(19) United States
(12) Patent Application Publication
(10) Pub. No.: US 2021/0340625 A1
(43) Pub. Date: Nov. 4, 2021

(54) tRNA-DERIVED FRAGMENTS AS BIOMARKERS FOR PARKINSON'S DISEASE

(71) Applicant: THOMAS JEFFERSON UNIVERSITY, Philadelphia, PA (US)

(72) Inventors: Isidore Rigoutsos, Daejeon, NY (US); Rogan MAGEE, Philadelphia, PA (US); Eric LONDIN, Philadelphia, PA (US)

(21) Appl. No.: 17/283,941

(22) PCT Filed: Oct. 10, 2019
(86) PCT No.: PCT/US2019/055648

§ 371 Date: Apr. 8, 2021

Related U.S. Application Data
(60) Provisional application No. 62/744,009, filed on Oct. 10, 2018.

(51) Int. Cl. C12Q 1/6883

(52) U.S. Cl. CPC C12Q 1/6883; C12Q 2600/158

(57) ABSTRACT

The present invention includes a method for analyzing tRNA-derived fragments. In one aspect, the present invention includes a method of identifying a subject in need of therapeutic intervention to treat a disease or condition, disease recurrence, or disease progression comprising characterizing the identity of tRNA fragments. The invention also includes diagnosing, identifying or monitoring a disease or condition, and a method for identifying tRNA fragments. The invention also includes diagnosing, identifying or monitoring Parkinson's disease in a subject in need thereof by characterizing the identity of tRNA fragments.

### CROSS-REFERENCE TO RELATED APPLICATIONS

[0001] This application claims priority under 35 U.S.C. § 119(e) to U.S. Provisional Patent Application No. 62/744,009, filed Oct. 10, 2018, which application is incorporated herein by reference in its entirety.

### BACKGROUND OF THE INVENTION

[0002] Transfer RNA (tRNA) molecules serve as a physical link between the snRNA and the amino acid sequence of proteins. The tRNA carries an amino acid to the protein synthetic machinery of a cell (ribosome) as directed by a 3-nucleotide sequence (codon) in a messenger RNA (mRNA), thereby serving as necessary components of translation, the biological synthesis of new proteins in accordance with the genetic code.

[0003] tRNA halves (tRHs) are produced in response to cellular stress and represent the first reported category of tRNA-derived fragments (CRFs). There are two variants of tRHs: 5′-tRNA halves (5′-tRH) and 3′-tRNA halves (3′-tRH). The endonuclease Angiogenin (ANG) has been shown to govern the production of tRHs from mature tRNAs, in several species and contexts. Subsequent work revealed two more categories that overlap the mature tRNA: the 5′-tRFs, whose 5′ termini are the 5′ ends of the mature tRNA, and the 3′-CRFs, whose 3′ termini are the 3′ end of the mature tRNA. Another category of tRFs are known as “internal tRFs” (i-tRFs); i-tRFs can begin and end anywhere along the mature tRNA sequence.

[0004] Functionally, tRFs have been linked to a variety of specific regulatory roles. Some tRFs act through miRNA pathway mechanisms, whereas other directly interact with cellular proteins such as cytochrome C. tRFs can also act as decoys for RNA-binding proteins, resulting in stabilization of oncogenic transcripts. Yet other tRFs directly interfere with translation, or disrupt formation of the multi-synthetase complex or ribosome biogenesis. tRFs have also been shown to control retrotransposon and reverse transcriptase activity in animals and plants.

[0005] Despite all the previously-reported links of different tRFs to different contexts there still exists an unmet need in the art to identify, characterize, quantify and ascertain the role of tRFs in diseased and healthy cells, as well as leverage information about these links for diagnosis and treatment. This invention contributes to the efforts to address these needs.

### BRIEF SUMMARY OF THE INVENTION

[0006] In one aspect, the invention provides a method of identifying a subject in need of therapeutic intervention to treat a disease, condition, disease recurrence, or disease progression. In certain embodiments, the method comprises isolating fragments derived from tRNAs (tRFs) from a sample obtained from the subject; and characterizing the tRFs and their relative abundance in the sample to identify a signature, wherein when the signature is indicative of a diagnosis of the disease, a treatment of the subject is recommended.

[0007] In another aspect, the invention comprises a method of diagnosing, identifying or monitoring Parkinson's Disease (PD) in a subject in need thereof. In certain embodiments, the method comprises isolating tRFs from a cell obtained from the subject, quantifying the tRFs using a panel of oligonucleotides engineered to detect tRFs, or another method; analyzing levels of the tRFs present in the cell; wherein a differential in the level of measured tRFs as compared to a reference is indicative of a diagnosis or identification of PD in the subject; and providing a treatment regimen to the subject dependent on the differential in the level of measured tRFs as compared to the reference.

[0008] In yet another aspect, the invention comprises a method of identifying a subject at risk for developing Parkinson's Disease (PD) or in need of therapeutic intervention to treat Parkinson's disease (PD). The method comprises steps of isolating fragments of tRFs from a sample obtained from the subject; quantifying the tRFs using a panel of oligonucleotides engineered to detect tRFs, or another method; and characterizing the tRFs and their relative abundance in the sample to identify a signature, wherein when the signature is indicative of a prognosis for developing PD or a diagnosis for a PD, a treatment of the subject is recommended.

[0009] In yet another aspect, the invention provides a kit for high-throughput analysis of tRFs fragments in a sample from a subject in need thereof, the kit comprising a collection of specially-designed qPCR assays for quantitating tRFs, or a panel of engineered oligonucleotides capable of hybridizing tRFs, or another quantification method.

[0010] In certain embodiments, the tRFs are selected from the group consisting of 3′-tRFs, 3′-tRFs, 5′-tRFs, and i-tRFs from a mitochondrion (MT). In certain embodiments, the tRFs are selected from the group consisting of 3′-tRFs, 3′-tRHs, 5′-tRFs, 5′-tRHs, and i-tRFs a nucleus (Nuc).

[0011] In certain embodiments, the sample is isolated from a cell, a tissue, an extracellular vesicle, or a body fluid obtained from the subject. In certain embodiments, the body fluid, the extracellular vesicle, the tissue or the cell is selected from the group consisting of bile, blood serum, plasma, cerebrospinal fluid, and prefrontal cortex.

[0012] In certain embodiments, isolating the tRFs comprises isolating tRFs fragments with a length in the range of about 10 nucleotides to about 70 nucleotides. In certain embodiments, the signature comprises at least one sequence selected from the group consisting of SEQ ID NO: 53135-SEQ ID NO: 63850.

[0013] In certain embodiments, the tRFs and their relative abundance vary between the normal state as compared to disease state or condition. In certain embodiments, the tRFs and their relative abundance vary depending on sex of the subject. in certain embodiments, the disease or condition, disease recurrence, or disease progression is a brain disease. In certain embodiments, the brain disease is genetically predisposed. In certain embodiments, the brain disease is Parkinson's Disease.

[0014] In certain embodiments, characterizing the tRFs comprises at least one assessment selected from the group consisting of sequencing tRFs, measuring overall abundance of a tRF mapped to the genome, measuring a relative abundance of a tRF to a reference, assessing a length of a tRF, identifying starting and ending points of a tRF, identifying genomic origin of a tRF, and identifying a terminal modification of a tRF.

[0015] In certain embodiments, the tRFs and their relative abundance vary between the normal state subject as compared to a subject at a risk of or suffering from PD. In certain embodiments, the tRFs and their relative abundance compared to control subjects differ between subjects suffering from PD with dementia and subjects suffering from PD without dementia.

[0016] In certain embodiments, the tRFs and their relative abundance vary with the body fluid, extracellular vesicle, cell or tissue sample. In certain embodiments, the tRFs and their relative abundance vary in the prefrontal cortex samples from the normal state subjects, the subjects suffering from PD with dementia, and the subjects suffering from PD without dementia.

[0017] In certain embodiments, the tRFs and their relative abundance vary in the cerebrospinal fluid samples from the normal state subjects, the subjects suffering from PD with dementia, and the subjects suffering from PD without dementia.

[0018] In certain embodiments, the tRFs and their relative abundance vary in the serum samples from the normal state subjects, the subjects suffering from PD with dementia, and the subjects suffering from PD without dementia.

[0019] In certain embodiments, the subject is a human,

### BRIEF DESCRIPTION OF THE DRAWINGS

[0020] The following detailed description of preferred embodiments of the invention will be better understood when read in conjunction with the appended drawings. For the purpose of illustrating the invention, there are examples shown in the drawings embodiments of which are presently preferred. It should be understood, however, that the invention is not limited to the precise arrangements and instrumentalities of the embodiments shown in the drawings.

[0021] FIGS. 1A-1F: tRFs identified in PFC, CSF and serum samples. The MINTmap and Threshold-sect algorithms were used to identify the set of tRFs recovered from all PFC samples, all CSF samples, and all SER samples. (FIG. 1A) The Venn diagram describes the overlap of tRFs discovered in these three collections. (FIG. 1B) The overlap shown in (FIG. 1A) was recomputed after filtering out any tRFs that are contained in the most recent Release 2.0 of MINTbase. Use oft tests allowed the identification of tRFs that are differentially abundant (DA) between control and Parkinson's disease samples in PFC (prefrontal cortex), CSF (cerebrospinal fluid), and SER (serum) samples. DA tRFs are those with a difference in means per a t test with p-value≤0.05. The shown Venn diagrams capture the overlap between tRFs identified in each context (FIGS. 1C-1F). Each panel describes the overlap of DA tRFs when splitting samples by patient sex (male or female) and sample tissue type (PFC, CSF, or SER), as indicated. Green circles represent PFC samples. Gold circles represent CSF samples. Red circles represent SER. samples.

[0022] FIGS. 2A-2F: DA tRFs in PFC, CSF, and SER samples. The DA tRFs were identified as described herein. The results showing fold changes and p-values, in combination with a breakdown by tRF type were plotted. Specifically, the logₑ fold change (PD:control) for each DA tRF in each sample set were plotted. Each group of dots shows the distribution of fold changes across samples for tRFs of the respective category (MT 3′-tRF, Nuc 3′-tRF, etc.). Dots of a given group are shifted to the right of the interval's left boundary according to their p-value: the lower the p-value the higher the shift to the right. As FIG. 2F indicates, each shown interval spans the values 0 through 5 (in -log₁₀). The results were plotted for PFC male comparisons (FIG. 2A), CSF female comparisons (FIG. 2B), CSF male comparisons (FIG. 2C), SER. female comparisons (FIG. 2D), and SER male comparisons (FIG. 2E). Green circles represent PFC samples. Gold circles represent CSF samples. Red circles represent SER samples. As can be seen, many tRFs exhibit considerable fold changes that are also statistically-significant.

[0023] FIGS. 3A-3D: tRF characteristics among PFC, CSF, and serum samples. A distribution of the probability that a IRF was expressed in any of X % of the samples in each collection was plotted, Specifically, FIG. 3A and. FIG. 39 show what percentage of identified tRFs (y-axis) is identified in each relative percentage of samples from each collection (x-axis). Green lines show PFC samples (FIG. 3A); gold lines show CSF samples (FIG. 3A-B); and, red lines show SER samples (FIG. 3A-9). FIG. 3C and FIG. 3D describe the identified DA tRFs previously shown in FIG. 2. Specifically, the number of DA tRFs identified for each of the ten tRF types (y-axis) vs. the percentage of the tRFs of each type that were originally identified in the sample group is plotted. Circle areas are sized according to the relative percentage of the total DA tRFs that came from each of the ten tRF types. These results were plotted separately for male (FIG. 3C) and female (FIG. 3D) samples. Green circles represent PFC samples. Gold circles represent CSF samples. Red circles represent SER samples.

[0024] FIGS. 4A-4F: tRFs in PFC, CSF, and SER samples that are differentially abundant between CNTRL (Control), PND (Parkinson's Disease without dementia), and PDD (Parkinson's Disease with dementia). t-tests were used to identify the DA tRFs, focusing only on the tRFs in {PFC∪CSF∪SER}—{MINTbase}. These analyses were carried out separately for PFC, CSF, and SER. The Venn diagrams describe the overlap between DA tRFs identified in each context (FIGS. 4A-4E) with those originally identified in FIGS. 1C-1F. Each panel describes the overlap of DA tRFs when splitting samples by patient sex, and by collection (PFC, CSF, or SER). Specifically, sample groups are plotted as follows: PFC male (FIG. 4A), CSF female (FIG. 4B), CSF male (FIG. 4C), SER female (FIG. 4D), and. SER male (FIG. 4E). FIG. 4F shows the complement of DA tRFs in PND vs. PDD comparisons. Specifically, retained and plotted are the intersections of DA tRFs that are not in {MINTbase} and also not part of the set of DA tRFs from CNTRL vs. PD, CNTRL vs. PND, or CNTRL vs. PDD comparisons. Green circles represent PFC samples. Gold circles represent CSF samples. Red circles represent SER samples.

[0025] FIGS. 5A-5D: Sample quality filtering based on identified tRF reads. The results of sample quality filtering for CSF (FIGS. 5A and 5C) and. SER (FIGS. 5B and 5D). Specifically, FIGS. 5A and 5B represent the log₂ number of reads passing adapter trimming and quality control (y-axis) vs. the number of reads were mapped to tRFs. FIGS. 5C and 5D show the mean reads mapping to each unique tRF in each sample (y-axis) vs. the log₂ number of reads passing adapter trimming and quality control. Gold circles represent CSF samples, while red circles represent SER samples. Grey rectangles mask samples that contain fewer than 100,000 tRNA space reads and have been excluded from analyses.

[0026] FIGS. 6A-6F: tRF profiles by structural type. tRFs derived from either the nuclear or the mitochondrial genome are annotated based on which one of five structural categories they belong. The sum RPM of tRFs belonging to each of the ten possible sets (five structural categories for nuclear and five structural categories for mitochondrial tRFs) as a percentage of the total RPM in each sample are calculated, and the mean and S.E.M. are plotted for PFC (FIG. 6A), CSF (FIG. 6B), and SER (FIG. 6C). FIGS. 6D-6F: the mean and S.E.M on a log₂ scale. S.E.M. is propagated to log₂ per the formula: log₂ es_{x̅}/x̅. RPM for any particular tRF of any of the ten tRF types. Green bars represent PFC PD samples, orange bars represent CSF PD samples, and red bars represent SER PD samples. Grey bars represent controls for each of PFC, CSF, and SER.

[0027] FIGS. 7A-7F: IRF profiles by length. In these datasets, tRFs can exist as mature short RNAs with lengths ranging from 16 to 48 nt. The sum RPM of tRFs for all tRFs of a particular length as a percentage of the total RPM in each sample is calculated, and then the mean and S.E.M. for nuclear tRFs only from PFC (FIG. 7A), CSF (FIG. 7B), and SER (FIG. 7C) samples, and for mitochondrial tRFs only for PFC (FIG. 7D), CSF (FIG. 7E), and SER (FIG. 7F) were plotted. Green bars represent PFC PD samples, orange bars represent CSF PD samples, and red bars represent SER PD samples. Grey bars represent controls for each of PFC, CSF, and SER.

### DETAILED DESCRIPTION OF THE INVENTION

[0028] Definitions

Unless defined otherwise, all technical and scientific terms used herein have the same meaning as commonly understood by one of ordinary skill in the art to which the invention pertains. Although any methods and materials similar or equivalent to those described herein may be used in the practice for testing of the present invention, the preferred materials and methods are described herein. In describing and claiming the present invention, the following terminology will be used. it is also to be understood that the terminology used herein is for the purpose of describing particular embodiments only, and is not intended to be limiting.

[0029] As used herein, the articles “a” and “an” are used to refer to one or to more than one .e., to at least one) of the grammatical object of the article. By way of example, “an element” means one element or more than one element.

[0030] As used herein when referring to a measurable value such as an amount, a temporal duration, and the like_{;} the term “about” is meant to encompass variations of +20% or within 10%, 9%, 8%, 7%, 6%, 5%, 4%, 3%, 2%, 1%, 0.5%, 0.1%, 0.05%, or 0.01% of the specified value, as such variations are appropriate to perform the disclosed methods. Unless otherwise clear from context, all numerical values provided herein are modified by the term about.

[0031] “About” as used herein when referring to a measurable value such as an amount, a temporal duration, and the like, is meant to encompass variations of ±20% or ±10%, more preferably +5%, even more preferably ±1%, and still more preferably ±0.1% from the specified value, as such variations are appropriate to perform the disclosed methods.

[0032] By “alteration” is meant a change (increase or decrease) in the expression levels or activity of a gene or polypeptide as detected by standard art known methods such as those described herein. As used herein, an alteration includes a 10% change in expression levels, preferably a 25% change, more preferably a 40% change, and most preferably a. 50% or greater change in expression levels.

[0033] By “complementary sequence” or “complement” is meant a nucleic acid base sequence that can form a double-stranded structure by matching base pairs to another polynucleotide sequence. Base pairing occurs through the formation of hydrogen bonds, which may be Watson-Crick, wobble, Hoogsteen or reversed Hoogsteen hydrogen bonding, between complementary nucleobases. For example, adenine and thymine are complementary nucleobases that pair through the formation of hydrogen bonds. In this disclosure, “comprises,” “comprising,” “containing” and “having” and the like can have the meaning ascribed to them in U.S. Patent law and can mean “includes,” “including,” and the like; “consisting essentially of” or “consists essentially” likewise has the meaning ascribed in U.S. Patent law and the term is open-ended, allowing for the presence of more than that which is recited so long as basic or novel characteristics of that which is recited is not changed by the presence of more than that which is recited, but excludes prior art embodiments.

[0034] “Detect” refers to identifying the presence, absence or amount of the biomarker to be detected.

[0035] The phrase “differentially abundant” refers to differences in the quantity and/or the frequency of a biomarker present in a sample taken from subjects having a disease, or condition, as compared to a control subject. A biomarker can be differentially present in terms of quantity, frequency or both. A polypeptide or polynucleotide is differentially present between two samples if the amount or frequency of the polypeptide or polynucleotide in one sample is statistically significantly different (either higher or lower) from the amount of the polypeptide or polynucleotide in the other sample, such as reference or control samples. Alternatively or additionally, a polypeptide or polynucleotide is differentially present between two sets of samples if the amount or frequency of the polypeptide or polynucleotide in samples of the first set, such as diseased subjects' samples, is statistically significantly (either higher or lower) from the amount of the polypeptide or polynucleotide in samples of the second set, such as reference or control samples. A biomarker that is present in one sample, but undetectable in another sample is differentially present.

[0036] A “disease” is a state of health of an animal wherein the animal cannot maintain homeostasis, and wherein if the disease is not ameliorated then the animal's health continues to deteriorate. A “disease subtype” is a state of health of an animal wherein animals with the disease manifest different clinical features or symptoms. For example, Alzheimer's disease includes at least three subtypes, inflammatory, non-inflammatory, and cortical.

[0037] A “disorder” as used herein, is used interchangeably with “condition,” and refers to a state of health in an animal, wherein the animal is able to maintain homeostasis, but in which the animal's state of health is less favorable than it would be in the absence of the disorder. Left untreated, a disorder does not necessarily cause a further decrease in the animal's state of health.

[0038] By “effective amount” is meant the amount required to reduce or improve at least one symptom of a disease relative to an untreated patient. The effective amount of active compound(s) used to practice the present invention for therapeutic treatment of a disease varies depending upon the manner of administration, the age, body weight, and general health of the subject.

[0039] As used herein “endogenous” refers to any material from or produced inside an organism, cell, tissue or system.

[0040] The term “expression” as used herein is defined as the transcription and/or translation of a particular nucleotide sequence driven by its promoter.

[0041] By “fragment” is meant a portion of a polynucleotide or nucleic acid molecule. This portion contains, preferably, at least 10%, 20%, 30%, 40%, 50%, 60%, 70%, 80%, 90%, 91%, 92%, 93%, 94%, 95%, 96%, 97%, 98%, or 99% of the entire length of the reference nucleic acids. A fragment may contain 10, 20, 30, 40, 50, 60, 70, 80, 90, or 100, 200, 300, 400, 500, 600, 700, 800, 900, 1000, 1500, 2000 or 2500 (and any integer value in between) nucleotides. The fragment, as applied to a nucleic acid molecule, refers to a subsequence of a larger nucleic acid. The fragment can be an autonomous and functional molecule. A fragment may contain modifications at neither, one, or both of its termini. A modification can include but is not limited to a phosphate, a cyclic phosphate, a hydroxyl, and an amino acid. A “fragment” of a nucleic acid molecule may be at least about 10 nucleotides in length; for example, at least about 50 nucleotides to about 100 nucleotides; at least about 100 to about 500 nucleotides, at least about 500 to about 1000 nucleotides, at least about 1000 nucleotides to about 1500 nucleotides; or about 1500 nucleotides to about 2500 nucleotides; or about 2500 nucleotides (and any integer value in between).

[0042] “Similar” refers to the sequence similarity or sequence identity between two polypeptides or between two nucleic acid molecules. When a position in both of the two compared sequences is occupied by the same base or amino acid monomer subunit, e.g., if a position in each of two DNA molecules is occupied by adenine, then the molecules are similar at that position. The percent of similarity between two sequences is a function of the number of matching or similar positions shared by the two sequences divided by the number of positions compared X 100. For example, if 6 of 10 of the positions in two sequences are matched or similar then the two sequences are 60% similar. By way of example, the DNA sequences ATTGCC and TATGGC share 50% similarity. Generally, a comparison is made when two sequences are aligned in a way that maximizes their similarity.

[0043] “Instructional material,” as that term is used herein, includes a publication, a recording, a diagram, or any other medium of expression that may be used to communicate the usefulness of the compounds of the invention. In some instances, the instructional material may be part of a kit useful for effecting alleviating or treating the various diseases or conditions recited herein. Optionally, or alternately, the instructional material may describe one or more methods of alleviating the diseases or conditions in a cell or a tissue of a mammal. The instructional material of the kit may, for example, be affixed to a container that contains the compounds of the invention or be shipped together with a container that contains the compounds. Alternatively, the instructional material may be shipped separately from the container with the intention that the recipient uses the instructional material and the compound cooperatively. For example, the instructional material is for use of a kit; instructions for use of the compound; or instructions for use of a formulation of the compound. “Isolated” means altered or removed from the natural state. For example, a nucleic acid or a peptide naturally present in a living animal is not “isolated,” but the same nucleic acid or peptide partially or completely separated from the coexisting materials of its natural state is “isolated.” An isolated nucleic acid or protein can exist in substantially purified form, or can exist in a non-native environment such as, for example, a host cell. The term “tRF” stands for tRNA-derived fragment, The term is used to refer to non-coding RNAs that are generated from a tRNA locus and are typically shorter than the locus' corresponding tRNA product. tRFs have typical lengths that range from 10 to 50, and possibly more, nucleotides. For generality, in this discussion, we use the term “tRF” to refer to a fragment that could be derived from the corresponding “precursor tRNA” molecule and either contain a post-transcriptionally added modification (e.g. “CCA”, a “−1” nucleotide as e.g. in the case of tRNAi^{HisGTG}, etc.) or not. As such, the term “tRF” could also refer to the entire “mature tRNA” (typical length of 75 nucleotides), or the entire mature tRNA without the CCA addition (typical length 72 nucleotides).

[0044] Generally speaking, the term “mitochondrial tRFs” is used to refer to tRNA fragments whose parental tRNA is located in the mitochondrial genome. Exceptions include: a) several tRNAs of mitochondrial origin that were recently found to be present in the nuclear genome; b) several sequences in the nuclear genome that were recently found to be similar to tRNAs of mitochondrial origin. The term “nuclear tRFs” is used to refer to tRNA fragments whose parental tRNA is located in the nuclear genome.

[0045] Unless otherwise specified, a “nucleotide sequence encoding an amino acid sequence” includes all nucleotide sequences that are degenerate versions of each other and that encode the same amino acid sequence. The phrase nucleotide sequence that encodes a protein or an RNA may also include introns to the extent that the nucleotide sequence encoding the protein may in some version contain an intron(s).

[0046] By “isolated polynucleotide” is meant a nucleic acid molecule (e.g., a DNA or an RNA) that is free of the nucleic acid sequences which flank it in the naturally-occurring genome of the organism from which the nucleic acid molecule of the invention is derived. The term therefore includes, for example, a recombinant DNA that is incorporated into a vector; into an autonomously replicating plasmid or virus; or into the genomic DNA of a prokaryote or eukaryote; or that exists as a separate molecule (for example, a tRF, cDNA or a genomic or cDNA fragment produced by PCR or restriction endonuclease digestion) independent of other sequences. In addition, the term includes an RNA molecule that is transcribed from a DNA molecule, as well as a recombinant DNA that is part of a hybrid gene encoding additional polypeptide sequence.

[0047] The term “oligonucleotide panel” or “panel of oligonucleotides” refers to a collection of one or more oligonucleotides that may be used to identify DNA (e.g. genomic segments comprising a specific sequence, DNA sequences bound by particular protein, etc.) or RNA (e.g. mRNAs, microRNAs, tRNAs etc.) or fragments thereof through hybridization of complementary regions between the oligonucleotides and the DNA or RNA. If the sought molecule is RNA, it is commonly converted to DNA through a reverse transcription step). The oligonucleotides may include complementary sequences to known DNA or known RNA sequences, The oligonucleotides may be engineered to be between about 5 nucleotides to about 40 nucleotides, or about 5 nucleotides to about 30 nucleotides, or about 5 nucleotides to about 20 nucleotides, or about 5 nucleotides to about 15 nucleotides in length. The term “oligonucleotide panel” or “panel of oligonucleotides” could also refer to a system and accompanying collection of reagents that, in addition to being able to hybridize to molecules containing a complementary sequence, can also ensure that the identified molecule's 3′ terminus matches precisely the 3′ terminus of the sought molecule, or that the identified molecule's 5′ terminus matches precisely the 5′ terminus of the sought molecule, or both: this ability is unlike what can be achieved by conventional assays such as e.g. Affymetrix chips and methods (e.g. “dumbbell-PCR”) and systems (e.g. the Fireplex system of Firefly BioWorks) that can achieve this are now beginning to be available.

[0048] The term “operably linked” refers to functional linkage between a regulatory sequence and a heterologous nucleic acid sequence resulting in expression or changes in abundance of the latter. For example, a first nucleic acid sequence is operably linked with a second nucleic acid sequence when the first nucleic acid sequence is placed in a functional relationship with the second nucleic acid sequence. For instance, a promoter is operably linked to a coding sequence if the promoter affects the transcription or expression of the coding sequence.

[0049] The terms “patient,” “subject,” “individual,” and the like are used interchangeably herein, and refer to a human or non-human mammal, or cells thereof whether in vitro or in situ, amenable to the methods described herein. Non-human mammals include, for example, livestock and pets, such as ovine, bovine, porcine, canine, feline and murine mammals. The term “subject” is intended to include living organisms in which an immune response can be elicited (e.g., mammals). Examples of subjects include humans, dogs, cats, mice, rats, and transgenic species thereof. In certain non-limiting embodiments, the patient, subject or individual is a human.

[0050] The term “polynucleotide” as used herein is defined as a chain of nucleotides. Furthermore, nucleic acids are polymers of nucleotides. Thus, nucleic acids and polynucleotides as used herein are interchangeable. One skilled in the art has the general knowledge that nucleic acids are polynucleotides, which may be hydrolyzed into the constituent monomeric “nucleotides.” The monomeric nucleotides may be hydrolyzed into nucleosides. As used herein polynucleotides include, but are not limited to, all nucleic acid sequences that are obtained by any means available in the art, including, without limitation, recombinant means, i.e., the cloning of nucleic acid sequences from a recombinant library or a cell genome, using ordinary cloning technology and PCR™, and the like, and by synthetic means. The following abbreviations for the commonly occurring nucleic acid bases are used. “A” refers to adenosine, “C” refers to cytosine, “G” refers to guanosine, “T” refers to thymidine, and “U” refers to uridine. The term “RNA” as used herein is defined as ribonucleic acid. The term “recombinant DNA” as used herein is defined as DNA produced by joining pieces of DNA from different sources.

[0051] As used herein, the terms “prevent,” “preventing,” “prevention,” and the like refer to reducing the probability of developing a disease or condition in a subject, who does not have, but is at risk of or susceptible to developing a disease or condition.

[0052] As used herein, the term “promoter/regulatory sequence” means a nucleic acid sequence which is required for expression of a gene product operably linked to the promoter/regulatory sequence. In some instances, this sequence may be the core promoter sequence and in other instances, this sequence may also include an enhancer sequence and other regulatory elements which are required for expression of the gene product. The promoter/regulatory sequence may, for example, be one which expresses the gene product in a tissue specific manner.

[0053] The terms “purified,” or “biologically pure” refer to material that is free to varying degrees from components which normally accompany it as found in its native state. “Purify” denotes a degree of separation that is higher than isolation. A “purified” or “biologically pure” protein is sufficiently free of other materials such that any impurities do not materially affect the biological properties of the protein or cause other adverse consequences. That is, a nucleic acid or peptide of this invention is purified if it is substantially free of cellular material, viral material, or culture medium when produced by recombinant DNA techniques, or chemical precursors or other chemicals when chemically synthesized. Purity and homogeneity are typically determined using analytical chemistry techniques, for example, polyacrylamide gel electrophoresis or high-performance liquid chromatography. The term “purified” can denote that a nucleic acid or protein gives rise to essentially one band in an electrophoretic gel. For a protein that can be subjected to modifications, for example, phosphorylation or glycosylation, different modifications may give rise to different isolated proteins, which can be separately purified. By “reduces” or “decreases” is meant a negative alteration of at least 10%, 25%, 50%, 75%, or 100%.

[0054] By “reference” is meant a standard or control. A “reference” is also a defined standard or control used as a basis for comparison.

[0055] As used herein, “relative abundance” refers to the ratio of the quantities of two or more molecules of interest (e.g. tRFs) present in a sample. The relative abundance of two or more molecules of interest in a given sample may differ from the relative abundance of the same two or more molecules in a second sample.

[0056] As used herein, “sample” or “biological sample” refers to anything, which may contain the biomarker (e.g., polypeptide, polynucleotide, or fragment thereof) for which a biomarker assay is desired. The sample may be a biological sample, such as a biological fluid or a biological tissue or an isolated cell or a collection of isolated cells or an isolated extracellular vesicle or collection of extracellular vesicles. In one embodiment, a biological sample is a tissue from prefrontal cortex. Examples of biological fluids include cerebrospinal fluid, urine, blood, plasma, serum, saliva, semen, stool, sputum, cerebral spinal fluid, tears, mucus, amniotic fluid or the like.

[0057] As used herein, the term “sensitivity” is indicates a percentage of biomarker-detected subjects with a particular disease. For example, in a specific assay to detect a percentage of disease-affected subjects in a particular population, the higher detectability of percentage of biomarkers (such as, for example tRFs) related to the diseases being detected corresponds to the higher sensitivity index of that assay.

[0058] The terms “short RNA profile” or “RNA profile” or “IRF profile” or “IRF profile” or “tRNA profile” or “tRNA fragment profile” are used interchangeably and refer to a genetic makeup of RNA molecules that are present in a sample, such as a cell, tissue, or subject. Optionally, the abundance of an RNA molecule that is part of an RNA profile may also be sought. Optionally, other attributes of an RNA molecule that is part of an RNA profile may also be sought and include but are not limited to a molecule's location within the genomic locus of origin, the molecule's starting point, the molecule's ending point, the molecule's length, the identity of the molecule's terminal modifications. etc.

[0059] The term “signature” or “tRF signature” as used herein refers to a subset of an RNA profile and comprises the identity of one or more molecules that are selected from an RNA profile and optionally one or more of the attributes of the one or more molecules that are selected from the RNA profile.

[0060] By “substantially identical” is meant a polypeptide or nucleic acid molecule exhibiting at least 50% identity to a reference amino acid sequence (for example, any one of the amino acid sequences described herein) or nucleic acid sequence (for example, any one of the nucleic acid sequences described herein). Preferably, such a sequence is at least 60%, more preferably 80% or 85%, and more preferably 90%, 95% or even 99% identical at the amino acid level or nucleic acid to the sequence used for comparison.

[0061] The term “therapeutic” as used herein means a treatment and/or prophylaxis. A therapeutic effect is obtained by suppression, remission, or eradication of a disease state.

[0062] As used herein, the terms “treat,” treating,” “treatment,” and the like refer to reducing or improving a disease or condition and/or symptom associated therewith. It will be appreciated that, although not precluded, treating a disease or condition does not require that the disease, condition or symptoms associated therewith be completely ameliorated or eliminated.

[0063] Ranges provided herein are understood to be shorthand for all of the values within the range. For example, a range of 1 to 50 is understood to include any number, combination of numbers, or sub-range from the group consisting 1, 2, 3, 4, 5, 6, 7, 8, 9, 10, 11, 12, 13, 14, 15, 16, 17, 18, 19, 20, 21, 22, 23, 24, 25, 26, 27, 28, 29, 30, 31, 32, 33, 34, 35, 36, 37, 38, 39, 40, 41, 42, 43, 44, 45, 46, 47, 48, 49, or 50.

[0064] The recitation of an embodiment for a variable or aspect herein includes that embodiment as any single embodiment or in combination with any other embodiments or portions thereof.

[0065] Any compositions or methods provided herein can be combined with one or more of any of the other compositions and methods provided herein.

### Description

[0066] The present invention includes methods and compositions of analyzing tRFs. Described herein are tRFs that are important for disease diagnosis. The present invention utilizes tRF-profiling to identify subjects in need of therapeutic intervention. One or more of the tRFs that are important for disease diagnosis can also serve as therapeutic targets themselves.

[0067] In one aspect, the invention provides a method of identifying a subject in need of therapeutic intervention to treat a disease, disease progression, or disease recurrence. The method comprises isolating tRFs from a sample obtained from the subject; characterizing the fragments of tRFs and their relative abundance in the sample to identify a signature, Wherein when the signature is indicative of a diagnosis of the disease of a disease subtype or of a disease recurrence), a treatment of the subject is recommended or provided. It is generally the case that the mechanistic events that are promoted by the tRFs used to determine whether treatment is recommended or provided can be elucidated through additional work. Consequently, one or more of these tRFs can serve as novel therapeutic targets as well.

### tRF Fragments

[0068] Analysis of tRF profiles or signatures in one or more cells lead to the discovery of tRF signatures present in healthy cells or diseased cells. tRF signatures of one or more cells, or a tissue may be used to identify a diseased cell, disease progression, or disease recurrence in a subject. Thus, the subject may be identified as in need of therapeutic intervention to delay the onset of, reduce, improve, and/or treat a disease or condition, such as cancer, in a subject in need thereof. One or more of the tRFs that comprise these signatures can also serve as targets of novel therapeutic interventions.

[0069] In another aspect, the invention includes a method for identifying tRFs from sequenced reads, typically obtained through next generation sequencing approaches. Various sequencing methodologies and platforms are known in the art. The choice of a platform may be based on the user's and experiment's requirements. In some embodiments, the sequencing method is a high throughput next-generation method. Non-limiting examples of massively parallel signature sequencing platforms are Illumina sequencing by synthesis (Illumina, san Diego Calif.), 454 pyrosequencing (Roche Diagnostics, Indianapolis Ind.), SOLiD sequencing (Life Technologies, Carlsbad, Calif.), Ion Torrent semiconductor sequencing (Life Technologies, Carlsbad, Calif.), Heliscope single molecule sequencing (Helicon Biosciences, Cambridge, Mass.), and Single molecule real time (SMRT) sequencing (Pacific Biosciences, Menlo Park, Calif.).

[0070] In certain embodiments the invention comprises analyzing five different and previously-defined structural categories of tRFs that overlap the mature tRNA. Further, these analyses may distinguish among these tRFs based on whether they originate in nuclearly- or mitochondrially-encoded tRNAs. Thus, the analyses can comprise as many as 10 different groups: 3′-tRFs, 5′-tRHs, and i-tRFs from the mitochondrion (MT) and the nucleus (Nuc), respectively.

[0071] In certain embodiments the method for characterizing the tRNA fragments in this invention comprises at least one assessment selected from the group consisting of sequencing the tRFs, measuring overall abundance of one of the tRFs, measuring a relative abundance of the one tRF to a reference, assessing a length of the one tRF, identifying starting and ending points of the one tRF, identifying genomic origin of the one tRF, and identifying a terminal modification of the one tRF,

[0072] Diagnostics

[0073] Samples from subjects suffering from a disease or a condition have a specific tRF-profile in the cell or cells that are diseased, including cells from the subject suffering from the Parkinson's Disease (PD). One or more of these tRFs could enter circulation and be found in, for example, extracellular vesicles. In such an event, the profile of tRFs contained in isolated exosomes could prove equally powerful in helping identify the disease or condition as the cells of the ailing tissue. Moreover, the disease or condition could also affect the tRF profile of cells in other adjacent or distant tissues. In such an event, the tRF profile of cells from these adjacent or distant tissues could prove equally powerful in helping identity the disease or condition as the cells of the ailing tissue. It is noted that the disease or a condition can affect the composition and abundance of tRNAs, of tRFs, or both.

[0074] In one aspect, a method of diagnosing, identifying or monitoring a disease in the subject comprises isolating tRFs from a cell obtained from the subject; analyzing levels of the tRFs present in the cell; wherein a differential in the level of measured tRF's as compared to a reference is indicative of a diagnosis or identification of Parkinson's disease in the subject; and providing a treatment regimen to the subject dependent on the differential in the level of measured tRFs as compared to the reference.

[0075] Identifying the existence of a disease or condition by identifying a tRF profile associated with the disease or condition in a sample obtained from the subject allows recommending or offering the subject a personalized treatment. In one aspect, the invention includes a method of identifying a cell's tRF population to establish and treat the onset of a disease, or the state of the disease, or that disease has recurred in a subject in need thereof comprising isolating fragments of tRFs from a sample (e.g. a cell) obtained from the subject; characterizing the fragments of tRF, which can include assessing one or more of, overall abundance, relative abundance, length of the fragment, starting and ending points of the fragment, terminal modifications, etc., in the sample to identify a. signature, wherein the signature is indicative of the presence of the disease, of the state of the disease, or of disease recurrence; and providing a treatment regimen to the subject dependent on the sampled cell's profile of tRFs.

[0076] In certain embodiments, characterizing the tRFs and their relative abundance can identify subjects in need of treatment. In certain embodiments the tRFs and their relative abundance vary between the normal state subject as compared to a subject at risk of or suffering from PD. In certain embodiments, the tRFs and their relative abundance compared to control subjects differ between subjects suffering from PD with dementia and subjects suffering from PD without dementia. In certain embodiments, the tRFs and their relative abundance vary with the gender of the subject. In certain embodiments, the tRFs and their relative abundance vary with the body fluid, cell or tissue sample.

[0077] In certain embodiments, the relative abundance of the tRFs that are present in the RNA profile can identify subjects in need of treatment. In another approach, diagnostic methods are used to assess tRF profiles in a biological sample relative to a reference (e.g., tRF profile in a healthy cell or tissue or body fluid in a corresponding control sample). Examples of a body fluid and tissues may include, but are not limited to amniotic fluid, bile, blood serum, plasma, cerebrospinal fluid, plasma and prefrontal cortex.

[0078] In certain embodiments, the sample, such as a cell or tissue or body fluid is obtained from the subject. In another embodiment, the cell or tissue or body fluid is isolated from the sample. In another embodiment, the cell or tissue is isolated from a body fluid.

[0079] In certain embodiments, a signature of tRFs or a presence or absence of specific tRFs are indicative a diagnosis of a disease or condition. In some embodiments, the signature of tRFs distinguishes a normal state as compared to a disease state or a condition.

[0080] In some embodiments, the signature of tRF comprises at least one sequence selected from the group consisting of: SEQ ID NOs: 53135-63850. In some embodiments, the signature comprises at least one sequence among those listed in SEQ ID NOs; 1-53134 that are not contained in SEQ ID NOs: 53135-69512.

[0081] In some embodiments, the methods or assays described herein comprise analyzing the presence or absence or the signature of tRFs in a disease or condition, disease recurrence, or disease progression selected from the group consisting of a cancer, a brain disease, a glaucoma, or a genetically predisposed disease or condition.

[0082] In general, characterizing the tRFs of this invention identifies a signature that may be indicative of a diagnosis of a disease or condition, the onset of a disease or condition, or the recurrence of a disease or condition. Moreover, characterizing the tRFs of this invention identifies one or more molecules that can serve as therapeutic targets themselves.

[0083] The character of the tRFs in the sample may be compared with a reference, such as other tRFs present within the cell, a healthy cell or a diseased cell will yield a relative abundance of the tRFs to identify a signature. Alternatively, the abundance of two or more tRFs, two or more tRNAs, or at least one tRF and at least one tRNA may be compared to identify a signature. Alternatively, the signature may be established by comparing the locations of the two or more tRFs within the genomic loci of origin, the starting and ending points of the fragments, the lengths of the fragments, and any other feature of the fragments as compared to other tRFs within the same sample or another sample or reference to distinguish a diseased state or condition, a propensity to develop a disease or condition, and/or the absence of a disease or condition. The skilled artisan will appreciate that the diagnostic can be adjusted to increase the sensitivity or specificity of the assay. In general, any significant increase (e.g., at least about 10%, 15%, 30%, 50%, 60%, 75%, 80%, or 90%) in the level of a polynucleotide or polypeptide biomarker in the subject sample relative to a reference may be used to diagnose a diseased state, a. propensity to develop a disease or condition, and/or the absence of a disease or condition.

[0084] Accordingly, a tRF profile may be obtained from a sample from a subject and compared to a reference tRF or tRNA fragment profile obtained from a reference cell or tissue or body fluid, so that it is possible to classify the subject as belonging to or not belonging to the reference population. The association may take into account the presence or absence of one or more tRF or tRNA fragments in a test sample and the frequency of detection of the tRF or tRNA fragments in a test sample compared to a control. The association may take into account both of such factors to facilitate a diagnosis of a disease or condition. The association may take into account both of such factors to guide recommending or offering a treatment, In one embodiment, the reference is the identity and abundance level of the tRF or tRNA fragments present in a control sample, such as non-diseased cell, a cell obtained from a patient that does not have the disease or condition at issue or a propensity to develop such a disease or condition. In another embodiment, the reference is a baseline level of the tRF or tRNA fragment presence and abundance in a biologic sample derived from the patient prior to, during, or after treatment for the disease or condition. In yet another embodiment, the reference is a standardized curve.

### Methods of Use

[0085] In one aspect, the invention includes a method of identifying a subject in need of treatment. The method comprises isolating fragments of tR.Fs from a sample obtained from the subject; characterizing the identity of the tRFs and their relative abundance in the sample to identify a signature, wherein the signature differs depending on the sex of the subject; and recommending or providing a personalized treatment regimen or a disease prognosis to the subject. In some embodiments, the signature comprises at least one sequence selected from the group consisting of SEQ ID NOs: 53135-63850. In some embodiments, the signature comprises at least one sequence among those listed in SEQ ID NOs: 1-53134 that are not contained in 53135-69152.

[0086] In another aspect, the method described herein includes diagnosing, identifying or monitoring the onset or recurrence of a disease or condition, such as a PD, in a subject in need of therapeutic intervention. In one embodiment, the method includes isolating RNA from a cell, tissue or body fluid obtained from the subject; hybridizing the RNA to a panel of oligonucleotides engineered to detect tRFs; analyzing an identity and levels of the tRFs present in the cell; wherein a differential in the identity or measured tRFs' levels to the reference is indicative of a diagnosis or identification of a disease or condition, such as PD, in the subject; and providing a treatment regimen to the subject dependent on the differential in the identity and measured tRFs' levels to the reference.

[0087] The non-coding RNAs of interest (tRFs or tRNAs) may be isolated by a method known in the art or selected from the group consisting of size selection, amplification and sequencing.

[0088] In some embodiments, the size of the tRFs is in the range of about 10 nucleotides to about 70 nucleotides are isolated. The range of sizes may include, but are not limited to, from about 15 nucleotides to about 50 nucleotides, and from about 20 nucleotides to about 45 nucleotides. The size of the tRFs fragments may be about 10 nucleotides, 11, 12, 13, 14, 15, 16, 17, 18, 19, 20, 21, 22, 23, 24, 25, 26, 27, 28, 29, 30, 31, 32, 33, 34, 35, 36, 37, 38, 39, 40, 41, 42, 43, 44, 45, 46, 47, 48, 49, 50, 51, 52, 53, 54, 55, 56, 57, 58, 59, 60, 61, 62, 63, 64, 65, 66, 67, 68, 69 or about 70 nucleotides.

[0089] In one embodiment, the signature is obtained by hybridization to a single oligonucleotide, or to a panel of oligonucleotides, such as those that comprise at least two or more oligonucleotides that selectively hybridize to the tRFs. To prepare the sample for characterization, the tRFs may be amplified prior to the hybridization.

### Monitoring

[0090] Methods of monitoring subjects that are at risk of developing a disease or condition, or are at risk of disease or condition recurrence, or who are receiving therapeutic intervention to reduce, improve, or treat a symptom of the disease or condition, such as breast cancer, are also useful in determining whether to administer treatment and in managing treatment. Provided are methods where the tRFs are measured and characterized. In some cases, the tRFs are measured and characterized as part of a routine course of action. In other cases, the tRFs are measured and characterized before and again after subject management or treatment. In these cases, the methods are used to monitor the onset of a disease or condition, the recurrence of the disease or condition, the status of the disease or condition, or a propensity to develop such disease or condition, e.g., Parkinson's disease.

[0091] For example, characterization of tRFs or signatures can be used to monitor a subject's response to certain treatments. Such characterization can be used to monitor for the presence or absence of the disease or condition. The changes in the relative abundance or tRF signature delineated herein before treatment, during treatment, or following the conclusion of a treatment regimen may be indicative of the course of the disease or condition, progression of disease or condition, or response to treatment. In some embodiments, characterization of tRFs or signatures may be assessed at one or more time points (e.g., 2, 3, 4, 5). Analysis of the tRFs is made, for example, using a size selection, amplification, and sequencing, or other standard method to determine the tRF profile. If desired, the tRF profile is compared to a reference to determine if any alteration in the tRF profile is present. Such monitoring may be useful, for example, in assessing the efficacy of a particular treatment in a patient. Therapeutics that normalize the tRF profile are taken as particularly useful.

### Kits

[0092] Kits for diagnosing, identifying or monitoring a disease or condition, such as PD with or without dementia, are included. In one aspect, the invention includes a. panel of engineered oligonucleotides comprising a mixture of oligonucleotides that are about 5 to about 15 nucleotides (nts) in length and capable of hybridizing RNAs (e.g. tRFs, full-length tRNAs, etc.), wherein the RNAs and RNA fragments are less than about 70 nts in length. In another aspect, the invention includes a kit for high-throughput analysis of RNAs or RNA fragments in a sample comprising the panel of engineered oligonucleotides of this invention along with hybridization reagents and RNA isolation reagents. In another aspect, the invention includes a kit for high-throughput analysis of RNAs or RNA fragments in a sample comprising a set of specially designed TaqMan® assays aimed at measuring the abundance of molecules mentioned in this invention. Alternatively, the kit could include: a specially designed TaqMan® Gene Expression Assays, TaqMan® Low Density Array-micro fluidic cards: a set of end-point specific assays such as dumbbell-PCR; a set of miR-ID assays. Other kits with variations on the components and oligonucleotide panels may be used in the context of the present invention. For example, the panel of engineered oligonucleotides or specially-designed kit may be specific to a cell type, disease type, stage of disease, or other aspect that may differentiate RNA fragment signatures. The kits and oligonucleotide panel may also be used to identify agents that modulate disease, or progression of disease in in vitro or in vivo animal models for the disease. In some embodiments, the subject in need thereof is a human.

[0093] The practice of the present invention employs, unless otherwise indicated, conventional techniques of molecular biology (including recombinant techniques), microbiology, cell biology, biochemistry and immunology, which are well within the purview of the skilled artisan. Such techniques are explained fully in the literature, such as, “Molecular Cloning: A Laboratory Manual”, fourth edition (Sambrook, 2012); “Oligonucleotide Synthesis” (Gait, 1984); “Culture of Animal Cells” (Freshney, 2010); “Methods in Enzymology” “Handbook of Experimental Immunology” (Weir, 1997); “Gene Transfer Vectors for Mammalian Cells” (Miller and Calos, 1987); “Short Protocols in Molecular Biology” (Ausubel, 2002); “Polymerase Chain Reaction: Principles, Applications and Troubleshooting”, (Babar, 2011); “Current Protocols in Immunology” (Coligan, 2002). These techniques are applicable to the production of the polynucleotides and polypeptides of the invention, and, as such, may be considered in making and practicing the invention. Particularly useful techniques for particular embodiments will be discussed in the sections that follow.

[0094] It is to be understood that wherever values and ranges are provided herein, all values and ranges encompassed by these values and ranges, are meant to be encompassed within the scope of the present invention. Moreover, all values that fall within these ranges, as well as the upper or lower limits of a range of values, are also contemplated by the present application.

[0095] The following examples further illustrate aspects of the present invention. However, they are in no way a limitation of the teachings or disclosure of the present invention as set forth herein.

### EXAMPLES

[0096] The invention is further described in detail by reference to the following experimental examples. These examples are provided for purposes of illustration only, and are not intended to be limiting unless otherwise specified. Thus, the invention should in no way be construed as being limited to the following examples, but rather, should be construed to encompass any and all variations which become evident as a result of the teaching provided herein.

[0097] Without further description, it is believed that one of ordinary skill in the art can, using the preceding description and the following illustrative examples, make and utilize the compounds of the present invention and practice the claimed methods. The following working examples therefore, specifically point out the preferred embodiments of the present invention, and are not to be construed as limiting in any way the remainder of the disclosure, The Results of the experiments disclosed herein are now described.

### Materials and Methods

### Datasets

[0098] Short RNA-sequencing (RNA-seq) data were obtained from two independent collections. Prefrontal cortex (PFC) data (Brodmann's area nine) were obtained from NM GEO: the 29 PD samples are from series #GSE72962, (Hoss et al, Front Aging Neurosci 2016; 8: 36.) whereas the 33 control samples are from series #GSE64977 (Hoss et al., BMC Med Genomics 2015; 8: 10). The 67 PD CSF samples, 69 CSF controls, 61 PD SER samples, and 71 SER controls were obtained from dbGap, reference #phs000727. (Burgos et al., PLoS One 2014; 9(5): e94839)

### Preprocessing of Sequenced Reads and tRF Profiling

[0099] First, short RNA-seq samples were quality-trimmed and adapters removed using the cutadapt (v1.5) tool. The MINTmap pipeline was used to profile and quantify tRFs in these samples. MINTmap only uses exact matches and distinguishes between exclusive tRFs that can only be found inside “tRNA space” and ambiguous tRFs that exist both inside and outside of tRNA space, Next, the Threshold-seq algorithm was used to calculate an adaptive threshold for each short RNA-seq sample. All tRFs that exceeded this threshold entered the downstream analysis. Finally, for all tRFs in each sample that exceeded the Threshold-seq threshold, a normalized value of abundance in reads per million (RPM) was calculated.

### Sample Quality Control

[0100] Extracting RNA from biofluids can be challenging due to instability of miRNA profiles derived from CSF and SER samples. In these analyses, a positive correlation between the number of reads after cutadapt quality-trimming of the CSF and SER collections and the number of reads that are identified as tRFs was observed (FIGS. 5A-5B). The correlation appears to break down in those samples where fewer reads survive quality-filtering. Looking at the average numbers of reads that map to the tRNA space allowed to determine the minimum number of trimmed reads needed to identify all unique tRFs: this appears to be achieved in samples where ≥100,000 reads map to tRFs (FIG. 5C-5D). Importantly, this minimum required number of reads mapping to tRNA space allowed to confidently identify samples in which tRFs are either present at very low levels, or not expressed at all. 127 CSF samples and 65 SER samples satisfied the requirement that ≥100,000 reads map to tRNA space.

### Sequence Batch Correction

[0101] The PFC samples that were analyzed were originally sequenced in three batches (SEQ ID NOs: 1-53134). To correct for batch effects, the RPM expression data was processed using the ComBat algorithm from Bioconductor (release 3.6). Combat-processed reads were used for all downstream analysis.

### Statistical Analyses

[0102] All analyses were run R version 3.3.0. Two-tailed t tests were used to identify differentially-abundant tRFs, retaining those which showed a significant difference in mean across sample categories (p-value≤0.05). To construct classifier models, the rpart package was used for regression trees, and the DiscriMiner package for Partial Least Squares—Discriminant Analysis (PLSDA). These two methods were chosen for their opposing qualities: RPART regression trees seek to define a step-by-step classification method that separates defined sample groups using “yes”/“no” decisions on quantitative data; PLSDA transforms collective observations about samples so that they most readily discriminate defined sample groups.

[0103] Monte Carlo simulations were used to evaluate the performance of these models. For each sample group, the datasets were randomly split into a training set comprised of 60% of the control and 60% of the disease samples, and a test set comprising the remaining 40% of control and disease samples. Using the training set, a classifier was built and used to determine the status of each sample in the test set. To adequately measure model performance, this was iterated over random sampling a total of N² times, where N is the sum total of the disease and control samples. To compute sensitivity and specificity, the total number of true positive, true negative, false positive, and false negative calls were tallied and made in each of the N² iterations.

[0104] Datasets corresponding to samples from prefrontal cortex (PFC), cerebrospinal fluid (CSF), and serum(SER) were obtained from NIH's GEO and dbGap. The datasets were subjected to the quality filtering described elsewhere, herein. After filtering, 62 PFC, 127 CSF, and 65 SER samples were further analyzed. All of the PFC samples were obtained from male patients. The clinical characteristics of these patients are listed in Table 1.

TABLE 1

| CLINICAL | | | |
|---|---|---|---|
| CHARACTERISTICS | PFC | CSF | SER |
| Control Samples | 33 | 64 | 31 |
| PD Samples | 29 | 63 | 34 |
| PD with Dementia | 11 | 24 | 12 |
| PD without Dementia | 18 | 39 | 22 |
| Male - Control | 33 | 37 | 15 |
| Male - PD | 29 | 37 | 23 |
| Female - Control | 0 | 27 | 16 |
| Female - PD | 0 | 26 | 11 |
| Age at Death | 72.5 ± 13.22 | 79.3 ± 8.6 | 80.9 ± 8.0 |
| (Mean ± SD) | | | |
| Motor Onset | 66.5 ± 9.8 | N/A | N/A |
| (Mean ± SD) | | | |

### Example 1

### The tRF Abundance Profiles Differ Among PFC, CSF and SER

[0105] By applying MINTmap and Threshold-seq on the datasets that survived the filtering, 31,196 tRFs in the PFC collection, 12,608 tRFs in the CSF collection, and 9,857 tRFs in the SER collection were identified. The corresponding tRF sequences are listed in SEQ ID NOs: 1-53134. Some tRFs appeared in two or more datasets. In total, there were 33,561 unique tRFs discovered across the three collections. In this work, “{PFC∪CSF∪SER}” is used to denote this set of unique tRFs. FIG. 1A shows how many tRFs are shared among the three collections. 58% of the tRFs in {PK∪CSF∪SER} are unique to the PFC samples.

[0106] As mentioned elsewhere herein, MINTmap distinguishes between tRFs that can arise exclusively from annotated tRNAs (“exclusive” tRFs) and “ambiguous” tRFs. The sequences of the latter exist in tRNA space as well as elsewhere on the genome. Of all PFC tRFs, 22,477 (72.05%) are exclusive. Similarly, 9,390 (74.47%) of all CSF tRFs are exclusive, as are 7,609 (77.19%) of all SER tRFs.

### Example 2

### All Five Structural Categories are Represented Among the Identified tRFs

[0107] The analyses herein focus on the five categories of tRFs that overlap the mature tRNA. The analyses distinguish among these tRFs based on whether they originate in nuclearly- or mitochondrially-encoded tRNAs. Thus, a total of 10 groups 3′-tRHs, 5′-tRFs, 5′-tRHs, and i-tRFs from the mitochondrion (MT) and the nucleus (Nuc), respectively, are considered.

[0108] First, relative abundances at the level of tRF categories are examined. FIGS. 6A-6C show that nuclear 5′-tRHs are most abundant in each of the three collections. In PFC, the majority of the remaining reads map to MT 3′-tRFs and nuclear i-tRFs. On the other hand, in both CSF and SER, most of the remaining reads map to nuclear 5′-tRFs, i-tRFs and 3′-tRFs.

[0109] However, this representation is skewed in that it does not account for the fact that different numbers of distinct tRFs are present in each tRF category. To address this bias, the relative abundances at the level of individual tRFs was examined separately for each of the 10 groups under consideration. Specifically, for each sample in a collection, e.g. PFC, the total RPM supporting a tRF category was divided, e.g. nuclear 5′ ARFs, by the number of distinct tRFs in the category. This number was then averaged across all the samples within the same collection. This calculation for the CSF and SER. collections was repeated. The results are summarized in FIGS. 6D-6F. This representation demonstrated that the average abundance per tRF is considerably less polarized across the 10 considered tRF groups than FIG. 6A-6C would suggest. For example, in the CSF collection, the nuclear 3′-tRFs account for a larger percentage of total reads than do 5′-CRFs. However, the reads land on comparatively fewer 5′-tRFs, which essentially puts the individual tRFs in these categories on equal footing in terms of relative abundances.

### Example 3

### The Observed tRFs have Length Distributions that are Sample-Source-Dependent

[0110] The average abundance of tRFs of a specific length separately in each of the three collections was examined. The distribution of RPM sums as a function of length, where all lengths are between 16 and 48 nt was considered. Overall, the three collections do not show any appreciable length differences between control (CNTRL) and PD. This is true for both MT tRFs (FIG. 7A-7C) and nuclear tRFs (FIG. 7D-7F) from all three collections. Even though no intra-collection differences were observed, it was found that there are inter-collection length differences. In particular, the majority of nuclear tRFs in the PFC collection are of lengths 32-34 nt (FIGS. 7D-7F). On the other hand, PFC MT tRFs are primarily 31-33 nt long (FIG. 7A), whereas in both CSF and SER the MT tRFs have peaks at both 29-31 nt and 44-46 nt (FIG. 7B-7C).

### Example 4

### Many of the Discovered tRFs are Unique to a Given Cellular Context

[0111] As mentioned above, numerous tRFs have been reported by now in different cellular contexts. This is an important consideration for attempts to develop potential biomarkers. tRFs that appear in multiple cellular contexts do not have the desirable tissue- and disease-state specificity that is expected of a good biomarker, and thus should be excluded from consideration.

[0112] With that in mind, MINThase, which is currently the largest repository of tRFs from human samples, was used. In particular, release 2.0 of MINTbase contains 26,744 distinct tRFs mined from 11,721 datasets and a multitude of contexts, In what follows, this set of 26,744 tRFs is denoted as “{MINTbase}.” MINTbase contains tRFs from 32 cancer types from TCGA, 452 samples from the 1000 Genomes Project for which RNA-seq data were made available, as well as several hundred more samples from other studies, both non-cancer and cancer. Release 2.0 of MINTbase also contains 7,405 distinct tRFs that were mined from the 535 brain tissue samples of TCGA's project on lower grade glioma (LGG). Any and all {MINTbase} tRFs that are present among the 33,561 tRFs of {PFC∪CSF∪SER} that is described above were removed as their presence in {MINTbase} indicates that their expression is neither PD-specific nor tissue-specific. The tRF set {PFC∪CSF∪SER}−{MINTbase} that includes 17,009 tRFs was created. Specifically, {PFC∪CSF∪SER}−{MINTbase} retained only 15,593 (49.98%) of the original PFC tRFs, 4,026 (33.33%) of the original CSF tRFs, and 2,705 (27.44%) of the original SER tRFs (FIG. 1B). The {PFC∪CSF∪SER}−{MINTbase} tRFs are present in the samples from PD patients and the matching CNTRL, and absent from the 11,271 datasets of {MINTbase}. In other words, they are as tissue- and as disease-context specific as allowed by the currently available data on tRFs. FIG. 1B shows how the tRFs that remain in {PFC∪CSF∪SER}−{MINTbase} are distributed across the three collections (PFC, CSF, SER).

### Example 5

### Multiple tRFs are Differentially Abundant Between CNTRL and PD in All Three Collections

[0113] The tRFs that are differentially abundant (DA) between health and the PD state were sought. Specifically, the t statistic and p-value of comparison of each individual tRF in CNTRL and PD groups of batch-corrected PFC data was computed, and a t test was performed of each individual tRF in CNTRL and PD groups in CSF and SER. data with a p-value threshold set to 0.05. Because it is known that a person's sex modulates tRF expression, DA tRFs were sought separately in samples from male and female donors.

[0114] For the full collection of tRFs in the {PFC∪CSF∪SER} set, the numbers of identified DA tRFs and their overlaps are summarized in FIGS. 1C-1D, for males and females. FIGS. 1E-1F show how the overlaps change when tRFs that are in the {MINTbase} set are removed from consideration. Note how 19 tRFs are DA between PD and CNTRL CSF in both males and females: of these, six have not been seen yet in other contexts (i.e., these six are not in part of the {MINTbase} collection of tRFs). By contrast, only three tRFs are DA between PD and CNTRL SER in both males and females: however, these three tRFs are in {MIN base} and thus are considered to not be specific to the PD context.

[0115] tRFs that are DA in the original comparison of PFC brain tissue (all male donors) overlap with male comparisons in biofluids. 62 tRFs are DA between PD and CNTRL samples in both CSF and PFC: 16 of the 62 are novel and have not been seen in other contexts. FIG. 2 shows the logₑ fold change between PD and CNTRL (i.e. the log₂ of the ratio of mean PD over mean CNTRL for each tRF) for all DA tRFs and across all comparisons. The data are provided separately for each of the five tRF categories and two genomic origins (nucleus and MI). In each plot, individual points represent DA tRFs, with the point's Y-value capturing the magnitude of the tRF's observed fold change (log₂) and the X-value capturing the −log₁₀ of the tRF's p-value (the further right, the lower the p-value).

[0116] Next, the distribution of tRFs across the collections was examined (FIG. 3A-B). As can be seen, there is a characteristic difference among the three collections. In PFC, ˜10% of tRFs are present in nearly all samples. On the other hand, in SER, most tRFs are present only in small groups of samples. In CSF, multiple tRFs are present in multiple samples. In other words, there exists a large number of tRFs from which DA tRF biomarkers could be drawn.

[0117] Lastly, examination was done to evaluate which of the 10 groups (five structural categories x 2 genomic origins) contribute to the DA tRFs of the {PKC∪CSF∪SER} set (FIGS. 3C-3D). Specifically, the number of DA tRFs in a given group (Y-axis) was plotted as a function of the percentage of tRFs from the same structural group that the DA tRFs represent (X-axis). In this FIG, the area of each bubble (and not the bubble's radius) associated with each tRF category is proportional to the number of DA tRFs (from the category), The rendering helps capture the relative relevance of the various tRF types in disease states. For example, in all three collections (PFC, CSF, and SER) it was found that a large number of nuclear i-tRFs that are DA (FIGS. 3C-3D). However, these i-tRFs are a relatively small portion of all i-tRFs that are present. On the other hand, almost one third of the MT 3′-tRFs that are present in PFC are DA between PD and CNTRL. Analogous observations can be made for the other tRF groups,

### Example 6

### Multiple tRFs are Differentially Abundant in the Context of Dementia Associated with PD

[0118] Next, tRFs that are DA between patients who had PD with dementia (PDD) and PD without dementia (PND) were sought. FIG. 4 illustrates which DA tRFs are shared among PDD, PND and CNTRL. The comparisons were carried out separately for males and females, and for each of the three collections (PFC, CSF, and SER). The DA tRFs compared here came from the {PK∪CSF∪SER}−{MINTbase} set.

[0119] Of note in PFC, it was found that 491 tRFs that are DA between CNTRL and PD, CNTRL and PND, and CNTRL and PDD patients: this indicates that these tRFs are DA independently of the stage of disease (FIG. 4A). Conversely, 265 and 159 tRFs are commonly DA between CNTRL vs. PD and CNTRL vs. PND and CNTRL vs. PDD comparisons, respectively (FIG. 4A). These tRFs likely capture changes that are specific to disease progression, and warrant further investigation into whether their roles are causative in this regard. The mutation background of these patients is not known, so it is conceivable that these tRFs could also change as a result of specific molecular alterations in individual donors.

[0120] It was also sought to determine whether any tRFs are DA between PND and PDD. It was found that a unique set of tRFs (from all five tRF structural categories) that are not contained in {MINTbase} are DA between PND and PDD, and do not appear as DA in any other comparisons (FIG. 4F). Interestingly, these select tRFs that are DA between PND and PDD show essentially no overlap among the three collections (PFC, CSF, and SER). It is necessary to emphasize that the tRFs that are DA between PND and PDD in SER exhibit a very strong dependence on the sex of the patient: males and females share only one DA tRF (FIG. 4F).

### Example 7

### tRFs Could Serve as Candidate PD Biomarkers

[0121] It was sought to determine whether DA tRFs could serve as biomarkers of PD. Two classification techniques were employed that used the abundance of tRFs as features: RPART and PLSDA (see Methods). Each RPART model was tuned to optimize the minimum number of features in each node of the decision tree. PLSDA was allowed to automatically select the number of components (latent variables) in the model. Each approach was used in a Monte Carlo simulation. The number of iterations varied across collections (see Methods). The performance assessment was done for the PLSDA model using all DA tRFs for each comparison (Table 2) and using only tRFs in {PFC∪CSF∪SER}−{MINTbase} (Table 2: “Sens” stands for sensitivity and “Spec” stands for specificity).

TABLE 2

| | Male | | Female | | Male | | Female | | Male | |
|---|---|---|---|---|---|---|---|---|---|---|
| | PFC | | CSF | | CSF | | SER | | SER | |
| | Sens | Spec | Sens | Spec | Sens | Spec | Sens | Spec | Sens | Spec |
| tRFs in | 98% | 86% | 90% | 98% | 91% | 79% | 100% | 59% | 91% | 96% |
| {PFC ∪ CSF ∪ SER} | | | | | | | | | | |
| tRFs in | 97% | 83% | 89% | 98% | 87% | 76% | 97% | 71% | 86% | 95% |
| {PFC ∪ CSF ∪ SER}- | | | | | | | | | | |
| tRHs | | | | | | | | | | |
| tRFs in | 99% | 85% | 91% | 94% | 89% | 78% | 96% | 53% | 93% | 97% |
| {PFC ∪ CSF ∪ SER}- | | | | | | | | | | |
| {MINTbase} | | | | | | | | | | |
| tRFs in | 97% | 83% | 88% | 95% | 88% | 78% | 98% | 64% | 65% | 98% |
| {PFC ∪ CSF ∪ SER}- | | | | | | | | | | |
| {MINTbase}-tRHs | | | | | | | | | | |

[0122] Also assessed, but not plotted here, are the results from using RPART, because the PLSDA model showed better performance (Table 3: “Sens” stands for sensitivity and “Spec” stands for specificity).

TABLE 3

| | Male | | Female | | Male | | Female | | Male | |
|---|---|---|---|---|---|---|---|---|---|---|
| | PFC | | CSF | | CSF | | SER | | SER | |
| | Sens | Spec | Sens | Spec | Sens | Spec | Sens | Spec | Sens | Spec |
| tRFs in | 79% | 83% | 59% | 59% | 67% | 56% | 95% | 10% | 53% | 62% |
| {PFC ∪ CSF ∪ SER} | | | | | | | | | | |
| tRFs in | 82% | 81% | 59% | 60% | 67% | 56% | 92% | 18% | 57% | 85% |
| {PFC ∪ CSF ∪ SER}- | | | | | | | | | | |
| {MINTbase} | | | | | | | | | | |

[0123] Finally, the performance of the PLSDA after scrambling the sample labels over the course of N² iterations was assessed, in order to determine how robust the PLSDA method was to noise. It was found that the performance of the model decreased dramatically, indicating that the PLSDA model identified true signal (data not shown).

[0124] Many tRNA halves have been shown to be induced by stress conditions in a wide variety of cell types. Consequently, tRNA halves are not expected to have the tissue- or disease-specificity required of good biomarker candidates. With this potential non-specificity in mind, all tRHs (5′ and 3′) were removed from the collection {PFC∪CSF∪SER}−{MINTbase}, and Monte-Carlo simulations were reran. As expected, it was observed that there was only a marginal decrease across all sensitivity and specificity measures (Table 2). Of note, there was an increase in specificity in the female SER classifier, which is anticipated given the rather small number (10) of starting tRFs (FIG. 1F).

### Example 8

### tRFs Could Serve as Candidate PND and PDD Biomarkers

[0125] Having shown the ability of tRFs to differentiate PD from CNTRL, it was sought to determine whether tRFs could also distinguish each of PDD and PND from CNTRL. In each of the comparisons, PDD vs. CNTRL and PND vs. CNTRL the DA tRFs described above and shown in FIG. 4 were used. The focus specifically was on the tRFs in {PFC∪CSF∪SER}−{MINTbase} given that these tRFs are more likely to exhibit the desired specificity that is expected of biomarkers. For the PFC samples, it was found that classification of CNTRL vs. PND and CNTRL vs. PDD is more specific than the comparison of CNTRL vs. PD (Table 4).

TABLE 4

| | Male PFC | | Female CSF | | Male CSF | | Female SER | | Male SER | |
|---|---|---|---|---|---|---|---|---|---|---|
| | Sens | Spec | Sens | Spec | Sens | Spec | Sens | Spec | Sens | Spec |
| | tRFs in {PFC ∪ CSF ∪ SER}-{MINTbase} | | | | | | | | | |
| CNTRL vs. PND | 100% | 95% | 100% | 95% | 98% | 98% | 80% | 58% | 89% | 64% |
| CNTRL vs. PDD | 100% | 99% | 100% | 99% | 98% | 93% | 98% | 78% | 57% | 68% |
| | tRFs in {PFC ∪ CSF ∪ SER}-{MINTbase}-tRHs | | | | | | | | | |
| CNTRL vs. PND | 100% | 95% | 96% | 97% | 86% | 88% | 83% | 59% | 83% | 65% |
| CNTRL vs. PDD | 100% | 98% | 99% | 92% | 89% | 83% | 98% | 77% | 37% | 59% |

[0126] Sensitivity remains at 100% across these three models, while specificity ranges from 85% to 99%. For CSF samples from female donors, the sensitivity improves from 91% to 98%. Specificity is relatively unchanged in CNTRL vs. PDD, but improves from 94% to 98% in CNTRL vs. PND. For CSF samples from male donors, sensitivity remains relatively unchanged, whereas specificity increases modestly. Curiously, sensitivity and specificity decrease substantially in SER comparisons (Table 4).

### Example 9

### Prioritizing the tRFs that Can Distinguish PD, PND, and PDD from CNTRL

[0127] Next, it was sought to prioritize the various tRFs based on their ability to discriminate PD from CNTRL. For PLSDA models using all tRFs from the original set {PFC∪CSF∪SER}, summed were the instances in which a tRF showed a Variance Importance in Projection (VIP) score≥1.5 in a PLSDA model, for all N² models (SEQ ID NOs: 57143-60526). Generally, the higher the VIP score is for any tRF, the higher the tRF's contribution to the PLSDA classification. Naturally, tRFs with higher VIP scores are comparatively better choices as biomarkers. Furthermore, the original model here to identify tRFs that were called VIP in the presence of both other potentially specific biomarkers and tRFs known to be non-specific to PD contexts were looked into.

[0128] To increase stringency of selection of highly specific biomarkers, VIP sums were filtered further keeping only those tRFs that are exclusive to the tRNA space and also absent from {MINTbase}. Notably, some of these tRFs are of the aforementioned tRH category. Even though the tRNA halves so far have been shown to be non-specific, it was opted to include these tRHs because they survived all possible filtering that is permitted by the currently available public data. As such, they can be viewed as candidate PD-specific biomarkers, with the understanding that they may lose their ‘PD-specific’ status if more data becomes available. For comparison, VIP votes for tRFs from the PLSDA models that do not include tRHs or tRFs seen in MINTbase were summer. The outcome of these steps resulted in a prioritized list of tRFs that would make ideal biomarker candidates. For example, 5′-tRFs contribute and average of 336.3 VIP votes in the analyses of the PFC collection (Table 5A).

TABLE 5A

| | tRF | # | Sum | Mean | # | Sum | Mean |
|---|---|---|---|---|---|---|---|
| Comparison | Category | tRFs | VIP | VIP | tRFs | VIP | VIP |
| Female CSF CNTRL vs. PD | Nuc i-tRF | 31 | 1755 | 56.6 | 23 | 1532 | 66.6 |
| Female CSF CNTRL vs. PD | Nuc 3′-tRF | 14 | 314 | 22.4 | 14 | 358 | 25.6 |
| Female CSF CNTRL vs. PD | Nuc 5′-tRH | 2 | 11 | 5.5 | 0 | 0 | 0.0 |
| Female CSF CNTRL vs. PD | Nuc 3′-tRH | 3 | 16 | 5.3 | 0 | 0 | 0.0 |
| Female CSF CNTRL vs. PD | Nuc 5′-tRF | 4 | 20 | 5.0 | 3 | 32 | 10.7 |
| Female CSF CNTRL vs. PD | MT i-tRF | 1 | 1 | 1.0 | 1 | 5 | 5.0 |
| Female SER CNTRL vs. PD | Nuc i-tRF | 3 | 1076 | 358.7 | 8 | 243 | 30.4 |
| Female SER CNTRL vs. PD | MT i-tRF | 1 | 19 | 19.0 | 2 | 18 | 9.0 |
| Male CSF CNTRL vs. PD | Nuc 5′-tRH | 1 | 1053 | 1053.0 | 0 | 0 | 0 |
| Male CSF CNTRL vs. PD | MT i-tRF | 3 | 1986 | 662.0 | 3 | 1524 | 508.0 |
| Male CSF CNTRL vs. PD | Nuc i-tRF | 92 | 19447 | 211.4 | 64 | 9922 | 155.0 |
| Male CSF CNTRL vs. PD | Nuc 3′-tRF | 91 | 6009 | 66.0 | 67 | 2964 | 44.2 |
| Male CSF CNTRL vs. PD | MT 3′-tRF | 1 | 42 | 42.0 | 1 | 125 | 125.0 |
| Male CSF CNTRL vs. PD | Nuc 3′-tRH | 7 | 91 | 13.0 | 0 | 0 | 0.0 |
| Male CSF CNTRL vs. PD | Nuc 5′-tRF | 2 | 8 | 4.0 | 0 | 0 | 0.0 |
| Male PFC CNTRL vs. PD | Nuc 5′-tRF | 28 | 8421 | 300.8 | 30 | 4207 | 140.2 |
| Male PFC CNTRL vs. PD | Nuc 5′-tRH | 15 | 3926 | 261.7 | 0 | 0 | 0.0 |
| Male PFC CNTRL vs. PD | MT 5′-tRF | 20 | 4663 | 233.2 | 397 | 1614 | 4.0 |
| Male PFC CNTRL vs. PD | Nuc 3′-tRF | 83 | 16322 | 196.7 | 218 | 8318 | 38.2 |
| Male PFC CNTRL vs. PD | MT 3′-tRF | 99 | 14865 | 150.2 | 86 | 7755 | 90.2 |
| Male PFC CNTRL vs. PD | Nuc i-tRF | 377 | 50092 | 132.9 | 112 | 34253 | 305.8 |
| Male PFC CNTRL vs. PD | MT i-tRF | 210 | 25153 | 119.8 | 17 | 9299 | 547.0 |
| Male PFC CNTRL vs. PD | MT 3′-tRH | 8 | 787 | 98.4 | 0 | 0 | 0 |
| Male PFC CNTRL vs. PD | Nuc 3′-tRH | 5 | 63 | 12.6 | 0 | 0 | 0 |
| Male PFC CNTRL vs. PD | MT 5′-tRH | 3 | 12 | 4.0 | 0 | 0 | 0 |
| Male SER CNTRL vs. PD | Nuc 3′-tRH | 1 | 90 | 90.0 | 0 | 0 | 0 |
| Male SER CNTRL vs. PD | Nuc i-tRF | 3 | 85 | 28.3 | 2 | 31 | 15.5 |
| Male SER CNTRL vs. PD | Nuc 3′-tRF | 4 | 39 | 9.8 | 2 | 9 | 4.5 |

[0129] When the tRFs from the other two tRF categories were subjected to the same filtering, the importance of nuclear i-tRFs as potent bi.omarkers emerged. Whereas most of the tRFs from the other categories are filtered out, nuclear i-tRFs contribute a high number of VIP votes on average in all five model contexts (Table 5A). Thus, nuclear i-tRFs may represent the most important set of tRFs to investigate in subsequent biomarker validation experiments.

[0130] It was noted that when this filtering was extended to the PLSDA models using CNTRL vs. PDD or CNTRL vs. PDD, this trend held (SEQ ID NOs:60527-63850). By design, none of the tRFs identified as VIP in these models, using the same filtering criteria of a VIP score ≥1.5, are recorded in MINTbase. Here again, i-tRFs emerge as potential PD biomarkers (Table 5B, 5C).

TABLE 5B

| | tRF | # | Sum | Mean |
|---|---|---|---|---|
| Comparison | Category | tRFs | VIP | VIP |
| Female CSF CNTRL vs. | Nuc 3′-tRF | 21 | 5237 | 249.4 |
| PDD | | | | |
| Female CSF CNTRL vs. | Nuc i-tRF | 26 | 4538 | 174.5 |
| PDD | | | | |
| Female CSF CNTRL vs. | MT i-tRF | 1 | 2 | 2.0 |
| PDD | | | | |
| Female CSF CNTRL vs. | MT 3′-tRF | 2 | 3 | 1.5 |
| PDD | | | | |
| Female CSF CNTRL vs. | Nuc i-tRF | 33 | 5345 | 162.0 |
| PND | | | | |
| Female CSF CNTRL vs. | MT i-tRF | 1 | 149 | 149.0 |
| PND | | | | |
| Female CSF CNTRL vs. | Nuc 3′-tRF | 15 | 1832 | 122.1 |
| PND | | | | |
| Female CSF CNTRL vs. | Nuc 5′-tRF | 1 | 23 | 23.0 |
| PND | | | | |
| Female SER CNTRL vs. | Nuc i-tRF | 12 | 249 | 20.8 |
| PDD | | | | |
| Female SER CNTRL vs. | Nuc 5′-tRF | 1 | 6 | 6.0 |
| PDD | | | | |
| Female SER CNTRL vs. | MT 3′-tRF | 1 | 2 | 2.0 |
| PDD | | | | |
| Female SER CNTRL vs. | Nuc 3′-tRF | 1 | 1 | 1.0 |
| PDD | | | | |
| Female SER CNTRL vs. | Nuc 3′-tRF | 4 | 7 | 1.8 |
| PND | | | | |
| Female SER CNTRL vs. | Nuc i-tRF | 3 | 4 | 1.3 |
| PND | | | | |

TABLE 5C

| | tRF | # | Sum | Mean |
|---|---|---|---|---|
| Comparison | Category | tRFs | VIP | VIP |
| Male CSF CNTRL vs. PDD | MT i-tRF | 5 | 2731 | 546.2 |
| Male CSF CNTRL vs. PDD | MT 3′-tRF | 8 | 3177 | 397.1 |
| Male CSF CNTRL vs. PDD | Nuc i-tRF | 133 | 47960 | 360.6 |
| Male CSF CNTRL vs. PDD | Nuc 3′-tRF | 245 | 11201 | 45.7 |
| Male CSF CNTRL vs. PND | Nuc i-tRF | 65 | 9603 | 147.7 |
| Male CSF CNTRL vs. PND | Nuc 3′-tRF | 49 | 5197 | 106.1 |
| Male CSF CNTRL vs. PND | MT i-tRF | 2 | 16 | 8.0 |
| Male CSF CNTRL vs. PND | Nuc 5′-tRF | 1 | 3 | 3.0 |
| Male PFC CNTRL vs. PDD | Nuc 3′-tRF | 149 | 21840 | 146.6 |
| Male PFC CNTRL vs. PDD | MT i-tRF | 373 | 48527 | 130.1 |
| Male PFC CNTRL vs. PDD | Nuc i-tRF | 679 | 79638 | 117.3 |
| Male PFC CNTRL vs. PDD | MT 5′-tRF | 18 | 862 | 47.9 |
| Male PFC CNTRL vs. PDD | Nuc 5′-tRF | 25 | 1003 | 40.1 |
| Male PFC CNTRL vs. PDD | MT 3′-tRF | 60 | 1362 | 22.7 |
| Male PFC CNTRL vs. PND | Nuc i-tRF | 520 | 57859 | 111.2 |
| Male PFC CNTRL vs. PND | Nuc 3′-tRF | 94 | 9067 | 96.5 |
| Male PFC CNTRL vs. PND | MT 5′-tRF | 25 | 1945 | 77.8 |
| Male PFC CNTRL vs. PND | MT i-tRF | 522 | 39415 | 75.5 |
| Male PFC CNTRL vs. PND | Nuc 5′-tRF | 28 | 1680 | 60.0 |
| Male PFC CNTRL vs. PND | MT 3′-tRF | 59 | 1563 | 26.5 |
| Male SER CNTRL vs. PDD | Nuc i-tRF | 1 | 1 | 1.0 |
| Male SER CNTRL vs. PND | MT 3′-tRF | 3 | 39 | 13.0 |
| Male SER CNTRL vs. PND | MT i-tRF | 1 | 4 | 4.0 |
| Male SER CNTRL vs. PND | Nuc i-tRF | 8 | 27 | 3.4 |

[0131] Though i-tRFs do not show the highest mean VIP vote in all cases, the number of unique tRFs contributing VIP votes is highest among i-FRFs in all but one case (male CSF

[0132] CNTRL vs. PDD). Additionally, although i-tRFs show the lowest mean VIP sum in female CSF CNTRL vs. PDD comparisons for example, there are 34 unique i-tRFs contributing VIP votes, as compared to only two 5′-CRFs. In all other female CNTRL vs. PDD and CNTRL vs. PND comparisons, i-tRFs exhibit among the top two mean VIP scores. In male comparisons, i-tRFs again contribute high stable means over a larger number of unique tRFs than alternative categories. Hence, i-tRFs emerge as promising biomarkers in the context of CNTRL vs. PDD or CNTRL vs. PND as well.

### Example 10

### The Candidate tRF Biomarkers are PD-specific

[0133] While the described analyses of this project were ongoing, and after Release 2.0 of MINTbase became available, several samples from Alzheimer's disease (AD) patients in NiH GEO (GSE63501) were noted. This collection includes 13 PFC samples from 3 female and 4 male control patients, and 4 female and 2 male AD patients.

[0134] To validate the specificity of PD classification signature, whether the DA tRFs with high VIP scores that emerged from the above analyses are present among these AD samples and controls was analyzed. MiNTmap was ran on the 13 samples that are part of the GSE63501 collection, and identified 5,662 tRFs with normalized abundance ≥1 RPM (SEQ NOs: 63851-69512). 3,734 of these tRFs are present in at least one female sample and 3,628 tRFs are present in at least one male control sample. 2,563 of these tRFs are present in female and 1,944 are present in male AD samples. Using the same approach and threshold settings that were employed to analyze the PFC, CSF and SER collections, 334 tRFs were identified that are DA in female control vs. female AD samples, and 8( ) tRFs that are DA in male control vs. male AD.

[0135] Finally, it was sought to identify which of the DA tRFs that can effectively distinguish PD from CNTRL are also DA between the AD and control samples of the GSE63501 collection. Any tRFs that appeared to be DA in both of these comparisons would be suboptimal choices for biomarkers, because they would not be disease-specific. On comparing the two lists, it was found that only 49 (15, respectively) of the 807 (334, respectively) tRFs that are DA between male (female, respectively) AD patients and controls are also present among the 987 tRFs that are DA between PD and CNTRL in the PFC samples. These 49+15 tRFs collectively contribute 3,924 (1.58%) of the 248,274 VIP votes in the PFC collection, i.e. a very small percentage of the total. Similarly, only 4 of the identified male AD DA tRFs are also DA in male CSF PD samples. 1 of the identified male AD DA tRFs is also DA in female CSF PD samples, and 2 of the identified male AD DA tRFs are also DA in male CSF PD samples. Together, only 1 of these 7 reidentified tRFs—a nuclear i-tRF accounting for 950 (1.40%) of 67,624 male CSF VIP votes—is among the VIP tRFs included in Table 4.

### Other Embodiments

[0136] The recitation of a listing of elements in any definition of a variable herein includes definitions of that variable as any single element or combination (or subcombination) of listed elements. The recitation of an embodiment herein includes that embodiment as any single embodiment or in combination with any other embodiments or portions thereof.

[0137] The disclosures of each and every patent, patent application, and publication cited herein are hereby incorporated herein by reference in their entirety. While this invention has been disclosed with reference to specific embodiments, it is apparent that other embodiments and variations of this invention may be devised by others skilled in the art without departing from the true spirit and scope of the invention. The appended claims are intended to be construed to include all such embodiments and equivalent variations.

The application's sequence listing, which the Patent Office published only in electronic form, follows.

SEQUENCE LISTING (69512 sequences)

SEQ ID NO: 1 - DNA, 17 bp, Homo Sapiens
aaaaaccatttcataac

SEQ ID NO: 2 - DNA, 18 bp, Homo Sapiens
aaaaaccatttcataact

SEQ ID NO: 3 - DNA, 22 bp, Homo Sapiens
aaaaaccatttcataactttgt

SEQ ID NO: 4 - DNA, 23 bp, Homo Sapiens
aaaaaccatttcataactttgtc

SEQ ID NO: 5 - DNA, 16 bp, Homo Sapiens
aaaaagtcatggaggc

SEQ ID NO: 6 - DNA, 17 bp, Homo Sapiens
aaaaagtcatggaggcc

SEQ ID NO: 7 - DNA, 18 bp, Homo Sapiens
aaaaagtcatggaggcca

SEQ ID NO: 8 - DNA, 20 bp, Homo Sapiens
aaaaagtcatggaggccatg

SEQ ID NO: 9 - DNA, 23 bp, Homo Sapiens
aaaaagtcatggaggccatgggg

SEQ ID NO: 10 - DNA, 24 bp, Homo Sapiens
aaaaagtcatggaggccatggggt

SEQ ID NO: 11 - DNA, 25 bp, Homo Sapiens
aaaaagtcatggaggccatggggtt

SEQ ID NO: 12 - DNA, 26 bp, Homo Sapiens
aaaaagtcatggaggccatggggttg

SEQ ID NO: 13 - DNA, 27 bp, Homo Sapiens
aaaaagtcatggaggccatggggttgg

SEQ ID NO: 14 - DNA, 30 bp, Homo Sapiens
aaaaagtcatggaggccatggggttggctt

SEQ ID NO: 15 - DNA, 16 bp, Homo Sapiens
aaaaattttggtgcaa

SEQ ID NO: 16 - DNA, 17 bp, Homo Sapiens
aaaaattttggtgcaac

SEQ ID NO: 17 - DNA, 18 bp, Homo Sapiens
aaaaattttggtgcaact

SEQ ID NO: 18 - DNA, 19 bp, Homo Sapiens
aaaaattttggtgcaactc

SEQ ID NO: 19 - DNA, 20 bp, Homo Sapiens
aaaaattttggtgcaactcc

SEQ ID NO: 20 - DNA, 22 bp, Homo Sapiens
aaaaattttggtgcaactccaa

SEQ ID NO: 21 - DNA, 24 bp, Homo Sapiens
aaaaattttggtgcaactccaaat

SEQ ID NO: 22 - DNA, 25 bp, Homo Sapiens
aaaaattttggtgcaactccaaata

SEQ ID NO: 23 - DNA, 29 bp, Homo Sapiens
aaaaattttggtgcaactccaaataaaag

SEQ ID NO: 24 - DNA, 30 bp, Homo Sapiens
aaaaattttggtgcaactccaaataaaagt

SEQ ID NO: 25 - DNA, 31 bp, Homo Sapiens
aaaaattttggtgcaactccaaataaaagta

SEQ ID NO: 26 - DNA, 32 bp, Homo Sapiens
aaaaattttggtgcaactccaaataaaagtac

SEQ ID NO: 27 - DNA, 33 bp, Homo Sapiens
aaaaattttggtgcaactccaaataaaagtacc

SEQ ID NO: 28 - DNA, 34 bp, Homo Sapiens
aaaaattttggtgcaactccaaataaaagtacca

SEQ ID NO: 29 - DNA, 16 bp, Homo Sapiens
aaaacatcagattgtg

SEQ ID NO: 30 - DNA, 17 bp, Homo Sapiens
aaaacatcagattgtga

SEQ ID NO: 31 - DNA, 18 bp, Homo Sapiens
aaaacatcagattgtgaa

SEQ ID NO: 32 - DNA, 19 bp, Homo Sapiens
aaaacatcagattgtgaat

SEQ ID NO: 33 - DNA, 20 bp, Homo Sapiens
aaaacatcagattgtgaatc

SEQ ID NO: 34 - DNA, 21 bp, Homo Sapiens
aaaacatcagattgtgaatct

SEQ ID NO: 35 - DNA, 22 bp, Homo Sapiens
aaaacatcagattgtgaatctg

SEQ ID NO: 36 - DNA, 23 bp, Homo Sapiens
aaaacatcagattgtgaatctga

SEQ ID NO: 37 - DNA, 24 bp, Homo Sapiens
aaaacatcagattgtgaatctgac

SEQ ID NO: 38 - DNA, 25 bp, Homo Sapiens
aaaacatcagattgtgaatctgaca

SEQ ID NO: 39 - DNA, 27 bp, Homo Sapiens
aaaacatcagattgtgaatctgacaac

SEQ ID NO: 40 - DNA, 28 bp, Homo Sapiens
aaaacatcagattgtgaatctgacaaca

SEQ ID NO: 41 - DNA, 29 bp, Homo Sapiens
aaaacatcagattgtgaatctgacaacag

SEQ ID NO: 42 - DNA, 30 bp, Homo Sapiens
aaaacatcagattgtgaatctgacaacaga

SEQ ID NO: 43 - DNA, 31 bp, Homo Sapiens
aaaacatcagattgtgaatctgacaacagag

SEQ ID NO: 44 - DNA, 32 bp, Homo Sapiens
aaaacatcagattgtgaatctgacaacagagg

SEQ ID NO: 45 - DNA, 33 bp, Homo Sapiens
aaaacatcagattgtgaatctgacaacagaggc

SEQ ID NO: 46 - DNA, 34 bp, Homo Sapiens
aaaacatcagattgtgaatctgacaacagaggct

SEQ ID NO: 47 - DNA, 35 bp, Homo Sapiens
aaaacatcagattgtgaatctgacaacagaggctt

SEQ ID NO: 48 - DNA, 36 bp, Homo Sapiens
aaaacatcagattgtgaatctgacaacagaggctta

SEQ ID NO: 49 - DNA, 37 bp, Homo Sapiens
aaaacatcagattgtgaatctgacaacagaggcttac

SEQ ID NO: 50 - DNA, 38 bp, Homo Sapiens
aaaacatcagattgtgaatctgacaacagaggcttacg

SEQ ID NO: 51 - DNA, 39 bp, Homo Sapiens
aaaacatcagattgtgaatctgacaacagaggcttacga

SEQ ID NO: 52 - DNA, 40 bp, Homo Sapiens
aaaacatcagattgtgaatctgacaacagaggcttacgac

SEQ ID NO: 53 - DNA, 41 bp, Homo Sapiens
aaaacatcagattgtgaatctgacaacagaggcttacgacc

SEQ ID NO: 54 - DNA, 42 bp, Homo Sapiens
aaaacatcagattgtgaatctgacaacagaggcttacgaccc

SEQ ID NO: 55 - DNA, 43 bp, Homo Sapiens
aaaacatcagattgtgaatctgacaacagaggcttacgacccc

SEQ ID NO: 56 - DNA, 44 bp, Homo Sapiens
aaaacatcagattgtgaatctgacaacagaggcttacgacccct

SEQ ID NO: 57 - DNA, 45 bp, Homo Sapiens
aaaacatcagattgtgaatctgacaacagaggcttacgacccctt

SEQ ID NO: 58 - DNA, 46 bp, Homo Sapiens
aaaacatcagattgtgaatctgacaacagaggcttacgacccctta

SEQ ID NO: 59 - DNA, 48 bp, Homo Sapiens
aaaacatcagattgtgaatctgacaacagaggcttacgaccccttatt

SEQ ID NO: 60 - DNA, 22 bp, Homo Sapiens
aaaaccatttcataactttgtc

SEQ ID NO: 61 - DNA, 22 bp, Homo Sapiens
aaaacctttttccaaggacacc

SEQ ID NO: 62 - DNA, 23 bp, Homo Sapiens
aaaacctttttccaaggacacca

SEQ ID NO: 63 - DNA, 16 bp, Homo Sapiens
aaaacgaatgatttcg

SEQ ID NO: 64 - DNA, 18 bp, Homo Sapiens
aaaacgaatgatttcgac

SEQ ID NO: 65 - DNA, 19 bp, Homo Sapiens
aaaacgaatgatttcgact

SEQ ID NO: 66 - DNA, 20 bp, Homo Sapiens
aaaacgaatgatttcgactc

SEQ ID NO: 67 - DNA, 21 bp, Homo Sapiens
aaaacgaatgatttcgactca

SEQ ID NO: 68 - DNA, 22 bp, Homo Sapiens
aaaacgaatgatttcgactcat

SEQ ID NO: 69 - DNA, 24 bp, Homo Sapiens
aaaacgaatgatttcgactcatta

SEQ ID NO: 70 - DNA, 26 bp, Homo Sapiens
aaaacgaatgatttcgactcattaaa

SEQ ID NO: 71 - DNA, 28 bp, Homo Sapiens
aaaacgaatgatttcgactcattaaatt

SEQ ID NO: 72 - DNA, 31 bp, Homo Sapiens
aaaacgaatgatttcgactcattaaattatg

SEQ ID NO: 73 - DNA, 32 bp, Homo Sapiens
aaaacgaatgatttcgactcattaaattatga

SEQ ID NO: 74 - DNA, 33 bp, Homo Sapiens
aaaacgaatgatttcgactcattaaattatgat

SEQ ID NO: 75 - DNA, 34 bp, Homo Sapiens
aaaacgaatgatttcgactcattaaattatgata

SEQ ID NO: 76 - DNA, 37 bp, Homo Sapiens
aaaacgaatgatttcgactcattaaattatgataatc

SEQ ID NO: 77 - DNA, 38 bp, Homo Sapiens
aaaacgaatgatttcgactcattaaattatgataatca

SEQ ID NO: 78 - DNA, 17 bp, Homo Sapiens
aaaacttaaaactttac

SEQ ID NO: 79 - DNA, 28 bp, Homo Sapiens
aaaacttaaaactttacaatcagaggtt

SEQ ID NO: 80 - DNA, 20 bp, Homo Sapiens
aaaacttaaaactttacagt

SEQ ID NO: 81 - DNA, 23 bp, Homo Sapiens
aaaacttaaaactttacagtcag

SEQ ID NO: 82 - DNA, 24 bp, Homo Sapiens
aaaacttaaaactttacagtcaga

SEQ ID NO: 83 - DNA, 25 bp, Homo Sapiens
aaaacttaaaactttacagtcagag

SEQ ID NO: 84 - DNA, 26 bp, Homo Sapiens
aaaacttaaaactttacagtcagagg

SEQ ID NO: 85 - DNA, 27 bp, Homo Sapiens
aaaacttaaaactttacagtcagaggt

SEQ ID NO: 86 - DNA, 28 bp, Homo Sapiens
aaaacttaaaactttacagtcagaggtt

SEQ ID NO: 87 - DNA, 29 bp, Homo Sapiens
aaaacttaaaactttacagtcagaggttc

SEQ ID NO: 88 - DNA, 37 bp, Homo Sapiens
aaaacttaaaactttacagtcagaggttcaattcctc

SEQ ID NO: 89 - DNA, 38 bp, Homo Sapiens
aaaacttaaaactttacagtcagaggttcaattcctct

SEQ ID NO: 90 - DNA, 39 bp, Homo Sapiens
aaaacttaaaactttacagtcagaggttcaattcctctt

SEQ ID NO: 91 - DNA, 40 bp, Homo Sapiens
aaaacttaaaactttacagtcagaggttcaattcctcttc

SEQ ID NO: 92 - DNA, 41 bp, Homo Sapiens
aaaacttaaaactttacagtcagaggttcaattcctcttct

SEQ ID NO: 93 - DNA, 48 bp, Homo Sapiens
aaaacttaaaactttacagtcagaggttcaattcctcttcttaacacc

SEQ ID NO: 94 - DNA, 18 bp, Homo Sapiens
aaaactttacagtcagag

SEQ ID NO: 95 - DNA, 19 bp, Homo Sapiens
aaaactttacagtcagagg

SEQ ID NO: 96 - DNA, 21 bp, Homo Sapiens
aaaactttacagtcagaggtt

SEQ ID NO: 97 - DNA, 22 bp, Homo Sapiens
aaaactttacagtcagaggttc

SEQ ID NO: 98 - DNA, 33 bp, Homo Sapiens
aaaactttacagtcagaggttcaattcctcttc

SEQ ID NO: 99 - DNA, 17 bp, Homo Sapiens
aaaagagttactttgat

SEQ ID NO: 100 - DNA, 19 bp, Homo Sapiens
aaaagagttactttgatag

SEQ ID NO: 101 - DNA, 21 bp, Homo Sapiens
aaaagagttactttgatagag

SEQ ID NO: 102 - DNA, 34 bp, Homo Sapiens
aaaagagttactttgatagagtaaataataggag

SEQ ID NO: 103 - DNA, 35 bp, Homo Sapiens
aaaagagttactttgatagagtaaataataggagc

SEQ ID NO: 104 - DNA, 36 bp, Homo Sapiens
aaaagagttactttgatagagtaaataataggagct

SEQ ID NO: 105 - DNA, 16 bp, Homo Sapiens
aaaagtcatggaggcc

SEQ ID NO: 106 - DNA, 17 bp, Homo Sapiens
aaaagtcatggaggcca

SEQ ID NO: 107 - DNA, 19 bp, Homo Sapiens
aaaagtcatggaggccatg

SEQ ID NO: 108 - DNA, 22 bp, Homo Sapiens
aaaagtcatggaggccatgggg

SEQ ID NO: 109 - DNA, 23 bp, Homo Sapiens
aaaagtcatggaggccatggggt

SEQ ID NO: 110 - DNA, 24 bp, Homo Sapiens
aaaagtcatggaggccatggggtt

SEQ ID NO: 111 - DNA, 25 bp, Homo Sapiens
aaaagtcatggaggccatggggttg

SEQ ID NO: 112 - DNA, 26 bp, Homo Sapiens
aaaagtcatggaggccatggggttgg

SEQ ID NO: 113 - DNA, 25 bp, Homo Sapiens
aaaatggctgagtgaagcattggac

SEQ ID NO: 114 - DNA, 26 bp, Homo Sapiens
aaaatggctgagtgaagcattggact

SEQ ID NO: 115 - DNA, 27 bp, Homo Sapiens
aaaatggctgagtgaagcattggactg

SEQ ID NO: 116 - DNA, 28 bp, Homo Sapiens
aaaatggctgagtgaagcattggactgt

SEQ ID NO: 117 - DNA, 29 bp, Homo Sapiens
aaaatggctgagtgaagcattggactgta

SEQ ID NO: 118 - DNA, 37 bp, Homo Sapiens
aaaatggctgagtgaagcattggactgtaaatctaaa

SEQ ID NO: 119 - DNA, 16 bp, Homo Sapiens
aaaatgttggttatac

SEQ ID NO: 120 - DNA, 17 bp, Homo Sapiens
aaaatgttggttatacc

SEQ ID NO: 121 - DNA, 18 bp, Homo Sapiens
aaaatgttggttataccc

SEQ ID NO: 122 - DNA, 20 bp, Homo Sapiens
aaaatgttggttataccctt

SEQ ID NO: 123 - DNA, 21 bp, Homo Sapiens
aaaatgttggttatacccttc

SEQ ID NO: 124 - DNA, 22 bp, Homo Sapiens
aaaatgttggttatacccttcc

SEQ ID NO: 125 - DNA, 23 bp, Homo Sapiens
aaaatgttggttatacccttccc

SEQ ID NO: 126 - DNA, 24 bp, Homo Sapiens
aaaatgttggttatacccttcccg

SEQ ID NO: 127 - DNA, 27 bp, Homo Sapiens
aaaatgttggttatacccttcccgtac

SEQ ID NO: 128 - DNA, 28 bp, Homo Sapiens
aaaatgttggttatacccttcccgtact

SEQ ID NO: 129 - DNA, 29 bp, Homo Sapiens
aaaatgttggttatacccttcccgtacta

SEQ ID NO: 130 - DNA, 30 bp, Homo Sapiens
aaaatgttggttatacccttcccgtactac

SEQ ID NO: 131 - DNA, 31 bp, Homo Sapiens
aaaatgttggttatacccttcccgtactacc

SEQ ID NO: 132 - DNA, 32 bp, Homo Sapiens
aaaatgttggttatacccttcccgtactacca

SEQ ID NO: 133 - DNA, 16 bp, Homo Sapiens
aaaatgtttagacggg

SEQ ID NO: 134 - DNA, 17 bp, Homo Sapiens
aaaatgtttagacgggc

SEQ ID NO: 135 - DNA, 18 bp, Homo Sapiens
aaaatgtttagacgggct

SEQ ID NO: 136 - DNA, 19 bp, Homo Sapiens
aaaatgtttagacgggctc

SEQ ID NO: 137 - DNA, 20 bp, Homo Sapiens
aaaatgtttagacgggctca

SEQ ID NO: 138 - DNA, 21 bp, Homo Sapiens
aaaatgtttagacgggctcac

SEQ ID NO: 139 - DNA, 22 bp, Homo Sapiens
aaaatgtttagacgggctcaca

SEQ ID NO: 140 - DNA, 23 bp, Homo Sapiens
aaaatgtttagacgggctcacat

SEQ ID NO: 141 - DNA, 24 bp, Homo Sapiens
aaaatgtttagacgggctcacatc

SEQ ID NO: 142 - DNA, 25 bp, Homo Sapiens
aaaatgtttagacgggctcacatca

SEQ ID NO: 143 - DNA, 26 bp, Homo Sapiens
aaaatgtttagacgggctcacatcac

SEQ ID NO: 144 - DNA, 27 bp, Homo Sapiens
aaaatgtttagacgggctcacatcacc

SEQ ID NO: 145 - DNA, 28 bp, Homo Sapiens
aaaatgtttagacgggctcacatcaccc

SEQ ID NO: 146 - DNA, 29 bp, Homo Sapiens
aaaatgtttagacgggctcacatcacccc

SEQ ID NO: 147 - DNA, 30 bp, Homo Sapiens
aaaatgtttagacgggctcacatcacccca

SEQ ID NO: 148 - DNA, 31 bp, Homo Sapiens
aaaatgtttagacgggctcacatcaccccat

SEQ ID NO: 149 - DNA, 32 bp, Homo Sapiens
aaaatgtttagacgggctcacatcaccccata

SEQ ID NO: 150 - DNA, 33 bp, Homo Sapiens
aaaatgtttagacgggctcacatcaccccataa

SEQ ID NO: 151 - DNA, 34 bp, Homo Sapiens
aaaatgtttagacgggctcacatcaccccataaa

SEQ ID NO: 152 - DNA, 35 bp, Homo Sapiens
aaaatgtttagacgggctcacatcaccccataaac

SEQ ID NO: 153 - DNA, 36 bp, Homo Sapiens
aaaatgtttagacgggctcacatcaccccataaaca

SEQ ID NO: 154 - DNA, 38 bp, Homo Sapiens
aaaatgtttagacgggctcacatcaccccataaacacc

SEQ ID NO: 155 - DNA, 39 bp, Homo Sapiens
aaaatgtttagacgggctcacatcaccccataaacacca

SEQ ID NO: 156 - DNA, 16 bp, Homo Sapiens
aaaattttggtgcaac

SEQ ID NO: 157 - DNA, 17 bp, Homo Sapiens
aaaattttggtgcaact

SEQ ID NO: 158 - DNA, 18 bp, Homo Sapiens
aaaattttggtgcaactc

SEQ ID NO: 159 - DNA, 19 bp, Homo Sapiens
aaaattttggtgcaactcc

SEQ ID NO: 160 - DNA, 20 bp, Homo Sapiens
aaaattttggtgcaactcca

SEQ ID NO: 161 - DNA, 28 bp, Homo Sapiens
aaaattttggtgcaactccaaataaaag

SEQ ID NO: 162 - DNA, 29 bp, Homo Sapiens
aaaattttggtgcaactccaaataaaagt

SEQ ID NO: 163 - DNA, 30 bp, Homo Sapiens
aaaattttggtgcaactccaaataaaagta

SEQ ID NO: 164 - DNA, 31 bp, Homo Sapiens
aaaattttggtgcaactccaaataaaagtac

SEQ ID NO: 165 - DNA, 32 bp, Homo Sapiens
aaaattttggtgcaactccaaataaaagtacc

SEQ ID NO: 166 - DNA, 20 bp, Homo Sapiens
aaacaaaacgaatgatttcg

SEQ ID NO: 167 - DNA, 22 bp, Homo Sapiens
aaacaaaacgaatgatttcgac

SEQ ID NO: 168 - DNA, 23 bp, Homo Sapiens
aaacaaaacgaatgatttcgact

SEQ ID NO: 169 - DNA, 24 bp, Homo Sapiens
aaacaaaacgaatgatttcgactc

SEQ ID NO: 170 - DNA, 25 bp, Homo Sapiens
aaacaaaacgaatgatttcgactca

SEQ ID NO: 171 - DNA, 26 bp, Homo Sapiens
aaacaaaacgaatgatttcgactcat

SEQ ID NO: 172 - DNA, 28 bp, Homo Sapiens
aaacaaaacgaatgatttcgactcatta

SEQ ID NO: 173 - DNA, 35 bp, Homo Sapiens
aaacaaaacgaatgatttcgactcattaaattatg

SEQ ID NO: 174 - DNA, 37 bp, Homo Sapiens
aaacaaaacgaatgatttcgactcattaaattatgat

SEQ ID NO: 175 - DNA, 38 bp, Homo Sapiens
aaacaaaacgaatgatttcgactcattaaattatgata

SEQ ID NO: 176 - DNA, 21 bp, Homo Sapiens
aaacaggagatcctgggttcg

SEQ ID NO: 177 - DNA, 22 bp, Homo Sapiens
aaacaggagatcctgggttcga

SEQ ID NO: 178 - DNA, 35 bp, Homo Sapiens
aaacaggagatcctgggttcgaatcccagcggggc

SEQ ID NO: 179 - DNA, 36 bp, Homo Sapiens
aaacaggagatcctgggttcgaatcccagcggggcc

SEQ ID NO: 180 - DNA, 37 bp, Homo Sapiens
aaacaggagatcctgggttcgaatcccagcggggcct

SEQ ID NO: 181 - DNA, 38 bp, Homo Sapiens
aaacaggagatcctgggttcgaatcccagcggggcctc

SEQ ID NO: 182 - DNA, 39 bp, Homo Sapiens
aaacaggagatcctgggttcgaatcccagcggggcctcc

SEQ ID NO: 183 - DNA, 34 bp, Homo Sapiens
aaacaggagatcctgggttcgaatcccagcggtg

SEQ ID NO: 184 - DNA, 35 bp, Homo Sapiens
aaacaggagatcctgggttcgaatcccagcggtgc

SEQ ID NO: 185 - DNA, 37 bp, Homo Sapiens
aaacaggagatcctgggttcgaatcccagcggtgcct

SEQ ID NO: 186 - DNA, 38 bp, Homo Sapiens
aaacaggagatcctgggttcgaatcccagcggtgcctc

SEQ ID NO: 187 - DNA, 39 bp, Homo Sapiens
aaacaggagatcctgggttcgaatcccagcggtgcctcc

SEQ ID NO: 188 - DNA, 40 bp, Homo Sapiens
aaacaggagatcctgggttcgaatcccagcggtgcctcca

SEQ ID NO: 189 - DNA, 38 bp, Homo Sapiens
aaacaggagatcctgggttcgaatcccagtagagcctc

SEQ ID NO: 190 - DNA, 38 bp, Homo Sapiens
aaacaggagatcctgggttcgactcccagtggggcctc

SEQ ID NO: 191 - DNA, 16 bp, Homo Sapiens
aaacatcagattgtga

SEQ ID NO: 192 - DNA, 17 bp, Homo Sapiens
aaacatcagattgtgaa

SEQ ID NO: 193 - DNA, 18 bp, Homo Sapiens
aaacatcagattgtgaat

SEQ ID NO: 194 - DNA, 19 bp, Homo Sapiens
aaacatcagattgtgaatc

SEQ ID NO: 195 - DNA, 20 bp, Homo Sapiens
aaacatcagattgtgaatct

SEQ ID NO: 196 - DNA, 21 bp, Homo Sapiens
aaacatcagattgtgaatctg

SEQ ID NO: 197 - DNA, 23 bp, Homo Sapiens
aaacatcagattgtgaatctgac

SEQ ID NO: 198 - DNA, 24 bp, Homo Sapiens
aaacatcagattgtgaatctgaca

SEQ ID NO: 199 - DNA, 25 bp, Homo Sapiens
aaacatcagattgtgaatctgacaa

SEQ ID NO: 200 - DNA, 26 bp, Homo Sapiens
aaacatcagattgtgaatctgacaac

SEQ ID NO: 201 - DNA, 27 bp, Homo Sapiens
aaacatcagattgtgaatctgacaaca

SEQ ID NO: 202 - DNA, 28 bp, Homo Sapiens
aaacatcagattgtgaatctgacaacag

SEQ ID NO: 203 - DNA, 29 bp, Homo Sapiens
aaacatcagattgtgaatctgacaacaga

SEQ ID NO: 204 - DNA, 30 bp, Homo Sapiens
aaacatcagattgtgaatctgacaacagag

SEQ ID NO: 205 - DNA, 31 bp, Homo Sapiens
aaacatcagattgtgaatctgacaacagagg

SEQ ID NO: 206 - DNA, 32 bp, Homo Sapiens
aaacatcagattgtgaatctgacaacagaggc

SEQ ID NO: 207 - DNA, 33 bp, Homo Sapiens
aaacatcagattgtgaatctgacaacagaggct

SEQ ID NO: 208 - DNA, 34 bp, Homo Sapiens
aaacatcagattgtgaatctgacaacagaggctt

SEQ ID NO: 209 - DNA, 35 bp, Homo Sapiens
aaacatcagattgtgaatctgacaacagaggctta

SEQ ID NO: 210 - DNA, 36 bp, Homo Sapiens
aaacatcagattgtgaatctgacaacagaggcttac

SEQ ID NO: 211 - DNA, 37 bp, Homo Sapiens
aaacatcagattgtgaatctgacaacagaggcttacg

SEQ ID NO: 212 - DNA, 38 bp, Homo Sapiens
aaacatcagattgtgaatctgacaacagaggcttacga

SEQ ID NO: 213 - DNA, 39 bp, Homo Sapiens
aaacatcagattgtgaatctgacaacagaggcttacgac

SEQ ID NO: 214 - DNA, 40 bp, Homo Sapiens
aaacatcagattgtgaatctgacaacagaggcttacgacc

SEQ ID NO: 215 - DNA, 41 bp, Homo Sapiens
aaacatcagattgtgaatctgacaacagaggcttacgaccc

SEQ ID NO: 216 - DNA, 42 bp, Homo Sapiens
aaacatcagattgtgaatctgacaacagaggcttacgacccc

SEQ ID NO: 217 - DNA, 43 bp, Homo Sapiens
aaacatcagattgtgaatctgacaacagaggcttacgacccct

SEQ ID NO: 218 - DNA, 44 bp, Homo Sapiens
aaacatcagattgtgaatctgacaacagaggcttacgacccctt

SEQ ID NO: 219 - DNA, 45 bp, Homo Sapiens
aaacatcagattgtgaatctgacaacagaggcttacgacccctta

SEQ ID NO: 220 - DNA, 46 bp, Homo Sapiens
aaacatcagattgtgaatctgacaacagaggcttacgaccccttat

SEQ ID NO: 221 - DNA, 47 bp, Homo Sapiens
aaacatcagattgtgaatctgacaacagaggcttacgaccccttatt

SEQ ID NO: 222 - DNA, 48 bp, Homo Sapiens
aaacatcagattgtgaatctgacaacagaggcttacgaccccttattt

SEQ ID NO: 223 - DNA, 16 bp, Homo Sapiens
aaaccaggggtcgcga

SEQ ID NO: 224 - DNA, 20 bp, Homo Sapiens
aaaccaggggtcgcgagttc

SEQ ID NO: 225 - DNA, 21 bp, Homo Sapiens
aaaccaggggtcgcgagttca

SEQ ID NO: 226 - DNA, 30 bp, Homo Sapiens
aaaccaggggtcgcgagttcaaatctcgct

SEQ ID NO: 227 - DNA, 35 bp, Homo Sapiens
aaaccaggggtcgcgagttcaaatctcgctggggc

SEQ ID NO: 228 - DNA, 37 bp, Homo Sapiens
aaaccaggggtcgcgagttcaaatctcgctggggcct

SEQ ID NO: 229 - DNA, 38 bp, Homo Sapiens
aaaccaggggtcgcgagttcaaatctcgctggggcctc

SEQ ID NO: 230 - DNA, 39 bp, Homo Sapiens
aaaccaggggtcgcgagttcaaatctcgctggggcctcc

SEQ ID NO: 231 - DNA, 37 bp, Homo Sapiens
aaaccaggggtcgcgagttcaattctcgctggggcct

SEQ ID NO: 232 - DNA, 37 bp, Homo Sapiens
aaaccaggggtcgcgagttcgatcctcgctggggcct

SEQ ID NO: 233 - DNA, 39 bp, Homo Sapiens
aaaccaggggtcgcgagttcgatcctcgctggggcctcc

SEQ ID NO: 234 - DNA, 18 bp, Homo Sapiens
aaaccatcctctgctacc

SEQ ID NO: 235 - DNA, 19 bp, Homo Sapiens
aaaccatcctctgctacca

SEQ ID NO: 236 - DNA, 16 bp, Homo Sapiens
aaaccatttcataact

SEQ ID NO: 237 - DNA, 17 bp, Homo Sapiens
aaaccatttcataactt

SEQ ID NO: 238 - DNA, 20 bp, Homo Sapiens
aaaccatttcataactttgt

SEQ ID NO: 239 - DNA, 21 bp, Homo Sapiens
aaaccatttcataactttgtc

SEQ ID NO: 240 - DNA, 22 bp, Homo Sapiens
aaaccatttcataactttgtca

SEQ ID NO: 241 - DNA, 23 bp, Homo Sapiens
aaaccatttcataactttgtcaa

SEQ ID NO: 242 - DNA, 25 bp, Homo Sapiens
aaaccatttcataactttgtcaaag

SEQ ID NO: 243 - DNA, 28 bp, Homo Sapiens
aaaccatttcataactttgtcaaagtta

SEQ ID NO: 244 - DNA, 33 bp, Homo Sapiens
aaaccatttcataactttgtcaaagttaaatta

SEQ ID NO: 245 - DNA, 38 bp, Homo Sapiens
aaaccatttcataactttgtcaaagttaaattataggc

SEQ ID NO: 246 - DNA, 39 bp, Homo Sapiens
aaaccatttcataactttgtcaaagttaaattataggct

SEQ ID NO: 247 - DNA, 17 bp, Homo Sapiens
aaacccccttatttcta

SEQ ID NO: 248 - DNA, 18 bp, Homo Sapiens
aaacccccttatttctac

SEQ ID NO: 249 - DNA, 19 bp, Homo Sapiens
aaacccccttatttctacc

SEQ ID NO: 250 - DNA, 20 bp, Homo Sapiens
aaacccccttatttctacca

SEQ ID NO: 251 - DNA, 21 bp, Homo Sapiens
aaaccgaagatcacgggttcg

SEQ ID NO: 252 - DNA, 37 bp, Homo Sapiens
aaaccgaagatcacgggttcgaaccccgtccgtgcct

SEQ ID NO: 253 - DNA, 38 bp, Homo Sapiens
aaaccgaagatcacgggttcgaaccccgtccgtgcctc

SEQ ID NO: 254 - DNA, 39 bp, Homo Sapiens
aaaccgaagatcacgggttcgaaccccgtccgtgcctcc

SEQ ID NO: 255 - DNA, 40 bp, Homo Sapiens
aaaccgaagatcacgggttcgaaccccgtccgtgcctcca

SEQ ID NO: 256 - DNA, 18 bp, Homo Sapiens
aaaccgaagatcgcgggt

SEQ ID NO: 257 - DNA, 20 bp, Homo Sapiens
aaaccgaagatcgcgggttc

SEQ ID NO: 258 - DNA, 21 bp, Homo Sapiens
aaaccgaagatcgcgggttcg

SEQ ID NO: 259 - DNA, 22 bp, Homo Sapiens
aaaccgaagatcgcgggttcga

SEQ ID NO: 260 - DNA, 24 bp, Homo Sapiens
aaaccgaagatcgcgggttcgaac

SEQ ID NO: 261 - DNA, 25 bp, Homo Sapiens
aaaccgaagatcgcgggttcgaacc

SEQ ID NO: 262 - DNA, 37 bp, Homo Sapiens
aaaccgaagatcgcgggttcgaaccccgtccgtgcct

SEQ ID NO: 263 - DNA, 38 bp, Homo Sapiens
aaaccgaagatcgcgggttcgaaccccgtccgtgcctc

SEQ ID NO: 264 - DNA, 39 bp, Homo Sapiens
aaaccgaagatcgcgggttcgaaccccgtccgtgcctcc

SEQ ID NO: 265 - DNA, 40 bp, Homo Sapiens
aaaccgaagatcgcgggttcgaaccccgtccgtgcctcca

SEQ ID NO: 266 - DNA, 16 bp, Homo Sapiens
aaaccggagatgaaaa

SEQ ID NO: 267 - DNA, 17 bp, Homo Sapiens
aaaccggagatgaaaac

SEQ ID NO: 268 - DNA, 18 bp, Homo Sapiens
aaaccggagatgaaaacc

SEQ ID NO: 269 - DNA, 19 bp, Homo Sapiens
aaaccggagatgaaaacct

SEQ ID NO: 270 - DNA, 31 bp, Homo Sapiens
aaaccggagatgaaaacctttttccaaggac

SEQ ID NO: 271 - DNA, 32 bp, Homo Sapiens
aaaccggagatgaaaacctttttccaaggaca

SEQ ID NO: 272 - DNA, 33 bp, Homo Sapiens
aaaccggagatgaaaacctttttccaaggacac

SEQ ID NO: 273 - DNA, 34 bp, Homo Sapiens
aaaccggagatgaaaacctttttccaaggacacc

SEQ ID NO: 274 - DNA, 35 bp, Homo Sapiens
aaaccggagatgaaaacctttttccaaggacacca

SEQ ID NO: 275 - DNA, 18 bp, Homo Sapiens
aaaccgggcagaagcacc

SEQ ID NO: 276 - DNA, 19 bp, Homo Sapiens
aaaccgggcagaagcacca

SEQ ID NO: 277 - DNA, 16 bp, Homo Sapiens
aaaccgggcggaaaca

SEQ ID NO: 278 - DNA, 17 bp, Homo Sapiens
aaaccgggcggaaacac

SEQ ID NO: 279 - DNA, 18 bp, Homo Sapiens
aaaccgggcggaaacacc

SEQ ID NO: 280 - DNA, 19 bp, Homo Sapiens
aaaccgggcggaaacacca

SEQ ID NO: 281 - DNA, 16 bp, Homo Sapiens
aaacctgccggggctt

SEQ ID NO: 282 - DNA, 17 bp, Homo Sapiens
aaacctgccggggcttc

SEQ ID NO: 283 - DNA, 18 bp, Homo Sapiens
aaacctgccggggcttcc

SEQ ID NO: 284 - DNA, 19 bp, Homo Sapiens
aaacctgccggggcttcca

SEQ ID NO: 285 - DNA, 21 bp, Homo Sapiens
aaacctttttccaaggacacc

SEQ ID NO: 286 - DNA, 22 bp, Homo Sapiens
aaacctttttccaaggacacca

SEQ ID NO: 287 - DNA, 17 bp, Homo Sapiens
aaacgaatgatttcgac

SEQ ID NO: 288 - DNA, 18 bp, Homo Sapiens
aaacgaatgatttcgact

SEQ ID NO: 289 - DNA, 19 bp, Homo Sapiens
aaacgaatgatttcgactc

SEQ ID NO: 290 - DNA, 20 bp, Homo Sapiens
aaacgaatgatttcgactca

SEQ ID NO: 291 - DNA, 21 bp, Homo Sapiens
aaacgaatgatttcgactcat

SEQ ID NO: 292 - DNA, 23 bp, Homo Sapiens
aaacgaatgatttcgactcatta

SEQ ID NO: 293 - DNA, 24 bp, Homo Sapiens
aaacgaatgatttcgactcattaa

SEQ ID NO: 294 - DNA, 25 bp, Homo Sapiens
aaacgaatgatttcgactcattaaa

SEQ ID NO: 295 - DNA, 26 bp, Homo Sapiens
aaacgaatgatttcgactcattaaat

SEQ ID NO: 296 - DNA, 30 bp, Homo Sapiens
aaacgaatgatttcgactcattaaattatg

SEQ ID NO: 297 - DNA, 32 bp, Homo Sapiens
aaacgaatgatttcgactcattaaattatgat

SEQ ID NO: 298 - DNA, 33 bp, Homo Sapiens
aaacgaatgatttcgactcattaaattatgata

SEQ ID NO: 299 - DNA, 41 bp, Homo Sapiens
aaacgaatgatttcgactcattaaattatgataatcatatt

SEQ ID NO: 300 - DNA, 44 bp, Homo Sapiens
aaacgaatgatttcgactcattaaattatgataatcatatttac

SEQ ID NO: 301 - DNA, 48 bp, Homo Sapiens
aaacgaatgatttcgactcattaaattatgataatcatatttaccaac

SEQ ID NO: 302 - DNA, 16 bp, Homo Sapiens
aaacttaaaactttac

SEQ ID NO: 303 - DNA, 17 bp, Homo Sapiens
aaacttaaaactttaca

SEQ ID NO: 304 - DNA, 28 bp, Homo Sapiens
aaacttaaaactttacaatcagaggttc

SEQ ID NO: 305 - DNA, 22 bp, Homo Sapiens
aaacttaaaactttacagtcag

SEQ ID NO: 306 - DNA, 23 bp, Homo Sapiens
aaacttaaaactttacagtcaga

SEQ ID NO: 307 - DNA, 24 bp, Homo Sapiens
aaacttaaaactttacagtcagag

SEQ ID NO: 308 - DNA, 25 bp, Homo Sapiens
aaacttaaaactttacagtcagagg

SEQ ID NO: 309 - DNA, 26 bp, Homo Sapiens
aaacttaaaactttacagtcagaggt

SEQ ID NO: 310 - DNA, 27 bp, Homo Sapiens
aaacttaaaactttacagtcagaggtt

SEQ ID NO: 311 - DNA, 28 bp, Homo Sapiens
aaacttaaaactttacagtcagaggttc

SEQ ID NO: 312 - DNA, 39 bp, Homo Sapiens
aaacttaaaactttacagtcagaggttcaattcctcttc

SEQ ID NO: 313 - DNA, 45 bp, Homo Sapiens
aaacttaaaactttacagtcagaggttcaattcctcttcttaaca

SEQ ID NO: 314 - DNA, 47 bp, Homo Sapiens
aaacttaaaactttacagtcagaggttcaattcctcttcttaacacc

SEQ ID NO: 315 - DNA, 17 bp, Homo Sapiens
aaactttacagtcagag

SEQ ID NO: 316 - DNA, 18 bp, Homo Sapiens
aaactttacagtcagagg

SEQ ID NO: 317 - DNA, 19 bp, Homo Sapiens
aaactttacagtcagaggt

SEQ ID NO: 318 - DNA, 20 bp, Homo Sapiens
aaactttacagtcagaggtt

SEQ ID NO: 319 - DNA, 21 bp, Homo Sapiens
aaactttacagtcagaggttc

SEQ ID NO: 320 - DNA, 27 bp, Homo Sapiens
aaactttacagtcagaggttcaattcc

SEQ ID NO: 321 - DNA, 16 bp, Homo Sapiens
aaagacaggggttagg

SEQ ID NO: 322 - DNA, 17 bp, Homo Sapiens
aaagacaggggttaggc

SEQ ID NO: 323 - DNA, 18 bp, Homo Sapiens
aaagacaggggttaggcc

SEQ ID NO: 324 - DNA, 19 bp, Homo Sapiens
aaagacaggggttaggcct

SEQ ID NO: 325 - DNA, 20 bp, Homo Sapiens
aaagacaggggttaggcctc

SEQ ID NO: 326 - DNA, 21 bp, Homo Sapiens
aaagacaggggttaggcctct

SEQ ID NO: 327 - DNA, 22 bp, Homo Sapiens
aaagacaggggttaggcctctt

SEQ ID NO: 328 - DNA, 23 bp, Homo Sapiens
aaagacaggggttaggcctcttt

SEQ ID NO: 329 - DNA, 24 bp, Homo Sapiens
aaagacaggggttaggcctctttt

SEQ ID NO: 330 - DNA, 28 bp, Homo Sapiens
aaagacaggggttaggcctctttttacc

SEQ ID NO: 331 - DNA, 29 bp, Homo Sapiens
aaagacaggggttaggcctctttttacca

SEQ ID NO: 332 - DNA, 30 bp, Homo Sapiens
aaagacaggggttaggcctctttttaccac

SEQ ID NO: 333 - DNA, 31 bp, Homo Sapiens
aaagacaggggttaggcctctttttaccacc

SEQ ID NO: 334 - DNA, 32 bp, Homo Sapiens
aaagacaggggttaggcctctttttaccacca

SEQ ID NO: 335 - DNA, 16 bp, Homo Sapiens
aaagactttttctctg

SEQ ID NO: 336 - DNA, 17 bp, Homo Sapiens
aaagactttttctctga

SEQ ID NO: 337 - DNA, 18 bp, Homo Sapiens
aaagactttttctctgac

SEQ ID NO: 338 - DNA, 19 bp, Homo Sapiens
aaagactttttctctgacc

SEQ ID NO: 339 - DNA, 20 bp, Homo Sapiens
aaagactttttctctgacca

SEQ ID NO: 340 - DNA, 16 bp, Homo Sapiens
aaagagttactttgat

SEQ ID NO: 341 - DNA, 20 bp, Homo Sapiens
aaagagttactttgatagag

SEQ ID NO: 342 - DNA, 21 bp, Homo Sapiens
aaagagttactttgatagagt

SEQ ID NO: 343 - DNA, 34 bp, Homo Sapiens
aaagagttactttgatagagtaaataataggagc

SEQ ID NO: 344 - DNA, 35 bp, Homo Sapiens
aaagagttactttgatagagtaaataataggagct

SEQ ID NO: 345 - DNA, 16 bp, Homo Sapiens
aaagattaagagaacc

SEQ ID NO: 346 - DNA, 17 bp, Homo Sapiens
aaagattaagagaacca

SEQ ID NO: 347 - DNA, 18 bp, Homo Sapiens
aaagattaagagaaccaa

SEQ ID NO: 348 - DNA, 19 bp, Homo Sapiens
aaagattaagagaaccaac

SEQ ID NO: 349 - DNA, 20 bp, Homo Sapiens
aaagattaagagaaccaaca

SEQ ID NO: 350 - DNA, 21 bp, Homo Sapiens
aaagattaagagaaccaacac

SEQ ID NO: 351 - DNA, 22 bp, Homo Sapiens
aaagattaagagaaccaacacc

SEQ ID NO: 352 - DNA, 23 bp, Homo Sapiens
aaagattaagagaaccaacacct

SEQ ID NO: 353 - DNA, 24 bp, Homo Sapiens
aaagattaagagaaccaacacctc

SEQ ID NO: 354 - DNA, 25 bp, Homo Sapiens
aaagattaagagaaccaacacctct

SEQ ID NO: 355 - DNA, 26 bp, Homo Sapiens
aaagattaagagaaccaacacctctt

SEQ ID NO: 356 - DNA, 27 bp, Homo Sapiens
aaagattaagagaaccaacacctcttt

SEQ ID NO: 357 - DNA, 28 bp, Homo Sapiens
aaagattaagagaaccaacacctcttta

SEQ ID NO: 358 - DNA, 30 bp, Homo Sapiens
aaagattaagagaaccaacacctctttaca

SEQ ID NO: 359 - DNA, 31 bp, Homo Sapiens
aaagattaagagaaccaacacctctttacag

SEQ ID NO: 360 - DNA, 33 bp, Homo Sapiens
aaagattaagagaaccaacacctctttacagtg

SEQ ID NO: 361 - DNA, 34 bp, Homo Sapiens
aaagattaagagaaccaacacctctttacagtga

SEQ ID NO: 362 - DNA, 35 bp, Homo Sapiens
aaagattaagagaaccaacacctctttacagtgac

SEQ ID NO: 363 - DNA, 36 bp, Homo Sapiens
aaagattaagagaaccaacacctctttacagtgacc

SEQ ID NO: 364 - DNA, 37 bp, Homo Sapiens
aaagattaagagaaccaacacctctttacagtgacca

SEQ ID NO: 365 - DNA, 31 bp, Homo Sapiens
aaagattggtggttcgagcccacccagggac

SEQ ID NO: 366 - DNA, 16 bp, Homo Sapiens
aaagcaatacactgaa

SEQ ID NO: 367 - DNA, 27 bp, Homo Sapiens
aaagcaatacactgaaaatgtttagac

SEQ ID NO: 368 - DNA, 29 bp, Homo Sapiens
aaagcaatacactgaaaatgtttagacgg

SEQ ID NO: 369 - DNA, 31 bp, Homo Sapiens
aaagcaatacactgaaaatgtttagacgggc

SEQ ID NO: 370 - DNA, 32 bp, Homo Sapiens
aaagcaatacactgaaaatgtttagacgggct

SEQ ID NO: 371 - DNA, 33 bp, Homo Sapiens
aaagcaatacactgaaaatgtttagacgggctc

SEQ ID NO: 372 - DNA, 34 bp, Homo Sapiens
aaagcaatacactgaaaatgtttagacgggctca

SEQ ID NO: 373 - DNA, 35 bp, Homo Sapiens
aaagcaatacactgaaaatgtttagacgggctcac

SEQ ID NO: 374 - DNA, 36 bp, Homo Sapiens
aaagcaatacactgaaaatgtttagacgggctcaca

SEQ ID NO: 375 - DNA, 37 bp, Homo Sapiens
aaagcaatacactgaaaatgtttagacgggctcacat

SEQ ID NO: 376 - DNA, 38 bp, Homo Sapiens
aaagcaatacactgaaaatgtttagacgggctcacatc

SEQ ID NO: 377 - DNA, 39 bp, Homo Sapiens
aaagcaatacactgaaaatgtttagacgggctcacatca

SEQ ID NO: 378 - DNA, 41 bp, Homo Sapiens
aaagcaatacactgaaaatgtttagacgggctcacatcacc

SEQ ID NO: 379 - DNA, 42 bp, Homo Sapiens
aaagcaatacactgaaaatgtttagacgggctcacatcaccc

SEQ ID NO: 380 - DNA, 43 bp, Homo Sapiens
aaagcaatacactgaaaatgtttagacgggctcacatcacccc

SEQ ID NO: 381 - DNA, 44 bp, Homo Sapiens
aaagcaatacactgaaaatgtttagacgggctcacatcacccca

SEQ ID NO: 382 - DNA, 16 bp, Homo Sapiens
aaagcacccaacttac

SEQ ID NO: 383 - DNA, 17 bp, Homo Sapiens
aaagcacccaacttaca

SEQ ID NO: 384 - DNA, 18 bp, Homo Sapiens
aaagcacccaacttacac

SEQ ID NO: 385 - DNA, 19 bp, Homo Sapiens
aaagcacccaacttacact

SEQ ID NO: 386 - DNA, 20 bp, Homo Sapiens
aaagcacccaacttacactt

SEQ ID NO: 387 - DNA, 21 bp, Homo Sapiens
aaagcacccaacttacactta

SEQ ID NO: 388 - DNA, 31 bp, Homo Sapiens
aaagcacccaacttacacttaggagatttca

SEQ ID NO: 389 - DNA, 32 bp, Homo Sapiens
aaagcacccaacttacacttaggagatttcaa

SEQ ID NO: 390 - DNA, 33 bp, Homo Sapiens
aaagcacccaacttacacttaggagatttcaac

SEQ ID NO: 391 - DNA, 34 bp, Homo Sapiens
aaagcacccaacttacacttaggagatttcaact

SEQ ID NO: 392 - DNA, 35 bp, Homo Sapiens
aaagcacccaacttacacttaggagatttcaactt

SEQ ID NO: 393 - DNA, 37 bp, Homo Sapiens
aaagcacccaacttacacttaggagatttcaacttaa

SEQ ID NO: 394 - DNA, 38 bp, Homo Sapiens
aaagcacccaacttacacttaggagatttcaacttaac

SEQ ID NO: 395 - DNA, 44 bp, Homo Sapiens
aaagcacccaacttacacttaggagatttcaacttaacttgacc

SEQ ID NO: 396 - DNA, 47 bp, Homo Sapiens
aaagcacccaacttacacttaggagatttcaacttaacttgaccgct

SEQ ID NO: 397 - DNA, 36 bp, Homo Sapiens
aaagccctcagtaagttgcaatacttaatttctgcc

SEQ ID NO: 398 - DNA, 37 bp, Homo Sapiens
aaagccctcagtaagttgcaatacttaatttctgcca

SEQ ID NO: 399 - DNA, 16 bp, Homo Sapiens
aaagctcacaagaact

SEQ ID NO: 400 - DNA, 17 bp, Homo Sapiens
aaagctcacaagaactg

SEQ ID NO: 401 - DNA, 18 bp, Homo Sapiens
aaagctcacaagaactgc

SEQ ID NO: 402 - DNA, 19 bp, Homo Sapiens
aaagctcacaagaactgct

SEQ ID NO: 403 - DNA, 20 bp, Homo Sapiens
aaagctcacaagaactgcta

SEQ ID NO: 404 - DNA, 21 bp, Homo Sapiens
aaagctcacaagaactgctaa

SEQ ID NO: 405 - DNA, 22 bp, Homo Sapiens
aaagctcacaagaactgctaac

SEQ ID NO: 406 - DNA, 23 bp, Homo Sapiens
aaagctcacaagaactgctaact

SEQ ID NO: 407 - DNA, 24 bp, Homo Sapiens
aaagctcacaagaactgctaactc

SEQ ID NO: 408 - DNA, 25 bp, Homo Sapiens
aaagctcacaagaactgctaactca

SEQ ID NO: 409 - DNA, 26 bp, Homo Sapiens
aaagctcacaagaactgctaactcat

SEQ ID NO: 410 - DNA, 27 bp, Homo Sapiens
aaagctcacaagaactgctaactcatg

SEQ ID NO: 411 - DNA, 28 bp, Homo Sapiens
aaagctcacaagaactgctaactcatgc

SEQ ID NO: 412 - DNA, 29 bp, Homo Sapiens
aaagctcacaagaactgctaactcatgcc

SEQ ID NO: 413 - DNA, 30 bp, Homo Sapiens
aaagctcacaagaactgctaactcatgccc

SEQ ID NO: 414 - DNA, 31 bp, Homo Sapiens
aaagctcacaagaactgctaactcatgcccc

SEQ ID NO: 415 - DNA, 32 bp, Homo Sapiens
aaagctcacaagaactgctaactcatgccccc

SEQ ID NO: 416 - DNA, 33 bp, Homo Sapiens
aaagctcacaagaactgctaactcatgccccca

SEQ ID NO: 417 - DNA, 34 bp, Homo Sapiens
aaagctcacaagaactgctaactcatgcccccat

SEQ ID NO: 418 - DNA, 35 bp, Homo Sapiens
aaagctcacaagaactgctaactcatgcccccatg

SEQ ID NO: 419 - DNA, 36 bp, Homo Sapiens
aaagctcacaagaactgctaactcatgcccccatgt

SEQ ID NO: 420 - DNA, 37 bp, Homo Sapiens
aaagctcacaagaactgctaactcatgcccccatgtc

SEQ ID NO: 421 - DNA, 38 bp, Homo Sapiens
aaagctcacaagaactgctaactcatgcccccatgtct

SEQ ID NO: 422 - DNA, 40 bp, Homo Sapiens
aaagctcacaagaactgctaactcatgcccccatgtctaa

SEQ ID NO: 423 - DNA, 41 bp, Homo Sapiens
aaagctcacaagaactgctaactcatgcccccatgtctaac

SEQ ID NO: 424 - DNA, 42 bp, Homo Sapiens
aaagctcacaagaactgctaactcatgcccccatgtctaaca

SEQ ID NO: 425 - DNA, 44 bp, Homo Sapiens
aaagctcacaagaactgctaactcatgcccccatgtctaacaac

SEQ ID NO: 426 - DNA, 45 bp, Homo Sapiens
aaagctcacaagaactgctaactcatgcccccatgtctaacaaca

SEQ ID NO: 427 - DNA, 46 bp, Homo Sapiens
aaagctcacaagaactgctaactcatgcccccatgtctaacaacat

SEQ ID NO: 428 - DNA, 47 bp, Homo Sapiens
aaagctcacaagaactgctaactcatgcccccatgtctaacaacatg

SEQ ID NO: 429 - DNA, 48 bp, Homo Sapiens
aaagctcacaagaactgctaactcatgcccccatgtctaacaacatgg

SEQ ID NO: 430 - DNA, 17 bp, Homo Sapiens
aaaggataacagctatc

SEQ ID NO: 431 - DNA, 25 bp, Homo Sapiens
aaaggataacagctatccattggtc

SEQ ID NO: 432 - DNA, 26 bp, Homo Sapiens
aaaggataacagctatccattggtct

SEQ ID NO: 433 - DNA, 27 bp, Homo Sapiens
aaaggataacagctatccattggtctt

SEQ ID NO: 434 - DNA, 28 bp, Homo Sapiens
aaaggataacagctatccattggtctta

SEQ ID NO: 435 - DNA, 29 bp, Homo Sapiens
aaaggataacagctatccattggtcttag

SEQ ID NO: 436 - DNA, 35 bp, Homo Sapiens
aaaggataacagctatccattggtcttaggcccca

SEQ ID NO: 437 - DNA, 16 bp, Homo Sapiens
aaaggtccccggttcg

SEQ ID NO: 438 - DNA, 31 bp, Homo Sapiens
aaaggtccccggttcgaaaccgggcggaaac

SEQ ID NO: 439 - DNA, 34 bp, Homo Sapiens
aaaggtccccggttcgaaaccgggcggaaacacc

SEQ ID NO: 440 - DNA, 22 bp, Homo Sapiens
aaaggtccccggttcgaaactg

SEQ ID NO: 441 - DNA, 34 bp, Homo Sapiens
aaaggtccctggttcaatcccgggtttcggcacc

SEQ ID NO: 442 - DNA, 16 bp, Homo Sapiens
aaaggtccctggttcg

SEQ ID NO: 443 - DNA, 31 bp, Homo Sapiens
aaaggtccctggttcgatcccgggtttcggc

SEQ ID NO: 444 - DNA, 33 bp, Homo Sapiens
aaaggtccctggttcgatcccgggtttcggcac

SEQ ID NO: 445 - DNA, 34 bp, Homo Sapiens
aaaggtccctggttcgatcccgggtttcggcacc

SEQ ID NO: 446 - DNA, 35 bp, Homo Sapiens
aaaggtccctggttcgatcccgggtttcggcacca

SEQ ID NO: 447 - DNA, 31 bp, Homo Sapiens
aaaggttccgggttcgagtcccggcggagtc

SEQ ID NO: 448 - DNA, 32 bp, Homo Sapiens
aaaggttccgggttcgagtcccggcggagtcg

SEQ ID NO: 449 - DNA, 33 bp, Homo Sapiens
aaaggttccgggttcgagtcccggcggagtcgc

SEQ ID NO: 450 - DNA, 34 bp, Homo Sapiens
aaaggttccgggttcgagtcccggcggagtcgcc

SEQ ID NO: 451 - DNA, 35 bp, Homo Sapiens
aaaggttccgggttcgagtcccggcggagtcgcca

SEQ ID NO: 452 - DNA, 16 bp, Homo Sapiens
aaaggttggtggttcg

SEQ ID NO: 453 - DNA, 31 bp, Homo Sapiens
aaaggttggtggttcgagcccacccagggac

SEQ ID NO: 454 - DNA, 33 bp, Homo Sapiens
aaaggttggtggttcgagcccacccagggacgc

SEQ ID NO: 455 - DNA, 34 bp, Homo Sapiens
aaaggttggtggttcgagcccacccagggacgcc

SEQ ID NO: 456 - DNA, 35 bp, Homo Sapiens
aaaggttggtggttcgagcccacccagggacgcca

SEQ ID NO: 457 - DNA, 34 bp, Homo Sapiens
aaaggttggtggttcgatcccacccagggacgcc

SEQ ID NO: 458 - DNA, 33 bp, Homo Sapiens
aaaggttgtgggttcgaatcccaccagagtcgc

SEQ ID NO: 459 - DNA, 34 bp, Homo Sapiens
aaaggttgtgggttcgaatcccaccagagtcgcc

SEQ ID NO: 460 - DNA, 35 bp, Homo Sapiens
aaaggttgtgggttcgaatcccaccagagtcgcca

SEQ ID NO: 461 - DNA, 33 bp, Homo Sapiens
aaaggttgtgggttcgagtcccaccagagtcgc

SEQ ID NO: 462 - DNA, 34 bp, Homo Sapiens
aaaggttgtgggttcgagtcccaccagagtcgcc

SEQ ID NO: 463 - DNA, 16 bp, Homo Sapiens
aaagtcatggaggcca

SEQ ID NO: 464 - DNA, 18 bp, Homo Sapiens
aaagtcatggaggccatg

SEQ ID NO: 465 - DNA, 21 bp, Homo Sapiens
aaagtcatggaggccatgggg

SEQ ID NO: 466 - DNA, 22 bp, Homo Sapiens
aaagtcatggaggccatggggt

SEQ ID NO: 467 - DNA, 23 bp, Homo Sapiens
aaagtcatggaggccatggggtt

SEQ ID NO: 468 - DNA, 24 bp, Homo Sapiens
aaagtcatggaggccatggggttg

SEQ ID NO: 469 - DNA, 25 bp, Homo Sapiens
aaagtcatggaggccatggggttgg

SEQ ID NO: 470 - DNA, 16 bp, Homo Sapiens
aaagtggctgatttgc

SEQ ID NO: 471 - DNA, 21 bp, Homo Sapiens
aaagtggctgatttgcgttca

SEQ ID NO: 472 - DNA, 28 bp, Homo Sapiens
aaagtggctgatttgcgttcagttgatg

SEQ ID NO: 473 - DNA, 35 bp, Homo Sapiens
aaagtggctgatttgcgttcagttgatgcagagtg

SEQ ID NO: 474 - DNA, 16 bp, Homo Sapiens
aaagttaaattatagg

SEQ ID NO: 475 - DNA, 17 bp, Homo Sapiens
aaagttaaattataggc

SEQ ID NO: 476 - DNA, 18 bp, Homo Sapiens
aaagttaaattataggct

SEQ ID NO: 477 - DNA, 19 bp, Homo Sapiens
aaagttaaattataggcta

SEQ ID NO: 478 - DNA, 20 bp, Homo Sapiens
aaagttaaattataggctaa

SEQ ID NO: 479 - DNA, 21 bp, Homo Sapiens
aaagttaaattataggctaaa

SEQ ID NO: 480 - DNA, 23 bp, Homo Sapiens
aaagttaaattataggctaaatc

SEQ ID NO: 481 - DNA, 24 bp, Homo Sapiens
aaagttaaattataggctaaatcc

SEQ ID NO: 482 - DNA, 25 bp, Homo Sapiens
aaagttaaattataggctaaatcct

SEQ ID NO: 483 - DNA, 28 bp, Homo Sapiens
aaagttaaattataggctaaatcctata

SEQ ID NO: 484 - DNA, 30 bp, Homo Sapiens
aaagttaaattataggctaaatcctatata

SEQ ID NO: 485 - DNA, 34 bp, Homo Sapiens
aaagttaaattataggctaaatcctatatatctt

SEQ ID NO: 486 - DNA, 16 bp, Homo Sapiens
aaataagctatcgggc

SEQ ID NO: 487 - DNA, 17 bp, Homo Sapiens
aaataagctatcgggcc

SEQ ID NO: 488 - DNA, 18 bp, Homo Sapiens
aaataagctatcgggccc

SEQ ID NO: 489 - DNA, 19 bp, Homo Sapiens
aaataagctatcgggccca

SEQ ID NO: 490 - DNA, 20 bp, Homo Sapiens
aaataagctatcgggcccat

SEQ ID NO: 491 - DNA, 21 bp, Homo Sapiens
aaataagctatcgggcccata

SEQ ID NO: 492 - DNA, 22 bp, Homo Sapiens
aaataagctatcgggcccatac

SEQ ID NO: 493 - DNA, 23 bp, Homo Sapiens
aaataagctatcgggcccatacc

SEQ ID NO: 494 - DNA, 24 bp, Homo Sapiens
aaataagctatcgggcccataccc

SEQ ID NO: 495 - DNA, 25 bp, Homo Sapiens
aaataagctatcgggcccatacccc

SEQ ID NO: 496 - DNA, 26 bp, Homo Sapiens
aaataagctatcgggcccataccccg

SEQ ID NO: 497 - DNA, 27 bp, Homo Sapiens
aaataagctatcgggcccataccccga

SEQ ID NO: 498 - DNA, 28 bp, Homo Sapiens
aaataagctatcgggcccataccccgaa

SEQ ID NO: 499 - DNA, 29 bp, Homo Sapiens
aaataagctatcgggcccataccccgaaa

SEQ ID NO: 500 - DNA, 30 bp, Homo Sapiens
aaataagctatcgggcccataccccgaaaa

SEQ ID NO: 501 - DNA, 31 bp, Homo Sapiens
aaataagctatcgggcccataccccgaaaat

SEQ ID NO: 502 - DNA, 32 bp, Homo Sapiens
aaataagctatcgggcccataccccgaaaatg

SEQ ID NO: 503 - DNA, 33 bp, Homo Sapiens
aaataagctatcgggcccataccccgaaaatgt

SEQ ID NO: 504 - DNA, 34 bp, Homo Sapiens
aaataagctatcgggcccataccccgaaaatgtt

SEQ ID NO: 505 - DNA, 35 bp, Homo Sapiens
aaataagctatcgggcccataccccgaaaatgttg

SEQ ID NO: 506 - DNA, 36 bp, Homo Sapiens
aaataagctatcgggcccataccccgaaaatgttgg

SEQ ID NO: 507 - DNA, 37 bp, Homo Sapiens
aaataagctatcgggcccataccccgaaaatgttggt

SEQ ID NO: 508 - DNA, 38 bp, Homo Sapiens
aaataagctatcgggcccataccccgaaaatgttggtt

SEQ ID NO: 509 - DNA, 39 bp, Homo Sapiens
aaataagctatcgggcccataccccgaaaatgttggtta

SEQ ID NO: 510 - DNA, 40 bp, Homo Sapiens
aaataagctatcgggcccataccccgaaaatgttggttat

SEQ ID NO: 511 - DNA, 43 bp, Homo Sapiens
aaataagctatcgggcccataccccgaaaatgttggttatacc

SEQ ID NO: 512 - DNA, 16 bp, Homo Sapiens
aaataataggagctta

SEQ ID NO: 513 - DNA, 17 bp, Homo Sapiens
aaataataggagcttaa

SEQ ID NO: 514 - DNA, 19 bp, Homo Sapiens
aaataataggagcttaaac

SEQ ID NO: 515 - DNA, 20 bp, Homo Sapiens
aaataataggagcttaaacc

SEQ ID NO: 516 - DNA, 21 bp, Homo Sapiens
aaataataggagcttaaaccc

SEQ ID NO: 517 - DNA, 22 bp, Homo Sapiens
aaataataggagcttaaacccc

SEQ ID NO: 518 - DNA, 23 bp, Homo Sapiens
aaataataggagcttaaaccccc

SEQ ID NO: 519 - DNA, 24 bp, Homo Sapiens
aaataataggagcttaaaccccct

SEQ ID NO: 520 - DNA, 25 bp, Homo Sapiens
aaataataggagcttaaaccccctt

SEQ ID NO: 521 - DNA, 26 bp, Homo Sapiens
aaataataggagcttaaaccccctta

SEQ ID NO: 522 - DNA, 28 bp, Homo Sapiens
aaataataggagcttaaacccccttatt

SEQ ID NO: 523 - DNA, 29 bp, Homo Sapiens
aaataataggagcttaaacccccttattt

SEQ ID NO: 524 - DNA, 30 bp, Homo Sapiens
aaataataggagcttaaacccccttatttc

SEQ ID NO: 525 - DNA, 31 bp, Homo Sapiens
aaataataggagcttaaacccccttatttct

SEQ ID NO: 526 - DNA, 32 bp, Homo Sapiens
aaataataggagcttaaacccccttatttcta

SEQ ID NO: 527 - DNA, 33 bp, Homo Sapiens
aaataataggagcttaaacccccttatttctac

SEQ ID NO: 528 - DNA, 34 bp, Homo Sapiens
aaataataggagcttaaacccccttatttctacc

SEQ ID NO: 529 - DNA, 35 bp, Homo Sapiens
aaataataggagcttaaacccccttatttctacca

SEQ ID NO: 530 - DNA, 19 bp, Homo Sapiens
aaatacaacgatggttttt

SEQ ID NO: 531 - DNA, 20 bp, Homo Sapiens
aaatacaacgatggtttttc

SEQ ID NO: 532 - DNA, 21 bp, Homo Sapiens
aaatacaacgatggtttttca

SEQ ID NO: 533 - DNA, 22 bp, Homo Sapiens
aaatacaacgatggtttttcat

SEQ ID NO: 534 - DNA, 24 bp, Homo Sapiens
aaatacaacgatggtttttcatat

SEQ ID NO: 535 - DNA, 25 bp, Homo Sapiens
aaatacaacgatggtttttcatatc

SEQ ID NO: 536 - DNA, 34 bp, Homo Sapiens
aaatacaacgatggtttttcatatcattggtcgt

SEQ ID NO: 537 - DNA, 39 bp, Homo Sapiens
aaatacaacgatggtttttcatatcattggtcgtggttg

SEQ ID NO: 538 - DNA, 40 bp, Homo Sapiens
aaatacaacgatggtttttcatatcattggtcgtggttgt

SEQ ID NO: 539 - DNA, 41 bp, Homo Sapiens
aaatacaacgatggtttttcatatcattggtcgtggttgta

SEQ ID NO: 540 - DNA, 43 bp, Homo Sapiens
aaatacaacgatggtttttcatatcattggtcgtggttgtagt

SEQ ID NO: 541 - DNA, 44 bp, Homo Sapiens
aaatacaacgatggtttttcatatcattggtcgtggttgtagtc

SEQ ID NO: 542 - DNA, 45 bp, Homo Sapiens
aaatacaacgatggtttttcatatcattggtcgtggttgtagtcc

SEQ ID NO: 543 - DNA, 46 bp, Homo Sapiens
aaatacaacgatggtttttcatatcattggtcgtggttgtagtccg

SEQ ID NO: 544 - DNA, 47 bp, Homo Sapiens
aaatacaacgatggtttttcatatcattggtcgtggttgtagtccgt

SEQ ID NO: 545 - DNA, 48 bp, Homo Sapiens
aaatacaacgatggtttttcatatcattggtcgtggttgtagtccgtg

SEQ ID NO: 546 - DNA, 16 bp, Homo Sapiens
aaatacagaccaagag

SEQ ID NO: 547 - DNA, 17 bp, Homo Sapiens
aaatacagaccaagagc

SEQ ID NO: 548 - DNA, 18 bp, Homo Sapiens
aaatacagaccaagagcc

SEQ ID NO: 549 - DNA, 19 bp, Homo Sapiens
aaatacagaccaagagcct

SEQ ID NO: 550 - DNA, 20 bp, Homo Sapiens
aaatacagaccaagagcctt

SEQ ID NO: 551 - DNA, 21 bp, Homo Sapiens
aaatacagaccaagagccttc

SEQ ID NO: 552 - DNA, 22 bp, Homo Sapiens
aaatacagaccaagagccttca

SEQ ID NO: 553 - DNA, 27 bp, Homo Sapiens
aaatacagaccaagagccttcaaagcc

SEQ ID NO: 554 - DNA, 28 bp, Homo Sapiens
aaatacagaccaagagccttcaaagccc

SEQ ID NO: 555 - DNA, 29 bp, Homo Sapiens
aaatacagaccaagagccttcaaagccct

SEQ ID NO: 556 - DNA, 34 bp, Homo Sapiens
aaatacagaccaagagccttcaaagccctcagta

SEQ ID NO: 557 - DNA, 18 bp, Homo Sapiens
aaatagctcagttgggag

SEQ ID NO: 558 - DNA, 33 bp, Homo Sapiens
aaatagctcagttgggagagcgttagactgaag

SEQ ID NO: 559 - DNA, 35 bp, Homo Sapiens
aaatagctcagttgggagagcgttagactgaagat

SEQ ID NO: 560 - DNA, 16 bp, Homo Sapiens
aaatagtaccgttaac

SEQ ID NO: 561 - DNA, 17 bp, Homo Sapiens
aaatagtaccgttaact

SEQ ID NO: 562 - DNA, 18 bp, Homo Sapiens
aaatagtaccgttaactt

SEQ ID NO: 563 - DNA, 19 bp, Homo Sapiens
aaatagtaccgttaacttc

SEQ ID NO: 564 - DNA, 20 bp, Homo Sapiens
aaatagtaccgttaacttcc

SEQ ID NO: 565 - DNA, 21 bp, Homo Sapiens
aaatagtaccgttaacttcca

SEQ ID NO: 566 - DNA, 24 bp, Homo Sapiens
aaatagtaccgttaacttccaatt

SEQ ID NO: 567 - DNA, 25 bp, Homo Sapiens
aaatagtaccgttaacttccaatta

SEQ ID NO: 568 - DNA, 27 bp, Homo Sapiens
aaatagtaccgttaacttccaattaac

SEQ ID NO: 569 - DNA, 37 bp, Homo Sapiens
aaatagtaccgttaacttccaattaactagttttgac

SEQ ID NO: 570 - DNA, 40 bp, Homo Sapiens
aaatagtaccgttaacttccaattaactagttttgacaac

SEQ ID NO: 571 - DNA, 30 bp, Homo Sapiens
aaatatagtttaaccaaaacatcagattgt

SEQ ID NO: 572 - DNA, 31 bp, Homo Sapiens
aaatatagtttaaccaaaacatcagattgtg

SEQ ID NO: 573 - DNA, 32 bp, Homo Sapiens
aaatatagtttaaccaaaacatcagattgtga

SEQ ID NO: 574 - DNA, 35 bp, Homo Sapiens
aaatatagtttaaccaaaacatcagattgtgaatc

SEQ ID NO: 575 - DNA, 18 bp, Homo Sapiens
aaatatgtctgataaaag

SEQ ID NO: 576 - DNA, 23 bp, Homo Sapiens
aaatatgtctgataaaagagtta

SEQ ID NO: 577 - DNA, 29 bp, Homo Sapiens
aaatatgtctgataaaagagttactttga

SEQ ID NO: 578 - DNA, 30 bp, Homo Sapiens
aaatatgtctgataaaagagttactttgat

SEQ ID NO: 579 - DNA, 34 bp, Homo Sapiens
aaatatgtctgataaaagagttactttgatagag

SEQ ID NO: 580 - DNA, 19 bp, Homo Sapiens
aaatcacgtcggggtcacc

SEQ ID NO: 581 - DNA, 38 bp, Homo Sapiens
aaatccattggggtttccccgcgcaggttcgaatcctg

SEQ ID NO: 582 - DNA, 16 bp, Homo Sapiens
aaatcccggacgagcc

SEQ ID NO: 583 - DNA, 17 bp, Homo Sapiens
aaatcccggacgagccc

SEQ ID NO: 584 - DNA, 18 bp, Homo Sapiens
aaatcccggacgagcccc

SEQ ID NO: 585 - DNA, 19 bp, Homo Sapiens
aaatcccggacgagccccc

SEQ ID NO: 586 - DNA, 20 bp, Homo Sapiens
aaatcccggacgagccccca

SEQ ID NO: 587 - DNA, 18 bp, Homo Sapiens
aaatccgggtgccccctc

SEQ ID NO: 588 - DNA, 19 bp, Homo Sapiens
aaatcctatatatcttacc

SEQ ID NO: 589 - DNA, 20 bp, Homo Sapiens
aaatcctatatatcttacca

SEQ ID NO: 590 - DNA, 22 bp, Homo Sapiens
aaatctaaagacaggggttagg

SEQ ID NO: 591 - DNA, 24 bp, Homo Sapiens
aaatctaaagacaggggttaggcc

SEQ ID NO: 592 - DNA, 25 bp, Homo Sapiens
aaatctaaagacaggggttaggcct

SEQ ID NO: 593 - DNA, 26 bp, Homo Sapiens
aaatctaaagacaggggttaggcctc

SEQ ID NO: 594 - DNA, 30 bp, Homo Sapiens
aaatctaaagacaggggttaggcctctttt

SEQ ID NO: 595 - DNA, 31 bp, Homo Sapiens
aaatctaaagacaggggttaggcctcttttt

SEQ ID NO: 596 - DNA, 32 bp, Homo Sapiens
aaatctaaagacaggggttaggcctcttttta

SEQ ID NO: 597 - DNA, 34 bp, Homo Sapiens
aaatctaaagacaggggttaggcctctttttacc

SEQ ID NO: 598 - DNA, 37 bp, Homo Sapiens
aaatctaaagacaggggttaggcctctttttaccacc

SEQ ID NO: 599 - DNA, 38 bp, Homo Sapiens
aaatctaaagacaggggttaggcctctttttaccacca

SEQ ID NO: 600 - DNA, 16 bp, Homo Sapiens
aaatctcgctggggcc

SEQ ID NO: 601 - DNA, 17 bp, Homo Sapiens
aaatctcgctggggcct

SEQ ID NO: 602 - DNA, 19 bp, Homo Sapiens
aaatctcgctggggcctcc

SEQ ID NO: 603 - DNA, 16 bp, Homo Sapiens
aaatctcggtggaacc

SEQ ID NO: 604 - DNA, 17 bp, Homo Sapiens
aaatctcggtggaacct

SEQ ID NO: 605 - DNA, 18 bp, Homo Sapiens
aaatctcggtggaacctc

SEQ ID NO: 606 - DNA, 19 bp, Homo Sapiens
aaatctcggtggaacctcc

SEQ ID NO: 607 - DNA, 20 bp, Homo Sapiens
aaatctcggtggaacctcca

SEQ ID NO: 608 - DNA, 18 bp, Homo Sapiens
aaatctcggtgggacccc

SEQ ID NO: 609 - DNA, 19 bp, Homo Sapiens
aaatctcggtgggaccccc

SEQ ID NO: 610 - DNA, 17 bp, Homo Sapiens
aaatctcggtgggacct

SEQ ID NO: 611 - DNA, 19 bp, Homo Sapiens
aaatctcggtgggacctcc

SEQ ID NO: 612 - DNA, 24 bp, Homo Sapiens
aaatggctgagtgaagcattggac

SEQ ID NO: 613 - DNA, 25 bp, Homo Sapiens
aaatggctgagtgaagcattggact

SEQ ID NO: 614 - DNA, 27 bp, Homo Sapiens
aaatggctgagtgaagcattggactgt

SEQ ID NO: 615 - DNA, 28 bp, Homo Sapiens
aaatggctgagtgaagcattggactgta

SEQ ID NO: 616 - DNA, 29 bp, Homo Sapiens
aaatggctgagtgaagcattggactgtaa

SEQ ID NO: 617 - DNA, 30 bp, Homo Sapiens
aaatggctgagtgaagcattggactgtaaa

SEQ ID NO: 618 - DNA, 16 bp, Homo Sapiens
aaatggtagagcgctc

SEQ ID NO: 619 - DNA, 18 bp, Homo Sapiens
aaatggtagagcgctcgc

SEQ ID NO: 620 - DNA, 20 bp, Homo Sapiens
aaatggtagagcgctcgctt

SEQ ID NO: 621 - DNA, 16 bp, Homo Sapiens
aaatgttggttatacc

SEQ ID NO: 622 - DNA, 17 bp, Homo Sapiens
aaatgttggttataccc

SEQ ID NO: 623 - DNA, 20 bp, Homo Sapiens
aaatgttggttatacccttc

SEQ ID NO: 624 - DNA, 27 bp, Homo Sapiens
aaatgttggttatacccttcccgtact

SEQ ID NO: 625 - DNA, 28 bp, Homo Sapiens
aaatgttggttatacccttcccgtacta

SEQ ID NO: 626 - DNA, 29 bp, Homo Sapiens
aaatgttggttatacccttcccgtactac

SEQ ID NO: 627 - DNA, 30 bp, Homo Sapiens
aaatgttggttatacccttcccgtactacc

SEQ ID NO: 628 - DNA, 31 bp, Homo Sapiens
aaatgttggttatacccttcccgtactacca

SEQ ID NO: 629 - DNA, 16 bp, Homo Sapiens
aaatgtttagacgggc

SEQ ID NO: 630 - DNA, 17 bp, Homo Sapiens
aaatgtttagacgggct

SEQ ID NO: 631 - DNA, 18 bp, Homo Sapiens
aaatgtttagacgggctc

SEQ ID NO: 632 - DNA, 19 bp, Homo Sapiens
aaatgtttagacgggctca

SEQ ID NO: 633 - DNA, 20 bp, Homo Sapiens
aaatgtttagacgggctcac

SEQ ID NO: 634 - DNA, 21 bp, Homo Sapiens
aaatgtttagacgggctcaca

SEQ ID NO: 635 - DNA, 22 bp, Homo Sapiens
aaatgtttagacgggctcacat

SEQ ID NO: 636 - DNA, 23 bp, Homo Sapiens
aaatgtttagacgggctcacatc

SEQ ID NO: 637 - DNA, 24 bp, Homo Sapiens
aaatgtttagacgggctcacatca

SEQ ID NO: 638 - DNA, 25 bp, Homo Sapiens
aaatgtttagacgggctcacatcac

SEQ ID NO: 639 - DNA, 26 bp, Homo Sapiens
aaatgtttagacgggctcacatcacc

SEQ ID NO: 640 - DNA, 27 bp, Homo Sapiens
aaatgtttagacgggctcacatcaccc

SEQ ID NO: 641 - DNA, 28 bp, Homo Sapiens
aaatgtttagacgggctcacatcacccc

SEQ ID NO: 642 - DNA, 29 bp, Homo Sapiens
aaatgtttagacgggctcacatcacccca

SEQ ID NO: 643 - DNA, 31 bp, Homo Sapiens
aaatgtttagacgggctcacatcaccccata

SEQ ID NO: 644 - DNA, 32 bp, Homo Sapiens
aaatgtttagacgggctcacatcaccccataa

SEQ ID NO: 645 - DNA, 33 bp, Homo Sapiens
aaatgtttagacgggctcacatcaccccataaa

SEQ ID NO: 646 - DNA, 34 bp, Homo Sapiens
aaatgtttagacgggctcacatcaccccataaac

SEQ ID NO: 647 - DNA, 37 bp, Homo Sapiens
aaatgtttagacgggctcacatcaccccataaacacc

SEQ ID NO: 648 - DNA, 38 bp, Homo Sapiens
aaatgtttagacgggctcacatcaccccataaacacca

SEQ ID NO: 649 - DNA, 16 bp, Homo Sapiens
aaattagaatcttagc

SEQ ID NO: 650 - DNA, 17 bp, Homo Sapiens
aaattagaatcttagct

SEQ ID NO: 651 - DNA, 18 bp, Homo Sapiens
aaattagaatcttagctt

SEQ ID NO: 652 - DNA, 19 bp, Homo Sapiens
aaattagaatcttagcttt

SEQ ID NO: 653 - DNA, 20 bp, Homo Sapiens
aaattagaatcttagctttg

SEQ ID NO: 654 - DNA, 21 bp, Homo Sapiens
aaattagaatcttagctttgg

SEQ ID NO: 655 - DNA, 24 bp, Homo Sapiens
aaattagaatcttagctttgggtg

SEQ ID NO: 656 - DNA, 28 bp, Homo Sapiens
aaattagaatcttagctttgggtgctaa

SEQ ID NO: 657 - DNA, 31 bp, Homo Sapiens
aaattagaatcttagctttgggtgctaatgg

SEQ ID NO: 658 - DNA, 36 bp, Homo Sapiens
aaattagaatcttagctttgggtgctaatggtggag

SEQ ID NO: 659 - DNA, 37 bp, Homo Sapiens
aaattagaatcttagctttgggtgctaatggtggagt

SEQ ID NO: 660 - DNA, 38 bp, Homo Sapiens
aaattagaatcttagctttgggtgctaatggtggagtt

SEQ ID NO: 661 - DNA, 39 bp, Homo Sapiens
aaattagaatcttagctttgggtgctaatggtggagtta

SEQ ID NO: 662 - DNA, 40 bp, Homo Sapiens
aaattagaatcttagctttgggtgctaatggtggagttaa

SEQ ID NO: 663 - DNA, 44 bp, Homo Sapiens
aaattagaatcttagctttgggtgctaatggtggagttaaagac

SEQ ID NO: 664 - DNA, 45 bp, Homo Sapiens
aaattagaatcttagctttgggtgctaatggtggagttaaagact

SEQ ID NO: 665 - DNA, 46 bp, Homo Sapiens
aaattagaatcttagctttgggtgctaatggtggagttaaagactt

SEQ ID NO: 666 - DNA, 16 bp, Homo Sapiens
aaattataggctaaat

SEQ ID NO: 667 - DNA, 17 bp, Homo Sapiens
aaattataggctaaatc

SEQ ID NO: 668 - DNA, 18 bp, Homo Sapiens
aaattataggctaaatcc

SEQ ID NO: 669 - DNA, 19 bp, Homo Sapiens
aaattataggctaaatcct

SEQ ID NO: 670 - DNA, 22 bp, Homo Sapiens
aaattataggctaaatcctata

SEQ ID NO: 671 - DNA, 27 bp, Homo Sapiens
aaattataggctaaatcctatatatct

SEQ ID NO: 672 - DNA, 31 bp, Homo Sapiens
aaattataggctaaatcctatatatcttacc

SEQ ID NO: 673 - DNA, 26 bp, Homo Sapiens
aaattatgataatcatatttaccaac

SEQ ID NO: 674 - DNA, 27 bp, Homo Sapiens
aaattatgataatcatatttaccaacc

SEQ ID NO: 675 - DNA, 28 bp, Homo Sapiens
aaattatgataatcatatttaccaacca

SEQ ID NO: 676 - DNA, 19 bp, Homo Sapiens
aaattcgaagaagcagctt

SEQ ID NO: 677 - DNA, 20 bp, Homo Sapiens
aaattcgaagaagcagcttc

SEQ ID NO: 678 - DNA, 27 bp, Homo Sapiens
aaattcgaagaagcagcttcaaacctg

SEQ ID NO: 679 - DNA, 34 bp, Homo Sapiens
aaattcgaagaagcagcttcaaacctgccggggc

SEQ ID NO: 680 - DNA, 35 bp, Homo Sapiens
aaattcgaagaagcagcttcaaacctgccggggct

SEQ ID NO: 681 - DNA, 36 bp, Homo Sapiens
aaattcgaagaagcagcttcaaacctgccggggctt

SEQ ID NO: 682 - DNA, 37 bp, Homo Sapiens
aaattcgaagaagcagcttcaaacctgccggggcttc

SEQ ID NO: 683 - DNA, 38 bp, Homo Sapiens
aaattcgaagaagcagcttcaaacctgccggggcttcc

SEQ ID NO: 684 - DNA, 39 bp, Homo Sapiens
aaattcgaagaagcagcttcaaacctgccggggcttcca

SEQ ID NO: 685 - DNA, 17 bp, Homo Sapiens
aaatttaggttaaatac

SEQ ID NO: 686 - DNA, 19 bp, Homo Sapiens
aaatttaggttaaatacag

SEQ ID NO: 687 - DNA, 21 bp, Homo Sapiens
aaatttaggttaaatacagac

SEQ ID NO: 688 - DNA, 22 bp, Homo Sapiens
aaatttaggttaaatacagacc

SEQ ID NO: 689 - DNA, 29 bp, Homo Sapiens
aaatttaggttaaatacagaccaagagcc

SEQ ID NO: 690 - DNA, 32 bp, Homo Sapiens
aaatttaggttaaatacagaccaagagccttc

SEQ ID NO: 691 - DNA, 33 bp, Homo Sapiens
aaatttaggttaaatacagaccaagagccttca

SEQ ID NO: 692 - DNA, 17 bp, Homo Sapiens
aaattttggtgcaactc

SEQ ID NO: 693 - DNA, 18 bp, Homo Sapiens
aaattttggtgcaactcc

SEQ ID NO: 694 - DNA, 28 bp, Homo Sapiens
aaattttggtgcaactccaaataaaagt

SEQ ID NO: 695 - DNA, 29 bp, Homo Sapiens
aaattttggtgcaactccaaataaaagta

SEQ ID NO: 696 - DNA, 30 bp, Homo Sapiens
aaattttggtgcaactccaaataaaagtac

SEQ ID NO: 697 - DNA, 31 bp, Homo Sapiens
aaattttggtgcaactccaaataaaagtacc

SEQ ID NO: 698 - DNA, 32 bp, Homo Sapiens
aaattttggtgcaactccaaataaaagtacca

SEQ ID NO: 699 - DNA, 19 bp, Homo Sapiens
aacaaaacgaatgatttcg

SEQ ID NO: 700 - DNA, 20 bp, Homo Sapiens
aacaaaacgaatgatttcga

SEQ ID NO: 701 - DNA, 21 bp, Homo Sapiens
aacaaaacgaatgatttcgac

SEQ ID NO: 702 - DNA, 22 bp, Homo Sapiens
aacaaaacgaatgatttcgact

SEQ ID NO: 703 - DNA, 23 bp, Homo Sapiens
aacaaaacgaatgatttcgactc

SEQ ID NO: 704 - DNA, 24 bp, Homo Sapiens
aacaaaacgaatgatttcgactca

SEQ ID NO: 705 - DNA, 25 bp, Homo Sapiens
aacaaaacgaatgatttcgactcat

SEQ ID NO: 706 - DNA, 27 bp, Homo Sapiens
aacaaaacgaatgatttcgactcatta

SEQ ID NO: 707 - DNA, 34 bp, Homo Sapiens
aacaaaacgaatgatttcgactcattaaattatg

SEQ ID NO: 708 - DNA, 16 bp, Homo Sapiens
aacaacatggctttct

SEQ ID NO: 709 - DNA, 17 bp, Homo Sapiens
aacaacatggctttctc

SEQ ID NO: 710 - DNA, 18 bp, Homo Sapiens
aacaacatggctttctca

SEQ ID NO: 711 - DNA, 19 bp, Homo Sapiens
aacaacatggctttctcac

SEQ ID NO: 712 - DNA, 20 bp, Homo Sapiens
aacaacatggctttctcacc

SEQ ID NO: 713 - DNA, 21 bp, Homo Sapiens
aacaacatggctttctcacca

SEQ ID NO: 714 - DNA, 16 bp, Homo Sapiens
aacacaaagcacccaa

SEQ ID NO: 715 - DNA, 17 bp, Homo Sapiens
aacacaaagcacccaac

SEQ ID NO: 716 - DNA, 18 bp, Homo Sapiens
aacacaaagcacccaact

SEQ ID NO: 717 - DNA, 19 bp, Homo Sapiens
aacacaaagcacccaactt

SEQ ID NO: 718 - DNA, 21 bp, Homo Sapiens
aacacaaagcacccaacttac

SEQ ID NO: 719 - DNA, 22 bp, Homo Sapiens
aacacaaagcacccaacttaca

SEQ ID NO: 720 - DNA, 24 bp, Homo Sapiens
aacacaaagcacccaacttacact

SEQ ID NO: 721 - DNA, 25 bp, Homo Sapiens
aacacaaagcacccaacttacactt

SEQ ID NO: 722 - DNA, 26 bp, Homo Sapiens
aacacaaagcacccaacttacactta

SEQ ID NO: 723 - DNA, 27 bp, Homo Sapiens
aacacaaagcacccaacttacacttag

SEQ ID NO: 724 - DNA, 28 bp, Homo Sapiens
aacacaaagcacccaacttacacttagg

SEQ ID NO: 725 - DNA, 29 bp, Homo Sapiens
aacacaaagcacccaacttacacttagga

SEQ ID NO: 726 - DNA, 31 bp, Homo Sapiens
aacacaaagcacccaacttacacttaggaga

SEQ ID NO: 727 - DNA, 32 bp, Homo Sapiens
aacacaaagcacccaacttacacttaggagat

SEQ ID NO: 728 - DNA, 33 bp, Homo Sapiens
aacacaaagcacccaacttacacttaggagatt

SEQ ID NO: 729 - DNA, 35 bp, Homo Sapiens
aacacaaagcacccaacttacacttaggagatttc

SEQ ID NO: 730 - DNA, 36 bp, Homo Sapiens
aacacaaagcacccaacttacacttaggagatttca

SEQ ID NO: 731 - DNA, 39 bp, Homo Sapiens
aacacaaagcacccaacttacacttaggagatttcaact

SEQ ID NO: 732 - DNA, 42 bp, Homo Sapiens
aacacaaagcacccaacttacacttaggagatttcaacttaa

SEQ ID NO: 733 - DNA, 44 bp, Homo Sapiens
aacacaaagcacccaacttacacttaggagatttcaacttaact

SEQ ID NO: 734 - DNA, 18 bp, Homo Sapiens
aacacctctttacagtga

SEQ ID NO: 735 - DNA, 19 bp, Homo Sapiens
aacacctctttacagtgac

SEQ ID NO: 736 - DNA, 20 bp, Homo Sapiens
aacacctctttacagtgacc

SEQ ID NO: 737 - DNA, 21 bp, Homo Sapiens
aacacctctttacagtgacca

SEQ ID NO: 738 - DNA, 16 bp, Homo Sapiens
aacagaggcttacgac

SEQ ID NO: 739 - DNA, 17 bp, Homo Sapiens
aacagaggcttacgacc

SEQ ID NO: 740 - DNA, 18 bp, Homo Sapiens
aacagaggcttacgaccc

SEQ ID NO: 741 - DNA, 19 bp, Homo Sapiens
aacagaggcttacgacccc

SEQ ID NO: 742 - DNA, 20 bp, Homo Sapiens
aacagaggcttacgacccct

SEQ ID NO: 743 - DNA, 24 bp, Homo Sapiens
aacagaggcttacgaccccttatt

SEQ ID NO: 744 - DNA, 28 bp, Homo Sapiens
aacagaggcttacgaccccttatttacc

SEQ ID NO: 745 - DNA, 29 bp, Homo Sapiens
aacagaggcttacgaccccttatttaccc

SEQ ID NO: 746 - DNA, 30 bp, Homo Sapiens
aacagaggcttacgaccccttatttacccc

SEQ ID NO: 747 - DNA, 31 bp, Homo Sapiens
aacagaggcttacgaccccttatttacccca

SEQ ID NO: 748 - DNA, 16 bp, Homo Sapiens
aacagctatccattgg

SEQ ID NO: 749 - DNA, 18 bp, Homo Sapiens
aacagctatccattggtc

SEQ ID NO: 750 - DNA, 19 bp, Homo Sapiens
aacagctatccattggtct

SEQ ID NO: 751 - DNA, 20 bp, Homo Sapiens
aacagctatccattggtctt

SEQ ID NO: 752 - DNA, 21 bp, Homo Sapiens
aacagctatccattggtctta

SEQ ID NO: 753 - DNA, 22 bp, Homo Sapiens
aacagctatccattggtcttag

SEQ ID NO: 754 - DNA, 25 bp, Homo Sapiens
aacagctatccattggtcttaggcc

SEQ ID NO: 755 - DNA, 26 bp, Homo Sapiens
aacagctatccattggtcttaggccc

SEQ ID NO: 756 - DNA, 27 bp, Homo Sapiens
aacagctatccattggtcttaggcccc

SEQ ID NO: 757 - DNA, 28 bp, Homo Sapiens
aacagctatccattggtcttaggcccca

SEQ ID NO: 758 - DNA, 30 bp, Homo Sapiens
aacagctatccattggtcttaggccccaaa

SEQ ID NO: 759 - DNA, 31 bp, Homo Sapiens
aacagctatccattggtcttaggccccaaaa

SEQ ID NO: 760 - DNA, 32 bp, Homo Sapiens
aacagctatccattggtcttaggccccaaaaa

SEQ ID NO: 761 - DNA, 33 bp, Homo Sapiens
aacagctatccattggtcttaggccccaaaaat

SEQ ID NO: 762 - DNA, 19 bp, Homo Sapiens
aacaggagatcctgggttc

SEQ ID NO: 763 - DNA, 21 bp, Homo Sapiens
aacaggagatcctgggttcga

SEQ ID NO: 764 - DNA, 23 bp, Homo Sapiens
aacaggagatcctgggttcgaat

SEQ ID NO: 765 - DNA, 24 bp, Homo Sapiens
aacaggagatcctgggttcgaatc

SEQ ID NO: 766 - DNA, 30 bp, Homo Sapiens
aacaggagatcctgggttcgaatcccagcg

SEQ ID NO: 767 - DNA, 36 bp, Homo Sapiens
aacaggagatcctgggttcgaatcccagcgaggcct

SEQ ID NO: 768 - DNA, 37 bp, Homo Sapiens
aacaggagatcctgggttcgaatcccagcgaggcctc

SEQ ID NO: 769 - DNA, 31 bp, Homo Sapiens
aacaggagatcctgggttcgaatcccagcgg

SEQ ID NO: 770 - DNA, 33 bp, Homo Sapiens
aacaggagatcctgggttcgaatcccagcgggg

SEQ ID NO: 771 - DNA, 34 bp, Homo Sapiens
aacaggagatcctgggttcgaatcccagcggggc

SEQ ID NO: 772 - DNA, 35 bp, Homo Sapiens
aacaggagatcctgggttcgaatcccagcggggcc

SEQ ID NO: 773 - DNA, 36 bp, Homo Sapiens
aacaggagatcctgggttcgaatcccagcggggcct

SEQ ID NO: 774 - DNA, 37 bp, Homo Sapiens
aacaggagatcctgggttcgaatcccagcggggcctc

SEQ ID NO: 775 - DNA, 38 bp, Homo Sapiens
aacaggagatcctgggttcgaatcccagcggggcctcc

SEQ ID NO: 776 - DNA, 33 bp, Homo Sapiens
aacaggagatcctgggttcgaatcccagcggtg

SEQ ID NO: 777 - DNA, 34 bp, Homo Sapiens
aacaggagatcctgggttcgaatcccagcggtgc

SEQ ID NO: 778 - DNA, 35 bp, Homo Sapiens
aacaggagatcctgggttcgaatcccagcggtgcc

SEQ ID NO: 779 - DNA, 36 bp, Homo Sapiens
aacaggagatcctgggttcgaatcccagcggtgcct

SEQ ID NO: 780 - DNA, 37 bp, Homo Sapiens
aacaggagatcctgggttcgaatcccagcggtgcctc

SEQ ID NO: 781 - DNA, 38 bp, Homo Sapiens
aacaggagatcctgggttcgaatcccagcggtgcctcc

SEQ ID NO: 782 - DNA, 39 bp, Homo Sapiens
aacaggagatcctgggttcgaatcccagcggtgcctcca

SEQ ID NO: 783 - DNA, 34 bp, Homo Sapiens
aacaggagatcctgggttcgaatcccagtagagc

SEQ ID NO: 784 - DNA, 36 bp, Homo Sapiens
aacaggagatcctgggttcgaatcccagtagagcct

SEQ ID NO: 785 - DNA, 37 bp, Homo Sapiens
aacaggagatcctgggttcgaatcccagtagagcctc

SEQ ID NO: 786 - DNA, 37 bp, Homo Sapiens
aacaggagatcctgggttcgactcccagcggggcctc

SEQ ID NO: 787 - DNA, 36 bp, Homo Sapiens
aacaggagatcctgggttcgactcccagtggggcct

SEQ ID NO: 788 - DNA, 17 bp, Homo Sapiens
aacatcagattgtgaat

SEQ ID NO: 789 - DNA, 18 bp, Homo Sapiens
aacatcagattgtgaatc

SEQ ID NO: 790 - DNA, 19 bp, Homo Sapiens
aacatcagattgtgaatct

SEQ ID NO: 791 - DNA, 20 bp, Homo Sapiens
aacatcagattgtgaatctg

SEQ ID NO: 792 - DNA, 22 bp, Homo Sapiens
aacatcagattgtgaatctgac

SEQ ID NO: 793 - DNA, 23 bp, Homo Sapiens
aacatcagattgtgaatctgaca

SEQ ID NO: 794 - DNA, 25 bp, Homo Sapiens
aacatcagattgtgaatctgacaac

SEQ ID NO: 795 - DNA, 26 bp, Homo Sapiens
aacatcagattgtgaatctgacaaca

SEQ ID NO: 796 - DNA, 27 bp, Homo Sapiens
aacatcagattgtgaatctgacaacag

SEQ ID NO: 797 - DNA, 28 bp, Homo Sapiens
aacatcagattgtgaatctgacaacaga

SEQ ID NO: 798 - DNA, 29 bp, Homo Sapiens
aacatcagattgtgaatctgacaacagag

SEQ ID NO: 799 - DNA, 30 bp, Homo Sapiens
aacatcagattgtgaatctgacaacagagg

SEQ ID NO: 800 - DNA, 31 bp, Homo Sapiens
aacatcagattgtgaatctgacaacagaggc

SEQ ID NO: 801 - DNA, 32 bp, Homo Sapiens
aacatcagattgtgaatctgacaacagaggct

SEQ ID NO: 802 - DNA, 33 bp, Homo Sapiens
aacatcagattgtgaatctgacaacagaggctt

SEQ ID NO: 803 - DNA, 34 bp, Homo Sapiens
aacatcagattgtgaatctgacaacagaggctta

SEQ ID NO: 804 - DNA, 35 bp, Homo Sapiens
aacatcagattgtgaatctgacaacagaggcttac

SEQ ID NO: 805 - DNA, 36 bp, Homo Sapiens
aacatcagattgtgaatctgacaacagaggcttacg

SEQ ID NO: 806 - DNA, 37 bp, Homo Sapiens
aacatcagattgtgaatctgacaacagaggcttacga

SEQ ID NO: 807 - DNA, 38 bp, Homo Sapiens
aacatcagattgtgaatctgacaacagaggcttacgac

SEQ ID NO: 808 - DNA, 39 bp, Homo Sapiens
aacatcagattgtgaatctgacaacagaggcttacgacc

SEQ ID NO: 809 - DNA, 40 bp, Homo Sapiens
aacatcagattgtgaatctgacaacagaggcttacgaccc

SEQ ID NO: 810 - DNA, 41 bp, Homo Sapiens
aacatcagattgtgaatctgacaacagaggcttacgacccc

SEQ ID NO: 811 - DNA, 42 bp, Homo Sapiens
aacatcagattgtgaatctgacaacagaggcttacgacccct

SEQ ID NO: 812 - DNA, 43 bp, Homo Sapiens
aacatcagattgtgaatctgacaacagaggcttacgacccctt

SEQ ID NO: 813 - DNA, 44 bp, Homo Sapiens
aacatcagattgtgaatctgacaacagaggcttacgacccctta

SEQ ID NO: 814 - DNA, 45 bp, Homo Sapiens
aacatcagattgtgaatctgacaacagaggcttacgaccccttat

SEQ ID NO: 815 - DNA, 46 bp, Homo Sapiens
aacatcagattgtgaatctgacaacagaggcttacgaccccttatt

SEQ ID NO: 816 - DNA, 47 bp, Homo Sapiens
aacatcagattgtgaatctgacaacagaggcttacgaccccttattt

SEQ ID NO: 817 - DNA, 16 bp, Homo Sapiens
aacatggctttctcac

SEQ ID NO: 818 - DNA, 17 bp, Homo Sapiens
aacatggctttctcacc

SEQ ID NO: 819 - DNA, 18 bp, Homo Sapiens
aacatggctttctcacca

SEQ ID NO: 820 - DNA, 20 bp, Homo Sapiens
aacattcaaaaaagagtacc

SEQ ID NO: 821 - DNA, 21 bp, Homo Sapiens
aacattcaaaaaagagtacca

SEQ ID NO: 822 - DNA, 16 bp, Homo Sapiens
aaccaaaacatcagat

SEQ ID NO: 823 - DNA, 18 bp, Homo Sapiens
aaccaaaacatcagattg

SEQ ID NO: 824 - DNA, 19 bp, Homo Sapiens
aaccaaaacatcagattgt

SEQ ID NO: 825 - DNA, 20 bp, Homo Sapiens
aaccaaaacatcagattgtg

SEQ ID NO: 826 - DNA, 21 bp, Homo Sapiens
aaccaaaacatcagattgtga

SEQ ID NO: 827 - DNA, 22 bp, Homo Sapiens
aaccaaaacatcagattgtgaa

SEQ ID NO: 828 - DNA, 23 bp, Homo Sapiens
aaccaaaacatcagattgtgaat

SEQ ID NO: 829 - DNA, 24 bp, Homo Sapiens
aaccaaaacatcagattgtgaatc

SEQ ID NO: 830 - DNA, 25 bp, Homo Sapiens
aaccaaaacatcagattgtgaatct

SEQ ID NO: 831 - DNA, 26 bp, Homo Sapiens
aaccaaaacatcagattgtgaatctg

SEQ ID NO: 832 - DNA, 28 bp, Homo Sapiens
aaccaaaacatcagattgtgaatctgac

SEQ ID NO: 833 - DNA, 29 bp, Homo Sapiens
aaccaaaacatcagattgtgaatctgaca

SEQ ID NO: 834 - DNA, 30 bp, Homo Sapiens
aaccaaaacatcagattgtgaatctgacaa

SEQ ID NO: 835 - DNA, 31 bp, Homo Sapiens
aaccaaaacatcagattgtgaatctgacaac

SEQ ID NO: 836 - DNA, 32 bp, Homo Sapiens
aaccaaaacatcagattgtgaatctgacaaca

SEQ ID NO: 837 - DNA, 33 bp, Homo Sapiens
aaccaaaacatcagattgtgaatctgacaacag

SEQ ID NO: 838 - DNA, 34 bp, Homo Sapiens
aaccaaaacatcagattgtgaatctgacaacaga

SEQ ID NO: 839 - DNA, 35 bp, Homo Sapiens
aaccaaaacatcagattgtgaatctgacaacagag

SEQ ID NO: 840 - DNA, 36 bp, Homo Sapiens
aaccaaaacatcagattgtgaatctgacaacagagg

SEQ ID NO: 841 - DNA, 37 bp, Homo Sapiens
aaccaaaacatcagattgtgaatctgacaacagaggc

SEQ ID NO: 842 - DNA, 38 bp, Homo Sapiens
aaccaaaacatcagattgtgaatctgacaacagaggct

SEQ ID NO: 843 - DNA, 39 bp, Homo Sapiens
aaccaaaacatcagattgtgaatctgacaacagaggctt

SEQ ID NO: 844 - DNA, 41 bp, Homo Sapiens
aaccaaaacatcagattgtgaatctgacaacagaggcttac

SEQ ID NO: 845 - DNA, 45 bp, Homo Sapiens
aaccaaaacatcagattgtgaatctgacaacagaggcttacgacc

SEQ ID NO: 846 - DNA, 46 bp, Homo Sapiens
aaccaaaacatcagattgtgaatctgacaacagaggcttacgaccc

SEQ ID NO: 847 - DNA, 47 bp, Homo Sapiens
aaccaaaacatcagattgtgaatctgacaacagaggcttacgacccc

SEQ ID NO: 848 - DNA, 48 bp, Homo Sapiens
aaccaaaacatcagattgtgaatctgacaacagaggcttacgacccct

SEQ ID NO: 849 - DNA, 16 bp, Homo Sapiens
aaccaacacctcttta

SEQ ID NO: 850 - DNA, 18 bp, Homo Sapiens
aaccaacacctctttaca

SEQ ID NO: 851 - DNA, 19 bp, Homo Sapiens
aaccaacacctctttacag

SEQ ID NO: 852 - DNA, 20 bp, Homo Sapiens
aaccaacacctctttacagt

SEQ ID NO: 853 - DNA, 21 bp, Homo Sapiens
aaccaacacctctttacagtg

SEQ ID NO: 854 - DNA, 22 bp, Homo Sapiens
aaccaacacctctttacagtga

SEQ ID NO: 855 - DNA, 23 bp, Homo Sapiens
aaccaacacctctttacagtgac

SEQ ID NO: 856 - DNA, 24 bp, Homo Sapiens
aaccaacacctctttacagtgacc

SEQ ID NO: 857 - DNA, 25 bp, Homo Sapiens
aaccaacacctctttacagtgacca

SEQ ID NO: 858 - DNA, 17 bp, Homo Sapiens
aaccagctttggggggt

SEQ ID NO: 859 - DNA, 18 bp, Homo Sapiens
aaccagctttggggggtt

SEQ ID NO: 860 - DNA, 16 bp, Homo Sapiens
aaccaggcggaaacac

SEQ ID NO: 861 - DNA, 18 bp, Homo Sapiens
aaccaggcggaaacacca

SEQ ID NO: 862 - DNA, 18 bp, Homo Sapiens
aaccaggggtcgcgagtt

SEQ ID NO: 863 - DNA, 19 bp, Homo Sapiens
aaccaggggtcgcgagttc

SEQ ID NO: 864 - DNA, 20 bp, Homo Sapiens
aaccaggggtcgcgagttca

SEQ ID NO: 865 - DNA, 30 bp, Homo Sapiens
aaccaggggtcgcgagttcaaatctcgctg

SEQ ID NO: 866 - DNA, 33 bp, Homo Sapiens
aaccaggggtcgcgagttcaaatctcgctgggg

SEQ ID NO: 867 - DNA, 34 bp, Homo Sapiens
aaccaggggtcgcgagttcaaatctcgctggggc

SEQ ID NO: 868 - DNA, 35 bp, Homo Sapiens
aaccaggggtcgcgagttcaaatctcgctggggcc

SEQ ID NO: 869 - DNA, 36 bp, Homo Sapiens
aaccaggggtcgcgagttcaaatctcgctggggcct

SEQ ID NO: 870 - DNA, 37 bp, Homo Sapiens
aaccaggggtcgcgagttcaaatctcgctggggcctc

SEQ ID NO: 871 - DNA, 38 bp, Homo Sapiens
aaccaggggtcgcgagttcaaatctcgctggggcctcc

SEQ ID NO: 872 - DNA, 36 bp, Homo Sapiens
aaccaggggtcgcgagttcaattctcgctggggcct

SEQ ID NO: 873 - DNA, 38 bp, Homo Sapiens
aaccaggggtcgcgagttcaattctcgctggggcctcc

SEQ ID NO: 874 - DNA, 38 bp, Homo Sapiens
aaccaggggtcgcgagttcgatcctcgctggggcctcc

SEQ ID NO: 875 - DNA, 16 bp, Homo Sapiens
aaccatcctctgctac

SEQ ID NO: 876 - DNA, 17 bp, Homo Sapiens
aaccatcctctgctacc

SEQ ID NO: 877 - DNA, 18 bp, Homo Sapiens
aaccatcctctgctacca

SEQ ID NO: 878 - DNA, 19 bp, Homo Sapiens
aaccatttcataactttgt

SEQ ID NO: 879 - DNA, 20 bp, Homo Sapiens
aaccatttcataactttgtc

SEQ ID NO: 880 - DNA, 21 bp, Homo Sapiens
aaccatttcataactttgtca

SEQ ID NO: 881 - DNA, 37 bp, Homo Sapiens
aaccatttcataactttgtcaaagttaaattataggc

SEQ ID NO: 882 - DNA, 38 bp, Homo Sapiens
aaccatttcataactttgtcaaagttaaattataggct

SEQ ID NO: 883 - DNA, 19 bp, Homo Sapiens
aacccagaggtcgatggat

SEQ ID NO: 884 - DNA, 20 bp, Homo Sapiens
aacccagaggtcgatggatc

SEQ ID NO: 885 - DNA, 21 bp, Homo Sapiens
aacccagaggtcgatggatcg

SEQ ID NO: 886 - DNA, 22 bp, Homo Sapiens
aacccagaggtcgatggatcga

SEQ ID NO: 887 - DNA, 23 bp, Homo Sapiens
aacccagaggtcgatggatcgaa

SEQ ID NO: 888 - DNA, 25 bp, Homo Sapiens
aacccagaggtcgatggatcgaaac

SEQ ID NO: 889 - DNA, 26 bp, Homo Sapiens
aacccagaggtcgatggatcgaaacc

SEQ ID NO: 890 - DNA, 27 bp, Homo Sapiens
aacccagaggtcgatggatcgaaacca

SEQ ID NO: 891 - DNA, 18 bp, Homo Sapiens
aaccccactcctggtacc

SEQ ID NO: 892 - DNA, 19 bp, Homo Sapiens
aaccccactcctggtacca

SEQ ID NO: 893 - DNA, 16 bp, Homo Sapiens
aacccccttatttcta

SEQ ID NO: 894 - DNA, 17 bp, Homo Sapiens
aacccccttatttctac

SEQ ID NO: 895 - DNA, 18 bp, Homo Sapiens
aacccccttatttctacc

SEQ ID NO: 896 - DNA, 19 bp, Homo Sapiens
aacccccttatttctacca

SEQ ID NO: 897 - DNA, 16 bp, Homo Sapiens
aaccccgtccgtgcct

SEQ ID NO: 898 - DNA, 17 bp, Homo Sapiens
aaccccgtccgtgcctc

SEQ ID NO: 899 - DNA, 18 bp, Homo Sapiens
aaccccgtccgtgcctcc

SEQ ID NO: 900 - DNA, 19 bp, Homo Sapiens
aaccccgtccgtgcctcca

SEQ ID NO: 901 - DNA, 17 bp, Homo Sapiens
aaccctgctcgctgcgc

SEQ ID NO: 902 - DNA, 18 bp, Homo Sapiens
aaccctgctcgctgcgcc

SEQ ID NO: 903 - DNA, 19 bp, Homo Sapiens
aaccctgctcgctgcgcca

SEQ ID NO: 904 - DNA, 19 bp, Homo Sapiens
aaccgaaaggttggtggtt

SEQ ID NO: 905 - DNA, 20 bp, Homo Sapiens
aaccgaaaggttggtggttc

SEQ ID NO: 906 - DNA, 21 bp, Homo Sapiens
aaccgaaaggttggtggttcg

SEQ ID NO: 907 - DNA, 22 bp, Homo Sapiens
aaccgaaaggttggtggttcga

SEQ ID NO: 908 - DNA, 23 bp, Homo Sapiens
aaccgaaaggttggtggttcgag

SEQ ID NO: 909 - DNA, 24 bp, Homo Sapiens
aaccgaaaggttggtggttcgagc

SEQ ID NO: 910 - DNA, 36 bp, Homo Sapiens
aaccgaaaggttggtggttcgagcccacccagggac

SEQ ID NO: 911 - DNA, 37 bp, Homo Sapiens
aaccgaaaggttggtggttcgagcccacccagggacg

SEQ ID NO: 912 - DNA, 38 bp, Homo Sapiens
aaccgaaaggttggtggttcgagcccacccagggacgc

SEQ ID NO: 913 - DNA, 39 bp, Homo Sapiens
aaccgaaaggttggtggttcgagcccacccagggacgcc

SEQ ID NO: 914 - DNA, 40 bp, Homo Sapiens
aaccgaaaggttggtggttcgagcccacccagggacgcca

SEQ ID NO: 915 - DNA, 20 bp, Homo Sapiens
aaccgaagatcacgggttcg

SEQ ID NO: 916 - DNA, 23 bp, Homo Sapiens
aaccgaagatcacgggttcgaac

SEQ ID NO: 917 - DNA, 33 bp, Homo Sapiens
aaccgaagatcacgggttcgaaccccgtccgtg

SEQ ID NO: 918 - DNA, 36 bp, Homo Sapiens
aaccgaagatcacgggttcgaaccccgtccgtgcct

SEQ ID NO: 919 - DNA, 37 bp, Homo Sapiens
aaccgaagatcacgggttcgaaccccgtccgtgcctc

SEQ ID NO: 920 - DNA, 38 bp, Homo Sapiens
aaccgaagatcacgggttcgaaccccgtccgtgcctcc

SEQ ID NO: 921 - DNA, 39 bp, Homo Sapiens
aaccgaagatcacgggttcgaaccccgtccgtgcctcca

SEQ ID NO: 922 - DNA, 17 bp, Homo Sapiens
aaccgaagatcgcgggt

SEQ ID NO: 923 - DNA, 20 bp, Homo Sapiens
aaccgaagatcgcgggttcg

SEQ ID NO: 924 - DNA, 21 bp, Homo Sapiens
aaccgaagatcgcgggttcga

SEQ ID NO: 925 - DNA, 23 bp, Homo Sapiens
aaccgaagatcgcgggttcgaac

SEQ ID NO: 926 - DNA, 24 bp, Homo Sapiens
aaccgaagatcgcgggttcgaacc

SEQ ID NO: 927 - DNA, 25 bp, Homo Sapiens
aaccgaagatcgcgggttcgaaccc

SEQ ID NO: 928 - DNA, 31 bp, Homo Sapiens
aaccgaagatcgcgggttcgaaccccgtccg

SEQ ID NO: 929 - DNA, 36 bp, Homo Sapiens
aaccgaagatcgcgggttcgaaccccgtccgtgcct

SEQ ID NO: 930 - DNA, 37 bp, Homo Sapiens
aaccgaagatcgcgggttcgaaccccgtccgtgcctc

SEQ ID NO: 931 - DNA, 38 bp, Homo Sapiens
aaccgaagatcgcgggttcgaaccccgtccgtgcctcc

SEQ ID NO: 932 - DNA, 39 bp, Homo Sapiens
aaccgaagatcgcgggttcgaaccccgtccgtgcctcca

SEQ ID NO: 933 - DNA, 17 bp, Homo Sapiens
aaccgagcggaaacacc

SEQ ID NO: 934 - DNA, 18 bp, Homo Sapiens
aaccgagcggaaacacca

SEQ ID NO: 935 - DNA, 16 bp, Homo Sapiens
aaccggagatgaaaac

SEQ ID NO: 936 - DNA, 17 bp, Homo Sapiens
aaccggagatgaaaacc

SEQ ID NO: 937 - DNA, 18 bp, Homo Sapiens
aaccggagatgaaaacct

SEQ ID NO: 938 - DNA, 19 bp, Homo Sapiens
aaccggagatgaaaacctt

SEQ ID NO: 939 - DNA, 21 bp, Homo Sapiens
aaccggagatgaaaacctttt

SEQ ID NO: 940 - DNA, 23 bp, Homo Sapiens
aaccggagatgaaaacctttttc

SEQ ID NO: 941 - DNA, 24 bp, Homo Sapiens
aaccggagatgaaaacctttttcc

SEQ ID NO: 942 - DNA, 25 bp, Homo Sapiens
aaccggagatgaaaacctttttcca

SEQ ID NO: 943 - DNA, 27 bp, Homo Sapiens
aaccggagatgaaaacctttttccaag

SEQ ID NO: 944 - DNA, 28 bp, Homo Sapiens
aaccggagatgaaaacctttttccaagg

SEQ ID NO: 945 - DNA, 29 bp, Homo Sapiens
aaccggagatgaaaacctttttccaagga

SEQ ID NO: 946 - DNA, 30 bp, Homo Sapiens
aaccggagatgaaaacctttttccaaggac

SEQ ID NO: 947 - DNA, 31 bp, Homo Sapiens
aaccggagatgaaaacctttttccaaggaca

SEQ ID NO: 948 - DNA, 32 bp, Homo Sapiens
aaccggagatgaaaacctttttccaaggacac

SEQ ID NO: 949 - DNA, 33 bp, Homo Sapiens
aaccggagatgaaaacctttttccaaggacacc

SEQ ID NO: 950 - DNA, 34 bp, Homo Sapiens
aaccggagatgaaaacctttttccaaggacacca

SEQ ID NO: 951 - DNA, 16 bp, Homo Sapiens
aaccgggcagaaacac

SEQ ID NO: 952 - DNA, 17 bp, Homo Sapiens
aaccgggcagaaacacc

SEQ ID NO: 953 - DNA, 18 bp, Homo Sapiens
aaccgggcagaaacacca

SEQ ID NO: 954 - DNA, 16 bp, Homo Sapiens
aaccgggcagaagcac

SEQ ID NO: 955 - DNA, 17 bp, Homo Sapiens
aaccgggcagaagcacc

SEQ ID NO: 956 - DNA, 18 bp, Homo Sapiens
aaccgggcagaagcacca

SEQ ID NO: 957 - DNA, 16 bp, Homo Sapiens
aaccgggcggaaacac

SEQ ID NO: 958 - DNA, 17 bp, Homo Sapiens
aaccgggcggaaacacc

SEQ ID NO: 959 - DNA, 18 bp, Homo Sapiens
aaccgggcggaaacacca

SEQ ID NO: 960 - DNA, 27 bp, Homo Sapiens
aacctcggttcgaatccgagtcacggc

SEQ ID NO: 961 - DNA, 28 bp, Homo Sapiens
aacctcggttcgaatccgagtcacggca

SEQ ID NO: 962 - DNA, 29 bp, Homo Sapiens
aacctcggttcgaatccgagtcacggcac

SEQ ID NO: 963 - DNA, 31 bp, Homo Sapiens
aacctcggttcgaatccgagtcacggcacca

SEQ ID NO: 964 - DNA, 16 bp, Homo Sapiens
aacctgccggggcttc

SEQ ID NO: 965 - DNA, 17 bp, Homo Sapiens
aacctgccggggcttcc

SEQ ID NO: 966 - DNA, 18 bp, Homo Sapiens
aacctgccggggcttcca

SEQ ID NO: 967 - DNA, 25 bp, Homo Sapiens
aaccttttaagttaaagattaagag

SEQ ID NO: 968 - DNA, 28 bp, Homo Sapiens
aaccttttaagttaaagattaagagaac

SEQ ID NO: 969 - DNA, 29 bp, Homo Sapiens
aaccttttaagttaaagattaagagaacc

SEQ ID NO: 970 - DNA, 30 bp, Homo Sapiens
aaccttttaagttaaagattaagagaacca

SEQ ID NO: 971 - DNA, 31 bp, Homo Sapiens
aaccttttaagttaaagattaagagaaccaa

SEQ ID NO: 972 - DNA, 32 bp, Homo Sapiens
aaccttttaagttaaagattaagagaaccaac

SEQ ID NO: 973 - DNA, 34 bp, Homo Sapiens
aaccttttaagttaaagattaagagaaccaacac

SEQ ID NO: 974 - DNA, 35 bp, Homo Sapiens
aaccttttaagttaaagattaagagaaccaacacc

SEQ ID NO: 975 - DNA, 36 bp, Homo Sapiens
aaccttttaagttaaagattaagagaaccaacacct

SEQ ID NO: 976 - DNA, 38 bp, Homo Sapiens
aaccttttaagttaaagattaagagaaccaacacctct

SEQ ID NO: 977 - DNA, 47 bp, Homo Sapiens
aaccttttaagttaaagattaagagaaccaacacctctttacagtga

SEQ ID NO: 978 - DNA, 48 bp, Homo Sapiens
aaccttttaagttaaagattaagagaaccaacacctctttacagtgac

SEQ ID NO: 979 - DNA, 17 bp, Homo Sapiens
aacctttttccaaggac

SEQ ID NO: 980 - DNA, 18 bp, Homo Sapiens
aacctttttccaaggaca

SEQ ID NO: 981 - DNA, 20 bp, Homo Sapiens
aacctttttccaaggacacc

SEQ ID NO: 982 - DNA, 21 bp, Homo Sapiens
aacctttttccaaggacacca

SEQ ID NO: 983 - DNA, 16 bp, Homo Sapiens
aacgaatgatttcgac

SEQ ID NO: 984 - DNA, 17 bp, Homo Sapiens
aacgaatgatttcgact

SEQ ID NO: 985 - DNA, 18 bp, Homo Sapiens
aacgaatgatttcgactc

SEQ ID NO: 986 - DNA, 19 bp, Homo Sapiens
aacgaatgatttcgactca

SEQ ID NO: 987 - DNA, 20 bp, Homo Sapiens
aacgaatgatttcgactcat

SEQ ID NO: 988 - DNA, 21 bp, Homo Sapiens
aacgaatgatttcgactcatt

SEQ ID NO: 989 - DNA, 22 bp, Homo Sapiens
aacgaatgatttcgactcatta

SEQ ID NO: 990 - DNA, 24 bp, Homo Sapiens
aacgaatgatttcgactcattaaa

SEQ ID NO: 991 - DNA, 29 bp, Homo Sapiens
aacgaatgatttcgactcattaaattatg

SEQ ID NO: 992 - DNA, 31 bp, Homo Sapiens
aacgaatgatttcgactcattaaattatgat

SEQ ID NO: 993 - DNA, 32 bp, Homo Sapiens
aacgaatgatttcgactcattaaattatgata

SEQ ID NO: 994 - DNA, 33 bp, Homo Sapiens
aacgaatgatttcgactcattaaattatgataa

SEQ ID NO: 995 - DNA, 35 bp, Homo Sapiens
aacgaatgatttcgactcattaaattatgataatc

SEQ ID NO: 996 - DNA, 44 bp, Homo Sapiens
aacgaatgatttcgactcattaaattatgataatcatatttacc

SEQ ID NO: 997 - DNA, 46 bp, Homo Sapiens
aacgaatgatttcgactcattaaattatgataatcatatttaccaa

SEQ ID NO: 998 - DNA, 48 bp, Homo Sapiens
aacgaatgatttcgactcattaaattatgataatcatatttaccaacc

SEQ ID NO: 999 - DNA, 16 bp, Homo Sapiens
aacgatggtttttcat

SEQ ID NO: 1000 - DNA, 19 bp, Homo Sapiens
aacgatggtttttcatatc

SEQ ID NO: 1001 - DNA, 26 bp, Homo Sapiens
aacgatggtttttcatatcattggtc

SEQ ID NO: 1002 - DNA, 27 bp, Homo Sapiens
aacgatggtttttcatatcattggtcg

SEQ ID NO: 1003 - DNA, 28 bp, Homo Sapiens
aacgatggtttttcatatcattggtcgt

SEQ ID NO: 1004 - DNA, 29 bp, Homo Sapiens
aacgatggtttttcatatcattggtcgtg

SEQ ID NO: 1005 - DNA, 32 bp, Homo Sapiens
aacgatggtttttcatatcattggtcgtggtt

SEQ ID NO: 1006 - DNA, 33 bp, Homo Sapiens
aacgatggtttttcatatcattggtcgtggttg

SEQ ID NO: 1007 - DNA, 34 bp, Homo Sapiens
aacgatggtttttcatatcattggtcgtggttgt

SEQ ID NO: 1008 - DNA, 35 bp, Homo Sapiens
aacgatggtttttcatatcattggtcgtggttgta

SEQ ID NO: 1009 - DNA, 36 bp, Homo Sapiens
aacgatggtttttcatatcattggtcgtggttgtag

SEQ ID NO: 1010 - DNA, 37 bp, Homo Sapiens
aacgatggtttttcatatcattggtcgtggttgtagt

SEQ ID NO: 1011 - DNA, 38 bp, Homo Sapiens
aacgatggtttttcatatcattggtcgtggttgtagtc

SEQ ID NO: 1012 - DNA, 39 bp, Homo Sapiens
aacgatggtttttcatatcattggtcgtggttgtagtcc

SEQ ID NO: 1013 - DNA, 40 bp, Homo Sapiens
aacgatggtttttcatatcattggtcgtggttgtagtccg

SEQ ID NO: 1014 - DNA, 41 bp, Homo Sapiens
aacgatggtttttcatatcattggtcgtggttgtagtccgt

SEQ ID NO: 1015 - DNA, 43 bp, Homo Sapiens
aacgatggtttttcatatcattggtcgtggttgtagtccgtgc

SEQ ID NO: 1016 - DNA, 44 bp, Homo Sapiens
aacgatggtttttcatatcattggtcgtggttgtagtccgtgcg

SEQ ID NO: 1017 - DNA, 45 bp, Homo Sapiens
aacgatggtttttcatatcattggtcgtggttgtagtccgtgcga

SEQ ID NO: 1018 - DNA, 46 bp, Homo Sapiens
aacgatggtttttcatatcattggtcgtggttgtagtccgtgcgag

SEQ ID NO: 1019 - DNA, 47 bp, Homo Sapiens
aacgatggtttttcatatcattggtcgtggttgtagtccgtgcgaga

SEQ ID NO: 1020 - DNA, 48 bp, Homo Sapiens
aacgatggtttttcatatcattggtcgtggttgtagtccgtgcgagaa

SEQ ID NO: 1021 - DNA, 35 bp, Homo Sapiens
aacgccaaggtcgcgggttcgatccccgtacgggc

SEQ ID NO: 1022 - DNA, 39 bp, Homo Sapiens
aacgccaaggtcgcgggttcgatccccgtacgggccacc

SEQ ID NO: 1023 - DNA, 40 bp, Homo Sapiens
aacgccaaggtcgcgggttcgatccccgtacgggccacca

SEQ ID NO: 1024 - DNA, 33 bp, Homo Sapiens
aacgccaaggtcgcgggttcgatccccgtactg

SEQ ID NO: 1025 - DNA, 17 bp, Homo Sapiens
aactaagtgtttgtggg

SEQ ID NO: 1026 - DNA, 18 bp, Homo Sapiens
aactaagtgtttgtgggt

SEQ ID NO: 1027 - DNA, 19 bp, Homo Sapiens
aactaagtgtttgtgggtt

SEQ ID NO: 1028 - DNA, 20 bp, Homo Sapiens
aactaagtgtttgtgggttt

SEQ ID NO: 1029 - DNA, 21 bp, Homo Sapiens
aactaagtgtttgtgggttta

SEQ ID NO: 1030 - DNA, 22 bp, Homo Sapiens
aactaagtgtttgtgggtttaa

SEQ ID NO: 1031 - DNA, 23 bp, Homo Sapiens
aactaagtgtttgtgggtttaag

SEQ ID NO: 1032 - DNA, 25 bp, Homo Sapiens
aactaagtgtttgtgggtttaagtc

SEQ ID NO: 1033 - DNA, 26 bp, Homo Sapiens
aactaagtgtttgtgggtttaagtcc

SEQ ID NO: 1034 - DNA, 27 bp, Homo Sapiens
aactaagtgtttgtgggtttaagtccc

SEQ ID NO: 1035 - DNA, 28 bp, Homo Sapiens
aactaagtgtttgtgggtttaagtccca

SEQ ID NO: 1036 - DNA, 30 bp, Homo Sapiens
aactaagtgtttgtgggtttaagtcccatt

SEQ ID NO: 1037 - DNA, 33 bp, Homo Sapiens
aactaagtgtttgtgggtttaagtcccattggt

SEQ ID NO: 1038 - DNA, 34 bp, Homo Sapiens
aactaagtgtttgtgggtttaagtcccattggtc

SEQ ID NO: 1039 - DNA, 35 bp, Homo Sapiens
aactaagtgtttgtgggtttaagtcccattggtct

SEQ ID NO: 1040 - DNA, 36 bp, Homo Sapiens
aactaagtgtttgtgggtttaagtcccattggtcta

SEQ ID NO: 1041 - DNA, 37 bp, Homo Sapiens
aactaagtgtttgtgggtttaagtcccattggtctag

SEQ ID NO: 1042 - DNA, 38 bp, Homo Sapiens
aactaagtgtttgtgggtttaagtcccattggtctagc

SEQ ID NO: 1043 - DNA, 39 bp, Homo Sapiens
aactaagtgtttgtgggtttaagtcccattggtctagcc

SEQ ID NO: 1044 - DNA, 40 bp, Homo Sapiens
aactaagtgtttgtgggtttaagtcccattggtctagcca

SEQ ID NO: 1045 - DNA, 16 bp, Homo Sapiens
aactagttttgacaac

SEQ ID NO: 1046 - DNA, 17 bp, Homo Sapiens
aactagttttgacaaca

SEQ ID NO: 1047 - DNA, 20 bp, Homo Sapiens
aactagttttgacaacattc

SEQ ID NO: 1048 - DNA, 29 bp, Homo Sapiens
aactagttttgacaacattcaaaaaagag

SEQ ID NO: 1049 - DNA, 30 bp, Homo Sapiens
aactagttttgacaacattcaaaaaagagt

SEQ ID NO: 1050 - DNA, 31 bp, Homo Sapiens
aactagttttgacaacattcaaaaaagagta

SEQ ID NO: 1051 - DNA, 32 bp, Homo Sapiens
aactagttttgacaacattcaaaaaagagtac

SEQ ID NO: 1052 - DNA, 33 bp, Homo Sapiens
aactagttttgacaacattcaaaaaagagtacc

SEQ ID NO: 1053 - DNA, 34 bp, Homo Sapiens
aactagttttgacaacattcaaaaaagagtacca

SEQ ID NO: 1054 - DNA, 16 bp, Homo Sapiens
aactcatgcccccatg

SEQ ID NO: 1055 - DNA, 17 bp, Homo Sapiens
aactcatgcccccatgt

SEQ ID NO: 1056 - DNA, 18 bp, Homo Sapiens
aactcatgcccccatgtc

SEQ ID NO: 1057 - DNA, 19 bp, Homo Sapiens
aactcatgcccccatgtct

SEQ ID NO: 1058 - DNA, 20 bp, Homo Sapiens
aactcatgcccccatgtcta

SEQ ID NO: 1059 - DNA, 21 bp, Homo Sapiens
aactcatgcccccatgtctaa

SEQ ID NO: 1060 - DNA, 22 bp, Homo Sapiens
aactcatgcccccatgtctaac

SEQ ID NO: 1061 - DNA, 23 bp, Homo Sapiens
aactcatgcccccatgtctaaca

SEQ ID NO: 1062 - DNA, 24 bp, Homo Sapiens
aactcatgcccccatgtctaacaa

SEQ ID NO: 1063 - DNA, 25 bp, Homo Sapiens
aactcatgcccccatgtctaacaac

SEQ ID NO: 1064 - DNA, 26 bp, Homo Sapiens
aactcatgcccccatgtctaacaaca

SEQ ID NO: 1065 - DNA, 27 bp, Homo Sapiens
aactcatgcccccatgtctaacaacat

SEQ ID NO: 1066 - DNA, 28 bp, Homo Sapiens
aactcatgcccccatgtctaacaacatg

SEQ ID NO: 1067 - DNA, 29 bp, Homo Sapiens
aactcatgcccccatgtctaacaacatgg

SEQ ID NO: 1068 - DNA, 30 bp, Homo Sapiens
aactcatgcccccatgtctaacaacatggc

SEQ ID NO: 1069 - DNA, 31 bp, Homo Sapiens
aactcatgcccccatgtctaacaacatggct

SEQ ID NO: 1070 - DNA, 32 bp, Homo Sapiens
aactcatgcccccatgtctaacaacatggctt

SEQ ID NO: 1071 - DNA, 33 bp, Homo Sapiens
aactcatgcccccatgtctaacaacatggcttt

SEQ ID NO: 1072 - DNA, 34 bp, Homo Sapiens
aactcatgcccccatgtctaacaacatggctttc

SEQ ID NO: 1073 - DNA, 35 bp, Homo Sapiens
aactcatgcccccatgtctaacaacatggctttct

SEQ ID NO: 1074 - DNA, 36 bp, Homo Sapiens
aactcatgcccccatgtctaacaacatggctttctc

SEQ ID NO: 1075 - DNA, 37 bp, Homo Sapiens
aactcatgcccccatgtctaacaacatggctttctca

SEQ ID NO: 1076 - DNA, 38 bp, Homo Sapiens
aactcatgcccccatgtctaacaacatggctttctcac

SEQ ID NO: 1077 - DNA, 39 bp, Homo Sapiens
aactcatgcccccatgtctaacaacatggctttctcacc

SEQ ID NO: 1078 - DNA, 40 bp, Homo Sapiens
aactcatgcccccatgtctaacaacatggctttctcacca

SEQ ID NO: 1079 - DNA, 17 bp, Homo Sapiens
aactccaaataaaagta

SEQ ID NO: 1080 - DNA, 18 bp, Homo Sapiens
aactccaaataaaagtac

SEQ ID NO: 1081 - DNA, 19 bp, Homo Sapiens
aactccaaataaaagtacc

SEQ ID NO: 1082 - DNA, 20 bp, Homo Sapiens
aactccaaataaaagtacca

SEQ ID NO: 1083 - DNA, 16 bp, Homo Sapiens
aactgctaactcatgc

SEQ ID NO: 1084 - DNA, 17 bp, Homo Sapiens
aactgctaactcatgcc

SEQ ID NO: 1085 - DNA, 18 bp, Homo Sapiens
aactgctaactcatgccc

SEQ ID NO: 1086 - DNA, 19 bp, Homo Sapiens
aactgctaactcatgcccc

SEQ ID NO: 1087 - DNA, 20 bp, Homo Sapiens
aactgctaactcatgccccc

SEQ ID NO: 1088 - DNA, 21 bp, Homo Sapiens
aactgctaactcatgccccca

SEQ ID NO: 1089 - DNA, 22 bp, Homo Sapiens
aactgctaactcatgcccccat

SEQ ID NO: 1090 - DNA, 23 bp, Homo Sapiens
aactgctaactcatgcccccatg

SEQ ID NO: 1091 - DNA, 24 bp, Homo Sapiens
aactgctaactcatgcccccatgt

SEQ ID NO: 1092 - DNA, 25 bp, Homo Sapiens
aactgctaactcatgcccccatgtc

SEQ ID NO: 1093 - DNA, 26 bp, Homo Sapiens
aactgctaactcatgcccccatgtct

SEQ ID NO: 1094 - DNA, 27 bp, Homo Sapiens
aactgctaactcatgcccccatgtcta

SEQ ID NO: 1095 - DNA, 28 bp, Homo Sapiens
aactgctaactcatgcccccatgtctaa

SEQ ID NO: 1096 - DNA, 29 bp, Homo Sapiens
aactgctaactcatgcccccatgtctaac

SEQ ID NO: 1097 - DNA, 30 bp, Homo Sapiens
aactgctaactcatgcccccatgtctaaca

SEQ ID NO: 1098 - DNA, 31 bp, Homo Sapiens
aactgctaactcatgcccccatgtctaacaa

SEQ ID NO: 1099 - DNA, 32 bp, Homo Sapiens
aactgctaactcatgcccccatgtctaacaac

SEQ ID NO: 1100 - DNA, 33 bp, Homo Sapiens
aactgctaactcatgcccccatgtctaacaaca

SEQ ID NO: 1101 - DNA, 34 bp, Homo Sapiens
aactgctaactcatgcccccatgtctaacaacat

SEQ ID NO: 1102 - DNA, 35 bp, Homo Sapiens
aactgctaactcatgcccccatgtctaacaacatg

SEQ ID NO: 1103 - DNA, 36 bp, Homo Sapiens
aactgctaactcatgcccccatgtctaacaacatgg

SEQ ID NO: 1104 - DNA, 37 bp, Homo Sapiens
aactgctaactcatgcccccatgtctaacaacatggc

SEQ ID NO: 1105 - DNA, 38 bp, Homo Sapiens
aactgctaactcatgcccccatgtctaacaacatggct

SEQ ID NO: 1106 - DNA, 39 bp, Homo Sapiens
aactgctaactcatgcccccatgtctaacaacatggctt

SEQ ID NO: 1107 - DNA, 40 bp, Homo Sapiens
aactgctaactcatgcccccatgtctaacaacatggcttt

SEQ ID NO: 1108 - DNA, 41 bp, Homo Sapiens
aactgctaactcatgcccccatgtctaacaacatggctttc

SEQ ID NO: 1109 - DNA, 42 bp, Homo Sapiens
aactgctaactcatgcccccatgtctaacaacatggctttct

SEQ ID NO: 1110 - DNA, 43 bp, Homo Sapiens
aactgctaactcatgcccccatgtctaacaacatggctttctc

SEQ ID NO: 1111 - DNA, 44 bp, Homo Sapiens
aactgctaactcatgcccccatgtctaacaacatggctttctca

SEQ ID NO: 1112 - DNA, 45 bp, Homo Sapiens
aactgctaactcatgcccccatgtctaacaacatggctttctcac

SEQ ID NO: 1113 - DNA, 46 bp, Homo Sapiens
aactgctaactcatgcccccatgtctaacaacatggctttctcacc

SEQ ID NO: 1114 - DNA, 47 bp, Homo Sapiens
aactgctaactcatgcccccatgtctaacaacatggctttctcacca

SEQ ID NO: 1115 - DNA, 17 bp, Homo Sapiens
aactgggcggaaacacc

SEQ ID NO: 1116 - DNA, 18 bp, Homo Sapiens
aactgggcggaaacacca

SEQ ID NO: 1117 - DNA, 17 bp, Homo Sapiens
aacttaaaactttacag

SEQ ID NO: 1118 - DNA, 21 bp, Homo Sapiens
aacttaaaactttacagtcag

SEQ ID NO: 1119 - DNA, 22 bp, Homo Sapiens
aacttaaaactttacagtcaga

SEQ ID NO: 1120 - DNA, 23 bp, Homo Sapiens
aacttaaaactttacagtcagag

SEQ ID NO: 1121 - DNA, 24 bp, Homo Sapiens
aacttaaaactttacagtcagagg

SEQ ID NO: 1122 - DNA, 26 bp, Homo Sapiens
aacttaaaactttacagtcagaggtt

SEQ ID NO: 1123 - DNA, 27 bp, Homo Sapiens
aacttaaaactttacagtcagaggttc

SEQ ID NO: 1124 - DNA, 28 bp, Homo Sapiens
aacttaaaactttacagtcagaggttca

SEQ ID NO: 1125 - DNA, 35 bp, Homo Sapiens
aacttaaaactttacagtcagaggttcaattcctc

SEQ ID NO: 1126 - DNA, 38 bp, Homo Sapiens
aacttaaaactttacagtcagaggttcaattcctcttc

SEQ ID NO: 1127 - DNA, 39 bp, Homo Sapiens
aacttaaaactttacagtcagaggttcaattcctcttct

SEQ ID NO: 1128 - DNA, 46 bp, Homo Sapiens
aacttaaaactttacagtcagaggttcaattcctcttcttaacacc

SEQ ID NO: 1129 - DNA, 16 bp, Homo Sapiens
aacttaacttgaccgc

SEQ ID NO: 1130 - DNA, 17 bp, Homo Sapiens
aacttaacttgaccgct

SEQ ID NO: 1131 - DNA, 18 bp, Homo Sapiens
aacttaacttgaccgctc

SEQ ID NO: 1132 - DNA, 19 bp, Homo Sapiens
aacttaacttgaccgctct

SEQ ID NO: 1133 - DNA, 20 bp, Homo Sapiens
aacttaacttgaccgctctg

SEQ ID NO: 1134 - DNA, 21 bp, Homo Sapiens
aacttaacttgaccgctctga

SEQ ID NO: 1135 - DNA, 22 bp, Homo Sapiens
aacttaacttgaccgctctgac

SEQ ID NO: 1136 - DNA, 23 bp, Homo Sapiens
aacttaacttgaccgctctgacc

SEQ ID NO: 1137 - DNA, 24 bp, Homo Sapiens
aacttaacttgaccgctctgacca

SEQ ID NO: 1138 - DNA, 16 bp, Homo Sapiens
aacttacacttaggag

SEQ ID NO: 1139 - DNA, 17 bp, Homo Sapiens
aacttacacttaggaga

SEQ ID NO: 1140 - DNA, 18 bp, Homo Sapiens
aacttacacttaggagat

SEQ ID NO: 1141 - DNA, 19 bp, Homo Sapiens
aacttacacttaggagatt

SEQ ID NO: 1142 - DNA, 20 bp, Homo Sapiens
aacttacacttaggagattt

SEQ ID NO: 1143 - DNA, 21 bp, Homo Sapiens
aacttacacttaggagatttc

SEQ ID NO: 1144 - DNA, 22 bp, Homo Sapiens
aacttacacttaggagatttca

SEQ ID NO: 1145 - DNA, 23 bp, Homo Sapiens
aacttacacttaggagatttcaa

SEQ ID NO: 1146 - DNA, 24 bp, Homo Sapiens
aacttacacttaggagatttcaac

SEQ ID NO: 1147 - DNA, 25 bp, Homo Sapiens
aacttacacttaggagatttcaact

SEQ ID NO: 1148 - DNA, 26 bp, Homo Sapiens
aacttacacttaggagatttcaactt

SEQ ID NO: 1149 - DNA, 27 bp, Homo Sapiens
aacttacacttaggagatttcaactta

SEQ ID NO: 1150 - DNA, 28 bp, Homo Sapiens
aacttacacttaggagatttcaacttaa

SEQ ID NO: 1151 - DNA, 29 bp, Homo Sapiens
aacttacacttaggagatttcaacttaac

SEQ ID NO: 1152 - DNA, 30 bp, Homo Sapiens
aacttacacttaggagatttcaacttaact

SEQ ID NO: 1153 - DNA, 31 bp, Homo Sapiens
aacttacacttaggagatttcaacttaactt

SEQ ID NO: 1154 - DNA, 32 bp, Homo Sapiens
aacttacacttaggagatttcaacttaacttg

SEQ ID NO: 1155 - DNA, 34 bp, Homo Sapiens
aacttacacttaggagatttcaacttaacttgac

SEQ ID NO: 1156 - DNA, 35 bp, Homo Sapiens
aacttacacttaggagatttcaacttaacttgacc

SEQ ID NO: 1157 - DNA, 36 bp, Homo Sapiens
aacttacacttaggagatttcaacttaacttgaccg

SEQ ID NO: 1158 - DNA, 37 bp, Homo Sapiens
aacttacacttaggagatttcaacttaacttgaccgc

SEQ ID NO: 1159 - DNA, 38 bp, Homo Sapiens
aacttacacttaggagatttcaacttaacttgaccgct

SEQ ID NO: 1160 - DNA, 39 bp, Homo Sapiens
aacttacacttaggagatttcaacttaacttgaccgctc

SEQ ID NO: 1161 - DNA, 40 bp, Homo Sapiens
aacttacacttaggagatttcaacttaacttgaccgctct

SEQ ID NO: 1162 - DNA, 41 bp, Homo Sapiens
aacttacacttaggagatttcaacttaacttgaccgctctg

SEQ ID NO: 1163 - DNA, 42 bp, Homo Sapiens
aacttacacttaggagatttcaacttaacttgaccgctctga

SEQ ID NO: 1164 - DNA, 43 bp, Homo Sapiens
aacttacacttaggagatttcaacttaacttgaccgctctgac

SEQ ID NO: 1165 - DNA, 44 bp, Homo Sapiens
aacttacacttaggagatttcaacttaacttgaccgctctgacc

SEQ ID NO: 1166 - DNA, 45 bp, Homo Sapiens
aacttacacttaggagatttcaacttaacttgaccgctctgacca

SEQ ID NO: 1167 - DNA, 18 bp, Homo Sapiens
aacttagcattaaccttt

SEQ ID NO: 1168 - DNA, 19 bp, Homo Sapiens
aacttagcattaacctttt

SEQ ID NO: 1169 - DNA, 21 bp, Homo Sapiens
aacttagcattaaccttttaa

SEQ ID NO: 1170 - DNA, 23 bp, Homo Sapiens
aacttagcattaaccttttaagt

SEQ ID NO: 1171 - DNA, 39 bp, Homo Sapiens
aacttagcattaaccttttaagttaaagattaagagaac

SEQ ID NO: 1172 - DNA, 40 bp, Homo Sapiens
aacttagcattaaccttttaagttaaagattaagagaacc

SEQ ID NO: 1173 - DNA, 46 bp, Homo Sapiens
aacttagcattaaccttttaagttaaagattaagagaaccaacacc

SEQ ID NO: 1174 - DNA, 47 bp, Homo Sapiens
aacttagcattaaccttttaagttaaagattaagagaaccaacacct

SEQ ID NO: 1175 - DNA, 17 bp, Homo Sapiens
aacttccaattaactag

SEQ ID NO: 1176 - DNA, 19 bp, Homo Sapiens
aacttccaattaactagtt

SEQ ID NO: 1177 - DNA, 21 bp, Homo Sapiens
aacttccaattaactagtttt

SEQ ID NO: 1178 - DNA, 24 bp, Homo Sapiens
aacttccaattaactagttttgac

SEQ ID NO: 1179 - DNA, 26 bp, Homo Sapiens
aacttccaattaactagttttgacaa

SEQ ID NO: 1180 - DNA, 27 bp, Homo Sapiens
aacttccaattaactagttttgacaac

SEQ ID NO: 1181 - DNA, 28 bp, Homo Sapiens
aacttccaattaactagttttgacaaca

SEQ ID NO: 1182 - DNA, 42 bp, Homo Sapiens
aacttccaattaactagttttgacaacattcaaaaaagagta

SEQ ID NO: 1183 - DNA, 43 bp, Homo Sapiens
aacttccaattaactagttttgacaacattcaaaaaagagtac

SEQ ID NO: 1184 - DNA, 44 bp, Homo Sapiens
aacttccaattaactagttttgacaacattcaaaaaagagtacc

SEQ ID NO: 1185 - DNA, 45 bp, Homo Sapiens
aacttccaattaactagttttgacaacattcaaaaaagagtacca

SEQ ID NO: 1186 - DNA, 16 bp, Homo Sapiens
aacttgaccgctctga

SEQ ID NO: 1187 - DNA, 17 bp, Homo Sapiens
aacttgaccgctctgac

SEQ ID NO: 1188 - DNA, 18 bp, Homo Sapiens
aacttgaccgctctgacc

SEQ ID NO: 1189 - DNA, 19 bp, Homo Sapiens
aacttgaccgctctgacca

SEQ ID NO: 1190 - DNA, 19 bp, Homo Sapiens
aactttacaatcagaggtt

SEQ ID NO: 1191 - DNA, 16 bp, Homo Sapiens
aactttacagtcagag

SEQ ID NO: 1192 - DNA, 17 bp, Homo Sapiens
aactttacagtcagagg

SEQ ID NO: 1193 - DNA, 18 bp, Homo Sapiens
aactttacagtcagaggt

SEQ ID NO: 1194 - DNA, 19 bp, Homo Sapiens
aactttacagtcagaggtt

SEQ ID NO: 1195 - DNA, 20 bp, Homo Sapiens
aactttacagtcagaggttc

SEQ ID NO: 1196 - DNA, 21 bp, Homo Sapiens
aactttacagtcagaggttca

SEQ ID NO: 1197 - DNA, 25 bp, Homo Sapiens
aactttacagtcagaggttcaattc

SEQ ID NO: 1198 - DNA, 26 bp, Homo Sapiens
aactttacagtcagaggttcaattcc

SEQ ID NO: 1199 - DNA, 31 bp, Homo Sapiens
aactttacagtcagaggttcaattcctcttc

SEQ ID NO: 1200 - DNA, 32 bp, Homo Sapiens
aactttacagtcagaggttcaattcctcttct

SEQ ID NO: 1201 - DNA, 26 bp, Homo Sapiens
aactttgtcaaagttaaattataggc

SEQ ID NO: 1202 - DNA, 27 bp, Homo Sapiens
aactttgtcaaagttaaattataggct

SEQ ID NO: 1203 - DNA, 28 bp, Homo Sapiens
aactttgtcaaagttaaattataggcta

SEQ ID NO: 1204 - DNA, 29 bp, Homo Sapiens
aactttgtcaaagttaaattataggctaa

SEQ ID NO: 1205 - DNA, 30 bp, Homo Sapiens
aactttgtcaaagttaaattataggctaaa

SEQ ID NO: 1206 - DNA, 32 bp, Homo Sapiens
aactttgtcaaagttaaattataggctaaatc

SEQ ID NO: 1207 - DNA, 33 bp, Homo Sapiens
aactttgtcaaagttaaattataggctaaatcc

SEQ ID NO: 1208 - DNA, 34 bp, Homo Sapiens
aactttgtcaaagttaaattataggctaaatcct

SEQ ID NO: 1209 - DNA, 37 bp, Homo Sapiens
aactttgtcaaagttaaattataggctaaatcctata

SEQ ID NO: 1210 - DNA, 39 bp, Homo Sapiens
aactttgtcaaagttaaattataggctaaatcctatata

SEQ ID NO: 1211 - DNA, 46 bp, Homo Sapiens
aactttgtcaaagttaaattataggctaaatcctatatatcttacc

SEQ ID NO: 1212 - DNA, 38 bp, Homo Sapiens
aacttttaaaggataacagctatccattggtcttaggc

SEQ ID NO: 1213 - DNA, 16 bp, Homo Sapiens
aagaactgctaactca

SEQ ID NO: 1214 - DNA, 17 bp, Homo Sapiens
aagaactgctaactcat

SEQ ID NO: 1215 - DNA, 18 bp, Homo Sapiens
aagaactgctaactcatg

SEQ ID NO: 1216 - DNA, 19 bp, Homo Sapiens
aagaactgctaactcatgc

SEQ ID NO: 1217 - DNA, 20 bp, Homo Sapiens
aagaactgctaactcatgcc

SEQ ID NO: 1218 - DNA, 21 bp, Homo Sapiens
aagaactgctaactcatgccc

SEQ ID NO: 1219 - DNA, 22 bp, Homo Sapiens
aagaactgctaactcatgcccc

SEQ ID NO: 1220 - DNA, 23 bp, Homo Sapiens
aagaactgctaactcatgccccc

SEQ ID NO: 1221 - DNA, 24 bp, Homo Sapiens
aagaactgctaactcatgccccca

SEQ ID NO: 1222 - DNA, 25 bp, Homo Sapiens
aagaactgctaactcatgcccccat

SEQ ID NO: 1223 - DNA, 26 bp, Homo Sapiens
aagaactgctaactcatgcccccatg

SEQ ID NO: 1224 - DNA, 27 bp, Homo Sapiens
aagaactgctaactcatgcccccatgt

SEQ ID NO: 1225 - DNA, 28 bp, Homo Sapiens
aagaactgctaactcatgcccccatgtc

SEQ ID NO: 1226 - DNA, 29 bp, Homo Sapiens
aagaactgctaactcatgcccccatgtct

SEQ ID NO: 1227 - DNA, 30 bp, Homo Sapiens
aagaactgctaactcatgcccccatgtcta

SEQ ID NO: 1228 - DNA, 31 bp, Homo Sapiens
aagaactgctaactcatgcccccatgtctaa

SEQ ID NO: 1229 - DNA, 32 bp, Homo Sapiens
aagaactgctaactcatgcccccatgtctaac

SEQ ID NO: 1230 - DNA, 33 bp, Homo Sapiens
aagaactgctaactcatgcccccatgtctaaca

SEQ ID NO: 1231 - DNA, 34 bp, Homo Sapiens
aagaactgctaactcatgcccccatgtctaacaa

SEQ ID NO: 1232 - DNA, 35 bp, Homo Sapiens
aagaactgctaactcatgcccccatgtctaacaac

SEQ ID NO: 1233 - DNA, 36 bp, Homo Sapiens
aagaactgctaactcatgcccccatgtctaacaaca

SEQ ID NO: 1234 - DNA, 37 bp, Homo Sapiens
aagaactgctaactcatgcccccatgtctaacaacat

SEQ ID NO: 1235 - DNA, 38 bp, Homo Sapiens
aagaactgctaactcatgcccccatgtctaacaacatg

SEQ ID NO: 1236 - DNA, 39 bp, Homo Sapiens
aagaactgctaactcatgcccccatgtctaacaacatgg

SEQ ID NO: 1237 - DNA, 40 bp, Homo Sapiens
aagaactgctaactcatgcccccatgtctaacaacatggc

SEQ ID NO: 1238 - DNA, 41 bp, Homo Sapiens
aagaactgctaactcatgcccccatgtctaacaacatggct

SEQ ID NO: 1239 - DNA, 42 bp, Homo Sapiens
aagaactgctaactcatgcccccatgtctaacaacatggctt

SEQ ID NO: 1240 - DNA, 43 bp, Homo Sapiens
aagaactgctaactcatgcccccatgtctaacaacatggcttt

SEQ ID NO: 1241 - DNA, 44 bp, Homo Sapiens
aagaactgctaactcatgcccccatgtctaacaacatggctttc

SEQ ID NO: 1242 - DNA, 45 bp, Homo Sapiens
aagaactgctaactcatgcccccatgtctaacaacatggctttct

SEQ ID NO: 1243 - DNA, 46 bp, Homo Sapiens
aagaactgctaactcatgcccccatgtctaacaacatggctttctc

SEQ ID NO: 1244 - DNA, 47 bp, Homo Sapiens
aagaactgctaactcatgcccccatgtctaacaacatggctttctca

SEQ ID NO: 1245 - DNA, 48 bp, Homo Sapiens
aagaactgctaactcatgcccccatgtctaacaacatggctttctcac

SEQ ID NO: 1246 - DNA, 17 bp, Homo Sapiens
aagaagcagcttcaaac

SEQ ID NO: 1247 - DNA, 18 bp, Homo Sapiens
aagaagcagcttcaaacc

SEQ ID NO: 1248 - DNA, 19 bp, Homo Sapiens
aagaagcagcttcaaacct

SEQ ID NO: 1249 - DNA, 20 bp, Homo Sapiens
aagaagcagcttcaaacctg

SEQ ID NO: 1250 - DNA, 26 bp, Homo Sapiens
aagaagcagcttcaaacctgccgggg

SEQ ID NO: 1251 - DNA, 27 bp, Homo Sapiens
aagaagcagcttcaaacctgccggggc

SEQ ID NO: 1252 - DNA, 28 bp, Homo Sapiens
aagaagcagcttcaaacctgccggggct

SEQ ID NO: 1253 - DNA, 29 bp, Homo Sapiens
aagaagcagcttcaaacctgccggggctt

SEQ ID NO: 1254 - DNA, 30 bp, Homo Sapiens
aagaagcagcttcaaacctgccggggcttc

SEQ ID NO: 1255 - DNA, 31 bp, Homo Sapiens
aagaagcagcttcaaacctgccggggcttcc

SEQ ID NO: 1256 - DNA, 32 bp, Homo Sapiens
aagaagcagcttcaaacctgccggggcttcca

SEQ ID NO: 1257 - DNA, 16 bp, Homo Sapiens
aagacaggggttaggc

SEQ ID NO: 1258 - DNA, 17 bp, Homo Sapiens
aagacaggggttaggcc

SEQ ID NO: 1259 - DNA, 18 bp, Homo Sapiens
aagacaggggttaggcct

SEQ ID NO: 1260 - DNA, 19 bp, Homo Sapiens
aagacaggggttaggcctc

SEQ ID NO: 1261 - DNA, 20 bp, Homo Sapiens
aagacaggggttaggcctct

SEQ ID NO: 1262 - DNA, 21 bp, Homo Sapiens
aagacaggggttaggcctctt

SEQ ID NO: 1263 - DNA, 22 bp, Homo Sapiens
aagacaggggttaggcctcttt

SEQ ID NO: 1264 - DNA, 24 bp, Homo Sapiens
aagacaggggttaggcctcttttt

SEQ ID NO: 1265 - DNA, 27 bp, Homo Sapiens
aagacaggggttaggcctctttttacc

SEQ ID NO: 1266 - DNA, 28 bp, Homo Sapiens
aagacaggggttaggcctctttttacca

SEQ ID NO: 1267 - DNA, 29 bp, Homo Sapiens
aagacaggggttaggcctctttttaccac

SEQ ID NO: 1268 - DNA, 30 bp, Homo Sapiens
aagacaggggttaggcctctttttaccacc

SEQ ID NO: 1269 - DNA, 31 bp, Homo Sapiens
aagacaggggttaggcctctttttaccacca

SEQ ID NO: 1270 - DNA, 16 bp, Homo Sapiens
aagactttttctctga

SEQ ID NO: 1271 - DNA, 17 bp, Homo Sapiens
aagactttttctctgac

SEQ ID NO: 1272 - DNA, 18 bp, Homo Sapiens
aagactttttctctgacc

SEQ ID NO: 1273 - DNA, 19 bp, Homo Sapiens
aagactttttctctgacca

SEQ ID NO: 1274 - DNA, 16 bp, Homo Sapiens
aagagaaccaacacct

SEQ ID NO: 1275 - DNA, 17 bp, Homo Sapiens
aagagaaccaacacctc

SEQ ID NO: 1276 - DNA, 18 bp, Homo Sapiens
aagagaaccaacacctct

SEQ ID NO: 1277 - DNA, 20 bp, Homo Sapiens
aagagaaccaacacctcttt

SEQ ID NO: 1278 - DNA, 21 bp, Homo Sapiens
aagagaaccaacacctcttta

SEQ ID NO: 1279 - DNA, 26 bp, Homo Sapiens
aagagaaccaacacctctttacagtg

SEQ ID NO: 1280 - DNA, 27 bp, Homo Sapiens
aagagaaccaacacctctttacagtga

SEQ ID NO: 1281 - DNA, 28 bp, Homo Sapiens
aagagaaccaacacctctttacagtgac

SEQ ID NO: 1282 - DNA, 29 bp, Homo Sapiens
aagagaaccaacacctctttacagtgacc

SEQ ID NO: 1283 - DNA, 30 bp, Homo Sapiens
aagagaaccaacacctctttacagtgacca

SEQ ID NO: 1284 - DNA, 18 bp, Homo Sapiens
aagagccttcaaagccct

SEQ ID NO: 1285 - DNA, 26 bp, Homo Sapiens
aagagccttcaaagccctcagtaagt

SEQ ID NO: 1286 - DNA, 29 bp, Homo Sapiens
aagagccttcaaagccctcagtaagttgc

SEQ ID NO: 1287 - DNA, 30 bp, Homo Sapiens
aagagccttcaaagccctcagtaagttgca

SEQ ID NO: 1288 - DNA, 46 bp, Homo Sapiens
aagagccttcaaagccctcagtaagttgcaatacttaatttctgcc

SEQ ID NO: 1289 - DNA, 47 bp, Homo Sapiens
aagagccttcaaagccctcagtaagttgcaatacttaatttctgcca

SEQ ID NO: 1290 - DNA, 16 bp, Homo Sapiens
aagaggtccccggttc

SEQ ID NO: 1291 - DNA, 17 bp, Homo Sapiens
aagaggtccccggttca

SEQ ID NO: 1292 - DNA, 27 bp, Homo Sapiens
aagaggtccccggttcaaatccgggtg

SEQ ID NO: 1293 - DNA, 33 bp, Homo Sapiens
aagaggtccccggttcaaatccgggtgccccct

SEQ ID NO: 1294 - DNA, 34 bp, Homo Sapiens
aagaggtccccggttcaaatccgggtgccccctc

SEQ ID NO: 1295 - DNA, 35 bp, Homo Sapiens
aagaggtccccggttcaaatccgggtgccccctcc

SEQ ID NO: 1296 - DNA, 16 bp, Homo Sapiens
aagaggtccctggttc

SEQ ID NO: 1297 - DNA, 35 bp, Homo Sapiens
aagaggtccctggttcaaatccgggtgccccctcc

SEQ ID NO: 1298 - DNA, 17 bp, Homo Sapiens
aagagttactttgatag

SEQ ID NO: 1299 - DNA, 18 bp, Homo Sapiens
aagagttactttgataga

SEQ ID NO: 1300 - DNA, 19 bp, Homo Sapiens
aagagttactttgatagag

SEQ ID NO: 1301 - DNA, 20 bp, Homo Sapiens
aagagttactttgatagagt

SEQ ID NO: 1302 - DNA, 33 bp, Homo Sapiens
aagagttactttgatagagtaaataataggagc

SEQ ID NO: 1303 - DNA, 34 bp, Homo Sapiens
aagagttactttgatagagtaaataataggagct

SEQ ID NO: 1304 - DNA, 35 bp, Homo Sapiens
aagagttactttgatagagtaaataataggagctt

SEQ ID NO: 1305 - DNA, 16 bp, Homo Sapiens
aagatccaatggacat

SEQ ID NO: 1306 - DNA, 33 bp, Homo Sapiens
aagatcgcgggttcgaaccccgtccgtgcctcc

SEQ ID NO: 1307 - DNA, 16 bp, Homo Sapiens
aagatggcagagcccg

SEQ ID NO: 1308 - DNA, 17 bp, Homo Sapiens
aagatggcagagcccgg

SEQ ID NO: 1309 - DNA, 18 bp, Homo Sapiens
aagatggcagagcccggt

SEQ ID NO: 1310 - DNA, 19 bp, Homo Sapiens
aagatggcagagcccggta

SEQ ID NO: 1311 - DNA, 20 bp, Homo Sapiens
aagatggcagagcccggtaa

SEQ ID NO: 1312 - DNA, 21 bp, Homo Sapiens
aagatggcagagcccggtaat

SEQ ID NO: 1313 - DNA, 22 bp, Homo Sapiens
aagatggcagagcccggtaatc

SEQ ID NO: 1314 - DNA, 23 bp, Homo Sapiens
aagatggcagagcccggtaatcg

SEQ ID NO: 1315 - DNA, 26 bp, Homo Sapiens
aagatggcagagcccggtaatcgcat

SEQ ID NO: 1316 - DNA, 27 bp, Homo Sapiens
aagatggcagagcccggtaatcgcata

SEQ ID NO: 1317 - DNA, 28 bp, Homo Sapiens
aagatggcagagcccggtaatcgcataa

SEQ ID NO: 1318 - DNA, 29 bp, Homo Sapiens
aagatggcagagcccggtaatcgcataaa

SEQ ID NO: 1319 - DNA, 30 bp, Homo Sapiens
aagatggcagagcccggtaatcgcataaaa

SEQ ID NO: 1320 - DNA, 31 bp, Homo Sapiens
aagatggcagagcccggtaatcgcataaaac

SEQ ID NO: 1321 - DNA, 34 bp, Homo Sapiens
aagatggcagagcccggtaatcgcataaaactta

SEQ ID NO: 1322 - DNA, 35 bp, Homo Sapiens
aagatggcagagcccggtaatcgcataaaacttaa

SEQ ID NO: 1323 - DNA, 36 bp, Homo Sapiens
aagatggcagagcccggtaatcgcataaaacttaaa

SEQ ID NO: 1324 - DNA, 37 bp, Homo Sapiens
aagatggcagagcccggtaatcgcataaaacttaaaa

SEQ ID NO: 1325 - DNA, 38 bp, Homo Sapiens
aagatggcagagcccggtaatcgcataaaacttaaaac

SEQ ID NO: 1326 - DNA, 39 bp, Homo Sapiens
aagatggcagagcccggtaatcgcataaaacttaaaact

SEQ ID NO: 1327 - DNA, 40 bp, Homo Sapiens
aagatggcagagcccggtaatcgcataaaacttaaaactt

SEQ ID NO: 1328 - DNA, 44 bp, Homo Sapiens
aagatggcagagcccggtaatcgcataaaacttaaaactttaca

SEQ ID NO: 1329 - DNA, 16 bp, Homo Sapiens
aagattaagagaacca

SEQ ID NO: 1330 - DNA, 17 bp, Homo Sapiens
aagattaagagaaccaa

SEQ ID NO: 1331 - DNA, 18 bp, Homo Sapiens
aagattaagagaaccaac

SEQ ID NO: 1332 - DNA, 19 bp, Homo Sapiens
aagattaagagaaccaaca

SEQ ID NO: 1333 - DNA, 20 bp, Homo Sapiens
aagattaagagaaccaacac

SEQ ID NO: 1334 - DNA, 21 bp, Homo Sapiens
aagattaagagaaccaacacc

SEQ ID NO: 1335 - DNA, 22 bp, Homo Sapiens
aagattaagagaaccaacacct

SEQ ID NO: 1336 - DNA, 23 bp, Homo Sapiens
aagattaagagaaccaacacctc

SEQ ID NO: 1337 - DNA, 24 bp, Homo Sapiens
aagattaagagaaccaacacctct

SEQ ID NO: 1338 - DNA, 25 bp, Homo Sapiens
aagattaagagaaccaacacctctt

SEQ ID NO: 1339 - DNA, 26 bp, Homo Sapiens
aagattaagagaaccaacacctcttt

SEQ ID NO: 1340 - DNA, 27 bp, Homo Sapiens
aagattaagagaaccaacacctcttta

SEQ ID NO: 1341 - DNA, 28 bp, Homo Sapiens
aagattaagagaaccaacacctctttac

SEQ ID NO: 1342 - DNA, 30 bp, Homo Sapiens
aagattaagagaaccaacacctctttacag

SEQ ID NO: 1343 - DNA, 32 bp, Homo Sapiens
aagattaagagaaccaacacctctttacagtg

SEQ ID NO: 1344 - DNA, 33 bp, Homo Sapiens
aagattaagagaaccaacacctctttacagtga

SEQ ID NO: 1345 - DNA, 34 bp, Homo Sapiens
aagattaagagaaccaacacctctttacagtgac

SEQ ID NO: 1346 - DNA, 35 bp, Homo Sapiens
aagattaagagaaccaacacctctttacagtgacc

SEQ ID NO: 1347 - DNA, 36 bp, Homo Sapiens
aagattaagagaaccaacacctctttacagtgacca

SEQ ID NO: 1348 - DNA, 22 bp, Homo Sapiens
aagattccaggttcgactcctg

SEQ ID NO: 1349 - DNA, 24 bp, Homo Sapiens
aagattccaggttcgactcctggc

SEQ ID NO: 1350 - DNA, 26 bp, Homo Sapiens
aagattccaggttcgactcctggctg

SEQ ID NO: 1351 - DNA, 29 bp, Homo Sapiens
aagattccaggttcgactcctggctggct

SEQ ID NO: 1352 - DNA, 30 bp, Homo Sapiens
aagattccaggttcgactcctggctggctc

SEQ ID NO: 1353 - DNA, 31 bp, Homo Sapiens
aagattccaggttcgactcctggctggctcg

SEQ ID NO: 1354 - DNA, 32 bp, Homo Sapiens
aagattccaggttcgactcctggctggctcgc

SEQ ID NO: 1355 - DNA, 33 bp, Homo Sapiens
aagattccaggttcgactcctggctggctcgcc

SEQ ID NO: 1356 - DNA, 34 bp, Homo Sapiens
aagattccaggttcgactcctggctggctcgcca

SEQ ID NO: 1357 - DNA, 20 bp, Homo Sapiens
aagattcccattcttgcgac

SEQ ID NO: 1358 - DNA, 29 bp, Homo Sapiens
aagattctaggttcgactcctggctggct

SEQ ID NO: 1359 - DNA, 30 bp, Homo Sapiens
aagattctaggttcgactcctggctggctc

SEQ ID NO: 1360 - DNA, 31 bp, Homo Sapiens
aagattctaggttcgactcctggctggctcg

SEQ ID NO: 1361 - DNA, 32 bp, Homo Sapiens
aagattctaggttcgactcctggctggctcgc

SEQ ID NO: 1362 - DNA, 33 bp, Homo Sapiens
aagattctaggttcgactcctggctggctcgcc

SEQ ID NO: 1363 - DNA, 34 bp, Homo Sapiens
aagattctaggttcgactcctggctggctcgcca

SEQ ID NO: 1364 - DNA, 22 bp, Homo Sapiens
aagattgagggttcgaatccct

SEQ ID NO: 1365 - DNA, 33 bp, Homo Sapiens
aagattgagggttcgaatcccttcgtggttgcc

SEQ ID NO: 1366 - DNA, 34 bp, Homo Sapiens
aagattgagggttcgaatcccttcgtggttgcca

SEQ ID NO: 1367 - DNA, 19 bp, Homo Sapiens
aagattgagggttcgagtc

SEQ ID NO: 1368 - DNA, 22 bp, Homo Sapiens
aagattgagggttcgagtccct

SEQ ID NO: 1369 - DNA, 24 bp, Homo Sapiens
aagattgagggttcgagtcccttc

SEQ ID NO: 1370 - DNA, 31 bp, Homo Sapiens
aagattgagggttcgagtcccttcgtggtcg

SEQ ID NO: 1371 - DNA, 32 bp, Homo Sapiens
aagattgagggttcgagtcccttcgtggtcgc

SEQ ID NO: 1372 - DNA, 33 bp, Homo Sapiens
aagattgagggttcgagtcccttcgtggtcgcc

SEQ ID NO: 1373 - DNA, 34 bp, Homo Sapiens
aagattgagggttcgagtcccttcgtggtcgcca

SEQ ID NO: 1374 - DNA, 22 bp, Homo Sapiens
aagattgcaggttcgagtcctg

SEQ ID NO: 1375 - DNA, 24 bp, Homo Sapiens
aagattgcaggttcgagtcctgcc

SEQ ID NO: 1376 - DNA, 30 bp, Homo Sapiens
aagattgcaggttcgagtcctgccgcggtc

SEQ ID NO: 1377 - DNA, 31 bp, Homo Sapiens
aagattgcaggttcgagtcctgccgcggtcg

SEQ ID NO: 1378 - DNA, 32 bp, Homo Sapiens
aagattgcaggttcgagtcctgccgcggtcgc

SEQ ID NO: 1379 - DNA, 33 bp, Homo Sapiens
aagattgcaggttcgagtcctgccgcggtcgcc

SEQ ID NO: 1380 - DNA, 34 bp, Homo Sapiens
aagattgcaggttcgagtcctgccgcggtcgcca

SEQ ID NO: 1381 - DNA, 30 bp, Homo Sapiens
aagcaatacactgaaaatgtttagacgggc

SEQ ID NO: 1382 - DNA, 31 bp, Homo Sapiens
aagcaatacactgaaaatgtttagacgggct

SEQ ID NO: 1383 - DNA, 32 bp, Homo Sapiens
aagcaatacactgaaaatgtttagacgggctc

SEQ ID NO: 1384 - DNA, 33 bp, Homo Sapiens
aagcaatacactgaaaatgtttagacgggctca

SEQ ID NO: 1385 - DNA, 34 bp, Homo Sapiens
aagcaatacactgaaaatgtttagacgggctcac

SEQ ID NO: 1386 - DNA, 35 bp, Homo Sapiens
aagcaatacactgaaaatgtttagacgggctcaca

SEQ ID NO: 1387 - DNA, 37 bp, Homo Sapiens
aagcaatacactgaaaatgtttagacgggctcacatc

SEQ ID NO: 1388 - DNA, 40 bp, Homo Sapiens
aagcaatacactgaaaatgtttagacgggctcacatcacc

SEQ ID NO: 1389 - DNA, 45 bp, Homo Sapiens
aagcaatacactgaaaatgtttagacgggctcacatcaccccata

SEQ ID NO: 1390 - DNA, 16 bp, Homo Sapiens
aagcacccaacttaca

SEQ ID NO: 1391 - DNA, 17 bp, Homo Sapiens
aagcacccaacttacac

SEQ ID NO: 1392 - DNA, 18 bp, Homo Sapiens
aagcacccaacttacact

SEQ ID NO: 1393 - DNA, 20 bp, Homo Sapiens
aagcacccaacttacactta

SEQ ID NO: 1394 - DNA, 21 bp, Homo Sapiens
aagcacccaacttacacttag

SEQ ID NO: 1395 - DNA, 23 bp, Homo Sapiens
aagcacccaacttacacttagga

SEQ ID NO: 1396 - DNA, 27 bp, Homo Sapiens
aagcacccaacttacacttaggagatt

SEQ ID NO: 1397 - DNA, 30 bp, Homo Sapiens
aagcacccaacttacacttaggagatttca

SEQ ID NO: 1398 - DNA, 31 bp, Homo Sapiens
aagcacccaacttacacttaggagatttcaa

SEQ ID NO: 1399 - DNA, 32 bp, Homo Sapiens
aagcacccaacttacacttaggagatttcaac

SEQ ID NO: 1400 - DNA, 34 bp, Homo Sapiens
aagcacccaacttacacttaggagatttcaactt

SEQ ID NO: 1401 - DNA, 35 bp, Homo Sapiens
aagcacccaacttacacttaggagatttcaactta

SEQ ID NO: 1402 - DNA, 36 bp, Homo Sapiens
aagcacccaacttacacttaggagatttcaacttaa

SEQ ID NO: 1403 - DNA, 37 bp, Homo Sapiens
aagcacccaacttacacttaggagatttcaacttaac

SEQ ID NO: 1404 - DNA, 42 bp, Homo Sapiens
aagcacccaacttacacttaggagatttcaacttaacttgac

SEQ ID NO: 1405 - DNA, 43 bp, Homo Sapiens
aagcacccaacttacacttaggagatttcaacttaacttgacc

SEQ ID NO: 1406 - DNA, 44 bp, Homo Sapiens
aagcacccaacttacacttaggagatttcaacttaacttgaccg

SEQ ID NO: 1407 - DNA, 39 bp, Homo Sapiens
aagcactctggactctgaatccagcgatccgagttcgag

SEQ ID NO: 1408 - DNA, 16 bp, Homo Sapiens
aagcagcttcaaacct

SEQ ID NO: 1409 - DNA, 17 bp, Homo Sapiens
aagcagcttcaaacctg

SEQ ID NO: 1410 - DNA, 23 bp, Homo Sapiens
aagcagcttcaaacctgccgggg

SEQ ID NO: 1411 - DNA, 24 bp, Homo Sapiens
aagcagcttcaaacctgccggggc

SEQ ID NO: 1412 - DNA, 25 bp, Homo Sapiens
aagcagcttcaaacctgccggggct

SEQ ID NO: 1413 - DNA, 26 bp, Homo Sapiens
aagcagcttcaaacctgccggggctt

SEQ ID NO: 1414 - DNA, 27 bp, Homo Sapiens
aagcagcttcaaacctgccggggcttc

SEQ ID NO: 1415 - DNA, 28 bp, Homo Sapiens
aagcagcttcaaacctgccggggcttcc

SEQ ID NO: 1416 - DNA, 29 bp, Homo Sapiens
aagcagcttcaaacctgccggggcttcca

SEQ ID NO: 1417 - DNA, 17 bp, Homo Sapiens
aagcagttgacccgggt

SEQ ID NO: 1418 - DNA, 19 bp, Homo Sapiens
aagcagttgacccgggttc

SEQ ID NO: 1419 - DNA, 27 bp, Homo Sapiens
aagcagttgacccgggttcgattcccg

SEQ ID NO: 1420 - DNA, 29 bp, Homo Sapiens
aagcagttgacccgggttcgattcccggc

SEQ ID NO: 1421 - DNA, 30 bp, Homo Sapiens
aagcagttgacccgggttcgattcccggcc

SEQ ID NO: 1422 - DNA, 31 bp, Homo Sapiens
aagcagttgacccgggttcgattcccggcca

SEQ ID NO: 1423 - DNA, 32 bp, Homo Sapiens
aagcagttgacccgggttcgattcccggccaa

SEQ ID NO: 1424 - DNA, 33 bp, Homo Sapiens
aagcagttgacccgggttcgattcccggccaac

SEQ ID NO: 1425 - DNA, 34 bp, Homo Sapiens
aagcagttgacccgggttcgattcccggccaacg

SEQ ID NO: 1426 - DNA, 35 bp, Homo Sapiens
aagcagttgacccgggttcgattcccggccaacgc

SEQ ID NO: 1427 - DNA, 37 bp, Homo Sapiens
aagcagttgacccgggttcgattcccggccaacgcac

SEQ ID NO: 1428 - DNA, 38 bp, Homo Sapiens
aagcagttgacccgggttcgattcccggccaacgcacc

SEQ ID NO: 1429 - DNA, 39 bp, Homo Sapiens
aagcagttgacccgggttcgattcccggccaacgcacca

SEQ ID NO: 1430 - DNA, 32 bp, Homo Sapiens
aagcatagctgccttccaagcagttgacccgg

SEQ ID NO: 1431 - DNA, 34 bp, Homo Sapiens
aagcatagctgccttccaagcagttgacccgggt

SEQ ID NO: 1432 - DNA, 16 bp, Homo Sapiens
aagcattggactgtaa

SEQ ID NO: 1433 - DNA, 17 bp, Homo Sapiens
aagcattggactgtaaa

SEQ ID NO: 1434 - DNA, 18 bp, Homo Sapiens
aagcattggactgtaaat

SEQ ID NO: 1435 - DNA, 19 bp, Homo Sapiens
aagcattggactgtaaatc

SEQ ID NO: 1436 - DNA, 20 bp, Homo Sapiens
aagcattggactgtaaatct

SEQ ID NO: 1437 - DNA, 21 bp, Homo Sapiens
aagcattggactgtaaatcta

SEQ ID NO: 1438 - DNA, 22 bp, Homo Sapiens
aagcattggactgtaaatctaa

SEQ ID NO: 1439 - DNA, 23 bp, Homo Sapiens
aagcattggactgtaaatctaaa

SEQ ID NO: 1440 - DNA, 24 bp, Homo Sapiens
aagcattggactgtaaatctaaag

SEQ ID NO: 1441 - DNA, 25 bp, Homo Sapiens
aagcattggactgtaaatctaaaga

SEQ ID NO: 1442 - DNA, 30 bp, Homo Sapiens
aagcattggactgtaaatctaaagacaggg

SEQ ID NO: 1443 - DNA, 33 bp, Homo Sapiens
aagcattggactgtaaatctaaagacaggggtt

SEQ ID NO: 1444 - DNA, 34 bp, Homo Sapiens
aagcattggactgtaaatctaaagacaggggtta

SEQ ID NO: 1445 - DNA, 36 bp, Homo Sapiens
aagcattggactgtaaatctaaagacaggggttagg

SEQ ID NO: 1446 - DNA, 37 bp, Homo Sapiens
aagcattggactgtaaatctaaagacaggggttaggc

SEQ ID NO: 1447 - DNA, 38 bp, Homo Sapiens
aagcattggactgtaaatctaaagacaggggttaggcc

SEQ ID NO: 1448 - DNA, 39 bp, Homo Sapiens
aagcattggactgtaaatctaaagacaggggttaggcct

SEQ ID NO: 1449 - DNA, 40 bp, Homo Sapiens
aagcattggactgtaaatctaaagacaggggttaggcctc

SEQ ID NO: 1450 - DNA, 42 bp, Homo Sapiens
aagcattggactgtaaatctaaagacaggggttaggcctctt

SEQ ID NO: 1451 - DNA, 43 bp, Homo Sapiens
aagcattggactgtaaatctaaagacaggggttaggcctcttt

SEQ ID NO: 1452 - DNA, 44 bp, Homo Sapiens
aagcattggactgtaaatctaaagacaggggttaggcctctttt

SEQ ID NO: 1453 - DNA, 46 bp, Homo Sapiens
aagcattggactgtaaatctaaagacaggggttaggcctcttttta

SEQ ID NO: 1454 - DNA, 47 bp, Homo Sapiens
aagcattggactgtaaatctaaagacaggggttaggcctctttttac

SEQ ID NO: 1455 - DNA, 2 bp, Homo Sapiens
mt

SEQ ID NO: 1456 - DNA, 16 bp, Homo Sapiens
aagccagggattgtgg

SEQ ID NO: 1457 - DNA, 18 bp, Homo Sapiens
aagccagggattgtgggt

SEQ ID NO: 1458 - DNA, 20 bp, Homo Sapiens
aagccagggattgtgggttc

SEQ ID NO: 1459 - DNA, 21 bp, Homo Sapiens
aagccagggattgtgggttcg

SEQ ID NO: 1460 - DNA, 24 bp, Homo Sapiens
aagccagggattgtgggttcgagt

SEQ ID NO: 1461 - DNA, 33 bp, Homo Sapiens
aagccagggattgtgggttcgagtcccacccgg

SEQ ID NO: 1462 - DNA, 34 bp, Homo Sapiens
aagccagggattgtgggttcgagtcccacccggg

SEQ ID NO: 1463 - DNA, 35 bp, Homo Sapiens
aagccagggattgtgggttcgagtcccacccgggg

SEQ ID NO: 1464 - DNA, 36 bp, Homo Sapiens
aagccagggattgtgggttcgagtcccacccggggt

SEQ ID NO: 1465 - DNA, 37 bp, Homo Sapiens
aagccagggattgtgggttcgagtcccacccggggta

SEQ ID NO: 1466 - DNA, 38 bp, Homo Sapiens
aagccagggattgtgggttcgagtcccacccggggtac

SEQ ID NO: 1467 - DNA, 39 bp, Homo Sapiens
aagccagggattgtgggttcgagtcccacccggggtacc

SEQ ID NO: 1468 - DNA, 40 bp, Homo Sapiens
aagccagggattgtgggttcgagtcccacccggggtacca

SEQ ID NO: 1469 - DNA, 37 bp, Homo Sapiens
aagccagggattgtgggttcgagtcccacctggggta

SEQ ID NO: 1470 - DNA, 38 bp, Homo Sapiens
aagccagggattgtgggttcgagtcccacctggggtac

SEQ ID NO: 1471 - DNA, 39 bp, Homo Sapiens
aagccagggattgtgggttcgagtcccacctggggtacc

SEQ ID NO: 1472 - DNA, 40 bp, Homo Sapiens
aagccagggattgtgggttcgagtcccacctggggtacca

SEQ ID NO: 1473 - DNA, 37 bp, Homo Sapiens
aagccagggattgtgggttcgagtcccacctggggtg

SEQ ID NO: 1474 - DNA, 38 bp, Homo Sapiens
aagccagggattgtgggttcgagtcccacctggggtgc

SEQ ID NO: 1475 - DNA, 39 bp, Homo Sapiens
aagccagggattgtgggttcgagtcccacctggggtgcc

SEQ ID NO: 1476 - DNA, 40 bp, Homo Sapiens
aagccagggattgtgggttcgagtcccacctggggtgcca

SEQ ID NO: 1477 - DNA, 30 bp, Homo Sapiens
aagccagggattgtgggttcgagtcccatc

SEQ ID NO: 1478 - DNA, 31 bp, Homo Sapiens
aagccagggattgtgggttcgagtcccatct

SEQ ID NO: 1479 - DNA, 32 bp, Homo Sapiens
aagccagggattgtgggttcgagtcccatctg

SEQ ID NO: 1480 - DNA, 33 bp, Homo Sapiens
aagccagggattgtgggttcgagtcccatctgg

SEQ ID NO: 1481 - DNA, 35 bp, Homo Sapiens
aagccagggattgtgggttcgagtcccatctgggg

SEQ ID NO: 1482 - DNA, 37 bp, Homo Sapiens
aagccagggattgtgggttcgagtcccatctggggtg

SEQ ID NO: 1483 - DNA, 38 bp, Homo Sapiens
aagccagggattgtgggttcgagtcccatctggggtgc

SEQ ID NO: 1484 - DNA, 39 bp, Homo Sapiens
aagccagggattgtgggttcgagtcccatctggggtgcc

SEQ ID NO: 1485 - DNA, 40 bp, Homo Sapiens
aagccagggattgtgggttcgagtcccatctggggtgcca

SEQ ID NO: 1486 - DNA, 29 bp, Homo Sapiens
aagccagttgattagggtgcttagctgtt

SEQ ID NO: 1487 - DNA, 18 bp, Homo Sapiens
aagccctcagtaagttgc

SEQ ID NO: 1488 - DNA, 33 bp, Homo Sapiens
aagccctcagtaagttgcaatacttaatttctg

SEQ ID NO: 1489 - DNA, 34 bp, Homo Sapiens
aagccctcagtaagttgcaatacttaatttctgc

SEQ ID NO: 1490 - DNA, 35 bp, Homo Sapiens
aagccctcagtaagttgcaatacttaatttctgcc

SEQ ID NO: 1491 - DNA, 36 bp, Homo Sapiens
aagccctcagtaagttgcaatacttaatttctgcca

SEQ ID NO: 1492 - DNA, 16 bp, Homo Sapiens
aagcgtgctgggccca

SEQ ID NO: 1493 - DNA, 17 bp, Homo Sapiens
aagcgtgctgggcccat

SEQ ID NO: 1494 - DNA, 22 bp, Homo Sapiens
aagcgtgctgggcccataaccc

SEQ ID NO: 1495 - DNA, 25 bp, Homo Sapiens
aagcgtgctgggcccataacccaga

SEQ ID NO: 1496 - DNA, 35 bp, Homo Sapiens
aagcgtgctgggcccataacccagaggtcgatgga

SEQ ID NO: 1497 - DNA, 36 bp, Homo Sapiens
aagcgtgctgggcccataacccagaggtcgatggat

SEQ ID NO: 1498 - DNA, 37 bp, Homo Sapiens
aagcgtgctgggcccataacccagaggtcgatggatc

SEQ ID NO: 1499 - DNA, 38 bp, Homo Sapiens
aagcgtgctgggcccataacccagaggtcgatggatcg

SEQ ID NO: 1500 - DNA, 16 bp, Homo Sapiens
aagctatcgggcccat

SEQ ID NO: 1501 - DNA, 17 bp, Homo Sapiens
aagctatcgggcccata

SEQ ID NO: 1502 - DNA, 18 bp, Homo Sapiens
aagctatcgggcccatac

SEQ ID NO: 1503 - DNA, 19 bp, Homo Sapiens
aagctatcgggcccatacc

SEQ ID NO: 1504 - DNA, 20 bp, Homo Sapiens
aagctatcgggcccataccc

SEQ ID NO: 1505 - DNA, 21 bp, Homo Sapiens
aagctatcgggcccatacccc

SEQ ID NO: 1506 - DNA, 22 bp, Homo Sapiens
aagctatcgggcccataccccg

SEQ ID NO: 1507 - DNA, 23 bp, Homo Sapiens
aagctatcgggcccataccccga

SEQ ID NO: 1508 - DNA, 24 bp, Homo Sapiens
aagctatcgggcccataccccgaa

SEQ ID NO: 1509 - DNA, 25 bp, Homo Sapiens
aagctatcgggcccataccccgaaa

SEQ ID NO: 1510 - DNA, 26 bp, Homo Sapiens
aagctatcgggcccataccccgaaaa

SEQ ID NO: 1511 - DNA, 27 bp, Homo Sapiens
aagctatcgggcccataccccgaaaat

SEQ ID NO: 1512 - DNA, 28 bp, Homo Sapiens
aagctatcgggcccataccccgaaaatg

SEQ ID NO: 1513 - DNA, 29 bp, Homo Sapiens
aagctatcgggcccataccccgaaaatgt

SEQ ID NO: 1514 - DNA, 30 bp, Homo Sapiens
aagctatcgggcccataccccgaaaatgtt

SEQ ID NO: 1515 - DNA, 32 bp, Homo Sapiens
aagctatcgggcccataccccgaaaatgttgg

SEQ ID NO: 1516 - DNA, 33 bp, Homo Sapiens
aagctatcgggcccataccccgaaaatgttggt

SEQ ID NO: 1517 - DNA, 34 bp, Homo Sapiens
aagctatcgggcccataccccgaaaatgttggtt

SEQ ID NO: 1518 - DNA, 35 bp, Homo Sapiens
aagctatcgggcccataccccgaaaatgttggtta

SEQ ID NO: 1519 - DNA, 36 bp, Homo Sapiens
aagctatcgggcccataccccgaaaatgttggttat

SEQ ID NO: 1520 - DNA, 37 bp, Homo Sapiens
aagctatcgggcccataccccgaaaatgttggttata

SEQ ID NO: 1521 - DNA, 38 bp, Homo Sapiens
aagctatcgggcccataccccgaaaatgttggttatac

SEQ ID NO: 1522 - DNA, 40 bp, Homo Sapiens
aagctatcgggcccataccccgaaaatgttggttataccc

SEQ ID NO: 1523 - DNA, 41 bp, Homo Sapiens
aagctatcgggcccataccccgaaaatgttggttataccct

SEQ ID NO: 1524 - DNA, 16 bp, Homo Sapiens
aagctcacaagaactg

SEQ ID NO: 1525 - DNA, 17 bp, Homo Sapiens
aagctcacaagaactgc

SEQ ID NO: 1526 - DNA, 18 bp, Homo Sapiens
aagctcacaagaactgct

SEQ ID NO: 1527 - DNA, 19 bp, Homo Sapiens
aagctcacaagaactgcta

SEQ ID NO: 1528 - DNA, 20 bp, Homo Sapiens
aagctcacaagaactgctaa

SEQ ID NO: 1529 - DNA, 21 bp, Homo Sapiens
aagctcacaagaactgctaac

SEQ ID NO: 1530 - DNA, 22 bp, Homo Sapiens
aagctcacaagaactgctaact

SEQ ID NO: 1531 - DNA, 23 bp, Homo Sapiens
aagctcacaagaactgctaactc

SEQ ID NO: 1532 - DNA, 24 bp, Homo Sapiens
aagctcacaagaactgctaactca

SEQ ID NO: 1533 - DNA, 25 bp, Homo Sapiens
aagctcacaagaactgctaactcat

SEQ ID NO: 1534 - DNA, 26 bp, Homo Sapiens
aagctcacaagaactgctaactcatg

SEQ ID NO: 1535 - DNA, 27 bp, Homo Sapiens
aagctcacaagaactgctaactcatgc

SEQ ID NO: 1536 - DNA, 28 bp, Homo Sapiens
aagctcacaagaactgctaactcatgcc

SEQ ID NO: 1537 - DNA, 29 bp, Homo Sapiens
aagctcacaagaactgctaactcatgccc

SEQ ID NO: 1538 - DNA, 30 bp, Homo Sapiens
aagctcacaagaactgctaactcatgcccc

SEQ ID NO: 1539 - DNA, 31 bp, Homo Sapiens
aagctcacaagaactgctaactcatgccccc

SEQ ID NO: 1540 - DNA, 32 bp, Homo Sapiens
aagctcacaagaactgctaactcatgccccca

SEQ ID NO: 1541 - DNA, 33 bp, Homo Sapiens
aagctcacaagaactgctaactcatgcccccat

SEQ ID NO: 1542 - DNA, 34 bp, Homo Sapiens
aagctcacaagaactgctaactcatgcccccatg

SEQ ID NO: 1543 - DNA, 35 bp, Homo Sapiens
aagctcacaagaactgctaactcatgcccccatgt

SEQ ID NO: 1544 - DNA, 36 bp, Homo Sapiens
aagctcacaagaactgctaactcatgcccccatgtc

SEQ ID NO: 1545 - DNA, 37 bp, Homo Sapiens
aagctcacaagaactgctaactcatgcccccatgtct

SEQ ID NO: 1546 - DNA, 39 bp, Homo Sapiens
aagctcacaagaactgctaactcatgcccccatgtctaa

SEQ ID NO: 1547 - DNA, 40 bp, Homo Sapiens
aagctcacaagaactgctaactcatgcccccatgtctaac

SEQ ID NO: 1548 - DNA, 41 bp, Homo Sapiens
aagctcacaagaactgctaactcatgcccccatgtctaaca

SEQ ID NO: 1549 - DNA, 42 bp, Homo Sapiens
aagctcacaagaactgctaactcatgcccccatgtctaacaa

SEQ ID NO: 1550 - DNA, 43 bp, Homo Sapiens
aagctcacaagaactgctaactcatgcccccatgtctaacaac

SEQ ID NO: 1551 - DNA, 44 bp, Homo Sapiens
aagctcacaagaactgctaactcatgcccccatgtctaacaaca

SEQ ID NO: 1552 - DNA, 45 bp, Homo Sapiens
aagctcacaagaactgctaactcatgcccccatgtctaacaacat

SEQ ID NO: 1553 - DNA, 46 bp, Homo Sapiens
aagctcacaagaactgctaactcatgcccccatgtctaacaacatg

SEQ ID NO: 1554 - DNA, 47 bp, Homo Sapiens
aagctcacaagaactgctaactcatgcccccatgtctaacaacatgg

SEQ ID NO: 1555 - DNA, 48 bp, Homo Sapiens
aagctcacaagaactgctaactcatgcccccatgtctaacaacatggc

SEQ ID NO: 1556 - DNA, 16 bp, Homo Sapiens
aaggataacagctatc

SEQ ID NO: 1557 - DNA, 19 bp, Homo Sapiens
aaggataacagctatccat

SEQ ID NO: 1558 - DNA, 21 bp, Homo Sapiens
aaggataacagctatccattg

SEQ ID NO: 1559 - DNA, 24 bp, Homo Sapiens
aaggataacagctatccattggtc

SEQ ID NO: 1560 - DNA, 25 bp, Homo Sapiens
aaggataacagctatccattggtct

SEQ ID NO: 1561 - DNA, 26 bp, Homo Sapiens
aaggataacagctatccattggtctt

SEQ ID NO: 1562 - DNA, 27 bp, Homo Sapiens
aaggataacagctatccattggtctta

SEQ ID NO: 1563 - DNA, 28 bp, Homo Sapiens
aaggataacagctatccattggtcttag

SEQ ID NO: 1564 - DNA, 34 bp, Homo Sapiens
aaggataacagctatccattggtcttaggcccca

SEQ ID NO: 1565 - DNA, 22 bp, Homo Sapiens
aaggcatcagcctccggagctg

SEQ ID NO: 1566 - DNA, 30 bp, Homo Sapiens
aaggcatcagcctccggagctggggattgt

SEQ ID NO: 1567 - DNA, 16 bp, Homo Sapiens
aaggcgccagactcaa

SEQ ID NO: 1568 - DNA, 16 bp, Homo Sapiens
aaggcgctgcgttcag

SEQ ID NO: 1569 - DNA, 16 bp, Homo Sapiens
aaggcgctggatttag

SEQ ID NO: 1570 - DNA, 24 bp, Homo Sapiens
aaggcgtctgacttcggatcagaa

SEQ ID NO: 1571 - DNA, 18 bp, Homo Sapiens
aaggctgcgtgttcgaat

SEQ ID NO: 1572 - DNA, 22 bp, Homo Sapiens
aaggctgcgtgttcgaatcacg

SEQ ID NO: 1573 - DNA, 26 bp, Homo Sapiens
aaggctgcgtgttcgaatcacgtcgg

SEQ ID NO: 1574 - DNA, 28 bp, Homo Sapiens
aaggctgcgtgttcgaatcacgtcgggg

SEQ ID NO: 1575 - DNA, 30 bp, Homo Sapiens
aaggctgcgtgttcgaatcacgtcggggtc

SEQ ID NO: 1576 - DNA, 33 bp, Homo Sapiens
aaggctgcgtgttcgaatcacgtcggggtcacc

SEQ ID NO: 1577 - DNA, 34 bp, Homo Sapiens
aaggctgcgtgttcgaatcacgtcggggtcacca

SEQ ID NO: 1578 - DNA, 16 bp, Homo Sapiens
aagggcttagcttaat

SEQ ID NO: 1579 - DNA, 17 bp, Homo Sapiens
aagggcttagcttaatt

SEQ ID NO: 1580 - DNA, 18 bp, Homo Sapiens
aagggcttagcttaatta

SEQ ID NO: 1581 - DNA, 19 bp, Homo Sapiens
aagggcttagcttaattaa

SEQ ID NO: 1582 - DNA, 20 bp, Homo Sapiens
aagggcttagcttaattaaa

SEQ ID NO: 1583 - DNA, 21 bp, Homo Sapiens
aagggcttagcttaattaaag

SEQ ID NO: 1584 - DNA, 22 bp, Homo Sapiens
aagggcttagcttaattaaagt

SEQ ID NO: 1585 - DNA, 23 bp, Homo Sapiens
aagggcttagcttaattaaagtg

SEQ ID NO: 1586 - DNA, 24 bp, Homo Sapiens
aagggcttagcttaattaaagtgg

SEQ ID NO: 1587 - DNA, 25 bp, Homo Sapiens
aagggcttagcttaattaaagtggc

SEQ ID NO: 1588 - DNA, 26 bp, Homo Sapiens
aagggcttagcttaattaaagtggct

SEQ ID NO: 1589 - DNA, 27 bp, Homo Sapiens
aagggcttagcttaattaaagtggctg

SEQ ID NO: 1590 - DNA, 28 bp, Homo Sapiens
aagggcttagcttaattaaagtggctga

SEQ ID NO: 1591 - DNA, 29 bp, Homo Sapiens
aagggcttagcttaattaaagtggctgat

SEQ ID NO: 1592 - DNA, 30 bp, Homo Sapiens
aagggcttagcttaattaaagtggctgatt

SEQ ID NO: 1593 - DNA, 31 bp, Homo Sapiens
aagggcttagcttaattaaagtggctgattt

SEQ ID NO: 1594 - DNA, 32 bp, Homo Sapiens
aagggcttagcttaattaaagtggctgatttg

SEQ ID NO: 1595 - DNA, 33 bp, Homo Sapiens
aagggcttagcttaattaaagtggctgatttgc

SEQ ID NO: 1596 - DNA, 34 bp, Homo Sapiens
aagggcttagcttaattaaagtggctgatttgcg

SEQ ID NO: 1597 - DNA, 35 bp, Homo Sapiens
aagggcttagcttaattaaagtggctgatttgcgt

SEQ ID NO: 1598 - DNA, 36 bp, Homo Sapiens
aagggcttagcttaattaaagtggctgatttgcgtt

SEQ ID NO: 1599 - DNA, 37 bp, Homo Sapiens
aagggcttagcttaattaaagtggctgatttgcgttc

SEQ ID NO: 1600 - DNA, 39 bp, Homo Sapiens
aagggcttagcttaattaaagtggctgatttgcgttcag

SEQ ID NO: 1601 - DNA, 40 bp, Homo Sapiens
aagggcttagcttaattaaagtggctgatttgcgttcagt

SEQ ID NO: 1602 - DNA, 41 bp, Homo Sapiens
aagggcttagcttaattaaagtggctgatttgcgttcagtt

SEQ ID NO: 1603 - DNA, 45 bp, Homo Sapiens
aagggcttagcttaattaaagtggctgatttgcgttcagttgatg

SEQ ID NO: 1604 - DNA, 16 bp, Homo Sapiens
aaggtattagaaaaac

SEQ ID NO: 1605 - DNA, 17 bp, Homo Sapiens
aaggtattagaaaaacc

SEQ ID NO: 1606 - DNA, 25 bp, Homo Sapiens
aaggtattagaaaaaccatttcata

SEQ ID NO: 1607 - DNA, 28 bp, Homo Sapiens
aaggtattagaaaaaccatttcataact

SEQ ID NO: 1608 - DNA, 29 bp, Homo Sapiens
aaggtattagaaaaaccatttcataactt

SEQ ID NO: 1609 - DNA, 32 bp, Homo Sapiens
aaggtattagaaaaaccatttcataactttgt

SEQ ID NO: 1610 - DNA, 33 bp, Homo Sapiens
aaggtattagaaaaaccatttcataactttgtc

SEQ ID NO: 1611 - DNA, 34 bp, Homo Sapiens
aaggtattagaaaaaccatttcataactttgtca

SEQ ID NO: 1612 - DNA, 37 bp, Homo Sapiens
aaggtattagaaaaaccatttcataactttgtcaaag

SEQ ID NO: 1613 - DNA, 38 bp, Homo Sapiens
aaggtattagaaaaaccatttcataactttgtcaaagt

SEQ ID NO: 1614 - DNA, 39 bp, Homo Sapiens
aaggtattagaaaaaccatttcataactttgtcaaagtt

SEQ ID NO: 1615 - DNA, 40 bp, Homo Sapiens
aaggtattagaaaaaccatttcataactttgtcaaagtta

SEQ ID NO: 1616 - DNA, 42 bp, Homo Sapiens
aaggtattagaaaaaccatttcataactttgtcaaagttaaa

SEQ ID NO: 1617 - DNA, 16 bp, Homo Sapiens
aaggtcagctaaataa

SEQ ID NO: 1618 - DNA, 17 bp, Homo Sapiens
aaggtcagctaaataag

SEQ ID NO: 1619 - DNA, 22 bp, Homo Sapiens
aaggtcagctaaataagctatc

SEQ ID NO: 1620 - DNA, 26 bp, Homo Sapiens
aaggtcagctaaataagctatcgggc

SEQ ID NO: 1621 - DNA, 27 bp, Homo Sapiens
aaggtcagctaaataagctatcgggcc

SEQ ID NO: 1622 - DNA, 28 bp, Homo Sapiens
aaggtcagctaaataagctatcgggccc

SEQ ID NO: 1623 - DNA, 29 bp, Homo Sapiens
aaggtcagctaaataagctatcgggccca

SEQ ID NO: 1624 - DNA, 30 bp, Homo Sapiens
aaggtcagctaaataagctatcgggcccat

SEQ ID NO: 1625 - DNA, 33 bp, Homo Sapiens
aaggtcagctaaataagctatcgggcccatacc

SEQ ID NO: 1626 - DNA, 37 bp, Homo Sapiens
aaggtcagctaaataagctatcgggcccataccccga

SEQ ID NO: 1627 - DNA, 38 bp, Homo Sapiens
aaggtcagctaaataagctatcgggcccataccccgaa

SEQ ID NO: 1628 - DNA, 40 bp, Homo Sapiens
aaggtcagctaaataagctatcgggcccataccccgaaaa

SEQ ID NO: 1629 - DNA, 42 bp, Homo Sapiens
aaggtcagctaaataagctatcgggcccataccccgaaaatg

SEQ ID NO: 1630 - DNA, 48 bp, Homo Sapiens
aaggtcagctaaataagctatcgggcccataccccgaaaatgttggtt

SEQ ID NO: 1631 - DNA, 21 bp, Homo Sapiens
aaggtccccggttcgaaaccg

SEQ ID NO: 1632 - DNA, 30 bp, Homo Sapiens
aaggtccccggttcgaaaccgggcggaaac

SEQ ID NO: 1633 - DNA, 32 bp, Homo Sapiens
aaggtccccggttcgaaaccgggcggaaacac

SEQ ID NO: 1634 - DNA, 32 bp, Homo Sapiens
aaggtccctggttcgatcccgggtttcggcac

SEQ ID NO: 1635 - DNA, 19 bp, Homo Sapiens
aaggtcctgagttcgaacc

SEQ ID NO: 1636 - DNA, 20 bp, Homo Sapiens
aaggtcctgagttcgaacct

SEQ ID NO: 1637 - DNA, 30 bp, Homo Sapiens
aaggtcctgagttcgaacctcagagggggc

SEQ ID NO: 1638 - DNA, 31 bp, Homo Sapiens
aaggtcctgagttcgaacctcagagggggca

SEQ ID NO: 1639 - DNA, 32 bp, Homo Sapiens
aaggtcctgagttcgaacctcagagggggcac

SEQ ID NO: 1640 - DNA, 20 bp, Homo Sapiens
aaggtcctgggttcgagccc

SEQ ID NO: 1641 - DNA, 27 bp, Homo Sapiens
aaggtcctgggttcgagccccagtgga

SEQ ID NO: 1642 - DNA, 28 bp, Homo Sapiens
aaggtcctgggttcgagccccagtggaa

SEQ ID NO: 1643 - DNA, 29 bp, Homo Sapiens
aaggtcctgggttcgagccccagtggaac

SEQ ID NO: 1644 - DNA, 30 bp, Homo Sapiens
aaggtcctgggttcgagccccagtggaacc

SEQ ID NO: 1645 - DNA, 33 bp, Homo Sapiens
aaggtcctgggttcgagccccagtggaaccacc

SEQ ID NO: 1646 - DNA, 34 bp, Homo Sapiens
aaggtcctgggttcgagccccagtggaaccacca

SEQ ID NO: 1647 - DNA, 24 bp, Homo Sapiens
aaggtcgcgggttcgaaccccgta

SEQ ID NO: 1648 - DNA, 29 bp, Homo Sapiens
aaggtcgcgggttcgaaccccgtacgggc

SEQ ID NO: 1649 - DNA, 30 bp, Homo Sapiens
aaggtcgcgggttcgaaccccgtacgggcc

SEQ ID NO: 1650 - DNA, 29 bp, Homo Sapiens
aaggtcgcgggttcgatccccgtacgggc

SEQ ID NO: 1651 - DNA, 30 bp, Homo Sapiens
aaggtcgcgggttcgatccccgtacgggcc

SEQ ID NO: 1652 - DNA, 31 bp, Homo Sapiens
aaggtcgcgggttcgatccccgtacgggcca

SEQ ID NO: 1653 - DNA, 32 bp, Homo Sapiens
aaggtcgcgggttcgatccccgtacgggccac

SEQ ID NO: 1654 - DNA, 33 bp, Homo Sapiens
aaggtcgcgggttcgatccccgtacgggccacc

SEQ ID NO: 1655 - DNA, 34 bp, Homo Sapiens
aaggtcgcgggttcgatccccgtacgggccacca

SEQ ID NO: 1656 - DNA, 28 bp, Homo Sapiens
aaggtcgtgagttcgagcctcacacggg

SEQ ID NO: 1657 - DNA, 30 bp, Homo Sapiens
aaggtcgtgagttcgatcctcacacggggc

SEQ ID NO: 1658 - DNA, 33 bp, Homo Sapiens
aaggtcgtgagttcgatcctcacacggggcacc

SEQ ID NO: 1659 - DNA, 24 bp, Homo Sapiens
aaggttccgggttcgagtcccggc

SEQ ID NO: 1660 - DNA, 28 bp, Homo Sapiens
aaggttccgggttcgagtcccggcggag

SEQ ID NO: 1661 - DNA, 30 bp, Homo Sapiens
aaggttccgggttcgagtcccggcggagtc

SEQ ID NO: 1662 - DNA, 31 bp, Homo Sapiens
aaggttccgggttcgagtcccggcggagtcg

SEQ ID NO: 1663 - DNA, 32 bp, Homo Sapiens
aaggttccgggttcgagtcccggcggagtcgc

SEQ ID NO: 1664 - DNA, 33 bp, Homo Sapiens
aaggttccgggttcgagtcccggcggagtcgcc

SEQ ID NO: 1665 - DNA, 34 bp, Homo Sapiens
aaggttccgggttcgagtcccggcggagtcgcca

SEQ ID NO: 1666 - DNA, 31 bp, Homo Sapiens
aaggttgcgtgttcaagtcacgtcggggtca

SEQ ID NO: 1667 - DNA, 33 bp, Homo Sapiens
aaggttgcgtgttcaagtcacgtcggggtcacc

SEQ ID NO: 1668 - DNA, 31 bp, Homo Sapiens
aaggttggtggttcgagcccacccagggacg

SEQ ID NO: 1669 - DNA, 32 bp, Homo Sapiens
aaggttggtggttcgagcccacccagggacgc

SEQ ID NO: 1670 - DNA, 33 bp, Homo Sapiens
aaggttggtggttcgagcccacccagggacgcc

SEQ ID NO: 1671 - DNA, 33 bp, Homo Sapiens
aaggttgtgggttcgaatcccaccagagtcgcc

SEQ ID NO: 1672 - DNA, 34 bp, Homo Sapiens
aaggttgtgggttcgaatcccaccagagtcgcca

SEQ ID NO: 1673 - DNA, 32 bp, Homo Sapiens
aaggttgtgggttcgagtcccaccagagtcgc

SEQ ID NO: 1674 - DNA, 33 bp, Homo Sapiens
aaggttgtgggttcgagtcccaccagagtcgcc

SEQ ID NO: 1675 - DNA, 34 bp, Homo Sapiens
aaggttgtgggttcgagtcccaccagagtcgcca

SEQ ID NO: 1676 - DNA, 31 bp, Homo Sapiens
aagtaaggtcagctaaataagctatcgggcc

SEQ ID NO: 1677 - DNA, 32 bp, Homo Sapiens
aagtaaggtcagctaaataagctatcgggccc

SEQ ID NO: 1678 - DNA, 17 bp, Homo Sapiens
aagtcacgtcggggtca

SEQ ID NO: 1679 - DNA, 19 bp, Homo Sapiens
aagtcacgtcggggtcacc

SEQ ID NO: 1680 - DNA, 17 bp, Homo Sapiens
aagtcatggaggccatg

SEQ ID NO: 1681 - DNA, 19 bp, Homo Sapiens
aagtcatggaggccatggg

SEQ ID NO: 1682 - DNA, 20 bp, Homo Sapiens
aagtcatggaggccatgggg

SEQ ID NO: 1683 - DNA, 21 bp, Homo Sapiens
aagtcatggaggccatggggt

SEQ ID NO: 1684 - DNA, 22 bp, Homo Sapiens
aagtcatggaggccatggggtt

SEQ ID NO: 1685 - DNA, 23 bp, Homo Sapiens
aagtcatggaggccatggggttg

SEQ ID NO: 1686 - DNA, 24 bp, Homo Sapiens
aagtcatggaggccatggggttgg

SEQ ID NO: 1687 - DNA, 29 bp, Homo Sapiens
aagtcatggaggccatggggttggcttga

SEQ ID NO: 1688 - DNA, 18 bp, Homo Sapiens
aagtcccattggtctagc

SEQ ID NO: 1689 - DNA, 19 bp, Homo Sapiens
aagtcccattggtctagcc

SEQ ID NO: 1690 - DNA, 20 bp, Homo Sapiens
aagtcccattggtctagcca

SEQ ID NO: 1691 - DNA, 16 bp, Homo Sapiens
aagtccctgttcgggc

SEQ ID NO: 1692 - DNA, 18 bp, Homo Sapiens
aagtccctgttcgggcgc

SEQ ID NO: 1693 - DNA, 19 bp, Homo Sapiens
aagtccctgttcgggcgcc

SEQ ID NO: 1694 - DNA, 19 bp, Homo Sapiens
aagtggctgatttgcgttc

SEQ ID NO: 1695 - DNA, 27 bp, Homo Sapiens
aagtggctgatttgcgttcagttgatg

SEQ ID NO: 1696 - DNA, 16 bp, Homo Sapiens
aagtgtttgtgggttt

SEQ ID NO: 1697 - DNA, 17 bp, Homo Sapiens
aagtgtttgtgggttta

SEQ ID NO: 1698 - DNA, 18 bp, Homo Sapiens
aagtgtttgtgggtttaa

SEQ ID NO: 1699 - DNA, 19 bp, Homo Sapiens
aagtgtttgtgggtttaag

SEQ ID NO: 1700 - DNA, 20 bp, Homo Sapiens
aagtgtttgtgggtttaagt

SEQ ID NO: 1701 - DNA, 21 bp, Homo Sapiens
aagtgtttgtgggtttaagtc

SEQ ID NO: 1702 - DNA, 22 bp, Homo Sapiens
aagtgtttgtgggtttaagtcc

SEQ ID NO: 1703 - DNA, 25 bp, Homo Sapiens
aagtgtttgtgggtttaagtcccat

SEQ ID NO: 1704 - DNA, 26 bp, Homo Sapiens
aagtgtttgtgggtttaagtcccatt

SEQ ID NO: 1705 - DNA, 27 bp, Homo Sapiens
aagtgtttgtgggtttaagtcccattg

SEQ ID NO: 1706 - DNA, 28 bp, Homo Sapiens
aagtgtttgtgggtttaagtcccattgg

SEQ ID NO: 1707 - DNA, 29 bp, Homo Sapiens
aagtgtttgtgggtttaagtcccattggt

SEQ ID NO: 1708 - DNA, 30 bp, Homo Sapiens
aagtgtttgtgggtttaagtcccattggtc

SEQ ID NO: 1709 - DNA, 31 bp, Homo Sapiens
aagtgtttgtgggtttaagtcccattggtct

SEQ ID NO: 1710 - DNA, 32 bp, Homo Sapiens
aagtgtttgtgggtttaagtcccattggtcta

SEQ ID NO: 1711 - DNA, 33 bp, Homo Sapiens
aagtgtttgtgggtttaagtcccattggtctag

SEQ ID NO: 1712 - DNA, 34 bp, Homo Sapiens
aagtgtttgtgggtttaagtcccattggtctagc

SEQ ID NO: 1713 - DNA, 35 bp, Homo Sapiens
aagtgtttgtgggtttaagtcccattggtctagcc

SEQ ID NO: 1714 - DNA, 36 bp, Homo Sapiens
aagtgtttgtgggtttaagtcccattggtctagcca

SEQ ID NO: 1715 - DNA, 19 bp, Homo Sapiens
aagttaaagattaagagaa

SEQ ID NO: 1716 - DNA, 20 bp, Homo Sapiens
aagttaaagattaagagaac

SEQ ID NO: 1717 - DNA, 21 bp, Homo Sapiens
aagttaaagattaagagaacc

SEQ ID NO: 1718 - DNA, 22 bp, Homo Sapiens
aagttaaagattaagagaacca

SEQ ID NO: 1719 - DNA, 23 bp, Homo Sapiens
aagttaaagattaagagaaccaa

SEQ ID NO: 1720 - DNA, 24 bp, Homo Sapiens
aagttaaagattaagagaaccaac

SEQ ID NO: 1721 - DNA, 25 bp, Homo Sapiens
aagttaaagattaagagaaccaaca

SEQ ID NO: 1722 - DNA, 26 bp, Homo Sapiens
aagttaaagattaagagaaccaacac

SEQ ID NO: 1723 - DNA, 27 bp, Homo Sapiens
aagttaaagattaagagaaccaacacc

SEQ ID NO: 1724 - DNA, 28 bp, Homo Sapiens
aagttaaagattaagagaaccaacacct

SEQ ID NO: 1725 - DNA, 29 bp, Homo Sapiens
aagttaaagattaagagaaccaacacctc

SEQ ID NO: 1726 - DNA, 30 bp, Homo Sapiens
aagttaaagattaagagaaccaacacctct

SEQ ID NO: 1727 - DNA, 31 bp, Homo Sapiens
aagttaaagattaagagaaccaacacctctt

SEQ ID NO: 1728 - DNA, 32 bp, Homo Sapiens
aagttaaagattaagagaaccaacacctcttt

SEQ ID NO: 1729 - DNA, 33 bp, Homo Sapiens
aagttaaagattaagagaaccaacacctcttta

SEQ ID NO: 1730 - DNA, 38 bp, Homo Sapiens
aagttaaagattaagagaaccaacacctctttacagtg

SEQ ID NO: 1731 - DNA, 39 bp, Homo Sapiens
aagttaaagattaagagaaccaacacctctttacagtga

SEQ ID NO: 1732 - DNA, 40 bp, Homo Sapiens
aagttaaagattaagagaaccaacacctctttacagtgac

SEQ ID NO: 1733 - DNA, 41 bp, Homo Sapiens
aagttaaagattaagagaaccaacacctctttacagtgacc

SEQ ID NO: 1734 - DNA, 42 bp, Homo Sapiens
aagttaaagattaagagaaccaacacctctttacagtgacca

SEQ ID NO: 1735 - DNA, 16 bp, Homo Sapiens
aagttaaattataggc

SEQ ID NO: 1736 - DNA, 17 bp, Homo Sapiens
aagttaaattataggct

SEQ ID NO: 1737 - DNA, 18 bp, Homo Sapiens
aagttaaattataggcta

SEQ ID NO: 1738 - DNA, 19 bp, Homo Sapiens
aagttaaattataggctaa

SEQ ID NO: 1739 - DNA, 20 bp, Homo Sapiens
aagttaaattataggctaaa

SEQ ID NO: 1740 - DNA, 22 bp, Homo Sapiens
aagttaaattataggctaaatc

SEQ ID NO: 1741 - DNA, 23 bp, Homo Sapiens
aagttaaattataggctaaatcc

SEQ ID NO: 1742 - DNA, 24 bp, Homo Sapiens
aagttaaattataggctaaatcct

SEQ ID NO: 1743 - DNA, 27 bp, Homo Sapiens
aagttaaattataggctaaatcctata

SEQ ID NO: 1744 - DNA, 29 bp, Homo Sapiens
aagttaaattataggctaaatcctatata

SEQ ID NO: 1745 - DNA, 32 bp, Homo Sapiens
aagttaaattataggctaaatcctatatatct

SEQ ID NO: 1746 - DNA, 17 bp, Homo Sapiens
aagttctggtctccgga

SEQ ID NO: 1747 - DNA, 22 bp, Homo Sapiens
aagttgcaatacttaatttctg

SEQ ID NO: 1748 - DNA, 23 bp, Homo Sapiens
aagttgcaatacttaatttctgc

SEQ ID NO: 1749 - DNA, 24 bp, Homo Sapiens
aagttgcaatacttaatttctgcc

SEQ ID NO: 1750 - DNA, 25 bp, Homo Sapiens
aagttgcaatacttaatttctgcca

SEQ ID NO: 1751 - DNA, 16 bp, Homo Sapiens
aataagctatcgggcc

SEQ ID NO: 1752 - DNA, 17 bp, Homo Sapiens
aataagctatcgggccc

SEQ ID NO: 1753 - DNA, 18 bp, Homo Sapiens
aataagctatcgggccca

SEQ ID NO: 1754 - DNA, 19 bp, Homo Sapiens
aataagctatcgggcccat

SEQ ID NO: 1755 - DNA, 20 bp, Homo Sapiens
aataagctatcgggcccata

SEQ ID NO: 1756 - DNA, 21 bp, Homo Sapiens
aataagctatcgggcccatac

SEQ ID NO: 1757 - DNA, 22 bp, Homo Sapiens
aataagctatcgggcccatacc

SEQ ID NO: 1758 - DNA, 23 bp, Homo Sapiens
aataagctatcgggcccataccc

SEQ ID NO: 1759 - DNA, 24 bp, Homo Sapiens
aataagctatcgggcccatacccc

SEQ ID NO: 1760 - DNA, 25 bp, Homo Sapiens
aataagctatcgggcccataccccg

SEQ ID NO: 1761 - DNA, 26 bp, Homo Sapiens
aataagctatcgggcccataccccga

SEQ ID NO: 1762 - DNA, 27 bp, Homo Sapiens
aataagctatcgggcccataccccgaa

SEQ ID NO: 1763 - DNA, 28 bp, Homo Sapiens
aataagctatcgggcccataccccgaaa

SEQ ID NO: 1764 - DNA, 29 bp, Homo Sapiens
aataagctatcgggcccataccccgaaaa

SEQ ID NO: 1765 - DNA, 30 bp, Homo Sapiens
aataagctatcgggcccataccccgaaaat

SEQ ID NO: 1766 - DNA, 31 bp, Homo Sapiens
aataagctatcgggcccataccccgaaaatg

SEQ ID NO: 1767 - DNA, 33 bp, Homo Sapiens
aataagctatcgggcccataccccgaaaatgtt

SEQ ID NO: 1768 - DNA, 34 bp, Homo Sapiens
aataagctatcgggcccataccccgaaaatgttg

SEQ ID NO: 1769 - DNA, 36 bp, Homo Sapiens
aataagctatcgggcccataccccgaaaatgttggt

SEQ ID NO: 1770 - DNA, 37 bp, Homo Sapiens
aataagctatcgggcccataccccgaaaatgttggtt

SEQ ID NO: 1771 - DNA, 38 bp, Homo Sapiens
aataagctatcgggcccataccccgaaaatgttggtta

SEQ ID NO: 1772 - DNA, 39 bp, Homo Sapiens
aataagctatcgggcccataccccgaaaatgttggttat

SEQ ID NO: 1773 - DNA, 16 bp, Homo Sapiens
aataataggagcttaa

SEQ ID NO: 1774 - DNA, 17 bp, Homo Sapiens
aataataggagcttaaa

SEQ ID NO: 1775 - DNA, 18 bp, Homo Sapiens
aataataggagcttaaac

SEQ ID NO: 1776 - DNA, 19 bp, Homo Sapiens
aataataggagcttaaacc

SEQ ID NO: 1777 - DNA, 20 bp, Homo Sapiens
aataataggagcttaaaccc

SEQ ID NO: 1778 - DNA, 21 bp, Homo Sapiens
aataataggagcttaaacccc

SEQ ID NO: 1779 - DNA, 22 bp, Homo Sapiens
aataataggagcttaaaccccc

SEQ ID NO: 1780 - DNA, 23 bp, Homo Sapiens
aataataggagcttaaaccccct

SEQ ID NO: 1781 - DNA, 25 bp, Homo Sapiens
aataataggagcttaaaccccctta

SEQ ID NO: 1782 - DNA, 26 bp, Homo Sapiens
aataataggagcttaaacccccttat

SEQ ID NO: 1783 - DNA, 27 bp, Homo Sapiens
aataataggagcttaaacccccttatt

SEQ ID NO: 1784 - DNA, 31 bp, Homo Sapiens
aataataggagcttaaacccccttatttcta

SEQ ID NO: 1785 - DNA, 32 bp, Homo Sapiens
aataataggagcttaaacccccttatttctac

SEQ ID NO: 1786 - DNA, 33 bp, Homo Sapiens
aataataggagcttaaacccccttatttctacc

SEQ ID NO: 1787 - DNA, 34 bp, Homo Sapiens
aataataggagcttaaacccccttatttctacca

SEQ ID NO: 1788 - DNA, 17 bp, Homo Sapiens
aatacaacgatggtttt

SEQ ID NO: 1789 - DNA, 18 bp, Homo Sapiens
aatacaacgatggttttt

SEQ ID NO: 1790 - DNA, 19 bp, Homo Sapiens
aatacaacgatggtttttc

SEQ ID NO: 1791 - DNA, 21 bp, Homo Sapiens
aatacaacgatggtttttcat

SEQ ID NO: 1792 - DNA, 23 bp, Homo Sapiens
aatacaacgatggtttttcatat

SEQ ID NO: 1793 - DNA, 24 bp, Homo Sapiens
aatacaacgatggtttttcatatc

SEQ ID NO: 1794 - DNA, 26 bp, Homo Sapiens
aatacaacgatggtttttcatatcat

SEQ ID NO: 1795 - DNA, 32 bp, Homo Sapiens
aatacaacgatggtttttcatatcattggtcg

SEQ ID NO: 1796 - DNA, 33 bp, Homo Sapiens
aatacaacgatggtttttcatatcattggtcgt

SEQ ID NO: 1797 - DNA, 38 bp, Homo Sapiens
aatacaacgatggtttttcatatcattggtcgtggttg

SEQ ID NO: 1798 - DNA, 39 bp, Homo Sapiens
aatacaacgatggtttttcatatcattggtcgtggttgt

SEQ ID NO: 1799 - DNA, 40 bp, Homo Sapiens
aatacaacgatggtttttcatatcattggtcgtggttgta

SEQ ID NO: 1800 - DNA, 43 bp, Homo Sapiens
aatacaacgatggtttttcatatcattggtcgtggttgtagtc

SEQ ID NO: 1801 - DNA, 44 bp, Homo Sapiens
aatacaacgatggtttttcatatcattggtcgtggttgtagtcc

SEQ ID NO: 1802 - DNA, 45 bp, Homo Sapiens
aatacaacgatggtttttcatatcattggtcgtggttgtagtccg

SEQ ID NO: 1803 - DNA, 48 bp, Homo Sapiens
aatacaacgatggtttttcatatcattggtcgtggttgtagtccgtgc

SEQ ID NO: 1804 - DNA, 16 bp, Homo Sapiens
aatacaccagtcttgt

SEQ ID NO: 1805 - DNA, 28 bp, Homo Sapiens
aatacaccagtcttgtaaaccggagatg

SEQ ID NO: 1806 - DNA, 46 bp, Homo Sapiens
aatacaccagtcttgtaaaccggagatgaaaacctttttccaagga

SEQ ID NO: 1807 - DNA, 48 bp, Homo Sapiens
aatacaccagtcttgtaaaccggagatgaaaacctttttccaaggaca

SEQ ID NO: 1808 - DNA, 26 bp, Homo Sapiens
aatacactgaaaatgtttagacgggc

SEQ ID NO: 1809 - DNA, 27 bp, Homo Sapiens
aatacactgaaaatgtttagacgggct

SEQ ID NO: 1810 - DNA, 28 bp, Homo Sapiens
aatacactgaaaatgtttagacgggctc

SEQ ID NO: 1811 - DNA, 29 bp, Homo Sapiens
aatacactgaaaatgtttagacgggctca

SEQ ID NO: 1812 - DNA, 30 bp, Homo Sapiens
aatacactgaaaatgtttagacgggctcac

SEQ ID NO: 1813 - DNA, 31 bp, Homo Sapiens
aatacactgaaaatgtttagacgggctcaca

SEQ ID NO: 1814 - DNA, 32 bp, Homo Sapiens
aatacactgaaaatgtttagacgggctcacat

SEQ ID NO: 1815 - DNA, 33 bp, Homo Sapiens
aatacactgaaaatgtttagacgggctcacatc

SEQ ID NO: 1816 - DNA, 34 bp, Homo Sapiens
aatacactgaaaatgtttagacgggctcacatca

SEQ ID NO: 1817 - DNA, 35 bp, Homo Sapiens
aatacactgaaaatgtttagacgggctcacatcac

SEQ ID NO: 1818 - DNA, 36 bp, Homo Sapiens
aatacactgaaaatgtttagacgggctcacatcacc

SEQ ID NO: 1819 - DNA, 37 bp, Homo Sapiens
aatacactgaaaatgtttagacgggctcacatcaccc

SEQ ID NO: 1820 - DNA, 38 bp, Homo Sapiens
aatacactgaaaatgtttagacgggctcacatcacccc

SEQ ID NO: 1821 - DNA, 45 bp, Homo Sapiens
aatacactgaaaatgtttagacgggctcacatcaccccataaaca

SEQ ID NO: 1822 - DNA, 47 bp, Homo Sapiens
aatacactgaaaatgtttagacgggctcacatcaccccataaacacc

SEQ ID NO: 1823 - DNA, 48 bp, Homo Sapiens
aatacactgaaaatgtttagacgggctcacatcaccccataaacacca

SEQ ID NO: 1824 - DNA, 16 bp, Homo Sapiens
aatacagaccaagagc

SEQ ID NO: 1825 - DNA, 17 bp, Homo Sapiens
aatacagaccaagagcc

SEQ ID NO: 1826 - DNA, 18 bp, Homo Sapiens
aatacagaccaagagcct

SEQ ID NO: 1827 - DNA, 19 bp, Homo Sapiens
aatacagaccaagagcctt

SEQ ID NO: 1828 - DNA, 20 bp, Homo Sapiens
aatacagaccaagagccttc

SEQ ID NO: 1829 - DNA, 21 bp, Homo Sapiens
aatacagaccaagagccttca

SEQ ID NO: 1830 - DNA, 22 bp, Homo Sapiens
aatacagaccaagagccttcaa

SEQ ID NO: 1831 - DNA, 23 bp, Homo Sapiens
aatacagaccaagagccttcaaa

SEQ ID NO: 1832 - DNA, 24 bp, Homo Sapiens
aatacagaccaagagccttcaaag

SEQ ID NO: 1833 - DNA, 26 bp, Homo Sapiens
aatacagaccaagagccttcaaagcc

SEQ ID NO: 1834 - DNA, 27 bp, Homo Sapiens
aatacagaccaagagccttcaaagccc

SEQ ID NO: 1835 - DNA, 30 bp, Homo Sapiens
aatacagaccaagagccttcaaagccctca

SEQ ID NO: 1836 - DNA, 44 bp, Homo Sapiens
aatacagaccaagagccttcaaagccctcagtaagttgcaatac

SEQ ID NO: 1837 - DNA, 16 bp, Homo Sapiens
aatacttaatttctgc

SEQ ID NO: 1838 - DNA, 17 bp, Homo Sapiens
aatacttaatttctgcc

SEQ ID NO: 1839 - DNA, 18 bp, Homo Sapiens
aatacttaatttctgcca

SEQ ID NO: 1840 - DNA, 38 bp, Homo Sapiens
aatagctcagttgggagagcgttagactgaagatctaa

SEQ ID NO: 1841 - DNA, 16 bp, Homo Sapiens
aataggagcttaaacc

SEQ ID NO: 1842 - DNA, 17 bp, Homo Sapiens
aataggagcttaaaccc

SEQ ID NO: 1843 - DNA, 18 bp, Homo Sapiens
aataggagcttaaacccc

SEQ ID NO: 1844 - DNA, 19 bp, Homo Sapiens
aataggagcttaaaccccc

SEQ ID NO: 1845 - DNA, 20 bp, Homo Sapiens
aataggagcttaaaccccct

SEQ ID NO: 1846 - DNA, 22 bp, Homo Sapiens
aataggagcttaaaccccctta

SEQ ID NO: 1847 - DNA, 24 bp, Homo Sapiens
aataggagcttaaacccccttatt

SEQ ID NO: 1848 - DNA, 26 bp, Homo Sapiens
aataggagcttaaacccccttatttc

SEQ ID NO: 1849 - DNA, 27 bp, Homo Sapiens
aataggagcttaaacccccttatttct

SEQ ID NO: 1850 - DNA, 28 bp, Homo Sapiens
aataggagcttaaacccccttatttcta

SEQ ID NO: 1851 - DNA, 29 bp, Homo Sapiens
aataggagcttaaacccccttatttctac

SEQ ID NO: 1852 - DNA, 30 bp, Homo Sapiens
aataggagcttaaacccccttatttctacc

SEQ ID NO: 1853 - DNA, 31 bp, Homo Sapiens
aataggagcttaaacccccttatttctacca

SEQ ID NO: 1854 - DNA, 16 bp, Homo Sapiens
aatagtaccgttaact

SEQ ID NO: 1855 - DNA, 17 bp, Homo Sapiens
aatagtaccgttaactt

SEQ ID NO: 1856 - DNA, 18 bp, Homo Sapiens
aatagtaccgttaacttc

SEQ ID NO: 1857 - DNA, 19 bp, Homo Sapiens
aatagtaccgttaacttcc

SEQ ID NO: 1858 - DNA, 20 bp, Homo Sapiens
aatagtaccgttaacttcca

SEQ ID NO: 1859 - DNA, 21 bp, Homo Sapiens
aatagtaccgttaacttccaa

SEQ ID NO: 1860 - DNA, 24 bp, Homo Sapiens
aatagtaccgttaacttccaatta

SEQ ID NO: 1861 - DNA, 34 bp, Homo Sapiens
aatagtaccgttaacttccaattaactagttttg

SEQ ID NO: 1862 - DNA, 36 bp, Homo Sapiens
aatagtaccgttaacttccaattaactagttttgac

SEQ ID NO: 1863 - DNA, 37 bp, Homo Sapiens
aatagtaccgttaacttccaattaactagttttgaca

SEQ ID NO: 1864 - DNA, 38 bp, Homo Sapiens
aatagtaccgttaacttccaattaactagttttgacaa

SEQ ID NO: 1865 - DNA, 39 bp, Homo Sapiens
aatagtaccgttaacttccaattaactagttttgacaac

SEQ ID NO: 1866 - DNA, 19 bp, Homo Sapiens
aatagtttaaattagaatc

SEQ ID NO: 1867 - DNA, 20 bp, Homo Sapiens
aatagtttaaattagaatct

SEQ ID NO: 1868 - DNA, 21 bp, Homo Sapiens
aatagtttaaattagaatctt

SEQ ID NO: 1869 - DNA, 26 bp, Homo Sapiens
aatagtttaaattagaatcttagctt

SEQ ID NO: 1870 - DNA, 28 bp, Homo Sapiens
aatagtttaaattagaatcttagctttg

SEQ ID NO: 1871 - DNA, 29 bp, Homo Sapiens
aatagtttaaattagaatcttagctttgg

SEQ ID NO: 1872 - DNA, 29 bp, Homo Sapiens
aatatagtttaaccaaaacatcagattgt

SEQ ID NO: 1873 - DNA, 30 bp, Homo Sapiens
aatatagtttaaccaaaacatcagattgtg

SEQ ID NO: 1874 - DNA, 31 bp, Homo Sapiens
aatatagtttaaccaaaacatcagattgtga

SEQ ID NO: 1875 - DNA, 33 bp, Homo Sapiens
aatatagtttaaccaaaacatcagattgtgaat

SEQ ID NO: 1876 - DNA, 34 bp, Homo Sapiens
aatatagtttaaccaaaacatcagattgtgaatc

SEQ ID NO: 1877 - DNA, 35 bp, Homo Sapiens
aatatagtttaaccaaaacatcagattgtgaatct

SEQ ID NO: 1878 - DNA, 39 bp, Homo Sapiens
aatatagtttaaccaaaacatcagattgtgaatctgaca

SEQ ID NO: 1879 - DNA, 29 bp, Homo Sapiens
aatatgtctgataaaagagttactttgat

SEQ ID NO: 1880 - DNA, 17 bp, Homo Sapiens
aatcacgtcggggtcac

SEQ ID NO: 1881 - DNA, 18 bp, Homo Sapiens
aatcacgtcggggtcacc

SEQ ID NO: 1882 - DNA, 19 bp, Homo Sapiens
aatcacgtcggggtcacca

SEQ ID NO: 1883 - DNA, 16 bp, Homo Sapiens
aatcatatttaccaac

SEQ ID NO: 1884 - DNA, 17 bp, Homo Sapiens
aatcatatttaccaacc

SEQ ID NO: 1885 - DNA, 18 bp, Homo Sapiens
aatcatatttaccaacca

SEQ ID NO: 1886 - DNA, 25 bp, Homo Sapiens
aatccaatgggggttccccgcgcag

SEQ ID NO: 1887 - DNA, 37 bp, Homo Sapiens
aatccaatggggtctccccgcgcaggttcgaaccctg

SEQ ID NO: 1888 - DNA, 41 bp, Homo Sapiens
aatccaatggggtctccccgcgcaggttcgaaccctgctcg

SEQ ID NO: 1889 - DNA, 48 bp, Homo Sapiens
aatccaatggggtttccccgcacaggttcgaatcctgttcgtgacgcc

SEQ ID NO: 1890 - DNA, 37 bp, Homo Sapiens
aatccagaggttccgggttcgagtcccggcagagatg

SEQ ID NO: 1891 - DNA, 38 bp, Homo Sapiens
aatccagaggttccgggttcgagtcccggcagagatgc

SEQ ID NO: 1892 - DNA, 39 bp, Homo Sapiens
aatccagaggttccgggttcgagtcccggcagagatgcc

SEQ ID NO: 1893 - DNA, 40 bp, Homo Sapiens
aatccagaggttccgggttcgagtcccggcagagatgcca

SEQ ID NO: 1894 - DNA, 19 bp, Homo Sapiens
aatccagcaatccgagttc

SEQ ID NO: 1895 - DNA, 21 bp, Homo Sapiens
aatccagcaatccgagttcga

SEQ ID NO: 1896 - DNA, 22 bp, Homo Sapiens
aatccagcaatccgagttcgaa

SEQ ID NO: 1897 - DNA, 23 bp, Homo Sapiens
aatccagcaatccgagttcgaat

SEQ ID NO: 1898 - DNA, 34 bp, Homo Sapiens
aatccagcaatccgagttcgaatctcggtgggac

SEQ ID NO: 1899 - DNA, 38 bp, Homo Sapiens
aatccagcaatccgagttcgaatctcggtgggacctcc

SEQ ID NO: 1900 - DNA, 39 bp, Homo Sapiens
aatccagcaatccgagttcgaatctcggtgggacctcca

SEQ ID NO: 1901 - DNA, 17 bp, Homo Sapiens
aatccagcgatccgagt

SEQ ID NO: 1902 - DNA, 18 bp, Homo Sapiens
aatccagcgatccgagtt

SEQ ID NO: 1903 - DNA, 19 bp, Homo Sapiens
aatccagcgatccgagttc

SEQ ID NO: 1904 - DNA, 20 bp, Homo Sapiens
aatccagcgatccgagttca

SEQ ID NO: 1905 - DNA, 21 bp, Homo Sapiens
aatccagcgatccgagttcaa

SEQ ID NO: 1906 - DNA, 22 bp, Homo Sapiens
aatccagcgatccgagttcaaa

SEQ ID NO: 1907 - DNA, 23 bp, Homo Sapiens
aatccagcgatccgagttcaaat

SEQ ID NO: 1908 - DNA, 24 bp, Homo Sapiens
aatccagcgatccgagttcaaatc

SEQ ID NO: 1909 - DNA, 25 bp, Homo Sapiens
aatccagcgatccgagttcaaatct

SEQ ID NO: 1910 - DNA, 29 bp, Homo Sapiens
aatccagcgatccgagttcaaatctcggt

SEQ ID NO: 1911 - DNA, 30 bp, Homo Sapiens
aatccagcgatccgagttcaaatctcggtg

SEQ ID NO: 1912 - DNA, 31 bp, Homo Sapiens
aatccagcgatccgagttcaaatctcggtgg

SEQ ID NO: 1913 - DNA, 36 bp, Homo Sapiens
aatccagcgatccgagttcaaatctcggtggaacct

SEQ ID NO: 1914 - DNA, 37 bp, Homo Sapiens
aatccagcgatccgagttcaaatctcggtggaacctc

SEQ ID NO: 1915 - DNA, 38 bp, Homo Sapiens
aatccagcgatccgagttcaaatctcggtggaacctcc

SEQ ID NO: 1916 - DNA, 39 bp, Homo Sapiens
aatccagcgatccgagttcaaatctcggtggaacctcca

SEQ ID NO: 1917 - DNA, 32 bp, Homo Sapiens
aatccagcgatccgagttcaaatctcggtggg

SEQ ID NO: 1918 - DNA, 34 bp, Homo Sapiens
aatccagcgatccgagttcaaatctcggtgggac

SEQ ID NO: 1919 - DNA, 35 bp, Homo Sapiens
aatccagcgatccgagttcaaatctcggtgggacc

SEQ ID NO: 1920 - DNA, 36 bp, Homo Sapiens
aatccagcgatccgagttcaaatctcggtgggacct

SEQ ID NO: 1921 - DNA, 37 bp, Homo Sapiens
aatccagcgatccgagttcaaatctcggtgggacctc

SEQ ID NO: 1922 - DNA, 38 bp, Homo Sapiens
aatccagcgatccgagttcaaatctcggtgggacctcc

SEQ ID NO: 1923 - DNA, 39 bp, Homo Sapiens
aatccagcgatccgagttcaaatctcggtgggacctcca

SEQ ID NO: 1924 - DNA, 22 bp, Homo Sapiens
aatccagcgatccgagttcaag

SEQ ID NO: 1925 - DNA, 23 bp, Homo Sapiens
aatccagcgatccgagttcaagt

SEQ ID NO: 1926 - DNA, 37 bp, Homo Sapiens
aatccagcgatccgagttcaagtctcggtggaacctc

SEQ ID NO: 1927 - DNA, 38 bp, Homo Sapiens
aatccagcgatccgagttcaagtctcggtggaacctcc

SEQ ID NO: 1928 - DNA, 39 bp, Homo Sapiens
aatccagcgatccgagttcaagtctcggtggaacctcca

SEQ ID NO: 1929 - DNA, 20 bp, Homo Sapiens
aatccagcgatccgagttcg

SEQ ID NO: 1930 - DNA, 21 bp, Homo Sapiens
aatccagcgatccgagttcga

SEQ ID NO: 1931 - DNA, 22 bp, Homo Sapiens
aatccagcgatccgagttcgag

SEQ ID NO: 1932 - DNA, 23 bp, Homo Sapiens
aatccagcgatccgagttcgagt

SEQ ID NO: 1933 - DNA, 24 bp, Homo Sapiens
aatccagcgatccgagttcgagtc

SEQ ID NO: 1934 - DNA, 25 bp, Homo Sapiens
aatccagcgatccgagttcgagtct

SEQ ID NO: 1935 - DNA, 30 bp, Homo Sapiens
aatccagcgatccgagttcgagtctcggtg

SEQ ID NO: 1936 - DNA, 36 bp, Homo Sapiens
aatccagcgatccgagttcgagtctcggtggaacct

SEQ ID NO: 1937 - DNA, 37 bp, Homo Sapiens
aatccagcgatccgagttcgagtctcggtggaacctc

SEQ ID NO: 1938 - DNA, 38 bp, Homo Sapiens
aatccagcgatccgagttcgagtctcggtggaacctcc

SEQ ID NO: 1939 - DNA, 39 bp, Homo Sapiens
aatccagcgatccgagttcgagtctcggtggaacctcca

SEQ ID NO: 1940 - DNA, 25 bp, Homo Sapiens
aatccattggggtctccccgcgcag

SEQ ID NO: 1941 - DNA, 37 bp, Homo Sapiens
aatccattggggtctccccgcgcaggttcgaatcctg

SEQ ID NO: 1942 - DNA, 40 bp, Homo Sapiens
aatccattggggtctccccgcgcaggttcgaatcctgccg

SEQ ID NO: 1943 - DNA, 41 bp, Homo Sapiens
aatccattggggtctccccgcgcaggttcgaatcctgccga

SEQ ID NO: 1944 - DNA, 42 bp, Homo Sapiens
aatccattggggtctccccgcgcaggttcgaatcctgccgac

SEQ ID NO: 1945 - DNA, 43 bp, Homo Sapiens
aatccattggggtctccccgcgcaggttcgaatcctgccgact

SEQ ID NO: 1946 - DNA, 22 bp, Homo Sapiens
aatccattggggtttccccgcg

SEQ ID NO: 1947 - DNA, 23 bp, Homo Sapiens
aatccattggggtttccccgcgc

SEQ ID NO: 1948 - DNA, 25 bp, Homo Sapiens
aatccattggggtttccccgcgcag

SEQ ID NO: 1949 - DNA, 26 bp, Homo Sapiens
aatccattggggtttccccgcgcagg

SEQ ID NO: 1950 - DNA, 27 bp, Homo Sapiens
aatccattggggtttccccgcgcaggt

SEQ ID NO: 1951 - DNA, 28 bp, Homo Sapiens
aatccattggggtttccccgcgcaggtt

SEQ ID NO: 1952 - DNA, 29 bp, Homo Sapiens
aatccattggggtttccccgcgcaggttc

SEQ ID NO: 1953 - DNA, 37 bp, Homo Sapiens
aatccattggggtttccccgcgcaggttcgaatcctg

SEQ ID NO: 1954 - DNA, 38 bp, Homo Sapiens
aatccattggggtttccccgcgcaggttcgaatcctgc

SEQ ID NO: 1955 - DNA, 39 bp, Homo Sapiens
aatccattggggtttccccgcgcaggttcgaatcctgcc

SEQ ID NO: 1956 - DNA, 40 bp, Homo Sapiens
aatccattggggtttccccgcgcaggttcgaatcctgccg

SEQ ID NO: 1957 - DNA, 41 bp, Homo Sapiens
aatccattggggtttccccgcgcaggttcgaatcctgccga

SEQ ID NO: 1958 - DNA, 42 bp, Homo Sapiens
aatccattggggtttccccgcgcaggttcgaatcctgccgac

SEQ ID NO: 1959 - DNA, 43 bp, Homo Sapiens
aatccattggggtttccccgcgcaggttcgaatcctgccgact

SEQ ID NO: 1960 - DNA, 46 bp, Homo Sapiens
aatccattggggtttccccgcgcaggttcgaatcctgccgactacg

SEQ ID NO: 1961 - DNA, 48 bp, Homo Sapiens
aatccattggggtttccccgcgcaggttcgaatcctgccgactacgcc

SEQ ID NO: 1962 - DNA, 16 bp, Homo Sapiens
aatccattgtgctctg

SEQ ID NO: 1963 - DNA, 23 bp, Homo Sapiens
aatccattgtgctctgcacgcgt

SEQ ID NO: 1964 - DNA, 24 bp, Homo Sapiens
aatccattgtgctctgcacgcgtg

SEQ ID NO: 1965 - DNA, 40 bp, Homo Sapiens
aatccattgtgctttgcacgcgtgggttcgaatcccatcc

SEQ ID NO: 1966 - DNA, 41 bp, Homo Sapiens
aatccattgtgctttgcacgcgtgggttcgaatcccatcct

SEQ ID NO: 1967 - DNA, 48 bp, Homo Sapiens
aatccattgtgctttgcacgcgtgggttcgaatcccatcctcgtcgcc

SEQ ID NO: 1968 - DNA, 18 bp, Homo Sapiens
aatcccaccctcgtcgcc

SEQ ID NO: 1969 - DNA, 19 bp, Homo Sapiens
aatcccaccctcgtcgcca

SEQ ID NO: 1970 - DNA, 16 bp, Homo Sapiens
aatcccaccgctgcca

SEQ ID NO: 1971 - DNA, 17 bp, Homo Sapiens
aatcccaccgctgccac

SEQ ID NO: 1972 - DNA, 18 bp, Homo Sapiens
aatcccaccgctgccacc

SEQ ID NO: 1973 - DNA, 19 bp, Homo Sapiens
aatcccaccgctgccacca

SEQ ID NO: 1974 - DNA, 18 bp, Homo Sapiens
aatcccaccttcgtcgcc

SEQ ID NO: 1975 - DNA, 19 bp, Homo Sapiens
aatcccaccttcgtcgcca

SEQ ID NO: 1976 - DNA, 17 bp, Homo Sapiens
aatcccactcctgacac

SEQ ID NO: 1977 - DNA, 18 bp, Homo Sapiens
aatcccactcctgacacc

SEQ ID NO: 1978 - DNA, 19 bp, Homo Sapiens
aatcccactcctgacacca

SEQ ID NO: 1979 - DNA, 16 bp, Homo Sapiens
aatcccacttctgaca

SEQ ID NO: 1980 - DNA, 18 bp, Homo Sapiens
aatcccacttctgacacc

SEQ ID NO: 1981 - DNA, 19 bp, Homo Sapiens
aatcccacttctgacacca

SEQ ID NO: 1982 - DNA, 16 bp, Homo Sapiens
aatcccagcggggcct

SEQ ID NO: 1983 - DNA, 16 bp, Homo Sapiens
aatcccagcggtgcct

SEQ ID NO: 1984 - DNA, 17 bp, Homo Sapiens
aatcccagcggtgcctc

SEQ ID NO: 1985 - DNA, 18 bp, Homo Sapiens
aatcccagcggtgcctcc

SEQ ID NO: 1986 - DNA, 19 bp, Homo Sapiens
aatcccagcggtgcctcca

SEQ ID NO: 1987 - DNA, 34 bp, Homo Sapiens
aatcccagggtcgtgggttcgagccccacgttgg

SEQ ID NO: 1988 - DNA, 36 bp, Homo Sapiens
aatcccagggtcgtgggttcgagccccacgttgggc

SEQ ID NO: 1989 - DNA, 39 bp, Homo Sapiens
aatcccagggtcgtgggttcgagccccacgttgggcgcc

SEQ ID NO: 1990 - DNA, 18 bp, Homo Sapiens
aatcccagtagagcctcc

SEQ ID NO: 1991 - DNA, 19 bp, Homo Sapiens
aatcccagtagagcctcca

SEQ ID NO: 1992 - DNA, 17 bp, Homo Sapiens
aatcccatcctcgtcgc

SEQ ID NO: 1993 - DNA, 18 bp, Homo Sapiens
aatcccatcctcgtcgcc

SEQ ID NO: 1994 - DNA, 19 bp, Homo Sapiens
aatcccatcctcgtcgcca

SEQ ID NO: 1995 - DNA, 19 bp, Homo Sapiens
aatccccggcacctccacc

SEQ ID NO: 1996 - DNA, 20 bp, Homo Sapiens
aatccccggcacctccacca

SEQ ID NO: 1997 - DNA, 16 bp, Homo Sapiens
aatcccggacgagccc

SEQ ID NO: 1998 - DNA, 17 bp, Homo Sapiens
aatcccggacgagcccc

SEQ ID NO: 1999 - DNA, 18 bp, Homo Sapiens
aatcccggacgagccccc

SEQ ID NO: 2000 - DNA, 19 bp, Homo Sapiens
aatcccggacgagccccca

SEQ ID NO: 2001 - DNA, 19 bp, Homo Sapiens
aatccctccgtggttacca

SEQ ID NO: 2002 - DNA, 16 bp, Homo Sapiens
aatcccttgtgcactg

SEQ ID NO: 2003 - DNA, 16 bp, Homo Sapiens
aatccgagtcacggca

SEQ ID NO: 2004 - DNA, 17 bp, Homo Sapiens
aatccgagtcacggcac

SEQ ID NO: 2005 - DNA, 18 bp, Homo Sapiens
aatccgagtcacggcacc

SEQ ID NO: 2006 - DNA, 19 bp, Homo Sapiens
aatccgagtcacggcacca

SEQ ID NO: 2007 - DNA, 18 bp, Homo Sapiens
aatccggctcgaaggacc

SEQ ID NO: 2008 - DNA, 19 bp, Homo Sapiens
aatccggctcgaaggacca

SEQ ID NO: 2009 - DNA, 18 bp, Homo Sapiens
aatccggctcggaggacc

SEQ ID NO: 2010 - DNA, 17 bp, Homo Sapiens
aatccgggtgccccctc

SEQ ID NO: 2011 - DNA, 18 bp, Homo Sapiens
aatccgggtgccccctcc

SEQ ID NO: 2012 - DNA, 19 bp, Homo Sapiens
aatccgggtgccccctcca

SEQ ID NO: 2013 - DNA, 18 bp, Homo Sapiens
aatcctatatatcttacc

SEQ ID NO: 2014 - DNA, 19 bp, Homo Sapiens
aatcctatatatcttacca

SEQ ID NO: 2015 - DNA, 18 bp, Homo Sapiens
aatcctgccgactacgcc

SEQ ID NO: 2016 - DNA, 19 bp, Homo Sapiens
aatcctgccgactacgcca

SEQ ID NO: 2017 - DNA, 18 bp, Homo Sapiens
aatcctgttcgtgacgcc

SEQ ID NO: 2018 - DNA, 19 bp, Homo Sapiens
aatcctgttcgtgacgcca

SEQ ID NO: 2019 - DNA, 20 bp, Homo Sapiens
aatcgcataaaacttaaaac

SEQ ID NO: 2020 - DNA, 21 bp, Homo Sapiens
aatcgcataaaacttaaaact

SEQ ID NO: 2021 - DNA, 22 bp, Homo Sapiens
aatcgcataaaacttaaaactt

SEQ ID NO: 2022 - DNA, 23 bp, Homo Sapiens
aatcgcataaaacttaaaacttt

SEQ ID NO: 2023 - DNA, 27 bp, Homo Sapiens
aatcgcataaaacttaaaactttacag

SEQ ID NO: 2024 - DNA, 32 bp, Homo Sapiens
aatcgcataaaacttaaaactttacagtcaga

SEQ ID NO: 2025 - DNA, 34 bp, Homo Sapiens
aatcgcataaaacttaaaactttacagtcagagg

SEQ ID NO: 2026 - DNA, 48 bp, Homo Sapiens
aatcgcataaaacttaaaactttacagtcagaggttcaattcctcttc

SEQ ID NO: 2027 - DNA, 21 bp, Homo Sapiens
aatcggttagcgcgcggtact

SEQ ID NO: 2028 - DNA, 23 bp, Homo Sapiens
aatcggttagcgcgcggtactta

SEQ ID NO: 2029 - DNA, 29 bp, Homo Sapiens
aatcggttagcgcgcggtacttataatgc

SEQ ID NO: 2030 - DNA, 20 bp, Homo Sapiens
aatctaaagacaggggttag

SEQ ID NO: 2031 - DNA, 21 bp, Homo Sapiens
aatctaaagacaggggttagg

SEQ ID NO: 2032 - DNA, 23 bp, Homo Sapiens
aatctaaagacaggggttaggcc

SEQ ID NO: 2033 - DNA, 24 bp, Homo Sapiens
aatctaaagacaggggttaggcct

SEQ ID NO: 2034 - DNA, 25 bp, Homo Sapiens
aatctaaagacaggggttaggcctc

SEQ ID NO: 2035 - DNA, 26 bp, Homo Sapiens
aatctaaagacaggggttaggcctct

SEQ ID NO: 2036 - DNA, 27 bp, Homo Sapiens
aatctaaagacaggggttaggcctctt

SEQ ID NO: 2037 - DNA, 28 bp, Homo Sapiens
aatctaaagacaggggttaggcctcttt

SEQ ID NO: 2038 - DNA, 29 bp, Homo Sapiens
aatctaaagacaggggttaggcctctttt

SEQ ID NO: 2039 - DNA, 31 bp, Homo Sapiens
aatctaaagacaggggttaggcctcttttta

SEQ ID NO: 2040 - DNA, 33 bp, Homo Sapiens
aatctaaagacaggggttaggcctctttttacc

SEQ ID NO: 2041 - DNA, 36 bp, Homo Sapiens
aatctaaagacaggggttaggcctctttttaccacc

SEQ ID NO: 2042 - DNA, 37 bp, Homo Sapiens
aatctaaagacaggggttaggcctctttttaccacca

SEQ ID NO: 2043 - DNA, 21 bp, Homo Sapiens
aatctcagggtcgtgggttcg

SEQ ID NO: 2044 - DNA, 35 bp, Homo Sapiens
aatctcagggtcgtgggttcgagccccacgttggg

SEQ ID NO: 2045 - DNA, 36 bp, Homo Sapiens
aatctcagggtcgtgggttcgagccccacgttgggc

SEQ ID NO: 2046 - DNA, 37 bp, Homo Sapiens
aatctcagggtcgtgggttcgagccccacgttgggcg

SEQ ID NO: 2047 - DNA, 38 bp, Homo Sapiens
aatctcagggtcgtgggttcgagccccacgttgggcgc

SEQ ID NO: 2048 - DNA, 39 bp, Homo Sapiens
aatctcagggtcgtgggttcgagccccacgttgggcgcc

SEQ ID NO: 2049 - DNA, 40 bp, Homo Sapiens
aatctcagggtcgtgggttcgagccccacgttgggcgcca

SEQ ID NO: 2050 - DNA, 16 bp, Homo Sapiens
aatctcgctggggcct

SEQ ID NO: 2051 - DNA, 17 bp, Homo Sapiens
aatctcgctggggcctc

SEQ ID NO: 2052 - DNA, 18 bp, Homo Sapiens
aatctcgctggggcctcc

SEQ ID NO: 2053 - DNA, 19 bp, Homo Sapiens
aatctcgctggggcctcca

SEQ ID NO: 2054 - DNA, 16 bp, Homo Sapiens
aatctcggtggaacct

SEQ ID NO: 2055 - DNA, 17 bp, Homo Sapiens
aatctcggtggaacctc

SEQ ID NO: 2056 - DNA, 18 bp, Homo Sapiens
aatctcggtggaacctcc

SEQ ID NO: 2057 - DNA, 19 bp, Homo Sapiens
aatctcggtggaacctcca

SEQ ID NO: 2058 - DNA, 17 bp, Homo Sapiens
aatctcggtgggacccc

SEQ ID NO: 2059 - DNA, 16 bp, Homo Sapiens
aatctcggtgggacct

SEQ ID NO: 2060 - DNA, 17 bp, Homo Sapiens
aatctcggtgggacctc

SEQ ID NO: 2061 - DNA, 18 bp, Homo Sapiens
aatctcggtgggacctcc

SEQ ID NO: 2062 - DNA, 19 bp, Homo Sapiens
aatctcggtgggacctcca

SEQ ID NO: 2063 - DNA, 18 bp, Homo Sapiens
aatctgaaggtcctgagt

SEQ ID NO: 2064 - DNA, 20 bp, Homo Sapiens
aatctgaaggtcctgagttc

SEQ ID NO: 2065 - DNA, 21 bp, Homo Sapiens
aatctgaaggtcctgagttcg

SEQ ID NO: 2066 - DNA, 24 bp, Homo Sapiens
aatctgaaggtcctgagttcgaac

SEQ ID NO: 2067 - DNA, 26 bp, Homo Sapiens
aatctgaaggtcctgagttcgaacct

SEQ ID NO: 2068 - DNA, 35 bp, Homo Sapiens
aatctgaaggtcctgagttcgaacctcagaggggg

SEQ ID NO: 2069 - DNA, 36 bp, Homo Sapiens
aatctgaaggtcctgagttcgaacctcagagggggc

SEQ ID NO: 2070 - DNA, 37 bp, Homo Sapiens
aatctgaaggtcctgagttcgaacctcagagggggca

SEQ ID NO: 2071 - DNA, 38 bp, Homo Sapiens
aatctgaaggtcctgagttcgaacctcagagggggcac

SEQ ID NO: 2072 - DNA, 39 bp, Homo Sapiens
aatctgaaggtcctgagttcgaacctcagagggggcacc

SEQ ID NO: 2073 - DNA, 40 bp, Homo Sapiens
aatctgaaggtcctgagttcgaacctcagagggggcacca

SEQ ID NO: 2074 - DNA, 36 bp, Homo Sapiens
aatctgaaggtcctgagttcgagcctcagagagggc

SEQ ID NO: 2075 - DNA, 37 bp, Homo Sapiens
aatctgaaggtcctgagttcgagcctcagagagggca

SEQ ID NO: 2076 - DNA, 39 bp, Homo Sapiens
aatctgaaggtcctgagttcgagcctcagagagggcacc

SEQ ID NO: 2077 - DNA, 19 bp, Homo Sapiens
aatctgaaggtcgtgagtt

SEQ ID NO: 2078 - DNA, 21 bp, Homo Sapiens
aatctgaaggtcgtgagttcg

SEQ ID NO: 2079 - DNA, 22 bp, Homo Sapiens
aatctgaaggtcgtgagttcga

SEQ ID NO: 2080 - DNA, 24 bp, Homo Sapiens
aatctgaaggtcgtgagttcgagc

SEQ ID NO: 2081 - DNA, 34 bp, Homo Sapiens
aatctgaaggtcgtgagttcgagcctcacacggg

SEQ ID NO: 2082 - DNA, 35 bp, Homo Sapiens
aatctgaaggtcgtgagttcgagcctcacacgggg

SEQ ID NO: 2083 - DNA, 36 bp, Homo Sapiens
aatctgaaggtcgtgagttcgagcctcacacggggc

SEQ ID NO: 2084 - DNA, 37 bp, Homo Sapiens
aatctgaaggtcgtgagttcgagcctcacacggggca

SEQ ID NO: 2085 - DNA, 38 bp, Homo Sapiens
aatctgaaggtcgtgagttcgagcctcacacggggcac

SEQ ID NO: 2086 - DNA, 39 bp, Homo Sapiens
aatctgaaggtcgtgagttcgagcctcacacggggcacc

SEQ ID NO: 2087 - DNA, 40 bp, Homo Sapiens
aatctgaaggtcgtgagttcgagcctcacacggggcacca

SEQ ID NO: 2088 - DNA, 24 bp, Homo Sapiens
aatctgaaggtcgtgagttcgatc

SEQ ID NO: 2089 - DNA, 34 bp, Homo Sapiens
aatctgaaggtcgtgagttcgatcctcacacggg

SEQ ID NO: 2090 - DNA, 35 bp, Homo Sapiens
aatctgaaggtcgtgagttcgatcctcacacgggg

SEQ ID NO: 2091 - DNA, 36 bp, Homo Sapiens
aatctgaaggtcgtgagttcgatcctcacacggggc

SEQ ID NO: 2092 - DNA, 37 bp, Homo Sapiens
aatctgaaggtcgtgagttcgatcctcacacggggca

SEQ ID NO: 2093 - DNA, 38 bp, Homo Sapiens
aatctgaaggtcgtgagttcgatcctcacacggggcac

SEQ ID NO: 2094 - DNA, 39 bp, Homo Sapiens
aatctgaaggtcgtgagttcgatcctcacacggggcacc

SEQ ID NO: 2095 - DNA, 40 bp, Homo Sapiens
aatctgaaggtcgtgagttcgatcctcacacggggcacca

SEQ ID NO: 2096 - DNA, 22 bp, Homo Sapiens
aatctgacaacagaggcttacg

SEQ ID NO: 2097 - DNA, 23 bp, Homo Sapiens
aatctgacaacagaggcttacga

SEQ ID NO: 2098 - DNA, 24 bp, Homo Sapiens
aatctgacaacagaggcttacgac

SEQ ID NO: 2099 - DNA, 25 bp, Homo Sapiens
aatctgacaacagaggcttacgacc

SEQ ID NO: 2100 - DNA, 26 bp, Homo Sapiens
aatctgacaacagaggcttacgaccc

SEQ ID NO: 2101 - DNA, 27 bp, Homo Sapiens
aatctgacaacagaggcttacgacccc

SEQ ID NO: 2102 - DNA, 28 bp, Homo Sapiens
aatctgacaacagaggcttacgacccct

SEQ ID NO: 2103 - DNA, 29 bp, Homo Sapiens
aatctgacaacagaggcttacgacccctt

SEQ ID NO: 2104 - DNA, 30 bp, Homo Sapiens
aatctgacaacagaggcttacgacccctta

SEQ ID NO: 2105 - DNA, 31 bp, Homo Sapiens
aatctgacaacagaggcttacgaccccttat

SEQ ID NO: 2106 - DNA, 32 bp, Homo Sapiens
aatctgacaacagaggcttacgaccccttatt

SEQ ID NO: 2107 - DNA, 34 bp, Homo Sapiens
aatctgacaacagaggcttacgaccccttattta

SEQ ID NO: 2108 - DNA, 35 bp, Homo Sapiens
aatctgacaacagaggcttacgaccccttatttac

SEQ ID NO: 2109 - DNA, 36 bp, Homo Sapiens
aatctgacaacagaggcttacgaccccttatttacc

SEQ ID NO: 2110 - DNA, 37 bp, Homo Sapiens
aatctgacaacagaggcttacgaccccttatttaccc

SEQ ID NO: 2111 - DNA, 38 bp, Homo Sapiens
aatctgacaacagaggcttacgaccccttatttacccc

SEQ ID NO: 2112 - DNA, 39 bp, Homo Sapiens
aatctgacaacagaggcttacgaccccttatttacccca

SEQ ID NO: 2113 - DNA, 29 bp, Homo Sapiens
aatctgagggtccagggttcaagtccctg

SEQ ID NO: 2114 - DNA, 37 bp, Homo Sapiens
aatctgagggtccagggttcaagtccctgttcgggcg

SEQ ID NO: 2115 - DNA, 38 bp, Homo Sapiens
aatctgagggtccagggttcaagtccctgttcgggcgc

SEQ ID NO: 2116 - DNA, 39 bp, Homo Sapiens
aatctgagggtccagggttcaagtccctgttcgggcgcc

SEQ ID NO: 2117 - DNA, 40 bp, Homo Sapiens
aatctgagggtccagggttcaagtccctgttcgggcgcca

SEQ ID NO: 2118 - DNA, 17 bp, Homo Sapiens
aatcttagctttgggtg

SEQ ID NO: 2119 - DNA, 20 bp, Homo Sapiens
aatcttagctttgggtgcta

SEQ ID NO: 2120 - DNA, 30 bp, Homo Sapiens
aatcttagctttgggtgctaatggtggagt

SEQ ID NO: 2121 - DNA, 31 bp, Homo Sapiens
aatcttagctttgggtgctaatggtggagtt

SEQ ID NO: 2122 - DNA, 32 bp, Homo Sapiens
aatcttagctttgggtgctaatggtggagtta

SEQ ID NO: 2123 - DNA, 37 bp, Homo Sapiens
aatcttagctttgggtgctaatggtggagttaaagac

SEQ ID NO: 2124 - DNA, 38 bp, Homo Sapiens
aatcttagctttgggtgctaatggtggagttaaagact

SEQ ID NO: 2125 - DNA, 16 bp, Homo Sapiens
aatgatttcgactcat

SEQ ID NO: 2126 - DNA, 17 bp, Homo Sapiens
aatgatttcgactcatt

SEQ ID NO: 2127 - DNA, 18 bp, Homo Sapiens
aatgatttcgactcatta

SEQ ID NO: 2128 - DNA, 19 bp, Homo Sapiens
aatgatttcgactcattaa

SEQ ID NO: 2129 - DNA, 20 bp, Homo Sapiens
aatgatttcgactcattaaa

SEQ ID NO: 2130 - DNA, 22 bp, Homo Sapiens
aatgatttcgactcattaaatt

SEQ ID NO: 2131 - DNA, 27 bp, Homo Sapiens
aatgatttcgactcattaaattatgat

SEQ ID NO: 2132 - DNA, 28 bp, Homo Sapiens
aatgatttcgactcattaaattatgata

SEQ ID NO: 2133 - DNA, 30 bp, Homo Sapiens
aatgatttcgactcattaaattatgataat

SEQ ID NO: 2134 - DNA, 31 bp, Homo Sapiens
aatgatttcgactcattaaattatgataatc

SEQ ID NO: 2135 - DNA, 40 bp, Homo Sapiens
aatgatttcgactcattaaattatgataatcatatttacc

SEQ ID NO: 2136 - DNA, 44 bp, Homo Sapiens
aatgatttcgactcattaaattatgataatcatatttaccaacc

SEQ ID NO: 2137 - DNA, 19 bp, Homo Sapiens
aatgccgaggttgtgagtt

SEQ ID NO: 2138 - DNA, 20 bp, Homo Sapiens
aatgccgaggttgtgagttc

SEQ ID NO: 2139 - DNA, 24 bp, Homo Sapiens
aatgccgaggttgtgagttcaagc

SEQ ID NO: 2140 - DNA, 23 bp, Homo Sapiens
aatgccgaggttgtgagttcgag

SEQ ID NO: 2141 - DNA, 24 bp, Homo Sapiens
aatgccgaggttgtgagttcgagc

SEQ ID NO: 2142 - DNA, 26 bp, Homo Sapiens
aatgccgaggttgtgagttcgagcct

SEQ ID NO: 2143 - DNA, 34 bp, Homo Sapiens
aatgccgaggttgtgagttcgagcctcacctgga

SEQ ID NO: 2144 - DNA, 35 bp, Homo Sapiens
aatgccgaggttgtgagttcgagcctcacctggag

SEQ ID NO: 2145 - DNA, 37 bp, Homo Sapiens
aatgccgaggttgtgagttcgagcctcacctggagca

SEQ ID NO: 2146 - DNA, 39 bp, Homo Sapiens
aatgccgaggttgtgagttcgagcctcacctggagcacc

SEQ ID NO: 2147 - DNA, 23 bp, Homo Sapiens
aatggacatatgtccgcgtgggt

SEQ ID NO: 2148 - DNA, 25 bp, Homo Sapiens
aatggacatatgtccgcgtgggttc

SEQ ID NO: 2149 - DNA, 26 bp, Homo Sapiens
aatggacatatgtccgcgtgggttcg

SEQ ID NO: 2150 - DNA, 43 bp, Homo Sapiens
aatggacatatgtccgcgtgggttcgaaccccactcctggtac

SEQ ID NO: 2151 - DNA, 16 bp, Homo Sapiens
aatggacgagcgcgct

SEQ ID NO: 2152 - DNA, 17 bp, Homo Sapiens
aatggacgagcgcgctg

SEQ ID NO: 2153 - DNA, 19 bp, Homo Sapiens
aatggacgagcgcgctgga

SEQ ID NO: 2154 - DNA, 16 bp, Homo Sapiens
aatggaggcgtgggtt

SEQ ID NO: 2155 - DNA, 21 bp, Homo Sapiens
aatggaggcgtgggttcgaat

SEQ ID NO: 2156 - DNA, 23 bp, Homo Sapiens
aatggaggcgtgggttcgaatcc

SEQ ID NO: 2157 - DNA, 27 bp, Homo Sapiens
aatggaggcgtgggttcgaatcccact

SEQ ID NO: 2158 - DNA, 29 bp, Homo Sapiens
aatggaggcgtgggttcgaatcccacttc

SEQ ID NO: 2159 - DNA, 31 bp, Homo Sapiens
aatggaggcgtgggttcgaatcccacttctg

SEQ ID NO: 2160 - DNA, 34 bp, Homo Sapiens
aatggaggcgtgggttcgaatcccacttctgaca

SEQ ID NO: 2161 - DNA, 35 bp, Homo Sapiens
aatggaggcgtgggttcgaatcccacttctgacac

SEQ ID NO: 2162 - DNA, 36 bp, Homo Sapiens
aatggaggcgtgggttcgaatcccacttctgacacc

SEQ ID NO: 2163 - DNA, 37 bp, Homo Sapiens
aatggaggcgtgggttcgaatcccacttctgacacca

SEQ ID NO: 2164 - DNA, 18 bp, Homo Sapiens
aatggataacgcgtctga

SEQ ID NO: 2165 - DNA, 19 bp, Homo Sapiens
aatggataacgcgtctgac

SEQ ID NO: 2166 - DNA, 20 bp, Homo Sapiens
aatggataacgcgtctgact

SEQ ID NO: 2167 - DNA, 16 bp, Homo Sapiens
aatggataaggcactg

SEQ ID NO: 2168 - DNA, 17 bp, Homo Sapiens
aatggataaggcactgg

SEQ ID NO: 2169 - DNA, 18 bp, Homo Sapiens
aatggataaggcactggc

SEQ ID NO: 2170 - DNA, 19 bp, Homo Sapiens
aatggataaggcactggcc

SEQ ID NO: 2171 - DNA, 16 bp, Homo Sapiens
aatggataaggcatca

SEQ ID NO: 2172 - DNA, 17 bp, Homo Sapiens
aatggataaggcatcag

SEQ ID NO: 2173 - DNA, 18 bp, Homo Sapiens
aatggataaggcatcagc

SEQ ID NO: 2174 - DNA, 20 bp, Homo Sapiens
aatggataaggcatcagcct

SEQ ID NO: 2175 - DNA, 22 bp, Homo Sapiens
aatggataaggcatcagcctcc

SEQ ID NO: 2176 - DNA, 23 bp, Homo Sapiens
aatggataaggcatcagcctccg

SEQ ID NO: 2177 - DNA, 29 bp, Homo Sapiens
aatggataaggcatcagcctccggagctg

SEQ ID NO: 2178 - DNA, 16 bp, Homo Sapiens
aatggataaggcattg

SEQ ID NO: 2179 - DNA, 17 bp, Homo Sapiens
aatggataaggcattgg

SEQ ID NO: 2180 - DNA, 18 bp, Homo Sapiens
aatggataaggcattggc

SEQ ID NO: 2181 - DNA, 19 bp, Homo Sapiens
aatggataaggcattggcc

SEQ ID NO: 2182 - DNA, 20 bp, Homo Sapiens
aatggataaggcattggcct

SEQ ID NO: 2183 - DNA, 21 bp, Homo Sapiens
aatggataaggcattggcctc

SEQ ID NO: 2184 - DNA, 22 bp, Homo Sapiens
aatggataaggcattggcctcc

SEQ ID NO: 2185 - DNA, 17 bp, Homo Sapiens
aatggataaggcgtctg

SEQ ID NO: 2186 - DNA, 18 bp, Homo Sapiens
aatggataaggcgtctga

SEQ ID NO: 2187 - DNA, 22 bp, Homo Sapiens
aatggataaggcgtctgattcc

SEQ ID NO: 2188 - DNA, 16 bp, Homo Sapiens
aatggatagcgcattg

SEQ ID NO: 2189 - DNA, 17 bp, Homo Sapiens
aatggatagcgcattgg

SEQ ID NO: 2190 - DNA, 18 bp, Homo Sapiens
aatggatagcgcattgga

SEQ ID NO: 2191 - DNA, 19 bp, Homo Sapiens
aatggatagcgcattggac

SEQ ID NO: 2192 - DNA, 20 bp, Homo Sapiens
aatggatagcgcattggact

SEQ ID NO: 2193 - DNA, 25 bp, Homo Sapiens
aatggattcatatccgcgtgggttc

SEQ ID NO: 2194 - DNA, 42 bp, Homo Sapiens
aatggattcatatccgcgtgggttcgaaccccacttctggta

SEQ ID NO: 2195 - DNA, 23 bp, Homo Sapiens
aatggctgagtgaagcattggac

SEQ ID NO: 2196 - DNA, 24 bp, Homo Sapiens
aatggctgagtgaagcattggact

SEQ ID NO: 2197 - DNA, 25 bp, Homo Sapiens
aatggctgagtgaagcattggactg

SEQ ID NO: 2198 - DNA, 26 bp, Homo Sapiens
aatggctgagtgaagcattggactgt

SEQ ID NO: 2199 - DNA, 27 bp, Homo Sapiens
aatggctgagtgaagcattggactgta

SEQ ID NO: 2200 - DNA, 28 bp, Homo Sapiens
aatggctgagtgaagcattggactgtaa

SEQ ID NO: 2201 - DNA, 29 bp, Homo Sapiens
aatggctgagtgaagcattggactgtaaa

SEQ ID NO: 2202 - DNA, 18 bp, Homo Sapiens
aatgggctggtgcccgcg

SEQ ID NO: 2203 - DNA, 44 bp, Homo Sapiens
aatgggctggtgcccgcgtgggttcgaaccccactctcggtacc

SEQ ID NO: 2204 - DNA, 24 bp, Homo Sapiens
aatggggtttccccgcacaggttc

SEQ ID NO: 2205 - DNA, 25 bp, Homo Sapiens
aatggggtttccccgcacaggttcg

SEQ ID NO: 2206 - DNA, 32 bp, Homo Sapiens
aatggggtttccccgcacaggttcgaatcctg

SEQ ID NO: 2207 - DNA, 43 bp, Homo Sapiens
aatggggtttccccgcacaggttcgaatcctgttcgtgacgcc

SEQ ID NO: 2208 - DNA, 17 bp, Homo Sapiens
aatggtaagcactctgg

SEQ ID NO: 2209 - DNA, 18 bp, Homo Sapiens
aatggtaagcactctgga

SEQ ID NO: 2210 - DNA, 18 bp, Homo Sapiens
aatggtagaattctcgcc

SEQ ID NO: 2211 - DNA, 16 bp, Homo Sapiens
aatggtgagcactctg

SEQ ID NO: 2212 - DNA, 17 bp, Homo Sapiens
aatggtgagcactctgg

SEQ ID NO: 2213 - DNA, 18 bp, Homo Sapiens
aatggtgagcactctgga

SEQ ID NO: 2214 - DNA, 20 bp, Homo Sapiens
aatggtgagcactctggact

SEQ ID NO: 2215 - DNA, 32 bp, Homo Sapiens
aatggtgagcactctggactctgaatccagcg

SEQ ID NO: 2216 - DNA, 22 bp, Homo Sapiens
aatggtgagcactttggactct

SEQ ID NO: 2217 - DNA, 23 bp, Homo Sapiens
aatggtgagcactttggactctg

SEQ ID NO: 2218 - DNA, 16 bp, Homo Sapiens
aatggtggagttaaag

SEQ ID NO: 2219 - DNA, 17 bp, Homo Sapiens
aatggtggagttaaaga

SEQ ID NO: 2220 - DNA, 18 bp, Homo Sapiens
aatggtggagttaaagac

SEQ ID NO: 2221 - DNA, 19 bp, Homo Sapiens
aatggtggagttaaagact

SEQ ID NO: 2222 - DNA, 20 bp, Homo Sapiens
aatggtggagttaaagactt

SEQ ID NO: 2223 - DNA, 21 bp, Homo Sapiens
aatggtggagttaaagacttt

SEQ ID NO: 2224 - DNA, 22 bp, Homo Sapiens
aatggtggagttaaagactttt

SEQ ID NO: 2225 - DNA, 23 bp, Homo Sapiens
aatggtggagttaaagacttttt

SEQ ID NO: 2226 - DNA, 24 bp, Homo Sapiens
aatggtggagttaaagactttttc

SEQ ID NO: 2227 - DNA, 25 bp, Homo Sapiens
aatggtggagttaaagactttttct

SEQ ID NO: 2228 - DNA, 26 bp, Homo Sapiens
aatggtggagttaaagactttttctc

SEQ ID NO: 2229 - DNA, 27 bp, Homo Sapiens
aatggtggagttaaagactttttctct

SEQ ID NO: 2230 - DNA, 28 bp, Homo Sapiens
aatggtggagttaaagactttttctctg

SEQ ID NO: 2231 - DNA, 29 bp, Homo Sapiens
aatggtggagttaaagactttttctctga

SEQ ID NO: 2232 - DNA, 30 bp, Homo Sapiens
aatggtggagttaaagactttttctctgac

SEQ ID NO: 2233 - DNA, 31 bp, Homo Sapiens
aatggtggagttaaagactttttctctgacc

SEQ ID NO: 2234 - DNA, 32 bp, Homo Sapiens
aatggtggagttaaagactttttctctgacca

SEQ ID NO: 2235 - DNA, 28 bp, Homo Sapiens
aatggtggttcagtggtagaattctcgc

SEQ ID NO: 2236 - DNA, 30 bp, Homo Sapiens
aatggtggttcagtggtagaattctcgcct

SEQ ID NO: 2237 - DNA, 16 bp, Homo Sapiens
aatggttagcactctg

SEQ ID NO: 2238 - DNA, 17 bp, Homo Sapiens
aatggttagcactctgg

SEQ ID NO: 2239 - DNA, 18 bp, Homo Sapiens
aatggttagcactctgga

SEQ ID NO: 2240 - DNA, 19 bp, Homo Sapiens
aatggttagcactctggac

SEQ ID NO: 2241 - DNA, 20 bp, Homo Sapiens
aatggttagcactctggact

SEQ ID NO: 2242 - DNA, 21 bp, Homo Sapiens
aatggttagcactctggactc

SEQ ID NO: 2243 - DNA, 22 bp, Homo Sapiens
aatggttagcactctggactct

SEQ ID NO: 2244 - DNA, 23 bp, Homo Sapiens
aatggttagcactctggactctg

SEQ ID NO: 2245 - DNA, 24 bp, Homo Sapiens
aatggttagcactctggactctga

SEQ ID NO: 2246 - DNA, 25 bp, Homo Sapiens
aatggttagcactctggactctgaa

SEQ ID NO: 2247 - DNA, 26 bp, Homo Sapiens
aatggttagcactctggactctgaat

SEQ ID NO: 2248 - DNA, 27 bp, Homo Sapiens
aatggttagcactctggactctgaatc

SEQ ID NO: 2249 - DNA, 28 bp, Homo Sapiens
aatggttagcactctggactctgaatcc

SEQ ID NO: 2250 - DNA, 29 bp, Homo Sapiens
aatggttagcactctggactctgaatcca

SEQ ID NO: 2251 - DNA, 31 bp, Homo Sapiens
aatggttagcactctggactctgaatccagc

SEQ ID NO: 2252 - DNA, 32 bp, Homo Sapiens
aatggttagcactctggactctgaatccagcg

SEQ ID NO: 2253 - DNA, 39 bp, Homo Sapiens
aatggttagcactctggactctgaatccagcgatccgag

SEQ ID NO: 2254 - DNA, 40 bp, Homo Sapiens
aatggttagcactctggactctgaatccagcgatccgagt

SEQ ID NO: 2255 - DNA, 43 bp, Homo Sapiens
aatggttagcactctggactctgaatccagcgatccgagttca

SEQ ID NO: 2256 - DNA, 23 bp, Homo Sapiens
aatggttagcactctggactttg

SEQ ID NO: 2257 - DNA, 25 bp, Homo Sapiens
aatggttagcactctggactttgaa

SEQ ID NO: 2258 - DNA, 31 bp, Homo Sapiens
aatggttagcactctggactttgaatccagc

SEQ ID NO: 2259 - DNA, 39 bp, Homo Sapiens
aatggttagcactctggactttgaatccagcgatccgag

SEQ ID NO: 2260 - DNA, 40 bp, Homo Sapiens
aatggttagcactctggactttgaatccagcgatccgagt

SEQ ID NO: 2261 - DNA, 16 bp, Homo Sapiens
aatgttggttataccc

SEQ ID NO: 2262 - DNA, 17 bp, Homo Sapiens
aatgttggttataccct

SEQ ID NO: 2263 - DNA, 19 bp, Homo Sapiens
aatgttggttatacccttc

SEQ ID NO: 2264 - DNA, 20 bp, Homo Sapiens
aatgttggttatacccttcc

SEQ ID NO: 2265 - DNA, 21 bp, Homo Sapiens
aatgttggttatacccttccc

SEQ ID NO: 2266 - DNA, 22 bp, Homo Sapiens
aatgttggttatacccttcccg

SEQ ID NO: 2267 - DNA, 24 bp, Homo Sapiens
aatgttggttatacccttcccgta

SEQ ID NO: 2268 - DNA, 26 bp, Homo Sapiens
aatgttggttatacccttcccgtact

SEQ ID NO: 2269 - DNA, 27 bp, Homo Sapiens
aatgttggttatacccttcccgtacta

SEQ ID NO: 2270 - DNA, 28 bp, Homo Sapiens
aatgttggttatacccttcccgtactac

SEQ ID NO: 2271 - DNA, 29 bp, Homo Sapiens
aatgttggttatacccttcccgtactacc

SEQ ID NO: 2272 - DNA, 30 bp, Homo Sapiens
aatgttggttatacccttcccgtactacca

SEQ ID NO: 2273 - DNA, 16 bp, Homo Sapiens
aatgtttagacgggct

SEQ ID NO: 2274 - DNA, 17 bp, Homo Sapiens
aatgtttagacgggctc

SEQ ID NO: 2275 - DNA, 18 bp, Homo Sapiens
aatgtttagacgggctca

SEQ ID NO: 2276 - DNA, 19 bp, Homo Sapiens
aatgtttagacgggctcac

SEQ ID NO: 2277 - DNA, 20 bp, Homo Sapiens
aatgtttagacgggctcaca

SEQ ID NO: 2278 - DNA, 21 bp, Homo Sapiens
aatgtttagacgggctcacat

SEQ ID NO: 2279 - DNA, 22 bp, Homo Sapiens
aatgtttagacgggctcacatc

SEQ ID NO: 2280 - DNA, 23 bp, Homo Sapiens
aatgtttagacgggctcacatca

SEQ ID NO: 2281 - DNA, 24 bp, Homo Sapiens
aatgtttagacgggctcacatcac

SEQ ID NO: 2282 - DNA, 25 bp, Homo Sapiens
aatgtttagacgggctcacatcacc

SEQ ID NO: 2283 - DNA, 26 bp, Homo Sapiens
aatgtttagacgggctcacatcaccc

SEQ ID NO: 2284 - DNA, 27 bp, Homo Sapiens
aatgtttagacgggctcacatcacccc

SEQ ID NO: 2285 - DNA, 28 bp, Homo Sapiens
aatgtttagacgggctcacatcacccca

SEQ ID NO: 2286 - DNA, 29 bp, Homo Sapiens
aatgtttagacgggctcacatcaccccat

SEQ ID NO: 2287 - DNA, 30 bp, Homo Sapiens
aatgtttagacgggctcacatcaccccata

SEQ ID NO: 2288 - DNA, 31 bp, Homo Sapiens
aatgtttagacgggctcacatcaccccataa

SEQ ID NO: 2289 - DNA, 32 bp, Homo Sapiens
aatgtttagacgggctcacatcaccccataaa

SEQ ID NO: 2290 - DNA, 33 bp, Homo Sapiens
aatgtttagacgggctcacatcaccccataaac

SEQ ID NO: 2291 - DNA, 34 bp, Homo Sapiens
aatgtttagacgggctcacatcaccccataaaca

SEQ ID NO: 2292 - DNA, 36 bp, Homo Sapiens
aatgtttagacgggctcacatcaccccataaacacc

SEQ ID NO: 2293 - DNA, 37 bp, Homo Sapiens
aatgtttagacgggctcacatcaccccataaacacca

SEQ ID NO: 2294 - DNA, 16 bp, Homo Sapiens
aattaaagtggctgat

SEQ ID NO: 2295 - DNA, 17 bp, Homo Sapiens
aattaaagtggctgatt

SEQ ID NO: 2296 - DNA, 18 bp, Homo Sapiens
aattaaagtggctgattt

SEQ ID NO: 2297 - DNA, 19 bp, Homo Sapiens
aattaaagtggctgatttg

SEQ ID NO: 2298 - DNA, 20 bp, Homo Sapiens
aattaaagtggctgatttgc

SEQ ID NO: 2299 - DNA, 17 bp, Homo Sapiens
aattaactagttttgac

SEQ ID NO: 2300 - DNA, 18 bp, Homo Sapiens
aattaactagttttgaca

SEQ ID NO: 2301 - DNA, 19 bp, Homo Sapiens
aattaactagttttgacaa

SEQ ID NO: 2302 - DNA, 20 bp, Homo Sapiens
aattaactagttttgacaac

SEQ ID NO: 2303 - DNA, 21 bp, Homo Sapiens
aattaactagttttgacaaca

SEQ ID NO: 2304 - DNA, 24 bp, Homo Sapiens
aattaactagttttgacaacattc

SEQ ID NO: 2305 - DNA, 31 bp, Homo Sapiens
aattaactagttttgacaacattcaaaaaag

SEQ ID NO: 2306 - DNA, 32 bp, Homo Sapiens
aattaactagttttgacaacattcaaaaaaga

SEQ ID NO: 2307 - DNA, 33 bp, Homo Sapiens
aattaactagttttgacaacattcaaaaaagag

SEQ ID NO: 2308 - DNA, 34 bp, Homo Sapiens
aattaactagttttgacaacattcaaaaaagagt

SEQ ID NO: 2309 - DNA, 35 bp, Homo Sapiens
aattaactagttttgacaacattcaaaaaagagta

SEQ ID NO: 2310 - DNA, 36 bp, Homo Sapiens
aattaactagttttgacaacattcaaaaaagagtac

SEQ ID NO: 2311 - DNA, 37 bp, Homo Sapiens
aattaactagttttgacaacattcaaaaaagagtacc

SEQ ID NO: 2312 - DNA, 38 bp, Homo Sapiens
aattaactagttttgacaacattcaaaaaagagtacca

SEQ ID NO: 2313 - DNA, 16 bp, Homo Sapiens
aattagaatcttagct

SEQ ID NO: 2314 - DNA, 17 bp, Homo Sapiens
aattagaatcttagctt

SEQ ID NO: 2315 - DNA, 18 bp, Homo Sapiens
aattagaatcttagcttt

SEQ ID NO: 2316 - DNA, 19 bp, Homo Sapiens
aattagaatcttagctttg

SEQ ID NO: 2317 - DNA, 20 bp, Homo Sapiens
aattagaatcttagctttgg

SEQ ID NO: 2318 - DNA, 23 bp, Homo Sapiens
aattagaatcttagctttgggtg

SEQ ID NO: 2319 - DNA, 24 bp, Homo Sapiens
aattagaatcttagctttgggtgc

SEQ ID NO: 2320 - DNA, 25 bp, Homo Sapiens
aattagaatcttagctttgggtgct

SEQ ID NO: 2321 - DNA, 28 bp, Homo Sapiens
aattagaatcttagctttgggtgctaat

SEQ ID NO: 2322 - DNA, 35 bp, Homo Sapiens
aattagaatcttagctttgggtgctaatggtggag

SEQ ID NO: 2323 - DNA, 36 bp, Homo Sapiens
aattagaatcttagctttgggtgctaatggtggagt

SEQ ID NO: 2324 - DNA, 37 bp, Homo Sapiens
aattagaatcttagctttgggtgctaatggtggagtt

SEQ ID NO: 2325 - DNA, 38 bp, Homo Sapiens
aattagaatcttagctttgggtgctaatggtggagtta

SEQ ID NO: 2326 - DNA, 43 bp, Homo Sapiens
aattagaatcttagctttgggtgctaatggtggagttaaagac

SEQ ID NO: 2327 - DNA, 44 bp, Homo Sapiens
aattagaatcttagctttgggtgctaatggtggagttaaagact

SEQ ID NO: 2328 - DNA, 45 bp, Homo Sapiens
aattagaatcttagctttgggtgctaatggtggagttaaagactt

SEQ ID NO: 2329 - DNA, 46 bp, Homo Sapiens
aattagaatcttagctttgggtgctaatggtggagttaaagacttt

SEQ ID NO: 2330 - DNA, 16 bp, Homo Sapiens
aattataggctaaatc

SEQ ID NO: 2331 - DNA, 17 bp, Homo Sapiens
aattataggctaaatcc

SEQ ID NO: 2332 - DNA, 18 bp, Homo Sapiens
aattataggctaaatcct

SEQ ID NO: 2333 - DNA, 30 bp, Homo Sapiens
aattataggctaaatcctatatatcttacc

SEQ ID NO: 2334 - DNA, 22 bp, Homo Sapiens
aattatgataatcatatttacc

SEQ ID NO: 2335 - DNA, 26 bp, Homo Sapiens
aattatgataatcatatttaccaacc

SEQ ID NO: 2336 - DNA, 18 bp, Homo Sapiens
aattcaaaggttccgggt

SEQ ID NO: 2337 - DNA, 35 bp, Homo Sapiens
aattcaaaggttccgggttcgagtcccggcggagt

SEQ ID NO: 2338 - DNA, 36 bp, Homo Sapiens
aattcaaaggttccgggttcgagtcccggcggagtc

SEQ ID NO: 2339 - DNA, 37 bp, Homo Sapiens
aattcaaaggttccgggttcgagtcccggcggagtcg

SEQ ID NO: 2340 - DNA, 38 bp, Homo Sapiens
aattcaaaggttccgggttcgagtcccggcggagtcgc

SEQ ID NO: 2341 - DNA, 39 bp, Homo Sapiens
aattcaaaggttccgggttcgagtcccggcggagtcgcc

SEQ ID NO: 2342 - DNA, 40 bp, Homo Sapiens
aattcaaaggttccgggttcgagtcccggcggagtcgcca

SEQ ID NO: 2343 - DNA, 39 bp, Homo Sapiens
aattcaaaggttgtgggttcgaatcccaccagagtcgcc

SEQ ID NO: 2344 - DNA, 40 bp, Homo Sapiens
aattcaaaggttgtgggttcgaatcccaccagagtcgcca

SEQ ID NO: 2345 - DNA, 39 bp, Homo Sapiens
aattcaaaggttgtgggttcgagtcccaccagagtcgcc

SEQ ID NO: 2346 - DNA, 40 bp, Homo Sapiens
aattcaaaggttgtgggttcgagtcccaccagagtcgcca

SEQ ID NO: 2347 - DNA, 18 bp, Homo Sapiens
aattccccgacggggagc

SEQ ID NO: 2348 - DNA, 19 bp, Homo Sapiens
aattccccgacggggagcc

SEQ ID NO: 2349 - DNA, 20 bp, Homo Sapiens
aattccccgacggggagcca

SEQ ID NO: 2350 - DNA, 16 bp, Homo Sapiens
aattcgaagaagcagc

SEQ ID NO: 2351 - DNA, 20 bp, Homo Sapiens
aattcgaagaagcagcttca

SEQ ID NO: 2352 - DNA, 26 bp, Homo Sapiens
aattcgaagaagcagcttcaaacctg

SEQ ID NO: 2353 - DNA, 33 bp, Homo Sapiens
aattcgaagaagcagcttcaaacctgccggggc

SEQ ID NO: 2354 - DNA, 34 bp, Homo Sapiens
aattcgaagaagcagcttcaaacctgccggggct

SEQ ID NO: 2355 - DNA, 35 bp, Homo Sapiens
aattcgaagaagcagcttcaaacctgccggggctt

SEQ ID NO: 2356 - DNA, 36 bp, Homo Sapiens
aattcgaagaagcagcttcaaacctgccggggcttc

SEQ ID NO: 2357 - DNA, 37 bp, Homo Sapiens
aattcgaagaagcagcttcaaacctgccggggcttcc

SEQ ID NO: 2358 - DNA, 38 bp, Homo Sapiens
aattcgaagaagcagcttcaaacctgccggggcttcca

SEQ ID NO: 2359 - DNA, 16 bp, Homo Sapiens
aattctcgcctgccac

SEQ ID NO: 2360 - DNA, 17 bp, Homo Sapiens
aattctcgcctgccacg

SEQ ID NO: 2361 - DNA, 18 bp, Homo Sapiens
aattctcgcctgccacgc

SEQ ID NO: 2362 - DNA, 27 bp, Homo Sapiens
aattctcgcctgccacgcgggaggccc

SEQ ID NO: 2363 - DNA, 29 bp, Homo Sapiens
aattctcgcctgccacgcgggaggcccgg

SEQ ID NO: 2364 - DNA, 30 bp, Homo Sapiens
aattctcgcctgccacgcgggaggcccggg

SEQ ID NO: 2365 - DNA, 34 bp, Homo Sapiens
aattctcgcctgccacgcgggaggcccgggttcg

SEQ ID NO: 2366 - DNA, 44 bp, Homo Sapiens
aattctcgcctgccacgcgggaggcccgggttcgattcccggcc

SEQ ID NO: 2367 - DNA, 16 bp, Homo Sapiens
aattctcgctggggcc

SEQ ID NO: 2368 - DNA, 18 bp, Homo Sapiens
aattctcgctggggcctc

SEQ ID NO: 2369 - DNA, 19 bp, Homo Sapiens
aattgcaaattcgaagaag

SEQ ID NO: 2370 - DNA, 20 bp, Homo Sapiens
aattgcaaattcgaagaagc

SEQ ID NO: 2371 - DNA, 26 bp, Homo Sapiens
aattgcaaattcgaagaagcagcttc

SEQ ID NO: 2372 - DNA, 28 bp, Homo Sapiens
aattgcaaattcgaagaagcagcttcaa

SEQ ID NO: 2373 - DNA, 33 bp, Homo Sapiens
aattgcaaattcgaagaagcagcttcaaacctg

SEQ ID NO: 2374 - DNA, 39 bp, Homo Sapiens
aattgcaaattcgaagaagcagcttcaaacctgccgggg

SEQ ID NO: 2375 - DNA, 40 bp, Homo Sapiens
aattgcaaattcgaagaagcagcttcaaacctgccggggc

SEQ ID NO: 2376 - DNA, 41 bp, Homo Sapiens
aattgcaaattcgaagaagcagcttcaaacctgccggggct

SEQ ID NO: 2377 - DNA, 42 bp, Homo Sapiens
aattgcaaattcgaagaagcagcttcaaacctgccggggctt

SEQ ID NO: 2378 - DNA, 43 bp, Homo Sapiens
aattgcaaattcgaagaagcagcttcaaacctgccggggcttc

SEQ ID NO: 2379 - DNA, 44 bp, Homo Sapiens
aattgcaaattcgaagaagcagcttcaaacctgccggggcttcc

SEQ ID NO: 2380 - DNA, 45 bp, Homo Sapiens
aattgcaaattcgaagaagcagcttcaaacctgccggggcttcca

SEQ ID NO: 2381 - DNA, 16 bp, Homo Sapiens
aatttaggttaaatac

SEQ ID NO: 2382 - DNA, 20 bp, Homo Sapiens
aatttaggttaaatacagac

SEQ ID NO: 2383 - DNA, 40 bp, Homo Sapiens
aattttggattctcagggatgggttcgattctcatagtcc

SEQ ID NO: 2384 - DNA, 41 bp, Homo Sapiens
aattttggattctcagggatgggttcgattctcatagtcct

SEQ ID NO: 2385 - DNA, 45 bp, Homo Sapiens
aattttggattctcagggatgggttcgattctcatagtcctagcc

SEQ ID NO: 2386 - DNA, 46 bp, Homo Sapiens
aattttggattctcagggatgggttcgattctcatagtcctagcca

SEQ ID NO: 2387 - DNA, 16 bp, Homo Sapiens
aattttggtgcaactc

SEQ ID NO: 2388 - DNA, 17 bp, Homo Sapiens
aattttggtgcaactcc

SEQ ID NO: 2389 - DNA, 18 bp, Homo Sapiens
aattttggtgcaactcca

SEQ ID NO: 2390 - DNA, 22 bp, Homo Sapiens
aattttggtgcaactccaaata

SEQ ID NO: 2391 - DNA, 29 bp, Homo Sapiens
aattttggtgcaactccaaataaaagtac

SEQ ID NO: 2392 - DNA, 30 bp, Homo Sapiens
aattttggtgcaactccaaataaaagtacc

SEQ ID NO: 2393 - DNA, 31 bp, Homo Sapiens
aattttggtgcaactccaaataaaagtacca

SEQ ID NO: 2394 - DNA, 18 bp, Homo Sapiens
acaaaacgaatgatttcg

SEQ ID NO: 2395 - DNA, 20 bp, Homo Sapiens
acaaaacgaatgatttcgac

SEQ ID NO: 2396 - DNA, 21 bp, Homo Sapiens
acaaaacgaatgatttcgact

SEQ ID NO: 2397 - DNA, 22 bp, Homo Sapiens
acaaaacgaatgatttcgactc

SEQ ID NO: 2398 - DNA, 23 bp, Homo Sapiens
acaaaacgaatgatttcgactca

SEQ ID NO: 2399 - DNA, 24 bp, Homo Sapiens
acaaaacgaatgatttcgactcat

SEQ ID NO: 2400 - DNA, 26 bp, Homo Sapiens
acaaaacgaatgatttcgactcatta

SEQ ID NO: 2401 - DNA, 27 bp, Homo Sapiens
acaaaacgaatgatttcgactcattaa

SEQ ID NO: 2402 - DNA, 35 bp, Homo Sapiens
acaaaacgaatgatttcgactcattaaattatgat

SEQ ID NO: 2403 - DNA, 40 bp, Homo Sapiens
acaaaacgaatgatttcgactcattaaattatgataatca

SEQ ID NO: 2404 - DNA, 17 bp, Homo Sapiens
acaaagcacccaactta

SEQ ID NO: 2405 - DNA, 18 bp, Homo Sapiens
acaaagcacccaacttac

SEQ ID NO: 2406 - DNA, 19 bp, Homo Sapiens
acaaagcacccaacttaca

SEQ ID NO: 2407 - DNA, 20 bp, Homo Sapiens
acaaagcacccaacttacac

SEQ ID NO: 2408 - DNA, 21 bp, Homo Sapiens
acaaagcacccaacttacact

SEQ ID NO: 2409 - DNA, 22 bp, Homo Sapiens
acaaagcacccaacttacactt

SEQ ID NO: 2410 - DNA, 23 bp, Homo Sapiens
acaaagcacccaacttacactta

SEQ ID NO: 2411 - DNA, 27 bp, Homo Sapiens
acaaagcacccaacttacacttaggag

SEQ ID NO: 2412 - DNA, 28 bp, Homo Sapiens
acaaagcacccaacttacacttaggaga

SEQ ID NO: 2413 - DNA, 30 bp, Homo Sapiens
acaaagcacccaacttacacttaggagatt

SEQ ID NO: 2414 - DNA, 31 bp, Homo Sapiens
acaaagcacccaacttacacttaggagattt

SEQ ID NO: 2415 - DNA, 33 bp, Homo Sapiens
acaaagcacccaacttacacttaggagatttca

SEQ ID NO: 2416 - DNA, 34 bp, Homo Sapiens
acaaagcacccaacttacacttaggagatttcaa

SEQ ID NO: 2417 - DNA, 35 bp, Homo Sapiens
acaaagcacccaacttacacttaggagatttcaac

SEQ ID NO: 2418 - DNA, 36 bp, Homo Sapiens
acaaagcacccaacttacacttaggagatttcaact

SEQ ID NO: 2419 - DNA, 37 bp, Homo Sapiens
acaaagcacccaacttacacttaggagatttcaactt

SEQ ID NO: 2420 - DNA, 39 bp, Homo Sapiens
acaaagcacccaacttacacttaggagatttcaacttaa

SEQ ID NO: 2421 - DNA, 40 bp, Homo Sapiens
acaaagcacccaacttacacttaggagatttcaacttaac

SEQ ID NO: 2422 - DNA, 46 bp, Homo Sapiens
acaaagcacccaacttacacttaggagatttcaacttaacttgacc

SEQ ID NO: 2423 - DNA, 16 bp, Homo Sapiens
acaacagaggcttacg

SEQ ID NO: 2424 - DNA, 18 bp, Homo Sapiens
acaacagaggcttacgac

SEQ ID NO: 2425 - DNA, 19 bp, Homo Sapiens
acaacagaggcttacgacc

SEQ ID NO: 2426 - DNA, 20 bp, Homo Sapiens
acaacagaggcttacgaccc

SEQ ID NO: 2427 - DNA, 21 bp, Homo Sapiens
acaacagaggcttacgacccc

SEQ ID NO: 2428 - DNA, 22 bp, Homo Sapiens
acaacagaggcttacgacccct

SEQ ID NO: 2429 - DNA, 24 bp, Homo Sapiens
acaacagaggcttacgacccctta

SEQ ID NO: 2430 - DNA, 26 bp, Homo Sapiens
acaacagaggcttacgaccccttatt

SEQ ID NO: 2431 - DNA, 30 bp, Homo Sapiens
acaacagaggcttacgaccccttatttacc

SEQ ID NO: 2432 - DNA, 31 bp, Homo Sapiens
acaacagaggcttacgaccccttatttaccc

SEQ ID NO: 2433 - DNA, 32 bp, Homo Sapiens
acaacagaggcttacgaccccttatttacccc

SEQ ID NO: 2434 - DNA, 33 bp, Homo Sapiens
acaacagaggcttacgaccccttatttacccca

SEQ ID NO: 2435 - DNA, 16 bp, Homo Sapiens
acaacatggctttctc

SEQ ID NO: 2436 - DNA, 17 bp, Homo Sapiens
acaacatggctttctca

SEQ ID NO: 2437 - DNA, 18 bp, Homo Sapiens
acaacatggctttctcac

SEQ ID NO: 2438 - DNA, 19 bp, Homo Sapiens
acaacatggctttctcacc

SEQ ID NO: 2439 - DNA, 20 bp, Homo Sapiens
acaacatggctttctcacca

SEQ ID NO: 2440 - DNA, 16 bp, Homo Sapiens
acaacattcaaaaaag

SEQ ID NO: 2441 - DNA, 20 bp, Homo Sapiens
acaacattcaaaaaagagta

SEQ ID NO: 2442 - DNA, 21 bp, Homo Sapiens
acaacattcaaaaaagagtac

SEQ ID NO: 2443 - DNA, 22 bp, Homo Sapiens
acaacattcaaaaaagagtacc

SEQ ID NO: 2444 - DNA, 23 bp, Homo Sapiens
acaacattcaaaaaagagtacca

SEQ ID NO: 2445 - DNA, 16 bp, Homo Sapiens
acaacgatggtttttc

SEQ ID NO: 2446 - DNA, 18 bp, Homo Sapiens
acaacgatggtttttcat

SEQ ID NO: 2447 - DNA, 20 bp, Homo Sapiens
acaacgatggtttttcatat

SEQ ID NO: 2448 - DNA, 29 bp, Homo Sapiens
acaacgatggtttttcatatcattggtcg

SEQ ID NO: 2449 - DNA, 30 bp, Homo Sapiens
acaacgatggtttttcatatcattggtcgt

SEQ ID NO: 2450 - DNA, 31 bp, Homo Sapiens
acaacgatggtttttcatatcattggtcgtg

SEQ ID NO: 2451 - DNA, 35 bp, Homo Sapiens
acaacgatggtttttcatatcattggtcgtggttg

SEQ ID NO: 2452 - DNA, 36 bp, Homo Sapiens
acaacgatggtttttcatatcattggtcgtggttgt

SEQ ID NO: 2453 - DNA, 37 bp, Homo Sapiens
acaacgatggtttttcatatcattggtcgtggttgta

SEQ ID NO: 2454 - DNA, 40 bp, Homo Sapiens
acaacgatggtttttcatatcattggtcgtggttgtagtc

SEQ ID NO: 2455 - DNA, 41 bp, Homo Sapiens
acaacgatggtttttcatatcattggtcgtggttgtagtcc

SEQ ID NO: 2456 - DNA, 42 bp, Homo Sapiens
acaacgatggtttttcatatcattggtcgtggttgtagtccg

SEQ ID NO: 2457 - DNA, 43 bp, Homo Sapiens
acaacgatggtttttcatatcattggtcgtggttgtagtccgt

SEQ ID NO: 2458 - DNA, 45 bp, Homo Sapiens
acaacgatggtttttcatatcattggtcgtggttgtagtccgtgc

SEQ ID NO: 2459 - DNA, 16 bp, Homo Sapiens
acaagaactgctaact

SEQ ID NO: 2460 - DNA, 17 bp, Homo Sapiens
acaagaactgctaactc

SEQ ID NO: 2461 - DNA, 18 bp, Homo Sapiens
acaagaactgctaactca

SEQ ID NO: 2462 - DNA, 19 bp, Homo Sapiens
acaagaactgctaactcat

SEQ ID NO: 2463 - DNA, 20 bp, Homo Sapiens
acaagaactgctaactcatg

SEQ ID NO: 2464 - DNA, 21 bp, Homo Sapiens
acaagaactgctaactcatgc

SEQ ID NO: 2465 - DNA, 22 bp, Homo Sapiens
acaagaactgctaactcatgcc

SEQ ID NO: 2466 - DNA, 23 bp, Homo Sapiens
acaagaactgctaactcatgccc

SEQ ID NO: 2467 - DNA, 24 bp, Homo Sapiens
acaagaactgctaactcatgcccc

SEQ ID NO: 2468 - DNA, 25 bp, Homo Sapiens
acaagaactgctaactcatgccccc

SEQ ID NO: 2469 - DNA, 26 bp, Homo Sapiens
acaagaactgctaactcatgccccca

SEQ ID NO: 2470 - DNA, 27 bp, Homo Sapiens
acaagaactgctaactcatgcccccat

SEQ ID NO: 2471 - DNA, 28 bp, Homo Sapiens
acaagaactgctaactcatgcccccatg

SEQ ID NO: 2472 - DNA, 29 bp, Homo Sapiens
acaagaactgctaactcatgcccccatgt

SEQ ID NO: 2473 - DNA, 30 bp, Homo Sapiens
acaagaactgctaactcatgcccccatgtc

SEQ ID NO: 2474 - DNA, 31 bp, Homo Sapiens
acaagaactgctaactcatgcccccatgtct

SEQ ID NO: 2475 - DNA, 32 bp, Homo Sapiens
acaagaactgctaactcatgcccccatgtcta

SEQ ID NO: 2476 - DNA, 33 bp, Homo Sapiens
acaagaactgctaactcatgcccccatgtctaa

SEQ ID NO: 2477 - DNA, 34 bp, Homo Sapiens
acaagaactgctaactcatgcccccatgtctaac

SEQ ID NO: 2478 - DNA, 35 bp, Homo Sapiens
acaagaactgctaactcatgcccccatgtctaaca

SEQ ID NO: 2479 - DNA, 36 bp, Homo Sapiens
acaagaactgctaactcatgcccccatgtctaacaa

SEQ ID NO: 2480 - DNA, 37 bp, Homo Sapiens
acaagaactgctaactcatgcccccatgtctaacaac

SEQ ID NO: 2481 - DNA, 38 bp, Homo Sapiens
acaagaactgctaactcatgcccccatgtctaacaaca

SEQ ID NO: 2482 - DNA, 39 bp, Homo Sapiens
acaagaactgctaactcatgcccccatgtctaacaacat

SEQ ID NO: 2483 - DNA, 40 bp, Homo Sapiens
acaagaactgctaactcatgcccccatgtctaacaacatg

SEQ ID NO: 2484 - DNA, 41 bp, Homo Sapiens
acaagaactgctaactcatgcccccatgtctaacaacatgg

SEQ ID NO: 2485 - DNA, 42 bp, Homo Sapiens
acaagaactgctaactcatgcccccatgtctaacaacatggc

SEQ ID NO: 2486 - DNA, 43 bp, Homo Sapiens
acaagaactgctaactcatgcccccatgtctaacaacatggct

SEQ ID NO: 2487 - DNA, 44 bp, Homo Sapiens
acaagaactgctaactcatgcccccatgtctaacaacatggctt

SEQ ID NO: 2488 - DNA, 45 bp, Homo Sapiens
acaagaactgctaactcatgcccccatgtctaacaacatggcttt

SEQ ID NO: 2489 - DNA, 46 bp, Homo Sapiens
acaagaactgctaactcatgcccccatgtctaacaacatggctttc

SEQ ID NO: 2490 - DNA, 47 bp, Homo Sapiens
acaagaactgctaactcatgcccccatgtctaacaacatggctttct

SEQ ID NO: 2491 - DNA, 48 bp, Homo Sapiens
acaagaactgctaactcatgcccccatgtctaacaacatggctttctc

SEQ ID NO: 2492 - DNA, 17 bp, Homo Sapiens
acacaaagcacccaact

SEQ ID NO: 2493 - DNA, 20 bp, Homo Sapiens
acacaaagcacccaacttac

SEQ ID NO: 2494 - DNA, 23 bp, Homo Sapiens
acacaaagcacccaacttacact

SEQ ID NO: 2495 - DNA, 24 bp, Homo Sapiens
acacaaagcacccaacttacactt

SEQ ID NO: 2496 - DNA, 25 bp, Homo Sapiens
acacaaagcacccaacttacactta

SEQ ID NO: 2497 - DNA, 28 bp, Homo Sapiens
acacaaagcacccaacttacacttagga

SEQ ID NO: 2498 - DNA, 34 bp, Homo Sapiens
acacaaagcacccaacttacacttaggagatttc

SEQ ID NO: 2499 - DNA, 37 bp, Homo Sapiens
acacaaagcacccaacttacacttaggagatttcaac

SEQ ID NO: 2500 - DNA, 38 bp, Homo Sapiens
acacaaagcacccaacttacacttaggagatttcaact

SEQ ID NO: 2501 - DNA, 46 bp, Homo Sapiens
acacaaagcacccaacttacacttaggagatttcaacttaacttga

SEQ ID NO: 2502 - DNA, 17 bp, Homo Sapiens
acacctctttacagtga

SEQ ID NO: 2503 - DNA, 18 bp, Homo Sapiens
acacctctttacagtgac

SEQ ID NO: 2504 - DNA, 19 bp, Homo Sapiens
acacctctttacagtgacc

SEQ ID NO: 2505 - DNA, 20 bp, Homo Sapiens
acacctctttacagtgacca

SEQ ID NO: 2506 - DNA, 17 bp, Homo Sapiens
acacgcagaaggtcctg

SEQ ID NO: 2507 - DNA, 40 bp, Homo Sapiens
acacgcagaaggtcctgggttcgagccccagtggaaccac

SEQ ID NO: 2508 - DNA, 41 bp, Homo Sapiens
acacgcagaaggtcctgggttcgagccccagtggaaccacc

SEQ ID NO: 2509 - DNA, 42 bp, Homo Sapiens
acacgcagaaggtcctgggttcgagccccagtggaaccacca

SEQ ID NO: 2510 - DNA, 19 bp, Homo Sapiens
acacgcgaaaggtccccgg

SEQ ID NO: 2511 - DNA, 23 bp, Homo Sapiens
acacgcgaaaggtccccggttcg

SEQ ID NO: 2512 - DNA, 34 bp, Homo Sapiens
acacgcgaaaggtccccggttcgaaaccgggcgg

SEQ ID NO: 2513 - DNA, 40 bp, Homo Sapiens
acacgcgaaaggtccccggttcgaaaccgggcggaaacac

SEQ ID NO: 2514 - DNA, 41 bp, Homo Sapiens
acacgcgaaaggtccccggttcgaaaccgggcggaaacacc

SEQ ID NO: 2515 - DNA, 41 bp, Homo Sapiens
acacgcgaaaggtccccggttcgatcccgggcggaaacacc

SEQ ID NO: 2516 - DNA, 21 bp, Homo Sapiens
acacgcgaaaggtccctggat

SEQ ID NO: 2517 - DNA, 31 bp, Homo Sapiens
acacgtgggttcgaatcccatcctcgtcgcc

SEQ ID NO: 2518 - DNA, 19 bp, Homo Sapiens
acactgaaaatgtttagac

SEQ ID NO: 2519 - DNA, 20 bp, Homo Sapiens
acactgaaaatgtttagacg

SEQ ID NO: 2520 - DNA, 23 bp, Homo Sapiens
acactgaaaatgtttagacgggc

SEQ ID NO: 2521 - DNA, 24 bp, Homo Sapiens
acactgaaaatgtttagacgggct

SEQ ID NO: 2522 - DNA, 25 bp, Homo Sapiens
acactgaaaatgtttagacgggctc

SEQ ID NO: 2523 - DNA, 26 bp, Homo Sapiens
acactgaaaatgtttagacgggctca

SEQ ID NO: 2524 - DNA, 27 bp, Homo Sapiens
acactgaaaatgtttagacgggctcac

SEQ ID NO: 2525 - DNA, 28 bp, Homo Sapiens
acactgaaaatgtttagacgggctcaca

SEQ ID NO: 2526 - DNA, 29 bp, Homo Sapiens
acactgaaaatgtttagacgggctcacat

SEQ ID NO: 2527 - DNA, 30 bp, Homo Sapiens
acactgaaaatgtttagacgggctcacatc

SEQ ID NO: 2528 - DNA, 31 bp, Homo Sapiens
acactgaaaatgtttagacgggctcacatca

SEQ ID NO: 2529 - DNA, 33 bp, Homo Sapiens
acactgaaaatgtttagacgggctcacatcacc

SEQ ID NO: 2530 - DNA, 34 bp, Homo Sapiens
acactgaaaatgtttagacgggctcacatcaccc

SEQ ID NO: 2531 - DNA, 35 bp, Homo Sapiens
acactgaaaatgtttagacgggctcacatcacccc

SEQ ID NO: 2532 - DNA, 42 bp, Homo Sapiens
acactgaaaatgtttagacgggctcacatcaccccataaaca

SEQ ID NO: 2533 - DNA, 44 bp, Homo Sapiens
acactgaaaatgtttagacgggctcacatcaccccataaacacc

SEQ ID NO: 2534 - DNA, 45 bp, Homo Sapiens
acactgaaaatgtttagacgggctcacatcaccccataaacacca

SEQ ID NO: 2535 - DNA, 16 bp, Homo Sapiens
acactgtaaagctaac

SEQ ID NO: 2536 - DNA, 16 bp, Homo Sapiens
acacttaggagatttc

SEQ ID NO: 2537 - DNA, 17 bp, Homo Sapiens
acacttaggagatttca

SEQ ID NO: 2538 - DNA, 19 bp, Homo Sapiens
acacttaggagatttcaac

SEQ ID NO: 2539 - DNA, 20 bp, Homo Sapiens
acacttaggagatttcaact

SEQ ID NO: 2540 - DNA, 21 bp, Homo Sapiens
acacttaggagatttcaactt

SEQ ID NO: 2541 - DNA, 22 bp, Homo Sapiens
acacttaggagatttcaactta

SEQ ID NO: 2542 - DNA, 23 bp, Homo Sapiens
acacttaggagatttcaacttaa

SEQ ID NO: 2543 - DNA, 24 bp, Homo Sapiens
acacttaggagatttcaacttaac

SEQ ID NO: 2544 - DNA, 25 bp, Homo Sapiens
acacttaggagatttcaacttaact

SEQ ID NO: 2545 - DNA, 26 bp, Homo Sapiens
acacttaggagatttcaacttaactt

SEQ ID NO: 2546 - DNA, 27 bp, Homo Sapiens
acacttaggagatttcaacttaacttg

SEQ ID NO: 2547 - DNA, 29 bp, Homo Sapiens
acacttaggagatttcaacttaacttgac

SEQ ID NO: 2548 - DNA, 30 bp, Homo Sapiens
acacttaggagatttcaacttaacttgacc

SEQ ID NO: 2549 - DNA, 31 bp, Homo Sapiens
acacttaggagatttcaacttaacttgaccg

SEQ ID NO: 2550 - DNA, 32 bp, Homo Sapiens
acacttaggagatttcaacttaacttgaccgc

SEQ ID NO: 2551 - DNA, 33 bp, Homo Sapiens
acacttaggagatttcaacttaacttgaccgct

SEQ ID NO: 2552 - DNA, 34 bp, Homo Sapiens
acacttaggagatttcaacttaacttgaccgctc

SEQ ID NO: 2553 - DNA, 35 bp, Homo Sapiens
acacttaggagatttcaacttaacttgaccgctct

SEQ ID NO: 2554 - DNA, 36 bp, Homo Sapiens
acacttaggagatttcaacttaacttgaccgctctg

SEQ ID NO: 2555 - DNA, 37 bp, Homo Sapiens
acacttaggagatttcaacttaacttgaccgctctga

SEQ ID NO: 2556 - DNA, 38 bp, Homo Sapiens
acacttaggagatttcaacttaacttgaccgctctgac

SEQ ID NO: 2557 - DNA, 39 bp, Homo Sapiens
acacttaggagatttcaacttaacttgaccgctctgacc

SEQ ID NO: 2558 - DNA, 40 bp, Homo Sapiens
acacttaggagatttcaacttaacttgaccgctctgacca

SEQ ID NO: 2559 - DNA, 17 bp, Homo Sapiens
acagaccaagagccttc

SEQ ID NO: 2560 - DNA, 18 bp, Homo Sapiens
acagaccaagagccttca

SEQ ID NO: 2561 - DNA, 19 bp, Homo Sapiens
acagaccaagagccttcaa

SEQ ID NO: 2562 - DNA, 20 bp, Homo Sapiens
acagaccaagagccttcaaa

SEQ ID NO: 2563 - DNA, 21 bp, Homo Sapiens
acagaccaagagccttcaaag

SEQ ID NO: 2564 - DNA, 22 bp, Homo Sapiens
acagaccaagagccttcaaagc

SEQ ID NO: 2565 - DNA, 23 bp, Homo Sapiens
acagaccaagagccttcaaagcc

SEQ ID NO: 2566 - DNA, 24 bp, Homo Sapiens
acagaccaagagccttcaaagccc

SEQ ID NO: 2567 - DNA, 26 bp, Homo Sapiens
acagaccaagagccttcaaagccctc

SEQ ID NO: 2568 - DNA, 27 bp, Homo Sapiens
acagaccaagagccttcaaagccctca

SEQ ID NO: 2569 - DNA, 28 bp, Homo Sapiens
acagaccaagagccttcaaagccctcag

SEQ ID NO: 2570 - DNA, 30 bp, Homo Sapiens
acagaccaagagccttcaaagccctcagta

SEQ ID NO: 2571 - DNA, 32 bp, Homo Sapiens
acagaccaagagccttcaaagccctcagtaag

SEQ ID NO: 2572 - DNA, 33 bp, Homo Sapiens
acagaccaagagccttcaaagccctcagtaagt

SEQ ID NO: 2573 - DNA, 35 bp, Homo Sapiens
acagaccaagagccttcaaagccctcagtaagttg

SEQ ID NO: 2574 - DNA, 36 bp, Homo Sapiens
acagaccaagagccttcaaagccctcagtaagttgc

SEQ ID NO: 2575 - DNA, 46 bp, Homo Sapiens
acagaccaagagccttcaaagccctcagtaagttgcaatacttaat

SEQ ID NO: 2576 - DNA, 25 bp, Homo Sapiens
acagagaatagtttaaattagaatc

SEQ ID NO: 2577 - DNA, 33 bp, Homo Sapiens
acagagaatagtttaaattagaatcttagcttt

SEQ ID NO: 2578 - DNA, 34 bp, Homo Sapiens
acagagaatagtttaaattagaatcttagctttg

SEQ ID NO: 2579 - DNA, 35 bp, Homo Sapiens
acagagaatagtttaaattagaatcttagctttgg

SEQ ID NO: 2580 - DNA, 41 bp, Homo Sapiens
acagagaatagtttaaattagaatcttagctttgggtgcta

SEQ ID NO: 2581 - DNA, 16 bp, Homo Sapiens
acagaggcttacgacc

SEQ ID NO: 2582 - DNA, 17 bp, Homo Sapiens
acagaggcttacgaccc

SEQ ID NO: 2583 - DNA, 18 bp, Homo Sapiens
acagaggcttacgacccc

SEQ ID NO: 2584 - DNA, 19 bp, Homo Sapiens
acagaggcttacgacccct

SEQ ID NO: 2585 - DNA, 21 bp, Homo Sapiens
acagaggcttacgacccctta

SEQ ID NO: 2586 - DNA, 26 bp, Homo Sapiens
acagaggcttacgaccccttatttac

SEQ ID NO: 2587 - DNA, 27 bp, Homo Sapiens
acagaggcttacgaccccttatttacc

SEQ ID NO: 2588 - DNA, 28 bp, Homo Sapiens
acagaggcttacgaccccttatttaccc

SEQ ID NO: 2589 - DNA, 29 bp, Homo Sapiens
acagaggcttacgaccccttatttacccc

SEQ ID NO: 2590 - DNA, 30 bp, Homo Sapiens
acagaggcttacgaccccttatttacccca

SEQ ID NO: 2591 - DNA, 16 bp, Homo Sapiens
acagctatccattggt

SEQ ID NO: 2592 - DNA, 17 bp, Homo Sapiens
acagctatccattggtc

SEQ ID NO: 2593 - DNA, 18 bp, Homo Sapiens
acagctatccattggtct

SEQ ID NO: 2594 - DNA, 19 bp, Homo Sapiens
acagctatccattggtctt

SEQ ID NO: 2595 - DNA, 20 bp, Homo Sapiens
acagctatccattggtctta

SEQ ID NO: 2596 - DNA, 21 bp, Homo Sapiens
acagctatccattggtcttag

SEQ ID NO: 2597 - DNA, 23 bp, Homo Sapiens
acagctatccattggtcttaggc

SEQ ID NO: 2598 - DNA, 24 bp, Homo Sapiens
acagctatccattggtcttaggcc

SEQ ID NO: 2599 - DNA, 25 bp, Homo Sapiens
acagctatccattggtcttaggccc

SEQ ID NO: 2600 - DNA, 26 bp, Homo Sapiens
acagctatccattggtcttaggcccc

SEQ ID NO: 2601 - DNA, 27 bp, Homo Sapiens
acagctatccattggtcttaggcccca

SEQ ID NO: 2602 - DNA, 30 bp, Homo Sapiens
acagctatccattggtcttaggccccaaaa

SEQ ID NO: 2603 - DNA, 31 bp, Homo Sapiens
acagctatccattggtcttaggccccaaaaa

SEQ ID NO: 2604 - DNA, 17 bp, Homo Sapiens
acaggagatcctgggtt

SEQ ID NO: 2605 - DNA, 18 bp, Homo Sapiens
acaggagatcctgggttc

SEQ ID NO: 2606 - DNA, 22 bp, Homo Sapiens
acaggagatcctgggttcgaat

SEQ ID NO: 2607 - DNA, 23 bp, Homo Sapiens
acaggagatcctgggttcgaatc

SEQ ID NO: 2608 - DNA, 27 bp, Homo Sapiens
acaggagatcctgggttcgaatcccag

SEQ ID NO: 2609 - DNA, 28 bp, Homo Sapiens
acaggagatcctgggttcgaatcccagc

SEQ ID NO: 2610 - DNA, 29 bp, Homo Sapiens
acaggagatcctgggttcgaatcccagcg

SEQ ID NO: 2611 - DNA, 35 bp, Homo Sapiens
acaggagatcctgggttcgaatcccagcgaggcct

SEQ ID NO: 2612 - DNA, 37 bp, Homo Sapiens
acaggagatcctgggttcgaatcccagcgaggcctcc

SEQ ID NO: 2613 - DNA, 30 bp, Homo Sapiens
acaggagatcctgggttcgaatcccagcgg

SEQ ID NO: 2614 - DNA, 32 bp, Homo Sapiens
acaggagatcctgggttcgaatcccagcgggg

SEQ ID NO: 2615 - DNA, 33 bp, Homo Sapiens
acaggagatcctgggttcgaatcccagcggggc

SEQ ID NO: 2616 - DNA, 34 bp, Homo Sapiens
acaggagatcctgggttcgaatcccagcggggcc

SEQ ID NO: 2617 - DNA, 35 bp, Homo Sapiens
acaggagatcctgggttcgaatcccagcggggcct

SEQ ID NO: 2618 - DNA, 36 bp, Homo Sapiens
acaggagatcctgggttcgaatcccagcggggcctc

SEQ ID NO: 2619 - DNA, 37 bp, Homo Sapiens
acaggagatcctgggttcgaatcccagcggggcctcc

SEQ ID NO: 2620 - DNA, 38 bp, Homo Sapiens
acaggagatcctgggttcgaatcccagcggggcctcca

SEQ ID NO: 2621 - DNA, 31 bp, Homo Sapiens
acaggagatcctgggttcgaatcccagcggt

SEQ ID NO: 2622 - DNA, 32 bp, Homo Sapiens
acaggagatcctgggttcgaatcccagcggtg

SEQ ID NO: 2623 - DNA, 33 bp, Homo Sapiens
acaggagatcctgggttcgaatcccagcggtgc

SEQ ID NO: 2624 - DNA, 34 bp, Homo Sapiens
acaggagatcctgggttcgaatcccagcggtgcc

SEQ ID NO: 2625 - DNA, 35 bp, Homo Sapiens
acaggagatcctgggttcgaatcccagcggtgcct

SEQ ID NO: 2626 - DNA, 36 bp, Homo Sapiens
acaggagatcctgggttcgaatcccagcggtgcctc

SEQ ID NO: 2627 - DNA, 37 bp, Homo Sapiens
acaggagatcctgggttcgaatcccagcggtgcctcc

SEQ ID NO: 2628 - DNA, 38 bp, Homo Sapiens
acaggagatcctgggttcgaatcccagcggtgcctcca

SEQ ID NO: 2629 - DNA, 35 bp, Homo Sapiens
acaggagatcctgggttcgaatcccagtagagcct

SEQ ID NO: 2630 - DNA, 36 bp, Homo Sapiens
acaggagatcctgggttcgaatcccagtagagcctc

SEQ ID NO: 2631 - DNA, 37 bp, Homo Sapiens
acaggagatcctgggttcgaatcccagtagagcctcc

SEQ ID NO: 2632 - DNA, 35 bp, Homo Sapiens
acaggagatcctgggttcgactcccagcggggcct

SEQ ID NO: 2633 - DNA, 36 bp, Homo Sapiens
acaggagatcctgggttcgactcccagcggggcctc

SEQ ID NO: 2634 - DNA, 37 bp, Homo Sapiens
acaggagatcctgggttcgactcccagcggggcctcc

SEQ ID NO: 2635 - DNA, 35 bp, Homo Sapiens
acaggagatcctgggttcgactcccagtggggcct

SEQ ID NO: 2636 - DNA, 36 bp, Homo Sapiens
acaggagatcctgggttcgactcccagtggggcctc

SEQ ID NO: 2637 - DNA, 37 bp, Homo Sapiens
acaggagatcctgggttcgactcccagtggggcctcc

SEQ ID NO: 2638 - DNA, 16 bp, Homo Sapiens
acaggggttaggcctc

SEQ ID NO: 2639 - DNA, 24 bp, Homo Sapiens
acaggggttaggcctctttttacc

SEQ ID NO: 2640 - DNA, 27 bp, Homo Sapiens
acaggggttaggcctctttttaccacc

SEQ ID NO: 2641 - DNA, 28 bp, Homo Sapiens
acaggggttaggcctctttttaccacca

SEQ ID NO: 2642 - DNA, 25 bp, Homo Sapiens
acaggttcgaatcctgttcgtgacg

SEQ ID NO: 2643 - DNA, 27 bp, Homo Sapiens
acaggttcgaatcctgttcgtgacgcc

SEQ ID NO: 2644 - DNA, 28 bp, Homo Sapiens
acaggttcgaatcctgttcgtgacgcca

SEQ ID NO: 2645 - DNA, 16 bp, Homo Sapiens
acagtcagaggttcaa

SEQ ID NO: 2646 - DNA, 19 bp, Homo Sapiens
acagtcagaggttcaattc

SEQ ID NO: 2647 - DNA, 20 bp, Homo Sapiens
acagtcagaggttcaattcc

SEQ ID NO: 2648 - DNA, 21 bp, Homo Sapiens
acagtcagaggttcaattcct

SEQ ID NO: 2649 - DNA, 22 bp, Homo Sapiens
acagtcagaggttcaattcctc

SEQ ID NO: 2650 - DNA, 23 bp, Homo Sapiens
acagtcagaggttcaattcctct

SEQ ID NO: 2651 - DNA, 31 bp, Homo Sapiens
acagtcagaggttcaattcctcttcttaaca

SEQ ID NO: 2652 - DNA, 17 bp, Homo Sapiens
acatatgtccgcgtggg

SEQ ID NO: 2653 - DNA, 18 bp, Homo Sapiens
acatatgtccgcgtgggt

SEQ ID NO: 2654 - DNA, 19 bp, Homo Sapiens
acatatgtccgcgtgggtt

SEQ ID NO: 2655 - DNA, 28 bp, Homo Sapiens
acatatgtccgcgtgggttcgaacccca

SEQ ID NO: 2656 - DNA, 33 bp, Homo Sapiens
acatatgtccgcgtgggttcgaaccccactcct

SEQ ID NO: 2657 - DNA, 16 bp, Homo Sapiens
acatcaccccataaac

SEQ ID NO: 2658 - DNA, 17 bp, Homo Sapiens
acatcaccccataaaca

SEQ ID NO: 2659 - DNA, 18 bp, Homo Sapiens
acatcaccccataaacac

SEQ ID NO: 2660 - DNA, 19 bp, Homo Sapiens
acatcaccccataaacacc

SEQ ID NO: 2661 - DNA, 20 bp, Homo Sapiens
acatcaccccataaacacca

SEQ ID NO: 2662 - DNA, 16 bp, Homo Sapiens
acatcagattgtgaat

SEQ ID NO: 2663 - DNA, 17 bp, Homo Sapiens
acatcagattgtgaatc

SEQ ID NO: 2664 - DNA, 18 bp, Homo Sapiens
acatcagattgtgaatct

SEQ ID NO: 2665 - DNA, 19 bp, Homo Sapiens
acatcagattgtgaatctg

SEQ ID NO: 2666 - DNA, 20 bp, Homo Sapiens
acatcagattgtgaatctga

SEQ ID NO: 2667 - DNA, 21 bp, Homo Sapiens
acatcagattgtgaatctgac

SEQ ID NO: 2668 - DNA, 22 bp, Homo Sapiens
acatcagattgtgaatctgaca

SEQ ID NO: 2669 - DNA, 24 bp, Homo Sapiens
acatcagattgtgaatctgacaac

SEQ ID NO: 2670 - DNA, 25 bp, Homo Sapiens
acatcagattgtgaatctgacaaca

SEQ ID NO: 2671 - DNA, 26 bp, Homo Sapiens
acatcagattgtgaatctgacaacag

SEQ ID NO: 2672 - DNA, 27 bp, Homo Sapiens
acatcagattgtgaatctgacaacaga

SEQ ID NO: 2673 - DNA, 28 bp, Homo Sapiens
acatcagattgtgaatctgacaacagag

SEQ ID NO: 2674 - DNA, 29 bp, Homo Sapiens
acatcagattgtgaatctgacaacagagg

SEQ ID NO: 2675 - DNA, 30 bp, Homo Sapiens
acatcagattgtgaatctgacaacagaggc

SEQ ID NO: 2676 - DNA, 31 bp, Homo Sapiens
acatcagattgtgaatctgacaacagaggct

SEQ ID NO: 2677 - DNA, 32 bp, Homo Sapiens
acatcagattgtgaatctgacaacagaggctt

SEQ ID NO: 2678 - DNA, 33 bp, Homo Sapiens
acatcagattgtgaatctgacaacagaggctta

SEQ ID NO: 2679 - DNA, 34 bp, Homo Sapiens
acatcagattgtgaatctgacaacagaggcttac

SEQ ID NO: 2680 - DNA, 35 bp, Homo Sapiens
acatcagattgtgaatctgacaacagaggcttacg

SEQ ID NO: 2681 - DNA, 36 bp, Homo Sapiens
acatcagattgtgaatctgacaacagaggcttacga

SEQ ID NO: 2682 - DNA, 37 bp, Homo Sapiens
acatcagattgtgaatctgacaacagaggcttacgac

SEQ ID NO: 2683 - DNA, 38 bp, Homo Sapiens
acatcagattgtgaatctgacaacagaggcttacgacc

SEQ ID NO: 2684 - DNA, 39 bp, Homo Sapiens
acatcagattgtgaatctgacaacagaggcttacgaccc

SEQ ID NO: 2685 - DNA, 40 bp, Homo Sapiens
acatcagattgtgaatctgacaacagaggcttacgacccc

SEQ ID NO: 2686 - DNA, 41 bp, Homo Sapiens
acatcagattgtgaatctgacaacagaggcttacgacccct

SEQ ID NO: 2687 - DNA, 42 bp, Homo Sapiens
acatcagattgtgaatctgacaacagaggcttacgacccctt

SEQ ID NO: 2688 - DNA, 43 bp, Homo Sapiens
acatcagattgtgaatctgacaacagaggcttacgacccctta

SEQ ID NO: 2689 - DNA, 44 bp, Homo Sapiens
acatcagattgtgaatctgacaacagaggcttacgaccccttat

SEQ ID NO: 2690 - DNA, 45 bp, Homo Sapiens
acatcagattgtgaatctgacaacagaggcttacgaccccttatt

SEQ ID NO: 2691 - DNA, 48 bp, Homo Sapiens
acatcagattgtgaatctgacaacagaggcttacgaccccttatttac

SEQ ID NO: 2692 - DNA, 16 bp, Homo Sapiens
acatggactctggagc

SEQ ID NO: 2693 - DNA, 16 bp, Homo Sapiens
acatggctttctcacc

SEQ ID NO: 2694 - DNA, 17 bp, Homo Sapiens
acatggctttctcacca

SEQ ID NO: 2695 - DNA, 21 bp, Homo Sapiens
acatggtctagcggttaggat

SEQ ID NO: 2696 - DNA, 22 bp, Homo Sapiens
acatggtctagcggttaggatt

SEQ ID NO: 2697 - DNA, 23 bp, Homo Sapiens
acatggtctagcggttaggattc

SEQ ID NO: 2698 - DNA, 24 bp, Homo Sapiens
acatggtctagcggttaggattcc

SEQ ID NO: 2699 - DNA, 25 bp, Homo Sapiens
acatggtctagcggttaggattcct

SEQ ID NO: 2700 - DNA, 26 bp, Homo Sapiens
acatggtctagcggttaggattcctg

SEQ ID NO: 2701 - DNA, 27 bp, Homo Sapiens
acatggtctagcggttaggattcctgg

SEQ ID NO: 2702 - DNA, 28 bp, Homo Sapiens
acatggtctagcggttaggattcctggt

SEQ ID NO: 2703 - DNA, 29 bp, Homo Sapiens
acatggtctagcggttaggattcctggtt

SEQ ID NO: 2704 - DNA, 30 bp, Homo Sapiens
acatggtctagcggttaggattcctggttt

SEQ ID NO: 2705 - DNA, 31 bp, Homo Sapiens
acatggtctagcggttaggattcctggtttt

SEQ ID NO: 2706 - DNA, 32 bp, Homo Sapiens
acatggtctagcggttaggattcctggttttc

SEQ ID NO: 2707 - DNA, 33 bp, Homo Sapiens
acatggtctagcggttaggattcctggttttca

SEQ ID NO: 2708 - DNA, 34 bp, Homo Sapiens
acatggtctagcggttaggattcctggttttcac

SEQ ID NO: 2709 - DNA, 36 bp, Homo Sapiens
acatggtctagcggttaggattcctggttttcaccc

SEQ ID NO: 2710 - DNA, 38 bp, Homo Sapiens
acatggtctagcggttaggattcctggttttcacccag

SEQ ID NO: 2711 - DNA, 19 bp, Homo Sapiens
acattcaaaaaagagtacc

SEQ ID NO: 2712 - DNA, 20 bp, Homo Sapiens
acattcaaaaaagagtacca

SEQ ID NO: 2713 - DNA, 18 bp, Homo Sapiens
accaaaacatcagattgt

SEQ ID NO: 2714 - DNA, 19 bp, Homo Sapiens
accaaaacatcagattgtg

SEQ ID NO: 2715 - DNA, 20 bp, Homo Sapiens
accaaaacatcagattgtga

SEQ ID NO: 2716 - DNA, 21 bp, Homo Sapiens
accaaaacatcagattgtgaa

SEQ ID NO: 2717 - DNA, 22 bp, Homo Sapiens
accaaaacatcagattgtgaat

SEQ ID NO: 2718 - DNA, 23 bp, Homo Sapiens
accaaaacatcagattgtgaatc

SEQ ID NO: 2719 - DNA, 24 bp, Homo Sapiens
accaaaacatcagattgtgaatct

SEQ ID NO: 2720 - DNA, 25 bp, Homo Sapiens
accaaaacatcagattgtgaatctg

SEQ ID NO: 2721 - DNA, 27 bp, Homo Sapiens
accaaaacatcagattgtgaatctgac

SEQ ID NO: 2722 - DNA, 28 bp, Homo Sapiens
accaaaacatcagattgtgaatctgaca

SEQ ID NO: 2723 - DNA, 30 bp, Homo Sapiens
accaaaacatcagattgtgaatctgacaac

SEQ ID NO: 2724 - DNA, 31 bp, Homo Sapiens
accaaaacatcagattgtgaatctgacaaca

SEQ ID NO: 2725 - DNA, 32 bp, Homo Sapiens
accaaaacatcagattgtgaatctgacaacag

SEQ ID NO: 2726 - DNA, 33 bp, Homo Sapiens
accaaaacatcagattgtgaatctgacaacaga

SEQ ID NO: 2727 - DNA, 34 bp, Homo Sapiens
accaaaacatcagattgtgaatctgacaacagag

SEQ ID NO: 2728 - DNA, 35 bp, Homo Sapiens
accaaaacatcagattgtgaatctgacaacagagg

SEQ ID NO: 2729 - DNA, 36 bp, Homo Sapiens
accaaaacatcagattgtgaatctgacaacagaggc

SEQ ID NO: 2730 - DNA, 37 bp, Homo Sapiens
accaaaacatcagattgtgaatctgacaacagaggct

SEQ ID NO: 2731 - DNA, 38 bp, Homo Sapiens
accaaaacatcagattgtgaatctgacaacagaggctt

SEQ ID NO: 2732 - DNA, 39 bp, Homo Sapiens
accaaaacatcagattgtgaatctgacaacagaggctta

SEQ ID NO: 2733 - DNA, 40 bp, Homo Sapiens
accaaaacatcagattgtgaatctgacaacagaggcttac

SEQ ID NO: 2734 - DNA, 41 bp, Homo Sapiens
accaaaacatcagattgtgaatctgacaacagaggcttacg

SEQ ID NO: 2735 - DNA, 43 bp, Homo Sapiens
accaaaacatcagattgtgaatctgacaacagaggcttacgac

SEQ ID NO: 2736 - DNA, 44 bp, Homo Sapiens
accaaaacatcagattgtgaatctgacaacagaggcttacgacc

SEQ ID NO: 2737 - DNA, 45 bp, Homo Sapiens
accaaaacatcagattgtgaatctgacaacagaggcttacgaccc

SEQ ID NO: 2738 - DNA, 46 bp, Homo Sapiens
accaaaacatcagattgtgaatctgacaacagaggcttacgacccc

SEQ ID NO: 2739 - DNA, 47 bp, Homo Sapiens
accaaaacatcagattgtgaatctgacaacagaggcttacgacccct

SEQ ID NO: 2740 - DNA, 48 bp, Homo Sapiens
accaaaacatcagattgtgaatctgacaacagaggcttacgacccctt

SEQ ID NO: 2741 - DNA, 16 bp, Homo Sapiens
accaacacctctttac

SEQ ID NO: 2742 - DNA, 17 bp, Homo Sapiens
accaacacctctttaca

SEQ ID NO: 2743 - DNA, 18 bp, Homo Sapiens
accaacacctctttacag

SEQ ID NO: 2744 - DNA, 19 bp, Homo Sapiens
accaacacctctttacagt

SEQ ID NO: 2745 - DNA, 20 bp, Homo Sapiens
accaacacctctttacagtg

SEQ ID NO: 2746 - DNA, 21 bp, Homo Sapiens
accaacacctctttacagtga

SEQ ID NO: 2747 - DNA, 22 bp, Homo Sapiens
accaacacctctttacagtgac

SEQ ID NO: 2748 - DNA, 23 bp, Homo Sapiens
accaacacctctttacagtgacc

SEQ ID NO: 2749 - DNA, 24 bp, Homo Sapiens
accaacacctctttacagtgacca

SEQ ID NO: 2750 - DNA, 24 bp, Homo Sapiens
accaagagccttcaaagccctcag

SEQ ID NO: 2751 - DNA, 25 bp, Homo Sapiens
accaagagccttcaaagccctcagt

SEQ ID NO: 2752 - DNA, 32 bp, Homo Sapiens
accaagagccttcaaagccctcagtaagttgc

SEQ ID NO: 2753 - DNA, 16 bp, Homo Sapiens
accagaatggccgagt

SEQ ID NO: 2754 - DNA, 17 bp, Homo Sapiens
accagaatggccgagtg

SEQ ID NO: 2755 - DNA, 18 bp, Homo Sapiens
accagaatggccgagtgg

SEQ ID NO: 2756 - DNA, 20 bp, Homo Sapiens
accagaatggccgagtggtt

SEQ ID NO: 2757 - DNA, 21 bp, Homo Sapiens
accagaatggccgagtggtta

SEQ ID NO: 2758 - DNA, 22 bp, Homo Sapiens
accagaatggccgagtggttaa

SEQ ID NO: 2759 - DNA, 23 bp, Homo Sapiens
accagaatggccgagtggttaag

SEQ ID NO: 2760 - DNA, 16 bp, Homo Sapiens
accagctttggggggt

SEQ ID NO: 2761 - DNA, 17 bp, Homo Sapiens
accagctttggggggtt

SEQ ID NO: 2762 - DNA, 18 bp, Homo Sapiens
accagctttggggggttc

SEQ ID NO: 2763 - DNA, 19 bp, Homo Sapiens
accagctttggggggttcg

SEQ ID NO: 2764 - DNA, 20 bp, Homo Sapiens
accagctttggggggttcga

SEQ ID NO: 2765 - DNA, 28 bp, Homo Sapiens
accagctttggggggttcgattccttcc

SEQ ID NO: 2766 - DNA, 29 bp, Homo Sapiens
accagctttggggggttcgattccttcct

SEQ ID NO: 2767 - DNA, 30 bp, Homo Sapiens
accagctttggggggttcgattccttcctt

SEQ ID NO: 2768 - DNA, 31 bp, Homo Sapiens
accagctttggggggttcgattccttccttt

SEQ ID NO: 2769 - DNA, 34 bp, Homo Sapiens
accagctttggggggttcgattccttcctttttt

SEQ ID NO: 2770 - DNA, 37 bp, Homo Sapiens
accagctttggggggttcgattccttccttttttgcc

SEQ ID NO: 2771 - DNA, 16 bp, Homo Sapiens
accaggatggccgagt

SEQ ID NO: 2772 - DNA, 17 bp, Homo Sapiens
accaggatggccgagtg

SEQ ID NO: 2773 - DNA, 18 bp, Homo Sapiens
accaggatggccgagtgg

SEQ ID NO: 2774 - DNA, 19 bp, Homo Sapiens
accaggatggccgagtggt

SEQ ID NO: 2775 - DNA, 20 bp, Homo Sapiens
accaggatggccgagtggtt

SEQ ID NO: 2776 - DNA, 21 bp, Homo Sapiens
accaggatggccgagtggtta

SEQ ID NO: 2777 - DNA, 22 bp, Homo Sapiens
accaggatggccgagtggttaa

SEQ ID NO: 2778 - DNA, 23 bp, Homo Sapiens
accaggatggccgagtggttaag

SEQ ID NO: 2779 - DNA, 24 bp, Homo Sapiens
accaggatggccgagtggttaagg

SEQ ID NO: 2780 - DNA, 25 bp, Homo Sapiens
accaggatggccgagtggttaaggc

SEQ ID NO: 2781 - DNA, 32 bp, Homo Sapiens
accaggatggccgagtggttaaggcgttggac

SEQ ID NO: 2782 - DNA, 33 bp, Homo Sapiens
accaggatggccgagtggttaaggcgttggact

SEQ ID NO: 2783 - DNA, 16 bp, Homo Sapiens
accaggcggaaacacc

SEQ ID NO: 2784 - DNA, 17 bp, Homo Sapiens
accaggcggaaacacca

SEQ ID NO: 2785 - DNA, 16 bp, Homo Sapiens
accaggggtcgcgagt

SEQ ID NO: 2786 - DNA, 17 bp, Homo Sapiens
accaggggtcgcgagtt

SEQ ID NO: 2787 - DNA, 18 bp, Homo Sapiens
accaggggtcgcgagttc

SEQ ID NO: 2788 - DNA, 19 bp, Homo Sapiens
accaggggtcgcgagttca

SEQ ID NO: 2789 - DNA, 28 bp, Homo Sapiens
accaggggtcgcgagttcaaatctcgct

SEQ ID NO: 2790 - DNA, 32 bp, Homo Sapiens
accaggggtcgcgagttcaaatctcgctgggg

SEQ ID NO: 2791 - DNA, 33 bp, Homo Sapiens
accaggggtcgcgagttcaaatctcgctggggc

SEQ ID NO: 2792 - DNA, 34 bp, Homo Sapiens
accaggggtcgcgagttcaaatctcgctggggcc

SEQ ID NO: 2793 - DNA, 35 bp, Homo Sapiens
accaggggtcgcgagttcaaatctcgctggggcct

SEQ ID NO: 2794 - DNA, 36 bp, Homo Sapiens
accaggggtcgcgagttcaaatctcgctggggcctc

SEQ ID NO: 2795 - DNA, 37 bp, Homo Sapiens
accaggggtcgcgagttcaaatctcgctggggcctcc

SEQ ID NO: 2796 - DNA, 38 bp, Homo Sapiens
accaggggtcgcgagttcaaatctcgctggggcctcca

SEQ ID NO: 2797 - DNA, 35 bp, Homo Sapiens
accaggggtcgcgagttcaattctcgctggggcct

SEQ ID NO: 2798 - DNA, 37 bp, Homo Sapiens
accaggggtcgcgagttcaattctcgctggggcctcc

SEQ ID NO: 2799 - DNA, 19 bp, Homo Sapiens
accaggggtcgcgagttcg

SEQ ID NO: 2800 - DNA, 35 bp, Homo Sapiens
accaggggtcgcgagttcgatcctcgctggggcct

SEQ ID NO: 2801 - DNA, 37 bp, Homo Sapiens
accaggggtcgcgagttcgatcctcgctggggcctcc

SEQ ID NO: 2802 - DNA, 45 bp, Homo Sapiens
accagtcttgtaaaccggagatgaaaacctttttccaaggacacc

SEQ ID NO: 2803 - DNA, 46 bp, Homo Sapiens
accagtcttgtaaaccggagatgaaaacctttttccaaggacacca

SEQ ID NO: 2804 - DNA, 16 bp, Homo Sapiens
accatcctctgctacc

SEQ ID NO: 2805 - DNA, 17 bp, Homo Sapiens
accatcctctgctacca

SEQ ID NO: 2806 - DNA, 19 bp, Homo Sapiens
accatttcataactttgtc

SEQ ID NO: 2807 - DNA, 20 bp, Homo Sapiens
accatttcataactttgtca

SEQ ID NO: 2808 - DNA, 37 bp, Homo Sapiens
accatttcataactttgtcaaagttaaattataggct

SEQ ID NO: 2809 - DNA, 38 bp, Homo Sapiens
accatttcataactttgtcaaagttaaattataggcta

SEQ ID NO: 2810 - DNA, 16 bp, Homo Sapiens
acccaacttacactta

SEQ ID NO: 2811 - DNA, 19 bp, Homo Sapiens
acccaacttacacttagga

SEQ ID NO: 2812 - DNA, 20 bp, Homo Sapiens
acccaacttacacttaggag

SEQ ID NO: 2813 - DNA, 22 bp, Homo Sapiens
acccaacttacacttaggagat

SEQ ID NO: 2814 - DNA, 23 bp, Homo Sapiens
acccaacttacacttaggagatt

SEQ ID NO: 2815 - DNA, 25 bp, Homo Sapiens
acccaacttacacttaggagatttc

SEQ ID NO: 2816 - DNA, 26 bp, Homo Sapiens
acccaacttacacttaggagatttca

SEQ ID NO: 2817 - DNA, 27 bp, Homo Sapiens
acccaacttacacttaggagatttcaa

SEQ ID NO: 2818 - DNA, 28 bp, Homo Sapiens
acccaacttacacttaggagatttcaac

SEQ ID NO: 2819 - DNA, 29 bp, Homo Sapiens
acccaacttacacttaggagatttcaact

SEQ ID NO: 2820 - DNA, 30 bp, Homo Sapiens
acccaacttacacttaggagatttcaactt

SEQ ID NO: 2821 - DNA, 31 bp, Homo Sapiens
acccaacttacacttaggagatttcaactta

SEQ ID NO: 2822 - DNA, 32 bp, Homo Sapiens
acccaacttacacttaggagatttcaacttaa

SEQ ID NO: 2823 - DNA, 33 bp, Homo Sapiens
acccaacttacacttaggagatttcaacttaac

SEQ ID NO: 2824 - DNA, 35 bp, Homo Sapiens
acccaacttacacttaggagatttcaacttaactt

SEQ ID NO: 2825 - DNA, 36 bp, Homo Sapiens
acccaacttacacttaggagatttcaacttaacttg

SEQ ID NO: 2826 - DNA, 38 bp, Homo Sapiens
acccaacttacacttaggagatttcaacttaacttgac

SEQ ID NO: 2827 - DNA, 39 bp, Homo Sapiens
acccaacttacacttaggagatttcaacttaacttgacc

SEQ ID NO: 2828 - DNA, 40 bp, Homo Sapiens
acccaacttacacttaggagatttcaacttaacttgaccg

SEQ ID NO: 2829 - DNA, 41 bp, Homo Sapiens
acccaacttacacttaggagatttcaacttaacttgaccgc

SEQ ID NO: 2830 - DNA, 42 bp, Homo Sapiens
acccaacttacacttaggagatttcaacttaacttgaccgct

SEQ ID NO: 2831 - DNA, 43 bp, Homo Sapiens
acccaacttacacttaggagatttcaacttaacttgaccgctc

SEQ ID NO: 2832 - DNA, 44 bp, Homo Sapiens
acccaacttacacttaggagatttcaacttaacttgaccgctct

SEQ ID NO: 2833 - DNA, 45 bp, Homo Sapiens
acccaacttacacttaggagatttcaacttaacttgaccgctctg

SEQ ID NO: 2834 - DNA, 46 bp, Homo Sapiens
acccaacttacacttaggagatttcaacttaacttgaccgctctga

SEQ ID NO: 2835 - DNA, 47 bp, Homo Sapiens
acccaacttacacttaggagatttcaacttaacttgaccgctctgac

SEQ ID NO: 2836 - DNA, 48 bp, Homo Sapiens
acccaacttacacttaggagatttcaacttaacttgaccgctctgacc

SEQ ID NO: 2837 - DNA, 17 bp, Homo Sapiens
acccagaggtcgatgga

SEQ ID NO: 2838 - DNA, 18 bp, Homo Sapiens
acccagaggtcgatggat

SEQ ID NO: 2839 - DNA, 19 bp, Homo Sapiens
acccagaggtcgatggatc

SEQ ID NO: 2840 - DNA, 20 bp, Homo Sapiens
acccagaggtcgatggatcg

SEQ ID NO: 2841 - DNA, 21 bp, Homo Sapiens
acccagaggtcgatggatcga

SEQ ID NO: 2842 - DNA, 22 bp, Homo Sapiens
acccagaggtcgatggatcgaa

SEQ ID NO: 2843 - DNA, 23 bp, Homo Sapiens
acccagaggtcgatggatcgaaa

SEQ ID NO: 2844 - DNA, 24 bp, Homo Sapiens
acccagaggtcgatggatcgaaac

SEQ ID NO: 2845 - DNA, 35 bp, Homo Sapiens
acccagaggtcgatggatcgaaaccatcctctgct

SEQ ID NO: 2846 - DNA, 21 bp, Homo Sapiens
acccagaggtcgatggatcta

SEQ ID NO: 2847 - DNA, 28 bp, Homo Sapiens
acccaggcggcccgggttcgactcccgg

SEQ ID NO: 2848 - DNA, 29 bp, Homo Sapiens
acccaggcggcccgggttcgactcccggt

SEQ ID NO: 2849 - DNA, 30 bp, Homo Sapiens
acccaggcggcccgggttcgactcccggtg

SEQ ID NO: 2850 - DNA, 31 bp, Homo Sapiens
acccaggcggcccgggttcgactcccggtgt

SEQ ID NO: 2851 - DNA, 32 bp, Homo Sapiens
acccaggcggcccgggttcgactcccggtgtg

SEQ ID NO: 2852 - DNA, 33 bp, Homo Sapiens
acccaggcggcccgggttcgactcccggtgtgg

SEQ ID NO: 2853 - DNA, 34 bp, Homo Sapiens
acccaggcggcccgggttcgactcccggtgtggg

SEQ ID NO: 2854 - DNA, 35 bp, Homo Sapiens
acccaggcggcccgggttcgactcccggtgtggga

SEQ ID NO: 2855 - DNA, 36 bp, Homo Sapiens
acccaggcggcccgggttcgactcccggtgtgggaa

SEQ ID NO: 2856 - DNA, 37 bp, Homo Sapiens
acccaggcggcccgggttcgactcccggtgtgggaac

SEQ ID NO: 2857 - DNA, 38 bp, Homo Sapiens
acccaggcggcccgggttcgactcccggtgtgggaacc

SEQ ID NO: 2858 - DNA, 39 bp, Homo Sapiens
acccaggcggcccgggttcgactcccggtgtgggaacca

SEQ ID NO: 2859 - DNA, 30 bp, Homo Sapiens
acccaggtggcccgggttcgactcccggta

SEQ ID NO: 2860 - DNA, 32 bp, Homo Sapiens
acccaggtggcccgggttcgactcccggtatg

SEQ ID NO: 2861 - DNA, 33 bp, Homo Sapiens
acccaggtggcccgggttcgactcccggtatgg

SEQ ID NO: 2862 - DNA, 34 bp, Homo Sapiens
acccaggtggcccgggttcgactcccggtatggg

SEQ ID NO: 2863 - DNA, 35 bp, Homo Sapiens
acccaggtggcccgggttcgactcccggtatggga

SEQ ID NO: 2864 - DNA, 36 bp, Homo Sapiens
acccaggtggcccgggttcgactcccggtatgggaa

SEQ ID NO: 2865 - DNA, 37 bp, Homo Sapiens
acccaggtggcccgggttcgactcccggtatgggaac

SEQ ID NO: 2866 - DNA, 38 bp, Homo Sapiens
acccaggtggcccgggttcgactcccggtatgggaacc

SEQ ID NO: 2867 - DNA, 39 bp, Homo Sapiens
acccaggtggcccgggttcgactcccggtatgggaacca

SEQ ID NO: 2868 - DNA, 18 bp, Homo Sapiens
acccagtggcctaatgga

SEQ ID NO: 2869 - DNA, 22 bp, Homo Sapiens
acccagtggcctaatggataag

SEQ ID NO: 2870 - DNA, 34 bp, Homo Sapiens
acccagtggcctaatggataaggcatcagcctcc

SEQ ID NO: 2871 - DNA, 35 bp, Homo Sapiens
acccagtggcctaatggataaggcatcagcctccg

SEQ ID NO: 2872 - DNA, 18 bp, Homo Sapiens
accccactactggtacca

SEQ ID NO: 2873 - DNA, 16 bp, Homo Sapiens
accccactcctggtac

SEQ ID NO: 2874 - DNA, 17 bp, Homo Sapiens
accccactcctggtacc

SEQ ID NO: 2875 - DNA, 18 bp, Homo Sapiens
accccactcctggtacca

SEQ ID NO: 2876 - DNA, 18 bp, Homo Sapiens
accccactctcggtacca

SEQ ID NO: 2877 - DNA, 17 bp, Homo Sapiens
accccacttctggtacc

SEQ ID NO: 2878 - DNA, 16 bp, Homo Sapiens
acccccttatttctac

SEQ ID NO: 2879 - DNA, 17 bp, Homo Sapiens
acccccttatttctacc

SEQ ID NO: 2880 - DNA, 18 bp, Homo Sapiens
acccccttatttctacca

SEQ ID NO: 2881 - DNA, 19 bp, Homo Sapiens
accccgaaaatgttggtta

SEQ ID NO: 2882 - DNA, 20 bp, Homo Sapiens
accccgaaaatgttggttat

SEQ ID NO: 2883 - DNA, 21 bp, Homo Sapiens
accccgaaaatgttggttata

SEQ ID NO: 2884 - DNA, 22 bp, Homo Sapiens
accccgaaaatgttggttatac

SEQ ID NO: 2885 - DNA, 33 bp, Homo Sapiens
accccgaaaatgttggttatacccttcccgtac

SEQ ID NO: 2886 - DNA, 34 bp, Homo Sapiens
accccgaaaatgttggttatacccttcccgtact

SEQ ID NO: 2887 - DNA, 35 bp, Homo Sapiens
accccgaaaatgttggttatacccttcccgtacta

SEQ ID NO: 2888 - DNA, 36 bp, Homo Sapiens
accccgaaaatgttggttatacccttcccgtactac

SEQ ID NO: 2889 - DNA, 37 bp, Homo Sapiens
accccgaaaatgttggttatacccttcccgtactacc

SEQ ID NO: 2890 - DNA, 38 bp, Homo Sapiens
accccgaaaatgttggttatacccttcccgtactacca

SEQ ID NO: 2891 - DNA, 17 bp, Homo Sapiens
accccgtacgggccacc

SEQ ID NO: 2892 - DNA, 18 bp, Homo Sapiens
accccgtacgggccacca

SEQ ID NO: 2893 - DNA, 16 bp, Homo Sapiens
accccgtccgtgcctc

SEQ ID NO: 2894 - DNA, 17 bp, Homo Sapiens
accccgtccgtgcctcc

SEQ ID NO: 2895 - DNA, 18 bp, Homo Sapiens
accccgtccgtgcctcca

SEQ ID NO: 2896 - DNA, 16 bp, Homo Sapiens
accccttatttacccc

SEQ ID NO: 2897 - DNA, 17 bp, Homo Sapiens
accccttatttacccca

SEQ ID NO: 2898 - DNA, 24 bp, Homo Sapiens
acccgggttcgattcccgggcggc

SEQ ID NO: 2899 - DNA, 28 bp, Homo Sapiens
acccgggttcgattcccgggcggcgcac

SEQ ID NO: 2900 - DNA, 16 bp, Homo Sapiens
accctgctcgctgcgc

SEQ ID NO: 2901 - DNA, 17 bp, Homo Sapiens
accctgctcgctgcgcc

SEQ ID NO: 2902 - DNA, 18 bp, Homo Sapiens
accctgctcgctgcgcca

SEQ ID NO: 2903 - DNA, 16 bp, Homo Sapiens
acccttcccgtactac

SEQ ID NO: 2904 - DNA, 17 bp, Homo Sapiens
acccttcccgtactacc

SEQ ID NO: 2905 - DNA, 18 bp, Homo Sapiens
acccttcccgtactacca

SEQ ID NO: 2906 - DNA, 19 bp, Homo Sapiens
accgaaaggttggtggttc

SEQ ID NO: 2907 - DNA, 20 bp, Homo Sapiens
accgaaaggttggtggttcg

SEQ ID NO: 2908 - DNA, 23 bp, Homo Sapiens
accgaaaggttggtggttcgagc

SEQ ID NO: 2909 - DNA, 27 bp, Homo Sapiens
accgaaaggttggtggttcgagcccac

SEQ ID NO: 2910 - DNA, 35 bp, Homo Sapiens
accgaaaggttggtggttcgagcccacccagggac

SEQ ID NO: 2911 - DNA, 36 bp, Homo Sapiens
accgaaaggttggtggttcgagcccacccagggacg

SEQ ID NO: 2912 - DNA, 38 bp, Homo Sapiens
accgaaaggttggtggttcgagcccacccagggacgcc

SEQ ID NO: 2913 - DNA, 39 bp, Homo Sapiens
accgaaaggttggtggttcgagcccacccagggacgcca

SEQ ID NO: 2914 - DNA, 16 bp, Homo Sapiens
accgaagatcacgggt

SEQ ID NO: 2915 - DNA, 33 bp, Homo Sapiens
accgaagatcacgggttcgaaccccgtccgtgc

SEQ ID NO: 2916 - DNA, 34 bp, Homo Sapiens
accgaagatcacgggttcgaaccccgtccgtgcc

SEQ ID NO: 2917 - DNA, 35 bp, Homo Sapiens
accgaagatcacgggttcgaaccccgtccgtgcct

SEQ ID NO: 2918 - DNA, 36 bp, Homo Sapiens
accgaagatcacgggttcgaaccccgtccgtgcctc

SEQ ID NO: 2919 - DNA, 37 bp, Homo Sapiens
accgaagatcacgggttcgaaccccgtccgtgcctcc

SEQ ID NO: 2920 - DNA, 38 bp, Homo Sapiens
accgaagatcacgggttcgaaccccgtccgtgcctcca

SEQ ID NO: 2921 - DNA, 16 bp, Homo Sapiens
accgaagatcgcgggt

SEQ ID NO: 2922 - DNA, 17 bp, Homo Sapiens
accgaagatcgcgggtt

SEQ ID NO: 2923 - DNA, 18 bp, Homo Sapiens
accgaagatcgcgggttc

SEQ ID NO: 2924 - DNA, 19 bp, Homo Sapiens
accgaagatcgcgggttcg

SEQ ID NO: 2925 - DNA, 32 bp, Homo Sapiens
accgaagatcgcgggttcgaaccccgtccgtg

SEQ ID NO: 2926 - DNA, 34 bp, Homo Sapiens
accgaagatcgcgggttcgaaccccgtccgtgcc

SEQ ID NO: 2927 - DNA, 35 bp, Homo Sapiens
accgaagatcgcgggttcgaaccccgtccgtgcct

SEQ ID NO: 2928 - DNA, 36 bp, Homo Sapiens
accgaagatcgcgggttcgaaccccgtccgtgcctc

SEQ ID NO: 2929 - DNA, 37 bp, Homo Sapiens
accgaagatcgcgggttcgaaccccgtccgtgcctcc

SEQ ID NO: 2930 - DNA, 38 bp, Homo Sapiens
accgaagatcgcgggttcgaaccccgtccgtgcctcca

SEQ ID NO: 2931 - DNA, 16 bp, Homo Sapiens
accgagcggaaacacc

SEQ ID NO: 2932 - DNA, 17 bp, Homo Sapiens
accgagcggaaacacca

SEQ ID NO: 2933 - DNA, 31 bp, Homo Sapiens
accgccgcagcccgggttcgattcccggtca

SEQ ID NO: 2934 - DNA, 16 bp, Homo Sapiens
accgccgcggcccggg

SEQ ID NO: 2935 - DNA, 17 bp, Homo Sapiens
accgccgcggcccgggt

SEQ ID NO: 2936 - DNA, 18 bp, Homo Sapiens
accgccgcggcccgggtt

SEQ ID NO: 2937 - DNA, 19 bp, Homo Sapiens
accgccgcggcccgggttc

SEQ ID NO: 2938 - DNA, 20 bp, Homo Sapiens
accgccgcggcccgggttcg

SEQ ID NO: 2939 - DNA, 21 bp, Homo Sapiens
accgccgcggcccgggttcga

SEQ ID NO: 2940 - DNA, 22 bp, Homo Sapiens
accgccgcggcccgggttcgat

SEQ ID NO: 2941 - DNA, 23 bp, Homo Sapiens
accgccgcggcccgggttcgatt

SEQ ID NO: 2942 - DNA, 25 bp, Homo Sapiens
accgccgcggcccgggttcgattcc

SEQ ID NO: 2943 - DNA, 27 bp, Homo Sapiens
accgccgcggcccgggttcgattcccg

SEQ ID NO: 2944 - DNA, 28 bp, Homo Sapiens
accgccgcggcccgggttcgattcccgg

SEQ ID NO: 2945 - DNA, 33 bp, Homo Sapiens
accgccgcggcccgggttcgattcccggccagg

SEQ ID NO: 2946 - DNA, 38 bp, Homo Sapiens
accgccgcggcccgggttcgattcccggccagggaacc

SEQ ID NO: 2947 - DNA, 39 bp, Homo Sapiens
accgccgcggcccgggttcgattcccggccagggaacca

SEQ ID NO: 2948 - DNA, 29 bp, Homo Sapiens
accgccgcggcccgggttcgattcccggt

SEQ ID NO: 2949 - DNA, 30 bp, Homo Sapiens
accgccgcggcccgggttcgattcccggtc

SEQ ID NO: 2950 - DNA, 31 bp, Homo Sapiens
accgccgcggcccgggttcgattcccggtca

SEQ ID NO: 2951 - DNA, 32 bp, Homo Sapiens
accgccgcggcccgggttcgattcccggtcag

SEQ ID NO: 2952 - DNA, 33 bp, Homo Sapiens
accgccgcggcccgggttcgattcccggtcagg

SEQ ID NO: 2953 - DNA, 36 bp, Homo Sapiens
accgccgcggcccgggttcgattcccggtcaggaaa

SEQ ID NO: 2954 - DNA, 38 bp, Homo Sapiens
accgccgcggcccgggttcgattcccggtcaggaaacc

SEQ ID NO: 2955 - DNA, 34 bp, Homo Sapiens
accgccgcggcccgggttcgattcccggtcaggg

SEQ ID NO: 2956 - DNA, 35 bp, Homo Sapiens
accgccgcggcccgggttcgattcccggtcaggga

SEQ ID NO: 2957 - DNA, 36 bp, Homo Sapiens
accgccgcggcccgggttcgattcccggtcagggaa

SEQ ID NO: 2958 - DNA, 37 bp, Homo Sapiens
accgccgcggcccgggttcgattcccggtcagggaac

SEQ ID NO: 2959 - DNA, 38 bp, Homo Sapiens
accgccgcggcccgggttcgattcccggtcagggaacc

SEQ ID NO: 2960 - DNA, 39 bp, Homo Sapiens
accgccgcggcccgggttcgattcccggtcagggaacca

SEQ ID NO: 2961 - DNA, 17 bp, Homo Sapiens
accgcgtggcctaatgg

SEQ ID NO: 2962 - DNA, 18 bp, Homo Sapiens
accgcgtggcctaatgga

SEQ ID NO: 2963 - DNA, 29 bp, Homo Sapiens
accgcgtggcctaatggataaggcgtctg

SEQ ID NO: 2964 - DNA, 32 bp, Homo Sapiens
accgcgtggcctaatggataaggcgtctgact

SEQ ID NO: 2965 - DNA, 34 bp, Homo Sapiens
accgcgtggcctaatggataaggcgtctgacttc

SEQ ID NO: 2966 - DNA, 35 bp, Homo Sapiens
accgcgtggcctaatggataaggcgtctgacttcg

SEQ ID NO: 2967 - DNA, 16 bp, Homo Sapiens
accggagatgaaaacc

SEQ ID NO: 2968 - DNA, 17 bp, Homo Sapiens
accggagatgaaaacct

SEQ ID NO: 2969 - DNA, 18 bp, Homo Sapiens
accggagatgaaaacctt

SEQ ID NO: 2970 - DNA, 19 bp, Homo Sapiens
accggagatgaaaaccttt

SEQ ID NO: 2971 - DNA, 20 bp, Homo Sapiens
accggagatgaaaacctttt

SEQ ID NO: 2972 - DNA, 21 bp, Homo Sapiens
accggagatgaaaaccttttt

SEQ ID NO: 2973 - DNA, 22 bp, Homo Sapiens
accggagatgaaaacctttttc

SEQ ID NO: 2974 - DNA, 23 bp, Homo Sapiens
accggagatgaaaacctttttcc

SEQ ID NO: 2975 - DNA, 26 bp, Homo Sapiens
accggagatgaaaacctttttccaag

SEQ ID NO: 2976 - DNA, 29 bp, Homo Sapiens
accggagatgaaaacctttttccaaggac

SEQ ID NO: 2977 - DNA, 30 bp, Homo Sapiens
accggagatgaaaacctttttccaaggaca

SEQ ID NO: 2978 - DNA, 31 bp, Homo Sapiens
accggagatgaaaacctttttccaaggacac

SEQ ID NO: 2979 - DNA, 32 bp, Homo Sapiens
accggagatgaaaacctttttccaaggacacc

SEQ ID NO: 2980 - DNA, 33 bp, Homo Sapiens
accggagatgaaaacctttttccaaggacacca

SEQ ID NO: 2981 - DNA, 33 bp, Homo Sapiens
accgggatggctgagtggttaaggcgttggact

SEQ ID NO: 2982 - DNA, 17 bp, Homo Sapiens
accgggcagaaacacca

SEQ ID NO: 2983 - DNA, 16 bp, Homo Sapiens
accgggcagaagcacc

SEQ ID NO: 2984 - DNA, 17 bp, Homo Sapiens
accgggcagaagcacca

SEQ ID NO: 2985 - DNA, 16 bp, Homo Sapiens
accgggcggaaacacc

SEQ ID NO: 2986 - DNA, 17 bp, Homo Sapiens
accgggcggaaacacca

SEQ ID NO: 2987 - DNA, 27 bp, Homo Sapiens
accggggttcaattccccgacggggag

SEQ ID NO: 2988 - DNA, 28 bp, Homo Sapiens
accggggttcaattccccgacggggagc

SEQ ID NO: 2989 - DNA, 29 bp, Homo Sapiens
accggggttcaattccccgacggggagcc

SEQ ID NO: 2990 - DNA, 28 bp, Homo Sapiens
accggggttcgattccccgacggggagc

SEQ ID NO: 2991 - DNA, 29 bp, Homo Sapiens
accggggttcgattccccgacggggagcc

SEQ ID NO: 2992 - DNA, 30 bp, Homo Sapiens
accggggttcgattccccgacggggagcca

SEQ ID NO: 2993 - DNA, 24 bp, Homo Sapiens
accgttaacttccaattaactagt

SEQ ID NO: 2994 - DNA, 28 bp, Homo Sapiens
accgttaacttccaattaactagttttg

SEQ ID NO: 2995 - DNA, 30 bp, Homo Sapiens
accgttaacttccaattaactagttttgac

SEQ ID NO: 2996 - DNA, 31 bp, Homo Sapiens
accgttaacttccaattaactagttttgaca

SEQ ID NO: 2997 - DNA, 32 bp, Homo Sapiens
accgttaacttccaattaactagttttgacaa

SEQ ID NO: 2998 - DNA, 33 bp, Homo Sapiens
accgttaacttccaattaactagttttgacaac

SEQ ID NO: 2999 - DNA, 34 bp, Homo Sapiens
accgttaacttccaattaactagttttgacaaca

SEQ ID NO: 3000 - DNA, 17 bp, Homo Sapiens
acctcagagggggcacc

SEQ ID NO: 3001 - DNA, 18 bp, Homo Sapiens
acctcagagggggcacca

SEQ ID NO: 3002 - DNA, 17 bp, Homo Sapiens
acctcctcaaagcaata

SEQ ID NO: 3003 - DNA, 18 bp, Homo Sapiens
acctcctcaaagcaatac

SEQ ID NO: 3004 - DNA, 19 bp, Homo Sapiens
acctcctcaaagcaataca

SEQ ID NO: 3005 - DNA, 21 bp, Homo Sapiens
acctcctcaaagcaatacact

SEQ ID NO: 3006 - DNA, 22 bp, Homo Sapiens
acctcctcaaagcaatacactg

SEQ ID NO: 3007 - DNA, 23 bp, Homo Sapiens
acctcctcaaagcaatacactga

SEQ ID NO: 3008 - DNA, 40 bp, Homo Sapiens
acctcctcaaagcaatacactgaaaatgtttagacgggct

SEQ ID NO: 3009 - DNA, 26 bp, Homo Sapiens
acctcggttcgaatccgagtcacggc

SEQ ID NO: 3010 - DNA, 16 bp, Homo Sapiens
acctcgtggcgcaacg

SEQ ID NO: 3011 - DNA, 17 bp, Homo Sapiens
acctcgtggcgcaacgg

SEQ ID NO: 3012 - DNA, 17 bp, Homo Sapiens
acctcgtggcgcaatgg

SEQ ID NO: 3013 - DNA, 16 bp, Homo Sapiens
acctctttacagtgac

SEQ ID NO: 3014 - DNA, 17 bp, Homo Sapiens
acctctttacagtgacc

SEQ ID NO: 3015 - DNA, 18 bp, Homo Sapiens
acctctttacagtgacca

SEQ ID NO: 3016 - DNA, 16 bp, Homo Sapiens
acctgccggggcttcc

SEQ ID NO: 3017 - DNA, 17 bp, Homo Sapiens
acctgccggggcttcca

SEQ ID NO: 3018 - DNA, 22 bp, Homo Sapiens
accttttaagttaaagattaag

SEQ ID NO: 3019 - DNA, 24 bp, Homo Sapiens
accttttaagttaaagattaagag

SEQ ID NO: 3020 - DNA, 26 bp, Homo Sapiens
accttttaagttaaagattaagagaa

SEQ ID NO: 3021 - DNA, 27 bp, Homo Sapiens
accttttaagttaaagattaagagaac

SEQ ID NO: 3022 - DNA, 28 bp, Homo Sapiens
accttttaagttaaagattaagagaacc

SEQ ID NO: 3023 - DNA, 29 bp, Homo Sapiens
accttttaagttaaagattaagagaacca

SEQ ID NO: 3024 - DNA, 30 bp, Homo Sapiens
accttttaagttaaagattaagagaaccaa

SEQ ID NO: 3025 - DNA, 31 bp, Homo Sapiens
accttttaagttaaagattaagagaaccaac

SEQ ID NO: 3026 - DNA, 33 bp, Homo Sapiens
accttttaagttaaagattaagagaaccaacac

SEQ ID NO: 3027 - DNA, 34 bp, Homo Sapiens
accttttaagttaaagattaagagaaccaacacc

SEQ ID NO: 3028 - DNA, 35 bp, Homo Sapiens
accttttaagttaaagattaagagaaccaacacct

SEQ ID NO: 3029 - DNA, 36 bp, Homo Sapiens
accttttaagttaaagattaagagaaccaacacctc

SEQ ID NO: 3030 - DNA, 37 bp, Homo Sapiens
accttttaagttaaagattaagagaaccaacacctct

SEQ ID NO: 3031 - DNA, 40 bp, Homo Sapiens
accttttaagttaaagattaagagaaccaacacctcttta

SEQ ID NO: 3032 - DNA, 42 bp, Homo Sapiens
accttttaagttaaagattaagagaaccaacacctctttaca

SEQ ID NO: 3033 - DNA, 43 bp, Homo Sapiens
accttttaagttaaagattaagagaaccaacacctctttacag

SEQ ID NO: 3034 - DNA, 46 bp, Homo Sapiens
accttttaagttaaagattaagagaaccaacacctctttacagtga

SEQ ID NO: 3035 - DNA, 47 bp, Homo Sapiens
accttttaagttaaagattaagagaaccaacacctctttacagtgac

SEQ ID NO: 3036 - DNA, 48 bp, Homo Sapiens
accttttaagttaaagattaagagaaccaacacctctttacagtgacc

SEQ ID NO: 3037 - DNA, 16 bp, Homo Sapiens
acctttttccaaggac

SEQ ID NO: 3038 - DNA, 17 bp, Homo Sapiens
acctttttccaaggaca

SEQ ID NO: 3039 - DNA, 18 bp, Homo Sapiens
acctttttccaaggacac

SEQ ID NO: 3040 - DNA, 19 bp, Homo Sapiens
acctttttccaaggacacc

SEQ ID NO: 3041 - DNA, 20 bp, Homo Sapiens
acctttttccaaggacacca

SEQ ID NO: 3042 - DNA, 16 bp, Homo Sapiens
acgaatgatttcgact

SEQ ID NO: 3043 - DNA, 17 bp, Homo Sapiens
acgaatgatttcgactc

SEQ ID NO: 3044 - DNA, 18 bp, Homo Sapiens
acgaatgatttcgactca

SEQ ID NO: 3045 - DNA, 19 bp, Homo Sapiens
acgaatgatttcgactcat

SEQ ID NO: 3046 - DNA, 21 bp, Homo Sapiens
acgaatgatttcgactcatta

SEQ ID NO: 3047 - DNA, 23 bp, Homo Sapiens
acgaatgatttcgactcattaaa

SEQ ID NO: 3048 - DNA, 24 bp, Homo Sapiens
acgaatgatttcgactcattaaat

SEQ ID NO: 3049 - DNA, 28 bp, Homo Sapiens
acgaatgatttcgactcattaaattatg

SEQ ID NO: 3050 - DNA, 30 bp, Homo Sapiens
acgaatgatttcgactcattaaattatgat

SEQ ID NO: 3051 - DNA, 31 bp, Homo Sapiens
acgaatgatttcgactcattaaattatgata

SEQ ID NO: 3052 - DNA, 33 bp, Homo Sapiens
acgaatgatttcgactcattaaattatgataat

SEQ ID NO: 3053 - DNA, 34 bp, Homo Sapiens
acgaatgatttcgactcattaaattatgataatc

SEQ ID NO: 3054 - DNA, 43 bp, Homo Sapiens
acgaatgatttcgactcattaaattatgataatcatatttacc

SEQ ID NO: 3055 - DNA, 46 bp, Homo Sapiens
acgaatgatttcgactcattaaattatgataatcatatttaccaac

SEQ ID NO: 3056 - DNA, 47 bp, Homo Sapiens
acgaatgatttcgactcattaaattatgataatcatatttaccaacc

SEQ ID NO: 3057 - DNA, 48 bp, Homo Sapiens
acgaatgatttcgactcattaaattatgataatcatatttaccaacca

SEQ ID NO: 3058 - DNA, 17 bp, Homo Sapiens
acgaccccttatttacc

SEQ ID NO: 3059 - DNA, 18 bp, Homo Sapiens
acgaccccttatttaccc

SEQ ID NO: 3060 - DNA, 19 bp, Homo Sapiens
acgaccccttatttacccc

SEQ ID NO: 3061 - DNA, 20 bp, Homo Sapiens
acgaccccttatttacccca

SEQ ID NO: 3062 - DNA, 31 bp, Homo Sapiens
acgagcgcgctggacttctaatccagaggtt

SEQ ID NO: 3063 - DNA, 22 bp, Homo Sapiens
acgaggccccgggttcaatccc

SEQ ID NO: 3064 - DNA, 29 bp, Homo Sapiens
acgaggccccgggttcaatccccggcacc

SEQ ID NO: 3065 - DNA, 31 bp, Homo Sapiens
acgaggccccgggttcaatccccggcacctc

SEQ ID NO: 3066 - DNA, 35 bp, Homo Sapiens
acgaggccccgggttcaatccccggcacctccacc

SEQ ID NO: 3067 - DNA, 36 bp, Homo Sapiens
acgaggccccgggttcaatccccggcacctccacca

SEQ ID NO: 3068 - DNA, 16 bp, Homo Sapiens
acgaggtcccgggttc

SEQ ID NO: 3069 - DNA, 18 bp, Homo Sapiens
acgatggtttttcatatc

SEQ ID NO: 3070 - DNA, 25 bp, Homo Sapiens
acgatggtttttcatatcattggtc

SEQ ID NO: 3071 - DNA, 26 bp, Homo Sapiens
acgatggtttttcatatcattggtcg

SEQ ID NO: 3072 - DNA, 27 bp, Homo Sapiens
acgatggtttttcatatcattggtcgt

SEQ ID NO: 3073 - DNA, 28 bp, Homo Sapiens
acgatggtttttcatatcattggtcgtg

SEQ ID NO: 3074 - DNA, 30 bp, Homo Sapiens
acgatggtttttcatatcattggtcgtggt

SEQ ID NO: 3075 - DNA, 31 bp, Homo Sapiens
acgatggtttttcatatcattggtcgtggtt

SEQ ID NO: 3076 - DNA, 32 bp, Homo Sapiens
acgatggtttttcatatcattggtcgtggttg

SEQ ID NO: 3077 - DNA, 33 bp, Homo Sapiens
acgatggtttttcatatcattggtcgtggttgt

SEQ ID NO: 3078 - DNA, 34 bp, Homo Sapiens
acgatggtttttcatatcattggtcgtggttgta

SEQ ID NO: 3079 - DNA, 35 bp, Homo Sapiens
acgatggtttttcatatcattggtcgtggttgtag

SEQ ID NO: 3080 - DNA, 36 bp, Homo Sapiens
acgatggtttttcatatcattggtcgtggttgtagt

SEQ ID NO: 3081 - DNA, 37 bp, Homo Sapiens
acgatggtttttcatatcattggtcgtggttgtagtc

SEQ ID NO: 3082 - DNA, 38 bp, Homo Sapiens
acgatggtttttcatatcattggtcgtggttgtagtcc

SEQ ID NO: 3083 - DNA, 39 bp, Homo Sapiens
acgatggtttttcatatcattggtcgtggttgtagtccg

SEQ ID NO: 3084 - DNA, 40 bp, Homo Sapiens
acgatggtttttcatatcattggtcgtggttgtagtccgt

SEQ ID NO: 3085 - DNA, 41 bp, Homo Sapiens
acgatggtttttcatatcattggtcgtggttgtagtccgtg

SEQ ID NO: 3086 - DNA, 42 bp, Homo Sapiens
acgatggtttttcatatcattggtcgtggttgtagtccgtgc

SEQ ID NO: 3087 - DNA, 43 bp, Homo Sapiens
acgatggtttttcatatcattggtcgtggttgtagtccgtgcg

SEQ ID NO: 3088 - DNA, 45 bp, Homo Sapiens
acgatggtttttcatatcattggtcgtggttgtagtccgtgcgag

SEQ ID NO: 3089 - DNA, 46 bp, Homo Sapiens
acgatggtttttcatatcattggtcgtggttgtagtccgtgcgaga

SEQ ID NO: 3090 - DNA, 47 bp, Homo Sapiens
acgatggtttttcatatcattggtcgtggttgtagtccgtgcgagaa

SEQ ID NO: 3091 - DNA, 48 bp, Homo Sapiens
acgatggtttttcatatcattggtcgtggttgtagtccgtgcgagaat

SEQ ID NO: 3092 - DNA, 39 bp, Homo Sapiens
acgcagaaggtcctgggttcaagccccagtggaaccacc

SEQ ID NO: 3093 - DNA, 25 bp, Homo Sapiens
acgcagaaggtcctgggttcgagcc

SEQ ID NO: 3094 - DNA, 29 bp, Homo Sapiens
acgcagaaggtcctgggttcgagccccag

SEQ ID NO: 3095 - DNA, 31 bp, Homo Sapiens
acgcagaaggtcctgggttcgagccccagtg

SEQ ID NO: 3096 - DNA, 35 bp, Homo Sapiens
acgcagaaggtcctgggttcgagccccagtggaac

SEQ ID NO: 3097 - DNA, 36 bp, Homo Sapiens
acgcagaaggtcctgggttcgagccccagtggaacc

SEQ ID NO: 3098 - DNA, 37 bp, Homo Sapiens
acgcagaaggtcctgggttcgagccccagtggaacca

SEQ ID NO: 3099 - DNA, 38 bp, Homo Sapiens
acgcagaaggtcctgggttcgagccccagtggaaccac

SEQ ID NO: 3100 - DNA, 39 bp, Homo Sapiens
acgcagaaggtcctgggttcgagccccagtggaaccacc

SEQ ID NO: 3101 - DNA, 40 bp, Homo Sapiens
acgcagaaggtcctgggttcgagccccagtggaaccacca

SEQ ID NO: 3102 - DNA, 38 bp, Homo Sapiens
acgcaggagacccaggttcgattcctggccaatgcacc

SEQ ID NO: 3103 - DNA, 16 bp, Homo Sapiens
acgccaaggtcgcggg

SEQ ID NO: 3104 - DNA, 18 bp, Homo Sapiens
acgccaaggtcgcgggtt

SEQ ID NO: 3105 - DNA, 19 bp, Homo Sapiens
acgccaaggtcgcgggttc

SEQ ID NO: 3106 - DNA, 21 bp, Homo Sapiens
acgccaaggtcgcgggttcga

SEQ ID NO: 3107 - DNA, 34 bp, Homo Sapiens
acgccaaggtcgcgggttcgaaccccgtacgggc

SEQ ID NO: 3108 - DNA, 38 bp, Homo Sapiens
acgccaaggtcgcgggttcgaaccccgtacgggccacc

SEQ ID NO: 3109 - DNA, 22 bp, Homo Sapiens
acgccaaggtcgcgggttcgat

SEQ ID NO: 3110 - DNA, 29 bp, Homo Sapiens
acgccaaggtcgcgggttcgatccccgta

SEQ ID NO: 3111 - DNA, 30 bp, Homo Sapiens
acgccaaggtcgcgggttcgatccccgtac

SEQ ID NO: 3112 - DNA, 33 bp, Homo Sapiens
acgccaaggtcgcgggttcgatccccgtacggg

SEQ ID NO: 3113 - DNA, 34 bp, Homo Sapiens
acgccaaggtcgcgggttcgatccccgtacgggc

SEQ ID NO: 3114 - DNA, 37 bp, Homo Sapiens
acgccaaggtcgcgggttcgatccccgtacgggccac

SEQ ID NO: 3115 - DNA, 38 bp, Homo Sapiens
acgccaaggtcgcgggttcgatccccgtacgggccacc

SEQ ID NO: 3116 - DNA, 39 bp, Homo Sapiens
acgccaaggtcgcgggttcgatccccgtacgggccacca

SEQ ID NO: 3117 - DNA, 38 bp, Homo Sapiens
acgccaaggtcgcgggttcgatccccgtactggccacc

SEQ ID NO: 3118 - DNA, 16 bp, Homo Sapiens
acgcgaaaggtccccg

SEQ ID NO: 3119 - DNA, 17 bp, Homo Sapiens
acgcgaaaggtccccgg

SEQ ID NO: 3120 - DNA, 18 bp, Homo Sapiens
acgcgaaaggtccccggt

SEQ ID NO: 3121 - DNA, 22 bp, Homo Sapiens
acgcgaaaggtccccggttcga

SEQ ID NO: 3122 - DNA, 35 bp, Homo Sapiens
acgcgaaaggtccccggttcgaaaccgggcagaag

SEQ ID NO: 3123 - DNA, 39 bp, Homo Sapiens
acgcgaaaggtccccggttcgaaaccgggcagaagcacc

SEQ ID NO: 3124 - DNA, 31 bp, Homo Sapiens
acgcgaaaggtccccggttcgaaaccgggcg

SEQ ID NO: 3125 - DNA, 34 bp, Homo Sapiens
acgcgaaaggtccccggttcgaaaccgggcggaa

SEQ ID NO: 3126 - DNA, 35 bp, Homo Sapiens
acgcgaaaggtccccggttcgaaaccgggcggaaa

SEQ ID NO: 3127 - DNA, 36 bp, Homo Sapiens
acgcgaaaggtccccggttcgaaaccgggcggaaac

SEQ ID NO: 3128 - DNA, 37 bp, Homo Sapiens
acgcgaaaggtccccggttcgaaaccgggcggaaaca

SEQ ID NO: 3129 - DNA, 38 bp, Homo Sapiens
acgcgaaaggtccccggttcgaaaccgggcggaaacac

SEQ ID NO: 3130 - DNA, 39 bp, Homo Sapiens
acgcgaaaggtccccggttcgaaaccgggcggaaacacc

SEQ ID NO: 3131 - DNA, 40 bp, Homo Sapiens
acgcgaaaggtccccggttcgaaaccgggcggaaacacca

SEQ ID NO: 3132 - DNA, 36 bp, Homo Sapiens
acgcgaaaggtccccggttcgatcccgggcggaaac

SEQ ID NO: 3133 - DNA, 38 bp, Homo Sapiens
acgcgaaaggtccccggttcgatcccgggcggaaacac

SEQ ID NO: 3134 - DNA, 39 bp, Homo Sapiens
acgcgaaaggtccccggttcgatcccgggcggaaacacc

SEQ ID NO: 3135 - DNA, 39 bp, Homo Sapiens
acgcgaaaggtccctggatcaaaaccaggcggaaacacc

SEQ ID NO: 3136 - DNA, 34 bp, Homo Sapiens
acgcgggagacccgggttcaattcccggccaatg

SEQ ID NO: 3137 - DNA, 38 bp, Homo Sapiens
acgcgggagacccgggttcaattcccggccaatgcacc

SEQ ID NO: 3138 - DNA, 39 bp, Homo Sapiens
acgcgggagacccgggttcaattcccggccaatgcacca

SEQ ID NO: 3139 - DNA, 16 bp, Homo Sapiens
acgcgggagaccgggg

SEQ ID NO: 3140 - DNA, 29 bp, Homo Sapiens
acgcgggagaccggggttcaattccccga

SEQ ID NO: 3141 - DNA, 30 bp, Homo Sapiens
acgcgggagaccggggttcaattccccgac

SEQ ID NO: 3142 - DNA, 33 bp, Homo Sapiens
acgcgggagaccggggttcaattccccgacggg

SEQ ID NO: 3143 - DNA, 34 bp, Homo Sapiens
acgcgggagaccggggttcaattccccgacgggg

SEQ ID NO: 3144 - DNA, 35 bp, Homo Sapiens
acgcgggagaccggggttcaattccccgacgggga

SEQ ID NO: 3145 - DNA, 36 bp, Homo Sapiens
acgcgggagaccggggttcaattccccgacggggag

SEQ ID NO: 3146 - DNA, 37 bp, Homo Sapiens
acgcgggagaccggggttcaattccccgacggggagc

SEQ ID NO: 3147 - DNA, 38 bp, Homo Sapiens
acgcgggagaccggggttcaattccccgacggggagcc

SEQ ID NO: 3148 - DNA, 39 bp, Homo Sapiens
acgcgggagaccggggttcaattccccgacggggagcca

SEQ ID NO: 3149 - DNA, 22 bp, Homo Sapiens
acgcgggagaccggggttcgat

SEQ ID NO: 3150 - DNA, 37 bp, Homo Sapiens
acgcgggagaccggggttcgattccccaacggggagc

SEQ ID NO: 3151 - DNA, 38 bp, Homo Sapiens
acgcgggagaccggggttcgattccccaacggggagcc

SEQ ID NO: 3152 - DNA, 39 bp, Homo Sapiens
acgcgggagaccggggttcgattccccaacggggagcca

SEQ ID NO: 3153 - DNA, 28 bp, Homo Sapiens
acgcgggagaccggggttcgattccccg

SEQ ID NO: 3154 - DNA, 29 bp, Homo Sapiens
acgcgggagaccggggttcgattccccga

SEQ ID NO: 3155 - DNA, 30 bp, Homo Sapiens
acgcgggagaccggggttcgattccccgac

SEQ ID NO: 3156 - DNA, 31 bp, Homo Sapiens
acgcgggagaccggggttcgattccccgacg

SEQ ID NO: 3157 - DNA, 32 bp, Homo Sapiens
acgcgggagaccggggttcgattccccgacgg

SEQ ID NO: 3158 - DNA, 33 bp, Homo Sapiens
acgcgggagaccggggttcgattccccgacggg

SEQ ID NO: 3159 - DNA, 34 bp, Homo Sapiens
acgcgggagaccggggttcgattccccgacgggg

SEQ ID NO: 3160 - DNA, 35 bp, Homo Sapiens
acgcgggagaccggggttcgattccccgacgggga

SEQ ID NO: 3161 - DNA, 36 bp, Homo Sapiens
acgcgggagaccggggttcgattccccgacggggag

SEQ ID NO: 3162 - DNA, 37 bp, Homo Sapiens
acgcgggagaccggggttcgattccccgacggggagc

SEQ ID NO: 3163 - DNA, 38 bp, Homo Sapiens
acgcgggagaccggggttcgattccccgacggggagcc

SEQ ID NO: 3164 - DNA, 39 bp, Homo Sapiens
acgcgggagaccggggttcgattccccgacggggagcca

SEQ ID NO: 3165 - DNA, 16 bp, Homo Sapiens
acgcgggaggcccggg

SEQ ID NO: 3166 - DNA, 17 bp, Homo Sapiens
acgcgggaggcccgggt

SEQ ID NO: 3167 - DNA, 18 bp, Homo Sapiens
acgcgggaggcccgggtt

SEQ ID NO: 3168 - DNA, 29 bp, Homo Sapiens
acgcgggaggcccgggttcgattcccggc

SEQ ID NO: 3169 - DNA, 30 bp, Homo Sapiens
acgcgggaggcccgggttcgattcccggcc

SEQ ID NO: 3170 - DNA, 32 bp, Homo Sapiens
acgcgggaggcccgggttcgattcccggccaa

SEQ ID NO: 3171 - DNA, 33 bp, Homo Sapiens
acgcgggaggcccgggttcgattcccggccaat

SEQ ID NO: 3172 - DNA, 34 bp, Homo Sapiens
acgcgggaggcccgggttcgattcccggccaatg

SEQ ID NO: 3173 - DNA, 35 bp, Homo Sapiens
acgcgggaggcccgggttcgattcccggccaatgc

SEQ ID NO: 3174 - DNA, 36 bp, Homo Sapiens
acgcgggaggcccgggttcgattcccggccaatgca

SEQ ID NO: 3175 - DNA, 37 bp, Homo Sapiens
acgcgggaggcccgggttcgattcccggccaatgcac

SEQ ID NO: 3176 - DNA, 38 bp, Homo Sapiens
acgcgggaggcccgggttcgattcccggccaatgcacc

SEQ ID NO: 3177 - DNA, 39 bp, Homo Sapiens
acgcgggaggcccgggttcgattcccggccaatgcacca

SEQ ID NO: 3178 - DNA, 33 bp, Homo Sapiens
acgcgggaggcccgggttcgattcccggcccat

SEQ ID NO: 3179 - DNA, 34 bp, Homo Sapiens
acgcgggaggcccgggttcgattcccggcccatg

SEQ ID NO: 3180 - DNA, 37 bp, Homo Sapiens
acgcgggaggcccgggttcgattcccggcccatgcac

SEQ ID NO: 3181 - DNA, 38 bp, Homo Sapiens
acgcgggaggcccgggttcgattcccggcccatgcacc

SEQ ID NO: 3182 - DNA, 39 bp, Homo Sapiens
acgcgggaggcccgggttcgattcccggcccatgcacca

SEQ ID NO: 3183 - DNA, 30 bp, Homo Sapiens
acgcgggaggcccgggtttgattcccggcc

SEQ ID NO: 3184 - DNA, 27 bp, Homo Sapiens
acgcgtctgactacggatcagaagatt

SEQ ID NO: 3185 - DNA, 30 bp, Homo Sapiens
acgcgtgggttcgaatcccatcctcgtcgc

SEQ ID NO: 3186 - DNA, 31 bp, Homo Sapiens
acgcgtgggttcgaatcccatcctcgtcgcc

SEQ ID NO: 3187 - DNA, 32 bp, Homo Sapiens
acgcgtgggttcgaatcccatcctcgtcgcca

SEQ ID NO: 3188 - DNA, 26 bp, Homo Sapiens
acggagaattttggattctcagggat

SEQ ID NO: 3189 - DNA, 35 bp, Homo Sapiens
acggagaattttggattctcagggatgggttcgat

SEQ ID NO: 3190 - DNA, 34 bp, Homo Sapiens
acggatcagaagattccaggttcgactcctggct

SEQ ID NO: 3191 - DNA, 16 bp, Homo Sapiens
acgggctcacatcacc

SEQ ID NO: 3192 - DNA, 17 bp, Homo Sapiens
acgggctcacatcaccc

SEQ ID NO: 3193 - DNA, 18 bp, Homo Sapiens
acgggctcacatcacccc

SEQ ID NO: 3194 - DNA, 19 bp, Homo Sapiens
acgggctcacatcacccca

SEQ ID NO: 3195 - DNA, 20 bp, Homo Sapiens
acgggctcacatcaccccat

SEQ ID NO: 3196 - DNA, 21 bp, Homo Sapiens
acgggctcacatcaccccata

SEQ ID NO: 3197 - DNA, 22 bp, Homo Sapiens
acgggctcacatcaccccataa

SEQ ID NO: 3198 - DNA, 23 bp, Homo Sapiens
acgggctcacatcaccccataaa

SEQ ID NO: 3199 - DNA, 24 bp, Homo Sapiens
acgggctcacatcaccccataaac

SEQ ID NO: 3200 - DNA, 25 bp, Homo Sapiens
acgggctcacatcaccccataaaca

SEQ ID NO: 3201 - DNA, 26 bp, Homo Sapiens
acgggctcacatcaccccataaacac

SEQ ID NO: 3202 - DNA, 27 bp, Homo Sapiens
acgggctcacatcaccccataaacacc

SEQ ID NO: 3203 - DNA, 28 bp, Homo Sapiens
acgggctcacatcaccccataaacacca

SEQ ID NO: 3204 - DNA, 20 bp, Homo Sapiens
acggtggccgagtggttaag

SEQ ID NO: 3205 - DNA, 35 bp, Homo Sapiens
acgtatgaggccccgggttcaatccccggcatctc

SEQ ID NO: 3206 - DNA, 39 bp, Homo Sapiens
acgtatgaggccccgggttcaatccccggcatctccacc

SEQ ID NO: 3207 - DNA, 17 bp, Homo Sapiens
acgtctgctttacacgc

SEQ ID NO: 3208 - DNA, 29 bp, Homo Sapiens
acgtgggttcgaatcccatcctcgtcgcc

SEQ ID NO: 3209 - DNA, 16 bp, Homo Sapiens
actaagtgtttgtggg

SEQ ID NO: 3210 - DNA, 17 bp, Homo Sapiens
actaagtgtttgtgggt

SEQ ID NO: 3211 - DNA, 18 bp, Homo Sapiens
actaagtgtttgtgggtt

SEQ ID NO: 3212 - DNA, 19 bp, Homo Sapiens
actaagtgtttgtgggttt

SEQ ID NO: 3213 - DNA, 20 bp, Homo Sapiens
actaagtgtttgtgggttta

SEQ ID NO: 3214 - DNA, 23 bp, Homo Sapiens
actaagtgtttgtgggtttaagt

SEQ ID NO: 3215 - DNA, 24 bp, Homo Sapiens
actaagtgtttgtgggtttaagtc

SEQ ID NO: 3216 - DNA, 27 bp, Homo Sapiens
actaagtgtttgtgggtttaagtccca

SEQ ID NO: 3217 - DNA, 28 bp, Homo Sapiens
actaagtgtttgtgggtttaagtcccat

SEQ ID NO: 3218 - DNA, 29 bp, Homo Sapiens
actaagtgtttgtgggtttaagtcccatt

SEQ ID NO: 3219 - DNA, 31 bp, Homo Sapiens
actaagtgtttgtgggtttaagtcccattgg

SEQ ID NO: 3220 - DNA, 32 bp, Homo Sapiens
actaagtgtttgtgggtttaagtcccattggt

SEQ ID NO: 3221 - DNA, 33 bp, Homo Sapiens
actaagtgtttgtgggtttaagtcccattggtc

SEQ ID NO: 3222 - DNA, 34 bp, Homo Sapiens
actaagtgtttgtgggtttaagtcccattggtct

SEQ ID NO: 3223 - DNA, 35 bp, Homo Sapiens
actaagtgtttgtgggtttaagtcccattggtcta

SEQ ID NO: 3224 - DNA, 36 bp, Homo Sapiens
actaagtgtttgtgggtttaagtcccattggtctag

SEQ ID NO: 3225 - DNA, 37 bp, Homo Sapiens
actaagtgtttgtgggtttaagtcccattggtctagc

SEQ ID NO: 3226 - DNA, 38 bp, Homo Sapiens
actaagtgtttgtgggtttaagtcccattggtctagcc

SEQ ID NO: 3227 - DNA, 39 bp, Homo Sapiens
actaagtgtttgtgggtttaagtcccattggtctagcca

SEQ ID NO: 3228 - DNA, 16 bp, Homo Sapiens
actagttttgacaaca

SEQ ID NO: 3229 - DNA, 18 bp, Homo Sapiens
actagttttgacaacatt

SEQ ID NO: 3230 - DNA, 19 bp, Homo Sapiens
actagttttgacaacattc

SEQ ID NO: 3231 - DNA, 20 bp, Homo Sapiens
actagttttgacaacattca

SEQ ID NO: 3232 - DNA, 26 bp, Homo Sapiens
actagttttgacaacattcaaaaaag

SEQ ID NO: 3233 - DNA, 28 bp, Homo Sapiens
actagttttgacaacattcaaaaaagag

SEQ ID NO: 3234 - DNA, 29 bp, Homo Sapiens
actagttttgacaacattcaaaaaagagt

SEQ ID NO: 3235 - DNA, 30 bp, Homo Sapiens
actagttttgacaacattcaaaaaagagta

SEQ ID NO: 3236 - DNA, 31 bp, Homo Sapiens
actagttttgacaacattcaaaaaagagtac

SEQ ID NO: 3237 - DNA, 32 bp, Homo Sapiens
actagttttgacaacattcaaaaaagagtacc

SEQ ID NO: 3238 - DNA, 33 bp, Homo Sapiens
actagttttgacaacattcaaaaaagagtacca

SEQ ID NO: 3239 - DNA, 16 bp, Homo Sapiens
actcaagttctggtct

SEQ ID NO: 3240 - DNA, 17 bp, Homo Sapiens
actcaagttctggtctc

SEQ ID NO: 3241 - DNA, 18 bp, Homo Sapiens
actcaagttctggtctcc

SEQ ID NO: 3242 - DNA, 19 bp, Homo Sapiens
actcaagttctggtctcca

SEQ ID NO: 3243 - DNA, 21 bp, Homo Sapiens
actcaagttctggtctccaat

SEQ ID NO: 3244 - DNA, 19 bp, Homo Sapiens
actcaagttctggtctccg

SEQ ID NO: 3245 - DNA, 21 bp, Homo Sapiens
actcaagttctggtctccgga

SEQ ID NO: 3246 - DNA, 22 bp, Homo Sapiens
actcaagttctggtctccggat

SEQ ID NO: 3247 - DNA, 34 bp, Homo Sapiens
actcaagttctggtctccggatggaggcgtgggt

SEQ ID NO: 3248 - DNA, 17 bp, Homo Sapiens
actcatgcccccatgtc

SEQ ID NO: 3249 - DNA, 18 bp, Homo Sapiens
actcatgcccccatgtct

SEQ ID NO: 3250 - DNA, 20 bp, Homo Sapiens
actcatgcccccatgtctaa

SEQ ID NO: 3251 - DNA, 21 bp, Homo Sapiens
actcatgcccccatgtctaac

SEQ ID NO: 3252 - DNA, 22 bp, Homo Sapiens
actcatgcccccatgtctaaca

SEQ ID NO: 3253 - DNA, 24 bp, Homo Sapiens
actcatgcccccatgtctaacaac

SEQ ID NO: 3254 - DNA, 25 bp, Homo Sapiens
actcatgcccccatgtctaacaaca

SEQ ID NO: 3255 - DNA, 27 bp, Homo Sapiens
actcatgcccccatgtctaacaacatg

SEQ ID NO: 3256 - DNA, 28 bp, Homo Sapiens
actcatgcccccatgtctaacaacatgg

SEQ ID NO: 3257 - DNA, 29 bp, Homo Sapiens
actcatgcccccatgtctaacaacatggc

SEQ ID NO: 3258 - DNA, 30 bp, Homo Sapiens
actcatgcccccatgtctaacaacatggct

SEQ ID NO: 3259 - DNA, 31 bp, Homo Sapiens
actcatgcccccatgtctaacaacatggctt

SEQ ID NO: 3260 - DNA, 32 bp, Homo Sapiens
actcatgcccccatgtctaacaacatggcttt

SEQ ID NO: 3261 - DNA, 33 bp, Homo Sapiens
actcatgcccccatgtctaacaacatggctttc

SEQ ID NO: 3262 - DNA, 34 bp, Homo Sapiens
actcatgcccccatgtctaacaacatggctttct

SEQ ID NO: 3263 - DNA, 35 bp, Homo Sapiens
actcatgcccccatgtctaacaacatggctttctc

SEQ ID NO: 3264 - DNA, 36 bp, Homo Sapiens
actcatgcccccatgtctaacaacatggctttctca

SEQ ID NO: 3265 - DNA, 37 bp, Homo Sapiens
actcatgcccccatgtctaacaacatggctttctcac

SEQ ID NO: 3266 - DNA, 38 bp, Homo Sapiens
actcatgcccccatgtctaacaacatggctttctcacc

SEQ ID NO: 3267 - DNA, 39 bp, Homo Sapiens
actcatgcccccatgtctaacaacatggctttctcacca

SEQ ID NO: 3268 - DNA, 29 bp, Homo Sapiens
actcattaaattatgataatcatatttac

SEQ ID NO: 3269 - DNA, 30 bp, Homo Sapiens
actcattaaattatgataatcatatttacc

SEQ ID NO: 3270 - DNA, 32 bp, Homo Sapiens
actcattaaattatgataatcatatttaccaa

SEQ ID NO: 3271 - DNA, 33 bp, Homo Sapiens
actcattaaattatgataatcatatttaccaac

SEQ ID NO: 3272 - DNA, 34 bp, Homo Sapiens
actcattaaattatgataatcatatttaccaacc

SEQ ID NO: 3273 - DNA, 35 bp, Homo Sapiens
actcattaaattatgataatcatatttaccaacca

SEQ ID NO: 3274 - DNA, 18 bp, Homo Sapiens
actccaaataaaagtacc

SEQ ID NO: 3275 - DNA, 19 bp, Homo Sapiens
actccaaataaaagtacca

SEQ ID NO: 3276 - DNA, 18 bp, Homo Sapiens
actccagatcagaaggct

SEQ ID NO: 3277 - DNA, 23 bp, Homo Sapiens
actccagatcagaaggctgcgtg

SEQ ID NO: 3278 - DNA, 26 bp, Homo Sapiens
actccagatcagaaggctgcgtgttc

SEQ ID NO: 3279 - DNA, 20 bp, Homo Sapiens
actccagatcagaaggttgc

SEQ ID NO: 3280 - DNA, 17 bp, Homo Sapiens
actcccggtatgggaac

SEQ ID NO: 3281 - DNA, 18 bp, Homo Sapiens
actcccggtatgggaacc

SEQ ID NO: 3282 - DNA, 17 bp, Homo Sapiens
actcccggtgtgggaac

SEQ ID NO: 3283 - DNA, 18 bp, Homo Sapiens
actcccggtgtgggaacc

SEQ ID NO: 3284 - DNA, 19 bp, Homo Sapiens
actcccggtgtgggaacca

SEQ ID NO: 3285 - DNA, 16 bp, Homo Sapiens
actcctggctggctcg

SEQ ID NO: 3286 - DNA, 17 bp, Homo Sapiens
actcctggctggctcgc

SEQ ID NO: 3287 - DNA, 18 bp, Homo Sapiens
actcctggctggctcgcc

SEQ ID NO: 3288 - DNA, 19 bp, Homo Sapiens
actcctggctggctcgcca

SEQ ID NO: 3289 - DNA, 19 bp, Homo Sapiens
actctgaatccagcgatcc

SEQ ID NO: 3290 - DNA, 20 bp, Homo Sapiens
actctgaatccagcgatccg

SEQ ID NO: 3291 - DNA, 21 bp, Homo Sapiens
actctgaatccagcgatccga

SEQ ID NO: 3292 - DNA, 22 bp, Homo Sapiens
actctgaatccagcgatccgag

SEQ ID NO: 3293 - DNA, 23 bp, Homo Sapiens
actctgaatccagcgatccgagt

SEQ ID NO: 3294 - DNA, 25 bp, Homo Sapiens
actctgaatccagcgatccgagttc

SEQ ID NO: 3295 - DNA, 37 bp, Homo Sapiens
actctgaatccagcgatccgagttcaaatctcggtgg

SEQ ID NO: 3296 - DNA, 39 bp, Homo Sapiens
actctgaatccagcgatccgagttcaaatctcggtggaa

SEQ ID NO: 3297 - DNA, 43 bp, Homo Sapiens
actctgaatccagcgatccgagttcaaatctcggtggaacctc

SEQ ID NO: 3298 - DNA, 44 bp, Homo Sapiens
actctgaatccagcgatccgagttcaaatctcggtggaacctcc

SEQ ID NO: 3299 - DNA, 45 bp, Homo Sapiens
actctgaatccagcgatccgagttcaaatctcggtggaacctcca

SEQ ID NO: 3300 - DNA, 36 bp, Homo Sapiens
actctgaatccagcgatccgagttcgagtctcggtg

SEQ ID NO: 3301 - DNA, 16 bp, Homo Sapiens
actctgcgttgtggcc

SEQ ID NO: 3302 - DNA, 17 bp, Homo Sapiens
actctgcgttgtggccg

SEQ ID NO: 3303 - DNA, 29 bp, Homo Sapiens
actctgcgttgtggccgcagcaacctcgg

SEQ ID NO: 3304 - DNA, 30 bp, Homo Sapiens
actctgcgttgtggccgcagcaacctcggt

SEQ ID NO: 3305 - DNA, 33 bp, Homo Sapiens
actctgcgttgtggccgcagcaacctcggttcg

SEQ ID NO: 3306 - DNA, 16 bp, Homo Sapiens
actctggactctgaat

SEQ ID NO: 3307 - DNA, 17 bp, Homo Sapiens
actctggactctgaatc

SEQ ID NO: 3308 - DNA, 18 bp, Homo Sapiens
actctggactctgaatcc

SEQ ID NO: 3309 - DNA, 19 bp, Homo Sapiens
actctggactctgaatcca

SEQ ID NO: 3310 - DNA, 20 bp, Homo Sapiens
actctggactctgaatccag

SEQ ID NO: 3311 - DNA, 21 bp, Homo Sapiens
actctggactctgaatccagc

SEQ ID NO: 3312 - DNA, 22 bp, Homo Sapiens
actctggactctgaatccagcg

SEQ ID NO: 3313 - DNA, 23 bp, Homo Sapiens
actctggactctgaatccagcga

SEQ ID NO: 3314 - DNA, 24 bp, Homo Sapiens
actctggactctgaatccagcgat

SEQ ID NO: 3315 - DNA, 26 bp, Homo Sapiens
actctggactctgaatccagcgatcc

SEQ ID NO: 3316 - DNA, 27 bp, Homo Sapiens
actctggactctgaatccagcgatccg

SEQ ID NO: 3317 - DNA, 28 bp, Homo Sapiens
actctggactctgaatccagcgatccga

SEQ ID NO: 3318 - DNA, 29 bp, Homo Sapiens
actctggactctgaatccagcgatccgag

SEQ ID NO: 3319 - DNA, 30 bp, Homo Sapiens
actctggactctgaatccagcgatccgagt

SEQ ID NO: 3320 - DNA, 31 bp, Homo Sapiens
actctggactctgaatccagcgatccgagtt

SEQ ID NO: 3321 - DNA, 32 bp, Homo Sapiens
actctggactctgaatccagcgatccgagttc

SEQ ID NO: 3322 - DNA, 33 bp, Homo Sapiens
actctggactctgaatccagcgatccgagttca

SEQ ID NO: 3323 - DNA, 36 bp, Homo Sapiens
actctggactctgaatccagcgatccgagttcaaat

SEQ ID NO: 3324 - DNA, 46 bp, Homo Sapiens
actctggactctgaatccagcgatccgagttcaaatctcggtggaa

SEQ ID NO: 3325 - DNA, 48 bp, Homo Sapiens
actctggactctgaatccagcgatccgagttcaaatctcggtggaacc

SEQ ID NO: 3326 - DNA, 33 bp, Homo Sapiens
actctggactctgaatccagcgatccgagttcg

SEQ ID NO: 3327 - DNA, 16 bp, Homo Sapiens
actctggactttgaat

SEQ ID NO: 3328 - DNA, 17 bp, Homo Sapiens
actctggactttgaatc

SEQ ID NO: 3329 - DNA, 18 bp, Homo Sapiens
actctggactttgaatcc

SEQ ID NO: 3330 - DNA, 19 bp, Homo Sapiens
actctggactttgaatcca

SEQ ID NO: 3331 - DNA, 21 bp, Homo Sapiens
actctggactttgaatccagc

SEQ ID NO: 3332 - DNA, 29 bp, Homo Sapiens
actctggactttgaatccagcgatccgag

SEQ ID NO: 3333 - DNA, 30 bp, Homo Sapiens
actctggactttgaatccagcgatccgagt

SEQ ID NO: 3334 - DNA, 32 bp, Homo Sapiens
actctggactttgaatccagcgatccgagttc

SEQ ID NO: 3335 - DNA, 33 bp, Homo Sapiens
actctggactttgaatccagcgatccgagttca

SEQ ID NO: 3336 - DNA, 19 bp, Homo Sapiens
actcttaatcccagggtcg

SEQ ID NO: 3337 - DNA, 21 bp, Homo Sapiens
actcttaatcccagggtcgtg

SEQ ID NO: 3338 - DNA, 20 bp, Homo Sapiens
actcttaatctcagggtcgt

SEQ ID NO: 3339 - DNA, 22 bp, Homo Sapiens
actcttaatctcagggtcgtgg

SEQ ID NO: 3340 - DNA, 29 bp, Homo Sapiens
actcttttagtataaatagtaccgttaac

SEQ ID NO: 3341 - DNA, 30 bp, Homo Sapiens
actcttttagtataaatagtaccgttaact

SEQ ID NO: 3342 - DNA, 31 bp, Homo Sapiens
actcttttagtataaatagtaccgttaactt

SEQ ID NO: 3343 - DNA, 32 bp, Homo Sapiens
actcttttagtataaatagtaccgttaacttc

SEQ ID NO: 3344 - DNA, 33 bp, Homo Sapiens
actcttttagtataaatagtaccgttaacttcc

SEQ ID NO: 3345 - DNA, 34 bp, Homo Sapiens
actcttttagtataaatagtaccgttaacttcca

SEQ ID NO: 3346 - DNA, 37 bp, Homo Sapiens
actcttttagtataaatagtaccgttaacttccaatt

SEQ ID NO: 3347 - DNA, 38 bp, Homo Sapiens
actcttttagtataaatagtaccgttaacttccaatta

SEQ ID NO: 3348 - DNA, 39 bp, Homo Sapiens
actcttttagtataaatagtaccgttaacttccaattaa

SEQ ID NO: 3349 - DNA, 17 bp, Homo Sapiens
actgaaaatgtttagac

SEQ ID NO: 3350 - DNA, 18 bp, Homo Sapiens
actgaaaatgtttagacg

SEQ ID NO: 3351 - DNA, 21 bp, Homo Sapiens
actgaaaatgtttagacgggc

SEQ ID NO: 3352 - DNA, 22 bp, Homo Sapiens
actgaaaatgtttagacgggct

SEQ ID NO: 3353 - DNA, 23 bp, Homo Sapiens
actgaaaatgtttagacgggctc

SEQ ID NO: 3354 - DNA, 24 bp, Homo Sapiens
actgaaaatgtttagacgggctca

SEQ ID NO: 3355 - DNA, 25 bp, Homo Sapiens
actgaaaatgtttagacgggctcac

SEQ ID NO: 3356 - DNA, 26 bp, Homo Sapiens
actgaaaatgtttagacgggctcaca

SEQ ID NO: 3357 - DNA, 27 bp, Homo Sapiens
actgaaaatgtttagacgggctcacat

SEQ ID NO: 3358 - DNA, 28 bp, Homo Sapiens
actgaaaatgtttagacgggctcacatc

SEQ ID NO: 3359 - DNA, 30 bp, Homo Sapiens
actgaaaatgtttagacgggctcacatcac

SEQ ID NO: 3360 - DNA, 31 bp, Homo Sapiens
actgaaaatgtttagacgggctcacatcacc

SEQ ID NO: 3361 - DNA, 32 bp, Homo Sapiens
actgaaaatgtttagacgggctcacatcaccc

SEQ ID NO: 3362 - DNA, 33 bp, Homo Sapiens
actgaaaatgtttagacgggctcacatcacccc

SEQ ID NO: 3363 - DNA, 34 bp, Homo Sapiens
actgaaaatgtttagacgggctcacatcacccca

SEQ ID NO: 3364 - DNA, 38 bp, Homo Sapiens
actgaaaatgtttagacgggctcacatcaccccataaa

SEQ ID NO: 3365 - DNA, 40 bp, Homo Sapiens
actgaaaatgtttagacgggctcacatcaccccataaaca

SEQ ID NO: 3366 - DNA, 42 bp, Homo Sapiens
actgaaaatgtttagacgggctcacatcaccccataaacacc

SEQ ID NO: 3367 - DNA, 43 bp, Homo Sapiens
actgaaaatgtttagacgggctcacatcaccccataaacacca

SEQ ID NO: 3368 - DNA, 42 bp, Homo Sapiens
actgcagatcaagaggtccccggttcaaatccgggtgccccc

SEQ ID NO: 3369 - DNA, 16 bp, Homo Sapiens
actgctaactcatgcc

SEQ ID NO: 3370 - DNA, 17 bp, Homo Sapiens
actgctaactcatgccc

SEQ ID NO: 3371 - DNA, 18 bp, Homo Sapiens
actgctaactcatgcccc

SEQ ID NO: 3372 - DNA, 19 bp, Homo Sapiens
actgctaactcatgccccc

SEQ ID NO: 3373 - DNA, 20 bp, Homo Sapiens
actgctaactcatgccccca

SEQ ID NO: 3374 - DNA, 21 bp, Homo Sapiens
actgctaactcatgcccccat

SEQ ID NO: 3375 - DNA, 22 bp, Homo Sapiens
actgctaactcatgcccccatg

SEQ ID NO: 3376 - DNA, 23 bp, Homo Sapiens
actgctaactcatgcccccatgt

SEQ ID NO: 3377 - DNA, 24 bp, Homo Sapiens
actgctaactcatgcccccatgtc

SEQ ID NO: 3378 - DNA, 25 bp, Homo Sapiens
actgctaactcatgcccccatgtct

SEQ ID NO: 3379 - DNA, 26 bp, Homo Sapiens
actgctaactcatgcccccatgtcta

SEQ ID NO: 3380 - DNA, 27 bp, Homo Sapiens
actgctaactcatgcccccatgtctaa

SEQ ID NO: 3381 - DNA, 28 bp, Homo Sapiens
actgctaactcatgcccccatgtctaac

SEQ ID NO: 3382 - DNA, 29 bp, Homo Sapiens
actgctaactcatgcccccatgtctaaca

SEQ ID NO: 3383 - DNA, 31 bp, Homo Sapiens
actgctaactcatgcccccatgtctaacaac

SEQ ID NO: 3384 - DNA, 32 bp, Homo Sapiens
actgctaactcatgcccccatgtctaacaaca

SEQ ID NO: 3385 - DNA, 33 bp, Homo Sapiens
actgctaactcatgcccccatgtctaacaacat

SEQ ID NO: 3386 - DNA, 34 bp, Homo Sapiens
actgctaactcatgcccccatgtctaacaacatg

SEQ ID NO: 3387 - DNA, 35 bp, Homo Sapiens
actgctaactcatgcccccatgtctaacaacatgg

SEQ ID NO: 3388 - DNA, 36 bp, Homo Sapiens
actgctaactcatgcccccatgtctaacaacatggc

SEQ ID NO: 3389 - DNA, 37 bp, Homo Sapiens
actgctaactcatgcccccatgtctaacaacatggct

SEQ ID NO: 3390 - DNA, 38 bp, Homo Sapiens
actgctaactcatgcccccatgtctaacaacatggctt

SEQ ID NO: 3391 - DNA, 39 bp, Homo Sapiens
actgctaactcatgcccccatgtctaacaacatggcttt

SEQ ID NO: 3392 - DNA, 40 bp, Homo Sapiens
actgctaactcatgcccccatgtctaacaacatggctttc

SEQ ID NO: 3393 - DNA, 41 bp, Homo Sapiens
actgctaactcatgcccccatgtctaacaacatggctttct

SEQ ID NO: 3394 - DNA, 42 bp, Homo Sapiens
actgctaactcatgcccccatgtctaacaacatggctttctc

SEQ ID NO: 3395 - DNA, 43 bp, Homo Sapiens
actgctaactcatgcccccatgtctaacaacatggctttctca

SEQ ID NO: 3396 - DNA, 44 bp, Homo Sapiens
actgctaactcatgcccccatgtctaacaacatggctttctcac

SEQ ID NO: 3397 - DNA, 45 bp, Homo Sapiens
actgctaactcatgcccccatgtctaacaacatggctttctcacc

SEQ ID NO: 3398 - DNA, 46 bp, Homo Sapiens
actgctaactcatgcccccatgtctaacaacatggctttctcacca

SEQ ID NO: 3399 - DNA, 18 bp, Homo Sapiens
actgctaatccattgtgc

SEQ ID NO: 3400 - DNA, 16 bp, Homo Sapiens
actgggcggaaacacc

SEQ ID NO: 3401 - DNA, 17 bp, Homo Sapiens
actgggcggaaacacca

SEQ ID NO: 3402 - DNA, 16 bp, Homo Sapiens
actggtcttgtaaacc

SEQ ID NO: 3403 - DNA, 30 bp, Homo Sapiens
actggtggttcagtggtagaattctcgcct

SEQ ID NO: 3404 - DNA, 22 bp, Homo Sapiens
actgtaaagctaacttagcatt

SEQ ID NO: 3405 - DNA, 26 bp, Homo Sapiens
actgtaaagctaacttagcattaacc

SEQ ID NO: 3406 - DNA, 27 bp, Homo Sapiens
actgtaaagctaacttagcattaacct

SEQ ID NO: 3407 - DNA, 33 bp, Homo Sapiens
actgtaaagctaacttagcattaaccttttaag

SEQ ID NO: 3408 - DNA, 34 bp, Homo Sapiens
actgtaaatctaaagacaggggttaggcctcttt

SEQ ID NO: 3409 - DNA, 42 bp, Homo Sapiens
actgtaaatctaaagacaggggttaggcctctttttaccacc

SEQ ID NO: 3410 - DNA, 43 bp, Homo Sapiens
actgtaaatctaaagacaggggttaggcctctttttaccacca

SEQ ID NO: 3411 - DNA, 20 bp, Homo Sapiens
acttaaaactttacagtcag

SEQ ID NO: 3412 - DNA, 22 bp, Homo Sapiens
acttaaaactttacagtcagag

SEQ ID NO: 3413 - DNA, 23 bp, Homo Sapiens
acttaaaactttacagtcagagg

SEQ ID NO: 3414 - DNA, 24 bp, Homo Sapiens
acttaaaactttacagtcagaggt

SEQ ID NO: 3415 - DNA, 25 bp, Homo Sapiens
acttaaaactttacagtcagaggtt

SEQ ID NO: 3416 - DNA, 26 bp, Homo Sapiens
acttaaaactttacagtcagaggttc

SEQ ID NO: 3417 - DNA, 37 bp, Homo Sapiens
acttaaaactttacagtcagaggttcaattcctcttc

SEQ ID NO: 3418 - DNA, 38 bp, Homo Sapiens
acttaaaactttacagtcagaggttcaattcctcttct

SEQ ID NO: 3419 - DNA, 16 bp, Homo Sapiens
acttaacttgaccgct

SEQ ID NO: 3420 - DNA, 17 bp, Homo Sapiens
acttaacttgaccgctc

SEQ ID NO: 3421 - DNA, 18 bp, Homo Sapiens
acttaacttgaccgctct

SEQ ID NO: 3422 - DNA, 19 bp, Homo Sapiens
acttaacttgaccgctctg

SEQ ID NO: 3423 - DNA, 20 bp, Homo Sapiens
acttaacttgaccgctctga

SEQ ID NO: 3424 - DNA, 21 bp, Homo Sapiens
acttaacttgaccgctctgac

SEQ ID NO: 3425 - DNA, 22 bp, Homo Sapiens
acttaacttgaccgctctgacc

SEQ ID NO: 3426 - DNA, 23 bp, Homo Sapiens
acttaacttgaccgctctgacca

SEQ ID NO: 3427 - DNA, 17 bp, Homo Sapiens
acttaagatccaatgga

SEQ ID NO: 3428 - DNA, 18 bp, Homo Sapiens
acttaagatccaatggac

SEQ ID NO: 3429 - DNA, 20 bp, Homo Sapiens
acttaagatccaatggacat

SEQ ID NO: 3430 - DNA, 21 bp, Homo Sapiens
acttaagatccaatggacata

SEQ ID NO: 3431 - DNA, 22 bp, Homo Sapiens
acttaagatccaatggacatat

SEQ ID NO: 3432 - DNA, 16 bp, Homo Sapiens
acttacacttaggaga

SEQ ID NO: 3433 - DNA, 17 bp, Homo Sapiens
acttacacttaggagat

SEQ ID NO: 3434 - DNA, 18 bp, Homo Sapiens
acttacacttaggagatt

SEQ ID NO: 3435 - DNA, 20 bp, Homo Sapiens
acttacacttaggagatttc

SEQ ID NO: 3436 - DNA, 21 bp, Homo Sapiens
acttacacttaggagatttca

SEQ ID NO: 3437 - DNA, 22 bp, Homo Sapiens
acttacacttaggagatttcaa

SEQ ID NO: 3438 - DNA, 23 bp, Homo Sapiens
acttacacttaggagatttcaac

SEQ ID NO: 3439 - DNA, 24 bp, Homo Sapiens
acttacacttaggagatttcaact

SEQ ID NO: 3440 - DNA, 25 bp, Homo Sapiens
acttacacttaggagatttcaactt

SEQ ID NO: 3441 - DNA, 27 bp, Homo Sapiens
acttacacttaggagatttcaacttaa

SEQ ID NO: 3442 - DNA, 28 bp, Homo Sapiens
acttacacttaggagatttcaacttaac

SEQ ID NO: 3443 - DNA, 29 bp, Homo Sapiens
acttacacttaggagatttcaacttaact

SEQ ID NO: 3444 - DNA, 30 bp, Homo Sapiens
acttacacttaggagatttcaacttaactt

SEQ ID NO: 3445 - DNA, 31 bp, Homo Sapiens
acttacacttaggagatttcaacttaacttg

SEQ ID NO: 3446 - DNA, 33 bp, Homo Sapiens
acttacacttaggagatttcaacttaacttgac

SEQ ID NO: 3447 - DNA, 34 bp, Homo Sapiens
acttacacttaggagatttcaacttaacttgacc

SEQ ID NO: 3448 - DNA, 35 bp, Homo Sapiens
acttacacttaggagatttcaacttaacttgaccg

SEQ ID NO: 3449 - DNA, 36 bp, Homo Sapiens
acttacacttaggagatttcaacttaacttgaccgc

SEQ ID NO: 3450 - DNA, 37 bp, Homo Sapiens
acttacacttaggagatttcaacttaacttgaccgct

SEQ ID NO: 3451 - DNA, 38 bp, Homo Sapiens
acttacacttaggagatttcaacttaacttgaccgctc

SEQ ID NO: 3452 - DNA, 39 bp, Homo Sapiens
acttacacttaggagatttcaacttaacttgaccgctct

SEQ ID NO: 3453 - DNA, 40 bp, Homo Sapiens
acttacacttaggagatttcaacttaacttgaccgctctg

SEQ ID NO: 3454 - DNA, 41 bp, Homo Sapiens
acttacacttaggagatttcaacttaacttgaccgctctga

SEQ ID NO: 3455 - DNA, 42 bp, Homo Sapiens
acttacacttaggagatttcaacttaacttgaccgctctgac

SEQ ID NO: 3456 - DNA, 43 bp, Homo Sapiens
acttacacttaggagatttcaacttaacttgaccgctctgacc

SEQ ID NO: 3457 - DNA, 44 bp, Homo Sapiens
acttacacttaggagatttcaacttaacttgaccgctctgacca

SEQ ID NO: 3458 - DNA, 22 bp, Homo Sapiens
acttagcattaaccttttaagt

SEQ ID NO: 3459 - DNA, 25 bp, Homo Sapiens
acttagcattaaccttttaagttaa

SEQ ID NO: 3460 - DNA, 32 bp, Homo Sapiens
acttagcattaaccttttaagttaaagattaa

SEQ ID NO: 3461 - DNA, 38 bp, Homo Sapiens
acttagcattaaccttttaagttaaagattaagagaac

SEQ ID NO: 3462 - DNA, 39 bp, Homo Sapiens
acttagcattaaccttttaagttaaagattaagagaacc

SEQ ID NO: 3463 - DNA, 45 bp, Homo Sapiens
acttagcattaaccttttaagttaaagattaagagaaccaacacc

SEQ ID NO: 3464 - DNA, 16 bp, Homo Sapiens
acttaggagatttcaa

SEQ ID NO: 3465 - DNA, 17 bp, Homo Sapiens
acttaggagatttcaac

SEQ ID NO: 3466 - DNA, 18 bp, Homo Sapiens
acttaggagatttcaact

SEQ ID NO: 3467 - DNA, 19 bp, Homo Sapiens
acttaggagatttcaactt

SEQ ID NO: 3468 - DNA, 20 bp, Homo Sapiens
acttaggagatttcaactta

SEQ ID NO: 3469 - DNA, 21 bp, Homo Sapiens
acttaggagatttcaacttaa

SEQ ID NO: 3470 - DNA, 22 bp, Homo Sapiens
acttaggagatttcaacttaac

SEQ ID NO: 3471 - DNA, 23 bp, Homo Sapiens
acttaggagatttcaacttaact

SEQ ID NO: 3472 - DNA, 24 bp, Homo Sapiens
acttaggagatttcaacttaactt

SEQ ID NO: 3473 - DNA, 25 bp, Homo Sapiens
acttaggagatttcaacttaacttg

SEQ ID NO: 3474 - DNA, 26 bp, Homo Sapiens
acttaggagatttcaacttaacttga

SEQ ID NO: 3475 - DNA, 27 bp, Homo Sapiens
acttaggagatttcaacttaacttgac

SEQ ID NO: 3476 - DNA, 28 bp, Homo Sapiens
acttaggagatttcaacttaacttgacc

SEQ ID NO: 3477 - DNA, 29 bp, Homo Sapiens
acttaggagatttcaacttaacttgaccg

SEQ ID NO: 3478 - DNA, 30 bp, Homo Sapiens
acttaggagatttcaacttaacttgaccgc

SEQ ID NO: 3479 - DNA, 31 bp, Homo Sapiens
acttaggagatttcaacttaacttgaccgct

SEQ ID NO: 3480 - DNA, 32 bp, Homo Sapiens
acttaggagatttcaacttaacttgaccgctc

SEQ ID NO: 3481 - DNA, 33 bp, Homo Sapiens
acttaggagatttcaacttaacttgaccgctct

SEQ ID NO: 3482 - DNA, 34 bp, Homo Sapiens
acttaggagatttcaacttaacttgaccgctctg

SEQ ID NO: 3483 - DNA, 35 bp, Homo Sapiens
acttaggagatttcaacttaacttgaccgctctga

SEQ ID NO: 3484 - DNA, 36 bp, Homo Sapiens
acttaggagatttcaacttaacttgaccgctctgac

SEQ ID NO: 3485 - DNA, 37 bp, Homo Sapiens
acttaggagatttcaacttaacttgaccgctctgacc

SEQ ID NO: 3486 - DNA, 38 bp, Homo Sapiens
acttaggagatttcaacttaacttgaccgctctgacca

SEQ ID NO: 3487 - DNA, 16 bp, Homo Sapiens
acttataatgccgagg

SEQ ID NO: 3488 - DNA, 17 bp, Homo Sapiens
acttataatgccgaggt

SEQ ID NO: 3489 - DNA, 21 bp, Homo Sapiens
acttataatgccgaggttgtg

SEQ ID NO: 3490 - DNA, 16 bp, Homo Sapiens
acttccaattaactag

SEQ ID NO: 3491 - DNA, 19 bp, Homo Sapiens
acttccaattaactagttt

SEQ ID NO: 3492 - DNA, 21 bp, Homo Sapiens
acttccaattaactagttttg

SEQ ID NO: 3493 - DNA, 22 bp, Homo Sapiens
acttccaattaactagttttga

SEQ ID NO: 3494 - DNA, 23 bp, Homo Sapiens
acttccaattaactagttttgac

SEQ ID NO: 3495 - DNA, 24 bp, Homo Sapiens
acttccaattaactagttttgaca

SEQ ID NO: 3496 - DNA, 25 bp, Homo Sapiens
acttccaattaactagttttgacaa

SEQ ID NO: 3497 - DNA, 26 bp, Homo Sapiens
acttccaattaactagttttgacaac

SEQ ID NO: 3498 - DNA, 43 bp, Homo Sapiens
acttccaattaactagttttgacaacattcaaaaaagagtacc

SEQ ID NO: 3499 - DNA, 44 bp, Homo Sapiens
acttccaattaactagttttgacaacattcaaaaaagagtacca

SEQ ID NO: 3500 - DNA, 16 bp, Homo Sapiens
acttcggatcagaaga

SEQ ID NO: 3501 - DNA, 23 bp, Homo Sapiens
acttcggatcagaagattgaggg

SEQ ID NO: 3502 - DNA, 24 bp, Homo Sapiens
acttcggatcagaagattgagggt

SEQ ID NO: 3503 - DNA, 35 bp, Homo Sapiens
acttcggatcagaagattgagggttcgagtccctt

SEQ ID NO: 3504 - DNA, 22 bp, Homo Sapiens
acttcggatcagaagattgcag

SEQ ID NO: 3505 - DNA, 23 bp, Homo Sapiens
acttcggatcagaagattgcagg

SEQ ID NO: 3506 - DNA, 25 bp, Homo Sapiens
acttcggatcagaagattgcaggtt

SEQ ID NO: 3507 - DNA, 26 bp, Homo Sapiens
acttcggatcagaagattgcaggttc

SEQ ID NO: 3508 - DNA, 27 bp, Homo Sapiens
acttcggatcagaagattgcaggttcg

SEQ ID NO: 3509 - DNA, 45 bp, Homo Sapiens
acttcggatcagaagattgcaggttcgagtcctgccgcggtcgcc

SEQ ID NO: 3510 - DNA, 16 bp, Homo Sapiens
acttgaccgctctgac

SEQ ID NO: 3511 - DNA, 17 bp, Homo Sapiens
acttgaccgctctgacc

SEQ ID NO: 3512 - DNA, 18 bp, Homo Sapiens
acttgaccgctctgacca

SEQ ID NO: 3513 - DNA, 18 bp, Homo Sapiens
actttacaatcagaggtt

SEQ ID NO: 3514 - DNA, 16 bp, Homo Sapiens
actttacagtcagagg

SEQ ID NO: 3515 - DNA, 17 bp, Homo Sapiens
actttacagtcagaggt

SEQ ID NO: 3516 - DNA, 18 bp, Homo Sapiens
actttacagtcagaggtt

SEQ ID NO: 3517 - DNA, 19 bp, Homo Sapiens
actttacagtcagaggttc

SEQ ID NO: 3518 - DNA, 20 bp, Homo Sapiens
actttacagtcagaggttca

SEQ ID NO: 3519 - DNA, 24 bp, Homo Sapiens
actttacagtcagaggttcaattc

SEQ ID NO: 3520 - DNA, 25 bp, Homo Sapiens
actttacagtcagaggttcaattcc

SEQ ID NO: 3521 - DNA, 26 bp, Homo Sapiens
actttacagtcagaggttcaattcct

SEQ ID NO: 3522 - DNA, 30 bp, Homo Sapiens
actttacagtcagaggttcaattcctcttc

SEQ ID NO: 3523 - DNA, 31 bp, Homo Sapiens
actttacagtcagaggttcaattcctcttct

SEQ ID NO: 3524 - DNA, 21 bp, Homo Sapiens
actttgaatccagcaatccga

SEQ ID NO: 3525 - DNA, 22 bp, Homo Sapiens
actttgaatccagcaatccgag

SEQ ID NO: 3526 - DNA, 23 bp, Homo Sapiens
actttgaatccagcaatccgagt

SEQ ID NO: 3527 - DNA, 24 bp, Homo Sapiens
actttgaatccagcaatccgagtt

SEQ ID NO: 3528 - DNA, 17 bp, Homo Sapiens
actttgaatccagcgat

SEQ ID NO: 3529 - DNA, 19 bp, Homo Sapiens
actttgaatccagcgatcc

SEQ ID NO: 3530 - DNA, 20 bp, Homo Sapiens
actttgaatccagcgatccg

SEQ ID NO: 3531 - DNA, 21 bp, Homo Sapiens
actttgaatccagcgatccga

SEQ ID NO: 3532 - DNA, 22 bp, Homo Sapiens
actttgaatccagcgatccgag

SEQ ID NO: 3533 - DNA, 23 bp, Homo Sapiens
actttgaatccagcgatccgagt

SEQ ID NO: 3534 - DNA, 24 bp, Homo Sapiens
actttgaatccagcgatccgagtt

SEQ ID NO: 3535 - DNA, 26 bp, Homo Sapiens
actttgaatccagcgatccgagttca

SEQ ID NO: 3536 - DNA, 23 bp, Homo Sapiens
actttgatagagtaaataatagg

SEQ ID NO: 3537 - DNA, 24 bp, Homo Sapiens
actttgatagagtaaataatagga

SEQ ID NO: 3538 - DNA, 25 bp, Homo Sapiens
actttgatagagtaaataataggag

SEQ ID NO: 3539 - DNA, 26 bp, Homo Sapiens
actttgatagagtaaataataggagc

SEQ ID NO: 3540 - DNA, 27 bp, Homo Sapiens
actttgatagagtaaataataggagct

SEQ ID NO: 3541 - DNA, 28 bp, Homo Sapiens
actttgatagagtaaataataggagctt

SEQ ID NO: 3542 - DNA, 29 bp, Homo Sapiens
actttgatagagtaaataataggagctta

SEQ ID NO: 3543 - DNA, 30 bp, Homo Sapiens
actttgatagagtaaataataggagcttaa

SEQ ID NO: 3544 - DNA, 31 bp, Homo Sapiens
actttgatagagtaaataataggagcttaaa

SEQ ID NO: 3545 - DNA, 32 bp, Homo Sapiens
actttgatagagtaaataataggagcttaaac

SEQ ID NO: 3546 - DNA, 33 bp, Homo Sapiens
actttgatagagtaaataataggagcttaaacc

SEQ ID NO: 3547 - DNA, 34 bp, Homo Sapiens
actttgatagagtaaataataggagcttaaaccc

SEQ ID NO: 3548 - DNA, 35 bp, Homo Sapiens
actttgatagagtaaataataggagcttaaacccc

SEQ ID NO: 3549 - DNA, 36 bp, Homo Sapiens
actttgatagagtaaataataggagcttaaaccccc

SEQ ID NO: 3550 - DNA, 37 bp, Homo Sapiens
actttgatagagtaaataataggagcttaaaccccct

SEQ ID NO: 3551 - DNA, 38 bp, Homo Sapiens
actttgatagagtaaataataggagcttaaaccccctt

SEQ ID NO: 3552 - DNA, 39 bp, Homo Sapiens
actttgatagagtaaataataggagcttaaaccccctta

SEQ ID NO: 3553 - DNA, 40 bp, Homo Sapiens
actttgatagagtaaataataggagcttaaacccccttat

SEQ ID NO: 3554 - DNA, 47 bp, Homo Sapiens
actttgatagagtaaataataggagcttaaacccccttatttctacc

SEQ ID NO: 3555 - DNA, 48 bp, Homo Sapiens
actttgatagagtaaataataggagcttaaacccccttatttctacca

SEQ ID NO: 3556 - DNA, 19 bp, Homo Sapiens
actttgtcaaagttaaatt

SEQ ID NO: 3557 - DNA, 20 bp, Homo Sapiens
actttgtcaaagttaaatta

SEQ ID NO: 3558 - DNA, 23 bp, Homo Sapiens
actttgtcaaagttaaattatag

SEQ ID NO: 3559 - DNA, 24 bp, Homo Sapiens
actttgtcaaagttaaattatagg

SEQ ID NO: 3560 - DNA, 25 bp, Homo Sapiens
actttgtcaaagttaaattataggc

SEQ ID NO: 3561 - DNA, 26 bp, Homo Sapiens
actttgtcaaagttaaattataggct

SEQ ID NO: 3562 - DNA, 27 bp, Homo Sapiens
actttgtcaaagttaaattataggcta

SEQ ID NO: 3563 - DNA, 28 bp, Homo Sapiens
actttgtcaaagttaaattataggctaa

SEQ ID NO: 3564 - DNA, 29 bp, Homo Sapiens
actttgtcaaagttaaattataggctaaa

SEQ ID NO: 3565 - DNA, 30 bp, Homo Sapiens
actttgtcaaagttaaattataggctaaat

SEQ ID NO: 3566 - DNA, 31 bp, Homo Sapiens
actttgtcaaagttaaattataggctaaatc

SEQ ID NO: 3567 - DNA, 32 bp, Homo Sapiens
actttgtcaaagttaaattataggctaaatcc

SEQ ID NO: 3568 - DNA, 33 bp, Homo Sapiens
actttgtcaaagttaaattataggctaaatcct

SEQ ID NO: 3569 - DNA, 34 bp, Homo Sapiens
actttgtcaaagttaaattataggctaaatccta

SEQ ID NO: 3570 - DNA, 36 bp, Homo Sapiens
actttgtcaaagttaaattataggctaaatcctata

SEQ ID NO: 3571 - DNA, 37 bp, Homo Sapiens
actttgtcaaagttaaattataggctaaatcctatat

SEQ ID NO: 3572 - DNA, 38 bp, Homo Sapiens
actttgtcaaagttaaattataggctaaatcctatata

SEQ ID NO: 3573 - DNA, 41 bp, Homo Sapiens
actttgtcaaagttaaattataggctaaatcctatatatct

SEQ ID NO: 3574 - DNA, 44 bp, Homo Sapiens
actttgtcaaagttaaattataggctaaatcctatatatcttac

SEQ ID NO: 3575 - DNA, 45 bp, Homo Sapiens
actttgtcaaagttaaattataggctaaatcctatatatcttacc

SEQ ID NO: 3576 - DNA, 46 bp, Homo Sapiens
actttgtcaaagttaaattataggctaaatcctatatatcttacca

SEQ ID NO: 3577 - DNA, 16 bp, Homo Sapiens
acttttaaaggataac

SEQ ID NO: 3578 - DNA, 17 bp, Homo Sapiens
acttttaaaggataaca

SEQ ID NO: 3579 - DNA, 18 bp, Homo Sapiens
acttttaaaggataacag

SEQ ID NO: 3580 - DNA, 19 bp, Homo Sapiens
acttttaaaggataacagc

SEQ ID NO: 3581 - DNA, 20 bp, Homo Sapiens
acttttaaaggataacagct

SEQ ID NO: 3582 - DNA, 21 bp, Homo Sapiens
acttttaaaggataacagcta

SEQ ID NO: 3583 - DNA, 22 bp, Homo Sapiens
acttttaaaggataacagctat

SEQ ID NO: 3584 - DNA, 23 bp, Homo Sapiens
acttttaaaggataacagctatc

SEQ ID NO: 3585 - DNA, 24 bp, Homo Sapiens
acttttaaaggataacagctatcc

SEQ ID NO: 3586 - DNA, 26 bp, Homo Sapiens
acttttaaaggataacagctatccat

SEQ ID NO: 3587 - DNA, 27 bp, Homo Sapiens
acttttaaaggataacagctatccatt

SEQ ID NO: 3588 - DNA, 28 bp, Homo Sapiens
acttttaaaggataacagctatccattg

SEQ ID NO: 3589 - DNA, 29 bp, Homo Sapiens
acttttaaaggataacagctatccattgg

SEQ ID NO: 3590 - DNA, 30 bp, Homo Sapiens
acttttaaaggataacagctatccattggt

SEQ ID NO: 3591 - DNA, 31 bp, Homo Sapiens
acttttaaaggataacagctatccattggtc

SEQ ID NO: 3592 - DNA, 32 bp, Homo Sapiens
acttttaaaggataacagctatccattggtct

SEQ ID NO: 3593 - DNA, 33 bp, Homo Sapiens
acttttaaaggataacagctatccattggtctt

SEQ ID NO: 3594 - DNA, 34 bp, Homo Sapiens
acttttaaaggataacagctatccattggtctta

SEQ ID NO: 3595 - DNA, 37 bp, Homo Sapiens
acttttaaaggataacagctatccattggtcttaggc

SEQ ID NO: 3596 - DNA, 38 bp, Homo Sapiens
acttttaaaggataacagctatccattggtcttaggcc

SEQ ID NO: 3597 - DNA, 39 bp, Homo Sapiens
acttttaaaggataacagctatccattggtcttaggccc

SEQ ID NO: 3598 - DNA, 40 bp, Homo Sapiens
acttttaaaggataacagctatccattggtcttaggcccc

SEQ ID NO: 3599 - DNA, 41 bp, Homo Sapiens
acttttaaaggataacagctatccattggtcttaggcccca

SEQ ID NO: 3600 - DNA, 48 bp, Homo Sapiens
acttttaaaggataacagctatccattggtcttaggccccaaaaattt

SEQ ID NO: 3601 - DNA, 38 bp, Homo Sapiens
acttttaatctgagggtccagggttcatgtccctgttc

SEQ ID NO: 3602 - DNA, 16 bp, Homo Sapiens
actttttctctgacca

SEQ ID NO: 3603 - DNA, 16 bp, Homo Sapiens
agaaagctcacaagaa

SEQ ID NO: 3604 - DNA, 17 bp, Homo Sapiens
agaaagctcacaagaac

SEQ ID NO: 3605 - DNA, 18 bp, Homo Sapiens
agaaagctcacaagaact

SEQ ID NO: 3606 - DNA, 19 bp, Homo Sapiens
agaaagctcacaagaactg

SEQ ID NO: 3607 - DNA, 20 bp, Homo Sapiens
agaaagctcacaagaactgc

SEQ ID NO: 3608 - DNA, 21 bp, Homo Sapiens
agaaagctcacaagaactgct

SEQ ID NO: 3609 - DNA, 22 bp, Homo Sapiens
agaaagctcacaagaactgcta

SEQ ID NO: 3610 - DNA, 23 bp, Homo Sapiens
agaaagctcacaagaactgctaa

SEQ ID NO: 3611 - DNA, 24 bp, Homo Sapiens
agaaagctcacaagaactgctaac

SEQ ID NO: 3612 - DNA, 25 bp, Homo Sapiens
agaaagctcacaagaactgctaact

SEQ ID NO: 3613 - DNA, 26 bp, Homo Sapiens
agaaagctcacaagaactgctaactc

SEQ ID NO: 3614 - DNA, 27 bp, Homo Sapiens
agaaagctcacaagaactgctaactca

SEQ ID NO: 3615 - DNA, 28 bp, Homo Sapiens
agaaagctcacaagaactgctaactcat

SEQ ID NO: 3616 - DNA, 29 bp, Homo Sapiens
agaaagctcacaagaactgctaactcatg

SEQ ID NO: 3617 - DNA, 30 bp, Homo Sapiens
agaaagctcacaagaactgctaactcatgc

SEQ ID NO: 3618 - DNA, 31 bp, Homo Sapiens
agaaagctcacaagaactgctaactcatgcc

SEQ ID NO: 3619 - DNA, 32 bp, Homo Sapiens
agaaagctcacaagaactgctaactcatgccc

SEQ ID NO: 3620 - DNA, 33 bp, Homo Sapiens
agaaagctcacaagaactgctaactcatgcccc

SEQ ID NO: 3621 - DNA, 34 bp, Homo Sapiens
agaaagctcacaagaactgctaactcatgccccc

SEQ ID NO: 3622 - DNA, 35 bp, Homo Sapiens
agaaagctcacaagaactgctaactcatgccccca

SEQ ID NO: 3623 - DNA, 36 bp, Homo Sapiens
agaaagctcacaagaactgctaactcatgcccccat

SEQ ID NO: 3624 - DNA, 38 bp, Homo Sapiens
agaaagctcacaagaactgctaactcatgcccccatgt

SEQ ID NO: 3625 - DNA, 39 bp, Homo Sapiens
agaaagctcacaagaactgctaactcatgcccccatgtc

SEQ ID NO: 3626 - DNA, 40 bp, Homo Sapiens
agaaagctcacaagaactgctaactcatgcccccatgtct

SEQ ID NO: 3627 - DNA, 41 bp, Homo Sapiens
agaaagctcacaagaactgctaactcatgcccccatgtcta

SEQ ID NO: 3628 - DNA, 42 bp, Homo Sapiens
agaaagctcacaagaactgctaactcatgcccccatgtctaa

SEQ ID NO: 3629 - DNA, 43 bp, Homo Sapiens
agaaagctcacaagaactgctaactcatgcccccatgtctaac

SEQ ID NO: 3630 - DNA, 44 bp, Homo Sapiens
agaaagctcacaagaactgctaactcatgcccccatgtctaaca

SEQ ID NO: 3631 - DNA, 45 bp, Homo Sapiens
agaaagctcacaagaactgctaactcatgcccccatgtctaacaa

SEQ ID NO: 3632 - DNA, 46 bp, Homo Sapiens
agaaagctcacaagaactgctaactcatgcccccatgtctaacaac

SEQ ID NO: 3633 - DNA, 47 bp, Homo Sapiens
agaaagctcacaagaactgctaactcatgcccccatgtctaacaaca

SEQ ID NO: 3634 - DNA, 48 bp, Homo Sapiens
agaaagctcacaagaactgctaactcatgcccccatgtctaacaacat

SEQ ID NO: 3635 - DNA, 16 bp, Homo Sapiens
agaaatatgtctgata

SEQ ID NO: 3636 - DNA, 17 bp, Homo Sapiens
agaaatatgtctgataa

SEQ ID NO: 3637 - DNA, 18 bp, Homo Sapiens
agaaatatgtctgataaa

SEQ ID NO: 3638 - DNA, 19 bp, Homo Sapiens
agaaatatgtctgataaaa

SEQ ID NO: 3639 - DNA, 20 bp, Homo Sapiens
agaaatatgtctgataaaag

SEQ ID NO: 3640 - DNA, 21 bp, Homo Sapiens
agaaatatgtctgataaaaga

SEQ ID NO: 3641 - DNA, 22 bp, Homo Sapiens
agaaatatgtctgataaaagag

SEQ ID NO: 3642 - DNA, 23 bp, Homo Sapiens
agaaatatgtctgataaaagagt

SEQ ID NO: 3643 - DNA, 24 bp, Homo Sapiens
agaaatatgtctgataaaagagtt

SEQ ID NO: 3644 - DNA, 25 bp, Homo Sapiens
agaaatatgtctgataaaagagtta

SEQ ID NO: 3645 - DNA, 26 bp, Homo Sapiens
agaaatatgtctgataaaagagttac

SEQ ID NO: 3646 - DNA, 27 bp, Homo Sapiens
agaaatatgtctgataaaagagttact

SEQ ID NO: 3647 - DNA, 28 bp, Homo Sapiens
agaaatatgtctgataaaagagttactt

SEQ ID NO: 3648 - DNA, 29 bp, Homo Sapiens
agaaatatgtctgataaaagagttacttt

SEQ ID NO: 3649 - DNA, 30 bp, Homo Sapiens
agaaatatgtctgataaaagagttactttg

SEQ ID NO: 3650 - DNA, 31 bp, Homo Sapiens
agaaatatgtctgataaaagagttactttga

SEQ ID NO: 3651 - DNA, 32 bp, Homo Sapiens
agaaatatgtctgataaaagagttactttgat

SEQ ID NO: 3652 - DNA, 33 bp, Homo Sapiens
agaaatatgtctgataaaagagttactttgata

SEQ ID NO: 3653 - DNA, 34 bp, Homo Sapiens
agaaatatgtctgataaaagagttactttgatag

SEQ ID NO: 3654 - DNA, 35 bp, Homo Sapiens
agaaatatgtctgataaaagagttactttgataga

SEQ ID NO: 3655 - DNA, 36 bp, Homo Sapiens
agaaatatgtctgataaaagagttactttgatagag

SEQ ID NO: 3656 - DNA, 37 bp, Homo Sapiens
agaaatatgtctgataaaagagttactttgatagagt

SEQ ID NO: 3657 - DNA, 38 bp, Homo Sapiens
agaaatatgtctgataaaagagttactttgatagagta

SEQ ID NO: 3658 - DNA, 39 bp, Homo Sapiens
agaaatatgtctgataaaagagttactttgatagagtaa

SEQ ID NO: 3659 - DNA, 40 bp, Homo Sapiens
agaaatatgtctgataaaagagttactttgatagagtaaa

SEQ ID NO: 3660 - DNA, 41 bp, Homo Sapiens
agaaatatgtctgataaaagagttactttgatagagtaaat

SEQ ID NO: 3661 - DNA, 47 bp, Homo Sapiens
agaaatatgtctgataaaagagttactttgatagagtaaataatagg

SEQ ID NO: 3662 - DNA, 48 bp, Homo Sapiens
agaaatatgtctgataaaagagttactttgatagagtaaataatagga

SEQ ID NO: 3663 - DNA, 17 bp, Homo Sapiens
agaaatttaggttaaat

SEQ ID NO: 3664 - DNA, 19 bp, Homo Sapiens
agaaatttaggttaaatac

SEQ ID NO: 3665 - DNA, 20 bp, Homo Sapiens
agaaatttaggttaaataca

SEQ ID NO: 3666 - DNA, 21 bp, Homo Sapiens
agaaatttaggttaaatacag

SEQ ID NO: 3667 - DNA, 23 bp, Homo Sapiens
agaaatttaggttaaatacagac

SEQ ID NO: 3668 - DNA, 24 bp, Homo Sapiens
agaaatttaggttaaatacagacc

SEQ ID NO: 3669 - DNA, 25 bp, Homo Sapiens
agaaatttaggttaaatacagacca

SEQ ID NO: 3670 - DNA, 27 bp, Homo Sapiens
agaaatttaggttaaatacagaccaag

SEQ ID NO: 3671 - DNA, 28 bp, Homo Sapiens
agaaatttaggttaaatacagaccaaga

SEQ ID NO: 3672 - DNA, 31 bp, Homo Sapiens
agaaatttaggttaaatacagaccaagagcc

SEQ ID NO: 3673 - DNA, 34 bp, Homo Sapiens
agaaatttaggttaaatacagaccaagagccttc

SEQ ID NO: 3674 - DNA, 35 bp, Homo Sapiens
agaaatttaggttaaatacagaccaagagccttca

SEQ ID NO: 3675 - DNA, 40 bp, Homo Sapiens
agaaatttaggttaaatacagaccaagagccttcaaagcc

SEQ ID NO: 3676 - DNA, 16 bp, Homo Sapiens
agaaccaacacctctt

SEQ ID NO: 3677 - DNA, 17 bp, Homo Sapiens
agaaccaacacctcttt

SEQ ID NO: 3678 - DNA, 18 bp, Homo Sapiens
agaaccaacacctcttta

SEQ ID NO: 3679 - DNA, 19 bp, Homo Sapiens
agaaccaacacctctttac

SEQ ID NO: 3680 - DNA, 20 bp, Homo Sapiens
agaaccaacacctctttaca

SEQ ID NO: 3681 - DNA, 21 bp, Homo Sapiens
agaaccaacacctctttacag

SEQ ID NO: 3682 - DNA, 22 bp, Homo Sapiens
agaaccaacacctctttacagt

SEQ ID NO: 3683 - DNA, 23 bp, Homo Sapiens
agaaccaacacctctttacagtg

SEQ ID NO: 3684 - DNA, 24 bp, Homo Sapiens
agaaccaacacctctttacagtga

SEQ ID NO: 3685 - DNA, 25 bp, Homo Sapiens
agaaccaacacctctttacagtgac

SEQ ID NO: 3686 - DNA, 26 bp, Homo Sapiens
agaaccaacacctctttacagtgacc

SEQ ID NO: 3687 - DNA, 27 bp, Homo Sapiens
agaaccaacacctctttacagtgacca

SEQ ID NO: 3688 - DNA, 16 bp, Homo Sapiens
agaactgctaactcat

SEQ ID NO: 3689 - DNA, 17 bp, Homo Sapiens
agaactgctaactcatg

SEQ ID NO: 3690 - DNA, 18 bp, Homo Sapiens
agaactgctaactcatgc

SEQ ID NO: 3691 - DNA, 19 bp, Homo Sapiens
agaactgctaactcatgcc

SEQ ID NO: 3692 - DNA, 20 bp, Homo Sapiens
agaactgctaactcatgccc

SEQ ID NO: 3693 - DNA, 21 bp, Homo Sapiens
agaactgctaactcatgcccc

SEQ ID NO: 3694 - DNA, 22 bp, Homo Sapiens
agaactgctaactcatgccccc

SEQ ID NO: 3695 - DNA, 23 bp, Homo Sapiens
agaactgctaactcatgccccca

SEQ ID NO: 3696 - DNA, 24 bp, Homo Sapiens
agaactgctaactcatgcccccat

SEQ ID NO: 3697 - DNA, 25 bp, Homo Sapiens
agaactgctaactcatgcccccatg

SEQ ID NO: 3698 - DNA, 26 bp, Homo Sapiens
agaactgctaactcatgcccccatgt

SEQ ID NO: 3699 - DNA, 27 bp, Homo Sapiens
agaactgctaactcatgcccccatgtc

SEQ ID NO: 3700 - DNA, 28 bp, Homo Sapiens
agaactgctaactcatgcccccatgtct

SEQ ID NO: 3701 - DNA, 29 bp, Homo Sapiens
agaactgctaactcatgcccccatgtcta

SEQ ID NO: 3702 - DNA, 30 bp, Homo Sapiens
agaactgctaactcatgcccccatgtctaa

SEQ ID NO: 3703 - DNA, 31 bp, Homo Sapiens
agaactgctaactcatgcccccatgtctaac

SEQ ID NO: 3704 - DNA, 32 bp, Homo Sapiens
agaactgctaactcatgcccccatgtctaaca

SEQ ID NO: 3705 - DNA, 33 bp, Homo Sapiens
agaactgctaactcatgcccccatgtctaacaa

SEQ ID NO: 3706 - DNA, 34 bp, Homo Sapiens
agaactgctaactcatgcccccatgtctaacaac

SEQ ID NO: 3707 - DNA, 35 bp, Homo Sapiens
agaactgctaactcatgcccccatgtctaacaaca

SEQ ID NO: 3708 - DNA, 36 bp, Homo Sapiens
agaactgctaactcatgcccccatgtctaacaacat

SEQ ID NO: 3709 - DNA, 37 bp, Homo Sapiens
agaactgctaactcatgcccccatgtctaacaacatg

SEQ ID NO: 3710 - DNA, 38 bp, Homo Sapiens
agaactgctaactcatgcccccatgtctaacaacatgg

SEQ ID NO: 3711 - DNA, 39 bp, Homo Sapiens
agaactgctaactcatgcccccatgtctaacaacatggc

SEQ ID NO: 3712 - DNA, 40 bp, Homo Sapiens
agaactgctaactcatgcccccatgtctaacaacatggct

SEQ ID NO: 3713 - DNA, 41 bp, Homo Sapiens
agaactgctaactcatgcccccatgtctaacaacatggctt

SEQ ID NO: 3714 - DNA, 42 bp, Homo Sapiens
agaactgctaactcatgcccccatgtctaacaacatggcttt

SEQ ID NO: 3715 - DNA, 43 bp, Homo Sapiens
agaactgctaactcatgcccccatgtctaacaacatggctttc

SEQ ID NO: 3716 - DNA, 44 bp, Homo Sapiens
agaactgctaactcatgcccccatgtctaacaacatggctttct

SEQ ID NO: 3717 - DNA, 45 bp, Homo Sapiens
agaactgctaactcatgcccccatgtctaacaacatggctttctc

SEQ ID NO: 3718 - DNA, 46 bp, Homo Sapiens
agaactgctaactcatgcccccatgtctaacaacatggctttctca

SEQ ID NO: 3719 - DNA, 47 bp, Homo Sapiens
agaactgctaactcatgcccccatgtctaacaacatggctttctcac

SEQ ID NO: 3720 - DNA, 48 bp, Homo Sapiens
agaactgctaactcatgcccccatgtctaacaacatggctttctcacc

SEQ ID NO: 3721 - DNA, 16 bp, Homo Sapiens
agaagattccaggttc

SEQ ID NO: 3722 - DNA, 17 bp, Homo Sapiens
agaagattccaggttcg

SEQ ID NO: 3723 - DNA, 21 bp, Homo Sapiens
agaagattccaggttcgactc

SEQ ID NO: 3724 - DNA, 24 bp, Homo Sapiens
agaagattccaggttcgactcctg

SEQ ID NO: 3725 - DNA, 28 bp, Homo Sapiens
agaagattccaggttcgactcctggctg

SEQ ID NO: 3726 - DNA, 30 bp, Homo Sapiens
agaagattccaggttcgactcctggctggc

SEQ ID NO: 3727 - DNA, 31 bp, Homo Sapiens
agaagattccaggttcgactcctggctggct

SEQ ID NO: 3728 - DNA, 32 bp, Homo Sapiens
agaagattccaggttcgactcctggctggctc

SEQ ID NO: 3729 - DNA, 33 bp, Homo Sapiens
agaagattccaggttcgactcctggctggctcg

SEQ ID NO: 3730 - DNA, 34 bp, Homo Sapiens
agaagattccaggttcgactcctggctggctcgc

SEQ ID NO: 3731 - DNA, 35 bp, Homo Sapiens
agaagattccaggttcgactcctggctggctcgcc

SEQ ID NO: 3732 - DNA, 36 bp, Homo Sapiens
agaagattccaggttcgactcctggctggctcgcca

SEQ ID NO: 3733 - DNA, 16 bp, Homo Sapiens
agaagattctaggttc

SEQ ID NO: 3734 - DNA, 17 bp, Homo Sapiens
agaagattctaggttcg

SEQ ID NO: 3735 - DNA, 26 bp, Homo Sapiens
agaagattctaggttcgactcctggc

SEQ ID NO: 3736 - DNA, 30 bp, Homo Sapiens
agaagattctaggttcgactcctggctggc

SEQ ID NO: 3737 - DNA, 31 bp, Homo Sapiens
agaagattctaggttcgactcctggctggct

SEQ ID NO: 3738 - DNA, 32 bp, Homo Sapiens
agaagattctaggttcgactcctggctggctc

SEQ ID NO: 3739 - DNA, 33 bp, Homo Sapiens
agaagattctaggttcgactcctggctggctcg

SEQ ID NO: 3740 - DNA, 34 bp, Homo Sapiens
agaagattctaggttcgactcctggctggctcgc

SEQ ID NO: 3741 - DNA, 35 bp, Homo Sapiens
agaagattctaggttcgactcctggctggctcgcc

SEQ ID NO: 3742 - DNA, 36 bp, Homo Sapiens
agaagattctaggttcgactcctggctggctcgcca

SEQ ID NO: 3743 - DNA, 16 bp, Homo Sapiens
agaagattgagggttc

SEQ ID NO: 3744 - DNA, 17 bp, Homo Sapiens
agaagattgagggttcg

SEQ ID NO: 3745 - DNA, 24 bp, Homo Sapiens
agaagattgagggttcgaatccct

SEQ ID NO: 3746 - DNA, 33 bp, Homo Sapiens
agaagattgagggttcgaatcccttcgtggttg

SEQ ID NO: 3747 - DNA, 34 bp, Homo Sapiens
agaagattgagggttcgaatcccttcgtggttgc

SEQ ID NO: 3748 - DNA, 35 bp, Homo Sapiens
agaagattgagggttcgaatcccttcgtggttgcc

SEQ ID NO: 3749 - DNA, 36 bp, Homo Sapiens
agaagattgagggttcgaatcccttcgtggttgcca

SEQ ID NO: 3750 - DNA, 24 bp, Homo Sapiens
agaagattgagggttcgagtccct

SEQ ID NO: 3751 - DNA, 33 bp, Homo Sapiens
agaagattgagggttcgagtcccttcgtggtcg

SEQ ID NO: 3752 - DNA, 34 bp, Homo Sapiens
agaagattgagggttcgagtcccttcgtggtcgc

SEQ ID NO: 3753 - DNA, 35 bp, Homo Sapiens
agaagattgagggttcgagtcccttcgtggtcgcc

SEQ ID NO: 3754 - DNA, 36 bp, Homo Sapiens
agaagattgagggttcgagtcccttcgtggtcgcca

SEQ ID NO: 3755 - DNA, 16 bp, Homo Sapiens
agaagattgcaggttc

SEQ ID NO: 3756 - DNA, 17 bp, Homo Sapiens
agaagattgcaggttcg

SEQ ID NO: 3757 - DNA, 24 bp, Homo Sapiens
agaagattgcaggttcgagtcctg

SEQ ID NO: 3758 - DNA, 32 bp, Homo Sapiens
agaagattgcaggttcgagtcctgccgcggtc

SEQ ID NO: 3759 - DNA, 33 bp, Homo Sapiens
agaagattgcaggttcgagtcctgccgcggtcg

SEQ ID NO: 3760 - DNA, 34 bp, Homo Sapiens
agaagattgcaggttcgagtcctgccgcggtcgc

SEQ ID NO: 3761 - DNA, 35 bp, Homo Sapiens
agaagattgcaggttcgagtcctgccgcggtcgcc

SEQ ID NO: 3762 - DNA, 36 bp, Homo Sapiens
agaagattgcaggttcgagtcctgccgcggtcgcca

SEQ ID NO: 3763 - DNA, 17 bp, Homo Sapiens
agaagcagcttcaaacc

SEQ ID NO: 3764 - DNA, 19 bp, Homo Sapiens
agaagcagcttcaaacctg

SEQ ID NO: 3765 - DNA, 25 bp, Homo Sapiens
agaagcagcttcaaacctgccgggg

SEQ ID NO: 3766 - DNA, 26 bp, Homo Sapiens
agaagcagcttcaaacctgccggggc

SEQ ID NO: 3767 - DNA, 27 bp, Homo Sapiens
agaagcagcttcaaacctgccggggct

SEQ ID NO: 3768 - DNA, 28 bp, Homo Sapiens
agaagcagcttcaaacctgccggggctt

SEQ ID NO: 3769 - DNA, 29 bp, Homo Sapiens
agaagcagcttcaaacctgccggggcttc

SEQ ID NO: 3770 - DNA, 30 bp, Homo Sapiens
agaagcagcttcaaacctgccggggcttcc

SEQ ID NO: 3771 - DNA, 31 bp, Homo Sapiens
agaagcagcttcaaacctgccggggcttcca

SEQ ID NO: 3772 - DNA, 16 bp, Homo Sapiens
agaaggctgcgtgttc

SEQ ID NO: 3773 - DNA, 21 bp, Homo Sapiens
agaaggctgcgtgttcgaatc

SEQ ID NO: 3774 - DNA, 28 bp, Homo Sapiens
agaaggctgcgtgttcgaatcacgtcgg

SEQ ID NO: 3775 - DNA, 29 bp, Homo Sapiens
agaaggctgcgtgttcgaatcacgtcggg

SEQ ID NO: 3776 - DNA, 30 bp, Homo Sapiens
agaaggctgcgtgttcgaatcacgtcgggg

SEQ ID NO: 3777 - DNA, 32 bp, Homo Sapiens
agaaggctgcgtgttcgaatcacgtcggggtc

SEQ ID NO: 3778 - DNA, 34 bp, Homo Sapiens
agaaggctgcgtgttcgaatcacgtcggggtcac

SEQ ID NO: 3779 - DNA, 35 bp, Homo Sapiens
agaaggctgcgtgttcgaatcacgtcggggtcacc

SEQ ID NO: 3780 - DNA, 36 bp, Homo Sapiens
agaaggctgcgtgttcgaatcacgtcggggtcacca

SEQ ID NO: 3781 - DNA, 16 bp, Homo Sapiens
agaaggtcctgggttc

SEQ ID NO: 3782 - DNA, 24 bp, Homo Sapiens
agaaggtcctgggttcgagcccca

SEQ ID NO: 3783 - DNA, 31 bp, Homo Sapiens
agaaggtcctgggttcgagccccagtggaac

SEQ ID NO: 3784 - DNA, 32 bp, Homo Sapiens
agaaggtcctgggttcgagccccagtggaacc

SEQ ID NO: 3785 - DNA, 33 bp, Homo Sapiens
agaaggtcctgggttcgagccccagtggaacca

SEQ ID NO: 3786 - DNA, 34 bp, Homo Sapiens
agaaggtcctgggttcgagccccagtggaaccac

SEQ ID NO: 3787 - DNA, 35 bp, Homo Sapiens
agaaggtcctgggttcgagccccagtggaaccacc

SEQ ID NO: 3788 - DNA, 36 bp, Homo Sapiens
agaaggtcctgggttcgagccccagtggaaccacca

SEQ ID NO: 3789 - DNA, 16 bp, Homo Sapiens
agaaggttgcgtgttc

SEQ ID NO: 3790 - DNA, 33 bp, Homo Sapiens
agaaggttgcgtgttcaaatcacgtcggggtca

SEQ ID NO: 3791 - DNA, 35 bp, Homo Sapiens
agaaggttgcgtgttcaaatcacgtcggggtcacc

SEQ ID NO: 3792 - DNA, 36 bp, Homo Sapiens
agaaggttgcgtgttcaaatcacgtcggggtcacca

SEQ ID NO: 3793 - DNA, 32 bp, Homo Sapiens
agaaggttgcgtgttcaagtcacgtcggggtc

SEQ ID NO: 3794 - DNA, 33 bp, Homo Sapiens
agaaggttgcgtgttcaagtcacgtcggggtca

SEQ ID NO: 3795 - DNA, 34 bp, Homo Sapiens
agaaggttgcgtgttcaagtcacgtcggggtcac

SEQ ID NO: 3796 - DNA, 35 bp, Homo Sapiens
agaaggttgcgtgttcaagtcacgtcggggtcacc

SEQ ID NO: 3797 - DNA, 36 bp, Homo Sapiens
agaaggttgcgtgttcaagtcacgtcggggtcacca

SEQ ID NO: 3798 - DNA, 26 bp, Homo Sapiens
agaatagtttaaattagaatcttagc

SEQ ID NO: 3799 - DNA, 27 bp, Homo Sapiens
agaatagtttaaattagaatcttagct

SEQ ID NO: 3800 - DNA, 28 bp, Homo Sapiens
agaatagtttaaattagaatcttagctt

SEQ ID NO: 3801 - DNA, 30 bp, Homo Sapiens
agaatagtttaaattagaatcttagctttg

SEQ ID NO: 3802 - DNA, 31 bp, Homo Sapiens
agaatagtttaaattagaatcttagctttgg

SEQ ID NO: 3803 - DNA, 16 bp, Homo Sapiens
agaatcttagctttgg

SEQ ID NO: 3804 - DNA, 19 bp, Homo Sapiens
agaatcttagctttgggtg

SEQ ID NO: 3805 - DNA, 21 bp, Homo Sapiens
agaatcttagctttgggtgct

SEQ ID NO: 3806 - DNA, 23 bp, Homo Sapiens
agaatcttagctttgggtgctaa

SEQ ID NO: 3807 - DNA, 31 bp, Homo Sapiens
agaatcttagctttgggtgctaatggtggag

SEQ ID NO: 3808 - DNA, 32 bp, Homo Sapiens
agaatcttagctttgggtgctaatggtggagt

SEQ ID NO: 3809 - DNA, 33 bp, Homo Sapiens
agaatcttagctttgggtgctaatggtggagtt

SEQ ID NO: 3810 - DNA, 34 bp, Homo Sapiens
agaatcttagctttgggtgctaatggtggagtta

SEQ ID NO: 3811 - DNA, 37 bp, Homo Sapiens
agaatcttagctttgggtgctaatggtggagttaaag

SEQ ID NO: 3812 - DNA, 38 bp, Homo Sapiens
agaatcttagctttgggtgctaatggtggagttaaaga

SEQ ID NO: 3813 - DNA, 39 bp, Homo Sapiens
agaatcttagctttgggtgctaatggtggagttaaagac

SEQ ID NO: 3814 - DNA, 40 bp, Homo Sapiens
agaatcttagctttgggtgctaatggtggagttaaagact

SEQ ID NO: 3815 - DNA, 41 bp, Homo Sapiens
agaatcttagctttgggtgctaatggtggagttaaagactt

SEQ ID NO: 3816 - DNA, 42 bp, Homo Sapiens
agaatcttagctttgggtgctaatggtggagttaaagacttt

SEQ ID NO: 3817 - DNA, 43 bp, Homo Sapiens
agaatcttagctttgggtgctaatggtggagttaaagactttt

SEQ ID NO: 3818 - DNA, 45 bp, Homo Sapiens
agaatcttagctttgggtgctaatggtggagttaaagactttttc

SEQ ID NO: 3819 - DNA, 47 bp, Homo Sapiens
agaatcttagctttgggtgctaatggtggagttaaagactttttctc

SEQ ID NO: 3820 - DNA, 20 bp, Homo Sapiens
agaatggccgagtggttaag

SEQ ID NO: 3821 - DNA, 16 bp, Homo Sapiens
agaattctcgcctgcc

SEQ ID NO: 3822 - DNA, 17 bp, Homo Sapiens
agaattctcgcctgcca

SEQ ID NO: 3823 - DNA, 18 bp, Homo Sapiens
agaattctcgcctgccac

SEQ ID NO: 3824 - DNA, 19 bp, Homo Sapiens
agaattctcgcctgccacg

SEQ ID NO: 3825 - DNA, 24 bp, Homo Sapiens
agaattctcgcctgccacgcggga

SEQ ID NO: 3826 - DNA, 25 bp, Homo Sapiens
agaattctcgcctgccacgcgggag

SEQ ID NO: 3827 - DNA, 31 bp, Homo Sapiens
agaattctcgcctgccacgcgggaggcccgg

SEQ ID NO: 3828 - DNA, 35 bp, Homo Sapiens
agaattctcgcctgccacgcgggaggcccgggttc

SEQ ID NO: 3829 - DNA, 19 bp, Homo Sapiens
agaattctcgcctgccatg

SEQ ID NO: 3830 - DNA, 22 bp, Homo Sapiens
agaattttggattctcagggat

SEQ ID NO: 3831 - DNA, 16 bp, Homo Sapiens
agacaggggttaggcc

SEQ ID NO: 3832 - DNA, 17 bp, Homo Sapiens
agacaggggttaggcct

SEQ ID NO: 3833 - DNA, 18 bp, Homo Sapiens
agacaggggttaggcctc

SEQ ID NO: 3834 - DNA, 19 bp, Homo Sapiens
agacaggggttaggcctct

SEQ ID NO: 3835 - DNA, 21 bp, Homo Sapiens
agacaggggttaggcctcttt

SEQ ID NO: 3836 - DNA, 22 bp, Homo Sapiens
agacaggggttaggcctctttt

SEQ ID NO: 3837 - DNA, 26 bp, Homo Sapiens
agacaggggttaggcctctttttacc

SEQ ID NO: 3838 - DNA, 29 bp, Homo Sapiens
agacaggggttaggcctctttttaccacc

SEQ ID NO: 3839 - DNA, 30 bp, Homo Sapiens
agacaggggttaggcctctttttaccacca

SEQ ID NO: 3840 - DNA, 16 bp, Homo Sapiens
agaccaagagccttca

SEQ ID NO: 3841 - DNA, 17 bp, Homo Sapiens
agaccaagagccttcaa

SEQ ID NO: 3842 - DNA, 18 bp, Homo Sapiens
agaccaagagccttcaaa

SEQ ID NO: 3843 - DNA, 19 bp, Homo Sapiens
agaccaagagccttcaaag

SEQ ID NO: 3844 - DNA, 21 bp, Homo Sapiens
agaccaagagccttcaaagcc

SEQ ID NO: 3845 - DNA, 22 bp, Homo Sapiens
agaccaagagccttcaaagccc

SEQ ID NO: 3846 - DNA, 24 bp, Homo Sapiens
agaccaagagccttcaaagccctc

SEQ ID NO: 3847 - DNA, 31 bp, Homo Sapiens
agaccaagagccttcaaagccctcagtaagt

SEQ ID NO: 3848 - DNA, 34 bp, Homo Sapiens
agaccaagagccttcaaagccctcagtaagttgc

SEQ ID NO: 3849 - DNA, 23 bp, Homo Sapiens
agaccggggttcaattccccgac

SEQ ID NO: 3850 - DNA, 25 bp, Homo Sapiens
agaccggggttcaattccccgacgg

SEQ ID NO: 3851 - DNA, 30 bp, Homo Sapiens
agaccggggttcaattccccgacggggagc

SEQ ID NO: 3852 - DNA, 31 bp, Homo Sapiens
agaccggggttcaattccccgacggggagcc

SEQ ID NO: 3853 - DNA, 32 bp, Homo Sapiens
agaccggggttcaattccccgacggggagcca

SEQ ID NO: 3854 - DNA, 19 bp, Homo Sapiens
agaccggggttcgattccc

SEQ ID NO: 3855 - DNA, 23 bp, Homo Sapiens
agaccggggttcgattccccgac

SEQ ID NO: 3856 - DNA, 25 bp, Homo Sapiens
agaccggggttcgattccccgacgg

SEQ ID NO: 3857 - DNA, 26 bp, Homo Sapiens
agaccggggttcgattccccgacggg

SEQ ID NO: 3858 - DNA, 27 bp, Homo Sapiens
agaccggggttcgattccccgacgggg

SEQ ID NO: 3859 - DNA, 28 bp, Homo Sapiens
agaccggggttcgattccccgacgggga

SEQ ID NO: 3860 - DNA, 29 bp, Homo Sapiens
agaccggggttcgattccccgacggggag

SEQ ID NO: 3861 - DNA, 30 bp, Homo Sapiens
agaccggggttcgattccccgacggggagc

SEQ ID NO: 3862 - DNA, 31 bp, Homo Sapiens
agaccggggttcgattccccgacggggagcc

SEQ ID NO: 3863 - DNA, 32 bp, Homo Sapiens
agaccggggttcgattccccgacggggagcca

SEQ ID NO: 3864 - DNA, 16 bp, Homo Sapiens
agacgggctcacatca

SEQ ID NO: 3865 - DNA, 17 bp, Homo Sapiens
agacgggctcacatcac

SEQ ID NO: 3866 - DNA, 18 bp, Homo Sapiens
agacgggctcacatcacc

SEQ ID NO: 3867 - DNA, 19 bp, Homo Sapiens
agacgggctcacatcaccc

SEQ ID NO: 3868 - DNA, 20 bp, Homo Sapiens
agacgggctcacatcacccc

SEQ ID NO: 3869 - DNA, 21 bp, Homo Sapiens
agacgggctcacatcacccca

SEQ ID NO: 3870 - DNA, 23 bp, Homo Sapiens
agacgggctcacatcaccccata

SEQ ID NO: 3871 - DNA, 24 bp, Homo Sapiens
agacgggctcacatcaccccataa

SEQ ID NO: 3872 - DNA, 25 bp, Homo Sapiens
agacgggctcacatcaccccataaa

SEQ ID NO: 3873 - DNA, 26 bp, Homo Sapiens
agacgggctcacatcaccccataaac

SEQ ID NO: 3874 - DNA, 27 bp, Homo Sapiens
agacgggctcacatcaccccataaaca

SEQ ID NO: 3875 - DNA, 28 bp, Homo Sapiens
agacgggctcacatcaccccataaacac

SEQ ID NO: 3876 - DNA, 29 bp, Homo Sapiens
agacgggctcacatcaccccataaacacc

SEQ ID NO: 3877 - DNA, 30 bp, Homo Sapiens
agacgggctcacatcaccccataaacacca

SEQ ID NO: 3878 - DNA, 18 bp, Homo Sapiens
agactcaagttctggtct

SEQ ID NO: 3879 - DNA, 20 bp, Homo Sapiens
agactcaagttctggtctcc

SEQ ID NO: 3880 - DNA, 23 bp, Homo Sapiens
agactcaagttctggtctccaat

SEQ ID NO: 3881 - DNA, 24 bp, Homo Sapiens
agactcaagttctggtctccaatg

SEQ ID NO: 3882 - DNA, 22 bp, Homo Sapiens
agactcaagttctggtctccgg

SEQ ID NO: 3883 - DNA, 23 bp, Homo Sapiens
agactcaagttctggtctccgga

SEQ ID NO: 3884 - DNA, 24 bp, Homo Sapiens
agactcaagttctggtctccggat

SEQ ID NO: 3885 - DNA, 25 bp, Homo Sapiens
agactcaagttctggtctccggatg

SEQ ID NO: 3886 - DNA, 36 bp, Homo Sapiens
agactcaagttctggtctccggatggaggcgtgggt

SEQ ID NO: 3887 - DNA, 37 bp, Homo Sapiens
agactcaagttctggtctccggatggaggcgtgggtt

SEQ ID NO: 3888 - DNA, 47 bp, Homo Sapiens
agactcttaatctcagggtcgtgggttcgagccccacgttgggcgcc

SEQ ID NO: 3889 - DNA, 39 bp, Homo Sapiens
agacttttaatctgagggtccagggttcaagtccctgtt

SEQ ID NO: 3890 - DNA, 16 bp, Homo Sapiens
agactttttctctgac

SEQ ID NO: 3891 - DNA, 17 bp, Homo Sapiens
agactttttctctgacc

SEQ ID NO: 3892 - DNA, 18 bp, Homo Sapiens
agactttttctctgacca

SEQ ID NO: 3893 - DNA, 16 bp, Homo Sapiens
agagaaccaacacctc

SEQ ID NO: 3894 - DNA, 17 bp, Homo Sapiens
agagaaccaacacctct

SEQ ID NO: 3895 - DNA, 19 bp, Homo Sapiens
agagaaccaacacctcttt

SEQ ID NO: 3896 - DNA, 23 bp, Homo Sapiens
agagaaccaacacctctttacag

SEQ ID NO: 3897 - DNA, 25 bp, Homo Sapiens
agagaaccaacacctctttacagtg

SEQ ID NO: 3898 - DNA, 26 bp, Homo Sapiens
agagaaccaacacctctttacagtga

SEQ ID NO: 3899 - DNA, 27 bp, Homo Sapiens
agagaaccaacacctctttacagtgac

SEQ ID NO: 3900 - DNA, 28 bp, Homo Sapiens
agagaaccaacacctctttacagtgacc

SEQ ID NO: 3901 - DNA, 29 bp, Homo Sapiens
agagaaccaacacctctttacagtgacca

SEQ ID NO: 3902 - DNA, 23 bp, Homo Sapiens
agagaatagtttaaattagaatc

SEQ ID NO: 3903 - DNA, 32 bp, Homo Sapiens
agagaatagtttaaattagaatcttagctttg

SEQ ID NO: 3904 - DNA, 33 bp, Homo Sapiens
agagaatagtttaaattagaatcttagctttgg

SEQ ID NO: 3905 - DNA, 20 bp, Homo Sapiens
agagcactggtcttgtaaac

SEQ ID NO: 3906 - DNA, 21 bp, Homo Sapiens
agagcatgagactcttaatct

SEQ ID NO: 3907 - DNA, 22 bp, Homo Sapiens
agagcatgagactcttaatctc

SEQ ID NO: 3908 - DNA, 29 bp, Homo Sapiens
agagcatgagactcttaatctcagggtcg

SEQ ID NO: 3909 - DNA, 30 bp, Homo Sapiens
agagcatgagactcttaatctcagggtcgt

SEQ ID NO: 3910 - DNA, 31 bp, Homo Sapiens
agagcatgagactcttaatctcagggtcgtg

SEQ ID NO: 3911 - DNA, 32 bp, Homo Sapiens
agagcatgagactcttaatctcagggtcgtgg

SEQ ID NO: 3912 - DNA, 34 bp, Homo Sapiens
agagcatgagactcttaatctcagggtcgtgggt

SEQ ID NO: 3913 - DNA, 35 bp, Homo Sapiens
agagcatgagactcttaatctcagggtcgtgggtt

SEQ ID NO: 3914 - DNA, 37 bp, Homo Sapiens
agagcatgagactcttaatctcagggtcgtgggttcg

SEQ ID NO: 3915 - DNA, 16 bp, Homo Sapiens
agagcatgggactctt

SEQ ID NO: 3916 - DNA, 21 bp, Homo Sapiens
agagcatgggactcttaatcc

SEQ ID NO: 3917 - DNA, 22 bp, Homo Sapiens
agagcatgggactcttaatccc

SEQ ID NO: 3918 - DNA, 29 bp, Homo Sapiens
agagcatgggactcttaatcccagggtcg

SEQ ID NO: 3919 - DNA, 30 bp, Homo Sapiens
agagcatgggactcttaatcccagggtcgt

SEQ ID NO: 3920 - DNA, 31 bp, Homo Sapiens
agagcatgggactcttaatcccagggtcgtg

SEQ ID NO: 3921 - DNA, 32 bp, Homo Sapiens
agagcatgggactcttaatcccagggtcgtgg

SEQ ID NO: 3922 - DNA, 33 bp, Homo Sapiens
agagcatgggactcttaatcccagggtcgtggg

SEQ ID NO: 3923 - DNA, 34 bp, Homo Sapiens
agagcatgggactcttaatcccagggtcgtgggt

SEQ ID NO: 3924 - DNA, 35 bp, Homo Sapiens
agagcatgggactcttaatcccagggtcgtgggtt

SEQ ID NO: 3925 - DNA, 36 bp, Homo Sapiens
agagcatgggactcttaatcccagggtcgtgggttc

SEQ ID NO: 3926 - DNA, 37 bp, Homo Sapiens
agagcatgggactcttaatcccagggtcgtgggttcg

SEQ ID NO: 3927 - DNA, 43 bp, Homo Sapiens
agagcatgggactcttaatcccagggtcgtgggttcgagcccc

SEQ ID NO: 3928 - DNA, 47 bp, Homo Sapiens
agagcatgggactcttaatcccagggtcgtgggttcgagccccacgt

SEQ ID NO: 3929 - DNA, 32 bp, Homo Sapiens
agagcatgggactcttaatctcagggtcgtgg

SEQ ID NO: 3930 - DNA, 35 bp, Homo Sapiens
agagcatgggactcttaatctcagggtcgtgggtt

SEQ ID NO: 3931 - DNA, 16 bp, Homo Sapiens
agagcatttgactgca

SEQ ID NO: 3932 - DNA, 33 bp, Homo Sapiens
agagcatttgactgcagatcaagaggtccccgg

SEQ ID NO: 3933 - DNA, 21 bp, Homo Sapiens
agagccagactgcctgggttt

SEQ ID NO: 3934 - DNA, 19 bp, Homo Sapiens
agagcccggtaatcgcata

SEQ ID NO: 3935 - DNA, 23 bp, Homo Sapiens
agagcccggtaatcgcataaaac

SEQ ID NO: 3936 - DNA, 26 bp, Homo Sapiens
agagcccggtaatcgcataaaactta

SEQ ID NO: 3937 - DNA, 27 bp, Homo Sapiens
agagcccggtaatcgcataaaacttaa

SEQ ID NO: 3938 - DNA, 28 bp, Homo Sapiens
agagcccggtaatcgcataaaacttaaa

SEQ ID NO: 3939 - DNA, 29 bp, Homo Sapiens
agagcccggtaatcgcataaaacttaaaa

SEQ ID NO: 3940 - DNA, 30 bp, Homo Sapiens
agagcccggtaatcgcataaaacttaaaac

SEQ ID NO: 3941 - DNA, 31 bp, Homo Sapiens
agagcccggtaatcgcataaaacttaaaact

SEQ ID NO: 3942 - DNA, 32 bp, Homo Sapiens
agagcccggtaatcgcataaaacttaaaactt

SEQ ID NO: 3943 - DNA, 33 bp, Homo Sapiens
agagcccggtaatcgcataaaacttaaaacttt

SEQ ID NO: 3944 - DNA, 35 bp, Homo Sapiens
agagcccggtaatcgcataaaacttaaaactttac

SEQ ID NO: 3945 - DNA, 36 bp, Homo Sapiens
agagcccggtaatcgcataaaacttaaaactttaca

SEQ ID NO: 3946 - DNA, 28 bp, Homo Sapiens
agagccttcaaagccctcagtaagttgc

SEQ ID NO: 3947 - DNA, 30 bp, Homo Sapiens
agagcgcgtgcttagcatgcacgaggcccc

SEQ ID NO: 3948 - DNA, 35 bp, Homo Sapiens
agagcgtggtgctaataacgccaaggtcgcgggtt

SEQ ID NO: 3949 - DNA, 16 bp, Homo Sapiens
agaggcttacgacccc

SEQ ID NO: 3950 - DNA, 17 bp, Homo Sapiens
agaggcttacgacccct

SEQ ID NO: 3951 - DNA, 19 bp, Homo Sapiens
agaggcttacgacccctta

SEQ ID NO: 3952 - DNA, 24 bp, Homo Sapiens
agaggcttacgaccccttatttac

SEQ ID NO: 3953 - DNA, 25 bp, Homo Sapiens
agaggcttacgaccccttatttacc

SEQ ID NO: 3954 - DNA, 26 bp, Homo Sapiens
agaggcttacgaccccttatttaccc

SEQ ID NO: 3955 - DNA, 27 bp, Homo Sapiens
agaggcttacgaccccttatttacccc

SEQ ID NO: 3956 - DNA, 28 bp, Homo Sapiens
agaggcttacgaccccttatttacccca

SEQ ID NO: 3957 - DNA, 16 bp, Homo Sapiens
agaggtccccggttca

SEQ ID NO: 3958 - DNA, 16 bp, Homo Sapiens
agaggtcccgggttca

SEQ ID NO: 3959 - DNA, 26 bp, Homo Sapiens
agaggtcccgggttcaaatcccggac

SEQ ID NO: 3960 - DNA, 32 bp, Homo Sapiens
agaggtcccgggttcaaatcccggacgagccc

SEQ ID NO: 3961 - DNA, 33 bp, Homo Sapiens
agaggtcccgggttcaaatcccggacgagcccc

SEQ ID NO: 3962 - DNA, 34 bp, Homo Sapiens
agaggtcccgggttcaaatcccggacgagccccc

SEQ ID NO: 3963 - DNA, 16 bp, Homo Sapiens
agaggtccctggttca

SEQ ID NO: 3964 - DNA, 22 bp, Homo Sapiens
agaggtccctggttcaaatccg

SEQ ID NO: 3965 - DNA, 23 bp, Homo Sapiens
agaggtccctggttcaaatccgg

SEQ ID NO: 3966 - DNA, 26 bp, Homo Sapiens
agaggtccctggttcaaatccgggtg

SEQ ID NO: 3967 - DNA, 16 bp, Homo Sapiens
agaggtcgatggatcg

SEQ ID NO: 3968 - DNA, 20 bp, Homo Sapiens
agaggtcgatggatcgaaac

SEQ ID NO: 3969 - DNA, 21 bp, Homo Sapiens
agaggtcgatggatcgaaacc

SEQ ID NO: 3970 - DNA, 22 bp, Homo Sapiens
agaggtcgatggatcgaaacca

SEQ ID NO: 3971 - DNA, 23 bp, Homo Sapiens
agaggtcgatggatcgaaaccat

SEQ ID NO: 3972 - DNA, 25 bp, Homo Sapiens
agaggtcgatggatcgaaaccatcc

SEQ ID NO: 3973 - DNA, 26 bp, Homo Sapiens
agaggtcgatggatcgaaaccatcct

SEQ ID NO: 3974 - DNA, 27 bp, Homo Sapiens
agaggtcgatggatcgaaaccatcctc

SEQ ID NO: 3975 - DNA, 16 bp, Homo Sapiens
agaggttccgggttcg

SEQ ID NO: 3976 - DNA, 25 bp, Homo Sapiens
agaggttccgggttcgagtcccggc

SEQ ID NO: 3977 - DNA, 32 bp, Homo Sapiens
agaggttccgggttcgagtcccggcagagatg

SEQ ID NO: 3978 - DNA, 33 bp, Homo Sapiens
agaggttccgggttcgagtcccggcagagatgc

SEQ ID NO: 3979 - DNA, 34 bp, Homo Sapiens
agaggttccgggttcgagtcccggcagagatgcc

SEQ ID NO: 3980 - DNA, 35 bp, Homo Sapiens
agaggttccgggttcgagtcccggcagagatgcca

SEQ ID NO: 3981 - DNA, 16 bp, Homo Sapiens
agagtaaataatagga

SEQ ID NO: 3982 - DNA, 17 bp, Homo Sapiens
agagtaaataataggag

SEQ ID NO: 3983 - DNA, 18 bp, Homo Sapiens
agagtaaataataggagc

SEQ ID NO: 3984 - DNA, 19 bp, Homo Sapiens
agagtaaataataggagct

SEQ ID NO: 3985 - DNA, 20 bp, Homo Sapiens
agagtaaataataggagctt

SEQ ID NO: 3986 - DNA, 21 bp, Homo Sapiens
agagtaaataataggagctta

SEQ ID NO: 3987 - DNA, 22 bp, Homo Sapiens
agagtaaataataggagcttaa

SEQ ID NO: 3988 - DNA, 23 bp, Homo Sapiens
agagtaaataataggagcttaaa

SEQ ID NO: 3989 - DNA, 24 bp, Homo Sapiens
agagtaaataataggagcttaaac

SEQ ID NO: 3990 - DNA, 25 bp, Homo Sapiens
agagtaaataataggagcttaaacc

SEQ ID NO: 3991 - DNA, 26 bp, Homo Sapiens
agagtaaataataggagcttaaaccc

SEQ ID NO: 3992 - DNA, 27 bp, Homo Sapiens
agagtaaataataggagcttaaacccc

SEQ ID NO: 3993 - DNA, 28 bp, Homo Sapiens
agagtaaataataggagcttaaaccccc

SEQ ID NO: 3994 - DNA, 29 bp, Homo Sapiens
agagtaaataataggagcttaaaccccct

SEQ ID NO: 3995 - DNA, 30 bp, Homo Sapiens
agagtaaataataggagcttaaaccccctt

SEQ ID NO: 3996 - DNA, 31 bp, Homo Sapiens
agagtaaataataggagcttaaaccccctta

SEQ ID NO: 3997 - DNA, 32 bp, Homo Sapiens
agagtaaataataggagcttaaacccccttat

SEQ ID NO: 3998 - DNA, 33 bp, Homo Sapiens
agagtaaataataggagcttaaacccccttatt

SEQ ID NO: 3999 - DNA, 34 bp, Homo Sapiens
agagtaaataataggagcttaaacccccttattt

SEQ ID NO: 4000 - DNA, 36 bp, Homo Sapiens
agagtaaataataggagcttaaacccccttatttct

SEQ ID NO: 4001 - DNA, 37 bp, Homo Sapiens
agagtaaataataggagcttaaacccccttatttcta

SEQ ID NO: 4002 - DNA, 39 bp, Homo Sapiens
agagtaaataataggagcttaaacccccttatttctacc

SEQ ID NO: 4003 - DNA, 18 bp, Homo Sapiens
agagtggcgcagcggaag

SEQ ID NO: 4004 - DNA, 20 bp, Homo Sapiens
agagtggcgcagcggaagcg

SEQ ID NO: 4005 - DNA, 25 bp, Homo Sapiens
agagtggcgcagcggaagcgtgctg

SEQ ID NO: 4006 - DNA, 27 bp, Homo Sapiens
agagtggcgcagcggaagcgtgctggg

SEQ ID NO: 4007 - DNA, 28 bp, Homo Sapiens
agagtggcgcagcggaagcgtgctgggc

SEQ ID NO: 4008 - DNA, 29 bp, Homo Sapiens
agagtggcgcagcggaagcgtgctgggcc

SEQ ID NO: 4009 - DNA, 30 bp, Homo Sapiens
agagtggcgcagcggaagcgtgctgggccc

SEQ ID NO: 4010 - DNA, 31 bp, Homo Sapiens
agagtggcgcagcggaagcgtgctgggccca

SEQ ID NO: 4011 - DNA, 32 bp, Homo Sapiens
agagtggcgcagcggaagcgtgctgggcccat

SEQ ID NO: 4012 - DNA, 36 bp, Homo Sapiens
agagtggcgcagcggaagcgtgctgggcccataacc

SEQ ID NO: 4013 - DNA, 46 bp, Homo Sapiens
agagtggcgcagcggaagcgtgctgggcccataacccagaggtcga

SEQ ID NO: 4014 - DNA, 16 bp, Homo Sapiens
agagtggggttttgca

SEQ ID NO: 4015 - DNA, 20 bp, Homo Sapiens
agagtggggttttgcagtcc

SEQ ID NO: 4016 - DNA, 21 bp, Homo Sapiens
agagtggggttttgcagtcct

SEQ ID NO: 4017 - DNA, 23 bp, Homo Sapiens
agagtggggttttgcagtcctta

SEQ ID NO: 4018 - DNA, 25 bp, Homo Sapiens
agagtggggttttgcagtccttacc

SEQ ID NO: 4019 - DNA, 26 bp, Homo Sapiens
agagtggggttttgcagtccttacca

SEQ ID NO: 4020 - DNA, 25 bp, Homo Sapiens
agagtgtagcttaacacaaagcacc

SEQ ID NO: 4021 - DNA, 26 bp, Homo Sapiens
agagtgtagcttaacacaaagcaccc

SEQ ID NO: 4022 - DNA, 27 bp, Homo Sapiens
agagtgtagcttaacacaaagcaccca

SEQ ID NO: 4023 - DNA, 28 bp, Homo Sapiens
agagtgtagcttaacacaaagcacccaa

SEQ ID NO: 4024 - DNA, 30 bp, Homo Sapiens
agagtgtagcttaacacaaagcacccaact

SEQ ID NO: 4025 - DNA, 31 bp, Homo Sapiens
agagtgtagcttaacacaaagcacccaactt

SEQ ID NO: 4026 - DNA, 16 bp, Homo Sapiens
agagttactttgatag

SEQ ID NO: 4027 - DNA, 19 bp, Homo Sapiens
agagttactttgatagagt

SEQ ID NO: 4028 - DNA, 31 bp, Homo Sapiens
agagttactttgatagagtaaataataggag

SEQ ID NO: 4029 - DNA, 32 bp, Homo Sapiens
agagttactttgatagagtaaataataggagc

SEQ ID NO: 4030 - DNA, 33 bp, Homo Sapiens
agagttactttgatagagtaaataataggagct

SEQ ID NO: 4031 - DNA, 34 bp, Homo Sapiens
agagttactttgatagagtaaataataggagctt

SEQ ID NO: 4032 - DNA, 16 bp, Homo Sapiens
agatcaagaggtcccc

SEQ ID NO: 4033 - DNA, 17 bp, Homo Sapiens
agatcaagaggtccccg

SEQ ID NO: 4034 - DNA, 24 bp, Homo Sapiens
agatcacgggttcgaaccccgtcc

SEQ ID NO: 4035 - DNA, 21 bp, Homo Sapiens
agatcagaaggctgcgtgttc

SEQ ID NO: 4036 - DNA, 33 bp, Homo Sapiens
agatcagaaggctgcgtgttcgaatcacgtcgg

SEQ ID NO: 4037 - DNA, 40 bp, Homo Sapiens
agatcagaaggctgcgtgttcgaatcacgtcggggtcacc

SEQ ID NO: 4038 - DNA, 21 bp, Homo Sapiens
agatcagaaggttgcgtgttc

SEQ ID NO: 4039 - DNA, 22 bp, Homo Sapiens
agatcagaaggttgcgtgttca

SEQ ID NO: 4040 - DNA, 40 bp, Homo Sapiens
agatcagaaggttgcgtgttcaaatcacgtcggggtcacc

SEQ ID NO: 4041 - DNA, 34 bp, Homo Sapiens
agatcagaaggttgcgtgttcaagtcacgtcggg

SEQ ID NO: 4042 - DNA, 36 bp, Homo Sapiens
agatcagaaggttgcgtgttcaagtcacgtcggggt

SEQ ID NO: 4043 - DNA, 37 bp, Homo Sapiens
agatcagaaggttgcgtgttcaagtcacgtcggggtc

SEQ ID NO: 4044 - DNA, 39 bp, Homo Sapiens
agatcagaaggttgcgtgttcaagtcacgtcggggtcac

SEQ ID NO: 4045 - DNA, 40 bp, Homo Sapiens
agatcagaaggttgcgtgttcaagtcacgtcggggtcacc

SEQ ID NO: 4046 - DNA, 41 bp, Homo Sapiens
agatcagaaggttgcgtgttcaagtcacgtcggggtcacca

SEQ ID NO: 4047 - DNA, 28 bp, Homo Sapiens
agatcctgggttcgaatcccagcggggc

SEQ ID NO: 4048 - DNA, 29 bp, Homo Sapiens
agatcctgggttcgaatcccagcggggcc

SEQ ID NO: 4049 - DNA, 31 bp, Homo Sapiens
agatcctgggttcgaatcccagcggggcctc

SEQ ID NO: 4050 - DNA, 32 bp, Homo Sapiens
agatcctgggttcgaatcccagcggggcctcc

SEQ ID NO: 4051 - DNA, 27 bp, Homo Sapiens
agatcctgggttcgaatcccagcggtg

SEQ ID NO: 4052 - DNA, 31 bp, Homo Sapiens
agatcctgggttcgaatcccagcggtgcctc

SEQ ID NO: 4053 - DNA, 32 bp, Homo Sapiens
agatcctgggttcgaatcccagcggtgcctcc

SEQ ID NO: 4054 - DNA, 29 bp, Homo Sapiens
agatcctgggttcgactcccagtggggcc

SEQ ID NO: 4055 - DNA, 18 bp, Homo Sapiens
agatcgcgggttcgaacc

SEQ ID NO: 4056 - DNA, 19 bp, Homo Sapiens
agatcgcgggttcgaaccc

SEQ ID NO: 4057 - DNA, 32 bp, Homo Sapiens
agatcgcgggttcgaaccccgtccgtgcctcc

SEQ ID NO: 4058 - DNA, 24 bp, Homo Sapiens
agatgaaaacctttttccaaggac

SEQ ID NO: 4059 - DNA, 25 bp, Homo Sapiens
agatgaaaacctttttccaaggaca

SEQ ID NO: 4060 - DNA, 26 bp, Homo Sapiens
agatgaaaacctttttccaaggacac

SEQ ID NO: 4061 - DNA, 27 bp, Homo Sapiens
agatgaaaacctttttccaaggacacc

SEQ ID NO: 4062 - DNA, 28 bp, Homo Sapiens
agatgaaaacctttttccaaggacacca

SEQ ID NO: 4063 - DNA, 17 bp, Homo Sapiens
agatggcagagcccggt

SEQ ID NO: 4064 - DNA, 18 bp, Homo Sapiens
agatggcagagcccggta

SEQ ID NO: 4065 - DNA, 19 bp, Homo Sapiens
agatggcagagcccggtaa

SEQ ID NO: 4066 - DNA, 20 bp, Homo Sapiens
agatggcagagcccggtaat

SEQ ID NO: 4067 - DNA, 26 bp, Homo Sapiens
agatggcagagcccggtaatcgcata

SEQ ID NO: 4068 - DNA, 28 bp, Homo Sapiens
agatggcagagcccggtaatcgcataaa

SEQ ID NO: 4069 - DNA, 30 bp, Homo Sapiens
agatggcagagcccggtaatcgcataaaac

SEQ ID NO: 4070 - DNA, 31 bp, Homo Sapiens
agatggcagagcccggtaatcgcataaaact

SEQ ID NO: 4071 - DNA, 33 bp, Homo Sapiens
agatggcagagcccggtaatcgcataaaactta

SEQ ID NO: 4072 - DNA, 34 bp, Homo Sapiens
agatggcagagcccggtaatcgcataaaacttaa

SEQ ID NO: 4073 - DNA, 35 bp, Homo Sapiens
agatggcagagcccggtaatcgcataaaacttaaa

SEQ ID NO: 4074 - DNA, 36 bp, Homo Sapiens
agatggcagagcccggtaatcgcataaaacttaaaa

SEQ ID NO: 4075 - DNA, 37 bp, Homo Sapiens
agatggcagagcccggtaatcgcataaaacttaaaac

SEQ ID NO: 4076 - DNA, 38 bp, Homo Sapiens
agatggcagagcccggtaatcgcataaaacttaaaact

SEQ ID NO: 4077 - DNA, 39 bp, Homo Sapiens
agatggcagagcccggtaatcgcataaaacttaaaactt

SEQ ID NO: 4078 - DNA, 16 bp, Homo Sapiens
agattaagagaaccaa

SEQ ID NO: 4079 - DNA, 17 bp, Homo Sapiens
agattaagagaaccaac

SEQ ID NO: 4080 - DNA, 18 bp, Homo Sapiens
agattaagagaaccaaca

SEQ ID NO: 4081 - DNA, 19 bp, Homo Sapiens
agattaagagaaccaacac

SEQ ID NO: 4082 - DNA, 20 bp, Homo Sapiens
agattaagagaaccaacacc

SEQ ID NO: 4083 - DNA, 21 bp, Homo Sapiens
agattaagagaaccaacacct

SEQ ID NO: 4084 - DNA, 22 bp, Homo Sapiens
agattaagagaaccaacacctc

SEQ ID NO: 4085 - DNA, 23 bp, Homo Sapiens
agattaagagaaccaacacctct

SEQ ID NO: 4086 - DNA, 24 bp, Homo Sapiens
agattaagagaaccaacacctctt

SEQ ID NO: 4087 - DNA, 25 bp, Homo Sapiens
agattaagagaaccaacacctcttt

SEQ ID NO: 4088 - DNA, 26 bp, Homo Sapiens
agattaagagaaccaacacctcttta

SEQ ID NO: 4089 - DNA, 29 bp, Homo Sapiens
agattaagagaaccaacacctctttacag

SEQ ID NO: 4090 - DNA, 31 bp, Homo Sapiens
agattaagagaaccaacacctctttacagtg

SEQ ID NO: 4091 - DNA, 32 bp, Homo Sapiens
agattaagagaaccaacacctctttacagtga

SEQ ID NO: 4092 - DNA, 33 bp, Homo Sapiens
agattaagagaaccaacacctctttacagtgac

SEQ ID NO: 4093 - DNA, 34 bp, Homo Sapiens
agattaagagaaccaacacctctttacagtgacc

SEQ ID NO: 4094 - DNA, 35 bp, Homo Sapiens
agattaagagaaccaacacctctttacagtgacca

SEQ ID NO: 4095 - DNA, 17 bp, Homo Sapiens
agattccaggttcgact

SEQ ID NO: 4096 - DNA, 18 bp, Homo Sapiens
agattccaggttcgactc

SEQ ID NO: 4097 - DNA, 21 bp, Homo Sapiens
agattccaggttcgactcctg

SEQ ID NO: 4098 - DNA, 30 bp, Homo Sapiens
agattccaggttcgactcctggctggctcg

SEQ ID NO: 4099 - DNA, 31 bp, Homo Sapiens
agattccaggttcgactcctggctggctcgc

SEQ ID NO: 4100 - DNA, 32 bp, Homo Sapiens
agattccaggttcgactcctggctggctcgcc

SEQ ID NO: 4101 - DNA, 33 bp, Homo Sapiens
agattccaggttcgactcctggctggctcgcca

SEQ ID NO: 4102 - DNA, 19 bp, Homo Sapiens
agattcccattcttgcgac

SEQ ID NO: 4103 - DNA, 23 bp, Homo Sapiens
agattcccattcttgcgacccgg

SEQ ID NO: 4104 - DNA, 46 bp, Homo Sapiens
agattcccattcttgcgacccgggttcgattcccgggcggcgcacc

SEQ ID NO: 4105 - DNA, 16 bp, Homo Sapiens
agattctaggttcgac

SEQ ID NO: 4106 - DNA, 17 bp, Homo Sapiens
agattctaggttcgact

SEQ ID NO: 4107 - DNA, 18 bp, Homo Sapiens
agattctaggttcgactc

SEQ ID NO: 4108 - DNA, 23 bp, Homo Sapiens
agattctaggttcgactcctggc

SEQ ID NO: 4109 - DNA, 29 bp, Homo Sapiens
agattctaggttcgactcctggctggctc

SEQ ID NO: 4110 - DNA, 30 bp, Homo Sapiens
agattctaggttcgactcctggctggctcg

SEQ ID NO: 4111 - DNA, 31 bp, Homo Sapiens
agattctaggttcgactcctggctggctcgc

SEQ ID NO: 4112 - DNA, 32 bp, Homo Sapiens
agattctaggttcgactcctggctggctcgcc

SEQ ID NO: 4113 - DNA, 33 bp, Homo Sapiens
agattctaggttcgactcctggctggctcgcca

SEQ ID NO: 4114 - DNA, 21 bp, Homo Sapiens
agattgagggttcgaatccct

SEQ ID NO: 4115 - DNA, 30 bp, Homo Sapiens
agattgagggttcgaatcccttcgtggttg

SEQ ID NO: 4116 - DNA, 31 bp, Homo Sapiens
agattgagggttcgaatcccttcgtggttgc

SEQ ID NO: 4117 - DNA, 32 bp, Homo Sapiens
agattgagggttcgaatcccttcgtggttgcc

SEQ ID NO: 4118 - DNA, 33 bp, Homo Sapiens
agattgagggttcgaatcccttcgtggttgcca

SEQ ID NO: 4119 - DNA, 18 bp, Homo Sapiens
agattgagggttcgagtc

SEQ ID NO: 4120 - DNA, 19 bp, Homo Sapiens
agattgagggttcgagtcc

SEQ ID NO: 4121 - DNA, 21 bp, Homo Sapiens
agattgagggttcgagtccct

SEQ ID NO: 4122 - DNA, 30 bp, Homo Sapiens
agattgagggttcgagtcccttcgtggtcg

SEQ ID NO: 4123 - DNA, 31 bp, Homo Sapiens
agattgagggttcgagtcccttcgtggtcgc

SEQ ID NO: 4124 - DNA, 32 bp, Homo Sapiens
agattgagggttcgagtcccttcgtggtcgcc

SEQ ID NO: 4125 - DNA, 33 bp, Homo Sapiens
agattgagggttcgagtcccttcgtggtcgcca

SEQ ID NO: 4126 - DNA, 18 bp, Homo Sapiens
agattgcaggttcgagtc

SEQ ID NO: 4127 - DNA, 21 bp, Homo Sapiens
agattgcaggttcgagtcctg

SEQ ID NO: 4128 - DNA, 23 bp, Homo Sapiens
agattgcaggttcgagtcctgcc

SEQ ID NO: 4129 - DNA, 29 bp, Homo Sapiens
agattgcaggttcgagtcctgccgcggtc

SEQ ID NO: 4130 - DNA, 30 bp, Homo Sapiens
agattgcaggttcgagtcctgccgcggtcg

SEQ ID NO: 4131 - DNA, 31 bp, Homo Sapiens
agattgcaggttcgagtcctgccgcggtcgc

SEQ ID NO: 4132 - DNA, 32 bp, Homo Sapiens
agattgcaggttcgagtcctgccgcggtcgcc

SEQ ID NO: 4133 - DNA, 33 bp, Homo Sapiens
agattgcaggttcgagtcctgccgcggtcgcca

SEQ ID NO: 4134 - DNA, 16 bp, Homo Sapiens
agattgtgaatctgac

SEQ ID NO: 4135 - DNA, 17 bp, Homo Sapiens
agattgtgaatctgaca

SEQ ID NO: 4136 - DNA, 18 bp, Homo Sapiens
agattgtgaatctgacaa

SEQ ID NO: 4137 - DNA, 19 bp, Homo Sapiens
agattgtgaatctgacaac

SEQ ID NO: 4138 - DNA, 20 bp, Homo Sapiens
agattgtgaatctgacaaca

SEQ ID NO: 4139 - DNA, 21 bp, Homo Sapiens
agattgtgaatctgacaacag

SEQ ID NO: 4140 - DNA, 22 bp, Homo Sapiens
agattgtgaatctgacaacaga

SEQ ID NO: 4141 - DNA, 23 bp, Homo Sapiens
agattgtgaatctgacaacagag

SEQ ID NO: 4142 - DNA, 24 bp, Homo Sapiens
agattgtgaatctgacaacagagg

SEQ ID NO: 4143 - DNA, 25 bp, Homo Sapiens
agattgtgaatctgacaacagaggc

SEQ ID NO: 4144 - DNA, 26 bp, Homo Sapiens
agattgtgaatctgacaacagaggct

SEQ ID NO: 4145 - DNA, 27 bp, Homo Sapiens
agattgtgaatctgacaacagaggctt

SEQ ID NO: 4146 - DNA, 28 bp, Homo Sapiens
agattgtgaatctgacaacagaggctta

SEQ ID NO: 4147 - DNA, 29 bp, Homo Sapiens
agattgtgaatctgacaacagaggcttac

SEQ ID NO: 4148 - DNA, 30 bp, Homo Sapiens
agattgtgaatctgacaacagaggcttacg

SEQ ID NO: 4149 - DNA, 31 bp, Homo Sapiens
agattgtgaatctgacaacagaggcttacga

SEQ ID NO: 4150 - DNA, 32 bp, Homo Sapiens
agattgtgaatctgacaacagaggcttacgac

SEQ ID NO: 4151 - DNA, 33 bp, Homo Sapiens
agattgtgaatctgacaacagaggcttacgacc

SEQ ID NO: 4152 - DNA, 34 bp, Homo Sapiens
agattgtgaatctgacaacagaggcttacgaccc

SEQ ID NO: 4153 - DNA, 35 bp, Homo Sapiens
agattgtgaatctgacaacagaggcttacgacccc

SEQ ID NO: 4154 - DNA, 36 bp, Homo Sapiens
agattgtgaatctgacaacagaggcttacgacccct

SEQ ID NO: 4155 - DNA, 37 bp, Homo Sapiens
agattgtgaatctgacaacagaggcttacgacccctt

SEQ ID NO: 4156 - DNA, 38 bp, Homo Sapiens
agattgtgaatctgacaacagaggcttacgacccctta

SEQ ID NO: 4157 - DNA, 39 bp, Homo Sapiens
agattgtgaatctgacaacagaggcttacgaccccttat

SEQ ID NO: 4158 - DNA, 40 bp, Homo Sapiens
agattgtgaatctgacaacagaggcttacgaccccttatt

SEQ ID NO: 4159 - DNA, 41 bp, Homo Sapiens
agattgtgaatctgacaacagaggcttacgaccccttattt

SEQ ID NO: 4160 - DNA, 42 bp, Homo Sapiens
agattgtgaatctgacaacagaggcttacgaccccttattta

SEQ ID NO: 4161 - DNA, 43 bp, Homo Sapiens
agattgtgaatctgacaacagaggcttacgaccccttatttac

SEQ ID NO: 4162 - DNA, 44 bp, Homo Sapiens
agattgtgaatctgacaacagaggcttacgaccccttatttacc

SEQ ID NO: 4163 - DNA, 45 bp, Homo Sapiens
agattgtgaatctgacaacagaggcttacgaccccttatttaccc

SEQ ID NO: 4164 - DNA, 46 bp, Homo Sapiens
agattgtgaatctgacaacagaggcttacgaccccttatttacccc

SEQ ID NO: 4165 - DNA, 47 bp, Homo Sapiens
agattgtgaatctgacaacagaggcttacgaccccttatttacccca

SEQ ID NO: 4166 - DNA, 18 bp, Homo Sapiens
agatttcaacttaacttg

SEQ ID NO: 4167 - DNA, 19 bp, Homo Sapiens
agatttcaacttaacttga

SEQ ID NO: 4168 - DNA, 20 bp, Homo Sapiens
agatttcaacttaacttgac

SEQ ID NO: 4169 - DNA, 21 bp, Homo Sapiens
agatttcaacttaacttgacc

SEQ ID NO: 4170 - DNA, 22 bp, Homo Sapiens
agatttcaacttaacttgaccg

SEQ ID NO: 4171 - DNA, 23 bp, Homo Sapiens
agatttcaacttaacttgaccgc

SEQ ID NO: 4172 - DNA, 24 bp, Homo Sapiens
agatttcaacttaacttgaccgct

SEQ ID NO: 4173 - DNA, 25 bp, Homo Sapiens
agatttcaacttaacttgaccgctc

SEQ ID NO: 4174 - DNA, 26 bp, Homo Sapiens
agatttcaacttaacttgaccgctct

SEQ ID NO: 4175 - DNA, 27 bp, Homo Sapiens
agatttcaacttaacttgaccgctctg

SEQ ID NO: 4176 - DNA, 28 bp, Homo Sapiens
agatttcaacttaacttgaccgctctga

SEQ ID NO: 4177 - DNA, 29 bp, Homo Sapiens
agatttcaacttaacttgaccgctctgac

SEQ ID NO: 4178 - DNA, 30 bp, Homo Sapiens
agatttcaacttaacttgaccgctctgacc

SEQ ID NO: 4179 - DNA, 31 bp, Homo Sapiens
agatttcaacttaacttgaccgctctgacca

SEQ ID NO: 4180 - DNA, 22 bp, Homo Sapiens
agcaacctcggttcgaatccga

SEQ ID NO: 4181 - DNA, 30 bp, Homo Sapiens
agcaacctcggttcgaatccgagtcacggc

SEQ ID NO: 4182 - DNA, 31 bp, Homo Sapiens
agcaacctcggttcgaatccgagtcacggca

SEQ ID NO: 4183 - DNA, 32 bp, Homo Sapiens
agcaacctcggttcgaatccgagtcacggcac

SEQ ID NO: 4184 - DNA, 33 bp, Homo Sapiens
agcaacctcggttcgaatccgagtcacggcacc

SEQ ID NO: 4185 - DNA, 25 bp, Homo Sapiens
agcaatacactgaaaatgtttagac

SEQ ID NO: 4186 - DNA, 26 bp, Homo Sapiens
agcaatacactgaaaatgtttagacg

SEQ ID NO: 4187 - DNA, 27 bp, Homo Sapiens
agcaatacactgaaaatgtttagacgg

SEQ ID NO: 4188 - DNA, 29 bp, Homo Sapiens
agcaatacactgaaaatgtttagacgggc

SEQ ID NO: 4189 - DNA, 30 bp, Homo Sapiens
agcaatacactgaaaatgtttagacgggct

SEQ ID NO: 4190 - DNA, 31 bp, Homo Sapiens
agcaatacactgaaaatgtttagacgggctc

SEQ ID NO: 4191 - DNA, 32 bp, Homo Sapiens
agcaatacactgaaaatgtttagacgggctca

SEQ ID NO: 4192 - DNA, 33 bp, Homo Sapiens
agcaatacactgaaaatgtttagacgggctcac

SEQ ID NO: 4193 - DNA, 34 bp, Homo Sapiens
agcaatacactgaaaatgtttagacgggctcaca

SEQ ID NO: 4194 - DNA, 36 bp, Homo Sapiens
agcaatacactgaaaatgtttagacgggctcacatc

SEQ ID NO: 4195 - DNA, 39 bp, Homo Sapiens
agcaatacactgaaaatgtttagacgggctcacatcacc

SEQ ID NO: 4196 - DNA, 29 bp, Homo Sapiens
agcaatccgagttcgaatctcggtgggac

SEQ ID NO: 4197 - DNA, 30 bp, Homo Sapiens
agcaatccgagttcgaatctcggtgggacc

SEQ ID NO: 4198 - DNA, 31 bp, Homo Sapiens
agcaatccgagttcgaatctcggtgggacct

SEQ ID NO: 4199 - DNA, 32 bp, Homo Sapiens
agcaatccgagttcgaatctcggtgggacctc

SEQ ID NO: 4200 - DNA, 33 bp, Homo Sapiens
agcaatccgagttcgaatctcggtgggacctcc

SEQ ID NO: 4201 - DNA, 16 bp, Homo Sapiens
agcacccaacttacac

SEQ ID NO: 4202 - DNA, 17 bp, Homo Sapiens
agcacccaacttacact

SEQ ID NO: 4203 - DNA, 18 bp, Homo Sapiens
agcacccaacttacactt

SEQ ID NO: 4204 - DNA, 19 bp, Homo Sapiens
agcacccaacttacactta

SEQ ID NO: 4205 - DNA, 25 bp, Homo Sapiens
agcacccaacttacacttaggagat

SEQ ID NO: 4206 - DNA, 27 bp, Homo Sapiens
agcacccaacttacacttaggagattt

SEQ ID NO: 4207 - DNA, 28 bp, Homo Sapiens
agcacccaacttacacttaggagatttc

SEQ ID NO: 4208 - DNA, 29 bp, Homo Sapiens
agcacccaacttacacttaggagatttca

SEQ ID NO: 4209 - DNA, 30 bp, Homo Sapiens
agcacccaacttacacttaggagatttcaa

SEQ ID NO: 4210 - DNA, 31 bp, Homo Sapiens
agcacccaacttacacttaggagatttcaac

SEQ ID NO: 4211 - DNA, 32 bp, Homo Sapiens
agcacccaacttacacttaggagatttcaact

SEQ ID NO: 4212 - DNA, 33 bp, Homo Sapiens
agcacccaacttacacttaggagatttcaactt

SEQ ID NO: 4213 - DNA, 35 bp, Homo Sapiens
agcacccaacttacacttaggagatttcaacttaa

SEQ ID NO: 4214 - DNA, 36 bp, Homo Sapiens
agcacccaacttacacttaggagatttcaacttaac

SEQ ID NO: 4215 - DNA, 37 bp, Homo Sapiens
agcacccaacttacacttaggagatttcaacttaact

SEQ ID NO: 4216 - DNA, 42 bp, Homo Sapiens
agcacccaacttacacttaggagatttcaacttaacttgacc

SEQ ID NO: 4217 - DNA, 46 bp, Homo Sapiens
agcacccaacttacacttaggagatttcaacttaacttgaccgctc

SEQ ID NO: 4218 - DNA, 47 bp, Homo Sapiens
agcacccaacttacacttaggagatttcaacttaacttgaccgctct

SEQ ID NO: 4219 - DNA, 48 bp, Homo Sapiens
agcacccaacttacacttaggagatttcaacttaacttgaccgctctg

SEQ ID NO: 4220 - DNA, 16 bp, Homo Sapiens
agcactctggactctg

SEQ ID NO: 4221 - DNA, 17 bp, Homo Sapiens
agcactctggactctga

SEQ ID NO: 4222 - DNA, 18 bp, Homo Sapiens
agcactctggactctgaa

SEQ ID NO: 4223 - DNA, 19 bp, Homo Sapiens
agcactctggactctgaat

SEQ ID NO: 4224 - DNA, 20 bp, Homo Sapiens
agcactctggactctgaatc

SEQ ID NO: 4225 - DNA, 21 bp, Homo Sapiens
agcactctggactctgaatcc

SEQ ID NO: 4226 - DNA, 22 bp, Homo Sapiens
agcactctggactctgaatcca

SEQ ID NO: 4227 - DNA, 23 bp, Homo Sapiens
agcactctggactctgaatccag

SEQ ID NO: 4228 - DNA, 24 bp, Homo Sapiens
agcactctggactctgaatccagc

SEQ ID NO: 4229 - DNA, 25 bp, Homo Sapiens
agcactctggactctgaatccagcg

SEQ ID NO: 4230 - DNA, 26 bp, Homo Sapiens
agcactctggactctgaatccagcga

SEQ ID NO: 4231 - DNA, 29 bp, Homo Sapiens
agcactctggactctgaatccagcgatcc

SEQ ID NO: 4232 - DNA, 30 bp, Homo Sapiens
agcactctggactctgaatccagcgatccg

SEQ ID NO: 4233 - DNA, 31 bp, Homo Sapiens
agcactctggactctgaatccagcgatccga

SEQ ID NO: 4234 - DNA, 32 bp, Homo Sapiens
agcactctggactctgaatccagcgatccgag

SEQ ID NO: 4235 - DNA, 33 bp, Homo Sapiens
agcactctggactctgaatccagcgatccgagt

SEQ ID NO: 4236 - DNA, 34 bp, Homo Sapiens
agcactctggactctgaatccagcgatccgagtt

SEQ ID NO: 4237 - DNA, 35 bp, Homo Sapiens
agcactctggactctgaatccagcgatccgagttc

SEQ ID NO: 4238 - DNA, 36 bp, Homo Sapiens
agcactctggactctgaatccagcgatccgagttca

SEQ ID NO: 4239 - DNA, 37 bp, Homo Sapiens
agcactctggactctgaatccagcgatccgagttcaa

SEQ ID NO: 4240 - DNA, 38 bp, Homo Sapiens
agcactctggactctgaatccagcgatccgagttcaaa

SEQ ID NO: 4241 - DNA, 39 bp, Homo Sapiens
agcactctggactctgaatccagcgatccgagttcaaat

SEQ ID NO: 4242 - DNA, 44 bp, Homo Sapiens
agcactctggactctgaatccagcgatccgagttcaaatctcgg

SEQ ID NO: 4243 - DNA, 45 bp, Homo Sapiens
agcactctggactctgaatccagcgatccgagttcaaatctcggt

SEQ ID NO: 4244 - DNA, 46 bp, Homo Sapiens
agcactctggactctgaatccagcgatccgagttcaaatctcggtg

SEQ ID NO: 4245 - DNA, 47 bp, Homo Sapiens
agcactctggactctgaatccagcgatccgagttcaaatctcggtgg

SEQ ID NO: 4246 - DNA, 48 bp, Homo Sapiens
agcactctggactctgaatccagcgatccgagttcaaatctcggtgga

SEQ ID NO: 4247 - DNA, 36 bp, Homo Sapiens
agcactctggactctgaatccagcgatccgagttcg

SEQ ID NO: 4248 - DNA, 38 bp, Homo Sapiens
agcactctggactctgaatccagcgatccgagttcgag

SEQ ID NO: 4249 - DNA, 22 bp, Homo Sapiens
agcactctggactctgaatccg

SEQ ID NO: 4250 - DNA, 16 bp, Homo Sapiens
agcactctggactttg

SEQ ID NO: 4251 - DNA, 17 bp, Homo Sapiens
agcactctggactttga

SEQ ID NO: 4252 - DNA, 18 bp, Homo Sapiens
agcactctggactttgaa

SEQ ID NO: 4253 - DNA, 20 bp, Homo Sapiens
agcactctggactttgaatc

SEQ ID NO: 4254 - DNA, 21 bp, Homo Sapiens
agcactctggactttgaatcc

SEQ ID NO: 4255 - DNA, 22 bp, Homo Sapiens
agcactctggactttgaatcca

SEQ ID NO: 4256 - DNA, 23 bp, Homo Sapiens
agcactctggactttgaatccag

SEQ ID NO: 4257 - DNA, 24 bp, Homo Sapiens
agcactctggactttgaatccagc

SEQ ID NO: 4258 - DNA, 28 bp, Homo Sapiens
agcactctggactttgaatccagcgatc

SEQ ID NO: 4259 - DNA, 29 bp, Homo Sapiens
agcactctggactttgaatccagcgatcc

SEQ ID NO: 4260 - DNA, 31 bp, Homo Sapiens
agcactctggactttgaatccagcgatccga

SEQ ID NO: 4261 - DNA, 32 bp, Homo Sapiens
agcactctggactttgaatccagcgatccgag

SEQ ID NO: 4262 - DNA, 33 bp, Homo Sapiens
agcactctggactttgaatccagcgatccgagt

SEQ ID NO: 4263 - DNA, 34 bp, Homo Sapiens
agcactctggactttgaatccagcgatccgagtt

SEQ ID NO: 4264 - DNA, 35 bp, Homo Sapiens
agcactctggactttgaatccagcgatccgagttc

SEQ ID NO: 4265 - DNA, 36 bp, Homo Sapiens
agcactctggactttgaatccagcgatccgagttca

SEQ ID NO: 4266 - DNA, 39 bp, Homo Sapiens
agcactctggactttgaatccagcgatccgagttcaaat

SEQ ID NO: 4267 - DNA, 46 bp, Homo Sapiens
agcactctggactttgaatccagcgatccgagttcaaatctcggtg

SEQ ID NO: 4268 - DNA, 18 bp, Homo Sapiens
agcactggtcttgtaaac

SEQ ID NO: 4269 - DNA, 19 bp, Homo Sapiens
agcactggtcttgtaaacc

SEQ ID NO: 4270 - DNA, 16 bp, Homo Sapiens
agcagagtggcgcagc

SEQ ID NO: 4271 - DNA, 17 bp, Homo Sapiens
agcagagtggcgcagcg

SEQ ID NO: 4272 - DNA, 18 bp, Homo Sapiens
agcagagtggcgcagcgg

SEQ ID NO: 4273 - DNA, 19 bp, Homo Sapiens
agcagagtggcgcagcgga

SEQ ID NO: 4274 - DNA, 20 bp, Homo Sapiens
agcagagtggcgcagcggaa

SEQ ID NO: 4275 - DNA, 21 bp, Homo Sapiens
agcagagtggcgcagcggaag

SEQ ID NO: 4276 - DNA, 22 bp, Homo Sapiens
agcagagtggcgcagcggaagc

SEQ ID NO: 4277 - DNA, 23 bp, Homo Sapiens
agcagagtggcgcagcggaagcg

SEQ ID NO: 4278 - DNA, 24 bp, Homo Sapiens
agcagagtggcgcagcggaagcgt

SEQ ID NO: 4279 - DNA, 26 bp, Homo Sapiens
agcagagtggcgcagcggaagcgtgc

SEQ ID NO: 4280 - DNA, 27 bp, Homo Sapiens
agcagagtggcgcagcggaagcgtgct

SEQ ID NO: 4281 - DNA, 28 bp, Homo Sapiens
agcagagtggcgcagcggaagcgtgctg

SEQ ID NO: 4282 - DNA, 29 bp, Homo Sapiens
agcagagtggcgcagcggaagcgtgctgg

SEQ ID NO: 4283 - DNA, 30 bp, Homo Sapiens
agcagagtggcgcagcggaagcgtgctggg

SEQ ID NO: 4284 - DNA, 31 bp, Homo Sapiens
agcagagtggcgcagcggaagcgtgctgggc

SEQ ID NO: 4285 - DNA, 32 bp, Homo Sapiens
agcagagtggcgcagcggaagcgtgctgggcc

SEQ ID NO: 4286 - DNA, 33 bp, Homo Sapiens
agcagagtggcgcagcggaagcgtgctgggccc

SEQ ID NO: 4287 - DNA, 34 bp, Homo Sapiens
agcagagtggcgcagcggaagcgtgctgggccca

SEQ ID NO: 4288 - DNA, 35 bp, Homo Sapiens
agcagagtggcgcagcggaagcgtgctgggcccat

SEQ ID NO: 4289 - DNA, 36 bp, Homo Sapiens
agcagagtggcgcagcggaagcgtgctgggcccata

SEQ ID NO: 4290 - DNA, 39 bp, Homo Sapiens
agcagagtggcgcagcggaagcgtgctgggcccataacc

SEQ ID NO: 4291 - DNA, 42 bp, Homo Sapiens
agcagagtggcgcagcggaagcgtgctgggcccataacccag

SEQ ID NO: 4292 - DNA, 43 bp, Homo Sapiens
agcagagtggcgcagcggaagcgtgctgggcccataacccaga

SEQ ID NO: 4293 - DNA, 16 bp, Homo Sapiens
agcagcttcaaacctg

SEQ ID NO: 4294 - DNA, 23 bp, Homo Sapiens
agcagcttcaaacctgccggggc

SEQ ID NO: 4295 - DNA, 24 bp, Homo Sapiens
agcagcttcaaacctgccggggct

SEQ ID NO: 4296 - DNA, 25 bp, Homo Sapiens
agcagcttcaaacctgccggggctt

SEQ ID NO: 4297 - DNA, 26 bp, Homo Sapiens
agcagcttcaaacctgccggggcttc

SEQ ID NO: 4298 - DNA, 27 bp, Homo Sapiens
agcagcttcaaacctgccggggcttcc

SEQ ID NO: 4299 - DNA, 28 bp, Homo Sapiens
agcagcttcaaacctgccggggcttcca

SEQ ID NO: 4300 - DNA, 19 bp, Homo Sapiens
agcagttaacgcgggttcg

SEQ ID NO: 4301 - DNA, 16 bp, Homo Sapiens
agcagttgacccgggt

SEQ ID NO: 4302 - DNA, 17 bp, Homo Sapiens
agcagttgacccgggtt

SEQ ID NO: 4303 - DNA, 18 bp, Homo Sapiens
agcagttgacccgggttc

SEQ ID NO: 4304 - DNA, 28 bp, Homo Sapiens
agcagttgacccgggttcgattcccggc

SEQ ID NO: 4305 - DNA, 29 bp, Homo Sapiens
agcagttgacccgggttcgattcccggcc

SEQ ID NO: 4306 - DNA, 30 bp, Homo Sapiens
agcagttgacccgggttcgattcccggcca

SEQ ID NO: 4307 - DNA, 31 bp, Homo Sapiens
agcagttgacccgggttcgattcccggccaa

SEQ ID NO: 4308 - DNA, 32 bp, Homo Sapiens
agcagttgacccgggttcgattcccggccaac

SEQ ID NO: 4309 - DNA, 33 bp, Homo Sapiens
agcagttgacccgggttcgattcccggccaacg

SEQ ID NO: 4310 - DNA, 34 bp, Homo Sapiens
agcagttgacccgggttcgattcccggccaacgc

SEQ ID NO: 4311 - DNA, 37 bp, Homo Sapiens
agcagttgacccgggttcgattcccggccaacgcacc

SEQ ID NO: 4312 - DNA, 38 bp, Homo Sapiens
agcagttgacccgggttcgattcccggccaacgcacca

SEQ ID NO: 4313 - DNA, 19 bp, Homo Sapiens
agcataagactcttaatct

SEQ ID NO: 4314 - DNA, 31 bp, Homo Sapiens
agcatagctgccttccaagcagttgacccgg

SEQ ID NO: 4315 - DNA, 32 bp, Homo Sapiens
agcatagctgccttccaagcagttgacccggg

SEQ ID NO: 4316 - DNA, 33 bp, Homo Sapiens
agcatagctgccttccaagcagttgacccgggt

SEQ ID NO: 4317 - DNA, 36 bp, Homo Sapiens
agcatagctgccttccaagcagttgacccgggttcg

SEQ ID NO: 4318 - DNA, 16 bp, Homo Sapiens
agcatgagactcttaa

SEQ ID NO: 4319 - DNA, 17 bp, Homo Sapiens
agcatgagactcttaat

SEQ ID NO: 4320 - DNA, 18 bp, Homo Sapiens
agcatgagactcttaatc

SEQ ID NO: 4321 - DNA, 19 bp, Homo Sapiens
agcatgagactcttaatct

SEQ ID NO: 4322 - DNA, 20 bp, Homo Sapiens
agcatgagactcttaatctc

SEQ ID NO: 4323 - DNA, 26 bp, Homo Sapiens
agcatgagactcttaatctcagggtc

SEQ ID NO: 4324 - DNA, 28 bp, Homo Sapiens
agcatgagactcttaatctcagggtcgt

SEQ ID NO: 4325 - DNA, 29 bp, Homo Sapiens
agcatgagactcttaatctcagggtcgtg

SEQ ID NO: 4326 - DNA, 30 bp, Homo Sapiens
agcatgagactcttaatctcagggtcgtgg

SEQ ID NO: 4327 - DNA, 33 bp, Homo Sapiens
agcatgagactcttaatctcagggtcgtgggtt

SEQ ID NO: 4328 - DNA, 16 bp, Homo Sapiens
agcatgggactcttaa

SEQ ID NO: 4329 - DNA, 17 bp, Homo Sapiens
agcatgggactcttaat

SEQ ID NO: 4330 - DNA, 18 bp, Homo Sapiens
agcatgggactcttaatc

SEQ ID NO: 4331 - DNA, 19 bp, Homo Sapiens
agcatgggactcttaatcc

SEQ ID NO: 4332 - DNA, 20 bp, Homo Sapiens
agcatgggactcttaatccc

SEQ ID NO: 4333 - DNA, 28 bp, Homo Sapiens
agcatgggactcttaatcccagggtcgt

SEQ ID NO: 4334 - DNA, 29 bp, Homo Sapiens
agcatgggactcttaatcccagggtcgtg

SEQ ID NO: 4335 - DNA, 30 bp, Homo Sapiens
agcatgggactcttaatcccagggtcgtgg

SEQ ID NO: 4336 - DNA, 31 bp, Homo Sapiens
agcatgggactcttaatcccagggtcgtggg

SEQ ID NO: 4337 - DNA, 33 bp, Homo Sapiens
agcatgggactcttaatcccagggtcgtgggtt

SEQ ID NO: 4338 - DNA, 34 bp, Homo Sapiens
agcatgggactcttaatcccagggtcgtgggttc

SEQ ID NO: 4339 - DNA, 35 bp, Homo Sapiens
agcatgggactcttaatcccagggtcgtgggttcg

SEQ ID NO: 4340 - DNA, 19 bp, Homo Sapiens
agcatgggactcttaatct

SEQ ID NO: 4341 - DNA, 20 bp, Homo Sapiens
agcatgggactcttaatctc

SEQ ID NO: 4342 - DNA, 33 bp, Homo Sapiens
agcatgggtggttcagtggtagaattctcgcct

SEQ ID NO: 4343 - DNA, 35 bp, Homo Sapiens
agcatgggtggttcagtggtagaattctcgcctgc

SEQ ID NO: 4344 - DNA, 16 bp, Homo Sapiens
agcattaaccttttaa

SEQ ID NO: 4345 - DNA, 17 bp, Homo Sapiens
agcattaaccttttaag

SEQ ID NO: 4346 - DNA, 18 bp, Homo Sapiens
agcattaaccttttaagt

SEQ ID NO: 4347 - DNA, 20 bp, Homo Sapiens
agcattaaccttttaagtta

SEQ ID NO: 4348 - DNA, 31 bp, Homo Sapiens
agcattaaccttttaagttaaagattaagag

SEQ ID NO: 4349 - DNA, 34 bp, Homo Sapiens
agcattaaccttttaagttaaagattaagagaac

SEQ ID NO: 4350 - DNA, 35 bp, Homo Sapiens
agcattaaccttttaagttaaagattaagagaacc

SEQ ID NO: 4351 - DNA, 36 bp, Homo Sapiens
agcattaaccttttaagttaaagattaagagaacca

SEQ ID NO: 4352 - DNA, 38 bp, Homo Sapiens
agcattaaccttttaagttaaagattaagagaaccaac

SEQ ID NO: 4353 - DNA, 40 bp, Homo Sapiens
agcattaaccttttaagttaaagattaagagaaccaacac

SEQ ID NO: 4354 - DNA, 41 bp, Homo Sapiens
agcattaaccttttaagttaaagattaagagaaccaacacc

SEQ ID NO: 4355 - DNA, 42 bp, Homo Sapiens
agcattaaccttttaagttaaagattaagagaaccaacacct

SEQ ID NO: 4356 - DNA, 44 bp, Homo Sapiens
agcattaaccttttaagttaaagattaagagaaccaacacctct

SEQ ID NO: 4357 - DNA, 16 bp, Homo Sapiens
agcattggactgtaaa

SEQ ID NO: 4358 - DNA, 17 bp, Homo Sapiens
agcattggactgtaaat

SEQ ID NO: 4359 - DNA, 18 bp, Homo Sapiens
agcattggactgtaaatc

SEQ ID NO: 4360 - DNA, 19 bp, Homo Sapiens
agcattggactgtaaatct

SEQ ID NO: 4361 - DNA, 21 bp, Homo Sapiens
agcattggactgtaaatctaa

SEQ ID NO: 4362 - DNA, 23 bp, Homo Sapiens
agcattggactgtaaatctaaag

SEQ ID NO: 4363 - DNA, 25 bp, Homo Sapiens
agcattggactgtaaatctaaagac

SEQ ID NO: 4364 - DNA, 34 bp, Homo Sapiens
agcattggactgtaaatctaaagacaggggttag

SEQ ID NO: 4365 - DNA, 36 bp, Homo Sapiens
agcattggactgtaaatctaaagacaggggttaggc

SEQ ID NO: 4366 - DNA, 38 bp, Homo Sapiens
agcattggactgtaaatctaaagacaggggttaggcct

SEQ ID NO: 4367 - DNA, 22 bp, Homo Sapiens
agcattggtggttcagtggtag

SEQ ID NO: 4368 - DNA, 29 bp, Homo Sapiens
agcattggtggttcagtggtagaattctc

SEQ ID NO: 4369 - DNA, 31 bp, Homo Sapiens
agcattggtggttcagtggtagaattctcgc

SEQ ID NO: 4370 - DNA, 32 bp, Homo Sapiens
agcattggtggttcagtggtagaattctcgcc

SEQ ID NO: 4371 - DNA, 33 bp, Homo Sapiens
agcattggtggttcagtggtagaattctcgcct

SEQ ID NO: 4372 - DNA, 34 bp, Homo Sapiens
agcattggtggttcagtggtagaattctcgcctg

SEQ ID NO: 4373 - DNA, 35 bp, Homo Sapiens
agcattggtggttcagtggtagaattctcgcctgc

SEQ ID NO: 4374 - DNA, 36 bp, Homo Sapiens
agcattggtggttcagtggtagaattctcgcctgcc

SEQ ID NO: 4375 - DNA, 37 bp, Homo Sapiens
agcattggtggttcagtggtagaattctcgcctgcca

SEQ ID NO: 4376 - DNA, 17 bp, Homo Sapiens
agccagggattgtgggt

SEQ ID NO: 4377 - DNA, 18 bp, Homo Sapiens
agccagggattgtgggtt

SEQ ID NO: 4378 - DNA, 19 bp, Homo Sapiens
agccagggattgtgggttc

SEQ ID NO: 4379 - DNA, 20 bp, Homo Sapiens
agccagggattgtgggttcg

SEQ ID NO: 4380 - DNA, 24 bp, Homo Sapiens
agccagggattgtgggttcgagtc

SEQ ID NO: 4381 - DNA, 30 bp, Homo Sapiens
agccagggattgtgggttcgagtcccaccc

SEQ ID NO: 4382 - DNA, 31 bp, Homo Sapiens
agccagggattgtgggttcgagtcccacccg

SEQ ID NO: 4383 - DNA, 33 bp, Homo Sapiens
agccagggattgtgggttcgagtcccacccggg

SEQ ID NO: 4384 - DNA, 34 bp, Homo Sapiens
agccagggattgtgggttcgagtcccacccgggg

SEQ ID NO: 4385 - DNA, 35 bp, Homo Sapiens
agccagggattgtgggttcgagtcccacccggggt

SEQ ID NO: 4386 - DNA, 36 bp, Homo Sapiens
agccagggattgtgggttcgagtcccacccggggta

SEQ ID NO: 4387 - DNA, 37 bp, Homo Sapiens
agccagggattgtgggttcgagtcccacccggggtac

SEQ ID NO: 4388 - DNA, 38 bp, Homo Sapiens
agccagggattgtgggttcgagtcccacccggggtacc

SEQ ID NO: 4389 - DNA, 39 bp, Homo Sapiens
agccagggattgtgggttcgagtcccacccggggtacca

SEQ ID NO: 4390 - DNA, 31 bp, Homo Sapiens
agccagggattgtgggttcgagtcccacctg

SEQ ID NO: 4391 - DNA, 32 bp, Homo Sapiens
agccagggattgtgggttcgagtcccacctgg

SEQ ID NO: 4392 - DNA, 36 bp, Homo Sapiens
agccagggattgtgggttcgagtcccacctggggta

SEQ ID NO: 4393 - DNA, 38 bp, Homo Sapiens
agccagggattgtgggttcgagtcccacctggggtacc

SEQ ID NO: 4394 - DNA, 39 bp, Homo Sapiens
agccagggattgtgggttcgagtcccacctggggtacca

SEQ ID NO: 4395 - DNA, 36 bp, Homo Sapiens
agccagggattgtgggttcgagtcccacctggggtg

SEQ ID NO: 4396 - DNA, 37 bp, Homo Sapiens
agccagggattgtgggttcgagtcccacctggggtgc

SEQ ID NO: 4397 - DNA, 38 bp, Homo Sapiens
agccagggattgtgggttcgagtcccacctggggtgcc

SEQ ID NO: 4398 - DNA, 39 bp, Homo Sapiens
agccagggattgtgggttcgagtcccacctggggtgcca

SEQ ID NO: 4399 - DNA, 29 bp, Homo Sapiens
agccagggattgtgggttcgagtcccatc

SEQ ID NO: 4400 - DNA, 32 bp, Homo Sapiens
agccagggattgtgggttcgagtcccatctgg

SEQ ID NO: 4401 - DNA, 34 bp, Homo Sapiens
agccagggattgtgggttcgagtcccatctgggg

SEQ ID NO: 4402 - DNA, 35 bp, Homo Sapiens
agccagggattgtgggttcgagtcccatctggggt

SEQ ID NO: 4403 - DNA, 36 bp, Homo Sapiens
agccagggattgtgggttcgagtcccatctggggtg

SEQ ID NO: 4404 - DNA, 37 bp, Homo Sapiens
agccagggattgtgggttcgagtcccatctggggtgc

SEQ ID NO: 4405 - DNA, 38 bp, Homo Sapiens
agccagggattgtgggttcgagtcccatctggggtgcc

SEQ ID NO: 4406 - DNA, 39 bp, Homo Sapiens
agccagggattgtgggttcgagtcccatctggggtgcca

SEQ ID NO: 4407 - DNA, 24 bp, Homo Sapiens
agccagttgattagggtgcttagc

SEQ ID NO: 4408 - DNA, 30 bp, Homo Sapiens
agccatgatcgtatagtggttagtactctg

SEQ ID NO: 4409 - DNA, 19 bp, Homo Sapiens
agccccacgttgggcgcca

SEQ ID NO: 4410 - DNA, 17 bp, Homo Sapiens
agccccagtggaaccac

SEQ ID NO: 4411 - DNA, 18 bp, Homo Sapiens
agccccagtggaaccacc

SEQ ID NO: 4412 - DNA, 19 bp, Homo Sapiens
agccccagtggaaccacca

SEQ ID NO: 4413 - DNA, 33 bp, Homo Sapiens
agcccggatagctcagtcggtagagcatcagac

SEQ ID NO: 4414 - DNA, 37 bp, Homo Sapiens
agcccggatagctcagtcggtagagcatcagactttt

SEQ ID NO: 4415 - DNA, 33 bp, Homo Sapiens
agcccggctagctcagtcggtagagcatgagac

SEQ ID NO: 4416 - DNA, 34 bp, Homo Sapiens
agcccggctagctcagtcggtagagcatgagact

SEQ ID NO: 4417 - DNA, 35 bp, Homo Sapiens
agcccggctagctcagtcggtagagcatgagactc

SEQ ID NO: 4418 - DNA, 34 bp, Homo Sapiens
agcccggctagctcagtcggtagagcatgggact

SEQ ID NO: 4419 - DNA, 21 bp, Homo Sapiens
agcccggtaatcgcataaaac

SEQ ID NO: 4420 - DNA, 24 bp, Homo Sapiens
agcccggtaatcgcataaaactta

SEQ ID NO: 4421 - DNA, 25 bp, Homo Sapiens
agcccggtaatcgcataaaacttaa

SEQ ID NO: 4422 - DNA, 27 bp, Homo Sapiens
agcccggtaatcgcataaaacttaaaa

SEQ ID NO: 4423 - DNA, 28 bp, Homo Sapiens
agcccggtaatcgcataaaacttaaaac

SEQ ID NO: 4424 - DNA, 29 bp, Homo Sapiens
agcccggtaatcgcataaaacttaaaact

SEQ ID NO: 4425 - DNA, 30 bp, Homo Sapiens
agcccggtaatcgcataaaacttaaaactt

SEQ ID NO: 4426 - DNA, 33 bp, Homo Sapiens
agcccggtaatcgcataaaacttaaaactttac

SEQ ID NO: 4427 - DNA, 40 bp, Homo Sapiens
agcccggtaatcgcataaaacttaaaactttacagtcaga

SEQ ID NO: 4428 - DNA, 17 bp, Homo Sapiens
agccctcagtaagttgc

SEQ ID NO: 4429 - DNA, 18 bp, Homo Sapiens
agccctcagtaagttgca

SEQ ID NO: 4430 - DNA, 22 bp, Homo Sapiens
agccctcagtaagttgcaatac

SEQ ID NO: 4431 - DNA, 26 bp, Homo Sapiens
agccctcagtaagttgcaatacttaa

SEQ ID NO: 4432 - DNA, 30 bp, Homo Sapiens
agccctcagtaagttgcaatacttaatttc

SEQ ID NO: 4433 - DNA, 32 bp, Homo Sapiens
agccctcagtaagttgcaatacttaatttctg

SEQ ID NO: 4434 - DNA, 33 bp, Homo Sapiens
agccctcagtaagttgcaatacttaatttctgc

SEQ ID NO: 4435 - DNA, 34 bp, Homo Sapiens
agccctcagtaagttgcaatacttaatttctgcc

SEQ ID NO: 4436 - DNA, 35 bp, Homo Sapiens
agccctcagtaagttgcaatacttaatttctgcca

SEQ ID NO: 4437 - DNA, 16 bp, Homo Sapiens
agccgtgatcgtatag

SEQ ID NO: 4438 - DNA, 17 bp, Homo Sapiens
agccgtgatcgtatagt

SEQ ID NO: 4439 - DNA, 18 bp, Homo Sapiens
agccgtgatcgtatagtg

SEQ ID NO: 4440 - DNA, 19 bp, Homo Sapiens
agccgtgatcgtatagtgg

SEQ ID NO: 4441 - DNA, 20 bp, Homo Sapiens
agccgtgatcgtatagtggt

SEQ ID NO: 4442 - DNA, 21 bp, Homo Sapiens
agccgtgatcgtatagtggtt

SEQ ID NO: 4443 - DNA, 22 bp, Homo Sapiens
agccgtgatcgtatagtggtta

SEQ ID NO: 4444 - DNA, 23 bp, Homo Sapiens
agccgtgatcgtatagtggttag

SEQ ID NO: 4445 - DNA, 24 bp, Homo Sapiens
agccgtgatcgtatagtggttagt

SEQ ID NO: 4446 - DNA, 25 bp, Homo Sapiens
agccgtgatcgtatagtggttagta

SEQ ID NO: 4447 - DNA, 26 bp, Homo Sapiens
agccgtgatcgtatagtggttagtac

SEQ ID NO: 4448 - DNA, 27 bp, Homo Sapiens
agccgtgatcgtatagtggttagtact

SEQ ID NO: 4449 - DNA, 28 bp, Homo Sapiens
agccgtgatcgtatagtggttagtactc

SEQ ID NO: 4450 - DNA, 29 bp, Homo Sapiens
agccgtgatcgtatagtggttagtactct

SEQ ID NO: 4451 - DNA, 30 bp, Homo Sapiens
agccgtgatcgtatagtggttagtactctg

SEQ ID NO: 4452 - DNA, 31 bp, Homo Sapiens
agccgtgatcgtatagtggttagtactctgc

SEQ ID NO: 4453 - DNA, 32 bp, Homo Sapiens
agccgtgatcgtatagtggttagtactctgcg

SEQ ID NO: 4454 - DNA, 33 bp, Homo Sapiens
agccgtgatcgtatagtggttagtactctgcgt

SEQ ID NO: 4455 - DNA, 34 bp, Homo Sapiens
agccgtgatcgtatagtggttagtactctgcgtt

SEQ ID NO: 4456 - DNA, 35 bp, Homo Sapiens
agccgtgatcgtatagtggttagtactctgcgttg

SEQ ID NO: 4457 - DNA, 36 bp, Homo Sapiens
agccgtgatcgtatagtggttagtactctgcgttgt

SEQ ID NO: 4458 - DNA, 37 bp, Homo Sapiens
agccgtgatcgtatagtggttagtactctgcgttgtg

SEQ ID NO: 4459 - DNA, 40 bp, Homo Sapiens
agccgtgatcgtatagtggttagtactctgcgttgtggcc

SEQ ID NO: 4460 - DNA, 41 bp, Homo Sapiens
agccgtgatcgtatagtggttagtactctgcgttgtggccg

SEQ ID NO: 4461 - DNA, 19 bp, Homo Sapiens
agcctcacctggagcacca

SEQ ID NO: 4462 - DNA, 22 bp, Homo Sapiens
agcctccggagctggggattgt

SEQ ID NO: 4463 - DNA, 28 bp, Homo Sapiens
agcctccggagctggggattgtgggttc

SEQ ID NO: 4464 - DNA, 43 bp, Homo Sapiens
agccttcaaagccctcagtaagttgcaatacttaatttctgcc

SEQ ID NO: 4465 - DNA, 44 bp, Homo Sapiens
agccttcaaagccctcagtaagttgcaatacttaatttctgcca

SEQ ID NO: 4466 - DNA, 21 bp, Homo Sapiens
agcgatccgagttcaaatctc

SEQ ID NO: 4467 - DNA, 25 bp, Homo Sapiens
agcgatccgagttcaaatctcggtg

SEQ ID NO: 4468 - DNA, 29 bp, Homo Sapiens
agcgatccgagttcaaatctcggtggaac

SEQ ID NO: 4469 - DNA, 30 bp, Homo Sapiens
agcgatccgagttcaaatctcggtggaacc

SEQ ID NO: 4470 - DNA, 31 bp, Homo Sapiens
agcgatccgagttcaaatctcggtggaacct

SEQ ID NO: 4471 - DNA, 32 bp, Homo Sapiens
agcgatccgagttcaaatctcggtggaacctc

SEQ ID NO: 4472 - DNA, 33 bp, Homo Sapiens
agcgatccgagttcaaatctcggtggaacctcc

SEQ ID NO: 4473 - DNA, 29 bp, Homo Sapiens
agcgatccgagttcaaatctcggtgggac

SEQ ID NO: 4474 - DNA, 30 bp, Homo Sapiens
agcgatccgagttcaaatctcggtgggacc

SEQ ID NO: 4475 - DNA, 31 bp, Homo Sapiens
agcgatccgagttcaaatctcggtgggacct

SEQ ID NO: 4476 - DNA, 32 bp, Homo Sapiens
agcgatccgagttcaaatctcggtgggacctc

SEQ ID NO: 4477 - DNA, 33 bp, Homo Sapiens
agcgatccgagttcaaatctcggtgggacctcc

SEQ ID NO: 4478 - DNA, 32 bp, Homo Sapiens
agcgatccgagttcaagtctcggtggaacctc

SEQ ID NO: 4479 - DNA, 21 bp, Homo Sapiens
agcgatccgagttcgagtctc

SEQ ID NO: 4480 - DNA, 24 bp, Homo Sapiens
agcgatccgagttcgagtctcggt

SEQ ID NO: 4481 - DNA, 29 bp, Homo Sapiens
agcgatccgagttcgagtctcggtggaac

SEQ ID NO: 4482 - DNA, 30 bp, Homo Sapiens
agcgatccgagttcgagtctcggtggaacc

SEQ ID NO: 4483 - DNA, 31 bp, Homo Sapiens
agcgatccgagttcgagtctcggtggaacct

SEQ ID NO: 4484 - DNA, 32 bp, Homo Sapiens
agcgatccgagttcgagtctcggtggaacctc

SEQ ID NO: 4485 - DNA, 33 bp, Homo Sapiens
agcgatccgagttcgagtctcggtggaacctcc

SEQ ID NO: 4486 - DNA, 21 bp, Homo Sapiens
agcgatggccgagtggttaag

SEQ ID NO: 4487 - DNA, 23 bp, Homo Sapiens
agcgatggccgagtggttaaggc

SEQ ID NO: 4488 - DNA, 17 bp, Homo Sapiens
agcgcattggacttcta

SEQ ID NO: 4489 - DNA, 19 bp, Homo Sapiens
agcgcattggacttctaat

SEQ ID NO: 4490 - DNA, 21 bp, Homo Sapiens
agcgcattggacttctaattc

SEQ ID NO: 4491 - DNA, 24 bp, Homo Sapiens
agcgcattggacttctaattcaaa

SEQ ID NO: 4492 - DNA, 25 bp, Homo Sapiens
agcgcattggacttctaattcaaag

SEQ ID NO: 4493 - DNA, 33 bp, Homo Sapiens
agcgcattggacttctaattcaaaggttccggg

SEQ ID NO: 4494 - DNA, 39 bp, Homo Sapiens
agcgcattggacttctaattcaaaggttgtgggttcgag

SEQ ID NO: 4495 - DNA, 16 bp, Homo Sapiens
agcgcgcggtacttat

SEQ ID NO: 4496 - DNA, 19 bp, Homo Sapiens
agcgcgctggacttctaat

SEQ ID NO: 4497 - DNA, 16 bp, Homo Sapiens
agcgcgttcggctgtt

SEQ ID NO: 4498 - DNA, 20 bp, Homo Sapiens
agcgcgttcggctgttaacc

SEQ ID NO: 4499 - DNA, 24 bp, Homo Sapiens
agcgcgttcggctgttaaccgaaa

SEQ ID NO: 4500 - DNA, 25 bp, Homo Sapiens
agcgcgttcggctgttaaccgaaag

SEQ ID NO: 4501 - DNA, 26 bp, Homo Sapiens
agcgcgttcggctgttaaccgaaagg

SEQ ID NO: 4502 - DNA, 27 bp, Homo Sapiens
agcgcgttcggctgttaaccgaaaggt

SEQ ID NO: 4503 - DNA, 35 bp, Homo Sapiens
agcgcgttcggctgttaaccgaaaggttggtggtt

SEQ ID NO: 4504 - DNA, 37 bp, Homo Sapiens
agcgcgttcggctgttaaccgaaaggttggtggttcg

SEQ ID NO: 4505 - DNA, 21 bp, Homo Sapiens
agcgcgttcggctgttaatct

SEQ ID NO: 4506 - DNA, 16 bp, Homo Sapiens
agcggaagcgtgctgg

SEQ ID NO: 4507 - DNA, 17 bp, Homo Sapiens
agcggaagcgtgctggg

SEQ ID NO: 4508 - DNA, 18 bp, Homo Sapiens
agcggaagcgtgctgggc

SEQ ID NO: 4509 - DNA, 19 bp, Homo Sapiens
agcggaagcgtgctgggcc

SEQ ID NO: 4510 - DNA, 20 bp, Homo Sapiens
agcggaagcgtgctgggccc

SEQ ID NO: 4511 - DNA, 21 bp, Homo Sapiens
agcggaagcgtgctgggccca

SEQ ID NO: 4512 - DNA, 22 bp, Homo Sapiens
agcggaagcgtgctgggcccat

SEQ ID NO: 4513 - DNA, 25 bp, Homo Sapiens
agcggaagcgtgctgggcccataac

SEQ ID NO: 4514 - DNA, 28 bp, Homo Sapiens
agcggaagcgtgctgggcccataaccca

SEQ ID NO: 4515 - DNA, 29 bp, Homo Sapiens
agcgggatcgatgcccgcatcctccacca

SEQ ID NO: 4516 - DNA, 17 bp, Homo Sapiens
agcggtctaaggcgctg

SEQ ID NO: 4517 - DNA, 24 bp, Homo Sapiens
agcggtctaaggcgctgcgttcag

SEQ ID NO: 4518 - DNA, 19 bp, Homo Sapiens
agcggtctaaggcgctgga

SEQ ID NO: 4519 - DNA, 21 bp, Homo Sapiens
agcggtctaaggcgctggatt

SEQ ID NO: 4520 - DNA, 19 bp, Homo Sapiens
agcggttaggattcctggt

SEQ ID NO: 4521 - DNA, 20 bp, Homo Sapiens
agcggttaggattcctggtt

SEQ ID NO: 4522 - DNA, 22 bp, Homo Sapiens
agcggttaggattcctggtttt

SEQ ID NO: 4523 - DNA, 23 bp, Homo Sapiens
agcggttaggattcctggttttc

SEQ ID NO: 4524 - DNA, 20 bp, Homo Sapiens
agcggttatcacattcgcct

SEQ ID NO: 4525 - DNA, 21 bp, Homo Sapiens
agcgtgctgggcccataaccc

SEQ ID NO: 4526 - DNA, 23 bp, Homo Sapiens
agcgtgctgggcccataacccag

SEQ ID NO: 4527 - DNA, 24 bp, Homo Sapiens
agcgtgctgggcccataacccaga

SEQ ID NO: 4528 - DNA, 32 bp, Homo Sapiens
agcgtgctgggcccataacccagaggtcgatg

SEQ ID NO: 4529 - DNA, 34 bp, Homo Sapiens
agcgtgctgggcccataacccagaggtcgatgga

SEQ ID NO: 4530 - DNA, 35 bp, Homo Sapiens
agcgtgctgggcccataacccagaggtcgatggat

SEQ ID NO: 4531 - DNA, 36 bp, Homo Sapiens
agcgtgctgggcccataacccagaggtcgatggatc

SEQ ID NO: 4532 - DNA, 37 bp, Homo Sapiens
agcgtgctgggcccataacccagaggtcgatggatcg

SEQ ID NO: 4533 - DNA, 18 bp, Homo Sapiens
agcgtggccgagcggtct

SEQ ID NO: 4534 - DNA, 19 bp, Homo Sapiens
agcgtggccgagcggtcta

SEQ ID NO: 4535 - DNA, 21 bp, Homo Sapiens
agcgtggccgagcggtctaag

SEQ ID NO: 4536 - DNA, 22 bp, Homo Sapiens
agcgtggccgagcggtctaagg

SEQ ID NO: 4537 - DNA, 23 bp, Homo Sapiens
agcgtggccgagcggtctaaggc

SEQ ID NO: 4538 - DNA, 34 bp, Homo Sapiens
agcgtggccgagcggtctaaggcgctggatttag

SEQ ID NO: 4539 - DNA, 34 bp, Homo Sapiens
agcgtggccgagtggtctaaggcgctggatttag

SEQ ID NO: 4540 - DNA, 33 bp, Homo Sapiens
agcgtggtgctaataacgccaaggtcgcgggtt

SEQ ID NO: 4541 - DNA, 19 bp, Homo Sapiens
agctaaataagctatcggg

SEQ ID NO: 4542 - DNA, 20 bp, Homo Sapiens
agctaaataagctatcgggc

SEQ ID NO: 4543 - DNA, 21 bp, Homo Sapiens
agctaaataagctatcgggcc

SEQ ID NO: 4544 - DNA, 22 bp, Homo Sapiens
agctaaataagctatcgggccc

SEQ ID NO: 4545 - DNA, 23 bp, Homo Sapiens
agctaaataagctatcgggccca

SEQ ID NO: 4546 - DNA, 24 bp, Homo Sapiens
agctaaataagctatcgggcccat

SEQ ID NO: 4547 - DNA, 25 bp, Homo Sapiens
agctaaataagctatcgggcccata

SEQ ID NO: 4548 - DNA, 26 bp, Homo Sapiens
agctaaataagctatcgggcccatac

SEQ ID NO: 4549 - DNA, 27 bp, Homo Sapiens
agctaaataagctatcgggcccatacc

SEQ ID NO: 4550 - DNA, 28 bp, Homo Sapiens
agctaaataagctatcgggcccataccc

SEQ ID NO: 4551 - DNA, 29 bp, Homo Sapiens
agctaaataagctatcgggcccatacccc

SEQ ID NO: 4552 - DNA, 33 bp, Homo Sapiens
agctaaataagctatcgggcccataccccgaaa

SEQ ID NO: 4553 - DNA, 40 bp, Homo Sapiens
agctaaataagctatcgggcccataccccgaaaatgttgg

SEQ ID NO: 4554 - DNA, 41 bp, Homo Sapiens
agctaaataagctatcgggcccataccccgaaaatgttggt

SEQ ID NO: 4555 - DNA, 42 bp, Homo Sapiens
agctaaataagctatcgggcccataccccgaaaatgttggtt

SEQ ID NO: 4556 - DNA, 16 bp, Homo Sapiens
agctatccattggtct

SEQ ID NO: 4557 - DNA, 17 bp, Homo Sapiens
agctatccattggtctt

SEQ ID NO: 4558 - DNA, 18 bp, Homo Sapiens
agctatccattggtctta

SEQ ID NO: 4559 - DNA, 19 bp, Homo Sapiens
agctatccattggtcttag

SEQ ID NO: 4560 - DNA, 22 bp, Homo Sapiens
agctatccattggtcttaggcc

SEQ ID NO: 4561 - DNA, 23 bp, Homo Sapiens
agctatccattggtcttaggccc

SEQ ID NO: 4562 - DNA, 28 bp, Homo Sapiens
agctatccattggtcttaggccccaaaa

SEQ ID NO: 4563 - DNA, 29 bp, Homo Sapiens
agctatccattggtcttaggccccaaaaa

SEQ ID NO: 4564 - DNA, 30 bp, Homo Sapiens
agctatccattggtcttaggccccaaaaat

SEQ ID NO: 4565 - DNA, 16 bp, Homo Sapiens
agctatcgggcccata

SEQ ID NO: 4566 - DNA, 17 bp, Homo Sapiens
agctatcgggcccatac

SEQ ID NO: 4567 - DNA, 18 bp, Homo Sapiens
agctatcgggcccatacc

SEQ ID NO: 4568 - DNA, 19 bp, Homo Sapiens
agctatcgggcccataccc

SEQ ID NO: 4569 - DNA, 20 bp, Homo Sapiens
agctatcgggcccatacccc

SEQ ID NO: 4570 - DNA, 21 bp, Homo Sapiens
agctatcgggcccataccccg

SEQ ID NO: 4571 - DNA, 22 bp, Homo Sapiens
agctatcgggcccataccccga

SEQ ID NO: 4572 - DNA, 23 bp, Homo Sapiens
agctatcgggcccataccccgaa

SEQ ID NO: 4573 - DNA, 24 bp, Homo Sapiens
agctatcgggcccataccccgaaa

SEQ ID NO: 4574 - DNA, 25 bp, Homo Sapiens
agctatcgggcccataccccgaaaa

SEQ ID NO: 4575 - DNA, 26 bp, Homo Sapiens
agctatcgggcccataccccgaaaat

SEQ ID NO: 4576 - DNA, 27 bp, Homo Sapiens
agctatcgggcccataccccgaaaatg

SEQ ID NO: 4577 - DNA, 28 bp, Homo Sapiens
agctatcgggcccataccccgaaaatgt

SEQ ID NO: 4578 - DNA, 29 bp, Homo Sapiens
agctatcgggcccataccccgaaaatgtt

SEQ ID NO: 4579 - DNA, 30 bp, Homo Sapiens
agctatcgggcccataccccgaaaatgttg

SEQ ID NO: 4580 - DNA, 31 bp, Homo Sapiens
agctatcgggcccataccccgaaaatgttgg

SEQ ID NO: 4581 - DNA, 32 bp, Homo Sapiens
agctatcgggcccataccccgaaaatgttggt

SEQ ID NO: 4582 - DNA, 33 bp, Homo Sapiens
agctatcgggcccataccccgaaaatgttggtt

SEQ ID NO: 4583 - DNA, 34 bp, Homo Sapiens
agctatcgggcccataccccgaaaatgttggtta

SEQ ID NO: 4584 - DNA, 35 bp, Homo Sapiens
agctatcgggcccataccccgaaaatgttggttat

SEQ ID NO: 4585 - DNA, 36 bp, Homo Sapiens
agctatcgggcccataccccgaaaatgttggttata

SEQ ID NO: 4586 - DNA, 37 bp, Homo Sapiens
agctatcgggcccataccccgaaaatgttggttatac

SEQ ID NO: 4587 - DNA, 40 bp, Homo Sapiens
agctatcgggcccataccccgaaaatgttggttataccct

SEQ ID NO: 4588 - DNA, 44 bp, Homo Sapiens
agctatcgggcccataccccgaaaatgttggttatacccttccc

SEQ ID NO: 4589 - DNA, 47 bp, Homo Sapiens
agctatcgggcccataccccgaaaatgttggttatacccttcccgta

SEQ ID NO: 4590 - DNA, 16 bp, Homo Sapiens
agctcacaagaactgc

SEQ ID NO: 4591 - DNA, 17 bp, Homo Sapiens
agctcacaagaactgct

SEQ ID NO: 4592 - DNA, 18 bp, Homo Sapiens
agctcacaagaactgcta

SEQ ID NO: 4593 - DNA, 19 bp, Homo Sapiens
agctcacaagaactgctaa

SEQ ID NO: 4594 - DNA, 20 bp, Homo Sapiens
agctcacaagaactgctaac

SEQ ID NO: 4595 - DNA, 21 bp, Homo Sapiens
agctcacaagaactgctaact

SEQ ID NO: 4596 - DNA, 22 bp, Homo Sapiens
agctcacaagaactgctaactc

SEQ ID NO: 4597 - DNA, 23 bp, Homo Sapiens
agctcacaagaactgctaactca

SEQ ID NO: 4598 - DNA, 24 bp, Homo Sapiens
agctcacaagaactgctaactcat

SEQ ID NO: 4599 - DNA, 25 bp, Homo Sapiens
agctcacaagaactgctaactcatg

SEQ ID NO: 4600 - DNA, 26 bp, Homo Sapiens
agctcacaagaactgctaactcatgc

SEQ ID NO: 4601 - DNA, 27 bp, Homo Sapiens
agctcacaagaactgctaactcatgcc

SEQ ID NO: 4602 - DNA, 28 bp, Homo Sapiens
agctcacaagaactgctaactcatgccc

SEQ ID NO: 4603 - DNA, 29 bp, Homo Sapiens
agctcacaagaactgctaactcatgcccc

SEQ ID NO: 4604 - DNA, 30 bp, Homo Sapiens
agctcacaagaactgctaactcatgccccc

SEQ ID NO: 4605 - DNA, 31 bp, Homo Sapiens
agctcacaagaactgctaactcatgccccca

SEQ ID NO: 4606 - DNA, 33 bp, Homo Sapiens
agctcacaagaactgctaactcatgcccccatg

SEQ ID NO: 4607 - DNA, 34 bp, Homo Sapiens
agctcacaagaactgctaactcatgcccccatgt

SEQ ID NO: 4608 - DNA, 35 bp, Homo Sapiens
agctcacaagaactgctaactcatgcccccatgtc

SEQ ID NO: 4609 - DNA, 36 bp, Homo Sapiens
agctcacaagaactgctaactcatgcccccatgtct

SEQ ID NO: 4610 - DNA, 38 bp, Homo Sapiens
agctcacaagaactgctaactcatgcccccatgtctaa

SEQ ID NO: 4611 - DNA, 39 bp, Homo Sapiens
agctcacaagaactgctaactcatgcccccatgtctaac

SEQ ID NO: 4612 - DNA, 40 bp, Homo Sapiens
agctcacaagaactgctaactcatgcccccatgtctaaca

SEQ ID NO: 4613 - DNA, 42 bp, Homo Sapiens
agctcacaagaactgctaactcatgcccccatgtctaacaac

SEQ ID NO: 4614 - DNA, 43 bp, Homo Sapiens
agctcacaagaactgctaactcatgcccccatgtctaacaaca

SEQ ID NO: 4615 - DNA, 44 bp, Homo Sapiens
agctcacaagaactgctaactcatgcccccatgtctaacaacat

SEQ ID NO: 4616 - DNA, 45 bp, Homo Sapiens
agctcacaagaactgctaactcatgcccccatgtctaacaacatg

SEQ ID NO: 4617 - DNA, 46 bp, Homo Sapiens
agctcacaagaactgctaactcatgcccccatgtctaacaacatgg

SEQ ID NO: 4618 - DNA, 47 bp, Homo Sapiens
agctcacaagaactgctaactcatgcccccatgtctaacaacatggc

SEQ ID NO: 4619 - DNA, 48 bp, Homo Sapiens
agctcacaagaactgctaactcatgcccccatgtctaacaacatggct

SEQ ID NO: 4620 - DNA, 25 bp, Homo Sapiens
agctcagctggtagagcggaggact

SEQ ID NO: 4621 - DNA, 24 bp, Homo Sapiens
agctcaggggtagagcatttgact

SEQ ID NO: 4622 - DNA, 24 bp, Homo Sapiens
agctcaggggttagagcactggtc

SEQ ID NO: 4623 - DNA, 25 bp, Homo Sapiens
agctcaggggttagagcactggtct

SEQ ID NO: 4624 - DNA, 16 bp, Homo Sapiens
agctcagtcggtagag

SEQ ID NO: 4625 - DNA, 17 bp, Homo Sapiens
agctcagtcggtagagc

SEQ ID NO: 4626 - DNA, 20 bp, Homo Sapiens
agctcagtcggtagagcatc

SEQ ID NO: 4627 - DNA, 24 bp, Homo Sapiens
agctcagtcggtagagcatcagac

SEQ ID NO: 4628 - DNA, 25 bp, Homo Sapiens
agctcagtcggtagagcatcagact

SEQ ID NO: 4629 - DNA, 26 bp, Homo Sapiens
agctcagtcggtagagcatcagactt

SEQ ID NO: 4630 - DNA, 27 bp, Homo Sapiens
agctcagtcggtagagcatcagacttt

SEQ ID NO: 4631 - DNA, 28 bp, Homo Sapiens
agctcagtcggtagagcatcagactttt

SEQ ID NO: 4632 - DNA, 20 bp, Homo Sapiens
agctcagtcggtagagcatg

SEQ ID NO: 4633 - DNA, 24 bp, Homo Sapiens
agctcagtcggtagagcatgagac

SEQ ID NO: 4634 - DNA, 25 bp, Homo Sapiens
agctcagtcggtagagcatgagacc

SEQ ID NO: 4635 - DNA, 26 bp, Homo Sapiens
agctcagtcggtagagcatgagaccc

SEQ ID NO: 4636 - DNA, 27 bp, Homo Sapiens
agctcagtcggtagagcatgagaccct

SEQ ID NO: 4637 - DNA, 28 bp, Homo Sapiens
agctcagtcggtagagcatgagaccctt

SEQ ID NO: 4638 - DNA, 25 bp, Homo Sapiens
agctcagtcggtagagcatgagact

SEQ ID NO: 4639 - DNA, 26 bp, Homo Sapiens
agctcagtcggtagagcatgagactc

SEQ ID NO: 4640 - DNA, 27 bp, Homo Sapiens
agctcagtcggtagagcatgagactct

SEQ ID NO: 4641 - DNA, 28 bp, Homo Sapiens
agctcagtcggtagagcatgagactctt

SEQ ID NO: 4642 - DNA, 30 bp, Homo Sapiens
agctcagtcggtagagcatgagactcttaa

SEQ ID NO: 4643 - DNA, 31 bp, Homo Sapiens
agctcagtcggtagagcatgagactcttaat

SEQ ID NO: 4644 - DNA, 32 bp, Homo Sapiens
agctcagtcggtagagcatgagactcttaatc

SEQ ID NO: 4645 - DNA, 33 bp, Homo Sapiens
agctcagtcggtagagcatgagactcttaatct

SEQ ID NO: 4646 - DNA, 44 bp, Homo Sapiens
agctcagtcggtagagcatgagactcttaatctcagggtcgtgg

SEQ ID NO: 4647 - DNA, 46 bp, Homo Sapiens
agctcagtcggtagagcatgagactcttaatctcagggtcgtgggt

SEQ ID NO: 4648 - DNA, 47 bp, Homo Sapiens
agctcagtcggtagagcatgagactcttaatctcagggtcgtgggtt

SEQ ID NO: 4649 - DNA, 22 bp, Homo Sapiens
agctcagtcggtagagcatggg

SEQ ID NO: 4650 - DNA, 23 bp, Homo Sapiens
agctcagtcggtagagcatggga

SEQ ID NO: 4651 - DNA, 24 bp, Homo Sapiens
agctcagtcggtagagcatgggac

SEQ ID NO: 4652 - DNA, 25 bp, Homo Sapiens
agctcagtcggtagagcatgggact

SEQ ID NO: 4653 - DNA, 26 bp, Homo Sapiens
agctcagtcggtagagcatgggactc

SEQ ID NO: 4654 - DNA, 27 bp, Homo Sapiens
agctcagtcggtagagcatgggactct

SEQ ID NO: 4655 - DNA, 28 bp, Homo Sapiens
agctcagtcggtagagcatgggactctt

SEQ ID NO: 4656 - DNA, 29 bp, Homo Sapiens
agctcagtcggtagagcatgggactctta

SEQ ID NO: 4657 - DNA, 30 bp, Homo Sapiens
agctcagtcggtagagcatgggactcttaa

SEQ ID NO: 4658 - DNA, 31 bp, Homo Sapiens
agctcagtcggtagagcatgggactcttaat

SEQ ID NO: 4659 - DNA, 32 bp, Homo Sapiens
agctcagtcggtagagcatgggactcttaatc

SEQ ID NO: 4660 - DNA, 33 bp, Homo Sapiens
agctcagtcggtagagcatgggactcttaatcc

SEQ ID NO: 4661 - DNA, 44 bp, Homo Sapiens
agctcagtcggtagagcatgggactcttaatcccagggtcgtgg

SEQ ID NO: 4662 - DNA, 46 bp, Homo Sapiens
agctcagtcggtagagcatgggactcttaatcccagggtcgtgggt

SEQ ID NO: 4663 - DNA, 47 bp, Homo Sapiens
agctcagtcggtagagcatgggactcttaatcccagggtcgtgggtt

SEQ ID NO: 4664 - DNA, 47 bp, Homo Sapiens
agctcagtcggtagagcatgggactcttaatctcagggtcgtgggtt

SEQ ID NO: 4665 - DNA, 24 bp, Homo Sapiens
agctcagtggtagagcatttgact

SEQ ID NO: 4666 - DNA, 25 bp, Homo Sapiens
agctcagtggtagagcatttgactg

SEQ ID NO: 4667 - DNA, 26 bp, Homo Sapiens
agctcagtggtagagcatttgactgc

SEQ ID NO: 4668 - DNA, 27 bp, Homo Sapiens
agctcagtggtagagcatttgactgca

SEQ ID NO: 4669 - DNA, 27 bp, Homo Sapiens
agctcagttgggagagcgttagactga

SEQ ID NO: 4670 - DNA, 24 bp, Homo Sapiens
agctcagttggtagagcatcagac

SEQ ID NO: 4671 - DNA, 16 bp, Homo Sapiens
agctccgaggtgattt

SEQ ID NO: 4672 - DNA, 17 bp, Homo Sapiens
agctccgaggtgatttt

SEQ ID NO: 4673 - DNA, 18 bp, Homo Sapiens
agctccgaggtgattttc

SEQ ID NO: 4674 - DNA, 19 bp, Homo Sapiens
agctccgaggtgattttca

SEQ ID NO: 4675 - DNA, 20 bp, Homo Sapiens
agctccgaggtgattttcat

SEQ ID NO: 4676 - DNA, 21 bp, Homo Sapiens
agctccgaggtgattttcata

SEQ ID NO: 4677 - DNA, 22 bp, Homo Sapiens
agctccgaggtgattttcatat

SEQ ID NO: 4678 - DNA, 23 bp, Homo Sapiens
agctccgaggtgattttcatatt

SEQ ID NO: 4679 - DNA, 24 bp, Homo Sapiens
agctccgaggtgattttcatattg

SEQ ID NO: 4680 - DNA, 25 bp, Homo Sapiens
agctccgaggtgattttcatattga

SEQ ID NO: 4681 - DNA, 26 bp, Homo Sapiens
agctccgaggtgattttcatattgaa

SEQ ID NO: 4682 - DNA, 27 bp, Homo Sapiens
agctccgaggtgattttcatattgaat

SEQ ID NO: 4683 - DNA, 28 bp, Homo Sapiens
agctccgaggtgattttcatattgaatt

SEQ ID NO: 4684 - DNA, 29 bp, Homo Sapiens
agctccgaggtgattttcatattgaattg

SEQ ID NO: 4685 - DNA, 30 bp, Homo Sapiens
agctccgaggtgattttcatattgaattgc

SEQ ID NO: 4686 - DNA, 31 bp, Homo Sapiens
agctccgaggtgattttcatattgaattgca

SEQ ID NO: 4687 - DNA, 32 bp, Homo Sapiens
agctccgaggtgattttcatattgaattgcaa

SEQ ID NO: 4688 - DNA, 33 bp, Homo Sapiens
agctccgaggtgattttcatattgaattgcaaa

SEQ ID NO: 4689 - DNA, 34 bp, Homo Sapiens
agctccgaggtgattttcatattgaattgcaaat

SEQ ID NO: 4690 - DNA, 35 bp, Homo Sapiens
agctccgaggtgattttcatattgaattgcaaatt

SEQ ID NO: 4691 - DNA, 36 bp, Homo Sapiens
agctccgaggtgattttcatattgaattgcaaattc

SEQ ID NO: 4692 - DNA, 37 bp, Homo Sapiens
agctccgaggtgattttcatattgaattgcaaattcg

SEQ ID NO: 4693 - DNA, 38 bp, Homo Sapiens
agctccgaggtgattttcatattgaattgcaaattcga

SEQ ID NO: 4694 - DNA, 39 bp, Homo Sapiens
agctccgaggtgattttcatattgaattgcaaattcgaa

SEQ ID NO: 4695 - DNA, 40 bp, Homo Sapiens
agctccgaggtgattttcatattgaattgcaaattcgaag

SEQ ID NO: 4696 - DNA, 41 bp, Homo Sapiens
agctccgaggtgattttcatattgaattgcaaattcgaaga

SEQ ID NO: 4697 - DNA, 42 bp, Homo Sapiens
agctccgaggtgattttcatattgaattgcaaattcgaagaa

SEQ ID NO: 4698 - DNA, 43 bp, Homo Sapiens
agctccgaggtgattttcatattgaattgcaaattcgaagaag

SEQ ID NO: 4699 - DNA, 44 bp, Homo Sapiens
agctccgaggtgattttcatattgaattgcaaattcgaagaagc

SEQ ID NO: 4700 - DNA, 45 bp, Homo Sapiens
agctccgaggtgattttcatattgaattgcaaattcgaagaagca

SEQ ID NO: 4701 - DNA, 47 bp, Homo Sapiens
agctccgaggtgattttcatattgaattgcaaattcgaagaagcagc

SEQ ID NO: 4702 - DNA, 48 bp, Homo Sapiens
agctccgaggtgattttcatattgaattgcaaattcgaagaagcagct

SEQ ID NO: 4703 - DNA, 26 bp, Homo Sapiens
agctgccttccaagcagttgacccgg

SEQ ID NO: 4704 - DNA, 27 bp, Homo Sapiens
agctgccttccaagcagttgacccggg

SEQ ID NO: 4705 - DNA, 28 bp, Homo Sapiens
agctgccttccaagcagttgacccgggt

SEQ ID NO: 4706 - DNA, 29 bp, Homo Sapiens
agctgccttccaagcagttgacccgggtt

SEQ ID NO: 4707 - DNA, 30 bp, Homo Sapiens
agctgccttccaagcagttgacccgggttc

SEQ ID NO: 4708 - DNA, 31 bp, Homo Sapiens
agctgccttccaagcagttgacccgggttcg

SEQ ID NO: 4709 - DNA, 16 bp, Homo Sapiens
agctggggattgtggg

SEQ ID NO: 4710 - DNA, 17 bp, Homo Sapiens
agctggggattgtgggt

SEQ ID NO: 4711 - DNA, 18 bp, Homo Sapiens
agctggggattgtgggtt

SEQ ID NO: 4712 - DNA, 19 bp, Homo Sapiens
agctggggattgtgggttc

SEQ ID NO: 4713 - DNA, 26 bp, Homo Sapiens
agctggggattgtgggttcgagtccc

SEQ ID NO: 4714 - DNA, 33 bp, Homo Sapiens
agctggggattgtgggttcgagtcccatctggg

SEQ ID NO: 4715 - DNA, 34 bp, Homo Sapiens
agctggggattgtgggttcgagtcccatctgggt

SEQ ID NO: 4716 - DNA, 36 bp, Homo Sapiens
agctggggattgtgggttcgagtcccatctgggtcg

SEQ ID NO: 4717 - DNA, 37 bp, Homo Sapiens
agctggggattgtgggttcgagtcccatctgggtcgc

SEQ ID NO: 4718 - DNA, 38 bp, Homo Sapiens
agctggggattgtgggttcgagtcccatctgggtcgcc

SEQ ID NO: 4719 - DNA, 39 bp, Homo Sapiens
agctggggattgtgggttcgagtcccatctgggtcgcca

SEQ ID NO: 4720 - DNA, 18 bp, Homo Sapiens
agctggtagagcggagga

SEQ ID NO: 4721 - DNA, 19 bp, Homo Sapiens
agctggtagagcggaggac

SEQ ID NO: 4722 - DNA, 20 bp, Homo Sapiens
agctggtagagcggaggact

SEQ ID NO: 4723 - DNA, 21 bp, Homo Sapiens
agctggtagagcggaggactg

SEQ ID NO: 4724 - DNA, 24 bp, Homo Sapiens
agctggtagagcggaggactgtag

SEQ ID NO: 4725 - DNA, 19 bp, Homo Sapiens
agctgttaactaagtgttt

SEQ ID NO: 4726 - DNA, 20 bp, Homo Sapiens
agctgttaactaagtgtttg

SEQ ID NO: 4727 - DNA, 21 bp, Homo Sapiens
agctgttaactaagtgtttgt

SEQ ID NO: 4728 - DNA, 23 bp, Homo Sapiens
agctgttaactaagtgtttgtgg

SEQ ID NO: 4729 - DNA, 26 bp, Homo Sapiens
agctgttaactaagtgtttgtgggtt

SEQ ID NO: 4730 - DNA, 27 bp, Homo Sapiens
agctgttaactaagtgtttgtgggttt

SEQ ID NO: 4731 - DNA, 28 bp, Homo Sapiens
agctgttaactaagtgtttgtgggttta

SEQ ID NO: 4732 - DNA, 29 bp, Homo Sapiens
agctgttaactaagtgtttgtgggtttaa

SEQ ID NO: 4733 - DNA, 30 bp, Homo Sapiens
agctgttaactaagtgtttgtgggtttaag

SEQ ID NO: 4734 - DNA, 34 bp, Homo Sapiens
agctgttaactaagtgtttgtgggtttaagtccc

SEQ ID NO: 4735 - DNA, 37 bp, Homo Sapiens
agctgttaactaagtgtttgtgggtttaagtcccatt

SEQ ID NO: 4736 - DNA, 39 bp, Homo Sapiens
agctgttaactaagtgtttgtgggtttaagtcccattgg

SEQ ID NO: 4737 - DNA, 40 bp, Homo Sapiens
agctgttaactaagtgtttgtgggtttaagtcccattggt

SEQ ID NO: 4738 - DNA, 41 bp, Homo Sapiens
agctgttaactaagtgtttgtgggtttaagtcccattggtc

SEQ ID NO: 4739 - DNA, 42 bp, Homo Sapiens
agctgttaactaagtgtttgtgggtttaagtcccattggtct

SEQ ID NO: 4740 - DNA, 44 bp, Homo Sapiens
agctgttaactaagtgtttgtgggtttaagtcccattggtctag

SEQ ID NO: 4741 - DNA, 45 bp, Homo Sapiens
agctgttaactaagtgtttgtgggtttaagtcccattggtctagc

SEQ ID NO: 4742 - DNA, 46 bp, Homo Sapiens
agctgttaactaagtgtttgtgggtttaagtcccattggtctagcc

SEQ ID NO: 4743 - DNA, 47 bp, Homo Sapiens
agctgttaactaagtgtttgtgggtttaagtcccattggtctagcca

SEQ ID NO: 4744 - DNA, 17 bp, Homo Sapiens
agcttaaacccccttat

SEQ ID NO: 4745 - DNA, 18 bp, Homo Sapiens
agcttaaacccccttatt

SEQ ID NO: 4746 - DNA, 20 bp, Homo Sapiens
agcttaaacccccttatttc

SEQ ID NO: 4747 - DNA, 21 bp, Homo Sapiens
agcttaaacccccttatttct

SEQ ID NO: 4748 - DNA, 22 bp, Homo Sapiens
agcttaaacccccttatttcta

SEQ ID NO: 4749 - DNA, 23 bp, Homo Sapiens
agcttaaacccccttatttctac

SEQ ID NO: 4750 - DNA, 24 bp, Homo Sapiens
agcttaaacccccttatttctacc

SEQ ID NO: 4751 - DNA, 25 bp, Homo Sapiens
agcttaaacccccttatttctacca

SEQ ID NO: 4752 - DNA, 25 bp, Homo Sapiens
agcttaattaaagtggctgatttgc

SEQ ID NO: 4753 - DNA, 27 bp, Homo Sapiens
agcttacctcctcaaagcaatacactg

SEQ ID NO: 4754 - DNA, 26 bp, Homo Sapiens
agcttagcggtagagcatttgactgc

SEQ ID NO: 4755 - DNA, 16 bp, Homo Sapiens
agcttcaaacctgccg

SEQ ID NO: 4756 - DNA, 17 bp, Homo Sapiens
agcttcaaacctgccgg

SEQ ID NO: 4757 - DNA, 18 bp, Homo Sapiens
agcttcaaacctgccggg

SEQ ID NO: 4758 - DNA, 19 bp, Homo Sapiens
agcttcaaacctgccgggg

SEQ ID NO: 4759 - DNA, 20 bp, Homo Sapiens
agcttcaaacctgccggggc

SEQ ID NO: 4760 - DNA, 21 bp, Homo Sapiens
agcttcaaacctgccggggct

SEQ ID NO: 4761 - DNA, 22 bp, Homo Sapiens
agcttcaaacctgccggggctt

SEQ ID NO: 4762 - DNA, 23 bp, Homo Sapiens
agcttcaaacctgccggggcttc

SEQ ID NO: 4763 - DNA, 24 bp, Homo Sapiens
agcttcaaacctgccggggcttcc

SEQ ID NO: 4764 - DNA, 25 bp, Homo Sapiens
agcttcaaacctgccggggcttcca

SEQ ID NO: 4765 - DNA, 16 bp, Homo Sapiens
agctttggggggttcg

SEQ ID NO: 4766 - DNA, 17 bp, Homo Sapiens
agctttggggggttcga

SEQ ID NO: 4767 - DNA, 18 bp, Homo Sapiens
agctttggggggttcgat

SEQ ID NO: 4768 - DNA, 19 bp, Homo Sapiens
agctttggggggttcgatt

SEQ ID NO: 4769 - DNA, 20 bp, Homo Sapiens
agctttggggggttcgattc

SEQ ID NO: 4770 - DNA, 21 bp, Homo Sapiens
agctttggggggttcgattcc

SEQ ID NO: 4771 - DNA, 22 bp, Homo Sapiens
agctttggggggttcgattcct

SEQ ID NO: 4772 - DNA, 23 bp, Homo Sapiens
agctttggggggttcgattcctt

SEQ ID NO: 4773 - DNA, 24 bp, Homo Sapiens
agctttggggggttcgattccttc

SEQ ID NO: 4774 - DNA, 25 bp, Homo Sapiens
agctttggggggttcgattccttcc

SEQ ID NO: 4775 - DNA, 26 bp, Homo Sapiens
agctttggggggttcgattccttcct

SEQ ID NO: 4776 - DNA, 27 bp, Homo Sapiens
agctttggggggttcgattccttcctt

SEQ ID NO: 4777 - DNA, 28 bp, Homo Sapiens
agctttggggggttcgattccttccttt

SEQ ID NO: 4778 - DNA, 32 bp, Homo Sapiens
agctttggggggttcgattccttccttttttg

SEQ ID NO: 4779 - DNA, 33 bp, Homo Sapiens
agctttggggggttcgattccttccttttttgc

SEQ ID NO: 4780 - DNA, 34 bp, Homo Sapiens
agctttggggggttcgattccttccttttttgcc

SEQ ID NO: 4781 - DNA, 35 bp, Homo Sapiens
agctttggggggttcgattccttccttttttgcca

SEQ ID NO: 4782 - DNA, 20 bp, Homo Sapiens
agctttgggtgctaatggtg

SEQ ID NO: 4783 - DNA, 22 bp, Homo Sapiens
agctttgggtgctaatggtgga

SEQ ID NO: 4784 - DNA, 23 bp, Homo Sapiens
agctttgggtgctaatggtggag

SEQ ID NO: 4785 - DNA, 24 bp, Homo Sapiens
agctttgggtgctaatggtggagt

SEQ ID NO: 4786 - DNA, 25 bp, Homo Sapiens
agctttgggtgctaatggtggagtt

SEQ ID NO: 4787 - DNA, 26 bp, Homo Sapiens
agctttgggtgctaatggtggagtta

SEQ ID NO: 4788 - DNA, 27 bp, Homo Sapiens
agctttgggtgctaatggtggagttaa

SEQ ID NO: 4789 - DNA, 28 bp, Homo Sapiens
agctttgggtgctaatggtggagttaaa

SEQ ID NO: 4790 - DNA, 29 bp, Homo Sapiens
agctttgggtgctaatggtggagttaaag

SEQ ID NO: 4791 - DNA, 30 bp, Homo Sapiens
agctttgggtgctaatggtggagttaaaga

SEQ ID NO: 4792 - DNA, 31 bp, Homo Sapiens
agctttgggtgctaatggtggagttaaagac

SEQ ID NO: 4793 - DNA, 32 bp, Homo Sapiens
agctttgggtgctaatggtggagttaaagact

SEQ ID NO: 4794 - DNA, 33 bp, Homo Sapiens
agctttgggtgctaatggtggagttaaagactt

SEQ ID NO: 4795 - DNA, 34 bp, Homo Sapiens
agctttgggtgctaatggtggagttaaagacttt

SEQ ID NO: 4796 - DNA, 35 bp, Homo Sapiens
agctttgggtgctaatggtggagttaaagactttt

SEQ ID NO: 4797 - DNA, 40 bp, Homo Sapiens
agctttgggtgctaatggtggagttaaagactttttctct

SEQ ID NO: 4798 - DNA, 42 bp, Homo Sapiens
agctttgggtgctaatggtggagttaaagactttttctctga

SEQ ID NO: 4799 - DNA, 43 bp, Homo Sapiens
agctttgggtgctaatggtggagttaaagactttttctctgac

SEQ ID NO: 4800 - DNA, 44 bp, Homo Sapiens
agctttgggtgctaatggtggagttaaagactttttctctgacc

SEQ ID NO: 4801 - DNA, 45 bp, Homo Sapiens
agctttgggtgctaatggtggagttaaagactttttctctgacca

SEQ ID NO: 4802 - DNA, 16 bp, Homo Sapiens
aggagatcctgggttc

SEQ ID NO: 4803 - DNA, 17 bp, Homo Sapiens
aggagatcctgggttcg

SEQ ID NO: 4804 - DNA, 27 bp, Homo Sapiens
aggagatcctgggttcgaatcccagcg

SEQ ID NO: 4805 - DNA, 31 bp, Homo Sapiens
aggagatcctgggttcgaatcccagcggggc

SEQ ID NO: 4806 - DNA, 32 bp, Homo Sapiens
aggagatcctgggttcgaatcccagcggggcc

SEQ ID NO: 4807 - DNA, 33 bp, Homo Sapiens
aggagatcctgggttcgaatcccagcggggcct

SEQ ID NO: 4808 - DNA, 34 bp, Homo Sapiens
aggagatcctgggttcgaatcccagcggggcctc

SEQ ID NO: 4809 - DNA, 35 bp, Homo Sapiens
aggagatcctgggttcgaatcccagcggggcctcc

SEQ ID NO: 4810 - DNA, 30 bp, Homo Sapiens
aggagatcctgggttcgaatcccagcggtg

SEQ ID NO: 4811 - DNA, 31 bp, Homo Sapiens
aggagatcctgggttcgaatcccagcggtgc

SEQ ID NO: 4812 - DNA, 32 bp, Homo Sapiens
aggagatcctgggttcgaatcccagcggtgcc

SEQ ID NO: 4813 - DNA, 33 bp, Homo Sapiens
aggagatcctgggttcgaatcccagcggtgcct

SEQ ID NO: 4814 - DNA, 34 bp, Homo Sapiens
aggagatcctgggttcgaatcccagcggtgcctc

SEQ ID NO: 4815 - DNA, 35 bp, Homo Sapiens
aggagatcctgggttcgaatcccagcggtgcctcc

SEQ ID NO: 4816 - DNA, 32 bp, Homo Sapiens
aggagatcctgggttcgaatcccagtagagcc

SEQ ID NO: 4817 - DNA, 34 bp, Homo Sapiens
aggagatcctgggttcgaatcccagtagagcctc

SEQ ID NO: 4818 - DNA, 35 bp, Homo Sapiens
aggagatcctgggttcgaatcccagtagagcctcc

SEQ ID NO: 4819 - DNA, 34 bp, Homo Sapiens
aggagatcctgggttcgactcccagcggggcctc

SEQ ID NO: 4820 - DNA, 35 bp, Homo Sapiens
aggagatcctgggttcgactcccagcggggcctcc

SEQ ID NO: 4821 - DNA, 30 bp, Homo Sapiens
aggagatcctgggttcgactcccagtgggg

SEQ ID NO: 4822 - DNA, 34 bp, Homo Sapiens
aggagatcctgggttcgactcccagtggggcctc

SEQ ID NO: 4823 - DNA, 35 bp, Homo Sapiens
aggagatcctgggttcgactcccagtggggcctcc

SEQ ID NO: 4824 - DNA, 16 bp, Homo Sapiens
aggagatttcaactta

SEQ ID NO: 4825 - DNA, 17 bp, Homo Sapiens
aggagatttcaacttaa

SEQ ID NO: 4826 - DNA, 18 bp, Homo Sapiens
aggagatttcaacttaac

SEQ ID NO: 4827 - DNA, 19 bp, Homo Sapiens
aggagatttcaacttaact

SEQ ID NO: 4828 - DNA, 20 bp, Homo Sapiens
aggagatttcaacttaactt

SEQ ID NO: 4829 - DNA, 21 bp, Homo Sapiens
aggagatttcaacttaacttg

SEQ ID NO: 4830 - DNA, 22 bp, Homo Sapiens
aggagatttcaacttaacttga

SEQ ID NO: 4831 - DNA, 23 bp, Homo Sapiens
aggagatttcaacttaacttgac

SEQ ID NO: 4832 - DNA, 24 bp, Homo Sapiens
aggagatttcaacttaacttgacc

SEQ ID NO: 4833 - DNA, 25 bp, Homo Sapiens
aggagatttcaacttaacttgaccg

SEQ ID NO: 4834 - DNA, 26 bp, Homo Sapiens
aggagatttcaacttaacttgaccgc

SEQ ID NO: 4835 - DNA, 27 bp, Homo Sapiens
aggagatttcaacttaacttgaccgct

SEQ ID NO: 4836 - DNA, 28 bp, Homo Sapiens
aggagatttcaacttaacttgaccgctc

SEQ ID NO: 4837 - DNA, 29 bp, Homo Sapiens
aggagatttcaacttaacttgaccgctct

SEQ ID NO: 4838 - DNA, 30 bp, Homo Sapiens
aggagatttcaacttaacttgaccgctctg

SEQ ID NO: 4839 - DNA, 31 bp, Homo Sapiens
aggagatttcaacttaacttgaccgctctga

SEQ ID NO: 4840 - DNA, 32 bp, Homo Sapiens
aggagatttcaacttaacttgaccgctctgac

SEQ ID NO: 4841 - DNA, 33 bp, Homo Sapiens
aggagatttcaacttaacttgaccgctctgacc

SEQ ID NO: 4842 - DNA, 34 bp, Homo Sapiens
aggagatttcaacttaacttgaccgctctgacca

SEQ ID NO: 4843 - DNA, 16 bp, Homo Sapiens
aggagcttaaaccccc

SEQ ID NO: 4844 - DNA, 19 bp, Homo Sapiens
aggagcttaaaccccctta

SEQ ID NO: 4845 - DNA, 22 bp, Homo Sapiens
aggagcttaaacccccttattt

SEQ ID NO: 4846 - DNA, 24 bp, Homo Sapiens
aggagcttaaacccccttatttct

SEQ ID NO: 4847 - DNA, 25 bp, Homo Sapiens
aggagcttaaacccccttatttcta

SEQ ID NO: 4848 - DNA, 26 bp, Homo Sapiens
aggagcttaaacccccttatttctac

SEQ ID NO: 4849 - DNA, 27 bp, Homo Sapiens
aggagcttaaacccccttatttctacc

SEQ ID NO: 4850 - DNA, 28 bp, Homo Sapiens
aggagcttaaacccccttatttctacca

SEQ ID NO: 4851 - DNA, 23 bp, Homo Sapiens
aggataacagctatccattggtc

SEQ ID NO: 4852 - DNA, 24 bp, Homo Sapiens
aggataacagctatccattggtct

SEQ ID NO: 4853 - DNA, 25 bp, Homo Sapiens
aggataacagctatccattggtctt

SEQ ID NO: 4854 - DNA, 26 bp, Homo Sapiens
aggataacagctatccattggtctta

SEQ ID NO: 4855 - DNA, 27 bp, Homo Sapiens
aggataacagctatccattggtcttag

SEQ ID NO: 4856 - DNA, 30 bp, Homo Sapiens
aggataacagctatccattggtcttaggcc

SEQ ID NO: 4857 - DNA, 31 bp, Homo Sapiens
aggataacagctatccattggtcttaggccc

SEQ ID NO: 4858 - DNA, 17 bp, Homo Sapiens
aggatggccgagcggtc

SEQ ID NO: 4859 - DNA, 18 bp, Homo Sapiens
aggatggccgagcggtct

SEQ ID NO: 4860 - DNA, 19 bp, Homo Sapiens
aggatggccgagcggtcta

SEQ ID NO: 4861 - DNA, 20 bp, Homo Sapiens
aggatggccgagcggtctaa

SEQ ID NO: 4862 - DNA, 21 bp, Homo Sapiens
aggatggccgagcggtctaag

SEQ ID NO: 4863 - DNA, 22 bp, Homo Sapiens
aggatggccgagcggtctaagg

SEQ ID NO: 4864 - DNA, 23 bp, Homo Sapiens
aggatggccgagcggtctaaggc

SEQ ID NO: 4865 - DNA, 26 bp, Homo Sapiens
aggatggccgagcggtctaaggcgct

SEQ ID NO: 4866 - DNA, 27 bp, Homo Sapiens
aggatggccgagcggtctaaggcgctg

SEQ ID NO: 4867 - DNA, 28 bp, Homo Sapiens
aggatggccgagcggtctaaggcgctgc

SEQ ID NO: 4868 - DNA, 29 bp, Homo Sapiens
aggatggccgagcggtctaaggcgctgcg

SEQ ID NO: 4869 - DNA, 30 bp, Homo Sapiens
aggatggccgagcggtctaaggcgctgcgt

SEQ ID NO: 4870 - DNA, 31 bp, Homo Sapiens
aggatggccgagcggtctaaggcgctgcgtt

SEQ ID NO: 4871 - DNA, 32 bp, Homo Sapiens
aggatggccgagcggtctaaggcgctgcgttc

SEQ ID NO: 4872 - DNA, 33 bp, Homo Sapiens
aggatggccgagcggtctaaggcgctgcgttca

SEQ ID NO: 4873 - DNA, 34 bp, Homo Sapiens
aggatggccgagcggtctaaggcgctgcgttcag

SEQ ID NO: 4874 - DNA, 16 bp, Homo Sapiens
aggatggccgagtggt

SEQ ID NO: 4875 - DNA, 19 bp, Homo Sapiens
aggatggccgagtggtcta

SEQ ID NO: 4876 - DNA, 21 bp, Homo Sapiens
aggatggccgagtggtctaag

SEQ ID NO: 4877 - DNA, 23 bp, Homo Sapiens
aggatggccgagtggtctaaggc

SEQ ID NO: 4878 - DNA, 25 bp, Homo Sapiens
aggatggccgagtggtctaaggcgc

SEQ ID NO: 4879 - DNA, 26 bp, Homo Sapiens
aggatggccgagtggtctaaggcgcc

SEQ ID NO: 4880 - DNA, 32 bp, Homo Sapiens
aggatggccgagtggtctaaggcgccagactc

SEQ ID NO: 4881 - DNA, 33 bp, Homo Sapiens
aggatggccgagtggtctaaggcgccagactca

SEQ ID NO: 4882 - DNA, 20 bp, Homo Sapiens
aggatggccgagtggttaag

SEQ ID NO: 4883 - DNA, 21 bp, Homo Sapiens
aggatggccgagtggttaagg

SEQ ID NO: 4884 - DNA, 22 bp, Homo Sapiens
aggatggccgagtggttaaggc

SEQ ID NO: 4885 - DNA, 19 bp, Homo Sapiens
aggatggggtgtgataggt

SEQ ID NO: 4886 - DNA, 20 bp, Homo Sapiens
aggatggggtgtgataggtg

SEQ ID NO: 4887 - DNA, 27 bp, Homo Sapiens
aggatggggtgtgataggtggcacgga

SEQ ID NO: 4888 - DNA, 28 bp, Homo Sapiens
aggatggggtgtgataggtggcacggag

SEQ ID NO: 4889 - DNA, 29 bp, Homo Sapiens
aggatggggtgtgataggtggcacggaga

SEQ ID NO: 4890 - DNA, 30 bp, Homo Sapiens
aggatggggtgtgataggtggcacggagaa

SEQ ID NO: 4891 - DNA, 31 bp, Homo Sapiens
aggatggggtgtgataggtggcacggagaat

SEQ ID NO: 4892 - DNA, 32 bp, Homo Sapiens
aggatggggtgtgataggtggcacggagaatt

SEQ ID NO: 4893 - DNA, 33 bp, Homo Sapiens
aggatggggtgtgataggtggcacggagaattt

SEQ ID NO: 4894 - DNA, 34 bp, Homo Sapiens
aggatggggtgtgataggtggcacggagaatttt

SEQ ID NO: 4895 - DNA, 35 bp, Homo Sapiens
aggatggggtgtgataggtggcacggagaattttg

SEQ ID NO: 4896 - DNA, 16 bp, Homo Sapiens
aggattcctggttttc

SEQ ID NO: 4897 - DNA, 24 bp, Homo Sapiens
aggattcctggttttcacccaggc

SEQ ID NO: 4898 - DNA, 28 bp, Homo Sapiens
aggattcctggttttcacccaggcggcc

SEQ ID NO: 4899 - DNA, 30 bp, Homo Sapiens
aggattcctggttttcacccaggcggcccg

SEQ ID NO: 4900 - DNA, 34 bp, Homo Sapiens
aggattcctggttttcacccaggcggcccgggtt

SEQ ID NO: 4901 - DNA, 35 bp, Homo Sapiens
aggattcctggttttcacccaggcggcccgggttc

SEQ ID NO: 4902 - DNA, 48 bp, Homo Sapiens
aggattcctggttttcacccaggcggcccgggttcgactcccggtgtg

SEQ ID NO: 4903 - DNA, 25 bp, Homo Sapiens
aggattcctggttttcacccaggtg

SEQ ID NO: 4904 - DNA, 29 bp, Homo Sapiens
aggattcctggttttcacccaggtggccc

SEQ ID NO: 4905 - DNA, 32 bp, Homo Sapiens
aggattcctggttttcacccaggtggcccggg

SEQ ID NO: 4906 - DNA, 16 bp, Homo Sapiens
aggattcggcgctctc

SEQ ID NO: 4907 - DNA, 17 bp, Homo Sapiens
aggattcggcgctctca

SEQ ID NO: 4908 - DNA, 18 bp, Homo Sapiens
aggattcggcgctctcac

SEQ ID NO: 4909 - DNA, 19 bp, Homo Sapiens
aggattcggcgctctcacc

SEQ ID NO: 4910 - DNA, 20 bp, Homo Sapiens
aggattcggcgctctcaccg

SEQ ID NO: 4911 - DNA, 21 bp, Homo Sapiens
aggattcggcgctctcaccgc

SEQ ID NO: 4912 - DNA, 22 bp, Homo Sapiens
aggattcggcgctctcaccgcc

SEQ ID NO: 4913 - DNA, 23 bp, Homo Sapiens
aggattcggcgctctcaccgccg

SEQ ID NO: 4914 - DNA, 24 bp, Homo Sapiens
aggattcggcgctctcaccgccgc

SEQ ID NO: 4915 - DNA, 27 bp, Homo Sapiens
aggattcggcgctctcaccgccgcggc

SEQ ID NO: 4916 - DNA, 28 bp, Homo Sapiens
aggattcggcgctctcaccgccgcggcc

SEQ ID NO: 4917 - DNA, 29 bp, Homo Sapiens
aggattcggcgctctcaccgccgcggccc

SEQ ID NO: 4918 - DNA, 30 bp, Homo Sapiens
aggattcggcgctctcaccgccgcggcccg

SEQ ID NO: 4919 - DNA, 31 bp, Homo Sapiens
aggattcggcgctctcaccgccgcggcccgg

SEQ ID NO: 4920 - DNA, 32 bp, Homo Sapiens
aggattcggcgctctcaccgccgcggcccggg

SEQ ID NO: 4921 - DNA, 33 bp, Homo Sapiens
aggattcggcgctctcaccgccgcggcccgggt

SEQ ID NO: 4922 - DNA, 34 bp, Homo Sapiens
aggattcggcgctctcaccgccgcggcccgggtt

SEQ ID NO: 4923 - DNA, 35 bp, Homo Sapiens
aggattcggcgctctcaccgccgcggcccgggttc

SEQ ID NO: 4924 - DNA, 36 bp, Homo Sapiens
aggattcggcgctctcaccgccgcggcccgggttcg

SEQ ID NO: 4925 - DNA, 38 bp, Homo Sapiens
aggattcggcgctctcaccgccgcggcccgggttcgat

SEQ ID NO: 4926 - DNA, 44 bp, Homo Sapiens
aggattcggcgctctcaccgccgcggcccgggttcgattcccgg

SEQ ID NO: 4927 - DNA, 45 bp, Homo Sapiens
aggattcggcgctctcaccgccgcggcccgggttcgattcccggt

SEQ ID NO: 4928 - DNA, 46 bp, Homo Sapiens
aggattcggcgctctcaccgccgcggcccgggttcgattcccggtc

SEQ ID NO: 4929 - DNA, 47 bp, Homo Sapiens
aggattcggcgctctcaccgccgcggcccgggttcgattcccggtca

SEQ ID NO: 4930 - DNA, 16 bp, Homo Sapiens
aggattcggcgctttc

SEQ ID NO: 4931 - DNA, 17 bp, Homo Sapiens
aggattcggcgctttca

SEQ ID NO: 4932 - DNA, 18 bp, Homo Sapiens
aggattcggcgctttcac

SEQ ID NO: 4933 - DNA, 19 bp, Homo Sapiens
aggattcggcgctttcacc

SEQ ID NO: 4934 - DNA, 20 bp, Homo Sapiens
aggattcggcgctttcaccg

SEQ ID NO: 4935 - DNA, 24 bp, Homo Sapiens
aggattcggcgctttcaccgccgc

SEQ ID NO: 4936 - DNA, 29 bp, Homo Sapiens
aggattcggcgctttcaccgccgcggccc

SEQ ID NO: 4937 - DNA, 35 bp, Homo Sapiens
aggattcggcgctttcaccgccgcggcccgggttc

SEQ ID NO: 4938 - DNA, 21 bp, Homo Sapiens
aggcatcagcctccggagctg

SEQ ID NO: 4939 - DNA, 25 bp, Homo Sapiens
aggcatcagcctccggagctgggga

SEQ ID NO: 4940 - DNA, 27 bp, Homo Sapiens
aggcatcagcctccggagctggggatt

SEQ ID NO: 4941 - DNA, 28 bp, Homo Sapiens
aggcatcagcctccggagctggggattg

SEQ ID NO: 4942 - DNA, 29 bp, Homo Sapiens
aggcatcagcctccggagctggggattgt

SEQ ID NO: 4943 - DNA, 36 bp, Homo Sapiens
aggcatcagcctccggagctggggattgtgggttcg

SEQ ID NO: 4944 - DNA, 20 bp, Homo Sapiens
aggcattggcctcctaagcc

SEQ ID NO: 4945 - DNA, 29 bp, Homo Sapiens
aggcattggcctcctaagccagggattgt

SEQ ID NO: 4946 - DNA, 40 bp, Homo Sapiens
aggccccaaaaattttggtgcaactccaaataaaagtacc

SEQ ID NO: 4947 - DNA, 24 bp, Homo Sapiens
aggccccgggttcaatccccggca

SEQ ID NO: 4948 - DNA, 26 bp, Homo Sapiens
aggccccgggttcaatccccggcacc

SEQ ID NO: 4949 - DNA, 32 bp, Homo Sapiens
aggccccgggttcaatccccggcacctccacc

SEQ ID NO: 4950 - DNA, 33 bp, Homo Sapiens
aggccccgggttcaatccccggcacctccacca

SEQ ID NO: 4951 - DNA, 32 bp, Homo Sapiens
aggccccgggttcgatccccggcatctccacc

SEQ ID NO: 4952 - DNA, 33 bp, Homo Sapiens
aggccccgggttcgatccccggcatctccacca

SEQ ID NO: 4953 - DNA, 33 bp, Homo Sapiens
aggcctcgtggcgcaacggtagcgcgtctgact

SEQ ID NO: 4954 - DNA, 35 bp, Homo Sapiens
aggcctcgtggcgcaacggtagcgcgtctgactcc

SEQ ID NO: 4955 - DNA, 18 bp, Homo Sapiens
aggcctctttttaccacc

SEQ ID NO: 4956 - DNA, 19 bp, Homo Sapiens
aggcctctttttaccacca

SEQ ID NO: 4957 - DNA, 19 bp, Homo Sapiens
aggcggcccgggttcgact

SEQ ID NO: 4958 - DNA, 20 bp, Homo Sapiens
aggcggcccgggttcgactc

SEQ ID NO: 4959 - DNA, 22 bp, Homo Sapiens
aggcggcccgggttcgactccc

SEQ ID NO: 4960 - DNA, 23 bp, Homo Sapiens
aggcggcccgggttcgactcccg

SEQ ID NO: 4961 - DNA, 24 bp, Homo Sapiens
aggcggcccgggttcgactcccgg

SEQ ID NO: 4962 - DNA, 25 bp, Homo Sapiens
aggcggcccgggttcgactcccggt

SEQ ID NO: 4963 - DNA, 26 bp, Homo Sapiens
aggcggcccgggttcgactcccggtg

SEQ ID NO: 4964 - DNA, 27 bp, Homo Sapiens
aggcggcccgggttcgactcccggtgt

SEQ ID NO: 4965 - DNA, 28 bp, Homo Sapiens
aggcggcccgggttcgactcccggtgtg

SEQ ID NO: 4966 - DNA, 29 bp, Homo Sapiens
aggcggcccgggttcgactcccggtgtgg

SEQ ID NO: 4967 - DNA, 30 bp, Homo Sapiens
aggcggcccgggttcgactcccggtgtggg

SEQ ID NO: 4968 - DNA, 31 bp, Homo Sapiens
aggcggcccgggttcgactcccggtgtggga

SEQ ID NO: 4969 - DNA, 32 bp, Homo Sapiens
aggcggcccgggttcgactcccggtgtgggaa

SEQ ID NO: 4970 - DNA, 33 bp, Homo Sapiens
aggcggcccgggttcgactcccggtgtgggaac

SEQ ID NO: 4971 - DNA, 34 bp, Homo Sapiens
aggcggcccgggttcgactcccggtgtgggaacc

SEQ ID NO: 4972 - DNA, 35 bp, Homo Sapiens
aggcggcccgggttcgactcccggtgtgggaacca

SEQ ID NO: 4973 - DNA, 19 bp, Homo Sapiens
aggcgtctgacttcggatc

SEQ ID NO: 4974 - DNA, 23 bp, Homo Sapiens
aggcgtctgacttcggatcagaa

SEQ ID NO: 4975 - DNA, 18 bp, Homo Sapiens
aggcgtctgattccggat

SEQ ID NO: 4976 - DNA, 19 bp, Homo Sapiens
aggcgtctgattccggatc

SEQ ID NO: 4977 - DNA, 33 bp, Homo Sapiens
aggcgtctgattccggatcagaagattgagggt

SEQ ID NO: 4978 - DNA, 19 bp, Homo Sapiens
aggcgtgggttcgaatccc

SEQ ID NO: 4979 - DNA, 20 bp, Homo Sapiens
aggcgtgggttcgaatccca

SEQ ID NO: 4980 - DNA, 20 bp, Homo Sapiens
aggctaaatcctatatatct

SEQ ID NO: 4981 - DNA, 24 bp, Homo Sapiens
aggctaaatcctatatatcttacc

SEQ ID NO: 4982 - DNA, 25 bp, Homo Sapiens
aggctaaatcctatatatcttacca

SEQ ID NO: 4983 - DNA, 18 bp, Homo Sapiens
aggctgcgtgttcgaatc

SEQ ID NO: 4984 - DNA, 25 bp, Homo Sapiens
aggctgcgtgttcgaatcacgtcgg

SEQ ID NO: 4985 - DNA, 32 bp, Homo Sapiens
aggctgcgtgttcgaatcacgtcggggtcacc

SEQ ID NO: 4986 - DNA, 18 bp, Homo Sapiens
aggcttacgaccccttat

SEQ ID NO: 4987 - DNA, 19 bp, Homo Sapiens
aggcttacgaccccttatt

SEQ ID NO: 4988 - DNA, 20 bp, Homo Sapiens
aggcttacgaccccttattt

SEQ ID NO: 4989 - DNA, 22 bp, Homo Sapiens
aggcttacgaccccttatttac

SEQ ID NO: 4990 - DNA, 23 bp, Homo Sapiens
aggcttacgaccccttatttacc

SEQ ID NO: 4991 - DNA, 24 bp, Homo Sapiens
aggcttacgaccccttatttaccc

SEQ ID NO: 4992 - DNA, 25 bp, Homo Sapiens
aggcttacgaccccttatttacccc

SEQ ID NO: 4993 - DNA, 26 bp, Homo Sapiens
aggcttacgaccccttatttacccca

SEQ ID NO: 4994 - DNA, 17 bp, Homo Sapiens
agggatgggttcgattc

SEQ ID NO: 4995 - DNA, 18 bp, Homo Sapiens
agggatgggttcgattct

SEQ ID NO: 4996 - DNA, 19 bp, Homo Sapiens
agggatgggttcgattctc

SEQ ID NO: 4997 - DNA, 20 bp, Homo Sapiens
agggatgggttcgattctca

SEQ ID NO: 4998 - DNA, 22 bp, Homo Sapiens
agggatgggttcgattctcata

SEQ ID NO: 4999 - DNA, 25 bp, Homo Sapiens
agggatgggttcgattctcatagtc

SEQ ID NO: 5000 - DNA, 26 bp, Homo Sapiens
agggatgggttcgattctcatagtcc

SEQ ID NO: 5001 - DNA, 27 bp, Homo Sapiens
agggatgggttcgattctcatagtcct

SEQ ID NO: 5002 - DNA, 29 bp, Homo Sapiens
agggatgggttcgattctcatagtcctag

SEQ ID NO: 5003 - DNA, 30 bp, Homo Sapiens
agggatgggttcgattctcatagtcctagc

SEQ ID NO: 5004 - DNA, 31 bp, Homo Sapiens
agggatgggttcgattctcatagtcctagcc

SEQ ID NO: 5005 - DNA, 32 bp, Homo Sapiens
agggatgggttcgattctcatagtcctagcca

SEQ ID NO: 5006 - DNA, 16 bp, Homo Sapiens
agggattgtgggttcg

SEQ ID NO: 5007 - DNA, 19 bp, Homo Sapiens
agggattgtgggttcgagt

SEQ ID NO: 5008 - DNA, 21 bp, Homo Sapiens
agggattgtgggttcgagtcc

SEQ ID NO: 5009 - DNA, 22 bp, Homo Sapiens
agggattgtgggttcgagtccc

SEQ ID NO: 5010 - DNA, 23 bp, Homo Sapiens
agggattgtgggttcgagtccca

SEQ ID NO: 5011 - DNA, 25 bp, Homo Sapiens
agggattgtgggttcgagtcccacc

SEQ ID NO: 5012 - DNA, 29 bp, Homo Sapiens
agggattgtgggttcgagtcccacccggg

SEQ ID NO: 5013 - DNA, 30 bp, Homo Sapiens
agggattgtgggttcgagtcccacccgggg

SEQ ID NO: 5014 - DNA, 31 bp, Homo Sapiens
agggattgtgggttcgagtcccacccggggt

SEQ ID NO: 5015 - DNA, 32 bp, Homo Sapiens
agggattgtgggttcgagtcccacccggggta

SEQ ID NO: 5016 - DNA, 33 bp, Homo Sapiens
agggattgtgggttcgagtcccacccggggtac

SEQ ID NO: 5017 - DNA, 34 bp, Homo Sapiens
agggattgtgggttcgagtcccacccggggtacc

SEQ ID NO: 5018 - DNA, 35 bp, Homo Sapiens
agggattgtgggttcgagtcccacccggggtacca

SEQ ID NO: 5019 - DNA, 31 bp, Homo Sapiens
agggattgtgggttcgagtcccacctggggt

SEQ ID NO: 5020 - DNA, 32 bp, Homo Sapiens
agggattgtgggttcgagtcccacctggggta

SEQ ID NO: 5021 - DNA, 33 bp, Homo Sapiens
agggattgtgggttcgagtcccacctggggtac

SEQ ID NO: 5022 - DNA, 34 bp, Homo Sapiens
agggattgtgggttcgagtcccacctggggtacc

SEQ ID NO: 5023 - DNA, 35 bp, Homo Sapiens
agggattgtgggttcgagtcccacctggggtacca

SEQ ID NO: 5024 - DNA, 32 bp, Homo Sapiens
agggattgtgggttcgagtcccacctggggtg

SEQ ID NO: 5025 - DNA, 33 bp, Homo Sapiens
agggattgtgggttcgagtcccacctggggtgc

SEQ ID NO: 5026 - DNA, 34 bp, Homo Sapiens
agggattgtgggttcgagtcccacctggggtgcc

SEQ ID NO: 5027 - DNA, 35 bp, Homo Sapiens
agggattgtgggttcgagtcccacctggggtgcca

SEQ ID NO: 5028 - DNA, 25 bp, Homo Sapiens
agggattgtgggttcgagtcccatc

SEQ ID NO: 5029 - DNA, 26 bp, Homo Sapiens
agggattgtgggttcgagtcccatct

SEQ ID NO: 5030 - DNA, 29 bp, Homo Sapiens
agggattgtgggttcgagtcccatctggg

SEQ ID NO: 5031 - DNA, 30 bp, Homo Sapiens
agggattgtgggttcgagtcccatctgggg

SEQ ID NO: 5032 - DNA, 31 bp, Homo Sapiens
agggattgtgggttcgagtcccatctggggt

SEQ ID NO: 5033 - DNA, 32 bp, Homo Sapiens
agggattgtgggttcgagtcccatctggggtg

SEQ ID NO: 5034 - DNA, 33 bp, Homo Sapiens
agggattgtgggttcgagtcccatctggggtgc

SEQ ID NO: 5035 - DNA, 34 bp, Homo Sapiens
agggattgtgggttcgagtcccatctggggtgcc

SEQ ID NO: 5036 - DNA, 35 bp, Homo Sapiens
agggattgtgggttcgagtcccatctggggtgcca

SEQ ID NO: 5037 - DNA, 33 bp, Homo Sapiens
agggggtatagctcagtggtagagcatttgact

SEQ ID NO: 5038 - DNA, 20 bp, Homo Sapiens
aggggtagagcatttgactg

SEQ ID NO: 5039 - DNA, 21 bp, Homo Sapiens
aggggtagagcatttgactgc

SEQ ID NO: 5040 - DNA, 16 bp, Homo Sapiens
aggggtatgattctcg

SEQ ID NO: 5041 - DNA, 17 bp, Homo Sapiens
aggggtatgattctcgc

SEQ ID NO: 5042 - DNA, 18 bp, Homo Sapiens
aggggtatgattctcgct

SEQ ID NO: 5043 - DNA, 19 bp, Homo Sapiens
aggggtatgattctcgctt

SEQ ID NO: 5044 - DNA, 20 bp, Homo Sapiens
aggggtatgattctcgcttc

SEQ ID NO: 5045 - DNA, 22 bp, Homo Sapiens
aggggtatgattctcgcttcgg

SEQ ID NO: 5046 - DNA, 22 bp, Homo Sapiens
aggggtatgattctcgctttgg

SEQ ID NO: 5047 - DNA, 18 bp, Homo Sapiens
aggggtatgattctcggt

SEQ ID NO: 5048 - DNA, 19 bp, Homo Sapiens
aggggtatgattctcggtt

SEQ ID NO: 5049 - DNA, 20 bp, Homo Sapiens
aggggtatgattctcggttt

SEQ ID NO: 5050 - DNA, 21 bp, Homo Sapiens
aggggtatgattctcggtttg

SEQ ID NO: 5051 - DNA, 22 bp, Homo Sapiens
aggggtatgattctcggtttgg

SEQ ID NO: 5052 - DNA, 16 bp, Homo Sapiens
aggggtcgcgagttca

SEQ ID NO: 5053 - DNA, 28 bp, Homo Sapiens
aggggtcgcgagttcaaatctcgctggg

SEQ ID NO: 5054 - DNA, 30 bp, Homo Sapiens
aggggtcgcgagttcaaatctcgctggggc

SEQ ID NO: 5055 - DNA, 31 bp, Homo Sapiens
aggggtcgcgagttcaaatctcgctggggcc

SEQ ID NO: 5056 - DNA, 32 bp, Homo Sapiens
aggggtcgcgagttcaaatctcgctggggcct

SEQ ID NO: 5057 - DNA, 33 bp, Homo Sapiens
aggggtcgcgagttcaaatctcgctggggcctc

SEQ ID NO: 5058 - DNA, 34 bp, Homo Sapiens
aggggtcgcgagttcaaatctcgctggggcctcc

SEQ ID NO: 5059 - DNA, 32 bp, Homo Sapiens
aggggtcgcgagttcaattctcgctggggcct

SEQ ID NO: 5060 - DNA, 33 bp, Homo Sapiens
aggggtcgcgagttcaattctcgctggggcctc

SEQ ID NO: 5061 - DNA, 16 bp, Homo Sapiens
aggggtcgcgagttcg

SEQ ID NO: 5062 - DNA, 32 bp, Homo Sapiens
aggggtcgcgagttcgatcctcgctggggcct

SEQ ID NO: 5063 - DNA, 33 bp, Homo Sapiens
aggggtcgcgagttcgatcctcgctggggcctc

SEQ ID NO: 5064 - DNA, 16 bp, Homo Sapiens
aggggttagagcactg

SEQ ID NO: 5065 - DNA, 17 bp, Homo Sapiens
aggggttagagcactgg

SEQ ID NO: 5066 - DNA, 19 bp, Homo Sapiens
aggggttagagcactggtc

SEQ ID NO: 5067 - DNA, 20 bp, Homo Sapiens
aggggttagagcactggtct

SEQ ID NO: 5068 - DNA, 22 bp, Homo Sapiens
aggggttaggcctctttttacc

SEQ ID NO: 5069 - DNA, 25 bp, Homo Sapiens
aggggttaggcctctttttaccacc

SEQ ID NO: 5070 - DNA, 26 bp, Homo Sapiens
aggggttaggcctctttttaccacca

SEQ ID NO: 5071 - DNA, 24 bp, Homo Sapiens
agggtccagggttcaagtccctgt

SEQ ID NO: 5072 - DNA, 34 bp, Homo Sapiens
agggtccagggttcaagtccctgttcaggcgcca

SEQ ID NO: 5073 - DNA, 30 bp, Homo Sapiens
agggtccagggttcaagtccctgttcgggc

SEQ ID NO: 5074 - DNA, 31 bp, Homo Sapiens
agggtccagggttcaagtccctgttcgggcg

SEQ ID NO: 5075 - DNA, 32 bp, Homo Sapiens
agggtccagggttcaagtccctgttcgggcgc

SEQ ID NO: 5076 - DNA, 33 bp, Homo Sapiens
agggtccagggttcaagtccctgttcgggcgcc

SEQ ID NO: 5077 - DNA, 34 bp, Homo Sapiens
agggtccagggttcaagtccctgttcgggcgcca

SEQ ID NO: 5078 - DNA, 25 bp, Homo Sapiens
agggtccagggttcatgtccctgtt

SEQ ID NO: 5079 - DNA, 21 bp, Homo Sapiens
agggtcgtgggttcgagcccc

SEQ ID NO: 5080 - DNA, 22 bp, Homo Sapiens
agggtcgtgggttcgagcccca

SEQ ID NO: 5081 - DNA, 24 bp, Homo Sapiens
agggtcgtgggttcgagccccacg

SEQ ID NO: 5082 - DNA, 25 bp, Homo Sapiens
agggtcgtgggttcgagccccacgt

SEQ ID NO: 5083 - DNA, 27 bp, Homo Sapiens
agggtcgtgggttcgagccccacgttg

SEQ ID NO: 5084 - DNA, 28 bp, Homo Sapiens
agggtcgtgggttcgagccccacgttgg

SEQ ID NO: 5085 - DNA, 29 bp, Homo Sapiens
agggtcgtgggttcgagccccacgttggg

SEQ ID NO: 5086 - DNA, 30 bp, Homo Sapiens
agggtcgtgggttcgagccccacgttgggc

SEQ ID NO: 5087 - DNA, 31 bp, Homo Sapiens
agggtcgtgggttcgagccccacgttgggcg

SEQ ID NO: 5088 - DNA, 32 bp, Homo Sapiens
agggtcgtgggttcgagccccacgttgggcgc

SEQ ID NO: 5089 - DNA, 33 bp, Homo Sapiens
agggtcgtgggttcgagccccacgttgggcgcc

SEQ ID NO: 5090 - DNA, 34 bp, Homo Sapiens
agggtcgtgggttcgagccccacgttgggcgcca

SEQ ID NO: 5091 - DNA, 16 bp, Homo Sapiens
agggtgcttagctgtt

SEQ ID NO: 5092 - DNA, 20 bp, Homo Sapiens
agggtgcttagctgttaact

SEQ ID NO: 5093 - DNA, 27 bp, Homo Sapiens
agggtgcttagctgttaactaagtgtt

SEQ ID NO: 5094 - DNA, 30 bp, Homo Sapiens
agggtgcttagctgttaactaagtgtttgt

SEQ ID NO: 5095 - DNA, 31 bp, Homo Sapiens
agggtgcttagctgttaactaagtgtttgtg

SEQ ID NO: 5096 - DNA, 35 bp, Homo Sapiens
agggtgcttagctgttaactaagtgtttgtgggtt

SEQ ID NO: 5097 - DNA, 36 bp, Homo Sapiens
agggtgcttagctgttaactaagtgtttgtgggttt

SEQ ID NO: 5098 - DNA, 37 bp, Homo Sapiens
agggtgcttagctgttaactaagtgtttgtgggttta

SEQ ID NO: 5099 - DNA, 46 bp, Homo Sapiens
agggtgcttagctgttaactaagtgtttgtgggtttaagtcccatt

SEQ ID NO: 5100 - DNA, 23 bp, Homo Sapiens
agggttcaagtccctgttcgggc

SEQ ID NO: 5101 - DNA, 24 bp, Homo Sapiens
agggttcaagtccctgttcgggcg

SEQ ID NO: 5102 - DNA, 25 bp, Homo Sapiens
agggttcaagtccctgttcgggcgc

SEQ ID NO: 5103 - DNA, 26 bp, Homo Sapiens
agggttcaagtccctgttcgggcgcc

SEQ ID NO: 5104 - DNA, 27 bp, Homo Sapiens
agggttcaagtccctgttcgggcgcca

SEQ ID NO: 5105 - DNA, 17 bp, Homo Sapiens
agggttcatgtccctgt

SEQ ID NO: 5106 - DNA, 26 bp, Homo Sapiens
agggttcgaatcccttcgtggttgcc

SEQ ID NO: 5107 - DNA, 24 bp, Homo Sapiens
agggttcgagtcccttcgtggtcg

SEQ ID NO: 5108 - DNA, 25 bp, Homo Sapiens
agggttcgagtcccttcgtggtcgc

SEQ ID NO: 5109 - DNA, 26 bp, Homo Sapiens
agggttcgagtcccttcgtggtcgcc

SEQ ID NO: 5110 - DNA, 27 bp, Homo Sapiens
agggttcgagtcccttcgtggtcgcca

SEQ ID NO: 5111 - DNA, 16 bp, Homo Sapiens
aggtagcgcatcagtc

SEQ ID NO: 5112 - DNA, 17 bp, Homo Sapiens
aggtagcgcatcagtct

SEQ ID NO: 5113 - DNA, 16 bp, Homo Sapiens
aggtcagctaaataag

SEQ ID NO: 5114 - DNA, 21 bp, Homo Sapiens
aggtcagctaaataagctatc

SEQ ID NO: 5115 - DNA, 24 bp, Homo Sapiens
aggtcagctaaataagctatcggg

SEQ ID NO: 5116 - DNA, 25 bp, Homo Sapiens
aggtcagctaaataagctatcgggc

SEQ ID NO: 5117 - DNA, 26 bp, Homo Sapiens
aggtcagctaaataagctatcgggcc

SEQ ID NO: 5118 - DNA, 27 bp, Homo Sapiens
aggtcagctaaataagctatcgggccc

SEQ ID NO: 5119 - DNA, 28 bp, Homo Sapiens
aggtcagctaaataagctatcgggccca

SEQ ID NO: 5120 - DNA, 29 bp, Homo Sapiens
aggtcagctaaataagctatcgggcccat

SEQ ID NO: 5121 - DNA, 30 bp, Homo Sapiens
aggtcagctaaataagctatcgggcccata

SEQ ID NO: 5122 - DNA, 32 bp, Homo Sapiens
aggtcagctaaataagctatcgggcccatacc

SEQ ID NO: 5123 - DNA, 36 bp, Homo Sapiens
aggtcagctaaataagctatcgggcccataccccga

SEQ ID NO: 5124 - DNA, 37 bp, Homo Sapiens
aggtcagctaaataagctatcgggcccataccccgaa

SEQ ID NO: 5125 - DNA, 38 bp, Homo Sapiens
aggtcagctaaataagctatcgggcccataccccgaaa

SEQ ID NO: 5126 - DNA, 41 bp, Homo Sapiens
aggtcagctaaataagctatcgggcccataccccgaaaatg

SEQ ID NO: 5127 - DNA, 43 bp, Homo Sapiens
aggtcagctaaataagctatcgggcccataccccgaaaatgtt

SEQ ID NO: 5128 - DNA, 47 bp, Homo Sapiens
aggtcagctaaataagctatcgggcccataccccgaaaatgttggtt

SEQ ID NO: 5129 - DNA, 48 bp, Homo Sapiens
aggtcagctaaataagctatcgggcccataccccgaaaatgttggtta

SEQ ID NO: 5130 - DNA, 30 bp, Homo Sapiens
aggtccccggttcgaaaccgggcggaaaca

SEQ ID NO: 5131 - DNA, 24 bp, Homo Sapiens
aggtcccgggttcaaatcccggac

SEQ ID NO: 5132 - DNA, 21 bp, Homo Sapiens
aggtcccgggttcaatccccg

SEQ ID NO: 5133 - DNA, 31 bp, Homo Sapiens
aggtcccgggttcgatccccagcatctccac

SEQ ID NO: 5134 - DNA, 32 bp, Homo Sapiens
aggtcccgggttcgatccccagcatctccacc

SEQ ID NO: 5135 - DNA, 33 bp, Homo Sapiens
aggtcccgggttcgatccccagcatctccacca

SEQ ID NO: 5136 - DNA, 21 bp, Homo Sapiens
aggtccctggttcaaatccgg

SEQ ID NO: 5137 - DNA, 17 bp, Homo Sapiens
aggtccctggttcaatc

SEQ ID NO: 5138 - DNA, 31 bp, Homo Sapiens
aggtccctggttcgatcccgggtttcggcac

SEQ ID NO: 5139 - DNA, 33 bp, Homo Sapiens
aggtccctggttcgatcccgggtttcggcacca

SEQ ID NO: 5140 - DNA, 16 bp, Homo Sapiens
aggtcctgagttcgaa

SEQ ID NO: 5141 - DNA, 17 bp, Homo Sapiens
aggtcctgagttcgaac

SEQ ID NO: 5142 - DNA, 18 bp, Homo Sapiens
aggtcctgagttcgaacc

SEQ ID NO: 5143 - DNA, 19 bp, Homo Sapiens
aggtcctgagttcgaacct

SEQ ID NO: 5144 - DNA, 29 bp, Homo Sapiens
aggtcctgagttcgaacctcagagggggc

SEQ ID NO: 5145 - DNA, 31 bp, Homo Sapiens
aggtcctgagttcgaacctcagagggggcac

SEQ ID NO: 5146 - DNA, 32 bp, Homo Sapiens
aggtcctgagttcgaacctcagagggggcacc

SEQ ID NO: 5147 - DNA, 33 bp, Homo Sapiens
aggtcctgagttcgaacctcagagggggcacca

SEQ ID NO: 5148 - DNA, 20 bp, Homo Sapiens
aggtcctgggttcgagcccc

SEQ ID NO: 5149 - DNA, 31 bp, Homo Sapiens
aggtcctgggttcgagccccagtggaaccac

SEQ ID NO: 5150 - DNA, 32 bp, Homo Sapiens
aggtcctgggttcgagccccagtggaaccacc

SEQ ID NO: 5151 - DNA, 33 bp, Homo Sapiens
aggtcctgggttcgagccccagtggaaccacca

SEQ ID NO: 5152 - DNA, 17 bp, Homo Sapiens
aggtcgatggatcgaaa

SEQ ID NO: 5153 - DNA, 18 bp, Homo Sapiens
aggtcgatggatcgaaac

SEQ ID NO: 5154 - DNA, 19 bp, Homo Sapiens
aggtcgatggatcgaaacc

SEQ ID NO: 5155 - DNA, 20 bp, Homo Sapiens
aggtcgatggatcgaaacca

SEQ ID NO: 5156 - DNA, 21 bp, Homo Sapiens
aggtcgatggatcgaaaccat

SEQ ID NO: 5157 - DNA, 32 bp, Homo Sapiens
aggtcgatggatcgaaaccatcctctgctacc

SEQ ID NO: 5158 - DNA, 29 bp, Homo Sapiens
aggtcgcgggttcgaaccccgtacgggcc

SEQ ID NO: 5159 - DNA, 30 bp, Homo Sapiens
aggtcgcgggttcgaaccccgtacgggcca

SEQ ID NO: 5160 - DNA, 19 bp, Homo Sapiens
aggtcgcgggttcgatccc

SEQ ID NO: 5161 - DNA, 23 bp, Homo Sapiens
aggtcgcgggttcgatccccgta

SEQ ID NO: 5162 - DNA, 27 bp, Homo Sapiens
aggtcgcgggttcgatccccgtacggg

SEQ ID NO: 5163 - DNA, 28 bp, Homo Sapiens
aggtcgcgggttcgatccccgtacgggc

SEQ ID NO: 5164 - DNA, 29 bp, Homo Sapiens
aggtcgcgggttcgatccccgtacgggcc

SEQ ID NO: 5165 - DNA, 30 bp, Homo Sapiens
aggtcgcgggttcgatccccgtacgggcca

SEQ ID NO: 5166 - DNA, 31 bp, Homo Sapiens
aggtcgcgggttcgatccccgtacgggccac

SEQ ID NO: 5167 - DNA, 32 bp, Homo Sapiens
aggtcgcgggttcgatccccgtacgggccacc

SEQ ID NO: 5168 - DNA, 33 bp, Homo Sapiens
aggtcgcgggttcgatccccgtacgggccacca

SEQ ID NO: 5169 - DNA, 26 bp, Homo Sapiens
aggtcgcgggttcgatccccgtactg

SEQ ID NO: 5170 - DNA, 31 bp, Homo Sapiens
aggtcgctggttcgaatccggctcgaaggac

SEQ ID NO: 5171 - DNA, 32 bp, Homo Sapiens
aggtcgctggttcgaatccggctcgaaggacc

SEQ ID NO: 5172 - DNA, 33 bp, Homo Sapiens
aggtcgctggttcgaatccggctcgaaggacca

SEQ ID NO: 5173 - DNA, 31 bp, Homo Sapiens
aggtcgctggttcgaatccggctcggaggac

SEQ ID NO: 5174 - DNA, 32 bp, Homo Sapiens
aggtcgctggttcgaatccggctcggaggacc

SEQ ID NO: 5175 - DNA, 19 bp, Homo Sapiens
aggtcgctggttcgattcc

SEQ ID NO: 5176 - DNA, 32 bp, Homo Sapiens
aggtcgctggttcgattccagctcgaaggacc

SEQ ID NO: 5177 - DNA, 22 bp, Homo Sapiens
aggtcgctggttcgattccggc

SEQ ID NO: 5178 - DNA, 23 bp, Homo Sapiens
aggtcgctggttcgattccggct

SEQ ID NO: 5179 - DNA, 31 bp, Homo Sapiens
aggtcgctggttcgattccggctcgaaggac

SEQ ID NO: 5180 - DNA, 32 bp, Homo Sapiens
aggtcgctggttcgattccggctcgaaggacc

SEQ ID NO: 5181 - DNA, 33 bp, Homo Sapiens
aggtcgctggttcgattccggctcgaaggacca

SEQ ID NO: 5182 - DNA, 18 bp, Homo Sapiens
aggtcgtgagttcgagcc

SEQ ID NO: 5183 - DNA, 19 bp, Homo Sapiens
aggtcgtgagttcgagcct

SEQ ID NO: 5184 - DNA, 20 bp, Homo Sapiens
aggtcgtgagttcgagcctc

SEQ ID NO: 5185 - DNA, 21 bp, Homo Sapiens
aggtcgtgagttcgagcctca

SEQ ID NO: 5186 - DNA, 18 bp, Homo Sapiens
aggtcgtgagttcgatcc

SEQ ID NO: 5187 - DNA, 20 bp, Homo Sapiens
aggtcgtgagttcgatcctc

SEQ ID NO: 5188 - DNA, 29 bp, Homo Sapiens
aggtcgtgagttcgatcctcacacggggc

SEQ ID NO: 5189 - DNA, 18 bp, Homo Sapiens
aggtgattttcatattga

SEQ ID NO: 5190 - DNA, 19 bp, Homo Sapiens
aggtgattttcatattgaa

SEQ ID NO: 5191 - DNA, 20 bp, Homo Sapiens
aggtgattttcatattgaat

SEQ ID NO: 5192 - DNA, 21 bp, Homo Sapiens
aggtgattttcatattgaatt

SEQ ID NO: 5193 - DNA, 22 bp, Homo Sapiens
aggtgattttcatattgaattg

SEQ ID NO: 5194 - DNA, 23 bp, Homo Sapiens
aggtgattttcatattgaattgc

SEQ ID NO: 5195 - DNA, 24 bp, Homo Sapiens
aggtgattttcatattgaattgca

SEQ ID NO: 5196 - DNA, 36 bp, Homo Sapiens
aggtgattttcatattgaattgcaaattcgaagaag

SEQ ID NO: 5197 - DNA, 37 bp, Homo Sapiens
aggtgattttcatattgaattgcaaattcgaagaagc

SEQ ID NO: 5198 - DNA, 38 bp, Homo Sapiens
aggtgattttcatattgaattgcaaattcgaagaagca

SEQ ID NO: 5199 - DNA, 39 bp, Homo Sapiens
aggtgattttcatattgaattgcaaattcgaagaagcag

SEQ ID NO: 5200 - DNA, 40 bp, Homo Sapiens
aggtgattttcatattgaattgcaaattcgaagaagcagc

SEQ ID NO: 5201 - DNA, 16 bp, Homo Sapiens
aggtggcacggagaat

SEQ ID NO: 5202 - DNA, 17 bp, Homo Sapiens
aggtggcacggagaatt

SEQ ID NO: 5203 - DNA, 18 bp, Homo Sapiens
aggtggcacggagaattt

SEQ ID NO: 5204 - DNA, 19 bp, Homo Sapiens
aggtggcacggagaatttt

SEQ ID NO: 5205 - DNA, 20 bp, Homo Sapiens
aggtggcacggagaattttg

SEQ ID NO: 5206 - DNA, 35 bp, Homo Sapiens
aggtggcacggagaattttggattctcagggatgg

SEQ ID NO: 5207 - DNA, 36 bp, Homo Sapiens
aggtggcacggagaattttggattctcagggatggg

SEQ ID NO: 5208 - DNA, 38 bp, Homo Sapiens
aggtggcacggagaattttggattctcagggatgggtt

SEQ ID NO: 5209 - DNA, 18 bp, Homo Sapiens
aggtggcccgggttcgac

SEQ ID NO: 5210 - DNA, 24 bp, Homo Sapiens
aggtggcccgggttcgactcccgg

SEQ ID NO: 5211 - DNA, 26 bp, Homo Sapiens
aggtggcccgggttcgactcccggta

SEQ ID NO: 5212 - DNA, 28 bp, Homo Sapiens
aggtggcccgggttcgactcccggtatg

SEQ ID NO: 5213 - DNA, 29 bp, Homo Sapiens
aggtggcccgggttcgactcccggtatgg

SEQ ID NO: 5214 - DNA, 30 bp, Homo Sapiens
aggtggcccgggttcgactcccggtatggg

SEQ ID NO: 5215 - DNA, 31 bp, Homo Sapiens
aggtggcccgggttcgactcccggtatggga

SEQ ID NO: 5216 - DNA, 32 bp, Homo Sapiens
aggtggcccgggttcgactcccggtatgggaa

SEQ ID NO: 5217 - DNA, 33 bp, Homo Sapiens
aggtggcccgggttcgactcccggtatgggaac

SEQ ID NO: 5218 - DNA, 34 bp, Homo Sapiens
aggtggcccgggttcgactcccggtatgggaacc

SEQ ID NO: 5219 - DNA, 35 bp, Homo Sapiens
aggtggcccgggttcgactcccggtatgggaacca

SEQ ID NO: 5220 - DNA, 19 bp, Homo Sapiens
aggtggccgagtggttaag

SEQ ID NO: 5221 - DNA, 27 bp, Homo Sapiens
aggttaaatacagaccaagagccttca

SEQ ID NO: 5222 - DNA, 21 bp, Homo Sapiens
aggttcaattcctcttcttaa

SEQ ID NO: 5223 - DNA, 23 bp, Homo Sapiens
aggttcaattcctcttcttaaca

SEQ ID NO: 5224 - DNA, 25 bp, Homo Sapiens
aggttcaattcctcttcttaacacc

SEQ ID NO: 5225 - DNA, 34 bp, Homo Sapiens
aggttccatggtgtaatggttagcactctggact

SEQ ID NO: 5226 - DNA, 23 bp, Homo Sapiens
aggttccgggttcgagtcccggc

SEQ ID NO: 5227 - DNA, 29 bp, Homo Sapiens
aggttccgggttcgagtcccggcggagtc

SEQ ID NO: 5228 - DNA, 31 bp, Homo Sapiens
aggttccgggttcgagtcccggcggagtcgc

SEQ ID NO: 5229 - DNA, 32 bp, Homo Sapiens
aggttccgggttcgagtcccggcggagtcgcc

SEQ ID NO: 5230 - DNA, 33 bp, Homo Sapiens
aggttccgggttcgagtcccggcggagtcgcca

SEQ ID NO: 5231 - DNA, 20 bp, Homo Sapiens
aggttcgaaccctgctcgct

SEQ ID NO: 5232 - DNA, 25 bp, Homo Sapiens
aggttcgaaccctgctcgctgcgcc

SEQ ID NO: 5233 - DNA, 26 bp, Homo Sapiens
aggttcgaaccctgctcgctgcgcca

SEQ ID NO: 5234 - DNA, 20 bp, Homo Sapiens
aggttcgaatcctgccgact

SEQ ID NO: 5235 - DNA, 24 bp, Homo Sapiens
aggttcgaatcctgtcggctacgc

SEQ ID NO: 5236 - DNA, 25 bp, Homo Sapiens
aggttcgaatcctgttcgtgacgcc

SEQ ID NO: 5237 - DNA, 26 bp, Homo Sapiens
aggttcgaatcctgttcgtgacgcca

SEQ ID NO: 5238 - DNA, 16 bp, Homo Sapiens
aggttcgactcctggc

SEQ ID NO: 5239 - DNA, 20 bp, Homo Sapiens
aggttcgactcctggctggc

SEQ ID NO: 5240 - DNA, 21 bp, Homo Sapiens
aggttcgactcctggctggct

SEQ ID NO: 5241 - DNA, 22 bp, Homo Sapiens
aggttcgactcctggctggctc

SEQ ID NO: 5242 - DNA, 23 bp, Homo Sapiens
aggttcgactcctggctggctcg

SEQ ID NO: 5243 - DNA, 24 bp, Homo Sapiens
aggttcgactcctggctggctcgc

SEQ ID NO: 5244 - DNA, 25 bp, Homo Sapiens
aggttcgactcctggctggctcgcc

SEQ ID NO: 5245 - DNA, 26 bp, Homo Sapiens
aggttcgactcctggctggctcgcca

SEQ ID NO: 5246 - DNA, 22 bp, Homo Sapiens
aggttcgagtcctgccgcggtc

SEQ ID NO: 5247 - DNA, 23 bp, Homo Sapiens
aggttcgagtcctgccgcggtcg

SEQ ID NO: 5248 - DNA, 26 bp, Homo Sapiens
aggttcgagtcctgccgcggtcgcca

SEQ ID NO: 5249 - DNA, 29 bp, Homo Sapiens
aggttgcgtgttcaaatcacgtcggggtc

SEQ ID NO: 5250 - DNA, 32 bp, Homo Sapiens
aggttgcgtgttcaaatcacgtcggggtcacc

SEQ ID NO: 5251 - DNA, 21 bp, Homo Sapiens
aggttgcgtgttcaagtcacg

SEQ ID NO: 5252 - DNA, 31 bp, Homo Sapiens
aggttgcgtgttcaagtcacgtcggggtcac

SEQ ID NO: 5253 - DNA, 33 bp, Homo Sapiens
aggttgcgtgttcaagtcacgtcggggtcacca

SEQ ID NO: 5254 - DNA, 16 bp, Homo Sapiens
aggttggtggttcgag

SEQ ID NO: 5255 - DNA, 29 bp, Homo Sapiens
aggttggtggttcgagcccacccagggac

SEQ ID NO: 5256 - DNA, 30 bp, Homo Sapiens
aggttggtggttcgagcccacccagggacg

SEQ ID NO: 5257 - DNA, 32 bp, Homo Sapiens
aggttggtggttcgagcccacccagggacgcc

SEQ ID NO: 5258 - DNA, 17 bp, Homo Sapiens
aggttgtgagttcgagc

SEQ ID NO: 5259 - DNA, 20 bp, Homo Sapiens
aggttgtgagttcgagcctc

SEQ ID NO: 5260 - DNA, 21 bp, Homo Sapiens
aggttgtgagttcgagcctca

SEQ ID NO: 5261 - DNA, 23 bp, Homo Sapiens
aggttgtgagttcgagcctcacc

SEQ ID NO: 5262 - DNA, 23 bp, Homo Sapiens
aggttgtgggttcgaatcccacc

SEQ ID NO: 5263 - DNA, 32 bp, Homo Sapiens
aggttgtgggttcgaatcccaccagagtcgcc

SEQ ID NO: 5264 - DNA, 33 bp, Homo Sapiens
aggttgtgggttcgaatcccaccagagtcgcca

SEQ ID NO: 5265 - DNA, 23 bp, Homo Sapiens
aggttgtgggttcgagtcccacc

SEQ ID NO: 5266 - DNA, 32 bp, Homo Sapiens
aggttgtgggttcgagtcccaccagagtcgcc

SEQ ID NO: 5267 - DNA, 16 bp, Homo Sapiens
agtaaataataggagc

SEQ ID NO: 5268 - DNA, 17 bp, Homo Sapiens
agtaaataataggagct

SEQ ID NO: 5269 - DNA, 18 bp, Homo Sapiens
agtaaataataggagctt

SEQ ID NO: 5270 - DNA, 19 bp, Homo Sapiens
agtaaataataggagctta

SEQ ID NO: 5271 - DNA, 20 bp, Homo Sapiens
agtaaataataggagcttaa

SEQ ID NO: 5272 - DNA, 21 bp, Homo Sapiens
agtaaataataggagcttaaa

SEQ ID NO: 5273 - DNA, 22 bp, Homo Sapiens
agtaaataataggagcttaaac

SEQ ID NO: 5274 - DNA, 23 bp, Homo Sapiens
agtaaataataggagcttaaacc

SEQ ID NO: 5275 - DNA, 24 bp, Homo Sapiens
agtaaataataggagcttaaaccc

SEQ ID NO: 5276 - DNA, 25 bp, Homo Sapiens
agtaaataataggagcttaaacccc

SEQ ID NO: 5277 - DNA, 26 bp, Homo Sapiens
agtaaataataggagcttaaaccccc

SEQ ID NO: 5278 - DNA, 27 bp, Homo Sapiens
agtaaataataggagcttaaaccccct

SEQ ID NO: 5279 - DNA, 28 bp, Homo Sapiens
agtaaataataggagcttaaaccccctt

SEQ ID NO: 5280 - DNA, 29 bp, Homo Sapiens
agtaaataataggagcttaaaccccctta

SEQ ID NO: 5281 - DNA, 30 bp, Homo Sapiens
agtaaataataggagcttaaacccccttat

SEQ ID NO: 5282 - DNA, 31 bp, Homo Sapiens
agtaaataataggagcttaaacccccttatt

SEQ ID NO: 5283 - DNA, 33 bp, Homo Sapiens
agtaaataataggagcttaaacccccttatttc

SEQ ID NO: 5284 - DNA, 34 bp, Homo Sapiens
agtaaataataggagcttaaacccccttatttct

SEQ ID NO: 5285 - DNA, 37 bp, Homo Sapiens
agtaaataataggagcttaaacccccttatttctacc

SEQ ID NO: 5286 - DNA, 16 bp, Homo Sapiens
agtaaggtcagctaaa

SEQ ID NO: 5287 - DNA, 17 bp, Homo Sapiens
agtaaggtcagctaaat

SEQ ID NO: 5288 - DNA, 18 bp, Homo Sapiens
agtaaggtcagctaaata

SEQ ID NO: 5289 - DNA, 19 bp, Homo Sapiens
agtaaggtcagctaaataa

SEQ ID NO: 5290 - DNA, 20 bp, Homo Sapiens
agtaaggtcagctaaataag

SEQ ID NO: 5291 - DNA, 21 bp, Homo Sapiens
agtaaggtcagctaaataagc

SEQ ID NO: 5292 - DNA, 22 bp, Homo Sapiens
agtaaggtcagctaaataagct

SEQ ID NO: 5293 - DNA, 23 bp, Homo Sapiens
agtaaggtcagctaaataagcta

SEQ ID NO: 5294 - DNA, 24 bp, Homo Sapiens
agtaaggtcagctaaataagctat

SEQ ID NO: 5295 - DNA, 25 bp, Homo Sapiens
agtaaggtcagctaaataagctatc

SEQ ID NO: 5296 - DNA, 26 bp, Homo Sapiens
agtaaggtcagctaaataagctatcg

SEQ ID NO: 5297 - DNA, 27 bp, Homo Sapiens
agtaaggtcagctaaataagctatcgg

SEQ ID NO: 5298 - DNA, 28 bp, Homo Sapiens
agtaaggtcagctaaataagctatcggg

SEQ ID NO: 5299 - DNA, 29 bp, Homo Sapiens
agtaaggtcagctaaataagctatcgggc

SEQ ID NO: 5300 - DNA, 30 bp, Homo Sapiens
agtaaggtcagctaaataagctatcgggcc

SEQ ID NO: 5301 - DNA, 31 bp, Homo Sapiens
agtaaggtcagctaaataagctatcgggccc

SEQ ID NO: 5302 - DNA, 32 bp, Homo Sapiens
agtaaggtcagctaaataagctatcgggccca

SEQ ID NO: 5303 - DNA, 33 bp, Homo Sapiens
agtaaggtcagctaaataagctatcgggcccat

SEQ ID NO: 5304 - DNA, 34 bp, Homo Sapiens
agtaaggtcagctaaataagctatcgggcccata

SEQ ID NO: 5305 - DNA, 35 bp, Homo Sapiens
agtaaggtcagctaaataagctatcgggcccatac

SEQ ID NO: 5306 - DNA, 36 bp, Homo Sapiens
agtaaggtcagctaaataagctatcgggcccatacc

SEQ ID NO: 5307 - DNA, 37 bp, Homo Sapiens
agtaaggtcagctaaataagctatcgggcccataccc

SEQ ID NO: 5308 - DNA, 38 bp, Homo Sapiens
agtaaggtcagctaaataagctatcgggcccatacccc

SEQ ID NO: 5309 - DNA, 39 bp, Homo Sapiens
agtaaggtcagctaaataagctatcgggcccataccccg

SEQ ID NO: 5310 - DNA, 40 bp, Homo Sapiens
agtaaggtcagctaaataagctatcgggcccataccccga

SEQ ID NO: 5311 - DNA, 41 bp, Homo Sapiens
agtaaggtcagctaaataagctatcgggcccataccccgaa

SEQ ID NO: 5312 - DNA, 42 bp, Homo Sapiens
agtaaggtcagctaaataagctatcgggcccataccccgaaa

SEQ ID NO: 5313 - DNA, 43 bp, Homo Sapiens
agtaaggtcagctaaataagctatcgggcccataccccgaaaa

SEQ ID NO: 5314 - DNA, 44 bp, Homo Sapiens
agtaaggtcagctaaataagctatcgggcccataccccgaaaat

SEQ ID NO: 5315 - DNA, 45 bp, Homo Sapiens
agtaaggtcagctaaataagctatcgggcccataccccgaaaatg

SEQ ID NO: 5316 - DNA, 46 bp, Homo Sapiens
agtaaggtcagctaaataagctatcgggcccataccccgaaaatgt

SEQ ID NO: 5317 - DNA, 47 bp, Homo Sapiens
agtaaggtcagctaaataagctatcgggcccataccccgaaaatgtt

SEQ ID NO: 5318 - DNA, 48 bp, Homo Sapiens
agtaaggtcagctaaataagctatcgggcccataccccgaaaatgttg

SEQ ID NO: 5319 - DNA, 16 bp, Homo Sapiens
agtaagttgcaatact

SEQ ID NO: 5320 - DNA, 22 bp, Homo Sapiens
agtaagttgcaatacttaattt

SEQ ID NO: 5321 - DNA, 25 bp, Homo Sapiens
agtaagttgcaatacttaatttctg

SEQ ID NO: 5322 - DNA, 26 bp, Homo Sapiens
agtaagttgcaatacttaatttctgc

SEQ ID NO: 5323 - DNA, 27 bp, Homo Sapiens
agtaagttgcaatacttaatttctgcc

SEQ ID NO: 5324 - DNA, 28 bp, Homo Sapiens
agtaagttgcaatacttaatttctgcca

SEQ ID NO: 5325 - DNA, 16 bp, Homo Sapiens
agtaccgttaacttcc

SEQ ID NO: 5326 - DNA, 20 bp, Homo Sapiens
agtaccgttaacttccaatt

SEQ ID NO: 5327 - DNA, 31 bp, Homo Sapiens
agtaccgttaacttccaattaactagttttg

SEQ ID NO: 5328 - DNA, 33 bp, Homo Sapiens
agtaccgttaacttccaattaactagttttgac

SEQ ID NO: 5329 - DNA, 34 bp, Homo Sapiens
agtaccgttaacttccaattaactagttttgaca

SEQ ID NO: 5330 - DNA, 36 bp, Homo Sapiens
agtaccgttaacttccaattaactagttttgacaac

SEQ ID NO: 5331 - DNA, 16 bp, Homo Sapiens
agtactctgcgttgtg

SEQ ID NO: 5332 - DNA, 19 bp, Homo Sapiens
agtactctgcgttgtggcc

SEQ ID NO: 5333 - DNA, 22 bp, Homo Sapiens
agtactctgcgttgtggccgca

SEQ ID NO: 5334 - DNA, 29 bp, Homo Sapiens
agtactctgcgttgtggccgcagcaacct

SEQ ID NO: 5335 - DNA, 33 bp, Homo Sapiens
agtactctgcgttgtggccgcagcaacctcggt

SEQ ID NO: 5336 - DNA, 19 bp, Homo Sapiens
agtaggtagcgcatcagtc

SEQ ID NO: 5337 - DNA, 20 bp, Homo Sapiens
agtaggtagcgcatcagtct

SEQ ID NO: 5338 - DNA, 19 bp, Homo Sapiens
agtaggtagcgcgtcagtc

SEQ ID NO: 5339 - DNA, 20 bp, Homo Sapiens
agtaggtagcgcgtcagtct

SEQ ID NO: 5340 - DNA, 22 bp, Homo Sapiens
agtataaatagtaccgttaact

SEQ ID NO: 5341 - DNA, 26 bp, Homo Sapiens
agtataaatagtaccgttaacttcca

SEQ ID NO: 5342 - DNA, 23 bp, Homo Sapiens
agtatagtggtgagtatccccgc

SEQ ID NO: 5343 - DNA, 26 bp, Homo Sapiens
agtatagtggtgagtatccccgcctg

SEQ ID NO: 5344 - DNA, 31 bp, Homo Sapiens
agtatagtggtgagtatccccgcctgtcacg

SEQ ID NO: 5345 - DNA, 16 bp, Homo Sapiens
agtatccccgcctgtc

SEQ ID NO: 5346 - DNA, 18 bp, Homo Sapiens
agtatccccgcctgtcac

SEQ ID NO: 5347 - DNA, 20 bp, Homo Sapiens
agtatccccgcctgtcacgc

SEQ ID NO: 5348 - DNA, 16 bp, Homo Sapiens
agtcacgtcggggtca

SEQ ID NO: 5349 - DNA, 18 bp, Homo Sapiens
agtcacgtcggggtcacc

SEQ ID NO: 5350 - DNA, 19 bp, Homo Sapiens
agtcacgtcggggtcacca

SEQ ID NO: 5351 - DNA, 17 bp, Homo Sapiens
agtcagaggttcaattc

SEQ ID NO: 5352 - DNA, 16 bp, Homo Sapiens
agtcatggaggccatg

SEQ ID NO: 5353 - DNA, 19 bp, Homo Sapiens
agtcatggaggccatgggg

SEQ ID NO: 5354 - DNA, 20 bp, Homo Sapiens
agtcatggaggccatggggt

SEQ ID NO: 5355 - DNA, 21 bp, Homo Sapiens
agtcatggaggccatggggtt

SEQ ID NO: 5356 - DNA, 22 bp, Homo Sapiens
agtcatggaggccatggggttg

SEQ ID NO: 5357 - DNA, 23 bp, Homo Sapiens
agtcatggaggccatggggttgg

SEQ ID NO: 5358 - DNA, 28 bp, Homo Sapiens
agtcatggaggccatggggttggcttga

SEQ ID NO: 5359 - DNA, 22 bp, Homo Sapiens
agtcatttcgatggcgtgggtt

SEQ ID NO: 5360 - DNA, 23 bp, Homo Sapiens
agtcatttcgatggcgtgggttc

SEQ ID NO: 5361 - DNA, 37 bp, Homo Sapiens
agtcatttcgatggcgtgggttcgaatcccaccgctg

SEQ ID NO: 5362 - DNA, 18 bp, Homo Sapiens
agtcccaccagagtcgcc

SEQ ID NO: 5363 - DNA, 18 bp, Homo Sapiens
agtcccacccggggtacc

SEQ ID NO: 5364 - DNA, 16 bp, Homo Sapiens
agtcccatctggggtg

SEQ ID NO: 5365 - DNA, 17 bp, Homo Sapiens
agtcccattggtctagc

SEQ ID NO: 5366 - DNA, 18 bp, Homo Sapiens
agtcccattggtctagcc

SEQ ID NO: 5367 - DNA, 19 bp, Homo Sapiens
agtcccattggtctagcca

SEQ ID NO: 5368 - DNA, 16 bp, Homo Sapiens
agtcccggcagagatg

SEQ ID NO: 5369 - DNA, 16 bp, Homo Sapiens
agtcccggcggagtcg

SEQ ID NO: 5370 - DNA, 17 bp, Homo Sapiens
agtcccggcggagtcgc

SEQ ID NO: 5371 - DNA, 19 bp, Homo Sapiens
agtcccggcggagtcgcca

SEQ ID NO: 5372 - DNA, 19 bp, Homo Sapiens
agtccctgtccaggcgcca

SEQ ID NO: 5373 - DNA, 18 bp, Homo Sapiens
agtccctgttcaggcgcc

SEQ ID NO: 5374 - DNA, 16 bp, Homo Sapiens
agtccctgttcgggcg

SEQ ID NO: 5375 - DNA, 17 bp, Homo Sapiens
agtccctgttcgggcgc

SEQ ID NO: 5376 - DNA, 18 bp, Homo Sapiens
agtccctgttcgggcgcc

SEQ ID NO: 5377 - DNA, 19 bp, Homo Sapiens
agtccctgttcgggcgcca

SEQ ID NO: 5378 - DNA, 16 bp, Homo Sapiens
agtcccttcgtggtcg

SEQ ID NO: 5379 - DNA, 16 bp, Homo Sapiens
agtccgtgcgagaata

SEQ ID NO: 5380 - DNA, 17 bp, Homo Sapiens
agtccgtgcgagaatac

SEQ ID NO: 5381 - DNA, 18 bp, Homo Sapiens
agtccgtgcgagaatacc

SEQ ID NO: 5382 - DNA, 19 bp, Homo Sapiens
agtccgtgcgagaatacca

SEQ ID NO: 5383 - DNA, 16 bp, Homo Sapiens
agtcctgccgcggtcg

SEQ ID NO: 5384 - DNA, 18 bp, Homo Sapiens
agtcctgccgcggtcgcc

SEQ ID NO: 5385 - DNA, 19 bp, Homo Sapiens
agtcctgccgcggtcgcca

SEQ ID NO: 5386 - DNA, 16 bp, Homo Sapiens
agtcggtagagcatca

SEQ ID NO: 5387 - DNA, 17 bp, Homo Sapiens
agtcggtagagcatcag

SEQ ID NO: 5388 - DNA, 18 bp, Homo Sapiens
agtcggtagagcatcaga

SEQ ID NO: 5389 - DNA, 19 bp, Homo Sapiens
agtcggtagagcatcagac

SEQ ID NO: 5390 - DNA, 20 bp, Homo Sapiens
agtcggtagagcatcagact

SEQ ID NO: 5391 - DNA, 21 bp, Homo Sapiens
agtcggtagagcatcagactt

SEQ ID NO: 5392 - DNA, 22 bp, Homo Sapiens
agtcggtagagcatcagacttt

SEQ ID NO: 5393 - DNA, 23 bp, Homo Sapiens
agtcggtagagcatcagactttt

SEQ ID NO: 5394 - DNA, 27 bp, Homo Sapiens
agtcggtagagcatcagacttttaatc

SEQ ID NO: 5395 - DNA, 28 bp, Homo Sapiens
agtcggtagagcatcagacttttaatct

SEQ ID NO: 5396 - DNA, 16 bp, Homo Sapiens
agtcggtagagcatga

SEQ ID NO: 5397 - DNA, 17 bp, Homo Sapiens
agtcggtagagcatgag

SEQ ID NO: 5398 - DNA, 18 bp, Homo Sapiens
agtcggtagagcatgaga

SEQ ID NO: 5399 - DNA, 19 bp, Homo Sapiens
agtcggtagagcatgagac

SEQ ID NO: 5400 - DNA, 20 bp, Homo Sapiens
agtcggtagagcatgagacc

SEQ ID NO: 5401 - DNA, 21 bp, Homo Sapiens
agtcggtagagcatgagaccc

SEQ ID NO: 5402 - DNA, 22 bp, Homo Sapiens
agtcggtagagcatgagaccct

SEQ ID NO: 5403 - DNA, 25 bp, Homo Sapiens
agtcggtagagcatgagacccttaa

SEQ ID NO: 5404 - DNA, 26 bp, Homo Sapiens
agtcggtagagcatgagacccttaat

SEQ ID NO: 5405 - DNA, 27 bp, Homo Sapiens
agtcggtagagcatgagacccttaatc

SEQ ID NO: 5406 - DNA, 28 bp, Homo Sapiens
agtcggtagagcatgagacccttaatct

SEQ ID NO: 5407 - DNA, 20 bp, Homo Sapiens
agtcggtagagcatgagact

SEQ ID NO: 5408 - DNA, 21 bp, Homo Sapiens
agtcggtagagcatgagactc

SEQ ID NO: 5409 - DNA, 22 bp, Homo Sapiens
agtcggtagagcatgagactct

SEQ ID NO: 5410 - DNA, 23 bp, Homo Sapiens
agtcggtagagcatgagactctt

SEQ ID NO: 5411 - DNA, 24 bp, Homo Sapiens
agtcggtagagcatgagactctta

SEQ ID NO: 5412 - DNA, 25 bp, Homo Sapiens
agtcggtagagcatgagactcttaa

SEQ ID NO: 5413 - DNA, 26 bp, Homo Sapiens
agtcggtagagcatgagactcttaat

SEQ ID NO: 5414 - DNA, 27 bp, Homo Sapiens
agtcggtagagcatgagactcttaatc

SEQ ID NO: 5415 - DNA, 28 bp, Homo Sapiens
agtcggtagagcatgagactcttaatct

SEQ ID NO: 5416 - DNA, 29 bp, Homo Sapiens
agtcggtagagcatgagactcttaatctc

SEQ ID NO: 5417 - DNA, 30 bp, Homo Sapiens
agtcggtagagcatgagactcttaatctca

SEQ ID NO: 5418 - DNA, 36 bp, Homo Sapiens
agtcggtagagcatgagactcttaatctcagggtcg

SEQ ID NO: 5419 - DNA, 37 bp, Homo Sapiens
agtcggtagagcatgagactcttaatctcagggtcgt

SEQ ID NO: 5420 - DNA, 38 bp, Homo Sapiens
agtcggtagagcatgagactcttaatctcagggtcgtg

SEQ ID NO: 5421 - DNA, 39 bp, Homo Sapiens
agtcggtagagcatgagactcttaatctcagggtcgtgg

SEQ ID NO: 5422 - DNA, 40 bp, Homo Sapiens
agtcggtagagcatgagactcttaatctcagggtcgtggg

SEQ ID NO: 5423 - DNA, 41 bp, Homo Sapiens
agtcggtagagcatgagactcttaatctcagggtcgtgggt

SEQ ID NO: 5424 - DNA, 42 bp, Homo Sapiens
agtcggtagagcatgagactcttaatctcagggtcgtgggtt

SEQ ID NO: 5425 - DNA, 44 bp, Homo Sapiens
agtcggtagagcatgagactcttaatctcagggtcgtgggttcg

SEQ ID NO: 5426 - DNA, 16 bp, Homo Sapiens
agtcggtagagcatgg

SEQ ID NO: 5427 - DNA, 17 bp, Homo Sapiens
agtcggtagagcatggg

SEQ ID NO: 5428 - DNA, 18 bp, Homo Sapiens
agtcggtagagcatggga

SEQ ID NO: 5429 - DNA, 19 bp, Homo Sapiens
agtcggtagagcatgggac

SEQ ID NO: 5430 - DNA, 20 bp, Homo Sapiens
agtcggtagagcatgggact

SEQ ID NO: 5431 - DNA, 21 bp, Homo Sapiens
agtcggtagagcatgggactc

SEQ ID NO: 5432 - DNA, 22 bp, Homo Sapiens
agtcggtagagcatgggactct

SEQ ID NO: 5433 - DNA, 23 bp, Homo Sapiens
agtcggtagagcatgggactctt

SEQ ID NO: 5434 - DNA, 24 bp, Homo Sapiens
agtcggtagagcatgggactctta

SEQ ID NO: 5435 - DNA, 25 bp, Homo Sapiens
agtcggtagagcatgggactcttaa

SEQ ID NO: 5436 - DNA, 26 bp, Homo Sapiens
agtcggtagagcatgggactcttaat

SEQ ID NO: 5437 - DNA, 27 bp, Homo Sapiens
agtcggtagagcatgggactcttaatc

SEQ ID NO: 5438 - DNA, 28 bp, Homo Sapiens
agtcggtagagcatgggactcttaatcc

SEQ ID NO: 5439 - DNA, 29 bp, Homo Sapiens
agtcggtagagcatgggactcttaatccc

SEQ ID NO: 5440 - DNA, 30 bp, Homo Sapiens
agtcggtagagcatgggactcttaatccca

SEQ ID NO: 5441 - DNA, 36 bp, Homo Sapiens
agtcggtagagcatgggactcttaatcccagggtcg

SEQ ID NO: 5442 - DNA, 37 bp, Homo Sapiens
agtcggtagagcatgggactcttaatcccagggtcgt

SEQ ID NO: 5443 - DNA, 38 bp, Homo Sapiens
agtcggtagagcatgggactcttaatcccagggtcgtg

SEQ ID NO: 5444 - DNA, 39 bp, Homo Sapiens
agtcggtagagcatgggactcttaatcccagggtcgtgg

SEQ ID NO: 5445 - DNA, 40 bp, Homo Sapiens
agtcggtagagcatgggactcttaatcccagggtcgtggg

SEQ ID NO: 5446 - DNA, 42 bp, Homo Sapiens
agtcggtagagcatgggactcttaatcccagggtcgtgggtt

SEQ ID NO: 5447 - DNA, 44 bp, Homo Sapiens
agtcggtagagcatgggactcttaatcccagggtcgtgggttcg

SEQ ID NO: 5448 - DNA, 48 bp, Homo Sapiens
agtcggtagagcatgggactcttaatcccagggtcgtgggttcgagcc

SEQ ID NO: 5449 - DNA, 28 bp, Homo Sapiens
agtcggtagagcatgggactcttaatct

SEQ ID NO: 5450 - DNA, 29 bp, Homo Sapiens
agtcggtagagcatgggactcttaatctc

SEQ ID NO: 5451 - DNA, 42 bp, Homo Sapiens
agtcggtagagcatgggactcttaatctcagggtcgtgggtt

SEQ ID NO: 5452 - DNA, 19 bp, Homo Sapiens
agtcggtggagcatgggac

SEQ ID NO: 5453 - DNA, 21 bp, Homo Sapiens
agtcgtggccgagtggttaag

SEQ ID NO: 5454 - DNA, 22 bp, Homo Sapiens
agtcgtggccgagtggttaagg

SEQ ID NO: 5455 - DNA, 23 bp, Homo Sapiens
agtcgtggccgagtggttaaggc

SEQ ID NO: 5456 - DNA, 22 bp, Homo Sapiens
agtctcataatctgaaggtcct

SEQ ID NO: 5457 - DNA, 23 bp, Homo Sapiens
agtctcataatctgaaggtcctg

SEQ ID NO: 5458 - DNA, 24 bp, Homo Sapiens
agtctcataatctgaaggtcctga

SEQ ID NO: 5459 - DNA, 26 bp, Homo Sapiens
agtctcataatctgaaggtcctgagt

SEQ ID NO: 5460 - DNA, 27 bp, Homo Sapiens
agtctcataatctgaaggtcctgagtt

SEQ ID NO: 5461 - DNA, 36 bp, Homo Sapiens
agtctcataatctgaaggtcctgagttcgaacctca

SEQ ID NO: 5462 - DNA, 21 bp, Homo Sapiens
agtctcataatctgaaggtcg

SEQ ID NO: 5463 - DNA, 22 bp, Homo Sapiens
agtctcataatctgaaggtcgt

SEQ ID NO: 5464 - DNA, 23 bp, Homo Sapiens
agtctcataatctgaaggtcgtg

SEQ ID NO: 5465 - DNA, 24 bp, Homo Sapiens
agtctcataatctgaaggtcgtga

SEQ ID NO: 5466 - DNA, 26 bp, Homo Sapiens
agtctcataatctgaaggtcgtgagt

SEQ ID NO: 5467 - DNA, 27 bp, Homo Sapiens
agtctcataatctgaaggtcgtgagtt

SEQ ID NO: 5468 - DNA, 47 bp, Homo Sapiens
agtctcataatctgaaggtcgtgagttcgatcctcacacggggcacc

SEQ ID NO: 5469 - DNA, 18 bp, Homo Sapiens
agtctcggtggaacctcc

SEQ ID NO: 5470 - DNA, 19 bp, Homo Sapiens
agtctcggtggaacctcca

SEQ ID NO: 5471 - DNA, 22 bp, Homo Sapiens
agtctcttcggaggcgtgggtt

SEQ ID NO: 5472 - DNA, 23 bp, Homo Sapiens
agtctcttcggaggcgtgggttc

SEQ ID NO: 5473 - DNA, 24 bp, Homo Sapiens
agtctcttcggaggcgtgggttcg

SEQ ID NO: 5474 - DNA, 16 bp, Homo Sapiens
agtctcttcgggggcg

SEQ ID NO: 5475 - DNA, 20 bp, Homo Sapiens
agtctcttcgggggcgtggg

SEQ ID NO: 5476 - DNA, 21 bp, Homo Sapiens
agtctcttcgggggcgtgggt

SEQ ID NO: 5477 - DNA, 22 bp, Homo Sapiens
agtctcttcgggggcgtgggtt

SEQ ID NO: 5478 - DNA, 23 bp, Homo Sapiens
agtctcttcgggggcgtgggttc

SEQ ID NO: 5479 - DNA, 24 bp, Homo Sapiens
agtctcttcgggggcgtgggttcg

SEQ ID NO: 5480 - DNA, 39 bp, Homo Sapiens
agtctcttcgggggcgtgggttcgaatcccaccgctgcc

SEQ ID NO: 5481 - DNA, 43 bp, Homo Sapiens
agtctcttcgggggcgtgggttcgaatcccaccgctgccacca

SEQ ID NO: 5482 - DNA, 20 bp, Homo Sapiens
agtcttgtaaaccggagatg

SEQ ID NO: 5483 - DNA, 27 bp, Homo Sapiens
agtcttgtaaaccggagatgaaaacct

SEQ ID NO: 5484 - DNA, 42 bp, Homo Sapiens
agtcttgtaaaccggagatgaaaacctttttccaaggacacc

SEQ ID NO: 5485 - DNA, 43 bp, Homo Sapiens
agtcttgtaaaccggagatgaaaacctttttccaaggacacca

SEQ ID NO: 5486 - DNA, 16 bp, Homo Sapiens
agtgaagcattggact

SEQ ID NO: 5487 - DNA, 17 bp, Homo Sapiens
agtgaagcattggactg

SEQ ID NO: 5488 - DNA, 18 bp, Homo Sapiens
agtgaagcattggactgt

SEQ ID NO: 5489 - DNA, 19 bp, Homo Sapiens
agtgaagcattggactgta

SEQ ID NO: 5490 - DNA, 20 bp, Homo Sapiens
agtgaagcattggactgtaa

SEQ ID NO: 5491 - DNA, 21 bp, Homo Sapiens
agtgaagcattggactgtaaa

SEQ ID NO: 5492 - DNA, 23 bp, Homo Sapiens
agtgaagcattggactgtaaatc

SEQ ID NO: 5493 - DNA, 24 bp, Homo Sapiens
agtgaagcattggactgtaaatct

SEQ ID NO: 5494 - DNA, 25 bp, Homo Sapiens
agtgaagcattggactgtaaatcta

SEQ ID NO: 5495 - DNA, 26 bp, Homo Sapiens
agtgaagcattggactgtaaatctaa

SEQ ID NO: 5496 - DNA, 27 bp, Homo Sapiens
agtgaagcattggactgtaaatctaaa

SEQ ID NO: 5497 - DNA, 28 bp, Homo Sapiens
agtgaagcattggactgtaaatctaaag

SEQ ID NO: 5498 - DNA, 37 bp, Homo Sapiens
agtgaagcattggactgtaaatctaaagacaggggtt

SEQ ID NO: 5499 - DNA, 30 bp, Homo Sapiens
agtggcctaatggataaggcatcagcctcc

SEQ ID NO: 5500 - DNA, 31 bp, Homo Sapiens
agtggcctaatggataaggcatcagcctccg

SEQ ID NO: 5501 - DNA, 33 bp, Homo Sapiens
agtggcgcaatcggttagcgcgcggtacttata

SEQ ID NO: 5502 - DNA, 19 bp, Homo Sapiens
agtggcgcaatggataacg

SEQ ID NO: 5503 - DNA, 17 bp, Homo Sapiens
agtggcgcagcggaagc

SEQ ID NO: 5504 - DNA, 18 bp, Homo Sapiens
agtggcgcagcggaagcg

SEQ ID NO: 5505 - DNA, 26 bp, Homo Sapiens
agtggcgcagcggaagcgtgctgggc

SEQ ID NO: 5506 - DNA, 27 bp, Homo Sapiens
agtggcgcagcggaagcgtgctgggcc

SEQ ID NO: 5507 - DNA, 28 bp, Homo Sapiens
agtggcgcagcggaagcgtgctgggccc

SEQ ID NO: 5508 - DNA, 29 bp, Homo Sapiens
agtggcgcagcggaagcgtgctgggccca

SEQ ID NO: 5509 - DNA, 30 bp, Homo Sapiens
agtggcgcagcggaagcgtgctgggcccat

SEQ ID NO: 5510 - DNA, 34 bp, Homo Sapiens
agtggcgcagcggaagcgtgctgggcccataacc

SEQ ID NO: 5511 - DNA, 16 bp, Homo Sapiens
agtggctaggattcgg

SEQ ID NO: 5512 - DNA, 17 bp, Homo Sapiens
agtggctaggattcggc

SEQ ID NO: 5513 - DNA, 18 bp, Homo Sapiens
agtggctaggattcggcg

SEQ ID NO: 5514 - DNA, 19 bp, Homo Sapiens
agtggctaggattcggcgc

SEQ ID NO: 5515 - DNA, 20 bp, Homo Sapiens
agtggctaggattcggcgct

SEQ ID NO: 5516 - DNA, 26 bp, Homo Sapiens
agtggctaggattcggcgctttcacc

SEQ ID NO: 5517 - DNA, 18 bp, Homo Sapiens
agtggctgatttgcgttc

SEQ ID NO: 5518 - DNA, 20 bp, Homo Sapiens
agtggctgatttgcgttcag

SEQ ID NO: 5519 - DNA, 26 bp, Homo Sapiens
agtggctgatttgcgttcagttgatg

SEQ ID NO: 5520 - DNA, 17 bp, Homo Sapiens
agtggggttttgcagtc

SEQ ID NO: 5521 - DNA, 18 bp, Homo Sapiens
agtggggttttgcagtcc

SEQ ID NO: 5522 - DNA, 20 bp, Homo Sapiens
agtggggttttgcagtcctt

SEQ ID NO: 5523 - DNA, 23 bp, Homo Sapiens
agtggggttttgcagtccttacc

SEQ ID NO: 5524 - DNA, 24 bp, Homo Sapiens
agtggggttttgcagtccttacca

SEQ ID NO: 5525 - DNA, 19 bp, Homo Sapiens
agtgggtagagcatcagac

SEQ ID NO: 5526 - DNA, 17 bp, Homo Sapiens
agtggtaagcatagctg

SEQ ID NO: 5527 - DNA, 18 bp, Homo Sapiens
agtggtaagcatagctgc

SEQ ID NO: 5528 - DNA, 19 bp, Homo Sapiens
agtggtaagcatagctgcc

SEQ ID NO: 5529 - DNA, 40 bp, Homo Sapiens
agtggtaagcatagctgccttccaagcagttgacccgggt

SEQ ID NO: 5530 - DNA, 18 bp, Homo Sapiens
agtggtagaattctcacc

SEQ ID NO: 5531 - DNA, 16 bp, Homo Sapiens
agtggtagaattctcg

SEQ ID NO: 5532 - DNA, 17 bp, Homo Sapiens
agtggtagaattctcgc

SEQ ID NO: 5533 - DNA, 18 bp, Homo Sapiens
agtggtagaattctcgcc

SEQ ID NO: 5534 - DNA, 19 bp, Homo Sapiens
agtggtagaattctcgcct

SEQ ID NO: 5535 - DNA, 20 bp, Homo Sapiens
agtggtagaattctcgcctc

SEQ ID NO: 5536 - DNA, 21 bp, Homo Sapiens
agtggtagaattctcgcctcc

SEQ ID NO: 5537 - DNA, 22 bp, Homo Sapiens
agtggtagaattctcgcctccc

SEQ ID NO: 5538 - DNA, 20 bp, Homo Sapiens
agtggtagaattctcgcctg

SEQ ID NO: 5539 - DNA, 21 bp, Homo Sapiens
agtggtagaattctcgcctgc

SEQ ID NO: 5540 - DNA, 22 bp, Homo Sapiens
agtggtagaattctcgcctgcc

SEQ ID NO: 5541 - DNA, 23 bp, Homo Sapiens
agtggtagaattctcgcctgcca

SEQ ID NO: 5542 - DNA, 24 bp, Homo Sapiens
agtggtagaattctcgcctgccac

SEQ ID NO: 5543 - DNA, 25 bp, Homo Sapiens
agtggtagaattctcgcctgccacg

SEQ ID NO: 5544 - DNA, 26 bp, Homo Sapiens
agtggtagaattctcgcctgccacgc

SEQ ID NO: 5545 - DNA, 28 bp, Homo Sapiens
agtggtagaattctcgcctgccacgcgg

SEQ ID NO: 5546 - DNA, 30 bp, Homo Sapiens
agtggtagaattctcgcctgccacgcggga

SEQ ID NO: 5547 - DNA, 34 bp, Homo Sapiens
agtggtagaattctcgcctgccacgcgggaggcc

SEQ ID NO: 5548 - DNA, 35 bp, Homo Sapiens
agtggtagaattctcgcctgccacgcgggaggccc

SEQ ID NO: 5549 - DNA, 36 bp, Homo Sapiens
agtggtagaattctcgcctgccacgcgggaggcccg

SEQ ID NO: 5550 - DNA, 37 bp, Homo Sapiens
agtggtagaattctcgcctgccacgcgggaggcccgg

SEQ ID NO: 5551 - DNA, 38 bp, Homo Sapiens
agtggtagaattctcgcctgccacgcgggaggcccggg

SEQ ID NO: 5552 - DNA, 39 bp, Homo Sapiens
agtggtagaattctcgcctgccacgcgggaggcccgggt

SEQ ID NO: 5553 - DNA, 40 bp, Homo Sapiens
agtggtagaattctcgcctgccacgcgggaggcccgggtt

SEQ ID NO: 5554 - DNA, 43 bp, Homo Sapiens
agtggtagaattctcgcctgccacgcgggaggcccgggttcga

SEQ ID NO: 5555 - DNA, 18 bp, Homo Sapiens
agtggtagaattcttgcc

SEQ ID NO: 5556 - DNA, 22 bp, Homo Sapiens
agtggtagaattcttgcctgcc

SEQ ID NO: 5557 - DNA, 16 bp, Homo Sapiens
agtggtagagcatttg

SEQ ID NO: 5558 - DNA, 17 bp, Homo Sapiens
agtggtagagcatttga

SEQ ID NO: 5559 - DNA, 18 bp, Homo Sapiens
agtggtagagcatttgac

SEQ ID NO: 5560 - DNA, 19 bp, Homo Sapiens
agtggtagagcatttgact

SEQ ID NO: 5561 - DNA, 20 bp, Homo Sapiens
agtggtagagcatttgactg

SEQ ID NO: 5562 - DNA, 21 bp, Homo Sapiens
agtggtagagcatttgactgc

SEQ ID NO: 5563 - DNA, 22 bp, Homo Sapiens
agtggtagagcatttgactgca

SEQ ID NO: 5564 - DNA, 26 bp, Homo Sapiens
agtggtagagcatttgactgcagatc

SEQ ID NO: 5565 - DNA, 27 bp, Homo Sapiens
agtggtagagcatttgactgcagatca

SEQ ID NO: 5566 - DNA, 29 bp, Homo Sapiens
agtggtagagcatttgactgcagatcaag

SEQ ID NO: 5567 - DNA, 35 bp, Homo Sapiens
agtggtagagcatttgactgcagatcaagaggtcc

SEQ ID NO: 5568 - DNA, 36 bp, Homo Sapiens
agtggtagagcatttgactgcagatcaagaggtccc

SEQ ID NO: 5569 - DNA, 16 bp, Homo Sapiens
agtggtagagcgcatg

SEQ ID NO: 5570 - DNA, 17 bp, Homo Sapiens
agtggtagagcgcatgc

SEQ ID NO: 5571 - DNA, 18 bp, Homo Sapiens
agtggtagagcgcatgct

SEQ ID NO: 5572 - DNA, 41 bp, Homo Sapiens
agtggtagagcgcatgctttgcatgtatgaggccccgggtt

SEQ ID NO: 5573 - DNA, 17 bp, Homo Sapiens
agtggtagagcgcgtgc

SEQ ID NO: 5574 - DNA, 18 bp, Homo Sapiens
agtggtatcatgcaagat

SEQ ID NO: 5575 - DNA, 19 bp, Homo Sapiens
agtggtatcatgcaagatt

SEQ ID NO: 5576 - DNA, 20 bp, Homo Sapiens
agtggtatcatgcaagattc

SEQ ID NO: 5577 - DNA, 21 bp, Homo Sapiens
agtggtatcatgcaagattcc

SEQ ID NO: 5578 - DNA, 39 bp, Homo Sapiens
agtggtatcatgcaagattcccattcttgcgacccgggt

SEQ ID NO: 5579 - DNA, 42 bp, Homo Sapiens
agtggtatcatgcaagattcccattcttgcgacccgggttcg

SEQ ID NO: 5580 - DNA, 17 bp, Homo Sapiens
agtggtatgattctcgc

SEQ ID NO: 5581 - DNA, 19 bp, Homo Sapiens
agtggtatgattctcgctt

SEQ ID NO: 5582 - DNA, 22 bp, Homo Sapiens
agtggtatgattctcgctttgg

SEQ ID NO: 5583 - DNA, 18 bp, Homo Sapiens
agtggtcatcacgttcgc

SEQ ID NO: 5584 - DNA, 19 bp, Homo Sapiens
agtggtcatcacgttcgcc

SEQ ID NO: 5585 - DNA, 20 bp, Homo Sapiens
agtggtcatcacgttcgcct

SEQ ID NO: 5586 - DNA, 20 bp, Homo Sapiens
agtggtctaaggcgccagac

SEQ ID NO: 5587 - DNA, 22 bp, Homo Sapiens
agtggtctaaggcgccagactc

SEQ ID NO: 5588 - DNA, 17 bp, Homo Sapiens
agtggtctaaggcgctg

SEQ ID NO: 5589 - DNA, 18 bp, Homo Sapiens
agtggtgagcatagctgc

SEQ ID NO: 5590 - DNA, 19 bp, Homo Sapiens
agtggtgagcatagctgcc

SEQ ID NO: 5591 - DNA, 23 bp, Homo Sapiens
agtggtgagcatagctgccttcc

SEQ ID NO: 5592 - DNA, 40 bp, Homo Sapiens
agtggtgagcatagctgccttccaagcagttgacccgggt

SEQ ID NO: 5593 - DNA, 36 bp, Homo Sapiens
agtggtgagtatccccgcctgtcacgcgggagaccg

SEQ ID NO: 5594 - DNA, 19 bp, Homo Sapiens
agtggttaaggcgttggac

SEQ ID NO: 5595 - DNA, 20 bp, Homo Sapiens
agtggttagagcactggtct

SEQ ID NO: 5596 - DNA, 19 bp, Homo Sapiens
agtggttagcatagctgcc

SEQ ID NO: 5597 - DNA, 40 bp, Homo Sapiens
agtggttagcatagctgccttccaagcagttgacccgggt

SEQ ID NO: 5598 - DNA, 16 bp, Homo Sapiens
agtggttaggattcgg

SEQ ID NO: 5599 - DNA, 17 bp, Homo Sapiens
agtggttaggattcggc

SEQ ID NO: 5600 - DNA, 18 bp, Homo Sapiens
agtggttaggattcggcg

SEQ ID NO: 5601 - DNA, 19 bp, Homo Sapiens
agtggttaggattcggcgc

SEQ ID NO: 5602 - DNA, 20 bp, Homo Sapiens
agtggttaggattcggcgct

SEQ ID NO: 5603 - DNA, 21 bp, Homo Sapiens
agtggttaggattcggcgctc

SEQ ID NO: 5604 - DNA, 22 bp, Homo Sapiens
agtggttaggattcggcgctct

SEQ ID NO: 5605 - DNA, 23 bp, Homo Sapiens
agtggttaggattcggcgctctc

SEQ ID NO: 5606 - DNA, 24 bp, Homo Sapiens
agtggttaggattcggcgctctca

SEQ ID NO: 5607 - DNA, 25 bp, Homo Sapiens
agtggttaggattcggcgctctcac

SEQ ID NO: 5608 - DNA, 26 bp, Homo Sapiens
agtggttaggattcggcgctctcacc

SEQ ID NO: 5609 - DNA, 27 bp, Homo Sapiens
agtggttaggattcggcgctctcaccg

SEQ ID NO: 5610 - DNA, 28 bp, Homo Sapiens
agtggttaggattcggcgctctcaccgc

SEQ ID NO: 5611 - DNA, 29 bp, Homo Sapiens
agtggttaggattcggcgctctcaccgcc

SEQ ID NO: 5612 - DNA, 31 bp, Homo Sapiens
agtggttaggattcggcgctctcaccgccgc

SEQ ID NO: 5613 - DNA, 32 bp, Homo Sapiens
agtggttaggattcggcgctctcaccgccgcg

SEQ ID NO: 5614 - DNA, 34 bp, Homo Sapiens
agtggttaggattcggcgctctcaccgccgcggc

SEQ ID NO: 5615 - DNA, 35 bp, Homo Sapiens
agtggttaggattcggcgctctcaccgccgcggcc

SEQ ID NO: 5616 - DNA, 36 bp, Homo Sapiens
agtggttaggattcggcgctctcaccgccgcggccc

SEQ ID NO: 5617 - DNA, 37 bp, Homo Sapiens
agtggttaggattcggcgctctcaccgccgcggcccg

SEQ ID NO: 5618 - DNA, 38 bp, Homo Sapiens
agtggttaggattcggcgctctcaccgccgcggcccgg

SEQ ID NO: 5619 - DNA, 39 bp, Homo Sapiens
agtggttaggattcggcgctctcaccgccgcggcccggg

SEQ ID NO: 5620 - DNA, 40 bp, Homo Sapiens
agtggttaggattcggcgctctcaccgccgcggcccgggt

SEQ ID NO: 5621 - DNA, 41 bp, Homo Sapiens
agtggttaggattcggcgctctcaccgccgcggcccgggtt

SEQ ID NO: 5622 - DNA, 42 bp, Homo Sapiens
agtggttaggattcggcgctctcaccgccgcggcccgggttc

SEQ ID NO: 5623 - DNA, 46 bp, Homo Sapiens
agtggttaggattcggcgctctcaccgccgcggcccgggttcgatt

SEQ ID NO: 5624 - DNA, 16 bp, Homo Sapiens
agtggttagtactctg

SEQ ID NO: 5625 - DNA, 17 bp, Homo Sapiens
agtggttagtactctgc

SEQ ID NO: 5626 - DNA, 18 bp, Homo Sapiens
agtggttagtactctgcg

SEQ ID NO: 5627 - DNA, 19 bp, Homo Sapiens
agtggttagtactctgcgt

SEQ ID NO: 5628 - DNA, 20 bp, Homo Sapiens
agtggttagtactctgcgtt

SEQ ID NO: 5629 - DNA, 21 bp, Homo Sapiens
agtggttagtactctgcgttg

SEQ ID NO: 5630 - DNA, 22 bp, Homo Sapiens
agtggttagtactctgcgttgt

SEQ ID NO: 5631 - DNA, 23 bp, Homo Sapiens
agtggttagtactctgcgttgtg

SEQ ID NO: 5632 - DNA, 26 bp, Homo Sapiens
agtggttagtactctgcgttgtggcc

SEQ ID NO: 5633 - DNA, 27 bp, Homo Sapiens
agtggttagtactctgcgttgtggccg

SEQ ID NO: 5634 - DNA, 35 bp, Homo Sapiens
agtggttagtactctgcgttgtggccgcagcaacc

SEQ ID NO: 5635 - DNA, 36 bp, Homo Sapiens
agtggttagtactctgcgttgtggccgcagcaacct

SEQ ID NO: 5636 - DNA, 26 bp, Homo Sapiens
agtggttagtatccccgcctgtcacg

SEQ ID NO: 5637 - DNA, 19 bp, Homo Sapiens
agtggttatcacattcgcc

SEQ ID NO: 5638 - DNA, 18 bp, Homo Sapiens
agtggttatcacgtctgc

SEQ ID NO: 5639 - DNA, 19 bp, Homo Sapiens
agtggttatcacgtctgct

SEQ ID NO: 5640 - DNA, 20 bp, Homo Sapiens
agtggttatcacgtctgctt

SEQ ID NO: 5641 - DNA, 21 bp, Homo Sapiens
agtggttatcacgtctgcttt

SEQ ID NO: 5642 - DNA, 22 bp, Homo Sapiens
agtggttatcacgtctgcttta

SEQ ID NO: 5643 - DNA, 23 bp, Homo Sapiens
agtggttatcacgtctgctttac

SEQ ID NO: 5644 - DNA, 25 bp, Homo Sapiens
agtggttatcacgtctgctttacac

SEQ ID NO: 5645 - DNA, 26 bp, Homo Sapiens
agtggttatcacgtctgctttacacg

SEQ ID NO: 5646 - DNA, 27 bp, Homo Sapiens
agtggttatcacgtctgctttacacgc

SEQ ID NO: 5647 - DNA, 18 bp, Homo Sapiens
agtggttatcacgttcgc

SEQ ID NO: 5648 - DNA, 19 bp, Homo Sapiens
agtggttatcacgttcgcc

SEQ ID NO: 5649 - DNA, 20 bp, Homo Sapiens
agtggttatcacgttcgcct

SEQ ID NO: 5650 - DNA, 21 bp, Homo Sapiens
agtggttatcacgttcgcctc

SEQ ID NO: 5651 - DNA, 22 bp, Homo Sapiens
agtggttatcacgttcgcctca

SEQ ID NO: 5652 - DNA, 23 bp, Homo Sapiens
agtggttatcacgttcgcctcac

SEQ ID NO: 5653 - DNA, 25 bp, Homo Sapiens
agtggttatcacgttcgcctcacac

SEQ ID NO: 5654 - DNA, 26 bp, Homo Sapiens
agtggttatcacgttcgcctcacacg

SEQ ID NO: 5655 - DNA, 27 bp, Homo Sapiens
agtggttatcacgttcgcctcacacgc

SEQ ID NO: 5656 - DNA, 26 bp, Homo Sapiens
agtgtagcggttatcacgtctgcttt

SEQ ID NO: 5657 - DNA, 25 bp, Homo Sapiens
agtgtagcttaacacaaagcaccca

SEQ ID NO: 5658 - DNA, 24 bp, Homo Sapiens
agtgtagtggtcatcacgttcgcc

SEQ ID NO: 5659 - DNA, 25 bp, Homo Sapiens
agtgtagtggtcatcacgttcgcct

SEQ ID NO: 5660 - DNA, 24 bp, Homo Sapiens
agtgtagtggttatcacgtctgct

SEQ ID NO: 5661 - DNA, 25 bp, Homo Sapiens
agtgtagtggttatcacgtctgctt

SEQ ID NO: 5662 - DNA, 26 bp, Homo Sapiens
agtgtagtggttatcacgtctgcttt

SEQ ID NO: 5663 - DNA, 23 bp, Homo Sapiens
agtgtagtggttatcacgttcgc

SEQ ID NO: 5664 - DNA, 24 bp, Homo Sapiens
agtgtagtggttatcacgttcgcc

SEQ ID NO: 5665 - DNA, 25 bp, Homo Sapiens
agtgtagtggttatcacgttcgcct

SEQ ID NO: 5666 - DNA, 26 bp, Homo Sapiens
agtgtagtggttatcacgttcgcctc

SEQ ID NO: 5667 - DNA, 28 bp, Homo Sapiens
agtgtagtggttatcacgttcgcctcac

SEQ ID NO: 5668 - DNA, 31 bp, Homo Sapiens
agtgtggccgagcggtctaaggcgctggatt

SEQ ID NO: 5669 - DNA, 16 bp, Homo Sapiens
agtgtttgtgggttta

SEQ ID NO: 5670 - DNA, 17 bp, Homo Sapiens
agtgtttgtgggtttaa

SEQ ID NO: 5671 - DNA, 21 bp, Homo Sapiens
agtgtttgtgggtttaagtcc

SEQ ID NO: 5672 - DNA, 25 bp, Homo Sapiens
agtgtttgtgggtttaagtcccatt

SEQ ID NO: 5673 - DNA, 29 bp, Homo Sapiens
agtgtttgtgggtttaagtcccattggtc

SEQ ID NO: 5674 - DNA, 30 bp, Homo Sapiens
agtgtttgtgggtttaagtcccattggtct

SEQ ID NO: 5675 - DNA, 31 bp, Homo Sapiens
agtgtttgtgggtttaagtcccattggtcta

SEQ ID NO: 5676 - DNA, 32 bp, Homo Sapiens
agtgtttgtgggtttaagtcccattggtctag

SEQ ID NO: 5677 - DNA, 33 bp, Homo Sapiens
agtgtttgtgggtttaagtcccattggtctagc

SEQ ID NO: 5678 - DNA, 34 bp, Homo Sapiens
agtgtttgtgggtttaagtcccattggtctagcc

SEQ ID NO: 5679 - DNA, 35 bp, Homo Sapiens
agtgtttgtgggtttaagtcccattggtctagcca

SEQ ID NO: 5680 - DNA, 18 bp, Homo Sapiens
agttaaagactttttctc

SEQ ID NO: 5681 - DNA, 19 bp, Homo Sapiens
agttaaagactttttctct

SEQ ID NO: 5682 - DNA, 20 bp, Homo Sapiens
agttaaagactttttctctg

SEQ ID NO: 5683 - DNA, 21 bp, Homo Sapiens
agttaaagactttttctctga

SEQ ID NO: 5684 - DNA, 22 bp, Homo Sapiens
agttaaagactttttctctgac

SEQ ID NO: 5685 - DNA, 23 bp, Homo Sapiens
agttaaagactttttctctgacc

SEQ ID NO: 5686 - DNA, 24 bp, Homo Sapiens
agttaaagactttttctctgacca

SEQ ID NO: 5687 - DNA, 17 bp, Homo Sapiens
agttaaagattaagaga

SEQ ID NO: 5688 - DNA, 18 bp, Homo Sapiens
agttaaagattaagagaa

SEQ ID NO: 5689 - DNA, 19 bp, Homo Sapiens
agttaaagattaagagaac

SEQ ID NO: 5690 - DNA, 20 bp, Homo Sapiens
agttaaagattaagagaacc

SEQ ID NO: 5691 - DNA, 21 bp, Homo Sapiens
agttaaagattaagagaacca

SEQ ID NO: 5692 - DNA, 22 bp, Homo Sapiens
agttaaagattaagagaaccaa

SEQ ID NO: 5693 - DNA, 23 bp, Homo Sapiens
agttaaagattaagagaaccaac

SEQ ID NO: 5694 - DNA, 24 bp, Homo Sapiens
agttaaagattaagagaaccaaca

SEQ ID NO: 5695 - DNA, 25 bp, Homo Sapiens
agttaaagattaagagaaccaacac

SEQ ID NO: 5696 - DNA, 26 bp, Homo Sapiens
agttaaagattaagagaaccaacacc

SEQ ID NO: 5697 - DNA, 27 bp, Homo Sapiens
agttaaagattaagagaaccaacacct

SEQ ID NO: 5698 - DNA, 28 bp, Homo Sapiens
agttaaagattaagagaaccaacacctc

SEQ ID NO: 5699 - DNA, 29 bp, Homo Sapiens
agttaaagattaagagaaccaacacctct

SEQ ID NO: 5700 - DNA, 30 bp, Homo Sapiens
agttaaagattaagagaaccaacacctctt

SEQ ID NO: 5701 - DNA, 31 bp, Homo Sapiens
agttaaagattaagagaaccaacacctcttt

SEQ ID NO: 5702 - DNA, 32 bp, Homo Sapiens
agttaaagattaagagaaccaacacctcttta

SEQ ID NO: 5703 - DNA, 37 bp, Homo Sapiens
agttaaagattaagagaaccaacacctctttacagtg

SEQ ID NO: 5704 - DNA, 38 bp, Homo Sapiens
agttaaagattaagagaaccaacacctctttacagtga

SEQ ID NO: 5705 - DNA, 39 bp, Homo Sapiens
agttaaagattaagagaaccaacacctctttacagtgac

SEQ ID NO: 5706 - DNA, 40 bp, Homo Sapiens
agttaaagattaagagaaccaacacctctttacagtgacc

SEQ ID NO: 5707 - DNA, 41 bp, Homo Sapiens
agttaaagattaagagaaccaacacctctttacagtgacca

SEQ ID NO: 5708 - DNA, 16 bp, Homo Sapiens
agttaaattataggct

SEQ ID NO: 5709 - DNA, 17 bp, Homo Sapiens
agttaaattataggcta

SEQ ID NO: 5710 - DNA, 18 bp, Homo Sapiens
agttaaattataggctaa

SEQ ID NO: 5711 - DNA, 19 bp, Homo Sapiens
agttaaattataggctaaa

SEQ ID NO: 5712 - DNA, 21 bp, Homo Sapiens
agttaaattataggctaaatc

SEQ ID NO: 5713 - DNA, 22 bp, Homo Sapiens
agttaaattataggctaaatcc

SEQ ID NO: 5714 - DNA, 23 bp, Homo Sapiens
agttaaattataggctaaatcct

SEQ ID NO: 5715 - DNA, 27 bp, Homo Sapiens
agttaaattataggctaaatcctatat

SEQ ID NO: 5716 - DNA, 28 bp, Homo Sapiens
agttaaattataggctaaatcctatata

SEQ ID NO: 5717 - DNA, 34 bp, Homo Sapiens
agttaaattataggctaaatcctatatatcttac

SEQ ID NO: 5718 - DNA, 35 bp, Homo Sapiens
agttaaattataggctaaatcctatatatcttacc

SEQ ID NO: 5719 - DNA, 29 bp, Homo Sapiens
agttactttgatagagtaaataataggag

SEQ ID NO: 5720 - DNA, 30 bp, Homo Sapiens
agttactttgatagagtaaataataggagc

SEQ ID NO: 5721 - DNA, 31 bp, Homo Sapiens
agttactttgatagagtaaataataggagct

SEQ ID NO: 5722 - DNA, 21 bp, Homo Sapiens
agttcaaatctcgctggggcc

SEQ ID NO: 5723 - DNA, 22 bp, Homo Sapiens
agttcaaatctcgctggggcct

SEQ ID NO: 5724 - DNA, 23 bp, Homo Sapiens
agttcaaatctcgctggggcctc

SEQ ID NO: 5725 - DNA, 24 bp, Homo Sapiens
agttcaaatctcgctggggcctcc

SEQ ID NO: 5726 - DNA, 16 bp, Homo Sapiens
agttcaaatctcggtg

SEQ ID NO: 5727 - DNA, 18 bp, Homo Sapiens
agttcaaatctcggtgga

SEQ ID NO: 5728 - DNA, 19 bp, Homo Sapiens
agttcaaatctcggtggaa

SEQ ID NO: 5729 - DNA, 20 bp, Homo Sapiens
agttcaaatctcggtggaac

SEQ ID NO: 5730 - DNA, 21 bp, Homo Sapiens
agttcaaatctcggtggaacc

SEQ ID NO: 5731 - DNA, 22 bp, Homo Sapiens
agttcaaatctcggtggaacct

SEQ ID NO: 5732 - DNA, 23 bp, Homo Sapiens
agttcaaatctcggtggaacctc

SEQ ID NO: 5733 - DNA, 24 bp, Homo Sapiens
agttcaaatctcggtggaacctcc

SEQ ID NO: 5734 - DNA, 25 bp, Homo Sapiens
agttcaaatctcggtggaacctcca

SEQ ID NO: 5735 - DNA, 19 bp, Homo Sapiens
agttcaaatctcggtggga

SEQ ID NO: 5736 - DNA, 20 bp, Homo Sapiens
agttcaaatctcggtgggac

SEQ ID NO: 5737 - DNA, 21 bp, Homo Sapiens
agttcaaatctcggtgggacc

SEQ ID NO: 5738 - DNA, 22 bp, Homo Sapiens
agttcaaatctcggtgggacct

SEQ ID NO: 5739 - DNA, 24 bp, Homo Sapiens
agttcaaatctcggtgggacctcc

SEQ ID NO: 5740 - DNA, 25 bp, Homo Sapiens
agttcaaatctcggtgggacctcca

SEQ ID NO: 5741 - DNA, 22 bp, Homo Sapiens
agttcaattctcgctggggcct

SEQ ID NO: 5742 - DNA, 18 bp, Homo Sapiens
agttcgaacctcagaggg

SEQ ID NO: 5743 - DNA, 19 bp, Homo Sapiens
agttcgaacctcagagggg

SEQ ID NO: 5744 - DNA, 24 bp, Homo Sapiens
agttcgaacctcagagggggcacc

SEQ ID NO: 5745 - DNA, 24 bp, Homo Sapiens
agttcgaatctcggtgggacctcc

SEQ ID NO: 5746 - DNA, 25 bp, Homo Sapiens
agttcgagcctcacacggggcacca

SEQ ID NO: 5747 - DNA, 19 bp, Homo Sapiens
agttcgagcctcacctgga

SEQ ID NO: 5748 - DNA, 24 bp, Homo Sapiens
agttcgagcctcacctggagcacc

SEQ ID NO: 5749 - DNA, 20 bp, Homo Sapiens
agttcgagtctcggtggaac

SEQ ID NO: 5750 - DNA, 21 bp, Homo Sapiens
agttcgagtctcggtggaacc

SEQ ID NO: 5751 - DNA, 22 bp, Homo Sapiens
agttcgagtctcggtggaacct

SEQ ID NO: 5752 - DNA, 23 bp, Homo Sapiens
agttcgagtctcggtggaacctc

SEQ ID NO: 5753 - DNA, 24 bp, Homo Sapiens
agttcgagtctcggtggaacctcc

SEQ ID NO: 5754 - DNA, 25 bp, Homo Sapiens
agttcgagtctcggtggaacctcca

SEQ ID NO: 5755 - DNA, 24 bp, Homo Sapiens
agttcgatcctcacacggggcacc

SEQ ID NO: 5756 - DNA, 19 bp, Homo Sapiens
agttcgatcctcgctgggg

SEQ ID NO: 5757 - DNA, 22 bp, Homo Sapiens
agttcgatcctcgctggggcct

SEQ ID NO: 5758 - DNA, 24 bp, Homo Sapiens
agttcgatcctcgctggggcctcc

SEQ ID NO: 5759 - DNA, 21 bp, Homo Sapiens
agttctggtctccaatggagg

SEQ ID NO: 5760 - DNA, 16 bp, Homo Sapiens
agttctggtctccgga

SEQ ID NO: 5761 - DNA, 17 bp, Homo Sapiens
agttctggtctccggat

SEQ ID NO: 5762 - DNA, 20 bp, Homo Sapiens
agttctggtctccggatgga

SEQ ID NO: 5763 - DNA, 21 bp, Homo Sapiens
agttctggtctccggatggag

SEQ ID NO: 5764 - DNA, 22 bp, Homo Sapiens
agttctggtctccggatggagg

SEQ ID NO: 5765 - DNA, 25 bp, Homo Sapiens
agttctggtctccggatggaggcgt

SEQ ID NO: 5766 - DNA, 28 bp, Homo Sapiens
agttctggtctccggatggaggcgtggg

SEQ ID NO: 5767 - DNA, 29 bp, Homo Sapiens
agttctggtctccggatggaggcgtgggt

SEQ ID NO: 5768 - DNA, 30 bp, Homo Sapiens
agttctggtctccggatggaggcgtgggtt

SEQ ID NO: 5769 - DNA, 16 bp, Homo Sapiens
agttgacccgggttcg

SEQ ID NO: 5770 - DNA, 25 bp, Homo Sapiens
agttgacccgggttcgattcccggc

SEQ ID NO: 5771 - DNA, 26 bp, Homo Sapiens
agttgacccgggttcgattcccggcc

SEQ ID NO: 5772 - DNA, 34 bp, Homo Sapiens
agttgacccgggttcgattcccggccaacgcacc

SEQ ID NO: 5773 - DNA, 17 bp, Homo Sapiens
agttgatgcagagtggg

SEQ ID NO: 5774 - DNA, 18 bp, Homo Sapiens
agttgatgcagagtgggg

SEQ ID NO: 5775 - DNA, 19 bp, Homo Sapiens
agttgatgcagagtggggt

SEQ ID NO: 5776 - DNA, 20 bp, Homo Sapiens
agttgatgcagagtggggtt

SEQ ID NO: 5777 - DNA, 22 bp, Homo Sapiens
agttgatgcagagtggggtttt

SEQ ID NO: 5778 - DNA, 23 bp, Homo Sapiens
agttgatgcagagtggggttttg

SEQ ID NO: 5779 - DNA, 24 bp, Homo Sapiens
agttgatgcagagtggggttttgc

SEQ ID NO: 5780 - DNA, 25 bp, Homo Sapiens
agttgatgcagagtggggttttgca

SEQ ID NO: 5781 - DNA, 28 bp, Homo Sapiens
agttgatgcagagtggggttttgcagtc

SEQ ID NO: 5782 - DNA, 29 bp, Homo Sapiens
agttgatgcagagtggggttttgcagtcc

SEQ ID NO: 5783 - DNA, 30 bp, Homo Sapiens
agttgatgcagagtggggttttgcagtcct

SEQ ID NO: 5784 - DNA, 31 bp, Homo Sapiens
agttgatgcagagtggggttttgcagtcctt

SEQ ID NO: 5785 - DNA, 32 bp, Homo Sapiens
agttgatgcagagtggggttttgcagtcctta

SEQ ID NO: 5786 - DNA, 33 bp, Homo Sapiens
agttgatgcagagtggggttttgcagtccttac

SEQ ID NO: 5787 - DNA, 34 bp, Homo Sapiens
agttgatgcagagtggggttttgcagtccttacc

SEQ ID NO: 5788 - DNA, 35 bp, Homo Sapiens
agttgatgcagagtggggttttgcagtccttacca

SEQ ID NO: 5789 - DNA, 16 bp, Homo Sapiens
agttgattagggtgct

SEQ ID NO: 5790 - DNA, 17 bp, Homo Sapiens
agttgattagggtgctt

SEQ ID NO: 5791 - DNA, 18 bp, Homo Sapiens
agttgattagggtgctta

SEQ ID NO: 5792 - DNA, 19 bp, Homo Sapiens
agttgattagggtgcttag

SEQ ID NO: 5793 - DNA, 20 bp, Homo Sapiens
agttgattagggtgcttagc

SEQ ID NO: 5794 - DNA, 21 bp, Homo Sapiens
agttgattagggtgcttagct

SEQ ID NO: 5795 - DNA, 22 bp, Homo Sapiens
agttgattagggtgcttagctg

SEQ ID NO: 5796 - DNA, 23 bp, Homo Sapiens
agttgattagggtgcttagctgt

SEQ ID NO: 5797 - DNA, 24 bp, Homo Sapiens
agttgattagggtgcttagctgtt

SEQ ID NO: 5798 - DNA, 25 bp, Homo Sapiens
agttgattagggtgcttagctgtta

SEQ ID NO: 5799 - DNA, 26 bp, Homo Sapiens
agttgattagggtgcttagctgttaa

SEQ ID NO: 5800 - DNA, 27 bp, Homo Sapiens
agttgattagggtgcttagctgttaac

SEQ ID NO: 5801 - DNA, 28 bp, Homo Sapiens
agttgattagggtgcttagctgttaact

SEQ ID NO: 5802 - DNA, 30 bp, Homo Sapiens
agttgattagggtgcttagctgttaactaa

SEQ ID NO: 5803 - DNA, 31 bp, Homo Sapiens
agttgattagggtgcttagctgttaactaag

SEQ ID NO: 5804 - DNA, 35 bp, Homo Sapiens
agttgattagggtgcttagctgttaactaagtgtt

SEQ ID NO: 5805 - DNA, 36 bp, Homo Sapiens
agttgattagggtgcttagctgttaactaagtgttt

SEQ ID NO: 5806 - DNA, 38 bp, Homo Sapiens
agttgattagggtgcttagctgttaactaagtgtttgt

SEQ ID NO: 5807 - DNA, 41 bp, Homo Sapiens
agttgattagggtgcttagctgttaactaagtgtttgtggg

SEQ ID NO: 5808 - DNA, 42 bp, Homo Sapiens
agttgattagggtgcttagctgttaactaagtgtttgtgggt

SEQ ID NO: 5809 - DNA, 43 bp, Homo Sapiens
agttgattagggtgcttagctgttaactaagtgtttgtgggtt

SEQ ID NO: 5810 - DNA, 44 bp, Homo Sapiens
agttgattagggtgcttagctgttaactaagtgtttgtgggttt

SEQ ID NO: 5811 - DNA, 45 bp, Homo Sapiens
agttgattagggtgcttagctgttaactaagtgtttgtgggttta

SEQ ID NO: 5812 - DNA, 46 bp, Homo Sapiens
agttgattagggtgcttagctgttaactaagtgtttgtgggtttaa

SEQ ID NO: 5813 - DNA, 17 bp, Homo Sapiens
agttgcaatacttaatt

SEQ ID NO: 5814 - DNA, 19 bp, Homo Sapiens
agttgcaatacttaatttc

SEQ ID NO: 5815 - DNA, 20 bp, Homo Sapiens
agttgcaatacttaatttct

SEQ ID NO: 5816 - DNA, 21 bp, Homo Sapiens
agttgcaatacttaatttctg

SEQ ID NO: 5817 - DNA, 22 bp, Homo Sapiens
agttgcaatacttaatttctgc

SEQ ID NO: 5818 - DNA, 23 bp, Homo Sapiens
agttgcaatacttaatttctgcc

SEQ ID NO: 5819 - DNA, 24 bp, Homo Sapiens
agttgcaatacttaatttctgcca

SEQ ID NO: 5820 - DNA, 22 bp, Homo Sapiens
agttgggagagcgttagactga

SEQ ID NO: 5821 - DNA, 29 bp, Homo Sapiens
agttgggagagcgttagactgaagatcta

SEQ ID NO: 5822 - DNA, 16 bp, Homo Sapiens
agttggtagagcatca

SEQ ID NO: 5823 - DNA, 18 bp, Homo Sapiens
agttggtagagcatcaga

SEQ ID NO: 5824 - DNA, 19 bp, Homo Sapiens
agttggtagagcatcagac

SEQ ID NO: 5825 - DNA, 20 bp, Homo Sapiens
agttggtagagcatcagact

SEQ ID NO: 5826 - DNA, 19 bp, Homo Sapiens
agttggtagagcatgggac

SEQ ID NO: 5827 - DNA, 28 bp, Homo Sapiens
agttggtagagcatgggactcttaatcc

SEQ ID NO: 5828 - DNA, 29 bp, Homo Sapiens
agttggtagagcatgggactcttaatccc

SEQ ID NO: 5829 - DNA, 38 bp, Homo Sapiens
agttggtagagcattggacttttaatttgagggcccag

SEQ ID NO: 5830 - DNA, 18 bp, Homo Sapiens
agttggtagagcggagga

SEQ ID NO: 5831 - DNA, 19 bp, Homo Sapiens
agttggtagagcggaggac

SEQ ID NO: 5832 - DNA, 21 bp, Homo Sapiens
agttggtagagcggaggactg

SEQ ID NO: 5833 - DNA, 23 bp, Homo Sapiens
agttggtagagcggaggactgta

SEQ ID NO: 5834 - DNA, 24 bp, Homo Sapiens
agttggtagagcggaggactgtag

SEQ ID NO: 5835 - DNA, 27 bp, Homo Sapiens
agtttaaacaaaacgaatgatttcgac

SEQ ID NO: 5836 - DNA, 28 bp, Homo Sapiens
agtttaaacaaaacgaatgatttcgact

SEQ ID NO: 5837 - DNA, 29 bp, Homo Sapiens
agtttaaacaaaacgaatgatttcgactc

SEQ ID NO: 5838 - DNA, 30 bp, Homo Sapiens
agtttaaacaaaacgaatgatttcgactca

SEQ ID NO: 5839 - DNA, 32 bp, Homo Sapiens
agtttaaacaaaacgaatgatttcgactcatt

SEQ ID NO: 5840 - DNA, 23 bp, Homo Sapiens
agtttaaattagaatcttagctt

SEQ ID NO: 5841 - DNA, 25 bp, Homo Sapiens
agtttaaattagaatcttagctttg

SEQ ID NO: 5842 - DNA, 26 bp, Homo Sapiens
agtttaaattagaatcttagctttgg

SEQ ID NO: 5843 - DNA, 44 bp, Homo Sapiens
agtttaaattagaatcttagctttgggtgctaatggtggagtta

SEQ ID NO: 5844 - DNA, 24 bp, Homo Sapiens
agtttaaccaaaacatcagattgt

SEQ ID NO: 5845 - DNA, 25 bp, Homo Sapiens
agtttaaccaaaacatcagattgtg

SEQ ID NO: 5846 - DNA, 26 bp, Homo Sapiens
agtttaaccaaaacatcagattgtga

SEQ ID NO: 5847 - DNA, 28 bp, Homo Sapiens
agtttaaccaaaacatcagattgtgaat

SEQ ID NO: 5848 - DNA, 29 bp, Homo Sapiens
agtttaaccaaaacatcagattgtgaatc

SEQ ID NO: 5849 - DNA, 30 bp, Homo Sapiens
agtttaaccaaaacatcagattgtgaatct

SEQ ID NO: 5850 - DNA, 31 bp, Homo Sapiens
agtttaaccaaaacatcagattgtgaatctg

SEQ ID NO: 5851 - DNA, 33 bp, Homo Sapiens
agtttaaccaaaacatcagattgtgaatctgac

SEQ ID NO: 5852 - DNA, 34 bp, Homo Sapiens
agtttaaccaaaacatcagattgtgaatctgaca

SEQ ID NO: 5853 - DNA, 35 bp, Homo Sapiens
agtttaaccaaaacatcagattgtgaatctgacaa

SEQ ID NO: 5854 - DNA, 37 bp, Homo Sapiens
agtttaaccaaaacatcagattgtgaatctgacaaca

SEQ ID NO: 5855 - DNA, 40 bp, Homo Sapiens
agtttaaccaaaacatcagattgtgaatctgacaacagag

SEQ ID NO: 5856 - DNA, 42 bp, Homo Sapiens
agtttaaccaaaacatcagattgtgaatctgacaacagaggc

SEQ ID NO: 5857 - DNA, 43 bp, Homo Sapiens
agtttaaccaaaacatcagattgtgaatctgacaacagaggct

SEQ ID NO: 5858 - DNA, 20 bp, Homo Sapiens
agtttatgtagcttacctcc

SEQ ID NO: 5859 - DNA, 21 bp, Homo Sapiens
agtttatgtagcttacctcct

SEQ ID NO: 5860 - DNA, 34 bp, Homo Sapiens
agtttccgtagtgtagtggttatcacgttcgcct

SEQ ID NO: 5861 - DNA, 35 bp, Homo Sapiens
agtttccgtagtgtagtggttatcacgttcgcctc

SEQ ID NO: 5862 - DNA, 26 bp, Homo Sapiens
agttttgacaacattcaaaaaagagt

SEQ ID NO: 5863 - DNA, 28 bp, Homo Sapiens
agttttgacaacattcaaaaaagagtac

SEQ ID NO: 5864 - DNA, 29 bp, Homo Sapiens
agttttgacaacattcaaaaaagagtacc

SEQ ID NO: 5865 - DNA, 30 bp, Homo Sapiens
agttttgacaacattcaaaaaagagtacca

SEQ ID NO: 5866 - DNA, 23 bp, Homo Sapiens
ataaaacttaaaactttacagtc

SEQ ID NO: 5867 - DNA, 25 bp, Homo Sapiens
ataaaacttaaaactttacagtcag

SEQ ID NO: 5868 - DNA, 26 bp, Homo Sapiens
ataaaacttaaaactttacagtcaga

SEQ ID NO: 5869 - DNA, 27 bp, Homo Sapiens
ataaaacttaaaactttacagtcagag

SEQ ID NO: 5870 - DNA, 28 bp, Homo Sapiens
ataaaacttaaaactttacagtcagagg

SEQ ID NO: 5871 - DNA, 29 bp, Homo Sapiens
ataaaacttaaaactttacagtcagaggt

SEQ ID NO: 5872 - DNA, 30 bp, Homo Sapiens
ataaaacttaaaactttacagtcagaggtt

SEQ ID NO: 5873 - DNA, 31 bp, Homo Sapiens
ataaaacttaaaactttacagtcagaggttc

SEQ ID NO: 5874 - DNA, 23 bp, Homo Sapiens
ataaaagagttactttgatagag

SEQ ID NO: 5875 - DNA, 38 bp, Homo Sapiens
ataaaagagttactttgatagagtaaataataggagct

SEQ ID NO: 5876 - DNA, 18 bp, Homo Sapiens
ataaatagtaccgttaac

SEQ ID NO: 5877 - DNA, 19 bp, Homo Sapiens
ataaatagtaccgttaact

SEQ ID NO: 5878 - DNA, 20 bp, Homo Sapiens
ataaatagtaccgttaactt

SEQ ID NO: 5879 - DNA, 21 bp, Homo Sapiens
ataaatagtaccgttaacttc

SEQ ID NO: 5880 - DNA, 22 bp, Homo Sapiens
ataaatagtaccgttaacttcc

SEQ ID NO: 5881 - DNA, 27 bp, Homo Sapiens
ataaatagtaccgttaacttccaatta

SEQ ID NO: 5882 - DNA, 39 bp, Homo Sapiens
ataaatagtaccgttaacttccaattaactagttttgac

SEQ ID NO: 5883 - DNA, 16 bp, Homo Sapiens
ataacagctatccatt

SEQ ID NO: 5884 - DNA, 17 bp, Homo Sapiens
ataacagctatccattg

SEQ ID NO: 5885 - DNA, 19 bp, Homo Sapiens
ataacagctatccattggt

SEQ ID NO: 5886 - DNA, 20 bp, Homo Sapiens
ataacagctatccattggtc

SEQ ID NO: 5887 - DNA, 21 bp, Homo Sapiens
ataacagctatccattggtct

SEQ ID NO: 5888 - DNA, 22 bp, Homo Sapiens
ataacagctatccattggtctt

SEQ ID NO: 5889 - DNA, 23 bp, Homo Sapiens
ataacagctatccattggtctta

SEQ ID NO: 5890 - DNA, 24 bp, Homo Sapiens
ataacagctatccattggtcttag

SEQ ID NO: 5891 - DNA, 27 bp, Homo Sapiens
ataacagctatccattggtcttaggcc

SEQ ID NO: 5892 - DNA, 28 bp, Homo Sapiens
ataacagctatccattggtcttaggccc

SEQ ID NO: 5893 - DNA, 29 bp, Homo Sapiens
ataacagctatccattggtcttaggcccc

SEQ ID NO: 5894 - DNA, 30 bp, Homo Sapiens
ataacagctatccattggtcttaggcccca

SEQ ID NO: 5895 - DNA, 32 bp, Homo Sapiens
ataacagctatccattggtcttaggccccaaa

SEQ ID NO: 5896 - DNA, 34 bp, Homo Sapiens
ataacagctatccattggtcttaggccccaaaaa

SEQ ID NO: 5897 - DNA, 35 bp, Homo Sapiens
ataacagctatccattggtcttaggccccaaaaat

SEQ ID NO: 5898 - DNA, 16 bp, Homo Sapiens
ataacccagaggtcga

SEQ ID NO: 5899 - DNA, 17 bp, Homo Sapiens
ataacccagaggtcgat

SEQ ID NO: 5900 - DNA, 18 bp, Homo Sapiens
ataacccagaggtcgatg

SEQ ID NO: 5901 - DNA, 20 bp, Homo Sapiens
ataacccagaggtcgatgga

SEQ ID NO: 5902 - DNA, 21 bp, Homo Sapiens
ataacccagaggtcgatggat

SEQ ID NO: 5903 - DNA, 22 bp, Homo Sapiens
ataacccagaggtcgatggatc

SEQ ID NO: 5904 - DNA, 23 bp, Homo Sapiens
ataacccagaggtcgatggatcg

SEQ ID NO: 5905 - DNA, 24 bp, Homo Sapiens
ataacccagaggtcgatggatcga

SEQ ID NO: 5906 - DNA, 27 bp, Homo Sapiens
ataacccagaggtcgatggatcgaaac

SEQ ID NO: 5907 - DNA, 23 bp, Homo Sapiens
ataacccagaggtcgatggatct

SEQ ID NO: 5908 - DNA, 16 bp, Homo Sapiens
ataacgccaaggtcgc

SEQ ID NO: 5909 - DNA, 20 bp, Homo Sapiens
ataacgccaaggtcgcgggt

SEQ ID NO: 5910 - DNA, 21 bp, Homo Sapiens
ataacgccaaggtcgcgggtt

SEQ ID NO: 5911 - DNA, 23 bp, Homo Sapiens
ataacgccaaggtcgcgggttcg

SEQ ID NO: 5912 - DNA, 37 bp, Homo Sapiens
ataacgccaaggtcgcgggttcgatccccgtacgggc

SEQ ID NO: 5913 - DNA, 41 bp, Homo Sapiens
ataacgccaaggtcgcgggttcgatccccgtacgggccacc

SEQ ID NO: 5914 - DNA, 28 bp, Homo Sapiens
ataactttgtcaaagttaaattataggc

SEQ ID NO: 5915 - DNA, 29 bp, Homo Sapiens
ataactttgtcaaagttaaattataggct

SEQ ID NO: 5916 - DNA, 30 bp, Homo Sapiens
ataactttgtcaaagttaaattataggcta

SEQ ID NO: 5917 - DNA, 31 bp, Homo Sapiens
ataactttgtcaaagttaaattataggctaa

SEQ ID NO: 5918 - DNA, 34 bp, Homo Sapiens
ataactttgtcaaagttaaattataggctaaatc

SEQ ID NO: 5919 - DNA, 16 bp, Homo Sapiens
ataagctatcgggccc

SEQ ID NO: 5920 - DNA, 17 bp, Homo Sapiens
ataagctatcgggccca

SEQ ID NO: 5921 - DNA, 18 bp, Homo Sapiens
ataagctatcgggcccat

SEQ ID NO: 5922 - DNA, 19 bp, Homo Sapiens
ataagctatcgggcccata

SEQ ID NO: 5923 - DNA, 20 bp, Homo Sapiens
ataagctatcgggcccatac

SEQ ID NO: 5924 - DNA, 21 bp, Homo Sapiens
ataagctatcgggcccatacc

SEQ ID NO: 5925 - DNA, 22 bp, Homo Sapiens
ataagctatcgggcccataccc

SEQ ID NO: 5926 - DNA, 23 bp, Homo Sapiens
ataagctatcgggcccatacccc

SEQ ID NO: 5927 - DNA, 24 bp, Homo Sapiens
ataagctatcgggcccataccccg

SEQ ID NO: 5928 - DNA, 25 bp, Homo Sapiens
ataagctatcgggcccataccccga

SEQ ID NO: 5929 - DNA, 26 bp, Homo Sapiens
ataagctatcgggcccataccccgaa

SEQ ID NO: 5930 - DNA, 27 bp, Homo Sapiens
ataagctatcgggcccataccccgaaa

SEQ ID NO: 5931 - DNA, 28 bp, Homo Sapiens
ataagctatcgggcccataccccgaaaa

SEQ ID NO: 5932 - DNA, 29 bp, Homo Sapiens
ataagctatcgggcccataccccgaaaat

SEQ ID NO: 5933 - DNA, 30 bp, Homo Sapiens
ataagctatcgggcccataccccgaaaatg

SEQ ID NO: 5934 - DNA, 32 bp, Homo Sapiens
ataagctatcgggcccataccccgaaaatgtt

SEQ ID NO: 5935 - DNA, 33 bp, Homo Sapiens
ataagctatcgggcccataccccgaaaatgttg

SEQ ID NO: 5936 - DNA, 35 bp, Homo Sapiens
ataagctatcgggcccataccccgaaaatgttggt

SEQ ID NO: 5937 - DNA, 36 bp, Homo Sapiens
ataagctatcgggcccataccccgaaaatgttggtt

SEQ ID NO: 5938 - DNA, 37 bp, Homo Sapiens
ataagctatcgggcccataccccgaaaatgttggtta

SEQ ID NO: 5939 - DNA, 38 bp, Homo Sapiens
ataagctatcgggcccataccccgaaaatgttggttat

SEQ ID NO: 5940 - DNA, 40 bp, Homo Sapiens
ataagctatcgggcccataccccgaaaatgttggttatac

SEQ ID NO: 5941 - DNA, 24 bp, Homo Sapiens
ataaggcatcagcctccggagctg

SEQ ID NO: 5942 - DNA, 17 bp, Homo Sapiens
ataataggagcttaaac

SEQ ID NO: 5943 - DNA, 18 bp, Homo Sapiens
ataataggagcttaaacc

SEQ ID NO: 5944 - DNA, 19 bp, Homo Sapiens
ataataggagcttaaaccc

SEQ ID NO: 5945 - DNA, 20 bp, Homo Sapiens
ataataggagcttaaacccc

SEQ ID NO: 5946 - DNA, 21 bp, Homo Sapiens
ataataggagcttaaaccccc

SEQ ID NO: 5947 - DNA, 22 bp, Homo Sapiens
ataataggagcttaaaccccct

SEQ ID NO: 5948 - DNA, 23 bp, Homo Sapiens
ataataggagcttaaaccccctt

SEQ ID NO: 5949 - DNA, 24 bp, Homo Sapiens
ataataggagcttaaaccccctta

SEQ ID NO: 5950 - DNA, 25 bp, Homo Sapiens
ataataggagcttaaacccccttat

SEQ ID NO: 5951 - DNA, 26 bp, Homo Sapiens
ataataggagcttaaacccccttatt

SEQ ID NO: 5952 - DNA, 28 bp, Homo Sapiens
ataataggagcttaaacccccttatttc

SEQ ID NO: 5953 - DNA, 29 bp, Homo Sapiens
ataataggagcttaaacccccttatttct

SEQ ID NO: 5954 - DNA, 30 bp, Homo Sapiens
ataataggagcttaaacccccttatttcta

SEQ ID NO: 5955 - DNA, 31 bp, Homo Sapiens
ataataggagcttaaacccccttatttctac

SEQ ID NO: 5956 - DNA, 32 bp, Homo Sapiens
ataataggagcttaaacccccttatttctacc

SEQ ID NO: 5957 - DNA, 33 bp, Homo Sapiens
ataataggagcttaaacccccttatttctacca

SEQ ID NO: 5958 - DNA, 18 bp, Homo Sapiens
ataatcatatttaccaac

SEQ ID NO: 5959 - DNA, 19 bp, Homo Sapiens
ataatcatatttaccaacc

SEQ ID NO: 5960 - DNA, 20 bp, Homo Sapiens
ataatcatatttaccaacca

SEQ ID NO: 5961 - DNA, 16 bp, Homo Sapiens
ataatctgaaggtcct

SEQ ID NO: 5962 - DNA, 17 bp, Homo Sapiens
ataatctgaaggtcctg

SEQ ID NO: 5963 - DNA, 18 bp, Homo Sapiens
ataatctgaaggtcctga

SEQ ID NO: 5964 - DNA, 20 bp, Homo Sapiens
ataatctgaaggtcctgagt

SEQ ID NO: 5965 - DNA, 39 bp, Homo Sapiens
ataatctgaaggtcctgagttcgaacctcagagggggca

SEQ ID NO: 5966 - DNA, 40 bp, Homo Sapiens
ataatctgaaggtcctgagttcgaacctcagagggggcac

SEQ ID NO: 5967 - DNA, 41 bp, Homo Sapiens
ataatctgaaggtcctgagttcgaacctcagagggggcacc

SEQ ID NO: 5968 - DNA, 42 bp, Homo Sapiens
ataatctgaaggtcctgagttcgaacctcagagggggcacca

SEQ ID NO: 5969 - DNA, 42 bp, Homo Sapiens
ataatctgaaggtcctgagttcgagcctcagagagggcacca

SEQ ID NO: 5970 - DNA, 20 bp, Homo Sapiens
ataatctgaaggtcgtgagt

SEQ ID NO: 5971 - DNA, 21 bp, Homo Sapiens
ataatctgaaggtcgtgagtt

SEQ ID NO: 5972 - DNA, 23 bp, Homo Sapiens
ataatctgaaggtcgtgagttcg

SEQ ID NO: 5973 - DNA, 37 bp, Homo Sapiens
ataatctgaaggtcgtgagttcgagcctcacacgggg

SEQ ID NO: 5974 - DNA, 39 bp, Homo Sapiens
ataatctgaaggtcgtgagttcgagcctcacacggggca

SEQ ID NO: 5975 - DNA, 40 bp, Homo Sapiens
ataatctgaaggtcgtgagttcgagcctcacacggggcac

SEQ ID NO: 5976 - DNA, 41 bp, Homo Sapiens
ataatctgaaggtcgtgagttcgagcctcacacggggcacc

SEQ ID NO: 5977 - DNA, 42 bp, Homo Sapiens
ataatctgaaggtcgtgagttcgagcctcacacggggcacca

SEQ ID NO: 5978 - DNA, 40 bp, Homo Sapiens
ataatctgaaggtcgtgagttcgatcctcacacggggcac

SEQ ID NO: 5979 - DNA, 41 bp, Homo Sapiens
ataatctgaaggtcgtgagttcgatcctcacacggggcacc

SEQ ID NO: 5980 - DNA, 42 bp, Homo Sapiens
ataatctgaaggtcgtgagttcgatcctcacacggggcacca

SEQ ID NO: 5981 - DNA, 16 bp, Homo Sapiens
ataatgccgaggttgt

SEQ ID NO: 5982 - DNA, 17 bp, Homo Sapiens
ataatgccgaggttgtg

SEQ ID NO: 5983 - DNA, 18 bp, Homo Sapiens
ataatgccgaggttgtga

SEQ ID NO: 5984 - DNA, 22 bp, Homo Sapiens
ataatgccgaggttgtgagttc

SEQ ID NO: 5985 - DNA, 23 bp, Homo Sapiens
ataatgccgaggttgtgagttcg

SEQ ID NO: 5986 - DNA, 24 bp, Homo Sapiens
ataatgccgaggttgtgagttcga

SEQ ID NO: 5987 - DNA, 34 bp, Homo Sapiens
ataatgccgaggttgtgagttcgagcctcacctg

SEQ ID NO: 5988 - DNA, 41 bp, Homo Sapiens
ataatgccgaggttgtgagttcgagcctcacctggagcacc

SEQ ID NO: 5989 - DNA, 18 bp, Homo Sapiens
atacaacgatggtttttc

SEQ ID NO: 5990 - DNA, 19 bp, Homo Sapiens
atacaacgatggtttttca

SEQ ID NO: 5991 - DNA, 20 bp, Homo Sapiens
atacaacgatggtttttcat

SEQ ID NO: 5992 - DNA, 22 bp, Homo Sapiens
atacaacgatggtttttcatat

SEQ ID NO: 5993 - DNA, 23 bp, Homo Sapiens
atacaacgatggtttttcatatc

SEQ ID NO: 5994 - DNA, 31 bp, Homo Sapiens
atacaacgatggtttttcatatcattggtcg

SEQ ID NO: 5995 - DNA, 32 bp, Homo Sapiens
atacaacgatggtttttcatatcattggtcgt

SEQ ID NO: 5996 - DNA, 37 bp, Homo Sapiens
atacaacgatggtttttcatatcattggtcgtggttg

SEQ ID NO: 5997 - DNA, 38 bp, Homo Sapiens
atacaacgatggtttttcatatcattggtcgtggttgt

SEQ ID NO: 5998 - DNA, 39 bp, Homo Sapiens
atacaacgatggtttttcatatcattggtcgtggttgta

SEQ ID NO: 5999 - DNA, 41 bp, Homo Sapiens
atacaacgatggtttttcatatcattggtcgtggttgtagt

SEQ ID NO: 6000 - DNA, 42 bp, Homo Sapiens
atacaacgatggtttttcatatcattggtcgtggttgtagtc

SEQ ID NO: 6001 - DNA, 43 bp, Homo Sapiens
atacaacgatggtttttcatatcattggtcgtggttgtagtcc

SEQ ID NO: 6002 - DNA, 44 bp, Homo Sapiens
atacaacgatggtttttcatatcattggtcgtggttgtagtccg

SEQ ID NO: 6003 - DNA, 47 bp, Homo Sapiens
atacaacgatggtttttcatatcattggtcgtggttgtagtccgtgc

SEQ ID NO: 6004 - DNA, 48 bp, Homo Sapiens
atacaacgatggtttttcatatcattggtcgtggttgtagtccgtgcg

SEQ ID NO: 6005 - DNA, 20 bp, Homo Sapiens
atacaccagtcttgtaaacc

SEQ ID NO: 6006 - DNA, 22 bp, Homo Sapiens
atacactgaaaatgtttagacg

SEQ ID NO: 6007 - DNA, 25 bp, Homo Sapiens
atacactgaaaatgtttagacgggc

SEQ ID NO: 6008 - DNA, 26 bp, Homo Sapiens
atacactgaaaatgtttagacgggct

SEQ ID NO: 6009 - DNA, 27 bp, Homo Sapiens
atacactgaaaatgtttagacgggctc

SEQ ID NO: 6010 - DNA, 28 bp, Homo Sapiens
atacactgaaaatgtttagacgggctca

SEQ ID NO: 6011 - DNA, 29 bp, Homo Sapiens
atacactgaaaatgtttagacgggctcac

SEQ ID NO: 6012 - DNA, 30 bp, Homo Sapiens
atacactgaaaatgtttagacgggctcaca

SEQ ID NO: 6013 - DNA, 32 bp, Homo Sapiens
atacactgaaaatgtttagacgggctcacatc

SEQ ID NO: 6014 - DNA, 35 bp, Homo Sapiens
atacactgaaaatgtttagacgggctcacatcacc

SEQ ID NO: 6015 - DNA, 36 bp, Homo Sapiens
atacactgaaaatgtttagacgggctcacatcaccc

SEQ ID NO: 6016 - DNA, 44 bp, Homo Sapiens
atacactgaaaatgtttagacgggctcacatcaccccataaaca

SEQ ID NO: 6017 - DNA, 46 bp, Homo Sapiens
atacactgaaaatgtttagacgggctcacatcaccccataaacacc

SEQ ID NO: 6018 - DNA, 47 bp, Homo Sapiens
atacactgaaaatgtttagacgggctcacatcaccccataaacacca

SEQ ID NO: 6019 - DNA, 16 bp, Homo Sapiens
atacagaccaagagcc

SEQ ID NO: 6020 - DNA, 17 bp, Homo Sapiens
atacagaccaagagcct

SEQ ID NO: 6021 - DNA, 18 bp, Homo Sapiens
atacagaccaagagcctt

SEQ ID NO: 6022 - DNA, 19 bp, Homo Sapiens
atacagaccaagagccttc

SEQ ID NO: 6023 - DNA, 20 bp, Homo Sapiens
atacagaccaagagccttca

SEQ ID NO: 6024 - DNA, 21 bp, Homo Sapiens
atacagaccaagagccttcaa

SEQ ID NO: 6025 - DNA, 22 bp, Homo Sapiens
atacagaccaagagccttcaaa

SEQ ID NO: 6026 - DNA, 25 bp, Homo Sapiens
atacagaccaagagccttcaaagcc

SEQ ID NO: 6027 - DNA, 26 bp, Homo Sapiens
atacagaccaagagccttcaaagccc

SEQ ID NO: 6028 - DNA, 29 bp, Homo Sapiens
atacagaccaagagccttcaaagccctca

SEQ ID NO: 6029 - DNA, 32 bp, Homo Sapiens
atacagaccaagagccttcaaagccctcagta

SEQ ID NO: 6030 - DNA, 20 bp, Homo Sapiens
ataccccgaaaatgttggtt

SEQ ID NO: 6031 - DNA, 26 bp, Homo Sapiens
ataccccgaaaatgttggttataccc

SEQ ID NO: 6032 - DNA, 34 bp, Homo Sapiens
ataccccgaaaatgttggttatacccttcccgta

SEQ ID NO: 6033 - DNA, 37 bp, Homo Sapiens
ataccccgaaaatgttggttatacccttcccgtacta

SEQ ID NO: 6034 - DNA, 38 bp, Homo Sapiens
ataccccgaaaatgttggttatacccttcccgtactac

SEQ ID NO: 6035 - DNA, 39 bp, Homo Sapiens
ataccccgaaaatgttggttatacccttcccgtactacc

SEQ ID NO: 6036 - DNA, 40 bp, Homo Sapiens
ataccccgaaaatgttggttatacccttcccgtactacca

SEQ ID NO: 6037 - DNA, 16 bp, Homo Sapiens
atacccttcccgtact

SEQ ID NO: 6038 - DNA, 17 bp, Homo Sapiens
atacccttcccgtacta

SEQ ID NO: 6039 - DNA, 18 bp, Homo Sapiens
atacccttcccgtactac

SEQ ID NO: 6040 - DNA, 19 bp, Homo Sapiens
atacccttcccgtactacc

SEQ ID NO: 6041 - DNA, 20 bp, Homo Sapiens
atacccttcccgtactacca

SEQ ID NO: 6042 - DNA, 16 bp, Homo Sapiens
atacttaatttctgcc

SEQ ID NO: 6043 - DNA, 17 bp, Homo Sapiens
atacttaatttctgcca

SEQ ID NO: 6044 - DNA, 18 bp, Homo Sapiens
atagagtaaataatagga

SEQ ID NO: 6045 - DNA, 19 bp, Homo Sapiens
atagagtaaataataggag

SEQ ID NO: 6046 - DNA, 20 bp, Homo Sapiens
atagagtaaataataggagc

SEQ ID NO: 6047 - DNA, 21 bp, Homo Sapiens
atagagtaaataataggagct

SEQ ID NO: 6048 - DNA, 22 bp, Homo Sapiens
atagagtaaataataggagctt

SEQ ID NO: 6049 - DNA, 23 bp, Homo Sapiens
atagagtaaataataggagctta

SEQ ID NO: 6050 - DNA, 24 bp, Homo Sapiens
atagagtaaataataggagcttaa

SEQ ID NO: 6051 - DNA, 26 bp, Homo Sapiens
atagagtaaataataggagcttaaac

SEQ ID NO: 6052 - DNA, 27 bp, Homo Sapiens
atagagtaaataataggagcttaaacc

SEQ ID NO: 6053 - DNA, 28 bp, Homo Sapiens
atagagtaaataataggagcttaaaccc

SEQ ID NO: 6054 - DNA, 29 bp, Homo Sapiens
atagagtaaataataggagcttaaacccc

SEQ ID NO: 6055 - DNA, 30 bp, Homo Sapiens
atagagtaaataataggagcttaaaccccc

SEQ ID NO: 6056 - DNA, 31 bp, Homo Sapiens
atagagtaaataataggagcttaaaccccct

SEQ ID NO: 6057 - DNA, 32 bp, Homo Sapiens
atagagtaaataataggagcttaaaccccctt

SEQ ID NO: 6058 - DNA, 33 bp, Homo Sapiens
atagagtaaataataggagcttaaaccccctta

SEQ ID NO: 6059 - DNA, 34 bp, Homo Sapiens
atagagtaaataataggagcttaaacccccttat

SEQ ID NO: 6060 - DNA, 35 bp, Homo Sapiens
atagagtaaataataggagcttaaacccccttatt

SEQ ID NO: 6061 - DNA, 36 bp, Homo Sapiens
atagagtaaataataggagcttaaacccccttattt

SEQ ID NO: 6062 - DNA, 37 bp, Homo Sapiens
atagagtaaataataggagcttaaacccccttatttc

SEQ ID NO: 6063 - DNA, 38 bp, Homo Sapiens
atagagtaaataataggagcttaaacccccttatttct

SEQ ID NO: 6064 - DNA, 39 bp, Homo Sapiens
atagagtaaataataggagcttaaacccccttatttcta

SEQ ID NO: 6065 - DNA, 41 bp, Homo Sapiens
atagagtaaataataggagcttaaacccccttatttctacc

SEQ ID NO: 6066 - DNA, 21 bp, Homo Sapiens
atagcgcattggacttctaat

SEQ ID NO: 6067 - DNA, 36 bp, Homo Sapiens
atagcgcattggacttctaattcaaaggttgtgggt

SEQ ID NO: 6068 - DNA, 26 bp, Homo Sapiens
atagctcaggggtagagcatttgact

SEQ ID NO: 6069 - DNA, 27 bp, Homo Sapiens
atagctcaggggtagagcatttgactg

SEQ ID NO: 6070 - DNA, 28 bp, Homo Sapiens
atagctcaggggtagagcatttgactgc

SEQ ID NO: 6071 - DNA, 20 bp, Homo Sapiens
atagctcaggggttagagca

SEQ ID NO: 6072 - DNA, 26 bp, Homo Sapiens
atagctcaggggttagagcactggtc

SEQ ID NO: 6073 - DNA, 27 bp, Homo Sapiens
atagctcaggggttagagcactggtct

SEQ ID NO: 6074 - DNA, 28 bp, Homo Sapiens
atagctcaggggttagagcactggtctt

SEQ ID NO: 6075 - DNA, 30 bp, Homo Sapiens
atagctcaggggttagagcactggtcttgt

SEQ ID NO: 6076 - DNA, 27 bp, Homo Sapiens
atagctcaggtggtagagcatttgact

SEQ ID NO: 6077 - DNA, 26 bp, Homo Sapiens
atagctcagtcagtagagcatcagac

SEQ ID NO: 6078 - DNA, 16 bp, Homo Sapiens
atagctcagtcggtag

SEQ ID NO: 6079 - DNA, 17 bp, Homo Sapiens
atagctcagtcggtaga

SEQ ID NO: 6080 - DNA, 18 bp, Homo Sapiens
atagctcagtcggtagag

SEQ ID NO: 6081 - DNA, 19 bp, Homo Sapiens
atagctcagtcggtagagc

SEQ ID NO: 6082 - DNA, 22 bp, Homo Sapiens
atagctcagtcggtagagcatc

SEQ ID NO: 6083 - DNA, 23 bp, Homo Sapiens
atagctcagtcggtagagcatca

SEQ ID NO: 6084 - DNA, 25 bp, Homo Sapiens
atagctcagtcggtagagcatcaga

SEQ ID NO: 6085 - DNA, 26 bp, Homo Sapiens
atagctcagtcggtagagcatcagac

SEQ ID NO: 6086 - DNA, 27 bp, Homo Sapiens
atagctcagtcggtagagcatcagact

SEQ ID NO: 6087 - DNA, 28 bp, Homo Sapiens
atagctcagtcggtagagcatcagactt

SEQ ID NO: 6088 - DNA, 29 bp, Homo Sapiens
atagctcagtcggtagagcatcagacttt

SEQ ID NO: 6089 - DNA, 30 bp, Homo Sapiens
atagctcagtcggtagagcatcagactttt

SEQ ID NO: 6090 - DNA, 28 bp, Homo Sapiens
atagctcagtgggtagagcatttgactg

SEQ ID NO: 6091 - DNA, 16 bp, Homo Sapiens
atagctcagtggtaga

SEQ ID NO: 6092 - DNA, 25 bp, Homo Sapiens
atagctcagtggtagagcatttgac

SEQ ID NO: 6093 - DNA, 26 bp, Homo Sapiens
atagctcagtggtagagcatttgact

SEQ ID NO: 6094 - DNA, 27 bp, Homo Sapiens
atagctcagtggtagagcatttgactg

SEQ ID NO: 6095 - DNA, 28 bp, Homo Sapiens
atagctcagtggtagagcatttgactgc

SEQ ID NO: 6096 - DNA, 29 bp, Homo Sapiens
atagctcagtggtagagcatttgactgca

SEQ ID NO: 6097 - DNA, 27 bp, Homo Sapiens
atagctcagtggttagagcactggtct

SEQ ID NO: 6098 - DNA, 16 bp, Homo Sapiens
atagctcagttgggag

SEQ ID NO: 6099 - DNA, 16 bp, Homo Sapiens
atagctcagttggtag

SEQ ID NO: 6100 - DNA, 26 bp, Homo Sapiens
atagctcagttggtagagcatcagac

SEQ ID NO: 6101 - DNA, 27 bp, Homo Sapiens
atagctcagttggtagagcatcagact

SEQ ID NO: 6102 - DNA, 31 bp, Homo Sapiens
atagctcagttggtagagcggaggactgtag

SEQ ID NO: 6103 - DNA, 16 bp, Homo Sapiens
atagctgccttccaag

SEQ ID NO: 6104 - DNA, 30 bp, Homo Sapiens
atagctgccttccaagcagttgacccgggt

SEQ ID NO: 6105 - DNA, 32 bp, Homo Sapiens
atagctgccttccaagcagttgacccgggttc

SEQ ID NO: 6106 - DNA, 16 bp, Homo Sapiens
ataggagcttaaaccc

SEQ ID NO: 6107 - DNA, 17 bp, Homo Sapiens
ataggagcttaaacccc

SEQ ID NO: 6108 - DNA, 18 bp, Homo Sapiens
ataggagcttaaaccccc

SEQ ID NO: 6109 - DNA, 19 bp, Homo Sapiens
ataggagcttaaaccccct

SEQ ID NO: 6110 - DNA, 21 bp, Homo Sapiens
ataggagcttaaaccccctta

SEQ ID NO: 6111 - DNA, 26 bp, Homo Sapiens
ataggagcttaaacccccttatttct

SEQ ID NO: 6112 - DNA, 27 bp, Homo Sapiens
ataggagcttaaacccccttatttcta

SEQ ID NO: 6113 - DNA, 28 bp, Homo Sapiens
ataggagcttaaacccccttatttctac

SEQ ID NO: 6114 - DNA, 29 bp, Homo Sapiens
ataggagcttaaacccccttatttctacc

SEQ ID NO: 6115 - DNA, 30 bp, Homo Sapiens
ataggagcttaaacccccttatttctacca

SEQ ID NO: 6116 - DNA, 26 bp, Homo Sapiens
ataggctaaatcctatatatcttacc

SEQ ID NO: 6117 - DNA, 27 bp, Homo Sapiens
ataggctaaatcctatatatcttacca

SEQ ID NO: 6118 - DNA, 16 bp, Homo Sapiens
ataggtggcacggaga

SEQ ID NO: 6119 - DNA, 17 bp, Homo Sapiens
ataggtggcacggagaa

SEQ ID NO: 6120 - DNA, 18 bp, Homo Sapiens
ataggtggcacggagaat

SEQ ID NO: 6121 - DNA, 20 bp, Homo Sapiens
ataggtggcacggagaattt

SEQ ID NO: 6122 - DNA, 21 bp, Homo Sapiens
ataggtggcacggagaatttt

SEQ ID NO: 6123 - DNA, 22 bp, Homo Sapiens
ataggtggcacggagaattttg

SEQ ID NO: 6124 - DNA, 37 bp, Homo Sapiens
ataggtggcacggagaattttggattctcagggatgg

SEQ ID NO: 6125 - DNA, 16 bp, Homo Sapiens
atagtaccgttaactt

SEQ ID NO: 6126 - DNA, 17 bp, Homo Sapiens
atagtaccgttaacttc

SEQ ID NO: 6127 - DNA, 18 bp, Homo Sapiens
atagtaccgttaacttcc

SEQ ID NO: 6128 - DNA, 19 bp, Homo Sapiens
atagtaccgttaacttcca

SEQ ID NO: 6129 - DNA, 22 bp, Homo Sapiens
atagtaccgttaacttccaatt

SEQ ID NO: 6130 - DNA, 23 bp, Homo Sapiens
atagtaccgttaacttccaatta

SEQ ID NO: 6131 - DNA, 33 bp, Homo Sapiens
atagtaccgttaacttccaattaactagttttg

SEQ ID NO: 6132 - DNA, 35 bp, Homo Sapiens
atagtaccgttaacttccaattaactagttttgac

SEQ ID NO: 6133 - DNA, 36 bp, Homo Sapiens
atagtaccgttaacttccaattaactagttttgaca

SEQ ID NO: 6134 - DNA, 37 bp, Homo Sapiens
atagtaccgttaacttccaattaactagttttgacaa

SEQ ID NO: 6135 - DNA, 38 bp, Homo Sapiens
atagtaccgttaacttccaattaactagttttgacaac

SEQ ID NO: 6136 - DNA, 22 bp, Homo Sapiens
atagtggtgagcatagctgcct

SEQ ID NO: 6137 - DNA, 25 bp, Homo Sapiens
atagtggtgagcatagctgccttcc

SEQ ID NO: 6138 - DNA, 42 bp, Homo Sapiens
atagtggtgagcatagctgccttccaagcagttgacccgggt

SEQ ID NO: 6139 - DNA, 17 bp, Homo Sapiens
atagtggtgagtatccc

SEQ ID NO: 6140 - DNA, 21 bp, Homo Sapiens
atagtggtgagtatccccgcc

SEQ ID NO: 6141 - DNA, 23 bp, Homo Sapiens
atagtggtgagtatccccgcctg

SEQ ID NO: 6142 - DNA, 24 bp, Homo Sapiens
atagtggtgagtatccccgcctgt

SEQ ID NO: 6143 - DNA, 25 bp, Homo Sapiens
atagtggtgagtatccccgcctgtc

SEQ ID NO: 6144 - DNA, 28 bp, Homo Sapiens
atagtggtgagtatccccgcctgtcacg

SEQ ID NO: 6145 - DNA, 19 bp, Homo Sapiens
atagtggttagcatagctg

SEQ ID NO: 6146 - DNA, 20 bp, Homo Sapiens
atagtggttagcatagctgc

SEQ ID NO: 6147 - DNA, 22 bp, Homo Sapiens
atagtggttagcatagctgcct

SEQ ID NO: 6148 - DNA, 16 bp, Homo Sapiens
atagtggttagtactc

SEQ ID NO: 6149 - DNA, 17 bp, Homo Sapiens
atagtggttagtactct

SEQ ID NO: 6150 - DNA, 18 bp, Homo Sapiens
atagtggttagtactctg

SEQ ID NO: 6151 - DNA, 19 bp, Homo Sapiens
atagtggttagtactctgc

SEQ ID NO: 6152 - DNA, 20 bp, Homo Sapiens
atagtggttagtactctgcg

SEQ ID NO: 6153 - DNA, 21 bp, Homo Sapiens
atagtggttagtactctgcgt

SEQ ID NO: 6154 - DNA, 22 bp, Homo Sapiens
atagtggttagtactctgcgtt

SEQ ID NO: 6155 - DNA, 23 bp, Homo Sapiens
atagtggttagtactctgcgttg

SEQ ID NO: 6156 - DNA, 24 bp, Homo Sapiens
atagtggttagtactctgcgttgt

SEQ ID NO: 6157 - DNA, 25 bp, Homo Sapiens
atagtggttagtactctgcgttgtg

SEQ ID NO: 6158 - DNA, 28 bp, Homo Sapiens
atagtggttagtactctgcgttgtggcc

SEQ ID NO: 6159 - DNA, 29 bp, Homo Sapiens
atagtggttagtactctgcgttgtggccg

SEQ ID NO: 6160 - DNA, 38 bp, Homo Sapiens
atagtggttagtactctgcgttgtggccgcagcaacct

SEQ ID NO: 6161 - DNA, 24 bp, Homo Sapiens
atagtggttagtatccccgcctgt

SEQ ID NO: 6162 - DNA, 28 bp, Homo Sapiens
atagtggttagtatccccgcctgtcacg

SEQ ID NO: 6163 - DNA, 16 bp, Homo Sapiens
atagtgtagcggttat

SEQ ID NO: 6164 - DNA, 17 bp, Homo Sapiens
atagtgtagcggttatc

SEQ ID NO: 6165 - DNA, 25 bp, Homo Sapiens
atagtgtagcggttatcacgtctgc

SEQ ID NO: 6166 - DNA, 28 bp, Homo Sapiens
atagtgtagcggttatcacgtctgcttt

SEQ ID NO: 6167 - DNA, 17 bp, Homo Sapiens
atagtgtagtggttatc

SEQ ID NO: 6168 - DNA, 23 bp, Homo Sapiens
atagtgtagtggttatcacgtct

SEQ ID NO: 6169 - DNA, 25 bp, Homo Sapiens
atagtgtagtggttatcacgtctgc

SEQ ID NO: 6170 - DNA, 26 bp, Homo Sapiens
atagtgtagtggttatcacgtctgct

SEQ ID NO: 6171 - DNA, 27 bp, Homo Sapiens
atagtgtagtggttatcacgtctgctt

SEQ ID NO: 6172 - DNA, 28 bp, Homo Sapiens
atagtgtagtggttatcacgtctgcttt

SEQ ID NO: 6173 - DNA, 29 bp, Homo Sapiens
atagtgtagtggttatcacgtctgcttta

SEQ ID NO: 6174 - DNA, 30 bp, Homo Sapiens
atagtgtagtggttatcacgtctgctttac

SEQ ID NO: 6175 - DNA, 27 bp, Homo Sapiens
atagtttaaacaaaacgaatgatttcg

SEQ ID NO: 6176 - DNA, 30 bp, Homo Sapiens
atagtttaaacaaaacgaatgatttcgact

SEQ ID NO: 6177 - DNA, 31 bp, Homo Sapiens
atagtttaaacaaaacgaatgatttcgactc

SEQ ID NO: 6178 - DNA, 18 bp, Homo Sapiens
atagtttaaattagaatc

SEQ ID NO: 6179 - DNA, 27 bp, Homo Sapiens
atagtttaaattagaatcttagctttg

SEQ ID NO: 6180 - DNA, 28 bp, Homo Sapiens
atagtttaaattagaatcttagctttgg

SEQ ID NO: 6181 - DNA, 28 bp, Homo Sapiens
atagtttaaccaaaacatcagattgtga

SEQ ID NO: 6182 - DNA, 30 bp, Homo Sapiens
atagtttaaccaaaacatcagattgtgaat

SEQ ID NO: 6183 - DNA, 31 bp, Homo Sapiens
atagtttaaccaaaacatcagattgtgaatc

SEQ ID NO: 6184 - DNA, 32 bp, Homo Sapiens
atagtttaaccaaaacatcagattgtgaatct

SEQ ID NO: 6185 - DNA, 34 bp, Homo Sapiens
atagtttaaccaaaacatcagattgtgaatctga

SEQ ID NO: 6186 - DNA, 36 bp, Homo Sapiens
atagtttaaccaaaacatcagattgtgaatctgaca

SEQ ID NO: 6187 - DNA, 45 bp, Homo Sapiens
atagtttaaccaaaacatcagattgtgaatctgacaacagaggct

SEQ ID NO: 6188 - DNA, 32 bp, Homo Sapiens
atatagtttaaacaaaacgaatgatttcgact

SEQ ID NO: 6189 - DNA, 35 bp, Homo Sapiens
atatagtttaaacaaaacgaatgatttcgactcat

SEQ ID NO: 6190 - DNA, 28 bp, Homo Sapiens
atatagtttaaccaaaacatcagattgt

SEQ ID NO: 6191 - DNA, 29 bp, Homo Sapiens
atatagtttaaccaaaacatcagattgtg

SEQ ID NO: 6192 - DNA, 30 bp, Homo Sapiens
atatagtttaaccaaaacatcagattgtga

SEQ ID NO: 6193 - DNA, 32 bp, Homo Sapiens
atatagtttaaccaaaacatcagattgtgaat

SEQ ID NO: 6194 - DNA, 33 bp, Homo Sapiens
atatagtttaaccaaaacatcagattgtgaatc

SEQ ID NO: 6195 - DNA, 36 bp, Homo Sapiens
atatagtttaaccaaaacatcagattgtgaatctga

SEQ ID NO: 6196 - DNA, 38 bp, Homo Sapiens
atatagtttaaccaaaacatcagattgtgaatctgaca

SEQ ID NO: 6197 - DNA, 17 bp, Homo Sapiens
atatcattggtcgtggt

SEQ ID NO: 6198 - DNA, 19 bp, Homo Sapiens
atatcattggtcgtggttg

SEQ ID NO: 6199 - DNA, 20 bp, Homo Sapiens
atatcattggtcgtggttgt

SEQ ID NO: 6200 - DNA, 21 bp, Homo Sapiens
atatcattggtcgtggttgta

SEQ ID NO: 6201 - DNA, 23 bp, Homo Sapiens
atatcattggtcgtggttgtagt

SEQ ID NO: 6202 - DNA, 24 bp, Homo Sapiens
atatcattggtcgtggttgtagtc

SEQ ID NO: 6203 - DNA, 25 bp, Homo Sapiens
atatcattggtcgtggttgtagtcc

SEQ ID NO: 6204 - DNA, 26 bp, Homo Sapiens
atatcattggtcgtggttgtagtccg

SEQ ID NO: 6205 - DNA, 27 bp, Homo Sapiens
atatcattggtcgtggttgtagtccgt

SEQ ID NO: 6206 - DNA, 28 bp, Homo Sapiens
atatcattggtcgtggttgtagtccgtg

SEQ ID NO: 6207 - DNA, 29 bp, Homo Sapiens
atatcattggtcgtggttgtagtccgtgc

SEQ ID NO: 6208 - DNA, 30 bp, Homo Sapiens
atatcattggtcgtggttgtagtccgtgcg

SEQ ID NO: 6209 - DNA, 31 bp, Homo Sapiens
atatcattggtcgtggttgtagtccgtgcga

SEQ ID NO: 6210 - DNA, 32 bp, Homo Sapiens
atatcattggtcgtggttgtagtccgtgcgag

SEQ ID NO: 6211 - DNA, 33 bp, Homo Sapiens
atatcattggtcgtggttgtagtccgtgcgaga

SEQ ID NO: 6212 - DNA, 34 bp, Homo Sapiens
atatcattggtcgtggttgtagtccgtgcgagaa

SEQ ID NO: 6213 - DNA, 35 bp, Homo Sapiens
atatcattggtcgtggttgtagtccgtgcgagaat

SEQ ID NO: 6214 - DNA, 36 bp, Homo Sapiens
atatcattggtcgtggttgtagtccgtgcgagaata

SEQ ID NO: 6215 - DNA, 37 bp, Homo Sapiens
atatcattggtcgtggttgtagtccgtgcgagaatac

SEQ ID NO: 6216 - DNA, 38 bp, Homo Sapiens
atatcattggtcgtggttgtagtccgtgcgagaatacc

SEQ ID NO: 6217 - DNA, 39 bp, Homo Sapiens
atatcattggtcgtggttgtagtccgtgcgagaatacca

SEQ ID NO: 6218 - DNA, 30 bp, Homo Sapiens
atatccgcgtgggttcgaaccccacttctg

SEQ ID NO: 6219 - DNA, 22 bp, Homo Sapiens
atatggtctagcggttaggatt

SEQ ID NO: 6220 - DNA, 24 bp, Homo Sapiens
atatggtctagcggttaggattcc

SEQ ID NO: 6221 - DNA, 25 bp, Homo Sapiens
atatggtctagcggttaggattcct

SEQ ID NO: 6222 - DNA, 26 bp, Homo Sapiens
atatggtctagcggttaggattcctg

SEQ ID NO: 6223 - DNA, 27 bp, Homo Sapiens
atatggtctagcggttaggattcctgg

SEQ ID NO: 6224 - DNA, 28 bp, Homo Sapiens
atatggtctagcggttaggattcctggt

SEQ ID NO: 6225 - DNA, 29 bp, Homo Sapiens
atatggtctagcggttaggattcctggtt

SEQ ID NO: 6226 - DNA, 30 bp, Homo Sapiens
atatggtctagcggttaggattcctggttt

SEQ ID NO: 6227 - DNA, 31 bp, Homo Sapiens
atatggtctagcggttaggattcctggtttt

SEQ ID NO: 6228 - DNA, 32 bp, Homo Sapiens
atatggtctagcggttaggattcctggttttc

SEQ ID NO: 6229 - DNA, 33 bp, Homo Sapiens
atatggtctagcggttaggattcctggttttca

SEQ ID NO: 6230 - DNA, 34 bp, Homo Sapiens
atatggtctagcggttaggattcctggttttcac

SEQ ID NO: 6231 - DNA, 35 bp, Homo Sapiens
atatggtctagcggttaggattcctggttttcacc

SEQ ID NO: 6232 - DNA, 36 bp, Homo Sapiens
atatggtctagcggttaggattcctggttttcaccc

SEQ ID NO: 6233 - DNA, 37 bp, Homo Sapiens
atatggtctagcggttaggattcctggttttcaccca

SEQ ID NO: 6234 - DNA, 16 bp, Homo Sapiens
atatgtccgcgtgggt

SEQ ID NO: 6235 - DNA, 17 bp, Homo Sapiens
atatgtccgcgtgggtt

SEQ ID NO: 6236 - DNA, 19 bp, Homo Sapiens
atatgtccgcgtgggttcg

SEQ ID NO: 6237 - DNA, 25 bp, Homo Sapiens
atatgtccgcgtgggttcgaacccc

SEQ ID NO: 6238 - DNA, 26 bp, Homo Sapiens
atatgtccgcgtgggttcgaacccca

SEQ ID NO: 6239 - DNA, 31 bp, Homo Sapiens
atatgtccgcgtgggttcgaaccccactcct

SEQ ID NO: 6240 - DNA, 32 bp, Homo Sapiens
atatgtccgcgtgggttcgaaccccactcctg

SEQ ID NO: 6241 - DNA, 37 bp, Homo Sapiens
atatgtccgcgtgggttcgaaccccactcctggtacc

SEQ ID NO: 6242 - DNA, 16 bp, Homo Sapiens
atatgtctgataaaag

SEQ ID NO: 6243 - DNA, 21 bp, Homo Sapiens
atatgtctgataaaagagtta

SEQ ID NO: 6244 - DNA, 22 bp, Homo Sapiens
atatgtctgataaaagagttac

SEQ ID NO: 6245 - DNA, 23 bp, Homo Sapiens
atatgtctgataaaagagttact

SEQ ID NO: 6246 - DNA, 46 bp, Homo Sapiens
atatgtctgataaaagagttactttgatagagtaaataataggagc

SEQ ID NO: 6247 - DNA, 16 bp, Homo Sapiens
atattgaattgcaaat

SEQ ID NO: 6248 - DNA, 17 bp, Homo Sapiens
atattgaattgcaaatt

SEQ ID NO: 6249 - DNA, 18 bp, Homo Sapiens
atattgaattgcaaattc

SEQ ID NO: 6250 - DNA, 19 bp, Homo Sapiens
atattgaattgcaaattcg

SEQ ID NO: 6251 - DNA, 29 bp, Homo Sapiens
atattgaattgcaaattcgaagaagcagc

SEQ ID NO: 6252 - DNA, 30 bp, Homo Sapiens
atattgaattgcaaattcgaagaagcagct

SEQ ID NO: 6253 - DNA, 32 bp, Homo Sapiens
atattgaattgcaaattcgaagaagcagcttc

SEQ ID NO: 6254 - DNA, 39 bp, Homo Sapiens
atattgaattgcaaattcgaagaagcagcttcaaacctg

SEQ ID NO: 6255 - DNA, 45 bp, Homo Sapiens
atattgaattgcaaattcgaagaagcagcttcaaacctgccgggg

SEQ ID NO: 6256 - DNA, 46 bp, Homo Sapiens
atattgaattgcaaattcgaagaagcagcttcaaacctgccggggc

SEQ ID NO: 6257 - DNA, 47 bp, Homo Sapiens
atattgaattgcaaattcgaagaagcagcttcaaacctgccggggct

SEQ ID NO: 6258 - DNA, 48 bp, Homo Sapiens
atattgaattgcaaattcgaagaagcagcttcaaacctgccggggctt

SEQ ID NO: 6259 - DNA, 36 bp, Homo Sapiens
atcaagaggtccccggttcaaatccgggtgccccct

SEQ ID NO: 6260 - DNA, 37 bp, Homo Sapiens
atcaagaggtccccggttcaaatccgggtgccccctc

SEQ ID NO: 6261 - DNA, 38 bp, Homo Sapiens
atcaagaggtccccggttcaaatccgggtgccccctcc

SEQ ID NO: 6262 - DNA, 17 bp, Homo Sapiens
atcaagaggtccctggt

SEQ ID NO: 6263 - DNA, 19 bp, Homo Sapiens
atcaagaggtccctggttc

SEQ ID NO: 6264 - DNA, 30 bp, Homo Sapiens
atcaagaggtccctggttcaaatccgggtg

SEQ ID NO: 6265 - DNA, 38 bp, Homo Sapiens
atcaagaggtccctggttcaaatccgggtgccccctcc

SEQ ID NO: 6266 - DNA, 16 bp, Homo Sapiens
atcaccccataaacac

SEQ ID NO: 6267 - DNA, 17 bp, Homo Sapiens
atcaccccataaacacc

SEQ ID NO: 6268 - DNA, 18 bp, Homo Sapiens
atcaccccataaacacca

SEQ ID NO: 6269 - DNA, 16 bp, Homo Sapiens
atcacgtcggggtcac

SEQ ID NO: 6270 - DNA, 17 bp, Homo Sapiens
atcacgtcggggtcacc

SEQ ID NO: 6271 - DNA, 18 bp, Homo Sapiens
atcacgtcggggtcacca

SEQ ID NO: 6272 - DNA, 19 bp, Homo Sapiens
atcacgtctgctttacacg

SEQ ID NO: 6273 - DNA, 21 bp, Homo Sapiens
atcacgtctgctttacacgca

SEQ ID NO: 6274 - DNA, 31 bp, Homo Sapiens
atcacgtctgctttacacgcagaaggtcctg

SEQ ID NO: 6275 - DNA, 16 bp, Homo Sapiens
atcacgttcgcctcac

SEQ ID NO: 6276 - DNA, 17 bp, Homo Sapiens
atcacgttcgcctcaca

SEQ ID NO: 6277 - DNA, 19 bp, Homo Sapiens
atcacgttcgcctcacacg

SEQ ID NO: 6278 - DNA, 20 bp, Homo Sapiens
atcacgttcgcctcacacgc

SEQ ID NO: 6279 - DNA, 18 bp, Homo Sapiens
atcagaagattccaggtt

SEQ ID NO: 6280 - DNA, 22 bp, Homo Sapiens
atcagaagattccaggttcgac

SEQ ID NO: 6281 - DNA, 23 bp, Homo Sapiens
atcagaagattccaggttcgact

SEQ ID NO: 6282 - DNA, 27 bp, Homo Sapiens
atcagaagattccaggttcgactcctg

SEQ ID NO: 6283 - DNA, 30 bp, Homo Sapiens
atcagaagattccaggttcgactcctggct

SEQ ID NO: 6284 - DNA, 33 bp, Homo Sapiens
atcagaagattccaggttcgactcctggctggc

SEQ ID NO: 6285 - DNA, 34 bp, Homo Sapiens
atcagaagattccaggttcgactcctggctggct

SEQ ID NO: 6286 - DNA, 35 bp, Homo Sapiens
atcagaagattccaggttcgactcctggctggctc

SEQ ID NO: 6287 - DNA, 36 bp, Homo Sapiens
atcagaagattccaggttcgactcctggctggctcg

SEQ ID NO: 6288 - DNA, 37 bp, Homo Sapiens
atcagaagattccaggttcgactcctggctggctcgc

SEQ ID NO: 6289 - DNA, 38 bp, Homo Sapiens
atcagaagattccaggttcgactcctggctggctcgcc

SEQ ID NO: 6290 - DNA, 39 bp, Homo Sapiens
atcagaagattccaggttcgactcctggctggctcgcca

SEQ ID NO: 6291 - DNA, 19 bp, Homo Sapiens
atcagaagattctaggttc

SEQ ID NO: 6292 - DNA, 22 bp, Homo Sapiens
atcagaagattctaggttcgac

SEQ ID NO: 6293 - DNA, 23 bp, Homo Sapiens
atcagaagattctaggttcgact

SEQ ID NO: 6294 - DNA, 25 bp, Homo Sapiens
atcagaagattctaggttcgactcc

SEQ ID NO: 6295 - DNA, 27 bp, Homo Sapiens
atcagaagattctaggttcgactcctg

SEQ ID NO: 6296 - DNA, 29 bp, Homo Sapiens
atcagaagattctaggttcgactcctggc

SEQ ID NO: 6297 - DNA, 33 bp, Homo Sapiens
atcagaagattctaggttcgactcctggctggc

SEQ ID NO: 6298 - DNA, 35 bp, Homo Sapiens
atcagaagattctaggttcgactcctggctggctc

SEQ ID NO: 6299 - DNA, 36 bp, Homo Sapiens
atcagaagattctaggttcgactcctggctggctcg

SEQ ID NO: 6300 - DNA, 37 bp, Homo Sapiens
atcagaagattctaggttcgactcctggctggctcgc

SEQ ID NO: 6301 - DNA, 38 bp, Homo Sapiens
atcagaagattctaggttcgactcctggctggctcgcc

SEQ ID NO: 6302 - DNA, 39 bp, Homo Sapiens
atcagaagattctaggttcgactcctggctggctcgcca

SEQ ID NO: 6303 - DNA, 17 bp, Homo Sapiens
atcagaagattgagggt

SEQ ID NO: 6304 - DNA, 19 bp, Homo Sapiens
atcagaagattgagggttc

SEQ ID NO: 6305 - DNA, 20 bp, Homo Sapiens
atcagaagattgagggttcg

SEQ ID NO: 6306 - DNA, 38 bp, Homo Sapiens
atcagaagattgagggttcgaatccctccgtggttacc

SEQ ID NO: 6307 - DNA, 38 bp, Homo Sapiens
atcagaagattgagggttcgaatcccttcgtggttacc

SEQ ID NO: 6308 - DNA, 36 bp, Homo Sapiens
atcagaagattgagggttcgaatcccttcgtggttg

SEQ ID NO: 6309 - DNA, 37 bp, Homo Sapiens
atcagaagattgagggttcgaatcccttcgtggttgc

SEQ ID NO: 6310 - DNA, 38 bp, Homo Sapiens
atcagaagattgagggttcgaatcccttcgtggttgcc

SEQ ID NO: 6311 - DNA, 39 bp, Homo Sapiens
atcagaagattgagggttcgaatcccttcgtggttgcca

SEQ ID NO: 6312 - DNA, 24 bp, Homo Sapiens
atcagaagattgagggttcgagtc

SEQ ID NO: 6313 - DNA, 34 bp, Homo Sapiens
atcagaagattgagggttcgagtcccttcgtggt

SEQ ID NO: 6314 - DNA, 35 bp, Homo Sapiens
atcagaagattgagggttcgagtcccttcgtggtc

SEQ ID NO: 6315 - DNA, 36 bp, Homo Sapiens
atcagaagattgagggttcgagtcccttcgtggtcg

SEQ ID NO: 6316 - DNA, 37 bp, Homo Sapiens
atcagaagattgagggttcgagtcccttcgtggtcgc

SEQ ID NO: 6317 - DNA, 38 bp, Homo Sapiens
atcagaagattgagggttcgagtcccttcgtggtcgcc

SEQ ID NO: 6318 - DNA, 39 bp, Homo Sapiens
atcagaagattgagggttcgagtcccttcgtggtcgcca

SEQ ID NO: 6319 - DNA, 19 bp, Homo Sapiens
atcagaagattgcaggttc

SEQ ID NO: 6320 - DNA, 20 bp, Homo Sapiens
atcagaagattgcaggttcg

SEQ ID NO: 6321 - DNA, 27 bp, Homo Sapiens
atcagaagattgcaggttcgagtcctg

SEQ ID NO: 6322 - DNA, 33 bp, Homo Sapiens
atcagaagattgcaggttcgagtcctgccgcgg

SEQ ID NO: 6323 - DNA, 35 bp, Homo Sapiens
atcagaagattgcaggttcgagtcctgccgcggtc

SEQ ID NO: 6324 - DNA, 36 bp, Homo Sapiens
atcagaagattgcaggttcgagtcctgccgcggtcg

SEQ ID NO: 6325 - DNA, 37 bp, Homo Sapiens
atcagaagattgcaggttcgagtcctgccgcggtcgc

SEQ ID NO: 6326 - DNA, 38 bp, Homo Sapiens
atcagaagattgcaggttcgagtcctgccgcggtcgcc

SEQ ID NO: 6327 - DNA, 39 bp, Homo Sapiens
atcagaagattgcaggttcgagtcctgccgcggtcgcca

SEQ ID NO: 6328 - DNA, 16 bp, Homo Sapiens
atcagaaggctgcgtg

SEQ ID NO: 6329 - DNA, 19 bp, Homo Sapiens
atcagaaggctgcgtgttc

SEQ ID NO: 6330 - DNA, 20 bp, Homo Sapiens
atcagaaggctgcgtgttcg

SEQ ID NO: 6331 - DNA, 33 bp, Homo Sapiens
atcagaaggctgcgtgttcgaatcacgtcgggg

SEQ ID NO: 6332 - DNA, 34 bp, Homo Sapiens
atcagaaggctgcgtgttcgaatcacgtcggggt

SEQ ID NO: 6333 - DNA, 35 bp, Homo Sapiens
atcagaaggctgcgtgttcgaatcacgtcggggtc

SEQ ID NO: 6334 - DNA, 36 bp, Homo Sapiens
atcagaaggctgcgtgttcgaatcacgtcggggtca

SEQ ID NO: 6335 - DNA, 37 bp, Homo Sapiens
atcagaaggctgcgtgttcgaatcacgtcggggtcac

SEQ ID NO: 6336 - DNA, 38 bp, Homo Sapiens
atcagaaggctgcgtgttcgaatcacgtcggggtcacc

SEQ ID NO: 6337 - DNA, 39 bp, Homo Sapiens
atcagaaggctgcgtgttcgaatcacgtcggggtcacca

SEQ ID NO: 6338 - DNA, 17 bp, Homo Sapiens
atcagaaggttgcgtgt

SEQ ID NO: 6339 - DNA, 18 bp, Homo Sapiens
atcagaaggttgcgtgtt

SEQ ID NO: 6340 - DNA, 19 bp, Homo Sapiens
atcagaaggttgcgtgttc

SEQ ID NO: 6341 - DNA, 20 bp, Homo Sapiens
atcagaaggttgcgtgttca

SEQ ID NO: 6342 - DNA, 33 bp, Homo Sapiens
atcagaaggttgcgtgttcaaatcacgtcgggg

SEQ ID NO: 6343 - DNA, 35 bp, Homo Sapiens
atcagaaggttgcgtgttcaaatcacgtcggggtc

SEQ ID NO: 6344 - DNA, 36 bp, Homo Sapiens
atcagaaggttgcgtgttcaaatcacgtcggggtca

SEQ ID NO: 6345 - DNA, 37 bp, Homo Sapiens
atcagaaggttgcgtgttcaaatcacgtcggggtcac

SEQ ID NO: 6346 - DNA, 38 bp, Homo Sapiens
atcagaaggttgcgtgttcaaatcacgtcggggtcacc

SEQ ID NO: 6347 - DNA, 39 bp, Homo Sapiens
atcagaaggttgcgtgttcaaatcacgtcggggtcacca

SEQ ID NO: 6348 - DNA, 32 bp, Homo Sapiens
atcagaaggttgcgtgttcaagtcacgtcggg

SEQ ID NO: 6349 - DNA, 33 bp, Homo Sapiens
atcagaaggttgcgtgttcaagtcacgtcgggg

SEQ ID NO: 6350 - DNA, 34 bp, Homo Sapiens
atcagaaggttgcgtgttcaagtcacgtcggggt

SEQ ID NO: 6351 - DNA, 35 bp, Homo Sapiens
atcagaaggttgcgtgttcaagtcacgtcggggtc

SEQ ID NO: 6352 - DNA, 36 bp, Homo Sapiens
atcagaaggttgcgtgttcaagtcacgtcggggtca

SEQ ID NO: 6353 - DNA, 37 bp, Homo Sapiens
atcagaaggttgcgtgttcaagtcacgtcggggtcac

SEQ ID NO: 6354 - DNA, 38 bp, Homo Sapiens
atcagaaggttgcgtgttcaagtcacgtcggggtcacc

SEQ ID NO: 6355 - DNA, 39 bp, Homo Sapiens
atcagaaggttgcgtgttcaagtcacgtcggggtcacca

SEQ ID NO: 6356 - DNA, 16 bp, Homo Sapiens
atcagattgtgaatct

SEQ ID NO: 6357 - DNA, 17 bp, Homo Sapiens
atcagattgtgaatctg

SEQ ID NO: 6358 - DNA, 18 bp, Homo Sapiens
atcagattgtgaatctga

SEQ ID NO: 6359 - DNA, 19 bp, Homo Sapiens
atcagattgtgaatctgac

SEQ ID NO: 6360 - DNA, 20 bp, Homo Sapiens
atcagattgtgaatctgaca

SEQ ID NO: 6361 - DNA, 22 bp, Homo Sapiens
atcagattgtgaatctgacaac

SEQ ID NO: 6362 - DNA, 24 bp, Homo Sapiens
atcagattgtgaatctgacaacag

SEQ ID NO: 6363 - DNA, 25 bp, Homo Sapiens
atcagattgtgaatctgacaacaga

SEQ ID NO: 6364 - DNA, 26 bp, Homo Sapiens
atcagattgtgaatctgacaacagag

SEQ ID NO: 6365 - DNA, 27 bp, Homo Sapiens
atcagattgtgaatctgacaacagagg

SEQ ID NO: 6366 - DNA, 28 bp, Homo Sapiens
atcagattgtgaatctgacaacagaggc

SEQ ID NO: 6367 - DNA, 29 bp, Homo Sapiens
atcagattgtgaatctgacaacagaggct

SEQ ID NO: 6368 - DNA, 30 bp, Homo Sapiens
atcagattgtgaatctgacaacagaggctt

SEQ ID NO: 6369 - DNA, 31 bp, Homo Sapiens
atcagattgtgaatctgacaacagaggctta

SEQ ID NO: 6370 - DNA, 32 bp, Homo Sapiens
atcagattgtgaatctgacaacagaggcttac

SEQ ID NO: 6371 - DNA, 33 bp, Homo Sapiens
atcagattgtgaatctgacaacagaggcttacg

SEQ ID NO: 6372 - DNA, 34 bp, Homo Sapiens
atcagattgtgaatctgacaacagaggcttacga

SEQ ID NO: 6373 - DNA, 35 bp, Homo Sapiens
atcagattgtgaatctgacaacagaggcttacgac

SEQ ID NO: 6374 - DNA, 36 bp, Homo Sapiens
atcagattgtgaatctgacaacagaggcttacgacc

SEQ ID NO: 6375 - DNA, 37 bp, Homo Sapiens
atcagattgtgaatctgacaacagaggcttacgaccc

SEQ ID NO: 6376 - DNA, 38 bp, Homo Sapiens
atcagattgtgaatctgacaacagaggcttacgacccc

SEQ ID NO: 6377 - DNA, 39 bp, Homo Sapiens
atcagattgtgaatctgacaacagaggcttacgacccct

SEQ ID NO: 6378 - DNA, 40 bp, Homo Sapiens
atcagattgtgaatctgacaacagaggcttacgacccctt

SEQ ID NO: 6379 - DNA, 41 bp, Homo Sapiens
atcagattgtgaatctgacaacagaggcttacgacccctta

SEQ ID NO: 6380 - DNA, 42 bp, Homo Sapiens
atcagattgtgaatctgacaacagaggcttacgaccccttat

SEQ ID NO: 6381 - DNA, 43 bp, Homo Sapiens
atcagattgtgaatctgacaacagaggcttacgaccccttatt

SEQ ID NO: 6382 - DNA, 47 bp, Homo Sapiens
atcagattgtgaatctgacaacagaggcttacgaccccttatttacc

SEQ ID NO: 6383 - DNA, 48 bp, Homo Sapiens
atcagattgtgaatctgacaacagaggcttacgaccccttatttaccc

SEQ ID NO: 6384 - DNA, 25 bp, Homo Sapiens
atcagcctccggagctggggattgt

SEQ ID NO: 6385 - DNA, 16 bp, Homo Sapiens
atcatatttaccaacc

SEQ ID NO: 6386 - DNA, 17 bp, Homo Sapiens
atcatatttaccaacca

SEQ ID NO: 6387 - DNA, 23 bp, Homo Sapiens
atcatgcaagattcccattcttg

SEQ ID NO: 6388 - DNA, 33 bp, Homo Sapiens
atcatgcaagattcccattcttgcgacccgggt

SEQ ID NO: 6389 - DNA, 34 bp, Homo Sapiens
atcatgcaagattcccattcttgcgacccgggtt

SEQ ID NO: 6390 - DNA, 36 bp, Homo Sapiens
atcatgcaagattcccattcttgcgacccgggttcg

SEQ ID NO: 6391 - DNA, 17 bp, Homo Sapiens
atcattggtcgtggttg

SEQ ID NO: 6392 - DNA, 18 bp, Homo Sapiens
atcattggtcgtggttgt

SEQ ID NO: 6393 - DNA, 19 bp, Homo Sapiens
atcattggtcgtggttgta

SEQ ID NO: 6394 - DNA, 20 bp, Homo Sapiens
atcattggtcgtggttgtag

SEQ ID NO: 6395 - DNA, 21 bp, Homo Sapiens
atcattggtcgtggttgtagt

SEQ ID NO: 6396 - DNA, 22 bp, Homo Sapiens
atcattggtcgtggttgtagtc

SEQ ID NO: 6397 - DNA, 23 bp, Homo Sapiens
atcattggtcgtggttgtagtcc

SEQ ID NO: 6398 - DNA, 24 bp, Homo Sapiens
atcattggtcgtggttgtagtccg

SEQ ID NO: 6399 - DNA, 25 bp, Homo Sapiens
atcattggtcgtggttgtagtccgt

SEQ ID NO: 6400 - DNA, 26 bp, Homo Sapiens
atcattggtcgtggttgtagtccgtg

SEQ ID NO: 6401 - DNA, 27 bp, Homo Sapiens
atcattggtcgtggttgtagtccgtgc

SEQ ID NO: 6402 - DNA, 28 bp, Homo Sapiens
atcattggtcgtggttgtagtccgtgcg

SEQ ID NO: 6403 - DNA, 29 bp, Homo Sapiens
atcattggtcgtggttgtagtccgtgcga

SEQ ID NO: 6404 - DNA, 30 bp, Homo Sapiens
atcattggtcgtggttgtagtccgtgcgag

SEQ ID NO: 6405 - DNA, 31 bp, Homo Sapiens
atcattggtcgtggttgtagtccgtgcgaga

SEQ ID NO: 6406 - DNA, 32 bp, Homo Sapiens
atcattggtcgtggttgtagtccgtgcgagaa

SEQ ID NO: 6407 - DNA, 33 bp, Homo Sapiens
atcattggtcgtggttgtagtccgtgcgagaat

SEQ ID NO: 6408 - DNA, 34 bp, Homo Sapiens
atcattggtcgtggttgtagtccgtgcgagaata

SEQ ID NO: 6409 - DNA, 35 bp, Homo Sapiens
atcattggtcgtggttgtagtccgtgcgagaatac

SEQ ID NO: 6410 - DNA, 36 bp, Homo Sapiens
atcattggtcgtggttgtagtccgtgcgagaatacc

SEQ ID NO: 6411 - DNA, 37 bp, Homo Sapiens
atcattggtcgtggttgtagtccgtgcgagaatacca

SEQ ID NO: 6412 - DNA, 16 bp, Homo Sapiens
atccaatggacatatg

SEQ ID NO: 6413 - DNA, 17 bp, Homo Sapiens
atccaatggacatatgt

SEQ ID NO: 6414 - DNA, 39 bp, Homo Sapiens
atccaatggacatatgtccgcgtgggttcgaaccccact

SEQ ID NO: 6415 - DNA, 48 bp, Homo Sapiens
atccaatggacatatgtccgcgtgggttcgaaccccactcctggtacc

SEQ ID NO: 6416 - DNA, 36 bp, Homo Sapiens
atccaatggggtctccccgcgcaggttcgaaccctg

SEQ ID NO: 6417 - DNA, 36 bp, Homo Sapiens
atccagaggttccgggttcgagtcccggcagagatg

SEQ ID NO: 6418 - DNA, 37 bp, Homo Sapiens
atccagaggttccgggttcgagtcccggcagagatgc

SEQ ID NO: 6419 - DNA, 38 bp, Homo Sapiens
atccagaggttccgggttcgagtcccggcagagatgcc

SEQ ID NO: 6420 - DNA, 39 bp, Homo Sapiens
atccagaggttccgggttcgagtcccggcagagatgcca

SEQ ID NO: 6421 - DNA, 17 bp, Homo Sapiens
atccagcgatccgagtt

SEQ ID NO: 6422 - DNA, 18 bp, Homo Sapiens
atccagcgatccgagttc

SEQ ID NO: 6423 - DNA, 19 bp, Homo Sapiens
atccagcgatccgagttca

SEQ ID NO: 6424 - DNA, 21 bp, Homo Sapiens
atccagcgatccgagttcaaa

SEQ ID NO: 6425 - DNA, 22 bp, Homo Sapiens
atccagcgatccgagttcaaat

SEQ ID NO: 6426 - DNA, 23 bp, Homo Sapiens
atccagcgatccgagttcaaatc

SEQ ID NO: 6427 - DNA, 24 bp, Homo Sapiens
atccagcgatccgagttcaaatct

SEQ ID NO: 6428 - DNA, 35 bp, Homo Sapiens
atccagcgatccgagttcaaatctcggtggaacct

SEQ ID NO: 6429 - DNA, 36 bp, Homo Sapiens
atccagcgatccgagttcaaatctcggtggaacctc

SEQ ID NO: 6430 - DNA, 37 bp, Homo Sapiens
atccagcgatccgagttcaaatctcggtggaacctcc

SEQ ID NO: 6431 - DNA, 38 bp, Homo Sapiens
atccagcgatccgagttcaaatctcggtggaacctcca

SEQ ID NO: 6432 - DNA, 32 bp, Homo Sapiens
atccagcgatccgagttcaaatctcggtggga

SEQ ID NO: 6433 - DNA, 33 bp, Homo Sapiens
atccagcgatccgagttcaaatctcggtgggac

SEQ ID NO: 6434 - DNA, 35 bp, Homo Sapiens
atccagcgatccgagttcaaatctcggtgggacct

SEQ ID NO: 6435 - DNA, 36 bp, Homo Sapiens
atccagcgatccgagttcaaatctcggtgggacctc

SEQ ID NO: 6436 - DNA, 37 bp, Homo Sapiens
atccagcgatccgagttcaaatctcggtgggacctcc

SEQ ID NO: 6437 - DNA, 21 bp, Homo Sapiens
atccagcgatccgagttcgag

SEQ ID NO: 6438 - DNA, 22 bp, Homo Sapiens
atccagcgatccgagttcgagt

SEQ ID NO: 6439 - DNA, 23 bp, Homo Sapiens
atccagcgatccgagttcgagtc

SEQ ID NO: 6440 - DNA, 24 bp, Homo Sapiens
atccagcgatccgagttcgagtct

SEQ ID NO: 6441 - DNA, 35 bp, Homo Sapiens
atccagcgatccgagttcgagtctcggtggaacct

SEQ ID NO: 6442 - DNA, 36 bp, Homo Sapiens
atccagcgatccgagttcgagtctcggtggaacctc

SEQ ID NO: 6443 - DNA, 37 bp, Homo Sapiens
atccagcgatccgagttcgagtctcggtggaacctcc

SEQ ID NO: 6444 - DNA, 16 bp, Homo Sapiens
atccaggtgccccctc

SEQ ID NO: 6445 - DNA, 17 bp, Homo Sapiens
atccaggtgccccctcc

SEQ ID NO: 6446 - DNA, 18 bp, Homo Sapiens
atccaggtgccccctcca

SEQ ID NO: 6447 - DNA, 27 bp, Homo Sapiens
atccattggggtctccccgcgcaggtt

SEQ ID NO: 6448 - DNA, 39 bp, Homo Sapiens
atccattggggtctccccgcgcaggttcgaatcctgccg

SEQ ID NO: 6449 - DNA, 47 bp, Homo Sapiens
atccattggggtctccccgcgcaggttcgaatcctgccgactacgcc

SEQ ID NO: 6450 - DNA, 48 bp, Homo Sapiens
atccattggggtctccccgcgcaggttcgaatcctgccgactacgcca

SEQ ID NO: 6451 - DNA, 22 bp, Homo Sapiens
atccattggggtttccccgcgc

SEQ ID NO: 6452 - DNA, 38 bp, Homo Sapiens
atccattggggtttccccgcgcaggttcgaatcctgcc

SEQ ID NO: 6453 - DNA, 42 bp, Homo Sapiens
atccattggggtttccccgcgcaggttcgaatcctgccgact

SEQ ID NO: 6454 - DNA, 46 bp, Homo Sapiens
atccattggggtttccccgcgcaggttcgaatcctgccgactacgc

SEQ ID NO: 6455 - DNA, 47 bp, Homo Sapiens
atccattggggtttccccgcgcaggttcgaatcctgccgactacgcc

SEQ ID NO: 6456 - DNA, 47 bp, Homo Sapiens; identical to SEQ ID NO: 6455

SEQ ID NO: 6457 - DNA, 16 bp, Homo Sapiens
atccattggtcttagg

SEQ ID NO: 6458 - DNA, 17 bp, Homo Sapiens
atccattggtcttaggc

SEQ ID NO: 6459 - DNA, 18 bp, Homo Sapiens
atccattggtcttaggcc

SEQ ID NO: 6460 - DNA, 19 bp, Homo Sapiens
atccattggtcttaggccc

SEQ ID NO: 6461 - DNA, 20 bp, Homo Sapiens
atccattggtcttaggcccc

SEQ ID NO: 6462 - DNA, 21 bp, Homo Sapiens
atccattggtcttaggcccca

SEQ ID NO: 6463 - DNA, 24 bp, Homo Sapiens
atccattggtcttaggccccaaaa

SEQ ID NO: 6464 - DNA, 25 bp, Homo Sapiens
atccattggtcttaggccccaaaaa

SEQ ID NO: 6465 - DNA, 26 bp, Homo Sapiens
atccattggtcttaggccccaaaaat

SEQ ID NO: 6466 - DNA, 27 bp, Homo Sapiens
atccattggtcttaggccccaaaaatt

SEQ ID NO: 6467 - DNA, 28 bp, Homo Sapiens
atccattggtcttaggccccaaaaattt

SEQ ID NO: 6468 - DNA, 29 bp, Homo Sapiens
atccattggtcttaggccccaaaaatttt

SEQ ID NO: 6469 - DNA, 30 bp, Homo Sapiens
atccattggtcttaggccccaaaaattttg

SEQ ID NO: 6470 - DNA, 31 bp, Homo Sapiens
atccattggtcttaggccccaaaaattttgg

SEQ ID NO: 6471 - DNA, 32 bp, Homo Sapiens
atccattggtcttaggccccaaaaattttggt

SEQ ID NO: 6472 - DNA, 33 bp, Homo Sapiens
atccattggtcttaggccccaaaaattttggtg

SEQ ID NO: 6473 - DNA, 34 bp, Homo Sapiens
atccattggtcttaggccccaaaaattttggtgc

SEQ ID NO: 6474 - DNA, 35 bp, Homo Sapiens
atccattggtcttaggccccaaaaattttggtgca

SEQ ID NO: 6475 - DNA, 38 bp, Homo Sapiens
atccattggtcttaggccccaaaaattttggtgcaact

SEQ ID NO: 6476 - DNA, 39 bp, Homo Sapiens
atccattggtcttaggccccaaaaattttggtgcaactc

SEQ ID NO: 6477 - DNA, 40 bp, Homo Sapiens
atccattggtcttaggccccaaaaattttggtgcaactcc

SEQ ID NO: 6478 - DNA, 45 bp, Homo Sapiens
atccattggtcttaggccccaaaaattttggtgcaactccaaata

SEQ ID NO: 6479 - DNA, 48 bp, Homo Sapiens
atccattggtcttaggccccaaaaattttggtgcaactccaaataaaa

SEQ ID NO: 6480 - DNA, 47 bp, Homo Sapiens
atccattgtgctctgcacgcgtgggttcgaatcccatcctcgtcgcc

SEQ ID NO: 6481 - DNA, 39 bp, Homo Sapiens
atccattgtgctttgcacgcgtgggttcgaatcccatcc

SEQ ID NO: 6482 - DNA, 40 bp, Homo Sapiens
atccattgtgctttgcacgcgtgggttcgaatcccatcct

SEQ ID NO: 6483 - DNA, 46 bp, Homo Sapiens
atccattgtgctttgcacgcgtgggttcgaatcccatcctcgtcgc

SEQ ID NO: 6484 - DNA, 47 bp, Homo Sapiens
atccattgtgctttgcacgcgtgggttcgaatcccatcctcgtcgcc

SEQ ID NO: 6485 - DNA, 48 bp, Homo Sapiens
atccattgtgctttgcacgcgtgggttcgaatcccatcctcgtcgcca

SEQ ID NO: 6486 - DNA, 16 bp, Homo Sapiens
atcccaccactgccac

SEQ ID NO: 6487 - DNA, 17 bp, Homo Sapiens
atcccaccactgccacc

SEQ ID NO: 6488 - DNA, 18 bp, Homo Sapiens
atcccaccactgccacca

SEQ ID NO: 6489 - DNA, 17 bp, Homo Sapiens
atcccaccagagtcgcc

SEQ ID NO: 6490 - DNA, 18 bp, Homo Sapiens
atcccaccagagtcgcca

SEQ ID NO: 6491 - DNA, 16 bp, Homo Sapiens
atcccaccctcgtcgc

SEQ ID NO: 6492 - DNA, 17 bp, Homo Sapiens
atcccaccctcgtcgcc

SEQ ID NO: 6493 - DNA, 18 bp, Homo Sapiens
atcccaccctcgtcgcca

SEQ ID NO: 6494 - DNA, 16 bp, Homo Sapiens
atcccaccgctgccac

SEQ ID NO: 6495 - DNA, 17 bp, Homo Sapiens
atcccaccgctgccacc

SEQ ID NO: 6496 - DNA, 18 bp, Homo Sapiens
atcccaccgctgccacca

SEQ ID NO: 6497 - DNA, 17 bp, Homo Sapiens
atcccaccttcgtcgcc

SEQ ID NO: 6498 - DNA, 18 bp, Homo Sapiens
atcccaccttcgtcgcca

SEQ ID NO: 6499 - DNA, 16 bp, Homo Sapiens
atcccactcctgacac

SEQ ID NO: 6500 - DNA, 17 bp, Homo Sapiens
atcccactcctgacacc

SEQ ID NO: 6501 - DNA, 18 bp, Homo Sapiens
atcccactcctgacacca

SEQ ID NO: 6502 - DNA, 18 bp, Homo Sapiens
atcccactgctgccacca

SEQ ID NO: 6503 - DNA, 16 bp, Homo Sapiens
atcccacttctgacac

SEQ ID NO: 6504 - DNA, 17 bp, Homo Sapiens
atcccacttctgacacc

SEQ ID NO: 6505 - DNA, 18 bp, Homo Sapiens
atcccacttctgacacca

SEQ ID NO: 6506 - DNA, 16 bp, Homo Sapiens
atcccagcggggcctc

SEQ ID NO: 6507 - DNA, 17 bp, Homo Sapiens
atcccagcggggcctcc

SEQ ID NO: 6508 - DNA, 18 bp, Homo Sapiens
atcccagcggggcctcca

SEQ ID NO: 6509 - DNA, 16 bp, Homo Sapiens
atcccagcggtgcctc

SEQ ID NO: 6510 - DNA, 17 bp, Homo Sapiens
atcccagcggtgcctcc

SEQ ID NO: 6511 - DNA, 18 bp, Homo Sapiens
atcccagcggtgcctcca

SEQ ID NO: 6512 - DNA, 32 bp, Homo Sapiens
atcccagggtcgtgggttcgagccccacgttg

SEQ ID NO: 6513 - DNA, 38 bp, Homo Sapiens
atcccagggtcgtgggttcgagccccacgttgggcgcc

SEQ ID NO: 6514 - DNA, 16 bp, Homo Sapiens
atcccagtagagcctc

SEQ ID NO: 6515 - DNA, 17 bp, Homo Sapiens
atcccagtagagcctcc

SEQ ID NO: 6516 - DNA, 18 bp, Homo Sapiens
atcccagtagagcctcca

SEQ ID NO: 6517 - DNA, 16 bp, Homo Sapiens
atcccatcctcgtcgc

SEQ ID NO: 6518 - DNA, 17 bp, Homo Sapiens
atcccatcctcgtcgcc

SEQ ID NO: 6519 - DNA, 18 bp, Homo Sapiens
atcccatcctcgtcgcca

SEQ ID NO: 6520 - DNA, 19 bp, Homo Sapiens
atccccagcatctccacca

SEQ ID NO: 6521 - DNA, 19 bp, Homo Sapiens
atccccagtacctccacca

SEQ ID NO: 6522 - DNA, 28 bp, Homo Sapiens
atccccgcctgtcacgcgggagaccggg

SEQ ID NO: 6523 - DNA, 16 bp, Homo Sapiens
atccccggcacctcca

SEQ ID NO: 6524 - DNA, 17 bp, Homo Sapiens
atccccggcacctccac

SEQ ID NO: 6525 - DNA, 18 bp, Homo Sapiens
atccccggcacctccacc

SEQ ID NO: 6526 - DNA, 19 bp, Homo Sapiens
atccccggcacctccacca

SEQ ID NO: 6527 - DNA, 16 bp, Homo Sapiens
atccccggcatctcca

SEQ ID NO: 6528 - DNA, 17 bp, Homo Sapiens
atccccggcatctccac

SEQ ID NO: 6529 - DNA, 18 bp, Homo Sapiens
atccccggcatctccacc

SEQ ID NO: 6530 - DNA, 19 bp, Homo Sapiens
atccccggcatctccacca

SEQ ID NO: 6531 - DNA, 16 bp, Homo Sapiens
atccccgtacgggcca

SEQ ID NO: 6532 - DNA, 18 bp, Homo Sapiens
atccccgtacgggccacc

SEQ ID NO: 6533 - DNA, 19 bp, Homo Sapiens
atccccgtacgggccacca

SEQ ID NO: 6534 - DNA, 16 bp, Homo Sapiens
atcccggacgagcccc

SEQ ID NO: 6535 - DNA, 17 bp, Homo Sapiens
atcccggacgagccccc

SEQ ID NO: 6536 - DNA, 18 bp, Homo Sapiens
atcccggacgagccccca

SEQ ID NO: 6537 - DNA, 17 bp, Homo Sapiens
atcccgggcggaaacac

SEQ ID NO: 6538 - DNA, 18 bp, Homo Sapiens
atcccgggcggaaacacc

SEQ ID NO: 6539 - DNA, 19 bp, Homo Sapiens
atcccgggcggaaacacca

SEQ ID NO: 6540 - DNA, 16 bp, Homo Sapiens
atcccgggtttcggca

SEQ ID NO: 6541 - DNA, 17 bp, Homo Sapiens
atcccgggtttcggcac

SEQ ID NO: 6542 - DNA, 18 bp, Homo Sapiens
atcccgggtttcggcacc

SEQ ID NO: 6543 - DNA, 19 bp, Homo Sapiens
atcccgggtttcggcacca

SEQ ID NO: 6544 - DNA, 17 bp, Homo Sapiens
atccctccgtggttacc

SEQ ID NO: 6545 - DNA, 18 bp, Homo Sapiens
atccctccgtggttacca

SEQ ID NO: 6546 - DNA, 34 bp, Homo Sapiens
atccctggtggtctagtggttaggattcggcgct

SEQ ID NO: 6547 - DNA, 35 bp, Homo Sapiens
atccctggtggtctagtggttaggattcggcgctc

SEQ ID NO: 6548 - DNA, 36 bp, Homo Sapiens
atccctggtggtctagtggttaggattcggcgctct

SEQ ID NO: 6549 - DNA, 16 bp, Homo Sapiens
atccgagtcacggcac

SEQ ID NO: 6550 - DNA, 17 bp, Homo Sapiens
atccgagtcacggcacc

SEQ ID NO: 6551 - DNA, 18 bp, Homo Sapiens
atccgagtcacggcacca

SEQ ID NO: 6552 - DNA, 27 bp, Homo Sapiens
atccgagttcaaatctcggtgggacct

SEQ ID NO: 6553 - DNA, 28 bp, Homo Sapiens
atccgagttcaaatctcggtgggacctc

SEQ ID NO: 6554 - DNA, 28 bp, Homo Sapiens
atccgagttcgaatctcggtgggacctc

SEQ ID NO: 6555 - DNA, 28 bp, Homo Sapiens
atccgcgtgggttcgaaccccacttctg

SEQ ID NO: 6556 - DNA, 29 bp, Homo Sapiens
atccgcgtgggttcgaaccccacttctgg

SEQ ID NO: 6557 - DNA, 33 bp, Homo Sapiens
atccgcgtgggttcgaaccccacttctggtacc

SEQ ID NO: 6558 - DNA, 16 bp, Homo Sapiens
atccggctcgaaggac

SEQ ID NO: 6559 - DNA, 17 bp, Homo Sapiens
atccggctcgaaggacc

SEQ ID NO: 6560 - DNA, 18 bp, Homo Sapiens
atccggctcgaaggacca

SEQ ID NO: 6561 - DNA, 16 bp, Homo Sapiens
atccggctcggaggac

SEQ ID NO: 6562 - DNA, 17 bp, Homo Sapiens
atccggctcggaggacc

SEQ ID NO: 6563 - DNA, 18 bp, Homo Sapiens
atccggctcggaggacca

SEQ ID NO: 6564 - DNA, 16 bp, Homo Sapiens
atccgggtgccccctc

SEQ ID NO: 6565 - DNA, 17 bp, Homo Sapiens
atccgggtgccccctcc

SEQ ID NO: 6566 - DNA, 18 bp, Homo Sapiens
atccgggtgccccctcca

SEQ ID NO: 6567 - DNA, 16 bp, Homo Sapiens
atcctatatatcttac

SEQ ID NO: 6568 - DNA, 17 bp, Homo Sapiens
atcctatatatcttacc

SEQ ID NO: 6569 - DNA, 18 bp, Homo Sapiens
atcctatatatcttacca

SEQ ID NO: 6570 - DNA, 19 bp, Homo Sapiens
atcctcacctggagcacca

SEQ ID NO: 6571 - DNA, 16 bp, Homo Sapiens
atcctgccgactacgc

SEQ ID NO: 6572 - DNA, 17 bp, Homo Sapiens
atcctgccgactacgcc

SEQ ID NO: 6573 - DNA, 18 bp, Homo Sapiens
atcctgccgactacgcca

SEQ ID NO: 6574 - DNA, 17 bp, Homo Sapiens
atcctgctcacagcgcc

SEQ ID NO: 6575 - DNA, 18 bp, Homo Sapiens
atcctgctcacagcgcca

SEQ ID NO: 6576 - DNA, 26 bp, Homo Sapiens
atcctgggttcgaatcccagcggggc

SEQ ID NO: 6577 - DNA, 27 bp, Homo Sapiens
atcctgggttcgaatcccagcggggcc

SEQ ID NO: 6578 - DNA, 28 bp, Homo Sapiens
atcctgggttcgaatcccagcggggcct

SEQ ID NO: 6579 - DNA, 29 bp, Homo Sapiens
atcctgggttcgaatcccagcggggcctc

SEQ ID NO: 6580 - DNA, 30 bp, Homo Sapiens
atcctgggttcgaatcccagcggggcctcc

SEQ ID NO: 6581 - DNA, 25 bp, Homo Sapiens
atcctgggttcgaatcccagcggtg

SEQ ID NO: 6582 - DNA, 30 bp, Homo Sapiens
atcctgggttcgaatcccagcggtgcctcc

SEQ ID NO: 6583 - DNA, 17 bp, Homo Sapiens
atcctgtcggctacgcc

SEQ ID NO: 6584 - DNA, 18 bp, Homo Sapiens
atcctgtcggctacgcca

SEQ ID NO: 6585 - DNA, 16 bp, Homo Sapiens
atcctgttcgtgacgc

SEQ ID NO: 6586 - DNA, 17 bp, Homo Sapiens
atcctgttcgtgacgcc

SEQ ID NO: 6587 - DNA, 18 bp, Homo Sapiens
atcctgttcgtgacgcca

SEQ ID NO: 6588 - DNA, 19 bp, Homo Sapiens
atccttaggtcgctggttc

SEQ ID NO: 6589 - DNA, 20 bp, Homo Sapiens
atccttaggtcgctggttcg

SEQ ID NO: 6590 - DNA, 21 bp, Homo Sapiens
atccttaggtcgctggttcga

SEQ ID NO: 6591 - DNA, 23 bp, Homo Sapiens
atccttaggtcgctggttcgaat

SEQ ID NO: 6592 - DNA, 31 bp, Homo Sapiens
atccttaggtcgctggttcgaatccggctcg

SEQ ID NO: 6593 - DNA, 22 bp, Homo Sapiens
atccttaggtcgctggttcgat

SEQ ID NO: 6594 - DNA, 23 bp, Homo Sapiens
atccttaggtcgctggttcgatt

SEQ ID NO: 6595 - DNA, 24 bp, Homo Sapiens
atccttaggtcgctggttcgattc

SEQ ID NO: 6596 - DNA, 31 bp, Homo Sapiens
atccttaggtcgctggttcgattccggctcg

SEQ ID NO: 6597 - DNA, 17 bp, Homo Sapiens
atcgaaaccatcctctg

SEQ ID NO: 6598 - DNA, 19 bp, Homo Sapiens
atcgaaaccatcctctgct

SEQ ID NO: 6599 - DNA, 20 bp, Homo Sapiens
atcgaaaccatcctctgcta

SEQ ID NO: 6600 - DNA, 21 bp, Homo Sapiens
atcgaaaccatcctctgctac

SEQ ID NO: 6601 - DNA, 22 bp, Homo Sapiens
atcgaaaccatcctctgctacc

SEQ ID NO: 6602 - DNA, 23 bp, Homo Sapiens
atcgaaaccatcctctgctacca

SEQ ID NO: 6603 - DNA, 23 bp, Homo Sapiens
atcgatgcccgcatcctccacca

SEQ ID NO: 6604 - DNA, 20 bp, Homo Sapiens
atcgcataaaacttaaaact

SEQ ID NO: 6605 - DNA, 21 bp, Homo Sapiens
atcgcataaaacttaaaactt

SEQ ID NO: 6606 - DNA, 23 bp, Homo Sapiens
atcgcataaaacttaaaacttta

SEQ ID NO: 6607 - DNA, 25 bp, Homo Sapiens
atcgcataaaacttaaaactttaca

SEQ ID NO: 6608 - DNA, 26 bp, Homo Sapiens
atcgcataaaacttaaaactttacag

SEQ ID NO: 6609 - DNA, 31 bp, Homo Sapiens
atcgcataaaacttaaaactttacagtcaga

SEQ ID NO: 6610 - DNA, 32 bp, Homo Sapiens
atcgcataaaacttaaaactttacagtcagag

SEQ ID NO: 6611 - DNA, 33 bp, Homo Sapiens
atcgcataaaacttaaaactttacagtcagagg

SEQ ID NO: 6612 - DNA, 35 bp, Homo Sapiens
atcgcataaaacttaaaactttacagtcagaggtt

SEQ ID NO: 6613 - DNA, 36 bp, Homo Sapiens
atcgcataaaacttaaaactttacagtcagaggttc

SEQ ID NO: 6614 - DNA, 16 bp, Homo Sapiens
atcgggcccatacccc

SEQ ID NO: 6615 - DNA, 17 bp, Homo Sapiens
atcgggcccataccccg

SEQ ID NO: 6616 - DNA, 18 bp, Homo Sapiens
atcgggcccataccccga

SEQ ID NO: 6617 - DNA, 19 bp, Homo Sapiens
atcgggcccataccccgaa

SEQ ID NO: 6618 - DNA, 20 bp, Homo Sapiens
atcgggcccataccccgaaa

SEQ ID NO: 6619 - DNA, 21 bp, Homo Sapiens
atcgggcccataccccgaaaa

SEQ ID NO: 6620 - DNA, 27 bp, Homo Sapiens
atcgggcccataccccgaaaatgttgg

SEQ ID NO: 6621 - DNA, 29 bp, Homo Sapiens
atcgggcccataccccgaaaatgttggtt

SEQ ID NO: 6622 - DNA, 30 bp, Homo Sapiens
atcgggcccataccccgaaaatgttggtta

SEQ ID NO: 6623 - DNA, 31 bp, Homo Sapiens
atcgggcccataccccgaaaatgttggttat

SEQ ID NO: 6624 - DNA, 32 bp, Homo Sapiens
atcgggcccataccccgaaaatgttggttata

SEQ ID NO: 6625 - DNA, 33 bp, Homo Sapiens
atcgggcccataccccgaaaatgttggttatac

SEQ ID NO: 6626 - DNA, 34 bp, Homo Sapiens
atcgggcccataccccgaaaatgttggttatacc

SEQ ID NO: 6627 - DNA, 35 bp, Homo Sapiens
atcgggcccataccccgaaaatgttggttataccc

SEQ ID NO: 6628 - DNA, 48 bp, Homo Sapiens
atcgggcccataccccgaaaatgttggttatacccttcccgtactacc

SEQ ID NO: 6629 - DNA, 19 bp, Homo Sapiens
atcggttagcgcgcggtac

SEQ ID NO: 6630 - DNA, 20 bp, Homo Sapiens
atcggttagcgcgcggtact

SEQ ID NO: 6631 - DNA, 23 bp, Homo Sapiens
atcggttagcgcgttcggctgtt

SEQ ID NO: 6632 - DNA, 26 bp, Homo Sapiens
atcggttagcgcgttcggctgttaac

SEQ ID NO: 6633 - DNA, 27 bp, Homo Sapiens
atcggttagcgcgttcggctgttaacc

SEQ ID NO: 6634 - DNA, 18 bp, Homo Sapiens
atcgtatagtggttagta

SEQ ID NO: 6635 - DNA, 20 bp, Homo Sapiens
atcgtatagtggttagtact

SEQ ID NO: 6636 - DNA, 21 bp, Homo Sapiens
atcgtatagtggttagtactc

SEQ ID NO: 6637 - DNA, 22 bp, Homo Sapiens
atcgtatagtggttagtactct

SEQ ID NO: 6638 - DNA, 23 bp, Homo Sapiens
atcgtatagtggttagtactctg

SEQ ID NO: 6639 - DNA, 24 bp, Homo Sapiens
atcgtatagtggttagtactctgc

SEQ ID NO: 6640 - DNA, 25 bp, Homo Sapiens
atcgtatagtggttagtactctgcg

SEQ ID NO: 6641 - DNA, 26 bp, Homo Sapiens
atcgtatagtggttagtactctgcgt

SEQ ID NO: 6642 - DNA, 27 bp, Homo Sapiens
atcgtatagtggttagtactctgcgtt

SEQ ID NO: 6643 - DNA, 28 bp, Homo Sapiens
atcgtatagtggttagtactctgcgttg

SEQ ID NO: 6644 - DNA, 29 bp, Homo Sapiens
atcgtatagtggttagtactctgcgttgt

SEQ ID NO: 6645 - DNA, 30 bp, Homo Sapiens
atcgtatagtggttagtactctgcgttgtg

SEQ ID NO: 6646 - DNA, 43 bp, Homo Sapiens
atcgtatagtggttagtactctgcgttgtggccgcagcaacct

SEQ ID NO: 6647 - DNA, 18 bp, Homo Sapiens
atctaaagacaggggtta

SEQ ID NO: 6648 - DNA, 19 bp, Homo Sapiens
atctaaagacaggggttag

SEQ ID NO: 6649 - DNA, 23 bp, Homo Sapiens
atctaaagacaggggttaggcct

SEQ ID NO: 6650 - DNA, 24 bp, Homo Sapiens
atctaaagacaggggttaggcctc

SEQ ID NO: 6651 - DNA, 27 bp, Homo Sapiens
atctaaagacaggggttaggcctcttt

SEQ ID NO: 6652 - DNA, 28 bp, Homo Sapiens
atctaaagacaggggttaggcctctttt

SEQ ID NO: 6653 - DNA, 32 bp, Homo Sapiens
atctaaagacaggggttaggcctctttttacc

SEQ ID NO: 6654 - DNA, 33 bp, Homo Sapiens
atctaaagacaggggttaggcctctttttacca

SEQ ID NO: 6655 - DNA, 35 bp, Homo Sapiens
atctaaagacaggggttaggcctctttttaccacc

SEQ ID NO: 6656 - DNA, 36 bp, Homo Sapiens
atctaaagacaggggttaggcctctttttaccacca

SEQ ID NO: 6657 - DNA, 19 bp, Homo Sapiens
atctaaaggtccctggttc

SEQ ID NO: 6658 - DNA, 23 bp, Homo Sapiens
atctaaaggtccctggttcaatc

SEQ ID NO: 6659 - DNA, 36 bp, Homo Sapiens
atctaaaggtccctggttcaatcccgggtttcggca

SEQ ID NO: 6660 - DNA, 37 bp, Homo Sapiens
atctaaaggtccctggttcaatcccgggtttcggcac

SEQ ID NO: 6661 - DNA, 38 bp, Homo Sapiens
atctaaaggtccctggttcaatcccgggtttcggcacc

SEQ ID NO: 6662 - DNA, 39 bp, Homo Sapiens
atctaaaggtccctggttcaatcccgggtttcggcacca

SEQ ID NO: 6663 - DNA, 20 bp, Homo Sapiens
atctaaaggtccctggttcg

SEQ ID NO: 6664 - DNA, 21 bp, Homo Sapiens
atctaaaggtccctggttcga

SEQ ID NO: 6665 - DNA, 22 bp, Homo Sapiens
atctaaaggtccctggttcgat

SEQ ID NO: 6666 - DNA, 23 bp, Homo Sapiens
atctaaaggtccctggttcgatc

SEQ ID NO: 6667 - DNA, 24 bp, Homo Sapiens
atctaaaggtccctggttcgatcc

SEQ ID NO: 6668 - DNA, 25 bp, Homo Sapiens
atctaaaggtccctggttcgatccc

SEQ ID NO: 6669 - DNA, 30 bp, Homo Sapiens
atctaaaggtccctggttcgatcccgggtt

SEQ ID NO: 6670 - DNA, 31 bp, Homo Sapiens
atctaaaggtccctggttcgatcccgggttt

SEQ ID NO: 6671 - DNA, 34 bp, Homo Sapiens
atctaaaggtccctggttcgatcccgggtttcgg

SEQ ID NO: 6672 - DNA, 35 bp, Homo Sapiens
atctaaaggtccctggttcgatcccgggtttcggc

SEQ ID NO: 6673 - DNA, 36 bp, Homo Sapiens
atctaaaggtccctggttcgatcccgggtttcggca

SEQ ID NO: 6674 - DNA, 37 bp, Homo Sapiens
atctaaaggtccctggttcgatcccgggtttcggcac

SEQ ID NO: 6675 - DNA, 38 bp, Homo Sapiens
atctaaaggtccctggttcgatcccgggtttcggcacc

SEQ ID NO: 6676 - DNA, 39 bp, Homo Sapiens
atctaaaggtccctggttcgatcccgggtttcggcacca

SEQ ID NO: 6677 - DNA, 19 bp, Homo Sapiens
atctcagggtcgtgggttc

SEQ ID NO: 6678 - DNA, 34 bp, Homo Sapiens
atctcagggtcgtgggttcgagccccacgttggg

SEQ ID NO: 6679 - DNA, 35 bp, Homo Sapiens
atctcagggtcgtgggttcgagccccacgttgggc

SEQ ID NO: 6680 - DNA, 37 bp, Homo Sapiens
atctcagggtcgtgggttcgagccccacgttgggcgc

SEQ ID NO: 6681 - DNA, 38 bp, Homo Sapiens
atctcagggtcgtgggttcgagccccacgttgggcgcc

SEQ ID NO: 6682 - DNA, 39 bp, Homo Sapiens
atctcagggtcgtgggttcgagccccacgttgggcgcca

SEQ ID NO: 6683 - DNA, 16 bp, Homo Sapiens
atctcgctggggcctc

SEQ ID NO: 6684 - DNA, 17 bp, Homo Sapiens
atctcgctggggcctcc

SEQ ID NO: 6685 - DNA, 18 bp, Homo Sapiens
atctcgctggggcctcca

SEQ ID NO: 6686 - DNA, 16 bp, Homo Sapiens
atctcggtggaacctc

SEQ ID NO: 6687 - DNA, 17 bp, Homo Sapiens
atctcggtggaacctcc

SEQ ID NO: 6688 - DNA, 18 bp, Homo Sapiens
atctcggtggaacctcca

SEQ ID NO: 6689 - DNA, 16 bp, Homo Sapiens
atctcggtgggacccc

SEQ ID NO: 6690 - DNA, 17 bp, Homo Sapiens
atctcggtgggaccccc

SEQ ID NO: 6691 - DNA, 16 bp, Homo Sapiens
atctcggtgggacctc

SEQ ID NO: 6692 - DNA, 17 bp, Homo Sapiens
atctcggtgggacctcc

SEQ ID NO: 6693 - DNA, 18 bp, Homo Sapiens
atctcggtgggacctcca

SEQ ID NO: 6694 - DNA, 17 bp, Homo Sapiens
atctcggtggtacctcc

SEQ ID NO: 6695 - DNA, 18 bp, Homo Sapiens
atctcggtggtacctcca

SEQ ID NO: 6696 - DNA, 17 bp, Homo Sapiens
atctgaaggtcctgagt

SEQ ID NO: 6697 - DNA, 19 bp, Homo Sapiens
atctgaaggtcctgagttc

SEQ ID NO: 6698 - DNA, 20 bp, Homo Sapiens
atctgaaggtcctgagttcg

SEQ ID NO: 6699 - DNA, 33 bp, Homo Sapiens
atctgaaggtcctgagttcgaacctcagagggg

SEQ ID NO: 6700 - DNA, 34 bp, Homo Sapiens
atctgaaggtcctgagttcgaacctcagaggggg

SEQ ID NO: 6701 - DNA, 35 bp, Homo Sapiens
atctgaaggtcctgagttcgaacctcagagggggc

SEQ ID NO: 6702 - DNA, 36 bp, Homo Sapiens
atctgaaggtcctgagttcgaacctcagagggggca

SEQ ID NO: 6703 - DNA, 37 bp, Homo Sapiens
atctgaaggtcctgagttcgaacctcagagggggcac

SEQ ID NO: 6704 - DNA, 38 bp, Homo Sapiens
atctgaaggtcctgagttcgaacctcagagggggcacc

SEQ ID NO: 6705 - DNA, 39 bp, Homo Sapiens
atctgaaggtcctgagttcgaacctcagagggggcacca

SEQ ID NO: 6706 - DNA, 35 bp, Homo Sapiens
atctgaaggtcctgagttcgagcctcagagagggc

SEQ ID NO: 6707 - DNA, 36 bp, Homo Sapiens
atctgaaggtcctgagttcgagcctcagagagggca

SEQ ID NO: 6708 - DNA, 37 bp, Homo Sapiens
atctgaaggtcctgagttcgagcctcagagagggcac

SEQ ID NO: 6709 - DNA, 38 bp, Homo Sapiens
atctgaaggtcctgagttcgagcctcagagagggcacc

SEQ ID NO: 6710 - DNA, 18 bp, Homo Sapiens
atctgaaggtcgtgagtt

SEQ ID NO: 6711 - DNA, 19 bp, Homo Sapiens
atctgaaggtcgtgagttc

SEQ ID NO: 6712 - DNA, 20 bp, Homo Sapiens
atctgaaggtcgtgagttcg

SEQ ID NO: 6713 - DNA, 33 bp, Homo Sapiens
atctgaaggtcgtgagttcgagcctcacacggg

SEQ ID NO: 6714 - DNA, 34 bp, Homo Sapiens
atctgaaggtcgtgagttcgagcctcacacgggg

SEQ ID NO: 6715 - DNA, 35 bp, Homo Sapiens
atctgaaggtcgtgagttcgagcctcacacggggc

SEQ ID NO: 6716 - DNA, 36 bp, Homo Sapiens
atctgaaggtcgtgagttcgagcctcacacggggca

SEQ ID NO: 6717 - DNA, 37 bp, Homo Sapiens
atctgaaggtcgtgagttcgagcctcacacggggcac

SEQ ID NO: 6718 - DNA, 38 bp, Homo Sapiens
atctgaaggtcgtgagttcgagcctcacacggggcacc

SEQ ID NO: 6719 - DNA, 39 bp, Homo Sapiens
atctgaaggtcgtgagttcgagcctcacacggggcacca

SEQ ID NO: 6720 - DNA, 33 bp, Homo Sapiens
atctgaaggtcgtgagttcgatcctcacacggg

SEQ ID NO: 6721 - DNA, 34 bp, Homo Sapiens
atctgaaggtcgtgagttcgatcctcacacgggg

SEQ ID NO: 6722 - DNA, 35 bp, Homo Sapiens
atctgaaggtcgtgagttcgatcctcacacggggc

SEQ ID NO: 6723 - DNA, 36 bp, Homo Sapiens
atctgaaggtcgtgagttcgatcctcacacggggca

SEQ ID NO: 6724 - DNA, 37 bp, Homo Sapiens
atctgaaggtcgtgagttcgatcctcacacggggcac

SEQ ID NO: 6725 - DNA, 38 bp, Homo Sapiens
atctgaaggtcgtgagttcgatcctcacacggggcacc

SEQ ID NO: 6726 - DNA, 39 bp, Homo Sapiens
atctgaaggtcgtgagttcgatcctcacacggggcacca

SEQ ID NO: 6727 - DNA, 21 bp, Homo Sapiens
atctgacaacagaggcttacg

SEQ ID NO: 6728 - DNA, 23 bp, Homo Sapiens
atctgacaacagaggcttacgac

SEQ ID NO: 6729 - DNA, 24 bp, Homo Sapiens
atctgacaacagaggcttacgacc

SEQ ID NO: 6730 - DNA, 25 bp, Homo Sapiens
atctgacaacagaggcttacgaccc

SEQ ID NO: 6731 - DNA, 26 bp, Homo Sapiens
atctgacaacagaggcttacgacccc

SEQ ID NO: 6732 - DNA, 27 bp, Homo Sapiens
atctgacaacagaggcttacgacccct

SEQ ID NO: 6733 - DNA, 28 bp, Homo Sapiens
atctgacaacagaggcttacgacccctt

SEQ ID NO: 6734 - DNA, 29 bp, Homo Sapiens
atctgacaacagaggcttacgacccctta

SEQ ID NO: 6735 - DNA, 31 bp, Homo Sapiens
atctgacaacagaggcttacgaccccttatt

SEQ ID NO: 6736 - DNA, 34 bp, Homo Sapiens
atctgacaacagaggcttacgaccccttatttac

SEQ ID NO: 6737 - DNA, 35 bp, Homo Sapiens
atctgacaacagaggcttacgaccccttatttacc

SEQ ID NO: 6738 - DNA, 36 bp, Homo Sapiens
atctgacaacagaggcttacgaccccttatttaccc

SEQ ID NO: 6739 - DNA, 37 bp, Homo Sapiens
atctgacaacagaggcttacgaccccttatttacccc

SEQ ID NO: 6740 - DNA, 38 bp, Homo Sapiens
atctgacaacagaggcttacgaccccttatttacccca

SEQ ID NO: 6741 - DNA, 20 bp, Homo Sapiens
atctgagggtccagggttca

SEQ ID NO: 6742 - DNA, 28 bp, Homo Sapiens
atctgagggtccagggttcaagtccctg

SEQ ID NO: 6743 - DNA, 38 bp, Homo Sapiens
atctgagggtccagggttcaagtccctgtccaggcgcc

SEQ ID NO: 6744 - DNA, 39 bp, Homo Sapiens
atctgagggtccagggttcaagtccctgtccaggcgcca

SEQ ID NO: 6745 - DNA, 38 bp, Homo Sapiens
atctgagggtccagggttcaagtccctgttcaggcacc

SEQ ID NO: 6746 - DNA, 38 bp, Homo Sapiens
atctgagggtccagggttcaagtccctgttcaggcgcc

SEQ ID NO: 6747 - DNA, 39 bp, Homo Sapiens
atctgagggtccagggttcaagtccctgttcaggcgcca

SEQ ID NO: 6748 - DNA, 33 bp, Homo Sapiens
atctgagggtccagggttcaagtccctgttcgg

SEQ ID NO: 6749 - DNA, 34 bp, Homo Sapiens
atctgagggtccagggttcaagtccctgttcggg

SEQ ID NO: 6750 - DNA, 35 bp, Homo Sapiens
atctgagggtccagggttcaagtccctgttcgggc

SEQ ID NO: 6751 - DNA, 36 bp, Homo Sapiens
atctgagggtccagggttcaagtccctgttcgggcg

SEQ ID NO: 6752 - DNA, 37 bp, Homo Sapiens
atctgagggtccagggttcaagtccctgttcgggcgc

SEQ ID NO: 6753 - DNA, 38 bp, Homo Sapiens
atctgagggtccagggttcaagtccctgttcgggcgcc

SEQ ID NO: 6754 - DNA, 39 bp, Homo Sapiens
atctgagggtccagggttcaagtccctgttcgggcgcca

SEQ ID NO: 6755 - DNA, 26 bp, Homo Sapiens
atctgagggtccagggttcatgtccc

SEQ ID NO: 6756 - DNA, 19 bp, Homo Sapiens
atctgagggtccagggttt

SEQ ID NO: 6757 - DNA, 17 bp, Homo Sapiens
atcttagctttgggtgc

SEQ ID NO: 6758 - DNA, 27 bp, Homo Sapiens
atcttagctttgggtgctaatggtgga

SEQ ID NO: 6759 - DNA, 28 bp, Homo Sapiens
atcttagctttgggtgctaatggtggag

SEQ ID NO: 6760 - DNA, 30 bp, Homo Sapiens
atcttagctttgggtgctaatggtggagtt

SEQ ID NO: 6761 - DNA, 31 bp, Homo Sapiens
atcttagctttgggtgctaatggtggagtta

SEQ ID NO: 6762 - DNA, 32 bp, Homo Sapiens
atcttagctttgggtgctaatggtggagttaa

SEQ ID NO: 6763 - DNA, 33 bp, Homo Sapiens
atcttagctttgggtgctaatggtggagttaaa

SEQ ID NO: 6764 - DNA, 34 bp, Homo Sapiens
atcttagctttgggtgctaatggtggagttaaag

SEQ ID NO: 6765 - DNA, 35 bp, Homo Sapiens
atcttagctttgggtgctaatggtggagttaaaga

SEQ ID NO: 6766 - DNA, 36 bp, Homo Sapiens
atcttagctttgggtgctaatggtggagttaaagac

SEQ ID NO: 6767 - DNA, 37 bp, Homo Sapiens
atcttagctttgggtgctaatggtggagttaaagact

SEQ ID NO: 6768 - DNA, 44 bp, Homo Sapiens
atcttagctttgggtgctaatggtggagttaaagactttttctc

SEQ ID NO: 6769 - DNA, 48 bp, Homo Sapiens
atcttagctttgggtgctaatggtggagttaaagactttttctctgac

SEQ ID NO: 6770 - DNA, 19 bp, Homo Sapiens
atgaaaacctttttccaag

SEQ ID NO: 6771 - DNA, 21 bp, Homo Sapiens
atgaaaacctttttccaagga

SEQ ID NO: 6772 - DNA, 22 bp, Homo Sapiens
atgaaaacctttttccaaggac

SEQ ID NO: 6773 - DNA, 23 bp, Homo Sapiens
atgaaaacctttttccaaggaca

SEQ ID NO: 6774 - DNA, 24 bp, Homo Sapiens
atgaaaacctttttccaaggacac

SEQ ID NO: 6775 - DNA, 25 bp, Homo Sapiens
atgaaaacctttttccaaggacacc

SEQ ID NO: 6776 - DNA, 26 bp, Homo Sapiens
atgaaaacctttttccaaggacacca

SEQ ID NO: 6777 - DNA, 16 bp, Homo Sapiens
atgagactcttaatct

SEQ ID NO: 6778 - DNA, 17 bp, Homo Sapiens
atgagactcttaatctc

SEQ ID NO: 6779 - DNA, 32 bp, Homo Sapiens
atgagactcttaatctcagggtcgtgggttcg

SEQ ID NO: 6780 - DNA, 16 bp, Homo Sapiens
atgaggccccgggttc

SEQ ID NO: 6781 - DNA, 22 bp, Homo Sapiens
atgaggccccgggttcaatccc

SEQ ID NO: 6782 - DNA, 23 bp, Homo Sapiens
atgaggccccgggttcaatcccc

SEQ ID NO: 6783 - DNA, 27 bp, Homo Sapiens
atgaggccccgggttcaatccccggca

SEQ ID NO: 6784 - DNA, 36 bp, Homo Sapiens
atgaggccccgggttcaatccccggcatctccacca

SEQ ID NO: 6785 - DNA, 26 bp, Homo Sapiens
atgaggccccgggttcgatccccggc

SEQ ID NO: 6786 - DNA, 27 bp, Homo Sapiens
atgaggccccgggttcgatccccggca

SEQ ID NO: 6787 - DNA, 28 bp, Homo Sapiens
atgaggccccgggttcgatccccggcat

SEQ ID NO: 6788 - DNA, 29 bp, Homo Sapiens
atgaggccccgggttcgatccccggcatc

SEQ ID NO: 6789 - DNA, 35 bp, Homo Sapiens
atgaggccccgggttcgatccccggcatctccacc

SEQ ID NO: 6790 - DNA, 36 bp, Homo Sapiens
atgaggccccgggttcgatccccggcatctccacca

SEQ ID NO: 6791 - DNA, 16 bp, Homo Sapiens
atgaggtcccgggttc

SEQ ID NO: 6792 - DNA, 17 bp, Homo Sapiens
atgaggtcccgggttcg

SEQ ID NO: 6793 - DNA, 22 bp, Homo Sapiens
atgaggtcccgggttcgatccc

SEQ ID NO: 6794 - DNA, 32 bp, Homo Sapiens
atgaggtcccgggttcgatccccagcatctcc

SEQ ID NO: 6795 - DNA, 33 bp, Homo Sapiens
atgaggtcccgggttcgatccccagcatctcca

SEQ ID NO: 6796 - DNA, 35 bp, Homo Sapiens
atgaggtcccgggttcgatccccagcatctccacc

SEQ ID NO: 6797 - DNA, 36 bp, Homo Sapiens
atgaggtcccgggttcgatccccagcatctccacca

SEQ ID NO: 6798 - DNA, 26 bp, Homo Sapiens
atgaggtcccgggttcgatccccggc

SEQ ID NO: 6799 - DNA, 18 bp, Homo Sapiens
atgataatcatatttacc

SEQ ID NO: 6800 - DNA, 19 bp, Homo Sapiens
atgataatcatatttacca

SEQ ID NO: 6801 - DNA, 20 bp, Homo Sapiens
atgataatcatatttaccaa

SEQ ID NO: 6802 - DNA, 21 bp, Homo Sapiens
atgataatcatatttaccaac

SEQ ID NO: 6803 - DNA, 22 bp, Homo Sapiens
atgataatcatatttaccaacc

SEQ ID NO: 6804 - DNA, 23 bp, Homo Sapiens
atgataatcatatttaccaacca

SEQ ID NO: 6805 - DNA, 16 bp, Homo Sapiens
atgattctcgcttcgg

SEQ ID NO: 6806 - DNA, 20 bp, Homo Sapiens
atgattctcgcttcgggtgc

SEQ ID NO: 6807 - DNA, 32 bp, Homo Sapiens
atgattctcgcttcgggtgcgagaggtcccgg

SEQ ID NO: 6808 - DNA, 16 bp, Homo Sapiens
atgattctcgctttgg

SEQ ID NO: 6809 - DNA, 19 bp, Homo Sapiens
atgattctcgctttgggtg

SEQ ID NO: 6810 - DNA, 32 bp, Homo Sapiens
atgattctcgctttgggtgcgagaggtcccgg

SEQ ID NO: 6811 - DNA, 24 bp, Homo Sapiens
atgattctcggtttgggtccgaga

SEQ ID NO: 6812 - DNA, 32 bp, Homo Sapiens
atgattctcggtttgggtccgagaggtcccgg

SEQ ID NO: 6813 - DNA, 16 bp, Homo Sapiens
atgatttcgactcatt

SEQ ID NO: 6814 - DNA, 20 bp, Homo Sapiens
atgatttcgactcattaaat

SEQ ID NO: 6815 - DNA, 25 bp, Homo Sapiens
atgatttcgactcattaaattatga

SEQ ID NO: 6816 - DNA, 26 bp, Homo Sapiens
atgatttcgactcattaaattatgat

SEQ ID NO: 6817 - DNA, 27 bp, Homo Sapiens
atgatttcgactcattaaattatgata

SEQ ID NO: 6818 - DNA, 28 bp, Homo Sapiens
atgatttcgactcattaaattatgataa

SEQ ID NO: 6819 - DNA, 29 bp, Homo Sapiens
atgatttcgactcattaaattatgataat

SEQ ID NO: 6820 - DNA, 30 bp, Homo Sapiens
atgatttcgactcattaaattatgataatc

SEQ ID NO: 6821 - DNA, 31 bp, Homo Sapiens
atgatttcgactcattaaattatgataatca

SEQ ID NO: 6822 - DNA, 41 bp, Homo Sapiens
atgatttcgactcattaaattatgataatcatatttaccaa

SEQ ID NO: 6823 - DNA, 42 bp, Homo Sapiens
atgatttcgactcattaaattatgataatcatatttaccaac

SEQ ID NO: 6824 - DNA, 43 bp, Homo Sapiens
atgatttcgactcattaaattatgataatcatatttaccaacc

SEQ ID NO: 6825 - DNA, 44 bp, Homo Sapiens
atgatttcgactcattaaattatgataatcatatttaccaacca

SEQ ID NO: 6826 - DNA, 30 bp, Homo Sapiens
atgcaagattcccattcttgcgacccgggt

SEQ ID NO: 6827 - DNA, 17 bp, Homo Sapiens
atgcagagtggggtttt

SEQ ID NO: 6828 - DNA, 18 bp, Homo Sapiens
atgcagagtggggttttg

SEQ ID NO: 6829 - DNA, 19 bp, Homo Sapiens
atgcagagtggggttttgc

SEQ ID NO: 6830 - DNA, 24 bp, Homo Sapiens
atgcagagtggggttttgcagtcc

SEQ ID NO: 6831 - DNA, 25 bp, Homo Sapiens
atgcagagtggggttttgcagtcct

SEQ ID NO: 6832 - DNA, 27 bp, Homo Sapiens
atgcagagtggggttttgcagtcctta

SEQ ID NO: 6833 - DNA, 28 bp, Homo Sapiens
atgcagagtggggttttgcagtccttac

SEQ ID NO: 6834 - DNA, 29 bp, Homo Sapiens
atgcagagtggggttttgcagtccttacc

SEQ ID NO: 6835 - DNA, 30 bp, Homo Sapiens
atgcagagtggggttttgcagtccttacca

SEQ ID NO: 6836 - DNA, 16 bp, Homo Sapiens
atgcccccatgtctaa

SEQ ID NO: 6837 - DNA, 17 bp, Homo Sapiens
atgcccccatgtctaac

SEQ ID NO: 6838 - DNA, 19 bp, Homo Sapiens
atgcccccatgtctaacaa

SEQ ID NO: 6839 - DNA, 20 bp, Homo Sapiens
atgcccccatgtctaacaac

SEQ ID NO: 6840 - DNA, 21 bp, Homo Sapiens
atgcccccatgtctaacaaca

SEQ ID NO: 6841 - DNA, 24 bp, Homo Sapiens
atgcccccatgtctaacaacatgg

SEQ ID NO: 6842 - DNA, 25 bp, Homo Sapiens
atgcccccatgtctaacaacatggc

SEQ ID NO: 6843 - DNA, 26 bp, Homo Sapiens
atgcccccatgtctaacaacatggct

SEQ ID NO: 6844 - DNA, 27 bp, Homo Sapiens
atgcccccatgtctaacaacatggctt

SEQ ID NO: 6845 - DNA, 28 bp, Homo Sapiens
atgcccccatgtctaacaacatggcttt

SEQ ID NO: 6846 - DNA, 29 bp, Homo Sapiens
atgcccccatgtctaacaacatggctttc

SEQ ID NO: 6847 - DNA, 30 bp, Homo Sapiens
atgcccccatgtctaacaacatggctttct

SEQ ID NO: 6848 - DNA, 31 bp, Homo Sapiens
atgcccccatgtctaacaacatggctttctc

SEQ ID NO: 6849 - DNA, 32 bp, Homo Sapiens
atgcccccatgtctaacaacatggctttctca

SEQ ID NO: 6850 - DNA, 33 bp, Homo Sapiens
atgcccccatgtctaacaacatggctttctcac

SEQ ID NO: 6851 - DNA, 34 bp, Homo Sapiens
atgcccccatgtctaacaacatggctttctcacc

SEQ ID NO: 6852 - DNA, 35 bp, Homo Sapiens
atgcccccatgtctaacaacatggctttctcacca

SEQ ID NO: 6853 - DNA, 19 bp, Homo Sapiens
atgcccgcatcctccacca

SEQ ID NO: 6854 - DNA, 19 bp, Homo Sapiens
atgccgaggttgtgagttc

SEQ ID NO: 6855 - DNA, 25 bp, Homo Sapiens
atgccgaggttgtgagttcgagcct

SEQ ID NO: 6856 - DNA, 32 bp, Homo Sapiens
atgccgaggttgtgagttcgagcctcacctgg

SEQ ID NO: 6857 - DNA, 33 bp, Homo Sapiens
atgccgaggttgtgagttcgagcctcacctgga

SEQ ID NO: 6858 - DNA, 38 bp, Homo Sapiens
atgccgaggttgtgagttcgagcctcacctggagcacc

SEQ ID NO: 6859 - DNA, 22 bp, Homo Sapiens
atgccgaggttgtgagttcgat

SEQ ID NO: 6860 - DNA, 23 bp, Homo Sapiens
atgccgaggttgtgagttcgatc

SEQ ID NO: 6861 - DNA, 24 bp, Homo Sapiens
atgccgaggttgtgagttcgatcc

SEQ ID NO: 6862 - DNA, 25 bp, Homo Sapiens
atgccgaggttgtgagttcgatcct

SEQ ID NO: 6863 - DNA, 21 bp, Homo Sapiens
atgctttgcacgtatgaggcc

SEQ ID NO: 6864 - DNA, 24 bp, Homo Sapiens
atgctttgcacgtatgaggccccg

SEQ ID NO: 6865 - DNA, 25 bp, Homo Sapiens
atgctttgcacgtatgaggccccgg

SEQ ID NO: 6866 - DNA, 26 bp, Homo Sapiens
atgctttgcacgtatgaggccccggg

SEQ ID NO: 6867 - DNA, 38 bp, Homo Sapiens
atgctttgcacgtatgaggccccgggttcaatccccgg

SEQ ID NO: 6868 - DNA, 24 bp, Homo Sapiens
atggacatatgtccgcgtgggttc

SEQ ID NO: 6869 - DNA, 29 bp, Homo Sapiens
atggacatatgtccgcgtgggttcgaacc

SEQ ID NO: 6870 - DNA, 30 bp, Homo Sapiens
atggacatatgtccgcgtgggttcgaaccc

SEQ ID NO: 6871 - DNA, 16 bp, Homo Sapiens
atggacgagcgcgctg

SEQ ID NO: 6872 - DNA, 18 bp, Homo Sapiens
atggacgagcgcgctgga

SEQ ID NO: 6873 - DNA, 19 bp, Homo Sapiens
atggacgagcgcgctggac

SEQ ID NO: 6874 - DNA, 23 bp, Homo Sapiens
atggacgagcgcgctggacttct

SEQ ID NO: 6875 - DNA, 23 bp, Homo Sapiens
atggactgctaatccattgtgct

SEQ ID NO: 6876 - DNA, 37 bp, Homo Sapiens
atggactgctaatccattgtgctctgcacgcgtgggt

SEQ ID NO: 6877 - DNA, 37 bp, Homo Sapiens
atggactgctaatccattgtgctttgcacgcgtgggt

SEQ ID NO: 6878 - DNA, 16 bp, Homo Sapiens
atggaggccatggggt

SEQ ID NO: 6879 - DNA, 17 bp, Homo Sapiens
atggaggccatggggtt

SEQ ID NO: 6880 - DNA, 18 bp, Homo Sapiens
atggaggccatggggttg

SEQ ID NO: 6881 - DNA, 20 bp, Homo Sapiens
atggaggccatggggttggc

SEQ ID NO: 6882 - DNA, 16 bp, Homo Sapiens
atggaggcgtgggttc

SEQ ID NO: 6883 - DNA, 17 bp, Homo Sapiens
atggaggcgtgggttcg

SEQ ID NO: 6884 - DNA, 19 bp, Homo Sapiens
atggaggcgtgggttcgaa

SEQ ID NO: 6885 - DNA, 22 bp, Homo Sapiens
atggaggcgtgggttcgaatcc

SEQ ID NO: 6886 - DNA, 23 bp, Homo Sapiens
atggaggcgtgggttcgaatccc

SEQ ID NO: 6887 - DNA, 24 bp, Homo Sapiens
atggaggcgtgggttcgaatccca

SEQ ID NO: 6888 - DNA, 26 bp, Homo Sapiens
atggaggcgtgggttcgaatcccact

SEQ ID NO: 6889 - DNA, 30 bp, Homo Sapiens
atggaggcgtgggttcgaatcccacttctg

SEQ ID NO: 6890 - DNA, 33 bp, Homo Sapiens
atggaggcgtgggttcgaatcccacttctgaca

SEQ ID NO: 6891 - DNA, 34 bp, Homo Sapiens
atggaggcgtgggttcgaatcccacttctgacac

SEQ ID NO: 6892 - DNA, 35 bp, Homo Sapiens
atggaggcgtgggttcgaatcccacttctgacacc

SEQ ID NO: 6893 - DNA, 36 bp, Homo Sapiens
atggaggcgtgggttcgaatcccacttctgacacca

SEQ ID NO: 6894 - DNA, 17 bp, Homo Sapiens
atggataacgcgtctga

SEQ ID NO: 6895 - DNA, 19 bp, Homo Sapiens
atggataacgcgtctgact

SEQ ID NO: 6896 - DNA, 16 bp, Homo Sapiens
atggataaggcactgg

SEQ ID NO: 6897 - DNA, 17 bp, Homo Sapiens
atggataaggcactggc

SEQ ID NO: 6898 - DNA, 18 bp, Homo Sapiens
atggataaggcactggcc

SEQ ID NO: 6899 - DNA, 21 bp, Homo Sapiens
atggataaggcactggcctcc

SEQ ID NO: 6900 - DNA, 16 bp, Homo Sapiens
atggataaggcatcag

SEQ ID NO: 6901 - DNA, 17 bp, Homo Sapiens
atggataaggcatcagc

SEQ ID NO: 6902 - DNA, 18 bp, Homo Sapiens
atggataaggcatcagcc

SEQ ID NO: 6903 - DNA, 19 bp, Homo Sapiens
atggataaggcatcagcct

SEQ ID NO: 6904 - DNA, 20 bp, Homo Sapiens
atggataaggcatcagcctc

SEQ ID NO: 6905 - DNA, 21 bp, Homo Sapiens
atggataaggcatcagcctcc

SEQ ID NO: 6906 - DNA, 22 bp, Homo Sapiens
atggataaggcatcagcctccg

SEQ ID NO: 6907 - DNA, 28 bp, Homo Sapiens
atggataaggcatcagcctccggagctg

SEQ ID NO: 6908 - DNA, 29 bp, Homo Sapiens
atggataaggcatcagcctccggagctgg

SEQ ID NO: 6909 - DNA, 31 bp, Homo Sapiens
atggataaggcatcagcctccggagctgggg

SEQ ID NO: 6910 - DNA, 36 bp, Homo Sapiens
atggataaggcatcagcctccggagctggggattgt

SEQ ID NO: 6911 - DNA, 16 bp, Homo Sapiens
atggataaggcattgg

SEQ ID NO: 6912 - DNA, 17 bp, Homo Sapiens
atggataaggcattggc

SEQ ID NO: 6913 - DNA, 18 bp, Homo Sapiens
atggataaggcattggcc

SEQ ID NO: 6914 - DNA, 19 bp, Homo Sapiens
atggataaggcattggcct

SEQ ID NO: 6915 - DNA, 21 bp, Homo Sapiens
atggataaggcattggcctcc

SEQ ID NO: 6916 - DNA, 29 bp, Homo Sapiens
atggataaggcattggcctcctaagccag

SEQ ID NO: 6917 - DNA, 16 bp, Homo Sapiens
atggataaggcgtctg

SEQ ID NO: 6918 - DNA, 17 bp, Homo Sapiens
atggataaggcgtctga

SEQ ID NO: 6919 - DNA, 18 bp, Homo Sapiens
atggataaggcgtctgac

SEQ ID NO: 6920 - DNA, 19 bp, Homo Sapiens
atggataaggcgtctgact

SEQ ID NO: 6921 - DNA, 22 bp, Homo Sapiens
atggataaggcgtctgacttcg

SEQ ID NO: 6922 - DNA, 19 bp, Homo Sapiens
atggataaggcgtctgatt

SEQ ID NO: 6923 - DNA, 21 bp, Homo Sapiens
atggataaggcgtctgattcc

SEQ ID NO: 6924 - DNA, 16 bp, Homo Sapiens
atggatagcgcattgg

SEQ ID NO: 6925 - DNA, 17 bp, Homo Sapiens
atggatagcgcattgga

SEQ ID NO: 6926 - DNA, 18 bp, Homo Sapiens
atggatagcgcattggac

SEQ ID NO: 6927 - DNA, 19 bp, Homo Sapiens
atggatagcgcattggact

SEQ ID NO: 6928 - DNA, 21 bp, Homo Sapiens
atggatagcgcattggacttc

SEQ ID NO: 6929 - DNA, 22 bp, Homo Sapiens
atggatagcgcattggacttct

SEQ ID NO: 6930 - DNA, 26 bp, Homo Sapiens
atggatagcgcattggacttctaatt

SEQ ID NO: 6931 - DNA, 23 bp, Homo Sapiens
atggatcgaaaccatcctctgct

SEQ ID NO: 6932 - DNA, 25 bp, Homo Sapiens
atggatcgaaaccatcctctgctac

SEQ ID NO: 6933 - DNA, 26 bp, Homo Sapiens
atggatcgaaaccatcctctgctacc

SEQ ID NO: 6934 - DNA, 27 bp, Homo Sapiens
atggatcgaaaccatcctctgctacca

SEQ ID NO: 6935 - DNA, 23 bp, Homo Sapiens
atggattcatatccgcgtgggtt

SEQ ID NO: 6936 - DNA, 16 bp, Homo Sapiens
atggcagagcccggta

SEQ ID NO: 6937 - DNA, 17 bp, Homo Sapiens
atggcagagcccggtaa

SEQ ID NO: 6938 - DNA, 18 bp, Homo Sapiens
atggcagagcccggtaat

SEQ ID NO: 6939 - DNA, 19 bp, Homo Sapiens
atggcagagcccggtaatc

SEQ ID NO: 6940 - DNA, 20 bp, Homo Sapiens
atggcagagcccggtaatcg

SEQ ID NO: 6941 - DNA, 24 bp, Homo Sapiens
atggcagagcccggtaatcgcata

SEQ ID NO: 6942 - DNA, 27 bp, Homo Sapiens
atggcagagcccggtaatcgcataaaa

SEQ ID NO: 6943 - DNA, 35 bp, Homo Sapiens
atggcagagcccggtaatcgcataaaacttaaaac

SEQ ID NO: 6944 - DNA, 36 bp, Homo Sapiens
atggcagagcccggtaatcgcataaaacttaaaact

SEQ ID NO: 6945 - DNA, 37 bp, Homo Sapiens
atggcagagcccggtaatcgcataaaacttaaaactt

SEQ ID NO: 6946 - DNA, 16 bp, Homo Sapiens
atggccgagcggtcta

SEQ ID NO: 6947 - DNA, 20 bp, Homo Sapiens
atggccgagcggtctaaggc

SEQ ID NO: 6948 - DNA, 20 bp, Homo Sapiens
atggccgagtggtctaaggc

SEQ ID NO: 6949 - DNA, 17 bp, Homo Sapiens
atggccgagtggttaag

SEQ ID NO: 6950 - DNA, 21 bp, Homo Sapiens
atggcgtgggttcgaatccca

SEQ ID NO: 6951 - DNA, 27 bp, Homo Sapiens
atggcgtgggttcgaatcccaccgctg

SEQ ID NO: 6952 - DNA, 32 bp, Homo Sapiens
atggcgtgggttcgaatcccaccgctgccacc

SEQ ID NO: 6953 - DNA, 22 bp, Homo Sapiens
atggctgagtgaagcattggac

SEQ ID NO: 6954 - DNA, 23 bp, Homo Sapiens
atggctgagtgaagcattggact

SEQ ID NO: 6955 - DNA, 24 bp, Homo Sapiens
atggctgagtgaagcattggactg

SEQ ID NO: 6956 - DNA, 25 bp, Homo Sapiens
atggctgagtgaagcattggactgt

SEQ ID NO: 6957 - DNA, 26 bp, Homo Sapiens
atggctgagtgaagcattggactgta

SEQ ID NO: 6958 - DNA, 27 bp, Homo Sapiens
atggctgagtgaagcattggactgtaa

SEQ ID NO: 6959 - DNA, 28 bp, Homo Sapiens
atggctgagtgaagcattggactgtaaa

SEQ ID NO: 6960 - DNA, 18 bp, Homo Sapiens
atggctgagtggttaagg

SEQ ID NO: 6961 - DNA, 16 bp, Homo Sapiens
atgggactcttaatcc

SEQ ID NO: 6962 - DNA, 17 bp, Homo Sapiens
atgggactcttaatccc

SEQ ID NO: 6963 - DNA, 25 bp, Homo Sapiens
atgggactcttaatcccagggtcgt

SEQ ID NO: 6964 - DNA, 28 bp, Homo Sapiens
atgggactcttaatcccagggtcgtggg

SEQ ID NO: 6965 - DNA, 30 bp, Homo Sapiens
atgggactcttaatcccagggtcgtgggtt

SEQ ID NO: 6966 - DNA, 17 bp, Homo Sapiens
atgggactcttaatctc

SEQ ID NO: 6967 - DNA, 23 bp, Homo Sapiens
atggggtctccccgcgcaggttc

SEQ ID NO: 6968 - DNA, 19 bp, Homo Sapiens
atggggtgtgataggtggc

SEQ ID NO: 6969 - DNA, 20 bp, Homo Sapiens
atggggtgtgataggtggca

SEQ ID NO: 6970 - DNA, 22 bp, Homo Sapiens
atggggtgtgataggtggcacg

SEQ ID NO: 6971 - DNA, 25 bp, Homo Sapiens
atggggtgtgataggtggcacggag

SEQ ID NO: 6972 - DNA, 26 bp, Homo Sapiens
atggggtgtgataggtggcacggaga

SEQ ID NO: 6973 - DNA, 27 bp, Homo Sapiens
atggggtgtgataggtggcacggagaa

SEQ ID NO: 6974 - DNA, 28 bp, Homo Sapiens
atggggtgtgataggtggcacggagaat

SEQ ID NO: 6975 - DNA, 29 bp, Homo Sapiens
atggggtgtgataggtggcacggagaatt

SEQ ID NO: 6976 - DNA, 30 bp, Homo Sapiens
atggggtgtgataggtggcacggagaattt

SEQ ID NO: 6977 - DNA, 31 bp, Homo Sapiens
atggggtgtgataggtggcacggagaatttt

SEQ ID NO: 6978 - DNA, 32 bp, Homo Sapiens
atggggtgtgataggtggcacggagaattttg

SEQ ID NO: 6979 - DNA, 33 bp, Homo Sapiens
atggggtgtgataggtggcacggagaattttgg

SEQ ID NO: 6980 - DNA, 16 bp, Homo Sapiens
atggggttggcttgaa

SEQ ID NO: 6981 - DNA, 16 bp, Homo Sapiens
atgggtggttcagtgg

SEQ ID NO: 6982 - DNA, 17 bp, Homo Sapiens
atgggtggttcagtggt

SEQ ID NO: 6983 - DNA, 18 bp, Homo Sapiens
atgggtggttcagtggta

SEQ ID NO: 6984 - DNA, 19 bp, Homo Sapiens
atgggtggttcagtggtag

SEQ ID NO: 6985 - DNA, 20 bp, Homo Sapiens
atgggtggttcagtggtaga

SEQ ID NO: 6986 - DNA, 21 bp, Homo Sapiens
atgggtggttcagtggtagaa

SEQ ID NO: 6987 - DNA, 22 bp, Homo Sapiens
atgggtggttcagtggtagaat

SEQ ID NO: 6988 - DNA, 23 bp, Homo Sapiens
atgggtggttcagtggtagaatt

SEQ ID NO: 6989 - DNA, 24 bp, Homo Sapiens
atgggtggttcagtggtagaattc

SEQ ID NO: 6990 - DNA, 25 bp, Homo Sapiens
atgggtggttcagtggtagaattct

SEQ ID NO: 6991 - DNA, 26 bp, Homo Sapiens
atgggtggttcagtggtagaattctc

SEQ ID NO: 6992 - DNA, 27 bp, Homo Sapiens
atgggtggttcagtggtagaattctcg

SEQ ID NO: 6993 - DNA, 28 bp, Homo Sapiens
atgggtggttcagtggtagaattctcgc

SEQ ID NO: 6994 - DNA, 29 bp, Homo Sapiens
atgggtggttcagtggtagaattctcgcc

SEQ ID NO: 6995 - DNA, 30 bp, Homo Sapiens
atgggtggttcagtggtagaattctcgcct

SEQ ID NO: 6996 - DNA, 31 bp, Homo Sapiens
atgggtggttcagtggtagaattctcgcctg

SEQ ID NO: 6997 - DNA, 32 bp, Homo Sapiens
atgggtggttcagtggtagaattctcgcctgc

SEQ ID NO: 6998 - DNA, 33 bp, Homo Sapiens
atgggtggttcagtggtagaattctcgcctgcc

SEQ ID NO: 6999 - DNA, 34 bp, Homo Sapiens
atgggtggttcagtggtagaattctcgcctgcca

SEQ ID NO: 7000 - DNA, 35 bp, Homo Sapiens
atgggtggttcagtggtagaattctcgcctgccac

SEQ ID NO: 7001 - DNA, 36 bp, Homo Sapiens
atgggtggttcagtggtagaattctcgcctgccacg

SEQ ID NO: 7002 - DNA, 37 bp, Homo Sapiens
atgggtggttcagtggtagaattctcgcctgccacgc

SEQ ID NO: 7003 - DNA, 38 bp, Homo Sapiens
atgggtggttcagtggtagaattctcgcctgccacgcg

SEQ ID NO: 7004 - DNA, 39 bp, Homo Sapiens
atgggtggttcagtggtagaattctcgcctgccacgcgg

SEQ ID NO: 7005 - DNA, 40 bp, Homo Sapiens
atgggtggttcagtggtagaattctcgcctgccacgcggg

SEQ ID NO: 7006 - DNA, 41 bp, Homo Sapiens
atgggtggttcagtggtagaattctcgcctgccacgcggga

SEQ ID NO: 7007 - DNA, 42 bp, Homo Sapiens
atgggtggttcagtggtagaattctcgcctgccacgcgggag

SEQ ID NO: 7008 - DNA, 43 bp, Homo Sapiens
atgggtggttcagtggtagaattctcgcctgccacgcgggagg

SEQ ID NO: 7009 - DNA, 44 bp, Homo Sapiens
atgggtggttcagtggtagaattctcgcctgccacgcgggaggc

SEQ ID NO: 7010 - DNA, 45 bp, Homo Sapiens
atgggtggttcagtggtagaattctcgcctgccacgcgggaggcc

SEQ ID NO: 7011 - DNA, 46 bp, Homo Sapiens
atgggtggttcagtggtagaattctcgcctgccacgcgggaggccc

SEQ ID NO: 7012 - DNA, 47 bp, Homo Sapiens
atgggtggttcagtggtagaattctcgcctgccacgcgggaggcccg

SEQ ID NO: 7013 - DNA, 23 bp, Homo Sapiens
atgggttcgattctcatagtcct

SEQ ID NO: 7014 - DNA, 25 bp, Homo Sapiens
atgggttcgattctcatagtcctag

SEQ ID NO: 7015 - DNA, 26 bp, Homo Sapiens
atgggttcgattctcatagtcctagc

SEQ ID NO: 7016 - DNA, 27 bp, Homo Sapiens
atgggttcgattctcatagtcctagcc

SEQ ID NO: 7017 - DNA, 28 bp, Homo Sapiens
atgggttcgattctcatagtcctagcca

SEQ ID NO: 7018 - DNA, 16 bp, Homo Sapiens
atggtaagcactctgg

SEQ ID NO: 7019 - DNA, 17 bp, Homo Sapiens
atggtaagcactctgga

SEQ ID NO: 7020 - DNA, 19 bp, Homo Sapiens
atggtaagcactctggact

SEQ ID NO: 7021 - DNA, 24 bp, Homo Sapiens
atggtaagcactctggactctgaa

SEQ ID NO: 7022 - DNA, 28 bp, Homo Sapiens
atggtaagcactctggactctgaatcca

SEQ ID NO: 7023 - DNA, 16 bp, Homo Sapiens
atggtagagcgctcgc

SEQ ID NO: 7024 - DNA, 17 bp, Homo Sapiens
atggtagagcgctcgct

SEQ ID NO: 7025 - DNA, 19 bp, Homo Sapiens
atggtcagcactctggact

SEQ ID NO: 7026 - DNA, 19 bp, Homo Sapiens
atggtctagcggttaggat

SEQ ID NO: 7027 - DNA, 20 bp, Homo Sapiens
atggtctagcggttaggatt

SEQ ID NO: 7028 - DNA, 22 bp, Homo Sapiens
atggtctagcggttaggattcc

SEQ ID NO: 7029 - DNA, 23 bp, Homo Sapiens
atggtctagcggttaggattcct

SEQ ID NO: 7030 - DNA, 24 bp, Homo Sapiens
atggtctagcggttaggattcctg

SEQ ID NO: 7031 - DNA, 25 bp, Homo Sapiens
atggtctagcggttaggattcctgg

SEQ ID NO: 7032 - DNA, 26 bp, Homo Sapiens
atggtctagcggttaggattcctggt

SEQ ID NO: 7033 - DNA, 27 bp, Homo Sapiens
atggtctagcggttaggattcctggtt

SEQ ID NO: 7034 - DNA, 28 bp, Homo Sapiens
atggtctagcggttaggattcctggttt

SEQ ID NO: 7035 - DNA, 29 bp, Homo Sapiens
atggtctagcggttaggattcctggtttt

SEQ ID NO: 7036 - DNA, 30 bp, Homo Sapiens
atggtctagcggttaggattcctggttttc

SEQ ID NO: 7037 - DNA, 31 bp, Homo Sapiens
atggtctagcggttaggattcctggttttca

SEQ ID NO: 7038 - DNA, 32 bp, Homo Sapiens
atggtctagcggttaggattcctggttttcac

SEQ ID NO: 7039 - DNA, 35 bp, Homo Sapiens
atggtctagcggttaggattcctggttttcaccca

SEQ ID NO: 7040 - DNA, 38 bp, Homo Sapiens
atggtctagcggttaggattcctggttttcacccaggc

SEQ ID NO: 7041 - DNA, 16 bp, Homo Sapiens
atggtgagcactctgg

SEQ ID NO: 7042 - DNA, 17 bp, Homo Sapiens
atggtgagcactctgga

SEQ ID NO: 7043 - DNA, 18 bp, Homo Sapiens
atggtgagcactctggac

SEQ ID NO: 7044 - DNA, 19 bp, Homo Sapiens
atggtgagcactctggact

SEQ ID NO: 7045 - DNA, 20 bp, Homo Sapiens
atggtgagcactctggactc

SEQ ID NO: 7046 - DNA, 21 bp, Homo Sapiens
atggtgagcactctggactct

SEQ ID NO: 7047 - DNA, 22 bp, Homo Sapiens
atggtgagcactctggactctg

SEQ ID NO: 7048 - DNA, 23 bp, Homo Sapiens
atggtgagcactctggactctga

SEQ ID NO: 7049 - DNA, 26 bp, Homo Sapiens
atggtgagcactctggactctgaatc

SEQ ID NO: 7050 - DNA, 27 bp, Homo Sapiens
atggtgagcactctggactctgaatcc

SEQ ID NO: 7051 - DNA, 28 bp, Homo Sapiens
atggtgagcactctggactctgaatcca

SEQ ID NO: 7052 - DNA, 30 bp, Homo Sapiens
atggtgagcactctggactctgaatccagc

SEQ ID NO: 7053 - DNA, 31 bp, Homo Sapiens
atggtgagcactctggactctgaatccagcg

SEQ ID NO: 7054 - DNA, 35 bp, Homo Sapiens
atggtgagcactctggactctgaatccagcgatcc

SEQ ID NO: 7055 - DNA, 17 bp, Homo Sapiens
atggtgagcactttgga

SEQ ID NO: 7056 - DNA, 16 bp, Homo Sapiens
atggtggagttaaaga

SEQ ID NO: 7057 - DNA, 17 bp, Homo Sapiens
atggtggagttaaagac

SEQ ID NO: 7058 - DNA, 18 bp, Homo Sapiens
atggtggagttaaagact

SEQ ID NO: 7059 - DNA, 19 bp, Homo Sapiens
atggtggagttaaagactt

SEQ ID NO: 7060 - DNA, 20 bp, Homo Sapiens
atggtggagttaaagacttt

SEQ ID NO: 7061 - DNA, 21 bp, Homo Sapiens
atggtggagttaaagactttt

SEQ ID NO: 7062 - DNA, 22 bp, Homo Sapiens
atggtggagttaaagacttttt

SEQ ID NO: 7063 - DNA, 25 bp, Homo Sapiens
atggtggagttaaagactttttctc

SEQ ID NO: 7064 - DNA, 26 bp, Homo Sapiens
atggtggagttaaagactttttctct

SEQ ID NO: 7065 - DNA, 27 bp, Homo Sapiens
atggtggagttaaagactttttctctg

SEQ ID NO: 7066 - DNA, 28 bp, Homo Sapiens
atggtggagttaaagactttttctctga

SEQ ID NO: 7067 - DNA, 29 bp, Homo Sapiens
atggtggagttaaagactttttctctgac

SEQ ID NO: 7068 - DNA, 30 bp, Homo Sapiens
atggtggagttaaagactttttctctgacc

SEQ ID NO: 7069 - DNA, 31 bp, Homo Sapiens
atggtggagttaaagactttttctctgacca

SEQ ID NO: 7070 - DNA, 25 bp, Homo Sapiens
atggtggttcagtggtagaattctc

SEQ ID NO: 7071 - DNA, 27 bp, Homo Sapiens
atggtggttcagtggtagaattctcgc

SEQ ID NO: 7072 - DNA, 29 bp, Homo Sapiens
atggtggttcagtggtagaattctcgcct

SEQ ID NO: 7073 - DNA, 27 bp, Homo Sapiens
atggtgtaatggtaagcactctggact

SEQ ID NO: 7074 - DNA, 27 bp, Homo Sapiens
atggtgtaatggtcagcactctggact

SEQ ID NO: 7075 - DNA, 17 bp, Homo Sapiens
atggtgtaatggtgagc

SEQ ID NO: 7076 - DNA, 25 bp, Homo Sapiens
atggtgtaatggtgagcactctgga

SEQ ID NO: 7077 - DNA, 26 bp, Homo Sapiens
atggtgtaatggtgagcactctggac

SEQ ID NO: 7078 - DNA, 28 bp, Homo Sapiens
atggtgtaatggtgagcactctggactc

SEQ ID NO: 7079 - DNA, 29 bp, Homo Sapiens
atggtgtaatggtgagcactctggactct

SEQ ID NO: 7080 - DNA, 30 bp, Homo Sapiens
atggtgtaatggtgagcactctggactctg

SEQ ID NO: 7081 - DNA, 29 bp, Homo Sapiens
atggtgtaatggtgagcactttggactct

SEQ ID NO: 7082 - DNA, 17 bp, Homo Sapiens
atggtgtaatggttagc

SEQ ID NO: 7083 - DNA, 18 bp, Homo Sapiens
atggtgtaatggttagca

SEQ ID NO: 7084 - DNA, 21 bp, Homo Sapiens
atggtgtaatggttagcactc

SEQ ID NO: 7085 - DNA, 23 bp, Homo Sapiens
atggtgtaatggttagcactctg

SEQ ID NO: 7086 - DNA, 24 bp, Homo Sapiens
atggtgtaatggttagcactctgg

SEQ ID NO: 7087 - DNA, 25 bp, Homo Sapiens
atggtgtaatggttagcactctgga

SEQ ID NO: 7088 - DNA, 26 bp, Homo Sapiens
atggtgtaatggttagcactctggac

SEQ ID NO: 7089 - DNA, 27 bp, Homo Sapiens
atggtgtaatggttagcactctggact

SEQ ID NO: 7090 - DNA, 28 bp, Homo Sapiens
atggtgtaatggttagcactctggactc

SEQ ID NO: 7091 - DNA, 29 bp, Homo Sapiens
atggtgtaatggttagcactctggactct

SEQ ID NO: 7092 - DNA, 30 bp, Homo Sapiens
atggtgtaatggttagcactctggactctg

SEQ ID NO: 7093 - DNA, 31 bp, Homo Sapiens
atggtgtaatggttagcactctggactctga

SEQ ID NO: 7094 - DNA, 32 bp, Homo Sapiens
atggtgtaatggttagcactctggactctgaa

SEQ ID NO: 7095 - DNA, 34 bp, Homo Sapiens
atggtgtaatggttagcactctggactctgaatc

SEQ ID NO: 7096 - DNA, 28 bp, Homo Sapiens
atggtgtaatggttagcactctggactt

SEQ ID NO: 7097 - DNA, 30 bp, Homo Sapiens
atggtgtaatggttagcactctggactttg

SEQ ID NO: 7098 - DNA, 16 bp, Homo Sapiens
atggttagcactctgg

SEQ ID NO: 7099 - DNA, 17 bp, Homo Sapiens
atggttagcactctgga

SEQ ID NO: 7100 - DNA, 18 bp, Homo Sapiens
atggttagcactctggac

SEQ ID NO: 7101 - DNA, 19 bp, Homo Sapiens
atggttagcactctggact

SEQ ID NO: 7102 - DNA, 20 bp, Homo Sapiens
atggttagcactctggactc

SEQ ID NO: 7103 - DNA, 21 bp, Homo Sapiens
atggttagcactctggactct

SEQ ID NO: 7104 - DNA, 22 bp, Homo Sapiens
atggttagcactctggactctg

SEQ ID NO: 7105 - DNA, 23 bp, Homo Sapiens
atggttagcactctggactctga

SEQ ID NO: 7106 - DNA, 24 bp, Homo Sapiens
atggttagcactctggactctgaa

SEQ ID NO: 7107 - DNA, 25 bp, Homo Sapiens
atggttagcactctggactctgaat

SEQ ID NO: 7108 - DNA, 26 bp, Homo Sapiens
atggttagcactctggactctgaatc

SEQ ID NO: 7109 - DNA, 27 bp, Homo Sapiens
atggttagcactctggactctgaatcc

SEQ ID NO: 7110 - DNA, 28 bp, Homo Sapiens
atggttagcactctggactctgaatcca

SEQ ID NO: 7111 - DNA, 30 bp, Homo Sapiens
atggttagcactctggactctgaatccagc

SEQ ID NO: 7112 - DNA, 31 bp, Homo Sapiens
atggttagcactctggactctgaatccagcg

SEQ ID NO: 7113 - DNA, 34 bp, Homo Sapiens
atggttagcactctggactctgaatccagcgatc

SEQ ID NO: 7114 - DNA, 35 bp, Homo Sapiens
atggttagcactctggactctgaatccagcgatcc

SEQ ID NO: 7115 - DNA, 37 bp, Homo Sapiens
atggttagcactctggactctgaatccagcgatccga

SEQ ID NO: 7116 - DNA, 38 bp, Homo Sapiens
atggttagcactctggactctgaatccagcgatccgag

SEQ ID NO: 7117 - DNA, 39 bp, Homo Sapiens
atggttagcactctggactctgaatccagcgatccgagt

SEQ ID NO: 7118 - DNA, 41 bp, Homo Sapiens
atggttagcactctggactctgaatccagcgatccgagttc

SEQ ID NO: 7119 - DNA, 42 bp, Homo Sapiens
atggttagcactctggactctgaatccagcgatccgagttca

SEQ ID NO: 7120 - DNA, 20 bp, Homo Sapiens
atggttagcactctggactt

SEQ ID NO: 7121 - DNA, 22 bp, Homo Sapiens
atggttagcactctggactttg

SEQ ID NO: 7122 - DNA, 23 bp, Homo Sapiens
atggttagcactctggactttga

SEQ ID NO: 7123 - DNA, 24 bp, Homo Sapiens
atggttagcactctggactttgaa

SEQ ID NO: 7124 - DNA, 25 bp, Homo Sapiens
atggttagcactctggactttgaat

SEQ ID NO: 7125 - DNA, 26 bp, Homo Sapiens
atggttagcactctggactttgaatc

SEQ ID NO: 7126 - DNA, 27 bp, Homo Sapiens
atggttagcactctggactttgaatcc

SEQ ID NO: 7127 - DNA, 28 bp, Homo Sapiens
atggttagcactctggactttgaatcca

SEQ ID NO: 7128 - DNA, 30 bp, Homo Sapiens
atggttagcactctggactttgaatccagc

SEQ ID NO: 7129 - DNA, 42 bp, Homo Sapiens
atggttagcactctggactttgaatccagcgatccgagttca

SEQ ID NO: 7130 - DNA, 22 bp, Homo Sapiens
atggtttttcatatcattggtc

SEQ ID NO: 7131 - DNA, 23 bp, Homo Sapiens
atggtttttcatatcattggtcg

SEQ ID NO: 7132 - DNA, 24 bp, Homo Sapiens
atggtttttcatatcattggtcgt

SEQ ID NO: 7133 - DNA, 25 bp, Homo Sapiens
atggtttttcatatcattggtcgtg

SEQ ID NO: 7134 - DNA, 26 bp, Homo Sapiens
atggtttttcatatcattggtcgtgg

SEQ ID NO: 7135 - DNA, 27 bp, Homo Sapiens
atggtttttcatatcattggtcgtggt

SEQ ID NO: 7136 - DNA, 28 bp, Homo Sapiens
atggtttttcatatcattggtcgtggtt

SEQ ID NO: 7137 - DNA, 29 bp, Homo Sapiens
atggtttttcatatcattggtcgtggttg

SEQ ID NO: 7138 - DNA, 30 bp, Homo Sapiens
atggtttttcatatcattggtcgtggttgt

SEQ ID NO: 7139 - DNA, 31 bp, Homo Sapiens
atggtttttcatatcattggtcgtggttgta

SEQ ID NO: 7140 - DNA, 32 bp, Homo Sapiens
atggtttttcatatcattggtcgtggttgtag

SEQ ID NO: 7141 - DNA, 33 bp, Homo Sapiens
atggtttttcatatcattggtcgtggttgtagt

SEQ ID NO: 7142 - DNA, 34 bp, Homo Sapiens
atggtttttcatatcattggtcgtggttgtagtc

SEQ ID NO: 7143 - DNA, 35 bp, Homo Sapiens
atggtttttcatatcattggtcgtggttgtagtcc

SEQ ID NO: 7144 - DNA, 36 bp, Homo Sapiens
atggtttttcatatcattggtcgtggttgtagtccg

SEQ ID NO: 7145 - DNA, 37 bp, Homo Sapiens
atggtttttcatatcattggtcgtggttgtagtccgt

SEQ ID NO: 7146 - DNA, 38 bp, Homo Sapiens
atggtttttcatatcattggtcgtggttgtagtccgtg

SEQ ID NO: 7147 - DNA, 39 bp, Homo Sapiens
atggtttttcatatcattggtcgtggttgtagtccgtgc

SEQ ID NO: 7148 - DNA, 40 bp, Homo Sapiens
atggtttttcatatcattggtcgtggttgtagtccgtgcg

SEQ ID NO: 7149 - DNA, 41 bp, Homo Sapiens
atggtttttcatatcattggtcgtggttgtagtccgtgcga

SEQ ID NO: 7150 - DNA, 42 bp, Homo Sapiens
atggtttttcatatcattggtcgtggttgtagtccgtgcgag

SEQ ID NO: 7151 - DNA, 43 bp, Homo Sapiens
atggtttttcatatcattggtcgtggttgtagtccgtgcgaga

SEQ ID NO: 7152 - DNA, 44 bp, Homo Sapiens
atggtttttcatatcattggtcgtggttgtagtccgtgcgagaa

SEQ ID NO: 7153 - DNA, 45 bp, Homo Sapiens
atggtttttcatatcattggtcgtggttgtagtccgtgcgagaat

SEQ ID NO: 7154 - DNA, 46 bp, Homo Sapiens
atggtttttcatatcattggtcgtggttgtagtccgtgcgagaata

SEQ ID NO: 7155 - DNA, 47 bp, Homo Sapiens
atggtttttcatatcattggtcgtggttgtagtccgtgcgagaatac

SEQ ID NO: 7156 - DNA, 48 bp, Homo Sapiens
atggtttttcatatcattggtcgtggttgtagtccgtgcgagaatacc

SEQ ID NO: 7157 - DNA, 16 bp, Homo Sapiens
atgtagctcagtggta

SEQ ID NO: 7158 - DNA, 17 bp, Homo Sapiens
atgtagctcagtggtag

SEQ ID NO: 7159 - DNA, 18 bp, Homo Sapiens
atgtagctcagtggtaga

SEQ ID NO: 7160 - DNA, 19 bp, Homo Sapiens
atgtagctcagtggtagag

SEQ ID NO: 7161 - DNA, 16 bp, Homo Sapiens
atgtagcttacctcct

SEQ ID NO: 7162 - DNA, 26 bp, Homo Sapiens
atgtagcttacctcctcaaagcaata

SEQ ID NO: 7163 - DNA, 30 bp, Homo Sapiens
atgtagcttacctcctcaaagcaatacact

SEQ ID NO: 7164 - DNA, 31 bp, Homo Sapiens
atgtagcttacctcctcaaagcaatacactg

SEQ ID NO: 7165 - DNA, 32 bp, Homo Sapiens
atgtagcttacctcctcaaagcaatacactga

SEQ ID NO: 7166 - DNA, 33 bp, Homo Sapiens
atgtagcttacctcctcaaagcaatacactgaa

SEQ ID NO: 7167 - DNA, 21 bp, Homo Sapiens
atgtatgaggtcccgggttcg

SEQ ID NO: 7168 - DNA, 16 bp, Homo Sapiens
atgtccgcgtgggttc

SEQ ID NO: 7169 - DNA, 17 bp, Homo Sapiens
atgtccgcgtgggttcg

SEQ ID NO: 7170 - DNA, 23 bp, Homo Sapiens
atgtccgcgtgggttcgaacccc

SEQ ID NO: 7171 - DNA, 24 bp, Homo Sapiens
atgtccgcgtgggttcgaacccca

SEQ ID NO: 7172 - DNA, 26 bp, Homo Sapiens
atgtccgcgtgggttcgaaccccact

SEQ ID NO: 7173 - DNA, 30 bp, Homo Sapiens
atgtccgcgtgggttcgaaccccactcctg

SEQ ID NO: 7174 - DNA, 31 bp, Homo Sapiens
atgtccgcgtgggttcgaaccccactcctgg

SEQ ID NO: 7175 - DNA, 32 bp, Homo Sapiens
atgtccgcgtgggttcgaaccccactcctggt

SEQ ID NO: 7176 - DNA, 33 bp, Homo Sapiens
atgtccgcgtgggttcgaaccccactcctggta

SEQ ID NO: 7177 - DNA, 34 bp, Homo Sapiens
atgtccgcgtgggttcgaaccccactcctggtac

SEQ ID NO: 7178 - DNA, 35 bp, Homo Sapiens
atgtccgcgtgggttcgaaccccactcctggtacc

SEQ ID NO: 7179 - DNA, 36 bp, Homo Sapiens
atgtccgcgtgggttcgaaccccactcctggtacca

SEQ ID NO: 7180 - DNA, 16 bp, Homo Sapiens
atgtctaacaacatgg

SEQ ID NO: 7181 - DNA, 17 bp, Homo Sapiens
atgtctaacaacatggc

SEQ ID NO: 7182 - DNA, 18 bp, Homo Sapiens
atgtctaacaacatggct

SEQ ID NO: 7183 - DNA, 19 bp, Homo Sapiens
atgtctaacaacatggctt

SEQ ID NO: 7184 - DNA, 20 bp, Homo Sapiens
atgtctaacaacatggcttt

SEQ ID NO: 7185 - DNA, 21 bp, Homo Sapiens
atgtctaacaacatggctttc

SEQ ID NO: 7186 - DNA, 22 bp, Homo Sapiens
atgtctaacaacatggctttct

SEQ ID NO: 7187 - DNA, 23 bp, Homo Sapiens
atgtctaacaacatggctttctc

SEQ ID NO: 7188 - DNA, 24 bp, Homo Sapiens
atgtctaacaacatggctttctca

SEQ ID NO: 7189 - DNA, 25 bp, Homo Sapiens
atgtctaacaacatggctttctcac

SEQ ID NO: 7190 - DNA, 26 bp, Homo Sapiens
atgtctaacaacatggctttctcacc

SEQ ID NO: 7191 - DNA, 27 bp, Homo Sapiens
atgtctaacaacatggctttctcacca

SEQ ID NO: 7192 - DNA, 21 bp, Homo Sapiens
atgtctgataaaagagttact

SEQ ID NO: 7193 - DNA, 26 bp, Homo Sapiens
atgtctgataaaagagttactttgat

SEQ ID NO: 7194 - DNA, 29 bp, Homo Sapiens
atgtctgataaaagagttactttgataga

SEQ ID NO: 7195 - DNA, 45 bp, Homo Sapiens
atgtctgataaaagagttactttgatagagtaaataataggagct

SEQ ID NO: 7196 - DNA, 16 bp, Homo Sapiens
atgttggttataccct

SEQ ID NO: 7197 - DNA, 21 bp, Homo Sapiens
atgttggttatacccttcccg

SEQ ID NO: 7198 - DNA, 23 bp, Homo Sapiens
atgttggttatacccttcccgta

SEQ ID NO: 7199 - DNA, 24 bp, Homo Sapiens
atgttggttatacccttcccgtac

SEQ ID NO: 7200 - DNA, 25 bp, Homo Sapiens
atgttggttatacccttcccgtact

SEQ ID NO: 7201 - DNA, 26 bp, Homo Sapiens
atgttggttatacccttcccgtacta

SEQ ID NO: 7202 - DNA, 27 bp, Homo Sapiens
atgttggttatacccttcccgtactac

SEQ ID NO: 7203 - DNA, 28 bp, Homo Sapiens
atgttggttatacccttcccgtactacc

SEQ ID NO: 7204 - DNA, 29 bp, Homo Sapiens
atgttggttatacccttcccgtactacca

SEQ ID NO: 7205 - DNA, 16 bp, Homo Sapiens
atgtttagacgggctc

SEQ ID NO: 7206 - DNA, 17 bp, Homo Sapiens
atgtttagacgggctca

SEQ ID NO: 7207 - DNA, 18 bp, Homo Sapiens
atgtttagacgggctcac

SEQ ID NO: 7208 - DNA, 19 bp, Homo Sapiens
atgtttagacgggctcaca

SEQ ID NO: 7209 - DNA, 20 bp, Homo Sapiens
atgtttagacgggctcacat

SEQ ID NO: 7210 - DNA, 21 bp, Homo Sapiens
atgtttagacgggctcacatc

SEQ ID NO: 7211 - DNA, 22 bp, Homo Sapiens
atgtttagacgggctcacatca

SEQ ID NO: 7212 - DNA, 23 bp, Homo Sapiens
atgtttagacgggctcacatcac

SEQ ID NO: 7213 - DNA, 24 bp, Homo Sapiens
atgtttagacgggctcacatcacc

SEQ ID NO: 7214 - DNA, 25 bp, Homo Sapiens
atgtttagacgggctcacatcaccc

SEQ ID NO: 7215 - DNA, 26 bp, Homo Sapiens
atgtttagacgggctcacatcacccc

SEQ ID NO: 7216 - DNA, 27 bp, Homo Sapiens
atgtttagacgggctcacatcacccca

SEQ ID NO: 7217 - DNA, 28 bp, Homo Sapiens
atgtttagacgggctcacatcaccccat

SEQ ID NO: 7218 - DNA, 29 bp, Homo Sapiens
atgtttagacgggctcacatcaccccata

SEQ ID NO: 7219 - DNA, 30 bp, Homo Sapiens
atgtttagacgggctcacatcaccccataa

SEQ ID NO: 7220 - DNA, 31 bp, Homo Sapiens
atgtttagacgggctcacatcaccccataaa

SEQ ID NO: 7221 - DNA, 32 bp, Homo Sapiens
atgtttagacgggctcacatcaccccataaac

SEQ ID NO: 7222 - DNA, 33 bp, Homo Sapiens
atgtttagacgggctcacatcaccccataaaca

SEQ ID NO: 7223 - DNA, 34 bp, Homo Sapiens
atgtttagacgggctcacatcaccccataaacac

SEQ ID NO: 7224 - DNA, 35 bp, Homo Sapiens
atgtttagacgggctcacatcaccccataaacacc

SEQ ID NO: 7225 - DNA, 36 bp, Homo Sapiens
atgtttagacgggctcacatcaccccataaacacca

SEQ ID NO: 7226 - DNA, 16 bp, Homo Sapiens
attaaagtggctgatt

SEQ ID NO: 7227 - DNA, 17 bp, Homo Sapiens
attaaagtggctgattt

SEQ ID NO: 7228 - DNA, 18 bp, Homo Sapiens
attaaagtggctgatttg

SEQ ID NO: 7229 - DNA, 19 bp, Homo Sapiens
attaaagtggctgatttgc

SEQ ID NO: 7230 - DNA, 16 bp, Homo Sapiens
attaaattatgataat

SEQ ID NO: 7231 - DNA, 17 bp, Homo Sapiens
attaaattatgataatc

SEQ ID NO: 7232 - DNA, 26 bp, Homo Sapiens
attaaattatgataatcatatttacc

SEQ ID NO: 7233 - DNA, 28 bp, Homo Sapiens
attaaattatgataatcatatttaccaa

SEQ ID NO: 7234 - DNA, 29 bp, Homo Sapiens
attaaattatgataatcatatttaccaac

SEQ ID NO: 7235 - DNA, 30 bp, Homo Sapiens
attaaattatgataatcatatttaccaacc

SEQ ID NO: 7236 - DNA, 31 bp, Homo Sapiens
attaaattatgataatcatatttaccaacca

SEQ ID NO: 7237 - DNA, 31 bp, Homo Sapiens
attaaccttttaagttaaagattaagagaac

SEQ ID NO: 7238 - DNA, 32 bp, Homo Sapiens
attaaccttttaagttaaagattaagagaacc

SEQ ID NO: 7239 - DNA, 37 bp, Homo Sapiens
attaaccttttaagttaaagattaagagaaccaacac

SEQ ID NO: 7240 - DNA, 39 bp, Homo Sapiens
attaaccttttaagttaaagattaagagaaccaacacct

SEQ ID NO: 7241 - DNA, 16 bp, Homo Sapiens
attaactagttttgac

SEQ ID NO: 7242 - DNA, 17 bp, Homo Sapiens
attaactagttttgaca

SEQ ID NO: 7243 - DNA, 18 bp, Homo Sapiens
attaactagttttgacaa

SEQ ID NO: 7244 - DNA, 19 bp, Homo Sapiens
attaactagttttgacaac

SEQ ID NO: 7245 - DNA, 20 bp, Homo Sapiens
attaactagttttgacaaca

SEQ ID NO: 7246 - DNA, 32 bp, Homo Sapiens
attaactagttttgacaacattcaaaaaagag

SEQ ID NO: 7247 - DNA, 33 bp, Homo Sapiens
attaactagttttgacaacattcaaaaaagagt

SEQ ID NO: 7248 - DNA, 34 bp, Homo Sapiens
attaactagttttgacaacattcaaaaaagagta

SEQ ID NO: 7249 - DNA, 35 bp, Homo Sapiens
attaactagttttgacaacattcaaaaaagagtac

SEQ ID NO: 7250 - DNA, 36 bp, Homo Sapiens
attaactagttttgacaacattcaaaaaagagtacc

SEQ ID NO: 7251 - DNA, 37 bp, Homo Sapiens
attaactagttttgacaacattcaaaaaagagtacca

SEQ ID NO: 7252 - DNA, 17 bp, Homo Sapiens
attaagagaaccaacac

SEQ ID NO: 7253 - DNA, 18 bp, Homo Sapiens
attaagagaaccaacacc

SEQ ID NO: 7254 - DNA, 19 bp, Homo Sapiens
attaagagaaccaacacct

SEQ ID NO: 7255 - DNA, 20 bp, Homo Sapiens
attaagagaaccaacacctc

SEQ ID NO: 7256 - DNA, 21 bp, Homo Sapiens
attaagagaaccaacacctct

SEQ ID NO: 7257 - DNA, 24 bp, Homo Sapiens
attaagagaaccaacacctcttta

SEQ ID NO: 7258 - DNA, 26 bp, Homo Sapiens
attaagagaaccaacacctctttaca

SEQ ID NO: 7259 - DNA, 28 bp, Homo Sapiens
attaagagaaccaacacctctttacagt

SEQ ID NO: 7260 - DNA, 29 bp, Homo Sapiens
attaagagaaccaacacctctttacagtg

SEQ ID NO: 7261 - DNA, 30 bp, Homo Sapiens
attaagagaaccaacacctctttacagtga

SEQ ID NO: 7262 - DNA, 31 bp, Homo Sapiens
attaagagaaccaacacctctttacagtgac

SEQ ID NO: 7263 - DNA, 32 bp, Homo Sapiens
attaagagaaccaacacctctttacagtgacc

SEQ ID NO: 7264 - DNA, 33 bp, Homo Sapiens
attaagagaaccaacacctctttacagtgacca

SEQ ID NO: 7265 - DNA, 16 bp, Homo Sapiens
attagaatcttagctt

SEQ ID NO: 7266 - DNA, 17 bp, Homo Sapiens
attagaatcttagcttt

SEQ ID NO: 7267 - DNA, 18 bp, Homo Sapiens
attagaatcttagctttg

SEQ ID NO: 7268 - DNA, 19 bp, Homo Sapiens
attagaatcttagctttgg

SEQ ID NO: 7269 - DNA, 24 bp, Homo Sapiens
attagaatcttagctttgggtgct

SEQ ID NO: 7270 - DNA, 26 bp, Homo Sapiens
attagaatcttagctttgggtgctaa

SEQ ID NO: 7271 - DNA, 34 bp, Homo Sapiens
attagaatcttagctttgggtgctaatggtggag

SEQ ID NO: 7272 - DNA, 35 bp, Homo Sapiens
attagaatcttagctttgggtgctaatggtggagt

SEQ ID NO: 7273 - DNA, 36 bp, Homo Sapiens
attagaatcttagctttgggtgctaatggtggagtt

SEQ ID NO: 7274 - DNA, 37 bp, Homo Sapiens
attagaatcttagctttgggtgctaatggtggagtta

SEQ ID NO: 7275 - DNA, 38 bp, Homo Sapiens
attagaatcttagctttgggtgctaatggtggagttaa

SEQ ID NO: 7276 - DNA, 40 bp, Homo Sapiens
attagaatcttagctttgggtgctaatggtggagttaaag

SEQ ID NO: 7277 - DNA, 42 bp, Homo Sapiens
attagaatcttagctttgggtgctaatggtggagttaaagac

SEQ ID NO: 7278 - DNA, 43 bp, Homo Sapiens
attagaatcttagctttgggtgctaatggtggagttaaagact

SEQ ID NO: 7279 - DNA, 19 bp, Homo Sapiens
attagctcaaatggtagag

SEQ ID NO: 7280 - DNA, 18 bp, Homo Sapiens
attagggtgcttagctgt

SEQ ID NO: 7281 - DNA, 19 bp, Homo Sapiens
attagggtgcttagctgtt

SEQ ID NO: 7282 - DNA, 20 bp, Homo Sapiens
attagggtgcttagctgtta

SEQ ID NO: 7283 - DNA, 22 bp, Homo Sapiens
attagggtgcttagctgttaac

SEQ ID NO: 7284 - DNA, 23 bp, Homo Sapiens
attagggtgcttagctgttaact

SEQ ID NO: 7285 - DNA, 24 bp, Homo Sapiens
attagggtgcttagctgttaacta

SEQ ID NO: 7286 - DNA, 25 bp, Homo Sapiens
attagggtgcttagctgttaactaa

SEQ ID NO: 7287 - DNA, 26 bp, Homo Sapiens
attagggtgcttagctgttaactaag

SEQ ID NO: 7288 - DNA, 36 bp, Homo Sapiens
attagggtgcttagctgttaactaagtgtttgtggg

SEQ ID NO: 7289 - DNA, 38 bp, Homo Sapiens
attagggtgcttagctgttaactaagtgtttgtgggtt

SEQ ID NO: 7290 - DNA, 39 bp, Homo Sapiens
attagggtgcttagctgttaactaagtgtttgtgggttt

SEQ ID NO: 7291 - DNA, 47 bp, Homo Sapiens
attagggtgcttagctgttaactaagtgtttgtgggtttaagtccca

SEQ ID NO: 7292 - DNA, 48 bp, Homo Sapiens
attagggtgcttagctgttaactaagtgtttgtgggtttaagtcccat

SEQ ID NO: 7293 - DNA, 16 bp, Homo Sapiens
attataggctaaatcc

SEQ ID NO: 7294 - DNA, 17 bp, Homo Sapiens
attataggctaaatcct

SEQ ID NO: 7295 - DNA, 29 bp, Homo Sapiens
attataggctaaatcctatatatcttacc

SEQ ID NO: 7296 - DNA, 21 bp, Homo Sapiens
attatgataatcatatttacc

SEQ ID NO: 7297 - DNA, 24 bp, Homo Sapiens
attatgataatcatatttaccaac

SEQ ID NO: 7298 - DNA, 25 bp, Homo Sapiens
attatgataatcatatttaccaacc

SEQ ID NO: 7299 - DNA, 26 bp, Homo Sapiens
attatgataatcatatttaccaacca

SEQ ID NO: 7300 - DNA, 16 bp, Homo Sapiens
attcaaaaaagagtac

SEQ ID NO: 7301 - DNA, 17 bp, Homo Sapiens
attcaaaaaagagtacc

SEQ ID NO: 7302 - DNA, 18 bp, Homo Sapiens
attcaaaaaagagtacca

SEQ ID NO: 7303 - DNA, 18 bp, Homo Sapiens
attcaaaggttccgggtt

SEQ ID NO: 7304 - DNA, 19 bp, Homo Sapiens
attcaaaggttccgggttc

SEQ ID NO: 7305 - DNA, 20 bp, Homo Sapiens
attcaaaggttccgggttcg

SEQ ID NO: 7306 - DNA, 21 bp, Homo Sapiens
attcaaaggttccgggttcga

SEQ ID NO: 7307 - DNA, 22 bp, Homo Sapiens
attcaaaggttccgggttcgag

SEQ ID NO: 7308 - DNA, 23 bp, Homo Sapiens
attcaaaggttccgggttcgagt

SEQ ID NO: 7309 - DNA, 33 bp, Homo Sapiens
attcaaaggttccgggttcgagtcccggcggag

SEQ ID NO: 7310 - DNA, 34 bp, Homo Sapiens
attcaaaggttccgggttcgagtcccggcggagt

SEQ ID NO: 7311 - DNA, 35 bp, Homo Sapiens
attcaaaggttccgggttcgagtcccggcggagtc

SEQ ID NO: 7312 - DNA, 36 bp, Homo Sapiens
attcaaaggttccgggttcgagtcccggcggagtcg

SEQ ID NO: 7313 - DNA, 37 bp, Homo Sapiens
attcaaaggttccgggttcgagtcccggcggagtcgc

SEQ ID NO: 7314 - DNA, 38 bp, Homo Sapiens
attcaaaggttccgggttcgagtcccggcggagtcgcc

SEQ ID NO: 7315 - DNA, 39 bp, Homo Sapiens
attcaaaggttccgggttcgagtcccggcggagtcgcca

SEQ ID NO: 7316 - DNA, 18 bp, Homo Sapiens
attcaaaggttgtgggtt

SEQ ID NO: 7317 - DNA, 34 bp, Homo Sapiens
attcaaaggttgtgggttcgaatcccaccagagt

SEQ ID NO: 7318 - DNA, 37 bp, Homo Sapiens
attcaaaggttgtgggttcgaatcccaccagagtcgc

SEQ ID NO: 7319 - DNA, 38 bp, Homo Sapiens
attcaaaggttgtgggttcgaatcccaccagagtcgcc

SEQ ID NO: 7320 - DNA, 39 bp, Homo Sapiens
attcaaaggttgtgggttcgaatcccaccagagtcgcca

SEQ ID NO: 7321 - DNA, 37 bp, Homo Sapiens
attcaaaggttgtgggttcgagtcccaccagagtcgc

SEQ ID NO: 7322 - DNA, 38 bp, Homo Sapiens
attcaaaggttgtgggttcgagtcccaccagagtcgcc

SEQ ID NO: 7323 - DNA, 39 bp, Homo Sapiens
attcaaaggttgtgggttcgagtcccaccagagtcgcca

SEQ ID NO: 7324 - DNA, 16 bp, Homo Sapiens
attccaggttcgactc

SEQ ID NO: 7325 - DNA, 19 bp, Homo Sapiens
attccaggttcgactcctg

SEQ ID NO: 7326 - DNA, 22 bp, Homo Sapiens
attccaggttcgactcctggct

SEQ ID NO: 7327 - DNA, 28 bp, Homo Sapiens
attccaggttcgactcctggctggctcg

SEQ ID NO: 7328 - DNA, 29 bp, Homo Sapiens
attccaggttcgactcctggctggctcgc

SEQ ID NO: 7329 - DNA, 30 bp, Homo Sapiens
attccaggttcgactcctggctggctcgcc

SEQ ID NO: 7330 - DNA, 31 bp, Homo Sapiens
attccaggttcgactcctggctggctcgcca

SEQ ID NO: 7331 - DNA, 17 bp, Homo Sapiens
attcccattcttgcgac

SEQ ID NO: 7332 - DNA, 23 bp, Homo Sapiens
attcccattcttgcgacccgggt

SEQ ID NO: 7333 - DNA, 44 bp, Homo Sapiens
attcccattcttgcgacccgggttcgattcccgggcggcgcacc

SEQ ID NO: 7334 - DNA, 16 bp, Homo Sapiens
attccccgacggggag

SEQ ID NO: 7335 - DNA, 17 bp, Homo Sapiens
attccccgacggggagc

SEQ ID NO: 7336 - DNA, 18 bp, Homo Sapiens
attccccgacggggagcc

SEQ ID NO: 7337 - DNA, 19 bp, Homo Sapiens
attccccgacggggagcca

SEQ ID NO: 7338 - DNA, 16 bp, Homo Sapiens
attcccggccaacgca

SEQ ID NO: 7339 - DNA, 17 bp, Homo Sapiens
attcccggccaacgcac

SEQ ID NO: 7340 - DNA, 18 bp, Homo Sapiens
attcccggccaacgcacc

SEQ ID NO: 7341 - DNA, 19 bp, Homo Sapiens
attcccggccaacgcacca

SEQ ID NO: 7342 - DNA, 18 bp, Homo Sapiens
attcccggccaatgcacc

SEQ ID NO: 7343 - DNA, 19 bp, Homo Sapiens
attcccggccaatgcacca

SEQ ID NO: 7344 - DNA, 17 bp, Homo Sapiens
attcccggccagggaac

SEQ ID NO: 7345 - DNA, 18 bp, Homo Sapiens
attcccggccagggaacc

SEQ ID NO: 7346 - DNA, 19 bp, Homo Sapiens
attcccggcccatgcacca

SEQ ID NO: 7347 - DNA, 16 bp, Homo Sapiens
attcccgggcggcgca

SEQ ID NO: 7348 - DNA, 17 bp, Homo Sapiens
attcccgggcggcgcac

SEQ ID NO: 7349 - DNA, 18 bp, Homo Sapiens
attcccgggcggcgcacc

SEQ ID NO: 7350 - DNA, 19 bp, Homo Sapiens
attcccgggcggcgcacca

SEQ ID NO: 7351 - DNA, 16 bp, Homo Sapiens
attcccggtcagggaa

SEQ ID NO: 7352 - DNA, 17 bp, Homo Sapiens
attcccggtcagggaac

SEQ ID NO: 7353 - DNA, 18 bp, Homo Sapiens
attcccggtcagggaacc

SEQ ID NO: 7354 - DNA, 19 bp, Homo Sapiens
attcccggtcagggaacca

SEQ ID NO: 7355 - DNA, 18 bp, Homo Sapiens
attcccggtcatggaacc

SEQ ID NO: 7356 - DNA, 16 bp, Homo Sapiens
attccggatcagaaga

SEQ ID NO: 7357 - DNA, 20 bp, Homo Sapiens
attccggatcagaagattga

SEQ ID NO: 7358 - DNA, 21 bp, Homo Sapiens
attccggatcagaagattgag

SEQ ID NO: 7359 - DNA, 24 bp, Homo Sapiens
attccggatcagaagattgagggt

SEQ ID NO: 7360 - DNA, 44 bp, Homo Sapiens
attccggatcagaagattgagggttcgagtcccttcgtggtcgc

SEQ ID NO: 7361 - DNA, 45 bp, Homo Sapiens
attccggatcagaagattgagggttcgagtcccttcgtggtcgcc

SEQ ID NO: 7362 - DNA, 17 bp, Homo Sapiens
attccggctcgaaggac

SEQ ID NO: 7363 - DNA, 18 bp, Homo Sapiens
attccggctcgaaggacc

SEQ ID NO: 7364 - DNA, 19 bp, Homo Sapiens
attccggctcgaaggacca

SEQ ID NO: 7365 - DNA, 18 bp, Homo Sapiens
attcctcttcttaacacc

SEQ ID NO: 7366 - DNA, 27 bp, Homo Sapiens
attcctggttttcacccaggcggcccg

SEQ ID NO: 7367 - DNA, 31 bp, Homo Sapiens
attcctggttttcacccaggcggcccgggtt

SEQ ID NO: 7368 - DNA, 37 bp, Homo Sapiens
attcctggttttcacccaggcggcccgggttcgactc

SEQ ID NO: 7369 - DNA, 39 bp, Homo Sapiens
attcctggttttcacccaggcggcccgggttcgactccc

SEQ ID NO: 7370 - DNA, 45 bp, Homo Sapiens
attcctggttttcacccaggcggcccgggttcgactcccggtgtg

SEQ ID NO: 7371 - DNA, 16 bp, Homo Sapiens
attccttccttttttg

SEQ ID NO: 7372 - DNA, 17 bp, Homo Sapiens
attccttccttttttgc

SEQ ID NO: 7373 - DNA, 18 bp, Homo Sapiens
attccttccttttttgcc

SEQ ID NO: 7374 - DNA, 19 bp, Homo Sapiens
attccttccttttttgcca

SEQ ID NO: 7375 - DNA, 17 bp, Homo Sapiens
attcgaagaagcagctt

SEQ ID NO: 7376 - DNA, 18 bp, Homo Sapiens
attcgaagaagcagcttc

SEQ ID NO: 7377 - DNA, 25 bp, Homo Sapiens
attcgaagaagcagcttcaaacctg

SEQ ID NO: 7378 - DNA, 26 bp, Homo Sapiens
attcgaagaagcagcttcaaacctgc

SEQ ID NO: 7379 - DNA, 32 bp, Homo Sapiens
attcgaagaagcagcttcaaacctgccggggc

SEQ ID NO: 7380 - DNA, 33 bp, Homo Sapiens
attcgaagaagcagcttcaaacctgccggggct

SEQ ID NO: 7381 - DNA, 34 bp, Homo Sapiens
attcgaagaagcagcttcaaacctgccggggctt

SEQ ID NO: 7382 - DNA, 35 bp, Homo Sapiens
attcgaagaagcagcttcaaacctgccggggcttc

SEQ ID NO: 7383 - DNA, 36 bp, Homo Sapiens
attcgaagaagcagcttcaaacctgccggggcttcc

SEQ ID NO: 7384 - DNA, 37 bp, Homo Sapiens
attcgaagaagcagcttcaaacctgccggggcttcca

SEQ ID NO: 7385 - DNA, 17 bp, Homo Sapiens
attcgcctcacacgcga

SEQ ID NO: 7386 - DNA, 16 bp, Homo Sapiens
attcggcgctctcacc

SEQ ID NO: 7387 - DNA, 17 bp, Homo Sapiens
attcggcgctctcaccg

SEQ ID NO: 7388 - DNA, 18 bp, Homo Sapiens
attcggcgctctcaccgc

SEQ ID NO: 7389 - DNA, 19 bp, Homo Sapiens
attcggcgctctcaccgcc

SEQ ID NO: 7390 - DNA, 25 bp, Homo Sapiens
attcggcgctctcaccgccgcggcc

SEQ ID NO: 7391 - DNA, 26 bp, Homo Sapiens
attcggcgctctcaccgccgcggccc

SEQ ID NO: 7392 - DNA, 27 bp, Homo Sapiens
attcggcgctctcaccgccgcggcccg

SEQ ID NO: 7393 - DNA, 28 bp, Homo Sapiens
attcggcgctctcaccgccgcggcccgg

SEQ ID NO: 7394 - DNA, 29 bp, Homo Sapiens
attcggcgctctcaccgccgcggcccggg

SEQ ID NO: 7395 - DNA, 30 bp, Homo Sapiens
attcggcgctctcaccgccgcggcccgggt

SEQ ID NO: 7396 - DNA, 31 bp, Homo Sapiens
attcggcgctctcaccgccgcggcccgggtt

SEQ ID NO: 7397 - DNA, 32 bp, Homo Sapiens
attcggcgctctcaccgccgcggcccgggttc

SEQ ID NO: 7398 - DNA, 33 bp, Homo Sapiens
attcggcgctctcaccgccgcggcccgggttcg

SEQ ID NO: 7399 - DNA, 34 bp, Homo Sapiens
attcggcgctctcaccgccgcggcccgggttcga

SEQ ID NO: 7400 - DNA, 35 bp, Homo Sapiens
attcggcgctctcaccgccgcggcccgggttcgat

SEQ ID NO: 7401 - DNA, 36 bp, Homo Sapiens
attcggcgctctcaccgccgcggcccgggttcgatt

SEQ ID NO: 7402 - DNA, 37 bp, Homo Sapiens
attcggcgctctcaccgccgcggcccgggttcgattc

SEQ ID NO: 7403 - DNA, 38 bp, Homo Sapiens
attcggcgctctcaccgccgcggcccgggttcgattcc

SEQ ID NO: 7404 - DNA, 39 bp, Homo Sapiens
attcggcgctctcaccgccgcggcccgggttcgattccc

SEQ ID NO: 7405 - DNA, 40 bp, Homo Sapiens
attcggcgctctcaccgccgcggcccgggttcgattcccg

SEQ ID NO: 7406 - DNA, 43 bp, Homo Sapiens
attcggcgctctcaccgccgcggcccgggttcgattcccggtc

SEQ ID NO: 7407 - DNA, 44 bp, Homo Sapiens
attcggcgctctcaccgccgcggcccgggttcgattcccggtca

SEQ ID NO: 7408 - DNA, 48 bp, Homo Sapiens
attcggcgctctcaccgccgcggcccgggttcgattcccggtcaggga

SEQ ID NO: 7409 - DNA, 28 bp, Homo Sapiens
attcggcgctttcaccgccgcggcccgg

SEQ ID NO: 7410 - DNA, 17 bp, Homo Sapiens
attcggtgctgaaagag

SEQ ID NO: 7411 - DNA, 16 bp, Homo Sapiens
attctaggttcgactc

SEQ ID NO: 7412 - DNA, 17 bp, Homo Sapiens
attctaggttcgactcc

SEQ ID NO: 7413 - DNA, 21 bp, Homo Sapiens
attctaggttcgactcctggc

SEQ ID NO: 7414 - DNA, 27 bp, Homo Sapiens
attctaggttcgactcctggctggctc

SEQ ID NO: 7415 - DNA, 28 bp, Homo Sapiens
attctaggttcgactcctggctggctcg

SEQ ID NO: 7416 - DNA, 29 bp, Homo Sapiens
attctaggttcgactcctggctggctcgc

SEQ ID NO: 7417 - DNA, 30 bp, Homo Sapiens
attctaggttcgactcctggctggctcgcc

SEQ ID NO: 7418 - DNA, 31 bp, Homo Sapiens
attctaggttcgactcctggctggctcgcca

SEQ ID NO: 7419 - DNA, 17 bp, Homo Sapiens
attctcagggatgggtt

SEQ ID NO: 7420 - DNA, 21 bp, Homo Sapiens
attctcagggatgggttcgat

SEQ ID NO: 7421 - DNA, 27 bp, Homo Sapiens
attctcagggatgggttcgattctcat

SEQ ID NO: 7422 - DNA, 29 bp, Homo Sapiens
attctcagggatgggttcgattctcatag

SEQ ID NO: 7423 - DNA, 33 bp, Homo Sapiens
attctcagggatgggttcgattctcatagtcct

SEQ ID NO: 7424 - DNA, 35 bp, Homo Sapiens
attctcagggatgggttcgattctcatagtcctag

SEQ ID NO: 7425 - DNA, 36 bp, Homo Sapiens
attctcagggatgggttcgattctcatagtcctagc

SEQ ID NO: 7426 - DNA, 37 bp, Homo Sapiens
attctcagggatgggttcgattctcatagtcctagcc

SEQ ID NO: 7427 - DNA, 38 bp, Homo Sapiens
attctcagggatgggttcgattctcatagtcctagcca

SEQ ID NO: 7428 - DNA, 16 bp, Homo Sapiens
attctcatagtcctag

SEQ ID NO: 7429 - DNA, 17 bp, Homo Sapiens
attctcatagtcctagc

SEQ ID NO: 7430 - DNA, 18 bp, Homo Sapiens
attctcatagtcctagcc

SEQ ID NO: 7431 - DNA, 19 bp, Homo Sapiens
attctcatagtcctagcca

SEQ ID NO: 7432 - DNA, 16 bp, Homo Sapiens
attctcgcctgccacg

SEQ ID NO: 7433 - DNA, 17 bp, Homo Sapiens
attctcgcctgccacgc

SEQ ID NO: 7434 - DNA, 21 bp, Homo Sapiens
attctcgcctgccacgcggga

SEQ ID NO: 7435 - DNA, 24 bp, Homo Sapiens
attctcgcctgccacgcgggaggc

SEQ ID NO: 7436 - DNA, 28 bp, Homo Sapiens
attctcgcctgccacgcgggaggcccgg

SEQ ID NO: 7437 - DNA, 29 bp, Homo Sapiens
attctcgcctgccacgcgggaggcccggg

SEQ ID NO: 7438 - DNA, 30 bp, Homo Sapiens
attctcgcctgccacgcgggaggcccgggt

SEQ ID NO: 7439 - DNA, 31 bp, Homo Sapiens
attctcgcctgccacgcgggaggcccgggtt

SEQ ID NO: 7440 - DNA, 33 bp, Homo Sapiens
attctcgcctgccacgcgggaggcccgggttcg

SEQ ID NO: 7441 - DNA, 17 bp, Homo Sapiens
attctcgctggggcctc

SEQ ID NO: 7442 - DNA, 18 bp, Homo Sapiens
attctcgctggggcctcc

SEQ ID NO: 7443 - DNA, 21 bp, Homo Sapiens
attctcggtttgggtccgaga

SEQ ID NO: 7444 - DNA, 17 bp, Homo Sapiens
attcttgcgacccgggt

SEQ ID NO: 7445 - DNA, 18 bp, Homo Sapiens
attcttgcgacccgggtt

SEQ ID NO: 7446 - DNA, 19 bp, Homo Sapiens
attcttgcgacccgggttc

SEQ ID NO: 7447 - DNA, 20 bp, Homo Sapiens
attcttgcgacccgggttcg

SEQ ID NO: 7448 - DNA, 21 bp, Homo Sapiens
attcttgcgacccgggttcga

SEQ ID NO: 7449 - DNA, 22 bp, Homo Sapiens
attcttgcgacccgggttcgat

SEQ ID NO: 7450 - DNA, 23 bp, Homo Sapiens
attcttgcgacccgggttcgatt

SEQ ID NO: 7451 - DNA, 26 bp, Homo Sapiens
attcttgcgacccgggttcgattccc

SEQ ID NO: 7452 - DNA, 30 bp, Homo Sapiens
attcttgcgacccgggttcgattcccgggc

SEQ ID NO: 7453 - DNA, 31 bp, Homo Sapiens
attcttgcgacccgggttcgattcccgggcg

SEQ ID NO: 7454 - DNA, 32 bp, Homo Sapiens
attcttgcgacccgggttcgattcccgggcgg

SEQ ID NO: 7455 - DNA, 33 bp, Homo Sapiens
attcttgcgacccgggttcgattcccgggcggc

SEQ ID NO: 7456 - DNA, 34 bp, Homo Sapiens
attcttgcgacccgggttcgattcccgggcggcg

SEQ ID NO: 7457 - DNA, 35 bp, Homo Sapiens
attcttgcgacccgggttcgattcccgggcggcgc

SEQ ID NO: 7458 - DNA, 36 bp, Homo Sapiens
attcttgcgacccgggttcgattcccgggcggcgca

SEQ ID NO: 7459 - DNA, 37 bp, Homo Sapiens
attcttgcgacccgggttcgattcccgggcggcgcac

SEQ ID NO: 7460 - DNA, 38 bp, Homo Sapiens
attcttgcgacccgggttcgattcccgggcggcgcacc

SEQ ID NO: 7461 - DNA, 39 bp, Homo Sapiens
attcttgcgacccgggttcgattcccgggcggcgcacca

SEQ ID NO: 7462 - DNA, 33 bp, Homo Sapiens
attgaagccagttgattagggtgcttagctgtt

SEQ ID NO: 7463 - DNA, 16 bp, Homo Sapiens
attgaattgcaaattc

SEQ ID NO: 7464 - DNA, 28 bp, Homo Sapiens
attgaattgcaaattcgaagaagcagct

SEQ ID NO: 7465 - DNA, 44 bp, Homo Sapiens
attgaattgcaaattcgaagaagcagcttcaaacctgccggggc

SEQ ID NO: 7466 - DNA, 45 bp, Homo Sapiens
attgaattgcaaattcgaagaagcagcttcaaacctgccggggct

SEQ ID NO: 7467 - DNA, 46 bp, Homo Sapiens
attgaattgcaaattcgaagaagcagcttcaaacctgccggggctt

SEQ ID NO: 7468 - DNA, 47 bp, Homo Sapiens
attgaattgcaaattcgaagaagcagcttcaaacctgccggggcttc

SEQ ID NO: 7469 - DNA, 19 bp, Homo Sapiens
attgagggttcgaatccct

SEQ ID NO: 7470 - DNA, 30 bp, Homo Sapiens
attgagggttcgaatcccttcgtggttgcc

SEQ ID NO: 7471 - DNA, 31 bp, Homo Sapiens
attgagggttcgaatcccttcgtggttgcca

SEQ ID NO: 7472 - DNA, 16 bp, Homo Sapiens
attgagggttcgagtc

SEQ ID NO: 7473 - DNA, 18 bp, Homo Sapiens
attgagggttcgagtccc

SEQ ID NO: 7474 - DNA, 19 bp, Homo Sapiens
attgagggttcgagtccct

SEQ ID NO: 7475 - DNA, 28 bp, Homo Sapiens
attgagggttcgagtcccttcgtggtcg

SEQ ID NO: 7476 - DNA, 29 bp, Homo Sapiens
attgagggttcgagtcccttcgtggtcgc

SEQ ID NO: 7477 - DNA, 30 bp, Homo Sapiens
attgagggttcgagtcccttcgtggtcgcc

SEQ ID NO: 7478 - DNA, 31 bp, Homo Sapiens
attgagggttcgagtcccttcgtggtcgcca

SEQ ID NO: 7479 - DNA, 18 bp, Homo Sapiens
attgcaaattcgaagaag

SEQ ID NO: 7480 - DNA, 23 bp, Homo Sapiens
attgcaaattcgaagaagcagct

SEQ ID NO: 7481 - DNA, 32 bp, Homo Sapiens
attgcaaattcgaagaagcagcttcaaacctg

SEQ ID NO: 7482 - DNA, 39 bp, Homo Sapiens
attgcaaattcgaagaagcagcttcaaacctgccggggc

SEQ ID NO: 7483 - DNA, 40 bp, Homo Sapiens
attgcaaattcgaagaagcagcttcaaacctgccggggct

SEQ ID NO: 7484 - DNA, 41 bp, Homo Sapiens
attgcaaattcgaagaagcagcttcaaacctgccggggctt

SEQ ID NO: 7485 - DNA, 42 bp, Homo Sapiens
attgcaaattcgaagaagcagcttcaaacctgccggggcttc

SEQ ID NO: 7486 - DNA, 43 bp, Homo Sapiens
attgcaaattcgaagaagcagcttcaaacctgccggggcttcc

SEQ ID NO: 7487 - DNA, 44 bp, Homo Sapiens
attgcaaattcgaagaagcagcttcaaacctgccggggcttcca

SEQ ID NO: 7488 - DNA, 19 bp, Homo Sapiens
attgcaggttcgagtcctg

SEQ ID NO: 7489 - DNA, 27 bp, Homo Sapiens
attgcaggttcgagtcctgccgcggtc

SEQ ID NO: 7490 - DNA, 30 bp, Homo Sapiens
attgcaggttcgagtcctgccgcggtcgcc

SEQ ID NO: 7491 - DNA, 31 bp, Homo Sapiens
attgcaggttcgagtcctgccgcggtcgcca

SEQ ID NO: 7492 - DNA, 27 bp, Homo Sapiens
attggactgtaaatctaaagacagggg

SEQ ID NO: 7493 - DNA, 28 bp, Homo Sapiens
attggactgtaaatctaaagacaggggt

SEQ ID NO: 7494 - DNA, 29 bp, Homo Sapiens
attggactgtaaatctaaagacaggggtt

SEQ ID NO: 7495 - DNA, 30 bp, Homo Sapiens
attggactgtaaatctaaagacaggggtta

SEQ ID NO: 7496 - DNA, 31 bp, Homo Sapiens
attggactgtaaatctaaagacaggggttag

SEQ ID NO: 7497 - DNA, 32 bp, Homo Sapiens
attggactgtaaatctaaagacaggggttagg

SEQ ID NO: 7498 - DNA, 33 bp, Homo Sapiens
attggactgtaaatctaaagacaggggttaggc

SEQ ID NO: 7499 - DNA, 34 bp, Homo Sapiens
attggactgtaaatctaaagacaggggttaggcc

SEQ ID NO: 7500 - DNA, 35 bp, Homo Sapiens
attggactgtaaatctaaagacaggggttaggcct

SEQ ID NO: 7501 - DNA, 36 bp, Homo Sapiens
attggactgtaaatctaaagacaggggttaggcctc

SEQ ID NO: 7502 - DNA, 37 bp, Homo Sapiens
attggactgtaaatctaaagacaggggttaggcctct

SEQ ID NO: 7503 - DNA, 38 bp, Homo Sapiens
attggactgtaaatctaaagacaggggttaggcctctt

SEQ ID NO: 7504 - DNA, 39 bp, Homo Sapiens
attggactgtaaatctaaagacaggggttaggcctcttt

SEQ ID NO: 7505 - DNA, 41 bp, Homo Sapiens
attggactgtaaatctaaagacaggggttaggcctcttttt

SEQ ID NO: 7506 - DNA, 42 bp, Homo Sapiens
attggactgtaaatctaaagacaggggttaggcctcttttta

SEQ ID NO: 7507 - DNA, 44 bp, Homo Sapiens
attggactgtaaatctaaagacaggggttaggcctctttttacc

SEQ ID NO: 7508 - DNA, 47 bp, Homo Sapiens
attggactgtaaatctaaagacaggggttaggcctctttttaccacc

SEQ ID NO: 7509 - DNA, 48 bp, Homo Sapiens
attggactgtaaatctaaagacaggggttaggcctctttttaccacca

SEQ ID NO: 7510 - DNA, 22 bp, Homo Sapiens
attggggtttccccgcgcaggt

SEQ ID NO: 7511 - DNA, 23 bp, Homo Sapiens
attggggtttccccgcgcaggtt

SEQ ID NO: 7512 - DNA, 24 bp, Homo Sapiens
attggggtttccccgcgcaggttc

SEQ ID NO: 7513 - DNA, 25 bp, Homo Sapiens
attggggtttccccgcgcaggttcg

SEQ ID NO: 7514 - DNA, 32 bp, Homo Sapiens
attggggtttccccgcgcaggttcgaatcctg

SEQ ID NO: 7515 - DNA, 16 bp, Homo Sapiens
attggtcgtggttgta

SEQ ID NO: 7516 - DNA, 17 bp, Homo Sapiens
attggtcgtggttgtag

SEQ ID NO: 7517 - DNA, 18 bp, Homo Sapiens
attggtcgtggttgtagt

SEQ ID NO: 7518 - DNA, 19 bp, Homo Sapiens
attggtcgtggttgtagtc

SEQ ID NO: 7519 - DNA, 20 bp, Homo Sapiens
attggtcgtggttgtagtcc

SEQ ID NO: 7520 - DNA, 21 bp, Homo Sapiens
attggtcgtggttgtagtccg

SEQ ID NO: 7521 - DNA, 22 bp, Homo Sapiens
attggtcgtggttgtagtccgt

SEQ ID NO: 7522 - DNA, 23 bp, Homo Sapiens
attggtcgtggttgtagtccgtg

SEQ ID NO: 7523 - DNA, 24 bp, Homo Sapiens
attggtcgtggttgtagtccgtgc

SEQ ID NO: 7524 - DNA, 25 bp, Homo Sapiens
attggtcgtggttgtagtccgtgcg

SEQ ID NO: 7525 - DNA, 26 bp, Homo Sapiens
attggtcgtggttgtagtccgtgcga

SEQ ID NO: 7526 - DNA, 27 bp, Homo Sapiens
attggtcgtggttgtagtccgtgcgag

SEQ ID NO: 7527 - DNA, 28 bp, Homo Sapiens
attggtcgtggttgtagtccgtgcgaga

SEQ ID NO: 7528 - DNA, 29 bp, Homo Sapiens
attggtcgtggttgtagtccgtgcgagaa

SEQ ID NO: 7529 - DNA, 30 bp, Homo Sapiens
attggtcgtggttgtagtccgtgcgagaat

SEQ ID NO: 7530 - DNA, 31 bp, Homo Sapiens
attggtcgtggttgtagtccgtgcgagaata

SEQ ID NO: 7531 - DNA, 32 bp, Homo Sapiens
attggtcgtggttgtagtccgtgcgagaatac

SEQ ID NO: 7532 - DNA, 33 bp, Homo Sapiens
attggtcgtggttgtagtccgtgcgagaatacc

SEQ ID NO: 7533 - DNA, 34 bp, Homo Sapiens
attggtcgtggttgtagtccgtgcgagaatacca

SEQ ID NO: 7534 - DNA, 16 bp, Homo Sapiens
attggtcttaggcccc

SEQ ID NO: 7535 - DNA, 17 bp, Homo Sapiens
attggtcttaggcccca

SEQ ID NO: 7536 - DNA, 29 bp, Homo Sapiens
attggtcttaggccccaaaaattttggtg

SEQ ID NO: 7537 - DNA, 35 bp, Homo Sapiens
attggtcttaggccccaaaaattttggtgcaactc

SEQ ID NO: 7538 - DNA, 36 bp, Homo Sapiens
attggtcttaggccccaaaaattttggtgcaactcc

SEQ ID NO: 7539 - DNA, 39 bp, Homo Sapiens
attggtcttaggccccaaaaattttggtgcaactccaaa

SEQ ID NO: 7540 - DNA, 41 bp, Homo Sapiens
attggtcttaggccccaaaaattttggtgcaactccaaata

SEQ ID NO: 7541 - DNA, 28 bp, Homo Sapiens
attggtggttcaatggtagaattctcgc

SEQ ID NO: 7542 - DNA, 30 bp, Homo Sapiens
attggtggttcaatggtagaattctcgcct

SEQ ID NO: 7543 - DNA, 16 bp, Homo Sapiens
attggtggttcagtgg

SEQ ID NO: 7544 - DNA, 17 bp, Homo Sapiens
attggtggttcagtggt

SEQ ID NO: 7545 - DNA, 18 bp, Homo Sapiens
attggtggttcagtggta

SEQ ID NO: 7546 - DNA, 19 bp, Homo Sapiens
attggtggttcagtggtag

SEQ ID NO: 7547 - DNA, 20 bp, Homo Sapiens
attggtggttcagtggtaga

SEQ ID NO: 7548 - DNA, 21 bp, Homo Sapiens
attggtggttcagtggtagaa

SEQ ID NO: 7549 - DNA, 22 bp, Homo Sapiens
attggtggttcagtggtagaat

SEQ ID NO: 7550 - DNA, 23 bp, Homo Sapiens
attggtggttcagtggtagaatt

SEQ ID NO: 7551 - DNA, 24 bp, Homo Sapiens
attggtggttcagtggtagaattc

SEQ ID NO: 7552 - DNA, 25 bp, Homo Sapiens
attggtggttcagtggtagaattct

SEQ ID NO: 7553 - DNA, 26 bp, Homo Sapiens
attggtggttcagtggtagaattctc

SEQ ID NO: 7554 - DNA, 27 bp, Homo Sapiens
attggtggttcagtggtagaattctcg

SEQ ID NO: 7555 - DNA, 28 bp, Homo Sapiens
attggtggttcagtggtagaattctcgc

SEQ ID NO: 7556 - DNA, 29 bp, Homo Sapiens
attggtggttcagtggtagaattctcgcc

SEQ ID NO: 7557 - DNA, 30 bp, Homo Sapiens
attggtggttcagtggtagaattctcgcct

SEQ ID NO: 7558 - DNA, 31 bp, Homo Sapiens
attggtggttcagtggtagaattctcgcctc

SEQ ID NO: 7559 - DNA, 32 bp, Homo Sapiens
attggtggttcagtggtagaattctcgcctcc

SEQ ID NO: 7560 - DNA, 33 bp, Homo Sapiens
attggtggttcagtggtagaattctcgcctccc

SEQ ID NO: 7561 - DNA, 34 bp, Homo Sapiens
attggtggttcagtggtagaattctcgcctccca

SEQ ID NO: 7562 - DNA, 35 bp, Homo Sapiens
attggtggttcagtggtagaattctcgcctcccac

SEQ ID NO: 7563 - DNA, 31 bp, Homo Sapiens
attggtggttcagtggtagaattctcgcctg

SEQ ID NO: 7564 - DNA, 32 bp, Homo Sapiens
attggtggttcagtggtagaattctcgcctgc

SEQ ID NO: 7565 - DNA, 33 bp, Homo Sapiens
attggtggttcagtggtagaattctcgcctgcc

SEQ ID NO: 7566 - DNA, 34 bp, Homo Sapiens
attggtggttcagtggtagaattctcgcctgcca

SEQ ID NO: 7567 - DNA, 35 bp, Homo Sapiens
attggtggttcagtggtagaattctcgcctgccac

SEQ ID NO: 7568 - DNA, 36 bp, Homo Sapiens
attggtggttcagtggtagaattctcgcctgccacg

SEQ ID NO: 7569 - DNA, 37 bp, Homo Sapiens
attggtggttcagtggtagaattctcgcctgccacgc

SEQ ID NO: 7570 - DNA, 38 bp, Homo Sapiens
attggtggttcagtggtagaattctcgcctgccacgcg

SEQ ID NO: 7571 - DNA, 39 bp, Homo Sapiens
attggtggttcagtggtagaattctcgcctgccacgcgg

SEQ ID NO: 7572 - DNA, 40 bp, Homo Sapiens
attggtggttcagtggtagaattctcgcctgccacgcggg

SEQ ID NO: 7573 - DNA, 41 bp, Homo Sapiens
attggtggttcagtggtagaattctcgcctgccacgcggga

SEQ ID NO: 7574 - DNA, 42 bp, Homo Sapiens
attggtggttcagtggtagaattctcgcctgccacgcgggag

SEQ ID NO: 7575 - DNA, 43 bp, Homo Sapiens
attggtggttcagtggtagaattctcgcctgccacgcgggagg

SEQ ID NO: 7576 - DNA, 44 bp, Homo Sapiens
attggtggttcagtggtagaattctcgcctgccacgcgggaggc

SEQ ID NO: 7577 - DNA, 45 bp, Homo Sapiens
attggtggttcagtggtagaattctcgcctgccacgcgggaggcc

SEQ ID NO: 7578 - DNA, 46 bp, Homo Sapiens
attggtggttcagtggtagaattctcgcctgccacgcgggaggccc

SEQ ID NO: 7579 - DNA, 47 bp, Homo Sapiens
attggtggttcagtggtagaattctcgcctgccacgcgggaggcccg

SEQ ID NO: 7580 - DNA, 48 bp, Homo Sapiens
attggtggttcagtggtagaattctcgcctgccacgcgggaggcccgg

SEQ ID NO: 7581 - DNA, 35 bp, Homo Sapiens
attggtggttcagtggtagaattctcgcctgccat

SEQ ID NO: 7582 - DNA, 16 bp, Homo Sapiens
attgtgaatctgacaa

SEQ ID NO: 7583 - DNA, 17 bp, Homo Sapiens
attgtgaatctgacaac

SEQ ID NO: 7584 - DNA, 18 bp, Homo Sapiens
attgtgaatctgacaaca

SEQ ID NO: 7585 - DNA, 19 bp, Homo Sapiens
attgtgaatctgacaacag

SEQ ID NO: 7586 - DNA, 20 bp, Homo Sapiens
attgtgaatctgacaacaga

SEQ ID NO: 7587 - DNA, 21 bp, Homo Sapiens
attgtgaatctgacaacagag

SEQ ID NO: 7588 - DNA, 22 bp, Homo Sapiens
attgtgaatctgacaacagagg

SEQ ID NO: 7589 - DNA, 23 bp, Homo Sapiens
attgtgaatctgacaacagaggc

SEQ ID NO: 7590 - DNA, 24 bp, Homo Sapiens
attgtgaatctgacaacagaggct

SEQ ID NO: 7591 - DNA, 25 bp, Homo Sapiens
attgtgaatctgacaacagaggctt

SEQ ID NO: 7592 - DNA, 26 bp, Homo Sapiens
attgtgaatctgacaacagaggctta

SEQ ID NO: 7593 - DNA, 27 bp, Homo Sapiens
attgtgaatctgacaacagaggcttac

SEQ ID NO: 7594 - DNA, 28 bp, Homo Sapiens
attgtgaatctgacaacagaggcttacg

SEQ ID NO: 7595 - DNA, 29 bp, Homo Sapiens
attgtgaatctgacaacagaggcttacga

SEQ ID NO: 7596 - DNA, 30 bp, Homo Sapiens
attgtgaatctgacaacagaggcttacgac

SEQ ID NO: 7597 - DNA, 31 bp, Homo Sapiens
attgtgaatctgacaacagaggcttacgacc

SEQ ID NO: 7598 - DNA, 32 bp, Homo Sapiens
attgtgaatctgacaacagaggcttacgaccc

SEQ ID NO: 7599 - DNA, 33 bp, Homo Sapiens
attgtgaatctgacaacagaggcttacgacccc

SEQ ID NO: 7600 - DNA, 34 bp, Homo Sapiens
attgtgaatctgacaacagaggcttacgacccct

SEQ ID NO: 7601 - DNA, 35 bp, Homo Sapiens
attgtgaatctgacaacagaggcttacgacccctt

SEQ ID NO: 7602 - DNA, 36 bp, Homo Sapiens
attgtgaatctgacaacagaggcttacgacccctta

SEQ ID NO: 7603 - DNA, 37 bp, Homo Sapiens
attgtgaatctgacaacagaggcttacgaccccttat

SEQ ID NO: 7604 - DNA, 38 bp, Homo Sapiens
attgtgaatctgacaacagaggcttacgaccccttatt

SEQ ID NO: 7605 - DNA, 39 bp, Homo Sapiens
attgtgaatctgacaacagaggcttacgaccccttattt

SEQ ID NO: 7606 - DNA, 40 bp, Homo Sapiens
attgtgaatctgacaacagaggcttacgaccccttattta

SEQ ID NO: 7607 - DNA, 41 bp, Homo Sapiens
attgtgaatctgacaacagaggcttacgaccccttatttac

SEQ ID NO: 7608 - DNA, 42 bp, Homo Sapiens
attgtgaatctgacaacagaggcttacgaccccttatttacc

SEQ ID NO: 7609 - DNA, 43 bp, Homo Sapiens
attgtgaatctgacaacagaggcttacgaccccttatttaccc

SEQ ID NO: 7610 - DNA, 44 bp, Homo Sapiens
attgtgaatctgacaacagaggcttacgaccccttatttacccc

SEQ ID NO: 7611 - DNA, 45 bp, Homo Sapiens
attgtgaatctgacaacagaggcttacgaccccttatttacccca

SEQ ID NO: 7612 - DNA, 21 bp, Homo Sapiens
attgtgctctgcacgcgtggg

SEQ ID NO: 7613 - DNA, 22 bp, Homo Sapiens
attgtgctctgcacgcgtgggt

SEQ ID NO: 7614 - DNA, 32 bp, Homo Sapiens
attgtgctctgcacgcgtgggttcgaatccca

SEQ ID NO: 7615 - DNA, 43 bp, Homo Sapiens
attgtgctctgcacgcgtgggttcgaatcccatcctcgtcgcc

SEQ ID NO: 7616 - DNA, 44 bp, Homo Sapiens
attgtgctctgcacgcgtgggttcgaatcccatcctcgtcgcca

SEQ ID NO: 7617 - DNA, 21 bp, Homo Sapiens
attgtgctttgcacgcgtggg

SEQ ID NO: 7618 - DNA, 24 bp, Homo Sapiens
attgtgctttgcacgcgtgggttc

SEQ ID NO: 7619 - DNA, 25 bp, Homo Sapiens
attgtgctttgcacgcgtgggttcg

SEQ ID NO: 7620 - DNA, 42 bp, Homo Sapiens
attgtgctttgcacgcgtgggttcgaatcccatcctcgtcgc

SEQ ID NO: 7621 - DNA, 43 bp, Homo Sapiens
attgtgctttgcacgcgtgggttcgaatcccatcctcgtcgcc

SEQ ID NO: 7622 - DNA, 44 bp, Homo Sapiens
attgtgctttgcacgcgtgggttcgaatcccatcctcgtcgcca

SEQ ID NO: 7623 - DNA, 28 bp, Homo Sapiens
attgtgggttcgagtcccacctggggtg

SEQ ID NO: 7624 - DNA, 28 bp, Homo Sapiens
attgtgggttcgagtcccatctggggtg

SEQ ID NO: 7625 - DNA, 29 bp, Homo Sapiens
attgtgggttcgagtcccatctggggtgc

SEQ ID NO: 7626 - DNA, 30 bp, Homo Sapiens
attgtgggttcgagtcccatctggggtgcc

SEQ ID NO: 7627 - DNA, 31 bp, Homo Sapiens
attgtgggttcgagtcccatctggggtgcca

SEQ ID NO: 7628 - DNA, 28 bp, Homo Sapiens
attgtgggttcgagtcccatctgggtcg

SEQ ID NO: 7629 - DNA, 29 bp, Homo Sapiens
attgtgggttcgagtcccatctgggtcgc

SEQ ID NO: 7630 - DNA, 30 bp, Homo Sapiens
attgtgggttcgagtcccatctgggtcgcc

SEQ ID NO: 7631 - DNA, 31 bp, Homo Sapiens
attgtgggttcgagtcccatctgggtcgcca

SEQ ID NO: 7632 - DNA, 19 bp, Homo Sapiens
atttaggttaaatacagac

SEQ ID NO: 7633 - DNA, 20 bp, Homo Sapiens
atttaggttaaatacagacc

SEQ ID NO: 7634 - DNA, 27 bp, Homo Sapiens
atttaggttaaatacagaccaagagcc

SEQ ID NO: 7635 - DNA, 40 bp, Homo Sapiens
atttaggttaaatacagaccaagagccttcaaagccctca

SEQ ID NO: 7636 - DNA, 16 bp, Homo Sapiens
atttcaacttaacttg

SEQ ID NO: 7637 - DNA, 18 bp, Homo Sapiens
atttcaacttaacttgac

SEQ ID NO: 7638 - DNA, 19 bp, Homo Sapiens
atttcaacttaacttgacc

SEQ ID NO: 7639 - DNA, 20 bp, Homo Sapiens
atttcaacttaacttgaccg

SEQ ID NO: 7640 - DNA, 22 bp, Homo Sapiens
atttcaacttaacttgaccgct

SEQ ID NO: 7641 - DNA, 23 bp, Homo Sapiens
atttcaacttaacttgaccgctc

SEQ ID NO: 7642 - DNA, 24 bp, Homo Sapiens
atttcaacttaacttgaccgctct

SEQ ID NO: 7643 - DNA, 25 bp, Homo Sapiens
atttcaacttaacttgaccgctctg

SEQ ID NO: 7644 - DNA, 26 bp, Homo Sapiens
atttcaacttaacttgaccgctctga

SEQ ID NO: 7645 - DNA, 27 bp, Homo Sapiens
atttcaacttaacttgaccgctctgac

SEQ ID NO: 7646 - DNA, 28 bp, Homo Sapiens
atttcaacttaacttgaccgctctgacc

SEQ ID NO: 7647 - DNA, 29 bp, Homo Sapiens
atttcaacttaacttgaccgctctgacca

SEQ ID NO: 7648 - DNA, 16 bp, Homo Sapiens
atttcataactttgtc

SEQ ID NO: 7649 - DNA, 17 bp, Homo Sapiens
atttcataactttgtca

SEQ ID NO: 7650 - DNA, 18 bp, Homo Sapiens
atttcataactttgtcaa

SEQ ID NO: 7651 - DNA, 19 bp, Homo Sapiens
atttcataactttgtcaaa

SEQ ID NO: 7652 - DNA, 20 bp, Homo Sapiens
atttcataactttgtcaaag

SEQ ID NO: 7653 - DNA, 21 bp, Homo Sapiens
atttcataactttgtcaaagt

SEQ ID NO: 7654 - DNA, 33 bp, Homo Sapiens
atttcataactttgtcaaagttaaattataggc

SEQ ID NO: 7655 - DNA, 34 bp, Homo Sapiens
atttcataactttgtcaaagttaaattataggct

SEQ ID NO: 7656 - DNA, 35 bp, Homo Sapiens
atttcataactttgtcaaagttaaattataggcta

SEQ ID NO: 7657 - DNA, 36 bp, Homo Sapiens
atttcataactttgtcaaagttaaattataggctaa

SEQ ID NO: 7658 - DNA, 37 bp, Homo Sapiens
atttcataactttgtcaaagttaaattataggctaaa

SEQ ID NO: 7659 - DNA, 39 bp, Homo Sapiens
atttcataactttgtcaaagttaaattataggctaaatc

SEQ ID NO: 7660 - DNA, 16 bp, Homo Sapiens
atttcgactcattaaa

SEQ ID NO: 7661 - DNA, 17 bp, Homo Sapiens
atttcgactcattaaat

SEQ ID NO: 7662 - DNA, 18 bp, Homo Sapiens
atttcgactcattaaatt

SEQ ID NO: 7663 - DNA, 20 bp, Homo Sapiens
atttcgactcattaaattat

SEQ ID NO: 7664 - DNA, 21 bp, Homo Sapiens
atttcgactcattaaattatg

SEQ ID NO: 7665 - DNA, 22 bp, Homo Sapiens
atttcgactcattaaattatga

SEQ ID NO: 7666 - DNA, 23 bp, Homo Sapiens
atttcgactcattaaattatgat

SEQ ID NO: 7667 - DNA, 24 bp, Homo Sapiens
atttcgactcattaaattatgata

SEQ ID NO: 7668 - DNA, 25 bp, Homo Sapiens
atttcgactcattaaattatgataa

SEQ ID NO: 7669 - DNA, 26 bp, Homo Sapiens
atttcgactcattaaattatgataat

SEQ ID NO: 7670 - DNA, 30 bp, Homo Sapiens
atttcgactcattaaattatgataatcata

SEQ ID NO: 7671 - DNA, 34 bp, Homo Sapiens
atttcgactcattaaattatgataatcatattta

SEQ ID NO: 7672 - DNA, 35 bp, Homo Sapiens
atttcgactcattaaattatgataatcatatttac

SEQ ID NO: 7673 - DNA, 36 bp, Homo Sapiens
atttcgactcattaaattatgataatcatatttacc

SEQ ID NO: 7674 - DNA, 37 bp, Homo Sapiens
atttcgactcattaaattatgataatcatatttacca

SEQ ID NO: 7675 - DNA, 38 bp, Homo Sapiens
atttcgactcattaaattatgataatcatatttaccaa

SEQ ID NO: 7676 - DNA, 39 bp, Homo Sapiens
atttcgactcattaaattatgataatcatatttaccaac

SEQ ID NO: 7677 - DNA, 40 bp, Homo Sapiens
atttcgactcattaaattatgataatcatatttaccaacc

SEQ ID NO: 7678 - DNA, 41 bp, Homo Sapiens
atttcgactcattaaattatgataatcatatttaccaacca

SEQ ID NO: 7679 - DNA, 17 bp, Homo Sapiens
atttcgatggcgtgggt

SEQ ID NO: 7680 - DNA, 18 bp, Homo Sapiens
atttcgatggcgtgggtt

SEQ ID NO: 7681 - DNA, 27 bp, Homo Sapiens
atttcgatggcgtgggttcgaatccca

SEQ ID NO: 7682 - DNA, 30 bp, Homo Sapiens
atttcgatggcgtgggttcgaatcccaccg

SEQ ID NO: 7683 - DNA, 33 bp, Homo Sapiens
atttcgatggcgtgggttcgaatcccaccgctg

SEQ ID NO: 7684 - DNA, 38 bp, Homo Sapiens
atttcgatggcgtgggttcgaatcccaccgctgccacc

SEQ ID NO: 7685 - DNA, 39 bp, Homo Sapiens
atttcgatggcgtgggttcgaatcccaccgctgccacca

SEQ ID NO: 7686 - DNA, 17 bp, Homo Sapiens
atttgcgttcagttgat

SEQ ID NO: 7687 - DNA, 18 bp, Homo Sapiens
attttcatattgaattgc

SEQ ID NO: 7688 - DNA, 19 bp, Homo Sapiens
attttcatattgaattgca

SEQ ID NO: 7689 - DNA, 24 bp, Homo Sapiens
attttcatattgaattgcaaattc

SEQ ID NO: 7690 - DNA, 26 bp, Homo Sapiens
attttcatattgaattgcaaattcga

SEQ ID NO: 7691 - DNA, 40 bp, Homo Sapiens
attttggattctcagggatgggttcgattctcatagtcct

SEQ ID NO: 7692 - DNA, 43 bp, Homo Sapiens
attttggattctcagggatgggttcgattctcatagtcctagc

SEQ ID NO: 7693 - DNA, 44 bp, Homo Sapiens
attttggattctcagggatgggttcgattctcatagtcctagcc

SEQ ID NO: 7694 - DNA, 45 bp, Homo Sapiens
attttggattctcagggatgggttcgattctcatagtcctagcca

SEQ ID NO: 7695 - DNA, 16 bp, Homo Sapiens
attttggtgcaactcc

SEQ ID NO: 7696 - DNA, 17 bp, Homo Sapiens
attttggtgcaactcca

SEQ ID NO: 7697 - DNA, 18 bp, Homo Sapiens
attttggtgcaactccaa

SEQ ID NO: 7698 - DNA, 20 bp, Homo Sapiens
attttggtgcaactccaaat

SEQ ID NO: 7699 - DNA, 21 bp, Homo Sapiens
attttggtgcaactccaaata

SEQ ID NO: 7700 - DNA, 28 bp, Homo Sapiens
attttggtgcaactccaaataaaagtac

SEQ ID NO: 7701 - DNA, 29 bp, Homo Sapiens
attttggtgcaactccaaataaaagtacc

SEQ ID NO: 7702 - DNA, 30 bp, Homo Sapiens
attttggtgcaactccaaataaaagtacca

SEQ ID NO: 7703 - DNA, 16 bp, Homo Sapiens
caaaaattttggtgca

SEQ ID NO: 7704 - DNA, 17 bp, Homo Sapiens
caaaaattttggtgcaa

SEQ ID NO: 7705 - DNA, 18 bp, Homo Sapiens
caaaaattttggtgcaac

SEQ ID NO: 7706 - DNA, 19 bp, Homo Sapiens
caaaaattttggtgcaact

SEQ ID NO: 7707 - DNA, 20 bp, Homo Sapiens
caaaaattttggtgcaactc

SEQ ID NO: 7708 - DNA, 21 bp, Homo Sapiens
caaaaattttggtgcaactcc

SEQ ID NO: 7709 - DNA, 22 bp, Homo Sapiens
caaaaattttggtgcaactcca

SEQ ID NO: 7710 - DNA, 25 bp, Homo Sapiens
caaaaattttggtgcaactccaaat

SEQ ID NO: 7711 - DNA, 26 bp, Homo Sapiens
caaaaattttggtgcaactccaaata

SEQ ID NO: 7712 - DNA, 31 bp, Homo Sapiens
caaaaattttggtgcaactccaaataaaagt

SEQ ID NO: 7713 - DNA, 32 bp, Homo Sapiens
caaaaattttggtgcaactccaaataaaagta

SEQ ID NO: 7714 - DNA, 33 bp, Homo Sapiens
caaaaattttggtgcaactccaaataaaagtac

SEQ ID NO: 7715 - DNA, 34 bp, Homo Sapiens
caaaaattttggtgcaactccaaataaaagtacc

SEQ ID NO: 7716 - DNA, 35 bp, Homo Sapiens
caaaaattttggtgcaactccaaataaaagtacca

SEQ ID NO: 7717 - DNA, 16 bp, Homo Sapiens
caaaacatcagattgt

SEQ ID NO: 7718 - DNA, 17 bp, Homo Sapiens
caaaacatcagattgtg

SEQ ID NO: 7719 - DNA, 18 bp, Homo Sapiens
caaaacatcagattgtga

SEQ ID NO: 7720 - DNA, 19 bp, Homo Sapiens
caaaacatcagattgtgaa

SEQ ID NO: 7721 - DNA, 20 bp, Homo Sapiens
caaaacatcagattgtgaat

SEQ ID NO: 7722 - DNA, 21 bp, Homo Sapiens
caaaacatcagattgtgaatc

SEQ ID NO: 7723 - DNA, 22 bp, Homo Sapiens
caaaacatcagattgtgaatct

SEQ ID NO: 7724 - DNA, 23 bp, Homo Sapiens
caaaacatcagattgtgaatctg

SEQ ID NO: 7725 - DNA, 24 bp, Homo Sapiens
caaaacatcagattgtgaatctga

SEQ ID NO: 7726 - DNA, 25 bp, Homo Sapiens
caaaacatcagattgtgaatctgac

SEQ ID NO: 7727 - DNA, 26 bp, Homo Sapiens
caaaacatcagattgtgaatctgaca

SEQ ID NO: 7728 - DNA, 28 bp, Homo Sapiens
caaaacatcagattgtgaatctgacaac

SEQ ID NO: 7729 - DNA, 29 bp, Homo Sapiens
caaaacatcagattgtgaatctgacaaca

SEQ ID NO: 7730 - DNA, 30 bp, Homo Sapiens
caaaacatcagattgtgaatctgacaacag

SEQ ID NO: 7731 - DNA, 31 bp, Homo Sapiens
caaaacatcagattgtgaatctgacaacaga

SEQ ID NO: 7732 - DNA, 32 bp, Homo Sapiens
caaaacatcagattgtgaatctgacaacagag

SEQ ID NO: 7733 - DNA, 33 bp, Homo Sapiens
caaaacatcagattgtgaatctgacaacagagg

SEQ ID NO: 7734 - DNA, 34 bp, Homo Sapiens
caaaacatcagattgtgaatctgacaacagaggc

SEQ ID NO: 7735 - DNA, 35 bp, Homo Sapiens
caaaacatcagattgtgaatctgacaacagaggct

SEQ ID NO: 7736 - DNA, 36 bp, Homo Sapiens
caaaacatcagattgtgaatctgacaacagaggctt

SEQ ID NO: 7737 - DNA, 37 bp, Homo Sapiens
caaaacatcagattgtgaatctgacaacagaggctta

SEQ ID NO: 7738 - DNA, 38 bp, Homo Sapiens
caaaacatcagattgtgaatctgacaacagaggcttac

SEQ ID NO: 7739 - DNA, 39 bp, Homo Sapiens
caaaacatcagattgtgaatctgacaacagaggcttacg

SEQ ID NO: 7740 - DNA, 40 bp, Homo Sapiens
caaaacatcagattgtgaatctgacaacagaggcttacga

SEQ ID NO: 7741 - DNA, 41 bp, Homo Sapiens
caaaacatcagattgtgaatctgacaacagaggcttacgac

SEQ ID NO: 7742 - DNA, 42 bp, Homo Sapiens
caaaacatcagattgtgaatctgacaacagaggcttacgacc

SEQ ID NO: 7743 - DNA, 43 bp, Homo Sapiens
caaaacatcagattgtgaatctgacaacagaggcttacgaccc

SEQ ID NO: 7744 - DNA, 44 bp, Homo Sapiens
caaaacatcagattgtgaatctgacaacagaggcttacgacccc

SEQ ID NO: 7745 - DNA, 45 bp, Homo Sapiens
caaaacatcagattgtgaatctgacaacagaggcttacgacccct

SEQ ID NO: 7746 - DNA, 46 bp, Homo Sapiens
caaaacatcagattgtgaatctgacaacagaggcttacgacccctt

SEQ ID NO: 7747 - DNA, 47 bp, Homo Sapiens
caaaacatcagattgtgaatctgacaacagaggcttacgacccctta

SEQ ID NO: 7748 - DNA, 48 bp, Homo Sapiens
caaaacatcagattgtgaatctgacaacagaggcttacgaccccttat

SEQ ID NO: 7749 - DNA, 16 bp, Homo Sapiens
caaaacgaatgatttc

SEQ ID NO: 7750 - DNA, 17 bp, Homo Sapiens
caaaacgaatgatttcg

SEQ ID NO: 7751 - DNA, 19 bp, Homo Sapiens
caaaacgaatgatttcgac

SEQ ID NO: 7752 - DNA, 20 bp, Homo Sapiens
caaaacgaatgatttcgact

SEQ ID NO: 7753 - DNA, 21 bp, Homo Sapiens
caaaacgaatgatttcgactc

SEQ ID NO: 7754 - DNA, 22 bp, Homo Sapiens
caaaacgaatgatttcgactca

SEQ ID NO: 7755 - DNA, 23 bp, Homo Sapiens
caaaacgaatgatttcgactcat

SEQ ID NO: 7756 - DNA, 24 bp, Homo Sapiens
caaaacgaatgatttcgactcatt

SEQ ID NO: 7757 - DNA, 25 bp, Homo Sapiens
caaaacgaatgatttcgactcatta

SEQ ID NO: 7758 - DNA, 27 bp, Homo Sapiens
caaaacgaatgatttcgactcattaaa

SEQ ID NO: 7759 - DNA, 29 bp, Homo Sapiens
caaaacgaatgatttcgactcattaaatt

SEQ ID NO: 7760 - DNA, 30 bp, Homo Sapiens
caaaacgaatgatttcgactcattaaatta

SEQ ID NO: 7761 - DNA, 32 bp, Homo Sapiens
caaaacgaatgatttcgactcattaaattatg

SEQ ID NO: 7762 - DNA, 33 bp, Homo Sapiens
caaaacgaatgatttcgactcattaaattatga

SEQ ID NO: 7763 - DNA, 34 bp, Homo Sapiens
caaaacgaatgatttcgactcattaaattatgat

SEQ ID NO: 7764 - DNA, 35 bp, Homo Sapiens
caaaacgaatgatttcgactcattaaattatgata

SEQ ID NO: 7765 - DNA, 16 bp, Homo Sapiens
caaacctgccggggct

SEQ ID NO: 7766 - DNA, 17 bp, Homo Sapiens
caaacctgccggggctt

SEQ ID NO: 7767 - DNA, 18 bp, Homo Sapiens
caaacctgccggggcttc

SEQ ID NO: 7768 - DNA, 19 bp, Homo Sapiens
caaacctgccggggcttcc

SEQ ID NO: 7769 - DNA, 20 bp, Homo Sapiens
caaacctgccggggcttcca

SEQ ID NO: 7770 - DNA, 16 bp, Homo Sapiens
caaagcaatacactga

SEQ ID NO: 7771 - DNA, 17 bp, Homo Sapiens
caaagcaatacactgaa

SEQ ID NO: 7772 - DNA, 18 bp, Homo Sapiens
caaagcaatacactgaaa

SEQ ID NO: 7773 - DNA, 28 bp, Homo Sapiens
caaagcaatacactgaaaatgtttagac

SEQ ID NO: 7774 - DNA, 30 bp, Homo Sapiens
caaagcaatacactgaaaatgtttagacgg

SEQ ID NO: 7775 - DNA, 32 bp, Homo Sapiens
caaagcaatacactgaaaatgtttagacgggc

SEQ ID NO: 7776 - DNA, 33 bp, Homo Sapiens
caaagcaatacactgaaaatgtttagacgggct

SEQ ID NO: 7777 - DNA, 34 bp, Homo Sapiens
caaagcaatacactgaaaatgtttagacgggctc

SEQ ID NO: 7778 - DNA, 35 bp, Homo Sapiens
caaagcaatacactgaaaatgtttagacgggctca

SEQ ID NO: 7779 - DNA, 36 bp, Homo Sapiens
caaagcaatacactgaaaatgtttagacgggctcac

SEQ ID NO: 7780 - DNA, 37 bp, Homo Sapiens
caaagcaatacactgaaaatgtttagacgggctcaca

SEQ ID NO: 7781 - DNA, 38 bp, Homo Sapiens
caaagcaatacactgaaaatgtttagacgggctcacat

SEQ ID NO: 7782 - DNA, 43 bp, Homo Sapiens
caaagcaatacactgaaaatgtttagacgggctcacatcaccc

SEQ ID NO: 7783 - DNA, 16 bp, Homo Sapiens
caaagcacccaactta

SEQ ID NO: 7784 - DNA, 17 bp, Homo Sapiens
caaagcacccaacttac

SEQ ID NO: 7785 - DNA, 18 bp, Homo Sapiens
caaagcacccaacttaca

SEQ ID NO: 7786 - DNA, 19 bp, Homo Sapiens
caaagcacccaacttacac

SEQ ID NO: 7787 - DNA, 20 bp, Homo Sapiens
caaagcacccaacttacact

SEQ ID NO: 7788 - DNA, 21 bp, Homo Sapiens
caaagcacccaacttacactt

SEQ ID NO: 7789 - DNA, 22 bp, Homo Sapiens
caaagcacccaacttacactta

SEQ ID NO: 7790 - DNA, 23 bp, Homo Sapiens
caaagcacccaacttacacttag

SEQ ID NO: 7791 - DNA, 24 bp, Homo Sapiens
caaagcacccaacttacacttagg

SEQ ID NO: 7792 - DNA, 25 bp, Homo Sapiens
caaagcacccaacttacacttagga

SEQ ID NO: 7793 - DNA, 26 bp, Homo Sapiens
caaagcacccaacttacacttaggag

SEQ ID NO: 7794 - DNA, 28 bp, Homo Sapiens
caaagcacccaacttacacttaggagat

SEQ ID NO: 7795 - DNA, 29 bp, Homo Sapiens
caaagcacccaacttacacttaggagatt

SEQ ID NO: 7796 - DNA, 30 bp, Homo Sapiens
caaagcacccaacttacacttaggagattt

SEQ ID NO: 7797 - DNA, 31 bp, Homo Sapiens
caaagcacccaacttacacttaggagatttc

SEQ ID NO: 7798 - DNA, 32 bp, Homo Sapiens
caaagcacccaacttacacttaggagatttca

SEQ ID NO: 7799 - DNA, 33 bp, Homo Sapiens
caaagcacccaacttacacttaggagatttcaa

SEQ ID NO: 7800 - DNA, 34 bp, Homo Sapiens
caaagcacccaacttacacttaggagatttcaac

SEQ ID NO: 7801 - DNA, 35 bp, Homo Sapiens
caaagcacccaacttacacttaggagatttcaact

SEQ ID NO: 7802 - DNA, 36 bp, Homo Sapiens
caaagcacccaacttacacttaggagatttcaactt

SEQ ID NO: 7803 - DNA, 37 bp, Homo Sapiens
caaagcacccaacttacacttaggagatttcaactta

SEQ ID NO: 7804 - DNA, 38 bp, Homo Sapiens
caaagcacccaacttacacttaggagatttcaacttaa

SEQ ID NO: 7805 - DNA, 39 bp, Homo Sapiens
caaagcacccaacttacacttaggagatttcaacttaac

SEQ ID NO: 7806 - DNA, 40 bp, Homo Sapiens
caaagcacccaacttacacttaggagatttcaacttaact

SEQ ID NO: 7807 - DNA, 44 bp, Homo Sapiens
caaagcacccaacttacacttaggagatttcaacttaacttgac

SEQ ID NO: 7808 - DNA, 45 bp, Homo Sapiens
caaagcacccaacttacacttaggagatttcaacttaacttgacc

SEQ ID NO: 7809 - DNA, 46 bp, Homo Sapiens
caaagcacccaacttacacttaggagatttcaacttaacttgaccg

SEQ ID NO: 7810 - DNA, 35 bp, Homo Sapiens
caaagccctcagtaagttgcaatacttaatttctg

SEQ ID NO: 7811 - DNA, 37 bp, Homo Sapiens
caaagccctcagtaagttgcaatacttaatttctgcc

SEQ ID NO: 7812 - DNA, 38 bp, Homo Sapiens
caaagccctcagtaagttgcaatacttaatttctgcca

SEQ ID NO: 7813 - DNA, 31 bp, Homo Sapiens
caaaggttccgggttcgagtcccggcggagt

SEQ ID NO: 7814 - DNA, 32 bp, Homo Sapiens
caaaggttccgggttcgagtcccggcggagtc

SEQ ID NO: 7815 - DNA, 34 bp, Homo Sapiens
caaaggttccgggttcgagtcccggcggagtcgc

SEQ ID NO: 7816 - DNA, 35 bp, Homo Sapiens
caaaggttccgggttcgagtcccggcggagtcgcc

SEQ ID NO: 7817 - DNA, 36 bp, Homo Sapiens
caaaggttccgggttcgagtcccggcggagtcgcca

SEQ ID NO: 7818 - DNA, 34 bp, Homo Sapiens
caaaggttgtgggttcgaatcccaccagagtcgc

SEQ ID NO: 7819 - DNA, 35 bp, Homo Sapiens
caaaggttgtgggttcgaatcccaccagagtcgcc

SEQ ID NO: 7820 - DNA, 36 bp, Homo Sapiens
caaaggttgtgggttcgaatcccaccagagtcgcca

SEQ ID NO: 7821 - DNA, 35 bp, Homo Sapiens
caaaggttgtgggttcgagtcccaccagagtcgcc

SEQ ID NO: 7822 - DNA, 36 bp, Homo Sapiens
caaaggttgtgggttcgagtcccaccagagtcgcca

SEQ ID NO: 7823 - DNA, 18 bp, Homo Sapiens
caaagttaaattataggc

SEQ ID NO: 7824 - DNA, 19 bp, Homo Sapiens
caaagttaaattataggct

SEQ ID NO: 7825 - DNA, 21 bp, Homo Sapiens
caaagttaaattataggctaa

SEQ ID NO: 7826 - DNA, 24 bp, Homo Sapiens
caaagttaaattataggctaaatc

SEQ ID NO: 7827 - DNA, 25 bp, Homo Sapiens
caaagttaaattataggctaaatcc

SEQ ID NO: 7828 - DNA, 26 bp, Homo Sapiens
caaagttaaattataggctaaatcct

SEQ ID NO: 7829 - DNA, 29 bp, Homo Sapiens
caaagttaaattataggctaaatcctata

SEQ ID NO: 7830 - DNA, 31 bp, Homo Sapiens
caaagttaaattataggctaaatcctatata

SEQ ID NO: 7831 - DNA, 35 bp, Homo Sapiens
caaagttaaattataggctaaatcctatatatctt

SEQ ID NO: 7832 - DNA, 20 bp, Homo Sapiens
caaatcacgtcggggtcacc

SEQ ID NO: 7833 - DNA, 21 bp, Homo Sapiens
caaatcacgtcggggtcacca

SEQ ID NO: 7834 - DNA, 16 bp, Homo Sapiens
caaatcccggacgagc

SEQ ID NO: 7835 - DNA, 17 bp, Homo Sapiens
caaatcccggacgagcc

SEQ ID NO: 7836 - DNA, 18 bp, Homo Sapiens
caaatcccggacgagccc

SEQ ID NO: 7837 - DNA, 19 bp, Homo Sapiens
caaatcccggacgagcccc

SEQ ID NO: 7838 - DNA, 20 bp, Homo Sapiens
caaatcccggacgagccccc

SEQ ID NO: 7839 - DNA, 21 bp, Homo Sapiens
caaatcccggacgagccccca

SEQ ID NO: 7840 - DNA, 19 bp, Homo Sapiens
caaatccgggtgccccctc

SEQ ID NO: 7841 - DNA, 20 bp, Homo Sapiens
caaatccgggtgccccctcc

SEQ ID NO: 7842 - DNA, 18 bp, Homo Sapiens
caaatctcgctggggcct

SEQ ID NO: 7843 - DNA, 19 bp, Homo Sapiens
caaatctcgctggggcctc

SEQ ID NO: 7844 - DNA, 20 bp, Homo Sapiens
caaatctcgctggggcctcc

SEQ ID NO: 7845 - DNA, 17 bp, Homo Sapiens
caaatctcggtggaacc

SEQ ID NO: 7846 - DNA, 18 bp, Homo Sapiens
caaatctcggtggaacct

SEQ ID NO: 7847 - DNA, 19 bp, Homo Sapiens
caaatctcggtggaacctc

SEQ ID NO: 7848 - DNA, 20 bp, Homo Sapiens
caaatctcggtggaacctcc

SEQ ID NO: 7849 - DNA, 21 bp, Homo Sapiens
caaatctcggtggaacctcca

SEQ ID NO: 7850 - DNA, 17 bp, Homo Sapiens
caaatctcggtgggacc

SEQ ID NO: 7851 - DNA, 18 bp, Homo Sapiens
caaatctcggtgggacct

SEQ ID NO: 7852 - DNA, 19 bp, Homo Sapiens
caaatctcggtgggacctc

SEQ ID NO: 7853 - DNA, 17 bp, Homo Sapiens
caaatggtagagcgctc

SEQ ID NO: 7854 - DNA, 19 bp, Homo Sapiens
caaatggtagagcgctcgc

SEQ ID NO: 7855 - DNA, 21 bp, Homo Sapiens
caaatggtagagcgctcgctt

SEQ ID NO: 7856 - DNA, 17 bp, Homo Sapiens
caaattcgaagaagcag

SEQ ID NO: 7857 - DNA, 18 bp, Homo Sapiens
caaattcgaagaagcagc

SEQ ID NO: 7858 - DNA, 20 bp, Homo Sapiens
caaattcgaagaagcagctt

SEQ ID NO: 7859 - DNA, 21 bp, Homo Sapiens
caaattcgaagaagcagcttc

SEQ ID NO: 7860 - DNA, 28 bp, Homo Sapiens
caaattcgaagaagcagcttcaaacctg

SEQ ID NO: 7861 - DNA, 31 bp, Homo Sapiens
caaattcgaagaagcagcttcaaacctgccg

SEQ ID NO: 7862 - DNA, 35 bp, Homo Sapiens
caaattcgaagaagcagcttcaaacctgccggggc

SEQ ID NO: 7863 - DNA, 36 bp, Homo Sapiens
caaattcgaagaagcagcttcaaacctgccggggct

SEQ ID NO: 7864 - DNA, 37 bp, Homo Sapiens
caaattcgaagaagcagcttcaaacctgccggggctt

SEQ ID NO: 7865 - DNA, 38 bp, Homo Sapiens
caaattcgaagaagcagcttcaaacctgccggggcttc

SEQ ID NO: 7866 - DNA, 39 bp, Homo Sapiens
caaattcgaagaagcagcttcaaacctgccggggcttcc

SEQ ID NO: 7867 - DNA, 40 bp, Homo Sapiens
caaattcgaagaagcagcttcaaacctgccggggcttcca

SEQ ID NO: 7868 - DNA, 16 bp, Homo Sapiens
caacacctctttacag

SEQ ID NO: 7869 - DNA, 17 bp, Homo Sapiens
caacacctctttacagt

SEQ ID NO: 7870 - DNA, 19 bp, Homo Sapiens
caacacctctttacagtga

SEQ ID NO: 7871 - DNA, 20 bp, Homo Sapiens
caacacctctttacagtgac

SEQ ID NO: 7872 - DNA, 21 bp, Homo Sapiens
caacacctctttacagtgacc

SEQ ID NO: 7873 - DNA, 22 bp, Homo Sapiens
caacacctctttacagtgacca

SEQ ID NO: 7874 - DNA, 17 bp, Homo Sapiens
caacagaggcttacgac

SEQ ID NO: 7875 - DNA, 18 bp, Homo Sapiens
caacagaggcttacgacc

SEQ ID NO: 7876 - DNA, 19 bp, Homo Sapiens
caacagaggcttacgaccc

SEQ ID NO: 7877 - DNA, 21 bp, Homo Sapiens
caacagaggcttacgacccct

SEQ ID NO: 7878 - DNA, 23 bp, Homo Sapiens
caacagaggcttacgacccctta

SEQ ID NO: 7879 - DNA, 28 bp, Homo Sapiens
caacagaggcttacgaccccttatttac

SEQ ID NO: 7880 - DNA, 29 bp, Homo Sapiens
caacagaggcttacgaccccttatttacc

SEQ ID NO: 7881 - DNA, 30 bp, Homo Sapiens
caacagaggcttacgaccccttatttaccc

SEQ ID NO: 7882 - DNA, 31 bp, Homo Sapiens
caacagaggcttacgaccccttatttacccc

SEQ ID NO: 7883 - DNA, 32 bp, Homo Sapiens
caacagaggcttacgaccccttatttacccca

SEQ ID NO: 7884 - DNA, 16 bp, Homo Sapiens
caacatggctttctca

SEQ ID NO: 7885 - DNA, 17 bp, Homo Sapiens
caacatggctttctcac

SEQ ID NO: 7886 - DNA, 18 bp, Homo Sapiens
caacatggctttctcacc

SEQ ID NO: 7887 - DNA, 19 bp, Homo Sapiens
caacatggctttctcacca

SEQ ID NO: 7888 - DNA, 18 bp, Homo Sapiens
caacattcaaaaaagagt

SEQ ID NO: 7889 - DNA, 19 bp, Homo Sapiens
caacattcaaaaaagagta

SEQ ID NO: 7890 - DNA, 20 bp, Homo Sapiens
caacattcaaaaaagagtac

SEQ ID NO: 7891 - DNA, 21 bp, Homo Sapiens
caacattcaaaaaagagtacc

SEQ ID NO: 7892 - DNA, 22 bp, Homo Sapiens
caacattcaaaaaagagtacca

SEQ ID NO: 7893 - DNA, 28 bp, Homo Sapiens
caacctcggttcgaatccgagtcacggc

SEQ ID NO: 7894 - DNA, 29 bp, Homo Sapiens
caacctcggttcgaatccgagtcacggca

SEQ ID NO: 7895 - DNA, 30 bp, Homo Sapiens
caacctcggttcgaatccgagtcacggcac

SEQ ID NO: 7896 - DNA, 31 bp, Homo Sapiens
caacctcggttcgaatccgagtcacggcacc

SEQ ID NO: 7897 - DNA, 16 bp, Homo Sapiens
caacgatggtttttca

SEQ ID NO: 7898 - DNA, 17 bp, Homo Sapiens
caacgatggtttttcat

SEQ ID NO: 7899 - DNA, 19 bp, Homo Sapiens
caacgatggtttttcatat

SEQ ID NO: 7900 - DNA, 20 bp, Homo Sapiens
caacgatggtttttcatatc

SEQ ID NO: 7901 - DNA, 27 bp, Homo Sapiens
caacgatggtttttcatatcattggtc

SEQ ID NO: 7902 - DNA, 29 bp, Homo Sapiens
caacgatggtttttcatatcattggtcgt

SEQ ID NO: 7903 - DNA, 30 bp, Homo Sapiens
caacgatggtttttcatatcattggtcgtg

SEQ ID NO: 7904 - DNA, 34 bp, Homo Sapiens
caacgatggtttttcatatcattggtcgtggttg

SEQ ID NO: 7905 - DNA, 35 bp, Homo Sapiens
caacgatggtttttcatatcattggtcgtggttgt

SEQ ID NO: 7906 - DNA, 36 bp, Homo Sapiens
caacgatggtttttcatatcattggtcgtggttgta

SEQ ID NO: 7907 - DNA, 37 bp, Homo Sapiens
caacgatggtttttcatatcattggtcgtggttgtag

SEQ ID NO: 7908 - DNA, 38 bp, Homo Sapiens
caacgatggtttttcatatcattggtcgtggttgtagt

SEQ ID NO: 7909 - DNA, 39 bp, Homo Sapiens
caacgatggtttttcatatcattggtcgtggttgtagtc

SEQ ID NO: 7910 - DNA, 40 bp, Homo Sapiens
caacgatggtttttcatatcattggtcgtggttgtagtcc

SEQ ID NO: 7911 - DNA, 41 bp, Homo Sapiens
caacgatggtttttcatatcattggtcgtggttgtagtccg

SEQ ID NO: 7912 - DNA, 42 bp, Homo Sapiens
caacgatggtttttcatatcattggtcgtggttgtagtccgt

SEQ ID NO: 7913 - DNA, 43 bp, Homo Sapiens
caacgatggtttttcatatcattggtcgtggttgtagtccgtg

SEQ ID NO: 7914 - DNA, 44 bp, Homo Sapiens
caacgatggtttttcatatcattggtcgtggttgtagtccgtgc

SEQ ID NO: 7915 - DNA, 47 bp, Homo Sapiens
caacgatggtttttcatatcattggtcgtggttgtagtccgtgcgag

SEQ ID NO: 7916 - DNA, 48 bp, Homo Sapiens
caacgatggtttttcatatcattggtcgtggttgtagtccgtgcgaga

SEQ ID NO: 7917 - DNA, 20 bp, Homo Sapiens
caacggtagcgcgtctgact

SEQ ID NO: 7918 - DNA, 16 bp, Homo Sapiens
caactccaaataaaag

SEQ ID NO: 7919 - DNA, 17 bp, Homo Sapiens
caactccaaataaaagt

SEQ ID NO: 7920 - DNA, 18 bp, Homo Sapiens
caactccaaataaaagta

SEQ ID NO: 7921 - DNA, 19 bp, Homo Sapiens
caactccaaataaaagtac

SEQ ID NO: 7922 - DNA, 20 bp, Homo Sapiens
caactccaaataaaagtacc

SEQ ID NO: 7923 - DNA, 21 bp, Homo Sapiens
caactccaaataaaagtacca

SEQ ID NO: 7924 - DNA, 16 bp, Homo Sapiens
caacttaacttgaccg

SEQ ID NO: 7925 - DNA, 17 bp, Homo Sapiens
caacttaacttgaccgc

SEQ ID NO: 7926 - DNA, 18 bp, Homo Sapiens
caacttaacttgaccgct

SEQ ID NO: 7927 - DNA, 19 bp, Homo Sapiens
caacttaacttgaccgctc

SEQ ID NO: 7928 - DNA, 20 bp, Homo Sapiens
caacttaacttgaccgctct

SEQ ID NO: 7929 - DNA, 21 bp, Homo Sapiens
caacttaacttgaccgctctg

SEQ ID NO: 7930 - DNA, 22 bp, Homo Sapiens
caacttaacttgaccgctctga

SEQ ID NO: 7931 - DNA, 23 bp, Homo Sapiens
caacttaacttgaccgctctgac

SEQ ID NO: 7932 - DNA, 24 bp, Homo Sapiens
caacttaacttgaccgctctgacc

SEQ ID NO: 7933 - DNA, 25 bp, Homo Sapiens
caacttaacttgaccgctctgacca

SEQ ID NO: 7934 - DNA, 16 bp, Homo Sapiens
caacttacacttagga

SEQ ID NO: 7935 - DNA, 17 bp, Homo Sapiens
caacttacacttaggag

SEQ ID NO: 7936 - DNA, 18 bp, Homo Sapiens
caacttacacttaggaga

SEQ ID NO: 7937 - DNA, 19 bp, Homo Sapiens
caacttacacttaggagat

SEQ ID NO: 7938 - DNA, 20 bp, Homo Sapiens
caacttacacttaggagatt

SEQ ID NO: 7939 - DNA, 21 bp, Homo Sapiens
caacttacacttaggagattt

SEQ ID NO: 7940 - DNA, 22 bp, Homo Sapiens
caacttacacttaggagatttc

SEQ ID NO: 7941 - DNA, 23 bp, Homo Sapiens
caacttacacttaggagatttca

SEQ ID NO: 7942 - DNA, 24 bp, Homo Sapiens
caacttacacttaggagatttcaa

SEQ ID NO: 7943 - DNA, 25 bp, Homo Sapiens
caacttacacttaggagatttcaac

SEQ ID NO: 7944 - DNA, 26 bp, Homo Sapiens
caacttacacttaggagatttcaact

SEQ ID NO: 7945 - DNA, 27 bp, Homo Sapiens
caacttacacttaggagatttcaactt

SEQ ID NO: 7946 - DNA, 28 bp, Homo Sapiens
caacttacacttaggagatttcaactta

SEQ ID NO: 7947 - DNA, 29 bp, Homo Sapiens
caacttacacttaggagatttcaacttaa

SEQ ID NO: 7948 - DNA, 30 bp, Homo Sapiens
caacttacacttaggagatttcaacttaac

SEQ ID NO: 7949 - DNA, 31 bp, Homo Sapiens
caacttacacttaggagatttcaacttaact

SEQ ID NO: 7950 - DNA, 32 bp, Homo Sapiens
caacttacacttaggagatttcaacttaactt

SEQ ID NO: 7951 - DNA, 33 bp, Homo Sapiens
caacttacacttaggagatttcaacttaacttg

SEQ ID NO: 7952 - DNA, 34 bp, Homo Sapiens
caacttacacttaggagatttcaacttaacttga

SEQ ID NO: 7953 - DNA, 35 bp, Homo Sapiens
caacttacacttaggagatttcaacttaacttgac

SEQ ID NO: 7954 - DNA, 36 bp, Homo Sapiens
caacttacacttaggagatttcaacttaacttgacc

SEQ ID NO: 7955 - DNA, 37 bp, Homo Sapiens
caacttacacttaggagatttcaacttaacttgaccg

SEQ ID NO: 7956 - DNA, 38 bp, Homo Sapiens
caacttacacttaggagatttcaacttaacttgaccgc

SEQ ID NO: 7957 - DNA, 39 bp, Homo Sapiens
caacttacacttaggagatttcaacttaacttgaccgct

SEQ ID NO: 7958 - DNA, 40 bp, Homo Sapiens
caacttacacttaggagatttcaacttaacttgaccgctc

SEQ ID NO: 7959 - DNA, 41 bp, Homo Sapiens
caacttacacttaggagatttcaacttaacttgaccgctct

SEQ ID NO: 7960 - DNA, 42 bp, Homo Sapiens
caacttacacttaggagatttcaacttaacttgaccgctctg

SEQ ID NO: 7961 - DNA, 43 bp, Homo Sapiens
caacttacacttaggagatttcaacttaacttgaccgctctga

SEQ ID NO: 7962 - DNA, 44 bp, Homo Sapiens
caacttacacttaggagatttcaacttaacttgaccgctctgac

SEQ ID NO: 7963 - DNA, 45 bp, Homo Sapiens
caacttacacttaggagatttcaacttaacttgaccgctctgacc

SEQ ID NO: 7964 - DNA, 46 bp, Homo Sapiens
caacttacacttaggagatttcaacttaacttgaccgctctgacca

SEQ ID NO: 7965 - DNA, 16 bp, Homo Sapiens
caagaactgctaactc

SEQ ID NO: 7966 - DNA, 17 bp, Homo Sapiens
caagaactgctaactca

SEQ ID NO: 7967 - DNA, 18 bp, Homo Sapiens
caagaactgctaactcat

SEQ ID NO: 7968 - DNA, 19 bp, Homo Sapiens
caagaactgctaactcatg

SEQ ID NO: 7969 - DNA, 20 bp, Homo Sapiens
caagaactgctaactcatgc

SEQ ID NO: 7970 - DNA, 21 bp, Homo Sapiens
caagaactgctaactcatgcc

SEQ ID NO: 7971 - DNA, 22 bp, Homo Sapiens
caagaactgctaactcatgccc

SEQ ID NO: 7972 - DNA, 23 bp, Homo Sapiens
caagaactgctaactcatgcccc

SEQ ID NO: 7973 - DNA, 24 bp, Homo Sapiens
caagaactgctaactcatgccccc

SEQ ID NO: 7974 - DNA, 25 bp, Homo Sapiens
caagaactgctaactcatgccccca

SEQ ID NO: 7975 - DNA, 26 bp, Homo Sapiens
caagaactgctaactcatgcccccat

SEQ ID NO: 7976 - DNA, 27 bp, Homo Sapiens
caagaactgctaactcatgcccccatg

SEQ ID NO: 7977 - DNA, 28 bp, Homo Sapiens
caagaactgctaactcatgcccccatgt

SEQ ID NO: 7978 - DNA, 29 bp, Homo Sapiens
caagaactgctaactcatgcccccatgtc

SEQ ID NO: 7979 - DNA, 30 bp, Homo Sapiens
caagaactgctaactcatgcccccatgtct

SEQ ID NO: 7980 - DNA, 31 bp, Homo Sapiens
caagaactgctaactcatgcccccatgtcta

SEQ ID NO: 7981 - DNA, 32 bp, Homo Sapiens
caagaactgctaactcatgcccccatgtctaa

SEQ ID NO: 7982 - DNA, 33 bp, Homo Sapiens
caagaactgctaactcatgcccccatgtctaac

SEQ ID NO: 7983 - DNA, 34 bp, Homo Sapiens
caagaactgctaactcatgcccccatgtctaaca

SEQ ID NO: 7984 - DNA, 35 bp, Homo Sapiens
caagaactgctaactcatgcccccatgtctaacaa

SEQ ID NO: 7985 - DNA, 36 bp, Homo Sapiens
caagaactgctaactcatgcccccatgtctaacaac

SEQ ID NO: 7986 - DNA, 37 bp, Homo Sapiens
caagaactgctaactcatgcccccatgtctaacaaca

SEQ ID NO: 7987 - DNA, 38 bp, Homo Sapiens
caagaactgctaactcatgcccccatgtctaacaacat

SEQ ID NO: 7988 - DNA, 39 bp, Homo Sapiens
caagaactgctaactcatgcccccatgtctaacaacatg

SEQ ID NO: 7989 - DNA, 40 bp, Homo Sapiens
caagaactgctaactcatgcccccatgtctaacaacatgg

SEQ ID NO: 7990 - DNA, 41 bp, Homo Sapiens
caagaactgctaactcatgcccccatgtctaacaacatggc

SEQ ID NO: 7991 - DNA, 42 bp, Homo Sapiens
caagaactgctaactcatgcccccatgtctaacaacatggct

SEQ ID NO: 7992 - DNA, 43 bp, Homo Sapiens
caagaactgctaactcatgcccccatgtctaacaacatggctt

SEQ ID NO: 7993 - DNA, 44 bp, Homo Sapiens
caagaactgctaactcatgcccccatgtctaacaacatggcttt

SEQ ID NO: 7994 - DNA, 45 bp, Homo Sapiens
caagaactgctaactcatgcccccatgtctaacaacatggctttc

SEQ ID NO: 7995 - DNA, 46 bp, Homo Sapiens
caagaactgctaactcatgcccccatgtctaacaacatggctttct

SEQ ID NO: 7996 - DNA, 47 bp, Homo Sapiens
caagaactgctaactcatgcccccatgtctaacaacatggctttctc

SEQ ID NO: 7997 - DNA, 48 bp, Homo Sapiens
caagaactgctaactcatgcccccatgtctaacaacatggctttctca

SEQ ID NO: 7998 - DNA, 17 bp, Homo Sapiens
caagagccttcaaagcc

SEQ ID NO: 7999 - DNA, 20 bp, Homo Sapiens
caagagccttcaaagccctc

SEQ ID NO: 8000 - DNA, 29 bp, Homo Sapiens
caagagccttcaaagccctcagtaagttg

SEQ ID NO: 8001 - DNA, 30 bp, Homo Sapiens
caagagccttcaaagccctcagtaagttgc

SEQ ID NO: 8002 - DNA, 35 bp, Homo Sapiens
caagagccttcaaagccctcagtaagttgcaatac

SEQ ID NO: 8003 - DNA, 47 bp, Homo Sapiens
caagagccttcaaagccctcagtaagttgcaatacttaatttctgcc

SEQ ID NO: 8004 - DNA, 17 bp, Homo Sapiens
caagaggtccccggttc

SEQ ID NO: 8005 - DNA, 18 bp, Homo Sapiens
caagaggtccccggttca

SEQ ID NO: 8006 - DNA, 34 bp, Homo Sapiens
caagaggtccccggttcaaatccgggtgccccct

SEQ ID NO: 8007 - DNA, 35 bp, Homo Sapiens
caagaggtccccggttcaaatccgggtgccccctc

SEQ ID NO: 8008 - DNA, 36 bp, Homo Sapiens
caagaggtccccggttcaaatccgggtgccccctcc

SEQ ID NO: 8009 - DNA, 16 bp, Homo Sapiens
caagaggtccctggtt

SEQ ID NO: 8010 - DNA, 17 bp, Homo Sapiens
caagaggtccctggttc

SEQ ID NO: 8011 - DNA, 25 bp, Homo Sapiens
caagaggtccctggttcaaatccgg

SEQ ID NO: 8012 - DNA, 34 bp, Homo Sapiens
caagaggtccctggttcaaatccgggtgccccct

SEQ ID NO: 8013 - DNA, 27 bp, Homo Sapiens
caagattcccattcttgcgacccgggt

SEQ ID NO: 8014 - DNA, 16 bp, Homo Sapiens
caagcagttgacccgg

SEQ ID NO: 8015 - DNA, 17 bp, Homo Sapiens
caagcagttgacccggg

SEQ ID NO: 8016 - DNA, 18 bp, Homo Sapiens
caagcagttgacccgggt

SEQ ID NO: 8017 - DNA, 19 bp, Homo Sapiens
caagcagttgacccgggtt

SEQ ID NO: 8018 - DNA, 20 bp, Homo Sapiens
caagcagttgacccgggttc

SEQ ID NO: 8019 - DNA, 21 bp, Homo Sapiens
caagcagttgacccgggttcg

SEQ ID NO: 8020 - DNA, 22 bp, Homo Sapiens
caagcagttgacccgggttcga

SEQ ID NO: 8021 - DNA, 23 bp, Homo Sapiens
caagcagttgacccgggttcgat

SEQ ID NO: 8022 - DNA, 24 bp, Homo Sapiens
caagcagttgacccgggttcgatt

SEQ ID NO: 8023 - DNA, 26 bp, Homo Sapiens
caagcagttgacccgggttcgattcc

SEQ ID NO: 8024 - DNA, 28 bp, Homo Sapiens
caagcagttgacccgggttcgattcccg

SEQ ID NO: 8025 - DNA, 31 bp, Homo Sapiens
caagcagttgacccgggttcgattcccggcc

SEQ ID NO: 8026 - DNA, 34 bp, Homo Sapiens
caagcagttgacccgggttcgattcccggccaac

SEQ ID NO: 8027 - DNA, 35 bp, Homo Sapiens
caagcagttgacccgggttcgattcccggccaacg

SEQ ID NO: 8028 - DNA, 36 bp, Homo Sapiens
caagcagttgacccgggttcgattcccggccaacgc

SEQ ID NO: 8029 - DNA, 37 bp, Homo Sapiens
caagcagttgacccgggttcgattcccggccaacgca

SEQ ID NO: 8030 - DNA, 39 bp, Homo Sapiens
caagcagttgacccgggttcgattcccggccaacgcacc

SEQ ID NO: 8031 - DNA, 16 bp, Homo Sapiens
caaggtcgcgggttcg

SEQ ID NO: 8032 - DNA, 30 bp, Homo Sapiens
caaggtcgcgggttcgaaccccgtacgggc

SEQ ID NO: 8033 - DNA, 31 bp, Homo Sapiens
caaggtcgcgggttcgaaccccgtacgggcc

SEQ ID NO: 8034 - DNA, 34 bp, Homo Sapiens
caaggtcgcgggttcgaaccccgtacgggccacc

SEQ ID NO: 8035 - DNA, 35 bp, Homo Sapiens
caaggtcgcgggttcgaaccccgtacgggccacca

SEQ ID NO: 8036 - DNA, 30 bp, Homo Sapiens
caaggtcgcgggttcgatccccgtacgggc

SEQ ID NO: 8037 - DNA, 31 bp, Homo Sapiens
caaggtcgcgggttcgatccccgtacgggcc

SEQ ID NO: 8038 - DNA, 32 bp, Homo Sapiens
caaggtcgcgggttcgatccccgtacgggcca

SEQ ID NO: 8039 - DNA, 34 bp, Homo Sapiens
caaggtcgcgggttcgatccccgtacgggccacc

SEQ ID NO: 8040 - DNA, 35 bp, Homo Sapiens
caaggtcgcgggttcgatccccgtacgggccacca

SEQ ID NO: 8041 - DNA, 34 bp, Homo Sapiens
caaggtcgcgggttcgatccccgtactggccacc

SEQ ID NO: 8042 - DNA, 35 bp, Homo Sapiens
caaggtcgcgggttcgatccccgtactggccacca

SEQ ID NO: 8043 - DNA, 20 bp, Homo Sapiens
caagtcacgtcggggtcacc

SEQ ID NO: 8044 - DNA, 17 bp, Homo Sapiens
caagtccctgttcgggc

SEQ ID NO: 8045 - DNA, 18 bp, Homo Sapiens
caagtccctgttcgggcg

SEQ ID NO: 8046 - DNA, 19 bp, Homo Sapiens
caagtccctgttcgggcgc

SEQ ID NO: 8047 - DNA, 20 bp, Homo Sapiens
caagtccctgttcgggcgcc

SEQ ID NO: 8048 - DNA, 21 bp, Homo Sapiens
caagtccctgttcgggcgcca

SEQ ID NO: 8049 - DNA, 16 bp, Homo Sapiens
caagttctggtctcca

SEQ ID NO: 8050 - DNA, 17 bp, Homo Sapiens
caagttctggtctccaa

SEQ ID NO: 8051 - DNA, 18 bp, Homo Sapiens
caagttctggtctccaat

SEQ ID NO: 8052 - DNA, 19 bp, Homo Sapiens
caagttctggtctccaatg

SEQ ID NO: 8053 - DNA, 30 bp, Homo Sapiens
caagttctggtctccaatggaggcgtgggt

SEQ ID NO: 8054 - DNA, 31 bp, Homo Sapiens
caagttctggtctccaatggaggcgtgggtt

SEQ ID NO: 8055 - DNA, 16 bp, Homo Sapiens
caagttctggtctccg

SEQ ID NO: 8056 - DNA, 17 bp, Homo Sapiens
caagttctggtctccgg

SEQ ID NO: 8057 - DNA, 18 bp, Homo Sapiens
caagttctggtctccgga

SEQ ID NO: 8058 - DNA, 19 bp, Homo Sapiens
caagttctggtctccggat

SEQ ID NO: 8059 - DNA, 20 bp, Homo Sapiens
caagttctggtctccggatg

SEQ ID NO: 8060 - DNA, 22 bp, Homo Sapiens
caagttctggtctccggatgga

SEQ ID NO: 8061 - DNA, 30 bp, Homo Sapiens
caagttctggtctccggatggaggcgtggg

SEQ ID NO: 8062 - DNA, 31 bp, Homo Sapiens
caagttctggtctccggatggaggcgtgggt

SEQ ID NO: 8063 - DNA, 32 bp, Homo Sapiens
caagttctggtctccggatggaggcgtgggtt

SEQ ID NO: 8064 - DNA, 23 bp, Homo Sapiens
caatacactgaaaatgtttagac

SEQ ID NO: 8065 - DNA, 24 bp, Homo Sapiens
caatacactgaaaatgtttagacg

SEQ ID NO: 8066 - DNA, 25 bp, Homo Sapiens
caatacactgaaaatgtttagacgg

SEQ ID NO: 8067 - DNA, 27 bp, Homo Sapiens
caatacactgaaaatgtttagacgggc

SEQ ID NO: 8068 - DNA, 28 bp, Homo Sapiens
caatacactgaaaatgtttagacgggct

SEQ ID NO: 8069 - DNA, 29 bp, Homo Sapiens
caatacactgaaaatgtttagacgggctc

SEQ ID NO: 8070 - DNA, 30 bp, Homo Sapiens
caatacactgaaaatgtttagacgggctca

SEQ ID NO: 8071 - DNA, 31 bp, Homo Sapiens
caatacactgaaaatgtttagacgggctcac

SEQ ID NO: 8072 - DNA, 32 bp, Homo Sapiens
caatacactgaaaatgtttagacgggctcaca

SEQ ID NO: 8073 - DNA, 33 bp, Homo Sapiens
caatacactgaaaatgtttagacgggctcacat

SEQ ID NO: 8074 - DNA, 34 bp, Homo Sapiens
caatacactgaaaatgtttagacgggctcacatc

SEQ ID NO: 8075 - DNA, 37 bp, Homo Sapiens
caatacactgaaaatgtttagacgggctcacatcacc

SEQ ID NO: 8076 - DNA, 38 bp, Homo Sapiens
caatacactgaaaatgtttagacgggctcacatcaccc

SEQ ID NO: 8077 - DNA, 39 bp, Homo Sapiens
caatacactgaaaatgtttagacgggctcacatcacccc

SEQ ID NO: 8078 - DNA, 46 bp, Homo Sapiens
caatacactgaaaatgtttagacgggctcacatcaccccataaaca

SEQ ID NO: 8079 - DNA, 48 bp, Homo Sapiens
caatacactgaaaatgtttagacgggctcacatcaccccataaacacc

SEQ ID NO: 8080 - DNA, 17 bp, Homo Sapiens
caatacttaatttctgc

SEQ ID NO: 8081 - DNA, 18 bp, Homo Sapiens
caatacttaatttctgcc

SEQ ID NO: 8082 - DNA, 19 bp, Homo Sapiens
caatacttaatttctgcca

SEQ ID NO: 8083 - DNA, 16 bp, Homo Sapiens
caatccccggcacctc

SEQ ID NO: 8084 - DNA, 20 bp, Homo Sapiens
caatccccggcacctccacc

SEQ ID NO: 8085 - DNA, 21 bp, Homo Sapiens
caatccccggcacctccacca

SEQ ID NO: 8086 - DNA, 20 bp, Homo Sapiens
caatccccggcatctccacc

SEQ ID NO: 8087 - DNA, 21 bp, Homo Sapiens
caatccccggcatctccacca

SEQ ID NO: 8088 - DNA, 21 bp, Homo Sapiens
caatcggttagcgcgcggtac

SEQ ID NO: 8089 - DNA, 22 bp, Homo Sapiens
caatcggttagcgcgcggtact

SEQ ID NO: 8090 - DNA, 24 bp, Homo Sapiens
caatcggttagcgcgcggtactta

SEQ ID NO: 8091 - DNA, 44 bp, Homo Sapiens
caatggacaggtgtccgcgtgggttcgagccccactcccggtac

SEQ ID NO: 8092 - DNA, 24 bp, Homo Sapiens
caatggacatatgtccgcgtgggt

SEQ ID NO: 8093 - DNA, 25 bp, Homo Sapiens
caatggacatatgtccgcgtgggtt

SEQ ID NO: 8094 - DNA, 26 bp, Homo Sapiens
caatggacatatgtccgcgtgggttc

SEQ ID NO: 8095 - DNA, 27 bp, Homo Sapiens
caatggacatatgtccgcgtgggttcg

SEQ ID NO: 8096 - DNA, 44 bp, Homo Sapiens
caatggacatatgtccgcgtgggttcgaaccccactcctggtac

SEQ ID NO: 8097 - DNA, 45 bp, Homo Sapiens
caatggacatatgtccgcgtgggttcgaaccccactcctggtacc

SEQ ID NO: 8098 - DNA, 46 bp, Homo Sapiens
caatggacatatgtccgcgtgggttcgaaccccactcctggtacca

SEQ ID NO: 8099 - DNA, 17 bp, Homo Sapiens
caatggacgagcgcgct

SEQ ID NO: 8100 - DNA, 20 bp, Homo Sapiens
caatggacgagcgcgctgga

SEQ ID NO: 8101 - DNA, 16 bp, Homo Sapiens
caatggaggcgtgggt

SEQ ID NO: 8102 - DNA, 17 bp, Homo Sapiens
caatggaggcgtgggtt

SEQ ID NO: 8103 - DNA, 18 bp, Homo Sapiens
caatggaggcgtgggttc

SEQ ID NO: 8104 - DNA, 32 bp, Homo Sapiens
caatggaggcgtgggttcgaatcccacttctg

SEQ ID NO: 8105 - DNA, 35 bp, Homo Sapiens
caatggaggcgtgggttcgaatcccacttctgaca

SEQ ID NO: 8106 - DNA, 36 bp, Homo Sapiens
caatggaggcgtgggttcgaatcccacttctgacac

SEQ ID NO: 8107 - DNA, 37 bp, Homo Sapiens
caatggaggcgtgggttcgaatcccacttctgacacc

SEQ ID NO: 8108 - DNA, 38 bp, Homo Sapiens
caatggaggcgtgggttcgaatcccacttctgacacca

SEQ ID NO: 8109 - DNA, 19 bp, Homo Sapiens
caatggataacgcgtctga

SEQ ID NO: 8110 - DNA, 21 bp, Homo Sapiens
caatggataacgcgtctgact

SEQ ID NO: 8111 - DNA, 16 bp, Homo Sapiens
caatggatagcgcatt

SEQ ID NO: 8112 - DNA, 17 bp, Homo Sapiens
caatggatagcgcattg

SEQ ID NO: 8113 - DNA, 18 bp, Homo Sapiens
caatggatagcgcattgg

SEQ ID NO: 8114 - DNA, 19 bp, Homo Sapiens
caatggatagcgcattgga

SEQ ID NO: 8115 - DNA, 20 bp, Homo Sapiens
caatggatagcgcattggac

SEQ ID NO: 8116 - DNA, 21 bp, Homo Sapiens
caatggatagcgcattggact

SEQ ID NO: 8117 - DNA, 43 bp, Homo Sapiens
caatggattcatatccgcgtgggttcgaaccccacttctggta

SEQ ID NO: 8118 - DNA, 45 bp, Homo Sapiens
caatgggctggtgcccgcgtgggttcgaaccccactctcggtacc

SEQ ID NO: 8119 - DNA, 23 bp, Homo Sapiens
caatggggtctccccgcgcaggt

SEQ ID NO: 8120 - DNA, 33 bp, Homo Sapiens
caatggggtctccccgcgcaggttcgaaccctg

SEQ ID NO: 8121 - DNA, 20 bp, Homo Sapiens
caatggtagaattctcgcct

SEQ ID NO: 8122 - DNA, 18 bp, Homo Sapiens
caattaactagttttgac

SEQ ID NO: 8123 - DNA, 19 bp, Homo Sapiens
caattaactagttttgaca

SEQ ID NO: 8124 - DNA, 20 bp, Homo Sapiens
caattaactagttttgacaa

SEQ ID NO: 8125 - DNA, 21 bp, Homo Sapiens
caattaactagttttgacaac

SEQ ID NO: 8126 - DNA, 22 bp, Homo Sapiens
caattaactagttttgacaaca

SEQ ID NO: 8127 - DNA, 25 bp, Homo Sapiens
caattaactagttttgacaacattc

SEQ ID NO: 8128 - DNA, 30 bp, Homo Sapiens
caattaactagttttgacaacattcaaaaa

SEQ ID NO: 8129 - DNA, 32 bp, Homo Sapiens
caattaactagttttgacaacattcaaaaaag

SEQ ID NO: 8130 - DNA, 34 bp, Homo Sapiens
caattaactagttttgacaacattcaaaaaagag

SEQ ID NO: 8131 - DNA, 35 bp, Homo Sapiens
caattaactagttttgacaacattcaaaaaagagt

SEQ ID NO: 8132 - DNA, 36 bp, Homo Sapiens
caattaactagttttgacaacattcaaaaaagagta

SEQ ID NO: 8133 - DNA, 37 bp, Homo Sapiens
caattaactagttttgacaacattcaaaaaagagtac

SEQ ID NO: 8134 - DNA, 38 bp, Homo Sapiens
caattaactagttttgacaacattcaaaaaagagtacc

SEQ ID NO: 8135 - DNA, 39 bp, Homo Sapiens
caattaactagttttgacaacattcaaaaaagagtacca

SEQ ID NO: 8136 - DNA, 19 bp, Homo Sapiens
caattccccgacggggagc

SEQ ID NO: 8137 - DNA, 20 bp, Homo Sapiens
caattccccgacggggagcc

SEQ ID NO: 8138 - DNA, 21 bp, Homo Sapiens
caattccccgacggggagcca

SEQ ID NO: 8139 - DNA, 20 bp, Homo Sapiens
caattcctcttcttaacacc

SEQ ID NO: 8140 - DNA, 18 bp, Homo Sapiens
caattctcgctggggcct

SEQ ID NO: 8141 - DNA, 16 bp, Homo Sapiens
cacaaagcacccaact

SEQ ID NO: 8142 - DNA, 17 bp, Homo Sapiens
cacaaagcacccaactt

SEQ ID NO: 8143 - DNA, 18 bp, Homo Sapiens
cacaaagcacccaactta

SEQ ID NO: 8144 - DNA, 19 bp, Homo Sapiens
cacaaagcacccaacttac

SEQ ID NO: 8145 - DNA, 20 bp, Homo Sapiens
cacaaagcacccaacttaca

SEQ ID NO: 8146 - DNA, 21 bp, Homo Sapiens
cacaaagcacccaacttacac

SEQ ID NO: 8147 - DNA, 22 bp, Homo Sapiens
cacaaagcacccaacttacact

SEQ ID NO: 8148 - DNA, 23 bp, Homo Sapiens
cacaaagcacccaacttacactt

SEQ ID NO: 8149 - DNA, 24 bp, Homo Sapiens
cacaaagcacccaacttacactta

SEQ ID NO: 8150 - DNA, 25 bp, Homo Sapiens
cacaaagcacccaacttacacttag

SEQ ID NO: 8151 - DNA, 26 bp, Homo Sapiens
cacaaagcacccaacttacacttagg

SEQ ID NO: 8152 - DNA, 27 bp, Homo Sapiens
cacaaagcacccaacttacacttagga

SEQ ID NO: 8153 - DNA, 28 bp, Homo Sapiens
cacaaagcacccaacttacacttaggag

SEQ ID NO: 8154 - DNA, 29 bp, Homo Sapiens
cacaaagcacccaacttacacttaggaga

SEQ ID NO: 8155 - DNA, 30 bp, Homo Sapiens
cacaaagcacccaacttacacttaggagat

SEQ ID NO: 8156 - DNA, 31 bp, Homo Sapiens
cacaaagcacccaacttacacttaggagatt

SEQ ID NO: 8157 - DNA, 32 bp, Homo Sapiens
cacaaagcacccaacttacacttaggagattt

SEQ ID NO: 8158 - DNA, 33 bp, Homo Sapiens
cacaaagcacccaacttacacttaggagatttc

SEQ ID NO: 8159 - DNA, 34 bp, Homo Sapiens
cacaaagcacccaacttacacttaggagatttca

SEQ ID NO: 8160 - DNA, 35 bp, Homo Sapiens
cacaaagcacccaacttacacttaggagatttcaa

SEQ ID NO: 8161 - DNA, 36 bp, Homo Sapiens
cacaaagcacccaacttacacttaggagatttcaac

SEQ ID NO: 8162 - DNA, 37 bp, Homo Sapiens
cacaaagcacccaacttacacttaggagatttcaact

SEQ ID NO: 8163 - DNA, 38 bp, Homo Sapiens
cacaaagcacccaacttacacttaggagatttcaactt

SEQ ID NO: 8164 - DNA, 39 bp, Homo Sapiens
cacaaagcacccaacttacacttaggagatttcaactta

SEQ ID NO: 8165 - DNA, 40 bp, Homo Sapiens
cacaaagcacccaacttacacttaggagatttcaacttaa

SEQ ID NO: 8166 - DNA, 41 bp, Homo Sapiens
cacaaagcacccaacttacacttaggagatttcaacttaac

SEQ ID NO: 8167 - DNA, 42 bp, Homo Sapiens
cacaaagcacccaacttacacttaggagatttcaacttaact

SEQ ID NO: 8168 - DNA, 48 bp, Homo Sapiens
cacaaagcacccaacttacacttaggagatttcaacttaacttgaccg

SEQ ID NO: 8169 - DNA, 16 bp, Homo Sapiens
cacaagaactgctaac

SEQ ID NO: 8170 - DNA, 17 bp, Homo Sapiens
cacaagaactgctaact

SEQ ID NO: 8171 - DNA, 18 bp, Homo Sapiens
cacaagaactgctaactc

SEQ ID NO: 8172 - DNA, 19 bp, Homo Sapiens
cacaagaactgctaactca

SEQ ID NO: 8173 - DNA, 20 bp, Homo Sapiens
cacaagaactgctaactcat

SEQ ID NO: 8174 - DNA, 21 bp, Homo Sapiens
cacaagaactgctaactcatg

SEQ ID NO: 8175 - DNA, 22 bp, Homo Sapiens
cacaagaactgctaactcatgc

SEQ ID NO: 8176 - DNA, 23 bp, Homo Sapiens
cacaagaactgctaactcatgcc

SEQ ID NO: 8177 - DNA, 24 bp, Homo Sapiens
cacaagaactgctaactcatgccc

SEQ ID NO: 8178 - DNA, 25 bp, Homo Sapiens
cacaagaactgctaactcatgcccc

SEQ ID NO: 8179 - DNA, 26 bp, Homo Sapiens
cacaagaactgctaactcatgccccc

SEQ ID NO: 8180 - DNA, 27 bp, Homo Sapiens
cacaagaactgctaactcatgccccca

SEQ ID NO: 8181 - DNA, 28 bp, Homo Sapiens
cacaagaactgctaactcatgcccccat

SEQ ID NO: 8182 - DNA, 29 bp, Homo Sapiens
cacaagaactgctaactcatgcccccatg

SEQ ID NO: 8183 - DNA, 30 bp, Homo Sapiens
cacaagaactgctaactcatgcccccatgt

SEQ ID NO: 8184 - DNA, 31 bp, Homo Sapiens
cacaagaactgctaactcatgcccccatgtc

SEQ ID NO: 8185 - DNA, 32 bp, Homo Sapiens
cacaagaactgctaactcatgcccccatgtct

SEQ ID NO: 8186 - DNA, 33 bp, Homo Sapiens
cacaagaactgctaactcatgcccccatgtcta

SEQ ID NO: 8187 - DNA, 34 bp, Homo Sapiens
cacaagaactgctaactcatgcccccatgtctaa

SEQ ID NO: 8188 - DNA, 35 bp, Homo Sapiens
cacaagaactgctaactcatgcccccatgtctaac

SEQ ID NO: 8189 - DNA, 36 bp, Homo Sapiens
cacaagaactgctaactcatgcccccatgtctaaca

SEQ ID NO: 8190 - DNA, 37 bp, Homo Sapiens
cacaagaactgctaactcatgcccccatgtctaacaa

SEQ ID NO: 8191 - DNA, 38 bp, Homo Sapiens
cacaagaactgctaactcatgcccccatgtctaacaac

SEQ ID NO: 8192 - DNA, 39 bp, Homo Sapiens
cacaagaactgctaactcatgcccccatgtctaacaaca

SEQ ID NO: 8193 - DNA, 40 bp, Homo Sapiens
cacaagaactgctaactcatgcccccatgtctaacaacat

SEQ ID NO: 8194 - DNA, 41 bp, Homo Sapiens
cacaagaactgctaactcatgcccccatgtctaacaacatg

SEQ ID NO: 8195 - DNA, 42 bp, Homo Sapiens
cacaagaactgctaactcatgcccccatgtctaacaacatgg

SEQ ID NO: 8196 - DNA, 43 bp, Homo Sapiens
cacaagaactgctaactcatgcccccatgtctaacaacatggc

SEQ ID NO: 8197 - DNA, 44 bp, Homo Sapiens
cacaagaactgctaactcatgcccccatgtctaacaacatggct

SEQ ID NO: 8198 - DNA, 45 bp, Homo Sapiens
cacaagaactgctaactcatgcccccatgtctaacaacatggctt

SEQ ID NO: 8199 - DNA, 46 bp, Homo Sapiens
cacaagaactgctaactcatgcccccatgtctaacaacatggcttt

SEQ ID NO: 8200 - DNA, 47 bp, Homo Sapiens
cacaagaactgctaactcatgcccccatgtctaacaacatggctttc

SEQ ID NO: 8201 - DNA, 48 bp, Homo Sapiens
cacaagaactgctaactcatgcccccatgtctaacaacatggctttct

SEQ ID NO: 8202 - DNA, 24 bp, Homo Sapiens
cacacgcgaaaggtccccggttcg

SEQ ID NO: 8203 - DNA, 42 bp, Homo Sapiens
cacacgcgaaaggtccccggttcgaaaccgggcggaaacacc

SEQ ID NO: 8204 - DNA, 32 bp, Homo Sapiens
cacacgtgggttcgaatcccatcctcgtcgcc

SEQ ID NO: 8205 - DNA, 33 bp, Homo Sapiens
cacacgtgggttcgaatcccatcctcgtcgcca

SEQ ID NO: 8206 - DNA, 28 bp, Homo Sapiens
cacaggttcgaatcctgttcgtgacgcc

SEQ ID NO: 8207 - DNA, 29 bp, Homo Sapiens
cacaggttcgaatcctgttcgtgacgcca

SEQ ID NO: 8208 - DNA, 16 bp, Homo Sapiens
cacatcaccccataaa

SEQ ID NO: 8209 - DNA, 17 bp, Homo Sapiens
cacatcaccccataaac

SEQ ID NO: 8210 - DNA, 18 bp, Homo Sapiens
cacatcaccccataaaca

SEQ ID NO: 8211 - DNA, 19 bp, Homo Sapiens
cacatcaccccataaacac

SEQ ID NO: 8212 - DNA, 20 bp, Homo Sapiens
cacatcaccccataaacacc

SEQ ID NO: 8213 - DNA, 21 bp, Homo Sapiens
cacatcaccccataaacacca

SEQ ID NO: 8214 - DNA, 19 bp, Homo Sapiens
cacatggtctagcggttag

SEQ ID NO: 8215 - DNA, 22 bp, Homo Sapiens
cacatggtctagcggttaggat

SEQ ID NO: 8216 - DNA, 23 bp, Homo Sapiens
cacatggtctagcggttaggatt

SEQ ID NO: 8217 - DNA, 24 bp, Homo Sapiens
cacatggtctagcggttaggattc

SEQ ID NO: 8218 - DNA, 25 bp, Homo Sapiens
cacatggtctagcggttaggattcc

SEQ ID NO: 8219 - DNA, 26 bp, Homo Sapiens
cacatggtctagcggttaggattcct

SEQ ID NO: 8220 - DNA, 27 bp, Homo Sapiens
cacatggtctagcggttaggattcctg

SEQ ID NO: 8221 - DNA, 28 bp, Homo Sapiens
cacatggtctagcggttaggattcctgg

SEQ ID NO: 8222 - DNA, 29 bp, Homo Sapiens
cacatggtctagcggttaggattcctggt

SEQ ID NO: 8223 - DNA, 30 bp, Homo Sapiens
cacatggtctagcggttaggattcctggtt

SEQ ID NO: 8224 - DNA, 31 bp, Homo Sapiens
cacatggtctagcggttaggattcctggttt

SEQ ID NO: 8225 - DNA, 32 bp, Homo Sapiens
cacatggtctagcggttaggattcctggtttt

SEQ ID NO: 8226 - DNA, 33 bp, Homo Sapiens
cacatggtctagcggttaggattcctggttttc

SEQ ID NO: 8227 - DNA, 34 bp, Homo Sapiens
cacatggtctagcggttaggattcctggttttca

SEQ ID NO: 8228 - DNA, 35 bp, Homo Sapiens
cacatggtctagcggttaggattcctggttttcac

SEQ ID NO: 8229 - DNA, 36 bp, Homo Sapiens
cacatggtctagcggttaggattcctggttttcacc

SEQ ID NO: 8230 - DNA, 37 bp, Homo Sapiens
cacatggtctagcggttaggattcctggttttcaccc

SEQ ID NO: 8231 - DNA, 38 bp, Homo Sapiens
cacatggtctagcggttaggattcctggttttcaccca

SEQ ID NO: 8232 - DNA, 39 bp, Homo Sapiens
cacatggtctagcggttaggattcctggttttcacccag

SEQ ID NO: 8233 - DNA, 17 bp, Homo Sapiens
cacattcgcctcacacg

SEQ ID NO: 8234 - DNA, 46 bp, Homo Sapiens
caccagtcttgtaaaccggagatgaaaacctttttccaaggacacc

SEQ ID NO: 8235 - DNA, 47 bp, Homo Sapiens
caccagtcttgtaaaccggagatgaaaacctttttccaaggacacca

SEQ ID NO: 8236 - DNA, 16 bp, Homo Sapiens
cacccaacttacactt

SEQ ID NO: 8237 - DNA, 17 bp, Homo Sapiens
cacccaacttacactta

SEQ ID NO: 8238 - DNA, 20 bp, Homo Sapiens
cacccaacttacacttagga

SEQ ID NO: 8239 - DNA, 21 bp, Homo Sapiens
cacccaacttacacttaggag

SEQ ID NO: 8240 - DNA, 22 bp, Homo Sapiens
cacccaacttacacttaggaga

SEQ ID NO: 8241 - DNA, 24 bp, Homo Sapiens
cacccaacttacacttaggagatt

SEQ ID NO: 8242 - DNA, 26 bp, Homo Sapiens
cacccaacttacacttaggagatttc

SEQ ID NO: 8243 - DNA, 27 bp, Homo Sapiens
cacccaacttacacttaggagatttca

SEQ ID NO: 8244 - DNA, 28 bp, Homo Sapiens
cacccaacttacacttaggagatttcaa

SEQ ID NO: 8245 - DNA, 29 bp, Homo Sapiens
cacccaacttacacttaggagatttcaac

SEQ ID NO: 8246 - DNA, 30 bp, Homo Sapiens
cacccaacttacacttaggagatttcaact

SEQ ID NO: 8247 - DNA, 31 bp, Homo Sapiens
cacccaacttacacttaggagatttcaactt

SEQ ID NO: 8248 - DNA, 32 bp, Homo Sapiens
cacccaacttacacttaggagatttcaactta

SEQ ID NO: 8249 - DNA, 33 bp, Homo Sapiens
cacccaacttacacttaggagatttcaacttaa

SEQ ID NO: 8250 - DNA, 34 bp, Homo Sapiens
cacccaacttacacttaggagatttcaacttaac

SEQ ID NO: 8251 - DNA, 40 bp, Homo Sapiens
cacccaacttacacttaggagatttcaacttaacttgacc

SEQ ID NO: 8252 - DNA, 41 bp, Homo Sapiens
cacccaacttacacttaggagatttcaacttaacttgaccg

SEQ ID NO: 8253 - DNA, 42 bp, Homo Sapiens
cacccaacttacacttaggagatttcaacttaacttgaccgc

SEQ ID NO: 8254 - DNA, 43 bp, Homo Sapiens
cacccaacttacacttaggagatttcaacttaacttgaccgct

SEQ ID NO: 8255 - DNA, 44 bp, Homo Sapiens
cacccaacttacacttaggagatttcaacttaacttgaccgctc

SEQ ID NO: 8256 - DNA, 45 bp, Homo Sapiens
cacccaacttacacttaggagatttcaacttaacttgaccgctct

SEQ ID NO: 8257 - DNA, 46 bp, Homo Sapiens
cacccaacttacacttaggagatttcaacttaacttgaccgctctg

SEQ ID NO: 8258 - DNA, 47 bp, Homo Sapiens
cacccaacttacacttaggagatttcaacttaacttgaccgctctga

SEQ ID NO: 8259 - DNA, 48 bp, Homo Sapiens
cacccaacttacacttaggagatttcaacttaacttgaccgctctgac

SEQ ID NO: 8260 - DNA, 20 bp, Homo Sapiens
cacccaggcggcccgggttc

SEQ ID NO: 8261 - DNA, 21 bp, Homo Sapiens
cacccaggcggcccgggttcg

SEQ ID NO: 8262 - DNA, 23 bp, Homo Sapiens
cacccaggcggcccgggttcgac

SEQ ID NO: 8263 - DNA, 24 bp, Homo Sapiens
cacccaggcggcccgggttcgact

SEQ ID NO: 8264 - DNA, 25 bp, Homo Sapiens
cacccaggcggcccgggttcgactc

SEQ ID NO: 8265 - DNA, 28 bp, Homo Sapiens
cacccaggcggcccgggttcgactcccg

SEQ ID NO: 8266 - DNA, 29 bp, Homo Sapiens
cacccaggcggcccgggttcgactcccgg

SEQ ID NO: 8267 - DNA, 30 bp, Homo Sapiens
cacccaggcggcccgggttcgactcccggt

SEQ ID NO: 8268 - DNA, 31 bp, Homo Sapiens
cacccaggcggcccgggttcgactcccggtg

SEQ ID NO: 8269 - DNA, 33 bp, Homo Sapiens
cacccaggcggcccgggttcgactcccggtgtg

SEQ ID NO: 8270 - DNA, 34 bp, Homo Sapiens
cacccaggcggcccgggttcgactcccggtgtgg

SEQ ID NO: 8271 - DNA, 35 bp, Homo Sapiens
cacccaggcggcccgggttcgactcccggtgtggg

SEQ ID NO: 8272 - DNA, 36 bp, Homo Sapiens
cacccaggcggcccgggttcgactcccggtgtggga

SEQ ID NO: 8273 - DNA, 37 bp, Homo Sapiens
cacccaggcggcccgggttcgactcccggtgtgggaa

SEQ ID NO: 8274 - DNA, 38 bp, Homo Sapiens
cacccaggcggcccgggttcgactcccggtgtgggaac

SEQ ID NO: 8275 - DNA, 39 bp, Homo Sapiens
cacccaggcggcccgggttcgactcccggtgtgggaacc

SEQ ID NO: 8276 - DNA, 40 bp, Homo Sapiens
cacccaggcggcccgggttcgactcccggtgtgggaacca

SEQ ID NO: 8277 - DNA, 29 bp, Homo Sapiens
cacccaggtggcccgggttcgactcccgg

SEQ ID NO: 8278 - DNA, 30 bp, Homo Sapiens
cacccaggtggcccgggttcgactcccggt

SEQ ID NO: 8279 - DNA, 31 bp, Homo Sapiens
cacccaggtggcccgggttcgactcccggta

SEQ ID NO: 8280 - DNA, 33 bp, Homo Sapiens
cacccaggtggcccgggttcgactcccggtatg

SEQ ID NO: 8281 - DNA, 34 bp, Homo Sapiens
cacccaggtggcccgggttcgactcccggtatgg

SEQ ID NO: 8282 - DNA, 35 bp, Homo Sapiens
cacccaggtggcccgggttcgactcccggtatggg

SEQ ID NO: 8283 - DNA, 37 bp, Homo Sapiens
cacccaggtggcccgggttcgactcccggtatgggaa

SEQ ID NO: 8284 - DNA, 38 bp, Homo Sapiens
cacccaggtggcccgggttcgactcccggtatgggaac

SEQ ID NO: 8285 - DNA, 39 bp, Homo Sapiens
cacccaggtggcccgggttcgactcccggtatgggaacc

SEQ ID NO: 8286 - DNA, 40 bp, Homo Sapiens
cacccaggtggcccgggttcgactcccggtatgggaacca

SEQ ID NO: 8287 - DNA, 16 bp, Homo Sapiens
caccccataaacacca

SEQ ID NO: 8288 - DNA, 16 bp, Homo Sapiens
caccgccgcggcccgg

SEQ ID NO: 8289 - DNA, 17 bp, Homo Sapiens
caccgccgcggcccggg

SEQ ID NO: 8290 - DNA, 18 bp, Homo Sapiens
caccgccgcggcccgggt

SEQ ID NO: 8291 - DNA, 19 bp, Homo Sapiens
caccgccgcggcccgggtt

SEQ ID NO: 8292 - DNA, 20 bp, Homo Sapiens
caccgccgcggcccgggttc

SEQ ID NO: 8293 - DNA, 21 bp, Homo Sapiens
caccgccgcggcccgggttcg

SEQ ID NO: 8294 - DNA, 22 bp, Homo Sapiens
caccgccgcggcccgggttcga

SEQ ID NO: 8295 - DNA, 23 bp, Homo Sapiens
caccgccgcggcccgggttcgat

SEQ ID NO: 8296 - DNA, 24 bp, Homo Sapiens
caccgccgcggcccgggttcgatt

SEQ ID NO: 8297 - DNA, 25 bp, Homo Sapiens
caccgccgcggcccgggttcgattc

SEQ ID NO: 8298 - DNA, 28 bp, Homo Sapiens
caccgccgcggcccgggttcgattcccg

SEQ ID NO: 8299 - DNA, 29 bp, Homo Sapiens
caccgccgcggcccgggttcgattcccgg

SEQ ID NO: 8300 - DNA, 30 bp, Homo Sapiens
caccgccgcggcccgggttcgattcccggc

SEQ ID NO: 8301 - DNA, 31 bp, Homo Sapiens
caccgccgcggcccgggttcgattcccggcc

SEQ ID NO: 8302 - DNA, 34 bp, Homo Sapiens
caccgccgcggcccgggttcgattcccggccagg

SEQ ID NO: 8303 - DNA, 39 bp, Homo Sapiens
caccgccgcggcccgggttcgattcccggccagggaacc

SEQ ID NO: 8304 - DNA, 40 bp, Homo Sapiens
caccgccgcggcccgggttcgattcccggccagggaacca

SEQ ID NO: 8305 - DNA, 30 bp, Homo Sapiens
caccgccgcggcccgggttcgattcccggt

SEQ ID NO: 8306 - DNA, 31 bp, Homo Sapiens
caccgccgcggcccgggttcgattcccggtc

SEQ ID NO: 8307 - DNA, 32 bp, Homo Sapiens
caccgccgcggcccgggttcgattcccggtca

SEQ ID NO: 8308 - DNA, 33 bp, Homo Sapiens
caccgccgcggcccgggttcgattcccggtcag

SEQ ID NO: 8309 - DNA, 34 bp, Homo Sapiens
caccgccgcggcccgggttcgattcccggtcagg

SEQ ID NO: 8310 - DNA, 35 bp, Homo Sapiens
caccgccgcggcccgggttcgattcccggtcaggg

SEQ ID NO: 8311 - DNA, 36 bp, Homo Sapiens
caccgccgcggcccgggttcgattcccggtcaggga

SEQ ID NO: 8312 - DNA, 37 bp, Homo Sapiens
caccgccgcggcccgggttcgattcccggtcagggaa

SEQ ID NO: 8313 - DNA, 38 bp, Homo Sapiens
caccgccgcggcccgggttcgattcccggtcagggaac

SEQ ID NO: 8314 - DNA, 39 bp, Homo Sapiens
caccgccgcggcccgggttcgattcccggtcagggaacc

SEQ ID NO: 8315 - DNA, 40 bp, Homo Sapiens
caccgccgcggcccgggttcgattcccggtcagggaacca

SEQ ID NO: 8316 - DNA, 16 bp, Homo Sapiens
cacctctttacagtga

SEQ ID NO: 8317 - DNA, 17 bp, Homo Sapiens
cacctctttacagtgac

SEQ ID NO: 8318 - DNA, 18 bp, Homo Sapiens
cacctctttacagtgacc

SEQ ID NO: 8319 - DNA, 19 bp, Homo Sapiens
cacctctttacagtgacca

SEQ ID NO: 8320 - DNA, 18 bp, Homo Sapiens
cacgaggccccgggttca

SEQ ID NO: 8321 - DNA, 30 bp, Homo Sapiens
cacgaggccccgggttcaatccccggcacc

SEQ ID NO: 8322 - DNA, 31 bp, Homo Sapiens
cacgaggccccgggttcaatccccggcacct

SEQ ID NO: 8323 - DNA, 36 bp, Homo Sapiens
cacgaggccccgggttcaatccccggcacctccacc

SEQ ID NO: 8324 - DNA, 16 bp, Homo Sapiens
cacgcagaaggtcctg

SEQ ID NO: 8325 - DNA, 23 bp, Homo Sapiens
cacgcagaaggtcctgggttcga

SEQ ID NO: 8326 - DNA, 32 bp, Homo Sapiens
cacgcagaaggtcctgggttcgagccccagtg

SEQ ID NO: 8327 - DNA, 36 bp, Homo Sapiens
cacgcagaaggtcctgggttcgagccccagtggaac

SEQ ID NO: 8328 - DNA, 39 bp, Homo Sapiens
cacgcagaaggtcctgggttcgagccccagtggaaccac

SEQ ID NO: 8329 - DNA, 40 bp, Homo Sapiens
cacgcagaaggtcctgggttcgagccccagtggaaccacc

SEQ ID NO: 8330 - DNA, 41 bp, Homo Sapiens
cacgcagaaggtcctgggttcgagccccagtggaaccacca

SEQ ID NO: 8331 - DNA, 16 bp, Homo Sapiens
cacgcgaaaggtcccc

SEQ ID NO: 8332 - DNA, 17 bp, Homo Sapiens
cacgcgaaaggtccccg

SEQ ID NO: 8333 - DNA, 18 bp, Homo Sapiens
cacgcgaaaggtccccgg

SEQ ID NO: 8334 - DNA, 19 bp, Homo Sapiens
cacgcgaaaggtccccggt

SEQ ID NO: 8335 - DNA, 22 bp, Homo Sapiens
cacgcgaaaggtccccggttcg

SEQ ID NO: 8336 - DNA, 23 bp, Homo Sapiens
cacgcgaaaggtccccggttcga

SEQ ID NO: 8337 - DNA, 32 bp, Homo Sapiens
cacgcgaaaggtccccggttcgaaaccgggca

SEQ ID NO: 8338 - DNA, 32 bp, Homo Sapiens
cacgcgaaaggtccccggttcgaaaccgggcg

SEQ ID NO: 8339 - DNA, 34 bp, Homo Sapiens
cacgcgaaaggtccccggttcgaaaccgggcgga

SEQ ID NO: 8340 - DNA, 40 bp, Homo Sapiens
cacgcgaaaggtccccggttcgaaaccgggcggaaacacc

SEQ ID NO: 8341 - DNA, 41 bp, Homo Sapiens
cacgcgaaaggtccccggttcgaaaccgggcggaaacacca

SEQ ID NO: 8342 - DNA, 31 bp, Homo Sapiens
cacgcgggagacccgggttcaattcccggcc

SEQ ID NO: 8343 - DNA, 39 bp, Homo Sapiens
cacgcgggagacccgggttcaattcccggccaatgcacc

SEQ ID NO: 8344 - DNA, 40 bp, Homo Sapiens
cacgcgggagacccgggttcaattcccggccaatgcacca

SEQ ID NO: 8345 - DNA, 16 bp, Homo Sapiens
cacgcgggagaccggg

SEQ ID NO: 8346 - DNA, 17 bp, Homo Sapiens
cacgcgggagaccgggg

SEQ ID NO: 8347 - DNA, 19 bp, Homo Sapiens
cacgcgggagaccggggtt

SEQ ID NO: 8348 - DNA, 29 bp, Homo Sapiens
cacgcgggagaccggggttcaattccccg

SEQ ID NO: 8349 - DNA, 30 bp, Homo Sapiens
cacgcgggagaccggggttcaattccccga

SEQ ID NO: 8350 - DNA, 31 bp, Homo Sapiens
cacgcgggagaccggggttcaattccccgac

SEQ ID NO: 8351 - DNA, 32 bp, Homo Sapiens
cacgcgggagaccggggttcaattccccgacg

SEQ ID NO: 8352 - DNA, 33 bp, Homo Sapiens
cacgcgggagaccggggttcaattccccgacgg

SEQ ID NO: 8353 - DNA, 34 bp, Homo Sapiens
cacgcgggagaccggggttcaattccccgacggg

SEQ ID NO: 8354 - DNA, 35 bp, Homo Sapiens
cacgcgggagaccggggttcaattccccgacgggg

SEQ ID NO: 8355 - DNA, 36 bp, Homo Sapiens
cacgcgggagaccggggttcaattccccgacgggga

SEQ ID NO: 8356 - DNA, 37 bp, Homo Sapiens
cacgcgggagaccggggttcaattccccgacggggag

SEQ ID NO: 8357 - DNA, 38 bp, Homo Sapiens
cacgcgggagaccggggttcaattccccgacggggagc

SEQ ID NO: 8358 - DNA, 39 bp, Homo Sapiens
cacgcgggagaccggggttcaattccccgacggggagcc

SEQ ID NO: 8359 - DNA, 40 bp, Homo Sapiens
cacgcgggagaccggggttcaattccccgacggggagcca

SEQ ID NO: 8360 - DNA, 21 bp, Homo Sapiens
cacgcgggagaccggggttcg

SEQ ID NO: 8361 - DNA, 23 bp, Homo Sapiens
cacgcgggagaccggggttcgat

SEQ ID NO: 8362 - DNA, 24 bp, Homo Sapiens
cacgcgggagaccggggttcgatt

SEQ ID NO: 8363 - DNA, 37 bp, Homo Sapiens
cacgcgggagaccggggttcgattccccaacggggag

SEQ ID NO: 8364 - DNA, 29 bp, Homo Sapiens
cacgcgggagaccggggttcgattccccg

SEQ ID NO: 8365 - DNA, 30 bp, Homo Sapiens
cacgcgggagaccggggttcgattccccga

SEQ ID NO: 8366 - DNA, 31 bp, Homo Sapiens
cacgcgggagaccggggttcgattccccgac

SEQ ID NO: 8367 - DNA, 32 bp, Homo Sapiens
cacgcgggagaccggggttcgattccccgacg

SEQ ID NO: 8368 - DNA, 33 bp, Homo Sapiens
cacgcgggagaccggggttcgattccccgacgg

SEQ ID NO: 8369 - DNA, 34 bp, Homo Sapiens
cacgcgggagaccggggttcgattccccgacggg

SEQ ID NO: 8370 - DNA, 35 bp, Homo Sapiens
cacgcgggagaccggggttcgattccccgacgggg

SEQ ID NO: 8371 - DNA, 36 bp, Homo Sapiens
cacgcgggagaccggggttcgattccccgacgggga

SEQ ID NO: 8372 - DNA, 37 bp, Homo Sapiens
cacgcgggagaccggggttcgattccccgacggggag

SEQ ID NO: 8373 - DNA, 38 bp, Homo Sapiens
cacgcgggagaccggggttcgattccccgacggggagc

SEQ ID NO: 8374 - DNA, 39 bp, Homo Sapiens
cacgcgggagaccggggttcgattccccgacggggagcc

SEQ ID NO: 8375 - DNA, 40 bp, Homo Sapiens
cacgcgggagaccggggttcgattccccgacggggagcca

SEQ ID NO: 8376 - DNA, 16 bp, Homo Sapiens
cacgcgggaggcccgg

SEQ ID NO: 8377 - DNA, 17 bp, Homo Sapiens
cacgcgggaggcccggg

SEQ ID NO: 8378 - DNA, 18 bp, Homo Sapiens
cacgcgggaggcccgggt

SEQ ID NO: 8379 - DNA, 21 bp, Homo Sapiens
cacgcgggaggcccgggttcg

SEQ ID NO: 8380 - DNA, 29 bp, Homo Sapiens
cacgcgggaggcccgggttcgattcccgg

SEQ ID NO: 8381 - DNA, 30 bp, Homo Sapiens
cacgcgggaggcccgggttcgattcccggc

SEQ ID NO: 8382 - DNA, 31 bp, Homo Sapiens
cacgcgggaggcccgggttcgattcccggcc

SEQ ID NO: 8383 - DNA, 32 bp, Homo Sapiens
cacgcgggaggcccgggttcgattcccggcca

SEQ ID NO: 8384 - DNA, 33 bp, Homo Sapiens
cacgcgggaggcccgggttcgattcccggccaa

SEQ ID NO: 8385 - DNA, 35 bp, Homo Sapiens
cacgcgggaggcccgggttcgattcccggccaatg

SEQ ID NO: 8386 - DNA, 36 bp, Homo Sapiens
cacgcgggaggcccgggttcgattcccggccaatgc

SEQ ID NO: 8387 - DNA, 37 bp, Homo Sapiens
cacgcgggaggcccgggttcgattcccggccaatgca

SEQ ID NO: 8388 - DNA, 38 bp, Homo Sapiens
cacgcgggaggcccgggttcgattcccggccaatgcac

SEQ ID NO: 8389 - DNA, 39 bp, Homo Sapiens
cacgcgggaggcccgggttcgattcccggccaatgcacc

SEQ ID NO: 8390 - DNA, 40 bp, Homo Sapiens
cacgcgggaggcccgggttcgattcccggccaatgcacca

SEQ ID NO: 8391 - DNA, 35 bp, Homo Sapiens
cacgcgggaggcccgggttcgattcccggcccatg

SEQ ID NO: 8392 - DNA, 39 bp, Homo Sapiens
cacgcgggaggcccgggttcgattcccggcccatgcacc

SEQ ID NO: 8393 - DNA, 32 bp, Homo Sapiens
cacgcgtgggttcgaatcccaccctcgtcgcc

SEQ ID NO: 8394 - DNA, 32 bp, Homo Sapiens
cacgcgtgggttcgaatcccaccttcgtcgcc

SEQ ID NO: 8395 - DNA, 28 bp, Homo Sapiens
cacgcgtgggttcgaatcccatcctcgt

SEQ ID NO: 8396 - DNA, 30 bp, Homo Sapiens
cacgcgtgggttcgaatcccatcctcgtcg

SEQ ID NO: 8397 - DNA, 31 bp, Homo Sapiens
cacgcgtgggttcgaatcccatcctcgtcgc

SEQ ID NO: 8398 - DNA, 32 bp, Homo Sapiens
cacgcgtgggttcgaatcccatcctcgtcgcc

SEQ ID NO: 8399 - DNA, 33 bp, Homo Sapiens
cacgcgtgggttcgaatcccatcctcgtcgcca

SEQ ID NO: 8400 - DNA, 34 bp, Homo Sapiens
cacggagaattttggattctcagggatgggttcg

SEQ ID NO: 8401 - DNA, 25 bp, Homo Sapiens
cacgggttcgaaccccgtccgtgcc

SEQ ID NO: 8402 - DNA, 26 bp, Homo Sapiens
cacgggttcgaaccccgtccgtgcct

SEQ ID NO: 8403 - DNA, 27 bp, Homo Sapiens
cacgggttcgaaccccgtccgtgcctc

SEQ ID NO: 8404 - DNA, 28 bp, Homo Sapiens
cacgggttcgaaccccgtccgtgcctcc

SEQ ID NO: 8405 - DNA, 18 bp, Homo Sapiens
cacgtatgaggccccggg

SEQ ID NO: 8406 - DNA, 30 bp, Homo Sapiens
cacgtatgaggccccgggttcaatccccgg

SEQ ID NO: 8407 - DNA, 32 bp, Homo Sapiens
cacgtatgaggccccgggttcaatccccggca

SEQ ID NO: 8408 - DNA, 16 bp, Homo Sapiens
cacgtcggggtcacca

SEQ ID NO: 8409 - DNA, 17 bp, Homo Sapiens
cacgtctgctttacacg

SEQ ID NO: 8410 - DNA, 16 bp, Homo Sapiens
cacgtggcctaatgga

SEQ ID NO: 8411 - DNA, 17 bp, Homo Sapiens
cacgttcgcctcacacg

SEQ ID NO: 8412 - DNA, 19 bp, Homo Sapiens
cacgttcgcctcacacgcg

SEQ ID NO: 8413 - DNA, 20 bp, Homo Sapiens
cacgttcgcctcacacgcga

SEQ ID NO: 8414 - DNA, 32 bp, Homo Sapiens
cacgttcgcctcacacgcgaaaggtccccggt

SEQ ID NO: 8415 - DNA, 16 bp, Homo Sapiens
cactctggactctgaa

SEQ ID NO: 8416 - DNA, 17 bp, Homo Sapiens
cactctggactctgaat

SEQ ID NO: 8417 - DNA, 18 bp, Homo Sapiens
cactctggactctgaatc

SEQ ID NO: 8418 - DNA, 19 bp, Homo Sapiens
cactctggactctgaatcc

SEQ ID NO: 8419 - DNA, 20 bp, Homo Sapiens
cactctggactctgaatcca

SEQ ID NO: 8420 - DNA, 21 bp, Homo Sapiens
cactctggactctgaatccag

SEQ ID NO: 8421 - DNA, 22 bp, Homo Sapiens
cactctggactctgaatccagc

SEQ ID NO: 8422 - DNA, 23 bp, Homo Sapiens
cactctggactctgaatccagcg

SEQ ID NO: 8423 - DNA, 24 bp, Homo Sapiens
cactctggactctgaatccagcga

SEQ ID NO: 8424 - DNA, 25 bp, Homo Sapiens
cactctggactctgaatccagcgat

SEQ ID NO: 8425 - DNA, 27 bp, Homo Sapiens
cactctggactctgaatccagcgatcc

SEQ ID NO: 8426 - DNA, 28 bp, Homo Sapiens
cactctggactctgaatccagcgatccg

SEQ ID NO: 8427 - DNA, 29 bp, Homo Sapiens
cactctggactctgaatccagcgatccga

SEQ ID NO: 8428 - DNA, 30 bp, Homo Sapiens
cactctggactctgaatccagcgatccgag

SEQ ID NO: 8429 - DNA, 31 bp, Homo Sapiens
cactctggactctgaatccagcgatccgagt

SEQ ID NO: 8430 - DNA, 32 bp, Homo Sapiens
cactctggactctgaatccagcgatccgagtt

SEQ ID NO: 8431 - DNA, 33 bp, Homo Sapiens
cactctggactctgaatccagcgatccgagttc

SEQ ID NO: 8432 - DNA, 34 bp, Homo Sapiens
cactctggactctgaatccagcgatccgagttca

SEQ ID NO: 8433 - DNA, 36 bp, Homo Sapiens
cactctggactctgaatccagcgatccgagttcgag

SEQ ID NO: 8434 - DNA, 16 bp, Homo Sapiens
cactctggactttgaa

SEQ ID NO: 8435 - DNA, 17 bp, Homo Sapiens
cactctggactttgaat

SEQ ID NO: 8436 - DNA, 18 bp, Homo Sapiens
cactctggactttgaatc

SEQ ID NO: 8437 - DNA, 19 bp, Homo Sapiens
cactctggactttgaatcc

SEQ ID NO: 8438 - DNA, 20 bp, Homo Sapiens
cactctggactttgaatcca

SEQ ID NO: 8439 - DNA, 22 bp, Homo Sapiens
cactctggactttgaatccagc

SEQ ID NO: 8440 - DNA, 30 bp, Homo Sapiens
cactctggactttgaatccagcaatccgag

SEQ ID NO: 8441 - DNA, 29 bp, Homo Sapiens
cactctggactttgaatccagcgatccga

SEQ ID NO: 8442 - DNA, 30 bp, Homo Sapiens
cactctggactttgaatccagcgatccgag

SEQ ID NO: 8443 - DNA, 31 bp, Homo Sapiens
cactctggactttgaatccagcgatccgagt

SEQ ID NO: 8444 - DNA, 32 bp, Homo Sapiens
cactctggactttgaatccagcgatccgagtt

SEQ ID NO: 8445 - DNA, 33 bp, Homo Sapiens
cactctggactttgaatccagcgatccgagttc

SEQ ID NO: 8446 - DNA, 19 bp, Homo Sapiens
cactgaaaatgtttagacg

SEQ ID NO: 8447 - DNA, 20 bp, Homo Sapiens
cactgaaaatgtttagacgg

SEQ ID NO: 8448 - DNA, 22 bp, Homo Sapiens
cactgaaaatgtttagacgggc

SEQ ID NO: 8449 - DNA, 23 bp, Homo Sapiens
cactgaaaatgtttagacgggct

SEQ ID NO: 8450 - DNA, 24 bp, Homo Sapiens
cactgaaaatgtttagacgggctc

SEQ ID NO: 8451 - DNA, 25 bp, Homo Sapiens
cactgaaaatgtttagacgggctca

SEQ ID NO: 8452 - DNA, 26 bp, Homo Sapiens
cactgaaaatgtttagacgggctcac

SEQ ID NO: 8453 - DNA, 27 bp, Homo Sapiens
cactgaaaatgtttagacgggctcaca

SEQ ID NO: 8454 - DNA, 28 bp, Homo Sapiens
cactgaaaatgtttagacgggctcacat

SEQ ID NO: 8455 - DNA, 29 bp, Homo Sapiens
cactgaaaatgtttagacgggctcacatc

SEQ ID NO: 8456 - DNA, 30 bp, Homo Sapiens
cactgaaaatgtttagacgggctcacatca

SEQ ID NO: 8457 - DNA, 32 bp, Homo Sapiens
cactgaaaatgtttagacgggctcacatcacc

SEQ ID NO: 8458 - DNA, 33 bp, Homo Sapiens
cactgaaaatgtttagacgggctcacatcaccc

SEQ ID NO: 8459 - DNA, 34 bp, Homo Sapiens
cactgaaaatgtttagacgggctcacatcacccc

SEQ ID NO: 8460 - DNA, 41 bp, Homo Sapiens
cactgaaaatgtttagacgggctcacatcaccccataaaca

SEQ ID NO: 8461 - DNA, 43 bp, Homo Sapiens
cactgaaaatgtttagacgggctcacatcaccccataaacacc

SEQ ID NO: 8462 - DNA, 44 bp, Homo Sapiens
cactgaaaatgtttagacgggctcacatcaccccataaacacca

SEQ ID NO: 8463 - DNA, 17 bp, Homo Sapiens
cactggtcttgtaaacc

SEQ ID NO: 8464 - DNA, 16 bp, Homo Sapiens
cactgtaaagctaact

SEQ ID NO: 8465 - DNA, 17 bp, Homo Sapiens
cactgtaaagctaactt

SEQ ID NO: 8466 - DNA, 18 bp, Homo Sapiens
cactgtaaagctaactta

SEQ ID NO: 8467 - DNA, 19 bp, Homo Sapiens
cactgtaaagctaacttag

SEQ ID NO: 8468 - DNA, 20 bp, Homo Sapiens
cactgtaaagctaacttagc

SEQ ID NO: 8469 - DNA, 21 bp, Homo Sapiens
cactgtaaagctaacttagca

SEQ ID NO: 8470 - DNA, 22 bp, Homo Sapiens
cactgtaaagctaacttagcat

SEQ ID NO: 8471 - DNA, 23 bp, Homo Sapiens
cactgtaaagctaacttagcatt

SEQ ID NO: 8472 - DNA, 24 bp, Homo Sapiens
cactgtaaagctaacttagcatta

SEQ ID NO: 8473 - DNA, 25 bp, Homo Sapiens
cactgtaaagctaacttagcattaa

SEQ ID NO: 8474 - DNA, 26 bp, Homo Sapiens
cactgtaaagctaacttagcattaac

SEQ ID NO: 8475 - DNA, 27 bp, Homo Sapiens
cactgtaaagctaacttagcattaacc

SEQ ID NO: 8476 - DNA, 28 bp, Homo Sapiens
cactgtaaagctaacttagcattaacct

SEQ ID NO: 8477 - DNA, 29 bp, Homo Sapiens
cactgtaaagctaacttagcattaacctt

SEQ ID NO: 8478 - DNA, 30 bp, Homo Sapiens
cactgtaaagctaacttagcattaaccttt

SEQ ID NO: 8479 - DNA, 31 bp, Homo Sapiens
cactgtaaagctaacttagcattaacctttt

SEQ ID NO: 8480 - DNA, 32 bp, Homo Sapiens
cactgtaaagctaacttagcattaacctttta

SEQ ID NO: 8481 - DNA, 33 bp, Homo Sapiens
cactgtaaagctaacttagcattaaccttttaa

SEQ ID NO: 8482 - DNA, 34 bp, Homo Sapiens
cactgtaaagctaacttagcattaaccttttaag

SEQ ID NO: 8483 - DNA, 35 bp, Homo Sapiens
cactgtaaagctaacttagcattaaccttttaagt

SEQ ID NO: 8484 - DNA, 36 bp, Homo Sapiens
cactgtaaagctaacttagcattaaccttttaagtt

SEQ ID NO: 8485 - DNA, 37 bp, Homo Sapiens
cactgtaaagctaacttagcattaaccttttaagtta

SEQ ID NO: 8486 - DNA, 38 bp, Homo Sapiens
cactgtaaagctaacttagcattaaccttttaagttaa

SEQ ID NO: 8487 - DNA, 39 bp, Homo Sapiens
cactgtaaagctaacttagcattaaccttttaagttaaa

SEQ ID NO: 8488 - DNA, 40 bp, Homo Sapiens
cactgtaaagctaacttagcattaaccttttaagttaaag

SEQ ID NO: 8489 - DNA, 41 bp, Homo Sapiens
cactgtaaagctaacttagcattaaccttttaagttaaaga

SEQ ID NO: 8490 - DNA, 42 bp, Homo Sapiens
cactgtaaagctaacttagcattaaccttttaagttaaagat

SEQ ID NO: 8491 - DNA, 43 bp, Homo Sapiens
cactgtaaagctaacttagcattaaccttttaagttaaagatt

SEQ ID NO: 8492 - DNA, 44 bp, Homo Sapiens
cactgtaaagctaacttagcattaaccttttaagttaaagatta

SEQ ID NO: 8493 - DNA, 45 bp, Homo Sapiens
cactgtaaagctaacttagcattaaccttttaagttaaagattaa

SEQ ID NO: 8494 - DNA, 46 bp, Homo Sapiens
cactgtaaagctaacttagcattaaccttttaagttaaagattaag

SEQ ID NO: 8495 - DNA, 47 bp, Homo Sapiens
cactgtaaagctaacttagcattaaccttttaagttaaagattaaga

SEQ ID NO: 8496 - DNA, 48 bp, Homo Sapiens
cactgtaaagctaacttagcattaaccttttaagttaaagattaagag

SEQ ID NO: 8497 - DNA, 16 bp, Homo Sapiens
cacttaggagatttca

SEQ ID NO: 8498 - DNA, 17 bp, Homo Sapiens
cacttaggagatttcaa

SEQ ID NO: 8499 - DNA, 18 bp, Homo Sapiens
cacttaggagatttcaac

SEQ ID NO: 8500 - DNA, 19 bp, Homo Sapiens
cacttaggagatttcaact

SEQ ID NO: 8501 - DNA, 20 bp, Homo Sapiens
cacttaggagatttcaactt

SEQ ID NO: 8502 - DNA, 21 bp, Homo Sapiens
cacttaggagatttcaactta

SEQ ID NO: 8503 - DNA, 22 bp, Homo Sapiens
cacttaggagatttcaacttaa

SEQ ID NO: 8504 - DNA, 23 bp, Homo Sapiens
cacttaggagatttcaacttaac

SEQ ID NO: 8505 - DNA, 24 bp, Homo Sapiens
cacttaggagatttcaacttaact

SEQ ID NO: 8506 - DNA, 25 bp, Homo Sapiens
cacttaggagatttcaacttaactt

SEQ ID NO: 8507 - DNA, 26 bp, Homo Sapiens
cacttaggagatttcaacttaacttg

SEQ ID NO: 8508 - DNA, 27 bp, Homo Sapiens
cacttaggagatttcaacttaacttga

SEQ ID NO: 8509 - DNA, 28 bp, Homo Sapiens
cacttaggagatttcaacttaacttgac

SEQ ID NO: 8510 - DNA, 29 bp, Homo Sapiens
cacttaggagatttcaacttaacttgacc

SEQ ID NO: 8511 - DNA, 30 bp, Homo Sapiens
cacttaggagatttcaacttaacttgaccg

SEQ ID NO: 8512 - DNA, 31 bp, Homo Sapiens
cacttaggagatttcaacttaacttgaccgc

SEQ ID NO: 8513 - DNA, 32 bp, Homo Sapiens
cacttaggagatttcaacttaacttgaccgct

SEQ ID NO: 8514 - DNA, 33 bp, Homo Sapiens
cacttaggagatttcaacttaacttgaccgctc

SEQ ID NO: 8515 - DNA, 34 bp, Homo Sapiens
cacttaggagatttcaacttaacttgaccgctct

SEQ ID NO: 8516 - DNA, 35 bp, Homo Sapiens
cacttaggagatttcaacttaacttgaccgctctg

SEQ ID NO: 8517 - DNA, 36 bp, Homo Sapiens
cacttaggagatttcaacttaacttgaccgctctga

SEQ ID NO: 8518 - DNA, 37 bp, Homo Sapiens
cacttaggagatttcaacttaacttgaccgctctgac

SEQ ID NO: 8519 - DNA, 38 bp, Homo Sapiens
cacttaggagatttcaacttaacttgaccgctctgacc

SEQ ID NO: 8520 - DNA, 39 bp, Homo Sapiens
cacttaggagatttcaacttaacttgaccgctctgacca

SEQ ID NO: 8521 - DNA, 16 bp, Homo Sapiens
cagaagattccaggtt

SEQ ID NO: 8522 - DNA, 17 bp, Homo Sapiens
cagaagattccaggttc

SEQ ID NO: 8523 - DNA, 18 bp, Homo Sapiens
cagaagattccaggttcg

SEQ ID NO: 8524 - DNA, 25 bp, Homo Sapiens
cagaagattccaggttcgactcctg

SEQ ID NO: 8525 - DNA, 27 bp, Homo Sapiens
cagaagattccaggttcgactcctggc

SEQ ID NO: 8526 - DNA, 28 bp, Homo Sapiens
cagaagattccaggttcgactcctggct

SEQ ID NO: 8527 - DNA, 31 bp, Homo Sapiens
cagaagattccaggttcgactcctggctggc

SEQ ID NO: 8528 - DNA, 32 bp, Homo Sapiens
cagaagattccaggttcgactcctggctggct

SEQ ID NO: 8529 - DNA, 33 bp, Homo Sapiens
cagaagattccaggttcgactcctggctggctc

SEQ ID NO: 8530 - DNA, 34 bp, Homo Sapiens
cagaagattccaggttcgactcctggctggctcg

SEQ ID NO: 8531 - DNA, 35 bp, Homo Sapiens
cagaagattccaggttcgactcctggctggctcgc

SEQ ID NO: 8532 - DNA, 36 bp, Homo Sapiens
cagaagattccaggttcgactcctggctggctcgcc

SEQ ID NO: 8533 - DNA, 37 bp, Homo Sapiens
cagaagattccaggttcgactcctggctggctcgcca

SEQ ID NO: 8534 - DNA, 16 bp, Homo Sapiens
cagaagattctaggtt

SEQ ID NO: 8535 - DNA, 17 bp, Homo Sapiens
cagaagattctaggttc

SEQ ID NO: 8536 - DNA, 18 bp, Homo Sapiens
cagaagattctaggttcg

SEQ ID NO: 8537 - DNA, 21 bp, Homo Sapiens
cagaagattctaggttcgact

SEQ ID NO: 8538 - DNA, 27 bp, Homo Sapiens
cagaagattctaggttcgactcctggc

SEQ ID NO: 8539 - DNA, 28 bp, Homo Sapiens
cagaagattctaggttcgactcctggct

SEQ ID NO: 8540 - DNA, 29 bp, Homo Sapiens
cagaagattctaggttcgactcctggctg

SEQ ID NO: 8541 - DNA, 31 bp, Homo Sapiens
cagaagattctaggttcgactcctggctggc

SEQ ID NO: 8542 - DNA, 32 bp, Homo Sapiens
cagaagattctaggttcgactcctggctggct

SEQ ID NO: 8543 - DNA, 33 bp, Homo Sapiens
cagaagattctaggttcgactcctggctggctc

SEQ ID NO: 8544 - DNA, 34 bp, Homo Sapiens
cagaagattctaggttcgactcctggctggctcg

SEQ ID NO: 8545 - DNA, 35 bp, Homo Sapiens
cagaagattctaggttcgactcctggctggctcgc

SEQ ID NO: 8546 - DNA, 36 bp, Homo Sapiens
cagaagattctaggttcgactcctggctggctcgcc

SEQ ID NO: 8547 - DNA, 37 bp, Homo Sapiens
cagaagattctaggttcgactcctggctggctcgcca

SEQ ID NO: 8548 - DNA, 16 bp, Homo Sapiens
cagaagattgagggtt

SEQ ID NO: 8549 - DNA, 17 bp, Homo Sapiens
cagaagattgagggttc

SEQ ID NO: 8550 - DNA, 18 bp, Homo Sapiens
cagaagattgagggttcg

SEQ ID NO: 8551 - DNA, 34 bp, Homo Sapiens
cagaagattgagggttcgaatccctccgtggtta

SEQ ID NO: 8552 - DNA, 36 bp, Homo Sapiens
cagaagattgagggttcgaatccctccgtggttacc

SEQ ID NO: 8553 - DNA, 34 bp, Homo Sapiens
cagaagattgagggttcgaatcccttcgtggtta

SEQ ID NO: 8554 - DNA, 36 bp, Homo Sapiens
cagaagattgagggttcgaatcccttcgtggttacc

SEQ ID NO: 8555 - DNA, 34 bp, Homo Sapiens
cagaagattgagggttcgaatcccttcgtggttg

SEQ ID NO: 8556 - DNA, 35 bp, Homo Sapiens
cagaagattgagggttcgaatcccttcgtggttgc

SEQ ID NO: 8557 - DNA, 36 bp, Homo Sapiens
cagaagattgagggttcgaatcccttcgtggttgcc

SEQ ID NO: 8558 - DNA, 37 bp, Homo Sapiens
cagaagattgagggttcgaatcccttcgtggttgcca

SEQ ID NO: 8559 - DNA, 24 bp, Homo Sapiens
cagaagattgagggttcgagtccc

SEQ ID NO: 8560 - DNA, 27 bp, Homo Sapiens
cagaagattgagggttcgagtcccttc

SEQ ID NO: 8561 - DNA, 28 bp, Homo Sapiens
cagaagattgagggttcgagtcccttcg

SEQ ID NO: 8562 - DNA, 32 bp, Homo Sapiens
cagaagattgagggttcgagtcccttcgtggt

SEQ ID NO: 8563 - DNA, 33 bp, Homo Sapiens
cagaagattgagggttcgagtcccttcgtggtc

SEQ ID NO: 8564 - DNA, 34 bp, Homo Sapiens
cagaagattgagggttcgagtcccttcgtggtcg

SEQ ID NO: 8565 - DNA, 35 bp, Homo Sapiens
cagaagattgagggttcgagtcccttcgtggtcgc

SEQ ID NO: 8566 - DNA, 36 bp, Homo Sapiens
cagaagattgagggttcgagtcccttcgtggtcgcc

SEQ ID NO: 8567 - DNA, 37 bp, Homo Sapiens
cagaagattgagggttcgagtcccttcgtggtcgcca

SEQ ID NO: 8568 - DNA, 16 bp, Homo Sapiens
cagaagattgcaggtt

SEQ ID NO: 8569 - DNA, 17 bp, Homo Sapiens
cagaagattgcaggttc

SEQ ID NO: 8570 - DNA, 18 bp, Homo Sapiens
cagaagattgcaggttcg

SEQ ID NO: 8571 - DNA, 22 bp, Homo Sapiens
cagaagattgcaggttcgagtc

SEQ ID NO: 8572 - DNA, 24 bp, Homo Sapiens
cagaagattgcaggttcgagtcct

SEQ ID NO: 8573 - DNA, 33 bp, Homo Sapiens
cagaagattgcaggttcgagtcctgccgcggtc

SEQ ID NO: 8574 - DNA, 34 bp, Homo Sapiens
cagaagattgcaggttcgagtcctgccgcggtcg

SEQ ID NO: 8575 - DNA, 35 bp, Homo Sapiens
cagaagattgcaggttcgagtcctgccgcggtcgc

SEQ ID NO: 8576 - DNA, 36 bp, Homo Sapiens
cagaagattgcaggttcgagtcctgccgcggtcgcc

SEQ ID NO: 8577 - DNA, 37 bp, Homo Sapiens
cagaagattgcaggttcgagtcctgccgcggtcgcca

SEQ ID NO: 8578 - DNA, 17 bp, Homo Sapiens
cagaaggctgcgtgttc

SEQ ID NO: 8579 - DNA, 18 bp, Homo Sapiens
cagaaggctgcgtgttcg

SEQ ID NO: 8580 - DNA, 32 bp, Homo Sapiens
cagaaggctgcgtgttcgaatcacgtcggggt

SEQ ID NO: 8581 - DNA, 33 bp, Homo Sapiens
cagaaggctgcgtgttcgaatcacgtcggggtc

SEQ ID NO: 8582 - DNA, 35 bp, Homo Sapiens
cagaaggctgcgtgttcgaatcacgtcggggtcac

SEQ ID NO: 8583 - DNA, 36 bp, Homo Sapiens
cagaaggctgcgtgttcgaatcacgtcggggtcacc

SEQ ID NO: 8584 - DNA, 37 bp, Homo Sapiens
cagaaggctgcgtgttcgaatcacgtcggggtcacca

SEQ ID NO: 8585 - DNA, 17 bp, Homo Sapiens
cagaaggtcctgggttc

SEQ ID NO: 8586 - DNA, 24 bp, Homo Sapiens
cagaaggtcctgggttcgagcccc

SEQ ID NO: 8587 - DNA, 32 bp, Homo Sapiens
cagaaggtcctgggttcgagccccagtggaac

SEQ ID NO: 8588 - DNA, 33 bp, Homo Sapiens
cagaaggtcctgggttcgagccccagtggaacc

SEQ ID NO: 8589 - DNA, 34 bp, Homo Sapiens
cagaaggtcctgggttcgagccccagtggaacca

SEQ ID NO: 8590 - DNA, 35 bp, Homo Sapiens
cagaaggtcctgggttcgagccccagtggaaccac

SEQ ID NO: 8591 - DNA, 36 bp, Homo Sapiens
cagaaggtcctgggttcgagccccagtggaaccacc

SEQ ID NO: 8592 - DNA, 37 bp, Homo Sapiens
cagaaggtcctgggttcgagccccagtggaaccacca

SEQ ID NO: 8593 - DNA, 17 bp, Homo Sapiens
cagaaggttgcgtgttc

SEQ ID NO: 8594 - DNA, 34 bp, Homo Sapiens
cagaaggttgcgtgttcaaatcacgtcggggtca

SEQ ID NO: 8595 - DNA, 35 bp, Homo Sapiens
cagaaggttgcgtgttcaaatcacgtcggggtcac

SEQ ID NO: 8596 - DNA, 36 bp, Homo Sapiens
cagaaggttgcgtgttcaaatcacgtcggggtcacc

SEQ ID NO: 8597 - DNA, 37 bp, Homo Sapiens
cagaaggttgcgtgttcaaatcacgtcggggtcacca

SEQ ID NO: 8598 - DNA, 31 bp, Homo Sapiens
cagaaggttgcgtgttcaagtcacgtcgggg

SEQ ID NO: 8599 - DNA, 33 bp, Homo Sapiens
cagaaggttgcgtgttcaagtcacgtcggggtc

SEQ ID NO: 8600 - DNA, 35 bp, Homo Sapiens
cagaaggttgcgtgttcaagtcacgtcggggtcac

SEQ ID NO: 8601 - DNA, 36 bp, Homo Sapiens
cagaaggttgcgtgttcaagtcacgtcggggtcacc

SEQ ID NO: 8602 - DNA, 37 bp, Homo Sapiens
cagaaggttgcgtgttcaagtcacgtcggggtcacca

SEQ ID NO: 8603 - DNA, 16 bp, Homo Sapiens
cagaatggccgagtgg

SEQ ID NO: 8604 - DNA, 21 bp, Homo Sapiens
cagaatggccgagtggttaag

SEQ ID NO: 8605 - DNA, 16 bp, Homo Sapiens
cagaccaagagccttc

SEQ ID NO: 8606 - DNA, 17 bp, Homo Sapiens
cagaccaagagccttca

SEQ ID NO: 8607 - DNA, 18 bp, Homo Sapiens
cagaccaagagccttcaa

SEQ ID NO: 8608 - DNA, 19 bp, Homo Sapiens
cagaccaagagccttcaaa

SEQ ID NO: 8609 - DNA, 20 bp, Homo Sapiens
cagaccaagagccttcaaag

SEQ ID NO: 8610 - DNA, 22 bp, Homo Sapiens
cagaccaagagccttcaaagcc

SEQ ID NO: 8611 - DNA, 23 bp, Homo Sapiens
cagaccaagagccttcaaagccc

SEQ ID NO: 8612 - DNA, 25 bp, Homo Sapiens
cagaccaagagccttcaaagccctc

SEQ ID NO: 8613 - DNA, 26 bp, Homo Sapiens
cagaccaagagccttcaaagccctca

SEQ ID NO: 8614 - DNA, 28 bp, Homo Sapiens
cagaccaagagccttcaaagccctcagt

SEQ ID NO: 8615 - DNA, 29 bp, Homo Sapiens
cagaccaagagccttcaaagccctcagta

SEQ ID NO: 8616 - DNA, 31 bp, Homo Sapiens
cagaccaagagccttcaaagccctcagtaag

SEQ ID NO: 8617 - DNA, 32 bp, Homo Sapiens
cagaccaagagccttcaaagccctcagtaagt

SEQ ID NO: 8618 - DNA, 35 bp, Homo Sapiens
cagaccaagagccttcaaagccctcagtaagttgc

SEQ ID NO: 8619 - DNA, 40 bp, Homo Sapiens
cagaccaagagccttcaaagccctcagtaagttgcaatac

SEQ ID NO: 8620 - DNA, 36 bp, Homo Sapiens
cagactcaagttctggtctccaatggaggcgtgggt

SEQ ID NO: 8621 - DNA, 24 bp, Homo Sapiens
cagactcaagttctggtctccgga

SEQ ID NO: 8622 - DNA, 29 bp, Homo Sapiens
cagacttttaatctgagggtccagggttc

SEQ ID NO: 8623 - DNA, 16 bp, Homo Sapiens
cagagaatagtttaaa

SEQ ID NO: 8624 - DNA, 17 bp, Homo Sapiens
cagagaatagtttaaat

SEQ ID NO: 8625 - DNA, 18 bp, Homo Sapiens
cagagaatagtttaaatt

SEQ ID NO: 8626 - DNA, 19 bp, Homo Sapiens
cagagaatagtttaaatta

SEQ ID NO: 8627 - DNA, 20 bp, Homo Sapiens
cagagaatagtttaaattag

SEQ ID NO: 8628 - DNA, 21 bp, Homo Sapiens
cagagaatagtttaaattaga

SEQ ID NO: 8629 - DNA, 22 bp, Homo Sapiens
cagagaatagtttaaattagaa

SEQ ID NO: 8630 - DNA, 23 bp, Homo Sapiens
cagagaatagtttaaattagaat

SEQ ID NO: 8631 - DNA, 24 bp, Homo Sapiens
cagagaatagtttaaattagaatc

SEQ ID NO: 8632 - DNA, 25 bp, Homo Sapiens
cagagaatagtttaaattagaatct

SEQ ID NO: 8633 - DNA, 26 bp, Homo Sapiens
cagagaatagtttaaattagaatctt

SEQ ID NO: 8634 - DNA, 27 bp, Homo Sapiens
cagagaatagtttaaattagaatctta

SEQ ID NO: 8635 - DNA, 28 bp, Homo Sapiens
cagagaatagtttaaattagaatcttag

SEQ ID NO: 8636 - DNA, 29 bp, Homo Sapiens
cagagaatagtttaaattagaatcttagc

SEQ ID NO: 8637 - DNA, 30 bp, Homo Sapiens
cagagaatagtttaaattagaatcttagct

SEQ ID NO: 8638 - DNA, 31 bp, Homo Sapiens
cagagaatagtttaaattagaatcttagctt

SEQ ID NO: 8639 - DNA, 32 bp, Homo Sapiens
cagagaatagtttaaattagaatcttagcttt

SEQ ID NO: 8640 - DNA, 33 bp, Homo Sapiens
cagagaatagtttaaattagaatcttagctttg

SEQ ID NO: 8641 - DNA, 34 bp, Homo Sapiens
cagagaatagtttaaattagaatcttagctttgg

SEQ ID NO: 8642 - DNA, 35 bp, Homo Sapiens
cagagaatagtttaaattagaatcttagctttggg

SEQ ID NO: 8643 - DNA, 37 bp, Homo Sapiens
cagagaatagtttaaattagaatcttagctttgggtg

SEQ ID NO: 8644 - DNA, 38 bp, Homo Sapiens
cagagaatagtttaaattagaatcttagctttgggtgc

SEQ ID NO: 8645 - DNA, 39 bp, Homo Sapiens
cagagaatagtttaaattagaatcttagctttgggtgct

SEQ ID NO: 8646 - DNA, 40 bp, Homo Sapiens
cagagaatagtttaaattagaatcttagctttgggtgcta

SEQ ID NO: 8647 - DNA, 41 bp, Homo Sapiens
cagagaatagtttaaattagaatcttagctttgggtgctaa

SEQ ID NO: 8648 - DNA, 42 bp, Homo Sapiens
cagagaatagtttaaattagaatcttagctttgggtgctaat

SEQ ID NO: 8649 - DNA, 43 bp, Homo Sapiens
cagagaatagtttaaattagaatcttagctttgggtgctaatg

SEQ ID NO: 8650 - DNA, 44 bp, Homo Sapiens
cagagaatagtttaaattagaatcttagctttgggtgctaatgg

SEQ ID NO: 8651 - DNA, 45 bp, Homo Sapiens
cagagaatagtttaaattagaatcttagctttgggtgctaatggt

SEQ ID NO: 8652 - DNA, 46 bp, Homo Sapiens
cagagaatagtttaaattagaatcttagctttgggtgctaatggtg

SEQ ID NO: 8653 - DNA, 47 bp, Homo Sapiens
cagagaatagtttaaattagaatcttagctttgggtgctaatggtgg

SEQ ID NO: 8654 - DNA, 48 bp, Homo Sapiens
cagagaatagtttaaattagaatcttagctttgggtgctaatggtgga

SEQ ID NO: 8655 - DNA, 16 bp, Homo Sapiens
cagagcatttgactgc

SEQ ID NO: 8656 - DNA, 16 bp, Homo Sapiens
cagagcccggtaatcg

SEQ ID NO: 8657 - DNA, 17 bp, Homo Sapiens
cagagcccggtaatcgc

SEQ ID NO: 8658 - DNA, 20 bp, Homo Sapiens
cagagcccggtaatcgcata

SEQ ID NO: 8659 - DNA, 21 bp, Homo Sapiens
cagagcccggtaatcgcataa

SEQ ID NO: 8660 - DNA, 22 bp, Homo Sapiens
cagagcccggtaatcgcataaa

SEQ ID NO: 8661 - DNA, 23 bp, Homo Sapiens
cagagcccggtaatcgcataaaa

SEQ ID NO: 8662 - DNA, 24 bp, Homo Sapiens
cagagcccggtaatcgcataaaac

SEQ ID NO: 8663 - DNA, 25 bp, Homo Sapiens
cagagcccggtaatcgcataaaact

SEQ ID NO: 8664 - DNA, 27 bp, Homo Sapiens
cagagcccggtaatcgcataaaactta

SEQ ID NO: 8665 - DNA, 28 bp, Homo Sapiens
cagagcccggtaatcgcataaaacttaa

SEQ ID NO: 8666 - DNA, 29 bp, Homo Sapiens
cagagcccggtaatcgcataaaacttaaa

SEQ ID NO: 8667 - DNA, 30 bp, Homo Sapiens
cagagcccggtaatcgcataaaacttaaaa

SEQ ID NO: 8668 - DNA, 31 bp, Homo Sapiens
cagagcccggtaatcgcataaaacttaaaac

SEQ ID NO: 8669 - DNA, 32 bp, Homo Sapiens
cagagcccggtaatcgcataaaacttaaaact

SEQ ID NO: 8670 - DNA, 33 bp, Homo Sapiens
cagagcccggtaatcgcataaaacttaaaactt

SEQ ID NO: 8671 - DNA, 34 bp, Homo Sapiens
cagagcccggtaatcgcataaaacttaaaacttt

SEQ ID NO: 8672 - DNA, 36 bp, Homo Sapiens
cagagcccggtaatcgcataaaacttaaaactttac

SEQ ID NO: 8673 - DNA, 37 bp, Homo Sapiens
cagagcccggtaatcgcataaaacttaaaactttaca

SEQ ID NO: 8674 - DNA, 16 bp, Homo Sapiens
cagaggcttacgaccc

SEQ ID NO: 8675 - DNA, 17 bp, Homo Sapiens
cagaggcttacgacccc

SEQ ID NO: 8676 - DNA, 18 bp, Homo Sapiens
cagaggcttacgacccct

SEQ ID NO: 8677 - DNA, 20 bp, Homo Sapiens
cagaggcttacgacccctta

SEQ ID NO: 8678 - DNA, 25 bp, Homo Sapiens
cagaggcttacgaccccttatttac

SEQ ID NO: 8679 - DNA, 26 bp, Homo Sapiens
cagaggcttacgaccccttatttacc

SEQ ID NO: 8680 - DNA, 27 bp, Homo Sapiens
cagaggcttacgaccccttatttaccc

SEQ ID NO: 8681 - DNA, 28 bp, Homo Sapiens
cagaggcttacgaccccttatttacccc

SEQ ID NO: 8682 - DNA, 29 bp, Homo Sapiens
cagaggcttacgaccccttatttacccca

SEQ ID NO: 8683 - DNA, 16 bp, Homo Sapiens
cagaggtcaatggatc

SEQ ID NO: 8684 - DNA, 16 bp, Homo Sapiens
cagaggtcgatggatc

SEQ ID NO: 8685 - DNA, 17 bp, Homo Sapiens
cagaggtcgatggatcg

SEQ ID NO: 8686 - DNA, 18 bp, Homo Sapiens
cagaggtcgatggatcga

SEQ ID NO: 8687 - DNA, 20 bp, Homo Sapiens
cagaggtcgatggatcgaaa

SEQ ID NO: 8688 - DNA, 21 bp, Homo Sapiens
cagaggtcgatggatcgaaac

SEQ ID NO: 8689 - DNA, 22 bp, Homo Sapiens
cagaggtcgatggatcgaaacc

SEQ ID NO: 8690 - DNA, 23 bp, Homo Sapiens
cagaggtcgatggatcgaaacca

SEQ ID NO: 8691 - DNA, 24 bp, Homo Sapiens
cagaggtcgatggatcgaaaccat

SEQ ID NO: 8692 - DNA, 27 bp, Homo Sapiens
cagaggtcgatggatcgaaaccatcct

SEQ ID NO: 8693 - DNA, 28 bp, Homo Sapiens
cagaggtcgatggatcgaaaccatcctc

SEQ ID NO: 8694 - DNA, 17 bp, Homo Sapiens
cagaggttcaattcctc

SEQ ID NO: 8695 - DNA, 16 bp, Homo Sapiens
cagaggttccgggttc

SEQ ID NO: 8696 - DNA, 17 bp, Homo Sapiens
cagaggttccgggttcg

SEQ ID NO: 8697 - DNA, 26 bp, Homo Sapiens
cagaggttccgggttcgagtcccggc

SEQ ID NO: 8698 - DNA, 32 bp, Homo Sapiens
cagaggttccgggttcgagtcccggcagagat

SEQ ID NO: 8699 - DNA, 33 bp, Homo Sapiens
cagaggttccgggttcgagtcccggcagagatg

SEQ ID NO: 8700 - DNA, 34 bp, Homo Sapiens
cagaggttccgggttcgagtcccggcagagatgc

SEQ ID NO: 8701 - DNA, 35 bp, Homo Sapiens
cagaggttccgggttcgagtcccggcagagatgcc

SEQ ID NO: 8702 - DNA, 36 bp, Homo Sapiens
cagaggttccgggttcgagtcccggcagagatgcca

SEQ ID NO: 8703 - DNA, 17 bp, Homo Sapiens
cagagtggcgcagcgga

SEQ ID NO: 8704 - DNA, 18 bp, Homo Sapiens
cagagtggcgcagcggaa

SEQ ID NO: 8705 - DNA, 19 bp, Homo Sapiens
cagagtggcgcagcggaag

SEQ ID NO: 8706 - DNA, 20 bp, Homo Sapiens
cagagtggcgcagcggaagc

SEQ ID NO: 8707 - DNA, 21 bp, Homo Sapiens
cagagtggcgcagcggaagcg

SEQ ID NO: 8708 - DNA, 25 bp, Homo Sapiens
cagagtggcgcagcggaagcgtgct

SEQ ID NO: 8709 - DNA, 26 bp, Homo Sapiens
cagagtggcgcagcggaagcgtgctg

SEQ ID NO: 8710 - DNA, 27 bp, Homo Sapiens
cagagtggcgcagcggaagcgtgctgg

SEQ ID NO: 8711 - DNA, 28 bp, Homo Sapiens
cagagtggcgcagcggaagcgtgctggg

SEQ ID NO: 8712 - DNA, 29 bp, Homo Sapiens
cagagtggcgcagcggaagcgtgctgggc

SEQ ID NO: 8713 - DNA, 30 bp, Homo Sapiens
cagagtggcgcagcggaagcgtgctgggcc

SEQ ID NO: 8714 - DNA, 31 bp, Homo Sapiens
cagagtggcgcagcggaagcgtgctgggccc

SEQ ID NO: 8715 - DNA, 32 bp, Homo Sapiens
cagagtggcgcagcggaagcgtgctgggccca

SEQ ID NO: 8716 - DNA, 33 bp, Homo Sapiens
cagagtggcgcagcggaagcgtgctgggcccat

SEQ ID NO: 8717 - DNA, 34 bp, Homo Sapiens
cagagtggcgcagcggaagcgtgctgggcccata

SEQ ID NO: 8718 - DNA, 38 bp, Homo Sapiens
cagagtggcgcagcggaagcgtgctgggcccataaccc

SEQ ID NO: 8719 - DNA, 40 bp, Homo Sapiens
cagagtggcgcagcggaagcgtgctgggcccataacccag

SEQ ID NO: 8720 - DNA, 47 bp, Homo Sapiens
cagagtggcgcagcggaagcgtgctgggcccataacccagaggtcga

SEQ ID NO: 8721 - DNA, 16 bp, Homo Sapiens
cagagtggggttttgc

SEQ ID NO: 8722 - DNA, 17 bp, Homo Sapiens
cagagtggggttttgca

SEQ ID NO: 8723 - DNA, 20 bp, Homo Sapiens
cagagtggggttttgcagtc

SEQ ID NO: 8724 - DNA, 21 bp, Homo Sapiens
cagagtggggttttgcagtcc

SEQ ID NO: 8725 - DNA, 22 bp, Homo Sapiens
cagagtggggttttgcagtcct

SEQ ID NO: 8726 - DNA, 23 bp, Homo Sapiens
cagagtggggttttgcagtcctt

SEQ ID NO: 8727 - DNA, 24 bp, Homo Sapiens
cagagtggggttttgcagtcctta

SEQ ID NO: 8728 - DNA, 25 bp, Homo Sapiens
cagagtggggttttgcagtccttac

SEQ ID NO: 8729 - DNA, 26 bp, Homo Sapiens
cagagtggggttttgcagtccttacc

SEQ ID NO: 8730 - DNA, 27 bp, Homo Sapiens
cagagtggggttttgcagtccttacca

SEQ ID NO: 8731 - DNA, 29 bp, Homo Sapiens
cagagtggtgcagcggaagcgtgctgggc

SEQ ID NO: 8732 - DNA, 16 bp, Homo Sapiens
cagagtgtagcttaac

SEQ ID NO: 8733 - DNA, 17 bp, Homo Sapiens
cagagtgtagcttaaca

SEQ ID NO: 8734 - DNA, 18 bp, Homo Sapiens
cagagtgtagcttaacac

SEQ ID NO: 8735 - DNA, 19 bp, Homo Sapiens
cagagtgtagcttaacaca

SEQ ID NO: 8736 - DNA, 20 bp, Homo Sapiens
cagagtgtagcttaacacaa

SEQ ID NO: 8737 - DNA, 21 bp, Homo Sapiens
cagagtgtagcttaacacaaa

SEQ ID NO: 8738 - DNA, 22 bp, Homo Sapiens
cagagtgtagcttaacacaaag

SEQ ID NO: 8739 - DNA, 23 bp, Homo Sapiens
cagagtgtagcttaacacaaagc

SEQ ID NO: 8740 - DNA, 24 bp, Homo Sapiens
cagagtgtagcttaacacaaagca

SEQ ID NO: 8741 - DNA, 25 bp, Homo Sapiens
cagagtgtagcttaacacaaagcac

SEQ ID NO: 8742 - DNA, 26 bp, Homo Sapiens
cagagtgtagcttaacacaaagcacc

SEQ ID NO: 8743 - DNA, 27 bp, Homo Sapiens
cagagtgtagcttaacacaaagcaccc

SEQ ID NO: 8744 - DNA, 28 bp, Homo Sapiens
cagagtgtagcttaacacaaagcaccca

SEQ ID NO: 8745 - DNA, 29 bp, Homo Sapiens
cagagtgtagcttaacacaaagcacccaa

SEQ ID NO: 8746 - DNA, 30 bp, Homo Sapiens
cagagtgtagcttaacacaaagcacccaac

SEQ ID NO: 8747 - DNA, 31 bp, Homo Sapiens
cagagtgtagcttaacacaaagcacccaact

SEQ ID NO: 8748 - DNA, 32 bp, Homo Sapiens
cagagtgtagcttaacacaaagcacccaactt

SEQ ID NO: 8749 - DNA, 33 bp, Homo Sapiens
cagagtgtagcttaacacaaagcacccaactta

SEQ ID NO: 8750 - DNA, 34 bp, Homo Sapiens
cagagtgtagcttaacacaaagcacccaacttac

SEQ ID NO: 8751 - DNA, 35 bp, Homo Sapiens
cagagtgtagcttaacacaaagcacccaacttaca

SEQ ID NO: 8752 - DNA, 36 bp, Homo Sapiens
cagagtgtagcttaacacaaagcacccaacttacac

SEQ ID NO: 8753 - DNA, 37 bp, Homo Sapiens
cagagtgtagcttaacacaaagcacccaacttacact

SEQ ID NO: 8754 - DNA, 38 bp, Homo Sapiens
cagagtgtagcttaacacaaagcacccaacttacactt

SEQ ID NO: 8755 - DNA, 39 bp, Homo Sapiens
cagagtgtagcttaacacaaagcacccaacttacactta

SEQ ID NO: 8756 - DNA, 40 bp, Homo Sapiens
cagagtgtagcttaacacaaagcacccaacttacacttag

SEQ ID NO: 8757 - DNA, 41 bp, Homo Sapiens
cagagtgtagcttaacacaaagcacccaacttacacttagg

SEQ ID NO: 8758 - DNA, 42 bp, Homo Sapiens
cagagtgtagcttaacacaaagcacccaacttacacttagga

SEQ ID NO: 8759 - DNA, 43 bp, Homo Sapiens
cagagtgtagcttaacacaaagcacccaacttacacttaggag

SEQ ID NO: 8760 - DNA, 44 bp, Homo Sapiens
cagagtgtagcttaacacaaagcacccaacttacacttaggaga

SEQ ID NO: 8761 - DNA, 45 bp, Homo Sapiens
cagagtgtagcttaacacaaagcacccaacttacacttaggagat

SEQ ID NO: 8762 - DNA, 46 bp, Homo Sapiens
cagagtgtagcttaacacaaagcacccaacttacacttaggagatt

SEQ ID NO: 8763 - DNA, 47 bp, Homo Sapiens
cagagtgtagcttaacacaaagcacccaacttacacttaggagattt

SEQ ID NO: 8764 - DNA, 48 bp, Homo Sapiens
cagagtgtagcttaacacaaagcacccaacttacacttaggagatttc

SEQ ID NO: 8765 - DNA, 18 bp, Homo Sapiens
cagatcaagaggtccccg

SEQ ID NO: 8766 - DNA, 17 bp, Homo Sapiens
cagatcagaaggctgcg

SEQ ID NO: 8767 - DNA, 41 bp, Homo Sapiens
cagatcagaaggctgcgtgttcgaatcacgtcggggtcacc

SEQ ID NO: 8768 - DNA, 18 bp, Homo Sapiens
cagatcagaaggttgcgt

SEQ ID NO: 8769 - DNA, 16 bp, Homo Sapiens
cagattgtgaatctga

SEQ ID NO: 8770 - DNA, 17 bp, Homo Sapiens
cagattgtgaatctgac

SEQ ID NO: 8771 - DNA, 18 bp, Homo Sapiens
cagattgtgaatctgaca

SEQ ID NO: 8772 - DNA, 19 bp, Homo Sapiens
cagattgtgaatctgacaa

SEQ ID NO: 8773 - DNA, 20 bp, Homo Sapiens
cagattgtgaatctgacaac

SEQ ID NO: 8774 - DNA, 21 bp, Homo Sapiens
cagattgtgaatctgacaaca

SEQ ID NO: 8775 - DNA, 22 bp, Homo Sapiens
cagattgtgaatctgacaacag

SEQ ID NO: 8776 - DNA, 23 bp, Homo Sapiens
cagattgtgaatctgacaacaga

SEQ ID NO: 8777 - DNA, 24 bp, Homo Sapiens
cagattgtgaatctgacaacagag

SEQ ID NO: 8778 - DNA, 25 bp, Homo Sapiens
cagattgtgaatctgacaacagagg

SEQ ID NO: 8779 - DNA, 26 bp, Homo Sapiens
cagattgtgaatctgacaacagaggc

SEQ ID NO: 8780 - DNA, 27 bp, Homo Sapiens
cagattgtgaatctgacaacagaggct

SEQ ID NO: 8781 - DNA, 28 bp, Homo Sapiens
cagattgtgaatctgacaacagaggctt

SEQ ID NO: 8782 - DNA, 29 bp, Homo Sapiens
cagattgtgaatctgacaacagaggctta

SEQ ID NO: 8783 - DNA, 30 bp, Homo Sapiens
cagattgtgaatctgacaacagaggcttac

SEQ ID NO: 8784 - DNA, 31 bp, Homo Sapiens
cagattgtgaatctgacaacagaggcttacg

SEQ ID NO: 8785 - DNA, 32 bp, Homo Sapiens
cagattgtgaatctgacaacagaggcttacga

SEQ ID NO: 8786 - DNA, 33 bp, Homo Sapiens
cagattgtgaatctgacaacagaggcttacgac

SEQ ID NO: 8787 - DNA, 34 bp, Homo Sapiens
cagattgtgaatctgacaacagaggcttacgacc

SEQ ID NO: 8788 - DNA, 35 bp, Homo Sapiens
cagattgtgaatctgacaacagaggcttacgaccc

SEQ ID NO: 8789 - DNA, 36 bp, Homo Sapiens
cagattgtgaatctgacaacagaggcttacgacccc

SEQ ID NO: 8790 - DNA, 37 bp, Homo Sapiens
cagattgtgaatctgacaacagaggcttacgacccct

SEQ ID NO: 8791 - DNA, 38 bp, Homo Sapiens
cagattgtgaatctgacaacagaggcttacgacccctt

SEQ ID NO: 8792 - DNA, 39 bp, Homo Sapiens
cagattgtgaatctgacaacagaggcttacgacccctta

SEQ ID NO: 8793 - DNA, 40 bp, Homo Sapiens
cagattgtgaatctgacaacagaggcttacgaccccttat

SEQ ID NO: 8794 - DNA, 41 bp, Homo Sapiens
cagattgtgaatctgacaacagaggcttacgaccccttatt

SEQ ID NO: 8795 - DNA, 42 bp, Homo Sapiens
cagattgtgaatctgacaacagaggcttacgaccccttattt

SEQ ID NO: 8796 - DNA, 43 bp, Homo Sapiens
cagattgtgaatctgacaacagaggcttacgaccccttattta

SEQ ID NO: 8797 - DNA, 44 bp, Homo Sapiens
cagattgtgaatctgacaacagaggcttacgaccccttatttac

SEQ ID NO: 8798 - DNA, 45 bp, Homo Sapiens
cagattgtgaatctgacaacagaggcttacgaccccttatttacc

SEQ ID NO: 8799 - DNA, 46 bp, Homo Sapiens
cagattgtgaatctgacaacagaggcttacgaccccttatttaccc

SEQ ID NO: 8800 - DNA, 47 bp, Homo Sapiens
cagattgtgaatctgacaacagaggcttacgaccccttatttacccc

SEQ ID NO: 8801 - DNA, 48 bp, Homo Sapiens
cagattgtgaatctgacaacagaggcttacgaccccttatttacccca

SEQ ID NO: 8802 - DNA, 25 bp, Homo Sapiens
cagcaacctcggttcgaatccgagt

SEQ ID NO: 8803 - DNA, 29 bp, Homo Sapiens
cagcaacctcggttcgaatccgagtcacg

SEQ ID NO: 8804 - DNA, 30 bp, Homo Sapiens
cagcaacctcggttcgaatccgagtcacgg

SEQ ID NO: 8805 - DNA, 31 bp, Homo Sapiens
cagcaacctcggttcgaatccgagtcacggc

SEQ ID NO: 8806 - DNA, 32 bp, Homo Sapiens
cagcaacctcggttcgaatccgagtcacggca

SEQ ID NO: 8807 - DNA, 33 bp, Homo Sapiens
cagcaacctcggttcgaatccgagtcacggcac

SEQ ID NO: 8808 - DNA, 34 bp, Homo Sapiens
cagcaacctcggttcgaatccgagtcacggcacc

SEQ ID NO: 8809 - DNA, 35 bp, Homo Sapiens
cagcaacctcggttcgaatccgagtcacggcacca

SEQ ID NO: 8810 - DNA, 30 bp, Homo Sapiens
cagcaatccgagttcgaatctcggtgggac

SEQ ID NO: 8811 - DNA, 31 bp, Homo Sapiens
cagcaatccgagttcgaatctcggtgggacc

SEQ ID NO: 8812 - DNA, 32 bp, Homo Sapiens
cagcaatccgagttcgaatctcggtgggacct

SEQ ID NO: 8813 - DNA, 33 bp, Homo Sapiens
cagcaatccgagttcgaatctcggtgggacctc

SEQ ID NO: 8814 - DNA, 34 bp, Homo Sapiens
cagcaatccgagttcgaatctcggtgggacctcc

SEQ ID NO: 8815 - DNA, 18 bp, Homo Sapiens
cagcactctggactctga

SEQ ID NO: 8816 - DNA, 22 bp, Homo Sapiens
cagcactctggactctgaatcc

SEQ ID NO: 8817 - DNA, 24 bp, Homo Sapiens
cagcactctggactctgaatccag

SEQ ID NO: 8818 - DNA, 25 bp, Homo Sapiens
cagcactctggactctgaatccagc

SEQ ID NO: 8819 - DNA, 33 bp, Homo Sapiens
cagcactctggactctgaatccagcgatccgag

SEQ ID NO: 8820 - DNA, 37 bp, Homo Sapiens
cagcactctggactctgaatccagcgatccgagttca

SEQ ID NO: 8821 - DNA, 32 bp, Homo Sapiens
cagcagagtggcgcagcggaagcgtgctgggc

SEQ ID NO: 8822 - DNA, 35 bp, Homo Sapiens
cagcagagtggcgcagcggaagcgtgctgggccca

SEQ ID NO: 8823 - DNA, 23 bp, Homo Sapiens
cagcctccggagctggggattgt

SEQ ID NO: 8824 - DNA, 27 bp, Homo Sapiens
cagcctccggagctggggattgtgggt

SEQ ID NO: 8825 - DNA, 16 bp, Homo Sapiens
cagcgatccgagttca

SEQ ID NO: 8826 - DNA, 22 bp, Homo Sapiens
cagcgatccgagttcaaatctc

SEQ ID NO: 8827 - DNA, 23 bp, Homo Sapiens
cagcgatccgagttcaaatctcg

SEQ ID NO: 8828 - DNA, 26 bp, Homo Sapiens
cagcgatccgagttcaaatctcggtg

SEQ ID NO: 8829 - DNA, 30 bp, Homo Sapiens
cagcgatccgagttcaaatctcggtggaac

SEQ ID NO: 8830 - DNA, 31 bp, Homo Sapiens
cagcgatccgagttcaaatctcggtggaacc

SEQ ID NO: 8831 - DNA, 32 bp, Homo Sapiens
cagcgatccgagttcaaatctcggtggaacct

SEQ ID NO: 8832 - DNA, 33 bp, Homo Sapiens
cagcgatccgagttcaaatctcggtggaacctc

SEQ ID NO: 8833 - DNA, 34 bp, Homo Sapiens
cagcgatccgagttcaaatctcggtggaacctcc

SEQ ID NO: 8834 - DNA, 35 bp, Homo Sapiens
cagcgatccgagttcaaatctcggtggaacctcca

SEQ ID NO: 8835 - DNA, 30 bp, Homo Sapiens
cagcgatccgagttcaaatctcggtgggac

SEQ ID NO: 8836 - DNA, 31 bp, Homo Sapiens
cagcgatccgagttcaaatctcggtgggacc

SEQ ID NO: 8837 - DNA, 32 bp, Homo Sapiens
cagcgatccgagttcaaatctcggtgggacct

SEQ ID NO: 8838 - DNA, 33 bp, Homo Sapiens
cagcgatccgagttcaaatctcggtgggacctc

SEQ ID NO: 8839 - DNA, 34 bp, Homo Sapiens
cagcgatccgagttcaaatctcggtgggacctcc

SEQ ID NO: 8840 - DNA, 31 bp, Homo Sapiens
cagcgatccgagttcaagtctcggtggaacc

SEQ ID NO: 8841 - DNA, 16 bp, Homo Sapiens
cagcgatccgagttcg

SEQ ID NO: 8842 - DNA, 22 bp, Homo Sapiens
cagcgatccgagttcgagtctc

SEQ ID NO: 8843 - DNA, 30 bp, Homo Sapiens
cagcgatccgagttcgagtctcggtggaac

SEQ ID NO: 8844 - DNA, 31 bp, Homo Sapiens
cagcgatccgagttcgagtctcggtggaacc

SEQ ID NO: 8845 - DNA, 32 bp, Homo Sapiens
cagcgatccgagttcgagtctcggtggaacct

SEQ ID NO: 8846 - DNA, 33 bp, Homo Sapiens
cagcgatccgagttcgagtctcggtggaacctc

SEQ ID NO: 8847 - DNA, 34 bp, Homo Sapiens
cagcgatccgagttcgagtctcggtggaacctcc

SEQ ID NO: 8848 - DNA, 18 bp, Homo Sapiens
cagcggaagcgtgctggg

SEQ ID NO: 8849 - DNA, 19 bp, Homo Sapiens
cagcggaagcgtgctgggc

SEQ ID NO: 8850 - DNA, 20 bp, Homo Sapiens
cagcggaagcgtgctgggcc

SEQ ID NO: 8851 - DNA, 21 bp, Homo Sapiens
cagcggaagcgtgctgggccc

SEQ ID NO: 8852 - DNA, 22 bp, Homo Sapiens
cagcggaagcgtgctgggccca

SEQ ID NO: 8853 - DNA, 23 bp, Homo Sapiens
cagcggaagcgtgctgggcccat

SEQ ID NO: 8854 - DNA, 25 bp, Homo Sapiens
cagcggaagcgtgctgggcccataa

SEQ ID NO: 8855 - DNA, 26 bp, Homo Sapiens
cagcggaagcgtgctgggcccataac

SEQ ID NO: 8856 - DNA, 28 bp, Homo Sapiens
cagcggaagcgtgctgggcccataaccc

SEQ ID NO: 8857 - DNA, 29 bp, Homo Sapiens
cagcggaagcgtgctgggcccataaccca

SEQ ID NO: 8858 - DNA, 31 bp, Homo Sapiens
cagcggaagcgtgctgggcccataacccaga

SEQ ID NO: 8859 - DNA, 36 bp, Homo Sapiens
cagcggaagcgtgctgggcccataacccagaggtcg

SEQ ID NO: 8860 - DNA, 38 bp, Homo Sapiens
cagcggaagcgtgctgggcccataacccagaggtcgat

SEQ ID NO: 8861 - DNA, 41 bp, Homo Sapiens
cagcggaagcgtgctgggcccataacccagaggtcgatgga

SEQ ID NO: 8862 - DNA, 42 bp, Homo Sapiens
cagcggaagcgtgctgggcccataacccagaggtcgatggat

SEQ ID NO: 8863 - DNA, 19 bp, Homo Sapiens
cagctaaataagctatcgg

SEQ ID NO: 8864 - DNA, 20 bp, Homo Sapiens
cagctaaataagctatcggg

SEQ ID NO: 8865 - DNA, 21 bp, Homo Sapiens
cagctaaataagctatcgggc

SEQ ID NO: 8866 - DNA, 22 bp, Homo Sapiens
cagctaaataagctatcgggcc

SEQ ID NO: 8867 - DNA, 23 bp, Homo Sapiens
cagctaaataagctatcgggccc

SEQ ID NO: 8868 - DNA, 24 bp, Homo Sapiens
cagctaaataagctatcgggccca

SEQ ID NO: 8869 - DNA, 25 bp, Homo Sapiens
cagctaaataagctatcgggcccat

SEQ ID NO: 8870 - DNA, 26 bp, Homo Sapiens
cagctaaataagctatcgggcccata

SEQ ID NO: 8871 - DNA, 27 bp, Homo Sapiens
cagctaaataagctatcgggcccatac

SEQ ID NO: 8872 - DNA, 28 bp, Homo Sapiens
cagctaaataagctatcgggcccatacc

SEQ ID NO: 8873 - DNA, 29 bp, Homo Sapiens
cagctaaataagctatcgggcccataccc

SEQ ID NO: 8874 - DNA, 30 bp, Homo Sapiens
cagctaaataagctatcgggcccatacccc

SEQ ID NO: 8875 - DNA, 32 bp, Homo Sapiens
cagctaaataagctatcgggcccataccccga

SEQ ID NO: 8876 - DNA, 33 bp, Homo Sapiens
cagctaaataagctatcgggcccataccccgaa

SEQ ID NO: 8877 - DNA, 34 bp, Homo Sapiens
cagctaaataagctatcgggcccataccccgaaa

SEQ ID NO: 8878 - DNA, 38 bp, Homo Sapiens
cagctaaataagctatcgggcccataccccgaaaatgt

SEQ ID NO: 8879 - DNA, 39 bp, Homo Sapiens
cagctaaataagctatcgggcccataccccgaaaatgtt

SEQ ID NO: 8880 - DNA, 41 bp, Homo Sapiens
cagctaaataagctatcgggcccataccccgaaaatgttgg

SEQ ID NO: 8881 - DNA, 42 bp, Homo Sapiens
cagctaaataagctatcgggcccataccccgaaaatgttggt

SEQ ID NO: 8882 - DNA, 43 bp, Homo Sapiens
cagctaaataagctatcgggcccataccccgaaaatgttggtt

SEQ ID NO: 8883 - DNA, 44 bp, Homo Sapiens
cagctaaataagctatcgggcccataccccgaaaatgttggtta

SEQ ID NO: 8884 - DNA, 45 bp, Homo Sapiens
cagctaaataagctatcgggcccataccccgaaaatgttggttat

SEQ ID NO: 8885 - DNA, 30 bp, Homo Sapiens
cagctagctcagtcggtagagcatgagact

SEQ ID NO: 8886 - DNA, 31 bp, Homo Sapiens
cagctagctcagtcggtagagcatgagactc

SEQ ID NO: 8887 - DNA, 32 bp, Homo Sapiens
cagctagctcagtcggtagagcatgagactct

SEQ ID NO: 8888 - DNA, 16 bp, Homo Sapiens
cagctatccattggtc

SEQ ID NO: 8889 - DNA, 17 bp, Homo Sapiens
cagctatccattggtct

SEQ ID NO: 8890 - DNA, 18 bp, Homo Sapiens
cagctatccattggtctt

SEQ ID NO: 8891 - DNA, 19 bp, Homo Sapiens
cagctatccattggtctta

SEQ ID NO: 8892 - DNA, 20 bp, Homo Sapiens
cagctatccattggtcttag

SEQ ID NO: 8893 - DNA, 23 bp, Homo Sapiens
cagctatccattggtcttaggcc

SEQ ID NO: 8894 - DNA, 24 bp, Homo Sapiens
cagctatccattggtcttaggccc

SEQ ID NO: 8895 - DNA, 25 bp, Homo Sapiens
cagctatccattggtcttaggcccc

SEQ ID NO: 8896 - DNA, 28 bp, Homo Sapiens
cagctatccattggtcttaggccccaaa

SEQ ID NO: 8897 - DNA, 29 bp, Homo Sapiens
cagctatccattggtcttaggccccaaaa

SEQ ID NO: 8898 - DNA, 30 bp, Homo Sapiens
cagctatccattggtcttaggccccaaaaa

SEQ ID NO: 8899 - DNA, 16 bp, Homo Sapiens
cagctgcctttcaagc

SEQ ID NO: 8900 - DNA, 19 bp, Homo Sapiens
cagctggtagagcggagga

SEQ ID NO: 8901 - DNA, 22 bp, Homo Sapiens
cagctggtagagcggaggactg

SEQ ID NO: 8902 - DNA, 24 bp, Homo Sapiens
cagctggtagagcggaggactgta

SEQ ID NO: 8903 - DNA, 25 bp, Homo Sapiens
cagctggtagagcggaggactgtag

SEQ ID NO: 8904 - DNA, 16 bp, Homo Sapiens
cagcttcaaacctgcc

SEQ ID NO: 8905 - DNA, 18 bp, Homo Sapiens
cagcttcaaacctgccgg

SEQ ID NO: 8906 - DNA, 20 bp, Homo Sapiens
cagcttcaaacctgccgggg

SEQ ID NO: 8907 - DNA, 21 bp, Homo Sapiens
cagcttcaaacctgccggggc

SEQ ID NO: 8908 - DNA, 22 bp, Homo Sapiens
cagcttcaaacctgccggggct

SEQ ID NO: 8909 - DNA, 23 bp, Homo Sapiens
cagcttcaaacctgccggggctt

SEQ ID NO: 8910 - DNA, 24 bp, Homo Sapiens
cagcttcaaacctgccggggcttc

SEQ ID NO: 8911 - DNA, 25 bp, Homo Sapiens
cagcttcaaacctgccggggcttcc

SEQ ID NO: 8912 - DNA, 26 bp, Homo Sapiens
cagcttcaaacctgccggggcttcca

SEQ ID NO: 8913 - DNA, 16 bp, Homo Sapiens
cagctttggggggttc

SEQ ID NO: 8914 - DNA, 17 bp, Homo Sapiens
cagctttggggggttcg

SEQ ID NO: 8915 - DNA, 18 bp, Homo Sapiens
cagctttggggggttcga

SEQ ID NO: 8916 - DNA, 19 bp, Homo Sapiens
cagctttggggggttcgat

SEQ ID NO: 8917 - DNA, 22 bp, Homo Sapiens
cagctttggggggttcgattcc

SEQ ID NO: 8918 - DNA, 23 bp, Homo Sapiens
cagctttggggggttcgattcct

SEQ ID NO: 8919 - DNA, 26 bp, Homo Sapiens
cagctttggggggttcgattccttcc

SEQ ID NO: 8920 - DNA, 27 bp, Homo Sapiens
cagctttggggggttcgattccttcct

SEQ ID NO: 8921 - DNA, 28 bp, Homo Sapiens
cagctttggggggttcgattccttcctt

SEQ ID NO: 8922 - DNA, 29 bp, Homo Sapiens
cagctttggggggttcgattccttccttt

SEQ ID NO: 8923 - DNA, 30 bp, Homo Sapiens
cagctttggggggttcgattccttcctttt

SEQ ID NO: 8924 - DNA, 33 bp, Homo Sapiens
cagctttggggggttcgattccttccttttttg

SEQ ID NO: 8925 - DNA, 34 bp, Homo Sapiens
cagctttggggggttcgattccttccttttttgc

SEQ ID NO: 8926 - DNA, 35 bp, Homo Sapiens
cagctttggggggttcgattccttccttttttgcc

SEQ ID NO: 8927 - DNA, 36 bp, Homo Sapiens
cagctttggggggttcgattccttccttttttgcca

SEQ ID NO: 8928 - DNA, 16 bp, Homo Sapiens
caggagatcctgggtt

SEQ ID NO: 8929 - DNA, 17 bp, Homo Sapiens
caggagatcctgggttc

SEQ ID NO: 8930 - DNA, 18 bp, Homo Sapiens
caggagatcctgggttcg

SEQ ID NO: 8931 - DNA, 27 bp, Homo Sapiens
caggagatcctgggttcgaatcccagc

SEQ ID NO: 8932 - DNA, 28 bp, Homo Sapiens
caggagatcctgggttcgaatcccagcg

SEQ ID NO: 8933 - DNA, 34 bp, Homo Sapiens
caggagatcctgggttcgaatcccagcgaggcct

SEQ ID NO: 8934 - DNA, 35 bp, Homo Sapiens
caggagatcctgggttcgaatcccagcgaggcctc

SEQ ID NO: 8935 - DNA, 36 bp, Homo Sapiens
caggagatcctgggttcgaatcccagcgaggcctcc

SEQ ID NO: 8936 - DNA, 29 bp, Homo Sapiens
caggagatcctgggttcgaatcccagcgg

SEQ ID NO: 8937 - DNA, 30 bp, Homo Sapiens
caggagatcctgggttcgaatcccagcggg

SEQ ID NO: 8938 - DNA, 31 bp, Homo Sapiens
caggagatcctgggttcgaatcccagcgggg

SEQ ID NO: 8939 - DNA, 32 bp, Homo Sapiens
caggagatcctgggttcgaatcccagcggggc

SEQ ID NO: 8940 - DNA, 33 bp, Homo Sapiens
caggagatcctgggttcgaatcccagcggggcc

SEQ ID NO: 8941 - DNA, 34 bp, Homo Sapiens
caggagatcctgggttcgaatcccagcggggcct

SEQ ID NO: 8942 - DNA, 35 bp, Homo Sapiens
caggagatcctgggttcgaatcccagcggggcctc

SEQ ID NO: 8943 - DNA, 36 bp, Homo Sapiens
caggagatcctgggttcgaatcccagcggggcctcc

SEQ ID NO: 8944 - DNA, 37 bp, Homo Sapiens
caggagatcctgggttcgaatcccagcggggcctcca

SEQ ID NO: 8945 - DNA, 30 bp, Homo Sapiens
caggagatcctgggttcgaatcccagcggt

SEQ ID NO: 8946 - DNA, 31 bp, Homo Sapiens
caggagatcctgggttcgaatcccagcggtg

SEQ ID NO: 8947 - DNA, 32 bp, Homo Sapiens
caggagatcctgggttcgaatcccagcggtgc

SEQ ID NO: 8948 - DNA, 33 bp, Homo Sapiens
caggagatcctgggttcgaatcccagcggtgcc

SEQ ID NO: 8949 - DNA, 34 bp, Homo Sapiens
caggagatcctgggttcgaatcccagcggtgcct

SEQ ID NO: 8950 - DNA, 35 bp, Homo Sapiens
caggagatcctgggttcgaatcccagcggtgcctc

SEQ ID NO: 8951 - DNA, 36 bp, Homo Sapiens
caggagatcctgggttcgaatcccagcggtgcctcc

SEQ ID NO: 8952 - DNA, 37 bp, Homo Sapiens
caggagatcctgggttcgaatcccagcggtgcctcca

SEQ ID NO: 8953 - DNA, 34 bp, Homo Sapiens
caggagatcctgggttcgaatcccagtagagcct

SEQ ID NO: 8954 - DNA, 35 bp, Homo Sapiens
caggagatcctgggttcgaatcccagtagagcctc

SEQ ID NO: 8955 - DNA, 36 bp, Homo Sapiens
caggagatcctgggttcgaatcccagtagagcctcc

SEQ ID NO: 8956 - DNA, 34 bp, Homo Sapiens
caggagatcctgggttcgactcccagcggggcct

SEQ ID NO: 8957 - DNA, 36 bp, Homo Sapiens
caggagatcctgggttcgactcccagcggggcctcc

SEQ ID NO: 8958 - DNA, 31 bp, Homo Sapiens
caggagatcctgggttcgactcccagtgggg

SEQ ID NO: 8959 - DNA, 34 bp, Homo Sapiens
caggagatcctgggttcgactcccagtggggcct

SEQ ID NO: 8960 - DNA, 36 bp, Homo Sapiens
caggagatcctgggttcgactcccagtggggcctcc

SEQ ID NO: 8961 - DNA, 16 bp, Homo Sapiens
caggatggccgagcgg

SEQ ID NO: 8962 - DNA, 18 bp, Homo Sapiens
caggatggccgagcggtc

SEQ ID NO: 8963 - DNA, 19 bp, Homo Sapiens
caggatggccgagcggtct

SEQ ID NO: 8964 - DNA, 20 bp, Homo Sapiens
caggatggccgagcggtcta

SEQ ID NO: 8965 - DNA, 21 bp, Homo Sapiens
caggatggccgagcggtctaa

SEQ ID NO: 8966 - DNA, 22 bp, Homo Sapiens
caggatggccgagcggtctaag

SEQ ID NO: 8967 - DNA, 23 bp, Homo Sapiens
caggatggccgagcggtctaagg

SEQ ID NO: 8968 - DNA, 24 bp, Homo Sapiens
caggatggccgagcggtctaaggc

SEQ ID NO: 8969 - DNA, 29 bp, Homo Sapiens
caggatggccgagcggtctaaggcgctgc

SEQ ID NO: 8970 - DNA, 30 bp, Homo Sapiens
caggatggccgagcggtctaaggcgctgcg

SEQ ID NO: 8971 - DNA, 31 bp, Homo Sapiens
caggatggccgagcggtctaaggcgctgcgt

SEQ ID NO: 8972 - DNA, 32 bp, Homo Sapiens
caggatggccgagcggtctaaggcgctgcgtt

SEQ ID NO: 8973 - DNA, 33 bp, Homo Sapiens
caggatggccgagcggtctaaggcgctgcgttc

SEQ ID NO: 8974 - DNA, 34 bp, Homo Sapiens
caggatggccgagcggtctaaggcgctgcgttca

SEQ ID NO: 8975 - DNA, 35 bp, Homo Sapiens
caggatggccgagcggtctaaggcgctgcgttcag

SEQ ID NO: 8976 - DNA, 16 bp, Homo Sapiens
caggatggccgagtgg

SEQ ID NO: 8977 - DNA, 19 bp, Homo Sapiens
caggatggccgagtggtct

SEQ ID NO: 8978 - DNA, 20 bp, Homo Sapiens
caggatggccgagtggtcta

SEQ ID NO: 8979 - DNA, 22 bp, Homo Sapiens
caggatggccgagtggtctaag

SEQ ID NO: 8980 - DNA, 24 bp, Homo Sapiens
caggatggccgagtggtctaaggc

SEQ ID NO: 8981 - DNA, 27 bp, Homo Sapiens
caggatggccgagtggtctaaggcgcc

SEQ ID NO: 8982 - DNA, 31 bp, Homo Sapiens
caggatggccgagtggtctaaggcgccagac

SEQ ID NO: 8983 - DNA, 33 bp, Homo Sapiens
caggatggccgagtggtctaaggcgccagactc

SEQ ID NO: 8984 - DNA, 34 bp, Homo Sapiens
caggatggccgagtggtctaaggcgccagactca

SEQ ID NO: 8985 - DNA, 35 bp, Homo Sapiens
caggatggccgagtggtctaaggcgccagactcaa

SEQ ID NO: 8986 - DNA, 36 bp, Homo Sapiens
caggatggccgagtggtctaaggcgccagactcaag

SEQ ID NO: 8987 - DNA, 21 bp, Homo Sapiens
caggatggccgagtggttaag

SEQ ID NO: 8988 - DNA, 22 bp, Homo Sapiens
caggatggccgagtggttaagg

SEQ ID NO: 8989 - DNA, 23 bp, Homo Sapiens
caggatggccgagtggttaaggc

SEQ ID NO: 8990 - DNA, 34 bp, Homo Sapiens
caggatggccgagtggttaaggcgttggacttaa

SEQ ID NO: 8991 - DNA, 16 bp, Homo Sapiens
caggcggcccgggttc

SEQ ID NO: 8992 - DNA, 17 bp, Homo Sapiens
caggcggcccgggttcg

SEQ ID NO: 8993 - DNA, 19 bp, Homo Sapiens
caggcggcccgggttcgac

SEQ ID NO: 8994 - DNA, 20 bp, Homo Sapiens
caggcggcccgggttcgact

SEQ ID NO: 8995 - DNA, 21 bp, Homo Sapiens
caggcggcccgggttcgactc

SEQ ID NO: 8996 - DNA, 22 bp, Homo Sapiens
caggcggcccgggttcgactcc

SEQ ID NO: 8997 - DNA, 23 bp, Homo Sapiens
caggcggcccgggttcgactccc

SEQ ID NO: 8998 - DNA, 24 bp, Homo Sapiens
caggcggcccgggttcgactcccg

SEQ ID NO: 8999 - DNA, 25 bp, Homo Sapiens
caggcggcccgggttcgactcccgg

SEQ ID NO: 9000 - DNA, 26 bp, Homo Sapiens
caggcggcccgggttcgactcccggt

SEQ ID NO: 9001 - DNA, 27 bp, Homo Sapiens
caggcggcccgggttcgactcccggtg

SEQ ID NO: 9002 - DNA, 28 bp, Homo Sapiens
caggcggcccgggttcgactcccggtgt

SEQ ID NO: 9003 - DNA, 29 bp, Homo Sapiens
caggcggcccgggttcgactcccggtgtg

SEQ ID NO: 9004 - DNA, 30 bp, Homo Sapiens
caggcggcccgggttcgactcccggtgtgg

SEQ ID NO: 9005 - DNA, 31 bp, Homo Sapiens
caggcggcccgggttcgactcccggtgtggg

SEQ ID NO: 9006 - DNA, 32 bp, Homo Sapiens
caggcggcccgggttcgactcccggtgtggga

SEQ ID NO: 9007 - DNA, 33 bp, Homo Sapiens
caggcggcccgggttcgactcccggtgtgggaa

SEQ ID NO: 9008 - DNA, 34 bp, Homo Sapiens
caggcggcccgggttcgactcccggtgtgggaac

SEQ ID NO: 9009 - DNA, 35 bp, Homo Sapiens
caggcggcccgggttcgactcccggtgtgggaacc

SEQ ID NO: 9010 - DNA, 36 bp, Homo Sapiens
caggcggcccgggttcgactcccggtgtgggaacca

SEQ ID NO: 9011 - DNA, 16 bp, Homo Sapiens
cagggatgggttcgat

SEQ ID NO: 9012 - DNA, 17 bp, Homo Sapiens
cagggatgggttcgatt

SEQ ID NO: 9013 - DNA, 18 bp, Homo Sapiens
cagggatgggttcgattc

SEQ ID NO: 9014 - DNA, 19 bp, Homo Sapiens
cagggatgggttcgattct

SEQ ID NO: 9015 - DNA, 20 bp, Homo Sapiens
cagggatgggttcgattctc

SEQ ID NO: 9016 - DNA, 26 bp, Homo Sapiens
cagggatgggttcgattctcatagtc

SEQ ID NO: 9017 - DNA, 27 bp, Homo Sapiens
cagggatgggttcgattctcatagtcc

SEQ ID NO: 9018 - DNA, 28 bp, Homo Sapiens
cagggatgggttcgattctcatagtcct

SEQ ID NO: 9019 - DNA, 29 bp, Homo Sapiens
cagggatgggttcgattctcatagtccta

SEQ ID NO: 9020 - DNA, 30 bp, Homo Sapiens
cagggatgggttcgattctcatagtcctag

SEQ ID NO: 9021 - DNA, 31 bp, Homo Sapiens
cagggatgggttcgattctcatagtcctagc

SEQ ID NO: 9022 - DNA, 32 bp, Homo Sapiens
cagggatgggttcgattctcatagtcctagcc

SEQ ID NO: 9023 - DNA, 33 bp, Homo Sapiens
cagggatgggttcgattctcatagtcctagcca

SEQ ID NO: 9024 - DNA, 16 bp, Homo Sapiens
cagggattgtgggttc

SEQ ID NO: 9025 - DNA, 17 bp, Homo Sapiens
cagggattgtgggttcg

SEQ ID NO: 9026 - DNA, 23 bp, Homo Sapiens
cagggattgtgggttcgagtccc

SEQ ID NO: 9027 - DNA, 30 bp, Homo Sapiens
cagggattgtgggttcgagtcccacccggg

SEQ ID NO: 9028 - DNA, 32 bp, Homo Sapiens
cagggattgtgggttcgagtcccacccggggt

SEQ ID NO: 9029 - DNA, 33 bp, Homo Sapiens
cagggattgtgggttcgagtcccacccggggta

SEQ ID NO: 9030 - DNA, 34 bp, Homo Sapiens
cagggattgtgggttcgagtcccacccggggtac

SEQ ID NO: 9031 - DNA, 35 bp, Homo Sapiens
cagggattgtgggttcgagtcccacccggggtacc

SEQ ID NO: 9032 - DNA, 36 bp, Homo Sapiens
cagggattgtgggttcgagtcccacccggggtacca

SEQ ID NO: 9033 - DNA, 33 bp, Homo Sapiens
cagggattgtgggttcgagtcccacctggggta

SEQ ID NO: 9034 - DNA, 34 bp, Homo Sapiens
cagggattgtgggttcgagtcccacctggggtac

SEQ ID NO: 9035 - DNA, 35 bp, Homo Sapiens
cagggattgtgggttcgagtcccacctggggtacc

SEQ ID NO: 9036 - DNA, 36 bp, Homo Sapiens
cagggattgtgggttcgagtcccacctggggtacca

SEQ ID NO: 9037 - DNA, 33 bp, Homo Sapiens
cagggattgtgggttcgagtcccacctggggtg

SEQ ID NO: 9038 - DNA, 34 bp, Homo Sapiens
cagggattgtgggttcgagtcccacctggggtgc

SEQ ID NO: 9039 - DNA, 35 bp, Homo Sapiens
cagggattgtgggttcgagtcccacctggggtgcc

SEQ ID NO: 9040 - DNA, 36 bp, Homo Sapiens
cagggattgtgggttcgagtcccacctggggtgcca

SEQ ID NO: 9041 - DNA, 26 bp, Homo Sapiens
cagggattgtgggttcgagtcccatc

SEQ ID NO: 9042 - DNA, 30 bp, Homo Sapiens
cagggattgtgggttcgagtcccatctggg

SEQ ID NO: 9043 - DNA, 31 bp, Homo Sapiens
cagggattgtgggttcgagtcccatctgggg

SEQ ID NO: 9044 - DNA, 32 bp, Homo Sapiens
cagggattgtgggttcgagtcccatctggggt

SEQ ID NO: 9045 - DNA, 33 bp, Homo Sapiens
cagggattgtgggttcgagtcccatctggggtg

SEQ ID NO: 9046 - DNA, 34 bp, Homo Sapiens
cagggattgtgggttcgagtcccatctggggtgc

SEQ ID NO: 9047 - DNA, 35 bp, Homo Sapiens
cagggattgtgggttcgagtcccatctggggtgcc

SEQ ID NO: 9048 - DNA, 36 bp, Homo Sapiens
cagggattgtgggttcgagtcccatctggggtgcca

SEQ ID NO: 9049 - DNA, 16 bp, Homo Sapiens
caggggtagagcattt

SEQ ID NO: 9050 - DNA, 20 bp, Homo Sapiens
caggggtagagcatttgact

SEQ ID NO: 9051 - DNA, 21 bp, Homo Sapiens
caggggtagagcatttgactg

SEQ ID NO: 9052 - DNA, 22 bp, Homo Sapiens
caggggtagagcatttgactgc

SEQ ID NO: 9053 - DNA, 16 bp, Homo Sapiens
caggggtcgcgagttc

SEQ ID NO: 9054 - DNA, 17 bp, Homo Sapiens
caggggtcgcgagttca

SEQ ID NO: 9055 - DNA, 30 bp, Homo Sapiens
caggggtcgcgagttcaaatctcgctgggg

SEQ ID NO: 9056 - DNA, 31 bp, Homo Sapiens
caggggtcgcgagttcaaatctcgctggggc

SEQ ID NO: 9057 - DNA, 32 bp, Homo Sapiens
caggggtcgcgagttcaaatctcgctggggcc

SEQ ID NO: 9058 - DNA, 33 bp, Homo Sapiens
caggggtcgcgagttcaaatctcgctggggcct

SEQ ID NO: 9059 - DNA, 34 bp, Homo Sapiens
caggggtcgcgagttcaaatctcgctggggcctc

SEQ ID NO: 9060 - DNA, 35 bp, Homo Sapiens
caggggtcgcgagttcaaatctcgctggggcctcc

SEQ ID NO: 9061 - DNA, 31 bp, Homo Sapiens
caggggtcgcgagttcaattctcgctggggc

SEQ ID NO: 9062 - DNA, 32 bp, Homo Sapiens
caggggtcgcgagttcaattctcgctggggcc

SEQ ID NO: 9063 - DNA, 33 bp, Homo Sapiens
caggggtcgcgagttcaattctcgctggggcct

SEQ ID NO: 9064 - DNA, 34 bp, Homo Sapiens
caggggtcgcgagttcaattctcgctggggcctc

SEQ ID NO: 9065 - DNA, 35 bp, Homo Sapiens
caggggtcgcgagttcaattctcgctggggcctcc

SEQ ID NO: 9066 - DNA, 32 bp, Homo Sapiens
caggggtcgcgagttcgatcctcgctggggcc

SEQ ID NO: 9067 - DNA, 33 bp, Homo Sapiens
caggggtcgcgagttcgatcctcgctggggcct

SEQ ID NO: 9068 - DNA, 34 bp, Homo Sapiens
caggggtcgcgagttcgatcctcgctggggcctc

SEQ ID NO: 9069 - DNA, 35 bp, Homo Sapiens
caggggtcgcgagttcgatcctcgctggggcctcc

SEQ ID NO: 9070 - DNA, 16 bp, Homo Sapiens
caggggttagagcact

SEQ ID NO: 9071 - DNA, 17 bp, Homo Sapiens
caggggttagagcactg

SEQ ID NO: 9072 - DNA, 18 bp, Homo Sapiens
caggggttagagcactgg

SEQ ID NO: 9073 - DNA, 19 bp, Homo Sapiens
caggggttagagcactggt

SEQ ID NO: 9074 - DNA, 20 bp, Homo Sapiens
caggggttagagcactggtc

SEQ ID NO: 9075 - DNA, 21 bp, Homo Sapiens
caggggttagagcactggtct

SEQ ID NO: 9076 - DNA, 16 bp, Homo Sapiens
caggggttaggcctct

SEQ ID NO: 9077 - DNA, 23 bp, Homo Sapiens
caggggttaggcctctttttacc

SEQ ID NO: 9078 - DNA, 26 bp, Homo Sapiens
caggggttaggcctctttttaccacc

SEQ ID NO: 9079 - DNA, 27 bp, Homo Sapiens
caggggttaggcctctttttaccacca

SEQ ID NO: 9080 - DNA, 16 bp, Homo Sapiens
cagggtcgtgggttcg

SEQ ID NO: 9081 - DNA, 21 bp, Homo Sapiens
cagggtcgtgggttcgagccc

SEQ ID NO: 9082 - DNA, 28 bp, Homo Sapiens
cagggtcgtgggttcgagccccacgttg

SEQ ID NO: 9083 - DNA, 29 bp, Homo Sapiens
cagggtcgtgggttcgagccccacgttgg

SEQ ID NO: 9084 - DNA, 30 bp, Homo Sapiens
cagggtcgtgggttcgagccccacgttggg

SEQ ID NO: 9085 - DNA, 31 bp, Homo Sapiens
cagggtcgtgggttcgagccccacgttgggc

SEQ ID NO: 9086 - DNA, 32 bp, Homo Sapiens
cagggtcgtgggttcgagccccacgttgggcg

SEQ ID NO: 9087 - DNA, 33 bp, Homo Sapiens
cagggtcgtgggttcgagccccacgttgggcgc

SEQ ID NO: 9088 - DNA, 34 bp, Homo Sapiens
cagggtcgtgggttcgagccccacgttgggcgcc

SEQ ID NO: 9089 - DNA, 35 bp, Homo Sapiens
cagggtcgtgggttcgagccccacgttgggcgcca

SEQ ID NO: 9090 - DNA, 25 bp, Homo Sapiens
cagggttcaagtccctgttcgggcg

SEQ ID NO: 9091 - DNA, 26 bp, Homo Sapiens
cagggttcaagtccctgttcgggcgc

SEQ ID NO: 9092 - DNA, 27 bp, Homo Sapiens
cagggttcaagtccctgttcgggcgcc

SEQ ID NO: 9093 - DNA, 28 bp, Homo Sapiens
cagggttcaagtccctgttcgggcgcca

SEQ ID NO: 9094 - DNA, 16 bp, Homo Sapiens
caggtcgcagtctccc

SEQ ID NO: 9095 - DNA, 17 bp, Homo Sapiens
caggtcgcagtctcccc

SEQ ID NO: 9096 - DNA, 16 bp, Homo Sapiens
caggtggcccgggttc

SEQ ID NO: 9097 - DNA, 27 bp, Homo Sapiens
caggtggcccgggttcgactcccggta

SEQ ID NO: 9098 - DNA, 30 bp, Homo Sapiens
caggtggcccgggttcgactcccggtatgg

SEQ ID NO: 9099 - DNA, 31 bp, Homo Sapiens
caggtggcccgggttcgactcccggtatggg

SEQ ID NO: 9100 - DNA, 32 bp, Homo Sapiens
caggtggcccgggttcgactcccggtatggga

SEQ ID NO: 9101 - DNA, 33 bp, Homo Sapiens
caggtggcccgggttcgactcccggtatgggaa

SEQ ID NO: 9102 - DNA, 34 bp, Homo Sapiens
caggtggcccgggttcgactcccggtatgggaac

SEQ ID NO: 9103 - DNA, 35 bp, Homo Sapiens
caggtggcccgggttcgactcccggtatgggaacc

SEQ ID NO: 9104 - DNA, 36 bp, Homo Sapiens
caggtggcccgggttcgactcccggtatgggaacca

SEQ ID NO: 9105 - DNA, 26 bp, Homo Sapiens
caggttcgaaccctgctcgctgcgcc

SEQ ID NO: 9106 - DNA, 27 bp, Homo Sapiens
caggttcgaaccctgctcgctgcgcca

SEQ ID NO: 9107 - DNA, 27 bp, Homo Sapiens
caggttcgaatcctgccgactacgcca

SEQ ID NO: 9108 - DNA, 26 bp, Homo Sapiens
caggttcgaatcctgttcgtgacgcc

SEQ ID NO: 9109 - DNA, 27 bp, Homo Sapiens
caggttcgaatcctgttcgtgacgcca

SEQ ID NO: 9110 - DNA, 17 bp, Homo Sapiens
caggttcgactcctggc

SEQ ID NO: 9111 - DNA, 23 bp, Homo Sapiens
caggttcgactcctggctggctc

SEQ ID NO: 9112 - DNA, 24 bp, Homo Sapiens
caggttcgactcctggctggctcg

SEQ ID NO: 9113 - DNA, 26 bp, Homo Sapiens
caggttcgactcctggctggctcgcc

SEQ ID NO: 9114 - DNA, 27 bp, Homo Sapiens
caggttcgagtcctgccgcggtcgcca

SEQ ID NO: 9115 - DNA, 30 bp, Homo Sapiens
cagtaaggtcagctaaataagctatcgggc

SEQ ID NO: 9116 - DNA, 31 bp, Homo Sapiens
cagtaaggtcagctaaataagctatcgggcc

SEQ ID NO: 9117 - DNA, 32 bp, Homo Sapiens
cagtaaggtcagctaaataagctatcgggccc

SEQ ID NO: 9118 - DNA, 33 bp, Homo Sapiens
cagtaaggtcagctaaataagctatcgggccca

SEQ ID NO: 9119 - DNA, 16 bp, Homo Sapiens
cagtaagttgcaatac

SEQ ID NO: 9120 - DNA, 17 bp, Homo Sapiens
cagtaagttgcaatact

SEQ ID NO: 9121 - DNA, 18 bp, Homo Sapiens
cagtaagttgcaatactt

SEQ ID NO: 9122 - DNA, 19 bp, Homo Sapiens
cagtaagttgcaatactta

SEQ ID NO: 9123 - DNA, 24 bp, Homo Sapiens
cagtaagttgcaatacttaatttc

SEQ ID NO: 9124 - DNA, 25 bp, Homo Sapiens
cagtaagttgcaatacttaatttct

SEQ ID NO: 9125 - DNA, 26 bp, Homo Sapiens
cagtaagttgcaatacttaatttctg

SEQ ID NO: 9126 - DNA, 27 bp, Homo Sapiens
cagtaagttgcaatacttaatttctgc

SEQ ID NO: 9127 - DNA, 28 bp, Homo Sapiens
cagtaagttgcaatacttaatttctgcc

SEQ ID NO: 9128 - DNA, 29 bp, Homo Sapiens
cagtaagttgcaatacttaatttctgcca

SEQ ID NO: 9129 - DNA, 16 bp, Homo Sapiens
cagtagagcatcagac

SEQ ID NO: 9130 - DNA, 20 bp, Homo Sapiens
cagtaggtagcgcgtcagtc

SEQ ID NO: 9131 - DNA, 21 bp, Homo Sapiens
cagtaggtagcgcgtcagtct

SEQ ID NO: 9132 - DNA, 29 bp, Homo Sapiens
cagtaggtagcgcgtcagtctcataatct

SEQ ID NO: 9133 - DNA, 17 bp, Homo Sapiens
cagtcagaggttcaatt

SEQ ID NO: 9134 - DNA, 18 bp, Homo Sapiens
cagtcagaggttcaattc

SEQ ID NO: 9135 - DNA, 19 bp, Homo Sapiens
cagtcagaggttcaattcc

SEQ ID NO: 9136 - DNA, 21 bp, Homo Sapiens
cagtcagaggttcaattcctc

SEQ ID NO: 9137 - DNA, 22 bp, Homo Sapiens
cagtcagaggttcaattcctct

SEQ ID NO: 9138 - DNA, 24 bp, Homo Sapiens
cagtcagaggttcaattcctcttc

SEQ ID NO: 9139 - DNA, 31 bp, Homo Sapiens
cagtcagaggttcaattcctcttcttaacac

SEQ ID NO: 9140 - DNA, 32 bp, Homo Sapiens
cagtcagaggttcaattcctcttcttaacacc

SEQ ID NO: 9141 - DNA, 16 bp, Homo Sapiens
cagtcagtagagcatc

SEQ ID NO: 9142 - DNA, 17 bp, Homo Sapiens
cagtcagtagagcatca

SEQ ID NO: 9143 - DNA, 20 bp, Homo Sapiens
cagtcagtagagcatcagac

SEQ ID NO: 9144 - DNA, 21 bp, Homo Sapiens
cagtcagtagagcatcagact

SEQ ID NO: 9145 - DNA, 16 bp, Homo Sapiens
cagtcatttcgatggc

SEQ ID NO: 9146 - DNA, 22 bp, Homo Sapiens
cagtcatttcgatggcgtgggt

SEQ ID NO: 9147 - DNA, 38 bp, Homo Sapiens
cagtcatttcgatggcgtgggttcgaatcccaccgctg

SEQ ID NO: 9148 - DNA, 40 bp, Homo Sapiens
cagtcatttcgatggcgtgggttcgaatcccaccgctgcc

SEQ ID NO: 9149 - DNA, 41 bp, Homo Sapiens
cagtcatttcgatggcgtgggttcgaatcccaccgctgcca

SEQ ID NO: 9150 - DNA, 42 bp, Homo Sapiens
cagtcatttcgatggcgtgggttcgaatcccaccgctgccac

SEQ ID NO: 9151 - DNA, 43 bp, Homo Sapiens
cagtcatttcgatggcgtgggttcgaatcccaccgctgccacc

SEQ ID NO: 9152 - DNA, 44 bp, Homo Sapiens
cagtcatttcgatggcgtgggttcgaatcccaccgctgccacca

SEQ ID NO: 9153 - DNA, 20 bp, Homo Sapiens
cagtcgatagagcatgagac

SEQ ID NO: 9154 - DNA, 16 bp, Homo Sapiens
cagtcggtagagcata

SEQ ID NO: 9155 - DNA, 20 bp, Homo Sapiens
cagtcggtagagcataagac

SEQ ID NO: 9156 - DNA, 21 bp, Homo Sapiens
cagtcggtagagcataagact

SEQ ID NO: 9157 - DNA, 22 bp, Homo Sapiens
cagtcggtagagcataagactc

SEQ ID NO: 9158 - DNA, 16 bp, Homo Sapiens
cagtcggtagagcatc

SEQ ID NO: 9159 - DNA, 17 bp, Homo Sapiens
cagtcggtagagcatca

SEQ ID NO: 9160 - DNA, 18 bp, Homo Sapiens
cagtcggtagagcatcag

SEQ ID NO: 9161 - DNA, 19 bp, Homo Sapiens
cagtcggtagagcatcaga

SEQ ID NO: 9162 - DNA, 20 bp, Homo Sapiens
cagtcggtagagcatcagac

SEQ ID NO: 9163 - DNA, 21 bp, Homo Sapiens
cagtcggtagagcatcagact

SEQ ID NO: 9164 - DNA, 22 bp, Homo Sapiens
cagtcggtagagcatcagactt

SEQ ID NO: 9165 - DNA, 23 bp, Homo Sapiens
cagtcggtagagcatcagacttt

SEQ ID NO: 9166 - DNA, 24 bp, Homo Sapiens
cagtcggtagagcatcagactttt

SEQ ID NO: 9167 - DNA, 28 bp, Homo Sapiens
cagtcggtagagcatcagacttttaatc

SEQ ID NO: 9168 - DNA, 29 bp, Homo Sapiens
cagtcggtagagcatcagacttttaatct

SEQ ID NO: 9169 - DNA, 30 bp, Homo Sapiens
cagtcggtagagcatcagacttttaatctg

SEQ ID NO: 9170 - DNA, 16 bp, Homo Sapiens
cagtcggtagagcatg

SEQ ID NO: 9171 - DNA, 17 bp, Homo Sapiens
cagtcggtagagcatga

SEQ ID NO: 9172 - DNA, 18 bp, Homo Sapiens
cagtcggtagagcatgag

SEQ ID NO: 9173 - DNA, 19 bp, Homo Sapiens
cagtcggtagagcatgaga

SEQ ID NO: 9174 - DNA, 20 bp, Homo Sapiens
cagtcggtagagcatgagac

SEQ ID NO: 9175 - DNA, 21 bp, Homo Sapiens
cagtcggtagagcatgagacc

SEQ ID NO: 9176 - DNA, 22 bp, Homo Sapiens
cagtcggtagagcatgagaccc

SEQ ID NO: 9177 - DNA, 23 bp, Homo Sapiens
cagtcggtagagcatgagaccct

SEQ ID NO: 9178 - DNA, 24 bp, Homo Sapiens
cagtcggtagagcatgagaccctt

SEQ ID NO: 9179 - DNA, 26 bp, Homo Sapiens
cagtcggtagagcatgagacccttaa

SEQ ID NO: 9180 - DNA, 27 bp, Homo Sapiens
cagtcggtagagcatgagacccttaat

SEQ ID NO: 9181 - DNA, 28 bp, Homo Sapiens
cagtcggtagagcatgagacccttaatc

SEQ ID NO: 9182 - DNA, 30 bp, Homo Sapiens
cagtcggtagagcatgagacccttaatctc

SEQ ID NO: 9183 - DNA, 31 bp, Homo Sapiens
cagtcggtagagcatgagacccttaatctca

SEQ ID NO: 9184 - DNA, 21 bp, Homo Sapiens
cagtcggtagagcatgagact

SEQ ID NO: 9185 - DNA, 22 bp, Homo Sapiens
cagtcggtagagcatgagactc

SEQ ID NO: 9186 - DNA, 23 bp, Homo Sapiens
cagtcggtagagcatgagactct

SEQ ID NO: 9187 - DNA, 24 bp, Homo Sapiens
cagtcggtagagcatgagactctt

SEQ ID NO: 9188 - DNA, 25 bp, Homo Sapiens
cagtcggtagagcatgagactctta

SEQ ID NO: 9189 - DNA, 26 bp, Homo Sapiens
cagtcggtagagcatgagactcttaa

SEQ ID NO: 9190 - DNA, 27 bp, Homo Sapiens
cagtcggtagagcatgagactcttaat

SEQ ID NO: 9191 - DNA, 28 bp, Homo Sapiens
cagtcggtagagcatgagactcttaatc

SEQ ID NO: 9192 - DNA, 29 bp, Homo Sapiens
cagtcggtagagcatgagactcttaatct

SEQ ID NO: 9193 - DNA, 30 bp, Homo Sapiens
cagtcggtagagcatgagactcttaatctc

SEQ ID NO: 9194 - DNA, 31 bp, Homo Sapiens
cagtcggtagagcatgagactcttaatctca

SEQ ID NO: 9195 - DNA, 37 bp, Homo Sapiens
cagtcggtagagcatgagactcttaatctcagggtcg

SEQ ID NO: 9196 - DNA, 38 bp, Homo Sapiens
cagtcggtagagcatgagactcttaatctcagggtcgt

SEQ ID NO: 9197 - DNA, 39 bp, Homo Sapiens
cagtcggtagagcatgagactcttaatctcagggtcgtg

SEQ ID NO: 9198 - DNA, 40 bp, Homo Sapiens
cagtcggtagagcatgagactcttaatctcagggtcgtgg

SEQ ID NO: 9199 - DNA, 41 bp, Homo Sapiens
cagtcggtagagcatgagactcttaatctcagggtcgtggg

SEQ ID NO: 9200 - DNA, 42 bp, Homo Sapiens
cagtcggtagagcatgagactcttaatctcagggtcgtgggt

SEQ ID NO: 9201 - DNA, 43 bp, Homo Sapiens
cagtcggtagagcatgagactcttaatctcagggtcgtgggtt

SEQ ID NO: 9202 - DNA, 44 bp, Homo Sapiens
cagtcggtagagcatgagactcttaatctcagggtcgtgggttc

SEQ ID NO: 9203 - DNA, 45 bp, Homo Sapiens
cagtcggtagagcatgagactcttaatctcagggtcgtgggttcg

SEQ ID NO: 9204 - DNA, 17 bp, Homo Sapiens
cagtcggtagagcatgg

SEQ ID NO: 9205 - DNA, 18 bp, Homo Sapiens
cagtcggtagagcatggg

SEQ ID NO: 9206 - DNA, 19 bp, Homo Sapiens
cagtcggtagagcatggga

SEQ ID NO: 9207 - DNA, 20 bp, Homo Sapiens
cagtcggtagagcatgggac

SEQ ID NO: 9208 - DNA, 21 bp, Homo Sapiens
cagtcggtagagcatgggact

SEQ ID NO: 9209 - DNA, 22 bp, Homo Sapiens
cagtcggtagagcatgggactc

SEQ ID NO: 9210 - DNA, 23 bp, Homo Sapiens
cagtcggtagagcatgggactct

SEQ ID NO: 9211 - DNA, 24 bp, Homo Sapiens
cagtcggtagagcatgggactctt

SEQ ID NO: 9212 - DNA, 25 bp, Homo Sapiens
cagtcggtagagcatgggactctta

SEQ ID NO: 9213 - DNA, 26 bp, Homo Sapiens
cagtcggtagagcatgggactcttaa

SEQ ID NO: 9214 - DNA, 27 bp, Homo Sapiens
cagtcggtagagcatgggactcttaat

SEQ ID NO: 9215 - DNA, 28 bp, Homo Sapiens
cagtcggtagagcatgggactcttaatc

SEQ ID NO: 9216 - DNA, 29 bp, Homo Sapiens
cagtcggtagagcatgggactcttaatcc

SEQ ID NO: 9217 - DNA, 30 bp, Homo Sapiens
cagtcggtagagcatgggactcttaatccc

SEQ ID NO: 9218 - DNA, 31 bp, Homo Sapiens
cagtcggtagagcatgggactcttaatccca

SEQ ID NO: 9219 - DNA, 37 bp, Homo Sapiens
cagtcggtagagcatgggactcttaatcccagggtcg

SEQ ID NO: 9220 - DNA, 38 bp, Homo Sapiens
cagtcggtagagcatgggactcttaatcccagggtcgt

SEQ ID NO: 9221 - DNA, 39 bp, Homo Sapiens
cagtcggtagagcatgggactcttaatcccagggtcgtg

SEQ ID NO: 9222 - DNA, 40 bp, Homo Sapiens
cagtcggtagagcatgggactcttaatcccagggtcgtgg

SEQ ID NO: 9223 - DNA, 41 bp, Homo Sapiens
cagtcggtagagcatgggactcttaatcccagggtcgtggg

SEQ ID NO: 9224 - DNA, 42 bp, Homo Sapiens
cagtcggtagagcatgggactcttaatcccagggtcgtgggt

SEQ ID NO: 9225 - DNA, 43 bp, Homo Sapiens
cagtcggtagagcatgggactcttaatcccagggtcgtgggtt

SEQ ID NO: 9226 - DNA, 45 bp, Homo Sapiens
cagtcggtagagcatgggactcttaatcccagggtcgtgggttcg

SEQ ID NO: 9227 - DNA, 29 bp, Homo Sapiens
cagtcggtagagcatgggactcttaatct

SEQ ID NO: 9228 - DNA, 30 bp, Homo Sapiens
cagtcggtagagcatgggactcttaatctc

SEQ ID NO: 9229 - DNA, 31 bp, Homo Sapiens
cagtcggtagagcatgggactcttaatctca

SEQ ID NO: 9230 - DNA, 38 bp, Homo Sapiens
cagtcggtagagcatgggactcttaatctcagggtcgt

SEQ ID NO: 9231 - DNA, 40 bp, Homo Sapiens
cagtcggtagagcatgggactcttaatctcagggtcgtgg

SEQ ID NO: 9232 - DNA, 16 bp, Homo Sapiens
cagtcggtggagcatg

SEQ ID NO: 9233 - DNA, 17 bp, Homo Sapiens
cagtcggtggagcatgg

SEQ ID NO: 9234 - DNA, 19 bp, Homo Sapiens
cagtcggtggagcatggga

SEQ ID NO: 9235 - DNA, 20 bp, Homo Sapiens
cagtcggtggagcatgggac

SEQ ID NO: 9236 - DNA, 21 bp, Homo Sapiens
cagtcggtggagcatgggact

SEQ ID NO: 9237 - DNA, 17 bp, Homo Sapiens
cagtctcataatctgaa

SEQ ID NO: 9238 - DNA, 23 bp, Homo Sapiens
cagtctcataatctgaaggtcct

SEQ ID NO: 9239 - DNA, 24 bp, Homo Sapiens
cagtctcataatctgaaggtcctg

SEQ ID NO: 9240 - DNA, 27 bp, Homo Sapiens
cagtctcataatctgaaggtcctgagt

SEQ ID NO: 9241 - DNA, 24 bp, Homo Sapiens
cagtctcataatctgaaggtcgtg

SEQ ID NO: 9242 - DNA, 27 bp, Homo Sapiens
cagtctcataatctgaaggtcgtgagt

SEQ ID NO: 9243 - DNA, 16 bp, Homo Sapiens
cagtctcccctggagg

SEQ ID NO: 9244 - DNA, 25 bp, Homo Sapiens
cagtctcccctggaggcgtgggttc

SEQ ID NO: 9245 - DNA, 44 bp, Homo Sapiens
cagtctcccctggaggcgtgggttcgaatcccactcctgacacc

SEQ ID NO: 9246 - DNA, 44 bp, Homo Sapiens
cagtctcccctggaggcgtgggttcgaatcccacttctgacacc

SEQ ID NO: 9247 - DNA, 16 bp, Homo Sapiens
cagtctcttcggaggc

SEQ ID NO: 9248 - DNA, 22 bp, Homo Sapiens
cagtctcttcggaggcgtgggt

SEQ ID NO: 9249 - DNA, 40 bp, Homo Sapiens
cagtctcttcggaggcgtgggttcgaatcccaccgctgcc

SEQ ID NO: 9250 - DNA, 43 bp, Homo Sapiens
cagtctcttcggaggcgtgggttcgaatcccaccgctgccacc

SEQ ID NO: 9251 - DNA, 44 bp, Homo Sapiens
cagtctcttcggaggcgtgggttcgaatcccaccgctgccacca

SEQ ID NO: 9252 - DNA, 16 bp, Homo Sapiens
cagtctcttcgggggc

SEQ ID NO: 9253 - DNA, 22 bp, Homo Sapiens
cagtctcttcgggggcgtgggt

SEQ ID NO: 9254 - DNA, 23 bp, Homo Sapiens
cagtctcttcgggggcgtgggtt

SEQ ID NO: 9255 - DNA, 24 bp, Homo Sapiens
cagtctcttcgggggcgtgggttc

SEQ ID NO: 9256 - DNA, 25 bp, Homo Sapiens
cagtctcttcgggggcgtgggttcg

SEQ ID NO: 9257 - DNA, 39 bp, Homo Sapiens
cagtctcttcgggggcgtgggttcgaatcccaccgctgc

SEQ ID NO: 9258 - DNA, 40 bp, Homo Sapiens
cagtctcttcgggggcgtgggttcgaatcccaccgctgcc

SEQ ID NO: 9259 - DNA, 41 bp, Homo Sapiens
cagtctcttcgggggcgtgggttcgaatcccaccgctgcca

SEQ ID NO: 9260 - DNA, 42 bp, Homo Sapiens
cagtctcttcgggggcgtgggttcgaatcccaccgctgccac

SEQ ID NO: 9261 - DNA, 43 bp, Homo Sapiens
cagtctcttcgggggcgtgggttcgaatcccaccgctgccacc

SEQ ID NO: 9262 - DNA, 44 bp, Homo Sapiens
cagtctcttcgggggcgtgggttcgaatcccaccgctgccacca

SEQ ID NO: 9263 - DNA, 26 bp, Homo Sapiens
cagtcttgtaaaccggagatgaaaac

SEQ ID NO: 9264 - DNA, 27 bp, Homo Sapiens
cagtcttgtaaaccggagatgaaaacc

SEQ ID NO: 9265 - DNA, 28 bp, Homo Sapiens
cagtcttgtaaaccggagatgaaaacct

SEQ ID NO: 9266 - DNA, 44 bp, Homo Sapiens
cagtcttgtaaaccggagatgaaaacctttttccaaggacacca

SEQ ID NO: 9267 - DNA, 16 bp, Homo Sapiens
cagtggcctaatggat

SEQ ID NO: 9268 - DNA, 27 bp, Homo Sapiens
cagtggcctaatggataaggcatcagc

SEQ ID NO: 9269 - DNA, 30 bp, Homo Sapiens
cagtggcctaatggataaggcatcagcctc

SEQ ID NO: 9270 - DNA, 31 bp, Homo Sapiens
cagtggcctaatggataaggcatcagcctcc

SEQ ID NO: 9271 - DNA, 32 bp, Homo Sapiens
cagtggcctaatggataaggcatcagcctccg

SEQ ID NO: 9272 - DNA, 25 bp, Homo Sapiens
cagtggcctaatggataaggcattg

SEQ ID NO: 9273 - DNA, 24 bp, Homo Sapiens
cagtggcgcaatcggttagcgcgc

SEQ ID NO: 9274 - DNA, 19 bp, Homo Sapiens
cagtggcgcaatggataac

SEQ ID NO: 9275 - DNA, 16 bp, Homo Sapiens
cagtgggtagagcatc

SEQ ID NO: 9276 - DNA, 17 bp, Homo Sapiens
cagtgggtagagcatca

SEQ ID NO: 9277 - DNA, 20 bp, Homo Sapiens
cagtgggtagagcatcagac

SEQ ID NO: 9278 - DNA, 16 bp, Homo Sapiens
cagtgggtagagcatt

SEQ ID NO: 9279 - DNA, 16 bp, Homo Sapiens
cagtggtagaattctc

SEQ ID NO: 9280 - DNA, 17 bp, Homo Sapiens
cagtggtagaattctcg

SEQ ID NO: 9281 - DNA, 18 bp, Homo Sapiens
cagtggtagaattctcgc

SEQ ID NO: 9282 - DNA, 19 bp, Homo Sapiens
cagtggtagaattctcgcc

SEQ ID NO: 9283 - DNA, 20 bp, Homo Sapiens
cagtggtagaattctcgcct

SEQ ID NO: 9284 - DNA, 21 bp, Homo Sapiens
cagtggtagaattctcgcctc

SEQ ID NO: 9285 - DNA, 23 bp, Homo Sapiens
cagtggtagaattctcgcctccc

SEQ ID NO: 9286 - DNA, 24 bp, Homo Sapiens
cagtggtagaattctcgcctccca

SEQ ID NO: 9287 - DNA, 21 bp, Homo Sapiens
cagtggtagaattctcgcctg

SEQ ID NO: 9288 - DNA, 22 bp, Homo Sapiens
cagtggtagaattctcgcctgc

SEQ ID NO: 9289 - DNA, 23 bp, Homo Sapiens
cagtggtagaattctcgcctgcc

SEQ ID NO: 9290 - DNA, 24 bp, Homo Sapiens
cagtggtagaattctcgcctgcca

SEQ ID NO: 9291 - DNA, 25 bp, Homo Sapiens
cagtggtagaattctcgcctgccac

SEQ ID NO: 9292 - DNA, 26 bp, Homo Sapiens
cagtggtagaattctcgcctgccacg

SEQ ID NO: 9293 - DNA, 27 bp, Homo Sapiens
cagtggtagaattctcgcctgccacgc

SEQ ID NO: 9294 - DNA, 28 bp, Homo Sapiens
cagtggtagaattctcgcctgccacgcg

SEQ ID NO: 9295 - DNA, 31 bp, Homo Sapiens
cagtggtagaattctcgcctgccacgcggga

SEQ ID NO: 9296 - DNA, 32 bp, Homo Sapiens
cagtggtagaattctcgcctgccacgcgggag

SEQ ID NO: 9297 - DNA, 34 bp, Homo Sapiens
cagtggtagaattctcgcctgccacgcgggaggc

SEQ ID NO: 9298 - DNA, 35 bp, Homo Sapiens
cagtggtagaattctcgcctgccacgcgggaggcc

SEQ ID NO: 9299 - DNA, 36 bp, Homo Sapiens
cagtggtagaattctcgcctgccacgcgggaggccc

SEQ ID NO: 9300 - DNA, 38 bp, Homo Sapiens
cagtggtagaattctcgcctgccacgcgggaggcccgg

SEQ ID NO: 9301 - DNA, 39 bp, Homo Sapiens
cagtggtagaattctcgcctgccacgcgggaggcccggg

SEQ ID NO: 9302 - DNA, 40 bp, Homo Sapiens
cagtggtagaattctcgcctgccacgcgggaggcccgggt

SEQ ID NO: 9303 - DNA, 42 bp, Homo Sapiens
cagtggtagaattctcgcctgccacgcgggaggcccgggttc

SEQ ID NO: 9304 - DNA, 20 bp, Homo Sapiens
cagtggtagaattcttgcct

SEQ ID NO: 9305 - DNA, 16 bp, Homo Sapiens
cagtggtagagcattt

SEQ ID NO: 9306 - DNA, 17 bp, Homo Sapiens
cagtggtagagcatttg

SEQ ID NO: 9307 - DNA, 18 bp, Homo Sapiens
cagtggtagagcatttga

SEQ ID NO: 9308 - DNA, 19 bp, Homo Sapiens
cagtggtagagcatttgac

SEQ ID NO: 9309 - DNA, 20 bp, Homo Sapiens
cagtggtagagcatttgact

SEQ ID NO: 9310 - DNA, 21 bp, Homo Sapiens
cagtggtagagcatttgactg

SEQ ID NO: 9311 - DNA, 22 bp, Homo Sapiens
cagtggtagagcatttgactgc

SEQ ID NO: 9312 - DNA, 23 bp, Homo Sapiens
cagtggtagagcatttgactgca

SEQ ID NO: 9313 - DNA, 30 bp, Homo Sapiens
cagtggtagagcatttgactgcagatcaag

SEQ ID NO: 9314 - DNA, 16 bp, Homo Sapiens
cagtggtagagcgcat

SEQ ID NO: 9315 - DNA, 18 bp, Homo Sapiens
cagtggtagagcgcatgc

SEQ ID NO: 9316 - DNA, 19 bp, Homo Sapiens
cagtggtagagcgcatgct

SEQ ID NO: 9317 - DNA, 20 bp, Homo Sapiens
cagtggtagagcgcatgctt

SEQ ID NO: 9318 - DNA, 42 bp, Homo Sapiens
cagtggtagagcgcatgctttgcatgtatgaggccccgggtt

SEQ ID NO: 9319 - DNA, 19 bp, Homo Sapiens
cagtggtagagcgcgtgct

SEQ ID NO: 9320 - DNA, 42 bp, Homo Sapiens
cagtggtagagcgcgtgcttcgcatgtacgaggccccgggtt

SEQ ID NO: 9321 - DNA, 16 bp, Homo Sapiens
cagttgacccgggttc

SEQ ID NO: 9322 - DNA, 17 bp, Homo Sapiens
cagttgacccgggttcg

SEQ ID NO: 9323 - DNA, 24 bp, Homo Sapiens
cagttgacccgggttcgattcccg

SEQ ID NO: 9324 - DNA, 26 bp, Homo Sapiens
cagttgacccgggttcgattcccggc

SEQ ID NO: 9325 - DNA, 27 bp, Homo Sapiens
cagttgacccgggttcgattcccggcc

SEQ ID NO: 9326 - DNA, 28 bp, Homo Sapiens
cagttgacccgggttcgattcccggcca

SEQ ID NO: 9327 - DNA, 29 bp, Homo Sapiens
cagttgacccgggttcgattcccggccaa

SEQ ID NO: 9328 - DNA, 30 bp, Homo Sapiens
cagttgacccgggttcgattcccggccaac

SEQ ID NO: 9329 - DNA, 31 bp, Homo Sapiens
cagttgacccgggttcgattcccggccaacg

SEQ ID NO: 9330 - DNA, 35 bp, Homo Sapiens
cagttgacccgggttcgattcccggccaacgcacc

SEQ ID NO: 9331 - DNA, 16 bp, Homo Sapiens
cagttgatgcagagtg

SEQ ID NO: 9332 - DNA, 17 bp, Homo Sapiens
cagttgatgcagagtgg

SEQ ID NO: 9333 - DNA, 18 bp, Homo Sapiens
cagttgatgcagagtggg

SEQ ID NO: 9334 - DNA, 21 bp, Homo Sapiens
cagttgatgcagagtggggtt

SEQ ID NO: 9335 - DNA, 23 bp, Homo Sapiens
cagttgatgcagagtggggtttt

SEQ ID NO: 9336 - DNA, 25 bp, Homo Sapiens
cagttgatgcagagtggggttttgc

SEQ ID NO: 9337 - DNA, 26 bp, Homo Sapiens
cagttgatgcagagtggggttttgca

SEQ ID NO: 9338 - DNA, 29 bp, Homo Sapiens
cagttgatgcagagtggggttttgcagtc

SEQ ID NO: 9339 - DNA, 30 bp, Homo Sapiens
cagttgatgcagagtggggttttgcagtcc

SEQ ID NO: 9340 - DNA, 31 bp, Homo Sapiens
cagttgatgcagagtggggttttgcagtcct

SEQ ID NO: 9341 - DNA, 32 bp, Homo Sapiens
cagttgatgcagagtggggttttgcagtcctt

SEQ ID NO: 9342 - DNA, 33 bp, Homo Sapiens
cagttgatgcagagtggggttttgcagtcctta

SEQ ID NO: 9343 - DNA, 34 bp, Homo Sapiens
cagttgatgcagagtggggttttgcagtccttac

SEQ ID NO: 9344 - DNA, 35 bp, Homo Sapiens
cagttgatgcagagtggggttttgcagtccttacc

SEQ ID NO: 9345 - DNA, 36 bp, Homo Sapiens
cagttgatgcagagtggggttttgcagtccttacca

SEQ ID NO: 9346 - DNA, 19 bp, Homo Sapiens
cagttgattagggtgctta

SEQ ID NO: 9347 - DNA, 21 bp, Homo Sapiens
cagttgattagggtgcttagc

SEQ ID NO: 9348 - DNA, 24 bp, Homo Sapiens
cagttgattagggtgcttagctgt

SEQ ID NO: 9349 - DNA, 25 bp, Homo Sapiens
cagttgattagggtgcttagctgtt

SEQ ID NO: 9350 - DNA, 27 bp, Homo Sapiens
cagttgattagggtgcttagctgttaa

SEQ ID NO: 9351 - DNA, 28 bp, Homo Sapiens
cagttgattagggtgcttagctgttaac

SEQ ID NO: 9352 - DNA, 36 bp, Homo Sapiens
cagttgattagggtgcttagctgttaactaagtgtt

SEQ ID NO: 9353 - DNA, 43 bp, Homo Sapiens
cagttgattagggtgcttagctgttaactaagtgtttgtgggt

SEQ ID NO: 9354 - DNA, 44 bp, Homo Sapiens
cagttgattagggtgcttagctgttaactaagtgtttgtgggtt

SEQ ID NO: 9355 - DNA, 45 bp, Homo Sapiens
cagttgattagggtgcttagctgttaactaagtgtttgtgggttt

SEQ ID NO: 9356 - DNA, 16 bp, Homo Sapiens
cagttggtagagcatc

SEQ ID NO: 9357 - DNA, 17 bp, Homo Sapiens
cagttggtagagcatca

SEQ ID NO: 9358 - DNA, 19 bp, Homo Sapiens
cagttggtagagcatcaga

SEQ ID NO: 9359 - DNA, 20 bp, Homo Sapiens
cagttggtagagcatcagac

SEQ ID NO: 9360 - DNA, 21 bp, Homo Sapiens
cagttggtagagcatcagact

SEQ ID NO: 9361 - DNA, 20 bp, Homo Sapiens
cagttggtagagcatgggac

SEQ ID NO: 9362 - DNA, 22 bp, Homo Sapiens
cagttggtagagcggaggactg

SEQ ID NO: 9363 - DNA, 24 bp, Homo Sapiens
cagttggtagagcggaggactgta

SEQ ID NO: 9364 - DNA, 21 bp, Homo Sapiens
cagttggttagagcgtggtgc

SEQ ID NO: 9365 - DNA, 16 bp, Homo Sapiens
cataaaacttaaaact

SEQ ID NO: 9366 - DNA, 17 bp, Homo Sapiens
cataaaacttaaaactt

SEQ ID NO: 9367 - DNA, 18 bp, Homo Sapiens
cataaaacttaaaacttt

SEQ ID NO: 9368 - DNA, 19 bp, Homo Sapiens
cataaaacttaaaacttta

SEQ ID NO: 9369 - DNA, 24 bp, Homo Sapiens
cataaaacttaaaactttacagtc

SEQ ID NO: 9370 - DNA, 26 bp, Homo Sapiens
cataaaacttaaaactttacagtcag

SEQ ID NO: 9371 - DNA, 27 bp, Homo Sapiens
cataaaacttaaaactttacagtcaga

SEQ ID NO: 9372 - DNA, 28 bp, Homo Sapiens
cataaaacttaaaactttacagtcagag

SEQ ID NO: 9373 - DNA, 29 bp, Homo Sapiens
cataaaacttaaaactttacagtcagagg

SEQ ID NO: 9374 - DNA, 30 bp, Homo Sapiens
cataaaacttaaaactttacagtcagaggt

SEQ ID NO: 9375 - DNA, 31 bp, Homo Sapiens
cataaaacttaaaactttacagtcagaggtt

SEQ ID NO: 9376 - DNA, 32 bp, Homo Sapiens
cataaaacttaaaactttacagtcagaggttc

SEQ ID NO: 9377 - DNA, 33 bp, Homo Sapiens
cataaaacttaaaactttacagtcagaggttca

SEQ ID NO: 9378 - DNA, 43 bp, Homo Sapiens
cataaaacttaaaactttacagtcagaggttcaattcctcttc

SEQ ID NO: 9379 - DNA, 17 bp, Homo Sapiens
cataacccagaggtcga

SEQ ID NO: 9380 - DNA, 18 bp, Homo Sapiens
cataacccagaggtcgat

SEQ ID NO: 9381 - DNA, 19 bp, Homo Sapiens
cataacccagaggtcgatg

SEQ ID NO: 9382 - DNA, 22 bp, Homo Sapiens
cataacccagaggtcgatggat

SEQ ID NO: 9383 - DNA, 23 bp, Homo Sapiens
cataacccagaggtcgatggatc

SEQ ID NO: 9384 - DNA, 24 bp, Homo Sapiens
cataacccagaggtcgatggatcg

SEQ ID NO: 9385 - DNA, 25 bp, Homo Sapiens
cataacccagaggtcgatggatcga

SEQ ID NO: 9386 - DNA, 26 bp, Homo Sapiens
cataacccagaggtcgatggatcgaa

SEQ ID NO: 9387 - DNA, 29 bp, Homo Sapiens
cataacccagaggtcgatggatcgaaacc

SEQ ID NO: 9388 - DNA, 35 bp, Homo Sapiens
cataacccagaggtcgatggatcgaaaccatcctc

SEQ ID NO: 9389 - DNA, 36 bp, Homo Sapiens
cataacccagaggtcgatggatcgaaaccatcctct

SEQ ID NO: 9390 - DNA, 16 bp, Homo Sapiens
cataactttgtcaaag

SEQ ID NO: 9391 - DNA, 17 bp, Homo Sapiens
cataactttgtcaaagt

SEQ ID NO: 9392 - DNA, 19 bp, Homo Sapiens
cataactttgtcaaagtta

SEQ ID NO: 9393 - DNA, 29 bp, Homo Sapiens
cataactttgtcaaagttaaattataggc

SEQ ID NO: 9394 - DNA, 30 bp, Homo Sapiens
cataactttgtcaaagttaaattataggct

SEQ ID NO: 9395 - DNA, 31 bp, Homo Sapiens
cataactttgtcaaagttaaattataggcta

SEQ ID NO: 9396 - DNA, 32 bp, Homo Sapiens
cataactttgtcaaagttaaattataggctaa

SEQ ID NO: 9397 - DNA, 33 bp, Homo Sapiens
cataactttgtcaaagttaaattataggctaaa

SEQ ID NO: 9398 - DNA, 17 bp, Homo Sapiens
cataatctgaaagtcct

SEQ ID NO: 9399 - DNA, 16 bp, Homo Sapiens
cataatctgaaggtcc

SEQ ID NO: 9400 - DNA, 17 bp, Homo Sapiens
cataatctgaaggtcct

SEQ ID NO: 9401 - DNA, 18 bp, Homo Sapiens
cataatctgaaggtcctg

SEQ ID NO: 9402 - DNA, 19 bp, Homo Sapiens
cataatctgaaggtcctga

SEQ ID NO: 9403 - DNA, 20 bp, Homo Sapiens
cataatctgaaggtcctgag

SEQ ID NO: 9404 - DNA, 21 bp, Homo Sapiens
cataatctgaaggtcctgagt

SEQ ID NO: 9405 - DNA, 22 bp, Homo Sapiens
cataatctgaaggtcctgagtt

SEQ ID NO: 9406 - DNA, 23 bp, Homo Sapiens
cataatctgaaggtcctgagttc

SEQ ID NO: 9407 - DNA, 24 bp, Homo Sapiens
cataatctgaaggtcctgagttcg

SEQ ID NO: 9408 - DNA, 30 bp, Homo Sapiens
cataatctgaaggtcctgagttcgaacctc

SEQ ID NO: 9409 - DNA, 31 bp, Homo Sapiens
cataatctgaaggtcctgagttcgaacctca

SEQ ID NO: 9410 - DNA, 36 bp, Homo Sapiens
cataatctgaaggtcctgagttcgaacctcagaggg

SEQ ID NO: 9411 - DNA, 37 bp, Homo Sapiens
cataatctgaaggtcctgagttcgaacctcagagggg

SEQ ID NO: 9412 - DNA, 38 bp, Homo Sapiens
cataatctgaaggtcctgagttcgaacctcagaggggg

SEQ ID NO: 9413 - DNA, 40 bp, Homo Sapiens
cataatctgaaggtcctgagttcgaacctcagagggggca

SEQ ID NO: 9414 - DNA, 41 bp, Homo Sapiens
cataatctgaaggtcctgagttcgaacctcagagggggcac

SEQ ID NO: 9415 - DNA, 42 bp, Homo Sapiens
cataatctgaaggtcctgagttcgaacctcagagggggcacc

SEQ ID NO: 9416 - DNA, 43 bp, Homo Sapiens
cataatctgaaggtcctgagttcgaacctcagagggggcacca

SEQ ID NO: 9417 - DNA, 28 bp, Homo Sapiens
cataatctgaaggtcctgagttcgagcc

SEQ ID NO: 9418 - DNA, 16 bp, Homo Sapiens
cataatctgaaggtcg

SEQ ID NO: 9419 - DNA, 18 bp, Homo Sapiens
cataatctgaaggtcgtg

SEQ ID NO: 9420 - DNA, 19 bp, Homo Sapiens
cataatctgaaggtcgtga

SEQ ID NO: 9421 - DNA, 20 bp, Homo Sapiens
cataatctgaaggtcgtgag

SEQ ID NO: 9422 - DNA, 21 bp, Homo Sapiens
cataatctgaaggtcgtgagt

SEQ ID NO: 9423 - DNA, 22 bp, Homo Sapiens
cataatctgaaggtcgtgagtt

SEQ ID NO: 9424 - DNA, 23 bp, Homo Sapiens
cataatctgaaggtcgtgagttc

SEQ ID NO: 9425 - DNA, 24 bp, Homo Sapiens
cataatctgaaggtcgtgagttcg

SEQ ID NO: 9426 - DNA, 29 bp, Homo Sapiens
cataatctgaaggtcgtgagttcgagcct

SEQ ID NO: 9427 - DNA, 35 bp, Homo Sapiens
cataatctgaaggtcgtgagttcgagcctcacacg

SEQ ID NO: 9428 - DNA, 37 bp, Homo Sapiens
cataatctgaaggtcgtgagttcgagcctcacacggg

SEQ ID NO: 9429 - DNA, 40 bp, Homo Sapiens
cataatctgaaggtcgtgagttcgagcctcacacggggca

SEQ ID NO: 9430 - DNA, 41 bp, Homo Sapiens
cataatctgaaggtcgtgagttcgagcctcacacggggcac

SEQ ID NO: 9431 - DNA, 42 bp, Homo Sapiens
cataatctgaaggtcgtgagttcgagcctcacacggggcacc

SEQ ID NO: 9432 - DNA, 43 bp, Homo Sapiens
cataatctgaaggtcgtgagttcgagcctcacacggggcacca

SEQ ID NO: 9433 - DNA, 37 bp, Homo Sapiens
cataatctgaaggtcgtgagttcgatcctcacacggg

SEQ ID NO: 9434 - DNA, 41 bp, Homo Sapiens
cataatctgaaggtcgtgagttcgatcctcacacggggcac

SEQ ID NO: 9435 - DNA, 42 bp, Homo Sapiens
cataatctgaaggtcgtgagttcgatcctcacacggggcacc

SEQ ID NO: 9436 - DNA, 43 bp, Homo Sapiens
cataatctgaaggtcgtgagttcgatcctcacacggggcacca

SEQ ID NO: 9437 - DNA, 22 bp, Homo Sapiens
cataccccgaaaatgttggtta

SEQ ID NO: 9438 - DNA, 23 bp, Homo Sapiens
cataccccgaaaatgttggttat

SEQ ID NO: 9439 - DNA, 35 bp, Homo Sapiens
cataccccgaaaatgttggttatacccttcccgta

SEQ ID NO: 9440 - DNA, 37 bp, Homo Sapiens
cataccccgaaaatgttggttatacccttcccgtact

SEQ ID NO: 9441 - DNA, 38 bp, Homo Sapiens
cataccccgaaaatgttggttatacccttcccgtacta

SEQ ID NO: 9442 - DNA, 40 bp, Homo Sapiens
cataccccgaaaatgttggttatacccttcccgtactacc

SEQ ID NO: 9443 - DNA, 41 bp, Homo Sapiens
cataccccgaaaatgttggttatacccttcccgtactacca

SEQ ID NO: 9444 - DNA, 28 bp, Homo Sapiens
catagctcaggggttagagcactggtct

SEQ ID NO: 9445 - DNA, 23 bp, Homo Sapiens
catagctgccttccaagcagttg

SEQ ID NO: 9446 - DNA, 29 bp, Homo Sapiens
catagctgccttccaagcagttgacccgg

SEQ ID NO: 9447 - DNA, 31 bp, Homo Sapiens
catagctgccttccaagcagttgacccgggt

SEQ ID NO: 9448 - DNA, 25 bp, Homo Sapiens
catagtgtagcggttatcacgtctg

SEQ ID NO: 9449 - DNA, 28 bp, Homo Sapiens
catagtgtagcggttatcacgtctgctt

SEQ ID NO: 9450 - DNA, 18 bp, Homo Sapiens
catagtgtagtggttatc

SEQ ID NO: 9451 - DNA, 27 bp, Homo Sapiens
catagtgtagtggttatcacgtctgct

SEQ ID NO: 9452 - DNA, 28 bp, Homo Sapiens
catagtgtagtggttatcacgtctgctt

SEQ ID NO: 9453 - DNA, 29 bp, Homo Sapiens
catagtgtagtggttatcacgtctgcttt

SEQ ID NO: 9454 - DNA, 30 bp, Homo Sapiens
catagtgtagtggttatcacgtctgcttta

SEQ ID NO: 9455 - DNA, 31 bp, Homo Sapiens
catagtgtagtggttatcacgtctgctttac

SEQ ID NO: 9456 - DNA, 19 bp, Homo Sapiens
catatcattggtcgtggtt

SEQ ID NO: 9457 - DNA, 20 bp, Homo Sapiens
catatcattggtcgtggttg

SEQ ID NO: 9458 - DNA, 21 bp, Homo Sapiens
catatcattggtcgtggttgt

SEQ ID NO: 9459 - DNA, 22 bp, Homo Sapiens
catatcattggtcgtggttgta

SEQ ID NO: 9460 - DNA, 24 bp, Homo Sapiens
catatcattggtcgtggttgtagt

SEQ ID NO: 9461 - DNA, 25 bp, Homo Sapiens
catatcattggtcgtggttgtagtc

SEQ ID NO: 9462 - DNA, 26 bp, Homo Sapiens
catatcattggtcgtggttgtagtcc

SEQ ID NO: 9463 - DNA, 27 bp, Homo Sapiens
catatcattggtcgtggttgtagtccg

SEQ ID NO: 9464 - DNA, 28 bp, Homo Sapiens
catatcattggtcgtggttgtagtccgt

SEQ ID NO: 9465 - DNA, 29 bp, Homo Sapiens
catatcattggtcgtggttgtagtccgtg

SEQ ID NO: 9466 - DNA, 30 bp, Homo Sapiens
catatcattggtcgtggttgtagtccgtgc

SEQ ID NO: 9467 - DNA, 31 bp, Homo Sapiens
catatcattggtcgtggttgtagtccgtgcg

SEQ ID NO: 9468 - DNA, 32 bp, Homo Sapiens
catatcattggtcgtggttgtagtccgtgcga

SEQ ID NO: 9469 - DNA, 33 bp, Homo Sapiens
catatcattggtcgtggttgtagtccgtgcgag

SEQ ID NO: 9470 - DNA, 34 bp, Homo Sapiens
catatcattggtcgtggttgtagtccgtgcgaga

SEQ ID NO: 9471 - DNA, 35 bp, Homo Sapiens
catatcattggtcgtggttgtagtccgtgcgagaa

SEQ ID NO: 9472 - DNA, 36 bp, Homo Sapiens
catatcattggtcgtggttgtagtccgtgcgagaat

SEQ ID NO: 9473 - DNA, 37 bp, Homo Sapiens
catatcattggtcgtggttgtagtccgtgcgagaata

SEQ ID NO: 9474 - DNA, 38 bp, Homo Sapiens
catatcattggtcgtggttgtagtccgtgcgagaatac

SEQ ID NO: 9475 - DNA, 39 bp, Homo Sapiens
catatcattggtcgtggttgtagtccgtgcgagaatacc

SEQ ID NO: 9476 - DNA, 40 bp, Homo Sapiens
catatcattggtcgtggttgtagtccgtgcgagaatacca

SEQ ID NO: 9477 - DNA, 22 bp, Homo Sapiens
catatggtctagcggttaggat

SEQ ID NO: 9478 - DNA, 23 bp, Homo Sapiens
catatggtctagcggttaggatt

SEQ ID NO: 9479 - DNA, 25 bp, Homo Sapiens
catatggtctagcggttaggattcc

SEQ ID NO: 9480 - DNA, 26 bp, Homo Sapiens
catatggtctagcggttaggattcct

SEQ ID NO: 9481 - DNA, 27 bp, Homo Sapiens
catatggtctagcggttaggattcctg

SEQ ID NO: 9482 - DNA, 28 bp, Homo Sapiens
catatggtctagcggttaggattcctgg

SEQ ID NO: 9483 - DNA, 29 bp, Homo Sapiens
catatggtctagcggttaggattcctggt

SEQ ID NO: 9484 - DNA, 30 bp, Homo Sapiens
catatggtctagcggttaggattcctggtt

SEQ ID NO: 9485 - DNA, 31 bp, Homo Sapiens
catatggtctagcggttaggattcctggttt

SEQ ID NO: 9486 - DNA, 32 bp, Homo Sapiens
catatggtctagcggttaggattcctggtttt

SEQ ID NO: 9487 - DNA, 33 bp, Homo Sapiens
catatggtctagcggttaggattcctggttttc

SEQ ID NO: 9488 - DNA, 34 bp, Homo Sapiens
catatggtctagcggttaggattcctggttttca

SEQ ID NO: 9489 - DNA, 35 bp, Homo Sapiens
catatggtctagcggttaggattcctggttttcac

SEQ ID NO: 9490 - DNA, 36 bp, Homo Sapiens
catatggtctagcggttaggattcctggttttcacc

SEQ ID NO: 9491 - DNA, 37 bp, Homo Sapiens
catatggtctagcggttaggattcctggttttcaccc

SEQ ID NO: 9492 - DNA, 16 bp, Homo Sapiens
catatgtccgcgtggg

SEQ ID NO: 9493 - DNA, 17 bp, Homo Sapiens
catatgtccgcgtgggt

SEQ ID NO: 9494 - DNA, 18 bp, Homo Sapiens
catatgtccgcgtgggtt

SEQ ID NO: 9495 - DNA, 20 bp, Homo Sapiens
catatgtccgcgtgggttcg

SEQ ID NO: 9496 - DNA, 26 bp, Homo Sapiens
catatgtccgcgtgggttcgaacccc

SEQ ID NO: 9497 - DNA, 27 bp, Homo Sapiens
catatgtccgcgtgggttcgaacccca

SEQ ID NO: 9498 - DNA, 29 bp, Homo Sapiens
catatgtccgcgtgggttcgaaccccact

SEQ ID NO: 9499 - DNA, 31 bp, Homo Sapiens
catatgtccgcgtgggttcgaaccccactcc

SEQ ID NO: 9500 - DNA, 33 bp, Homo Sapiens
catatgtccgcgtgggttcgaaccccactcctg

SEQ ID NO: 9501 - DNA, 36 bp, Homo Sapiens
catatgtccgcgtgggttcgaaccccactcctggta

SEQ ID NO: 9502 - DNA, 37 bp, Homo Sapiens
catatgtccgcgtgggttcgaaccccactcctggtac

SEQ ID NO: 9503 - DNA, 38 bp, Homo Sapiens
catatgtccgcgtgggttcgaaccccactcctggtacc

SEQ ID NO: 9504 - DNA, 16 bp, Homo Sapiens
catattgaattgcaaa

SEQ ID NO: 9505 - DNA, 17 bp, Homo Sapiens
catattgaattgcaaat

SEQ ID NO: 9506 - DNA, 18 bp, Homo Sapiens
catattgaattgcaaatt

SEQ ID NO: 9507 - DNA, 19 bp, Homo Sapiens
catattgaattgcaaattc

SEQ ID NO: 9508 - DNA, 22 bp, Homo Sapiens
catattgaattgcaaattcgaa

SEQ ID NO: 9509 - DNA, 24 bp, Homo Sapiens
catattgaattgcaaattcgaaga

SEQ ID NO: 9510 - DNA, 31 bp, Homo Sapiens
catattgaattgcaaattcgaagaagcagct

SEQ ID NO: 9511 - DNA, 33 bp, Homo Sapiens
catattgaattgcaaattcgaagaagcagcttc

SEQ ID NO: 9512 - DNA, 47 bp, Homo Sapiens
catattgaattgcaaattcgaagaagcagcttcaaacctgccggggc

SEQ ID NO: 9513 - DNA, 48 bp, Homo Sapiens
catattgaattgcaaattcgaagaagcagcttcaaacctgccggggct

SEQ ID NO: 9514 - DNA, 16 bp, Homo Sapiens
catcaccccataaaca

SEQ ID NO: 9515 - DNA, 17 bp, Homo Sapiens
catcaccccataaacac

SEQ ID NO: 9516 - DNA, 18 bp, Homo Sapiens
catcaccccataaacacc

SEQ ID NO: 9517 - DNA, 19 bp, Homo Sapiens
catcaccccataaacacca

SEQ ID NO: 9518 - DNA, 16 bp, Homo Sapiens
catcagattgtgaatc

SEQ ID NO: 9519 - DNA, 17 bp, Homo Sapiens
catcagattgtgaatct

SEQ ID NO: 9520 - DNA, 18 bp, Homo Sapiens
catcagattgtgaatctg

SEQ ID NO: 9521 - DNA, 19 bp, Homo Sapiens
catcagattgtgaatctga

SEQ ID NO: 9522 - DNA, 20 bp, Homo Sapiens
catcagattgtgaatctgac

SEQ ID NO: 9523 - DNA, 21 bp, Homo Sapiens
catcagattgtgaatctgaca

SEQ ID NO: 9524 - DNA, 22 bp, Homo Sapiens
catcagattgtgaatctgacaa

SEQ ID NO: 9525 - DNA, 23 bp, Homo Sapiens
catcagattgtgaatctgacaac

SEQ ID NO: 9526 - DNA, 24 bp, Homo Sapiens
catcagattgtgaatctgacaaca

SEQ ID NO: 9527 - DNA, 25 bp, Homo Sapiens
catcagattgtgaatctgacaacag

SEQ ID NO: 9528 - DNA, 26 bp, Homo Sapiens
catcagattgtgaatctgacaacaga

SEQ ID NO: 9529 - DNA, 27 bp, Homo Sapiens
catcagattgtgaatctgacaacagag

SEQ ID NO: 9530 - DNA, 28 bp, Homo Sapiens
catcagattgtgaatctgacaacagagg

SEQ ID NO: 9531 - DNA, 29 bp, Homo Sapiens
catcagattgtgaatctgacaacagaggc

SEQ ID NO: 9532 - DNA, 30 bp, Homo Sapiens
catcagattgtgaatctgacaacagaggct

SEQ ID NO: 9533 - DNA, 31 bp, Homo Sapiens
catcagattgtgaatctgacaacagaggctt

SEQ ID NO: 9534 - DNA, 32 bp, Homo Sapiens
catcagattgtgaatctgacaacagaggctta

SEQ ID NO: 9535 - DNA, 33 bp, Homo Sapiens
catcagattgtgaatctgacaacagaggcttac

SEQ ID NO: 9536 - DNA, 34 bp, Homo Sapiens
catcagattgtgaatctgacaacagaggcttacg

SEQ ID NO: 9537 - DNA, 35 bp, Homo Sapiens
catcagattgtgaatctgacaacagaggcttacga

SEQ ID NO: 9538 - DNA, 36 bp, Homo Sapiens
catcagattgtgaatctgacaacagaggcttacgac

SEQ ID NO: 9539 - DNA, 37 bp, Homo Sapiens
catcagattgtgaatctgacaacagaggcttacgacc

SEQ ID NO: 9540 - DNA, 38 bp, Homo Sapiens
catcagattgtgaatctgacaacagaggcttacgaccc

SEQ ID NO: 9541 - DNA, 39 bp, Homo Sapiens
catcagattgtgaatctgacaacagaggcttacgacccc

SEQ ID NO: 9542 - DNA, 40 bp, Homo Sapiens
catcagattgtgaatctgacaacagaggcttacgacccct

SEQ ID NO: 9543 - DNA, 41 bp, Homo Sapiens
catcagattgtgaatctgacaacagaggcttacgacccctt

SEQ ID NO: 9544 - DNA, 42 bp, Homo Sapiens
catcagattgtgaatctgacaacagaggcttacgacccctta

SEQ ID NO: 9545 - DNA, 43 bp, Homo Sapiens
catcagattgtgaatctgacaacagaggcttacgaccccttat

SEQ ID NO: 9546 - DNA, 44 bp, Homo Sapiens
catcagattgtgaatctgacaacagaggcttacgaccccttatt

SEQ ID NO: 9547 - DNA, 47 bp, Homo Sapiens
catcagattgtgaatctgacaacagaggcttacgaccccttatttac

SEQ ID NO: 9548 - DNA, 48 bp, Homo Sapiens
catcagattgtgaatctgacaacagaggcttacgaccccttatttacc

SEQ ID NO: 9549 - DNA, 18 bp, Homo Sapiens
catcagcctccggagctg

SEQ ID NO: 9550 - DNA, 26 bp, Homo Sapiens
catcagcctccggagctggggattgt

SEQ ID NO: 9551 - DNA, 16 bp, Homo Sapiens
catgagacccttaatc

SEQ ID NO: 9552 - DNA, 16 bp, Homo Sapiens
catgagactcttaatc

SEQ ID NO: 9553 - DNA, 17 bp, Homo Sapiens
catgagactcttaatct

SEQ ID NO: 9554 - DNA, 18 bp, Homo Sapiens
catgagactcttaatctc

SEQ ID NO: 9555 - DNA, 39 bp, Homo Sapiens
catgagactcttaatctcagggtcgtgggttcgagcccc

SEQ ID NO: 9556 - DNA, 17 bp, Homo Sapiens
catgaggtcccgggttc

SEQ ID NO: 9557 - DNA, 33 bp, Homo Sapiens
catgaggtcccgggttcgatccccagcatctcc

SEQ ID NO: 9558 - DNA, 35 bp, Homo Sapiens
catgaggtcccgggttcgatccccagcatctccac

SEQ ID NO: 9559 - DNA, 36 bp, Homo Sapiens
catgaggtcccgggttcgatccccagcatctccacc

SEQ ID NO: 9560 - DNA, 37 bp, Homo Sapiens
catgaggtcccgggttcgatccccagcatctccacca

SEQ ID NO: 9561 - DNA, 28 bp, Homo Sapiens
catgatcgtatagtggttagtactctgc

SEQ ID NO: 9562 - DNA, 16 bp, Homo Sapiens
catgcaagattcccat

SEQ ID NO: 9563 - DNA, 18 bp, Homo Sapiens
catgcaagattcccattc

SEQ ID NO: 9564 - DNA, 29 bp, Homo Sapiens
catgcaagattcccattcttgcgacccgg

SEQ ID NO: 9565 - DNA, 31 bp, Homo Sapiens
catgcaagattcccattcttgcgacccgggt

SEQ ID NO: 9566 - DNA, 16 bp, Homo Sapiens
catgcccccatgtcta

SEQ ID NO: 9567 - DNA, 17 bp, Homo Sapiens
catgcccccatgtctaa

SEQ ID NO: 9568 - DNA, 18 bp, Homo Sapiens
catgcccccatgtctaac

SEQ ID NO: 9569 - DNA, 19 bp, Homo Sapiens
catgcccccatgtctaaca

SEQ ID NO: 9570 - DNA, 20 bp, Homo Sapiens
catgcccccatgtctaacaa

SEQ ID NO: 9571 - DNA, 21 bp, Homo Sapiens
catgcccccatgtctaacaac

SEQ ID NO: 9572 - DNA, 22 bp, Homo Sapiens
catgcccccatgtctaacaaca

SEQ ID NO: 9573 - DNA, 24 bp, Homo Sapiens
catgcccccatgtctaacaacatg

SEQ ID NO: 9574 - DNA, 25 bp, Homo Sapiens
catgcccccatgtctaacaacatgg

SEQ ID NO: 9575 - DNA, 26 bp, Homo Sapiens
catgcccccatgtctaacaacatggc

SEQ ID NO: 9576 - DNA, 27 bp, Homo Sapiens
catgcccccatgtctaacaacatggct

SEQ ID NO: 9577 - DNA, 28 bp, Homo Sapiens
catgcccccatgtctaacaacatggctt

SEQ ID NO: 9578 - DNA, 29 bp, Homo Sapiens
catgcccccatgtctaacaacatggcttt

SEQ ID NO: 9579 - DNA, 30 bp, Homo Sapiens
catgcccccatgtctaacaacatggctttc

SEQ ID NO: 9580 - DNA, 31 bp, Homo Sapiens
catgcccccatgtctaacaacatggctttct

SEQ ID NO: 9581 - DNA, 32 bp, Homo Sapiens
catgcccccatgtctaacaacatggctttctc

SEQ ID NO: 9582 - DNA, 33 bp, Homo Sapiens
catgcccccatgtctaacaacatggctttctca

SEQ ID NO: 9583 - DNA, 34 bp, Homo Sapiens
catgcccccatgtctaacaacatggctttctcac

SEQ ID NO: 9584 - DNA, 35 bp, Homo Sapiens
catgcccccatgtctaacaacatggctttctcacc

SEQ ID NO: 9585 - DNA, 36 bp, Homo Sapiens
catgcccccatgtctaacaacatggctttctcacca

SEQ ID NO: 9586 - DNA, 18 bp, Homo Sapiens
catggaggccatggggtt

SEQ ID NO: 9587 - DNA, 19 bp, Homo Sapiens
catggaggccatggggttg

SEQ ID NO: 9588 - DNA, 20 bp, Homo Sapiens
catggaggccatggggttgg

SEQ ID NO: 9589 - DNA, 21 bp, Homo Sapiens
catggaggccatggggttggc

SEQ ID NO: 9590 - DNA, 25 bp, Homo Sapiens
catggaggccatggggttggcttga

SEQ ID NO: 9591 - DNA, 16 bp, Homo Sapiens
catggaggcgtgggtt

SEQ ID NO: 9592 - DNA, 34 bp, Homo Sapiens
catggaggcgtgggttcgaatcccacttctgaca

SEQ ID NO: 9593 - DNA, 36 bp, Homo Sapiens
catggaggcgtgggttcgaatcccacttctgacacc

SEQ ID NO: 9594 - DNA, 16 bp, Homo Sapiens
catggctttctcacca

SEQ ID NO: 9595 - DNA, 16 bp, Homo Sapiens
catgggactcttaatc

SEQ ID NO: 9596 - DNA, 17 bp, Homo Sapiens
catgggactcttaatcc

SEQ ID NO: 9597 - DNA, 18 bp, Homo Sapiens
catgggactcttaatccc

SEQ ID NO: 9598 - DNA, 26 bp, Homo Sapiens
catgggactcttaatcccagggtcgt

SEQ ID NO: 9599 - DNA, 31 bp, Homo Sapiens
catgggactcttaatcccagggtcgtgggtt

SEQ ID NO: 9600 - DNA, 32 bp, Homo Sapiens
catgggactcttaatcccagggtcgtgggttc

SEQ ID NO: 9601 - DNA, 36 bp, Homo Sapiens
catgggactcttaatcccagggtcgtgggttcgagc

SEQ ID NO: 9602 - DNA, 17 bp, Homo Sapiens
catgggactcttaatct

SEQ ID NO: 9603 - DNA, 18 bp, Homo Sapiens
catgggactcttaatctc

SEQ ID NO: 9604 - DNA, 16 bp, Homo Sapiens
catggggttggcttga

SEQ ID NO: 9605 - DNA, 20 bp, Homo Sapiens
catggggttggcttgaaacc

SEQ ID NO: 9606 - DNA, 24 bp, Homo Sapiens
catggggttggcttgaaaccagct

SEQ ID NO: 9607 - DNA, 27 bp, Homo Sapiens
catggggttggcttgaaaccagctttg

SEQ ID NO: 9608 - DNA, 35 bp, Homo Sapiens
catggggttggcttgaaaccagctttggggggttc

SEQ ID NO: 9609 - DNA, 17 bp, Homo Sapiens
catgggtggttcagtgg

SEQ ID NO: 9610 - DNA, 19 bp, Homo Sapiens
catgggtggttcagtggta

SEQ ID NO: 9611 - DNA, 20 bp, Homo Sapiens
catgggtggttcagtggtag

SEQ ID NO: 9612 - DNA, 21 bp, Homo Sapiens
catgggtggttcagtggtaga

SEQ ID NO: 9613 - DNA, 22 bp, Homo Sapiens
catgggtggttcagtggtagaa

SEQ ID NO: 9614 - DNA, 24 bp, Homo Sapiens
catgggtggttcagtggtagaatt

SEQ ID NO: 9615 - DNA, 25 bp, Homo Sapiens
catgggtggttcagtggtagaattc

SEQ ID NO: 9616 - DNA, 26 bp, Homo Sapiens
catgggtggttcagtggtagaattct

SEQ ID NO: 9617 - DNA, 27 bp, Homo Sapiens
catgggtggttcagtggtagaattctc

SEQ ID NO: 9618 - DNA, 28 bp, Homo Sapiens
catgggtggttcagtggtagaattctcg

SEQ ID NO: 9619 - DNA, 29 bp, Homo Sapiens
catgggtggttcagtggtagaattctcgc

SEQ ID NO: 9620 - DNA, 30 bp, Homo Sapiens
catgggtggttcagtggtagaattctcgcc

SEQ ID NO: 9621 - DNA, 31 bp, Homo Sapiens
catgggtggttcagtggtagaattctcgcct

SEQ ID NO: 9622 - DNA, 32 bp, Homo Sapiens
catgggtggttcagtggtagaattctcgcctg

SEQ ID NO: 9623 - DNA, 33 bp, Homo Sapiens
catgggtggttcagtggtagaattctcgcctgc

SEQ ID NO: 9624 - DNA, 34 bp, Homo Sapiens
catgggtggttcagtggtagaattctcgcctgcc

SEQ ID NO: 9625 - DNA, 35 bp, Homo Sapiens
catgggtggttcagtggtagaattctcgcctgcca

SEQ ID NO: 9626 - DNA, 36 bp, Homo Sapiens
catgggtggttcagtggtagaattctcgcctgccac

SEQ ID NO: 9627 - DNA, 37 bp, Homo Sapiens
catgggtggttcagtggtagaattctcgcctgccacg

SEQ ID NO: 9628 - DNA, 39 bp, Homo Sapiens
catgggtggttcagtggtagaattctcgcctgccacgcg

SEQ ID NO: 9629 - DNA, 40 bp, Homo Sapiens
catgggtggttcagtggtagaattctcgcctgccacgcgg

SEQ ID NO: 9630 - DNA, 42 bp, Homo Sapiens
catgggtggttcagtggtagaattctcgcctgccacgcggga

SEQ ID NO: 9631 - DNA, 46 bp, Homo Sapiens
catgggtggttcagtggtagaattctcgcctgccacgcgggaggcc

SEQ ID NO: 9632 - DNA, 48 bp, Homo Sapiens
catgggtggttcagtggtagaattctcgcctgccacgcgggaggcccg

SEQ ID NO: 9633 - DNA, 20 bp, Homo Sapiens
catggtctagcggttaggat

SEQ ID NO: 9634 - DNA, 21 bp, Homo Sapiens
catggtctagcggttaggatt

SEQ ID NO: 9635 - DNA, 23 bp, Homo Sapiens
catggtctagcggttaggattcc

SEQ ID NO: 9636 - DNA, 24 bp, Homo Sapiens
catggtctagcggttaggattcct

SEQ ID NO: 9637 - DNA, 25 bp, Homo Sapiens
catggtctagcggttaggattcctg

SEQ ID NO: 9638 - DNA, 26 bp, Homo Sapiens
catggtctagcggttaggattcctgg

SEQ ID NO: 9639 - DNA, 27 bp, Homo Sapiens
catggtctagcggttaggattcctggt

SEQ ID NO: 9640 - DNA, 28 bp, Homo Sapiens
catggtctagcggttaggattcctggtt

SEQ ID NO: 9641 - DNA, 29 bp, Homo Sapiens
catggtctagcggttaggattcctggttt

SEQ ID NO: 9642 - DNA, 30 bp, Homo Sapiens
catggtctagcggttaggattcctggtttt

SEQ ID NO: 9643 - DNA, 31 bp, Homo Sapiens
catggtctagcggttaggattcctggttttc

SEQ ID NO: 9644 - DNA, 32 bp, Homo Sapiens
catggtctagcggttaggattcctggttttca

SEQ ID NO: 9645 - DNA, 33 bp, Homo Sapiens
catggtctagcggttaggattcctggttttcac

SEQ ID NO: 9646 - DNA, 26 bp, Homo Sapiens
catggtgtaatggtgagcactctgga

SEQ ID NO: 9647 - DNA, 29 bp, Homo Sapiens
catggtgtaatggtgagcactctggactc

SEQ ID NO: 9648 - DNA, 30 bp, Homo Sapiens
catggtgtaatggtgagcactctggactct

SEQ ID NO: 9649 - DNA, 31 bp, Homo Sapiens
catggtgtaatggtgagcactctggactctg

SEQ ID NO: 9650 - DNA, 24 bp, Homo Sapiens
catggtgtaatggttagcactctg

SEQ ID NO: 9651 - DNA, 26 bp, Homo Sapiens
catggtgtaatggttagcactctgga

SEQ ID NO: 9652 - DNA, 27 bp, Homo Sapiens
catggtgtaatggttagcactctggac

SEQ ID NO: 9653 - DNA, 28 bp, Homo Sapiens
catggtgtaatggttagcactctggact

SEQ ID NO: 9654 - DNA, 29 bp, Homo Sapiens
catggtgtaatggttagcactctggactc

SEQ ID NO: 9655 - DNA, 30 bp, Homo Sapiens
catggtgtaatggttagcactctggactct

SEQ ID NO: 9656 - DNA, 31 bp, Homo Sapiens
catggtgtaatggttagcactctggactctg

SEQ ID NO: 9657 - DNA, 32 bp, Homo Sapiens
catggtgtaatggttagcactctggactctga

SEQ ID NO: 9658 - DNA, 33 bp, Homo Sapiens
catggtgtaatggttagcactctggactctgaa

SEQ ID NO: 9659 - DNA, 31 bp, Homo Sapiens
catggtgtaatggttagcactctggactttg

SEQ ID NO: 9660 - DNA, 18 bp, Homo Sapiens
catgtctaacaacatggc

SEQ ID NO: 9661 - DNA, 19 bp, Homo Sapiens
catgtctaacaacatggct

SEQ ID NO: 9662 - DNA, 20 bp, Homo Sapiens
catgtctaacaacatggctt

SEQ ID NO: 9663 - DNA, 22 bp, Homo Sapiens
catgtctaacaacatggctttc

SEQ ID NO: 9664 - DNA, 23 bp, Homo Sapiens
catgtctaacaacatggctttct

SEQ ID NO: 9665 - DNA, 24 bp, Homo Sapiens
catgtctaacaacatggctttctc

SEQ ID NO: 9666 - DNA, 25 bp, Homo Sapiens
catgtctaacaacatggctttctca

SEQ ID NO: 9667 - DNA, 26 bp, Homo Sapiens
catgtctaacaacatggctttctcac

SEQ ID NO: 9668 - DNA, 27 bp, Homo Sapiens
catgtctaacaacatggctttctcacc

SEQ ID NO: 9669 - DNA, 28 bp, Homo Sapiens
catgtctaacaacatggctttctcacca

SEQ ID NO: 9670 - DNA, 16 bp, Homo Sapiens
cattaaattatgataa

SEQ ID NO: 9671 - DNA, 21 bp, Homo Sapiens
cattaaattatgataatcata

SEQ ID NO: 9672 - DNA, 23 bp, Homo Sapiens
cattaaattatgataatcatatt

SEQ ID NO: 9673 - DNA, 25 bp, Homo Sapiens
cattaaattatgataatcatattta

SEQ ID NO: 9674 - DNA, 26 bp, Homo Sapiens
cattaaattatgataatcatatttac

SEQ ID NO: 9675 - DNA, 27 bp, Homo Sapiens
cattaaattatgataatcatatttacc

SEQ ID NO: 9676 - DNA, 29 bp, Homo Sapiens
cattaaattatgataatcatatttaccaa

SEQ ID NO: 9677 - DNA, 30 bp, Homo Sapiens
cattaaattatgataatcatatttaccaac

SEQ ID NO: 9678 - DNA, 31 bp, Homo Sapiens
cattaaattatgataatcatatttaccaacc

SEQ ID NO: 9679 - DNA, 32 bp, Homo Sapiens
cattaaattatgataatcatatttaccaacca

SEQ ID NO: 9680 - DNA, 19 bp, Homo Sapiens
cattaaccttttaagttaa

SEQ ID NO: 9681 - DNA, 23 bp, Homo Sapiens
cattaaccttttaagttaaagat

SEQ ID NO: 9682 - DNA, 26 bp, Homo Sapiens
cattaaccttttaagttaaagattaa

SEQ ID NO: 9683 - DNA, 32 bp, Homo Sapiens
cattaaccttttaagttaaagattaagagaac

SEQ ID NO: 9684 - DNA, 33 bp, Homo Sapiens
cattaaccttttaagttaaagattaagagaacc

SEQ ID NO: 9685 - DNA, 34 bp, Homo Sapiens
cattaaccttttaagttaaagattaagagaacca

SEQ ID NO: 9686 - DNA, 36 bp, Homo Sapiens
cattaaccttttaagttaaagattaagagaaccaac

SEQ ID NO: 9687 - DNA, 38 bp, Homo Sapiens
cattaaccttttaagttaaagattaagagaaccaacac

SEQ ID NO: 9688 - DNA, 39 bp, Homo Sapiens
cattaaccttttaagttaaagattaagagaaccaacacc

SEQ ID NO: 9689 - DNA, 40 bp, Homo Sapiens
cattaaccttttaagttaaagattaagagaaccaacacct

SEQ ID NO: 9690 - DNA, 16 bp, Homo Sapiens
cattcaaaaaagagta

SEQ ID NO: 9691 - DNA, 17 bp, Homo Sapiens
cattcaaaaaagagtac

SEQ ID NO: 9692 - DNA, 18 bp, Homo Sapiens
cattcaaaaaagagtacc

SEQ ID NO: 9693 - DNA, 19 bp, Homo Sapiens
cattcaaaaaagagtacca

SEQ ID NO: 9694 - DNA, 18 bp, Homo Sapiens
cattcgcctcacacgcga

SEQ ID NO: 9695 - DNA, 28 bp, Homo Sapiens
cattcggctgttaaccgaaaggttggtg

SEQ ID NO: 9696 - DNA, 16 bp, Homo Sapiens
cattcttgcgacccgg

SEQ ID NO: 9697 - DNA, 17 bp, Homo Sapiens
cattcttgcgacccggg

SEQ ID NO: 9698 - DNA, 18 bp, Homo Sapiens
cattcttgcgacccgggt

SEQ ID NO: 9699 - DNA, 19 bp, Homo Sapiens
cattcttgcgacccgggtt

SEQ ID NO: 9700 - DNA, 20 bp, Homo Sapiens
cattcttgcgacccgggttc

SEQ ID NO: 9701 - DNA, 21 bp, Homo Sapiens
cattcttgcgacccgggttcg

SEQ ID NO: 9702 - DNA, 22 bp, Homo Sapiens
cattcttgcgacccgggttcga

SEQ ID NO: 9703 - DNA, 23 bp, Homo Sapiens
cattcttgcgacccgggttcgat

SEQ ID NO: 9704 - DNA, 24 bp, Homo Sapiens
cattcttgcgacccgggttcgatt

SEQ ID NO: 9705 - DNA, 31 bp, Homo Sapiens
cattcttgcgacccgggttcgattcccgggc

SEQ ID NO: 9706 - DNA, 32 bp, Homo Sapiens
cattcttgcgacccgggttcgattcccgggcg

SEQ ID NO: 9707 - DNA, 33 bp, Homo Sapiens
cattcttgcgacccgggttcgattcccgggcgg

SEQ ID NO: 9708 - DNA, 34 bp, Homo Sapiens
cattcttgcgacccgggttcgattcccgggcggc

SEQ ID NO: 9709 - DNA, 35 bp, Homo Sapiens
cattcttgcgacccgggttcgattcccgggcggcg

SEQ ID NO: 9710 - DNA, 36 bp, Homo Sapiens
cattcttgcgacccgggttcgattcccgggcggcgc

SEQ ID NO: 9711 - DNA, 37 bp, Homo Sapiens
cattcttgcgacccgggttcgattcccgggcggcgca

SEQ ID NO: 9712 - DNA, 38 bp, Homo Sapiens
cattcttgcgacccgggttcgattcccgggcggcgcac

SEQ ID NO: 9713 - DNA, 39 bp, Homo Sapiens
cattcttgcgacccgggttcgattcccgggcggcgcacc

SEQ ID NO: 9714 - DNA, 40 bp, Homo Sapiens
cattcttgcgacccgggttcgattcccgggcggcgcacca

SEQ ID NO: 9715 - DNA, 16 bp, Homo Sapiens
cattggactgtaaatc

SEQ ID NO: 9716 - DNA, 17 bp, Homo Sapiens
cattggactgtaaatct

SEQ ID NO: 9717 - DNA, 18 bp, Homo Sapiens
cattggactgtaaatcta

SEQ ID NO: 9718 - DNA, 19 bp, Homo Sapiens
cattggactgtaaatctaa

SEQ ID NO: 9719 - DNA, 20 bp, Homo Sapiens
cattggactgtaaatctaaa

SEQ ID NO: 9720 - DNA, 22 bp, Homo Sapiens
cattggactgtaaatctaaaga

SEQ ID NO: 9721 - DNA, 26 bp, Homo Sapiens
cattggactgtaaatctaaagacagg

SEQ ID NO: 9722 - DNA, 32 bp, Homo Sapiens
cattggactgtaaatctaaagacaggggttag

SEQ ID NO: 9723 - DNA, 34 bp, Homo Sapiens
cattggactgtaaatctaaagacaggggttaggc

SEQ ID NO: 9724 - DNA, 35 bp, Homo Sapiens
cattggactgtaaatctaaagacaggggttaggcc

SEQ ID NO: 9725 - DNA, 36 bp, Homo Sapiens
cattggactgtaaatctaaagacaggggttaggcct

SEQ ID NO: 9726 - DNA, 37 bp, Homo Sapiens
cattggactgtaaatctaaagacaggggttaggcctc

SEQ ID NO: 9727 - DNA, 38 bp, Homo Sapiens
cattggactgtaaatctaaagacaggggttaggcctct

SEQ ID NO: 9728 - DNA, 41 bp, Homo Sapiens
cattggactgtaaatctaaagacaggggttaggcctctttt

SEQ ID NO: 9729 - DNA, 45 bp, Homo Sapiens
cattggactgtaaatctaaagacaggggttaggcctctttttacc

SEQ ID NO: 9730 - DNA, 48 bp, Homo Sapiens
cattggactgtaaatctaaagacaggggttaggcctctttttaccacc

SEQ ID NO: 9731 - DNA, 19 bp, Homo Sapiens
cattggacttctaattcaa

SEQ ID NO: 9732 - DNA, 17 bp, Homo Sapiens
cattggcctcctaagcc

SEQ ID NO: 9733 - DNA, 22 bp, Homo Sapiens
cattggggtctccccgcgcagg

SEQ ID NO: 9734 - DNA, 23 bp, Homo Sapiens
cattggggtctccccgcgcaggt

SEQ ID NO: 9735 - DNA, 24 bp, Homo Sapiens
cattggggtctccccgcgcaggtt

SEQ ID NO: 9736 - DNA, 19 bp, Homo Sapiens
cattggggtttccccgcgc

SEQ ID NO: 9737 - DNA, 20 bp, Homo Sapiens
cattggggtttccccgcgca

SEQ ID NO: 9738 - DNA, 21 bp, Homo Sapiens
cattggggtttccccgcgcag

SEQ ID NO: 9739 - DNA, 22 bp, Homo Sapiens
cattggggtttccccgcgcagg

SEQ ID NO: 9740 - DNA, 23 bp, Homo Sapiens
cattggggtttccccgcgcaggt

SEQ ID NO: 9741 - DNA, 24 bp, Homo Sapiens
cattggggtttccccgcgcaggtt

SEQ ID NO: 9742 - DNA, 25 bp, Homo Sapiens
cattggggtttccccgcgcaggttc

SEQ ID NO: 9743 - DNA, 26 bp, Homo Sapiens
cattggggtttccccgcgcaggttcg

SEQ ID NO: 9744 - DNA, 33 bp, Homo Sapiens
cattggggtttccccgcgcaggttcgaatcctg

SEQ ID NO: 9745 - DNA, 38 bp, Homo Sapiens
cattggggtttccccgcgcaggttcgaatcctgccgac

SEQ ID NO: 9746 - DNA, 39 bp, Homo Sapiens
cattggggtttccccgcgcaggttcgaatcctgccgact

SEQ ID NO: 9747 - DNA, 43 bp, Homo Sapiens
cattggggtttccccgcgcaggttcgaatcctgccgactacgc

SEQ ID NO: 9748 - DNA, 44 bp, Homo Sapiens
cattggggtttccccgcgcaggttcgaatcctgccgactacgcc

SEQ ID NO: 9749 - DNA, 16 bp, Homo Sapiens
cattggtcgtggttgt

SEQ ID NO: 9750 - DNA, 17 bp, Homo Sapiens
cattggtcgtggttgta

SEQ ID NO: 9751 - DNA, 18 bp, Homo Sapiens
cattggtcgtggttgtag

SEQ ID NO: 9752 - DNA, 19 bp, Homo Sapiens
cattggtcgtggttgtagt

SEQ ID NO: 9753 - DNA, 20 bp, Homo Sapiens
cattggtcgtggttgtagtc

SEQ ID NO: 9754 - DNA, 21 bp, Homo Sapiens
cattggtcgtggttgtagtcc

SEQ ID NO: 9755 - DNA, 22 bp, Homo Sapiens
cattggtcgtggttgtagtccg

SEQ ID NO: 9756 - DNA, 23 bp, Homo Sapiens
cattggtcgtggttgtagtccgt

SEQ ID NO: 9757 - DNA, 24 bp, Homo Sapiens
cattggtcgtggttgtagtccgtg

SEQ ID NO: 9758 - DNA, 25 bp, Homo Sapiens
cattggtcgtggttgtagtccgtgc

SEQ ID NO: 9759 - DNA, 26 bp, Homo Sapiens
cattggtcgtggttgtagtccgtgcg

SEQ ID NO: 9760 - DNA, 27 bp, Homo Sapiens
cattggtcgtggttgtagtccgtgcga

SEQ ID NO: 9761 - DNA, 28 bp, Homo Sapiens
cattggtcgtggttgtagtccgtgcgag

SEQ ID NO: 9762 - DNA, 29 bp, Homo Sapiens
cattggtcgtggttgtagtccgtgcgaga

SEQ ID NO: 9763 - DNA, 30 bp, Homo Sapiens
cattggtcgtggttgtagtccgtgcgagaa

SEQ ID NO: 9764 - DNA, 31 bp, Homo Sapiens
cattggtcgtggttgtagtccgtgcgagaat

SEQ ID NO: 9765 - DNA, 32 bp, Homo Sapiens
cattggtcgtggttgtagtccgtgcgagaata

SEQ ID NO: 9766 - DNA, 33 bp, Homo Sapiens
cattggtcgtggttgtagtccgtgcgagaatac

SEQ ID NO: 9767 - DNA, 34 bp, Homo Sapiens
cattggtcgtggttgtagtccgtgcgagaatacc

SEQ ID NO: 9768 - DNA, 35 bp, Homo Sapiens
cattggtcgtggttgtagtccgtgcgagaatacca

SEQ ID NO: 9769 - DNA, 16 bp, Homo Sapiens
cattggtcttaggccc

SEQ ID NO: 9770 - DNA, 17 bp, Homo Sapiens
cattggtcttaggcccc

SEQ ID NO: 9771 - DNA, 19 bp, Homo Sapiens
cattggtcttaggccccaa

SEQ ID NO: 9772 - DNA, 22 bp, Homo Sapiens
cattggtcttaggccccaaaaa

SEQ ID NO: 9773 - DNA, 23 bp, Homo Sapiens
cattggtcttaggccccaaaaat

SEQ ID NO: 9774 - DNA, 30 bp, Homo Sapiens
cattggtcttaggccccaaaaattttggtg

SEQ ID NO: 9775 - DNA, 31 bp, Homo Sapiens
cattggtcttaggccccaaaaattttggtgc

SEQ ID NO: 9776 - DNA, 32 bp, Homo Sapiens
cattggtcttaggccccaaaaattttggtgca

SEQ ID NO: 9777 - DNA, 33 bp, Homo Sapiens
cattggtcttaggccccaaaaattttggtgcaa

SEQ ID NO: 9778 - DNA, 35 bp, Homo Sapiens
cattggtcttaggccccaaaaattttggtgcaact

SEQ ID NO: 9779 - DNA, 36 bp, Homo Sapiens
cattggtcttaggccccaaaaattttggtgcaactc

SEQ ID NO: 9780 - DNA, 37 bp, Homo Sapiens
cattggtcttaggccccaaaaattttggtgcaactcc

SEQ ID NO: 9781 - DNA, 40 bp, Homo Sapiens
cattggtcttaggccccaaaaattttggtgcaactccaaa

SEQ ID NO: 9782 - DNA, 41 bp, Homo Sapiens
cattggtcttaggccccaaaaattttggtgcaactccaaat

SEQ ID NO: 9783 - DNA, 42 bp, Homo Sapiens
cattggtcttaggccccaaaaattttggtgcaactccaaata

SEQ ID NO: 9784 - DNA, 30 bp, Homo Sapiens
cattggtggttcaatggtagaattctcgcc

SEQ ID NO: 9785 - DNA, 17 bp, Homo Sapiens
cattggtggttcagtgg

SEQ ID NO: 9786 - DNA, 19 bp, Homo Sapiens
cattggtggttcagtggta

SEQ ID NO: 9787 - DNA, 20 bp, Homo Sapiens
cattggtggttcagtggtag

SEQ ID NO: 9788 - DNA, 21 bp, Homo Sapiens
cattggtggttcagtggtaga

SEQ ID NO: 9789 - DNA, 22 bp, Homo Sapiens
cattggtggttcagtggtagaa

SEQ ID NO: 9790 - DNA, 23 bp, Homo Sapiens
cattggtggttcagtggtagaat

SEQ ID NO: 9791 - DNA, 24 bp, Homo Sapiens
cattggtggttcagtggtagaatt

SEQ ID NO: 9792 - DNA, 25 bp, Homo Sapiens
cattggtggttcagtggtagaattc

SEQ ID NO: 9793 - DNA, 26 bp, Homo Sapiens
cattggtggttcagtggtagaattct

SEQ ID NO: 9794 - DNA, 27 bp, Homo Sapiens
cattggtggttcagtggtagaattctc

SEQ ID NO: 9795 - DNA, 28 bp, Homo Sapiens
cattggtggttcagtggtagaattctcg

SEQ ID NO: 9796 - DNA, 29 bp, Homo Sapiens
cattggtggttcagtggtagaattctcgc

SEQ ID NO: 9797 - DNA, 30 bp, Homo Sapiens
cattggtggttcagtggtagaattctcgcc

SEQ ID NO: 9798 - DNA, 31 bp, Homo Sapiens
cattggtggttcagtggtagaattctcgcct

SEQ ID NO: 9799 - DNA, 32 bp, Homo Sapiens
cattggtggttcagtggtagaattctcgcctc

SEQ ID NO: 9800 - DNA, 33 bp, Homo Sapiens
cattggtggttcagtggtagaattctcgcctcc

SEQ ID NO: 9801 - DNA, 34 bp, Homo Sapiens
cattggtggttcagtggtagaattctcgcctccc

SEQ ID NO: 9802 - DNA, 35 bp, Homo Sapiens
cattggtggttcagtggtagaattctcgcctccca

SEQ ID NO: 9803 - DNA, 36 bp, Homo Sapiens
cattggtggttcagtggtagaattctcgcctcccac

SEQ ID NO: 9804 - DNA, 32 bp, Homo Sapiens
cattggtggttcagtggtagaattctcgcctg

SEQ ID NO: 9805 - DNA, 33 bp, Homo Sapiens
cattggtggttcagtggtagaattctcgcctgc

SEQ ID NO: 9806 - DNA, 34 bp, Homo Sapiens
cattggtggttcagtggtagaattctcgcctgcc

SEQ ID NO: 9807 - DNA, 35 bp, Homo Sapiens
cattggtggttcagtggtagaattctcgcctgcca

SEQ ID NO: 9808 - DNA, 36 bp, Homo Sapiens
cattggtggttcagtggtagaattctcgcctgccac

SEQ ID NO: 9809 - DNA, 37 bp, Homo Sapiens
cattggtggttcagtggtagaattctcgcctgccacg

SEQ ID NO: 9810 - DNA, 38 bp, Homo Sapiens
cattggtggttcagtggtagaattctcgcctgccacgc

SEQ ID NO: 9811 - DNA, 39 bp, Homo Sapiens
cattggtggttcagtggtagaattctcgcctgccacgcg

SEQ ID NO: 9812 - DNA, 42 bp, Homo Sapiens
cattggtggttcagtggtagaattctcgcctgccacgcggga

SEQ ID NO: 9813 - DNA, 43 bp, Homo Sapiens
cattggtggttcagtggtagaattctcgcctgccacgcgggag

SEQ ID NO: 9814 - DNA, 47 bp, Homo Sapiens
cattggtggttcagtggtagaattctcgcctgccacgcgggaggccc

SEQ ID NO: 9815 - DNA, 48 bp, Homo Sapiens
cattggtggttcagtggtagaattctcgcctgccacgcgggaggcccg

SEQ ID NO: 9816 - DNA, 44 bp, Homo Sapiens
cattgtgctctgcacgcgtgggttcgaatcccatcctcgtcgcc

SEQ ID NO: 9817 - DNA, 45 bp, Homo Sapiens
cattgtgctctgcacgcgtgggttcgaatcccatcctcgtcgcca

SEQ ID NO: 9818 - DNA, 23 bp, Homo Sapiens
cattgtgctttgcacgcgtgggt

SEQ ID NO: 9819 - DNA, 24 bp, Homo Sapiens
cattgtgctttgcacgcgtgggtt

SEQ ID NO: 9820 - DNA, 25 bp, Homo Sapiens
cattgtgctttgcacgcgtgggttc

SEQ ID NO: 9821 - DNA, 43 bp, Homo Sapiens
cattgtgctttgcacgcgtgggttcgaatcccatcctcgtcgc

SEQ ID NO: 9822 - DNA, 44 bp, Homo Sapiens
cattgtgctttgcacgcgtgggttcgaatcccatcctcgtcgcc

SEQ ID NO: 9823 - DNA, 45 bp, Homo Sapiens
cattgtgctttgcacgcgtgggttcgaatcccatcctcgtcgcca

SEQ ID NO: 9824 - DNA, 16 bp, Homo Sapiens
catttcataactttgt

SEQ ID NO: 9825 - DNA, 17 bp, Homo Sapiens
catttcataactttgtc

SEQ ID NO: 9826 - DNA, 18 bp, Homo Sapiens
catttcataactttgtca

SEQ ID NO: 9827 - DNA, 19 bp, Homo Sapiens
catttcataactttgtcaa

SEQ ID NO: 9828 - DNA, 20 bp, Homo Sapiens
catttcataactttgtcaaa

SEQ ID NO: 9829 - DNA, 21 bp, Homo Sapiens
catttcataactttgtcaaag

SEQ ID NO: 9830 - DNA, 22 bp, Homo Sapiens
catttcataactttgtcaaagt

SEQ ID NO: 9831 - DNA, 27 bp, Homo Sapiens
catttcataactttgtcaaagttaaat

SEQ ID NO: 9832 - DNA, 32 bp, Homo Sapiens
catttcataactttgtcaaagttaaattatag

SEQ ID NO: 9833 - DNA, 34 bp, Homo Sapiens
catttcataactttgtcaaagttaaattataggc

SEQ ID NO: 9834 - DNA, 35 bp, Homo Sapiens
catttcataactttgtcaaagttaaattataggct

SEQ ID NO: 9835 - DNA, 36 bp, Homo Sapiens
catttcataactttgtcaaagttaaattataggcta

SEQ ID NO: 9836 - DNA, 37 bp, Homo Sapiens
catttcataactttgtcaaagttaaattataggctaa

SEQ ID NO: 9837 - DNA, 38 bp, Homo Sapiens
catttcataactttgtcaaagttaaattataggctaaa

SEQ ID NO: 9838 - DNA, 39 bp, Homo Sapiens
catttcataactttgtcaaagttaaattataggctaaat

SEQ ID NO: 9839 - DNA, 40 bp, Homo Sapiens
catttcataactttgtcaaagttaaattataggctaaatc

SEQ ID NO: 9840 - DNA, 41 bp, Homo Sapiens
catttcataactttgtcaaagttaaattataggctaaatcc

SEQ ID NO: 9841 - DNA, 42 bp, Homo Sapiens
catttcataactttgtcaaagttaaattataggctaaatcct

SEQ ID NO: 9842 - DNA, 47 bp, Homo Sapiens
catttcataactttgtcaaagttaaattataggctaaatcctatata

SEQ ID NO: 9843 - DNA, 18 bp, Homo Sapiens
catttcgatggcgtgggt

SEQ ID NO: 9844 - DNA, 20 bp, Homo Sapiens
catttcgatggcgtgggttc

SEQ ID NO: 9845 - DNA, 21 bp, Homo Sapiens
catttcgatggcgtgggttcg

SEQ ID NO: 9846 - DNA, 34 bp, Homo Sapiens
catttcgatggcgtgggttcgaatcccaccgctg

SEQ ID NO: 9847 - DNA, 16 bp, Homo Sapiens
catttgactgcagatc

SEQ ID NO: 9848 - DNA, 17 bp, Homo Sapiens
catttgactgcagatca

SEQ ID NO: 9849 - DNA, 30 bp, Homo Sapiens
catttgactgcagatcaaaaggtccctggt

SEQ ID NO: 9850 - DNA, 27 bp, Homo Sapiens
catttgactgcagatcaagaggtcccc

SEQ ID NO: 9851 - DNA, 32 bp, Homo Sapiens
catttgactgcagatcaagaggtccccggttc

SEQ ID NO: 9852 - DNA, 21 bp, Homo Sapiens
ccaaaaattttggtgcaactc

SEQ ID NO: 9853 - DNA, 22 bp, Homo Sapiens
ccaaaaattttggtgcaactcc

SEQ ID NO: 9854 - DNA, 25 bp, Homo Sapiens
ccaaaaattttggtgcaactccaaa

SEQ ID NO: 9855 - DNA, 26 bp, Homo Sapiens
ccaaaaattttggtgcaactccaaat

SEQ ID NO: 9856 - DNA, 27 bp, Homo Sapiens
ccaaaaattttggtgcaactccaaata

SEQ ID NO: 9857 - DNA, 31 bp, Homo Sapiens
ccaaaaattttggtgcaactccaaataaaag

SEQ ID NO: 9858 - DNA, 32 bp, Homo Sapiens
ccaaaaattttggtgcaactccaaataaaagt

SEQ ID NO: 9859 - DNA, 33 bp, Homo Sapiens
ccaaaaattttggtgcaactccaaataaaagta

SEQ ID NO: 9860 - DNA, 34 bp, Homo Sapiens
ccaaaaattttggtgcaactccaaataaaagtac

SEQ ID NO: 9861 - DNA, 35 bp, Homo Sapiens
ccaaaaattttggtgcaactccaaataaaagtacc

SEQ ID NO: 9862 - DNA, 36 bp, Homo Sapiens
ccaaaaattttggtgcaactccaaataaaagtacca

SEQ ID NO: 9863 - DNA, 17 bp, Homo Sapiens
ccaaaacatcagattgt

SEQ ID NO: 9864 - DNA, 18 bp, Homo Sapiens
ccaaaacatcagattgtg

SEQ ID NO: 9865 - DNA, 19 bp, Homo Sapiens
ccaaaacatcagattgtga

SEQ ID NO: 9866 - DNA, 20 bp, Homo Sapiens
ccaaaacatcagattgtgaa

SEQ ID NO: 9867 - DNA, 21 bp, Homo Sapiens
ccaaaacatcagattgtgaat

SEQ ID NO: 9868 - DNA, 22 bp, Homo Sapiens
ccaaaacatcagattgtgaatc

SEQ ID NO: 9869 - DNA, 23 bp, Homo Sapiens
ccaaaacatcagattgtgaatct

SEQ ID NO: 9870 - DNA, 24 bp, Homo Sapiens
ccaaaacatcagattgtgaatctg

SEQ ID NO: 9871 - DNA, 25 bp, Homo Sapiens
ccaaaacatcagattgtgaatctga

SEQ ID NO: 9872 - DNA, 26 bp, Homo Sapiens
ccaaaacatcagattgtgaatctgac

SEQ ID NO: 9873 - DNA, 27 bp, Homo Sapiens
ccaaaacatcagattgtgaatctgaca

SEQ ID NO: 9874 - DNA, 28 bp, Homo Sapiens
ccaaaacatcagattgtgaatctgacaa

SEQ ID NO: 9875 - DNA, 29 bp, Homo Sapiens
ccaaaacatcagattgtgaatctgacaac

SEQ ID NO: 9876 - DNA, 30 bp, Homo Sapiens
ccaaaacatcagattgtgaatctgacaaca

SEQ ID NO: 9877 - DNA, 31 bp, Homo Sapiens
ccaaaacatcagattgtgaatctgacaacag

SEQ ID NO: 9878 - DNA, 32 bp, Homo Sapiens
ccaaaacatcagattgtgaatctgacaacaga

SEQ ID NO: 9879 - DNA, 33 bp, Homo Sapiens
ccaaaacatcagattgtgaatctgacaacagag

SEQ ID NO: 9880 - DNA, 34 bp, Homo Sapiens
ccaaaacatcagattgtgaatctgacaacagagg

SEQ ID NO: 9881 - DNA, 35 bp, Homo Sapiens
ccaaaacatcagattgtgaatctgacaacagaggc

SEQ ID NO: 9882 - DNA, 36 bp, Homo Sapiens
ccaaaacatcagattgtgaatctgacaacagaggct

SEQ ID NO: 9883 - DNA, 37 bp, Homo Sapiens
ccaaaacatcagattgtgaatctgacaacagaggctt

SEQ ID NO: 9884 - DNA, 38 bp, Homo Sapiens
ccaaaacatcagattgtgaatctgacaacagaggctta

SEQ ID NO: 9885 - DNA, 39 bp, Homo Sapiens
ccaaaacatcagattgtgaatctgacaacagaggcttac

SEQ ID NO: 9886 - DNA, 40 bp, Homo Sapiens
ccaaaacatcagattgtgaatctgacaacagaggcttacg

SEQ ID NO: 9887 - DNA, 41 bp, Homo Sapiens
ccaaaacatcagattgtgaatctgacaacagaggcttacga

SEQ ID NO: 9888 - DNA, 42 bp, Homo Sapiens
ccaaaacatcagattgtgaatctgacaacagaggcttacgac

SEQ ID NO: 9889 - DNA, 43 bp, Homo Sapiens
ccaaaacatcagattgtgaatctgacaacagaggcttacgacc

SEQ ID NO: 9890 - DNA, 44 bp, Homo Sapiens
ccaaaacatcagattgtgaatctgacaacagaggcttacgaccc

SEQ ID NO: 9891 - DNA, 45 bp, Homo Sapiens
ccaaaacatcagattgtgaatctgacaacagaggcttacgacccc

SEQ ID NO: 9892 - DNA, 46 bp, Homo Sapiens
ccaaaacatcagattgtgaatctgacaacagaggcttacgacccct

SEQ ID NO: 9893 - DNA, 47 bp, Homo Sapiens
ccaaaacatcagattgtgaatctgacaacagaggcttacgacccctt

SEQ ID NO: 9894 - DNA, 48 bp, Homo Sapiens
ccaaaacatcagattgtgaatctgacaacagaggcttacgacccctta

SEQ ID NO: 9895 - DNA, 16 bp, Homo Sapiens
ccaaataaaagtacca

SEQ ID NO: 9896 - DNA, 16 bp, Homo Sapiens
ccaacacctctttaca

SEQ ID NO: 9897 - DNA, 17 bp, Homo Sapiens
ccaacacctctttacag

SEQ ID NO: 9898 - DNA, 18 bp, Homo Sapiens
ccaacacctctttacagt

SEQ ID NO: 9899 - DNA, 19 bp, Homo Sapiens
ccaacacctctttacagtg

SEQ ID NO: 9900 - DNA, 20 bp, Homo Sapiens
ccaacacctctttacagtga

SEQ ID NO: 9901 - DNA, 21 bp, Homo Sapiens
ccaacacctctttacagtgac

SEQ ID NO: 9902 - DNA, 22 bp, Homo Sapiens
ccaacacctctttacagtgacc

SEQ ID NO: 9903 - DNA, 23 bp, Homo Sapiens
ccaacacctctttacagtgacca

SEQ ID NO: 9904 - DNA, 16 bp, Homo Sapiens
ccaacttacacttagg

SEQ ID NO: 9905 - DNA, 17 bp, Homo Sapiens
ccaacttacacttagga

SEQ ID NO: 9906 - DNA, 18 bp, Homo Sapiens
ccaacttacacttaggag

SEQ ID NO: 9907 - DNA, 19 bp, Homo Sapiens
ccaacttacacttaggaga

SEQ ID NO: 9908 - DNA, 20 bp, Homo Sapiens
ccaacttacacttaggagat

SEQ ID NO: 9909 - DNA, 21 bp, Homo Sapiens
ccaacttacacttaggagatt

SEQ ID NO: 9910 - DNA, 22 bp, Homo Sapiens
ccaacttacacttaggagattt

SEQ ID NO: 9911 - DNA, 23 bp, Homo Sapiens
ccaacttacacttaggagatttc

SEQ ID NO: 9912 - DNA, 24 bp, Homo Sapiens
ccaacttacacttaggagatttca

SEQ ID NO: 9913 - DNA, 25 bp, Homo Sapiens
ccaacttacacttaggagatttcaa

SEQ ID NO: 9914 - DNA, 26 bp, Homo Sapiens
ccaacttacacttaggagatttcaac

SEQ ID NO: 9915 - DNA, 27 bp, Homo Sapiens
ccaacttacacttaggagatttcaact

SEQ ID NO: 9916 - DNA, 28 bp, Homo Sapiens
ccaacttacacttaggagatttcaactt

SEQ ID NO: 9917 - DNA, 29 bp, Homo Sapiens
ccaacttacacttaggagatttcaactta

SEQ ID NO: 9918 - DNA, 30 bp, Homo Sapiens
ccaacttacacttaggagatttcaacttaa

SEQ ID NO: 9919 - DNA, 31 bp, Homo Sapiens
ccaacttacacttaggagatttcaacttaac

SEQ ID NO: 9920 - DNA, 32 bp, Homo Sapiens
ccaacttacacttaggagatttcaacttaact

SEQ ID NO: 9921 - DNA, 33 bp, Homo Sapiens
ccaacttacacttaggagatttcaacttaactt

SEQ ID NO: 9922 - DNA, 34 bp, Homo Sapiens
ccaacttacacttaggagatttcaacttaacttg

SEQ ID NO: 9923 - DNA, 35 bp, Homo Sapiens
ccaacttacacttaggagatttcaacttaacttga

SEQ ID NO: 9924 - DNA, 36 bp, Homo Sapiens
ccaacttacacttaggagatttcaacttaacttgac

SEQ ID NO: 9925 - DNA, 37 bp, Homo Sapiens
ccaacttacacttaggagatttcaacttaacttgacc

SEQ ID NO: 9926 - DNA, 38 bp, Homo Sapiens
ccaacttacacttaggagatttcaacttaacttgaccg

SEQ ID NO: 9927 - DNA, 39 bp, Homo Sapiens
ccaacttacacttaggagatttcaacttaacttgaccgc

SEQ ID NO: 9928 - DNA, 40 bp, Homo Sapiens
ccaacttacacttaggagatttcaacttaacttgaccgct

SEQ ID NO: 9929 - DNA, 41 bp, Homo Sapiens
ccaacttacacttaggagatttcaacttaacttgaccgctc

SEQ ID NO: 9930 - DNA, 42 bp, Homo Sapiens
ccaacttacacttaggagatttcaacttaacttgaccgctct

SEQ ID NO: 9931 - DNA, 43 bp, Homo Sapiens
ccaacttacacttaggagatttcaacttaacttgaccgctctg

SEQ ID NO: 9932 - DNA, 44 bp, Homo Sapiens
ccaacttacacttaggagatttcaacttaacttgaccgctctga

SEQ ID NO: 9933 - DNA, 45 bp, Homo Sapiens
ccaacttacacttaggagatttcaacttaacttgaccgctctgac

SEQ ID NO: 9934 - DNA, 46 bp, Homo Sapiens
ccaacttacacttaggagatttcaacttaacttgaccgctctgacc

SEQ ID NO: 9935 - DNA, 47 bp, Homo Sapiens
ccaacttacacttaggagatttcaacttaacttgaccgctctgacca

SEQ ID NO: 9936 - DNA, 31 bp, Homo Sapiens
ccaagagccttcaaagccctcagtaagttgc

SEQ ID NO: 9937 - DNA, 36 bp, Homo Sapiens
ccaagaggtcccgggttcaaatcccggacgagcccc

SEQ ID NO: 9938 - DNA, 17 bp, Homo Sapiens
ccaagcagttgacccgg

SEQ ID NO: 9939 - DNA, 18 bp, Homo Sapiens
ccaagcagttgacccggg

SEQ ID NO: 9940 - DNA, 19 bp, Homo Sapiens
ccaagcagttgacccgggt

SEQ ID NO: 9941 - DNA, 21 bp, Homo Sapiens
ccaagcagttgacccgggttc

SEQ ID NO: 9942 - DNA, 23 bp, Homo Sapiens
ccaagcagttgacccgggttcga

SEQ ID NO: 9943 - DNA, 31 bp, Homo Sapiens
ccaagcagttgacccgggttcgattcccggc

SEQ ID NO: 9944 - DNA, 32 bp, Homo Sapiens
ccaagcagttgacccgggttcgattcccggcc

SEQ ID NO: 9945 - DNA, 36 bp, Homo Sapiens
ccaagcagttgacccgggttcgattcccggccaacg

SEQ ID NO: 9946 - DNA, 40 bp, Homo Sapiens
ccaagcagttgacccgggttcgattcccggccaacgcacc

SEQ ID NO: 9947 - DNA, 16 bp, Homo Sapiens
ccaaggtcgcgggttc

SEQ ID NO: 9948 - DNA, 17 bp, Homo Sapiens
ccaaggtcgcgggttcg

SEQ ID NO: 9949 - DNA, 31 bp, Homo Sapiens
ccaaggtcgcgggttcgaaccccgtacgggc

SEQ ID NO: 9950 - DNA, 35 bp, Homo Sapiens
ccaaggtcgcgggttcgaaccccgtacgggccacc

SEQ ID NO: 9951 - DNA, 20 bp, Homo Sapiens
ccaaggtcgcgggttcgatc

SEQ ID NO: 9952 - DNA, 31 bp, Homo Sapiens
ccaaggtcgcgggttcgatccccgtacgggc

SEQ ID NO: 9953 - DNA, 32 bp, Homo Sapiens
ccaaggtcgcgggttcgatccccgtacgggcc

SEQ ID NO: 9954 - DNA, 33 bp, Homo Sapiens
ccaaggtcgcgggttcgatccccgtacgggcca

SEQ ID NO: 9955 - DNA, 34 bp, Homo Sapiens
ccaaggtcgcgggttcgatccccgtacgggccac

SEQ ID NO: 9956 - DNA, 35 bp, Homo Sapiens
ccaaggtcgcgggttcgatccccgtacgggccacc

SEQ ID NO: 9957 - DNA, 36 bp, Homo Sapiens
ccaaggtcgcgggttcgatccccgtacgggccacca

SEQ ID NO: 9958 - DNA, 35 bp, Homo Sapiens
ccaaggtcgcgggttcgatccccgtactggccacc

SEQ ID NO: 9959 - DNA, 36 bp, Homo Sapiens
ccaaggtcgcgggttcgatccccgtactggccacca

SEQ ID NO: 9960 - DNA, 25 bp, Homo Sapiens
ccaatggacatatgtccgcgtgggt

SEQ ID NO: 9961 - DNA, 17 bp, Homo Sapiens
ccaatggaggcgtgggt

SEQ ID NO: 9962 - DNA, 18 bp, Homo Sapiens
ccaatggaggcgtgggtt

SEQ ID NO: 9963 - DNA, 29 bp, Homo Sapiens
ccaatggaggcgtgggttcgaatcccact

SEQ ID NO: 9964 - DNA, 33 bp, Homo Sapiens
ccaatggaggcgtgggttcgaatcccacttctg

SEQ ID NO: 9965 - DNA, 36 bp, Homo Sapiens
ccaatggaggcgtgggttcgaatcccacttctgaca

SEQ ID NO: 9966 - DNA, 37 bp, Homo Sapiens
ccaatggaggcgtgggttcgaatcccacttctgacac

SEQ ID NO: 9967 - DNA, 38 bp, Homo Sapiens
ccaatggaggcgtgggttcgaatcccacttctgacacc

SEQ ID NO: 9968 - DNA, 39 bp, Homo Sapiens
ccaatggaggcgtgggttcgaatcccacttctgacacca

SEQ ID NO: 9969 - DNA, 19 bp, Homo Sapiens
ccaattaactagttttgac

SEQ ID NO: 9970 - DNA, 22 bp, Homo Sapiens
ccaattaactagttttgacaac

SEQ ID NO: 9971 - DNA, 23 bp, Homo Sapiens
ccaattaactagttttgacaaca

SEQ ID NO: 9972 - DNA, 35 bp, Homo Sapiens
ccaattaactagttttgacaacattcaaaaaagag

SEQ ID NO: 9973 - DNA, 37 bp, Homo Sapiens
ccaattaactagttttgacaacattcaaaaaagagta

SEQ ID NO: 9974 - DNA, 38 bp, Homo Sapiens
ccaattaactagttttgacaacattcaaaaaagagtac

SEQ ID NO: 9975 - DNA, 39 bp, Homo Sapiens
ccaattaactagttttgacaacattcaaaaaagagtacc

SEQ ID NO: 9976 - DNA, 40 bp, Homo Sapiens
ccaattaactagttttgacaacattcaaaaaagagtacca

SEQ ID NO: 9977 - DNA, 16 bp, Homo Sapiens
ccacatggtctagcgg

SEQ ID NO: 9978 - DNA, 17 bp, Homo Sapiens
ccacatggtctagcggt

SEQ ID NO: 9979 - DNA, 20 bp, Homo Sapiens
ccacatggtctagcggttag

SEQ ID NO: 9980 - DNA, 23 bp, Homo Sapiens
ccacatggtctagcggttaggat

SEQ ID NO: 9981 - DNA, 24 bp, Homo Sapiens
ccacatggtctagcggttaggatt

SEQ ID NO: 9982 - DNA, 25 bp, Homo Sapiens
ccacatggtctagcggttaggattc

SEQ ID NO: 9983 - DNA, 26 bp, Homo Sapiens
ccacatggtctagcggttaggattcc

SEQ ID NO: 9984 - DNA, 27 bp, Homo Sapiens
ccacatggtctagcggttaggattcct

SEQ ID NO: 9985 - DNA, 28 bp, Homo Sapiens
ccacatggtctagcggttaggattcctg

SEQ ID NO: 9986 - DNA, 29 bp, Homo Sapiens
ccacatggtctagcggttaggattcctgg

SEQ ID NO: 9987 - DNA, 30 bp, Homo Sapiens
ccacatggtctagcggttaggattcctggt

SEQ ID NO: 9988 - DNA, 31 bp, Homo Sapiens
ccacatggtctagcggttaggattcctggtt

SEQ ID NO: 9989 - DNA, 32 bp, Homo Sapiens
ccacatggtctagcggttaggattcctggttt

SEQ ID NO: 9990 - DNA, 33 bp, Homo Sapiens
ccacatggtctagcggttaggattcctggtttt

SEQ ID NO: 9991 - DNA, 34 bp, Homo Sapiens
ccacatggtctagcggttaggattcctggttttc

SEQ ID NO: 9992 - DNA, 35 bp, Homo Sapiens
ccacatggtctagcggttaggattcctggttttca

SEQ ID NO: 9993 - DNA, 36 bp, Homo Sapiens
ccacatggtctagcggttaggattcctggttttcac

SEQ ID NO: 9994 - DNA, 37 bp, Homo Sapiens
ccacatggtctagcggttaggattcctggttttcacc

SEQ ID NO: 9995 - DNA, 38 bp, Homo Sapiens
ccacatggtctagcggttaggattcctggttttcaccc

SEQ ID NO: 9996 - DNA, 39 bp, Homo Sapiens
ccacatggtctagcggttaggattcctggttttcaccca

SEQ ID NO: 9997 - DNA, 40 bp, Homo Sapiens
ccacatggtctagcggttaggattcctggttttcacccag

SEQ ID NO: 9998 - DNA, 48 bp, Homo Sapiens
ccacatggtctagcggttaggattcctggttttcacccaggcggcccg

SEQ ID NO: 9999 - DNA, 16 bp, Homo Sapiens
ccacccagggacgcca

SEQ ID NO: 10000 - DNA, 40 bp, Homo Sapiens
ccacgcgggagacccgggttcaattcccggccaatgcacc

SEQ ID NO: 10001 - DNA, 16 bp, Homo Sapiens
ccacgcgggaggcccg

SEQ ID NO: 10002 - DNA, 17 bp, Homo Sapiens
ccacgcgggaggcccgg

SEQ ID NO: 10003 - DNA, 18 bp, Homo Sapiens
ccacgcgggaggcccggg

SEQ ID NO: 10004 - DNA, 19 bp, Homo Sapiens
ccacgcgggaggcccgggt

SEQ ID NO: 10005 - DNA, 22 bp, Homo Sapiens
ccacgcgggaggcccgggttcg

SEQ ID NO: 10006 - DNA, 32 bp, Homo Sapiens
ccacgcgggaggcccgggttcgattcccggcc

SEQ ID NO: 10007 - DNA, 33 bp, Homo Sapiens
ccacgcgggaggcccgggttcgattcccggcca

SEQ ID NO: 10008 - DNA, 35 bp, Homo Sapiens
ccacgcgggaggcccgggttcgattcccggccaat

SEQ ID NO: 10009 - DNA, 36 bp, Homo Sapiens
ccacgcgggaggcccgggttcgattcccggccaatg

SEQ ID NO: 10010 - DNA, 37 bp, Homo Sapiens
ccacgcgggaggcccgggttcgattcccggccaatgc

SEQ ID NO: 10011 - DNA, 38 bp, Homo Sapiens
ccacgcgggaggcccgggttcgattcccggccaatgca

SEQ ID NO: 10012 - DNA, 40 bp, Homo Sapiens
ccacgcgggaggcccgggttcgattcccggccaatgcacc

SEQ ID NO: 10013 - DNA, 41 bp, Homo Sapiens
ccacgcgggaggcccgggttcgattcccggccaatgcacca

SEQ ID NO: 10014 - DNA, 36 bp, Homo Sapiens
ccacgcgggaggcccgggttcgattcccggcccatg

SEQ ID NO: 10015 - DNA, 40 bp, Homo Sapiens
ccacgcgggaggcccgggttcgattcccggcccatgcacc

SEQ ID NO: 10016 - DNA, 41 bp, Homo Sapiens
ccacgcgggaggcccgggttcgattcccggcccatgcacca

SEQ ID NO: 10017 - DNA, 17 bp, Homo Sapiens
ccacgtggcctaatgga

SEQ ID NO: 10018 - DNA, 16 bp, Homo Sapiens
ccactgtaaagctaac

SEQ ID NO: 10019 - DNA, 17 bp, Homo Sapiens
ccactgtaaagctaact

SEQ ID NO: 10020 - DNA, 18 bp, Homo Sapiens
ccactgtaaagctaactt

SEQ ID NO: 10021 - DNA, 20 bp, Homo Sapiens
ccactgtaaagctaacttag

SEQ ID NO: 10022 - DNA, 21 bp, Homo Sapiens
ccactgtaaagctaacttagc

SEQ ID NO: 10023 - DNA, 22 bp, Homo Sapiens
ccactgtaaagctaacttagca

SEQ ID NO: 10024 - DNA, 24 bp, Homo Sapiens
ccactgtaaagctaacttagcatt

SEQ ID NO: 10025 - DNA, 25 bp, Homo Sapiens
ccactgtaaagctaacttagcatta

SEQ ID NO: 10026 - DNA, 27 bp, Homo Sapiens
ccactgtaaagctaacttagcattaac

SEQ ID NO: 10027 - DNA, 28 bp, Homo Sapiens
ccactgtaaagctaacttagcattaacc

SEQ ID NO: 10028 - DNA, 29 bp, Homo Sapiens
ccactgtaaagctaacttagcattaacct

SEQ ID NO: 10029 - DNA, 30 bp, Homo Sapiens
ccactgtaaagctaacttagcattaacctt

SEQ ID NO: 10030 - DNA, 31 bp, Homo Sapiens
ccactgtaaagctaacttagcattaaccttt

SEQ ID NO: 10031 - DNA, 32 bp, Homo Sapiens
ccactgtaaagctaacttagcattaacctttt

SEQ ID NO: 10032 - DNA, 33 bp, Homo Sapiens
ccactgtaaagctaacttagcattaacctttta

SEQ ID NO: 10033 - DNA, 34 bp, Homo Sapiens
ccactgtaaagctaacttagcattaaccttttaa

SEQ ID NO: 10034 - DNA, 35 bp, Homo Sapiens
ccactgtaaagctaacttagcattaaccttttaag

SEQ ID NO: 10035 - DNA, 36 bp, Homo Sapiens
ccactgtaaagctaacttagcattaaccttttaagt

SEQ ID NO: 10036 - DNA, 46 bp, Homo Sapiens
ccactgtaaagctaacttagcattaaccttttaagttaaagattaa

SEQ ID NO: 10037 - DNA, 48 bp, Homo Sapiens
ccactgtaaagctaacttagcattaaccttttaagttaaagattaaga

SEQ ID NO: 10038 - DNA, 16 bp, Homo Sapiens
ccagaggtcgatggat

SEQ ID NO: 10039 - DNA, 17 bp, Homo Sapiens
ccagaggtcgatggatc

SEQ ID NO: 10040 - DNA, 18 bp, Homo Sapiens
ccagaggtcgatggatcg

SEQ ID NO: 10041 - DNA, 22 bp, Homo Sapiens
ccagaggtcgatggatcgaaac

SEQ ID NO: 10042 - DNA, 23 bp, Homo Sapiens
ccagaggtcgatggatcgaaacc

SEQ ID NO: 10043 - DNA, 24 bp, Homo Sapiens
ccagaggtcgatggatcgaaacca

SEQ ID NO: 10044 - DNA, 25 bp, Homo Sapiens
ccagaggtcgatggatcgaaaccat

SEQ ID NO: 10045 - DNA, 16 bp, Homo Sapiens
ccagaggttccgggtt

SEQ ID NO: 10046 - DNA, 17 bp, Homo Sapiens
ccagaggttccgggttc

SEQ ID NO: 10047 - DNA, 18 bp, Homo Sapiens
ccagaggttccgggttcg

SEQ ID NO: 10048 - DNA, 34 bp, Homo Sapiens
ccagaggttccgggttcgagtcccggcagagatg

SEQ ID NO: 10049 - DNA, 35 bp, Homo Sapiens
ccagaggttccgggttcgagtcccggcagagatgc

SEQ ID NO: 10050 - DNA, 36 bp, Homo Sapiens
ccagaggttccgggttcgagtcccggcagagatgcc

SEQ ID NO: 10051 - DNA, 37 bp, Homo Sapiens
ccagaggttccgggttcgagtcccggcagagatgcca

SEQ ID NO: 10052 - DNA, 17 bp, Homo Sapiens
ccagagtgtagcttaac

SEQ ID NO: 10053 - DNA, 20 bp, Homo Sapiens
ccagagtgtagcttaacaca

SEQ ID NO: 10054 - DNA, 22 bp, Homo Sapiens
ccagagtgtagcttaacacaaa

SEQ ID NO: 10055 - DNA, 27 bp, Homo Sapiens
ccagagtgtagcttaacacaaagcacc

SEQ ID NO: 10056 - DNA, 28 bp, Homo Sapiens
ccagagtgtagcttaacacaaagcaccc

SEQ ID NO: 10057 - DNA, 29 bp, Homo Sapiens
ccagagtgtagcttaacacaaagcaccca

SEQ ID NO: 10058 - DNA, 30 bp, Homo Sapiens
ccagagtgtagcttaacacaaagcacccaa

SEQ ID NO: 10059 - DNA, 31 bp, Homo Sapiens
ccagagtgtagcttaacacaaagcacccaac

SEQ ID NO: 10060 - DNA, 32 bp, Homo Sapiens
ccagagtgtagcttaacacaaagcacccaact

SEQ ID NO: 10061 - DNA, 33 bp, Homo Sapiens
ccagagtgtagcttaacacaaagcacccaactt

SEQ ID NO: 10062 - DNA, 34 bp, Homo Sapiens
ccagagtgtagcttaacacaaagcacccaactta

SEQ ID NO: 10063 - DNA, 17 bp, Homo Sapiens
ccagatcagaaggctgc

SEQ ID NO: 10064 - DNA, 19 bp, Homo Sapiens
ccagatcagaaggctgcgt

SEQ ID NO: 10065 - DNA, 20 bp, Homo Sapiens
ccagatcagaaggctgcgtg

SEQ ID NO: 10066 - DNA, 22 bp, Homo Sapiens
ccagatcagaaggctgcgtgtt

SEQ ID NO: 10067 - DNA, 23 bp, Homo Sapiens
ccagatcagaaggctgcgtgttc

SEQ ID NO: 10068 - DNA, 24 bp, Homo Sapiens
ccagatcagaaggctgcgtgttcg

SEQ ID NO: 10069 - DNA, 29 bp, Homo Sapiens
ccagatcagaaggctgcgtgttcgaatca

SEQ ID NO: 10070 - DNA, 33 bp, Homo Sapiens
ccagatcagaaggctgcgtgttcgaatcacgtc

SEQ ID NO: 10071 - DNA, 39 bp, Homo Sapiens
ccagatcagaaggctgcgtgttcgaatcacgtcggggtc

SEQ ID NO: 10072 - DNA, 17 bp, Homo Sapiens
ccagatcagaaggttgc

SEQ ID NO: 10073 - DNA, 20 bp, Homo Sapiens
ccagatcagaaggttgcgtg

SEQ ID NO: 10074 - DNA, 23 bp, Homo Sapiens
ccagatcagaaggttgcgtgttc

SEQ ID NO: 10075 - DNA, 24 bp, Homo Sapiens
ccagatcagaaggttgcgtgttca

SEQ ID NO: 10076 - DNA, 29 bp, Homo Sapiens
ccagatcagaaggttgcgtgttcaaatca

SEQ ID NO: 10077 - DNA, 17 bp, Homo Sapiens
ccagcaatccgagttcg

SEQ ID NO: 10078 - DNA, 31 bp, Homo Sapiens
ccagcaatccgagttcgaatctcggtgggac

SEQ ID NO: 10079 - DNA, 33 bp, Homo Sapiens
ccagcaatccgagttcgaatctcggtgggacct

SEQ ID NO: 10080 - DNA, 34 bp, Homo Sapiens
ccagcaatccgagttcgaatctcggtgggacctc

SEQ ID NO: 10081 - DNA, 35 bp, Homo Sapiens
ccagcaatccgagttcgaatctcggtgggacctcc

SEQ ID NO: 10082 - DNA, 16 bp, Homo Sapiens
ccagcgatccgagttc

SEQ ID NO: 10083 - DNA, 17 bp, Homo Sapiens
ccagcgatccgagttca

SEQ ID NO: 10084 - DNA, 21 bp, Homo Sapiens
ccagcgatccgagttcaaatc

SEQ ID NO: 10085 - DNA, 27 bp, Homo Sapiens
ccagcgatccgagttcaaatctcggtg

SEQ ID NO: 10086 - DNA, 31 bp, Homo Sapiens
ccagcgatccgagttcaaatctcggtggaac

SEQ ID NO: 10087 - DNA, 32 bp, Homo Sapiens
ccagcgatccgagttcaaatctcggtggaacc

SEQ ID NO: 10088 - DNA, 33 bp, Homo Sapiens
ccagcgatccgagttcaaatctcggtggaacct

SEQ ID NO: 10089 - DNA, 34 bp, Homo Sapiens
ccagcgatccgagttcaaatctcggtggaacctc

SEQ ID NO: 10090 - DNA, 35 bp, Homo Sapiens
ccagcgatccgagttcaaatctcggtggaacctcc

SEQ ID NO: 10091 - DNA, 36 bp, Homo Sapiens
ccagcgatccgagttcaaatctcggtggaacctcca

SEQ ID NO: 10092 - DNA, 31 bp, Homo Sapiens
ccagcgatccgagttcaaatctcggtgggac

SEQ ID NO: 10093 - DNA, 32 bp, Homo Sapiens
ccagcgatccgagttcaaatctcggtgggacc

SEQ ID NO: 10094 - DNA, 33 bp, Homo Sapiens
ccagcgatccgagttcaaatctcggtgggacct

SEQ ID NO: 10095 - DNA, 34 bp, Homo Sapiens
ccagcgatccgagttcaaatctcggtgggacctc

SEQ ID NO: 10096 - DNA, 35 bp, Homo Sapiens
ccagcgatccgagttcaaatctcggtgggacctcc

SEQ ID NO: 10097 - DNA, 34 bp, Homo Sapiens
ccagcgatccgagttcaagtctcggtggaacctc

SEQ ID NO: 10098 - DNA, 17 bp, Homo Sapiens
ccagcgatccgagttcg

SEQ ID NO: 10099 - DNA, 23 bp, Homo Sapiens
ccagcgatccgagttcgagtctc

SEQ ID NO: 10100 - DNA, 33 bp, Homo Sapiens
ccagcgatccgagttcgagtctcggtggaacct

SEQ ID NO: 10101 - DNA, 34 bp, Homo Sapiens
ccagcgatccgagttcgagtctcggtggaacctc

SEQ ID NO: 10102 - DNA, 35 bp, Homo Sapiens
ccagcgatccgagttcgagtctcggtggaacctcc

SEQ ID NO: 10103 - DNA, 30 bp, Homo Sapiens
ccagctagctcagtcggtagagcatgagac

SEQ ID NO: 10104 - DNA, 31 bp, Homo Sapiens
ccagctagctcagtcggtagagcatgagact

SEQ ID NO: 10105 - DNA, 32 bp, Homo Sapiens
ccagctagctcagtcggtagagcatgagactc

SEQ ID NO: 10106 - DNA, 40 bp, Homo Sapiens
ccagctagctcagtcggtagagcatgagactcttaatctc

SEQ ID NO: 10107 - DNA, 16 bp, Homo Sapiens
ccagctttggggggtt

SEQ ID NO: 10108 - DNA, 17 bp, Homo Sapiens
ccagctttggggggttc

SEQ ID NO: 10109 - DNA, 18 bp, Homo Sapiens
ccagctttggggggttcg

SEQ ID NO: 10110 - DNA, 27 bp, Homo Sapiens
ccagctttggggggttcgattccttcc

SEQ ID NO: 10111 - DNA, 28 bp, Homo Sapiens
ccagctttggggggttcgattccttcct

SEQ ID NO: 10112 - DNA, 29 bp, Homo Sapiens
ccagctttggggggttcgattccttcctt

SEQ ID NO: 10113 - DNA, 30 bp, Homo Sapiens
ccagctttggggggttcgattccttccttt

SEQ ID NO: 10114 - DNA, 31 bp, Homo Sapiens
ccagctttggggggttcgattccttcctttt

SEQ ID NO: 10115 - DNA, 35 bp, Homo Sapiens
ccagctttggggggttcgattccttccttttttgc

SEQ ID NO: 10116 - DNA, 36 bp, Homo Sapiens
ccagctttggggggttcgattccttccttttttgcc

SEQ ID NO: 10117 - DNA, 37 bp, Homo Sapiens
ccagctttggggggttcgattccttccttttttgcca

SEQ ID NO: 10118 - DNA, 18 bp, Homo Sapiens
ccaggatggccgagtggt

SEQ ID NO: 10119 - DNA, 19 bp, Homo Sapiens
ccaggatggccgagtggtt

SEQ ID NO: 10120 - DNA, 22 bp, Homo Sapiens
ccaggatggccgagtggttaag

SEQ ID NO: 10121 - DNA, 24 bp, Homo Sapiens
ccaggatggccgagtggttaaggc

SEQ ID NO: 10122 - DNA, 33 bp, Homo Sapiens
ccaggatggccgagtggttaaggcgttggactt

SEQ ID NO: 10123 - DNA, 17 bp, Homo Sapiens
ccaggcggcccgggttc

SEQ ID NO: 10124 - DNA, 22 bp, Homo Sapiens
ccaggcggcccgggttcgactc

SEQ ID NO: 10125 - DNA, 26 bp, Homo Sapiens
ccaggcggcccgggttcgactcccgg

SEQ ID NO: 10126 - DNA, 27 bp, Homo Sapiens
ccaggcggcccgggttcgactcccggt

SEQ ID NO: 10127 - DNA, 28 bp, Homo Sapiens
ccaggcggcccgggttcgactcccggtg

SEQ ID NO: 10128 - DNA, 29 bp, Homo Sapiens
ccaggcggcccgggttcgactcccggtgt

SEQ ID NO: 10129 - DNA, 30 bp, Homo Sapiens
ccaggcggcccgggttcgactcccggtgtg

SEQ ID NO: 10130 - DNA, 31 bp, Homo Sapiens
ccaggcggcccgggttcgactcccggtgtgg

SEQ ID NO: 10131 - DNA, 32 bp, Homo Sapiens
ccaggcggcccgggttcgactcccggtgtggg

SEQ ID NO: 10132 - DNA, 33 bp, Homo Sapiens
ccaggcggcccgggttcgactcccggtgtggga

SEQ ID NO: 10133 - DNA, 34 bp, Homo Sapiens
ccaggcggcccgggttcgactcccggtgtgggaa

SEQ ID NO: 10134 - DNA, 35 bp, Homo Sapiens
ccaggcggcccgggttcgactcccggtgtgggaac

SEQ ID NO: 10135 - DNA, 36 bp, Homo Sapiens
ccaggcggcccgggttcgactcccggtgtgggaacc

SEQ ID NO: 10136 - DNA, 37 bp, Homo Sapiens
ccaggcggcccgggttcgactcccggtgtgggaacca

SEQ ID NO: 10137 - DNA, 16 bp, Homo Sapiens
ccagggattgtgggtt

SEQ ID NO: 10138 - DNA, 17 bp, Homo Sapiens
ccagggattgtgggttc

SEQ ID NO: 10139 - DNA, 18 bp, Homo Sapiens
ccagggattgtgggttcg

SEQ ID NO: 10140 - DNA, 34 bp, Homo Sapiens
ccagggattgtgggttcgagtcccacccggggta

SEQ ID NO: 10141 - DNA, 36 bp, Homo Sapiens
ccagggattgtgggttcgagtcccacccggggtacc

SEQ ID NO: 10142 - DNA, 37 bp, Homo Sapiens
ccagggattgtgggttcgagtcccacccggggtacca

SEQ ID NO: 10143 - DNA, 36 bp, Homo Sapiens
ccagggattgtgggttcgagtcccacctggggtacc

SEQ ID NO: 10144 - DNA, 36 bp, Homo Sapiens
ccagggattgtgggttcgagtcccacctggggtgcc

SEQ ID NO: 10145 - DNA, 37 bp, Homo Sapiens
ccagggattgtgggttcgagtcccacctggggtgcca

SEQ ID NO: 10146 - DNA, 27 bp, Homo Sapiens
ccagggattgtgggttcgagtcccatc

SEQ ID NO: 10147 - DNA, 34 bp, Homo Sapiens
ccagggattgtgggttcgagtcccatctggggtg

SEQ ID NO: 10148 - DNA, 35 bp, Homo Sapiens
ccagggattgtgggttcgagtcccatctggggtgc

SEQ ID NO: 10149 - DNA, 36 bp, Homo Sapiens
ccagggattgtgggttcgagtcccatctggggtgcc

SEQ ID NO: 10150 - DNA, 37 bp, Homo Sapiens
ccagggattgtgggttcgagtcccatctggggtgcca

SEQ ID NO: 10151 - DNA, 16 bp, Homo Sapiens
ccaggggtcgcgagtt

SEQ ID NO: 10152 - DNA, 17 bp, Homo Sapiens
ccaggggtcgcgagttc

SEQ ID NO: 10153 - DNA, 18 bp, Homo Sapiens
ccaggggtcgcgagttca

SEQ ID NO: 10154 - DNA, 32 bp, Homo Sapiens
ccaggggtcgcgagttcaaatctcgctggggc

SEQ ID NO: 10155 - DNA, 33 bp, Homo Sapiens
ccaggggtcgcgagttcaaatctcgctggggcc

SEQ ID NO: 10156 - DNA, 34 bp, Homo Sapiens
ccaggggtcgcgagttcaaatctcgctggggcct

SEQ ID NO: 10157 - DNA, 35 bp, Homo Sapiens
ccaggggtcgcgagttcaaatctcgctggggcctc

SEQ ID NO: 10158 - DNA, 36 bp, Homo Sapiens
ccaggggtcgcgagttcaaatctcgctggggcctcc

SEQ ID NO: 10159 - DNA, 37 bp, Homo Sapiens
ccaggggtcgcgagttcaaatctcgctggggcctcca

SEQ ID NO: 10160 - DNA, 34 bp, Homo Sapiens
ccaggggtcgcgagttcaattctcgctggggcct

SEQ ID NO: 10161 - DNA, 35 bp, Homo Sapiens
ccaggggtcgcgagttcaattctcgctggggcctc

SEQ ID NO: 10162 - DNA, 36 bp, Homo Sapiens
ccaggggtcgcgagttcaattctcgctggggcctcc

SEQ ID NO: 10163 - DNA, 37 bp, Homo Sapiens
ccaggggtcgcgagttcaattctcgctggggcctcca

SEQ ID NO: 10164 - DNA, 34 bp, Homo Sapiens
ccaggggtcgcgagttcgatcctcgctggggcct

SEQ ID NO: 10165 - DNA, 36 bp, Homo Sapiens
ccaggggtcgcgagttcgatcctcgctggggcctcc

SEQ ID NO: 10166 - DNA, 16 bp, Homo Sapiens
ccagggtcgtgggttc

SEQ ID NO: 10167 - DNA, 17 bp, Homo Sapiens
ccagggtcgtgggttcg

SEQ ID NO: 10168 - DNA, 29 bp, Homo Sapiens
ccagggtcgtgggttcgagccccacgttg

SEQ ID NO: 10169 - DNA, 32 bp, Homo Sapiens
ccagggtcgtgggttcgagccccacgttgggc

SEQ ID NO: 10170 - DNA, 33 bp, Homo Sapiens
ccagggtcgtgggttcgagccccacgttgggcg

SEQ ID NO: 10171 - DNA, 34 bp, Homo Sapiens
ccagggtcgtgggttcgagccccacgttgggcgc

SEQ ID NO: 10172 - DNA, 35 bp, Homo Sapiens
ccagggtcgtgggttcgagccccacgttgggcgcc

SEQ ID NO: 10173 - DNA, 36 bp, Homo Sapiens
ccagggtcgtgggttcgagccccacgttgggcgcca

SEQ ID NO: 10174 - DNA, 26 bp, Homo Sapiens
ccagggttcaagtccctgtccaggcg

SEQ ID NO: 10175 - DNA, 28 bp, Homo Sapiens
ccagggttcaagtccctgtccaggcgcc

SEQ ID NO: 10176 - DNA, 25 bp, Homo Sapiens
ccagggttcaagtccctgttcaggc

SEQ ID NO: 10177 - DNA, 26 bp, Homo Sapiens
ccagggttcaagtccctgttcaggcg

SEQ ID NO: 10178 - DNA, 24 bp, Homo Sapiens
ccagggttcaagtccctgttcggg

SEQ ID NO: 10179 - DNA, 25 bp, Homo Sapiens
ccagggttcaagtccctgttcgggc

SEQ ID NO: 10180 - DNA, 26 bp, Homo Sapiens
ccagggttcaagtccctgttcgggcg

SEQ ID NO: 10181 - DNA, 27 bp, Homo Sapiens
ccagggttcaagtccctgttcgggcgc

SEQ ID NO: 10182 - DNA, 28 bp, Homo Sapiens
ccagggttcaagtccctgttcgggcgcc

SEQ ID NO: 10183 - DNA, 29 bp, Homo Sapiens
ccagggttcaagtccctgttcgggcgcca

SEQ ID NO: 10184 - DNA, 27 bp, Homo Sapiens
ccaggtggcccgggttcgactcccggt

SEQ ID NO: 10185 - DNA, 28 bp, Homo Sapiens
ccaggtggcccgggttcgactcccggta

SEQ ID NO: 10186 - DNA, 29 bp, Homo Sapiens
ccaggtggcccgggttcgactcccggtat

SEQ ID NO: 10187 - DNA, 30 bp, Homo Sapiens
ccaggtggcccgggttcgactcccggtatg

SEQ ID NO: 10188 - DNA, 31 bp, Homo Sapiens
ccaggtggcccgggttcgactcccggtatgg

SEQ ID NO: 10189 - DNA, 32 bp, Homo Sapiens
ccaggtggcccgggttcgactcccggtatggg

SEQ ID NO: 10190 - DNA, 33 bp, Homo Sapiens
ccaggtggcccgggttcgactcccggtatggga

SEQ ID NO: 10191 - DNA, 34 bp, Homo Sapiens
ccaggtggcccgggttcgactcccggtatgggaa

SEQ ID NO: 10192 - DNA, 35 bp, Homo Sapiens
ccaggtggcccgggttcgactcccggtatgggaac

SEQ ID NO: 10193 - DNA, 36 bp, Homo Sapiens
ccaggtggcccgggttcgactcccggtatgggaacc

SEQ ID NO: 10194 - DNA, 37 bp, Homo Sapiens
ccaggtggcccgggttcgactcccggtatgggaacca

SEQ ID NO: 10195 - DNA, 16 bp, Homo Sapiens
ccaggttcgactcctg

SEQ ID NO: 10196 - DNA, 27 bp, Homo Sapiens
ccaggttcgactcctggctggctcgcc

SEQ ID NO: 10197 - DNA, 44 bp, Homo Sapiens
ccagtctcttcggaggcgtgggttcgaatcccaccgctgccacc

SEQ ID NO: 10198 - DNA, 16 bp, Homo Sapiens
ccagtctcttcggggg

SEQ ID NO: 10199 - DNA, 23 bp, Homo Sapiens
ccagtctcttcgggggcgtgggt

SEQ ID NO: 10200 - DNA, 24 bp, Homo Sapiens
ccagtctcttcgggggcgtgggtt

SEQ ID NO: 10201 - DNA, 41 bp, Homo Sapiens
ccagtctcttcgggggcgtgggttcgaatcccaccgctgcc

SEQ ID NO: 10202 - DNA, 42 bp, Homo Sapiens
ccagtctcttcgggggcgtgggttcgaatcccaccgctgcca

SEQ ID NO: 10203 - DNA, 43 bp, Homo Sapiens
ccagtctcttcgggggcgtgggttcgaatcccaccgctgccac

SEQ ID NO: 10204 - DNA, 44 bp, Homo Sapiens
ccagtctcttcgggggcgtgggttcgaatcccaccgctgccacc

SEQ ID NO: 10205 - DNA, 27 bp, Homo Sapiens
ccagtcttgtaaaccggagatgaaaac

SEQ ID NO: 10206 - DNA, 16 bp, Homo Sapiens
ccagtggcctaatgga

SEQ ID NO: 10207 - DNA, 17 bp, Homo Sapiens
ccagtggcctaatggat

SEQ ID NO: 10208 - DNA, 31 bp, Homo Sapiens
ccagtggcctaatggataaggcatcagcctc

SEQ ID NO: 10209 - DNA, 32 bp, Homo Sapiens
ccagtggcctaatggataaggcatcagcctcc

SEQ ID NO: 10210 - DNA, 33 bp, Homo Sapiens
ccagtggcctaatggataaggcatcagcctccg

SEQ ID NO: 10211 - DNA, 33 bp, Homo Sapiens
ccagtggcgcaatcggttagcgcgcggtactta

SEQ ID NO: 10212 - DNA, 16 bp, Homo Sapiens
ccagtggcgcaatgga

SEQ ID NO: 10213 - DNA, 20 bp, Homo Sapiens
ccagtggcgcaatggataac

SEQ ID NO: 10214 - DNA, 25 bp, Homo Sapiens
ccagttgattagggtgcttagctgt

SEQ ID NO: 10215 - DNA, 26 bp, Homo Sapiens
ccagttgattagggtgcttagctgtt

SEQ ID NO: 10216 - DNA, 45 bp, Homo Sapiens
ccagttgattagggtgcttagctgttaactaagtgtttgtgggtt

SEQ ID NO: 10217 - DNA, 20 bp, Homo Sapiens
ccataacccagaggtcgatg

SEQ ID NO: 10218 - DNA, 22 bp, Homo Sapiens
ccataacccagaggtcgatgga

SEQ ID NO: 10219 - DNA, 23 bp, Homo Sapiens
ccataacccagaggtcgatggat

SEQ ID NO: 10220 - DNA, 25 bp, Homo Sapiens
ccataacccagaggtcgatggatcg

SEQ ID NO: 10221 - DNA, 41 bp, Homo Sapiens
ccataccccgaaaatgttggttatacccttcccgtactacc

SEQ ID NO: 10222 - DNA, 42 bp, Homo Sapiens
ccataccccgaaaatgttggttatacccttcccgtactacca

SEQ ID NO: 10223 - DNA, 25 bp, Homo Sapiens
ccatagctcaggggttagagcactg

SEQ ID NO: 10224 - DNA, 28 bp, Homo Sapiens
ccatagctcaggggttagagcactggtc

SEQ ID NO: 10225 - DNA, 25 bp, Homo Sapiens
ccatagctcagtggttagagcactg

SEQ ID NO: 10226 - DNA, 19 bp, Homo Sapiens
ccatagtgtagcggttatc

SEQ ID NO: 10227 - DNA, 27 bp, Homo Sapiens
ccatagtgtagcggttatcacgtctgc

SEQ ID NO: 10228 - DNA, 30 bp, Homo Sapiens
ccatagtgtagcggttatcacgtctgcttt

SEQ ID NO: 10229 - DNA, 32 bp, Homo Sapiens
ccatagtgtagcggttatcacgtctgctttac

SEQ ID NO: 10230 - DNA, 19 bp, Homo Sapiens
ccatagtgtagtggttatc

SEQ ID NO: 10231 - DNA, 28 bp, Homo Sapiens
ccatagtgtagtggttatcacatctgct

SEQ ID NO: 10232 - DNA, 29 bp, Homo Sapiens
ccatagtgtagtggttatcacatctgctt

SEQ ID NO: 10233 - DNA, 26 bp, Homo Sapiens
ccatagtgtagtggttatcacgtctg

SEQ ID NO: 10234 - DNA, 27 bp, Homo Sapiens
ccatagtgtagtggttatcacgtctgc

SEQ ID NO: 10235 - DNA, 28 bp, Homo Sapiens
ccatagtgtagtggttatcacgtctgct

SEQ ID NO: 10236 - DNA, 29 bp, Homo Sapiens
ccatagtgtagtggttatcacgtctgctt

SEQ ID NO: 10237 - DNA, 30 bp, Homo Sapiens
ccatagtgtagtggttatcacgtctgcttt

SEQ ID NO: 10238 - DNA, 31 bp, Homo Sapiens
ccatagtgtagtggttatcacgtctgcttta

SEQ ID NO: 10239 - DNA, 32 bp, Homo Sapiens
ccatagtgtagtggttatcacgtctgctttac

SEQ ID NO: 10240 - DNA, 23 bp, Homo Sapiens
ccatatggtctagcggttaggat

SEQ ID NO: 10241 - DNA, 24 bp, Homo Sapiens
ccatatggtctagcggttaggatt

SEQ ID NO: 10242 - DNA, 25 bp, Homo Sapiens
ccatatggtctagcggttaggattc

SEQ ID NO: 10243 - DNA, 26 bp, Homo Sapiens
ccatatggtctagcggttaggattcc

SEQ ID NO: 10244 - DNA, 27 bp, Homo Sapiens
ccatatggtctagcggttaggattcct

SEQ ID NO: 10245 - DNA, 28 bp, Homo Sapiens
ccatatggtctagcggttaggattcctg

SEQ ID NO: 10246 - DNA, 29 bp, Homo Sapiens
ccatatggtctagcggttaggattcctgg

SEQ ID NO: 10247 - DNA, 30 bp, Homo Sapiens
ccatatggtctagcggttaggattcctggt

SEQ ID NO: 10248 - DNA, 31 bp, Homo Sapiens
ccatatggtctagcggttaggattcctggtt

SEQ ID NO: 10249 - DNA, 32 bp, Homo Sapiens
ccatatggtctagcggttaggattcctggttt

SEQ ID NO: 10250 - DNA, 33 bp, Homo Sapiens
ccatatggtctagcggttaggattcctggtttt

SEQ ID NO: 10251 - DNA, 34 bp, Homo Sapiens
ccatatggtctagcggttaggattcctggttttc

SEQ ID NO: 10252 - DNA, 35 bp, Homo Sapiens
ccatatggtctagcggttaggattcctggttttca

SEQ ID NO: 10253 - DNA, 36 bp, Homo Sapiens
ccatatggtctagcggttaggattcctggttttcac

SEQ ID NO: 10254 - DNA, 37 bp, Homo Sapiens
ccatatggtctagcggttaggattcctggttttcacc

SEQ ID NO: 10255 - DNA, 38 bp, Homo Sapiens
ccatatggtctagcggttaggattcctggttttcaccc

SEQ ID NO: 10256 - DNA, 39 bp, Homo Sapiens
ccatatggtctagcggttaggattcctggttttcaccca

SEQ ID NO: 10257 - DNA, 40 bp, Homo Sapiens
ccatatggtctagcggttaggattcctggttttcacccag

SEQ ID NO: 10258 - DNA, 16 bp, Homo Sapiens
ccatcctctgctacca

SEQ ID NO: 10259 - DNA, 27 bp, Homo Sapiens
ccatgatcgtatagtggttagtactct

SEQ ID NO: 10260 - DNA, 28 bp, Homo Sapiens
ccatgatcgtatagtggttagtactctg

SEQ ID NO: 10261 - DNA, 29 bp, Homo Sapiens
ccatgatcgtatagtggttagtactctgc

SEQ ID NO: 10262 - DNA, 30 bp, Homo Sapiens
ccatgatcgtatagtggttagtactctgcg

SEQ ID NO: 10263 - DNA, 37 bp, Homo Sapiens
ccatggggttggcttgaaaccagctttggggggttcg

SEQ ID NO: 10264 - DNA, 25 bp, Homo Sapiens
ccatggtgtaatggtgagcactctg

SEQ ID NO: 10265 - DNA, 29 bp, Homo Sapiens
ccatggtgtaatggtgagcactctggact

SEQ ID NO: 10266 - DNA, 31 bp, Homo Sapiens
ccatggtgtaatggtgagcactctggactct

SEQ ID NO: 10267 - DNA, 32 bp, Homo Sapiens
ccatggtgtaatggtgagcactctggactctg

SEQ ID NO: 10268 - DNA, 33 bp, Homo Sapiens
ccatggtgtaatggtgagcactctggactctga

SEQ ID NO: 10269 - DNA, 38 bp, Homo Sapiens
ccatggtgtaatggtgagcactctggactctgaatcca

SEQ ID NO: 10270 - DNA, 24 bp, Homo Sapiens
ccatggtgtaatggttagcactct

SEQ ID NO: 10271 - DNA, 25 bp, Homo Sapiens
ccatggtgtaatggttagcactctg

SEQ ID NO: 10272 - DNA, 26 bp, Homo Sapiens
ccatggtgtaatggttagcactctgg

SEQ ID NO: 10273 - DNA, 28 bp, Homo Sapiens
ccatggtgtaatggttagcactctggac

SEQ ID NO: 10274 - DNA, 29 bp, Homo Sapiens
ccatggtgtaatggttagcactctggact

SEQ ID NO: 10275 - DNA, 30 bp, Homo Sapiens
ccatggtgtaatggttagcactctggactc

SEQ ID NO: 10276 - DNA, 31 bp, Homo Sapiens
ccatggtgtaatggttagcactctggactct

SEQ ID NO: 10277 - DNA, 32 bp, Homo Sapiens
ccatggtgtaatggttagcactctggactctg

SEQ ID NO: 10278 - DNA, 33 bp, Homo Sapiens
ccatggtgtaatggttagcactctggactctga

SEQ ID NO: 10279 - DNA, 34 bp, Homo Sapiens
ccatggtgtaatggttagcactctggactctgaa

SEQ ID NO: 10280 - DNA, 32 bp, Homo Sapiens
ccatggtgtaatggttagcactctggactttg

SEQ ID NO: 10281 - DNA, 37 bp, Homo Sapiens
ccatggtgtaatggttagcactctggactttgaatcc

SEQ ID NO: 10282 - DNA, 25 bp, Homo Sapiens
ccatgtctaacaacatggctttctc

SEQ ID NO: 10283 - DNA, 27 bp, Homo Sapiens
ccatgtctaacaacatggctttctcac

SEQ ID NO: 10284 - DNA, 28 bp, Homo Sapiens
ccatgtctaacaacatggctttctcacc

SEQ ID NO: 10285 - DNA, 29 bp, Homo Sapiens
ccatgtctaacaacatggctttctcacca

SEQ ID NO: 10286 - DNA, 16 bp, Homo Sapiens
ccattcttgcgacccg

SEQ ID NO: 10287 - DNA, 17 bp, Homo Sapiens
ccattcttgcgacccgg

SEQ ID NO: 10288 - DNA, 18 bp, Homo Sapiens
ccattcttgcgacccggg

SEQ ID NO: 10289 - DNA, 19 bp, Homo Sapiens
ccattcttgcgacccgggt

SEQ ID NO: 10290 - DNA, 20 bp, Homo Sapiens
ccattcttgcgacccgggtt

SEQ ID NO: 10291 - DNA, 34 bp, Homo Sapiens
ccattcttgcgacccgggttcgattcccgggcgg

SEQ ID NO: 10292 - DNA, 35 bp, Homo Sapiens
ccattcttgcgacccgggttcgattcccgggcggc

SEQ ID NO: 10293 - DNA, 36 bp, Homo Sapiens
ccattcttgcgacccgggttcgattcccgggcggcg

SEQ ID NO: 10294 - DNA, 37 bp, Homo Sapiens
ccattcttgcgacccgggttcgattcccgggcggcgc

SEQ ID NO: 10295 - DNA, 38 bp, Homo Sapiens
ccattcttgcgacccgggttcgattcccgggcggcgca

SEQ ID NO: 10296 - DNA, 39 bp, Homo Sapiens
ccattcttgcgacccgggttcgattcccgggcggcgcac

SEQ ID NO: 10297 - DNA, 40 bp, Homo Sapiens
ccattcttgcgacccgggttcgattcccgggcggcgcacc

SEQ ID NO: 10298 - DNA, 41 bp, Homo Sapiens
ccattcttgcgacccgggttcgattcccgggcggcgcacca

SEQ ID NO: 10299 - DNA, 24 bp, Homo Sapiens
ccattggggtttccccgcgcaggt

SEQ ID NO: 10300 - DNA, 16 bp, Homo Sapiens
ccattggtcttaggcc

SEQ ID NO: 10301 - DNA, 17 bp, Homo Sapiens
ccattggtcttaggccc

SEQ ID NO: 10302 - DNA, 18 bp, Homo Sapiens
ccattggtcttaggcccc

SEQ ID NO: 10303 - DNA, 19 bp, Homo Sapiens
ccattggtcttaggcccca

SEQ ID NO: 10304 - DNA, 22 bp, Homo Sapiens
ccattggtcttaggccccaaaa

SEQ ID NO: 10305 - DNA, 23 bp, Homo Sapiens
ccattggtcttaggccccaaaaa

SEQ ID NO: 10306 - DNA, 24 bp, Homo Sapiens
ccattggtcttaggccccaaaaat

SEQ ID NO: 10307 - DNA, 29 bp, Homo Sapiens
ccattggtcttaggccccaaaaattttgg

SEQ ID NO: 10308 - DNA, 37 bp, Homo Sapiens
ccattggtcttaggccccaaaaattttggtgcaactc

SEQ ID NO: 10309 - DNA, 38 bp, Homo Sapiens
ccattggtcttaggccccaaaaattttggtgcaactcc

SEQ ID NO: 10310 - DNA, 39 bp, Homo Sapiens
ccattggtcttaggccccaaaaattttggtgcaactcca

SEQ ID NO: 10311 - DNA, 41 bp, Homo Sapiens
ccattggtcttaggccccaaaaattttggtgcaactccaaa

SEQ ID NO: 10312 - DNA, 43 bp, Homo Sapiens
ccattggtcttaggccccaaaaattttggtgcaactccaaata

SEQ ID NO: 10313 - DNA, 19 bp, Homo Sapiens
ccattgtgctctgcacgcg

SEQ ID NO: 10314 - DNA, 45 bp, Homo Sapiens
ccattgtgctctgcacgcgtgggttcgaatcccatcctcgtcgcc

SEQ ID NO: 10315 - DNA, 24 bp, Homo Sapiens
ccattgtgctttgcacgcgtgggt

SEQ ID NO: 10316 - DNA, 44 bp, Homo Sapiens
ccattgtgctttgcacgcgtgggttcgaatcccatcctcgtcgc

SEQ ID NO: 10317 - DNA, 45 bp, Homo Sapiens
ccattgtgctttgcacgcgtgggttcgaatcccatcctcgtcgcc

SEQ ID NO: 10318 - DNA, 46 bp, Homo Sapiens
ccattgtgctttgcacgcgtgggttcgaatcccatcctcgtcgcca

SEQ ID NO: 10319 - DNA, 18 bp, Homo Sapiens
ccatttcataactttgtc

SEQ ID NO: 10320 - DNA, 19 bp, Homo Sapiens
ccatttcataactttgtca

SEQ ID NO: 10321 - DNA, 21 bp, Homo Sapiens
ccatttcataactttgtcaaa

SEQ ID NO: 10322 - DNA, 22 bp, Homo Sapiens
ccatttcataactttgtcaaag

SEQ ID NO: 10323 - DNA, 33 bp, Homo Sapiens
ccatttcataactttgtcaaagttaaattatag

SEQ ID NO: 10324 - DNA, 35 bp, Homo Sapiens
ccatttcataactttgtcaaagttaaattataggc

SEQ ID NO: 10325 - DNA, 36 bp, Homo Sapiens
ccatttcataactttgtcaaagttaaattataggct

SEQ ID NO: 10326 - DNA, 37 bp, Homo Sapiens
ccatttcataactttgtcaaagttaaattataggcta

SEQ ID NO: 10327 - DNA, 38 bp, Homo Sapiens
ccatttcataactttgtcaaagttaaattataggctaa

SEQ ID NO: 10328 - DNA, 39 bp, Homo Sapiens
ccatttcataactttgtcaaagttaaattataggctaaa

SEQ ID NO: 10329 - DNA, 22 bp, Homo Sapiens
cccaaaaattttggtgcaactc

SEQ ID NO: 10330 - DNA, 23 bp, Homo Sapiens
cccaaaaattttggtgcaactcc

SEQ ID NO: 10331 - DNA, 26 bp, Homo Sapiens
cccaaaaattttggtgcaactccaaa

SEQ ID NO: 10332 - DNA, 27 bp, Homo Sapiens
cccaaaaattttggtgcaactccaaat

SEQ ID NO: 10333 - DNA, 28 bp, Homo Sapiens
cccaaaaattttggtgcaactccaaata

SEQ ID NO: 10334 - DNA, 33 bp, Homo Sapiens
cccaaaaattttggtgcaactccaaataaaagt

SEQ ID NO: 10335 - DNA, 34 bp, Homo Sapiens
cccaaaaattttggtgcaactccaaataaaagta

SEQ ID NO: 10336 - DNA, 35 bp, Homo Sapiens
cccaaaaattttggtgcaactccaaataaaagtac

SEQ ID NO: 10337 - DNA, 36 bp, Homo Sapiens
cccaaaaattttggtgcaactccaaataaaagtacc

SEQ ID NO: 10338 - DNA, 37 bp, Homo Sapiens
cccaaaaattttggtgcaactccaaataaaagtacca

SEQ ID NO: 10339 - DNA, 16 bp, Homo Sapiens
cccaacttacacttag

SEQ ID NO: 10340 - DNA, 18 bp, Homo Sapiens
cccaacttacacttagga

SEQ ID NO: 10341 - DNA, 19 bp, Homo Sapiens
cccaacttacacttaggag

SEQ ID NO: 10342 - DNA, 20 bp, Homo Sapiens
cccaacttacacttaggaga

SEQ ID NO: 10343 - DNA, 21 bp, Homo Sapiens
cccaacttacacttaggagat

SEQ ID NO: 10344 - DNA, 22 bp, Homo Sapiens
cccaacttacacttaggagatt

SEQ ID NO: 10345 - DNA, 24 bp, Homo Sapiens
cccaacttacacttaggagatttc

SEQ ID NO: 10346 - DNA, 25 bp, Homo Sapiens
cccaacttacacttaggagatttca

SEQ ID NO: 10347 - DNA, 26 bp, Homo Sapiens
cccaacttacacttaggagatttcaa

SEQ ID NO: 10348 - DNA, 27 bp, Homo Sapiens
cccaacttacacttaggagatttcaac

SEQ ID NO: 10349 - DNA, 28 bp, Homo Sapiens
cccaacttacacttaggagatttcaact

SEQ ID NO: 10350 - DNA, 29 bp, Homo Sapiens
cccaacttacacttaggagatttcaactt

SEQ ID NO: 10351 - DNA, 30 bp, Homo Sapiens
cccaacttacacttaggagatttcaactta

SEQ ID NO: 10352 - DNA, 31 bp, Homo Sapiens
cccaacttacacttaggagatttcaacttaa

SEQ ID NO: 10353 - DNA, 32 bp, Homo Sapiens
cccaacttacacttaggagatttcaacttaac

SEQ ID NO: 10354 - DNA, 34 bp, Homo Sapiens
cccaacttacacttaggagatttcaacttaactt

SEQ ID NO: 10355 - DNA, 35 bp, Homo Sapiens
cccaacttacacttaggagatttcaacttaacttg

SEQ ID NO: 10356 - DNA, 37 bp, Homo Sapiens
cccaacttacacttaggagatttcaacttaacttgac

SEQ ID NO: 10357 - DNA, 38 bp, Homo Sapiens
cccaacttacacttaggagatttcaacttaacttgacc

SEQ ID NO: 10358 - DNA, 39 bp, Homo Sapiens
cccaacttacacttaggagatttcaacttaacttgaccg

SEQ ID NO: 10359 - DNA, 40 bp, Homo Sapiens
cccaacttacacttaggagatttcaacttaacttgaccgc

SEQ ID NO: 10360 - DNA, 41 bp, Homo Sapiens
cccaacttacacttaggagatttcaacttaacttgaccgct

SEQ ID NO: 10361 - DNA, 42 bp, Homo Sapiens
cccaacttacacttaggagatttcaacttaacttgaccgctc

SEQ ID NO: 10362 - DNA, 43 bp, Homo Sapiens
cccaacttacacttaggagatttcaacttaacttgaccgctct

SEQ ID NO: 10363 - DNA, 44 bp, Homo Sapiens
cccaacttacacttaggagatttcaacttaacttgaccgctctg

SEQ ID NO: 10364 - DNA, 45 bp, Homo Sapiens
cccaacttacacttaggagatttcaacttaacttgaccgctctga

SEQ ID NO: 10365 - DNA, 46 bp, Homo Sapiens
cccaacttacacttaggagatttcaacttaacttgaccgctctgac

SEQ ID NO: 10366 - DNA, 47 bp, Homo Sapiens
cccaacttacacttaggagatttcaacttaacttgaccgctctgacc

SEQ ID NO: 10367 - DNA, 48 bp, Homo Sapiens
cccaacttacacttaggagatttcaacttaacttgaccgctctgacca

SEQ ID NO: 10368 - DNA, 16 bp, Homo Sapiens
cccaatacctccacca

SEQ ID NO: 10369 - DNA, 16 bp, Homo Sapiens
cccacatggtctagcg

SEQ ID NO: 10370 - DNA, 25 bp, Homo Sapiens
cccacatggtctagcggttaggatt

SEQ ID NO: 10371 - DNA, 26 bp, Homo Sapiens
cccacatggtctagcggttaggattc

SEQ ID NO: 10372 - DNA, 27 bp, Homo Sapiens
cccacatggtctagcggttaggattcc

SEQ ID NO: 10373 - DNA, 28 bp, Homo Sapiens
cccacatggtctagcggttaggattcct

SEQ ID NO: 10374 - DNA, 29 bp, Homo Sapiens
cccacatggtctagcggttaggattcctg

SEQ ID NO: 10375 - DNA, 30 bp, Homo Sapiens
cccacatggtctagcggttaggattcctgg

SEQ ID NO: 10376 - DNA, 31 bp, Homo Sapiens
cccacatggtctagcggttaggattcctggt

SEQ ID NO: 10377 - DNA, 32 bp, Homo Sapiens
cccacatggtctagcggttaggattcctggtt

SEQ ID NO: 10378 - DNA, 33 bp, Homo Sapiens
cccacatggtctagcggttaggattcctggttt

SEQ ID NO: 10379 - DNA, 34 bp, Homo Sapiens
cccacatggtctagcggttaggattcctggtttt

SEQ ID NO: 10380 - DNA, 35 bp, Homo Sapiens
cccacatggtctagcggttaggattcctggttttc

SEQ ID NO: 10381 - DNA, 36 bp, Homo Sapiens
cccacatggtctagcggttaggattcctggttttca

SEQ ID NO: 10382 - DNA, 37 bp, Homo Sapiens
cccacatggtctagcggttaggattcctggttttcac

SEQ ID NO: 10383 - DNA, 38 bp, Homo Sapiens
cccacatggtctagcggttaggattcctggttttcacc

SEQ ID NO: 10384 - DNA, 39 bp, Homo Sapiens
cccacatggtctagcggttaggattcctggttttcaccc

SEQ ID NO: 10385 - DNA, 40 bp, Homo Sapiens
cccacatggtctagcggttaggattcctggttttcaccca

SEQ ID NO: 10386 - DNA, 41 bp, Homo Sapiens
cccacatggtctagcggttaggattcctggttttcacccag

SEQ ID NO: 10387 - DNA, 16 bp, Homo Sapiens
cccaccactgccacca

SEQ ID NO: 10388 - DNA, 16 bp, Homo Sapiens
cccaccagagtcgcca

SEQ ID NO: 10389 - DNA, 16 bp, Homo Sapiens
cccacccagggacgcc

SEQ ID NO: 10390 - DNA, 17 bp, Homo Sapiens
cccacccagggacgcca

SEQ ID NO: 10391 - DNA, 16 bp, Homo Sapiens
cccaccctcgtcgcca

SEQ ID NO: 10392 - DNA, 16 bp, Homo Sapiens
cccaccgctgccacca

SEQ ID NO: 10393 - DNA, 16 bp, Homo Sapiens
cccacctggggtgcca

SEQ ID NO: 10394 - DNA, 16 bp, Homo Sapiens
cccaccttcgtcgcca

SEQ ID NO: 10395 - DNA, 42 bp, Homo Sapiens
cccacgcgggagacccgggttcaattcccggccaatgcacca

SEQ ID NO: 10396 - DNA, 16 bp, Homo Sapiens
cccacgttgggcgcca

SEQ ID NO: 10397 - DNA, 16 bp, Homo Sapiens
cccactcctgacacca

SEQ ID NO: 10398 - DNA, 16 bp, Homo Sapiens
cccactcctggtacca

SEQ ID NO: 10399 - DNA, 16 bp, Homo Sapiens
cccacttctgacacca

SEQ ID NO: 10400 - DNA, 16 bp, Homo Sapiens
cccagaggtcgatgga

SEQ ID NO: 10401 - DNA, 17 bp, Homo Sapiens
cccagaggtcgatggat

SEQ ID NO: 10402 - DNA, 18 bp, Homo Sapiens
cccagaggtcgatggatc

SEQ ID NO: 10403 - DNA, 19 bp, Homo Sapiens
cccagaggtcgatggatcg

SEQ ID NO: 10404 - DNA, 20 bp, Homo Sapiens
cccagaggtcgatggatcga

SEQ ID NO: 10405 - DNA, 21 bp, Homo Sapiens
cccagaggtcgatggatcgaa

SEQ ID NO: 10406 - DNA, 22 bp, Homo Sapiens
cccagaggtcgatggatcgaaa

SEQ ID NO: 10407 - DNA, 23 bp, Homo Sapiens
cccagaggtcgatggatcgaaac

SEQ ID NO: 10408 - DNA, 24 bp, Homo Sapiens
cccagaggtcgatggatcgaaacc

SEQ ID NO: 10409 - DNA, 16 bp, Homo Sapiens
cccagcatctccacca

SEQ ID NO: 10410 - DNA, 16 bp, Homo Sapiens
cccagcggggcctcca

SEQ ID NO: 10411 - DNA, 16 bp, Homo Sapiens
cccagcggtgcctcca

SEQ ID NO: 10412 - DNA, 27 bp, Homo Sapiens
cccaggcggcccgggttcgactcccgg

SEQ ID NO: 10413 - DNA, 28 bp, Homo Sapiens
cccaggcggcccgggttcgactcccggt

SEQ ID NO: 10414 - DNA, 29 bp, Homo Sapiens
cccaggcggcccgggttcgactcccggtg

SEQ ID NO: 10415 - DNA, 30 bp, Homo Sapiens
cccaggcggcccgggttcgactcccggtgt

SEQ ID NO: 10416 - DNA, 31 bp, Homo Sapiens
cccaggcggcccgggttcgactcccggtgtg

SEQ ID NO: 10417 - DNA, 32 bp, Homo Sapiens
cccaggcggcccgggttcgactcccggtgtgg

SEQ ID NO: 10418 - DNA, 33 bp, Homo Sapiens
cccaggcggcccgggttcgactcccggtgtggg

SEQ ID NO: 10419 - DNA, 34 bp, Homo Sapiens
cccaggcggcccgggttcgactcccggtgtggga

SEQ ID NO: 10420 - DNA, 35 bp, Homo Sapiens
cccaggcggcccgggttcgactcccggtgtgggaa

SEQ ID NO: 10421 - DNA, 36 bp, Homo Sapiens
cccaggcggcccgggttcgactcccggtgtgggaac

SEQ ID NO: 10422 - DNA, 37 bp, Homo Sapiens
cccaggcggcccgggttcgactcccggtgtgggaacc

SEQ ID NO: 10423 - DNA, 38 bp, Homo Sapiens
cccaggcggcccgggttcgactcccggtgtgggaacca

SEQ ID NO: 10424 - DNA, 17 bp, Homo Sapiens
cccagggtcgtgggttc

SEQ ID NO: 10425 - DNA, 34 bp, Homo Sapiens
cccagggtcgtgggttcgagccccacgttgggcg

SEQ ID NO: 10426 - DNA, 36 bp, Homo Sapiens
cccagggtcgtgggttcgagccccacgttgggcgcc

SEQ ID NO: 10427 - DNA, 26 bp, Homo Sapiens
cccaggtggcccgggttcgactcccg

SEQ ID NO: 10428 - DNA, 31 bp, Homo Sapiens
cccaggtggcccgggttcgactcccggtatg

SEQ ID NO: 10429 - DNA, 32 bp, Homo Sapiens
cccaggtggcccgggttcgactcccggtatgg

SEQ ID NO: 10430 - DNA, 35 bp, Homo Sapiens
cccaggtggcccgggttcgactcccggtatgggaa

SEQ ID NO: 10431 - DNA, 36 bp, Homo Sapiens
cccaggtggcccgggttcgactcccggtatgggaac

SEQ ID NO: 10432 - DNA, 37 bp, Homo Sapiens
cccaggtggcccgggttcgactcccggtatgggaacc

SEQ ID NO: 10433 - DNA, 38 bp, Homo Sapiens
cccaggtggcccgggttcgactcccggtatgggaacca

SEQ ID NO: 10434 - DNA, 16 bp, Homo Sapiens
cccagtagagcctcca

SEQ ID NO: 10435 - DNA, 16 bp, Homo Sapiens
cccagtggaaccacca

SEQ ID NO: 10436 - DNA, 16 bp, Homo Sapiens
cccagtggcctaatgg

SEQ ID NO: 10437 - DNA, 17 bp, Homo Sapiens
cccagtggcctaatgga

SEQ ID NO: 10438 - DNA, 21 bp, Homo Sapiens
cccagtggcctaatggataag

SEQ ID NO: 10439 - DNA, 27 bp, Homo Sapiens
cccagtggcctaatggataaggcactg

SEQ ID NO: 10440 - DNA, 31 bp, Homo Sapiens
cccagtggcctaatggataaggcatcagcct

SEQ ID NO: 10441 - DNA, 32 bp, Homo Sapiens
cccagtggcctaatggataaggcatcagcctc

SEQ ID NO: 10442 - DNA, 33 bp, Homo Sapiens
cccagtggcctaatggataaggcatcagcctcc

SEQ ID NO: 10443 - DNA, 34 bp, Homo Sapiens
cccagtggcctaatggataaggcatcagcctccg

SEQ ID NO: 10444 - DNA, 27 bp, Homo Sapiens
cccagtggcctaatggataaggcattg

SEQ ID NO: 10445 - DNA, 19 bp, Homo Sapiens
cccataacccagaggtcga

SEQ ID NO: 10446 - DNA, 20 bp, Homo Sapiens
cccataacccagaggtcgat

SEQ ID NO: 10447 - DNA, 21 bp, Homo Sapiens
cccataacccagaggtcgatg

SEQ ID NO: 10448 - DNA, 24 bp, Homo Sapiens
cccataacccagaggtcgatggat

SEQ ID NO: 10449 - DNA, 25 bp, Homo Sapiens
cccataacccagaggtcgatggatc

SEQ ID NO: 10450 - DNA, 17 bp, Homo Sapiens
cccataccccgaaaatg

SEQ ID NO: 10451 - DNA, 18 bp, Homo Sapiens
cccataccccgaaaatgt

SEQ ID NO: 10452 - DNA, 19 bp, Homo Sapiens
cccataccccgaaaatgtt

SEQ ID NO: 10453 - DNA, 20 bp, Homo Sapiens
cccataccccgaaaatgttg

SEQ ID NO: 10454 - DNA, 21 bp, Homo Sapiens
cccataccccgaaaatgttgg

SEQ ID NO: 10455 - DNA, 22 bp, Homo Sapiens
cccataccccgaaaatgttggt

SEQ ID NO: 10456 - DNA, 23 bp, Homo Sapiens
cccataccccgaaaatgttggtt

SEQ ID NO: 10457 - DNA, 24 bp, Homo Sapiens
cccataccccgaaaatgttggtta

SEQ ID NO: 10458 - DNA, 26 bp, Homo Sapiens
cccataccccgaaaatgttggttata

SEQ ID NO: 10459 - DNA, 28 bp, Homo Sapiens
cccataccccgaaaatgttggttatacc

SEQ ID NO: 10460 - DNA, 29 bp, Homo Sapiens
cccataccccgaaaatgttggttataccc

SEQ ID NO: 10461 - DNA, 30 bp, Homo Sapiens
cccataccccgaaaatgttggttataccct

SEQ ID NO: 10462 - DNA, 31 bp, Homo Sapiens
cccataccccgaaaatgttggttataccctt

SEQ ID NO: 10463 - DNA, 33 bp, Homo Sapiens
cccataccccgaaaatgttggttatacccttcc

SEQ ID NO: 10464 - DNA, 34 bp, Homo Sapiens
cccataccccgaaaatgttggttatacccttccc

SEQ ID NO: 10465 - DNA, 35 bp, Homo Sapiens
cccataccccgaaaatgttggttatacccttcccg

SEQ ID NO: 10466 - DNA, 36 bp, Homo Sapiens
cccataccccgaaaatgttggttatacccttcccgt

SEQ ID NO: 10467 - DNA, 37 bp, Homo Sapiens
cccataccccgaaaatgttggttatacccttcccgta

SEQ ID NO: 10468 - DNA, 38 bp, Homo Sapiens
cccataccccgaaaatgttggttatacccttcccgtac

SEQ ID NO: 10469 - DNA, 39 bp, Homo Sapiens
cccataccccgaaaatgttggttatacccttcccgtact

SEQ ID NO: 10470 - DNA, 40 bp, Homo Sapiens
cccataccccgaaaatgttggttatacccttcccgtacta

SEQ ID NO: 10471 - DNA, 41 bp, Homo Sapiens
cccataccccgaaaatgttggttatacccttcccgtactac

SEQ ID NO: 10472 - DNA, 42 bp, Homo Sapiens
cccataccccgaaaatgttggttatacccttcccgtactacc

SEQ ID NO: 10473 - DNA, 43 bp, Homo Sapiens
cccataccccgaaaatgttggttatacccttcccgtactacca

SEQ ID NO: 10474 - DNA, 16 bp, Homo Sapiens
cccatatggtctagcg

SEQ ID NO: 10475 - DNA, 25 bp, Homo Sapiens
cccatatggtctagcggttaggatt

SEQ ID NO: 10476 - DNA, 27 bp, Homo Sapiens
cccatatggtctagcggttaggattcc

SEQ ID NO: 10477 - DNA, 28 bp, Homo Sapiens
cccatatggtctagcggttaggattcct

SEQ ID NO: 10478 - DNA, 29 bp, Homo Sapiens
cccatatggtctagcggttaggattcctg

SEQ ID NO: 10479 - DNA, 30 bp, Homo Sapiens
cccatatggtctagcggttaggattcctgg

SEQ ID NO: 10480 - DNA, 31 bp, Homo Sapiens
cccatatggtctagcggttaggattcctggt

SEQ ID NO: 10481 - DNA, 32 bp, Homo Sapiens
cccatatggtctagcggttaggattcctggtt

SEQ ID NO: 10482 - DNA, 33 bp, Homo Sapiens
cccatatggtctagcggttaggattcctggttt

SEQ ID NO: 10483 - DNA, 34 bp, Homo Sapiens
cccatatggtctagcggttaggattcctggtttt

SEQ ID NO: 10484 - DNA, 35 bp, Homo Sapiens
cccatatggtctagcggttaggattcctggttttc

SEQ ID NO: 10485 - DNA, 36 bp, Homo Sapiens
cccatatggtctagcggttaggattcctggttttca

SEQ ID NO: 10486 - DNA, 16 bp, Homo Sapiens
cccatcctcgtcgcca

SEQ ID NO: 10487 - DNA, 16 bp, Homo Sapiens
cccatctggggtgcca

SEQ ID NO: 10488 - DNA, 16 bp, Homo Sapiens
cccatctgggtcgcca

SEQ ID NO: 10489 - DNA, 32 bp, Homo Sapiens
cccatggtgtaatggtcagcactctggactct

SEQ ID NO: 10490 - DNA, 33 bp, Homo Sapiens
cccatggtgtaatggtcagcactctggactctg

SEQ ID NO: 10491 - DNA, 26 bp, Homo Sapiens
cccatggtgtaatggttagcactctg

SEQ ID NO: 10492 - DNA, 27 bp, Homo Sapiens
cccatggtgtaatggttagcactctgg

SEQ ID NO: 10493 - DNA, 28 bp, Homo Sapiens
cccatggtgtaatggttagcactctgga

SEQ ID NO: 10494 - DNA, 29 bp, Homo Sapiens
cccatggtgtaatggttagcactctggac

SEQ ID NO: 10495 - DNA, 30 bp, Homo Sapiens
cccatggtgtaatggttagcactctggact

SEQ ID NO: 10496 - DNA, 33 bp, Homo Sapiens
cccatggtgtaatggttagcactctggactttg

SEQ ID NO: 10497 - DNA, 34 bp, Homo Sapiens
cccatggtgtaatggttagcactctggactttga

SEQ ID NO: 10498 - DNA, 35 bp, Homo Sapiens
cccatggtgtaatggttagcactctggactttgaa

SEQ ID NO: 10499 - DNA, 38 bp, Homo Sapiens
cccatggtgtaatggttagcactctggactttgaatcc

SEQ ID NO: 10500 - DNA, 21 bp, Homo Sapiens
cccatgtctaacaacatggct

SEQ ID NO: 10501 - DNA, 28 bp, Homo Sapiens
cccatgtctaacaacatggctttctcac

SEQ ID NO: 10502 - DNA, 29 bp, Homo Sapiens
cccatgtctaacaacatggctttctcacc

SEQ ID NO: 10503 - DNA, 30 bp, Homo Sapiens
cccatgtctaacaacatggctttctcacca

SEQ ID NO: 10504 - DNA, 16 bp, Homo Sapiens
cccattcttgcgaccc

SEQ ID NO: 10505 - DNA, 17 bp, Homo Sapiens
cccattcttgcgacccg

SEQ ID NO: 10506 - DNA, 18 bp, Homo Sapiens
cccattcttgcgacccgg

SEQ ID NO: 10507 - DNA, 19 bp, Homo Sapiens
cccattcttgcgacccggg

SEQ ID NO: 10508 - DNA, 20 bp, Homo Sapiens
cccattcttgcgacccgggt

SEQ ID NO: 10509 - DNA, 21 bp, Homo Sapiens
cccattcttgcgacccgggtt

SEQ ID NO: 10510 - DNA, 22 bp, Homo Sapiens
cccattcttgcgacccgggttc

SEQ ID NO: 10511 - DNA, 23 bp, Homo Sapiens
cccattcttgcgacccgggttcg

SEQ ID NO: 10512 - DNA, 24 bp, Homo Sapiens
cccattcttgcgacccgggttcga

SEQ ID NO: 10513 - DNA, 25 bp, Homo Sapiens
cccattcttgcgacccgggttcgat

SEQ ID NO: 10514 - DNA, 26 bp, Homo Sapiens
cccattcttgcgacccgggttcgatt

SEQ ID NO: 10515 - DNA, 27 bp, Homo Sapiens
cccattcttgcgacccgggttcgattc

SEQ ID NO: 10516 - DNA, 28 bp, Homo Sapiens
cccattcttgcgacccgggttcgattcc

SEQ ID NO: 10517 - DNA, 29 bp, Homo Sapiens
cccattcttgcgacccgggttcgattccc

SEQ ID NO: 10518 - DNA, 30 bp, Homo Sapiens
cccattcttgcgacccgggttcgattcccg

SEQ ID NO: 10519 - DNA, 34 bp, Homo Sapiens
cccattcttgcgacccgggttcgattcccgggcg

SEQ ID NO: 10520 - DNA, 35 bp, Homo Sapiens
cccattcttgcgacccgggttcgattcccgggcgg

SEQ ID NO: 10521 - DNA, 36 bp, Homo Sapiens
cccattcttgcgacccgggttcgattcccgggcggc

SEQ ID NO: 10522 - DNA, 37 bp, Homo Sapiens
cccattcttgcgacccgggttcgattcccgggcggcg

SEQ ID NO: 10523 - DNA, 38 bp, Homo Sapiens
cccattcttgcgacccgggttcgattcccgggcggcgc

SEQ ID NO: 10524 - DNA, 39 bp, Homo Sapiens
cccattcttgcgacccgggttcgattcccgggcggcgca

SEQ ID NO: 10525 - DNA, 40 bp, Homo Sapiens
cccattcttgcgacccgggttcgattcccgggcggcgcac

SEQ ID NO: 10526 - DNA, 41 bp, Homo Sapiens
cccattcttgcgacccgggttcgattcccgggcggcgcacc

SEQ ID NO: 10527 - DNA, 42 bp, Homo Sapiens
cccattcttgcgacccgggttcgattcccgggcggcgcacca

SEQ ID NO: 10528 - DNA, 16 bp, Homo Sapiens
cccattggtctagcca

SEQ ID NO: 10529 - DNA, 24 bp, Homo Sapiens
ccccaaaaattttggtgcaactcc

SEQ ID NO: 10530 - DNA, 25 bp, Homo Sapiens
ccccaaaaattttggtgcaactcca

SEQ ID NO: 10531 - DNA, 26 bp, Homo Sapiens
ccccaaaaattttggtgcaactccaa

SEQ ID NO: 10532 - DNA, 27 bp, Homo Sapiens
ccccaaaaattttggtgcaactccaaa

SEQ ID NO: 10533 - DNA, 28 bp, Homo Sapiens
ccccaaaaattttggtgcaactccaaat

SEQ ID NO: 10534 - DNA, 29 bp, Homo Sapiens
ccccaaaaattttggtgcaactccaaata

SEQ ID NO: 10535 - DNA, 33 bp, Homo Sapiens
ccccaaaaattttggtgcaactccaaataaaag

SEQ ID NO: 10536 - DNA, 34 bp, Homo Sapiens
ccccaaaaattttggtgcaactccaaataaaagt

SEQ ID NO: 10537 - DNA, 35 bp, Homo Sapiens
ccccaaaaattttggtgcaactccaaataaaagta

SEQ ID NO: 10538 - DNA, 36 bp, Homo Sapiens
ccccaaaaattttggtgcaactccaaataaaagtac

SEQ ID NO: 10539 - DNA, 37 bp, Homo Sapiens
ccccaaaaattttggtgcaactccaaataaaagtacc

SEQ ID NO: 10540 - DNA, 38 bp, Homo Sapiens
ccccaaaaattttggtgcaactccaaataaaagtacca

SEQ ID NO: 10541 - DNA, 16 bp, Homo Sapiens
ccccacattgggcgcc

SEQ ID NO: 10542 - DNA, 16 bp, Homo Sapiens
ccccacgttgggcgcc

SEQ ID NO: 10543 - DNA, 17 bp, Homo Sapiens
ccccacgttgggcgcca

SEQ ID NO: 10544 - DNA, 16 bp, Homo Sapiens
ccccactcctggtacc

SEQ ID NO: 10545 - DNA, 17 bp, Homo Sapiens
ccccactcctggtacca

SEQ ID NO: 10546 - DNA, 16 bp, Homo Sapiens
ccccacttctggtacc

SEQ ID NO: 10547 - DNA, 17 bp, Homo Sapiens
ccccacttctggtacca

SEQ ID NO: 10548 - DNA, 16 bp, Homo Sapiens
ccccagcatctccacc

SEQ ID NO: 10549 - DNA, 17 bp, Homo Sapiens
ccccagcatctccacca

SEQ ID NO: 10550 - DNA, 17 bp, Homo Sapiens
ccccagtacctccacca

SEQ ID NO: 10551 - DNA, 16 bp, Homo Sapiens
ccccagtggaaccacc

SEQ ID NO: 10552 - DNA, 17 bp, Homo Sapiens
ccccagtggaaccacca

SEQ ID NO: 10553 - DNA, 18 bp, Homo Sapiens
ccccagtggcctaatgga

SEQ ID NO: 10554 - DNA, 33 bp, Homo Sapiens
ccccatggtgtaatggtcagcactctggactct

SEQ ID NO: 10555 - DNA, 34 bp, Homo Sapiens
ccccatggtgtaatggtcagcactctggactctg

SEQ ID NO: 10556 - DNA, 27 bp, Homo Sapiens
ccccatggtgtaatggttagcactctg

SEQ ID NO: 10557 - DNA, 28 bp, Homo Sapiens
ccccatggtgtaatggttagcactctgg

SEQ ID NO: 10558 - DNA, 29 bp, Homo Sapiens
ccccatggtgtaatggttagcactctgga

SEQ ID NO: 10559 - DNA, 30 bp, Homo Sapiens
ccccatggtgtaatggttagcactctggac

SEQ ID NO: 10560 - DNA, 31 bp, Homo Sapiens
ccccatggtgtaatggttagcactctggact

SEQ ID NO: 10561 - DNA, 34 bp, Homo Sapiens
ccccatggtgtaatggttagcactctggactttg

SEQ ID NO: 10562 - DNA, 35 bp, Homo Sapiens
ccccatggtgtaatggttagcactctggactttga

SEQ ID NO: 10563 - DNA, 39 bp, Homo Sapiens
ccccatggtgtaatggttagcactctggactttgaatcc

SEQ ID NO: 10564 - DNA, 16 bp, Homo Sapiens
ccccatgtctaacaac

SEQ ID NO: 10565 - DNA, 17 bp, Homo Sapiens
ccccatgtctaacaaca

SEQ ID NO: 10566 - DNA, 21 bp, Homo Sapiens
ccccatgtctaacaacatggc

SEQ ID NO: 10567 - DNA, 22 bp, Homo Sapiens
ccccatgtctaacaacatggct

SEQ ID NO: 10568 - DNA, 29 bp, Homo Sapiens
ccccatgtctaacaacatggctttctcac

SEQ ID NO: 10569 - DNA, 30 bp, Homo Sapiens
ccccatgtctaacaacatggctttctcacc

SEQ ID NO: 10570 - DNA, 31 bp, Homo Sapiens
ccccatgtctaacaacatggctttctcacca

SEQ ID NO: 10571 - DNA, 16 bp, Homo Sapiens
cccccatgtctaacaa

SEQ ID NO: 10572 - DNA, 17 bp, Homo Sapiens
cccccatgtctaacaac

SEQ ID NO: 10573 - DNA, 18 bp, Homo Sapiens
cccccatgtctaacaaca

SEQ ID NO: 10574 - DNA, 21 bp, Homo Sapiens
cccccatgtctaacaacatgg

SEQ ID NO: 10575 - DNA, 22 bp, Homo Sapiens
cccccatgtctaacaacatggc

SEQ ID NO: 10576 - DNA, 23 bp, Homo Sapiens
cccccatgtctaacaacatggct

SEQ ID NO: 10577 - DNA, 24 bp, Homo Sapiens
cccccatgtctaacaacatggctt

SEQ ID NO: 10578 - DNA, 27 bp, Homo Sapiens
cccccatgtctaacaacatggctttct

SEQ ID NO: 10579 - DNA, 29 bp, Homo Sapiens
cccccatgtctaacaacatggctttctca

SEQ ID NO: 10580 - DNA, 30 bp, Homo Sapiens
cccccatgtctaacaacatggctttctcac

SEQ ID NO: 10581 - DNA, 31 bp, Homo Sapiens
cccccatgtctaacaacatggctttctcacc

SEQ ID NO: 10582 - DNA, 32 bp, Homo Sapiens
cccccatgtctaacaacatggctttctcacca

SEQ ID NO: 10583 - DNA, 17 bp, Homo Sapiens
cccccggctcctccacc

SEQ ID NO: 10584 - DNA, 18 bp, Homo Sapiens
cccccggctcctccacca

SEQ ID NO: 10585 - DNA, 16 bp, Homo Sapiens
cccccttatttctacc

SEQ ID NO: 10586 - DNA, 17 bp, Homo Sapiens
cccccttatttctacca

SEQ ID NO: 10587 - DNA, 16 bp, Homo Sapiens
ccccgaaaatgttggt

SEQ ID NO: 10588 - DNA, 18 bp, Homo Sapiens
ccccgaaaatgttggtta

SEQ ID NO: 10589 - DNA, 19 bp, Homo Sapiens
ccccgaaaatgttggttat

SEQ ID NO: 10590 - DNA, 20 bp, Homo Sapiens
ccccgaaaatgttggttata

SEQ ID NO: 10591 - DNA, 21 bp, Homo Sapiens
ccccgaaaatgttggttatac

SEQ ID NO: 10592 - DNA, 24 bp, Homo Sapiens
ccccgaaaatgttggttataccct

SEQ ID NO: 10593 - DNA, 26 bp, Homo Sapiens
ccccgaaaatgttggttatacccttc

SEQ ID NO: 10594 - DNA, 28 bp, Homo Sapiens
ccccgaaaatgttggttatacccttccc

SEQ ID NO: 10595 - DNA, 32 bp, Homo Sapiens
ccccgaaaatgttggttatacccttcccgtac

SEQ ID NO: 10596 - DNA, 33 bp, Homo Sapiens
ccccgaaaatgttggttatacccttcccgtact

SEQ ID NO: 10597 - DNA, 34 bp, Homo Sapiens
ccccgaaaatgttggttatacccttcccgtacta

SEQ ID NO: 10598 - DNA, 35 bp, Homo Sapiens
ccccgaaaatgttggttatacccttcccgtactac

SEQ ID NO: 10599 - DNA, 36 bp, Homo Sapiens
ccccgaaaatgttggttatacccttcccgtactacc

SEQ ID NO: 10600 - DNA, 37 bp, Homo Sapiens
ccccgaaaatgttggttatacccttcccgtactacca

SEQ ID NO: 10601 - DNA, 16 bp, Homo Sapiens
ccccgacggggagcca

SEQ ID NO: 10602 - DNA, 23 bp, Homo Sapiens
ccccgcacaggttcgaatcctgt

SEQ ID NO: 10603 - DNA, 24 bp, Homo Sapiens
ccccgcctgtcacgcgggagaccg

SEQ ID NO: 10604 - DNA, 21 bp, Homo Sapiens
ccccgcgcaggttcgaaccct

SEQ ID NO: 10605 - DNA, 22 bp, Homo Sapiens
ccccgcgcaggttcgaaccctg

SEQ ID NO: 10606 - DNA, 33 bp, Homo Sapiens
ccccgcgcaggttcgaaccctgctcgctgcgcc

SEQ ID NO: 10607 - DNA, 18 bp, Homo Sapiens
ccccgcgcaggttcgaat

SEQ ID NO: 10608 - DNA, 19 bp, Homo Sapiens
ccccgcgcaggttcgaatc

SEQ ID NO: 10609 - DNA, 20 bp, Homo Sapiens
ccccgcgcaggttcgaatcc

SEQ ID NO: 10610 - DNA, 21 bp, Homo Sapiens
ccccgcgcaggttcgaatcct

SEQ ID NO: 10611 - DNA, 22 bp, Homo Sapiens
ccccgcgcaggttcgaatcctg

SEQ ID NO: 10612 - DNA, 23 bp, Homo Sapiens
ccccgcgcaggttcgaatcctgc

SEQ ID NO: 10613 - DNA, 24 bp, Homo Sapiens
ccccgcgcaggttcgaatcctgcc

SEQ ID NO: 10614 - DNA, 25 bp, Homo Sapiens
ccccgcgcaggttcgaatcctgccg

SEQ ID NO: 10615 - DNA, 33 bp, Homo Sapiens
ccccgcgcaggttcgaatcctgccgactacgcc

SEQ ID NO: 10616 - DNA, 34 bp, Homo Sapiens
ccccgcgcaggttcgaatcctgccgactacgcca

SEQ ID NO: 10617 - DNA, 24 bp, Homo Sapiens
ccccgcgcaggttcgaatcctgct

SEQ ID NO: 10618 - DNA, 33 bp, Homo Sapiens
ccccgcgcaggttcgaatcctgctcacagcgcc

SEQ ID NO: 10619 - DNA, 34 bp, Homo Sapiens
ccccgcgcaggttcgaatcctgctcacagcgcca

SEQ ID NO: 10620 - DNA, 16 bp, Homo Sapiens
ccccggcacctccacc

SEQ ID NO: 10621 - DNA, 17 bp, Homo Sapiens
ccccggcacctccacca

SEQ ID NO: 10622 - DNA, 16 bp, Homo Sapiens
ccccggcatctccacc

SEQ ID NO: 10623 - DNA, 17 bp, Homo Sapiens
ccccggcatctccacca

SEQ ID NO: 10624 - DNA, 16 bp, Homo Sapiens
ccccggctcctccacc

SEQ ID NO: 10625 - DNA, 16 bp, Homo Sapiens
ccccgggttcaatccc

SEQ ID NO: 10626 - DNA, 26 bp, Homo Sapiens
ccccgggttcaatccccggcacctcc

SEQ ID NO: 10627 - DNA, 29 bp, Homo Sapiens
ccccgggttcaatccccggcacctccacc

SEQ ID NO: 10628 - DNA, 30 bp, Homo Sapiens
ccccgggttcaatccccggcacctccacca

SEQ ID NO: 10629 - DNA, 29 bp, Homo Sapiens
ccccgggttcaatccccggcatctccacc

SEQ ID NO: 10630 - DNA, 30 bp, Homo Sapiens
ccccgggttcaatccccggcatctccacca

SEQ ID NO: 10631 - DNA, 17 bp, Homo Sapiens
ccccgggttcgaccccc

SEQ ID NO: 10632 - DNA, 27 bp, Homo Sapiens
ccccgggttcgacccccggctcctcca

SEQ ID NO: 10633 - DNA, 29 bp, Homo Sapiens
ccccgggttcgacccccggctcctccacc

SEQ ID NO: 10634 - DNA, 20 bp, Homo Sapiens
ccccgggttcgatccccggc

SEQ ID NO: 10635 - DNA, 28 bp, Homo Sapiens
ccccgggttcgatccccggcatctccac

SEQ ID NO: 10636 - DNA, 29 bp, Homo Sapiens
ccccgggttcgatccccggcatctccacc

SEQ ID NO: 10637 - DNA, 30 bp, Homo Sapiens
ccccgggttcgatccccggcatctccacca

SEQ ID NO: 10638 - DNA, 29 bp, Homo Sapiens
ccccggttcaaatccgggtgccccctcca

SEQ ID NO: 10639 - DNA, 22 bp, Homo Sapiens
ccccggttcgaaaccgggcgga

SEQ ID NO: 10640 - DNA, 25 bp, Homo Sapiens
ccccggttcgaaaccgggcggaaac

SEQ ID NO: 10641 - DNA, 26 bp, Homo Sapiens
ccccggttcgaaaccgggcggaaaca

SEQ ID NO: 10642 - DNA, 29 bp, Homo Sapiens
ccccggttcgaaaccgggcggaaacacca

SEQ ID NO: 10643 - DNA, 16 bp, Homo Sapiens
ccccgtacgggccacc

SEQ ID NO: 10644 - DNA, 17 bp, Homo Sapiens
ccccgtacgggccacca

SEQ ID NO: 10645 - DNA, 16 bp, Homo Sapiens
ccccgtactggccacc

SEQ ID NO: 10646 - DNA, 17 bp, Homo Sapiens
ccccgtactggccacca

SEQ ID NO: 10647 - DNA, 16 bp, Homo Sapiens
ccccgtccgtgcctcc

SEQ ID NO: 10648 - DNA, 17 bp, Homo Sapiens
ccccgtccgtgcctcca

SEQ ID NO: 10649 - DNA, 35 bp, Homo Sapiens
cccctggaggcgtgggttcgaatcccacttctgac

SEQ ID NO: 10650 - DNA, 36 bp, Homo Sapiens
cccctggaggcgtgggttcgaatcccacttctgaca

SEQ ID NO: 10651 - DNA, 39 bp, Homo Sapiens
cccctggaggcgtgggttcgaatcccacttctgacacca

SEQ ID NO: 10652 - DNA, 23 bp, Homo Sapiens
cccctgtggtctagtggttagga

SEQ ID NO: 10653 - DNA, 16 bp, Homo Sapiens
ccccttatttacccca

SEQ ID NO: 10654 - DNA, 16 bp, Homo Sapiens
ccccttatttctacca

SEQ ID NO: 10655 - DNA, 16 bp, Homo Sapiens
cccgaaaatgttggtt

SEQ ID NO: 10656 - DNA, 17 bp, Homo Sapiens
cccgaaaatgttggtta

SEQ ID NO: 10657 - DNA, 18 bp, Homo Sapiens
cccgaaaatgttggttat

SEQ ID NO: 10658 - DNA, 19 bp, Homo Sapiens
cccgaaaatgttggttata

SEQ ID NO: 10659 - DNA, 20 bp, Homo Sapiens
cccgaaaatgttggttatac

SEQ ID NO: 10660 - DNA, 21 bp, Homo Sapiens
cccgaaaatgttggttatacc

SEQ ID NO: 10661 - DNA, 22 bp, Homo Sapiens
cccgaaaatgttggttataccc

SEQ ID NO: 10662 - DNA, 23 bp, Homo Sapiens
cccgaaaatgttggttataccct

SEQ ID NO: 10663 - DNA, 25 bp, Homo Sapiens
cccgaaaatgttggttatacccttc

SEQ ID NO: 10664 - DNA, 26 bp, Homo Sapiens
cccgaaaatgttggttatacccttcc

SEQ ID NO: 10665 - DNA, 27 bp, Homo Sapiens
cccgaaaatgttggttatacccttccc

SEQ ID NO: 10666 - DNA, 28 bp, Homo Sapiens
cccgaaaatgttggttatacccttcccg

SEQ ID NO: 10667 - DNA, 29 bp, Homo Sapiens
cccgaaaatgttggttatacccttcccgt

SEQ ID NO: 10668 - DNA, 30 bp, Homo Sapiens
cccgaaaatgttggttatacccttcccgta

SEQ ID NO: 10669 - DNA, 31 bp, Homo Sapiens
cccgaaaatgttggttatacccttcccgtac

SEQ ID NO: 10670 - DNA, 32 bp, Homo Sapiens
cccgaaaatgttggttatacccttcccgtact

SEQ ID NO: 10671 - DNA, 33 bp, Homo Sapiens
cccgaaaatgttggttatacccttcccgtacta

SEQ ID NO: 10672 - DNA, 34 bp, Homo Sapiens
cccgaaaatgttggttatacccttcccgtactac

SEQ ID NO: 10673 - DNA, 35 bp, Homo Sapiens
cccgaaaatgttggttatacccttcccgtactacc

SEQ ID NO: 10674 - DNA, 36 bp, Homo Sapiens
cccgaaaatgttggttatacccttcccgtactacca

SEQ ID NO: 10675 - DNA, 33 bp, Homo Sapiens
cccgcacaggttcgaatcctgttcgtgacgcca

SEQ ID NO: 10676 - DNA, 16 bp, Homo Sapiens
cccgcatcctccacca

SEQ ID NO: 10677 - DNA, 16 bp, Homo Sapiens
cccgcattctccacca

SEQ ID NO: 10678 - DNA, 26 bp, Homo Sapiens
cccgcctgtcacgcgggagaccgggg

SEQ ID NO: 10679 - DNA, 48 bp, Homo Sapiens
cccgcctgtcacgcgggagaccggggttcaattccccgacggggagcc

SEQ ID NO: 10680 - DNA, 48 bp, Homo Sapiens
cccgcctgtcacgcgggagaccggggttcgattccccgacggggagcc

SEQ ID NO: 10681 - DNA, 17 bp, Homo Sapiens
cccgcgcaggttcgaac

SEQ ID NO: 10682 - DNA, 21 bp, Homo Sapiens
cccgcgcaggttcgaaccctg

SEQ ID NO: 10683 - DNA, 32 bp, Homo Sapiens
cccgcgcaggttcgaaccctgctcgctgcgcc

SEQ ID NO: 10684 - DNA, 21 bp, Homo Sapiens
cccgcgcaggttcgaatcctg

SEQ ID NO: 10685 - DNA, 32 bp, Homo Sapiens
cccgcgcaggttcgaatcctgccgactacgcc

SEQ ID NO: 10686 - DNA, 33 bp, Homo Sapiens
cccgcgcaggttcgaatcctgccgactacgcca

SEQ ID NO: 10687 - DNA, 32 bp, Homo Sapiens
cccgcgcaggttcgaatcctgctcacagcgcc

SEQ ID NO: 10688 - DNA, 16 bp, Homo Sapiens
cccggacgagccccca

SEQ ID NO: 10689 - DNA, 16 bp, Homo Sapiens
cccggatagctcagtc

SEQ ID NO: 10690 - DNA, 17 bp, Homo Sapiens
cccggatagctcagtcg

SEQ ID NO: 10691 - DNA, 18 bp, Homo Sapiens
cccggatagctcagtcgg

SEQ ID NO: 10692 - DNA, 21 bp, Homo Sapiens
cccggatagctcagtcggtag

SEQ ID NO: 10693 - DNA, 22 bp, Homo Sapiens
cccggatagctcagtcggtaga

SEQ ID NO: 10694 - DNA, 23 bp, Homo Sapiens
cccggatagctcagtcggtagag

SEQ ID NO: 10695 - DNA, 24 bp, Homo Sapiens
cccggatagctcagtcggtagagc

SEQ ID NO: 10696 - DNA, 25 bp, Homo Sapiens
cccggatagctcagtcggtagagca

SEQ ID NO: 10697 - DNA, 26 bp, Homo Sapiens
cccggatagctcagtcggtagagcat

SEQ ID NO: 10698 - DNA, 27 bp, Homo Sapiens
cccggatagctcagtcggtagagcatc

SEQ ID NO: 10699 - DNA, 28 bp, Homo Sapiens
cccggatagctcagtcggtagagcatca

SEQ ID NO: 10700 - DNA, 29 bp, Homo Sapiens
cccggatagctcagtcggtagagcatcag

SEQ ID NO: 10701 - DNA, 30 bp, Homo Sapiens
cccggatagctcagtcggtagagcatcaga

SEQ ID NO: 10702 - DNA, 31 bp, Homo Sapiens
cccggatagctcagtcggtagagcatcagac

SEQ ID NO: 10703 - DNA, 32 bp, Homo Sapiens
cccggatagctcagtcggtagagcatcagact

SEQ ID NO: 10704 - DNA, 33 bp, Homo Sapiens
cccggatagctcagtcggtagagcatcagactt

SEQ ID NO: 10705 - DNA, 34 bp, Homo Sapiens
cccggatagctcagtcggtagagcatcagacttt

SEQ ID NO: 10706 - DNA, 35 bp, Homo Sapiens
cccggatagctcagtcggtagagcatcagactttt

SEQ ID NO: 10707 - DNA, 16 bp, Homo Sapiens
cccggcacctccacca

SEQ ID NO: 10708 - DNA, 16 bp, Homo Sapiens
cccggcatctccacca

SEQ ID NO: 10709 - DNA, 16 bp, Homo Sapiens
cccggccaacgcacca

SEQ ID NO: 10710 - DNA, 16 bp, Homo Sapiens
cccggccaatgcacca

SEQ ID NO: 10711 - DNA, 16 bp, Homo Sapiens
cccggccagggaacca

SEQ ID NO: 10712 - DNA, 16 bp, Homo Sapiens
cccggcccatgcacca

SEQ ID NO: 10713 - DNA, 16 bp, Homo Sapiens
cccggcggagtcgcca

SEQ ID NO: 10714 - DNA, 16 bp, Homo Sapiens
cccggctagctcagtc

SEQ ID NO: 10715 - DNA, 17 bp, Homo Sapiens
cccggctagctcagtcg

SEQ ID NO: 10716 - DNA, 18 bp, Homo Sapiens
cccggctagctcagtcgg

SEQ ID NO: 10717 - DNA, 24 bp, Homo Sapiens
cccggctagctcagtcggtagagc

SEQ ID NO: 10718 - DNA, 25 bp, Homo Sapiens
cccggctagctcagtcggtagagca

SEQ ID NO: 10719 - DNA, 26 bp, Homo Sapiens
cccggctagctcagtcggtagagcat

SEQ ID NO: 10720 - DNA, 27 bp, Homo Sapiens
cccggctagctcagtcggtagagcatg

SEQ ID NO: 10721 - DNA, 28 bp, Homo Sapiens
cccggctagctcagtcggtagagcatga

SEQ ID NO: 10722 - DNA, 29 bp, Homo Sapiens
cccggctagctcagtcggtagagcatgag

SEQ ID NO: 10723 - DNA, 30 bp, Homo Sapiens
cccggctagctcagtcggtagagcatgaga

SEQ ID NO: 10724 - DNA, 31 bp, Homo Sapiens
cccggctagctcagtcggtagagcatgagac

SEQ ID NO: 10725 - DNA, 32 bp, Homo Sapiens
cccggctagctcagtcggtagagcatgagacc

SEQ ID NO: 10726 - DNA, 33 bp, Homo Sapiens
cccggctagctcagtcggtagagcatgagaccc

SEQ ID NO: 10727 - DNA, 34 bp, Homo Sapiens
cccggctagctcagtcggtagagcatgagaccct

SEQ ID NO: 10728 - DNA, 32 bp, Homo Sapiens
cccggctagctcagtcggtagagcatgagact

SEQ ID NO: 10729 - DNA, 33 bp, Homo Sapiens
cccggctagctcagtcggtagagcatgagactc

SEQ ID NO: 10730 - DNA, 34 bp, Homo Sapiens
cccggctagctcagtcggtagagcatgagactct

SEQ ID NO: 10731 - DNA, 35 bp, Homo Sapiens
cccggctagctcagtcggtagagcatgagactctt

SEQ ID NO: 10732 - DNA, 36 bp, Homo Sapiens
cccggctagctcagtcggtagagcatgagactctta

SEQ ID NO: 10733 - DNA, 37 bp, Homo Sapiens
cccggctagctcagtcggtagagcatgagactcttaa

SEQ ID NO: 10734 - DNA, 38 bp, Homo Sapiens
cccggctagctcagtcggtagagcatgagactcttaat

SEQ ID NO: 10735 - DNA, 39 bp, Homo Sapiens
cccggctagctcagtcggtagagcatgagactcttaatc

SEQ ID NO: 10736 - DNA, 40 bp, Homo Sapiens
cccggctagctcagtcggtagagcatgagactcttaatct

SEQ ID NO: 10737 - DNA, 41 bp, Homo Sapiens
cccggctagctcagtcggtagagcatgagactcttaatctc

SEQ ID NO: 10738 - DNA, 42 bp, Homo Sapiens
cccggctagctcagtcggtagagcatgagactcttaatctca

SEQ ID NO: 10739 - DNA, 48 bp, Homo Sapiens
cccggctagctcagtcggtagagcatgagactcttaatctcagggtcg

SEQ ID NO: 10740 - DNA, 28 bp, Homo Sapiens
cccggctagctcagtcggtagagcatgg

SEQ ID NO: 10741 - DNA, 29 bp, Homo Sapiens
cccggctagctcagtcggtagagcatggg

SEQ ID NO: 10742 - DNA, 30 bp, Homo Sapiens
cccggctagctcagtcggtagagcatggga

SEQ ID NO: 10743 - DNA, 31 bp, Homo Sapiens
cccggctagctcagtcggtagagcatgggac

SEQ ID NO: 10744 - DNA, 32 bp, Homo Sapiens
cccggctagctcagtcggtagagcatgggact

SEQ ID NO: 10745 - DNA, 33 bp, Homo Sapiens
cccggctagctcagtcggtagagcatgggactc

SEQ ID NO: 10746 - DNA, 34 bp, Homo Sapiens
cccggctagctcagtcggtagagcatgggactct

SEQ ID NO: 10747 - DNA, 35 bp, Homo Sapiens
cccggctagctcagtcggtagagcatgggactctt

SEQ ID NO: 10748 - DNA, 36 bp, Homo Sapiens
cccggctagctcagtcggtagagcatgggactctta

SEQ ID NO: 10749 - DNA, 40 bp, Homo Sapiens
cccggctagctcagtcggtagagcatgggactcttaatcc

SEQ ID NO: 10750 - DNA, 41 bp, Homo Sapiens
cccggctagctcagtcggtagagcatgggactcttaatccc

SEQ ID NO: 10751 - DNA, 42 bp, Homo Sapiens
cccggctagctcagtcggtagagcatgggactcttaatccca

SEQ ID NO: 10752 - DNA, 48 bp, Homo Sapiens
cccggctagctcagtcggtagagcatgggactcttaatcccagggtcg

SEQ ID NO: 10753 - DNA, 40 bp, Homo Sapiens
cccggctagctcagtcggtagagcatgggactcttaatct

SEQ ID NO: 10754 - DNA, 16 bp, Homo Sapiens
cccggctcctccacca

SEQ ID NO: 10755 - DNA, 16 bp, Homo Sapiens
cccgggcggaaacacc

SEQ ID NO: 10756 - DNA, 17 bp, Homo Sapiens
cccgggcggaaacacca

SEQ ID NO: 10757 - DNA, 16 bp, Homo Sapiens
cccgggcggcgcacca

SEQ ID NO: 10758 - DNA, 26 bp, Homo Sapiens
cccgggttcaaatcccggacgagccc

SEQ ID NO: 10759 - DNA, 27 bp, Homo Sapiens
cccgggttcaaatcccggacgagcccc

SEQ ID NO: 10760 - DNA, 28 bp, Homo Sapiens
cccgggttcaaatcccggacgagccccc

SEQ ID NO: 10761 - DNA, 29 bp, Homo Sapiens
cccgggttcaaatcccggacgagccccca

SEQ ID NO: 10762 - DNA, 29 bp, Homo Sapiens
cccgggttcaatccccggcacctccacca

SEQ ID NO: 10763 - DNA, 28 bp, Homo Sapiens
cccgggttcaatccccggcatctccacc

SEQ ID NO: 10764 - DNA, 29 bp, Homo Sapiens
cccgggttcaatccccggcatctccacca

SEQ ID NO: 10765 - DNA, 16 bp, Homo Sapiens
cccgggttcgactccc

SEQ ID NO: 10766 - DNA, 28 bp, Homo Sapiens
cccgggttcgactcccggtatgggaacc

SEQ ID NO: 10767 - DNA, 27 bp, Homo Sapiens
cccgggttcgactcccggtgtgggaac

SEQ ID NO: 10768 - DNA, 28 bp, Homo Sapiens
cccgggttcgactcccggtgtgggaacc

SEQ ID NO: 10769 - DNA, 29 bp, Homo Sapiens
cccgggttcgactcccggtgtgggaacca

SEQ ID NO: 10770 - DNA, 26 bp, Homo Sapiens
cccgggttcgatccccagcatctcca

SEQ ID NO: 10771 - DNA, 27 bp, Homo Sapiens
cccgggttcgatccccagcatctccac

SEQ ID NO: 10772 - DNA, 28 bp, Homo Sapiens
cccgggttcgatccccagcatctccacc

SEQ ID NO: 10773 - DNA, 29 bp, Homo Sapiens
cccgggttcgatccccagcatctccacca

SEQ ID NO: 10774 - DNA, 27 bp, Homo Sapiens
cccgggttcgatccccggcatctccac

SEQ ID NO: 10775 - DNA, 28 bp, Homo Sapiens
cccgggttcgatccccggcatctccacc

SEQ ID NO: 10776 - DNA, 16 bp, Homo Sapiens
cccgggttcgattccc

SEQ ID NO: 10777 - DNA, 24 bp, Homo Sapiens
cccgggttcgattcccggccaatg

SEQ ID NO: 10778 - DNA, 27 bp, Homo Sapiens
cccgggttcgattcccggccaatgcac

SEQ ID NO: 10779 - DNA, 25 bp, Homo Sapiens
cccgggttcgattcccggtcaggga

SEQ ID NO: 10780 - DNA, 27 bp, Homo Sapiens
cccgggttcgattcccggtcagggaac

SEQ ID NO: 10781 - DNA, 28 bp, Homo Sapiens
cccgggttcgattcccggtcagggaacc

SEQ ID NO: 10782 - DNA, 29 bp, Homo Sapiens
cccgggttcgattcccggtcagggaacca

SEQ ID NO: 10783 - DNA, 16 bp, Homo Sapiens
cccgggtttcggcacc

SEQ ID NO: 10784 - DNA, 17 bp, Homo Sapiens
cccgggtttcggcacca

SEQ ID NO: 10785 - DNA, 16 bp, Homo Sapiens
cccggtaatcgcataa

SEQ ID NO: 10786 - DNA, 17 bp, Homo Sapiens
cccggtaatcgcataaa

SEQ ID NO: 10787 - DNA, 18 bp, Homo Sapiens
cccggtaatcgcataaaa

SEQ ID NO: 10788 - DNA, 19 bp, Homo Sapiens
cccggtaatcgcataaaac

SEQ ID NO: 10789 - DNA, 20 bp, Homo Sapiens
cccggtaatcgcataaaact

SEQ ID NO: 10790 - DNA, 21 bp, Homo Sapiens
cccggtaatcgcataaaactt

SEQ ID NO: 10791 - DNA, 22 bp, Homo Sapiens
cccggtaatcgcataaaactta

SEQ ID NO: 10792 - DNA, 23 bp, Homo Sapiens
cccggtaatcgcataaaacttaa

SEQ ID NO: 10793 - DNA, 24 bp, Homo Sapiens
cccggtaatcgcataaaacttaaa

SEQ ID NO: 10794 - DNA, 25 bp, Homo Sapiens
cccggtaatcgcataaaacttaaaa

SEQ ID NO: 10795 - DNA, 26 bp, Homo Sapiens
cccggtaatcgcataaaacttaaaac

SEQ ID NO: 10796 - DNA, 27 bp, Homo Sapiens
cccggtaatcgcataaaacttaaaact

SEQ ID NO: 10797 - DNA, 28 bp, Homo Sapiens
cccggtaatcgcataaaacttaaaactt

SEQ ID NO: 10798 - DNA, 29 bp, Homo Sapiens
cccggtaatcgcataaaacttaaaacttt

SEQ ID NO: 10799 - DNA, 31 bp, Homo Sapiens
cccggtaatcgcataaaacttaaaactttac

SEQ ID NO: 10800 - DNA, 32 bp, Homo Sapiens
cccggtaatcgcataaaacttaaaactttaca

SEQ ID NO: 10801 - DNA, 35 bp, Homo Sapiens
cccggtaatcgcataaaacttaaaactttacagtc

SEQ ID NO: 10802 - DNA, 37 bp, Homo Sapiens
cccggtaatcgcataaaacttaaaactttacagtcag

SEQ ID NO: 10803 - DNA, 38 bp, Homo Sapiens
cccggtaatcgcataaaacttaaaactttacagtcaga

SEQ ID NO: 10804 - DNA, 43 bp, Homo Sapiens
cccggtaatcgcataaaacttaaaactttacagtcagaggttc

SEQ ID NO: 10805 - DNA, 44 bp, Homo Sapiens
cccggtaatcgcataaaacttaaaactttacagtcagaggttca

SEQ ID NO: 10806 - DNA, 16 bp, Homo Sapiens
cccggtatgggaacca

SEQ ID NO: 10807 - DNA, 16 bp, Homo Sapiens
cccggtcagggaacca

SEQ ID NO: 10808 - DNA, 17 bp, Homo Sapiens
cccggtggcctaatgga

SEQ ID NO: 10809 - DNA, 34 bp, Homo Sapiens
cccggtggcctaatggataaggcattggcctcct

SEQ ID NO: 10810 - DNA, 16 bp, Homo Sapiens
cccggtgtgggaacca

SEQ ID NO: 10811 - DNA, 16 bp, Homo Sapiens
cccgtacgggccacca

SEQ ID NO: 10812 - DNA, 16 bp, Homo Sapiens
cccgtactggccacca

SEQ ID NO: 10813 - DNA, 16 bp, Homo Sapiens
cccgtccgtgcctcca

SEQ ID NO: 10814 - DNA, 30 bp, Homo Sapiens
ccctatagctcaggggttagagcactggtc

SEQ ID NO: 10815 - DNA, 31 bp, Homo Sapiens
ccctatagctcaggggttagagcactggtct

SEQ ID NO: 10816 - DNA, 32 bp, Homo Sapiens
ccctatagctcaggggttagagcactggtctt

SEQ ID NO: 10817 - DNA, 33 bp, Homo Sapiens
ccctatagctcaggggttagagcactggtcttg

SEQ ID NO: 10818 - DNA, 34 bp, Homo Sapiens
ccctatagctcaggggttagagcactggtcttgt

SEQ ID NO: 10819 - DNA, 16 bp, Homo Sapiens
ccctcagtaagttgca

SEQ ID NO: 10820 - DNA, 17 bp, Homo Sapiens
ccctcagtaagttgcaa

SEQ ID NO: 10821 - DNA, 18 bp, Homo Sapiens
ccctcagtaagttgcaat

SEQ ID NO: 10822 - DNA, 19 bp, Homo Sapiens
ccctcagtaagttgcaata

SEQ ID NO: 10823 - DNA, 20 bp, Homo Sapiens
ccctcagtaagttgcaatac

SEQ ID NO: 10824 - DNA, 21 bp, Homo Sapiens
ccctcagtaagttgcaatact

SEQ ID NO: 10825 - DNA, 22 bp, Homo Sapiens
ccctcagtaagttgcaatactt

SEQ ID NO: 10826 - DNA, 28 bp, Homo Sapiens
ccctcagtaagttgcaatacttaatttc

SEQ ID NO: 10827 - DNA, 30 bp, Homo Sapiens
ccctcagtaagttgcaatacttaatttctg

SEQ ID NO: 10828 - DNA, 31 bp, Homo Sapiens
ccctcagtaagttgcaatacttaatttctgc

SEQ ID NO: 10829 - DNA, 32 bp, Homo Sapiens
ccctcagtaagttgcaatacttaatttctgcc

SEQ ID NO: 10830 - DNA, 33 bp, Homo Sapiens
ccctcagtaagttgcaatacttaatttctgcca

SEQ ID NO: 10831 - DNA, 16 bp, Homo Sapiens
ccctccgtggttacca

SEQ ID NO: 10832 - DNA, 16 bp, Homo Sapiens
ccctgctcgctgcgcc

SEQ ID NO: 10833 - DNA, 17 bp, Homo Sapiens
ccctgctcgctgcgcca

SEQ ID NO: 10834 - DNA, 16 bp, Homo Sapiens
ccctggaggcgtgggt

SEQ ID NO: 10835 - DNA, 37 bp, Homo Sapiens
ccctggaggcgtgggttcgaatcccacttctgacacc

SEQ ID NO: 10836 - DNA, 33 bp, Homo Sapiens
ccctggcggtctagtggttaggattcggcgctc

SEQ ID NO: 10837 - DNA, 16 bp, Homo Sapiens
ccctggtggtctagtg

SEQ ID NO: 10838 - DNA, 18 bp, Homo Sapiens
ccctggtggtctagtggc

SEQ ID NO: 10839 - DNA, 19 bp, Homo Sapiens
ccctggtggtctagtggct

SEQ ID NO: 10840 - DNA, 26 bp, Homo Sapiens
ccctggtggtctagtggctaggattc

SEQ ID NO: 10841 - DNA, 27 bp, Homo Sapiens
ccctggtggtctagtggctaggattcg

SEQ ID NO: 10842 - DNA, 28 bp, Homo Sapiens
ccctggtggtctagtggctaggattcgg

SEQ ID NO: 10843 - DNA, 29 bp, Homo Sapiens
ccctggtggtctagtggctaggattcggc

SEQ ID NO: 10844 - DNA, 30 bp, Homo Sapiens
ccctggtggtctagtggctaggattcggcg

SEQ ID NO: 10845 - DNA, 31 bp, Homo Sapiens
ccctggtggtctagtggctaggattcggcgc

SEQ ID NO: 10846 - DNA, 32 bp, Homo Sapiens
ccctggtggtctagtggctaggattcggcgct

SEQ ID NO: 10847 - DNA, 33 bp, Homo Sapiens
ccctggtggtctagtggctaggattcggcgctt

SEQ ID NO: 10848 - DNA, 34 bp, Homo Sapiens
ccctggtggtctagtggctaggattcggcgcttt

SEQ ID NO: 10849 - DNA, 35 bp, Homo Sapiens
ccctggtggtctagtggctaggattcggcgctttc

SEQ ID NO: 10850 - DNA, 36 bp, Homo Sapiens
ccctggtggtctagtggctaggattcggcgctttca

SEQ ID NO: 10851 - DNA, 37 bp, Homo Sapiens
ccctggtggtctagtggctaggattcggcgctttcac

SEQ ID NO: 10852 - DNA, 38 bp, Homo Sapiens
ccctggtggtctagtggctaggattcggcgctttcacc

SEQ ID NO: 10853 - DNA, 39 bp, Homo Sapiens
ccctggtggtctagtggctaggattcggcgctttcaccg

SEQ ID NO: 10854 - DNA, 18 bp, Homo Sapiens
ccctggtggtctagtggt

SEQ ID NO: 10855 - DNA, 23 bp, Homo Sapiens
ccctggtggtctagtggttagga

SEQ ID NO: 10856 - DNA, 24 bp, Homo Sapiens
ccctggtggtctagtggttaggat

SEQ ID NO: 10857 - DNA, 25 bp, Homo Sapiens
ccctggtggtctagtggttaggatt

SEQ ID NO: 10858 - DNA, 26 bp, Homo Sapiens
ccctggtggtctagtggttaggattc

SEQ ID NO: 10859 - DNA, 27 bp, Homo Sapiens
ccctggtggtctagtggttaggattcg

SEQ ID NO: 10860 - DNA, 28 bp, Homo Sapiens
ccctggtggtctagtggttaggattcgg

SEQ ID NO: 10861 - DNA, 29 bp, Homo Sapiens
ccctggtggtctagtggttaggattcggc

SEQ ID NO: 10862 - DNA, 30 bp, Homo Sapiens
ccctggtggtctagtggttaggattcggcg

SEQ ID NO: 10863 - DNA, 31 bp, Homo Sapiens
ccctggtggtctagtggttaggattcggcgc

SEQ ID NO: 10864 - DNA, 32 bp, Homo Sapiens
ccctggtggtctagtggttaggattcggcgct

SEQ ID NO: 10865 - DNA, 33 bp, Homo Sapiens
ccctggtggtctagtggttaggattcggcgctc

SEQ ID NO: 10866 - DNA, 34 bp, Homo Sapiens
ccctggtggtctagtggttaggattcggcgctct

SEQ ID NO: 10867 - DNA, 35 bp, Homo Sapiens
ccctggtggtctagtggttaggattcggcgctctc

SEQ ID NO: 10868 - DNA, 36 bp, Homo Sapiens
ccctggtggtctagtggttaggattcggcgctctca

SEQ ID NO: 10869 - DNA, 37 bp, Homo Sapiens
ccctggtggtctagtggttaggattcggcgctctcac

SEQ ID NO: 10870 - DNA, 38 bp, Homo Sapiens
ccctggtggtctagtggttaggattcggcgctctcacc

SEQ ID NO: 10871 - DNA, 39 bp, Homo Sapiens
ccctggtggtctagtggttaggattcggcgctctcaccg

SEQ ID NO: 10872 - DNA, 41 bp, Homo Sapiens
ccctggtggtctagtggttaggattcggcgctctcaccgcc

SEQ ID NO: 10873 - DNA, 48 bp, Homo Sapiens
ccctggtggtctagtggttaggattcggcgctctcaccgccgcggccc

SEQ ID NO: 10874 - DNA, 28 bp, Homo Sapiens
ccctggttcaaatccgggtgccccctcc

SEQ ID NO: 10875 - DNA, 26 bp, Homo Sapiens
ccctggttcaatcccgggtttcggca

SEQ ID NO: 10876 - DNA, 27 bp, Homo Sapiens
ccctggttcaatcccgggtttcggcac

SEQ ID NO: 10877 - DNA, 29 bp, Homo Sapiens
ccctggttcaatcccgggtttcggcacca

SEQ ID NO: 10878 - DNA, 16 bp, Homo Sapiens
ccctggttcgatcccg

SEQ ID NO: 10879 - DNA, 25 bp, Homo Sapiens
ccctggttcgatcccgggtttcggc

SEQ ID NO: 10880 - DNA, 26 bp, Homo Sapiens
ccctggttcgatcccgggtttcggca

SEQ ID NO: 10881 - DNA, 27 bp, Homo Sapiens
ccctggttcgatcccgggtttcggcac

SEQ ID NO: 10882 - DNA, 28 bp, Homo Sapiens
ccctggttcgatcccgggtttcggcacc

SEQ ID NO: 10883 - DNA, 29 bp, Homo Sapiens
ccctggttcgatcccgggtttcggcacca

SEQ ID NO: 10884 - DNA, 17 bp, Homo Sapiens
ccctgtggtctagtggc

SEQ ID NO: 10885 - DNA, 16 bp, Homo Sapiens
ccctgttcgggcgcca

SEQ ID NO: 10886 - DNA, 16 bp, Homo Sapiens
cccttcccgtactacc

SEQ ID NO: 10887 - DNA, 17 bp, Homo Sapiens
cccttcccgtactacca

SEQ ID NO: 10888 - DNA, 16 bp, Homo Sapiens
cccttcgtggtcgcca

SEQ ID NO: 10889 - DNA, 16 bp, Homo Sapiens
cccttcgtggttgcca

SEQ ID NO: 10890 - DNA, 16 bp, Homo Sapiens
ccgaaaatgttggtta

SEQ ID NO: 10891 - DNA, 17 bp, Homo Sapiens
ccgaaaatgttggttat

SEQ ID NO: 10892 - DNA, 18 bp, Homo Sapiens
ccgaaaatgttggttata

SEQ ID NO: 10893 - DNA, 19 bp, Homo Sapiens
ccgaaaatgttggttatac

SEQ ID NO: 10894 - DNA, 20 bp, Homo Sapiens
ccgaaaatgttggttatacc

SEQ ID NO: 10895 - DNA, 21 bp, Homo Sapiens
ccgaaaatgttggttataccc

SEQ ID NO: 10896 - DNA, 22 bp, Homo Sapiens
ccgaaaatgttggttataccct

SEQ ID NO: 10897 - DNA, 23 bp, Homo Sapiens
ccgaaaatgttggttataccctt

SEQ ID NO: 10898 - DNA, 24 bp, Homo Sapiens
ccgaaaatgttggttatacccttc

SEQ ID NO: 10899 - DNA, 25 bp, Homo Sapiens
ccgaaaatgttggttatacccttcc

SEQ ID NO: 10900 - DNA, 26 bp, Homo Sapiens
ccgaaaatgttggttatacccttccc

SEQ ID NO: 10901 - DNA, 27 bp, Homo Sapiens
ccgaaaatgttggttatacccttcccg

SEQ ID NO: 10902 - DNA, 28 bp, Homo Sapiens
ccgaaaatgttggttatacccttcccgt

SEQ ID NO: 10903 - DNA, 29 bp, Homo Sapiens
ccgaaaatgttggttatacccttcccgta

SEQ ID NO: 10904 - DNA, 30 bp, Homo Sapiens
ccgaaaatgttggttatacccttcccgtac

SEQ ID NO: 10905 - DNA, 31 bp, Homo Sapiens
ccgaaaatgttggttatacccttcccgtact

SEQ ID NO: 10906 - DNA, 32 bp, Homo Sapiens
ccgaaaatgttggttatacccttcccgtacta

SEQ ID NO: 10907 - DNA, 33 bp, Homo Sapiens
ccgaaaatgttggttatacccttcccgtactac

SEQ ID NO: 10908 - DNA, 34 bp, Homo Sapiens
ccgaaaatgttggttatacccttcccgtactacc

SEQ ID NO: 10909 - DNA, 35 bp, Homo Sapiens
ccgaaaatgttggttatacccttcccgtactacca

SEQ ID NO: 10910 - DNA, 37 bp, Homo Sapiens
ccgaaagattggtggttcgagcccacccagggacgcc

SEQ ID NO: 10911 - DNA, 17 bp, Homo Sapiens
ccgaaaggttggtggtt

SEQ ID NO: 10912 - DNA, 18 bp, Homo Sapiens
ccgaaaggttggtggttc

SEQ ID NO: 10913 - DNA, 19 bp, Homo Sapiens
ccgaaaggttggtggttcg

SEQ ID NO: 10914 - DNA, 34 bp, Homo Sapiens
ccgaaaggttggtggttcgagcccacccagggac

SEQ ID NO: 10915 - DNA, 35 bp, Homo Sapiens
ccgaaaggttggtggttcgagcccacccagggacg

SEQ ID NO: 10916 - DNA, 36 bp, Homo Sapiens
ccgaaaggttggtggttcgagcccacccagggacgc

SEQ ID NO: 10917 - DNA, 37 bp, Homo Sapiens
ccgaaaggttggtggttcgagcccacccagggacgcc

SEQ ID NO: 10918 - DNA, 38 bp, Homo Sapiens
ccgaaaggttggtggttcgagcccacccagggacgcca

SEQ ID NO: 10919 - DNA, 37 bp, Homo Sapiens
ccgaaaggttggtggttcgatcccacccagggacgcc

SEQ ID NO: 10920 - DNA, 38 bp, Homo Sapiens
ccgaaaggttggtggttcgatcccacccagggacgcca

SEQ ID NO: 10921 - DNA, 18 bp, Homo Sapiens
ccgaaatagctcagttgg

SEQ ID NO: 10922 - DNA, 22 bp, Homo Sapiens
ccgaaatagctcagttgggaga

SEQ ID NO: 10923 - DNA, 16 bp, Homo Sapiens
ccgaagatcacgggtt

SEQ ID NO: 10924 - DNA, 34 bp, Homo Sapiens
ccgaagatcacgggttcgaaccccgtccgtgcct

SEQ ID NO: 10925 - DNA, 35 bp, Homo Sapiens
ccgaagatcacgggttcgaaccccgtccgtgcctc

SEQ ID NO: 10926 - DNA, 36 bp, Homo Sapiens
ccgaagatcacgggttcgaaccccgtccgtgcctcc

SEQ ID NO: 10927 - DNA, 37 bp, Homo Sapiens
ccgaagatcacgggttcgaaccccgtccgtgcctcca

SEQ ID NO: 10928 - DNA, 16 bp, Homo Sapiens
ccgaagatcgcgggtt

SEQ ID NO: 10929 - DNA, 17 bp, Homo Sapiens
ccgaagatcgcgggttc

SEQ ID NO: 10930 - DNA, 28 bp, Homo Sapiens
ccgaagatcgcgggttcgaaccccgtcc

SEQ ID NO: 10931 - DNA, 31 bp, Homo Sapiens
ccgaagatcgcgggttcgaaccccgtccgtg

SEQ ID NO: 10932 - DNA, 33 bp, Homo Sapiens
ccgaagatcgcgggttcgaaccccgtccgtgcc

SEQ ID NO: 10933 - DNA, 34 bp, Homo Sapiens
ccgaagatcgcgggttcgaaccccgtccgtgcct

SEQ ID NO: 10934 - DNA, 35 bp, Homo Sapiens
ccgaagatcgcgggttcgaaccccgtccgtgcctc

SEQ ID NO: 10935 - DNA, 36 bp, Homo Sapiens
ccgaagatcgcgggttcgaaccccgtccgtgcctcc

SEQ ID NO: 10936 - DNA, 37 bp, Homo Sapiens
ccgaagatcgcgggttcgaaccccgtccgtgcctcca

SEQ ID NO: 10937 - DNA, 33 bp, Homo Sapiens
ccgagaggtcccgggttcaaatcccggacgagc

SEQ ID NO: 10938 - DNA, 35 bp, Homo Sapiens
ccgagaggtcccgggttcaaatcccggacgagccc

SEQ ID NO: 10939 - DNA, 36 bp, Homo Sapiens
ccgagaggtcccgggttcaaatcccggacgagcccc

SEQ ID NO: 10940 - DNA, 37 bp, Homo Sapiens
ccgagaggtcccgggttcaaatcccggacgagccccc

SEQ ID NO: 10941 - DNA, 38 bp, Homo Sapiens
ccgagaggtcccgggttcaaatcccggacgagccccca

SEQ ID NO: 10942 - DNA, 16 bp, Homo Sapiens
ccgagcggtctaaggc

SEQ ID NO: 10943 - DNA, 21 bp, Homo Sapiens
ccgagcggtctaaggcgctgc

SEQ ID NO: 10944 - DNA, 16 bp, Homo Sapiens
ccgaggtgattttcat

SEQ ID NO: 10945 - DNA, 17 bp, Homo Sapiens
ccgaggtgattttcata

SEQ ID NO: 10946 - DNA, 18 bp, Homo Sapiens
ccgaggtgattttcatat

SEQ ID NO: 10947 - DNA, 19 bp, Homo Sapiens
ccgaggtgattttcatatt

SEQ ID NO: 10948 - DNA, 20 bp, Homo Sapiens
ccgaggtgattttcatattg

SEQ ID NO: 10949 - DNA, 21 bp, Homo Sapiens
ccgaggtgattttcatattga

SEQ ID NO: 10950 - DNA, 22 bp, Homo Sapiens
ccgaggtgattttcatattgaa

SEQ ID NO: 10951 - DNA, 23 bp, Homo Sapiens
ccgaggtgattttcatattgaat

SEQ ID NO: 10952 - DNA, 24 bp, Homo Sapiens
ccgaggtgattttcatattgaatt

SEQ ID NO: 10953 - DNA, 25 bp, Homo Sapiens
ccgaggtgattttcatattgaattg

SEQ ID NO: 10954 - DNA, 26 bp, Homo Sapiens
ccgaggtgattttcatattgaattgc

SEQ ID NO: 10955 - DNA, 27 bp, Homo Sapiens
ccgaggtgattttcatattgaattgca

SEQ ID NO: 10956 - DNA, 28 bp, Homo Sapiens
ccgaggtgattttcatattgaattgcaa

SEQ ID NO: 10957 - DNA, 29 bp, Homo Sapiens
ccgaggtgattttcatattgaattgcaaa

SEQ ID NO: 10958 - DNA, 30 bp, Homo Sapiens
ccgaggtgattttcatattgaattgcaaat

SEQ ID NO: 10959 - DNA, 31 bp, Homo Sapiens
ccgaggtgattttcatattgaattgcaaatt

SEQ ID NO: 10960 - DNA, 32 bp, Homo Sapiens
ccgaggtgattttcatattgaattgcaaattc

SEQ ID NO: 10961 - DNA, 33 bp, Homo Sapiens
ccgaggtgattttcatattgaattgcaaattcg

SEQ ID NO: 10962 - DNA, 34 bp, Homo Sapiens
ccgaggtgattttcatattgaattgcaaattcga

SEQ ID NO: 10963 - DNA, 36 bp, Homo Sapiens
ccgaggtgattttcatattgaattgcaaattcgaag

SEQ ID NO: 10964 - DNA, 38 bp, Homo Sapiens
ccgaggtgattttcatattgaattgcaaattcgaagaa

SEQ ID NO: 10965 - DNA, 39 bp, Homo Sapiens
ccgaggtgattttcatattgaattgcaaattcgaagaag

SEQ ID NO: 10966 - DNA, 40 bp, Homo Sapiens
ccgaggtgattttcatattgaattgcaaattcgaagaagc

SEQ ID NO: 10967 - DNA, 45 bp, Homo Sapiens
ccgaggtgattttcatattgaattgcaaattcgaagaagcagctt

SEQ ID NO: 10968 - DNA, 46 bp, Homo Sapiens
ccgaggtgattttcatattgaattgcaaattcgaagaagcagcttc

SEQ ID NO: 10969 - DNA, 16 bp, Homo Sapiens
ccgaggttgtgagttc

SEQ ID NO: 10970 - DNA, 17 bp, Homo Sapiens
ccgaggttgtgagttcg

SEQ ID NO: 10971 - DNA, 35 bp, Homo Sapiens
ccgaggttgtgagttcgagcctcacctggagcacc

SEQ ID NO: 10972 - DNA, 36 bp, Homo Sapiens
ccgaggttgtgagttcgagcctcacctggagcacca

SEQ ID NO: 10973 - DNA, 16 bp, Homo Sapiens
ccgagtcacggcacca

SEQ ID NO: 10974 - DNA, 16 bp, Homo Sapiens
ccgagtggtctaaggc

SEQ ID NO: 10975 - DNA, 25 bp, Homo Sapiens
ccgagtggtctaaggcgccagactc

SEQ ID NO: 10976 - DNA, 26 bp, Homo Sapiens
ccgagttcgagtctcggtggaacctc

SEQ ID NO: 10977 - DNA, 16 bp, Homo Sapiens
ccgcacgttgggcgcc

SEQ ID NO: 10978 - DNA, 16 bp, Homo Sapiens
ccgcagcaacctcggt

SEQ ID NO: 10979 - DNA, 17 bp, Homo Sapiens
ccgcagcaacctcggtt

SEQ ID NO: 10980 - DNA, 18 bp, Homo Sapiens
ccgcagcaacctcggttc

SEQ ID NO: 10981 - DNA, 19 bp, Homo Sapiens
ccgcagcaacctcggttcg

SEQ ID NO: 10982 - DNA, 23 bp, Homo Sapiens
ccgcagcaacctcggttcgaatc

SEQ ID NO: 10983 - DNA, 28 bp, Homo Sapiens
ccgcagcaacctcggttcgaatccgagt

SEQ ID NO: 10984 - DNA, 29 bp, Homo Sapiens
ccgcagcaacctcggttcgaatccgagtc

SEQ ID NO: 10985 - DNA, 32 bp, Homo Sapiens
ccgcagcaacctcggttcgaatccgagtcacg

SEQ ID NO: 10986 - DNA, 33 bp, Homo Sapiens
ccgcagcaacctcggttcgaatccgagtcacgg

SEQ ID NO: 10987 - DNA, 34 bp, Homo Sapiens
ccgcagcaacctcggttcgaatccgagtcacggc

SEQ ID NO: 10988 - DNA, 35 bp, Homo Sapiens
ccgcagcaacctcggttcgaatccgagtcacggca

SEQ ID NO: 10989 - DNA, 36 bp, Homo Sapiens
ccgcagcaacctcggttcgaatccgagtcacggcac

SEQ ID NO: 10990 - DNA, 37 bp, Homo Sapiens
ccgcagcaacctcggttcgaatccgagtcacggcacc

SEQ ID NO: 10991 - DNA, 38 bp, Homo Sapiens
ccgcagcaacctcggttcgaatccgagtcacggcacca

SEQ ID NO: 10992 - DNA, 16 bp, Homo Sapiens
ccgccgcggcccgggt

SEQ ID NO: 10993 - DNA, 17 bp, Homo Sapiens
ccgccgcggcccgggtt

SEQ ID NO: 10994 - DNA, 18 bp, Homo Sapiens
ccgccgcggcccgggttc

SEQ ID NO: 10995 - DNA, 19 bp, Homo Sapiens
ccgccgcggcccgggttcg

SEQ ID NO: 10996 - DNA, 20 bp, Homo Sapiens
ccgccgcggcccgggttcga

SEQ ID NO: 10997 - DNA, 21 bp, Homo Sapiens
ccgccgcggcccgggttcgat

SEQ ID NO: 10998 - DNA, 22 bp, Homo Sapiens
ccgccgcggcccgggttcgatt

SEQ ID NO: 10999 - DNA, 23 bp, Homo Sapiens
ccgccgcggcccgggttcgattc

SEQ ID NO: 11000 - DNA, 24 bp, Homo Sapiens
ccgccgcggcccgggttcgattcc

SEQ ID NO: 11001 - DNA, 25 bp, Homo Sapiens
ccgccgcggcccgggttcgattccc

SEQ ID NO: 11002 - DNA, 26 bp, Homo Sapiens
ccgccgcggcccgggttcgattcccg

SEQ ID NO: 11003 - DNA, 27 bp, Homo Sapiens
ccgccgcggcccgggttcgattcccgg

SEQ ID NO: 11004 - DNA, 32 bp, Homo Sapiens
ccgccgcggcccgggttcgattcccggccagg

SEQ ID NO: 11005 - DNA, 37 bp, Homo Sapiens
ccgccgcggcccgggttcgattcccggccagggaacc

SEQ ID NO: 11006 - DNA, 28 bp, Homo Sapiens
ccgccgcggcccgggttcgattcccggt

SEQ ID NO: 11007 - DNA, 29 bp, Homo Sapiens
ccgccgcggcccgggttcgattcccggtc

SEQ ID NO: 11008 - DNA, 30 bp, Homo Sapiens
ccgccgcggcccgggttcgattcccggtca

SEQ ID NO: 11009 - DNA, 31 bp, Homo Sapiens
ccgccgcggcccgggttcgattcccggtcag

SEQ ID NO: 11010 - DNA, 32 bp, Homo Sapiens
ccgccgcggcccgggttcgattcccggtcagg

SEQ ID NO: 11011 - DNA, 33 bp, Homo Sapiens
ccgccgcggcccgggttcgattcccggtcaggg

SEQ ID NO: 11012 - DNA, 34 bp, Homo Sapiens
ccgccgcggcccgggttcgattcccggtcaggga

SEQ ID NO: 11013 - DNA, 35 bp, Homo Sapiens
ccgccgcggcccgggttcgattcccggtcagggaa

SEQ ID NO: 11014 - DNA, 36 bp, Homo Sapiens
ccgccgcggcccgggttcgattcccggtcagggaac

SEQ ID NO: 11015 - DNA, 37 bp, Homo Sapiens
ccgccgcggcccgggttcgattcccggtcagggaacc

SEQ ID NO: 11016 - DNA, 38 bp, Homo Sapiens
ccgccgcggcccgggttcgattcccggtcagggaacca

SEQ ID NO: 11017 - DNA, 27 bp, Homo Sapiens
ccgcctgtcacgcgggagaccggggtt

SEQ ID NO: 11018 - DNA, 46 bp, Homo Sapiens
ccgcctgtcacgcgggagaccggggttcaattccccgacggggagc

SEQ ID NO: 11019 - DNA, 47 bp, Homo Sapiens
ccgcctgtcacgcgggagaccggggttcaattccccgacggggagcc

SEQ ID NO: 11020 - DNA, 48 bp, Homo Sapiens
ccgcctgtcacgcgggagaccggggttcaattccccgacggggagcca

SEQ ID NO: 11021 - DNA, 42 bp, Homo Sapiens
ccgcctgtcacgcgggagaccggggttcgattccccgacggg

SEQ ID NO: 11022 - DNA, 43 bp, Homo Sapiens
ccgcctgtcacgcgggagaccggggttcgattccccgacgggg

SEQ ID NO: 11023 - DNA, 45 bp, Homo Sapiens
ccgcctgtcacgcgggagaccggggttcgattccccgacggggag

SEQ ID NO: 11024 - DNA, 46 bp, Homo Sapiens
ccgcctgtcacgcgggagaccggggttcgattccccgacggggagc

SEQ ID NO: 11025 - DNA, 47 bp, Homo Sapiens
ccgcctgtcacgcgggagaccggggttcgattccccgacggggagcc

SEQ ID NO: 11026 - DNA, 48 bp, Homo Sapiens
ccgcctgtcacgcgggagaccggggttcgattccccgacggggagcca

SEQ ID NO: 11027 - DNA, 17 bp, Homo Sapiens
ccgcgcaggttcgaacc

SEQ ID NO: 11028 - DNA, 19 bp, Homo Sapiens
ccgcgcaggttcgaaccct

SEQ ID NO: 11029 - DNA, 20 bp, Homo Sapiens
ccgcgcaggttcgaaccctg

SEQ ID NO: 11030 - DNA, 18 bp, Homo Sapiens
ccgcgcaggttcgaatcc

SEQ ID NO: 11031 - DNA, 20 bp, Homo Sapiens
ccgcgcaggttcgaatcctg

SEQ ID NO: 11032 - DNA, 32 bp, Homo Sapiens
ccgcgcaggttcgaatcctgccgactacgcca

SEQ ID NO: 11033 - DNA, 16 bp, Homo Sapiens
ccgcggcccgggttcg

SEQ ID NO: 11034 - DNA, 17 bp, Homo Sapiens
ccgcggcccgggttcga

SEQ ID NO: 11035 - DNA, 18 bp, Homo Sapiens
ccgcggcccgggttcgat

SEQ ID NO: 11036 - DNA, 20 bp, Homo Sapiens
ccgcggcccgggttcgattc

SEQ ID NO: 11037 - DNA, 22 bp, Homo Sapiens
ccgcggcccgggttcgattccc

SEQ ID NO: 11038 - DNA, 23 bp, Homo Sapiens
ccgcggcccgggttcgattcccg

SEQ ID NO: 11039 - DNA, 24 bp, Homo Sapiens
ccgcggcccgggttcgattcccgg

SEQ ID NO: 11040 - DNA, 25 bp, Homo Sapiens
ccgcggcccgggttcgattcccggt

SEQ ID NO: 11041 - DNA, 26 bp, Homo Sapiens
ccgcggcccgggttcgattcccggtc

SEQ ID NO: 11042 - DNA, 27 bp, Homo Sapiens
ccgcggcccgggttcgattcccggtca

SEQ ID NO: 11043 - DNA, 28 bp, Homo Sapiens
ccgcggcccgggttcgattcccggtcag

SEQ ID NO: 11044 - DNA, 29 bp, Homo Sapiens
ccgcggcccgggttcgattcccggtcagg

SEQ ID NO: 11045 - DNA, 30 bp, Homo Sapiens
ccgcggcccgggttcgattcccggtcaggg

SEQ ID NO: 11046 - DNA, 32 bp, Homo Sapiens
ccgcggcccgggttcgattcccggtcagggaa

SEQ ID NO: 11047 - DNA, 33 bp, Homo Sapiens
ccgcggcccgggttcgattcccggtcagggaac

SEQ ID NO: 11048 - DNA, 34 bp, Homo Sapiens
ccgcggcccgggttcgattcccggtcagggaacc

SEQ ID NO: 11049 - DNA, 35 bp, Homo Sapiens
ccgcggcccgggttcgattcccggtcagggaacca

SEQ ID NO: 11050 - DNA, 17 bp, Homo Sapiens
ccgcgtggcctaatgga

SEQ ID NO: 11051 - DNA, 21 bp, Homo Sapiens
ccgcgtggcctaatggataag

SEQ ID NO: 11052 - DNA, 28 bp, Homo Sapiens
ccgcgtggcctaatggataaggcgtctg

SEQ ID NO: 11053 - DNA, 31 bp, Homo Sapiens
ccgcgtggcctaatggataaggcgtctgact

SEQ ID NO: 11054 - DNA, 33 bp, Homo Sapiens
ccgcgtggcctaatggataaggcgtctgacttc

SEQ ID NO: 11055 - DNA, 34 bp, Homo Sapiens
ccgcgtggcctaatggataaggcgtctgacttcg

SEQ ID NO: 11056 - DNA, 34 bp, Homo Sapiens
ccgcgtggcctaatggataaggcgtctgattccg

SEQ ID NO: 11057 - DNA, 26 bp, Homo Sapiens
ccgcgtgggttcgaaccccactcctg

SEQ ID NO: 11058 - DNA, 30 bp, Homo Sapiens
ccgcgtgggttcgaaccccactcctggtac

SEQ ID NO: 11059 - DNA, 31 bp, Homo Sapiens
ccgcgtgggttcgaaccccactcctggtacc

SEQ ID NO: 11060 - DNA, 19 bp, Homo Sapiens
ccgctggtgtagtggtatc

SEQ ID NO: 11061 - DNA, 20 bp, Homo Sapiens
ccgctggtgtagtggtatca

SEQ ID NO: 11062 - DNA, 22 bp, Homo Sapiens
ccgctggtgtagtggtatcatg

SEQ ID NO: 11063 - DNA, 23 bp, Homo Sapiens
ccgctggtgtagtggtatcatgc

SEQ ID NO: 11064 - DNA, 24 bp, Homo Sapiens
ccgctggtgtagtggtatcatgca

SEQ ID NO: 11065 - DNA, 25 bp, Homo Sapiens
ccgctggtgtagtggtatcatgcaa

SEQ ID NO: 11066 - DNA, 26 bp, Homo Sapiens
ccgctggtgtagtggtatcatgcaag

SEQ ID NO: 11067 - DNA, 27 bp, Homo Sapiens
ccgctggtgtagtggtatcatgcaaga

SEQ ID NO: 11068 - DNA, 28 bp, Homo Sapiens
ccgctggtgtagtggtatcatgcaagat

SEQ ID NO: 11069 - DNA, 29 bp, Homo Sapiens
ccgctggtgtagtggtatcatgcaagatt

SEQ ID NO: 11070 - DNA, 30 bp, Homo Sapiens
ccgctggtgtagtggtatcatgcaagattc

SEQ ID NO: 11071 - DNA, 31 bp, Homo Sapiens
ccgctggtgtagtggtatcatgcaagattcc

SEQ ID NO: 11072 - DNA, 32 bp, Homo Sapiens
ccgctggtgtagtggtatcatgcaagattccc

SEQ ID NO: 11073 - DNA, 33 bp, Homo Sapiens
ccgctggtgtagtggtatcatgcaagattccca

SEQ ID NO: 11074 - DNA, 34 bp, Homo Sapiens
ccgctggtgtagtggtatcatgcaagattcccat

SEQ ID NO: 11075 - DNA, 36 bp, Homo Sapiens
ccgctggtgtagtggtatcatgcaagattcccattc

SEQ ID NO: 11076 - DNA, 37 bp, Homo Sapiens
ccgctggtgtagtggtatcatgcaagattcccattct

SEQ ID NO: 11077 - DNA, 39 bp, Homo Sapiens
ccgctggtgtagtggtatcatgcaagattcccattcttg

SEQ ID NO: 11078 - DNA, 41 bp, Homo Sapiens
ccgctggtgtagtggtatcatgcaagattcccattcttgcg

SEQ ID NO: 11079 - DNA, 46 bp, Homo Sapiens
ccgctggtgtagtggtatcatgcaagattcccattcttgcgacccg

SEQ ID NO: 11080 - DNA, 47 bp, Homo Sapiens
ccgctggtgtagtggtatcatgcaagattcccattcttgcgacccgg

SEQ ID NO: 11081 - DNA, 48 bp, Homo Sapiens
ccgctggtgtagtggtatcatgcaagattcccattcttgcgacccggg

SEQ ID NO: 11082 - DNA, 16 bp, Homo Sapiens
ccggagatgaaaacct

SEQ ID NO: 11083 - DNA, 17 bp, Homo Sapiens
ccggagatgaaaacctt

SEQ ID NO: 11084 - DNA, 18 bp, Homo Sapiens
ccggagatgaaaaccttt

SEQ ID NO: 11085 - DNA, 19 bp, Homo Sapiens
ccggagatgaaaacctttt

SEQ ID NO: 11086 - DNA, 20 bp, Homo Sapiens
ccggagatgaaaaccttttt

SEQ ID NO: 11087 - DNA, 21 bp, Homo Sapiens
ccggagatgaaaacctttttc

SEQ ID NO: 11088 - DNA, 22 bp, Homo Sapiens
ccggagatgaaaacctttttcc

SEQ ID NO: 11089 - DNA, 23 bp, Homo Sapiens
ccggagatgaaaacctttttcca

SEQ ID NO: 11090 - DNA, 24 bp, Homo Sapiens
ccggagatgaaaacctttttccaa

SEQ ID NO: 11091 - DNA, 25 bp, Homo Sapiens
ccggagatgaaaacctttttccaag

SEQ ID NO: 11092 - DNA, 26 bp, Homo Sapiens
ccggagatgaaaacctttttccaagg

SEQ ID NO: 11093 - DNA, 27 bp, Homo Sapiens
ccggagatgaaaacctttttccaagga

SEQ ID NO: 11094 - DNA, 28 bp, Homo Sapiens
ccggagatgaaaacctttttccaaggac

SEQ ID NO: 11095 - DNA, 29 bp, Homo Sapiens
ccggagatgaaaacctttttccaaggaca

SEQ ID NO: 11096 - DNA, 30 bp, Homo Sapiens
ccggagatgaaaacctttttccaaggacac

SEQ ID NO: 11097 - DNA, 31 bp, Homo Sapiens
ccggagatgaaaacctttttccaaggacacc

SEQ ID NO: 11098 - DNA, 32 bp, Homo Sapiens
ccggagatgaaaacctttttccaaggacacca

SEQ ID NO: 11099 - DNA, 17 bp, Homo Sapiens
ccggagctggggattgt

SEQ ID NO: 11100 - DNA, 31 bp, Homo Sapiens
ccggagctggggattgtgggttcgagtccca

SEQ ID NO: 11101 - DNA, 33 bp, Homo Sapiens
ccggagctggggattgtgggttcgagtcccatc

SEQ ID NO: 11102 - DNA, 16 bp, Homo Sapiens
ccggatagctcagtcg

SEQ ID NO: 11103 - DNA, 17 bp, Homo Sapiens
ccggatagctcagtcgg

SEQ ID NO: 11104 - DNA, 18 bp, Homo Sapiens
ccggatagctcagtcggt

SEQ ID NO: 11105 - DNA, 19 bp, Homo Sapiens
ccggatagctcagtcggta

SEQ ID NO: 11106 - DNA, 20 bp, Homo Sapiens
ccggatagctcagtcggtag

SEQ ID NO: 11107 - DNA, 21 bp, Homo Sapiens
ccggatagctcagtcggtaga

SEQ ID NO: 11108 - DNA, 22 bp, Homo Sapiens
ccggatagctcagtcggtagag

SEQ ID NO: 11109 - DNA, 23 bp, Homo Sapiens
ccggatagctcagtcggtagagc

SEQ ID NO: 11110 - DNA, 24 bp, Homo Sapiens
ccggatagctcagtcggtagagca

SEQ ID NO: 11111 - DNA, 25 bp, Homo Sapiens
ccggatagctcagtcggtagagcat

SEQ ID NO: 11112 - DNA, 26 bp, Homo Sapiens
ccggatagctcagtcggtagagcatc

SEQ ID NO: 11113 - DNA, 27 bp, Homo Sapiens
ccggatagctcagtcggtagagcatca

SEQ ID NO: 11114 - DNA, 28 bp, Homo Sapiens
ccggatagctcagtcggtagagcatcag

SEQ ID NO: 11115 - DNA, 29 bp, Homo Sapiens
ccggatagctcagtcggtagagcatcaga

SEQ ID NO: 11116 - DNA, 30 bp, Homo Sapiens
ccggatagctcagtcggtagagcatcagac

SEQ ID NO: 11117 - DNA, 31 bp, Homo Sapiens
ccggatagctcagtcggtagagcatcagact

SEQ ID NO: 11118 - DNA, 32 bp, Homo Sapiens
ccggatagctcagtcggtagagcatcagactt

SEQ ID NO: 11119 - DNA, 33 bp, Homo Sapiens
ccggatagctcagtcggtagagcatcagacttt

SEQ ID NO: 11120 - DNA, 34 bp, Homo Sapiens
ccggatagctcagtcggtagagcatcagactttt

SEQ ID NO: 11121 - DNA, 39 bp, Homo Sapiens
ccggatagctcagtcggtagagcatcagacttttaatct

SEQ ID NO: 11122 - DNA, 16 bp, Homo Sapiens
ccggatcagaagattg

SEQ ID NO: 11123 - DNA, 17 bp, Homo Sapiens
ccggatcagaagattga

SEQ ID NO: 11124 - DNA, 18 bp, Homo Sapiens
ccggatcagaagattgag

SEQ ID NO: 11125 - DNA, 19 bp, Homo Sapiens
ccggatcagaagattgagg

SEQ ID NO: 11126 - DNA, 20 bp, Homo Sapiens
ccggatcagaagattgaggg

SEQ ID NO: 11127 - DNA, 21 bp, Homo Sapiens
ccggatcagaagattgagggt

SEQ ID NO: 11128 - DNA, 22 bp, Homo Sapiens
ccggatcagaagattgagggtt

SEQ ID NO: 11129 - DNA, 23 bp, Homo Sapiens
ccggatcagaagattgagggttc

SEQ ID NO: 11130 - DNA, 24 bp, Homo Sapiens
ccggatcagaagattgagggttcg

SEQ ID NO: 11131 - DNA, 30 bp, Homo Sapiens
ccggatcagaagattgagggttcgagtccc

SEQ ID NO: 11132 - DNA, 31 bp, Homo Sapiens
ccggatcagaagattgagggttcgagtccct

SEQ ID NO: 11133 - DNA, 42 bp, Homo Sapiens
ccggatcagaagattgagggttcgagtcccttcgtggtcgcc

SEQ ID NO: 11134 - DNA, 16 bp, Homo Sapiens
ccggatggaggcgtgg

SEQ ID NO: 11135 - DNA, 17 bp, Homo Sapiens
ccggatggaggcgtggg

SEQ ID NO: 11136 - DNA, 18 bp, Homo Sapiens
ccggatggaggcgtgggt

SEQ ID NO: 11137 - DNA, 19 bp, Homo Sapiens
ccggatggaggcgtgggtt

SEQ ID NO: 11138 - DNA, 20 bp, Homo Sapiens
ccggatggaggcgtgggttc

SEQ ID NO: 11139 - DNA, 21 bp, Homo Sapiens
ccggatggaggcgtgggttcg

SEQ ID NO: 11140 - DNA, 28 bp, Homo Sapiens
ccggatggaggcgtgggttcgaatccca

SEQ ID NO: 11141 - DNA, 30 bp, Homo Sapiens
ccggatggaggcgtgggttcgaatcccact

SEQ ID NO: 11142 - DNA, 34 bp, Homo Sapiens
ccggatggaggcgtgggttcgaatcccacttctg

SEQ ID NO: 11143 - DNA, 37 bp, Homo Sapiens
ccggatggaggcgtgggttcgaatcccacttctgaca

SEQ ID NO: 11144 - DNA, 38 bp, Homo Sapiens
ccggatggaggcgtgggttcgaatcccacttctgacac

SEQ ID NO: 11145 - DNA, 39 bp, Homo Sapiens
ccggatggaggcgtgggttcgaatcccacttctgacacc

SEQ ID NO: 11146 - DNA, 16 bp, Homo Sapiens
ccggctagctcagtcg

SEQ ID NO: 11147 - DNA, 32 bp, Homo Sapiens
ccggctagctcagtcgatagagcatgagactc

SEQ ID NO: 11148 - DNA, 17 bp, Homo Sapiens
ccggctagctcagtcgg

SEQ ID NO: 11149 - DNA, 20 bp, Homo Sapiens
ccggctagctcagtcggtag

SEQ ID NO: 11150 - DNA, 21 bp, Homo Sapiens
ccggctagctcagtcggtaga

SEQ ID NO: 11151 - DNA, 22 bp, Homo Sapiens
ccggctagctcagtcggtagag

SEQ ID NO: 11152 - DNA, 23 bp, Homo Sapiens
ccggctagctcagtcggtagagc

SEQ ID NO: 11153 - DNA, 24 bp, Homo Sapiens
ccggctagctcagtcggtagagca

SEQ ID NO: 11154 - DNA, 25 bp, Homo Sapiens
ccggctagctcagtcggtagagcat

SEQ ID NO: 11155 - DNA, 26 bp, Homo Sapiens
ccggctagctcagtcggtagagcatg

SEQ ID NO: 11156 - DNA, 27 bp, Homo Sapiens
ccggctagctcagtcggtagagcatga

SEQ ID NO: 11157 - DNA, 28 bp, Homo Sapiens
ccggctagctcagtcggtagagcatgag

SEQ ID NO: 11158 - DNA, 29 bp, Homo Sapiens
ccggctagctcagtcggtagagcatgaga

SEQ ID NO: 11159 - DNA, 30 bp, Homo Sapiens
ccggctagctcagtcggtagagcatgagac

SEQ ID NO: 11160 - DNA, 31 bp, Homo Sapiens
ccggctagctcagtcggtagagcatgagacc

SEQ ID NO: 11161 - DNA, 32 bp, Homo Sapiens
ccggctagctcagtcggtagagcatgagaccc

SEQ ID NO: 11162 - DNA, 33 bp, Homo Sapiens
ccggctagctcagtcggtagagcatgagaccct

SEQ ID NO: 11163 - DNA, 34 bp, Homo Sapiens
ccggctagctcagtcggtagagcatgagaccctt

SEQ ID NO: 11164 - DNA, 39 bp, Homo Sapiens
ccggctagctcagtcggtagagcatgagacccttaatct

SEQ ID NO: 11165 - DNA, 31 bp, Homo Sapiens
ccggctagctcagtcggtagagcatgagact

SEQ ID NO: 11166 - DNA, 32 bp, Homo Sapiens
ccggctagctcagtcggtagagcatgagactc

SEQ ID NO: 11167 - DNA, 33 bp, Homo Sapiens
ccggctagctcagtcggtagagcatgagactct

SEQ ID NO: 11168 - DNA, 34 bp, Homo Sapiens
ccggctagctcagtcggtagagcatgagactctt

SEQ ID NO: 11169 - DNA, 35 bp, Homo Sapiens
ccggctagctcagtcggtagagcatgagactctta

SEQ ID NO: 11170 - DNA, 36 bp, Homo Sapiens
ccggctagctcagtcggtagagcatgagactcttaa

SEQ ID NO: 11171 - DNA, 37 bp, Homo Sapiens
ccggctagctcagtcggtagagcatgagactcttaat

SEQ ID NO: 11172 - DNA, 38 bp, Homo Sapiens
ccggctagctcagtcggtagagcatgagactcttaatc

SEQ ID NO: 11173 - DNA, 39 bp, Homo Sapiens
ccggctagctcagtcggtagagcatgagactcttaatct

SEQ ID NO: 11174 - DNA, 40 bp, Homo Sapiens
ccggctagctcagtcggtagagcatgagactcttaatctc

SEQ ID NO: 11175 - DNA, 41 bp, Homo Sapiens
ccggctagctcagtcggtagagcatgagactcttaatctca

SEQ ID NO: 11176 - DNA, 27 bp, Homo Sapiens
ccggctagctcagtcggtagagcatgg

SEQ ID NO: 11177 - DNA, 28 bp, Homo Sapiens
ccggctagctcagtcggtagagcatggg

SEQ ID NO: 11178 - DNA, 29 bp, Homo Sapiens
ccggctagctcagtcggtagagcatggga

SEQ ID NO: 11179 - DNA, 30 bp, Homo Sapiens
ccggctagctcagtcggtagagcatgggac

SEQ ID NO: 11180 - DNA, 31 bp, Homo Sapiens
ccggctagctcagtcggtagagcatgggact

SEQ ID NO: 11181 - DNA, 32 bp, Homo Sapiens
ccggctagctcagtcggtagagcatgggactc

SEQ ID NO: 11182 - DNA, 33 bp, Homo Sapiens
ccggctagctcagtcggtagagcatgggactct

SEQ ID NO: 11183 - DNA, 34 bp, Homo Sapiens
ccggctagctcagtcggtagagcatgggactctt

SEQ ID NO: 11184 - DNA, 35 bp, Homo Sapiens
ccggctagctcagtcggtagagcatgggactctta

SEQ ID NO: 11185 - DNA, 36 bp, Homo Sapiens
ccggctagctcagtcggtagagcatgggactcttaa

SEQ ID NO: 11186 - DNA, 37 bp, Homo Sapiens
ccggctagctcagtcggtagagcatgggactcttaat

SEQ ID NO: 11187 - DNA, 38 bp, Homo Sapiens
ccggctagctcagtcggtagagcatgggactcttaatc

SEQ ID NO: 11188 - DNA, 39 bp, Homo Sapiens
ccggctagctcagtcggtagagcatgggactcttaatcc

SEQ ID NO: 11189 - DNA, 40 bp, Homo Sapiens
ccggctagctcagtcggtagagcatgggactcttaatccc

SEQ ID NO: 11190 - DNA, 41 bp, Homo Sapiens
ccggctagctcagtcggtagagcatgggactcttaatccca

SEQ ID NO: 11191 - DNA, 47 bp, Homo Sapiens
ccggctagctcagtcggtagagcatgggactcttaatcccagggtcg

SEQ ID NO: 11192 - DNA, 39 bp, Homo Sapiens
ccggctagctcagtcggtagagcatgggactcttaatct

SEQ ID NO: 11193 - DNA, 16 bp, Homo Sapiens
ccggctcgaaggacca

SEQ ID NO: 11194 - DNA, 16 bp, Homo Sapiens
ccggctcggaggacca

SEQ ID NO: 11195 - DNA, 16 bp, Homo Sapiens
ccgggcagaagcacca

SEQ ID NO: 11196 - DNA, 16 bp, Homo Sapiens
ccgggcggaaacacca

SEQ ID NO: 11197 - DNA, 26 bp, Homo Sapiens
ccggggttcaagtccctgttcgggcg

SEQ ID NO: 11198 - DNA, 27 bp, Homo Sapiens
ccggggttcaagtccctgttcgggcgc

SEQ ID NO: 11199 - DNA, 26 bp, Homo Sapiens
ccggggttcaattccccgacggggag

SEQ ID NO: 11200 - DNA, 27 bp, Homo Sapiens
ccggggttcaattccccgacggggagc

SEQ ID NO: 11201 - DNA, 28 bp, Homo Sapiens
ccggggttcaattccccgacggggagcc

SEQ ID NO: 11202 - DNA, 29 bp, Homo Sapiens
ccggggttcaattccccgacggggagcca

SEQ ID NO: 11203 - DNA, 16 bp, Homo Sapiens
ccggggttcgattccc

SEQ ID NO: 11204 - DNA, 23 bp, Homo Sapiens
ccggggttcgattccccgacggg

SEQ ID NO: 11205 - DNA, 24 bp, Homo Sapiens
ccggggttcgattccccgacgggg

SEQ ID NO: 11206 - DNA, 26 bp, Homo Sapiens
ccggggttcgattccccgacggggag

SEQ ID NO: 11207 - DNA, 27 bp, Homo Sapiens
ccggggttcgattccccgacggggagc

SEQ ID NO: 11208 - DNA, 28 bp, Homo Sapiens
ccggggttcgattccccgacggggagcc

SEQ ID NO: 11209 - DNA, 29 bp, Homo Sapiens
ccggggttcgattccccgacggggagcca

SEQ ID NO: 11210 - DNA, 16 bp, Homo Sapiens
ccgggtgccccctcca

SEQ ID NO: 11211 - DNA, 16 bp, Homo Sapiens
ccgggttcgactcccg

SEQ ID NO: 11212 - DNA, 22 bp, Homo Sapiens
ccgggttcgactcccggtgtgg

SEQ ID NO: 11213 - DNA, 26 bp, Homo Sapiens
ccgggttcgactcccggtgtgggaac

SEQ ID NO: 11214 - DNA, 27 bp, Homo Sapiens
ccgggttcgactcccggtgtgggaacc

SEQ ID NO: 11215 - DNA, 28 bp, Homo Sapiens
ccgggttcgactcccggtgtgggaacca

SEQ ID NO: 11216 - DNA, 27 bp, Homo Sapiens
ccgggttcgagtcccggcggagtcgcc

SEQ ID NO: 11217 - DNA, 28 bp, Homo Sapiens
ccgggttcgagtcccggcggagtcgcca

SEQ ID NO: 11218 - DNA, 27 bp, Homo Sapiens
ccgggttcgatccccggcatctccacc

SEQ ID NO: 11219 - DNA, 28 bp, Homo Sapiens
ccgggttcgatccccggcatctccacca

SEQ ID NO: 11220 - DNA, 22 bp, Homo Sapiens
ccgggttcgattcccgggcggc

SEQ ID NO: 11221 - DNA, 23 bp, Homo Sapiens
ccgggttcgattcccgggcggcg

SEQ ID NO: 11222 - DNA, 25 bp, Homo Sapiens
ccgggttcgattcccgggcggcgca

SEQ ID NO: 11223 - DNA, 26 bp, Homo Sapiens
ccgggttcgattcccgggcggcgcac

SEQ ID NO: 11224 - DNA, 27 bp, Homo Sapiens
ccgggttcgattcccgggcggcgcacc

SEQ ID NO: 11225 - DNA, 28 bp, Homo Sapiens
ccgggttcgattcccgggcggcgcacca

SEQ ID NO: 11226 - DNA, 27 bp, Homo Sapiens
ccgggttcgattcccggtcagggaacc

SEQ ID NO: 11227 - DNA, 28 bp, Homo Sapiens
ccgggttcgattcccggtcagggaacca

SEQ ID NO: 11228 - DNA, 16 bp, Homo Sapiens
ccgggtttcggcacca

SEQ ID NO: 11229 - DNA, 16 bp, Homo Sapiens
ccggtaatcgcataaa

SEQ ID NO: 11230 - DNA, 17 bp, Homo Sapiens
ccggtaatcgcataaaa

SEQ ID NO: 11231 - DNA, 18 bp, Homo Sapiens
ccggtaatcgcataaaac

SEQ ID NO: 11232 - DNA, 19 bp, Homo Sapiens
ccggtaatcgcataaaact

SEQ ID NO: 11233 - DNA, 20 bp, Homo Sapiens
ccggtaatcgcataaaactt

SEQ ID NO: 11234 - DNA, 21 bp, Homo Sapiens
ccggtaatcgcataaaactta

SEQ ID NO: 11235 - DNA, 22 bp, Homo Sapiens
ccggtaatcgcataaaacttaa

SEQ ID NO: 11236 - DNA, 23 bp, Homo Sapiens
ccggtaatcgcataaaacttaaa

SEQ ID NO: 11237 - DNA, 24 bp, Homo Sapiens
ccggtaatcgcataaaacttaaaa

SEQ ID NO: 11238 - DNA, 25 bp, Homo Sapiens
ccggtaatcgcataaaacttaaaac

SEQ ID NO: 11239 - DNA, 26 bp, Homo Sapiens
ccggtaatcgcataaaacttaaaact

SEQ ID NO: 11240 - DNA, 27 bp, Homo Sapiens
ccggtaatcgcataaaacttaaaactt

SEQ ID NO: 11241 - DNA, 28 bp, Homo Sapiens
ccggtaatcgcataaaacttaaaacttt

SEQ ID NO: 11242 - DNA, 30 bp, Homo Sapiens
ccggtaatcgcataaaacttaaaactttac

SEQ ID NO: 11243 - DNA, 31 bp, Homo Sapiens
ccggtaatcgcataaaacttaaaactttaca

SEQ ID NO: 11244 - DNA, 32 bp, Homo Sapiens
ccggtaatcgcataaaacttaaaactttacag

SEQ ID NO: 11245 - DNA, 33 bp, Homo Sapiens
ccggtaatcgcataaaacttaaaactttacagt

SEQ ID NO: 11246 - DNA, 34 bp, Homo Sapiens
ccggtaatcgcataaaacttaaaactttacagtc

SEQ ID NO: 11247 - DNA, 35 bp, Homo Sapiens
ccggtaatcgcataaaacttaaaactttacagtca

SEQ ID NO: 11248 - DNA, 36 bp, Homo Sapiens
ccggtaatcgcataaaacttaaaactttacagtcag

SEQ ID NO: 11249 - DNA, 37 bp, Homo Sapiens
ccggtaatcgcataaaacttaaaactttacagtcaga

SEQ ID NO: 11250 - DNA, 38 bp, Homo Sapiens
ccggtaatcgcataaaacttaaaactttacagtcagag

SEQ ID NO: 11251 - DNA, 40 bp, Homo Sapiens
ccggtaatcgcataaaacttaaaactttacagtcagaggt

SEQ ID NO: 11252 - DNA, 42 bp, Homo Sapiens
ccggtaatcgcataaaacttaaaactttacagtcagaggttc

SEQ ID NO: 11253 - DNA, 43 bp, Homo Sapiens
ccggtaatcgcataaaacttaaaactttacagtcagaggttca

SEQ ID NO: 11254 - DNA, 16 bp, Homo Sapiens
ccggtggcctaatgga

SEQ ID NO: 11255 - DNA, 18 bp, Homo Sapiens
ccggttagctcagtcggc

SEQ ID NO: 11256 - DNA, 17 bp, Homo Sapiens
ccggttagctcagttgg

SEQ ID NO: 11257 - DNA, 31 bp, Homo Sapiens
ccggttagctcagttggttagagcgtggtgc

SEQ ID NO: 11258 - DNA, 17 bp, Homo Sapiens
ccggttcaaatccgggt

SEQ ID NO: 11259 - DNA, 17 bp, Homo Sapiens
ccggttcgaaaccgggc

SEQ ID NO: 11260 - DNA, 18 bp, Homo Sapiens
ccggttcgaaaccgggcg

SEQ ID NO: 11261 - DNA, 20 bp, Homo Sapiens
ccggttcgaaaccgggcgga

SEQ ID NO: 11262 - DNA, 22 bp, Homo Sapiens
ccggttcgaaaccgggcggaaa

SEQ ID NO: 11263 - DNA, 23 bp, Homo Sapiens
ccggttcgaaaccgggcggaaac

SEQ ID NO: 11264 - DNA, 24 bp, Homo Sapiens
ccggttcgaaaccgggcggaaaca

SEQ ID NO: 11265 - DNA, 26 bp, Homo Sapiens
ccggttcgaaaccgggcggaaacacc

SEQ ID NO: 11266 - DNA, 17 bp, Homo Sapiens
ccggttcgatcccgggc

SEQ ID NO: 11267 - DNA, 23 bp, Homo Sapiens
ccggttcgatcccgggcggaaac

SEQ ID NO: 11268 - DNA, 17 bp, Homo Sapiens
ccgtagtggagtggtta

SEQ ID NO: 11269 - DNA, 19 bp, Homo Sapiens
ccgtagtggagtggttatc

SEQ ID NO: 11270 - DNA, 28 bp, Homo Sapiens
ccgtagtggagtggttatcacgttcgcc

SEQ ID NO: 11271 - DNA, 29 bp, Homo Sapiens
ccgtagtggagtggttatcacgttcgcct

SEQ ID NO: 11272 - DNA, 19 bp, Homo Sapiens
ccgtagtgtagcggttatc

SEQ ID NO: 11273 - DNA, 24 bp, Homo Sapiens
ccgtagtgtagcggttatcacatt

SEQ ID NO: 11274 - DNA, 28 bp, Homo Sapiens
ccgtagtgtagcggttatcacattcgcc

SEQ ID NO: 11275 - DNA, 29 bp, Homo Sapiens
ccgtagtgtagcggttatcacattcgcct

SEQ ID NO: 11276 - DNA, 30 bp, Homo Sapiens
ccgtagtgtagcggttatcacattcgcctc

SEQ ID NO: 11277 - DNA, 31 bp, Homo Sapiens
ccgtagtgtagcggttatcacattcgcctca

SEQ ID NO: 11278 - DNA, 32 bp, Homo Sapiens
ccgtagtgtagcggttatcacattcgcctcac

SEQ ID NO: 11279 - DNA, 16 bp, Homo Sapiens
ccgtagtgtagtggtc

SEQ ID NO: 11280 - DNA, 18 bp, Homo Sapiens
ccgtagtgtagtggtcat

SEQ ID NO: 11281 - DNA, 19 bp, Homo Sapiens
ccgtagtgtagtggtcatc

SEQ ID NO: 11282 - DNA, 20 bp, Homo Sapiens
ccgtagtgtagtggtcatca

SEQ ID NO: 11283 - DNA, 27 bp, Homo Sapiens
ccgtagtgtagtggtcatcacgttcgc

SEQ ID NO: 11284 - DNA, 28 bp, Homo Sapiens
ccgtagtgtagtggtcatcacgttcgcc

SEQ ID NO: 11285 - DNA, 29 bp, Homo Sapiens
ccgtagtgtagtggtcatcacgttcgcct

SEQ ID NO: 11286 - DNA, 16 bp, Homo Sapiens
ccgtagtgtagtggtt

SEQ ID NO: 11287 - DNA, 18 bp, Homo Sapiens
ccgtagtgtagtggttat

SEQ ID NO: 11288 - DNA, 19 bp, Homo Sapiens
ccgtagtgtagtggttatc

SEQ ID NO: 11289 - DNA, 20 bp, Homo Sapiens
ccgtagtgtagtggttatca

SEQ ID NO: 11290 - DNA, 22 bp, Homo Sapiens
ccgtagtgtagtggttatcacg

SEQ ID NO: 11291 - DNA, 26 bp, Homo Sapiens
ccgtagtgtagtggttatcacgttcg

SEQ ID NO: 11292 - DNA, 27 bp, Homo Sapiens
ccgtagtgtagtggttatcacgttcgc

SEQ ID NO: 11293 - DNA, 28 bp, Homo Sapiens
ccgtagtgtagtggttatcacgttcgcc

SEQ ID NO: 11294 - DNA, 29 bp, Homo Sapiens
ccgtagtgtagtggttatcacgttcgcct

SEQ ID NO: 11295 - DNA, 30 bp, Homo Sapiens
ccgtagtgtagtggttatcacgttcgcctc

SEQ ID NO: 11296 - DNA, 31 bp, Homo Sapiens
ccgtagtgtagtggttatcacgttcgcctca

SEQ ID NO: 11297 - DNA, 32 bp, Homo Sapiens
ccgtagtgtagtggttatcacgttcgcctcac

SEQ ID NO: 11298 - DNA, 33 bp, Homo Sapiens
ccgtagtgtagtggttatcacgttcgcctcaca

SEQ ID NO: 11299 - DNA, 34 bp, Homo Sapiens
ccgtagtgtagtggttatcacgttcgcctcacac

SEQ ID NO: 11300 - DNA, 35 bp, Homo Sapiens
ccgtagtgtagtggttatcacgttcgcctcacacg

SEQ ID NO: 11301 - DNA, 38 bp, Homo Sapiens
ccgtagtgtagtggttatcacgttcgcctcacacgcga

SEQ ID NO: 11302 - DNA, 48 bp, Homo Sapiens
ccgtagtgtagtggttatcacgttcgcctcacacgcgaaaggtccccg

SEQ ID NO: 11303 - DNA, 19 bp, Homo Sapiens
ccgtagtgtagtggttatt

SEQ ID NO: 11304 - DNA, 16 bp, Homo Sapiens
ccgtgatcgtatagtg

SEQ ID NO: 11305 - DNA, 20 bp, Homo Sapiens
ccgtgatcgtatagtggtta

SEQ ID NO: 11306 - DNA, 21 bp, Homo Sapiens
ccgtgatcgtatagtggttag

SEQ ID NO: 11307 - DNA, 22 bp, Homo Sapiens
ccgtgatcgtatagtggttagt

SEQ ID NO: 11308 - DNA, 23 bp, Homo Sapiens
ccgtgatcgtatagtggttagta

SEQ ID NO: 11309 - DNA, 24 bp, Homo Sapiens
ccgtgatcgtatagtggttagtac

SEQ ID NO: 11310 - DNA, 25 bp, Homo Sapiens
ccgtgatcgtatagtggttagtact

SEQ ID NO: 11311 - DNA, 26 bp, Homo Sapiens
ccgtgatcgtatagtggttagtactc

SEQ ID NO: 11312 - DNA, 27 bp, Homo Sapiens
ccgtgatcgtatagtggttagtactct

SEQ ID NO: 11313 - DNA, 28 bp, Homo Sapiens
ccgtgatcgtatagtggttagtactctg

SEQ ID NO: 11314 - DNA, 29 bp, Homo Sapiens
ccgtgatcgtatagtggttagtactctgc

SEQ ID NO: 11315 - DNA, 30 bp, Homo Sapiens
ccgtgatcgtatagtggttagtactctgcg

SEQ ID NO: 11316 - DNA, 31 bp, Homo Sapiens
ccgtgatcgtatagtggttagtactctgcgt

SEQ ID NO: 11317 - DNA, 32 bp, Homo Sapiens
ccgtgatcgtatagtggttagtactctgcgtt

SEQ ID NO: 11318 - DNA, 33 bp, Homo Sapiens
ccgtgatcgtatagtggttagtactctgcgttg

SEQ ID NO: 11319 - DNA, 34 bp, Homo Sapiens
ccgtgatcgtatagtggttagtactctgcgttgt

SEQ ID NO: 11320 - DNA, 35 bp, Homo Sapiens
ccgtgatcgtatagtggttagtactctgcgttgtg

SEQ ID NO: 11321 - DNA, 36 bp, Homo Sapiens
ccgtgatcgtatagtggttagtactctgcgttgtgg

SEQ ID NO: 11322 - DNA, 37 bp, Homo Sapiens
ccgtgatcgtatagtggttagtactctgcgttgtggc

SEQ ID NO: 11323 - DNA, 38 bp, Homo Sapiens
ccgtgatcgtatagtggttagtactctgcgttgtggcc

SEQ ID NO: 11324 - DNA, 39 bp, Homo Sapiens
ccgtgatcgtatagtggttagtactctgcgttgtggccg

SEQ ID NO: 11325 - DNA, 40 bp, Homo Sapiens
ccgtgatcgtatagtggttagtactctgcgttgtggccgc

SEQ ID NO: 11326 - DNA, 41 bp, Homo Sapiens
ccgtgatcgtatagtggttagtactctgcgttgtggccgca

SEQ ID NO: 11327 - DNA, 44 bp, Homo Sapiens
ccgtgatcgtatagtggttagtactctgcgttgtggccgcagca

SEQ ID NO: 11328 - DNA, 47 bp, Homo Sapiens
ccgtgatcgtatagtggttagtactctgcgttgtggccgcagcaacc

SEQ ID NO: 11329 - DNA, 48 bp, Homo Sapiens
ccgtgatcgtatagtggttagtactctgcgttgtggccgcagcaacct

SEQ ID NO: 11330 - DNA, 16 bp, Homo Sapiens
ccgtgcgagaatacca

SEQ ID NO: 11331 - DNA, 25 bp, Homo Sapiens
ccgtggcgcaatggatagcgcattg

SEQ ID NO: 11332 - DNA, 29 bp, Homo Sapiens
ccgtggcgcaatggatagcgcattggact

SEQ ID NO: 11333 - DNA, 32 bp, Homo Sapiens
ccgtggcgcaatggatagcgcattggacttct

SEQ ID NO: 11334 - DNA, 17 bp, Homo Sapiens
ccgttaacttccaatta

SEQ ID NO: 11335 - DNA, 20 bp, Homo Sapiens
ccgttaacttccaattaact

SEQ ID NO: 11336 - DNA, 29 bp, Homo Sapiens
ccgttaacttccaattaactagttttgac

SEQ ID NO: 11337 - DNA, 30 bp, Homo Sapiens
ccgttaacttccaattaactagttttgaca

SEQ ID NO: 11338 - DNA, 31 bp, Homo Sapiens
ccgttaacttccaattaactagttttgacaa

SEQ ID NO: 11339 - DNA, 32 bp, Homo Sapiens
ccgttaacttccaattaactagttttgacaac

SEQ ID NO: 11340 - DNA, 33 bp, Homo Sapiens
ccgttaacttccaattaactagttttgacaaca

SEQ ID NO: 11341 - DNA, 34 bp, Homo Sapiens
ccgttaacttccaattaactagttttgacaacat

SEQ ID NO: 11342 - DNA, 48 bp, Homo Sapiens
ccgttaacttccaattaactagttttgacaacattcaaaaaagagtac

SEQ ID NO: 11343 - DNA, 40 bp, Homo Sapiens
cctaagccagggattgtgggttcgagtcccacccggggta

SEQ ID NO: 11344 - DNA, 42 bp, Homo Sapiens
cctaagccagggattgtgggttcgagtcccacccggggtacc

SEQ ID NO: 11345 - DNA, 42 bp, Homo Sapiens
cctaagccagggattgtgggttcgagtcccacctggggtgcc

SEQ ID NO: 11346 - DNA, 38 bp, Homo Sapiens
cctaagccagggattgtgggttcgagtcccatctgggg

SEQ ID NO: 11347 - DNA, 42 bp, Homo Sapiens
cctaagccagggattgtgggttcgagtcccatctggggtgcc

SEQ ID NO: 11348 - DNA, 43 bp, Homo Sapiens
cctaagccagggattgtgggttcgagtcccatctggggtgcca

SEQ ID NO: 11349 - DNA, 19 bp, Homo Sapiens
cctaatggataaggcactg

SEQ ID NO: 11350 - DNA, 21 bp, Homo Sapiens
cctaatggataaggcactggc

SEQ ID NO: 11351 - DNA, 23 bp, Homo Sapiens
cctaatggataaggcatcagcct

SEQ ID NO: 11352 - DNA, 26 bp, Homo Sapiens
cctaatggataaggcatcagcctccg

SEQ ID NO: 11353 - DNA, 32 bp, Homo Sapiens
cctaatggataaggcatcagcctccggagctg

SEQ ID NO: 11354 - DNA, 19 bp, Homo Sapiens
cctaatggataaggcattg

SEQ ID NO: 11355 - DNA, 21 bp, Homo Sapiens
cctaatggataaggcgtctga

SEQ ID NO: 11356 - DNA, 29 bp, Homo Sapiens
cctatagctcaggggttagagcactggtc

SEQ ID NO: 11357 - DNA, 30 bp, Homo Sapiens
cctatagctcaggggttagagcactggtct

SEQ ID NO: 11358 - DNA, 32 bp, Homo Sapiens
cctatagctcaggggttagagcactggtcttg

SEQ ID NO: 11359 - DNA, 33 bp, Homo Sapiens
cctatagctcaggggttagagcactggtcttgt

SEQ ID NO: 11360 - DNA, 16 bp, Homo Sapiens
cctatatatcttacca

SEQ ID NO: 11361 - DNA, 16 bp, Homo Sapiens
cctcaaagcaatacac

SEQ ID NO: 11362 - DNA, 18 bp, Homo Sapiens
cctcaaagcaatacactg

SEQ ID NO: 11363 - DNA, 19 bp, Homo Sapiens
cctcaaagcaatacactga

SEQ ID NO: 11364 - DNA, 35 bp, Homo Sapiens
cctcaaagcaatacactgaaaatgtttagacgggc

SEQ ID NO: 11365 - DNA, 36 bp, Homo Sapiens
cctcaaagcaatacactgaaaatgtttagacgggct

SEQ ID NO: 11366 - DNA, 37 bp, Homo Sapiens
cctcaaagcaatacactgaaaatgtttagacgggctc

SEQ ID NO: 11367 - DNA, 38 bp, Homo Sapiens
cctcaaagcaatacactgaaaatgtttagacgggctca

SEQ ID NO: 11368 - DNA, 22 bp, Homo Sapiens
cctcacacgcgaaaggtccccg

SEQ ID NO: 11369 - DNA, 17 bp, Homo Sapiens
cctcacacggggcacca

SEQ ID NO: 11370 - DNA, 16 bp, Homo Sapiens
cctcacctggagcacc

SEQ ID NO: 11371 - DNA, 17 bp, Homo Sapiens
cctcacctggagcacca

SEQ ID NO: 11372 - DNA, 16 bp, Homo Sapiens
cctcagagggggcacc

SEQ ID NO: 11373 - DNA, 17 bp, Homo Sapiens
cctcagagggggcacca

SEQ ID NO: 11374 - DNA, 17 bp, Homo Sapiens
cctcagtaagttgcaat

SEQ ID NO: 11375 - DNA, 18 bp, Homo Sapiens
cctcagtaagttgcaata

SEQ ID NO: 11376 - DNA, 19 bp, Homo Sapiens
cctcagtaagttgcaatac

SEQ ID NO: 11377 - DNA, 20 bp, Homo Sapiens
cctcagtaagttgcaatact

SEQ ID NO: 11378 - DNA, 22 bp, Homo Sapiens
cctcagtaagttgcaatactta

SEQ ID NO: 11379 - DNA, 23 bp, Homo Sapiens
cctcagtaagttgcaatacttaa

SEQ ID NO: 11380 - DNA, 24 bp, Homo Sapiens
cctcagtaagttgcaatacttaat

SEQ ID NO: 11381 - DNA, 27 bp, Homo Sapiens
cctcagtaagttgcaatacttaatttc

SEQ ID NO: 11382 - DNA, 28 bp, Homo Sapiens
cctcagtaagttgcaatacttaatttct

SEQ ID NO: 11383 - DNA, 29 bp, Homo Sapiens
cctcagtaagttgcaatacttaatttctg

SEQ ID NO: 11384 - DNA, 30 bp, Homo Sapiens
cctcagtaagttgcaatacttaatttctgc

SEQ ID NO: 11385 - DNA, 31 bp, Homo Sapiens
cctcagtaagttgcaatacttaatttctgcc

SEQ ID NO: 11386 - DNA, 32 bp, Homo Sapiens
cctcagtaagttgcaatacttaatttctgcca

SEQ ID NO: 11387 - DNA, 16 bp, Homo Sapiens
cctcctaagccaggga

SEQ ID NO: 11388 - DNA, 37 bp, Homo Sapiens
cctcctaagccagggattgtgggttcgagtcccacct

SEQ ID NO: 11389 - DNA, 16 bp, Homo Sapiens
cctcctcaaagcaata

SEQ ID NO: 11390 - DNA, 17 bp, Homo Sapiens
cctcctcaaagcaatac

SEQ ID NO: 11391 - DNA, 18 bp, Homo Sapiens
cctcctcaaagcaataca

SEQ ID NO: 11392 - DNA, 20 bp, Homo Sapiens
cctcctcaaagcaatacact

SEQ ID NO: 11393 - DNA, 21 bp, Homo Sapiens
cctcctcaaagcaatacactg

SEQ ID NO: 11394 - DNA, 22 bp, Homo Sapiens
cctcctcaaagcaatacactga

SEQ ID NO: 11395 - DNA, 23 bp, Homo Sapiens
cctcctcaaagcaatacactgaa

SEQ ID NO: 11396 - DNA, 39 bp, Homo Sapiens
cctcctcaaagcaatacactgaaaatgtttagacgggct

SEQ ID NO: 11397 - DNA, 16 bp, Homo Sapiens
cctcgctggggcctcc

SEQ ID NO: 11398 - DNA, 17 bp, Homo Sapiens
cctcgctggggcctcca

SEQ ID NO: 11399 - DNA, 16 bp, Homo Sapiens
cctcggttcgaatccg

SEQ ID NO: 11400 - DNA, 26 bp, Homo Sapiens
cctcggttcgaatccgagtcacggca

SEQ ID NO: 11401 - DNA, 27 bp, Homo Sapiens
cctcggttcgaatccgagtcacggcac

SEQ ID NO: 11402 - DNA, 30 bp, Homo Sapiens
cctcgtggcgcaacggtagcgcgtctgact

SEQ ID NO: 11403 - DNA, 32 bp, Homo Sapiens
cctcgtggcgcaacggtagcgcgtctgactcc

SEQ ID NO: 11404 - DNA, 16 bp, Homo Sapiens
cctcgtggcgcaatgg

SEQ ID NO: 11405 - DNA, 18 bp, Homo Sapiens
cctcgttagcgcagtagg

SEQ ID NO: 11406 - DNA, 21 bp, Homo Sapiens
cctcgttagtatagtggtgag

SEQ ID NO: 11407 - DNA, 25 bp, Homo Sapiens
cctcgttagtatagtggtgagtatc

SEQ ID NO: 11408 - DNA, 27 bp, Homo Sapiens
cctcgttagtatagtggtgagtatccc

SEQ ID NO: 11409 - DNA, 28 bp, Homo Sapiens
cctcgttagtatagtggtgagtatcccc

SEQ ID NO: 11410 - DNA, 29 bp, Homo Sapiens
cctcgttagtatagtggtgagtatccccg

SEQ ID NO: 11411 - DNA, 31 bp, Homo Sapiens
cctcgttagtatagtggtgagtatccccgcc

SEQ ID NO: 11412 - DNA, 32 bp, Homo Sapiens
cctcgttagtatagtggtgagtatccccgcct

SEQ ID NO: 11413 - DNA, 33 bp, Homo Sapiens
cctcgttagtatagtggtgagtatccccgcctg

SEQ ID NO: 11414 - DNA, 34 bp, Homo Sapiens
cctcgttagtatagtggtgagtatccccgcctgt

SEQ ID NO: 11415 - DNA, 35 bp, Homo Sapiens
cctcgttagtatagtggtgagtatccccgcctgtc

SEQ ID NO: 11416 - DNA, 38 bp, Homo Sapiens
cctcgttagtatagtggtgagtatccccgcctgtcacg

SEQ ID NO: 11417 - DNA, 40 bp, Homo Sapiens
cctcgttagtatagtggtgagtatccccgcctgtcacgcg

SEQ ID NO: 11418 - DNA, 27 bp, Homo Sapiens
cctcgttagtatagtggttagtatccc

SEQ ID NO: 11419 - DNA, 28 bp, Homo Sapiens
cctcgttagtatagtggttagtatcccc

SEQ ID NO: 11420 - DNA, 32 bp, Homo Sapiens
cctcgttagtatagtggttagtatccccgcct

SEQ ID NO: 11421 - DNA, 34 bp, Homo Sapiens
cctcgttagtatagtggttagtatccccgcctgt

SEQ ID NO: 11422 - DNA, 35 bp, Homo Sapiens
cctcgttagtatagtggttagtatccccgcctgtc

SEQ ID NO: 11423 - DNA, 17 bp, Homo Sapiens
cctcttagcgcagcggg

SEQ ID NO: 11424 - DNA, 16 bp, Homo Sapiens
cctcttcttaacacca

SEQ ID NO: 11425 - DNA, 16 bp, Homo Sapiens
cctctttacagtgacc

SEQ ID NO: 11426 - DNA, 17 bp, Homo Sapiens
cctctttacagtgacca

SEQ ID NO: 11427 - DNA, 16 bp, Homo Sapiens
cctctttttaccacca

SEQ ID NO: 11428 - DNA, 25 bp, Homo Sapiens
cctgagttcgaacctcagagggggc

SEQ ID NO: 11429 - DNA, 26 bp, Homo Sapiens
cctgagttcgaacctcagagggggca

SEQ ID NO: 11430 - DNA, 16 bp, Homo Sapiens
cctgagttcgagcctc

SEQ ID NO: 11431 - DNA, 18 bp, Homo Sapiens
cctgccacgcgggaggcc

SEQ ID NO: 11432 - DNA, 19 bp, Homo Sapiens
cctgccacgcgggaggccc

SEQ ID NO: 11433 - DNA, 20 bp, Homo Sapiens
cctgccacgcgggaggcccg

SEQ ID NO: 11434 - DNA, 21 bp, Homo Sapiens
cctgccacgcgggaggcccgg

SEQ ID NO: 11435 - DNA, 22 bp, Homo Sapiens
cctgccacgcgggaggcccggg

SEQ ID NO: 11436 - DNA, 23 bp, Homo Sapiens
cctgccacgcgggaggcccgggt

SEQ ID NO: 11437 - DNA, 25 bp, Homo Sapiens
cctgccacgcgggaggcccgggttc

SEQ ID NO: 11438 - DNA, 16 bp, Homo Sapiens
cctgccgactacgcca

SEQ ID NO: 11439 - DNA, 16 bp, Homo Sapiens
cctgccgcggtcgcca

SEQ ID NO: 11440 - DNA, 16 bp, Homo Sapiens
cctgccggggcttcca

SEQ ID NO: 11441 - DNA, 16 bp, Homo Sapiens
cctgctcacagcgcca

SEQ ID NO: 11442 - DNA, 16 bp, Homo Sapiens
cctgctcgctgcgcca

SEQ ID NO: 11443 - DNA, 16 bp, Homo Sapiens
cctggaggcgtgggtt

SEQ ID NO: 11444 - DNA, 35 bp, Homo Sapiens
cctggaggcgtgggttcgaatcccacttctgacac

SEQ ID NO: 11445 - DNA, 36 bp, Homo Sapiens
cctggaggcgtgggttcgaatcccacttctgacacc

SEQ ID NO: 11446 - DNA, 31 bp, Homo Sapiens
cctggcggtctagtggttaggattcggcgct

SEQ ID NO: 11447 - DNA, 32 bp, Homo Sapiens
cctggcggtctagtggttaggattcggcgctc

SEQ ID NO: 11448 - DNA, 33 bp, Homo Sapiens
cctggcggtctagtggttaggattcggcgctct

SEQ ID NO: 11449 - DNA, 34 bp, Homo Sapiens
cctggcggtctagtggttaggattcggcgctctc

SEQ ID NO: 11450 - DNA, 16 bp, Homo Sapiens
cctggctggctcgcca

SEQ ID NO: 11451 - DNA, 27 bp, Homo Sapiens
cctgggtagctcagtcggtagagcatc

SEQ ID NO: 11452 - DNA, 31 bp, Homo Sapiens
cctgggtagctcagtcggtagagcatcagac

SEQ ID NO: 11453 - DNA, 24 bp, Homo Sapiens
cctgggttcgaatcccagcggggc

SEQ ID NO: 11454 - DNA, 25 bp, Homo Sapiens
cctgggttcgaatcccagcggggcc

SEQ ID NO: 11455 - DNA, 26 bp, Homo Sapiens
cctgggttcgaatcccagcggggcct

SEQ ID NO: 11456 - DNA, 27 bp, Homo Sapiens
cctgggttcgaatcccagcggggcctc

SEQ ID NO: 11457 - DNA, 28 bp, Homo Sapiens
cctgggttcgaatcccagcggggcctcc

SEQ ID NO: 11458 - DNA, 29 bp, Homo Sapiens
cctgggttcgaatcccagcggggcctcca

SEQ ID NO: 11459 - DNA, 23 bp, Homo Sapiens
cctgggttcgaatcccagcggtg

SEQ ID NO: 11460 - DNA, 24 bp, Homo Sapiens
cctgggttcgaatcccagcggtgc

SEQ ID NO: 11461 - DNA, 25 bp, Homo Sapiens
cctgggttcgaatcccagcggtgcc

SEQ ID NO: 11462 - DNA, 26 bp, Homo Sapiens
cctgggttcgaatcccagcggtgcct

SEQ ID NO: 11463 - DNA, 27 bp, Homo Sapiens
cctgggttcgaatcccagcggtgcctc

SEQ ID NO: 11464 - DNA, 28 bp, Homo Sapiens
cctgggttcgaatcccagcggtgcctcc

SEQ ID NO: 11465 - DNA, 29 bp, Homo Sapiens
cctgggttcgaatcccagcggtgcctcca

SEQ ID NO: 11466 - DNA, 26 bp, Homo Sapiens
cctgggttcgagccccagtggaacca

SEQ ID NO: 11467 - DNA, 28 bp, Homo Sapiens
cctgggttcgagccccagtggaaccacc

SEQ ID NO: 11468 - DNA, 16 bp, Homo Sapiens
cctggtggtctagtgg

SEQ ID NO: 11469 - DNA, 17 bp, Homo Sapiens
cctggtggtctagtggc

SEQ ID NO: 11470 - DNA, 19 bp, Homo Sapiens
cctggtggtctagtggcta

SEQ ID NO: 11471 - DNA, 20 bp, Homo Sapiens
cctggtggtctagtggctag

SEQ ID NO: 11472 - DNA, 23 bp, Homo Sapiens
cctggtggtctagtggctaggat

SEQ ID NO: 11473 - DNA, 25 bp, Homo Sapiens
cctggtggtctagtggctaggattc

SEQ ID NO: 11474 - DNA, 26 bp, Homo Sapiens
cctggtggtctagtggctaggattcg

SEQ ID NO: 11475 - DNA, 27 bp, Homo Sapiens
cctggtggtctagtggctaggattcgg

SEQ ID NO: 11476 - DNA, 28 bp, Homo Sapiens
cctggtggtctagtggctaggattcggc

SEQ ID NO: 11477 - DNA, 29 bp, Homo Sapiens
cctggtggtctagtggctaggattcggcg

SEQ ID NO: 11478 - DNA, 30 bp, Homo Sapiens
cctggtggtctagtggctaggattcggcgc

SEQ ID NO: 11479 - DNA, 31 bp, Homo Sapiens
cctggtggtctagtggctaggattcggcgct

SEQ ID NO: 11480 - DNA, 32 bp, Homo Sapiens
cctggtggtctagtggctaggattcggcgctt

SEQ ID NO: 11481 - DNA, 33 bp, Homo Sapiens
cctggtggtctagtggctaggattcggcgcttt

SEQ ID NO: 11482 - DNA, 34 bp, Homo Sapiens
cctggtggtctagtggctaggattcggcgctttc

SEQ ID NO: 11483 - DNA, 35 bp, Homo Sapiens
cctggtggtctagtggctaggattcggcgctttca

SEQ ID NO: 11484 - DNA, 36 bp, Homo Sapiens
cctggtggtctagtggctaggattcggcgctttcac

SEQ ID NO: 11485 - DNA, 37 bp, Homo Sapiens
cctggtggtctagtggctaggattcggcgctttcacc

SEQ ID NO: 11486 - DNA, 20 bp, Homo Sapiens
cctggtggtctagtggttag

SEQ ID NO: 11487 - DNA, 21 bp, Homo Sapiens
cctggtggtctagtggttagg

SEQ ID NO: 11488 - DNA, 22 bp, Homo Sapiens
cctggtggtctagtggttagga

SEQ ID NO: 11489 - DNA, 23 bp, Homo Sapiens
cctggtggtctagtggttaggat

SEQ ID NO: 11490 - DNA, 24 bp, Homo Sapiens
cctggtggtctagtggttaggatt

SEQ ID NO: 11491 - DNA, 25 bp, Homo Sapiens
cctggtggtctagtggttaggattc

SEQ ID NO: 11492 - DNA, 26 bp, Homo Sapiens
cctggtggtctagtggttaggattcg

SEQ ID NO: 11493 - DNA, 27 bp, Homo Sapiens
cctggtggtctagtggttaggattcgg

SEQ ID NO: 11494 - DNA, 28 bp, Homo Sapiens
cctggtggtctagtggttaggattcggc

SEQ ID NO: 11495 - DNA, 29 bp, Homo Sapiens
cctggtggtctagtggttaggattcggcg

SEQ ID NO: 11496 - DNA, 30 bp, Homo Sapiens
cctggtggtctagtggttaggattcggcgc

SEQ ID NO: 11497 - DNA, 31 bp, Homo Sapiens
cctggtggtctagtggttaggattcggcgct

SEQ ID NO: 11498 - DNA, 32 bp, Homo Sapiens
cctggtggtctagtggttaggattcggcgctc

SEQ ID NO: 11499 - DNA, 33 bp, Homo Sapiens
cctggtggtctagtggttaggattcggcgctct

SEQ ID NO: 11500 - DNA, 34 bp, Homo Sapiens
cctggtggtctagtggttaggattcggcgctctc

SEQ ID NO: 11501 - DNA, 35 bp, Homo Sapiens
cctggtggtctagtggttaggattcggcgctctca

SEQ ID NO: 11502 - DNA, 36 bp, Homo Sapiens
cctggtggtctagtggttaggattcggcgctctcac

SEQ ID NO: 11503 - DNA, 37 bp, Homo Sapiens
cctggtggtctagtggttaggattcggcgctctcacc

SEQ ID NO: 11504 - DNA, 38 bp, Homo Sapiens
cctggtggtctagtggttaggattcggcgctctcaccg

SEQ ID NO: 11505 - DNA, 39 bp, Homo Sapiens
cctggtggtctagtggttaggattcggcgctctcaccgc

SEQ ID NO: 11506 - DNA, 40 bp, Homo Sapiens
cctggtggtctagtggttaggattcggcgctctcaccgcc

SEQ ID NO: 11507 - DNA, 48 bp, Homo Sapiens
cctggtggtctagtggttaggattcggcgctctcaccgccgcggcccg

SEQ ID NO: 11508 - DNA, 25 bp, Homo Sapiens
cctggttcgatcccgggtttcggca

SEQ ID NO: 11509 - DNA, 26 bp, Homo Sapiens
cctggttcgatcccgggtttcggcac

SEQ ID NO: 11510 - DNA, 28 bp, Homo Sapiens
cctggttcgatcccgggtttcggcacca

SEQ ID NO: 11511 - DNA, 29 bp, Homo Sapiens
cctggttttcacccaggcggcccgggttc

SEQ ID NO: 11512 - DNA, 38 bp, Homo Sapiens
cctggttttcacccaggcggcccgggttcgactcccgg

SEQ ID NO: 11513 - DNA, 48 bp, Homo Sapiens
cctggttttcacccaggcggcccgggttcgactcccggtgtgggaacc

SEQ ID NO: 11514 - DNA, 16 bp, Homo Sapiens
cctgtcacgcgggaga

SEQ ID NO: 11515 - DNA, 18 bp, Homo Sapiens
cctgtcacgcgggagacc

SEQ ID NO: 11516 - DNA, 19 bp, Homo Sapiens
cctgtcacgcgggagaccg

SEQ ID NO: 11517 - DNA, 21 bp, Homo Sapiens
cctgtcacgcgggagaccggg

SEQ ID NO: 11518 - DNA, 23 bp, Homo Sapiens
cctgtcacgcgggagaccggggt

SEQ ID NO: 11519 - DNA, 33 bp, Homo Sapiens
cctgtcacgcgggagaccggggttcaattcccc

SEQ ID NO: 11520 - DNA, 35 bp, Homo Sapiens
cctgtcacgcgggagaccggggttcaattccccga

SEQ ID NO: 11521 - DNA, 39 bp, Homo Sapiens
cctgtcacgcgggagaccggggttcaattccccgacggg

SEQ ID NO: 11522 - DNA, 43 bp, Homo Sapiens
cctgtcacgcgggagaccggggttcaattccccgacggggagc

SEQ ID NO: 11523 - DNA, 44 bp, Homo Sapiens
cctgtcacgcgggagaccggggttcaattccccgacggggagcc

SEQ ID NO: 11524 - DNA, 45 bp, Homo Sapiens
cctgtcacgcgggagaccggggttcaattccccgacggggagcca

SEQ ID NO: 11525 - DNA, 34 bp, Homo Sapiens
cctgtcacgcgggagaccggggttcgattccccg

SEQ ID NO: 11526 - DNA, 38 bp, Homo Sapiens
cctgtcacgcgggagaccggggttcgattccccgacgg

SEQ ID NO: 11527 - DNA, 39 bp, Homo Sapiens
cctgtcacgcgggagaccggggttcgattccccgacggg

SEQ ID NO: 11528 - DNA, 40 bp, Homo Sapiens
cctgtcacgcgggagaccggggttcgattccccgacgggg

SEQ ID NO: 11529 - DNA, 41 bp, Homo Sapiens
cctgtcacgcgggagaccggggttcgattccccgacgggga

SEQ ID NO: 11530 - DNA, 42 bp, Homo Sapiens
cctgtcacgcgggagaccggggttcgattccccgacggggag

SEQ ID NO: 11531 - DNA, 43 bp, Homo Sapiens
cctgtcacgcgggagaccggggttcgattccccgacggggagc

SEQ ID NO: 11532 - DNA, 44 bp, Homo Sapiens
cctgtcacgcgggagaccggggttcgattccccgacggggagcc

SEQ ID NO: 11533 - DNA, 45 bp, Homo Sapiens
cctgtcacgcgggagaccggggttcgattccccgacggggagcca

SEQ ID NO: 11534 - DNA, 16 bp, Homo Sapiens
cctgtggtctagtggc

SEQ ID NO: 11535 - DNA, 17 bp, Homo Sapiens
cctgtggtctagtggct

SEQ ID NO: 11536 - DNA, 20 bp, Homo Sapiens
cctgtggtctagtggttagg

SEQ ID NO: 11537 - DNA, 16 bp, Homo Sapiens
cctgttcgtgacgcca

SEQ ID NO: 11538 - DNA, 19 bp, Homo Sapiens
ccttagcgcagtaggcagc

SEQ ID NO: 11539 - DNA, 18 bp, Homo Sapiens
ccttaggtcgctggttcg

SEQ ID NO: 11540 - DNA, 35 bp, Homo Sapiens
ccttaggtcgctggttcgaatccggctcgaaggac

SEQ ID NO: 11541 - DNA, 36 bp, Homo Sapiens
ccttaggtcgctggttcgaatccggctcgaaggacc

SEQ ID NO: 11542 - DNA, 35 bp, Homo Sapiens
ccttaggtcgctggttcgaatccggctcggaggac

SEQ ID NO: 11543 - DNA, 36 bp, Homo Sapiens
ccttaggtcgctggttcgaatccggctcggaggacc

SEQ ID NO: 11544 - DNA, 32 bp, Homo Sapiens
ccttaggtcgctggttcgattccggctcgaag

SEQ ID NO: 11545 - DNA, 35 bp, Homo Sapiens
ccttaggtcgctggttcgattccggctcgaaggac

SEQ ID NO: 11546 - DNA, 36 bp, Homo Sapiens
ccttaggtcgctggttcgattccggctcgaaggacc

SEQ ID NO: 11547 - DNA, 23 bp, Homo Sapiens
ccttcaaagccctcagtaagttg

SEQ ID NO: 11548 - DNA, 40 bp, Homo Sapiens
ccttcaaagccctcagtaagttgcaatacttaatttctgc

SEQ ID NO: 11549 - DNA, 41 bp, Homo Sapiens
ccttcaaagccctcagtaagttgcaatacttaatttctgcc

SEQ ID NO: 11550 - DNA, 42 bp, Homo Sapiens
ccttcaaagccctcagtaagttgcaatacttaatttctgcca

SEQ ID NO: 11551 - DNA, 19 bp, Homo Sapiens
ccttccaagcagttgaccc

SEQ ID NO: 11552 - DNA, 20 bp, Homo Sapiens
ccttccaagcagttgacccg

SEQ ID NO: 11553 - DNA, 21 bp, Homo Sapiens
ccttccaagcagttgacccgg

SEQ ID NO: 11554 - DNA, 22 bp, Homo Sapiens
ccttccaagcagttgacccggg

SEQ ID NO: 11555 - DNA, 23 bp, Homo Sapiens
ccttccaagcagttgacccgggt

SEQ ID NO: 11556 - DNA, 24 bp, Homo Sapiens
ccttccaagcagttgacccgggtt

SEQ ID NO: 11557 - DNA, 25 bp, Homo Sapiens
ccttccaagcagttgacccgggttc

SEQ ID NO: 11558 - DNA, 36 bp, Homo Sapiens
ccttccaagcagttgacccgggttcgattcccggcc

SEQ ID NO: 11559 - DNA, 39 bp, Homo Sapiens
ccttccaagcagttgacccgggttcgattcccggccaac

SEQ ID NO: 11560 - DNA, 44 bp, Homo Sapiens
ccttccaagcagttgacccgggttcgattcccggccaacgcacc

SEQ ID NO: 11561 - DNA, 16 bp, Homo Sapiens
ccttcccgtactacca

SEQ ID NO: 11562 - DNA, 16 bp, Homo Sapiens
ccttccttttttgcca

SEQ ID NO: 11563 - DNA, 16 bp, Homo Sapiens
ccttcgatagctcagc

SEQ ID NO: 11564 - DNA, 17 bp, Homo Sapiens
ccttcgatagctcagct

SEQ ID NO: 11565 - DNA, 18 bp, Homo Sapiens
ccttcgatagctcagctg

SEQ ID NO: 11566 - DNA, 19 bp, Homo Sapiens
ccttcgatagctcagctgg

SEQ ID NO: 11567 - DNA, 20 bp, Homo Sapiens
ccttcgatagctcagctggt

SEQ ID NO: 11568 - DNA, 23 bp, Homo Sapiens
ccttcgatagctcagctggtaga

SEQ ID NO: 11569 - DNA, 25 bp, Homo Sapiens
ccttcgatagctcagctggtagagc

SEQ ID NO: 11570 - DNA, 32 bp, Homo Sapiens
ccttcgatagctcagctggtagagcggaggac

SEQ ID NO: 11571 - DNA, 33 bp, Homo Sapiens
ccttcgatagctcagctggtagagcggaggact

SEQ ID NO: 11572 - DNA, 34 bp, Homo Sapiens
ccttcgatagctcagctggtagagcggaggactg

SEQ ID NO: 11573 - DNA, 35 bp, Homo Sapiens
ccttcgatagctcagctggtagagcggaggactgt

SEQ ID NO: 11574 - DNA, 36 bp, Homo Sapiens
ccttcgatagctcagctggtagagcggaggactgta

SEQ ID NO: 11575 - DNA, 37 bp, Homo Sapiens
ccttcgatagctcagctggtagagcggaggactgtag

SEQ ID NO: 11576 - DNA, 19 bp, Homo Sapiens
ccttcgatagctcagttgg

SEQ ID NO: 11577 - DNA, 22 bp, Homo Sapiens
ccttcgatagctcagttggtag

SEQ ID NO: 11578 - DNA, 23 bp, Homo Sapiens
ccttcgatagctcagttggtaga

SEQ ID NO: 11579 - DNA, 25 bp, Homo Sapiens
ccttcgatagctcagttggtagagc

SEQ ID NO: 11580 - DNA, 32 bp, Homo Sapiens
ccttcgatagctcagttggtagagcggaggac

SEQ ID NO: 11581 - DNA, 33 bp, Homo Sapiens
ccttcgatagctcagttggtagagcggaggact

SEQ ID NO: 11582 - DNA, 34 bp, Homo Sapiens
ccttcgatagctcagttggtagagcggaggactg

SEQ ID NO: 11583 - DNA, 35 bp, Homo Sapiens
ccttcgatagctcagttggtagagcggaggactgt

SEQ ID NO: 11584 - DNA, 36 bp, Homo Sapiens
ccttcgatagctcagttggtagagcggaggactgta

SEQ ID NO: 11585 - DNA, 16 bp, Homo Sapiens
ccttgtagtataaact

SEQ ID NO: 11586 - DNA, 29 bp, Homo Sapiens
ccttgtagtataaactaatacaccagtct

SEQ ID NO: 11587 - DNA, 21 bp, Homo Sapiens
ccttttaagttaaagattaag

SEQ ID NO: 11588 - DNA, 25 bp, Homo Sapiens
ccttttaagttaaagattaagagaa

SEQ ID NO: 11589 - DNA, 26 bp, Homo Sapiens
ccttttaagttaaagattaagagaac

SEQ ID NO: 11590 - DNA, 27 bp, Homo Sapiens
ccttttaagttaaagattaagagaacc

SEQ ID NO: 11591 - DNA, 28 bp, Homo Sapiens
ccttttaagttaaagattaagagaacca

SEQ ID NO: 11592 - DNA, 29 bp, Homo Sapiens
ccttttaagttaaagattaagagaaccaa

SEQ ID NO: 11593 - DNA, 30 bp, Homo Sapiens
ccttttaagttaaagattaagagaaccaac

SEQ ID NO: 11594 - DNA, 31 bp, Homo Sapiens
ccttttaagttaaagattaagagaaccaaca

SEQ ID NO: 11595 - DNA, 32 bp, Homo Sapiens
ccttttaagttaaagattaagagaaccaacac

SEQ ID NO: 11596 - DNA, 33 bp, Homo Sapiens
ccttttaagttaaagattaagagaaccaacacc

SEQ ID NO: 11597 - DNA, 34 bp, Homo Sapiens
ccttttaagttaaagattaagagaaccaacacct

SEQ ID NO: 11598 - DNA, 35 bp, Homo Sapiens
ccttttaagttaaagattaagagaaccaacacctc

SEQ ID NO: 11599 - DNA, 36 bp, Homo Sapiens
ccttttaagttaaagattaagagaaccaacacctct

SEQ ID NO: 11600 - DNA, 38 bp, Homo Sapiens
ccttttaagttaaagattaagagaaccaacacctcttt

SEQ ID NO: 11601 - DNA, 39 bp, Homo Sapiens
ccttttaagttaaagattaagagaaccaacacctcttta

SEQ ID NO: 11602 - DNA, 44 bp, Homo Sapiens
ccttttaagttaaagattaagagaaccaacacctctttacagtg

SEQ ID NO: 11603 - DNA, 45 bp, Homo Sapiens
ccttttaagttaaagattaagagaaccaacacctctttacagtga

SEQ ID NO: 11604 - DNA, 46 bp, Homo Sapiens
ccttttaagttaaagattaagagaaccaacacctctttacagtgac

SEQ ID NO: 11605 - DNA, 47 bp, Homo Sapiens
ccttttaagttaaagattaagagaaccaacacctctttacagtgacc

SEQ ID NO: 11606 - DNA, 48 bp, Homo Sapiens
ccttttaagttaaagattaagagaaccaacacctctttacagtgacca

SEQ ID NO: 11607 - DNA, 16 bp, Homo Sapiens
cctttttccaaggaca

SEQ ID NO: 11608 - DNA, 17 bp, Homo Sapiens
cctttttccaaggacac

SEQ ID NO: 11609 - DNA, 18 bp, Homo Sapiens
cctttttccaaggacacc

SEQ ID NO: 11610 - DNA, 19 bp, Homo Sapiens
cctttttccaaggacacca

SEQ ID NO: 11611 - DNA, 18 bp, Homo Sapiens
cgaaaaagtcatggaggc

SEQ ID NO: 11612 - DNA, 19 bp, Homo Sapiens
cgaaaaagtcatggaggcc

SEQ ID NO: 11613 - DNA, 16 bp, Homo Sapiens
cgaaaatgttggttat

SEQ ID NO: 11614 - DNA, 17 bp, Homo Sapiens
cgaaaatgttggttata

SEQ ID NO: 11615 - DNA, 18 bp, Homo Sapiens
cgaaaatgttggttatac

SEQ ID NO: 11616 - DNA, 19 bp, Homo Sapiens
cgaaaatgttggttatacc

SEQ ID NO: 11617 - DNA, 20 bp, Homo Sapiens
cgaaaatgttggttataccc

SEQ ID NO: 11618 - DNA, 21 bp, Homo Sapiens
cgaaaatgttggttataccct

SEQ ID NO: 11619 - DNA, 22 bp, Homo Sapiens
cgaaaatgttggttataccctt

SEQ ID NO: 11620 - DNA, 23 bp, Homo Sapiens
cgaaaatgttggttatacccttc

SEQ ID NO: 11621 - DNA, 24 bp, Homo Sapiens
cgaaaatgttggttatacccttcc

SEQ ID NO: 11622 - DNA, 25 bp, Homo Sapiens
cgaaaatgttggttatacccttccc

SEQ ID NO: 11623 - DNA, 26 bp, Homo Sapiens
cgaaaatgttggttatacccttcccg

SEQ ID NO: 11624 - DNA, 27 bp, Homo Sapiens
cgaaaatgttggttatacccttcccgt

SEQ ID NO: 11625 - DNA, 28 bp, Homo Sapiens
cgaaaatgttggttatacccttcccgta

SEQ ID NO: 11626 - DNA, 29 bp, Homo Sapiens
cgaaaatgttggttatacccttcccgtac

SEQ ID NO: 11627 - DNA, 30 bp, Homo Sapiens
cgaaaatgttggttatacccttcccgtact

SEQ ID NO: 11628 - DNA, 31 bp, Homo Sapiens
cgaaaatgttggttatacccttcccgtacta

SEQ ID NO: 11629 - DNA, 32 bp, Homo Sapiens
cgaaaatgttggttatacccttcccgtactac

SEQ ID NO: 11630 - DNA, 33 bp, Homo Sapiens
cgaaaatgttggttatacccttcccgtactacc

SEQ ID NO: 11631 - DNA, 34 bp, Homo Sapiens
cgaaaatgttggttatacccttcccgtactacca

SEQ ID NO: 11632 - DNA, 16 bp, Homo Sapiens
cgaaaccatcctctgc

SEQ ID NO: 11633 - DNA, 17 bp, Homo Sapiens
cgaaaccatcctctgct

SEQ ID NO: 11634 - DNA, 19 bp, Homo Sapiens
cgaaaccatcctctgctac

SEQ ID NO: 11635 - DNA, 20 bp, Homo Sapiens
cgaaaccatcctctgctacc

SEQ ID NO: 11636 - DNA, 21 bp, Homo Sapiens
cgaaaccatcctctgctacca

SEQ ID NO: 11637 - DNA, 21 bp, Homo Sapiens
cgaaaccgggcagaagcacca

SEQ ID NO: 11638 - DNA, 17 bp, Homo Sapiens
cgaaaccgggcggaaac

SEQ ID NO: 11639 - DNA, 19 bp, Homo Sapiens
cgaaaccgggcggaaacac

SEQ ID NO: 11640 - DNA, 20 bp, Homo Sapiens
cgaaaccgggcggaaacacc

SEQ ID NO: 11641 - DNA, 21 bp, Homo Sapiens
cgaaaccgggcggaaacacca

SEQ ID NO: 11642 - DNA, 36 bp, Homo Sapiens
cgaaagattggtggttcgagcccacccagggacgcc

SEQ ID NO: 11643 - DNA, 17 bp, Homo Sapiens
cgaaaggtccccggttc

SEQ ID NO: 11644 - DNA, 18 bp, Homo Sapiens
cgaaaggtccccggttcg

SEQ ID NO: 11645 - DNA, 36 bp, Homo Sapiens
cgaaaggtccccggttcgaaaccgggcagaagcacc

SEQ ID NO: 11646 - DNA, 28 bp, Homo Sapiens
cgaaaggtccccggttcgaaaccgggcg

SEQ ID NO: 11647 - DNA, 33 bp, Homo Sapiens
cgaaaggtccccggttcgaaaccgggcggaaac

SEQ ID NO: 11648 - DNA, 34 bp, Homo Sapiens
cgaaaggtccccggttcgaaaccgggcggaaaca

SEQ ID NO: 11649 - DNA, 35 bp, Homo Sapiens
cgaaaggtccccggttcgaaaccgggcggaaacac

SEQ ID NO: 11650 - DNA, 36 bp, Homo Sapiens
cgaaaggtccccggttcgaaaccgggcggaaacacc

SEQ ID NO: 11651 - DNA, 37 bp, Homo Sapiens
cgaaaggtccccggttcgaaaccgggcggaaacacca

SEQ ID NO: 11652 - DNA, 16 bp, Homo Sapiens
cgaaaggttggtggtt

SEQ ID NO: 11653 - DNA, 17 bp, Homo Sapiens
cgaaaggttggtggttc

SEQ ID NO: 11654 - DNA, 18 bp, Homo Sapiens
cgaaaggttggtggttcg

SEQ ID NO: 11655 - DNA, 33 bp, Homo Sapiens
cgaaaggttggtggttcgagcccacccagggac

SEQ ID NO: 11656 - DNA, 34 bp, Homo Sapiens
cgaaaggttggtggttcgagcccacccagggacg

SEQ ID NO: 11657 - DNA, 35 bp, Homo Sapiens
cgaaaggttggtggttcgagcccacccagggacgc

SEQ ID NO: 11658 - DNA, 36 bp, Homo Sapiens
cgaaaggttggtggttcgagcccacccagggacgcc

SEQ ID NO: 11659 - DNA, 37 bp, Homo Sapiens
cgaaaggttggtggttcgagcccacccagggacgcca

SEQ ID NO: 11660 - DNA, 36 bp, Homo Sapiens
cgaaaggttggtggttcgatcccacccagggacgcc

SEQ ID NO: 11661 - DNA, 37 bp, Homo Sapiens
cgaaaggttggtggttcgatcccacccagggacgcca

SEQ ID NO: 11662 - DNA, 17 bp, Homo Sapiens
cgaaatagctcagttgg

SEQ ID NO: 11663 - DNA, 17 bp, Homo Sapiens
cgaaccccgtccgtgcc

SEQ ID NO: 11664 - DNA, 18 bp, Homo Sapiens
cgaaccccgtccgtgcct

SEQ ID NO: 11665 - DNA, 19 bp, Homo Sapiens
cgaaccccgtccgtgcctc

SEQ ID NO: 11666 - DNA, 20 bp, Homo Sapiens
cgaaccccgtccgtgcctcc

SEQ ID NO: 11667 - DNA, 21 bp, Homo Sapiens
cgaaccccgtccgtgcctcca

SEQ ID NO: 11668 - DNA, 21 bp, Homo Sapiens
cgaaccctgctcgctgcgcca

SEQ ID NO: 11669 - DNA, 20 bp, Homo Sapiens
cgaacctcagagggggcacc

SEQ ID NO: 11670 - DNA, 20 bp, Homo Sapiens
cgaagaagcagcttcaaacc

SEQ ID NO: 11671 - DNA, 28 bp, Homo Sapiens
cgaagaagcagcttcaaacctgccgggg

SEQ ID NO: 11672 - DNA, 29 bp, Homo Sapiens
cgaagaagcagcttcaaacctgccggggc

SEQ ID NO: 11673 - DNA, 30 bp, Homo Sapiens
cgaagaagcagcttcaaacctgccggggct

SEQ ID NO: 11674 - DNA, 31 bp, Homo Sapiens
cgaagaagcagcttcaaacctgccggggctt

SEQ ID NO: 11675 - DNA, 32 bp, Homo Sapiens
cgaagaagcagcttcaaacctgccggggcttc

SEQ ID NO: 11676 - DNA, 33 bp, Homo Sapiens
cgaagaagcagcttcaaacctgccggggcttcc

SEQ ID NO: 11677 - DNA, 34 bp, Homo Sapiens
cgaagaagcagcttcaaacctgccggggcttcca

SEQ ID NO: 11678 - DNA, 16 bp, Homo Sapiens
cgaagatcacgggttc

SEQ ID NO: 11679 - DNA, 17 bp, Homo Sapiens
cgaagatcacgggttcg

SEQ ID NO: 11680 - DNA, 32 bp, Homo Sapiens
cgaagatcacgggttcgaaccccgtccgtgcc

SEQ ID NO: 11681 - DNA, 33 bp, Homo Sapiens
cgaagatcacgggttcgaaccccgtccgtgcct

SEQ ID NO: 11682 - DNA, 34 bp, Homo Sapiens
cgaagatcacgggttcgaaccccgtccgtgcctc

SEQ ID NO: 11683 - DNA, 35 bp, Homo Sapiens
cgaagatcacgggttcgaaccccgtccgtgcctcc

SEQ ID NO: 11684 - DNA, 16 bp, Homo Sapiens
cgaagatcgcgggttc

SEQ ID NO: 11685 - DNA, 17 bp, Homo Sapiens
cgaagatcgcgggttcg

SEQ ID NO: 11686 - DNA, 32 bp, Homo Sapiens
cgaagatcgcgggttcgaaccccgtccgtgcc

SEQ ID NO: 11687 - DNA, 33 bp, Homo Sapiens
cgaagatcgcgggttcgaaccccgtccgtgcct

SEQ ID NO: 11688 - DNA, 34 bp, Homo Sapiens
cgaagatcgcgggttcgaaccccgtccgtgcctc

SEQ ID NO: 11689 - DNA, 35 bp, Homo Sapiens
cgaagatcgcgggttcgaaccccgtccgtgcctcc

SEQ ID NO: 11690 - DNA, 18 bp, Homo Sapiens
cgaatcacgtcggggtca

SEQ ID NO: 11691 - DNA, 20 bp, Homo Sapiens
cgaatcacgtcggggtcacc

SEQ ID NO: 11692 - DNA, 21 bp, Homo Sapiens
cgaatcacgtcggggtcacca

SEQ ID NO: 11693 - DNA, 17 bp, Homo Sapiens
cgaatcccaccgctgcc

SEQ ID NO: 11694 - DNA, 18 bp, Homo Sapiens
cgaatcccaccgctgcca

SEQ ID NO: 11695 - DNA, 20 bp, Homo Sapiens
cgaatcccaccgctgccacc

SEQ ID NO: 11696 - DNA, 21 bp, Homo Sapiens
cgaatcccaccgctgccacca

SEQ ID NO: 11697 - DNA, 17 bp, Homo Sapiens
cgaatcccactcctgac

SEQ ID NO: 11698 - DNA, 20 bp, Homo Sapiens
cgaatcccactcctgacacc

SEQ ID NO: 11699 - DNA, 21 bp, Homo Sapiens
cgaatcccactcctgacacca

SEQ ID NO: 11700 - DNA, 18 bp, Homo Sapiens
cgaatcccacttctgaca

SEQ ID NO: 11701 - DNA, 19 bp, Homo Sapiens
cgaatcccacttctgacac

SEQ ID NO: 11702 - DNA, 20 bp, Homo Sapiens
cgaatcccacttctgacacc

SEQ ID NO: 11703 - DNA, 21 bp, Homo Sapiens
cgaatcccacttctgacacca

SEQ ID NO: 11704 - DNA, 17 bp, Homo Sapiens
cgaatcccagcggggcc

SEQ ID NO: 11705 - DNA, 20 bp, Homo Sapiens
cgaatcccagcggtgcctcc

SEQ ID NO: 11706 - DNA, 21 bp, Homo Sapiens
cgaatcccagcggtgcctcca

SEQ ID NO: 11707 - DNA, 20 bp, Homo Sapiens
cgaatcccagtagagcctcc

SEQ ID NO: 11708 - DNA, 19 bp, Homo Sapiens
cgaatcccatcctcgtcgc

SEQ ID NO: 11709 - DNA, 20 bp, Homo Sapiens
cgaatcccatcctcgtcgcc

SEQ ID NO: 11710 - DNA, 21 bp, Homo Sapiens
cgaatcccatcctcgtcgcca

SEQ ID NO: 11711 - DNA, 17 bp, Homo Sapiens
cgaatccgagtcacggc

SEQ ID NO: 11712 - DNA, 18 bp, Homo Sapiens
cgaatccgagtcacggca

SEQ ID NO: 11713 - DNA, 19 bp, Homo Sapiens
cgaatccgagtcacggcac

SEQ ID NO: 11714 - DNA, 20 bp, Homo Sapiens
cgaatccgagtcacggcacc

SEQ ID NO: 11715 - DNA, 21 bp, Homo Sapiens
cgaatccgagtcacggcacca

SEQ ID NO: 11716 - DNA, 20 bp, Homo Sapiens
cgaatccggctcgaaggacc

SEQ ID NO: 11717 - DNA, 21 bp, Homo Sapiens
cgaatccggctcgaaggacca

SEQ ID NO: 11718 - DNA, 20 bp, Homo Sapiens
cgaatccggctcggaggacc

SEQ ID NO: 11719 - DNA, 20 bp, Homo Sapiens
cgaatcctgccgactacgcc

SEQ ID NO: 11720 - DNA, 21 bp, Homo Sapiens
cgaatcctgccgactacgcca

SEQ ID NO: 11721 - DNA, 21 bp, Homo Sapiens
cgaatcctgctcacagcgcca

SEQ ID NO: 11722 - DNA, 18 bp, Homo Sapiens
cgaatcctgttcgtgacg

SEQ ID NO: 11723 - DNA, 20 bp, Homo Sapiens
cgaatcctgttcgtgacgcc

SEQ ID NO: 11724 - DNA, 21 bp, Homo Sapiens
cgaatcctgttcgtgacgcca

SEQ ID NO: 11725 - DNA, 16 bp, Homo Sapiens
cgaatgatttcgactc

SEQ ID NO: 11726 - DNA, 17 bp, Homo Sapiens
cgaatgatttcgactca

SEQ ID NO: 11727 - DNA, 18 bp, Homo Sapiens
cgaatgatttcgactcat

SEQ ID NO: 11728 - DNA, 19 bp, Homo Sapiens
cgaatgatttcgactcatt

SEQ ID NO: 11729 - DNA, 20 bp, Homo Sapiens
cgaatgatttcgactcatta

SEQ ID NO: 11730 - DNA, 21 bp, Homo Sapiens
cgaatgatttcgactcattaa

SEQ ID NO: 11731 - DNA, 22 bp, Homo Sapiens
cgaatgatttcgactcattaaa

SEQ ID NO: 11732 - DNA, 23 bp, Homo Sapiens
cgaatgatttcgactcattaaat

SEQ ID NO: 11733 - DNA, 30 bp, Homo Sapiens
cgaatgatttcgactcattaaattatgata

SEQ ID NO: 11734 - DNA, 31 bp, Homo Sapiens
cgaatgatttcgactcattaaattatgataa

SEQ ID NO: 11735 - DNA, 33 bp, Homo Sapiens
cgaatgatttcgactcattaaattatgataatc

SEQ ID NO: 11736 - DNA, 40 bp, Homo Sapiens
cgaatgatttcgactcattaaattatgataatcatattta

SEQ ID NO: 11737 - DNA, 41 bp, Homo Sapiens
cgaatgatttcgactcattaaattatgataatcatatttac

SEQ ID NO: 11738 - DNA, 42 bp, Homo Sapiens
cgaatgatttcgactcattaaattatgataatcatatttacc

SEQ ID NO: 11739 - DNA, 46 bp, Homo Sapiens
cgaatgatttcgactcattaaattatgataatcatatttaccaacc

SEQ ID NO: 11740 - DNA, 47 bp, Homo Sapiens
cgaatgatttcgactcattaaattatgataatcatatttaccaacca

SEQ ID NO: 11741 - DNA, 34 bp, Homo Sapiens
cgacccagtggcctaatggataaggcatcagcct

SEQ ID NO: 11742 - DNA, 16 bp, Homo Sapiens
cgaccccttatttacc

SEQ ID NO: 11743 - DNA, 17 bp, Homo Sapiens
cgaccccttatttaccc

SEQ ID NO: 11744 - DNA, 18 bp, Homo Sapiens
cgaccccttatttacccc

SEQ ID NO: 11745 - DNA, 19 bp, Homo Sapiens
cgaccccttatttacccca

SEQ ID NO: 11746 - DNA, 31 bp, Homo Sapiens
cgacccgggttcgattcccgggcggcgcacc

SEQ ID NO: 11747 - DNA, 17 bp, Homo Sapiens
cgactcattaaattatg

SEQ ID NO: 11748 - DNA, 19 bp, Homo Sapiens
cgactcattaaattatgat

SEQ ID NO: 11749 - DNA, 23 bp, Homo Sapiens
cgactcattaaattatgataatc

SEQ ID NO: 11750 - DNA, 30 bp, Homo Sapiens
cgactcattaaattatgataatcatattta

SEQ ID NO: 11751 - DNA, 31 bp, Homo Sapiens
cgactcattaaattatgataatcatatttac

SEQ ID NO: 11752 - DNA, 32 bp, Homo Sapiens
cgactcattaaattatgataatcatatttacc

SEQ ID NO: 11753 - DNA, 34 bp, Homo Sapiens
cgactcattaaattatgataatcatatttaccaa

SEQ ID NO: 11754 - DNA, 35 bp, Homo Sapiens
cgactcattaaattatgataatcatatttaccaac

SEQ ID NO: 11755 - DNA, 36 bp, Homo Sapiens
cgactcattaaattatgataatcatatttaccaacc

SEQ ID NO: 11756 - DNA, 37 bp, Homo Sapiens
cgactcattaaattatgataatcatatttaccaacca

SEQ ID NO: 11757 - DNA, 19 bp, Homo Sapiens
cgactcccggtatgggaac

SEQ ID NO: 11758 - DNA, 20 bp, Homo Sapiens
cgactcccggtatgggaacc

SEQ ID NO: 11759 - DNA, 16 bp, Homo Sapiens
cgactcccggtgtggg

SEQ ID NO: 11760 - DNA, 17 bp, Homo Sapiens
cgactcccggtgtggga

SEQ ID NO: 11761 - DNA, 18 bp, Homo Sapiens
cgactcccggtgtgggaa

SEQ ID NO: 11762 - DNA, 19 bp, Homo Sapiens
cgactcccggtgtgggaac

SEQ ID NO: 11763 - DNA, 20 bp, Homo Sapiens
cgactcccggtgtgggaacc

SEQ ID NO: 11764 - DNA, 21 bp, Homo Sapiens
cgactcccggtgtgggaacca

SEQ ID NO: 11765 - DNA, 16 bp, Homo Sapiens
cgactcctggctggct

SEQ ID NO: 11766 - DNA, 17 bp, Homo Sapiens
cgactcctggctggctc

SEQ ID NO: 11767 - DNA, 18 bp, Homo Sapiens
cgactcctggctggctcg

SEQ ID NO: 11768 - DNA, 19 bp, Homo Sapiens
cgactcctggctggctcgc

SEQ ID NO: 11769 - DNA, 20 bp, Homo Sapiens
cgactcctggctggctcgcc

SEQ ID NO: 11770 - DNA, 21 bp, Homo Sapiens
cgactcctggctggctcgcca

SEQ ID NO: 11771 - DNA, 20 bp, Homo Sapiens
cgagaaagctcacaagaact

SEQ ID NO: 11772 - DNA, 21 bp, Homo Sapiens
cgagaaagctcacaagaactg

SEQ ID NO: 11773 - DNA, 22 bp, Homo Sapiens
cgagaaagctcacaagaactgc

SEQ ID NO: 11774 - DNA, 23 bp, Homo Sapiens
cgagaaagctcacaagaactgct

SEQ ID NO: 11775 - DNA, 24 bp, Homo Sapiens
cgagaaagctcacaagaactgcta

SEQ ID NO: 11776 - DNA, 26 bp, Homo Sapiens
cgagaaagctcacaagaactgctaac

SEQ ID NO: 11777 - DNA, 27 bp, Homo Sapiens
cgagaaagctcacaagaactgctaact

SEQ ID NO: 11778 - DNA, 28 bp, Homo Sapiens
cgagaaagctcacaagaactgctaactc

SEQ ID NO: 11779 - DNA, 16 bp, Homo Sapiens
cgagaggtagcgggat

SEQ ID NO: 11780 - DNA, 17 bp, Homo Sapiens
cgagaggtagcgggatc

SEQ ID NO: 11781 - DNA, 18 bp, Homo Sapiens
cgagaggtagcgggatcg

SEQ ID NO: 11782 - DNA, 17 bp, Homo Sapiens
cgagaggtagtgggatc

SEQ ID NO: 11783 - DNA, 17 bp, Homo Sapiens
cgagaggtcccgggttc

SEQ ID NO: 11784 - DNA, 18 bp, Homo Sapiens
cgagaggtcccgggttca

SEQ ID NO: 11785 - DNA, 31 bp, Homo Sapiens
cgagaggtcccgggttcaaatcccggacgag

SEQ ID NO: 11786 - DNA, 32 bp, Homo Sapiens
cgagaggtcccgggttcaaatcccggacgagc

SEQ ID NO: 11787 - DNA, 33 bp, Homo Sapiens
cgagaggtcccgggttcaaatcccggacgagcc

SEQ ID NO: 11788 - DNA, 34 bp, Homo Sapiens
cgagaggtcccgggttcaaatcccggacgagccc

SEQ ID NO: 11789 - DNA, 35 bp, Homo Sapiens
cgagaggtcccgggttcaaatcccggacgagcccc

SEQ ID NO: 11790 - DNA, 36 bp, Homo Sapiens
cgagaggtcccgggttcaaatcccggacgagccccc

SEQ ID NO: 11791 - DNA, 37 bp, Homo Sapiens
cgagaggtcccgggttcaaatcccggacgagccccca

SEQ ID NO: 11792 - DNA, 17 bp, Homo Sapiens
cgagccccacgttgggc

SEQ ID NO: 11793 - DNA, 18 bp, Homo Sapiens
cgagccccacgttgggcg

SEQ ID NO: 11794 - DNA, 19 bp, Homo Sapiens
cgagccccacgttgggcgc

SEQ ID NO: 11795 - DNA, 20 bp, Homo Sapiens
cgagccccacgttgggcgcc

SEQ ID NO: 11796 - DNA, 21 bp, Homo Sapiens
cgagccccacgttgggcgcca

SEQ ID NO: 11797 - DNA, 19 bp, Homo Sapiens
cgagccccagtggaaccac

SEQ ID NO: 11798 - DNA, 20 bp, Homo Sapiens
cgagccccagtggaaccacc

SEQ ID NO: 11799 - DNA, 21 bp, Homo Sapiens
cgagccccagtggaaccacca

SEQ ID NO: 11800 - DNA, 20 bp, Homo Sapiens
cgagcctcacctggagcacc

SEQ ID NO: 11801 - DNA, 18 bp, Homo Sapiens
cgagcgcgctggacttct

SEQ ID NO: 11802 - DNA, 30 bp, Homo Sapiens
cgagcggtctaaggcgctgcgttcaggtcg

SEQ ID NO: 11803 - DNA, 29 bp, Homo Sapiens
cgagcggtctaaggcgctggattaaggct

SEQ ID NO: 11804 - DNA, 16 bp, Homo Sapiens
cgaggccccgggttca

SEQ ID NO: 11805 - DNA, 29 bp, Homo Sapiens
cgaggccccgggttcaatccccggcacct

SEQ ID NO: 11806 - DNA, 19 bp, Homo Sapiens
cgaggtgattttcatattg

SEQ ID NO: 11807 - DNA, 20 bp, Homo Sapiens
cgaggtgattttcatattga

SEQ ID NO: 11808 - DNA, 23 bp, Homo Sapiens
cgaggtgattttcatattgaatt

SEQ ID NO: 11809 - DNA, 24 bp, Homo Sapiens
cgaggtgattttcatattgaattg

SEQ ID NO: 11810 - DNA, 25 bp, Homo Sapiens
cgaggtgattttcatattgaattgc

SEQ ID NO: 11811 - DNA, 26 bp, Homo Sapiens
cgaggtgattttcatattgaattgca

SEQ ID NO: 11812 - DNA, 31 bp, Homo Sapiens
cgaggtgattttcatattgaattgcaaattc

SEQ ID NO: 11813 - DNA, 16 bp, Homo Sapiens
cgaggtggccgagtgg

SEQ ID NO: 11814 - DNA, 21 bp, Homo Sapiens
cgaggtggccgagtggttaag

SEQ ID NO: 11815 - DNA, 16 bp, Homo Sapiens
cgaggttgtgagttcg

SEQ ID NO: 11816 - DNA, 33 bp, Homo Sapiens
cgaggttgtgagttcgagcctcacctggagcac

SEQ ID NO: 11817 - DNA, 34 bp, Homo Sapiens
cgaggttgtgagttcgagcctcacctggagcacc

SEQ ID NO: 11818 - DNA, 35 bp, Homo Sapiens
cgaggttgtgagttcgagcctcacctggagcacca

SEQ ID NO: 11819 - DNA, 16 bp, Homo Sapiens
cgagtcccacccgggg

SEQ ID NO: 11820 - DNA, 16 bp, Homo Sapiens
cgagtcccatctgggg

SEQ ID NO: 11821 - DNA, 20 bp, Homo Sapiens
cgagtcccatctggggtgcc

SEQ ID NO: 11822 - DNA, 18 bp, Homo Sapiens
cgagtcccggcggagtcg

SEQ ID NO: 11823 - DNA, 17 bp, Homo Sapiens
cgagtcctgccgcggtc

SEQ ID NO: 11824 - DNA, 18 bp, Homo Sapiens
cgagtcctgccgcggtcg

SEQ ID NO: 11825 - DNA, 20 bp, Homo Sapiens
cgagtcctgccgcggtcgcc

SEQ ID NO: 11826 - DNA, 21 bp, Homo Sapiens
cgagtcctgccgcggtcgcca

SEQ ID NO: 11827 - DNA, 18 bp, Homo Sapiens
cgagtctcggtggaacct

SEQ ID NO: 11828 - DNA, 21 bp, Homo Sapiens
cgagtctcggtggaacctcca

SEQ ID NO: 11829 - DNA, 22 bp, Homo Sapiens
cgagttcaaatctcgctggggc

SEQ ID NO: 11830 - DNA, 23 bp, Homo Sapiens
cgagttcaaatctcgctggggcc

SEQ ID NO: 11831 - DNA, 24 bp, Homo Sapiens
cgagttcaaatctcgctggggcct

SEQ ID NO: 11832 - DNA, 25 bp, Homo Sapiens
cgagttcaaatctcgctggggcctc

SEQ ID NO: 11833 - DNA, 26 bp, Homo Sapiens
cgagttcaaatctcgctggggcctcc

SEQ ID NO: 11834 - DNA, 22 bp, Homo Sapiens
cgagttcaaatctcggtggaac

SEQ ID NO: 11835 - DNA, 23 bp, Homo Sapiens
cgagttcaaatctcggtggaacc

SEQ ID NO: 11836 - DNA, 24 bp, Homo Sapiens
cgagttcaaatctcggtggaacct

SEQ ID NO: 11837 - DNA, 25 bp, Homo Sapiens
cgagttcaaatctcggtggaacctc

SEQ ID NO: 11838 - DNA, 26 bp, Homo Sapiens
cgagttcaaatctcggtggaacctcc

SEQ ID NO: 11839 - DNA, 22 bp, Homo Sapiens
cgagttcaaatctcggtgggac

SEQ ID NO: 11840 - DNA, 23 bp, Homo Sapiens
cgagttcaaatctcggtgggacc

SEQ ID NO: 11841 - DNA, 24 bp, Homo Sapiens
cgagttcaaatctcggtgggacct

SEQ ID NO: 11842 - DNA, 25 bp, Homo Sapiens
cgagttcaaatctcggtgggacctc

SEQ ID NO: 11843 - DNA, 26 bp, Homo Sapiens
cgagttcaaatctcggtgggacctcc

SEQ ID NO: 11844 - DNA, 23 bp, Homo Sapiens
cgagttcaattctcgctggggcc

SEQ ID NO: 11845 - DNA, 25 bp, Homo Sapiens
cgagttcaattctcgctggggcctc

SEQ ID NO: 11846 - DNA, 24 bp, Homo Sapiens
cgagttcgaatctcggtgggacct

SEQ ID NO: 11847 - DNA, 25 bp, Homo Sapiens
cgagttcgaatctcggtgggacctc

SEQ ID NO: 11848 - DNA, 23 bp, Homo Sapiens
cgagttcgagtctcggtggaacc

SEQ ID NO: 11849 - DNA, 24 bp, Homo Sapiens
cgagttcgagtctcggtggaacct

SEQ ID NO: 11850 - DNA, 25 bp, Homo Sapiens
cgagttcgagtctcggtggaacctc

SEQ ID NO: 11851 - DNA, 26 bp, Homo Sapiens
cgagttcgagtctcggtggaacctcc

SEQ ID NO: 11852 - DNA, 27 bp, Homo Sapiens
cgagttcgagtctcggtggaacctcca

SEQ ID NO: 11853 - DNA, 26 bp, Homo Sapiens
cgagttcgatcctcgctggggcctcc

SEQ ID NO: 11854 - DNA, 18 bp, Homo Sapiens
cgatagagcatgagactc

SEQ ID NO: 11855 - DNA, 28 bp, Homo Sapiens
cgatagctcagctggtagagcggaggac

SEQ ID NO: 11856 - DNA, 20 bp, Homo Sapiens
cgatccccagcatctccacc

SEQ ID NO: 11857 - DNA, 21 bp, Homo Sapiens
cgatccccagcatctccacca

SEQ ID NO: 11858 - DNA, 16 bp, Homo Sapiens
cgatccccagtacctc

SEQ ID NO: 11859 - DNA, 16 bp, Homo Sapiens
cgatccccggcacctc

SEQ ID NO: 11860 - DNA, 20 bp, Homo Sapiens
cgatccccggcacctccacc

SEQ ID NO: 11861 - DNA, 21 bp, Homo Sapiens
cgatccccggcacctccacca

SEQ ID NO: 11862 - DNA, 18 bp, Homo Sapiens
cgatccccggcatctcca

SEQ ID NO: 11863 - DNA, 19 bp, Homo Sapiens
cgatccccggcatctccac

SEQ ID NO: 11864 - DNA, 20 bp, Homo Sapiens
cgatccccggcatctccacc

SEQ ID NO: 11865 - DNA, 21 bp, Homo Sapiens
cgatccccggcatctccacca

SEQ ID NO: 11866 - DNA, 17 bp, Homo Sapiens
cgatccccgtacgggcc

SEQ ID NO: 11867 - DNA, 20 bp, Homo Sapiens
cgatccccgtacgggccacc

SEQ ID NO: 11868 - DNA, 21 bp, Homo Sapiens
cgatccccgtacgggccacca

SEQ ID NO: 11869 - DNA, 19 bp, Homo Sapiens
cgatccccgtactggccac

SEQ ID NO: 11870 - DNA, 21 bp, Homo Sapiens
cgatcccgggcggaaacacca

SEQ ID NO: 11871 - DNA, 18 bp, Homo Sapiens
cgatcccgggtttcggca

SEQ ID NO: 11872 - DNA, 19 bp, Homo Sapiens
cgatcccgggtttcggcac

SEQ ID NO: 11873 - DNA, 21 bp, Homo Sapiens
cgatcccgggtttcggcacca

SEQ ID NO: 11874 - DNA, 22 bp, Homo Sapiens
cgatccgagttcaaatctcggt

SEQ ID NO: 11875 - DNA, 23 bp, Homo Sapiens
cgatccgagttcaaatctcggtg

SEQ ID NO: 11876 - DNA, 29 bp, Homo Sapiens
cgatccgagttcaaatctcggtgggacct

SEQ ID NO: 11877 - DNA, 30 bp, Homo Sapiens
cgatccgagttcaaatctcggtgggacctc

SEQ ID NO: 11878 - DNA, 23 bp, Homo Sapiens
cgatccgagttcgagtctcggtg

SEQ ID NO: 11879 - DNA, 18 bp, Homo Sapiens
cgatgcccgcatcctcca

SEQ ID NO: 11880 - DNA, 20 bp, Homo Sapiens
cgatgcccgcatcctccacc

SEQ ID NO: 11881 - DNA, 21 bp, Homo Sapiens
cgatgcccgcatcctccacca

SEQ ID NO: 11882 - DNA, 17 bp, Homo Sapiens
cgatggatcgaaaccat

SEQ ID NO: 11883 - DNA, 25 bp, Homo Sapiens
cgatggatcgaaaccatcctctgct

SEQ ID NO: 11884 - DNA, 26 bp, Homo Sapiens
cgatggatcgaaaccatcctctgcta

SEQ ID NO: 11885 - DNA, 27 bp, Homo Sapiens
cgatggatcgaaaccatcctctgctac

SEQ ID NO: 11886 - DNA, 28 bp, Homo Sapiens
cgatggatcgaaaccatcctctgctacc

SEQ ID NO: 11887 - DNA, 29 bp, Homo Sapiens
cgatggatcgaaaccatcctctgctacca

SEQ ID NO: 11888 - DNA, 19 bp, Homo Sapiens
cgatggccgagtggttaag

SEQ ID NO: 11889 - DNA, 24 bp, Homo Sapiens
cgatggccgagtggttaaggcgtt

SEQ ID NO: 11890 - DNA, 16 bp, Homo Sapiens
cgatggcgtgggttcg

SEQ ID NO: 11891 - DNA, 29 bp, Homo Sapiens
cgatggcgtgggttcgaatcccaccgctg

SEQ ID NO: 11892 - DNA, 23 bp, Homo Sapiens
cgatggtttttcatatcattggt

SEQ ID NO: 11893 - DNA, 24 bp, Homo Sapiens
cgatggtttttcatatcattggtc

SEQ ID NO: 11894 - DNA, 25 bp, Homo Sapiens
cgatggtttttcatatcattggtcg

SEQ ID NO: 11895 - DNA, 26 bp, Homo Sapiens
cgatggtttttcatatcattggtcgt

SEQ ID NO: 11896 - DNA, 27 bp, Homo Sapiens
cgatggtttttcatatcattggtcgtg

SEQ ID NO: 11897 - DNA, 30 bp, Homo Sapiens
cgatggtttttcatatcattggtcgtggtt

SEQ ID NO: 11898 - DNA, 31 bp, Homo Sapiens
cgatggtttttcatatcattggtcgtggttg

SEQ ID NO: 11899 - DNA, 32 bp, Homo Sapiens
cgatggtttttcatatcattggtcgtggttgt

SEQ ID NO: 11900 - DNA, 33 bp, Homo Sapiens
cgatggtttttcatatcattggtcgtggttgta

SEQ ID NO: 11901 - DNA, 34 bp, Homo Sapiens
cgatggtttttcatatcattggtcgtggttgtag

SEQ ID NO: 11902 - DNA, 35 bp, Homo Sapiens
cgatggtttttcatatcattggtcgtggttgtagt

SEQ ID NO: 11903 - DNA, 36 bp, Homo Sapiens
cgatggtttttcatatcattggtcgtggttgtagtc

SEQ ID NO: 11904 - DNA, 37 bp, Homo Sapiens
cgatggtttttcatatcattggtcgtggttgtagtcc

SEQ ID NO: 11905 - DNA, 38 bp, Homo Sapiens
cgatggtttttcatatcattggtcgtggttgtagtccg

SEQ ID NO: 11906 - DNA, 39 bp, Homo Sapiens
cgatggtttttcatatcattggtcgtggttgtagtccgt

SEQ ID NO: 11907 - DNA, 46 bp, Homo Sapiens
cgatggtttttcatatcattggtcgtggttgtagtccgtgcgagaa

SEQ ID NO: 11908 - DNA, 47 bp, Homo Sapiens
cgatggtttttcatatcattggtcgtggttgtagtccgtgcgagaat

SEQ ID NO: 11909 - DNA, 48 bp, Homo Sapiens
cgatggtttttcatatcattggtcgtggttgtagtccgtgcgagaata

SEQ ID NO: 11910 - DNA, 18 bp, Homo Sapiens
cgattccccgacggggag

SEQ ID NO: 11911 - DNA, 19 bp, Homo Sapiens
cgattccccgacggggagc

SEQ ID NO: 11912 - DNA, 20 bp, Homo Sapiens
cgattccccgacggggagcc

SEQ ID NO: 11913 - DNA, 21 bp, Homo Sapiens
cgattccccgacggggagcca

SEQ ID NO: 11914 - DNA, 16 bp, Homo Sapiens
cgattcccggccaacg

SEQ ID NO: 11915 - DNA, 18 bp, Homo Sapiens
cgattcccggccaacgca

SEQ ID NO: 11916 - DNA, 19 bp, Homo Sapiens
cgattcccggccaacgcac

SEQ ID NO: 11917 - DNA, 20 bp, Homo Sapiens
cgattcccggccaacgcacc

SEQ ID NO: 11918 - DNA, 21 bp, Homo Sapiens
cgattcccggccaacgcacca

SEQ ID NO: 11919 - DNA, 16 bp, Homo Sapiens
cgattcccggccaatg

SEQ ID NO: 11920 - DNA, 20 bp, Homo Sapiens
cgattcccggccaatgcacc

SEQ ID NO: 11921 - DNA, 21 bp, Homo Sapiens
cgattcccggccaatgcacca

SEQ ID NO: 11922 - DNA, 21 bp, Homo Sapiens
cgattcccggcccatgcacca

SEQ ID NO: 11923 - DNA, 16 bp, Homo Sapiens
cgattcccgggcggcg

SEQ ID NO: 11924 - DNA, 17 bp, Homo Sapiens
cgattcccgggcggcgc

SEQ ID NO: 11925 - DNA, 19 bp, Homo Sapiens
cgattcccgggcggcgcac

SEQ ID NO: 11926 - DNA, 20 bp, Homo Sapiens
cgattcccgggcggcgcacc

SEQ ID NO: 11927 - DNA, 21 bp, Homo Sapiens
cgattcccgggcggcgcacca

SEQ ID NO: 11928 - DNA, 20 bp, Homo Sapiens
cgattcccggtcaggaaacc

SEQ ID NO: 11929 - DNA, 19 bp, Homo Sapiens
cgattcccggtcagggaac

SEQ ID NO: 11930 - DNA, 20 bp, Homo Sapiens
cgattcccggtcagggaacc

SEQ ID NO: 11931 - DNA, 21 bp, Homo Sapiens
cgattcccggtcagggaacca

SEQ ID NO: 11932 - DNA, 19 bp, Homo Sapiens
cgattccggctcgaaggac

SEQ ID NO: 11933 - DNA, 20 bp, Homo Sapiens
cgattccggctcgaaggacc

SEQ ID NO: 11934 - DNA, 21 bp, Homo Sapiens
cgattccggctcgaaggacca

SEQ ID NO: 11935 - DNA, 20 bp, Homo Sapiens
cgattccttccttttttgcc

SEQ ID NO: 11936 - DNA, 21 bp, Homo Sapiens
cgattccttccttttttgcca

SEQ ID NO: 11937 - DNA, 18 bp, Homo Sapiens
cgattctcatagtcctag

SEQ ID NO: 11938 - DNA, 19 bp, Homo Sapiens
cgattctcatagtcctagc

SEQ ID NO: 11939 - DNA, 20 bp, Homo Sapiens
cgattctcatagtcctagcc

SEQ ID NO: 11940 - DNA, 21 bp, Homo Sapiens
cgattctcatagtcctagcca

SEQ ID NO: 11941 - DNA, 22 bp, Homo Sapiens
cgcaatggacgagcgcgctgga

SEQ ID NO: 11942 - DNA, 19 bp, Homo Sapiens
cgcaatggatagcgcattg

SEQ ID NO: 11943 - DNA, 21 bp, Homo Sapiens
cgcaatggatagcgcattgga

SEQ ID NO: 11944 - DNA, 25 bp, Homo Sapiens
cgcaatggatagcgcattggacttc

SEQ ID NO: 11945 - DNA, 32 bp, Homo Sapiens
cgcactggtggttcagtggtagaattctcgcc

SEQ ID NO: 11946 - DNA, 19 bp, Homo Sapiens
cgcagaaggtcctgggttc

SEQ ID NO: 11947 - DNA, 35 bp, Homo Sapiens
cgcagaaggtcctgggttcaagccccagtggaacc

SEQ ID NO: 11948 - DNA, 38 bp, Homo Sapiens
cgcagaaggtcctgggttcaagccccagtggaaccacc

SEQ ID NO: 11949 - DNA, 28 bp, Homo Sapiens
cgcagaaggtcctgggttcgagccccag

SEQ ID NO: 11950 - DNA, 33 bp, Homo Sapiens
cgcagaaggtcctgggttcgagccccagtggaa

SEQ ID NO: 11951 - DNA, 34 bp, Homo Sapiens
cgcagaaggtcctgggttcgagccccagtggaac

SEQ ID NO: 11952 - DNA, 35 bp, Homo Sapiens
cgcagaaggtcctgggttcgagccccagtggaacc

SEQ ID NO: 11953 - DNA, 36 bp, Homo Sapiens
cgcagaaggtcctgggttcgagccccagtggaacca

SEQ ID NO: 11954 - DNA, 37 bp, Homo Sapiens
cgcagaaggtcctgggttcgagccccagtggaaccac

SEQ ID NO: 11955 - DNA, 38 bp, Homo Sapiens
cgcagaaggtcctgggttcgagccccagtggaaccacc

SEQ ID NO: 11956 - DNA, 39 bp, Homo Sapiens
cgcagaaggtcctgggttcgagccccagtggaaccacca

SEQ ID NO: 11957 - DNA, 17 bp, Homo Sapiens
cgcagcaacctcggttc

SEQ ID NO: 11958 - DNA, 18 bp, Homo Sapiens
cgcagcaacctcggttcg

SEQ ID NO: 11959 - DNA, 26 bp, Homo Sapiens
cgcagcaacctcggttcgaatccgag

SEQ ID NO: 11960 - DNA, 27 bp, Homo Sapiens
cgcagcaacctcggttcgaatccgagt

SEQ ID NO: 11961 - DNA, 29 bp, Homo Sapiens
cgcagcaacctcggttcgaatccgagtca

SEQ ID NO: 11962 - DNA, 31 bp, Homo Sapiens
cgcagcaacctcggttcgaatccgagtcacg

SEQ ID NO: 11963 - DNA, 32 bp, Homo Sapiens
cgcagcaacctcggttcgaatccgagtcacgg

SEQ ID NO: 11964 - DNA, 33 bp, Homo Sapiens
cgcagcaacctcggttcgaatccgagtcacggc

SEQ ID NO: 11965 - DNA, 34 bp, Homo Sapiens
cgcagcaacctcggttcgaatccgagtcacggca

SEQ ID NO: 11966 - DNA, 35 bp, Homo Sapiens
cgcagcaacctcggttcgaatccgagtcacggcac

SEQ ID NO: 11967 - DNA, 36 bp, Homo Sapiens
cgcagcaacctcggttcgaatccgagtcacggcacc

SEQ ID NO: 11968 - DNA, 37 bp, Homo Sapiens
cgcagcaacctcggttcgaatccgagtcacggcacca

SEQ ID NO: 11969 - DNA, 20 bp, Homo Sapiens
cgcagcggaagcgtgctggg

SEQ ID NO: 11970 - DNA, 21 bp, Homo Sapiens
cgcagcggaagcgtgctgggc

SEQ ID NO: 11971 - DNA, 22 bp, Homo Sapiens
cgcagcggaagcgtgctgggcc

SEQ ID NO: 11972 - DNA, 23 bp, Homo Sapiens
cgcagcggaagcgtgctgggccc

SEQ ID NO: 11973 - DNA, 24 bp, Homo Sapiens
cgcagcggaagcgtgctgggccca

SEQ ID NO: 11974 - DNA, 25 bp, Homo Sapiens
cgcagcggaagcgtgctgggcccat

SEQ ID NO: 11975 - DNA, 30 bp, Homo Sapiens
cgcagcggaagcgtgctgggcccataaccc

SEQ ID NO: 11976 - DNA, 43 bp, Homo Sapiens
cgcagcggaagcgtgctgggcccataacccagaggtcgatgga

SEQ ID NO: 11977 - DNA, 44 bp, Homo Sapiens
cgcagcggaagcgtgctgggcccataacccagaggtcgatggat

SEQ ID NO: 11978 - DNA, 17 bp, Homo Sapiens
cgcaggttcgaaccctg

SEQ ID NO: 11979 - DNA, 27 bp, Homo Sapiens
cgcaggttcgaaccctgctcgctgcgc

SEQ ID NO: 11980 - DNA, 17 bp, Homo Sapiens
cgcaggttcgaatcctg

SEQ ID NO: 11981 - DNA, 18 bp, Homo Sapiens
cgcataaaacttaaaact

SEQ ID NO: 11982 - DNA, 19 bp, Homo Sapiens
cgcataaaacttaaaactt

SEQ ID NO: 11983 - DNA, 20 bp, Homo Sapiens
cgcataaaacttaaaacttt

SEQ ID NO: 11984 - DNA, 21 bp, Homo Sapiens
cgcataaaacttaaaacttta

SEQ ID NO: 11985 - DNA, 22 bp, Homo Sapiens
cgcataaaacttaaaactttac

SEQ ID NO: 11986 - DNA, 23 bp, Homo Sapiens
cgcataaaacttaaaactttaca

SEQ ID NO: 11987 - DNA, 24 bp, Homo Sapiens
cgcataaaacttaaaactttacag

SEQ ID NO: 11988 - DNA, 26 bp, Homo Sapiens
cgcataaaacttaaaactttacagtc

SEQ ID NO: 11989 - DNA, 28 bp, Homo Sapiens
cgcataaaacttaaaactttacagtcag

SEQ ID NO: 11990 - DNA, 29 bp, Homo Sapiens
cgcataaaacttaaaactttacagtcaga

SEQ ID NO: 11991 - DNA, 30 bp, Homo Sapiens
cgcataaaacttaaaactttacagtcagag

SEQ ID NO: 11992 - DNA, 31 bp, Homo Sapiens
cgcataaaacttaaaactttacagtcagagg

SEQ ID NO: 11993 - DNA, 32 bp, Homo Sapiens
cgcataaaacttaaaactttacagtcagaggt

SEQ ID NO: 11994 - DNA, 33 bp, Homo Sapiens
cgcataaaacttaaaactttacagtcagaggtt

SEQ ID NO: 11995 - DNA, 34 bp, Homo Sapiens
cgcataaaacttaaaactttacagtcagaggttc

SEQ ID NO: 11996 - DNA, 35 bp, Homo Sapiens
cgcataaaacttaaaactttacagtcagaggttca

SEQ ID NO: 11997 - DNA, 45 bp, Homo Sapiens
cgcataaaacttaaaactttacagtcagaggttcaattcctcttc

SEQ ID NO: 11998 - DNA, 32 bp, Homo Sapiens
cgcatgggtggttcagtggtagaattctcgcc

SEQ ID NO: 11999 - DNA, 33 bp, Homo Sapiens
cgcatgggtggttcagtggtagaattctcgcct

SEQ ID NO: 12000 - DNA, 34 bp, Homo Sapiens
cgcatgggtggttcagtggtagaattctcgcctg

SEQ ID NO: 12001 - DNA, 35 bp, Homo Sapiens
cgcatgggtggttcagtggtagaattctcgcctgc

SEQ ID NO: 12002 - DNA, 36 bp, Homo Sapiens
cgcatgggtggttcagtggtagaattctcgcctgcc

SEQ ID NO: 12003 - DNA, 30 bp, Homo Sapiens
cgcattcggctgttaaccgaaaggttggtg

SEQ ID NO: 12004 - DNA, 16 bp, Homo Sapiens
cgcattggacttctaa

SEQ ID NO: 12005 - DNA, 17 bp, Homo Sapiens
cgcattggacttctaat

SEQ ID NO: 12006 - DNA, 18 bp, Homo Sapiens
cgcattggacttctaatt

SEQ ID NO: 12007 - DNA, 21 bp, Homo Sapiens
cgcattggacttctaattcaa

SEQ ID NO: 12008 - DNA, 19 bp, Homo Sapiens
cgcattggtggttcagtgg

SEQ ID NO: 12009 - DNA, 29 bp, Homo Sapiens
cgcattggtggttcagtggtagaattctc

SEQ ID NO: 12010 - DNA, 31 bp, Homo Sapiens
cgcattggtggttcagtggtagaattctcgc

SEQ ID NO: 12011 - DNA, 32 bp, Homo Sapiens
cgcattggtggttcagtggtagaattctcgcc

SEQ ID NO: 12012 - DNA, 33 bp, Homo Sapiens
cgcattggtggttcagtggtagaattctcgcct

SEQ ID NO: 12013 - DNA, 34 bp, Homo Sapiens
cgcattggtggttcagtggtagaattctcgcctg

SEQ ID NO: 12014 - DNA, 35 bp, Homo Sapiens
cgcattggtggttcagtggtagaattctcgcctgc

SEQ ID NO: 12015 - DNA, 36 bp, Homo Sapiens
cgcattggtggttcagtggtagaattctcgcctgcc

SEQ ID NO: 12016 - DNA, 37 bp, Homo Sapiens
cgcattggtggttcagtggtagaattctcgcctgcca

SEQ ID NO: 12017 - DNA, 38 bp, Homo Sapiens
cgcattggtggttcagtggtagaattctcgcctgccac

SEQ ID NO: 12018 - DNA, 39 bp, Homo Sapiens
cgcattggtggttcagtggtagaattctcgcctgccacg

SEQ ID NO: 12019 - DNA, 16 bp, Homo Sapiens
cgccaaggtcgcgggt

SEQ ID NO: 12020 - DNA, 17 bp, Homo Sapiens
cgccaaggtcgcgggtt

SEQ ID NO: 12021 - DNA, 18 bp, Homo Sapiens
cgccaaggtcgcgggttc

SEQ ID NO: 12022 - DNA, 33 bp, Homo Sapiens
cgccaaggtcgcgggttcgaaccccgtacgggc

SEQ ID NO: 12023 - DNA, 37 bp, Homo Sapiens
cgccaaggtcgcgggttcgaaccccgtacgggccacc

SEQ ID NO: 12024 - DNA, 38 bp, Homo Sapiens
cgccaaggtcgcgggttcgaaccccgtacgggccacca

SEQ ID NO: 12025 - DNA, 28 bp, Homo Sapiens
cgccaaggtcgcgggttcgatccccgta

SEQ ID NO: 12026 - DNA, 30 bp, Homo Sapiens
cgccaaggtcgcgggttcgatccccgtacg

SEQ ID NO: 12027 - DNA, 32 bp, Homo Sapiens
cgccaaggtcgcgggttcgatccccgtacggg

SEQ ID NO: 12028 - DNA, 33 bp, Homo Sapiens
cgccaaggtcgcgggttcgatccccgtacgggc

SEQ ID NO: 12029 - DNA, 35 bp, Homo Sapiens
cgccaaggtcgcgggttcgatccccgtacgggcca

SEQ ID NO: 12030 - DNA, 37 bp, Homo Sapiens
cgccaaggtcgcgggttcgatccccgtacgggccacc

SEQ ID NO: 12031 - DNA, 38 bp, Homo Sapiens
cgccaaggtcgcgggttcgatccccgtacgggccacca

SEQ ID NO: 12032 - DNA, 32 bp, Homo Sapiens
cgccaaggtcgcgggttcgatccccgtactgg

SEQ ID NO: 12033 - DNA, 37 bp, Homo Sapiens
cgccaaggtcgcgggttcgatccccgtactggccacc

SEQ ID NO: 12034 - DNA, 16 bp, Homo Sapiens
cgcccggatagctcag

SEQ ID NO: 12035 - DNA, 19 bp, Homo Sapiens
cgcccggatagctcagtcg

SEQ ID NO: 12036 - DNA, 20 bp, Homo Sapiens
cgcccggatagctcagtcgg

SEQ ID NO: 12037 - DNA, 22 bp, Homo Sapiens
cgcccggatagctcagtcggta

SEQ ID NO: 12038 - DNA, 23 bp, Homo Sapiens
cgcccggatagctcagtcggtag

SEQ ID NO: 12039 - DNA, 24 bp, Homo Sapiens
cgcccggatagctcagtcggtaga

SEQ ID NO: 12040 - DNA, 32 bp, Homo Sapiens
cgcccggatagctcagtcggtagagcatcaga

SEQ ID NO: 12041 - DNA, 33 bp, Homo Sapiens
cgcccggatagctcagtcggtagagcatcagac

SEQ ID NO: 12042 - DNA, 34 bp, Homo Sapiens
cgcccggatagctcagtcggtagagcatcagact

SEQ ID NO: 12043 - DNA, 36 bp, Homo Sapiens
cgcccggatagctcagtcggtagagcatcagacttt

SEQ ID NO: 12044 - DNA, 37 bp, Homo Sapiens
cgcccggatagctcagtcggtagagcatcagactttt

SEQ ID NO: 12045 - DNA, 16 bp, Homo Sapiens
cgcccggctagctcag

SEQ ID NO: 12046 - DNA, 17 bp, Homo Sapiens
cgcccggctagctcagt

SEQ ID NO: 12047 - DNA, 33 bp, Homo Sapiens
cgcccggctagctcagtcggtagagcatgagac

SEQ ID NO: 12048 - DNA, 34 bp, Homo Sapiens
cgcccggctagctcagtcggtagagcatgagact

SEQ ID NO: 12049 - DNA, 35 bp, Homo Sapiens
cgcccggctagctcagtcggtagagcatgagactc

SEQ ID NO: 12050 - DNA, 36 bp, Homo Sapiens
cgcccggctagctcagtcggtagagcatgagactct

SEQ ID NO: 12051 - DNA, 42 bp, Homo Sapiens
cgcccggctagctcagtcggtagagcatgagactcttaatct

SEQ ID NO: 12052 - DNA, 30 bp, Homo Sapiens
cgcccggctagctcagtcggtagagcatgg

SEQ ID NO: 12053 - DNA, 33 bp, Homo Sapiens
cgcccggctagctcagtcggtagagcatgggac

SEQ ID NO: 12054 - DNA, 34 bp, Homo Sapiens
cgcccggctagctcagtcggtagagcatgggact

SEQ ID NO: 12055 - DNA, 35 bp, Homo Sapiens
cgcccggctagctcagtcggtagagcatgggactc

SEQ ID NO: 12056 - DNA, 36 bp, Homo Sapiens
cgcccggctagctcagtcggtagagcatgggactct

SEQ ID NO: 12057 - DNA, 37 bp, Homo Sapiens
cgcccggctagctcagtcggtagagcatgggactctt

SEQ ID NO: 12058 - DNA, 38 bp, Homo Sapiens
cgcccggctagctcagtcggtagagcatgggactctta

SEQ ID NO: 12059 - DNA, 42 bp, Homo Sapiens
cgcccggctagctcagtcggtagagcatgggactcttaatcc

SEQ ID NO: 12060 - DNA, 16 bp, Homo Sapiens
cgccgcggcccgggtt

SEQ ID NO: 12061 - DNA, 17 bp, Homo Sapiens
cgccgcggcccgggttc

SEQ ID NO: 12062 - DNA, 18 bp, Homo Sapiens
cgccgcggcccgggttcg

SEQ ID NO: 12063 - DNA, 21 bp, Homo Sapiens
cgccgcggcccgggttcgatt

SEQ ID NO: 12064 - DNA, 24 bp, Homo Sapiens
cgccgcggcccgggttcgattccc

SEQ ID NO: 12065 - DNA, 25 bp, Homo Sapiens
cgccgcggcccgggttcgattcccg

SEQ ID NO: 12066 - DNA, 26 bp, Homo Sapiens
cgccgcggcccgggttcgattcccgg

SEQ ID NO: 12067 - DNA, 27 bp, Homo Sapiens
cgccgcggcccgggttcgattcccggc

SEQ ID NO: 12068 - DNA, 31 bp, Homo Sapiens
cgccgcggcccgggttcgattcccggccagg

SEQ ID NO: 12069 - DNA, 36 bp, Homo Sapiens
cgccgcggcccgggttcgattcccggccagggaacc

SEQ ID NO: 12070 - DNA, 27 bp, Homo Sapiens
cgccgcggcccgggttcgattcccggt

SEQ ID NO: 12071 - DNA, 28 bp, Homo Sapiens
cgccgcggcccgggttcgattcccggtc

SEQ ID NO: 12072 - DNA, 29 bp, Homo Sapiens
cgccgcggcccgggttcgattcccggtca

SEQ ID NO: 12073 - DNA, 30 bp, Homo Sapiens
cgccgcggcccgggttcgattcccggtcag

SEQ ID NO: 12074 - DNA, 31 bp, Homo Sapiens
cgccgcggcccgggttcgattcccggtcagg

SEQ ID NO: 12075 - DNA, 35 bp, Homo Sapiens
cgccgcggcccgggttcgattcccggtcaggaaac

SEQ ID NO: 12076 - DNA, 32 bp, Homo Sapiens
cgccgcggcccgggttcgattcccggtcaggg

SEQ ID NO: 12077 - DNA, 33 bp, Homo Sapiens
cgccgcggcccgggttcgattcccggtcaggga

SEQ ID NO: 12078 - DNA, 34 bp, Homo Sapiens
cgccgcggcccgggttcgattcccggtcagggaa

SEQ ID NO: 12079 - DNA, 35 bp, Homo Sapiens
cgccgcggcccgggttcgattcccggtcagggaac

SEQ ID NO: 12080 - DNA, 36 bp, Homo Sapiens
cgccgcggcccgggttcgattcccggtcagggaacc

SEQ ID NO: 12081 - DNA, 37 bp, Homo Sapiens
cgccgcggcccgggttcgattcccggtcagggaacca

SEQ ID NO: 12082 - DNA, 16 bp, Homo Sapiens
cgccgctggtgtagtg

SEQ ID NO: 12083 - DNA, 17 bp, Homo Sapiens
cgccgctggtgtagtgg

SEQ ID NO: 12084 - DNA, 19 bp, Homo Sapiens
cgccgctggtgtagtggta

SEQ ID NO: 12085 - DNA, 21 bp, Homo Sapiens
cgccgctggtgtagtggtatc

SEQ ID NO: 12086 - DNA, 25 bp, Homo Sapiens
cgccgctggtgtagtggtatcatgc

SEQ ID NO: 12087 - DNA, 26 bp, Homo Sapiens
cgccgctggtgtagtggtatcatgca

SEQ ID NO: 12088 - DNA, 27 bp, Homo Sapiens
cgccgctggtgtagtggtatcatgcaa

SEQ ID NO: 12089 - DNA, 28 bp, Homo Sapiens
cgccgctggtgtagtggtatcatgcaag

SEQ ID NO: 12090 - DNA, 29 bp, Homo Sapiens
cgccgctggtgtagtggtatcatgcaaga

SEQ ID NO: 12091 - DNA, 30 bp, Homo Sapiens
cgccgctggtgtagtggtatcatgcaagat

SEQ ID NO: 12092 - DNA, 31 bp, Homo Sapiens
cgccgctggtgtagtggtatcatgcaagatt

SEQ ID NO: 12093 - DNA, 32 bp, Homo Sapiens
cgccgctggtgtagtggtatcatgcaagattc

SEQ ID NO: 12094 - DNA, 33 bp, Homo Sapiens
cgccgctggtgtagtggtatcatgcaagattcc

SEQ ID NO: 12095 - DNA, 34 bp, Homo Sapiens
cgccgctggtgtagtggtatcatgcaagattccc

SEQ ID NO: 12096 - DNA, 35 bp, Homo Sapiens
cgccgctggtgtagtggtatcatgcaagattccca

SEQ ID NO: 12097 - DNA, 37 bp, Homo Sapiens
cgccgctggtgtagtggtatcatgcaagattcccatt

SEQ ID NO: 12098 - DNA, 38 bp, Homo Sapiens
cgccgctggtgtagtggtatcatgcaagattcccattc

SEQ ID NO: 12099 - DNA, 39 bp, Homo Sapiens
cgccgctggtgtagtggtatcatgcaagattcccattct

SEQ ID NO: 12100 - DNA, 43 bp, Homo Sapiens
cgccgctggtgtagtggtatcatgcaagattcccattcttgcg

SEQ ID NO: 12101 - DNA, 47 bp, Homo Sapiens
cgccgctggtgtagtggtatcatgcaagattcccattcttgcgaccc

SEQ ID NO: 12102 - DNA, 48 bp, Homo Sapiens
cgccgctggtgtagtggtatcatgcaagattcccattcttgcgacccg

SEQ ID NO: 12103 - DNA, 22 bp, Homo Sapiens
cgccgtgatcgtatagtggtta

SEQ ID NO: 12104 - DNA, 24 bp, Homo Sapiens
cgccgtgatcgtatagtggttagt

SEQ ID NO: 12105 - DNA, 29 bp, Homo Sapiens
cgccgtgatcgtatagtggttagtactct

SEQ ID NO: 12106 - DNA, 31 bp, Homo Sapiens
cgccgtgatcgtatagtggttagtactctgc

SEQ ID NO: 12107 - DNA, 32 bp, Homo Sapiens
cgccgtgatcgtatagtggttagtactctgcg

SEQ ID NO: 12108 - DNA, 33 bp, Homo Sapiens
cgccgtgatcgtatagtggttagtactctgcgt

SEQ ID NO: 12109 - DNA, 34 bp, Homo Sapiens
cgccgtgatcgtatagtggttagtactctgcgtt

SEQ ID NO: 12110 - DNA, 35 bp, Homo Sapiens
cgccgtgatcgtatagtggttagtactctgcgttg

SEQ ID NO: 12111 - DNA, 36 bp, Homo Sapiens
cgccgtgatcgtatagtggttagtactctgcgttgt

SEQ ID NO: 12112 - DNA, 37 bp, Homo Sapiens
cgccgtgatcgtatagtggttagtactctgcgttgtg

SEQ ID NO: 12113 - DNA, 16 bp, Homo Sapiens
cgcctgccacgcggga

SEQ ID NO: 12114 - DNA, 21 bp, Homo Sapiens
cgcctgccacgcgggaggccc

SEQ ID NO: 12115 - DNA, 22 bp, Homo Sapiens
cgcctgccacgcgggaggcccg

SEQ ID NO: 12116 - DNA, 24 bp, Homo Sapiens
cgcctgccacgcgggaggcccggg

SEQ ID NO: 12117 - DNA, 25 bp, Homo Sapiens
cgcctgccacgcgggaggcccgggt

SEQ ID NO: 12118 - DNA, 26 bp, Homo Sapiens
cgcctgccacgcgggaggcccgggtt

SEQ ID NO: 12119 - DNA, 28 bp, Homo Sapiens
cgcctgccacgcgggaggcccgggttcg

SEQ ID NO: 12120 - DNA, 45 bp, Homo Sapiens
cgcctgccacgcgggaggcccgggttcgattcccggccaatgcac

SEQ ID NO: 12121 - DNA, 46 bp, Homo Sapiens
cgcctgccacgcgggaggcccgggttcgattcccggccaatgcacc

SEQ ID NO: 12122 - DNA, 47 bp, Homo Sapiens
cgcctgccacgcgggaggcccgggttcgattcccggccaatgcacca

SEQ ID NO: 12123 - DNA, 16 bp, Homo Sapiens
cgcctgtcacgcggga

SEQ ID NO: 12124 - DNA, 19 bp, Homo Sapiens
cgcctgtcacgcgggagac

SEQ ID NO: 12125 - DNA, 20 bp, Homo Sapiens
cgcctgtcacgcgggagacc

SEQ ID NO: 12126 - DNA, 22 bp, Homo Sapiens
cgcctgtcacgcgggagaccgg

SEQ ID NO: 12127 - DNA, 25 bp, Homo Sapiens
cgcctgtcacgcgggagaccggggt

SEQ ID NO: 12128 - DNA, 40 bp, Homo Sapiens
cgcctgtcacgcgggagaccggggttcaattccccgacgg

SEQ ID NO: 12129 - DNA, 41 bp, Homo Sapiens
cgcctgtcacgcgggagaccggggttcaattccccgacggg

SEQ ID NO: 12130 - DNA, 42 bp, Homo Sapiens
cgcctgtcacgcgggagaccggggttcaattccccgacgggg

SEQ ID NO: 12131 - DNA, 44 bp, Homo Sapiens
cgcctgtcacgcgggagaccggggttcaattccccgacggggag

SEQ ID NO: 12132 - DNA, 45 bp, Homo Sapiens
cgcctgtcacgcgggagaccggggttcaattccccgacggggagc

SEQ ID NO: 12133 - DNA, 46 bp, Homo Sapiens
cgcctgtcacgcgggagaccggggttcaattccccgacggggagcc

SEQ ID NO: 12134 - DNA, 47 bp, Homo Sapiens
cgcctgtcacgcgggagaccggggttcaattccccgacggggagcca

SEQ ID NO: 12135 - DNA, 37 bp, Homo Sapiens
cgcctgtcacgcgggagaccggggttcgattccccga

SEQ ID NO: 12136 - DNA, 38 bp, Homo Sapiens
cgcctgtcacgcgggagaccggggttcgattccccgac

SEQ ID NO: 12137 - DNA, 39 bp, Homo Sapiens
cgcctgtcacgcgggagaccggggttcgattccccgacg

SEQ ID NO: 12138 - DNA, 40 bp, Homo Sapiens
cgcctgtcacgcgggagaccggggttcgattccccgacgg

SEQ ID NO: 12139 - DNA, 41 bp, Homo Sapiens
cgcctgtcacgcgggagaccggggttcgattccccgacggg

SEQ ID NO: 12140 - DNA, 42 bp, Homo Sapiens
cgcctgtcacgcgggagaccggggttcgattccccgacgggg

SEQ ID NO: 12141 - DNA, 43 bp, Homo Sapiens
cgcctgtcacgcgggagaccggggttcgattccccgacgggga

SEQ ID NO: 12142 - DNA, 44 bp, Homo Sapiens
cgcctgtcacgcgggagaccggggttcgattccccgacggggag

SEQ ID NO: 12143 - DNA, 45 bp, Homo Sapiens
cgcctgtcacgcgggagaccggggttcgattccccgacggggagc

SEQ ID NO: 12144 - DNA, 46 bp, Homo Sapiens
cgcctgtcacgcgggagaccggggttcgattccccgacggggagcc

SEQ ID NO: 12145 - DNA, 47 bp, Homo Sapiens
cgcctgtcacgcgggagaccggggttcgattccccgacggggagcca

SEQ ID NO: 12146 - DNA, 16 bp, Homo Sapiens
cgcgaaaggtccccgg

SEQ ID NO: 12147 - DNA, 17 bp, Homo Sapiens
cgcgaaaggtccccggt

SEQ ID NO: 12148 - DNA, 19 bp, Homo Sapiens
cgcgaaaggtccccggttc

SEQ ID NO: 12149 - DNA, 20 bp, Homo Sapiens
cgcgaaaggtccccggttcg

SEQ ID NO: 12150 - DNA, 34 bp, Homo Sapiens
cgcgaaaggtccccggttcgaaaccgggcagaag

SEQ ID NO: 12151 - DNA, 38 bp, Homo Sapiens
cgcgaaaggtccccggttcgaaaccgggcagaagcacc

SEQ ID NO: 12152 - DNA, 30 bp, Homo Sapiens
cgcgaaaggtccccggttcgaaaccgggcg

SEQ ID NO: 12153 - DNA, 32 bp, Homo Sapiens
cgcgaaaggtccccggttcgaaaccgggcgga

SEQ ID NO: 12154 - DNA, 34 bp, Homo Sapiens
cgcgaaaggtccccggttcgaaaccgggcggaaa

SEQ ID NO: 12155 - DNA, 35 bp, Homo Sapiens
cgcgaaaggtccccggttcgaaaccgggcggaaac

SEQ ID NO: 12156 - DNA, 36 bp, Homo Sapiens
cgcgaaaggtccccggttcgaaaccgggcggaaaca

SEQ ID NO: 12157 - DNA, 37 bp, Homo Sapiens
cgcgaaaggtccccggttcgaaaccgggcggaaacac

SEQ ID NO: 12158 - DNA, 38 bp, Homo Sapiens
cgcgaaaggtccccggttcgaaaccgggcggaaacacc

SEQ ID NO: 12159 - DNA, 39 bp, Homo Sapiens
cgcgaaaggtccccggttcgaaaccgggcggaaacacca

SEQ ID NO: 12160 - DNA, 36 bp, Homo Sapiens
cgcgaaaggtccccggttcgaaactgggcggaaaca

SEQ ID NO: 12161 - DNA, 38 bp, Homo Sapiens
cgcgaaaggtccccggttcgaaactgggcggaaacacc

SEQ ID NO: 12162 - DNA, 34 bp, Homo Sapiens
cgcgaaaggtccccggttcgatcccgggcggaaa

SEQ ID NO: 12163 - DNA, 36 bp, Homo Sapiens
cgcgaaaggtccccggttcgatcccgggcggaaaca

SEQ ID NO: 12164 - DNA, 38 bp, Homo Sapiens
cgcgaaaggtccccggttcgatcccgggcggaaacacc

SEQ ID NO: 12165 - DNA, 24 bp, Homo Sapiens
cgcgagttcaaatctcgctggggc

SEQ ID NO: 12166 - DNA, 25 bp, Homo Sapiens
cgcgagttcaaatctcgctggggcc

SEQ ID NO: 12167 - DNA, 26 bp, Homo Sapiens
cgcgagttcaaatctcgctggggcct

SEQ ID NO: 12168 - DNA, 27 bp, Homo Sapiens
cgcgagttcaaatctcgctggggcctc

SEQ ID NO: 12169 - DNA, 28 bp, Homo Sapiens
cgcgagttcaaatctcgctggggcctcc

SEQ ID NO: 12170 - DNA, 29 bp, Homo Sapiens
cgcgagttcaaatctcgctggggcctcca

SEQ ID NO: 12171 - DNA, 25 bp, Homo Sapiens
cgcgagttcaattctcgctggggcc

SEQ ID NO: 12172 - DNA, 26 bp, Homo Sapiens
cgcgagttcaattctcgctggggcct

SEQ ID NO: 12173 - DNA, 27 bp, Homo Sapiens
cgcgagttcaattctcgctggggcctc

SEQ ID NO: 12174 - DNA, 28 bp, Homo Sapiens
cgcgagttcaattctcgctggggcctcc

SEQ ID NO: 12175 - DNA, 24 bp, Homo Sapiens
cgcgagttcgatcctcgctggggc

SEQ ID NO: 12176 - DNA, 26 bp, Homo Sapiens
cgcgagttcgatcctcgctggggcct

SEQ ID NO: 12177 - DNA, 27 bp, Homo Sapiens
cgcgagttcgatcctcgctggggcctc

SEQ ID NO: 12178 - DNA, 19 bp, Homo Sapiens
cgcgcaggttcgaaccctg

SEQ ID NO: 12179 - DNA, 19 bp, Homo Sapiens
cgcgcaggttcgaatcctg

SEQ ID NO: 12180 - DNA, 33 bp, Homo Sapiens
cgcgccgctggtgtagtggtatcatgcaagatt

SEQ ID NO: 12181 - DNA, 37 bp, Homo Sapiens
cgcgccgctggtgtagtggtatcatgcaagattccca

SEQ ID NO: 12182 - DNA, 29 bp, Homo Sapiens
cgcgcggtacttataatgccgaggttgtg

SEQ ID NO: 12183 - DNA, 17 bp, Homo Sapiens
cgcggcccgggttcgat

SEQ ID NO: 12184 - DNA, 19 bp, Homo Sapiens
cgcggcccgggttcgattc

SEQ ID NO: 12185 - DNA, 20 bp, Homo Sapiens
cgcggcccgggttcgattcc

SEQ ID NO: 12186 - DNA, 21 bp, Homo Sapiens
cgcggcccgggttcgattccc

SEQ ID NO: 12187 - DNA, 24 bp, Homo Sapiens
cgcggcccgggttcgattcccggt

SEQ ID NO: 12188 - DNA, 25 bp, Homo Sapiens
cgcggcccgggttcgattcccggtc

SEQ ID NO: 12189 - DNA, 26 bp, Homo Sapiens
cgcggcccgggttcgattcccggtca

SEQ ID NO: 12190 - DNA, 27 bp, Homo Sapiens
cgcggcccgggttcgattcccggtcag

SEQ ID NO: 12191 - DNA, 28 bp, Homo Sapiens
cgcggcccgggttcgattcccggtcagg

SEQ ID NO: 12192 - DNA, 29 bp, Homo Sapiens
cgcggcccgggttcgattcccggtcaggg

SEQ ID NO: 12193 - DNA, 31 bp, Homo Sapiens
cgcggcccgggttcgattcccggtcagggaa

SEQ ID NO: 12194 - DNA, 32 bp, Homo Sapiens
cgcggcccgggttcgattcccggtcagggaac

SEQ ID NO: 12195 - DNA, 33 bp, Homo Sapiens
cgcggcccgggttcgattcccggtcagggaacc

SEQ ID NO: 12196 - DNA, 34 bp, Homo Sapiens
cgcggcccgggttcgattcccggtcagggaacca

SEQ ID NO: 12197 - DNA, 36 bp, Homo Sapiens
cgcgggagacccgggttcaattcccggccaatgcac

SEQ ID NO: 12198 - DNA, 37 bp, Homo Sapiens
cgcgggagacccgggttcaattcccggccaatgcacc

SEQ ID NO: 12199 - DNA, 38 bp, Homo Sapiens
cgcgggagacccgggttcaattcccggccaatgcacca

SEQ ID NO: 12200 - DNA, 18 bp, Homo Sapiens
cgcgggagaccggggttc

SEQ ID NO: 12201 - DNA, 26 bp, Homo Sapiens
cgcgggagaccggggttcaattcccc

SEQ ID NO: 12202 - DNA, 27 bp, Homo Sapiens
cgcgggagaccggggttcaattccccg

SEQ ID NO: 12203 - DNA, 28 bp, Homo Sapiens
cgcgggagaccggggttcaattccccga

SEQ ID NO: 12204 - DNA, 29 bp, Homo Sapiens
cgcgggagaccggggttcaattccccgac

SEQ ID NO: 12205 - DNA, 30 bp, Homo Sapiens
cgcgggagaccggggttcaattccccgacg

SEQ ID NO: 12206 - DNA, 31 bp, Homo Sapiens
cgcgggagaccggggttcaattccccgacgg

SEQ ID NO: 12207 - DNA, 32 bp, Homo Sapiens
cgcgggagaccggggttcaattccccgacggg

SEQ ID NO: 12208 - DNA, 33 bp, Homo Sapiens
cgcgggagaccggggttcaattccccgacgggg

SEQ ID NO: 12209 - DNA, 34 bp, Homo Sapiens
cgcgggagaccggggttcaattccccgacgggga

SEQ ID NO: 12210 - DNA, 35 bp, Homo Sapiens
cgcgggagaccggggttcaattccccgacggggag

SEQ ID NO: 12211 - DNA, 36 bp, Homo Sapiens
cgcgggagaccggggttcaattccccgacggggagc

SEQ ID NO: 12212 - DNA, 37 bp, Homo Sapiens
cgcgggagaccggggttcaattccccgacggggagcc

SEQ ID NO: 12213 - DNA, 38 bp, Homo Sapiens
cgcgggagaccggggttcaattccccgacggggagcca

SEQ ID NO: 12214 - DNA, 19 bp, Homo Sapiens
cgcgggagaccggggttcg

SEQ ID NO: 12215 - DNA, 21 bp, Homo Sapiens
cgcgggagaccggggttcgat

SEQ ID NO: 12216 - DNA, 23 bp, Homo Sapiens
cgcgggagaccggggttcgattc

SEQ ID NO: 12217 - DNA, 37 bp, Homo Sapiens
cgcgggagaccggggttcgattccccaacggggagcc

SEQ ID NO: 12218 - DNA, 38 bp, Homo Sapiens
cgcgggagaccggggttcgattccccaacggggagcca

SEQ ID NO: 12219 - DNA, 27 bp, Homo Sapiens
cgcgggagaccggggttcgattccccg

SEQ ID NO: 12220 - DNA, 28 bp, Homo Sapiens
cgcgggagaccggggttcgattccccga

SEQ ID NO: 12221 - DNA, 29 bp, Homo Sapiens
cgcgggagaccggggttcgattccccgac

SEQ ID NO: 12222 - DNA, 30 bp, Homo Sapiens
cgcgggagaccggggttcgattccccgacg

SEQ ID NO: 12223 - DNA, 31 bp, Homo Sapiens
cgcgggagaccggggttcgattccccgacgg

SEQ ID NO: 12224 - DNA, 32 bp, Homo Sapiens
cgcgggagaccggggttcgattccccgacggg

SEQ ID NO: 12225 - DNA, 33 bp, Homo Sapiens
cgcgggagaccggggttcgattccccgacgggg

SEQ ID NO: 12226 - DNA, 34 bp, Homo Sapiens
cgcgggagaccggggttcgattccccgacgggga

SEQ ID NO: 12227 - DNA, 35 bp, Homo Sapiens
cgcgggagaccggggttcgattccccgacggggag

SEQ ID NO: 12228 - DNA, 36 bp, Homo Sapiens
cgcgggagaccggggttcgattccccgacggggagc

SEQ ID NO: 12229 - DNA, 37 bp, Homo Sapiens
cgcgggagaccggggttcgattccccgacggggagcc

SEQ ID NO: 12230 - DNA, 38 bp, Homo Sapiens
cgcgggagaccggggttcgattccccgacggggagcca

SEQ ID NO: 12231 - DNA, 16 bp, Homo Sapiens
cgcgggaggcccgggt

SEQ ID NO: 12232 - DNA, 17 bp, Homo Sapiens
cgcgggaggcccgggtt

SEQ ID NO: 12233 - DNA, 18 bp, Homo Sapiens
cgcgggaggcccgggttc

SEQ ID NO: 12234 - DNA, 19 bp, Homo Sapiens
cgcgggaggcccgggttcg

SEQ ID NO: 12235 - DNA, 22 bp, Homo Sapiens
cgcgggaggcccgggttcgatt

SEQ ID NO: 12236 - DNA, 26 bp, Homo Sapiens
cgcgggaggcccgggttcgattcccg

SEQ ID NO: 12237 - DNA, 28 bp, Homo Sapiens
cgcgggaggcccgggttcgattcccggc

SEQ ID NO: 12238 - DNA, 29 bp, Homo Sapiens
cgcgggaggcccgggttcgattcccggcc

SEQ ID NO: 12239 - DNA, 31 bp, Homo Sapiens
cgcgggaggcccgggttcgattcccggccaa

SEQ ID NO: 12240 - DNA, 32 bp, Homo Sapiens
cgcgggaggcccgggttcgattcccggccaat

SEQ ID NO: 12241 - DNA, 33 bp, Homo Sapiens
cgcgggaggcccgggttcgattcccggccaatg

SEQ ID NO: 12242 - DNA, 34 bp, Homo Sapiens
cgcgggaggcccgggttcgattcccggccaatgc

SEQ ID NO: 12243 - DNA, 35 bp, Homo Sapiens
cgcgggaggcccgggttcgattcccggccaatgca

SEQ ID NO: 12244 - DNA, 36 bp, Homo Sapiens
cgcgggaggcccgggttcgattcccggccaatgcac

SEQ ID NO: 12245 - DNA, 37 bp, Homo Sapiens
cgcgggaggcccgggttcgattcccggccaatgcacc

SEQ ID NO: 12246 - DNA, 38 bp, Homo Sapiens
cgcgggaggcccgggttcgattcccggccaatgcacca

SEQ ID NO: 12247 - DNA, 31 bp, Homo Sapiens
cgcgggaggcccgggttcgattcccggccca

SEQ ID NO: 12248 - DNA, 32 bp, Homo Sapiens
cgcgggaggcccgggttcgattcccggcccat

SEQ ID NO: 12249 - DNA, 33 bp, Homo Sapiens
cgcgggaggcccgggttcgattcccggcccatg

SEQ ID NO: 12250 - DNA, 34 bp, Homo Sapiens
cgcgggaggcccgggttcgattcccggcccatgc

SEQ ID NO: 12251 - DNA, 37 bp, Homo Sapiens
cgcgggaggcccgggttcgattcccggcccatgcacc

SEQ ID NO: 12252 - DNA, 38 bp, Homo Sapiens
cgcgggaggcccgggttcgattcccggcccatgcacca

SEQ ID NO: 12253 - DNA, 17 bp, Homo Sapiens
cgcgggttcgaaccccg

SEQ ID NO: 12254 - DNA, 24 bp, Homo Sapiens
cgcgggttcgaaccccgtacgggc

SEQ ID NO: 12255 - DNA, 25 bp, Homo Sapiens
cgcgggttcgaaccccgtacgggcc

SEQ ID NO: 12256 - DNA, 26 bp, Homo Sapiens
cgcgggttcgaaccccgtacgggcca

SEQ ID NO: 12257 - DNA, 27 bp, Homo Sapiens
cgcgggttcgaaccccgtacgggccac

SEQ ID NO: 12258 - DNA, 25 bp, Homo Sapiens
cgcgggttcgaaccccgtccgtgcc

SEQ ID NO: 12259 - DNA, 27 bp, Homo Sapiens
cgcgggttcgaaccccgtccgtgcctc

SEQ ID NO: 12260 - DNA, 29 bp, Homo Sapiens
cgcgggttcgaaccccgtccgtgcctcca

SEQ ID NO: 12261 - DNA, 17 bp, Homo Sapiens
cgcgggttcgatccccg

SEQ ID NO: 12262 - DNA, 24 bp, Homo Sapiens
cgcgggttcgatccccgtacgggc

SEQ ID NO: 12263 - DNA, 25 bp, Homo Sapiens
cgcgggttcgatccccgtacgggcc

SEQ ID NO: 12264 - DNA, 26 bp, Homo Sapiens
cgcgggttcgatccccgtacgggcca

SEQ ID NO: 12265 - DNA, 27 bp, Homo Sapiens
cgcgggttcgatccccgtacgggccac

SEQ ID NO: 12266 - DNA, 28 bp, Homo Sapiens
cgcgggttcgatccccgtacgggccacc

SEQ ID NO: 12267 - DNA, 29 bp, Homo Sapiens
cgcgggttcgatccccgtacgggccacca

SEQ ID NO: 12268 - DNA, 20 bp, Homo Sapiens
cgcggtggccaagtggtaag

SEQ ID NO: 12269 - DNA, 22 bp, Homo Sapiens
cgcggtggccaagtggtaaggc

SEQ ID NO: 12270 - DNA, 26 bp, Homo Sapiens
cgcggtggccaagtggtaaggcgtcg

SEQ ID NO: 12271 - DNA, 18 bp, Homo Sapiens
cgcgtcagtctcataatc

SEQ ID NO: 12272 - DNA, 22 bp, Homo Sapiens
cgcgtcagtctcataatctgaa

SEQ ID NO: 12273 - DNA, 29 bp, Homo Sapiens
cgcgtcagtctcataatctgaaggtcctg

SEQ ID NO: 12274 - DNA, 16 bp, Homo Sapiens
cgcgtggcctaatgga

SEQ ID NO: 12275 - DNA, 20 bp, Homo Sapiens
cgcgtggcctaatggataag

SEQ ID NO: 12276 - DNA, 27 bp, Homo Sapiens
cgcgtggcctaatggataaggcgtctg

SEQ ID NO: 12277 - DNA, 30 bp, Homo Sapiens
cgcgtggcctaatggataaggcgtctgact

SEQ ID NO: 12278 - DNA, 32 bp, Homo Sapiens
cgcgtggcctaatggataaggcgtctgacttc

SEQ ID NO: 12279 - DNA, 33 bp, Homo Sapiens
cgcgtggcctaatggataaggcgtctgacttcg

SEQ ID NO: 12280 - DNA, 31 bp, Homo Sapiens
cgcgtggcctaatggataaggcgtctgattc

SEQ ID NO: 12281 - DNA, 32 bp, Homo Sapiens
cgcgtggcctaatggataaggcgtctgattcc

SEQ ID NO: 12282 - DNA, 33 bp, Homo Sapiens
cgcgtggcctaatggataaggcgtctgattccg

SEQ ID NO: 12283 - DNA, 29 bp, Homo Sapiens
cgcgtgggttcgaaccccactcctggtac

SEQ ID NO: 12284 - DNA, 30 bp, Homo Sapiens
cgcgtgggttcgaaccccactcctggtacc

SEQ ID NO: 12285 - DNA, 29 bp, Homo Sapiens
cgcgtgggttcgaaccccacttctggtac

SEQ ID NO: 12286 - DNA, 30 bp, Homo Sapiens
cgcgtgggttcgaatcccaccctcgtcgcc

SEQ ID NO: 12287 - DNA, 28 bp, Homo Sapiens
cgcgtgggttcgaatcccatcctcgtcg

SEQ ID NO: 12288 - DNA, 29 bp, Homo Sapiens
cgcgtgggttcgaatcccatcctcgtcgc

SEQ ID NO: 12289 - DNA, 30 bp, Homo Sapiens
cgcgtgggttcgaatcccatcctcgtcgcc

SEQ ID NO: 12290 - DNA, 31 bp, Homo Sapiens
cgcgtgggttcgaatcccatcctcgtcgcca

SEQ ID NO: 12291 - DNA, 16 bp, Homo Sapiens
cgctctcaccgccgcg

SEQ ID NO: 12292 - DNA, 18 bp, Homo Sapiens
cgctctcaccgccgcggc

SEQ ID NO: 12293 - DNA, 19 bp, Homo Sapiens
cgctctcaccgccgcggcc

SEQ ID NO: 12294 - DNA, 20 bp, Homo Sapiens
cgctctcaccgccgcggccc

SEQ ID NO: 12295 - DNA, 21 bp, Homo Sapiens
cgctctcaccgccgcggcccg

SEQ ID NO: 12296 - DNA, 23 bp, Homo Sapiens
cgctctcaccgccgcggcccggg

SEQ ID NO: 12297 - DNA, 24 bp, Homo Sapiens
cgctctcaccgccgcggcccgggt

SEQ ID NO: 12298 - DNA, 25 bp, Homo Sapiens
cgctctcaccgccgcggcccgggtt

SEQ ID NO: 12299 - DNA, 26 bp, Homo Sapiens
cgctctcaccgccgcggcccgggttc

SEQ ID NO: 12300 - DNA, 27 bp, Homo Sapiens
cgctctcaccgccgcggcccgggttcg

SEQ ID NO: 12301 - DNA, 29 bp, Homo Sapiens
cgctctcaccgccgcggcccgggttcgat

SEQ ID NO: 12302 - DNA, 31 bp, Homo Sapiens
cgctctcaccgccgcggcccgggttcgattc

SEQ ID NO: 12303 - DNA, 34 bp, Homo Sapiens
cgctctcaccgccgcggcccgggttcgattcccg

SEQ ID NO: 12304 - DNA, 40 bp, Homo Sapiens
cgctctcaccgccgcggcccgggttcgattcccggtcagg

SEQ ID NO: 12305 - DNA, 43 bp, Homo Sapiens
cgctctcaccgccgcggcccgggttcgattcccggtcagggaa

SEQ ID NO: 12306 - DNA, 44 bp, Homo Sapiens
cgctctcaccgccgcggcccgggttcgattcccggtcagggaac

SEQ ID NO: 12307 - DNA, 45 bp, Homo Sapiens
cgctctcaccgccgcggcccgggttcgattcccggtcagggaacc

SEQ ID NO: 12308 - DNA, 46 bp, Homo Sapiens
cgctctcaccgccgcggcccgggttcgattcccggtcagggaacca

SEQ ID NO: 12309 - DNA, 18 bp, Homo Sapiens
cgctggtgtagtggtatc

SEQ ID NO: 12310 - DNA, 23 bp, Homo Sapiens
cgctggtgtagtggtatcatgca

SEQ ID NO: 12311 - DNA, 25 bp, Homo Sapiens
cgctggtgtagtggtatcatgcaag

SEQ ID NO: 12312 - DNA, 26 bp, Homo Sapiens
cgctggtgtagtggtatcatgcaaga

SEQ ID NO: 12313 - DNA, 27 bp, Homo Sapiens
cgctggtgtagtggtatcatgcaagat

SEQ ID NO: 12314 - DNA, 28 bp, Homo Sapiens
cgctggtgtagtggtatcatgcaagatt

SEQ ID NO: 12315 - DNA, 29 bp, Homo Sapiens
cgctggtgtagtggtatcatgcaagattc

SEQ ID NO: 12316 - DNA, 30 bp, Homo Sapiens
cgctggtgtagtggtatcatgcaagattcc

SEQ ID NO: 12317 - DNA, 31 bp, Homo Sapiens
cgctggtgtagtggtatcatgcaagattccc

SEQ ID NO: 12318 - DNA, 32 bp, Homo Sapiens
cgctggtgtagtggtatcatgcaagattccca

SEQ ID NO: 12319 - DNA, 46 bp, Homo Sapiens
cgctggtgtagtggtatcatgcaagattcccattcttgcgacccgg

SEQ ID NO: 12320 - DNA, 47 bp, Homo Sapiens
cgctggtgtagtggtatcatgcaagattcccattcttgcgacccggg

SEQ ID NO: 12321 - DNA, 48 bp, Homo Sapiens
cgctggtgtagtggtatcatgcaagattcccattcttgcgacccgggt

SEQ ID NO: 12322 - DNA, 26 bp, Homo Sapiens
cgctggttcgaatccggctcgaagga

SEQ ID NO: 12323 - DNA, 27 bp, Homo Sapiens
cgctggttcgaatccggctcgaaggac

SEQ ID NO: 12324 - DNA, 28 bp, Homo Sapiens
cgctggttcgaatccggctcgaaggacc

SEQ ID NO: 12325 - DNA, 29 bp, Homo Sapiens
cgctggttcgaatccggctcgaaggacca

SEQ ID NO: 12326 - DNA, 25 bp, Homo Sapiens
cgctggttcgaatccggctcggagg

SEQ ID NO: 12327 - DNA, 26 bp, Homo Sapiens
cgctggttcgaatccggctcggagga

SEQ ID NO: 12328 - DNA, 27 bp, Homo Sapiens
cgctggttcgaatccggctcggaggac

SEQ ID NO: 12329 - DNA, 28 bp, Homo Sapiens
cgctggttcgaatccggctcggaggacc

SEQ ID NO: 12330 - DNA, 29 bp, Homo Sapiens
cgctggttcgaatccggctcggaggacca

SEQ ID NO: 12331 - DNA, 28 bp, Homo Sapiens
cgctggttcgattccagctcgaaggacc

SEQ ID NO: 12332 - DNA, 29 bp, Homo Sapiens
cgctggttcgattccagctcgaaggacca

SEQ ID NO: 12333 - DNA, 18 bp, Homo Sapiens
cgctggttcgattccggc

SEQ ID NO: 12334 - DNA, 24 bp, Homo Sapiens
cgctggttcgattccggctcgaag

SEQ ID NO: 12335 - DNA, 25 bp, Homo Sapiens
cgctggttcgattccggctcgaagg

SEQ ID NO: 12336 - DNA, 26 bp, Homo Sapiens
cgctggttcgattccggctcgaagga

SEQ ID NO: 12337 - DNA, 27 bp, Homo Sapiens
cgctggttcgattccggctcgaaggac

SEQ ID NO: 12338 - DNA, 28 bp, Homo Sapiens
cgctggttcgattccggctcgaaggacc

SEQ ID NO: 12339 - DNA, 29 bp, Homo Sapiens
cgctggttcgattccggctcgaaggacca

SEQ ID NO: 12340 - DNA, 22 bp, Homo Sapiens
cgcttcgggtgcgagaggtccc

SEQ ID NO: 12341 - DNA, 33 bp, Homo Sapiens
cgcttctgtagtgtagtggttatcacgttcgcc

SEQ ID NO: 12342 - DNA, 34 bp, Homo Sapiens
cgcttctgtagtgtagtggttatcacgttcgcct

SEQ ID NO: 12343 - DNA, 35 bp, Homo Sapiens
cgcttctgtagtgtagtggttatcacgttcgcctc

SEQ ID NO: 12344 - DNA, 46 bp, Homo Sapiens
cgctttcaccgccgcggcccgggttcgattcccggtcagggaacca

SEQ ID NO: 12345 - DNA, 16 bp, Homo Sapiens
cggaagcgtgctgggc

SEQ ID NO: 12346 - DNA, 17 bp, Homo Sapiens
cggaagcgtgctgggcc

SEQ ID NO: 12347 - DNA, 18 bp, Homo Sapiens
cggaagcgtgctgggccc

SEQ ID NO: 12348 - DNA, 19 bp, Homo Sapiens
cggaagcgtgctgggccca

SEQ ID NO: 12349 - DNA, 20 bp, Homo Sapiens
cggaagcgtgctgggcccat

SEQ ID NO: 12350 - DNA, 22 bp, Homo Sapiens
cggaagcgtgctgggcccataa

SEQ ID NO: 12351 - DNA, 23 bp, Homo Sapiens
cggaagcgtgctgggcccataac

SEQ ID NO: 12352 - DNA, 24 bp, Homo Sapiens
cggaagcgtgctgggcccataacc

SEQ ID NO: 12353 - DNA, 25 bp, Homo Sapiens
cggaagcgtgctgggcccataaccc

SEQ ID NO: 12354 - DNA, 26 bp, Homo Sapiens
cggaagcgtgctgggcccataaccca

SEQ ID NO: 12355 - DNA, 27 bp, Homo Sapiens
cggaagcgtgctgggcccataacccag

SEQ ID NO: 12356 - DNA, 28 bp, Homo Sapiens
cggaagcgtgctgggcccataacccaga

SEQ ID NO: 12357 - DNA, 29 bp, Homo Sapiens
cggaagcgtgctgggcccataacccagag

SEQ ID NO: 12358 - DNA, 32 bp, Homo Sapiens
cggaagcgtgctgggcccataacccagaggtc

SEQ ID NO: 12359 - DNA, 33 bp, Homo Sapiens
cggaagcgtgctgggcccataacccagaggtcg

SEQ ID NO: 12360 - DNA, 34 bp, Homo Sapiens
cggaagcgtgctgggcccataacccagaggtcga

SEQ ID NO: 12361 - DNA, 35 bp, Homo Sapiens
cggaagcgtgctgggcccataacccagaggtcgat

SEQ ID NO: 12362 - DNA, 36 bp, Homo Sapiens
cggaagcgtgctgggcccataacccagaggtcgatg

SEQ ID NO: 12363 - DNA, 37 bp, Homo Sapiens
cggaagcgtgctgggcccataacccagaggtcgatgg

SEQ ID NO: 12364 - DNA, 38 bp, Homo Sapiens
cggaagcgtgctgggcccataacccagaggtcgatgga

SEQ ID NO: 12365 - DNA, 39 bp, Homo Sapiens
cggaagcgtgctgggcccataacccagaggtcgatggat

SEQ ID NO: 12366 - DNA, 40 bp, Homo Sapiens
cggaagcgtgctgggcccataacccagaggtcgatggatc

SEQ ID NO: 12367 - DNA, 41 bp, Homo Sapiens
cggaagcgtgctgggcccataacccagaggtcgatggatcg

SEQ ID NO: 12368 - DNA, 41 bp, Homo Sapiens
cggaagcgtgctgggcccataacccagaggtcgatggatct

SEQ ID NO: 12369 - DNA, 32 bp, Homo Sapiens
cggagaattttggattctcagggatgggttcg

SEQ ID NO: 12370 - DNA, 34 bp, Homo Sapiens
cggagaattttggattctcagggatgggttcgat

SEQ ID NO: 12371 - DNA, 48 bp, Homo Sapiens
cggagaattttggattctcagggatgggttcgattctcatagtcctag

SEQ ID NO: 12372 - DNA, 16 bp, Homo Sapiens
cggagatgaaaacctt

SEQ ID NO: 12373 - DNA, 17 bp, Homo Sapiens
cggagatgaaaaccttt

SEQ ID NO: 12374 - DNA, 18 bp, Homo Sapiens
cggagatgaaaacctttt

SEQ ID NO: 12375 - DNA, 20 bp, Homo Sapiens
cggagatgaaaacctttttc

SEQ ID NO: 12376 - DNA, 21 bp, Homo Sapiens
cggagatgaaaacctttttcc

SEQ ID NO: 12377 - DNA, 22 bp, Homo Sapiens
cggagatgaaaacctttttcca

SEQ ID NO: 12378 - DNA, 24 bp, Homo Sapiens
cggagatgaaaacctttttccaag

SEQ ID NO: 12379 - DNA, 25 bp, Homo Sapiens
cggagatgaaaacctttttccaagg

SEQ ID NO: 12380 - DNA, 26 bp, Homo Sapiens
cggagatgaaaacctttttccaagga

SEQ ID NO: 12381 - DNA, 27 bp, Homo Sapiens
cggagatgaaaacctttttccaaggac

SEQ ID NO: 12382 - DNA, 28 bp, Homo Sapiens
cggagatgaaaacctttttccaaggaca

SEQ ID NO: 12383 - DNA, 29 bp, Homo Sapiens
cggagatgaaaacctttttccaaggacac

SEQ ID NO: 12384 - DNA, 30 bp, Homo Sapiens
cggagatgaaaacctttttccaaggacacc

SEQ ID NO: 12385 - DNA, 31 bp, Homo Sapiens
cggagatgaaaacctttttccaaggacacca

SEQ ID NO: 12386 - DNA, 16 bp, Homo Sapiens
cggagctggggattgt

SEQ ID NO: 12387 - DNA, 23 bp, Homo Sapiens
cggagctggggattgtgggttcg

SEQ ID NO: 12388 - DNA, 30 bp, Homo Sapiens
cggagctggggattgtgggttcgagtccca

SEQ ID NO: 12389 - DNA, 32 bp, Homo Sapiens
cggagctggggattgtgggttcgagtcccatc

SEQ ID NO: 12390 - DNA, 33 bp, Homo Sapiens
cggagctggggattgtgggttcgagtcccatct

SEQ ID NO: 12391 - DNA, 41 bp, Homo Sapiens
cggagctggggattgtgggttcgagtcccatctgggtcgcc

SEQ ID NO: 12392 - DNA, 25 bp, Homo Sapiens
cggaggcgtgggttcgaatcccacc

SEQ ID NO: 12393 - DNA, 26 bp, Homo Sapiens
cggaggcgtgggttcgaatcccaccg

SEQ ID NO: 12394 - DNA, 29 bp, Homo Sapiens
cggaggcgtgggttcgaatcccaccgctg

SEQ ID NO: 12395 - DNA, 16 bp, Homo Sapiens
cggatagctcagtcgg

SEQ ID NO: 12396 - DNA, 17 bp, Homo Sapiens
cggatagctcagtcggt

SEQ ID NO: 12397 - DNA, 18 bp, Homo Sapiens
cggatagctcagtcggta

SEQ ID NO: 12398 - DNA, 19 bp, Homo Sapiens
cggatagctcagtcggtag

SEQ ID NO: 12399 - DNA, 20 bp, Homo Sapiens
cggatagctcagtcggtaga

SEQ ID NO: 12400 - DNA, 21 bp, Homo Sapiens
cggatagctcagtcggtagag

SEQ ID NO: 12401 - DNA, 22 bp, Homo Sapiens
cggatagctcagtcggtagagc

SEQ ID NO: 12402 - DNA, 23 bp, Homo Sapiens
cggatagctcagtcggtagagca

SEQ ID NO: 12403 - DNA, 24 bp, Homo Sapiens
cggatagctcagtcggtagagcat

SEQ ID NO: 12404 - DNA, 25 bp, Homo Sapiens
cggatagctcagtcggtagagcatc

SEQ ID NO: 12405 - DNA, 26 bp, Homo Sapiens
cggatagctcagtcggtagagcatca

SEQ ID NO: 12406 - DNA, 27 bp, Homo Sapiens
cggatagctcagtcggtagagcatcag

SEQ ID NO: 12407 - DNA, 28 bp, Homo Sapiens
cggatagctcagtcggtagagcatcaga

SEQ ID NO: 12408 - DNA, 29 bp, Homo Sapiens
cggatagctcagtcggtagagcatcagac

SEQ ID NO: 12409 - DNA, 30 bp, Homo Sapiens
cggatagctcagtcggtagagcatcagact

SEQ ID NO: 12410 - DNA, 31 bp, Homo Sapiens
cggatagctcagtcggtagagcatcagactt

SEQ ID NO: 12411 - DNA, 32 bp, Homo Sapiens
cggatagctcagtcggtagagcatcagacttt

SEQ ID NO: 12412 - DNA, 33 bp, Homo Sapiens
cggatagctcagtcggtagagcatcagactttt

SEQ ID NO: 12413 - DNA, 39 bp, Homo Sapiens
cggatagctcagtcggtagagcatcagacttttaatctg

SEQ ID NO: 12414 - DNA, 16 bp, Homo Sapiens
cggatcagaagattcc

SEQ ID NO: 12415 - DNA, 22 bp, Homo Sapiens
cggatcagaagattccaggttc

SEQ ID NO: 12416 - DNA, 30 bp, Homo Sapiens
cggatcagaagattccaggttcgactcctg

SEQ ID NO: 12417 - DNA, 33 bp, Homo Sapiens
cggatcagaagattccaggttcgactcctggct

SEQ ID NO: 12418 - DNA, 22 bp, Homo Sapiens
cggatcagaagattctaggttc

SEQ ID NO: 12419 - DNA, 41 bp, Homo Sapiens
cggatcagaagattctaggttcgactcctggctggctcgcc

SEQ ID NO: 12420 - DNA, 16 bp, Homo Sapiens
cggatcagaagattga

SEQ ID NO: 12421 - DNA, 18 bp, Homo Sapiens
cggatcagaagattgagg

SEQ ID NO: 12422 - DNA, 20 bp, Homo Sapiens
cggatcagaagattgagggt

SEQ ID NO: 12423 - DNA, 22 bp, Homo Sapiens
cggatcagaagattgagggttc

SEQ ID NO: 12424 - DNA, 23 bp, Homo Sapiens
cggatcagaagattgagggttcg

SEQ ID NO: 12425 - DNA, 30 bp, Homo Sapiens
cggatcagaagattgagggttcgagtccct

SEQ ID NO: 12426 - DNA, 41 bp, Homo Sapiens
cggatcagaagattgagggttcgagtcccttcgtggtcgcc

SEQ ID NO: 12427 - DNA, 16 bp, Homo Sapiens
cggatcagaagattgc

SEQ ID NO: 12428 - DNA, 18 bp, Homo Sapiens
cggatcagaagattgcag

SEQ ID NO: 12429 - DNA, 22 bp, Homo Sapiens
cggatcagaagattgcaggttc

SEQ ID NO: 12430 - DNA, 23 bp, Homo Sapiens
cggatcagaagattgcaggttcg

SEQ ID NO: 12431 - DNA, 41 bp, Homo Sapiens
cggatcagaagattgcaggttcgagtcctgccgcggtcgcc

SEQ ID NO: 12432 - DNA, 16 bp, Homo Sapiens
cggatggaggcgtggg

SEQ ID NO: 12433 - DNA, 17 bp, Homo Sapiens
cggatggaggcgtgggt

SEQ ID NO: 12434 - DNA, 18 bp, Homo Sapiens
cggatggaggcgtgggtt

SEQ ID NO: 12435 - DNA, 26 bp, Homo Sapiens
cggatggaggcgtgggttcgaatccc

SEQ ID NO: 12436 - DNA, 27 bp, Homo Sapiens
cggatggaggcgtgggttcgaatccca

SEQ ID NO: 12437 - DNA, 28 bp, Homo Sapiens
cggatggaggcgtgggttcgaatcccac

SEQ ID NO: 12438 - DNA, 29 bp, Homo Sapiens
cggatggaggcgtgggttcgaatcccact

SEQ ID NO: 12439 - DNA, 31 bp, Homo Sapiens
cggatggaggcgtgggttcgaatcccacttc

SEQ ID NO: 12440 - DNA, 32 bp, Homo Sapiens
cggatggaggcgtgggttcgaatcccacttct

SEQ ID NO: 12441 - DNA, 33 bp, Homo Sapiens
cggatggaggcgtgggttcgaatcccacttctg

SEQ ID NO: 12442 - DNA, 36 bp, Homo Sapiens
cggatggaggcgtgggttcgaatcccacttctgaca

SEQ ID NO: 12443 - DNA, 37 bp, Homo Sapiens
cggatggaggcgtgggttcgaatcccacttctgacac

SEQ ID NO: 12444 - DNA, 38 bp, Homo Sapiens
cggatggaggcgtgggttcgaatcccacttctgacacc

SEQ ID NO: 12445 - DNA, 16 bp, Homo Sapiens
cggcccgggttcgact

SEQ ID NO: 12446 - DNA, 17 bp, Homo Sapiens
cggcccgggttcgactc

SEQ ID NO: 12447 - DNA, 18 bp, Homo Sapiens
cggcccgggttcgactcc

SEQ ID NO: 12448 - DNA, 20 bp, Homo Sapiens
cggcccgggttcgactcccg

SEQ ID NO: 12449 - DNA, 21 bp, Homo Sapiens
cggcccgggttcgactcccgg

SEQ ID NO: 12450 - DNA, 22 bp, Homo Sapiens
cggcccgggttcgactcccggt

SEQ ID NO: 12451 - DNA, 23 bp, Homo Sapiens
cggcccgggttcgactcccggtg

SEQ ID NO: 12452 - DNA, 24 bp, Homo Sapiens
cggcccgggttcgactcccggtgt

SEQ ID NO: 12453 - DNA, 25 bp, Homo Sapiens
cggcccgggttcgactcccggtgtg

SEQ ID NO: 12454 - DNA, 26 bp, Homo Sapiens
cggcccgggttcgactcccggtgtgg

SEQ ID NO: 12455 - DNA, 28 bp, Homo Sapiens
cggcccgggttcgactcccggtgtggga

SEQ ID NO: 12456 - DNA, 30 bp, Homo Sapiens
cggcccgggttcgactcccggtgtgggaac

SEQ ID NO: 12457 - DNA, 31 bp, Homo Sapiens
cggcccgggttcgactcccggtgtgggaacc

SEQ ID NO: 12458 - DNA, 32 bp, Homo Sapiens
cggcccgggttcgactcccggtgtgggaacca

SEQ ID NO: 12459 - DNA, 17 bp, Homo Sapiens
cggcccgggttcgattc

SEQ ID NO: 12460 - DNA, 18 bp, Homo Sapiens
cggcccgggttcgattcc

SEQ ID NO: 12461 - DNA, 19 bp, Homo Sapiens
cggcccgggttcgattccc

SEQ ID NO: 12462 - DNA, 20 bp, Homo Sapiens
cggcccgggttcgattcccg

SEQ ID NO: 12463 - DNA, 21 bp, Homo Sapiens
cggcccgggttcgattcccgg

SEQ ID NO: 12464 - DNA, 22 bp, Homo Sapiens
cggcccgggttcgattcccggt

SEQ ID NO: 12465 - DNA, 23 bp, Homo Sapiens
cggcccgggttcgattcccggtc

SEQ ID NO: 12466 - DNA, 29 bp, Homo Sapiens
cggcccgggttcgattcccggtcagggaa

SEQ ID NO: 12467 - DNA, 30 bp, Homo Sapiens
cggcccgggttcgattcccggtcagggaac

SEQ ID NO: 12468 - DNA, 31 bp, Homo Sapiens
cggcccgggttcgattcccggtcagggaacc

SEQ ID NO: 12469 - DNA, 32 bp, Homo Sapiens
cggcccgggttcgattcccggtcagggaacca

SEQ ID NO: 12470 - DNA, 16 bp, Homo Sapiens
cggcgctctcaccgcc

SEQ ID NO: 12471 - DNA, 22 bp, Homo Sapiens
cggcgctctcaccgccgcggcc

SEQ ID NO: 12472 - DNA, 23 bp, Homo Sapiens
cggcgctctcaccgccgcggccc

SEQ ID NO: 12473 - DNA, 24 bp, Homo Sapiens
cggcgctctcaccgccgcggcccg

SEQ ID NO: 12474 - DNA, 26 bp, Homo Sapiens
cggcgctctcaccgccgcggcccggg

SEQ ID NO: 12475 - DNA, 27 bp, Homo Sapiens
cggcgctctcaccgccgcggcccgggt

SEQ ID NO: 12476 - DNA, 28 bp, Homo Sapiens
cggcgctctcaccgccgcggcccgggtt

SEQ ID NO: 12477 - DNA, 29 bp, Homo Sapiens
cggcgctctcaccgccgcggcccgggttc

SEQ ID NO: 12478 - DNA, 33 bp, Homo Sapiens
cggcgctctcaccgccgcggcccgggttcgatt

SEQ ID NO: 12479 - DNA, 38 bp, Homo Sapiens
cggcgctctcaccgccgcggcccgggttcgattcccgg

SEQ ID NO: 12480 - DNA, 39 bp, Homo Sapiens
cggcgctctcaccgccgcggcccgggttcgattcccggt

SEQ ID NO: 12481 - DNA, 46 bp, Homo Sapiens
cggcgctctcaccgccgcggcccgggttcgattcccggtcagggaa

SEQ ID NO: 12482 - DNA, 47 bp, Homo Sapiens
cggcgctctcaccgccgcggcccgggttcgattcccggtcagggaac

SEQ ID NO: 12483 - DNA, 48 bp, Homo Sapiens
cggcgctctcaccgccgcggcccgggttcgattcccggtcagggaacc

SEQ ID NO: 12484 - DNA, 30 bp, Homo Sapiens
cggctagctcagtcgatagagcatgagact

SEQ ID NO: 12485 - DNA, 32 bp, Homo Sapiens
cggctagctcagtcgatagagcatgagactct

SEQ ID NO: 12486 - DNA, 16 bp, Homo Sapiens
cggctagctcagtcgg

SEQ ID NO: 12487 - DNA, 17 bp, Homo Sapiens
cggctagctcagtcggt

SEQ ID NO: 12488 - DNA, 18 bp, Homo Sapiens
cggctagctcagtcggta

SEQ ID NO: 12489 - DNA, 19 bp, Homo Sapiens
cggctagctcagtcggtag

SEQ ID NO: 12490 - DNA, 20 bp, Homo Sapiens
cggctagctcagtcggtaga

SEQ ID NO: 12491 - DNA, 21 bp, Homo Sapiens
cggctagctcagtcggtagag

SEQ ID NO: 12492 - DNA, 22 bp, Homo Sapiens
cggctagctcagtcggtagagc

SEQ ID NO: 12493 - DNA, 23 bp, Homo Sapiens
cggctagctcagtcggtagagca

SEQ ID NO: 12494 - DNA, 24 bp, Homo Sapiens
cggctagctcagtcggtagagcat

SEQ ID NO: 12495 - DNA, 25 bp, Homo Sapiens
cggctagctcagtcggtagagcatg

SEQ ID NO: 12496 - DNA, 26 bp, Homo Sapiens
cggctagctcagtcggtagagcatga

SEQ ID NO: 12497 - DNA, 27 bp, Homo Sapiens
cggctagctcagtcggtagagcatgag

SEQ ID NO: 12498 - DNA, 28 bp, Homo Sapiens
cggctagctcagtcggtagagcatgaga

SEQ ID NO: 12499 - DNA, 29 bp, Homo Sapiens
cggctagctcagtcggtagagcatgagac

SEQ ID NO: 12500 - DNA, 30 bp, Homo Sapiens
cggctagctcagtcggtagagcatgagacc

SEQ ID NO: 12501 - DNA, 31 bp, Homo Sapiens
cggctagctcagtcggtagagcatgagaccc

SEQ ID NO: 12502 - DNA, 32 bp, Homo Sapiens
cggctagctcagtcggtagagcatgagaccct

SEQ ID NO: 12503 - DNA, 33 bp, Homo Sapiens
cggctagctcagtcggtagagcatgagaccctt

SEQ ID NO: 12504 - DNA, 30 bp, Homo Sapiens
cggctagctcagtcggtagagcatgagact

SEQ ID NO: 12505 - DNA, 31 bp, Homo Sapiens
cggctagctcagtcggtagagcatgagactc

SEQ ID NO: 12506 - DNA, 32 bp, Homo Sapiens
cggctagctcagtcggtagagcatgagactct

SEQ ID NO: 12507 - DNA, 33 bp, Homo Sapiens
cggctagctcagtcggtagagcatgagactctt

SEQ ID NO: 12508 - DNA, 34 bp, Homo Sapiens
cggctagctcagtcggtagagcatgagactctta

SEQ ID NO: 12509 - DNA, 35 bp, Homo Sapiens
cggctagctcagtcggtagagcatgagactcttaa

SEQ ID NO: 12510 - DNA, 36 bp, Homo Sapiens
cggctagctcagtcggtagagcatgagactcttaat

SEQ ID NO: 12511 - DNA, 37 bp, Homo Sapiens
cggctagctcagtcggtagagcatgagactcttaatc

SEQ ID NO: 12512 - DNA, 38 bp, Homo Sapiens
cggctagctcagtcggtagagcatgagactcttaatct

SEQ ID NO: 12513 - DNA, 39 bp, Homo Sapiens
cggctagctcagtcggtagagcatgagactcttaatctc

SEQ ID NO: 12514 - DNA, 40 bp, Homo Sapiens
cggctagctcagtcggtagagcatgagactcttaatctca

SEQ ID NO: 12515 - DNA, 46 bp, Homo Sapiens
cggctagctcagtcggtagagcatgagactcttaatctcagggtcg

SEQ ID NO: 12516 - DNA, 48 bp, Homo Sapiens
cggctagctcagtcggtagagcatgagactcttaatctcagggtcgtg

SEQ ID NO: 12517 - DNA, 26 bp, Homo Sapiens
cggctagctcagtcggtagagcatgg

SEQ ID NO: 12518 - DNA, 27 bp, Homo Sapiens
cggctagctcagtcggtagagcatggg

SEQ ID NO: 12519 - DNA, 28 bp, Homo Sapiens
cggctagctcagtcggtagagcatggga

SEQ ID NO: 12520 - DNA, 29 bp, Homo Sapiens
cggctagctcagtcggtagagcatgggac

SEQ ID NO: 12521 - DNA, 30 bp, Homo Sapiens
cggctagctcagtcggtagagcatgggact

SEQ ID NO: 12522 - DNA, 31 bp, Homo Sapiens
cggctagctcagtcggtagagcatgggactc

SEQ ID NO: 12523 - DNA, 32 bp, Homo Sapiens
cggctagctcagtcggtagagcatgggactct

SEQ ID NO: 12524 - DNA, 33 bp, Homo Sapiens
cggctagctcagtcggtagagcatgggactctt

SEQ ID NO: 12525 - DNA, 34 bp, Homo Sapiens
cggctagctcagtcggtagagcatgggactctta

SEQ ID NO: 12526 - DNA, 35 bp, Homo Sapiens
cggctagctcagtcggtagagcatgggactcttaa

SEQ ID NO: 12527 - DNA, 36 bp, Homo Sapiens
cggctagctcagtcggtagagcatgggactcttaat

SEQ ID NO: 12528 - DNA, 37 bp, Homo Sapiens
cggctagctcagtcggtagagcatgggactcttaatc

SEQ ID NO: 12529 - DNA, 38 bp, Homo Sapiens
cggctagctcagtcggtagagcatgggactcttaatcc

SEQ ID NO: 12530 - DNA, 39 bp, Homo Sapiens
cggctagctcagtcggtagagcatgggactcttaatccc

SEQ ID NO: 12531 - DNA, 40 bp, Homo Sapiens
cggctagctcagtcggtagagcatgggactcttaatccca

SEQ ID NO: 12532 - DNA, 47 bp, Homo Sapiens
cggctagctcagtcggtagagcatgggactcttaatcccagggtcgt

SEQ ID NO: 12533 - DNA, 48 bp, Homo Sapiens
cggctagctcagtcggtagagcatgggactcttaatcccagggtcgtg

SEQ ID NO: 12534 - DNA, 38 bp, Homo Sapiens
cggctagctcagtcggtagagcatgggactcttaatct

SEQ ID NO: 12535 - DNA, 33 bp, Homo Sapiens
cggctcgttggtctaggggtatgattctcgctt

SEQ ID NO: 12536 - DNA, 22 bp, Homo Sapiens
cggctgttaaccgaaaggttgg

SEQ ID NO: 12537 - DNA, 23 bp, Homo Sapiens
cggctgttaaccgaaaggttggt

SEQ ID NO: 12538 - DNA, 27 bp, Homo Sapiens
cggctgttaaccgaaaggttggtggtt

SEQ ID NO: 12539 - DNA, 46 bp, Homo Sapiens
cggctgttaaccgaaaggttggtggttcgagcccacccagggacgc

SEQ ID NO: 12540 - DNA, 47 bp, Homo Sapiens
cggctgttaaccgaaaggttggtggttcgagcccacccagggacgcc

SEQ ID NO: 12541 - DNA, 30 bp, Homo Sapiens
cgggagacccgggttcaattcccggccaat

SEQ ID NO: 12542 - DNA, 16 bp, Homo Sapiens
cgggagaccggggttc

SEQ ID NO: 12543 - DNA, 27 bp, Homo Sapiens
cgggagaccggggttcaattccccgac

SEQ ID NO: 12544 - DNA, 28 bp, Homo Sapiens
cgggagaccggggttcaattccccgacg

SEQ ID NO: 12545 - DNA, 29 bp, Homo Sapiens
cgggagaccggggttcaattccccgacgg

SEQ ID NO: 12546 - DNA, 30 bp, Homo Sapiens
cgggagaccggggttcaattccccgacggg

SEQ ID NO: 12547 - DNA, 31 bp, Homo Sapiens
cgggagaccggggttcaattccccgacgggg

SEQ ID NO: 12548 - DNA, 32 bp, Homo Sapiens
cgggagaccggggttcaattccccgacgggga

SEQ ID NO: 12549 - DNA, 33 bp, Homo Sapiens
cgggagaccggggttcaattccccgacggggag

SEQ ID NO: 12550 - DNA, 34 bp, Homo Sapiens
cgggagaccggggttcaattccccgacggggagc

SEQ ID NO: 12551 - DNA, 35 bp, Homo Sapiens
cgggagaccggggttcaattccccgacggggagcc

SEQ ID NO: 12552 - DNA, 36 bp, Homo Sapiens
cgggagaccggggttcaattccccgacggggagcca

SEQ ID NO: 12553 - DNA, 17 bp, Homo Sapiens
cgggagaccggggttcg

SEQ ID NO: 12554 - DNA, 21 bp, Homo Sapiens
cgggagaccggggttcgattc

SEQ ID NO: 12555 - DNA, 26 bp, Homo Sapiens
cgggagaccggggttcgattccccga

SEQ ID NO: 12556 - DNA, 27 bp, Homo Sapiens
cgggagaccggggttcgattccccgac

SEQ ID NO: 12557 - DNA, 28 bp, Homo Sapiens
cgggagaccggggttcgattccccgacg

SEQ ID NO: 12558 - DNA, 29 bp, Homo Sapiens
cgggagaccggggttcgattccccgacgg

SEQ ID NO: 12559 - DNA, 30 bp, Homo Sapiens
cgggagaccggggttcgattccccgacggg

SEQ ID NO: 12560 - DNA, 31 bp, Homo Sapiens
cgggagaccggggttcgattccccgacgggg

SEQ ID NO: 12561 - DNA, 32 bp, Homo Sapiens
cgggagaccggggttcgattccccgacgggga

SEQ ID NO: 12562 - DNA, 33 bp, Homo Sapiens
cgggagaccggggttcgattccccgacggggag

SEQ ID NO: 12563 - DNA, 34 bp, Homo Sapiens
cgggagaccggggttcgattccccgacggggagc

SEQ ID NO: 12564 - DNA, 35 bp, Homo Sapiens
cgggagaccggggttcgattccccgacggggagcc

SEQ ID NO: 12565 - DNA, 36 bp, Homo Sapiens
cgggagaccggggttcgattccccgacggggagcca

SEQ ID NO: 12566 - DNA, 16 bp, Homo Sapiens
cgggaggcccgggttc

SEQ ID NO: 12567 - DNA, 17 bp, Homo Sapiens
cgggaggcccgggttcg

SEQ ID NO: 12568 - DNA, 25 bp, Homo Sapiens
cgggaggcccgggttcgattcccgg

SEQ ID NO: 12569 - DNA, 26 bp, Homo Sapiens
cgggaggcccgggttcgattcccggc

SEQ ID NO: 12570 - DNA, 27 bp, Homo Sapiens
cgggaggcccgggttcgattcccggcc

SEQ ID NO: 12571 - DNA, 28 bp, Homo Sapiens
cgggaggcccgggttcgattcccggcca

SEQ ID NO: 12572 - DNA, 30 bp, Homo Sapiens
cgggaggcccgggttcgattcccggccaat

SEQ ID NO: 12573 - DNA, 31 bp, Homo Sapiens
cgggaggcccgggttcgattcccggccaatg

SEQ ID NO: 12574 - DNA, 32 bp, Homo Sapiens
cgggaggcccgggttcgattcccggccaatgc

SEQ ID NO: 12575 - DNA, 33 bp, Homo Sapiens
cgggaggcccgggttcgattcccggccaatgca

SEQ ID NO: 12576 - DNA, 34 bp, Homo Sapiens
cgggaggcccgggttcgattcccggccaatgcac

SEQ ID NO: 12577 - DNA, 35 bp, Homo Sapiens
cgggaggcccgggttcgattcccggccaatgcacc

SEQ ID NO: 12578 - DNA, 36 bp, Homo Sapiens
cgggaggcccgggttcgattcccggccaatgcacca

SEQ ID NO: 12579 - DNA, 28 bp, Homo Sapiens
cgggaggcccgggttcgattcccggccc

SEQ ID NO: 12580 - DNA, 31 bp, Homo Sapiens
cgggaggcccgggttcgattcccggcccatg

SEQ ID NO: 12581 - DNA, 35 bp, Homo Sapiens
cgggaggcccgggttcgattcccggcccatgcacc

SEQ ID NO: 12582 - DNA, 36 bp, Homo Sapiens
cgggaggcccgggttcgattcccggcccatgcacca

SEQ ID NO: 12583 - DNA, 27 bp, Homo Sapiens
cgggatcgatgcccgcattctccacca

SEQ ID NO: 12584 - DNA, 16 bp, Homo Sapiens
cgggcccataccccga

SEQ ID NO: 12585 - DNA, 17 bp, Homo Sapiens
cgggcccataccccgaa

SEQ ID NO: 12586 - DNA, 18 bp, Homo Sapiens
cgggcccataccccgaaa

SEQ ID NO: 12587 - DNA, 19 bp, Homo Sapiens
cgggcccataccccgaaaa

SEQ ID NO: 12588 - DNA, 23 bp, Homo Sapiens
cgggcccataccccgaaaatgtt

SEQ ID NO: 12589 - DNA, 24 bp, Homo Sapiens
cgggcccataccccgaaaatgttg

SEQ ID NO: 12590 - DNA, 25 bp, Homo Sapiens
cgggcccataccccgaaaatgttgg

SEQ ID NO: 12591 - DNA, 26 bp, Homo Sapiens
cgggcccataccccgaaaatgttggt

SEQ ID NO: 12592 - DNA, 27 bp, Homo Sapiens
cgggcccataccccgaaaatgttggtt

SEQ ID NO: 12593 - DNA, 28 bp, Homo Sapiens
cgggcccataccccgaaaatgttggtta

SEQ ID NO: 12594 - DNA, 29 bp, Homo Sapiens
cgggcccataccccgaaaatgttggttat

SEQ ID NO: 12595 - DNA, 30 bp, Homo Sapiens
cgggcccataccccgaaaatgttggttata

SEQ ID NO: 12596 - DNA, 31 bp, Homo Sapiens
cgggcccataccccgaaaatgttggttatac

SEQ ID NO: 12597 - DNA, 32 bp, Homo Sapiens
cgggcccataccccgaaaatgttggttatacc

SEQ ID NO: 12598 - DNA, 33 bp, Homo Sapiens
cgggcccataccccgaaaatgttggttataccc

SEQ ID NO: 12599 - DNA, 36 bp, Homo Sapiens
cgggcccataccccgaaaatgttggttatacccttc

SEQ ID NO: 12600 - DNA, 37 bp, Homo Sapiens
cgggcccataccccgaaaatgttggttatacccttcc

SEQ ID NO: 12601 - DNA, 39 bp, Homo Sapiens
cgggcccataccccgaaaatgttggttatacccttcccg

SEQ ID NO: 12602 - DNA, 41 bp, Homo Sapiens
cgggcccataccccgaaaatgttggttatacccttcccgta

SEQ ID NO: 12603 - DNA, 42 bp, Homo Sapiens
cgggcccataccccgaaaatgttggttatacccttcccgtac

SEQ ID NO: 12604 - DNA, 43 bp, Homo Sapiens
cgggcccataccccgaaaatgttggttatacccttcccgtact

SEQ ID NO: 12605 - DNA, 46 bp, Homo Sapiens
cgggcccataccccgaaaatgttggttatacccttcccgtactacc

SEQ ID NO: 12606 - DNA, 47 bp, Homo Sapiens
cgggcccataccccgaaaatgttggttatacccttcccgtactacca

SEQ ID NO: 12607 - DNA, 16 bp, Homo Sapiens
cgggctcacatcaccc

SEQ ID NO: 12608 - DNA, 17 bp, Homo Sapiens
cgggctcacatcacccc

SEQ ID NO: 12609 - DNA, 18 bp, Homo Sapiens
cgggctcacatcacccca

SEQ ID NO: 12610 - DNA, 20 bp, Homo Sapiens
cgggctcacatcaccccata

SEQ ID NO: 12611 - DNA, 21 bp, Homo Sapiens
cgggctcacatcaccccataa

SEQ ID NO: 12612 - DNA, 22 bp, Homo Sapiens
cgggctcacatcaccccataaa

SEQ ID NO: 12613 - DNA, 23 bp, Homo Sapiens
cgggctcacatcaccccataaac

SEQ ID NO: 12614 - DNA, 24 bp, Homo Sapiens
cgggctcacatcaccccataaaca

SEQ ID NO: 12615 - DNA, 25 bp, Homo Sapiens
cgggctcacatcaccccataaacac

SEQ ID NO: 12616 - DNA, 26 bp, Homo Sapiens
cgggctcacatcaccccataaacacc

SEQ ID NO: 12617 - DNA, 27 bp, Homo Sapiens
cgggctcacatcaccccataaacacca

SEQ ID NO: 12618 - DNA, 23 bp, Homo Sapiens
cggggatgtagctcagtggtaga

SEQ ID NO: 12619 - DNA, 16 bp, Homo Sapiens
cgggggcgtgggttcg

SEQ ID NO: 12620 - DNA, 25 bp, Homo Sapiens
cgggggcgtgggttcgaatcccacc

SEQ ID NO: 12621 - DNA, 29 bp, Homo Sapiens
cgggggcgtgggttcgaatcccaccgctg

SEQ ID NO: 12622 - DNA, 33 bp, Homo Sapiens
cgggggtatagctcagtggtagagcatttgact

SEQ ID NO: 12623 - DNA, 34 bp, Homo Sapiens
cgggggtatagctcagtggtagagcatttgactg

SEQ ID NO: 12624 - DNA, 35 bp, Homo Sapiens
cgggggtatagctcagtggtagagcatttgactgc

SEQ ID NO: 12625 - DNA, 35 bp, Homo Sapiens
cgggggtgtagctcagtggtagagcatttgactgc

SEQ ID NO: 12626 - DNA, 26 bp, Homo Sapiens
cggggttcaattccccgacggggagc

SEQ ID NO: 12627 - DNA, 27 bp, Homo Sapiens
cggggttcaattccccgacggggagcc

SEQ ID NO: 12628 - DNA, 19 bp, Homo Sapiens
cggggttcgattccccgac

SEQ ID NO: 12629 - DNA, 22 bp, Homo Sapiens
cggggttcgattccccgacggg

SEQ ID NO: 12630 - DNA, 25 bp, Homo Sapiens
cggggttcgattccccgacggggag

SEQ ID NO: 12631 - DNA, 26 bp, Homo Sapiens
cggggttcgattccccgacggggagc

SEQ ID NO: 12632 - DNA, 27 bp, Homo Sapiens
cggggttcgattccccgacggggagcc

SEQ ID NO: 12633 - DNA, 28 bp, Homo Sapiens
cggggttcgattccccgacggggagcca

SEQ ID NO: 12634 - DNA, 16 bp, Homo Sapiens
cgggtgcgagaggtcc

SEQ ID NO: 12635 - DNA, 17 bp, Homo Sapiens
cgggtgcgagaggtccc

SEQ ID NO: 12636 - DNA, 18 bp, Homo Sapiens
cgggtgcgagaggtcccg

SEQ ID NO: 12637 - DNA, 22 bp, Homo Sapiens
cgggtgtgagaggtcccgggtt

SEQ ID NO: 12638 - DNA, 17 bp, Homo Sapiens
cgggttcaaatcccgga

SEQ ID NO: 12639 - DNA, 18 bp, Homo Sapiens
cgggttcaaatcccggac

SEQ ID NO: 12640 - DNA, 19 bp, Homo Sapiens
cgggttcaaatcccggacg

SEQ ID NO: 12641 - DNA, 20 bp, Homo Sapiens
cgggttcaaatcccggacga

SEQ ID NO: 12642 - DNA, 21 bp, Homo Sapiens
cgggttcaaatcccggacgag

SEQ ID NO: 12643 - DNA, 22 bp, Homo Sapiens
cgggttcaaatcccggacgagc

SEQ ID NO: 12644 - DNA, 23 bp, Homo Sapiens
cgggttcaaatcccggacgagcc

SEQ ID NO: 12645 - DNA, 24 bp, Homo Sapiens
cgggttcaaatcccggacgagccc

SEQ ID NO: 12646 - DNA, 25 bp, Homo Sapiens
cgggttcaaatcccggacgagcccc

SEQ ID NO: 12647 - DNA, 26 bp, Homo Sapiens
cgggttcaaatcccggacgagccccc

SEQ ID NO: 12648 - DNA, 17 bp, Homo Sapiens
cgggttcaatccccggc

SEQ ID NO: 12649 - DNA, 22 bp, Homo Sapiens
cgggttcgaaccccgtacgggc

SEQ ID NO: 12650 - DNA, 23 bp, Homo Sapiens
cgggttcgaaccccgtacgggcc

SEQ ID NO: 12651 - DNA, 25 bp, Homo Sapiens
cgggttcgaaccccgtacgggccac

SEQ ID NO: 12652 - DNA, 26 bp, Homo Sapiens
cgggttcgaaccccgtacgggccacc

SEQ ID NO: 12653 - DNA, 22 bp, Homo Sapiens
cgggttcgaaccccgtccgtgc

SEQ ID NO: 12654 - DNA, 23 bp, Homo Sapiens
cgggttcgaaccccgtccgtgcc

SEQ ID NO: 12655 - DNA, 24 bp, Homo Sapiens
cgggttcgaaccccgtccgtgcct

SEQ ID NO: 12656 - DNA, 25 bp, Homo Sapiens
cgggttcgaaccccgtccgtgcctc

SEQ ID NO: 12657 - DNA, 26 bp, Homo Sapiens
cgggttcgaaccccgtccgtgcctcc

SEQ ID NO: 12658 - DNA, 23 bp, Homo Sapiens
cgggttcgactcccggtatggga

SEQ ID NO: 12659 - DNA, 24 bp, Homo Sapiens
cgggttcgactcccggtatgggaa

SEQ ID NO: 12660 - DNA, 25 bp, Homo Sapiens
cgggttcgactcccggtatgggaac

SEQ ID NO: 12661 - DNA, 26 bp, Homo Sapiens
cgggttcgactcccggtatgggaacc

SEQ ID NO: 12662 - DNA, 27 bp, Homo Sapiens
cgggttcgactcccggtatgggaacca

SEQ ID NO: 12663 - DNA, 18 bp, Homo Sapiens
cgggttcgactcccggtg

SEQ ID NO: 12664 - DNA, 19 bp, Homo Sapiens
cgggttcgactcccggtgt

SEQ ID NO: 12665 - DNA, 21 bp, Homo Sapiens
cgggttcgactcccggtgtgg

SEQ ID NO: 12666 - DNA, 22 bp, Homo Sapiens
cgggttcgactcccggtgtggg

SEQ ID NO: 12667 - DNA, 23 bp, Homo Sapiens
cgggttcgactcccggtgtggga

SEQ ID NO: 12668 - DNA, 24 bp, Homo Sapiens
cgggttcgactcccggtgtgggaa

SEQ ID NO: 12669 - DNA, 25 bp, Homo Sapiens
cgggttcgactcccggtgtgggaac

SEQ ID NO: 12670 - DNA, 26 bp, Homo Sapiens
cgggttcgactcccggtgtgggaacc

SEQ ID NO: 12671 - DNA, 27 bp, Homo Sapiens
cgggttcgactcccggtgtgggaacca

SEQ ID NO: 12672 - DNA, 26 bp, Homo Sapiens
cgggttcgagtcccggcggagtcgcc

SEQ ID NO: 12673 - DNA, 24 bp, Homo Sapiens
cgggttcgatccccagcatctcca

SEQ ID NO: 12674 - DNA, 17 bp, Homo Sapiens
cgggttcgatccccggc

SEQ ID NO: 12675 - DNA, 20 bp, Homo Sapiens
cgggttcgatccccggcatc

SEQ ID NO: 12676 - DNA, 22 bp, Homo Sapiens
cgggttcgatccccggcatctc

SEQ ID NO: 12677 - DNA, 23 bp, Homo Sapiens
cgggttcgatccccggcatctcc

SEQ ID NO: 12678 - DNA, 25 bp, Homo Sapiens
cgggttcgatccccggcatctccac

SEQ ID NO: 12679 - DNA, 26 bp, Homo Sapiens
cgggttcgatccccggcatctccacc

SEQ ID NO: 12680 - DNA, 27 bp, Homo Sapiens
cgggttcgatccccggcatctccacca

SEQ ID NO: 12681 - DNA, 22 bp, Homo Sapiens
cgggttcgatccccgtacgggc

SEQ ID NO: 12682 - DNA, 23 bp, Homo Sapiens
cgggttcgatccccgtacgggcc

SEQ ID NO: 12683 - DNA, 24 bp, Homo Sapiens
cgggttcgatccccgtacgggcca

SEQ ID NO: 12684 - DNA, 25 bp, Homo Sapiens
cgggttcgatccccgtacgggccac

SEQ ID NO: 12685 - DNA, 26 bp, Homo Sapiens
cgggttcgatccccgtacgggccacc

SEQ ID NO: 12686 - DNA, 27 bp, Homo Sapiens
cgggttcgatccccgtacgggccacca

SEQ ID NO: 12687 - DNA, 25 bp, Homo Sapiens
cgggttcgattcccggccaacgcac

SEQ ID NO: 12688 - DNA, 18 bp, Homo Sapiens
cgggttcgattcccgggc

SEQ ID NO: 12689 - DNA, 21 bp, Homo Sapiens
cgggttcgattcccgggcggc

SEQ ID NO: 12690 - DNA, 22 bp, Homo Sapiens
cgggttcgattcccgggcggcg

SEQ ID NO: 12691 - DNA, 23 bp, Homo Sapiens
cgggttcgattcccgggcggcgc

SEQ ID NO: 12692 - DNA, 24 bp, Homo Sapiens
cgggttcgattcccgggcggcgca

SEQ ID NO: 12693 - DNA, 25 bp, Homo Sapiens
cgggttcgattcccgggcggcgcac

SEQ ID NO: 12694 - DNA, 27 bp, Homo Sapiens
cgggttcgattcccgggcggcgcacca

SEQ ID NO: 12695 - DNA, 21 bp, Homo Sapiens
cgggttcgattcccggtcagg

SEQ ID NO: 12696 - DNA, 22 bp, Homo Sapiens
cgggttcgattcccggtcaggg

SEQ ID NO: 12697 - DNA, 23 bp, Homo Sapiens
cgggttcgattcccggtcaggga

SEQ ID NO: 12698 - DNA, 24 bp, Homo Sapiens
cgggttcgattcccggtcagggaa

SEQ ID NO: 12699 - DNA, 25 bp, Homo Sapiens
cgggttcgattcccggtcagggaac

SEQ ID NO: 12700 - DNA, 26 bp, Homo Sapiens
cgggttcgattcccggtcagggaacc

SEQ ID NO: 12701 - DNA, 27 bp, Homo Sapiens
cgggttcgattcccggtcagggaacca

SEQ ID NO: 12702 - DNA, 33 bp, Homo Sapiens
cggtaaaatggctgagtgaagcattggactgta

SEQ ID NO: 12703 - DNA, 16 bp, Homo Sapiens
cggtaatcgcataaaa

SEQ ID NO: 12704 - DNA, 17 bp, Homo Sapiens
cggtaatcgcataaaac

SEQ ID NO: 12705 - DNA, 18 bp, Homo Sapiens
cggtaatcgcataaaact

SEQ ID NO: 12706 - DNA, 19 bp, Homo Sapiens
cggtaatcgcataaaactt

SEQ ID NO: 12707 - DNA, 20 bp, Homo Sapiens
cggtaatcgcataaaactta

SEQ ID NO: 12708 - DNA, 21 bp, Homo Sapiens
cggtaatcgcataaaacttaa

SEQ ID NO: 12709 - DNA, 22 bp, Homo Sapiens
cggtaatcgcataaaacttaaa

SEQ ID NO: 12710 - DNA, 23 bp, Homo Sapiens
cggtaatcgcataaaacttaaaa

SEQ ID NO: 12711 - DNA, 24 bp, Homo Sapiens
cggtaatcgcataaaacttaaaac

SEQ ID NO: 12712 - DNA, 25 bp, Homo Sapiens
cggtaatcgcataaaacttaaaact

SEQ ID NO: 12713 - DNA, 26 bp, Homo Sapiens
cggtaatcgcataaaacttaaaactt

SEQ ID NO: 12714 - DNA, 27 bp, Homo Sapiens
cggtaatcgcataaaacttaaaacttt

SEQ ID NO: 12715 - DNA, 28 bp, Homo Sapiens
cggtaatcgcataaaacttaaaacttta

SEQ ID NO: 12716 - DNA, 29 bp, Homo Sapiens
cggtaatcgcataaaacttaaaactttac

SEQ ID NO: 12717 - DNA, 30 bp, Homo Sapiens
cggtaatcgcataaaacttaaaactttaca

SEQ ID NO: 12718 - DNA, 31 bp, Homo Sapiens
cggtaatcgcataaaacttaaaactttacag

SEQ ID NO: 12719 - DNA, 32 bp, Homo Sapiens
cggtaatcgcataaaacttaaaactttacagt

SEQ ID NO: 12720 - DNA, 33 bp, Homo Sapiens
cggtaatcgcataaaacttaaaactttacagtc

SEQ ID NO: 12721 - DNA, 34 bp, Homo Sapiens
cggtaatcgcataaaacttaaaactttacagtca

SEQ ID NO: 12722 - DNA, 35 bp, Homo Sapiens
cggtaatcgcataaaacttaaaactttacagtcag

SEQ ID NO: 12723 - DNA, 36 bp, Homo Sapiens
cggtaatcgcataaaacttaaaactttacagtcaga

SEQ ID NO: 12724 - DNA, 37 bp, Homo Sapiens
cggtaatcgcataaaacttaaaactttacagtcagag

SEQ ID NO: 12725 - DNA, 38 bp, Homo Sapiens
cggtaatcgcataaaacttaaaactttacagtcagagg

SEQ ID NO: 12726 - DNA, 39 bp, Homo Sapiens
cggtaatcgcataaaacttaaaactttacagtcagaggt

SEQ ID NO: 12727 - DNA, 40 bp, Homo Sapiens
cggtaatcgcataaaacttaaaactttacagtcagaggtt

SEQ ID NO: 12728 - DNA, 41 bp, Homo Sapiens
cggtaatcgcataaaacttaaaactttacagtcagaggttc

SEQ ID NO: 12729 - DNA, 42 bp, Homo Sapiens
cggtaatcgcataaaacttaaaactttacagtcagaggttca

SEQ ID NO: 12730 - DNA, 16 bp, Homo Sapiens
cggtagagcatcagac

SEQ ID NO: 12731 - DNA, 17 bp, Homo Sapiens
cggtagagcatcagact

SEQ ID NO: 12732 - DNA, 18 bp, Homo Sapiens
cggtagagcatcagactt

SEQ ID NO: 12733 - DNA, 19 bp, Homo Sapiens
cggtagagcatcagacttt

SEQ ID NO: 12734 - DNA, 20 bp, Homo Sapiens
cggtagagcatcagactttt

SEQ ID NO: 12735 - DNA, 24 bp, Homo Sapiens
cggtagagcatcagacttttaatc

SEQ ID NO: 12736 - DNA, 16 bp, Homo Sapiens
cggtagagcatgagac

SEQ ID NO: 12737 - DNA, 17 bp, Homo Sapiens
cggtagagcatgagacc

SEQ ID NO: 12738 - DNA, 18 bp, Homo Sapiens
cggtagagcatgagaccc

SEQ ID NO: 12739 - DNA, 22 bp, Homo Sapiens
cggtagagcatgagacccttaa

SEQ ID NO: 12740 - DNA, 24 bp, Homo Sapiens
cggtagagcatgagacccttaatc

SEQ ID NO: 12741 - DNA, 25 bp, Homo Sapiens
cggtagagcatgagacccttaatct

SEQ ID NO: 12742 - DNA, 17 bp, Homo Sapiens
cggtagagcatgagact

SEQ ID NO: 12743 - DNA, 18 bp, Homo Sapiens
cggtagagcatgagactc

SEQ ID NO: 12744 - DNA, 19 bp, Homo Sapiens
cggtagagcatgagactct

SEQ ID NO: 12745 - DNA, 20 bp, Homo Sapiens
cggtagagcatgagactctt

SEQ ID NO: 12746 - DNA, 22 bp, Homo Sapiens
cggtagagcatgagactcttaa

SEQ ID NO: 12747 - DNA, 24 bp, Homo Sapiens
cggtagagcatgagactcttaatc

SEQ ID NO: 12748 - DNA, 25 bp, Homo Sapiens
cggtagagcatgagactcttaatct

SEQ ID NO: 12749 - DNA, 26 bp, Homo Sapiens
cggtagagcatgagactcttaatctc

SEQ ID NO: 12750 - DNA, 35 bp, Homo Sapiens
cggtagagcatgagactcttaatctcagggtcgtg

SEQ ID NO: 12751 - DNA, 36 bp, Homo Sapiens
cggtagagcatgagactcttaatctcagggtcgtgg

SEQ ID NO: 12752 - DNA, 38 bp, Homo Sapiens
cggtagagcatgagactcttaatctcagggtcgtgggt

SEQ ID NO: 12753 - DNA, 39 bp, Homo Sapiens
cggtagagcatgagactcttaatctcagggtcgtgggtt

SEQ ID NO: 12754 - DNA, 40 bp, Homo Sapiens
cggtagagcatgagactcttaatctcagggtcgtgggttc

SEQ ID NO: 12755 - DNA, 16 bp, Homo Sapiens
cggtagagcatgggac

SEQ ID NO: 12756 - DNA, 17 bp, Homo Sapiens
cggtagagcatgggact

SEQ ID NO: 12757 - DNA, 18 bp, Homo Sapiens
cggtagagcatgggactc

SEQ ID NO: 12758 - DNA, 19 bp, Homo Sapiens
cggtagagcatgggactct

SEQ ID NO: 12759 - DNA, 20 bp, Homo Sapiens
cggtagagcatgggactctt

SEQ ID NO: 12760 - DNA, 22 bp, Homo Sapiens
cggtagagcatgggactcttaa

SEQ ID NO: 12761 - DNA, 24 bp, Homo Sapiens
cggtagagcatgggactcttaatc

SEQ ID NO: 12762 - DNA, 25 bp, Homo Sapiens
cggtagagcatgggactcttaatcc

SEQ ID NO: 12763 - DNA, 26 bp, Homo Sapiens
cggtagagcatgggactcttaatccc

SEQ ID NO: 12764 - DNA, 34 bp, Homo Sapiens
cggtagagcatgggactcttaatcccagggtcgt

SEQ ID NO: 12765 - DNA, 35 bp, Homo Sapiens
cggtagagcatgggactcttaatcccagggtcgtg

SEQ ID NO: 12766 - DNA, 36 bp, Homo Sapiens
cggtagagcatgggactcttaatcccagggtcgtgg

SEQ ID NO: 12767 - DNA, 39 bp, Homo Sapiens
cggtagagcatgggactcttaatcccagggtcgtgggtt

SEQ ID NO: 12768 - DNA, 40 bp, Homo Sapiens
cggtagagcatgggactcttaatcccagggtcgtgggttc

SEQ ID NO: 12769 - DNA, 46 bp, Homo Sapiens
cggtagagcatgggactcttaatcccagggtcgtgggttcgagccc

SEQ ID NO: 12770 - DNA, 26 bp, Homo Sapiens
cggtagagcatgggactcttaatctc

SEQ ID NO: 12771 - DNA, 17 bp, Homo Sapiens
cggtagagcatttgact

SEQ ID NO: 12772 - DNA, 19 bp, Homo Sapiens
cggtagagcatttgactgc

SEQ ID NO: 12773 - DNA, 17 bp, Homo Sapiens
cggtagcgcgtctgact

SEQ ID NO: 12774 - DNA, 30 bp, Homo Sapiens
cggtcccatggtgtaatggttagcactctg

SEQ ID NO: 12775 - DNA, 16 bp, Homo Sapiens
cggtctaaggcgctgc

SEQ ID NO: 12776 - DNA, 17 bp, Homo Sapiens
cggtctaaggcgctgcg

SEQ ID NO: 12777 - DNA, 19 bp, Homo Sapiens
cggtctaaggcgctgcgtt

SEQ ID NO: 12778 - DNA, 20 bp, Homo Sapiens
cggtctaaggcgctgcgttc

SEQ ID NO: 12779 - DNA, 17 bp, Homo Sapiens
cggtctaaggcgctgga

SEQ ID NO: 12780 - DNA, 32 bp, Homo Sapiens
cggtggcctaatggataaggcattggcctcct

SEQ ID NO: 12781 - DNA, 17 bp, Homo Sapiens
cggttagcgccttcggc

SEQ ID NO: 12782 - DNA, 17 bp, Homo Sapiens
cggttagcgcgcggtac

SEQ ID NO: 12783 - DNA, 18 bp, Homo Sapiens
cggttagcgcgcggtact

SEQ ID NO: 12784 - DNA, 20 bp, Homo Sapiens
cggttagcgcgcggtactta

SEQ ID NO: 12785 - DNA, 24 bp, Homo Sapiens
cggttagcgcgttcggctgttaac

SEQ ID NO: 12786 - DNA, 25 bp, Homo Sapiens
cggttagcgcgttcggctgttaacc

SEQ ID NO: 12787 - DNA, 17 bp, Homo Sapiens
cggttagctcagtcggc

SEQ ID NO: 12788 - DNA, 23 bp, Homo Sapiens
cggttagctcagtcggctagagc

SEQ ID NO: 12789 - DNA, 16 bp, Homo Sapiens
cggttagctcagttgg

SEQ ID NO: 12790 - DNA, 21 bp, Homo Sapiens
cggttagctcagttggttaga

SEQ ID NO: 12791 - DNA, 23 bp, Homo Sapiens
cggttagctcagttggttagagc

SEQ ID NO: 12792 - DNA, 31 bp, Homo Sapiens
cggttagctcagttggttagagcgtggtgct

SEQ ID NO: 12793 - DNA, 16 bp, Homo Sapiens
cggttaggattcctgg

SEQ ID NO: 12794 - DNA, 17 bp, Homo Sapiens
cggttaggattcctggt

SEQ ID NO: 12795 - DNA, 18 bp, Homo Sapiens
cggttaggattcctggtt

SEQ ID NO: 12796 - DNA, 19 bp, Homo Sapiens
cggttaggattcctggttt

SEQ ID NO: 12797 - DNA, 20 bp, Homo Sapiens
cggttaggattcctggtttt

SEQ ID NO: 12798 - DNA, 21 bp, Homo Sapiens
cggttaggattcctggttttc

SEQ ID NO: 12799 - DNA, 22 bp, Homo Sapiens
cggttaggattcctggttttca

SEQ ID NO: 12800 - DNA, 23 bp, Homo Sapiens
cggttaggattcctggttttcac

SEQ ID NO: 12801 - DNA, 27 bp, Homo Sapiens
cggttaggattcctggttttcacccag

SEQ ID NO: 12802 - DNA, 28 bp, Homo Sapiens
cggttaggattcctggttttcacccagg

SEQ ID NO: 12803 - DNA, 29 bp, Homo Sapiens
cggttaggattcctggttttcacccaggc

SEQ ID NO: 12804 - DNA, 34 bp, Homo Sapiens
cggttaggattcctggttttcacccaggcggccc

SEQ ID NO: 12805 - DNA, 30 bp, Homo Sapiens
cggttaggattcctggttttcacccaggtg

SEQ ID NO: 12806 - DNA, 34 bp, Homo Sapiens
cggttaggattcctggttttcacccaggtggccc

SEQ ID NO: 12807 - DNA, 17 bp, Homo Sapiens
cggttatcacattcgcc

SEQ ID NO: 12808 - DNA, 21 bp, Homo Sapiens
cggttatcacattcgcctcac

SEQ ID NO: 12809 - DNA, 22 bp, Homo Sapiens
cggttatcacattcgcctcaca

SEQ ID NO: 12810 - DNA, 23 bp, Homo Sapiens
cggttatcacattcgcctcacac

SEQ ID NO: 12811 - DNA, 16 bp, Homo Sapiens
cggttatcacgtctgc

SEQ ID NO: 12812 - DNA, 17 bp, Homo Sapiens
cggttatcacgtctgct

SEQ ID NO: 12813 - DNA, 18 bp, Homo Sapiens
cggttatcacgtctgctt

SEQ ID NO: 12814 - DNA, 19 bp, Homo Sapiens
cggttatcacgtctgcttt

SEQ ID NO: 12815 - DNA, 21 bp, Homo Sapiens
cggttatcacgtctgctttac

SEQ ID NO: 12816 - DNA, 23 bp, Homo Sapiens
cggttatcacgtctgctttacac

SEQ ID NO: 12817 - DNA, 24 bp, Homo Sapiens
cggttatcacgtctgctttacacg

SEQ ID NO: 12818 - DNA, 25 bp, Homo Sapiens
cggttatcacgtctgctttacacgc

SEQ ID NO: 12819 - DNA, 19 bp, Homo Sapiens
cggttcaaatccgggtgcc

SEQ ID NO: 12820 - DNA, 20 bp, Homo Sapiens
cggttcaaatccgggtgccc

SEQ ID NO: 12821 - DNA, 33 bp, Homo Sapiens
cggttccatagtgtagtggttatcacgtctgct

SEQ ID NO: 12822 - DNA, 34 bp, Homo Sapiens
cggttccatagtgtagtggttatcacgtctgctt

SEQ ID NO: 12823 - DNA, 35 bp, Homo Sapiens
cggttccatagtgtagtggttatcacgtctgcttt

SEQ ID NO: 12824 - DNA, 34 bp, Homo Sapiens
cggttccatggtgtaatggttagcactctggact

SEQ ID NO: 12825 - DNA, 41 bp, Homo Sapiens
cggttccatggtgtaatggttagcactctggactctgaatc

SEQ ID NO: 12826 - DNA, 16 bp, Homo Sapiens
cggttcgaaaccgggc

SEQ ID NO: 12827 - DNA, 17 bp, Homo Sapiens
cggttcgaaaccgggcg

SEQ ID NO: 12828 - DNA, 19 bp, Homo Sapiens
cggttcgaaaccgggcgga

SEQ ID NO: 12829 - DNA, 20 bp, Homo Sapiens
cggttcgaaaccgggcggaa

SEQ ID NO: 12830 - DNA, 21 bp, Homo Sapiens
cggttcgaaaccgggcggaaa

SEQ ID NO: 12831 - DNA, 22 bp, Homo Sapiens
cggttcgaaaccgggcggaaac

SEQ ID NO: 12832 - DNA, 23 bp, Homo Sapiens
cggttcgaaaccgggcggaaaca

SEQ ID NO: 12833 - DNA, 25 bp, Homo Sapiens
cggttcgaaaccgggcggaaacacc

SEQ ID NO: 12834 - DNA, 20 bp, Homo Sapiens
cggttcgaatccgagtcacg

SEQ ID NO: 12835 - DNA, 22 bp, Homo Sapiens
cggttcgaatccgagtcacggc

SEQ ID NO: 12836 - DNA, 23 bp, Homo Sapiens
cggttcgaatccgagtcacggca

SEQ ID NO: 12837 - DNA, 24 bp, Homo Sapiens
cggttcgaatccgagtcacggcac

SEQ ID NO: 12838 - DNA, 25 bp, Homo Sapiens
cggttcgaatccgagtcacggcacc

SEQ ID NO: 12839 - DNA, 20 bp, Homo Sapiens
cggttcgatcccgggcggaa

SEQ ID NO: 12840 - DNA, 21 bp, Homo Sapiens
cggtttgggtccgagaggtcc

SEQ ID NO: 12841 - DNA, 21 bp, Homo Sapiens
cgtaaaccgaagatcacgggt

SEQ ID NO: 12842 - DNA, 40 bp, Homo Sapiens
cgtaaaccgaagatcacgggttcgaaccccgtccgtgcct

SEQ ID NO: 12843 - DNA, 42 bp, Homo Sapiens
cgtaaaccgaagatcacgggttcgaaccccgtccgtgcctcc

SEQ ID NO: 12844 - DNA, 21 bp, Homo Sapiens
cgtaaaccgaagatcgcgggt

SEQ ID NO: 12845 - DNA, 22 bp, Homo Sapiens
cgtaaaccgaagatcgcgggtt

SEQ ID NO: 12846 - DNA, 41 bp, Homo Sapiens
cgtaaaccgaagatcgcgggttcgaaccccgtccgtgcctc

SEQ ID NO: 12847 - DNA, 16 bp, Homo Sapiens
cgtagtcgtggccgag

SEQ ID NO: 12848 - DNA, 17 bp, Homo Sapiens
cgtagtcgtggccgagt

SEQ ID NO: 12849 - DNA, 18 bp, Homo Sapiens
cgtagtcgtggccgagtg

SEQ ID NO: 12850 - DNA, 19 bp, Homo Sapiens
cgtagtcgtggccgagtgg

SEQ ID NO: 12851 - DNA, 21 bp, Homo Sapiens
cgtagtcgtggccgagtggtt

SEQ ID NO: 12852 - DNA, 22 bp, Homo Sapiens
cgtagtcgtggccgagtggtta

SEQ ID NO: 12853 - DNA, 23 bp, Homo Sapiens
cgtagtcgtggccgagtggttaa

SEQ ID NO: 12854 - DNA, 24 bp, Homo Sapiens
cgtagtcgtggccgagtggttaag

SEQ ID NO: 12855 - DNA, 18 bp, Homo Sapiens
cgtagtgtagcggttatc

SEQ ID NO: 12856 - DNA, 20 bp, Homo Sapiens
cgtagtgtagcggttatcac

SEQ ID NO: 12857 - DNA, 21 bp, Homo Sapiens
cgtagtgtagcggttatcaca

SEQ ID NO: 12858 - DNA, 23 bp, Homo Sapiens
cgtagtgtagcggttatcacatt

SEQ ID NO: 12859 - DNA, 24 bp, Homo Sapiens
cgtagtgtagcggttatcacattc

SEQ ID NO: 12860 - DNA, 16 bp, Homo Sapiens
cgtagtgtagtggtca

SEQ ID NO: 12861 - DNA, 17 bp, Homo Sapiens
cgtagtgtagtggtcat

SEQ ID NO: 12862 - DNA, 18 bp, Homo Sapiens
cgtagtgtagtggtcatc

SEQ ID NO: 12863 - DNA, 19 bp, Homo Sapiens
cgtagtgtagtggtcatca

SEQ ID NO: 12864 - DNA, 27 bp, Homo Sapiens
cgtagtgtagtggtcatcacgttcgcc

SEQ ID NO: 12865 - DNA, 28 bp, Homo Sapiens
cgtagtgtagtggtcatcacgttcgcct

SEQ ID NO: 12866 - DNA, 17 bp, Homo Sapiens
cgtagtgtagtggttat

SEQ ID NO: 12867 - DNA, 18 bp, Homo Sapiens
cgtagtgtagtggttatc

SEQ ID NO: 12868 - DNA, 19 bp, Homo Sapiens
cgtagtgtagtggttatca

SEQ ID NO: 12869 - DNA, 20 bp, Homo Sapiens
cgtagtgtagtggttatcac

SEQ ID NO: 12870 - DNA, 21 bp, Homo Sapiens
cgtagtgtagtggttatcacg

SEQ ID NO: 12871 - DNA, 26 bp, Homo Sapiens
cgtagtgtagtggttatcacgttcgc

SEQ ID NO: 12872 - DNA, 27 bp, Homo Sapiens
cgtagtgtagtggttatcacgttcgcc

SEQ ID NO: 12873 - DNA, 28 bp, Homo Sapiens
cgtagtgtagtggttatcacgttcgcct

SEQ ID NO: 12874 - DNA, 29 bp, Homo Sapiens
cgtagtgtagtggttatcacgttcgcctc

SEQ ID NO: 12875 - DNA, 30 bp, Homo Sapiens
cgtagtgtagtggttatcacgttcgcctca

SEQ ID NO: 12876 - DNA, 31 bp, Homo Sapiens
cgtagtgtagtggttatcacgttcgcctcac

SEQ ID NO: 12877 - DNA, 16 bp, Homo Sapiens
cgtatagtggttagta

SEQ ID NO: 12878 - DNA, 17 bp, Homo Sapiens
cgtatagtggttagtac

SEQ ID NO: 12879 - DNA, 18 bp, Homo Sapiens
cgtatagtggttagtact

SEQ ID NO: 12880 - DNA, 19 bp, Homo Sapiens
cgtatagtggttagtactc

SEQ ID NO: 12881 - DNA, 20 bp, Homo Sapiens
cgtatagtggttagtactct

SEQ ID NO: 12882 - DNA, 21 bp, Homo Sapiens
cgtatagtggttagtactctg

SEQ ID NO: 12883 - DNA, 22 bp, Homo Sapiens
cgtatagtggttagtactctgc

SEQ ID NO: 12884 - DNA, 23 bp, Homo Sapiens
cgtatagtggttagtactctgcg

SEQ ID NO: 12885 - DNA, 24 bp, Homo Sapiens
cgtatagtggttagtactctgcgt

SEQ ID NO: 12886 - DNA, 25 bp, Homo Sapiens
cgtatagtggttagtactctgcgtt

SEQ ID NO: 12887 - DNA, 26 bp, Homo Sapiens
cgtatagtggttagtactctgcgttg

SEQ ID NO: 12888 - DNA, 27 bp, Homo Sapiens
cgtatagtggttagtactctgcgttgt

SEQ ID NO: 12889 - DNA, 28 bp, Homo Sapiens
cgtatagtggttagtactctgcgttgtg

SEQ ID NO: 12890 - DNA, 31 bp, Homo Sapiens
cgtatagtggttagtactctgcgttgtggcc

SEQ ID NO: 12891 - DNA, 33 bp, Homo Sapiens
cgtatagtggttagtactctgcgttgtggccgc

SEQ ID NO: 12892 - DNA, 40 bp, Homo Sapiens
cgtatagtggttagtactctgcgttgtggccgcagcaacc

SEQ ID NO: 12893 - DNA, 41 bp, Homo Sapiens
cgtatagtggttagtactctgcgttgtggccgcagcaacct

SEQ ID NO: 12894 - DNA, 45 bp, Homo Sapiens
cgtatagtggttagtactctgcgttgtggccgcagcaacctcggt

SEQ ID NO: 12895 - DNA, 16 bp, Homo Sapiens
cgtatgaggccccggg

SEQ ID NO: 12896 - DNA, 17 bp, Homo Sapiens
cgtatgaggccccgggt

SEQ ID NO: 12897 - DNA, 18 bp, Homo Sapiens
cgtatgaggccccgggtt

SEQ ID NO: 12898 - DNA, 25 bp, Homo Sapiens
cgtatgaggccccgggttcaatccc

SEQ ID NO: 12899 - DNA, 29 bp, Homo Sapiens
cgtatgaggccccgggttcaatccccggc

SEQ ID NO: 12900 - DNA, 30 bp, Homo Sapiens
cgtatgaggccccgggttcaatccccggca

SEQ ID NO: 12901 - DNA, 34 bp, Homo Sapiens
cgtatgaggccccgggttcaatccccggcatctc

SEQ ID NO: 12902 - DNA, 36 bp, Homo Sapiens
cgtatgaggccccgggttcaatccccggcatctcca

SEQ ID NO: 12903 - DNA, 37 bp, Homo Sapiens
cgtatgaggccccgggttcaatccccggcatctccac

SEQ ID NO: 12904 - DNA, 38 bp, Homo Sapiens
cgtatgaggccccgggttcaatccccggcatctccacc

SEQ ID NO: 12905 - DNA, 17 bp, Homo Sapiens
cgtcaggatggccgagc

SEQ ID NO: 12906 - DNA, 18 bp, Homo Sapiens
cgtcaggatggccgagtg

SEQ ID NO: 12907 - DNA, 28 bp, Homo Sapiens
cgtcagtctcataatctgaaggtcgtga

SEQ ID NO: 12908 - DNA, 21 bp, Homo Sapiens
cgtctctgtggcgcaatggac

SEQ ID NO: 12909 - DNA, 18 bp, Homo Sapiens
cgtctgattccggatcag

SEQ ID NO: 12910 - DNA, 17 bp, Homo Sapiens
cgtgagttcgagcctca

SEQ ID NO: 12911 - DNA, 26 bp, Homo Sapiens
cgtgagttcgagcctcacacggggca

SEQ ID NO: 12912 - DNA, 27 bp, Homo Sapiens
cgtgagttcgagcctcacacggggcac

SEQ ID NO: 12913 - DNA, 29 bp, Homo Sapiens
cgtgagttcgagcctcacacggggcacca

SEQ ID NO: 12914 - DNA, 25 bp, Homo Sapiens
cgtgagttcgatcctcacacggggc

SEQ ID NO: 12915 - DNA, 26 bp, Homo Sapiens
cgtgagttcgatcctcacacggggca

SEQ ID NO: 12916 - DNA, 16 bp, Homo Sapiens
cgtgatcgtatagtgg

SEQ ID NO: 12917 - DNA, 19 bp, Homo Sapiens
cgtgatcgtatagtggtta

SEQ ID NO: 12918 - DNA, 20 bp, Homo Sapiens
cgtgatcgtatagtggttag

SEQ ID NO: 12919 - DNA, 21 bp, Homo Sapiens
cgtgatcgtatagtggttagt

SEQ ID NO: 12920 - DNA, 22 bp, Homo Sapiens
cgtgatcgtatagtggttagta

SEQ ID NO: 12921 - DNA, 23 bp, Homo Sapiens
cgtgatcgtatagtggttagtac

SEQ ID NO: 12922 - DNA, 24 bp, Homo Sapiens
cgtgatcgtatagtggttagtact

SEQ ID NO: 12923 - DNA, 25 bp, Homo Sapiens
cgtgatcgtatagtggttagtactc

SEQ ID NO: 12924 - DNA, 26 bp, Homo Sapiens
cgtgatcgtatagtggttagtactct

SEQ ID NO: 12925 - DNA, 27 bp, Homo Sapiens
cgtgatcgtatagtggttagtactctg

SEQ ID NO: 12926 - DNA, 28 bp, Homo Sapiens
cgtgatcgtatagtggttagtactctgc

SEQ ID NO: 12927 - DNA, 29 bp, Homo Sapiens
cgtgatcgtatagtggttagtactctgcg

SEQ ID NO: 12928 - DNA, 30 bp, Homo Sapiens
cgtgatcgtatagtggttagtactctgcgt

SEQ ID NO: 12929 - DNA, 31 bp, Homo Sapiens
cgtgatcgtatagtggttagtactctgcgtt

SEQ ID NO: 12930 - DNA, 32 bp, Homo Sapiens
cgtgatcgtatagtggttagtactctgcgttg

SEQ ID NO: 12931 - DNA, 33 bp, Homo Sapiens
cgtgatcgtatagtggttagtactctgcgttgt

SEQ ID NO: 12932 - DNA, 34 bp, Homo Sapiens
cgtgatcgtatagtggttagtactctgcgttgtg

SEQ ID NO: 12933 - DNA, 35 bp, Homo Sapiens
cgtgatcgtatagtggttagtactctgcgttgtgg

SEQ ID NO: 12934 - DNA, 36 bp, Homo Sapiens
cgtgatcgtatagtggttagtactctgcgttgtggc

SEQ ID NO: 12935 - DNA, 37 bp, Homo Sapiens
cgtgatcgtatagtggttagtactctgcgttgtggcc

SEQ ID NO: 12936 - DNA, 38 bp, Homo Sapiens
cgtgatcgtatagtggttagtactctgcgttgtggccg

SEQ ID NO: 12937 - DNA, 42 bp, Homo Sapiens
cgtgatcgtatagtggttagtactctgcgttgtggccgcagc

SEQ ID NO: 12938 - DNA, 46 bp, Homo Sapiens
cgtgatcgtatagtggttagtactctgcgttgtggccgcagcaacc

SEQ ID NO: 12939 - DNA, 47 bp, Homo Sapiens
cgtgatcgtatagtggttagtactctgcgttgtggccgcagcaacct

SEQ ID NO: 12940 - DNA, 19 bp, Homo Sapiens
cgtgctgggcccataaccc

SEQ ID NO: 12941 - DNA, 21 bp, Homo Sapiens
cgtgctgggcccataacccag

SEQ ID NO: 12942 - DNA, 22 bp, Homo Sapiens
cgtgctgggcccataacccaga

SEQ ID NO: 12943 - DNA, 27 bp, Homo Sapiens
cgtgctgggcccataacccagaggtcg

SEQ ID NO: 12944 - DNA, 28 bp, Homo Sapiens
cgtgctgggcccataacccagaggtcga

SEQ ID NO: 12945 - DNA, 29 bp, Homo Sapiens
cgtgctgggcccataacccagaggtcgat

SEQ ID NO: 12946 - DNA, 30 bp, Homo Sapiens
cgtgctgggcccataacccagaggtcgatg

SEQ ID NO: 12947 - DNA, 31 bp, Homo Sapiens
cgtgctgggcccataacccagaggtcgatgg

SEQ ID NO: 12948 - DNA, 32 bp, Homo Sapiens
cgtgctgggcccataacccagaggtcgatgga

SEQ ID NO: 12949 - DNA, 33 bp, Homo Sapiens
cgtgctgggcccataacccagaggtcgatggat

SEQ ID NO: 12950 - DNA, 34 bp, Homo Sapiens
cgtgctgggcccataacccagaggtcgatggatc

SEQ ID NO: 12951 - DNA, 35 bp, Homo Sapiens
cgtgctgggcccataacccagaggtcgatggatcg

SEQ ID NO: 12952 - DNA, 40 bp, Homo Sapiens
cgtgctgggcccataacccagaggtcgatggatcgaaacc

SEQ ID NO: 12953 - DNA, 16 bp, Homo Sapiens
cgtggccgagcggtct

SEQ ID NO: 12954 - DNA, 17 bp, Homo Sapiens
cgtggccgagcggtcta

SEQ ID NO: 12955 - DNA, 19 bp, Homo Sapiens
cgtggccgagcggtctaag

SEQ ID NO: 12956 - DNA, 27 bp, Homo Sapiens
cgtggccgagtggtctaaggcgctgga

SEQ ID NO: 12957 - DNA, 31 bp, Homo Sapiens
cgtggccgagtggtctaaggcgctggattta

SEQ ID NO: 12958 - DNA, 18 bp, Homo Sapiens
cgtggccgagtggttaag

SEQ ID NO: 12959 - DNA, 19 bp, Homo Sapiens
cgtggccgagtggttaagg

SEQ ID NO: 12960 - DNA, 18 bp, Homo Sapiens
cgtggcctaatggataag

SEQ ID NO: 12961 - DNA, 30 bp, Homo Sapiens
cgtggcctaatggataaggcgtctgattcc

SEQ ID NO: 12962 - DNA, 31 bp, Homo Sapiens
cgtggcctaatggataaggcgtctgattccg

SEQ ID NO: 12963 - DNA, 27 bp, Homo Sapiens
cgtggcgcaatggatagcgcattggac

SEQ ID NO: 12964 - DNA, 27 bp, Homo Sapiens
cgtgggttcgaaccccactcctggtac

SEQ ID NO: 12965 - DNA, 16 bp, Homo Sapiens
cgtgggttcgaatccc

SEQ ID NO: 12966 - DNA, 17 bp, Homo Sapiens
cgtgggttcgaatccca

SEQ ID NO: 12967 - DNA, 28 bp, Homo Sapiens
cgtgggttcgaatcccaccctcgtcgcc

SEQ ID NO: 12968 - DNA, 25 bp, Homo Sapiens
cgtgggttcgaatcccacttctgac

SEQ ID NO: 12969 - DNA, 25 bp, Homo Sapiens
cgtgggttcgaatcccatcctcgtc

SEQ ID NO: 12970 - DNA, 27 bp, Homo Sapiens
cgtgggttcgaatcccatcctcgtcgc

SEQ ID NO: 12971 - DNA, 28 bp, Homo Sapiens
cgtgggttcgaatcccatcctcgtcgcc

SEQ ID NO: 12972 - DNA, 29 bp, Homo Sapiens
cgtgggttcgaatcccatcctcgtcgcca

SEQ ID NO: 12973 - DNA, 24 bp, Homo Sapiens
cgtgggttcgagccccacgttggg

SEQ ID NO: 12974 - DNA, 25 bp, Homo Sapiens
cgtgggttcgagccccacgttgggc

SEQ ID NO: 12975 - DNA, 26 bp, Homo Sapiens
cgtgggttcgagccccacgttgggcg

SEQ ID NO: 12976 - DNA, 27 bp, Homo Sapiens
cgtgggttcgagccccacgttgggcgc

SEQ ID NO: 12977 - DNA, 28 bp, Homo Sapiens
cgtgggttcgagccccacgttgggcgcc

SEQ ID NO: 12978 - DNA, 29 bp, Homo Sapiens
cgtgggttcgagccccacgttgggcgcca

SEQ ID NO: 12979 - DNA, 31 bp, Homo Sapiens
cgtggtggtctagtggctaggattcggcgct

SEQ ID NO: 12980 - DNA, 34 bp, Homo Sapiens
cgtggtggtctagtggctaggattcggcgctttc

SEQ ID NO: 12981 - DNA, 16 bp, Homo Sapiens
cgtggttgtagtccgt

SEQ ID NO: 12982 - DNA, 17 bp, Homo Sapiens
cgtggttgtagtccgtg

SEQ ID NO: 12983 - DNA, 18 bp, Homo Sapiens
cgtggttgtagtccgtgc

SEQ ID NO: 12984 - DNA, 19 bp, Homo Sapiens
cgtggttgtagtccgtgcg

SEQ ID NO: 12985 - DNA, 20 bp, Homo Sapiens
cgtggttgtagtccgtgcga

SEQ ID NO: 12986 - DNA, 21 bp, Homo Sapiens
cgtggttgtagtccgtgcgag

SEQ ID NO: 12987 - DNA, 22 bp, Homo Sapiens
cgtggttgtagtccgtgcgaga

SEQ ID NO: 12988 - DNA, 23 bp, Homo Sapiens
cgtggttgtagtccgtgcgagaa

SEQ ID NO: 12989 - DNA, 24 bp, Homo Sapiens
cgtggttgtagtccgtgcgagaat

SEQ ID NO: 12990 - DNA, 25 bp, Homo Sapiens
cgtggttgtagtccgtgcgagaata

SEQ ID NO: 12991 - DNA, 26 bp, Homo Sapiens
cgtggttgtagtccgtgcgagaatac

SEQ ID NO: 12992 - DNA, 27 bp, Homo Sapiens
cgtggttgtagtccgtgcgagaatacc

SEQ ID NO: 12993 - DNA, 28 bp, Homo Sapiens
cgtggttgtagtccgtgcgagaatacca

SEQ ID NO: 12994 - DNA, 26 bp, Homo Sapiens
cgtgttcaaatcacgtcggggtcacc

SEQ ID NO: 12995 - DNA, 22 bp, Homo Sapiens
cgtgttcaagtcacgtcggggt

SEQ ID NO: 12996 - DNA, 26 bp, Homo Sapiens
cgtgttcaagtcacgtcggggtcacc

SEQ ID NO: 12997 - DNA, 27 bp, Homo Sapiens
cgtgttcaagtcacgtcggggtcacca

SEQ ID NO: 12998 - DNA, 23 bp, Homo Sapiens
cgtgttcgaatcacgtcggggtc

SEQ ID NO: 12999 - DNA, 26 bp, Homo Sapiens
cgtgttcgaatcacgtcggggtcacc

SEQ ID NO: 13000 - DNA, 16 bp, Homo Sapiens
cgttaacttccaatta

SEQ ID NO: 13001 - DNA, 28 bp, Homo Sapiens
cgttaacttccaattaactagttttgac

SEQ ID NO: 13002 - DNA, 29 bp, Homo Sapiens
cgttaacttccaattaactagttttgaca

SEQ ID NO: 13003 - DNA, 30 bp, Homo Sapiens
cgttaacttccaattaactagttttgacaa

SEQ ID NO: 13004 - DNA, 31 bp, Homo Sapiens
cgttaacttccaattaactagttttgacaac

SEQ ID NO: 13005 - DNA, 32 bp, Homo Sapiens
cgttaacttccaattaactagttttgacaaca

SEQ ID NO: 13006 - DNA, 21 bp, Homo Sapiens
cgttaagatggcagagcccgg

SEQ ID NO: 13007 - DNA, 18 bp, Homo Sapiens
cgttagcgcagtaggcag

SEQ ID NO: 13008 - DNA, 19 bp, Homo Sapiens
cgttagcgcagtaggtagc

SEQ ID NO: 13009 - DNA, 19 bp, Homo Sapiens
cgttagtatagtggtgagt

SEQ ID NO: 13010 - DNA, 21 bp, Homo Sapiens
cgttagtatagtggtgagtat

SEQ ID NO: 13011 - DNA, 24 bp, Homo Sapiens
cgttagtatagtggtgagtatccc

SEQ ID NO: 13012 - DNA, 25 bp, Homo Sapiens
cgttagtatagtggtgagtatcccc

SEQ ID NO: 13013 - DNA, 27 bp, Homo Sapiens
cgttagtatagtggtgagtatccccgc

SEQ ID NO: 13014 - DNA, 28 bp, Homo Sapiens
cgttagtatagtggtgagtatccccgcc

SEQ ID NO: 13015 - DNA, 29 bp, Homo Sapiens
cgttagtatagtggtgagtatccccgcct

SEQ ID NO: 13016 - DNA, 31 bp, Homo Sapiens
cgttagtatagtggtgagtatccccgcctgt

SEQ ID NO: 13017 - DNA, 32 bp, Homo Sapiens
cgttagtatagtggtgagtatccccgcctgtc

SEQ ID NO: 13018 - DNA, 38 bp, Homo Sapiens
cgttagtatagtggtgagtatccccgcctgtcacgcgg

SEQ ID NO: 13019 - DNA, 28 bp, Homo Sapiens
cgttagtatagtggttagtatccccgcc

SEQ ID NO: 13020 - DNA, 31 bp, Homo Sapiens
cgttagtatagtggttagtatccccgcctgt

SEQ ID NO: 13021 - DNA, 32 bp, Homo Sapiens
cgttagtatagtggttagtatccccgcctgtc

SEQ ID NO: 13022 - DNA, 16 bp, Homo Sapiens
cgttcaggtcgcagtc

SEQ ID NO: 13023 - DNA, 17 bp, Homo Sapiens
cgttcaggtcgcagtct

SEQ ID NO: 13024 - DNA, 18 bp, Homo Sapiens
cgttcaggtcgcagtctc

SEQ ID NO: 13025 - DNA, 19 bp, Homo Sapiens
cgttcaggtcgcagtctcc

SEQ ID NO: 13026 - DNA, 20 bp, Homo Sapiens
cgttcaggtcgcagtctccc

SEQ ID NO: 13027 - DNA, 20 bp, Homo Sapiens
cgttcagttgatgcagagtg

SEQ ID NO: 13028 - DNA, 23 bp, Homo Sapiens
cgttcagttgatgcagagtgggg

SEQ ID NO: 13029 - DNA, 24 bp, Homo Sapiens
cgttcagttgatgcagagtggggt

SEQ ID NO: 13030 - DNA, 25 bp, Homo Sapiens
cgttcagttgatgcagagtggggtt

SEQ ID NO: 13031 - DNA, 34 bp, Homo Sapiens
cgttcagttgatgcagagtggggttttgcagtcc

SEQ ID NO: 13032 - DNA, 35 bp, Homo Sapiens
cgttcagttgatgcagagtggggttttgcagtcct

SEQ ID NO: 13033 - DNA, 36 bp, Homo Sapiens
cgttcagttgatgcagagtggggttttgcagtcctt

SEQ ID NO: 13034 - DNA, 37 bp, Homo Sapiens
cgttcagttgatgcagagtggggttttgcagtcctta

SEQ ID NO: 13035 - DNA, 38 bp, Homo Sapiens
cgttcagttgatgcagagtggggttttgcagtccttac

SEQ ID NO: 13036 - DNA, 39 bp, Homo Sapiens
cgttcagttgatgcagagtggggttttgcagtccttacc

SEQ ID NO: 13037 - DNA, 40 bp, Homo Sapiens
cgttcagttgatgcagagtggggttttgcagtccttacca

SEQ ID NO: 13038 - DNA, 16 bp, Homo Sapiens
cgttccgctgttaacc

SEQ ID NO: 13039 - DNA, 16 bp, Homo Sapiens
cgttggtctaggggta

SEQ ID NO: 13040 - DNA, 23 bp, Homo Sapiens
cgttggtctaggggtatgattct

SEQ ID NO: 13041 - DNA, 24 bp, Homo Sapiens
cgttggtctaggggtatgattctc

SEQ ID NO: 13042 - DNA, 25 bp, Homo Sapiens
cgttggtctaggggtatgattctcg

SEQ ID NO: 13043 - DNA, 27 bp, Homo Sapiens
cgttggtctaggggtatgattctcgct

SEQ ID NO: 13044 - DNA, 28 bp, Homo Sapiens
cgttggtctaggggtatgattctcgctt

SEQ ID NO: 13045 - DNA, 29 bp, Homo Sapiens
cgttggtctaggggtatgattctcgcttc

SEQ ID NO: 13046 - DNA, 31 bp, Homo Sapiens
cgttggtctaggggtatgattctcgcttcgg

SEQ ID NO: 13047 - DNA, 31 bp, Homo Sapiens
cgttggtctaggggtatgattctcgctttgg

SEQ ID NO: 13048 - DNA, 34 bp, Homo Sapiens
cgttggtctaggggtatgattctcgctttgggtg

SEQ ID NO: 13049 - DNA, 31 bp, Homo Sapiens
cgttggtctaggggtatgattctcggtttgg

SEQ ID NO: 13050 - DNA, 27 bp, Homo Sapiens
cgttggtctagtggtatgattctcgct

SEQ ID NO: 13051 - DNA, 16 bp, Homo Sapiens
cgttggtggtatagtg

SEQ ID NO: 13052 - DNA, 24 bp, Homo Sapiens
cgttggtggtatagtggtaagcat

SEQ ID NO: 13053 - DNA, 28 bp, Homo Sapiens
cgttggtggtatagtggtaagcatagct

SEQ ID NO: 13054 - DNA, 29 bp, Homo Sapiens
cgttggtggtatagtggtaagcatagctg

SEQ ID NO: 13055 - DNA, 30 bp, Homo Sapiens
cgttggtggtatagtggtaagcatagctgc

SEQ ID NO: 13056 - DNA, 31 bp, Homo Sapiens
cgttggtggtatagtggtaagcatagctgcc

SEQ ID NO: 13057 - DNA, 32 bp, Homo Sapiens
cgttggtggtatagtggtaagcatagctgcct

SEQ ID NO: 13058 - DNA, 27 bp, Homo Sapiens
cgttggtggtatagtggtgagcatagc

SEQ ID NO: 13059 - DNA, 28 bp, Homo Sapiens
cgttggtggtatagtggtgagcatagct

SEQ ID NO: 13060 - DNA, 29 bp, Homo Sapiens
cgttggtggtatagtggtgagcatagctg

SEQ ID NO: 13061 - DNA, 30 bp, Homo Sapiens
cgttggtggtatagtggtgagcatagctgc

SEQ ID NO: 13062 - DNA, 31 bp, Homo Sapiens
cgttggtggtatagtggtgagcatagctgcc

SEQ ID NO: 13063 - DNA, 32 bp, Homo Sapiens
cgttggtggtatagtggtgagcatagctgcct

SEQ ID NO: 13064 - DNA, 34 bp, Homo Sapiens
cgttggtggtatagtggtgagcatagctgccttc

SEQ ID NO: 13065 - DNA, 35 bp, Homo Sapiens
cgttggtggtatagtggtgagcatagctgccttcc

SEQ ID NO: 13066 - DNA, 27 bp, Homo Sapiens
cgttggtggtatagtggttagcatagc

SEQ ID NO: 13067 - DNA, 28 bp, Homo Sapiens
cgttggtggtatagtggttagcatagct

SEQ ID NO: 13068 - DNA, 30 bp, Homo Sapiens
cgttggtggtatagtggttagcatagctgc

SEQ ID NO: 13069 - DNA, 31 bp, Homo Sapiens
cgttggtggtatagtggttagcatagctgcc

SEQ ID NO: 13070 - DNA, 32 bp, Homo Sapiens
cgttggtggtatagtggttagcatagctgcct

SEQ ID NO: 13071 - DNA, 35 bp, Homo Sapiens
cgttggtggtatagtggttagcatagctgccttcc

SEQ ID NO: 13072 - DNA, 31 bp, Homo Sapiens
cgttggtggtttagtggtagaattctcgcct

SEQ ID NO: 13073 - DNA, 21 bp, Homo Sapiens
cgtttatgtagcttacctcct

SEQ ID NO: 13074 - DNA, 34 bp, Homo Sapiens
cgtttccgtagtggagtggttatcacgttcgcct

SEQ ID NO: 13075 - DNA, 33 bp, Homo Sapiens
cgtttccgtagtgtagtggtcatcacgttcgcc

SEQ ID NO: 13076 - DNA, 34 bp, Homo Sapiens
cgtttccgtagtgtagtggtcatcacgttcgcct

SEQ ID NO: 13077 - DNA, 33 bp, Homo Sapiens
cgtttccgtagtgtagtggttatcacgttcgcc

SEQ ID NO: 13078 - DNA, 34 bp, Homo Sapiens
cgtttccgtagtgtagtggttatcacgttcgcct

SEQ ID NO: 13079 - DNA, 35 bp, Homo Sapiens
cgtttccgtagtgtagtggttatcacgttcgcctc

SEQ ID NO: 13080 - DNA, 36 bp, Homo Sapiens
cgtttccgtagtgtagtggttatcacgttcgcctca

SEQ ID NO: 13081 - DNA, 37 bp, Homo Sapiens
cgtttccgtagtgtagtggttatcacgttcgcctcac

SEQ ID NO: 13082 - DNA, 19 bp, Homo Sapiens
ctaaagacaggggttaggc

SEQ ID NO: 13083 - DNA, 20 bp, Homo Sapiens
ctaaagacaggggttaggcc

SEQ ID NO: 13084 - DNA, 21 bp, Homo Sapiens
ctaaagacaggggttaggcct

SEQ ID NO: 13085 - DNA, 22 bp, Homo Sapiens
ctaaagacaggggttaggcctc

SEQ ID NO: 13086 - DNA, 23 bp, Homo Sapiens
ctaaagacaggggttaggcctct

SEQ ID NO: 13087 - DNA, 25 bp, Homo Sapiens
ctaaagacaggggttaggcctcttt

SEQ ID NO: 13088 - DNA, 26 bp, Homo Sapiens
ctaaagacaggggttaggcctctttt

SEQ ID NO: 13089 - DNA, 27 bp, Homo Sapiens
ctaaagacaggggttaggcctcttttt

SEQ ID NO: 13090 - DNA, 28 bp, Homo Sapiens
ctaaagacaggggttaggcctcttttta

SEQ ID NO: 13091 - DNA, 30 bp, Homo Sapiens
ctaaagacaggggttaggcctctttttacc

SEQ ID NO: 13092 - DNA, 31 bp, Homo Sapiens
ctaaagacaggggttaggcctctttttacca

SEQ ID NO: 13093 - DNA, 32 bp, Homo Sapiens
ctaaagacaggggttaggcctctttttaccac

SEQ ID NO: 13094 - DNA, 33 bp, Homo Sapiens
ctaaagacaggggttaggcctctttttaccacc

SEQ ID NO: 13095 - DNA, 34 bp, Homo Sapiens
ctaaagacaggggttaggcctctttttaccacca

SEQ ID NO: 13096 - DNA, 17 bp, Homo Sapiens
ctaaaggtccctggttc

SEQ ID NO: 13097 - DNA, 35 bp, Homo Sapiens
ctaaaggtccctggttcaatcccgggtttcggcac

SEQ ID NO: 13098 - DNA, 18 bp, Homo Sapiens
ctaaaggtccctggttcg

SEQ ID NO: 13099 - DNA, 33 bp, Homo Sapiens
ctaaaggtccctggttcgatcccgggtttcggc

SEQ ID NO: 13100 - DNA, 34 bp, Homo Sapiens
ctaaaggtccctggttcgatcccgggtttcggca

SEQ ID NO: 13101 - DNA, 35 bp, Homo Sapiens
ctaaaggtccctggttcgatcccgggtttcggcac

SEQ ID NO: 13102 - DNA, 36 bp, Homo Sapiens
ctaaaggtccctggttcgatcccgggtttcggcacc

SEQ ID NO: 13103 - DNA, 37 bp, Homo Sapiens
ctaaaggtccctggttcgatcccgggtttcggcacca

SEQ ID NO: 13104 - DNA, 16 bp, Homo Sapiens
ctaaataagctatcgg

SEQ ID NO: 13105 - DNA, 17 bp, Homo Sapiens
ctaaataagctatcggg

SEQ ID NO: 13106 - DNA, 18 bp, Homo Sapiens
ctaaataagctatcgggc

SEQ ID NO: 13107 - DNA, 19 bp, Homo Sapiens
ctaaataagctatcgggcc

SEQ ID NO: 13108 - DNA, 20 bp, Homo Sapiens
ctaaataagctatcgggccc

SEQ ID NO: 13109 - DNA, 21 bp, Homo Sapiens
ctaaataagctatcgggccca

SEQ ID NO: 13110 - DNA, 22 bp, Homo Sapiens
ctaaataagctatcgggcccat

SEQ ID NO: 13111 - DNA, 23 bp, Homo Sapiens
ctaaataagctatcgggcccata

SEQ ID NO: 13112 - DNA, 24 bp, Homo Sapiens
ctaaataagctatcgggcccatac

SEQ ID NO: 13113 - DNA, 25 bp, Homo Sapiens
ctaaataagctatcgggcccatacc

SEQ ID NO: 13114 - DNA, 26 bp, Homo Sapiens
ctaaataagctatcgggcccataccc

SEQ ID NO: 13115 - DNA, 27 bp, Homo Sapiens
ctaaataagctatcgggcccatacccc

SEQ ID NO: 13116 - DNA, 28 bp, Homo Sapiens
ctaaataagctatcgggcccataccccg

SEQ ID NO: 13117 - DNA, 29 bp, Homo Sapiens
ctaaataagctatcgggcccataccccga

SEQ ID NO: 13118 - DNA, 30 bp, Homo Sapiens
ctaaataagctatcgggcccataccccgaa

SEQ ID NO: 13119 - DNA, 31 bp, Homo Sapiens
ctaaataagctatcgggcccataccccgaaa

SEQ ID NO: 13120 - DNA, 32 bp, Homo Sapiens
ctaaataagctatcgggcccataccccgaaaa

SEQ ID NO: 13121 - DNA, 36 bp, Homo Sapiens
ctaaataagctatcgggcccataccccgaaaatgtt

SEQ ID NO: 13122 - DNA, 40 bp, Homo Sapiens
ctaaataagctatcgggcccataccccgaaaatgttggtt

SEQ ID NO: 13123 - DNA, 41 bp, Homo Sapiens
ctaaataagctatcgggcccataccccgaaaatgttggtta

SEQ ID NO: 13124 - DNA, 42 bp, Homo Sapiens
ctaaataagctatcgggcccataccccgaaaatgttggttat

SEQ ID NO: 13125 - DNA, 16 bp, Homo Sapiens
ctaaatcctatatatc

SEQ ID NO: 13126 - DNA, 17 bp, Homo Sapiens
ctaaatcctatatatct

SEQ ID NO: 13127 - DNA, 21 bp, Homo Sapiens
ctaaatcctatatatcttacc

SEQ ID NO: 13128 - DNA, 22 bp, Homo Sapiens
ctaaatcctatatatcttacca

SEQ ID NO: 13129 - DNA, 16 bp, Homo Sapiens
ctaacaacatggcttt

SEQ ID NO: 13130 - DNA, 17 bp, Homo Sapiens
ctaacaacatggctttc

SEQ ID NO: 13131 - DNA, 18 bp, Homo Sapiens
ctaacaacatggctttct

SEQ ID NO: 13132 - DNA, 19 bp, Homo Sapiens
ctaacaacatggctttctc

SEQ ID NO: 13133 - DNA, 20 bp, Homo Sapiens
ctaacaacatggctttctca

SEQ ID NO: 13134 - DNA, 21 bp, Homo Sapiens
ctaacaacatggctttctcac

SEQ ID NO: 13135 - DNA, 22 bp, Homo Sapiens
ctaacaacatggctttctcacc

SEQ ID NO: 13136 - DNA, 23 bp, Homo Sapiens
ctaacaacatggctttctcacca

SEQ ID NO: 13137 - DNA, 16 bp, Homo Sapiens
ctaactcatgccccca

SEQ ID NO: 13138 - DNA, 18 bp, Homo Sapiens
ctaactcatgcccccatg

SEQ ID NO: 13139 - DNA, 19 bp, Homo Sapiens
ctaactcatgcccccatgt

SEQ ID NO: 13140 - DNA, 20 bp, Homo Sapiens
ctaactcatgcccccatgtc

SEQ ID NO: 13141 - DNA, 21 bp, Homo Sapiens
ctaactcatgcccccatgtct

SEQ ID NO: 13142 - DNA, 22 bp, Homo Sapiens
ctaactcatgcccccatgtcta

SEQ ID NO: 13143 - DNA, 23 bp, Homo Sapiens
ctaactcatgcccccatgtctaa

SEQ ID NO: 13144 - DNA, 24 bp, Homo Sapiens
ctaactcatgcccccatgtctaac

SEQ ID NO: 13145 - DNA, 25 bp, Homo Sapiens
ctaactcatgcccccatgtctaaca

SEQ ID NO: 13146 - DNA, 27 bp, Homo Sapiens
ctaactcatgcccccatgtctaacaac

SEQ ID NO: 13147 - DNA, 28 bp, Homo Sapiens
ctaactcatgcccccatgtctaacaaca

SEQ ID NO: 13148 - DNA, 29 bp, Homo Sapiens
ctaactcatgcccccatgtctaacaacat

SEQ ID NO: 13149 - DNA, 30 bp, Homo Sapiens
ctaactcatgcccccatgtctaacaacatg

SEQ ID NO: 13150 - DNA, 31 bp, Homo Sapiens
ctaactcatgcccccatgtctaacaacatgg

SEQ ID NO: 13151 - DNA, 32 bp, Homo Sapiens
ctaactcatgcccccatgtctaacaacatggc

SEQ ID NO: 13152 - DNA, 33 bp, Homo Sapiens
ctaactcatgcccccatgtctaacaacatggct

SEQ ID NO: 13153 - DNA, 34 bp, Homo Sapiens
ctaactcatgcccccatgtctaacaacatggctt

SEQ ID NO: 13154 - DNA, 35 bp, Homo Sapiens
ctaactcatgcccccatgtctaacaacatggcttt

SEQ ID NO: 13155 - DNA, 36 bp, Homo Sapiens
ctaactcatgcccccatgtctaacaacatggctttc

SEQ ID NO: 13156 - DNA, 37 bp, Homo Sapiens
ctaactcatgcccccatgtctaacaacatggctttct

SEQ ID NO: 13157 - DNA, 38 bp, Homo Sapiens
ctaactcatgcccccatgtctaacaacatggctttctc

SEQ ID NO: 13158 - DNA, 39 bp, Homo Sapiens
ctaactcatgcccccatgtctaacaacatggctttctca

SEQ ID NO: 13159 - DNA, 40 bp, Homo Sapiens
ctaactcatgcccccatgtctaacaacatggctttctcac

SEQ ID NO: 13160 - DNA, 41 bp, Homo Sapiens
ctaactcatgcccccatgtctaacaacatggctttctcacc

SEQ ID NO: 13161 - DNA, 42 bp, Homo Sapiens
ctaactcatgcccccatgtctaacaacatggctttctcacca

SEQ ID NO: 13162 - DNA, 17 bp, Homo Sapiens
ctaacttagcattaacc

SEQ ID NO: 13163 - DNA, 25 bp, Homo Sapiens
ctaacttagcattaaccttttaagt

SEQ ID NO: 13164 - DNA, 27 bp, Homo Sapiens
ctaacttagcattaaccttttaagtta

SEQ ID NO: 13165 - DNA, 28 bp, Homo Sapiens
ctaacttagcattaaccttttaagttaa

SEQ ID NO: 13166 - DNA, 38 bp, Homo Sapiens
ctaacttagcattaaccttttaagttaaagattaagag

SEQ ID NO: 13167 - DNA, 42 bp, Homo Sapiens
ctaacttagcattaaccttttaagttaaagattaagagaacc

SEQ ID NO: 13168 - DNA, 16 bp, Homo Sapiens
ctaagccagggattgt

SEQ ID NO: 13169 - DNA, 18 bp, Homo Sapiens
ctaagccagggattgtgg

SEQ ID NO: 13170 - DNA, 19 bp, Homo Sapiens
ctaagccagggattgtggg

SEQ ID NO: 13171 - DNA, 20 bp, Homo Sapiens
ctaagccagggattgtgggt

SEQ ID NO: 13172 - DNA, 21 bp, Homo Sapiens
ctaagccagggattgtgggtt

SEQ ID NO: 13173 - DNA, 22 bp, Homo Sapiens
ctaagccagggattgtgggttc

SEQ ID NO: 13174 - DNA, 23 bp, Homo Sapiens
ctaagccagggattgtgggttcg

SEQ ID NO: 13175 - DNA, 27 bp, Homo Sapiens
ctaagccagggattgtgggttcgagtc

SEQ ID NO: 13176 - DNA, 30 bp, Homo Sapiens
ctaagccagggattgtgggttcgagtccca

SEQ ID NO: 13177 - DNA, 39 bp, Homo Sapiens
ctaagccagggattgtgggttcgagtcccacccggggta

SEQ ID NO: 13178 - DNA, 41 bp, Homo Sapiens
ctaagccagggattgtgggttcgagtcccacccggggtacc

SEQ ID NO: 13179 - DNA, 42 bp, Homo Sapiens
ctaagccagggattgtgggttcgagtcccacccggggtacca

SEQ ID NO: 13180 - DNA, 41 bp, Homo Sapiens
ctaagccagggattgtgggttcgagtcccacctggggtacc

SEQ ID NO: 13181 - DNA, 41 bp, Homo Sapiens
ctaagccagggattgtgggttcgagtcccacctggggtgcc

SEQ ID NO: 13182 - DNA, 42 bp, Homo Sapiens
ctaagccagggattgtgggttcgagtcccacctggggtgcca

SEQ ID NO: 13183 - DNA, 31 bp, Homo Sapiens
ctaagccagggattgtgggttcgagtcccat

SEQ ID NO: 13184 - DNA, 32 bp, Homo Sapiens
ctaagccagggattgtgggttcgagtcccatc

SEQ ID NO: 13185 - DNA, 39 bp, Homo Sapiens
ctaagccagggattgtgggttcgagtcccatctggggtg

SEQ ID NO: 13186 - DNA, 41 bp, Homo Sapiens
ctaagccagggattgtgggttcgagtcccatctggggtgcc

SEQ ID NO: 13187 - DNA, 42 bp, Homo Sapiens
ctaagccagggattgtgggttcgagtcccatctggggtgcca

SEQ ID NO: 13188 - DNA, 18 bp, Homo Sapiens
ctaaggcgctgcgttcag

SEQ ID NO: 13189 - DNA, 21 bp, Homo Sapiens
ctaaggcgctggattaaggct

SEQ ID NO: 13190 - DNA, 23 bp, Homo Sapiens
ctaaggcgctggattaaggctcc

SEQ ID NO: 13191 - DNA, 21 bp, Homo Sapiens
ctaaggcgctggatttaggct

SEQ ID NO: 13192 - DNA, 17 bp, Homo Sapiens
ctaagtgtttgtgggtt

SEQ ID NO: 13193 - DNA, 18 bp, Homo Sapiens
ctaagtgtttgtgggttt

SEQ ID NO: 13194 - DNA, 19 bp, Homo Sapiens
ctaagtgtttgtgggttta

SEQ ID NO: 13195 - DNA, 20 bp, Homo Sapiens
ctaagtgtttgtgggtttaa

SEQ ID NO: 13196 - DNA, 22 bp, Homo Sapiens
ctaagtgtttgtgggtttaagt

SEQ ID NO: 13197 - DNA, 25 bp, Homo Sapiens
ctaagtgtttgtgggtttaagtccc

SEQ ID NO: 13198 - DNA, 28 bp, Homo Sapiens
ctaagtgtttgtgggtttaagtcccatt

SEQ ID NO: 13199 - DNA, 29 bp, Homo Sapiens
ctaagtgtttgtgggtttaagtcccattg

SEQ ID NO: 13200 - DNA, 31 bp, Homo Sapiens
ctaagtgtttgtgggtttaagtcccattggt

SEQ ID NO: 13201 - DNA, 32 bp, Homo Sapiens
ctaagtgtttgtgggtttaagtcccattggtc

SEQ ID NO: 13202 - DNA, 33 bp, Homo Sapiens
ctaagtgtttgtgggtttaagtcccattggtct

SEQ ID NO: 13203 - DNA, 34 bp, Homo Sapiens
ctaagtgtttgtgggtttaagtcccattggtcta

SEQ ID NO: 13204 - DNA, 35 bp, Homo Sapiens
ctaagtgtttgtgggtttaagtcccattggtctag

SEQ ID NO: 13205 - DNA, 36 bp, Homo Sapiens
ctaagtgtttgtgggtttaagtcccattggtctagc

SEQ ID NO: 13206 - DNA, 37 bp, Homo Sapiens
ctaagtgtttgtgggtttaagtcccattggtctagcc

SEQ ID NO: 13207 - DNA, 38 bp, Homo Sapiens
ctaagtgtttgtgggtttaagtcccattggtctagcca

SEQ ID NO: 13208 - DNA, 19 bp, Homo Sapiens
ctaatacaccagtcttgta

SEQ ID NO: 13209 - DNA, 30 bp, Homo Sapiens
ctaatacaccagtcttgtaaaccggagatg

SEQ ID NO: 13210 - DNA, 35 bp, Homo Sapiens
ctaatacaccagtcttgtaaaccggagatgaaaac

SEQ ID NO: 13211 - DNA, 22 bp, Homo Sapiens
ctaatccagaggttccgggttc

SEQ ID NO: 13212 - DNA, 39 bp, Homo Sapiens
ctaatccagaggttccgggttcgagtcccggcagagatg

SEQ ID NO: 13213 - DNA, 40 bp, Homo Sapiens
ctaatccagaggttccgggttcgagtcccggcagagatgc

SEQ ID NO: 13214 - DNA, 41 bp, Homo Sapiens
ctaatccagaggttccgggttcgagtcccggcagagatgcc

SEQ ID NO: 13215 - DNA, 42 bp, Homo Sapiens
ctaatccagaggttccgggttcgagtcccggcagagatgcca

SEQ ID NO: 13216 - DNA, 16 bp, Homo Sapiens
ctaatccattgtgctt

SEQ ID NO: 13217 - DNA, 16 bp, Homo Sapiens
ctaatggataaggcac

SEQ ID NO: 13218 - DNA, 17 bp, Homo Sapiens
ctaatggataaggcact

SEQ ID NO: 13219 - DNA, 18 bp, Homo Sapiens
ctaatggataaggcactg

SEQ ID NO: 13220 - DNA, 20 bp, Homo Sapiens
ctaatggataaggcactggc

SEQ ID NO: 13221 - DNA, 16 bp, Homo Sapiens
ctaatggataaggcat

SEQ ID NO: 13222 - DNA, 17 bp, Homo Sapiens
ctaatggataaggcatc

SEQ ID NO: 13223 - DNA, 18 bp, Homo Sapiens
ctaatggataaggcatca

SEQ ID NO: 13224 - DNA, 19 bp, Homo Sapiens
ctaatggataaggcatcag

SEQ ID NO: 13225 - DNA, 22 bp, Homo Sapiens
ctaatggataaggcatcagcct

SEQ ID NO: 13226 - DNA, 23 bp, Homo Sapiens
ctaatggataaggcatcagcctc

SEQ ID NO: 13227 - DNA, 24 bp, Homo Sapiens
ctaatggataaggcatcagcctcc

SEQ ID NO: 13228 - DNA, 25 bp, Homo Sapiens
ctaatggataaggcatcagcctccg

SEQ ID NO: 13229 - DNA, 31 bp, Homo Sapiens
ctaatggataaggcatcagcctccggagctg

SEQ ID NO: 13230 - DNA, 32 bp, Homo Sapiens
ctaatggataaggcatcagcctccggagctgg

SEQ ID NO: 13231 - DNA, 17 bp, Homo Sapiens
ctaatggataaggcatt

SEQ ID NO: 13232 - DNA, 18 bp, Homo Sapiens
ctaatggataaggcattg

SEQ ID NO: 13233 - DNA, 19 bp, Homo Sapiens
ctaatggataaggcattgg

SEQ ID NO: 13234 - DNA, 20 bp, Homo Sapiens
ctaatggataaggcattggc

SEQ ID NO: 13235 - DNA, 22 bp, Homo Sapiens
ctaatggataaggcattggcct

SEQ ID NO: 13236 - DNA, 31 bp, Homo Sapiens
ctaatggataaggcattggcctcctaagcca

SEQ ID NO: 13237 - DNA, 17 bp, Homo Sapiens
ctaatggataaggcgtc

SEQ ID NO: 13238 - DNA, 20 bp, Homo Sapiens
ctaatggataaggcgtctga

SEQ ID NO: 13239 - DNA, 22 bp, Homo Sapiens
ctaatggataaggcgtctgact

SEQ ID NO: 13240 - DNA, 16 bp, Homo Sapiens
ctaatggtggagttaa

SEQ ID NO: 13241 - DNA, 17 bp, Homo Sapiens
ctaatggtggagttaaa

SEQ ID NO: 13242 - DNA, 18 bp, Homo Sapiens
ctaatggtggagttaaag

SEQ ID NO: 13243 - DNA, 19 bp, Homo Sapiens
ctaatggtggagttaaaga

SEQ ID NO: 13244 - DNA, 20 bp, Homo Sapiens
ctaatggtggagttaaagac

SEQ ID NO: 13245 - DNA, 21 bp, Homo Sapiens
ctaatggtggagttaaagact

SEQ ID NO: 13246 - DNA, 22 bp, Homo Sapiens
ctaatggtggagttaaagactt

SEQ ID NO: 13247 - DNA, 23 bp, Homo Sapiens
ctaatggtggagttaaagacttt

SEQ ID NO: 13248 - DNA, 24 bp, Homo Sapiens
ctaatggtggagttaaagactttt

SEQ ID NO: 13249 - DNA, 25 bp, Homo Sapiens
ctaatggtggagttaaagacttttt

SEQ ID NO: 13250 - DNA, 26 bp, Homo Sapiens
ctaatggtggagttaaagactttttc

SEQ ID NO: 13251 - DNA, 28 bp, Homo Sapiens
ctaatggtggagttaaagactttttctc

SEQ ID NO: 13252 - DNA, 29 bp, Homo Sapiens
ctaatggtggagttaaagactttttctct

SEQ ID NO: 13253 - DNA, 30 bp, Homo Sapiens
ctaatggtggagttaaagactttttctctg

SEQ ID NO: 13254 - DNA, 31 bp, Homo Sapiens
ctaatggtggagttaaagactttttctctga

SEQ ID NO: 13255 - DNA, 32 bp, Homo Sapiens
ctaatggtggagttaaagactttttctctgac

SEQ ID NO: 13256 - DNA, 33 bp, Homo Sapiens
ctaatggtggagttaaagactttttctctgacc

SEQ ID NO: 13257 - DNA, 34 bp, Homo Sapiens
ctaatggtggagttaaagactttttctctgacca

SEQ ID NO: 13258 - DNA, 17 bp, Homo Sapiens
ctaattcaaaggttccg

SEQ ID NO: 13259 - DNA, 18 bp, Homo Sapiens
ctaattcaaaggttccgg

SEQ ID NO: 13260 - DNA, 20 bp, Homo Sapiens
ctaattcaaaggttccgggt

SEQ ID NO: 13261 - DNA, 41 bp, Homo Sapiens
ctaattcaaaggttccgggttcgagtcccggcggagtcgcc

SEQ ID NO: 13262 - DNA, 42 bp, Homo Sapiens
ctaattcaaaggttccgggttcgagtcccggcggagtcgcca

SEQ ID NO: 13263 - DNA, 41 bp, Homo Sapiens
ctaattcaaaggttgtgggttcgaatcccaccagagtcgcc

SEQ ID NO: 13264 - DNA, 42 bp, Homo Sapiens
ctaattcaaaggttgtgggttcgaatcccaccagagtcgcca

SEQ ID NO: 13265 - DNA, 41 bp, Homo Sapiens
ctaattcaaaggttgtgggttcgagtcccaccagagtcgcc

SEQ ID NO: 13266 - DNA, 42 bp, Homo Sapiens
ctaattcaaaggttgtgggttcgagtcccaccagagtcgcca

SEQ ID NO: 13267 - DNA, 17 bp, Homo Sapiens
ctagcggttaggattcc

SEQ ID NO: 13268 - DNA, 18 bp, Homo Sapiens
ctagcggttaggattcct

SEQ ID NO: 13269 - DNA, 19 bp, Homo Sapiens
ctagcggttaggattcctg

SEQ ID NO: 13270 - DNA, 21 bp, Homo Sapiens
ctagcggttaggattcctggt

SEQ ID NO: 13271 - DNA, 22 bp, Homo Sapiens
ctagcggttaggattcctggtt

SEQ ID NO: 13272 - DNA, 23 bp, Homo Sapiens
ctagcggttaggattcctggttt

SEQ ID NO: 13273 - DNA, 24 bp, Homo Sapiens
ctagcggttaggattcctggtttt

SEQ ID NO: 13274 - DNA, 25 bp, Homo Sapiens
ctagcggttaggattcctggttttc

SEQ ID NO: 13275 - DNA, 26 bp, Homo Sapiens
ctagcggttaggattcctggttttca

SEQ ID NO: 13276 - DNA, 43 bp, Homo Sapiens
ctagcggttaggattcctggttttcacccaggcggcccgggtt

SEQ ID NO: 13277 - DNA, 34 bp, Homo Sapiens
ctagcggttaggattcctggttttcacccaggtg

SEQ ID NO: 13278 - DNA, 17 bp, Homo Sapiens
ctagctcagccggtaga

SEQ ID NO: 13279 - DNA, 16 bp, Homo Sapiens
ctagctcagtcggtag

SEQ ID NO: 13280 - DNA, 17 bp, Homo Sapiens
ctagctcagtcggtaga

SEQ ID NO: 13281 - DNA, 18 bp, Homo Sapiens
ctagctcagtcggtagag

SEQ ID NO: 13282 - DNA, 19 bp, Homo Sapiens
ctagctcagtcggtagagc

SEQ ID NO: 13283 - DNA, 22 bp, Homo Sapiens
ctagctcagtcggtagagcatg

SEQ ID NO: 13284 - DNA, 26 bp, Homo Sapiens
ctagctcagtcggtagagcatgagac

SEQ ID NO: 13285 - DNA, 27 bp, Homo Sapiens
ctagctcagtcggtagagcatgagacc

SEQ ID NO: 13286 - DNA, 28 bp, Homo Sapiens
ctagctcagtcggtagagcatgagaccc

SEQ ID NO: 13287 - DNA, 29 bp, Homo Sapiens
ctagctcagtcggtagagcatgagaccct

SEQ ID NO: 13288 - DNA, 27 bp, Homo Sapiens
ctagctcagtcggtagagcatgagact

SEQ ID NO: 13289 - DNA, 28 bp, Homo Sapiens
ctagctcagtcggtagagcatgagactc

SEQ ID NO: 13290 - DNA, 29 bp, Homo Sapiens
ctagctcagtcggtagagcatgagactct

SEQ ID NO: 13291 - DNA, 30 bp, Homo Sapiens
ctagctcagtcggtagagcatgagactctt

SEQ ID NO: 13292 - DNA, 31 bp, Homo Sapiens
ctagctcagtcggtagagcatgagactctta

SEQ ID NO: 13293 - DNA, 32 bp, Homo Sapiens
ctagctcagtcggtagagcatgagactcttaa

SEQ ID NO: 13294 - DNA, 33 bp, Homo Sapiens
ctagctcagtcggtagagcatgagactcttaat

SEQ ID NO: 13295 - DNA, 34 bp, Homo Sapiens
ctagctcagtcggtagagcatgagactcttaatc

SEQ ID NO: 13296 - DNA, 46 bp, Homo Sapiens
ctagctcagtcggtagagcatgagactcttaatctcagggtcgtgg

SEQ ID NO: 13297 - DNA, 48 bp, Homo Sapiens
ctagctcagtcggtagagcatgagactcttaatctcagggtcgtgggt

SEQ ID NO: 13298 - DNA, 25 bp, Homo Sapiens
ctagctcagtcggtagagcatggga

SEQ ID NO: 13299 - DNA, 26 bp, Homo Sapiens
ctagctcagtcggtagagcatgggac

SEQ ID NO: 13300 - DNA, 27 bp, Homo Sapiens
ctagctcagtcggtagagcatgggact

SEQ ID NO: 13301 - DNA, 28 bp, Homo Sapiens
ctagctcagtcggtagagcatgggactc

SEQ ID NO: 13302 - DNA, 29 bp, Homo Sapiens
ctagctcagtcggtagagcatgggactct

SEQ ID NO: 13303 - DNA, 30 bp, Homo Sapiens
ctagctcagtcggtagagcatgggactctt

SEQ ID NO: 13304 - DNA, 32 bp, Homo Sapiens
ctagctcagtcggtagagcatgggactcttaa

SEQ ID NO: 13305 - DNA, 43 bp, Homo Sapiens
ctagctcagtcggtagagcatgggactcttaatcccagggtcg

SEQ ID NO: 13306 - DNA, 44 bp, Homo Sapiens
ctagctcagtcggtagagcatgggactcttaatcccagggtcgt

SEQ ID NO: 13307 - DNA, 46 bp, Homo Sapiens
ctagctcagtcggtagagcatgggactcttaatcccagggtcgtgg

SEQ ID NO: 13308 - DNA, 48 bp, Homo Sapiens
ctagctcagtcggtagagcatgggactcttaatcccagggtcgtgggt

SEQ ID NO: 13309 - DNA, 22 bp, Homo Sapiens
ctaggatggggtgtgataggtg

SEQ ID NO: 13310 - DNA, 31 bp, Homo Sapiens
ctaggatggggtgtgataggtggcacggaga

SEQ ID NO: 13311 - DNA, 32 bp, Homo Sapiens
ctaggatggggtgtgataggtggcacggagaa

SEQ ID NO: 13312 - DNA, 33 bp, Homo Sapiens
ctaggatggggtgtgataggtggcacggagaat

SEQ ID NO: 13313 - DNA, 34 bp, Homo Sapiens
ctaggatggggtgtgataggtggcacggagaatt

SEQ ID NO: 13314 - DNA, 35 bp, Homo Sapiens
ctaggatggggtgtgataggtggcacggagaattt

SEQ ID NO: 13315 - DNA, 36 bp, Homo Sapiens
ctaggatggggtgtgataggtggcacggagaatttt

SEQ ID NO: 13316 - DNA, 37 bp, Homo Sapiens
ctaggatggggtgtgataggtggcacggagaattttg

SEQ ID NO: 13317 - DNA, 16 bp, Homo Sapiens
ctaggattcggcgctt

SEQ ID NO: 13318 - DNA, 18 bp, Homo Sapiens
ctaggattcggcgctttc

SEQ ID NO: 13319 - DNA, 21 bp, Homo Sapiens
ctaggattcggcgctttcacc

SEQ ID NO: 13320 - DNA, 22 bp, Homo Sapiens
ctaggattcggcgctttcaccg

SEQ ID NO: 13321 - DNA, 37 bp, Homo Sapiens
ctaggattcggcgctttcaccgccgcggcccgggttc

SEQ ID NO: 13322 - DNA, 16 bp, Homo Sapiens
ctaggggtatgattct

SEQ ID NO: 13323 - DNA, 17 bp, Homo Sapiens
ctaggggtatgattctc

SEQ ID NO: 13324 - DNA, 18 bp, Homo Sapiens
ctaggggtatgattctcg

SEQ ID NO: 13325 - DNA, 19 bp, Homo Sapiens
ctaggggtatgattctcgc

SEQ ID NO: 13326 - DNA, 20 bp, Homo Sapiens
ctaggggtatgattctcgct

SEQ ID NO: 13327 - DNA, 21 bp, Homo Sapiens
ctaggggtatgattctcgctt

SEQ ID NO: 13328 - DNA, 24 bp, Homo Sapiens
ctaggggtatgattctcgcttcgg

SEQ ID NO: 13329 - DNA, 24 bp, Homo Sapiens
ctaggggtatgattctcgctttgg

SEQ ID NO: 13330 - DNA, 20 bp, Homo Sapiens
ctaggggtatgattctcggt

SEQ ID NO: 13331 - DNA, 21 bp, Homo Sapiens
ctaggggtatgattctcggtt

SEQ ID NO: 13332 - DNA, 23 bp, Homo Sapiens
ctaggggtatgattctcggtttg

SEQ ID NO: 13333 - DNA, 24 bp, Homo Sapiens
ctaggggtatgattctcggtttgg

SEQ ID NO: 13334 - DNA, 24 bp, Homo Sapiens
ctaggttcgactcctggctggctc

SEQ ID NO: 13335 - DNA, 27 bp, Homo Sapiens
ctaggttcgactcctggctggctcgcc

SEQ ID NO: 13336 - DNA, 28 bp, Homo Sapiens
ctaggttcgactcctggctggctcgcca

SEQ ID NO: 13337 - DNA, 16 bp, Homo Sapiens
ctagtggctaggattc

SEQ ID NO: 13338 - DNA, 17 bp, Homo Sapiens
ctagtggctaggattcg

SEQ ID NO: 13339 - DNA, 19 bp, Homo Sapiens
ctagtggctaggattcggc

SEQ ID NO: 13340 - DNA, 20 bp, Homo Sapiens
ctagtggctaggattcggcg

SEQ ID NO: 13341 - DNA, 21 bp, Homo Sapiens
ctagtggctaggattcggcgc

SEQ ID NO: 13342 - DNA, 22 bp, Homo Sapiens
ctagtggctaggattcggcgct

SEQ ID NO: 13343 - DNA, 24 bp, Homo Sapiens
ctagtggctaggattcggcgcttt

SEQ ID NO: 13344 - DNA, 25 bp, Homo Sapiens
ctagtggctaggattcggcgctttc

SEQ ID NO: 13345 - DNA, 27 bp, Homo Sapiens
ctagtggctaggattcggcgctttcac

SEQ ID NO: 13346 - DNA, 28 bp, Homo Sapiens
ctagtggctaggattcggcgctttcacc

SEQ ID NO: 13347 - DNA, 29 bp, Homo Sapiens
ctagtggctaggattcggcgctttcaccg

SEQ ID NO: 13348 - DNA, 21 bp, Homo Sapiens
ctagtggtatgattctcgctt

SEQ ID NO: 13349 - DNA, 16 bp, Homo Sapiens
ctagtggttaggattc

SEQ ID NO: 13350 - DNA, 17 bp, Homo Sapiens
ctagtggttaggattcg

SEQ ID NO: 13351 - DNA, 18 bp, Homo Sapiens
ctagtggttaggattcgg

SEQ ID NO: 13352 - DNA, 19 bp, Homo Sapiens
ctagtggttaggattcggc

SEQ ID NO: 13353 - DNA, 20 bp, Homo Sapiens
ctagtggttaggattcggcg

SEQ ID NO: 13354 - DNA, 21 bp, Homo Sapiens
ctagtggttaggattcggcgc

SEQ ID NO: 13355 - DNA, 22 bp, Homo Sapiens
ctagtggttaggattcggcgct

SEQ ID NO: 13356 - DNA, 23 bp, Homo Sapiens
ctagtggttaggattcggcgctc

SEQ ID NO: 13357 - DNA, 24 bp, Homo Sapiens
ctagtggttaggattcggcgctct

SEQ ID NO: 13358 - DNA, 25 bp, Homo Sapiens
ctagtggttaggattcggcgctctc

SEQ ID NO: 13359 - DNA, 26 bp, Homo Sapiens
ctagtggttaggattcggcgctctca

SEQ ID NO: 13360 - DNA, 27 bp, Homo Sapiens
ctagtggttaggattcggcgctctcac

SEQ ID NO: 13361 - DNA, 28 bp, Homo Sapiens
ctagtggttaggattcggcgctctcacc

SEQ ID NO: 13362 - DNA, 29 bp, Homo Sapiens
ctagtggttaggattcggcgctctcaccg

SEQ ID NO: 13363 - DNA, 31 bp, Homo Sapiens
ctagtggttaggattcggcgctctcaccgcc

SEQ ID NO: 13364 - DNA, 32 bp, Homo Sapiens
ctagtggttaggattcggcgctctcaccgccg

SEQ ID NO: 13365 - DNA, 38 bp, Homo Sapiens
ctagtggttaggattcggcgctctcaccgccgcggccc

SEQ ID NO: 13366 - DNA, 39 bp, Homo Sapiens
ctagtggttaggattcggcgctctcaccgccgcggcccg

SEQ ID NO: 13367 - DNA, 42 bp, Homo Sapiens
ctagtggttaggattcggcgctctcaccgccgcggcccgggt

SEQ ID NO: 13368 - DNA, 43 bp, Homo Sapiens
ctagtggttaggattcggcgctctcaccgccgcggcccgggtt

SEQ ID NO: 13369 - DNA, 44 bp, Homo Sapiens
ctagtggttaggattcggcgctctcaccgccgcggcccgggttc

SEQ ID NO: 13370 - DNA, 18 bp, Homo Sapiens
ctagttttgacaacattc

SEQ ID NO: 13371 - DNA, 23 bp, Homo Sapiens
ctagttttgacaacattcaaaaa

SEQ ID NO: 13372 - DNA, 25 bp, Homo Sapiens
ctagttttgacaacattcaaaaaag

SEQ ID NO: 13373 - DNA, 27 bp, Homo Sapiens
ctagttttgacaacattcaaaaaagag

SEQ ID NO: 13374 - DNA, 28 bp, Homo Sapiens
ctagttttgacaacattcaaaaaagagt

SEQ ID NO: 13375 - DNA, 29 bp, Homo Sapiens
ctagttttgacaacattcaaaaaagagta

SEQ ID NO: 13376 - DNA, 30 bp, Homo Sapiens
ctagttttgacaacattcaaaaaagagtac

SEQ ID NO: 13377 - DNA, 31 bp, Homo Sapiens
ctagttttgacaacattcaaaaaagagtacc

SEQ ID NO: 13378 - DNA, 32 bp, Homo Sapiens
ctagttttgacaacattcaaaaaagagtacca

SEQ ID NO: 13379 - DNA, 28 bp, Homo Sapiens
ctatagctcaggggttagagcactggtc

SEQ ID NO: 13380 - DNA, 29 bp, Homo Sapiens
ctatagctcaggggttagagcactggtct

SEQ ID NO: 13381 - DNA, 16 bp, Homo Sapiens
ctatccattggtctta

SEQ ID NO: 13382 - DNA, 17 bp, Homo Sapiens
ctatccattggtcttag

SEQ ID NO: 13383 - DNA, 18 bp, Homo Sapiens
ctatccattggtcttagg

SEQ ID NO: 13384 - DNA, 19 bp, Homo Sapiens
ctatccattggtcttaggc

SEQ ID NO: 13385 - DNA, 20 bp, Homo Sapiens
ctatccattggtcttaggcc

SEQ ID NO: 13386 - DNA, 21 bp, Homo Sapiens
ctatccattggtcttaggccc

SEQ ID NO: 13387 - DNA, 22 bp, Homo Sapiens
ctatccattggtcttaggcccc

SEQ ID NO: 13388 - DNA, 23 bp, Homo Sapiens
ctatccattggtcttaggcccca

SEQ ID NO: 13389 - DNA, 25 bp, Homo Sapiens
ctatccattggtcttaggccccaaa

SEQ ID NO: 13390 - DNA, 26 bp, Homo Sapiens
ctatccattggtcttaggccccaaaa

SEQ ID NO: 13391 - DNA, 27 bp, Homo Sapiens
ctatccattggtcttaggccccaaaaa

SEQ ID NO: 13392 - DNA, 28 bp, Homo Sapiens
ctatccattggtcttaggccccaaaaat

SEQ ID NO: 13393 - DNA, 29 bp, Homo Sapiens
ctatccattggtcttaggccccaaaaatt

SEQ ID NO: 13394 - DNA, 32 bp, Homo Sapiens
ctatccattggtcttaggccccaaaaattttg

SEQ ID NO: 13395 - DNA, 33 bp, Homo Sapiens
ctatccattggtcttaggccccaaaaattttgg

SEQ ID NO: 13396 - DNA, 35 bp, Homo Sapiens
ctatccattggtcttaggccccaaaaattttggtg

SEQ ID NO: 13397 - DNA, 37 bp, Homo Sapiens
ctatccattggtcttaggccccaaaaattttggtgca

SEQ ID NO: 13398 - DNA, 47 bp, Homo Sapiens
ctatccattggtcttaggccccaaaaattttggtgcaactccaaata

SEQ ID NO: 13399 - DNA, 16 bp, Homo Sapiens
ctatcgggcccatacc

SEQ ID NO: 13400 - DNA, 17 bp, Homo Sapiens
ctatcgggcccataccc

SEQ ID NO: 13401 - DNA, 18 bp, Homo Sapiens
ctatcgggcccatacccc

SEQ ID NO: 13402 - DNA, 19 bp, Homo Sapiens
ctatcgggcccataccccg

SEQ ID NO: 13403 - DNA, 20 bp, Homo Sapiens
ctatcgggcccataccccga

SEQ ID NO: 13404 - DNA, 21 bp, Homo Sapiens
ctatcgggcccataccccgaa

SEQ ID NO: 13405 - DNA, 22 bp, Homo Sapiens
ctatcgggcccataccccgaaa

SEQ ID NO: 13406 - DNA, 23 bp, Homo Sapiens
ctatcgggcccataccccgaaaa

SEQ ID NO: 13407 - DNA, 24 bp, Homo Sapiens
ctatcgggcccataccccgaaaat

SEQ ID NO: 13408 - DNA, 25 bp, Homo Sapiens
ctatcgggcccataccccgaaaatg

SEQ ID NO: 13409 - DNA, 26 bp, Homo Sapiens
ctatcgggcccataccccgaaaatgt

SEQ ID NO: 13410 - DNA, 27 bp, Homo Sapiens
ctatcgggcccataccccgaaaatgtt

SEQ ID NO: 13411 - DNA, 28 bp, Homo Sapiens
ctatcgggcccataccccgaaaatgttg

SEQ ID NO: 13412 - DNA, 29 bp, Homo Sapiens
ctatcgggcccataccccgaaaatgttgg

SEQ ID NO: 13413 - DNA, 30 bp, Homo Sapiens
ctatcgggcccataccccgaaaatgttggt

SEQ ID NO: 13414 - DNA, 31 bp, Homo Sapiens
ctatcgggcccataccccgaaaatgttggtt

SEQ ID NO: 13415 - DNA, 32 bp, Homo Sapiens
ctatcgggcccataccccgaaaatgttggtta

SEQ ID NO: 13416 - DNA, 33 bp, Homo Sapiens
ctatcgggcccataccccgaaaatgttggttat

SEQ ID NO: 13417 - DNA, 34 bp, Homo Sapiens
ctatcgggcccataccccgaaaatgttggttata

SEQ ID NO: 13418 - DNA, 35 bp, Homo Sapiens
ctatcgggcccataccccgaaaatgttggttatac

SEQ ID NO: 13419 - DNA, 36 bp, Homo Sapiens
ctatcgggcccataccccgaaaatgttggttatacc

SEQ ID NO: 13420 - DNA, 37 bp, Homo Sapiens
ctatcgggcccataccccgaaaatgttggttataccc

SEQ ID NO: 13421 - DNA, 38 bp, Homo Sapiens
ctatcgggcccataccccgaaaatgttggttataccct

SEQ ID NO: 13422 - DNA, 40 bp, Homo Sapiens
ctatcgggcccataccccgaaaatgttggttatacccttc

SEQ ID NO: 13423 - DNA, 42 bp, Homo Sapiens
ctatcgggcccataccccgaaaatgttggttatacccttccc

SEQ ID NO: 13424 - DNA, 46 bp, Homo Sapiens
ctatcgggcccataccccgaaaatgttggttatacccttcccgtac

SEQ ID NO: 13425 - DNA, 47 bp, Homo Sapiens
ctatcgggcccataccccgaaaatgttggttatacccttcccgtact

SEQ ID NO: 13426 - DNA, 16 bp, Homo Sapiens
ctcaaagcaatacact

SEQ ID NO: 13427 - DNA, 17 bp, Homo Sapiens
ctcaaagcaatacactg

SEQ ID NO: 13428 - DNA, 18 bp, Homo Sapiens
ctcaaagcaatacactga

SEQ ID NO: 13429 - DNA, 19 bp, Homo Sapiens
ctcaaagcaatacactgaa

SEQ ID NO: 13430 - DNA, 31 bp, Homo Sapiens
ctcaaagcaatacactgaaaatgtttagacg

SEQ ID NO: 13431 - DNA, 35 bp, Homo Sapiens
ctcaaagcaatacactgaaaatgtttagacgggct

SEQ ID NO: 13432 - DNA, 36 bp, Homo Sapiens
ctcaaagcaatacactgaaaatgtttagacgggctc

SEQ ID NO: 13433 - DNA, 37 bp, Homo Sapiens
ctcaaagcaatacactgaaaatgtttagacgggctca

SEQ ID NO: 13434 - DNA, 38 bp, Homo Sapiens
ctcaaagcaatacactgaaaatgtttagacgggctcac

SEQ ID NO: 13435 - DNA, 45 bp, Homo Sapiens
ctcaaagcaatacactgaaaatgtttagacgggctcacatcaccc

SEQ ID NO: 13436 - DNA, 16 bp, Homo Sapiens
ctcaagttctggtctc

SEQ ID NO: 13437 - DNA, 17 bp, Homo Sapiens
ctcaagttctggtctcc

SEQ ID NO: 13438 - DNA, 18 bp, Homo Sapiens
ctcaagttctggtctcca

SEQ ID NO: 13439 - DNA, 21 bp, Homo Sapiens
ctcaagttctggtctccaatg

SEQ ID NO: 13440 - DNA, 32 bp, Homo Sapiens
ctcaagttctggtctccaatggaggcgtgggt

SEQ ID NO: 13441 - DNA, 18 bp, Homo Sapiens
ctcaagttctggtctccg

SEQ ID NO: 13442 - DNA, 19 bp, Homo Sapiens
ctcaagttctggtctccgg

SEQ ID NO: 13443 - DNA, 20 bp, Homo Sapiens
ctcaagttctggtctccgga

SEQ ID NO: 13444 - DNA, 21 bp, Homo Sapiens
ctcaagttctggtctccggat

SEQ ID NO: 13445 - DNA, 22 bp, Homo Sapiens
ctcaagttctggtctccggatg

SEQ ID NO: 13446 - DNA, 28 bp, Homo Sapiens
ctcaagttctggtctccggatggaggcg

SEQ ID NO: 13447 - DNA, 33 bp, Homo Sapiens
ctcaagttctggtctccggatggaggcgtgggt

SEQ ID NO: 13448 - DNA, 16 bp, Homo Sapiens
ctcacaagaactgcta

SEQ ID NO: 13449 - DNA, 17 bp, Homo Sapiens
ctcacaagaactgctaa

SEQ ID NO: 13450 - DNA, 18 bp, Homo Sapiens
ctcacaagaactgctaac

SEQ ID NO: 13451 - DNA, 19 bp, Homo Sapiens
ctcacaagaactgctaact

SEQ ID NO: 13452 - DNA, 20 bp, Homo Sapiens
ctcacaagaactgctaactc

SEQ ID NO: 13453 - DNA, 21 bp, Homo Sapiens
ctcacaagaactgctaactca

SEQ ID NO: 13454 - DNA, 22 bp, Homo Sapiens
ctcacaagaactgctaactcat

SEQ ID NO: 13455 - DNA, 23 bp, Homo Sapiens
ctcacaagaactgctaactcatg

SEQ ID NO: 13456 - DNA, 24 bp, Homo Sapiens
ctcacaagaactgctaactcatgc

SEQ ID NO: 13457 - DNA, 25 bp, Homo Sapiens
ctcacaagaactgctaactcatgcc

SEQ ID NO: 13458 - DNA, 26 bp, Homo Sapiens
ctcacaagaactgctaactcatgccc

SEQ ID NO: 13459 - DNA, 27 bp, Homo Sapiens
ctcacaagaactgctaactcatgcccc

SEQ ID NO: 13460 - DNA, 28 bp, Homo Sapiens
ctcacaagaactgctaactcatgccccc

SEQ ID NO: 13461 - DNA, 29 bp, Homo Sapiens
ctcacaagaactgctaactcatgccccca

SEQ ID NO: 13462 - DNA, 30 bp, Homo Sapiens
ctcacaagaactgctaactcatgcccccat

SEQ ID NO: 13463 - DNA, 31 bp, Homo Sapiens
ctcacaagaactgctaactcatgcccccatg

SEQ ID NO: 13464 - DNA, 32 bp, Homo Sapiens
ctcacaagaactgctaactcatgcccccatgt

SEQ ID NO: 13465 - DNA, 33 bp, Homo Sapiens
ctcacaagaactgctaactcatgcccccatgtc

SEQ ID NO: 13466 - DNA, 34 bp, Homo Sapiens
ctcacaagaactgctaactcatgcccccatgtct

SEQ ID NO: 13467 - DNA, 35 bp, Homo Sapiens
ctcacaagaactgctaactcatgcccccatgtcta

SEQ ID NO: 13468 - DNA, 36 bp, Homo Sapiens
ctcacaagaactgctaactcatgcccccatgtctaa

SEQ ID NO: 13469 - DNA, 37 bp, Homo Sapiens
ctcacaagaactgctaactcatgcccccatgtctaac

SEQ ID NO: 13470 - DNA, 38 bp, Homo Sapiens
ctcacaagaactgctaactcatgcccccatgtctaaca

SEQ ID NO: 13471 - DNA, 39 bp, Homo Sapiens
ctcacaagaactgctaactcatgcccccatgtctaacaa

SEQ ID NO: 13472 - DNA, 40 bp, Homo Sapiens
ctcacaagaactgctaactcatgcccccatgtctaacaac

SEQ ID NO: 13473 - DNA, 41 bp, Homo Sapiens
ctcacaagaactgctaactcatgcccccatgtctaacaaca

SEQ ID NO: 13474 - DNA, 42 bp, Homo Sapiens
ctcacaagaactgctaactcatgcccccatgtctaacaacat

SEQ ID NO: 13475 - DNA, 43 bp, Homo Sapiens
ctcacaagaactgctaactcatgcccccatgtctaacaacatg

SEQ ID NO: 13476 - DNA, 44 bp, Homo Sapiens
ctcacaagaactgctaactcatgcccccatgtctaacaacatgg

SEQ ID NO: 13477 - DNA, 45 bp, Homo Sapiens
ctcacaagaactgctaactcatgcccccatgtctaacaacatggc

SEQ ID NO: 13478 - DNA, 46 bp, Homo Sapiens
ctcacaagaactgctaactcatgcccccatgtctaacaacatggct

SEQ ID NO: 13479 - DNA, 47 bp, Homo Sapiens
ctcacaagaactgctaactcatgcccccatgtctaacaacatggctt

SEQ ID NO: 13480 - DNA, 48 bp, Homo Sapiens
ctcacaagaactgctaactcatgcccccatgtctaacaacatggcttt

SEQ ID NO: 13481 - DNA, 23 bp, Homo Sapiens
ctcacacgcgaaaggtccccggt

SEQ ID NO: 13482 - DNA, 16 bp, Homo Sapiens
ctcacacggggcacca

SEQ ID NO: 13483 - DNA, 16 bp, Homo Sapiens
ctcacatcaccccata

SEQ ID NO: 13484 - DNA, 17 bp, Homo Sapiens
ctcacatcaccccataa

SEQ ID NO: 13485 - DNA, 18 bp, Homo Sapiens
ctcacatcaccccataaa

SEQ ID NO: 13486 - DNA, 19 bp, Homo Sapiens
ctcacatcaccccataaac

SEQ ID NO: 13487 - DNA, 20 bp, Homo Sapiens
ctcacatcaccccataaaca

SEQ ID NO: 13488 - DNA, 21 bp, Homo Sapiens
ctcacatcaccccataaacac

SEQ ID NO: 13489 - DNA, 22 bp, Homo Sapiens
ctcacatcaccccataaacacc

SEQ ID NO: 13490 - DNA, 23 bp, Homo Sapiens
ctcacatcaccccataaacacca

SEQ ID NO: 13491 - DNA, 16 bp, Homo Sapiens
ctcaccgccgcggccc

SEQ ID NO: 13492 - DNA, 17 bp, Homo Sapiens
ctcaccgccgcggcccg

SEQ ID NO: 13493 - DNA, 18 bp, Homo Sapiens
ctcaccgccgcggcccgg

SEQ ID NO: 13494 - DNA, 20 bp, Homo Sapiens
ctcaccgccgcggcccgggt

SEQ ID NO: 13495 - DNA, 21 bp, Homo Sapiens
ctcaccgccgcggcccgggtt

SEQ ID NO: 13496 - DNA, 22 bp, Homo Sapiens
ctcaccgccgcggcccgggttc

SEQ ID NO: 13497 - DNA, 23 bp, Homo Sapiens
ctcaccgccgcggcccgggttcg

SEQ ID NO: 13498 - DNA, 25 bp, Homo Sapiens
ctcaccgccgcggcccgggttcgat

SEQ ID NO: 13499 - DNA, 27 bp, Homo Sapiens
ctcaccgccgcggcccgggttcgattc

SEQ ID NO: 13500 - DNA, 30 bp, Homo Sapiens
ctcaccgccgcggcccgggttcgattcccg

SEQ ID NO: 13501 - DNA, 31 bp, Homo Sapiens
ctcaccgccgcggcccgggttcgattcccgg

SEQ ID NO: 13502 - DNA, 32 bp, Homo Sapiens
ctcaccgccgcggcccgggttcgattcccggt

SEQ ID NO: 13503 - DNA, 33 bp, Homo Sapiens
ctcaccgccgcggcccgggttcgattcccggtc

SEQ ID NO: 13504 - DNA, 34 bp, Homo Sapiens
ctcaccgccgcggcccgggttcgattcccggtca

SEQ ID NO: 13505 - DNA, 35 bp, Homo Sapiens
ctcaccgccgcggcccgggttcgattcccggtcag

SEQ ID NO: 13506 - DNA, 36 bp, Homo Sapiens
ctcaccgccgcggcccgggttcgattcccggtcagg

SEQ ID NO: 13507 - DNA, 38 bp, Homo Sapiens
ctcaccgccgcggcccgggttcgattcccggtcaggga

SEQ ID NO: 13508 - DNA, 39 bp, Homo Sapiens
ctcaccgccgcggcccgggttcgattcccggtcagggaa

SEQ ID NO: 13509 - DNA, 40 bp, Homo Sapiens
ctcaccgccgcggcccgggttcgattcccggtcagggaac

SEQ ID NO: 13510 - DNA, 41 bp, Homo Sapiens
ctcaccgccgcggcccgggttcgattcccggtcagggaacc

SEQ ID NO: 13511 - DNA, 42 bp, Homo Sapiens
ctcaccgccgcggcccgggttcgattcccggtcagggaacca

SEQ ID NO: 13512 - DNA, 16 bp, Homo Sapiens
ctcacctggagcacca

SEQ ID NO: 13513 - DNA, 16 bp, Homo Sapiens
ctcagagagggcacca

SEQ ID NO: 13514 - DNA, 16 bp, Homo Sapiens
ctcagagggggcacca

SEQ ID NO: 13515 - DNA, 16 bp, Homo Sapiens
ctcagggatgggttcg

SEQ ID NO: 13516 - DNA, 18 bp, Homo Sapiens
ctcagggatgggttcgat

SEQ ID NO: 13517 - DNA, 19 bp, Homo Sapiens
ctcagggatgggttcgatt

SEQ ID NO: 13518 - DNA, 20 bp, Homo Sapiens
ctcagggatgggttcgattc

SEQ ID NO: 13519 - DNA, 21 bp, Homo Sapiens
ctcagggatgggttcgattct

SEQ ID NO: 13520 - DNA, 22 bp, Homo Sapiens
ctcagggatgggttcgattctc

SEQ ID NO: 13521 - DNA, 28 bp, Homo Sapiens
ctcagggatgggttcgattctcatagtc

SEQ ID NO: 13522 - DNA, 29 bp, Homo Sapiens
ctcagggatgggttcgattctcatagtcc

SEQ ID NO: 13523 - DNA, 30 bp, Homo Sapiens
ctcagggatgggttcgattctcatagtcct

SEQ ID NO: 13524 - DNA, 32 bp, Homo Sapiens
ctcagggatgggttcgattctcatagtcctag

SEQ ID NO: 13525 - DNA, 33 bp, Homo Sapiens
ctcagggatgggttcgattctcatagtcctagc

SEQ ID NO: 13526 - DNA, 34 bp, Homo Sapiens
ctcagggatgggttcgattctcatagtcctagcc

SEQ ID NO: 13527 - DNA, 35 bp, Homo Sapiens
ctcagggatgggttcgattctcatagtcctagcca

SEQ ID NO: 13528 - DNA, 16 bp, Homo Sapiens
ctcaggggtagagcat

SEQ ID NO: 13529 - DNA, 20 bp, Homo Sapiens
ctcaggggtagagcatttga

SEQ ID NO: 13530 - DNA, 22 bp, Homo Sapiens
ctcaggggtagagcatttgact

SEQ ID NO: 13531 - DNA, 23 bp, Homo Sapiens
ctcaggggtagagcatttgactg

SEQ ID NO: 13532 - DNA, 18 bp, Homo Sapiens
ctcaggggttagagcact

SEQ ID NO: 13533 - DNA, 19 bp, Homo Sapiens
ctcaggggttagagcactg

SEQ ID NO: 13534 - DNA, 22 bp, Homo Sapiens
ctcaggggttagagcactggtc

SEQ ID NO: 13535 - DNA, 23 bp, Homo Sapiens
ctcaggggttagagcactggtct

SEQ ID NO: 13536 - DNA, 17 bp, Homo Sapiens
ctcagggtcgtgggttc

SEQ ID NO: 13537 - DNA, 18 bp, Homo Sapiens
ctcagggtcgtgggttcg

SEQ ID NO: 13538 - DNA, 33 bp, Homo Sapiens
ctcagggtcgtgggttcgagccccacgttgggc

SEQ ID NO: 13539 - DNA, 34 bp, Homo Sapiens
ctcagggtcgtgggttcgagccccacgttgggcg

SEQ ID NO: 13540 - DNA, 35 bp, Homo Sapiens
ctcagggtcgtgggttcgagccccacgttgggcgc

SEQ ID NO: 13541 - DNA, 36 bp, Homo Sapiens
ctcagggtcgtgggttcgagccccacgttgggcgcc

SEQ ID NO: 13542 - DNA, 37 bp, Homo Sapiens
ctcagggtcgtgggttcgagccccacgttgggcgcca

SEQ ID NO: 13543 - DNA, 16 bp, Homo Sapiens
ctcagtaagttgcaat

SEQ ID NO: 13544 - DNA, 17 bp, Homo Sapiens
ctcagtaagttgcaata

SEQ ID NO: 13545 - DNA, 18 bp, Homo Sapiens
ctcagtaagttgcaatac

SEQ ID NO: 13546 - DNA, 19 bp, Homo Sapiens
ctcagtaagttgcaatact

SEQ ID NO: 13547 - DNA, 20 bp, Homo Sapiens
ctcagtaagttgcaatactt

SEQ ID NO: 13548 - DNA, 21 bp, Homo Sapiens
ctcagtaagttgcaatactta

SEQ ID NO: 13549 - DNA, 22 bp, Homo Sapiens
ctcagtaagttgcaatacttaa

SEQ ID NO: 13550 - DNA, 23 bp, Homo Sapiens
ctcagtaagttgcaatacttaat

SEQ ID NO: 13551 - DNA, 24 bp, Homo Sapiens
ctcagtaagttgcaatacttaatt

SEQ ID NO: 13552 - DNA, 25 bp, Homo Sapiens
ctcagtaagttgcaatacttaattt

SEQ ID NO: 13553 - DNA, 26 bp, Homo Sapiens
ctcagtaagttgcaatacttaatttc

SEQ ID NO: 13554 - DNA, 27 bp, Homo Sapiens
ctcagtaagttgcaatacttaatttct

SEQ ID NO: 13555 - DNA, 28 bp, Homo Sapiens
ctcagtaagttgcaatacttaatttctg

SEQ ID NO: 13556 - DNA, 29 bp, Homo Sapiens
ctcagtaagttgcaatacttaatttctgc

SEQ ID NO: 13557 - DNA, 30 bp, Homo Sapiens
ctcagtaagttgcaatacttaatttctgcc

SEQ ID NO: 13558 - DNA, 31 bp, Homo Sapiens
ctcagtaagttgcaatacttaatttctgcca

SEQ ID NO: 13559 - DNA, 24 bp, Homo Sapiens
ctcagtcgatagagcatgagactc

SEQ ID NO: 13560 - DNA, 16 bp, Homo Sapiens
ctcagtcggtagagca

SEQ ID NO: 13561 - DNA, 17 bp, Homo Sapiens
ctcagtcggtagagcat

SEQ ID NO: 13562 - DNA, 18 bp, Homo Sapiens
ctcagtcggtagagcatc

SEQ ID NO: 13563 - DNA, 19 bp, Homo Sapiens
ctcagtcggtagagcatca

SEQ ID NO: 13564 - DNA, 20 bp, Homo Sapiens
ctcagtcggtagagcatcag

SEQ ID NO: 13565 - DNA, 21 bp, Homo Sapiens
ctcagtcggtagagcatcaga

SEQ ID NO: 13566 - DNA, 22 bp, Homo Sapiens
ctcagtcggtagagcatcagac

SEQ ID NO: 13567 - DNA, 23 bp, Homo Sapiens
ctcagtcggtagagcatcagact

SEQ ID NO: 13568 - DNA, 24 bp, Homo Sapiens
ctcagtcggtagagcatcagactt

SEQ ID NO: 13569 - DNA, 25 bp, Homo Sapiens
ctcagtcggtagagcatcagacttt

SEQ ID NO: 13570 - DNA, 26 bp, Homo Sapiens
ctcagtcggtagagcatcagactttt

SEQ ID NO: 13571 - DNA, 18 bp, Homo Sapiens
ctcagtcggtagagcatg

SEQ ID NO: 13572 - DNA, 19 bp, Homo Sapiens
ctcagtcggtagagcatga

SEQ ID NO: 13573 - DNA, 21 bp, Homo Sapiens
ctcagtcggtagagcatgaga

SEQ ID NO: 13574 - DNA, 22 bp, Homo Sapiens
ctcagtcggtagagcatgagac

SEQ ID NO: 13575 - DNA, 23 bp, Homo Sapiens
ctcagtcggtagagcatgagacc

SEQ ID NO: 13576 - DNA, 24 bp, Homo Sapiens
ctcagtcggtagagcatgagaccc

SEQ ID NO: 13577 - DNA, 25 bp, Homo Sapiens
ctcagtcggtagagcatgagaccct

SEQ ID NO: 13578 - DNA, 23 bp, Homo Sapiens
ctcagtcggtagagcatgagact

SEQ ID NO: 13579 - DNA, 24 bp, Homo Sapiens
ctcagtcggtagagcatgagactc

SEQ ID NO: 13580 - DNA, 25 bp, Homo Sapiens
ctcagtcggtagagcatgagactct

SEQ ID NO: 13581 - DNA, 26 bp, Homo Sapiens
ctcagtcggtagagcatgagactctt

SEQ ID NO: 13582 - DNA, 27 bp, Homo Sapiens
ctcagtcggtagagcatgagactctta

SEQ ID NO: 13583 - DNA, 28 bp, Homo Sapiens
ctcagtcggtagagcatgagactcttaa

SEQ ID NO: 13584 - DNA, 29 bp, Homo Sapiens
ctcagtcggtagagcatgagactcttaat

SEQ ID NO: 13585 - DNA, 30 bp, Homo Sapiens
ctcagtcggtagagcatgagactcttaatc

SEQ ID NO: 13586 - DNA, 31 bp, Homo Sapiens
ctcagtcggtagagcatgagactcttaatct

SEQ ID NO: 13587 - DNA, 32 bp, Homo Sapiens
ctcagtcggtagagcatgagactcttaatctc

SEQ ID NO: 13588 - DNA, 42 bp, Homo Sapiens
ctcagtcggtagagcatgagactcttaatctcagggtcgtgg

SEQ ID NO: 13589 - DNA, 45 bp, Homo Sapiens
ctcagtcggtagagcatgagactcttaatctcagggtcgtgggtt

SEQ ID NO: 13590 - DNA, 19 bp, Homo Sapiens
ctcagtcggtagagcatgg

SEQ ID NO: 13591 - DNA, 20 bp, Homo Sapiens
ctcagtcggtagagcatggg

SEQ ID NO: 13592 - DNA, 21 bp, Homo Sapiens
ctcagtcggtagagcatggga

SEQ ID NO: 13593 - DNA, 22 bp, Homo Sapiens
ctcagtcggtagagcatgggac

SEQ ID NO: 13594 - DNA, 23 bp, Homo Sapiens
ctcagtcggtagagcatgggact

SEQ ID NO: 13595 - DNA, 24 bp, Homo Sapiens
ctcagtcggtagagcatgggactc

SEQ ID NO: 13596 - DNA, 25 bp, Homo Sapiens
ctcagtcggtagagcatgggactct

SEQ ID NO: 13597 - DNA, 26 bp, Homo Sapiens
ctcagtcggtagagcatgggactctt

SEQ ID NO: 13598 - DNA, 27 bp, Homo Sapiens
ctcagtcggtagagcatgggactctta

SEQ ID NO: 13599 - DNA, 28 bp, Homo Sapiens
ctcagtcggtagagcatgggactcttaa

SEQ ID NO: 13600 - DNA, 29 bp, Homo Sapiens
ctcagtcggtagagcatgggactcttaat

SEQ ID NO: 13601 - DNA, 31 bp, Homo Sapiens
ctcagtcggtagagcatgggactcttaatcc

SEQ ID NO: 13602 - DNA, 32 bp, Homo Sapiens
ctcagtcggtagagcatgggactcttaatccc

SEQ ID NO: 13603 - DNA, 42 bp, Homo Sapiens
ctcagtcggtagagcatgggactcttaatcccagggtcgtgg

SEQ ID NO: 13604 - DNA, 45 bp, Homo Sapiens
ctcagtcggtagagcatgggactcttaatcccagggtcgtgggtt

SEQ ID NO: 13605 - DNA, 33 bp, Homo Sapiens
ctcagtcggtagagcatgggactcttaatctca

SEQ ID NO: 13606 - DNA, 16 bp, Homo Sapiens
ctcagtcggtagagct

SEQ ID NO: 13607 - DNA, 16 bp, Homo Sapiens
ctcagtggtagagcat

SEQ ID NO: 13608 - DNA, 18 bp, Homo Sapiens
ctcagtggtagagcattt

SEQ ID NO: 13609 - DNA, 20 bp, Homo Sapiens
ctcagtggtagagcatttga

SEQ ID NO: 13610 - DNA, 22 bp, Homo Sapiens
ctcagtggtagagcatttgact

SEQ ID NO: 13611 - DNA, 24 bp, Homo Sapiens
ctcagtggtagagcatttgactgc

SEQ ID NO: 13612 - DNA, 25 bp, Homo Sapiens
ctcagtggtagagcatttgactgca

SEQ ID NO: 13613 - DNA, 17 bp, Homo Sapiens
ctcagtggtagagcgca

SEQ ID NO: 13614 - DNA, 18 bp, Homo Sapiens
ctcagtggtagagcgcat

SEQ ID NO: 13615 - DNA, 18 bp, Homo Sapiens
ctcagtggttagagcact

SEQ ID NO: 13616 - DNA, 25 bp, Homo Sapiens
ctcagttggtagagcatgggactct

SEQ ID NO: 13617 - DNA, 26 bp, Homo Sapiens
ctcagttggtagagcatgggactctt

SEQ ID NO: 13618 - DNA, 17 bp, Homo Sapiens
ctcataatctgaaggtc

SEQ ID NO: 13619 - DNA, 19 bp, Homo Sapiens
ctcataatctgaaggtcct

SEQ ID NO: 13620 - DNA, 22 bp, Homo Sapiens
ctcataatctgaaggtcctgag

SEQ ID NO: 13621 - DNA, 23 bp, Homo Sapiens
ctcataatctgaaggtcctgagt

SEQ ID NO: 13622 - DNA, 25 bp, Homo Sapiens
ctcataatctgaaggtcctgagttc

SEQ ID NO: 13623 - DNA, 31 bp, Homo Sapiens
ctcataatctgaaggtcctgagttcgaacct

SEQ ID NO: 13624 - DNA, 44 bp, Homo Sapiens
ctcataatctgaaggtcctgagttcgaacctcagagggggcacc

SEQ ID NO: 13625 - DNA, 45 bp, Homo Sapiens
ctcataatctgaaggtcctgagttcgaacctcagagggggcacca

SEQ ID NO: 13626 - DNA, 18 bp, Homo Sapiens
ctcataatctgaaggtcg

SEQ ID NO: 13627 - DNA, 20 bp, Homo Sapiens
ctcataatctgaaggtcgtg

SEQ ID NO: 13628 - DNA, 23 bp, Homo Sapiens
ctcataatctgaaggtcgtgagt

SEQ ID NO: 13629 - DNA, 39 bp, Homo Sapiens
ctcataatctgaaggtcgtgagttcgagcctcacacggg

SEQ ID NO: 13630 - DNA, 44 bp, Homo Sapiens
ctcataatctgaaggtcgtgagttcgatcctcacacggggcacc

SEQ ID NO: 13631 - DNA, 16 bp, Homo Sapiens
ctcatagtcctagcca

SEQ ID NO: 13632 - DNA, 16 bp, Homo Sapiens
ctcatgcccccatgtc

SEQ ID NO: 13633 - DNA, 17 bp, Homo Sapiens
ctcatgcccccatgtct

SEQ ID NO: 13634 - DNA, 18 bp, Homo Sapiens
ctcatgcccccatgtcta

SEQ ID NO: 13635 - DNA, 19 bp, Homo Sapiens
ctcatgcccccatgtctaa

SEQ ID NO: 13636 - DNA, 20 bp, Homo Sapiens
ctcatgcccccatgtctaac

SEQ ID NO: 13637 - DNA, 21 bp, Homo Sapiens
ctcatgcccccatgtctaaca

SEQ ID NO: 13638 - DNA, 23 bp, Homo Sapiens
ctcatgcccccatgtctaacaac

SEQ ID NO: 13639 - DNA, 24 bp, Homo Sapiens
ctcatgcccccatgtctaacaaca

SEQ ID NO: 13640 - DNA, 25 bp, Homo Sapiens
ctcatgcccccatgtctaacaacat

SEQ ID NO: 13641 - DNA, 26 bp, Homo Sapiens
ctcatgcccccatgtctaacaacatg

SEQ ID NO: 13642 - DNA, 27 bp, Homo Sapiens
ctcatgcccccatgtctaacaacatgg

SEQ ID NO: 13643 - DNA, 28 bp, Homo Sapiens
ctcatgcccccatgtctaacaacatggc

SEQ ID NO: 13644 - DNA, 29 bp, Homo Sapiens
ctcatgcccccatgtctaacaacatggct

SEQ ID NO: 13645 - DNA, 30 bp, Homo Sapiens
ctcatgcccccatgtctaacaacatggctt

SEQ ID NO: 13646 - DNA, 31 bp, Homo Sapiens
ctcatgcccccatgtctaacaacatggcttt

SEQ ID NO: 13647 - DNA, 32 bp, Homo Sapiens
ctcatgcccccatgtctaacaacatggctttc

SEQ ID NO: 13648 - DNA, 33 bp, Homo Sapiens
ctcatgcccccatgtctaacaacatggctttct

SEQ ID NO: 13649 - DNA, 34 bp, Homo Sapiens
ctcatgcccccatgtctaacaacatggctttctc

SEQ ID NO: 13650 - DNA, 35 bp, Homo Sapiens
ctcatgcccccatgtctaacaacatggctttctca

SEQ ID NO: 13651 - DNA, 36 bp, Homo Sapiens
ctcatgcccccatgtctaacaacatggctttctcac

SEQ ID NO: 13652 - DNA, 37 bp, Homo Sapiens
ctcatgcccccatgtctaacaacatggctttctcacc

SEQ ID NO: 13653 - DNA, 38 bp, Homo Sapiens
ctcatgcccccatgtctaacaacatggctttctcacca

SEQ ID NO: 13654 - DNA, 33 bp, Homo Sapiens
ctcattaaattatgataatcatatttaccaacc

SEQ ID NO: 13655 - DNA, 16 bp, Homo Sapiens
ctccaaataaaagtac

SEQ ID NO: 13656 - DNA, 17 bp, Homo Sapiens
ctccaaataaaagtacc

SEQ ID NO: 13657 - DNA, 18 bp, Homo Sapiens
ctccaaataaaagtacca

SEQ ID NO: 13658 - DNA, 35 bp, Homo Sapiens
ctccaatggaggcgtgggttcgaatcccacttctg

SEQ ID NO: 13659 - DNA, 17 bp, Homo Sapiens
ctccagatcagaaggct

SEQ ID NO: 13660 - DNA, 18 bp, Homo Sapiens
ctccagatcagaaggctg

SEQ ID NO: 13661 - DNA, 19 bp, Homo Sapiens
ctccagatcagaaggctgc

SEQ ID NO: 13662 - DNA, 20 bp, Homo Sapiens
ctccagatcagaaggctgcg

SEQ ID NO: 13663 - DNA, 21 bp, Homo Sapiens
ctccagatcagaaggctgcgt

SEQ ID NO: 13664 - DNA, 22 bp, Homo Sapiens
ctccagatcagaaggctgcgtg

SEQ ID NO: 13665 - DNA, 24 bp, Homo Sapiens
ctccagatcagaaggctgcgtgtt

SEQ ID NO: 13666 - DNA, 25 bp, Homo Sapiens
ctccagatcagaaggctgcgtgttc

SEQ ID NO: 13667 - DNA, 26 bp, Homo Sapiens
ctccagatcagaaggctgcgtgttcg

SEQ ID NO: 13668 - DNA, 29 bp, Homo Sapiens
ctccagatcagaaggctgcgtgttcgaat

SEQ ID NO: 13669 - DNA, 30 bp, Homo Sapiens
ctccagatcagaaggctgcgtgttcgaatc

SEQ ID NO: 13670 - DNA, 39 bp, Homo Sapiens
ctccagatcagaaggctgcgtgttcgaatcacgtcgggg

SEQ ID NO: 13671 - DNA, 40 bp, Homo Sapiens
ctccagatcagaaggctgcgtgttcgaatcacgtcggggt

SEQ ID NO: 13672 - DNA, 44 bp, Homo Sapiens
ctccagatcagaaggctgcgtgttcgaatcacgtcggggtcacc

SEQ ID NO: 13673 - DNA, 19 bp, Homo Sapiens
ctccagatcagaaggttgc

SEQ ID NO: 13674 - DNA, 25 bp, Homo Sapiens
ctccagatcagaaggttgcgtgttc

SEQ ID NO: 13675 - DNA, 38 bp, Homo Sapiens
ctccagatcagaaggttgcgtgttcaagtcacgtcggg

SEQ ID NO: 13676 - DNA, 17 bp, Homo Sapiens
ctccagtcatttcgatg

SEQ ID NO: 13677 - DNA, 46 bp, Homo Sapiens
ctccagtcatttcgatggcgtgggttcgaatcccaccgctgccacc

SEQ ID NO: 13678 - DNA, 47 bp, Homo Sapiens
ctccagtcatttcgatggcgtgggttcgaatcccaccgctgccacca

SEQ ID NO: 13679 - DNA, 16 bp, Homo Sapiens
ctccagtctcttcgga

SEQ ID NO: 13680 - DNA, 45 bp, Homo Sapiens
ctccagtctcttcggaggcgtgggttcgaatcccaccgctgccac

SEQ ID NO: 13681 - DNA, 46 bp, Homo Sapiens
ctccagtctcttcggaggcgtgggttcgaatcccaccgctgccacc

SEQ ID NO: 13682 - DNA, 16 bp, Homo Sapiens
ctccagtctcttcggg

SEQ ID NO: 13683 - DNA, 17 bp, Homo Sapiens
ctccagtctcttcgggg

SEQ ID NO: 13684 - DNA, 18 bp, Homo Sapiens
ctccagtctcttcggggg

SEQ ID NO: 13685 - DNA, 20 bp, Homo Sapiens
ctccagtctcttcgggggcg

SEQ ID NO: 13686 - DNA, 25 bp, Homo Sapiens
ctccagtctcttcgggggcgtgggt

SEQ ID NO: 13687 - DNA, 44 bp, Homo Sapiens
ctccagtctcttcgggggcgtgggttcgaatcccaccgctgcca

SEQ ID NO: 13688 - DNA, 45 bp, Homo Sapiens
ctccagtctcttcgggggcgtgggttcgaatcccaccgctgccac

SEQ ID NO: 13689 - DNA, 46 bp, Homo Sapiens
ctccagtctcttcgggggcgtgggttcgaatcccaccgctgccacc

SEQ ID NO: 13690 - DNA, 47 bp, Homo Sapiens
ctccagtctcttcgggggcgtgggttcgaatcccaccgctgccacca

SEQ ID NO: 13691 - DNA, 16 bp, Homo Sapiens
ctccatagctcagggg

SEQ ID NO: 13692 - DNA, 17 bp, Homo Sapiens
ctccatagctcaggggt

SEQ ID NO: 13693 - DNA, 27 bp, Homo Sapiens
ctccatagctcaggggttagagcactg

SEQ ID NO: 13694 - DNA, 28 bp, Homo Sapiens
ctccatagctcaggggttagagcactgg

SEQ ID NO: 13695 - DNA, 30 bp, Homo Sapiens
ctccatagctcaggggttagagcactggtc

SEQ ID NO: 13696 - DNA, 31 bp, Homo Sapiens
ctccatagctcaggggttagagcactggtct

SEQ ID NO: 13697 - DNA, 32 bp, Homo Sapiens
ctccatagctcaggggttagagcactggtctt

SEQ ID NO: 13698 - DNA, 33 bp, Homo Sapiens
ctccatagctcaggggttagagcactggtcttg

SEQ ID NO: 13699 - DNA, 34 bp, Homo Sapiens
ctccatagctcaggggttagagcactggtcttgt

SEQ ID NO: 13700 - DNA, 39 bp, Homo Sapiens
ctccatagctcaggggttagagcactggtcttgtaaacc

SEQ ID NO: 13701 - DNA, 27 bp, Homo Sapiens
ctccatagctcagtggttagagcactg

SEQ ID NO: 13702 - DNA, 34 bp, Homo Sapiens
ctccatagctcagtggttagagcactggtcttgt

SEQ ID NO: 13703 - DNA, 27 bp, Homo Sapiens
ctcccacatggtctagcggttaggatt

SEQ ID NO: 13704 - DNA, 30 bp, Homo Sapiens
ctcccacatggtctagcggttaggattcct

SEQ ID NO: 13705 - DNA, 34 bp, Homo Sapiens
ctcccacatggtctagcggttaggattcctggtt

SEQ ID NO: 13706 - DNA, 36 bp, Homo Sapiens
ctcccacatggtctagcggttaggattcctggtttt

SEQ ID NO: 13707 - DNA, 16 bp, Homo Sapiens
ctcccagtggggcctc

SEQ ID NO: 13708 - DNA, 17 bp, Homo Sapiens
ctcccagtggggcctcc

SEQ ID NO: 13709 - DNA, 34 bp, Homo Sapiens
ctcccatatggtctagcggttaggattcctggtt

SEQ ID NO: 13710 - DNA, 36 bp, Homo Sapiens
ctcccatatggtctagcggttaggattcctggtttt

SEQ ID NO: 13711 - DNA, 23 bp, Homo Sapiens
ctccccgcgcaggttcgaaccct

SEQ ID NO: 13712 - DNA, 22 bp, Homo Sapiens
ctccccgcgcaggttcgaatcc

SEQ ID NO: 13713 - DNA, 23 bp, Homo Sapiens
ctccccgcgcaggttcgaatcct

SEQ ID NO: 13714 - DNA, 38 bp, Homo Sapiens
ctcccctggaggcgtgggttcgaatcccacttctgaca

SEQ ID NO: 13715 - DNA, 16 bp, Homo Sapiens
ctcccggtatgggaac

SEQ ID NO: 13716 - DNA, 17 bp, Homo Sapiens
ctcccggtatgggaacc

SEQ ID NO: 13717 - DNA, 16 bp, Homo Sapiens
ctcccggtgtgggaac

SEQ ID NO: 13718 - DNA, 17 bp, Homo Sapiens
ctcccggtgtgggaacc

SEQ ID NO: 13719 - DNA, 18 bp, Homo Sapiens
ctcccggtgtgggaacca

SEQ ID NO: 13720 - DNA, 34 bp, Homo Sapiens
ctccctggtggtctagtggctaggattcggcgct

SEQ ID NO: 13721 - DNA, 37 bp, Homo Sapiens
ctccctggtggtctagtggctaggattcggcgctttc

SEQ ID NO: 13722 - DNA, 27 bp, Homo Sapiens
ctccctggtggtctagtggttaggatt

SEQ ID NO: 13723 - DNA, 29 bp, Homo Sapiens
ctccctggtggtctagtggttaggattcg

SEQ ID NO: 13724 - DNA, 31 bp, Homo Sapiens
ctccctggtggtctagtggttaggattcggc

SEQ ID NO: 13725 - DNA, 32 bp, Homo Sapiens
ctccctggtggtctagtggttaggattcggcg

SEQ ID NO: 13726 - DNA, 33 bp, Homo Sapiens
ctccctggtggtctagtggttaggattcggcgc

SEQ ID NO: 13727 - DNA, 34 bp, Homo Sapiens
ctccctggtggtctagtggttaggattcggcgct

SEQ ID NO: 13728 - DNA, 35 bp, Homo Sapiens
ctccctggtggtctagtggttaggattcggcgctc

SEQ ID NO: 13729 - DNA, 36 bp, Homo Sapiens
ctccctggtggtctagtggttaggattcggcgctct

SEQ ID NO: 13730 - DNA, 37 bp, Homo Sapiens
ctccctggtggtctagtggttaggattcggcgctctc

SEQ ID NO: 13731 - DNA, 38 bp, Homo Sapiens
ctccctggtggtctagtggttaggattcggcgctctca

SEQ ID NO: 13732 - DNA, 40 bp, Homo Sapiens
ctccctggtggtctagtggttaggattcggcgctctcacc

SEQ ID NO: 13733 - DNA, 41 bp, Homo Sapiens
ctccctggtggtctagtggttaggattcggcgctctcaccg

SEQ ID NO: 13734 - DNA, 16 bp, Homo Sapiens
ctccgaggtgattttc

SEQ ID NO: 13735 - DNA, 17 bp, Homo Sapiens
ctccgaggtgattttca

SEQ ID NO: 13736 - DNA, 18 bp, Homo Sapiens
ctccgaggtgattttcat

SEQ ID NO: 13737 - DNA, 19 bp, Homo Sapiens
ctccgaggtgattttcata

SEQ ID NO: 13738 - DNA, 20 bp, Homo Sapiens
ctccgaggtgattttcatat

SEQ ID NO: 13739 - DNA, 21 bp, Homo Sapiens
ctccgaggtgattttcatatt

SEQ ID NO: 13740 - DNA, 22 bp, Homo Sapiens
ctccgaggtgattttcatattg

SEQ ID NO: 13741 - DNA, 23 bp, Homo Sapiens
ctccgaggtgattttcatattga

SEQ ID NO: 13742 - DNA, 24 bp, Homo Sapiens
ctccgaggtgattttcatattgaa

SEQ ID NO: 13743 - DNA, 25 bp, Homo Sapiens
ctccgaggtgattttcatattgaat

SEQ ID NO: 13744 - DNA, 26 bp, Homo Sapiens
ctccgaggtgattttcatattgaatt

SEQ ID NO: 13745 - DNA, 27 bp, Homo Sapiens
ctccgaggtgattttcatattgaattg

SEQ ID NO: 13746 - DNA, 28 bp, Homo Sapiens
ctccgaggtgattttcatattgaattgc

SEQ ID NO: 13747 - DNA, 29 bp, Homo Sapiens
ctccgaggtgattttcatattgaattgca

SEQ ID NO: 13748 - DNA, 30 bp, Homo Sapiens
ctccgaggtgattttcatattgaattgcaa

SEQ ID NO: 13749 - DNA, 31 bp, Homo Sapiens
ctccgaggtgattttcatattgaattgcaaa

SEQ ID NO: 13750 - DNA, 32 bp, Homo Sapiens
ctccgaggtgattttcatattgaattgcaaat

SEQ ID NO: 13751 - DNA, 33 bp, Homo Sapiens
ctccgaggtgattttcatattgaattgcaaatt

SEQ ID NO: 13752 - DNA, 34 bp, Homo Sapiens
ctccgaggtgattttcatattgaattgcaaattc

SEQ ID NO: 13753 - DNA, 35 bp, Homo Sapiens
ctccgaggtgattttcatattgaattgcaaattcg

SEQ ID NO: 13754 - DNA, 36 bp, Homo Sapiens
ctccgaggtgattttcatattgaattgcaaattcga

SEQ ID NO: 13755 - DNA, 37 bp, Homo Sapiens
ctccgaggtgattttcatattgaattgcaaattcgaa

SEQ ID NO: 13756 - DNA, 38 bp, Homo Sapiens
ctccgaggtgattttcatattgaattgcaaattcgaag

SEQ ID NO: 13757 - DNA, 40 bp, Homo Sapiens
ctccgaggtgattttcatattgaattgcaaattcgaagaa

SEQ ID NO: 13758 - DNA, 41 bp, Homo Sapiens
ctccgaggtgattttcatattgaattgcaaattcgaagaag

SEQ ID NO: 13759 - DNA, 42 bp, Homo Sapiens
ctccgaggtgattttcatattgaattgcaaattcgaagaagc

SEQ ID NO: 13760 - DNA, 44 bp, Homo Sapiens
ctccgaggtgattttcatattgaattgcaaattcgaagaagcag

SEQ ID NO: 13761 - DNA, 45 bp, Homo Sapiens
ctccgaggtgattttcatattgaattgcaaattcgaagaagcagc

SEQ ID NO: 13762 - DNA, 46 bp, Homo Sapiens
ctccgaggtgattttcatattgaattgcaaattcgaagaagcagct

SEQ ID NO: 13763 - DNA, 47 bp, Homo Sapiens
ctccgaggtgattttcatattgaattgcaaattcgaagaagcagctt

SEQ ID NO: 13764 - DNA, 48 bp, Homo Sapiens
ctccgaggtgattttcatattgaattgcaaattcgaagaagcagcttc

SEQ ID NO: 13765 - DNA, 26 bp, Homo Sapiens
ctccggagctggggattgtgggttcg

SEQ ID NO: 13766 - DNA, 16 bp, Homo Sapiens
ctccggatggaggcgt

SEQ ID NO: 13767 - DNA, 20 bp, Homo Sapiens
ctccggatggaggcgtgggt

SEQ ID NO: 13768 - DNA, 16 bp, Homo Sapiens
ctccgtggcgcaatgg

SEQ ID NO: 13769 - DNA, 17 bp, Homo Sapiens
ctccgtggcgcaatgga

SEQ ID NO: 13770 - DNA, 27 bp, Homo Sapiens
ctccgtggcgcaatggatagcgcattg

SEQ ID NO: 13771 - DNA, 28 bp, Homo Sapiens
ctccgtggcgcaatggatagcgcattgg

SEQ ID NO: 13772 - DNA, 29 bp, Homo Sapiens
ctccgtggcgcaatggatagcgcattgga

SEQ ID NO: 13773 - DNA, 30 bp, Homo Sapiens
ctccgtggcgcaatggatagcgcattggac

SEQ ID NO: 13774 - DNA, 31 bp, Homo Sapiens
ctccgtggcgcaatggatagcgcattggact

SEQ ID NO: 13775 - DNA, 19 bp, Homo Sapiens
ctcctcaaagcaatacact

SEQ ID NO: 13776 - DNA, 20 bp, Homo Sapiens
ctcctcaaagcaatacactg

SEQ ID NO: 13777 - DNA, 21 bp, Homo Sapiens
ctcctcaaagcaatacactga

SEQ ID NO: 13778 - DNA, 38 bp, Homo Sapiens
ctcctcaaagcaatacactgaaaatgtttagacgggct

SEQ ID NO: 13779 - DNA, 41 bp, Homo Sapiens
ctcctcaaagcaatacactgaaaatgtttagacgggctcac

SEQ ID NO: 13780 - DNA, 29 bp, Homo Sapiens
ctcctcgttagtatagtggtgagtatccc

SEQ ID NO: 13781 - DNA, 30 bp, Homo Sapiens
ctcctcgttagtatagtggtgagtatcccc

SEQ ID NO: 13782 - DNA, 33 bp, Homo Sapiens
ctcctcgttagtatagtggtgagtatccccgcc

SEQ ID NO: 13783 - DNA, 34 bp, Homo Sapiens
ctcctcgttagtatagtggtgagtatccccgcct

SEQ ID NO: 13784 - DNA, 35 bp, Homo Sapiens
ctcctcgttagtatagtggtgagtatccccgcctg

SEQ ID NO: 13785 - DNA, 36 bp, Homo Sapiens
ctcctcgttagtatagtggtgagtatccccgcctgt

SEQ ID NO: 13786 - DNA, 37 bp, Homo Sapiens
ctcctcgttagtatagtggtgagtatccccgcctgtc

SEQ ID NO: 13787 - DNA, 29 bp, Homo Sapiens
ctcctcgttagtatagtggttagtatccc

SEQ ID NO: 13788 - DNA, 30 bp, Homo Sapiens
ctcctcgttagtatagtggttagtatcccc

SEQ ID NO: 13789 - DNA, 33 bp, Homo Sapiens
ctcctcgttagtatagtggttagtatccccgcc

SEQ ID NO: 13790 - DNA, 34 bp, Homo Sapiens
ctcctcgttagtatagtggttagtatccccgcct

SEQ ID NO: 13791 - DNA, 36 bp, Homo Sapiens
ctcctcgttagtatagtggttagtatccccgcctgt

SEQ ID NO: 13792 - DNA, 37 bp, Homo Sapiens
ctcctcgttagtatagtggttagtatccccgcctgtc

SEQ ID NO: 13793 - DNA, 39 bp, Homo Sapiens
ctcctcgttagtatagtggttagtatccccgcctgtcac

SEQ ID NO: 13794 - DNA, 17 bp, Homo Sapiens
ctcctggctggctcacc

SEQ ID NO: 13795 - DNA, 16 bp, Homo Sapiens
ctcctggctggctcgc

SEQ ID NO: 13796 - DNA, 17 bp, Homo Sapiens
ctcctggctggctcgcc

SEQ ID NO: 13797 - DNA, 18 bp, Homo Sapiens
ctcctggctggctcgcca

SEQ ID NO: 13798 - DNA, 16 bp, Homo Sapiens
ctccttagcgcagtag

SEQ ID NO: 13799 - DNA, 17 bp, Homo Sapiens
ctccttagcgcagtagg

SEQ ID NO: 13800 - DNA, 16 bp, Homo Sapiens
ctcgcctgccacgcgg

SEQ ID NO: 13801 - DNA, 23 bp, Homo Sapiens
ctcgcctgccacgcgggaggccc

SEQ ID NO: 13802 - DNA, 25 bp, Homo Sapiens
ctcgcctgccacgcgggaggcccgg

SEQ ID NO: 13803 - DNA, 26 bp, Homo Sapiens
ctcgcctgccacgcgggaggcccggg

SEQ ID NO: 13804 - DNA, 27 bp, Homo Sapiens
ctcgcctgccacgcgggaggcccgggt

SEQ ID NO: 13805 - DNA, 28 bp, Homo Sapiens
ctcgcctgccacgcgggaggcccgggtt

SEQ ID NO: 13806 - DNA, 29 bp, Homo Sapiens
ctcgcctgccacgcgggaggcccgggttc

SEQ ID NO: 13807 - DNA, 16 bp, Homo Sapiens
ctcgctggggcctcca

SEQ ID NO: 13808 - DNA, 16 bp, Homo Sapiens
ctcggtggaacctcca

SEQ ID NO: 13809 - DNA, 16 bp, Homo Sapiens
ctcggtgggacctcca

SEQ ID NO: 13810 - DNA, 24 bp, Homo Sapiens
ctcggttcgaatccgagtcacggc

SEQ ID NO: 13811 - DNA, 31 bp, Homo Sapiens
ctcgtggcgcaacggtagcgcgtctgactcc

SEQ ID NO: 13812 - DNA, 32 bp, Homo Sapiens
ctcgtggcgcaacggtagcgcgtctgactcca

SEQ ID NO: 13813 - DNA, 31 bp, Homo Sapiens
ctcgtggcgcaatggtagcgcgtctgactcc

SEQ ID NO: 13814 - DNA, 16 bp, Homo Sapiens
ctcgttagcgcagtag

SEQ ID NO: 13815 - DNA, 17 bp, Homo Sapiens
ctcgttagcgcagtagg

SEQ ID NO: 13816 - DNA, 18 bp, Homo Sapiens
ctcgttagcgcagtaggt

SEQ ID NO: 13817 - DNA, 20 bp, Homo Sapiens
ctcgttagcgcagtaggtag

SEQ ID NO: 13818 - DNA, 21 bp, Homo Sapiens
ctcgttagcgcagtaggtagc

SEQ ID NO: 13819 - DNA, 23 bp, Homo Sapiens
ctcgttagcgcagtaggtagcgc

SEQ ID NO: 13820 - DNA, 16 bp, Homo Sapiens
ctcgttagtatagtgg

SEQ ID NO: 13821 - DNA, 24 bp, Homo Sapiens
ctcgttagtatagtggtgagtatc

SEQ ID NO: 13822 - DNA, 26 bp, Homo Sapiens
ctcgttagtatagtggtgagtatccc

SEQ ID NO: 13823 - DNA, 27 bp, Homo Sapiens
ctcgttagtatagtggtgagtatcccc

SEQ ID NO: 13824 - DNA, 28 bp, Homo Sapiens
ctcgttagtatagtggtgagtatccccg

SEQ ID NO: 13825 - DNA, 29 bp, Homo Sapiens
ctcgttagtatagtggtgagtatccccgc

SEQ ID NO: 13826 - DNA, 30 bp, Homo Sapiens
ctcgttagtatagtggtgagtatccccgcc

SEQ ID NO: 13827 - DNA, 31 bp, Homo Sapiens
ctcgttagtatagtggtgagtatccccgcct

SEQ ID NO: 13828 - DNA, 32 bp, Homo Sapiens
ctcgttagtatagtggtgagtatccccgcctg

SEQ ID NO: 13829 - DNA, 33 bp, Homo Sapiens
ctcgttagtatagtggtgagtatccccgcctgt

SEQ ID NO: 13830 - DNA, 34 bp, Homo Sapiens
ctcgttagtatagtggtgagtatccccgcctgtc

SEQ ID NO: 13831 - DNA, 35 bp, Homo Sapiens
ctcgttagtatagtggtgagtatccccgcctgtca

SEQ ID NO: 13832 - DNA, 36 bp, Homo Sapiens
ctcgttagtatagtggtgagtatccccgcctgtcac

SEQ ID NO: 13833 - DNA, 37 bp, Homo Sapiens
ctcgttagtatagtggtgagtatccccgcctgtcacg

SEQ ID NO: 13834 - DNA, 39 bp, Homo Sapiens
ctcgttagtatagtggtgagtatccccgcctgtcacgcg

SEQ ID NO: 13835 - DNA, 40 bp, Homo Sapiens
ctcgttagtatagtggtgagtatccccgcctgtcacgcgg

SEQ ID NO: 13836 - DNA, 48 bp, Homo Sapiens
ctcgttagtatagtggtgagtatccccgcctgtcacgcgggagaccgg

SEQ ID NO: 13837 - DNA, 26 bp, Homo Sapiens
ctcgttagtatagtggttagtatccc

SEQ ID NO: 13838 - DNA, 27 bp, Homo Sapiens
ctcgttagtatagtggttagtatcccc

SEQ ID NO: 13839 - DNA, 28 bp, Homo Sapiens
ctcgttagtatagtggttagtatccccg

SEQ ID NO: 13840 - DNA, 29 bp, Homo Sapiens
ctcgttagtatagtggttagtatccccgc

SEQ ID NO: 13841 - DNA, 30 bp, Homo Sapiens
ctcgttagtatagtggttagtatccccgcc

SEQ ID NO: 13842 - DNA, 31 bp, Homo Sapiens
ctcgttagtatagtggttagtatccccgcct

SEQ ID NO: 13843 - DNA, 32 bp, Homo Sapiens
ctcgttagtatagtggttagtatccccgcctg

SEQ ID NO: 13844 - DNA, 33 bp, Homo Sapiens
ctcgttagtatagtggttagtatccccgcctgt

SEQ ID NO: 13845 - DNA, 34 bp, Homo Sapiens
ctcgttagtatagtggttagtatccccgcctgtc

SEQ ID NO: 13846 - DNA, 35 bp, Homo Sapiens
ctcgttagtatagtggttagtatccccgcctgtca

SEQ ID NO: 13847 - DNA, 25 bp, Homo Sapiens
ctcgttggtctaggggtatgattct

SEQ ID NO: 13848 - DNA, 26 bp, Homo Sapiens
ctcgttggtctaggggtatgattctc

SEQ ID NO: 13849 - DNA, 27 bp, Homo Sapiens
ctcgttggtctaggggtatgattctcg

SEQ ID NO: 13850 - DNA, 28 bp, Homo Sapiens
ctcgttggtctaggggtatgattctcgc

SEQ ID NO: 13851 - DNA, 29 bp, Homo Sapiens
ctcgttggtctaggggtatgattctcgct

SEQ ID NO: 13852 - DNA, 30 bp, Homo Sapiens
ctcgttggtctaggggtatgattctcgctt

SEQ ID NO: 13853 - DNA, 32 bp, Homo Sapiens
ctcgttggtctaggggtatgattctcgcttcg

SEQ ID NO: 13854 - DNA, 33 bp, Homo Sapiens
ctcgttggtctaggggtatgattctcgcttcgg

SEQ ID NO: 13855 - DNA, 31 bp, Homo Sapiens
ctcgttggtctaggggtatgattctcgcttt

SEQ ID NO: 13856 - DNA, 33 bp, Homo Sapiens
ctcgttggtctaggggtatgattctcgctttgg

SEQ ID NO: 13857 - DNA, 32 bp, Homo Sapiens
ctcgttggtctaggggtatgattctcggtttg

SEQ ID NO: 13858 - DNA, 33 bp, Homo Sapiens
ctcgttggtctaggggtatgattctcggtttgg

SEQ ID NO: 13859 - DNA, 27 bp, Homo Sapiens
ctcgttggtctagtggtatgattctcg

SEQ ID NO: 13860 - DNA, 33 bp, Homo Sapiens
ctcgttggtctagtggtatgattctcgctttgg

SEQ ID NO: 13861 - DNA, 16 bp, Homo Sapiens
ctctcaccgccgcggc

SEQ ID NO: 13862 - DNA, 17 bp, Homo Sapiens
ctctcaccgccgcggcc

SEQ ID NO: 13863 - DNA, 18 bp, Homo Sapiens
ctctcaccgccgcggccc

SEQ ID NO: 13864 - DNA, 19 bp, Homo Sapiens
ctctcaccgccgcggcccg

SEQ ID NO: 13865 - DNA, 20 bp, Homo Sapiens
ctctcaccgccgcggcccgg

SEQ ID NO: 13866 - DNA, 21 bp, Homo Sapiens
ctctcaccgccgcggcccggg

SEQ ID NO: 13867 - DNA, 22 bp, Homo Sapiens
ctctcaccgccgcggcccgggt

SEQ ID NO: 13868 - DNA, 23 bp, Homo Sapiens
ctctcaccgccgcggcccgggtt

SEQ ID NO: 13869 - DNA, 24 bp, Homo Sapiens
ctctcaccgccgcggcccgggttc

SEQ ID NO: 13870 - DNA, 25 bp, Homo Sapiens
ctctcaccgccgcggcccgggttcg

SEQ ID NO: 13871 - DNA, 27 bp, Homo Sapiens
ctctcaccgccgcggcccgggttcgat

SEQ ID NO: 13872 - DNA, 29 bp, Homo Sapiens
ctctcaccgccgcggcccgggttcgattc

SEQ ID NO: 13873 - DNA, 33 bp, Homo Sapiens
ctctcaccgccgcggcccgggttcgattcccgg

SEQ ID NO: 13874 - DNA, 34 bp, Homo Sapiens
ctctcaccgccgcggcccgggttcgattcccggt

SEQ ID NO: 13875 - DNA, 35 bp, Homo Sapiens
ctctcaccgccgcggcccgggttcgattcccggtc

SEQ ID NO: 13876 - DNA, 36 bp, Homo Sapiens
ctctcaccgccgcggcccgggttcgattcccggtca

SEQ ID NO: 13877 - DNA, 37 bp, Homo Sapiens
ctctcaccgccgcggcccgggttcgattcccggtcag

SEQ ID NO: 13878 - DNA, 38 bp, Homo Sapiens
ctctcaccgccgcggcccgggttcgattcccggtcagg

SEQ ID NO: 13879 - DNA, 39 bp, Homo Sapiens
ctctcaccgccgcggcccgggttcgattcccggtcaggg

SEQ ID NO: 13880 - DNA, 41 bp, Homo Sapiens
ctctcaccgccgcggcccgggttcgattcccggtcagggaa

SEQ ID NO: 13881 - DNA, 42 bp, Homo Sapiens
ctctcaccgccgcggcccgggttcgattcccggtcagggaac

SEQ ID NO: 13882 - DNA, 43 bp, Homo Sapiens
ctctcaccgccgcggcccgggttcgattcccggtcagggaacc

SEQ ID NO: 13883 - DNA, 44 bp, Homo Sapiens
ctctcaccgccgcggcccgggttcgattcccggtcagggaacca

SEQ ID NO: 13884 - DNA, 18 bp, Homo Sapiens
ctctgaatccagcgatcc

SEQ ID NO: 13885 - DNA, 19 bp, Homo Sapiens
ctctgaatccagcgatccg

SEQ ID NO: 13886 - DNA, 20 bp, Homo Sapiens
ctctgaatccagcgatccga

SEQ ID NO: 13887 - DNA, 21 bp, Homo Sapiens
ctctgaatccagcgatccgag

SEQ ID NO: 13888 - DNA, 22 bp, Homo Sapiens
ctctgaatccagcgatccgagt

SEQ ID NO: 13889 - DNA, 23 bp, Homo Sapiens
ctctgaatccagcgatccgagtt

SEQ ID NO: 13890 - DNA, 24 bp, Homo Sapiens
ctctgaatccagcgatccgagttc

SEQ ID NO: 13891 - DNA, 32 bp, Homo Sapiens
ctctgaatccagcgatccgagttcaaatctcg

SEQ ID NO: 13892 - DNA, 35 bp, Homo Sapiens
ctctgaatccagcgatccgagttcaaatctcggtg

SEQ ID NO: 13893 - DNA, 36 bp, Homo Sapiens
ctctgaatccagcgatccgagttcaaatctcggtgg

SEQ ID NO: 13894 - DNA, 37 bp, Homo Sapiens
ctctgaatccagcgatccgagttcaaatctcggtgga

SEQ ID NO: 13895 - DNA, 38 bp, Homo Sapiens
ctctgaatccagcgatccgagttcaaatctcggtggaa

SEQ ID NO: 13896 - DNA, 39 bp, Homo Sapiens
ctctgaatccagcgatccgagttcaaatctcggtggaac

SEQ ID NO: 13897 - DNA, 41 bp, Homo Sapiens
ctctgaatccagcgatccgagttcaaatctcggtggaacct

SEQ ID NO: 13898 - DNA, 43 bp, Homo Sapiens
ctctgaatccagcgatccgagttcaaatctcggtggaacctcc

SEQ ID NO: 13899 - DNA, 35 bp, Homo Sapiens
ctctgaatccagcgatccgagttcgagtctcggtg

SEQ ID NO: 13900 - DNA, 36 bp, Homo Sapiens
ctctgaatccagcgatccgagttcgagtctcggtgg

SEQ ID NO: 13901 - DNA, 37 bp, Homo Sapiens
ctctgaatccagcgatccgagttcgagtctcggtgga

SEQ ID NO: 13902 - DNA, 38 bp, Homo Sapiens
ctctgaatccagcgatccgagttcgagtctcggtggaa

SEQ ID NO: 13903 - DNA, 42 bp, Homo Sapiens
ctctgaatccagcgatccgagttcgagtctcggtggaacctc

SEQ ID NO: 13904 - DNA, 16 bp, Homo Sapiens
ctctgcgttgtggccg

SEQ ID NO: 13905 - DNA, 16 bp, Homo Sapiens
ctctggactctgaatc

SEQ ID NO: 13906 - DNA, 17 bp, Homo Sapiens
ctctggactctgaatcc

SEQ ID NO: 13907 - DNA, 18 bp, Homo Sapiens
ctctggactctgaatcca

SEQ ID NO: 13908 - DNA, 19 bp, Homo Sapiens
ctctggactctgaatccag

SEQ ID NO: 13909 - DNA, 20 bp, Homo Sapiens
ctctggactctgaatccagc

SEQ ID NO: 13910 - DNA, 21 bp, Homo Sapiens
ctctggactctgaatccagcg

SEQ ID NO: 13911 - DNA, 23 bp, Homo Sapiens
ctctggactctgaatccagcgat

SEQ ID NO: 13912 - DNA, 26 bp, Homo Sapiens
ctctggactctgaatccagcgatccg

SEQ ID NO: 13913 - DNA, 27 bp, Homo Sapiens
ctctggactctgaatccagcgatccga

SEQ ID NO: 13914 - DNA, 28 bp, Homo Sapiens
ctctggactctgaatccagcgatccgag

SEQ ID NO: 13915 - DNA, 29 bp, Homo Sapiens
ctctggactctgaatccagcgatccgagt

SEQ ID NO: 13916 - DNA, 30 bp, Homo Sapiens
ctctggactctgaatccagcgatccgagtt

SEQ ID NO: 13917 - DNA, 31 bp, Homo Sapiens
ctctggactctgaatccagcgatccgagttc

SEQ ID NO: 13918 - DNA, 32 bp, Homo Sapiens
ctctggactctgaatccagcgatccgagttca

SEQ ID NO: 13919 - DNA, 33 bp, Homo Sapiens
ctctggactctgaatccagcgatccgagttcaa

SEQ ID NO: 13920 - DNA, 34 bp, Homo Sapiens
ctctggactctgaatccagcgatccgagttcaaa

SEQ ID NO: 13921 - DNA, 48 bp, Homo Sapiens
ctctggactctgaatccagcgatccgagttcaaatctcggtggaacct

SEQ ID NO: 13922 - DNA, 16 bp, Homo Sapiens
ctctggactttgaatc

SEQ ID NO: 13923 - DNA, 17 bp, Homo Sapiens
ctctggactttgaatcc

SEQ ID NO: 13924 - DNA, 28 bp, Homo Sapiens
ctctggactttgaatccagcgatccgag

SEQ ID NO: 13925 - DNA, 16 bp, Homo Sapiens
ctctgtggaacctcca

SEQ ID NO: 13926 - DNA, 17 bp, Homo Sapiens
ctctgtggcgcaatgga

SEQ ID NO: 13927 - DNA, 18 bp, Homo Sapiens
ctctgtggcgcaatggac

SEQ ID NO: 13928 - DNA, 19 bp, Homo Sapiens
ctctgtggcgcaatggacg

SEQ ID NO: 13929 - DNA, 34 bp, Homo Sapiens
ctctgtggcgcaatggatagcgcattggacttct

SEQ ID NO: 13930 - DNA, 17 bp, Homo Sapiens
ctcttaatcccagggtc

SEQ ID NO: 13931 - DNA, 18 bp, Homo Sapiens
ctcttaatcccagggtcg

SEQ ID NO: 13932 - DNA, 19 bp, Homo Sapiens
ctcttaatcccagggtcgt

SEQ ID NO: 13933 - DNA, 20 bp, Homo Sapiens
ctcttaatcccagggtcgtg

SEQ ID NO: 13934 - DNA, 21 bp, Homo Sapiens
ctcttaatcccagggtcgtgg

SEQ ID NO: 13935 - DNA, 24 bp, Homo Sapiens
ctcttaatcccagggtcgtgggtt

SEQ ID NO: 13936 - DNA, 26 bp, Homo Sapiens
ctcttaatcccagggtcgtgggttcg

SEQ ID NO: 13937 - DNA, 18 bp, Homo Sapiens
ctcttaatctcagggtcg

SEQ ID NO: 13938 - DNA, 19 bp, Homo Sapiens
ctcttaatctcagggtcgt

SEQ ID NO: 13939 - DNA, 20 bp, Homo Sapiens
ctcttaatctcagggtcgtg

SEQ ID NO: 13940 - DNA, 21 bp, Homo Sapiens
ctcttaatctcagggtcgtgg

SEQ ID NO: 13941 - DNA, 24 bp, Homo Sapiens
ctcttaatctcagggtcgtgggtt

SEQ ID NO: 13942 - DNA, 16 bp, Homo Sapiens
ctcttagcgcagtggg

SEQ ID NO: 13943 - DNA, 20 bp, Homo Sapiens
ctcttcggaggcgtgggttc

SEQ ID NO: 13944 - DNA, 16 bp, Homo Sapiens
ctcttcgggggcgtgg

SEQ ID NO: 13945 - DNA, 17 bp, Homo Sapiens
ctcttcgggggcgtggg

SEQ ID NO: 13946 - DNA, 18 bp, Homo Sapiens
ctcttcgggggcgtgggt

SEQ ID NO: 13947 - DNA, 19 bp, Homo Sapiens
ctcttcgggggcgtgggtt

SEQ ID NO: 13948 - DNA, 20 bp, Homo Sapiens
ctcttcgggggcgtgggttc

SEQ ID NO: 13949 - DNA, 20 bp, Homo Sapiens
ctcttcgggggcgtgggttt

SEQ ID NO: 13950 - DNA, 16 bp, Homo Sapiens
ctctttacagtgacca

SEQ ID NO: 13951 - DNA, 32 bp, Homo Sapiens
ctcttttagtataaatagtaccgttaacttcc

SEQ ID NO: 13952 - DNA, 16 bp, Homo Sapiens
ctgaaaatgtttagac

SEQ ID NO: 13953 - DNA, 20 bp, Homo Sapiens
ctgaaaatgtttagacgggc

SEQ ID NO: 13954 - DNA, 21 bp, Homo Sapiens
ctgaaaatgtttagacgggct

SEQ ID NO: 13955 - DNA, 22 bp, Homo Sapiens
ctgaaaatgtttagacgggctc

SEQ ID NO: 13956 - DNA, 23 bp, Homo Sapiens
ctgaaaatgtttagacgggctca

SEQ ID NO: 13957 - DNA, 24 bp, Homo Sapiens
ctgaaaatgtttagacgggctcac

SEQ ID NO: 13958 - DNA, 25 bp, Homo Sapiens
ctgaaaatgtttagacgggctcaca

SEQ ID NO: 13959 - DNA, 27 bp, Homo Sapiens
ctgaaaatgtttagacgggctcacatc

SEQ ID NO: 13960 - DNA, 30 bp, Homo Sapiens
ctgaaaatgtttagacgggctcacatcacc

SEQ ID NO: 13961 - DNA, 31 bp, Homo Sapiens
ctgaaaatgtttagacgggctcacatcaccc

SEQ ID NO: 13962 - DNA, 33 bp, Homo Sapiens
ctgaaaatgtttagacgggctcacatcacccca

SEQ ID NO: 13963 - DNA, 35 bp, Homo Sapiens
ctgaaaatgtttagacgggctcacatcaccccata

SEQ ID NO: 13964 - DNA, 36 bp, Homo Sapiens
ctgaaaatgtttagacgggctcacatcaccccataa

SEQ ID NO: 13965 - DNA, 39 bp, Homo Sapiens
ctgaaaatgtttagacgggctcacatcaccccataaaca

SEQ ID NO: 13966 - DNA, 41 bp, Homo Sapiens
ctgaaaatgtttagacgggctcacatcaccccataaacacc

SEQ ID NO: 13967 - DNA, 42 bp, Homo Sapiens
ctgaaaatgtttagacgggctcacatcaccccataaacacca

SEQ ID NO: 13968 - DNA, 37 bp, Homo Sapiens
ctgaaaggttggtggttcgagcccacccagggacgcc

SEQ ID NO: 13969 - DNA, 38 bp, Homo Sapiens
ctgaaaggttggtggttcgagcccacccagggacgcca

SEQ ID NO: 13970 - DNA, 16 bp, Homo Sapiens
ctgaaggtcctgagtt

SEQ ID NO: 13971 - DNA, 17 bp, Homo Sapiens
ctgaaggtcctgagttc

SEQ ID NO: 13972 - DNA, 18 bp, Homo Sapiens
ctgaaggtcctgagttcg

SEQ ID NO: 13973 - DNA, 21 bp, Homo Sapiens
ctgaaggtcctgagttcgaac

SEQ ID NO: 13974 - DNA, 22 bp, Homo Sapiens
ctgaaggtcctgagttcgaacc

SEQ ID NO: 13975 - DNA, 23 bp, Homo Sapiens
ctgaaggtcctgagttcgaacct

SEQ ID NO: 13976 - DNA, 24 bp, Homo Sapiens
ctgaaggtcctgagttcgaacctc

SEQ ID NO: 13977 - DNA, 25 bp, Homo Sapiens
ctgaaggtcctgagttcgaacctca

SEQ ID NO: 13978 - DNA, 28 bp, Homo Sapiens
ctgaaggtcctgagttcgaacctcagag

SEQ ID NO: 13979 - DNA, 29 bp, Homo Sapiens
ctgaaggtcctgagttcgaacctcagagg

SEQ ID NO: 13980 - DNA, 31 bp, Homo Sapiens
ctgaaggtcctgagttcgaacctcagagggg

SEQ ID NO: 13981 - DNA, 32 bp, Homo Sapiens
ctgaaggtcctgagttcgaacctcagaggggg

SEQ ID NO: 13982 - DNA, 33 bp, Homo Sapiens
ctgaaggtcctgagttcgaacctcagagggggc

SEQ ID NO: 13983 - DNA, 34 bp, Homo Sapiens
ctgaaggtcctgagttcgaacctcagagggggca

SEQ ID NO: 13984 - DNA, 35 bp, Homo Sapiens
ctgaaggtcctgagttcgaacctcagagggggcac

SEQ ID NO: 13985 - DNA, 36 bp, Homo Sapiens
ctgaaggtcctgagttcgaacctcagagggggcacc

SEQ ID NO: 13986 - DNA, 37 bp, Homo Sapiens
ctgaaggtcctgagttcgaacctcagagggggcacca

SEQ ID NO: 13987 - DNA, 22 bp, Homo Sapiens
ctgaaggtcctgagttcgagcc

SEQ ID NO: 13988 - DNA, 33 bp, Homo Sapiens
ctgaaggtcctgagttcgagcctcagagagggc

SEQ ID NO: 13989 - DNA, 34 bp, Homo Sapiens
ctgaaggtcctgagttcgagcctcagagagggca

SEQ ID NO: 13990 - DNA, 35 bp, Homo Sapiens
ctgaaggtcctgagttcgagcctcagagagggcac

SEQ ID NO: 13991 - DNA, 36 bp, Homo Sapiens
ctgaaggtcctgagttcgagcctcagagagggcacc

SEQ ID NO: 13992 - DNA, 37 bp, Homo Sapiens
ctgaaggtcctgagttcgagcctcagagagggcacca

SEQ ID NO: 13993 - DNA, 16 bp, Homo Sapiens
ctgaaggtcgtgagtt

SEQ ID NO: 13994 - DNA, 17 bp, Homo Sapiens
ctgaaggtcgtgagttc

SEQ ID NO: 13995 - DNA, 18 bp, Homo Sapiens
ctgaaggtcgtgagttcg

SEQ ID NO: 13996 - DNA, 22 bp, Homo Sapiens
ctgaaggtcgtgagttcgagcc

SEQ ID NO: 13997 - DNA, 23 bp, Homo Sapiens
ctgaaggtcgtgagttcgagcct

SEQ ID NO: 13998 - DNA, 24 bp, Homo Sapiens
ctgaaggtcgtgagttcgagcctc

SEQ ID NO: 13999 - DNA, 30 bp, Homo Sapiens
ctgaaggtcgtgagttcgagcctcacacgg

SEQ ID NO: 14000 - DNA, 31 bp, Homo Sapiens
ctgaaggtcgtgagttcgagcctcacacggg

SEQ ID NO: 14001 - DNA, 33 bp, Homo Sapiens
ctgaaggtcgtgagttcgagcctcacacggggc

SEQ ID NO: 14002 - DNA, 34 bp, Homo Sapiens
ctgaaggtcgtgagttcgagcctcacacggggca

SEQ ID NO: 14003 - DNA, 35 bp, Homo Sapiens
ctgaaggtcgtgagttcgagcctcacacggggcac

SEQ ID NO: 14004 - DNA, 36 bp, Homo Sapiens
ctgaaggtcgtgagttcgagcctcacacggggcacc

SEQ ID NO: 14005 - DNA, 37 bp, Homo Sapiens
ctgaaggtcgtgagttcgagcctcacacggggcacca

SEQ ID NO: 14006 - DNA, 32 bp, Homo Sapiens
ctgaaggtcgtgagttcgatcctcacacgggg

SEQ ID NO: 14007 - DNA, 33 bp, Homo Sapiens
ctgaaggtcgtgagttcgatcctcacacggggc

SEQ ID NO: 14008 - DNA, 34 bp, Homo Sapiens
ctgaaggtcgtgagttcgatcctcacacggggca

SEQ ID NO: 14009 - DNA, 35 bp, Homo Sapiens
ctgaaggtcgtgagttcgatcctcacacggggcac

SEQ ID NO: 14010 - DNA, 36 bp, Homo Sapiens
ctgaaggtcgtgagttcgatcctcacacggggcacc

SEQ ID NO: 14011 - DNA, 37 bp, Homo Sapiens
ctgaaggtcgtgagttcgatcctcacacggggcacca

SEQ ID NO: 14012 - DNA, 16 bp, Homo Sapiens
ctgaatccagcgatcc

SEQ ID NO: 14013 - DNA, 17 bp, Homo Sapiens
ctgaatccagcgatccg

SEQ ID NO: 14014 - DNA, 18 bp, Homo Sapiens
ctgaatccagcgatccga

SEQ ID NO: 14015 - DNA, 19 bp, Homo Sapiens
ctgaatccagcgatccgag

SEQ ID NO: 14016 - DNA, 20 bp, Homo Sapiens
ctgaatccagcgatccgagt

SEQ ID NO: 14017 - DNA, 21 bp, Homo Sapiens
ctgaatccagcgatccgagtt

SEQ ID NO: 14018 - DNA, 22 bp, Homo Sapiens
ctgaatccagcgatccgagttc

SEQ ID NO: 14019 - DNA, 23 bp, Homo Sapiens
ctgaatccagcgatccgagttca

SEQ ID NO: 14020 - DNA, 24 bp, Homo Sapiens
ctgaatccagcgatccgagttcaa

SEQ ID NO: 14021 - DNA, 25 bp, Homo Sapiens
ctgaatccagcgatccgagttcaaa

SEQ ID NO: 14022 - DNA, 26 bp, Homo Sapiens
ctgaatccagcgatccgagttcaaat

SEQ ID NO: 14023 - DNA, 27 bp, Homo Sapiens
ctgaatccagcgatccgagttcaaatc

SEQ ID NO: 14024 - DNA, 28 bp, Homo Sapiens
ctgaatccagcgatccgagttcaaatct

SEQ ID NO: 14025 - DNA, 32 bp, Homo Sapiens
ctgaatccagcgatccgagttcaaatctcggt

SEQ ID NO: 14026 - DNA, 33 bp, Homo Sapiens
ctgaatccagcgatccgagttcaaatctcggtg

SEQ ID NO: 14027 - DNA, 35 bp, Homo Sapiens
ctgaatccagcgatccgagttcaaatctcggtgga

SEQ ID NO: 14028 - DNA, 36 bp, Homo Sapiens
ctgaatccagcgatccgagttcaaatctcggtggaa

SEQ ID NO: 14029 - DNA, 37 bp, Homo Sapiens
ctgaatccagcgatccgagttcaaatctcggtggaac

SEQ ID NO: 14030 - DNA, 38 bp, Homo Sapiens
ctgaatccagcgatccgagttcaaatctcggtggaacc

SEQ ID NO: 14031 - DNA, 39 bp, Homo Sapiens
ctgaatccagcgatccgagttcaaatctcggtggaacct

SEQ ID NO: 14032 - DNA, 40 bp, Homo Sapiens
ctgaatccagcgatccgagttcaaatctcggtggaacctc

SEQ ID NO: 14033 - DNA, 41 bp, Homo Sapiens
ctgaatccagcgatccgagttcaaatctcggtggaacctcc

SEQ ID NO: 14034 - DNA, 42 bp, Homo Sapiens
ctgaatccagcgatccgagttcaaatctcggtggaacctcca

SEQ ID NO: 14035 - DNA, 39 bp, Homo Sapiens
ctgaatccagcgatccgagttcaagtctcggtggaacct

SEQ ID NO: 14036 - DNA, 23 bp, Homo Sapiens
ctgaatccagcgatccgagttcg

SEQ ID NO: 14037 - DNA, 24 bp, Homo Sapiens
ctgaatccagcgatccgagttcga

SEQ ID NO: 14038 - DNA, 25 bp, Homo Sapiens
ctgaatccagcgatccgagttcgag

SEQ ID NO: 14039 - DNA, 26 bp, Homo Sapiens
ctgaatccagcgatccgagttcgagt

SEQ ID NO: 14040 - DNA, 28 bp, Homo Sapiens
ctgaatccagcgatccgagttcgagtct

SEQ ID NO: 14041 - DNA, 33 bp, Homo Sapiens
ctgaatccagcgatccgagttcgagtctcggtg

SEQ ID NO: 14042 - DNA, 34 bp, Homo Sapiens
ctgaatccagcgatccgagttcgagtctcggtgg

SEQ ID NO: 14043 - DNA, 39 bp, Homo Sapiens
ctgaatccagcgatccgagttcgagtctcggtggaacct

SEQ ID NO: 14044 - DNA, 40 bp, Homo Sapiens
ctgaatccagcgatccgagttcgagtctcggtggaacctc

SEQ ID NO: 14045 - DNA, 41 bp, Homo Sapiens
ctgaatccagcgatccgagttcgagtctcggtggaacctcc

SEQ ID NO: 14046 - DNA, 16 bp, Homo Sapiens
ctgacaacagaggctt

SEQ ID NO: 14047 - DNA, 17 bp, Homo Sapiens
ctgacaacagaggctta

SEQ ID NO: 14048 - DNA, 18 bp, Homo Sapiens
ctgacaacagaggcttac

SEQ ID NO: 14049 - DNA, 19 bp, Homo Sapiens
ctgacaacagaggcttacg

SEQ ID NO: 14050 - DNA, 20 bp, Homo Sapiens
ctgacaacagaggcttacga

SEQ ID NO: 14051 - DNA, 21 bp, Homo Sapiens
ctgacaacagaggcttacgac

SEQ ID NO: 14052 - DNA, 22 bp, Homo Sapiens
ctgacaacagaggcttacgacc

SEQ ID NO: 14053 - DNA, 23 bp, Homo Sapiens
ctgacaacagaggcttacgaccc

SEQ ID NO: 14054 - DNA, 24 bp, Homo Sapiens
ctgacaacagaggcttacgacccc

SEQ ID NO: 14055 - DNA, 25 bp, Homo Sapiens
ctgacaacagaggcttacgacccct

SEQ ID NO: 14056 - DNA, 26 bp, Homo Sapiens
ctgacaacagaggcttacgacccctt

SEQ ID NO: 14057 - DNA, 27 bp, Homo Sapiens
ctgacaacagaggcttacgacccctta

SEQ ID NO: 14058 - DNA, 28 bp, Homo Sapiens
ctgacaacagaggcttacgaccccttat

SEQ ID NO: 14059 - DNA, 29 bp, Homo Sapiens
ctgacaacagaggcttacgaccccttatt

SEQ ID NO: 14060 - DNA, 30 bp, Homo Sapiens
ctgacaacagaggcttacgaccccttattt

SEQ ID NO: 14061 - DNA, 31 bp, Homo Sapiens
ctgacaacagaggcttacgaccccttattta

SEQ ID NO: 14062 - DNA, 32 bp, Homo Sapiens
ctgacaacagaggcttacgaccccttatttac

SEQ ID NO: 14063 - DNA, 33 bp, Homo Sapiens
ctgacaacagaggcttacgaccccttatttacc

SEQ ID NO: 14064 - DNA, 34 bp, Homo Sapiens
ctgacaacagaggcttacgaccccttatttaccc

SEQ ID NO: 14065 - DNA, 35 bp, Homo Sapiens
ctgacaacagaggcttacgaccccttatttacccc

SEQ ID NO: 14066 - DNA, 36 bp, Homo Sapiens
ctgacaacagaggcttacgaccccttatttacccca

SEQ ID NO: 14067 - DNA, 16 bp, Homo Sapiens
ctgacttcggatcaga

SEQ ID NO: 14068 - DNA, 17 bp, Homo Sapiens
ctgacttcggatcagaa

SEQ ID NO: 14069 - DNA, 27 bp, Homo Sapiens
ctgacttcggatcagaagattgcaggt

SEQ ID NO: 14070 - DNA, 36 bp, Homo Sapiens
ctgacttcggatcagaagattgcaggttcgagtcct

SEQ ID NO: 14071 - DNA, 16 bp, Homo Sapiens
ctgagggtccagggtt

SEQ ID NO: 14072 - DNA, 17 bp, Homo Sapiens
ctgagggtccagggttc

SEQ ID NO: 14073 - DNA, 18 bp, Homo Sapiens
ctgagggtccagggttca

SEQ ID NO: 14074 - DNA, 26 bp, Homo Sapiens
ctgagggtccagggttcaagtccctg

SEQ ID NO: 14075 - DNA, 36 bp, Homo Sapiens
ctgagggtccagggttcaagtccctgtccaggcgcc

SEQ ID NO: 14076 - DNA, 36 bp, Homo Sapiens
ctgagggtccagggttcaagtccctgttcaggcgcc

SEQ ID NO: 14077 - DNA, 31 bp, Homo Sapiens
ctgagggtccagggttcaagtccctgttcgg

SEQ ID NO: 14078 - DNA, 32 bp, Homo Sapiens
ctgagggtccagggttcaagtccctgttcggg

SEQ ID NO: 14079 - DNA, 33 bp, Homo Sapiens
ctgagggtccagggttcaagtccctgttcgggc

SEQ ID NO: 14080 - DNA, 34 bp, Homo Sapiens
ctgagggtccagggttcaagtccctgttcgggcg

SEQ ID NO: 14081 - DNA, 35 bp, Homo Sapiens
ctgagggtccagggttcaagtccctgttcgggcgc

SEQ ID NO: 14082 - DNA, 36 bp, Homo Sapiens
ctgagggtccagggttcaagtccctgttcgggcgcc

SEQ ID NO: 14083 - DNA, 37 bp, Homo Sapiens
ctgagggtccagggttcaagtccctgttcgggcgcca

SEQ ID NO: 14084 - DNA, 25 bp, Homo Sapiens
ctgagggtccagggttcatgtccct

SEQ ID NO: 14085 - DNA, 29 bp, Homo Sapiens
ctgagggtccagggttcatgtccctgttc

SEQ ID NO: 14086 - DNA, 18 bp, Homo Sapiens
ctgagggtccagggttta

SEQ ID NO: 14087 - DNA, 16 bp, Homo Sapiens
ctgagtgaagcattgg

SEQ ID NO: 14088 - DNA, 18 bp, Homo Sapiens
ctgagtgaagcattggac

SEQ ID NO: 14089 - DNA, 19 bp, Homo Sapiens
ctgagtgaagcattggact

SEQ ID NO: 14090 - DNA, 20 bp, Homo Sapiens
ctgagtgaagcattggactg

SEQ ID NO: 14091 - DNA, 21 bp, Homo Sapiens
ctgagtgaagcattggactgt

SEQ ID NO: 14092 - DNA, 22 bp, Homo Sapiens
ctgagtgaagcattggactgta

SEQ ID NO: 14093 - DNA, 23 bp, Homo Sapiens
ctgagtgaagcattggactgtaa

SEQ ID NO: 14094 - DNA, 24 bp, Homo Sapiens
ctgagtgaagcattggactgtaaa

SEQ ID NO: 14095 - DNA, 27 bp, Homo Sapiens
ctgagtgaagcattggactgtaaatct

SEQ ID NO: 14096 - DNA, 28 bp, Homo Sapiens
ctgagtgaagcattggactgtaaatcta

SEQ ID NO: 14097 - DNA, 29 bp, Homo Sapiens
ctgagtgaagcattggactgtaaatctaa

SEQ ID NO: 14098 - DNA, 30 bp, Homo Sapiens
ctgagtgaagcattggactgtaaatctaaa

SEQ ID NO: 14099 - DNA, 31 bp, Homo Sapiens
ctgagtgaagcattggactgtaaatctaaag

SEQ ID NO: 14100 - DNA, 37 bp, Homo Sapiens
ctgagtgaagcattggactgtaaatctaaagacaggg

SEQ ID NO: 14101 - DNA, 24 bp, Homo Sapiens
ctgagttcgaacctcagagggggc

SEQ ID NO: 14102 - DNA, 22 bp, Homo Sapiens
ctgataaaagagttactttgat

SEQ ID NO: 14103 - DNA, 26 bp, Homo Sapiens
ctgataaaagagttactttgatagag

SEQ ID NO: 14104 - DNA, 16 bp, Homo Sapiens
ctgattccggatcaga

SEQ ID NO: 14105 - DNA, 19 bp, Homo Sapiens
ctgcagatcaagaggtccc

SEQ ID NO: 14106 - DNA, 22 bp, Homo Sapiens
ctgcagatcaagaggtccccgg

SEQ ID NO: 14107 - DNA, 21 bp, Homo Sapiens
ctgcagatcaagaggtccctg

SEQ ID NO: 14108 - DNA, 23 bp, Homo Sapiens
ctgcagatcaagaggtccctggt

SEQ ID NO: 14109 - DNA, 17 bp, Homo Sapiens
ctgccacgcgggaggcc

SEQ ID NO: 14110 - DNA, 18 bp, Homo Sapiens
ctgccacgcgggaggccc

SEQ ID NO: 14111 - DNA, 20 bp, Homo Sapiens
ctgccacgcgggaggcccgg

SEQ ID NO: 14112 - DNA, 21 bp, Homo Sapiens
ctgccacgcgggaggcccggg

SEQ ID NO: 14113 - DNA, 22 bp, Homo Sapiens
ctgccacgcgggaggcccgggt

SEQ ID NO: 14114 - DNA, 23 bp, Homo Sapiens
ctgccacgcgggaggcccgggtt

SEQ ID NO: 14115 - DNA, 25 bp, Homo Sapiens
ctgccacgcgggaggcccgggttcg

SEQ ID NO: 14116 - DNA, 28 bp, Homo Sapiens
ctgccacgcgggaggcccgggttcgatt

SEQ ID NO: 14117 - DNA, 35 bp, Homo Sapiens
ctgccacgcgggaggcccgggttcgattcccggcc

SEQ ID NO: 14118 - DNA, 24 bp, Homo Sapiens
ctgccttccaagcagttgacccgg

SEQ ID NO: 14119 - DNA, 26 bp, Homo Sapiens
ctgccttccaagcagttgacccgggt

SEQ ID NO: 14120 - DNA, 47 bp, Homo Sapiens
ctgccttccaagcagttgacccgggttcgattcccggccaacgcacc

SEQ ID NO: 14121 - DNA, 18 bp, Homo Sapiens
ctgcgtgttcgaatcacg

SEQ ID NO: 14122 - DNA, 22 bp, Homo Sapiens
ctgcgtgttcgaatcacgtcgg

SEQ ID NO: 14123 - DNA, 23 bp, Homo Sapiens
ctgcgtgttcgaatcacgtcggg

SEQ ID NO: 14124 - DNA, 24 bp, Homo Sapiens
ctgcgtgttcgaatcacgtcgggg

SEQ ID NO: 14125 - DNA, 25 bp, Homo Sapiens
ctgcgtgttcgaatcacgtcggggt

SEQ ID NO: 14126 - DNA, 26 bp, Homo Sapiens
ctgcgtgttcgaatcacgtcggggtc

SEQ ID NO: 14127 - DNA, 27 bp, Homo Sapiens
ctgcgtgttcgaatcacgtcggggtca

SEQ ID NO: 14128 - DNA, 28 bp, Homo Sapiens
ctgcgtgttcgaatcacgtcggggtcac

SEQ ID NO: 14129 - DNA, 29 bp, Homo Sapiens
ctgcgtgttcgaatcacgtcggggtcacc

SEQ ID NO: 14130 - DNA, 30 bp, Homo Sapiens
ctgcgtgttcgaatcacgtcggggtcacca

SEQ ID NO: 14131 - DNA, 16 bp, Homo Sapiens
ctgcgttgtggccgca

SEQ ID NO: 14132 - DNA, 16 bp, Homo Sapiens
ctgctaactcatgccc

SEQ ID NO: 14133 - DNA, 17 bp, Homo Sapiens
ctgctaactcatgcccc

SEQ ID NO: 14134 - DNA, 18 bp, Homo Sapiens
ctgctaactcatgccccc

SEQ ID NO: 14135 - DNA, 19 bp, Homo Sapiens
ctgctaactcatgccccca

SEQ ID NO: 14136 - DNA, 20 bp, Homo Sapiens
ctgctaactcatgcccccat

SEQ ID NO: 14137 - DNA, 21 bp, Homo Sapiens
ctgctaactcatgcccccatg

SEQ ID NO: 14138 - DNA, 22 bp, Homo Sapiens
ctgctaactcatgcccccatgt

SEQ ID NO: 14139 - DNA, 23 bp, Homo Sapiens
ctgctaactcatgcccccatgtc

SEQ ID NO: 14140 - DNA, 24 bp, Homo Sapiens
ctgctaactcatgcccccatgtct

SEQ ID NO: 14141 - DNA, 25 bp, Homo Sapiens
ctgctaactcatgcccccatgtcta

SEQ ID NO: 14142 - DNA, 26 bp, Homo Sapiens
ctgctaactcatgcccccatgtctaa

SEQ ID NO: 14143 - DNA, 27 bp, Homo Sapiens
ctgctaactcatgcccccatgtctaac

SEQ ID NO: 14144 - DNA, 28 bp, Homo Sapiens
ctgctaactcatgcccccatgtctaaca

SEQ ID NO: 14145 - DNA, 30 bp, Homo Sapiens
ctgctaactcatgcccccatgtctaacaac

SEQ ID NO: 14146 - DNA, 31 bp, Homo Sapiens
ctgctaactcatgcccccatgtctaacaaca

SEQ ID NO: 14147 - DNA, 32 bp, Homo Sapiens
ctgctaactcatgcccccatgtctaacaacat

SEQ ID NO: 14148 - DNA, 33 bp, Homo Sapiens
ctgctaactcatgcccccatgtctaacaacatg

SEQ ID NO: 14149 - DNA, 34 bp, Homo Sapiens
ctgctaactcatgcccccatgtctaacaacatgg

SEQ ID NO: 14150 - DNA, 35 bp, Homo Sapiens
ctgctaactcatgcccccatgtctaacaacatggc

SEQ ID NO: 14151 - DNA, 36 bp, Homo Sapiens
ctgctaactcatgcccccatgtctaacaacatggct

SEQ ID NO: 14152 - DNA, 37 bp, Homo Sapiens
ctgctaactcatgcccccatgtctaacaacatggctt

SEQ ID NO: 14153 - DNA, 38 bp, Homo Sapiens
ctgctaactcatgcccccatgtctaacaacatggcttt

SEQ ID NO: 14154 - DNA, 39 bp, Homo Sapiens
ctgctaactcatgcccccatgtctaacaacatggctttc

SEQ ID NO: 14155 - DNA, 40 bp, Homo Sapiens
ctgctaactcatgcccccatgtctaacaacatggctttct

SEQ ID NO: 14156 - DNA, 41 bp, Homo Sapiens
ctgctaactcatgcccccatgtctaacaacatggctttctc

SEQ ID NO: 14157 - DNA, 42 bp, Homo Sapiens
ctgctaactcatgcccccatgtctaacaacatggctttctca

SEQ ID NO: 14158 - DNA, 43 bp, Homo Sapiens
ctgctaactcatgcccccatgtctaacaacatggctttctcac

SEQ ID NO: 14159 - DNA, 44 bp, Homo Sapiens
ctgctaactcatgcccccatgtctaacaacatggctttctcacc

SEQ ID NO: 14160 - DNA, 45 bp, Homo Sapiens
ctgctaactcatgcccccatgtctaacaacatggctttctcacca

SEQ ID NO: 14161 - DNA, 17 bp, Homo Sapiens
ctgctaatccattgtgc

SEQ ID NO: 14162 - DNA, 18 bp, Homo Sapiens
ctgctaatccattgtgct

SEQ ID NO: 14163 - DNA, 19 bp, Homo Sapiens
ctgctaatccattgtgctc

SEQ ID NO: 14164 - DNA, 22 bp, Homo Sapiens
ctgctaatccattgtgctttgc

SEQ ID NO: 14165 - DNA, 16 bp, Homo Sapiens
ctggactctgaatcca

SEQ ID NO: 14166 - DNA, 17 bp, Homo Sapiens
ctggactctgaatccag

SEQ ID NO: 14167 - DNA, 18 bp, Homo Sapiens
ctggactctgaatccagc

SEQ ID NO: 14168 - DNA, 19 bp, Homo Sapiens
ctggactctgaatccagcg

SEQ ID NO: 14169 - DNA, 20 bp, Homo Sapiens
ctggactctgaatccagcga

SEQ ID NO: 14170 - DNA, 21 bp, Homo Sapiens
ctggactctgaatccagcgat

SEQ ID NO: 14171 - DNA, 22 bp, Homo Sapiens
ctggactctgaatccagcgatc

SEQ ID NO: 14172 - DNA, 23 bp, Homo Sapiens
ctggactctgaatccagcgatcc

SEQ ID NO: 14173 - DNA, 24 bp, Homo Sapiens
ctggactctgaatccagcgatccg

SEQ ID NO: 14174 - DNA, 25 bp, Homo Sapiens
ctggactctgaatccagcgatccga

SEQ ID NO: 14175 - DNA, 26 bp, Homo Sapiens
ctggactctgaatccagcgatccgag

SEQ ID NO: 14176 - DNA, 27 bp, Homo Sapiens
ctggactctgaatccagcgatccgagt

SEQ ID NO: 14177 - DNA, 28 bp, Homo Sapiens
ctggactctgaatccagcgatccgagtt

SEQ ID NO: 14178 - DNA, 29 bp, Homo Sapiens
ctggactctgaatccagcgatccgagttc

SEQ ID NO: 14179 - DNA, 30 bp, Homo Sapiens
ctggactctgaatccagcgatccgagttca

SEQ ID NO: 14180 - DNA, 31 bp, Homo Sapiens
ctggactctgaatccagcgatccgagttcaa

SEQ ID NO: 14181 - DNA, 32 bp, Homo Sapiens
ctggactctgaatccagcgatccgagttcaaa

SEQ ID NO: 14182 - DNA, 39 bp, Homo Sapiens
ctggactctgaatccagcgatccgagttcaaatctcggt

SEQ ID NO: 14183 - DNA, 40 bp, Homo Sapiens
ctggactctgaatccagcgatccgagttcaaatctcggtg

SEQ ID NO: 14184 - DNA, 46 bp, Homo Sapiens
ctggactctgaatccagcgatccgagttcaaatctcggtggaacct

SEQ ID NO: 14185 - DNA, 48 bp, Homo Sapiens
ctggactctgaatccagcgatccgagttcaaatctcggtggaacctcc

SEQ ID NO: 14186 - DNA, 30 bp, Homo Sapiens
ctggactctgaatccagcgatccgagttcg

SEQ ID NO: 14187 - DNA, 47 bp, Homo Sapiens
ctggactctgaatccagcgatccgagttcgagtctcggtggaacctc

SEQ ID NO: 14188 - DNA, 16 bp, Homo Sapiens
ctggactttgaatcca

SEQ ID NO: 14189 - DNA, 26 bp, Homo Sapiens
ctggactttgaatccagcgatccgag

SEQ ID NO: 14190 - DNA, 27 bp, Homo Sapiens
ctggactttgaatccagcgatccgagt

SEQ ID NO: 14191 - DNA, 29 bp, Homo Sapiens
ctggactttgaatccagcgatccgagttc

SEQ ID NO: 14192 - DNA, 35 bp, Homo Sapiens
ctggaggcgtgggttcgaatcccacttctgacacc

SEQ ID NO: 14193 - DNA, 23 bp, Homo Sapiens
ctggatagctcagtcggtagagc

SEQ ID NO: 14194 - DNA, 26 bp, Homo Sapiens
ctggatagctcagtcggtagagcatc

SEQ ID NO: 14195 - DNA, 27 bp, Homo Sapiens
ctggatagctcagtcggtagagcatca

SEQ ID NO: 14196 - DNA, 28 bp, Homo Sapiens
ctggatagctcagtcggtagagcatcag

SEQ ID NO: 14197 - DNA, 30 bp, Homo Sapiens
ctggatagctcagtcggtagagcatcagac

SEQ ID NO: 14198 - DNA, 31 bp, Homo Sapiens
ctggatagctcagtcggtagagcatcagact

SEQ ID NO: 14199 - DNA, 20 bp, Homo Sapiens
ctggatagctcagttggtag

SEQ ID NO: 14200 - DNA, 23 bp, Homo Sapiens
ctggatagctcagttggtagagc

SEQ ID NO: 14201 - DNA, 26 bp, Homo Sapiens
ctggatagctcagttggtagagcatc

SEQ ID NO: 14202 - DNA, 30 bp, Homo Sapiens
ctggatagctcagttggtagagcatcagac

SEQ ID NO: 14203 - DNA, 36 bp, Homo Sapiens
ctggatttaggctccagtctcttcggaggcgtgggt

SEQ ID NO: 14204 - DNA, 29 bp, Homo Sapiens
ctggcggtctagtggttaggattcggcgc

SEQ ID NO: 14205 - DNA, 30 bp, Homo Sapiens
ctggcggtctagtggttaggattcggcgct

SEQ ID NO: 14206 - DNA, 31 bp, Homo Sapiens
ctggcggtctagtggttaggattcggcgctc

SEQ ID NO: 14207 - DNA, 17 bp, Homo Sapiens
ctggctagctcagtcgg

SEQ ID NO: 14208 - DNA, 24 bp, Homo Sapiens
ctgggcccataacccagaggtcga

SEQ ID NO: 14209 - DNA, 26 bp, Homo Sapiens
ctgggcccataacccagaggtcgatg

SEQ ID NO: 14210 - DNA, 28 bp, Homo Sapiens
ctgggcccataacccagaggtcgatgga

SEQ ID NO: 14211 - DNA, 29 bp, Homo Sapiens
ctgggcccataacccagaggtcgatggat

SEQ ID NO: 14212 - DNA, 30 bp, Homo Sapiens
ctgggcccataacccagaggtcgatggatc

SEQ ID NO: 14213 - DNA, 31 bp, Homo Sapiens
ctgggcccataacccagaggtcgatggatcg

SEQ ID NO: 14214 - DNA, 16 bp, Homo Sapiens
ctggggattgtgggtt

SEQ ID NO: 14215 - DNA, 17 bp, Homo Sapiens
ctggggattgtgggttc

SEQ ID NO: 14216 - DNA, 18 bp, Homo Sapiens
ctggggattgtgggttcg

SEQ ID NO: 14217 - DNA, 24 bp, Homo Sapiens
ctggggattgtgggttcgagtccc

SEQ ID NO: 14218 - DNA, 27 bp, Homo Sapiens
ctggggattgtgggttcgagtcccatc

SEQ ID NO: 14219 - DNA, 32 bp, Homo Sapiens
ctggggattgtgggttcgagtcccatctgggt

SEQ ID NO: 14220 - DNA, 33 bp, Homo Sapiens
ctggggattgtgggttcgagtcccatctgggtc

SEQ ID NO: 14221 - DNA, 34 bp, Homo Sapiens
ctggggattgtgggttcgagtcccatctgggtcg

SEQ ID NO: 14222 - DNA, 35 bp, Homo Sapiens
ctggggattgtgggttcgagtcccatctgggtcgc

SEQ ID NO: 14223 - DNA, 36 bp, Homo Sapiens
ctggggattgtgggttcgagtcccatctgggtcgcc

SEQ ID NO: 14224 - DNA, 37 bp, Homo Sapiens
ctggggattgtgggttcgagtcccatctgggtcgcca

SEQ ID NO: 14225 - DNA, 23 bp, Homo Sapiens
ctgggtagctcagtcggtagagc

SEQ ID NO: 14226 - DNA, 26 bp, Homo Sapiens
ctgggtagctcagtcggtagagcatc

SEQ ID NO: 14227 - DNA, 27 bp, Homo Sapiens
ctgggtagctcagtcggtagagcatca

SEQ ID NO: 14228 - DNA, 28 bp, Homo Sapiens
ctgggtagctcagtcggtagagcatcag

SEQ ID NO: 14229 - DNA, 30 bp, Homo Sapiens
ctgggtagctcagtcggtagagcatcagac

SEQ ID NO: 14230 - DNA, 23 bp, Homo Sapiens
ctgggttcgaatcccagcggggc

SEQ ID NO: 14231 - DNA, 24 bp, Homo Sapiens
ctgggttcgaatcccagcggggcc

SEQ ID NO: 14232 - DNA, 26 bp, Homo Sapiens
ctgggttcgaatcccagcggggcctc

SEQ ID NO: 14233 - DNA, 27 bp, Homo Sapiens
ctgggttcgaatcccagcggggcctcc

SEQ ID NO: 14234 - DNA, 25 bp, Homo Sapiens
ctgggttcgaatcccagcggtgcct

SEQ ID NO: 14235 - DNA, 26 bp, Homo Sapiens
ctgggttcgaatcccagcggtgcctc

SEQ ID NO: 14236 - DNA, 27 bp, Homo Sapiens
ctgggttcgaatcccagcggtgcctcc

SEQ ID NO: 14237 - DNA, 25 bp, Homo Sapiens
ctgggttcgagccccagtggaacca

SEQ ID NO: 14238 - DNA, 27 bp, Homo Sapiens
ctgggttcgagccccagtggaaccacc

SEQ ID NO: 14239 - DNA, 17 bp, Homo Sapiens
ctggtagagcggaggac

SEQ ID NO: 14240 - DNA, 18 bp, Homo Sapiens
ctggtagagcggaggact

SEQ ID NO: 14241 - DNA, 19 bp, Homo Sapiens
ctggtagagcggaggactg

SEQ ID NO: 14242 - DNA, 21 bp, Homo Sapiens
ctggtagagcggaggactgta

SEQ ID NO: 14243 - DNA, 26 bp, Homo Sapiens
ctggtagagcggaggactgtagatcc

SEQ ID NO: 14244 - DNA, 20 bp, Homo Sapiens
ctggtctagtggttaggatt

SEQ ID NO: 14245 - DNA, 45 bp, Homo Sapiens
ctggtctccaatggaggcgtgggttcgaatcccacttctgacacc

SEQ ID NO: 14246 - DNA, 25 bp, Homo Sapiens
ctggtctccggatggaggcgtgggt

SEQ ID NO: 14247 - DNA, 46 bp, Homo Sapiens
ctggtctccggatggaggcgtgggttcgaatcccacttctgacacc

SEQ ID NO: 14248 - DNA, 47 bp, Homo Sapiens
ctggtctccggatggaggcgtgggttcgaatcccacttctgacacca

SEQ ID NO: 14249 - DNA, 16 bp, Homo Sapiens
ctggtggtctagtggc

SEQ ID NO: 14250 - DNA, 21 bp, Homo Sapiens
ctggtggtctagtggctagga

SEQ ID NO: 14251 - DNA, 23 bp, Homo Sapiens
ctggtggtctagtggctaggatt

SEQ ID NO: 14252 - DNA, 24 bp, Homo Sapiens
ctggtggtctagtggctaggattc

SEQ ID NO: 14253 - DNA, 25 bp, Homo Sapiens
ctggtggtctagtggctaggattcg

SEQ ID NO: 14254 - DNA, 26 bp, Homo Sapiens
ctggtggtctagtggctaggattcgg

SEQ ID NO: 14255 - DNA, 27 bp, Homo Sapiens
ctggtggtctagtggctaggattcggc

SEQ ID NO: 14256 - DNA, 28 bp, Homo Sapiens
ctggtggtctagtggctaggattcggcg

SEQ ID NO: 14257 - DNA, 29 bp, Homo Sapiens
ctggtggtctagtggctaggattcggcgc

SEQ ID NO: 14258 - DNA, 30 bp, Homo Sapiens
ctggtggtctagtggctaggattcggcgct

SEQ ID NO: 14259 - DNA, 31 bp, Homo Sapiens
ctggtggtctagtggctaggattcggcgctt

SEQ ID NO: 14260 - DNA, 32 bp, Homo Sapiens
ctggtggtctagtggctaggattcggcgcttt

SEQ ID NO: 14261 - DNA, 33 bp, Homo Sapiens
ctggtggtctagtggctaggattcggcgctttc

SEQ ID NO: 14262 - DNA, 34 bp, Homo Sapiens
ctggtggtctagtggctaggattcggcgctttca

SEQ ID NO: 14263 - DNA, 35 bp, Homo Sapiens
ctggtggtctagtggctaggattcggcgctttcac

SEQ ID NO: 14264 - DNA, 36 bp, Homo Sapiens
ctggtggtctagtggctaggattcggcgctttcacc

SEQ ID NO: 14265 - DNA, 16 bp, Homo Sapiens
ctggtggtctagtggt

SEQ ID NO: 14266 - DNA, 19 bp, Homo Sapiens
ctggtggtctagtggttag

SEQ ID NO: 14267 - DNA, 20 bp, Homo Sapiens
ctggtggtctagtggttagg

SEQ ID NO: 14268 - DNA, 21 bp, Homo Sapiens
ctggtggtctagtggttagga

SEQ ID NO: 14269 - DNA, 22 bp, Homo Sapiens
ctggtggtctagtggttaggat

SEQ ID NO: 14270 - DNA, 23 bp, Homo Sapiens
ctggtggtctagtggttaggatt

SEQ ID NO: 14271 - DNA, 24 bp, Homo Sapiens
ctggtggtctagtggttaggattc

SEQ ID NO: 14272 - DNA, 25 bp, Homo Sapiens
ctggtggtctagtggttaggattcg

SEQ ID NO: 14273 - DNA, 26 bp, Homo Sapiens
ctggtggtctagtggttaggattcgg

SEQ ID NO: 14274 - DNA, 27 bp, Homo Sapiens
ctggtggtctagtggttaggattcggc

SEQ ID NO: 14275 - DNA, 28 bp, Homo Sapiens
ctggtggtctagtggttaggattcggcg

SEQ ID NO: 14276 - DNA, 29 bp, Homo Sapiens
ctggtggtctagtggttaggattcggcgc

SEQ ID NO: 14277 - DNA, 30 bp, Homo Sapiens
ctggtggtctagtggttaggattcggcgct

SEQ ID NO: 14278 - DNA, 31 bp, Homo Sapiens
ctggtggtctagtggttaggattcggcgctc

SEQ ID NO: 14279 - DNA, 32 bp, Homo Sapiens
ctggtggtctagtggttaggattcggcgctct

SEQ ID NO: 14280 - DNA, 33 bp, Homo Sapiens
ctggtggtctagtggttaggattcggcgctctc

SEQ ID NO: 14281 - DNA, 34 bp, Homo Sapiens
ctggtggtctagtggttaggattcggcgctctca

SEQ ID NO: 14282 - DNA, 35 bp, Homo Sapiens
ctggtggtctagtggttaggattcggcgctctcac

SEQ ID NO: 14283 - DNA, 36 bp, Homo Sapiens
ctggtggtctagtggttaggattcggcgctctcacc

SEQ ID NO: 14284 - DNA, 39 bp, Homo Sapiens
ctggtggtctagtggttaggattcggcgctctcaccgcc

SEQ ID NO: 14285 - DNA, 46 bp, Homo Sapiens
ctggtggtctagtggttaggattcggcgctctcaccgccgcggccc

SEQ ID NO: 14286 - DNA, 28 bp, Homo Sapiens
ctggtggttcagtggtagaattctcgcc

SEQ ID NO: 14287 - DNA, 29 bp, Homo Sapiens
ctggtggttcagtggtagaattctcgcct

SEQ ID NO: 14288 - DNA, 16 bp, Homo Sapiens
ctggtgtagtggtatc

SEQ ID NO: 14289 - DNA, 18 bp, Homo Sapiens
ctggtgtagtggtatcat

SEQ ID NO: 14290 - DNA, 21 bp, Homo Sapiens
ctggtgtagtggtatcatgca

SEQ ID NO: 14291 - DNA, 23 bp, Homo Sapiens
ctggtgtagtggtatcatgcaag

SEQ ID NO: 14292 - DNA, 24 bp, Homo Sapiens
ctggtgtagtggtatcatgcaaga

SEQ ID NO: 14293 - DNA, 26 bp, Homo Sapiens
ctggtgtagtggtatcatgcaagatt

SEQ ID NO: 14294 - DNA, 27 bp, Homo Sapiens
ctggtgtagtggtatcatgcaagattc

SEQ ID NO: 14295 - DNA, 28 bp, Homo Sapiens
ctggtgtagtggtatcatgcaagattcc

SEQ ID NO: 14296 - DNA, 29 bp, Homo Sapiens
ctggtgtagtggtatcatgcaagattccc

SEQ ID NO: 14297 - DNA, 33 bp, Homo Sapiens
ctggtgtagtggtatcatgcaagattcccattc

SEQ ID NO: 14298 - DNA, 34 bp, Homo Sapiens
ctggtgtagtggtatcatgcaagattcccattct

SEQ ID NO: 14299 - DNA, 38 bp, Homo Sapiens
ctggtgtagtggtatcatgcaagattcccattcttgcg

SEQ ID NO: 14300 - DNA, 42 bp, Homo Sapiens
ctggtgtagtggtatcatgcaagattcccattcttgcgaccc

SEQ ID NO: 14301 - DNA, 43 bp, Homo Sapiens
ctggtgtagtggtatcatgcaagattcccattcttgcgacccg

SEQ ID NO: 14302 - DNA, 44 bp, Homo Sapiens
ctggtgtagtggtatcatgcaagattcccattcttgcgacccgg

SEQ ID NO: 14303 - DNA, 45 bp, Homo Sapiens
ctggtgtagtggtatcatgcaagattcccattcttgcgacccggg

SEQ ID NO: 14304 - DNA, 46 bp, Homo Sapiens
ctggtgtagtggtatcatgcaagattcccattcttgcgacccgggt

SEQ ID NO: 14305 - DNA, 26 bp, Homo Sapiens
ctggttcaaatccgggtgccccctcc

SEQ ID NO: 14306 - DNA, 24 bp, Homo Sapiens
ctggttcaatcccgggtttcggca

SEQ ID NO: 14307 - DNA, 27 bp, Homo Sapiens
ctggttcaatcccgggtttcggcacca

SEQ ID NO: 14308 - DNA, 16 bp, Homo Sapiens
ctggttcgaatccggc

SEQ ID NO: 14309 - DNA, 17 bp, Homo Sapiens
ctggttcgaatccggct

SEQ ID NO: 14310 - DNA, 24 bp, Homo Sapiens
ctggttcgaatccggctcgaagga

SEQ ID NO: 14311 - DNA, 25 bp, Homo Sapiens
ctggttcgaatccggctcgaaggac

SEQ ID NO: 14312 - DNA, 26 bp, Homo Sapiens
ctggttcgaatccggctcgaaggacc

SEQ ID NO: 14313 - DNA, 27 bp, Homo Sapiens
ctggttcgaatccggctcgaaggacca

SEQ ID NO: 14314 - DNA, 25 bp, Homo Sapiens
ctggttcgaatccggctcggaggac

SEQ ID NO: 14315 - DNA, 26 bp, Homo Sapiens
ctggttcgaatccggctcggaggacc

SEQ ID NO: 14316 - DNA, 22 bp, Homo Sapiens
ctggttcgatcccgggtttcgg

SEQ ID NO: 14317 - DNA, 24 bp, Homo Sapiens
ctggttcgatcccgggtttcggca

SEQ ID NO: 14318 - DNA, 25 bp, Homo Sapiens
ctggttcgatcccgggtttcggcac

SEQ ID NO: 14319 - DNA, 26 bp, Homo Sapiens
ctggttcgatcccgggtttcggcacc

SEQ ID NO: 14320 - DNA, 27 bp, Homo Sapiens
ctggttcgatcccgggtttcggcacca

SEQ ID NO: 14321 - DNA, 16 bp, Homo Sapiens
ctggttcgattccggc

SEQ ID NO: 14322 - DNA, 17 bp, Homo Sapiens
ctggttcgattccggct

SEQ ID NO: 14323 - DNA, 18 bp, Homo Sapiens
ctggttcgattccggctc

SEQ ID NO: 14324 - DNA, 25 bp, Homo Sapiens
ctggttcgattccggctcgaaggac

SEQ ID NO: 14325 - DNA, 26 bp, Homo Sapiens
ctggttcgattccggctcgaaggacc

SEQ ID NO: 14326 - DNA, 27 bp, Homo Sapiens
ctggttcgattccggctcgaaggacca

SEQ ID NO: 14327 - DNA, 37 bp, Homo Sapiens
ctggttttcacccaggcggcccgggttcgactcccgg

SEQ ID NO: 14328 - DNA, 47 bp, Homo Sapiens
ctggttttcacccaggcggcccgggttcgactcccggtgtgggaacc

SEQ ID NO: 14329 - DNA, 48 bp, Homo Sapiens
ctggttttcacccaggcggcccgggttcgactcccggtgtgggaacca

SEQ ID NO: 14330 - DNA, 28 bp, Homo Sapiens
ctggttttcacccaggtggcccgggttc

SEQ ID NO: 14331 - DNA, 16 bp, Homo Sapiens
ctgtaaagctaactta

SEQ ID NO: 14332 - DNA, 18 bp, Homo Sapiens
ctgtaaagctaacttagc

SEQ ID NO: 14333 - DNA, 21 bp, Homo Sapiens
ctgtaaagctaacttagcatt

SEQ ID NO: 14334 - DNA, 22 bp, Homo Sapiens
ctgtaaagctaacttagcatta

SEQ ID NO: 14335 - DNA, 24 bp, Homo Sapiens
ctgtaaagctaacttagcattaac

SEQ ID NO: 14336 - DNA, 25 bp, Homo Sapiens
ctgtaaagctaacttagcattaacc

SEQ ID NO: 14337 - DNA, 26 bp, Homo Sapiens
ctgtaaagctaacttagcattaacct

SEQ ID NO: 14338 - DNA, 29 bp, Homo Sapiens
ctgtaaagctaacttagcattaacctttt

SEQ ID NO: 14339 - DNA, 30 bp, Homo Sapiens
ctgtaaagctaacttagcattaacctttta

SEQ ID NO: 14340 - DNA, 31 bp, Homo Sapiens
ctgtaaagctaacttagcattaaccttttaa

SEQ ID NO: 14341 - DNA, 32 bp, Homo Sapiens
ctgtaaagctaacttagcattaaccttttaag

SEQ ID NO: 14342 - DNA, 33 bp, Homo Sapiens
ctgtaaagctaacttagcattaaccttttaagt

SEQ ID NO: 14343 - DNA, 36 bp, Homo Sapiens
ctgtaaagctaacttagcattaaccttttaagttaa

SEQ ID NO: 14344 - DNA, 41 bp, Homo Sapiens
ctgtaaatctaaagacaggggttaggcctctttttaccacc

SEQ ID NO: 14345 - DNA, 42 bp, Homo Sapiens
ctgtaaatctaaagacaggggttaggcctctttttaccacca

SEQ ID NO: 14346 - DNA, 19 bp, Homo Sapiens
ctgtagatccttaggtcgc

SEQ ID NO: 14347 - DNA, 29 bp, Homo Sapiens
ctgtagcgcgatcggttagcgccttcggc

SEQ ID NO: 14348 - DNA, 28 bp, Homo Sapiens
ctgtagtgtagtggttatcacgttcgcc

SEQ ID NO: 14349 - DNA, 29 bp, Homo Sapiens
ctgtagtgtagtggttatcacgttcgcct

SEQ ID NO: 14350 - DNA, 30 bp, Homo Sapiens
ctgtagtgtagtggttatcacgttcgcctc

SEQ ID NO: 14351 - DNA, 31 bp, Homo Sapiens
ctgtagtgtagtggttatcacgttcgcctca

SEQ ID NO: 14352 - DNA, 32 bp, Homo Sapiens
ctgtagtgtagtggttatcacgttcgcctcac

SEQ ID NO: 14353 - DNA, 16 bp, Homo Sapiens
ctgtcacgcgggagac

SEQ ID NO: 14354 - DNA, 17 bp, Homo Sapiens
ctgtcacgcgggagacc

SEQ ID NO: 14355 - DNA, 18 bp, Homo Sapiens
ctgtcacgcgggagaccg

SEQ ID NO: 14356 - DNA, 20 bp, Homo Sapiens
ctgtcacgcgggagaccggg

SEQ ID NO: 14357 - DNA, 22 bp, Homo Sapiens
ctgtcacgcgggagaccggggt

SEQ ID NO: 14358 - DNA, 23 bp, Homo Sapiens
ctgtcacgcgggagaccggggtt

SEQ ID NO: 14359 - DNA, 35 bp, Homo Sapiens
ctgtcacgcgggagaccggggttcaattccccgac

SEQ ID NO: 14360 - DNA, 38 bp, Homo Sapiens
ctgtcacgcgggagaccggggttcaattccccgacggg

SEQ ID NO: 14361 - DNA, 40 bp, Homo Sapiens
ctgtcacgcgggagaccggggttcaattccccgacgggga

SEQ ID NO: 14362 - DNA, 42 bp, Homo Sapiens
ctgtcacgcgggagaccggggttcaattccccgacggggagc

SEQ ID NO: 14363 - DNA, 43 bp, Homo Sapiens
ctgtcacgcgggagaccggggttcaattccccgacggggagcc

SEQ ID NO: 14364 - DNA, 44 bp, Homo Sapiens
ctgtcacgcgggagaccggggttcaattccccgacggggagcca

SEQ ID NO: 14365 - DNA, 25 bp, Homo Sapiens
ctgtcacgcgggagaccggggttcg

SEQ ID NO: 14366 - DNA, 32 bp, Homo Sapiens
ctgtcacgcgggagaccggggttcgattcccc

SEQ ID NO: 14367 - DNA, 35 bp, Homo Sapiens
ctgtcacgcgggagaccggggttcgattccccaac

SEQ ID NO: 14368 - DNA, 34 bp, Homo Sapiens
ctgtcacgcgggagaccggggttcgattccccga

SEQ ID NO: 14369 - DNA, 35 bp, Homo Sapiens
ctgtcacgcgggagaccggggttcgattccccgac

SEQ ID NO: 14370 - DNA, 36 bp, Homo Sapiens
ctgtcacgcgggagaccggggttcgattccccgacg

SEQ ID NO: 14371 - DNA, 37 bp, Homo Sapiens
ctgtcacgcgggagaccggggttcgattccccgacgg

SEQ ID NO: 14372 - DNA, 38 bp, Homo Sapiens
ctgtcacgcgggagaccggggttcgattccccgacggg

SEQ ID NO: 14373 - DNA, 39 bp, Homo Sapiens
ctgtcacgcgggagaccggggttcgattccccgacgggg

SEQ ID NO: 14374 - DNA, 41 bp, Homo Sapiens
ctgtcacgcgggagaccggggttcgattccccgacggggag

SEQ ID NO: 14375 - DNA, 42 bp, Homo Sapiens
ctgtcacgcgggagaccggggttcgattccccgacggggagc

SEQ ID NO: 14376 - DNA, 43 bp, Homo Sapiens
ctgtcacgcgggagaccggggttcgattccccgacggggagcc

SEQ ID NO: 14377 - DNA, 44 bp, Homo Sapiens
ctgtcacgcgggagaccggggttcgattccccgacggggagcca

SEQ ID NO: 14378 - DNA, 16 bp, Homo Sapiens
ctgtggcgcaatcggt

SEQ ID NO: 14379 - DNA, 36 bp, Homo Sapiens
ctgtggcgcaatcggttagcgcgttcggctgttaac

SEQ ID NO: 14380 - DNA, 16 bp, Homo Sapiens
ctgtggcgcaatggac

SEQ ID NO: 14381 - DNA, 28 bp, Homo Sapiens
ctgtggcgcaatggatagcgcattggac

SEQ ID NO: 14382 - DNA, 18 bp, Homo Sapiens
ctgtggtctagtggttag

SEQ ID NO: 14383 - DNA, 19 bp, Homo Sapiens
ctgtggtctagtggttagg

SEQ ID NO: 14384 - DNA, 20 bp, Homo Sapiens
ctgtggtctagtggttagga

SEQ ID NO: 14385 - DNA, 45 bp, Homo Sapiens
ctgttaaccgaaaggttggtggttcgagcccacccagggacgcca

SEQ ID NO: 14386 - DNA, 18 bp, Homo Sapiens
ctgttaactaagtgtttg

SEQ ID NO: 14387 - DNA, 19 bp, Homo Sapiens
ctgttaactaagtgtttgt

SEQ ID NO: 14388 - DNA, 20 bp, Homo Sapiens
ctgttaactaagtgtttgtg

SEQ ID NO: 14389 - DNA, 25 bp, Homo Sapiens
ctgttaactaagtgtttgtgggttt

SEQ ID NO: 14390 - DNA, 26 bp, Homo Sapiens
ctgttaactaagtgtttgtgggttta

SEQ ID NO: 14391 - DNA, 27 bp, Homo Sapiens
ctgttaactaagtgtttgtgggtttaa

SEQ ID NO: 14392 - DNA, 32 bp, Homo Sapiens
ctgttaactaagtgtttgtgggtttaagtccc

SEQ ID NO: 14393 - DNA, 35 bp, Homo Sapiens
ctgttaactaagtgtttgtgggtttaagtcccatt

SEQ ID NO: 14394 - DNA, 36 bp, Homo Sapiens
ctgttaactaagtgtttgtgggtttaagtcccattg

SEQ ID NO: 14395 - DNA, 39 bp, Homo Sapiens
ctgttaactaagtgtttgtgggtttaagtcccattggtc

SEQ ID NO: 14396 - DNA, 40 bp, Homo Sapiens
ctgttaactaagtgtttgtgggtttaagtcccattggtct

SEQ ID NO: 14397 - DNA, 42 bp, Homo Sapiens
ctgttaactaagtgtttgtgggtttaagtcccattggtctag

SEQ ID NO: 14398 - DNA, 43 bp, Homo Sapiens
ctgttaactaagtgtttgtgggtttaagtcccattggtctagc

SEQ ID NO: 14399 - DNA, 44 bp, Homo Sapiens
ctgttaactaagtgtttgtgggtttaagtcccattggtctagcc

SEQ ID NO: 14400 - DNA, 45 bp, Homo Sapiens
ctgttaactaagtgtttgtgggtttaagtcccattggtctagcca

SEQ ID NO: 14401 - DNA, 19 bp, Homo Sapiens
cttaaaactttacagtcag

SEQ ID NO: 14402 - DNA, 20 bp, Homo Sapiens
cttaaaactttacagtcaga

SEQ ID NO: 14403 - DNA, 21 bp, Homo Sapiens
cttaaaactttacagtcagag

SEQ ID NO: 14404 - DNA, 22 bp, Homo Sapiens
cttaaaactttacagtcagagg

SEQ ID NO: 14405 - DNA, 23 bp, Homo Sapiens
cttaaaactttacagtcagaggt

SEQ ID NO: 14406 - DNA, 24 bp, Homo Sapiens
cttaaaactttacagtcagaggtt

SEQ ID NO: 14407 - DNA, 25 bp, Homo Sapiens
cttaaaactttacagtcagaggttc

SEQ ID NO: 14408 - DNA, 26 bp, Homo Sapiens
cttaaaactttacagtcagaggttca

SEQ ID NO: 14409 - DNA, 33 bp, Homo Sapiens
cttaaaactttacagtcagaggttcaattcctc

SEQ ID NO: 14410 - DNA, 34 bp, Homo Sapiens
cttaaaactttacagtcagaggttcaattcctct

SEQ ID NO: 14411 - DNA, 35 bp, Homo Sapiens
cttaaaactttacagtcagaggttcaattcctctt

SEQ ID NO: 14412 - DNA, 36 bp, Homo Sapiens
cttaaaactttacagtcagaggttcaattcctcttc

SEQ ID NO: 14413 - DNA, 37 bp, Homo Sapiens
cttaaaactttacagtcagaggttcaattcctcttct

SEQ ID NO: 14414 - DNA, 16 bp, Homo Sapiens
cttaaacccccttatt

SEQ ID NO: 14415 - DNA, 17 bp, Homo Sapiens
cttaaacccccttattt

SEQ ID NO: 14416 - DNA, 18 bp, Homo Sapiens
cttaaacccccttatttc

SEQ ID NO: 14417 - DNA, 19 bp, Homo Sapiens
cttaaacccccttatttct

SEQ ID NO: 14418 - DNA, 20 bp, Homo Sapiens
cttaaacccccttatttcta

SEQ ID NO: 14419 - DNA, 21 bp, Homo Sapiens
cttaaacccccttatttctac

SEQ ID NO: 14420 - DNA, 22 bp, Homo Sapiens
cttaaacccccttatttctacc

SEQ ID NO: 14421 - DNA, 23 bp, Homo Sapiens
cttaaacccccttatttctacca

SEQ ID NO: 14422 - DNA, 16 bp, Homo Sapiens
cttaacacaaagcacc

SEQ ID NO: 14423 - DNA, 17 bp, Homo Sapiens
cttaacacaaagcaccc

SEQ ID NO: 14424 - DNA, 18 bp, Homo Sapiens
cttaacacaaagcaccca

SEQ ID NO: 14425 - DNA, 19 bp, Homo Sapiens
cttaacacaaagcacccaa

SEQ ID NO: 14426 - DNA, 20 bp, Homo Sapiens
cttaacacaaagcacccaac

SEQ ID NO: 14427 - DNA, 21 bp, Homo Sapiens
cttaacacaaagcacccaact

SEQ ID NO: 14428 - DNA, 22 bp, Homo Sapiens
cttaacacaaagcacccaactt

SEQ ID NO: 14429 - DNA, 23 bp, Homo Sapiens
cttaacacaaagcacccaactta

SEQ ID NO: 14430 - DNA, 24 bp, Homo Sapiens
cttaacacaaagcacccaacttac

SEQ ID NO: 14431 - DNA, 25 bp, Homo Sapiens
cttaacacaaagcacccaacttaca

SEQ ID NO: 14432 - DNA, 26 bp, Homo Sapiens
cttaacacaaagcacccaacttacac

SEQ ID NO: 14433 - DNA, 27 bp, Homo Sapiens
cttaacacaaagcacccaacttacact

SEQ ID NO: 14434 - DNA, 28 bp, Homo Sapiens
cttaacacaaagcacccaacttacactt

SEQ ID NO: 14435 - DNA, 29 bp, Homo Sapiens
cttaacacaaagcacccaacttacactta

SEQ ID NO: 14436 - DNA, 30 bp, Homo Sapiens
cttaacacaaagcacccaacttacacttag

SEQ ID NO: 14437 - DNA, 31 bp, Homo Sapiens
cttaacacaaagcacccaacttacacttagg

SEQ ID NO: 14438 - DNA, 32 bp, Homo Sapiens
cttaacacaaagcacccaacttacacttagga

SEQ ID NO: 14439 - DNA, 33 bp, Homo Sapiens
cttaacacaaagcacccaacttacacttaggag

SEQ ID NO: 14440 - DNA, 34 bp, Homo Sapiens
cttaacacaaagcacccaacttacacttaggaga

SEQ ID NO: 14441 - DNA, 35 bp, Homo Sapiens
cttaacacaaagcacccaacttacacttaggagat

SEQ ID NO: 14442 - DNA, 37 bp, Homo Sapiens
cttaacacaaagcacccaacttacacttaggagattt

SEQ ID NO: 14443 - DNA, 38 bp, Homo Sapiens
cttaacacaaagcacccaacttacacttaggagatttc

SEQ ID NO: 14444 - DNA, 40 bp, Homo Sapiens
cttaacacaaagcacccaacttacacttaggagatttcaa

SEQ ID NO: 14445 - DNA, 41 bp, Homo Sapiens
cttaacacaaagcacccaacttacacttaggagatttcaac

SEQ ID NO: 14446 - DNA, 44 bp, Homo Sapiens
cttaacacaaagcacccaacttacacttaggagatttcaactta

SEQ ID NO: 14447 - DNA, 45 bp, Homo Sapiens
cttaacacaaagcacccaacttacacttaggagatttcaacttaa

SEQ ID NO: 14448 - DNA, 46 bp, Homo Sapiens
cttaacacaaagcacccaacttacacttaggagatttcaacttaac

SEQ ID NO: 14449 - DNA, 47 bp, Homo Sapiens
cttaacacaaagcacccaacttacacttaggagatttcaacttaact

SEQ ID NO: 14450 - DNA, 16 bp, Homo Sapiens
cttaacttgaccgctc

SEQ ID NO: 14451 - DNA, 17 bp, Homo Sapiens
cttaacttgaccgctct

SEQ ID NO: 14452 - DNA, 18 bp, Homo Sapiens
cttaacttgaccgctctg

SEQ ID NO: 14453 - DNA, 19 bp, Homo Sapiens
cttaacttgaccgctctga

SEQ ID NO: 14454 - DNA, 20 bp, Homo Sapiens
cttaacttgaccgctctgac

SEQ ID NO: 14455 - DNA, 21 bp, Homo Sapiens
cttaacttgaccgctctgacc

SEQ ID NO: 14456 - DNA, 22 bp, Homo Sapiens
cttaacttgaccgctctgacca

SEQ ID NO: 14457 - DNA, 16 bp, Homo Sapiens
cttaagatccaatgga

SEQ ID NO: 14458 - DNA, 17 bp, Homo Sapiens
cttaagatccaatggac

SEQ ID NO: 14459 - DNA, 18 bp, Homo Sapiens
cttaagatccaatggaca

SEQ ID NO: 14460 - DNA, 19 bp, Homo Sapiens
cttaagatccaatggacat

SEQ ID NO: 14461 - DNA, 20 bp, Homo Sapiens
cttaagatccaatggacata

SEQ ID NO: 14462 - DNA, 21 bp, Homo Sapiens
cttaagatccaatggacatat

SEQ ID NO: 14463 - DNA, 16 bp, Homo Sapiens
cttaatcccagggtcg

SEQ ID NO: 14464 - DNA, 17 bp, Homo Sapiens
cttaatcccagggtcgt

SEQ ID NO: 14465 - DNA, 18 bp, Homo Sapiens
cttaatcccagggtcgtg

SEQ ID NO: 14466 - DNA, 19 bp, Homo Sapiens
cttaatcccagggtcgtgg

SEQ ID NO: 14467 - DNA, 22 bp, Homo Sapiens
cttaatcccagggtcgtgggtt

SEQ ID NO: 14468 - DNA, 36 bp, Homo Sapiens
cttaatcccagggtcgtgggttcgagccccacgttg

SEQ ID NO: 14469 - DNA, 42 bp, Homo Sapiens
cttaatcccagggtcgtgggttcgagccccacgttgggcgcc

SEQ ID NO: 14470 - DNA, 16 bp, Homo Sapiens
cttaatctcagggtcg

SEQ ID NO: 14471 - DNA, 17 bp, Homo Sapiens
cttaatctcagggtcgt

SEQ ID NO: 14472 - DNA, 18 bp, Homo Sapiens
cttaatctcagggtcgtg

SEQ ID NO: 14473 - DNA, 19 bp, Homo Sapiens
cttaatctcagggtcgtgg

SEQ ID NO: 14474 - DNA, 22 bp, Homo Sapiens
cttaatctcagggtcgtgggtt

SEQ ID NO: 14475 - DNA, 30 bp, Homo Sapiens
cttaatctcagggtcgtgggttcgagcccc

SEQ ID NO: 14476 - DNA, 42 bp, Homo Sapiens
cttaatctcagggtcgtgggttcgagccccacgttgggcgcc

SEQ ID NO: 14477 - DNA, 43 bp, Homo Sapiens
cttaatctcagggtcgtgggttcgagccccacgttgggcgcca

SEQ ID NO: 14478 - DNA, 18 bp, Homo Sapiens
cttaattaaagtggctga

SEQ ID NO: 14479 - DNA, 19 bp, Homo Sapiens
cttaattaaagtggctgat

SEQ ID NO: 14480 - DNA, 20 bp, Homo Sapiens
cttaattaaagtggctgatt

SEQ ID NO: 14481 - DNA, 21 bp, Homo Sapiens
cttaattaaagtggctgattt

SEQ ID NO: 14482 - DNA, 22 bp, Homo Sapiens
cttaattaaagtggctgatttg

SEQ ID NO: 14483 - DNA, 23 bp, Homo Sapiens
cttaattaaagtggctgatttgc

SEQ ID NO: 14484 - DNA, 16 bp, Homo Sapiens
cttacacttaggagat

SEQ ID NO: 14485 - DNA, 17 bp, Homo Sapiens
cttacacttaggagatt

SEQ ID NO: 14486 - DNA, 19 bp, Homo Sapiens
cttacacttaggagatttc

SEQ ID NO: 14487 - DNA, 20 bp, Homo Sapiens
cttacacttaggagatttca

SEQ ID NO: 14488 - DNA, 21 bp, Homo Sapiens
cttacacttaggagatttcaa

SEQ ID NO: 14489 - DNA, 22 bp, Homo Sapiens
cttacacttaggagatttcaac

SEQ ID NO: 14490 - DNA, 23 bp, Homo Sapiens
cttacacttaggagatttcaact

SEQ ID NO: 14491 - DNA, 24 bp, Homo Sapiens
cttacacttaggagatttcaactt

SEQ ID NO: 14492 - DNA, 25 bp, Homo Sapiens
cttacacttaggagatttcaactta

SEQ ID NO: 14493 - DNA, 26 bp, Homo Sapiens
cttacacttaggagatttcaacttaa

SEQ ID NO: 14494 - DNA, 27 bp, Homo Sapiens
cttacacttaggagatttcaacttaac

SEQ ID NO: 14495 - DNA, 28 bp, Homo Sapiens
cttacacttaggagatttcaacttaact

SEQ ID NO: 14496 - DNA, 29 bp, Homo Sapiens
cttacacttaggagatttcaacttaactt

SEQ ID NO: 14497 - DNA, 30 bp, Homo Sapiens
cttacacttaggagatttcaacttaacttg

SEQ ID NO: 14498 - DNA, 31 bp, Homo Sapiens
cttacacttaggagatttcaacttaacttga

SEQ ID NO: 14499 - DNA, 32 bp, Homo Sapiens
cttacacttaggagatttcaacttaacttgac

SEQ ID NO: 14500 - DNA, 33 bp, Homo Sapiens
cttacacttaggagatttcaacttaacttgacc

SEQ ID NO: 14501 - DNA, 34 bp, Homo Sapiens
cttacacttaggagatttcaacttaacttgaccg

SEQ ID NO: 14502 - DNA, 35 bp, Homo Sapiens
cttacacttaggagatttcaacttaacttgaccgc

SEQ ID NO: 14503 - DNA, 36 bp, Homo Sapiens
cttacacttaggagatttcaacttaacttgaccgct

SEQ ID NO: 14504 - DNA, 37 bp, Homo Sapiens
cttacacttaggagatttcaacttaacttgaccgctc

SEQ ID NO: 14505 - DNA, 38 bp, Homo Sapiens
cttacacttaggagatttcaacttaacttgaccgctct

SEQ ID NO: 14506 - DNA, 39 bp, Homo Sapiens
cttacacttaggagatttcaacttaacttgaccgctctg

SEQ ID NO: 14507 - DNA, 40 bp, Homo Sapiens
cttacacttaggagatttcaacttaacttgaccgctctga

SEQ ID NO: 14508 - DNA, 41 bp, Homo Sapiens
cttacacttaggagatttcaacttaacttgaccgctctgac

SEQ ID NO: 14509 - DNA, 42 bp, Homo Sapiens
cttacacttaggagatttcaacttaacttgaccgctctgacc

SEQ ID NO: 14510 - DNA, 43 bp, Homo Sapiens
cttacacttaggagatttcaacttaacttgaccgctctgacca

SEQ ID NO: 14511 - DNA, 16 bp, Homo Sapiens
cttacctcctcaaagc

SEQ ID NO: 14512 - DNA, 17 bp, Homo Sapiens
cttacctcctcaaagca

SEQ ID NO: 14513 - DNA, 21 bp, Homo Sapiens
cttacctcctcaaagcaatac

SEQ ID NO: 14514 - DNA, 22 bp, Homo Sapiens
cttacctcctcaaagcaataca

SEQ ID NO: 14515 - DNA, 23 bp, Homo Sapiens
cttacctcctcaaagcaatacac

SEQ ID NO: 14516 - DNA, 24 bp, Homo Sapiens
cttacctcctcaaagcaatacact

SEQ ID NO: 14517 - DNA, 25 bp, Homo Sapiens
cttacctcctcaaagcaatacactg

SEQ ID NO: 14518 - DNA, 26 bp, Homo Sapiens
cttacctcctcaaagcaatacactga

SEQ ID NO: 14519 - DNA, 27 bp, Homo Sapiens
cttacctcctcaaagcaatacactgaa

SEQ ID NO: 14520 - DNA, 32 bp, Homo Sapiens
cttacctcctcaaagcaatacactgaaaatgt

SEQ ID NO: 14521 - DNA, 43 bp, Homo Sapiens
cttacctcctcaaagcaatacactgaaaatgtttagacgggct

SEQ ID NO: 14522 - DNA, 18 bp, Homo Sapiens
cttacgaccccttattta

SEQ ID NO: 14523 - DNA, 19 bp, Homo Sapiens
cttacgaccccttatttac

SEQ ID NO: 14524 - DNA, 20 bp, Homo Sapiens
cttacgaccccttatttacc

SEQ ID NO: 14525 - DNA, 21 bp, Homo Sapiens
cttacgaccccttatttaccc

SEQ ID NO: 14526 - DNA, 22 bp, Homo Sapiens
cttacgaccccttatttacccc

SEQ ID NO: 14527 - DNA, 23 bp, Homo Sapiens
cttacgaccccttatttacccca

SEQ ID NO: 14528 - DNA, 17 bp, Homo Sapiens
cttagcattaacctttt

SEQ ID NO: 14529 - DNA, 19 bp, Homo Sapiens
cttagcattaaccttttaa

SEQ ID NO: 14530 - DNA, 20 bp, Homo Sapiens
cttagcattaaccttttaag

SEQ ID NO: 14531 - DNA, 21 bp, Homo Sapiens
cttagcattaaccttttaagt

SEQ ID NO: 14532 - DNA, 23 bp, Homo Sapiens
cttagcattaaccttttaagtta

SEQ ID NO: 14533 - DNA, 24 bp, Homo Sapiens
cttagcattaaccttttaagttaa

SEQ ID NO: 14534 - DNA, 38 bp, Homo Sapiens
cttagcattaaccttttaagttaaagattaagagaacc

SEQ ID NO: 14535 - DNA, 44 bp, Homo Sapiens
cttagcattaaccttttaagttaaagattaagagaaccaacacc

SEQ ID NO: 14536 - DNA, 16 bp, Homo Sapiens
cttagcgcagcgggca

SEQ ID NO: 14537 - DNA, 24 bp, Homo Sapiens
cttagctgttaactaagtgtttgt

SEQ ID NO: 14538 - DNA, 28 bp, Homo Sapiens
cttagctgttaactaagtgtttgtgggt

SEQ ID NO: 14539 - DNA, 29 bp, Homo Sapiens
cttagctgttaactaagtgtttgtgggtt

SEQ ID NO: 14540 - DNA, 30 bp, Homo Sapiens
cttagctgttaactaagtgtttgtgggttt

SEQ ID NO: 14541 - DNA, 31 bp, Homo Sapiens
cttagctgttaactaagtgtttgtgggttta

SEQ ID NO: 14542 - DNA, 32 bp, Homo Sapiens
cttagctgttaactaagtgtttgtgggtttaa

SEQ ID NO: 14543 - DNA, 33 bp, Homo Sapiens
cttagctgttaactaagtgtttgtgggtttaag

SEQ ID NO: 14544 - DNA, 40 bp, Homo Sapiens
cttagctgttaactaagtgtttgtgggtttaagtcccatt

SEQ ID NO: 14545 - DNA, 44 bp, Homo Sapiens
cttagctgttaactaagtgtttgtgggtttaagtcccattggtc

SEQ ID NO: 14546 - DNA, 45 bp, Homo Sapiens
cttagctgttaactaagtgtttgtgggtttaagtcccattggtct

SEQ ID NO: 14547 - DNA, 48 bp, Homo Sapiens
cttagctgttaactaagtgtttgtgggtttaagtcccattggtctagc

SEQ ID NO: 14548 - DNA, 23 bp, Homo Sapiens
cttagcttaattaaagtggctga

SEQ ID NO: 14549 - DNA, 23 bp, Homo Sapiens
cttagctttgggtgctaatggtg

SEQ ID NO: 14550 - DNA, 24 bp, Homo Sapiens
cttagctttgggtgctaatggtgg

SEQ ID NO: 14551 - DNA, 25 bp, Homo Sapiens
cttagctttgggtgctaatggtgga

SEQ ID NO: 14552 - DNA, 26 bp, Homo Sapiens
cttagctttgggtgctaatggtggag

SEQ ID NO: 14553 - DNA, 27 bp, Homo Sapiens
cttagctttgggtgctaatggtggagt

SEQ ID NO: 14554 - DNA, 28 bp, Homo Sapiens
cttagctttgggtgctaatggtggagtt

SEQ ID NO: 14555 - DNA, 29 bp, Homo Sapiens
cttagctttgggtgctaatggtggagtta

SEQ ID NO: 14556 - DNA, 30 bp, Homo Sapiens
cttagctttgggtgctaatggtggagttaa

SEQ ID NO: 14557 - DNA, 31 bp, Homo Sapiens
cttagctttgggtgctaatggtggagttaaa

SEQ ID NO: 14558 - DNA, 32 bp, Homo Sapiens
cttagctttgggtgctaatggtggagttaaag

SEQ ID NO: 14559 - DNA, 33 bp, Homo Sapiens
cttagctttgggtgctaatggtggagttaaaga

SEQ ID NO: 14560 - DNA, 34 bp, Homo Sapiens
cttagctttgggtgctaatggtggagttaaagac

SEQ ID NO: 14561 - DNA, 35 bp, Homo Sapiens
cttagctttgggtgctaatggtggagttaaagact

SEQ ID NO: 14562 - DNA, 36 bp, Homo Sapiens
cttagctttgggtgctaatggtggagttaaagactt

SEQ ID NO: 14563 - DNA, 37 bp, Homo Sapiens
cttagctttgggtgctaatggtggagttaaagacttt

SEQ ID NO: 14564 - DNA, 42 bp, Homo Sapiens
cttagctttgggtgctaatggtggagttaaagactttttctc

SEQ ID NO: 14565 - DNA, 45 bp, Homo Sapiens
cttagctttgggtgctaatggtggagttaaagactttttctctga

SEQ ID NO: 14566 - DNA, 46 bp, Homo Sapiens
cttagctttgggtgctaatggtggagttaaagactttttctctgac

SEQ ID NO: 14567 - DNA, 47 bp, Homo Sapiens
cttagctttgggtgctaatggtggagttaaagactttttctctgacc

SEQ ID NO: 14568 - DNA, 48 bp, Homo Sapiens
cttagctttgggtgctaatggtggagttaaagactttttctctgacca

SEQ ID NO: 14569 - DNA, 16 bp, Homo Sapiens
cttaggagatttcaac

SEQ ID NO: 14570 - DNA, 17 bp, Homo Sapiens
cttaggagatttcaact

SEQ ID NO: 14571 - DNA, 18 bp, Homo Sapiens
cttaggagatttcaactt

SEQ ID NO: 14572 - DNA, 19 bp, Homo Sapiens
cttaggagatttcaactta

SEQ ID NO: 14573 - DNA, 20 bp, Homo Sapiens
cttaggagatttcaacttaa

SEQ ID NO: 14574 - DNA, 21 bp, Homo Sapiens
cttaggagatttcaacttaac

SEQ ID NO: 14575 - DNA, 22 bp, Homo Sapiens
cttaggagatttcaacttaact

SEQ ID NO: 14576 - DNA, 23 bp, Homo Sapiens
cttaggagatttcaacttaactt

SEQ ID NO: 14577 - DNA, 24 bp, Homo Sapiens
cttaggagatttcaacttaacttg

SEQ ID NO: 14578 - DNA, 25 bp, Homo Sapiens
cttaggagatttcaacttaacttga

SEQ ID NO: 14579 - DNA, 26 bp, Homo Sapiens
cttaggagatttcaacttaacttgac

SEQ ID NO: 14580 - DNA, 27 bp, Homo Sapiens
cttaggagatttcaacttaacttgacc

SEQ ID NO: 14581 - DNA, 28 bp, Homo Sapiens
cttaggagatttcaacttaacttgaccg

SEQ ID NO: 14582 - DNA, 29 bp, Homo Sapiens
cttaggagatttcaacttaacttgaccgc

SEQ ID NO: 14583 - DNA, 30 bp, Homo Sapiens
cttaggagatttcaacttaacttgaccgct

SEQ ID NO: 14584 - DNA, 31 bp, Homo Sapiens
cttaggagatttcaacttaacttgaccgctc

SEQ ID NO: 14585 - DNA, 32 bp, Homo Sapiens
cttaggagatttcaacttaacttgaccgctct

SEQ ID NO: 14586 - DNA, 33 bp, Homo Sapiens
cttaggagatttcaacttaacttgaccgctctg

SEQ ID NO: 14587 - DNA, 34 bp, Homo Sapiens
cttaggagatttcaacttaacttgaccgctctga

SEQ ID NO: 14588 - DNA, 35 bp, Homo Sapiens
cttaggagatttcaacttaacttgaccgctctgac

SEQ ID NO: 14589 - DNA, 36 bp, Homo Sapiens
cttaggagatttcaacttaacttgaccgctctgacc

SEQ ID NO: 14590 - DNA, 37 bp, Homo Sapiens
cttaggagatttcaacttaacttgaccgctctgacca

SEQ ID NO: 14591 - DNA, 35 bp, Homo Sapiens
cttaggccccaaaaattttggtgcaactccaaata

SEQ ID NO: 14592 - DNA, 16 bp, Homo Sapiens
cttaggtcgctggttc

SEQ ID NO: 14593 - DNA, 17 bp, Homo Sapiens
cttaggtcgctggttcg

SEQ ID NO: 14594 - DNA, 34 bp, Homo Sapiens
cttaggtcgctggttcgaatccggctcgaaggac

SEQ ID NO: 14595 - DNA, 35 bp, Homo Sapiens
cttaggtcgctggttcgaatccggctcgaaggacc

SEQ ID NO: 14596 - DNA, 34 bp, Homo Sapiens
cttaggtcgctggttcgaatccggctcggaggac

SEQ ID NO: 14597 - DNA, 35 bp, Homo Sapiens
cttaggtcgctggttcgaatccggctcggaggacc

SEQ ID NO: 14598 - DNA, 36 bp, Homo Sapiens
cttaggtcgctggttcgaatccggctcggaggacca

SEQ ID NO: 14599 - DNA, 34 bp, Homo Sapiens
cttaggtcgctggttcgattccggctcgaaggac

SEQ ID NO: 14600 - DNA, 35 bp, Homo Sapiens
cttaggtcgctggttcgattccggctcgaaggacc

SEQ ID NO: 14601 - DNA, 36 bp, Homo Sapiens
cttaggtcgctggttcgattccggctcgaaggacca

SEQ ID NO: 14602 - DNA, 18 bp, Homo Sapiens
cttataatgccgaggttg

SEQ ID NO: 14603 - DNA, 19 bp, Homo Sapiens
cttataatgccgaggttgt

SEQ ID NO: 14604 - DNA, 20 bp, Homo Sapiens
cttataatgccgaggttgtg

SEQ ID NO: 14605 - DNA, 22 bp, Homo Sapiens
cttataatgccgaggttgtgag

SEQ ID NO: 14606 - DNA, 23 bp, Homo Sapiens
cttataatgccgaggttgtgagt

SEQ ID NO: 14607 - DNA, 24 bp, Homo Sapiens
cttataatgccgaggttgtgagtt

SEQ ID NO: 14608 - DNA, 25 bp, Homo Sapiens
cttataatgccgaggttgtgagttc

SEQ ID NO: 14609 - DNA, 16 bp, Homo Sapiens
cttcaaacctgccggg

SEQ ID NO: 14610 - DNA, 17 bp, Homo Sapiens
cttcaaacctgccgggg

SEQ ID NO: 14611 - DNA, 18 bp, Homo Sapiens
cttcaaacctgccggggc

SEQ ID NO: 14612 - DNA, 19 bp, Homo Sapiens
cttcaaacctgccggggct

SEQ ID NO: 14613 - DNA, 20 bp, Homo Sapiens
cttcaaacctgccggggctt

SEQ ID NO: 14614 - DNA, 21 bp, Homo Sapiens
cttcaaacctgccggggcttc

SEQ ID NO: 14615 - DNA, 22 bp, Homo Sapiens
cttcaaacctgccggggcttcc

SEQ ID NO: 14616 - DNA, 23 bp, Homo Sapiens
cttcaaacctgccggggcttcca

SEQ ID NO: 14617 - DNA, 40 bp, Homo Sapiens
cttcaaagccctcagtaagttgcaatacttaatttctgcc

SEQ ID NO: 14618 - DNA, 41 bp, Homo Sapiens
cttcaaagccctcagtaagttgcaatacttaatttctgcca

SEQ ID NO: 14619 - DNA, 17 bp, Homo Sapiens
cttccaagcagttgacc

SEQ ID NO: 14620 - DNA, 18 bp, Homo Sapiens
cttccaagcagttgaccc

SEQ ID NO: 14621 - DNA, 19 bp, Homo Sapiens
cttccaagcagttgacccg

SEQ ID NO: 14622 - DNA, 20 bp, Homo Sapiens
cttccaagcagttgacccgg

SEQ ID NO: 14623 - DNA, 21 bp, Homo Sapiens
cttccaagcagttgacccggg

SEQ ID NO: 14624 - DNA, 22 bp, Homo Sapiens
cttccaagcagttgacccgggt

SEQ ID NO: 14625 - DNA, 23 bp, Homo Sapiens
cttccaagcagttgacccgggtt

SEQ ID NO: 14626 - DNA, 34 bp, Homo Sapiens
cttccaagcagttgacccgggttcgattcccggc

SEQ ID NO: 14627 - DNA, 35 bp, Homo Sapiens
cttccaagcagttgacccgggttcgattcccggcc

SEQ ID NO: 14628 - DNA, 16 bp, Homo Sapiens
cttccaattaactagt

SEQ ID NO: 14629 - DNA, 17 bp, Homo Sapiens
cttccaattaactagtt

SEQ ID NO: 14630 - DNA, 20 bp, Homo Sapiens
cttccaattaactagttttg

SEQ ID NO: 14631 - DNA, 21 bp, Homo Sapiens
cttccaattaactagttttga

SEQ ID NO: 14632 - DNA, 22 bp, Homo Sapiens
cttccaattaactagttttgac

SEQ ID NO: 14633 - DNA, 23 bp, Homo Sapiens
cttccaattaactagttttgaca

SEQ ID NO: 14634 - DNA, 24 bp, Homo Sapiens
cttccaattaactagttttgacaa

SEQ ID NO: 14635 - DNA, 25 bp, Homo Sapiens
cttccaattaactagttttgacaac

SEQ ID NO: 14636 - DNA, 26 bp, Homo Sapiens
cttccaattaactagttttgacaaca

SEQ ID NO: 14637 - DNA, 40 bp, Homo Sapiens
cttccaattaactagttttgacaacattcaaaaaagagta

SEQ ID NO: 14638 - DNA, 42 bp, Homo Sapiens
cttccaattaactagttttgacaacattcaaaaaagagtacc

SEQ ID NO: 14639 - DNA, 43 bp, Homo Sapiens
cttccaattaactagttttgacaacattcaaaaaagagtacca

SEQ ID NO: 14640 - DNA, 18 bp, Homo Sapiens
cttcgatagctcagctgg

SEQ ID NO: 14641 - DNA, 16 bp, Homo Sapiens
cttcggaggcgtgggt

SEQ ID NO: 14642 - DNA, 17 bp, Homo Sapiens
cttcggaggcgtgggtt

SEQ ID NO: 14643 - DNA, 18 bp, Homo Sapiens
cttcggaggcgtgggttc

SEQ ID NO: 14644 - DNA, 19 bp, Homo Sapiens
cttcggaggcgtgggttcg

SEQ ID NO: 14645 - DNA, 26 bp, Homo Sapiens
cttcggaggcgtgggttcgaatccca

SEQ ID NO: 14646 - DNA, 19 bp, Homo Sapiens
cttcggatcagaagattga

SEQ ID NO: 14647 - DNA, 20 bp, Homo Sapiens
cttcggatcagaagattgag

SEQ ID NO: 14648 - DNA, 21 bp, Homo Sapiens
cttcggatcagaagattgagg

SEQ ID NO: 14649 - DNA, 23 bp, Homo Sapiens
cttcggatcagaagattgagggt

SEQ ID NO: 14650 - DNA, 25 bp, Homo Sapiens
cttcggatcagaagattgagggttc

SEQ ID NO: 14651 - DNA, 26 bp, Homo Sapiens
cttcggatcagaagattgagggttcg

SEQ ID NO: 14652 - DNA, 44 bp, Homo Sapiens
cttcggatcagaagattgagggttcgagtcccttcgtggtcgcc

SEQ ID NO: 14653 - DNA, 45 bp, Homo Sapiens
cttcggatcagaagattgagggttcgagtcccttcgtggtcgcca

SEQ ID NO: 14654 - DNA, 20 bp, Homo Sapiens
cttcggatcagaagattgca

SEQ ID NO: 14655 - DNA, 25 bp, Homo Sapiens
cttcggatcagaagattgcaggttc

SEQ ID NO: 14656 - DNA, 26 bp, Homo Sapiens
cttcggatcagaagattgcaggttcg

SEQ ID NO: 14657 - DNA, 30 bp, Homo Sapiens
cttcggatcagaagattgcaggttcgagtc

SEQ ID NO: 14658 - DNA, 31 bp, Homo Sapiens
cttcggatcagaagattgcaggttcgagtcc

SEQ ID NO: 14659 - DNA, 32 bp, Homo Sapiens
cttcggatcagaagattgcaggttcgagtcct

SEQ ID NO: 14660 - DNA, 33 bp, Homo Sapiens
cttcggatcagaagattgcaggttcgagtcctg

SEQ ID NO: 14661 - DNA, 45 bp, Homo Sapiens
cttcggatcagaagattgcaggttcgagtcctgccgcggtcgcca

SEQ ID NO: 14662 - DNA, 16 bp, Homo Sapiens
cttcgggggcgtgggt

SEQ ID NO: 14663 - DNA, 17 bp, Homo Sapiens
cttcgggggcgtgggtt

SEQ ID NO: 14664 - DNA, 18 bp, Homo Sapiens
cttcgggggcgtgggttc

SEQ ID NO: 14665 - DNA, 19 bp, Homo Sapiens
cttcgggggcgtgggttcg

SEQ ID NO: 14666 - DNA, 37 bp, Homo Sapiens
cttcgggggcgtgggttcgaatcccaccgctgccacc

SEQ ID NO: 14667 - DNA, 18 bp, Homo Sapiens
cttcgggggcgtgggttt

SEQ ID NO: 14668 - DNA, 44 bp, Homo Sapiens
cttcgggtgcgagaggtcccgggttcaaatcccggacgagcccc

SEQ ID NO: 14669 - DNA, 45 bp, Homo Sapiens
cttcgggtgcgagaggtcccgggttcaaatcccggacgagccccc

SEQ ID NO: 14670 - DNA, 25 bp, Homo Sapiens
cttctgtagtgtagtggttatcacg

SEQ ID NO: 14671 - DNA, 30 bp, Homo Sapiens
cttctgtagtgtagtggttatcacgttcgc

SEQ ID NO: 14672 - DNA, 31 bp, Homo Sapiens
cttctgtagtgtagtggttatcacgttcgcc

SEQ ID NO: 14673 - DNA, 32 bp, Homo Sapiens
cttctgtagtgtagtggttatcacgttcgcct

SEQ ID NO: 14674 - DNA, 33 bp, Homo Sapiens
cttctgtagtgtagtggttatcacgttcgcctc

SEQ ID NO: 14675 - DNA, 34 bp, Homo Sapiens
cttctgtagtgtagtggttatcacgttcgcctca

SEQ ID NO: 14676 - DNA, 35 bp, Homo Sapiens
cttctgtagtgtagtggttatcacgttcgcctcac

SEQ ID NO: 14677 - DNA, 38 bp, Homo Sapiens
cttctgtagtgtagtggttatcacgttcgcctcacacg

SEQ ID NO: 14678 - DNA, 16 bp, Homo Sapiens
cttgaccgctctgacc

SEQ ID NO: 14679 - DNA, 17 bp, Homo Sapiens
cttgaccgctctgacca

SEQ ID NO: 14680 - DNA, 16 bp, Homo Sapiens
cttgcgacccgggttc

SEQ ID NO: 14681 - DNA, 17 bp, Homo Sapiens
cttgcgacccgggttcg

SEQ ID NO: 14682 - DNA, 22 bp, Homo Sapiens
cttgcgacccgggttcgattcc

SEQ ID NO: 14683 - DNA, 30 bp, Homo Sapiens
cttgcgacccgggttcgattcccgggcggc

SEQ ID NO: 14684 - DNA, 31 bp, Homo Sapiens
cttgcgacccgggttcgattcccgggcggcg

SEQ ID NO: 14685 - DNA, 35 bp, Homo Sapiens
cttgcgacccgggttcgattcccgggcggcgcacc

SEQ ID NO: 14686 - DNA, 27 bp, Homo Sapiens
cttgtaaaccaggggtcgcgagttcaa

SEQ ID NO: 14687 - DNA, 22 bp, Homo Sapiens
cttgtaaaccggagatgaaaac

SEQ ID NO: 14688 - DNA, 23 bp, Homo Sapiens
cttgtaaaccggagatgaaaacc

SEQ ID NO: 14689 - DNA, 24 bp, Homo Sapiens
cttgtaaaccggagatgaaaacct

SEQ ID NO: 14690 - DNA, 34 bp, Homo Sapiens
cttgtaaaccggagatgaaaacctttttccaagg

SEQ ID NO: 14691 - DNA, 37 bp, Homo Sapiens
cttgtaaaccggagatgaaaacctttttccaaggaca

SEQ ID NO: 14692 - DNA, 38 bp, Homo Sapiens
cttgtaaaccggagatgaaaacctttttccaaggacac

SEQ ID NO: 14693 - DNA, 39 bp, Homo Sapiens
cttgtaaaccggagatgaaaacctttttccaaggacacc

SEQ ID NO: 14694 - DNA, 40 bp, Homo Sapiens
cttgtaaaccggagatgaaaacctttttccaaggacacca

SEQ ID NO: 14695 - DNA, 26 bp, Homo Sapiens
cttgtagtataaactaatacaccagt

SEQ ID NO: 14696 - DNA, 23 bp, Homo Sapiens
cttgtagttgaaatacaacgatg

SEQ ID NO: 14697 - DNA, 17 bp, Homo Sapiens
ctttacaatcagaggtt

SEQ ID NO: 14698 - DNA, 45 bp, Homo Sapiens
ctttacacgcagaaggtcctgggttcgagccccagtggaaccacc

SEQ ID NO: 14699 - DNA, 16 bp, Homo Sapiens
ctttacagtcagaggt

SEQ ID NO: 14700 - DNA, 17 bp, Homo Sapiens
ctttacagtcagaggtt

SEQ ID NO: 14701 - DNA, 18 bp, Homo Sapiens
ctttacagtcagaggttc

SEQ ID NO: 14702 - DNA, 19 bp, Homo Sapiens
ctttacagtcagaggttca

SEQ ID NO: 14703 - DNA, 20 bp, Homo Sapiens
ctttacagtcagaggttcaa

SEQ ID NO: 14704 - DNA, 23 bp, Homo Sapiens
ctttacagtcagaggttcaattc

SEQ ID NO: 14705 - DNA, 24 bp, Homo Sapiens
ctttacagtcagaggttcaattcc

SEQ ID NO: 14706 - DNA, 25 bp, Homo Sapiens
ctttacagtcagaggttcaattcct

SEQ ID NO: 14707 - DNA, 26 bp, Homo Sapiens
ctttacagtcagaggttcaattcctc

SEQ ID NO: 14708 - DNA, 28 bp, Homo Sapiens
ctttacagtcagaggttcaattcctctt

SEQ ID NO: 14709 - DNA, 29 bp, Homo Sapiens
ctttacagtcagaggttcaattcctcttc

SEQ ID NO: 14710 - DNA, 30 bp, Homo Sapiens
ctttacagtcagaggttcaattcctcttct

SEQ ID NO: 14711 - DNA, 35 bp, Homo Sapiens
ctttacagtcagaggttcaattcctcttcttaaca

SEQ ID NO: 14712 - DNA, 36 bp, Homo Sapiens
ctttacagtcagaggttcaattcctcttcttaacac

SEQ ID NO: 14713 - DNA, 37 bp, Homo Sapiens
ctttacagtcagaggttcaattcctcttcttaacacc

SEQ ID NO: 14714 - DNA, 18 bp, Homo Sapiens
ctttcaccgccgcggccc

SEQ ID NO: 14715 - DNA, 20 bp, Homo Sapiens
ctttcaccgccgcggcccgg

SEQ ID NO: 14716 - DNA, 22 bp, Homo Sapiens
ctttcaccgccgcggcccgggt

SEQ ID NO: 14717 - DNA, 24 bp, Homo Sapiens
ctttcaccgccgcggcccgggttc

SEQ ID NO: 14718 - DNA, 36 bp, Homo Sapiens
ctttcaccgccgcggcccgggttcgattcccggtca

SEQ ID NO: 14719 - DNA, 19 bp, Homo Sapiens
ctttgaatccagcaatccg

SEQ ID NO: 14720 - DNA, 20 bp, Homo Sapiens
ctttgaatccagcaatccga

SEQ ID NO: 14721 - DNA, 21 bp, Homo Sapiens
ctttgaatccagcaatccgag

SEQ ID NO: 14722 - DNA, 22 bp, Homo Sapiens
ctttgaatccagcaatccgagt

SEQ ID NO: 14723 - DNA, 23 bp, Homo Sapiens
ctttgaatccagcaatccgagtt

SEQ ID NO: 14724 - DNA, 24 bp, Homo Sapiens
ctttgaatccagcaatccgagttc

SEQ ID NO: 14725 - DNA, 16 bp, Homo Sapiens
ctttgaatccagcgat

SEQ ID NO: 14726 - DNA, 17 bp, Homo Sapiens
ctttgaatccagcgatc

SEQ ID NO: 14727 - DNA, 18 bp, Homo Sapiens
ctttgaatccagcgatcc

SEQ ID NO: 14728 - DNA, 19 bp, Homo Sapiens
ctttgaatccagcgatccg

SEQ ID NO: 14729 - DNA, 20 bp, Homo Sapiens
ctttgaatccagcgatccga

SEQ ID NO: 14730 - DNA, 21 bp, Homo Sapiens
ctttgaatccagcgatccgag

SEQ ID NO: 14731 - DNA, 22 bp, Homo Sapiens
ctttgaatccagcgatccgagt

SEQ ID NO: 14732 - DNA, 23 bp, Homo Sapiens
ctttgaatccagcgatccgagtt

SEQ ID NO: 14733 - DNA, 24 bp, Homo Sapiens
ctttgaatccagcgatccgagttc

SEQ ID NO: 14734 - DNA, 25 bp, Homo Sapiens
ctttgaatccagcgatccgagttca

SEQ ID NO: 14735 - DNA, 35 bp, Homo Sapiens
ctttgaatccagcgatccgagttcaaatctcggtg

SEQ ID NO: 14736 - DNA, 36 bp, Homo Sapiens
ctttgaatccagcgatccgagttcaaatctcggtgg

SEQ ID NO: 14737 - DNA, 38 bp, Homo Sapiens
ctttgaatccagcgatccgagttcaaatctcggtggga

SEQ ID NO: 14738 - DNA, 16 bp, Homo Sapiens
ctttgatagagtaaat

SEQ ID NO: 14739 - DNA, 18 bp, Homo Sapiens
ctttgatagagtaaataa

SEQ ID NO: 14740 - DNA, 19 bp, Homo Sapiens
ctttgatagagtaaataat

SEQ ID NO: 14741 - DNA, 21 bp, Homo Sapiens
ctttgatagagtaaataatag

SEQ ID NO: 14742 - DNA, 23 bp, Homo Sapiens
ctttgatagagtaaataatagga

SEQ ID NO: 14743 - DNA, 24 bp, Homo Sapiens
ctttgatagagtaaataataggag

SEQ ID NO: 14744 - DNA, 25 bp, Homo Sapiens
ctttgatagagtaaataataggagc

SEQ ID NO: 14745 - DNA, 26 bp, Homo Sapiens
ctttgatagagtaaataataggagct

SEQ ID NO: 14746 - DNA, 27 bp, Homo Sapiens
ctttgatagagtaaataataggagctt

SEQ ID NO: 14747 - DNA, 28 bp, Homo Sapiens
ctttgatagagtaaataataggagctta

SEQ ID NO: 14748 - DNA, 29 bp, Homo Sapiens
ctttgatagagtaaataataggagcttaa

SEQ ID NO: 14749 - DNA, 30 bp, Homo Sapiens
ctttgatagagtaaataataggagcttaaa

SEQ ID NO: 14750 - DNA, 31 bp, Homo Sapiens
ctttgatagagtaaataataggagcttaaac

SEQ ID NO: 14751 - DNA, 32 bp, Homo Sapiens
ctttgatagagtaaataataggagcttaaacc

SEQ ID NO: 14752 - DNA, 33 bp, Homo Sapiens
ctttgatagagtaaataataggagcttaaaccc

SEQ ID NO: 14753 - DNA, 34 bp, Homo Sapiens
ctttgatagagtaaataataggagcttaaacccc

SEQ ID NO: 14754 - DNA, 35 bp, Homo Sapiens
ctttgatagagtaaataataggagcttaaaccccc

SEQ ID NO: 14755 - DNA, 36 bp, Homo Sapiens
ctttgatagagtaaataataggagcttaaaccccct

SEQ ID NO: 14756 - DNA, 37 bp, Homo Sapiens
ctttgatagagtaaataataggagcttaaaccccctt

SEQ ID NO: 14757 - DNA, 38 bp, Homo Sapiens
ctttgatagagtaaataataggagcttaaaccccctta

SEQ ID NO: 14758 - DNA, 39 bp, Homo Sapiens
ctttgatagagtaaataataggagcttaaacccccttat

SEQ ID NO: 14759 - DNA, 40 bp, Homo Sapiens
ctttgatagagtaaataataggagcttaaacccccttatt

SEQ ID NO: 14760 - DNA, 46 bp, Homo Sapiens
ctttgatagagtaaataataggagcttaaacccccttatttctacc

SEQ ID NO: 14761 - DNA, 47 bp, Homo Sapiens
ctttgatagagtaaataataggagcttaaacccccttatttctacca

SEQ ID NO: 14762 - DNA, 16 bp, Homo Sapiens
ctttgcacgcgtgggt

SEQ ID NO: 14763 - DNA, 37 bp, Homo Sapiens
ctttgcacgcgtgggttcgaatcccatcctcgtcgcc

SEQ ID NO: 14764 - DNA, 38 bp, Homo Sapiens
ctttgcacgcgtgggttcgaatcccatcctcgtcgcca

SEQ ID NO: 14765 - DNA, 17 bp, Homo Sapiens
ctttgcacgtatgaggc

SEQ ID NO: 14766 - DNA, 35 bp, Homo Sapiens
ctttgcacgtatgaggccccgggttcaatccccgg

SEQ ID NO: 14767 - DNA, 40 bp, Homo Sapiens
ctttgcacgtatgaggccccgggttcaatccccggcatct

SEQ ID NO: 14768 - DNA, 41 bp, Homo Sapiens
ctttgcacgtatgaggccccgggttcaatccccggcatctc

SEQ ID NO: 14769 - DNA, 19 bp, Homo Sapiens
ctttggggggttcgattcc

SEQ ID NO: 14770 - DNA, 23 bp, Homo Sapiens
ctttggggggttcgattccttcc

SEQ ID NO: 14771 - DNA, 24 bp, Homo Sapiens
ctttggggggttcgattccttcct

SEQ ID NO: 14772 - DNA, 30 bp, Homo Sapiens
ctttggggggttcgattccttccttttttg

SEQ ID NO: 14773 - DNA, 32 bp, Homo Sapiens
ctttggggggttcgattccttccttttttgcc

SEQ ID NO: 14774 - DNA, 33 bp, Homo Sapiens
ctttggggggttcgattccttccttttttgcca

SEQ ID NO: 14775 - DNA, 20 bp, Homo Sapiens
ctttgggtgcgagaggtccc

SEQ ID NO: 14776 - DNA, 44 bp, Homo Sapiens
ctttgggtgcgagaggtcccgggttcaaatcccggacgagcccc

SEQ ID NO: 14777 - DNA, 16 bp, Homo Sapiens
ctttgggtgctaatgg

SEQ ID NO: 14778 - DNA, 18 bp, Homo Sapiens
ctttgggtgctaatggtg

SEQ ID NO: 14779 - DNA, 19 bp, Homo Sapiens
ctttgggtgctaatggtgg

SEQ ID NO: 14780 - DNA, 21 bp, Homo Sapiens
ctttgggtgctaatggtggag

SEQ ID NO: 14781 - DNA, 22 bp, Homo Sapiens
ctttgggtgctaatggtggagt

SEQ ID NO: 14782 - DNA, 23 bp, Homo Sapiens
ctttgggtgctaatggtggagtt

SEQ ID NO: 14783 - DNA, 24 bp, Homo Sapiens
ctttgggtgctaatggtggagtta

SEQ ID NO: 14784 - DNA, 25 bp, Homo Sapiens
ctttgggtgctaatggtggagttaa

SEQ ID NO: 14785 - DNA, 26 bp, Homo Sapiens
ctttgggtgctaatggtggagttaaa

SEQ ID NO: 14786 - DNA, 27 bp, Homo Sapiens
ctttgggtgctaatggtggagttaaag

SEQ ID NO: 14787 - DNA, 28 bp, Homo Sapiens
ctttgggtgctaatggtggagttaaaga

SEQ ID NO: 14788 - DNA, 29 bp, Homo Sapiens
ctttgggtgctaatggtggagttaaagac

SEQ ID NO: 14789 - DNA, 30 bp, Homo Sapiens
ctttgggtgctaatggtggagttaaagact

SEQ ID NO: 14790 - DNA, 31 bp, Homo Sapiens
ctttgggtgctaatggtggagttaaagactt

SEQ ID NO: 14791 - DNA, 32 bp, Homo Sapiens
ctttgggtgctaatggtggagttaaagacttt

SEQ ID NO: 14792 - DNA, 33 bp, Homo Sapiens
ctttgggtgctaatggtggagttaaagactttt

SEQ ID NO: 14793 - DNA, 36 bp, Homo Sapiens
ctttgggtgctaatggtggagttaaagactttttct

SEQ ID NO: 14794 - DNA, 37 bp, Homo Sapiens
ctttgggtgctaatggtggagttaaagactttttctc

SEQ ID NO: 14795 - DNA, 40 bp, Homo Sapiens
ctttgggtgctaatggtggagttaaagactttttctctga

SEQ ID NO: 14796 - DNA, 41 bp, Homo Sapiens
ctttgggtgctaatggtggagttaaagactttttctctgac

SEQ ID NO: 14797 - DNA, 42 bp, Homo Sapiens
ctttgggtgctaatggtggagttaaagactttttctctgacc

SEQ ID NO: 14798 - DNA, 43 bp, Homo Sapiens
ctttgggtgctaatggtggagttaaagactttttctctgacca

SEQ ID NO: 14799 - DNA, 16 bp, Homo Sapiens
ctttgtcaaagttaaa

SEQ ID NO: 14800 - DNA, 18 bp, Homo Sapiens
ctttgtcaaagttaaatt

SEQ ID NO: 14801 - DNA, 20 bp, Homo Sapiens
ctttgtcaaagttaaattat

SEQ ID NO: 14802 - DNA, 21 bp, Homo Sapiens
ctttgtcaaagttaaattata

SEQ ID NO: 14803 - DNA, 22 bp, Homo Sapiens
ctttgtcaaagttaaattatag

SEQ ID NO: 14804 - DNA, 23 bp, Homo Sapiens
ctttgtcaaagttaaattatagg

SEQ ID NO: 14805 - DNA, 24 bp, Homo Sapiens
ctttgtcaaagttaaattataggc

SEQ ID NO: 14806 - DNA, 25 bp, Homo Sapiens
ctttgtcaaagttaaattataggct

SEQ ID NO: 14807 - DNA, 26 bp, Homo Sapiens
ctttgtcaaagttaaattataggcta

SEQ ID NO: 14808 - DNA, 27 bp, Homo Sapiens
ctttgtcaaagttaaattataggctaa

SEQ ID NO: 14809 - DNA, 28 bp, Homo Sapiens
ctttgtcaaagttaaattataggctaaa

SEQ ID NO: 14810 - DNA, 29 bp, Homo Sapiens
ctttgtcaaagttaaattataggctaaat

SEQ ID NO: 14811 - DNA, 31 bp, Homo Sapiens
ctttgtcaaagttaaattataggctaaatcc

SEQ ID NO: 14812 - DNA, 32 bp, Homo Sapiens
ctttgtcaaagttaaattataggctaaatcct

SEQ ID NO: 14813 - DNA, 33 bp, Homo Sapiens
ctttgtcaaagttaaattataggctaaatccta

SEQ ID NO: 14814 - DNA, 35 bp, Homo Sapiens
ctttgtcaaagttaaattataggctaaatcctata

SEQ ID NO: 14815 - DNA, 36 bp, Homo Sapiens
ctttgtcaaagttaaattataggctaaatcctatat

SEQ ID NO: 14816 - DNA, 37 bp, Homo Sapiens
ctttgtcaaagttaaattataggctaaatcctatata

SEQ ID NO: 14817 - DNA, 39 bp, Homo Sapiens
ctttgtcaaagttaaattataggctaaatcctatatatc

SEQ ID NO: 14818 - DNA, 41 bp, Homo Sapiens
ctttgtcaaagttaaattataggctaaatcctatatatctt

SEQ ID NO: 14819 - DNA, 43 bp, Homo Sapiens
ctttgtcaaagttaaattataggctaaatcctatatatcttac

SEQ ID NO: 14820 - DNA, 44 bp, Homo Sapiens
ctttgtcaaagttaaattataggctaaatcctatatatcttacc

SEQ ID NO: 14821 - DNA, 45 bp, Homo Sapiens
ctttgtcaaagttaaattataggctaaatcctatatatcttacca

SEQ ID NO: 14822 - DNA, 19 bp, Homo Sapiens
cttttaaaggataacagct

SEQ ID NO: 14823 - DNA, 30 bp, Homo Sapiens
cttttaaaggataacagctatccattggtc

SEQ ID NO: 14824 - DNA, 31 bp, Homo Sapiens
cttttaaaggataacagctatccattggtct

SEQ ID NO: 14825 - DNA, 32 bp, Homo Sapiens
cttttaaaggataacagctatccattggtctt

SEQ ID NO: 14826 - DNA, 34 bp, Homo Sapiens
cttttaaaggataacagctatccattggtcttag

SEQ ID NO: 14827 - DNA, 16 bp, Homo Sapiens
cttttaagttaaagat

SEQ ID NO: 14828 - DNA, 20 bp, Homo Sapiens
cttttaagttaaagattaag

SEQ ID NO: 14829 - DNA, 22 bp, Homo Sapiens
cttttaagttaaagattaagag

SEQ ID NO: 14830 - DNA, 24 bp, Homo Sapiens
cttttaagttaaagattaagagaa

SEQ ID NO: 14831 - DNA, 25 bp, Homo Sapiens
cttttaagttaaagattaagagaac

SEQ ID NO: 14832 - DNA, 26 bp, Homo Sapiens
cttttaagttaaagattaagagaacc

SEQ ID NO: 14833 - DNA, 27 bp, Homo Sapiens
cttttaagttaaagattaagagaacca

SEQ ID NO: 14834 - DNA, 28 bp, Homo Sapiens
cttttaagttaaagattaagagaaccaa

SEQ ID NO: 14835 - DNA, 29 bp, Homo Sapiens
cttttaagttaaagattaagagaaccaac

SEQ ID NO: 14836 - DNA, 30 bp, Homo Sapiens
cttttaagttaaagattaagagaaccaaca

SEQ ID NO: 14837 - DNA, 31 bp, Homo Sapiens
cttttaagttaaagattaagagaaccaacac

SEQ ID NO: 14838 - DNA, 32 bp, Homo Sapiens
cttttaagttaaagattaagagaaccaacacc

SEQ ID NO: 14839 - DNA, 33 bp, Homo Sapiens
cttttaagttaaagattaagagaaccaacacct

SEQ ID NO: 14840 - DNA, 34 bp, Homo Sapiens
cttttaagttaaagattaagagaaccaacacctc

SEQ ID NO: 14841 - DNA, 35 bp, Homo Sapiens
cttttaagttaaagattaagagaaccaacacctct

SEQ ID NO: 14842 - DNA, 36 bp, Homo Sapiens
cttttaagttaaagattaagagaaccaacacctctt

SEQ ID NO: 14843 - DNA, 38 bp, Homo Sapiens
cttttaagttaaagattaagagaaccaacacctcttta

SEQ ID NO: 14844 - DNA, 41 bp, Homo Sapiens
cttttaagttaaagattaagagaaccaacacctctttacag

SEQ ID NO: 14845 - DNA, 43 bp, Homo Sapiens
cttttaagttaaagattaagagaaccaacacctctttacagtg

SEQ ID NO: 14846 - DNA, 44 bp, Homo Sapiens
cttttaagttaaagattaagagaaccaacacctctttacagtga

SEQ ID NO: 14847 - DNA, 45 bp, Homo Sapiens
cttttaagttaaagattaagagaaccaacacctctttacagtgac

SEQ ID NO: 14848 - DNA, 46 bp, Homo Sapiens
cttttaagttaaagattaagagaaccaacacctctttacagtgacc

SEQ ID NO: 14849 - DNA, 47 bp, Homo Sapiens
cttttaagttaaagattaagagaaccaacacctctttacagtgacca

SEQ ID NO: 14850 - DNA, 18 bp, Homo Sapiens
cttttaatctgagggtcc

SEQ ID NO: 14851 - DNA, 19 bp, Homo Sapiens
cttttaatctgagggtcca

SEQ ID NO: 14852 - DNA, 37 bp, Homo Sapiens
cttttaatctgagggtccagggttcatgtccctgttc

SEQ ID NO: 14853 - DNA, 26 bp, Homo Sapiens
cttttagtataaatagtaccgttaac

SEQ ID NO: 14854 - DNA, 27 bp, Homo Sapiens
cttttagtataaatagtaccgttaact

SEQ ID NO: 14855 - DNA, 28 bp, Homo Sapiens
cttttagtataaatagtaccgttaactt

SEQ ID NO: 14856 - DNA, 29 bp, Homo Sapiens
cttttagtataaatagtaccgttaacttc

SEQ ID NO: 14857 - DNA, 30 bp, Homo Sapiens
cttttagtataaatagtaccgttaacttcc

SEQ ID NO: 14858 - DNA, 31 bp, Homo Sapiens
cttttagtataaatagtaccgttaacttcca

SEQ ID NO: 14859 - DNA, 35 bp, Homo Sapiens
cttttagtataaatagtaccgttaacttccaatta

SEQ ID NO: 14860 - DNA, 16 bp, Homo Sapiens
ctttttccaaggacac

SEQ ID NO: 14861 - DNA, 17 bp, Homo Sapiens
ctttttccaaggacacc

SEQ ID NO: 14862 - DNA, 18 bp, Homo Sapiens
ctttttccaaggacacca

SEQ ID NO: 14863 - DNA, 16 bp, Homo Sapiens
gaaaaagtcatggagg

SEQ ID NO: 14864 - DNA, 17 bp, Homo Sapiens
gaaaaagtcatggaggc

SEQ ID NO: 14865 - DNA, 18 bp, Homo Sapiens
gaaaaagtcatggaggcc

SEQ ID NO: 14866 - DNA, 19 bp, Homo Sapiens
gaaaaagtcatggaggcca

SEQ ID NO: 14867 - DNA, 20 bp, Homo Sapiens
gaaaaagtcatggaggccat

SEQ ID NO: 14868 - DNA, 21 bp, Homo Sapiens
gaaaaagtcatggaggccatg

SEQ ID NO: 14869 - DNA, 22 bp, Homo Sapiens
gaaaaagtcatggaggccatgg

SEQ ID NO: 14870 - DNA, 23 bp, Homo Sapiens
gaaaaagtcatggaggccatggg

SEQ ID NO: 14871 - DNA, 24 bp, Homo Sapiens
gaaaaagtcatggaggccatgggg

SEQ ID NO: 14872 - DNA, 25 bp, Homo Sapiens
gaaaaagtcatggaggccatggggt

SEQ ID NO: 14873 - DNA, 26 bp, Homo Sapiens
gaaaaagtcatggaggccatggggtt

SEQ ID NO: 14874 - DNA, 27 bp, Homo Sapiens
gaaaaagtcatggaggccatggggttg

SEQ ID NO: 14875 - DNA, 28 bp, Homo Sapiens
gaaaaagtcatggaggccatggggttgg

SEQ ID NO: 14876 - DNA, 29 bp, Homo Sapiens
gaaaaagtcatggaggccatggggttggc

SEQ ID NO: 14877 - DNA, 30 bp, Homo Sapiens
gaaaaagtcatggaggccatggggttggct

SEQ ID NO: 14878 - DNA, 31 bp, Homo Sapiens
gaaaaagtcatggaggccatggggttggctt

SEQ ID NO: 14879 - DNA, 32 bp, Homo Sapiens
gaaaaagtcatggaggccatggggttggcttg

SEQ ID NO: 14880 - DNA, 33 bp, Homo Sapiens
gaaaaagtcatggaggccatggggttggcttga

SEQ ID NO: 14881 - DNA, 34 bp, Homo Sapiens
gaaaaagtcatggaggccatggggttggcttgaa

SEQ ID NO: 14882 - DNA, 35 bp, Homo Sapiens
gaaaaagtcatggaggccatggggttggcttgaaa

SEQ ID NO: 14883 - DNA, 37 bp, Homo Sapiens
gaaaaagtcatggaggccatggggttggcttgaaacc

SEQ ID NO: 14884 - DNA, 38 bp, Homo Sapiens
gaaaaagtcatggaggccatggggttggcttgaaacca

SEQ ID NO: 14885 - DNA, 40 bp, Homo Sapiens
gaaaaagtcatggaggccatggggttggcttgaaaccagc

SEQ ID NO: 14886 - DNA, 41 bp, Homo Sapiens
gaaaaagtcatggaggccatggggttggcttgaaaccagct

SEQ ID NO: 14887 - DNA, 42 bp, Homo Sapiens
gaaaaagtcatggaggccatggggttggcttgaaaccagctt

SEQ ID NO: 14888 - DNA, 43 bp, Homo Sapiens
gaaaaagtcatggaggccatggggttggcttgaaaccagcttt

SEQ ID NO: 14889 - DNA, 45 bp, Homo Sapiens
gaaaaagtcatggaggccatggggttggcttgaaaccagctttgg

SEQ ID NO: 14890 - DNA, 46 bp, Homo Sapiens
gaaaaagtcatggaggccatggggttggcttgaaaccagctttggg

SEQ ID NO: 14891 - DNA, 17 bp, Homo Sapiens
gaaaacctttttccaag

SEQ ID NO: 14892 - DNA, 20 bp, Homo Sapiens
gaaaacctttttccaaggac

SEQ ID NO: 14893 - DNA, 21 bp, Homo Sapiens
gaaaacctttttccaaggaca

SEQ ID NO: 14894 - DNA, 23 bp, Homo Sapiens
gaaaacctttttccaaggacacc

SEQ ID NO: 14895 - DNA, 24 bp, Homo Sapiens
gaaaacctttttccaaggacacca

SEQ ID NO: 14896 - DNA, 16 bp, Homo Sapiens
gaaaatgttggttata

SEQ ID NO: 14897 - DNA, 17 bp, Homo Sapiens
gaaaatgttggttatac

SEQ ID NO: 14898 - DNA, 18 bp, Homo Sapiens
gaaaatgttggttatacc

SEQ ID NO: 14899 - DNA, 19 bp, Homo Sapiens
gaaaatgttggttataccc

SEQ ID NO: 14900 - DNA, 20 bp, Homo Sapiens
gaaaatgttggttataccct

SEQ ID NO: 14901 - DNA, 21 bp, Homo Sapiens
gaaaatgttggttataccctt

SEQ ID NO: 14902 - DNA, 22 bp, Homo Sapiens
gaaaatgttggttatacccttc

SEQ ID NO: 14903 - DNA, 24 bp, Homo Sapiens
gaaaatgttggttatacccttccc

SEQ ID NO: 14904 - DNA, 25 bp, Homo Sapiens
gaaaatgttggttatacccttcccg

SEQ ID NO: 14905 - DNA, 27 bp, Homo Sapiens
gaaaatgttggttatacccttcccgta

SEQ ID NO: 14906 - DNA, 28 bp, Homo Sapiens
gaaaatgttggttatacccttcccgtac

SEQ ID NO: 14907 - DNA, 29 bp, Homo Sapiens
gaaaatgttggttatacccttcccgtact

SEQ ID NO: 14908 - DNA, 30 bp, Homo Sapiens
gaaaatgttggttatacccttcccgtacta

SEQ ID NO: 14909 - DNA, 31 bp, Homo Sapiens
gaaaatgttggttatacccttcccgtactac

SEQ ID NO: 14910 - DNA, 32 bp, Homo Sapiens
gaaaatgttggttatacccttcccgtactacc

SEQ ID NO: 14911 - DNA, 33 bp, Homo Sapiens
gaaaatgttggttatacccttcccgtactacca

SEQ ID NO: 14912 - DNA, 16 bp, Homo Sapiens
gaaaatgtttagacgg

SEQ ID NO: 14913 - DNA, 17 bp, Homo Sapiens
gaaaatgtttagacggg

SEQ ID NO: 14914 - DNA, 18 bp, Homo Sapiens
gaaaatgtttagacgggc

SEQ ID NO: 14915 - DNA, 19 bp, Homo Sapiens
gaaaatgtttagacgggct

SEQ ID NO: 14916 - DNA, 20 bp, Homo Sapiens
gaaaatgtttagacgggctc

SEQ ID NO: 14917 - DNA, 21 bp, Homo Sapiens
gaaaatgtttagacgggctca

SEQ ID NO: 14918 - DNA, 22 bp, Homo Sapiens
gaaaatgtttagacgggctcac

SEQ ID NO: 14919 - DNA, 23 bp, Homo Sapiens
gaaaatgtttagacgggctcaca

SEQ ID NO: 14920 - DNA, 24 bp, Homo Sapiens
gaaaatgtttagacgggctcacat

SEQ ID NO: 14921 - DNA, 25 bp, Homo Sapiens
gaaaatgtttagacgggctcacatc

SEQ ID NO: 14922 - DNA, 26 bp, Homo Sapiens
gaaaatgtttagacgggctcacatca

SEQ ID NO: 14923 - DNA, 27 bp, Homo Sapiens
gaaaatgtttagacgggctcacatcac

SEQ ID NO: 14924 - DNA, 28 bp, Homo Sapiens
gaaaatgtttagacgggctcacatcacc

SEQ ID NO: 14925 - DNA, 29 bp, Homo Sapiens
gaaaatgtttagacgggctcacatcaccc

SEQ ID NO: 14926 - DNA, 30 bp, Homo Sapiens
gaaaatgtttagacgggctcacatcacccc

SEQ ID NO: 14927 - DNA, 31 bp, Homo Sapiens
gaaaatgtttagacgggctcacatcacccca

SEQ ID NO: 14928 - DNA, 32 bp, Homo Sapiens
gaaaatgtttagacgggctcacatcaccccat

SEQ ID NO: 14929 - DNA, 33 bp, Homo Sapiens
gaaaatgtttagacgggctcacatcaccccata

SEQ ID NO: 14930 - DNA, 34 bp, Homo Sapiens
gaaaatgtttagacgggctcacatcaccccataa

SEQ ID NO: 14931 - DNA, 35 bp, Homo Sapiens
gaaaatgtttagacgggctcacatcaccccataaa

SEQ ID NO: 14932 - DNA, 36 bp, Homo Sapiens
gaaaatgtttagacgggctcacatcaccccataaac

SEQ ID NO: 14933 - DNA, 37 bp, Homo Sapiens
gaaaatgtttagacgggctcacatcaccccataaaca

SEQ ID NO: 14934 - DNA, 39 bp, Homo Sapiens
gaaaatgtttagacgggctcacatcaccccataaacacc

SEQ ID NO: 14935 - DNA, 40 bp, Homo Sapiens
gaaaatgtttagacgggctcacatcaccccataaacacca

SEQ ID NO: 14936 - DNA, 21 bp, Homo Sapiens
gaaaccagctttggggggttc

SEQ ID NO: 14937 - DNA, 34 bp, Homo Sapiens
gaaaccagctttggggggttcgattccttccttt

SEQ ID NO: 14938 - DNA, 16 bp, Homo Sapiens
gaaaccatcctctgct

SEQ ID NO: 14939 - DNA, 19 bp, Homo Sapiens
gaaaccatcctctgctacc

SEQ ID NO: 14940 - DNA, 20 bp, Homo Sapiens
gaaaccatcctctgctacca

SEQ ID NO: 14941 - DNA, 16 bp, Homo Sapiens
gaaaccgggcggaaac

SEQ ID NO: 14942 - DNA, 17 bp, Homo Sapiens
gaaaccgggcggaaaca

SEQ ID NO: 14943 - DNA, 18 bp, Homo Sapiens
gaaaccgggcggaaacac

SEQ ID NO: 14944 - DNA, 19 bp, Homo Sapiens
gaaaccgggcggaaacacc

SEQ ID NO: 14945 - DNA, 20 bp, Homo Sapiens
gaaaccgggcggaaacacca

SEQ ID NO: 14946 - DNA, 16 bp, Homo Sapiens
gaaagattggtggttc

SEQ ID NO: 14947 - DNA, 17 bp, Homo Sapiens
gaaagattggtggttcg

SEQ ID NO: 14948 - DNA, 35 bp, Homo Sapiens
gaaagattggtggttcgagcccacccagggacgcc

SEQ ID NO: 14949 - DNA, 16 bp, Homo Sapiens
gaaagctcacaagaac

SEQ ID NO: 14950 - DNA, 17 bp, Homo Sapiens
gaaagctcacaagaact

SEQ ID NO: 14951 - DNA, 18 bp, Homo Sapiens
gaaagctcacaagaactg

SEQ ID NO: 14952 - DNA, 19 bp, Homo Sapiens
gaaagctcacaagaactgc

SEQ ID NO: 14953 - DNA, 20 bp, Homo Sapiens
gaaagctcacaagaactgct

SEQ ID NO: 14954 - DNA, 21 bp, Homo Sapiens
gaaagctcacaagaactgcta

SEQ ID NO: 14955 - DNA, 22 bp, Homo Sapiens
gaaagctcacaagaactgctaa

SEQ ID NO: 14956 - DNA, 23 bp, Homo Sapiens
gaaagctcacaagaactgctaac

SEQ ID NO: 14957 - DNA, 24 bp, Homo Sapiens
gaaagctcacaagaactgctaact

SEQ ID NO: 14958 - DNA, 25 bp, Homo Sapiens
gaaagctcacaagaactgctaactc

SEQ ID NO: 14959 - DNA, 26 bp, Homo Sapiens
gaaagctcacaagaactgctaactca

SEQ ID NO: 14960 - DNA, 27 bp, Homo Sapiens
gaaagctcacaagaactgctaactcat

SEQ ID NO: 14961 - DNA, 28 bp, Homo Sapiens
gaaagctcacaagaactgctaactcatg

SEQ ID NO: 14962 - DNA, 29 bp, Homo Sapiens
gaaagctcacaagaactgctaactcatgc

SEQ ID NO: 14963 - DNA, 30 bp, Homo Sapiens
gaaagctcacaagaactgctaactcatgcc

SEQ ID NO: 14964 - DNA, 31 bp, Homo Sapiens
gaaagctcacaagaactgctaactcatgccc

SEQ ID NO: 14965 - DNA, 32 bp, Homo Sapiens
gaaagctcacaagaactgctaactcatgcccc

SEQ ID NO: 14966 - DNA, 33 bp, Homo Sapiens
gaaagctcacaagaactgctaactcatgccccc

SEQ ID NO: 14967 - DNA, 34 bp, Homo Sapiens
gaaagctcacaagaactgctaactcatgccccca

SEQ ID NO: 14968 - DNA, 35 bp, Homo Sapiens
gaaagctcacaagaactgctaactcatgcccccat

SEQ ID NO: 14969 - DNA, 36 bp, Homo Sapiens
gaaagctcacaagaactgctaactcatgcccccatg

SEQ ID NO: 14970 - DNA, 37 bp, Homo Sapiens
gaaagctcacaagaactgctaactcatgcccccatgt

SEQ ID NO: 14971 - DNA, 38 bp, Homo Sapiens
gaaagctcacaagaactgctaactcatgcccccatgtc

SEQ ID NO: 14972 - DNA, 39 bp, Homo Sapiens
gaaagctcacaagaactgctaactcatgcccccatgtct

SEQ ID NO: 14973 - DNA, 40 bp, Homo Sapiens
gaaagctcacaagaactgctaactcatgcccccatgtcta

SEQ ID NO: 14974 - DNA, 41 bp, Homo Sapiens
gaaagctcacaagaactgctaactcatgcccccatgtctaa

SEQ ID NO: 14975 - DNA, 42 bp, Homo Sapiens
gaaagctcacaagaactgctaactcatgcccccatgtctaac

SEQ ID NO: 14976 - DNA, 43 bp, Homo Sapiens
gaaagctcacaagaactgctaactcatgcccccatgtctaaca

SEQ ID NO: 14977 - DNA, 44 bp, Homo Sapiens
gaaagctcacaagaactgctaactcatgcccccatgtctaacaa

SEQ ID NO: 14978 - DNA, 45 bp, Homo Sapiens
gaaagctcacaagaactgctaactcatgcccccatgtctaacaac

SEQ ID NO: 14979 - DNA, 46 bp, Homo Sapiens
gaaagctcacaagaactgctaactcatgcccccatgtctaacaaca

SEQ ID NO: 14980 - DNA, 47 bp, Homo Sapiens
gaaagctcacaagaactgctaactcatgcccccatgtctaacaacat

SEQ ID NO: 14981 - DNA, 48 bp, Homo Sapiens
gaaagctcacaagaactgctaactcatgcccccatgtctaacaacatg

SEQ ID NO: 14982 - DNA, 23 bp, Homo Sapiens
gaaaggtccccggttcgaaaccg

SEQ ID NO: 14983 - DNA, 32 bp, Homo Sapiens
gaaaggtccccggttcgaaaccgggcggaaac

SEQ ID NO: 14984 - DNA, 35 bp, Homo Sapiens
gaaaggtccccggttcgaaaccgggcggaaacacc

SEQ ID NO: 14985 - DNA, 32 bp, Homo Sapiens
gaaaggtccccggttcgatcccgggcggaaac

SEQ ID NO: 14986 - DNA, 16 bp, Homo Sapiens
gaaaggttggtggttc

SEQ ID NO: 14987 - DNA, 17 bp, Homo Sapiens
gaaaggttggtggttcg

SEQ ID NO: 14988 - DNA, 32 bp, Homo Sapiens
gaaaggttggtggttcgagcccacccagggac

SEQ ID NO: 14989 - DNA, 33 bp, Homo Sapiens
gaaaggttggtggttcgagcccacccagggacg

SEQ ID NO: 14990 - DNA, 34 bp, Homo Sapiens
gaaaggttggtggttcgagcccacccagggacgc

SEQ ID NO: 14991 - DNA, 35 bp, Homo Sapiens
gaaaggttggtggttcgagcccacccagggacgcc

SEQ ID NO: 14992 - DNA, 36 bp, Homo Sapiens
gaaaggttggtggttcgagcccacccagggacgcca

SEQ ID NO: 14993 - DNA, 32 bp, Homo Sapiens
gaaaggttggtggttcgatcccacccagggac

SEQ ID NO: 14994 - DNA, 19 bp, Homo Sapiens
gaaatacaacgatggtttt

SEQ ID NO: 14995 - DNA, 20 bp, Homo Sapiens
gaaatacaacgatggttttt

SEQ ID NO: 14996 - DNA, 21 bp, Homo Sapiens
gaaatacaacgatggtttttc

SEQ ID NO: 14997 - DNA, 26 bp, Homo Sapiens
gaaatacaacgatggtttttcatatc

SEQ ID NO: 14998 - DNA, 33 bp, Homo Sapiens
gaaatacaacgatggtttttcatatcattggtc

SEQ ID NO: 14999 - DNA, 34 bp, Homo Sapiens
gaaatacaacgatggtttttcatatcattggtcg

SEQ ID NO: 15000 - DNA, 35 bp, Homo Sapiens
gaaatacaacgatggtttttcatatcattggtcgt

SEQ ID NO: 15001 - DNA, 40 bp, Homo Sapiens
gaaatacaacgatggtttttcatatcattggtcgtggttg

SEQ ID NO: 15002 - DNA, 41 bp, Homo Sapiens
gaaatacaacgatggtttttcatatcattggtcgtggttgt

SEQ ID NO: 15003 - DNA, 42 bp, Homo Sapiens
gaaatacaacgatggtttttcatatcattggtcgtggttgta

SEQ ID NO: 15004 - DNA, 44 bp, Homo Sapiens
gaaatacaacgatggtttttcatatcattggtcgtggttgtagt

SEQ ID NO: 15005 - DNA, 45 bp, Homo Sapiens
gaaatacaacgatggtttttcatatcattggtcgtggttgtagtc

SEQ ID NO: 15006 - DNA, 46 bp, Homo Sapiens
gaaatacaacgatggtttttcatatcattggtcgtggttgtagtcc

SEQ ID NO: 15007 - DNA, 47 bp, Homo Sapiens
gaaatacaacgatggtttttcatatcattggtcgtggttgtagtccg

SEQ ID NO: 15008 - DNA, 48 bp, Homo Sapiens
gaaatacaacgatggtttttcatatcattggtcgtggttgtagtccgt

SEQ ID NO: 15009 - DNA, 19 bp, Homo Sapiens
gaaatatgtctgataaaag

SEQ ID NO: 15010 - DNA, 31 bp, Homo Sapiens
gaaatatgtctgataaaagagttactttgat

SEQ ID NO: 15011 - DNA, 34 bp, Homo Sapiens
gaaatatgtctgataaaagagttactttgataga

SEQ ID NO: 15012 - DNA, 39 bp, Homo Sapiens
gaaatccaatggggtctccccgcgcaggttcgaaccctg

SEQ ID NO: 15013 - DNA, 39 bp, Homo Sapiens
gaaatccattggggtctccccgcgcaggttcgaatcctg

SEQ ID NO: 15014 - DNA, 22 bp, Homo Sapiens
gaaatttaggttaaatacagac

SEQ ID NO: 15015 - DNA, 16 bp, Homo Sapiens
gaaccaacacctcttt

SEQ ID NO: 15016 - DNA, 17 bp, Homo Sapiens
gaaccaacacctcttta

SEQ ID NO: 15017 - DNA, 18 bp, Homo Sapiens
gaaccaacacctctttac

SEQ ID NO: 15018 - DNA, 19 bp, Homo Sapiens
gaaccaacacctctttaca

SEQ ID NO: 15019 - DNA, 20 bp, Homo Sapiens
gaaccaacacctctttacag

SEQ ID NO: 15020 - DNA, 22 bp, Homo Sapiens
gaaccaacacctctttacagtg

SEQ ID NO: 15021 - DNA, 23 bp, Homo Sapiens
gaaccaacacctctttacagtga

SEQ ID NO: 15022 - DNA, 24 bp, Homo Sapiens
gaaccaacacctctttacagtgac

SEQ ID NO: 15023 - DNA, 25 bp, Homo Sapiens
gaaccaacacctctttacagtgacc

SEQ ID NO: 15024 - DNA, 26 bp, Homo Sapiens
gaaccaacacctctttacagtgacca

SEQ ID NO: 15025 - DNA, 20 bp, Homo Sapiens
gaaccctgctcgctgcgcca

SEQ ID NO: 15026 - DNA, 16 bp, Homo Sapiens
gaactgctaactcatg

SEQ ID NO: 15027 - DNA, 17 bp, Homo Sapiens
gaactgctaactcatgc

SEQ ID NO: 15028 - DNA, 18 bp, Homo Sapiens
gaactgctaactcatgcc

SEQ ID NO: 15029 - DNA, 19 bp, Homo Sapiens
gaactgctaactcatgccc

SEQ ID NO: 15030 - DNA, 20 bp, Homo Sapiens
gaactgctaactcatgcccc

SEQ ID NO: 15031 - DNA, 21 bp, Homo Sapiens
gaactgctaactcatgccccc

SEQ ID NO: 15032 - DNA, 22 bp, Homo Sapiens
gaactgctaactcatgccccca

SEQ ID NO: 15033 - DNA, 23 bp, Homo Sapiens
gaactgctaactcatgcccccat

SEQ ID NO: 15034 - DNA, 24 bp, Homo Sapiens
gaactgctaactcatgcccccatg

SEQ ID NO: 15035 - DNA, 25 bp, Homo Sapiens
gaactgctaactcatgcccccatgt

SEQ ID NO: 15036 - DNA, 26 bp, Homo Sapiens
gaactgctaactcatgcccccatgtc

SEQ ID NO: 15037 - DNA, 27 bp, Homo Sapiens
gaactgctaactcatgcccccatgtct

SEQ ID NO: 15038 - DNA, 28 bp, Homo Sapiens
gaactgctaactcatgcccccatgtcta

SEQ ID NO: 15039 - DNA, 29 bp, Homo Sapiens
gaactgctaactcatgcccccatgtctaa

SEQ ID NO: 15040 - DNA, 30 bp, Homo Sapiens
gaactgctaactcatgcccccatgtctaac

SEQ ID NO: 15041 - DNA, 31 bp, Homo Sapiens
gaactgctaactcatgcccccatgtctaaca

SEQ ID NO: 15042 - DNA, 32 bp, Homo Sapiens
gaactgctaactcatgcccccatgtctaacaa

SEQ ID NO: 15043 - DNA, 33 bp, Homo Sapiens
gaactgctaactcatgcccccatgtctaacaac

SEQ ID NO: 15044 - DNA, 34 bp, Homo Sapiens
gaactgctaactcatgcccccatgtctaacaaca

SEQ ID NO: 15045 - DNA, 35 bp, Homo Sapiens
gaactgctaactcatgcccccatgtctaacaacat

SEQ ID NO: 15046 - DNA, 36 bp, Homo Sapiens
gaactgctaactcatgcccccatgtctaacaacatg

SEQ ID NO: 15047 - DNA, 37 bp, Homo Sapiens
gaactgctaactcatgcccccatgtctaacaacatgg

SEQ ID NO: 15048 - DNA, 38 bp, Homo Sapiens
gaactgctaactcatgcccccatgtctaacaacatggc

SEQ ID NO: 15049 - DNA, 39 bp, Homo Sapiens
gaactgctaactcatgcccccatgtctaacaacatggct

SEQ ID NO: 15050 - DNA, 40 bp, Homo Sapiens
gaactgctaactcatgcccccatgtctaacaacatggctt

SEQ ID NO: 15051 - DNA, 41 bp, Homo Sapiens
gaactgctaactcatgcccccatgtctaacaacatggcttt

SEQ ID NO: 15052 - DNA, 42 bp, Homo Sapiens
gaactgctaactcatgcccccatgtctaacaacatggctttc

SEQ ID NO: 15053 - DNA, 43 bp, Homo Sapiens
gaactgctaactcatgcccccatgtctaacaacatggctttct

SEQ ID NO: 15054 - DNA, 44 bp, Homo Sapiens
gaactgctaactcatgcccccatgtctaacaacatggctttctc

SEQ ID NO: 15055 - DNA, 45 bp, Homo Sapiens
gaactgctaactcatgcccccatgtctaacaacatggctttctca

SEQ ID NO: 15056 - DNA, 46 bp, Homo Sapiens
gaactgctaactcatgcccccatgtctaacaacatggctttctcac

SEQ ID NO: 15057 - DNA, 47 bp, Homo Sapiens
gaactgctaactcatgcccccatgtctaacaacatggctttctcacc

SEQ ID NO: 15058 - DNA, 48 bp, Homo Sapiens
gaactgctaactcatgcccccatgtctaacaacatggctttctcacca

SEQ ID NO: 15059 - DNA, 27 bp, Homo Sapiens
gaagaagcagcttcaaacctgccgggg

SEQ ID NO: 15060 - DNA, 28 bp, Homo Sapiens
gaagaagcagcttcaaacctgccggggc

SEQ ID NO: 15061 - DNA, 29 bp, Homo Sapiens
gaagaagcagcttcaaacctgccggggct

SEQ ID NO: 15062 - DNA, 30 bp, Homo Sapiens
gaagaagcagcttcaaacctgccggggctt

SEQ ID NO: 15063 - DNA, 31 bp, Homo Sapiens
gaagaagcagcttcaaacctgccggggcttc

SEQ ID NO: 15064 - DNA, 32 bp, Homo Sapiens
gaagaagcagcttcaaacctgccggggcttcc

SEQ ID NO: 15065 - DNA, 33 bp, Homo Sapiens
gaagaagcagcttcaaacctgccggggcttcca

SEQ ID NO: 15066 - DNA, 16 bp, Homo Sapiens
gaagatcacgggttcg

SEQ ID NO: 15067 - DNA, 34 bp, Homo Sapiens
gaagatcacgggttcgaaccccgtccgtgcctcc

SEQ ID NO: 15068 - DNA, 16 bp, Homo Sapiens
gaagatcgcgggttcg

SEQ ID NO: 15069 - DNA, 23 bp, Homo Sapiens
gaagatcgcgggttcgaaccccg

SEQ ID NO: 15070 - DNA, 32 bp, Homo Sapiens
gaagatcgcgggttcgaaccccgtccgtgcct

SEQ ID NO: 15071 - DNA, 33 bp, Homo Sapiens
gaagatcgcgggttcgaaccccgtccgtgcctc

SEQ ID NO: 15072 - DNA, 34 bp, Homo Sapiens
gaagatcgcgggttcgaaccccgtccgtgcctcc

SEQ ID NO: 15073 - DNA, 35 bp, Homo Sapiens
gaagatcgcgggttcgaaccccgtccgtgcctcca

SEQ ID NO: 15074 - DNA, 29 bp, Homo Sapiens
gaagattccaggttcgactcctggctggc

SEQ ID NO: 15075 - DNA, 30 bp, Homo Sapiens
gaagattccaggttcgactcctggctggct

SEQ ID NO: 15076 - DNA, 31 bp, Homo Sapiens
gaagattccaggttcgactcctggctggctc

SEQ ID NO: 15077 - DNA, 32 bp, Homo Sapiens
gaagattccaggttcgactcctggctggctcg

SEQ ID NO: 15078 - DNA, 33 bp, Homo Sapiens
gaagattccaggttcgactcctggctggctcgc

SEQ ID NO: 15079 - DNA, 34 bp, Homo Sapiens
gaagattccaggttcgactcctggctggctcgcc

SEQ ID NO: 15080 - DNA, 35 bp, Homo Sapiens
gaagattccaggttcgactcctggctggctcgcca

SEQ ID NO: 15081 - DNA, 16 bp, Homo Sapiens
gaagattctaggttcg

SEQ ID NO: 15082 - DNA, 21 bp, Homo Sapiens
gaagattctaggttcgactcc

SEQ ID NO: 15083 - DNA, 25 bp, Homo Sapiens
gaagattctaggttcgactcctggc

SEQ ID NO: 15084 - DNA, 29 bp, Homo Sapiens
gaagattctaggttcgactcctggctggc

SEQ ID NO: 15085 - DNA, 30 bp, Homo Sapiens
gaagattctaggttcgactcctggctggct

SEQ ID NO: 15086 - DNA, 31 bp, Homo Sapiens
gaagattctaggttcgactcctggctggctc

SEQ ID NO: 15087 - DNA, 32 bp, Homo Sapiens
gaagattctaggttcgactcctggctggctcg

SEQ ID NO: 15088 - DNA, 33 bp, Homo Sapiens
gaagattctaggttcgactcctggctggctcgc

SEQ ID NO: 15089 - DNA, 34 bp, Homo Sapiens
gaagattctaggttcgactcctggctggctcgcc

SEQ ID NO: 15090 - DNA, 35 bp, Homo Sapiens
gaagattctaggttcgactcctggctggctcgcca

SEQ ID NO: 15091 - DNA, 16 bp, Homo Sapiens
gaagattgagggttcg

SEQ ID NO: 15092 - DNA, 32 bp, Homo Sapiens
gaagattgagggttcgaatcccttcgtggttg

SEQ ID NO: 15093 - DNA, 33 bp, Homo Sapiens
gaagattgagggttcgaatcccttcgtggttgc

SEQ ID NO: 15094 - DNA, 34 bp, Homo Sapiens
gaagattgagggttcgaatcccttcgtggttgcc

SEQ ID NO: 15095 - DNA, 35 bp, Homo Sapiens
gaagattgagggttcgaatcccttcgtggttgcca

SEQ ID NO: 15096 - DNA, 23 bp, Homo Sapiens
gaagattgagggttcgagtccct

SEQ ID NO: 15097 - DNA, 32 bp, Homo Sapiens
gaagattgagggttcgagtcccttcgtggtcg

SEQ ID NO: 15098 - DNA, 33 bp, Homo Sapiens
gaagattgagggttcgagtcccttcgtggtcgc

SEQ ID NO: 15099 - DNA, 34 bp, Homo Sapiens
gaagattgagggttcgagtcccttcgtggtcgcc

SEQ ID NO: 15100 - DNA, 35 bp, Homo Sapiens
gaagattgagggttcgagtcccttcgtggtcgcca

SEQ ID NO: 15101 - DNA, 23 bp, Homo Sapiens
gaagattgcaggttcgagtcctg

SEQ ID NO: 15102 - DNA, 31 bp, Homo Sapiens
gaagattgcaggttcgagtcctgccgcggtc

SEQ ID NO: 15103 - DNA, 32 bp, Homo Sapiens
gaagattgcaggttcgagtcctgccgcggtcg

SEQ ID NO: 15104 - DNA, 33 bp, Homo Sapiens
gaagattgcaggttcgagtcctgccgcggtcgc

SEQ ID NO: 15105 - DNA, 34 bp, Homo Sapiens
gaagattgcaggttcgagtcctgccgcggtcgcc

SEQ ID NO: 15106 - DNA, 35 bp, Homo Sapiens
gaagattgcaggttcgagtcctgccgcggtcgcca

SEQ ID NO: 15107 - DNA, 16 bp, Homo Sapiens
gaagcagcttcaaacc

SEQ ID NO: 15108 - DNA, 17 bp, Homo Sapiens
gaagcagcttcaaacct

SEQ ID NO: 15109 - DNA, 18 bp, Homo Sapiens
gaagcagcttcaaacctg

SEQ ID NO: 15110 - DNA, 24 bp, Homo Sapiens
gaagcagcttcaaacctgccgggg

SEQ ID NO: 15111 - DNA, 25 bp, Homo Sapiens
gaagcagcttcaaacctgccggggc

SEQ ID NO: 15112 - DNA, 26 bp, Homo Sapiens
gaagcagcttcaaacctgccggggct

SEQ ID NO: 15113 - DNA, 27 bp, Homo Sapiens
gaagcagcttcaaacctgccggggctt

SEQ ID NO: 15114 - DNA, 28 bp, Homo Sapiens
gaagcagcttcaaacctgccggggcttc

SEQ ID NO: 15115 - DNA, 29 bp, Homo Sapiens
gaagcagcttcaaacctgccggggcttcc

SEQ ID NO: 15116 - DNA, 30 bp, Homo Sapiens
gaagcagcttcaaacctgccggggcttcca

SEQ ID NO: 15117 - DNA, 16 bp, Homo Sapiens
gaagcattggactgta

SEQ ID NO: 15118 - DNA, 17 bp, Homo Sapiens
gaagcattggactgtaa

SEQ ID NO: 15119 - DNA, 18 bp, Homo Sapiens
gaagcattggactgtaaa

SEQ ID NO: 15120 - DNA, 19 bp, Homo Sapiens
gaagcattggactgtaaat

SEQ ID NO: 15121 - DNA, 20 bp, Homo Sapiens
gaagcattggactgtaaatc

SEQ ID NO: 15122 - DNA, 21 bp, Homo Sapiens
gaagcattggactgtaaatct

SEQ ID NO: 15123 - DNA, 22 bp, Homo Sapiens
gaagcattggactgtaaatcta

SEQ ID NO: 15124 - DNA, 23 bp, Homo Sapiens
gaagcattggactgtaaatctaa

SEQ ID NO: 15125 - DNA, 24 bp, Homo Sapiens
gaagcattggactgtaaatctaaa

SEQ ID NO: 15126 - DNA, 31 bp, Homo Sapiens
gaagcattggactgtaaatctaaagacaggg

SEQ ID NO: 15127 - DNA, 34 bp, Homo Sapiens
gaagcattggactgtaaatctaaagacaggggtt

SEQ ID NO: 15128 - DNA, 37 bp, Homo Sapiens
gaagcattggactgtaaatctaaagacaggggttagg

SEQ ID NO: 15129 - DNA, 43 bp, Homo Sapiens
gaagcattggactgtaaatctaaagacaggggttaggcctctt

SEQ ID NO: 15130 - DNA, 45 bp, Homo Sapiens
gaagcattggactgtaaatctaaagacaggggttaggcctctttt

SEQ ID NO: 15131 - DNA, 16 bp, Homo Sapiens
gaagcgtgctgggccc

SEQ ID NO: 15132 - DNA, 17 bp, Homo Sapiens
gaagcgtgctgggccca

SEQ ID NO: 15133 - DNA, 18 bp, Homo Sapiens
gaagcgtgctgggcccat

SEQ ID NO: 15134 - DNA, 23 bp, Homo Sapiens
gaagcgtgctgggcccataaccc

SEQ ID NO: 15135 - DNA, 26 bp, Homo Sapiens
gaagcgtgctgggcccataacccaga

SEQ ID NO: 15136 - DNA, 32 bp, Homo Sapiens
gaagcgtgctgggcccataacccagaggtcga

SEQ ID NO: 15137 - DNA, 36 bp, Homo Sapiens
gaagcgtgctgggcccataacccagaggtcgatgga

SEQ ID NO: 15138 - DNA, 37 bp, Homo Sapiens
gaagcgtgctgggcccataacccagaggtcgatggat

SEQ ID NO: 15139 - DNA, 39 bp, Homo Sapiens
gaagcgtgctgggcccataacccagaggtcgatggatcg

SEQ ID NO: 15140 - DNA, 16 bp, Homo Sapiens
gaaggctgcgtgttcg

SEQ ID NO: 15141 - DNA, 27 bp, Homo Sapiens
gaaggctgcgtgttcgaatcacgtcgg

SEQ ID NO: 15142 - DNA, 29 bp, Homo Sapiens
gaaggctgcgtgttcgaatcacgtcgggg

SEQ ID NO: 15143 - DNA, 31 bp, Homo Sapiens
gaaggctgcgtgttcgaatcacgtcggggtc

SEQ ID NO: 15144 - DNA, 32 bp, Homo Sapiens
gaaggctgcgtgttcgaatcacgtcggggtca

SEQ ID NO: 15145 - DNA, 33 bp, Homo Sapiens
gaaggctgcgtgttcgaatcacgtcggggtcac

SEQ ID NO: 15146 - DNA, 34 bp, Homo Sapiens
gaaggctgcgtgttcgaatcacgtcggggtcacc

SEQ ID NO: 15147 - DNA, 35 bp, Homo Sapiens
gaaggctgcgtgttcgaatcacgtcggggtcacca

SEQ ID NO: 15148 - DNA, 16 bp, Homo Sapiens
gaaggtcctgagttcg

SEQ ID NO: 15149 - DNA, 20 bp, Homo Sapiens
gaaggtcctgagttcgaacc

SEQ ID NO: 15150 - DNA, 21 bp, Homo Sapiens
gaaggtcctgagttcgaacct

SEQ ID NO: 15151 - DNA, 22 bp, Homo Sapiens
gaaggtcctgagttcgaacctc

SEQ ID NO: 15152 - DNA, 31 bp, Homo Sapiens
gaaggtcctgagttcgaacctcagagggggc

SEQ ID NO: 15153 - DNA, 32 bp, Homo Sapiens
gaaggtcctgagttcgaacctcagagggggca

SEQ ID NO: 15154 - DNA, 33 bp, Homo Sapiens
gaaggtcctgagttcgaacctcagagggggcac

SEQ ID NO: 15155 - DNA, 34 bp, Homo Sapiens
gaaggtcctgagttcgaacctcagagggggcacc

SEQ ID NO: 15156 - DNA, 35 bp, Homo Sapiens
gaaggtcctgagttcgaacctcagagggggcacca

SEQ ID NO: 15157 - DNA, 34 bp, Homo Sapiens
gaaggtcctgagttcgagcctcagagagggcacc

SEQ ID NO: 15158 - DNA, 22 bp, Homo Sapiens
gaaggtcctgggttcgagcccc

SEQ ID NO: 15159 - DNA, 30 bp, Homo Sapiens
gaaggtcctgggttcgagccccagtggaac

SEQ ID NO: 15160 - DNA, 31 bp, Homo Sapiens
gaaggtcctgggttcgagccccagtggaacc

SEQ ID NO: 15161 - DNA, 32 bp, Homo Sapiens
gaaggtcctgggttcgagccccagtggaacca

SEQ ID NO: 15162 - DNA, 33 bp, Homo Sapiens
gaaggtcctgggttcgagccccagtggaaccac

SEQ ID NO: 15163 - DNA, 34 bp, Homo Sapiens
gaaggtcctgggttcgagccccagtggaaccacc

SEQ ID NO: 15164 - DNA, 35 bp, Homo Sapiens
gaaggtcctgggttcgagccccagtggaaccacca

SEQ ID NO: 15165 - DNA, 16 bp, Homo Sapiens
gaaggtcgtgagttcg

SEQ ID NO: 15166 - DNA, 19 bp, Homo Sapiens
gaaggtcgtgagttcgagc

SEQ ID NO: 15167 - DNA, 33 bp, Homo Sapiens
gaaggtcgtgagttcgagcctcacacggggcac

SEQ ID NO: 15168 - DNA, 34 bp, Homo Sapiens
gaaggtcgtgagttcgagcctcacacggggcacc

SEQ ID NO: 15169 - DNA, 35 bp, Homo Sapiens
gaaggtcgtgagttcgagcctcacacggggcacca

SEQ ID NO: 15170 - DNA, 31 bp, Homo Sapiens
gaaggtcgtgagttcgatcctcacacggggc

SEQ ID NO: 15171 - DNA, 32 bp, Homo Sapiens
gaaggtcgtgagttcgatcctcacacggggca

SEQ ID NO: 15172 - DNA, 33 bp, Homo Sapiens
gaaggtcgtgagttcgatcctcacacggggcac

SEQ ID NO: 15173 - DNA, 34 bp, Homo Sapiens
gaaggtcgtgagttcgatcctcacacggggcacc

SEQ ID NO: 15174 - DNA, 35 bp, Homo Sapiens
gaaggtcgtgagttcgatcctcacacggggcacca

SEQ ID NO: 15175 - DNA, 16 bp, Homo Sapiens
gaaggttgcgtgttca

SEQ ID NO: 15176 - DNA, 31 bp, Homo Sapiens
gaaggttgcgtgttcaaatcacgtcggggtc

SEQ ID NO: 15177 - DNA, 34 bp, Homo Sapiens
gaaggttgcgtgttcaaatcacgtcggggtcacc

SEQ ID NO: 15178 - DNA, 32 bp, Homo Sapiens
gaaggttgcgtgttcaagtcacgtcggggtca

SEQ ID NO: 15179 - DNA, 33 bp, Homo Sapiens
gaaggttgcgtgttcaagtcacgtcggggtcac

SEQ ID NO: 15180 - DNA, 34 bp, Homo Sapiens
gaaggttgcgtgttcaagtcacgtcggggtcacc

SEQ ID NO: 15181 - DNA, 35 bp, Homo Sapiens
gaaggttgcgtgttcaagtcacgtcggggtcacca

SEQ ID NO: 15182 - DNA, 20 bp, Homo Sapiens
gaatagtttaaattagaatc

SEQ ID NO: 15183 - DNA, 25 bp, Homo Sapiens
gaatagtttaaattagaatcttagc

SEQ ID NO: 15184 - DNA, 26 bp, Homo Sapiens
gaatagtttaaattagaatcttagct

SEQ ID NO: 15185 - DNA, 27 bp, Homo Sapiens
gaatagtttaaattagaatcttagctt

SEQ ID NO: 15186 - DNA, 28 bp, Homo Sapiens
gaatagtttaaattagaatcttagcttt

SEQ ID NO: 15187 - DNA, 29 bp, Homo Sapiens
gaatagtttaaattagaatcttagctttg

SEQ ID NO: 15188 - DNA, 30 bp, Homo Sapiens
gaatagtttaaattagaatcttagctttgg

SEQ ID NO: 15189 - DNA, 19 bp, Homo Sapiens
gaatcacgtcggggtcacc

SEQ ID NO: 15190 - DNA, 16 bp, Homo Sapiens
gaatccagcgatccga

SEQ ID NO: 15191 - DNA, 17 bp, Homo Sapiens
gaatccagcgatccgag

SEQ ID NO: 15192 - DNA, 19 bp, Homo Sapiens
gaatccagcgatccgagtt

SEQ ID NO: 15193 - DNA, 20 bp, Homo Sapiens
gaatccagcgatccgagttc

SEQ ID NO: 15194 - DNA, 21 bp, Homo Sapiens
gaatccagcgatccgagttca

SEQ ID NO: 15195 - DNA, 23 bp, Homo Sapiens
gaatccagcgatccgagttcaaa

SEQ ID NO: 15196 - DNA, 31 bp, Homo Sapiens
gaatccagcgatccgagttcaaatctcggtg

SEQ ID NO: 15197 - DNA, 37 bp, Homo Sapiens
gaatccagcgatccgagttcaaatctcggtggaacct

SEQ ID NO: 15198 - DNA, 38 bp, Homo Sapiens
gaatccagcgatccgagttcaaatctcggtggaacctc

SEQ ID NO: 15199 - DNA, 39 bp, Homo Sapiens
gaatccagcgatccgagttcaaatctcggtggaacctcc

SEQ ID NO: 15200 - DNA, 40 bp, Homo Sapiens
gaatccagcgatccgagttcaaatctcggtggaacctcca

SEQ ID NO: 15201 - DNA, 23 bp, Homo Sapiens
gaatccagcgatccgagttcgag

SEQ ID NO: 15202 - DNA, 24 bp, Homo Sapiens
gaatccagcgatccgagttcgagt

SEQ ID NO: 15203 - DNA, 31 bp, Homo Sapiens
gaatccagcgatccgagttcgagtctcggtg

SEQ ID NO: 15204 - DNA, 37 bp, Homo Sapiens
gaatccagcgatccgagttcgagtctcggtggaacct

SEQ ID NO: 15205 - DNA, 38 bp, Homo Sapiens
gaatccagcgatccgagttcgagtctcggtggaacctc

SEQ ID NO: 15206 - DNA, 39 bp, Homo Sapiens
gaatccagcgatccgagttcgagtctcggtggaacctcc

SEQ ID NO: 15207 - DNA, 20 bp, Homo Sapiens
gaatcccaccagagtcgcca

SEQ ID NO: 15208 - DNA, 17 bp, Homo Sapiens
gaatcccaccgctgcca

SEQ ID NO: 15209 - DNA, 19 bp, Homo Sapiens
gaatcccaccgctgccacc

SEQ ID NO: 15210 - DNA, 20 bp, Homo Sapiens
gaatcccagcggtgcctcca

SEQ ID NO: 15211 - DNA, 18 bp, Homo Sapiens
gaatcccatcctcgtcgc

SEQ ID NO: 15212 - DNA, 19 bp, Homo Sapiens
gaatcccatcctcgtcgcc

SEQ ID NO: 15213 - DNA, 20 bp, Homo Sapiens
gaatcccatcctcgtcgcca

SEQ ID NO: 15214 - DNA, 16 bp, Homo Sapiens
gaatccgagtcacggc

SEQ ID NO: 15215 - DNA, 17 bp, Homo Sapiens
gaatccgagtcacggca

SEQ ID NO: 15216 - DNA, 18 bp, Homo Sapiens
gaatccgagtcacggcac

SEQ ID NO: 15217 - DNA, 19 bp, Homo Sapiens
gaatccgagtcacggcacc

SEQ ID NO: 15218 - DNA, 20 bp, Homo Sapiens
gaatccgagtcacggcacca

SEQ ID NO: 15219 - DNA, 19 bp, Homo Sapiens
gaatccggctcgaaggacc

SEQ ID NO: 15220 - DNA, 19 bp, Homo Sapiens
gaatccggctcggaggacc

SEQ ID NO: 15221 - DNA, 20 bp, Homo Sapiens
gaatcctgttcgtgacgcca

SEQ ID NO: 15222 - DNA, 19 bp, Homo Sapiens
gaatctgacaacagaggct

SEQ ID NO: 15223 - DNA, 20 bp, Homo Sapiens
gaatctgacaacagaggctt

SEQ ID NO: 15224 - DNA, 25 bp, Homo Sapiens
gaatctgacaacagaggcttacgac

SEQ ID NO: 15225 - DNA, 26 bp, Homo Sapiens
gaatctgacaacagaggcttacgacc

SEQ ID NO: 15226 - DNA, 27 bp, Homo Sapiens
gaatctgacaacagaggcttacgaccc

SEQ ID NO: 15227 - DNA, 28 bp, Homo Sapiens
gaatctgacaacagaggcttacgacccc

SEQ ID NO: 15228 - DNA, 29 bp, Homo Sapiens
gaatctgacaacagaggcttacgacccct

SEQ ID NO: 15229 - DNA, 30 bp, Homo Sapiens
gaatctgacaacagaggcttacgacccctt

SEQ ID NO: 15230 - DNA, 31 bp, Homo Sapiens
gaatctgacaacagaggcttacgacccctta

SEQ ID NO: 15231 - DNA, 36 bp, Homo Sapiens
gaatctgacaacagaggcttacgaccccttatttac

SEQ ID NO: 15232 - DNA, 37 bp, Homo Sapiens
gaatctgacaacagaggcttacgaccccttatttacc

SEQ ID NO: 15233 - DNA, 38 bp, Homo Sapiens
gaatctgacaacagaggcttacgaccccttatttaccc

SEQ ID NO: 15234 - DNA, 39 bp, Homo Sapiens
gaatctgacaacagaggcttacgaccccttatttacccc

SEQ ID NO: 15235 - DNA, 40 bp, Homo Sapiens
gaatctgacaacagaggcttacgaccccttatttacccca

SEQ ID NO: 15236 - DNA, 33 bp, Homo Sapiens
gaatcttagctttgggtgctaatggtggagtta

SEQ ID NO: 15237 - DNA, 38 bp, Homo Sapiens
gaatcttagctttgggtgctaatggtggagttaaagac

SEQ ID NO: 15238 - DNA, 39 bp, Homo Sapiens
gaatcttagctttgggtgctaatggtggagttaaagact

SEQ ID NO: 15239 - DNA, 40 bp, Homo Sapiens
gaatcttagctttgggtgctaatggtggagttaaagactt

SEQ ID NO: 15240 - DNA, 16 bp, Homo Sapiens
gaatgatttcgactca

SEQ ID NO: 15241 - DNA, 17 bp, Homo Sapiens
gaatgatttcgactcat

SEQ ID NO: 15242 - DNA, 18 bp, Homo Sapiens
gaatgatttcgactcatt

SEQ ID NO: 15243 - DNA, 19 bp, Homo Sapiens
gaatgatttcgactcatta

SEQ ID NO: 15244 - DNA, 27 bp, Homo Sapiens
gaatgatttcgactcattaaattatga

SEQ ID NO: 15245 - DNA, 28 bp, Homo Sapiens
gaatgatttcgactcattaaattatgat

SEQ ID NO: 15246 - DNA, 29 bp, Homo Sapiens
gaatgatttcgactcattaaattatgata

SEQ ID NO: 15247 - DNA, 30 bp, Homo Sapiens
gaatgatttcgactcattaaattatgataa

SEQ ID NO: 15248 - DNA, 31 bp, Homo Sapiens
gaatgatttcgactcattaaattatgataat

SEQ ID NO: 15249 - DNA, 32 bp, Homo Sapiens
gaatgatttcgactcattaaattatgataatc

SEQ ID NO: 15250 - DNA, 33 bp, Homo Sapiens
gaatgatttcgactcattaaattatgataatca

SEQ ID NO: 15251 - DNA, 45 bp, Homo Sapiens
gaatgatttcgactcattaaattatgataatcatatttaccaacc

SEQ ID NO: 15252 - DNA, 16 bp, Homo Sapiens
gaattctcgcctgcca

SEQ ID NO: 15253 - DNA, 17 bp, Homo Sapiens
gaattctcgcctgccac

SEQ ID NO: 15254 - DNA, 18 bp, Homo Sapiens
gaattctcgcctgccacg

SEQ ID NO: 15255 - DNA, 31 bp, Homo Sapiens
gaattctcgcctgccacgcgggaggcccggg

SEQ ID NO: 15256 - DNA, 45 bp, Homo Sapiens
gaattctcgcctgccacgcgggaggcccgggttcgattcccggcc

SEQ ID NO: 15257 - DNA, 19 bp, Homo Sapiens
gaattgcaaattcgaagaa

SEQ ID NO: 15258 - DNA, 21 bp, Homo Sapiens
gaattgcaaattcgaagaagc

SEQ ID NO: 15259 - DNA, 23 bp, Homo Sapiens
gaattgcaaattcgaagaagcag

SEQ ID NO: 15260 - DNA, 24 bp, Homo Sapiens
gaattgcaaattcgaagaagcagc

SEQ ID NO: 15261 - DNA, 25 bp, Homo Sapiens
gaattgcaaattcgaagaagcagct

SEQ ID NO: 15262 - DNA, 26 bp, Homo Sapiens
gaattgcaaattcgaagaagcagctt

SEQ ID NO: 15263 - DNA, 32 bp, Homo Sapiens
gaattgcaaattcgaagaagcagcttcaaacc

SEQ ID NO: 15264 - DNA, 34 bp, Homo Sapiens
gaattgcaaattcgaagaagcagcttcaaacctg

SEQ ID NO: 15265 - DNA, 40 bp, Homo Sapiens
gaattgcaaattcgaagaagcagcttcaaacctgccgggg

SEQ ID NO: 15266 - DNA, 41 bp, Homo Sapiens
gaattgcaaattcgaagaagcagcttcaaacctgccggggc

SEQ ID NO: 15267 - DNA, 42 bp, Homo Sapiens
gaattgcaaattcgaagaagcagcttcaaacctgccggggct

SEQ ID NO: 15268 - DNA, 43 bp, Homo Sapiens
gaattgcaaattcgaagaagcagcttcaaacctgccggggctt

SEQ ID NO: 15269 - DNA, 44 bp, Homo Sapiens
gaattgcaaattcgaagaagcagcttcaaacctgccggggcttc

SEQ ID NO: 15270 - DNA, 45 bp, Homo Sapiens
gaattgcaaattcgaagaagcagcttcaaacctgccggggcttcc

SEQ ID NO: 15271 - DNA, 46 bp, Homo Sapiens
gaattgcaaattcgaagaagcagcttcaaacctgccggggcttcca

SEQ ID NO: 15272 - DNA, 16 bp, Homo Sapiens
gacaacagaggcttac

SEQ ID NO: 15273 - DNA, 17 bp, Homo Sapiens
gacaacagaggcttacg

SEQ ID NO: 15274 - DNA, 18 bp, Homo Sapiens
gacaacagaggcttacga

SEQ ID NO: 15275 - DNA, 19 bp, Homo Sapiens
gacaacagaggcttacgac

SEQ ID NO: 15276 - DNA, 20 bp, Homo Sapiens
gacaacagaggcttacgacc

SEQ ID NO: 15277 - DNA, 21 bp, Homo Sapiens
gacaacagaggcttacgaccc

SEQ ID NO: 15278 - DNA, 22 bp, Homo Sapiens
gacaacagaggcttacgacccc

SEQ ID NO: 15279 - DNA, 23 bp, Homo Sapiens
gacaacagaggcttacgacccct

SEQ ID NO: 15280 - DNA, 25 bp, Homo Sapiens
gacaacagaggcttacgacccctta

SEQ ID NO: 15281 - DNA, 26 bp, Homo Sapiens
gacaacagaggcttacgaccccttat

SEQ ID NO: 15282 - DNA, 27 bp, Homo Sapiens
gacaacagaggcttacgaccccttatt

SEQ ID NO: 15283 - DNA, 29 bp, Homo Sapiens
gacaacagaggcttacgaccccttattta

SEQ ID NO: 15284 - DNA, 30 bp, Homo Sapiens
gacaacagaggcttacgaccccttatttac

SEQ ID NO: 15285 - DNA, 31 bp, Homo Sapiens
gacaacagaggcttacgaccccttatttacc

SEQ ID NO: 15286 - DNA, 32 bp, Homo Sapiens
gacaacagaggcttacgaccccttatttaccc

SEQ ID NO: 15287 - DNA, 33 bp, Homo Sapiens
gacaacagaggcttacgaccccttatttacccc

SEQ ID NO: 15288 - DNA, 34 bp, Homo Sapiens
gacaacagaggcttacgaccccttatttacccca

SEQ ID NO: 15289 - DNA, 17 bp, Homo Sapiens
gacaacattcaaaaaag

SEQ ID NO: 15290 - DNA, 22 bp, Homo Sapiens
gacaacattcaaaaaagagtac

SEQ ID NO: 15291 - DNA, 23 bp, Homo Sapiens
gacaacattcaaaaaagagtacc

SEQ ID NO: 15292 - DNA, 24 bp, Homo Sapiens
gacaacattcaaaaaagagtacca

SEQ ID NO: 15293 - DNA, 16 bp, Homo Sapiens
gacaggggttaggcct

SEQ ID NO: 15294 - DNA, 17 bp, Homo Sapiens
gacaggggttaggcctc

SEQ ID NO: 15295 - DNA, 18 bp, Homo Sapiens
gacaggggttaggcctct

SEQ ID NO: 15296 - DNA, 25 bp, Homo Sapiens
gacaggggttaggcctctttttacc

SEQ ID NO: 15297 - DNA, 28 bp, Homo Sapiens
gacaggggttaggcctctttttaccacc

SEQ ID NO: 15298 - DNA, 29 bp, Homo Sapiens
gacaggggttaggcctctttttaccacca

SEQ ID NO: 15299 - DNA, 20 bp, Homo Sapiens
gaccaagagccttcaaagcc

SEQ ID NO: 15300 - DNA, 24 bp, Homo Sapiens
gaccaagagccttcaaagccctca

SEQ ID NO: 15301 - DNA, 25 bp, Homo Sapiens
gaccaagagccttcaaagccctcag

SEQ ID NO: 15302 - DNA, 30 bp, Homo Sapiens
gaccaagagccttcaaagccctcagtaagt

SEQ ID NO: 15303 - DNA, 33 bp, Homo Sapiens
gaccaagagccttcaaagccctcagtaagttgc

SEQ ID NO: 15304 - DNA, 17 bp, Homo Sapiens
gaccacgtggcctaatg

SEQ ID NO: 15305 - DNA, 18 bp, Homo Sapiens
gaccacgtggcctaatgg

SEQ ID NO: 15306 - DNA, 19 bp, Homo Sapiens
gaccacgtggcctaatgga

SEQ ID NO: 15307 - DNA, 20 bp, Homo Sapiens
gaccacgtggcctaatggat

SEQ ID NO: 15308 - DNA, 32 bp, Homo Sapiens
gaccacgtggcctaatggataaggcgtctgac

SEQ ID NO: 15309 - DNA, 33 bp, Homo Sapiens
gaccacgtggcctaatggataaggcgtctgact

SEQ ID NO: 15310 - DNA, 36 bp, Homo Sapiens
gaccacgtggcctaatggataaggcgtctgacttcg

SEQ ID NO: 15311 - DNA, 18 bp, Homo Sapiens
gacccagtggcctaatgg

SEQ ID NO: 15312 - DNA, 19 bp, Homo Sapiens
gacccagtggcctaatgga

SEQ ID NO: 15313 - DNA, 20 bp, Homo Sapiens
gacccagtggcctaatggat

SEQ ID NO: 15314 - DNA, 23 bp, Homo Sapiens
gacccagtggcctaatggataag

SEQ ID NO: 15315 - DNA, 26 bp, Homo Sapiens
gacccagtggcctaatggataaggca

SEQ ID NO: 15316 - DNA, 28 bp, Homo Sapiens
gacccagtggcctaatggataaggcatc

SEQ ID NO: 15317 - DNA, 29 bp, Homo Sapiens
gacccagtggcctaatggataaggcatca

SEQ ID NO: 15318 - DNA, 30 bp, Homo Sapiens
gacccagtggcctaatggataaggcatcag

SEQ ID NO: 15319 - DNA, 31 bp, Homo Sapiens
gacccagtggcctaatggataaggcatcagc

SEQ ID NO: 15320 - DNA, 32 bp, Homo Sapiens
gacccagtggcctaatggataaggcatcagcc

SEQ ID NO: 15321 - DNA, 33 bp, Homo Sapiens
gacccagtggcctaatggataaggcatcagcct

SEQ ID NO: 15322 - DNA, 34 bp, Homo Sapiens
gacccagtggcctaatggataaggcatcagcctc

SEQ ID NO: 15323 - DNA, 35 bp, Homo Sapiens
gacccagtggcctaatggataaggcatcagcctcc

SEQ ID NO: 15324 - DNA, 36 bp, Homo Sapiens
gacccagtggcctaatggataaggcatcagcctccg

SEQ ID NO: 15325 - DNA, 42 bp, Homo Sapiens
gacccagtggcctaatggataaggcatcagcctccggagctg

SEQ ID NO: 15326 - DNA, 16 bp, Homo Sapiens
gaccccttatttaccc

SEQ ID NO: 15327 - DNA, 17 bp, Homo Sapiens
gaccccttatttacccc

SEQ ID NO: 15328 - DNA, 18 bp, Homo Sapiens
gaccccttatttacccca

SEQ ID NO: 15329 - DNA, 22 bp, Homo Sapiens
gacccgggttcgattcccggcc

SEQ ID NO: 15330 - DNA, 25 bp, Homo Sapiens
gacccgggttcgattcccggccaac

SEQ ID NO: 15331 - DNA, 30 bp, Homo Sapiens
gacccgggttcgattcccggccaacgcacc

SEQ ID NO: 15332 - DNA, 31 bp, Homo Sapiens
gacccgggttcgattcccggccaacgcacca

SEQ ID NO: 15333 - DNA, 18 bp, Homo Sapiens
gaccgcgtggcctaatgg

SEQ ID NO: 15334 - DNA, 19 bp, Homo Sapiens
gaccgcgtggcctaatgga

SEQ ID NO: 15335 - DNA, 20 bp, Homo Sapiens
gaccgcgtggcctaatggat

SEQ ID NO: 15336 - DNA, 23 bp, Homo Sapiens
gaccgcgtggcctaatggataag

SEQ ID NO: 15337 - DNA, 30 bp, Homo Sapiens
gaccgcgtggcctaatggataaggcgtctg

SEQ ID NO: 15338 - DNA, 32 bp, Homo Sapiens
gaccgcgtggcctaatggataaggcgtctgac

SEQ ID NO: 15339 - DNA, 33 bp, Homo Sapiens
gaccgcgtggcctaatggataaggcgtctgact

SEQ ID NO: 15340 - DNA, 34 bp, Homo Sapiens
gaccgcgtggcctaatggataaggcgtctgactt

SEQ ID NO: 15341 - DNA, 35 bp, Homo Sapiens
gaccgcgtggcctaatggataaggcgtctgacttc

SEQ ID NO: 15342 - DNA, 36 bp, Homo Sapiens
gaccgcgtggcctaatggataaggcgtctgacttcg

SEQ ID NO: 15343 - DNA, 29 bp, Homo Sapiens
gaccggggttcaattccccgacggggagc

SEQ ID NO: 15344 - DNA, 30 bp, Homo Sapiens
gaccggggttcaattccccgacggggagcc

SEQ ID NO: 15345 - DNA, 31 bp, Homo Sapiens
gaccggggttcaattccccgacggggagcca

SEQ ID NO: 15346 - DNA, 24 bp, Homo Sapiens
gaccggggttcgattccccgacgg

SEQ ID NO: 15347 - DNA, 25 bp, Homo Sapiens
gaccggggttcgattccccgacggg

SEQ ID NO: 15348 - DNA, 26 bp, Homo Sapiens
gaccggggttcgattccccgacgggg

SEQ ID NO: 15349 - DNA, 28 bp, Homo Sapiens
gaccggggttcgattccccgacggggag

SEQ ID NO: 15350 - DNA, 29 bp, Homo Sapiens
gaccggggttcgattccccgacggggagc

SEQ ID NO: 15351 - DNA, 30 bp, Homo Sapiens
gaccggggttcgattccccgacggggagcc

SEQ ID NO: 15352 - DNA, 31 bp, Homo Sapiens
gaccggggttcgattccccgacggggagcca

SEQ ID NO: 15353 - DNA, 16 bp, Homo Sapiens
gacctcgtggcgcaac

SEQ ID NO: 15354 - DNA, 17 bp, Homo Sapiens
gacctcgtggcgcaacg

SEQ ID NO: 15355 - DNA, 18 bp, Homo Sapiens
gacctcgtggcgcaacgg

SEQ ID NO: 15356 - DNA, 21 bp, Homo Sapiens
gacctcgtggcgcaacggtag

SEQ ID NO: 15357 - DNA, 31 bp, Homo Sapiens
gacctcgtggcgcaacggtagcgcgtctgac

SEQ ID NO: 15358 - DNA, 32 bp, Homo Sapiens
gacctcgtggcgcaacggtagcgcgtctgact

SEQ ID NO: 15359 - DNA, 33 bp, Homo Sapiens
gacctcgtggcgcaacggtagcgcgtctgactc

SEQ ID NO: 15360 - DNA, 34 bp, Homo Sapiens
gacctcgtggcgcaacggtagcgcgtctgactcc

SEQ ID NO: 15361 - DNA, 18 bp, Homo Sapiens
gacctcgtggcgcaatgg

SEQ ID NO: 15362 - DNA, 21 bp, Homo Sapiens
gacctcgtggcgcaatggtag

SEQ ID NO: 15363 - DNA, 22 bp, Homo Sapiens
gacctcgtggcgcaatggtagc

SEQ ID NO: 15364 - DNA, 23 bp, Homo Sapiens
gacctcgtggcgcaatggtagcg

SEQ ID NO: 15365 - DNA, 32 bp, Homo Sapiens
gacctcgtggcgcaatggtagcgcgtctgact

SEQ ID NO: 15366 - DNA, 33 bp, Homo Sapiens
gacctcgtggcgcaatggtagcgcgtctgactc

SEQ ID NO: 15367 - DNA, 34 bp, Homo Sapiens
gacctcgtggcgcaatggtagcgcgtctgactcc

SEQ ID NO: 15368 - DNA, 16 bp, Homo Sapiens
gacgaggtggccgagt

SEQ ID NO: 15369 - DNA, 17 bp, Homo Sapiens
gacgaggtggccgagtg

SEQ ID NO: 15370 - DNA, 18 bp, Homo Sapiens
gacgaggtggccgagtgg

SEQ ID NO: 15371 - DNA, 19 bp, Homo Sapiens
gacgaggtggccgagtggt

SEQ ID NO: 15372 - DNA, 20 bp, Homo Sapiens
gacgaggtggccgagtggtt

SEQ ID NO: 15373 - DNA, 21 bp, Homo Sapiens
gacgaggtggccgagtggtta

SEQ ID NO: 15374 - DNA, 22 bp, Homo Sapiens
gacgaggtggccgagtggttaa

SEQ ID NO: 15375 - DNA, 23 bp, Homo Sapiens
gacgaggtggccgagtggttaag

SEQ ID NO: 15376 - DNA, 24 bp, Homo Sapiens
gacgaggtggccgagtggttaagg

SEQ ID NO: 15377 - DNA, 25 bp, Homo Sapiens
gacgaggtggccgagtggttaaggc

SEQ ID NO: 15378 - DNA, 32 bp, Homo Sapiens
gacgaggtggccgagtggttaaggcgatggac

SEQ ID NO: 15379 - DNA, 33 bp, Homo Sapiens
gacgaggtggccgagtggttaaggcgatggact

SEQ ID NO: 15380 - DNA, 35 bp, Homo Sapiens
gacgaggtggccgagtggttaaggcgatggactgc

SEQ ID NO: 15381 - DNA, 36 bp, Homo Sapiens
gacgaggtggccgagtggttaaggcgatggactgct

SEQ ID NO: 15382 - DNA, 16 bp, Homo Sapiens
gacgggctcacatcac

SEQ ID NO: 15383 - DNA, 17 bp, Homo Sapiens
gacgggctcacatcacc

SEQ ID NO: 15384 - DNA, 18 bp, Homo Sapiens
gacgggctcacatcaccc

SEQ ID NO: 15385 - DNA, 19 bp, Homo Sapiens
gacgggctcacatcacccc

SEQ ID NO: 15386 - DNA, 20 bp, Homo Sapiens
gacgggctcacatcacccca

SEQ ID NO: 15387 - DNA, 21 bp, Homo Sapiens
gacgggctcacatcaccccat

SEQ ID NO: 15388 - DNA, 22 bp, Homo Sapiens
gacgggctcacatcaccccata

SEQ ID NO: 15389 - DNA, 23 bp, Homo Sapiens
gacgggctcacatcaccccataa

SEQ ID NO: 15390 - DNA, 24 bp, Homo Sapiens
gacgggctcacatcaccccataaa

SEQ ID NO: 15391 - DNA, 25 bp, Homo Sapiens
gacgggctcacatcaccccataaac

SEQ ID NO: 15392 - DNA, 26 bp, Homo Sapiens
gacgggctcacatcaccccataaaca

SEQ ID NO: 15393 - DNA, 27 bp, Homo Sapiens
gacgggctcacatcaccccataaacac

SEQ ID NO: 15394 - DNA, 28 bp, Homo Sapiens
gacgggctcacatcaccccataaacacc

SEQ ID NO: 15395 - DNA, 29 bp, Homo Sapiens
gacgggctcacatcaccccataaacacca

SEQ ID NO: 15396 - DNA, 17 bp, Homo Sapiens
gactacggatcagaaga

SEQ ID NO: 15397 - DNA, 23 bp, Homo Sapiens
gactcaagttctggtctccaatg

SEQ ID NO: 15398 - DNA, 22 bp, Homo Sapiens
gactcaagttctggtctccgga

SEQ ID NO: 15399 - DNA, 23 bp, Homo Sapiens
gactcaagttctggtctccggat

SEQ ID NO: 15400 - DNA, 31 bp, Homo Sapiens
gactcattaaattatgataatcatatttacc

SEQ ID NO: 15401 - DNA, 35 bp, Homo Sapiens
gactcattaaattatgataatcatatttaccaacc

SEQ ID NO: 15402 - DNA, 36 bp, Homo Sapiens
gactcattaaattatgataatcatatttaccaacca

SEQ ID NO: 15403 - DNA, 21 bp, Homo Sapiens
gactccagatcagaaggctgc

SEQ ID NO: 15404 - DNA, 27 bp, Homo Sapiens
gactccagatcagaaggctgcgtgttc

SEQ ID NO: 15405 - DNA, 20 bp, Homo Sapiens
gactccagatcagaaggttg

SEQ ID NO: 15406 - DNA, 18 bp, Homo Sapiens
gactcccggtatgggaac

SEQ ID NO: 15407 - DNA, 19 bp, Homo Sapiens
gactcccggtatgggaacc

SEQ ID NO: 15408 - DNA, 18 bp, Homo Sapiens
gactcccggtgtgggaac

SEQ ID NO: 15409 - DNA, 19 bp, Homo Sapiens
gactcccggtgtgggaacc

SEQ ID NO: 15410 - DNA, 20 bp, Homo Sapiens
gactcccggtgtgggaacca

SEQ ID NO: 15411 - DNA, 16 bp, Homo Sapiens
gactcctggctggctc

SEQ ID NO: 15412 - DNA, 17 bp, Homo Sapiens
gactcctggctggctcg

SEQ ID NO: 15413 - DNA, 18 bp, Homo Sapiens
gactcctggctggctcgc

SEQ ID NO: 15414 - DNA, 19 bp, Homo Sapiens
gactcctggctggctcgcc

SEQ ID NO: 15415 - DNA, 20 bp, Homo Sapiens
gactcctggctggctcgcca

SEQ ID NO: 15416 - DNA, 16 bp, Homo Sapiens
gactctgaatccagcg

SEQ ID NO: 15417 - DNA, 17 bp, Homo Sapiens
gactctgaatccagcga

SEQ ID NO: 15418 - DNA, 20 bp, Homo Sapiens
gactctgaatccagcgatcc

SEQ ID NO: 15419 - DNA, 22 bp, Homo Sapiens
gactctgaatccagcgatccga

SEQ ID NO: 15420 - DNA, 23 bp, Homo Sapiens
gactctgaatccagcgatccgag

SEQ ID NO: 15421 - DNA, 24 bp, Homo Sapiens
gactctgaatccagcgatccgagt

SEQ ID NO: 15422 - DNA, 26 bp, Homo Sapiens
gactctgaatccagcgatccgagttc

SEQ ID NO: 15423 - DNA, 40 bp, Homo Sapiens
gactctgaatccagcgatccgagttcaaatctcggtggaa

SEQ ID NO: 15424 - DNA, 41 bp, Homo Sapiens
gactctgaatccagcgatccgagttcaaatctcggtggaac

SEQ ID NO: 15425 - DNA, 43 bp, Homo Sapiens
gactctgaatccagcgatccgagttcaaatctcggtggaacct

SEQ ID NO: 15426 - DNA, 44 bp, Homo Sapiens
gactctgaatccagcgatccgagttcaaatctcggtggaacctc

SEQ ID NO: 15427 - DNA, 45 bp, Homo Sapiens
gactctgaatccagcgatccgagttcaaatctcggtggaacctcc

SEQ ID NO: 15428 - DNA, 46 bp, Homo Sapiens
gactctgaatccagcgatccgagttcaaatctcggtggaacctcca

SEQ ID NO: 15429 - DNA, 43 bp, Homo Sapiens
gactctgaatccagcgatccgagttcgagtctcggtggaacct

SEQ ID NO: 15430 - DNA, 44 bp, Homo Sapiens
gactctgaatccagcgatccgagttcgagtctcggtggaacctc

SEQ ID NO: 15431 - DNA, 45 bp, Homo Sapiens
gactctgaatccagcgatccgagttcgagtctcggtggaacctcc

SEQ ID NO: 15432 - DNA, 45 bp, Homo Sapiens
gactcttaatcccagggtcgtgggttcgagccccacgttgggcgc

SEQ ID NO: 15433 - DNA, 21 bp, Homo Sapiens
gactgcagatcaagaggtccc

SEQ ID NO: 15434 - DNA, 19 bp, Homo Sapiens
gactgctaatccattgtgc

SEQ ID NO: 15435 - DNA, 43 bp, Homo Sapiens
gactgtaaatctaaagacaggggttaggcctctttttaccacc

SEQ ID NO: 15436 - DNA, 44 bp, Homo Sapiens
gactgtaaatctaaagacaggggttaggcctctttttaccacca

SEQ ID NO: 15437 - DNA, 18 bp, Homo Sapiens
gacttaagatccaatgga

SEQ ID NO: 15438 - DNA, 19 bp, Homo Sapiens
gacttaagatccaatggac

SEQ ID NO: 15439 - DNA, 20 bp, Homo Sapiens
gacttaagatccaatggaca

SEQ ID NO: 15440 - DNA, 21 bp, Homo Sapiens
gacttaagatccaatggacat

SEQ ID NO: 15441 - DNA, 22 bp, Homo Sapiens
gacttaagatccaatggacata

SEQ ID NO: 15442 - DNA, 23 bp, Homo Sapiens
gacttaagatccaatggacatat

SEQ ID NO: 15443 - DNA, 25 bp, Homo Sapiens
gacttaagatccaatggacatatgt

SEQ ID NO: 15444 - DNA, 16 bp, Homo Sapiens
gacttcggatcagaag

SEQ ID NO: 15445 - DNA, 17 bp, Homo Sapiens
gacttcggatcagaaga

SEQ ID NO: 15446 - DNA, 20 bp, Homo Sapiens
gacttcggatcagaagattg

SEQ ID NO: 15447 - DNA, 24 bp, Homo Sapiens
gacttcggatcagaagattgaggg

SEQ ID NO: 15448 - DNA, 26 bp, Homo Sapiens
gacttcggatcagaagattgagggtt

SEQ ID NO: 15449 - DNA, 27 bp, Homo Sapiens
gacttcggatcagaagattgagggttc

SEQ ID NO: 15450 - DNA, 46 bp, Homo Sapiens
gacttcggatcagaagattgagggttcgaatcccttcgtggttgcc

SEQ ID NO: 15451 - DNA, 46 bp, Homo Sapiens
gacttcggatcagaagattgagggttcgagtcccttcgtggtcgcc

SEQ ID NO: 15452 - DNA, 21 bp, Homo Sapiens
gacttcggatcagaagattgc

SEQ ID NO: 15453 - DNA, 23 bp, Homo Sapiens
gacttcggatcagaagattgcag

SEQ ID NO: 15454 - DNA, 27 bp, Homo Sapiens
gacttcggatcagaagattgcaggttc

SEQ ID NO: 15455 - DNA, 43 bp, Homo Sapiens
gacttcggatcagaagattgcaggttcgagtcctgccgcggtc

SEQ ID NO: 15456 - DNA, 44 bp, Homo Sapiens
gacttcggatcagaagattgcaggttcgagtcctgccgcggtcg

SEQ ID NO: 15457 - DNA, 45 bp, Homo Sapiens
gacttcggatcagaagattgcaggttcgagtcctgccgcggtcgc

SEQ ID NO: 15458 - DNA, 46 bp, Homo Sapiens
gacttcggatcagaagattgcaggttcgagtcctgccgcggtcgcc

SEQ ID NO: 15459 - DNA, 18 bp, Homo Sapiens
gactttgaatccagcgat

SEQ ID NO: 15460 - DNA, 19 bp, Homo Sapiens
gactttgaatccagcgatc

SEQ ID NO: 15461 - DNA, 21 bp, Homo Sapiens
gactttgaatccagcgatccg

SEQ ID NO: 15462 - DNA, 22 bp, Homo Sapiens
gactttgaatccagcgatccga

SEQ ID NO: 15463 - DNA, 23 bp, Homo Sapiens
gactttgaatccagcgatccgag

SEQ ID NO: 15464 - DNA, 43 bp, Homo Sapiens
gactttgaatccagcgatccgagttcaaatctcggtgggacct

SEQ ID NO: 15465 - DNA, 44 bp, Homo Sapiens
gactttgaatccagcgatccgagttcaaatctcggtgggacctc

SEQ ID NO: 15466 - DNA, 45 bp, Homo Sapiens
gactttgaatccagcgatccgagttcaaatctcggtgggacctcc

SEQ ID NO: 15467 - DNA, 19 bp, Homo Sapiens
gacttttaaaggataacag

SEQ ID NO: 15468 - DNA, 22 bp, Homo Sapiens
gacttttaatctgagggtccag

SEQ ID NO: 15469 - DNA, 16 bp, Homo Sapiens
gactttttctctgacc

SEQ ID NO: 15470 - DNA, 17 bp, Homo Sapiens
gactttttctctgacca

SEQ ID NO: 15471 - DNA, 16 bp, Homo Sapiens
gagaaagctcacaaga

SEQ ID NO: 15472 - DNA, 17 bp, Homo Sapiens
gagaaagctcacaagaa

SEQ ID NO: 15473 - DNA, 18 bp, Homo Sapiens
gagaaagctcacaagaac

SEQ ID NO: 15474 - DNA, 19 bp, Homo Sapiens
gagaaagctcacaagaact

SEQ ID NO: 15475 - DNA, 20 bp, Homo Sapiens
gagaaagctcacaagaactg

SEQ ID NO: 15476 - DNA, 21 bp, Homo Sapiens
gagaaagctcacaagaactgc

SEQ ID NO: 15477 - DNA, 22 bp, Homo Sapiens
gagaaagctcacaagaactgct

SEQ ID NO: 15478 - DNA, 23 bp, Homo Sapiens
gagaaagctcacaagaactgcta

SEQ ID NO: 15479 - DNA, 24 bp, Homo Sapiens
gagaaagctcacaagaactgctaa

SEQ ID NO: 15480 - DNA, 25 bp, Homo Sapiens
gagaaagctcacaagaactgctaac

SEQ ID NO: 15481 - DNA, 26 bp, Homo Sapiens
gagaaagctcacaagaactgctaact

SEQ ID NO: 15482 - DNA, 27 bp, Homo Sapiens
gagaaagctcacaagaactgctaactc

SEQ ID NO: 15483 - DNA, 28 bp, Homo Sapiens
gagaaagctcacaagaactgctaactca

SEQ ID NO: 15484 - DNA, 29 bp, Homo Sapiens
gagaaagctcacaagaactgctaactcat

SEQ ID NO: 15485 - DNA, 30 bp, Homo Sapiens
gagaaagctcacaagaactgctaactcatg

SEQ ID NO: 15486 - DNA, 31 bp, Homo Sapiens
gagaaagctcacaagaactgctaactcatgc

SEQ ID NO: 15487 - DNA, 32 bp, Homo Sapiens
gagaaagctcacaagaactgctaactcatgcc

SEQ ID NO: 15488 - DNA, 33 bp, Homo Sapiens
gagaaagctcacaagaactgctaactcatgccc

SEQ ID NO: 15489 - DNA, 34 bp, Homo Sapiens
gagaaagctcacaagaactgctaactcatgcccc

SEQ ID NO: 15490 - DNA, 35 bp, Homo Sapiens
gagaaagctcacaagaactgctaactcatgccccc

SEQ ID NO: 15491 - DNA, 36 bp, Homo Sapiens
gagaaagctcacaagaactgctaactcatgccccca

SEQ ID NO: 15492 - DNA, 37 bp, Homo Sapiens
gagaaagctcacaagaactgctaactcatgcccccat

SEQ ID NO: 15493 - DNA, 38 bp, Homo Sapiens
gagaaagctcacaagaactgctaactcatgcccccatg

SEQ ID NO: 15494 - DNA, 39 bp, Homo Sapiens
gagaaagctcacaagaactgctaactcatgcccccatgt

SEQ ID NO: 15495 - DNA, 40 bp, Homo Sapiens
gagaaagctcacaagaactgctaactcatgcccccatgtc

SEQ ID NO: 15496 - DNA, 41 bp, Homo Sapiens
gagaaagctcacaagaactgctaactcatgcccccatgtct

SEQ ID NO: 15497 - DNA, 42 bp, Homo Sapiens
gagaaagctcacaagaactgctaactcatgcccccatgtcta

SEQ ID NO: 15498 - DNA, 43 bp, Homo Sapiens
gagaaagctcacaagaactgctaactcatgcccccatgtctaa

SEQ ID NO: 15499 - DNA, 44 bp, Homo Sapiens
gagaaagctcacaagaactgctaactcatgcccccatgtctaac

SEQ ID NO: 15500 - DNA, 45 bp, Homo Sapiens
gagaaagctcacaagaactgctaactcatgcccccatgtctaaca

SEQ ID NO: 15501 - DNA, 46 bp, Homo Sapiens
gagaaagctcacaagaactgctaactcatgcccccatgtctaacaa

SEQ ID NO: 15502 - DNA, 47 bp, Homo Sapiens
gagaaagctcacaagaactgctaactcatgcccccatgtctaacaac

SEQ ID NO: 15503 - DNA, 48 bp, Homo Sapiens
gagaaagctcacaagaactgctaactcatgcccccatgtctaacaaca

SEQ ID NO: 15504 - DNA, 17 bp, Homo Sapiens
gagaaccaacacctctt

SEQ ID NO: 15505 - DNA, 18 bp, Homo Sapiens
gagaaccaacacctcttt

SEQ ID NO: 15506 - DNA, 19 bp, Homo Sapiens
gagaaccaacacctcttta

SEQ ID NO: 15507 - DNA, 20 bp, Homo Sapiens
gagaaccaacacctctttac

SEQ ID NO: 15508 - DNA, 21 bp, Homo Sapiens
gagaaccaacacctctttaca

SEQ ID NO: 15509 - DNA, 22 bp, Homo Sapiens
gagaaccaacacctctttacag

SEQ ID NO: 15510 - DNA, 24 bp, Homo Sapiens
gagaaccaacacctctttacagtg

SEQ ID NO: 15511 - DNA, 25 bp, Homo Sapiens
gagaaccaacacctctttacagtga

SEQ ID NO: 15512 - DNA, 26 bp, Homo Sapiens
gagaaccaacacctctttacagtgac

SEQ ID NO: 15513 - DNA, 27 bp, Homo Sapiens
gagaaccaacacctctttacagtgacc

SEQ ID NO: 15514 - DNA, 28 bp, Homo Sapiens
gagaaccaacacctctttacagtgacca

SEQ ID NO: 15515 - DNA, 18 bp, Homo Sapiens
gagaatagtttaaattag

SEQ ID NO: 15516 - DNA, 20 bp, Homo Sapiens
gagaatagtttaaattagaa

SEQ ID NO: 15517 - DNA, 21 bp, Homo Sapiens
gagaatagtttaaattagaat

SEQ ID NO: 15518 - DNA, 22 bp, Homo Sapiens
gagaatagtttaaattagaatc

SEQ ID NO: 15519 - DNA, 23 bp, Homo Sapiens
gagaatagtttaaattagaatct

SEQ ID NO: 15520 - DNA, 24 bp, Homo Sapiens
gagaatagtttaaattagaatctt

SEQ ID NO: 15521 - DNA, 25 bp, Homo Sapiens
gagaatagtttaaattagaatctta

SEQ ID NO: 15522 - DNA, 26 bp, Homo Sapiens
gagaatagtttaaattagaatcttag

SEQ ID NO: 15523 - DNA, 27 bp, Homo Sapiens
gagaatagtttaaattagaatcttagc

SEQ ID NO: 15524 - DNA, 28 bp, Homo Sapiens
gagaatagtttaaattagaatcttagct

SEQ ID NO: 15525 - DNA, 29 bp, Homo Sapiens
gagaatagtttaaattagaatcttagctt

SEQ ID NO: 15526 - DNA, 30 bp, Homo Sapiens
gagaatagtttaaattagaatcttagcttt

SEQ ID NO: 15527 - DNA, 31 bp, Homo Sapiens
gagaatagtttaaattagaatcttagctttg

SEQ ID NO: 15528 - DNA, 32 bp, Homo Sapiens
gagaatagtttaaattagaatcttagctttgg

SEQ ID NO: 15529 - DNA, 35 bp, Homo Sapiens
gagaatagtttaaattagaatcttagctttgggtg

SEQ ID NO: 15530 - DNA, 24 bp, Homo Sapiens
gagaccggggttcaattccccgac

SEQ ID NO: 15531 - DNA, 30 bp, Homo Sapiens
gagaccggggttcaattccccgacggggag

SEQ ID NO: 15532 - DNA, 31 bp, Homo Sapiens
gagaccggggttcaattccccgacggggagc

SEQ ID NO: 15533 - DNA, 32 bp, Homo Sapiens
gagaccggggttcaattccccgacggggagcc

SEQ ID NO: 15534 - DNA, 33 bp, Homo Sapiens
gagaccggggttcaattccccgacggggagcca

SEQ ID NO: 15535 - DNA, 23 bp, Homo Sapiens
gagaccggggttcgattccccga

SEQ ID NO: 15536 - DNA, 24 bp, Homo Sapiens
gagaccggggttcgattccccgac

SEQ ID NO: 15537 - DNA, 25 bp, Homo Sapiens
gagaccggggttcgattccccgacg

SEQ ID NO: 15538 - DNA, 26 bp, Homo Sapiens
gagaccggggttcgattccccgacgg

SEQ ID NO: 15539 - DNA, 27 bp, Homo Sapiens
gagaccggggttcgattccccgacggg

SEQ ID NO: 15540 - DNA, 28 bp, Homo Sapiens
gagaccggggttcgattccccgacgggg

SEQ ID NO: 15541 - DNA, 29 bp, Homo Sapiens
gagaccggggttcgattccccgacgggga

SEQ ID NO: 15542 - DNA, 30 bp, Homo Sapiens
gagaccggggttcgattccccgacggggag

SEQ ID NO: 15543 - DNA, 31 bp, Homo Sapiens
gagaccggggttcgattccccgacggggagc

SEQ ID NO: 15544 - DNA, 32 bp, Homo Sapiens
gagaccggggttcgattccccgacggggagcc

SEQ ID NO: 15545 - DNA, 33 bp, Homo Sapiens
gagaccggggttcgattccccgacggggagcca

SEQ ID NO: 15546 - DNA, 30 bp, Homo Sapiens
gagactcttaatctcagggtcgtgggttcg

SEQ ID NO: 15547 - DNA, 22 bp, Homo Sapiens
gagagcgttagactgaagatct

SEQ ID NO: 15548 - DNA, 16 bp, Homo Sapiens
gagaggtagcgggatc

SEQ ID NO: 15549 - DNA, 17 bp, Homo Sapiens
gagaggtagcgggatcg

SEQ ID NO: 15550 - DNA, 26 bp, Homo Sapiens
gagaggtagcgggatcgatgcccgca

SEQ ID NO: 15551 - DNA, 16 bp, Homo Sapiens
gagaggtcccgggttc

SEQ ID NO: 15552 - DNA, 17 bp, Homo Sapiens
gagaggtcccgggttca

SEQ ID NO: 15553 - DNA, 27 bp, Homo Sapiens
gagaggtcccgggttcaaatcccggac

SEQ ID NO: 15554 - DNA, 31 bp, Homo Sapiens
gagaggtcccgggttcaaatcccggacgagc

SEQ ID NO: 15555 - DNA, 32 bp, Homo Sapiens
gagaggtcccgggttcaaatcccggacgagcc

SEQ ID NO: 15556 - DNA, 33 bp, Homo Sapiens
gagaggtcccgggttcaaatcccggacgagccc

SEQ ID NO: 15557 - DNA, 34 bp, Homo Sapiens
gagaggtcccgggttcaaatcccggacgagcccc

SEQ ID NO: 15558 - DNA, 35 bp, Homo Sapiens
gagaggtcccgggttcaaatcccggacgagccccc

SEQ ID NO: 15559 - DNA, 30 bp, Homo Sapiens
gagatcctgggttcgaatcccagcggggcc

SEQ ID NO: 15560 - DNA, 31 bp, Homo Sapiens
gagatcctgggttcgaatcccagcggggcct

SEQ ID NO: 15561 - DNA, 30 bp, Homo Sapiens
gagatcctgggttcgaatcccagcggtgcc

SEQ ID NO: 15562 - DNA, 33 bp, Homo Sapiens
gagatcctgggttcgaatcccagcggtgcctcc

SEQ ID NO: 15563 - DNA, 19 bp, Homo Sapiens
gagatgaaaacctttttcc

SEQ ID NO: 15564 - DNA, 20 bp, Homo Sapiens
gagatgaaaacctttttcca

SEQ ID NO: 15565 - DNA, 22 bp, Homo Sapiens
gagatgaaaacctttttccaag

SEQ ID NO: 15566 - DNA, 23 bp, Homo Sapiens
gagatgaaaacctttttccaagg

SEQ ID NO: 15567 - DNA, 25 bp, Homo Sapiens
gagatgaaaacctttttccaaggac

SEQ ID NO: 15568 - DNA, 26 bp, Homo Sapiens
gagatgaaaacctttttccaaggaca

SEQ ID NO: 15569 - DNA, 27 bp, Homo Sapiens
gagatgaaaacctttttccaaggacac

SEQ ID NO: 15570 - DNA, 28 bp, Homo Sapiens
gagatgaaaacctttttccaaggacacc

SEQ ID NO: 15571 - DNA, 29 bp, Homo Sapiens
gagatgaaaacctttttccaaggacacca

SEQ ID NO: 15572 - DNA, 16 bp, Homo Sapiens
gagatttcaacttaac

SEQ ID NO: 15573 - DNA, 17 bp, Homo Sapiens
gagatttcaacttaact

SEQ ID NO: 15574 - DNA, 21 bp, Homo Sapiens
gagatttcaacttaacttgac

SEQ ID NO: 15575 - DNA, 22 bp, Homo Sapiens
gagatttcaacttaacttgacc

SEQ ID NO: 15576 - DNA, 23 bp, Homo Sapiens
gagatttcaacttaacttgaccg

SEQ ID NO: 15577 - DNA, 24 bp, Homo Sapiens
gagatttcaacttaacttgaccgc

SEQ ID NO: 15578 - DNA, 25 bp, Homo Sapiens
gagatttcaacttaacttgaccgct

SEQ ID NO: 15579 - DNA, 26 bp, Homo Sapiens
gagatttcaacttaacttgaccgctc

SEQ ID NO: 15580 - DNA, 27 bp, Homo Sapiens
gagatttcaacttaacttgaccgctct

SEQ ID NO: 15581 - DNA, 28 bp, Homo Sapiens
gagatttcaacttaacttgaccgctctg

SEQ ID NO: 15582 - DNA, 29 bp, Homo Sapiens
gagatttcaacttaacttgaccgctctga

SEQ ID NO: 15583 - DNA, 30 bp, Homo Sapiens
gagatttcaacttaacttgaccgctctgac

SEQ ID NO: 15584 - DNA, 31 bp, Homo Sapiens
gagatttcaacttaacttgaccgctctgacc

SEQ ID NO: 15585 - DNA, 32 bp, Homo Sapiens
gagatttcaacttaacttgaccgctctgacca

SEQ ID NO: 15586 - DNA, 22 bp, Homo Sapiens
gagcactctggactctgaatcc

SEQ ID NO: 15587 - DNA, 24 bp, Homo Sapiens
gagcactctggactctgaatccag

SEQ ID NO: 15588 - DNA, 25 bp, Homo Sapiens
gagcactctggactctgaatccagc

SEQ ID NO: 15589 - DNA, 26 bp, Homo Sapiens
gagcactctggactctgaatccagcg

SEQ ID NO: 15590 - DNA, 33 bp, Homo Sapiens
gagcactctggactctgaatccagcgatccgag

SEQ ID NO: 15591 - DNA, 34 bp, Homo Sapiens
gagcactctggactctgaatccagcgatccgagt

SEQ ID NO: 15592 - DNA, 35 bp, Homo Sapiens
gagcactctggactctgaatccagcgatccgagtt

SEQ ID NO: 15593 - DNA, 38 bp, Homo Sapiens
gagcactctggactctgaatccagcgatccgagttcga

SEQ ID NO: 15594 - DNA, 39 bp, Homo Sapiens
gagcactctggactctgaatccagcgatccgagttcgag

SEQ ID NO: 15595 - DNA, 32 bp, Homo Sapiens
gagcatagctgccttccaagcagttgacccgg

SEQ ID NO: 15596 - DNA, 34 bp, Homo Sapiens
gagcatagctgccttccaagcagttgacccgggt

SEQ ID NO: 15597 - DNA, 19 bp, Homo Sapiens
gagcatgagactcttaatc

SEQ ID NO: 15598 - DNA, 20 bp, Homo Sapiens
gagcatgagactcttaatct

SEQ ID NO: 15599 - DNA, 21 bp, Homo Sapiens
gagcatgagactcttaatctc

SEQ ID NO: 15600 - DNA, 31 bp, Homo Sapiens
gagcatgagactcttaatctcagggtcgtgg

SEQ ID NO: 15601 - DNA, 34 bp, Homo Sapiens
gagcatgagactcttaatctcagggtcgtgggtt

SEQ ID NO: 15602 - DNA, 16 bp, Homo Sapiens
gagcatgggactctta

SEQ ID NO: 15603 - DNA, 20 bp, Homo Sapiens
gagcatgggactcttaatcc

SEQ ID NO: 15604 - DNA, 21 bp, Homo Sapiens
gagcatgggactcttaatccc

SEQ ID NO: 15605 - DNA, 29 bp, Homo Sapiens
gagcatgggactcttaatcccagggtcgt

SEQ ID NO: 15606 - DNA, 30 bp, Homo Sapiens
gagcatgggactcttaatcccagggtcgtg

SEQ ID NO: 15607 - DNA, 31 bp, Homo Sapiens
gagcatgggactcttaatcccagggtcgtgg

SEQ ID NO: 15608 - DNA, 34 bp, Homo Sapiens
gagcatgggactcttaatcccagggtcgtgggtt

SEQ ID NO: 15609 - DNA, 35 bp, Homo Sapiens
gagcatgggactcttaatcccagggtcgtgggttc

SEQ ID NO: 15610 - DNA, 36 bp, Homo Sapiens
gagcatgggactcttaatcccagggtcgtgggttcg

SEQ ID NO: 15611 - DNA, 21 bp, Homo Sapiens
gagcatgggactcttaatctc

SEQ ID NO: 15612 - DNA, 19 bp, Homo Sapiens
gagccccacgttgggcgcc

SEQ ID NO: 15613 - DNA, 19 bp, Homo Sapiens
gagccccagtggaaccacc

SEQ ID NO: 15614 - DNA, 17 bp, Homo Sapiens
gagcccggtaatcgcat

SEQ ID NO: 15615 - DNA, 18 bp, Homo Sapiens
gagcccggtaatcgcata

SEQ ID NO: 15616 - DNA, 19 bp, Homo Sapiens
gagcccggtaatcgcataa

SEQ ID NO: 15617 - DNA, 20 bp, Homo Sapiens
gagcccggtaatcgcataaa

SEQ ID NO: 15618 - DNA, 22 bp, Homo Sapiens
gagcccggtaatcgcataaaac

SEQ ID NO: 15619 - DNA, 24 bp, Homo Sapiens
gagcccggtaatcgcataaaactt

SEQ ID NO: 15620 - DNA, 25 bp, Homo Sapiens
gagcccggtaatcgcataaaactta

SEQ ID NO: 15621 - DNA, 26 bp, Homo Sapiens
gagcccggtaatcgcataaaacttaa

SEQ ID NO: 15622 - DNA, 27 bp, Homo Sapiens
gagcccggtaatcgcataaaacttaaa

SEQ ID NO: 15623 - DNA, 28 bp, Homo Sapiens
gagcccggtaatcgcataaaacttaaaa

SEQ ID NO: 15624 - DNA, 29 bp, Homo Sapiens
gagcccggtaatcgcataaaacttaaaac

SEQ ID NO: 15625 - DNA, 30 bp, Homo Sapiens
gagcccggtaatcgcataaaacttaaaact

SEQ ID NO: 15626 - DNA, 31 bp, Homo Sapiens
gagcccggtaatcgcataaaacttaaaactt

SEQ ID NO: 15627 - DNA, 32 bp, Homo Sapiens
gagcccggtaatcgcataaaacttaaaacttt

SEQ ID NO: 15628 - DNA, 33 bp, Homo Sapiens
gagcccggtaatcgcataaaacttaaaacttta

SEQ ID NO: 15629 - DNA, 34 bp, Homo Sapiens
gagcccggtaatcgcataaaacttaaaactttac

SEQ ID NO: 15630 - DNA, 35 bp, Homo Sapiens
gagcccggtaatcgcataaaacttaaaactttaca

SEQ ID NO: 15631 - DNA, 36 bp, Homo Sapiens
gagcccggtaatcgcataaaacttaaaactttacag

SEQ ID NO: 15632 - DNA, 41 bp, Homo Sapiens
gagcccggtaatcgcataaaacttaaaactttacagtcaga

SEQ ID NO: 15633 - DNA, 42 bp, Homo Sapiens
gagcccggtaatcgcataaaacttaaaactttacagtcagag

SEQ ID NO: 15634 - DNA, 19 bp, Homo Sapiens
gagcctcacctggagcacc

SEQ ID NO: 15635 - DNA, 44 bp, Homo Sapiens
gagccttcaaagccctcagtaagttgcaatacttaatttctgcc

SEQ ID NO: 15636 - DNA, 45 bp, Homo Sapiens
gagccttcaaagccctcagtaagttgcaatacttaatttctgcca

SEQ ID NO: 15637 - DNA, 16 bp, Homo Sapiens
gagcgcgctggacttc

SEQ ID NO: 15638 - DNA, 18 bp, Homo Sapiens
gagcggtctaaggcgctg

SEQ ID NO: 15639 - DNA, 22 bp, Homo Sapiens
gagcggtctaaggcgctgcgtt

SEQ ID NO: 15640 - DNA, 23 bp, Homo Sapiens
gagcggtctaaggcgctgcgttc

SEQ ID NO: 15641 - DNA, 25 bp, Homo Sapiens
gagcggtctaaggcgctgcgttcag

SEQ ID NO: 15642 - DNA, 20 bp, Homo Sapiens
gagcggtctaaggcgctgga

SEQ ID NO: 15643 - DNA, 38 bp, Homo Sapiens
gagctggggattgtgggttcgagtcccatctgggtcgc

SEQ ID NO: 15644 - DNA, 39 bp, Homo Sapiens
gagctggggattgtgggttcgagtcccatctgggtcgcc

SEQ ID NO: 15645 - DNA, 40 bp, Homo Sapiens
gagctggggattgtgggttcgagtcccatctgggtcgcca

SEQ ID NO: 15646 - DNA, 16 bp, Homo Sapiens
gagcttaaaccccctt

SEQ ID NO: 15647 - DNA, 17 bp, Homo Sapiens
gagcttaaaccccctta

SEQ ID NO: 15648 - DNA, 18 bp, Homo Sapiens
gagcttaaacccccttat

SEQ ID NO: 15649 - DNA, 19 bp, Homo Sapiens
gagcttaaacccccttatt

SEQ ID NO: 15650 - DNA, 20 bp, Homo Sapiens
gagcttaaacccccttattt

SEQ ID NO: 15651 - DNA, 21 bp, Homo Sapiens
gagcttaaacccccttatttc

SEQ ID NO: 15652 - DNA, 22 bp, Homo Sapiens
gagcttaaacccccttatttct

SEQ ID NO: 15653 - DNA, 23 bp, Homo Sapiens
gagcttaaacccccttatttcta

SEQ ID NO: 15654 - DNA, 24 bp, Homo Sapiens
gagcttaaacccccttatttctac

SEQ ID NO: 15655 - DNA, 25 bp, Homo Sapiens
gagcttaaacccccttatttctacc

SEQ ID NO: 15656 - DNA, 26 bp, Homo Sapiens
gagcttaaacccccttatttctacca

SEQ ID NO: 15657 - DNA, 20 bp, Homo Sapiens
gaggccccgggttcaatccc

SEQ ID NO: 15658 - DNA, 34 bp, Homo Sapiens
gaggccccgggttcaatccccggcacctccacca

SEQ ID NO: 15659 - DNA, 24 bp, Homo Sapiens
gaggccccgggttcgatccccggc

SEQ ID NO: 15660 - DNA, 25 bp, Homo Sapiens
gaggccccgggttcgatccccggca

SEQ ID NO: 15661 - DNA, 28 bp, Homo Sapiens
gaggccccgggttcgatccccggcatct

SEQ ID NO: 15662 - DNA, 34 bp, Homo Sapiens
gaggccccgggttcgatccccggcatctccacca

SEQ ID NO: 15663 - DNA, 32 bp, Homo Sapiens
gaggcccgggttcgattcccggccaatgcacc

SEQ ID NO: 15664 - DNA, 20 bp, Homo Sapiens
gaggcgtgggttcgaatccc

SEQ ID NO: 15665 - DNA, 32 bp, Homo Sapiens
gaggcgtgggttcgaatcccactcctgacacc

SEQ ID NO: 15666 - DNA, 27 bp, Homo Sapiens
gaggcgtgggttcgaatcccacttctg

SEQ ID NO: 15667 - DNA, 31 bp, Homo Sapiens
gaggcgtgggttcgaatcccacttctgacac

SEQ ID NO: 15668 - DNA, 32 bp, Homo Sapiens
gaggcgtgggttcgaatcccacttctgacacc

SEQ ID NO: 15669 - DNA, 33 bp, Homo Sapiens
gaggcgtgggttcgaatcccacttctgacacca

SEQ ID NO: 15670 - DNA, 16 bp, Homo Sapiens
gaggcttacgacccct

SEQ ID NO: 15671 - DNA, 17 bp, Homo Sapiens
gaggcttacgacccctt

SEQ ID NO: 15672 - DNA, 18 bp, Homo Sapiens
gaggcttacgacccctta

SEQ ID NO: 15673 - DNA, 20 bp, Homo Sapiens
gaggcttacgaccccttatt

SEQ ID NO: 15674 - DNA, 22 bp, Homo Sapiens
gaggcttacgaccccttattta

SEQ ID NO: 15675 - DNA, 23 bp, Homo Sapiens
gaggcttacgaccccttatttac

SEQ ID NO: 15676 - DNA, 24 bp, Homo Sapiens
gaggcttacgaccccttatttacc

SEQ ID NO: 15677 - DNA, 25 bp, Homo Sapiens
gaggcttacgaccccttatttaccc

SEQ ID NO: 15678 - DNA, 26 bp, Homo Sapiens
gaggcttacgaccccttatttacccc

SEQ ID NO: 15679 - DNA, 27 bp, Homo Sapiens
gaggcttacgaccccttatttacccca

SEQ ID NO: 15680 - DNA, 16 bp, Homo Sapiens
gagggtccagggttca

SEQ ID NO: 15681 - DNA, 30 bp, Homo Sapiens
gagggtccagggttcaagtccctgttcggg

SEQ ID NO: 15682 - DNA, 31 bp, Homo Sapiens
gagggtccagggttcaagtccctgttcgggc

SEQ ID NO: 15683 - DNA, 32 bp, Homo Sapiens
gagggtccagggttcaagtccctgttcgggcg

SEQ ID NO: 15684 - DNA, 33 bp, Homo Sapiens
gagggtccagggttcaagtccctgttcgggcgc

SEQ ID NO: 15685 - DNA, 34 bp, Homo Sapiens
gagggtccagggttcaagtccctgttcgggcgcc

SEQ ID NO: 15686 - DNA, 35 bp, Homo Sapiens
gagggtccagggttcaagtccctgttcgggcgcca

SEQ ID NO: 15687 - DNA, 26 bp, Homo Sapiens
gagggttcgagtcccttcgtggtcgc

SEQ ID NO: 15688 - DNA, 27 bp, Homo Sapiens
gagggttcgagtcccttcgtggtcgcc

SEQ ID NO: 15689 - DNA, 28 bp, Homo Sapiens
gagggttcgagtcccttcgtggtcgcca

SEQ ID NO: 15690 - DNA, 19 bp, Homo Sapiens
gaggtcccgggttcgatcc

SEQ ID NO: 15691 - DNA, 28 bp, Homo Sapiens
gaggtcccgggttcgatccccagcatct

SEQ ID NO: 15692 - DNA, 20 bp, Homo Sapiens
gaggtcgatggatcgaaacc

SEQ ID NO: 15693 - DNA, 21 bp, Homo Sapiens
gaggtcgatggatcgaaacca

SEQ ID NO: 15694 - DNA, 22 bp, Homo Sapiens
gaggtcgatggatcgaaaccat

SEQ ID NO: 15695 - DNA, 29 bp, Homo Sapiens
gaggtcgatggatcgaaaccatcctctgc

SEQ ID NO: 15696 - DNA, 18 bp, Homo Sapiens
gaggtgattttcatattg

SEQ ID NO: 15697 - DNA, 19 bp, Homo Sapiens
gaggtgattttcatattga

SEQ ID NO: 15698 - DNA, 22 bp, Homo Sapiens
gaggtgattttcatattgaatt

SEQ ID NO: 15699 - DNA, 23 bp, Homo Sapiens
gaggtgattttcatattgaattg

SEQ ID NO: 15700 - DNA, 24 bp, Homo Sapiens
gaggtgattttcatattgaattgc

SEQ ID NO: 15701 - DNA, 25 bp, Homo Sapiens
gaggtgattttcatattgaattgca

SEQ ID NO: 15702 - DNA, 31 bp, Homo Sapiens
gaggtgattttcatattgaattgcaaattcg

SEQ ID NO: 15703 - DNA, 20 bp, Homo Sapiens
gaggtggccgagtggttaag

SEQ ID NO: 15704 - DNA, 21 bp, Homo Sapiens
gaggtggccgagtggttaagg

SEQ ID NO: 15705 - DNA, 24 bp, Homo Sapiens
gaggttccgggttcgagtcccggc

SEQ ID NO: 15706 - DNA, 30 bp, Homo Sapiens
gaggttgtgagttcaagcctcacctggagc

SEQ ID NO: 15707 - DNA, 30 bp, Homo Sapiens
gaggttgtgagttcgagcctcacctggagc

SEQ ID NO: 15708 - DNA, 33 bp, Homo Sapiens
gaggttgtgagttcgagcctcacctggagcacc

SEQ ID NO: 15709 - DNA, 16 bp, Homo Sapiens
gagtaaataataggag

SEQ ID NO: 15710 - DNA, 17 bp, Homo Sapiens
gagtaaataataggagc

SEQ ID NO: 15711 - DNA, 18 bp, Homo Sapiens
gagtaaataataggagct

SEQ ID NO: 15712 - DNA, 19 bp, Homo Sapiens
gagtaaataataggagctt

SEQ ID NO: 15713 - DNA, 20 bp, Homo Sapiens
gagtaaataataggagctta

SEQ ID NO: 15714 - DNA, 21 bp, Homo Sapiens
gagtaaataataggagcttaa

SEQ ID NO: 15715 - DNA, 23 bp, Homo Sapiens
gagtaaataataggagcttaaac

SEQ ID NO: 15716 - DNA, 24 bp, Homo Sapiens
gagtaaataataggagcttaaacc

SEQ ID NO: 15717 - DNA, 25 bp, Homo Sapiens
gagtaaataataggagcttaaaccc

SEQ ID NO: 15718 - DNA, 26 bp, Homo Sapiens
gagtaaataataggagcttaaacccc

SEQ ID NO: 15719 - DNA, 27 bp, Homo Sapiens
gagtaaataataggagcttaaaccccc

SEQ ID NO: 15720 - DNA, 28 bp, Homo Sapiens
gagtaaataataggagcttaaaccccct

SEQ ID NO: 15721 - DNA, 29 bp, Homo Sapiens
gagtaaataataggagcttaaaccccctt

SEQ ID NO: 15722 - DNA, 30 bp, Homo Sapiens
gagtaaataataggagcttaaaccccctta

SEQ ID NO: 15723 - DNA, 31 bp, Homo Sapiens
gagtaaataataggagcttaaacccccttat

SEQ ID NO: 15724 - DNA, 32 bp, Homo Sapiens
gagtaaataataggagcttaaacccccttatt

SEQ ID NO: 15725 - DNA, 35 bp, Homo Sapiens
gagtaaataataggagcttaaacccccttatttct

SEQ ID NO: 15726 - DNA, 31 bp, Homo Sapiens
gagtaaggtcagctaaataagctatcgggcc

SEQ ID NO: 15727 - DNA, 32 bp, Homo Sapiens
gagtaaggtcagctaaataagctatcgggccc

SEQ ID NO: 15728 - DNA, 16 bp, Homo Sapiens
gagtatccccgcctgt

SEQ ID NO: 15729 - DNA, 17 bp, Homo Sapiens
gagtatccccgcctgtc

SEQ ID NO: 15730 - DNA, 20 bp, Homo Sapiens
gagtatccccgcctgtcacg

SEQ ID NO: 15731 - DNA, 27 bp, Homo Sapiens
gagtatccccgcctgtcacgcgggaga

SEQ ID NO: 15732 - DNA, 18 bp, Homo Sapiens
gagtcccatctgggtcgc

SEQ ID NO: 15733 - DNA, 16 bp, Homo Sapiens
gagtcccggcggagtc

SEQ ID NO: 15734 - DNA, 17 bp, Homo Sapiens
gagtcccggcggagtcg

SEQ ID NO: 15735 - DNA, 17 bp, Homo Sapiens
gagtcccttcgtggtcg

SEQ ID NO: 15736 - DNA, 18 bp, Homo Sapiens
gagtcctgccgcggtcgc

SEQ ID NO: 15737 - DNA, 19 bp, Homo Sapiens
gagtcctgccgcggtcgcc

SEQ ID NO: 15738 - DNA, 16 bp, Homo Sapiens
gagtctcggtggaacc

SEQ ID NO: 15739 - DNA, 17 bp, Homo Sapiens
gagtctcggtggaacct

SEQ ID NO: 15740 - DNA, 19 bp, Homo Sapiens
gagtctcggtggaacctcc

SEQ ID NO: 15741 - DNA, 16 bp, Homo Sapiens
gagtgaagcattggac

SEQ ID NO: 15742 - DNA, 17 bp, Homo Sapiens
gagtgaagcattggact

SEQ ID NO: 15743 - DNA, 18 bp, Homo Sapiens
gagtgaagcattggactg

SEQ ID NO: 15744 - DNA, 19 bp, Homo Sapiens
gagtgaagcattggactgt

SEQ ID NO: 15745 - DNA, 20 bp, Homo Sapiens
gagtgaagcattggactgta

SEQ ID NO: 15746 - DNA, 21 bp, Homo Sapiens
gagtgaagcattggactgtaa

SEQ ID NO: 15747 - DNA, 22 bp, Homo Sapiens
gagtgaagcattggactgtaaa

SEQ ID NO: 15748 - DNA, 23 bp, Homo Sapiens
gagtgaagcattggactgtaaat

SEQ ID NO: 15749 - DNA, 24 bp, Homo Sapiens
gagtgaagcattggactgtaaatc

SEQ ID NO: 15750 - DNA, 25 bp, Homo Sapiens
gagtgaagcattggactgtaaatct

SEQ ID NO: 15751 - DNA, 26 bp, Homo Sapiens
gagtgaagcattggactgtaaatcta

SEQ ID NO: 15752 - DNA, 27 bp, Homo Sapiens
gagtgaagcattggactgtaaatctaa

SEQ ID NO: 15753 - DNA, 28 bp, Homo Sapiens
gagtgaagcattggactgtaaatctaaa

SEQ ID NO: 15754 - DNA, 29 bp, Homo Sapiens
gagtgaagcattggactgtaaatctaaag

SEQ ID NO: 15755 - DNA, 30 bp, Homo Sapiens
gagtgaagcattggactgtaaatctaaaga

SEQ ID NO: 15756 - DNA, 32 bp, Homo Sapiens
gagtgaagcattggactgtaaatctaaagaca

SEQ ID NO: 15757 - DNA, 33 bp, Homo Sapiens
gagtgaagcattggactgtaaatctaaagacag

SEQ ID NO: 15758 - DNA, 36 bp, Homo Sapiens
gagtgaagcattggactgtaaatctaaagacagggg

SEQ ID NO: 15759 - DNA, 37 bp, Homo Sapiens
gagtgaagcattggactgtaaatctaaagacaggggt

SEQ ID NO: 15760 - DNA, 38 bp, Homo Sapiens
gagtgaagcattggactgtaaatctaaagacaggggtt

SEQ ID NO: 15761 - DNA, 39 bp, Homo Sapiens
gagtgaagcattggactgtaaatctaaagacaggggtta

SEQ ID NO: 15762 - DNA, 40 bp, Homo Sapiens
gagtgaagcattggactgtaaatctaaagacaggggttag

SEQ ID NO: 15763 - DNA, 42 bp, Homo Sapiens
gagtgaagcattggactgtaaatctaaagacaggggttaggc

SEQ ID NO: 15764 - DNA, 43 bp, Homo Sapiens
gagtgaagcattggactgtaaatctaaagacaggggttaggcc

SEQ ID NO: 15765 - DNA, 44 bp, Homo Sapiens
gagtgaagcattggactgtaaatctaaagacaggggttaggcct

SEQ ID NO: 15766 - DNA, 45 bp, Homo Sapiens
gagtgaagcattggactgtaaatctaaagacaggggttaggcctc

SEQ ID NO: 15767 - DNA, 17 bp, Homo Sapiens
gagtggcgcagcggaag

SEQ ID NO: 15768 - DNA, 19 bp, Homo Sapiens
gagtggcgcagcggaagcg

SEQ ID NO: 15769 - DNA, 26 bp, Homo Sapiens
gagtggcgcagcggaagcgtgctggg

SEQ ID NO: 15770 - DNA, 27 bp, Homo Sapiens
gagtggcgcagcggaagcgtgctgggc

SEQ ID NO: 15771 - DNA, 28 bp, Homo Sapiens
gagtggcgcagcggaagcgtgctgggcc

SEQ ID NO: 15772 - DNA, 29 bp, Homo Sapiens
gagtggcgcagcggaagcgtgctgggccc

SEQ ID NO: 15773 - DNA, 30 bp, Homo Sapiens
gagtggcgcagcggaagcgtgctgggccca

SEQ ID NO: 15774 - DNA, 31 bp, Homo Sapiens
gagtggcgcagcggaagcgtgctgggcccat

SEQ ID NO: 15775 - DNA, 34 bp, Homo Sapiens
gagtggcgcagcggaagcgtgctgggcccataac

SEQ ID NO: 15776 - DNA, 35 bp, Homo Sapiens
gagtggcgcagcggaagcgtgctgggcccataacc

SEQ ID NO: 15777 - DNA, 17 bp, Homo Sapiens
gagtggggttttgcagt

SEQ ID NO: 15778 - DNA, 18 bp, Homo Sapiens
gagtggggttttgcagtc

SEQ ID NO: 15779 - DNA, 19 bp, Homo Sapiens
gagtggggttttgcagtcc

SEQ ID NO: 15780 - DNA, 20 bp, Homo Sapiens
gagtggggttttgcagtcct

SEQ ID NO: 15781 - DNA, 21 bp, Homo Sapiens
gagtggggttttgcagtcctt

SEQ ID NO: 15782 - DNA, 23 bp, Homo Sapiens
gagtggggttttgcagtccttac

SEQ ID NO: 15783 - DNA, 24 bp, Homo Sapiens
gagtggggttttgcagtccttacc

SEQ ID NO: 15784 - DNA, 25 bp, Homo Sapiens
gagtggggttttgcagtccttacca

SEQ ID NO: 15785 - DNA, 23 bp, Homo Sapiens
gagtggtctaaggcgccagactc

SEQ ID NO: 15786 - DNA, 16 bp, Homo Sapiens
gagtgtagcttaacac

SEQ ID NO: 15787 - DNA, 25 bp, Homo Sapiens
gagtgtagcttaacacaaagcaccc

SEQ ID NO: 15788 - DNA, 26 bp, Homo Sapiens
gagtgtagcttaacacaaagcaccca

SEQ ID NO: 15789 - DNA, 27 bp, Homo Sapiens
gagtgtagcttaacacaaagcacccaa

SEQ ID NO: 15790 - DNA, 31 bp, Homo Sapiens
gagtgtagcttaacacaaagcacccaactta

SEQ ID NO: 15791 - DNA, 32 bp, Homo Sapiens
gagtgtagcttaacacaaagcacccaacttac

SEQ ID NO: 15792 - DNA, 35 bp, Homo Sapiens
gagtgtagcttaacacaaagcacccaacttacact

SEQ ID NO: 15793 - DNA, 37 bp, Homo Sapiens
gagtgtagcttaacacaaagcacccaacttacactta

SEQ ID NO: 15794 - DNA, 17 bp, Homo Sapiens
gagttaaagactttttc

SEQ ID NO: 15795 - DNA, 19 bp, Homo Sapiens
gagttaaagactttttctc

SEQ ID NO: 15796 - DNA, 22 bp, Homo Sapiens
gagttaaagactttttctctga

SEQ ID NO: 15797 - DNA, 23 bp, Homo Sapiens
gagttaaagactttttctctgac

SEQ ID NO: 15798 - DNA, 24 bp, Homo Sapiens
gagttaaagactttttctctgacc

SEQ ID NO: 15799 - DNA, 25 bp, Homo Sapiens
gagttaaagactttttctctgacca

SEQ ID NO: 15800 - DNA, 31 bp, Homo Sapiens
gagttactttgatagagtaaataataggagc

SEQ ID NO: 15801 - DNA, 32 bp, Homo Sapiens
gagttactttgatagagtaaataataggagct

SEQ ID NO: 15802 - DNA, 34 bp, Homo Sapiens
gagttactttgatagagtaaataataggagctta

SEQ ID NO: 15803 - DNA, 23 bp, Homo Sapiens
gagttcaaatctcgctggggcct

SEQ ID NO: 15804 - DNA, 24 bp, Homo Sapiens
gagttcaaatctcgctggggcctc

SEQ ID NO: 15805 - DNA, 25 bp, Homo Sapiens
gagttcaaatctcgctggggcctcc

SEQ ID NO: 15806 - DNA, 21 bp, Homo Sapiens
gagttcaaatctcggtggaac

SEQ ID NO: 15807 - DNA, 23 bp, Homo Sapiens
gagttcaaatctcggtggaacct

SEQ ID NO: 15808 - DNA, 24 bp, Homo Sapiens
gagttcaaatctcggtggaacctc

SEQ ID NO: 15809 - DNA, 25 bp, Homo Sapiens
gagttcaaatctcggtggaacctcc

SEQ ID NO: 15810 - DNA, 26 bp, Homo Sapiens
gagttcaaatctcggtggaacctcca

SEQ ID NO: 15811 - DNA, 21 bp, Homo Sapiens
gagttcaaatctcggtgggac

SEQ ID NO: 15812 - DNA, 22 bp, Homo Sapiens
gagttcaaatctcggtgggacc

SEQ ID NO: 15813 - DNA, 23 bp, Homo Sapiens
gagttcaaatctcggtgggacct

SEQ ID NO: 15814 - DNA, 24 bp, Homo Sapiens
gagttcaaatctcggtgggacctc

SEQ ID NO: 15815 - DNA, 24 bp, Homo Sapiens
gagttcaagtctcggtggaacctc

SEQ ID NO: 15816 - DNA, 25 bp, Homo Sapiens
gagttcgaacctcagagggggcacc

SEQ ID NO: 15817 - DNA, 21 bp, Homo Sapiens
gagttcgaatctcggtgggac

SEQ ID NO: 15818 - DNA, 22 bp, Homo Sapiens
gagttcgaatctcggtgggacc

SEQ ID NO: 15819 - DNA, 23 bp, Homo Sapiens
gagttcgaatctcggtgggacct

SEQ ID NO: 15820 - DNA, 24 bp, Homo Sapiens
gagttcgaatctcggtgggacctc

SEQ ID NO: 15821 - DNA, 21 bp, Homo Sapiens
gagttcgagtctcggtggaac

SEQ ID NO: 15822 - DNA, 22 bp, Homo Sapiens
gagttcgagtctcggtggaacc

SEQ ID NO: 15823 - DNA, 23 bp, Homo Sapiens
gagttcgagtctcggtggaacct

SEQ ID NO: 15824 - DNA, 24 bp, Homo Sapiens
gagttcgagtctcggtggaacctc

SEQ ID NO: 15825 - DNA, 25 bp, Homo Sapiens
gagttcgagtctcggtggaacctcc

SEQ ID NO: 15826 - DNA, 26 bp, Homo Sapiens
gagttcgagtctcggtggaacctcca

SEQ ID NO: 15827 - DNA, 22 bp, Homo Sapiens
gagttcgatcctcgctggggcc

SEQ ID NO: 15828 - DNA, 24 bp, Homo Sapiens
gagttcgatcctcgctggggcctc

SEQ ID NO: 15829 - DNA, 25 bp, Homo Sapiens
gagttcgatcctcgctggggcctcc

SEQ ID NO: 15830 - DNA, 19 bp, Homo Sapiens
gataaaagagttactttga

SEQ ID NO: 15831 - DNA, 20 bp, Homo Sapiens
gataaaagagttactttgat

SEQ ID NO: 15832 - DNA, 21 bp, Homo Sapiens
gataaaagagttactttgata

SEQ ID NO: 15833 - DNA, 23 bp, Homo Sapiens
gataaaagagttactttgataga

SEQ ID NO: 15834 - DNA, 38 bp, Homo Sapiens
gataaaagagttactttgatagagtaaataataggagc

SEQ ID NO: 15835 - DNA, 39 bp, Homo Sapiens
gataaaagagttactttgatagagtaaataataggagct

SEQ ID NO: 15836 - DNA, 40 bp, Homo Sapiens
gataaaagagttactttgatagagtaaataataggagctt

SEQ ID NO: 15837 - DNA, 17 bp, Homo Sapiens
gataacagctatccatt

SEQ ID NO: 15838 - DNA, 18 bp, Homo Sapiens
gataacagctatccattg

SEQ ID NO: 15839 - DNA, 19 bp, Homo Sapiens
gataacagctatccattgg

SEQ ID NO: 15840 - DNA, 20 bp, Homo Sapiens
gataacagctatccattggt

SEQ ID NO: 15841 - DNA, 21 bp, Homo Sapiens
gataacagctatccattggtc

SEQ ID NO: 15842 - DNA, 22 bp, Homo Sapiens
gataacagctatccattggtct

SEQ ID NO: 15843 - DNA, 23 bp, Homo Sapiens
gataacagctatccattggtctt

SEQ ID NO: 15844 - DNA, 24 bp, Homo Sapiens
gataacagctatccattggtctta

SEQ ID NO: 15845 - DNA, 25 bp, Homo Sapiens
gataacagctatccattggtcttag

SEQ ID NO: 15846 - DNA, 28 bp, Homo Sapiens
gataacagctatccattggtcttaggcc

SEQ ID NO: 15847 - DNA, 29 bp, Homo Sapiens
gataacagctatccattggtcttaggccc

SEQ ID NO: 15848 - DNA, 30 bp, Homo Sapiens
gataacagctatccattggtcttaggcccc

SEQ ID NO: 15849 - DNA, 31 bp, Homo Sapiens
gataacagctatccattggtcttaggcccca

SEQ ID NO: 15850 - DNA, 35 bp, Homo Sapiens
gataacagctatccattggtcttaggccccaaaaa

SEQ ID NO: 15851 - DNA, 43 bp, Homo Sapiens
gataacagctatccattggtcttaggccccaaaaattttggtg

SEQ ID NO: 15852 - DNA, 25 bp, Homo Sapiens
gataaggcatcagcctccggagctg

SEQ ID NO: 15853 - DNA, 18 bp, Homo Sapiens
gataaggcgtctgattcc

SEQ ID NO: 15854 - DNA, 16 bp, Homo Sapiens
gataatcatatttacc

SEQ ID NO: 15855 - DNA, 17 bp, Homo Sapiens
gataatcatatttacca

SEQ ID NO: 15856 - DNA, 18 bp, Homo Sapiens
gataatcatatttaccaa

SEQ ID NO: 15857 - DNA, 19 bp, Homo Sapiens
gataatcatatttaccaac

SEQ ID NO: 15858 - DNA, 20 bp, Homo Sapiens
gataatcatatttaccaacc

SEQ ID NO: 15859 - DNA, 21 bp, Homo Sapiens
gataatcatatttaccaacca

SEQ ID NO: 15860 - DNA, 19 bp, Homo Sapiens
gatagagtaaataatagga

SEQ ID NO: 15861 - DNA, 20 bp, Homo Sapiens
gatagagtaaataataggag

SEQ ID NO: 15862 - DNA, 21 bp, Homo Sapiens
gatagagtaaataataggagc

SEQ ID NO: 15863 - DNA, 22 bp, Homo Sapiens
gatagagtaaataataggagct

SEQ ID NO: 15864 - DNA, 23 bp, Homo Sapiens
gatagagtaaataataggagctt

SEQ ID NO: 15865 - DNA, 24 bp, Homo Sapiens
gatagagtaaataataggagctta

SEQ ID NO: 15866 - DNA, 25 bp, Homo Sapiens
gatagagtaaataataggagcttaa

SEQ ID NO: 15867 - DNA, 27 bp, Homo Sapiens
gatagagtaaataataggagcttaaac

SEQ ID NO: 15868 - DNA, 28 bp, Homo Sapiens
gatagagtaaataataggagcttaaacc

SEQ ID NO: 15869 - DNA, 29 bp, Homo Sapiens
gatagagtaaataataggagcttaaaccc

SEQ ID NO: 15870 - DNA, 30 bp, Homo Sapiens
gatagagtaaataataggagcttaaacccc

SEQ ID NO: 15871 - DNA, 31 bp, Homo Sapiens
gatagagtaaataataggagcttaaaccccc

SEQ ID NO: 15872 - DNA, 32 bp, Homo Sapiens
gatagagtaaataataggagcttaaaccccct

SEQ ID NO: 15873 - DNA, 33 bp, Homo Sapiens
gatagagtaaataataggagcttaaaccccctt

SEQ ID NO: 15874 - DNA, 34 bp, Homo Sapiens
gatagagtaaataataggagcttaaaccccctta

SEQ ID NO: 15875 - DNA, 35 bp, Homo Sapiens
gatagagtaaataataggagcttaaacccccttat

SEQ ID NO: 15876 - DNA, 36 bp, Homo Sapiens
gatagagtaaataataggagcttaaacccccttatt

SEQ ID NO: 15877 - DNA, 39 bp, Homo Sapiens
gatagagtaaataataggagcttaaacccccttatttct

SEQ ID NO: 15878 - DNA, 20 bp, Homo Sapiens
gatagcgcattggacttcta

SEQ ID NO: 15879 - DNA, 26 bp, Homo Sapiens
gatagctcagctggtagagcggagga

SEQ ID NO: 15880 - DNA, 28 bp, Homo Sapiens
gatagctcagctggtagagcggaggact

SEQ ID NO: 15881 - DNA, 31 bp, Homo Sapiens
gatagctcagctggtagagcggaggactgta

SEQ ID NO: 15882 - DNA, 17 bp, Homo Sapiens
gatagctcagtcggtag

SEQ ID NO: 15883 - DNA, 18 bp, Homo Sapiens
gatagctcagtcggtaga

SEQ ID NO: 15884 - DNA, 19 bp, Homo Sapiens
gatagctcagtcggtagag

SEQ ID NO: 15885 - DNA, 23 bp, Homo Sapiens
gatagctcagtcggtagagcatc

SEQ ID NO: 15886 - DNA, 27 bp, Homo Sapiens
gatagctcagtcggtagagcatcagac

SEQ ID NO: 15887 - DNA, 28 bp, Homo Sapiens
gatagctcagtcggtagagcatcagact

SEQ ID NO: 15888 - DNA, 29 bp, Homo Sapiens
gatagctcagtcggtagagcatcagactt

SEQ ID NO: 15889 - DNA, 30 bp, Homo Sapiens
gatagctcagtcggtagagcatcagacttt

SEQ ID NO: 15890 - DNA, 31 bp, Homo Sapiens
gatagctcagtcggtagagcatcagactttt

SEQ ID NO: 15891 - DNA, 18 bp, Homo Sapiens
gatagctcagttggtaga

SEQ ID NO: 15892 - DNA, 19 bp, Homo Sapiens
gatagctcagttggtagag

SEQ ID NO: 15893 - DNA, 29 bp, Homo Sapiens
gatagctcagttggtagagcggaggactg

SEQ ID NO: 15894 - DNA, 31 bp, Homo Sapiens
gatagctcagttggtagagcggaggactgta

SEQ ID NO: 15895 - DNA, 18 bp, Homo Sapiens
gataggtggcacggagaa

SEQ ID NO: 15896 - DNA, 19 bp, Homo Sapiens
gataggtggcacggagaat

SEQ ID NO: 15897 - DNA, 20 bp, Homo Sapiens
gataggtggcacggagaatt

SEQ ID NO: 15898 - DNA, 21 bp, Homo Sapiens
gataggtggcacggagaattt

SEQ ID NO: 15899 - DNA, 22 bp, Homo Sapiens
gataggtggcacggagaatttt

SEQ ID NO: 15900 - DNA, 23 bp, Homo Sapiens
gataggtggcacggagaattttg

SEQ ID NO: 15901 - DNA, 39 bp, Homo Sapiens
gatcaagaggtccccggttcaaatccgggtgccccctcc

SEQ ID NO: 15902 - DNA, 24 bp, Homo Sapiens
gatcagaagattccaggttcgact

SEQ ID NO: 15903 - DNA, 37 bp, Homo Sapiens
gatcagaagattccaggttcgactcctggctggctcg

SEQ ID NO: 15904 - DNA, 38 bp, Homo Sapiens
gatcagaagattccaggttcgactcctggctggctcgc

SEQ ID NO: 15905 - DNA, 39 bp, Homo Sapiens
gatcagaagattccaggttcgactcctggctggctcgcc

SEQ ID NO: 15906 - DNA, 40 bp, Homo Sapiens
gatcagaagattccaggttcgactcctggctggctcgcca

SEQ ID NO: 15907 - DNA, 23 bp, Homo Sapiens
gatcagaagattctaggttcgac

SEQ ID NO: 15908 - DNA, 24 bp, Homo Sapiens
gatcagaagattctaggttcgact

SEQ ID NO: 15909 - DNA, 34 bp, Homo Sapiens
gatcagaagattctaggttcgactcctggctggc

SEQ ID NO: 15910 - DNA, 35 bp, Homo Sapiens
gatcagaagattctaggttcgactcctggctggct

SEQ ID NO: 15911 - DNA, 36 bp, Homo Sapiens
gatcagaagattctaggttcgactcctggctggctc

SEQ ID NO: 15912 - DNA, 37 bp, Homo Sapiens
gatcagaagattctaggttcgactcctggctggctcg

SEQ ID NO: 15913 - DNA, 38 bp, Homo Sapiens
gatcagaagattctaggttcgactcctggctggctcgc

SEQ ID NO: 15914 - DNA, 39 bp, Homo Sapiens
gatcagaagattctaggttcgactcctggctggctcgcc

SEQ ID NO: 15915 - DNA, 40 bp, Homo Sapiens
gatcagaagattctaggttcgactcctggctggctcgcca

SEQ ID NO: 15916 - DNA, 18 bp, Homo Sapiens
gatcagaagattgagggt

SEQ ID NO: 15917 - DNA, 21 bp, Homo Sapiens
gatcagaagattgagggttcg

SEQ ID NO: 15918 - DNA, 31 bp, Homo Sapiens
gatcagaagattgagggttcgaatccctccg

SEQ ID NO: 15919 - DNA, 39 bp, Homo Sapiens
gatcagaagattgagggttcgaatccctccgtggttacc

SEQ ID NO: 15920 - DNA, 37 bp, Homo Sapiens
gatcagaagattgagggttcgaatcccttcgtggttg

SEQ ID NO: 15921 - DNA, 39 bp, Homo Sapiens
gatcagaagattgagggttcgaatcccttcgtggttgcc

SEQ ID NO: 15922 - DNA, 37 bp, Homo Sapiens
gatcagaagattgagggttcgagtcccttcgtggtcg

SEQ ID NO: 15923 - DNA, 38 bp, Homo Sapiens
gatcagaagattgagggttcgagtcccttcgtggtcgc

SEQ ID NO: 15924 - DNA, 39 bp, Homo Sapiens
gatcagaagattgagggttcgagtcccttcgtggtcgcc

SEQ ID NO: 15925 - DNA, 40 bp, Homo Sapiens
gatcagaagattgagggttcgagtcccttcgtggtcgcca

SEQ ID NO: 15926 - DNA, 36 bp, Homo Sapiens
gatcagaagattgcaggttcgagtcctgccgcggtc

SEQ ID NO: 15927 - DNA, 37 bp, Homo Sapiens
gatcagaagattgcaggttcgagtcctgccgcggtcg

SEQ ID NO: 15928 - DNA, 38 bp, Homo Sapiens
gatcagaagattgcaggttcgagtcctgccgcggtcgc

SEQ ID NO: 15929 - DNA, 39 bp, Homo Sapiens
gatcagaagattgcaggttcgagtcctgccgcggtcgcc

SEQ ID NO: 15930 - DNA, 40 bp, Homo Sapiens
gatcagaagattgcaggttcgagtcctgccgcggtcgcca

SEQ ID NO: 15931 - DNA, 20 bp, Homo Sapiens
gatcagaaggctgcgtgttc

SEQ ID NO: 15932 - DNA, 21 bp, Homo Sapiens
gatcagaaggctgcgtgttcg

SEQ ID NO: 15933 - DNA, 34 bp, Homo Sapiens
gatcagaaggctgcgtgttcgaatcacgtcgggg

SEQ ID NO: 15934 - DNA, 35 bp, Homo Sapiens
gatcagaaggctgcgtgttcgaatcacgtcggggt

SEQ ID NO: 15935 - DNA, 36 bp, Homo Sapiens
gatcagaaggctgcgtgttcgaatcacgtcggggtc

SEQ ID NO: 15936 - DNA, 38 bp, Homo Sapiens
gatcagaaggctgcgtgttcgaatcacgtcggggtcac

SEQ ID NO: 15937 - DNA, 39 bp, Homo Sapiens
gatcagaaggctgcgtgttcgaatcacgtcggggtcacc

SEQ ID NO: 15938 - DNA, 40 bp, Homo Sapiens
gatcagaaggctgcgtgttcgaatcacgtcggggtcacca

SEQ ID NO: 15939 - DNA, 16 bp, Homo Sapiens
gatcagaaggttgcgt

SEQ ID NO: 15940 - DNA, 20 bp, Homo Sapiens
gatcagaaggttgcgtgttc

SEQ ID NO: 15941 - DNA, 34 bp, Homo Sapiens
gatcagaaggttgcgtgttcaaatcacgtcgggg

SEQ ID NO: 15942 - DNA, 36 bp, Homo Sapiens
gatcagaaggttgcgtgttcaaatcacgtcggggtc

SEQ ID NO: 15943 - DNA, 37 bp, Homo Sapiens
gatcagaaggttgcgtgttcaaatcacgtcggggtca

SEQ ID NO: 15944 - DNA, 38 bp, Homo Sapiens
gatcagaaggttgcgtgttcaaatcacgtcggggtcac

SEQ ID NO: 15945 - DNA, 39 bp, Homo Sapiens
gatcagaaggttgcgtgttcaaatcacgtcggggtcacc

SEQ ID NO: 15946 - DNA, 40 bp, Homo Sapiens
gatcagaaggttgcgtgttcaaatcacgtcggggtcacca

SEQ ID NO: 15947 - DNA, 34 bp, Homo Sapiens
gatcagaaggttgcgtgttcaagtcacgtcgggg

SEQ ID NO: 15948 - DNA, 35 bp, Homo Sapiens
gatcagaaggttgcgtgttcaagtcacgtcggggt

SEQ ID NO: 15949 - DNA, 36 bp, Homo Sapiens
gatcagaaggttgcgtgttcaagtcacgtcggggtc

SEQ ID NO: 15950 - DNA, 37 bp, Homo Sapiens
gatcagaaggttgcgtgttcaagtcacgtcggggtca

SEQ ID NO: 15951 - DNA, 38 bp, Homo Sapiens
gatcagaaggttgcgtgttcaagtcacgtcggggtcac

SEQ ID NO: 15952 - DNA, 39 bp, Homo Sapiens
gatcagaaggttgcgtgttcaagtcacgtcggggtcacc

SEQ ID NO: 15953 - DNA, 40 bp, Homo Sapiens
gatcagaaggttgcgtgttcaagtcacgtcggggtcacca

SEQ ID NO: 15954 - DNA, 16 bp, Homo Sapiens
gatccaatggacatat

SEQ ID NO: 15955 - DNA, 18 bp, Homo Sapiens
gatccaatggacatatgt

SEQ ID NO: 15956 - DNA, 20 bp, Homo Sapiens
gatccccagcatctccacca

SEQ ID NO: 15957 - DNA, 19 bp, Homo Sapiens
gatccccggcatctccacc

SEQ ID NO: 15958 - DNA, 20 bp, Homo Sapiens
gatccccggcatctccacca

SEQ ID NO: 15959 - DNA, 16 bp, Homo Sapiens
gatccccgtacgggcc

SEQ ID NO: 15960 - DNA, 18 bp, Homo Sapiens
gatccccgtacgggccac

SEQ ID NO: 15961 - DNA, 19 bp, Homo Sapiens
gatccccgtacgggccacc

SEQ ID NO: 15962 - DNA, 20 bp, Homo Sapiens
gatcccgggcggaaacacca

SEQ ID NO: 15963 - DNA, 18 bp, Homo Sapiens
gatcccgggtttcggcac

SEQ ID NO: 15964 - DNA, 20 bp, Homo Sapiens
gatcccgggtttcggcacca

SEQ ID NO: 15965 - DNA, 19 bp, Homo Sapiens
gatccgagttcgagtctcg

SEQ ID NO: 15966 - DNA, 29 bp, Homo Sapiens
gatccgagttcgagtctcggtggaacctc

SEQ ID NO: 15967 - DNA, 27 bp, Homo Sapiens
gatcctgggttcgaatcccagcggggc

SEQ ID NO: 15968 - DNA, 28 bp, Homo Sapiens
gatcctgggttcgaatcccagcggggcc

SEQ ID NO: 15969 - DNA, 31 bp, Homo Sapiens
gatcctgggttcgaatcccagcggggcctcc

SEQ ID NO: 15970 - DNA, 26 bp, Homo Sapiens
gatcctgggttcgaatcccagcggtg

SEQ ID NO: 15971 - DNA, 31 bp, Homo Sapiens
gatcctgggttcgaatcccagcggtgcctcc

SEQ ID NO: 15972 - DNA, 30 bp, Homo Sapiens
gatcctgggttcgaatcccagtagagcctc

SEQ ID NO: 15973 - DNA, 31 bp, Homo Sapiens
gatcctgggttcgaatcccagtagagcctcc

SEQ ID NO: 15974 - DNA, 16 bp, Homo Sapiens
gatccttaggtcgctg

SEQ ID NO: 15975 - DNA, 35 bp, Homo Sapiens
gatccttaggtcgctggttcgaatccggctcgaag

SEQ ID NO: 15976 - DNA, 20 bp, Homo Sapiens
gatcgaaaccatcctctgct

SEQ ID NO: 15977 - DNA, 23 bp, Homo Sapiens
gatcgaaaccatcctctgctacc

SEQ ID NO: 15978 - DNA, 24 bp, Homo Sapiens
gatcgaaaccatcctctgctacca

SEQ ID NO: 15979 - DNA, 23 bp, Homo Sapiens
gatcgtatagtggttagtactct

SEQ ID NO: 15980 - DNA, 24 bp, Homo Sapiens
gatcgtatagtggttagtactctg

SEQ ID NO: 15981 - DNA, 25 bp, Homo Sapiens
gatcgtatagtggttagtactctgc

SEQ ID NO: 15982 - DNA, 26 bp, Homo Sapiens
gatcgtatagtggttagtactctgcg

SEQ ID NO: 15983 - DNA, 27 bp, Homo Sapiens
gatcgtatagtggttagtactctgcgt

SEQ ID NO: 15984 - DNA, 28 bp, Homo Sapiens
gatcgtatagtggttagtactctgcgtt

SEQ ID NO: 15985 - DNA, 29 bp, Homo Sapiens
gatcgtatagtggttagtactctgcgttg

SEQ ID NO: 15986 - DNA, 22 bp, Homo Sapiens
gatgaaaacctttttccaagga

SEQ ID NO: 15987 - DNA, 23 bp, Homo Sapiens
gatgaaaacctttttccaaggac

SEQ ID NO: 15988 - DNA, 24 bp, Homo Sapiens
gatgaaaacctttttccaaggaca

SEQ ID NO: 15989 - DNA, 25 bp, Homo Sapiens
gatgaaaacctttttccaaggacac

SEQ ID NO: 15990 - DNA, 26 bp, Homo Sapiens
gatgaaaacctttttccaaggacacc

SEQ ID NO: 15991 - DNA, 27 bp, Homo Sapiens
gatgaaaacctttttccaaggacacca

SEQ ID NO: 15992 - DNA, 16 bp, Homo Sapiens
gatgcagagtggggtt

SEQ ID NO: 15993 - DNA, 17 bp, Homo Sapiens
gatgcagagtggggttt

SEQ ID NO: 15994 - DNA, 19 bp, Homo Sapiens
gatgcagagtggggttttg

SEQ ID NO: 15995 - DNA, 24 bp, Homo Sapiens
gatgcagagtggggttttgcagtc

SEQ ID NO: 15996 - DNA, 25 bp, Homo Sapiens
gatgcagagtggggttttgcagtcc

SEQ ID NO: 15997 - DNA, 26 bp, Homo Sapiens
gatgcagagtggggttttgcagtcct

SEQ ID NO: 15998 - DNA, 28 bp, Homo Sapiens
gatgcagagtggggttttgcagtcctta

SEQ ID NO: 15999 - DNA, 29 bp, Homo Sapiens
gatgcagagtggggttttgcagtccttac

SEQ ID NO: 16000 - DNA, 30 bp, Homo Sapiens
gatgcagagtggggttttgcagtccttacc

SEQ ID NO: 16001 - DNA, 31 bp, Homo Sapiens
gatgcagagtggggttttgcagtccttacca

SEQ ID NO: 16002 - DNA, 19 bp, Homo Sapiens
gatgcccgcatcctccacc

SEQ ID NO: 16003 - DNA, 24 bp, Homo Sapiens
gatggaggcgtgggttcgaatccc

SEQ ID NO: 16004 - DNA, 25 bp, Homo Sapiens
gatggaggcgtgggttcgaatccca

SEQ ID NO: 16005 - DNA, 31 bp, Homo Sapiens
gatggaggcgtgggttcgaatcccacttctg

SEQ ID NO: 16006 - DNA, 34 bp, Homo Sapiens
gatggaggcgtgggttcgaatcccacttctgaca

SEQ ID NO: 16007 - DNA, 36 bp, Homo Sapiens
gatggaggcgtgggttcgaatcccacttctgacacc

SEQ ID NO: 16008 - DNA, 37 bp, Homo Sapiens
gatggaggcgtgggttcgaatcccacttctgacacca

SEQ ID NO: 16009 - DNA, 24 bp, Homo Sapiens
gatggatcgaaaccatcctctgct

SEQ ID NO: 16010 - DNA, 19 bp, Homo Sapiens
gatggcagagcccggtaat

SEQ ID NO: 16011 - DNA, 21 bp, Homo Sapiens
gatggcagagcccggtaatcg

SEQ ID NO: 16012 - DNA, 25 bp, Homo Sapiens
gatggcagagcccggtaatcgcata

SEQ ID NO: 16013 - DNA, 26 bp, Homo Sapiens
gatggcagagcccggtaatcgcataa

SEQ ID NO: 16014 - DNA, 28 bp, Homo Sapiens
gatggcagagcccggtaatcgcataaaa

SEQ ID NO: 16015 - DNA, 29 bp, Homo Sapiens
gatggcagagcccggtaatcgcataaaac

SEQ ID NO: 16016 - DNA, 32 bp, Homo Sapiens
gatggcagagcccggtaatcgcataaaactta

SEQ ID NO: 16017 - DNA, 33 bp, Homo Sapiens
gatggcagagcccggtaatcgcataaaacttaa

SEQ ID NO: 16018 - DNA, 34 bp, Homo Sapiens
gatggcagagcccggtaatcgcataaaacttaaa

SEQ ID NO: 16019 - DNA, 36 bp, Homo Sapiens
gatggcagagcccggtaatcgcataaaacttaaaac

SEQ ID NO: 16020 - DNA, 37 bp, Homo Sapiens
gatggcagagcccggtaatcgcataaaacttaaaact

SEQ ID NO: 16021 - DNA, 16 bp, Homo Sapiens
gatggccgagcggtct

SEQ ID NO: 16022 - DNA, 17 bp, Homo Sapiens
gatggccgagcggtcta

SEQ ID NO: 16023 - DNA, 19 bp, Homo Sapiens
gatggccgagcggtctaag

SEQ ID NO: 16024 - DNA, 21 bp, Homo Sapiens
gatggccgagcggtctaaggc

SEQ ID NO: 16025 - DNA, 29 bp, Homo Sapiens
gatggccgagcggtctaaggcgctgcgtt

SEQ ID NO: 16026 - DNA, 21 bp, Homo Sapiens
gatggccgagtggtctaaggc

SEQ ID NO: 16027 - DNA, 18 bp, Homo Sapiens
gatggccgagtggttaag

SEQ ID NO: 16028 - DNA, 19 bp, Homo Sapiens
gatggccgagtggttaagg

SEQ ID NO: 16029 - DNA, 28 bp, Homo Sapiens
gatggcgtgggttcgaatcccaccgctg

SEQ ID NO: 16030 - DNA, 20 bp, Homo Sapiens
gatggggtgtgataggtggc

SEQ ID NO: 16031 - DNA, 23 bp, Homo Sapiens
gatggggtgtgataggtggcacg

SEQ ID NO: 16032 - DNA, 25 bp, Homo Sapiens
gatggggtgtgataggtggcacgga

SEQ ID NO: 16033 - DNA, 26 bp, Homo Sapiens
gatggggtgtgataggtggcacggag

SEQ ID NO: 16034 - DNA, 27 bp, Homo Sapiens
gatggggtgtgataggtggcacggaga

SEQ ID NO: 16035 - DNA, 28 bp, Homo Sapiens
gatggggtgtgataggtggcacggagaa

SEQ ID NO: 16036 - DNA, 29 bp, Homo Sapiens
gatggggtgtgataggtggcacggagaat

SEQ ID NO: 16037 - DNA, 30 bp, Homo Sapiens
gatggggtgtgataggtggcacggagaatt

SEQ ID NO: 16038 - DNA, 31 bp, Homo Sapiens
gatggggtgtgataggtggcacggagaattt

SEQ ID NO: 16039 - DNA, 32 bp, Homo Sapiens
gatggggtgtgataggtggcacggagaatttt

SEQ ID NO: 16040 - DNA, 33 bp, Homo Sapiens
gatggggtgtgataggtggcacggagaattttg

SEQ ID NO: 16041 - DNA, 16 bp, Homo Sapiens
gatgggttcgattctc

SEQ ID NO: 16042 - DNA, 26 bp, Homo Sapiens
gatgggttcgattctcatagtcctag

SEQ ID NO: 16043 - DNA, 27 bp, Homo Sapiens
gatgggttcgattctcatagtcctagc

SEQ ID NO: 16044 - DNA, 28 bp, Homo Sapiens
gatgggttcgattctcatagtcctagcc

SEQ ID NO: 16045 - DNA, 29 bp, Homo Sapiens
gatgggttcgattctcatagtcctagcca

SEQ ID NO: 16046 - DNA, 23 bp, Homo Sapiens
gatggtttttcatatcattggtc

SEQ ID NO: 16047 - DNA, 24 bp, Homo Sapiens
gatggtttttcatatcattggtcg

SEQ ID NO: 16048 - DNA, 25 bp, Homo Sapiens
gatggtttttcatatcattggtcgt

SEQ ID NO: 16049 - DNA, 26 bp, Homo Sapiens
gatggtttttcatatcattggtcgtg

SEQ ID NO: 16050 - DNA, 27 bp, Homo Sapiens
gatggtttttcatatcattggtcgtgg

SEQ ID NO: 16051 - DNA, 28 bp, Homo Sapiens
gatggtttttcatatcattggtcgtggt

SEQ ID NO: 16052 - DNA, 29 bp, Homo Sapiens
gatggtttttcatatcattggtcgtggtt

SEQ ID NO: 16053 - DNA, 30 bp, Homo Sapiens
gatggtttttcatatcattggtcgtggttg

SEQ ID NO: 16054 - DNA, 31 bp, Homo Sapiens
gatggtttttcatatcattggtcgtggttgt

SEQ ID NO: 16055 - DNA, 32 bp, Homo Sapiens
gatggtttttcatatcattggtcgtggttgta

SEQ ID NO: 16056 - DNA, 33 bp, Homo Sapiens
gatggtttttcatatcattggtcgtggttgtag

SEQ ID NO: 16057 - DNA, 34 bp, Homo Sapiens
gatggtttttcatatcattggtcgtggttgtagt

SEQ ID NO: 16058 - DNA, 35 bp, Homo Sapiens
gatggtttttcatatcattggtcgtggttgtagtc

SEQ ID NO: 16059 - DNA, 36 bp, Homo Sapiens
gatggtttttcatatcattggtcgtggttgtagtcc

SEQ ID NO: 16060 - DNA, 37 bp, Homo Sapiens
gatggtttttcatatcattggtcgtggttgtagtccg

SEQ ID NO: 16061 - DNA, 38 bp, Homo Sapiens
gatggtttttcatatcattggtcgtggttgtagtccgt

SEQ ID NO: 16062 - DNA, 39 bp, Homo Sapiens
gatggtttttcatatcattggtcgtggttgtagtccgtg

SEQ ID NO: 16063 - DNA, 40 bp, Homo Sapiens
gatggtttttcatatcattggtcgtggttgtagtccgtgc

SEQ ID NO: 16064 - DNA, 41 bp, Homo Sapiens
gatggtttttcatatcattggtcgtggttgtagtccgtgcg

SEQ ID NO: 16065 - DNA, 42 bp, Homo Sapiens
gatggtttttcatatcattggtcgtggttgtagtccgtgcga

SEQ ID NO: 16066 - DNA, 43 bp, Homo Sapiens
gatggtttttcatatcattggtcgtggttgtagtccgtgcgag

SEQ ID NO: 16067 - DNA, 44 bp, Homo Sapiens
gatggtttttcatatcattggtcgtggttgtagtccgtgcgaga

SEQ ID NO: 16068 - DNA, 45 bp, Homo Sapiens
gatggtttttcatatcattggtcgtggttgtagtccgtgcgagaa

SEQ ID NO: 16069 - DNA, 46 bp, Homo Sapiens
gatggtttttcatatcattggtcgtggttgtagtccgtgcgagaat

SEQ ID NO: 16070 - DNA, 47 bp, Homo Sapiens
gatggtttttcatatcattggtcgtggttgtagtccgtgcgagaata

SEQ ID NO: 16071 - DNA, 48 bp, Homo Sapiens
gatggtttttcatatcattggtcgtggttgtagtccgtgcgagaatac

SEQ ID NO: 16072 - DNA, 17 bp, Homo Sapiens
gatgtagctcagtggta

SEQ ID NO: 16073 - DNA, 18 bp, Homo Sapiens
gatgtagctcagtggtag

SEQ ID NO: 16074 - DNA, 19 bp, Homo Sapiens
gatgtagctcagtggtaga

SEQ ID NO: 16075 - DNA, 20 bp, Homo Sapiens
gatgtagctcagtggtagag

SEQ ID NO: 16076 - DNA, 32 bp, Homo Sapiens
gatgtagctcagtggtagagcgcatgcttcgc

SEQ ID NO: 16077 - DNA, 32 bp, Homo Sapiens
gatgtagctcagtggtagagcgcatgctttgc

SEQ ID NO: 16078 - DNA, 32 bp, Homo Sapiens
gatgtagctcagtggtagagcgcgcgcttcgc

SEQ ID NO: 16079 - DNA, 16 bp, Homo Sapiens
gattaagagaaccaac

SEQ ID NO: 16080 - DNA, 18 bp, Homo Sapiens
gattaagagaaccaacac

SEQ ID NO: 16081 - DNA, 19 bp, Homo Sapiens
gattaagagaaccaacacc

SEQ ID NO: 16082 - DNA, 20 bp, Homo Sapiens
gattaagagaaccaacacct

SEQ ID NO: 16083 - DNA, 21 bp, Homo Sapiens
gattaagagaaccaacacctc

SEQ ID NO: 16084 - DNA, 22 bp, Homo Sapiens
gattaagagaaccaacacctct

SEQ ID NO: 16085 - DNA, 24 bp, Homo Sapiens
gattaagagaaccaacacctcttt

SEQ ID NO: 16086 - DNA, 25 bp, Homo Sapiens
gattaagagaaccaacacctcttta

SEQ ID NO: 16087 - DNA, 27 bp, Homo Sapiens
gattaagagaaccaacacctctttaca

SEQ ID NO: 16088 - DNA, 30 bp, Homo Sapiens
gattaagagaaccaacacctctttacagtg

SEQ ID NO: 16089 - DNA, 31 bp, Homo Sapiens
gattaagagaaccaacacctctttacagtga

SEQ ID NO: 16090 - DNA, 32 bp, Homo Sapiens
gattaagagaaccaacacctctttacagtgac

SEQ ID NO: 16091 - DNA, 33 bp, Homo Sapiens
gattaagagaaccaacacctctttacagtgacc

SEQ ID NO: 16092 - DNA, 34 bp, Homo Sapiens
gattaagagaaccaacacctctttacagtgacca

SEQ ID NO: 16093 - DNA, 19 bp, Homo Sapiens
gattagctcaaatggtaga

SEQ ID NO: 16094 - DNA, 20 bp, Homo Sapiens
gattagctcaaatggtagag

SEQ ID NO: 16095 - DNA, 16 bp, Homo Sapiens
gattagggtgcttagc

SEQ ID NO: 16096 - DNA, 17 bp, Homo Sapiens
gattagggtgcttagct

SEQ ID NO: 16097 - DNA, 19 bp, Homo Sapiens
gattagggtgcttagctgt

SEQ ID NO: 16098 - DNA, 20 bp, Homo Sapiens
gattagggtgcttagctgtt

SEQ ID NO: 16099 - DNA, 22 bp, Homo Sapiens
gattagggtgcttagctgttaa

SEQ ID NO: 16100 - DNA, 24 bp, Homo Sapiens
gattagggtgcttagctgttaact

SEQ ID NO: 16101 - DNA, 25 bp, Homo Sapiens
gattagggtgcttagctgttaacta

SEQ ID NO: 16102 - DNA, 31 bp, Homo Sapiens
gattagggtgcttagctgttaactaagtgtt

SEQ ID NO: 16103 - DNA, 33 bp, Homo Sapiens
gattagggtgcttagctgttaactaagtgtttg

SEQ ID NO: 16104 - DNA, 34 bp, Homo Sapiens
gattagggtgcttagctgttaactaagtgtttgt

SEQ ID NO: 16105 - DNA, 39 bp, Homo Sapiens
gattagggtgcttagctgttaactaagtgtttgtgggtt

SEQ ID NO: 16106 - DNA, 40 bp, Homo Sapiens
gattagggtgcttagctgttaactaagtgtttgtgggttt

SEQ ID NO: 16107 - DNA, 17 bp, Homo Sapiens
gattccaggttcgactc

SEQ ID NO: 16108 - DNA, 27 bp, Homo Sapiens
gattccaggttcgactcctggctggct

SEQ ID NO: 16109 - DNA, 28 bp, Homo Sapiens
gattccaggttcgactcctggctggctc

SEQ ID NO: 16110 - DNA, 29 bp, Homo Sapiens
gattccaggttcgactcctggctggctcg

SEQ ID NO: 16111 - DNA, 30 bp, Homo Sapiens
gattccaggttcgactcctggctggctcgc

SEQ ID NO: 16112 - DNA, 31 bp, Homo Sapiens
gattccaggttcgactcctggctggctcgcc

SEQ ID NO: 16113 - DNA, 18 bp, Homo Sapiens
gattcccattcttgcgac

SEQ ID NO: 16114 - DNA, 19 bp, Homo Sapiens
gattcccattcttgcgacc

SEQ ID NO: 16115 - DNA, 22 bp, Homo Sapiens
gattcccattcttgcgacccgg

SEQ ID NO: 16116 - DNA, 45 bp, Homo Sapiens
gattcccattcttgcgacccgggttcgattcccgggcggcgcacc

SEQ ID NO: 16117 - DNA, 46 bp, Homo Sapiens
gattcccattcttgcgacccgggttcgattcccgggcggcgcacca

SEQ ID NO: 16118 - DNA, 17 bp, Homo Sapiens
gattccccgacggggag

SEQ ID NO: 16119 - DNA, 18 bp, Homo Sapiens
gattccccgacggggagc

SEQ ID NO: 16120 - DNA, 19 bp, Homo Sapiens
gattccccgacggggagcc

SEQ ID NO: 16121 - DNA, 20 bp, Homo Sapiens
gattccccgacggggagcca

SEQ ID NO: 16122 - DNA, 19 bp, Homo Sapiens
gattcccggccaacgcacc

SEQ ID NO: 16123 - DNA, 20 bp, Homo Sapiens
gattcccggccaacgcacca

SEQ ID NO: 16124 - DNA, 17 bp, Homo Sapiens
gattcccggccaatgca

SEQ ID NO: 16125 - DNA, 18 bp, Homo Sapiens
gattcccggccaatgcac

SEQ ID NO: 16126 - DNA, 19 bp, Homo Sapiens
gattcccggccaatgcacc

SEQ ID NO: 16127 - DNA, 20 bp, Homo Sapiens
gattcccggccaatgcacca

SEQ ID NO: 16128 - DNA, 19 bp, Homo Sapiens
gattcccgggcggcgcacc

SEQ ID NO: 16129 - DNA, 20 bp, Homo Sapiens
gattcccgggcggcgcacca

SEQ ID NO: 16130 - DNA, 18 bp, Homo Sapiens
gattcccggtcagggaac

SEQ ID NO: 16131 - DNA, 19 bp, Homo Sapiens
gattcccggtcagggaacc

SEQ ID NO: 16132 - DNA, 16 bp, Homo Sapiens
gattccggatcagaag

SEQ ID NO: 16133 - DNA, 17 bp, Homo Sapiens
gattccggatcagaaga

SEQ ID NO: 16134 - DNA, 20 bp, Homo Sapiens
gattccggatcagaagattg

SEQ ID NO: 16135 - DNA, 21 bp, Homo Sapiens
gattccggatcagaagattga

SEQ ID NO: 16136 - DNA, 22 bp, Homo Sapiens
gattccggatcagaagattgag

SEQ ID NO: 16137 - DNA, 27 bp, Homo Sapiens
gattccggatcagaagattgagggttc

SEQ ID NO: 16138 - DNA, 46 bp, Homo Sapiens
gattccggatcagaagattgagggttcgagtcccttcgtggtcgcc

SEQ ID NO: 16139 - DNA, 47 bp, Homo Sapiens
gattccggatcagaagattgagggttcgagtcccttcgtggtcgcca

SEQ ID NO: 16140 - DNA, 17 bp, Homo Sapiens
gattccggctcgaagga

SEQ ID NO: 16141 - DNA, 18 bp, Homo Sapiens
gattccggctcgaaggac

SEQ ID NO: 16142 - DNA, 19 bp, Homo Sapiens
gattccggctcgaaggacc

SEQ ID NO: 16143 - DNA, 20 bp, Homo Sapiens
gattccggctcgaaggacca

SEQ ID NO: 16144 - DNA, 33 bp, Homo Sapiens
gattcctggttttcacccaggcggcccgggttc

SEQ ID NO: 16145 - DNA, 19 bp, Homo Sapiens
gattccttccttttttgcc

SEQ ID NO: 16146 - DNA, 20 bp, Homo Sapiens
gattccttccttttttgcca

SEQ ID NO: 16147 - DNA, 16 bp, Homo Sapiens
gattcggcgctctcac

SEQ ID NO: 16148 - DNA, 17 bp, Homo Sapiens
gattcggcgctctcacc

SEQ ID NO: 16149 - DNA, 18 bp, Homo Sapiens
gattcggcgctctcaccg

SEQ ID NO: 16150 - DNA, 19 bp, Homo Sapiens
gattcggcgctctcaccgc

SEQ ID NO: 16151 - DNA, 20 bp, Homo Sapiens
gattcggcgctctcaccgcc

SEQ ID NO: 16152 - DNA, 26 bp, Homo Sapiens
gattcggcgctctcaccgccgcggcc

SEQ ID NO: 16153 - DNA, 27 bp, Homo Sapiens
gattcggcgctctcaccgccgcggccc

SEQ ID NO: 16154 - DNA, 28 bp, Homo Sapiens
gattcggcgctctcaccgccgcggcccg

SEQ ID NO: 16155 - DNA, 29 bp, Homo Sapiens
gattcggcgctctcaccgccgcggcccgg

SEQ ID NO: 16156 - DNA, 30 bp, Homo Sapiens
gattcggcgctctcaccgccgcggcccggg

SEQ ID NO: 16157 - DNA, 31 bp, Homo Sapiens
gattcggcgctctcaccgccgcggcccgggt

SEQ ID NO: 16158 - DNA, 32 bp, Homo Sapiens
gattcggcgctctcaccgccgcggcccgggtt

SEQ ID NO: 16159 - DNA, 33 bp, Homo Sapiens
gattcggcgctctcaccgccgcggcccgggttc

SEQ ID NO: 16160 - DNA, 36 bp, Homo Sapiens
gattcggcgctctcaccgccgcggcccgggttcgat

SEQ ID NO: 16161 - DNA, 37 bp, Homo Sapiens
gattcggcgctctcaccgccgcggcccgggttcgatt

SEQ ID NO: 16162 - DNA, 38 bp, Homo Sapiens
gattcggcgctctcaccgccgcggcccgggttcgattc

SEQ ID NO: 16163 - DNA, 27 bp, Homo Sapiens
gattcggcgctttcaccgccgcggccc

SEQ ID NO: 16164 - DNA, 28 bp, Homo Sapiens
gattcggcgctttcaccgccgcggcccg

SEQ ID NO: 16165 - DNA, 16 bp, Homo Sapiens
gattctaggttcgact

SEQ ID NO: 16166 - DNA, 22 bp, Homo Sapiens
gattctaggttcgactcctggc

SEQ ID NO: 16167 - DNA, 27 bp, Homo Sapiens
gattctaggttcgactcctggctggct

SEQ ID NO: 16168 - DNA, 28 bp, Homo Sapiens
gattctaggttcgactcctggctggctc

SEQ ID NO: 16169 - DNA, 29 bp, Homo Sapiens
gattctaggttcgactcctggctggctcg

SEQ ID NO: 16170 - DNA, 30 bp, Homo Sapiens
gattctaggttcgactcctggctggctcgc

SEQ ID NO: 16171 - DNA, 31 bp, Homo Sapiens
gattctaggttcgactcctggctggctcgcc

SEQ ID NO: 16172 - DNA, 32 bp, Homo Sapiens
gattctaggttcgactcctggctggctcgcca

SEQ ID NO: 16173 - DNA, 33 bp, Homo Sapiens
gattctcagggatgggttcgattctcatagtcc

SEQ ID NO: 16174 - DNA, 36 bp, Homo Sapiens
gattctcagggatgggttcgattctcatagtcctag

SEQ ID NO: 16175 - DNA, 37 bp, Homo Sapiens
gattctcagggatgggttcgattctcatagtcctagc

SEQ ID NO: 16176 - DNA, 38 bp, Homo Sapiens
gattctcagggatgggttcgattctcatagtcctagcc

SEQ ID NO: 16177 - DNA, 39 bp, Homo Sapiens
gattctcagggatgggttcgattctcatagtcctagcca

SEQ ID NO: 16178 - DNA, 17 bp, Homo Sapiens
gattctcatagtcctag

SEQ ID NO: 16179 - DNA, 18 bp, Homo Sapiens
gattctcatagtcctagc

SEQ ID NO: 16180 - DNA, 19 bp, Homo Sapiens
gattctcatagtcctagcc

SEQ ID NO: 16181 - DNA, 20 bp, Homo Sapiens
gattctcatagtcctagcca

SEQ ID NO: 16182 - DNA, 20 bp, Homo Sapiens
gattctcggtttgggtccga

SEQ ID NO: 16183 - DNA, 33 bp, Homo Sapiens
gattgaagccagttgattagggtgcttagctgt

SEQ ID NO: 16184 - DNA, 34 bp, Homo Sapiens
gattgaagccagttgattagggtgcttagctgtt

SEQ ID NO: 16185 - DNA, 31 bp, Homo Sapiens
gattgagggttcgaatcccttcgtggttacc

SEQ ID NO: 16186 - DNA, 29 bp, Homo Sapiens
gattgagggttcgaatcccttcgtggttg

SEQ ID NO: 16187 - DNA, 31 bp, Homo Sapiens
gattgagggttcgaatcccttcgtggttgcc

SEQ ID NO: 16188 - DNA, 17 bp, Homo Sapiens
gattgagggttcgagtc

SEQ ID NO: 16189 - DNA, 20 bp, Homo Sapiens
gattgagggttcgagtccct

SEQ ID NO: 16190 - DNA, 29 bp, Homo Sapiens
gattgagggttcgagtcccttcgtggtcg

SEQ ID NO: 16191 - DNA, 30 bp, Homo Sapiens
gattgagggttcgagtcccttcgtggtcgc

SEQ ID NO: 16192 - DNA, 31 bp, Homo Sapiens
gattgagggttcgagtcccttcgtggtcgcc

SEQ ID NO: 16193 - DNA, 32 bp, Homo Sapiens
gattgagggttcgagtcccttcgtggtcgcca

SEQ ID NO: 16194 - DNA, 20 bp, Homo Sapiens
gattgcaggttcgagtcctg

SEQ ID NO: 16195 - DNA, 30 bp, Homo Sapiens
gattgcaggttcgagtcctgccgcggtcgc

SEQ ID NO: 16196 - DNA, 31 bp, Homo Sapiens
gattgcaggttcgagtcctgccgcggtcgcc

SEQ ID NO: 16197 - DNA, 32 bp, Homo Sapiens
gattgcaggttcgagtcctgccgcggtcgcca

SEQ ID NO: 16198 - DNA, 16 bp, Homo Sapiens
gattgtgaatctgaca

SEQ ID NO: 16199 - DNA, 17 bp, Homo Sapiens
gattgtgaatctgacaa

SEQ ID NO: 16200 - DNA, 18 bp, Homo Sapiens
gattgtgaatctgacaac

SEQ ID NO: 16201 - DNA, 19 bp, Homo Sapiens
gattgtgaatctgacaaca

SEQ ID NO: 16202 - DNA, 20 bp, Homo Sapiens
gattgtgaatctgacaacag

SEQ ID NO: 16203 - DNA, 21 bp, Homo Sapiens
gattgtgaatctgacaacaga

SEQ ID NO: 16204 - DNA, 22 bp, Homo Sapiens
gattgtgaatctgacaacagag

SEQ ID NO: 16205 - DNA, 23 bp, Homo Sapiens
gattgtgaatctgacaacagagg

SEQ ID NO: 16206 - DNA, 24 bp, Homo Sapiens
gattgtgaatctgacaacagaggc

SEQ ID NO: 16207 - DNA, 25 bp, Homo Sapiens
gattgtgaatctgacaacagaggct

SEQ ID NO: 16208 - DNA, 26 bp, Homo Sapiens
gattgtgaatctgacaacagaggctt

SEQ ID NO: 16209 - DNA, 27 bp, Homo Sapiens
gattgtgaatctgacaacagaggctta

SEQ ID NO: 16210 - DNA, 28 bp, Homo Sapiens
gattgtgaatctgacaacagaggcttac

SEQ ID NO: 16211 - DNA, 29 bp, Homo Sapiens
gattgtgaatctgacaacagaggcttacg

SEQ ID NO: 16212 - DNA, 30 bp, Homo Sapiens
gattgtgaatctgacaacagaggcttacga

SEQ ID NO: 16213 - DNA, 31 bp, Homo Sapiens
gattgtgaatctgacaacagaggcttacgac

SEQ ID NO: 16214 - DNA, 32 bp, Homo Sapiens
gattgtgaatctgacaacagaggcttacgacc

SEQ ID NO: 16215 - DNA, 33 bp, Homo Sapiens
gattgtgaatctgacaacagaggcttacgaccc

SEQ ID NO: 16216 - DNA, 34 bp, Homo Sapiens
gattgtgaatctgacaacagaggcttacgacccc

SEQ ID NO: 16217 - DNA, 35 bp, Homo Sapiens
gattgtgaatctgacaacagaggcttacgacccct

SEQ ID NO: 16218 - DNA, 36 bp, Homo Sapiens
gattgtgaatctgacaacagaggcttacgacccctt

SEQ ID NO: 16219 - DNA, 37 bp, Homo Sapiens
gattgtgaatctgacaacagaggcttacgacccctta

SEQ ID NO: 16220 - DNA, 38 bp, Homo Sapiens
gattgtgaatctgacaacagaggcttacgaccccttat

SEQ ID NO: 16221 - DNA, 39 bp, Homo Sapiens
gattgtgaatctgacaacagaggcttacgaccccttatt

SEQ ID NO: 16222 - DNA, 40 bp, Homo Sapiens
gattgtgaatctgacaacagaggcttacgaccccttattt

SEQ ID NO: 16223 - DNA, 41 bp, Homo Sapiens
gattgtgaatctgacaacagaggcttacgaccccttattta

SEQ ID NO: 16224 - DNA, 42 bp, Homo Sapiens
gattgtgaatctgacaacagaggcttacgaccccttatttac

SEQ ID NO: 16225 - DNA, 43 bp, Homo Sapiens
gattgtgaatctgacaacagaggcttacgaccccttatttacc

SEQ ID NO: 16226 - DNA, 44 bp, Homo Sapiens
gattgtgaatctgacaacagaggcttacgaccccttatttaccc

SEQ ID NO: 16227 - DNA, 45 bp, Homo Sapiens
gattgtgaatctgacaacagaggcttacgaccccttatttacccc

SEQ ID NO: 16228 - DNA, 46 bp, Homo Sapiens
gattgtgaatctgacaacagaggcttacgaccccttatttacccca

SEQ ID NO: 16229 - DNA, 29 bp, Homo Sapiens
gattgtgggttcgagtcccacctggggtg

SEQ ID NO: 16230 - DNA, 24 bp, Homo Sapiens
gattgtgggttcgagtcccatctg

SEQ ID NO: 16231 - DNA, 29 bp, Homo Sapiens
gattgtgggttcgagtcccatctggggtg

SEQ ID NO: 16232 - DNA, 30 bp, Homo Sapiens
gattgtgggttcgagtcccatctggggtgc

SEQ ID NO: 16233 - DNA, 31 bp, Homo Sapiens
gattgtgggttcgagtcccatctggggtgcc

SEQ ID NO: 16234 - DNA, 32 bp, Homo Sapiens
gattgtgggttcgagtcccatctggggtgcca

SEQ ID NO: 16235 - DNA, 28 bp, Homo Sapiens
gattgtgggttcgagtcccatctgggtc

SEQ ID NO: 16236 - DNA, 29 bp, Homo Sapiens
gattgtgggttcgagtcccatctgggtcg

SEQ ID NO: 16237 - DNA, 30 bp, Homo Sapiens
gattgtgggttcgagtcccatctgggtcgc

SEQ ID NO: 16238 - DNA, 31 bp, Homo Sapiens
gattgtgggttcgagtcccatctgggtcgcc

SEQ ID NO: 16239 - DNA, 32 bp, Homo Sapiens
gattgtgggttcgagtcccatctgggtcgcca

SEQ ID NO: 16240 - DNA, 19 bp, Homo Sapiens
gatttaggctccagtcatt

SEQ ID NO: 16241 - DNA, 17 bp, Homo Sapiens
gatttcaacttaacttg

SEQ ID NO: 16242 - DNA, 19 bp, Homo Sapiens
gatttcaacttaacttgac

SEQ ID NO: 16243 - DNA, 20 bp, Homo Sapiens
gatttcaacttaacttgacc

SEQ ID NO: 16244 - DNA, 21 bp, Homo Sapiens
gatttcaacttaacttgaccg

SEQ ID NO: 16245 - DNA, 22 bp, Homo Sapiens
gatttcaacttaacttgaccgc

SEQ ID NO: 16246 - DNA, 23 bp, Homo Sapiens
gatttcaacttaacttgaccgct

SEQ ID NO: 16247 - DNA, 24 bp, Homo Sapiens
gatttcaacttaacttgaccgctc

SEQ ID NO: 16248 - DNA, 25 bp, Homo Sapiens
gatttcaacttaacttgaccgctct

SEQ ID NO: 16249 - DNA, 26 bp, Homo Sapiens
gatttcaacttaacttgaccgctctg

SEQ ID NO: 16250 - DNA, 27 bp, Homo Sapiens
gatttcaacttaacttgaccgctctga

SEQ ID NO: 16251 - DNA, 28 bp, Homo Sapiens
gatttcaacttaacttgaccgctctgac

SEQ ID NO: 16252 - DNA, 29 bp, Homo Sapiens
gatttcaacttaacttgaccgctctgacc

SEQ ID NO: 16253 - DNA, 30 bp, Homo Sapiens
gatttcaacttaacttgaccgctctgacca

SEQ ID NO: 16254 - DNA, 16 bp, Homo Sapiens
gatttcgactcattaa

SEQ ID NO: 16255 - DNA, 17 bp, Homo Sapiens
gatttcgactcattaaa

SEQ ID NO: 16256 - DNA, 18 bp, Homo Sapiens
gatttcgactcattaaat

SEQ ID NO: 16257 - DNA, 19 bp, Homo Sapiens
gatttcgactcattaaatt

SEQ ID NO: 16258 - DNA, 20 bp, Homo Sapiens
gatttcgactcattaaatta

SEQ ID NO: 16259 - DNA, 21 bp, Homo Sapiens
gatttcgactcattaaattat

SEQ ID NO: 16260 - DNA, 22 bp, Homo Sapiens
gatttcgactcattaaattatg

SEQ ID NO: 16261 - DNA, 23 bp, Homo Sapiens
gatttcgactcattaaattatga

SEQ ID NO: 16262 - DNA, 24 bp, Homo Sapiens
gatttcgactcattaaattatgat

SEQ ID NO: 16263 - DNA, 25 bp, Homo Sapiens
gatttcgactcattaaattatgata

SEQ ID NO: 16264 - DNA, 26 bp, Homo Sapiens
gatttcgactcattaaattatgataa

SEQ ID NO: 16265 - DNA, 27 bp, Homo Sapiens
gatttcgactcattaaattatgataat

SEQ ID NO: 16266 - DNA, 28 bp, Homo Sapiens
gatttcgactcattaaattatgataatc

SEQ ID NO: 16267 - DNA, 29 bp, Homo Sapiens
gatttcgactcattaaattatgataatca

SEQ ID NO: 16268 - DNA, 35 bp, Homo Sapiens
gatttcgactcattaaattatgataatcatattta

SEQ ID NO: 16269 - DNA, 36 bp, Homo Sapiens
gatttcgactcattaaattatgataatcatatttac

SEQ ID NO: 16270 - DNA, 37 bp, Homo Sapiens
gatttcgactcattaaattatgataatcatatttacc

SEQ ID NO: 16271 - DNA, 38 bp, Homo Sapiens
gatttcgactcattaaattatgataatcatatttacca

SEQ ID NO: 16272 - DNA, 39 bp, Homo Sapiens
gatttcgactcattaaattatgataatcatatttaccaa

SEQ ID NO: 16273 - DNA, 40 bp, Homo Sapiens
gatttcgactcattaaattatgataatcatatttaccaac

SEQ ID NO: 16274 - DNA, 41 bp, Homo Sapiens
gatttcgactcattaaattatgataatcatatttaccaacc

SEQ ID NO: 16275 - DNA, 42 bp, Homo Sapiens
gatttcgactcattaaattatgataatcatatttaccaacca

SEQ ID NO: 16276 - DNA, 16 bp, Homo Sapiens
gatttgcgttcagttg

SEQ ID NO: 16277 - DNA, 18 bp, Homo Sapiens
gatttgcgttcagttgat

SEQ ID NO: 16278 - DNA, 19 bp, Homo Sapiens
gatttgcgttcagttgatg

SEQ ID NO: 16279 - DNA, 20 bp, Homo Sapiens
gatttgcgttcagttgatgc

SEQ ID NO: 16280 - DNA, 28 bp, Homo Sapiens
gatttgcgttcagttgatgcagagtggg

SEQ ID NO: 16281 - DNA, 18 bp, Homo Sapiens
gattttcatattgaattg

SEQ ID NO: 16282 - DNA, 19 bp, Homo Sapiens
gattttcatattgaattgc

SEQ ID NO: 16283 - DNA, 20 bp, Homo Sapiens
gattttcatattgaattgca

SEQ ID NO: 16284 - DNA, 23 bp, Homo Sapiens
gattttcatattgaattgcaaat

SEQ ID NO: 16285 - DNA, 25 bp, Homo Sapiens
gattttcatattgaattgcaaattc

SEQ ID NO: 16286 - DNA, 29 bp, Homo Sapiens
gattttcatattgaattgcaaattcgaag

SEQ ID NO: 16287 - DNA, 18 bp, Homo Sapiens
gcaaattcgaagaagcag

SEQ ID NO: 16288 - DNA, 29 bp, Homo Sapiens
gcaaattcgaagaagcagcttcaaacctg

SEQ ID NO: 16289 - DNA, 36 bp, Homo Sapiens
gcaaattcgaagaagcagcttcaaacctgccggggc

SEQ ID NO: 16290 - DNA, 37 bp, Homo Sapiens
gcaaattcgaagaagcagcttcaaacctgccggggct

SEQ ID NO: 16291 - DNA, 38 bp, Homo Sapiens
gcaaattcgaagaagcagcttcaaacctgccggggctt

SEQ ID NO: 16292 - DNA, 39 bp, Homo Sapiens
gcaaattcgaagaagcagcttcaaacctgccggggcttc

SEQ ID NO: 16293 - DNA, 40 bp, Homo Sapiens
gcaaattcgaagaagcagcttcaaacctgccggggcttcc

SEQ ID NO: 16294 - DNA, 41 bp, Homo Sapiens
gcaaattcgaagaagcagcttcaaacctgccggggcttcca

SEQ ID NO: 16295 - DNA, 20 bp, Homo Sapiens
gcaacctcggttcgaatccg

SEQ ID NO: 16296 - DNA, 29 bp, Homo Sapiens
gcaacctcggttcgaatccgagtcacggc

SEQ ID NO: 16297 - DNA, 31 bp, Homo Sapiens
gcaacctcggttcgaatccgagtcacggcac

SEQ ID NO: 16298 - DNA, 32 bp, Homo Sapiens
gcaacctcggttcgaatccgagtcacggcacc

SEQ ID NO: 16299 - DNA, 23 bp, Homo Sapiens
gcaacggtagcgcgtctgactcc

SEQ ID NO: 16300 - DNA, 19 bp, Homo Sapiens
gcaactccaaataaaagta

SEQ ID NO: 16301 - DNA, 20 bp, Homo Sapiens
gcaactccaaataaaagtac

SEQ ID NO: 16302 - DNA, 21 bp, Homo Sapiens
gcaactccaaataaaagtacc

SEQ ID NO: 16303 - DNA, 22 bp, Homo Sapiens
gcaactccaaataaaagtacca

SEQ ID NO: 16304 - DNA, 27 bp, Homo Sapiens
gcaagattcccattcttgcgacccggg

SEQ ID NO: 16305 - DNA, 28 bp, Homo Sapiens
gcaagattcccattcttgcgacccgggt

SEQ ID NO: 16306 - DNA, 29 bp, Homo Sapiens
gcaagattcccattcttgcgacccgggtt

SEQ ID NO: 16307 - DNA, 30 bp, Homo Sapiens
gcaagattcccattcttgcgacccgggttc

SEQ ID NO: 16308 - DNA, 24 bp, Homo Sapiens
gcaatacactgaaaatgtttagac

SEQ ID NO: 16309 - DNA, 28 bp, Homo Sapiens
gcaatacactgaaaatgtttagacgggc

SEQ ID NO: 16310 - DNA, 29 bp, Homo Sapiens
gcaatacactgaaaatgtttagacgggct

SEQ ID NO: 16311 - DNA, 30 bp, Homo Sapiens
gcaatacactgaaaatgtttagacgggctc

SEQ ID NO: 16312 - DNA, 31 bp, Homo Sapiens
gcaatacactgaaaatgtttagacgggctca

SEQ ID NO: 16313 - DNA, 32 bp, Homo Sapiens
gcaatacactgaaaatgtttagacgggctcac

SEQ ID NO: 16314 - DNA, 33 bp, Homo Sapiens
gcaatacactgaaaatgtttagacgggctcaca

SEQ ID NO: 16315 - DNA, 34 bp, Homo Sapiens
gcaatacactgaaaatgtttagacgggctcacat

SEQ ID NO: 16316 - DNA, 35 bp, Homo Sapiens
gcaatacactgaaaatgtttagacgggctcacatc

SEQ ID NO: 16317 - DNA, 41 bp, Homo Sapiens
gcaatacactgaaaatgtttagacgggctcacatcacccca

SEQ ID NO: 16318 - DNA, 47 bp, Homo Sapiens
gcaatacactgaaaatgtttagacgggctcacatcaccccataaaca

SEQ ID NO: 16319 - DNA, 17 bp, Homo Sapiens
gcaatacttaatttctg

SEQ ID NO: 16320 - DNA, 18 bp, Homo Sapiens
gcaatacttaatttctgc

SEQ ID NO: 16321 - DNA, 19 bp, Homo Sapiens
gcaatacttaatttctgcc

SEQ ID NO: 16322 - DNA, 20 bp, Homo Sapiens
gcaatacttaatttctgcca

SEQ ID NO: 16323 - DNA, 31 bp, Homo Sapiens
gcaatccgagttcgaatctcggtgggacctc

SEQ ID NO: 16324 - DNA, 22 bp, Homo Sapiens
gcaatcggttagcgcgcggtac

SEQ ID NO: 16325 - DNA, 25 bp, Homo Sapiens
gcaatcggttagcgcgcggtactta

SEQ ID NO: 16326 - DNA, 29 bp, Homo Sapiens
gcaatcggttagcgcgttcggctgttaac

SEQ ID NO: 16327 - DNA, 19 bp, Homo Sapiens
gcaatggacgagcgcgctg

SEQ ID NO: 16328 - DNA, 21 bp, Homo Sapiens
gcaatggacgagcgcgctgga

SEQ ID NO: 16329 - DNA, 22 bp, Homo Sapiens
gcaatggacgagcgcgctggac

SEQ ID NO: 16330 - DNA, 20 bp, Homo Sapiens
gcaatggataacgcgtctga

SEQ ID NO: 16331 - DNA, 22 bp, Homo Sapiens
gcaatggataacgcgtctgact

SEQ ID NO: 16332 - DNA, 18 bp, Homo Sapiens
gcaatggatagcgcattg

SEQ ID NO: 16333 - DNA, 19 bp, Homo Sapiens
gcaatggatagcgcattgg

SEQ ID NO: 16334 - DNA, 20 bp, Homo Sapiens
gcaatggatagcgcattgga

SEQ ID NO: 16335 - DNA, 30 bp, Homo Sapiens
gcaatggatagcgcattggacttctaattc

SEQ ID NO: 16336 - DNA, 18 bp, Homo Sapiens
gcaatggtggttcagtgg

SEQ ID NO: 16337 - DNA, 27 bp, Homo Sapiens
gcaatggtggttcagtggtagaattct

SEQ ID NO: 16338 - DNA, 28 bp, Homo Sapiens
gcaatggtggttcagtggtagaattctc

SEQ ID NO: 16339 - DNA, 30 bp, Homo Sapiens
gcaatggtggttcagtggtagaattctcgc

SEQ ID NO: 16340 - DNA, 31 bp, Homo Sapiens
gcaatggtggttcagtggtagaattctcgcc

SEQ ID NO: 16341 - DNA, 32 bp, Homo Sapiens
gcaatggtggttcagtggtagaattctcgcct

SEQ ID NO: 16342 - DNA, 16 bp, Homo Sapiens
gcacccaacttacact

SEQ ID NO: 16343 - DNA, 27 bp, Homo Sapiens
gcacccaacttacacttaggagatttc

SEQ ID NO: 16344 - DNA, 35 bp, Homo Sapiens
gcacccaacttacacttaggagatttcaacttaac

SEQ ID NO: 16345 - DNA, 36 bp, Homo Sapiens
gcacccaacttacacttaggagatttcaacttaact

SEQ ID NO: 16346 - DNA, 37 bp, Homo Sapiens
gcacccaacttacacttaggagatttcaacttaactt

SEQ ID NO: 16347 - DNA, 40 bp, Homo Sapiens
gcacccaacttacacttaggagatttcaacttaacttgac

SEQ ID NO: 16348 - DNA, 41 bp, Homo Sapiens
gcacccaacttacacttaggagatttcaacttaacttgacc

SEQ ID NO: 16349 - DNA, 45 bp, Homo Sapiens
gcacccaacttacacttaggagatttcaacttaacttgaccgctc

SEQ ID NO: 16350 - DNA, 46 bp, Homo Sapiens
gcacccaacttacacttaggagatttcaacttaacttgaccgctct

SEQ ID NO: 16351 - DNA, 47 bp, Homo Sapiens
gcacccaacttacacttaggagatttcaacttaacttgaccgctctg

SEQ ID NO: 16352 - DNA, 48 bp, Homo Sapiens
gcacccaacttacacttaggagatttcaacttaacttgaccgctctga

SEQ ID NO: 16353 - DNA, 31 bp, Homo Sapiens
gcacgaggccccgggttcaatccccggcacc

SEQ ID NO: 16354 - DNA, 32 bp, Homo Sapiens
gcacgaggccccgggttcaatccccggcacct

SEQ ID NO: 16355 - DNA, 33 bp, Homo Sapiens
gcacgaggccccgggttcaatccccggcacctc

SEQ ID NO: 16356 - DNA, 36 bp, Homo Sapiens
gcacgaggccccgggttcaatccccggcacctccac

SEQ ID NO: 16357 - DNA, 37 bp, Homo Sapiens
gcacgaggccccgggttcaatccccggcacctccacc

SEQ ID NO: 16358 - DNA, 38 bp, Homo Sapiens
gcacgaggccccgggttcaatccccggcacctccacca

SEQ ID NO: 16359 - DNA, 16 bp, Homo Sapiens
gcacgaggtcctgggt

SEQ ID NO: 16360 - DNA, 32 bp, Homo Sapiens
gcacgcgtgggttcgaatcccatcctcgtcgc

SEQ ID NO: 16361 - DNA, 33 bp, Homo Sapiens
gcacgcgtgggttcgaatcccatcctcgtcgcc

SEQ ID NO: 16362 - DNA, 34 bp, Homo Sapiens
gcacgcgtgggttcgaatcccatcctcgtcgcca

SEQ ID NO: 16363 - DNA, 16 bp, Homo Sapiens
gcactctggactctga

SEQ ID NO: 16364 - DNA, 17 bp, Homo Sapiens
gcactctggactctgaa

SEQ ID NO: 16365 - DNA, 18 bp, Homo Sapiens
gcactctggactctgaat

SEQ ID NO: 16366 - DNA, 19 bp, Homo Sapiens
gcactctggactctgaatc

SEQ ID NO: 16367 - DNA, 20 bp, Homo Sapiens
gcactctggactctgaatcc

SEQ ID NO: 16368 - DNA, 21 bp, Homo Sapiens
gcactctggactctgaatcca

SEQ ID NO: 16369 - DNA, 22 bp, Homo Sapiens
gcactctggactctgaatccag

SEQ ID NO: 16370 - DNA, 23 bp, Homo Sapiens
gcactctggactctgaatccagc

SEQ ID NO: 16371 - DNA, 24 bp, Homo Sapiens
gcactctggactctgaatccagcg

SEQ ID NO: 16372 - DNA, 25 bp, Homo Sapiens
gcactctggactctgaatccagcga

SEQ ID NO: 16373 - DNA, 28 bp, Homo Sapiens
gcactctggactctgaatccagcgatcc

SEQ ID NO: 16374 - DNA, 29 bp, Homo Sapiens
gcactctggactctgaatccagcgatccg

SEQ ID NO: 16375 - DNA, 30 bp, Homo Sapiens
gcactctggactctgaatccagcgatccga

SEQ ID NO: 16376 - DNA, 31 bp, Homo Sapiens
gcactctggactctgaatccagcgatccgag

SEQ ID NO: 16377 - DNA, 32 bp, Homo Sapiens
gcactctggactctgaatccagcgatccgagt

SEQ ID NO: 16378 - DNA, 33 bp, Homo Sapiens
gcactctggactctgaatccagcgatccgagtt

SEQ ID NO: 16379 - DNA, 34 bp, Homo Sapiens
gcactctggactctgaatccagcgatccgagttc

SEQ ID NO: 16380 - DNA, 35 bp, Homo Sapiens
gcactctggactctgaatccagcgatccgagttca

SEQ ID NO: 16381 - DNA, 36 bp, Homo Sapiens
gcactctggactctgaatccagcgatccgagttcaa

SEQ ID NO: 16382 - DNA, 37 bp, Homo Sapiens
gcactctggactctgaatccagcgatccgagttcaaa

SEQ ID NO: 16383 - DNA, 44 bp, Homo Sapiens
gcactctggactctgaatccagcgatccgagttcaaatctcggt

SEQ ID NO: 16384 - DNA, 45 bp, Homo Sapiens
gcactctggactctgaatccagcgatccgagttcaaatctcggtg

SEQ ID NO: 16385 - DNA, 35 bp, Homo Sapiens
gcactctggactctgaatccagcgatccgagttcg

SEQ ID NO: 16386 - DNA, 16 bp, Homo Sapiens
gcactctggactttga

SEQ ID NO: 16387 - DNA, 17 bp, Homo Sapiens
gcactctggactttgaa

SEQ ID NO: 16388 - DNA, 18 bp, Homo Sapiens
gcactctggactttgaat

SEQ ID NO: 16389 - DNA, 19 bp, Homo Sapiens
gcactctggactttgaatc

SEQ ID NO: 16390 - DNA, 20 bp, Homo Sapiens
gcactctggactttgaatcc

SEQ ID NO: 16391 - DNA, 21 bp, Homo Sapiens
gcactctggactttgaatcca

SEQ ID NO: 16392 - DNA, 23 bp, Homo Sapiens
gcactctggactttgaatccagc

SEQ ID NO: 16393 - DNA, 29 bp, Homo Sapiens
gcactctggactttgaatccagcgatccg

SEQ ID NO: 16394 - DNA, 30 bp, Homo Sapiens
gcactctggactttgaatccagcgatccga

SEQ ID NO: 16395 - DNA, 31 bp, Homo Sapiens
gcactctggactttgaatccagcgatccgag

SEQ ID NO: 16396 - DNA, 35 bp, Homo Sapiens
gcactctggactttgaatccagcgatccgagttca

SEQ ID NO: 16397 - DNA, 18 bp, Homo Sapiens
gcactggtcttgtaaacc

SEQ ID NO: 16398 - DNA, 18 bp, Homo Sapiens
gcactggtggttcagtgg

SEQ ID NO: 16399 - DNA, 27 bp, Homo Sapiens
gcactggtggttcagtggtagaattct

SEQ ID NO: 16400 - DNA, 28 bp, Homo Sapiens
gcactggtggttcagtggtagaattctc

SEQ ID NO: 16401 - DNA, 30 bp, Homo Sapiens
gcactggtggttcagtggtagaattctcgc

SEQ ID NO: 16402 - DNA, 31 bp, Homo Sapiens
gcactggtggttcagtggtagaattctcgcc

SEQ ID NO: 16403 - DNA, 32 bp, Homo Sapiens
gcactggtggttcagtggtagaattctcgcct

SEQ ID NO: 16404 - DNA, 33 bp, Homo Sapiens
gcactggtggttcagtggtagaattctcgcctc

SEQ ID NO: 16405 - DNA, 35 bp, Homo Sapiens
gcactggtggttcagtggtagaattctcgcctccc

SEQ ID NO: 16406 - DNA, 36 bp, Homo Sapiens
gcactggtggttcagtggtagaattctcgcctccca

SEQ ID NO: 16407 - DNA, 29 bp, Homo Sapiens
gcactgtaaagctaacttagcattaacct

SEQ ID NO: 16408 - DNA, 17 bp, Homo Sapiens
gcagaaggtcctgggtt

SEQ ID NO: 16409 - DNA, 18 bp, Homo Sapiens
gcagaaggtcctgggttc

SEQ ID NO: 16410 - DNA, 37 bp, Homo Sapiens
gcagaaggtcctgggttcaagccccagtggaaccacc

SEQ ID NO: 16411 - DNA, 27 bp, Homo Sapiens
gcagaaggtcctgggttcgagccccag

SEQ ID NO: 16412 - DNA, 28 bp, Homo Sapiens
gcagaaggtcctgggttcgagccccagt

SEQ ID NO: 16413 - DNA, 32 bp, Homo Sapiens
gcagaaggtcctgggttcgagccccagtggaa

SEQ ID NO: 16414 - DNA, 33 bp, Homo Sapiens
gcagaaggtcctgggttcgagccccagtggaac

SEQ ID NO: 16415 - DNA, 34 bp, Homo Sapiens
gcagaaggtcctgggttcgagccccagtggaacc

SEQ ID NO: 16416 - DNA, 35 bp, Homo Sapiens
gcagaaggtcctgggttcgagccccagtggaacca

SEQ ID NO: 16417 - DNA, 36 bp, Homo Sapiens
gcagaaggtcctgggttcgagccccagtggaaccac

SEQ ID NO: 16418 - DNA, 37 bp, Homo Sapiens
gcagaaggtcctgggttcgagccccagtggaaccacc

SEQ ID NO: 16419 - DNA, 38 bp, Homo Sapiens
gcagaaggtcctgggttcgagccccagtggaaccacca

SEQ ID NO: 16420 - DNA, 16 bp, Homo Sapiens
gcagagcccggtaatc

SEQ ID NO: 16421 - DNA, 17 bp, Homo Sapiens
gcagagcccggtaatcg

SEQ ID NO: 16422 - DNA, 18 bp, Homo Sapiens
gcagagcccggtaatcgc

SEQ ID NO: 16423 - DNA, 20 bp, Homo Sapiens
gcagagcccggtaatcgcat

SEQ ID NO: 16424 - DNA, 21 bp, Homo Sapiens
gcagagcccggtaatcgcata

SEQ ID NO: 16425 - DNA, 22 bp, Homo Sapiens
gcagagcccggtaatcgcataa

SEQ ID NO: 16426 - DNA, 23 bp, Homo Sapiens
gcagagcccggtaatcgcataaa

SEQ ID NO: 16427 - DNA, 24 bp, Homo Sapiens
gcagagcccggtaatcgcataaaa

SEQ ID NO: 16428 - DNA, 25 bp, Homo Sapiens
gcagagcccggtaatcgcataaaac

SEQ ID NO: 16429 - DNA, 26 bp, Homo Sapiens
gcagagcccggtaatcgcataaaact

SEQ ID NO: 16430 - DNA, 28 bp, Homo Sapiens
gcagagcccggtaatcgcataaaactta

SEQ ID NO: 16431 - DNA, 29 bp, Homo Sapiens
gcagagcccggtaatcgcataaaacttaa

SEQ ID NO: 16432 - DNA, 30 bp, Homo Sapiens
gcagagcccggtaatcgcataaaacttaaa

SEQ ID NO: 16433 - DNA, 31 bp, Homo Sapiens
gcagagcccggtaatcgcataaaacttaaaa

SEQ ID NO: 16434 - DNA, 32 bp, Homo Sapiens
gcagagcccggtaatcgcataaaacttaaaac

SEQ ID NO: 16435 - DNA, 33 bp, Homo Sapiens
gcagagcccggtaatcgcataaaacttaaaact

SEQ ID NO: 16436 - DNA, 34 bp, Homo Sapiens
gcagagcccggtaatcgcataaaacttaaaactt

SEQ ID NO: 16437 - DNA, 35 bp, Homo Sapiens
gcagagcccggtaatcgcataaaacttaaaacttt

SEQ ID NO: 16438 - DNA, 27 bp, Homo Sapiens
gcagagtggcgcagcggaagcgtgctg

SEQ ID NO: 16439 - DNA, 29 bp, Homo Sapiens
gcagagtggcgcagcggaagcgtgctggg

SEQ ID NO: 16440 - DNA, 30 bp, Homo Sapiens
gcagagtggcgcagcggaagcgtgctgggc

SEQ ID NO: 16441 - DNA, 31 bp, Homo Sapiens
gcagagtggcgcagcggaagcgtgctgggcc

SEQ ID NO: 16442 - DNA, 32 bp, Homo Sapiens
gcagagtggcgcagcggaagcgtgctgggccc

SEQ ID NO: 16443 - DNA, 34 bp, Homo Sapiens
gcagagtggcgcagcggaagcgtgctgggcccat

SEQ ID NO: 16444 - DNA, 48 bp, Homo Sapiens
gcagagtggcgcagcggaagcgtgctgggcccataacccagaggtcga

SEQ ID NO: 16445 - DNA, 16 bp, Homo Sapiens
gcagagtggggttttg

SEQ ID NO: 16446 - DNA, 17 bp, Homo Sapiens
gcagagtggggttttgc

SEQ ID NO: 16447 - DNA, 18 bp, Homo Sapiens
gcagagtggggttttgca

SEQ ID NO: 16448 - DNA, 21 bp, Homo Sapiens
gcagagtggggttttgcagtc

SEQ ID NO: 16449 - DNA, 22 bp, Homo Sapiens
gcagagtggggttttgcagtcc

SEQ ID NO: 16450 - DNA, 23 bp, Homo Sapiens
gcagagtggggttttgcagtcct

SEQ ID NO: 16451 - DNA, 24 bp, Homo Sapiens
gcagagtggggttttgcagtcctt

SEQ ID NO: 16452 - DNA, 25 bp, Homo Sapiens
gcagagtggggttttgcagtcctta

SEQ ID NO: 16453 - DNA, 26 bp, Homo Sapiens
gcagagtggggttttgcagtccttac

SEQ ID NO: 16454 - DNA, 27 bp, Homo Sapiens
gcagagtggggttttgcagtccttacc

SEQ ID NO: 16455 - DNA, 28 bp, Homo Sapiens
gcagagtggggttttgcagtccttacca

SEQ ID NO: 16456 - DNA, 16 bp, Homo Sapiens
gcagcaacctcggttc

SEQ ID NO: 16457 - DNA, 17 bp, Homo Sapiens
gcagcaacctcggttcg

SEQ ID NO: 16458 - DNA, 26 bp, Homo Sapiens
gcagcaacctcggttcgaatccgagt

SEQ ID NO: 16459 - DNA, 30 bp, Homo Sapiens
gcagcaacctcggttcgaatccgagtcacg

SEQ ID NO: 16460 - DNA, 31 bp, Homo Sapiens
gcagcaacctcggttcgaatccgagtcacgg

SEQ ID NO: 16461 - DNA, 32 bp, Homo Sapiens
gcagcaacctcggttcgaatccgagtcacggc

SEQ ID NO: 16462 - DNA, 33 bp, Homo Sapiens
gcagcaacctcggttcgaatccgagtcacggca

SEQ ID NO: 16463 - DNA, 34 bp, Homo Sapiens
gcagcaacctcggttcgaatccgagtcacggcac

SEQ ID NO: 16464 - DNA, 35 bp, Homo Sapiens
gcagcaacctcggttcgaatccgagtcacggcacc

SEQ ID NO: 16465 - DNA, 36 bp, Homo Sapiens
gcagcaacctcggttcgaatccgagtcacggcacca

SEQ ID NO: 16466 - DNA, 16 bp, Homo Sapiens
gcagcgatggccgagt

SEQ ID NO: 16467 - DNA, 17 bp, Homo Sapiens
gcagcgatggccgagtg

SEQ ID NO: 16468 - DNA, 18 bp, Homo Sapiens
gcagcgatggccgagtgg

SEQ ID NO: 16469 - DNA, 19 bp, Homo Sapiens
gcagcgatggccgagtggt

SEQ ID NO: 16470 - DNA, 20 bp, Homo Sapiens
gcagcgatggccgagtggtt

SEQ ID NO: 16471 - DNA, 21 bp, Homo Sapiens
gcagcgatggccgagtggtta

SEQ ID NO: 16472 - DNA, 22 bp, Homo Sapiens
gcagcgatggccgagtggttaa

SEQ ID NO: 16473 - DNA, 23 bp, Homo Sapiens
gcagcgatggccgagtggttaag

SEQ ID NO: 16474 - DNA, 24 bp, Homo Sapiens
gcagcgatggccgagtggttaagg

SEQ ID NO: 16475 - DNA, 25 bp, Homo Sapiens
gcagcgatggccgagtggttaaggc

SEQ ID NO: 16476 - DNA, 32 bp, Homo Sapiens
gcagcgatggccgagtggttaaggcgttggac

SEQ ID NO: 16477 - DNA, 33 bp, Homo Sapiens
gcagcgatggccgagtggttaaggcgttggact

SEQ ID NO: 16478 - DNA, 22 bp, Homo Sapiens
gcagcgcgtcagtctcataatc

SEQ ID NO: 16479 - DNA, 20 bp, Homo Sapiens
gcagcggaagcgtgctgggc

SEQ ID NO: 16480 - DNA, 21 bp, Homo Sapiens
gcagcggaagcgtgctgggcc

SEQ ID NO: 16481 - DNA, 22 bp, Homo Sapiens
gcagcggaagcgtgctgggccc

SEQ ID NO: 16482 - DNA, 23 bp, Homo Sapiens
gcagcggaagcgtgctgggccca

SEQ ID NO: 16483 - DNA, 24 bp, Homo Sapiens
gcagcggaagcgtgctgggcccat

SEQ ID NO: 16484 - DNA, 41 bp, Homo Sapiens
gcagcggaagcgtgctgggcccataacccagaggtcgatgg

SEQ ID NO: 16485 - DNA, 42 bp, Homo Sapiens
gcagcggaagcgtgctgggcccataacccagaggtcgatgga

SEQ ID NO: 16486 - DNA, 43 bp, Homo Sapiens
gcagcggaagcgtgctgggcccataacccagaggtcgatggat

SEQ ID NO: 16487 - DNA, 22 bp, Homo Sapiens
gcagcttcaaacctgccggggc

SEQ ID NO: 16488 - DNA, 24 bp, Homo Sapiens
gcagcttcaaacctgccggggctt

SEQ ID NO: 16489 - DNA, 25 bp, Homo Sapiens
gcagcttcaaacctgccggggcttc

SEQ ID NO: 16490 - DNA, 26 bp, Homo Sapiens
gcagcttcaaacctgccggggcttcc

SEQ ID NO: 16491 - DNA, 27 bp, Homo Sapiens
gcagcttcaaacctgccggggcttcca

SEQ ID NO: 16492 - DNA, 16 bp, Homo Sapiens
gcaggttcgaaccctg

SEQ ID NO: 16493 - DNA, 16 bp, Homo Sapiens
gcaggttcgaatcctg

SEQ ID NO: 16494 - DNA, 27 bp, Homo Sapiens
gcaggttcgaatcctgccgactacgcc

SEQ ID NO: 16495 - DNA, 16 bp, Homo Sapiens
gcaggttcgagtcctg

SEQ ID NO: 16496 - DNA, 26 bp, Homo Sapiens
gcaggttcgagtcctgccgcggtcgc

SEQ ID NO: 16497 - DNA, 21 bp, Homo Sapiens
gcagtggtagaattctcgcct

SEQ ID NO: 16498 - DNA, 16 bp, Homo Sapiens
gcagttgacccgggtt

SEQ ID NO: 16499 - DNA, 18 bp, Homo Sapiens
gcagttgacccgggttcg

SEQ ID NO: 16500 - DNA, 28 bp, Homo Sapiens
gcagttgacccgggttcgattcccggcc

SEQ ID NO: 16501 - DNA, 30 bp, Homo Sapiens
gcagttgacccgggttcgattcccggccaa

SEQ ID NO: 16502 - DNA, 31 bp, Homo Sapiens
gcagttgacccgggttcgattcccggccaac

SEQ ID NO: 16503 - DNA, 32 bp, Homo Sapiens
gcagttgacccgggttcgattcccggccaacg

SEQ ID NO: 16504 - DNA, 36 bp, Homo Sapiens
gcagttgacccgggttcgattcccggccaacgcacc

SEQ ID NO: 16505 - DNA, 17 bp, Homo Sapiens
gcataaaacttaaaact

SEQ ID NO: 16506 - DNA, 18 bp, Homo Sapiens
gcataaaacttaaaactt

SEQ ID NO: 16507 - DNA, 25 bp, Homo Sapiens
gcataaaacttaaaactttacagtc

SEQ ID NO: 16508 - DNA, 27 bp, Homo Sapiens
gcataaaacttaaaactttacagtcag

SEQ ID NO: 16509 - DNA, 28 bp, Homo Sapiens
gcataaaacttaaaactttacagtcaga

SEQ ID NO: 16510 - DNA, 29 bp, Homo Sapiens
gcataaaacttaaaactttacagtcagag

SEQ ID NO: 16511 - DNA, 30 bp, Homo Sapiens
gcataaaacttaaaactttacagtcagagg

SEQ ID NO: 16512 - DNA, 31 bp, Homo Sapiens
gcataaaacttaaaactttacagtcagaggt

SEQ ID NO: 16513 - DNA, 32 bp, Homo Sapiens
gcataaaacttaaaactttacagtcagaggtt

SEQ ID NO: 16514 - DNA, 33 bp, Homo Sapiens
gcataaaacttaaaactttacagtcagaggttc

SEQ ID NO: 16515 - DNA, 34 bp, Homo Sapiens
gcataaaacttaaaactttacagtcagaggttca

SEQ ID NO: 16516 - DNA, 32 bp, Homo Sapiens
gcatagctgccttccaagcagttgacccgggt

SEQ ID NO: 16517 - DNA, 18 bp, Homo Sapiens
gcataggtggttcagtgg

SEQ ID NO: 16518 - DNA, 26 bp, Homo Sapiens
gcataggtggttcagtggtagaattc

SEQ ID NO: 16519 - DNA, 27 bp, Homo Sapiens
gcataggtggttcagtggtagaattct

SEQ ID NO: 16520 - DNA, 19 bp, Homo Sapiens
gcatcagcctccggagctg

SEQ ID NO: 16521 - DNA, 23 bp, Homo Sapiens
gcatcagcctccggagctgggga

SEQ ID NO: 16522 - DNA, 27 bp, Homo Sapiens
gcatcagcctccggagctggggattgt

SEQ ID NO: 16523 - DNA, 16 bp, Homo Sapiens
gcatgagactcttaat

SEQ ID NO: 16524 - DNA, 17 bp, Homo Sapiens
gcatgagactcttaatc

SEQ ID NO: 16525 - DNA, 18 bp, Homo Sapiens
gcatgagactcttaatct

SEQ ID NO: 16526 - DNA, 19 bp, Homo Sapiens
gcatgagactcttaatctc

SEQ ID NO: 16527 - DNA, 27 bp, Homo Sapiens
gcatgagactcttaatctcagggtcgt

SEQ ID NO: 16528 - DNA, 32 bp, Homo Sapiens
gcatgagactcttaatctcagggtcgtgggtt

SEQ ID NO: 16529 - DNA, 32 bp, Homo Sapiens
gcatgaggtcccgggttcgatccccagcatct

SEQ ID NO: 16530 - DNA, 33 bp, Homo Sapiens
gcatgaggtcccgggttcgatccccagcatctc

SEQ ID NO: 16531 - DNA, 34 bp, Homo Sapiens
gcatgaggtcccgggttcgatccccagcatctcc

SEQ ID NO: 16532 - DNA, 35 bp, Homo Sapiens
gcatgaggtcccgggttcgatccccagcatctcca

SEQ ID NO: 16533 - DNA, 36 bp, Homo Sapiens
gcatgaggtcccgggttcgatccccagcatctccac

SEQ ID NO: 16534 - DNA, 37 bp, Homo Sapiens
gcatgaggtcccgggttcgatccccagcatctccacc

SEQ ID NO: 16535 - DNA, 38 bp, Homo Sapiens
gcatgaggtcccgggttcgatccccagcatctccacca

SEQ ID NO: 16536 - DNA, 16 bp, Homo Sapiens
gcatgggactcttaat

SEQ ID NO: 16537 - DNA, 17 bp, Homo Sapiens
gcatgggactcttaatc

SEQ ID NO: 16538 - DNA, 18 bp, Homo Sapiens
gcatgggactcttaatcc

SEQ ID NO: 16539 - DNA, 19 bp, Homo Sapiens
gcatgggactcttaatccc

SEQ ID NO: 16540 - DNA, 27 bp, Homo Sapiens
gcatgggactcttaatcccagggtcgt

SEQ ID NO: 16541 - DNA, 32 bp, Homo Sapiens
gcatgggactcttaatcccagggtcgtgggtt

SEQ ID NO: 16542 - DNA, 33 bp, Homo Sapiens
gcatgggactcttaatcccagggtcgtgggttc

SEQ ID NO: 16543 - DNA, 18 bp, Homo Sapiens
gcatgggactcttaatct

SEQ ID NO: 16544 - DNA, 19 bp, Homo Sapiens
gcatgggactcttaatctc

SEQ ID NO: 16545 - DNA, 18 bp, Homo Sapiens
gcatgggtgattcagtgg

SEQ ID NO: 16546 - DNA, 16 bp, Homo Sapiens
gcatgggtggttcagt

SEQ ID NO: 16547 - DNA, 17 bp, Homo Sapiens
gcatgggtggttcagtg

SEQ ID NO: 16548 - DNA, 18 bp, Homo Sapiens
gcatgggtggttcagtgg

SEQ ID NO: 16549 - DNA, 20 bp, Homo Sapiens
gcatgggtggttcagtggta

SEQ ID NO: 16550 - DNA, 21 bp, Homo Sapiens
gcatgggtggttcagtggtag

SEQ ID NO: 16551 - DNA, 22 bp, Homo Sapiens
gcatgggtggttcagtggtaga

SEQ ID NO: 16552 - DNA, 23 bp, Homo Sapiens
gcatgggtggttcagtggtagaa

SEQ ID NO: 16553 - DNA, 24 bp, Homo Sapiens
gcatgggtggttcagtggtagaat

SEQ ID NO: 16554 - DNA, 25 bp, Homo Sapiens
gcatgggtggttcagtggtagaatt

SEQ ID NO: 16555 - DNA, 26 bp, Homo Sapiens
gcatgggtggttcagtggtagaattc

SEQ ID NO: 16556 - DNA, 27 bp, Homo Sapiens
gcatgggtggttcagtggtagaattct

SEQ ID NO: 16557 - DNA, 28 bp, Homo Sapiens
gcatgggtggttcagtggtagaattctc

SEQ ID NO: 16558 - DNA, 29 bp, Homo Sapiens
gcatgggtggttcagtggtagaattctcg

SEQ ID NO: 16559 - DNA, 30 bp, Homo Sapiens
gcatgggtggttcagtggtagaattctcgc

SEQ ID NO: 16560 - DNA, 31 bp, Homo Sapiens
gcatgggtggttcagtggtagaattctcgcc

SEQ ID NO: 16561 - DNA, 32 bp, Homo Sapiens
gcatgggtggttcagtggtagaattctcgcct

SEQ ID NO: 16562 - DNA, 33 bp, Homo Sapiens
gcatgggtggttcagtggtagaattctcgcctg

SEQ ID NO: 16563 - DNA, 34 bp, Homo Sapiens
gcatgggtggttcagtggtagaattctcgcctgc

SEQ ID NO: 16564 - DNA, 35 bp, Homo Sapiens
gcatgggtggttcagtggtagaattctcgcctgcc

SEQ ID NO: 16565 - DNA, 36 bp, Homo Sapiens
gcatgggtggttcagtggtagaattctcgcctgcca

SEQ ID NO: 16566 - DNA, 37 bp, Homo Sapiens
gcatgggtggttcagtggtagaattctcgcctgccac

SEQ ID NO: 16567 - DNA, 38 bp, Homo Sapiens
gcatgggtggttcagtggtagaattctcgcctgccacg

SEQ ID NO: 16568 - DNA, 39 bp, Homo Sapiens
gcatgggtggttcagtggtagaattctcgcctgccacgc

SEQ ID NO: 16569 - DNA, 40 bp, Homo Sapiens
gcatgggtggttcagtggtagaattctcgcctgccacgcg

SEQ ID NO: 16570 - DNA, 41 bp, Homo Sapiens
gcatgggtggttcagtggtagaattctcgcctgccacgcgg

SEQ ID NO: 16571 - DNA, 42 bp, Homo Sapiens
gcatgggtggttcagtggtagaattctcgcctgccacgcggg

SEQ ID NO: 16572 - DNA, 43 bp, Homo Sapiens
gcatgggtggttcagtggtagaattctcgcctgccacgcggga

SEQ ID NO: 16573 - DNA, 44 bp, Homo Sapiens
gcatgggtggttcagtggtagaattctcgcctgccacgcgggag

SEQ ID NO: 16574 - DNA, 46 bp, Homo Sapiens
gcatgggtggttcagtggtagaattctcgcctgccacgcgggaggc

SEQ ID NO: 16575 - DNA, 47 bp, Homo Sapiens
gcatgggtggttcagtggtagaattctcgcctgccacgcgggaggcc

SEQ ID NO: 16576 - DNA, 48 bp, Homo Sapiens
gcatgggtggttcagtggtagaattctcgcctgccacgcgggaggccc

SEQ ID NO: 16577 - DNA, 33 bp, Homo Sapiens
gcattaaccttttaagttaaagattaagagaac

SEQ ID NO: 16578 - DNA, 34 bp, Homo Sapiens
gcattaaccttttaagttaaagattaagagaacc

SEQ ID NO: 16579 - DNA, 35 bp, Homo Sapiens
gcattaaccttttaagttaaagattaagagaacca

SEQ ID NO: 16580 - DNA, 37 bp, Homo Sapiens
gcattaaccttttaagttaaagattaagagaaccaac

SEQ ID NO: 16581 - DNA, 39 bp, Homo Sapiens
gcattaaccttttaagttaaagattaagagaaccaacac

SEQ ID NO: 16582 - DNA, 40 bp, Homo Sapiens
gcattaaccttttaagttaaagattaagagaaccaacacc

SEQ ID NO: 16583 - DNA, 41 bp, Homo Sapiens
gcattaaccttttaagttaaagattaagagaaccaacacct

SEQ ID NO: 16584 - DNA, 16 bp, Homo Sapiens
gcattcggctgttaac

SEQ ID NO: 16585 - DNA, 17 bp, Homo Sapiens
gcattcggctgttaacc

SEQ ID NO: 16586 - DNA, 16 bp, Homo Sapiens
gcattggactgtaaat

SEQ ID NO: 16587 - DNA, 17 bp, Homo Sapiens
gcattggactgtaaatc

SEQ ID NO: 16588 - DNA, 18 bp, Homo Sapiens
gcattggactgtaaatct

SEQ ID NO: 16589 - DNA, 19 bp, Homo Sapiens
gcattggactgtaaatcta

SEQ ID NO: 16590 - DNA, 20 bp, Homo Sapiens
gcattggactgtaaatctaa

SEQ ID NO: 16591 - DNA, 21 bp, Homo Sapiens
gcattggactgtaaatctaaa

SEQ ID NO: 16592 - DNA, 22 bp, Homo Sapiens
gcattggactgtaaatctaaag

SEQ ID NO: 16593 - DNA, 25 bp, Homo Sapiens
gcattggactgtaaatctaaagaca

SEQ ID NO: 16594 - DNA, 27 bp, Homo Sapiens
gcattggactgtaaatctaaagacagg

SEQ ID NO: 16595 - DNA, 28 bp, Homo Sapiens
gcattggactgtaaatctaaagacaggg

SEQ ID NO: 16596 - DNA, 31 bp, Homo Sapiens
gcattggactgtaaatctaaagacaggggtt

SEQ ID NO: 16597 - DNA, 34 bp, Homo Sapiens
gcattggactgtaaatctaaagacaggggttagg

SEQ ID NO: 16598 - DNA, 35 bp, Homo Sapiens
gcattggactgtaaatctaaagacaggggttaggc

SEQ ID NO: 16599 - DNA, 36 bp, Homo Sapiens
gcattggactgtaaatctaaagacaggggttaggcc

SEQ ID NO: 16600 - DNA, 37 bp, Homo Sapiens
gcattggactgtaaatctaaagacaggggttaggcct

SEQ ID NO: 16601 - DNA, 38 bp, Homo Sapiens
gcattggactgtaaatctaaagacaggggttaggcctc

SEQ ID NO: 16602 - DNA, 41 bp, Homo Sapiens
gcattggactgtaaatctaaagacaggggttaggcctcttt

SEQ ID NO: 16603 - DNA, 42 bp, Homo Sapiens
gcattggactgtaaatctaaagacaggggttaggcctctttt

SEQ ID NO: 16604 - DNA, 44 bp, Homo Sapiens
gcattggactgtaaatctaaagacaggggttaggcctcttttta

SEQ ID NO: 16605 - DNA, 46 bp, Homo Sapiens
gcattggactgtaaatctaaagacaggggttaggcctctttttacc

SEQ ID NO: 16606 - DNA, 16 bp, Homo Sapiens
gcattggacttctaat

SEQ ID NO: 16607 - DNA, 19 bp, Homo Sapiens
gcattggacttctaattca

SEQ ID NO: 16608 - DNA, 20 bp, Homo Sapiens
gcattggacttctaattcaa

SEQ ID NO: 16609 - DNA, 18 bp, Homo Sapiens
gcattggtggttcaatgg

SEQ ID NO: 16610 - DNA, 27 bp, Homo Sapiens
gcattggtggttcaatggtagaattct

SEQ ID NO: 16611 - DNA, 28 bp, Homo Sapiens
gcattggtggttcaatggtagaattctc

SEQ ID NO: 16612 - DNA, 30 bp, Homo Sapiens
gcattggtggttcaatggtagaattctcgc

SEQ ID NO: 16613 - DNA, 31 bp, Homo Sapiens
gcattggtggttcaatggtagaattctcgcc

SEQ ID NO: 16614 - DNA, 32 bp, Homo Sapiens
gcattggtggttcaatggtagaattctcgcct

SEQ ID NO: 16615 - DNA, 33 bp, Homo Sapiens
gcattggtggttcaatggtagaattctcgcctc

SEQ ID NO: 16616 - DNA, 16 bp, Homo Sapiens
gcattggtggttcagt

SEQ ID NO: 16617 - DNA, 17 bp, Homo Sapiens
gcattggtggttcagtg

SEQ ID NO: 16618 - DNA, 18 bp, Homo Sapiens
gcattggtggttcagtgg

SEQ ID NO: 16619 - DNA, 19 bp, Homo Sapiens
gcattggtggttcagtggt

SEQ ID NO: 16620 - DNA, 20 bp, Homo Sapiens
gcattggtggttcagtggta

SEQ ID NO: 16621 - DNA, 21 bp, Homo Sapiens
gcattggtggttcagtggtag

SEQ ID NO: 16622 - DNA, 22 bp, Homo Sapiens
gcattggtggttcagtggtaga

SEQ ID NO: 16623 - DNA, 23 bp, Homo Sapiens
gcattggtggttcagtggtagaa

SEQ ID NO: 16624 - DNA, 24 bp, Homo Sapiens
gcattggtggttcagtggtagaat

SEQ ID NO: 16625 - DNA, 25 bp, Homo Sapiens
gcattggtggttcagtggtagaatt

SEQ ID NO: 16626 - DNA, 26 bp, Homo Sapiens
gcattggtggttcagtggtagaattc

SEQ ID NO: 16627 - DNA, 27 bp, Homo Sapiens
gcattggtggttcagtggtagaattct

SEQ ID NO: 16628 - DNA, 28 bp, Homo Sapiens
gcattggtggttcagtggtagaattctc

SEQ ID NO: 16629 - DNA, 29 bp, Homo Sapiens
gcattggtggttcagtggtagaattctcg

SEQ ID NO: 16630 - DNA, 30 bp, Homo Sapiens
gcattggtggttcagtggtagaattctcgc

SEQ ID NO: 16631 - DNA, 31 bp, Homo Sapiens
gcattggtggttcagtggtagaattctcgcc

SEQ ID NO: 16632 - DNA, 32 bp, Homo Sapiens
gcattggtggttcagtggtagaattctcgcct

SEQ ID NO: 16633 - DNA, 33 bp, Homo Sapiens
gcattggtggttcagtggtagaattctcgcctc

SEQ ID NO: 16634 - DNA, 34 bp, Homo Sapiens
gcattggtggttcagtggtagaattctcgcctcc

SEQ ID NO: 16635 - DNA, 35 bp, Homo Sapiens
gcattggtggttcagtggtagaattctcgcctccc

SEQ ID NO: 16636 - DNA, 36 bp, Homo Sapiens
gcattggtggttcagtggtagaattctcgcctccca

SEQ ID NO: 16637 - DNA, 37 bp, Homo Sapiens
gcattggtggttcagtggtagaattctcgcctcccac

SEQ ID NO: 16638 - DNA, 38 bp, Homo Sapiens
gcattggtggttcagtggtagaattctcgcctcccacg

SEQ ID NO: 16639 - DNA, 39 bp, Homo Sapiens
gcattggtggttcagtggtagaattctcgcctcccacgc

SEQ ID NO: 16640 - DNA, 33 bp, Homo Sapiens
gcattggtggttcagtggtagaattctcgcctg

SEQ ID NO: 16641 - DNA, 34 bp, Homo Sapiens
gcattggtggttcagtggtagaattctcgcctgc

SEQ ID NO: 16642 - DNA, 35 bp, Homo Sapiens
gcattggtggttcagtggtagaattctcgcctgcc

SEQ ID NO: 16643 - DNA, 36 bp, Homo Sapiens
gcattggtggttcagtggtagaattctcgcctgcca

SEQ ID NO: 16644 - DNA, 37 bp, Homo Sapiens
gcattggtggttcagtggtagaattctcgcctgccac

SEQ ID NO: 16645 - DNA, 38 bp, Homo Sapiens
gcattggtggttcagtggtagaattctcgcctgccacg

SEQ ID NO: 16646 - DNA, 39 bp, Homo Sapiens
gcattggtggttcagtggtagaattctcgcctgccacgc

SEQ ID NO: 16647 - DNA, 40 bp, Homo Sapiens
gcattggtggttcagtggtagaattctcgcctgccacgcg

SEQ ID NO: 16648 - DNA, 41 bp, Homo Sapiens
gcattggtggttcagtggtagaattctcgcctgccacgcgg

SEQ ID NO: 16649 - DNA, 42 bp, Homo Sapiens
gcattggtggttcagtggtagaattctcgcctgccacgcggg

SEQ ID NO: 16650 - DNA, 43 bp, Homo Sapiens
gcattggtggttcagtggtagaattctcgcctgccacgcggga

SEQ ID NO: 16651 - DNA, 44 bp, Homo Sapiens
gcattggtggttcagtggtagaattctcgcctgccacgcgggag

SEQ ID NO: 16652 - DNA, 45 bp, Homo Sapiens
gcattggtggttcagtggtagaattctcgcctgccacgcgggagg

SEQ ID NO: 16653 - DNA, 46 bp, Homo Sapiens
gcattggtggttcagtggtagaattctcgcctgccacgcgggaggc

SEQ ID NO: 16654 - DNA, 47 bp, Homo Sapiens
gcattggtggttcagtggtagaattctcgcctgccacgcgggaggcc

SEQ ID NO: 16655 - DNA, 48 bp, Homo Sapiens
gcattggtggttcagtggtagaattctcgcctgccacgcgggaggccc

SEQ ID NO: 16656 - DNA, 37 bp, Homo Sapiens
gcattggtggttcagtggtagaattctcgcctgccat

SEQ ID NO: 16657 - DNA, 38 bp, Homo Sapiens
gcattggtggttcagtggtagaattctcgcctgccatg

SEQ ID NO: 16658 - DNA, 39 bp, Homo Sapiens
gcattggtggttcagtggtagaattctcgcctgccatgc

SEQ ID NO: 16659 - DNA, 16 bp, Homo Sapiens
gccaaggtcgcgggtt

SEQ ID NO: 16660 - DNA, 17 bp, Homo Sapiens
gccaaggtcgcgggttc

SEQ ID NO: 16661 - DNA, 18 bp, Homo Sapiens
gccaaggtcgcgggttcg

SEQ ID NO: 16662 - DNA, 32 bp, Homo Sapiens
gccaaggtcgcgggttcgaaccccgtacgggc

SEQ ID NO: 16663 - DNA, 36 bp, Homo Sapiens
gccaaggtcgcgggttcgaaccccgtacgggccacc

SEQ ID NO: 16664 - DNA, 32 bp, Homo Sapiens
gccaaggtcgcgggttcgatccccgtacgggc

SEQ ID NO: 16665 - DNA, 35 bp, Homo Sapiens
gccaaggtcgcgggttcgatccccgtacgggccac

SEQ ID NO: 16666 - DNA, 36 bp, Homo Sapiens
gccaaggtcgcgggttcgatccccgtacgggccacc

SEQ ID NO: 16667 - DNA, 37 bp, Homo Sapiens
gccaaggtcgcgggttcgatccccgtacgggccacca

SEQ ID NO: 16668 - DNA, 36 bp, Homo Sapiens
gccaaggtcgcgggttcgatccccgtactggccacc

SEQ ID NO: 16669 - DNA, 16 bp, Homo Sapiens
gccacgcgggaggccc

SEQ ID NO: 16670 - DNA, 17 bp, Homo Sapiens
gccacgcgggaggcccg

SEQ ID NO: 16671 - DNA, 18 bp, Homo Sapiens
gccacgcgggaggcccgg

SEQ ID NO: 16672 - DNA, 20 bp, Homo Sapiens
gccacgcgggaggcccgggt

SEQ ID NO: 16673 - DNA, 22 bp, Homo Sapiens
gccacgcgggaggcccgggttc

SEQ ID NO: 16674 - DNA, 23 bp, Homo Sapiens
gccacgcgggaggcccgggttcg

SEQ ID NO: 16675 - DNA, 24 bp, Homo Sapiens
gccacgcgggaggcccgggttcga

SEQ ID NO: 16676 - DNA, 25 bp, Homo Sapiens
gccacgcgggaggcccgggttcgat

SEQ ID NO: 16677 - DNA, 33 bp, Homo Sapiens
gccacgcgggaggcccgggttcgattcccggcc

SEQ ID NO: 16678 - DNA, 37 bp, Homo Sapiens
gccacgcgggaggcccgggttcgattcccggccaatg

SEQ ID NO: 16679 - DNA, 40 bp, Homo Sapiens
gccacgcgggaggcccgggttcgattcccggccaatgcac

SEQ ID NO: 16680 - DNA, 41 bp, Homo Sapiens
gccacgcgggaggcccgggttcgattcccggccaatgcacc

SEQ ID NO: 16681 - DNA, 42 bp, Homo Sapiens
gccacgcgggaggcccgggttcgattcccggccaatgcacca

SEQ ID NO: 16682 - DNA, 41 bp, Homo Sapiens
gccacgcgggaggcccgggttcgattcccggcccatgcacc

SEQ ID NO: 16683 - DNA, 42 bp, Homo Sapiens
gccacgcgggaggcccgggttcgattcccggcccatgcacca

SEQ ID NO: 16684 - DNA, 18 bp, Homo Sapiens
gccagggattgtgggttc

SEQ ID NO: 16685 - DNA, 19 bp, Homo Sapiens
gccagggattgtgggttcg

SEQ ID NO: 16686 - DNA, 33 bp, Homo Sapiens
gccagggattgtgggttcgagtcccacccgggg

SEQ ID NO: 16687 - DNA, 35 bp, Homo Sapiens
gccagggattgtgggttcgagtcccacccggggta

SEQ ID NO: 16688 - DNA, 36 bp, Homo Sapiens
gccagggattgtgggttcgagtcccacccggggtac

SEQ ID NO: 16689 - DNA, 37 bp, Homo Sapiens
gccagggattgtgggttcgagtcccacccggggtacc

SEQ ID NO: 16690 - DNA, 35 bp, Homo Sapiens
gccagggattgtgggttcgagtcccacctggggta

SEQ ID NO: 16691 - DNA, 37 bp, Homo Sapiens
gccagggattgtgggttcgagtcccacctggggtacc

SEQ ID NO: 16692 - DNA, 35 bp, Homo Sapiens
gccagggattgtgggttcgagtcccacctggggtg

SEQ ID NO: 16693 - DNA, 37 bp, Homo Sapiens
gccagggattgtgggttcgagtcccacctggggtgcc

SEQ ID NO: 16694 - DNA, 38 bp, Homo Sapiens
gccagggattgtgggttcgagtcccacctggggtgcca

SEQ ID NO: 16695 - DNA, 28 bp, Homo Sapiens
gccagggattgtgggttcgagtcccatc

SEQ ID NO: 16696 - DNA, 30 bp, Homo Sapiens
gccagggattgtgggttcgagtcccatctg

SEQ ID NO: 16697 - DNA, 31 bp, Homo Sapiens
gccagggattgtgggttcgagtcccatctgg

SEQ ID NO: 16698 - DNA, 33 bp, Homo Sapiens
gccagggattgtgggttcgagtcccatctgggg

SEQ ID NO: 16699 - DNA, 35 bp, Homo Sapiens
gccagggattgtgggttcgagtcccatctggggtg

SEQ ID NO: 16700 - DNA, 36 bp, Homo Sapiens
gccagggattgtgggttcgagtcccatctggggtgc

SEQ ID NO: 16701 - DNA, 37 bp, Homo Sapiens
gccagggattgtgggttcgagtcccatctggggtgcc

SEQ ID NO: 16702 - DNA, 38 bp, Homo Sapiens
gccagggattgtgggttcgagtcccatctggggtgcca

SEQ ID NO: 16703 - DNA, 17 bp, Homo Sapiens
gccagtggcgcaatgga

SEQ ID NO: 16704 - DNA, 26 bp, Homo Sapiens
gccagttgattagggtgcttagctgt

SEQ ID NO: 16705 - DNA, 27 bp, Homo Sapiens
gccagttgattagggtgcttagctgtt

SEQ ID NO: 16706 - DNA, 27 bp, Homo Sapiens
gccatgatcgtatagtggttagtactc

SEQ ID NO: 16707 - DNA, 28 bp, Homo Sapiens
gccatgatcgtatagtggttagtactct

SEQ ID NO: 16708 - DNA, 29 bp, Homo Sapiens
gccatgatcgtatagtggttagtactctg

SEQ ID NO: 16709 - DNA, 30 bp, Homo Sapiens
gccatgatcgtatagtggttagtactctgc

SEQ ID NO: 16710 - DNA, 31 bp, Homo Sapiens
gccatgatcgtatagtggttagtactctgcg

SEQ ID NO: 16711 - DNA, 32 bp, Homo Sapiens
gccatgatcgtatagtggttagtactctgcgc

SEQ ID NO: 16712 - DNA, 16 bp, Homo Sapiens
gcccacccagggacgc

SEQ ID NO: 16713 - DNA, 17 bp, Homo Sapiens
gcccacccagggacgcc

SEQ ID NO: 16714 - DNA, 18 bp, Homo Sapiens
gcccacccagggacgcca

SEQ ID NO: 16715 - DNA, 32 bp, Homo Sapiens
gcccagctagctcagtcggtagagcatgagac

SEQ ID NO: 16716 - DNA, 33 bp, Homo Sapiens
gcccagctagctcagtcggtagagcatgagact

SEQ ID NO: 16717 - DNA, 34 bp, Homo Sapiens
gcccagctagctcagtcggtagagcatgagactc

SEQ ID NO: 16718 - DNA, 35 bp, Homo Sapiens
gcccagctagctcagtcggtagagcatgagactct

SEQ ID NO: 16719 - DNA, 22 bp, Homo Sapiens
gcccataacccagaggtcgatg

SEQ ID NO: 16720 - DNA, 25 bp, Homo Sapiens
gcccataacccagaggtcgatggat

SEQ ID NO: 16721 - DNA, 27 bp, Homo Sapiens
gcccataacccagaggtcgatggatcg

SEQ ID NO: 16722 - DNA, 16 bp, Homo Sapiens
gcccataccccgaaaa

SEQ ID NO: 16723 - DNA, 20 bp, Homo Sapiens
gcccataccccgaaaatgtt

SEQ ID NO: 16724 - DNA, 21 bp, Homo Sapiens
gcccataccccgaaaatgttg

SEQ ID NO: 16725 - DNA, 22 bp, Homo Sapiens
gcccataccccgaaaatgttgg

SEQ ID NO: 16726 - DNA, 23 bp, Homo Sapiens
gcccataccccgaaaatgttggt

SEQ ID NO: 16727 - DNA, 24 bp, Homo Sapiens
gcccataccccgaaaatgttggtt

SEQ ID NO: 16728 - DNA, 25 bp, Homo Sapiens
gcccataccccgaaaatgttggtta

SEQ ID NO: 16729 - DNA, 29 bp, Homo Sapiens
gcccataccccgaaaatgttggttatacc

SEQ ID NO: 16730 - DNA, 34 bp, Homo Sapiens
gcccataccccgaaaatgttggttatacccttcc

SEQ ID NO: 16731 - DNA, 43 bp, Homo Sapiens
gcccataccccgaaaatgttggttatacccttcccgtactacc

SEQ ID NO: 16732 - DNA, 44 bp, Homo Sapiens
gcccataccccgaaaatgttggttatacccttcccgtactacca

SEQ ID NO: 16733 - DNA, 38 bp, Homo Sapiens
gccccaaaaattttggtgcaactccaaataaaagtacc

SEQ ID NO: 16734 - DNA, 16 bp, Homo Sapiens
gccccacgttgggcgc

SEQ ID NO: 16735 - DNA, 17 bp, Homo Sapiens
gccccacgttgggcgcc

SEQ ID NO: 16736 - DNA, 18 bp, Homo Sapiens
gccccacgttgggcgcca

SEQ ID NO: 16737 - DNA, 16 bp, Homo Sapiens
gccccagtggaaccac

SEQ ID NO: 16738 - DNA, 17 bp, Homo Sapiens
gccccagtggaaccacc

SEQ ID NO: 16739 - DNA, 18 bp, Homo Sapiens
gccccagtggaaccacca

SEQ ID NO: 16740 - DNA, 18 bp, Homo Sapiens
gccccagtggcctaatgg

SEQ ID NO: 16741 - DNA, 19 bp, Homo Sapiens
gccccagtggcctaatgga

SEQ ID NO: 16742 - DNA, 20 bp, Homo Sapiens
gccccagtggcctaatggat

SEQ ID NO: 16743 - DNA, 29 bp, Homo Sapiens
gccccagtggcctaatggataaggcactg

SEQ ID NO: 16744 - DNA, 29 bp, Homo Sapiens
gccccagtggcctaatggataaggcattg

SEQ ID NO: 16745 - DNA, 30 bp, Homo Sapiens
gccccagtggcctaatggataaggcattgg

SEQ ID NO: 16746 - DNA, 33 bp, Homo Sapiens
gccccagtggcctaatggataaggcattggcct

SEQ ID NO: 16747 - DNA, 36 bp, Homo Sapiens
gccccagtggcctaatggataaggcattggcctcct

SEQ ID NO: 16748 - DNA, 19 bp, Homo Sapiens
gccccagtggcctgatgga

SEQ ID NO: 16749 - DNA, 34 bp, Homo Sapiens
gccccatggtgtaatggtcagcactctggactct

SEQ ID NO: 16750 - DNA, 35 bp, Homo Sapiens
gccccatggtgtaatggtcagcactctggactctg

SEQ ID NO: 16751 - DNA, 28 bp, Homo Sapiens
gccccatggtgtaatggttagcactctg

SEQ ID NO: 16752 - DNA, 32 bp, Homo Sapiens
gccccatggtgtaatggttagcactctggact

SEQ ID NO: 16753 - DNA, 35 bp, Homo Sapiens
gccccatggtgtaatggttagcactctggactttg

SEQ ID NO: 16754 - DNA, 40 bp, Homo Sapiens
gccccatggtgtaatggttagcactctggactttgaatcc

SEQ ID NO: 16755 - DNA, 17 bp, Homo Sapiens
gcccccatgtctaacaa

SEQ ID NO: 16756 - DNA, 18 bp, Homo Sapiens
gcccccatgtctaacaac

SEQ ID NO: 16757 - DNA, 19 bp, Homo Sapiens
gcccccatgtctaacaaca

SEQ ID NO: 16758 - DNA, 21 bp, Homo Sapiens
gcccccatgtctaacaacatg

SEQ ID NO: 16759 - DNA, 22 bp, Homo Sapiens
gcccccatgtctaacaacatgg

SEQ ID NO: 16760 - DNA, 23 bp, Homo Sapiens
gcccccatgtctaacaacatggc

SEQ ID NO: 16761 - DNA, 24 bp, Homo Sapiens
gcccccatgtctaacaacatggct

SEQ ID NO: 16762 - DNA, 25 bp, Homo Sapiens
gcccccatgtctaacaacatggctt

SEQ ID NO: 16763 - DNA, 26 bp, Homo Sapiens
gcccccatgtctaacaacatggcttt

SEQ ID NO: 16764 - DNA, 27 bp, Homo Sapiens
gcccccatgtctaacaacatggctttc

SEQ ID NO: 16765 - DNA, 28 bp, Homo Sapiens
gcccccatgtctaacaacatggctttct

SEQ ID NO: 16766 - DNA, 29 bp, Homo Sapiens
gcccccatgtctaacaacatggctttctc

SEQ ID NO: 16767 - DNA, 30 bp, Homo Sapiens
gcccccatgtctaacaacatggctttctca

SEQ ID NO: 16768 - DNA, 31 bp, Homo Sapiens
gcccccatgtctaacaacatggctttctcac

SEQ ID NO: 16769 - DNA, 32 bp, Homo Sapiens
gcccccatgtctaacaacatggctttctcacc

SEQ ID NO: 16770 - DNA, 33 bp, Homo Sapiens
gcccccatgtctaacaacatggctttctcacca

SEQ ID NO: 16771 - DNA, 20 bp, Homo Sapiens
gccccgggttcaatccccgg

SEQ ID NO: 16772 - DNA, 30 bp, Homo Sapiens
gccccgggttcaatccccggcacctccacc

SEQ ID NO: 16773 - DNA, 31 bp, Homo Sapiens
gccccgggttcaatccccggcacctccacca

SEQ ID NO: 16774 - DNA, 17 bp, Homo Sapiens
gccccgggttcgatccc

SEQ ID NO: 16775 - DNA, 18 bp, Homo Sapiens
gccccgggttcgatcccc

SEQ ID NO: 16776 - DNA, 20 bp, Homo Sapiens
gccccgggttcgatccccgg

SEQ ID NO: 16777 - DNA, 22 bp, Homo Sapiens
gccccgggttcgatccccggca

SEQ ID NO: 16778 - DNA, 25 bp, Homo Sapiens
gccccgggttcgatccccggcatct

SEQ ID NO: 16779 - DNA, 18 bp, Homo Sapiens
gccccggtggcctaatgg

SEQ ID NO: 16780 - DNA, 19 bp, Homo Sapiens
gccccggtggcctaatgga

SEQ ID NO: 16781 - DNA, 20 bp, Homo Sapiens
gccccggtggcctaatggat

SEQ ID NO: 16782 - DNA, 29 bp, Homo Sapiens
gccccggtggcctaatggataaggcattg

SEQ ID NO: 16783 - DNA, 33 bp, Homo Sapiens
gccccggtggcctaatggataaggcattggcct

SEQ ID NO: 16784 - DNA, 36 bp, Homo Sapiens
gccccggtggcctaatggataaggcattggcctcct

SEQ ID NO: 16785 - DNA, 16 bp, Homo Sapiens
gcccgcatcctccacc

SEQ ID NO: 16786 - DNA, 17 bp, Homo Sapiens
gcccgcatcctccacca

SEQ ID NO: 16787 - DNA, 17 bp, Homo Sapiens
gcccgcattctccacca

SEQ ID NO: 16788 - DNA, 16 bp, Homo Sapiens
gcccggatagctcagt

SEQ ID NO: 16789 - DNA, 17 bp, Homo Sapiens
gcccggatagctcagtc

SEQ ID NO: 16790 - DNA, 18 bp, Homo Sapiens
gcccggatagctcagtcg

SEQ ID NO: 16791 - DNA, 19 bp, Homo Sapiens
gcccggatagctcagtcgg

SEQ ID NO: 16792 - DNA, 20 bp, Homo Sapiens
gcccggatagctcagtcggt

SEQ ID NO: 16793 - DNA, 21 bp, Homo Sapiens
gcccggatagctcagtcggta

SEQ ID NO: 16794 - DNA, 22 bp, Homo Sapiens
gcccggatagctcagtcggtag

SEQ ID NO: 16795 - DNA, 23 bp, Homo Sapiens
gcccggatagctcagtcggtaga

SEQ ID NO: 16796 - DNA, 24 bp, Homo Sapiens
gcccggatagctcagtcggtagag

SEQ ID NO: 16797 - DNA, 25 bp, Homo Sapiens
gcccggatagctcagtcggtagagc

SEQ ID NO: 16798 - DNA, 26 bp, Homo Sapiens
gcccggatagctcagtcggtagagca

SEQ ID NO: 16799 - DNA, 27 bp, Homo Sapiens
gcccggatagctcagtcggtagagcat

SEQ ID NO: 16800 - DNA, 28 bp, Homo Sapiens
gcccggatagctcagtcggtagagcatc

SEQ ID NO: 16801 - DNA, 29 bp, Homo Sapiens
gcccggatagctcagtcggtagagcatca

SEQ ID NO: 16802 - DNA, 30 bp, Homo Sapiens
gcccggatagctcagtcggtagagcatcag

SEQ ID NO: 16803 - DNA, 31 bp, Homo Sapiens
gcccggatagctcagtcggtagagcatcaga

SEQ ID NO: 16804 - DNA, 32 bp, Homo Sapiens
gcccggatagctcagtcggtagagcatcagac

SEQ ID NO: 16805 - DNA, 33 bp, Homo Sapiens
gcccggatagctcagtcggtagagcatcagact

SEQ ID NO: 16806 - DNA, 34 bp, Homo Sapiens
gcccggatagctcagtcggtagagcatcagactt

SEQ ID NO: 16807 - DNA, 35 bp, Homo Sapiens
gcccggatagctcagtcggtagagcatcagacttt

SEQ ID NO: 16808 - DNA, 36 bp, Homo Sapiens
gcccggatagctcagtcggtagagcatcagactttt

SEQ ID NO: 16809 - DNA, 37 bp, Homo Sapiens
gcccggatagctcagtcggtagagcatcagactttta

SEQ ID NO: 16810 - DNA, 39 bp, Homo Sapiens
gcccggatagctcagtcggtagagcatcagacttttaat

SEQ ID NO: 16811 - DNA, 16 bp, Homo Sapiens
gcccggctagctcagt

SEQ ID NO: 16812 - DNA, 17 bp, Homo Sapiens
gcccggctagctcagtc

SEQ ID NO: 16813 - DNA, 18 bp, Homo Sapiens
gcccggctagctcagtcg

SEQ ID NO: 16814 - DNA, 32 bp, Homo Sapiens
gcccggctagctcagtcgatagagcatgagac

SEQ ID NO: 16815 - DNA, 33 bp, Homo Sapiens
gcccggctagctcagtcgatagagcatgagact

SEQ ID NO: 16816 - DNA, 34 bp, Homo Sapiens
gcccggctagctcagtcgatagagcatgagactc

SEQ ID NO: 16817 - DNA, 36 bp, Homo Sapiens
gcccggctagctcagtcgatagagcatgagactctt

SEQ ID NO: 16818 - DNA, 19 bp, Homo Sapiens
gcccggctagctcagtcgg

SEQ ID NO: 16819 - DNA, 22 bp, Homo Sapiens
gcccggctagctcagtcggtag

SEQ ID NO: 16820 - DNA, 23 bp, Homo Sapiens
gcccggctagctcagtcggtaga

SEQ ID NO: 16821 - DNA, 24 bp, Homo Sapiens
gcccggctagctcagtcggtagag

SEQ ID NO: 16822 - DNA, 25 bp, Homo Sapiens
gcccggctagctcagtcggtagagc

SEQ ID NO: 16823 - DNA, 26 bp, Homo Sapiens
gcccggctagctcagtcggtagagca

SEQ ID NO: 16824 - DNA, 27 bp, Homo Sapiens
gcccggctagctcagtcggtagagcat

SEQ ID NO: 16825 - DNA, 28 bp, Homo Sapiens
gcccggctagctcagtcggtagagcatg

SEQ ID NO: 16826 - DNA, 29 bp, Homo Sapiens
gcccggctagctcagtcggtagagcatga

SEQ ID NO: 16827 - DNA, 30 bp, Homo Sapiens
gcccggctagctcagtcggtagagcatgag

SEQ ID NO: 16828 - DNA, 31 bp, Homo Sapiens
gcccggctagctcagtcggtagagcatgaga

SEQ ID NO: 16829 - DNA, 32 bp, Homo Sapiens
gcccggctagctcagtcggtagagcatgagac

SEQ ID NO: 16830 - DNA, 33 bp, Homo Sapiens
gcccggctagctcagtcggtagagcatgagacc

SEQ ID NO: 16831 - DNA, 34 bp, Homo Sapiens
gcccggctagctcagtcggtagagcatgagaccc

SEQ ID NO: 16832 - DNA, 35 bp, Homo Sapiens
gcccggctagctcagtcggtagagcatgagaccct

SEQ ID NO: 16833 - DNA, 36 bp, Homo Sapiens
gcccggctagctcagtcggtagagcatgagaccctt

SEQ ID NO: 16834 - DNA, 38 bp, Homo Sapiens
gcccggctagctcagtcggtagagcatgagacccttaa

SEQ ID NO: 16835 - DNA, 33 bp, Homo Sapiens
gcccggctagctcagtcggtagagcatgagact

SEQ ID NO: 16836 - DNA, 34 bp, Homo Sapiens
gcccggctagctcagtcggtagagcatgagactc

SEQ ID NO: 16837 - DNA, 35 bp, Homo Sapiens
gcccggctagctcagtcggtagagcatgagactct

SEQ ID NO: 16838 - DNA, 36 bp, Homo Sapiens
gcccggctagctcagtcggtagagcatgagactctt

SEQ ID NO: 16839 - DNA, 37 bp, Homo Sapiens
gcccggctagctcagtcggtagagcatgagactctta

SEQ ID NO: 16840 - DNA, 38 bp, Homo Sapiens
gcccggctagctcagtcggtagagcatgagactcttaa

SEQ ID NO: 16841 - DNA, 39 bp, Homo Sapiens
gcccggctagctcagtcggtagagcatgagactcttaat

SEQ ID NO: 16842 - DNA, 40 bp, Homo Sapiens
gcccggctagctcagtcggtagagcatgagactcttaatc

SEQ ID NO: 16843 - DNA, 41 bp, Homo Sapiens
gcccggctagctcagtcggtagagcatgagactcttaatct

SEQ ID NO: 16844 - DNA, 42 bp, Homo Sapiens
gcccggctagctcagtcggtagagcatgagactcttaatctc

SEQ ID NO: 16845 - DNA, 43 bp, Homo Sapiens
gcccggctagctcagtcggtagagcatgagactcttaatctca

SEQ ID NO: 16846 - DNA, 29 bp, Homo Sapiens
gcccggctagctcagtcggtagagcatgg

SEQ ID NO: 16847 - DNA, 30 bp, Homo Sapiens
gcccggctagctcagtcggtagagcatggg

SEQ ID NO: 16848 - DNA, 31 bp, Homo Sapiens
gcccggctagctcagtcggtagagcatggga

SEQ ID NO: 16849 - DNA, 32 bp, Homo Sapiens
gcccggctagctcagtcggtagagcatgggac

SEQ ID NO: 16850 - DNA, 33 bp, Homo Sapiens
gcccggctagctcagtcggtagagcatgggact

SEQ ID NO: 16851 - DNA, 34 bp, Homo Sapiens
gcccggctagctcagtcggtagagcatgggactc

SEQ ID NO: 16852 - DNA, 35 bp, Homo Sapiens
gcccggctagctcagtcggtagagcatgggactct

SEQ ID NO: 16853 - DNA, 36 bp, Homo Sapiens
gcccggctagctcagtcggtagagcatgggactctt

SEQ ID NO: 16854 - DNA, 37 bp, Homo Sapiens
gcccggctagctcagtcggtagagcatgggactctta

SEQ ID NO: 16855 - DNA, 38 bp, Homo Sapiens
gcccggctagctcagtcggtagagcatgggactcttaa

SEQ ID NO: 16856 - DNA, 39 bp, Homo Sapiens
gcccggctagctcagtcggtagagcatgggactcttaat

SEQ ID NO: 16857 - DNA, 40 bp, Homo Sapiens
gcccggctagctcagtcggtagagcatgggactcttaatc

SEQ ID NO: 16858 - DNA, 41 bp, Homo Sapiens
gcccggctagctcagtcggtagagcatgggactcttaatcc

SEQ ID NO: 16859 - DNA, 42 bp, Homo Sapiens
gcccggctagctcagtcggtagagcatgggactcttaatccc

SEQ ID NO: 16860 - DNA, 43 bp, Homo Sapiens
gcccggctagctcagtcggtagagcatgggactcttaatccca

SEQ ID NO: 16861 - DNA, 41 bp, Homo Sapiens
gcccggctagctcagtcggtagagcatgggactcttaatct

SEQ ID NO: 16862 - DNA, 42 bp, Homo Sapiens
gcccggctagctcagtcggtagagcatgggactcttaatctc

SEQ ID NO: 16863 - DNA, 28 bp, Homo Sapiens
gcccgggttcgactcccggtgtgggaac

SEQ ID NO: 16864 - DNA, 29 bp, Homo Sapiens
gcccgggttcgactcccggtgtgggaacc

SEQ ID NO: 16865 - DNA, 30 bp, Homo Sapiens
gcccgggttcgactcccggtgtgggaacca

SEQ ID NO: 16866 - DNA, 29 bp, Homo Sapiens
gcccgggttcgattcccggtcagggaacc

SEQ ID NO: 16867 - DNA, 30 bp, Homo Sapiens
gcccgggttcgattcccggtcagggaacca

SEQ ID NO: 16868 - DNA, 20 bp, Homo Sapiens
gcccggtaatcgcataaaac

SEQ ID NO: 16869 - DNA, 27 bp, Homo Sapiens
gcccggtaatcgcataaaacttaaaac

SEQ ID NO: 16870 - DNA, 28 bp, Homo Sapiens
gcccggtaatcgcataaaacttaaaact

SEQ ID NO: 16871 - DNA, 16 bp, Homo Sapiens
gccctcagtaagttgc

SEQ ID NO: 16872 - DNA, 18 bp, Homo Sapiens
gccctcagtaagttgcaa

SEQ ID NO: 16873 - DNA, 19 bp, Homo Sapiens
gccctcagtaagttgcaat

SEQ ID NO: 16874 - DNA, 20 bp, Homo Sapiens
gccctcagtaagttgcaata

SEQ ID NO: 16875 - DNA, 22 bp, Homo Sapiens
gccctcagtaagttgcaatact

SEQ ID NO: 16876 - DNA, 29 bp, Homo Sapiens
gccctcagtaagttgcaatacttaatttc

SEQ ID NO: 16877 - DNA, 31 bp, Homo Sapiens
gccctcagtaagttgcaatacttaatttctg

SEQ ID NO: 16878 - DNA, 32 bp, Homo Sapiens
gccctcagtaagttgcaatacttaatttctgc

SEQ ID NO: 16879 - DNA, 33 bp, Homo Sapiens
gccctcagtaagttgcaatacttaatttctgcc

SEQ ID NO: 16880 - DNA, 34 bp, Homo Sapiens
gccctcagtaagttgcaatacttaatttctgcca

SEQ ID NO: 16881 - DNA, 19 bp, Homo Sapiens
gccctcttagcgcagcggg

SEQ ID NO: 16882 - DNA, 19 bp, Homo Sapiens
gccctcttagcgcagtggg

SEQ ID NO: 16883 - DNA, 32 bp, Homo Sapiens
gccctcttagcgcagtgggcagcgcgtcagtc

SEQ ID NO: 16884 - DNA, 18 bp, Homo Sapiens
gccgaaatagctcagttg

SEQ ID NO: 16885 - DNA, 19 bp, Homo Sapiens
gccgaaatagctcagttgg

SEQ ID NO: 16886 - DNA, 20 bp, Homo Sapiens
gccgaaatagctcagttggg

SEQ ID NO: 16887 - DNA, 21 bp, Homo Sapiens
gccgaaatagctcagttggga

SEQ ID NO: 16888 - DNA, 22 bp, Homo Sapiens
gccgaaatagctcagttgggag

SEQ ID NO: 16889 - DNA, 23 bp, Homo Sapiens
gccgaaatagctcagttgggaga

SEQ ID NO: 16890 - DNA, 33 bp, Homo Sapiens
gccgaaatagctcagttgggagagcgttagact

SEQ ID NO: 16891 - DNA, 33 bp, Homo Sapiens
gccgagatagctcagttgggagagcgttagact

SEQ ID NO: 16892 - DNA, 16 bp, Homo Sapiens
gccgagcggtctaagg

SEQ ID NO: 16893 - DNA, 17 bp, Homo Sapiens
gccgagcggtctaaggc

SEQ ID NO: 16894 - DNA, 22 bp, Homo Sapiens
gccgagcggtctaaggcgctgc

SEQ ID NO: 16895 - DNA, 16 bp, Homo Sapiens
gccgaggttgtgagtt

SEQ ID NO: 16896 - DNA, 17 bp, Homo Sapiens
gccgaggttgtgagttc

SEQ ID NO: 16897 - DNA, 33 bp, Homo Sapiens
gccgaggttgtgagttcgagcctcacctggagc

SEQ ID NO: 16898 - DNA, 27 bp, Homo Sapiens
gccgagtggttaaggcgatggactgct

SEQ ID NO: 16899 - DNA, 20 bp, Homo Sapiens
gccgcagcaacctcggttcg

SEQ ID NO: 16900 - DNA, 33 bp, Homo Sapiens
gccgcagcaacctcggttcgaatccgagtcacg

SEQ ID NO: 16901 - DNA, 36 bp, Homo Sapiens
gccgcagcaacctcggttcgaatccgagtcacggca

SEQ ID NO: 16902 - DNA, 37 bp, Homo Sapiens
gccgcagcaacctcggttcgaatccgagtcacggcac

SEQ ID NO: 16903 - DNA, 38 bp, Homo Sapiens
gccgcagcaacctcggttcgaatccgagtcacggcacc

SEQ ID NO: 16904 - DNA, 39 bp, Homo Sapiens
gccgcagcaacctcggttcgaatccgagtcacggcacca

SEQ ID NO: 16905 - DNA, 16 bp, Homo Sapiens
gccgcggcccgggttc

SEQ ID NO: 16906 - DNA, 26 bp, Homo Sapiens
gccgcggcccgggttcgattcccggt

SEQ ID NO: 16907 - DNA, 27 bp, Homo Sapiens
gccgcggcccgggttcgattcccggtc

SEQ ID NO: 16908 - DNA, 29 bp, Homo Sapiens
gccgcggcccgggttcgattcccggtcag

SEQ ID NO: 16909 - DNA, 30 bp, Homo Sapiens
gccgcggcccgggttcgattcccggtcagg

SEQ ID NO: 16910 - DNA, 31 bp, Homo Sapiens
gccgcggcccgggttcgattcccggtcaggg

SEQ ID NO: 16911 - DNA, 32 bp, Homo Sapiens
gccgcggcccgggttcgattcccggtcaggga

SEQ ID NO: 16912 - DNA, 33 bp, Homo Sapiens
gccgcggcccgggttcgattcccggtcagggaa

SEQ ID NO: 16913 - DNA, 34 bp, Homo Sapiens
gccgcggcccgggttcgattcccggtcagggaac

SEQ ID NO: 16914 - DNA, 35 bp, Homo Sapiens
gccgcggcccgggttcgattcccggtcagggaacc

SEQ ID NO: 16915 - DNA, 36 bp, Homo Sapiens
gccgcggcccgggttcgattcccggtcagggaacca

SEQ ID NO: 16916 - DNA, 18 bp, Homo Sapiens
gccgcgtggcctaatgga

SEQ ID NO: 16917 - DNA, 35 bp, Homo Sapiens
gccgcgtggcctaatggataaggcgtctgattccg

SEQ ID NO: 16918 - DNA, 16 bp, Homo Sapiens
gccgctggtgtagtgg

SEQ ID NO: 16919 - DNA, 18 bp, Homo Sapiens
gccgctggtgtagtggta

SEQ ID NO: 16920 - DNA, 24 bp, Homo Sapiens
gccgctggtgtagtggtatcatgc

SEQ ID NO: 16921 - DNA, 25 bp, Homo Sapiens
gccgctggtgtagtggtatcatgca

SEQ ID NO: 16922 - DNA, 26 bp, Homo Sapiens
gccgctggtgtagtggtatcatgcaa

SEQ ID NO: 16923 - DNA, 27 bp, Homo Sapiens
gccgctggtgtagtggtatcatgcaag

SEQ ID NO: 16924 - DNA, 28 bp, Homo Sapiens
gccgctggtgtagtggtatcatgcaaga

SEQ ID NO: 16925 - DNA, 29 bp, Homo Sapiens
gccgctggtgtagtggtatcatgcaagat

SEQ ID NO: 16926 - DNA, 30 bp, Homo Sapiens
gccgctggtgtagtggtatcatgcaagatt

SEQ ID NO: 16927 - DNA, 31 bp, Homo Sapiens
gccgctggtgtagtggtatcatgcaagattc

SEQ ID NO: 16928 - DNA, 32 bp, Homo Sapiens
gccgctggtgtagtggtatcatgcaagattcc

SEQ ID NO: 16929 - DNA, 33 bp, Homo Sapiens
gccgctggtgtagtggtatcatgcaagattccc

SEQ ID NO: 16930 - DNA, 34 bp, Homo Sapiens
gccgctggtgtagtggtatcatgcaagattccca

SEQ ID NO: 16931 - DNA, 35 bp, Homo Sapiens
gccgctggtgtagtggtatcatgcaagattcccat

SEQ ID NO: 16932 - DNA, 37 bp, Homo Sapiens
gccgctggtgtagtggtatcatgcaagattcccattc

SEQ ID NO: 16933 - DNA, 38 bp, Homo Sapiens
gccgctggtgtagtggtatcatgcaagattcccattct

SEQ ID NO: 16934 - DNA, 47 bp, Homo Sapiens
gccgctggtgtagtggtatcatgcaagattcccattcttgcgacccg

SEQ ID NO: 16935 - DNA, 48 bp, Homo Sapiens
gccgctggtgtagtggtatcatgcaagattcccattcttgcgacccgg

SEQ ID NO: 16936 - DNA, 19 bp, Homo Sapiens
gccggttagctcagttggt

SEQ ID NO: 16937 - DNA, 16 bp, Homo Sapiens
gccgtgatcgtatagt

SEQ ID NO: 16938 - DNA, 17 bp, Homo Sapiens
gccgtgatcgtatagtg

SEQ ID NO: 16939 - DNA, 18 bp, Homo Sapiens
gccgtgatcgtatagtgg

SEQ ID NO: 16940 - DNA, 19 bp, Homo Sapiens
gccgtgatcgtatagtggt

SEQ ID NO: 16941 - DNA, 20 bp, Homo Sapiens
gccgtgatcgtatagtggtt

SEQ ID NO: 16942 - DNA, 21 bp, Homo Sapiens
gccgtgatcgtatagtggtta

SEQ ID NO: 16943 - DNA, 22 bp, Homo Sapiens
gccgtgatcgtatagtggttag

SEQ ID NO: 16944 - DNA, 23 bp, Homo Sapiens
gccgtgatcgtatagtggttagt

SEQ ID NO: 16945 - DNA, 24 bp, Homo Sapiens
gccgtgatcgtatagtggttagta

SEQ ID NO: 16946 - DNA, 25 bp, Homo Sapiens
gccgtgatcgtatagtggttagtac

SEQ ID NO: 16947 - DNA, 26 bp, Homo Sapiens
gccgtgatcgtatagtggttagtact

SEQ ID NO: 16948 - DNA, 27 bp, Homo Sapiens
gccgtgatcgtatagtggttagtactc

SEQ ID NO: 16949 - DNA, 28 bp, Homo Sapiens
gccgtgatcgtatagtggttagtactct

SEQ ID NO: 16950 - DNA, 29 bp, Homo Sapiens
gccgtgatcgtatagtggttagtactctg

SEQ ID NO: 16951 - DNA, 30 bp, Homo Sapiens
gccgtgatcgtatagtggttagtactctgc

SEQ ID NO: 16952 - DNA, 31 bp, Homo Sapiens
gccgtgatcgtatagtggttagtactctgcg

SEQ ID NO: 16953 - DNA, 32 bp, Homo Sapiens
gccgtgatcgtatagtggttagtactctgcgt

SEQ ID NO: 16954 - DNA, 33 bp, Homo Sapiens
gccgtgatcgtatagtggttagtactctgcgtt

SEQ ID NO: 16955 - DNA, 34 bp, Homo Sapiens
gccgtgatcgtatagtggttagtactctgcgttg

SEQ ID NO: 16956 - DNA, 35 bp, Homo Sapiens
gccgtgatcgtatagtggttagtactctgcgttgt

SEQ ID NO: 16957 - DNA, 36 bp, Homo Sapiens
gccgtgatcgtatagtggttagtactctgcgttgtg

SEQ ID NO: 16958 - DNA, 37 bp, Homo Sapiens
gccgtgatcgtatagtggttagtactctgcgttgtgg

SEQ ID NO: 16959 - DNA, 38 bp, Homo Sapiens
gccgtgatcgtatagtggttagtactctgcgttgtggc

SEQ ID NO: 16960 - DNA, 39 bp, Homo Sapiens
gccgtgatcgtatagtggttagtactctgcgttgtggcc

SEQ ID NO: 16961 - DNA, 40 bp, Homo Sapiens
gccgtgatcgtatagtggttagtactctgcgttgtggccg

SEQ ID NO: 16962 - DNA, 41 bp, Homo Sapiens
gccgtgatcgtatagtggttagtactctgcgttgtggccgc

SEQ ID NO: 16963 - DNA, 42 bp, Homo Sapiens
gccgtgatcgtatagtggttagtactctgcgttgtggccgca

SEQ ID NO: 16964 - DNA, 43 bp, Homo Sapiens
gccgtgatcgtatagtggttagtactctgcgttgtggccgcag

SEQ ID NO: 16965 - DNA, 44 bp, Homo Sapiens
gccgtgatcgtatagtggttagtactctgcgttgtggccgcagc

SEQ ID NO: 16966 - DNA, 45 bp, Homo Sapiens
gccgtgatcgtatagtggttagtactctgcgttgtggccgcagca

SEQ ID NO: 16967 - DNA, 48 bp, Homo Sapiens
gccgtgatcgtatagtggttagtactctgcgttgtggccgcagcaacc

SEQ ID NO: 16968 - DNA, 23 bp, Homo Sapiens
gcctcacacgcgaaaggtccccg

SEQ ID NO: 16969 - DNA, 44 bp, Homo Sapiens
gcctcacacgcgaaaggtccccggttcgaaaccgggcggaaaca

SEQ ID NO: 16970 - DNA, 46 bp, Homo Sapiens
gcctcacacgcgaaaggtccccggttcgaaaccgggcggaaacacc

SEQ ID NO: 16971 - DNA, 40 bp, Homo Sapiens
gcctcacacgcgaaaggtccccggttcgatcccgggcgga

SEQ ID NO: 16972 - DNA, 41 bp, Homo Sapiens
gcctcacacgcgaaaggtccccggttcgatcccgggcggaa

SEQ ID NO: 16973 - DNA, 46 bp, Homo Sapiens
gcctcacacgcgaaaggtccccggttcgatcccgggcggaaacacc

SEQ ID NO: 16974 - DNA, 17 bp, Homo Sapiens
gcctcacctggagcacc

SEQ ID NO: 16975 - DNA, 18 bp, Homo Sapiens
gcctcacctggagcacca

SEQ ID NO: 16976 - DNA, 46 bp, Homo Sapiens
gcctccggagctggggattgtgggttcgagtcccatctgggtcgcc

SEQ ID NO: 16977 - DNA, 16 bp, Homo Sapiens
gcctccttagcgcagt

SEQ ID NO: 16978 - DNA, 18 bp, Homo Sapiens
gcctccttagcgcagtag

SEQ ID NO: 16979 - DNA, 19 bp, Homo Sapiens
gcctccttagcgcagtagg

SEQ ID NO: 16980 - DNA, 32 bp, Homo Sapiens
gcctccttagcgcagtaggcagcgcgtcagtc

SEQ ID NO: 16981 - DNA, 35 bp, Homo Sapiens
gcctccttagcgcagtaggcagcgcgtcagtctca

SEQ ID NO: 16982 - DNA, 16 bp, Homo Sapiens
gcctcgttagcgcagt

SEQ ID NO: 16983 - DNA, 18 bp, Homo Sapiens
gcctcgttagcgcagtag

SEQ ID NO: 16984 - DNA, 19 bp, Homo Sapiens
gcctcgttagcgcagtagg

SEQ ID NO: 16985 - DNA, 32 bp, Homo Sapiens
gcctcgttagcgcagtaggcagcgcgtcagtc

SEQ ID NO: 16986 - DNA, 34 bp, Homo Sapiens
gcctcgttagcgcagtaggcagcgcgtcagtctc

SEQ ID NO: 16987 - DNA, 35 bp, Homo Sapiens
gcctcgttagcgcagtaggcagcgcgtcagtctca

SEQ ID NO: 16988 - DNA, 32 bp, Homo Sapiens
gcctcgttagcgcagtaggtagcgcgtcagtc

SEQ ID NO: 16989 - DNA, 33 bp, Homo Sapiens
gcctcgttagcgcagtaggtagcgcgtcagtct

SEQ ID NO: 16990 - DNA, 35 bp, Homo Sapiens
gcctcgttagcgcagtaggtagcgcgtcagtctca

SEQ ID NO: 16991 - DNA, 16 bp, Homo Sapiens
gcctctttttaccacc

SEQ ID NO: 16992 - DNA, 17 bp, Homo Sapiens
gcctctttttaccacca

SEQ ID NO: 16993 - DNA, 18 bp, Homo Sapiens
gcctgccacgcgggaggc

SEQ ID NO: 16994 - DNA, 24 bp, Homo Sapiens
gcctgccacgcgggaggcccgggt

SEQ ID NO: 16995 - DNA, 45 bp, Homo Sapiens
gcctgccacgcgggaggcccgggttcgattcccggccaatgcacc

SEQ ID NO: 16996 - DNA, 19 bp, Homo Sapiens
gcctggatagctcagtcgg

SEQ ID NO: 16997 - DNA, 22 bp, Homo Sapiens
gcctggatagctcagtcggtag

SEQ ID NO: 16998 - DNA, 28 bp, Homo Sapiens
gcctggatagctcagtcggtagagcatc

SEQ ID NO: 16999 - DNA, 29 bp, Homo Sapiens
gcctggatagctcagtcggtagagcatca

SEQ ID NO: 17000 - DNA, 31 bp, Homo Sapiens
gcctggatagctcagtcggtagagcatcaga

SEQ ID NO: 17001 - DNA, 32 bp, Homo Sapiens
gcctggatagctcagtcggtagagcatcagac

SEQ ID NO: 17002 - DNA, 33 bp, Homo Sapiens
gcctggatagctcagtcggtagagcatcagact

SEQ ID NO: 17003 - DNA, 19 bp, Homo Sapiens
gcctggatagctcagttgg

SEQ ID NO: 17004 - DNA, 20 bp, Homo Sapiens
gcctggatagctcagttggt

SEQ ID NO: 17005 - DNA, 28 bp, Homo Sapiens
gcctggatagctcagttggtagagcatc

SEQ ID NO: 17006 - DNA, 32 bp, Homo Sapiens
gcctggatagctcagttggtagagcatcagac

SEQ ID NO: 17007 - DNA, 33 bp, Homo Sapiens
gcctggatagctcagttggtagagcatcagact

SEQ ID NO: 17008 - DNA, 19 bp, Homo Sapiens
gcctgggtagctcagtcgg

SEQ ID NO: 17009 - DNA, 22 bp, Homo Sapiens
gcctgggtagctcagtcggtag

SEQ ID NO: 17010 - DNA, 28 bp, Homo Sapiens
gcctgggtagctcagtcggtagagcatc

SEQ ID NO: 17011 - DNA, 29 bp, Homo Sapiens
gcctgggtagctcagtcggtagagcatca

SEQ ID NO: 17012 - DNA, 31 bp, Homo Sapiens
gcctgggtagctcagtcggtagagcatcaga

SEQ ID NO: 17013 - DNA, 32 bp, Homo Sapiens
gcctgggtagctcagtcggtagagcatcagac

SEQ ID NO: 17014 - DNA, 33 bp, Homo Sapiens
gcctgggtagctcagtcggtagagcatcagact

SEQ ID NO: 17015 - DNA, 19 bp, Homo Sapiens
gcctgtcacgcgggagacc

SEQ ID NO: 17016 - DNA, 20 bp, Homo Sapiens
gcctgtcacgcgggagaccg

SEQ ID NO: 17017 - DNA, 21 bp, Homo Sapiens
gcctgtcacgcgggagaccgg

SEQ ID NO: 17018 - DNA, 40 bp, Homo Sapiens
gcctgtcacgcgggagaccggggttcaattccccgacggg

SEQ ID NO: 17019 - DNA, 44 bp, Homo Sapiens
gcctgtcacgcgggagaccggggttcaattccccgacggggagc

SEQ ID NO: 17020 - DNA, 45 bp, Homo Sapiens
gcctgtcacgcgggagaccggggttcaattccccgacggggagcc

SEQ ID NO: 17021 - DNA, 46 bp, Homo Sapiens
gcctgtcacgcgggagaccggggttcaattccccgacggggagcca

SEQ ID NO: 17022 - DNA, 39 bp, Homo Sapiens
gcctgtcacgcgggagaccggggttcgattccccgacgg

SEQ ID NO: 17023 - DNA, 40 bp, Homo Sapiens
gcctgtcacgcgggagaccggggttcgattccccgacggg

SEQ ID NO: 17024 - DNA, 41 bp, Homo Sapiens
gcctgtcacgcgggagaccggggttcgattccccgacgggg

SEQ ID NO: 17025 - DNA, 42 bp, Homo Sapiens
gcctgtcacgcgggagaccggggttcgattccccgacgggga

SEQ ID NO: 17026 - DNA, 43 bp, Homo Sapiens
gcctgtcacgcgggagaccggggttcgattccccgacggggag

SEQ ID NO: 17027 - DNA, 44 bp, Homo Sapiens
gcctgtcacgcgggagaccggggttcgattccccgacggggagc

SEQ ID NO: 17028 - DNA, 45 bp, Homo Sapiens
gcctgtcacgcgggagaccggggttcgattccccgacggggagcc

SEQ ID NO: 17029 - DNA, 46 bp, Homo Sapiens
gcctgtcacgcgggagaccggggttcgattccccgacggggagcca

SEQ ID NO: 17030 - DNA, 42 bp, Homo Sapiens
gccttcaaagccctcagtaagttgcaatacttaatttctgcc

SEQ ID NO: 17031 - DNA, 43 bp, Homo Sapiens
gccttcaaagccctcagtaagttgcaatacttaatttctgcca

SEQ ID NO: 17032 - DNA, 22 bp, Homo Sapiens
gccttccaagcagttgacccgg

SEQ ID NO: 17033 - DNA, 36 bp, Homo Sapiens
gccttccaagcagttgacccgggttcgattcccggc

SEQ ID NO: 17034 - DNA, 45 bp, Homo Sapiens
gccttccaagcagttgacccgggttcgattcccggccaacgcacc

SEQ ID NO: 17035 - DNA, 16 bp, Homo Sapiens
gcgaaaggtccccggt

SEQ ID NO: 17036 - DNA, 17 bp, Homo Sapiens
gcgaaaggtccccggtt

SEQ ID NO: 17037 - DNA, 19 bp, Homo Sapiens
gcgaaaggtccccggttcg

SEQ ID NO: 17038 - DNA, 33 bp, Homo Sapiens
gcgaaaggtccccggttcgaaaccgggcagaag

SEQ ID NO: 17039 - DNA, 37 bp, Homo Sapiens
gcgaaaggtccccggttcgaaaccgggcagaagcacc

SEQ ID NO: 17040 - DNA, 38 bp, Homo Sapiens
gcgaaaggtccccggttcgaaaccgggcagaagcacca

SEQ ID NO: 17041 - DNA, 29 bp, Homo Sapiens
gcgaaaggtccccggttcgaaaccgggcg

SEQ ID NO: 17042 - DNA, 33 bp, Homo Sapiens
gcgaaaggtccccggttcgaaaccgggcggaaa

SEQ ID NO: 17043 - DNA, 34 bp, Homo Sapiens
gcgaaaggtccccggttcgaaaccgggcggaaac

SEQ ID NO: 17044 - DNA, 35 bp, Homo Sapiens
gcgaaaggtccccggttcgaaaccgggcggaaaca

SEQ ID NO: 17045 - DNA, 36 bp, Homo Sapiens
gcgaaaggtccccggttcgaaaccgggcggaaacac

SEQ ID NO: 17046 - DNA, 37 bp, Homo Sapiens
gcgaaaggtccccggttcgaaaccgggcggaaacacc

SEQ ID NO: 17047 - DNA, 38 bp, Homo Sapiens
gcgaaaggtccccggttcgaaaccgggcggaaacacca

SEQ ID NO: 17048 - DNA, 37 bp, Homo Sapiens
gcgaaaggtccccggttcgaaactgggcggaaacacc

SEQ ID NO: 17049 - DNA, 33 bp, Homo Sapiens
gcgaaaggtccccggttcgatcccgggcggaaa

SEQ ID NO: 17050 - DNA, 34 bp, Homo Sapiens
gcgaaaggtccccggttcgatcccgggcggaaac

SEQ ID NO: 17051 - DNA, 35 bp, Homo Sapiens
gcgaaaggtccccggttcgatcccgggcggaaaca

SEQ ID NO: 17052 - DNA, 37 bp, Homo Sapiens
gcgaaaggtccccggttcgatcccgggcggaaacacc

SEQ ID NO: 17053 - DNA, 38 bp, Homo Sapiens
gcgaaaggtccccggttcgatcccgggcggaaacacca

SEQ ID NO: 17054 - DNA, 37 bp, Homo Sapiens
gcgaaaggtccctggatcaaaaccaggcggaaacacc

SEQ ID NO: 17055 - DNA, 20 bp, Homo Sapiens
gcgacccgggttcgattccc

SEQ ID NO: 17056 - DNA, 28 bp, Homo Sapiens
gcgacccgggttcgattcccgggcggcg

SEQ ID NO: 17057 - DNA, 16 bp, Homo Sapiens
gcgagaggtagcggga

SEQ ID NO: 17058 - DNA, 17 bp, Homo Sapiens
gcgagaggtagcgggat

SEQ ID NO: 17059 - DNA, 18 bp, Homo Sapiens
gcgagaggtagcgggatc

SEQ ID NO: 17060 - DNA, 16 bp, Homo Sapiens
gcgagaggtcccgggt

SEQ ID NO: 17061 - DNA, 31 bp, Homo Sapiens
gcgagaggtcccgggttcaaatcccggacga

SEQ ID NO: 17062 - DNA, 32 bp, Homo Sapiens
gcgagaggtcccgggttcaaatcccggacgag

SEQ ID NO: 17063 - DNA, 34 bp, Homo Sapiens
gcgagaggtcccgggttcaaatcccggacgagcc

SEQ ID NO: 17064 - DNA, 35 bp, Homo Sapiens
gcgagaggtcccgggttcaaatcccggacgagccc

SEQ ID NO: 17065 - DNA, 36 bp, Homo Sapiens
gcgagaggtcccgggttcaaatcccggacgagcccc

SEQ ID NO: 17066 - DNA, 37 bp, Homo Sapiens
gcgagaggtcccgggttcaaatcccggacgagccccc

SEQ ID NO: 17067 - DNA, 38 bp, Homo Sapiens
gcgagaggtcccgggttcaaatcccggacgagccccca

SEQ ID NO: 17068 - DNA, 26 bp, Homo Sapiens
gcgagttcaaatctcgctggggcctc

SEQ ID NO: 17069 - DNA, 26 bp, Homo Sapiens
gcgagttcaattctcgctggggcctc

SEQ ID NO: 17070 - DNA, 26 bp, Homo Sapiens
gcgagttcgatcctcgctggggcctc

SEQ ID NO: 17071 - DNA, 24 bp, Homo Sapiens
gcgatccgagttcaaatctcggtg

SEQ ID NO: 17072 - DNA, 28 bp, Homo Sapiens
gcgatccgagttcaaatctcggtggaac

SEQ ID NO: 17073 - DNA, 29 bp, Homo Sapiens
gcgatccgagttcaaatctcggtggaacc

SEQ ID NO: 17074 - DNA, 31 bp, Homo Sapiens
gcgatccgagttcaaatctcggtggaacctc

SEQ ID NO: 17075 - DNA, 32 bp, Homo Sapiens
gcgatccgagttcaaatctcggtggaacctcc

SEQ ID NO: 17076 - DNA, 28 bp, Homo Sapiens
gcgatccgagttcaaatctcggtgggac

SEQ ID NO: 17077 - DNA, 29 bp, Homo Sapiens
gcgatccgagttcaaatctcggtgggacc

SEQ ID NO: 17078 - DNA, 31 bp, Homo Sapiens
gcgatccgagttcaaatctcggtgggacctc

SEQ ID NO: 17079 - DNA, 24 bp, Homo Sapiens
gcgatccgagttcgagtctcggtg

SEQ ID NO: 17080 - DNA, 28 bp, Homo Sapiens
gcgatccgagttcgagtctcggtggaac

SEQ ID NO: 17081 - DNA, 31 bp, Homo Sapiens
gcgatccgagttcgagtctcggtggaacctc

SEQ ID NO: 17082 - DNA, 32 bp, Homo Sapiens
gcgatccgagttcgagtctcggtggaacctcc

SEQ ID NO: 17083 - DNA, 20 bp, Homo Sapiens
gcgatggccgagtggttaag

SEQ ID NO: 17084 - DNA, 24 bp, Homo Sapiens
gcgcaatggataacgcgtctgact

SEQ ID NO: 17085 - DNA, 22 bp, Homo Sapiens
gcgcagcggaagcgtgctgggc

SEQ ID NO: 17086 - DNA, 23 bp, Homo Sapiens
gcgcagcggaagcgtgctgggcc

SEQ ID NO: 17087 - DNA, 30 bp, Homo Sapiens
gcgcagcggaagcgtgctgggcccataacc

SEQ ID NO: 17088 - DNA, 31 bp, Homo Sapiens
gcgcagcggaagcgtgctgggcccataaccc

SEQ ID NO: 17089 - DNA, 18 bp, Homo Sapiens
gcgcaggttcgaaccctg

SEQ ID NO: 17090 - DNA, 16 bp, Homo Sapiens
gcgcaggttcgaatcc

SEQ ID NO: 17091 - DNA, 17 bp, Homo Sapiens
gcgcaggttcgaatcct

SEQ ID NO: 17092 - DNA, 18 bp, Homo Sapiens
gcgcaggttcgaatcctg

SEQ ID NO: 17093 - DNA, 21 bp, Homo Sapiens
gcgcattcggctgttaaccga

SEQ ID NO: 17094 - DNA, 31 bp, Homo Sapiens
gcgcattcggctgttaaccgaaaggttggtg

SEQ ID NO: 17095 - DNA, 16 bp, Homo Sapiens
gcgcattggacttcta

SEQ ID NO: 17096 - DNA, 18 bp, Homo Sapiens
gcgcattggacttctaat

SEQ ID NO: 17097 - DNA, 32 bp, Homo Sapiens
gcgcattggacttctaattcaaaggttccggg

SEQ ID NO: 17098 - DNA, 16 bp, Homo Sapiens
gcgccgctggtgtagt

SEQ ID NO: 17099 - DNA, 17 bp, Homo Sapiens
gcgccgctggtgtagtg

SEQ ID NO: 17100 - DNA, 18 bp, Homo Sapiens
gcgccgctggtgtagtgg

SEQ ID NO: 17101 - DNA, 20 bp, Homo Sapiens
gcgccgctggtgtagtggta

SEQ ID NO: 17102 - DNA, 21 bp, Homo Sapiens
gcgccgctggtgtagtggtat

SEQ ID NO: 17103 - DNA, 22 bp, Homo Sapiens
gcgccgctggtgtagtggtatc

SEQ ID NO: 17104 - DNA, 23 bp, Homo Sapiens
gcgccgctggtgtagtggtatca

SEQ ID NO: 17105 - DNA, 25 bp, Homo Sapiens
gcgccgctggtgtagtggtatcatg

SEQ ID NO: 17106 - DNA, 26 bp, Homo Sapiens
gcgccgctggtgtagtggtatcatgc

SEQ ID NO: 17107 - DNA, 27 bp, Homo Sapiens
gcgccgctggtgtagtggtatcatgca

SEQ ID NO: 17108 - DNA, 28 bp, Homo Sapiens
gcgccgctggtgtagtggtatcatgcaa

SEQ ID NO: 17109 - DNA, 29 bp, Homo Sapiens
gcgccgctggtgtagtggtatcatgcaag

SEQ ID NO: 17110 - DNA, 30 bp, Homo Sapiens
gcgccgctggtgtagtggtatcatgcaaga

SEQ ID NO: 17111 - DNA, 31 bp, Homo Sapiens
gcgccgctggtgtagtggtatcatgcaagat

SEQ ID NO: 17112 - DNA, 32 bp, Homo Sapiens
gcgccgctggtgtagtggtatcatgcaagatt

SEQ ID NO: 17113 - DNA, 33 bp, Homo Sapiens
gcgccgctggtgtagtggtatcatgcaagattc

SEQ ID NO: 17114 - DNA, 34 bp, Homo Sapiens
gcgccgctggtgtagtggtatcatgcaagattcc

SEQ ID NO: 17115 - DNA, 35 bp, Homo Sapiens
gcgccgctggtgtagtggtatcatgcaagattccc

SEQ ID NO: 17116 - DNA, 36 bp, Homo Sapiens
gcgccgctggtgtagtggtatcatgcaagattccca

SEQ ID NO: 17117 - DNA, 37 bp, Homo Sapiens
gcgccgctggtgtagtggtatcatgcaagattcccat

SEQ ID NO: 17118 - DNA, 39 bp, Homo Sapiens
gcgccgctggtgtagtggtatcatgcaagattcccattc

SEQ ID NO: 17119 - DNA, 40 bp, Homo Sapiens
gcgccgctggtgtagtggtatcatgcaagattcccattct

SEQ ID NO: 17120 - DNA, 42 bp, Homo Sapiens
gcgccgctggtgtagtggtatcatgcaagattcccattcttg

SEQ ID NO: 17121 - DNA, 44 bp, Homo Sapiens
gcgccgctggtgtagtggtatcatgcaagattcccattcttgcg

SEQ ID NO: 17122 - DNA, 28 bp, Homo Sapiens
gcgcgcggtacttataatgccgaggttg

SEQ ID NO: 17123 - DNA, 30 bp, Homo Sapiens
gcgcgcggtacttataatgccgaggttgtg

SEQ ID NO: 17124 - DNA, 35 bp, Homo Sapiens
gcgcgtcagtctcataatctgaaggtcctgagttc

SEQ ID NO: 17125 - DNA, 18 bp, Homo Sapiens
gcgcgttcggctgttaac

SEQ ID NO: 17126 - DNA, 25 bp, Homo Sapiens
gcgcgttcggctgttaaccgaaagg

SEQ ID NO: 17127 - DNA, 16 bp, Homo Sapiens
gcgctctcaccgccgc

SEQ ID NO: 17128 - DNA, 17 bp, Homo Sapiens
gcgctctcaccgccgcg

SEQ ID NO: 17129 - DNA, 18 bp, Homo Sapiens
gcgctctcaccgccgcgg

SEQ ID NO: 17130 - DNA, 19 bp, Homo Sapiens
gcgctctcaccgccgcggc

SEQ ID NO: 17131 - DNA, 20 bp, Homo Sapiens
gcgctctcaccgccgcggcc

SEQ ID NO: 17132 - DNA, 21 bp, Homo Sapiens
gcgctctcaccgccgcggccc

SEQ ID NO: 17133 - DNA, 22 bp, Homo Sapiens
gcgctctcaccgccgcggcccg

SEQ ID NO: 17134 - DNA, 23 bp, Homo Sapiens
gcgctctcaccgccgcggcccgg

SEQ ID NO: 17135 - DNA, 24 bp, Homo Sapiens
gcgctctcaccgccgcggcccggg

SEQ ID NO: 17136 - DNA, 25 bp, Homo Sapiens
gcgctctcaccgccgcggcccgggt

SEQ ID NO: 17137 - DNA, 26 bp, Homo Sapiens
gcgctctcaccgccgcggcccgggtt

SEQ ID NO: 17138 - DNA, 27 bp, Homo Sapiens
gcgctctcaccgccgcggcccgggttc

SEQ ID NO: 17139 - DNA, 28 bp, Homo Sapiens
gcgctctcaccgccgcggcccgggttcg

SEQ ID NO: 17140 - DNA, 29 bp, Homo Sapiens
gcgctctcaccgccgcggcccgggttcga

SEQ ID NO: 17141 - DNA, 30 bp, Homo Sapiens
gcgctctcaccgccgcggcccgggttcgat

SEQ ID NO: 17142 - DNA, 31 bp, Homo Sapiens
gcgctctcaccgccgcggcccgggttcgatt

SEQ ID NO: 17143 - DNA, 32 bp, Homo Sapiens
gcgctctcaccgccgcggcccgggttcgattc

SEQ ID NO: 17144 - DNA, 33 bp, Homo Sapiens
gcgctctcaccgccgcggcccgggttcgattcc

SEQ ID NO: 17145 - DNA, 34 bp, Homo Sapiens
gcgctctcaccgccgcggcccgggttcgattccc

SEQ ID NO: 17146 - DNA, 41 bp, Homo Sapiens
gcgctctcaccgccgcggcccgggttcgattcccggtcagg

SEQ ID NO: 17147 - DNA, 43 bp, Homo Sapiens
gcgctctcaccgccgcggcccgggttcgattcccggtcaggga

SEQ ID NO: 17148 - DNA, 44 bp, Homo Sapiens
gcgctctcaccgccgcggcccgggttcgattcccggtcagggaa

SEQ ID NO: 17149 - DNA, 45 bp, Homo Sapiens
gcgctctcaccgccgcggcccgggttcgattcccggtcagggaac

SEQ ID NO: 17150 - DNA, 46 bp, Homo Sapiens
gcgctctcaccgccgcggcccgggttcgattcccggtcagggaacc

SEQ ID NO: 17151 - DNA, 47 bp, Homo Sapiens
gcgctctcaccgccgcggcccgggttcgattcccggtcagggaacca

SEQ ID NO: 17152 - DNA, 18 bp, Homo Sapiens
gcgctggatttaggctcc

SEQ ID NO: 17153 - DNA, 27 bp, Homo Sapiens
gcgctttcaccgccgcggcccgggttc

SEQ ID NO: 17154 - DNA, 45 bp, Homo Sapiens
gcgctttcaccgccgcggcccgggttcgattcccggtcagggaac

SEQ ID NO: 17155 - DNA, 47 bp, Homo Sapiens
gcgctttcaccgccgcggcccgggttcgattcccggtcagggaacca

SEQ ID NO: 17156 - DNA, 16 bp, Homo Sapiens
gcggaagcgtgctggg

SEQ ID NO: 17157 - DNA, 17 bp, Homo Sapiens
gcggaagcgtgctgggc

SEQ ID NO: 17158 - DNA, 18 bp, Homo Sapiens
gcggaagcgtgctgggcc

SEQ ID NO: 17159 - DNA, 19 bp, Homo Sapiens
gcggaagcgtgctgggccc

SEQ ID NO: 17160 - DNA, 20 bp, Homo Sapiens
gcggaagcgtgctgggccca

SEQ ID NO: 17161 - DNA, 21 bp, Homo Sapiens
gcggaagcgtgctgggcccat

SEQ ID NO: 17162 - DNA, 25 bp, Homo Sapiens
gcggaagcgtgctgggcccataacc

SEQ ID NO: 17163 - DNA, 26 bp, Homo Sapiens
gcggaagcgtgctgggcccataaccc

SEQ ID NO: 17164 - DNA, 28 bp, Homo Sapiens
gcggaagcgtgctgggcccataacccag

SEQ ID NO: 17165 - DNA, 29 bp, Homo Sapiens
gcggaagcgtgctgggcccataacccaga

SEQ ID NO: 17166 - DNA, 35 bp, Homo Sapiens
gcggaagcgtgctgggcccataacccagaggtcga

SEQ ID NO: 17167 - DNA, 37 bp, Homo Sapiens
gcggaagcgtgctgggcccataacccagaggtcgatg

SEQ ID NO: 17168 - DNA, 39 bp, Homo Sapiens
gcggaagcgtgctgggcccataacccagaggtcgatgga

SEQ ID NO: 17169 - DNA, 41 bp, Homo Sapiens
gcggaagcgtgctgggcccataacccagaggtcgatggatc

SEQ ID NO: 17170 - DNA, 16 bp, Homo Sapiens
gcggcccgggttcgac

SEQ ID NO: 17171 - DNA, 17 bp, Homo Sapiens
gcggcccgggttcgact

SEQ ID NO: 17172 - DNA, 18 bp, Homo Sapiens
gcggcccgggttcgactc

SEQ ID NO: 17173 - DNA, 19 bp, Homo Sapiens
gcggcccgggttcgactcc

SEQ ID NO: 17174 - DNA, 20 bp, Homo Sapiens
gcggcccgggttcgactccc

SEQ ID NO: 17175 - DNA, 22 bp, Homo Sapiens
gcggcccgggttcgactcccgg

SEQ ID NO: 17176 - DNA, 23 bp, Homo Sapiens
gcggcccgggttcgactcccggt

SEQ ID NO: 17177 - DNA, 24 bp, Homo Sapiens
gcggcccgggttcgactcccggtg

SEQ ID NO: 17178 - DNA, 25 bp, Homo Sapiens
gcggcccgggttcgactcccggtgt

SEQ ID NO: 17179 - DNA, 26 bp, Homo Sapiens
gcggcccgggttcgactcccggtgtg

SEQ ID NO: 17180 - DNA, 27 bp, Homo Sapiens
gcggcccgggttcgactcccggtgtgg

SEQ ID NO: 17181 - DNA, 28 bp, Homo Sapiens
gcggcccgggttcgactcccggtgtggg

SEQ ID NO: 17182 - DNA, 29 bp, Homo Sapiens
gcggcccgggttcgactcccggtgtggga

SEQ ID NO: 17183 - DNA, 30 bp, Homo Sapiens
gcggcccgggttcgactcccggtgtgggaa

SEQ ID NO: 17184 - DNA, 31 bp, Homo Sapiens
gcggcccgggttcgactcccggtgtgggaac

SEQ ID NO: 17185 - DNA, 32 bp, Homo Sapiens
gcggcccgggttcgactcccggtgtgggaacc

SEQ ID NO: 17186 - DNA, 33 bp, Homo Sapiens
gcggcccgggttcgactcccggtgtgggaacca

SEQ ID NO: 17187 - DNA, 16 bp, Homo Sapiens
gcggcccgggttcgat

SEQ ID NO: 17188 - DNA, 17 bp, Homo Sapiens
gcggcccgggttcgatt

SEQ ID NO: 17189 - DNA, 18 bp, Homo Sapiens
gcggcccgggttcgattc

SEQ ID NO: 17190 - DNA, 19 bp, Homo Sapiens
gcggcccgggttcgattcc

SEQ ID NO: 17191 - DNA, 20 bp, Homo Sapiens
gcggcccgggttcgattccc

SEQ ID NO: 17192 - DNA, 21 bp, Homo Sapiens
gcggcccgggttcgattcccg

SEQ ID NO: 17193 - DNA, 22 bp, Homo Sapiens
gcggcccgggttcgattcccgg

SEQ ID NO: 17194 - DNA, 23 bp, Homo Sapiens
gcggcccgggttcgattcccggt

SEQ ID NO: 17195 - DNA, 24 bp, Homo Sapiens
gcggcccgggttcgattcccggtc

SEQ ID NO: 17196 - DNA, 25 bp, Homo Sapiens
gcggcccgggttcgattcccggtca

SEQ ID NO: 17197 - DNA, 26 bp, Homo Sapiens
gcggcccgggttcgattcccggtcag

SEQ ID NO: 17198 - DNA, 27 bp, Homo Sapiens
gcggcccgggttcgattcccggtcagg

SEQ ID NO: 17199 - DNA, 28 bp, Homo Sapiens
gcggcccgggttcgattcccggtcaggg

SEQ ID NO: 17200 - DNA, 29 bp, Homo Sapiens
gcggcccgggttcgattcccggtcaggga

SEQ ID NO: 17201 - DNA, 30 bp, Homo Sapiens
gcggcccgggttcgattcccggtcagggaa

SEQ ID NO: 17202 - DNA, 31 bp, Homo Sapiens
gcggcccgggttcgattcccggtcagggaac

SEQ ID NO: 17203 - DNA, 32 bp, Homo Sapiens
gcggcccgggttcgattcccggtcagggaacc

SEQ ID NO: 17204 - DNA, 33 bp, Homo Sapiens
gcggcccgggttcgattcccggtcagggaacca

SEQ ID NO: 17205 - DNA, 36 bp, Homo Sapiens
gcgggagacccgggttcaattcccggccaatgcacc

SEQ ID NO: 17206 - DNA, 37 bp, Homo Sapiens
gcgggagacccgggttcaattcccggccaatgcacca

SEQ ID NO: 17207 - DNA, 16 bp, Homo Sapiens
gcgggagaccggggtt

SEQ ID NO: 17208 - DNA, 17 bp, Homo Sapiens
gcgggagaccggggttc

SEQ ID NO: 17209 - DNA, 27 bp, Homo Sapiens
gcgggagaccggggttcaattccccga

SEQ ID NO: 17210 - DNA, 28 bp, Homo Sapiens
gcgggagaccggggttcaattccccgac

SEQ ID NO: 17211 - DNA, 29 bp, Homo Sapiens
gcgggagaccggggttcaattccccgacg

SEQ ID NO: 17212 - DNA, 30 bp, Homo Sapiens
gcgggagaccggggttcaattccccgacgg

SEQ ID NO: 17213 - DNA, 31 bp, Homo Sapiens
gcgggagaccggggttcaattccccgacggg

SEQ ID NO: 17214 - DNA, 32 bp, Homo Sapiens
gcgggagaccggggttcaattccccgacgggg

SEQ ID NO: 17215 - DNA, 33 bp, Homo Sapiens
gcgggagaccggggttcaattccccgacgggga

SEQ ID NO: 17216 - DNA, 34 bp, Homo Sapiens
gcgggagaccggggttcaattccccgacggggag

SEQ ID NO: 17217 - DNA, 35 bp, Homo Sapiens
gcgggagaccggggttcaattccccgacggggagc

SEQ ID NO: 17218 - DNA, 36 bp, Homo Sapiens
gcgggagaccggggttcaattccccgacggggagcc

SEQ ID NO: 17219 - DNA, 37 bp, Homo Sapiens
gcgggagaccggggttcaattccccgacggggagcca

SEQ ID NO: 17220 - DNA, 20 bp, Homo Sapiens
gcgggagaccggggttcgat

SEQ ID NO: 17221 - DNA, 35 bp, Homo Sapiens
gcgggagaccggggttcgattccccaacggggagc

SEQ ID NO: 17222 - DNA, 36 bp, Homo Sapiens
gcgggagaccggggttcgattccccaacggggagcc

SEQ ID NO: 17223 - DNA, 37 bp, Homo Sapiens
gcgggagaccggggttcgattccccaacggggagcca

SEQ ID NO: 17224 - DNA, 26 bp, Homo Sapiens
gcgggagaccggggttcgattccccg

SEQ ID NO: 17225 - DNA, 27 bp, Homo Sapiens
gcgggagaccggggttcgattccccga

SEQ ID NO: 17226 - DNA, 28 bp, Homo Sapiens
gcgggagaccggggttcgattccccgac

SEQ ID NO: 17227 - DNA, 29 bp, Homo Sapiens
gcgggagaccggggttcgattccccgacg

SEQ ID NO: 17228 - DNA, 30 bp, Homo Sapiens
gcgggagaccggggttcgattccccgacgg

SEQ ID NO: 17229 - DNA, 31 bp, Homo Sapiens
gcgggagaccggggttcgattccccgacggg

SEQ ID NO: 17230 - DNA, 32 bp, Homo Sapiens
gcgggagaccggggttcgattccccgacgggg

SEQ ID NO: 17231 - DNA, 33 bp, Homo Sapiens
gcgggagaccggggttcgattccccgacgggga

SEQ ID NO: 17232 - DNA, 34 bp, Homo Sapiens
gcgggagaccggggttcgattccccgacggggag

SEQ ID NO: 17233 - DNA, 35 bp, Homo Sapiens
gcgggagaccggggttcgattccccgacggggagc

SEQ ID NO: 17234 - DNA, 36 bp, Homo Sapiens
gcgggagaccggggttcgattccccgacggggagcc

SEQ ID NO: 17235 - DNA, 37 bp, Homo Sapiens
gcgggagaccggggttcgattccccgacggggagcca

SEQ ID NO: 17236 - DNA, 16 bp, Homo Sapiens
gcgggaggcccgggtt

SEQ ID NO: 17237 - DNA, 18 bp, Homo Sapiens
gcgggaggcccgggttcg

SEQ ID NO: 17238 - DNA, 23 bp, Homo Sapiens
gcgggaggcccgggttcgattcc

SEQ ID NO: 17239 - DNA, 27 bp, Homo Sapiens
gcgggaggcccgggttcgattcccggc

SEQ ID NO: 17240 - DNA, 28 bp, Homo Sapiens
gcgggaggcccgggttcgattcccggcc

SEQ ID NO: 17241 - DNA, 30 bp, Homo Sapiens
gcgggaggcccgggttcgattcccggccaa

SEQ ID NO: 17242 - DNA, 31 bp, Homo Sapiens
gcgggaggcccgggttcgattcccggccaat

SEQ ID NO: 17243 - DNA, 32 bp, Homo Sapiens
gcgggaggcccgggttcgattcccggccaatg

SEQ ID NO: 17244 - DNA, 33 bp, Homo Sapiens
gcgggaggcccgggttcgattcccggccaatgc

SEQ ID NO: 17245 - DNA, 34 bp, Homo Sapiens
gcgggaggcccgggttcgattcccggccaatgca

SEQ ID NO: 17246 - DNA, 35 bp, Homo Sapiens
gcgggaggcccgggttcgattcccggccaatgcac

SEQ ID NO: 17247 - DNA, 36 bp, Homo Sapiens
gcgggaggcccgggttcgattcccggccaatgcacc

SEQ ID NO: 17248 - DNA, 37 bp, Homo Sapiens
gcgggaggcccgggttcgattcccggccaatgcacca

SEQ ID NO: 17249 - DNA, 32 bp, Homo Sapiens
gcgggaggcccgggttcgattcccggcccatg

SEQ ID NO: 17250 - DNA, 36 bp, Homo Sapiens
gcgggaggcccgggttcgattcccggcccatgcacc

SEQ ID NO: 17251 - DNA, 27 bp, Homo Sapiens
gcgggttcgaaccccgtccgtgcctcc

SEQ ID NO: 17252 - DNA, 25 bp, Homo Sapiens
gcgggttcgatccccgtacgggcca

SEQ ID NO: 17253 - DNA, 27 bp, Homo Sapiens
gcgggttcgatccccgtacgggccacc

SEQ ID NO: 17254 - DNA, 16 bp, Homo Sapiens
gcggtctaaggcgctg

SEQ ID NO: 17255 - DNA, 16 bp, Homo Sapiens
gcggttaggattcctg

SEQ ID NO: 17256 - DNA, 18 bp, Homo Sapiens
gcggttaggattcctggt

SEQ ID NO: 17257 - DNA, 19 bp, Homo Sapiens
gcggttaggattcctggtt

SEQ ID NO: 17258 - DNA, 20 bp, Homo Sapiens
gcggttaggattcctggttt

SEQ ID NO: 17259 - DNA, 21 bp, Homo Sapiens
gcggttaggattcctggtttt

SEQ ID NO: 17260 - DNA, 22 bp, Homo Sapiens
gcggttaggattcctggttttc

SEQ ID NO: 17261 - DNA, 23 bp, Homo Sapiens
gcggttaggattcctggttttca

SEQ ID NO: 17262 - DNA, 36 bp, Homo Sapiens
gcggttaggattcctggttttcacccaggcggcccg

SEQ ID NO: 17263 - DNA, 19 bp, Homo Sapiens
gcggttatcacattcgcct

SEQ ID NO: 17264 - DNA, 22 bp, Homo Sapiens
gcggttatcacattcgcctcac

SEQ ID NO: 17265 - DNA, 17 bp, Homo Sapiens
gcggttatcacgtctgc

SEQ ID NO: 17266 - DNA, 18 bp, Homo Sapiens
gcggttatcacgtctgct

SEQ ID NO: 17267 - DNA, 19 bp, Homo Sapiens
gcggttatcacgtctgctt

SEQ ID NO: 17268 - DNA, 20 bp, Homo Sapiens
gcggttatcacgtctgcttt

SEQ ID NO: 17269 - DNA, 21 bp, Homo Sapiens
gcggttatcacgtctgcttta

SEQ ID NO: 17270 - DNA, 22 bp, Homo Sapiens
gcggttatcacgtctgctttac

SEQ ID NO: 17271 - DNA, 18 bp, Homo Sapiens
gcgtgctgggcccataac

SEQ ID NO: 17272 - DNA, 19 bp, Homo Sapiens
gcgtgctgggcccataacc

SEQ ID NO: 17273 - DNA, 20 bp, Homo Sapiens
gcgtgctgggcccataaccc

SEQ ID NO: 17274 - DNA, 22 bp, Homo Sapiens
gcgtgctgggcccataacccag

SEQ ID NO: 17275 - DNA, 23 bp, Homo Sapiens
gcgtgctgggcccataacccaga

SEQ ID NO: 17276 - DNA, 28 bp, Homo Sapiens
gcgtgctgggcccataacccagaggtcg

SEQ ID NO: 17277 - DNA, 29 bp, Homo Sapiens
gcgtgctgggcccataacccagaggtcga

SEQ ID NO: 17278 - DNA, 30 bp, Homo Sapiens
gcgtgctgggcccataacccagaggtcgat

SEQ ID NO: 17279 - DNA, 31 bp, Homo Sapiens
gcgtgctgggcccataacccagaggtcgatg

SEQ ID NO: 17280 - DNA, 33 bp, Homo Sapiens
gcgtgctgggcccataacccagaggtcgatgga

SEQ ID NO: 17281 - DNA, 34 bp, Homo Sapiens
gcgtgctgggcccataacccagaggtcgatggat

SEQ ID NO: 17282 - DNA, 35 bp, Homo Sapiens
gcgtgctgggcccataacccagaggtcgatggatc

SEQ ID NO: 17283 - DNA, 36 bp, Homo Sapiens
gcgtgctgggcccataacccagaggtcgatggatcg

SEQ ID NO: 17284 - DNA, 16 bp, Homo Sapiens
gcgtggccgagcggtc

SEQ ID NO: 17285 - DNA, 17 bp, Homo Sapiens
gcgtggccgagcggtct

SEQ ID NO: 17286 - DNA, 18 bp, Homo Sapiens
gcgtggccgagcggtcta

SEQ ID NO: 17287 - DNA, 20 bp, Homo Sapiens
gcgtggccgagcggtctaag

SEQ ID NO: 17288 - DNA, 21 bp, Homo Sapiens
gcgtggccgagcggtctaagg

SEQ ID NO: 17289 - DNA, 22 bp, Homo Sapiens
gcgtggccgagcggtctaaggc

SEQ ID NO: 17290 - DNA, 20 bp, Homo Sapiens
gcgtggccgagtggtctaag

SEQ ID NO: 17291 - DNA, 27 bp, Homo Sapiens
gcgtggcctaatggataaggcgtctga

SEQ ID NO: 17292 - DNA, 29 bp, Homo Sapiens
gcgtggcctaatggataaggcgtctgact

SEQ ID NO: 17293 - DNA, 31 bp, Homo Sapiens
gcgtggcctaatggataaggcgtctgattcc

SEQ ID NO: 17294 - DNA, 32 bp, Homo Sapiens
gcgtggcctaatggataaggcgtctgattccg

SEQ ID NO: 17295 - DNA, 28 bp, Homo Sapiens
gcgtgggttcgaaccccacttctggtac

SEQ ID NO: 17296 - DNA, 27 bp, Homo Sapiens
gcgtgggttcgaatcccatcctcgtcg

SEQ ID NO: 17297 - DNA, 29 bp, Homo Sapiens
gcgtgggttcgaatcccatcctcgtcgcc

SEQ ID NO: 17298 - DNA, 30 bp, Homo Sapiens
gcgtgggttcgaatcccatcctcgtcgcca

SEQ ID NO: 17299 - DNA, 32 bp, Homo Sapiens
gcgtggtgctaataacgccaaggtcgcgggtt

SEQ ID NO: 17300 - DNA, 24 bp, Homo Sapiens
gcgtgttcaaatcacgtcggggtc

SEQ ID NO: 17301 - DNA, 24 bp, Homo Sapiens
gcgtgttcgaatcacgtcggggtc

SEQ ID NO: 17302 - DNA, 26 bp, Homo Sapiens
gcgtgttcgaatcacgtcggggtcac

SEQ ID NO: 17303 - DNA, 20 bp, Homo Sapiens
gcgttcaggtcgcagtctcc

SEQ ID NO: 17304 - DNA, 21 bp, Homo Sapiens
gcgttcaggtcgcagtctccc

SEQ ID NO: 17305 - DNA, 16 bp, Homo Sapiens
gcgttggtggtatagt

SEQ ID NO: 17306 - DNA, 17 bp, Homo Sapiens
gcgttggtggtatagtg

SEQ ID NO: 17307 - DNA, 18 bp, Homo Sapiens
gcgttggtggtatagtgg

SEQ ID NO: 17308 - DNA, 19 bp, Homo Sapiens
gcgttggtggtatagtggt

SEQ ID NO: 17309 - DNA, 20 bp, Homo Sapiens
gcgttggtggtatagtggta

SEQ ID NO: 17310 - DNA, 22 bp, Homo Sapiens
gcgttggtggtatagtggtaag

SEQ ID NO: 17311 - DNA, 23 bp, Homo Sapiens
gcgttggtggtatagtggtaagc

SEQ ID NO: 17312 - DNA, 24 bp, Homo Sapiens
gcgttggtggtatagtggtaagca

SEQ ID NO: 17313 - DNA, 26 bp, Homo Sapiens
gcgttggtggtatagtggtaagcata

SEQ ID NO: 17314 - DNA, 27 bp, Homo Sapiens
gcgttggtggtatagtggtaagcatag

SEQ ID NO: 17315 - DNA, 28 bp, Homo Sapiens
gcgttggtggtatagtggtaagcatagc

SEQ ID NO: 17316 - DNA, 29 bp, Homo Sapiens
gcgttggtggtatagtggtaagcatagct

SEQ ID NO: 17317 - DNA, 30 bp, Homo Sapiens
gcgttggtggtatagtggtaagcatagctg

SEQ ID NO: 17318 - DNA, 31 bp, Homo Sapiens
gcgttggtggtatagtggtaagcatagctgc

SEQ ID NO: 17319 - DNA, 32 bp, Homo Sapiens
gcgttggtggtatagtggtaagcatagctgcc

SEQ ID NO: 17320 - DNA, 33 bp, Homo Sapiens
gcgttggtggtatagtggtaagcatagctgcct

SEQ ID NO: 17321 - DNA, 34 bp, Homo Sapiens
gcgttggtggtatagtggtaagcatagctgcctt

SEQ ID NO: 17322 - DNA, 35 bp, Homo Sapiens
gcgttggtggtatagtggtaagcatagctgccttc

SEQ ID NO: 17323 - DNA, 36 bp, Homo Sapiens
gcgttggtggtatagtggtaagcatagctgccttcc

SEQ ID NO: 17324 - DNA, 37 bp, Homo Sapiens
gcgttggtggtatagtggtaagcatagctgccttcca

SEQ ID NO: 17325 - DNA, 40 bp, Homo Sapiens
gcgttggtggtatagtggtaagcatagctgccttccaagc

SEQ ID NO: 17326 - DNA, 20 bp, Homo Sapiens
gcgttggtggtatagtggtg

SEQ ID NO: 17327 - DNA, 22 bp, Homo Sapiens
gcgttggtggtatagtggtgag

SEQ ID NO: 17328 - DNA, 23 bp, Homo Sapiens
gcgttggtggtatagtggtgagc

SEQ ID NO: 17329 - DNA, 24 bp, Homo Sapiens
gcgttggtggtatagtggtgagca

SEQ ID NO: 17330 - DNA, 25 bp, Homo Sapiens
gcgttggtggtatagtggtgagcat

SEQ ID NO: 17331 - DNA, 26 bp, Homo Sapiens
gcgttggtggtatagtggtgagcata

SEQ ID NO: 17332 - DNA, 27 bp, Homo Sapiens
gcgttggtggtatagtggtgagcatag

SEQ ID NO: 17333 - DNA, 28 bp, Homo Sapiens
gcgttggtggtatagtggtgagcatagc

SEQ ID NO: 17334 - DNA, 29 bp, Homo Sapiens
gcgttggtggtatagtggtgagcatagct

SEQ ID NO: 17335 - DNA, 30 bp, Homo Sapiens
gcgttggtggtatagtggtgagcatagctg

SEQ ID NO: 17336 - DNA, 31 bp, Homo Sapiens
gcgttggtggtatagtggtgagcatagctgc

SEQ ID NO: 17337 - DNA, 32 bp, Homo Sapiens
gcgttggtggtatagtggtgagcatagctgcc

SEQ ID NO: 17338 - DNA, 33 bp, Homo Sapiens
gcgttggtggtatagtggtgagcatagctgcct

SEQ ID NO: 17339 - DNA, 34 bp, Homo Sapiens
gcgttggtggtatagtggtgagcatagctgcctt

SEQ ID NO: 17340 - DNA, 35 bp, Homo Sapiens
gcgttggtggtatagtggtgagcatagctgccttc

SEQ ID NO: 17341 - DNA, 36 bp, Homo Sapiens
gcgttggtggtatagtggtgagcatagctgccttcc

SEQ ID NO: 17342 - DNA, 37 bp, Homo Sapiens
gcgttggtggtatagtggtgagcatagctgccttcca

SEQ ID NO: 17343 - DNA, 38 bp, Homo Sapiens
gcgttggtggtatagtggtgagcatagctgccttccaa

SEQ ID NO: 17344 - DNA, 39 bp, Homo Sapiens
gcgttggtggtatagtggtgagcatagctgccttccaag

SEQ ID NO: 17345 - DNA, 40 bp, Homo Sapiens
gcgttggtggtatagtggtgagcatagctgccttccaagc

SEQ ID NO: 17346 - DNA, 45 bp, Homo Sapiens
gcgttggtggtatagtggtgagcatagctgccttccaagcagttg

SEQ ID NO: 17347 - DNA, 47 bp, Homo Sapiens
gcgttggtggtatagtggtgagcatagctgccttccaagcagttgac

SEQ ID NO: 17348 - DNA, 48 bp, Homo Sapiens
gcgttggtggtatagtggtgagcatagctgccttccaagcagttgacc

SEQ ID NO: 17349 - DNA, 20 bp, Homo Sapiens
gcgttggtggtatagtggtt

SEQ ID NO: 17350 - DNA, 21 bp, Homo Sapiens
gcgttggtggtatagtggtta

SEQ ID NO: 17351 - DNA, 22 bp, Homo Sapiens
gcgttggtggtatagtggttag

SEQ ID NO: 17352 - DNA, 23 bp, Homo Sapiens
gcgttggtggtatagtggttagc

SEQ ID NO: 17353 - DNA, 24 bp, Homo Sapiens
gcgttggtggtatagtggttagca

SEQ ID NO: 17354 - DNA, 26 bp, Homo Sapiens
gcgttggtggtatagtggttagcata

SEQ ID NO: 17355 - DNA, 27 bp, Homo Sapiens
gcgttggtggtatagtggttagcatag

SEQ ID NO: 17356 - DNA, 28 bp, Homo Sapiens
gcgttggtggtatagtggttagcatagc

SEQ ID NO: 17357 - DNA, 29 bp, Homo Sapiens
gcgttggtggtatagtggttagcatagct

SEQ ID NO: 17358 - DNA, 30 bp, Homo Sapiens
gcgttggtggtatagtggttagcatagctg

SEQ ID NO: 17359 - DNA, 31 bp, Homo Sapiens
gcgttggtggtatagtggttagcatagctgc

SEQ ID NO: 17360 - DNA, 32 bp, Homo Sapiens
gcgttggtggtatagtggttagcatagctgcc

SEQ ID NO: 17361 - DNA, 33 bp, Homo Sapiens
gcgttggtggtatagtggttagcatagctgcct

SEQ ID NO: 17362 - DNA, 34 bp, Homo Sapiens
gcgttggtggtatagtggttagcatagctgcctt

SEQ ID NO: 17363 - DNA, 35 bp, Homo Sapiens
gcgttggtggtatagtggttagcatagctgccttc

SEQ ID NO: 17364 - DNA, 36 bp, Homo Sapiens
gcgttggtggtatagtggttagcatagctgccttcc

SEQ ID NO: 17365 - DNA, 37 bp, Homo Sapiens
gcgttggtggtatagtggttagcatagctgccttcca

SEQ ID NO: 17366 - DNA, 38 bp, Homo Sapiens
gcgttggtggtatagtggttagcatagctgccttccaa

SEQ ID NO: 17367 - DNA, 40 bp, Homo Sapiens
gcgttggtggtatagtggttagcatagctgccttccaagc

SEQ ID NO: 17368 - DNA, 31 bp, Homo Sapiens
gcgttggtggtttagtggtagaattctcgcc

SEQ ID NO: 17369 - DNA, 32 bp, Homo Sapiens
gcgttggtggtttagtggtagaattctcgcct

SEQ ID NO: 17370 - DNA, 33 bp, Homo Sapiens
gcgttggtggtttagtggtagaattctcgcctc

SEQ ID NO: 17371 - DNA, 34 bp, Homo Sapiens
gcgttggtggtttagtggtagaattctcgcctcc

SEQ ID NO: 17372 - DNA, 23 bp, Homo Sapiens
gcgttgtggccgcagcaacctcg

SEQ ID NO: 17373 - DNA, 17 bp, Homo Sapiens
gctaaataagctatcgg

SEQ ID NO: 17374 - DNA, 18 bp, Homo Sapiens
gctaaataagctatcggg

SEQ ID NO: 17375 - DNA, 19 bp, Homo Sapiens
gctaaataagctatcgggc

SEQ ID NO: 17376 - DNA, 20 bp, Homo Sapiens
gctaaataagctatcgggcc

SEQ ID NO: 17377 - DNA, 21 bp, Homo Sapiens
gctaaataagctatcgggccc

SEQ ID NO: 17378 - DNA, 22 bp, Homo Sapiens
gctaaataagctatcgggccca

SEQ ID NO: 17379 - DNA, 23 bp, Homo Sapiens
gctaaataagctatcgggcccat

SEQ ID NO: 17380 - DNA, 24 bp, Homo Sapiens
gctaaataagctatcgggcccata

SEQ ID NO: 17381 - DNA, 25 bp, Homo Sapiens
gctaaataagctatcgggcccatac

SEQ ID NO: 17382 - DNA, 26 bp, Homo Sapiens
gctaaataagctatcgggcccatacc

SEQ ID NO: 17383 - DNA, 27 bp, Homo Sapiens
gctaaataagctatcgggcccataccc

SEQ ID NO: 17384 - DNA, 28 bp, Homo Sapiens
gctaaataagctatcgggcccatacccc

SEQ ID NO: 17385 - DNA, 30 bp, Homo Sapiens
gctaaataagctatcgggcccataccccga

SEQ ID NO: 17386 - DNA, 32 bp, Homo Sapiens
gctaaataagctatcgggcccataccccgaaa

SEQ ID NO: 17387 - DNA, 41 bp, Homo Sapiens
gctaaataagctatcgggcccataccccgaaaatgttggtt

SEQ ID NO: 17388 - DNA, 43 bp, Homo Sapiens
gctaaataagctatcgggcccataccccgaaaatgttggttat

SEQ ID NO: 17389 - DNA, 17 bp, Homo Sapiens
gctaaatcctatatatc

SEQ ID NO: 17390 - DNA, 18 bp, Homo Sapiens
gctaaatcctatatatct

SEQ ID NO: 17391 - DNA, 20 bp, Homo Sapiens
gctaaatcctatatatctta

SEQ ID NO: 17392 - DNA, 21 bp, Homo Sapiens
gctaaatcctatatatcttac

SEQ ID NO: 17393 - DNA, 22 bp, Homo Sapiens
gctaaatcctatatatcttacc

SEQ ID NO: 17394 - DNA, 23 bp, Homo Sapiens
gctaaatcctatatatcttacca

SEQ ID NO: 17395 - DNA, 16 bp, Homo Sapiens
gctaactcatgccccc

SEQ ID NO: 17396 - DNA, 21 bp, Homo Sapiens
gctaactcatgcccccatgtc

SEQ ID NO: 17397 - DNA, 22 bp, Homo Sapiens
gctaactcatgcccccatgtct

SEQ ID NO: 17398 - DNA, 23 bp, Homo Sapiens
gctaactcatgcccccatgtcta

SEQ ID NO: 17399 - DNA, 24 bp, Homo Sapiens
gctaactcatgcccccatgtctaa

SEQ ID NO: 17400 - DNA, 25 bp, Homo Sapiens
gctaactcatgcccccatgtctaac

SEQ ID NO: 17401 - DNA, 26 bp, Homo Sapiens
gctaactcatgcccccatgtctaaca

SEQ ID NO: 17402 - DNA, 28 bp, Homo Sapiens
gctaactcatgcccccatgtctaacaac

SEQ ID NO: 17403 - DNA, 29 bp, Homo Sapiens
gctaactcatgcccccatgtctaacaaca

SEQ ID NO: 17404 - DNA, 30 bp, Homo Sapiens
gctaactcatgcccccatgtctaacaacat

SEQ ID NO: 17405 - DNA, 34 bp, Homo Sapiens
gctaactcatgcccccatgtctaacaacatggct

SEQ ID NO: 17406 - DNA, 35 bp, Homo Sapiens
gctaactcatgcccccatgtctaacaacatggctt

SEQ ID NO: 17407 - DNA, 37 bp, Homo Sapiens
gctaactcatgcccccatgtctaacaacatggctttc

SEQ ID NO: 17408 - DNA, 38 bp, Homo Sapiens
gctaactcatgcccccatgtctaacaacatggctttct

SEQ ID NO: 17409 - DNA, 39 bp, Homo Sapiens
gctaactcatgcccccatgtctaacaacatggctttctc

SEQ ID NO: 17410 - DNA, 40 bp, Homo Sapiens
gctaactcatgcccccatgtctaacaacatggctttctca

SEQ ID NO: 17411 - DNA, 41 bp, Homo Sapiens
gctaactcatgcccccatgtctaacaacatggctttctcac

SEQ ID NO: 17412 - DNA, 42 bp, Homo Sapiens
gctaactcatgcccccatgtctaacaacatggctttctcacc

SEQ ID NO: 17413 - DNA, 43 bp, Homo Sapiens
gctaactcatgcccccatgtctaacaacatggctttctcacca

SEQ ID NO: 17414 - DNA, 16 bp, Homo Sapiens
gctaatccattgtgct

SEQ ID NO: 17415 - DNA, 16 bp, Homo Sapiens
gctaatggtggagtta

SEQ ID NO: 17416 - DNA, 17 bp, Homo Sapiens
gctaatggtggagttaa

SEQ ID NO: 17417 - DNA, 18 bp, Homo Sapiens
gctaatggtggagttaaa

SEQ ID NO: 17418 - DNA, 19 bp, Homo Sapiens
gctaatggtggagttaaag

SEQ ID NO: 17419 - DNA, 20 bp, Homo Sapiens
gctaatggtggagttaaaga

SEQ ID NO: 17420 - DNA, 21 bp, Homo Sapiens
gctaatggtggagttaaagac

SEQ ID NO: 17421 - DNA, 22 bp, Homo Sapiens
gctaatggtggagttaaagact

SEQ ID NO: 17422 - DNA, 23 bp, Homo Sapiens
gctaatggtggagttaaagactt

SEQ ID NO: 17423 - DNA, 24 bp, Homo Sapiens
gctaatggtggagttaaagacttt

SEQ ID NO: 17424 - DNA, 25 bp, Homo Sapiens
gctaatggtggagttaaagactttt

SEQ ID NO: 17425 - DNA, 26 bp, Homo Sapiens
gctaatggtggagttaaagacttttt

SEQ ID NO: 17426 - DNA, 28 bp, Homo Sapiens
gctaatggtggagttaaagactttttct

SEQ ID NO: 17427 - DNA, 29 bp, Homo Sapiens
gctaatggtggagttaaagactttttctc

SEQ ID NO: 17428 - DNA, 31 bp, Homo Sapiens
gctaatggtggagttaaagactttttctctg

SEQ ID NO: 17429 - DNA, 32 bp, Homo Sapiens
gctaatggtggagttaaagactttttctctga

SEQ ID NO: 17430 - DNA, 33 bp, Homo Sapiens
gctaatggtggagttaaagactttttctctgac

SEQ ID NO: 17431 - DNA, 34 bp, Homo Sapiens
gctaatggtggagttaaagactttttctctgacc

SEQ ID NO: 17432 - DNA, 35 bp, Homo Sapiens
gctaatggtggagttaaagactttttctctgacca

SEQ ID NO: 17433 - DNA, 16 bp, Homo Sapiens
gctagctcagtcggta

SEQ ID NO: 17434 - DNA, 17 bp, Homo Sapiens
gctagctcagtcggtag

SEQ ID NO: 17435 - DNA, 18 bp, Homo Sapiens
gctagctcagtcggtaga

SEQ ID NO: 17436 - DNA, 19 bp, Homo Sapiens
gctagctcagtcggtagag

SEQ ID NO: 17437 - DNA, 20 bp, Homo Sapiens
gctagctcagtcggtagagc

SEQ ID NO: 17438 - DNA, 23 bp, Homo Sapiens
gctagctcagtcggtagagcatg

SEQ ID NO: 17439 - DNA, 25 bp, Homo Sapiens
gctagctcagtcggtagagcatgag

SEQ ID NO: 17440 - DNA, 26 bp, Homo Sapiens
gctagctcagtcggtagagcatgaga

SEQ ID NO: 17441 - DNA, 27 bp, Homo Sapiens
gctagctcagtcggtagagcatgagac

SEQ ID NO: 17442 - DNA, 29 bp, Homo Sapiens
gctagctcagtcggtagagcatgagaccc

SEQ ID NO: 17443 - DNA, 30 bp, Homo Sapiens
gctagctcagtcggtagagcatgagaccct

SEQ ID NO: 17444 - DNA, 28 bp, Homo Sapiens
gctagctcagtcggtagagcatgagact

SEQ ID NO: 17445 - DNA, 29 bp, Homo Sapiens
gctagctcagtcggtagagcatgagactc

SEQ ID NO: 17446 - DNA, 30 bp, Homo Sapiens
gctagctcagtcggtagagcatgagactct

SEQ ID NO: 17447 - DNA, 31 bp, Homo Sapiens
gctagctcagtcggtagagcatgagactctt

SEQ ID NO: 17448 - DNA, 32 bp, Homo Sapiens
gctagctcagtcggtagagcatgagactctta

SEQ ID NO: 17449 - DNA, 33 bp, Homo Sapiens
gctagctcagtcggtagagcatgagactcttaa

SEQ ID NO: 17450 - DNA, 34 bp, Homo Sapiens
gctagctcagtcggtagagcatgagactcttaat

SEQ ID NO: 17451 - DNA, 35 bp, Homo Sapiens
gctagctcagtcggtagagcatgagactcttaatc

SEQ ID NO: 17452 - DNA, 36 bp, Homo Sapiens
gctagctcagtcggtagagcatgagactcttaatct

SEQ ID NO: 17453 - DNA, 44 bp, Homo Sapiens
gctagctcagtcggtagagcatgagactcttaatctcagggtcg

SEQ ID NO: 17454 - DNA, 46 bp, Homo Sapiens
gctagctcagtcggtagagcatgagactcttaatctcagggtcgtg

SEQ ID NO: 17455 - DNA, 47 bp, Homo Sapiens
gctagctcagtcggtagagcatgagactcttaatctcagggtcgtgg

SEQ ID NO: 17456 - DNA, 48 bp, Homo Sapiens
gctagctcagtcggtagagcatgagactcttaatctcagggtcgtggg

SEQ ID NO: 17457 - DNA, 25 bp, Homo Sapiens
gctagctcagtcggtagagcatggg

SEQ ID NO: 17458 - DNA, 26 bp, Homo Sapiens
gctagctcagtcggtagagcatggga

SEQ ID NO: 17459 - DNA, 27 bp, Homo Sapiens
gctagctcagtcggtagagcatgggac

SEQ ID NO: 17460 - DNA, 28 bp, Homo Sapiens
gctagctcagtcggtagagcatgggact

SEQ ID NO: 17461 - DNA, 29 bp, Homo Sapiens
gctagctcagtcggtagagcatgggactc

SEQ ID NO: 17462 - DNA, 30 bp, Homo Sapiens
gctagctcagtcggtagagcatgggactct

SEQ ID NO: 17463 - DNA, 31 bp, Homo Sapiens
gctagctcagtcggtagagcatgggactctt

SEQ ID NO: 17464 - DNA, 32 bp, Homo Sapiens
gctagctcagtcggtagagcatgggactctta

SEQ ID NO: 17465 - DNA, 33 bp, Homo Sapiens
gctagctcagtcggtagagcatgggactcttaa

SEQ ID NO: 17466 - DNA, 34 bp, Homo Sapiens
gctagctcagtcggtagagcatgggactcttaat

SEQ ID NO: 17467 - DNA, 35 bp, Homo Sapiens
gctagctcagtcggtagagcatgggactcttaatc

SEQ ID NO: 17468 - DNA, 36 bp, Homo Sapiens
gctagctcagtcggtagagcatgggactcttaatcc

SEQ ID NO: 17469 - DNA, 37 bp, Homo Sapiens
gctagctcagtcggtagagcatgggactcttaatccc

SEQ ID NO: 17470 - DNA, 44 bp, Homo Sapiens
gctagctcagtcggtagagcatgggactcttaatcccagggtcg

SEQ ID NO: 17471 - DNA, 45 bp, Homo Sapiens
gctagctcagtcggtagagcatgggactcttaatcccagggtcgt

SEQ ID NO: 17472 - DNA, 46 bp, Homo Sapiens
gctagctcagtcggtagagcatgggactcttaatcccagggtcgtg

SEQ ID NO: 17473 - DNA, 47 bp, Homo Sapiens
gctagctcagtcggtagagcatgggactcttaatcccagggtcgtgg

SEQ ID NO: 17474 - DNA, 48 bp, Homo Sapiens
gctagctcagtcggtagagcatgggactcttaatcccagggtcgtggg

SEQ ID NO: 17475 - DNA, 16 bp, Homo Sapiens
gctaggattcggcgct

SEQ ID NO: 17476 - DNA, 17 bp, Homo Sapiens
gctaggattcggcgctt

SEQ ID NO: 17477 - DNA, 18 bp, Homo Sapiens
gctaggattcggcgcttt

SEQ ID NO: 17478 - DNA, 19 bp, Homo Sapiens
gctaggattcggcgctttc

SEQ ID NO: 17479 - DNA, 22 bp, Homo Sapiens
gctaggattcggcgctttcacc

SEQ ID NO: 17480 - DNA, 16 bp, Homo Sapiens
gctatccattggtctt

SEQ ID NO: 17481 - DNA, 17 bp, Homo Sapiens
gctatccattggtctta

SEQ ID NO: 17482 - DNA, 18 bp, Homo Sapiens
gctatccattggtcttag

SEQ ID NO: 17483 - DNA, 21 bp, Homo Sapiens
gctatccattggtcttaggcc

SEQ ID NO: 17484 - DNA, 22 bp, Homo Sapiens
gctatccattggtcttaggccc

SEQ ID NO: 17485 - DNA, 28 bp, Homo Sapiens
gctatccattggtcttaggccccaaaaa

SEQ ID NO: 17486 - DNA, 16 bp, Homo Sapiens
gctatcgggcccatac

SEQ ID NO: 17487 - DNA, 17 bp, Homo Sapiens
gctatcgggcccatacc

SEQ ID NO: 17488 - DNA, 18 bp, Homo Sapiens
gctatcgggcccataccc

SEQ ID NO: 17489 - DNA, 19 bp, Homo Sapiens
gctatcgggcccatacccc

SEQ ID NO: 17490 - DNA, 20 bp, Homo Sapiens
gctatcgggcccataccccg

SEQ ID NO: 17491 - DNA, 21 bp, Homo Sapiens
gctatcgggcccataccccga

SEQ ID NO: 17492 - DNA, 22 bp, Homo Sapiens
gctatcgggcccataccccgaa

SEQ ID NO: 17493 - DNA, 23 bp, Homo Sapiens
gctatcgggcccataccccgaaa

SEQ ID NO: 17494 - DNA, 24 bp, Homo Sapiens
gctatcgggcccataccccgaaaa

SEQ ID NO: 17495 - DNA, 25 bp, Homo Sapiens
gctatcgggcccataccccgaaaat

SEQ ID NO: 17496 - DNA, 26 bp, Homo Sapiens
gctatcgggcccataccccgaaaatg

SEQ ID NO: 17497 - DNA, 28 bp, Homo Sapiens
gctatcgggcccataccccgaaaatgtt

SEQ ID NO: 17498 - DNA, 29 bp, Homo Sapiens
gctatcgggcccataccccgaaaatgttg

SEQ ID NO: 17499 - DNA, 30 bp, Homo Sapiens
gctatcgggcccataccccgaaaatgttgg

SEQ ID NO: 17500 - DNA, 31 bp, Homo Sapiens
gctatcgggcccataccccgaaaatgttggt

SEQ ID NO: 17501 - DNA, 32 bp, Homo Sapiens
gctatcgggcccataccccgaaaatgttggtt

SEQ ID NO: 17502 - DNA, 33 bp, Homo Sapiens
gctatcgggcccataccccgaaaatgttggtta

SEQ ID NO: 17503 - DNA, 34 bp, Homo Sapiens
gctatcgggcccataccccgaaaatgttggttat

SEQ ID NO: 17504 - DNA, 35 bp, Homo Sapiens
gctatcgggcccataccccgaaaatgttggttata

SEQ ID NO: 17505 - DNA, 36 bp, Homo Sapiens
gctatcgggcccataccccgaaaatgttggttatac

SEQ ID NO: 17506 - DNA, 37 bp, Homo Sapiens
gctatcgggcccataccccgaaaatgttggttatacc

SEQ ID NO: 17507 - DNA, 16 bp, Homo Sapiens
gctcacaagaactgct

SEQ ID NO: 17508 - DNA, 17 bp, Homo Sapiens
gctcacaagaactgcta

SEQ ID NO: 17509 - DNA, 18 bp, Homo Sapiens
gctcacaagaactgctaa

SEQ ID NO: 17510 - DNA, 19 bp, Homo Sapiens
gctcacaagaactgctaac

SEQ ID NO: 17511 - DNA, 20 bp, Homo Sapiens
gctcacaagaactgctaact

SEQ ID NO: 17512 - DNA, 21 bp, Homo Sapiens
gctcacaagaactgctaactc

SEQ ID NO: 17513 - DNA, 22 bp, Homo Sapiens
gctcacaagaactgctaactca

SEQ ID NO: 17514 - DNA, 23 bp, Homo Sapiens
gctcacaagaactgctaactcat

SEQ ID NO: 17515 - DNA, 24 bp, Homo Sapiens
gctcacaagaactgctaactcatg

SEQ ID NO: 17516 - DNA, 25 bp, Homo Sapiens
gctcacaagaactgctaactcatgc

SEQ ID NO: 17517 - DNA, 26 bp, Homo Sapiens
gctcacaagaactgctaactcatgcc

SEQ ID NO: 17518 - DNA, 27 bp, Homo Sapiens
gctcacaagaactgctaactcatgccc

SEQ ID NO: 17519 - DNA, 28 bp, Homo Sapiens
gctcacaagaactgctaactcatgcccc

SEQ ID NO: 17520 - DNA, 29 bp, Homo Sapiens
gctcacaagaactgctaactcatgccccc

SEQ ID NO: 17521 - DNA, 30 bp, Homo Sapiens
gctcacaagaactgctaactcatgccccca

SEQ ID NO: 17522 - DNA, 31 bp, Homo Sapiens
gctcacaagaactgctaactcatgcccccat

SEQ ID NO: 17523 - DNA, 32 bp, Homo Sapiens
gctcacaagaactgctaactcatgcccccatg

SEQ ID NO: 17524 - DNA, 33 bp, Homo Sapiens
gctcacaagaactgctaactcatgcccccatgt

SEQ ID NO: 17525 - DNA, 34 bp, Homo Sapiens
gctcacaagaactgctaactcatgcccccatgtc

SEQ ID NO: 17526 - DNA, 35 bp, Homo Sapiens
gctcacaagaactgctaactcatgcccccatgtct

SEQ ID NO: 17527 - DNA, 36 bp, Homo Sapiens
gctcacaagaactgctaactcatgcccccatgtcta

SEQ ID NO: 17528 - DNA, 37 bp, Homo Sapiens
gctcacaagaactgctaactcatgcccccatgtctaa

SEQ ID NO: 17529 - DNA, 38 bp, Homo Sapiens
gctcacaagaactgctaactcatgcccccatgtctaac

SEQ ID NO: 17530 - DNA, 39 bp, Homo Sapiens
gctcacaagaactgctaactcatgcccccatgtctaaca

SEQ ID NO: 17531 - DNA, 41 bp, Homo Sapiens
gctcacaagaactgctaactcatgcccccatgtctaacaac

SEQ ID NO: 17532 - DNA, 42 bp, Homo Sapiens
gctcacaagaactgctaactcatgcccccatgtctaacaaca

SEQ ID NO: 17533 - DNA, 43 bp, Homo Sapiens
gctcacaagaactgctaactcatgcccccatgtctaacaacat

SEQ ID NO: 17534 - DNA, 44 bp, Homo Sapiens
gctcacaagaactgctaactcatgcccccatgtctaacaacatg

SEQ ID NO: 17535 - DNA, 45 bp, Homo Sapiens
gctcacaagaactgctaactcatgcccccatgtctaacaacatgg

SEQ ID NO: 17536 - DNA, 46 bp, Homo Sapiens
gctcacaagaactgctaactcatgcccccatgtctaacaacatggc

SEQ ID NO: 17537 - DNA, 47 bp, Homo Sapiens
gctcacaagaactgctaactcatgcccccatgtctaacaacatggct

SEQ ID NO: 17538 - DNA, 48 bp, Homo Sapiens
gctcacaagaactgctaactcatgcccccatgtctaacaacatggctt

SEQ ID NO: 17539 - DNA, 17 bp, Homo Sapiens
gctcacatcaccccata

SEQ ID NO: 17540 - DNA, 18 bp, Homo Sapiens
gctcacatcaccccataa

SEQ ID NO: 17541 - DNA, 19 bp, Homo Sapiens
gctcacatcaccccataaa

SEQ ID NO: 17542 - DNA, 20 bp, Homo Sapiens
gctcacatcaccccataaac

SEQ ID NO: 17543 - DNA, 21 bp, Homo Sapiens
gctcacatcaccccataaaca

SEQ ID NO: 17544 - DNA, 22 bp, Homo Sapiens
gctcacatcaccccataaacac

SEQ ID NO: 17545 - DNA, 23 bp, Homo Sapiens
gctcacatcaccccataaacacc

SEQ ID NO: 17546 - DNA, 24 bp, Homo Sapiens
gctcacatcaccccataaacacca

SEQ ID NO: 17547 - DNA, 23 bp, Homo Sapiens
gctcaggggtagagcatttgact

SEQ ID NO: 17548 - DNA, 20 bp, Homo Sapiens
gctcaggggttagagcactg

SEQ ID NO: 17549 - DNA, 23 bp, Homo Sapiens
gctcaggggttagagcactggtc

SEQ ID NO: 17550 - DNA, 24 bp, Homo Sapiens
gctcaggggttagagcactggtct

SEQ ID NO: 17551 - DNA, 32 bp, Homo Sapiens
gctcaggggttagagcactggtcttgtaaacc

SEQ ID NO: 17552 - DNA, 17 bp, Homo Sapiens
gctcagtcggtagagca

SEQ ID NO: 17553 - DNA, 19 bp, Homo Sapiens
gctcagtcggtagagcatc

SEQ ID NO: 17554 - DNA, 23 bp, Homo Sapiens
gctcagtcggtagagcatcagac

SEQ ID NO: 17555 - DNA, 24 bp, Homo Sapiens
gctcagtcggtagagcatcagact

SEQ ID NO: 17556 - DNA, 26 bp, Homo Sapiens
gctcagtcggtagagcatcagacttt

SEQ ID NO: 17557 - DNA, 27 bp, Homo Sapiens
gctcagtcggtagagcatcagactttt

SEQ ID NO: 17558 - DNA, 19 bp, Homo Sapiens
gctcagtcggtagagcatg

SEQ ID NO: 17559 - DNA, 23 bp, Homo Sapiens
gctcagtcggtagagcatgagac

SEQ ID NO: 17560 - DNA, 25 bp, Homo Sapiens
gctcagtcggtagagcatgagaccc

SEQ ID NO: 17561 - DNA, 26 bp, Homo Sapiens
gctcagtcggtagagcatgagaccct

SEQ ID NO: 17562 - DNA, 24 bp, Homo Sapiens
gctcagtcggtagagcatgagact

SEQ ID NO: 17563 - DNA, 25 bp, Homo Sapiens
gctcagtcggtagagcatgagactc

SEQ ID NO: 17564 - DNA, 26 bp, Homo Sapiens
gctcagtcggtagagcatgagactct

SEQ ID NO: 17565 - DNA, 27 bp, Homo Sapiens
gctcagtcggtagagcatgagactctt

SEQ ID NO: 17566 - DNA, 29 bp, Homo Sapiens
gctcagtcggtagagcatgagactcttaa

SEQ ID NO: 17567 - DNA, 30 bp, Homo Sapiens
gctcagtcggtagagcatgagactcttaat

SEQ ID NO: 17568 - DNA, 31 bp, Homo Sapiens
gctcagtcggtagagcatgagactcttaatc

SEQ ID NO: 17569 - DNA, 32 bp, Homo Sapiens
gctcagtcggtagagcatgagactcttaatct

SEQ ID NO: 17570 - DNA, 33 bp, Homo Sapiens
gctcagtcggtagagcatgagactcttaatctc

SEQ ID NO: 17571 - DNA, 43 bp, Homo Sapiens
gctcagtcggtagagcatgagactcttaatctcagggtcgtgg

SEQ ID NO: 17572 - DNA, 46 bp, Homo Sapiens
gctcagtcggtagagcatgagactcttaatctcagggtcgtgggtt

SEQ ID NO: 17573 - DNA, 21 bp, Homo Sapiens
gctcagtcggtagagcatggg

SEQ ID NO: 17574 - DNA, 22 bp, Homo Sapiens
gctcagtcggtagagcatggga

SEQ ID NO: 17575 - DNA, 23 bp, Homo Sapiens
gctcagtcggtagagcatgggac

SEQ ID NO: 17576 - DNA, 24 bp, Homo Sapiens
gctcagtcggtagagcatgggact

SEQ ID NO: 17577 - DNA, 25 bp, Homo Sapiens
gctcagtcggtagagcatgggactc

SEQ ID NO: 17578 - DNA, 26 bp, Homo Sapiens
gctcagtcggtagagcatgggactct

SEQ ID NO: 17579 - DNA, 27 bp, Homo Sapiens
gctcagtcggtagagcatgggactctt

SEQ ID NO: 17580 - DNA, 28 bp, Homo Sapiens
gctcagtcggtagagcatgggactctta

SEQ ID NO: 17581 - DNA, 30 bp, Homo Sapiens
gctcagtcggtagagcatgggactcttaat

SEQ ID NO: 17582 - DNA, 31 bp, Homo Sapiens
gctcagtcggtagagcatgggactcttaatc

SEQ ID NO: 17583 - DNA, 32 bp, Homo Sapiens
gctcagtcggtagagcatgggactcttaatcc

SEQ ID NO: 17584 - DNA, 33 bp, Homo Sapiens
gctcagtcggtagagcatgggactcttaatccc

SEQ ID NO: 17585 - DNA, 42 bp, Homo Sapiens
gctcagtcggtagagcatgggactcttaatcccagggtcgtg

SEQ ID NO: 17586 - DNA, 43 bp, Homo Sapiens
gctcagtcggtagagcatgggactcttaatcccagggtcgtgg

SEQ ID NO: 17587 - DNA, 46 bp, Homo Sapiens
gctcagtcggtagagcatgggactcttaatcccagggtcgtgggtt

SEQ ID NO: 17588 - DNA, 32 bp, Homo Sapiens
gctcagtcggtagagcatgggactcttaatct

SEQ ID NO: 17589 - DNA, 46 bp, Homo Sapiens
gctcagtcggtagagcatgggactcttaatctcagggtcgtgggtt

SEQ ID NO: 17590 - DNA, 23 bp, Homo Sapiens
gctcagtggtagagcatttgact

SEQ ID NO: 17591 - DNA, 24 bp, Homo Sapiens
gctcagtggtagagcatttgactg

SEQ ID NO: 17592 - DNA, 25 bp, Homo Sapiens
gctcagtggtagagcatttgactgc

SEQ ID NO: 17593 - DNA, 26 bp, Homo Sapiens
gctcagtggtagagcatttgactgca

SEQ ID NO: 17594 - DNA, 47 bp, Homo Sapiens
gctccagtcatttcgatggcgtgggttcgaatcccaccgctgccacc

SEQ ID NO: 17595 - DNA, 23 bp, Homo Sapiens
gctccagtctcttcggaggcgtg

SEQ ID NO: 17596 - DNA, 24 bp, Homo Sapiens
gctccagtctcttcggaggcgtgg

SEQ ID NO: 17597 - DNA, 46 bp, Homo Sapiens
gctccagtctcttcggaggcgtgggttcgaatcccaccgctgccac

SEQ ID NO: 17598 - DNA, 23 bp, Homo Sapiens
gctccagtctcttcgggggcgtg

SEQ ID NO: 17599 - DNA, 26 bp, Homo Sapiens
gctccagtctcttcgggggcgtgggt

SEQ ID NO: 17600 - DNA, 45 bp, Homo Sapiens
gctccagtctcttcgggggcgtgggttcgaatcccaccgctgcca

SEQ ID NO: 17601 - DNA, 47 bp, Homo Sapiens
gctccagtctcttcgggggcgtgggttcgaatcccaccgctgccacc

SEQ ID NO: 17602 - DNA, 48 bp, Homo Sapiens
gctccagtctcttcgggggcgtgggttcgaatcccaccgctgccacca

SEQ ID NO: 17603 - DNA, 19 bp, Homo Sapiens
gctccagtggcgcaatcgg

SEQ ID NO: 17604 - DNA, 20 bp, Homo Sapiens
gctccagtggcgcaatcggt

SEQ ID NO: 17605 - DNA, 23 bp, Homo Sapiens
gctccagtggcgcaatcggttag

SEQ ID NO: 17606 - DNA, 25 bp, Homo Sapiens
gctccagtggcgcaatcggttagcg

SEQ ID NO: 17607 - DNA, 27 bp, Homo Sapiens
gctccagtggcgcaatcggttagcgcg

SEQ ID NO: 17608 - DNA, 33 bp, Homo Sapiens
gctccagtggcgcaatcggttagcgcgcggtac

SEQ ID NO: 17609 - DNA, 34 bp, Homo Sapiens
gctccagtggcgcaatcggttagcgcgcggtact

SEQ ID NO: 17610 - DNA, 35 bp, Homo Sapiens
gctccagtggcgcaatcggttagcgcgcggtactt

SEQ ID NO: 17611 - DNA, 36 bp, Homo Sapiens
gctccagtggcgcaatcggttagcgcgcggtactta

SEQ ID NO: 17612 - DNA, 37 bp, Homo Sapiens
gctccagtggcgcaatcggttagcgcgcggtacttat

SEQ ID NO: 17613 - DNA, 16 bp, Homo Sapiens
gctccatagctcaggg

SEQ ID NO: 17614 - DNA, 18 bp, Homo Sapiens
gctccatagctcaggggt

SEQ ID NO: 17615 - DNA, 28 bp, Homo Sapiens
gctccatagctcaggggttagagcactg

SEQ ID NO: 17616 - DNA, 32 bp, Homo Sapiens
gctccatagctcaggggttagagcactggtct

SEQ ID NO: 17617 - DNA, 16 bp, Homo Sapiens
gctccgaggtgatttt

SEQ ID NO: 17618 - DNA, 17 bp, Homo Sapiens
gctccgaggtgattttc

SEQ ID NO: 17619 - DNA, 18 bp, Homo Sapiens
gctccgaggtgattttca

SEQ ID NO: 17620 - DNA, 19 bp, Homo Sapiens
gctccgaggtgattttcat

SEQ ID NO: 17621 - DNA, 20 bp, Homo Sapiens
gctccgaggtgattttcata

SEQ ID NO: 17622 - DNA, 21 bp, Homo Sapiens
gctccgaggtgattttcatat

SEQ ID NO: 17623 - DNA, 22 bp, Homo Sapiens
gctccgaggtgattttcatatt

SEQ ID NO: 17624 - DNA, 23 bp, Homo Sapiens
gctccgaggtgattttcatattg

SEQ ID NO: 17625 - DNA, 24 bp, Homo Sapiens
gctccgaggtgattttcatattga

SEQ ID NO: 17626 - DNA, 26 bp, Homo Sapiens
gctccgaggtgattttcatattgaat

SEQ ID NO: 17627 - DNA, 27 bp, Homo Sapiens
gctccgaggtgattttcatattgaatt

SEQ ID NO: 17628 - DNA, 28 bp, Homo Sapiens
gctccgaggtgattttcatattgaattg

SEQ ID NO: 17629 - DNA, 29 bp, Homo Sapiens
gctccgaggtgattttcatattgaattgc

SEQ ID NO: 17630 - DNA, 30 bp, Homo Sapiens
gctccgaggtgattttcatattgaattgca

SEQ ID NO: 17631 - DNA, 33 bp, Homo Sapiens
gctccgaggtgattttcatattgaattgcaaat

SEQ ID NO: 17632 - DNA, 35 bp, Homo Sapiens
gctccgaggtgattttcatattgaattgcaaattc

SEQ ID NO: 17633 - DNA, 36 bp, Homo Sapiens
gctccgaggtgattttcatattgaattgcaaattcg

SEQ ID NO: 17634 - DNA, 38 bp, Homo Sapiens
gctccgaggtgattttcatattgaattgcaaattcgaa

SEQ ID NO: 17635 - DNA, 40 bp, Homo Sapiens
gctccgaggtgattttcatattgaattgcaaattcgaaga

SEQ ID NO: 17636 - DNA, 44 bp, Homo Sapiens
gctccgaggtgattttcatattgaattgcaaattcgaagaagca

SEQ ID NO: 17637 - DNA, 45 bp, Homo Sapiens
gctccgaggtgattttcatattgaattgcaaattcgaagaagcag

SEQ ID NO: 17638 - DNA, 18 bp, Homo Sapiens
gctccgtggcgcaatgga

SEQ ID NO: 17639 - DNA, 28 bp, Homo Sapiens
gctccgtggcgcaatggatagcgcattg

SEQ ID NO: 17640 - DNA, 29 bp, Homo Sapiens
gctccgtggcgcaatggatagcgcattgg

SEQ ID NO: 17641 - DNA, 32 bp, Homo Sapiens
gctccgtggcgcaatggatagcgcattggact

SEQ ID NO: 17642 - DNA, 26 bp, Homo Sapiens
gctcgttggtctaggggtatgattct

SEQ ID NO: 17643 - DNA, 27 bp, Homo Sapiens
gctcgttggtctaggggtatgattctc

SEQ ID NO: 17644 - DNA, 29 bp, Homo Sapiens
gctcgttggtctaggggtatgattctcgc

SEQ ID NO: 17645 - DNA, 30 bp, Homo Sapiens
gctcgttggtctaggggtatgattctcgct

SEQ ID NO: 17646 - DNA, 31 bp, Homo Sapiens
gctcgttggtctaggggtatgattctcgctt

SEQ ID NO: 17647 - DNA, 34 bp, Homo Sapiens
gctcgttggtctaggggtatgattctcgcttcgg

SEQ ID NO: 17648 - DNA, 34 bp, Homo Sapiens
gctcgttggtctaggggtatgattctcgctttgg

SEQ ID NO: 17649 - DNA, 30 bp, Homo Sapiens
gctcgttggtctaggggtatgattctcggt

SEQ ID NO: 17650 - DNA, 31 bp, Homo Sapiens
gctcgttggtctaggggtatgattctcggtt

SEQ ID NO: 17651 - DNA, 34 bp, Homo Sapiens
gctcgttggtctaggggtatgattctcggtttgg

SEQ ID NO: 17652 - DNA, 16 bp, Homo Sapiens
gctctcaccgccgcgg

SEQ ID NO: 17653 - DNA, 17 bp, Homo Sapiens
gctctcaccgccgcggc

SEQ ID NO: 17654 - DNA, 18 bp, Homo Sapiens
gctctcaccgccgcggcc

SEQ ID NO: 17655 - DNA, 19 bp, Homo Sapiens
gctctcaccgccgcggccc

SEQ ID NO: 17656 - DNA, 20 bp, Homo Sapiens
gctctcaccgccgcggcccg

SEQ ID NO: 17657 - DNA, 21 bp, Homo Sapiens
gctctcaccgccgcggcccgg

SEQ ID NO: 17658 - DNA, 22 bp, Homo Sapiens
gctctcaccgccgcggcccggg

SEQ ID NO: 17659 - DNA, 23 bp, Homo Sapiens
gctctcaccgccgcggcccgggt

SEQ ID NO: 17660 - DNA, 24 bp, Homo Sapiens
gctctcaccgccgcggcccgggtt

SEQ ID NO: 17661 - DNA, 25 bp, Homo Sapiens
gctctcaccgccgcggcccgggttc

SEQ ID NO: 17662 - DNA, 26 bp, Homo Sapiens
gctctcaccgccgcggcccgggttcg

SEQ ID NO: 17663 - DNA, 29 bp, Homo Sapiens
gctctcaccgccgcggcccgggttcgatt

SEQ ID NO: 17664 - DNA, 30 bp, Homo Sapiens
gctctcaccgccgcggcccgggttcgattc

SEQ ID NO: 17665 - DNA, 36 bp, Homo Sapiens
gctctcaccgccgcggcccgggttcgattcccggtc

SEQ ID NO: 17666 - DNA, 37 bp, Homo Sapiens
gctctcaccgccgcggcccgggttcgattcccggtca

SEQ ID NO: 17667 - DNA, 39 bp, Homo Sapiens
gctctcaccgccgcggcccgggttcgattcccggtcagg

SEQ ID NO: 17668 - DNA, 40 bp, Homo Sapiens
gctctcaccgccgcggcccgggttcgattcccggtcaggg

SEQ ID NO: 17669 - DNA, 41 bp, Homo Sapiens
gctctcaccgccgcggcccgggttcgattcccggtcaggga

SEQ ID NO: 17670 - DNA, 42 bp, Homo Sapiens
gctctcaccgccgcggcccgggttcgattcccggtcagggaa

SEQ ID NO: 17671 - DNA, 43 bp, Homo Sapiens
gctctcaccgccgcggcccgggttcgattcccggtcagggaac

SEQ ID NO: 17672 - DNA, 44 bp, Homo Sapiens
gctctcaccgccgcggcccgggttcgattcccggtcagggaacc

SEQ ID NO: 17673 - DNA, 45 bp, Homo Sapiens
gctctcaccgccgcggcccgggttcgattcccggtcagggaacca

SEQ ID NO: 17674 - DNA, 18 bp, Homo Sapiens
gctctgtggcgcaatgga

SEQ ID NO: 17675 - DNA, 19 bp, Homo Sapiens
gctgagtgaagcattggac

SEQ ID NO: 17676 - DNA, 20 bp, Homo Sapiens
gctgagtgaagcattggact

SEQ ID NO: 17677 - DNA, 21 bp, Homo Sapiens
gctgagtgaagcattggactg

SEQ ID NO: 17678 - DNA, 22 bp, Homo Sapiens
gctgagtgaagcattggactgt

SEQ ID NO: 17679 - DNA, 23 bp, Homo Sapiens
gctgagtgaagcattggactgta

SEQ ID NO: 17680 - DNA, 24 bp, Homo Sapiens
gctgagtgaagcattggactgtaa

SEQ ID NO: 17681 - DNA, 25 bp, Homo Sapiens
gctgagtgaagcattggactgtaaa

SEQ ID NO: 17682 - DNA, 27 bp, Homo Sapiens
gctgagtgaagcattggactgtaaatc

SEQ ID NO: 17683 - DNA, 28 bp, Homo Sapiens
gctgagtgaagcattggactgtaaatct

SEQ ID NO: 17684 - DNA, 30 bp, Homo Sapiens
gctgagtgaagcattggactgtaaatctaa

SEQ ID NO: 17685 - DNA, 31 bp, Homo Sapiens
gctgagtgaagcattggactgtaaatctaaa

SEQ ID NO: 17686 - DNA, 32 bp, Homo Sapiens
gctgagtgaagcattggactgtaaatctaaag

SEQ ID NO: 17687 - DNA, 41 bp, Homo Sapiens
gctgagtgaagcattggactgtaaatctaaagacaggggtt

SEQ ID NO: 17688 - DNA, 46 bp, Homo Sapiens
gctgagtgaagcattggactgtaaatctaaagacaggggttaggcc

SEQ ID NO: 17689 - DNA, 48 bp, Homo Sapiens
gctgagtgaagcattggactgtaaatctaaagacaggggttaggcctc

SEQ ID NO: 17690 - DNA, 27 bp, Homo Sapiens
gctgccttccaagcagttgacccgggt

SEQ ID NO: 17691 - DNA, 27 bp, Homo Sapiens
gctgcgtgttcgaatcacgtcggggtc

SEQ ID NO: 17692 - DNA, 30 bp, Homo Sapiens
gctgcgtgttcgaatcacgtcggggtcacc

SEQ ID NO: 17693 - DNA, 29 bp, Homo Sapiens
gctgggcccataacccagaggtcgatgga

SEQ ID NO: 17694 - DNA, 30 bp, Homo Sapiens
gctgggcccataacccagaggtcgatggat

SEQ ID NO: 17695 - DNA, 31 bp, Homo Sapiens
gctgggcccataacccagaggtcgatggatc

SEQ ID NO: 17696 - DNA, 32 bp, Homo Sapiens
gctgggcccataacccagaggtcgatggatcg

SEQ ID NO: 17697 - DNA, 18 bp, Homo Sapiens
gctggggattgtgggttc

SEQ ID NO: 17698 - DNA, 19 bp, Homo Sapiens
gctggggattgtgggttcg

SEQ ID NO: 17699 - DNA, 25 bp, Homo Sapiens
gctggggattgtgggttcgagtccc

SEQ ID NO: 17700 - DNA, 26 bp, Homo Sapiens
gctggggattgtgggttcgagtccca

SEQ ID NO: 17701 - DNA, 28 bp, Homo Sapiens
gctggggattgtgggttcgagtcccatc

SEQ ID NO: 17702 - DNA, 32 bp, Homo Sapiens
gctggggattgtgggttcgagtcccatctggg

SEQ ID NO: 17703 - DNA, 33 bp, Homo Sapiens
gctggggattgtgggttcgagtcccatctgggt

SEQ ID NO: 17704 - DNA, 34 bp, Homo Sapiens
gctggggattgtgggttcgagtcccatctgggtc

SEQ ID NO: 17705 - DNA, 35 bp, Homo Sapiens
gctggggattgtgggttcgagtcccatctgggtcg

SEQ ID NO: 17706 - DNA, 36 bp, Homo Sapiens
gctggggattgtgggttcgagtcccatctgggtcgc

SEQ ID NO: 17707 - DNA, 37 bp, Homo Sapiens
gctggggattgtgggttcgagtcccatctgggtcgcc

SEQ ID NO: 17708 - DNA, 38 bp, Homo Sapiens
gctggggattgtgggttcgagtcccatctgggtcgcca

SEQ ID NO: 17709 - DNA, 18 bp, Homo Sapiens
gctggtagagcggaggac

SEQ ID NO: 17710 - DNA, 26 bp, Homo Sapiens
gctggtagagcggaggactgtagatc

SEQ ID NO: 17711 - DNA, 16 bp, Homo Sapiens
gctggtgtagtggtat

SEQ ID NO: 17712 - DNA, 17 bp, Homo Sapiens
gctggtgtagtggtatc

SEQ ID NO: 17713 - DNA, 18 bp, Homo Sapiens
gctggtgtagtggtatca

SEQ ID NO: 17714 - DNA, 19 bp, Homo Sapiens
gctggtgtagtggtatcat

SEQ ID NO: 17715 - DNA, 20 bp, Homo Sapiens
gctggtgtagtggtatcatg

SEQ ID NO: 17716 - DNA, 21 bp, Homo Sapiens
gctggtgtagtggtatcatgc

SEQ ID NO: 17717 - DNA, 22 bp, Homo Sapiens
gctggtgtagtggtatcatgca

SEQ ID NO: 17718 - DNA, 24 bp, Homo Sapiens
gctggtgtagtggtatcatgcaag

SEQ ID NO: 17719 - DNA, 25 bp, Homo Sapiens
gctggtgtagtggtatcatgcaaga

SEQ ID NO: 17720 - DNA, 26 bp, Homo Sapiens
gctggtgtagtggtatcatgcaagat

SEQ ID NO: 17721 - DNA, 27 bp, Homo Sapiens
gctggtgtagtggtatcatgcaagatt

SEQ ID NO: 17722 - DNA, 28 bp, Homo Sapiens
gctggtgtagtggtatcatgcaagattc

SEQ ID NO: 17723 - DNA, 29 bp, Homo Sapiens
gctggtgtagtggtatcatgcaagattcc

SEQ ID NO: 17724 - DNA, 30 bp, Homo Sapiens
gctggtgtagtggtatcatgcaagattccc

SEQ ID NO: 17725 - DNA, 31 bp, Homo Sapiens
gctggtgtagtggtatcatgcaagattccca

SEQ ID NO: 17726 - DNA, 34 bp, Homo Sapiens
gctggtgtagtggtatcatgcaagattcccattc

SEQ ID NO: 17727 - DNA, 35 bp, Homo Sapiens
gctggtgtagtggtatcatgcaagattcccattct

SEQ ID NO: 17728 - DNA, 45 bp, Homo Sapiens
gctggtgtagtggtatcatgcaagattcccattcttgcgacccgg

SEQ ID NO: 17729 - DNA, 46 bp, Homo Sapiens
gctggtgtagtggtatcatgcaagattcccattcttgcgacccggg

SEQ ID NO: 17730 - DNA, 47 bp, Homo Sapiens
gctggtgtagtggtatcatgcaagattcccattcttgcgacccgggt

SEQ ID NO: 17731 - DNA, 27 bp, Homo Sapiens
gctggttcgaatccggctcgaaggacc

SEQ ID NO: 17732 - DNA, 26 bp, Homo Sapiens
gctggttcgattccggctcgaaggac

SEQ ID NO: 17733 - DNA, 27 bp, Homo Sapiens
gctggttcgattccggctcgaaggacc

SEQ ID NO: 17734 - DNA, 28 bp, Homo Sapiens
gctggttcgattccggctcgaaggacca

SEQ ID NO: 17735 - DNA, 16 bp, Homo Sapiens
gctgtgatggccgagt

SEQ ID NO: 17736 - DNA, 18 bp, Homo Sapiens
gctgtgatggccgagtgg

SEQ ID NO: 17737 - DNA, 24 bp, Homo Sapiens
gctgtgatggccgagtggttaagg

SEQ ID NO: 17738 - DNA, 25 bp, Homo Sapiens
gctgtgatggccgagtggttaaggc

SEQ ID NO: 17739 - DNA, 33 bp, Homo Sapiens
gctgtgatggccgagtggttaaggtgttggact

SEQ ID NO: 17740 - DNA, 34 bp, Homo Sapiens
gctgtgatggccgagtggttaaggtgttggactc

SEQ ID NO: 17741 - DNA, 25 bp, Homo Sapiens
gctgttaactaagtgtttgtgggtt

SEQ ID NO: 17742 - DNA, 26 bp, Homo Sapiens
gctgttaactaagtgtttgtgggttt

SEQ ID NO: 17743 - DNA, 34 bp, Homo Sapiens
gctgttaactaagtgtttgtgggtttaagtccca

SEQ ID NO: 17744 - DNA, 44 bp, Homo Sapiens
gctgttaactaagtgtttgtgggtttaagtcccattggtctagc

SEQ ID NO: 17745 - DNA, 45 bp, Homo Sapiens
gctgttaactaagtgtttgtgggtttaagtcccattggtctagcc

SEQ ID NO: 17746 - DNA, 46 bp, Homo Sapiens
gctgttaactaagtgtttgtgggtttaagtcccattggtctagcca

SEQ ID NO: 17747 - DNA, 16 bp, Homo Sapiens
gcttaaacccccttat

SEQ ID NO: 17748 - DNA, 17 bp, Homo Sapiens
gcttaaacccccttatt

SEQ ID NO: 17749 - DNA, 19 bp, Homo Sapiens
gcttaaacccccttatttc

SEQ ID NO: 17750 - DNA, 20 bp, Homo Sapiens
gcttaaacccccttatttct

SEQ ID NO: 17751 - DNA, 21 bp, Homo Sapiens
gcttaaacccccttatttcta

SEQ ID NO: 17752 - DNA, 22 bp, Homo Sapiens
gcttaaacccccttatttctac

SEQ ID NO: 17753 - DNA, 23 bp, Homo Sapiens
gcttaaacccccttatttctacc

SEQ ID NO: 17754 - DNA, 24 bp, Homo Sapiens
gcttaaacccccttatttctacca

SEQ ID NO: 17755 - DNA, 18 bp, Homo Sapiens
gcttaacacaaagcaccc

SEQ ID NO: 17756 - DNA, 21 bp, Homo Sapiens
gcttaacacaaagcacccaac

SEQ ID NO: 17757 - DNA, 30 bp, Homo Sapiens
gcttaacacaaagcacccaacttacactta

SEQ ID NO: 17758 - DNA, 20 bp, Homo Sapiens
gcttaattaaagtggctgat

SEQ ID NO: 17759 - DNA, 23 bp, Homo Sapiens
gcttaattaaagtggctgatttg

SEQ ID NO: 17760 - DNA, 24 bp, Homo Sapiens
gcttaattaaagtggctgatttgc

SEQ ID NO: 17761 - DNA, 25 bp, Homo Sapiens
gcttacctcctcaaagcaatacact

SEQ ID NO: 17762 - DNA, 28 bp, Homo Sapiens
gcttacctcctcaaagcaatacactgaa

SEQ ID NO: 17763 - DNA, 19 bp, Homo Sapiens
gcttacgaccccttattta

SEQ ID NO: 17764 - DNA, 20 bp, Homo Sapiens
gcttacgaccccttatttac

SEQ ID NO: 17765 - DNA, 21 bp, Homo Sapiens
gcttacgaccccttatttacc

SEQ ID NO: 17766 - DNA, 22 bp, Homo Sapiens
gcttacgaccccttatttaccc

SEQ ID NO: 17767 - DNA, 23 bp, Homo Sapiens
gcttacgaccccttatttacccc

SEQ ID NO: 17768 - DNA, 24 bp, Homo Sapiens
gcttacgaccccttatttacccca

SEQ ID NO: 17769 - DNA, 23 bp, Homo Sapiens
gcttagcggtagagcatttgact

SEQ ID NO: 17770 - DNA, 30 bp, Homo Sapiens
gcttagctgttaactaagtgtttgtgggtt

SEQ ID NO: 17771 - DNA, 31 bp, Homo Sapiens
gcttagctgttaactaagtgtttgtgggttt

SEQ ID NO: 17772 - DNA, 32 bp, Homo Sapiens
gcttagctgttaactaagtgtttgtgggttta

SEQ ID NO: 17773 - DNA, 33 bp, Homo Sapiens
gcttagctgttaactaagtgtttgtgggtttaa

SEQ ID NO: 17774 - DNA, 37 bp, Homo Sapiens
gcttagctgttaactaagtgtttgtgggtttaagtcc

SEQ ID NO: 17775 - DNA, 41 bp, Homo Sapiens
gcttagctgttaactaagtgtttgtgggtttaagtcccatt

SEQ ID NO: 17776 - DNA, 29 bp, Homo Sapiens
gcttagcttaattaaagtggctgatttgc

SEQ ID NO: 17777 - DNA, 16 bp, Homo Sapiens
gcttcaaacctgccgg

SEQ ID NO: 17778 - DNA, 17 bp, Homo Sapiens
gcttcaaacctgccggg

SEQ ID NO: 17779 - DNA, 18 bp, Homo Sapiens
gcttcaaacctgccgggg

SEQ ID NO: 17780 - DNA, 19 bp, Homo Sapiens
gcttcaaacctgccggggc

SEQ ID NO: 17781 - DNA, 20 bp, Homo Sapiens
gcttcaaacctgccggggct

SEQ ID NO: 17782 - DNA, 21 bp, Homo Sapiens
gcttcaaacctgccggggctt

SEQ ID NO: 17783 - DNA, 22 bp, Homo Sapiens
gcttcaaacctgccggggcttc

SEQ ID NO: 17784 - DNA, 23 bp, Homo Sapiens
gcttcaaacctgccggggcttcc

SEQ ID NO: 17785 - DNA, 24 bp, Homo Sapiens
gcttcaaacctgccggggcttcca

SEQ ID NO: 17786 - DNA, 20 bp, Homo Sapiens
gcttcgggtgcgagaggtcc

SEQ ID NO: 17787 - DNA, 45 bp, Homo Sapiens
gcttcgggtgcgagaggtcccgggttcaaatcccggacgagcccc

SEQ ID NO: 17788 - DNA, 33 bp, Homo Sapiens
gcttctgtaatgtagtggttatcacattcgcct

SEQ ID NO: 17789 - DNA, 16 bp, Homo Sapiens
gcttctgtagtgtagt

SEQ ID NO: 17790 - DNA, 17 bp, Homo Sapiens
gcttctgtagtgtagtg

SEQ ID NO: 17791 - DNA, 18 bp, Homo Sapiens
gcttctgtagtgtagtgg

SEQ ID NO: 17792 - DNA, 19 bp, Homo Sapiens
gcttctgtagtgtagtggt

SEQ ID NO: 17793 - DNA, 23 bp, Homo Sapiens
gcttctgtagtgtagtggttatc

SEQ ID NO: 17794 - DNA, 24 bp, Homo Sapiens
gcttctgtagtgtagtggttatca

SEQ ID NO: 17795 - DNA, 25 bp, Homo Sapiens
gcttctgtagtgtagtggttatcac

SEQ ID NO: 17796 - DNA, 26 bp, Homo Sapiens
gcttctgtagtgtagtggttatcacg

SEQ ID NO: 17797 - DNA, 28 bp, Homo Sapiens
gcttctgtagtgtagtggttatcacgtt

SEQ ID NO: 17798 - DNA, 29 bp, Homo Sapiens
gcttctgtagtgtagtggttatcacgttc

SEQ ID NO: 17799 - DNA, 30 bp, Homo Sapiens
gcttctgtagtgtagtggttatcacgttcg

SEQ ID NO: 17800 - DNA, 31 bp, Homo Sapiens
gcttctgtagtgtagtggttatcacgttcgc

SEQ ID NO: 17801 - DNA, 32 bp, Homo Sapiens
gcttctgtagtgtagtggttatcacgttcgcc

SEQ ID NO: 17802 - DNA, 33 bp, Homo Sapiens
gcttctgtagtgtagtggttatcacgttcgcct

SEQ ID NO: 17803 - DNA, 34 bp, Homo Sapiens
gcttctgtagtgtagtggttatcacgttcgcctc

SEQ ID NO: 17804 - DNA, 35 bp, Homo Sapiens
gcttctgtagtgtagtggttatcacgttcgcctca

SEQ ID NO: 17805 - DNA, 36 bp, Homo Sapiens
gcttctgtagtgtagtggttatcacgttcgcctcac

SEQ ID NO: 17806 - DNA, 37 bp, Homo Sapiens
gcttctgtagtgtagtggttatcacgttcgcctcaca

SEQ ID NO: 17807 - DNA, 38 bp, Homo Sapiens
gcttctgtagtgtagtggttatcacgttcgcctcacac

SEQ ID NO: 17808 - DNA, 39 bp, Homo Sapiens
gcttctgtagtgtagtggttatcacgttcgcctcacacg

SEQ ID NO: 17809 - DNA, 40 bp, Homo Sapiens
gcttctgtagtgtagtggttatcacgttcgcctcacacgc

SEQ ID NO: 17810 - DNA, 41 bp, Homo Sapiens
gcttctgtagtgtagtggttatcacgttcgcctcacacgcg

SEQ ID NO: 17811 - DNA, 43 bp, Homo Sapiens
gcttctgtagtgtagtggttatcacgttcgcctcacacgcgaa

SEQ ID NO: 17812 - DNA, 22 bp, Homo Sapiens
gctttacacgcagaaggtcctg

SEQ ID NO: 17813 - DNA, 46 bp, Homo Sapiens
gctttacacgcagaaggtcctgggttcgagccccagtggaaccacc

SEQ ID NO: 17814 - DNA, 19 bp, Homo Sapiens
gctttcaccgccgcggccc

SEQ ID NO: 17815 - DNA, 20 bp, Homo Sapiens
gctttcaccgccgcggcccg

SEQ ID NO: 17816 - DNA, 24 bp, Homo Sapiens
gctttcaccgccgcggcccgggtt

SEQ ID NO: 17817 - DNA, 26 bp, Homo Sapiens
gctttcaccgccgcggcccgggttcg

SEQ ID NO: 17818 - DNA, 17 bp, Homo Sapiens
gctttgcacgcgtgggt

SEQ ID NO: 17819 - DNA, 31 bp, Homo Sapiens
gctttgcacgcgtgggttcgaatcccatcct

SEQ ID NO: 17820 - DNA, 19 bp, Homo Sapiens
gctttgcacgtatgaggcc

SEQ ID NO: 17821 - DNA, 20 bp, Homo Sapiens
gctttgcacgtatgaggccc

SEQ ID NO: 17822 - DNA, 21 bp, Homo Sapiens
gctttgcacgtatgaggcccc

SEQ ID NO: 17823 - DNA, 22 bp, Homo Sapiens
gctttgcacgtatgaggccccg

SEQ ID NO: 17824 - DNA, 23 bp, Homo Sapiens
gctttgcacgtatgaggccccgg

SEQ ID NO: 17825 - DNA, 24 bp, Homo Sapiens
gctttgcacgtatgaggccccggg

SEQ ID NO: 17826 - DNA, 25 bp, Homo Sapiens
gctttgcacgtatgaggccccgggt

SEQ ID NO: 17827 - DNA, 40 bp, Homo Sapiens
gctttgcacgtatgaggccccgggttcaatccccggcatc

SEQ ID NO: 17828 - DNA, 41 bp, Homo Sapiens
gctttgcacgtatgaggccccgggttcaatccccggcatct

SEQ ID NO: 17829 - DNA, 16 bp, Homo Sapiens
gctttggggggttcga

SEQ ID NO: 17830 - DNA, 17 bp, Homo Sapiens
gctttggggggttcgat

SEQ ID NO: 17831 - DNA, 18 bp, Homo Sapiens
gctttggggggttcgatt

SEQ ID NO: 17832 - DNA, 19 bp, Homo Sapiens
gctttggggggttcgattc

SEQ ID NO: 17833 - DNA, 20 bp, Homo Sapiens
gctttggggggttcgattcc

SEQ ID NO: 17834 - DNA, 21 bp, Homo Sapiens
gctttggggggttcgattcct

SEQ ID NO: 17835 - DNA, 23 bp, Homo Sapiens
gctttggggggttcgattccttc

SEQ ID NO: 17836 - DNA, 24 bp, Homo Sapiens
gctttggggggttcgattccttcc

SEQ ID NO: 17837 - DNA, 25 bp, Homo Sapiens
gctttggggggttcgattccttcct

SEQ ID NO: 17838 - DNA, 26 bp, Homo Sapiens
gctttggggggttcgattccttcctt

SEQ ID NO: 17839 - DNA, 27 bp, Homo Sapiens
gctttggggggttcgattccttccttt

SEQ ID NO: 17840 - DNA, 31 bp, Homo Sapiens
gctttggggggttcgattccttccttttttg

SEQ ID NO: 17841 - DNA, 32 bp, Homo Sapiens
gctttggggggttcgattccttccttttttgc

SEQ ID NO: 17842 - DNA, 33 bp, Homo Sapiens
gctttggggggttcgattccttccttttttgcc

SEQ ID NO: 17843 - DNA, 34 bp, Homo Sapiens
gctttggggggttcgattccttccttttttgcca

SEQ ID NO: 17844 - DNA, 16 bp, Homo Sapiens
gctttgggtgctaatg

SEQ ID NO: 17845 - DNA, 18 bp, Homo Sapiens
gctttgggtgctaatggt

SEQ ID NO: 17846 - DNA, 21 bp, Homo Sapiens
gctttgggtgctaatggtgga

SEQ ID NO: 17847 - DNA, 22 bp, Homo Sapiens
gctttgggtgctaatggtggag

SEQ ID NO: 17848 - DNA, 23 bp, Homo Sapiens
gctttgggtgctaatggtggagt

SEQ ID NO: 17849 - DNA, 24 bp, Homo Sapiens
gctttgggtgctaatggtggagtt

SEQ ID NO: 17850 - DNA, 25 bp, Homo Sapiens
gctttgggtgctaatggtggagtta

SEQ ID NO: 17851 - DNA, 26 bp, Homo Sapiens
gctttgggtgctaatggtggagttaa

SEQ ID NO: 17852 - DNA, 27 bp, Homo Sapiens
gctttgggtgctaatggtggagttaaa

SEQ ID NO: 17853 - DNA, 28 bp, Homo Sapiens
gctttgggtgctaatggtggagttaaag

SEQ ID NO: 17854 - DNA, 29 bp, Homo Sapiens
gctttgggtgctaatggtggagttaaaga

SEQ ID NO: 17855 - DNA, 30 bp, Homo Sapiens
gctttgggtgctaatggtggagttaaagac

SEQ ID NO: 17856 - DNA, 31 bp, Homo Sapiens
gctttgggtgctaatggtggagttaaagact

SEQ ID NO: 17857 - DNA, 32 bp, Homo Sapiens
gctttgggtgctaatggtggagttaaagactt

SEQ ID NO: 17858 - DNA, 33 bp, Homo Sapiens
gctttgggtgctaatggtggagttaaagacttt

SEQ ID NO: 17859 - DNA, 35 bp, Homo Sapiens
gctttgggtgctaatggtggagttaaagacttttt

SEQ ID NO: 17860 - DNA, 38 bp, Homo Sapiens
gctttgggtgctaatggtggagttaaagactttttctc

SEQ ID NO: 17861 - DNA, 40 bp, Homo Sapiens
gctttgggtgctaatggtggagttaaagactttttctctg

SEQ ID NO: 17862 - DNA, 41 bp, Homo Sapiens
gctttgggtgctaatggtggagttaaagactttttctctga

SEQ ID NO: 17863 - DNA, 42 bp, Homo Sapiens
gctttgggtgctaatggtggagttaaagactttttctctgac

SEQ ID NO: 17864 - DNA, 43 bp, Homo Sapiens
gctttgggtgctaatggtggagttaaagactttttctctgacc

SEQ ID NO: 17865 - DNA, 44 bp, Homo Sapiens
gctttgggtgctaatggtggagttaaagactttttctctgacca

SEQ ID NO: 17866 - DNA, 26 bp, Homo Sapiens
ggaaaaagtcatggaggccatggggt

SEQ ID NO: 17867 - DNA, 27 bp, Homo Sapiens
ggaaaaagtcatggaggccatggggtt

SEQ ID NO: 17868 - DNA, 16 bp, Homo Sapiens
ggaagcgtgctgggcc

SEQ ID NO: 17869 - DNA, 17 bp, Homo Sapiens
ggaagcgtgctgggccc

SEQ ID NO: 17870 - DNA, 18 bp, Homo Sapiens
ggaagcgtgctgggccca

SEQ ID NO: 17871 - DNA, 19 bp, Homo Sapiens
ggaagcgtgctgggcccat

SEQ ID NO: 17872 - DNA, 23 bp, Homo Sapiens
ggaagcgtgctgggcccataacc

SEQ ID NO: 17873 - DNA, 24 bp, Homo Sapiens
ggaagcgtgctgggcccataaccc

SEQ ID NO: 17874 - DNA, 25 bp, Homo Sapiens
ggaagcgtgctgggcccataaccca

SEQ ID NO: 17875 - DNA, 27 bp, Homo Sapiens
ggaagcgtgctgggcccataacccaga

SEQ ID NO: 17876 - DNA, 32 bp, Homo Sapiens
ggaagcgtgctgggcccataacccagaggtcg

SEQ ID NO: 17877 - DNA, 33 bp, Homo Sapiens
ggaagcgtgctgggcccataacccagaggtcga

SEQ ID NO: 17878 - DNA, 34 bp, Homo Sapiens
ggaagcgtgctgggcccataacccagaggtcgat

SEQ ID NO: 17879 - DNA, 35 bp, Homo Sapiens
ggaagcgtgctgggcccataacccagaggtcgatg

SEQ ID NO: 17880 - DNA, 36 bp, Homo Sapiens
ggaagcgtgctgggcccataacccagaggtcgatgg

SEQ ID NO: 17881 - DNA, 37 bp, Homo Sapiens
ggaagcgtgctgggcccataacccagaggtcgatgga

SEQ ID NO: 17882 - DNA, 38 bp, Homo Sapiens
ggaagcgtgctgggcccataacccagaggtcgatggat

SEQ ID NO: 17883 - DNA, 39 bp, Homo Sapiens
ggaagcgtgctgggcccataacccagaggtcgatggatc

SEQ ID NO: 17884 - DNA, 40 bp, Homo Sapiens
ggaagcgtgctgggcccataacccagaggtcgatggatcg

SEQ ID NO: 17885 - DNA, 21 bp, Homo Sapiens
ggaattagctcaagtggtaga

SEQ ID NO: 17886 - DNA, 16 bp, Homo Sapiens
ggacgagcgcgctgga

SEQ ID NO: 17887 - DNA, 16 bp, Homo Sapiens
ggactctgaatccagc

SEQ ID NO: 17888 - DNA, 18 bp, Homo Sapiens
ggactctgaatccagcga

SEQ ID NO: 17889 - DNA, 21 bp, Homo Sapiens
ggactctgaatccagcgatcc

SEQ ID NO: 17890 - DNA, 24 bp, Homo Sapiens
ggactctgaatccagcgatccgag

SEQ ID NO: 17891 - DNA, 25 bp, Homo Sapiens
ggactctgaatccagcgatccgagt

SEQ ID NO: 17892 - DNA, 27 bp, Homo Sapiens
ggactctgaatccagcgatccgagttc

SEQ ID NO: 17893 - DNA, 44 bp, Homo Sapiens
ggactctgaatccagcgatccgagttcaaatctcggtggaacct

SEQ ID NO: 17894 - DNA, 45 bp, Homo Sapiens
ggactctgaatccagcgatccgagttcaaatctcggtggaacctc

SEQ ID NO: 17895 - DNA, 46 bp, Homo Sapiens
ggactctgaatccagcgatccgagttcaaatctcggtggaacctcc

SEQ ID NO: 17896 - DNA, 47 bp, Homo Sapiens
ggactctgaatccagcgatccgagttcaaatctcggtggaacctcca

SEQ ID NO: 17897 - DNA, 38 bp, Homo Sapiens
ggactctgaatccagcgatccgagttcgagtctcggtg

SEQ ID NO: 17898 - DNA, 44 bp, Homo Sapiens
ggactctgaatccagcgatccgagttcgagtctcggtggaacct

SEQ ID NO: 17899 - DNA, 46 bp, Homo Sapiens
ggactctgaatccagcgatccgagttcgagtctcggtggaacctcc

SEQ ID NO: 17900 - DNA, 41 bp, Homo Sapiens
ggactgtaaatctaaagacaggggttaggcctctttttacc

SEQ ID NO: 17901 - DNA, 44 bp, Homo Sapiens
ggactgtaaatctaaagacaggggttaggcctctttttaccacc

SEQ ID NO: 17902 - DNA, 27 bp, Homo Sapiens
ggagaaagctcacaagaactgctaact

SEQ ID NO: 17903 - DNA, 24 bp, Homo Sapiens
ggagaccggggttcaattccccga

SEQ ID NO: 17904 - DNA, 25 bp, Homo Sapiens
ggagaccggggttcaattccccgac

SEQ ID NO: 17905 - DNA, 26 bp, Homo Sapiens
ggagaccggggttcaattccccgacg

SEQ ID NO: 17906 - DNA, 28 bp, Homo Sapiens
ggagaccggggttcaattccccgacggg

SEQ ID NO: 17907 - DNA, 29 bp, Homo Sapiens
ggagaccggggttcaattccccgacgggg

SEQ ID NO: 17908 - DNA, 30 bp, Homo Sapiens
ggagaccggggttcaattccccgacgggga

SEQ ID NO: 17909 - DNA, 31 bp, Homo Sapiens
ggagaccggggttcaattccccgacggggag

SEQ ID NO: 17910 - DNA, 32 bp, Homo Sapiens
ggagaccggggttcaattccccgacggggagc

SEQ ID NO: 17911 - DNA, 33 bp, Homo Sapiens
ggagaccggggttcaattccccgacggggagcc

SEQ ID NO: 17912 - DNA, 34 bp, Homo Sapiens
ggagaccggggttcaattccccgacggggagcca

SEQ ID NO: 17913 - DNA, 19 bp, Homo Sapiens
ggagaccggggttcgattc

SEQ ID NO: 17914 - DNA, 25 bp, Homo Sapiens
ggagaccggggttcgattccccgac

SEQ ID NO: 17915 - DNA, 26 bp, Homo Sapiens
ggagaccggggttcgattccccgacg

SEQ ID NO: 17916 - DNA, 27 bp, Homo Sapiens
ggagaccggggttcgattccccgacgg

SEQ ID NO: 17917 - DNA, 28 bp, Homo Sapiens
ggagaccggggttcgattccccgacggg

SEQ ID NO: 17918 - DNA, 29 bp, Homo Sapiens
ggagaccggggttcgattccccgacgggg

SEQ ID NO: 17919 - DNA, 30 bp, Homo Sapiens
ggagaccggggttcgattccccgacgggga

SEQ ID NO: 17920 - DNA, 31 bp, Homo Sapiens
ggagaccggggttcgattccccgacggggag

SEQ ID NO: 17921 - DNA, 32 bp, Homo Sapiens
ggagaccggggttcgattccccgacggggagc

SEQ ID NO: 17922 - DNA, 33 bp, Homo Sapiens
ggagaccggggttcgattccccgacggggagcc

SEQ ID NO: 17923 - DNA, 34 bp, Homo Sapiens
ggagaccggggttcgattccccgacggggagcca

SEQ ID NO: 17924 - DNA, 29 bp, Homo Sapiens
ggagagcgttagactgaagatctaaaggt

SEQ ID NO: 17925 - DNA, 16 bp, Homo Sapiens
ggagatcctgggttcg

SEQ ID NO: 17926 - DNA, 30 bp, Homo Sapiens
ggagatcctgggttcgaatcccagcggggc

SEQ ID NO: 17927 - DNA, 31 bp, Homo Sapiens
ggagatcctgggttcgaatcccagcggggcc

SEQ ID NO: 17928 - DNA, 32 bp, Homo Sapiens
ggagatcctgggttcgaatcccagcggggcct

SEQ ID NO: 17929 - DNA, 33 bp, Homo Sapiens
ggagatcctgggttcgaatcccagcggggcctc

SEQ ID NO: 17930 - DNA, 30 bp, Homo Sapiens
ggagatcctgggttcgaatcccagcggtgc

SEQ ID NO: 17931 - DNA, 31 bp, Homo Sapiens
ggagatcctgggttcgaatcccagcggtgcc

SEQ ID NO: 17932 - DNA, 32 bp, Homo Sapiens
ggagatcctgggttcgaatcccagcggtgcct

SEQ ID NO: 17933 - DNA, 33 bp, Homo Sapiens
ggagatcctgggttcgaatcccagcggtgcctc

SEQ ID NO: 17934 - DNA, 34 bp, Homo Sapiens
ggagatcctgggttcgaatcccagcggtgcctcc

SEQ ID NO: 17935 - DNA, 21 bp, Homo Sapiens
ggagatgaaaacctttttcca

SEQ ID NO: 17936 - DNA, 23 bp, Homo Sapiens
ggagatgaaaacctttttccaag

SEQ ID NO: 17937 - DNA, 24 bp, Homo Sapiens
ggagatgaaaacctttttccaagg

SEQ ID NO: 17938 - DNA, 26 bp, Homo Sapiens
ggagatgaaaacctttttccaaggac

SEQ ID NO: 17939 - DNA, 27 bp, Homo Sapiens
ggagatgaaaacctttttccaaggaca

SEQ ID NO: 17940 - DNA, 28 bp, Homo Sapiens
ggagatgaaaacctttttccaaggacac

SEQ ID NO: 17941 - DNA, 29 bp, Homo Sapiens
ggagatgaaaacctttttccaaggacacc

SEQ ID NO: 17942 - DNA, 30 bp, Homo Sapiens
ggagatgaaaacctttttccaaggacacca

SEQ ID NO: 17943 - DNA, 16 bp, Homo Sapiens
ggagatttcaacttaa

SEQ ID NO: 17944 - DNA, 17 bp, Homo Sapiens
ggagatttcaacttaac

SEQ ID NO: 17945 - DNA, 18 bp, Homo Sapiens
ggagatttcaacttaact

SEQ ID NO: 17946 - DNA, 20 bp, Homo Sapiens
ggagatttcaacttaacttg

SEQ ID NO: 17947 - DNA, 21 bp, Homo Sapiens
ggagatttcaacttaacttga

SEQ ID NO: 17948 - DNA, 22 bp, Homo Sapiens
ggagatttcaacttaacttgac

SEQ ID NO: 17949 - DNA, 23 bp, Homo Sapiens
ggagatttcaacttaacttgacc

SEQ ID NO: 17950 - DNA, 24 bp, Homo Sapiens
ggagatttcaacttaacttgaccg

SEQ ID NO: 17951 - DNA, 25 bp, Homo Sapiens
ggagatttcaacttaacttgaccgc

SEQ ID NO: 17952 - DNA, 26 bp, Homo Sapiens
ggagatttcaacttaacttgaccgct

SEQ ID NO: 17953 - DNA, 27 bp, Homo Sapiens
ggagatttcaacttaacttgaccgctc

SEQ ID NO: 17954 - DNA, 28 bp, Homo Sapiens
ggagatttcaacttaacttgaccgctct

SEQ ID NO: 17955 - DNA, 29 bp, Homo Sapiens
ggagatttcaacttaacttgaccgctctg

SEQ ID NO: 17956 - DNA, 30 bp, Homo Sapiens
ggagatttcaacttaacttgaccgctctga

SEQ ID NO: 17957 - DNA, 31 bp, Homo Sapiens
ggagatttcaacttaacttgaccgctctgac

SEQ ID NO: 17958 - DNA, 32 bp, Homo Sapiens
ggagatttcaacttaacttgaccgctctgacc

SEQ ID NO: 17959 - DNA, 33 bp, Homo Sapiens
ggagatttcaacttaacttgaccgctctgacca

SEQ ID NO: 17960 - DNA, 17 bp, Homo Sapiens
ggagctggggattgtgg

SEQ ID NO: 17961 - DNA, 19 bp, Homo Sapiens
ggagctggggattgtgggt

SEQ ID NO: 17962 - DNA, 28 bp, Homo Sapiens
ggagctggggattgtgggttcgagtccc

SEQ ID NO: 17963 - DNA, 40 bp, Homo Sapiens
ggagctggggattgtgggttcgagtcccatctgggtcgcc

SEQ ID NO: 17964 - DNA, 41 bp, Homo Sapiens
ggagctggggattgtgggttcgagtcccatctgggtcgcca

SEQ ID NO: 17965 - DNA, 16 bp, Homo Sapiens
ggagcttaaaccccct

SEQ ID NO: 17966 - DNA, 22 bp, Homo Sapiens
ggagcttaaacccccttatttc

SEQ ID NO: 17967 - DNA, 23 bp, Homo Sapiens
ggagcttaaacccccttatttct

SEQ ID NO: 17968 - DNA, 24 bp, Homo Sapiens
ggagcttaaacccccttatttcta

SEQ ID NO: 17969 - DNA, 25 bp, Homo Sapiens
ggagcttaaacccccttatttctac

SEQ ID NO: 17970 - DNA, 26 bp, Homo Sapiens
ggagcttaaacccccttatttctacc

SEQ ID NO: 17971 - DNA, 27 bp, Homo Sapiens
ggagcttaaacccccttatttctacca

SEQ ID NO: 17972 - DNA, 29 bp, Homo Sapiens
ggaggcccgggttcgattcccggccaatg

SEQ ID NO: 17973 - DNA, 33 bp, Homo Sapiens
ggaggcccgggttcgattcccggccaatgcacc

SEQ ID NO: 17974 - DNA, 34 bp, Homo Sapiens
ggaggcccgggttcgattcccggccaatgcacca

SEQ ID NO: 17975 - DNA, 21 bp, Homo Sapiens
ggaggcgtgggttcgaatccc

SEQ ID NO: 17976 - DNA, 24 bp, Homo Sapiens
ggaggcgtgggttcgaatcccact

SEQ ID NO: 17977 - DNA, 31 bp, Homo Sapiens
ggaggcgtgggttcgaatcccacttctgaca

SEQ ID NO: 17978 - DNA, 32 bp, Homo Sapiens
ggaggcgtgggttcgaatcccacttctgacac

SEQ ID NO: 17979 - DNA, 33 bp, Homo Sapiens
ggaggcgtgggttcgaatcccacttctgacacc

SEQ ID NO: 17980 - DNA, 34 bp, Homo Sapiens
ggaggcgtgggttcgaatcccacttctgacacca

SEQ ID NO: 17981 - DNA, 20 bp, Homo Sapiens
ggagttaaagactttttctc

SEQ ID NO: 17982 - DNA, 23 bp, Homo Sapiens
ggagttaaagactttttctctga

SEQ ID NO: 17983 - DNA, 24 bp, Homo Sapiens
ggagttaaagactttttctctgac

SEQ ID NO: 17984 - DNA, 25 bp, Homo Sapiens
ggagttaaagactttttctctgacc

SEQ ID NO: 17985 - DNA, 26 bp, Homo Sapiens
ggagttaaagactttttctctgacca

SEQ ID NO: 17986 - DNA, 22 bp, Homo Sapiens
ggataacagctatccattggtc

SEQ ID NO: 17987 - DNA, 23 bp, Homo Sapiens
ggataacagctatccattggtct

SEQ ID NO: 17988 - DNA, 24 bp, Homo Sapiens
ggataacagctatccattggtctt

SEQ ID NO: 17989 - DNA, 25 bp, Homo Sapiens
ggataacagctatccattggtctta

SEQ ID NO: 17990 - DNA, 26 bp, Homo Sapiens
ggataacagctatccattggtcttag

SEQ ID NO: 17991 - DNA, 29 bp, Homo Sapiens
ggataacagctatccattggtcttaggcc

SEQ ID NO: 17992 - DNA, 31 bp, Homo Sapiens
ggataacagctatccattggtcttaggcccc

SEQ ID NO: 17993 - DNA, 17 bp, Homo Sapiens
ggataacgcgtctgact

SEQ ID NO: 17994 - DNA, 20 bp, Homo Sapiens
ggataacgcgtctgactacg

SEQ ID NO: 17995 - DNA, 32 bp, Homo Sapiens
ggataacgcgtctgactacggatcagaagatt

SEQ ID NO: 17996 - DNA, 18 bp, Homo Sapiens
ggataaggcactggcctc

SEQ ID NO: 17997 - DNA, 17 bp, Homo Sapiens
ggataaggcatcagcct

SEQ ID NO: 17998 - DNA, 19 bp, Homo Sapiens
ggataaggcatcagcctcc

SEQ ID NO: 17999 - DNA, 26 bp, Homo Sapiens
ggataaggcatcagcctccggagctg

SEQ ID NO: 18000 - DNA, 31 bp, Homo Sapiens
ggataaggcatcagcctccggagctggggat

SEQ ID NO: 18001 - DNA, 33 bp, Homo Sapiens
ggataaggcatcagcctccggagctggggattg

SEQ ID NO: 18002 - DNA, 34 bp, Homo Sapiens
ggataaggcatcagcctccggagctggggattgt

SEQ ID NO: 18003 - DNA, 20 bp, Homo Sapiens
ggataaggcgtctgattccg

SEQ ID NO: 18004 - DNA, 16 bp, Homo Sapiens
ggatagcgcattggac

SEQ ID NO: 18005 - DNA, 17 bp, Homo Sapiens
ggatagcgcattggact

SEQ ID NO: 18006 - DNA, 19 bp, Homo Sapiens
ggatagcgcattggacttc

SEQ ID NO: 18007 - DNA, 23 bp, Homo Sapiens
ggatagcgcattggacttctaat

SEQ ID NO: 18008 - DNA, 16 bp, Homo Sapiens
ggatagctcagtcggt

SEQ ID NO: 18009 - DNA, 17 bp, Homo Sapiens
ggatagctcagtcggta

SEQ ID NO: 18010 - DNA, 18 bp, Homo Sapiens
ggatagctcagtcggtag

SEQ ID NO: 18011 - DNA, 19 bp, Homo Sapiens
ggatagctcagtcggtaga

SEQ ID NO: 18012 - DNA, 20 bp, Homo Sapiens
ggatagctcagtcggtagag

SEQ ID NO: 18013 - DNA, 21 bp, Homo Sapiens
ggatagctcagtcggtagagc

SEQ ID NO: 18014 - DNA, 24 bp, Homo Sapiens
ggatagctcagtcggtagagcatc

SEQ ID NO: 18015 - DNA, 25 bp, Homo Sapiens
ggatagctcagtcggtagagcatca

SEQ ID NO: 18016 - DNA, 27 bp, Homo Sapiens
ggatagctcagtcggtagagcatcaga

SEQ ID NO: 18017 - DNA, 28 bp, Homo Sapiens
ggatagctcagtcggtagagcatcagac

SEQ ID NO: 18018 - DNA, 29 bp, Homo Sapiens
ggatagctcagtcggtagagcatcagact

SEQ ID NO: 18019 - DNA, 30 bp, Homo Sapiens
ggatagctcagtcggtagagcatcagactt

SEQ ID NO: 18020 - DNA, 31 bp, Homo Sapiens
ggatagctcagtcggtagagcatcagacttt

SEQ ID NO: 18021 - DNA, 32 bp, Homo Sapiens
ggatagctcagtcggtagagcatcagactttt

SEQ ID NO: 18022 - DNA, 24 bp, Homo Sapiens
ggatagctcagttggtagagcatc

SEQ ID NO: 18023 - DNA, 21 bp, Homo Sapiens
ggatcagaagattccaggttc

SEQ ID NO: 18024 - DNA, 22 bp, Homo Sapiens
ggatcagaagattccaggttcg

SEQ ID NO: 18025 - DNA, 24 bp, Homo Sapiens
ggatcagaagattccaggttcgac

SEQ ID NO: 18026 - DNA, 38 bp, Homo Sapiens
ggatcagaagattccaggttcgactcctggctggctcg

SEQ ID NO: 18027 - DNA, 40 bp, Homo Sapiens
ggatcagaagattccaggttcgactcctggctggctcgcc

SEQ ID NO: 18028 - DNA, 41 bp, Homo Sapiens
ggatcagaagattccaggttcgactcctggctggctcgcca

SEQ ID NO: 18029 - DNA, 21 bp, Homo Sapiens
ggatcagaagattctaggttc

SEQ ID NO: 18030 - DNA, 22 bp, Homo Sapiens
ggatcagaagattctaggttcg

SEQ ID NO: 18031 - DNA, 31 bp, Homo Sapiens
ggatcagaagattctaggttcgactcctggc

SEQ ID NO: 18032 - DNA, 37 bp, Homo Sapiens
ggatcagaagattctaggttcgactcctggctggctc

SEQ ID NO: 18033 - DNA, 38 bp, Homo Sapiens
ggatcagaagattctaggttcgactcctggctggctcg

SEQ ID NO: 18034 - DNA, 39 bp, Homo Sapiens
ggatcagaagattctaggttcgactcctggctggctcgc

SEQ ID NO: 18035 - DNA, 40 bp, Homo Sapiens
ggatcagaagattctaggttcgactcctggctggctcgcc

SEQ ID NO: 18036 - DNA, 41 bp, Homo Sapiens
ggatcagaagattctaggttcgactcctggctggctcgcca

SEQ ID NO: 18037 - DNA, 19 bp, Homo Sapiens
ggatcagaagattgagggt

SEQ ID NO: 18038 - DNA, 20 bp, Homo Sapiens
ggatcagaagattgagggtt

SEQ ID NO: 18039 - DNA, 21 bp, Homo Sapiens
ggatcagaagattgagggttc

SEQ ID NO: 18040 - DNA, 22 bp, Homo Sapiens
ggatcagaagattgagggttcg

SEQ ID NO: 18041 - DNA, 29 bp, Homo Sapiens
ggatcagaagattgagggttcgagtccct

SEQ ID NO: 18042 - DNA, 39 bp, Homo Sapiens
ggatcagaagattgagggttcgagtcccttcgtggtcgc

SEQ ID NO: 18043 - DNA, 40 bp, Homo Sapiens
ggatcagaagattgagggttcgagtcccttcgtggtcgcc

SEQ ID NO: 18044 - DNA, 41 bp, Homo Sapiens
ggatcagaagattgagggttcgagtcccttcgtggtcgcca

SEQ ID NO: 18045 - DNA, 20 bp, Homo Sapiens
ggatcagaagattgcaggtt

SEQ ID NO: 18046 - DNA, 21 bp, Homo Sapiens
ggatcagaagattgcaggttc

SEQ ID NO: 18047 - DNA, 29 bp, Homo Sapiens
ggatcagaagattgcaggttcgagtcctg

SEQ ID NO: 18048 - DNA, 40 bp, Homo Sapiens
ggatcagaagattgcaggttcgagtcctgccgcggtcgcc

SEQ ID NO: 18049 - DNA, 16 bp, Homo Sapiens
ggatggaggcgtgggt

SEQ ID NO: 18050 - DNA, 17 bp, Homo Sapiens
ggatggaggcgtgggtt

SEQ ID NO: 18051 - DNA, 18 bp, Homo Sapiens
ggatggaggcgtgggttc

SEQ ID NO: 18052 - DNA, 35 bp, Homo Sapiens
ggatggaggcgtgggttcgaatcccacttctgaca

SEQ ID NO: 18053 - DNA, 37 bp, Homo Sapiens
ggatggaggcgtgggttcgaatcccacttctgacacc

SEQ ID NO: 18054 - DNA, 16 bp, Homo Sapiens
ggatggccgagcggtc

SEQ ID NO: 18055 - DNA, 17 bp, Homo Sapiens
ggatggccgagcggtct

SEQ ID NO: 18056 - DNA, 18 bp, Homo Sapiens
ggatggccgagcggtcta

SEQ ID NO: 18057 - DNA, 20 bp, Homo Sapiens
ggatggccgagcggtctaag

SEQ ID NO: 18058 - DNA, 22 bp, Homo Sapiens
ggatggccgagcggtctaaggc

SEQ ID NO: 18059 - DNA, 26 bp, Homo Sapiens
ggatggccgagcggtctaaggcgctg

SEQ ID NO: 18060 - DNA, 31 bp, Homo Sapiens
ggatggccgagcggtctaaggcgctgcgttc

SEQ ID NO: 18061 - DNA, 33 bp, Homo Sapiens
ggatggccgagcggtctaaggcgctgcgttcag

SEQ ID NO: 18062 - DNA, 18 bp, Homo Sapiens
ggatggccgagtggtcta

SEQ ID NO: 18063 - DNA, 20 bp, Homo Sapiens
ggatggccgagtggtctaag

SEQ ID NO: 18064 - DNA, 21 bp, Homo Sapiens
ggatggccgagtggtctaagg

SEQ ID NO: 18065 - DNA, 31 bp, Homo Sapiens
ggatggccgagtggtctaaggcgccagactc

SEQ ID NO: 18066 - DNA, 19 bp, Homo Sapiens
ggatggccgagtggttaag

SEQ ID NO: 18067 - DNA, 19 bp, Homo Sapiens
ggatggggtgtgataggtg

SEQ ID NO: 18068 - DNA, 21 bp, Homo Sapiens
ggatggggtgtgataggtggc

SEQ ID NO: 18069 - DNA, 25 bp, Homo Sapiens
ggatggggtgtgataggtggcacgg

SEQ ID NO: 18070 - DNA, 26 bp, Homo Sapiens
ggatggggtgtgataggtggcacgga

SEQ ID NO: 18071 - DNA, 27 bp, Homo Sapiens
ggatggggtgtgataggtggcacggag

SEQ ID NO: 18072 - DNA, 28 bp, Homo Sapiens
ggatggggtgtgataggtggcacggaga

SEQ ID NO: 18073 - DNA, 29 bp, Homo Sapiens
ggatggggtgtgataggtggcacggagaa

SEQ ID NO: 18074 - DNA, 30 bp, Homo Sapiens
ggatggggtgtgataggtggcacggagaat

SEQ ID NO: 18075 - DNA, 31 bp, Homo Sapiens
ggatggggtgtgataggtggcacggagaatt

SEQ ID NO: 18076 - DNA, 32 bp, Homo Sapiens
ggatggggtgtgataggtggcacggagaattt

SEQ ID NO: 18077 - DNA, 33 bp, Homo Sapiens
ggatggggtgtgataggtggcacggagaatttt

SEQ ID NO: 18078 - DNA, 34 bp, Homo Sapiens
ggatggggtgtgataggtggcacggagaattttg

SEQ ID NO: 18079 - DNA, 27 bp, Homo Sapiens
ggatgggttcgattctcatagtcctag

SEQ ID NO: 18080 - DNA, 28 bp, Homo Sapiens
ggatgggttcgattctcatagtcctagc

SEQ ID NO: 18081 - DNA, 29 bp, Homo Sapiens
ggatgggttcgattctcatagtcctagcc

SEQ ID NO: 18082 - DNA, 30 bp, Homo Sapiens
ggatgggttcgattctcatagtcctagcca

SEQ ID NO: 18083 - DNA, 16 bp, Homo Sapiens
ggatgtagctcagtgg

SEQ ID NO: 18084 - DNA, 33 bp, Homo Sapiens
ggatgtagctcagtggtagagcgcatgcttcgc

SEQ ID NO: 18085 - DNA, 33 bp, Homo Sapiens
ggatgtagctcagtggtagagcgcgcgcttcgc

SEQ ID NO: 18086 - DNA, 19 bp, Homo Sapiens
ggattagctcaaatggtag

SEQ ID NO: 18087 - DNA, 20 bp, Homo Sapiens
ggattagctcaaatggtaga

SEQ ID NO: 18088 - DNA, 29 bp, Homo Sapiens
ggattcctggttttcacccaggcggcccg

SEQ ID NO: 18089 - DNA, 37 bp, Homo Sapiens
ggattcctggttttcacccaggcggcccgggttcgac

SEQ ID NO: 18090 - DNA, 16 bp, Homo Sapiens
ggattcggcgctctca

SEQ ID NO: 18091 - DNA, 17 bp, Homo Sapiens
ggattcggcgctctcac

SEQ ID NO: 18092 - DNA, 18 bp, Homo Sapiens
ggattcggcgctctcacc

SEQ ID NO: 18093 - DNA, 19 bp, Homo Sapiens
ggattcggcgctctcaccg

SEQ ID NO: 18094 - DNA, 21 bp, Homo Sapiens
ggattcggcgctctcaccgcc

SEQ ID NO: 18095 - DNA, 23 bp, Homo Sapiens
ggattcggcgctctcaccgccgc

SEQ ID NO: 18096 - DNA, 26 bp, Homo Sapiens
ggattcggcgctctcaccgccgcggc

SEQ ID NO: 18097 - DNA, 27 bp, Homo Sapiens
ggattcggcgctctcaccgccgcggcc

SEQ ID NO: 18098 - DNA, 28 bp, Homo Sapiens
ggattcggcgctctcaccgccgcggccc

SEQ ID NO: 18099 - DNA, 29 bp, Homo Sapiens
ggattcggcgctctcaccgccgcggcccg

SEQ ID NO: 18100 - DNA, 30 bp, Homo Sapiens
ggattcggcgctctcaccgccgcggcccgg

SEQ ID NO: 18101 - DNA, 31 bp, Homo Sapiens
ggattcggcgctctcaccgccgcggcccggg

SEQ ID NO: 18102 - DNA, 32 bp, Homo Sapiens
ggattcggcgctctcaccgccgcggcccgggt

SEQ ID NO: 18103 - DNA, 33 bp, Homo Sapiens
ggattcggcgctctcaccgccgcggcccgggtt

SEQ ID NO: 18104 - DNA, 34 bp, Homo Sapiens
ggattcggcgctctcaccgccgcggcccgggttc

SEQ ID NO: 18105 - DNA, 17 bp, Homo Sapiens
ggattcggcgctttcac

SEQ ID NO: 18106 - DNA, 21 bp, Homo Sapiens
ggattcggcgctttcaccgcc

SEQ ID NO: 18107 - DNA, 35 bp, Homo Sapiens
ggattctcagggatgggttcgattctcatagtcct

SEQ ID NO: 18108 - DNA, 37 bp, Homo Sapiens
ggattctcagggatgggttcgattctcatagtcctag

SEQ ID NO: 18109 - DNA, 39 bp, Homo Sapiens
ggattctcagggatgggttcgattctcatagtcctagcc

SEQ ID NO: 18110 - DNA, 40 bp, Homo Sapiens
ggattctcagggatgggttcgattctcatagtcctagcca

SEQ ID NO: 18111 - DNA, 20 bp, Homo Sapiens
ggattgtgggttcgagtccc

SEQ ID NO: 18112 - DNA, 30 bp, Homo Sapiens
ggattgtgggttcgagtcccacctggggta

SEQ ID NO: 18113 - DNA, 28 bp, Homo Sapiens
ggattgtgggttcgagtcccatctgggg

SEQ ID NO: 18114 - DNA, 32 bp, Homo Sapiens
ggattgtgggttcgagtcccatctggggtgcc

SEQ ID NO: 18115 - DNA, 31 bp, Homo Sapiens
ggattgtgggttcgagtcccatctgggtcgc

SEQ ID NO: 18116 - DNA, 32 bp, Homo Sapiens
ggattgtgggttcgagtcccatctgggtcgcc

SEQ ID NO: 18117 - DNA, 33 bp, Homo Sapiens
ggattgtgggttcgagtcccatctgggtcgcca

SEQ ID NO: 18118 - DNA, 21 bp, Homo Sapiens
ggatttaggctccagtcattt

SEQ ID NO: 18119 - DNA, 34 bp, Homo Sapiens
ggcacggagaattttggattctcagggatgggtt

SEQ ID NO: 18120 - DNA, 16 bp, Homo Sapiens
ggcagagcatttgact

SEQ ID NO: 18121 - DNA, 16 bp, Homo Sapiens
ggcagagcccggtaat

SEQ ID NO: 18122 - DNA, 26 bp, Homo Sapiens
ggcagagcccggtaatcgcataaaac

SEQ ID NO: 18123 - DNA, 28 bp, Homo Sapiens
ggcagagcccggtaatcgcataaaactt

SEQ ID NO: 18124 - DNA, 29 bp, Homo Sapiens
ggcagagcccggtaatcgcataaaactta

SEQ ID NO: 18125 - DNA, 33 bp, Homo Sapiens
ggcagagcccggtaatcgcataaaacttaaaac

SEQ ID NO: 18126 - DNA, 34 bp, Homo Sapiens
ggcagagcccggtaatcgcataaaacttaaaact

SEQ ID NO: 18127 - DNA, 35 bp, Homo Sapiens
ggcagagcccggtaatcgcataaaacttaaaactt

SEQ ID NO: 18128 - DNA, 19 bp, Homo Sapiens
ggcagcgatggccgagtgg

SEQ ID NO: 18129 - DNA, 30 bp, Homo Sapiens
ggcatagctcagtggtagagcatttgactg

SEQ ID NO: 18130 - DNA, 31 bp, Homo Sapiens
ggcatagctcagtggtagagcatttgactgc

SEQ ID NO: 18131 - DNA, 20 bp, Homo Sapiens
ggcatcagcctccggagctg

SEQ ID NO: 18132 - DNA, 27 bp, Homo Sapiens
ggcatcagcctccggagctggggattg

SEQ ID NO: 18133 - DNA, 28 bp, Homo Sapiens
ggcatcagcctccggagctggggattgt

SEQ ID NO: 18134 - DNA, 35 bp, Homo Sapiens
ggcatcagcctccggagctggggattgtgggttcg

SEQ ID NO: 18135 - DNA, 31 bp, Homo Sapiens
ggcatgggtggttcagtggtagaattctcgc

SEQ ID NO: 18136 - DNA, 32 bp, Homo Sapiens
ggcatgggtggttcagtggtagaattctcgcc

SEQ ID NO: 18137 - DNA, 33 bp, Homo Sapiens
ggcatgggtggttcagtggtagaattctcgcct

SEQ ID NO: 18138 - DNA, 34 bp, Homo Sapiens
ggcatgggtggttcagtggtagaattctcgcctg

SEQ ID NO: 18139 - DNA, 35 bp, Homo Sapiens
ggcatgggtggttcagtggtagaattctcgcctgc

SEQ ID NO: 18140 - DNA, 19 bp, Homo Sapiens
ggcattggcctcctaagcc

SEQ ID NO: 18141 - DNA, 28 bp, Homo Sapiens
ggcattggcctcctaagccagggattgt

SEQ ID NO: 18142 - DNA, 32 bp, Homo Sapiens
ggcattggtggttcagtggtagaattctcgcc

SEQ ID NO: 18143 - DNA, 33 bp, Homo Sapiens
ggcattggtggttcagtggtagaattctcgcct

SEQ ID NO: 18144 - DNA, 34 bp, Homo Sapiens
ggcattggtggttcagtggtagaattctcgcctg

SEQ ID NO: 18145 - DNA, 35 bp, Homo Sapiens
ggcattggtggttcagtggtagaattctcgcctgc

SEQ ID NO: 18146 - DNA, 36 bp, Homo Sapiens
ggcattggtggttcagtggtagaattctcgcctgcc

SEQ ID NO: 18147 - DNA, 37 bp, Homo Sapiens
ggcattggtggttcagtggtagaattctcgcctgcca

SEQ ID NO: 18148 - DNA, 18 bp, Homo Sapiens
ggccagtggcgcaatgga

SEQ ID NO: 18149 - DNA, 22 bp, Homo Sapiens
ggccatgatcgtatagtggtta

SEQ ID NO: 18150 - DNA, 26 bp, Homo Sapiens
ggcccataacccagaggtcgatggat

SEQ ID NO: 18151 - DNA, 27 bp, Homo Sapiens
ggcccataacccagaggtcgatggatc

SEQ ID NO: 18152 - DNA, 16 bp, Homo Sapiens
ggcccataccccgaaa

SEQ ID NO: 18153 - DNA, 17 bp, Homo Sapiens
ggcccataccccgaaaa

SEQ ID NO: 18154 - DNA, 18 bp, Homo Sapiens
ggcccataccccgaaaat

SEQ ID NO: 18155 - DNA, 19 bp, Homo Sapiens
ggcccataccccgaaaatg

SEQ ID NO: 18156 - DNA, 20 bp, Homo Sapiens
ggcccataccccgaaaatgt

SEQ ID NO: 18157 - DNA, 21 bp, Homo Sapiens
ggcccataccccgaaaatgtt

SEQ ID NO: 18158 - DNA, 22 bp, Homo Sapiens
ggcccataccccgaaaatgttg

SEQ ID NO: 18159 - DNA, 24 bp, Homo Sapiens
ggcccataccccgaaaatgttggt

SEQ ID NO: 18160 - DNA, 25 bp, Homo Sapiens
ggcccataccccgaaaatgttggtt

SEQ ID NO: 18161 - DNA, 26 bp, Homo Sapiens
ggcccataccccgaaaatgttggtta

SEQ ID NO: 18162 - DNA, 27 bp, Homo Sapiens
ggcccataccccgaaaatgttggttat

SEQ ID NO: 18163 - DNA, 28 bp, Homo Sapiens
ggcccataccccgaaaatgttggttata

SEQ ID NO: 18164 - DNA, 29 bp, Homo Sapiens
ggcccataccccgaaaatgttggttatac

SEQ ID NO: 18165 - DNA, 30 bp, Homo Sapiens
ggcccataccccgaaaatgttggttatacc

SEQ ID NO: 18166 - DNA, 31 bp, Homo Sapiens
ggcccataccccgaaaatgttggttataccc

SEQ ID NO: 18167 - DNA, 32 bp, Homo Sapiens
ggcccataccccgaaaatgttggttataccct

SEQ ID NO: 18168 - DNA, 33 bp, Homo Sapiens
ggcccataccccgaaaatgttggttataccctt

SEQ ID NO: 18169 - DNA, 34 bp, Homo Sapiens
ggcccataccccgaaaatgttggttatacccttc

SEQ ID NO: 18170 - DNA, 35 bp, Homo Sapiens
ggcccataccccgaaaatgttggttatacccttcc

SEQ ID NO: 18171 - DNA, 36 bp, Homo Sapiens
ggcccataccccgaaaatgttggttatacccttccc

SEQ ID NO: 18172 - DNA, 40 bp, Homo Sapiens
ggcccataccccgaaaatgttggttatacccttcccgtac

SEQ ID NO: 18173 - DNA, 41 bp, Homo Sapiens
ggcccataccccgaaaatgttggttatacccttcccgtact

SEQ ID NO: 18174 - DNA, 42 bp, Homo Sapiens
ggcccataccccgaaaatgttggttatacccttcccgtacta

SEQ ID NO: 18175 - DNA, 43 bp, Homo Sapiens
ggcccataccccgaaaatgttggttatacccttcccgtactac

SEQ ID NO: 18176 - DNA, 44 bp, Homo Sapiens
ggcccataccccgaaaatgttggttatacccttcccgtactacc

SEQ ID NO: 18177 - DNA, 45 bp, Homo Sapiens
ggcccataccccgaaaatgttggttatacccttcccgtactacca

SEQ ID NO: 18178 - DNA, 17 bp, Homo Sapiens
ggccccatggtgtaatg

SEQ ID NO: 18179 - DNA, 18 bp, Homo Sapiens
ggccccatggtgtaatgg

SEQ ID NO: 18180 - DNA, 19 bp, Homo Sapiens
ggccccatggtgtaatggt

SEQ ID NO: 18181 - DNA, 29 bp, Homo Sapiens
ggccccatggtgtaatggtcagcactctg

SEQ ID NO: 18182 - DNA, 32 bp, Homo Sapiens
ggccccatggtgtaatggtcagcactctggac

SEQ ID NO: 18183 - DNA, 33 bp, Homo Sapiens
ggccccatggtgtaatggtcagcactctggact

SEQ ID NO: 18184 - DNA, 34 bp, Homo Sapiens
ggccccatggtgtaatggtcagcactctggactc

SEQ ID NO: 18185 - DNA, 35 bp, Homo Sapiens
ggccccatggtgtaatggtcagcactctggactct

SEQ ID NO: 18186 - DNA, 36 bp, Homo Sapiens
ggccccatggtgtaatggtcagcactctggactctg

SEQ ID NO: 18187 - DNA, 37 bp, Homo Sapiens
ggccccatggtgtaatggtcagcactctggactctga

SEQ ID NO: 18188 - DNA, 40 bp, Homo Sapiens
ggccccatggtgtaatggtcagcactctggactctgaatc

SEQ ID NO: 18189 - DNA, 41 bp, Homo Sapiens
ggccccatggtgtaatggtcagcactctggactctgaatcc

SEQ ID NO: 18190 - DNA, 22 bp, Homo Sapiens
ggccccatggtgtaatggttag

SEQ ID NO: 18191 - DNA, 23 bp, Homo Sapiens
ggccccatggtgtaatggttagc

SEQ ID NO: 18192 - DNA, 28 bp, Homo Sapiens
ggccccatggtgtaatggttagcactct

SEQ ID NO: 18193 - DNA, 29 bp, Homo Sapiens
ggccccatggtgtaatggttagcactctg

SEQ ID NO: 18194 - DNA, 30 bp, Homo Sapiens
ggccccatggtgtaatggttagcactctgg

SEQ ID NO: 18195 - DNA, 32 bp, Homo Sapiens
ggccccatggtgtaatggttagcactctggac

SEQ ID NO: 18196 - DNA, 33 bp, Homo Sapiens
ggccccatggtgtaatggttagcactctggact

SEQ ID NO: 18197 - DNA, 34 bp, Homo Sapiens
ggccccatggtgtaatggttagcactctggactt

SEQ ID NO: 18198 - DNA, 35 bp, Homo Sapiens
ggccccatggtgtaatggttagcactctggacttt

SEQ ID NO: 18199 - DNA, 36 bp, Homo Sapiens
ggccccatggtgtaatggttagcactctggactttg

SEQ ID NO: 18200 - DNA, 37 bp, Homo Sapiens
ggccccatggtgtaatggttagcactctggactttga

SEQ ID NO: 18201 - DNA, 40 bp, Homo Sapiens
ggccccatggtgtaatggttagcactctggactttgaatc

SEQ ID NO: 18202 - DNA, 41 bp, Homo Sapiens
ggccccatggtgtaatggttagcactctggactttgaatcc

SEQ ID NO: 18203 - DNA, 22 bp, Homo Sapiens
ggccccgggttcaatccccggc

SEQ ID NO: 18204 - DNA, 32 bp, Homo Sapiens
ggccccgggttcaatccccggcacctccacca

SEQ ID NO: 18205 - DNA, 22 bp, Homo Sapiens
ggccccgggttcgatccccggc

SEQ ID NO: 18206 - DNA, 16 bp, Homo Sapiens
ggcccgggttcgactc

SEQ ID NO: 18207 - DNA, 29 bp, Homo Sapiens
ggcccgggttcgactcccggtgtgggaac

SEQ ID NO: 18208 - DNA, 30 bp, Homo Sapiens
ggcccgggttcgactcccggtgtgggaacc

SEQ ID NO: 18209 - DNA, 31 bp, Homo Sapiens
ggcccgggttcgactcccggtgtgggaacca

SEQ ID NO: 18210 - DNA, 17 bp, Homo Sapiens
ggcccgggttcgattcc

SEQ ID NO: 18211 - DNA, 18 bp, Homo Sapiens
ggcccgggttcgattccc

SEQ ID NO: 18212 - DNA, 21 bp, Homo Sapiens
ggcccgggttcgattcccggt

SEQ ID NO: 18213 - DNA, 16 bp, Homo Sapiens
ggccctatagctcagg

SEQ ID NO: 18214 - DNA, 17 bp, Homo Sapiens
ggccctatagctcaggg

SEQ ID NO: 18215 - DNA, 18 bp, Homo Sapiens
ggccctatagctcagggg

SEQ ID NO: 18216 - DNA, 19 bp, Homo Sapiens
ggccctatagctcaggggt

SEQ ID NO: 18217 - DNA, 29 bp, Homo Sapiens
ggccctatagctcaggggttagagcactg

SEQ ID NO: 18218 - DNA, 30 bp, Homo Sapiens
ggccctatagctcaggggttagagcactgg

SEQ ID NO: 18219 - DNA, 31 bp, Homo Sapiens
ggccctatagctcaggggttagagcactggt

SEQ ID NO: 18220 - DNA, 32 bp, Homo Sapiens
ggccctatagctcaggggttagagcactggtc

SEQ ID NO: 18221 - DNA, 33 bp, Homo Sapiens
ggccctatagctcaggggttagagcactggtct

SEQ ID NO: 18222 - DNA, 34 bp, Homo Sapiens
ggccctatagctcaggggttagagcactggtctt

SEQ ID NO: 18223 - DNA, 35 bp, Homo Sapiens
ggccctatagctcaggggttagagcactggtcttg

SEQ ID NO: 18224 - DNA, 37 bp, Homo Sapiens
ggccctatagctcaggggttagagcactggtcttgta

SEQ ID NO: 18225 - DNA, 21 bp, Homo Sapiens
ggccctgtggcttagctggtc

SEQ ID NO: 18226 - DNA, 16 bp, Homo Sapiens
ggccgagcggtctaag

SEQ ID NO: 18227 - DNA, 18 bp, Homo Sapiens
ggccgagcggtctaaggc

SEQ ID NO: 18228 - DNA, 22 bp, Homo Sapiens
ggccgagcggtctaaggcgctg

SEQ ID NO: 18229 - DNA, 23 bp, Homo Sapiens
ggccgagcggtctaaggcgctgc

SEQ ID NO: 18230 - DNA, 26 bp, Homo Sapiens
ggccgagtggtctaaggcgccagact

SEQ ID NO: 18231 - DNA, 24 bp, Homo Sapiens
ggccgagtggttaaggcgatggac

SEQ ID NO: 18232 - DNA, 27 bp, Homo Sapiens
ggccgagtggttaaggcgatggactgc

SEQ ID NO: 18233 - DNA, 28 bp, Homo Sapiens
ggccgagtggttaaggcgatggactgct

SEQ ID NO: 18234 - DNA, 21 bp, Homo Sapiens
ggccgcagcaacctcggttcg

SEQ ID NO: 18235 - DNA, 34 bp, Homo Sapiens
ggccgcagcaacctcggttcgaatccgagtcacg

SEQ ID NO: 18236 - DNA, 39 bp, Homo Sapiens
ggccgcagcaacctcggttcgaatccgagtcacggcacc

SEQ ID NO: 18237 - DNA, 18 bp, Homo Sapiens
ggccgcgtggcctaatgg

SEQ ID NO: 18238 - DNA, 19 bp, Homo Sapiens
ggccgcgtggcctaatgga

SEQ ID NO: 18239 - DNA, 29 bp, Homo Sapiens
ggccgcgtggcctaatggataaggcgtct

SEQ ID NO: 18240 - DNA, 30 bp, Homo Sapiens
ggccgcgtggcctaatggataaggcgtctg

SEQ ID NO: 18241 - DNA, 33 bp, Homo Sapiens
ggccgcgtggcctaatggataaggcgtctgact

SEQ ID NO: 18242 - DNA, 36 bp, Homo Sapiens
ggccgcgtggcctaatggataaggcgtctgacttcg

SEQ ID NO: 18243 - DNA, 32 bp, Homo Sapiens
ggccgcgtggcctaatggataaggcgtctgat

SEQ ID NO: 18244 - DNA, 33 bp, Homo Sapiens
ggccgcgtggcctaatggataaggcgtctgatt

SEQ ID NO: 18245 - DNA, 34 bp, Homo Sapiens
ggccgcgtggcctaatggataaggcgtctgattc

SEQ ID NO: 18246 - DNA, 35 bp, Homo Sapiens
ggccgcgtggcctaatggataaggcgtctgattcc

SEQ ID NO: 18247 - DNA, 36 bp, Homo Sapiens
ggccgcgtggcctaatggataaggcgtctgattccg

SEQ ID NO: 18248 - DNA, 16 bp, Homo Sapiens
ggccggttagctcagt

SEQ ID NO: 18249 - DNA, 19 bp, Homo Sapiens
ggccggttagctcagtcgg

SEQ ID NO: 18250 - DNA, 20 bp, Homo Sapiens
ggccggttagctcagtcggc

SEQ ID NO: 18251 - DNA, 33 bp, Homo Sapiens
ggccggttagctcagtcggctagagcgtggtgc

SEQ ID NO: 18252 - DNA, 18 bp, Homo Sapiens
ggccggttagctcagttg

SEQ ID NO: 18253 - DNA, 19 bp, Homo Sapiens
ggccggttagctcagttgg

SEQ ID NO: 18254 - DNA, 20 bp, Homo Sapiens
ggccggttagctcagttggt

SEQ ID NO: 18255 - DNA, 21 bp, Homo Sapiens
ggccggttagctcagttggta

SEQ ID NO: 18256 - DNA, 35 bp, Homo Sapiens
ggccggttagctcagttggtaagagcgtggtgctg

SEQ ID NO: 18257 - DNA, 21 bp, Homo Sapiens
ggccggttagctcagttggtc

SEQ ID NO: 18258 - DNA, 21 bp, Homo Sapiens
ggccggttagctcagttggtt

SEQ ID NO: 18259 - DNA, 23 bp, Homo Sapiens
ggccggttagctcagttggttag

SEQ ID NO: 18260 - DNA, 24 bp, Homo Sapiens
ggccggttagctcagttggttaga

SEQ ID NO: 18261 - DNA, 25 bp, Homo Sapiens
ggccggttagctcagttggttagag

SEQ ID NO: 18262 - DNA, 26 bp, Homo Sapiens
ggccggttagctcagttggttagagc

SEQ ID NO: 18263 - DNA, 33 bp, Homo Sapiens
ggccggttagctcagttggttagagcgtggtgc

SEQ ID NO: 18264 - DNA, 34 bp, Homo Sapiens
ggccggttagctcagttggttagagcgtggtgct

SEQ ID NO: 18265 - DNA, 16 bp, Homo Sapiens
ggccgtgatcgtatag

SEQ ID NO: 18266 - DNA, 17 bp, Homo Sapiens
ggccgtgatcgtatagt

SEQ ID NO: 18267 - DNA, 18 bp, Homo Sapiens
ggccgtgatcgtatagtg

SEQ ID NO: 18268 - DNA, 19 bp, Homo Sapiens
ggccgtgatcgtatagtgg

SEQ ID NO: 18269 - DNA, 20 bp, Homo Sapiens
ggccgtgatcgtatagtggt

SEQ ID NO: 18270 - DNA, 21 bp, Homo Sapiens
ggccgtgatcgtatagtggtt

SEQ ID NO: 18271 - DNA, 22 bp, Homo Sapiens
ggccgtgatcgtatagtggtta

SEQ ID NO: 18272 - DNA, 23 bp, Homo Sapiens
ggccgtgatcgtatagtggttag

SEQ ID NO: 18273 - DNA, 24 bp, Homo Sapiens
ggccgtgatcgtatagtggttagt

SEQ ID NO: 18274 - DNA, 25 bp, Homo Sapiens
ggccgtgatcgtatagtggttagta

SEQ ID NO: 18275 - DNA, 26 bp, Homo Sapiens
ggccgtgatcgtatagtggttagtac

SEQ ID NO: 18276 - DNA, 27 bp, Homo Sapiens
ggccgtgatcgtatagtggttagtact

SEQ ID NO: 18277 - DNA, 28 bp, Homo Sapiens
ggccgtgatcgtatagtggttagtactc

SEQ ID NO: 18278 - DNA, 29 bp, Homo Sapiens
ggccgtgatcgtatagtggttagtactct

SEQ ID NO: 18279 - DNA, 30 bp, Homo Sapiens
ggccgtgatcgtatagtggttagtactctg

SEQ ID NO: 18280 - DNA, 31 bp, Homo Sapiens
ggccgtgatcgtatagtggttagtactctgc

SEQ ID NO: 18281 - DNA, 32 bp, Homo Sapiens
ggccgtgatcgtatagtggttagtactctgcg

SEQ ID NO: 18282 - DNA, 33 bp, Homo Sapiens
ggccgtgatcgtatagtggttagtactctgcgt

SEQ ID NO: 18283 - DNA, 34 bp, Homo Sapiens
ggccgtgatcgtatagtggttagtactctgcgtt

SEQ ID NO: 18284 - DNA, 35 bp, Homo Sapiens
ggccgtgatcgtatagtggttagtactctgcgttg

SEQ ID NO: 18285 - DNA, 36 bp, Homo Sapiens
ggccgtgatcgtatagtggttagtactctgcgttgt

SEQ ID NO: 18286 - DNA, 37 bp, Homo Sapiens
ggccgtgatcgtatagtggttagtactctgcgttgtg

SEQ ID NO: 18287 - DNA, 38 bp, Homo Sapiens
ggccgtgatcgtatagtggttagtactctgcgttgtgg

SEQ ID NO: 18288 - DNA, 39 bp, Homo Sapiens
ggccgtgatcgtatagtggttagtactctgcgttgtggc

SEQ ID NO: 18289 - DNA, 40 bp, Homo Sapiens
ggccgtgatcgtatagtggttagtactctgcgttgtggcc

SEQ ID NO: 18290 - DNA, 27 bp, Homo Sapiens
ggcctaatggataaggcatcagcctcc

SEQ ID NO: 18291 - DNA, 28 bp, Homo Sapiens
ggcctaatggataaggcgtctgattccg

SEQ ID NO: 18292 - DNA, 18 bp, Homo Sapiens
ggcctcgtggcgcaacgg

SEQ ID NO: 18293 - DNA, 31 bp, Homo Sapiens
ggcctcgtggcgcaacggtagcgcgtctgac

SEQ ID NO: 18294 - DNA, 32 bp, Homo Sapiens
ggcctcgtggcgcaacggtagcgcgtctgact

SEQ ID NO: 18295 - DNA, 33 bp, Homo Sapiens
ggcctcgtggcgcaacggtagcgcgtctgactc

SEQ ID NO: 18296 - DNA, 34 bp, Homo Sapiens
ggcctcgtggcgcaacggtagcgcgtctgactcc

SEQ ID NO: 18297 - DNA, 35 bp, Homo Sapiens
ggcctcgtggcgcaacggtagcgcgtctgactcca

SEQ ID NO: 18298 - DNA, 17 bp, Homo Sapiens
ggcctctttttaccacc

SEQ ID NO: 18299 - DNA, 18 bp, Homo Sapiens
ggcctctttttaccacca

SEQ ID NO: 18300 - DNA, 16 bp, Homo Sapiens
ggcgcaatcggttagc

SEQ ID NO: 18301 - DNA, 26 bp, Homo Sapiens
ggcgcaatcggttagcgcgcggtact

SEQ ID NO: 18302 - DNA, 24 bp, Homo Sapiens
ggcgcaatggatagcgcattggac

SEQ ID NO: 18303 - DNA, 20 bp, Homo Sapiens
ggcgccgtggcttagttggt

SEQ ID NO: 18304 - DNA, 22 bp, Homo Sapiens
ggcgcggtggccaagtggtaag

SEQ ID NO: 18305 - DNA, 24 bp, Homo Sapiens
ggcgcggtggccaagtggtaaggc

SEQ ID NO: 18306 - DNA, 32 bp, Homo Sapiens
ggcgcggtggccaagtggtaaggcgtcggtct

SEQ ID NO: 18307 - DNA, 21 bp, Homo Sapiens
ggcgctctcaccgccgcggcc

SEQ ID NO: 18308 - DNA, 22 bp, Homo Sapiens
ggcgctctcaccgccgcggccc

SEQ ID NO: 18309 - DNA, 23 bp, Homo Sapiens
ggcgctctcaccgccgcggcccg

SEQ ID NO: 18310 - DNA, 24 bp, Homo Sapiens
ggcgctctcaccgccgcggcccgg

SEQ ID NO: 18311 - DNA, 25 bp, Homo Sapiens
ggcgctctcaccgccgcggcccggg

SEQ ID NO: 18312 - DNA, 26 bp, Homo Sapiens
ggcgctctcaccgccgcggcccgggt

SEQ ID NO: 18313 - DNA, 27 bp, Homo Sapiens
ggcgctctcaccgccgcggcccgggtt

SEQ ID NO: 18314 - DNA, 28 bp, Homo Sapiens
ggcgctctcaccgccgcggcccgggttc

SEQ ID NO: 18315 - DNA, 29 bp, Homo Sapiens
ggcgctctcaccgccgcggcccgggttcg

SEQ ID NO: 18316 - DNA, 46 bp, Homo Sapiens
ggcgctctcaccgccgcggcccgggttcgattcccggtcagggaac

SEQ ID NO: 18317 - DNA, 47 bp, Homo Sapiens
ggcgctctcaccgccgcggcccgggttcgattcccggtcagggaacc

SEQ ID NO: 18318 - DNA, 48 bp, Homo Sapiens
ggcgctctcaccgccgcggcccgggttcgattcccggtcagggaacca

SEQ ID NO: 18319 - DNA, 21 bp, Homo Sapiens
ggcggcccgggttcgactccc

SEQ ID NO: 18320 - DNA, 24 bp, Homo Sapiens
ggcggcccgggttcgactcccggt

SEQ ID NO: 18321 - DNA, 25 bp, Homo Sapiens
ggcggcccgggttcgactcccggtg

SEQ ID NO: 18322 - DNA, 26 bp, Homo Sapiens
ggcggcccgggttcgactcccggtgt

SEQ ID NO: 18323 - DNA, 27 bp, Homo Sapiens
ggcggcccgggttcgactcccggtgtg

SEQ ID NO: 18324 - DNA, 28 bp, Homo Sapiens
ggcggcccgggttcgactcccggtgtgg

SEQ ID NO: 18325 - DNA, 29 bp, Homo Sapiens
ggcggcccgggttcgactcccggtgtggg

SEQ ID NO: 18326 - DNA, 30 bp, Homo Sapiens
ggcggcccgggttcgactcccggtgtggga

SEQ ID NO: 18327 - DNA, 31 bp, Homo Sapiens
ggcggcccgggttcgactcccggtgtgggaa

SEQ ID NO: 18328 - DNA, 32 bp, Homo Sapiens
ggcggcccgggttcgactcccggtgtgggaac

SEQ ID NO: 18329 - DNA, 33 bp, Homo Sapiens
ggcggcccgggttcgactcccggtgtgggaacc

SEQ ID NO: 18330 - DNA, 34 bp, Homo Sapiens
ggcggcccgggttcgactcccggtgtgggaacca

SEQ ID NO: 18331 - DNA, 18 bp, Homo Sapiens
ggcgtctgacttcggatc

SEQ ID NO: 18332 - DNA, 18 bp, Homo Sapiens
ggcgtctgattccggatc

SEQ ID NO: 18333 - DNA, 22 bp, Homo Sapiens
ggctaaatcctatatatcttac

SEQ ID NO: 18334 - DNA, 23 bp, Homo Sapiens
ggctaaatcctatatatcttacc

SEQ ID NO: 18335 - DNA, 24 bp, Homo Sapiens
ggctaaatcctatatatcttacca

SEQ ID NO: 18336 - DNA, 29 bp, Homo Sapiens
ggctagctcagtcgatagagcatgagact

SEQ ID NO: 18337 - DNA, 16 bp, Homo Sapiens
ggctagctcagtcggc

SEQ ID NO: 18338 - DNA, 16 bp, Homo Sapiens
ggctagctcagtcggt

SEQ ID NO: 18339 - DNA, 17 bp, Homo Sapiens
ggctagctcagtcggta

SEQ ID NO: 18340 - DNA, 18 bp, Homo Sapiens
ggctagctcagtcggtag

SEQ ID NO: 18341 - DNA, 19 bp, Homo Sapiens
ggctagctcagtcggtaga

SEQ ID NO: 18342 - DNA, 20 bp, Homo Sapiens
ggctagctcagtcggtagag

SEQ ID NO: 18343 - DNA, 21 bp, Homo Sapiens
ggctagctcagtcggtagagc

SEQ ID NO: 18344 - DNA, 22 bp, Homo Sapiens
ggctagctcagtcggtagagca

SEQ ID NO: 18345 - DNA, 23 bp, Homo Sapiens
ggctagctcagtcggtagagcat

SEQ ID NO: 18346 - DNA, 24 bp, Homo Sapiens
ggctagctcagtcggtagagcatg

SEQ ID NO: 18347 - DNA, 25 bp, Homo Sapiens
ggctagctcagtcggtagagcatga

SEQ ID NO: 18348 - DNA, 26 bp, Homo Sapiens
ggctagctcagtcggtagagcatgag

SEQ ID NO: 18349 - DNA, 27 bp, Homo Sapiens
ggctagctcagtcggtagagcatgaga

SEQ ID NO: 18350 - DNA, 28 bp, Homo Sapiens
ggctagctcagtcggtagagcatgagac

SEQ ID NO: 18351 - DNA, 29 bp, Homo Sapiens
ggctagctcagtcggtagagcatgagacc

SEQ ID NO: 18352 - DNA, 30 bp, Homo Sapiens
ggctagctcagtcggtagagcatgagaccc

SEQ ID NO: 18353 - DNA, 31 bp, Homo Sapiens
ggctagctcagtcggtagagcatgagaccct

SEQ ID NO: 18354 - DNA, 29 bp, Homo Sapiens
ggctagctcagtcggtagagcatgagact

SEQ ID NO: 18355 - DNA, 30 bp, Homo Sapiens
ggctagctcagtcggtagagcatgagactc

SEQ ID NO: 18356 - DNA, 31 bp, Homo Sapiens
ggctagctcagtcggtagagcatgagactct

SEQ ID NO: 18357 - DNA, 32 bp, Homo Sapiens
ggctagctcagtcggtagagcatgagactctt

SEQ ID NO: 18358 - DNA, 33 bp, Homo Sapiens
ggctagctcagtcggtagagcatgagactctta

SEQ ID NO: 18359 - DNA, 34 bp, Homo Sapiens
ggctagctcagtcggtagagcatgagactcttaa

SEQ ID NO: 18360 - DNA, 35 bp, Homo Sapiens
ggctagctcagtcggtagagcatgagactcttaat

SEQ ID NO: 18361 - DNA, 36 bp, Homo Sapiens
ggctagctcagtcggtagagcatgagactcttaatc

SEQ ID NO: 18362 - DNA, 37 bp, Homo Sapiens
ggctagctcagtcggtagagcatgagactcttaatct

SEQ ID NO: 18363 - DNA, 38 bp, Homo Sapiens
ggctagctcagtcggtagagcatgagactcttaatctc

SEQ ID NO: 18364 - DNA, 48 bp, Homo Sapiens
ggctagctcagtcggtagagcatgagactcttaatctcagggtcgtgg

SEQ ID NO: 18365 - DNA, 25 bp, Homo Sapiens
ggctagctcagtcggtagagcatgg

SEQ ID NO: 18366 - DNA, 26 bp, Homo Sapiens
ggctagctcagtcggtagagcatggg

SEQ ID NO: 18367 - DNA, 27 bp, Homo Sapiens
ggctagctcagtcggtagagcatggga

SEQ ID NO: 18368 - DNA, 28 bp, Homo Sapiens
ggctagctcagtcggtagagcatgggac

SEQ ID NO: 18369 - DNA, 29 bp, Homo Sapiens
ggctagctcagtcggtagagcatgggact

SEQ ID NO: 18370 - DNA, 30 bp, Homo Sapiens
ggctagctcagtcggtagagcatgggactc

SEQ ID NO: 18371 - DNA, 31 bp, Homo Sapiens
ggctagctcagtcggtagagcatgggactct

SEQ ID NO: 18372 - DNA, 32 bp, Homo Sapiens
ggctagctcagtcggtagagcatgggactctt

SEQ ID NO: 18373 - DNA, 33 bp, Homo Sapiens
ggctagctcagtcggtagagcatgggactctta

SEQ ID NO: 18374 - DNA, 34 bp, Homo Sapiens
ggctagctcagtcggtagagcatgggactcttaa

SEQ ID NO: 18375 - DNA, 35 bp, Homo Sapiens
ggctagctcagtcggtagagcatgggactcttaat

SEQ ID NO: 18376 - DNA, 36 bp, Homo Sapiens
ggctagctcagtcggtagagcatgggactcttaatc

SEQ ID NO: 18377 - DNA, 37 bp, Homo Sapiens
ggctagctcagtcggtagagcatgggactcttaatcc

SEQ ID NO: 18378 - DNA, 38 bp, Homo Sapiens
ggctagctcagtcggtagagcatgggactcttaatccc

SEQ ID NO: 18379 - DNA, 48 bp, Homo Sapiens
ggctagctcagtcggtagagcatgggactcttaatcccagggtcgtgg

SEQ ID NO: 18380 - DNA, 16 bp, Homo Sapiens
ggctaggattcggcgc

SEQ ID NO: 18381 - DNA, 17 bp, Homo Sapiens
ggctaggattcggcgct

SEQ ID NO: 18382 - DNA, 18 bp, Homo Sapiens
ggctaggattcggcgctt

SEQ ID NO: 18383 - DNA, 19 bp, Homo Sapiens
ggctaggattcggcgcttt

SEQ ID NO: 18384 - DNA, 20 bp, Homo Sapiens
ggctaggattcggcgctttc

SEQ ID NO: 18385 - DNA, 23 bp, Homo Sapiens
ggctaggattcggcgctttcacc

SEQ ID NO: 18386 - DNA, 16 bp, Homo Sapiens
ggctcacatcacccca

SEQ ID NO: 18387 - DNA, 18 bp, Homo Sapiens
ggctcacatcaccccata

SEQ ID NO: 18388 - DNA, 19 bp, Homo Sapiens
ggctcacatcaccccataa

SEQ ID NO: 18389 - DNA, 20 bp, Homo Sapiens
ggctcacatcaccccataaa

SEQ ID NO: 18390 - DNA, 21 bp, Homo Sapiens
ggctcacatcaccccataaac

SEQ ID NO: 18391 - DNA, 22 bp, Homo Sapiens
ggctcacatcaccccataaaca

SEQ ID NO: 18392 - DNA, 23 bp, Homo Sapiens
ggctcacatcaccccataaacac

SEQ ID NO: 18393 - DNA, 24 bp, Homo Sapiens
ggctcacatcaccccataaacacc

SEQ ID NO: 18394 - DNA, 25 bp, Homo Sapiens
ggctcacatcaccccataaacacca

SEQ ID NO: 18395 - DNA, 25 bp, Homo Sapiens
ggctccagtctcttcggaggcgtgg

SEQ ID NO: 18396 - DNA, 22 bp, Homo Sapiens
ggctccagtctcttcgggggcg

SEQ ID NO: 18397 - DNA, 24 bp, Homo Sapiens
ggctccagtctcttcgggggcgtg

SEQ ID NO: 18398 - DNA, 25 bp, Homo Sapiens
ggctccagtctcttcgggggcgtgg

SEQ ID NO: 18399 - DNA, 26 bp, Homo Sapiens
ggctccagtctcttcgggggcgtggg

SEQ ID NO: 18400 - DNA, 27 bp, Homo Sapiens
ggctccagtctcttcgggggcgtgggt

SEQ ID NO: 18401 - DNA, 28 bp, Homo Sapiens
ggctccagtctcttcgggggcgtgggtt

SEQ ID NO: 18402 - DNA, 17 bp, Homo Sapiens
ggctccatagctcaggg

SEQ ID NO: 18403 - DNA, 18 bp, Homo Sapiens
ggctccatagctcagggg

SEQ ID NO: 18404 - DNA, 19 bp, Homo Sapiens
ggctccatagctcaggggt

SEQ ID NO: 18405 - DNA, 27 bp, Homo Sapiens
ggctccatagctcaggggttagagcac

SEQ ID NO: 18406 - DNA, 28 bp, Homo Sapiens
ggctccatagctcaggggttagagcact

SEQ ID NO: 18407 - DNA, 29 bp, Homo Sapiens
ggctccatagctcaggggttagagcactg

SEQ ID NO: 18408 - DNA, 30 bp, Homo Sapiens
ggctccatagctcaggggttagagcactgg

SEQ ID NO: 18409 - DNA, 31 bp, Homo Sapiens
ggctccatagctcaggggttagagcactggt

SEQ ID NO: 18410 - DNA, 32 bp, Homo Sapiens
ggctccatagctcaggggttagagcactggtc

SEQ ID NO: 18411 - DNA, 33 bp, Homo Sapiens
ggctccatagctcaggggttagagcactggtct

SEQ ID NO: 18412 - DNA, 34 bp, Homo Sapiens
ggctccatagctcaggggttagagcactggtctt

SEQ ID NO: 18413 - DNA, 35 bp, Homo Sapiens
ggctccatagctcaggggttagagcactggtcttg

SEQ ID NO: 18414 - DNA, 36 bp, Homo Sapiens
ggctccatagctcaggggttagagcactggtcttgt

SEQ ID NO: 18415 - DNA, 37 bp, Homo Sapiens
ggctccatagctcaggggttagagcactggtcttgta

SEQ ID NO: 18416 - DNA, 32 bp, Homo Sapiens
ggctccatagctcagtggttagagcactggtc

SEQ ID NO: 18417 - DNA, 33 bp, Homo Sapiens
ggctccatagctcagtggttagagcactggtct

SEQ ID NO: 18418 - DNA, 35 bp, Homo Sapiens
ggctccatagctcagtggttagagcactggtcttg

SEQ ID NO: 18419 - DNA, 18 bp, Homo Sapiens
ggctccgtggcgcaatgg

SEQ ID NO: 18420 - DNA, 19 bp, Homo Sapiens
ggctccgtggcgcaatgga

SEQ ID NO: 18421 - DNA, 20 bp, Homo Sapiens
ggctccgtggcgcaatggat

SEQ ID NO: 18422 - DNA, 22 bp, Homo Sapiens
ggctccgtggcgcaatggatag

SEQ ID NO: 18423 - DNA, 23 bp, Homo Sapiens
ggctccgtggcgcaatggatagc

SEQ ID NO: 18424 - DNA, 29 bp, Homo Sapiens
ggctccgtggcgcaatggatagcgcattg

SEQ ID NO: 18425 - DNA, 30 bp, Homo Sapiens
ggctccgtggcgcaatggatagcgcattgg

SEQ ID NO: 18426 - DNA, 31 bp, Homo Sapiens
ggctccgtggcgcaatggatagcgcattgga

SEQ ID NO: 18427 - DNA, 32 bp, Homo Sapiens
ggctccgtggcgcaatggatagcgcattggac

SEQ ID NO: 18428 - DNA, 33 bp, Homo Sapiens
ggctccgtggcgcaatggatagcgcattggact

SEQ ID NO: 18429 - DNA, 34 bp, Homo Sapiens
ggctccgtggcgcaatggatagcgcattggactt

SEQ ID NO: 18430 - DNA, 35 bp, Homo Sapiens
ggctccgtggcgcaatggatagcgcattggacttc

SEQ ID NO: 18431 - DNA, 36 bp, Homo Sapiens
ggctccgtggcgcaatggatagcgcattggacttct

SEQ ID NO: 18432 - DNA, 37 bp, Homo Sapiens
ggctccgtggcgcaatggatagcgcattggacttcta

SEQ ID NO: 18433 - DNA, 16 bp, Homo Sapiens
ggctccgtggcttagc

SEQ ID NO: 18434 - DNA, 18 bp, Homo Sapiens
ggctccgtggcttagctg

SEQ ID NO: 18435 - DNA, 16 bp, Homo Sapiens
ggctcgttggtctagg

SEQ ID NO: 18436 - DNA, 17 bp, Homo Sapiens
ggctcgttggtctaggg

SEQ ID NO: 18437 - DNA, 18 bp, Homo Sapiens
ggctcgttggtctagggg

SEQ ID NO: 18438 - DNA, 19 bp, Homo Sapiens
ggctcgttggtctaggggt

SEQ ID NO: 18439 - DNA, 20 bp, Homo Sapiens
ggctcgttggtctaggggta

SEQ ID NO: 18440 - DNA, 22 bp, Homo Sapiens
ggctcgttggtctaggggtatg

SEQ ID NO: 18441 - DNA, 23 bp, Homo Sapiens
ggctcgttggtctaggggtatga

SEQ ID NO: 18442 - DNA, 25 bp, Homo Sapiens
ggctcgttggtctaggggtatgatt

SEQ ID NO: 18443 - DNA, 26 bp, Homo Sapiens
ggctcgttggtctaggggtatgattc

SEQ ID NO: 18444 - DNA, 27 bp, Homo Sapiens
ggctcgttggtctaggggtatgattct

SEQ ID NO: 18445 - DNA, 28 bp, Homo Sapiens
ggctcgttggtctaggggtatgattctc

SEQ ID NO: 18446 - DNA, 29 bp, Homo Sapiens
ggctcgttggtctaggggtatgattctcg

SEQ ID NO: 18447 - DNA, 30 bp, Homo Sapiens
ggctcgttggtctaggggtatgattctcgc

SEQ ID NO: 18448 - DNA, 31 bp, Homo Sapiens
ggctcgttggtctaggggtatgattctcgct

SEQ ID NO: 18449 - DNA, 32 bp, Homo Sapiens
ggctcgttggtctaggggtatgattctcgctt

SEQ ID NO: 18450 - DNA, 33 bp, Homo Sapiens
ggctcgttggtctaggggtatgattctcgcttc

SEQ ID NO: 18451 - DNA, 34 bp, Homo Sapiens
ggctcgttggtctaggggtatgattctcgcttcg

SEQ ID NO: 18452 - DNA, 35 bp, Homo Sapiens
ggctcgttggtctaggggtatgattctcgcttcgg

SEQ ID NO: 18453 - DNA, 36 bp, Homo Sapiens
ggctcgttggtctaggggtatgattctcgcttcggg

SEQ ID NO: 18454 - DNA, 33 bp, Homo Sapiens
ggctcgttggtctaggggtatgattctcgcttt

SEQ ID NO: 18455 - DNA, 34 bp, Homo Sapiens
ggctcgttggtctaggggtatgattctcgctttg

SEQ ID NO: 18456 - DNA, 35 bp, Homo Sapiens
ggctcgttggtctaggggtatgattctcgctttgg

SEQ ID NO: 18457 - DNA, 36 bp, Homo Sapiens
ggctcgttggtctaggggtatgattctcgctttggg

SEQ ID NO: 18458 - DNA, 31 bp, Homo Sapiens
ggctcgttggtctaggggtatgattctcggt

SEQ ID NO: 18459 - DNA, 32 bp, Homo Sapiens
ggctcgttggtctaggggtatgattctcggtt

SEQ ID NO: 18460 - DNA, 33 bp, Homo Sapiens
ggctcgttggtctaggggtatgattctcggttt

SEQ ID NO: 18461 - DNA, 34 bp, Homo Sapiens
ggctcgttggtctaggggtatgattctcggtttg

SEQ ID NO: 18462 - DNA, 35 bp, Homo Sapiens
ggctcgttggtctaggggtatgattctcggtttgg

SEQ ID NO: 18463 - DNA, 37 bp, Homo Sapiens
ggctcgttggtctaggggtatgattctcggtttgggt

SEQ ID NO: 18464 - DNA, 38 bp, Homo Sapiens
ggctcgttggtctaggggtatgattctcggtttgggtc

SEQ ID NO: 18465 - DNA, 22 bp, Homo Sapiens
ggctcgttggtctagtggtatg

SEQ ID NO: 18466 - DNA, 28 bp, Homo Sapiens
ggctcgttggtctagtggtatgattctc

SEQ ID NO: 18467 - DNA, 31 bp, Homo Sapiens
ggctcgttggtctagtggtatgattctcgct

SEQ ID NO: 18468 - DNA, 32 bp, Homo Sapiens
ggctcgttggtctagtggtatgattctcgctt

SEQ ID NO: 18469 - DNA, 35 bp, Homo Sapiens
ggctcgttggtctagtggtatgattctcgctttgg

SEQ ID NO: 18470 - DNA, 18 bp, Homo Sapiens
ggctctgtggcgcaatgg

SEQ ID NO: 18471 - DNA, 19 bp, Homo Sapiens
ggctctgtggcgcaatgga

SEQ ID NO: 18472 - DNA, 20 bp, Homo Sapiens
ggctctgtggcgcaatggat

SEQ ID NO: 18473 - DNA, 29 bp, Homo Sapiens
ggctctgtggcgcaatggatagcgcattg

SEQ ID NO: 18474 - DNA, 32 bp, Homo Sapiens
ggctctgtggcgcaatggatagcgcattggac

SEQ ID NO: 18475 - DNA, 33 bp, Homo Sapiens
ggctctgtggcgcaatggatagcgcattggact

SEQ ID NO: 18476 - DNA, 34 bp, Homo Sapiens
ggctctgtggcgcaatggatagcgcattggactt

SEQ ID NO: 18477 - DNA, 20 bp, Homo Sapiens
ggctctgtggcttagttggc

SEQ ID NO: 18478 - DNA, 20 bp, Homo Sapiens
ggctgagtgaagcattggac

SEQ ID NO: 18479 - DNA, 21 bp, Homo Sapiens
ggctgagtgaagcattggact

SEQ ID NO: 18480 - DNA, 22 bp, Homo Sapiens
ggctgagtgaagcattggactg

SEQ ID NO: 18481 - DNA, 23 bp, Homo Sapiens
ggctgagtgaagcattggactgt

SEQ ID NO: 18482 - DNA, 24 bp, Homo Sapiens
ggctgagtgaagcattggactgta

SEQ ID NO: 18483 - DNA, 25 bp, Homo Sapiens
ggctgagtgaagcattggactgtaa

SEQ ID NO: 18484 - DNA, 26 bp, Homo Sapiens
ggctgagtgaagcattggactgtaaa

SEQ ID NO: 18485 - DNA, 28 bp, Homo Sapiens
ggctgagtgaagcattggactgtaaatc

SEQ ID NO: 18486 - DNA, 29 bp, Homo Sapiens
ggctgagtgaagcattggactgtaaatct

SEQ ID NO: 18487 - DNA, 31 bp, Homo Sapiens
ggctgagtgaagcattggactgtaaatctaa

SEQ ID NO: 18488 - DNA, 16 bp, Homo Sapiens
ggctgcgtgttcgaat

SEQ ID NO: 18489 - DNA, 30 bp, Homo Sapiens
ggctgcgtgttcgaatcacgtcggggtcac

SEQ ID NO: 18490 - DNA, 26 bp, Homo Sapiens
ggctgtgatggccgagtggttaaggc

SEQ ID NO: 18491 - DNA, 22 bp, Homo Sapiens
ggctgttaaccgaaaggttggt

SEQ ID NO: 18492 - DNA, 23 bp, Homo Sapiens
ggctgttaaccgaaaggttggtg

SEQ ID NO: 18493 - DNA, 26 bp, Homo Sapiens
ggctgttaaccgaaaggttggtggtt

SEQ ID NO: 18494 - DNA, 45 bp, Homo Sapiens
ggctgttaaccgaaaggttggtggttcgagcccacccagggacgc

SEQ ID NO: 18495 - DNA, 16 bp, Homo Sapiens
ggcttacgacccctta

SEQ ID NO: 18496 - DNA, 21 bp, Homo Sapiens
ggcttacgaccccttatttac

SEQ ID NO: 18497 - DNA, 23 bp, Homo Sapiens
ggcttacgaccccttatttaccc

SEQ ID NO: 18498 - DNA, 24 bp, Homo Sapiens
ggcttacgaccccttatttacccc

SEQ ID NO: 18499 - DNA, 25 bp, Homo Sapiens
ggcttacgaccccttatttacccca

SEQ ID NO: 18500 - DNA, 24 bp, Homo Sapiens
ggcttagcttaattaaagtggctg

SEQ ID NO: 18501 - DNA, 26 bp, Homo Sapiens
ggcttagcttaattaaagtggctgat

SEQ ID NO: 18502 - DNA, 30 bp, Homo Sapiens
ggcttagcttaattaaagtggctgatttgc

SEQ ID NO: 18503 - DNA, 34 bp, Homo Sapiens
ggcttctgtagtgtagtggttatcacgttcgcct

SEQ ID NO: 18504 - DNA, 26 bp, Homo Sapiens
gggagaccggggttcaattccccgac

SEQ ID NO: 18505 - DNA, 28 bp, Homo Sapiens
gggagaccggggttcaattccccgacgg

SEQ ID NO: 18506 - DNA, 29 bp, Homo Sapiens
gggagaccggggttcaattccccgacggg

SEQ ID NO: 18507 - DNA, 30 bp, Homo Sapiens
gggagaccggggttcaattccccgacgggg

SEQ ID NO: 18508 - DNA, 31 bp, Homo Sapiens
gggagaccggggttcaattccccgacgggga

SEQ ID NO: 18509 - DNA, 32 bp, Homo Sapiens
gggagaccggggttcaattccccgacggggag

SEQ ID NO: 18510 - DNA, 33 bp, Homo Sapiens
gggagaccggggttcaattccccgacggggagc

SEQ ID NO: 18511 - DNA, 34 bp, Homo Sapiens
gggagaccggggttcaattccccgacggggagcc

SEQ ID NO: 18512 - DNA, 35 bp, Homo Sapiens
gggagaccggggttcaattccccgacggggagcca

SEQ ID NO: 18513 - DNA, 16 bp, Homo Sapiens
gggagaccggggttcg

SEQ ID NO: 18514 - DNA, 25 bp, Homo Sapiens
gggagaccggggttcgattccccga

SEQ ID NO: 18515 - DNA, 26 bp, Homo Sapiens
gggagaccggggttcgattccccgac

SEQ ID NO: 18516 - DNA, 27 bp, Homo Sapiens
gggagaccggggttcgattccccgacg

SEQ ID NO: 18517 - DNA, 28 bp, Homo Sapiens
gggagaccggggttcgattccccgacgg

SEQ ID NO: 18518 - DNA, 29 bp, Homo Sapiens
gggagaccggggttcgattccccgacggg

SEQ ID NO: 18519 - DNA, 30 bp, Homo Sapiens
gggagaccggggttcgattccccgacgggg

SEQ ID NO: 18520 - DNA, 31 bp, Homo Sapiens
gggagaccggggttcgattccccgacgggga

SEQ ID NO: 18521 - DNA, 32 bp, Homo Sapiens
gggagaccggggttcgattccccgacggggag

SEQ ID NO: 18522 - DNA, 33 bp, Homo Sapiens
gggagaccggggttcgattccccgacggggagc

SEQ ID NO: 18523 - DNA, 34 bp, Homo Sapiens
gggagaccggggttcgattccccgacggggagcc

SEQ ID NO: 18524 - DNA, 35 bp, Homo Sapiens
gggagaccggggttcgattccccgacggggagcca

SEQ ID NO: 18525 - DNA, 32 bp, Homo Sapiens
gggagagcgttagactgaagatctaaaggtcc

SEQ ID NO: 18526 - DNA, 25 bp, Homo Sapiens
gggaggcccgggttcgattcccggc

SEQ ID NO: 18527 - DNA, 26 bp, Homo Sapiens
gggaggcccgggttcgattcccggcc

SEQ ID NO: 18528 - DNA, 30 bp, Homo Sapiens
gggaggcccgggttcgattcccggccaatg

SEQ ID NO: 18529 - DNA, 33 bp, Homo Sapiens
gggaggcccgggttcgattcccggccaatgcac

SEQ ID NO: 18530 - DNA, 34 bp, Homo Sapiens
gggaggcccgggttcgattcccggccaatgcacc

SEQ ID NO: 18531 - DNA, 35 bp, Homo Sapiens
gggaggcccgggttcgattcccggccaatgcacca

SEQ ID NO: 18532 - DNA, 34 bp, Homo Sapiens
gggaggcccgggttcgattcccggcccatgcacc

SEQ ID NO: 18533 - DNA, 16 bp, Homo Sapiens
gggatgggttcgattc

SEQ ID NO: 18534 - DNA, 18 bp, Homo Sapiens
gggatgggttcgattctc

SEQ ID NO: 18535 - DNA, 25 bp, Homo Sapiens
gggatgggttcgattctcatagtcc

SEQ ID NO: 18536 - DNA, 26 bp, Homo Sapiens
gggatgggttcgattctcatagtcct

SEQ ID NO: 18537 - DNA, 29 bp, Homo Sapiens
gggatgggttcgattctcatagtcctagc

SEQ ID NO: 18538 - DNA, 30 bp, Homo Sapiens
gggatgggttcgattctcatagtcctagcc

SEQ ID NO: 18539 - DNA, 31 bp, Homo Sapiens
gggatgggttcgattctcatagtcctagcca

SEQ ID NO: 18540 - DNA, 16 bp, Homo Sapiens
gggatgtagctcagtg

SEQ ID NO: 18541 - DNA, 17 bp, Homo Sapiens
gggatgtagctcagtgg

SEQ ID NO: 18542 - DNA, 18 bp, Homo Sapiens
gggatgtagctcagtggt

SEQ ID NO: 18543 - DNA, 19 bp, Homo Sapiens
gggatgtagctcagtggta

SEQ ID NO: 18544 - DNA, 20 bp, Homo Sapiens
gggatgtagctcagtggtag

SEQ ID NO: 18545 - DNA, 21 bp, Homo Sapiens
gggatgtagctcagtggtaga

SEQ ID NO: 18546 - DNA, 22 bp, Homo Sapiens
gggatgtagctcagtggtagag

SEQ ID NO: 18547 - DNA, 23 bp, Homo Sapiens
gggatgtagctcagtggtagagc

SEQ ID NO: 18548 - DNA, 27 bp, Homo Sapiens
gggatgtagctcagtggtagagcgcat

SEQ ID NO: 18549 - DNA, 34 bp, Homo Sapiens
gggatgtagctcagtggtagagcgcgcgcttcgc

SEQ ID NO: 18550 - DNA, 20 bp, Homo Sapiens
gggattagctcaaatggtag

SEQ ID NO: 18551 - DNA, 21 bp, Homo Sapiens
gggattagctcaaatggtaga

SEQ ID NO: 18552 - DNA, 22 bp, Homo Sapiens
gggattagctcaaatggtagag

SEQ ID NO: 18553 - DNA, 30 bp, Homo Sapiens
gggattagctcaaatggtagagcgctcgct

SEQ ID NO: 18554 - DNA, 20 bp, Homo Sapiens
gggattgtgggttcgagtcc

SEQ ID NO: 18555 - DNA, 21 bp, Homo Sapiens
gggattgtgggttcgagtccc

SEQ ID NO: 18556 - DNA, 22 bp, Homo Sapiens
gggattgtgggttcgagtccca

SEQ ID NO: 18557 - DNA, 24 bp, Homo Sapiens
gggattgtgggttcgagtcccacc

SEQ ID NO: 18558 - DNA, 29 bp, Homo Sapiens
gggattgtgggttcgagtcccacccgggg

SEQ ID NO: 18559 - DNA, 30 bp, Homo Sapiens
gggattgtgggttcgagtcccacccggggt

SEQ ID NO: 18560 - DNA, 31 bp, Homo Sapiens
gggattgtgggttcgagtcccacccggggta

SEQ ID NO: 18561 - DNA, 31 bp, Homo Sapiens
gggattgtgggttcgagtcccacctggggta

SEQ ID NO: 18562 - DNA, 24 bp, Homo Sapiens
gggattgtgggttcgagtcccatc

SEQ ID NO: 18563 - DNA, 27 bp, Homo Sapiens
gggattgtgggttcgagtcccatctgg

SEQ ID NO: 18564 - DNA, 29 bp, Homo Sapiens
gggattgtgggttcgagtcccatctgggg

SEQ ID NO: 18565 - DNA, 31 bp, Homo Sapiens
gggattgtgggttcgagtcccatctggggtg

SEQ ID NO: 18566 - DNA, 32 bp, Homo Sapiens
gggattgtgggttcgagtcccatctggggtgc

SEQ ID NO: 18567 - DNA, 33 bp, Homo Sapiens
gggattgtgggttcgagtcccatctggggtgcc

SEQ ID NO: 18568 - DNA, 34 bp, Homo Sapiens
gggattgtgggttcgagtcccatctggggtgcca

SEQ ID NO: 18569 - DNA, 32 bp, Homo Sapiens
gggattgtgggttcgagtcccatctgggtcgc

SEQ ID NO: 18570 - DNA, 33 bp, Homo Sapiens
gggattgtgggttcgagtcccatctgggtcgcc

SEQ ID NO: 18571 - DNA, 34 bp, Homo Sapiens
gggattgtgggttcgagtcccatctgggtcgcca

SEQ ID NO: 18572 - DNA, 31 bp, Homo Sapiens
gggcatagctcagtggtagagcatttgactg

SEQ ID NO: 18573 - DNA, 32 bp, Homo Sapiens
gggcatagctcagtggtagagcatttgactgc

SEQ ID NO: 18574 - DNA, 18 bp, Homo Sapiens
gggccagtggcgcaatgg

SEQ ID NO: 18575 - DNA, 19 bp, Homo Sapiens
gggccagtggcgcaatgga

SEQ ID NO: 18576 - DNA, 20 bp, Homo Sapiens
gggccagtggcgcaatggat

SEQ ID NO: 18577 - DNA, 24 bp, Homo Sapiens
gggccagtggcgcaatggataacg

SEQ ID NO: 18578 - DNA, 32 bp, Homo Sapiens
gggccagtggcgcaatggataacgcgtctgac

SEQ ID NO: 18579 - DNA, 33 bp, Homo Sapiens
gggccagtggcgcaatggataacgcgtctgact

SEQ ID NO: 18580 - DNA, 26 bp, Homo Sapiens
gggcccataacccagaggtcgatgga

SEQ ID NO: 18581 - DNA, 27 bp, Homo Sapiens
gggcccataacccagaggtcgatggat

SEQ ID NO: 18582 - DNA, 28 bp, Homo Sapiens
gggcccataacccagaggtcgatggatc

SEQ ID NO: 18583 - DNA, 29 bp, Homo Sapiens
gggcccataacccagaggtcgatggatcg

SEQ ID NO: 18584 - DNA, 16 bp, Homo Sapiens
gggcccataccccgaa

SEQ ID NO: 18585 - DNA, 17 bp, Homo Sapiens
gggcccataccccgaaa

SEQ ID NO: 18586 - DNA, 18 bp, Homo Sapiens
gggcccataccccgaaaa

SEQ ID NO: 18587 - DNA, 19 bp, Homo Sapiens
gggcccataccccgaaaat

SEQ ID NO: 18588 - DNA, 20 bp, Homo Sapiens
gggcccataccccgaaaatg

SEQ ID NO: 18589 - DNA, 21 bp, Homo Sapiens
gggcccataccccgaaaatgt

SEQ ID NO: 18590 - DNA, 22 bp, Homo Sapiens
gggcccataccccgaaaatgtt

SEQ ID NO: 18591 - DNA, 23 bp, Homo Sapiens
gggcccataccccgaaaatgttg

SEQ ID NO: 18592 - DNA, 24 bp, Homo Sapiens
gggcccataccccgaaaatgttgg

SEQ ID NO: 18593 - DNA, 25 bp, Homo Sapiens
gggcccataccccgaaaatgttggt

SEQ ID NO: 18594 - DNA, 26 bp, Homo Sapiens
gggcccataccccgaaaatgttggtt

SEQ ID NO: 18595 - DNA, 27 bp, Homo Sapiens
gggcccataccccgaaaatgttggtta

SEQ ID NO: 18596 - DNA, 28 bp, Homo Sapiens
gggcccataccccgaaaatgttggttat

SEQ ID NO: 18597 - DNA, 29 bp, Homo Sapiens
gggcccataccccgaaaatgttggttata

SEQ ID NO: 18598 - DNA, 30 bp, Homo Sapiens
gggcccataccccgaaaatgttggttatac

SEQ ID NO: 18599 - DNA, 31 bp, Homo Sapiens
gggcccataccccgaaaatgttggttatacc

SEQ ID NO: 18600 - DNA, 32 bp, Homo Sapiens
gggcccataccccgaaaatgttggttataccc

SEQ ID NO: 18601 - DNA, 33 bp, Homo Sapiens
gggcccataccccgaaaatgttggttataccct

SEQ ID NO: 18602 - DNA, 34 bp, Homo Sapiens
gggcccataccccgaaaatgttggttataccctt

SEQ ID NO: 18603 - DNA, 35 bp, Homo Sapiens
gggcccataccccgaaaatgttggttatacccttc

SEQ ID NO: 18604 - DNA, 36 bp, Homo Sapiens
gggcccataccccgaaaatgttggttatacccttcc

SEQ ID NO: 18605 - DNA, 37 bp, Homo Sapiens
gggcccataccccgaaaatgttggttatacccttccc

SEQ ID NO: 18606 - DNA, 39 bp, Homo Sapiens
gggcccataccccgaaaatgttggttatacccttcccgt

SEQ ID NO: 18607 - DNA, 40 bp, Homo Sapiens
gggcccataccccgaaaatgttggttatacccttcccgta

SEQ ID NO: 18608 - DNA, 41 bp, Homo Sapiens
gggcccataccccgaaaatgttggttatacccttcccgtac

SEQ ID NO: 18609 - DNA, 42 bp, Homo Sapiens
gggcccataccccgaaaatgttggttatacccttcccgtact

SEQ ID NO: 18610 - DNA, 43 bp, Homo Sapiens
gggcccataccccgaaaatgttggttatacccttcccgtacta

SEQ ID NO: 18611 - DNA, 44 bp, Homo Sapiens
gggcccataccccgaaaatgttggttatacccttcccgtactac

SEQ ID NO: 18612 - DNA, 45 bp, Homo Sapiens
gggcccataccccgaaaatgttggttatacccttcccgtactacc

SEQ ID NO: 18613 - DNA, 46 bp, Homo Sapiens
gggcccataccccgaaaatgttggttatacccttcccgtactacca

SEQ ID NO: 18614 - DNA, 19 bp, Homo Sapiens
gggccccatggtgtaatgg

SEQ ID NO: 18615 - DNA, 20 bp, Homo Sapiens
gggccgcgtggcctaatgga

SEQ ID NO: 18616 - DNA, 35 bp, Homo Sapiens
gggcctcgtggcgcaacggtagcgcgtctgactcc

SEQ ID NO: 18617 - DNA, 20 bp, Homo Sapiens
gggcgtgggttcgaatccca

SEQ ID NO: 18618 - DNA, 16 bp, Homo Sapiens
gggctcacatcacccc

SEQ ID NO: 18619 - DNA, 17 bp, Homo Sapiens
gggctcacatcacccca

SEQ ID NO: 18620 - DNA, 19 bp, Homo Sapiens
gggctcacatcaccccata

SEQ ID NO: 18621 - DNA, 20 bp, Homo Sapiens
gggctcacatcaccccataa

SEQ ID NO: 18622 - DNA, 21 bp, Homo Sapiens
gggctcacatcaccccataaa

SEQ ID NO: 18623 - DNA, 22 bp, Homo Sapiens
gggctcacatcaccccataaac

SEQ ID NO: 18624 - DNA, 23 bp, Homo Sapiens
gggctcacatcaccccataaaca

SEQ ID NO: 18625 - DNA, 24 bp, Homo Sapiens
gggctcacatcaccccataaacac

SEQ ID NO: 18626 - DNA, 25 bp, Homo Sapiens
gggctcacatcaccccataaacacc

SEQ ID NO: 18627 - DNA, 26 bp, Homo Sapiens
gggctcacatcaccccataaacacca

SEQ ID NO: 18628 - DNA, 31 bp, Homo Sapiens
gggcttagcttaattaaagtggctgatttgc

SEQ ID NO: 18629 - DNA, 16 bp, Homo Sapiens
ggggaattagctcaaa

SEQ ID NO: 18630 - DNA, 19 bp, Homo Sapiens
ggggaattagctcaaatgg

SEQ ID NO: 18631 - DNA, 20 bp, Homo Sapiens
ggggaattagctcaaatggt

SEQ ID NO: 18632 - DNA, 23 bp, Homo Sapiens
ggggaattagctcaaatggtaga

SEQ ID NO: 18633 - DNA, 32 bp, Homo Sapiens
ggggaattagctcaaatggtagagcgctcgct

SEQ ID NO: 18634 - DNA, 33 bp, Homo Sapiens
ggggaattagctcaaatggtagagcgctcgctt

SEQ ID NO: 18635 - DNA, 33 bp, Homo Sapiens
ggggaattagctcaagtggtagagcgctcgctt

SEQ ID NO: 18636 - DNA, 16 bp, Homo Sapiens
ggggatgtagctcagt

SEQ ID NO: 18637 - DNA, 17 bp, Homo Sapiens
ggggatgtagctcagtg

SEQ ID NO: 18638 - DNA, 18 bp, Homo Sapiens
ggggatgtagctcagtgg

SEQ ID NO: 18639 - DNA, 19 bp, Homo Sapiens
ggggatgtagctcagtggt

SEQ ID NO: 18640 - DNA, 20 bp, Homo Sapiens
ggggatgtagctcagtggta

SEQ ID NO: 18641 - DNA, 21 bp, Homo Sapiens
ggggatgtagctcagtggtag

SEQ ID NO: 18642 - DNA, 22 bp, Homo Sapiens
ggggatgtagctcagtggtaga

SEQ ID NO: 18643 - DNA, 23 bp, Homo Sapiens
ggggatgtagctcagtggtagag

SEQ ID NO: 18644 - DNA, 24 bp, Homo Sapiens
ggggatgtagctcagtggtagagc

SEQ ID NO: 18645 - DNA, 26 bp, Homo Sapiens
ggggatgtagctcagtggtagagcgc

SEQ ID NO: 18646 - DNA, 27 bp, Homo Sapiens
ggggatgtagctcagtggtagagcgca

SEQ ID NO: 18647 - DNA, 28 bp, Homo Sapiens
ggggatgtagctcagtggtagagcgcat

SEQ ID NO: 18648 - DNA, 29 bp, Homo Sapiens
ggggatgtagctcagtggtagagcgcatg

SEQ ID NO: 18649 - DNA, 30 bp, Homo Sapiens
ggggatgtagctcagtggtagagcgcatgc

SEQ ID NO: 18650 - DNA, 31 bp, Homo Sapiens
ggggatgtagctcagtggtagagcgcatgct

SEQ ID NO: 18651 - DNA, 32 bp, Homo Sapiens
ggggatgtagctcagtggtagagcgcatgctt

SEQ ID NO: 18652 - DNA, 35 bp, Homo Sapiens
ggggatgtagctcagtggtagagcgcatgcttcgc

SEQ ID NO: 18653 - DNA, 34 bp, Homo Sapiens
ggggatgtagctcagtggtagagcgcatgctttg

SEQ ID NO: 18654 - DNA, 35 bp, Homo Sapiens
ggggatgtagctcagtggtagagcgcatgctttgc

SEQ ID NO: 18655 - DNA, 40 bp, Homo Sapiens
ggggatgtagctcagtggtagagcgcatgctttgcacgta

SEQ ID NO: 18656 - DNA, 28 bp, Homo Sapiens
ggggatgtagctcagtggtagagcgcgc

SEQ ID NO: 18657 - DNA, 29 bp, Homo Sapiens
ggggatgtagctcagtggtagagcgcgcg

SEQ ID NO: 18658 - DNA, 30 bp, Homo Sapiens
ggggatgtagctcagtggtagagcgcgcgc

SEQ ID NO: 18659 - DNA, 31 bp, Homo Sapiens
ggggatgtagctcagtggtagagcgcgcgct

SEQ ID NO: 18660 - DNA, 32 bp, Homo Sapiens
ggggatgtagctcagtggtagagcgcgcgctt

SEQ ID NO: 18661 - DNA, 33 bp, Homo Sapiens
ggggatgtagctcagtggtagagcgcgcgcttc

SEQ ID NO: 18662 - DNA, 34 bp, Homo Sapiens
ggggatgtagctcagtggtagagcgcgcgcttcg

SEQ ID NO: 18663 - DNA, 35 bp, Homo Sapiens
ggggatgtagctcagtggtagagcgcgcgcttcgc

SEQ ID NO: 18664 - DNA, 22 bp, Homo Sapiens
ggggattagctcaaatggtaga

SEQ ID NO: 18665 - DNA, 32 bp, Homo Sapiens
ggggattagctcaaatggtagagcgctcgctt

SEQ ID NO: 18666 - DNA, 16 bp, Homo Sapiens
ggggattgtgggttcg

SEQ ID NO: 18667 - DNA, 22 bp, Homo Sapiens
ggggattgtgggttcgagtccc

SEQ ID NO: 18668 - DNA, 23 bp, Homo Sapiens
ggggattgtgggttcgagtccca

SEQ ID NO: 18669 - DNA, 25 bp, Homo Sapiens
ggggattgtgggttcgagtcccatc

SEQ ID NO: 18670 - DNA, 29 bp, Homo Sapiens
ggggattgtgggttcgagtcccatctggg

SEQ ID NO: 18671 - DNA, 31 bp, Homo Sapiens
ggggattgtgggttcgagtcccatctgggtc

SEQ ID NO: 18672 - DNA, 32 bp, Homo Sapiens
ggggattgtgggttcgagtcccatctgggtcg

SEQ ID NO: 18673 - DNA, 33 bp, Homo Sapiens
ggggattgtgggttcgagtcccatctgggtcgc

SEQ ID NO: 18674 - DNA, 34 bp, Homo Sapiens
ggggattgtgggttcgagtcccatctgggtcgcc

SEQ ID NO: 18675 - DNA, 35 bp, Homo Sapiens
ggggattgtgggttcgagtcccatctgggtcgcca

SEQ ID NO: 18676 - DNA, 19 bp, Homo Sapiens
ggggcagagcatttgactg

SEQ ID NO: 18677 - DNA, 32 bp, Homo Sapiens
ggggcatagctcagtggtagagcatttgactg

SEQ ID NO: 18678 - DNA, 33 bp, Homo Sapiens
ggggcatagctcagtggtagagcatttgactgc

SEQ ID NO: 18679 - DNA, 21 bp, Homo Sapiens
ggggcgtgggttcgaatccca

SEQ ID NO: 18680 - DNA, 23 bp, Homo Sapiens
ggggcgtgggttcgaatcccacc

SEQ ID NO: 18681 - DNA, 27 bp, Homo Sapiens
ggggcgtgggttcgaatcccaccgctg

SEQ ID NO: 18682 - DNA, 16 bp, Homo Sapiens
gggggattagctcaaa

SEQ ID NO: 18683 - DNA, 18 bp, Homo Sapiens
gggggattagctcaaatg

SEQ ID NO: 18684 - DNA, 19 bp, Homo Sapiens
gggggattagctcaaatgg

SEQ ID NO: 18685 - DNA, 20 bp, Homo Sapiens
gggggattagctcaaatggt

SEQ ID NO: 18686 - DNA, 21 bp, Homo Sapiens
gggggattagctcaaatggta

SEQ ID NO: 18687 - DNA, 22 bp, Homo Sapiens
gggggattagctcaaatggtag

SEQ ID NO: 18688 - DNA, 23 bp, Homo Sapiens
gggggattagctcaaatggtaga

SEQ ID NO: 18689 - DNA, 24 bp, Homo Sapiens
gggggattagctcaaatggtagag

SEQ ID NO: 18690 - DNA, 25 bp, Homo Sapiens
gggggattagctcaaatggtagagc

SEQ ID NO: 18691 - DNA, 31 bp, Homo Sapiens
gggggattagctcaaatggtagagcgctcgc

SEQ ID NO: 18692 - DNA, 32 bp, Homo Sapiens
gggggattagctcaaatggtagagcgctcgct

SEQ ID NO: 18693 - DNA, 33 bp, Homo Sapiens
gggggattagctcaaatggtagagcgctcgctt

SEQ ID NO: 18694 - DNA, 18 bp, Homo Sapiens
gggggcatagctcagtgg

SEQ ID NO: 18695 - DNA, 22 bp, Homo Sapiens
gggggcatagctcagtggtaga

SEQ ID NO: 18696 - DNA, 27 bp, Homo Sapiens
gggggcatagctcagtggtagagcatt

SEQ ID NO: 18697 - DNA, 28 bp, Homo Sapiens
gggggcatagctcagtggtagagcattt

SEQ ID NO: 18698 - DNA, 29 bp, Homo Sapiens
gggggcatagctcagtggtagagcatttg

SEQ ID NO: 18699 - DNA, 31 bp, Homo Sapiens
gggggcatagctcagtggtagagcatttgac

SEQ ID NO: 18700 - DNA, 32 bp, Homo Sapiens
gggggcatagctcagtggtagagcatttgact

SEQ ID NO: 18701 - DNA, 33 bp, Homo Sapiens
gggggcatagctcagtggtagagcatttgactg

SEQ ID NO: 18702 - DNA, 34 bp, Homo Sapiens
gggggcatagctcagtggtagagcatttgactgc

SEQ ID NO: 18703 - DNA, 35 bp, Homo Sapiens
gggggcatagctcagtggtagagcatttgactgca

SEQ ID NO: 18704 - DNA, 24 bp, Homo Sapiens
gggggcgtgggttcgaatcccacc

SEQ ID NO: 18705 - DNA, 16 bp, Homo Sapiens
gggggtatagctcagc

SEQ ID NO: 18706 - DNA, 29 bp, Homo Sapiens
gggggtatagctcagcggtagagcgcgtg

SEQ ID NO: 18707 - DNA, 31 bp, Homo Sapiens
gggggtatagctcagcggtagagcgcgtgct

SEQ ID NO: 18708 - DNA, 32 bp, Homo Sapiens
gggggtatagctcagcggtagagcgcgtgctt

SEQ ID NO: 18709 - DNA, 16 bp, Homo Sapiens
gggggtatagctcagg

SEQ ID NO: 18710 - DNA, 18 bp, Homo Sapiens
gggggtatagctcagggg

SEQ ID NO: 18711 - DNA, 22 bp, Homo Sapiens
gggggtatagctcaggggtaga

SEQ ID NO: 18712 - DNA, 24 bp, Homo Sapiens
gggggtatagctcaggggtagagc

SEQ ID NO: 18713 - DNA, 25 bp, Homo Sapiens
gggggtatagctcaggggtagagca

SEQ ID NO: 18714 - DNA, 31 bp, Homo Sapiens
gggggtatagctcaggggtagagcacttgac

SEQ ID NO: 18715 - DNA, 32 bp, Homo Sapiens
gggggtatagctcaggggtagagcacttgact

SEQ ID NO: 18716 - DNA, 33 bp, Homo Sapiens
gggggtatagctcaggggtagagcacttgactg

SEQ ID NO: 18717 - DNA, 35 bp, Homo Sapiens
gggggtatagctcaggggtagagcacttgactgca

SEQ ID NO: 18718 - DNA, 26 bp, Homo Sapiens
gggggtatagctcaggggtagagcat

SEQ ID NO: 18719 - DNA, 27 bp, Homo Sapiens
gggggtatagctcaggggtagagcatt

SEQ ID NO: 18720 - DNA, 28 bp, Homo Sapiens
gggggtatagctcaggggtagagcattt

SEQ ID NO: 18721 - DNA, 29 bp, Homo Sapiens
gggggtatagctcaggggtagagcatttg

SEQ ID NO: 18722 - DNA, 30 bp, Homo Sapiens
gggggtatagctcaggggtagagcatttga

SEQ ID NO: 18723 - DNA, 31 bp, Homo Sapiens
gggggtatagctcaggggtagagcatttgac

SEQ ID NO: 18724 - DNA, 32 bp, Homo Sapiens
gggggtatagctcaggggtagagcatttgact

SEQ ID NO: 18725 - DNA, 33 bp, Homo Sapiens
gggggtatagctcaggggtagagcatttgactg

SEQ ID NO: 18726 - DNA, 34 bp, Homo Sapiens
gggggtatagctcaggggtagagcatttgactgc

SEQ ID NO: 18727 - DNA, 35 bp, Homo Sapiens
gggggtatagctcaggggtagagcatttgactgca

SEQ ID NO: 18728 - DNA, 37 bp, Homo Sapiens
gggggtatagctcaggggtagagcatttgactgcaga

SEQ ID NO: 18729 - DNA, 33 bp, Homo Sapiens
gggggtatagctcaggtggtagagcatttgact

SEQ ID NO: 18730 - DNA, 34 bp, Homo Sapiens
gggggtatagctcaggtggtagagcatttgactg

SEQ ID NO: 18731 - DNA, 35 bp, Homo Sapiens
gggggtatagctcaggtggtagagcatttgactgc

SEQ ID NO: 18732 - DNA, 36 bp, Homo Sapiens
gggggtatagctcaggtggtagagcatttgactgca

SEQ ID NO: 18733 - DNA, 16 bp, Homo Sapiens
gggggtatagctcagt

SEQ ID NO: 18734 - DNA, 17 bp, Homo Sapiens
gggggtatagctcagtg

SEQ ID NO: 18735 - DNA, 18 bp, Homo Sapiens
gggggtatagctcagtgg

SEQ ID NO: 18736 - DNA, 19 bp, Homo Sapiens
gggggtatagctcagtggg

SEQ ID NO: 18737 - DNA, 33 bp, Homo Sapiens
gggggtatagctcagtgggtagagcatttgact

SEQ ID NO: 18738 - DNA, 34 bp, Homo Sapiens
gggggtatagctcagtgggtagagcatttgactg

SEQ ID NO: 18739 - DNA, 35 bp, Homo Sapiens
gggggtatagctcagtgggtagagcatttgactgc

SEQ ID NO: 18740 - DNA, 36 bp, Homo Sapiens
gggggtatagctcagtgggtagagcatttgactgca

SEQ ID NO: 18741 - DNA, 19 bp, Homo Sapiens
gggggtatagctcagtggt

SEQ ID NO: 18742 - DNA, 20 bp, Homo Sapiens
gggggtatagctcagtggta

SEQ ID NO: 18743 - DNA, 21 bp, Homo Sapiens
gggggtatagctcagtggtag

SEQ ID NO: 18744 - DNA, 22 bp, Homo Sapiens
gggggtatagctcagtggtaga

SEQ ID NO: 18745 - DNA, 23 bp, Homo Sapiens
gggggtatagctcagtggtagag

SEQ ID NO: 18746 - DNA, 24 bp, Homo Sapiens
gggggtatagctcagtggtagagc

SEQ ID NO: 18747 - DNA, 25 bp, Homo Sapiens
gggggtatagctcagtggtagagca

SEQ ID NO: 18748 - DNA, 26 bp, Homo Sapiens
gggggtatagctcagtggtagagcat

SEQ ID NO: 18749 - DNA, 27 bp, Homo Sapiens
gggggtatagctcagtggtagagcatt

SEQ ID NO: 18750 - DNA, 28 bp, Homo Sapiens
gggggtatagctcagtggtagagcattt

SEQ ID NO: 18751 - DNA, 29 bp, Homo Sapiens
gggggtatagctcagtggtagagcatttg

SEQ ID NO: 18752 - DNA, 30 bp, Homo Sapiens
gggggtatagctcagtggtagagcatttga

SEQ ID NO: 18753 - DNA, 31 bp, Homo Sapiens
gggggtatagctcagtggtagagcatttgac

SEQ ID NO: 18754 - DNA, 32 bp, Homo Sapiens
gggggtatagctcagtggtagagcatttgact

SEQ ID NO: 18755 - DNA, 33 bp, Homo Sapiens
gggggtatagctcagtggtagagcatttgactg

SEQ ID NO: 18756 - DNA, 34 bp, Homo Sapiens
gggggtatagctcagtggtagagcatttgactgc

SEQ ID NO: 18757 - DNA, 35 bp, Homo Sapiens
gggggtatagctcagtggtagagcatttgactgca

SEQ ID NO: 18758 - DNA, 39 bp, Homo Sapiens
gggggtatagctcagtggtagagcatttgactgcagatc

SEQ ID NO: 18759 - DNA, 42 bp, Homo Sapiens
gggggtatagctcagtggtagagcatttgactgcagatcaag

SEQ ID NO: 18760 - DNA, 48 bp, Homo Sapiens
gggggtatagctcagtggtagagcatttgactgcagatcaagaggtcc

SEQ ID NO: 18761 - DNA, 32 bp, Homo Sapiens
gggggtatagctcagtggtagagcgcgtgctt

SEQ ID NO: 18762 - DNA, 28 bp, Homo Sapiens
gggggtatagcttagcggtagagcattt

SEQ ID NO: 18763 - DNA, 29 bp, Homo Sapiens
gggggtatagcttagcggtagagcatttg

SEQ ID NO: 18764 - DNA, 31 bp, Homo Sapiens
gggggtatagcttagcggtagagcatttgac

SEQ ID NO: 18765 - DNA, 32 bp, Homo Sapiens
gggggtatagcttagcggtagagcatttgact

SEQ ID NO: 18766 - DNA, 33 bp, Homo Sapiens
gggggtatagcttagcggtagagcatttgactg

SEQ ID NO: 18767 - DNA, 34 bp, Homo Sapiens
gggggtatagcttagcggtagagcatttgactgc

SEQ ID NO: 18768 - DNA, 35 bp, Homo Sapiens
gggggtatagcttagcggtagagcatttgactgca

SEQ ID NO: 18769 - DNA, 32 bp, Homo Sapiens
gggggtatagcttaggggtagagcatttgact

SEQ ID NO: 18770 - DNA, 25 bp, Homo Sapiens
gggggtcgattccccgacggggagc

SEQ ID NO: 18771 - DNA, 26 bp, Homo Sapiens
gggggtcgattccccgacggggagcc

SEQ ID NO: 18772 - DNA, 27 bp, Homo Sapiens
gggggtcgattccccgacggggagcca

SEQ ID NO: 18773 - DNA, 16 bp, Homo Sapiens
gggggtgtagctcagt

SEQ ID NO: 18774 - DNA, 17 bp, Homo Sapiens
gggggtgtagctcagtg

SEQ ID NO: 18775 - DNA, 18 bp, Homo Sapiens
gggggtgtagctcagtgg

SEQ ID NO: 18776 - DNA, 19 bp, Homo Sapiens
gggggtgtagctcagtggt

SEQ ID NO: 18777 - DNA, 20 bp, Homo Sapiens
gggggtgtagctcagtggta

SEQ ID NO: 18778 - DNA, 21 bp, Homo Sapiens
gggggtgtagctcagtggtag

SEQ ID NO: 18779 - DNA, 22 bp, Homo Sapiens
gggggtgtagctcagtggtaga

SEQ ID NO: 18780 - DNA, 23 bp, Homo Sapiens
gggggtgtagctcagtggtagag

SEQ ID NO: 18781 - DNA, 24 bp, Homo Sapiens
gggggtgtagctcagtggtagagc

SEQ ID NO: 18782 - DNA, 26 bp, Homo Sapiens
gggggtgtagctcagtggtagagcac

SEQ ID NO: 18783 - DNA, 31 bp, Homo Sapiens
gggggtgtagctcagtggtagagcacatgct

SEQ ID NO: 18784 - DNA, 32 bp, Homo Sapiens
gggggtgtagctcagtggtagagcacatgctt

SEQ ID NO: 18785 - DNA, 27 bp, Homo Sapiens
gggggtgtagctcagtggtagagcatt

SEQ ID NO: 18786 - DNA, 28 bp, Homo Sapiens
gggggtgtagctcagtggtagagcattt

SEQ ID NO: 18787 - DNA, 30 bp, Homo Sapiens
gggggtgtagctcagtggtagagcatttga

SEQ ID NO: 18788 - DNA, 31 bp, Homo Sapiens
gggggtgtagctcagtggtagagcatttgac

SEQ ID NO: 18789 - DNA, 32 bp, Homo Sapiens
gggggtgtagctcagtggtagagcatttgact

SEQ ID NO: 18790 - DNA, 33 bp, Homo Sapiens
gggggtgtagctcagtggtagagcatttgactg

SEQ ID NO: 18791 - DNA, 34 bp, Homo Sapiens
gggggtgtagctcagtggtagagcatttgactgc

SEQ ID NO: 18792 - DNA, 35 bp, Homo Sapiens
gggggtgtagctcagtggtagagcatttgactgca

SEQ ID NO: 18793 - DNA, 28 bp, Homo Sapiens
gggggtgtagctcagtggtagagcgcat

SEQ ID NO: 18794 - DNA, 31 bp, Homo Sapiens
gggggtgtagctcagtggtagagcgcatgct

SEQ ID NO: 18795 - DNA, 32 bp, Homo Sapiens
gggggtgtagctcagtggtagagcgcatgctt

SEQ ID NO: 18796 - DNA, 33 bp, Homo Sapiens
gggggtgtagctcagtggtagagcgcatgcttt

SEQ ID NO: 18797 - DNA, 35 bp, Homo Sapiens
gggggtgtagctcagtggtagagcgcatgctttgc

SEQ ID NO: 18798 - DNA, 27 bp, Homo Sapiens
gggggtgtagctcagtggtagagcgcg

SEQ ID NO: 18799 - DNA, 28 bp, Homo Sapiens
gggggtgtagctcagtggtagagcgcgt

SEQ ID NO: 18800 - DNA, 29 bp, Homo Sapiens
gggggtgtagctcagtggtagagcgcgtg

SEQ ID NO: 18801 - DNA, 30 bp, Homo Sapiens
gggggtgtagctcagtggtagagcgcgtgc

SEQ ID NO: 18802 - DNA, 31 bp, Homo Sapiens
gggggtgtagctcagtggtagagcgcgtgct

SEQ ID NO: 18803 - DNA, 32 bp, Homo Sapiens
gggggtgtagctcagtggtagagcgcgtgctt

SEQ ID NO: 18804 - DNA, 33 bp, Homo Sapiens
gggggtgtagctcagtggtagagcgcgtgctta

SEQ ID NO: 18805 - DNA, 33 bp, Homo Sapiens
gggggtgtagctcagtggtagagcgcgtgcttc

SEQ ID NO: 18806 - DNA, 35 bp, Homo Sapiens
gggggtgtagctcagtggtagagcgcgtgcttcgc

SEQ ID NO: 18807 - DNA, 27 bp, Homo Sapiens
gggggttcgattccttccttttttgcc

SEQ ID NO: 18808 - DNA, 28 bp, Homo Sapiens
gggggttcgattccttccttttttgcca

SEQ ID NO: 18809 - DNA, 17 bp, Homo Sapiens
ggggtagagcatttgac

SEQ ID NO: 18810 - DNA, 19 bp, Homo Sapiens
ggggtagagcatttgactg

SEQ ID NO: 18811 - DNA, 20 bp, Homo Sapiens
ggggtagagcatttgactgc

SEQ ID NO: 18812 - DNA, 32 bp, Homo Sapiens
ggggtatagctcaggggtagagcatttgactg

SEQ ID NO: 18813 - DNA, 33 bp, Homo Sapiens
ggggtatagctcaggggtagagcatttgactgc

SEQ ID NO: 18814 - DNA, 34 bp, Homo Sapiens
ggggtatagctcaggggtagagcatttgactgca

SEQ ID NO: 18815 - DNA, 27 bp, Homo Sapiens
ggggtatagctcagtggtagagcattt

SEQ ID NO: 18816 - DNA, 28 bp, Homo Sapiens
ggggtatagctcagtggtagagcatttg

SEQ ID NO: 18817 - DNA, 29 bp, Homo Sapiens
ggggtatagctcagtggtagagcatttga

SEQ ID NO: 18818 - DNA, 31 bp, Homo Sapiens
ggggtatagctcagtggtagagcatttgact

SEQ ID NO: 18819 - DNA, 32 bp, Homo Sapiens
ggggtatagctcagtggtagagcatttgactg

SEQ ID NO: 18820 - DNA, 33 bp, Homo Sapiens
ggggtatagctcagtggtagagcatttgactgc

SEQ ID NO: 18821 - DNA, 34 bp, Homo Sapiens
ggggtatagctcagtggtagagcatttgactgca

SEQ ID NO: 18822 - DNA, 32 bp, Homo Sapiens
ggggtatagcttagcggtagagcatttgactg

SEQ ID NO: 18823 - DNA, 16 bp, Homo Sapiens
ggggtatgattctcgc

SEQ ID NO: 18824 - DNA, 17 bp, Homo Sapiens
ggggtatgattctcgct

SEQ ID NO: 18825 - DNA, 18 bp, Homo Sapiens
ggggtatgattctcgctt

SEQ ID NO: 18826 - DNA, 19 bp, Homo Sapiens
ggggtatgattctcgcttc

SEQ ID NO: 18827 - DNA, 20 bp, Homo Sapiens
ggggtatgattctcgcttcg

SEQ ID NO: 18828 - DNA, 21 bp, Homo Sapiens
ggggtatgattctcgcttcgg

SEQ ID NO: 18829 - DNA, 20 bp, Homo Sapiens
ggggtatgattctcgctttg

SEQ ID NO: 18830 - DNA, 21 bp, Homo Sapiens
ggggtatgattctcgctttgg

SEQ ID NO: 18831 - DNA, 16 bp, Homo Sapiens
ggggtatgattctcgg

SEQ ID NO: 18832 - DNA, 17 bp, Homo Sapiens
ggggtatgattctcggt

SEQ ID NO: 18833 - DNA, 18 bp, Homo Sapiens
ggggtatgattctcggtt

SEQ ID NO: 18834 - DNA, 19 bp, Homo Sapiens
ggggtatgattctcggttt

SEQ ID NO: 18835 - DNA, 20 bp, Homo Sapiens
ggggtatgattctcggtttg

SEQ ID NO: 18836 - DNA, 21 bp, Homo Sapiens
ggggtatgattctcggtttgg

SEQ ID NO: 18837 - DNA, 23 bp, Homo Sapiens
ggggtcgcgagttcaaatctcgc

SEQ ID NO: 18838 - DNA, 32 bp, Homo Sapiens
ggggtcgcgagttcaaatctcgctggggcctc

SEQ ID NO: 18839 - DNA, 32 bp, Homo Sapiens
ggggtgtagctcagtggtagagcatttgactg

SEQ ID NO: 18840 - DNA, 33 bp, Homo Sapiens
ggggtgtagctcagtggtagagcatttgactgc

SEQ ID NO: 18841 - DNA, 31 bp, Homo Sapiens
ggggtgtagctcagtggtagagcgcgtgctt

SEQ ID NO: 18842 - DNA, 18 bp, Homo Sapiens
ggggtgtgataggtggca

SEQ ID NO: 18843 - DNA, 20 bp, Homo Sapiens
ggggtgtgataggtggcacg

SEQ ID NO: 18844 - DNA, 24 bp, Homo Sapiens
ggggtgtgataggtggcacggaga

SEQ ID NO: 18845 - DNA, 30 bp, Homo Sapiens
ggggtgtgataggtggcacggagaattttg

SEQ ID NO: 18846 - DNA, 18 bp, Homo Sapiens
ggggttagagcactggtc

SEQ ID NO: 18847 - DNA, 19 bp, Homo Sapiens
ggggttagagcactggtct

SEQ ID NO: 18848 - DNA, 16 bp, Homo Sapiens
ggggttaggcctcttt

SEQ ID NO: 18849 - DNA, 21 bp, Homo Sapiens
ggggttaggcctctttttacc

SEQ ID NO: 18850 - DNA, 23 bp, Homo Sapiens
ggggttaggcctctttttaccac

SEQ ID NO: 18851 - DNA, 24 bp, Homo Sapiens
ggggttaggcctctttttaccacc

SEQ ID NO: 18852 - DNA, 25 bp, Homo Sapiens
ggggttaggcctctttttaccacca

SEQ ID NO: 18853 - DNA, 20 bp, Homo Sapiens
ggggttcaattccccgacgg

SEQ ID NO: 18854 - DNA, 21 bp, Homo Sapiens
ggggttcaattccccgacggg

SEQ ID NO: 18855 - DNA, 22 bp, Homo Sapiens
ggggttcaattccccgacgggg

SEQ ID NO: 18856 - DNA, 24 bp, Homo Sapiens
ggggttcaattccccgacggggag

SEQ ID NO: 18857 - DNA, 25 bp, Homo Sapiens
ggggttcaattccccgacggggagc

SEQ ID NO: 18858 - DNA, 26 bp, Homo Sapiens
ggggttcaattccccgacggggagcc

SEQ ID NO: 18859 - DNA, 27 bp, Homo Sapiens
ggggttcaattccccgacggggagcca

SEQ ID NO: 18860 - DNA, 25 bp, Homo Sapiens
ggggttcgattccccaacggggagc

SEQ ID NO: 18861 - DNA, 26 bp, Homo Sapiens
ggggttcgattccccaacggggagcc

SEQ ID NO: 18862 - DNA, 19 bp, Homo Sapiens
ggggttcgattccccgacg

SEQ ID NO: 18863 - DNA, 20 bp, Homo Sapiens
ggggttcgattccccgacgg

SEQ ID NO: 18864 - DNA, 21 bp, Homo Sapiens
ggggttcgattccccgacggg

SEQ ID NO: 18865 - DNA, 23 bp, Homo Sapiens
ggggttcgattccccgacgggga

SEQ ID NO: 18866 - DNA, 24 bp, Homo Sapiens
ggggttcgattccccgacggggag

SEQ ID NO: 18867 - DNA, 25 bp, Homo Sapiens
ggggttcgattccccgacggggagc

SEQ ID NO: 18868 - DNA, 26 bp, Homo Sapiens
ggggttcgattccccgacggggagcc

SEQ ID NO: 18869 - DNA, 27 bp, Homo Sapiens
ggggttcgattccccgacggggagcca

SEQ ID NO: 18870 - DNA, 17 bp, Homo Sapiens
ggggttcgattccttcc

SEQ ID NO: 18871 - DNA, 18 bp, Homo Sapiens
ggggttcgattccttcct

SEQ ID NO: 18872 - DNA, 19 bp, Homo Sapiens
ggggttcgattccttcctt

SEQ ID NO: 18873 - DNA, 25 bp, Homo Sapiens
ggggttcgattccttccttttttgc

SEQ ID NO: 18874 - DNA, 26 bp, Homo Sapiens
ggggttcgattccttccttttttgcc

SEQ ID NO: 18875 - DNA, 27 bp, Homo Sapiens
ggggttcgattccttccttttttgcca

SEQ ID NO: 18876 - DNA, 20 bp, Homo Sapiens
ggggttttgcagtccttacc

SEQ ID NO: 18877 - DNA, 21 bp, Homo Sapiens
ggggttttgcagtccttacca

SEQ ID NO: 18878 - DNA, 17 bp, Homo Sapiens
gggtagagcatttgact

SEQ ID NO: 18879 - DNA, 19 bp, Homo Sapiens
gggtagagcatttgactgc

SEQ ID NO: 18880 - DNA, 20 bp, Homo Sapiens
gggtagctcagtcggtagag

SEQ ID NO: 18881 - DNA, 28 bp, Homo Sapiens
gggtagctcagtcggtagagcatcagac

SEQ ID NO: 18882 - DNA, 19 bp, Homo Sapiens
gggtatagctcaggggtag

SEQ ID NO: 18883 - DNA, 26 bp, Homo Sapiens
gggtatagctcaggggtagagcattt

SEQ ID NO: 18884 - DNA, 30 bp, Homo Sapiens
gggtatagctcaggggtagagcatttgact

SEQ ID NO: 18885 - DNA, 31 bp, Homo Sapiens
gggtatagctcaggggtagagcatttgactg

SEQ ID NO: 18886 - DNA, 32 bp, Homo Sapiens
gggtatagctcaggggtagagcatttgactgc

SEQ ID NO: 18887 - DNA, 33 bp, Homo Sapiens
gggtatagctcaggggtagagcatttgactgca

SEQ ID NO: 18888 - DNA, 33 bp, Homo Sapiens
gggtatagctcaggtggtagagcatttgactgc

SEQ ID NO: 18889 - DNA, 16 bp, Homo Sapiens
gggtatagctcagtgg

SEQ ID NO: 18890 - DNA, 32 bp, Homo Sapiens
gggtatagctcagtgggtagagcatttgactg

SEQ ID NO: 18891 - DNA, 33 bp, Homo Sapiens
gggtatagctcagtgggtagagcatttgactgc

SEQ ID NO: 18892 - DNA, 34 bp, Homo Sapiens
gggtatagctcagtgggtagagcatttgactgca

SEQ ID NO: 18893 - DNA, 18 bp, Homo Sapiens
gggtatagctcagtggta

SEQ ID NO: 18894 - DNA, 19 bp, Homo Sapiens
gggtatagctcagtggtag

SEQ ID NO: 18895 - DNA, 20 bp, Homo Sapiens
gggtatagctcagtggtaga

SEQ ID NO: 18896 - DNA, 25 bp, Homo Sapiens
gggtatagctcagtggtagagcatt

SEQ ID NO: 18897 - DNA, 26 bp, Homo Sapiens
gggtatagctcagtggtagagcattt

SEQ ID NO: 18898 - DNA, 27 bp, Homo Sapiens
gggtatagctcagtggtagagcatttg

SEQ ID NO: 18899 - DNA, 28 bp, Homo Sapiens
gggtatagctcagtggtagagcatttga

SEQ ID NO: 18900 - DNA, 29 bp, Homo Sapiens
gggtatagctcagtggtagagcatttgac

SEQ ID NO: 18901 - DNA, 30 bp, Homo Sapiens
gggtatagctcagtggtagagcatttgact

SEQ ID NO: 18902 - DNA, 31 bp, Homo Sapiens
gggtatagctcagtggtagagcatttgactg

SEQ ID NO: 18903 - DNA, 32 bp, Homo Sapiens
gggtatagctcagtggtagagcatttgactgc

SEQ ID NO: 18904 - DNA, 33 bp, Homo Sapiens
gggtatagctcagtggtagagcatttgactgca

SEQ ID NO: 18905 - DNA, 37 bp, Homo Sapiens
gggtatagctcagtggtagagcatttgactgcagatc

SEQ ID NO: 18906 - DNA, 30 bp, Homo Sapiens
gggtatagcttagcggtagagcatttgact

SEQ ID NO: 18907 - DNA, 31 bp, Homo Sapiens
gggtatagcttagcggtagagcatttgactg

SEQ ID NO: 18908 - DNA, 32 bp, Homo Sapiens
gggtatagcttagcggtagagcatttgactgc

SEQ ID NO: 18909 - DNA, 33 bp, Homo Sapiens
gggtatagcttagcggtagagcatttgactgca

SEQ ID NO: 18910 - DNA, 16 bp, Homo Sapiens
gggtatgattctcgct

SEQ ID NO: 18911 - DNA, 17 bp, Homo Sapiens
gggtatgattctcgctt

SEQ ID NO: 18912 - DNA, 18 bp, Homo Sapiens
gggtatgattctcgcttc

SEQ ID NO: 18913 - DNA, 19 bp, Homo Sapiens
gggtatgattctcgcttcg

SEQ ID NO: 18914 - DNA, 20 bp, Homo Sapiens
gggtatgattctcgcttcgg

SEQ ID NO: 18915 - DNA, 18 bp, Homo Sapiens
gggtatgattctcgcttt

SEQ ID NO: 18916 - DNA, 19 bp, Homo Sapiens
gggtatgattctcgctttg

SEQ ID NO: 18917 - DNA, 20 bp, Homo Sapiens
gggtatgattctcgctttgg

SEQ ID NO: 18918 - DNA, 16 bp, Homo Sapiens
gggtatgattctcggt

SEQ ID NO: 18919 - DNA, 17 bp, Homo Sapiens
gggtatgattctcggtt

SEQ ID NO: 18920 - DNA, 18 bp, Homo Sapiens
gggtatgattctcggttt

SEQ ID NO: 18921 - DNA, 19 bp, Homo Sapiens
gggtatgattctcggtttg

SEQ ID NO: 18922 - DNA, 20 bp, Homo Sapiens
gggtatgattctcggtttgg

SEQ ID NO: 18923 - DNA, 28 bp, Homo Sapiens
gggtatgattctcggtttgggtccgaga

SEQ ID NO: 18924 - DNA, 29 bp, Homo Sapiens
gggtccagggttcaagtccctgttcgggc

SEQ ID NO: 18925 - DNA, 30 bp, Homo Sapiens
gggtccagggttcaagtccctgttcgggcg

SEQ ID NO: 18926 - DNA, 31 bp, Homo Sapiens
gggtccagggttcaagtccctgttcgggcgc

SEQ ID NO: 18927 - DNA, 32 bp, Homo Sapiens
gggtccagggttcaagtccctgttcgggcgcc

SEQ ID NO: 18928 - DNA, 33 bp, Homo Sapiens
gggtccagggttcaagtccctgttcgggcgcca

SEQ ID NO: 18929 - DNA, 23 bp, Homo Sapiens
gggtccagggttcatgtccctgt

SEQ ID NO: 18930 - DNA, 17 bp, Homo Sapiens
gggtcgtgggttcgagc

SEQ ID NO: 18931 - DNA, 20 bp, Homo Sapiens
gggtcgtgggttcgagcccc

SEQ ID NO: 18932 - DNA, 21 bp, Homo Sapiens
gggtcgtgggttcgagcccca

SEQ ID NO: 18933 - DNA, 23 bp, Homo Sapiens
gggtcgtgggttcgagccccacg

SEQ ID NO: 18934 - DNA, 24 bp, Homo Sapiens
gggtcgtgggttcgagccccacgt

SEQ ID NO: 18935 - DNA, 27 bp, Homo Sapiens
gggtcgtgggttcgagccccacgttgg

SEQ ID NO: 18936 - DNA, 29 bp, Homo Sapiens
gggtcgtgggttcgagccccacgttgggc

SEQ ID NO: 18937 - DNA, 30 bp, Homo Sapiens
gggtcgtgggttcgagccccacgttgggcg

SEQ ID NO: 18938 - DNA, 31 bp, Homo Sapiens
gggtcgtgggttcgagccccacgttgggcgc

SEQ ID NO: 18939 - DNA, 32 bp, Homo Sapiens
gggtcgtgggttcgagccccacgttgggcgcc

SEQ ID NO: 18940 - DNA, 33 bp, Homo Sapiens
gggtcgtgggttcgagccccacgttgggcgcca

SEQ ID NO: 18941 - DNA, 16 bp, Homo Sapiens
gggtgcgagaggtccc

SEQ ID NO: 18942 - DNA, 18 bp, Homo Sapiens
gggtgcgagaggtcccgg

SEQ ID NO: 18943 - DNA, 21 bp, Homo Sapiens
gggtgcgagaggtcccgggtt

SEQ ID NO: 18944 - DNA, 23 bp, Homo Sapiens
gggtgcgagaggtcccgggttca

SEQ ID NO: 18945 - DNA, 35 bp, Homo Sapiens
gggtgcgagaggtcccgggttcaaatcccggacga

SEQ ID NO: 18946 - DNA, 37 bp, Homo Sapiens
gggtgcgagaggtcccgggttcaaatcccggacgagc

SEQ ID NO: 18947 - DNA, 40 bp, Homo Sapiens
gggtgcgagaggtcccgggttcaaatcccggacgagcccc

SEQ ID NO: 18948 - DNA, 41 bp, Homo Sapiens
gggtgcgagaggtcccgggttcaaatcccggacgagccccc

SEQ ID NO: 18949 - DNA, 16 bp, Homo Sapiens
gggtgctaatggtgga

SEQ ID NO: 18950 - DNA, 20 bp, Homo Sapiens
gggtgctaatggtggagtta

SEQ ID NO: 18951 - DNA, 21 bp, Homo Sapiens
gggtgctaatggtggagttaa

SEQ ID NO: 18952 - DNA, 22 bp, Homo Sapiens
gggtgctaatggtggagttaaa

SEQ ID NO: 18953 - DNA, 23 bp, Homo Sapiens
gggtgctaatggtggagttaaag

SEQ ID NO: 18954 - DNA, 25 bp, Homo Sapiens
gggtgctaatggtggagttaaagac

SEQ ID NO: 18955 - DNA, 26 bp, Homo Sapiens
gggtgctaatggtggagttaaagact

SEQ ID NO: 18956 - DNA, 28 bp, Homo Sapiens
gggtgctaatggtggagttaaagacttt

SEQ ID NO: 18957 - DNA, 36 bp, Homo Sapiens
gggtgctaatggtggagttaaagactttttctctga

SEQ ID NO: 18958 - DNA, 37 bp, Homo Sapiens
gggtgctaatggtggagttaaagactttttctctgac

SEQ ID NO: 18959 - DNA, 38 bp, Homo Sapiens
gggtgctaatggtggagttaaagactttttctctgacc

SEQ ID NO: 18960 - DNA, 39 bp, Homo Sapiens
gggtgctaatggtggagttaaagactttttctctgacca

SEQ ID NO: 18961 - DNA, 28 bp, Homo Sapiens
gggtgcttagctgttaactaagtgtttg

SEQ ID NO: 18962 - DNA, 34 bp, Homo Sapiens
gggtgcttagctgttaactaagtgtttgtgggtt

SEQ ID NO: 18963 - DNA, 36 bp, Homo Sapiens
gggtgcttagctgttaactaagtgtttgtgggttta

SEQ ID NO: 18964 - DNA, 19 bp, Homo Sapiens
gggtggttcagtggtagaa

SEQ ID NO: 18965 - DNA, 21 bp, Homo Sapiens
gggtggttcagtggtagaatt

SEQ ID NO: 18966 - DNA, 22 bp, Homo Sapiens
gggtggttcagtggtagaattc

SEQ ID NO: 18967 - DNA, 23 bp, Homo Sapiens
gggtggttcagtggtagaattct

SEQ ID NO: 18968 - DNA, 24 bp, Homo Sapiens
gggtggttcagtggtagaattctc

SEQ ID NO: 18969 - DNA, 25 bp, Homo Sapiens
gggtggttcagtggtagaattctcg

SEQ ID NO: 18970 - DNA, 26 bp, Homo Sapiens
gggtggttcagtggtagaattctcgc

SEQ ID NO: 18971 - DNA, 27 bp, Homo Sapiens
gggtggttcagtggtagaattctcgcc

SEQ ID NO: 18972 - DNA, 28 bp, Homo Sapiens
gggtggttcagtggtagaattctcgcct

SEQ ID NO: 18973 - DNA, 29 bp, Homo Sapiens
gggtggttcagtggtagaattctcgcctg

SEQ ID NO: 18974 - DNA, 30 bp, Homo Sapiens
gggtggttcagtggtagaattctcgcctgc

SEQ ID NO: 18975 - DNA, 31 bp, Homo Sapiens
gggtggttcagtggtagaattctcgcctgcc

SEQ ID NO: 18976 - DNA, 32 bp, Homo Sapiens
gggtggttcagtggtagaattctcgcctgcca

SEQ ID NO: 18977 - DNA, 16 bp, Homo Sapiens
gggtgtagctcagtgg

SEQ ID NO: 18978 - DNA, 20 bp, Homo Sapiens
gggtgtagctcagtggtaga

SEQ ID NO: 18979 - DNA, 25 bp, Homo Sapiens
gggtgtagctcagtggtagagcatt

SEQ ID NO: 18980 - DNA, 27 bp, Homo Sapiens
gggtgtagctcagtggtagagcatttg

SEQ ID NO: 18981 - DNA, 30 bp, Homo Sapiens
gggtgtagctcagtggtagagcatttgact

SEQ ID NO: 18982 - DNA, 31 bp, Homo Sapiens
gggtgtagctcagtggtagagcatttgactg

SEQ ID NO: 18983 - DNA, 32 bp, Homo Sapiens
gggtgtagctcagtggtagagcatttgactgc

SEQ ID NO: 18984 - DNA, 33 bp, Homo Sapiens
gggtgtagctcagtggtagagcatttgactgca

SEQ ID NO: 18985 - DNA, 16 bp, Homo Sapiens
gggtgtgataggtggc

SEQ ID NO: 18986 - DNA, 17 bp, Homo Sapiens
gggtgtgataggtggca

SEQ ID NO: 18987 - DNA, 19 bp, Homo Sapiens
gggtgtgataggtggcacg

SEQ ID NO: 18988 - DNA, 21 bp, Homo Sapiens
gggtgtgataggtggcacgga

SEQ ID NO: 18989 - DNA, 22 bp, Homo Sapiens
gggtgtgataggtggcacggag

SEQ ID NO: 18990 - DNA, 23 bp, Homo Sapiens
gggtgtgataggtggcacggaga

SEQ ID NO: 18991 - DNA, 24 bp, Homo Sapiens
gggtgtgataggtggcacggagaa

SEQ ID NO: 18992 - DNA, 25 bp, Homo Sapiens
gggtgtgataggtggcacggagaat

SEQ ID NO: 18993 - DNA, 26 bp, Homo Sapiens
gggtgtgataggtggcacggagaatt

SEQ ID NO: 18994 - DNA, 27 bp, Homo Sapiens
gggtgtgataggtggcacggagaattt

SEQ ID NO: 18995 - DNA, 28 bp, Homo Sapiens
gggtgtgataggtggcacggagaatttt

SEQ ID NO: 18996 - DNA, 29 bp, Homo Sapiens
gggtgtgataggtggcacggagaattttg

SEQ ID NO: 18997 - DNA, 17 bp, Homo Sapiens
gggttagagcactggtc

SEQ ID NO: 18998 - DNA, 18 bp, Homo Sapiens
gggttagagcactggtct

SEQ ID NO: 18999 - DNA, 26 bp, Homo Sapiens
gggttagagcactggtcttgtaaacc

SEQ ID NO: 19000 - DNA, 17 bp, Homo Sapiens
gggttaggcctcttttt

SEQ ID NO: 19001 - DNA, 18 bp, Homo Sapiens
gggttaggcctcttttta

SEQ ID NO: 19002 - DNA, 19 bp, Homo Sapiens
gggttaggcctctttttac

SEQ ID NO: 19003 - DNA, 20 bp, Homo Sapiens
gggttaggcctctttttacc

SEQ ID NO: 19004 - DNA, 21 bp, Homo Sapiens
gggttaggcctctttttacca

SEQ ID NO: 19005 - DNA, 22 bp, Homo Sapiens
gggttaggcctctttttaccac

SEQ ID NO: 19006 - DNA, 23 bp, Homo Sapiens
gggttaggcctctttttaccacc

SEQ ID NO: 19007 - DNA, 24 bp, Homo Sapiens
gggttaggcctctttttaccacca

SEQ ID NO: 19008 - DNA, 22 bp, Homo Sapiens
gggttcaagtccctgttcgggc

SEQ ID NO: 19009 - DNA, 23 bp, Homo Sapiens
gggttcaagtccctgttcgggcg

SEQ ID NO: 19010 - DNA, 24 bp, Homo Sapiens
gggttcaagtccctgttcgggcgc

SEQ ID NO: 19011 - DNA, 25 bp, Homo Sapiens
gggttcaagtccctgttcgggcgcc

SEQ ID NO: 19012 - DNA, 26 bp, Homo Sapiens
gggttcaagtccctgttcgggcgcca

SEQ ID NO: 19013 - DNA, 24 bp, Homo Sapiens
gggttcaatccccggcacctccac

SEQ ID NO: 19014 - DNA, 24 bp, Homo Sapiens
gggttcaattccccgacggggagc

SEQ ID NO: 19015 - DNA, 25 bp, Homo Sapiens
gggttcaattccccgacggggagcc

SEQ ID NO: 19016 - DNA, 26 bp, Homo Sapiens
gggttcaattccccgacggggagcca

SEQ ID NO: 19017 - DNA, 23 bp, Homo Sapiens
gggttcaattcccggtcagggaa

SEQ ID NO: 19018 - DNA, 34 bp, Homo Sapiens
gggttccatagtgtagtggttatcacgtctgctt

SEQ ID NO: 19019 - DNA, 34 bp, Homo Sapiens
gggttccatggtgtaatggttagcactctggact

SEQ ID NO: 19020 - DNA, 25 bp, Homo Sapiens
gggttcgaaccccgtccgtgcctcc

SEQ ID NO: 19021 - DNA, 26 bp, Homo Sapiens
gggttcgaatcccagcggggcctcca

SEQ ID NO: 19022 - DNA, 25 bp, Homo Sapiens
gggttcgaatcccagcggtgcctcc

SEQ ID NO: 19023 - DNA, 24 bp, Homo Sapiens
gggttcgaatcccatcctcgtcgc

SEQ ID NO: 19024 - DNA, 25 bp, Homo Sapiens
gggttcgaatcccatcctcgtcgcc

SEQ ID NO: 19025 - DNA, 26 bp, Homo Sapiens
gggttcgaatcccatcctcgtcgcca

SEQ ID NO: 19026 - DNA, 23 bp, Homo Sapiens
gggttcgaatcccttcgtggttg

SEQ ID NO: 19027 - DNA, 24 bp, Homo Sapiens
gggttcgaatcccttcgtggttgc

SEQ ID NO: 19028 - DNA, 22 bp, Homo Sapiens
gggttcgactcccggtatggga

SEQ ID NO: 19029 - DNA, 23 bp, Homo Sapiens
gggttcgactcccggtatgggaa

SEQ ID NO: 19030 - DNA, 24 bp, Homo Sapiens
gggttcgactcccggtatgggaac

SEQ ID NO: 19031 - DNA, 25 bp, Homo Sapiens
gggttcgactcccggtatgggaacc

SEQ ID NO: 19032 - DNA, 18 bp, Homo Sapiens
gggttcgactcccggtgt

SEQ ID NO: 19033 - DNA, 20 bp, Homo Sapiens
gggttcgactcccggtgtgg

SEQ ID NO: 19034 - DNA, 21 bp, Homo Sapiens
gggttcgactcccggtgtggg

SEQ ID NO: 19035 - DNA, 22 bp, Homo Sapiens
gggttcgactcccggtgtggga

SEQ ID NO: 19036 - DNA, 23 bp, Homo Sapiens
gggttcgactcccggtgtgggaa

SEQ ID NO: 19037 - DNA, 24 bp, Homo Sapiens
gggttcgactcccggtgtgggaac

SEQ ID NO: 19038 - DNA, 25 bp, Homo Sapiens
gggttcgactcccggtgtgggaacc

SEQ ID NO: 19039 - DNA, 26 bp, Homo Sapiens
gggttcgactcccggtgtgggaacca

SEQ ID NO: 19040 - DNA, 23 bp, Homo Sapiens
gggttcgagccccacgttgggcg

SEQ ID NO: 19041 - DNA, 24 bp, Homo Sapiens
gggttcgagccccacgttgggcgc

SEQ ID NO: 19042 - DNA, 25 bp, Homo Sapiens
gggttcgagccccacgttgggcgcc

SEQ ID NO: 19043 - DNA, 26 bp, Homo Sapiens
gggttcgagccccacgttgggcgcca

SEQ ID NO: 19044 - DNA, 24 bp, Homo Sapiens
gggttcgagtcccatctgggtcgc

SEQ ID NO: 19045 - DNA, 23 bp, Homo Sapiens
gggttcgagtcccggcagagatg

SEQ ID NO: 19046 - DNA, 25 bp, Homo Sapiens
gggttcgagtcccttcgtggtcgcc

SEQ ID NO: 19047 - DNA, 16 bp, Homo Sapiens
gggttcgatccccggc

SEQ ID NO: 19048 - DNA, 17 bp, Homo Sapiens
gggttcgatccccggca

SEQ ID NO: 19049 - DNA, 20 bp, Homo Sapiens
gggttcgatccccggcatct

SEQ ID NO: 19050 - DNA, 21 bp, Homo Sapiens
gggttcgatccccggcatctc

SEQ ID NO: 19051 - DNA, 22 bp, Homo Sapiens
gggttcgatccccggcatctcc

SEQ ID NO: 19052 - DNA, 24 bp, Homo Sapiens
gggttcgatccccggcatctccac

SEQ ID NO: 19053 - DNA, 25 bp, Homo Sapiens
gggttcgatccccggcatctccacc

SEQ ID NO: 19054 - DNA, 26 bp, Homo Sapiens
gggttcgatccccggcatctccacca

SEQ ID NO: 19055 - DNA, 19 bp, Homo Sapiens
gggttcgattccccgacgg

SEQ ID NO: 19056 - DNA, 22 bp, Homo Sapiens
gggttcgattccccgacgggga

SEQ ID NO: 19057 - DNA, 23 bp, Homo Sapiens
gggttcgattccccgacggggag

SEQ ID NO: 19058 - DNA, 24 bp, Homo Sapiens
gggttcgattccccgacggggagc

SEQ ID NO: 19059 - DNA, 25 bp, Homo Sapiens
gggttcgattccccgacggggagcc

SEQ ID NO: 19060 - DNA, 26 bp, Homo Sapiens
gggttcgattccccgacggggagcca

SEQ ID NO: 19061 - DNA, 16 bp, Homo Sapiens
gggttcgattcccggc

SEQ ID NO: 19062 - DNA, 18 bp, Homo Sapiens
gggttcgattcccggcca

SEQ ID NO: 19063 - DNA, 21 bp, Homo Sapiens
gggttcgattcccggccaacg

SEQ ID NO: 19064 - DNA, 24 bp, Homo Sapiens
gggttcgattcccggccaacgcac

SEQ ID NO: 19065 - DNA, 21 bp, Homo Sapiens
gggttcgattcccggccaatg

SEQ ID NO: 19066 - DNA, 24 bp, Homo Sapiens
gggttcgattcccggccagggaac

SEQ ID NO: 19067 - DNA, 17 bp, Homo Sapiens
gggttcgattcccgggc

SEQ ID NO: 19068 - DNA, 18 bp, Homo Sapiens
gggttcgattcccgggcg

SEQ ID NO: 19069 - DNA, 20 bp, Homo Sapiens
gggttcgattcccgggcggc

SEQ ID NO: 19070 - DNA, 21 bp, Homo Sapiens
gggttcgattcccgggcggcg

SEQ ID NO: 19071 - DNA, 22 bp, Homo Sapiens
gggttcgattcccgggcggcgc

SEQ ID NO: 19072 - DNA, 23 bp, Homo Sapiens
gggttcgattcccgggcggcgca

SEQ ID NO: 19073 - DNA, 24 bp, Homo Sapiens
gggttcgattcccgggcggcgcac

SEQ ID NO: 19074 - DNA, 25 bp, Homo Sapiens
gggttcgattcccgggcggcgcacc

SEQ ID NO: 19075 - DNA, 26 bp, Homo Sapiens
gggttcgattcccgggcggcgcacca

SEQ ID NO: 19076 - DNA, 17 bp, Homo Sapiens
gggttcgattcccggtc

SEQ ID NO: 19077 - DNA, 18 bp, Homo Sapiens
gggttcgattcccggtca

SEQ ID NO: 19078 - DNA, 19 bp, Homo Sapiens
gggttcgattcccggtcag

SEQ ID NO: 19079 - DNA, 20 bp, Homo Sapiens
gggttcgattcccggtcagg

SEQ ID NO: 19080 - DNA, 24 bp, Homo Sapiens
gggttcgattcccggtcaggaaac

SEQ ID NO: 19081 - DNA, 25 bp, Homo Sapiens
gggttcgattcccggtcaggaaacc

SEQ ID NO: 19082 - DNA, 21 bp, Homo Sapiens
gggttcgattcccggtcaggg

SEQ ID NO: 19083 - DNA, 22 bp, Homo Sapiens
gggttcgattcccggtcaggga

SEQ ID NO: 19084 - DNA, 23 bp, Homo Sapiens
gggttcgattcccggtcagggaa

SEQ ID NO: 19085 - DNA, 24 bp, Homo Sapiens
gggttcgattcccggtcagggaac

SEQ ID NO: 19086 - DNA, 25 bp, Homo Sapiens
gggttcgattcccggtcagggaacc

SEQ ID NO: 19087 - DNA, 26 bp, Homo Sapiens
gggttcgattcccggtcagggaacca

SEQ ID NO: 19088 - DNA, 24 bp, Homo Sapiens
gggttcgattccttccttttttgc

SEQ ID NO: 19089 - DNA, 25 bp, Homo Sapiens
gggttcgattccttccttttttgcc

SEQ ID NO: 19090 - DNA, 26 bp, Homo Sapiens
gggttcgattccttccttttttgcca

SEQ ID NO: 19091 - DNA, 20 bp, Homo Sapiens
gggttcgattctcatagtcc

SEQ ID NO: 19092 - DNA, 23 bp, Homo Sapiens
gggttcgattctcatagtcctag

SEQ ID NO: 19093 - DNA, 24 bp, Homo Sapiens
gggttcgattctcatagtcctagc

SEQ ID NO: 19094 - DNA, 25 bp, Homo Sapiens
gggttcgattctcatagtcctagcc

SEQ ID NO: 19095 - DNA, 26 bp, Homo Sapiens
gggttcgattctcatagtcctagcca

SEQ ID NO: 19096 - DNA, 20 bp, Homo Sapiens
gggtttaagtcccattggtc

SEQ ID NO: 19097 - DNA, 23 bp, Homo Sapiens
gggtttaagtcccattggtctag

SEQ ID NO: 19098 - DNA, 24 bp, Homo Sapiens
gggtttaagtcccattggtctagc

SEQ ID NO: 19099 - DNA, 25 bp, Homo Sapiens
gggtttaagtcccattggtctagcc

SEQ ID NO: 19100 - DNA, 18 bp, Homo Sapiens
gggtttccccgcgcaggt

SEQ ID NO: 19101 - DNA, 19 bp, Homo Sapiens
gggtttccccgcgcaggtt

SEQ ID NO: 19102 - DNA, 19 bp, Homo Sapiens
gggttttgcagtccttacc

SEQ ID NO: 19103 - DNA, 20 bp, Homo Sapiens
gggttttgcagtccttacca

SEQ ID NO: 19104 - DNA, 16 bp, Homo Sapiens
ggtaaaatggctgagt

SEQ ID NO: 19105 - DNA, 17 bp, Homo Sapiens
ggtaaaatggctgagtg

SEQ ID NO: 19106 - DNA, 18 bp, Homo Sapiens
ggtaaaatggctgagtga

SEQ ID NO: 19107 - DNA, 19 bp, Homo Sapiens
ggtaaaatggctgagtgaa

SEQ ID NO: 19108 - DNA, 20 bp, Homo Sapiens
ggtaaaatggctgagtgaag

SEQ ID NO: 19109 - DNA, 21 bp, Homo Sapiens
ggtaaaatggctgagtgaagc

SEQ ID NO: 19110 - DNA, 22 bp, Homo Sapiens
ggtaaaatggctgagtgaagca

SEQ ID NO: 19111 - DNA, 23 bp, Homo Sapiens
ggtaaaatggctgagtgaagcat

SEQ ID NO: 19112 - DNA, 24 bp, Homo Sapiens
ggtaaaatggctgagtgaagcatt

SEQ ID NO: 19113 - DNA, 25 bp, Homo Sapiens
ggtaaaatggctgagtgaagcattg

SEQ ID NO: 19114 - DNA, 26 bp, Homo Sapiens
ggtaaaatggctgagtgaagcattgg

SEQ ID NO: 19115 - DNA, 27 bp, Homo Sapiens
ggtaaaatggctgagtgaagcattgga

SEQ ID NO: 19116 - DNA, 28 bp, Homo Sapiens
ggtaaaatggctgagtgaagcattggac

SEQ ID NO: 19117 - DNA, 29 bp, Homo Sapiens
ggtaaaatggctgagtgaagcattggact

SEQ ID NO: 19118 - DNA, 30 bp, Homo Sapiens
ggtaaaatggctgagtgaagcattggactg

SEQ ID NO: 19119 - DNA, 31 bp, Homo Sapiens
ggtaaaatggctgagtgaagcattggactgt

SEQ ID NO: 19120 - DNA, 32 bp, Homo Sapiens
ggtaaaatggctgagtgaagcattggactgta

SEQ ID NO: 19121 - DNA, 33 bp, Homo Sapiens
ggtaaaatggctgagtgaagcattggactgtaa

SEQ ID NO: 19122 - DNA, 34 bp, Homo Sapiens
ggtaaaatggctgagtgaagcattggactgtaaa

SEQ ID NO: 19123 - DNA, 35 bp, Homo Sapiens
ggtaaaatggctgagtgaagcattggactgtaaat

SEQ ID NO: 19124 - DNA, 36 bp, Homo Sapiens
ggtaaaatggctgagtgaagcattggactgtaaatc

SEQ ID NO: 19125 - DNA, 37 bp, Homo Sapiens
ggtaaaatggctgagtgaagcattggactgtaaatct

SEQ ID NO: 19126 - DNA, 38 bp, Homo Sapiens
ggtaaaatggctgagtgaagcattggactgtaaatcta

SEQ ID NO: 19127 - DNA, 39 bp, Homo Sapiens
ggtaaaatggctgagtgaagcattggactgtaaatctaa

SEQ ID NO: 19128 - DNA, 40 bp, Homo Sapiens
ggtaaaatggctgagtgaagcattggactgtaaatctaaa

SEQ ID NO: 19129 - DNA, 41 bp, Homo Sapiens
ggtaaaatggctgagtgaagcattggactgtaaatctaaag

SEQ ID NO: 19130 - DNA, 43 bp, Homo Sapiens
ggtaaaatggctgagtgaagcattggactgtaaatctaaagac

SEQ ID NO: 19131 - DNA, 47 bp, Homo Sapiens
ggtaaaatggctgagtgaagcattggactgtaaatctaaagacaggg

SEQ ID NO: 19132 - DNA, 48 bp, Homo Sapiens
ggtaaaatggctgagtgaagcattggactgtaaatctaaagacagggg

SEQ ID NO: 19133 - DNA, 17 bp, Homo Sapiens
ggtaaatatagtttaac

SEQ ID NO: 19134 - DNA, 18 bp, Homo Sapiens
ggtaaatatagtttaacc

SEQ ID NO: 19135 - DNA, 29 bp, Homo Sapiens
ggtaaatatagtttaaccaaaacatcaga

SEQ ID NO: 19136 - DNA, 30 bp, Homo Sapiens
ggtaaatatagtttaaccaaaacatcagat

SEQ ID NO: 19137 - DNA, 32 bp, Homo Sapiens
ggtaaatatagtttaaccaaaacatcagattg

SEQ ID NO: 19138 - DNA, 33 bp, Homo Sapiens
ggtaaatatagtttaaccaaaacatcagattgt

SEQ ID NO: 19139 - DNA, 34 bp, Homo Sapiens
ggtaaatatagtttaaccaaaacatcagattgtg

SEQ ID NO: 19140 - DNA, 35 bp, Homo Sapiens
ggtaaatatagtttaaccaaaacatcagattgtga

SEQ ID NO: 19141 - DNA, 36 bp, Homo Sapiens
ggtaaatatagtttaaccaaaacatcagattgtgaa

SEQ ID NO: 19142 - DNA, 37 bp, Homo Sapiens
ggtaaatatagtttaaccaaaacatcagattgtgaat

SEQ ID NO: 19143 - DNA, 38 bp, Homo Sapiens
ggtaaatatagtttaaccaaaacatcagattgtgaatc

SEQ ID NO: 19144 - DNA, 39 bp, Homo Sapiens
ggtaaatatagtttaaccaaaacatcagattgtgaatct

SEQ ID NO: 19145 - DNA, 40 bp, Homo Sapiens
ggtaaatatagtttaaccaaaacatcagattgtgaatctg

SEQ ID NO: 19146 - DNA, 41 bp, Homo Sapiens
ggtaaatatagtttaaccaaaacatcagattgtgaatctga

SEQ ID NO: 19147 - DNA, 42 bp, Homo Sapiens
ggtaaatatagtttaaccaaaacatcagattgtgaatctgac

SEQ ID NO: 19148 - DNA, 43 bp, Homo Sapiens
ggtaaatatagtttaaccaaaacatcagattgtgaatctgaca

SEQ ID NO: 19149 - DNA, 44 bp, Homo Sapiens
ggtaaatatagtttaaccaaaacatcagattgtgaatctgacaa

SEQ ID NO: 19150 - DNA, 21 bp, Homo Sapiens
ggtaagcactctggactctga

SEQ ID NO: 19151 - DNA, 22 bp, Homo Sapiens
ggtaagcactctggactctgaa

SEQ ID NO: 19152 - DNA, 36 bp, Homo Sapiens
ggtaagcactctggactctgaatccagcgatccgag

SEQ ID NO: 19153 - DNA, 20 bp, Homo Sapiens
ggtaagcatagctgccttcc

SEQ ID NO: 19154 - DNA, 16 bp, Homo Sapiens
ggtaatcgcataaaac

SEQ ID NO: 19155 - DNA, 17 bp, Homo Sapiens
ggtaatcgcataaaact

SEQ ID NO: 19156 - DNA, 18 bp, Homo Sapiens
ggtaatcgcataaaactt

SEQ ID NO: 19157 - DNA, 19 bp, Homo Sapiens
ggtaatcgcataaaactta

SEQ ID NO: 19158 - DNA, 20 bp, Homo Sapiens
ggtaatcgcataaaacttaa

SEQ ID NO: 19159 - DNA, 21 bp, Homo Sapiens
ggtaatcgcataaaacttaaa

SEQ ID NO: 19160 - DNA, 22 bp, Homo Sapiens
ggtaatcgcataaaacttaaaa

SEQ ID NO: 19161 - DNA, 23 bp, Homo Sapiens
ggtaatcgcataaaacttaaaac

SEQ ID NO: 19162 - DNA, 24 bp, Homo Sapiens
ggtaatcgcataaaacttaaaact

SEQ ID NO: 19163 - DNA, 25 bp, Homo Sapiens
ggtaatcgcataaaacttaaaactt

SEQ ID NO: 19164 - DNA, 26 bp, Homo Sapiens
ggtaatcgcataaaacttaaaacttt

SEQ ID NO: 19165 - DNA, 27 bp, Homo Sapiens
ggtaatcgcataaaacttaaaacttta

SEQ ID NO: 19166 - DNA, 28 bp, Homo Sapiens
ggtaatcgcataaaacttaaaactttac

SEQ ID NO: 19167 - DNA, 29 bp, Homo Sapiens
ggtaatcgcataaaacttaaaactttaca

SEQ ID NO: 19168 - DNA, 30 bp, Homo Sapiens
ggtaatcgcataaaacttaaaactttacag

SEQ ID NO: 19169 - DNA, 31 bp, Homo Sapiens
ggtaatcgcataaaacttaaaactttacagt

SEQ ID NO: 19170 - DNA, 32 bp, Homo Sapiens
ggtaatcgcataaaacttaaaactttacagtc

SEQ ID NO: 19171 - DNA, 34 bp, Homo Sapiens
ggtaatcgcataaaacttaaaactttacagtcag

SEQ ID NO: 19172 - DNA, 35 bp, Homo Sapiens
ggtaatcgcataaaacttaaaactttacagtcaga

SEQ ID NO: 19173 - DNA, 36 bp, Homo Sapiens
ggtaatcgcataaaacttaaaactttacagtcagag

SEQ ID NO: 19174 - DNA, 37 bp, Homo Sapiens
ggtaatcgcataaaacttaaaactttacagtcagagg

SEQ ID NO: 19175 - DNA, 39 bp, Homo Sapiens
ggtaatcgcataaaacttaaaactttacagtcagaggtt

SEQ ID NO: 19176 - DNA, 40 bp, Homo Sapiens
ggtaatcgcataaaacttaaaactttacagtcagaggttc

SEQ ID NO: 19177 - DNA, 41 bp, Homo Sapiens
ggtaatcgcataaaacttaaaactttacagtcagaggttca

SEQ ID NO: 19178 - DNA, 28 bp, Homo Sapiens
ggtacttataatgccgaggttgtgagtt

SEQ ID NO: 19179 - DNA, 16 bp, Homo Sapiens
ggtagaattctcgcct

SEQ ID NO: 19180 - DNA, 19 bp, Homo Sapiens
ggtagaattctcgcctccc

SEQ ID NO: 19181 - DNA, 36 bp, Homo Sapiens
ggtagaattctcgcctcccacgcgggagacccgggt

SEQ ID NO: 19182 - DNA, 37 bp, Homo Sapiens
ggtagaattctcgcctcccacgcgggagacccgggtt

SEQ ID NO: 19183 - DNA, 17 bp, Homo Sapiens
ggtagaattctcgcctg

SEQ ID NO: 19184 - DNA, 18 bp, Homo Sapiens
ggtagaattctcgcctgc

SEQ ID NO: 19185 - DNA, 19 bp, Homo Sapiens
ggtagaattctcgcctgcc

SEQ ID NO: 19186 - DNA, 20 bp, Homo Sapiens
ggtagaattctcgcctgcca

SEQ ID NO: 19187 - DNA, 21 bp, Homo Sapiens
ggtagaattctcgcctgccac

SEQ ID NO: 19188 - DNA, 22 bp, Homo Sapiens
ggtagaattctcgcctgccacg

SEQ ID NO: 19189 - DNA, 23 bp, Homo Sapiens
ggtagaattctcgcctgccacgc

SEQ ID NO: 19190 - DNA, 25 bp, Homo Sapiens
ggtagaattctcgcctgccacgcgg

SEQ ID NO: 19191 - DNA, 27 bp, Homo Sapiens
ggtagaattctcgcctgccacgcggga

SEQ ID NO: 19192 - DNA, 28 bp, Homo Sapiens
ggtagaattctcgcctgccacgcgggag

SEQ ID NO: 19193 - DNA, 31 bp, Homo Sapiens
ggtagaattctcgcctgccacgcgggaggcc

SEQ ID NO: 19194 - DNA, 32 bp, Homo Sapiens
ggtagaattctcgcctgccacgcgggaggccc

SEQ ID NO: 19195 - DNA, 33 bp, Homo Sapiens
ggtagaattctcgcctgccacgcgggaggcccg

SEQ ID NO: 19196 - DNA, 34 bp, Homo Sapiens
ggtagaattctcgcctgccacgcgggaggcccgg

SEQ ID NO: 19197 - DNA, 35 bp, Homo Sapiens
ggtagaattctcgcctgccacgcgggaggcccggg

SEQ ID NO: 19198 - DNA, 36 bp, Homo Sapiens
ggtagaattctcgcctgccacgcgggaggcccgggt

SEQ ID NO: 19199 - DNA, 37 bp, Homo Sapiens
ggtagaattctcgcctgccacgcgggaggcccgggtt

SEQ ID NO: 19200 - DNA, 39 bp, Homo Sapiens
ggtagaattctcgcctgccacgcgggaggcccgggttcg

SEQ ID NO: 19201 - DNA, 16 bp, Homo Sapiens
ggtagagcatcagact

SEQ ID NO: 19202 - DNA, 17 bp, Homo Sapiens
ggtagagcatcagactt

SEQ ID NO: 19203 - DNA, 18 bp, Homo Sapiens
ggtagagcatcagacttt

SEQ ID NO: 19204 - DNA, 19 bp, Homo Sapiens
ggtagagcatcagactttt

SEQ ID NO: 19205 - DNA, 22 bp, Homo Sapiens
ggtagagcatcagacttttaat

SEQ ID NO: 19206 - DNA, 16 bp, Homo Sapiens
ggtagagcatgagacc

SEQ ID NO: 19207 - DNA, 17 bp, Homo Sapiens
ggtagagcatgagaccc

SEQ ID NO: 19208 - DNA, 18 bp, Homo Sapiens
ggtagagcatgagaccct

SEQ ID NO: 19209 - DNA, 25 bp, Homo Sapiens
ggtagagcatgagacccttaatctc

SEQ ID NO: 19210 - DNA, 16 bp, Homo Sapiens
ggtagagcatgagact

SEQ ID NO: 19211 - DNA, 17 bp, Homo Sapiens
ggtagagcatgagactc

SEQ ID NO: 19212 - DNA, 18 bp, Homo Sapiens
ggtagagcatgagactct

SEQ ID NO: 19213 - DNA, 19 bp, Homo Sapiens
ggtagagcatgagactctt

SEQ ID NO: 19214 - DNA, 21 bp, Homo Sapiens
ggtagagcatgagactcttaa

SEQ ID NO: 19215 - DNA, 23 bp, Homo Sapiens
ggtagagcatgagactcttaatc

SEQ ID NO: 19216 - DNA, 24 bp, Homo Sapiens
ggtagagcatgagactcttaatct

SEQ ID NO: 19217 - DNA, 25 bp, Homo Sapiens
ggtagagcatgagactcttaatctc

SEQ ID NO: 19218 - DNA, 32 bp, Homo Sapiens
ggtagagcatgagactcttaatctcagggtcg

SEQ ID NO: 19219 - DNA, 33 bp, Homo Sapiens
ggtagagcatgagactcttaatctcagggtcgt

SEQ ID NO: 19220 - DNA, 34 bp, Homo Sapiens
ggtagagcatgagactcttaatctcagggtcgtg

SEQ ID NO: 19221 - DNA, 35 bp, Homo Sapiens
ggtagagcatgagactcttaatctcagggtcgtgg

SEQ ID NO: 19222 - DNA, 36 bp, Homo Sapiens
ggtagagcatgagactcttaatctcagggtcgtggg

SEQ ID NO: 19223 - DNA, 38 bp, Homo Sapiens
ggtagagcatgagactcttaatctcagggtcgtgggtt

SEQ ID NO: 19224 - DNA, 39 bp, Homo Sapiens
ggtagagcatgagactcttaatctcagggtcgtgggttc

SEQ ID NO: 19225 - DNA, 40 bp, Homo Sapiens
ggtagagcatgagactcttaatctcagggtcgtgggttcg

SEQ ID NO: 19226 - DNA, 16 bp, Homo Sapiens
ggtagagcatgggact

SEQ ID NO: 19227 - DNA, 17 bp, Homo Sapiens
ggtagagcatgggactc

SEQ ID NO: 19228 - DNA, 18 bp, Homo Sapiens
ggtagagcatgggactct

SEQ ID NO: 19229 - DNA, 19 bp, Homo Sapiens
ggtagagcatgggactctt

SEQ ID NO: 19230 - DNA, 20 bp, Homo Sapiens
ggtagagcatgggactctta

SEQ ID NO: 19231 - DNA, 21 bp, Homo Sapiens
ggtagagcatgggactcttaa

SEQ ID NO: 19232 - DNA, 22 bp, Homo Sapiens
ggtagagcatgggactcttaat

SEQ ID NO: 19233 - DNA, 23 bp, Homo Sapiens
ggtagagcatgggactcttaatc

SEQ ID NO: 19234 - DNA, 24 bp, Homo Sapiens
ggtagagcatgggactcttaatcc

SEQ ID NO: 19235 - DNA, 25 bp, Homo Sapiens
ggtagagcatgggactcttaatccc

SEQ ID NO: 19236 - DNA, 26 bp, Homo Sapiens
ggtagagcatgggactcttaatccca

SEQ ID NO: 19237 - DNA, 32 bp, Homo Sapiens
ggtagagcatgggactcttaatcccagggtcg

SEQ ID NO: 19238 - DNA, 33 bp, Homo Sapiens
ggtagagcatgggactcttaatcccagggtcgt

SEQ ID NO: 19239 - DNA, 34 bp, Homo Sapiens
ggtagagcatgggactcttaatcccagggtcgtg

SEQ ID NO: 19240 - DNA, 35 bp, Homo Sapiens
ggtagagcatgggactcttaatcccagggtcgtgg

SEQ ID NO: 19241 - DNA, 36 bp, Homo Sapiens
ggtagagcatgggactcttaatcccagggtcgtggg

SEQ ID NO: 19242 - DNA, 38 bp, Homo Sapiens
ggtagagcatgggactcttaatcccagggtcgtgggtt

SEQ ID NO: 19243 - DNA, 40 bp, Homo Sapiens
ggtagagcatgggactcttaatcccagggtcgtgggttcg

SEQ ID NO: 19244 - DNA, 46 bp, Homo Sapiens
ggtagagcatgggactcttaatcccagggtcgtgggttcgagcccc

SEQ ID NO: 19245 - DNA, 25 bp, Homo Sapiens
ggtagagcatgggactcttaatctc

SEQ ID NO: 19246 - DNA, 16 bp, Homo Sapiens
ggtagagcatttgact

SEQ ID NO: 19247 - DNA, 17 bp, Homo Sapiens
ggtagagcatttgactg

SEQ ID NO: 19248 - DNA, 18 bp, Homo Sapiens
ggtagagcatttgactgc

SEQ ID NO: 19249 - DNA, 17 bp, Homo Sapiens
ggtagagcggaggactg

SEQ ID NO: 19250 - DNA, 20 bp, Homo Sapiens
ggtagagcggaggactgtag

SEQ ID NO: 19251 - DNA, 16 bp, Homo Sapiens
ggtagcgcgtctgact

SEQ ID NO: 19252 - DNA, 18 bp, Homo Sapiens
ggtagcgcgtctgactcc

SEQ ID NO: 19253 - DNA, 16 bp, Homo Sapiens
ggtagcgtggccgagc

SEQ ID NO: 19254 - DNA, 17 bp, Homo Sapiens
ggtagcgtggccgagcg

SEQ ID NO: 19255 - DNA, 18 bp, Homo Sapiens
ggtagcgtggccgagcgg

SEQ ID NO: 19256 - DNA, 19 bp, Homo Sapiens
ggtagcgtggccgagcggt

SEQ ID NO: 19257 - DNA, 20 bp, Homo Sapiens
ggtagcgtggccgagcggtc

SEQ ID NO: 19258 - DNA, 21 bp, Homo Sapiens
ggtagcgtggccgagcggtct

SEQ ID NO: 19259 - DNA, 22 bp, Homo Sapiens
ggtagcgtggccgagcggtcta

SEQ ID NO: 19260 - DNA, 23 bp, Homo Sapiens
ggtagcgtggccgagcggtctaa

SEQ ID NO: 19261 - DNA, 24 bp, Homo Sapiens
ggtagcgtggccgagcggtctaag

SEQ ID NO: 19262 - DNA, 25 bp, Homo Sapiens
ggtagcgtggccgagcggtctaagg

SEQ ID NO: 19263 - DNA, 26 bp, Homo Sapiens
ggtagcgtggccgagcggtctaaggc

SEQ ID NO: 19264 - DNA, 28 bp, Homo Sapiens
ggtagcgtggccgagcggtctaaggcgc

SEQ ID NO: 19265 - DNA, 30 bp, Homo Sapiens
ggtagcgtggccgagcggtctaaggcgctg

SEQ ID NO: 19266 - DNA, 32 bp, Homo Sapiens
ggtagcgtggccgagcggtctaaggcgctgga

SEQ ID NO: 19267 - DNA, 33 bp, Homo Sapiens
ggtagcgtggccgagcggtctaaggcgctggat

SEQ ID NO: 19268 - DNA, 34 bp, Homo Sapiens
ggtagcgtggccgagcggtctaaggcgctggatt

SEQ ID NO: 19269 - DNA, 35 bp, Homo Sapiens
ggtagcgtggccgagcggtctaaggcgctggattt

SEQ ID NO: 19270 - DNA, 37 bp, Homo Sapiens
ggtagcgtggccgagcggtctaaggcgctggatttag

SEQ ID NO: 19271 - DNA, 16 bp, Homo Sapiens
ggtagcgtggccgagt

SEQ ID NO: 19272 - DNA, 18 bp, Homo Sapiens
ggtagcgtggccgagtgg

SEQ ID NO: 19273 - DNA, 19 bp, Homo Sapiens
ggtagcgtggccgagtggt

SEQ ID NO: 19274 - DNA, 20 bp, Homo Sapiens
ggtagcgtggccgagtggtc

SEQ ID NO: 19275 - DNA, 21 bp, Homo Sapiens
ggtagcgtggccgagtggtct

SEQ ID NO: 19276 - DNA, 22 bp, Homo Sapiens
ggtagcgtggccgagtggtcta

SEQ ID NO: 19277 - DNA, 24 bp, Homo Sapiens
ggtagcgtggccgagtggtctaag

SEQ ID NO: 19278 - DNA, 25 bp, Homo Sapiens
ggtagcgtggccgagtggtctaagg

SEQ ID NO: 19279 - DNA, 26 bp, Homo Sapiens
ggtagcgtggccgagtggtctaaggc

SEQ ID NO: 19280 - DNA, 31 bp, Homo Sapiens
ggtagcgtggccgagtggtctaaggcgctgg

SEQ ID NO: 19281 - DNA, 33 bp, Homo Sapiens
ggtagcgtggccgagtggtctaaggcgctggat

SEQ ID NO: 19282 - DNA, 34 bp, Homo Sapiens
ggtagcgtggccgagtggtctaaggcgctggatt

SEQ ID NO: 19283 - DNA, 35 bp, Homo Sapiens
ggtagcgtggccgagtggtctaaggcgctggattt

SEQ ID NO: 19284 - DNA, 37 bp, Homo Sapiens
ggtagcgtggccgagtggtctaaggcgctggatttag

SEQ ID NO: 19285 - DNA, 23 bp, Homo Sapiens
ggtagctcagtcggtagagcatc

SEQ ID NO: 19286 - DNA, 27 bp, Homo Sapiens
ggtagctcagtcggtagagcatcagac

SEQ ID NO: 19287 - DNA, 19 bp, Homo Sapiens
ggtagtcgtggccgagtgg

SEQ ID NO: 19288 - DNA, 16 bp, Homo Sapiens
ggtagtgtggccgagc

SEQ ID NO: 19289 - DNA, 18 bp, Homo Sapiens
ggtagtgtggccgagcgg

SEQ ID NO: 19290 - DNA, 19 bp, Homo Sapiens
ggtagtgtggccgagcggt

SEQ ID NO: 19291 - DNA, 21 bp, Homo Sapiens
ggtagtgtggccgagcggtct

SEQ ID NO: 19292 - DNA, 22 bp, Homo Sapiens
ggtagtgtggccgagcggtcta

SEQ ID NO: 19293 - DNA, 24 bp, Homo Sapiens
ggtagtgtggccgagcggtctaag

SEQ ID NO: 19294 - DNA, 25 bp, Homo Sapiens
ggtagtgtggccgagcggtctaagg

SEQ ID NO: 19295 - DNA, 26 bp, Homo Sapiens
ggtagtgtggccgagcggtctaaggc

SEQ ID NO: 19296 - DNA, 34 bp, Homo Sapiens
ggtagtgtggccgagcggtctaaggcgctggatt

SEQ ID NO: 19297 - DNA, 35 bp, Homo Sapiens
ggtagtgtggccgagcggtctaaggcgctggattt

SEQ ID NO: 19298 - DNA, 31 bp, Homo Sapiens
ggtatagctcaggggtagagcatttgactgc

SEQ ID NO: 19299 - DNA, 32 bp, Homo Sapiens
ggtatagctcaggggtagagcatttgactgca

SEQ ID NO: 19300 - DNA, 33 bp, Homo Sapiens
ggtatagctcaggtggtagagcatttgactgca

SEQ ID NO: 19301 - DNA, 31 bp, Homo Sapiens
ggtatagctcagtgggtagagcatttgactg

SEQ ID NO: 19302 - DNA, 32 bp, Homo Sapiens
ggtatagctcagtgggtagagcatttgactgc

SEQ ID NO: 19303 - DNA, 19 bp, Homo Sapiens
ggtatagctcagtggtaga

SEQ ID NO: 19304 - DNA, 20 bp, Homo Sapiens
ggtatagctcagtggtagag

SEQ ID NO: 19305 - DNA, 26 bp, Homo Sapiens
ggtatagctcagtggtagagcatttg

SEQ ID NO: 19306 - DNA, 28 bp, Homo Sapiens
ggtatagctcagtggtagagcatttgac

SEQ ID NO: 19307 - DNA, 29 bp, Homo Sapiens
ggtatagctcagtggtagagcatttgact

SEQ ID NO: 19308 - DNA, 30 bp, Homo Sapiens
ggtatagctcagtggtagagcatttgactg

SEQ ID NO: 19309 - DNA, 31 bp, Homo Sapiens
ggtatagctcagtggtagagcatttgactgc

SEQ ID NO: 19310 - DNA, 32 bp, Homo Sapiens
ggtatagctcagtggtagagcatttgactgca

SEQ ID NO: 19311 - DNA, 30 bp, Homo Sapiens
ggtatagcttagcggtagagcatttgactg

SEQ ID NO: 19312 - DNA, 31 bp, Homo Sapiens
ggtatagcttagcggtagagcatttgactgc

SEQ ID NO: 19313 - DNA, 32 bp, Homo Sapiens
ggtatagcttagcggtagagcatttgactgca

SEQ ID NO: 19314 - DNA, 45 bp, Homo Sapiens
ggtatagtggtgagcatagctgccttccaagcagttgacccgggt

SEQ ID NO: 19315 - DNA, 22 bp, Homo Sapiens
ggtatagtggttagcatagctg

SEQ ID NO: 19316 - DNA, 24 bp, Homo Sapiens
ggtatagtggttagcatagctgcc

SEQ ID NO: 19317 - DNA, 27 bp, Homo Sapiens
ggtatagtggttagcatagctgccttc

SEQ ID NO: 19318 - DNA, 16 bp, Homo Sapiens
ggtatatagtttaaac

SEQ ID NO: 19319 - DNA, 35 bp, Homo Sapiens
ggtatatagtttaaacaaaacgaatgatttcgact

SEQ ID NO: 19320 - DNA, 16 bp, Homo Sapiens
ggtatcatgcaagatt

SEQ ID NO: 19321 - DNA, 17 bp, Homo Sapiens
ggtatcatgcaagattc

SEQ ID NO: 19322 - DNA, 34 bp, Homo Sapiens
ggtatcatgcaagattcccattcttgcgacccgg

SEQ ID NO: 19323 - DNA, 36 bp, Homo Sapiens
ggtatcatgcaagattcccattcttgcgacccgggt

SEQ ID NO: 19324 - DNA, 40 bp, Homo Sapiens
ggtatcatgcaagattcccattcttgcgacccgggttcga

SEQ ID NO: 19325 - DNA, 16 bp, Homo Sapiens
ggtatgattctcgctt

SEQ ID NO: 19326 - DNA, 17 bp, Homo Sapiens
ggtatgattctcgctta

SEQ ID NO: 19327 - DNA, 17 bp, Homo Sapiens
ggtatgattctcgcttc

SEQ ID NO: 19328 - DNA, 18 bp, Homo Sapiens
ggtatgattctcgcttcg

SEQ ID NO: 19329 - DNA, 19 bp, Homo Sapiens
ggtatgattctcgcttcgg

SEQ ID NO: 19330 - DNA, 17 bp, Homo Sapiens
ggtatgattctcgcttt

SEQ ID NO: 19331 - DNA, 18 bp, Homo Sapiens
ggtatgattctcgctttg

SEQ ID NO: 19332 - DNA, 19 bp, Homo Sapiens
ggtatgattctcgctttgg

SEQ ID NO: 19333 - DNA, 16 bp, Homo Sapiens
ggtatgattctcggtt

SEQ ID NO: 19334 - DNA, 17 bp, Homo Sapiens
ggtatgattctcggttt

SEQ ID NO: 19335 - DNA, 18 bp, Homo Sapiens
ggtatgattctcggtttg

SEQ ID NO: 19336 - DNA, 19 bp, Homo Sapiens
ggtatgattctcggtttgg

SEQ ID NO: 19337 - DNA, 28 bp, Homo Sapiens
ggtcagcactctggactctgaatccagc

SEQ ID NO: 19338 - DNA, 24 bp, Homo Sapiens
ggtcagctaaataagctatcgggc

SEQ ID NO: 19339 - DNA, 25 bp, Homo Sapiens
ggtcagctaaataagctatcgggcc

SEQ ID NO: 19340 - DNA, 26 bp, Homo Sapiens
ggtcagctaaataagctatcgggccc

SEQ ID NO: 19341 - DNA, 27 bp, Homo Sapiens
ggtcagctaaataagctatcgggccca

SEQ ID NO: 19342 - DNA, 28 bp, Homo Sapiens
ggtcagctaaataagctatcgggcccat

SEQ ID NO: 19343 - DNA, 29 bp, Homo Sapiens
ggtcagctaaataagctatcgggcccata

SEQ ID NO: 19344 - DNA, 35 bp, Homo Sapiens
ggtcagctaaataagctatcgggcccataccccga

SEQ ID NO: 19345 - DNA, 46 bp, Homo Sapiens
ggtcagctaaataagctatcgggcccataccccgaaaatgttggtt

SEQ ID NO: 19346 - DNA, 47 bp, Homo Sapiens
ggtcagctaaataagctatcgggcccataccccgaaaatgttggtta

SEQ ID NO: 19347 - DNA, 28 bp, Homo Sapiens
ggtccagggttcaagtccctgttcgggc

SEQ ID NO: 19348 - DNA, 29 bp, Homo Sapiens
ggtccagggttcaagtccctgttcgggcg

SEQ ID NO: 19349 - DNA, 30 bp, Homo Sapiens
ggtccagggttcaagtccctgttcgggcgc

SEQ ID NO: 19350 - DNA, 31 bp, Homo Sapiens
ggtccagggttcaagtccctgttcgggcgcc

SEQ ID NO: 19351 - DNA, 32 bp, Homo Sapiens
ggtccagggttcaagtccctgttcgggcgcca

SEQ ID NO: 19352 - DNA, 16 bp, Homo Sapiens
ggtcccatggtgtaat

SEQ ID NO: 19353 - DNA, 17 bp, Homo Sapiens
ggtcccatggtgtaatg

SEQ ID NO: 19354 - DNA, 18 bp, Homo Sapiens
ggtcccatggtgtaatgg

SEQ ID NO: 19355 - DNA, 19 bp, Homo Sapiens
ggtcccatggtgtaatggt

SEQ ID NO: 19356 - DNA, 22 bp, Homo Sapiens
ggtcccatggtgtaatggttag

SEQ ID NO: 19357 - DNA, 23 bp, Homo Sapiens
ggtcccatggtgtaatggttagc

SEQ ID NO: 19358 - DNA, 27 bp, Homo Sapiens
ggtcccatggtgtaatggttagcactc

SEQ ID NO: 19359 - DNA, 28 bp, Homo Sapiens
ggtcccatggtgtaatggttagcactct

SEQ ID NO: 19360 - DNA, 29 bp, Homo Sapiens
ggtcccatggtgtaatggttagcactctg

SEQ ID NO: 19361 - DNA, 30 bp, Homo Sapiens
ggtcccatggtgtaatggttagcactctgg

SEQ ID NO: 19362 - DNA, 31 bp, Homo Sapiens
ggtcccatggtgtaatggttagcactctgga

SEQ ID NO: 19363 - DNA, 32 bp, Homo Sapiens
ggtcccatggtgtaatggttagcactctggac

SEQ ID NO: 19364 - DNA, 33 bp, Homo Sapiens
ggtcccatggtgtaatggttagcactctggact

SEQ ID NO: 19365 - DNA, 34 bp, Homo Sapiens
ggtcccatggtgtaatggttagcactctggactt

SEQ ID NO: 19366 - DNA, 36 bp, Homo Sapiens
ggtcccatggtgtaatggttagcactctggactttg

SEQ ID NO: 19367 - DNA, 40 bp, Homo Sapiens
ggtcccatggtgtaatggttagcactctggactttgaatc

SEQ ID NO: 19368 - DNA, 41 bp, Homo Sapiens
ggtcccatggtgtaatggttagcactctggactttgaatcc

SEQ ID NO: 19369 - DNA, 33 bp, Homo Sapiens
ggtcccatggtgtaatggttagcactctgggct

SEQ ID NO: 19370 - DNA, 32 bp, Homo Sapiens
ggtcccgggttcgatccccagcatctccacca

SEQ ID NO: 19371 - DNA, 31 bp, Homo Sapiens
ggtcccgggttcgatccccggcatctccacc

SEQ ID NO: 19372 - DNA, 19 bp, Homo Sapiens
ggtccctggttcaaatccg

SEQ ID NO: 19373 - DNA, 29 bp, Homo Sapiens
ggtccctggttcgatcccgggtttcggca

SEQ ID NO: 19374 - DNA, 16 bp, Homo Sapiens
ggtcctgagttcgaac

SEQ ID NO: 19375 - DNA, 17 bp, Homo Sapiens
ggtcctgagttcgaacc

SEQ ID NO: 19376 - DNA, 18 bp, Homo Sapiens
ggtcctgagttcgaacct

SEQ ID NO: 19377 - DNA, 28 bp, Homo Sapiens
ggtcctgagttcgaacctcagagggggc

SEQ ID NO: 19378 - DNA, 29 bp, Homo Sapiens
ggtcctgagttcgaacctcagagggggca

SEQ ID NO: 19379 - DNA, 31 bp, Homo Sapiens
ggtcctgagttcgaacctcagagggggcacc

SEQ ID NO: 19380 - DNA, 19 bp, Homo Sapiens
ggtcctgggttcgagcccc

SEQ ID NO: 19381 - DNA, 31 bp, Homo Sapiens
ggtcctgggttcgagccccagtggaaccacc

SEQ ID NO: 19382 - DNA, 19 bp, Homo Sapiens
ggtccttgtagtataaact

SEQ ID NO: 19383 - DNA, 17 bp, Homo Sapiens
ggtcgatggatcgaaac

SEQ ID NO: 19384 - DNA, 18 bp, Homo Sapiens
ggtcgatggatcgaaacc

SEQ ID NO: 19385 - DNA, 19 bp, Homo Sapiens
ggtcgatggatcgaaacca

SEQ ID NO: 19386 - DNA, 20 bp, Homo Sapiens
ggtcgatggatcgaaaccat

SEQ ID NO: 19387 - DNA, 28 bp, Homo Sapiens
ggtcgatggatcgaaaccatcctctgct

SEQ ID NO: 19388 - DNA, 31 bp, Homo Sapiens
ggtcgatggatcgaaaccatcctctgctacc

SEQ ID NO: 19389 - DNA, 23 bp, Homo Sapiens
ggtcgattccccgacggggagcc

SEQ ID NO: 19390 - DNA, 24 bp, Homo Sapiens
ggtcgattccccgacggggagcca

SEQ ID NO: 19391 - DNA, 17 bp, Homo Sapiens
ggtcgcagtctcccctg

SEQ ID NO: 19392 - DNA, 27 bp, Homo Sapiens
ggtcgcgagttcaaatctcgctggggc

SEQ ID NO: 19393 - DNA, 28 bp, Homo Sapiens
ggtcgcgagttcaaatctcgctggggcc

SEQ ID NO: 19394 - DNA, 29 bp, Homo Sapiens
ggtcgcgagttcaaatctcgctggggcct

SEQ ID NO: 19395 - DNA, 30 bp, Homo Sapiens
ggtcgcgagttcaaatctcgctggggcctc

SEQ ID NO: 19396 - DNA, 31 bp, Homo Sapiens
ggtcgcgagttcaaatctcgctggggcctcc

SEQ ID NO: 19397 - DNA, 31 bp, Homo Sapiens
ggtcgcgagttcaattctcgctggggcctcc

SEQ ID NO: 19398 - DNA, 30 bp, Homo Sapiens
ggtcgcgagttcgatcctcgctggggcctc

SEQ ID NO: 19399 - DNA, 28 bp, Homo Sapiens
ggtcgcgggttcgaaccccgtacgggcc

SEQ ID NO: 19400 - DNA, 27 bp, Homo Sapiens
ggtcgcgggttcgatccccgtacgggc

SEQ ID NO: 19401 - DNA, 28 bp, Homo Sapiens
ggtcgcgggttcgatccccgtacgggcc

SEQ ID NO: 19402 - DNA, 29 bp, Homo Sapiens
ggtcgcgggttcgatccccgtacgggcca

SEQ ID NO: 19403 - DNA, 30 bp, Homo Sapiens
ggtcgcgggttcgatccccgtacgggccac

SEQ ID NO: 19404 - DNA, 31 bp, Homo Sapiens
ggtcgcgggttcgatccccgtacgggccacc

SEQ ID NO: 19405 - DNA, 31 bp, Homo Sapiens
ggtcgctggttcaattccggctcgaaggacc

SEQ ID NO: 19406 - DNA, 30 bp, Homo Sapiens
ggtcgctggttcgaatccggctcgaaggac

SEQ ID NO: 19407 - DNA, 31 bp, Homo Sapiens
ggtcgctggttcgaatccggctcgaaggacc

SEQ ID NO: 19408 - DNA, 32 bp, Homo Sapiens
ggtcgctggttcgaatccggctcgaaggacca

SEQ ID NO: 19409 - DNA, 31 bp, Homo Sapiens
ggtcgctggttcgaatccggctcggaggacc

SEQ ID NO: 19410 - DNA, 31 bp, Homo Sapiens
ggtcgctggttcgattccagctcgaaggacc

SEQ ID NO: 19411 - DNA, 30 bp, Homo Sapiens
ggtcgctggttcgattccggctcgaaggac

SEQ ID NO: 19412 - DNA, 31 bp, Homo Sapiens
ggtcgctggttcgattccggctcgaaggacc

SEQ ID NO: 19413 - DNA, 32 bp, Homo Sapiens
ggtcgctggttcgattccggctcgaaggacca

SEQ ID NO: 19414 - DNA, 16 bp, Homo Sapiens
ggtcgtgagttcgagc

SEQ ID NO: 19415 - DNA, 20 bp, Homo Sapiens
ggtcgtgagttcgagcctca

SEQ ID NO: 19416 - DNA, 28 bp, Homo Sapiens
ggtcgtgagttcgatcctcacacggggc

SEQ ID NO: 19417 - DNA, 29 bp, Homo Sapiens
ggtcgtgagttcgatcctcacacggggca

SEQ ID NO: 19418 - DNA, 17 bp, Homo Sapiens
ggtcgtgggttcgagcc

SEQ ID NO: 19419 - DNA, 20 bp, Homo Sapiens
ggtcgtgggttcgagcccca

SEQ ID NO: 19420 - DNA, 27 bp, Homo Sapiens
ggtcgtgggttcgagccccacgttggg

SEQ ID NO: 19421 - DNA, 28 bp, Homo Sapiens
ggtcgtgggttcgagccccacgttgggc

SEQ ID NO: 19422 - DNA, 29 bp, Homo Sapiens
ggtcgtgggttcgagccccacgttgggcg

SEQ ID NO: 19423 - DNA, 30 bp, Homo Sapiens
ggtcgtgggttcgagccccacgttgggcgc

SEQ ID NO: 19424 - DNA, 31 bp, Homo Sapiens
ggtcgtgggttcgagccccacgttgggcgcc

SEQ ID NO: 19425 - DNA, 32 bp, Homo Sapiens
ggtcgtgggttcgagccccacgttgggcgcca

SEQ ID NO: 19426 - DNA, 16 bp, Homo Sapiens
ggtcgtggttgtagtc

SEQ ID NO: 19427 - DNA, 17 bp, Homo Sapiens
ggtcgtggttgtagtcc

SEQ ID NO: 19428 - DNA, 18 bp, Homo Sapiens
ggtcgtggttgtagtccg

SEQ ID NO: 19429 - DNA, 20 bp, Homo Sapiens
ggtcgtggttgtagtccgtg

SEQ ID NO: 19430 - DNA, 21 bp, Homo Sapiens
ggtcgtggttgtagtccgtgc

SEQ ID NO: 19431 - DNA, 22 bp, Homo Sapiens
ggtcgtggttgtagtccgtgcg

SEQ ID NO: 19432 - DNA, 23 bp, Homo Sapiens
ggtcgtggttgtagtccgtgcga

SEQ ID NO: 19433 - DNA, 24 bp, Homo Sapiens
ggtcgtggttgtagtccgtgcgag

SEQ ID NO: 19434 - DNA, 25 bp, Homo Sapiens
ggtcgtggttgtagtccgtgcgaga

SEQ ID NO: 19435 - DNA, 26 bp, Homo Sapiens
ggtcgtggttgtagtccgtgcgagaa

SEQ ID NO: 19436 - DNA, 27 bp, Homo Sapiens
ggtcgtggttgtagtccgtgcgagaat

SEQ ID NO: 19437 - DNA, 28 bp, Homo Sapiens
ggtcgtggttgtagtccgtgcgagaata

SEQ ID NO: 19438 - DNA, 29 bp, Homo Sapiens
ggtcgtggttgtagtccgtgcgagaatac

SEQ ID NO: 19439 - DNA, 30 bp, Homo Sapiens
ggtcgtggttgtagtccgtgcgagaatacc

SEQ ID NO: 19440 - DNA, 31 bp, Homo Sapiens
ggtcgtggttgtagtccgtgcgagaatacca

SEQ ID NO: 19441 - DNA, 16 bp, Homo Sapiens
ggtctaaggcgctgcg

SEQ ID NO: 19442 - DNA, 19 bp, Homo Sapiens
ggtctaaggcgctgcgttc

SEQ ID NO: 19443 - DNA, 16 bp, Homo Sapiens
ggtctaaggcgctgga

SEQ ID NO: 19444 - DNA, 18 bp, Homo Sapiens
ggtctagcggttaggatt

SEQ ID NO: 19445 - DNA, 20 bp, Homo Sapiens
ggtctagcggttaggattcc

SEQ ID NO: 19446 - DNA, 22 bp, Homo Sapiens
ggtctagcggttaggattcctg

SEQ ID NO: 19447 - DNA, 25 bp, Homo Sapiens
ggtctagcggttaggattcctggtt

SEQ ID NO: 19448 - DNA, 28 bp, Homo Sapiens
ggtctagcggttaggattcctggttttc

SEQ ID NO: 19449 - DNA, 20 bp, Homo Sapiens
ggtctaggggtatgattctc

SEQ ID NO: 19450 - DNA, 21 bp, Homo Sapiens
ggtctaggggtatgattctcg

SEQ ID NO: 19451 - DNA, 22 bp, Homo Sapiens
ggtctaggggtatgattctcgc

SEQ ID NO: 19452 - DNA, 23 bp, Homo Sapiens
ggtctaggggtatgattctcgct

SEQ ID NO: 19453 - DNA, 24 bp, Homo Sapiens
ggtctaggggtatgattctcgctt

SEQ ID NO: 19454 - DNA, 27 bp, Homo Sapiens
ggtctaggggtatgattctcgctttgg

SEQ ID NO: 19455 - DNA, 23 bp, Homo Sapiens
ggtctaggggtatgattctcggt

SEQ ID NO: 19456 - DNA, 24 bp, Homo Sapiens
ggtctaggggtatgattctcggtt

SEQ ID NO: 19457 - DNA, 27 bp, Homo Sapiens
ggtctaggggtatgattctcggtttgg

SEQ ID NO: 19458 - DNA, 17 bp, Homo Sapiens
ggtctagtggctaggat

SEQ ID NO: 19459 - DNA, 20 bp, Homo Sapiens
ggtctagtggctaggattcg

SEQ ID NO: 19460 - DNA, 22 bp, Homo Sapiens
ggtctagtggctaggattcggc

SEQ ID NO: 19461 - DNA, 28 bp, Homo Sapiens
ggtctagtggctaggattcggcgctttc

SEQ ID NO: 19462 - DNA, 17 bp, Homo Sapiens
ggtctagtggttaggat

SEQ ID NO: 19463 - DNA, 18 bp, Homo Sapiens
ggtctagtggttaggatt

SEQ ID NO: 19464 - DNA, 26 bp, Homo Sapiens
ggtctagtggttaggattcagcgctc

SEQ ID NO: 19465 - DNA, 20 bp, Homo Sapiens
ggtctagtggttaggattcg

SEQ ID NO: 19466 - DNA, 21 bp, Homo Sapiens
ggtctagtggttaggattcgg

SEQ ID NO: 19467 - DNA, 22 bp, Homo Sapiens
ggtctagtggttaggattcggc

SEQ ID NO: 19468 - DNA, 23 bp, Homo Sapiens
ggtctagtggttaggattcggcg

SEQ ID NO: 19469 - DNA, 24 bp, Homo Sapiens
ggtctagtggttaggattcggcgc

SEQ ID NO: 19470 - DNA, 25 bp, Homo Sapiens
ggtctagtggttaggattcggcgct

SEQ ID NO: 19471 - DNA, 26 bp, Homo Sapiens
ggtctagtggttaggattcggcgctc

SEQ ID NO: 19472 - DNA, 27 bp, Homo Sapiens
ggtctagtggttaggattcggcgctct

SEQ ID NO: 19473 - DNA, 28 bp, Homo Sapiens
ggtctagtggttaggattcggcgctctc

SEQ ID NO: 19474 - DNA, 29 bp, Homo Sapiens
ggtctagtggttaggattcggcgctctca

SEQ ID NO: 19475 - DNA, 30 bp, Homo Sapiens
ggtctagtggttaggattcggcgctctcac

SEQ ID NO: 19476 - DNA, 31 bp, Homo Sapiens
ggtctagtggttaggattcggcgctctcacc

SEQ ID NO: 19477 - DNA, 34 bp, Homo Sapiens
ggtctagtggttaggattcggcgctctcaccgcc

SEQ ID NO: 19478 - DNA, 41 bp, Homo Sapiens
ggtctagtggttaggattcggcgctctcaccgccgcggccc

SEQ ID NO: 19479 - DNA, 43 bp, Homo Sapiens
ggtctagtggttaggattcggcgctctcaccgccgcggcccgg

SEQ ID NO: 19480 - DNA, 46 bp, Homo Sapiens
ggtctagtggttaggattcggcgctctcaccgccgcggcccgggtt

SEQ ID NO: 19481 - DNA, 47 bp, Homo Sapiens
ggtctagtggttaggattcggcgctctcaccgccgcggcccgggttc

SEQ ID NO: 19482 - DNA, 24 bp, Homo Sapiens
ggtctccaatggaggcgtgggttc

SEQ ID NO: 19483 - DNA, 21 bp, Homo Sapiens
ggtctccggatggaggcgtgg

SEQ ID NO: 19484 - DNA, 16 bp, Homo Sapiens
ggtgagcactctggac

SEQ ID NO: 19485 - DNA, 17 bp, Homo Sapiens
ggtgagcactctggact

SEQ ID NO: 19486 - DNA, 18 bp, Homo Sapiens
ggtgagcactctggactc

SEQ ID NO: 19487 - DNA, 22 bp, Homo Sapiens
ggtgagcactctggactctgaa

SEQ ID NO: 19488 - DNA, 23 bp, Homo Sapiens
ggtgagcactctggactctgaat

SEQ ID NO: 19489 - DNA, 24 bp, Homo Sapiens
ggtgagcactctggactctgaatc

SEQ ID NO: 19490 - DNA, 25 bp, Homo Sapiens
ggtgagcactctggactctgaatcc

SEQ ID NO: 19491 - DNA, 26 bp, Homo Sapiens
ggtgagcactctggactctgaatcca

SEQ ID NO: 19492 - DNA, 27 bp, Homo Sapiens
ggtgagcactctggactctgaatccag

SEQ ID NO: 19493 - DNA, 28 bp, Homo Sapiens
ggtgagcactctggactctgaatccagc

SEQ ID NO: 19494 - DNA, 29 bp, Homo Sapiens
ggtgagcactctggactctgaatccagcg

SEQ ID NO: 19495 - DNA, 33 bp, Homo Sapiens
ggtgagcactctggactctgaatccagcgatcc

SEQ ID NO: 19496 - DNA, 34 bp, Homo Sapiens
ggtgagcactctggactctgaatccagcgatccg

SEQ ID NO: 19497 - DNA, 36 bp, Homo Sapiens
ggtgagcactctggactctgaatccagcgatccgag

SEQ ID NO: 19498 - DNA, 37 bp, Homo Sapiens
ggtgagcactctggactctgaatccagcgatccgagt

SEQ ID NO: 19499 - DNA, 39 bp, Homo Sapiens
ggtgagcactctggactctgaatccagcgatccgagttc

SEQ ID NO: 19500 - DNA, 40 bp, Homo Sapiens
ggtgagcactctggactctgaatccagcgatccgagttcg

SEQ ID NO: 19501 - DNA, 42 bp, Homo Sapiens
ggtgagcactctggactctgaatccagcgatccgagttcgag

SEQ ID NO: 19502 - DNA, 18 bp, Homo Sapiens
ggtgagcatagctgcctt

SEQ ID NO: 19503 - DNA, 16 bp, Homo Sapiens
ggtgagtatccccgcc

SEQ ID NO: 19504 - DNA, 18 bp, Homo Sapiens
ggtgagtatccccgcctg

SEQ ID NO: 19505 - DNA, 19 bp, Homo Sapiens
ggtgagtatccccgcctgt

SEQ ID NO: 19506 - DNA, 20 bp, Homo Sapiens
ggtgagtatccccgcctgtc

SEQ ID NO: 19507 - DNA, 23 bp, Homo Sapiens
ggtgagtatccccgcctgtcacg

SEQ ID NO: 19508 - DNA, 25 bp, Homo Sapiens
ggtgagtatccccgcctgtcacgcg

SEQ ID NO: 19509 - DNA, 16 bp, Homo Sapiens
ggtgattttcatattg

SEQ ID NO: 19510 - DNA, 17 bp, Homo Sapiens
ggtgattttcatattga

SEQ ID NO: 19511 - DNA, 21 bp, Homo Sapiens
ggtgattttcatattgaattg

SEQ ID NO: 19512 - DNA, 22 bp, Homo Sapiens
ggtgattttcatattgaattgc

SEQ ID NO: 19513 - DNA, 23 bp, Homo Sapiens
ggtgattttcatattgaattgca

SEQ ID NO: 19514 - DNA, 35 bp, Homo Sapiens
ggtgattttcatattgaattgcaaattcgaagaag

SEQ ID NO: 19515 - DNA, 22 bp, Homo Sapiens
ggtgcaactccaaataaaagta

SEQ ID NO: 19516 - DNA, 23 bp, Homo Sapiens
ggtgcaactccaaataaaagtac

SEQ ID NO: 19517 - DNA, 24 bp, Homo Sapiens
ggtgcaactccaaataaaagtacc

SEQ ID NO: 19518 - DNA, 25 bp, Homo Sapiens
ggtgcaactccaaataaaagtacca

SEQ ID NO: 19519 - DNA, 23 bp, Homo Sapiens
ggtgcagtggtagaattctcgcc

SEQ ID NO: 19520 - DNA, 24 bp, Homo Sapiens
ggtgcagtggtagaattctcgcct

SEQ ID NO: 19521 - DNA, 16 bp, Homo Sapiens
ggtgcgagaggtcccg

SEQ ID NO: 19522 - DNA, 22 bp, Homo Sapiens
ggtgcgagaggtcccgggttca

SEQ ID NO: 19523 - DNA, 23 bp, Homo Sapiens
ggtgcgagaggtcccgggttcaa

SEQ ID NO: 19524 - DNA, 24 bp, Homo Sapiens
ggtgcgagaggtcccgggttcaaa

SEQ ID NO: 19525 - DNA, 25 bp, Homo Sapiens
ggtgcgagaggtcccgggttcaaat

SEQ ID NO: 19526 - DNA, 36 bp, Homo Sapiens
ggtgcgagaggtcccgggttcaaatcccggacgagc

SEQ ID NO: 19527 - DNA, 37 bp, Homo Sapiens
ggtgcgagaggtcccgggttcaaatcccggacgagcc

SEQ ID NO: 19528 - DNA, 38 bp, Homo Sapiens
ggtgcgagaggtcccgggttcaaatcccggacgagccc

SEQ ID NO: 19529 - DNA, 39 bp, Homo Sapiens
ggtgcgagaggtcccgggttcaaatcccggacgagcccc

SEQ ID NO: 19530 - DNA, 40 bp, Homo Sapiens
ggtgcgagaggtcccgggttcaaatcccggacgagccccc

SEQ ID NO: 19531 - DNA, 41 bp, Homo Sapiens
ggtgcgagaggtcccgggttcaaatcccggacgagccccca

SEQ ID NO: 19532 - DNA, 28 bp, Homo Sapiens
ggtgctaataacgccaaggtcgcgggtt

SEQ ID NO: 19533 - DNA, 18 bp, Homo Sapiens
ggtgctaatggtggagtt

SEQ ID NO: 19534 - DNA, 19 bp, Homo Sapiens
ggtgctaatggtggagtta

SEQ ID NO: 19535 - DNA, 20 bp, Homo Sapiens
ggtgctaatggtggagttaa

SEQ ID NO: 19536 - DNA, 21 bp, Homo Sapiens
ggtgctaatggtggagttaaa

SEQ ID NO: 19537 - DNA, 22 bp, Homo Sapiens
ggtgctaatggtggagttaaag

SEQ ID NO: 19538 - DNA, 23 bp, Homo Sapiens
ggtgctaatggtggagttaaaga

SEQ ID NO: 19539 - DNA, 24 bp, Homo Sapiens
ggtgctaatggtggagttaaagac

SEQ ID NO: 19540 - DNA, 25 bp, Homo Sapiens
ggtgctaatggtggagttaaagact

SEQ ID NO: 19541 - DNA, 26 bp, Homo Sapiens
ggtgctaatggtggagttaaagactt

SEQ ID NO: 19542 - DNA, 27 bp, Homo Sapiens
ggtgctaatggtggagttaaagacttt

SEQ ID NO: 19543 - DNA, 28 bp, Homo Sapiens
ggtgctaatggtggagttaaagactttt

SEQ ID NO: 19544 - DNA, 29 bp, Homo Sapiens
ggtgctaatggtggagttaaagacttttt

SEQ ID NO: 19545 - DNA, 31 bp, Homo Sapiens
ggtgctaatggtggagttaaagactttttct

SEQ ID NO: 19546 - DNA, 32 bp, Homo Sapiens
ggtgctaatggtggagttaaagactttttctc

SEQ ID NO: 19547 - DNA, 35 bp, Homo Sapiens
ggtgctaatggtggagttaaagactttttctctga

SEQ ID NO: 19548 - DNA, 36 bp, Homo Sapiens
ggtgctaatggtggagttaaagactttttctctgac

SEQ ID NO: 19549 - DNA, 37 bp, Homo Sapiens
ggtgctaatggtggagttaaagactttttctctgacc

SEQ ID NO: 19550 - DNA, 38 bp, Homo Sapiens
ggtgctaatggtggagttaaagactttttctctgacca

SEQ ID NO: 19551 - DNA, 18 bp, Homo Sapiens
ggtgcttagctgttaact

SEQ ID NO: 19552 - DNA, 32 bp, Homo Sapiens
ggtgcttagctgttaactaagtgtttgtgggt

SEQ ID NO: 19553 - DNA, 33 bp, Homo Sapiens
ggtgcttagctgttaactaagtgtttgtgggtt

SEQ ID NO: 19554 - DNA, 34 bp, Homo Sapiens
ggtgcttagctgttaactaagtgtttgtgggttt

SEQ ID NO: 19555 - DNA, 35 bp, Homo Sapiens
ggtgcttagctgttaactaagtgtttgtgggttta

SEQ ID NO: 19556 - DNA, 37 bp, Homo Sapiens
ggtgcttagctgttaactaagtgtttgtgggtttaag

SEQ ID NO: 19557 - DNA, 17 bp, Homo Sapiens
ggtggagcatgggactc

SEQ ID NO: 19558 - DNA, 16 bp, Homo Sapiens
ggtggagttaaagact

SEQ ID NO: 19559 - DNA, 17 bp, Homo Sapiens
ggtggagttaaagactt

SEQ ID NO: 19560 - DNA, 18 bp, Homo Sapiens
ggtggagttaaagacttt

SEQ ID NO: 19561 - DNA, 19 bp, Homo Sapiens
ggtggagttaaagactttt

SEQ ID NO: 19562 - DNA, 20 bp, Homo Sapiens
ggtggagttaaagacttttt

SEQ ID NO: 19563 - DNA, 22 bp, Homo Sapiens
ggtggagttaaagactttttct

SEQ ID NO: 19564 - DNA, 23 bp, Homo Sapiens
ggtggagttaaagactttttctc

SEQ ID NO: 19565 - DNA, 24 bp, Homo Sapiens
ggtggagttaaagactttttctct

SEQ ID NO: 19566 - DNA, 25 bp, Homo Sapiens
ggtggagttaaagactttttctctg

SEQ ID NO: 19567 - DNA, 26 bp, Homo Sapiens
ggtggagttaaagactttttctctga

SEQ ID NO: 19568 - DNA, 27 bp, Homo Sapiens
ggtggagttaaagactttttctctgac

SEQ ID NO: 19569 - DNA, 28 bp, Homo Sapiens
ggtggagttaaagactttttctctgacc

SEQ ID NO: 19570 - DNA, 29 bp, Homo Sapiens
ggtggagttaaagactttttctctgacca

SEQ ID NO: 19571 - DNA, 16 bp, Homo Sapiens
ggtggcacggagaatt

SEQ ID NO: 19572 - DNA, 17 bp, Homo Sapiens
ggtggcacggagaattt

SEQ ID NO: 19573 - DNA, 18 bp, Homo Sapiens
ggtggcacggagaatttt

SEQ ID NO: 19574 - DNA, 19 bp, Homo Sapiens
ggtggcacggagaattttg

SEQ ID NO: 19575 - DNA, 35 bp, Homo Sapiens
ggtggcacggagaattttggattctcagggatggg

SEQ ID NO: 19576 - DNA, 33 bp, Homo Sapiens
ggtggcccgggttcgactcccggtatgggaacc

SEQ ID NO: 19577 - DNA, 18 bp, Homo Sapiens
ggtggccgagtggttaag

SEQ ID NO: 19578 - DNA, 46 bp, Homo Sapiens
ggtggtatagtggtaagcatagctgccttccaagcagttgacccgg

SEQ ID NO: 19579 - DNA, 28 bp, Homo Sapiens
ggtggtatagtggttagcatagctgcct

SEQ ID NO: 19580 - DNA, 23 bp, Homo Sapiens
ggtggtctagtggctaggattcg

SEQ ID NO: 19581 - DNA, 25 bp, Homo Sapiens
ggtggtctagtggctaggattcggc

SEQ ID NO: 19582 - DNA, 27 bp, Homo Sapiens
ggtggtctagtggctaggattcggcgc

SEQ ID NO: 19583 - DNA, 28 bp, Homo Sapiens
ggtggtctagtggctaggattcggcgct

SEQ ID NO: 19584 - DNA, 29 bp, Homo Sapiens
ggtggtctagtggctaggattcggcgctt

SEQ ID NO: 19585 - DNA, 31 bp, Homo Sapiens
ggtggtctagtggctaggattcggcgctttc

SEQ ID NO: 19586 - DNA, 34 bp, Homo Sapiens
ggtggtctagtggctaggattcggcgctttcacc

SEQ ID NO: 19587 - DNA, 17 bp, Homo Sapiens
ggtggtctagtggttag

SEQ ID NO: 19588 - DNA, 18 bp, Homo Sapiens
ggtggtctagtggttagg

SEQ ID NO: 19589 - DNA, 20 bp, Homo Sapiens
ggtggtctagtggttaggat

SEQ ID NO: 19590 - DNA, 21 bp, Homo Sapiens
ggtggtctagtggttaggatt

SEQ ID NO: 19591 - DNA, 22 bp, Homo Sapiens
ggtggtctagtggttaggattc

SEQ ID NO: 19592 - DNA, 23 bp, Homo Sapiens
ggtggtctagtggttaggattcg

SEQ ID NO: 19593 - DNA, 24 bp, Homo Sapiens
ggtggtctagtggttaggattcgg

SEQ ID NO: 19594 - DNA, 25 bp, Homo Sapiens
ggtggtctagtggttaggattcggc

SEQ ID NO: 19595 - DNA, 26 bp, Homo Sapiens
ggtggtctagtggttaggattcggcg

SEQ ID NO: 19596 - DNA, 27 bp, Homo Sapiens
ggtggtctagtggttaggattcggcgc

SEQ ID NO: 19597 - DNA, 28 bp, Homo Sapiens
ggtggtctagtggttaggattcggcgct

SEQ ID NO: 19598 - DNA, 29 bp, Homo Sapiens
ggtggtctagtggttaggattcggcgctc

SEQ ID NO: 19599 - DNA, 30 bp, Homo Sapiens
ggtggtctagtggttaggattcggcgctct

SEQ ID NO: 19600 - DNA, 31 bp, Homo Sapiens
ggtggtctagtggttaggattcggcgctctc

SEQ ID NO: 19601 - DNA, 32 bp, Homo Sapiens
ggtggtctagtggttaggattcggcgctctca

SEQ ID NO: 19602 - DNA, 34 bp, Homo Sapiens
ggtggtctagtggttaggattcggcgctctcacc

SEQ ID NO: 19603 - DNA, 44 bp, Homo Sapiens
ggtggtctagtggttaggattcggcgctctcaccgccgcggccc

SEQ ID NO: 19604 - DNA, 16 bp, Homo Sapiens
ggtggttcagtggtag

SEQ ID NO: 19605 - DNA, 18 bp, Homo Sapiens
ggtggttcagtggtagaa

SEQ ID NO: 19606 - DNA, 21 bp, Homo Sapiens
ggtggttcagtggtagaattc

SEQ ID NO: 19607 - DNA, 22 bp, Homo Sapiens
ggtggttcagtggtagaattct

SEQ ID NO: 19608 - DNA, 23 bp, Homo Sapiens
ggtggttcagtggtagaattctc

SEQ ID NO: 19609 - DNA, 24 bp, Homo Sapiens
ggtggttcagtggtagaattctcg

SEQ ID NO: 19610 - DNA, 25 bp, Homo Sapiens
ggtggttcagtggtagaattctcgc

SEQ ID NO: 19611 - DNA, 26 bp, Homo Sapiens
ggtggttcagtggtagaattctcgcc

SEQ ID NO: 19612 - DNA, 27 bp, Homo Sapiens
ggtggttcagtggtagaattctcgcct

SEQ ID NO: 19613 - DNA, 28 bp, Homo Sapiens
ggtggttcagtggtagaattctcgcctc

SEQ ID NO: 19614 - DNA, 30 bp, Homo Sapiens
ggtggttcagtggtagaattctcgcctccc

SEQ ID NO: 19615 - DNA, 31 bp, Homo Sapiens
ggtggttcagtggtagaattctcgcctccca

SEQ ID NO: 19616 - DNA, 46 bp, Homo Sapiens
ggtggttcagtggtagaattctcgcctcccacgcgggagacccggg

SEQ ID NO: 19617 - DNA, 28 bp, Homo Sapiens
ggtggttcagtggtagaattctcgcctg

SEQ ID NO: 19618 - DNA, 29 bp, Homo Sapiens
ggtggttcagtggtagaattctcgcctgc

SEQ ID NO: 19619 - DNA, 30 bp, Homo Sapiens
ggtggttcagtggtagaattctcgcctgcc

SEQ ID NO: 19620 - DNA, 31 bp, Homo Sapiens
ggtggttcagtggtagaattctcgcctgcca

SEQ ID NO: 19621 - DNA, 32 bp, Homo Sapiens
ggtggttcagtggtagaattctcgcctgccac

SEQ ID NO: 19622 - DNA, 33 bp, Homo Sapiens
ggtggttcagtggtagaattctcgcctgccacg

SEQ ID NO: 19623 - DNA, 34 bp, Homo Sapiens
ggtggttcagtggtagaattctcgcctgccacgc

SEQ ID NO: 19624 - DNA, 37 bp, Homo Sapiens
ggtggttcagtggtagaattctcgcctgccacgcggg

SEQ ID NO: 19625 - DNA, 43 bp, Homo Sapiens
ggtggttcagtggtagaattctcgcctgccacgcgggaggccc

SEQ ID NO: 19626 - DNA, 45 bp, Homo Sapiens
ggtggttcagtggtagaattctcgcctgccacgcgggaggcccgg

SEQ ID NO: 19627 - DNA, 47 bp, Homo Sapiens
ggtggttcagtggtagaattctcgcctgccacgcgggaggcccgggt

SEQ ID NO: 19628 - DNA, 25 bp, Homo Sapiens
ggtgtaatggtgagcactctggact

SEQ ID NO: 19629 - DNA, 26 bp, Homo Sapiens
ggtgtaatggtgagcactctggactc

SEQ ID NO: 19630 - DNA, 28 bp, Homo Sapiens
ggtgtaatggtgagcactctggactctg

SEQ ID NO: 19631 - DNA, 30 bp, Homo Sapiens
ggtgtaatggtgagcactctggactctgaa

SEQ ID NO: 19632 - DNA, 32 bp, Homo Sapiens
ggtgtaatggtgagcactctggactctgaatc

SEQ ID NO: 19633 - DNA, 19 bp, Homo Sapiens
ggtgtaatggttagcactc

SEQ ID NO: 19634 - DNA, 21 bp, Homo Sapiens
ggtgtaatggttagcactctg

SEQ ID NO: 19635 - DNA, 22 bp, Homo Sapiens
ggtgtaatggttagcactctgg

SEQ ID NO: 19636 - DNA, 23 bp, Homo Sapiens
ggtgtaatggttagcactctgga

SEQ ID NO: 19637 - DNA, 24 bp, Homo Sapiens
ggtgtaatggttagcactctggac

SEQ ID NO: 19638 - DNA, 25 bp, Homo Sapiens
ggtgtaatggttagcactctggact

SEQ ID NO: 19639 - DNA, 26 bp, Homo Sapiens
ggtgtaatggttagcactctggactc

SEQ ID NO: 19640 - DNA, 27 bp, Homo Sapiens
ggtgtaatggttagcactctggactct

SEQ ID NO: 19641 - DNA, 28 bp, Homo Sapiens
ggtgtaatggttagcactctggactctg

SEQ ID NO: 19642 - DNA, 32 bp, Homo Sapiens
ggtgtaatggttagcactctggactctgaatc

SEQ ID NO: 19643 - DNA, 33 bp, Homo Sapiens
ggtgtaatggttagcactctggactctgaatcc

SEQ ID NO: 19644 - DNA, 43 bp, Homo Sapiens
ggtgtaatggttagcactctggactctgaatccagcgatccga

SEQ ID NO: 19645 - DNA, 44 bp, Homo Sapiens
ggtgtaatggttagcactctggactctgaatccagcgatccgag

SEQ ID NO: 19646 - DNA, 45 bp, Homo Sapiens
ggtgtaatggttagcactctggactctgaatccagcgatccgagt

SEQ ID NO: 19647 - DNA, 46 bp, Homo Sapiens
ggtgtaatggttagcactctggactctgaatccagcgatccgagtt

SEQ ID NO: 19648 - DNA, 47 bp, Homo Sapiens
ggtgtaatggttagcactctggactctgaatccagcgatccgagttc

SEQ ID NO: 19649 - DNA, 17 bp, Homo Sapiens
ggtgtagctcagtggta

SEQ ID NO: 19650 - DNA, 30 bp, Homo Sapiens
ggtgtagctcagtggtagagcatttgactg

SEQ ID NO: 19651 - DNA, 31 bp, Homo Sapiens
ggtgtagctcagtggtagagcatttgactgc

SEQ ID NO: 19652 - DNA, 32 bp, Homo Sapiens
ggtgtagctcagtggtagagcatttgactgca

SEQ ID NO: 19653 - DNA, 32 bp, Homo Sapiens
ggtgtagctcagtggtagagcgcgtgcttcgc

SEQ ID NO: 19654 - DNA, 16 bp, Homo Sapiens
ggtgtagtggtatcat

SEQ ID NO: 19655 - DNA, 17 bp, Homo Sapiens
ggtgtagtggtatcatg

SEQ ID NO: 19656 - DNA, 19 bp, Homo Sapiens
ggtgtagtggtatcatgca

SEQ ID NO: 19657 - DNA, 22 bp, Homo Sapiens
ggtgtagtggtatcatgcaaga

SEQ ID NO: 19658 - DNA, 24 bp, Homo Sapiens
ggtgtagtggtatcatgcaagatt

SEQ ID NO: 19659 - DNA, 25 bp, Homo Sapiens
ggtgtagtggtatcatgcaagattc

SEQ ID NO: 19660 - DNA, 26 bp, Homo Sapiens
ggtgtagtggtatcatgcaagattcc

SEQ ID NO: 19661 - DNA, 27 bp, Homo Sapiens
ggtgtagtggtatcatgcaagattccc

SEQ ID NO: 19662 - DNA, 28 bp, Homo Sapiens
ggtgtagtggtatcatgcaagattccca

SEQ ID NO: 19663 - DNA, 31 bp, Homo Sapiens
ggtgtagtggtatcatgcaagattcccattc

SEQ ID NO: 19664 - DNA, 42 bp, Homo Sapiens
ggtgtagtggtatcatgcaagattcccattcttgcgacccgg

SEQ ID NO: 19665 - DNA, 43 bp, Homo Sapiens
ggtgtagtggtatcatgcaagattcccattcttgcgacccggg

SEQ ID NO: 19666 - DNA, 44 bp, Homo Sapiens
ggtgtagtggtatcatgcaagattcccattcttgcgacccgggt

SEQ ID NO: 19667 - DNA, 16 bp, Homo Sapiens
ggtgtgagaggtcccg

SEQ ID NO: 19668 - DNA, 16 bp, Homo Sapiens
ggtgtgataggtggca

SEQ ID NO: 19669 - DNA, 23 bp, Homo Sapiens
ggtgtgataggtggcacggagaa

SEQ ID NO: 19670 - DNA, 28 bp, Homo Sapiens
ggtgtgataggtggcacggagaattttg

SEQ ID NO: 19671 - DNA, 21 bp, Homo Sapiens
ggttaaatacagaccaagagc

SEQ ID NO: 19672 - DNA, 22 bp, Homo Sapiens
ggttaaatacagaccaagagcc

SEQ ID NO: 19673 - DNA, 16 bp, Homo Sapiens
ggttaaggcattggac

SEQ ID NO: 19674 - DNA, 17 bp, Homo Sapiens
ggttaaggcattggact

SEQ ID NO: 19675 - DNA, 23 bp, Homo Sapiens
ggttaaggcgatggactgctaat

SEQ ID NO: 19676 - DNA, 16 bp, Homo Sapiens
ggttaaggcgttggac

SEQ ID NO: 19677 - DNA, 16 bp, Homo Sapiens
ggttagagcactggtc

SEQ ID NO: 19678 - DNA, 17 bp, Homo Sapiens
ggttagagcactggtct

SEQ ID NO: 19679 - DNA, 16 bp, Homo Sapiens
ggttagcactctggac

SEQ ID NO: 19680 - DNA, 17 bp, Homo Sapiens
ggttagcactctggact

SEQ ID NO: 19681 - DNA, 18 bp, Homo Sapiens
ggttagcactctggactc

SEQ ID NO: 19682 - DNA, 19 bp, Homo Sapiens
ggttagcactctggactct

SEQ ID NO: 19683 - DNA, 20 bp, Homo Sapiens
ggttagcactctggactctg

SEQ ID NO: 19684 - DNA, 21 bp, Homo Sapiens
ggttagcactctggactctga

SEQ ID NO: 19685 - DNA, 22 bp, Homo Sapiens
ggttagcactctggactctgaa

SEQ ID NO: 19686 - DNA, 23 bp, Homo Sapiens
ggttagcactctggactctgaat

SEQ ID NO: 19687 - DNA, 24 bp, Homo Sapiens
ggttagcactctggactctgaatc

SEQ ID NO: 19688 - DNA, 25 bp, Homo Sapiens
ggttagcactctggactctgaatcc

SEQ ID NO: 19689 - DNA, 26 bp, Homo Sapiens
ggttagcactctggactctgaatcca

SEQ ID NO: 19690 - DNA, 28 bp, Homo Sapiens
ggttagcactctggactctgaatccagc

SEQ ID NO: 19691 - DNA, 29 bp, Homo Sapiens
ggttagcactctggactctgaatccagcg

SEQ ID NO: 19692 - DNA, 30 bp, Homo Sapiens
ggttagcactctggactctgaatccagcga

SEQ ID NO: 19693 - DNA, 31 bp, Homo Sapiens
ggttagcactctggactctgaatccagcgat

SEQ ID NO: 19694 - DNA, 32 bp, Homo Sapiens
ggttagcactctggactctgaatccagcgatc

SEQ ID NO: 19695 - DNA, 33 bp, Homo Sapiens
ggttagcactctggactctgaatccagcgatcc

SEQ ID NO: 19696 - DNA, 34 bp, Homo Sapiens
ggttagcactctggactctgaatccagcgatccg

SEQ ID NO: 19697 - DNA, 35 bp, Homo Sapiens
ggttagcactctggactctgaatccagcgatccga

SEQ ID NO: 19698 - DNA, 36 bp, Homo Sapiens
ggttagcactctggactctgaatccagcgatccgag

SEQ ID NO: 19699 - DNA, 37 bp, Homo Sapiens
ggttagcactctggactctgaatccagcgatccgagt

SEQ ID NO: 19700 - DNA, 38 bp, Homo Sapiens
ggttagcactctggactctgaatccagcgatccgagtt

SEQ ID NO: 19701 - DNA, 39 bp, Homo Sapiens
ggttagcactctggactctgaatccagcgatccgagttc

SEQ ID NO: 19702 - DNA, 40 bp, Homo Sapiens
ggttagcactctggactctgaatccagcgatccgagttca

SEQ ID NO: 19703 - DNA, 48 bp, Homo Sapiens
ggttagcactctggactctgaatccagcgatccgagttcaaatctcgg

SEQ ID NO: 19704 - DNA, 42 bp, Homo Sapiens
ggttagcactctggactctgaatccagcgatccgagttcaag

SEQ ID NO: 19705 - DNA, 20 bp, Homo Sapiens
ggttagcactctggactttg

SEQ ID NO: 19706 - DNA, 21 bp, Homo Sapiens
ggttagcactctggactttga

SEQ ID NO: 19707 - DNA, 22 bp, Homo Sapiens
ggttagcactctggactttgaa

SEQ ID NO: 19708 - DNA, 23 bp, Homo Sapiens
ggttagcactctggactttgaat

SEQ ID NO: 19709 - DNA, 24 bp, Homo Sapiens
ggttagcactctggactttgaatc

SEQ ID NO: 19710 - DNA, 25 bp, Homo Sapiens
ggttagcactctggactttgaatcc

SEQ ID NO: 19711 - DNA, 26 bp, Homo Sapiens
ggttagcactctggactttgaatcca

SEQ ID NO: 19712 - DNA, 28 bp, Homo Sapiens
ggttagcactctggactttgaatccagc

SEQ ID NO: 19713 - DNA, 33 bp, Homo Sapiens
ggttagcactctggactttgaatccagcaatcc

SEQ ID NO: 19714 - DNA, 36 bp, Homo Sapiens
ggttagcactctggactttgaatccagcaatccgag

SEQ ID NO: 19715 - DNA, 33 bp, Homo Sapiens
ggttagcactctggactttgaatccagcgatcc

SEQ ID NO: 19716 - DNA, 35 bp, Homo Sapiens
ggttagcactctggactttgaatccagcgatccga

SEQ ID NO: 19717 - DNA, 36 bp, Homo Sapiens
ggttagcactctggactttgaatccagcgatccgag

SEQ ID NO: 19718 - DNA, 37 bp, Homo Sapiens
ggttagcactctggactttgaatccagcgatccgagt

SEQ ID NO: 19719 - DNA, 38 bp, Homo Sapiens
ggttagcactctggactttgaatccagcgatccgagtt

SEQ ID NO: 19720 - DNA, 40 bp, Homo Sapiens
ggttagcactctggactttgaatccagcgatccgagttca

SEQ ID NO: 19721 - DNA, 48 bp, Homo Sapiens
ggttagcactctggactttgaatccagcgatccgagttcaaatctcgg

SEQ ID NO: 19722 - DNA, 16 bp, Homo Sapiens
ggttagcgccttcggc

SEQ ID NO: 19723 - DNA, 16 bp, Homo Sapiens
ggttagcgcgcggtac

SEQ ID NO: 19724 - DNA, 19 bp, Homo Sapiens
ggttagcgcgcggtactta

SEQ ID NO: 19725 - DNA, 17 bp, Homo Sapiens
ggttagcgcgttcggct

SEQ ID NO: 19726 - DNA, 23 bp, Homo Sapiens
ggttagcgcgttcggctgttaac

SEQ ID NO: 19727 - DNA, 24 bp, Homo Sapiens
ggttagcgcgttcggctgttaacc

SEQ ID NO: 19728 - DNA, 16 bp, Homo Sapiens
ggttagctcagtcggc

SEQ ID NO: 19729 - DNA, 18 bp, Homo Sapiens
ggttagctcagtcggcta

SEQ ID NO: 19730 - DNA, 19 bp, Homo Sapiens
ggttagctcagtcggctag

SEQ ID NO: 19731 - DNA, 20 bp, Homo Sapiens
ggttagctcagtcggctaga

SEQ ID NO: 19732 - DNA, 22 bp, Homo Sapiens
ggttagctcagtcggctagagc

SEQ ID NO: 19733 - DNA, 19 bp, Homo Sapiens
ggttagctcagttggttag

SEQ ID NO: 19734 - DNA, 16 bp, Homo Sapiens
ggttaggattcagcgc

SEQ ID NO: 19735 - DNA, 17 bp, Homo Sapiens
ggttaggattcagcgct

SEQ ID NO: 19736 - DNA, 16 bp, Homo Sapiens
ggttaggattcctggt

SEQ ID NO: 19737 - DNA, 17 bp, Homo Sapiens
ggttaggattcctggtt

SEQ ID NO: 19738 - DNA, 18 bp, Homo Sapiens
ggttaggattcctggttt

SEQ ID NO: 19739 - DNA, 19 bp, Homo Sapiens
ggttaggattcctggtttt

SEQ ID NO: 19740 - DNA, 20 bp, Homo Sapiens
ggttaggattcctggttttc

SEQ ID NO: 19741 - DNA, 21 bp, Homo Sapiens
ggttaggattcctggttttca

SEQ ID NO: 19742 - DNA, 33 bp, Homo Sapiens
ggttaggattcctggttttcacccaggcggccc

SEQ ID NO: 19743 - DNA, 16 bp, Homo Sapiens
ggttaggattcggcgc

SEQ ID NO: 19744 - DNA, 17 bp, Homo Sapiens
ggttaggattcggcgct

SEQ ID NO: 19745 - DNA, 18 bp, Homo Sapiens
ggttaggattcggcgctc

SEQ ID NO: 19746 - DNA, 19 bp, Homo Sapiens
ggttaggattcggcgctct

SEQ ID NO: 19747 - DNA, 20 bp, Homo Sapiens
ggttaggattcggcgctctc

SEQ ID NO: 19748 - DNA, 21 bp, Homo Sapiens
ggttaggattcggcgctctca

SEQ ID NO: 19749 - DNA, 22 bp, Homo Sapiens
ggttaggattcggcgctctcac

SEQ ID NO: 19750 - DNA, 23 bp, Homo Sapiens
ggttaggattcggcgctctcacc

SEQ ID NO: 19751 - DNA, 24 bp, Homo Sapiens
ggttaggattcggcgctctcaccg

SEQ ID NO: 19752 - DNA, 25 bp, Homo Sapiens
ggttaggattcggcgctctcaccgc

SEQ ID NO: 19753 - DNA, 26 bp, Homo Sapiens
ggttaggattcggcgctctcaccgcc

SEQ ID NO: 19754 - DNA, 27 bp, Homo Sapiens
ggttaggattcggcgctctcaccgccg

SEQ ID NO: 19755 - DNA, 28 bp, Homo Sapiens
ggttaggattcggcgctctcaccgccgc

SEQ ID NO: 19756 - DNA, 32 bp, Homo Sapiens
ggttaggattcggcgctctcaccgccgcggcc

SEQ ID NO: 19757 - DNA, 33 bp, Homo Sapiens
ggttaggattcggcgctctcaccgccgcggccc

SEQ ID NO: 19758 - DNA, 34 bp, Homo Sapiens
ggttaggattcggcgctctcaccgccgcggcccg

SEQ ID NO: 19759 - DNA, 35 bp, Homo Sapiens
ggttaggattcggcgctctcaccgccgcggcccgg

SEQ ID NO: 19760 - DNA, 36 bp, Homo Sapiens
ggttaggattcggcgctctcaccgccgcggcccggg

SEQ ID NO: 19761 - DNA, 37 bp, Homo Sapiens
ggttaggattcggcgctctcaccgccgcggcccgggt

SEQ ID NO: 19762 - DNA, 38 bp, Homo Sapiens
ggttaggattcggcgctctcaccgccgcggcccgggtt

SEQ ID NO: 19763 - DNA, 39 bp, Homo Sapiens
ggttaggattcggcgctctcaccgccgcggcccgggttc

SEQ ID NO: 19764 - DNA, 42 bp, Homo Sapiens
ggttaggattcggcgctctcaccgccgcggcccgggttcgat

SEQ ID NO: 19765 - DNA, 18 bp, Homo Sapiens
ggttaggcctctttttac

SEQ ID NO: 19766 - DNA, 19 bp, Homo Sapiens
ggttaggcctctttttacc

SEQ ID NO: 19767 - DNA, 21 bp, Homo Sapiens
ggttaggcctctttttaccac

SEQ ID NO: 19768 - DNA, 22 bp, Homo Sapiens
ggttaggcctctttttaccacc

SEQ ID NO: 19769 - DNA, 23 bp, Homo Sapiens
ggttaggcctctttttaccacca

SEQ ID NO: 19770 - DNA, 16 bp, Homo Sapiens
ggttagtactctgcgt

SEQ ID NO: 19771 - DNA, 17 bp, Homo Sapiens
ggttagtactctgcgtt

SEQ ID NO: 19772 - DNA, 18 bp, Homo Sapiens
ggttagtactctgcgttg

SEQ ID NO: 19773 - DNA, 19 bp, Homo Sapiens
ggttagtactctgcgttgt

SEQ ID NO: 19774 - DNA, 20 bp, Homo Sapiens
ggttagtactctgcgttgtg

SEQ ID NO: 19775 - DNA, 23 bp, Homo Sapiens
ggttagtactctgcgttgtggcc

SEQ ID NO: 19776 - DNA, 24 bp, Homo Sapiens
ggttagtactctgcgttgtggccg

SEQ ID NO: 19777 - DNA, 32 bp, Homo Sapiens
ggttagtactctgcgttgtggccgcagcaacc

SEQ ID NO: 19778 - DNA, 33 bp, Homo Sapiens
ggttagtactctgcgttgtggccgcagcaacct

SEQ ID NO: 19779 - DNA, 36 bp, Homo Sapiens
ggttagtactctgcgttgtggccgcagcaacctcgg

SEQ ID NO: 19780 - DNA, 37 bp, Homo Sapiens
ggttagtactctgcgttgtggccgcagcaacctcggt

SEQ ID NO: 19781 - DNA, 16 bp, Homo Sapiens
ggttagtatccccgcc

SEQ ID NO: 19782 - DNA, 19 bp, Homo Sapiens
ggttagtatccccgcctgt

SEQ ID NO: 19783 - DNA, 20 bp, Homo Sapiens
ggttagtatccccgcctgtc

SEQ ID NO: 19784 - DNA, 16 bp, Homo Sapiens
ggttatacccttcccg

SEQ ID NO: 19785 - DNA, 19 bp, Homo Sapiens
ggttatacccttcccgtac

SEQ ID NO: 19786 - DNA, 20 bp, Homo Sapiens
ggttatacccttcccgtact

SEQ ID NO: 19787 - DNA, 21 bp, Homo Sapiens
ggttatacccttcccgtacta

SEQ ID NO: 19788 - DNA, 22 bp, Homo Sapiens
ggttatacccttcccgtactac

SEQ ID NO: 19789 - DNA, 23 bp, Homo Sapiens
ggttatacccttcccgtactacc

SEQ ID NO: 19790 - DNA, 24 bp, Homo Sapiens
ggttatacccttcccgtactacca

SEQ ID NO: 19791 - DNA, 17 bp, Homo Sapiens
ggttatcacatctgctt

SEQ ID NO: 19792 - DNA, 18 bp, Homo Sapiens
ggttatcacatctgcttt

SEQ ID NO: 19793 - DNA, 20 bp, Homo Sapiens
ggttatcacattcgcctcac

SEQ ID NO: 19794 - DNA, 16 bp, Homo Sapiens
ggttatcacgtctgct

SEQ ID NO: 19795 - DNA, 17 bp, Homo Sapiens
ggttatcacgtctgctt

SEQ ID NO: 19796 - DNA, 18 bp, Homo Sapiens
ggttatcacgtctgcttt

SEQ ID NO: 19797 - DNA, 19 bp, Homo Sapiens
ggttatcacgtctgcttta

SEQ ID NO: 19798 - DNA, 20 bp, Homo Sapiens
ggttatcacgtctgctttac

SEQ ID NO: 19799 - DNA, 21 bp, Homo Sapiens
ggttatcacgtctgctttaca

SEQ ID NO: 19800 - DNA, 22 bp, Homo Sapiens
ggttatcacgtctgctttacac

SEQ ID NO: 19801 - DNA, 16 bp, Homo Sapiens
ggttatcacgttcgcc

SEQ ID NO: 19802 - DNA, 17 bp, Homo Sapiens
ggttatcacgttcgcct

SEQ ID NO: 19803 - DNA, 18 bp, Homo Sapiens
ggttatcacgttcgcctc

SEQ ID NO: 19804 - DNA, 19 bp, Homo Sapiens
ggttatcacgttcgcctca

SEQ ID NO: 19805 - DNA, 20 bp, Homo Sapiens
ggttatcacgttcgcctcac

SEQ ID NO: 19806 - DNA, 22 bp, Homo Sapiens
ggttatcacgttcgcctcacac

SEQ ID NO: 19807 - DNA, 23 bp, Homo Sapiens
ggttatcacgttcgcctcacacg

SEQ ID NO: 19808 - DNA, 24 bp, Homo Sapiens
ggttatcacgttcgcctcacacgc

SEQ ID NO: 19809 - DNA, 27 bp, Homo Sapiens
ggttatcacgttcgcctcacacgcgaa

SEQ ID NO: 19810 - DNA, 16 bp, Homo Sapiens
ggttcaaatcccggac

SEQ ID NO: 19811 - DNA, 17 bp, Homo Sapiens
ggttcaaatcccggacg

SEQ ID NO: 19812 - DNA, 18 bp, Homo Sapiens
ggttcaaatcccggacga

SEQ ID NO: 19813 - DNA, 19 bp, Homo Sapiens
ggttcaaatcccggacgag

SEQ ID NO: 19814 - DNA, 20 bp, Homo Sapiens
ggttcaaatcccggacgagc

SEQ ID NO: 19815 - DNA, 21 bp, Homo Sapiens
ggttcaaatcccggacgagcc

SEQ ID NO: 19816 - DNA, 22 bp, Homo Sapiens
ggttcaaatcccggacgagccc

SEQ ID NO: 19817 - DNA, 23 bp, Homo Sapiens
ggttcaaatcccggacgagcccc

SEQ ID NO: 19818 - DNA, 24 bp, Homo Sapiens
ggttcaaatcccggacgagccccc

SEQ ID NO: 19819 - DNA, 16 bp, Homo Sapiens
ggttcaaatccgggtg

SEQ ID NO: 19820 - DNA, 18 bp, Homo Sapiens
ggttcaaatccgggtgcc

SEQ ID NO: 19821 - DNA, 24 bp, Homo Sapiens
ggttcaaatccgggtgccccctcc

SEQ ID NO: 19822 - DNA, 25 bp, Homo Sapiens
ggttcaaatccgggtgccccctcca

SEQ ID NO: 19823 - DNA, 22 bp, Homo Sapiens
ggttcaagtccctgttcgggcg

SEQ ID NO: 19824 - DNA, 23 bp, Homo Sapiens
ggttcaagtccctgttcgggcgc

SEQ ID NO: 19825 - DNA, 24 bp, Homo Sapiens
ggttcaagtccctgttcgggcgcc

SEQ ID NO: 19826 - DNA, 19 bp, Homo Sapiens
ggttcaatccccggcacct

SEQ ID NO: 19827 - DNA, 23 bp, Homo Sapiens
ggttcaatccccggcacctccac

SEQ ID NO: 19828 - DNA, 24 bp, Homo Sapiens
ggttcaatccccggcacctccacc

SEQ ID NO: 19829 - DNA, 25 bp, Homo Sapiens
ggttcaatccccggcacctccacca

SEQ ID NO: 19830 - DNA, 20 bp, Homo Sapiens
ggttcaatccccggcatctc

SEQ ID NO: 19831 - DNA, 16 bp, Homo Sapiens
ggttcaattccccgac

SEQ ID NO: 19832 - DNA, 22 bp, Homo Sapiens
ggttcaattccccgacggggag

SEQ ID NO: 19833 - DNA, 23 bp, Homo Sapiens
ggttcaattccccgacggggagc

SEQ ID NO: 19834 - DNA, 24 bp, Homo Sapiens
ggttcaattccccgacggggagcc

SEQ ID NO: 19835 - DNA, 25 bp, Homo Sapiens
ggttcaattccccgacggggagcca

SEQ ID NO: 19836 - DNA, 22 bp, Homo Sapiens
ggttcaattcctcttcttaaca

SEQ ID NO: 19837 - DNA, 24 bp, Homo Sapiens
ggttcaattcctcttcttaacacc

SEQ ID NO: 19838 - DNA, 17 bp, Homo Sapiens
ggttcagtggtagaatt

SEQ ID NO: 19839 - DNA, 18 bp, Homo Sapiens
ggttcagtggtagaattc

SEQ ID NO: 19840 - DNA, 19 bp, Homo Sapiens
ggttcagtggtagaattct

SEQ ID NO: 19841 - DNA, 20 bp, Homo Sapiens
ggttcagtggtagaattctc

SEQ ID NO: 19842 - DNA, 22 bp, Homo Sapiens
ggttcagtggtagaattctcgc

SEQ ID NO: 19843 - DNA, 23 bp, Homo Sapiens
ggttcagtggtagaattctcgcc

SEQ ID NO: 19844 - DNA, 24 bp, Homo Sapiens
ggttcagtggtagaattctcgcct

SEQ ID NO: 19845 - DNA, 27 bp, Homo Sapiens
ggttcagtggtagaattctcgcctccc

SEQ ID NO: 19846 - DNA, 25 bp, Homo Sapiens
ggttcagtggtagaattctcgcctg

SEQ ID NO: 19847 - DNA, 26 bp, Homo Sapiens
ggttcagtggtagaattctcgcctgc

SEQ ID NO: 19848 - DNA, 27 bp, Homo Sapiens
ggttcagtggtagaattctcgcctgcc

SEQ ID NO: 19849 - DNA, 28 bp, Homo Sapiens
ggttcagtggtagaattctcgcctgcca

SEQ ID NO: 19850 - DNA, 29 bp, Homo Sapiens
ggttcagtggtagaattctcgcctgccac

SEQ ID NO: 19851 - DNA, 30 bp, Homo Sapiens
ggttcagtggtagaattctcgcctgccacg

SEQ ID NO: 19852 - DNA, 31 bp, Homo Sapiens
ggttcagtggtagaattctcgcctgccacgc

SEQ ID NO: 19853 - DNA, 40 bp, Homo Sapiens
ggttcagtggtagaattctcgcctgccacgcgggaggccc

SEQ ID NO: 19854 - DNA, 42 bp, Homo Sapiens
ggttcagtggtagaattctcgcctgccacgcgggaggcccgg

SEQ ID NO: 19855 - DNA, 24 bp, Homo Sapiens
ggttcagtggtagaattcttgcct

SEQ ID NO: 19856 - DNA, 16 bp, Homo Sapiens
ggttccatagtgtagc

SEQ ID NO: 19857 - DNA, 18 bp, Homo Sapiens
ggttccatagtgtagcgg

SEQ ID NO: 19858 - DNA, 19 bp, Homo Sapiens
ggttccatagtgtagcggt

SEQ ID NO: 19859 - DNA, 22 bp, Homo Sapiens
ggttccatagtgtagcggttat

SEQ ID NO: 19860 - DNA, 23 bp, Homo Sapiens
ggttccatagtgtagcggttatc

SEQ ID NO: 19861 - DNA, 28 bp, Homo Sapiens
ggttccatagtgtagcggttatcacgtc

SEQ ID NO: 19862 - DNA, 29 bp, Homo Sapiens
ggttccatagtgtagcggttatcacgtct

SEQ ID NO: 19863 - DNA, 30 bp, Homo Sapiens
ggttccatagtgtagcggttatcacgtctg

SEQ ID NO: 19864 - DNA, 31 bp, Homo Sapiens
ggttccatagtgtagcggttatcacgtctgc

SEQ ID NO: 19865 - DNA, 32 bp, Homo Sapiens
ggttccatagtgtagcggttatcacgtctgct

SEQ ID NO: 19866 - DNA, 33 bp, Homo Sapiens
ggttccatagtgtagcggttatcacgtctgctt

SEQ ID NO: 19867 - DNA, 34 bp, Homo Sapiens
ggttccatagtgtagcggttatcacgtctgcttt

SEQ ID NO: 19868 - DNA, 35 bp, Homo Sapiens
ggttccatagtgtagcggttatcacgtctgcttta

SEQ ID NO: 19869 - DNA, 36 bp, Homo Sapiens
ggttccatagtgtagcggttatcacgtctgctttac

SEQ ID NO: 19870 - DNA, 37 bp, Homo Sapiens
ggttccatagtgtagcggttatcacgtctgctttaca

SEQ ID NO: 19871 - DNA, 38 bp, Homo Sapiens
ggttccatagtgtagcggttatcacgtctgctttacac

SEQ ID NO: 19872 - DNA, 39 bp, Homo Sapiens
ggttccatagtgtagcggttatcacgtctgctttacacg

SEQ ID NO: 19873 - DNA, 16 bp, Homo Sapiens
ggttccatagtgtagt

SEQ ID NO: 19874 - DNA, 17 bp, Homo Sapiens
ggttccatagtgtagtg

SEQ ID NO: 19875 - DNA, 18 bp, Homo Sapiens
ggttccatagtgtagtgg

SEQ ID NO: 19876 - DNA, 19 bp, Homo Sapiens
ggttccatagtgtagtggt

SEQ ID NO: 19877 - DNA, 21 bp, Homo Sapiens
ggttccatagtgtagtggtta

SEQ ID NO: 19878 - DNA, 22 bp, Homo Sapiens
ggttccatagtgtagtggttat

SEQ ID NO: 19879 - DNA, 23 bp, Homo Sapiens
ggttccatagtgtagtggttatc

SEQ ID NO: 19880 - DNA, 24 bp, Homo Sapiens
ggttccatagtgtagtggttatca

SEQ ID NO: 19881 - DNA, 25 bp, Homo Sapiens
ggttccatagtgtagtggttatcac

SEQ ID NO: 19882 - DNA, 31 bp, Homo Sapiens
ggttccatagtgtagtggttatcacatctgc

SEQ ID NO: 19883 - DNA, 32 bp, Homo Sapiens
ggttccatagtgtagtggttatcacatctgct

SEQ ID NO: 19884 - DNA, 33 bp, Homo Sapiens
ggttccatagtgtagtggttatcacatctgctt

SEQ ID NO: 19885 - DNA, 34 bp, Homo Sapiens
ggttccatagtgtagtggttatcacatctgcttt

SEQ ID NO: 19886 - DNA, 35 bp, Homo Sapiens
ggttccatagtgtagtggttatcacatctgcttta

SEQ ID NO: 19887 - DNA, 36 bp, Homo Sapiens
ggttccatagtgtagtggttatcacatctgctttac

SEQ ID NO: 19888 - DNA, 37 bp, Homo Sapiens
ggttccatagtgtagtggttatcacatctgctttaca

SEQ ID NO: 19889 - DNA, 26 bp, Homo Sapiens
ggttccatagtgtagtggttatcacg

SEQ ID NO: 19890 - DNA, 28 bp, Homo Sapiens
ggttccatagtgtagtggttatcacgtc

SEQ ID NO: 19891 - DNA, 29 bp, Homo Sapiens
ggttccatagtgtagtggttatcacgtct

SEQ ID NO: 19892 - DNA, 30 bp, Homo Sapiens
ggttccatagtgtagtggttatcacgtctg

SEQ ID NO: 19893 - DNA, 31 bp, Homo Sapiens
ggttccatagtgtagtggttatcacgtctgc

SEQ ID NO: 19894 - DNA, 32 bp, Homo Sapiens
ggttccatagtgtagtggttatcacgtctgct

SEQ ID NO: 19895 - DNA, 33 bp, Homo Sapiens
ggttccatagtgtagtggttatcacgtctgctt

SEQ ID NO: 19896 - DNA, 34 bp, Homo Sapiens
ggttccatagtgtagtggttatcacgtctgcttt

SEQ ID NO: 19897 - DNA, 35 bp, Homo Sapiens
ggttccatagtgtagtggttatcacgtctgcttta

SEQ ID NO: 19898 - DNA, 36 bp, Homo Sapiens
ggttccatagtgtagtggttatcacgtctgctttac

SEQ ID NO: 19899 - DNA, 37 bp, Homo Sapiens
ggttccatagtgtagtggttatcacgtctgctttaca

SEQ ID NO: 19900 - DNA, 38 bp, Homo Sapiens
ggttccatagtgtagtggttatcacgtctgctttacac

SEQ ID NO: 19901 - DNA, 39 bp, Homo Sapiens
ggttccatagtgtagtggttatcacgtctgctttacacg

SEQ ID NO: 19902 - DNA, 40 bp, Homo Sapiens
ggttccatagtgtagtggttatcacgtctgctttacacgc

SEQ ID NO: 19903 - DNA, 43 bp, Homo Sapiens
ggttccatagtgtagtggttatcacgtctgctttacacgcaga

SEQ ID NO: 19904 - DNA, 16 bp, Homo Sapiens
ggttccatggtgtaat

SEQ ID NO: 19905 - DNA, 17 bp, Homo Sapiens
ggttccatggtgtaatg

SEQ ID NO: 19906 - DNA, 18 bp, Homo Sapiens
ggttccatggtgtaatgg

SEQ ID NO: 19907 - DNA, 19 bp, Homo Sapiens
ggttccatggtgtaatggt

SEQ ID NO: 19908 - DNA, 29 bp, Homo Sapiens
ggttccatggtgtaatggtaagcactctg

SEQ ID NO: 19909 - DNA, 32 bp, Homo Sapiens
ggttccatggtgtaatggtaagcactctggac

SEQ ID NO: 19910 - DNA, 33 bp, Homo Sapiens
ggttccatggtgtaatggtaagcactctggact

SEQ ID NO: 19911 - DNA, 34 bp, Homo Sapiens
ggttccatggtgtaatggtaagcactctggactc

SEQ ID NO: 19912 - DNA, 35 bp, Homo Sapiens
ggttccatggtgtaatggtaagcactctggactct

SEQ ID NO: 19913 - DNA, 36 bp, Homo Sapiens
ggttccatggtgtaatggtaagcactctggactctg

SEQ ID NO: 19914 - DNA, 27 bp, Homo Sapiens
ggttccatggtgtaatggtgagcactc

SEQ ID NO: 19915 - DNA, 28 bp, Homo Sapiens
ggttccatggtgtaatggtgagcactct

SEQ ID NO: 19916 - DNA, 29 bp, Homo Sapiens
ggttccatggtgtaatggtgagcactctg

SEQ ID NO: 19917 - DNA, 30 bp, Homo Sapiens
ggttccatggtgtaatggtgagcactctgg

SEQ ID NO: 19918 - DNA, 31 bp, Homo Sapiens
ggttccatggtgtaatggtgagcactctgga

SEQ ID NO: 19919 - DNA, 32 bp, Homo Sapiens
ggttccatggtgtaatggtgagcactctggac

SEQ ID NO: 19920 - DNA, 33 bp, Homo Sapiens
ggttccatggtgtaatggtgagcactctggact

SEQ ID NO: 19921 - DNA, 34 bp, Homo Sapiens
ggttccatggtgtaatggtgagcactctggactc

SEQ ID NO: 19922 - DNA, 35 bp, Homo Sapiens
ggttccatggtgtaatggtgagcactctggactct

SEQ ID NO: 19923 - DNA, 36 bp, Homo Sapiens
ggttccatggtgtaatggtgagcactctggactctg

SEQ ID NO: 19924 - DNA, 37 bp, Homo Sapiens
ggttccatggtgtaatggtgagcactctggactctga

SEQ ID NO: 19925 - DNA, 40 bp, Homo Sapiens
ggttccatggtgtaatggtgagcactctggactctgaatc

SEQ ID NO: 19926 - DNA, 41 bp, Homo Sapiens
ggttccatggtgtaatggtgagcactctggactctgaatcc

SEQ ID NO: 19927 - DNA, 23 bp, Homo Sapiens
ggttccatggtgtaatggttagc

SEQ ID NO: 19928 - DNA, 27 bp, Homo Sapiens
ggttccatggtgtaatggttagcactc

SEQ ID NO: 19929 - DNA, 28 bp, Homo Sapiens
ggttccatggtgtaatggttagcactct

SEQ ID NO: 19930 - DNA, 29 bp, Homo Sapiens
ggttccatggtgtaatggttagcactctg

SEQ ID NO: 19931 - DNA, 30 bp, Homo Sapiens
ggttccatggtgtaatggttagcactctgg

SEQ ID NO: 19932 - DNA, 31 bp, Homo Sapiens
ggttccatggtgtaatggttagcactctgga

SEQ ID NO: 19933 - DNA, 32 bp, Homo Sapiens
ggttccatggtgtaatggttagcactctggac

SEQ ID NO: 19934 - DNA, 33 bp, Homo Sapiens
ggttccatggtgtaatggttagcactctggact

SEQ ID NO: 19935 - DNA, 34 bp, Homo Sapiens
ggttccatggtgtaatggttagcactctggactc

SEQ ID NO: 19936 - DNA, 35 bp, Homo Sapiens
ggttccatggtgtaatggttagcactctggactct

SEQ ID NO: 19937 - DNA, 36 bp, Homo Sapiens
ggttccatggtgtaatggttagcactctggactctg

SEQ ID NO: 19938 - DNA, 37 bp, Homo Sapiens
ggttccatggtgtaatggttagcactctggactctga

SEQ ID NO: 19939 - DNA, 38 bp, Homo Sapiens
ggttccatggtgtaatggttagcactctggactctgaa

SEQ ID NO: 19940 - DNA, 39 bp, Homo Sapiens
ggttccatggtgtaatggttagcactctggactctgaat

SEQ ID NO: 19941 - DNA, 40 bp, Homo Sapiens
ggttccatggtgtaatggttagcactctggactctgaatc

SEQ ID NO: 19942 - DNA, 41 bp, Homo Sapiens
ggttccatggtgtaatggttagcactctggactctgaatcc

SEQ ID NO: 19943 - DNA, 42 bp, Homo Sapiens
ggttccatggtgtaatggttagcactctggactctgaatcca

SEQ ID NO: 19944 - DNA, 44 bp, Homo Sapiens
ggttccatggtgtaatggttagcactctggactctgaatccagc

SEQ ID NO: 19945 - DNA, 45 bp, Homo Sapiens
ggttccatggtgtaatggttagcactctggactctgaatccagcg

SEQ ID NO: 19946 - DNA, 46 bp, Homo Sapiens
ggttccatggtgtaatggttagcactctggactctgaatccagcga

SEQ ID NO: 19947 - DNA, 47 bp, Homo Sapiens
ggttccatggtgtaatggttagcactctggactctgaatccagcgat

SEQ ID NO: 19948 - DNA, 48 bp, Homo Sapiens
ggttccatggtgtaatggttagcactctggactctgaatccagcgatc

SEQ ID NO: 19949 - DNA, 28 bp, Homo Sapiens
ggttccgggttcgagtcccggcggagtc

SEQ ID NO: 19950 - DNA, 30 bp, Homo Sapiens
ggttccgggttcgagtcccggcggagtcgc

SEQ ID NO: 19951 - DNA, 31 bp, Homo Sapiens
ggttccgggttcgagtcccggcggagtcgcc

SEQ ID NO: 19952 - DNA, 32 bp, Homo Sapiens
ggttccgggttcgagtcccggcggagtcgcca

SEQ ID NO: 19953 - DNA, 16 bp, Homo Sapiens
ggttcgaaaccgggcg

SEQ ID NO: 19954 - DNA, 18 bp, Homo Sapiens
ggttcgaaaccgggcgga

SEQ ID NO: 19955 - DNA, 19 bp, Homo Sapiens
ggttcgaaaccgggcggaa

SEQ ID NO: 19956 - DNA, 20 bp, Homo Sapiens
ggttcgaaaccgggcggaaa

SEQ ID NO: 19957 - DNA, 21 bp, Homo Sapiens
ggttcgaaaccgggcggaaac

SEQ ID NO: 19958 - DNA, 22 bp, Homo Sapiens
ggttcgaaaccgggcggaaaca

SEQ ID NO: 19959 - DNA, 23 bp, Homo Sapiens
ggttcgaaaccgggcggaaacac

SEQ ID NO: 19960 - DNA, 24 bp, Homo Sapiens
ggttcgaaaccgggcggaaacacc

SEQ ID NO: 19961 - DNA, 20 bp, Homo Sapiens
ggttcgaaccccgtacgggc

SEQ ID NO: 19962 - DNA, 23 bp, Homo Sapiens
ggttcgaaccccgtccgtgcctc

SEQ ID NO: 19963 - DNA, 19 bp, Homo Sapiens
ggttcgaaccctgctcgct

SEQ ID NO: 19964 - DNA, 24 bp, Homo Sapiens
ggttcgaaccctgctcgctgcgcc

SEQ ID NO: 19965 - DNA, 25 bp, Homo Sapiens
ggttcgaaccctgctcgctgcgcca

SEQ ID NO: 19966 - DNA, 23 bp, Homo Sapiens
ggttcgaatcccaccagagtcgc

SEQ ID NO: 19967 - DNA, 25 bp, Homo Sapiens
ggttcgaatcccaccagagtcgcca

SEQ ID NO: 19968 - DNA, 23 bp, Homo Sapiens
ggttcgaatcccaccgctgccac

SEQ ID NO: 19969 - DNA, 24 bp, Homo Sapiens
ggttcgaatcccaccgctgccacc

SEQ ID NO: 19970 - DNA, 22 bp, Homo Sapiens
ggttcgaatcccactcctgaca

SEQ ID NO: 19971 - DNA, 24 bp, Homo Sapiens
ggttcgaatcccactcctgacacc

SEQ ID NO: 19972 - DNA, 25 bp, Homo Sapiens
ggttcgaatcccactcctgacacca

SEQ ID NO: 19973 - DNA, 23 bp, Homo Sapiens
ggttcgaatcccacttctgacac

SEQ ID NO: 19974 - DNA, 24 bp, Homo Sapiens
ggttcgaatcccacttctgacacc

SEQ ID NO: 19975 - DNA, 22 bp, Homo Sapiens
ggttcgaatcccagcggtgcct

SEQ ID NO: 19976 - DNA, 24 bp, Homo Sapiens
ggttcgaatcccagcggtgcctcc

SEQ ID NO: 19977 - DNA, 23 bp, Homo Sapiens
ggttcgaatcccatcctcgtcgc

SEQ ID NO: 19978 - DNA, 24 bp, Homo Sapiens
ggttcgaatcccatcctcgtcgcc

SEQ ID NO: 19979 - DNA, 25 bp, Homo Sapiens
ggttcgaatcccatcctcgtcgcca

SEQ ID NO: 19980 - DNA, 23 bp, Homo Sapiens
ggttcgaatcccttcgtggttgc

SEQ ID NO: 19981 - DNA, 24 bp, Homo Sapiens
ggttcgaatcccttcgtggttgcc

SEQ ID NO: 19982 - DNA, 19 bp, Homo Sapiens
ggttcgaatccgagtcacg

SEQ ID NO: 19983 - DNA, 21 bp, Homo Sapiens
ggttcgaatccgagtcacggc

SEQ ID NO: 19984 - DNA, 22 bp, Homo Sapiens
ggttcgaatccgagtcacggca

SEQ ID NO: 19985 - DNA, 23 bp, Homo Sapiens
ggttcgaatccgagtcacggcac

SEQ ID NO: 19986 - DNA, 24 bp, Homo Sapiens
ggttcgaatccgagtcacggcacc

SEQ ID NO: 19987 - DNA, 25 bp, Homo Sapiens
ggttcgaatccgagtcacggcacca

SEQ ID NO: 19988 - DNA, 23 bp, Homo Sapiens
ggttcgaatccggctcgaaggac

SEQ ID NO: 19989 - DNA, 23 bp, Homo Sapiens
ggttcgaatccggctcggaggac

SEQ ID NO: 19990 - DNA, 18 bp, Homo Sapiens
ggttcgaatcctgccgac

SEQ ID NO: 19991 - DNA, 19 bp, Homo Sapiens
ggttcgaatcctgccgact

SEQ ID NO: 19992 - DNA, 22 bp, Homo Sapiens
ggttcgaatcctgccgactacg

SEQ ID NO: 19993 - DNA, 17 bp, Homo Sapiens
ggttcgaatcctgtcgg

SEQ ID NO: 19994 - DNA, 18 bp, Homo Sapiens
ggttcgaatcctgttcgt

SEQ ID NO: 19995 - DNA, 24 bp, Homo Sapiens
ggttcgaatcctgttcgtgacgcc

SEQ ID NO: 19996 - DNA, 25 bp, Homo Sapiens
ggttcgaatcctgttcgtgacgcca

SEQ ID NO: 19997 - DNA, 18 bp, Homo Sapiens
ggttcgactcccggtatg

SEQ ID NO: 19998 - DNA, 23 bp, Homo Sapiens
ggttcgactcccggtatgggaac

SEQ ID NO: 19999 - DNA, 24 bp, Homo Sapiens
ggttcgactcccggtatgggaacc

SEQ ID NO: 20000 - DNA, 16 bp, Homo Sapiens
ggttcgactcccggtg

SEQ ID NO: 20001 - DNA, 17 bp, Homo Sapiens
ggttcgactcccggtgt

SEQ ID NO: 20002 - DNA, 18 bp, Homo Sapiens
ggttcgactcccggtgtg

SEQ ID NO: 20003 - DNA, 19 bp, Homo Sapiens
ggttcgactcccggtgtgg

SEQ ID NO: 20004 - DNA, 20 bp, Homo Sapiens
ggttcgactcccggtgtggg

SEQ ID NO: 20005 - DNA, 21 bp, Homo Sapiens
ggttcgactcccggtgtggga

SEQ ID NO: 20006 - DNA, 22 bp, Homo Sapiens
ggttcgactcccggtgtgggaa

SEQ ID NO: 20007 - DNA, 23 bp, Homo Sapiens
ggttcgactcccggtgtgggaac

SEQ ID NO: 20008 - DNA, 24 bp, Homo Sapiens
ggttcgactcccggtgtgggaacc

SEQ ID NO: 20009 - DNA, 25 bp, Homo Sapiens
ggttcgactcccggtgtgggaacca

SEQ ID NO: 20010 - DNA, 19 bp, Homo Sapiens
ggttcgactcctggctggc

SEQ ID NO: 20011 - DNA, 20 bp, Homo Sapiens
ggttcgactcctggctggct

SEQ ID NO: 20012 - DNA, 21 bp, Homo Sapiens
ggttcgactcctggctggctc

SEQ ID NO: 20013 - DNA, 22 bp, Homo Sapiens
ggttcgactcctggctggctcg

SEQ ID NO: 20014 - DNA, 23 bp, Homo Sapiens
ggttcgactcctggctggctcgc

SEQ ID NO: 20015 - DNA, 24 bp, Homo Sapiens
ggttcgactcctggctggctcgcc

SEQ ID NO: 20016 - DNA, 25 bp, Homo Sapiens
ggttcgactcctggctggctcgcca

SEQ ID NO: 20017 - DNA, 24 bp, Homo Sapiens
ggttcgagtcccacctggggtacc

SEQ ID NO: 20018 - DNA, 24 bp, Homo Sapiens
ggttcgagtcccatctggggtgcc

SEQ ID NO: 20019 - DNA, 24 bp, Homo Sapiens
ggttcgagtcccatctgggtcgcc

SEQ ID NO: 20020 - DNA, 22 bp, Homo Sapiens
ggttcgagtcccggcagagatg

SEQ ID NO: 20021 - DNA, 24 bp, Homo Sapiens
ggttcgagtcccggcagagatgcc

SEQ ID NO: 20022 - DNA, 16 bp, Homo Sapiens
ggttcgagtcccggcg

SEQ ID NO: 20023 - DNA, 17 bp, Homo Sapiens
ggttcgagtcccggcgg

SEQ ID NO: 20024 - DNA, 18 bp, Homo Sapiens
ggttcgagtcccggcgga

SEQ ID NO: 20025 - DNA, 19 bp, Homo Sapiens
ggttcgagtcccggcggag

SEQ ID NO: 20026 - DNA, 20 bp, Homo Sapiens
ggttcgagtcccggcggagt

SEQ ID NO: 20027 - DNA, 21 bp, Homo Sapiens
ggttcgagtcccggcggagtc

SEQ ID NO: 20028 - DNA, 22 bp, Homo Sapiens
ggttcgagtcccggcggagtcg

SEQ ID NO: 20029 - DNA, 23 bp, Homo Sapiens
ggttcgagtcccggcggagtcgc

SEQ ID NO: 20030 - DNA, 25 bp, Homo Sapiens
ggttcgagtcccggcggagtcgcca

SEQ ID NO: 20031 - DNA, 17 bp, Homo Sapiens
ggttcgagtcccttcgt

SEQ ID NO: 20032 - DNA, 21 bp, Homo Sapiens
ggttcgagtcccttcgtggtc

SEQ ID NO: 20033 - DNA, 24 bp, Homo Sapiens
ggttcgagtcccttcgtggtcgcc

SEQ ID NO: 20034 - DNA, 17 bp, Homo Sapiens
ggttcgagtcctgccgc

SEQ ID NO: 20035 - DNA, 23 bp, Homo Sapiens
ggttcgagtcctgccgcggtcgc

SEQ ID NO: 20036 - DNA, 24 bp, Homo Sapiens
ggttcgagtcctgccgcggtcgcc

SEQ ID NO: 20037 - DNA, 25 bp, Homo Sapiens
ggttcgagtcctgccgcggtcgcca

SEQ ID NO: 20038 - DNA, 23 bp, Homo Sapiens
ggttcgatccccagcatctccac

SEQ ID NO: 20039 - DNA, 16 bp, Homo Sapiens
ggttcgatccccggca

SEQ ID NO: 20040 - DNA, 17 bp, Homo Sapiens
ggttcgatccccggcat

SEQ ID NO: 20041 - DNA, 18 bp, Homo Sapiens
ggttcgatccccggcatc

SEQ ID NO: 20042 - DNA, 19 bp, Homo Sapiens
ggttcgatccccggcatct

SEQ ID NO: 20043 - DNA, 20 bp, Homo Sapiens
ggttcgatccccggcatctc

SEQ ID NO: 20044 - DNA, 21 bp, Homo Sapiens
ggttcgatccccggcatctcc

SEQ ID NO: 20045 - DNA, 22 bp, Homo Sapiens
ggttcgatccccggcatctcca

SEQ ID NO: 20046 - DNA, 24 bp, Homo Sapiens
ggttcgatccccggcatctccacc

SEQ ID NO: 20047 - DNA, 25 bp, Homo Sapiens
ggttcgatccccggcatctccacca

SEQ ID NO: 20048 - DNA, 16 bp, Homo Sapiens
ggttcgatccccgtac

SEQ ID NO: 20049 - DNA, 20 bp, Homo Sapiens
ggttcgatccccgtacgggc

SEQ ID NO: 20050 - DNA, 21 bp, Homo Sapiens
ggttcgatccccgtacgggcc

SEQ ID NO: 20051 - DNA, 17 bp, Homo Sapiens
ggttcgatccccgtact

SEQ ID NO: 20052 - DNA, 20 bp, Homo Sapiens
ggttcgatccccgtactggc

SEQ ID NO: 20053 - DNA, 21 bp, Homo Sapiens
ggttcgatccccgtactggcc

SEQ ID NO: 20054 - DNA, 22 bp, Homo Sapiens
ggttcgatccccgtactggcca

SEQ ID NO: 20055 - DNA, 23 bp, Homo Sapiens
ggttcgatccccgtactggccac

SEQ ID NO: 20056 - DNA, 24 bp, Homo Sapiens
ggttcgatccccgtactggccacc

SEQ ID NO: 20057 - DNA, 22 bp, Homo Sapiens
ggttcgatcccgggcggaaaca

SEQ ID NO: 20058 - DNA, 24 bp, Homo Sapiens
ggttcgatcccgggcggaaacacc

SEQ ID NO: 20059 - DNA, 16 bp, Homo Sapiens
ggttcgatcccgggtt

SEQ ID NO: 20060 - DNA, 17 bp, Homo Sapiens
ggttcgatcccgggttt

SEQ ID NO: 20061 - DNA, 22 bp, Homo Sapiens
ggttcgatcccgggtttcggca

SEQ ID NO: 20062 - DNA, 23 bp, Homo Sapiens
ggttcgatcccgggtttcggcac

SEQ ID NO: 20063 - DNA, 16 bp, Homo Sapiens
ggttcgattccccaac

SEQ ID NO: 20064 - DNA, 16 bp, Homo Sapiens
ggttcgattccccgac

SEQ ID NO: 20065 - DNA, 17 bp, Homo Sapiens
ggttcgattccccgacg

SEQ ID NO: 20066 - DNA, 18 bp, Homo Sapiens
ggttcgattccccgacgg

SEQ ID NO: 20067 - DNA, 19 bp, Homo Sapiens
ggttcgattccccgacggg

SEQ ID NO: 20068 - DNA, 20 bp, Homo Sapiens
ggttcgattccccgacgggg

SEQ ID NO: 20069 - DNA, 21 bp, Homo Sapiens
ggttcgattccccgacgggga

SEQ ID NO: 20070 - DNA, 22 bp, Homo Sapiens
ggttcgattccccgacggggag

SEQ ID NO: 20071 - DNA, 23 bp, Homo Sapiens
ggttcgattccccgacggggagc

SEQ ID NO: 20072 - DNA, 24 bp, Homo Sapiens
ggttcgattccccgacggggagcc

SEQ ID NO: 20073 - DNA, 25 bp, Homo Sapiens
ggttcgattccccgacggggagcca

SEQ ID NO: 20074 - DNA, 16 bp, Homo Sapiens
ggttcgattcccggcc

SEQ ID NO: 20075 - DNA, 19 bp, Homo Sapiens
ggttcgattcccggccaac

SEQ ID NO: 20076 - DNA, 20 bp, Homo Sapiens
ggttcgattcccggccaacg

SEQ ID NO: 20077 - DNA, 24 bp, Homo Sapiens
ggttcgattcccggccaacgcacc

SEQ ID NO: 20078 - DNA, 20 bp, Homo Sapiens
ggttcgattcccggccaatg

SEQ ID NO: 20079 - DNA, 21 bp, Homo Sapiens
ggttcgattcccggccaatgc

SEQ ID NO: 20080 - DNA, 24 bp, Homo Sapiens
ggttcgattcccggccaatgcacc

SEQ ID NO: 20081 - DNA, 16 bp, Homo Sapiens
ggttcgattcccgggc

SEQ ID NO: 20082 - DNA, 17 bp, Homo Sapiens
ggttcgattcccgggcg

SEQ ID NO: 20083 - DNA, 19 bp, Homo Sapiens
ggttcgattcccgggcggc

SEQ ID NO: 20084 - DNA, 22 bp, Homo Sapiens
ggttcgattcccgggcggcgca

SEQ ID NO: 20085 - DNA, 24 bp, Homo Sapiens
ggttcgattcccgggcggcgcacc

SEQ ID NO: 20086 - DNA, 16 bp, Homo Sapiens
ggttcgattcccgggt

SEQ ID NO: 20087 - DNA, 16 bp, Homo Sapiens
ggttcgattcccggtc

SEQ ID NO: 20088 - DNA, 17 bp, Homo Sapiens
ggttcgattcccggtca

SEQ ID NO: 20089 - DNA, 18 bp, Homo Sapiens
ggttcgattcccggtcag

SEQ ID NO: 20090 - DNA, 19 bp, Homo Sapiens
ggttcgattcccggtcagg

SEQ ID NO: 20091 - DNA, 24 bp, Homo Sapiens
ggttcgattcccggtcaggaaacc

SEQ ID NO: 20092 - DNA, 20 bp, Homo Sapiens
ggttcgattcccggtcaggg

SEQ ID NO: 20093 - DNA, 21 bp, Homo Sapiens
ggttcgattcccggtcaggga

SEQ ID NO: 20094 - DNA, 22 bp, Homo Sapiens
ggttcgattcccggtcagggaa

SEQ ID NO: 20095 - DNA, 23 bp, Homo Sapiens
ggttcgattcccggtcagggaac

SEQ ID NO: 20096 - DNA, 24 bp, Homo Sapiens
ggttcgattcccggtcagggaacc

SEQ ID NO: 20097 - DNA, 25 bp, Homo Sapiens
ggttcgattcccggtcagggaacca

SEQ ID NO: 20098 - DNA, 16 bp, Homo Sapiens
ggttcgattccggctc

SEQ ID NO: 20099 - DNA, 22 bp, Homo Sapiens
ggttcgattccggctcgaagga

SEQ ID NO: 20100 - DNA, 23 bp, Homo Sapiens
ggttcgattccggctcgaaggac

SEQ ID NO: 20101 - DNA, 24 bp, Homo Sapiens
ggttcgattccggctcgaaggacc

SEQ ID NO: 20102 - DNA, 22 bp, Homo Sapiens
ggttcgattccttccttttttg

SEQ ID NO: 20103 - DNA, 23 bp, Homo Sapiens
ggttcgattccttccttttttgc

SEQ ID NO: 20104 - DNA, 24 bp, Homo Sapiens
ggttcgattccttccttttttgcc

SEQ ID NO: 20105 - DNA, 25 bp, Homo Sapiens
ggttcgattccttccttttttgcca

SEQ ID NO: 20106 - DNA, 18 bp, Homo Sapiens
ggttcgattctcatagtc

SEQ ID NO: 20107 - DNA, 19 bp, Homo Sapiens
ggttcgattctcatagtcc

SEQ ID NO: 20108 - DNA, 20 bp, Homo Sapiens
ggttcgattctcatagtcct

SEQ ID NO: 20109 - DNA, 21 bp, Homo Sapiens
ggttcgattctcatagtccta

SEQ ID NO: 20110 - DNA, 22 bp, Homo Sapiens
ggttcgattctcatagtcctag

SEQ ID NO: 20111 - DNA, 23 bp, Homo Sapiens
ggttcgattctcatagtcctagc

SEQ ID NO: 20112 - DNA, 24 bp, Homo Sapiens
ggttcgattctcatagtcctagcc

SEQ ID NO: 20113 - DNA, 25 bp, Homo Sapiens
ggttcgattctcatagtcctagcca

SEQ ID NO: 20114 - DNA, 18 bp, Homo Sapiens
ggttcttgtagttgaaat

SEQ ID NO: 20115 - DNA, 26 bp, Homo Sapiens
ggttgcgtgttcaagtcacgtcgggg

SEQ ID NO: 20116 - DNA, 28 bp, Homo Sapiens
ggttgcgtgttcaagtcacgtcggggtc

SEQ ID NO: 20117 - DNA, 18 bp, Homo Sapiens
ggttggtggttcgagccc

SEQ ID NO: 20118 - DNA, 31 bp, Homo Sapiens
ggttggtggttcgagcccacccagggacgcc

SEQ ID NO: 20119 - DNA, 32 bp, Homo Sapiens
ggttggtggttcgagcccacccagggacgcca

SEQ ID NO: 20120 - DNA, 16 bp, Homo Sapiens
ggttgtagtccgtgcg

SEQ ID NO: 20121 - DNA, 17 bp, Homo Sapiens
ggttgtagtccgtgcga

SEQ ID NO: 20122 - DNA, 18 bp, Homo Sapiens
ggttgtagtccgtgcgag

SEQ ID NO: 20123 - DNA, 19 bp, Homo Sapiens
ggttgtagtccgtgcgaga

SEQ ID NO: 20124 - DNA, 20 bp, Homo Sapiens
ggttgtagtccgtgcgagaa

SEQ ID NO: 20125 - DNA, 21 bp, Homo Sapiens
ggttgtagtccgtgcgagaat

SEQ ID NO: 20126 - DNA, 22 bp, Homo Sapiens
ggttgtagtccgtgcgagaata

SEQ ID NO: 20127 - DNA, 23 bp, Homo Sapiens
ggttgtagtccgtgcgagaatac

SEQ ID NO: 20128 - DNA, 24 bp, Homo Sapiens
ggttgtagtccgtgcgagaatacc

SEQ ID NO: 20129 - DNA, 25 bp, Homo Sapiens
ggttgtagtccgtgcgagaatacca

SEQ ID NO: 20130 - DNA, 16 bp, Homo Sapiens
ggttgtgagttcgagc

SEQ ID NO: 20131 - DNA, 20 bp, Homo Sapiens
ggttgtgagttcgagcctca

SEQ ID NO: 20132 - DNA, 31 bp, Homo Sapiens
ggttgtgagttcgagcctcacctggagcacc

SEQ ID NO: 20133 - DNA, 17 bp, Homo Sapiens
ggttgtgagttcgatcc

SEQ ID NO: 20134 - DNA, 31 bp, Homo Sapiens
ggttgtgggttcgaatcccaccagagtcgcc

SEQ ID NO: 20135 - DNA, 32 bp, Homo Sapiens
ggttgtgggttcgaatcccaccagagtcgcca

SEQ ID NO: 20136 - DNA, 18 bp, Homo Sapiens
ggtttaagtcccattggt

SEQ ID NO: 20137 - DNA, 19 bp, Homo Sapiens
ggtttaagtcccattggtc

SEQ ID NO: 20138 - DNA, 20 bp, Homo Sapiens
ggtttaagtcccattggtct

SEQ ID NO: 20139 - DNA, 21 bp, Homo Sapiens
ggtttaagtcccattggtcta

SEQ ID NO: 20140 - DNA, 23 bp, Homo Sapiens
ggtttaagtcccattggtctagc

SEQ ID NO: 20141 - DNA, 24 bp, Homo Sapiens
ggtttaagtcccattggtctagcc

SEQ ID NO: 20142 - DNA, 25 bp, Homo Sapiens
ggtttaagtcccattggtctagcca

SEQ ID NO: 20143 - DNA, 17 bp, Homo Sapiens
ggtttccccgcgcaggt

SEQ ID NO: 20144 - DNA, 18 bp, Homo Sapiens
ggtttccccgcgcaggtt

SEQ ID NO: 20145 - DNA, 33 bp, Homo Sapiens
ggtttccgtagtgtagcggttatcacattcgcc

SEQ ID NO: 20146 - DNA, 34 bp, Homo Sapiens
ggtttccgtagtgtagcggttatcacattcgcct

SEQ ID NO: 20147 - DNA, 19 bp, Homo Sapiens
ggtttccgtagtgtagtgg

SEQ ID NO: 20148 - DNA, 33 bp, Homo Sapiens
ggtttccgtagtgtagtggtcatcacgttcgcc

SEQ ID NO: 20149 - DNA, 34 bp, Homo Sapiens
ggtttccgtagtgtagtggtcatcacgttcgcct

SEQ ID NO: 20150 - DNA, 24 bp, Homo Sapiens
ggtttccgtagtgtagtggttatc

SEQ ID NO: 20151 - DNA, 30 bp, Homo Sapiens
ggtttccgtagtgtagtggttatcacgttc

SEQ ID NO: 20152 - DNA, 32 bp, Homo Sapiens
ggtttccgtagtgtagtggttatcacgttcgc

SEQ ID NO: 20153 - DNA, 33 bp, Homo Sapiens
ggtttccgtagtgtagtggttatcacgttcgcc

SEQ ID NO: 20154 - DNA, 34 bp, Homo Sapiens
ggtttccgtagtgtagtggttatcacgttcgcct

SEQ ID NO: 20155 - DNA, 35 bp, Homo Sapiens
ggtttccgtagtgtagtggttatcacgttcgcctc

SEQ ID NO: 20156 - DNA, 44 bp, Homo Sapiens
ggtttccgtagtgtagtggttatcacgttcgcctcacacgcgaa

SEQ ID NO: 20157 - DNA, 19 bp, Homo Sapiens
ggttttcacccaggcggcc

SEQ ID NO: 20158 - DNA, 38 bp, Homo Sapiens
ggttttcacccaggcggcccgggttcgactcccggtgt

SEQ ID NO: 20159 - DNA, 39 bp, Homo Sapiens
ggttttcacccaggcggcccgggttcgactcccggtgtg

SEQ ID NO: 20160 - DNA, 40 bp, Homo Sapiens
ggttttcacccaggcggcccgggttcgactcccggtgtgg

SEQ ID NO: 20161 - DNA, 41 bp, Homo Sapiens
ggttttcacccaggcggcccgggttcgactcccggtgtggg

SEQ ID NO: 20162 - DNA, 42 bp, Homo Sapiens
ggttttcacccaggcggcccgggttcgactcccggtgtggga

SEQ ID NO: 20163 - DNA, 43 bp, Homo Sapiens
ggttttcacccaggcggcccgggttcgactcccggtgtgggaa

SEQ ID NO: 20164 - DNA, 44 bp, Homo Sapiens
ggttttcacccaggcggcccgggttcgactcccggtgtgggaac

SEQ ID NO: 20165 - DNA, 45 bp, Homo Sapiens
ggttttcacccaggcggcccgggttcgactcccggtgtgggaacc

SEQ ID NO: 20166 - DNA, 46 bp, Homo Sapiens
ggttttcacccaggcggcccgggttcgactcccggtgtgggaacca

SEQ ID NO: 20167 - DNA, 40 bp, Homo Sapiens
ggttttcacccaggtggcccgggttcgactcccggtatgg

SEQ ID NO: 20168 - DNA, 17 bp, Homo Sapiens
ggttttgcagtccttac

SEQ ID NO: 20169 - DNA, 18 bp, Homo Sapiens
ggttttgcagtccttacc

SEQ ID NO: 20170 - DNA, 19 bp, Homo Sapiens
ggttttgcagtccttacca

SEQ ID NO: 20171 - DNA, 18 bp, Homo Sapiens
ggtttttcatatcattgg

SEQ ID NO: 20172 - DNA, 19 bp, Homo Sapiens
ggtttttcatatcattggt

SEQ ID NO: 20173 - DNA, 20 bp, Homo Sapiens
ggtttttcatatcattggtc

SEQ ID NO: 20174 - DNA, 21 bp, Homo Sapiens
ggtttttcatatcattggtcg

SEQ ID NO: 20175 - DNA, 22 bp, Homo Sapiens
ggtttttcatatcattggtcgt

SEQ ID NO: 20176 - DNA, 23 bp, Homo Sapiens
ggtttttcatatcattggtcgtg

SEQ ID NO: 20177 - DNA, 24 bp, Homo Sapiens
ggtttttcatatcattggtcgtgg

SEQ ID NO: 20178 - DNA, 25 bp, Homo Sapiens
ggtttttcatatcattggtcgtggt

SEQ ID NO: 20179 - DNA, 26 bp, Homo Sapiens
ggtttttcatatcattggtcgtggtt

SEQ ID NO: 20180 - DNA, 27 bp, Homo Sapiens
ggtttttcatatcattggtcgtggttg

SEQ ID NO: 20181 - DNA, 28 bp, Homo Sapiens
ggtttttcatatcattggtcgtggttgt

SEQ ID NO: 20182 - DNA, 29 bp, Homo Sapiens
ggtttttcatatcattggtcgtggttgta

SEQ ID NO: 20183 - DNA, 30 bp, Homo Sapiens
ggtttttcatatcattggtcgtggttgtag

SEQ ID NO: 20184 - DNA, 31 bp, Homo Sapiens
ggtttttcatatcattggtcgtggttgtagt

SEQ ID NO: 20185 - DNA, 32 bp, Homo Sapiens
ggtttttcatatcattggtcgtggttgtagtc

SEQ ID NO: 20186 - DNA, 33 bp, Homo Sapiens
ggtttttcatatcattggtcgtggttgtagtcc

SEQ ID NO: 20187 - DNA, 34 bp, Homo Sapiens
ggtttttcatatcattggtcgtggttgtagtccg

SEQ ID NO: 20188 - DNA, 35 bp, Homo Sapiens
ggtttttcatatcattggtcgtggttgtagtccgt

SEQ ID NO: 20189 - DNA, 36 bp, Homo Sapiens
ggtttttcatatcattggtcgtggttgtagtccgtg

SEQ ID NO: 20190 - DNA, 37 bp, Homo Sapiens
ggtttttcatatcattggtcgtggttgtagtccgtgc

SEQ ID NO: 20191 - DNA, 38 bp, Homo Sapiens
ggtttttcatatcattggtcgtggttgtagtccgtgcg

SEQ ID NO: 20192 - DNA, 39 bp, Homo Sapiens
ggtttttcatatcattggtcgtggttgtagtccgtgcga

SEQ ID NO: 20193 - DNA, 40 bp, Homo Sapiens
ggtttttcatatcattggtcgtggttgtagtccgtgcgag

SEQ ID NO: 20194 - DNA, 41 bp, Homo Sapiens
ggtttttcatatcattggtcgtggttgtagtccgtgcgaga

SEQ ID NO: 20195 - DNA, 42 bp, Homo Sapiens
ggtttttcatatcattggtcgtggttgtagtccgtgcgagaa

SEQ ID NO: 20196 - DNA, 43 bp, Homo Sapiens
ggtttttcatatcattggtcgtggttgtagtccgtgcgagaat

SEQ ID NO: 20197 - DNA, 44 bp, Homo Sapiens
ggtttttcatatcattggtcgtggttgtagtccgtgcgagaata

SEQ ID NO: 20198 - DNA, 45 bp, Homo Sapiens
ggtttttcatatcattggtcgtggttgtagtccgtgcgagaatac

SEQ ID NO: 20199 - DNA, 46 bp, Homo Sapiens
ggtttttcatatcattggtcgtggttgtagtccgtgcgagaatacc

SEQ ID NO: 20200 - DNA, 47 bp, Homo Sapiens
ggtttttcatatcattggtcgtggttgtagtccgtgcgagaatacca

SEQ ID NO: 20201 - DNA, 18 bp, Homo Sapiens
gtaaaatggctgagtgaa

SEQ ID NO: 20202 - DNA, 27 bp, Homo Sapiens
gtaaaatggctgagtgaagcattggac

SEQ ID NO: 20203 - DNA, 28 bp, Homo Sapiens
gtaaaatggctgagtgaagcattggact

SEQ ID NO: 20204 - DNA, 30 bp, Homo Sapiens
gtaaaatggctgagtgaagcattggactgt

SEQ ID NO: 20205 - DNA, 31 bp, Homo Sapiens
gtaaaatggctgagtgaagcattggactgta

SEQ ID NO: 20206 - DNA, 33 bp, Homo Sapiens
gtaaacaggagatcctgggttcgaatcccagcg

SEQ ID NO: 20207 - DNA, 37 bp, Homo Sapiens
gtaaacaggagatcctgggttcgaatcccagcggggc

SEQ ID NO: 20208 - DNA, 38 bp, Homo Sapiens
gtaaacaggagatcctgggttcgaatcccagcggggcc

SEQ ID NO: 20209 - DNA, 39 bp, Homo Sapiens
gtaaacaggagatcctgggttcgaatcccagcggggcct

SEQ ID NO: 20210 - DNA, 40 bp, Homo Sapiens
gtaaacaggagatcctgggttcgaatcccagcggggcctc

SEQ ID NO: 20211 - DNA, 41 bp, Homo Sapiens
gtaaacaggagatcctgggttcgaatcccagcggggcctcc

SEQ ID NO: 20212 - DNA, 36 bp, Homo Sapiens
gtaaacaggagatcctgggttcgaatcccagcggtg

SEQ ID NO: 20213 - DNA, 37 bp, Homo Sapiens
gtaaacaggagatcctgggttcgaatcccagcggtgc

SEQ ID NO: 20214 - DNA, 39 bp, Homo Sapiens
gtaaacaggagatcctgggttcgaatcccagcggtgcct

SEQ ID NO: 20215 - DNA, 40 bp, Homo Sapiens
gtaaacaggagatcctgggttcgaatcccagcggtgcctc

SEQ ID NO: 20216 - DNA, 41 bp, Homo Sapiens
gtaaacaggagatcctgggttcgaatcccagcggtgcctcc

SEQ ID NO: 20217 - DNA, 16 bp, Homo Sapiens
gtaaaccaggggtcgc

SEQ ID NO: 20218 - DNA, 18 bp, Homo Sapiens
gtaaaccaggggtcgcga

SEQ ID NO: 20219 - DNA, 20 bp, Homo Sapiens
gtaaaccaggggtcgcgagt

SEQ ID NO: 20220 - DNA, 21 bp, Homo Sapiens
gtaaaccaggggtcgcgagtt

SEQ ID NO: 20221 - DNA, 22 bp, Homo Sapiens
gtaaaccaggggtcgcgagttc

SEQ ID NO: 20222 - DNA, 23 bp, Homo Sapiens
gtaaaccaggggtcgcgagttca

SEQ ID NO: 20223 - DNA, 32 bp, Homo Sapiens
gtaaaccaggggtcgcgagttcaaatctcgct

SEQ ID NO: 20224 - DNA, 34 bp, Homo Sapiens
gtaaaccaggggtcgcgagttcaaatctcgctgg

SEQ ID NO: 20225 - DNA, 20 bp, Homo Sapiens
gtaaaccgaagatcacgggt

SEQ ID NO: 20226 - DNA, 40 bp, Homo Sapiens
gtaaaccgaagatcacgggttcgaaccccgtccgtgcctc

SEQ ID NO: 20227 - DNA, 20 bp, Homo Sapiens
gtaaaccgaagatcgcgggt

SEQ ID NO: 20228 - DNA, 21 bp, Homo Sapiens
gtaaaccgaagatcgcgggtt

SEQ ID NO: 20229 - DNA, 40 bp, Homo Sapiens
gtaaaccgaagatcgcgggttcgaaccccgtccgtgcctc

SEQ ID NO: 20230 - DNA, 41 bp, Homo Sapiens
gtaaaccgaagatcgcgggttcgaaccccgtccgtgcctcc

SEQ ID NO: 20231 - DNA, 16 bp, Homo Sapiens
gtaaaccggagatgaa

SEQ ID NO: 20232 - DNA, 17 bp, Homo Sapiens
gtaaaccggagatgaaa

SEQ ID NO: 20233 - DNA, 18 bp, Homo Sapiens
gtaaaccggagatgaaaa

SEQ ID NO: 20234 - DNA, 19 bp, Homo Sapiens
gtaaaccggagatgaaaac

SEQ ID NO: 20235 - DNA, 20 bp, Homo Sapiens
gtaaaccggagatgaaaacc

SEQ ID NO: 20236 - DNA, 21 bp, Homo Sapiens
gtaaaccggagatgaaaacct

SEQ ID NO: 20237 - DNA, 22 bp, Homo Sapiens
gtaaaccggagatgaaaacctt

SEQ ID NO: 20238 - DNA, 30 bp, Homo Sapiens
gtaaaccggagatgaaaacctttttccaag

SEQ ID NO: 20239 - DNA, 31 bp, Homo Sapiens
gtaaaccggagatgaaaacctttttccaagg

SEQ ID NO: 20240 - DNA, 33 bp, Homo Sapiens
gtaaaccggagatgaaaacctttttccaaggac

SEQ ID NO: 20241 - DNA, 34 bp, Homo Sapiens
gtaaaccggagatgaaaacctttttccaaggaca

SEQ ID NO: 20242 - DNA, 35 bp, Homo Sapiens
gtaaaccggagatgaaaacctttttccaaggacac

SEQ ID NO: 20243 - DNA, 36 bp, Homo Sapiens
gtaaaccggagatgaaaacctttttccaaggacacc

SEQ ID NO: 20244 - DNA, 37 bp, Homo Sapiens
gtaaaccggagatgaaaacctttttccaaggacacca

SEQ ID NO: 20245 - DNA, 16 bp, Homo Sapiens
gtaaataataggagct

SEQ ID NO: 20246 - DNA, 17 bp, Homo Sapiens
gtaaataataggagctt

SEQ ID NO: 20247 - DNA, 18 bp, Homo Sapiens
gtaaataataggagctta

SEQ ID NO: 20248 - DNA, 19 bp, Homo Sapiens
gtaaataataggagcttaa

SEQ ID NO: 20249 - DNA, 20 bp, Homo Sapiens
gtaaataataggagcttaaa

SEQ ID NO: 20250 - DNA, 21 bp, Homo Sapiens
gtaaataataggagcttaaac

SEQ ID NO: 20251 - DNA, 22 bp, Homo Sapiens
gtaaataataggagcttaaacc

SEQ ID NO: 20252 - DNA, 23 bp, Homo Sapiens
gtaaataataggagcttaaaccc

SEQ ID NO: 20253 - DNA, 24 bp, Homo Sapiens
gtaaataataggagcttaaacccc

SEQ ID NO: 20254 - DNA, 25 bp, Homo Sapiens
gtaaataataggagcttaaaccccc

SEQ ID NO: 20255 - DNA, 26 bp, Homo Sapiens
gtaaataataggagcttaaaccccct

SEQ ID NO: 20256 - DNA, 28 bp, Homo Sapiens
gtaaataataggagcttaaaccccctta

SEQ ID NO: 20257 - DNA, 29 bp, Homo Sapiens
gtaaataataggagcttaaacccccttat

SEQ ID NO: 20258 - DNA, 34 bp, Homo Sapiens
gtaaataataggagcttaaacccccttatttcta

SEQ ID NO: 20259 - DNA, 36 bp, Homo Sapiens
gtaaataataggagcttaaacccccttatttctacc

SEQ ID NO: 20260 - DNA, 37 bp, Homo Sapiens
gtaaataataggagcttaaacccccttatttctacca

SEQ ID NO: 20261 - DNA, 32 bp, Homo Sapiens
gtaaatatagtttaaccaaaacatcagattgt

SEQ ID NO: 20262 - DNA, 33 bp, Homo Sapiens
gtaaatatagtttaaccaaaacatcagattgtg

SEQ ID NO: 20263 - DNA, 34 bp, Homo Sapiens
gtaaatatagtttaaccaaaacatcagattgtga

SEQ ID NO: 20264 - DNA, 36 bp, Homo Sapiens
gtaaatatagtttaaccaaaacatcagattgtgaat

SEQ ID NO: 20265 - DNA, 37 bp, Homo Sapiens
gtaaatatagtttaaccaaaacatcagattgtgaatc

SEQ ID NO: 20266 - DNA, 42 bp, Homo Sapiens
gtaaatatagtttaaccaaaacatcagattgtgaatctgaca

SEQ ID NO: 20267 - DNA, 39 bp, Homo Sapiens
gtaaatctaaagacaggggttaggcctctttttaccacc

SEQ ID NO: 20268 - DNA, 40 bp, Homo Sapiens
gtaaatctaaagacaggggttaggcctctttttaccacca

SEQ ID NO: 20269 - DNA, 16 bp, Homo Sapiens
gtaaggtcagctaaat

SEQ ID NO: 20270 - DNA, 17 bp, Homo Sapiens
gtaaggtcagctaaata

SEQ ID NO: 20271 - DNA, 18 bp, Homo Sapiens
gtaaggtcagctaaataa

SEQ ID NO: 20272 - DNA, 19 bp, Homo Sapiens
gtaaggtcagctaaataag

SEQ ID NO: 20273 - DNA, 20 bp, Homo Sapiens
gtaaggtcagctaaataagc

SEQ ID NO: 20274 - DNA, 21 bp, Homo Sapiens
gtaaggtcagctaaataagct

SEQ ID NO: 20275 - DNA, 23 bp, Homo Sapiens
gtaaggtcagctaaataagctat

SEQ ID NO: 20276 - DNA, 27 bp, Homo Sapiens
gtaaggtcagctaaataagctatcggg

SEQ ID NO: 20277 - DNA, 28 bp, Homo Sapiens
gtaaggtcagctaaataagctatcgggc

SEQ ID NO: 20278 - DNA, 29 bp, Homo Sapiens
gtaaggtcagctaaataagctatcgggcc

SEQ ID NO: 20279 - DNA, 30 bp, Homo Sapiens
gtaaggtcagctaaataagctatcgggccc

SEQ ID NO: 20280 - DNA, 31 bp, Homo Sapiens
gtaaggtcagctaaataagctatcgggccca

SEQ ID NO: 20281 - DNA, 32 bp, Homo Sapiens
gtaaggtcagctaaataagctatcgggcccat

SEQ ID NO: 20282 - DNA, 33 bp, Homo Sapiens
gtaaggtcagctaaataagctatcgggcccata

SEQ ID NO: 20283 - DNA, 35 bp, Homo Sapiens
gtaaggtcagctaaataagctatcgggcccatacc

SEQ ID NO: 20284 - DNA, 39 bp, Homo Sapiens
gtaaggtcagctaaataagctatcgggcccataccccga

SEQ ID NO: 20285 - DNA, 41 bp, Homo Sapiens
gtaaggtcagctaaataagctatcgggcccataccccgaaa

SEQ ID NO: 20286 - DNA, 24 bp, Homo Sapiens
gtaagttgcaatacttaatttctg

SEQ ID NO: 20287 - DNA, 25 bp, Homo Sapiens
gtaagttgcaatacttaatttctgc

SEQ ID NO: 20288 - DNA, 26 bp, Homo Sapiens
gtaagttgcaatacttaatttctgcc

SEQ ID NO: 20289 - DNA, 27 bp, Homo Sapiens
gtaagttgcaatacttaatttctgcca

SEQ ID NO: 20290 - DNA, 19 bp, Homo Sapiens
gtaatcgcataaaacttaa

SEQ ID NO: 20291 - DNA, 22 bp, Homo Sapiens
gtaatcgcataaaacttaaaac

SEQ ID NO: 20292 - DNA, 23 bp, Homo Sapiens
gtaatcgcataaaacttaaaact

SEQ ID NO: 20293 - DNA, 24 bp, Homo Sapiens
gtaatcgcataaaacttaaaactt

SEQ ID NO: 20294 - DNA, 25 bp, Homo Sapiens
gtaatcgcataaaacttaaaacttt

SEQ ID NO: 20295 - DNA, 35 bp, Homo Sapiens
gtaatcgcataaaacttaaaactttacagtcagag

SEQ ID NO: 20296 - DNA, 39 bp, Homo Sapiens
gtaatcgcataaaacttaaaactttacagtcagaggttc

SEQ ID NO: 20297 - DNA, 18 bp, Homo Sapiens
gtaatggtaagcactctg

SEQ ID NO: 20298 - DNA, 19 bp, Homo Sapiens
gtaatggtaagcactctgg

SEQ ID NO: 20299 - DNA, 20 bp, Homo Sapiens
gtaatggtaagcactctgga

SEQ ID NO: 20300 - DNA, 25 bp, Homo Sapiens
gtaatggtaagcactctggactctg

SEQ ID NO: 20301 - DNA, 34 bp, Homo Sapiens
gtaatggtaagcactctggactctgaatccagcg

SEQ ID NO: 20302 - DNA, 16 bp, Homo Sapiens
gtaatggtgagcactc

SEQ ID NO: 20303 - DNA, 17 bp, Homo Sapiens
gtaatggtgagcactct

SEQ ID NO: 20304 - DNA, 18 bp, Homo Sapiens
gtaatggtgagcactctg

SEQ ID NO: 20305 - DNA, 19 bp, Homo Sapiens
gtaatggtgagcactctgg

SEQ ID NO: 20306 - DNA, 20 bp, Homo Sapiens
gtaatggtgagcactctgga

SEQ ID NO: 20307 - DNA, 21 bp, Homo Sapiens
gtaatggtgagcactctggac

SEQ ID NO: 20308 - DNA, 22 bp, Homo Sapiens
gtaatggtgagcactctggact

SEQ ID NO: 20309 - DNA, 23 bp, Homo Sapiens
gtaatggtgagcactctggactc

SEQ ID NO: 20310 - DNA, 24 bp, Homo Sapiens
gtaatggtgagcactctggactct

SEQ ID NO: 20311 - DNA, 25 bp, Homo Sapiens
gtaatggtgagcactctggactctg

SEQ ID NO: 20312 - DNA, 29 bp, Homo Sapiens
gtaatggtgagcactctggactctgaatc

SEQ ID NO: 20313 - DNA, 30 bp, Homo Sapiens
gtaatggtgagcactctggactctgaatcc

SEQ ID NO: 20314 - DNA, 34 bp, Homo Sapiens
gtaatggtgagcactctggactctgaatccagcg

SEQ ID NO: 20315 - DNA, 16 bp, Homo Sapiens
gtaatggttagcactc

SEQ ID NO: 20316 - DNA, 17 bp, Homo Sapiens
gtaatggttagcactct

SEQ ID NO: 20317 - DNA, 18 bp, Homo Sapiens
gtaatggttagcactctg

SEQ ID NO: 20318 - DNA, 19 bp, Homo Sapiens
gtaatggttagcactctgg

SEQ ID NO: 20319 - DNA, 20 bp, Homo Sapiens
gtaatggttagcactctgga

SEQ ID NO: 20320 - DNA, 21 bp, Homo Sapiens
gtaatggttagcactctggac

SEQ ID NO: 20321 - DNA, 22 bp, Homo Sapiens
gtaatggttagcactctggact

SEQ ID NO: 20322 - DNA, 23 bp, Homo Sapiens
gtaatggttagcactctggactc

SEQ ID NO: 20323 - DNA, 24 bp, Homo Sapiens
gtaatggttagcactctggactct

SEQ ID NO: 20324 - DNA, 25 bp, Homo Sapiens
gtaatggttagcactctggactctg

SEQ ID NO: 20325 - DNA, 26 bp, Homo Sapiens
gtaatggttagcactctggactctga

SEQ ID NO: 20326 - DNA, 27 bp, Homo Sapiens
gtaatggttagcactctggactctgaa

SEQ ID NO: 20327 - DNA, 29 bp, Homo Sapiens
gtaatggttagcactctggactctgaatc

SEQ ID NO: 20328 - DNA, 30 bp, Homo Sapiens
gtaatggttagcactctggactctgaatcc

SEQ ID NO: 20329 - DNA, 34 bp, Homo Sapiens
gtaatggttagcactctggactctgaatccagcg

SEQ ID NO: 20330 - DNA, 41 bp, Homo Sapiens
gtaatggttagcactctggactctgaatccagcgatccgag

SEQ ID NO: 20331 - DNA, 42 bp, Homo Sapiens
gtaatggttagcactctggactctgaatccagcgatccgagt

SEQ ID NO: 20332 - DNA, 43 bp, Homo Sapiens
gtaatggttagcactctggactctgaatccagcgatccgagtt

SEQ ID NO: 20333 - DNA, 23 bp, Homo Sapiens
gtaatggttagcactctggactt

SEQ ID NO: 20334 - DNA, 25 bp, Homo Sapiens
gtaatggttagcactctggactttg

SEQ ID NO: 20335 - DNA, 20 bp, Homo Sapiens
gtaatggttagcactctggg

SEQ ID NO: 20336 - DNA, 22 bp, Homo Sapiens
gtaatggttagcactctgggct

SEQ ID NO: 20337 - DNA, 32 bp, Homo Sapiens
gtaccgttaacttccaattaactagttttgac

SEQ ID NO: 20338 - DNA, 33 bp, Homo Sapiens
gtaccgttaacttccaattaactagttttgaca

SEQ ID NO: 20339 - DNA, 35 bp, Homo Sapiens
gtaccgttaacttccaattaactagttttgacaac

SEQ ID NO: 20340 - DNA, 19 bp, Homo Sapiens
gtactctgcgttgtggccg

SEQ ID NO: 20341 - DNA, 17 bp, Homo Sapiens
gtagaattctcgcctcc

SEQ ID NO: 20342 - DNA, 18 bp, Homo Sapiens
gtagaattctcgcctccc

SEQ ID NO: 20343 - DNA, 20 bp, Homo Sapiens
gtagaattctcgcctcccac

SEQ ID NO: 20344 - DNA, 31 bp, Homo Sapiens
gtagaattctcgcctcccacgcgggagaccc

SEQ ID NO: 20345 - DNA, 33 bp, Homo Sapiens
gtagaattctcgcctcccacgcgggagacccgg

SEQ ID NO: 20346 - DNA, 34 bp, Homo Sapiens
gtagaattctcgcctcccacgcgggagacccggg

SEQ ID NO: 20347 - DNA, 35 bp, Homo Sapiens
gtagaattctcgcctcccacgcgggagacccgggt

SEQ ID NO: 20348 - DNA, 36 bp, Homo Sapiens
gtagaattctcgcctcccacgcgggagacccgggtt

SEQ ID NO: 20349 - DNA, 16 bp, Homo Sapiens
gtagaattctcgcctg

SEQ ID NO: 20350 - DNA, 17 bp, Homo Sapiens
gtagaattctcgcctgc

SEQ ID NO: 20351 - DNA, 18 bp, Homo Sapiens
gtagaattctcgcctgcc

SEQ ID NO: 20352 - DNA, 19 bp, Homo Sapiens
gtagaattctcgcctgcca

SEQ ID NO: 20353 - DNA, 20 bp, Homo Sapiens
gtagaattctcgcctgccac

SEQ ID NO: 20354 - DNA, 21 bp, Homo Sapiens
gtagaattctcgcctgccacg

SEQ ID NO: 20355 - DNA, 22 bp, Homo Sapiens
gtagaattctcgcctgccacgc

SEQ ID NO: 20356 - DNA, 23 bp, Homo Sapiens
gtagaattctcgcctgccacgcg

SEQ ID NO: 20357 - DNA, 24 bp, Homo Sapiens
gtagaattctcgcctgccacgcgg

SEQ ID NO: 20358 - DNA, 25 bp, Homo Sapiens
gtagaattctcgcctgccacgcggg

SEQ ID NO: 20359 - DNA, 26 bp, Homo Sapiens
gtagaattctcgcctgccacgcggga

SEQ ID NO: 20360 - DNA, 27 bp, Homo Sapiens
gtagaattctcgcctgccacgcgggag

SEQ ID NO: 20361 - DNA, 28 bp, Homo Sapiens
gtagaattctcgcctgccacgcgggagg

SEQ ID NO: 20362 - DNA, 29 bp, Homo Sapiens
gtagaattctcgcctgccacgcgggaggc

SEQ ID NO: 20363 - DNA, 30 bp, Homo Sapiens
gtagaattctcgcctgccacgcgggaggcc

SEQ ID NO: 20364 - DNA, 31 bp, Homo Sapiens
gtagaattctcgcctgccacgcgggaggccc

SEQ ID NO: 20365 - DNA, 32 bp, Homo Sapiens
gtagaattctcgcctgccacgcgggaggcccg

SEQ ID NO: 20366 - DNA, 33 bp, Homo Sapiens
gtagaattctcgcctgccacgcgggaggcccgg

SEQ ID NO: 20367 - DNA, 34 bp, Homo Sapiens
gtagaattctcgcctgccacgcgggaggcccggg

SEQ ID NO: 20368 - DNA, 35 bp, Homo Sapiens
gtagaattctcgcctgccacgcgggaggcccgggt

SEQ ID NO: 20369 - DNA, 36 bp, Homo Sapiens
gtagaattctcgcctgccacgcgggaggcccgggtt

SEQ ID NO: 20370 - DNA, 37 bp, Homo Sapiens
gtagaattctcgcctgccacgcgggaggcccgggttc

SEQ ID NO: 20371 - DNA, 41 bp, Homo Sapiens
gtagaattctcgcctgccacgcgggaggcccgggttcgatt

SEQ ID NO: 20372 - DNA, 43 bp, Homo Sapiens
gtagaattctcgcctgccacgcgggaggcccgggttcgattcc

SEQ ID NO: 20373 - DNA, 46 bp, Homo Sapiens
gtagaattctcgcctgccacgcgggaggcccgggttcgattcccgg

SEQ ID NO: 20374 - DNA, 47 bp, Homo Sapiens
gtagaattctcgcctgccacgcgggaggcccgggttcgattcccggc

SEQ ID NO: 20375 - DNA, 48 bp, Homo Sapiens
gtagaattctcgcctgccacgcgggaggcccgggttcgattcccggcc

SEQ ID NO: 20376 - DNA, 37 bp, Homo Sapiens
gtagaattctcgcctgccacgcgggaggcccgggttt

SEQ ID NO: 20377 - DNA, 16 bp, Homo Sapiens
gtagaattcttgcctg

SEQ ID NO: 20378 - DNA, 18 bp, Homo Sapiens
gtagagcatcagactttt

SEQ ID NO: 20379 - DNA, 16 bp, Homo Sapiens
gtagagcatgagaccc

SEQ ID NO: 20380 - DNA, 17 bp, Homo Sapiens
gtagagcatgagaccct

SEQ ID NO: 20381 - DNA, 23 bp, Homo Sapiens
gtagagcatgagacccttaatct

SEQ ID NO: 20382 - DNA, 24 bp, Homo Sapiens
gtagagcatgagacccttaatctc

SEQ ID NO: 20383 - DNA, 16 bp, Homo Sapiens
gtagagcatgagactc

SEQ ID NO: 20384 - DNA, 17 bp, Homo Sapiens
gtagagcatgagactct

SEQ ID NO: 20385 - DNA, 20 bp, Homo Sapiens
gtagagcatgagactcttaa

SEQ ID NO: 20386 - DNA, 22 bp, Homo Sapiens
gtagagcatgagactcttaatc

SEQ ID NO: 20387 - DNA, 23 bp, Homo Sapiens
gtagagcatgagactcttaatct

SEQ ID NO: 20388 - DNA, 24 bp, Homo Sapiens
gtagagcatgagactcttaatctc

SEQ ID NO: 20389 - DNA, 25 bp, Homo Sapiens
gtagagcatgagactcttaatctca

SEQ ID NO: 20390 - DNA, 31 bp, Homo Sapiens
gtagagcatgagactcttaatctcagggtcg

SEQ ID NO: 20391 - DNA, 32 bp, Homo Sapiens
gtagagcatgagactcttaatctcagggtcgt

SEQ ID NO: 20392 - DNA, 33 bp, Homo Sapiens
gtagagcatgagactcttaatctcagggtcgtg

SEQ ID NO: 20393 - DNA, 34 bp, Homo Sapiens
gtagagcatgagactcttaatctcagggtcgtgg

SEQ ID NO: 20394 - DNA, 35 bp, Homo Sapiens
gtagagcatgagactcttaatctcagggtcgtggg

SEQ ID NO: 20395 - DNA, 36 bp, Homo Sapiens
gtagagcatgagactcttaatctcagggtcgtgggt

SEQ ID NO: 20396 - DNA, 37 bp, Homo Sapiens
gtagagcatgagactcttaatctcagggtcgtgggtt

SEQ ID NO: 20397 - DNA, 39 bp, Homo Sapiens
gtagagcatgagactcttaatctcagggtcgtgggttcg

SEQ ID NO: 20398 - DNA, 16 bp, Homo Sapiens
gtagagcatgggactc

SEQ ID NO: 20399 - DNA, 17 bp, Homo Sapiens
gtagagcatgggactct

SEQ ID NO: 20400 - DNA, 18 bp, Homo Sapiens
gtagagcatgggactctt

SEQ ID NO: 20401 - DNA, 21 bp, Homo Sapiens
gtagagcatgggactcttaat

SEQ ID NO: 20402 - DNA, 22 bp, Homo Sapiens
gtagagcatgggactcttaatc

SEQ ID NO: 20403 - DNA, 23 bp, Homo Sapiens
gtagagcatgggactcttaatcc

SEQ ID NO: 20404 - DNA, 24 bp, Homo Sapiens
gtagagcatgggactcttaatccc

SEQ ID NO: 20405 - DNA, 25 bp, Homo Sapiens
gtagagcatgggactcttaatccca

SEQ ID NO: 20406 - DNA, 31 bp, Homo Sapiens
gtagagcatgggactcttaatcccagggtcg

SEQ ID NO: 20407 - DNA, 32 bp, Homo Sapiens
gtagagcatgggactcttaatcccagggtcgt

SEQ ID NO: 20408 - DNA, 33 bp, Homo Sapiens
gtagagcatgggactcttaatcccagggtcgtg

SEQ ID NO: 20409 - DNA, 34 bp, Homo Sapiens
gtagagcatgggactcttaatcccagggtcgtgg

SEQ ID NO: 20410 - DNA, 35 bp, Homo Sapiens
gtagagcatgggactcttaatcccagggtcgtggg

SEQ ID NO: 20411 - DNA, 37 bp, Homo Sapiens
gtagagcatgggactcttaatcccagggtcgtgggtt

SEQ ID NO: 20412 - DNA, 39 bp, Homo Sapiens
gtagagcatgggactcttaatcccagggtcgtgggttcg

SEQ ID NO: 20413 - DNA, 43 bp, Homo Sapiens
gtagagcatgggactcttaatcccagggtcgtgggttcgagcc

SEQ ID NO: 20414 - DNA, 45 bp, Homo Sapiens
gtagagcatgggactcttaatcccagggtcgtgggttcgagcccc

SEQ ID NO: 20415 - DNA, 24 bp, Homo Sapiens
gtagagcatgggactcttaatctc

SEQ ID NO: 20416 - DNA, 33 bp, Homo Sapiens
gtagagcatgggactcttaatctcagggtcgtg

SEQ ID NO: 20417 - DNA, 34 bp, Homo Sapiens
gtagagcatgggactcttaatctcagggtcgtgg

SEQ ID NO: 20418 - DNA, 37 bp, Homo Sapiens
gtagagcatgggactcttaatctcagggtcgtgggtt

SEQ ID NO: 20419 - DNA, 16 bp, Homo Sapiens
gtagagcatttgactg

SEQ ID NO: 20420 - DNA, 17 bp, Homo Sapiens
gtagagcatttgactgc

SEQ ID NO: 20421 - DNA, 24 bp, Homo Sapiens
gtagattgaagccagttgattagg

SEQ ID NO: 20422 - DNA, 18 bp, Homo Sapiens
gtagcggttatcacattc

SEQ ID NO: 20423 - DNA, 21 bp, Homo Sapiens
gtagcggttatcacattcgcc

SEQ ID NO: 20424 - DNA, 22 bp, Homo Sapiens
gtagcggttatcacattcgcct

SEQ ID NO: 20425 - DNA, 18 bp, Homo Sapiens
gtagcggttatcacgtct

SEQ ID NO: 20426 - DNA, 19 bp, Homo Sapiens
gtagcgtggccgagcggtc

SEQ ID NO: 20427 - DNA, 20 bp, Homo Sapiens
gtagcgtggccgagcggtct

SEQ ID NO: 20428 - DNA, 21 bp, Homo Sapiens
gtagcgtggccgagcggtcta

SEQ ID NO: 20429 - DNA, 23 bp, Homo Sapiens
gtagcgtggccgagcggtctaag

SEQ ID NO: 20430 - DNA, 25 bp, Homo Sapiens
gtagcgtggccgagcggtctaaggc

SEQ ID NO: 20431 - DNA, 25 bp, Homo Sapiens
gtagcgtggccgagtggtctaaggc

SEQ ID NO: 20432 - DNA, 17 bp, Homo Sapiens
gtagctcagtggtagag

SEQ ID NO: 20433 - DNA, 26 bp, Homo Sapiens
gtagctcagtggtagagcatttgact

SEQ ID NO: 20434 - DNA, 27 bp, Homo Sapiens
gtagctcagtggtagagcatttgactg

SEQ ID NO: 20435 - DNA, 28 bp, Homo Sapiens
gtagctcagtggtagagcatttgactgc

SEQ ID NO: 20436 - DNA, 26 bp, Homo Sapiens
gtagctcagtggtagagcgcatgctt

SEQ ID NO: 20437 - DNA, 21 bp, Homo Sapiens
gtagcttaacacaaagcaccc

SEQ ID NO: 20438 - DNA, 22 bp, Homo Sapiens
gtagcttaacacaaagcaccca

SEQ ID NO: 20439 - DNA, 24 bp, Homo Sapiens
gtagcttacctcctcaaagcaata

SEQ ID NO: 20440 - DNA, 28 bp, Homo Sapiens
gtagcttacctcctcaaagcaatacact

SEQ ID NO: 20441 - DNA, 31 bp, Homo Sapiens
gtaggatggggtgtgataggtggcacggaga

SEQ ID NO: 20442 - DNA, 18 bp, Homo Sapiens
gtaggtagcgcatcagtc

SEQ ID NO: 20443 - DNA, 19 bp, Homo Sapiens
gtaggtagcgcatcagtct

SEQ ID NO: 20444 - DNA, 16 bp, Homo Sapiens
gtagtccgtgcgagaa

SEQ ID NO: 20445 - DNA, 17 bp, Homo Sapiens
gtagtccgtgcgagaat

SEQ ID NO: 20446 - DNA, 18 bp, Homo Sapiens
gtagtccgtgcgagaata

SEQ ID NO: 20447 - DNA, 19 bp, Homo Sapiens
gtagtccgtgcgagaatac

SEQ ID NO: 20448 - DNA, 20 bp, Homo Sapiens
gtagtccgtgcgagaatacc

SEQ ID NO: 20449 - DNA, 21 bp, Homo Sapiens
gtagtccgtgcgagaatacca

SEQ ID NO: 20450 - DNA, 16 bp, Homo Sapiens
gtagtcgtggccgagt

SEQ ID NO: 20451 - DNA, 17 bp, Homo Sapiens
gtagtcgtggccgagtg

SEQ ID NO: 20452 - DNA, 18 bp, Homo Sapiens
gtagtcgtggccgagtgg

SEQ ID NO: 20453 - DNA, 19 bp, Homo Sapiens
gtagtcgtggccgagtggt

SEQ ID NO: 20454 - DNA, 20 bp, Homo Sapiens
gtagtcgtggccgagtggtt

SEQ ID NO: 20455 - DNA, 21 bp, Homo Sapiens
gtagtcgtggccgagtggtta

SEQ ID NO: 20456 - DNA, 22 bp, Homo Sapiens
gtagtcgtggccgagtggttaa

SEQ ID NO: 20457 - DNA, 23 bp, Homo Sapiens
gtagtcgtggccgagtggttaag

SEQ ID NO: 20458 - DNA, 24 bp, Homo Sapiens
gtagtcgtggccgagtggttaagg

SEQ ID NO: 20459 - DNA, 25 bp, Homo Sapiens
gtagtcgtggccgagtggttaaggc

SEQ ID NO: 20460 - DNA, 32 bp, Homo Sapiens
gtagtcgtggccgagtggttaaggcgatggac

SEQ ID NO: 20461 - DNA, 33 bp, Homo Sapiens
gtagtcgtggccgagtggttaaggcgatggact

SEQ ID NO: 20462 - DNA, 33 bp, Homo Sapiens
gtagtcgtggccgagtggttaaggtgatggact

SEQ ID NO: 20463 - DNA, 21 bp, Homo Sapiens
gtagtggtatcatgcaagatt

SEQ ID NO: 20464 - DNA, 22 bp, Homo Sapiens
gtagtggtatcatgcaagattc

SEQ ID NO: 20465 - DNA, 23 bp, Homo Sapiens
gtagtggtatcatgcaagattcc

SEQ ID NO: 20466 - DNA, 24 bp, Homo Sapiens
gtagtggtatcatgcaagattccc

SEQ ID NO: 20467 - DNA, 41 bp, Homo Sapiens
gtagtggtatcatgcaagattcccattcttgcgacccgggt

SEQ ID NO: 20468 - DNA, 21 bp, Homo Sapiens
gtagtggtcatcacgttcgcc

SEQ ID NO: 20469 - DNA, 22 bp, Homo Sapiens
gtagtggtcatcacgttcgcct

SEQ ID NO: 20470 - DNA, 21 bp, Homo Sapiens
gtagtggttatcacatctgct

SEQ ID NO: 20471 - DNA, 21 bp, Homo Sapiens
gtagtggttatcacattcgcc

SEQ ID NO: 20472 - DNA, 22 bp, Homo Sapiens
gtagtggttatcacattcgcct

SEQ ID NO: 20473 - DNA, 20 bp, Homo Sapiens
gtagtggttatcacgtctgc

SEQ ID NO: 20474 - DNA, 21 bp, Homo Sapiens
gtagtggttatcacgtctgct

SEQ ID NO: 20475 - DNA, 22 bp, Homo Sapiens
gtagtggttatcacgtctgctt

SEQ ID NO: 20476 - DNA, 23 bp, Homo Sapiens
gtagtggttatcacgtctgcttt

SEQ ID NO: 20477 - DNA, 25 bp, Homo Sapiens
gtagtggttatcacgtctgctttac

SEQ ID NO: 20478 - DNA, 26 bp, Homo Sapiens
gtagtggttatcacgtctgctttaca

SEQ ID NO: 20479 - DNA, 18 bp, Homo Sapiens
gtagtggttatcacgttc

SEQ ID NO: 20480 - DNA, 19 bp, Homo Sapiens
gtagtggttatcacgttcg

SEQ ID NO: 20481 - DNA, 20 bp, Homo Sapiens
gtagtggttatcacgttcgc

SEQ ID NO: 20482 - DNA, 21 bp, Homo Sapiens
gtagtggttatcacgttcgcc

SEQ ID NO: 20483 - DNA, 22 bp, Homo Sapiens
gtagtggttatcacgttcgcct

SEQ ID NO: 20484 - DNA, 23 bp, Homo Sapiens
gtagtggttatcacgttcgcctc

SEQ ID NO: 20485 - DNA, 24 bp, Homo Sapiens
gtagtggttatcacgttcgcctca

SEQ ID NO: 20486 - DNA, 25 bp, Homo Sapiens
gtagtggttatcacgttcgcctcac

SEQ ID NO: 20487 - DNA, 26 bp, Homo Sapiens
gtagtggttatcacgttcgcctcaca

SEQ ID NO: 20488 - DNA, 27 bp, Homo Sapiens
gtagtggttatcacgttcgcctcacac

SEQ ID NO: 20489 - DNA, 28 bp, Homo Sapiens
gtagtggttatcacgttcgcctcacacg

SEQ ID NO: 20490 - DNA, 16 bp, Homo Sapiens
gtagtgtagcggttat

SEQ ID NO: 20491 - DNA, 17 bp, Homo Sapiens
gtagtgtagcggttatc

SEQ ID NO: 20492 - DNA, 18 bp, Homo Sapiens
gtagtgtagcggttatca

SEQ ID NO: 20493 - DNA, 19 bp, Homo Sapiens
gtagtgtagcggttatcac

SEQ ID NO: 20494 - DNA, 22 bp, Homo Sapiens
gtagtgtagcggttatcacatt

SEQ ID NO: 20495 - DNA, 28 bp, Homo Sapiens
gtagtgtagcggttatcacattcgcctc

SEQ ID NO: 20496 - DNA, 17 bp, Homo Sapiens
gtagtgtagtggtcatc

SEQ ID NO: 20497 - DNA, 24 bp, Homo Sapiens
gtagtgtagtggtcatcacgttcg

SEQ ID NO: 20498 - DNA, 25 bp, Homo Sapiens
gtagtgtagtggtcatcacgttcgc

SEQ ID NO: 20499 - DNA, 26 bp, Homo Sapiens
gtagtgtagtggtcatcacgttcgcc

SEQ ID NO: 20500 - DNA, 27 bp, Homo Sapiens
gtagtgtagtggtcatcacgttcgcct

SEQ ID NO: 20501 - DNA, 16 bp, Homo Sapiens
gtagtgtagtggttat

SEQ ID NO: 20502 - DNA, 17 bp, Homo Sapiens
gtagtgtagtggttatc

SEQ ID NO: 20503 - DNA, 18 bp, Homo Sapiens
gtagtgtagtggttatca

SEQ ID NO: 20504 - DNA, 19 bp, Homo Sapiens
gtagtgtagtggttatcac

SEQ ID NO: 20505 - DNA, 24 bp, Homo Sapiens
gtagtgtagtggttatcacgttcg

SEQ ID NO: 20506 - DNA, 25 bp, Homo Sapiens
gtagtgtagtggttatcacgttcgc

SEQ ID NO: 20507 - DNA, 26 bp, Homo Sapiens
gtagtgtagtggttatcacgttcgcc

SEQ ID NO: 20508 - DNA, 27 bp, Homo Sapiens
gtagtgtagtggttatcacgttcgcct

SEQ ID NO: 20509 - DNA, 28 bp, Homo Sapiens
gtagtgtagtggttatcacgttcgcctc

SEQ ID NO: 20510 - DNA, 29 bp, Homo Sapiens
gtagtgtagtggttatcacgttcgcctca

SEQ ID NO: 20511 - DNA, 30 bp, Homo Sapiens
gtagtgtagtggttatcacgttcgcctcac

SEQ ID NO: 20512 - DNA, 31 bp, Homo Sapiens
gtagtgtagtggttatcacgttcgcctcaca

SEQ ID NO: 20513 - DNA, 33 bp, Homo Sapiens
gtagtgtagtggttatcacgttcgcctcacacg

SEQ ID NO: 20514 - DNA, 20 bp, Homo Sapiens
gtagttgaaatacaacgatg

SEQ ID NO: 20515 - DNA, 20 bp, Homo Sapiens
gtataaatagtaccgttaac

SEQ ID NO: 20516 - DNA, 21 bp, Homo Sapiens
gtataaatagtaccgttaact

SEQ ID NO: 20517 - DNA, 22 bp, Homo Sapiens
gtataaatagtaccgttaactt

SEQ ID NO: 20518 - DNA, 23 bp, Homo Sapiens
gtataaatagtaccgttaacttc

SEQ ID NO: 20519 - DNA, 24 bp, Homo Sapiens
gtataaatagtaccgttaacttcc

SEQ ID NO: 20520 - DNA, 28 bp, Homo Sapiens
gtatagctcaggggtagagcatttgact

SEQ ID NO: 20521 - DNA, 29 bp, Homo Sapiens
gtatagctcaggggtagagcatttgactg

SEQ ID NO: 20522 - DNA, 30 bp, Homo Sapiens
gtatagctcaggggtagagcatttgactgc

SEQ ID NO: 20523 - DNA, 31 bp, Homo Sapiens
gtatagctcaggggtagagcatttgactgca

SEQ ID NO: 20524 - DNA, 31 bp, Homo Sapiens
gtatagctcagtgggtagagcatttgactgc

SEQ ID NO: 20525 - DNA, 18 bp, Homo Sapiens
gtatagctcagtggtaga

SEQ ID NO: 20526 - DNA, 19 bp, Homo Sapiens
gtatagctcagtggtagag

SEQ ID NO: 20527 - DNA, 28 bp, Homo Sapiens
gtatagctcagtggtagagcatttgact

SEQ ID NO: 20528 - DNA, 29 bp, Homo Sapiens
gtatagctcagtggtagagcatttgactg

SEQ ID NO: 20529 - DNA, 30 bp, Homo Sapiens
gtatagctcagtggtagagcatttgactgc

SEQ ID NO: 20530 - DNA, 31 bp, Homo Sapiens
gtatagctcagtggtagagcatttgactgca

SEQ ID NO: 20531 - DNA, 30 bp, Homo Sapiens
gtatagcttagcggtagagcatttgactgc

SEQ ID NO: 20532 - DNA, 19 bp, Homo Sapiens
gtatagtggtaagcatagc

SEQ ID NO: 20533 - DNA, 23 bp, Homo Sapiens
gtatagtggtgagcatagctgcc

SEQ ID NO: 20534 - DNA, 24 bp, Homo Sapiens
gtatagtggtgagcatagctgcct

SEQ ID NO: 20535 - DNA, 27 bp, Homo Sapiens
gtatagtggtgagcatagctgccttcc

SEQ ID NO: 20536 - DNA, 44 bp, Homo Sapiens
gtatagtggtgagcatagctgccttccaagcagttgacccgggt

SEQ ID NO: 20537 - DNA, 19 bp, Homo Sapiens
gtatagtggtgagtatccc

SEQ ID NO: 20538 - DNA, 22 bp, Homo Sapiens
gtatagtggtgagtatccccgc

SEQ ID NO: 20539 - DNA, 19 bp, Homo Sapiens
gtatagtggttagcatagc

SEQ ID NO: 20540 - DNA, 21 bp, Homo Sapiens
gtatagtggttagcatagctg

SEQ ID NO: 20541 - DNA, 23 bp, Homo Sapiens
gtatagtggttagcatagctgcc

SEQ ID NO: 20542 - DNA, 24 bp, Homo Sapiens
gtatagtggttagcatagctgcct

SEQ ID NO: 20543 - DNA, 27 bp, Homo Sapiens
gtatagtggttagcatagctgccttcc

SEQ ID NO: 20544 - DNA, 16 bp, Homo Sapiens
gtatagtggttagtac

SEQ ID NO: 20545 - DNA, 17 bp, Homo Sapiens
gtatagtggttagtact

SEQ ID NO: 20546 - DNA, 18 bp, Homo Sapiens
gtatagtggttagtactc

SEQ ID NO: 20547 - DNA, 19 bp, Homo Sapiens
gtatagtggttagtactct

SEQ ID NO: 20548 - DNA, 20 bp, Homo Sapiens
gtatagtggttagtactctg

SEQ ID NO: 20549 - DNA, 21 bp, Homo Sapiens
gtatagtggttagtactctgc

SEQ ID NO: 20550 - DNA, 22 bp, Homo Sapiens
gtatagtggttagtactctgcg

SEQ ID NO: 20551 - DNA, 23 bp, Homo Sapiens
gtatagtggttagtactctgcgt

SEQ ID NO: 20552 - DNA, 24 bp, Homo Sapiens
gtatagtggttagtactctgcgtt

SEQ ID NO: 20553 - DNA, 25 bp, Homo Sapiens
gtatagtggttagtactctgcgttg

SEQ ID NO: 20554 - DNA, 26 bp, Homo Sapiens
gtatagtggttagtactctgcgttgt

SEQ ID NO: 20555 - DNA, 27 bp, Homo Sapiens
gtatagtggttagtactctgcgttgtg

SEQ ID NO: 20556 - DNA, 30 bp, Homo Sapiens
gtatagtggttagtactctgcgttgtggcc

SEQ ID NO: 20557 - DNA, 31 bp, Homo Sapiens
gtatagtggttagtactctgcgttgtggccg

SEQ ID NO: 20558 - DNA, 40 bp, Homo Sapiens
gtatagtggttagtactctgcgttgtggccgcagcaacct

SEQ ID NO: 20559 - DNA, 19 bp, Homo Sapiens
gtatagtggttagtatccc

SEQ ID NO: 20560 - DNA, 26 bp, Homo Sapiens
gtatagtggttagtatccccgcctgt

SEQ ID NO: 20561 - DNA, 16 bp, Homo Sapiens
gtatatagtttaaaca

SEQ ID NO: 20562 - DNA, 31 bp, Homo Sapiens
gtatatagtttaaacaaaacgaatgatttcg

SEQ ID NO: 20563 - DNA, 33 bp, Homo Sapiens
gtatatagtttaaacaaaacgaatgatttcgac

SEQ ID NO: 20564 - DNA, 34 bp, Homo Sapiens
gtatatagtttaaacaaaacgaatgatttcgact

SEQ ID NO: 20565 - DNA, 35 bp, Homo Sapiens
gtatatagtttaaacaaaacgaatgatttcgactc

SEQ ID NO: 20566 - DNA, 36 bp, Homo Sapiens
gtatatagtttaaacaaaacgaatgatttcgactca

SEQ ID NO: 20567 - DNA, 37 bp, Homo Sapiens
gtatatagtttaaacaaaacgaatgatttcgactcat

SEQ ID NO: 20568 - DNA, 38 bp, Homo Sapiens
gtatatagtttaaacaaaacgaatgatttcgactcatt

SEQ ID NO: 20569 - DNA, 39 bp, Homo Sapiens
gtatatagtttaaacaaaacgaatgatttcgactcatta

SEQ ID NO: 20570 - DNA, 18 bp, Homo Sapiens
gtatcatgcaagattccc

SEQ ID NO: 20571 - DNA, 19 bp, Homo Sapiens
gtatcatgcaagattccca

SEQ ID NO: 20572 - DNA, 32 bp, Homo Sapiens
gtatcatgcaagattcccattcttgcgacccg

SEQ ID NO: 20573 - DNA, 33 bp, Homo Sapiens
gtatcatgcaagattcccattcttgcgacccgg

SEQ ID NO: 20574 - DNA, 35 bp, Homo Sapiens
gtatcatgcaagattcccattcttgcgacccgggt

SEQ ID NO: 20575 - DNA, 16 bp, Homo Sapiens
gtatgaggccccgggt

SEQ ID NO: 20576 - DNA, 28 bp, Homo Sapiens
gtatgaggccccgggttcaatccccggc

SEQ ID NO: 20577 - DNA, 37 bp, Homo Sapiens
gtatgaggccccgggttcaatccccggcatctccacc

SEQ ID NO: 20578 - DNA, 38 bp, Homo Sapiens
gtatgaggccccgggttcaatccccggcatctccacca

SEQ ID NO: 20579 - DNA, 21 bp, Homo Sapiens
gtatgaggccccgggttcgat

SEQ ID NO: 20580 - DNA, 25 bp, Homo Sapiens
gtatgaggccccgggttcgatcccc

SEQ ID NO: 20581 - DNA, 27 bp, Homo Sapiens
gtatgaggccccgggttcgatccccgg

SEQ ID NO: 20582 - DNA, 28 bp, Homo Sapiens
gtatgaggccccgggttcgatccccggc

SEQ ID NO: 20583 - DNA, 31 bp, Homo Sapiens
gtatgaggccccgggttcgatccccggcatc

SEQ ID NO: 20584 - DNA, 32 bp, Homo Sapiens
gtatgaggccccgggttcgatccccggcatct

SEQ ID NO: 20585 - DNA, 33 bp, Homo Sapiens
gtatgaggccccgggttcgatccccggcatctc

SEQ ID NO: 20586 - DNA, 34 bp, Homo Sapiens
gtatgaggccccgggttcgatccccggcatctcc

SEQ ID NO: 20587 - DNA, 35 bp, Homo Sapiens
gtatgaggccccgggttcgatccccggcatctcca

SEQ ID NO: 20588 - DNA, 36 bp, Homo Sapiens
gtatgaggccccgggttcgatccccggcatctccac

SEQ ID NO: 20589 - DNA, 37 bp, Homo Sapiens
gtatgaggccccgggttcgatccccggcatctccacc

SEQ ID NO: 20590 - DNA, 38 bp, Homo Sapiens
gtatgaggccccgggttcgatccccggcatctccacca

SEQ ID NO: 20591 - DNA, 16 bp, Homo Sapiens
gtatgaggtcccgggt

SEQ ID NO: 20592 - DNA, 29 bp, Homo Sapiens
gtatgaggtcccgggttcgatccccggca

SEQ ID NO: 20593 - DNA, 32 bp, Homo Sapiens
gtatgaggtcccgggttcgatccccggcatct

SEQ ID NO: 20594 - DNA, 33 bp, Homo Sapiens
gtatgaggtcccgggttcgatccccggcatctc

SEQ ID NO: 20595 - DNA, 34 bp, Homo Sapiens
gtatgaggtcccgggttcgatccccggcatctcc

SEQ ID NO: 20596 - DNA, 35 bp, Homo Sapiens
gtatgaggtcccgggttcgatccccggcatctcca

SEQ ID NO: 20597 - DNA, 36 bp, Homo Sapiens
gtatgaggtcccgggttcgatccccggcatctccac

SEQ ID NO: 20598 - DNA, 37 bp, Homo Sapiens
gtatgaggtcccgggttcgatccccggcatctccacc

SEQ ID NO: 20599 - DNA, 16 bp, Homo Sapiens
gtatgattctcgcttc

SEQ ID NO: 20600 - DNA, 17 bp, Homo Sapiens
gtatgattctcgcttcg

SEQ ID NO: 20601 - DNA, 18 bp, Homo Sapiens
gtatgattctcgcttcgg

SEQ ID NO: 20602 - DNA, 16 bp, Homo Sapiens
gtatgattctcgcttt

SEQ ID NO: 20603 - DNA, 17 bp, Homo Sapiens
gtatgattctcgctttg

SEQ ID NO: 20604 - DNA, 18 bp, Homo Sapiens
gtatgattctcgctttgg

SEQ ID NO: 20605 - DNA, 34 bp, Homo Sapiens
gtatgattctcgctttgggtgcgagaggtcccgg

SEQ ID NO: 20606 - DNA, 16 bp, Homo Sapiens
gtatgattctcggttt

SEQ ID NO: 20607 - DNA, 17 bp, Homo Sapiens
gtatgattctcggtttg

SEQ ID NO: 20608 - DNA, 18 bp, Homo Sapiens
gtatgattctcggtttgg

SEQ ID NO: 20609 - DNA, 23 bp, Homo Sapiens
gtatgattctcggtttgggtccg

SEQ ID NO: 20610 - DNA, 26 bp, Homo Sapiens
gtatgattctcggtttgggtccgaga

SEQ ID NO: 20611 - DNA, 37 bp, Homo Sapiens
gtatggaggcgtgggttcgaatcccacttctgacacc

SEQ ID NO: 20612 - DNA, 30 bp, Homo Sapiens
gtattagaaaaaccatttcataactttgtc

SEQ ID NO: 20613 - DNA, 19 bp, Homo Sapiens
gtcaaagttaaattatagg

SEQ ID NO: 20614 - DNA, 20 bp, Homo Sapiens
gtcaaagttaaattataggc

SEQ ID NO: 20615 - DNA, 21 bp, Homo Sapiens
gtcaaagttaaattataggct

SEQ ID NO: 20616 - DNA, 22 bp, Homo Sapiens
gtcaaagttaaattataggcta

SEQ ID NO: 20617 - DNA, 23 bp, Homo Sapiens
gtcaaagttaaattataggctaa

SEQ ID NO: 20618 - DNA, 33 bp, Homo Sapiens
gtcaaagttaaattataggctaaatcctatata

SEQ ID NO: 20619 - DNA, 37 bp, Homo Sapiens
gtcaaagttaaattataggctaaatcctatatatctt

SEQ ID NO: 20620 - DNA, 38 bp, Homo Sapiens
gtcaaagttaaattataggctaaatcctatatatctta

SEQ ID NO: 20621 - DNA, 40 bp, Homo Sapiens
gtcaaagttaaattataggctaaatcctatatatcttacc

SEQ ID NO: 20622 - DNA, 35 bp, Homo Sapiens
gtcacgcgggagaccggggttcaattccccgacgg

SEQ ID NO: 20623 - DNA, 36 bp, Homo Sapiens
gtcacgcgggagaccggggttcaattccccgacggg

SEQ ID NO: 20624 - DNA, 37 bp, Homo Sapiens
gtcacgcgggagaccggggttcaattccccgacgggg

SEQ ID NO: 20625 - DNA, 40 bp, Homo Sapiens
gtcacgcgggagaccggggttcaattccccgacggggagc

SEQ ID NO: 20626 - DNA, 41 bp, Homo Sapiens
gtcacgcgggagaccggggttcaattccccgacggggagcc

SEQ ID NO: 20627 - DNA, 42 bp, Homo Sapiens
gtcacgcgggagaccggggttcaattccccgacggggagcca

SEQ ID NO: 20628 - DNA, 26 bp, Homo Sapiens
gtcacgcgggagaccggggttcgatt

SEQ ID NO: 20629 - DNA, 35 bp, Homo Sapiens
gtcacgcgggagaccggggttcgattccccgacgg

SEQ ID NO: 20630 - DNA, 36 bp, Homo Sapiens
gtcacgcgggagaccggggttcgattccccgacggg

SEQ ID NO: 20631 - DNA, 37 bp, Homo Sapiens
gtcacgcgggagaccggggttcgattccccgacgggg

SEQ ID NO: 20632 - DNA, 39 bp, Homo Sapiens
gtcacgcgggagaccggggttcgattccccgacggggag

SEQ ID NO: 20633 - DNA, 40 bp, Homo Sapiens
gtcacgcgggagaccggggttcgattccccgacggggagc

SEQ ID NO: 20634 - DNA, 41 bp, Homo Sapiens
gtcacgcgggagaccggggttcgattccccgacggggagcc

SEQ ID NO: 20635 - DNA, 42 bp, Homo Sapiens
gtcacgcgggagaccggggttcgattccccgacggggagcca

SEQ ID NO: 20636 - DNA, 16 bp, Homo Sapiens
gtcacggtggccgagt

SEQ ID NO: 20637 - DNA, 18 bp, Homo Sapiens
gtcacggtggccgagtgg

SEQ ID NO: 20638 - DNA, 19 bp, Homo Sapiens
gtcacggtggccgagtggt

SEQ ID NO: 20639 - DNA, 23 bp, Homo Sapiens
gtcacggtggccgagtggttaag

SEQ ID NO: 20640 - DNA, 24 bp, Homo Sapiens
gtcacggtggccgagtggttaagg

SEQ ID NO: 20641 - DNA, 25 bp, Homo Sapiens
gtcacggtggccgagtggttaaggc

SEQ ID NO: 20642 - DNA, 16 bp, Homo Sapiens
gtcacgtcggggtcac

SEQ ID NO: 20643 - DNA, 17 bp, Homo Sapiens
gtcacgtcggggtcacc

SEQ ID NO: 20644 - DNA, 18 bp, Homo Sapiens
gtcacgtcggggtcacca

SEQ ID NO: 20645 - DNA, 17 bp, Homo Sapiens
gtcagaggttcaattcc

SEQ ID NO: 20646 - DNA, 19 bp, Homo Sapiens
gtcagaggttcaattcctc

SEQ ID NO: 20647 - DNA, 20 bp, Homo Sapiens
gtcagaggttcaattcctct

SEQ ID NO: 20648 - DNA, 30 bp, Homo Sapiens
gtcagaggttcaattcctcttcttaacacc

SEQ ID NO: 20649 - DNA, 22 bp, Homo Sapiens
gtcagctaaataagctatcggg

SEQ ID NO: 20650 - DNA, 23 bp, Homo Sapiens
gtcagctaaataagctatcgggc

SEQ ID NO: 20651 - DNA, 24 bp, Homo Sapiens
gtcagctaaataagctatcgggcc

SEQ ID NO: 20652 - DNA, 25 bp, Homo Sapiens
gtcagctaaataagctatcgggccc

SEQ ID NO: 20653 - DNA, 26 bp, Homo Sapiens
gtcagctaaataagctatcgggccca

SEQ ID NO: 20654 - DNA, 27 bp, Homo Sapiens
gtcagctaaataagctatcgggcccat

SEQ ID NO: 20655 - DNA, 28 bp, Homo Sapiens
gtcagctaaataagctatcgggcccata

SEQ ID NO: 20656 - DNA, 29 bp, Homo Sapiens
gtcagctaaataagctatcgggcccatac

SEQ ID NO: 20657 - DNA, 30 bp, Homo Sapiens
gtcagctaaataagctatcgggcccatacc

SEQ ID NO: 20658 - DNA, 34 bp, Homo Sapiens
gtcagctaaataagctatcgggcccataccccga

SEQ ID NO: 20659 - DNA, 43 bp, Homo Sapiens
gtcagctaaataagctatcgggcccataccccgaaaatgttgg

SEQ ID NO: 20660 - DNA, 45 bp, Homo Sapiens
gtcagctaaataagctatcgggcccataccccgaaaatgttggtt

SEQ ID NO: 20661 - DNA, 16 bp, Homo Sapiens
gtcaggatggccgagc

SEQ ID NO: 20662 - DNA, 17 bp, Homo Sapiens
gtcaggatggccgagca

SEQ ID NO: 20663 - DNA, 17 bp, Homo Sapiens
gtcaggatggccgagcg

SEQ ID NO: 20664 - DNA, 18 bp, Homo Sapiens
gtcaggatggccgagcgg

SEQ ID NO: 20665 - DNA, 19 bp, Homo Sapiens
gtcaggatggccgagcggt

SEQ ID NO: 20666 - DNA, 20 bp, Homo Sapiens
gtcaggatggccgagcggtc

SEQ ID NO: 20667 - DNA, 21 bp, Homo Sapiens
gtcaggatggccgagcggtct

SEQ ID NO: 20668 - DNA, 22 bp, Homo Sapiens
gtcaggatggccgagcggtcta

SEQ ID NO: 20669 - DNA, 23 bp, Homo Sapiens
gtcaggatggccgagcggtctaa

SEQ ID NO: 20670 - DNA, 24 bp, Homo Sapiens
gtcaggatggccgagcggtctaag

SEQ ID NO: 20671 - DNA, 25 bp, Homo Sapiens
gtcaggatggccgagcggtctaagg

SEQ ID NO: 20672 - DNA, 26 bp, Homo Sapiens
gtcaggatggccgagcggtctaaggc

SEQ ID NO: 20673 - DNA, 29 bp, Homo Sapiens
gtcaggatggccgagcggtctaaggcgct

SEQ ID NO: 20674 - DNA, 30 bp, Homo Sapiens
gtcaggatggccgagcggtctaaggcgctg

SEQ ID NO: 20675 - DNA, 31 bp, Homo Sapiens
gtcaggatggccgagcggtctaaggcgctgc

SEQ ID NO: 20676 - DNA, 32 bp, Homo Sapiens
gtcaggatggccgagcggtctaaggcgctgcg

SEQ ID NO: 20677 - DNA, 33 bp, Homo Sapiens
gtcaggatggccgagcggtctaaggcgctgcgt

SEQ ID NO: 20678 - DNA, 34 bp, Homo Sapiens
gtcaggatggccgagcggtctaaggcgctgcgtt

SEQ ID NO: 20679 - DNA, 35 bp, Homo Sapiens
gtcaggatggccgagcggtctaaggcgctgcgttc

SEQ ID NO: 20680 - DNA, 36 bp, Homo Sapiens
gtcaggatggccgagcggtctaaggcgctgcgttca

SEQ ID NO: 20681 - DNA, 37 bp, Homo Sapiens
gtcaggatggccgagcggtctaaggcgctgcgttcag

SEQ ID NO: 20682 - DNA, 16 bp, Homo Sapiens
gtcaggatggccgagt

SEQ ID NO: 20683 - DNA, 17 bp, Homo Sapiens
gtcaggatggccgagtg

SEQ ID NO: 20684 - DNA, 18 bp, Homo Sapiens
gtcaggatggccgagtgg

SEQ ID NO: 20685 - DNA, 19 bp, Homo Sapiens
gtcaggatggccgagtggt

SEQ ID NO: 20686 - DNA, 20 bp, Homo Sapiens
gtcaggatggccgagtggtc

SEQ ID NO: 20687 - DNA, 21 bp, Homo Sapiens
gtcaggatggccgagtggtct

SEQ ID NO: 20688 - DNA, 22 bp, Homo Sapiens
gtcaggatggccgagtggtcta

SEQ ID NO: 20689 - DNA, 23 bp, Homo Sapiens
gtcaggatggccgagtggtctaa

SEQ ID NO: 20690 - DNA, 24 bp, Homo Sapiens
gtcaggatggccgagtggtctaag

SEQ ID NO: 20691 - DNA, 25 bp, Homo Sapiens
gtcaggatggccgagtggtctaagg

SEQ ID NO: 20692 - DNA, 26 bp, Homo Sapiens
gtcaggatggccgagtggtctaaggc

SEQ ID NO: 20693 - DNA, 29 bp, Homo Sapiens
gtcaggatggccgagtggtctaaggcgcc

SEQ ID NO: 20694 - DNA, 30 bp, Homo Sapiens
gtcaggatggccgagtggtctaaggcgcca

SEQ ID NO: 20695 - DNA, 32 bp, Homo Sapiens
gtcaggatggccgagtggtctaaggcgccaga

SEQ ID NO: 20696 - DNA, 33 bp, Homo Sapiens
gtcaggatggccgagtggtctaaggcgccagac

SEQ ID NO: 20697 - DNA, 34 bp, Homo Sapiens
gtcaggatggccgagtggtctaaggcgccagact

SEQ ID NO: 20698 - DNA, 35 bp, Homo Sapiens
gtcaggatggccgagtggtctaaggcgccagactc

SEQ ID NO: 20699 - DNA, 48 bp, Homo Sapiens
gtcaggatggccgagtggtctaaggcgccagactcaagttctggtctc

SEQ ID NO: 20700 - DNA, 18 bp, Homo Sapiens
gtcagtagagcatcagac

SEQ ID NO: 20701 - DNA, 27 bp, Homo Sapiens
gtcagtctcataatctgaaggtcctga

SEQ ID NO: 20702 - DNA, 26 bp, Homo Sapiens
gtcagtctcataatctgaaggtcgtg

SEQ ID NO: 20703 - DNA, 31 bp, Homo Sapiens
gtcagtctcataatctgaaggtcgtgagttc

SEQ ID NO: 20704 - DNA, 19 bp, Homo Sapiens
gtcatggaggccatggggt

SEQ ID NO: 20705 - DNA, 20 bp, Homo Sapiens
gtcatggaggccatggggtt

SEQ ID NO: 20706 - DNA, 21 bp, Homo Sapiens
gtcatggaggccatggggttg

SEQ ID NO: 20707 - DNA, 27 bp, Homo Sapiens
gtcatggaggccatggggttggcttga

SEQ ID NO: 20708 - DNA, 21 bp, Homo Sapiens
gtcatttcgatggcgtgggtt

SEQ ID NO: 20709 - DNA, 27 bp, Homo Sapiens
gtccagggttcaagtccctgttcgggc

SEQ ID NO: 20710 - DNA, 28 bp, Homo Sapiens
gtccagggttcaagtccctgttcgggcg

SEQ ID NO: 20711 - DNA, 29 bp, Homo Sapiens
gtccagggttcaagtccctgttcgggcgc

SEQ ID NO: 20712 - DNA, 30 bp, Homo Sapiens
gtccagggttcaagtccctgttcgggcgcc

SEQ ID NO: 20713 - DNA, 31 bp, Homo Sapiens
gtccagggttcaagtccctgttcgggcgcca

SEQ ID NO: 20714 - DNA, 34 bp, Homo Sapiens
gtcccacatggtctagcggttaggattcctggtt

SEQ ID NO: 20715 - DNA, 35 bp, Homo Sapiens
gtcccacatggtctagcggttaggattcctggttt

SEQ ID NO: 20716 - DNA, 17 bp, Homo Sapiens
gtcccaccagagtcgcc

SEQ ID NO: 20717 - DNA, 18 bp, Homo Sapiens
gtcccaccagagtcgcca

SEQ ID NO: 20718 - DNA, 17 bp, Homo Sapiens
gtcccacccggggtacc

SEQ ID NO: 20719 - DNA, 18 bp, Homo Sapiens
gtcccacccggggtacca

SEQ ID NO: 20720 - DNA, 17 bp, Homo Sapiens
gtcccacctggggtacc

SEQ ID NO: 20721 - DNA, 18 bp, Homo Sapiens
gtcccacctggggtgcca

SEQ ID NO: 20722 - DNA, 34 bp, Homo Sapiens
gtcccatatggtctagcggttaggattcctggtt

SEQ ID NO: 20723 - DNA, 16 bp, Homo Sapiens
gtcccatctggggtgc

SEQ ID NO: 20724 - DNA, 17 bp, Homo Sapiens
gtcccatctggggtgcc

SEQ ID NO: 20725 - DNA, 18 bp, Homo Sapiens
gtcccatctggggtgcca

SEQ ID NO: 20726 - DNA, 17 bp, Homo Sapiens
gtcccatctgggtcgcc

SEQ ID NO: 20727 - DNA, 18 bp, Homo Sapiens
gtcccatctgggtcgcca

SEQ ID NO: 20728 - DNA, 28 bp, Homo Sapiens
gtcccatggtgtaatggttagcactctg

SEQ ID NO: 20729 - DNA, 29 bp, Homo Sapiens
gtcccatggtgtaatggttagcactctgg

SEQ ID NO: 20730 - DNA, 31 bp, Homo Sapiens
gtcccatggtgtaatggttagcactctggac

SEQ ID NO: 20731 - DNA, 32 bp, Homo Sapiens
gtcccatggtgtaatggttagcactctggact

SEQ ID NO: 20732 - DNA, 35 bp, Homo Sapiens
gtcccatggtgtaatggttagcactctggactttg

SEQ ID NO: 20733 - DNA, 40 bp, Homo Sapiens
gtcccatggtgtaatggttagcactctggactttgaatcc

SEQ ID NO: 20734 - DNA, 16 bp, Homo Sapiens
gtcccattggtctagc

SEQ ID NO: 20735 - DNA, 17 bp, Homo Sapiens
gtcccattggtctagcc

SEQ ID NO: 20736 - DNA, 18 bp, Homo Sapiens
gtcccattggtctagcca

SEQ ID NO: 20737 - DNA, 18 bp, Homo Sapiens
gtccccggttcaaatccg

SEQ ID NO: 20738 - DNA, 19 bp, Homo Sapiens
gtccccggttcaaatccgg

SEQ ID NO: 20739 - DNA, 30 bp, Homo Sapiens
gtccccggttcaaatccgggtgccccctcc

SEQ ID NO: 20740 - DNA, 17 bp, Homo Sapiens
gtccccggttcgaaacc

SEQ ID NO: 20741 - DNA, 21 bp, Homo Sapiens
gtccccggttcgatcccgggc

SEQ ID NO: 20742 - DNA, 16 bp, Homo Sapiens
gtcccggcagagatgc

SEQ ID NO: 20743 - DNA, 17 bp, Homo Sapiens
gtcccggcagagatgcc

SEQ ID NO: 20744 - DNA, 18 bp, Homo Sapiens
gtcccggcagagatgcca

SEQ ID NO: 20745 - DNA, 16 bp, Homo Sapiens
gtcccggcggagtcgc

SEQ ID NO: 20746 - DNA, 17 bp, Homo Sapiens
gtcccggcggagtcgcc

SEQ ID NO: 20747 - DNA, 18 bp, Homo Sapiens
gtcccggcggagtcgcca

SEQ ID NO: 20748 - DNA, 18 bp, Homo Sapiens
gtcccgggttcaaatccc

SEQ ID NO: 20749 - DNA, 19 bp, Homo Sapiens
gtcccgggttcaaatcccg

SEQ ID NO: 20750 - DNA, 22 bp, Homo Sapiens
gtcccgggttcaaatcccggac

SEQ ID NO: 20751 - DNA, 17 bp, Homo Sapiens
gtcccgggttcgatccc

SEQ ID NO: 20752 - DNA, 18 bp, Homo Sapiens
gtcccgggttcgatcccc

SEQ ID NO: 20753 - DNA, 30 bp, Homo Sapiens
gtcccgggttcgatccccagcatctccacc

SEQ ID NO: 20754 - DNA, 32 bp, Homo Sapiens
gtccctggtggtctagtggttaggattcggcg

SEQ ID NO: 20755 - DNA, 33 bp, Homo Sapiens
gtccctggtggtctagtggttaggattcggcgc

SEQ ID NO: 20756 - DNA, 34 bp, Homo Sapiens
gtccctggtggtctagtggttaggattcggcgct

SEQ ID NO: 20757 - DNA, 35 bp, Homo Sapiens
gtccctggtggtctagtggttaggattcggcgctc

SEQ ID NO: 20758 - DNA, 36 bp, Homo Sapiens
gtccctggtggtctagtggttaggattcggcgctct

SEQ ID NO: 20759 - DNA, 28 bp, Homo Sapiens
gtccctggttcaatcccgggtttcggca

SEQ ID NO: 20760 - DNA, 17 bp, Homo Sapiens
gtccctgtccaggcgcc

SEQ ID NO: 20761 - DNA, 18 bp, Homo Sapiens
gtccctgtccaggcgcca

SEQ ID NO: 20762 - DNA, 17 bp, Homo Sapiens
gtccctgttcaggcacc

SEQ ID NO: 20763 - DNA, 16 bp, Homo Sapiens
gtccctgttcgggcgc

SEQ ID NO: 20764 - DNA, 17 bp, Homo Sapiens
gtccctgttcgggcgcc

SEQ ID NO: 20765 - DNA, 18 bp, Homo Sapiens
gtccctgttcgggcgcca

SEQ ID NO: 20766 - DNA, 16 bp, Homo Sapiens
gtcccttcgtggtcgc

SEQ ID NO: 20767 - DNA, 17 bp, Homo Sapiens
gtcccttcgtggtcgcc

SEQ ID NO: 20768 - DNA, 18 bp, Homo Sapiens
gtcccttcgtggtcgcca

SEQ ID NO: 20769 - DNA, 19 bp, Homo Sapiens
gtccgcgtgggttcgaacc

SEQ ID NO: 20770 - DNA, 22 bp, Homo Sapiens
gtccgcgtgggttcgaacccca

SEQ ID NO: 20771 - DNA, 24 bp, Homo Sapiens
gtccgcgtgggttcgaaccccact

SEQ ID NO: 20772 - DNA, 26 bp, Homo Sapiens
gtccgcgtgggttcgaaccccactcc

SEQ ID NO: 20773 - DNA, 27 bp, Homo Sapiens
gtccgcgtgggttcgaaccccactcct

SEQ ID NO: 20774 - DNA, 28 bp, Homo Sapiens
gtccgcgtgggttcgaaccccactcctg

SEQ ID NO: 20775 - DNA, 29 bp, Homo Sapiens
gtccgcgtgggttcgaaccccactcctgg

SEQ ID NO: 20776 - DNA, 30 bp, Homo Sapiens
gtccgcgtgggttcgaaccccactcctggt

SEQ ID NO: 20777 - DNA, 31 bp, Homo Sapiens
gtccgcgtgggttcgaaccccactcctggta

SEQ ID NO: 20778 - DNA, 32 bp, Homo Sapiens
gtccgcgtgggttcgaaccccactcctggtac

SEQ ID NO: 20779 - DNA, 33 bp, Homo Sapiens
gtccgcgtgggttcgaaccccactcctggtacc

SEQ ID NO: 20780 - DNA, 34 bp, Homo Sapiens
gtccgcgtgggttcgaaccccactcctggtacca

SEQ ID NO: 20781 - DNA, 16 bp, Homo Sapiens
gtccgtgcgagaatac

SEQ ID NO: 20782 - DNA, 17 bp, Homo Sapiens
gtccgtgcgagaatacc

SEQ ID NO: 20783 - DNA, 18 bp, Homo Sapiens
gtccgtgcgagaatacca

SEQ ID NO: 20784 - DNA, 32 bp, Homo Sapiens
gtcctcgttagtatagtggtgagtatccccgc

SEQ ID NO: 20785 - DNA, 17 bp, Homo Sapiens
gtcctgagttcgaacct

SEQ ID NO: 20786 - DNA, 27 bp, Homo Sapiens
gtcctgagttcgaacctcagagggggc

SEQ ID NO: 20787 - DNA, 28 bp, Homo Sapiens
gtcctgagttcgaacctcagagggggca

SEQ ID NO: 20788 - DNA, 31 bp, Homo Sapiens
gtcctgagttcgaacctcagagggggcacca

SEQ ID NO: 20789 - DNA, 16 bp, Homo Sapiens
gtcctgccgcggtcgc

SEQ ID NO: 20790 - DNA, 17 bp, Homo Sapiens
gtcctgccgcggtcgcc

SEQ ID NO: 20791 - DNA, 18 bp, Homo Sapiens
gtcctgccgcggtcgcca

SEQ ID NO: 20792 - DNA, 16 bp, Homo Sapiens
gtcctgggttcgagcc

SEQ ID NO: 20793 - DNA, 17 bp, Homo Sapiens
gtcctgggttcgagccc

SEQ ID NO: 20794 - DNA, 18 bp, Homo Sapiens
gtcctgggttcgagcccc

SEQ ID NO: 20795 - DNA, 27 bp, Homo Sapiens
gtcctgggttcgagccccagtggaacc

SEQ ID NO: 20796 - DNA, 30 bp, Homo Sapiens
gtcctgggttcgagccccagtggaaccacc

SEQ ID NO: 20797 - DNA, 31 bp, Homo Sapiens
gtcctgggttcgagccccagtggaaccacca

SEQ ID NO: 20798 - DNA, 16 bp, Homo Sapiens
gtccttgtagtataaa

SEQ ID NO: 20799 - DNA, 17 bp, Homo Sapiens
gtccttgtagtataaac

SEQ ID NO: 20800 - DNA, 18 bp, Homo Sapiens
gtccttgtagtataaact

SEQ ID NO: 20801 - DNA, 19 bp, Homo Sapiens
gtccttgtagtataaacta

SEQ ID NO: 20802 - DNA, 20 bp, Homo Sapiens
gtccttgtagtataaactaa

SEQ ID NO: 20803 - DNA, 21 bp, Homo Sapiens
gtccttgtagtataaactaat

SEQ ID NO: 20804 - DNA, 22 bp, Homo Sapiens
gtccttgtagtataaactaata

SEQ ID NO: 20805 - DNA, 23 bp, Homo Sapiens
gtccttgtagtataaactaatac

SEQ ID NO: 20806 - DNA, 24 bp, Homo Sapiens
gtccttgtagtataaactaataca

SEQ ID NO: 20807 - DNA, 25 bp, Homo Sapiens
gtccttgtagtataaactaatacac

SEQ ID NO: 20808 - DNA, 26 bp, Homo Sapiens
gtccttgtagtataaactaatacacc

SEQ ID NO: 20809 - DNA, 27 bp, Homo Sapiens
gtccttgtagtataaactaatacacca

SEQ ID NO: 20810 - DNA, 28 bp, Homo Sapiens
gtccttgtagtataaactaatacaccag

SEQ ID NO: 20811 - DNA, 29 bp, Homo Sapiens
gtccttgtagtataaactaatacaccagt

SEQ ID NO: 20812 - DNA, 30 bp, Homo Sapiens
gtccttgtagtataaactaatacaccagtc

SEQ ID NO: 20813 - DNA, 31 bp, Homo Sapiens
gtccttgtagtataaactaatacaccagtct

SEQ ID NO: 20814 - DNA, 33 bp, Homo Sapiens
gtccttgtagtataaactaatacaccagtcttg

SEQ ID NO: 20815 - DNA, 34 bp, Homo Sapiens
gtccttgtagtataaactaatacaccagtcttgt

SEQ ID NO: 20816 - DNA, 38 bp, Homo Sapiens
gtccttgtagtataaactaatacaccagtcttgtaaac

SEQ ID NO: 20817 - DNA, 39 bp, Homo Sapiens
gtccttgtagtataaactaatacaccagtcttgtaaacc

SEQ ID NO: 20818 - DNA, 40 bp, Homo Sapiens
gtccttgtagtataaactaatacaccagtcttgtaaaccg

SEQ ID NO: 20819 - DNA, 41 bp, Homo Sapiens
gtccttgtagtataaactaatacaccagtcttgtaaaccgg

SEQ ID NO: 20820 - DNA, 44 bp, Homo Sapiens
gtccttgtagtataaactaatacaccagtcttgtaaaccggaga

SEQ ID NO: 20821 - DNA, 16 bp, Homo Sapiens
gtcgatagagcatgag

SEQ ID NO: 20822 - DNA, 16 bp, Homo Sapiens
gtcgatggatcgaaac

SEQ ID NO: 20823 - DNA, 17 bp, Homo Sapiens
gtcgatggatcgaaacc

SEQ ID NO: 20824 - DNA, 18 bp, Homo Sapiens
gtcgatggatcgaaacca

SEQ ID NO: 20825 - DNA, 30 bp, Homo Sapiens
gtcgatggatcgaaaccatcctctgctacc

SEQ ID NO: 20826 - DNA, 23 bp, Homo Sapiens
gtcgattccccgacggggagcca

SEQ ID NO: 20827 - DNA, 16 bp, Homo Sapiens
gtcgcagtctcccctg

SEQ ID NO: 20828 - DNA, 24 bp, Homo Sapiens
gtcgcagtctcccctggaggcgtg

SEQ ID NO: 20829 - DNA, 16 bp, Homo Sapiens
gtcgcgagttcaaatc

SEQ ID NO: 20830 - DNA, 18 bp, Homo Sapiens
gtcgcgagttcaaatctc

SEQ ID NO: 20831 - DNA, 26 bp, Homo Sapiens
gtcgcgagttcaaatctcgctggggc

SEQ ID NO: 20832 - DNA, 27 bp, Homo Sapiens
gtcgcgagttcaaatctcgctggggcc

SEQ ID NO: 20833 - DNA, 29 bp, Homo Sapiens
gtcgcgagttcaaatctcgctggggcctc

SEQ ID NO: 20834 - DNA, 30 bp, Homo Sapiens
gtcgcgagttcaaatctcgctggggcctcc

SEQ ID NO: 20835 - DNA, 29 bp, Homo Sapiens
gtcgcgagttcaattctcgctggggcctc

SEQ ID NO: 20836 - DNA, 29 bp, Homo Sapiens
gtcgcgagttcgatcctcgctggggcctc

SEQ ID NO: 20837 - DNA, 30 bp, Homo Sapiens
gtcgcgagttcgatcctcgctggggcctcc

SEQ ID NO: 20838 - DNA, 27 bp, Homo Sapiens
gtcgcgggttcgaaccccgtacgggcc

SEQ ID NO: 20839 - DNA, 28 bp, Homo Sapiens
gtcgcgggttcgaaccccgtacgggcca

SEQ ID NO: 20840 - DNA, 30 bp, Homo Sapiens
gtcgcgggttcgaaccccgtacgggccacc

SEQ ID NO: 20841 - DNA, 26 bp, Homo Sapiens
gtcgcgggttcgatccccgtacgggc

SEQ ID NO: 20842 - DNA, 27 bp, Homo Sapiens
gtcgcgggttcgatccccgtacgggcc

SEQ ID NO: 20843 - DNA, 28 bp, Homo Sapiens
gtcgcgggttcgatccccgtacgggcca

SEQ ID NO: 20844 - DNA, 29 bp, Homo Sapiens
gtcgcgggttcgatccccgtacgggccac

SEQ ID NO: 20845 - DNA, 30 bp, Homo Sapiens
gtcgcgggttcgatccccgtacgggccacc

SEQ ID NO: 20846 - DNA, 31 bp, Homo Sapiens
gtcgcgggttcgatccccgtacgggccacca

SEQ ID NO: 20847 - DNA, 30 bp, Homo Sapiens
gtcgctggttcgaatccggctcgaaggacc

SEQ ID NO: 20848 - DNA, 31 bp, Homo Sapiens
gtcgctggttcgaatccggctcgaaggacca

SEQ ID NO: 20849 - DNA, 29 bp, Homo Sapiens
gtcgctggttcgaatccggctcggaggac

SEQ ID NO: 20850 - DNA, 30 bp, Homo Sapiens
gtcgctggttcgaatccggctcggaggacc

SEQ ID NO: 20851 - DNA, 30 bp, Homo Sapiens
gtcgctggttcgattccagctcgaaggacc

SEQ ID NO: 20852 - DNA, 20 bp, Homo Sapiens
gtcgctggttcgattccggc

SEQ ID NO: 20853 - DNA, 29 bp, Homo Sapiens
gtcgctggttcgattccggctcgaaggac

SEQ ID NO: 20854 - DNA, 30 bp, Homo Sapiens
gtcgctggttcgattccggctcgaaggacc

SEQ ID NO: 20855 - DNA, 31 bp, Homo Sapiens
gtcgctggttcgattccggctcgaaggacca

SEQ ID NO: 20856 - DNA, 17 bp, Homo Sapiens
gtcggatcccagctctc

SEQ ID NO: 20857 - DNA, 18 bp, Homo Sapiens
gtcggtagagcataagac

SEQ ID NO: 20858 - DNA, 19 bp, Homo Sapiens
gtcggtagagcataagact

SEQ ID NO: 20859 - DNA, 16 bp, Homo Sapiens
gtcggtagagcatcag

SEQ ID NO: 20860 - DNA, 17 bp, Homo Sapiens
gtcggtagagcatcaga

SEQ ID NO: 20861 - DNA, 18 bp, Homo Sapiens
gtcggtagagcatcagac

SEQ ID NO: 20862 - DNA, 19 bp, Homo Sapiens
gtcggtagagcatcagact

SEQ ID NO: 20863 - DNA, 20 bp, Homo Sapiens
gtcggtagagcatcagactt

SEQ ID NO: 20864 - DNA, 21 bp, Homo Sapiens
gtcggtagagcatcagacttt

SEQ ID NO: 20865 - DNA, 22 bp, Homo Sapiens
gtcggtagagcatcagactttt

SEQ ID NO: 20866 - DNA, 29 bp, Homo Sapiens
gtcggtagagcatcagacttttaatctga

SEQ ID NO: 20867 - DNA, 16 bp, Homo Sapiens
gtcggtagagcatgag

SEQ ID NO: 20868 - DNA, 17 bp, Homo Sapiens
gtcggtagagcatgaga

SEQ ID NO: 20869 - DNA, 18 bp, Homo Sapiens
gtcggtagagcatgagac

SEQ ID NO: 20870 - DNA, 19 bp, Homo Sapiens
gtcggtagagcatgagacc

SEQ ID NO: 20871 - DNA, 20 bp, Homo Sapiens
gtcggtagagcatgagaccc

SEQ ID NO: 20872 - DNA, 21 bp, Homo Sapiens
gtcggtagagcatgagaccct

SEQ ID NO: 20873 - DNA, 24 bp, Homo Sapiens
gtcggtagagcatgagacccttaa

SEQ ID NO: 20874 - DNA, 25 bp, Homo Sapiens
gtcggtagagcatgagacccttaat

SEQ ID NO: 20875 - DNA, 26 bp, Homo Sapiens
gtcggtagagcatgagacccttaatc

SEQ ID NO: 20876 - DNA, 27 bp, Homo Sapiens
gtcggtagagcatgagacccttaatct

SEQ ID NO: 20877 - DNA, 28 bp, Homo Sapiens
gtcggtagagcatgagacccttaatctc

SEQ ID NO: 20878 - DNA, 19 bp, Homo Sapiens
gtcggtagagcatgagact

SEQ ID NO: 20879 - DNA, 20 bp, Homo Sapiens
gtcggtagagcatgagactc

SEQ ID NO: 20880 - DNA, 21 bp, Homo Sapiens
gtcggtagagcatgagactct

SEQ ID NO: 20881 - DNA, 22 bp, Homo Sapiens
gtcggtagagcatgagactctt

SEQ ID NO: 20882 - DNA, 23 bp, Homo Sapiens
gtcggtagagcatgagactctta

SEQ ID NO: 20883 - DNA, 24 bp, Homo Sapiens
gtcggtagagcatgagactcttaa

SEQ ID NO: 20884 - DNA, 25 bp, Homo Sapiens
gtcggtagagcatgagactcttaat

SEQ ID NO: 20885 - DNA, 26 bp, Homo Sapiens
gtcggtagagcatgagactcttaatc

SEQ ID NO: 20886 - DNA, 27 bp, Homo Sapiens
gtcggtagagcatgagactcttaatct

SEQ ID NO: 20887 - DNA, 28 bp, Homo Sapiens
gtcggtagagcatgagactcttaatctc

SEQ ID NO: 20888 - DNA, 29 bp, Homo Sapiens
gtcggtagagcatgagactcttaatctca

SEQ ID NO: 20889 - DNA, 36 bp, Homo Sapiens
gtcggtagagcatgagactcttaatctcagggtcgt

SEQ ID NO: 20890 - DNA, 37 bp, Homo Sapiens
gtcggtagagcatgagactcttaatctcagggtcgtg

SEQ ID NO: 20891 - DNA, 38 bp, Homo Sapiens
gtcggtagagcatgagactcttaatctcagggtcgtgg

SEQ ID NO: 20892 - DNA, 39 bp, Homo Sapiens
gtcggtagagcatgagactcttaatctcagggtcgtggg

SEQ ID NO: 20893 - DNA, 40 bp, Homo Sapiens
gtcggtagagcatgagactcttaatctcagggtcgtgggt

SEQ ID NO: 20894 - DNA, 41 bp, Homo Sapiens
gtcggtagagcatgagactcttaatctcagggtcgtgggtt

SEQ ID NO: 20895 - DNA, 42 bp, Homo Sapiens
gtcggtagagcatgagactcttaatctcagggtcgtgggttc

SEQ ID NO: 20896 - DNA, 43 bp, Homo Sapiens
gtcggtagagcatgagactcttaatctcagggtcgtgggttcg

SEQ ID NO: 20897 - DNA, 16 bp, Homo Sapiens
gtcggtagagcatggg

SEQ ID NO: 20898 - DNA, 17 bp, Homo Sapiens
gtcggtagagcatggga

SEQ ID NO: 20899 - DNA, 18 bp, Homo Sapiens
gtcggtagagcatgggac

SEQ ID NO: 20900 - DNA, 19 bp, Homo Sapiens
gtcggtagagcatgggact

SEQ ID NO: 20901 - DNA, 20 bp, Homo Sapiens
gtcggtagagcatgggactc

SEQ ID NO: 20902 - DNA, 21 bp, Homo Sapiens
gtcggtagagcatgggactct

SEQ ID NO: 20903 - DNA, 22 bp, Homo Sapiens
gtcggtagagcatgggactctt

SEQ ID NO: 20904 - DNA, 23 bp, Homo Sapiens
gtcggtagagcatgggactctta

SEQ ID NO: 20905 - DNA, 24 bp, Homo Sapiens
gtcggtagagcatgggactcttaa

SEQ ID NO: 20906 - DNA, 25 bp, Homo Sapiens
gtcggtagagcatgggactcttaat

SEQ ID NO: 20907 - DNA, 26 bp, Homo Sapiens
gtcggtagagcatgggactcttaatc

SEQ ID NO: 20908 - DNA, 27 bp, Homo Sapiens
gtcggtagagcatgggactcttaatcc

SEQ ID NO: 20909 - DNA, 28 bp, Homo Sapiens
gtcggtagagcatgggactcttaatccc

SEQ ID NO: 20910 - DNA, 29 bp, Homo Sapiens
gtcggtagagcatgggactcttaatccca

SEQ ID NO: 20911 - DNA, 32 bp, Homo Sapiens
gtcggtagagcatgggactcttaatcccaggg

SEQ ID NO: 20912 - DNA, 36 bp, Homo Sapiens
gtcggtagagcatgggactcttaatcccagggtcgt

SEQ ID NO: 20913 - DNA, 37 bp, Homo Sapiens
gtcggtagagcatgggactcttaatcccagggtcgtg

SEQ ID NO: 20914 - DNA, 38 bp, Homo Sapiens
gtcggtagagcatgggactcttaatcccagggtcgtgg

SEQ ID NO: 20915 - DNA, 39 bp, Homo Sapiens
gtcggtagagcatgggactcttaatcccagggtcgtggg

SEQ ID NO: 20916 - DNA, 40 bp, Homo Sapiens
gtcggtagagcatgggactcttaatcccagggtcgtgggt

SEQ ID NO: 20917 - DNA, 41 bp, Homo Sapiens
gtcggtagagcatgggactcttaatcccagggtcgtgggtt

SEQ ID NO: 20918 - DNA, 43 bp, Homo Sapiens
gtcggtagagcatgggactcttaatcccagggtcgtgggttcg

SEQ ID NO: 20919 - DNA, 27 bp, Homo Sapiens
gtcggtagagcatgggactcttaatct

SEQ ID NO: 20920 - DNA, 28 bp, Homo Sapiens
gtcggtagagcatgggactcttaatctc

SEQ ID NO: 20921 - DNA, 29 bp, Homo Sapiens
gtcggtagagcatgggactcttaatctca

SEQ ID NO: 20922 - DNA, 16 bp, Homo Sapiens
gtcgtgagttcgagcc

SEQ ID NO: 20923 - DNA, 18 bp, Homo Sapiens
gtcgtgagttcgagcctc

SEQ ID NO: 20924 - DNA, 29 bp, Homo Sapiens
gtcgtgagttcgagcctcacacggggcac

SEQ ID NO: 20925 - DNA, 18 bp, Homo Sapiens
gtcgtgagttcgatcctc

SEQ ID NO: 20926 - DNA, 27 bp, Homo Sapiens
gtcgtgagttcgatcctcacacggggc

SEQ ID NO: 20927 - DNA, 28 bp, Homo Sapiens
gtcgtgagttcgatcctcacacggggca

SEQ ID NO: 20928 - DNA, 19 bp, Homo Sapiens
gtcgtggccgagtggttaa

SEQ ID NO: 20929 - DNA, 20 bp, Homo Sapiens
gtcgtggccgagtggttaag

SEQ ID NO: 20930 - DNA, 21 bp, Homo Sapiens
gtcgtggccgagtggttaagg

SEQ ID NO: 20931 - DNA, 22 bp, Homo Sapiens
gtcgtggccgagtggttaaggc

SEQ ID NO: 20932 - DNA, 16 bp, Homo Sapiens
gtcgtgggttcgagcc

SEQ ID NO: 20933 - DNA, 17 bp, Homo Sapiens
gtcgtgggttcgagccc

SEQ ID NO: 20934 - DNA, 18 bp, Homo Sapiens
gtcgtgggttcgagcccc

SEQ ID NO: 20935 - DNA, 27 bp, Homo Sapiens
gtcgtgggttcgagccccacgttgggc

SEQ ID NO: 20936 - DNA, 28 bp, Homo Sapiens
gtcgtgggttcgagccccacgttgggcg

SEQ ID NO: 20937 - DNA, 29 bp, Homo Sapiens
gtcgtgggttcgagccccacgttgggcgc

SEQ ID NO: 20938 - DNA, 30 bp, Homo Sapiens
gtcgtgggttcgagccccacgttgggcgcc

SEQ ID NO: 20939 - DNA, 31 bp, Homo Sapiens
gtcgtgggttcgagccccacgttgggcgcca

SEQ ID NO: 20940 - DNA, 16 bp, Homo Sapiens
gtcgtggttgtagtcc

SEQ ID NO: 20941 - DNA, 17 bp, Homo Sapiens
gtcgtggttgtagtccg

SEQ ID NO: 20942 - DNA, 18 bp, Homo Sapiens
gtcgtggttgtagtccgt

SEQ ID NO: 20943 - DNA, 19 bp, Homo Sapiens
gtcgtggttgtagtccgtg

SEQ ID NO: 20944 - DNA, 20 bp, Homo Sapiens
gtcgtggttgtagtccgtgc

SEQ ID NO: 20945 - DNA, 21 bp, Homo Sapiens
gtcgtggttgtagtccgtgcg

SEQ ID NO: 20946 - DNA, 22 bp, Homo Sapiens
gtcgtggttgtagtccgtgcga

SEQ ID NO: 20947 - DNA, 23 bp, Homo Sapiens
gtcgtggttgtagtccgtgcgag

SEQ ID NO: 20948 - DNA, 24 bp, Homo Sapiens
gtcgtggttgtagtccgtgcgaga

SEQ ID NO: 20949 - DNA, 25 bp, Homo Sapiens
gtcgtggttgtagtccgtgcgagaa

SEQ ID NO: 20950 - DNA, 26 bp, Homo Sapiens
gtcgtggttgtagtccgtgcgagaat

SEQ ID NO: 20951 - DNA, 27 bp, Homo Sapiens
gtcgtggttgtagtccgtgcgagaata

SEQ ID NO: 20952 - DNA, 28 bp, Homo Sapiens
gtcgtggttgtagtccgtgcgagaatac

SEQ ID NO: 20953 - DNA, 29 bp, Homo Sapiens
gtcgtggttgtagtccgtgcgagaatacc

SEQ ID NO: 20954 - DNA, 30 bp, Homo Sapiens
gtcgtggttgtagtccgtgcgagaatacca

SEQ ID NO: 20955 - DNA, 16 bp, Homo Sapiens
gtctaacaacatggct

SEQ ID NO: 20956 - DNA, 17 bp, Homo Sapiens
gtctaacaacatggctt

SEQ ID NO: 20957 - DNA, 18 bp, Homo Sapiens
gtctaacaacatggcttt

SEQ ID NO: 20958 - DNA, 19 bp, Homo Sapiens
gtctaacaacatggctttc

SEQ ID NO: 20959 - DNA, 20 bp, Homo Sapiens
gtctaacaacatggctttct

SEQ ID NO: 20960 - DNA, 21 bp, Homo Sapiens
gtctaacaacatggctttctc

SEQ ID NO: 20961 - DNA, 22 bp, Homo Sapiens
gtctaacaacatggctttctca

SEQ ID NO: 20962 - DNA, 23 bp, Homo Sapiens
gtctaacaacatggctttctcac

SEQ ID NO: 20963 - DNA, 24 bp, Homo Sapiens
gtctaacaacatggctttctcacc

SEQ ID NO: 20964 - DNA, 25 bp, Homo Sapiens
gtctaacaacatggctttctcacca

SEQ ID NO: 20965 - DNA, 16 bp, Homo Sapiens
gtctagcggttaggat

SEQ ID NO: 20966 - DNA, 17 bp, Homo Sapiens
gtctagcggttaggatt

SEQ ID NO: 20967 - DNA, 18 bp, Homo Sapiens
gtctagcggttaggattc

SEQ ID NO: 20968 - DNA, 19 bp, Homo Sapiens
gtctagcggttaggattcc

SEQ ID NO: 20969 - DNA, 20 bp, Homo Sapiens
gtctagcggttaggattcct

SEQ ID NO: 20970 - DNA, 21 bp, Homo Sapiens
gtctagcggttaggattcctg

SEQ ID NO: 20971 - DNA, 22 bp, Homo Sapiens
gtctagcggttaggattcctgg

SEQ ID NO: 20972 - DNA, 23 bp, Homo Sapiens
gtctagcggttaggattcctggt

SEQ ID NO: 20973 - DNA, 24 bp, Homo Sapiens
gtctagcggttaggattcctggtt

SEQ ID NO: 20974 - DNA, 25 bp, Homo Sapiens
gtctagcggttaggattcctggttt

SEQ ID NO: 20975 - DNA, 26 bp, Homo Sapiens
gtctagcggttaggattcctggtttt

SEQ ID NO: 20976 - DNA, 27 bp, Homo Sapiens
gtctagcggttaggattcctggttttc

SEQ ID NO: 20977 - DNA, 28 bp, Homo Sapiens
gtctagcggttaggattcctggttttca

SEQ ID NO: 20978 - DNA, 18 bp, Homo Sapiens
gtctaggggtatgattct

SEQ ID NO: 20979 - DNA, 19 bp, Homo Sapiens
gtctaggggtatgattctc

SEQ ID NO: 20980 - DNA, 20 bp, Homo Sapiens
gtctaggggtatgattctcg

SEQ ID NO: 20981 - DNA, 21 bp, Homo Sapiens
gtctaggggtatgattctcgc

SEQ ID NO: 20982 - DNA, 22 bp, Homo Sapiens
gtctaggggtatgattctcgct

SEQ ID NO: 20983 - DNA, 23 bp, Homo Sapiens
gtctaggggtatgattctcgctt

SEQ ID NO: 20984 - DNA, 26 bp, Homo Sapiens
gtctaggggtatgattctcgcttcgg

SEQ ID NO: 20985 - DNA, 26 bp, Homo Sapiens
gtctaggggtatgattctcgctttgg

SEQ ID NO: 20986 - DNA, 22 bp, Homo Sapiens
gtctaggggtatgattctcggt

SEQ ID NO: 20987 - DNA, 23 bp, Homo Sapiens
gtctaggggtatgattctcggtt

SEQ ID NO: 20988 - DNA, 16 bp, Homo Sapiens
gtctagtggctaggat

SEQ ID NO: 20989 - DNA, 17 bp, Homo Sapiens
gtctagtggctaggatt

SEQ ID NO: 20990 - DNA, 19 bp, Homo Sapiens
gtctagtggctaggattcg

SEQ ID NO: 20991 - DNA, 21 bp, Homo Sapiens
gtctagtggctaggattcggc

SEQ ID NO: 20992 - DNA, 22 bp, Homo Sapiens
gtctagtggctaggattcggcg

SEQ ID NO: 20993 - DNA, 23 bp, Homo Sapiens
gtctagtggctaggattcggcgc

SEQ ID NO: 20994 - DNA, 24 bp, Homo Sapiens
gtctagtggctaggattcggcgct

SEQ ID NO: 20995 - DNA, 27 bp, Homo Sapiens
gtctagtggctaggattcggcgctttc

SEQ ID NO: 20996 - DNA, 30 bp, Homo Sapiens
gtctagtggctaggattcggcgctttcacc

SEQ ID NO: 20997 - DNA, 16 bp, Homo Sapiens
gtctagtggtatgatt

SEQ ID NO: 20998 - DNA, 16 bp, Homo Sapiens
gtctagtggttaggat

SEQ ID NO: 20999 - DNA, 17 bp, Homo Sapiens
gtctagtggttaggatt

SEQ ID NO: 21000 - DNA, 18 bp, Homo Sapiens
gtctagtggttaggattc

SEQ ID NO: 21001 - DNA, 19 bp, Homo Sapiens
gtctagtggttaggattcg

SEQ ID NO: 21002 - DNA, 20 bp, Homo Sapiens
gtctagtggttaggattcgg

SEQ ID NO: 21003 - DNA, 21 bp, Homo Sapiens
gtctagtggttaggattcggc

SEQ ID NO: 21004 - DNA, 22 bp, Homo Sapiens
gtctagtggttaggattcggcg

SEQ ID NO: 21005 - DNA, 23 bp, Homo Sapiens
gtctagtggttaggattcggcgc

SEQ ID NO: 21006 - DNA, 24 bp, Homo Sapiens
gtctagtggttaggattcggcgct

SEQ ID NO: 21007 - DNA, 25 bp, Homo Sapiens
gtctagtggttaggattcggcgctc

SEQ ID NO: 21008 - DNA, 26 bp, Homo Sapiens
gtctagtggttaggattcggcgctct

SEQ ID NO: 21009 - DNA, 27 bp, Homo Sapiens
gtctagtggttaggattcggcgctctc

SEQ ID NO: 21010 - DNA, 28 bp, Homo Sapiens
gtctagtggttaggattcggcgctctca

SEQ ID NO: 21011 - DNA, 30 bp, Homo Sapiens
gtctagtggttaggattcggcgctctcacc

SEQ ID NO: 21012 - DNA, 33 bp, Homo Sapiens
gtctagtggttaggattcggcgctctcaccgcc

SEQ ID NO: 21013 - DNA, 40 bp, Homo Sapiens
gtctagtggttaggattcggcgctctcaccgccgcggccc

SEQ ID NO: 21014 - DNA, 43 bp, Homo Sapiens
gtctagtggttaggattcggcgctctcaccgccgcggcccggg

SEQ ID NO: 21015 - DNA, 44 bp, Homo Sapiens
gtctagtggttaggattcggcgctctcaccgccgcggcccgggt

SEQ ID NO: 21016 - DNA, 45 bp, Homo Sapiens
gtctagtggttaggattcggcgctctcaccgccgcggcccgggtt

SEQ ID NO: 21017 - DNA, 46 bp, Homo Sapiens
gtctagtggttaggattcggcgctctcaccgccgcggcccgggttc

SEQ ID NO: 21018 - DNA, 20 bp, Homo Sapiens
gtctcataatctgaaggtcc

SEQ ID NO: 21019 - DNA, 21 bp, Homo Sapiens
gtctcataatctgaaggtcct

SEQ ID NO: 21020 - DNA, 22 bp, Homo Sapiens
gtctcataatctgaaggtcctg

SEQ ID NO: 21021 - DNA, 25 bp, Homo Sapiens
gtctcataatctgaaggtcctgagt

SEQ ID NO: 21022 - DNA, 41 bp, Homo Sapiens
gtctcataatctgaaggtcctgagttcgaacctcagagggg

SEQ ID NO: 21023 - DNA, 46 bp, Homo Sapiens
gtctcataatctgaaggtcctgagttcgaacctcagagggggcacc

SEQ ID NO: 21024 - DNA, 22 bp, Homo Sapiens
gtctcataatctgaaggtcgtg

SEQ ID NO: 21025 - DNA, 41 bp, Homo Sapiens
gtctcataatctgaaggtcgtgagttcgagcctcacacggg

SEQ ID NO: 21026 - DNA, 46 bp, Homo Sapiens
gtctcataatctgaaggtcgtgagttcgatcctcacacggggcacc

SEQ ID NO: 21027 - DNA, 19 bp, Homo Sapiens
gtctccccgcgcaggttcg

SEQ ID NO: 21028 - DNA, 37 bp, Homo Sapiens
gtctccccgcgcaggttcgaaccctgctcgctgcgcc

SEQ ID NO: 21029 - DNA, 38 bp, Homo Sapiens
gtctccccgcgcaggttcgaaccctgctcgctgcgcca

SEQ ID NO: 21030 - DNA, 22 bp, Homo Sapiens
gtctccggatggaggcgtgggt

SEQ ID NO: 21031 - DNA, 16 bp, Homo Sapiens
gtctcggtggaacctc

SEQ ID NO: 21032 - DNA, 17 bp, Homo Sapiens
gtctcggtggaacctcc

SEQ ID NO: 21033 - DNA, 18 bp, Homo Sapiens
gtctcggtggaacctcca

SEQ ID NO: 21034 - DNA, 17 bp, Homo Sapiens
gtctctgtggcgcaatc

SEQ ID NO: 21035 - DNA, 18 bp, Homo Sapiens
gtctctgtggcgcaatcg

SEQ ID NO: 21036 - DNA, 19 bp, Homo Sapiens
gtctctgtggcgcaatcgg

SEQ ID NO: 21037 - DNA, 20 bp, Homo Sapiens
gtctctgtggcgcaatcggc

SEQ ID NO: 21038 - DNA, 20 bp, Homo Sapiens
gtctctgtggcgcaatcggt

SEQ ID NO: 21039 - DNA, 34 bp, Homo Sapiens
gtctctgtggcgcaatcggttagcgcattcggct

SEQ ID NO: 21040 - DNA, 35 bp, Homo Sapiens
gtctctgtggcgcaatcggttagcgcattcggctg

SEQ ID NO: 21041 - DNA, 37 bp, Homo Sapiens
gtctctgtggcgcaatcggttagcgcattcggctgtt

SEQ ID NO: 21042 - DNA, 35 bp, Homo Sapiens
gtctctgtggcgcaatcggttagcgcgttcggctg

SEQ ID NO: 21043 - DNA, 37 bp, Homo Sapiens
gtctctgtggcgcaatcggttagcgcgttcggctgtt

SEQ ID NO: 21044 - DNA, 18 bp, Homo Sapiens
gtctctgtggcgcaatgg

SEQ ID NO: 21045 - DNA, 19 bp, Homo Sapiens
gtctctgtggcgcaatgga

SEQ ID NO: 21046 - DNA, 20 bp, Homo Sapiens
gtctctgtggcgcaatggac

SEQ ID NO: 21047 - DNA, 21 bp, Homo Sapiens
gtctctgtggcgcaatggacg

SEQ ID NO: 21048 - DNA, 22 bp, Homo Sapiens
gtctctgtggcgcaatggacga

SEQ ID NO: 21049 - DNA, 33 bp, Homo Sapiens
gtctctgtggcgcaatggacgagcgcgctggac

SEQ ID NO: 21050 - DNA, 19 bp, Homo Sapiens
gtctctgtggcgcaatggg

SEQ ID NO: 21051 - DNA, 18 bp, Homo Sapiens
gtctcttcgggggcgtgg

SEQ ID NO: 21052 - DNA, 20 bp, Homo Sapiens
gtctcttcgggggcgtgggt

SEQ ID NO: 21053 - DNA, 21 bp, Homo Sapiens
gtctcttcgggggcgtgggtt

SEQ ID NO: 21054 - DNA, 22 bp, Homo Sapiens
gtctcttcgggggcgtgggttc

SEQ ID NO: 21055 - DNA, 23 bp, Homo Sapiens
gtctgataaaagagttactttga

SEQ ID NO: 21056 - DNA, 24 bp, Homo Sapiens
gtctgataaaagagttactttgat

SEQ ID NO: 21057 - DNA, 29 bp, Homo Sapiens
gtctgattccggatcagaagattgagggt

SEQ ID NO: 21058 - DNA, 29 bp, Homo Sapiens
gtctgctttacacgcagaaggtcctgggt

SEQ ID NO: 21059 - DNA, 45 bp, Homo Sapiens
gtcttaggccccaaaaattttggtgcaactccaaataaaagtacc

SEQ ID NO: 21060 - DNA, 24 bp, Homo Sapiens
gtcttgtaaaccggagatgaaaac

SEQ ID NO: 21061 - DNA, 41 bp, Homo Sapiens
gtcttgtaaaccggagatgaaaacctttttccaaggacacc

SEQ ID NO: 21062 - DNA, 42 bp, Homo Sapiens
gtcttgtaaaccggagatgaaaacctttttccaaggacacca

SEQ ID NO: 21063 - DNA, 16 bp, Homo Sapiens
gtgaagcattggactg

SEQ ID NO: 21064 - DNA, 17 bp, Homo Sapiens
gtgaagcattggactgt

SEQ ID NO: 21065 - DNA, 18 bp, Homo Sapiens
gtgaagcattggactgta

SEQ ID NO: 21066 - DNA, 19 bp, Homo Sapiens
gtgaagcattggactgtaa

SEQ ID NO: 21067 - DNA, 20 bp, Homo Sapiens
gtgaagcattggactgtaaa

SEQ ID NO: 21068 - DNA, 22 bp, Homo Sapiens
gtgaagcattggactgtaaatc

SEQ ID NO: 21069 - DNA, 23 bp, Homo Sapiens
gtgaagcattggactgtaaatct

SEQ ID NO: 21070 - DNA, 24 bp, Homo Sapiens
gtgaagcattggactgtaaatcta

SEQ ID NO: 21071 - DNA, 25 bp, Homo Sapiens
gtgaagcattggactgtaaatctaa

SEQ ID NO: 21072 - DNA, 26 bp, Homo Sapiens
gtgaagcattggactgtaaatctaaa

SEQ ID NO: 21073 - DNA, 29 bp, Homo Sapiens
gtgaagcattggactgtaaatctaaagac

SEQ ID NO: 21074 - DNA, 35 bp, Homo Sapiens
gtgaagcattggactgtaaatctaaagacaggggt

SEQ ID NO: 21075 - DNA, 48 bp, Homo Sapiens
gtgaagcattggactgtaaatctaaagacaggggttaggcctcttttt

SEQ ID NO: 21076 - DNA, 16 bp, Homo Sapiens
gtgaatctgacaacag

SEQ ID NO: 21077 - DNA, 17 bp, Homo Sapiens
gtgaatctgacaacaga

SEQ ID NO: 21078 - DNA, 18 bp, Homo Sapiens
gtgaatctgacaacagag

SEQ ID NO: 21079 - DNA, 20 bp, Homo Sapiens
gtgaatctgacaacagaggc

SEQ ID NO: 21080 - DNA, 21 bp, Homo Sapiens
gtgaatctgacaacagaggct

SEQ ID NO: 21081 - DNA, 22 bp, Homo Sapiens
gtgaatctgacaacagaggctt

SEQ ID NO: 21082 - DNA, 24 bp, Homo Sapiens
gtgaatctgacaacagaggcttac

SEQ ID NO: 21083 - DNA, 25 bp, Homo Sapiens
gtgaatctgacaacagaggcttacg

SEQ ID NO: 21084 - DNA, 26 bp, Homo Sapiens
gtgaatctgacaacagaggcttacga

SEQ ID NO: 21085 - DNA, 27 bp, Homo Sapiens
gtgaatctgacaacagaggcttacgac

SEQ ID NO: 21086 - DNA, 28 bp, Homo Sapiens
gtgaatctgacaacagaggcttacgacc

SEQ ID NO: 21087 - DNA, 29 bp, Homo Sapiens
gtgaatctgacaacagaggcttacgaccc

SEQ ID NO: 21088 - DNA, 30 bp, Homo Sapiens
gtgaatctgacaacagaggcttacgacccc

SEQ ID NO: 21089 - DNA, 31 bp, Homo Sapiens
gtgaatctgacaacagaggcttacgacccct

SEQ ID NO: 21090 - DNA, 32 bp, Homo Sapiens
gtgaatctgacaacagaggcttacgacccctt

SEQ ID NO: 21091 - DNA, 33 bp, Homo Sapiens
gtgaatctgacaacagaggcttacgacccctta

SEQ ID NO: 21092 - DNA, 34 bp, Homo Sapiens
gtgaatctgacaacagaggcttacgaccccttat

SEQ ID NO: 21093 - DNA, 35 bp, Homo Sapiens
gtgaatctgacaacagaggcttacgaccccttatt

SEQ ID NO: 21094 - DNA, 36 bp, Homo Sapiens
gtgaatctgacaacagaggcttacgaccccttattt

SEQ ID NO: 21095 - DNA, 37 bp, Homo Sapiens
gtgaatctgacaacagaggcttacgaccccttattta

SEQ ID NO: 21096 - DNA, 39 bp, Homo Sapiens
gtgaatctgacaacagaggcttacgaccccttatttacc

SEQ ID NO: 21097 - DNA, 40 bp, Homo Sapiens
gtgaatctgacaacagaggcttacgaccccttatttaccc

SEQ ID NO: 21098 - DNA, 41 bp, Homo Sapiens
gtgaatctgacaacagaggcttacgaccccttatttacccc

SEQ ID NO: 21099 - DNA, 42 bp, Homo Sapiens
gtgaatctgacaacagaggcttacgaccccttatttacccca

SEQ ID NO: 21100 - DNA, 35 bp, Homo Sapiens
gtgagaggtcccgggttcaaatcccggacgagccc

SEQ ID NO: 21101 - DNA, 36 bp, Homo Sapiens
gtgagaggtcccgggttcaaatcccggacgagcccc

SEQ ID NO: 21102 - DNA, 17 bp, Homo Sapiens
gtgagcactctggactc

SEQ ID NO: 21103 - DNA, 22 bp, Homo Sapiens
gtgagcactctggactctgaat

SEQ ID NO: 21104 - DNA, 24 bp, Homo Sapiens
gtgagcactctggactctgaatcc

SEQ ID NO: 21105 - DNA, 25 bp, Homo Sapiens
gtgagcactctggactctgaatcca

SEQ ID NO: 21106 - DNA, 26 bp, Homo Sapiens
gtgagcactctggactctgaatccag

SEQ ID NO: 21107 - DNA, 27 bp, Homo Sapiens
gtgagcactctggactctgaatccagc

SEQ ID NO: 21108 - DNA, 28 bp, Homo Sapiens
gtgagcactctggactctgaatccagcg

SEQ ID NO: 21109 - DNA, 32 bp, Homo Sapiens
gtgagcactctggactctgaatccagcgatcc

SEQ ID NO: 21110 - DNA, 35 bp, Homo Sapiens
gtgagcactctggactctgaatccagcgatccgag

SEQ ID NO: 21111 - DNA, 18 bp, Homo Sapiens
gtgagcatagctgccttc

SEQ ID NO: 21112 - DNA, 36 bp, Homo Sapiens
gtgagcatagctgccttccaagcagttgacccgggt

SEQ ID NO: 21113 - DNA, 16 bp, Homo Sapiens
gtgaggtcccgggttc

SEQ ID NO: 21114 - DNA, 17 bp, Homo Sapiens
gtgagtatccccgcctg

SEQ ID NO: 21115 - DNA, 18 bp, Homo Sapiens
gtgagtatccccgcctgt

SEQ ID NO: 21116 - DNA, 19 bp, Homo Sapiens
gtgagtatccccgcctgtc

SEQ ID NO: 21117 - DNA, 20 bp, Homo Sapiens
gtgagtatccccgcctgtca

SEQ ID NO: 21118 - DNA, 21 bp, Homo Sapiens
gtgagtatccccgcctgtcac

SEQ ID NO: 21119 - DNA, 23 bp, Homo Sapiens
gtgagtatccccgcctgtcacgc

SEQ ID NO: 21120 - DNA, 16 bp, Homo Sapiens
gtgagttcgagcctca

SEQ ID NO: 21121 - DNA, 16 bp, Homo Sapiens
gtgagttcgatcctca

SEQ ID NO: 21122 - DNA, 18 bp, Homo Sapiens
gtgataggtggcacggag

SEQ ID NO: 21123 - DNA, 19 bp, Homo Sapiens
gtgataggtggcacggaga

SEQ ID NO: 21124 - DNA, 20 bp, Homo Sapiens
gtgataggtggcacggagaa

SEQ ID NO: 21125 - DNA, 21 bp, Homo Sapiens
gtgataggtggcacggagaat

SEQ ID NO: 21126 - DNA, 25 bp, Homo Sapiens
gtgataggtggcacggagaattttg

SEQ ID NO: 21127 - DNA, 19 bp, Homo Sapiens
gtgatcgtatagtggttag

SEQ ID NO: 21128 - DNA, 20 bp, Homo Sapiens
gtgatcgtatagtggttagt

SEQ ID NO: 21129 - DNA, 21 bp, Homo Sapiens
gtgatcgtatagtggttagta

SEQ ID NO: 21130 - DNA, 22 bp, Homo Sapiens
gtgatcgtatagtggttagtac

SEQ ID NO: 21131 - DNA, 23 bp, Homo Sapiens
gtgatcgtatagtggttagtact

SEQ ID NO: 21132 - DNA, 24 bp, Homo Sapiens
gtgatcgtatagtggttagtactc

SEQ ID NO: 21133 - DNA, 25 bp, Homo Sapiens
gtgatcgtatagtggttagtactct

SEQ ID NO: 21134 - DNA, 26 bp, Homo Sapiens
gtgatcgtatagtggttagtactctg

SEQ ID NO: 21135 - DNA, 27 bp, Homo Sapiens
gtgatcgtatagtggttagtactctgc

SEQ ID NO: 21136 - DNA, 28 bp, Homo Sapiens
gtgatcgtatagtggttagtactctgcg

SEQ ID NO: 21137 - DNA, 29 bp, Homo Sapiens
gtgatcgtatagtggttagtactctgcgt

SEQ ID NO: 21138 - DNA, 30 bp, Homo Sapiens
gtgatcgtatagtggttagtactctgcgtt

SEQ ID NO: 21139 - DNA, 31 bp, Homo Sapiens
gtgatcgtatagtggttagtactctgcgttg

SEQ ID NO: 21140 - DNA, 32 bp, Homo Sapiens
gtgatcgtatagtggttagtactctgcgttgt

SEQ ID NO: 21141 - DNA, 33 bp, Homo Sapiens
gtgatcgtatagtggttagtactctgcgttgtg

SEQ ID NO: 21142 - DNA, 35 bp, Homo Sapiens
gtgatcgtatagtggttagtactctgcgttgtggc

SEQ ID NO: 21143 - DNA, 36 bp, Homo Sapiens
gtgatcgtatagtggttagtactctgcgttgtggcc

SEQ ID NO: 21144 - DNA, 18 bp, Homo Sapiens
gtgattttcatattgaat

SEQ ID NO: 21145 - DNA, 20 bp, Homo Sapiens
gtgattttcatattgaattg

SEQ ID NO: 21146 - DNA, 21 bp, Homo Sapiens
gtgattttcatattgaattgc

SEQ ID NO: 21147 - DNA, 22 bp, Homo Sapiens
gtgattttcatattgaattgca

SEQ ID NO: 21148 - DNA, 36 bp, Homo Sapiens
gtgattttcatattgaattgcaaattcgaagaagca

SEQ ID NO: 21149 - DNA, 37 bp, Homo Sapiens
gtgattttcatattgaattgcaaattcgaagaagcag

SEQ ID NO: 21150 - DNA, 16 bp, Homo Sapiens
gtgcaactccaaataa

SEQ ID NO: 21151 - DNA, 17 bp, Homo Sapiens
gtgcaactccaaataaa

SEQ ID NO: 21152 - DNA, 18 bp, Homo Sapiens
gtgcaactccaaataaaa

SEQ ID NO: 21153 - DNA, 19 bp, Homo Sapiens
gtgcaactccaaataaaag

SEQ ID NO: 21154 - DNA, 20 bp, Homo Sapiens
gtgcaactccaaataaaagt

SEQ ID NO: 21155 - DNA, 21 bp, Homo Sapiens
gtgcaactccaaataaaagta

SEQ ID NO: 21156 - DNA, 22 bp, Homo Sapiens
gtgcaactccaaataaaagtac

SEQ ID NO: 21157 - DNA, 23 bp, Homo Sapiens
gtgcaactccaaataaaagtacc

SEQ ID NO: 21158 - DNA, 24 bp, Homo Sapiens
gtgcaactccaaataaaagtacca

SEQ ID NO: 21159 - DNA, 35 bp, Homo Sapiens
gtgcgagaggtcccgggttcaaatcccggacgagc

SEQ ID NO: 21160 - DNA, 38 bp, Homo Sapiens
gtgcgagaggtcccgggttcaaatcccggacgagcccc

SEQ ID NO: 21161 - DNA, 39 bp, Homo Sapiens
gtgcgagaggtcccgggttcaaatcccggacgagccccc

SEQ ID NO: 21162 - DNA, 17 bp, Homo Sapiens
gtgctaatggtggagtt

SEQ ID NO: 21163 - DNA, 19 bp, Homo Sapiens
gtgctaatggtggagttaa

SEQ ID NO: 21164 - DNA, 20 bp, Homo Sapiens
gtgctaatggtggagttaaa

SEQ ID NO: 21165 - DNA, 21 bp, Homo Sapiens
gtgctaatggtggagttaaag

SEQ ID NO: 21166 - DNA, 22 bp, Homo Sapiens
gtgctaatggtggagttaaaga

SEQ ID NO: 21167 - DNA, 23 bp, Homo Sapiens
gtgctaatggtggagttaaagac

SEQ ID NO: 21168 - DNA, 24 bp, Homo Sapiens
gtgctaatggtggagttaaagact

SEQ ID NO: 21169 - DNA, 25 bp, Homo Sapiens
gtgctaatggtggagttaaagactt

SEQ ID NO: 21170 - DNA, 26 bp, Homo Sapiens
gtgctaatggtggagttaaagacttt

SEQ ID NO: 21171 - DNA, 27 bp, Homo Sapiens
gtgctaatggtggagttaaagactttt

SEQ ID NO: 21172 - DNA, 30 bp, Homo Sapiens
gtgctaatggtggagttaaagactttttct

SEQ ID NO: 21173 - DNA, 31 bp, Homo Sapiens
gtgctaatggtggagttaaagactttttctc

SEQ ID NO: 21174 - DNA, 34 bp, Homo Sapiens
gtgctaatggtggagttaaagactttttctctga

SEQ ID NO: 21175 - DNA, 35 bp, Homo Sapiens
gtgctaatggtggagttaaagactttttctctgac

SEQ ID NO: 21176 - DNA, 36 bp, Homo Sapiens
gtgctaatggtggagttaaagactttttctctgacc

SEQ ID NO: 21177 - DNA, 37 bp, Homo Sapiens
gtgctaatggtggagttaaagactttttctctgacca

SEQ ID NO: 21178 - DNA, 40 bp, Homo Sapiens
gtgctctgcacgcgtgggttcgaatcccatcctcgtcgcc

SEQ ID NO: 21179 - DNA, 41 bp, Homo Sapiens
gtgctctgcacgcgtgggttcgaatcccatcctcgtcgcca

SEQ ID NO: 21180 - DNA, 18 bp, Homo Sapiens
gtgctgggcccataaccc

SEQ ID NO: 21181 - DNA, 21 bp, Homo Sapiens
gtgctgggcccataacccaga

SEQ ID NO: 21182 - DNA, 28 bp, Homo Sapiens
gtgctgggcccataacccagaggtcgat

SEQ ID NO: 21183 - DNA, 29 bp, Homo Sapiens
gtgctgggcccataacccagaggtcgatg

SEQ ID NO: 21184 - DNA, 31 bp, Homo Sapiens
gtgctgggcccataacccagaggtcgatgga

SEQ ID NO: 21185 - DNA, 32 bp, Homo Sapiens
gtgctgggcccataacccagaggtcgatggat

SEQ ID NO: 21186 - DNA, 33 bp, Homo Sapiens
gtgctgggcccataacccagaggtcgatggatc

SEQ ID NO: 21187 - DNA, 34 bp, Homo Sapiens
gtgctgggcccataacccagaggtcgatggatcg

SEQ ID NO: 21188 - DNA, 36 bp, Homo Sapiens
gtgctgggcccataacccagaggtcgatggatcgaa

SEQ ID NO: 21189 - DNA, 38 bp, Homo Sapiens
gtgctgggcccataacccagaggtcgatggatcgaaac

SEQ ID NO: 21190 - DNA, 39 bp, Homo Sapiens
gtgctgggcccataacccagaggtcgatggatcgaaacc

SEQ ID NO: 21191 - DNA, 40 bp, Homo Sapiens
gtgctgggcccataacccagaggtcgatggatcgaaacca

SEQ ID NO: 21192 - DNA, 34 bp, Homo Sapiens
gtgctgggcccataacccagaggtcgatggatct

SEQ ID NO: 21193 - DNA, 31 bp, Homo Sapiens
gtgcttagctgttaactaagtgtttgtgggt

SEQ ID NO: 21194 - DNA, 33 bp, Homo Sapiens
gtgcttagctgttaactaagtgtttgtgggttt

SEQ ID NO: 21195 - DNA, 34 bp, Homo Sapiens
gtgcttagctgttaactaagtgtttgtgggttta

SEQ ID NO: 21196 - DNA, 40 bp, Homo Sapiens
gtgctttgcacgcgtgggttcgaatcccatcctcgtcgcc

SEQ ID NO: 21197 - DNA, 41 bp, Homo Sapiens
gtgctttgcacgcgtgggttcgaatcccatcctcgtcgcca

SEQ ID NO: 21198 - DNA, 25 bp, Homo Sapiens
gtggagtggttatcacgttcgcctc

SEQ ID NO: 21199 - DNA, 16 bp, Homo Sapiens
gtggagttaaagactt

SEQ ID NO: 21200 - DNA, 17 bp, Homo Sapiens
gtggagttaaagacttt

SEQ ID NO: 21201 - DNA, 18 bp, Homo Sapiens
gtggagttaaagactttt

SEQ ID NO: 21202 - DNA, 19 bp, Homo Sapiens
gtggagttaaagacttttt

SEQ ID NO: 21203 - DNA, 20 bp, Homo Sapiens
gtggagttaaagactttttc

SEQ ID NO: 21204 - DNA, 21 bp, Homo Sapiens
gtggagttaaagactttttct

SEQ ID NO: 21205 - DNA, 22 bp, Homo Sapiens
gtggagttaaagactttttctc

SEQ ID NO: 21206 - DNA, 23 bp, Homo Sapiens
gtggagttaaagactttttctct

SEQ ID NO: 21207 - DNA, 24 bp, Homo Sapiens
gtggagttaaagactttttctctg

SEQ ID NO: 21208 - DNA, 25 bp, Homo Sapiens
gtggagttaaagactttttctctga

SEQ ID NO: 21209 - DNA, 26 bp, Homo Sapiens
gtggagttaaagactttttctctgac

SEQ ID NO: 21210 - DNA, 27 bp, Homo Sapiens
gtggagttaaagactttttctctgacc

SEQ ID NO: 21211 - DNA, 28 bp, Homo Sapiens
gtggagttaaagactttttctctgacca

SEQ ID NO: 21212 - DNA, 16 bp, Homo Sapiens
gtggcacggagaattt

SEQ ID NO: 21213 - DNA, 17 bp, Homo Sapiens
gtggcacggagaatttt

SEQ ID NO: 21214 - DNA, 18 bp, Homo Sapiens
gtggcacggagaattttg

SEQ ID NO: 21215 - DNA, 24 bp, Homo Sapiens
gtggcccgggttcgactcccggta

SEQ ID NO: 21216 - DNA, 26 bp, Homo Sapiens
gtggcccgggttcgactcccggtatg

SEQ ID NO: 21217 - DNA, 30 bp, Homo Sapiens
gtggcccgggttcgactcccggtatgggaa

SEQ ID NO: 21218 - DNA, 32 bp, Homo Sapiens
gtggcccgggttcgactcccggtatgggaacc

SEQ ID NO: 21219 - DNA, 18 bp, Homo Sapiens
gtggccgagcggtctaag

SEQ ID NO: 21220 - DNA, 20 bp, Homo Sapiens
gtggccgagcggtctaaggc

SEQ ID NO: 21221 - DNA, 17 bp, Homo Sapiens
gtggccgagtggttaag

SEQ ID NO: 21222 - DNA, 18 bp, Homo Sapiens
gtggccgagtggttaagg

SEQ ID NO: 21223 - DNA, 23 bp, Homo Sapiens
gtggcctaatggataaggcactg

SEQ ID NO: 21224 - DNA, 30 bp, Homo Sapiens
gtggcctaatggataaggcatcagcctccg

SEQ ID NO: 21225 - DNA, 23 bp, Homo Sapiens
gtggcctaatggataaggcattg

SEQ ID NO: 21226 - DNA, 25 bp, Homo Sapiens
gtggcctaatggataaggcattggc

SEQ ID NO: 21227 - DNA, 34 bp, Homo Sapiens
gtggcgcaatcggttagcgcgttcggctgttaac

SEQ ID NO: 21228 - DNA, 18 bp, Homo Sapiens
gtggcgcaatggatagcg

SEQ ID NO: 21229 - DNA, 26 bp, Homo Sapiens
gtggcgcaatggatagcgcattggac

SEQ ID NO: 21230 - DNA, 27 bp, Homo Sapiens
gtggcgcaatggatagcgcattggact

SEQ ID NO: 21231 - DNA, 24 bp, Homo Sapiens
gtggcgcagcggaagcgtgctggg

SEQ ID NO: 21232 - DNA, 25 bp, Homo Sapiens
gtggcgcagcggaagcgtgctgggc

SEQ ID NO: 21233 - DNA, 26 bp, Homo Sapiens
gtggcgcagcggaagcgtgctgggcc

SEQ ID NO: 21234 - DNA, 27 bp, Homo Sapiens
gtggcgcagcggaagcgtgctgggccc

SEQ ID NO: 21235 - DNA, 28 bp, Homo Sapiens
gtggcgcagcggaagcgtgctgggccca

SEQ ID NO: 21236 - DNA, 34 bp, Homo Sapiens
gtggcgcagcggaagcgtgctgggcccataaccc

SEQ ID NO: 21237 - DNA, 16 bp, Homo Sapiens
gtggctaggattcggc

SEQ ID NO: 21238 - DNA, 17 bp, Homo Sapiens
gtggctaggattcggcg

SEQ ID NO: 21239 - DNA, 18 bp, Homo Sapiens
gtggctaggattcggcgc

SEQ ID NO: 21240 - DNA, 19 bp, Homo Sapiens
gtggctaggattcggcgct

SEQ ID NO: 21241 - DNA, 24 bp, Homo Sapiens
gtggctaggattcggcgctttcac

SEQ ID NO: 21242 - DNA, 25 bp, Homo Sapiens
gtggctaggattcggcgctttcacc

SEQ ID NO: 21243 - DNA, 26 bp, Homo Sapiens
gtggctaggattcggcgctttcaccg

SEQ ID NO: 21244 - DNA, 17 bp, Homo Sapiens
gtggctgatttgcgttc

SEQ ID NO: 21245 - DNA, 25 bp, Homo Sapiens
gtggctgatttgcgttcagttgatg

SEQ ID NO: 21246 - DNA, 32 bp, Homo Sapiens
gtggctgatttgcgttcagttgatgcagagtg

SEQ ID NO: 21247 - DNA, 16 bp, Homo Sapiens
gtggggttttgcagtc

SEQ ID NO: 21248 - DNA, 17 bp, Homo Sapiens
gtggggttttgcagtcc

SEQ ID NO: 21249 - DNA, 18 bp, Homo Sapiens
gtggggttttgcagtcct

SEQ ID NO: 21250 - DNA, 22 bp, Homo Sapiens
gtggggttttgcagtccttacc

SEQ ID NO: 21251 - DNA, 23 bp, Homo Sapiens
gtggggttttgcagtccttacca

SEQ ID NO: 21252 - DNA, 18 bp, Homo Sapiens
gtgggtagagcatcagac

SEQ ID NO: 21253 - DNA, 16 bp, Homo Sapiens
gtgggttcgaatccca

SEQ ID NO: 21254 - DNA, 27 bp, Homo Sapiens
gtgggttcgaatcccaccagagtcgcc

SEQ ID NO: 21255 - DNA, 28 bp, Homo Sapiens
gtgggttcgaatcccaccagagtcgcca

SEQ ID NO: 21256 - DNA, 27 bp, Homo Sapiens
gtgggttcgaatcccaccctcgtcgcc

SEQ ID NO: 21257 - DNA, 27 bp, Homo Sapiens
gtgggttcgaatcccaccttcgtcgcc

SEQ ID NO: 21258 - DNA, 28 bp, Homo Sapiens
gtgggttcgaatcccaccttcgtcgcca

SEQ ID NO: 21259 - DNA, 26 bp, Homo Sapiens
gtgggttcgaatcccatcctcgtcgc

SEQ ID NO: 21260 - DNA, 27 bp, Homo Sapiens
gtgggttcgaatcccatcctcgtcgcc

SEQ ID NO: 21261 - DNA, 28 bp, Homo Sapiens
gtgggttcgaatcccatcctcgtcgcca

SEQ ID NO: 21262 - DNA, 24 bp, Homo Sapiens
gtgggttcgagccccacgttgggc

SEQ ID NO: 21263 - DNA, 25 bp, Homo Sapiens
gtgggttcgagccccacgttgggcg

SEQ ID NO: 21264 - DNA, 26 bp, Homo Sapiens
gtgggttcgagccccacgttgggcgc

SEQ ID NO: 21265 - DNA, 27 bp, Homo Sapiens
gtgggttcgagccccacgttgggcgcc

SEQ ID NO: 21266 - DNA, 28 bp, Homo Sapiens
gtgggttcgagccccacgttgggcgcca

SEQ ID NO: 21267 - DNA, 27 bp, Homo Sapiens
gtgggttcgagtcccaccagagtcgcc

SEQ ID NO: 21268 - DNA, 25 bp, Homo Sapiens
gtgggttcgagtcccacccggggta

SEQ ID NO: 21269 - DNA, 26 bp, Homo Sapiens
gtgggttcgagtcccatctgggtcgc

SEQ ID NO: 21270 - DNA, 27 bp, Homo Sapiens
gtgggttcgagtcccatctgggtcgcc

SEQ ID NO: 21271 - DNA, 22 bp, Homo Sapiens
gtgggtttaagtcccattggtc

SEQ ID NO: 21272 - DNA, 23 bp, Homo Sapiens
gtgggtttaagtcccattggtct

SEQ ID NO: 21273 - DNA, 25 bp, Homo Sapiens
gtgggtttaagtcccattggtctag

SEQ ID NO: 21274 - DNA, 26 bp, Homo Sapiens
gtgggtttaagtcccattggtctagc

SEQ ID NO: 21275 - DNA, 27 bp, Homo Sapiens
gtgggtttaagtcccattggtctagcc

SEQ ID NO: 21276 - DNA, 28 bp, Homo Sapiens
gtgggtttaagtcccattggtctagcca

SEQ ID NO: 21277 - DNA, 17 bp, Homo Sapiens
gtggtaagcatagctgc

SEQ ID NO: 21278 - DNA, 18 bp, Homo Sapiens
gtggtaagcatagctgcc

SEQ ID NO: 21279 - DNA, 16 bp, Homo Sapiens
gtggtagaattctcgc

SEQ ID NO: 21280 - DNA, 17 bp, Homo Sapiens
gtggtagaattctcgcc

SEQ ID NO: 21281 - DNA, 18 bp, Homo Sapiens
gtggtagaattctcgcct

SEQ ID NO: 21282 - DNA, 19 bp, Homo Sapiens
gtggtagaattctcgcctc

SEQ ID NO: 21283 - DNA, 21 bp, Homo Sapiens
gtggtagaattctcgcctccc

SEQ ID NO: 21284 - DNA, 22 bp, Homo Sapiens
gtggtagaattctcgcctccca

SEQ ID NO: 21285 - DNA, 19 bp, Homo Sapiens
gtggtagaattctcgcctg

SEQ ID NO: 21286 - DNA, 20 bp, Homo Sapiens
gtggtagaattctcgcctgc

SEQ ID NO: 21287 - DNA, 21 bp, Homo Sapiens
gtggtagaattctcgcctgcc

SEQ ID NO: 21288 - DNA, 22 bp, Homo Sapiens
gtggtagaattctcgcctgcca

SEQ ID NO: 21289 - DNA, 23 bp, Homo Sapiens
gtggtagaattctcgcctgccac

SEQ ID NO: 21290 - DNA, 24 bp, Homo Sapiens
gtggtagaattctcgcctgccacg

SEQ ID NO: 21291 - DNA, 25 bp, Homo Sapiens
gtggtagaattctcgcctgccacgc

SEQ ID NO: 21292 - DNA, 29 bp, Homo Sapiens
gtggtagaattctcgcctgccacgcggga

SEQ ID NO: 21293 - DNA, 33 bp, Homo Sapiens
gtggtagaattctcgcctgccacgcgggaggcc

SEQ ID NO: 21294 - DNA, 34 bp, Homo Sapiens
gtggtagaattctcgcctgccacgcgggaggccc

SEQ ID NO: 21295 - DNA, 36 bp, Homo Sapiens
gtggtagaattctcgcctgccacgcgggaggcccgg

SEQ ID NO: 21296 - DNA, 37 bp, Homo Sapiens
gtggtagaattctcgcctgccacgcgggaggcccggg

SEQ ID NO: 21297 - DNA, 38 bp, Homo Sapiens
gtggtagaattctcgcctgccacgcgggaggcccgggt

SEQ ID NO: 21298 - DNA, 39 bp, Homo Sapiens
gtggtagaattctcgcctgccacgcgggaggcccgggtt

SEQ ID NO: 21299 - DNA, 40 bp, Homo Sapiens
gtggtagaattctcgcctgccacgcgggaggcccgggttc

SEQ ID NO: 21300 - DNA, 16 bp, Homo Sapiens
gtggtagagcatttga

SEQ ID NO: 21301 - DNA, 17 bp, Homo Sapiens
gtggtagagcatttgac

SEQ ID NO: 21302 - DNA, 18 bp, Homo Sapiens
gtggtagagcatttgact

SEQ ID NO: 21303 - DNA, 19 bp, Homo Sapiens
gtggtagagcatttgactg

SEQ ID NO: 21304 - DNA, 20 bp, Homo Sapiens
gtggtagagcatttgactgc

SEQ ID NO: 21305 - DNA, 21 bp, Homo Sapiens
gtggtagagcatttgactgca

SEQ ID NO: 21306 - DNA, 17 bp, Homo Sapiens
gtggtagagcgcatgct

SEQ ID NO: 21307 - DNA, 21 bp, Homo Sapiens
gtggtagagcgcatgctttgc

SEQ ID NO: 21308 - DNA, 19 bp, Homo Sapiens
gtggtagagcgcgtgcttc

SEQ ID NO: 21309 - DNA, 30 bp, Homo Sapiens
gtggtatagtggtaagcatagctgccttcc

SEQ ID NO: 21310 - DNA, 45 bp, Homo Sapiens
gtggtatagtggtaagcatagctgccttccaagcagttgacccgg

SEQ ID NO: 21311 - DNA, 47 bp, Homo Sapiens
gtggtatagtggtaagcatagctgccttccaagcagttgacccgggt

SEQ ID NO: 21312 - DNA, 16 bp, Homo Sapiens
gtggtatagtggtgag

SEQ ID NO: 21313 - DNA, 22 bp, Homo Sapiens
gtggtatagtggtgagcatagc

SEQ ID NO: 21314 - DNA, 23 bp, Homo Sapiens
gtggtatagtggtgagcatagct

SEQ ID NO: 21315 - DNA, 24 bp, Homo Sapiens
gtggtatagtggtgagcatagctg

SEQ ID NO: 21316 - DNA, 25 bp, Homo Sapiens
gtggtatagtggtgagcatagctgc

SEQ ID NO: 21317 - DNA, 26 bp, Homo Sapiens
gtggtatagtggtgagcatagctgcc

SEQ ID NO: 21318 - DNA, 30 bp, Homo Sapiens
gtggtatagtggtgagcatagctgccttcc

SEQ ID NO: 21319 - DNA, 47 bp, Homo Sapiens
gtggtatagtggtgagcatagctgccttccaagcagttgacccgggt

SEQ ID NO: 21320 - DNA, 22 bp, Homo Sapiens
gtggtatagtggttagcatagc

SEQ ID NO: 21321 - DNA, 23 bp, Homo Sapiens
gtggtatagtggttagcatagct

SEQ ID NO: 21322 - DNA, 16 bp, Homo Sapiens
gtggtatcatgcaaga

SEQ ID NO: 21323 - DNA, 17 bp, Homo Sapiens
gtggtatcatgcaagat

SEQ ID NO: 21324 - DNA, 18 bp, Homo Sapiens
gtggtatcatgcaagatt

SEQ ID NO: 21325 - DNA, 19 bp, Homo Sapiens
gtggtatcatgcaagattc

SEQ ID NO: 21326 - DNA, 20 bp, Homo Sapiens
gtggtatcatgcaagattcc

SEQ ID NO: 21327 - DNA, 21 bp, Homo Sapiens
gtggtatcatgcaagattccc

SEQ ID NO: 21328 - DNA, 16 bp, Homo Sapiens
gtggtatgattctcgc

SEQ ID NO: 21329 - DNA, 17 bp, Homo Sapiens
gtggtatgattctcgct

SEQ ID NO: 21330 - DNA, 21 bp, Homo Sapiens
gtggtatgattctcgctttgg

SEQ ID NO: 21331 - DNA, 17 bp, Homo Sapiens
gtggtcatcacgttcgc

SEQ ID NO: 21332 - DNA, 18 bp, Homo Sapiens
gtggtcatcacgttcgcc

SEQ ID NO: 21333 - DNA, 19 bp, Homo Sapiens
gtggtcatcacgttcgcct

SEQ ID NO: 21334 - DNA, 16 bp, Homo Sapiens
gtggtctaaggcgcca

SEQ ID NO: 21335 - DNA, 16 bp, Homo Sapiens
gtggtctaaggcgctg

SEQ ID NO: 21336 - DNA, 20 bp, Homo Sapiens
gtggtctagtggctaggatt

SEQ ID NO: 21337 - DNA, 22 bp, Homo Sapiens
gtggtctagtggctaggattcg

SEQ ID NO: 21338 - DNA, 24 bp, Homo Sapiens
gtggtctagtggctaggattcggc

SEQ ID NO: 21339 - DNA, 25 bp, Homo Sapiens
gtggtctagtggctaggattcggcg

SEQ ID NO: 21340 - DNA, 26 bp, Homo Sapiens
gtggtctagtggctaggattcggcgc

SEQ ID NO: 21341 - DNA, 27 bp, Homo Sapiens
gtggtctagtggctaggattcggcgct

SEQ ID NO: 21342 - DNA, 28 bp, Homo Sapiens
gtggtctagtggctaggattcggcgctt

SEQ ID NO: 21343 - DNA, 29 bp, Homo Sapiens
gtggtctagtggctaggattcggcgcttt

SEQ ID NO: 21344 - DNA, 30 bp, Homo Sapiens
gtggtctagtggctaggattcggcgctttc

SEQ ID NO: 21345 - DNA, 33 bp, Homo Sapiens
gtggtctagtggctaggattcggcgctttcacc

SEQ ID NO: 21346 - DNA, 16 bp, Homo Sapiens
gtggtctagtggttag

SEQ ID NO: 21347 - DNA, 19 bp, Homo Sapiens
gtggtctagtggttaggat

SEQ ID NO: 21348 - DNA, 20 bp, Homo Sapiens
gtggtctagtggttaggatt

SEQ ID NO: 21349 - DNA, 21 bp, Homo Sapiens
gtggtctagtggttaggattc

SEQ ID NO: 21350 - DNA, 22 bp, Homo Sapiens
gtggtctagtggttaggattcg

SEQ ID NO: 21351 - DNA, 23 bp, Homo Sapiens
gtggtctagtggttaggattcgg

SEQ ID NO: 21352 - DNA, 24 bp, Homo Sapiens
gtggtctagtggttaggattcggc

SEQ ID NO: 21353 - DNA, 25 bp, Homo Sapiens
gtggtctagtggttaggattcggcg

SEQ ID NO: 21354 - DNA, 26 bp, Homo Sapiens
gtggtctagtggttaggattcggcgc

SEQ ID NO: 21355 - DNA, 27 bp, Homo Sapiens
gtggtctagtggttaggattcggcgct

SEQ ID NO: 21356 - DNA, 28 bp, Homo Sapiens
gtggtctagtggttaggattcggcgctc

SEQ ID NO: 21357 - DNA, 29 bp, Homo Sapiens
gtggtctagtggttaggattcggcgctct

SEQ ID NO: 21358 - DNA, 30 bp, Homo Sapiens
gtggtctagtggttaggattcggcgctctc

SEQ ID NO: 21359 - DNA, 31 bp, Homo Sapiens
gtggtctagtggttaggattcggcgctctca

SEQ ID NO: 21360 - DNA, 33 bp, Homo Sapiens
gtggtctagtggttaggattcggcgctctcacc

SEQ ID NO: 21361 - DNA, 34 bp, Homo Sapiens
gtggtctagtggttaggattcggcgctctcaccg

SEQ ID NO: 21362 - DNA, 43 bp, Homo Sapiens
gtggtctagtggttaggattcggcgctctcaccgccgcggccc

SEQ ID NO: 21363 - DNA, 48 bp, Homo Sapiens
gtggtctagtggttaggattcggcgctctcaccgccgcggcccgggtt

SEQ ID NO: 21364 - DNA, 16 bp, Homo Sapiens
gtggtgagcatagctg

SEQ ID NO: 21365 - DNA, 17 bp, Homo Sapiens
gtggtgagcatagctgc

SEQ ID NO: 21366 - DNA, 18 bp, Homo Sapiens
gtggtgagcatagctgcc

SEQ ID NO: 21367 - DNA, 19 bp, Homo Sapiens
gtggtgagcatagctgcct

SEQ ID NO: 21368 - DNA, 22 bp, Homo Sapiens
gtggtgagcatagctgccttcc

SEQ ID NO: 21369 - DNA, 23 bp, Homo Sapiens
gtggtgagcatagctgccttcca

SEQ ID NO: 21370 - DNA, 39 bp, Homo Sapiens
gtggtgagcatagctgccttccaagcagttgacccgggt

SEQ ID NO: 21371 - DNA, 17 bp, Homo Sapiens
gtggtgagtatccccgc

SEQ ID NO: 21372 - DNA, 18 bp, Homo Sapiens
gtggtgagtatccccgcc

SEQ ID NO: 21373 - DNA, 19 bp, Homo Sapiens
gtggtgagtatccccgcct

SEQ ID NO: 21374 - DNA, 20 bp, Homo Sapiens
gtggtgagtatccccgcctg

SEQ ID NO: 21375 - DNA, 21 bp, Homo Sapiens
gtggtgagtatccccgcctgt

SEQ ID NO: 21376 - DNA, 22 bp, Homo Sapiens
gtggtgagtatccccgcctgtc

SEQ ID NO: 21377 - DNA, 23 bp, Homo Sapiens
gtggtgagtatccccgcctgtca

SEQ ID NO: 21378 - DNA, 24 bp, Homo Sapiens
gtggtgagtatccccgcctgtcac

SEQ ID NO: 21379 - DNA, 25 bp, Homo Sapiens
gtggtgagtatccccgcctgtcacg

SEQ ID NO: 21380 - DNA, 26 bp, Homo Sapiens
gtggtgagtatccccgcctgtcacgc

SEQ ID NO: 21381 - DNA, 27 bp, Homo Sapiens
gtggtgagtatccccgcctgtcacgcg

SEQ ID NO: 21382 - DNA, 30 bp, Homo Sapiens
gtggtgctaataacgccaaggtcgcgggtt

SEQ ID NO: 21383 - DNA, 19 bp, Homo Sapiens
gtggtgtagtggtgagcac

SEQ ID NO: 21384 - DNA, 17 bp, Homo Sapiens
gtggttaaggcattgga

SEQ ID NO: 21385 - DNA, 18 bp, Homo Sapiens
gtggttaaggcattggac

SEQ ID NO: 21386 - DNA, 17 bp, Homo Sapiens
gtggttaaggcgttgga

SEQ ID NO: 21387 - DNA, 16 bp, Homo Sapiens
gtggttagcatagctg

SEQ ID NO: 21388 - DNA, 17 bp, Homo Sapiens
gtggttagcatagctgc

SEQ ID NO: 21389 - DNA, 18 bp, Homo Sapiens
gtggttagcatagctgcc

SEQ ID NO: 21390 - DNA, 19 bp, Homo Sapiens
gtggttagcatagctgcct

SEQ ID NO: 21391 - DNA, 20 bp, Homo Sapiens
gtggttaggattcagcgctc

SEQ ID NO: 21392 - DNA, 16 bp, Homo Sapiens
gtggttaggattcggc

SEQ ID NO: 21393 - DNA, 17 bp, Homo Sapiens
gtggttaggattcggcg

SEQ ID NO: 21394 - DNA, 18 bp, Homo Sapiens
gtggttaggattcggcgc

SEQ ID NO: 21395 - DNA, 19 bp, Homo Sapiens
gtggttaggattcggcgct

SEQ ID NO: 21396 - DNA, 20 bp, Homo Sapiens
gtggttaggattcggcgctc

SEQ ID NO: 21397 - DNA, 21 bp, Homo Sapiens
gtggttaggattcggcgctct

SEQ ID NO: 21398 - DNA, 22 bp, Homo Sapiens
gtggttaggattcggcgctctc

SEQ ID NO: 21399 - DNA, 23 bp, Homo Sapiens
gtggttaggattcggcgctctca

SEQ ID NO: 21400 - DNA, 24 bp, Homo Sapiens
gtggttaggattcggcgctctcac

SEQ ID NO: 21401 - DNA, 25 bp, Homo Sapiens
gtggttaggattcggcgctctcacc

SEQ ID NO: 21402 - DNA, 26 bp, Homo Sapiens
gtggttaggattcggcgctctcaccg

SEQ ID NO: 21403 - DNA, 27 bp, Homo Sapiens
gtggttaggattcggcgctctcaccgc

SEQ ID NO: 21404 - DNA, 28 bp, Homo Sapiens
gtggttaggattcggcgctctcaccgcc

SEQ ID NO: 21405 - DNA, 30 bp, Homo Sapiens
gtggttaggattcggcgctctcaccgccgc

SEQ ID NO: 21406 - DNA, 34 bp, Homo Sapiens
gtggttaggattcggcgctctcaccgccgcggcc

SEQ ID NO: 21407 - DNA, 35 bp, Homo Sapiens
gtggttaggattcggcgctctcaccgccgcggccc

SEQ ID NO: 21408 - DNA, 36 bp, Homo Sapiens
gtggttaggattcggcgctctcaccgccgcggcccg

SEQ ID NO: 21409 - DNA, 37 bp, Homo Sapiens
gtggttaggattcggcgctctcaccgccgcggcccgg

SEQ ID NO: 21410 - DNA, 38 bp, Homo Sapiens
gtggttaggattcggcgctctcaccgccgcggcccggg

SEQ ID NO: 21411 - DNA, 39 bp, Homo Sapiens
gtggttaggattcggcgctctcaccgccgcggcccgggt

SEQ ID NO: 21412 - DNA, 40 bp, Homo Sapiens
gtggttaggattcggcgctctcaccgccgcggcccgggtt

SEQ ID NO: 21413 - DNA, 41 bp, Homo Sapiens
gtggttaggattcggcgctctcaccgccgcggcccgggttc

SEQ ID NO: 21414 - DNA, 45 bp, Homo Sapiens
gtggttaggattcggcgctctcaccgccgcggcccgggttcgatt

SEQ ID NO: 21415 - DNA, 46 bp, Homo Sapiens
gtggttaggattcggcgctctcaccgccgcggcccgggttcgattc

SEQ ID NO: 21416 - DNA, 16 bp, Homo Sapiens
gtggttagtactctgc

SEQ ID NO: 21417 - DNA, 17 bp, Homo Sapiens
gtggttagtactctgcg

SEQ ID NO: 21418 - DNA, 18 bp, Homo Sapiens
gtggttagtactctgcgt

SEQ ID NO: 21419 - DNA, 19 bp, Homo Sapiens
gtggttagtactctgcgtt

SEQ ID NO: 21420 - DNA, 20 bp, Homo Sapiens
gtggttagtactctgcgttg

SEQ ID NO: 21421 - DNA, 21 bp, Homo Sapiens
gtggttagtactctgcgttgt

SEQ ID NO: 21422 - DNA, 22 bp, Homo Sapiens
gtggttagtactctgcgttgtg

SEQ ID NO: 21423 - DNA, 24 bp, Homo Sapiens
gtggttagtactctgcgttgtggc

SEQ ID NO: 21424 - DNA, 25 bp, Homo Sapiens
gtggttagtactctgcgttgtggcc

SEQ ID NO: 21425 - DNA, 26 bp, Homo Sapiens
gtggttagtactctgcgttgtggccg

SEQ ID NO: 21426 - DNA, 27 bp, Homo Sapiens
gtggttagtactctgcgttgtggccgc

SEQ ID NO: 21427 - DNA, 31 bp, Homo Sapiens
gtggttagtactctgcgttgtggccgcagca

SEQ ID NO: 21428 - DNA, 34 bp, Homo Sapiens
gtggttagtactctgcgttgtggccgcagcaacc

SEQ ID NO: 21429 - DNA, 35 bp, Homo Sapiens
gtggttagtactctgcgttgtggccgcagcaacct

SEQ ID NO: 21430 - DNA, 37 bp, Homo Sapiens
gtggttagtactctgcgttgtggccgcagcaacctcg

SEQ ID NO: 21431 - DNA, 38 bp, Homo Sapiens
gtggttagtactctgcgttgtggccgcagcaacctcgg

SEQ ID NO: 21432 - DNA, 20 bp, Homo Sapiens
gtggttagtatccccgcctg

SEQ ID NO: 21433 - DNA, 21 bp, Homo Sapiens
gtggttagtatccccgcctgt

SEQ ID NO: 21434 - DNA, 22 bp, Homo Sapiens
gtggttagtatccccgcctgtc

SEQ ID NO: 21435 - DNA, 23 bp, Homo Sapiens
gtggttagtatccccgcctgtca

SEQ ID NO: 21436 - DNA, 24 bp, Homo Sapiens
gtggttagtatccccgcctgtcac

SEQ ID NO: 21437 - DNA, 25 bp, Homo Sapiens
gtggttagtatccccgcctgtcacg

SEQ ID NO: 21438 - DNA, 27 bp, Homo Sapiens
gtggttagtatccccgcctgtcacgcg

SEQ ID NO: 21439 - DNA, 19 bp, Homo Sapiens
gtggttatcacatctgctt

SEQ ID NO: 21440 - DNA, 20 bp, Homo Sapiens
gtggttatcacatctgcttt

SEQ ID NO: 21441 - DNA, 21 bp, Homo Sapiens
gtggttatcacatctgcttta

SEQ ID NO: 21442 - DNA, 22 bp, Homo Sapiens
gtggttatcacatctgctttac

SEQ ID NO: 21443 - DNA, 19 bp, Homo Sapiens
gtggttatcacattcgcct

SEQ ID NO: 21444 - DNA, 20 bp, Homo Sapiens
gtggttatcacattcgcctc

SEQ ID NO: 21445 - DNA, 21 bp, Homo Sapiens
gtggttatcacattcgcctca

SEQ ID NO: 21446 - DNA, 22 bp, Homo Sapiens
gtggttatcacattcgcctcac

SEQ ID NO: 21447 - DNA, 23 bp, Homo Sapiens
gtggttatcacattcgcctcaca

SEQ ID NO: 21448 - DNA, 17 bp, Homo Sapiens
gtggttatcacgtctgc

SEQ ID NO: 21449 - DNA, 18 bp, Homo Sapiens
gtggttatcacgtctgct

SEQ ID NO: 21450 - DNA, 19 bp, Homo Sapiens
gtggttatcacgtctgctt

SEQ ID NO: 21451 - DNA, 20 bp, Homo Sapiens
gtggttatcacgtctgcttt

SEQ ID NO: 21452 - DNA, 21 bp, Homo Sapiens
gtggttatcacgtctgcttta

SEQ ID NO: 21453 - DNA, 22 bp, Homo Sapiens
gtggttatcacgtctgctttac

SEQ ID NO: 21454 - DNA, 23 bp, Homo Sapiens
gtggttatcacgtctgctttaca

SEQ ID NO: 21455 - DNA, 24 bp, Homo Sapiens
gtggttatcacgtctgctttacac

SEQ ID NO: 21456 - DNA, 25 bp, Homo Sapiens
gtggttatcacgtctgctttacacg

SEQ ID NO: 21457 - DNA, 26 bp, Homo Sapiens
gtggttatcacgtctgctttacacgc

SEQ ID NO: 21458 - DNA, 37 bp, Homo Sapiens
gtggttatcacgtctgctttacacgcagaaggtcctg

SEQ ID NO: 21459 - DNA, 16 bp, Homo Sapiens
gtggttatcacgttcg

SEQ ID NO: 21460 - DNA, 17 bp, Homo Sapiens
gtggttatcacgttcgc

SEQ ID NO: 21461 - DNA, 18 bp, Homo Sapiens
gtggttatcacgttcgcc

SEQ ID NO: 21462 - DNA, 19 bp, Homo Sapiens
gtggttatcacgttcgcct

SEQ ID NO: 21463 - DNA, 20 bp, Homo Sapiens
gtggttatcacgttcgccta

SEQ ID NO: 21464 - DNA, 25 bp, Homo Sapiens
gtggttatcacgttcgcctaacacg

SEQ ID NO: 21465 - DNA, 20 bp, Homo Sapiens
gtggttatcacgttcgcctc

SEQ ID NO: 21466 - DNA, 21 bp, Homo Sapiens
gtggttatcacgttcgcctca

SEQ ID NO: 21467 - DNA, 22 bp, Homo Sapiens
gtggttatcacgttcgcctcac

SEQ ID NO: 21468 - DNA, 23 bp, Homo Sapiens
gtggttatcacgttcgcctcaca

SEQ ID NO: 21469 - DNA, 24 bp, Homo Sapiens
gtggttatcacgttcgcctcacac

SEQ ID NO: 21470 - DNA, 25 bp, Homo Sapiens
gtggttatcacgttcgcctcacacg

SEQ ID NO: 21471 - DNA, 26 bp, Homo Sapiens
gtggttatcacgttcgcctcacacgc

SEQ ID NO: 21472 - DNA, 27 bp, Homo Sapiens
gtggttatcacgttcgcctcacacgcg

SEQ ID NO: 21473 - DNA, 17 bp, Homo Sapiens
gtggttcagtggtagaa

SEQ ID NO: 21474 - DNA, 18 bp, Homo Sapiens
gtggttcagtggtagaat

SEQ ID NO: 21475 - DNA, 19 bp, Homo Sapiens
gtggttcagtggtagaatt

SEQ ID NO: 21476 - DNA, 20 bp, Homo Sapiens
gtggttcagtggtagaattc

SEQ ID NO: 21477 - DNA, 21 bp, Homo Sapiens
gtggttcagtggtagaattct

SEQ ID NO: 21478 - DNA, 22 bp, Homo Sapiens
gtggttcagtggtagaattctc

SEQ ID NO: 21479 - DNA, 23 bp, Homo Sapiens
gtggttcagtggtagaattctcg

SEQ ID NO: 21480 - DNA, 24 bp, Homo Sapiens
gtggttcagtggtagaattctcgc

SEQ ID NO: 21481 - DNA, 25 bp, Homo Sapiens
gtggttcagtggtagaattctcgcc

SEQ ID NO: 21482 - DNA, 26 bp, Homo Sapiens
gtggttcagtggtagaattctcgcct

SEQ ID NO: 21483 - DNA, 27 bp, Homo Sapiens
gtggttcagtggtagaattctcgcctc

SEQ ID NO: 21484 - DNA, 29 bp, Homo Sapiens
gtggttcagtggtagaattctcgcctccc

SEQ ID NO: 21485 - DNA, 30 bp, Homo Sapiens
gtggttcagtggtagaattctcgcctccca

SEQ ID NO: 21486 - DNA, 27 bp, Homo Sapiens
gtggttcagtggtagaattctcgcctg

SEQ ID NO: 21487 - DNA, 28 bp, Homo Sapiens
gtggttcagtggtagaattctcgcctgc

SEQ ID NO: 21488 - DNA, 29 bp, Homo Sapiens
gtggttcagtggtagaattctcgcctgcc

SEQ ID NO: 21489 - DNA, 30 bp, Homo Sapiens
gtggttcagtggtagaattctcgcctgcca

SEQ ID NO: 21490 - DNA, 31 bp, Homo Sapiens
gtggttcagtggtagaattctcgcctgccac

SEQ ID NO: 21491 - DNA, 32 bp, Homo Sapiens
gtggttcagtggtagaattctcgcctgccacg

SEQ ID NO: 21492 - DNA, 36 bp, Homo Sapiens
gtggttcagtggtagaattctcgcctgccacgcggg

SEQ ID NO: 21493 - DNA, 42 bp, Homo Sapiens
gtggttcagtggtagaattctcgcctgccacgcgggaggccc

SEQ ID NO: 21494 - DNA, 44 bp, Homo Sapiens
gtggttcagtggtagaattctcgcctgccacgcgggaggcccgg

SEQ ID NO: 21495 - DNA, 45 bp, Homo Sapiens
gtggttcagtggtagaattctcgcctgccacgcgggaggcccggg

SEQ ID NO: 21496 - DNA, 46 bp, Homo Sapiens
gtggttcagtggtagaattctcgcctgccacgcgggaggcccgggt

SEQ ID NO: 21497 - DNA, 16 bp, Homo Sapiens
gtggttgtagtccgtg

SEQ ID NO: 21498 - DNA, 17 bp, Homo Sapiens
gtggttgtagtccgtgc

SEQ ID NO: 21499 - DNA, 18 bp, Homo Sapiens
gtggttgtagtccgtgcg

SEQ ID NO: 21500 - DNA, 19 bp, Homo Sapiens
gtggttgtagtccgtgcga

SEQ ID NO: 21501 - DNA, 20 bp, Homo Sapiens
gtggttgtagtccgtgcgag

SEQ ID NO: 21502 - DNA, 21 bp, Homo Sapiens
gtggttgtagtccgtgcgaga

SEQ ID NO: 21503 - DNA, 22 bp, Homo Sapiens
gtggttgtagtccgtgcgagaa

SEQ ID NO: 21504 - DNA, 23 bp, Homo Sapiens
gtggttgtagtccgtgcgagaat

SEQ ID NO: 21505 - DNA, 24 bp, Homo Sapiens
gtggttgtagtccgtgcgagaata

SEQ ID NO: 21506 - DNA, 25 bp, Homo Sapiens
gtggttgtagtccgtgcgagaatac

SEQ ID NO: 21507 - DNA, 26 bp, Homo Sapiens
gtggttgtagtccgtgcgagaatacc

SEQ ID NO: 21508 - DNA, 27 bp, Homo Sapiens
gtggttgtagtccgtgcgagaatacca

SEQ ID NO: 21509 - DNA, 20 bp, Homo Sapiens
gtgtaatggtaagcactctg

SEQ ID NO: 21510 - DNA, 32 bp, Homo Sapiens
gtgtaatggtaagcactctggactctgaatcc

SEQ ID NO: 21511 - DNA, 20 bp, Homo Sapiens
gtgtaatggtcagcactctg

SEQ ID NO: 21512 - DNA, 43 bp, Homo Sapiens
gtgtaatggtcagcactctggactctgaatccagcgatccgag

SEQ ID NO: 21513 - DNA, 18 bp, Homo Sapiens
gtgtaatggtgagcactc

SEQ ID NO: 21514 - DNA, 19 bp, Homo Sapiens
gtgtaatggtgagcactct

SEQ ID NO: 21515 - DNA, 20 bp, Homo Sapiens
gtgtaatggtgagcactctg

SEQ ID NO: 21516 - DNA, 22 bp, Homo Sapiens
gtgtaatggtgagcactctgga

SEQ ID NO: 21517 - DNA, 24 bp, Homo Sapiens
gtgtaatggtgagcactctggact

SEQ ID NO: 21518 - DNA, 25 bp, Homo Sapiens
gtgtaatggtgagcactctggactc

SEQ ID NO: 21519 - DNA, 26 bp, Homo Sapiens
gtgtaatggtgagcactctggactct

SEQ ID NO: 21520 - DNA, 27 bp, Homo Sapiens
gtgtaatggtgagcactctggactctg

SEQ ID NO: 21521 - DNA, 30 bp, Homo Sapiens
gtgtaatggtgagcactctggactctgaat

SEQ ID NO: 21522 - DNA, 31 bp, Homo Sapiens
gtgtaatggtgagcactctggactctgaatc

SEQ ID NO: 21523 - DNA, 32 bp, Homo Sapiens
gtgtaatggtgagcactctggactctgaatcc

SEQ ID NO: 21524 - DNA, 43 bp, Homo Sapiens
gtgtaatggtgagcactctggactctgaatccagcgatccgag

SEQ ID NO: 21525 - DNA, 18 bp, Homo Sapiens
gtgtaatggttagcactc

SEQ ID NO: 21526 - DNA, 19 bp, Homo Sapiens
gtgtaatggttagcactct

SEQ ID NO: 21527 - DNA, 20 bp, Homo Sapiens
gtgtaatggttagcactctg

SEQ ID NO: 21528 - DNA, 21 bp, Homo Sapiens
gtgtaatggttagcactctgg

SEQ ID NO: 21529 - DNA, 22 bp, Homo Sapiens
gtgtaatggttagcactctgga

SEQ ID NO: 21530 - DNA, 23 bp, Homo Sapiens
gtgtaatggttagcactctggac

SEQ ID NO: 21531 - DNA, 24 bp, Homo Sapiens
gtgtaatggttagcactctggact

SEQ ID NO: 21532 - DNA, 25 bp, Homo Sapiens
gtgtaatggttagcactctggactc

SEQ ID NO: 21533 - DNA, 26 bp, Homo Sapiens
gtgtaatggttagcactctggactct

SEQ ID NO: 21534 - DNA, 27 bp, Homo Sapiens
gtgtaatggttagcactctggactctg

SEQ ID NO: 21535 - DNA, 28 bp, Homo Sapiens
gtgtaatggttagcactctggactctga

SEQ ID NO: 21536 - DNA, 29 bp, Homo Sapiens
gtgtaatggttagcactctggactctgaa

SEQ ID NO: 21537 - DNA, 31 bp, Homo Sapiens
gtgtaatggttagcactctggactctgaatc

SEQ ID NO: 21538 - DNA, 32 bp, Homo Sapiens
gtgtaatggttagcactctggactctgaatcc

SEQ ID NO: 21539 - DNA, 36 bp, Homo Sapiens
gtgtaatggttagcactctggactctgaatccagcg

SEQ ID NO: 21540 - DNA, 39 bp, Homo Sapiens
gtgtaatggttagcactctggactctgaatccagcgatc

SEQ ID NO: 21541 - DNA, 40 bp, Homo Sapiens
gtgtaatggttagcactctggactctgaatccagcgatcc

SEQ ID NO: 21542 - DNA, 41 bp, Homo Sapiens
gtgtaatggttagcactctggactctgaatccagcgatccg

SEQ ID NO: 21543 - DNA, 43 bp, Homo Sapiens
gtgtaatggttagcactctggactctgaatccagcgatccgag

SEQ ID NO: 21544 - DNA, 44 bp, Homo Sapiens
gtgtaatggttagcactctggactctgaatccagcgatccgagt

SEQ ID NO: 21545 - DNA, 45 bp, Homo Sapiens
gtgtaatggttagcactctggactctgaatccagcgatccgagtt

SEQ ID NO: 21546 - DNA, 46 bp, Homo Sapiens
gtgtaatggttagcactctggactctgaatccagcgatccgagttc

SEQ ID NO: 21547 - DNA, 47 bp, Homo Sapiens
gtgtaatggttagcactctggactctgaatccagcgatccgagttca

SEQ ID NO: 21548 - DNA, 25 bp, Homo Sapiens
gtgtaatggttagcactctggactt

SEQ ID NO: 21549 - DNA, 26 bp, Homo Sapiens
gtgtaatggttagcactctggacttt

SEQ ID NO: 21550 - DNA, 32 bp, Homo Sapiens
gtgtaatggttagcactctggactttgaatcc

SEQ ID NO: 21551 - DNA, 36 bp, Homo Sapiens
gtgtaatggttagcactctggactttgaatccagcg

SEQ ID NO: 21552 - DNA, 24 bp, Homo Sapiens
gtgtagcggttatcacattcgcct

SEQ ID NO: 21553 - DNA, 25 bp, Homo Sapiens
gtgtagcggttatcacattcgcctc

SEQ ID NO: 21554 - DNA, 21 bp, Homo Sapiens
gtgtagcggttatcacgtctg

SEQ ID NO: 21555 - DNA, 18 bp, Homo Sapiens
gtgtagctcagtggtaga

SEQ ID NO: 21556 - DNA, 28 bp, Homo Sapiens
gtgtagctcagtggtagagcatttgact

SEQ ID NO: 21557 - DNA, 29 bp, Homo Sapiens
gtgtagctcagtggtagagcatttgactg

SEQ ID NO: 21558 - DNA, 30 bp, Homo Sapiens
gtgtagctcagtggtagagcatttgactgc

SEQ ID NO: 21559 - DNA, 31 bp, Homo Sapiens
gtgtagctcagtggtagagcatttgactgca

SEQ ID NO: 21560 - DNA, 27 bp, Homo Sapiens
gtgtagctcagtggtagagcgcgtgct

SEQ ID NO: 21561 - DNA, 31 bp, Homo Sapiens
gtgtagctcagtggtagagcgcgtgcttcgc

SEQ ID NO: 21562 - DNA, 18 bp, Homo Sapiens
gtgtagtggtatcatgca

SEQ ID NO: 21563 - DNA, 23 bp, Homo Sapiens
gtgtagtggtatcatgcaagatt

SEQ ID NO: 21564 - DNA, 24 bp, Homo Sapiens
gtgtagtggtatcatgcaagattc

SEQ ID NO: 21565 - DNA, 25 bp, Homo Sapiens
gtgtagtggtatcatgcaagattcc

SEQ ID NO: 21566 - DNA, 26 bp, Homo Sapiens
gtgtagtggtatcatgcaagattccc

SEQ ID NO: 21567 - DNA, 31 bp, Homo Sapiens
gtgtagtggtatcatgcaagattcccattct

SEQ ID NO: 21568 - DNA, 32 bp, Homo Sapiens
gtgtagtggtatcatgcaagattcccattctt

SEQ ID NO: 21569 - DNA, 41 bp, Homo Sapiens
gtgtagtggtatcatgcaagattcccattcttgcgacccgg

SEQ ID NO: 21570 - DNA, 42 bp, Homo Sapiens
gtgtagtggtatcatgcaagattcccattcttgcgacccggg

SEQ ID NO: 21571 - DNA, 43 bp, Homo Sapiens
gtgtagtggtatcatgcaagattcccattcttgcgacccgggt

SEQ ID NO: 21572 - DNA, 23 bp, Homo Sapiens
gtgtagtggtcatcacgttcgcc

SEQ ID NO: 21573 - DNA, 24 bp, Homo Sapiens
gtgtagtggtcatcacgttcgcct

SEQ ID NO: 21574 - DNA, 23 bp, Homo Sapiens
gtgtagtggttatcacattcgcc

SEQ ID NO: 21575 - DNA, 24 bp, Homo Sapiens
gtgtagtggttatcacattcgcct

SEQ ID NO: 21576 - DNA, 21 bp, Homo Sapiens
gtgtagtggttatcacgtctg

SEQ ID NO: 21577 - DNA, 23 bp, Homo Sapiens
gtgtagtggttatcacgtctgct

SEQ ID NO: 21578 - DNA, 24 bp, Homo Sapiens
gtgtagtggttatcacgtctgctt

SEQ ID NO: 21579 - DNA, 25 bp, Homo Sapiens
gtgtagtggttatcacgtctgcttt

SEQ ID NO: 21580 - DNA, 27 bp, Homo Sapiens
gtgtagtggttatcacgtctgctttac

SEQ ID NO: 21581 - DNA, 21 bp, Homo Sapiens
gtgtagtggttatcacgttcg

SEQ ID NO: 21582 - DNA, 22 bp, Homo Sapiens
gtgtagtggttatcacgttcgc

SEQ ID NO: 21583 - DNA, 23 bp, Homo Sapiens
gtgtagtggttatcacgttcgcc

SEQ ID NO: 21584 - DNA, 24 bp, Homo Sapiens
gtgtagtggttatcacgttcgcct

SEQ ID NO: 21585 - DNA, 25 bp, Homo Sapiens
gtgtagtggttatcacgttcgcctc

SEQ ID NO: 21586 - DNA, 26 bp, Homo Sapiens
gtgtagtggttatcacgttcgcctca

SEQ ID NO: 21587 - DNA, 27 bp, Homo Sapiens
gtgtagtggttatcacgttcgcctcac

SEQ ID NO: 21588 - DNA, 28 bp, Homo Sapiens
gtgtagtggttatcacgttcgcctcaca

SEQ ID NO: 21589 - DNA, 29 bp, Homo Sapiens
gtgtagtggttatcacgttcgcctcacac

SEQ ID NO: 21590 - DNA, 30 bp, Homo Sapiens
gtgtagtggttatcacgttcgcctcacacg

SEQ ID NO: 21591 - DNA, 45 bp, Homo Sapiens
gtgtagtggttatcacgttcgcctcacacgcgaaaggtccccggt

SEQ ID NO: 21592 - DNA, 24 bp, Homo Sapiens
gtgtagtggttatcacgtttgcct

SEQ ID NO: 21593 - DNA, 24 bp, Homo Sapiens
gtgtagtggttatcatgttcgcct

SEQ ID NO: 21594 - DNA, 16 bp, Homo Sapiens
gtgtgaggtcccgggt

SEQ ID NO: 21595 - DNA, 35 bp, Homo Sapiens
gtgtgaggtcccgggttcaatccccggcatctcca

SEQ ID NO: 21596 - DNA, 17 bp, Homo Sapiens
gtgtgataggtggcacg

SEQ ID NO: 21597 - DNA, 20 bp, Homo Sapiens
gtgtgataggtggcacggag

SEQ ID NO: 21598 - DNA, 22 bp, Homo Sapiens
gtgtgataggtggcacggagaa

SEQ ID NO: 21599 - DNA, 23 bp, Homo Sapiens
gtgtgataggtggcacggagaat

SEQ ID NO: 21600 - DNA, 27 bp, Homo Sapiens
gtgtgataggtggcacggagaattttg

SEQ ID NO: 21601 - DNA, 18 bp, Homo Sapiens
gtgtggccgagcggtcta

SEQ ID NO: 21602 - DNA, 20 bp, Homo Sapiens
gtgttcaaatcacgtcgggg

SEQ ID NO: 21603 - DNA, 25 bp, Homo Sapiens
gtgttcaaatcacgtcggggtcacc

SEQ ID NO: 21604 - DNA, 19 bp, Homo Sapiens
gtgttcaagtcacgtcggg

SEQ ID NO: 21605 - DNA, 25 bp, Homo Sapiens
gtgttcaagtcacgtcggggtcacc

SEQ ID NO: 21606 - DNA, 26 bp, Homo Sapiens
gtgttcaagtcacgtcggggtcacca

SEQ ID NO: 21607 - DNA, 22 bp, Homo Sapiens
gtgttcgaatcacgtcggggtc

SEQ ID NO: 21608 - DNA, 23 bp, Homo Sapiens
gtgttcgaatcacgtcggggtca

SEQ ID NO: 21609 - DNA, 24 bp, Homo Sapiens
gtgttcgaatcacgtcggggtcac

SEQ ID NO: 21610 - DNA, 25 bp, Homo Sapiens
gtgttcgaatcacgtcggggtcacc

SEQ ID NO: 21611 - DNA, 26 bp, Homo Sapiens
gtgttcgaatcacgtcggggtcacca

SEQ ID NO: 21612 - DNA, 20 bp, Homo Sapiens
gtgtttgtgggtttaagtcc

SEQ ID NO: 21613 - DNA, 22 bp, Homo Sapiens
gtgtttgtgggtttaagtccca

SEQ ID NO: 21614 - DNA, 23 bp, Homo Sapiens
gtgtttgtgggtttaagtcccat

SEQ ID NO: 21615 - DNA, 24 bp, Homo Sapiens
gtgtttgtgggtttaagtcccatt

SEQ ID NO: 21616 - DNA, 27 bp, Homo Sapiens
gtgtttgtgggtttaagtcccattggt

SEQ ID NO: 21617 - DNA, 28 bp, Homo Sapiens
gtgtttgtgggtttaagtcccattggtc

SEQ ID NO: 21618 - DNA, 29 bp, Homo Sapiens
gtgtttgtgggtttaagtcccattggtct

SEQ ID NO: 21619 - DNA, 30 bp, Homo Sapiens
gtgtttgtgggtttaagtcccattggtcta

SEQ ID NO: 21620 - DNA, 31 bp, Homo Sapiens
gtgtttgtgggtttaagtcccattggtctag

SEQ ID NO: 21621 - DNA, 32 bp, Homo Sapiens
gtgtttgtgggtttaagtcccattggtctagc

SEQ ID NO: 21622 - DNA, 33 bp, Homo Sapiens
gtgtttgtgggtttaagtcccattggtctagcc

SEQ ID NO: 21623 - DNA, 34 bp, Homo Sapiens
gtgtttgtgggtttaagtcccattggtctagcca

SEQ ID NO: 21624 - DNA, 16 bp, Homo Sapiens
gttaaagactttttct

SEQ ID NO: 21625 - DNA, 17 bp, Homo Sapiens
gttaaagactttttctc

SEQ ID NO: 21626 - DNA, 18 bp, Homo Sapiens
gttaaagactttttctct

SEQ ID NO: 21627 - DNA, 19 bp, Homo Sapiens
gttaaagactttttctctg

SEQ ID NO: 21628 - DNA, 20 bp, Homo Sapiens
gttaaagactttttctctga

SEQ ID NO: 21629 - DNA, 21 bp, Homo Sapiens
gttaaagactttttctctgac

SEQ ID NO: 21630 - DNA, 22 bp, Homo Sapiens
gttaaagactttttctctgacc

SEQ ID NO: 21631 - DNA, 23 bp, Homo Sapiens
gttaaagactttttctctgacca

SEQ ID NO: 21632 - DNA, 16 bp, Homo Sapiens
gttaaagattaagaga

SEQ ID NO: 21633 - DNA, 17 bp, Homo Sapiens
gttaaagattaagagaa

SEQ ID NO: 21634 - DNA, 18 bp, Homo Sapiens
gttaaagattaagagaac

SEQ ID NO: 21635 - DNA, 19 bp, Homo Sapiens
gttaaagattaagagaacc

SEQ ID NO: 21636 - DNA, 20 bp, Homo Sapiens
gttaaagattaagagaacca

SEQ ID NO: 21637 - DNA, 21 bp, Homo Sapiens
gttaaagattaagagaaccaa

SEQ ID NO: 21638 - DNA, 22 bp, Homo Sapiens
gttaaagattaagagaaccaac

SEQ ID NO: 21639 - DNA, 23 bp, Homo Sapiens
gttaaagattaagagaaccaaca

SEQ ID NO: 21640 - DNA, 24 bp, Homo Sapiens
gttaaagattaagagaaccaacac

SEQ ID NO: 21641 - DNA, 25 bp, Homo Sapiens
gttaaagattaagagaaccaacacc

SEQ ID NO: 21642 - DNA, 26 bp, Homo Sapiens
gttaaagattaagagaaccaacacct

SEQ ID NO: 21643 - DNA, 27 bp, Homo Sapiens
gttaaagattaagagaaccaacacctc

SEQ ID NO: 21644 - DNA, 28 bp, Homo Sapiens
gttaaagattaagagaaccaacacctct

SEQ ID NO: 21645 - DNA, 29 bp, Homo Sapiens
gttaaagattaagagaaccaacacctctt

SEQ ID NO: 21646 - DNA, 30 bp, Homo Sapiens
gttaaagattaagagaaccaacacctcttt

SEQ ID NO: 21647 - DNA, 31 bp, Homo Sapiens
gttaaagattaagagaaccaacacctcttta

SEQ ID NO: 21648 - DNA, 32 bp, Homo Sapiens
gttaaagattaagagaaccaacacctctttac

SEQ ID NO: 21649 - DNA, 33 bp, Homo Sapiens
gttaaagattaagagaaccaacacctctttaca

SEQ ID NO: 21650 - DNA, 34 bp, Homo Sapiens
gttaaagattaagagaaccaacacctctttacag

SEQ ID NO: 21651 - DNA, 35 bp, Homo Sapiens
gttaaagattaagagaaccaacacctctttacagt

SEQ ID NO: 21652 - DNA, 36 bp, Homo Sapiens
gttaaagattaagagaaccaacacctctttacagtg

SEQ ID NO: 21653 - DNA, 37 bp, Homo Sapiens
gttaaagattaagagaaccaacacctctttacagtga

SEQ ID NO: 21654 - DNA, 38 bp, Homo Sapiens
gttaaagattaagagaaccaacacctctttacagtgac

SEQ ID NO: 21655 - DNA, 39 bp, Homo Sapiens
gttaaagattaagagaaccaacacctctttacagtgacc

SEQ ID NO: 21656 - DNA, 40 bp, Homo Sapiens
gttaaagattaagagaaccaacacctctttacagtgacca

SEQ ID NO: 21657 - DNA, 17 bp, Homo Sapiens
gttaaatacagaccaag

SEQ ID NO: 21658 - DNA, 18 bp, Homo Sapiens
gttaaatacagaccaaga

SEQ ID NO: 21659 - DNA, 20 bp, Homo Sapiens
gttaaatacagaccaagagc

SEQ ID NO: 21660 - DNA, 21 bp, Homo Sapiens
gttaaatacagaccaagagcc

SEQ ID NO: 21661 - DNA, 22 bp, Homo Sapiens
gttaaatacagaccaagagcct

SEQ ID NO: 21662 - DNA, 23 bp, Homo Sapiens
gttaaatacagaccaagagcctt

SEQ ID NO: 21663 - DNA, 24 bp, Homo Sapiens
gttaaatacagaccaagagccttc

SEQ ID NO: 21664 - DNA, 25 bp, Homo Sapiens
gttaaatacagaccaagagccttca

SEQ ID NO: 21665 - DNA, 26 bp, Homo Sapiens
gttaaatacagaccaagagccttcaa

SEQ ID NO: 21666 - DNA, 30 bp, Homo Sapiens
gttaaatacagaccaagagccttcaaagcc

SEQ ID NO: 21667 - DNA, 31 bp, Homo Sapiens
gttaaatacagaccaagagccttcaaagccc

SEQ ID NO: 21668 - DNA, 16 bp, Homo Sapiens
gttaaattataggcta

SEQ ID NO: 21669 - DNA, 17 bp, Homo Sapiens
gttaaattataggctaa

SEQ ID NO: 21670 - DNA, 18 bp, Homo Sapiens
gttaaattataggctaaa

SEQ ID NO: 21671 - DNA, 19 bp, Homo Sapiens
gttaaattataggctaaat

SEQ ID NO: 21672 - DNA, 20 bp, Homo Sapiens
gttaaattataggctaaatc

SEQ ID NO: 21673 - DNA, 21 bp, Homo Sapiens
gttaaattataggctaaatcc

SEQ ID NO: 21674 - DNA, 22 bp, Homo Sapiens
gttaaattataggctaaatcct

SEQ ID NO: 21675 - DNA, 25 bp, Homo Sapiens
gttaaattataggctaaatcctata

SEQ ID NO: 21676 - DNA, 26 bp, Homo Sapiens
gttaaattataggctaaatcctatat

SEQ ID NO: 21677 - DNA, 27 bp, Homo Sapiens
gttaaattataggctaaatcctatata

SEQ ID NO: 21678 - DNA, 29 bp, Homo Sapiens
gttaaattataggctaaatcctatatatc

SEQ ID NO: 21679 - DNA, 30 bp, Homo Sapiens
gttaaattataggctaaatcctatatatct

SEQ ID NO: 21680 - DNA, 34 bp, Homo Sapiens
gttaaattataggctaaatcctatatatcttacc

SEQ ID NO: 21681 - DNA, 42 bp, Homo Sapiens
gttaaccgaaaggttggtggttcgagcccacccagggacgcc

SEQ ID NO: 21682 - DNA, 43 bp, Homo Sapiens
gttaaccgaaaggttggtggttcgagcccacccagggacgcca

SEQ ID NO: 21683 - DNA, 17 bp, Homo Sapiens
gttaactaagtgtttgt

SEQ ID NO: 21684 - DNA, 18 bp, Homo Sapiens
gttaactaagtgtttgtg

SEQ ID NO: 21685 - DNA, 19 bp, Homo Sapiens
gttaactaagtgtttgtgg

SEQ ID NO: 21686 - DNA, 20 bp, Homo Sapiens
gttaactaagtgtttgtggg

SEQ ID NO: 21687 - DNA, 21 bp, Homo Sapiens
gttaactaagtgtttgtgggt

SEQ ID NO: 21688 - DNA, 22 bp, Homo Sapiens
gttaactaagtgtttgtgggtt

SEQ ID NO: 21689 - DNA, 23 bp, Homo Sapiens
gttaactaagtgtttgtgggttt

SEQ ID NO: 21690 - DNA, 28 bp, Homo Sapiens
gttaactaagtgtttgtgggtttaagtc

SEQ ID NO: 21691 - DNA, 29 bp, Homo Sapiens
gttaactaagtgtttgtgggtttaagtcc

SEQ ID NO: 21692 - DNA, 33 bp, Homo Sapiens
gttaactaagtgtttgtgggtttaagtcccatt

SEQ ID NO: 21693 - DNA, 37 bp, Homo Sapiens
gttaactaagtgtttgtgggtttaagtcccattggtc

SEQ ID NO: 21694 - DNA, 38 bp, Homo Sapiens
gttaactaagtgtttgtgggtttaagtcccattggtct

SEQ ID NO: 21695 - DNA, 39 bp, Homo Sapiens
gttaactaagtgtttgtgggtttaagtcccattggtcta

SEQ ID NO: 21696 - DNA, 40 bp, Homo Sapiens
gttaactaagtgtttgtgggtttaagtcccattggtctag

SEQ ID NO: 21697 - DNA, 41 bp, Homo Sapiens
gttaactaagtgtttgtgggtttaagtcccattggtctagc

SEQ ID NO: 21698 - DNA, 42 bp, Homo Sapiens
gttaactaagtgtttgtgggtttaagtcccattggtctagcc

SEQ ID NO: 21699 - DNA, 43 bp, Homo Sapiens
gttaactaagtgtttgtgggtttaagtcccattggtctagcca

SEQ ID NO: 21700 - DNA, 27 bp, Homo Sapiens
gttaacttccaattaactagttttgac

SEQ ID NO: 21701 - DNA, 16 bp, Homo Sapiens
gttaagatggcagagc

SEQ ID NO: 21702 - DNA, 17 bp, Homo Sapiens
gttaagatggcagagcc

SEQ ID NO: 21703 - DNA, 18 bp, Homo Sapiens
gttaagatggcagagccc

SEQ ID NO: 21704 - DNA, 19 bp, Homo Sapiens
gttaagatggcagagccca

SEQ ID NO: 21705 - DNA, 19 bp, Homo Sapiens
gttaagatggcagagcccg

SEQ ID NO: 21706 - DNA, 20 bp, Homo Sapiens
gttaagatggcagagcccgg

SEQ ID NO: 21707 - DNA, 21 bp, Homo Sapiens
gttaagatggcagagcccggc

SEQ ID NO: 21708 - DNA, 22 bp, Homo Sapiens
gttaagatggcagagcccggca

SEQ ID NO: 21709 - DNA, 21 bp, Homo Sapiens
gttaagatggcagagcccggt

SEQ ID NO: 21710 - DNA, 22 bp, Homo Sapiens
gttaagatggcagagcccggta

SEQ ID NO: 21711 - DNA, 23 bp, Homo Sapiens
gttaagatggcagagcccggtaa

SEQ ID NO: 21712 - DNA, 24 bp, Homo Sapiens
gttaagatggcagagcccggtaat

SEQ ID NO: 21713 - DNA, 25 bp, Homo Sapiens
gttaagatggcagagcccggtaatc

SEQ ID NO: 21714 - DNA, 26 bp, Homo Sapiens
gttaagatggcagagcccggtaatcg

SEQ ID NO: 21715 - DNA, 27 bp, Homo Sapiens
gttaagatggcagagcccggtaatcgc

SEQ ID NO: 21716 - DNA, 28 bp, Homo Sapiens
gttaagatggcagagcccggtaatcgca

SEQ ID NO: 21717 - DNA, 29 bp, Homo Sapiens
gttaagatggcagagcccggtaatcgcat

SEQ ID NO: 21718 - DNA, 30 bp, Homo Sapiens
gttaagatggcagagcccggtaatcgcata

SEQ ID NO: 21719 - DNA, 31 bp, Homo Sapiens
gttaagatggcagagcccggtaatcgcataa

SEQ ID NO: 21720 - DNA, 32 bp, Homo Sapiens
gttaagatggcagagcccggtaatcgcataaa

SEQ ID NO: 21721 - DNA, 33 bp, Homo Sapiens
gttaagatggcagagcccggtaatcgcataaaa

SEQ ID NO: 21722 - DNA, 34 bp, Homo Sapiens
gttaagatggcagagcccggtaatcgcataaaac

SEQ ID NO: 21723 - DNA, 35 bp, Homo Sapiens
gttaagatggcagagcccggtaatcgcataaaact

SEQ ID NO: 21724 - DNA, 36 bp, Homo Sapiens
gttaagatggcagagcccggtaatcgcataaaactt

SEQ ID NO: 21725 - DNA, 37 bp, Homo Sapiens
gttaagatggcagagcccggtaatcgcataaaactta

SEQ ID NO: 21726 - DNA, 38 bp, Homo Sapiens
gttaagatggcagagcccggtaatcgcataaaacttaa

SEQ ID NO: 21727 - DNA, 39 bp, Homo Sapiens
gttaagatggcagagcccggtaatcgcataaaacttaaa

SEQ ID NO: 21728 - DNA, 40 bp, Homo Sapiens
gttaagatggcagagcccggtaatcgcataaaacttaaaa

SEQ ID NO: 21729 - DNA, 41 bp, Homo Sapiens
gttaagatggcagagcccggtaatcgcataaaacttaaaac

SEQ ID NO: 21730 - DNA, 42 bp, Homo Sapiens
gttaagatggcagagcccggtaatcgcataaaacttaaaact

SEQ ID NO: 21731 - DNA, 43 bp, Homo Sapiens
gttaagatggcagagcccggtaatcgcataaaacttaaaactt

SEQ ID NO: 21732 - DNA, 44 bp, Homo Sapiens
gttaagatggcagagcccggtaatcgcataaaacttaaaacttt

SEQ ID NO: 21733 - DNA, 45 bp, Homo Sapiens
gttaagatggcagagcccggtaatcgcataaaacttaaaacttta

SEQ ID NO: 21734 - DNA, 46 bp, Homo Sapiens
gttaagatggcagagcccggtaatcgcataaaacttaaaactttac

SEQ ID NO: 21735 - DNA, 47 bp, Homo Sapiens
gttaagatggcagagcccggtaatcgcataaaacttaaaactttaca

SEQ ID NO: 21736 - DNA, 48 bp, Homo Sapiens
gttaagatggcagagcccggtaatcgcataaaacttaaaactttacag

SEQ ID NO: 21737 - DNA, 18 bp, Homo Sapiens
gttaagatggcagagcct

SEQ ID NO: 21738 - DNA, 20 bp, Homo Sapiens
gttaagatggcagagcctgg

SEQ ID NO: 21739 - DNA, 18 bp, Homo Sapiens
gttaagatggcatagccc

SEQ ID NO: 21740 - DNA, 16 bp, Homo Sapiens
gttagagcactggtct

SEQ ID NO: 21741 - DNA, 16 bp, Homo Sapiens
gttagcactctggact

SEQ ID NO: 21742 - DNA, 17 bp, Homo Sapiens
gttagcactctggactc

SEQ ID NO: 21743 - DNA, 18 bp, Homo Sapiens
gttagcactctggactct

SEQ ID NO: 21744 - DNA, 19 bp, Homo Sapiens
gttagcactctggactctg

SEQ ID NO: 21745 - DNA, 20 bp, Homo Sapiens
gttagcactctggactctga

SEQ ID NO: 21746 - DNA, 21 bp, Homo Sapiens
gttagcactctggactctgaa

SEQ ID NO: 21747 - DNA, 22 bp, Homo Sapiens
gttagcactctggactctgaat

SEQ ID NO: 21748 - DNA, 23 bp, Homo Sapiens
gttagcactctggactctgaatc

SEQ ID NO: 21749 - DNA, 24 bp, Homo Sapiens
gttagcactctggactctgaatcc

SEQ ID NO: 21750 - DNA, 25 bp, Homo Sapiens
gttagcactctggactctgaatcca

SEQ ID NO: 21751 - DNA, 26 bp, Homo Sapiens
gttagcactctggactctgaatccag

SEQ ID NO: 21752 - DNA, 27 bp, Homo Sapiens
gttagcactctggactctgaatccagc

SEQ ID NO: 21753 - DNA, 28 bp, Homo Sapiens
gttagcactctggactctgaatccagcg

SEQ ID NO: 21754 - DNA, 33 bp, Homo Sapiens
gttagcactctggactctgaatccagcgatccg

SEQ ID NO: 21755 - DNA, 34 bp, Homo Sapiens
gttagcactctggactctgaatccagcgatccga

SEQ ID NO: 21756 - DNA, 35 bp, Homo Sapiens
gttagcactctggactctgaatccagcgatccgag

SEQ ID NO: 21757 - DNA, 36 bp, Homo Sapiens
gttagcactctggactctgaatccagcgatccgagt

SEQ ID NO: 21758 - DNA, 37 bp, Homo Sapiens
gttagcactctggactctgaatccagcgatccgagtt

SEQ ID NO: 21759 - DNA, 38 bp, Homo Sapiens
gttagcactctggactctgaatccagcgatccgagttc

SEQ ID NO: 21760 - DNA, 39 bp, Homo Sapiens
gttagcactctggactctgaatccagcgatccgagttca

SEQ ID NO: 21761 - DNA, 19 bp, Homo Sapiens
gttagcactctggactttg

SEQ ID NO: 21762 - DNA, 23 bp, Homo Sapiens
gttagcactctggactttgaatc

SEQ ID NO: 21763 - DNA, 24 bp, Homo Sapiens
gttagcactctggactttgaatcc

SEQ ID NO: 21764 - DNA, 35 bp, Homo Sapiens
gttagcactctggactttgaatccagcaatccgag

SEQ ID NO: 21765 - DNA, 34 bp, Homo Sapiens
gttagcactctggactttgaatccagcgatccga

SEQ ID NO: 21766 - DNA, 35 bp, Homo Sapiens
gttagcactctggactttgaatccagcgatccgag

SEQ ID NO: 21767 - DNA, 36 bp, Homo Sapiens
gttagcactctggactttgaatccagcgatccgagt

SEQ ID NO: 21768 - DNA, 18 bp, Homo Sapiens
gttagcatagctgccttc

SEQ ID NO: 21769 - DNA, 19 bp, Homo Sapiens
gttagcatagctgccttcc

SEQ ID NO: 21770 - DNA, 19 bp, Homo Sapiens
gttagcgcagtaggtagcg

SEQ ID NO: 21771 - DNA, 18 bp, Homo Sapiens
gttagcgcgcggtactta

SEQ ID NO: 21772 - DNA, 38 bp, Homo Sapiens
gttagcgcgttcggctgttaaccgaaaggttggtggtt

SEQ ID NO: 21773 - DNA, 19 bp, Homo Sapiens
gttagctcagtcggctaga

SEQ ID NO: 21774 - DNA, 21 bp, Homo Sapiens
gttagctcagtcggctagagc

SEQ ID NO: 21775 - DNA, 16 bp, Homo Sapiens
gttaggattcctggtt

SEQ ID NO: 21776 - DNA, 17 bp, Homo Sapiens
gttaggattcctggttt

SEQ ID NO: 21777 - DNA, 18 bp, Homo Sapiens
gttaggattcctggtttt

SEQ ID NO: 21778 - DNA, 19 bp, Homo Sapiens
gttaggattcctggttttc

SEQ ID NO: 21779 - DNA, 20 bp, Homo Sapiens
gttaggattcctggttttca

SEQ ID NO: 21780 - DNA, 36 bp, Homo Sapiens
gttaggattcctggttttcacccaggcggcccgggt

SEQ ID NO: 21781 - DNA, 38 bp, Homo Sapiens
gttaggattcctggttttcacccaggcggcccgggttc

SEQ ID NO: 21782 - DNA, 43 bp, Homo Sapiens
gttaggattcctggttttcacccaggcggcccgggttcgactc

SEQ ID NO: 21783 - DNA, 16 bp, Homo Sapiens
gttaggattcggcgct

SEQ ID NO: 21784 - DNA, 17 bp, Homo Sapiens
gttaggattcggcgctc

SEQ ID NO: 21785 - DNA, 18 bp, Homo Sapiens
gttaggattcggcgctct

SEQ ID NO: 21786 - DNA, 19 bp, Homo Sapiens
gttaggattcggcgctctc

SEQ ID NO: 21787 - DNA, 20 bp, Homo Sapiens
gttaggattcggcgctctca

SEQ ID NO: 21788 - DNA, 21 bp, Homo Sapiens
gttaggattcggcgctctcac

SEQ ID NO: 21789 - DNA, 22 bp, Homo Sapiens
gttaggattcggcgctctcacc

SEQ ID NO: 21790 - DNA, 23 bp, Homo Sapiens
gttaggattcggcgctctcaccg

SEQ ID NO: 21791 - DNA, 24 bp, Homo Sapiens
gttaggattcggcgctctcaccgc

SEQ ID NO: 21792 - DNA, 25 bp, Homo Sapiens
gttaggattcggcgctctcaccgcc

SEQ ID NO: 21793 - DNA, 27 bp, Homo Sapiens
gttaggattcggcgctctcaccgccgc

SEQ ID NO: 21794 - DNA, 28 bp, Homo Sapiens
gttaggattcggcgctctcaccgccgcg

SEQ ID NO: 21795 - DNA, 30 bp, Homo Sapiens
gttaggattcggcgctctcaccgccgcggc

SEQ ID NO: 21796 - DNA, 31 bp, Homo Sapiens
gttaggattcggcgctctcaccgccgcggcc

SEQ ID NO: 21797 - DNA, 32 bp, Homo Sapiens
gttaggattcggcgctctcaccgccgcggccc

SEQ ID NO: 21798 - DNA, 33 bp, Homo Sapiens
gttaggattcggcgctctcaccgccgcggcccg

SEQ ID NO: 21799 - DNA, 34 bp, Homo Sapiens
gttaggattcggcgctctcaccgccgcggcccgg

SEQ ID NO: 21800 - DNA, 35 bp, Homo Sapiens
gttaggattcggcgctctcaccgccgcggcccggg

SEQ ID NO: 21801 - DNA, 36 bp, Homo Sapiens
gttaggattcggcgctctcaccgccgcggcccgggt

SEQ ID NO: 21802 - DNA, 37 bp, Homo Sapiens
gttaggattcggcgctctcaccgccgcggcccgggtt

SEQ ID NO: 21803 - DNA, 38 bp, Homo Sapiens
gttaggattcggcgctctcaccgccgcggcccgggttc

SEQ ID NO: 21804 - DNA, 43 bp, Homo Sapiens
gttaggattcggcgctctcaccgccgcggcccgggttcgattc

SEQ ID NO: 21805 - DNA, 48 bp, Homo Sapiens
gttaggattcggcgctctcaccgccgcggcccgggttcgattcccggt

SEQ ID NO: 21806 - DNA, 16 bp, Homo Sapiens
gttaggcctcttttta

SEQ ID NO: 21807 - DNA, 17 bp, Homo Sapiens
gttaggcctctttttac

SEQ ID NO: 21808 - DNA, 18 bp, Homo Sapiens
gttaggcctctttttacc

SEQ ID NO: 21809 - DNA, 19 bp, Homo Sapiens
gttaggcctctttttacca

SEQ ID NO: 21810 - DNA, 20 bp, Homo Sapiens
gttaggcctctttttaccac

SEQ ID NO: 21811 - DNA, 21 bp, Homo Sapiens
gttaggcctctttttaccacc

SEQ ID NO: 21812 - DNA, 22 bp, Homo Sapiens
gttaggcctctttttaccacca

SEQ ID NO: 21813 - DNA, 16 bp, Homo Sapiens
gttagtactctgcgtt

SEQ ID NO: 21814 - DNA, 17 bp, Homo Sapiens
gttagtactctgcgttg

SEQ ID NO: 21815 - DNA, 18 bp, Homo Sapiens
gttagtactctgcgttgt

SEQ ID NO: 21816 - DNA, 19 bp, Homo Sapiens
gttagtactctgcgttgtg

SEQ ID NO: 21817 - DNA, 22 bp, Homo Sapiens
gttagtactctgcgttgtggcc

SEQ ID NO: 21818 - DNA, 23 bp, Homo Sapiens
gttagtactctgcgttgtggccg

SEQ ID NO: 21819 - DNA, 25 bp, Homo Sapiens
gttagtactctgcgttgtggccgca

SEQ ID NO: 21820 - DNA, 27 bp, Homo Sapiens
gttagtactctgcgttgtggccgcagc

SEQ ID NO: 21821 - DNA, 31 bp, Homo Sapiens
gttagtactctgcgttgtggccgcagcaacc

SEQ ID NO: 21822 - DNA, 32 bp, Homo Sapiens
gttagtactctgcgttgtggccgcagcaacct

SEQ ID NO: 21823 - DNA, 34 bp, Homo Sapiens
gttagtactctgcgttgtggccgcagcaacctcg

SEQ ID NO: 21824 - DNA, 36 bp, Homo Sapiens
gttagtactctgcgttgtggccgcagcaacctcggt

SEQ ID NO: 21825 - DNA, 21 bp, Homo Sapiens
gttagtatagtggtgagtatc

SEQ ID NO: 21826 - DNA, 24 bp, Homo Sapiens
gttagtatagtggtgcgtatcccc

SEQ ID NO: 21827 - DNA, 23 bp, Homo Sapiens
gttagtatagtggttagtatccc

SEQ ID NO: 21828 - DNA, 18 bp, Homo Sapiens
gttagtatccccgcctgt

SEQ ID NO: 21829 - DNA, 19 bp, Homo Sapiens
gttagtatccccgcctgtc

SEQ ID NO: 21830 - DNA, 16 bp, Homo Sapiens
gttatacccttcccgt

SEQ ID NO: 21831 - DNA, 17 bp, Homo Sapiens
gttatacccttcccgta

SEQ ID NO: 21832 - DNA, 18 bp, Homo Sapiens
gttatacccttcccgtac

SEQ ID NO: 21833 - DNA, 19 bp, Homo Sapiens
gttatacccttcccgtact

SEQ ID NO: 21834 - DNA, 20 bp, Homo Sapiens
gttatacccttcccgtacta

SEQ ID NO: 21835 - DNA, 21 bp, Homo Sapiens
gttatacccttcccgtactac

SEQ ID NO: 21836 - DNA, 22 bp, Homo Sapiens
gttatacccttcccgtactacc

SEQ ID NO: 21837 - DNA, 23 bp, Homo Sapiens
gttatacccttcccgtactacca

SEQ ID NO: 21838 - DNA, 16 bp, Homo Sapiens
gttatcacatctgctt

SEQ ID NO: 21839 - DNA, 17 bp, Homo Sapiens
gttatcacatctgcttt

SEQ ID NO: 21840 - DNA, 19 bp, Homo Sapiens
gttatcacatctgctttac

SEQ ID NO: 21841 - DNA, 16 bp, Homo Sapiens
gttatcacattcgcct

SEQ ID NO: 21842 - DNA, 19 bp, Homo Sapiens
gttatcacattcgcctcac

SEQ ID NO: 21843 - DNA, 16 bp, Homo Sapiens
gttatcacgtctgctt

SEQ ID NO: 21844 - DNA, 17 bp, Homo Sapiens
gttatcacgtctgcttt

SEQ ID NO: 21845 - DNA, 18 bp, Homo Sapiens
gttatcacgtctgcttta

SEQ ID NO: 21846 - DNA, 19 bp, Homo Sapiens
gttatcacgtctgctttac

SEQ ID NO: 21847 - DNA, 20 bp, Homo Sapiens
gttatcacgtctgctttaca

SEQ ID NO: 21848 - DNA, 22 bp, Homo Sapiens
gttatcacgtctgctttacacg

SEQ ID NO: 21849 - DNA, 23 bp, Homo Sapiens
gttatcacgtctgctttacacgc

SEQ ID NO: 21850 - DNA, 34 bp, Homo Sapiens
gttatcacgtctgctttacacgcagaaggtcctg

SEQ ID NO: 21851 - DNA, 16 bp, Homo Sapiens
gttatcacgttcgcct

SEQ ID NO: 21852 - DNA, 17 bp, Homo Sapiens
gttatcacgttcgcctc

SEQ ID NO: 21853 - DNA, 18 bp, Homo Sapiens
gttatcacgttcgcctca

SEQ ID NO: 21854 - DNA, 19 bp, Homo Sapiens
gttatcacgttcgcctcac

SEQ ID NO: 21855 - DNA, 20 bp, Homo Sapiens
gttatcacgttcgcctcaca

SEQ ID NO: 21856 - DNA, 21 bp, Homo Sapiens
gttatcacgttcgcctcacac

SEQ ID NO: 21857 - DNA, 22 bp, Homo Sapiens
gttatcacgttcgcctcacacg

SEQ ID NO: 21858 - DNA, 23 bp, Homo Sapiens
gttcaaatcacgtcggggtcacc

SEQ ID NO: 21859 - DNA, 16 bp, Homo Sapiens
gttcaaatccaggtgc

SEQ ID NO: 21860 - DNA, 18 bp, Homo Sapiens
gttcaaatccaggtgccc

SEQ ID NO: 21861 - DNA, 22 bp, Homo Sapiens
gttcaaatccaggtgccccctc

SEQ ID NO: 21862 - DNA, 23 bp, Homo Sapiens
gttcaaatccaggtgccccctcc

SEQ ID NO: 21863 - DNA, 16 bp, Homo Sapiens
gttcaaatcccggacg

SEQ ID NO: 21864 - DNA, 18 bp, Homo Sapiens
gttcaaatcccggacgag

SEQ ID NO: 21865 - DNA, 19 bp, Homo Sapiens
gttcaaatcccggacgagc

SEQ ID NO: 21866 - DNA, 20 bp, Homo Sapiens
gttcaaatcccggacgagcc

SEQ ID NO: 21867 - DNA, 21 bp, Homo Sapiens
gttcaaatcccggacgagccc

SEQ ID NO: 21868 - DNA, 22 bp, Homo Sapiens
gttcaaatcccggacgagcccc

SEQ ID NO: 21869 - DNA, 23 bp, Homo Sapiens
gttcaaatcccggacgagccccc

SEQ ID NO: 21870 - DNA, 24 bp, Homo Sapiens
gttcaaatcccggacgagccccca

SEQ ID NO: 21871 - DNA, 16 bp, Homo Sapiens
gttcaaatccgggtgc

SEQ ID NO: 21872 - DNA, 17 bp, Homo Sapiens
gttcaaatccgggtgcc

SEQ ID NO: 21873 - DNA, 18 bp, Homo Sapiens
gttcaaatccgggtgccc

SEQ ID NO: 21874 - DNA, 19 bp, Homo Sapiens
gttcaaatccgggtgcccc

SEQ ID NO: 21875 - DNA, 20 bp, Homo Sapiens
gttcaaatccgggtgccccc

SEQ ID NO: 21876 - DNA, 21 bp, Homo Sapiens
gttcaaatccgggtgccccct

SEQ ID NO: 21877 - DNA, 22 bp, Homo Sapiens
gttcaaatccgggtgccccctc

SEQ ID NO: 21878 - DNA, 23 bp, Homo Sapiens
gttcaaatccgggtgccccctcc

SEQ ID NO: 21879 - DNA, 24 bp, Homo Sapiens
gttcaaatccgggtgccccctcca

SEQ ID NO: 21880 - DNA, 19 bp, Homo Sapiens
gttcaaatctcgctggggc

SEQ ID NO: 21881 - DNA, 20 bp, Homo Sapiens
gttcaaatctcgctggggcc

SEQ ID NO: 21882 - DNA, 21 bp, Homo Sapiens
gttcaaatctcgctggggcct

SEQ ID NO: 21883 - DNA, 22 bp, Homo Sapiens
gttcaaatctcgctggggcctc

SEQ ID NO: 21884 - DNA, 23 bp, Homo Sapiens
gttcaaatctcgctggggcctcc

SEQ ID NO: 21885 - DNA, 17 bp, Homo Sapiens
gttcaaatctcggtgga

SEQ ID NO: 21886 - DNA, 18 bp, Homo Sapiens
gttcaaatctcggtggaa

SEQ ID NO: 21887 - DNA, 20 bp, Homo Sapiens
gttcaaatctcggtggaacc

SEQ ID NO: 21888 - DNA, 21 bp, Homo Sapiens
gttcaaatctcggtggaacct

SEQ ID NO: 21889 - DNA, 22 bp, Homo Sapiens
gttcaaatctcggtggaacctc

SEQ ID NO: 21890 - DNA, 23 bp, Homo Sapiens
gttcaaatctcggtggaacctcc

SEQ ID NO: 21891 - DNA, 24 bp, Homo Sapiens
gttcaaatctcggtggaacctcca

SEQ ID NO: 21892 - DNA, 21 bp, Homo Sapiens
gttcaaatctcggtgggacct

SEQ ID NO: 21893 - DNA, 22 bp, Homo Sapiens
gttcaaatctcggtgggacctc

SEQ ID NO: 21894 - DNA, 23 bp, Homo Sapiens
gttcaaatctcggtgggacctcc

SEQ ID NO: 21895 - DNA, 20 bp, Homo Sapiens
gttcaagtcacgtcggggtc

SEQ ID NO: 21896 - DNA, 22 bp, Homo Sapiens
gttcaagtcacgtcggggtcac

SEQ ID NO: 21897 - DNA, 23 bp, Homo Sapiens
gttcaagtcacgtcggggtcacc

SEQ ID NO: 21898 - DNA, 24 bp, Homo Sapiens
gttcaagtcacgtcggggtcacca

SEQ ID NO: 21899 - DNA, 23 bp, Homo Sapiens
gttcaagtccctgtccaggcgcc

SEQ ID NO: 21900 - DNA, 23 bp, Homo Sapiens
gttcaagtccctgttcaggcgcc

SEQ ID NO: 21901 - DNA, 20 bp, Homo Sapiens
gttcaagtccctgttcgggc

SEQ ID NO: 21902 - DNA, 21 bp, Homo Sapiens
gttcaagtccctgttcgggcg

SEQ ID NO: 21903 - DNA, 22 bp, Homo Sapiens
gttcaagtccctgttcgggcgc

SEQ ID NO: 21904 - DNA, 23 bp, Homo Sapiens
gttcaagtccctgttcgggcgcc

SEQ ID NO: 21905 - DNA, 24 bp, Homo Sapiens
gttcaagtccctgttcgggcgcca

SEQ ID NO: 21906 - DNA, 21 bp, Homo Sapiens
gttcaagtctcggtggaacct

SEQ ID NO: 21907 - DNA, 16 bp, Homo Sapiens
gttcaatccccggcac

SEQ ID NO: 21908 - DNA, 18 bp, Homo Sapiens
gttcaatccccggcacct

SEQ ID NO: 21909 - DNA, 23 bp, Homo Sapiens
gttcaatccccggcacctccacc

SEQ ID NO: 21910 - DNA, 24 bp, Homo Sapiens
gttcaatccccggcacctccacca

SEQ ID NO: 21911 - DNA, 19 bp, Homo Sapiens
gttcaatccccggcatctc

SEQ ID NO: 21912 - DNA, 24 bp, Homo Sapiens
gttcaatccccggcatctccacca

SEQ ID NO: 21913 - DNA, 24 bp, Homo Sapiens
gttcaatcccgggtttcggcacca

SEQ ID NO: 21914 - DNA, 16 bp, Homo Sapiens
gttcaattccccgacg

SEQ ID NO: 21915 - DNA, 21 bp, Homo Sapiens
gttcaattccccgacggggag

SEQ ID NO: 21916 - DNA, 22 bp, Homo Sapiens
gttcaattccccgacggggagc

SEQ ID NO: 21917 - DNA, 23 bp, Homo Sapiens
gttcaattccccgacggggagcc

SEQ ID NO: 21918 - DNA, 24 bp, Homo Sapiens
gttcaattccccgacggggagcca

SEQ ID NO: 21919 - DNA, 21 bp, Homo Sapiens
gttcaattcctcttcttaaca

SEQ ID NO: 21920 - DNA, 23 bp, Homo Sapiens
gttcaattcctcttcttaacacc

SEQ ID NO: 21921 - DNA, 21 bp, Homo Sapiens
gttcaattctcgctggggcct

SEQ ID NO: 21922 - DNA, 16 bp, Homo Sapiens
gttcaggtcgcagtct

SEQ ID NO: 21923 - DNA, 17 bp, Homo Sapiens
gttcaggtcgcagtctc

SEQ ID NO: 21924 - DNA, 18 bp, Homo Sapiens
gttcaggtcgcagtctcc

SEQ ID NO: 21925 - DNA, 19 bp, Homo Sapiens
gttcaggtcgcagtctccc

SEQ ID NO: 21926 - DNA, 20 bp, Homo Sapiens
gttcaggtcgcagtctcccc

SEQ ID NO: 21927 - DNA, 22 bp, Homo Sapiens
gttcaggtcgcagtctcccctg

SEQ ID NO: 21928 - DNA, 34 bp, Homo Sapiens
gttcaggtcgcagtctcccctggaggcgtgggtt

SEQ ID NO: 21929 - DNA, 16 bp, Homo Sapiens
gttcagtggtagaatt

SEQ ID NO: 21930 - DNA, 17 bp, Homo Sapiens
gttcagtggtagaattc

SEQ ID NO: 21931 - DNA, 18 bp, Homo Sapiens
gttcagtggtagaattct

SEQ ID NO: 21932 - DNA, 19 bp, Homo Sapiens
gttcagtggtagaattctc

SEQ ID NO: 21933 - DNA, 20 bp, Homo Sapiens
gttcagtggtagaattctcg

SEQ ID NO: 21934 - DNA, 21 bp, Homo Sapiens
gttcagtggtagaattctcgc

SEQ ID NO: 21935 - DNA, 22 bp, Homo Sapiens
gttcagtggtagaattctcgcc

SEQ ID NO: 21936 - DNA, 23 bp, Homo Sapiens
gttcagtggtagaattctcgcct

SEQ ID NO: 21937 - DNA, 24 bp, Homo Sapiens
gttcagtggtagaattctcgcctc

SEQ ID NO: 21938 - DNA, 26 bp, Homo Sapiens
gttcagtggtagaattctcgcctccc

SEQ ID NO: 21939 - DNA, 27 bp, Homo Sapiens
gttcagtggtagaattctcgcctccca

SEQ ID NO: 21940 - DNA, 24 bp, Homo Sapiens
gttcagtggtagaattctcgcctg

SEQ ID NO: 21941 - DNA, 25 bp, Homo Sapiens
gttcagtggtagaattctcgcctgc

SEQ ID NO: 21942 - DNA, 26 bp, Homo Sapiens
gttcagtggtagaattctcgcctgcc

SEQ ID NO: 21943 - DNA, 27 bp, Homo Sapiens
gttcagtggtagaattctcgcctgcca

SEQ ID NO: 21944 - DNA, 29 bp, Homo Sapiens
gttcagtggtagaattctcgcctgccacg

SEQ ID NO: 21945 - DNA, 30 bp, Homo Sapiens
gttcagtggtagaattctcgcctgccacgc

SEQ ID NO: 21946 - DNA, 32 bp, Homo Sapiens
gttcagtggtagaattctcgcctgccacgcgg

SEQ ID NO: 21947 - DNA, 35 bp, Homo Sapiens
gttcagtggtagaattctcgcctgccacgcgggag

SEQ ID NO: 21948 - DNA, 38 bp, Homo Sapiens
gttcagtggtagaattctcgcctgccacgcgggaggcc

SEQ ID NO: 21949 - DNA, 39 bp, Homo Sapiens
gttcagtggtagaattctcgcctgccacgcgggaggccc

SEQ ID NO: 21950 - DNA, 40 bp, Homo Sapiens
gttcagtggtagaattctcgcctgccacgcgggaggcccg

SEQ ID NO: 21951 - DNA, 41 bp, Homo Sapiens
gttcagtggtagaattctcgcctgccacgcgggaggcccgg

SEQ ID NO: 21952 - DNA, 43 bp, Homo Sapiens
gttcagtggtagaattctcgcctgccacgcgggaggcccgggt

SEQ ID NO: 21953 - DNA, 44 bp, Homo Sapiens
gttcagtggtagaattctcgcctgccacgcgggaggcccgggtt

SEQ ID NO: 21954 - DNA, 29 bp, Homo Sapiens
gttcagtggtagaattctcgcctgccatg

SEQ ID NO: 21955 - DNA, 23 bp, Homo Sapiens
gttcagtggtagaattcttgcct

SEQ ID NO: 21956 - DNA, 26 bp, Homo Sapiens
gttcagtggtagaattcttgcctgcc

SEQ ID NO: 21957 - DNA, 34 bp, Homo Sapiens
gttcagttgatgcagagtggggttttgcagtcct

SEQ ID NO: 21958 - DNA, 36 bp, Homo Sapiens
gttcagttgatgcagagtggggttttgcagtcctta

SEQ ID NO: 21959 - DNA, 37 bp, Homo Sapiens
gttcagttgatgcagagtggggttttgcagtccttac

SEQ ID NO: 21960 - DNA, 38 bp, Homo Sapiens
gttcagttgatgcagagtggggttttgcagtccttacc

SEQ ID NO: 21961 - DNA, 39 bp, Homo Sapiens
gttcagttgatgcagagtggggttttgcagtccttacca

SEQ ID NO: 21962 - DNA, 16 bp, Homo Sapiens
gttcatgtccctgttc

SEQ ID NO: 21963 - DNA, 16 bp, Homo Sapiens
gttccatagtgtagcg

SEQ ID NO: 21964 - DNA, 22 bp, Homo Sapiens
gttccatagtgtagcggttatc

SEQ ID NO: 21965 - DNA, 27 bp, Homo Sapiens
gttccatagtgtagcggttatcacgtc

SEQ ID NO: 21966 - DNA, 29 bp, Homo Sapiens
gttccatagtgtagcggttatcacgtctg

SEQ ID NO: 21967 - DNA, 30 bp, Homo Sapiens
gttccatagtgtagcggttatcacgtctgc

SEQ ID NO: 21968 - DNA, 31 bp, Homo Sapiens
gttccatagtgtagcggttatcacgtctgct

SEQ ID NO: 21969 - DNA, 32 bp, Homo Sapiens
gttccatagtgtagcggttatcacgtctgctt

SEQ ID NO: 21970 - DNA, 33 bp, Homo Sapiens
gttccatagtgtagcggttatcacgtctgcttt

SEQ ID NO: 21971 - DNA, 35 bp, Homo Sapiens
gttccatagtgtagcggttatcacgtctgctttac

SEQ ID NO: 21972 - DNA, 41 bp, Homo Sapiens
gttccatagtgtagcggttatcacgtctgctttacacgcag

SEQ ID NO: 21973 - DNA, 22 bp, Homo Sapiens
gttccatagtgtagtggttatc

SEQ ID NO: 21974 - DNA, 31 bp, Homo Sapiens
gttccatagtgtagtggttatcacatctgct

SEQ ID NO: 21975 - DNA, 33 bp, Homo Sapiens
gttccatagtgtagtggttatcacatctgcttt

SEQ ID NO: 21976 - DNA, 35 bp, Homo Sapiens
gttccatagtgtagtggttatcacatctgctttac

SEQ ID NO: 21977 - DNA, 25 bp, Homo Sapiens
gttccatagtgtagtggttatcacg

SEQ ID NO: 21978 - DNA, 28 bp, Homo Sapiens
gttccatagtgtagtggttatcacgtct

SEQ ID NO: 21979 - DNA, 29 bp, Homo Sapiens
gttccatagtgtagtggttatcacgtctg

SEQ ID NO: 21980 - DNA, 30 bp, Homo Sapiens
gttccatagtgtagtggttatcacgtctgc

SEQ ID NO: 21981 - DNA, 31 bp, Homo Sapiens
gttccatagtgtagtggttatcacgtctgct

SEQ ID NO: 21982 - DNA, 32 bp, Homo Sapiens
gttccatagtgtagtggttatcacgtctgctt

SEQ ID NO: 21983 - DNA, 33 bp, Homo Sapiens
gttccatagtgtagtggttatcacgtctgcttt

SEQ ID NO: 21984 - DNA, 34 bp, Homo Sapiens
gttccatagtgtagtggttatcacgtctgcttta

SEQ ID NO: 21985 - DNA, 35 bp, Homo Sapiens
gttccatagtgtagtggttatcacgtctgctttac

SEQ ID NO: 21986 - DNA, 36 bp, Homo Sapiens
gttccatagtgtagtggttatcacgtctgctttaca

SEQ ID NO: 21987 - DNA, 42 bp, Homo Sapiens
gttccatagtgtagtggttatcacgtctgctttacacgcaga

SEQ ID NO: 21988 - DNA, 28 bp, Homo Sapiens
gttccatggtgtaatggtgagcactctg

SEQ ID NO: 21989 - DNA, 32 bp, Homo Sapiens
gttccatggtgtaatggtgagcactctggact

SEQ ID NO: 21990 - DNA, 22 bp, Homo Sapiens
gttccatggtgtaatggttagc

SEQ ID NO: 21991 - DNA, 26 bp, Homo Sapiens
gttccatggtgtaatggttagcactc

SEQ ID NO: 21992 - DNA, 27 bp, Homo Sapiens
gttccatggtgtaatggttagcactct

SEQ ID NO: 21993 - DNA, 28 bp, Homo Sapiens
gttccatggtgtaatggttagcactctg

SEQ ID NO: 21994 - DNA, 29 bp, Homo Sapiens
gttccatggtgtaatggttagcactctgg

SEQ ID NO: 21995 - DNA, 30 bp, Homo Sapiens
gttccatggtgtaatggttagcactctgga

SEQ ID NO: 21996 - DNA, 31 bp, Homo Sapiens
gttccatggtgtaatggttagcactctggac

SEQ ID NO: 21997 - DNA, 32 bp, Homo Sapiens
gttccatggtgtaatggttagcactctggact

SEQ ID NO: 21998 - DNA, 33 bp, Homo Sapiens
gttccatggtgtaatggttagcactctggactc

SEQ ID NO: 21999 - DNA, 34 bp, Homo Sapiens
gttccatggtgtaatggttagcactctggactct

SEQ ID NO: 22000 - DNA, 35 bp, Homo Sapiens
gttccatggtgtaatggttagcactctggactctg

SEQ ID NO: 22001 - DNA, 40 bp, Homo Sapiens
gttccatggtgtaatggttagcactctggactctgaatcc

SEQ ID NO: 22002 - DNA, 44 bp, Homo Sapiens
gttccatggtgtaatggttagcactctggactctgaatccagcg

SEQ ID NO: 22003 - DNA, 16 bp, Homo Sapiens
gttccgggttcgagtc

SEQ ID NO: 22004 - DNA, 27 bp, Homo Sapiens
gttccgggttcgagtcccggcggagtc

SEQ ID NO: 22005 - DNA, 29 bp, Homo Sapiens
gttccgggttcgagtcccggcggagtcgc

SEQ ID NO: 22006 - DNA, 30 bp, Homo Sapiens
gttccgggttcgagtcccggcggagtcgcc

SEQ ID NO: 22007 - DNA, 31 bp, Homo Sapiens
gttccgggttcgagtcccggcggagtcgcca

SEQ ID NO: 22008 - DNA, 20 bp, Homo Sapiens
gttcgaaaccgggcggaaac

SEQ ID NO: 22009 - DNA, 23 bp, Homo Sapiens
gttcgaaaccgggcggaaacacc

SEQ ID NO: 22010 - DNA, 24 bp, Homo Sapiens
gttcgaaaccgggcggaaacacca

SEQ ID NO: 22011 - DNA, 23 bp, Homo Sapiens
gttcgaaccccactcctggtacc

SEQ ID NO: 22012 - DNA, 21 bp, Homo Sapiens
gttcgaaccccgtccgtgcct

SEQ ID NO: 22013 - DNA, 22 bp, Homo Sapiens
gttcgaaccccgtccgtgcctc

SEQ ID NO: 22014 - DNA, 23 bp, Homo Sapiens
gttcgaaccccgtccgtgcctcc

SEQ ID NO: 22015 - DNA, 24 bp, Homo Sapiens
gttcgaaccccgtccgtgcctcca

SEQ ID NO: 22016 - DNA, 23 bp, Homo Sapiens
gttcgaaccctgctcgctgcgcc

SEQ ID NO: 22017 - DNA, 24 bp, Homo Sapiens
gttcgaaccctgctcgctgcgcca

SEQ ID NO: 22018 - DNA, 16 bp, Homo Sapiens
gttcgaacctcagagg

SEQ ID NO: 22019 - DNA, 23 bp, Homo Sapiens
gttcgaacctcagagggggcacc

SEQ ID NO: 22020 - DNA, 24 bp, Homo Sapiens
gttcgaacctcagagggggcacca

SEQ ID NO: 22021 - DNA, 21 bp, Homo Sapiens
gttcgaatcacgtcggggtca

SEQ ID NO: 22022 - DNA, 23 bp, Homo Sapiens
gttcgaatcacgtcggggtcacc

SEQ ID NO: 22023 - DNA, 23 bp, Homo Sapiens
gttcgaatcccaccgctgccacc

SEQ ID NO: 22024 - DNA, 24 bp, Homo Sapiens
gttcgaatcccaccgctgccacca

SEQ ID NO: 22025 - DNA, 17 bp, Homo Sapiens
gttcgaatcccactcct

SEQ ID NO: 22026 - DNA, 18 bp, Homo Sapiens
gttcgaatcccactcctg

SEQ ID NO: 22027 - DNA, 23 bp, Homo Sapiens
gttcgaatcccactcctgacacc

SEQ ID NO: 22028 - DNA, 24 bp, Homo Sapiens
gttcgaatcccactcctgacacca

SEQ ID NO: 22029 - DNA, 18 bp, Homo Sapiens
gttcgaatcccacttctg

SEQ ID NO: 22030 - DNA, 21 bp, Homo Sapiens
gttcgaatcccacttctgaca

SEQ ID NO: 22031 - DNA, 23 bp, Homo Sapiens
gttcgaatcccacttctgacacc

SEQ ID NO: 22032 - DNA, 24 bp, Homo Sapiens
gttcgaatcccacttctgacacca

SEQ ID NO: 22033 - DNA, 16 bp, Homo Sapiens
gttcgaatcccagcgg

SEQ ID NO: 22034 - DNA, 21 bp, Homo Sapiens
gttcgaatcccagcggggcct

SEQ ID NO: 22035 - DNA, 22 bp, Homo Sapiens
gttcgaatcccagcggggcctc

SEQ ID NO: 22036 - DNA, 23 bp, Homo Sapiens
gttcgaatcccagcggggcctcc

SEQ ID NO: 22037 - DNA, 18 bp, Homo Sapiens
gttcgaatcccagcggtg

SEQ ID NO: 22038 - DNA, 21 bp, Homo Sapiens
gttcgaatcccagcggtgcct

SEQ ID NO: 22039 - DNA, 22 bp, Homo Sapiens
gttcgaatcccagcggtgcctc

SEQ ID NO: 22040 - DNA, 23 bp, Homo Sapiens
gttcgaatcccagcggtgcctcc

SEQ ID NO: 22041 - DNA, 24 bp, Homo Sapiens
gttcgaatcccagcggtgcctcca

SEQ ID NO: 22042 - DNA, 21 bp, Homo Sapiens
gttcgaatcccagtagagcct

SEQ ID NO: 22043 - DNA, 22 bp, Homo Sapiens
gttcgaatcccatcctcgtcgc

SEQ ID NO: 22044 - DNA, 23 bp, Homo Sapiens
gttcgaatcccatcctcgtcgcc

SEQ ID NO: 22045 - DNA, 24 bp, Homo Sapiens
gttcgaatcccatcctcgtcgcca

SEQ ID NO: 22046 - DNA, 16 bp, Homo Sapiens
gttcgaatcccttcgt

SEQ ID NO: 22047 - DNA, 23 bp, Homo Sapiens
gttcgaatcccttcgtggttgcc

SEQ ID NO: 22048 - DNA, 24 bp, Homo Sapiens
gttcgaatcccttcgtggttgcca

SEQ ID NO: 22049 - DNA, 17 bp, Homo Sapiens
gttcgaatccgagtcac

SEQ ID NO: 22050 - DNA, 18 bp, Homo Sapiens
gttcgaatccgagtcacg

SEQ ID NO: 22051 - DNA, 19 bp, Homo Sapiens
gttcgaatccgagtcacgg

SEQ ID NO: 22052 - DNA, 20 bp, Homo Sapiens
gttcgaatccgagtcacggc

SEQ ID NO: 22053 - DNA, 21 bp, Homo Sapiens
gttcgaatccgagtcacggca

SEQ ID NO: 22054 - DNA, 22 bp, Homo Sapiens
gttcgaatccgagtcacggcac

SEQ ID NO: 22055 - DNA, 23 bp, Homo Sapiens
gttcgaatccgagtcacggcacc

SEQ ID NO: 22056 - DNA, 24 bp, Homo Sapiens
gttcgaatccgagtcacggcacca

SEQ ID NO: 22057 - DNA, 18 bp, Homo Sapiens
gttcgaatccggctcgaa

SEQ ID NO: 22058 - DNA, 23 bp, Homo Sapiens
gttcgaatccggctcgaaggacc

SEQ ID NO: 22059 - DNA, 18 bp, Homo Sapiens
gttcgaatccggctcgga

SEQ ID NO: 22060 - DNA, 18 bp, Homo Sapiens
gttcgaatcctgccgact

SEQ ID NO: 22061 - DNA, 24 bp, Homo Sapiens
gttcgaatcctgccgactacgcca

SEQ ID NO: 22062 - DNA, 23 bp, Homo Sapiens
gttcgaatcctgttcgtgacgcc

SEQ ID NO: 22063 - DNA, 24 bp, Homo Sapiens
gttcgaatcctgttcgtgacgcca

SEQ ID NO: 22064 - DNA, 19 bp, Homo Sapiens
gttcgactcccagtggggc

SEQ ID NO: 22065 - DNA, 21 bp, Homo Sapiens
gttcgactcccagtggggcct

SEQ ID NO: 22066 - DNA, 16 bp, Homo Sapiens
gttcgactcccggtat

SEQ ID NO: 22067 - DNA, 17 bp, Homo Sapiens
gttcgactcccggtatg

SEQ ID NO: 22068 - DNA, 21 bp, Homo Sapiens
gttcgactcccggtatgggaa

SEQ ID NO: 22069 - DNA, 22 bp, Homo Sapiens
gttcgactcccggtatgggaac

SEQ ID NO: 22070 - DNA, 23 bp, Homo Sapiens
gttcgactcccggtatgggaacc

SEQ ID NO: 22071 - DNA, 24 bp, Homo Sapiens
gttcgactcccggtatgggaacca

SEQ ID NO: 22072 - DNA, 16 bp, Homo Sapiens
gttcgactcccggtgt

SEQ ID NO: 22073 - DNA, 17 bp, Homo Sapiens
gttcgactcccggtgtg

SEQ ID NO: 22074 - DNA, 18 bp, Homo Sapiens
gttcgactcccggtgtgg

SEQ ID NO: 22075 - DNA, 21 bp, Homo Sapiens
gttcgactcccggtgtgggaa

SEQ ID NO: 22076 - DNA, 22 bp, Homo Sapiens
gttcgactcccggtgtgggaac

SEQ ID NO: 22077 - DNA, 23 bp, Homo Sapiens
gttcgactcccggtgtgggaacc

SEQ ID NO: 22078 - DNA, 24 bp, Homo Sapiens
gttcgactcccggtgtgggaacca

SEQ ID NO: 22079 - DNA, 23 bp, Homo Sapiens
gttcgactcctggctggctcgcc

SEQ ID NO: 22080 - DNA, 24 bp, Homo Sapiens
gttcgactcctggctggctcgcca

SEQ ID NO: 22081 - DNA, 22 bp, Homo Sapiens
gttcgagcccacccagggacgc

SEQ ID NO: 22082 - DNA, 23 bp, Homo Sapiens
gttcgagcccacccagggacgcc

SEQ ID NO: 22083 - DNA, 24 bp, Homo Sapiens
gttcgagcccacccagggacgcca

SEQ ID NO: 22084 - DNA, 23 bp, Homo Sapiens
gttcgagccccacgttgggcgcc

SEQ ID NO: 22085 - DNA, 24 bp, Homo Sapiens
gttcgagccccacgttgggcgcca

SEQ ID NO: 22086 - DNA, 17 bp, Homo Sapiens
gttcgagccccagtgga

SEQ ID NO: 22087 - DNA, 19 bp, Homo Sapiens
gttcgagccccagtggaac

SEQ ID NO: 22088 - DNA, 20 bp, Homo Sapiens
gttcgagccccagtggaacc

SEQ ID NO: 22089 - DNA, 23 bp, Homo Sapiens
gttcgagccccagtggaaccacc

SEQ ID NO: 22090 - DNA, 24 bp, Homo Sapiens
gttcgagccccagtggaaccacca

SEQ ID NO: 22091 - DNA, 21 bp, Homo Sapiens
gttcgagcctcacacggggca

SEQ ID NO: 22092 - DNA, 24 bp, Homo Sapiens
gttcgagcctcacacggggcacca

SEQ ID NO: 22093 - DNA, 16 bp, Homo Sapiens
gttcgagcctcacctg

SEQ ID NO: 22094 - DNA, 18 bp, Homo Sapiens
gttcgagcctcacctgga

SEQ ID NO: 22095 - DNA, 23 bp, Homo Sapiens
gttcgagcctcacctggagcacc

SEQ ID NO: 22096 - DNA, 23 bp, Homo Sapiens
gttcgagtcccacctggggtacc

SEQ ID NO: 22097 - DNA, 23 bp, Homo Sapiens
gttcgagtcccacctggggtgcc

SEQ ID NO: 22098 - DNA, 16 bp, Homo Sapiens
gttcgagtcccatctg

SEQ ID NO: 22099 - DNA, 23 bp, Homo Sapiens
gttcgagtcccatctggggtgcc

SEQ ID NO: 22100 - DNA, 24 bp, Homo Sapiens
gttcgagtcccatctggggtgcca

SEQ ID NO: 22101 - DNA, 23 bp, Homo Sapiens
gttcgagtcccatctgggtcgcc

SEQ ID NO: 22102 - DNA, 24 bp, Homo Sapiens
gttcgagtcccatctgggtcgcca

SEQ ID NO: 22103 - DNA, 23 bp, Homo Sapiens
gttcgagtcccggcagagatgcc

SEQ ID NO: 22104 - DNA, 24 bp, Homo Sapiens
gttcgagtcccggcagagatgcca

SEQ ID NO: 22105 - DNA, 17 bp, Homo Sapiens
gttcgagtcccggcgga

SEQ ID NO: 22106 - DNA, 18 bp, Homo Sapiens
gttcgagtcccggcggag

SEQ ID NO: 22107 - DNA, 21 bp, Homo Sapiens
gttcgagtcccggcggagtcg

SEQ ID NO: 22108 - DNA, 22 bp, Homo Sapiens
gttcgagtcccggcggagtcgc

SEQ ID NO: 22109 - DNA, 24 bp, Homo Sapiens
gttcgagtcccggcggagtcgcca

SEQ ID NO: 22110 - DNA, 16 bp, Homo Sapiens
gttcgagtcccttcgt

SEQ ID NO: 22111 - DNA, 23 bp, Homo Sapiens
gttcgagtcccttcgtggtcgcc

SEQ ID NO: 22112 - DNA, 24 bp, Homo Sapiens
gttcgagtcccttcgtggtcgcca

SEQ ID NO: 22113 - DNA, 23 bp, Homo Sapiens
gttcgagtcctgccgcggtcgcc

SEQ ID NO: 22114 - DNA, 24 bp, Homo Sapiens
gttcgagtcctgccgcggtcgcca

SEQ ID NO: 22115 - DNA, 20 bp, Homo Sapiens
gttcgagtctcggtggaacc

SEQ ID NO: 22116 - DNA, 21 bp, Homo Sapiens
gttcgagtctcggtggaacct

SEQ ID NO: 22117 - DNA, 22 bp, Homo Sapiens
gttcgagtctcggtggaacctc

SEQ ID NO: 22118 - DNA, 23 bp, Homo Sapiens
gttcgagtctcggtggaacctcc

SEQ ID NO: 22119 - DNA, 24 bp, Homo Sapiens
gttcgagtctcggtggaacctcca

SEQ ID NO: 22120 - DNA, 23 bp, Homo Sapiens
gttcgatccccagcatctccacc

SEQ ID NO: 22121 - DNA, 17 bp, Homo Sapiens
gttcgatccccagtacc

SEQ ID NO: 22122 - DNA, 17 bp, Homo Sapiens
gttcgatccccggcatc

SEQ ID NO: 22123 - DNA, 18 bp, Homo Sapiens
gttcgatccccggcatct

SEQ ID NO: 22124 - DNA, 19 bp, Homo Sapiens
gttcgatccccggcatctc

SEQ ID NO: 22125 - DNA, 21 bp, Homo Sapiens
gttcgatccccggcatctcca

SEQ ID NO: 22126 - DNA, 22 bp, Homo Sapiens
gttcgatccccggcatctccac

SEQ ID NO: 22127 - DNA, 23 bp, Homo Sapiens
gttcgatccccggcatctccacc

SEQ ID NO: 22128 - DNA, 24 bp, Homo Sapiens
gttcgatccccggcatctccacca

SEQ ID NO: 22129 - DNA, 16 bp, Homo Sapiens
gttcgatccccgtacg

SEQ ID NO: 22130 - DNA, 17 bp, Homo Sapiens
gttcgatccccgtacgg

SEQ ID NO: 22131 - DNA, 19 bp, Homo Sapiens
gttcgatccccgtacgggc

SEQ ID NO: 22132 - DNA, 20 bp, Homo Sapiens
gttcgatccccgtacgggcc

SEQ ID NO: 22133 - DNA, 21 bp, Homo Sapiens
gttcgatccccgtacgggcca

SEQ ID NO: 22134 - DNA, 22 bp, Homo Sapiens
gttcgatccccgtacgggccac

SEQ ID NO: 22135 - DNA, 23 bp, Homo Sapiens
gttcgatcccgggcggaaacacc

SEQ ID NO: 22136 - DNA, 24 bp, Homo Sapiens
gttcgatcccgggcggaaacacca

SEQ ID NO: 22137 - DNA, 21 bp, Homo Sapiens
gttcgatcccgggtttcggca

SEQ ID NO: 22138 - DNA, 22 bp, Homo Sapiens
gttcgatcccgggtttcggcac

SEQ ID NO: 22139 - DNA, 23 bp, Homo Sapiens
gttcgatcccgggtttcggcacc

SEQ ID NO: 22140 - DNA, 24 bp, Homo Sapiens
gttcgatcccgggtttcggcacca

SEQ ID NO: 22141 - DNA, 23 bp, Homo Sapiens
gttcgatcctcacacggggcacc

SEQ ID NO: 22142 - DNA, 21 bp, Homo Sapiens
gttcgatcctcgctggggcct

SEQ ID NO: 22143 - DNA, 23 bp, Homo Sapiens
gttcgatcctcgctggggcctcc

SEQ ID NO: 22144 - DNA, 23 bp, Homo Sapiens
gttcgattccccaacggggagcc

SEQ ID NO: 22145 - DNA, 24 bp, Homo Sapiens
gttcgattccccaacggggagcca

SEQ ID NO: 22146 - DNA, 16 bp, Homo Sapiens
gttcgattccccgacg

SEQ ID NO: 22147 - DNA, 17 bp, Homo Sapiens
gttcgattccccgacgg

SEQ ID NO: 22148 - DNA, 18 bp, Homo Sapiens
gttcgattccccgacggg

SEQ ID NO: 22149 - DNA, 19 bp, Homo Sapiens
gttcgattccccgacgggg

SEQ ID NO: 22150 - DNA, 20 bp, Homo Sapiens
gttcgattccccgacgggga

SEQ ID NO: 22151 - DNA, 21 bp, Homo Sapiens
gttcgattccccgacggggag

SEQ ID NO: 22152 - DNA, 22 bp, Homo Sapiens
gttcgattccccgacggggagc

SEQ ID NO: 22153 - DNA, 23 bp, Homo Sapiens
gttcgattccccgacggggagcc

SEQ ID NO: 22154 - DNA, 24 bp, Homo Sapiens
gttcgattccccgacggggagcca

SEQ ID NO: 22155 - DNA, 16 bp, Homo Sapiens
gttcgattcccggcca

SEQ ID NO: 22156 - DNA, 17 bp, Homo Sapiens
gttcgattcccggccaa

SEQ ID NO: 22157 - DNA, 18 bp, Homo Sapiens
gttcgattcccggccaac

SEQ ID NO: 22158 - DNA, 19 bp, Homo Sapiens
gttcgattcccggccaacg

SEQ ID NO: 22159 - DNA, 23 bp, Homo Sapiens
gttcgattcccggccaacgcacc

SEQ ID NO: 22160 - DNA, 24 bp, Homo Sapiens
gttcgattcccggccaacgcacca

SEQ ID NO: 22161 - DNA, 18 bp, Homo Sapiens
gttcgattcccggccaat

SEQ ID NO: 22162 - DNA, 19 bp, Homo Sapiens
gttcgattcccggccaatg

SEQ ID NO: 22163 - DNA, 23 bp, Homo Sapiens
gttcgattcccggccaatgcacc

SEQ ID NO: 22164 - DNA, 24 bp, Homo Sapiens
gttcgattcccggccaatgcacca

SEQ ID NO: 22165 - DNA, 16 bp, Homo Sapiens
gttcgattcccggccc

SEQ ID NO: 22166 - DNA, 18 bp, Homo Sapiens
gttcgattcccgggcggc

SEQ ID NO: 22167 - DNA, 21 bp, Homo Sapiens
gttcgattcccgggcggcgca

SEQ ID NO: 22168 - DNA, 23 bp, Homo Sapiens
gttcgattcccgggcggcgcacc

SEQ ID NO: 22169 - DNA, 24 bp, Homo Sapiens
gttcgattcccgggcggcgcacca

SEQ ID NO: 22170 - DNA, 16 bp, Homo Sapiens
gttcgattcccggtca

SEQ ID NO: 22171 - DNA, 17 bp, Homo Sapiens
gttcgattcccggtcag

SEQ ID NO: 22172 - DNA, 18 bp, Homo Sapiens
gttcgattcccggtcagg

SEQ ID NO: 22173 - DNA, 19 bp, Homo Sapiens
gttcgattcccggtcaggg

SEQ ID NO: 22174 - DNA, 20 bp, Homo Sapiens
gttcgattcccggtcaggga

SEQ ID NO: 22175 - DNA, 21 bp, Homo Sapiens
gttcgattcccggtcagggaa

SEQ ID NO: 22176 - DNA, 22 bp, Homo Sapiens
gttcgattcccggtcagggaac

SEQ ID NO: 22177 - DNA, 23 bp, Homo Sapiens
gttcgattcccggtcagggaacc

SEQ ID NO: 22178 - DNA, 24 bp, Homo Sapiens
gttcgattcccggtcagggaacca

SEQ ID NO: 22179 - DNA, 18 bp, Homo Sapiens
gttcgattccggctcgaa

SEQ ID NO: 22180 - DNA, 21 bp, Homo Sapiens
gttcgattccggctcgaagga

SEQ ID NO: 22181 - DNA, 22 bp, Homo Sapiens
gttcgattccggctcgaaggac

SEQ ID NO: 22182 - DNA, 23 bp, Homo Sapiens
gttcgattccggctcgaaggacc

SEQ ID NO: 22183 - DNA, 24 bp, Homo Sapiens
gttcgattccggctcgaaggacca

SEQ ID NO: 22184 - DNA, 16 bp, Homo Sapiens
gttcgattccttcctt

SEQ ID NO: 22185 - DNA, 19 bp, Homo Sapiens
gttcgattccttccttttt

SEQ ID NO: 22186 - DNA, 21 bp, Homo Sapiens
gttcgattccttccttttttg

SEQ ID NO: 22187 - DNA, 22 bp, Homo Sapiens
gttcgattccttccttttttgc

SEQ ID NO: 22188 - DNA, 23 bp, Homo Sapiens
gttcgattccttccttttttgcc

SEQ ID NO: 22189 - DNA, 24 bp, Homo Sapiens
gttcgattccttccttttttgcca

SEQ ID NO: 22190 - DNA, 16 bp, Homo Sapiens
gttcgattctcatagt

SEQ ID NO: 22191 - DNA, 17 bp, Homo Sapiens
gttcgattctcatagtc

SEQ ID NO: 22192 - DNA, 18 bp, Homo Sapiens
gttcgattctcatagtcc

SEQ ID NO: 22193 - DNA, 19 bp, Homo Sapiens
gttcgattctcatagtcct

SEQ ID NO: 22194 - DNA, 20 bp, Homo Sapiens
gttcgattctcatagtccta

SEQ ID NO: 22195 - DNA, 21 bp, Homo Sapiens
gttcgattctcatagtcctag

SEQ ID NO: 22196 - DNA, 22 bp, Homo Sapiens
gttcgattctcatagtcctagc

SEQ ID NO: 22197 - DNA, 23 bp, Homo Sapiens
gttcgattctcatagtcctagcc

SEQ ID NO: 22198 - DNA, 24 bp, Homo Sapiens
gttcgattctcatagtcctagcca

SEQ ID NO: 22199 - DNA, 16 bp, Homo Sapiens
gttctggtctccaatg

SEQ ID NO: 22200 - DNA, 48 bp, Homo Sapiens
gttctggtctccaatggaggcgtgggttcgaatcccacttctgacacc

SEQ ID NO: 22201 - DNA, 16 bp, Homo Sapiens
gttctggtctccggat

SEQ ID NO: 22202 - DNA, 19 bp, Homo Sapiens
gttctggtctccggatgga

SEQ ID NO: 22203 - DNA, 23 bp, Homo Sapiens
gttctggtctccggatggaggcg

SEQ ID NO: 22204 - DNA, 24 bp, Homo Sapiens
gttctggtctccggatggaggcgt

SEQ ID NO: 22205 - DNA, 28 bp, Homo Sapiens
gttctggtctccggatggaggcgtgggt

SEQ ID NO: 22206 - DNA, 16 bp, Homo Sapiens
gttcttgtagttgaaa

SEQ ID NO: 22207 - DNA, 17 bp, Homo Sapiens
gttcttgtagttgaaat

SEQ ID NO: 22208 - DNA, 18 bp, Homo Sapiens
gttcttgtagttgaaata

SEQ ID NO: 22209 - DNA, 19 bp, Homo Sapiens
gttcttgtagttgaaatac

SEQ ID NO: 22210 - DNA, 20 bp, Homo Sapiens
gttcttgtagttgaaataca

SEQ ID NO: 22211 - DNA, 21 bp, Homo Sapiens
gttcttgtagttgaaatacaa

SEQ ID NO: 22212 - DNA, 22 bp, Homo Sapiens
gttcttgtagttgaaatacaac

SEQ ID NO: 22213 - DNA, 23 bp, Homo Sapiens
gttcttgtagttgaaatacaacg

SEQ ID NO: 22214 - DNA, 24 bp, Homo Sapiens
gttcttgtagttgaaatacaacga

SEQ ID NO: 22215 - DNA, 25 bp, Homo Sapiens
gttcttgtagttgaaatacaacgat

SEQ ID NO: 22216 - DNA, 26 bp, Homo Sapiens
gttcttgtagttgaaatacaacgatg

SEQ ID NO: 22217 - DNA, 27 bp, Homo Sapiens
gttcttgtagttgaaatacaacgatgg

SEQ ID NO: 22218 - DNA, 28 bp, Homo Sapiens
gttcttgtagttgaaatacaacgatggt

SEQ ID NO: 22219 - DNA, 29 bp, Homo Sapiens
gttcttgtagttgaaatacaacgatggtt

SEQ ID NO: 22220 - DNA, 30 bp, Homo Sapiens
gttcttgtagttgaaatacaacgatggttt

SEQ ID NO: 22221 - DNA, 31 bp, Homo Sapiens
gttcttgtagttgaaatacaacgatggtttt

SEQ ID NO: 22222 - DNA, 32 bp, Homo Sapiens
gttcttgtagttgaaatacaacgatggttttt

SEQ ID NO: 22223 - DNA, 33 bp, Homo Sapiens
gttcttgtagttgaaatacaacgatggtttttc

SEQ ID NO: 22224 - DNA, 34 bp, Homo Sapiens
gttcttgtagttgaaatacaacgatggtttttca

SEQ ID NO: 22225 - DNA, 35 bp, Homo Sapiens
gttcttgtagttgaaatacaacgatggtttttcat

SEQ ID NO: 22226 - DNA, 36 bp, Homo Sapiens
gttcttgtagttgaaatacaacgatggtttttcata

SEQ ID NO: 22227 - DNA, 37 bp, Homo Sapiens
gttcttgtagttgaaatacaacgatggtttttcatat

SEQ ID NO: 22228 - DNA, 38 bp, Homo Sapiens
gttcttgtagttgaaatacaacgatggtttttcatatc

SEQ ID NO: 22229 - DNA, 39 bp, Homo Sapiens
gttcttgtagttgaaatacaacgatggtttttcatatca

SEQ ID NO: 22230 - DNA, 40 bp, Homo Sapiens
gttcttgtagttgaaatacaacgatggtttttcatatcat

SEQ ID NO: 22231 - DNA, 41 bp, Homo Sapiens
gttcttgtagttgaaatacaacgatggtttttcatatcatt

SEQ ID NO: 22232 - DNA, 42 bp, Homo Sapiens
gttcttgtagttgaaatacaacgatggtttttcatatcattg

SEQ ID NO: 22233 - DNA, 43 bp, Homo Sapiens
gttcttgtagttgaaatacaacgatggtttttcatatcattgg

SEQ ID NO: 22234 - DNA, 44 bp, Homo Sapiens
gttcttgtagttgaaatacaacgatggtttttcatatcattggt

SEQ ID NO: 22235 - DNA, 45 bp, Homo Sapiens
gttcttgtagttgaaatacaacgatggtttttcatatcattggtc

SEQ ID NO: 22236 - DNA, 46 bp, Homo Sapiens
gttcttgtagttgaaatacaacgatggtttttcatatcattggtcg

SEQ ID NO: 22237 - DNA, 47 bp, Homo Sapiens
gttcttgtagttgaaatacaacgatggtttttcatatcattggtcgt

SEQ ID NO: 22238 - DNA, 48 bp, Homo Sapiens
gttcttgtagttgaaatacaacgatggtttttcatatcattggtcgtg

SEQ ID NO: 22239 - DNA, 17 bp, Homo Sapiens
gttgaaatacaacgatg

SEQ ID NO: 22240 - DNA, 19 bp, Homo Sapiens
gttgaaatacaacgatggt

SEQ ID NO: 22241 - DNA, 20 bp, Homo Sapiens
gttgaaatacaacgatggtt

SEQ ID NO: 22242 - DNA, 21 bp, Homo Sapiens
gttgaaatacaacgatggttt

SEQ ID NO: 22243 - DNA, 22 bp, Homo Sapiens
gttgaaatacaacgatggtttt

SEQ ID NO: 22244 - DNA, 23 bp, Homo Sapiens
gttgaaatacaacgatggttttt

SEQ ID NO: 22245 - DNA, 25 bp, Homo Sapiens
gttgaaatacaacgatggtttttca

SEQ ID NO: 22246 - DNA, 26 bp, Homo Sapiens
gttgaaatacaacgatggtttttcat

SEQ ID NO: 22247 - DNA, 28 bp, Homo Sapiens
gttgaaatacaacgatggtttttcatat

SEQ ID NO: 22248 - DNA, 29 bp, Homo Sapiens
gttgaaatacaacgatggtttttcatatc

SEQ ID NO: 22249 - DNA, 36 bp, Homo Sapiens
gttgaaatacaacgatggtttttcatatcattggtc

SEQ ID NO: 22250 - DNA, 37 bp, Homo Sapiens
gttgaaatacaacgatggtttttcatatcattggtcg

SEQ ID NO: 22251 - DNA, 38 bp, Homo Sapiens
gttgaaatacaacgatggtttttcatatcattggtcgt

SEQ ID NO: 22252 - DNA, 44 bp, Homo Sapiens
gttgaaatacaacgatggtttttcatatcattggtcgtggttgt

SEQ ID NO: 22253 - DNA, 45 bp, Homo Sapiens
gttgaaatacaacgatggtttttcatatcattggtcgtggttgta

SEQ ID NO: 22254 - DNA, 48 bp, Homo Sapiens
gttgaaatacaacgatggtttttcatatcattggtcgtggttgtagtc

SEQ ID NO: 22255 - DNA, 24 bp, Homo Sapiens
gttgacccgggttcgattcccggc

SEQ ID NO: 22256 - DNA, 25 bp, Homo Sapiens
gttgacccgggttcgattcccggcc

SEQ ID NO: 22257 - DNA, 29 bp, Homo Sapiens
gttgacccgggttcgattcccggccaacg

SEQ ID NO: 22258 - DNA, 16 bp, Homo Sapiens
gttgatgcagagtggg

SEQ ID NO: 22259 - DNA, 17 bp, Homo Sapiens
gttgatgcagagtgggg

SEQ ID NO: 22260 - DNA, 18 bp, Homo Sapiens
gttgatgcagagtggggt

SEQ ID NO: 22261 - DNA, 19 bp, Homo Sapiens
gttgatgcagagtggggtt

SEQ ID NO: 22262 - DNA, 20 bp, Homo Sapiens
gttgatgcagagtggggttt

SEQ ID NO: 22263 - DNA, 21 bp, Homo Sapiens
gttgatgcagagtggggtttt

SEQ ID NO: 22264 - DNA, 22 bp, Homo Sapiens
gttgatgcagagtggggttttg

SEQ ID NO: 22265 - DNA, 24 bp, Homo Sapiens
gttgatgcagagtggggttttgca

SEQ ID NO: 22266 - DNA, 25 bp, Homo Sapiens
gttgatgcagagtggggttttgcag

SEQ ID NO: 22267 - DNA, 26 bp, Homo Sapiens
gttgatgcagagtggggttttgcagt

SEQ ID NO: 22268 - DNA, 27 bp, Homo Sapiens
gttgatgcagagtggggttttgcagtc

SEQ ID NO: 22269 - DNA, 28 bp, Homo Sapiens
gttgatgcagagtggggttttgcagtcc

SEQ ID NO: 22270 - DNA, 29 bp, Homo Sapiens
gttgatgcagagtggggttttgcagtcct

SEQ ID NO: 22271 - DNA, 30 bp, Homo Sapiens
gttgatgcagagtggggttttgcagtcctt

SEQ ID NO: 22272 - DNA, 31 bp, Homo Sapiens
gttgatgcagagtggggttttgcagtcctta

SEQ ID NO: 22273 - DNA, 32 bp, Homo Sapiens
gttgatgcagagtggggttttgcagtccttac

SEQ ID NO: 22274 - DNA, 33 bp, Homo Sapiens
gttgatgcagagtggggttttgcagtccttacc

SEQ ID NO: 22275 - DNA, 34 bp, Homo Sapiens
gttgatgcagagtggggttttgcagtccttacca

SEQ ID NO: 22276 - DNA, 19 bp, Homo Sapiens
gttgattagggtgcttagc

SEQ ID NO: 22277 - DNA, 20 bp, Homo Sapiens
gttgattagggtgcttagct

SEQ ID NO: 22278 - DNA, 22 bp, Homo Sapiens
gttgattagggtgcttagctgt

SEQ ID NO: 22279 - DNA, 23 bp, Homo Sapiens
gttgattagggtgcttagctgtt

SEQ ID NO: 22280 - DNA, 24 bp, Homo Sapiens
gttgattagggtgcttagctgtta

SEQ ID NO: 22281 - DNA, 28 bp, Homo Sapiens
gttgattagggtgcttagctgttaacta

SEQ ID NO: 22282 - DNA, 29 bp, Homo Sapiens
gttgattagggtgcttagctgttaactaa

SEQ ID NO: 22283 - DNA, 42 bp, Homo Sapiens
gttgattagggtgcttagctgttaactaagtgtttgtgggtt

SEQ ID NO: 22284 - DNA, 44 bp, Homo Sapiens
gttgattagggtgcttagctgttaactaagtgtttgtgggttta

SEQ ID NO: 22285 - DNA, 19 bp, Homo Sapiens
gttgcaatacttaatttct

SEQ ID NO: 22286 - DNA, 20 bp, Homo Sapiens
gttgcaatacttaatttctg

SEQ ID NO: 22287 - DNA, 21 bp, Homo Sapiens
gttgcaatacttaatttctgc

SEQ ID NO: 22288 - DNA, 22 bp, Homo Sapiens
gttgcaatacttaatttctgcc

SEQ ID NO: 22289 - DNA, 23 bp, Homo Sapiens
gttgcaatacttaatttctgcca

SEQ ID NO: 22290 - DNA, 27 bp, Homo Sapiens
gttgcgtgttcaagtcacgtcggggtc

SEQ ID NO: 22291 - DNA, 29 bp, Homo Sapiens
gttgcgtgttcaagtcacgtcggggtcac

SEQ ID NO: 22292 - DNA, 26 bp, Homo Sapiens
gttgggagagcgttagactgaagatc

SEQ ID NO: 22293 - DNA, 19 bp, Homo Sapiens
gttggtagagcatcagact

SEQ ID NO: 22294 - DNA, 22 bp, Homo Sapiens
gttggtagagcatcagactttt

SEQ ID NO: 22295 - DNA, 19 bp, Homo Sapiens
gttggtagagcatgggact

SEQ ID NO: 22296 - DNA, 27 bp, Homo Sapiens
gttggtagagcatgggactcttaatcc

SEQ ID NO: 22297 - DNA, 17 bp, Homo Sapiens
gttggtagagcggagga

SEQ ID NO: 22298 - DNA, 19 bp, Homo Sapiens
gttggtagagcggaggact

SEQ ID NO: 22299 - DNA, 22 bp, Homo Sapiens
gttggtagagcggaggactgta

SEQ ID NO: 22300 - DNA, 23 bp, Homo Sapiens
gttggtagagcggaggactgtag

SEQ ID NO: 22301 - DNA, 23 bp, Homo Sapiens
gttggtctaggggtatgattctc

SEQ ID NO: 22302 - DNA, 25 bp, Homo Sapiens
gttggtctaggggtatgattctcgc

SEQ ID NO: 22303 - DNA, 26 bp, Homo Sapiens
gttggtctaggggtatgattctcgct

SEQ ID NO: 22304 - DNA, 27 bp, Homo Sapiens
gttggtctaggggtatgattctcgctt

SEQ ID NO: 22305 - DNA, 16 bp, Homo Sapiens
gttggtggtatagtgg

SEQ ID NO: 22306 - DNA, 17 bp, Homo Sapiens
gttggtggtatagtggt

SEQ ID NO: 22307 - DNA, 19 bp, Homo Sapiens
gttggtggtatagtggtaa

SEQ ID NO: 22308 - DNA, 20 bp, Homo Sapiens
gttggtggtatagtggtaag

SEQ ID NO: 22309 - DNA, 26 bp, Homo Sapiens
gttggtggtatagtggtaagcatagc

SEQ ID NO: 22310 - DNA, 27 bp, Homo Sapiens
gttggtggtatagtggtaagcatagct

SEQ ID NO: 22311 - DNA, 28 bp, Homo Sapiens
gttggtggtatagtggtaagcatagctg

SEQ ID NO: 22312 - DNA, 29 bp, Homo Sapiens
gttggtggtatagtggtaagcatagctgc

SEQ ID NO: 22313 - DNA, 30 bp, Homo Sapiens
gttggtggtatagtggtaagcatagctgcc

SEQ ID NO: 22314 - DNA, 31 bp, Homo Sapiens
gttggtggtatagtggtaagcatagctgcct

SEQ ID NO: 22315 - DNA, 32 bp, Homo Sapiens
gttggtggtatagtggtaagcatagctgcctt

SEQ ID NO: 22316 - DNA, 34 bp, Homo Sapiens
gttggtggtatagtggtaagcatagctgccttcc

SEQ ID NO: 22317 - DNA, 47 bp, Homo Sapiens
gttggtggtatagtggtaagcatagctgccttccaagcagttgaccc

SEQ ID NO: 22318 - DNA, 19 bp, Homo Sapiens
gttggtggtatagtggtga

SEQ ID NO: 22319 - DNA, 20 bp, Homo Sapiens
gttggtggtatagtggtgag

SEQ ID NO: 22320 - DNA, 21 bp, Homo Sapiens
gttggtggtatagtggtgagc

SEQ ID NO: 22321 - DNA, 22 bp, Homo Sapiens
gttggtggtatagtggtgagca

SEQ ID NO: 22322 - DNA, 23 bp, Homo Sapiens
gttggtggtatagtggtgagcat

SEQ ID NO: 22323 - DNA, 24 bp, Homo Sapiens
gttggtggtatagtggtgagcata

SEQ ID NO: 22324 - DNA, 25 bp, Homo Sapiens
gttggtggtatagtggtgagcatag

SEQ ID NO: 22325 - DNA, 26 bp, Homo Sapiens
gttggtggtatagtggtgagcatagc

SEQ ID NO: 22326 - DNA, 27 bp, Homo Sapiens
gttggtggtatagtggtgagcatagct

SEQ ID NO: 22327 - DNA, 28 bp, Homo Sapiens
gttggtggtatagtggtgagcatagctg

SEQ ID NO: 22328 - DNA, 29 bp, Homo Sapiens
gttggtggtatagtggtgagcatagctgc

SEQ ID NO: 22329 - DNA, 30 bp, Homo Sapiens
gttggtggtatagtggtgagcatagctgcc

SEQ ID NO: 22330 - DNA, 31 bp, Homo Sapiens
gttggtggtatagtggtgagcatagctgcct

SEQ ID NO: 22331 - DNA, 32 bp, Homo Sapiens
gttggtggtatagtggtgagcatagctgcctt

SEQ ID NO: 22332 - DNA, 33 bp, Homo Sapiens
gttggtggtatagtggtgagcatagctgccttc

SEQ ID NO: 22333 - DNA, 34 bp, Homo Sapiens
gttggtggtatagtggtgagcatagctgccttcc

SEQ ID NO: 22334 - DNA, 35 bp, Homo Sapiens
gttggtggtatagtggtgagcatagctgccttcca

SEQ ID NO: 22335 - DNA, 42 bp, Homo Sapiens
gttggtggtatagtggtgagcatagctgccttccaagcagtt

SEQ ID NO: 22336 - DNA, 44 bp, Homo Sapiens
gttggtggtatagtggtgagcatagctgccttccaagcagttga

SEQ ID NO: 22337 - DNA, 26 bp, Homo Sapiens
gttggtggtatagtggttagcatagc

SEQ ID NO: 22338 - DNA, 27 bp, Homo Sapiens
gttggtggtatagtggttagcatagct

SEQ ID NO: 22339 - DNA, 28 bp, Homo Sapiens
gttggtggtatagtggttagcatagctg

SEQ ID NO: 22340 - DNA, 29 bp, Homo Sapiens
gttggtggtatagtggttagcatagctgc

SEQ ID NO: 22341 - DNA, 30 bp, Homo Sapiens
gttggtggtatagtggttagcatagctgcc

SEQ ID NO: 22342 - DNA, 31 bp, Homo Sapiens
gttggtggtatagtggttagcatagctgcct

SEQ ID NO: 22343 - DNA, 32 bp, Homo Sapiens
gttggtggtatagtggttagcatagctgcctt

SEQ ID NO: 22344 - DNA, 33 bp, Homo Sapiens
gttggtggtatagtggttagcatagctgccttc

SEQ ID NO: 22345 - DNA, 34 bp, Homo Sapiens
gttggtggtatagtggttagcatagctgccttcc

SEQ ID NO: 22346 - DNA, 35 bp, Homo Sapiens
gttggtggtatagtggttagcatagctgccttcca

SEQ ID NO: 22347 - DNA, 48 bp, Homo Sapiens
gttggtggtatagtggttagcatagctgccttccaagcagttgacccg

SEQ ID NO: 22348 - DNA, 27 bp, Homo Sapiens
gttggtggttcgagcccacccagggac

SEQ ID NO: 22349 - DNA, 30 bp, Homo Sapiens
gttggtggttcgagcccacccagggacgcc

SEQ ID NO: 22350 - DNA, 31 bp, Homo Sapiens
gttggtggttcgagcccacccagggacgcca

SEQ ID NO: 22351 - DNA, 30 bp, Homo Sapiens
gttggtggtttagtggtagaattctcgcct

SEQ ID NO: 22352 - DNA, 31 bp, Homo Sapiens
gttggtggtttagtggtagaattctcgcctc

SEQ ID NO: 22353 - DNA, 19 bp, Homo Sapiens
gttggttagagcgtggtgc

SEQ ID NO: 22354 - DNA, 16 bp, Homo Sapiens
gttggttatacccttc

SEQ ID NO: 22355 - DNA, 17 bp, Homo Sapiens
gttggttatacccttcc

SEQ ID NO: 22356 - DNA, 18 bp, Homo Sapiens
gttggttatacccttccc

SEQ ID NO: 22357 - DNA, 21 bp, Homo Sapiens
gttggttatacccttcccgta

SEQ ID NO: 22358 - DNA, 22 bp, Homo Sapiens
gttggttatacccttcccgtac

SEQ ID NO: 22359 - DNA, 23 bp, Homo Sapiens
gttggttatacccttcccgtact

SEQ ID NO: 22360 - DNA, 24 bp, Homo Sapiens
gttggttatacccttcccgtacta

SEQ ID NO: 22361 - DNA, 25 bp, Homo Sapiens
gttggttatacccttcccgtactac

SEQ ID NO: 22362 - DNA, 26 bp, Homo Sapiens
gttggttatacccttcccgtactacc

SEQ ID NO: 22363 - DNA, 27 bp, Homo Sapiens
gttggttatacccttcccgtactacca

SEQ ID NO: 22364 - DNA, 16 bp, Homo Sapiens
gttgtagtccgtgcga

SEQ ID NO: 22365 - DNA, 17 bp, Homo Sapiens
gttgtagtccgtgcgag

SEQ ID NO: 22366 - DNA, 18 bp, Homo Sapiens
gttgtagtccgtgcgaga

SEQ ID NO: 22367 - DNA, 19 bp, Homo Sapiens
gttgtagtccgtgcgagaa

SEQ ID NO: 22368 - DNA, 20 bp, Homo Sapiens
gttgtagtccgtgcgagaat

SEQ ID NO: 22369 - DNA, 21 bp, Homo Sapiens
gttgtagtccgtgcgagaata

SEQ ID NO: 22370 - DNA, 22 bp, Homo Sapiens
gttgtagtccgtgcgagaatac

SEQ ID NO: 22371 - DNA, 23 bp, Homo Sapiens
gttgtagtccgtgcgagaatacc

SEQ ID NO: 22372 - DNA, 24 bp, Homo Sapiens
gttgtagtccgtgcgagaatacca

SEQ ID NO: 22373 - DNA, 30 bp, Homo Sapiens
gttgtgggttcgaatcccaccagagtcgcc

SEQ ID NO: 22374 - DNA, 31 bp, Homo Sapiens
gttgtgggttcgaatcccaccagagtcgcca

SEQ ID NO: 22375 - DNA, 30 bp, Homo Sapiens
gttgtgggttcgagtcccaccagagtcgcc

SEQ ID NO: 22376 - DNA, 24 bp, Homo Sapiens
gtttaaacaaaacgaatgatttcg

SEQ ID NO: 22377 - DNA, 26 bp, Homo Sapiens
gtttaaacaaaacgaatgatttcgac

SEQ ID NO: 22378 - DNA, 27 bp, Homo Sapiens
gtttaaacaaaacgaatgatttcgact

SEQ ID NO: 22379 - DNA, 28 bp, Homo Sapiens
gtttaaacaaaacgaatgatttcgactc

SEQ ID NO: 22380 - DNA, 29 bp, Homo Sapiens
gtttaaacaaaacgaatgatttcgactca

SEQ ID NO: 22381 - DNA, 30 bp, Homo Sapiens
gtttaaacaaaacgaatgatttcgactcat

SEQ ID NO: 22382 - DNA, 31 bp, Homo Sapiens
gtttaaacaaaacgaatgatttcgactcatt

SEQ ID NO: 22383 - DNA, 16 bp, Homo Sapiens
gtttaaattagaatct

SEQ ID NO: 22384 - DNA, 17 bp, Homo Sapiens
gtttaaattagaatctt

SEQ ID NO: 22385 - DNA, 20 bp, Homo Sapiens
gtttaaattagaatcttagc

SEQ ID NO: 22386 - DNA, 21 bp, Homo Sapiens
gtttaaattagaatcttagct

SEQ ID NO: 22387 - DNA, 22 bp, Homo Sapiens
gtttaaattagaatcttagctt

SEQ ID NO: 22388 - DNA, 23 bp, Homo Sapiens
gtttaaattagaatcttagcttt

SEQ ID NO: 22389 - DNA, 24 bp, Homo Sapiens
gtttaaattagaatcttagctttg

SEQ ID NO: 22390 - DNA, 25 bp, Homo Sapiens
gtttaaattagaatcttagctttgg

SEQ ID NO: 22391 - DNA, 29 bp, Homo Sapiens
gtttaaattagaatcttagctttgggtgc

SEQ ID NO: 22392 - DNA, 30 bp, Homo Sapiens
gtttaaattagaatcttagctttgggtgct

SEQ ID NO: 22393 - DNA, 31 bp, Homo Sapiens
gtttaaattagaatcttagctttgggtgcta

SEQ ID NO: 22394 - DNA, 41 bp, Homo Sapiens
gtttaaattagaatcttagctttgggtgctaatggtggagt

SEQ ID NO: 22395 - DNA, 42 bp, Homo Sapiens
gtttaaattagaatcttagctttgggtgctaatggtggagtt

SEQ ID NO: 22396 - DNA, 47 bp, Homo Sapiens
gtttaaattagaatcttagctttgggtgctaatggtggagttaaaga

SEQ ID NO: 22397 - DNA, 48 bp, Homo Sapiens
gtttaaattagaatcttagctttgggtgctaatggtggagttaaagac

SEQ ID NO: 22398 - DNA, 23 bp, Homo Sapiens
gtttaaccaaaacatcagattgt

SEQ ID NO: 22399 - DNA, 24 bp, Homo Sapiens
gtttaaccaaaacatcagattgtg

SEQ ID NO: 22400 - DNA, 25 bp, Homo Sapiens
gtttaaccaaaacatcagattgtga

SEQ ID NO: 22401 - DNA, 27 bp, Homo Sapiens
gtttaaccaaaacatcagattgtgaat

SEQ ID NO: 22402 - DNA, 28 bp, Homo Sapiens
gtttaaccaaaacatcagattgtgaatc

SEQ ID NO: 22403 - DNA, 29 bp, Homo Sapiens
gtttaaccaaaacatcagattgtgaatct

SEQ ID NO: 22404 - DNA, 31 bp, Homo Sapiens
gtttaaccaaaacatcagattgtgaatctga

SEQ ID NO: 22405 - DNA, 32 bp, Homo Sapiens
gtttaaccaaaacatcagattgtgaatctgac

SEQ ID NO: 22406 - DNA, 33 bp, Homo Sapiens
gtttaaccaaaacatcagattgtgaatctgaca

SEQ ID NO: 22407 - DNA, 36 bp, Homo Sapiens
gtttaaccaaaacatcagattgtgaatctgacaaca

SEQ ID NO: 22408 - DNA, 37 bp, Homo Sapiens
gtttaaccaaaacatcagattgtgaatctgacaacag

SEQ ID NO: 22409 - DNA, 40 bp, Homo Sapiens
gtttaaccaaaacatcagattgtgaatctgacaacagagg

SEQ ID NO: 22410 - DNA, 41 bp, Homo Sapiens
gtttaaccaaaacatcagattgtgaatctgacaacagaggc

SEQ ID NO: 22411 - DNA, 42 bp, Homo Sapiens
gtttaaccaaaacatcagattgtgaatctgacaacagaggct

SEQ ID NO: 22412 - DNA, 43 bp, Homo Sapiens
gtttaaccaaaacatcagattgtgaatctgacaacagaggctt

SEQ ID NO: 22413 - DNA, 45 bp, Homo Sapiens
gtttaaccaaaacatcagattgtgaatctgacaacagaggcttac

SEQ ID NO: 22414 - DNA, 18 bp, Homo Sapiens
gtttaagtcccattggtc

SEQ ID NO: 22415 - DNA, 19 bp, Homo Sapiens
gtttaagtcccattggtct

SEQ ID NO: 22416 - DNA, 20 bp, Homo Sapiens
gtttaagtcccattggtcta

SEQ ID NO: 22417 - DNA, 22 bp, Homo Sapiens
gtttaagtcccattggtctagc

SEQ ID NO: 22418 - DNA, 23 bp, Homo Sapiens
gtttaagtcccattggtctagcc

SEQ ID NO: 22419 - DNA, 24 bp, Homo Sapiens
gtttaagtcccattggtctagcca

SEQ ID NO: 22420 - DNA, 16 bp, Homo Sapiens
gtttagacgggctcac

SEQ ID NO: 22421 - DNA, 17 bp, Homo Sapiens
gtttagacgggctcaca

SEQ ID NO: 22422 - DNA, 18 bp, Homo Sapiens
gtttagacgggctcacat

SEQ ID NO: 22423 - DNA, 19 bp, Homo Sapiens
gtttagacgggctcacatc

SEQ ID NO: 22424 - DNA, 20 bp, Homo Sapiens
gtttagacgggctcacatca

SEQ ID NO: 22425 - DNA, 21 bp, Homo Sapiens
gtttagacgggctcacatcac

SEQ ID NO: 22426 - DNA, 22 bp, Homo Sapiens
gtttagacgggctcacatcacc

SEQ ID NO: 22427 - DNA, 23 bp, Homo Sapiens
gtttagacgggctcacatcaccc

SEQ ID NO: 22428 - DNA, 24 bp, Homo Sapiens
gtttagacgggctcacatcacccc

SEQ ID NO: 22429 - DNA, 25 bp, Homo Sapiens
gtttagacgggctcacatcacccca

SEQ ID NO: 22430 - DNA, 26 bp, Homo Sapiens
gtttagacgggctcacatcaccccat

SEQ ID NO: 22431 - DNA, 27 bp, Homo Sapiens
gtttagacgggctcacatcaccccata

SEQ ID NO: 22432 - DNA, 28 bp, Homo Sapiens
gtttagacgggctcacatcaccccataa

SEQ ID NO: 22433 - DNA, 29 bp, Homo Sapiens
gtttagacgggctcacatcaccccataaa

SEQ ID NO: 22434 - DNA, 30 bp, Homo Sapiens
gtttagacgggctcacatcaccccataaac

SEQ ID NO: 22435 - DNA, 31 bp, Homo Sapiens
gtttagacgggctcacatcaccccataaaca

SEQ ID NO: 22436 - DNA, 32 bp, Homo Sapiens
gtttagacgggctcacatcaccccataaacac

SEQ ID NO: 22437 - DNA, 33 bp, Homo Sapiens
gtttagacgggctcacatcaccccataaacacc

SEQ ID NO: 22438 - DNA, 34 bp, Homo Sapiens
gtttagacgggctcacatcaccccataaacacca

SEQ ID NO: 22439 - DNA, 16 bp, Homo Sapiens
gtttatgtagcttacc

SEQ ID NO: 22440 - DNA, 17 bp, Homo Sapiens
gtttatgtagcttacct

SEQ ID NO: 22441 - DNA, 18 bp, Homo Sapiens
gtttatgtagcttacctc

SEQ ID NO: 22442 - DNA, 19 bp, Homo Sapiens
gtttatgtagcttacctcc

SEQ ID NO: 22443 - DNA, 20 bp, Homo Sapiens
gtttatgtagcttacctcct

SEQ ID NO: 22444 - DNA, 21 bp, Homo Sapiens
gtttatgtagcttacctcctc

SEQ ID NO: 22445 - DNA, 22 bp, Homo Sapiens
gtttatgtagcttacctcctca

SEQ ID NO: 22446 - DNA, 23 bp, Homo Sapiens
gtttatgtagcttacctcctcaa

SEQ ID NO: 22447 - DNA, 24 bp, Homo Sapiens
gtttatgtagcttacctcctcaaa

SEQ ID NO: 22448 - DNA, 25 bp, Homo Sapiens
gtttatgtagcttacctcctcaaag

SEQ ID NO: 22449 - DNA, 26 bp, Homo Sapiens
gtttatgtagcttacctcctcaaagc

SEQ ID NO: 22450 - DNA, 27 bp, Homo Sapiens
gtttatgtagcttacctcctcaaagca

SEQ ID NO: 22451 - DNA, 28 bp, Homo Sapiens
gtttatgtagcttacctcctcaaagcaa

SEQ ID NO: 22452 - DNA, 29 bp, Homo Sapiens
gtttatgtagcttacctcctcaaagcaat

SEQ ID NO: 22453 - DNA, 30 bp, Homo Sapiens
gtttatgtagcttacctcctcaaagcaata

SEQ ID NO: 22454 - DNA, 31 bp, Homo Sapiens
gtttatgtagcttacctcctcaaagcaatac

SEQ ID NO: 22455 - DNA, 32 bp, Homo Sapiens
gtttatgtagcttacctcctcaaagcaataca

SEQ ID NO: 22456 - DNA, 33 bp, Homo Sapiens
gtttatgtagcttacctcctcaaagcaatacac

SEQ ID NO: 22457 - DNA, 34 bp, Homo Sapiens
gtttatgtagcttacctcctcaaagcaatacact

SEQ ID NO: 22458 - DNA, 35 bp, Homo Sapiens
gtttatgtagcttacctcctcaaagcaatacactg

SEQ ID NO: 22459 - DNA, 36 bp, Homo Sapiens
gtttatgtagcttacctcctcaaagcaatacactga

SEQ ID NO: 22460 - DNA, 37 bp, Homo Sapiens
gtttatgtagcttacctcctcaaagcaatacactgaa

SEQ ID NO: 22461 - DNA, 38 bp, Homo Sapiens
gtttatgtagcttacctcctcaaagcaatacactgaaa

SEQ ID NO: 22462 - DNA, 41 bp, Homo Sapiens
gtttatgtagcttacctcctcaaagcaatacactgaaaatg

SEQ ID NO: 22463 - DNA, 46 bp, Homo Sapiens
gtttatgtagcttacctcctcaaagcaatacactgaaaatgtttag

SEQ ID NO: 22464 - DNA, 16 bp, Homo Sapiens
gtttccccgcgcaggt

SEQ ID NO: 22465 - DNA, 17 bp, Homo Sapiens
gtttccccgcgcaggtt

SEQ ID NO: 22466 - DNA, 37 bp, Homo Sapiens
gtttccccgcgcaggttcgaatcctgccgactacgcc

SEQ ID NO: 22467 - DNA, 38 bp, Homo Sapiens
gtttccccgcgcaggttcgaatcctgccgactacgcca

SEQ ID NO: 22468 - DNA, 18 bp, Homo Sapiens
gtttccgtagtggagtgg

SEQ ID NO: 22469 - DNA, 23 bp, Homo Sapiens
gtttccgtagtggagtggttatc

SEQ ID NO: 22470 - DNA, 24 bp, Homo Sapiens
gtttccgtagtggagtggttatca

SEQ ID NO: 22471 - DNA, 30 bp, Homo Sapiens
gtttccgtagtggagtggttatcacgttcg

SEQ ID NO: 22472 - DNA, 31 bp, Homo Sapiens
gtttccgtagtggagtggttatcacgttcgc

SEQ ID NO: 22473 - DNA, 32 bp, Homo Sapiens
gtttccgtagtggagtggttatcacgttcgcc

SEQ ID NO: 22474 - DNA, 33 bp, Homo Sapiens
gtttccgtagtggagtggttatcacgttcgcct

SEQ ID NO: 22475 - DNA, 34 bp, Homo Sapiens
gtttccgtagtggagtggttatcacgttcgcctc

SEQ ID NO: 22476 - DNA, 35 bp, Homo Sapiens
gtttccgtagtggagtggttatcacgttcgcctca

SEQ ID NO: 22477 - DNA, 36 bp, Homo Sapiens
gtttccgtagtggagtggttatcacgttcgcctcac

SEQ ID NO: 22478 - DNA, 37 bp, Homo Sapiens
gtttccgtagtggagtggttatcacgttcgcctcaca

SEQ ID NO: 22479 - DNA, 38 bp, Homo Sapiens
gtttccgtagtggagtggttatcacgttcgcctcacac

SEQ ID NO: 22480 - DNA, 16 bp, Homo Sapiens
gtttccgtagtgtagc

SEQ ID NO: 22481 - DNA, 17 bp, Homo Sapiens
gtttccgtagtgtagcg

SEQ ID NO: 22482 - DNA, 19 bp, Homo Sapiens
gtttccgtagtgtagcggt

SEQ ID NO: 22483 - DNA, 23 bp, Homo Sapiens
gtttccgtagtgtagcggttatc

SEQ ID NO: 22484 - DNA, 24 bp, Homo Sapiens
gtttccgtagtgtagcggttatca

SEQ ID NO: 22485 - DNA, 25 bp, Homo Sapiens
gtttccgtagtgtagcggttatcac

SEQ ID NO: 22486 - DNA, 26 bp, Homo Sapiens
gtttccgtagtgtagcggttatcaca

SEQ ID NO: 22487 - DNA, 27 bp, Homo Sapiens
gtttccgtagtgtagcggttatcacat

SEQ ID NO: 22488 - DNA, 28 bp, Homo Sapiens
gtttccgtagtgtagcggttatcacatt

SEQ ID NO: 22489 - DNA, 29 bp, Homo Sapiens
gtttccgtagtgtagcggttatcacattc

SEQ ID NO: 22490 - DNA, 30 bp, Homo Sapiens
gtttccgtagtgtagcggttatcacattcg

SEQ ID NO: 22491 - DNA, 31 bp, Homo Sapiens
gtttccgtagtgtagcggttatcacattcgc

SEQ ID NO: 22492 - DNA, 32 bp, Homo Sapiens
gtttccgtagtgtagcggttatcacattcgcc

SEQ ID NO: 22493 - DNA, 33 bp, Homo Sapiens
gtttccgtagtgtagcggttatcacattcgcct

SEQ ID NO: 22494 - DNA, 34 bp, Homo Sapiens
gtttccgtagtgtagcggttatcacattcgcctc

SEQ ID NO: 22495 - DNA, 35 bp, Homo Sapiens
gtttccgtagtgtagcggttatcacattcgcctca

SEQ ID NO: 22496 - DNA, 36 bp, Homo Sapiens
gtttccgtagtgtagcggttatcacattcgcctcac

SEQ ID NO: 22497 - DNA, 37 bp, Homo Sapiens
gtttccgtagtgtagcggttatcacattcgcctcaca

SEQ ID NO: 22498 - DNA, 38 bp, Homo Sapiens
gtttccgtagtgtagcggttatcacattcgcctcacac

SEQ ID NO: 22499 - DNA, 39 bp, Homo Sapiens
gtttccgtagtgtagcggttatcacattcgcctcacacg

SEQ ID NO: 22500 - DNA, 43 bp, Homo Sapiens
gtttccgtagtgtagcggttatcacattcgcctcacacgcgaa

SEQ ID NO: 22501 - DNA, 16 bp, Homo Sapiens
gtttccgtagtgtagt

SEQ ID NO: 22502 - DNA, 17 bp, Homo Sapiens
gtttccgtagtgtagtg

SEQ ID NO: 22503 - DNA, 18 bp, Homo Sapiens
gtttccgtagtgtagtgg

SEQ ID NO: 22504 - DNA, 19 bp, Homo Sapiens
gtttccgtagtgtagtggt

SEQ ID NO: 22505 - DNA, 20 bp, Homo Sapiens
gtttccgtagtgtagtggtc

SEQ ID NO: 22506 - DNA, 21 bp, Homo Sapiens
gtttccgtagtgtagtggtca

SEQ ID NO: 22507 - DNA, 22 bp, Homo Sapiens
gtttccgtagtgtagtggtcat

SEQ ID NO: 22508 - DNA, 23 bp, Homo Sapiens
gtttccgtagtgtagtggtcatc

SEQ ID NO: 22509 - DNA, 24 bp, Homo Sapiens
gtttccgtagtgtagtggtcatca

SEQ ID NO: 22510 - DNA, 25 bp, Homo Sapiens
gtttccgtagtgtagtggtcatcac

SEQ ID NO: 22511 - DNA, 26 bp, Homo Sapiens
gtttccgtagtgtagtggtcatcacg

SEQ ID NO: 22512 - DNA, 27 bp, Homo Sapiens
gtttccgtagtgtagtggtcatcacgt

SEQ ID NO: 22513 - DNA, 28 bp, Homo Sapiens
gtttccgtagtgtagtggtcatcacgtt

SEQ ID NO: 22514 - DNA, 29 bp, Homo Sapiens
gtttccgtagtgtagtggtcatcacgttc

SEQ ID NO: 22515 - DNA, 30 bp, Homo Sapiens
gtttccgtagtgtagtggtcatcacgttcg

SEQ ID NO: 22516 - DNA, 31 bp, Homo Sapiens
gtttccgtagtgtagtggtcatcacgttcgc

SEQ ID NO: 22517 - DNA, 32 bp, Homo Sapiens
gtttccgtagtgtagtggtcatcacgttcgcc

SEQ ID NO: 22518 - DNA, 33 bp, Homo Sapiens
gtttccgtagtgtagtggtcatcacgttcgcct

SEQ ID NO: 22519 - DNA, 34 bp, Homo Sapiens
gtttccgtagtgtagtggtcatcacgttcgccta

SEQ ID NO: 22520 - DNA, 35 bp, Homo Sapiens
gtttccgtagtgtagtggtcatcacgttcgcctaa

SEQ ID NO: 22521 - DNA, 36 bp, Homo Sapiens
gtttccgtagtgtagtggtcatcacgttcgcctaac

SEQ ID NO: 22522 - DNA, 37 bp, Homo Sapiens
gtttccgtagtgtagtggtcatcacgttcgcctaaca

SEQ ID NO: 22523 - DNA, 20 bp, Homo Sapiens
gtttccgtagtgtagtggtt

SEQ ID NO: 22524 - DNA, 21 bp, Homo Sapiens
gtttccgtagtgtagtggtta

SEQ ID NO: 22525 - DNA, 22 bp, Homo Sapiens
gtttccgtagtgtagtggttat

SEQ ID NO: 22526 - DNA, 23 bp, Homo Sapiens
gtttccgtagtgtagtggttatc

SEQ ID NO: 22527 - DNA, 24 bp, Homo Sapiens
gtttccgtagtgtagtggttatca

SEQ ID NO: 22528 - DNA, 25 bp, Homo Sapiens
gtttccgtagtgtagtggttatcac

SEQ ID NO: 22529 - DNA, 26 bp, Homo Sapiens
gtttccgtagtgtagtggttatcacg

SEQ ID NO: 22530 - DNA, 27 bp, Homo Sapiens
gtttccgtagtgtagtggttatcacgt

SEQ ID NO: 22531 - DNA, 28 bp, Homo Sapiens
gtttccgtagtgtagtggttatcacgtt

SEQ ID NO: 22532 - DNA, 29 bp, Homo Sapiens
gtttccgtagtgtagtggttatcacgttc

SEQ ID NO: 22533 - DNA, 30 bp, Homo Sapiens
gtttccgtagtgtagtggttatcacgttcg

SEQ ID NO: 22534 - DNA, 31 bp, Homo Sapiens
gtttccgtagtgtagtggttatcacgttcgc

SEQ ID NO: 22535 - DNA, 32 bp, Homo Sapiens
gtttccgtagtgtagtggttatcacgttcgcc

SEQ ID NO: 22536 - DNA, 33 bp, Homo Sapiens
gtttccgtagtgtagtggttatcacgttcgcct

SEQ ID NO: 22537 - DNA, 34 bp, Homo Sapiens
gtttccgtagtgtagtggttatcacgttcgccta

SEQ ID NO: 22538 - DNA, 35 bp, Homo Sapiens
gtttccgtagtgtagtggttatcacgttcgcctaa

SEQ ID NO: 22539 - DNA, 36 bp, Homo Sapiens
gtttccgtagtgtagtggttatcacgttcgcctaac

SEQ ID NO: 22540 - DNA, 37 bp, Homo Sapiens
gtttccgtagtgtagtggttatcacgttcgcctaaca

SEQ ID NO: 22541 - DNA, 39 bp, Homo Sapiens
gtttccgtagtgtagtggttatcacgttcgcctaacacg

SEQ ID NO: 22542 - DNA, 34 bp, Homo Sapiens
gtttccgtagtgtagtggttatcacgttcgcctc

SEQ ID NO: 22543 - DNA, 35 bp, Homo Sapiens
gtttccgtagtgtagtggttatcacgttcgcctca

SEQ ID NO: 22544 - DNA, 36 bp, Homo Sapiens
gtttccgtagtgtagtggttatcacgttcgcctcac

SEQ ID NO: 22545 - DNA, 37 bp, Homo Sapiens
gtttccgtagtgtagtggttatcacgttcgcctcaca

SEQ ID NO: 22546 - DNA, 38 bp, Homo Sapiens
gtttccgtagtgtagtggttatcacgttcgcctcacac

SEQ ID NO: 22547 - DNA, 39 bp, Homo Sapiens
gtttccgtagtgtagtggttatcacgttcgcctcacacg

SEQ ID NO: 22548 - DNA, 40 bp, Homo Sapiens
gtttccgtagtgtagtggttatcacgttcgcctcacacgc

SEQ ID NO: 22549 - DNA, 41 bp, Homo Sapiens
gtttccgtagtgtagtggttatcacgttcgcctcacacgcg

SEQ ID NO: 22550 - DNA, 42 bp, Homo Sapiens
gtttccgtagtgtagtggttatcacgttcgcctcacacgcga

SEQ ID NO: 22551 - DNA, 43 bp, Homo Sapiens
gtttccgtagtgtagtggttatcacgttcgcctcacacgcgaa

SEQ ID NO: 22552 - DNA, 44 bp, Homo Sapiens
gtttccgtagtgtagtggttatcacgttcgcctcacacgcgaaa

SEQ ID NO: 22553 - DNA, 32 bp, Homo Sapiens
gtttccgtagtgtagtggttatcacgtttgcc

SEQ ID NO: 22554 - DNA, 33 bp, Homo Sapiens
gtttccgtagtgtagtggttatcacgtttgcct

SEQ ID NO: 22555 - DNA, 23 bp, Homo Sapiens
gtttccgtagtgtagtggttatt

SEQ ID NO: 22556 - DNA, 32 bp, Homo Sapiens
gtttccgtagtgtagtggttattatgttcgcc

SEQ ID NO: 22557 - DNA, 33 bp, Homo Sapiens
gtttccgtagtgtagtggttattatgttcgcct

SEQ ID NO: 22558 - DNA, 18 bp, Homo Sapiens
gtttccgtggtgtagtgg

SEQ ID NO: 22559 - DNA, 23 bp, Homo Sapiens
gtttccgtggtgtagtggttatc

SEQ ID NO: 22560 - DNA, 32 bp, Homo Sapiens
gtttccgtggtgtagtggttatcacattcgcc

SEQ ID NO: 22561 - DNA, 33 bp, Homo Sapiens
gtttccgtggtgtagtggttatcacattcgcct

SEQ ID NO: 22562 - DNA, 16 bp, Homo Sapiens
gtttgtgggtttaagt

SEQ ID NO: 22563 - DNA, 17 bp, Homo Sapiens
gtttgtgggtttaagtc

SEQ ID NO: 22564 - DNA, 18 bp, Homo Sapiens
gtttgtgggtttaagtcc

SEQ ID NO: 22565 - DNA, 19 bp, Homo Sapiens
gtttgtgggtttaagtccc

SEQ ID NO: 22566 - DNA, 20 bp, Homo Sapiens
gtttgtgggtttaagtccca

SEQ ID NO: 22567 - DNA, 22 bp, Homo Sapiens
gtttgtgggtttaagtcccatt

SEQ ID NO: 22568 - DNA, 26 bp, Homo Sapiens
gtttgtgggtttaagtcccattggtc

SEQ ID NO: 22569 - DNA, 27 bp, Homo Sapiens
gtttgtgggtttaagtcccattggtct

SEQ ID NO: 22570 - DNA, 28 bp, Homo Sapiens
gtttgtgggtttaagtcccattggtcta

SEQ ID NO: 22571 - DNA, 29 bp, Homo Sapiens
gtttgtgggtttaagtcccattggtctag

SEQ ID NO: 22572 - DNA, 30 bp, Homo Sapiens
gtttgtgggtttaagtcccattggtctagc

SEQ ID NO: 22573 - DNA, 31 bp, Homo Sapiens
gtttgtgggtttaagtcccattggtctagcc

SEQ ID NO: 22574 - DNA, 32 bp, Homo Sapiens
gtttgtgggtttaagtcccattggtctagcca

SEQ ID NO: 22575 - DNA, 27 bp, Homo Sapiens
gttttcacccaggcggcccgggttcga

SEQ ID NO: 22576 - DNA, 36 bp, Homo Sapiens
gttttcacccaggcggcccgggttcgactcccggtg

SEQ ID NO: 22577 - DNA, 37 bp, Homo Sapiens
gttttcacccaggcggcccgggttcgactcccggtgt

SEQ ID NO: 22578 - DNA, 38 bp, Homo Sapiens
gttttcacccaggcggcccgggttcgactcccggtgtg

SEQ ID NO: 22579 - DNA, 39 bp, Homo Sapiens
gttttcacccaggcggcccgggttcgactcccggtgtgg

SEQ ID NO: 22580 - DNA, 41 bp, Homo Sapiens
gttttcacccaggcggcccgggttcgactcccggtgtggga

SEQ ID NO: 22581 - DNA, 42 bp, Homo Sapiens
gttttcacccaggcggcccgggttcgactcccggtgtgggaa

SEQ ID NO: 22582 - DNA, 43 bp, Homo Sapiens
gttttcacccaggcggcccgggttcgactcccggtgtgggaac

SEQ ID NO: 22583 - DNA, 44 bp, Homo Sapiens
gttttcacccaggcggcccgggttcgactcccggtgtgggaacc

SEQ ID NO: 22584 - DNA, 45 bp, Homo Sapiens
gttttcacccaggcggcccgggttcgactcccggtgtgggaacca

SEQ ID NO: 22585 - DNA, 28 bp, Homo Sapiens
gttttgacaacattcaaaaaagagtacc

SEQ ID NO: 22586 - DNA, 29 bp, Homo Sapiens
gttttgacaacattcaaaaaagagtacca

SEQ ID NO: 22587 - DNA, 16 bp, Homo Sapiens
gttttgcagtccttac

SEQ ID NO: 22588 - DNA, 17 bp, Homo Sapiens
gttttgcagtccttacc

SEQ ID NO: 22589 - DNA, 18 bp, Homo Sapiens
gttttgcagtccttacca

SEQ ID NO: 22590 - DNA, 16 bp, Homo Sapiens
gtttttcatatcattg

SEQ ID NO: 22591 - DNA, 17 bp, Homo Sapiens
gtttttcatatcattgg

SEQ ID NO: 22592 - DNA, 18 bp, Homo Sapiens
gtttttcatatcattggt

SEQ ID NO: 22593 - DNA, 19 bp, Homo Sapiens
gtttttcatatcattggtc

SEQ ID NO: 22594 - DNA, 20 bp, Homo Sapiens
gtttttcatatcattggtcg

SEQ ID NO: 22595 - DNA, 21 bp, Homo Sapiens
gtttttcatatcattggtcgt

SEQ ID NO: 22596 - DNA, 22 bp, Homo Sapiens
gtttttcatatcattggtcgtg

SEQ ID NO: 22597 - DNA, 23 bp, Homo Sapiens
gtttttcatatcattggtcgtgg

SEQ ID NO: 22598 - DNA, 24 bp, Homo Sapiens
gtttttcatatcattggtcgtggt

SEQ ID NO: 22599 - DNA, 25 bp, Homo Sapiens
gtttttcatatcattggtcgtggtt

SEQ ID NO: 22600 - DNA, 26 bp, Homo Sapiens
gtttttcatatcattggtcgtggttg

SEQ ID NO: 22601 - DNA, 27 bp, Homo Sapiens
gtttttcatatcattggtcgtggttgt

SEQ ID NO: 22602 - DNA, 28 bp, Homo Sapiens
gtttttcatatcattggtcgtggttgta

SEQ ID NO: 22603 - DNA, 29 bp, Homo Sapiens
gtttttcatatcattggtcgtggttgtag

SEQ ID NO: 22604 - DNA, 30 bp, Homo Sapiens
gtttttcatatcattggtcgtggttgtagt

SEQ ID NO: 22605 - DNA, 31 bp, Homo Sapiens
gtttttcatatcattggtcgtggttgtagtc

SEQ ID NO: 22606 - DNA, 32 bp, Homo Sapiens
gtttttcatatcattggtcgtggttgtagtcc

SEQ ID NO: 22607 - DNA, 33 bp, Homo Sapiens
gtttttcatatcattggtcgtggttgtagtccg

SEQ ID NO: 22608 - DNA, 34 bp, Homo Sapiens
gtttttcatatcattggtcgtggttgtagtccgt

SEQ ID NO: 22609 - DNA, 35 bp, Homo Sapiens
gtttttcatatcattggtcgtggttgtagtccgtg

SEQ ID NO: 22610 - DNA, 36 bp, Homo Sapiens
gtttttcatatcattggtcgtggttgtagtccgtgc

SEQ ID NO: 22611 - DNA, 37 bp, Homo Sapiens
gtttttcatatcattggtcgtggttgtagtccgtgcg

SEQ ID NO: 22612 - DNA, 38 bp, Homo Sapiens
gtttttcatatcattggtcgtggttgtagtccgtgcga

SEQ ID NO: 22613 - DNA, 39 bp, Homo Sapiens
gtttttcatatcattggtcgtggttgtagtccgtgcgag

SEQ ID NO: 22614 - DNA, 40 bp, Homo Sapiens
gtttttcatatcattggtcgtggttgtagtccgtgcgaga

SEQ ID NO: 22615 - DNA, 41 bp, Homo Sapiens
gtttttcatatcattggtcgtggttgtagtccgtgcgagaa

SEQ ID NO: 22616 - DNA, 42 bp, Homo Sapiens
gtttttcatatcattggtcgtggttgtagtccgtgcgagaat

SEQ ID NO: 22617 - DNA, 43 bp, Homo Sapiens
gtttttcatatcattggtcgtggttgtagtccgtgcgagaata

SEQ ID NO: 22618 - DNA, 44 bp, Homo Sapiens
gtttttcatatcattggtcgtggttgtagtccgtgcgagaatac

SEQ ID NO: 22619 - DNA, 45 bp, Homo Sapiens
gtttttcatatcattggtcgtggttgtagtccgtgcgagaatacc

SEQ ID NO: 22620 - DNA, 46 bp, Homo Sapiens
gtttttcatatcattggtcgtggttgtagtccgtgcgagaatacca

SEQ ID NO: 22621 - DNA, 18 bp, Homo Sapiens
taaaacttaaaactttac

SEQ ID NO: 22622 - DNA, 19 bp, Homo Sapiens
taaaacttaaaactttaca

SEQ ID NO: 22623 - DNA, 22 bp, Homo Sapiens
taaaacttaaaactttacagtc

SEQ ID NO: 22624 - DNA, 23 bp, Homo Sapiens
taaaacttaaaactttacagtca

SEQ ID NO: 22625 - DNA, 24 bp, Homo Sapiens
taaaacttaaaactttacagtcag

SEQ ID NO: 22626 - DNA, 25 bp, Homo Sapiens
taaaacttaaaactttacagtcaga

SEQ ID NO: 22627 - DNA, 26 bp, Homo Sapiens
taaaacttaaaactttacagtcagag

SEQ ID NO: 22628 - DNA, 27 bp, Homo Sapiens
taaaacttaaaactttacagtcagagg

SEQ ID NO: 22629 - DNA, 28 bp, Homo Sapiens
taaaacttaaaactttacagtcagaggt

SEQ ID NO: 22630 - DNA, 29 bp, Homo Sapiens
taaaacttaaaactttacagtcagaggtt

SEQ ID NO: 22631 - DNA, 30 bp, Homo Sapiens
taaaacttaaaactttacagtcagaggttc

SEQ ID NO: 22632 - DNA, 31 bp, Homo Sapiens
taaaacttaaaactttacagtcagaggttca

SEQ ID NO: 22633 - DNA, 39 bp, Homo Sapiens
taaaacttaaaactttacagtcagaggttcaattcctct

SEQ ID NO: 22634 - DNA, 21 bp, Homo Sapiens
taaaactttacagtcagaggt

SEQ ID NO: 22635 - DNA, 22 bp, Homo Sapiens
taaaactttacagtcagaggtt

SEQ ID NO: 22636 - DNA, 23 bp, Homo Sapiens
taaaactttacagtcagaggttc

SEQ ID NO: 22637 - DNA, 28 bp, Homo Sapiens
taaaactttacagtcagaggttcaattc

SEQ ID NO: 22638 - DNA, 34 bp, Homo Sapiens
taaaactttacagtcagaggttcaattcctcttc

SEQ ID NO: 22639 - DNA, 19 bp, Homo Sapiens
taaaagagttactttgata

SEQ ID NO: 22640 - DNA, 23 bp, Homo Sapiens
taaaagagttactttgatagagt

SEQ ID NO: 22641 - DNA, 36 bp, Homo Sapiens
taaaagagttactttgatagagtaaataataggagc

SEQ ID NO: 22642 - DNA, 37 bp, Homo Sapiens
taaaaggttggtggttcgaacccacccagaggcgcca

SEQ ID NO: 22643 - DNA, 18 bp, Homo Sapiens
taaaatggctgagtgaag

SEQ ID NO: 22644 - DNA, 26 bp, Homo Sapiens
taaaatggctgagtgaagcattggac

SEQ ID NO: 22645 - DNA, 27 bp, Homo Sapiens
taaaatggctgagtgaagcattggact

SEQ ID NO: 22646 - DNA, 28 bp, Homo Sapiens
taaaatggctgagtgaagcattggactg

SEQ ID NO: 22647 - DNA, 29 bp, Homo Sapiens
taaaatggctgagtgaagcattggactgt

SEQ ID NO: 22648 - DNA, 30 bp, Homo Sapiens
taaaatggctgagtgaagcattggactgta

SEQ ID NO: 22649 - DNA, 31 bp, Homo Sapiens
taaaatggctgagtgaagcattggactgtaa

SEQ ID NO: 22650 - DNA, 34 bp, Homo Sapiens
taaaatggctgagtgaagcattggactgtaaatc

SEQ ID NO: 22651 - DNA, 35 bp, Homo Sapiens
taaaatggctgagtgaagcattggactgtaaatct

SEQ ID NO: 22652 - DNA, 18 bp, Homo Sapiens
taaacaaaacgaatgatt

SEQ ID NO: 22653 - DNA, 21 bp, Homo Sapiens
taaacaaaacgaatgatttcg

SEQ ID NO: 22654 - DNA, 23 bp, Homo Sapiens
taaacaaaacgaatgatttcgac

SEQ ID NO: 22655 - DNA, 24 bp, Homo Sapiens
taaacaaaacgaatgatttcgact

SEQ ID NO: 22656 - DNA, 25 bp, Homo Sapiens
taaacaaaacgaatgatttcgactc

SEQ ID NO: 22657 - DNA, 26 bp, Homo Sapiens
taaacaaaacgaatgatttcgactca

SEQ ID NO: 22658 - DNA, 27 bp, Homo Sapiens
taaacaaaacgaatgatttcgactcat

SEQ ID NO: 22659 - DNA, 28 bp, Homo Sapiens
taaacaaaacgaatgatttcgactcatt

SEQ ID NO: 22660 - DNA, 29 bp, Homo Sapiens
taaacaaaacgaatgatttcgactcatta

SEQ ID NO: 22661 - DNA, 31 bp, Homo Sapiens
taaacaaaacgaatgatttcgactcattaaa

SEQ ID NO: 22662 - DNA, 32 bp, Homo Sapiens
taaacaaaacgaatgatttcgactcattaaat

SEQ ID NO: 22663 - DNA, 33 bp, Homo Sapiens
taaacaaaacgaatgatttcgactcattaaatt

SEQ ID NO: 22664 - DNA, 36 bp, Homo Sapiens
taaacaaaacgaatgatttcgactcattaaattatg

SEQ ID NO: 22665 - DNA, 37 bp, Homo Sapiens
taaacaaaacgaatgatttcgactcattaaattatga

SEQ ID NO: 22666 - DNA, 38 bp, Homo Sapiens
taaacaaaacgaatgatttcgactcattaaattatgat

SEQ ID NO: 22667 - DNA, 39 bp, Homo Sapiens
taaacaaaacgaatgatttcgactcattaaattatgata

SEQ ID NO: 22668 - DNA, 41 bp, Homo Sapiens
taaacaaaacgaatgatttcgactcattaaattatgataat

SEQ ID NO: 22669 - DNA, 42 bp, Homo Sapiens
taaacaaaacgaatgatttcgactcattaaattatgataatc

SEQ ID NO: 22670 - DNA, 21 bp, Homo Sapiens
taaacaggagatcctgggttc

SEQ ID NO: 22671 - DNA, 22 bp, Homo Sapiens
taaacaggagatcctgggttcg

SEQ ID NO: 22672 - DNA, 23 bp, Homo Sapiens
taaacaggagatcctgggttcga

SEQ ID NO: 22673 - DNA, 25 bp, Homo Sapiens
taaacaggagatcctgggttcgaat

SEQ ID NO: 22674 - DNA, 31 bp, Homo Sapiens
taaacaggagatcctgggttcgaatcccagc

SEQ ID NO: 22675 - DNA, 32 bp, Homo Sapiens
taaacaggagatcctgggttcgaatcccagcg

SEQ ID NO: 22676 - DNA, 38 bp, Homo Sapiens
taaacaggagatcctgggttcgaatcccagcgaggcct

SEQ ID NO: 22677 - DNA, 35 bp, Homo Sapiens
taaacaggagatcctgggttcgaatcccagcgggg

SEQ ID NO: 22678 - DNA, 36 bp, Homo Sapiens
taaacaggagatcctgggttcgaatcccagcggggc

SEQ ID NO: 22679 - DNA, 37 bp, Homo Sapiens
taaacaggagatcctgggttcgaatcccagcggggcc

SEQ ID NO: 22680 - DNA, 38 bp, Homo Sapiens
taaacaggagatcctgggttcgaatcccagcggggcct

SEQ ID NO: 22681 - DNA, 39 bp, Homo Sapiens
taaacaggagatcctgggttcgaatcccagcggggcctc

SEQ ID NO: 22682 - DNA, 40 bp, Homo Sapiens
taaacaggagatcctgggttcgaatcccagcggggcctcc

SEQ ID NO: 22683 - DNA, 41 bp, Homo Sapiens
taaacaggagatcctgggttcgaatcccagcggggcctcca

SEQ ID NO: 22684 - DNA, 34 bp, Homo Sapiens
taaacaggagatcctgggttcgaatcccagcggt

SEQ ID NO: 22685 - DNA, 35 bp, Homo Sapiens
taaacaggagatcctgggttcgaatcccagcggtg

SEQ ID NO: 22686 - DNA, 36 bp, Homo Sapiens
taaacaggagatcctgggttcgaatcccagcggtgc

SEQ ID NO: 22687 - DNA, 37 bp, Homo Sapiens
taaacaggagatcctgggttcgaatcccagcggtgcc

SEQ ID NO: 22688 - DNA, 38 bp, Homo Sapiens
taaacaggagatcctgggttcgaatcccagcggtgcct

SEQ ID NO: 22689 - DNA, 39 bp, Homo Sapiens
taaacaggagatcctgggttcgaatcccagcggtgcctc

SEQ ID NO: 22690 - DNA, 40 bp, Homo Sapiens
taaacaggagatcctgggttcgaatcccagcggtgcctcc

SEQ ID NO: 22691 - DNA, 41 bp, Homo Sapiens
taaacaggagatcctgggttcgaatcccagcggtgcctcca

SEQ ID NO: 22692 - DNA, 24 bp, Homo Sapiens
taaacaggagatcctgggttcgac

SEQ ID NO: 22693 - DNA, 38 bp, Homo Sapiens
taaacaggagatcctgggttcgactcccagcggggcct

SEQ ID NO: 22694 - DNA, 16 bp, Homo Sapiens
taaaccaggggtcgcg

SEQ ID NO: 22695 - DNA, 17 bp, Homo Sapiens
taaaccaggggtcgcga

SEQ ID NO: 22696 - DNA, 20 bp, Homo Sapiens
taaaccaggggtcgcgagtt

SEQ ID NO: 22697 - DNA, 21 bp, Homo Sapiens
taaaccaggggtcgcgagttc

SEQ ID NO: 22698 - DNA, 22 bp, Homo Sapiens
taaaccaggggtcgcgagttca

SEQ ID NO: 22699 - DNA, 23 bp, Homo Sapiens
taaaccaggggtcgcgagttcaa

SEQ ID NO: 22700 - DNA, 25 bp, Homo Sapiens
taaaccaggggtcgcgagttcaaat

SEQ ID NO: 22701 - DNA, 26 bp, Homo Sapiens
taaaccaggggtcgcgagttcaaatc

SEQ ID NO: 22702 - DNA, 35 bp, Homo Sapiens
taaaccaggggtcgcgagttcaaatctcgctgggg

SEQ ID NO: 22703 - DNA, 36 bp, Homo Sapiens
taaaccaggggtcgcgagttcaaatctcgctggggc

SEQ ID NO: 22704 - DNA, 38 bp, Homo Sapiens
taaaccaggggtcgcgagttcaaatctcgctggggcct

SEQ ID NO: 22705 - DNA, 40 bp, Homo Sapiens
taaaccaggggtcgcgagttcaaatctcgctggggcctcc

SEQ ID NO: 22706 - DNA, 41 bp, Homo Sapiens
taaaccaggggtcgcgagttcaaatctcgctggggcctcca

SEQ ID NO: 22707 - DNA, 38 bp, Homo Sapiens
taaaccaggggtcgcgagttcaattctcgctggggcct

SEQ ID NO: 22708 - DNA, 38 bp, Homo Sapiens
taaaccaggggtcgcgagttcgatcctcgctggggcct

SEQ ID NO: 22709 - DNA, 17 bp, Homo Sapiens
taaacccccttatttct

SEQ ID NO: 22710 - DNA, 18 bp, Homo Sapiens
taaacccccttatttcta

SEQ ID NO: 22711 - DNA, 19 bp, Homo Sapiens
taaacccccttatttctac

SEQ ID NO: 22712 - DNA, 20 bp, Homo Sapiens
taaacccccttatttctacc

SEQ ID NO: 22713 - DNA, 21 bp, Homo Sapiens
taaacccccttatttctacca

SEQ ID NO: 22714 - DNA, 19 bp, Homo Sapiens
taaaccgaagatcacgggt

SEQ ID NO: 22715 - DNA, 22 bp, Homo Sapiens
taaaccgaagatcacgggttcg

SEQ ID NO: 22716 - DNA, 23 bp, Homo Sapiens
taaaccgaagatcacgggttcga

SEQ ID NO: 22717 - DNA, 38 bp, Homo Sapiens
taaaccgaagatcacgggttcgaaccccgtccgtgcct

SEQ ID NO: 22718 - DNA, 39 bp, Homo Sapiens
taaaccgaagatcacgggttcgaaccccgtccgtgcctc

SEQ ID NO: 22719 - DNA, 40 bp, Homo Sapiens
taaaccgaagatcacgggttcgaaccccgtccgtgcctcc

SEQ ID NO: 22720 - DNA, 41 bp, Homo Sapiens
taaaccgaagatcacgggttcgaaccccgtccgtgcctcca

SEQ ID NO: 22721 - DNA, 19 bp, Homo Sapiens
taaaccgaagatcgcgggt

SEQ ID NO: 22722 - DNA, 22 bp, Homo Sapiens
taaaccgaagatcgcgggttcg

SEQ ID NO: 22723 - DNA, 23 bp, Homo Sapiens
taaaccgaagatcgcgggttcga

SEQ ID NO: 22724 - DNA, 25 bp, Homo Sapiens
taaaccgaagatcgcgggttcgaac

SEQ ID NO: 22725 - DNA, 26 bp, Homo Sapiens
taaaccgaagatcgcgggttcgaacc

SEQ ID NO: 22726 - DNA, 27 bp, Homo Sapiens
taaaccgaagatcgcgggttcgaaccc

SEQ ID NO: 22727 - DNA, 38 bp, Homo Sapiens
taaaccgaagatcgcgggttcgaaccccgtccgtgcct

SEQ ID NO: 22728 - DNA, 39 bp, Homo Sapiens
taaaccgaagatcgcgggttcgaaccccgtccgtgcctc

SEQ ID NO: 22729 - DNA, 40 bp, Homo Sapiens
taaaccgaagatcgcgggttcgaaccccgtccgtgcctcc

SEQ ID NO: 22730 - DNA, 41 bp, Homo Sapiens
taaaccgaagatcgcgggttcgaaccccgtccgtgcctcca

SEQ ID NO: 22731 - DNA, 16 bp, Homo Sapiens
taaaccggagatgaaa

SEQ ID NO: 22732 - DNA, 17 bp, Homo Sapiens
taaaccggagatgaaaa

SEQ ID NO: 22733 - DNA, 18 bp, Homo Sapiens
taaaccggagatgaaaac

SEQ ID NO: 22734 - DNA, 19 bp, Homo Sapiens
taaaccggagatgaaaacc

SEQ ID NO: 22735 - DNA, 20 bp, Homo Sapiens
taaaccggagatgaaaacct

SEQ ID NO: 22736 - DNA, 21 bp, Homo Sapiens
taaaccggagatgaaaacctt

SEQ ID NO: 22737 - DNA, 22 bp, Homo Sapiens
taaaccggagatgaaaaccttt

SEQ ID NO: 22738 - DNA, 23 bp, Homo Sapiens
taaaccggagatgaaaacctttt

SEQ ID NO: 22739 - DNA, 24 bp, Homo Sapiens
taaaccggagatgaaaaccttttt

SEQ ID NO: 22740 - DNA, 25 bp, Homo Sapiens
taaaccggagatgaaaacctttttc

SEQ ID NO: 22741 - DNA, 29 bp, Homo Sapiens
taaaccggagatgaaaacctttttccaag

SEQ ID NO: 22742 - DNA, 30 bp, Homo Sapiens
taaaccggagatgaaaacctttttccaagg

SEQ ID NO: 22743 - DNA, 31 bp, Homo Sapiens
taaaccggagatgaaaacctttttccaagga

SEQ ID NO: 22744 - DNA, 32 bp, Homo Sapiens
taaaccggagatgaaaacctttttccaaggac

SEQ ID NO: 22745 - DNA, 33 bp, Homo Sapiens
taaaccggagatgaaaacctttttccaaggaca

SEQ ID NO: 22746 - DNA, 34 bp, Homo Sapiens
taaaccggagatgaaaacctttttccaaggacac

SEQ ID NO: 22747 - DNA, 35 bp, Homo Sapiens
taaaccggagatgaaaacctttttccaaggacacc

SEQ ID NO: 22748 - DNA, 36 bp, Homo Sapiens
taaaccggagatgaaaacctttttccaaggacacca

SEQ ID NO: 22749 - DNA, 16 bp, Homo Sapiens
taaagacaggggttag

SEQ ID NO: 22750 - DNA, 17 bp, Homo Sapiens
taaagacaggggttagg

SEQ ID NO: 22751 - DNA, 18 bp, Homo Sapiens
taaagacaggggttaggc

SEQ ID NO: 22752 - DNA, 19 bp, Homo Sapiens
taaagacaggggttaggcc

SEQ ID NO: 22753 - DNA, 20 bp, Homo Sapiens
taaagacaggggttaggcct

SEQ ID NO: 22754 - DNA, 21 bp, Homo Sapiens
taaagacaggggttaggcctc

SEQ ID NO: 22755 - DNA, 22 bp, Homo Sapiens
taaagacaggggttaggcctct

SEQ ID NO: 22756 - DNA, 23 bp, Homo Sapiens
taaagacaggggttaggcctctt

SEQ ID NO: 22757 - DNA, 24 bp, Homo Sapiens
taaagacaggggttaggcctcttt

SEQ ID NO: 22758 - DNA, 25 bp, Homo Sapiens
taaagacaggggttaggcctctttt

SEQ ID NO: 22759 - DNA, 26 bp, Homo Sapiens
taaagacaggggttaggcctcttttt

SEQ ID NO: 22760 - DNA, 27 bp, Homo Sapiens
taaagacaggggttaggcctcttttta

SEQ ID NO: 22761 - DNA, 29 bp, Homo Sapiens
taaagacaggggttaggcctctttttacc

SEQ ID NO: 22762 - DNA, 30 bp, Homo Sapiens
taaagacaggggttaggcctctttttacca

SEQ ID NO: 22763 - DNA, 32 bp, Homo Sapiens
taaagacaggggttaggcctctttttaccacc

SEQ ID NO: 22764 - DNA, 33 bp, Homo Sapiens
taaagacaggggttaggcctctttttaccacca

SEQ ID NO: 22765 - DNA, 16 bp, Homo Sapiens
taaagactttttctct

SEQ ID NO: 22766 - DNA, 17 bp, Homo Sapiens
taaagactttttctctg

SEQ ID NO: 22767 - DNA, 18 bp, Homo Sapiens
taaagactttttctctga

SEQ ID NO: 22768 - DNA, 19 bp, Homo Sapiens
taaagactttttctctgac

SEQ ID NO: 22769 - DNA, 20 bp, Homo Sapiens
taaagactttttctctgacc

SEQ ID NO: 22770 - DNA, 21 bp, Homo Sapiens
taaagactttttctctgacca

SEQ ID NO: 22771 - DNA, 16 bp, Homo Sapiens
taaagattaagagaac

SEQ ID NO: 22772 - DNA, 17 bp, Homo Sapiens
taaagattaagagaacc

SEQ ID NO: 22773 - DNA, 18 bp, Homo Sapiens
taaagattaagagaacca

SEQ ID NO: 22774 - DNA, 19 bp, Homo Sapiens
taaagattaagagaaccaa

SEQ ID NO: 22775 - DNA, 20 bp, Homo Sapiens
taaagattaagagaaccaac

SEQ ID NO: 22776 - DNA, 21 bp, Homo Sapiens
taaagattaagagaaccaaca

SEQ ID NO: 22777 - DNA, 22 bp, Homo Sapiens
taaagattaagagaaccaacac

SEQ ID NO: 22778 - DNA, 23 bp, Homo Sapiens
taaagattaagagaaccaacacc

SEQ ID NO: 22779 - DNA, 24 bp, Homo Sapiens
taaagattaagagaaccaacacct

SEQ ID NO: 22780 - DNA, 25 bp, Homo Sapiens
taaagattaagagaaccaacacctc

SEQ ID NO: 22781 - DNA, 26 bp, Homo Sapiens
taaagattaagagaaccaacacctct

SEQ ID NO: 22782 - DNA, 27 bp, Homo Sapiens
taaagattaagagaaccaacacctctt

SEQ ID NO: 22783 - DNA, 28 bp, Homo Sapiens
taaagattaagagaaccaacacctcttt

SEQ ID NO: 22784 - DNA, 29 bp, Homo Sapiens
taaagattaagagaaccaacacctcttta

SEQ ID NO: 22785 - DNA, 30 bp, Homo Sapiens
taaagattaagagaaccaacacctctttac

SEQ ID NO: 22786 - DNA, 31 bp, Homo Sapiens
taaagattaagagaaccaacacctctttaca

SEQ ID NO: 22787 - DNA, 32 bp, Homo Sapiens
taaagattaagagaaccaacacctctttacag

SEQ ID NO: 22788 - DNA, 33 bp, Homo Sapiens
taaagattaagagaaccaacacctctttacagt

SEQ ID NO: 22789 - DNA, 34 bp, Homo Sapiens
taaagattaagagaaccaacacctctttacagtg

SEQ ID NO: 22790 - DNA, 35 bp, Homo Sapiens
taaagattaagagaaccaacacctctttacagtga

SEQ ID NO: 22791 - DNA, 36 bp, Homo Sapiens
taaagattaagagaaccaacacctctttacagtgac

SEQ ID NO: 22792 - DNA, 37 bp, Homo Sapiens
taaagattaagagaaccaacacctctttacagtgacc

SEQ ID NO: 22793 - DNA, 38 bp, Homo Sapiens
taaagattaagagaaccaacacctctttacagtgacca

SEQ ID NO: 22794 - DNA, 26 bp, Homo Sapiens
taaaggataacagctatccattggtc

SEQ ID NO: 22795 - DNA, 27 bp, Homo Sapiens
taaaggataacagctatccattggtct

SEQ ID NO: 22796 - DNA, 28 bp, Homo Sapiens
taaaggataacagctatccattggtctt

SEQ ID NO: 22797 - DNA, 29 bp, Homo Sapiens
taaaggataacagctatccattggtctta

SEQ ID NO: 22798 - DNA, 30 bp, Homo Sapiens
taaaggataacagctatccattggtcttag

SEQ ID NO: 22799 - DNA, 36 bp, Homo Sapiens
taaaggataacagctatccattggtcttaggcccca

SEQ ID NO: 22800 - DNA, 16 bp, Homo Sapiens
taaaggtccctggttc

SEQ ID NO: 22801 - DNA, 32 bp, Homo Sapiens
taaaggtccctggttcgatcccgggtttcggc

SEQ ID NO: 22802 - DNA, 34 bp, Homo Sapiens
taaaggtccctggttcgatcccgggtttcggcac

SEQ ID NO: 22803 - DNA, 35 bp, Homo Sapiens
taaaggtccctggttcgatcccgggtttcggcacc

SEQ ID NO: 22804 - DNA, 16 bp, Homo Sapiens
taaagtggctgatttg

SEQ ID NO: 22805 - DNA, 17 bp, Homo Sapiens
taaagtggctgatttgc

SEQ ID NO: 22806 - DNA, 16 bp, Homo Sapiens
taaataagctatcggg

SEQ ID NO: 22807 - DNA, 17 bp, Homo Sapiens
taaataagctatcgggc

SEQ ID NO: 22808 - DNA, 18 bp, Homo Sapiens
taaataagctatcgggcc

SEQ ID NO: 22809 - DNA, 19 bp, Homo Sapiens
taaataagctatcgggccc

SEQ ID NO: 22810 - DNA, 20 bp, Homo Sapiens
taaataagctatcgggccca

SEQ ID NO: 22811 - DNA, 21 bp, Homo Sapiens
taaataagctatcgggcccat

SEQ ID NO: 22812 - DNA, 22 bp, Homo Sapiens
taaataagctatcgggcccata

SEQ ID NO: 22813 - DNA, 23 bp, Homo Sapiens
taaataagctatcgggcccatac

SEQ ID NO: 22814 - DNA, 24 bp, Homo Sapiens
taaataagctatcgggcccatacc

SEQ ID NO: 22815 - DNA, 25 bp, Homo Sapiens
taaataagctatcgggcccataccc

SEQ ID NO: 22816 - DNA, 26 bp, Homo Sapiens
taaataagctatcgggcccatacccc

SEQ ID NO: 22817 - DNA, 27 bp, Homo Sapiens
taaataagctatcgggcccataccccg

SEQ ID NO: 22818 - DNA, 28 bp, Homo Sapiens
taaataagctatcgggcccataccccga

SEQ ID NO: 22819 - DNA, 29 bp, Homo Sapiens
taaataagctatcgggcccataccccgaa

SEQ ID NO: 22820 - DNA, 30 bp, Homo Sapiens
taaataagctatcgggcccataccccgaaa

SEQ ID NO: 22821 - DNA, 31 bp, Homo Sapiens
taaataagctatcgggcccataccccgaaaa

SEQ ID NO: 22822 - DNA, 33 bp, Homo Sapiens
taaataagctatcgggcccataccccgaaaatg

SEQ ID NO: 22823 - DNA, 34 bp, Homo Sapiens
taaataagctatcgggcccataccccgaaaatgt

SEQ ID NO: 22824 - DNA, 35 bp, Homo Sapiens
taaataagctatcgggcccataccccgaaaatgtt

SEQ ID NO: 22825 - DNA, 36 bp, Homo Sapiens
taaataagctatcgggcccataccccgaaaatgttg

SEQ ID NO: 22826 - DNA, 39 bp, Homo Sapiens
taaataagctatcgggcccataccccgaaaatgttggtt

SEQ ID NO: 22827 - DNA, 40 bp, Homo Sapiens
taaataagctatcgggcccataccccgaaaatgttggtta

SEQ ID NO: 22828 - DNA, 41 bp, Homo Sapiens
taaataagctatcgggcccataccccgaaaatgttggttat

SEQ ID NO: 22829 - DNA, 16 bp, Homo Sapiens
taaataataggagctt

SEQ ID NO: 22830 - DNA, 17 bp, Homo Sapiens
taaataataggagctta

SEQ ID NO: 22831 - DNA, 18 bp, Homo Sapiens
taaataataggagcttaa

SEQ ID NO: 22832 - DNA, 19 bp, Homo Sapiens
taaataataggagcttaaa

SEQ ID NO: 22833 - DNA, 20 bp, Homo Sapiens
taaataataggagcttaaac

SEQ ID NO: 22834 - DNA, 21 bp, Homo Sapiens
taaataataggagcttaaacc

SEQ ID NO: 22835 - DNA, 22 bp, Homo Sapiens
taaataataggagcttaaaccc

SEQ ID NO: 22836 - DNA, 23 bp, Homo Sapiens
taaataataggagcttaaacccc

SEQ ID NO: 22837 - DNA, 24 bp, Homo Sapiens
taaataataggagcttaaaccccc

SEQ ID NO: 22838 - DNA, 25 bp, Homo Sapiens
taaataataggagcttaaaccccct

SEQ ID NO: 22839 - DNA, 27 bp, Homo Sapiens
taaataataggagcttaaaccccctta

SEQ ID NO: 22840 - DNA, 29 bp, Homo Sapiens
taaataataggagcttaaacccccttatt

SEQ ID NO: 22841 - DNA, 32 bp, Homo Sapiens
taaataataggagcttaaacccccttatttct

SEQ ID NO: 22842 - DNA, 33 bp, Homo Sapiens
taaataataggagcttaaacccccttatttcta

SEQ ID NO: 22843 - DNA, 34 bp, Homo Sapiens
taaataataggagcttaaacccccttatttctac

SEQ ID NO: 22844 - DNA, 35 bp, Homo Sapiens
taaataataggagcttaaacccccttatttctacc

SEQ ID NO: 22845 - DNA, 36 bp, Homo Sapiens
taaataataggagcttaaacccccttatttctacca

SEQ ID NO: 22846 - DNA, 18 bp, Homo Sapiens
taaatacagaccaagagc

SEQ ID NO: 22847 - DNA, 19 bp, Homo Sapiens
taaatacagaccaagagcc

SEQ ID NO: 22848 - DNA, 20 bp, Homo Sapiens
taaatacagaccaagagcct

SEQ ID NO: 22849 - DNA, 21 bp, Homo Sapiens
taaatacagaccaagagcctt

SEQ ID NO: 22850 - DNA, 22 bp, Homo Sapiens
taaatacagaccaagagccttc

SEQ ID NO: 22851 - DNA, 23 bp, Homo Sapiens
taaatacagaccaagagccttca

SEQ ID NO: 22852 - DNA, 24 bp, Homo Sapiens
taaatacagaccaagagccttcaa

SEQ ID NO: 22853 - DNA, 25 bp, Homo Sapiens
taaatacagaccaagagccttcaaa

SEQ ID NO: 22854 - DNA, 26 bp, Homo Sapiens
taaatacagaccaagagccttcaaag

SEQ ID NO: 22855 - DNA, 28 bp, Homo Sapiens
taaatacagaccaagagccttcaaagcc

SEQ ID NO: 22856 - DNA, 29 bp, Homo Sapiens
taaatacagaccaagagccttcaaagccc

SEQ ID NO: 22857 - DNA, 32 bp, Homo Sapiens
taaatacagaccaagagccttcaaagccctca

SEQ ID NO: 22858 - DNA, 35 bp, Homo Sapiens
taaatacagaccaagagccttcaaagccctcagta

SEQ ID NO: 22859 - DNA, 17 bp, Homo Sapiens
taaatagtaccgttaac

SEQ ID NO: 22860 - DNA, 18 bp, Homo Sapiens
taaatagtaccgttaact

SEQ ID NO: 22861 - DNA, 19 bp, Homo Sapiens
taaatagtaccgttaactt

SEQ ID NO: 22862 - DNA, 20 bp, Homo Sapiens
taaatagtaccgttaacttc

SEQ ID NO: 22863 - DNA, 21 bp, Homo Sapiens
taaatagtaccgttaacttcc

SEQ ID NO: 22864 - DNA, 22 bp, Homo Sapiens
taaatagtaccgttaacttcca

SEQ ID NO: 22865 - DNA, 23 bp, Homo Sapiens
taaatagtaccgttaacttccaa

SEQ ID NO: 22866 - DNA, 26 bp, Homo Sapiens
taaatagtaccgttaacttccaatta

SEQ ID NO: 22867 - DNA, 28 bp, Homo Sapiens
taaatagtaccgttaacttccaattaac

SEQ ID NO: 22868 - DNA, 38 bp, Homo Sapiens
taaatagtaccgttaacttccaattaactagttttgac

SEQ ID NO: 22869 - DNA, 16 bp, Homo Sapiens
taaatatagtttaacc

SEQ ID NO: 22870 - DNA, 31 bp, Homo Sapiens
taaatatagtttaaccaaaacatcagattgt

SEQ ID NO: 22871 - DNA, 32 bp, Homo Sapiens
taaatatagtttaaccaaaacatcagattgtg

SEQ ID NO: 22872 - DNA, 33 bp, Homo Sapiens
taaatatagtttaaccaaaacatcagattgtga

SEQ ID NO: 22873 - DNA, 35 bp, Homo Sapiens
taaatatagtttaaccaaaacatcagattgtgaat

SEQ ID NO: 22874 - DNA, 36 bp, Homo Sapiens
taaatatagtttaaccaaaacatcagattgtgaatc

SEQ ID NO: 22875 - DNA, 20 bp, Homo Sapiens
taaatcctatatatcttacc

SEQ ID NO: 22876 - DNA, 21 bp, Homo Sapiens
taaatcctatatatcttacca

SEQ ID NO: 22877 - DNA, 25 bp, Homo Sapiens
taaatctaaagacaggggttaggcc

SEQ ID NO: 22878 - DNA, 26 bp, Homo Sapiens
taaatctaaagacaggggttaggcct

SEQ ID NO: 22879 - DNA, 27 bp, Homo Sapiens
taaatctaaagacaggggttaggcctc

SEQ ID NO: 22880 - DNA, 28 bp, Homo Sapiens
taaatctaaagacaggggttaggcctct

SEQ ID NO: 22881 - DNA, 30 bp, Homo Sapiens
taaatctaaagacaggggttaggcctcttt

SEQ ID NO: 22882 - DNA, 31 bp, Homo Sapiens
taaatctaaagacaggggttaggcctctttt

SEQ ID NO: 22883 - DNA, 33 bp, Homo Sapiens
taaatctaaagacaggggttaggcctcttttta

SEQ ID NO: 22884 - DNA, 35 bp, Homo Sapiens
taaatctaaagacaggggttaggcctctttttacc

SEQ ID NO: 22885 - DNA, 38 bp, Homo Sapiens
taaatctaaagacaggggttaggcctctttttaccacc

SEQ ID NO: 22886 - DNA, 39 bp, Homo Sapiens
taaatctaaagacaggggttaggcctctttttaccacca

SEQ ID NO: 22887 - DNA, 17 bp, Homo Sapiens
taaattagaatcttagc

SEQ ID NO: 22888 - DNA, 18 bp, Homo Sapiens
taaattagaatcttagct

SEQ ID NO: 22889 - DNA, 19 bp, Homo Sapiens
taaattagaatcttagctt

SEQ ID NO: 22890 - DNA, 20 bp, Homo Sapiens
taaattagaatcttagcttt

SEQ ID NO: 22891 - DNA, 21 bp, Homo Sapiens
taaattagaatcttagctttg

SEQ ID NO: 22892 - DNA, 22 bp, Homo Sapiens
taaattagaatcttagctttgg

SEQ ID NO: 22893 - DNA, 25 bp, Homo Sapiens
taaattagaatcttagctttgggtg

SEQ ID NO: 22894 - DNA, 27 bp, Homo Sapiens
taaattagaatcttagctttgggtgct

SEQ ID NO: 22895 - DNA, 35 bp, Homo Sapiens
taaattagaatcttagctttgggtgctaatggtgg

SEQ ID NO: 22896 - DNA, 37 bp, Homo Sapiens
taaattagaatcttagctttgggtgctaatggtggag

SEQ ID NO: 22897 - DNA, 39 bp, Homo Sapiens
taaattagaatcttagctttgggtgctaatggtggagtt

SEQ ID NO: 22898 - DNA, 40 bp, Homo Sapiens
taaattagaatcttagctttgggtgctaatggtggagtta

SEQ ID NO: 22899 - DNA, 45 bp, Homo Sapiens
taaattagaatcttagctttgggtgctaatggtggagttaaagac

SEQ ID NO: 22900 - DNA, 46 bp, Homo Sapiens
taaattagaatcttagctttgggtgctaatggtggagttaaagact

SEQ ID NO: 22901 - DNA, 16 bp, Homo Sapiens
taaattataggctaaa

SEQ ID NO: 22902 - DNA, 17 bp, Homo Sapiens
taaattataggctaaat

SEQ ID NO: 22903 - DNA, 18 bp, Homo Sapiens
taaattataggctaaatc

SEQ ID NO: 22904 - DNA, 19 bp, Homo Sapiens
taaattataggctaaatcc

SEQ ID NO: 22905 - DNA, 28 bp, Homo Sapiens
taaattatgataatcatatttaccaacc

SEQ ID NO: 22906 - DNA, 16 bp, Homo Sapiens
taacaacatggctttc

SEQ ID NO: 22907 - DNA, 18 bp, Homo Sapiens
taacaacatggctttctc

SEQ ID NO: 22908 - DNA, 19 bp, Homo Sapiens
taacaacatggctttctca

SEQ ID NO: 22909 - DNA, 20 bp, Homo Sapiens
taacaacatggctttctcac

SEQ ID NO: 22910 - DNA, 21 bp, Homo Sapiens
taacaacatggctttctcacc

SEQ ID NO: 22911 - DNA, 22 bp, Homo Sapiens
taacaacatggctttctcacca

SEQ ID NO: 22912 - DNA, 16 bp, Homo Sapiens
taacacaaagcaccca

SEQ ID NO: 22913 - DNA, 17 bp, Homo Sapiens
taacacaaagcacccaa

SEQ ID NO: 22914 - DNA, 18 bp, Homo Sapiens
taacacaaagcacccaac

SEQ ID NO: 22915 - DNA, 19 bp, Homo Sapiens
taacacaaagcacccaact

SEQ ID NO: 22916 - DNA, 20 bp, Homo Sapiens
taacacaaagcacccaactt

SEQ ID NO: 22917 - DNA, 22 bp, Homo Sapiens
taacacaaagcacccaacttac

SEQ ID NO: 22918 - DNA, 23 bp, Homo Sapiens
taacacaaagcacccaacttaca

SEQ ID NO: 22919 - DNA, 24 bp, Homo Sapiens
taacacaaagcacccaacttacac

SEQ ID NO: 22920 - DNA, 25 bp, Homo Sapiens
taacacaaagcacccaacttacact

SEQ ID NO: 22921 - DNA, 26 bp, Homo Sapiens
taacacaaagcacccaacttacactt

SEQ ID NO: 22922 - DNA, 27 bp, Homo Sapiens
taacacaaagcacccaacttacactta

SEQ ID NO: 22923 - DNA, 28 bp, Homo Sapiens
taacacaaagcacccaacttacacttag

SEQ ID NO: 22924 - DNA, 29 bp, Homo Sapiens
taacacaaagcacccaacttacacttagg

SEQ ID NO: 22925 - DNA, 30 bp, Homo Sapiens
taacacaaagcacccaacttacacttagga

SEQ ID NO: 22926 - DNA, 31 bp, Homo Sapiens
taacacaaagcacccaacttacacttaggag

SEQ ID NO: 22927 - DNA, 32 bp, Homo Sapiens
taacacaaagcacccaacttacacttaggaga

SEQ ID NO: 22928 - DNA, 33 bp, Homo Sapiens
taacacaaagcacccaacttacacttaggagat

SEQ ID NO: 22929 - DNA, 34 bp, Homo Sapiens
taacacaaagcacccaacttacacttaggagatt

SEQ ID NO: 22930 - DNA, 35 bp, Homo Sapiens
taacacaaagcacccaacttacacttaggagattt

SEQ ID NO: 22931 - DNA, 36 bp, Homo Sapiens
taacacaaagcacccaacttacacttaggagatttc

SEQ ID NO: 22932 - DNA, 37 bp, Homo Sapiens
taacacaaagcacccaacttacacttaggagatttca

SEQ ID NO: 22933 - DNA, 38 bp, Homo Sapiens
taacacaaagcacccaacttacacttaggagatttcaa

SEQ ID NO: 22934 - DNA, 39 bp, Homo Sapiens
taacacaaagcacccaacttacacttaggagatttcaac

SEQ ID NO: 22935 - DNA, 40 bp, Homo Sapiens
taacacaaagcacccaacttacacttaggagatttcaact

SEQ ID NO: 22936 - DNA, 41 bp, Homo Sapiens
taacacaaagcacccaacttacacttaggagatttcaactt

SEQ ID NO: 22937 - DNA, 42 bp, Homo Sapiens
taacacaaagcacccaacttacacttaggagatttcaactta

SEQ ID NO: 22938 - DNA, 43 bp, Homo Sapiens
taacacaaagcacccaacttacacttaggagatttcaacttaa

SEQ ID NO: 22939 - DNA, 44 bp, Homo Sapiens
taacacaaagcacccaacttacacttaggagatttcaacttaac

SEQ ID NO: 22940 - DNA, 45 bp, Homo Sapiens
taacacaaagcacccaacttacacttaggagatttcaacttaact

SEQ ID NO: 22941 - DNA, 46 bp, Homo Sapiens
taacacaaagcacccaacttacacttaggagatttcaacttaactt

SEQ ID NO: 22942 - DNA, 16 bp, Homo Sapiens
taacagctatccattg

SEQ ID NO: 22943 - DNA, 19 bp, Homo Sapiens
taacagctatccattggtc

SEQ ID NO: 22944 - DNA, 20 bp, Homo Sapiens
taacagctatccattggtct

SEQ ID NO: 22945 - DNA, 21 bp, Homo Sapiens
taacagctatccattggtctt

SEQ ID NO: 22946 - DNA, 22 bp, Homo Sapiens
taacagctatccattggtctta

SEQ ID NO: 22947 - DNA, 23 bp, Homo Sapiens
taacagctatccattggtcttag

SEQ ID NO: 22948 - DNA, 27 bp, Homo Sapiens
taacagctatccattggtcttaggccc

SEQ ID NO: 22949 - DNA, 28 bp, Homo Sapiens
taacagctatccattggtcttaggcccc

SEQ ID NO: 22950 - DNA, 29 bp, Homo Sapiens
taacagctatccattggtcttaggcccca

SEQ ID NO: 22951 - DNA, 33 bp, Homo Sapiens
taacagctatccattggtcttaggccccaaaaa

SEQ ID NO: 22952 - DNA, 17 bp, Homo Sapiens
taaccaaaacatcagat

SEQ ID NO: 22953 - DNA, 19 bp, Homo Sapiens
taaccaaaacatcagattg

SEQ ID NO: 22954 - DNA, 20 bp, Homo Sapiens
taaccaaaacatcagattgt

SEQ ID NO: 22955 - DNA, 21 bp, Homo Sapiens
taaccaaaacatcagattgtg

SEQ ID NO: 22956 - DNA, 22 bp, Homo Sapiens
taaccaaaacatcagattgtga

SEQ ID NO: 22957 - DNA, 23 bp, Homo Sapiens
taaccaaaacatcagattgtgaa

SEQ ID NO: 22958 - DNA, 24 bp, Homo Sapiens
taaccaaaacatcagattgtgaat

SEQ ID NO: 22959 - DNA, 25 bp, Homo Sapiens
taaccaaaacatcagattgtgaatc

SEQ ID NO: 22960 - DNA, 26 bp, Homo Sapiens
taaccaaaacatcagattgtgaatct

SEQ ID NO: 22961 - DNA, 27 bp, Homo Sapiens
taaccaaaacatcagattgtgaatctg

SEQ ID NO: 22962 - DNA, 28 bp, Homo Sapiens
taaccaaaacatcagattgtgaatctga

SEQ ID NO: 22963 - DNA, 29 bp, Homo Sapiens
taaccaaaacatcagattgtgaatctgac

SEQ ID NO: 22964 - DNA, 30 bp, Homo Sapiens
taaccaaaacatcagattgtgaatctgaca

SEQ ID NO: 22965 - DNA, 31 bp, Homo Sapiens
taaccaaaacatcagattgtgaatctgacaa

SEQ ID NO: 22966 - DNA, 32 bp, Homo Sapiens
taaccaaaacatcagattgtgaatctgacaac

SEQ ID NO: 22967 - DNA, 33 bp, Homo Sapiens
taaccaaaacatcagattgtgaatctgacaaca

SEQ ID NO: 22968 - DNA, 34 bp, Homo Sapiens
taaccaaaacatcagattgtgaatctgacaacag

SEQ ID NO: 22969 - DNA, 35 bp, Homo Sapiens
taaccaaaacatcagattgtgaatctgacaacaga

SEQ ID NO: 22970 - DNA, 36 bp, Homo Sapiens
taaccaaaacatcagattgtgaatctgacaacagag

SEQ ID NO: 22971 - DNA, 37 bp, Homo Sapiens
taaccaaaacatcagattgtgaatctgacaacagagg

SEQ ID NO: 22972 - DNA, 38 bp, Homo Sapiens
taaccaaaacatcagattgtgaatctgacaacagaggc

SEQ ID NO: 22973 - DNA, 39 bp, Homo Sapiens
taaccaaaacatcagattgtgaatctgacaacagaggct

SEQ ID NO: 22974 - DNA, 40 bp, Homo Sapiens
taaccaaaacatcagattgtgaatctgacaacagaggctt

SEQ ID NO: 22975 - DNA, 43 bp, Homo Sapiens
taaccaaaacatcagattgtgaatctgacaacagaggcttacg

SEQ ID NO: 22976 - DNA, 44 bp, Homo Sapiens
taaccaaaacatcagattgtgaatctgacaacagaggcttacga

SEQ ID NO: 22977 - DNA, 46 bp, Homo Sapiens
taaccaaaacatcagattgtgaatctgacaacagaggcttacgacc

SEQ ID NO: 22978 - DNA, 47 bp, Homo Sapiens
taaccaaaacatcagattgtgaatctgacaacagaggcttacgaccc

SEQ ID NO: 22979 - DNA, 48 bp, Homo Sapiens
taaccaaaacatcagattgtgaatctgacaacagaggcttacgacccc

SEQ ID NO: 22980 - DNA, 17 bp, Homo Sapiens
taacccagaggtcgatg

SEQ ID NO: 22981 - DNA, 18 bp, Homo Sapiens
taacccagaggtcgatgg

SEQ ID NO: 22982 - DNA, 19 bp, Homo Sapiens
taacccagaggtcgatgga

SEQ ID NO: 22983 - DNA, 20 bp, Homo Sapiens
taacccagaggtcgatggat

SEQ ID NO: 22984 - DNA, 21 bp, Homo Sapiens
taacccagaggtcgatggatc

SEQ ID NO: 22985 - DNA, 22 bp, Homo Sapiens
taacccagaggtcgatggatcg

SEQ ID NO: 22986 - DNA, 23 bp, Homo Sapiens
taacccagaggtcgatggatcga

SEQ ID NO: 22987 - DNA, 24 bp, Homo Sapiens
taacccagaggtcgatggatcgaa

SEQ ID NO: 22988 - DNA, 26 bp, Homo Sapiens
taacccagaggtcgatggatcgaaac

SEQ ID NO: 22989 - DNA, 40 bp, Homo Sapiens
taacccagaggtcgatggatcgaaaccatcctctgctacc

SEQ ID NO: 22990 - DNA, 41 bp, Homo Sapiens
taacccagaggtcgatggatcgaaaccatcctctgctacca

SEQ ID NO: 22991 - DNA, 21 bp, Homo Sapiens
taaccgaaaggttggtggttc

SEQ ID NO: 22992 - DNA, 22 bp, Homo Sapiens
taaccgaaaggttggtggttcg

SEQ ID NO: 22993 - DNA, 23 bp, Homo Sapiens
taaccgaaaggttggtggttcga

SEQ ID NO: 22994 - DNA, 24 bp, Homo Sapiens
taaccgaaaggttggtggttcgag

SEQ ID NO: 22995 - DNA, 25 bp, Homo Sapiens
taaccgaaaggttggtggttcgagc

SEQ ID NO: 22996 - DNA, 26 bp, Homo Sapiens
taaccgaaaggttggtggttcgagcc

SEQ ID NO: 22997 - DNA, 37 bp, Homo Sapiens
taaccgaaaggttggtggttcgagcccacccagggac

SEQ ID NO: 22998 - DNA, 38 bp, Homo Sapiens
taaccgaaaggttggtggttcgagcccacccagggacg

SEQ ID NO: 22999 - DNA, 39 bp, Homo Sapiens
taaccgaaaggttggtggttcgagcccacccagggacgc

SEQ ID NO: 23000 - DNA, 40 bp, Homo Sapiens
taaccgaaaggttggtggttcgagcccacccagggacgcc

SEQ ID NO: 23001 - DNA, 41 bp, Homo Sapiens
taaccgaaaggttggtggttcgagcccacccagggacgcca

SEQ ID NO: 23002 - DNA, 29 bp, Homo Sapiens
taaccttttaagttaaagattaagagaac

SEQ ID NO: 23003 - DNA, 30 bp, Homo Sapiens
taaccttttaagttaaagattaagagaacc

SEQ ID NO: 23004 - DNA, 31 bp, Homo Sapiens
taaccttttaagttaaagattaagagaacca

SEQ ID NO: 23005 - DNA, 32 bp, Homo Sapiens
taaccttttaagttaaagattaagagaaccaa

SEQ ID NO: 23006 - DNA, 33 bp, Homo Sapiens
taaccttttaagttaaagattaagagaaccaac

SEQ ID NO: 23007 - DNA, 35 bp, Homo Sapiens
taaccttttaagttaaagattaagagaaccaacac

SEQ ID NO: 23008 - DNA, 36 bp, Homo Sapiens
taaccttttaagttaaagattaagagaaccaacacc

SEQ ID NO: 23009 - DNA, 37 bp, Homo Sapiens
taaccttttaagttaaagattaagagaaccaacacct

SEQ ID NO: 23010 - DNA, 48 bp, Homo Sapiens
taaccttttaagttaaagattaagagaaccaacacctctttacagtga

SEQ ID NO: 23011 - DNA, 20 bp, Homo Sapiens
taacgccaaggtcgcgggtt

SEQ ID NO: 23012 - DNA, 21 bp, Homo Sapiens
taacgccaaggtcgcgggttc

SEQ ID NO: 23013 - DNA, 22 bp, Homo Sapiens
taacgccaaggtcgcgggttcg

SEQ ID NO: 23014 - DNA, 23 bp, Homo Sapiens
taacgccaaggtcgcgggttcga

SEQ ID NO: 23015 - DNA, 25 bp, Homo Sapiens
taacgccaaggtcgcgggttcgaac

SEQ ID NO: 23016 - DNA, 36 bp, Homo Sapiens
taacgccaaggtcgcgggttcgaaccccgtacgggc

SEQ ID NO: 23017 - DNA, 40 bp, Homo Sapiens
taacgccaaggtcgcgggttcgaaccccgtacgggccacc

SEQ ID NO: 23018 - DNA, 41 bp, Homo Sapiens
taacgccaaggtcgcgggttcgaaccccgtacgggccacca

SEQ ID NO: 23019 - DNA, 24 bp, Homo Sapiens
taacgccaaggtcgcgggttcgat

SEQ ID NO: 23020 - DNA, 25 bp, Homo Sapiens
taacgccaaggtcgcgggttcgatc

SEQ ID NO: 23021 - DNA, 26 bp, Homo Sapiens
taacgccaaggtcgcgggttcgatcc

SEQ ID NO: 23022 - DNA, 27 bp, Homo Sapiens
taacgccaaggtcgcgggttcgatccc

SEQ ID NO: 23023 - DNA, 29 bp, Homo Sapiens
taacgccaaggtcgcgggttcgatccccg

SEQ ID NO: 23024 - DNA, 31 bp, Homo Sapiens
taacgccaaggtcgcgggttcgatccccgta

SEQ ID NO: 23025 - DNA, 32 bp, Homo Sapiens
taacgccaaggtcgcgggttcgatccccgtac

SEQ ID NO: 23026 - DNA, 33 bp, Homo Sapiens
taacgccaaggtcgcgggttcgatccccgtacg

SEQ ID NO: 23027 - DNA, 36 bp, Homo Sapiens
taacgccaaggtcgcgggttcgatccccgtacgggc

SEQ ID NO: 23028 - DNA, 40 bp, Homo Sapiens
taacgccaaggtcgcgggttcgatccccgtacgggccacc

SEQ ID NO: 23029 - DNA, 41 bp, Homo Sapiens
taacgccaaggtcgcgggttcgatccccgtacgggccacca

SEQ ID NO: 23030 - DNA, 34 bp, Homo Sapiens
taacgccaaggtcgcgggttcgatccccgtactg

SEQ ID NO: 23031 - DNA, 35 bp, Homo Sapiens
taacgccaaggtcgcgggttcgatccccgtactgg

SEQ ID NO: 23032 - DNA, 41 bp, Homo Sapiens
taacgccaaggtcgcgggttcgatccccgtactggccacca

SEQ ID NO: 23033 - DNA, 18 bp, Homo Sapiens
taactaagtgtttgtggg

SEQ ID NO: 23034 - DNA, 19 bp, Homo Sapiens
taactaagtgtttgtgggt

SEQ ID NO: 23035 - DNA, 20 bp, Homo Sapiens
taactaagtgtttgtgggtt

SEQ ID NO: 23036 - DNA, 21 bp, Homo Sapiens
taactaagtgtttgtgggttt

SEQ ID NO: 23037 - DNA, 22 bp, Homo Sapiens
taactaagtgtttgtgggttta

SEQ ID NO: 23038 - DNA, 26 bp, Homo Sapiens
taactaagtgtttgtgggtttaagtc

SEQ ID NO: 23039 - DNA, 31 bp, Homo Sapiens
taactaagtgtttgtgggtttaagtcccatt

SEQ ID NO: 23040 - DNA, 35 bp, Homo Sapiens
taactaagtgtttgtgggtttaagtcccattggtc

SEQ ID NO: 23041 - DNA, 36 bp, Homo Sapiens
taactaagtgtttgtgggtttaagtcccattggtct

SEQ ID NO: 23042 - DNA, 38 bp, Homo Sapiens
taactaagtgtttgtgggtttaagtcccattggtctag

SEQ ID NO: 23043 - DNA, 39 bp, Homo Sapiens
taactaagtgtttgtgggtttaagtcccattggtctagc

SEQ ID NO: 23044 - DNA, 40 bp, Homo Sapiens
taactaagtgtttgtgggtttaagtcccattggtctagcc

SEQ ID NO: 23045 - DNA, 41 bp, Homo Sapiens
taactaagtgtttgtgggtttaagtcccattggtctagcca

SEQ ID NO: 23046 - DNA, 16 bp, Homo Sapiens
taactagttttgacaa

SEQ ID NO: 23047 - DNA, 17 bp, Homo Sapiens
taactagttttgacaac

SEQ ID NO: 23048 - DNA, 18 bp, Homo Sapiens
taactagttttgacaaca

SEQ ID NO: 23049 - DNA, 30 bp, Homo Sapiens
taactagttttgacaacattcaaaaaagag

SEQ ID NO: 23050 - DNA, 31 bp, Homo Sapiens
taactagttttgacaacattcaaaaaagagt

SEQ ID NO: 23051 - DNA, 32 bp, Homo Sapiens
taactagttttgacaacattcaaaaaagagta

SEQ ID NO: 23052 - DNA, 33 bp, Homo Sapiens
taactagttttgacaacattcaaaaaagagtac

SEQ ID NO: 23053 - DNA, 34 bp, Homo Sapiens
taactagttttgacaacattcaaaaaagagtacc

SEQ ID NO: 23054 - DNA, 35 bp, Homo Sapiens
taactagttttgacaacattcaaaaaagagtacca

SEQ ID NO: 23055 - DNA, 17 bp, Homo Sapiens
taactcatgcccccatg

SEQ ID NO: 23056 - DNA, 19 bp, Homo Sapiens
taactcatgcccccatgtc

SEQ ID NO: 23057 - DNA, 20 bp, Homo Sapiens
taactcatgcccccatgtct

SEQ ID NO: 23058 - DNA, 22 bp, Homo Sapiens
taactcatgcccccatgtctaa

SEQ ID NO: 23059 - DNA, 23 bp, Homo Sapiens
taactcatgcccccatgtctaac

SEQ ID NO: 23060 - DNA, 24 bp, Homo Sapiens
taactcatgcccccatgtctaaca

SEQ ID NO: 23061 - DNA, 25 bp, Homo Sapiens
taactcatgcccccatgtctaacaa

SEQ ID NO: 23062 - DNA, 26 bp, Homo Sapiens
taactcatgcccccatgtctaacaac

SEQ ID NO: 23063 - DNA, 27 bp, Homo Sapiens
taactcatgcccccatgtctaacaaca

SEQ ID NO: 23064 - DNA, 28 bp, Homo Sapiens
taactcatgcccccatgtctaacaacat

SEQ ID NO: 23065 - DNA, 29 bp, Homo Sapiens
taactcatgcccccatgtctaacaacatg

SEQ ID NO: 23066 - DNA, 30 bp, Homo Sapiens
taactcatgcccccatgtctaacaacatgg

SEQ ID NO: 23067 - DNA, 31 bp, Homo Sapiens
taactcatgcccccatgtctaacaacatggc

SEQ ID NO: 23068 - DNA, 32 bp, Homo Sapiens
taactcatgcccccatgtctaacaacatggct

SEQ ID NO: 23069 - DNA, 33 bp, Homo Sapiens
taactcatgcccccatgtctaacaacatggctt

SEQ ID NO: 23070 - DNA, 34 bp, Homo Sapiens
taactcatgcccccatgtctaacaacatggcttt

SEQ ID NO: 23071 - DNA, 35 bp, Homo Sapiens
taactcatgcccccatgtctaacaacatggctttc

SEQ ID NO: 23072 - DNA, 36 bp, Homo Sapiens
taactcatgcccccatgtctaacaacatggctttct

SEQ ID NO: 23073 - DNA, 37 bp, Homo Sapiens
taactcatgcccccatgtctaacaacatggctttctc

SEQ ID NO: 23074 - DNA, 38 bp, Homo Sapiens
taactcatgcccccatgtctaacaacatggctttctca

SEQ ID NO: 23075 - DNA, 39 bp, Homo Sapiens
taactcatgcccccatgtctaacaacatggctttctcac

SEQ ID NO: 23076 - DNA, 40 bp, Homo Sapiens
taactcatgcccccatgtctaacaacatggctttctcacc

SEQ ID NO: 23077 - DNA, 41 bp, Homo Sapiens
taactcatgcccccatgtctaacaacatggctttctcacca

SEQ ID NO: 23078 - DNA, 16 bp, Homo Sapiens
taacttagcattaacc

SEQ ID NO: 23079 - DNA, 17 bp, Homo Sapiens
taacttagcattaacct

SEQ ID NO: 23080 - DNA, 19 bp, Homo Sapiens
taacttagcattaaccttt

SEQ ID NO: 23081 - DNA, 26 bp, Homo Sapiens
taacttagcattaaccttttaagtta

SEQ ID NO: 23082 - DNA, 41 bp, Homo Sapiens
taacttagcattaaccttttaagttaaagattaagagaacc

SEQ ID NO: 23083 - DNA, 17 bp, Homo Sapiens
taacttccaattaacta

SEQ ID NO: 23084 - DNA, 19 bp, Homo Sapiens
taacttccaattaactagt

SEQ ID NO: 23085 - DNA, 20 bp, Homo Sapiens
taacttccaattaactagtt

SEQ ID NO: 23086 - DNA, 22 bp, Homo Sapiens
taacttccaattaactagtttt

SEQ ID NO: 23087 - DNA, 23 bp, Homo Sapiens
taacttccaattaactagttttg

SEQ ID NO: 23088 - DNA, 24 bp, Homo Sapiens
taacttccaattaactagttttga

SEQ ID NO: 23089 - DNA, 25 bp, Homo Sapiens
taacttccaattaactagttttgac

SEQ ID NO: 23090 - DNA, 26 bp, Homo Sapiens
taacttccaattaactagttttgaca

SEQ ID NO: 23091 - DNA, 27 bp, Homo Sapiens
taacttccaattaactagttttgacaa

SEQ ID NO: 23092 - DNA, 28 bp, Homo Sapiens
taacttccaattaactagttttgacaac

SEQ ID NO: 23093 - DNA, 29 bp, Homo Sapiens
taacttccaattaactagttttgacaaca

SEQ ID NO: 23094 - DNA, 31 bp, Homo Sapiens
taacttccaattaactagttttgacaacatt

SEQ ID NO: 23095 - DNA, 33 bp, Homo Sapiens
taacttccaattaactagttttgacaacattca

SEQ ID NO: 23096 - DNA, 45 bp, Homo Sapiens
taacttccaattaactagttttgacaacattcaaaaaagagtacc

SEQ ID NO: 23097 - DNA, 46 bp, Homo Sapiens
taacttccaattaactagttttgacaacattcaaaaaagagtacca

SEQ ID NO: 23098 - DNA, 16 bp, Homo Sapiens
taacttgaccgctctg

SEQ ID NO: 23099 - DNA, 17 bp, Homo Sapiens
taacttgaccgctctga

SEQ ID NO: 23100 - DNA, 18 bp, Homo Sapiens
taacttgaccgctctgac

SEQ ID NO: 23101 - DNA, 19 bp, Homo Sapiens
taacttgaccgctctgacc

SEQ ID NO: 23102 - DNA, 20 bp, Homo Sapiens
taacttgaccgctctgacca

SEQ ID NO: 23103 - DNA, 20 bp, Homo Sapiens
taactttgtcaaagttaaat

SEQ ID NO: 23104 - DNA, 27 bp, Homo Sapiens
taactttgtcaaagttaaattataggc

SEQ ID NO: 23105 - DNA, 28 bp, Homo Sapiens
taactttgtcaaagttaaattataggct

SEQ ID NO: 23106 - DNA, 29 bp, Homo Sapiens
taactttgtcaaagttaaattataggcta

SEQ ID NO: 23107 - DNA, 30 bp, Homo Sapiens
taactttgtcaaagttaaattataggctaa

SEQ ID NO: 23108 - DNA, 31 bp, Homo Sapiens
taactttgtcaaagttaaattataggctaaa

SEQ ID NO: 23109 - DNA, 16 bp, Homo Sapiens
taagagaaccaacacc

SEQ ID NO: 23110 - DNA, 17 bp, Homo Sapiens
taagagaaccaacacct

SEQ ID NO: 23111 - DNA, 18 bp, Homo Sapiens
taagagaaccaacacctc

SEQ ID NO: 23112 - DNA, 19 bp, Homo Sapiens
taagagaaccaacacctct

SEQ ID NO: 23113 - DNA, 20 bp, Homo Sapiens
taagagaaccaacacctctt

SEQ ID NO: 23114 - DNA, 22 bp, Homo Sapiens
taagagaaccaacacctcttta

SEQ ID NO: 23115 - DNA, 23 bp, Homo Sapiens
taagagaaccaacacctctttac

SEQ ID NO: 23116 - DNA, 27 bp, Homo Sapiens
taagagaaccaacacctctttacagtg

SEQ ID NO: 23117 - DNA, 28 bp, Homo Sapiens
taagagaaccaacacctctttacagtga

SEQ ID NO: 23118 - DNA, 29 bp, Homo Sapiens
taagagaaccaacacctctttacagtgac

SEQ ID NO: 23119 - DNA, 30 bp, Homo Sapiens
taagagaaccaacacctctttacagtgacc

SEQ ID NO: 23120 - DNA, 31 bp, Homo Sapiens
taagagaaccaacacctctttacagtgacca

SEQ ID NO: 23121 - DNA, 17 bp, Homo Sapiens
taagatccaatggacat

SEQ ID NO: 23122 - DNA, 19 bp, Homo Sapiens
taagatccaatggacatat

SEQ ID NO: 23123 - DNA, 16 bp, Homo Sapiens
taagatggcagagccc

SEQ ID NO: 23124 - DNA, 17 bp, Homo Sapiens
taagatggcagagcccg

SEQ ID NO: 23125 - DNA, 18 bp, Homo Sapiens
taagatggcagagcccgg

SEQ ID NO: 23126 - DNA, 19 bp, Homo Sapiens
taagatggcagagcccggt

SEQ ID NO: 23127 - DNA, 20 bp, Homo Sapiens
taagatggcagagcccggta

SEQ ID NO: 23128 - DNA, 21 bp, Homo Sapiens
taagatggcagagcccggtaa

SEQ ID NO: 23129 - DNA, 22 bp, Homo Sapiens
taagatggcagagcccggtaat

SEQ ID NO: 23130 - DNA, 23 bp, Homo Sapiens
taagatggcagagcccggtaatc

SEQ ID NO: 23131 - DNA, 24 bp, Homo Sapiens
taagatggcagagcccggtaatcg

SEQ ID NO: 23132 - DNA, 25 bp, Homo Sapiens
taagatggcagagcccggtaatcgc

SEQ ID NO: 23133 - DNA, 26 bp, Homo Sapiens
taagatggcagagcccggtaatcgca

SEQ ID NO: 23134 - DNA, 27 bp, Homo Sapiens
taagatggcagagcccggtaatcgcat

SEQ ID NO: 23135 - DNA, 28 bp, Homo Sapiens
taagatggcagagcccggtaatcgcata

SEQ ID NO: 23136 - DNA, 29 bp, Homo Sapiens
taagatggcagagcccggtaatcgcataa

SEQ ID NO: 23137 - DNA, 30 bp, Homo Sapiens
taagatggcagagcccggtaatcgcataaa

SEQ ID NO: 23138 - DNA, 31 bp, Homo Sapiens
taagatggcagagcccggtaatcgcataaaa

SEQ ID NO: 23139 - DNA, 32 bp, Homo Sapiens
taagatggcagagcccggtaatcgcataaaac

SEQ ID NO: 23140 - DNA, 33 bp, Homo Sapiens
taagatggcagagcccggtaatcgcataaaact

SEQ ID NO: 23141 - DNA, 35 bp, Homo Sapiens
taagatggcagagcccggtaatcgcataaaactta

SEQ ID NO: 23142 - DNA, 36 bp, Homo Sapiens
taagatggcagagcccggtaatcgcataaaacttaa

SEQ ID NO: 23143 - DNA, 37 bp, Homo Sapiens
taagatggcagagcccggtaatcgcataaaacttaaa

SEQ ID NO: 23144 - DNA, 38 bp, Homo Sapiens
taagatggcagagcccggtaatcgcataaaacttaaaa

SEQ ID NO: 23145 - DNA, 39 bp, Homo Sapiens
taagatggcagagcccggtaatcgcataaaacttaaaac

SEQ ID NO: 23146 - DNA, 40 bp, Homo Sapiens
taagatggcagagcccggtaatcgcataaaacttaaaact

SEQ ID NO: 23147 - DNA, 41 bp, Homo Sapiens
taagatggcagagcccggtaatcgcataaaacttaaaactt

SEQ ID NO: 23148 - DNA, 45 bp, Homo Sapiens
taagatggcagagcccggtaatcgcataaaacttaaaactttaca

SEQ ID NO: 23149 - DNA, 23 bp, Homo Sapiens
taagcactctggactctgaatcc

SEQ ID NO: 23150 - DNA, 40 bp, Homo Sapiens
taagcactctggactctgaatccagcgatccgagttcgag

SEQ ID NO: 23151 - DNA, 18 bp, Homo Sapiens
taagcatagctgccttcc

SEQ ID NO: 23152 - DNA, 16 bp, Homo Sapiens
taagccagggattgtg

SEQ ID NO: 23153 - DNA, 17 bp, Homo Sapiens
taagccagggattgtgg

SEQ ID NO: 23154 - DNA, 19 bp, Homo Sapiens
taagccagggattgtgggt

SEQ ID NO: 23155 - DNA, 20 bp, Homo Sapiens
taagccagggattgtgggtt

SEQ ID NO: 23156 - DNA, 21 bp, Homo Sapiens
taagccagggattgtgggttc

SEQ ID NO: 23157 - DNA, 22 bp, Homo Sapiens
taagccagggattgtgggttcg

SEQ ID NO: 23158 - DNA, 23 bp, Homo Sapiens
taagccagggattgtgggttcga

SEQ ID NO: 23159 - DNA, 24 bp, Homo Sapiens
taagccagggattgtgggttcgag

SEQ ID NO: 23160 - DNA, 31 bp, Homo Sapiens
taagccagggattgtgggttcgagtcccacc

SEQ ID NO: 23161 - DNA, 33 bp, Homo Sapiens
taagccagggattgtgggttcgagtcccacccg

SEQ ID NO: 23162 - DNA, 38 bp, Homo Sapiens
taagccagggattgtgggttcgagtcccacccggggta

SEQ ID NO: 23163 - DNA, 40 bp, Homo Sapiens
taagccagggattgtgggttcgagtcccacccggggtacc

SEQ ID NO: 23164 - DNA, 41 bp, Homo Sapiens
taagccagggattgtgggttcgagtcccacccggggtacca

SEQ ID NO: 23165 - DNA, 32 bp, Homo Sapiens
taagccagggattgtgggttcgagtcccacct

SEQ ID NO: 23166 - DNA, 33 bp, Homo Sapiens
taagccagggattgtgggttcgagtcccacctg

SEQ ID NO: 23167 - DNA, 34 bp, Homo Sapiens
taagccagggattgtgggttcgagtcccacctgg

SEQ ID NO: 23168 - DNA, 38 bp, Homo Sapiens
taagccagggattgtgggttcgagtcccacctggggta

SEQ ID NO: 23169 - DNA, 39 bp, Homo Sapiens
taagccagggattgtgggttcgagtcccacctggggtac

SEQ ID NO: 23170 - DNA, 40 bp, Homo Sapiens
taagccagggattgtgggttcgagtcccacctggggtacc

SEQ ID NO: 23171 - DNA, 41 bp, Homo Sapiens
taagccagggattgtgggttcgagtcccacctggggtacca

SEQ ID NO: 23172 - DNA, 38 bp, Homo Sapiens
taagccagggattgtgggttcgagtcccacctggggtg

SEQ ID NO: 23173 - DNA, 39 bp, Homo Sapiens
taagccagggattgtgggttcgagtcccacctggggtgc

SEQ ID NO: 23174 - DNA, 40 bp, Homo Sapiens
taagccagggattgtgggttcgagtcccacctggggtgcc

SEQ ID NO: 23175 - DNA, 41 bp, Homo Sapiens
taagccagggattgtgggttcgagtcccacctggggtgcca

SEQ ID NO: 23176 - DNA, 31 bp, Homo Sapiens
taagccagggattgtgggttcgagtcccatc

SEQ ID NO: 23177 - DNA, 38 bp, Homo Sapiens
taagccagggattgtgggttcgagtcccatctggggtg

SEQ ID NO: 23178 - DNA, 39 bp, Homo Sapiens
taagccagggattgtgggttcgagtcccatctggggtgc

SEQ ID NO: 23179 - DNA, 40 bp, Homo Sapiens
taagccagggattgtgggttcgagtcccatctggggtgcc

SEQ ID NO: 23180 - DNA, 41 bp, Homo Sapiens
taagccagggattgtgggttcgagtcccatctggggtgcca

SEQ ID NO: 23181 - DNA, 16 bp, Homo Sapiens
taagctatcgggccca

SEQ ID NO: 23182 - DNA, 17 bp, Homo Sapiens
taagctatcgggcccat

SEQ ID NO: 23183 - DNA, 18 bp, Homo Sapiens
taagctatcgggcccata

SEQ ID NO: 23184 - DNA, 19 bp, Homo Sapiens
taagctatcgggcccatac

SEQ ID NO: 23185 - DNA, 20 bp, Homo Sapiens
taagctatcgggcccatacc

SEQ ID NO: 23186 - DNA, 21 bp, Homo Sapiens
taagctatcgggcccataccc

SEQ ID NO: 23187 - DNA, 22 bp, Homo Sapiens
taagctatcgggcccatacccc

SEQ ID NO: 23188 - DNA, 23 bp, Homo Sapiens
taagctatcgggcccataccccg

SEQ ID NO: 23189 - DNA, 24 bp, Homo Sapiens
taagctatcgggcccataccccga

SEQ ID NO: 23190 - DNA, 25 bp, Homo Sapiens
taagctatcgggcccataccccgaa

SEQ ID NO: 23191 - DNA, 26 bp, Homo Sapiens
taagctatcgggcccataccccgaaa

SEQ ID NO: 23192 - DNA, 27 bp, Homo Sapiens
taagctatcgggcccataccccgaaaa

SEQ ID NO: 23193 - DNA, 28 bp, Homo Sapiens
taagctatcgggcccataccccgaaaat

SEQ ID NO: 23194 - DNA, 29 bp, Homo Sapiens
taagctatcgggcccataccccgaaaatg

SEQ ID NO: 23195 - DNA, 30 bp, Homo Sapiens
taagctatcgggcccataccccgaaaatgt

SEQ ID NO: 23196 - DNA, 31 bp, Homo Sapiens
taagctatcgggcccataccccgaaaatgtt

SEQ ID NO: 23197 - DNA, 32 bp, Homo Sapiens
taagctatcgggcccataccccgaaaatgttg

SEQ ID NO: 23198 - DNA, 33 bp, Homo Sapiens
taagctatcgggcccataccccgaaaatgttgg

SEQ ID NO: 23199 - DNA, 34 bp, Homo Sapiens
taagctatcgggcccataccccgaaaatgttggt

SEQ ID NO: 23200 - DNA, 35 bp, Homo Sapiens
taagctatcgggcccataccccgaaaatgttggtt

SEQ ID NO: 23201 - DNA, 36 bp, Homo Sapiens
taagctatcgggcccataccccgaaaatgttggtta

SEQ ID NO: 23202 - DNA, 37 bp, Homo Sapiens
taagctatcgggcccataccccgaaaatgttggttat

SEQ ID NO: 23203 - DNA, 38 bp, Homo Sapiens
taagctatcgggcccataccccgaaaatgttggttata

SEQ ID NO: 23204 - DNA, 39 bp, Homo Sapiens
taagctatcgggcccataccccgaaaatgttggttatac

SEQ ID NO: 23205 - DNA, 40 bp, Homo Sapiens
taagctatcgggcccataccccgaaaatgttggttatacc

SEQ ID NO: 23206 - DNA, 44 bp, Homo Sapiens
taagctatcgggcccataccccgaaaatgttggttatacccttc

SEQ ID NO: 23207 - DNA, 47 bp, Homo Sapiens
taagctatcgggcccataccccgaaaatgttggttatacccttcccg

SEQ ID NO: 23208 - DNA, 27 bp, Homo Sapiens
taaggcatcagcctccggagctgggga

SEQ ID NO: 23209 - DNA, 31 bp, Homo Sapiens
taaggcatcagcctccggagctggggattgt

SEQ ID NO: 23210 - DNA, 27 bp, Homo Sapiens
taaggcattggcctcctaagccaggga

SEQ ID NO: 23211 - DNA, 17 bp, Homo Sapiens
taaggcgccagactcaa

SEQ ID NO: 23212 - DNA, 22 bp, Homo Sapiens
taaggcgctgcgttcaggtcgc

SEQ ID NO: 23213 - DNA, 36 bp, Homo Sapiens
taagggcttagcttaattaaagtggctgatttgcgt

SEQ ID NO: 23214 - DNA, 16 bp, Homo Sapiens
taaggtcagctaaata

SEQ ID NO: 23215 - DNA, 17 bp, Homo Sapiens
taaggtcagctaaataa

SEQ ID NO: 23216 - DNA, 18 bp, Homo Sapiens
taaggtcagctaaataag

SEQ ID NO: 23217 - DNA, 19 bp, Homo Sapiens
taaggtcagctaaataagc

SEQ ID NO: 23218 - DNA, 20 bp, Homo Sapiens
taaggtcagctaaataagct

SEQ ID NO: 23219 - DNA, 23 bp, Homo Sapiens
taaggtcagctaaataagctatc

SEQ ID NO: 23220 - DNA, 24 bp, Homo Sapiens
taaggtcagctaaataagctatcg

SEQ ID NO: 23221 - DNA, 26 bp, Homo Sapiens
taaggtcagctaaataagctatcggg

SEQ ID NO: 23222 - DNA, 27 bp, Homo Sapiens
taaggtcagctaaataagctatcgggc

SEQ ID NO: 23223 - DNA, 28 bp, Homo Sapiens
taaggtcagctaaataagctatcgggcc

SEQ ID NO: 23224 - DNA, 29 bp, Homo Sapiens
taaggtcagctaaataagctatcgggccc

SEQ ID NO: 23225 - DNA, 30 bp, Homo Sapiens
taaggtcagctaaataagctatcgggccca

SEQ ID NO: 23226 - DNA, 31 bp, Homo Sapiens
taaggtcagctaaataagctatcgggcccat

SEQ ID NO: 23227 - DNA, 32 bp, Homo Sapiens
taaggtcagctaaataagctatcgggcccata

SEQ ID NO: 23228 - DNA, 33 bp, Homo Sapiens
taaggtcagctaaataagctatcgggcccatac

SEQ ID NO: 23229 - DNA, 34 bp, Homo Sapiens
taaggtcagctaaataagctatcgggcccatacc

SEQ ID NO: 23230 - DNA, 35 bp, Homo Sapiens
taaggtcagctaaataagctatcgggcccataccc

SEQ ID NO: 23231 - DNA, 36 bp, Homo Sapiens
taaggtcagctaaataagctatcgggcccatacccc

SEQ ID NO: 23232 - DNA, 38 bp, Homo Sapiens
taaggtcagctaaataagctatcgggcccataccccga

SEQ ID NO: 23233 - DNA, 39 bp, Homo Sapiens
taaggtcagctaaataagctatcgggcccataccccgaa

SEQ ID NO: 23234 - DNA, 40 bp, Homo Sapiens
taaggtcagctaaataagctatcgggcccataccccgaaa

SEQ ID NO: 23235 - DNA, 43 bp, Homo Sapiens
taaggtcagctaaataagctatcgggcccataccccgaaaatg

SEQ ID NO: 23236 - DNA, 45 bp, Homo Sapiens
taaggtcagctaaataagctatcgggcccataccccgaaaatgtt

SEQ ID NO: 23237 - DNA, 47 bp, Homo Sapiens
taaggtcagctaaataagctatcgggcccataccccgaaaatgttgg

SEQ ID NO: 23238 - DNA, 48 bp, Homo Sapiens
taaggtcagctaaataagctatcgggcccataccccgaaaatgttggt

SEQ ID NO: 23239 - DNA, 16 bp, Homo Sapiens
taagtcccattggtct

SEQ ID NO: 23240 - DNA, 19 bp, Homo Sapiens
taagtcccattggtctagc

SEQ ID NO: 23241 - DNA, 20 bp, Homo Sapiens
taagtcccattggtctagcc

SEQ ID NO: 23242 - DNA, 21 bp, Homo Sapiens
taagtcccattggtctagcca

SEQ ID NO: 23243 - DNA, 16 bp, Homo Sapiens
taagtgtttgtgggtt

SEQ ID NO: 23244 - DNA, 17 bp, Homo Sapiens
taagtgtttgtgggttt

SEQ ID NO: 23245 - DNA, 18 bp, Homo Sapiens
taagtgtttgtgggttta

SEQ ID NO: 23246 - DNA, 19 bp, Homo Sapiens
taagtgtttgtgggtttaa

SEQ ID NO: 23247 - DNA, 20 bp, Homo Sapiens
taagtgtttgtgggtttaag

SEQ ID NO: 23248 - DNA, 22 bp, Homo Sapiens
taagtgtttgtgggtttaagtc

SEQ ID NO: 23249 - DNA, 23 bp, Homo Sapiens
taagtgtttgtgggtttaagtcc

SEQ ID NO: 23250 - DNA, 29 bp, Homo Sapiens
taagtgtttgtgggtttaagtcccattgg

SEQ ID NO: 23251 - DNA, 31 bp, Homo Sapiens
taagtgtttgtgggtttaagtcccattggtc

SEQ ID NO: 23252 - DNA, 32 bp, Homo Sapiens
taagtgtttgtgggtttaagtcccattggtct

SEQ ID NO: 23253 - DNA, 33 bp, Homo Sapiens
taagtgtttgtgggtttaagtcccattggtcta

SEQ ID NO: 23254 - DNA, 34 bp, Homo Sapiens
taagtgtttgtgggtttaagtcccattggtctag

SEQ ID NO: 23255 - DNA, 35 bp, Homo Sapiens
taagtgtttgtgggtttaagtcccattggtctagc

SEQ ID NO: 23256 - DNA, 36 bp, Homo Sapiens
taagtgtttgtgggtttaagtcccattggtctagcc

SEQ ID NO: 23257 - DNA, 37 bp, Homo Sapiens
taagtgtttgtgggtttaagtcccattggtctagcca

SEQ ID NO: 23258 - DNA, 19 bp, Homo Sapiens
taagttaaagattaagaga

SEQ ID NO: 23259 - DNA, 20 bp, Homo Sapiens
taagttaaagattaagagaa

SEQ ID NO: 23260 - DNA, 21 bp, Homo Sapiens
taagttaaagattaagagaac

SEQ ID NO: 23261 - DNA, 22 bp, Homo Sapiens
taagttaaagattaagagaacc

SEQ ID NO: 23262 - DNA, 23 bp, Homo Sapiens
taagttaaagattaagagaacca

SEQ ID NO: 23263 - DNA, 24 bp, Homo Sapiens
taagttaaagattaagagaaccaa

SEQ ID NO: 23264 - DNA, 25 bp, Homo Sapiens
taagttaaagattaagagaaccaac

SEQ ID NO: 23265 - DNA, 26 bp, Homo Sapiens
taagttaaagattaagagaaccaaca

SEQ ID NO: 23266 - DNA, 27 bp, Homo Sapiens
taagttaaagattaagagaaccaacac

SEQ ID NO: 23267 - DNA, 28 bp, Homo Sapiens
taagttaaagattaagagaaccaacacc

SEQ ID NO: 23268 - DNA, 29 bp, Homo Sapiens
taagttaaagattaagagaaccaacacct

SEQ ID NO: 23269 - DNA, 30 bp, Homo Sapiens
taagttaaagattaagagaaccaacacctc

SEQ ID NO: 23270 - DNA, 31 bp, Homo Sapiens
taagttaaagattaagagaaccaacacctct

SEQ ID NO: 23271 - DNA, 32 bp, Homo Sapiens
taagttaaagattaagagaaccaacacctctt

SEQ ID NO: 23272 - DNA, 33 bp, Homo Sapiens
taagttaaagattaagagaaccaacacctcttt

SEQ ID NO: 23273 - DNA, 34 bp, Homo Sapiens
taagttaaagattaagagaaccaacacctcttta

SEQ ID NO: 23274 - DNA, 36 bp, Homo Sapiens
taagttaaagattaagagaaccaacacctctttaca

SEQ ID NO: 23275 - DNA, 37 bp, Homo Sapiens
taagttaaagattaagagaaccaacacctctttacag

SEQ ID NO: 23276 - DNA, 38 bp, Homo Sapiens
taagttaaagattaagagaaccaacacctctttacagt

SEQ ID NO: 23277 - DNA, 39 bp, Homo Sapiens
taagttaaagattaagagaaccaacacctctttacagtg

SEQ ID NO: 23278 - DNA, 40 bp, Homo Sapiens
taagttaaagattaagagaaccaacacctctttacagtga

SEQ ID NO: 23279 - DNA, 41 bp, Homo Sapiens
taagttaaagattaagagaaccaacacctctttacagtgac

SEQ ID NO: 23280 - DNA, 42 bp, Homo Sapiens
taagttaaagattaagagaaccaacacctctttacagtgacc

SEQ ID NO: 23281 - DNA, 43 bp, Homo Sapiens
taagttaaagattaagagaaccaacacctctttacagtgacca

SEQ ID NO: 23282 - DNA, 23 bp, Homo Sapiens
taagttgcaatacttaatttctg

SEQ ID NO: 23283 - DNA, 24 bp, Homo Sapiens
taagttgcaatacttaatttctgc

SEQ ID NO: 23284 - DNA, 25 bp, Homo Sapiens
taagttgcaatacttaatttctgcc

SEQ ID NO: 23285 - DNA, 26 bp, Homo Sapiens
taagttgcaatacttaatttctgcca

SEQ ID NO: 23286 - DNA, 16 bp, Homo Sapiens
taatacaccagtcttg

SEQ ID NO: 23287 - DNA, 17 bp, Homo Sapiens
taatacaccagtcttgt

SEQ ID NO: 23288 - DNA, 27 bp, Homo Sapiens
taatacaccagtcttgtaaaccggaga

SEQ ID NO: 23289 - DNA, 34 bp, Homo Sapiens
taatacaccagtcttgtaaaccggagatgaaaac

SEQ ID NO: 23290 - DNA, 35 bp, Homo Sapiens
taatacaccagtcttgtaaaccggagatgaaaacc

SEQ ID NO: 23291 - DNA, 36 bp, Homo Sapiens
taatacaccagtcttgtaaaccggagatgaaaacct

SEQ ID NO: 23292 - DNA, 16 bp, Homo Sapiens
taataggagcttaaac

SEQ ID NO: 23293 - DNA, 17 bp, Homo Sapiens
taataggagcttaaacc

SEQ ID NO: 23294 - DNA, 18 bp, Homo Sapiens
taataggagcttaaaccc

SEQ ID NO: 23295 - DNA, 19 bp, Homo Sapiens
taataggagcttaaacccc

SEQ ID NO: 23296 - DNA, 20 bp, Homo Sapiens
taataggagcttaaaccccc

SEQ ID NO: 23297 - DNA, 21 bp, Homo Sapiens
taataggagcttaaaccccct

SEQ ID NO: 23298 - DNA, 22 bp, Homo Sapiens
taataggagcttaaaccccctt

SEQ ID NO: 23299 - DNA, 23 bp, Homo Sapiens
taataggagcttaaaccccctta

SEQ ID NO: 23300 - DNA, 27 bp, Homo Sapiens
taataggagcttaaacccccttatttc

SEQ ID NO: 23301 - DNA, 28 bp, Homo Sapiens
taataggagcttaaacccccttatttct

SEQ ID NO: 23302 - DNA, 31 bp, Homo Sapiens
taataggagcttaaacccccttatttctacc

SEQ ID NO: 23303 - DNA, 32 bp, Homo Sapiens
taataggagcttaaacccccttatttctacca

SEQ ID NO: 23304 - DNA, 17 bp, Homo Sapiens
taatcatatttaccaac

SEQ ID NO: 23305 - DNA, 18 bp, Homo Sapiens
taatcatatttaccaacc

SEQ ID NO: 23306 - DNA, 19 bp, Homo Sapiens
taatcatatttaccaacca

SEQ ID NO: 23307 - DNA, 38 bp, Homo Sapiens
taatccagaggttccgggttcgagtcccggcagagatg

SEQ ID NO: 23308 - DNA, 40 bp, Homo Sapiens
taatccagaggttccgggttcgagtcccggcagagatgcc

SEQ ID NO: 23309 - DNA, 41 bp, Homo Sapiens
taatccagaggttccgggttcgagtcccggcagagatgcca

SEQ ID NO: 23310 - DNA, 18 bp, Homo Sapiens
taatccattgtgctctgc

SEQ ID NO: 23311 - DNA, 19 bp, Homo Sapiens
taatccattgtgctctgca

SEQ ID NO: 23312 - DNA, 20 bp, Homo Sapiens
taatccattgtgctctgcac

SEQ ID NO: 23313 - DNA, 21 bp, Homo Sapiens
taatccattgtgctctgcacg

SEQ ID NO: 23314 - DNA, 22 bp, Homo Sapiens
taatccattgtgctctgcacgc

SEQ ID NO: 23315 - DNA, 23 bp, Homo Sapiens
taatccattgtgctctgcacgcg

SEQ ID NO: 23316 - DNA, 24 bp, Homo Sapiens
taatccattgtgctctgcacgcgt

SEQ ID NO: 23317 - DNA, 42 bp, Homo Sapiens
taatccattgtgctctgcacgcgtgggttcgaatcccaccct

SEQ ID NO: 23318 - DNA, 42 bp, Homo Sapiens
taatccattgtgctctgcacgcgtgggttcgaatcccatcct

SEQ ID NO: 23319 - DNA, 21 bp, Homo Sapiens
taatccattgtgctttgcacg

SEQ ID NO: 23320 - DNA, 23 bp, Homo Sapiens
taatccattgtgctttgcacgcg

SEQ ID NO: 23321 - DNA, 24 bp, Homo Sapiens
taatccattgtgctttgcacgcgt

SEQ ID NO: 23322 - DNA, 42 bp, Homo Sapiens
taatccattgtgctttgcacgcgtgggttcgaatcccatcct

SEQ ID NO: 23323 - DNA, 16 bp, Homo Sapiens
taatcccagggtcgtg

SEQ ID NO: 23324 - DNA, 40 bp, Homo Sapiens
taatcccagggtcgtgggttcgagccccacgttgggcgcc

SEQ ID NO: 23325 - DNA, 41 bp, Homo Sapiens
taatcccagggtcgtgggttcgagccccacgttgggcgcca

SEQ ID NO: 23326 - DNA, 22 bp, Homo Sapiens
taatcgcataaaacttaaaact

SEQ ID NO: 23327 - DNA, 23 bp, Homo Sapiens
taatcgcataaaacttaaaactt

SEQ ID NO: 23328 - DNA, 24 bp, Homo Sapiens
taatcgcataaaacttaaaacttt

SEQ ID NO: 23329 - DNA, 27 bp, Homo Sapiens
taatcgcataaaacttaaaactttaca

SEQ ID NO: 23330 - DNA, 28 bp, Homo Sapiens
taatcgcataaaacttaaaactttacag

SEQ ID NO: 23331 - DNA, 34 bp, Homo Sapiens
taatcgcataaaacttaaaactttacagtcagag

SEQ ID NO: 23332 - DNA, 38 bp, Homo Sapiens
taatcgcataaaacttaaaactttacagtcagaggttc

SEQ ID NO: 23333 - DNA, 37 bp, Homo Sapiens
taatctcagggtcgtgggttcgagccccacgttgggc

SEQ ID NO: 23334 - DNA, 38 bp, Homo Sapiens
taatctcagggtcgtgggttcgagccccacgttgggcg

SEQ ID NO: 23335 - DNA, 39 bp, Homo Sapiens
taatctcagggtcgtgggttcgagccccacgttgggcgc

SEQ ID NO: 23336 - DNA, 40 bp, Homo Sapiens
taatctcagggtcgtgggttcgagccccacgttgggcgcc

SEQ ID NO: 23337 - DNA, 41 bp, Homo Sapiens
taatctcagggtcgtgggttcgagccccacgttgggcgcca

SEQ ID NO: 23338 - DNA, 16 bp, Homo Sapiens
taatctgaaggtcctg

SEQ ID NO: 23339 - DNA, 17 bp, Homo Sapiens
taatctgaaggtcctga

SEQ ID NO: 23340 - DNA, 18 bp, Homo Sapiens
taatctgaaggtcctgag

SEQ ID NO: 23341 - DNA, 19 bp, Homo Sapiens
taatctgaaggtcctgagt

SEQ ID NO: 23342 - DNA, 20 bp, Homo Sapiens
taatctgaaggtcctgagtt

SEQ ID NO: 23343 - DNA, 21 bp, Homo Sapiens
taatctgaaggtcctgagttc

SEQ ID NO: 23344 - DNA, 22 bp, Homo Sapiens
taatctgaaggtcctgagttcg

SEQ ID NO: 23345 - DNA, 26 bp, Homo Sapiens
taatctgaaggtcctgagttcgaacc

SEQ ID NO: 23346 - DNA, 35 bp, Homo Sapiens
taatctgaaggtcctgagttcgaacctcagagggg

SEQ ID NO: 23347 - DNA, 37 bp, Homo Sapiens
taatctgaaggtcctgagttcgaacctcagagggggc

SEQ ID NO: 23348 - DNA, 38 bp, Homo Sapiens
taatctgaaggtcctgagttcgaacctcagagggggca

SEQ ID NO: 23349 - DNA, 39 bp, Homo Sapiens
taatctgaaggtcctgagttcgaacctcagagggggcac

SEQ ID NO: 23350 - DNA, 40 bp, Homo Sapiens
taatctgaaggtcctgagttcgaacctcagagggggcacc

SEQ ID NO: 23351 - DNA, 41 bp, Homo Sapiens
taatctgaaggtcctgagttcgaacctcagagggggcacca

SEQ ID NO: 23352 - DNA, 38 bp, Homo Sapiens
taatctgaaggtcctgagttcgagcctcagagagggca

SEQ ID NO: 23353 - DNA, 41 bp, Homo Sapiens
taatctgaaggtcctgagttcgagcctcagagagggcacca

SEQ ID NO: 23354 - DNA, 16 bp, Homo Sapiens
taatctgaaggtcgtg

SEQ ID NO: 23355 - DNA, 17 bp, Homo Sapiens
taatctgaaggtcgtga

SEQ ID NO: 23356 - DNA, 19 bp, Homo Sapiens
taatctgaaggtcgtgagt

SEQ ID NO: 23357 - DNA, 20 bp, Homo Sapiens
taatctgaaggtcgtgagtt

SEQ ID NO: 23358 - DNA, 21 bp, Homo Sapiens
taatctgaaggtcgtgagttc

SEQ ID NO: 23359 - DNA, 22 bp, Homo Sapiens
taatctgaaggtcgtgagttcg

SEQ ID NO: 23360 - DNA, 35 bp, Homo Sapiens
taatctgaaggtcgtgagttcgagcctcacacggg

SEQ ID NO: 23361 - DNA, 36 bp, Homo Sapiens
taatctgaaggtcgtgagttcgagcctcacacgggg

SEQ ID NO: 23362 - DNA, 37 bp, Homo Sapiens
taatctgaaggtcgtgagttcgagcctcacacggggc

SEQ ID NO: 23363 - DNA, 38 bp, Homo Sapiens
taatctgaaggtcgtgagttcgagcctcacacggggca

SEQ ID NO: 23364 - DNA, 39 bp, Homo Sapiens
taatctgaaggtcgtgagttcgagcctcacacggggcac

SEQ ID NO: 23365 - DNA, 40 bp, Homo Sapiens
taatctgaaggtcgtgagttcgagcctcacacggggcacc

SEQ ID NO: 23366 - DNA, 41 bp, Homo Sapiens
taatctgaaggtcgtgagttcgagcctcacacggggcacca

SEQ ID NO: 23367 - DNA, 25 bp, Homo Sapiens
taatctgaaggtcgtgagttcgatc

SEQ ID NO: 23368 - DNA, 28 bp, Homo Sapiens
taatctgaaggtcgtgagttcgatcctc

SEQ ID NO: 23369 - DNA, 38 bp, Homo Sapiens
taatctgaaggtcgtgagttcgatcctcacacggggca

SEQ ID NO: 23370 - DNA, 39 bp, Homo Sapiens
taatctgaaggtcgtgagttcgatcctcacacggggcac

SEQ ID NO: 23371 - DNA, 40 bp, Homo Sapiens
taatctgaaggtcgtgagttcgatcctcacacggggcacc

SEQ ID NO: 23372 - DNA, 41 bp, Homo Sapiens
taatctgaaggtcgtgagttcgatcctcacacggggcacca

SEQ ID NO: 23373 - DNA, 22 bp, Homo Sapiens
taatctgagggtccagggttca

SEQ ID NO: 23374 - DNA, 23 bp, Homo Sapiens
taatctgagggtccagggttcaa

SEQ ID NO: 23375 - DNA, 24 bp, Homo Sapiens
taatctgagggtccagggttcaag

SEQ ID NO: 23376 - DNA, 40 bp, Homo Sapiens
taatctgagggtccagggttcaagtccctgttcgggcgcc

SEQ ID NO: 23377 - DNA, 16 bp, Homo Sapiens
taatgccgaggttgtg

SEQ ID NO: 23378 - DNA, 20 bp, Homo Sapiens
taatgccgaggttgtgagtt

SEQ ID NO: 23379 - DNA, 21 bp, Homo Sapiens
taatgccgaggttgtgagttc

SEQ ID NO: 23380 - DNA, 22 bp, Homo Sapiens
taatgccgaggttgtgagttcg

SEQ ID NO: 23381 - DNA, 23 bp, Homo Sapiens
taatgccgaggttgtgagttcga

SEQ ID NO: 23382 - DNA, 24 bp, Homo Sapiens
taatgccgaggttgtgagttcgag

SEQ ID NO: 23383 - DNA, 25 bp, Homo Sapiens
taatgccgaggttgtgagttcgagc

SEQ ID NO: 23384 - DNA, 35 bp, Homo Sapiens
taatgccgaggttgtgagttcgagcctcacctgga

SEQ ID NO: 23385 - DNA, 40 bp, Homo Sapiens
taatgccgaggttgtgagttcgagcctcacctggagcacc

SEQ ID NO: 23386 - DNA, 16 bp, Homo Sapiens
taatggataaggcact

SEQ ID NO: 23387 - DNA, 17 bp, Homo Sapiens
taatggataaggcactg

SEQ ID NO: 23388 - DNA, 18 bp, Homo Sapiens
taatggataaggcactgg

SEQ ID NO: 23389 - DNA, 19 bp, Homo Sapiens
taatggataaggcactggc

SEQ ID NO: 23390 - DNA, 24 bp, Homo Sapiens
taatggataaggcactggcctcct

SEQ ID NO: 23391 - DNA, 16 bp, Homo Sapiens
taatggataaggcatc

SEQ ID NO: 23392 - DNA, 17 bp, Homo Sapiens
taatggataaggcatca

SEQ ID NO: 23393 - DNA, 18 bp, Homo Sapiens
taatggataaggcatcag

SEQ ID NO: 23394 - DNA, 19 bp, Homo Sapiens
taatggataaggcatcagc

SEQ ID NO: 23395 - DNA, 21 bp, Homo Sapiens
taatggataaggcatcagcct

SEQ ID NO: 23396 - DNA, 22 bp, Homo Sapiens
taatggataaggcatcagcctc

SEQ ID NO: 23397 - DNA, 23 bp, Homo Sapiens
taatggataaggcatcagcctcc

SEQ ID NO: 23398 - DNA, 24 bp, Homo Sapiens
taatggataaggcatcagcctccg

SEQ ID NO: 23399 - DNA, 29 bp, Homo Sapiens
taatggataaggcatcagcctccggagct

SEQ ID NO: 23400 - DNA, 30 bp, Homo Sapiens
taatggataaggcatcagcctccggagctg

SEQ ID NO: 23401 - DNA, 31 bp, Homo Sapiens
taatggataaggcatcagcctccggagctgg

SEQ ID NO: 23402 - DNA, 32 bp, Homo Sapiens
taatggataaggcatcagcctccggagctggg

SEQ ID NO: 23403 - DNA, 16 bp, Homo Sapiens
taatggataaggcatt

SEQ ID NO: 23404 - DNA, 17 bp, Homo Sapiens
taatggataaggcattg

SEQ ID NO: 23405 - DNA, 18 bp, Homo Sapiens
taatggataaggcattgg

SEQ ID NO: 23406 - DNA, 19 bp, Homo Sapiens
taatggataaggcattggc

SEQ ID NO: 23407 - DNA, 29 bp, Homo Sapiens
taatggataaggcattggcctcctaagcc

SEQ ID NO: 23408 - DNA, 16 bp, Homo Sapiens
taatggataaggcgtc

SEQ ID NO: 23409 - DNA, 17 bp, Homo Sapiens
taatggataaggcgtct

SEQ ID NO: 23410 - DNA, 18 bp, Homo Sapiens
taatggataaggcgtctg

SEQ ID NO: 23411 - DNA, 19 bp, Homo Sapiens
taatggataaggcgtctga

SEQ ID NO: 23412 - DNA, 21 bp, Homo Sapiens
taatggataaggcgtctgact

SEQ ID NO: 23413 - DNA, 33 bp, Homo Sapiens
taatggataaggcgtctgacttcggatcagaag

SEQ ID NO: 23414 - DNA, 23 bp, Homo Sapiens
taatggataaggcgtctgattcc

SEQ ID NO: 23415 - DNA, 24 bp, Homo Sapiens
taatggataaggcgtctgattccg

SEQ ID NO: 23416 - DNA, 18 bp, Homo Sapiens
taatggtaagcactctgg

SEQ ID NO: 23417 - DNA, 16 bp, Homo Sapiens
taatggtgagcactct

SEQ ID NO: 23418 - DNA, 17 bp, Homo Sapiens
taatggtgagcactctg

SEQ ID NO: 23419 - DNA, 18 bp, Homo Sapiens
taatggtgagcactctgg

SEQ ID NO: 23420 - DNA, 19 bp, Homo Sapiens
taatggtgagcactctgga

SEQ ID NO: 23421 - DNA, 20 bp, Homo Sapiens
taatggtgagcactctggac

SEQ ID NO: 23422 - DNA, 21 bp, Homo Sapiens
taatggtgagcactctggact

SEQ ID NO: 23423 - DNA, 29 bp, Homo Sapiens
taatggtgagcactctggactctgaatcc

SEQ ID NO: 23424 - DNA, 30 bp, Homo Sapiens
taatggtgagcactctggactctgaatcca

SEQ ID NO: 23425 - DNA, 16 bp, Homo Sapiens
taatggtggagttaaa

SEQ ID NO: 23426 - DNA, 17 bp, Homo Sapiens
taatggtggagttaaag

SEQ ID NO: 23427 - DNA, 18 bp, Homo Sapiens
taatggtggagttaaaga

SEQ ID NO: 23428 - DNA, 19 bp, Homo Sapiens
taatggtggagttaaagac

SEQ ID NO: 23429 - DNA, 20 bp, Homo Sapiens
taatggtggagttaaagact

SEQ ID NO: 23430 - DNA, 21 bp, Homo Sapiens
taatggtggagttaaagactt

SEQ ID NO: 23431 - DNA, 22 bp, Homo Sapiens
taatggtggagttaaagacttt

SEQ ID NO: 23432 - DNA, 23 bp, Homo Sapiens
taatggtggagttaaagactttt

SEQ ID NO: 23433 - DNA, 24 bp, Homo Sapiens
taatggtggagttaaagacttttt

SEQ ID NO: 23434 - DNA, 25 bp, Homo Sapiens
taatggtggagttaaagactttttc

SEQ ID NO: 23435 - DNA, 26 bp, Homo Sapiens
taatggtggagttaaagactttttct

SEQ ID NO: 23436 - DNA, 27 bp, Homo Sapiens
taatggtggagttaaagactttttctc

SEQ ID NO: 23437 - DNA, 28 bp, Homo Sapiens
taatggtggagttaaagactttttctct

SEQ ID NO: 23438 - DNA, 29 bp, Homo Sapiens
taatggtggagttaaagactttttctctg

SEQ ID NO: 23439 - DNA, 30 bp, Homo Sapiens
taatggtggagttaaagactttttctctga

SEQ ID NO: 23440 - DNA, 31 bp, Homo Sapiens
taatggtggagttaaagactttttctctgac

SEQ ID NO: 23441 - DNA, 32 bp, Homo Sapiens
taatggtggagttaaagactttttctctgacc

SEQ ID NO: 23442 - DNA, 33 bp, Homo Sapiens
taatggtggagttaaagactttttctctgacca

SEQ ID NO: 23443 - DNA, 16 bp, Homo Sapiens
taatggttagcactct

SEQ ID NO: 23444 - DNA, 17 bp, Homo Sapiens
taatggttagcactctg

SEQ ID NO: 23445 - DNA, 18 bp, Homo Sapiens
taatggttagcactctgg

SEQ ID NO: 23446 - DNA, 19 bp, Homo Sapiens
taatggttagcactctgga

SEQ ID NO: 23447 - DNA, 20 bp, Homo Sapiens
taatggttagcactctggac

SEQ ID NO: 23448 - DNA, 21 bp, Homo Sapiens
taatggttagcactctggact

SEQ ID NO: 23449 - DNA, 22 bp, Homo Sapiens
taatggttagcactctggactc

SEQ ID NO: 23450 - DNA, 23 bp, Homo Sapiens
taatggttagcactctggactct

SEQ ID NO: 23451 - DNA, 24 bp, Homo Sapiens
taatggttagcactctggactctg

SEQ ID NO: 23452 - DNA, 25 bp, Homo Sapiens
taatggttagcactctggactctga

SEQ ID NO: 23453 - DNA, 26 bp, Homo Sapiens
taatggttagcactctggactctgaa

SEQ ID NO: 23454 - DNA, 28 bp, Homo Sapiens
taatggttagcactctggactctgaatc

SEQ ID NO: 23455 - DNA, 29 bp, Homo Sapiens
taatggttagcactctggactctgaatcc

SEQ ID NO: 23456 - DNA, 30 bp, Homo Sapiens
taatggttagcactctggactctgaatcca

SEQ ID NO: 23457 - DNA, 33 bp, Homo Sapiens
taatggttagcactctggactctgaatccagcg

SEQ ID NO: 23458 - DNA, 40 bp, Homo Sapiens
taatggttagcactctggactctgaatccagcgatccgag

SEQ ID NO: 23459 - DNA, 41 bp, Homo Sapiens
taatggttagcactctggactctgaatccagcgatccgagt

SEQ ID NO: 23460 - DNA, 42 bp, Homo Sapiens
taatggttagcactctggactctgaatccagcgatccgagtt

SEQ ID NO: 23461 - DNA, 44 bp, Homo Sapiens
taatggttagcactctggactctgaatccagcgatccgagttca

SEQ ID NO: 23462 - DNA, 24 bp, Homo Sapiens
taatggttagcactctggactttg

SEQ ID NO: 23463 - DNA, 25 bp, Homo Sapiens
taatggttagcactctggactttga

SEQ ID NO: 23464 - DNA, 28 bp, Homo Sapiens
taatggttagcactctggactttgaatc

SEQ ID NO: 23465 - DNA, 29 bp, Homo Sapiens
taatggttagcactctggactttgaatcc

SEQ ID NO: 23466 - DNA, 42 bp, Homo Sapiens
taatggttagcactctggactttgaatccagcgatccgagtt

SEQ ID NO: 23467 - DNA, 16 bp, Homo Sapiens
taattaaagtggctga

SEQ ID NO: 23468 - DNA, 17 bp, Homo Sapiens
taattaaagtggctgat

SEQ ID NO: 23469 - DNA, 18 bp, Homo Sapiens
taattaaagtggctgatt

SEQ ID NO: 23470 - DNA, 19 bp, Homo Sapiens
taattaaagtggctgattt

SEQ ID NO: 23471 - DNA, 20 bp, Homo Sapiens
taattaaagtggctgatttg

SEQ ID NO: 23472 - DNA, 21 bp, Homo Sapiens
taattaaagtggctgatttgc

SEQ ID NO: 23473 - DNA, 19 bp, Homo Sapiens
taattcaaaggttccgggt

SEQ ID NO: 23474 - DNA, 40 bp, Homo Sapiens
taattcaaaggttccgggttcgagtcccggcggagtcgcc

SEQ ID NO: 23475 - DNA, 41 bp, Homo Sapiens
taattcaaaggttccgggttcgagtcccggcggagtcgcca

SEQ ID NO: 23476 - DNA, 40 bp, Homo Sapiens
taattcaaaggttgtgggttcgaatcccaccagagtcgcc

SEQ ID NO: 23477 - DNA, 41 bp, Homo Sapiens
taattcaaaggttgtgggttcgaatcccaccagagtcgcca

SEQ ID NO: 23478 - DNA, 16 bp, Homo Sapiens
tacaacgatggttttt

SEQ ID NO: 23479 - DNA, 17 bp, Homo Sapiens
tacaacgatggtttttc

SEQ ID NO: 23480 - DNA, 18 bp, Homo Sapiens
tacaacgatggtttttca

SEQ ID NO: 23481 - DNA, 19 bp, Homo Sapiens
tacaacgatggtttttcat

SEQ ID NO: 23482 - DNA, 21 bp, Homo Sapiens
tacaacgatggtttttcatat

SEQ ID NO: 23483 - DNA, 22 bp, Homo Sapiens
tacaacgatggtttttcatatc

SEQ ID NO: 23484 - DNA, 29 bp, Homo Sapiens
tacaacgatggtttttcatatcattggtc

SEQ ID NO: 23485 - DNA, 30 bp, Homo Sapiens
tacaacgatggtttttcatatcattggtcg

SEQ ID NO: 23486 - DNA, 31 bp, Homo Sapiens
tacaacgatggtttttcatatcattggtcgt

SEQ ID NO: 23487 - DNA, 36 bp, Homo Sapiens
tacaacgatggtttttcatatcattggtcgtggttg

SEQ ID NO: 23488 - DNA, 37 bp, Homo Sapiens
tacaacgatggtttttcatatcattggtcgtggttgt

SEQ ID NO: 23489 - DNA, 38 bp, Homo Sapiens
tacaacgatggtttttcatatcattggtcgtggttgta

SEQ ID NO: 23490 - DNA, 40 bp, Homo Sapiens
tacaacgatggtttttcatatcattggtcgtggttgtagt

SEQ ID NO: 23491 - DNA, 41 bp, Homo Sapiens
tacaacgatggtttttcatatcattggtcgtggttgtagtc

SEQ ID NO: 23492 - DNA, 42 bp, Homo Sapiens
tacaacgatggtttttcatatcattggtcgtggttgtagtcc

SEQ ID NO: 23493 - DNA, 44 bp, Homo Sapiens
tacaacgatggtttttcatatcattggtcgtggttgtagtccgt

SEQ ID NO: 23494 - DNA, 47 bp, Homo Sapiens
tacaacgatggtttttcatatcattggtcgtggttgtagtccgtgcg

SEQ ID NO: 23495 - DNA, 48 bp, Homo Sapiens
tacaacgatggtttttcatatcattggtcgtggttgtagtccgtgcga

SEQ ID NO: 23496 - DNA, 48 bp, Homo Sapiens
tacaccagtcttgtaaaccggagatgaaaacctttttccaaggacacc

SEQ ID NO: 23497 - DNA, 18 bp, Homo Sapiens
tacacgcagaaggtcctg

SEQ ID NO: 23498 - DNA, 21 bp, Homo Sapiens
tacacgcagaaggtcctgggt

SEQ ID NO: 23499 - DNA, 42 bp, Homo Sapiens
tacacgcagaaggtcctgggttcgagccccagtggaaccacc

SEQ ID NO: 23500 - DNA, 24 bp, Homo Sapiens
tacactgaaaatgtttagacgggc

SEQ ID NO: 23501 - DNA, 25 bp, Homo Sapiens
tacactgaaaatgtttagacgggct

SEQ ID NO: 23502 - DNA, 26 bp, Homo Sapiens
tacactgaaaatgtttagacgggctc

SEQ ID NO: 23503 - DNA, 27 bp, Homo Sapiens
tacactgaaaatgtttagacgggctca

SEQ ID NO: 23504 - DNA, 28 bp, Homo Sapiens
tacactgaaaatgtttagacgggctcac

SEQ ID NO: 23505 - DNA, 29 bp, Homo Sapiens
tacactgaaaatgtttagacgggctcaca

SEQ ID NO: 23506 - DNA, 30 bp, Homo Sapiens
tacactgaaaatgtttagacgggctcacat

SEQ ID NO: 23507 - DNA, 31 bp, Homo Sapiens
tacactgaaaatgtttagacgggctcacatc

SEQ ID NO: 23508 - DNA, 34 bp, Homo Sapiens
tacactgaaaatgtttagacgggctcacatcacc

SEQ ID NO: 23509 - DNA, 35 bp, Homo Sapiens
tacactgaaaatgtttagacgggctcacatcaccc

SEQ ID NO: 23510 - DNA, 43 bp, Homo Sapiens
tacactgaaaatgtttagacgggctcacatcaccccataaaca

SEQ ID NO: 23511 - DNA, 45 bp, Homo Sapiens
tacactgaaaatgtttagacgggctcacatcaccccataaacacc

SEQ ID NO: 23512 - DNA, 46 bp, Homo Sapiens
tacactgaaaatgtttagacgggctcacatcaccccataaacacca

SEQ ID NO: 23513 - DNA, 16 bp, Homo Sapiens
tacacttaggagattt

SEQ ID NO: 23514 - DNA, 17 bp, Homo Sapiens
tacacttaggagatttc

SEQ ID NO: 23515 - DNA, 18 bp, Homo Sapiens
tacacttaggagatttca

SEQ ID NO: 23516 - DNA, 19 bp, Homo Sapiens
tacacttaggagatttcaa

SEQ ID NO: 23517 - DNA, 20 bp, Homo Sapiens
tacacttaggagatttcaac

SEQ ID NO: 23518 - DNA, 21 bp, Homo Sapiens
tacacttaggagatttcaact

SEQ ID NO: 23519 - DNA, 22 bp, Homo Sapiens
tacacttaggagatttcaactt

SEQ ID NO: 23520 - DNA, 23 bp, Homo Sapiens
tacacttaggagatttcaactta

SEQ ID NO: 23521 - DNA, 24 bp, Homo Sapiens
tacacttaggagatttcaacttaa

SEQ ID NO: 23522 - DNA, 25 bp, Homo Sapiens
tacacttaggagatttcaacttaac

SEQ ID NO: 23523 - DNA, 26 bp, Homo Sapiens
tacacttaggagatttcaacttaact

SEQ ID NO: 23524 - DNA, 27 bp, Homo Sapiens
tacacttaggagatttcaacttaactt

SEQ ID NO: 23525 - DNA, 28 bp, Homo Sapiens
tacacttaggagatttcaacttaacttg

SEQ ID NO: 23526 - DNA, 29 bp, Homo Sapiens
tacacttaggagatttcaacttaacttga

SEQ ID NO: 23527 - DNA, 30 bp, Homo Sapiens
tacacttaggagatttcaacttaacttgac

SEQ ID NO: 23528 - DNA, 31 bp, Homo Sapiens
tacacttaggagatttcaacttaacttgacc

SEQ ID NO: 23529 - DNA, 32 bp, Homo Sapiens
tacacttaggagatttcaacttaacttgaccg

SEQ ID NO: 23530 - DNA, 33 bp, Homo Sapiens
tacacttaggagatttcaacttaacttgaccgc

SEQ ID NO: 23531 - DNA, 34 bp, Homo Sapiens
tacacttaggagatttcaacttaacttgaccgct

SEQ ID NO: 23532 - DNA, 35 bp, Homo Sapiens
tacacttaggagatttcaacttaacttgaccgctc

SEQ ID NO: 23533 - DNA, 36 bp, Homo Sapiens
tacacttaggagatttcaacttaacttgaccgctct

SEQ ID NO: 23534 - DNA, 37 bp, Homo Sapiens
tacacttaggagatttcaacttaacttgaccgctctg

SEQ ID NO: 23535 - DNA, 38 bp, Homo Sapiens
tacacttaggagatttcaacttaacttgaccgctctga

SEQ ID NO: 23536 - DNA, 39 bp, Homo Sapiens
tacacttaggagatttcaacttaacttgaccgctctgac

SEQ ID NO: 23537 - DNA, 40 bp, Homo Sapiens
tacacttaggagatttcaacttaacttgaccgctctgacc

SEQ ID NO: 23538 - DNA, 41 bp, Homo Sapiens
tacacttaggagatttcaacttaacttgaccgctctgacca

SEQ ID NO: 23539 - DNA, 16 bp, Homo Sapiens
tacagaccaagagcct

SEQ ID NO: 23540 - DNA, 18 bp, Homo Sapiens
tacagaccaagagccttc

SEQ ID NO: 23541 - DNA, 19 bp, Homo Sapiens
tacagaccaagagccttca

SEQ ID NO: 23542 - DNA, 20 bp, Homo Sapiens
tacagaccaagagccttcaa

SEQ ID NO: 23543 - DNA, 21 bp, Homo Sapiens
tacagaccaagagccttcaaa

SEQ ID NO: 23544 - DNA, 22 bp, Homo Sapiens
tacagaccaagagccttcaaag

SEQ ID NO: 23545 - DNA, 24 bp, Homo Sapiens
tacagaccaagagccttcaaagcc

SEQ ID NO: 23546 - DNA, 25 bp, Homo Sapiens
tacagaccaagagccttcaaagccc

SEQ ID NO: 23547 - DNA, 27 bp, Homo Sapiens
tacagaccaagagccttcaaagccctc

SEQ ID NO: 23548 - DNA, 28 bp, Homo Sapiens
tacagaccaagagccttcaaagccctca

SEQ ID NO: 23549 - DNA, 30 bp, Homo Sapiens
tacagaccaagagccttcaaagccctcagt

SEQ ID NO: 23550 - DNA, 31 bp, Homo Sapiens
tacagaccaagagccttcaaagccctcagta

SEQ ID NO: 23551 - DNA, 34 bp, Homo Sapiens
tacagaccaagagccttcaaagccctcagtaagt

SEQ ID NO: 23552 - DNA, 37 bp, Homo Sapiens
tacagaccaagagccttcaaagccctcagtaagttgc

SEQ ID NO: 23553 - DNA, 38 bp, Homo Sapiens
tacagaccaagagccttcaaagccctcagtaagttgca

SEQ ID NO: 23554 - DNA, 16 bp, Homo Sapiens
tacagtcagaggttca

SEQ ID NO: 23555 - DNA, 20 bp, Homo Sapiens
tacagtcagaggttcaattc

SEQ ID NO: 23556 - DNA, 21 bp, Homo Sapiens
tacagtcagaggttcaattcc

SEQ ID NO: 23557 - DNA, 22 bp, Homo Sapiens
tacagtcagaggttcaattcct

SEQ ID NO: 23558 - DNA, 23 bp, Homo Sapiens
tacagtcagaggttcaattcctc

SEQ ID NO: 23559 - DNA, 24 bp, Homo Sapiens
tacagtcagaggttcaattcctct

SEQ ID NO: 23560 - DNA, 26 bp, Homo Sapiens
tacagtcagaggttcaattcctcttc

SEQ ID NO: 23561 - DNA, 32 bp, Homo Sapiens
tacagtcagaggttcaattcctcttcttaaca

SEQ ID NO: 23562 - DNA, 33 bp, Homo Sapiens
tacagtcagaggttcaattcctcttcttaacac

SEQ ID NO: 23563 - DNA, 34 bp, Homo Sapiens
tacagtcagaggttcaattcctcttcttaacacc

SEQ ID NO: 23564 - DNA, 20 bp, Homo Sapiens
taccccgaaaatgttggtta

SEQ ID NO: 23565 - DNA, 21 bp, Homo Sapiens
taccccgaaaatgttggttat

SEQ ID NO: 23566 - DNA, 31 bp, Homo Sapiens
taccccgaaaatgttggttatacccttcccg

SEQ ID NO: 23567 - DNA, 33 bp, Homo Sapiens
taccccgaaaatgttggttatacccttcccgta

SEQ ID NO: 23568 - DNA, 35 bp, Homo Sapiens
taccccgaaaatgttggttatacccttcccgtact

SEQ ID NO: 23569 - DNA, 36 bp, Homo Sapiens
taccccgaaaatgttggttatacccttcccgtacta

SEQ ID NO: 23570 - DNA, 37 bp, Homo Sapiens
taccccgaaaatgttggttatacccttcccgtactac

SEQ ID NO: 23571 - DNA, 38 bp, Homo Sapiens
taccccgaaaatgttggttatacccttcccgtactacc

SEQ ID NO: 23572 - DNA, 39 bp, Homo Sapiens
taccccgaaaatgttggttatacccttcccgtactacca

SEQ ID NO: 23573 - DNA, 16 bp, Homo Sapiens
tacccttcccgtacta

SEQ ID NO: 23574 - DNA, 17 bp, Homo Sapiens
tacccttcccgtactac

SEQ ID NO: 23575 - DNA, 18 bp, Homo Sapiens
tacccttcccgtactacc

SEQ ID NO: 23576 - DNA, 19 bp, Homo Sapiens
tacccttcccgtactacca

SEQ ID NO: 23577 - DNA, 24 bp, Homo Sapiens
taccgttaacttccaattaactag

SEQ ID NO: 23578 - DNA, 26 bp, Homo Sapiens
taccgttaacttccaattaactagtt

SEQ ID NO: 23579 - DNA, 29 bp, Homo Sapiens
taccgttaacttccaattaactagttttg

SEQ ID NO: 23580 - DNA, 31 bp, Homo Sapiens
taccgttaacttccaattaactagttttgac

SEQ ID NO: 23581 - DNA, 32 bp, Homo Sapiens
taccgttaacttccaattaactagttttgaca

SEQ ID NO: 23582 - DNA, 33 bp, Homo Sapiens
taccgttaacttccaattaactagttttgacaa

SEQ ID NO: 23583 - DNA, 34 bp, Homo Sapiens
taccgttaacttccaattaactagttttgacaac

SEQ ID NO: 23584 - DNA, 35 bp, Homo Sapiens
taccgttaacttccaattaactagttttgacaaca

SEQ ID NO: 23585 - DNA, 18 bp, Homo Sapiens
tacctcctcaaagcaata

SEQ ID NO: 23586 - DNA, 19 bp, Homo Sapiens
tacctcctcaaagcaatac

SEQ ID NO: 23587 - DNA, 21 bp, Homo Sapiens
tacctcctcaaagcaatacac

SEQ ID NO: 23588 - DNA, 22 bp, Homo Sapiens
tacctcctcaaagcaatacact

SEQ ID NO: 23589 - DNA, 23 bp, Homo Sapiens
tacctcctcaaagcaatacactg

SEQ ID NO: 23590 - DNA, 24 bp, Homo Sapiens
tacctcctcaaagcaatacactga

SEQ ID NO: 23591 - DNA, 25 bp, Homo Sapiens
tacctcctcaaagcaatacactgaa

SEQ ID NO: 23592 - DNA, 40 bp, Homo Sapiens
tacctcctcaaagcaatacactgaaaatgtttagacgggc

SEQ ID NO: 23593 - DNA, 41 bp, Homo Sapiens
tacctcctcaaagcaatacactgaaaatgtttagacgggct

SEQ ID NO: 23594 - DNA, 42 bp, Homo Sapiens
tacctcctcaaagcaatacactgaaaatgtttagacgggctc

SEQ ID NO: 23595 - DNA, 18 bp, Homo Sapiens
tacgaccccttatttacc

SEQ ID NO: 23596 - DNA, 19 bp, Homo Sapiens
tacgaccccttatttaccc

SEQ ID NO: 23597 - DNA, 20 bp, Homo Sapiens
tacgaccccttatttacccc

SEQ ID NO: 23598 - DNA, 21 bp, Homo Sapiens
tacgaccccttatttacccca

SEQ ID NO: 23599 - DNA, 24 bp, Homo Sapiens
tacggatcagaagattccaggttc

SEQ ID NO: 23600 - DNA, 17 bp, Homo Sapiens
tactctgcgttgtggcc

SEQ ID NO: 23601 - DNA, 18 bp, Homo Sapiens
tactctgcgttgtggccg

SEQ ID NO: 23602 - DNA, 19 bp, Homo Sapiens
tactctgcgttgtggccgc

SEQ ID NO: 23603 - DNA, 20 bp, Homo Sapiens
tactctgcgttgtggccgca

SEQ ID NO: 23604 - DNA, 21 bp, Homo Sapiens
tactctgcgttgtggccgcag

SEQ ID NO: 23605 - DNA, 22 bp, Homo Sapiens
tactctgcgttgtggccgcagc

SEQ ID NO: 23606 - DNA, 30 bp, Homo Sapiens
tactctgcgttgtggccgcagcaacctcgg

SEQ ID NO: 23607 - DNA, 16 bp, Homo Sapiens
tacttaatttctgcca

SEQ ID NO: 23608 - DNA, 25 bp, Homo Sapiens
tactttgatagagtaaataatagga

SEQ ID NO: 23609 - DNA, 26 bp, Homo Sapiens
tactttgatagagtaaataataggag

SEQ ID NO: 23610 - DNA, 27 bp, Homo Sapiens
tactttgatagagtaaataataggagc

SEQ ID NO: 23611 - DNA, 28 bp, Homo Sapiens
tactttgatagagtaaataataggagct

SEQ ID NO: 23612 - DNA, 29 bp, Homo Sapiens
tactttgatagagtaaataataggagctt

SEQ ID NO: 23613 - DNA, 30 bp, Homo Sapiens
tactttgatagagtaaataataggagctta

SEQ ID NO: 23614 - DNA, 31 bp, Homo Sapiens
tactttgatagagtaaataataggagcttaa

SEQ ID NO: 23615 - DNA, 33 bp, Homo Sapiens
tactttgatagagtaaataataggagcttaaac

SEQ ID NO: 23616 - DNA, 34 bp, Homo Sapiens
tactttgatagagtaaataataggagcttaaacc

SEQ ID NO: 23617 - DNA, 35 bp, Homo Sapiens
tactttgatagagtaaataataggagcttaaaccc

SEQ ID NO: 23618 - DNA, 36 bp, Homo Sapiens
tactttgatagagtaaataataggagcttaaacccc

SEQ ID NO: 23619 - DNA, 37 bp, Homo Sapiens
tactttgatagagtaaataataggagcttaaaccccc

SEQ ID NO: 23620 - DNA, 38 bp, Homo Sapiens
tactttgatagagtaaataataggagcttaaaccccct

SEQ ID NO: 23621 - DNA, 40 bp, Homo Sapiens
tactttgatagagtaaataataggagcttaaaccccctta

SEQ ID NO: 23622 - DNA, 48 bp, Homo Sapiens
tactttgatagagtaaataataggagcttaaacccccttatttctacc

SEQ ID NO: 23623 - DNA, 16 bp, Homo Sapiens
tagaatcttagctttg

SEQ ID NO: 23624 - DNA, 17 bp, Homo Sapiens
tagaatcttagctttgg

SEQ ID NO: 23625 - DNA, 22 bp, Homo Sapiens
tagaatcttagctttgggtgct

SEQ ID NO: 23626 - DNA, 23 bp, Homo Sapiens
tagaatcttagctttgggtgcta

SEQ ID NO: 23627 - DNA, 24 bp, Homo Sapiens
tagaatcttagctttgggtgctaa

SEQ ID NO: 23628 - DNA, 27 bp, Homo Sapiens
tagaatcttagctttgggtgctaatgg

SEQ ID NO: 23629 - DNA, 32 bp, Homo Sapiens
tagaatcttagctttgggtgctaatggtggag

SEQ ID NO: 23630 - DNA, 34 bp, Homo Sapiens
tagaatcttagctttgggtgctaatggtggagtt

SEQ ID NO: 23631 - DNA, 35 bp, Homo Sapiens
tagaatcttagctttgggtgctaatggtggagtta

SEQ ID NO: 23632 - DNA, 36 bp, Homo Sapiens
tagaatcttagctttgggtgctaatggtggagttaa

SEQ ID NO: 23633 - DNA, 37 bp, Homo Sapiens
tagaatcttagctttgggtgctaatggtggagttaaa

SEQ ID NO: 23634 - DNA, 38 bp, Homo Sapiens
tagaatcttagctttgggtgctaatggtggagttaaag

SEQ ID NO: 23635 - DNA, 39 bp, Homo Sapiens
tagaatcttagctttgggtgctaatggtggagttaaaga

SEQ ID NO: 23636 - DNA, 40 bp, Homo Sapiens
tagaatcttagctttgggtgctaatggtggagttaaagac

SEQ ID NO: 23637 - DNA, 41 bp, Homo Sapiens
tagaatcttagctttgggtgctaatggtggagttaaagact

SEQ ID NO: 23638 - DNA, 43 bp, Homo Sapiens
tagaatcttagctttgggtgctaatggtggagttaaagacttt

SEQ ID NO: 23639 - DNA, 47 bp, Homo Sapiens
tagaatcttagctttgggtgctaatggtggagttaaagactttttct

SEQ ID NO: 23640 - DNA, 48 bp, Homo Sapiens
tagaatcttagctttgggtgctaatggtggagttaaagactttttctc

SEQ ID NO: 23641 - DNA, 32 bp, Homo Sapiens
tagaattctcgcctcccacgcgggagacccgg

SEQ ID NO: 23642 - DNA, 33 bp, Homo Sapiens
tagaattctcgcctcccacgcgggagacccggg

SEQ ID NO: 23643 - DNA, 16 bp, Homo Sapiens
tagaattctcgcctgc

SEQ ID NO: 23644 - DNA, 17 bp, Homo Sapiens
tagaattctcgcctgcc

SEQ ID NO: 23645 - DNA, 18 bp, Homo Sapiens
tagaattctcgcctgcca

SEQ ID NO: 23646 - DNA, 19 bp, Homo Sapiens
tagaattctcgcctgccac

SEQ ID NO: 23647 - DNA, 20 bp, Homo Sapiens
tagaattctcgcctgccacg

SEQ ID NO: 23648 - DNA, 21 bp, Homo Sapiens
tagaattctcgcctgccacgc

SEQ ID NO: 23649 - DNA, 23 bp, Homo Sapiens
tagaattctcgcctgccacgcgg

SEQ ID NO: 23650 - DNA, 25 bp, Homo Sapiens
tagaattctcgcctgccacgcggga

SEQ ID NO: 23651 - DNA, 29 bp, Homo Sapiens
tagaattctcgcctgccacgcgggaggcc

SEQ ID NO: 23652 - DNA, 30 bp, Homo Sapiens
tagaattctcgcctgccacgcgggaggccc

SEQ ID NO: 23653 - DNA, 31 bp, Homo Sapiens
tagaattctcgcctgccacgcgggaggcccg

SEQ ID NO: 23654 - DNA, 32 bp, Homo Sapiens
tagaattctcgcctgccacgcgggaggcccgg

SEQ ID NO: 23655 - DNA, 33 bp, Homo Sapiens
tagaattctcgcctgccacgcgggaggcccggg

SEQ ID NO: 23656 - DNA, 34 bp, Homo Sapiens
tagaattctcgcctgccacgcgggaggcccgggt

SEQ ID NO: 23657 - DNA, 35 bp, Homo Sapiens
tagaattctcgcctgccacgcgggaggcccgggtt

SEQ ID NO: 23658 - DNA, 46 bp, Homo Sapiens
tagaattctcgcctgccacgcgggaggcccgggttcgattcccggc

SEQ ID NO: 23659 - DNA, 47 bp, Homo Sapiens
tagaattctcgcctgccacgcgggaggcccgggttcgattcccggcc

SEQ ID NO: 23660 - DNA, 16 bp, Homo Sapiens
tagacgggctcacatc

SEQ ID NO: 23661 - DNA, 17 bp, Homo Sapiens
tagacgggctcacatca

SEQ ID NO: 23662 - DNA, 18 bp, Homo Sapiens
tagacgggctcacatcac

SEQ ID NO: 23663 - DNA, 19 bp, Homo Sapiens
tagacgggctcacatcacc

SEQ ID NO: 23664 - DNA, 20 bp, Homo Sapiens
tagacgggctcacatcaccc

SEQ ID NO: 23665 - DNA, 21 bp, Homo Sapiens
tagacgggctcacatcacccc

SEQ ID NO: 23666 - DNA, 22 bp, Homo Sapiens
tagacgggctcacatcacccca

SEQ ID NO: 23667 - DNA, 23 bp, Homo Sapiens
tagacgggctcacatcaccccat

SEQ ID NO: 23668 - DNA, 24 bp, Homo Sapiens
tagacgggctcacatcaccccata

SEQ ID NO: 23669 - DNA, 25 bp, Homo Sapiens
tagacgggctcacatcaccccataa

SEQ ID NO: 23670 - DNA, 26 bp, Homo Sapiens
tagacgggctcacatcaccccataaa

SEQ ID NO: 23671 - DNA, 27 bp, Homo Sapiens
tagacgggctcacatcaccccataaac

SEQ ID NO: 23672 - DNA, 28 bp, Homo Sapiens
tagacgggctcacatcaccccataaaca

SEQ ID NO: 23673 - DNA, 29 bp, Homo Sapiens
tagacgggctcacatcaccccataaacac

SEQ ID NO: 23674 - DNA, 30 bp, Homo Sapiens
tagacgggctcacatcaccccataaacacc

SEQ ID NO: 23675 - DNA, 31 bp, Homo Sapiens
tagacgggctcacatcaccccataaacacca

SEQ ID NO: 23676 - DNA, 24 bp, Homo Sapiens
tagactgaagatctaaaggtccct

SEQ ID NO: 23677 - DNA, 25 bp, Homo Sapiens
tagactgaagatctaaaggtccctg

SEQ ID NO: 23678 - DNA, 17 bp, Homo Sapiens
tagagcatcagactttt

SEQ ID NO: 23679 - DNA, 23 bp, Homo Sapiens
tagagcatcagacttttaatctg

SEQ ID NO: 23680 - DNA, 32 bp, Homo Sapiens
tagagcatgagacccttaatctcagggtcgtg

SEQ ID NO: 23681 - DNA, 16 bp, Homo Sapiens
tagagcatgagactct

SEQ ID NO: 23682 - DNA, 17 bp, Homo Sapiens
tagagcatgagactctt

SEQ ID NO: 23683 - DNA, 19 bp, Homo Sapiens
tagagcatgagactcttaa

SEQ ID NO: 23684 - DNA, 21 bp, Homo Sapiens
tagagcatgagactcttaatc

SEQ ID NO: 23685 - DNA, 22 bp, Homo Sapiens
tagagcatgagactcttaatct

SEQ ID NO: 23686 - DNA, 23 bp, Homo Sapiens
tagagcatgagactcttaatctc

SEQ ID NO: 23687 - DNA, 29 bp, Homo Sapiens
tagagcatgagactcttaatctcagggtc

SEQ ID NO: 23688 - DNA, 36 bp, Homo Sapiens
tagagcatgagactcttaatctcagggtcatgggtt

SEQ ID NO: 23689 - DNA, 30 bp, Homo Sapiens
tagagcatgagactcttaatctcagggtcg

SEQ ID NO: 23690 - DNA, 31 bp, Homo Sapiens
tagagcatgagactcttaatctcagggtcgt

SEQ ID NO: 23691 - DNA, 32 bp, Homo Sapiens
tagagcatgagactcttaatctcagggtcgtg

SEQ ID NO: 23692 - DNA, 33 bp, Homo Sapiens
tagagcatgagactcttaatctcagggtcgtgg

SEQ ID NO: 23693 - DNA, 34 bp, Homo Sapiens
tagagcatgagactcttaatctcagggtcgtggg

SEQ ID NO: 23694 - DNA, 35 bp, Homo Sapiens
tagagcatgagactcttaatctcagggtcgtgggt

SEQ ID NO: 23695 - DNA, 36 bp, Homo Sapiens
tagagcatgagactcttaatctcagggtcgtgggtt

SEQ ID NO: 23696 - DNA, 37 bp, Homo Sapiens
tagagcatgagactcttaatctcagggtcgtgggttc

SEQ ID NO: 23697 - DNA, 38 bp, Homo Sapiens
tagagcatgagactcttaatctcagggtcgtgggttcg

SEQ ID NO: 23698 - DNA, 42 bp, Homo Sapiens
tagagcatgagactcttaatctcagggtcgtgggttcgagcc

SEQ ID NO: 23699 - DNA, 44 bp, Homo Sapiens
tagagcatgagactcttaatctcagggtcgtgggttcgagcccc

SEQ ID NO: 23700 - DNA, 45 bp, Homo Sapiens
tagagcatgagactcttaatctcagggtcgtgggttcgagcccca

SEQ ID NO: 23701 - DNA, 16 bp, Homo Sapiens
tagagcatgggactct

SEQ ID NO: 23702 - DNA, 17 bp, Homo Sapiens
tagagcatgggactctt

SEQ ID NO: 23703 - DNA, 20 bp, Homo Sapiens
tagagcatgggactcttaat

SEQ ID NO: 23704 - DNA, 21 bp, Homo Sapiens
tagagcatgggactcttaatc

SEQ ID NO: 23705 - DNA, 22 bp, Homo Sapiens
tagagcatgggactcttaatcc

SEQ ID NO: 23706 - DNA, 23 bp, Homo Sapiens
tagagcatgggactcttaatccc

SEQ ID NO: 23707 - DNA, 26 bp, Homo Sapiens
tagagcatgggactcttaatcccagg

SEQ ID NO: 23708 - DNA, 30 bp, Homo Sapiens
tagagcatgggactcttaatcccagggtcg

SEQ ID NO: 23709 - DNA, 31 bp, Homo Sapiens
tagagcatgggactcttaatcccagggtcgt

SEQ ID NO: 23710 - DNA, 32 bp, Homo Sapiens
tagagcatgggactcttaatcccagggtcgtg

SEQ ID NO: 23711 - DNA, 33 bp, Homo Sapiens
tagagcatgggactcttaatcccagggtcgtgg

SEQ ID NO: 23712 - DNA, 34 bp, Homo Sapiens
tagagcatgggactcttaatcccagggtcgtggg

SEQ ID NO: 23713 - DNA, 35 bp, Homo Sapiens
tagagcatgggactcttaatcccagggtcgtgggt

SEQ ID NO: 23714 - DNA, 36 bp, Homo Sapiens
tagagcatgggactcttaatcccagggtcgtgggtt

SEQ ID NO: 23715 - DNA, 38 bp, Homo Sapiens
tagagcatgggactcttaatcccagggtcgtgggttcg

SEQ ID NO: 23716 - DNA, 42 bp, Homo Sapiens
tagagcatgggactcttaatcccagggtcgtgggttcgagcc

SEQ ID NO: 23717 - DNA, 44 bp, Homo Sapiens
tagagcatgggactcttaatcccagggtcgtgggttcgagcccc

SEQ ID NO: 23718 - DNA, 22 bp, Homo Sapiens
tagagcatgggactcttaatct

SEQ ID NO: 23719 - DNA, 23 bp, Homo Sapiens
tagagcatgggactcttaatctc

SEQ ID NO: 23720 - DNA, 30 bp, Homo Sapiens
tagagcatgggactcttaatctcagggtcg

SEQ ID NO: 23721 - DNA, 32 bp, Homo Sapiens
tagagcatgggactcttaatctcagggtcgtg

SEQ ID NO: 23722 - DNA, 33 bp, Homo Sapiens
tagagcatgggactcttaatctcagggtcgtgg

SEQ ID NO: 23723 - DNA, 35 bp, Homo Sapiens
tagagcatgggactcttaatctcagggtcgtgggt

SEQ ID NO: 23724 - DNA, 36 bp, Homo Sapiens
tagagcatgggactcttaatctcagggtcgtgggtt

SEQ ID NO: 23725 - DNA, 16 bp, Homo Sapiens
tagagcatttgactgc

SEQ ID NO: 23726 - DNA, 17 bp, Homo Sapiens
tagagcatttgactgca

SEQ ID NO: 23727 - DNA, 21 bp, Homo Sapiens
tagagccagactgcctgggtt

SEQ ID NO: 23728 - DNA, 22 bp, Homo Sapiens
tagagccagactgcctgggttt

SEQ ID NO: 23729 - DNA, 23 bp, Homo Sapiens
tagagccagactgcctgggtttg

SEQ ID NO: 23730 - DNA, 16 bp, Homo Sapiens
tagaggtatgattctc

SEQ ID NO: 23731 - DNA, 17 bp, Homo Sapiens
tagagtaaataatagga

SEQ ID NO: 23732 - DNA, 18 bp, Homo Sapiens
tagagtaaataataggag

SEQ ID NO: 23733 - DNA, 19 bp, Homo Sapiens
tagagtaaataataggagc

SEQ ID NO: 23734 - DNA, 20 bp, Homo Sapiens
tagagtaaataataggagct

SEQ ID NO: 23735 - DNA, 21 bp, Homo Sapiens
tagagtaaataataggagctt

SEQ ID NO: 23736 - DNA, 22 bp, Homo Sapiens
tagagtaaataataggagctta

SEQ ID NO: 23737 - DNA, 23 bp, Homo Sapiens
tagagtaaataataggagcttaa

SEQ ID NO: 23738 - DNA, 25 bp, Homo Sapiens
tagagtaaataataggagcttaaac

SEQ ID NO: 23739 - DNA, 26 bp, Homo Sapiens
tagagtaaataataggagcttaaacc

SEQ ID NO: 23740 - DNA, 27 bp, Homo Sapiens
tagagtaaataataggagcttaaaccc

SEQ ID NO: 23741 - DNA, 28 bp, Homo Sapiens
tagagtaaataataggagcttaaacccc

SEQ ID NO: 23742 - DNA, 29 bp, Homo Sapiens
tagagtaaataataggagcttaaaccccc

SEQ ID NO: 23743 - DNA, 30 bp, Homo Sapiens
tagagtaaataataggagcttaaaccccct

SEQ ID NO: 23744 - DNA, 31 bp, Homo Sapiens
tagagtaaataataggagcttaaaccccctt

SEQ ID NO: 23745 - DNA, 32 bp, Homo Sapiens
tagagtaaataataggagcttaaaccccctta

SEQ ID NO: 23746 - DNA, 33 bp, Homo Sapiens
tagagtaaataataggagcttaaacccccttat

SEQ ID NO: 23747 - DNA, 34 bp, Homo Sapiens
tagagtaaataataggagcttaaacccccttatt

SEQ ID NO: 23748 - DNA, 37 bp, Homo Sapiens
tagagtaaataataggagcttaaacccccttatttct

SEQ ID NO: 23749 - DNA, 17 bp, Homo Sapiens
tagattgaagccagttg

SEQ ID NO: 23750 - DNA, 18 bp, Homo Sapiens
tagattgaagccagttga

SEQ ID NO: 23751 - DNA, 22 bp, Homo Sapiens
tagattgaagccagttgattag

SEQ ID NO: 23752 - DNA, 24 bp, Homo Sapiens
tagattgaagccagttgattaggg

SEQ ID NO: 23753 - DNA, 25 bp, Homo Sapiens
tagattgaagccagttgattagggt

SEQ ID NO: 23754 - DNA, 26 bp, Homo Sapiens
tagattgaagccagttgattagggtg

SEQ ID NO: 23755 - DNA, 27 bp, Homo Sapiens
tagattgaagccagttgattagggtgc

SEQ ID NO: 23756 - DNA, 28 bp, Homo Sapiens
tagattgaagccagttgattagggtgct

SEQ ID NO: 23757 - DNA, 29 bp, Homo Sapiens
tagattgaagccagttgattagggtgctt

SEQ ID NO: 23758 - DNA, 30 bp, Homo Sapiens
tagattgaagccagttgattagggtgctta

SEQ ID NO: 23759 - DNA, 31 bp, Homo Sapiens
tagattgaagccagttgattagggtgcttag

SEQ ID NO: 23760 - DNA, 32 bp, Homo Sapiens
tagattgaagccagttgattagggtgcttagc

SEQ ID NO: 23761 - DNA, 33 bp, Homo Sapiens
tagattgaagccagttgattagggtgcttagct

SEQ ID NO: 23762 - DNA, 34 bp, Homo Sapiens
tagattgaagccagttgattagggtgcttagctg

SEQ ID NO: 23763 - DNA, 35 bp, Homo Sapiens
tagattgaagccagttgattagggtgcttagctgt

SEQ ID NO: 23764 - DNA, 36 bp, Homo Sapiens
tagattgaagccagttgattagggtgcttagctgtt

SEQ ID NO: 23765 - DNA, 37 bp, Homo Sapiens
tagattgaagccagttgattagggtgcttagctgtta

SEQ ID NO: 23766 - DNA, 38 bp, Homo Sapiens
tagattgaagccagttgattagggtgcttagctgttaa

SEQ ID NO: 23767 - DNA, 39 bp, Homo Sapiens
tagattgaagccagttgattagggtgcttagctgttaac

SEQ ID NO: 23768 - DNA, 40 bp, Homo Sapiens
tagattgaagccagttgattagggtgcttagctgttaact

SEQ ID NO: 23769 - DNA, 41 bp, Homo Sapiens
tagattgaagccagttgattagggtgcttagctgttaacta

SEQ ID NO: 23770 - DNA, 42 bp, Homo Sapiens
tagattgaagccagttgattagggtgcttagctgttaactaa

SEQ ID NO: 23771 - DNA, 46 bp, Homo Sapiens
tagattgaagccagttgattagggtgcttagctgttaactaagtgt

SEQ ID NO: 23772 - DNA, 48 bp, Homo Sapiens
tagattgaagccagttgattagggtgcttagctgttaactaagtgttt

SEQ ID NO: 23773 - DNA, 16 bp, Homo Sapiens
tagcactctggactct

SEQ ID NO: 23774 - DNA, 17 bp, Homo Sapiens
tagcactctggactctg

SEQ ID NO: 23775 - DNA, 18 bp, Homo Sapiens
tagcactctggactctga

SEQ ID NO: 23776 - DNA, 19 bp, Homo Sapiens
tagcactctggactctgaa

SEQ ID NO: 23777 - DNA, 20 bp, Homo Sapiens
tagcactctggactctgaat

SEQ ID NO: 23778 - DNA, 21 bp, Homo Sapiens
tagcactctggactctgaatc

SEQ ID NO: 23779 - DNA, 22 bp, Homo Sapiens
tagcactctggactctgaatcc

SEQ ID NO: 23780 - DNA, 23 bp, Homo Sapiens
tagcactctggactctgaatcca

SEQ ID NO: 23781 - DNA, 24 bp, Homo Sapiens
tagcactctggactctgaatccag

SEQ ID NO: 23782 - DNA, 25 bp, Homo Sapiens
tagcactctggactctgaatccagc

SEQ ID NO: 23783 - DNA, 26 bp, Homo Sapiens
tagcactctggactctgaatccagcg

SEQ ID NO: 23784 - DNA, 27 bp, Homo Sapiens
tagcactctggactctgaatccagcga

SEQ ID NO: 23785 - DNA, 28 bp, Homo Sapiens
tagcactctggactctgaatccagcgat

SEQ ID NO: 23786 - DNA, 32 bp, Homo Sapiens
tagcactctggactctgaatccagcgatccga

SEQ ID NO: 23787 - DNA, 33 bp, Homo Sapiens
tagcactctggactctgaatccagcgatccgag

SEQ ID NO: 23788 - DNA, 34 bp, Homo Sapiens
tagcactctggactctgaatccagcgatccgagt

SEQ ID NO: 23789 - DNA, 35 bp, Homo Sapiens
tagcactctggactctgaatccagcgatccgagtt

SEQ ID NO: 23790 - DNA, 36 bp, Homo Sapiens
tagcactctggactctgaatccagcgatccgagttc

SEQ ID NO: 23791 - DNA, 37 bp, Homo Sapiens
tagcactctggactctgaatccagcgatccgagttca

SEQ ID NO: 23792 - DNA, 38 bp, Homo Sapiens
tagcactctggactctgaatccagcgatccgagttcaa

SEQ ID NO: 23793 - DNA, 42 bp, Homo Sapiens
tagcactctggactctgaatccagcgatccgagttcaaatct

SEQ ID NO: 23794 - DNA, 45 bp, Homo Sapiens
tagcactctggactctgaatccagcgatccgagttcaaatctcgg

SEQ ID NO: 23795 - DNA, 46 bp, Homo Sapiens
tagcactctggactctgaatccagcgatccgagttcaaatctcggt

SEQ ID NO: 23796 - DNA, 47 bp, Homo Sapiens
tagcactctggactctgaatccagcgatccgagttcaaatctcggtg

SEQ ID NO: 23797 - DNA, 39 bp, Homo Sapiens
tagcactctggactctgaatccagcgatccgagttcaag

SEQ ID NO: 23798 - DNA, 17 bp, Homo Sapiens
tagcactctggactttg

SEQ ID NO: 23799 - DNA, 18 bp, Homo Sapiens
tagcactctggactttga

SEQ ID NO: 23800 - DNA, 19 bp, Homo Sapiens
tagcactctggactttgaa

SEQ ID NO: 23801 - DNA, 20 bp, Homo Sapiens
tagcactctggactttgaat

SEQ ID NO: 23802 - DNA, 21 bp, Homo Sapiens
tagcactctggactttgaatc

SEQ ID NO: 23803 - DNA, 22 bp, Homo Sapiens
tagcactctggactttgaatcc

SEQ ID NO: 23804 - DNA, 23 bp, Homo Sapiens
tagcactctggactttgaatcca

SEQ ID NO: 23805 - DNA, 25 bp, Homo Sapiens
tagcactctggactttgaatccagc

SEQ ID NO: 23806 - DNA, 34 bp, Homo Sapiens
tagcactctggactttgaatccagcaatccgagt

SEQ ID NO: 23807 - DNA, 33 bp, Homo Sapiens
tagcactctggactttgaatccagcgatccgag

SEQ ID NO: 23808 - DNA, 34 bp, Homo Sapiens
tagcactctggactttgaatccagcgatccgagt

SEQ ID NO: 23809 - DNA, 35 bp, Homo Sapiens
tagcactctggactttgaatccagcgatccgagtt

SEQ ID NO: 23810 - DNA, 36 bp, Homo Sapiens
tagcactctggactttgaatccagcgatccgagttc

SEQ ID NO: 23811 - DNA, 37 bp, Homo Sapiens
tagcactctggactttgaatccagcgatccgagttca

SEQ ID NO: 23812 - DNA, 40 bp, Homo Sapiens
tagcactctggactttgaatccagcgatccgagttcaaat

SEQ ID NO: 23813 - DNA, 47 bp, Homo Sapiens
tagcactctggactttgaatccagcgatccgagttcaaatctcggtg

SEQ ID NO: 23814 - DNA, 22 bp, Homo Sapiens
tagcactctgggctttgaatcc

SEQ ID NO: 23815 - DNA, 32 bp, Homo Sapiens
tagcatagctgccttccaagcagttgacccgg

SEQ ID NO: 23816 - DNA, 17 bp, Homo Sapiens
tagcattaaccttttaa

SEQ ID NO: 23817 - DNA, 18 bp, Homo Sapiens
tagcattaaccttttaag

SEQ ID NO: 23818 - DNA, 19 bp, Homo Sapiens
tagcattaaccttttaagt

SEQ ID NO: 23819 - DNA, 25 bp, Homo Sapiens
tagcattaaccttttaagttaaaga

SEQ ID NO: 23820 - DNA, 30 bp, Homo Sapiens
tagcattaaccttttaagttaaagattaag

SEQ ID NO: 23821 - DNA, 33 bp, Homo Sapiens
tagcattaaccttttaagttaaagattaagaga

SEQ ID NO: 23822 - DNA, 35 bp, Homo Sapiens
tagcattaaccttttaagttaaagattaagagaac

SEQ ID NO: 23823 - DNA, 36 bp, Homo Sapiens
tagcattaaccttttaagttaaagattaagagaacc

SEQ ID NO: 23824 - DNA, 38 bp, Homo Sapiens
tagcattaaccttttaagttaaagattaagagaaccaa

SEQ ID NO: 23825 - DNA, 39 bp, Homo Sapiens
tagcattaaccttttaagttaaagattaagagaaccaac

SEQ ID NO: 23826 - DNA, 41 bp, Homo Sapiens
tagcattaaccttttaagttaaagattaagagaaccaacac

SEQ ID NO: 23827 - DNA, 42 bp, Homo Sapiens
tagcattaaccttttaagttaaagattaagagaaccaacacc

SEQ ID NO: 23828 - DNA, 43 bp, Homo Sapiens
tagcattaaccttttaagttaaagattaagagaaccaacacct

SEQ ID NO: 23829 - DNA, 44 bp, Homo Sapiens
tagcattaaccttttaagttaaagattaagagaaccaacacctc

SEQ ID NO: 23830 - DNA, 16 bp, Homo Sapiens
tagcgcagtaggcagc

SEQ ID NO: 23831 - DNA, 16 bp, Homo Sapiens
tagcgcagtaggtagc

SEQ ID NO: 23832 - DNA, 16 bp, Homo Sapiens
tagcgcattggacttc

SEQ ID NO: 23833 - DNA, 21 bp, Homo Sapiens
tagcgcattggacttctaatt

SEQ ID NO: 23834 - DNA, 22 bp, Homo Sapiens
tagcgcattggacttctaattc

SEQ ID NO: 23835 - DNA, 34 bp, Homo Sapiens
tagcgcattggacttctaattcaaaggttccggg

SEQ ID NO: 23836 - DNA, 35 bp, Homo Sapiens
tagcgcattggacttctaattcaaaggttgtgggt

SEQ ID NO: 23837 - DNA, 21 bp, Homo Sapiens
tagcgcgtctgactccagatc

SEQ ID NO: 23838 - DNA, 17 bp, Homo Sapiens
tagcgcgttcggctgtt

SEQ ID NO: 23839 - DNA, 21 bp, Homo Sapiens
tagcgcgttcggctgttaacc

SEQ ID NO: 23840 - DNA, 23 bp, Homo Sapiens
tagcgcgttcggctgttaaccga

SEQ ID NO: 23841 - DNA, 24 bp, Homo Sapiens
tagcgcgttcggctgttaaccgaa

SEQ ID NO: 23842 - DNA, 33 bp, Homo Sapiens
tagcgcgttcggctgttaaccgaaaggttggtg

SEQ ID NO: 23843 - DNA, 36 bp, Homo Sapiens
tagcgcgttcggctgttaaccgaaaggttggtggtt

SEQ ID NO: 23844 - DNA, 29 bp, Homo Sapiens
tagcgggatcgatgcccgcatcctccacc

SEQ ID NO: 23845 - DNA, 22 bp, Homo Sapiens
tagcggtagagcatttgactgc

SEQ ID NO: 23846 - DNA, 16 bp, Homo Sapiens
tagcggttaggattcc

SEQ ID NO: 23847 - DNA, 17 bp, Homo Sapiens
tagcggttaggattcct

SEQ ID NO: 23848 - DNA, 18 bp, Homo Sapiens
tagcggttaggattcctg

SEQ ID NO: 23849 - DNA, 20 bp, Homo Sapiens
tagcggttaggattcctggt

SEQ ID NO: 23850 - DNA, 21 bp, Homo Sapiens
tagcggttaggattcctggtt

SEQ ID NO: 23851 - DNA, 22 bp, Homo Sapiens
tagcggttaggattcctggttt

SEQ ID NO: 23852 - DNA, 23 bp, Homo Sapiens
tagcggttaggattcctggtttt

SEQ ID NO: 23853 - DNA, 24 bp, Homo Sapiens
tagcggttaggattcctggttttc

SEQ ID NO: 23854 - DNA, 27 bp, Homo Sapiens
tagcggttaggattcctggttttcacc

SEQ ID NO: 23855 - DNA, 28 bp, Homo Sapiens
tagcggttaggattcctggttttcaccc

SEQ ID NO: 23856 - DNA, 30 bp, Homo Sapiens
tagcggttaggattcctggttttcacccag

SEQ ID NO: 23857 - DNA, 32 bp, Homo Sapiens
tagcggttaggattcctggttttcacccaggt

SEQ ID NO: 23858 - DNA, 17 bp, Homo Sapiens
tagcggttatcacattc

SEQ ID NO: 23859 - DNA, 21 bp, Homo Sapiens
tagcggttatcacattcgcct

SEQ ID NO: 23860 - DNA, 22 bp, Homo Sapiens
tagcggttatcacattcgcctc

SEQ ID NO: 23861 - DNA, 18 bp, Homo Sapiens
tagcggttatcacgtctg

SEQ ID NO: 23862 - DNA, 21 bp, Homo Sapiens
tagcggttatcacgtctgctt

SEQ ID NO: 23863 - DNA, 16 bp, Homo Sapiens
tagcgtggccgagcgg

SEQ ID NO: 23864 - DNA, 19 bp, Homo Sapiens
tagcgtggccgagcggtct

SEQ ID NO: 23865 - DNA, 20 bp, Homo Sapiens
tagcgtggccgagcggtcta

SEQ ID NO: 23866 - DNA, 22 bp, Homo Sapiens
tagcgtggccgagcggtctaag

SEQ ID NO: 23867 - DNA, 23 bp, Homo Sapiens
tagcgtggccgagcggtctaagg

SEQ ID NO: 23868 - DNA, 24 bp, Homo Sapiens
tagcgtggccgagcggtctaaggc

SEQ ID NO: 23869 - DNA, 35 bp, Homo Sapiens
tagcgtggccgagcggtctaaggcgctggatttag

SEQ ID NO: 23870 - DNA, 19 bp, Homo Sapiens
tagcgtggccgagtggtct

SEQ ID NO: 23871 - DNA, 22 bp, Homo Sapiens
tagcgtggccgagtggtctaag

SEQ ID NO: 23872 - DNA, 24 bp, Homo Sapiens
tagcgtggccgagtggtctaaggc

SEQ ID NO: 23873 - DNA, 32 bp, Homo Sapiens
tagcgtggccgagtggtctaaggcgctggatt

SEQ ID NO: 23874 - DNA, 35 bp, Homo Sapiens
tagcgtggccgagtggtctaaggcgctggatttag

SEQ ID NO: 23875 - DNA, 16 bp, Homo Sapiens
tagctcaggcggtaga

SEQ ID NO: 23876 - DNA, 17 bp, Homo Sapiens
tagctcaggcggtagag

SEQ ID NO: 23877 - DNA, 25 bp, Homo Sapiens
tagctcaggggtagagcatttgact

SEQ ID NO: 23878 - DNA, 26 bp, Homo Sapiens
tagctcaggggtagagcatttgactg

SEQ ID NO: 23879 - DNA, 27 bp, Homo Sapiens
tagctcaggggtagagcatttgactgc

SEQ ID NO: 23880 - DNA, 18 bp, Homo Sapiens
tagctcaggggttagagc

SEQ ID NO: 23881 - DNA, 25 bp, Homo Sapiens
tagctcaggggttagagcactggtc

SEQ ID NO: 23882 - DNA, 26 bp, Homo Sapiens
tagctcaggggttagagcactggtct

SEQ ID NO: 23883 - DNA, 27 bp, Homo Sapiens
tagctcaggggttagagcactggtctt

SEQ ID NO: 23884 - DNA, 35 bp, Homo Sapiens
tagctcaggggttagagcactggtcttgtaaacca

SEQ ID NO: 23885 - DNA, 16 bp, Homo Sapiens
tagctcagtcggtaga

SEQ ID NO: 23886 - DNA, 17 bp, Homo Sapiens
tagctcagtcggtagag

SEQ ID NO: 23887 - DNA, 18 bp, Homo Sapiens
tagctcagtcggtagagc

SEQ ID NO: 23888 - DNA, 20 bp, Homo Sapiens
tagctcagtcggtagagcat

SEQ ID NO: 23889 - DNA, 25 bp, Homo Sapiens
tagctcagtcggtagagcataagac

SEQ ID NO: 23890 - DNA, 26 bp, Homo Sapiens
tagctcagtcggtagagcataagact

SEQ ID NO: 23891 - DNA, 21 bp, Homo Sapiens
tagctcagtcggtagagcatc

SEQ ID NO: 23892 - DNA, 25 bp, Homo Sapiens
tagctcagtcggtagagcatcagac

SEQ ID NO: 23893 - DNA, 26 bp, Homo Sapiens
tagctcagtcggtagagcatcagact

SEQ ID NO: 23894 - DNA, 27 bp, Homo Sapiens
tagctcagtcggtagagcatcagactt

SEQ ID NO: 23895 - DNA, 28 bp, Homo Sapiens
tagctcagtcggtagagcatcagacttt

SEQ ID NO: 23896 - DNA, 29 bp, Homo Sapiens
tagctcagtcggtagagcatcagactttt

SEQ ID NO: 23897 - DNA, 21 bp, Homo Sapiens
tagctcagtcggtagagcatg

SEQ ID NO: 23898 - DNA, 25 bp, Homo Sapiens
tagctcagtcggtagagcatgagac

SEQ ID NO: 23899 - DNA, 27 bp, Homo Sapiens
tagctcagtcggtagagcatgagaccc

SEQ ID NO: 23900 - DNA, 28 bp, Homo Sapiens
tagctcagtcggtagagcatgagaccct

SEQ ID NO: 23901 - DNA, 34 bp, Homo Sapiens
tagctcagtcggtagagcatgagacccttaatct

SEQ ID NO: 23902 - DNA, 26 bp, Homo Sapiens
tagctcagtcggtagagcatgagact

SEQ ID NO: 23903 - DNA, 27 bp, Homo Sapiens
tagctcagtcggtagagcatgagactc

SEQ ID NO: 23904 - DNA, 28 bp, Homo Sapiens
tagctcagtcggtagagcatgagactct

SEQ ID NO: 23905 - DNA, 29 bp, Homo Sapiens
tagctcagtcggtagagcatgagactctt

SEQ ID NO: 23906 - DNA, 30 bp, Homo Sapiens
tagctcagtcggtagagcatgagactctta

SEQ ID NO: 23907 - DNA, 31 bp, Homo Sapiens
tagctcagtcggtagagcatgagactcttaa

SEQ ID NO: 23908 - DNA, 32 bp, Homo Sapiens
tagctcagtcggtagagcatgagactcttaat

SEQ ID NO: 23909 - DNA, 33 bp, Homo Sapiens
tagctcagtcggtagagcatgagactcttaatc

SEQ ID NO: 23910 - DNA, 34 bp, Homo Sapiens
tagctcagtcggtagagcatgagactcttaatct

SEQ ID NO: 23911 - DNA, 42 bp, Homo Sapiens
tagctcagtcggtagagcatgagactcttaatctcagggtcg

SEQ ID NO: 23912 - DNA, 44 bp, Homo Sapiens
tagctcagtcggtagagcatgagactcttaatctcagggtcgtg

SEQ ID NO: 23913 - DNA, 45 bp, Homo Sapiens
tagctcagtcggtagagcatgagactcttaatctcagggtcgtgg

SEQ ID NO: 23914 - DNA, 47 bp, Homo Sapiens
tagctcagtcggtagagcatgagactcttaatctcagggtcgtgggt

SEQ ID NO: 23915 - DNA, 48 bp, Homo Sapiens
tagctcagtcggtagagcatgagactcttaatctcagggtcgtgggtt

SEQ ID NO: 23916 - DNA, 23 bp, Homo Sapiens
tagctcagtcggtagagcatggg

SEQ ID NO: 23917 - DNA, 24 bp, Homo Sapiens
tagctcagtcggtagagcatggga

SEQ ID NO: 23918 - DNA, 25 bp, Homo Sapiens
tagctcagtcggtagagcatgggac

SEQ ID NO: 23919 - DNA, 26 bp, Homo Sapiens
tagctcagtcggtagagcatgggact

SEQ ID NO: 23920 - DNA, 27 bp, Homo Sapiens
tagctcagtcggtagagcatgggactc

SEQ ID NO: 23921 - DNA, 28 bp, Homo Sapiens
tagctcagtcggtagagcatgggactct

SEQ ID NO: 23922 - DNA, 29 bp, Homo Sapiens
tagctcagtcggtagagcatgggactctt

SEQ ID NO: 23923 - DNA, 30 bp, Homo Sapiens
tagctcagtcggtagagcatgggactctta

SEQ ID NO: 23924 - DNA, 31 bp, Homo Sapiens
tagctcagtcggtagagcatgggactcttaa

SEQ ID NO: 23925 - DNA, 32 bp, Homo Sapiens
tagctcagtcggtagagcatgggactcttaat

SEQ ID NO: 23926 - DNA, 33 bp, Homo Sapiens
tagctcagtcggtagagcatgggactcttaatc

SEQ ID NO: 23927 - DNA, 34 bp, Homo Sapiens
tagctcagtcggtagagcatgggactcttaatcc

SEQ ID NO: 23928 - DNA, 42 bp, Homo Sapiens
tagctcagtcggtagagcatgggactcttaatcccagggtcg

SEQ ID NO: 23929 - DNA, 45 bp, Homo Sapiens
tagctcagtcggtagagcatgggactcttaatcccagggtcgtgg

SEQ ID NO: 23930 - DNA, 46 bp, Homo Sapiens
tagctcagtcggtagagcatgggactcttaatcccagggtcgtggg

SEQ ID NO: 23931 - DNA, 47 bp, Homo Sapiens
tagctcagtcggtagagcatgggactcttaatcccagggtcgtgggt

SEQ ID NO: 23932 - DNA, 48 bp, Homo Sapiens
tagctcagtcggtagagcatgggactcttaatcccagggtcgtgggtt

SEQ ID NO: 23933 - DNA, 48 bp, Homo Sapiens
tagctcagtcggtagagcatgggactcttaatctcagggtcgtgggtt

SEQ ID NO: 23934 - DNA, 25 bp, Homo Sapiens
tagctcagtggtagagcatttgact

SEQ ID NO: 23935 - DNA, 26 bp, Homo Sapiens
tagctcagtggtagagcatttgactg

SEQ ID NO: 23936 - DNA, 27 bp, Homo Sapiens
tagctcagtggtagagcatttgactgc

SEQ ID NO: 23937 - DNA, 28 bp, Homo Sapiens
tagctcagtggtagagcatttgactgca

SEQ ID NO: 23938 - DNA, 42 bp, Homo Sapiens
tagctcagttgggagagcgttagactgaagatctaaaggtcc

SEQ ID NO: 23939 - DNA, 25 bp, Homo Sapiens
tagctcagttggtagagcatcagac

SEQ ID NO: 23940 - DNA, 26 bp, Homo Sapiens
tagctcagttggtagagcatcagact

SEQ ID NO: 23941 - DNA, 29 bp, Homo Sapiens
tagctgccttccaagcagttgacccgggt

SEQ ID NO: 23942 - DNA, 30 bp, Homo Sapiens
tagctgccttccaagcagttgacccgggtt

SEQ ID NO: 23943 - DNA, 31 bp, Homo Sapiens
tagctgccttccaagcagttgacccgggttc

SEQ ID NO: 23944 - DNA, 19 bp, Homo Sapiens
tagctgttaactaagtgtt

SEQ ID NO: 23945 - DNA, 20 bp, Homo Sapiens
tagctgttaactaagtgttt

SEQ ID NO: 23946 - DNA, 21 bp, Homo Sapiens
tagctgttaactaagtgtttg

SEQ ID NO: 23947 - DNA, 22 bp, Homo Sapiens
tagctgttaactaagtgtttgt

SEQ ID NO: 23948 - DNA, 23 bp, Homo Sapiens
tagctgttaactaagtgtttgtg

SEQ ID NO: 23949 - DNA, 25 bp, Homo Sapiens
tagctgttaactaagtgtttgtggg

SEQ ID NO: 23950 - DNA, 26 bp, Homo Sapiens
tagctgttaactaagtgtttgtgggt

SEQ ID NO: 23951 - DNA, 27 bp, Homo Sapiens
tagctgttaactaagtgtttgtgggtt

SEQ ID NO: 23952 - DNA, 28 bp, Homo Sapiens
tagctgttaactaagtgtttgtgggttt

SEQ ID NO: 23953 - DNA, 29 bp, Homo Sapiens
tagctgttaactaagtgtttgtgggttta

SEQ ID NO: 23954 - DNA, 30 bp, Homo Sapiens
tagctgttaactaagtgtttgtgggtttaa

SEQ ID NO: 23955 - DNA, 31 bp, Homo Sapiens
tagctgttaactaagtgtttgtgggtttaag

SEQ ID NO: 23956 - DNA, 33 bp, Homo Sapiens
tagctgttaactaagtgtttgtgggtttaagtc

SEQ ID NO: 23957 - DNA, 35 bp, Homo Sapiens
tagctgttaactaagtgtttgtgggtttaagtccc

SEQ ID NO: 23958 - DNA, 36 bp, Homo Sapiens
tagctgttaactaagtgtttgtgggtttaagtccca

SEQ ID NO: 23959 - DNA, 38 bp, Homo Sapiens
tagctgttaactaagtgtttgtgggtttaagtcccatt

SEQ ID NO: 23960 - DNA, 41 bp, Homo Sapiens
tagctgttaactaagtgtttgtgggtttaagtcccattggt

SEQ ID NO: 23961 - DNA, 42 bp, Homo Sapiens
tagctgttaactaagtgtttgtgggtttaagtcccattggtc

SEQ ID NO: 23962 - DNA, 43 bp, Homo Sapiens
tagctgttaactaagtgtttgtgggtttaagtcccattggtct

SEQ ID NO: 23963 - DNA, 44 bp, Homo Sapiens
tagctgttaactaagtgtttgtgggtttaagtcccattggtcta

SEQ ID NO: 23964 - DNA, 45 bp, Homo Sapiens
tagctgttaactaagtgtttgtgggtttaagtcccattggtctag

SEQ ID NO: 23965 - DNA, 46 bp, Homo Sapiens
tagctgttaactaagtgtttgtgggtttaagtcccattggtctagc

SEQ ID NO: 23966 - DNA, 47 bp, Homo Sapiens
tagctgttaactaagtgtttgtgggtttaagtcccattggtctagcc

SEQ ID NO: 23967 - DNA, 48 bp, Homo Sapiens
tagctgttaactaagtgtttgtgggtttaagtcccattggtctagcca

SEQ ID NO: 23968 - DNA, 31 bp, Homo Sapiens
tagcttaacacaaagcacccaacttacactt

SEQ ID NO: 23969 - DNA, 32 bp, Homo Sapiens
tagcttaacacaaagcacccaacttacactta

SEQ ID NO: 23970 - DNA, 26 bp, Homo Sapiens
tagcttaattaaagtggctgatttgc

SEQ ID NO: 23971 - DNA, 28 bp, Homo Sapiens
tagcttacctcctcaaagcaatacactg

SEQ ID NO: 23972 - DNA, 30 bp, Homo Sapiens
tagcttacctcctcaaagcaatacactgaa

SEQ ID NO: 23973 - DNA, 25 bp, Homo Sapiens
tagcttagcggtagagcatttgact

SEQ ID NO: 23974 - DNA, 23 bp, Homo Sapiens
tagcttagttggtagagcattgg

SEQ ID NO: 23975 - DNA, 21 bp, Homo Sapiens
tagctttgggtgctaatggtg

SEQ ID NO: 23976 - DNA, 22 bp, Homo Sapiens
tagctttgggtgctaatggtgg

SEQ ID NO: 23977 - DNA, 23 bp, Homo Sapiens
tagctttgggtgctaatggtgga

SEQ ID NO: 23978 - DNA, 24 bp, Homo Sapiens
tagctttgggtgctaatggtggag

SEQ ID NO: 23979 - DNA, 26 bp, Homo Sapiens
tagctttgggtgctaatggtggagtt

SEQ ID NO: 23980 - DNA, 27 bp, Homo Sapiens
tagctttgggtgctaatggtggagtta

SEQ ID NO: 23981 - DNA, 28 bp, Homo Sapiens
tagctttgggtgctaatggtggagttaa

SEQ ID NO: 23982 - DNA, 29 bp, Homo Sapiens
tagctttgggtgctaatggtggagttaaa

SEQ ID NO: 23983 - DNA, 30 bp, Homo Sapiens
tagctttgggtgctaatggtggagttaaag

SEQ ID NO: 23984 - DNA, 31 bp, Homo Sapiens
tagctttgggtgctaatggtggagttaaaga

SEQ ID NO: 23985 - DNA, 32 bp, Homo Sapiens
tagctttgggtgctaatggtggagttaaagac

SEQ ID NO: 23986 - DNA, 33 bp, Homo Sapiens
tagctttgggtgctaatggtggagttaaagact

SEQ ID NO: 23987 - DNA, 34 bp, Homo Sapiens
tagctttgggtgctaatggtggagttaaagactt

SEQ ID NO: 23988 - DNA, 35 bp, Homo Sapiens
tagctttgggtgctaatggtggagttaaagacttt

SEQ ID NO: 23989 - DNA, 43 bp, Homo Sapiens
tagctttgggtgctaatggtggagttaaagactttttctctga

SEQ ID NO: 23990 - DNA, 44 bp, Homo Sapiens
tagctttgggtgctaatggtggagttaaagactttttctctgac

SEQ ID NO: 23991 - DNA, 45 bp, Homo Sapiens
tagctttgggtgctaatggtggagttaaagactttttctctgacc

SEQ ID NO: 23992 - DNA, 46 bp, Homo Sapiens
tagctttgggtgctaatggtggagttaaagactttttctctgacca

SEQ ID NO: 23993 - DNA, 16 bp, Homo Sapiens
taggagatttcaactt

SEQ ID NO: 23994 - DNA, 17 bp, Homo Sapiens
taggagatttcaactta

SEQ ID NO: 23995 - DNA, 18 bp, Homo Sapiens
taggagatttcaacttaa

SEQ ID NO: 23996 - DNA, 19 bp, Homo Sapiens
taggagatttcaacttaac

SEQ ID NO: 23997 - DNA, 20 bp, Homo Sapiens
taggagatttcaacttaact

SEQ ID NO: 23998 - DNA, 21 bp, Homo Sapiens
taggagatttcaacttaactt

SEQ ID NO: 23999 - DNA, 22 bp, Homo Sapiens
taggagatttcaacttaacttg

SEQ ID NO: 24000 - DNA, 23 bp, Homo Sapiens
taggagatttcaacttaacttga

SEQ ID NO: 24001 - DNA, 24 bp, Homo Sapiens
taggagatttcaacttaacttgac

SEQ ID NO: 24002 - DNA, 25 bp, Homo Sapiens
taggagatttcaacttaacttgacc

SEQ ID NO: 24003 - DNA, 26 bp, Homo Sapiens
taggagatttcaacttaacttgaccg

SEQ ID NO: 24004 - DNA, 27 bp, Homo Sapiens
taggagatttcaacttaacttgaccgc

SEQ ID NO: 24005 - DNA, 28 bp, Homo Sapiens
taggagatttcaacttaacttgaccgct

SEQ ID NO: 24006 - DNA, 29 bp, Homo Sapiens
taggagatttcaacttaacttgaccgctc

SEQ ID NO: 24007 - DNA, 30 bp, Homo Sapiens
taggagatttcaacttaacttgaccgctct

SEQ ID NO: 24008 - DNA, 31 bp, Homo Sapiens
taggagatttcaacttaacttgaccgctctg

SEQ ID NO: 24009 - DNA, 32 bp, Homo Sapiens
taggagatttcaacttaacttgaccgctctga

SEQ ID NO: 24010 - DNA, 33 bp, Homo Sapiens
taggagatttcaacttaacttgaccgctctgac

SEQ ID NO: 24011 - DNA, 34 bp, Homo Sapiens
taggagatttcaacttaacttgaccgctctgacc

SEQ ID NO: 24012 - DNA, 35 bp, Homo Sapiens
taggagatttcaacttaacttgaccgctctgacca

SEQ ID NO: 24013 - DNA, 16 bp, Homo Sapiens
taggagcttaaacccc

SEQ ID NO: 24014 - DNA, 17 bp, Homo Sapiens
taggagcttaaaccccc

SEQ ID NO: 24015 - DNA, 18 bp, Homo Sapiens
taggagcttaaaccccct

SEQ ID NO: 24016 - DNA, 19 bp, Homo Sapiens
taggagcttaaaccccctt

SEQ ID NO: 24017 - DNA, 20 bp, Homo Sapiens
taggagcttaaaccccctta

SEQ ID NO: 24018 - DNA, 21 bp, Homo Sapiens
taggagcttaaacccccttat

SEQ ID NO: 24019 - DNA, 22 bp, Homo Sapiens
taggagcttaaacccccttatt

SEQ ID NO: 24020 - DNA, 25 bp, Homo Sapiens
taggagcttaaacccccttatttct

SEQ ID NO: 24021 - DNA, 26 bp, Homo Sapiens
taggagcttaaacccccttatttcta

SEQ ID NO: 24022 - DNA, 27 bp, Homo Sapiens
taggagcttaaacccccttatttctac

SEQ ID NO: 24023 - DNA, 28 bp, Homo Sapiens
taggagcttaaacccccttatttctacc

SEQ ID NO: 24024 - DNA, 29 bp, Homo Sapiens
taggagcttaaacccccttatttctacca

SEQ ID NO: 24025 - DNA, 16 bp, Homo Sapiens
taggatggggtgtgat

SEQ ID NO: 24026 - DNA, 17 bp, Homo Sapiens
taggatggggtgtgata

SEQ ID NO: 24027 - DNA, 18 bp, Homo Sapiens
taggatggggtgtgatag

SEQ ID NO: 24028 - DNA, 19 bp, Homo Sapiens
taggatggggtgtgatagg

SEQ ID NO: 24029 - DNA, 20 bp, Homo Sapiens
taggatggggtgtgataggt

SEQ ID NO: 24030 - DNA, 21 bp, Homo Sapiens
taggatggggtgtgataggtg

SEQ ID NO: 24031 - DNA, 22 bp, Homo Sapiens
taggatggggtgtgataggtgg

SEQ ID NO: 24032 - DNA, 23 bp, Homo Sapiens
taggatggggtgtgataggtggc

SEQ ID NO: 24033 - DNA, 24 bp, Homo Sapiens
taggatggggtgtgataggtggca

SEQ ID NO: 24034 - DNA, 25 bp, Homo Sapiens
taggatggggtgtgataggtggcac

SEQ ID NO: 24035 - DNA, 26 bp, Homo Sapiens
taggatggggtgtgataggtggcacg

SEQ ID NO: 24036 - DNA, 27 bp, Homo Sapiens
taggatggggtgtgataggtggcacgg

SEQ ID NO: 24037 - DNA, 28 bp, Homo Sapiens
taggatggggtgtgataggtggcacgga

SEQ ID NO: 24038 - DNA, 29 bp, Homo Sapiens
taggatggggtgtgataggtggcacggag

SEQ ID NO: 24039 - DNA, 30 bp, Homo Sapiens
taggatggggtgtgataggtggcacggaga

SEQ ID NO: 24040 - DNA, 31 bp, Homo Sapiens
taggatggggtgtgataggtggcacggagaa

SEQ ID NO: 24041 - DNA, 32 bp, Homo Sapiens
taggatggggtgtgataggtggcacggagaat

SEQ ID NO: 24042 - DNA, 33 bp, Homo Sapiens
taggatggggtgtgataggtggcacggagaatt

SEQ ID NO: 24043 - DNA, 34 bp, Homo Sapiens
taggatggggtgtgataggtggcacggagaattt

SEQ ID NO: 24044 - DNA, 35 bp, Homo Sapiens
taggatggggtgtgataggtggcacggagaatttt

SEQ ID NO: 24045 - DNA, 36 bp, Homo Sapiens
taggatggggtgtgataggtggcacggagaattttg

SEQ ID NO: 24046 - DNA, 37 bp, Homo Sapiens
taggatggggtgtgataggtggcacggagaattttgg

SEQ ID NO: 24047 - DNA, 38 bp, Homo Sapiens
taggatggggtgtgataggtggcacggagaattttgga

SEQ ID NO: 24048 - DNA, 39 bp, Homo Sapiens
taggatggggtgtgataggtggcacggagaattttggat

SEQ ID NO: 24049 - DNA, 40 bp, Homo Sapiens
taggatggggtgtgataggtggcacggagaattttggatt

SEQ ID NO: 24050 - DNA, 41 bp, Homo Sapiens
taggatggggtgtgataggtggcacggagaattttggattc

SEQ ID NO: 24051 - DNA, 42 bp, Homo Sapiens
taggatggggtgtgataggtggcacggagaattttggattct

SEQ ID NO: 24052 - DNA, 43 bp, Homo Sapiens
taggatggggtgtgataggtggcacggagaattttggattctc

SEQ ID NO: 24053 - DNA, 44 bp, Homo Sapiens
taggatggggtgtgataggtggcacggagaattttggattctca

SEQ ID NO: 24054 - DNA, 48 bp, Homo Sapiens
taggatggggtgtgataggtggcacggagaattttggattctcaggga

SEQ ID NO: 24055 - DNA, 16 bp, Homo Sapiens
taggattcctggtttt

SEQ ID NO: 24056 - DNA, 17 bp, Homo Sapiens
taggattcctggttttc

SEQ ID NO: 24057 - DNA, 24 bp, Homo Sapiens
taggattcctggttttcacccagg

SEQ ID NO: 24058 - DNA, 33 bp, Homo Sapiens
taggattcctggttttcacccaggcggcccggg

SEQ ID NO: 24059 - DNA, 35 bp, Homo Sapiens
taggattcctggttttcacccaggcggcccgggtt

SEQ ID NO: 24060 - DNA, 36 bp, Homo Sapiens
taggattcctggttttcacccaggcggcccgggttc

SEQ ID NO: 24061 - DNA, 41 bp, Homo Sapiens
taggattcctggttttcacccaggcggcccgggttcgactc

SEQ ID NO: 24062 - DNA, 43 bp, Homo Sapiens
taggattcctggttttcacccaggcggcccgggttcgactccc

SEQ ID NO: 24063 - DNA, 47 bp, Homo Sapiens
taggattcctggttttcacccaggcggcccgggttcgactcccggtg

SEQ ID NO: 24064 - DNA, 26 bp, Homo Sapiens
taggattcctggttttcacccaggtg

SEQ ID NO: 24065 - DNA, 36 bp, Homo Sapiens
taggattcctggttttcacccaggtggcccgggttc

SEQ ID NO: 24066 - DNA, 41 bp, Homo Sapiens
taggattcctggttttcacccaggtggcccgggttcgactc

SEQ ID NO: 24067 - DNA, 16 bp, Homo Sapiens
taggattcggcgctct

SEQ ID NO: 24068 - DNA, 17 bp, Homo Sapiens
taggattcggcgctctc

SEQ ID NO: 24069 - DNA, 18 bp, Homo Sapiens
taggattcggcgctctca

SEQ ID NO: 24070 - DNA, 19 bp, Homo Sapiens
taggattcggcgctctcac

SEQ ID NO: 24071 - DNA, 20 bp, Homo Sapiens
taggattcggcgctctcacc

SEQ ID NO: 24072 - DNA, 21 bp, Homo Sapiens
taggattcggcgctctcaccg

SEQ ID NO: 24073 - DNA, 22 bp, Homo Sapiens
taggattcggcgctctcaccgc

SEQ ID NO: 24074 - DNA, 23 bp, Homo Sapiens
taggattcggcgctctcaccgcc

SEQ ID NO: 24075 - DNA, 24 bp, Homo Sapiens
taggattcggcgctctcaccgcca

SEQ ID NO: 24076 - DNA, 24 bp, Homo Sapiens
taggattcggcgctctcaccgccg

SEQ ID NO: 24077 - DNA, 29 bp, Homo Sapiens
taggattcggcgctctcaccgccgcggcc

SEQ ID NO: 24078 - DNA, 30 bp, Homo Sapiens
taggattcggcgctctcaccgccgcggccc

SEQ ID NO: 24079 - DNA, 31 bp, Homo Sapiens
taggattcggcgctctcaccgccgcggcccg

SEQ ID NO: 24080 - DNA, 32 bp, Homo Sapiens
taggattcggcgctctcaccgccgcggcccgg

SEQ ID NO: 24081 - DNA, 33 bp, Homo Sapiens
taggattcggcgctctcaccgccgcggcccggg

SEQ ID NO: 24082 - DNA, 34 bp, Homo Sapiens
taggattcggcgctctcaccgccgcggcccgggt

SEQ ID NO: 24083 - DNA, 35 bp, Homo Sapiens
taggattcggcgctctcaccgccgcggcccgggtt

SEQ ID NO: 24084 - DNA, 36 bp, Homo Sapiens
taggattcggcgctctcaccgccgcggcccgggttc

SEQ ID NO: 24085 - DNA, 37 bp, Homo Sapiens
taggattcggcgctctcaccgccgcggcccgggttcg

SEQ ID NO: 24086 - DNA, 46 bp, Homo Sapiens
taggattcggcgctctcaccgccgcggcccgggttcgattcccggt

SEQ ID NO: 24087 - DNA, 47 bp, Homo Sapiens
taggattcggcgctctcaccgccgcggcccgggttcgattcccggtc

SEQ ID NO: 24088 - DNA, 48 bp, Homo Sapiens
taggattcggcgctctcaccgccgcggcccgggttcgattcccggtca

SEQ ID NO: 24089 - DNA, 16 bp, Homo Sapiens
taggattcggcgcttt

SEQ ID NO: 24090 - DNA, 17 bp, Homo Sapiens
taggattcggcgctttc

SEQ ID NO: 24091 - DNA, 19 bp, Homo Sapiens
taggattcggcgctttcac

SEQ ID NO: 24092 - DNA, 20 bp, Homo Sapiens
taggattcggcgctttcacc

SEQ ID NO: 24093 - DNA, 21 bp, Homo Sapiens
taggattcggcgctttcaccg

SEQ ID NO: 24094 - DNA, 23 bp, Homo Sapiens
taggattcggcgctttcaccgcc

SEQ ID NO: 24095 - DNA, 30 bp, Homo Sapiens
taggattcggcgctttcaccgccgcggccc

SEQ ID NO: 24096 - DNA, 40 bp, Homo Sapiens
taggccccaaaaattttggtgcaactccaaataaaagtac

SEQ ID NO: 24097 - DNA, 41 bp, Homo Sapiens
taggccccaaaaattttggtgcaactccaaataaaagtacc

SEQ ID NO: 24098 - DNA, 16 bp, Homo Sapiens
taggcctctttttacc

SEQ ID NO: 24099 - DNA, 19 bp, Homo Sapiens
taggcctctttttaccacc

SEQ ID NO: 24100 - DNA, 20 bp, Homo Sapiens
taggcctctttttaccacca

SEQ ID NO: 24101 - DNA, 20 bp, Homo Sapiens
taggctaaatcctatatatc

SEQ ID NO: 24102 - DNA, 22 bp, Homo Sapiens
taggctaaatcctatatatctt

SEQ ID NO: 24103 - DNA, 24 bp, Homo Sapiens
taggctaaatcctatatatcttac

SEQ ID NO: 24104 - DNA, 25 bp, Homo Sapiens
taggctaaatcctatatatcttacc

SEQ ID NO: 24105 - DNA, 26 bp, Homo Sapiens
taggctaaatcctatatatcttacca

SEQ ID NO: 24106 - DNA, 20 bp, Homo Sapiens
taggctccagtctcttcgga

SEQ ID NO: 24107 - DNA, 16 bp, Homo Sapiens
taggggtatgattctc

SEQ ID NO: 24108 - DNA, 17 bp, Homo Sapiens
taggggtatgattctcg

SEQ ID NO: 24109 - DNA, 18 bp, Homo Sapiens
taggggtatgattctcgc

SEQ ID NO: 24110 - DNA, 19 bp, Homo Sapiens
taggggtatgattctcgct

SEQ ID NO: 24111 - DNA, 20 bp, Homo Sapiens
taggggtatgattctcgctt

SEQ ID NO: 24112 - DNA, 21 bp, Homo Sapiens
taggggtatgattctcgcttc

SEQ ID NO: 24113 - DNA, 22 bp, Homo Sapiens
taggggtatgattctcgctttg

SEQ ID NO: 24114 - DNA, 23 bp, Homo Sapiens
taggggtatgattctcgctttgg

SEQ ID NO: 24115 - DNA, 19 bp, Homo Sapiens
taggggtatgattctcggt

SEQ ID NO: 24116 - DNA, 20 bp, Homo Sapiens
taggggtatgattctcggtt

SEQ ID NO: 24117 - DNA, 22 bp, Homo Sapiens
taggggtatgattctcggtttg

SEQ ID NO: 24118 - DNA, 23 bp, Homo Sapiens
taggggtatgattctcggtttgg

SEQ ID NO: 24119 - DNA, 16 bp, Homo Sapiens
tagggtgcttagctgt

SEQ ID NO: 24120 - DNA, 17 bp, Homo Sapiens
tagggtgcttagctgtt

SEQ ID NO: 24121 - DNA, 18 bp, Homo Sapiens
tagggtgcttagctgtta

SEQ ID NO: 24122 - DNA, 20 bp, Homo Sapiens
tagggtgcttagctgttaac

SEQ ID NO: 24123 - DNA, 21 bp, Homo Sapiens
tagggtgcttagctgttaact

SEQ ID NO: 24124 - DNA, 22 bp, Homo Sapiens
tagggtgcttagctgttaacta

SEQ ID NO: 24125 - DNA, 32 bp, Homo Sapiens
tagggtgcttagctgttaactaagtgtttgtg

SEQ ID NO: 24126 - DNA, 35 bp, Homo Sapiens
tagggtgcttagctgttaactaagtgtttgtgggt

SEQ ID NO: 24127 - DNA, 36 bp, Homo Sapiens
tagggtgcttagctgttaactaagtgtttgtgggtt

SEQ ID NO: 24128 - DNA, 37 bp, Homo Sapiens
tagggtgcttagctgttaactaagtgtttgtgggttt

SEQ ID NO: 24129 - DNA, 38 bp, Homo Sapiens
tagggtgcttagctgttaactaagtgtttgtgggttta

SEQ ID NO: 24130 - DNA, 39 bp, Homo Sapiens
tagggtgcttagctgttaactaagtgtttgtgggtttaa

SEQ ID NO: 24131 - DNA, 47 bp, Homo Sapiens
tagggtgcttagctgttaactaagtgtttgtgggtttaagtcccatt

SEQ ID NO: 24132 - DNA, 18 bp, Homo Sapiens
taggtagcgcatcagtct

SEQ ID NO: 24133 - DNA, 20 bp, Homo Sapiens
taggtcgctggttcgaatcc

SEQ ID NO: 24134 - DNA, 23 bp, Homo Sapiens
taggtcgctggttcgaatccggc

SEQ ID NO: 24135 - DNA, 32 bp, Homo Sapiens
taggtcgctggttcgaatccggctcgaaggac

SEQ ID NO: 24136 - DNA, 33 bp, Homo Sapiens
taggtcgctggttcgaatccggctcgaaggacc

SEQ ID NO: 24137 - DNA, 32 bp, Homo Sapiens
taggtcgctggttcgaatccggctcggaggac

SEQ ID NO: 24138 - DNA, 33 bp, Homo Sapiens
taggtcgctggttcgaatccggctcggaggacc

SEQ ID NO: 24139 - DNA, 33 bp, Homo Sapiens
taggtcgctggttcgattccagctcgaaggacc

SEQ ID NO: 24140 - DNA, 23 bp, Homo Sapiens
taggtcgctggttcgattccggc

SEQ ID NO: 24141 - DNA, 24 bp, Homo Sapiens
taggtcgctggttcgattccggct

SEQ ID NO: 24142 - DNA, 25 bp, Homo Sapiens
taggtcgctggttcgattccggctc

SEQ ID NO: 24143 - DNA, 32 bp, Homo Sapiens
taggtcgctggttcgattccggctcgaaggac

SEQ ID NO: 24144 - DNA, 33 bp, Homo Sapiens
taggtcgctggttcgattccggctcgaaggacc

SEQ ID NO: 24145 - DNA, 16 bp, Homo Sapiens
taggtggcacggagaa

SEQ ID NO: 24146 - DNA, 17 bp, Homo Sapiens
taggtggcacggagaat

SEQ ID NO: 24147 - DNA, 19 bp, Homo Sapiens
taggtggcacggagaattt

SEQ ID NO: 24148 - DNA, 20 bp, Homo Sapiens
taggtggcacggagaatttt

SEQ ID NO: 24149 - DNA, 21 bp, Homo Sapiens
taggtggcacggagaattttg

SEQ ID NO: 24150 - DNA, 16 bp, Homo Sapiens
taggttaaatacagac

SEQ ID NO: 24151 - DNA, 20 bp, Homo Sapiens
taggttcgactcctggctgg

SEQ ID NO: 24152 - DNA, 21 bp, Homo Sapiens
taggttcgactcctggctggc

SEQ ID NO: 24153 - DNA, 22 bp, Homo Sapiens
taggttcgactcctggctggct

SEQ ID NO: 24154 - DNA, 23 bp, Homo Sapiens
taggttcgactcctggctggctc

SEQ ID NO: 24155 - DNA, 24 bp, Homo Sapiens
taggttcgactcctggctggctcg

SEQ ID NO: 24156 - DNA, 25 bp, Homo Sapiens
taggttcgactcctggctggctcgc

SEQ ID NO: 24157 - DNA, 26 bp, Homo Sapiens
taggttcgactcctggctggctcgcc

SEQ ID NO: 24158 - DNA, 27 bp, Homo Sapiens
taggttcgactcctggctggctcgcca

SEQ ID NO: 24159 - DNA, 16 bp, Homo Sapiens
tagtaccgttaacttc

SEQ ID NO: 24160 - DNA, 17 bp, Homo Sapiens
tagtaccgttaacttcc

SEQ ID NO: 24161 - DNA, 18 bp, Homo Sapiens
tagtaccgttaacttcca

SEQ ID NO: 24162 - DNA, 19 bp, Homo Sapiens
tagtaccgttaacttccaa

SEQ ID NO: 24163 - DNA, 21 bp, Homo Sapiens
tagtaccgttaacttccaatt

SEQ ID NO: 24164 - DNA, 22 bp, Homo Sapiens
tagtaccgttaacttccaatta

SEQ ID NO: 24165 - DNA, 23 bp, Homo Sapiens
tagtaccgttaacttccaattaa

SEQ ID NO: 24166 - DNA, 24 bp, Homo Sapiens
tagtaccgttaacttccaattaac

SEQ ID NO: 24167 - DNA, 25 bp, Homo Sapiens
tagtaccgttaacttccaattaact

SEQ ID NO: 24168 - DNA, 28 bp, Homo Sapiens
tagtaccgttaacttccaattaactagt

SEQ ID NO: 24169 - DNA, 29 bp, Homo Sapiens
tagtaccgttaacttccaattaactagtt

SEQ ID NO: 24170 - DNA, 32 bp, Homo Sapiens
tagtaccgttaacttccaattaactagttttg

SEQ ID NO: 24171 - DNA, 33 bp, Homo Sapiens
tagtaccgttaacttccaattaactagttttga

SEQ ID NO: 24172 - DNA, 34 bp, Homo Sapiens
tagtaccgttaacttccaattaactagttttgac

SEQ ID NO: 24173 - DNA, 35 bp, Homo Sapiens
tagtaccgttaacttccaattaactagttttgaca

SEQ ID NO: 24174 - DNA, 36 bp, Homo Sapiens
tagtaccgttaacttccaattaactagttttgacaa

SEQ ID NO: 24175 - DNA, 37 bp, Homo Sapiens
tagtaccgttaacttccaattaactagttttgacaac

SEQ ID NO: 24176 - DNA, 38 bp, Homo Sapiens
tagtaccgttaacttccaattaactagttttgacaaca

SEQ ID NO: 24177 - DNA, 16 bp, Homo Sapiens
tagtactctgcgttgt

SEQ ID NO: 24178 - DNA, 17 bp, Homo Sapiens
tagtactctgcgttgtg

SEQ ID NO: 24179 - DNA, 21 bp, Homo Sapiens
tagtactctgcgttgtggccg

SEQ ID NO: 24180 - DNA, 22 bp, Homo Sapiens
tagtactctgcgttgtggccgc

SEQ ID NO: 24181 - DNA, 23 bp, Homo Sapiens
tagtactctgcgttgtggccgca

SEQ ID NO: 24182 - DNA, 34 bp, Homo Sapiens
tagtactctgcgttgtggccgcagcaacctcggt

SEQ ID NO: 24183 - DNA, 35 bp, Homo Sapiens
tagtactctgcgttgtggccgcagcaacctcggtt

SEQ ID NO: 24184 - DNA, 16 bp, Homo Sapiens
tagtatccccgcctgt

SEQ ID NO: 24185 - DNA, 17 bp, Homo Sapiens
tagtatccccgcctgtc

SEQ ID NO: 24186 - DNA, 16 bp, Homo Sapiens
tagtccgtgcgagaat

SEQ ID NO: 24187 - DNA, 17 bp, Homo Sapiens
tagtccgtgcgagaata

SEQ ID NO: 24188 - DNA, 18 bp, Homo Sapiens
tagtccgtgcgagaatac

SEQ ID NO: 24189 - DNA, 19 bp, Homo Sapiens
tagtccgtgcgagaatacc

SEQ ID NO: 24190 - DNA, 20 bp, Homo Sapiens
tagtccgtgcgagaatacca

SEQ ID NO: 24191 - DNA, 16 bp, Homo Sapiens
tagtcgtggccgagtg

SEQ ID NO: 24192 - DNA, 17 bp, Homo Sapiens
tagtcgtggccgagtgg

SEQ ID NO: 24193 - DNA, 19 bp, Homo Sapiens
tagtcgtggccgagtggtt

SEQ ID NO: 24194 - DNA, 20 bp, Homo Sapiens
tagtcgtggccgagtggtta

SEQ ID NO: 24195 - DNA, 21 bp, Homo Sapiens
tagtcgtggccgagtggttaa

SEQ ID NO: 24196 - DNA, 22 bp, Homo Sapiens
tagtcgtggccgagtggttaag

SEQ ID NO: 24197 - DNA, 23 bp, Homo Sapiens
tagtcgtggccgagtggttaagg

SEQ ID NO: 24198 - DNA, 24 bp, Homo Sapiens
tagtcgtggccgagtggttaaggc

SEQ ID NO: 24199 - DNA, 16 bp, Homo Sapiens
tagtggctaggattcg

SEQ ID NO: 24200 - DNA, 18 bp, Homo Sapiens
tagtggctaggattcggc

SEQ ID NO: 24201 - DNA, 19 bp, Homo Sapiens
tagtggctaggattcggcg

SEQ ID NO: 24202 - DNA, 20 bp, Homo Sapiens
tagtggctaggattcggcgc

SEQ ID NO: 24203 - DNA, 21 bp, Homo Sapiens
tagtggctaggattcggcgct

SEQ ID NO: 24204 - DNA, 22 bp, Homo Sapiens
tagtggctaggattcggcgctt

SEQ ID NO: 24205 - DNA, 23 bp, Homo Sapiens
tagtggctaggattcggcgcttt

SEQ ID NO: 24206 - DNA, 24 bp, Homo Sapiens
tagtggctaggattcggcgctttc

SEQ ID NO: 24207 - DNA, 27 bp, Homo Sapiens
tagtggctaggattcggcgctttcacc

SEQ ID NO: 24208 - DNA, 20 bp, Homo Sapiens
tagtggtaagcatagctgcc

SEQ ID NO: 24209 - DNA, 21 bp, Homo Sapiens
tagtggtagaattctcgcctc

SEQ ID NO: 24210 - DNA, 17 bp, Homo Sapiens
tagtggtatcatgcaag

SEQ ID NO: 24211 - DNA, 20 bp, Homo Sapiens
tagtggtatcatgcaagatt

SEQ ID NO: 24212 - DNA, 21 bp, Homo Sapiens
tagtggtatcatgcaagattc

SEQ ID NO: 24213 - DNA, 22 bp, Homo Sapiens
tagtggtatcatgcaagattcc

SEQ ID NO: 24214 - DNA, 23 bp, Homo Sapiens
tagtggtatcatgcaagattccc

SEQ ID NO: 24215 - DNA, 24 bp, Homo Sapiens
tagtggtatcatgcaagattccca

SEQ ID NO: 24216 - DNA, 29 bp, Homo Sapiens
tagtggtatcatgcaagattcccattctt

SEQ ID NO: 24217 - DNA, 39 bp, Homo Sapiens
tagtggtatcatgcaagattcccattcttgcgacccggg

SEQ ID NO: 24218 - DNA, 18 bp, Homo Sapiens
tagtggtatgattctcgc

SEQ ID NO: 24219 - DNA, 19 bp, Homo Sapiens
tagtggtatgattctcgct

SEQ ID NO: 24220 - DNA, 19 bp, Homo Sapiens
tagtggtcatcacgttcgc

SEQ ID NO: 24221 - DNA, 20 bp, Homo Sapiens
tagtggtcatcacgttcgcc

SEQ ID NO: 24222 - DNA, 21 bp, Homo Sapiens
tagtggtcatcacgttcgcct

SEQ ID NO: 24223 - DNA, 20 bp, Homo Sapiens
tagtggtgagcatagctgcc

SEQ ID NO: 24224 - DNA, 21 bp, Homo Sapiens
tagtggtgagcatagctgcct

SEQ ID NO: 24225 - DNA, 24 bp, Homo Sapiens
tagtggtgagcatagctgccttcc

SEQ ID NO: 24226 - DNA, 26 bp, Homo Sapiens
tagtggtgagcatagctgccttccaa

SEQ ID NO: 24227 - DNA, 41 bp, Homo Sapiens
tagtggtgagcatagctgccttccaagcagttgacccgggt

SEQ ID NO: 24228 - DNA, 16 bp, Homo Sapiens
tagtggtgagtatccc

SEQ ID NO: 24229 - DNA, 19 bp, Homo Sapiens
tagtggtgagtatccccgc

SEQ ID NO: 24230 - DNA, 21 bp, Homo Sapiens
tagtggtgagtatccccgcct

SEQ ID NO: 24231 - DNA, 23 bp, Homo Sapiens
tagtggtgagtatccccgcctgt

SEQ ID NO: 24232 - DNA, 24 bp, Homo Sapiens
tagtggtgagtatccccgcctgtc

SEQ ID NO: 24233 - DNA, 26 bp, Homo Sapiens
tagtggtgagtatccccgcctgtcac

SEQ ID NO: 24234 - DNA, 27 bp, Homo Sapiens
tagtggtgagtatccccgcctgtcacg

SEQ ID NO: 24235 - DNA, 29 bp, Homo Sapiens
tagtggtgagtatccccgcctgtcacgcg

SEQ ID NO: 24236 - DNA, 17 bp, Homo Sapiens
tagtggttagcatagct

SEQ ID NO: 24237 - DNA, 19 bp, Homo Sapiens
tagtggttagcatagctgc

SEQ ID NO: 24238 - DNA, 20 bp, Homo Sapiens
tagtggttagcatagctgcc

SEQ ID NO: 24239 - DNA, 21 bp, Homo Sapiens
tagtggttagcatagctgcct

SEQ ID NO: 24240 - DNA, 28 bp, Homo Sapiens
tagtggttagcatagctgccttccaagc

SEQ ID NO: 24241 - DNA, 40 bp, Homo Sapiens
tagtggttagcatagctgccttccaagcagttgacccggg

SEQ ID NO: 24242 - DNA, 41 bp, Homo Sapiens
tagtggttagcatagctgccttccaagcagttgacccgggt

SEQ ID NO: 24243 - DNA, 42 bp, Homo Sapiens
tagtggttagcatagctgccttccaagcagttgacccgggtt

SEQ ID NO: 24244 - DNA, 16 bp, Homo Sapiens
tagtggttaggattcg

SEQ ID NO: 24245 - DNA, 17 bp, Homo Sapiens
tagtggttaggattcgg

SEQ ID NO: 24246 - DNA, 18 bp, Homo Sapiens
tagtggttaggattcggc

SEQ ID NO: 24247 - DNA, 19 bp, Homo Sapiens
tagtggttaggattcggcg

SEQ ID NO: 24248 - DNA, 20 bp, Homo Sapiens
tagtggttaggattcggcgc

SEQ ID NO: 24249 - DNA, 21 bp, Homo Sapiens
tagtggttaggattcggcgct

SEQ ID NO: 24250 - DNA, 22 bp, Homo Sapiens
tagtggttaggattcggcgctc

SEQ ID NO: 24251 - DNA, 23 bp, Homo Sapiens
tagtggttaggattcggcgctct

SEQ ID NO: 24252 - DNA, 24 bp, Homo Sapiens
tagtggttaggattcggcgctctc

SEQ ID NO: 24253 - DNA, 25 bp, Homo Sapiens
tagtggttaggattcggcgctctca

SEQ ID NO: 24254 - DNA, 26 bp, Homo Sapiens
tagtggttaggattcggcgctctcac

SEQ ID NO: 24255 - DNA, 27 bp, Homo Sapiens
tagtggttaggattcggcgctctcacc

SEQ ID NO: 24256 - DNA, 28 bp, Homo Sapiens
tagtggttaggattcggcgctctcaccg

SEQ ID NO: 24257 - DNA, 29 bp, Homo Sapiens
tagtggttaggattcggcgctctcaccgc

SEQ ID NO: 24258 - DNA, 30 bp, Homo Sapiens
tagtggttaggattcggcgctctcaccgcc

SEQ ID NO: 24259 - DNA, 32 bp, Homo Sapiens
tagtggttaggattcggcgctctcaccgccgc

SEQ ID NO: 24260 - DNA, 35 bp, Homo Sapiens
tagtggttaggattcggcgctctcaccgccgcggc

SEQ ID NO: 24261 - DNA, 37 bp, Homo Sapiens
tagtggttaggattcggcgctctcaccgccgcggccc

SEQ ID NO: 24262 - DNA, 38 bp, Homo Sapiens
tagtggttaggattcggcgctctcaccgccgcggcccg

SEQ ID NO: 24263 - DNA, 39 bp, Homo Sapiens
tagtggttaggattcggcgctctcaccgccgcggcccgg

SEQ ID NO: 24264 - DNA, 40 bp, Homo Sapiens
tagtggttaggattcggcgctctcaccgccgcggcccggg

SEQ ID NO: 24265 - DNA, 41 bp, Homo Sapiens
tagtggttaggattcggcgctctcaccgccgcggcccgggt

SEQ ID NO: 24266 - DNA, 42 bp, Homo Sapiens
tagtggttaggattcggcgctctcaccgccgcggcccgggtt

SEQ ID NO: 24267 - DNA, 43 bp, Homo Sapiens
tagtggttaggattcggcgctctcaccgccgcggcccgggttc

SEQ ID NO: 24268 - DNA, 16 bp, Homo Sapiens
tagtggttagtactct

SEQ ID NO: 24269 - DNA, 17 bp, Homo Sapiens
tagtggttagtactctg

SEQ ID NO: 24270 - DNA, 18 bp, Homo Sapiens
tagtggttagtactctgc

SEQ ID NO: 24271 - DNA, 19 bp, Homo Sapiens
tagtggttagtactctgcg

SEQ ID NO: 24272 - DNA, 20 bp, Homo Sapiens
tagtggttagtactctgcgc

SEQ ID NO: 24273 - DNA, 21 bp, Homo Sapiens
tagtggttagtactctgcgct

SEQ ID NO: 24274 - DNA, 22 bp, Homo Sapiens
tagtggttagtactctgcgctg

SEQ ID NO: 24275 - DNA, 20 bp, Homo Sapiens
tagtggttagtactctgcgt

SEQ ID NO: 24276 - DNA, 21 bp, Homo Sapiens
tagtggttagtactctgcgtt

SEQ ID NO: 24277 - DNA, 22 bp, Homo Sapiens
tagtggttagtactctgcgttg

SEQ ID NO: 24278 - DNA, 23 bp, Homo Sapiens
tagtggttagtactctgcgttgt

SEQ ID NO: 24279 - DNA, 24 bp, Homo Sapiens
tagtggttagtactctgcgttgtg

SEQ ID NO: 24280 - DNA, 26 bp, Homo Sapiens
tagtggttagtactctgcgttgtggc

SEQ ID NO: 24281 - DNA, 27 bp, Homo Sapiens
tagtggttagtactctgcgttgtggcc

SEQ ID NO: 24282 - DNA, 28 bp, Homo Sapiens
tagtggttagtactctgcgttgtggccg

SEQ ID NO: 24283 - DNA, 32 bp, Homo Sapiens
tagtggttagtactctgcgttgtggccgcagc

SEQ ID NO: 24284 - DNA, 33 bp, Homo Sapiens
tagtggttagtactctgcgttgtggccgcagca

SEQ ID NO: 24285 - DNA, 34 bp, Homo Sapiens
tagtggttagtactctgcgttgtggccgcagcaa

SEQ ID NO: 24286 - DNA, 36 bp, Homo Sapiens
tagtggttagtactctgcgttgtggccgcagcaacc

SEQ ID NO: 24287 - DNA, 37 bp, Homo Sapiens
tagtggttagtactctgcgttgtggccgcagcaacct

SEQ ID NO: 24288 - DNA, 39 bp, Homo Sapiens
tagtggttagtactctgcgttgtggccgcagcaacctcg

SEQ ID NO: 24289 - DNA, 16 bp, Homo Sapiens
tagtggttagtatccc

SEQ ID NO: 24290 - DNA, 19 bp, Homo Sapiens
tagtggttagtatccccgc

SEQ ID NO: 24291 - DNA, 20 bp, Homo Sapiens
tagtggttagtatccccgcc

SEQ ID NO: 24292 - DNA, 23 bp, Homo Sapiens
tagtggttagtatccccgcctgt

SEQ ID NO: 24293 - DNA, 24 bp, Homo Sapiens
tagtggttagtatccccgcctgtc

SEQ ID NO: 24294 - DNA, 27 bp, Homo Sapiens
tagtggttagtatccccgcctgtcacg

SEQ ID NO: 24295 - DNA, 20 bp, Homo Sapiens
tagtggttatcacatctgct

SEQ ID NO: 24296 - DNA, 21 bp, Homo Sapiens
tagtggttatcacatctgctt

SEQ ID NO: 24297 - DNA, 22 bp, Homo Sapiens
tagtggttatcacatctgcttt

SEQ ID NO: 24298 - DNA, 22 bp, Homo Sapiens
tagtggttatcacattcgcctc

SEQ ID NO: 24299 - DNA, 16 bp, Homo Sapiens
tagtggttatcacgtc

SEQ ID NO: 24300 - DNA, 18 bp, Homo Sapiens
tagtggttatcacgtctg

SEQ ID NO: 24301 - DNA, 19 bp, Homo Sapiens
tagtggttatcacgtctgc

SEQ ID NO: 24302 - DNA, 20 bp, Homo Sapiens
tagtggttatcacgtctgct

SEQ ID NO: 24303 - DNA, 21 bp, Homo Sapiens
tagtggttatcacgtctgctt

SEQ ID NO: 24304 - DNA, 22 bp, Homo Sapiens
tagtggttatcacgtctgcttt

SEQ ID NO: 24305 - DNA, 23 bp, Homo Sapiens
tagtggttatcacgtctgcttta

SEQ ID NO: 24306 - DNA, 24 bp, Homo Sapiens
tagtggttatcacgtctgctttac

SEQ ID NO: 24307 - DNA, 26 bp, Homo Sapiens
tagtggttatcacgtctgctttacac

SEQ ID NO: 24308 - DNA, 19 bp, Homo Sapiens
tagtggttatcacgttcgc

SEQ ID NO: 24309 - DNA, 20 bp, Homo Sapiens
tagtggttatcacgttcgcc

SEQ ID NO: 24310 - DNA, 21 bp, Homo Sapiens
tagtggttatcacgttcgcct

SEQ ID NO: 24311 - DNA, 22 bp, Homo Sapiens
tagtggttatcacgttcgcctc

SEQ ID NO: 24312 - DNA, 23 bp, Homo Sapiens
tagtggttatcacgttcgcctca

SEQ ID NO: 24313 - DNA, 24 bp, Homo Sapiens
tagtggttatcacgttcgcctcac

SEQ ID NO: 24314 - DNA, 27 bp, Homo Sapiens
tagtggttatcacgttcgcctcacacg

SEQ ID NO: 24315 - DNA, 28 bp, Homo Sapiens
tagtggttatcacgttcgcctcacacgc

SEQ ID NO: 24316 - DNA, 21 bp, Homo Sapiens
tagtggttatcacgtttgcct

SEQ ID NO: 24317 - DNA, 16 bp, Homo Sapiens
tagtgtagcggttatc

SEQ ID NO: 24318 - DNA, 17 bp, Homo Sapiens
tagtgtagcggttatca

SEQ ID NO: 24319 - DNA, 18 bp, Homo Sapiens
tagtgtagcggttatcac

SEQ ID NO: 24320 - DNA, 23 bp, Homo Sapiens
tagtgtagcggttatcacattcg

SEQ ID NO: 24321 - DNA, 25 bp, Homo Sapiens
tagtgtagcggttatcacattcgcc

SEQ ID NO: 24322 - DNA, 23 bp, Homo Sapiens
tagtgtagcggttatcacgtctg

SEQ ID NO: 24323 - DNA, 24 bp, Homo Sapiens
tagtgtagcggttatcacgtctgc

SEQ ID NO: 24324 - DNA, 26 bp, Homo Sapiens
tagtgtagcggttatcacgtctgctt

SEQ ID NO: 24325 - DNA, 16 bp, Homo Sapiens
tagtgtagtggtcatc

SEQ ID NO: 24326 - DNA, 24 bp, Homo Sapiens
tagtgtagtggtcatcacgttcgc

SEQ ID NO: 24327 - DNA, 25 bp, Homo Sapiens
tagtgtagtggtcatcacgttcgcc

SEQ ID NO: 24328 - DNA, 26 bp, Homo Sapiens
tagtgtagtggtcatcacgttcgcct

SEQ ID NO: 24329 - DNA, 16 bp, Homo Sapiens
tagtgtagtggttatc

SEQ ID NO: 24330 - DNA, 17 bp, Homo Sapiens
tagtgtagtggttatca

SEQ ID NO: 24331 - DNA, 26 bp, Homo Sapiens
tagtgtagtggttatcacatctgctt

SEQ ID NO: 24332 - DNA, 19 bp, Homo Sapiens
tagtgtagtggttatcacg

SEQ ID NO: 24333 - DNA, 23 bp, Homo Sapiens
tagtgtagtggttatcacgtctg

SEQ ID NO: 24334 - DNA, 24 bp, Homo Sapiens
tagtgtagtggttatcacgtctgc

SEQ ID NO: 24335 - DNA, 25 bp, Homo Sapiens
tagtgtagtggttatcacgtctgct

SEQ ID NO: 24336 - DNA, 26 bp, Homo Sapiens
tagtgtagtggttatcacgtctgctt

SEQ ID NO: 24337 - DNA, 27 bp, Homo Sapiens
tagtgtagtggttatcacgtctgcttt

SEQ ID NO: 24338 - DNA, 28 bp, Homo Sapiens
tagtgtagtggttatcacgtctgcttta

SEQ ID NO: 24339 - DNA, 29 bp, Homo Sapiens
tagtgtagtggttatcacgtctgctttac

SEQ ID NO: 24340 - DNA, 30 bp, Homo Sapiens
tagtgtagtggttatcacgtctgctttaca

SEQ ID NO: 24341 - DNA, 24 bp, Homo Sapiens
tagtgtagtggttatcacgttcgc

SEQ ID NO: 24342 - DNA, 25 bp, Homo Sapiens
tagtgtagtggttatcacgttcgcc

SEQ ID NO: 24343 - DNA, 26 bp, Homo Sapiens
tagtgtagtggttatcacgttcgcct

SEQ ID NO: 24344 - DNA, 27 bp, Homo Sapiens
tagtgtagtggttatcacgttcgcctc

SEQ ID NO: 24345 - DNA, 28 bp, Homo Sapiens
tagtgtagtggttatcacgttcgcctca

SEQ ID NO: 24346 - DNA, 29 bp, Homo Sapiens
tagtgtagtggttatcacgttcgcctcac

SEQ ID NO: 24347 - DNA, 29 bp, Homo Sapiens
tagtttaaacaaaacgaatgatttcgact

SEQ ID NO: 24348 - DNA, 30 bp, Homo Sapiens
tagtttaaacaaaacgaatgatttcgactc

SEQ ID NO: 24349 - DNA, 20 bp, Homo Sapiens
tagtttaaattagaatctta

SEQ ID NO: 24350 - DNA, 23 bp, Homo Sapiens
tagtttaaattagaatcttagct

SEQ ID NO: 24351 - DNA, 24 bp, Homo Sapiens
tagtttaaattagaatcttagctt

SEQ ID NO: 24352 - DNA, 26 bp, Homo Sapiens
tagtttaaattagaatcttagctttg

SEQ ID NO: 24353 - DNA, 27 bp, Homo Sapiens
tagtttaaattagaatcttagctttgg

SEQ ID NO: 24354 - DNA, 36 bp, Homo Sapiens
tagtttaaattagaatcttagctttgggtgctaatg

SEQ ID NO: 24355 - DNA, 25 bp, Homo Sapiens
tagtttaaccaaaacatcagattgt

SEQ ID NO: 24356 - DNA, 26 bp, Homo Sapiens
tagtttaaccaaaacatcagattgtg

SEQ ID NO: 24357 - DNA, 27 bp, Homo Sapiens
tagtttaaccaaaacatcagattgtga

SEQ ID NO: 24358 - DNA, 29 bp, Homo Sapiens
tagtttaaccaaaacatcagattgtgaat

SEQ ID NO: 24359 - DNA, 30 bp, Homo Sapiens
tagtttaaccaaaacatcagattgtgaatc

SEQ ID NO: 24360 - DNA, 31 bp, Homo Sapiens
tagtttaaccaaaacatcagattgtgaatct

SEQ ID NO: 24361 - DNA, 33 bp, Homo Sapiens
tagtttaaccaaaacatcagattgtgaatctga

SEQ ID NO: 24362 - DNA, 35 bp, Homo Sapiens
tagtttaaccaaaacatcagattgtgaatctgaca

SEQ ID NO: 24363 - DNA, 26 bp, Homo Sapiens
tagttttgacaacattcaaaaaagag

SEQ ID NO: 24364 - DNA, 27 bp, Homo Sapiens
tagttttgacaacattcaaaaaagagt

SEQ ID NO: 24365 - DNA, 28 bp, Homo Sapiens
tagttttgacaacattcaaaaaagagta

SEQ ID NO: 24366 - DNA, 29 bp, Homo Sapiens
tagttttgacaacattcaaaaaagagtac

SEQ ID NO: 24367 - DNA, 30 bp, Homo Sapiens
tagttttgacaacattcaaaaaagagtacc

SEQ ID NO: 24368 - DNA, 31 bp, Homo Sapiens
tagttttgacaacattcaaaaaagagtacca

SEQ ID NO: 24369 - DNA, 19 bp, Homo Sapiens
tataaatagtaccgttaac

SEQ ID NO: 24370 - DNA, 20 bp, Homo Sapiens
tataaatagtaccgttaact

SEQ ID NO: 24371 - DNA, 21 bp, Homo Sapiens
tataaatagtaccgttaactt

SEQ ID NO: 24372 - DNA, 22 bp, Homo Sapiens
tataaatagtaccgttaacttc

SEQ ID NO: 24373 - DNA, 23 bp, Homo Sapiens
tataaatagtaccgttaacttcc

SEQ ID NO: 24374 - DNA, 24 bp, Homo Sapiens
tataaatagtaccgttaacttcca

SEQ ID NO: 24375 - DNA, 28 bp, Homo Sapiens
tataaatagtaccgttaacttccaatta

SEQ ID NO: 24376 - DNA, 40 bp, Homo Sapiens
tataaatagtaccgttaacttccaattaactagttttgac

SEQ ID NO: 24377 - DNA, 18 bp, Homo Sapiens
tataatgccgaggttgtg

SEQ ID NO: 24378 - DNA, 23 bp, Homo Sapiens
tataatgccgaggttgtgagttc

SEQ ID NO: 24379 - DNA, 24 bp, Homo Sapiens
tataatgccgaggttgtgagttcg

SEQ ID NO: 24380 - DNA, 33 bp, Homo Sapiens
tataatgccgaggttgtgagttcgagcctcacc

SEQ ID NO: 24381 - DNA, 34 bp, Homo Sapiens
tataatgccgaggttgtgagttcgagcctcacct

SEQ ID NO: 24382 - DNA, 35 bp, Homo Sapiens
tataatgccgaggttgtgagttcgagcctcacctg

SEQ ID NO: 24383 - DNA, 42 bp, Homo Sapiens
tataatgccgaggttgtgagttcgagcctcacctggagcacc

SEQ ID NO: 24384 - DNA, 42 bp, Homo Sapiens
tataatgccgaggttgtgagttcgatcctcacctggagcacc

SEQ ID NO: 24385 - DNA, 16 bp, Homo Sapiens
tatacccttcccgtac

SEQ ID NO: 24386 - DNA, 17 bp, Homo Sapiens
tatacccttcccgtact

SEQ ID NO: 24387 - DNA, 18 bp, Homo Sapiens
tatacccttcccgtacta

SEQ ID NO: 24388 - DNA, 19 bp, Homo Sapiens
tatacccttcccgtactac

SEQ ID NO: 24389 - DNA, 20 bp, Homo Sapiens
tatacccttcccgtactacc

SEQ ID NO: 24390 - DNA, 21 bp, Homo Sapiens
tatacccttcccgtactacca

SEQ ID NO: 24391 - DNA, 27 bp, Homo Sapiens
tatagctcaggggtagagcatttgact

SEQ ID NO: 24392 - DNA, 29 bp, Homo Sapiens
tatagctcaggggtagagcatttgactgc

SEQ ID NO: 24393 - DNA, 32 bp, Homo Sapiens
tatagctcaggggtagagcatttgactgcaga

SEQ ID NO: 24394 - DNA, 24 bp, Homo Sapiens
tatagctcaggggttagagcactg

SEQ ID NO: 24395 - DNA, 28 bp, Homo Sapiens
tatagctcaggggttagagcactggtct

SEQ ID NO: 24396 - DNA, 18 bp, Homo Sapiens
tatagctcagtggtagag

SEQ ID NO: 24397 - DNA, 27 bp, Homo Sapiens
tatagctcagtggtagagcatttgact

SEQ ID NO: 24398 - DNA, 28 bp, Homo Sapiens
tatagctcagtggtagagcatttgactg

SEQ ID NO: 24399 - DNA, 29 bp, Homo Sapiens
tatagctcagtggtagagcatttgactgc

SEQ ID NO: 24400 - DNA, 30 bp, Homo Sapiens
tatagctcagtggtagagcatttgactgca

SEQ ID NO: 24401 - DNA, 47 bp, Homo Sapiens
tatagctcagtggtagagcatttgactgcagatcaagaggtccccgg

SEQ ID NO: 24402 - DNA, 27 bp, Homo Sapiens
tatagcttagcggtagagcatttgact

SEQ ID NO: 24403 - DNA, 27 bp, Homo Sapiens
tataggctaaatcctatatatcttacc

SEQ ID NO: 24404 - DNA, 21 bp, Homo Sapiens
tatagtggtaagcatagctgc

SEQ ID NO: 24405 - DNA, 23 bp, Homo Sapiens
tatagtggtaagcatagctgcct

SEQ ID NO: 24406 - DNA, 21 bp, Homo Sapiens
tatagtggtgagcatagctgc

SEQ ID NO: 24407 - DNA, 22 bp, Homo Sapiens
tatagtggtgagcatagctgcc

SEQ ID NO: 24408 - DNA, 23 bp, Homo Sapiens
tatagtggtgagcatagctgcct

SEQ ID NO: 24409 - DNA, 26 bp, Homo Sapiens
tatagtggtgagcatagctgccttcc

SEQ ID NO: 24410 - DNA, 39 bp, Homo Sapiens
tatagtggtgagcatagctgccttccaagcagttgaccc

SEQ ID NO: 24411 - DNA, 43 bp, Homo Sapiens
tatagtggtgagcatagctgccttccaagcagttgacccgggt

SEQ ID NO: 24412 - DNA, 45 bp, Homo Sapiens
tatagtggtgagcatagctgccttccaagcagttgacccgggttc

SEQ ID NO: 24413 - DNA, 16 bp, Homo Sapiens
tatagtggtgagtatc

SEQ ID NO: 24414 - DNA, 18 bp, Homo Sapiens
tatagtggtgagtatccc

SEQ ID NO: 24415 - DNA, 19 bp, Homo Sapiens
tatagtggttagcatagct

SEQ ID NO: 24416 - DNA, 21 bp, Homo Sapiens
tatagtggttagcatagctgc

SEQ ID NO: 24417 - DNA, 22 bp, Homo Sapiens
tatagtggttagcatagctgcc

SEQ ID NO: 24418 - DNA, 23 bp, Homo Sapiens
tatagtggttagcatagctgcct

SEQ ID NO: 24419 - DNA, 26 bp, Homo Sapiens
tatagtggttagcatagctgccttcc

SEQ ID NO: 24420 - DNA, 42 bp, Homo Sapiens
tatagtggttagcatagctgccttccaagcagttgacccggg

SEQ ID NO: 24421 - DNA, 16 bp, Homo Sapiens
tatagtggttagtact

SEQ ID NO: 24422 - DNA, 17 bp, Homo Sapiens
tatagtggttagtactc

SEQ ID NO: 24423 - DNA, 18 bp, Homo Sapiens
tatagtggttagtactct

SEQ ID NO: 24424 - DNA, 19 bp, Homo Sapiens
tatagtggttagtactctg

SEQ ID NO: 24425 - DNA, 20 bp, Homo Sapiens
tatagtggttagtactctgc

SEQ ID NO: 24426 - DNA, 21 bp, Homo Sapiens
tatagtggttagtactctgcg

SEQ ID NO: 24427 - DNA, 22 bp, Homo Sapiens
tatagtggttagtactctgcgt

SEQ ID NO: 24428 - DNA, 23 bp, Homo Sapiens
tatagtggttagtactctgcgtt

SEQ ID NO: 24429 - DNA, 24 bp, Homo Sapiens
tatagtggttagtactctgcgttg

SEQ ID NO: 24430 - DNA, 25 bp, Homo Sapiens
tatagtggttagtactctgcgttgt

SEQ ID NO: 24431 - DNA, 26 bp, Homo Sapiens
tatagtggttagtactctgcgttgtg

SEQ ID NO: 24432 - DNA, 28 bp, Homo Sapiens
tatagtggttagtactctgcgttgtggc

SEQ ID NO: 24433 - DNA, 29 bp, Homo Sapiens
tatagtggttagtactctgcgttgtggcc

SEQ ID NO: 24434 - DNA, 30 bp, Homo Sapiens
tatagtggttagtactctgcgttgtggccg

SEQ ID NO: 24435 - DNA, 38 bp, Homo Sapiens
tatagtggttagtactctgcgttgtggccgcagcaacc

SEQ ID NO: 24436 - DNA, 39 bp, Homo Sapiens
tatagtggttagtactctgcgttgtggccgcagcaacct

SEQ ID NO: 24437 - DNA, 43 bp, Homo Sapiens
tatagtggttagtactctgcgttgtggccgcagcaacctcggt

SEQ ID NO: 24438 - DNA, 17 bp, Homo Sapiens
tatagtggttagtatcc

SEQ ID NO: 24439 - DNA, 18 bp, Homo Sapiens
tatagtggttagtatccc

SEQ ID NO: 24440 - DNA, 31 bp, Homo Sapiens
tatagtttaaacaaaacgaatgatttcgact

SEQ ID NO: 24441 - DNA, 27 bp, Homo Sapiens
tatagtttaaccaaaacatcagattgt

SEQ ID NO: 24442 - DNA, 28 bp, Homo Sapiens
tatagtttaaccaaaacatcagattgtg

SEQ ID NO: 24443 - DNA, 29 bp, Homo Sapiens
tatagtttaaccaaaacatcagattgtga

SEQ ID NO: 24444 - DNA, 32 bp, Homo Sapiens
tatagtttaaccaaaacatcagattgtgaatc

SEQ ID NO: 24445 - DNA, 37 bp, Homo Sapiens
tatagtttaaccaaaacatcagattgtgaatctgaca

SEQ ID NO: 24446 - DNA, 32 bp, Homo Sapiens
tatatagtttaaacaaaacgaatgatttcgac

SEQ ID NO: 24447 - DNA, 33 bp, Homo Sapiens
tatatagtttaaacaaaacgaatgatttcgact

SEQ ID NO: 24448 - DNA, 20 bp, Homo Sapiens
tatcacgtctgctttacacg

SEQ ID NO: 24449 - DNA, 21 bp, Homo Sapiens
tatcacgtctgctttacacgc

SEQ ID NO: 24450 - DNA, 17 bp, Homo Sapiens
tatcacgttcgcctcac

SEQ ID NO: 24451 - DNA, 20 bp, Homo Sapiens
tatcacgttcgcctcacacg

SEQ ID NO: 24452 - DNA, 21 bp, Homo Sapiens
tatcacgttcgcctcacacgc

SEQ ID NO: 24453 - DNA, 22 bp, Homo Sapiens
tatcacgttcgcctcacacgcg

SEQ ID NO: 24454 - DNA, 24 bp, Homo Sapiens
tatcatgcaagattcccattcttg

SEQ ID NO: 24455 - DNA, 32 bp, Homo Sapiens
tatcatgcaagattcccattcttgcgacccgg

SEQ ID NO: 24456 - DNA, 34 bp, Homo Sapiens
tatcatgcaagattcccattcttgcgacccgggt

SEQ ID NO: 24457 - DNA, 37 bp, Homo Sapiens
tatcatgcaagattcccattcttgcgacccgggttcg

SEQ ID NO: 24458 - DNA, 17 bp, Homo Sapiens
tatcattggtcgtggtt

SEQ ID NO: 24459 - DNA, 18 bp, Homo Sapiens
tatcattggtcgtggttg

SEQ ID NO: 24460 - DNA, 19 bp, Homo Sapiens
tatcattggtcgtggttgt

SEQ ID NO: 24461 - DNA, 20 bp, Homo Sapiens
tatcattggtcgtggttgta

SEQ ID NO: 24462 - DNA, 21 bp, Homo Sapiens
tatcattggtcgtggttgtag

SEQ ID NO: 24463 - DNA, 22 bp, Homo Sapiens
tatcattggtcgtggttgtagt

SEQ ID NO: 24464 - DNA, 23 bp, Homo Sapiens
tatcattggtcgtggttgtagtc

SEQ ID NO: 24465 - DNA, 24 bp, Homo Sapiens
tatcattggtcgtggttgtagtcc

SEQ ID NO: 24466 - DNA, 25 bp, Homo Sapiens
tatcattggtcgtggttgtagtccg

SEQ ID NO: 24467 - DNA, 26 bp, Homo Sapiens
tatcattggtcgtggttgtagtccgt

SEQ ID NO: 24468 - DNA, 27 bp, Homo Sapiens
tatcattggtcgtggttgtagtccgtg

SEQ ID NO: 24469 - DNA, 28 bp, Homo Sapiens
tatcattggtcgtggttgtagtccgtgc

SEQ ID NO: 24470 - DNA, 29 bp, Homo Sapiens
tatcattggtcgtggttgtagtccgtgcg

SEQ ID NO: 24471 - DNA, 30 bp, Homo Sapiens
tatcattggtcgtggttgtagtccgtgcga

SEQ ID NO: 24472 - DNA, 31 bp, Homo Sapiens
tatcattggtcgtggttgtagtccgtgcgag

SEQ ID NO: 24473 - DNA, 32 bp, Homo Sapiens
tatcattggtcgtggttgtagtccgtgcgaga

SEQ ID NO: 24474 - DNA, 33 bp, Homo Sapiens
tatcattggtcgtggttgtagtccgtgcgagaa

SEQ ID NO: 24475 - DNA, 34 bp, Homo Sapiens
tatcattggtcgtggttgtagtccgtgcgagaat

SEQ ID NO: 24476 - DNA, 35 bp, Homo Sapiens
tatcattggtcgtggttgtagtccgtgcgagaata

SEQ ID NO: 24477 - DNA, 36 bp, Homo Sapiens
tatcattggtcgtggttgtagtccgtgcgagaatac

SEQ ID NO: 24478 - DNA, 37 bp, Homo Sapiens
tatcattggtcgtggttgtagtccgtgcgagaatacc

SEQ ID NO: 24479 - DNA, 38 bp, Homo Sapiens
tatcattggtcgtggttgtagtccgtgcgagaatacca

SEQ ID NO: 24480 - DNA, 16 bp, Homo Sapiens
tatccattggtcttag

SEQ ID NO: 24481 - DNA, 18 bp, Homo Sapiens
tatccattggtcttaggc

SEQ ID NO: 24482 - DNA, 19 bp, Homo Sapiens
tatccattggtcttaggcc

SEQ ID NO: 24483 - DNA, 20 bp, Homo Sapiens
tatccattggtcttaggccc

SEQ ID NO: 24484 - DNA, 21 bp, Homo Sapiens
tatccattggtcttaggcccc

SEQ ID NO: 24485 - DNA, 22 bp, Homo Sapiens
tatccattggtcttaggcccca

SEQ ID NO: 24486 - DNA, 24 bp, Homo Sapiens
tatccattggtcttaggccccaaa

SEQ ID NO: 24487 - DNA, 25 bp, Homo Sapiens
tatccattggtcttaggccccaaaa

SEQ ID NO: 24488 - DNA, 26 bp, Homo Sapiens
tatccattggtcttaggccccaaaaa

SEQ ID NO: 24489 - DNA, 27 bp, Homo Sapiens
tatccattggtcttaggccccaaaaat

SEQ ID NO: 24490 - DNA, 28 bp, Homo Sapiens
tatccattggtcttaggccccaaaaatt

SEQ ID NO: 24491 - DNA, 32 bp, Homo Sapiens
tatccattggtcttaggccccaaaaattttgg

SEQ ID NO: 24492 - DNA, 33 bp, Homo Sapiens
tatccattggtcttaggccccaaaaattttggt

SEQ ID NO: 24493 - DNA, 34 bp, Homo Sapiens
tatccattggtcttaggccccaaaaattttggtg

SEQ ID NO: 24494 - DNA, 36 bp, Homo Sapiens
tatccattggtcttaggccccaaaaattttggtgca

SEQ ID NO: 24495 - DNA, 39 bp, Homo Sapiens
tatccattggtcttaggccccaaaaattttggtgcaact

SEQ ID NO: 24496 - DNA, 40 bp, Homo Sapiens
tatccattggtcttaggccccaaaaattttggtgcaactc

SEQ ID NO: 24497 - DNA, 41 bp, Homo Sapiens
tatccattggtcttaggccccaaaaattttggtgcaactcc

SEQ ID NO: 24498 - DNA, 42 bp, Homo Sapiens
tatccattggtcttaggccccaaaaattttggtgcaactcca

SEQ ID NO: 24499 - DNA, 44 bp, Homo Sapiens
tatccattggtcttaggccccaaaaattttggtgcaactccaaa

SEQ ID NO: 24500 - DNA, 46 bp, Homo Sapiens
tatccattggtcttaggccccaaaaattttggtgcaactccaaata

SEQ ID NO: 24501 - DNA, 29 bp, Homo Sapiens
tatccgcgtgggttcgaaccccacttctg

SEQ ID NO: 24502 - DNA, 16 bp, Homo Sapiens
tatcgggcccataccc

SEQ ID NO: 24503 - DNA, 17 bp, Homo Sapiens
tatcgggcccatacccc

SEQ ID NO: 24504 - DNA, 18 bp, Homo Sapiens
tatcgggcccataccccg

SEQ ID NO: 24505 - DNA, 19 bp, Homo Sapiens
tatcgggcccataccccga

SEQ ID NO: 24506 - DNA, 20 bp, Homo Sapiens
tatcgggcccataccccgaa

SEQ ID NO: 24507 - DNA, 21 bp, Homo Sapiens
tatcgggcccataccccgaaa

SEQ ID NO: 24508 - DNA, 22 bp, Homo Sapiens
tatcgggcccataccccgaaaa

SEQ ID NO: 24509 - DNA, 23 bp, Homo Sapiens
tatcgggcccataccccgaaaat

SEQ ID NO: 24510 - DNA, 24 bp, Homo Sapiens
tatcgggcccataccccgaaaatg

SEQ ID NO: 24511 - DNA, 25 bp, Homo Sapiens
tatcgggcccataccccgaaaatgt

SEQ ID NO: 24512 - DNA, 26 bp, Homo Sapiens
tatcgggcccataccccgaaaatgtt

SEQ ID NO: 24513 - DNA, 27 bp, Homo Sapiens
tatcgggcccataccccgaaaatgttg

SEQ ID NO: 24514 - DNA, 28 bp, Homo Sapiens
tatcgggcccataccccgaaaatgttgg

SEQ ID NO: 24515 - DNA, 29 bp, Homo Sapiens
tatcgggcccataccccgaaaatgttggt

SEQ ID NO: 24516 - DNA, 30 bp, Homo Sapiens
tatcgggcccataccccgaaaatgttggtt

SEQ ID NO: 24517 - DNA, 31 bp, Homo Sapiens
tatcgggcccataccccgaaaatgttggtta

SEQ ID NO: 24518 - DNA, 32 bp, Homo Sapiens
tatcgggcccataccccgaaaatgttggttat

SEQ ID NO: 24519 - DNA, 33 bp, Homo Sapiens
tatcgggcccataccccgaaaatgttggttata

SEQ ID NO: 24520 - DNA, 34 bp, Homo Sapiens
tatcgggcccataccccgaaaatgttggttatac

SEQ ID NO: 24521 - DNA, 35 bp, Homo Sapiens
tatcgggcccataccccgaaaatgttggttatacc

SEQ ID NO: 24522 - DNA, 36 bp, Homo Sapiens
tatcgggcccataccccgaaaatgttggttataccc

SEQ ID NO: 24523 - DNA, 37 bp, Homo Sapiens
tatcgggcccataccccgaaaatgttggttataccct

SEQ ID NO: 24524 - DNA, 39 bp, Homo Sapiens
tatcgggcccataccccgaaaatgttggttatacccttc

SEQ ID NO: 24525 - DNA, 40 bp, Homo Sapiens
tatcgggcccataccccgaaaatgttggttatacccttcc

SEQ ID NO: 24526 - DNA, 41 bp, Homo Sapiens
tatcgggcccataccccgaaaatgttggttatacccttccc

SEQ ID NO: 24527 - DNA, 42 bp, Homo Sapiens
tatcgggcccataccccgaaaatgttggttatacccttcccg

SEQ ID NO: 24528 - DNA, 44 bp, Homo Sapiens
tatcgggcccataccccgaaaatgttggttatacccttcccgta

SEQ ID NO: 24529 - DNA, 33 bp, Homo Sapiens
tatgaggccccgggttcaatccccggcatctcc

SEQ ID NO: 24530 - DNA, 34 bp, Homo Sapiens
tatgaggccccgggttcaatccccggcatctcca

SEQ ID NO: 24531 - DNA, 35 bp, Homo Sapiens
tatgaggccccgggttcaatccccggcatctccac

SEQ ID NO: 24532 - DNA, 36 bp, Homo Sapiens
tatgaggccccgggttcaatccccggcatctccacc

SEQ ID NO: 24533 - DNA, 31 bp, Homo Sapiens
tatgaggccccgggttcgatccccggcatct

SEQ ID NO: 24534 - DNA, 35 bp, Homo Sapiens
tatgaggccccgggttcgatccccggcatctccac

SEQ ID NO: 24535 - DNA, 36 bp, Homo Sapiens
tatgaggccccgggttcgatccccggcatctccacc

SEQ ID NO: 24536 - DNA, 37 bp, Homo Sapiens
tatgaggccccgggttcgatccccggcatctccacca

SEQ ID NO: 24537 - DNA, 35 bp, Homo Sapiens
tatgaggtcccgggttcgatccccggcatctccac

SEQ ID NO: 24538 - DNA, 36 bp, Homo Sapiens
tatgaggtcccgggttcgatccccggcatctccacc

SEQ ID NO: 24539 - DNA, 19 bp, Homo Sapiens
tatgataatcatatttacc

SEQ ID NO: 24540 - DNA, 22 bp, Homo Sapiens
tatgataatcatatttaccaac

SEQ ID NO: 24541 - DNA, 23 bp, Homo Sapiens
tatgataatcatatttaccaacc

SEQ ID NO: 24542 - DNA, 24 bp, Homo Sapiens
tatgataatcatatttaccaacca

SEQ ID NO: 24543 - DNA, 16 bp, Homo Sapiens
tatgattctcgcttcg

SEQ ID NO: 24544 - DNA, 17 bp, Homo Sapiens
tatgattctcgcttcgg

SEQ ID NO: 24545 - DNA, 22 bp, Homo Sapiens
tatgattctcgcttcgggtgcg

SEQ ID NO: 24546 - DNA, 23 bp, Homo Sapiens
tatgattctcgcttcgggtgcga

SEQ ID NO: 24547 - DNA, 33 bp, Homo Sapiens
tatgattctcgcttcgggtgcgagaggtcccgg

SEQ ID NO: 24548 - DNA, 35 bp, Homo Sapiens
tatgattctcgcttcgggtgcgagaggtcccgggt

SEQ ID NO: 24549 - DNA, 35 bp, Homo Sapiens
tatgattctcgcttcgggtgtgagaggtcccgggt

SEQ ID NO: 24550 - DNA, 17 bp, Homo Sapiens
tatgattctcgctttgg

SEQ ID NO: 24551 - DNA, 33 bp, Homo Sapiens
tatgattctcgctttgggtgcgagaggtcccgg

SEQ ID NO: 24552 - DNA, 16 bp, Homo Sapiens
tatgattctcggtttg

SEQ ID NO: 24553 - DNA, 17 bp, Homo Sapiens
tatgattctcggtttgg

SEQ ID NO: 24554 - DNA, 21 bp, Homo Sapiens
tatgattctcggtttgggtcc

SEQ ID NO: 24555 - DNA, 22 bp, Homo Sapiens
tatgattctcggtttgggtccg

SEQ ID NO: 24556 - DNA, 23 bp, Homo Sapiens
tatgattctcggtttgggtccga

SEQ ID NO: 24557 - DNA, 25 bp, Homo Sapiens
tatgattctcggtttgggtccgaga

SEQ ID NO: 24558 - DNA, 32 bp, Homo Sapiens
tatgattctcggtttgggtccgagaggtcccg

SEQ ID NO: 24559 - DNA, 33 bp, Homo Sapiens
tatgattctcggtttgggtccgagaggtcccgg

SEQ ID NO: 24560 - DNA, 35 bp, Homo Sapiens
tatgattctcggtttgggtccgagaggtcccgggt

SEQ ID NO: 24561 - DNA, 34 bp, Homo Sapiens
tatggaggcgtgggttcgaatcccacttctgaca

SEQ ID NO: 24562 - DNA, 36 bp, Homo Sapiens
tatggaggcgtgggttcgaatcccacttctgacacc

SEQ ID NO: 24563 - DNA, 37 bp, Homo Sapiens
tatggaggcgtgggttcgaatcccacttctgacacca

SEQ ID NO: 24564 - DNA, 20 bp, Homo Sapiens
tatggtctagcggttaggat

SEQ ID NO: 24565 - DNA, 21 bp, Homo Sapiens
tatggtctagcggttaggatt

SEQ ID NO: 24566 - DNA, 23 bp, Homo Sapiens
tatggtctagcggttaggattcc

SEQ ID NO: 24567 - DNA, 24 bp, Homo Sapiens
tatggtctagcggttaggattcct

SEQ ID NO: 24568 - DNA, 26 bp, Homo Sapiens
tatggtctagcggttaggattcctgg

SEQ ID NO: 24569 - DNA, 27 bp, Homo Sapiens
tatggtctagcggttaggattcctggt

SEQ ID NO: 24570 - DNA, 28 bp, Homo Sapiens
tatggtctagcggttaggattcctggtt

SEQ ID NO: 24571 - DNA, 29 bp, Homo Sapiens
tatggtctagcggttaggattcctggttt

SEQ ID NO: 24572 - DNA, 30 bp, Homo Sapiens
tatggtctagcggttaggattcctggtttt

SEQ ID NO: 24573 - DNA, 31 bp, Homo Sapiens
tatggtctagcggttaggattcctggttttc

SEQ ID NO: 24574 - DNA, 37 bp, Homo Sapiens
tatggtctagcggttaggattcctggttttcacccag

SEQ ID NO: 24575 - DNA, 16 bp, Homo Sapiens
tatgtagcttacctcc

SEQ ID NO: 24576 - DNA, 17 bp, Homo Sapiens
tatgtagcttacctcct

SEQ ID NO: 24577 - DNA, 34 bp, Homo Sapiens
tatgtagcttacctcctcaaagcaatacactgaa

SEQ ID NO: 24578 - DNA, 16 bp, Homo Sapiens
tatgtccgcgtgggtt

SEQ ID NO: 24579 - DNA, 18 bp, Homo Sapiens
tatgtccgcgtgggttcg

SEQ ID NO: 24580 - DNA, 19 bp, Homo Sapiens
tatgtccgcgtgggttcga

SEQ ID NO: 24581 - DNA, 21 bp, Homo Sapiens
tatgtccgcgtgggttcgaac

SEQ ID NO: 24582 - DNA, 22 bp, Homo Sapiens
tatgtccgcgtgggttcgaacc

SEQ ID NO: 24583 - DNA, 23 bp, Homo Sapiens
tatgtccgcgtgggttcgaaccc

SEQ ID NO: 24584 - DNA, 24 bp, Homo Sapiens
tatgtccgcgtgggttcgaacccc

SEQ ID NO: 24585 - DNA, 25 bp, Homo Sapiens
tatgtccgcgtgggttcgaacccca

SEQ ID NO: 24586 - DNA, 27 bp, Homo Sapiens
tatgtccgcgtgggttcgaaccccact

SEQ ID NO: 24587 - DNA, 28 bp, Homo Sapiens
tatgtccgcgtgggttcgaaccccactc

SEQ ID NO: 24588 - DNA, 30 bp, Homo Sapiens
tatgtccgcgtgggttcgaaccccactcct

SEQ ID NO: 24589 - DNA, 31 bp, Homo Sapiens
tatgtccgcgtgggttcgaaccccactcctg

SEQ ID NO: 24590 - DNA, 32 bp, Homo Sapiens
tatgtccgcgtgggttcgaaccccactcctgg

SEQ ID NO: 24591 - DNA, 33 bp, Homo Sapiens
tatgtccgcgtgggttcgaaccccactcctggt

SEQ ID NO: 24592 - DNA, 34 bp, Homo Sapiens
tatgtccgcgtgggttcgaaccccactcctggta

SEQ ID NO: 24593 - DNA, 35 bp, Homo Sapiens
tatgtccgcgtgggttcgaaccccactcctggtac

SEQ ID NO: 24594 - DNA, 36 bp, Homo Sapiens
tatgtccgcgtgggttcgaaccccactcctggtacc

SEQ ID NO: 24595 - DNA, 37 bp, Homo Sapiens
tatgtccgcgtgggttcgaaccccactcctggtacca

SEQ ID NO: 24596 - DNA, 29 bp, Homo Sapiens
tattagaaaaaccatttcataactttgtc

SEQ ID NO: 24597 - DNA, 17 bp, Homo Sapiens
tattgaattgcaaattc

SEQ ID NO: 24598 - DNA, 27 bp, Homo Sapiens
tattgaattgcaaattcgaagaagcag

SEQ ID NO: 24599 - DNA, 28 bp, Homo Sapiens
tattgaattgcaaattcgaagaagcagc

SEQ ID NO: 24600 - DNA, 30 bp, Homo Sapiens
tattgaattgcaaattcgaagaagcagctt

SEQ ID NO: 24601 - DNA, 32 bp, Homo Sapiens
tattgaattgcaaattcgaagaagcagcttca

SEQ ID NO: 24602 - DNA, 38 bp, Homo Sapiens
tattgaattgcaaattcgaagaagcagcttcaaacctg

SEQ ID NO: 24603 - DNA, 44 bp, Homo Sapiens
tattgaattgcaaattcgaagaagcagcttcaaacctgccgggg

SEQ ID NO: 24604 - DNA, 45 bp, Homo Sapiens
tattgaattgcaaattcgaagaagcagcttcaaacctgccggggc

SEQ ID NO: 24605 - DNA, 46 bp, Homo Sapiens
tattgaattgcaaattcgaagaagcagcttcaaacctgccggggct

SEQ ID NO: 24606 - DNA, 47 bp, Homo Sapiens
tattgaattgcaaattcgaagaagcagcttcaaacctgccggggctt

SEQ ID NO: 24607 - DNA, 48 bp, Homo Sapiens
tattgaattgcaaattcgaagaagcagcttcaaacctgccggggcttc

SEQ ID NO: 24608 - DNA, 16 bp, Homo Sapiens
tcaaaaaagagtacca

SEQ ID NO: 24609 - DNA, 19 bp, Homo Sapiens
tcaaaaccaggcggaaaca

SEQ ID NO: 24610 - DNA, 20 bp, Homo Sapiens
tcaaaaccaggcggaaacac

SEQ ID NO: 24611 - DNA, 22 bp, Homo Sapiens
tcaaaaccaggcggaaacacca

SEQ ID NO: 24612 - DNA, 16 bp, Homo Sapiens
tcaaacctgccggggc

SEQ ID NO: 24613 - DNA, 17 bp, Homo Sapiens
tcaaacctgccggggct

SEQ ID NO: 24614 - DNA, 18 bp, Homo Sapiens
tcaaacctgccggggctt

SEQ ID NO: 24615 - DNA, 19 bp, Homo Sapiens
tcaaacctgccggggcttc

SEQ ID NO: 24616 - DNA, 20 bp, Homo Sapiens
tcaaacctgccggggcttcc

SEQ ID NO: 24617 - DNA, 21 bp, Homo Sapiens
tcaaacctgccggggcttcca

SEQ ID NO: 24618 - DNA, 16 bp, Homo Sapiens
tcaaagcaatacactg

SEQ ID NO: 24619 - DNA, 17 bp, Homo Sapiens
tcaaagcaatacactga

SEQ ID NO: 24620 - DNA, 18 bp, Homo Sapiens
tcaaagcaatacactgaa

SEQ ID NO: 24621 - DNA, 29 bp, Homo Sapiens
tcaaagcaatacactgaaaatgtttagac

SEQ ID NO: 24622 - DNA, 30 bp, Homo Sapiens
tcaaagcaatacactgaaaatgtttagacg

SEQ ID NO: 24623 - DNA, 31 bp, Homo Sapiens
tcaaagcaatacactgaaaatgtttagacgg

SEQ ID NO: 24624 - DNA, 33 bp, Homo Sapiens
tcaaagcaatacactgaaaatgtttagacgggc

SEQ ID NO: 24625 - DNA, 34 bp, Homo Sapiens
tcaaagcaatacactgaaaatgtttagacgggct

SEQ ID NO: 24626 - DNA, 35 bp, Homo Sapiens
tcaaagcaatacactgaaaatgtttagacgggctc

SEQ ID NO: 24627 - DNA, 36 bp, Homo Sapiens
tcaaagcaatacactgaaaatgtttagacgggctca

SEQ ID NO: 24628 - DNA, 37 bp, Homo Sapiens
tcaaagcaatacactgaaaatgtttagacgggctcac

SEQ ID NO: 24629 - DNA, 38 bp, Homo Sapiens
tcaaagcaatacactgaaaatgtttagacgggctcaca

SEQ ID NO: 24630 - DNA, 39 bp, Homo Sapiens
tcaaagcaatacactgaaaatgtttagacgggctcacat

SEQ ID NO: 24631 - DNA, 43 bp, Homo Sapiens
tcaaagcaatacactgaaaatgtttagacgggctcacatcacc

SEQ ID NO: 24632 - DNA, 44 bp, Homo Sapiens
tcaaagcaatacactgaaaatgtttagacgggctcacatcaccc

SEQ ID NO: 24633 - DNA, 21 bp, Homo Sapiens
tcaaagccctcagtaagttgc

SEQ ID NO: 24634 - DNA, 23 bp, Homo Sapiens
tcaaagccctcagtaagttgcaa

SEQ ID NO: 24635 - DNA, 27 bp, Homo Sapiens
tcaaagccctcagtaagttgcaatact

SEQ ID NO: 24636 - DNA, 28 bp, Homo Sapiens
tcaaagccctcagtaagttgcaatactt

SEQ ID NO: 24637 - DNA, 38 bp, Homo Sapiens
tcaaagccctcagtaagttgcaatacttaatttctgcc

SEQ ID NO: 24638 - DNA, 39 bp, Homo Sapiens
tcaaagccctcagtaagttgcaatacttaatttctgcca

SEQ ID NO: 24639 - DNA, 18 bp, Homo Sapiens
tcaaaggttccgggttcg

SEQ ID NO: 24640 - DNA, 32 bp, Homo Sapiens
tcaaaggttccgggttcgagtcccggcggagt

SEQ ID NO: 24641 - DNA, 33 bp, Homo Sapiens
tcaaaggttccgggttcgagtcccggcggagtc

SEQ ID NO: 24642 - DNA, 34 bp, Homo Sapiens
tcaaaggttccgggttcgagtcccggcggagtcg

SEQ ID NO: 24643 - DNA, 35 bp, Homo Sapiens
tcaaaggttccgggttcgagtcccggcggagtcgc

SEQ ID NO: 24644 - DNA, 36 bp, Homo Sapiens
tcaaaggttccgggttcgagtcccggcggagtcgcc

SEQ ID NO: 24645 - DNA, 37 bp, Homo Sapiens
tcaaaggttccgggttcgagtcccggcggagtcgcca

SEQ ID NO: 24646 - DNA, 35 bp, Homo Sapiens
tcaaaggttgtgggttcgaatcccaccagagtcgc

SEQ ID NO: 24647 - DNA, 36 bp, Homo Sapiens
tcaaaggttgtgggttcgaatcccaccagagtcgcc

SEQ ID NO: 24648 - DNA, 37 bp, Homo Sapiens
tcaaaggttgtgggttcgaatcccaccagagtcgcca

SEQ ID NO: 24649 - DNA, 35 bp, Homo Sapiens
tcaaaggttgtgggttcgagtcccaccagagtcgc

SEQ ID NO: 24650 - DNA, 36 bp, Homo Sapiens
tcaaaggttgtgggttcgagtcccaccagagtcgcc

SEQ ID NO: 24651 - DNA, 37 bp, Homo Sapiens
tcaaaggttgtgggttcgagtcccaccagagtcgcca

SEQ ID NO: 24652 - DNA, 17 bp, Homo Sapiens
tcaaagttaaattatag

SEQ ID NO: 24653 - DNA, 18 bp, Homo Sapiens
tcaaagttaaattatagg

SEQ ID NO: 24654 - DNA, 19 bp, Homo Sapiens
tcaaagttaaattataggc

SEQ ID NO: 24655 - DNA, 20 bp, Homo Sapiens
tcaaagttaaattataggct

SEQ ID NO: 24656 - DNA, 21 bp, Homo Sapiens
tcaaagttaaattataggcta

SEQ ID NO: 24657 - DNA, 22 bp, Homo Sapiens
tcaaagttaaattataggctaa

SEQ ID NO: 24658 - DNA, 23 bp, Homo Sapiens
tcaaagttaaattataggctaaa

SEQ ID NO: 24659 - DNA, 24 bp, Homo Sapiens
tcaaagttaaattataggctaaat

SEQ ID NO: 24660 - DNA, 25 bp, Homo Sapiens
tcaaagttaaattataggctaaatc

SEQ ID NO: 24661 - DNA, 26 bp, Homo Sapiens
tcaaagttaaattataggctaaatcc

SEQ ID NO: 24662 - DNA, 27 bp, Homo Sapiens
tcaaagttaaattataggctaaatcct

SEQ ID NO: 24663 - DNA, 28 bp, Homo Sapiens
tcaaagttaaattataggctaaatccta

SEQ ID NO: 24664 - DNA, 30 bp, Homo Sapiens
tcaaagttaaattataggctaaatcctata

SEQ ID NO: 24665 - DNA, 31 bp, Homo Sapiens
tcaaagttaaattataggctaaatcctatat

SEQ ID NO: 24666 - DNA, 32 bp, Homo Sapiens
tcaaagttaaattataggctaaatcctatata

SEQ ID NO: 24667 - DNA, 33 bp, Homo Sapiens
tcaaagttaaattataggctaaatcctatatat

SEQ ID NO: 24668 - DNA, 34 bp, Homo Sapiens
tcaaagttaaattataggctaaatcctatatatc

SEQ ID NO: 24669 - DNA, 35 bp, Homo Sapiens
tcaaagttaaattataggctaaatcctatatatct

SEQ ID NO: 24670 - DNA, 36 bp, Homo Sapiens
tcaaagttaaattataggctaaatcctatatatctt

SEQ ID NO: 24671 - DNA, 38 bp, Homo Sapiens
tcaaagttaaattataggctaaatcctatatatcttac

SEQ ID NO: 24672 - DNA, 39 bp, Homo Sapiens
tcaaagttaaattataggctaaatcctatatatcttacc

SEQ ID NO: 24673 - DNA, 40 bp, Homo Sapiens
tcaaagttaaattataggctaaatcctatatatcttacca

SEQ ID NO: 24674 - DNA, 21 bp, Homo Sapiens
tcaaatcacgtcggggtcacc

SEQ ID NO: 24675 - DNA, 22 bp, Homo Sapiens
tcaaatcacgtcggggtcacca

SEQ ID NO: 24676 - DNA, 16 bp, Homo Sapiens
tcaaatcccggacgag

SEQ ID NO: 24677 - DNA, 17 bp, Homo Sapiens
tcaaatcccggacgagc

SEQ ID NO: 24678 - DNA, 18 bp, Homo Sapiens
tcaaatcccggacgagcc

SEQ ID NO: 24679 - DNA, 19 bp, Homo Sapiens
tcaaatcccggacgagccc

SEQ ID NO: 24680 - DNA, 20 bp, Homo Sapiens
tcaaatcccggacgagcccc

SEQ ID NO: 24681 - DNA, 21 bp, Homo Sapiens
tcaaatcccggacgagccccc

SEQ ID NO: 24682 - DNA, 22 bp, Homo Sapiens
tcaaatcccggacgagccccca

SEQ ID NO: 24683 - DNA, 20 bp, Homo Sapiens
tcaaatccgggtgccccctc

SEQ ID NO: 24684 - DNA, 21 bp, Homo Sapiens
tcaaatccgggtgccccctcc

SEQ ID NO: 24685 - DNA, 22 bp, Homo Sapiens
tcaaatccgggtgccccctcca

SEQ ID NO: 24686 - DNA, 16 bp, Homo Sapiens
tcaaatctcgctgggg

SEQ ID NO: 24687 - DNA, 19 bp, Homo Sapiens
tcaaatctcgctggggcct

SEQ ID NO: 24688 - DNA, 20 bp, Homo Sapiens
tcaaatctcgctggggcctc

SEQ ID NO: 24689 - DNA, 21 bp, Homo Sapiens
tcaaatctcgctggggcctcc

SEQ ID NO: 24690 - DNA, 22 bp, Homo Sapiens
tcaaatctcgctggggcctcca

SEQ ID NO: 24691 - DNA, 18 bp, Homo Sapiens
tcaaatctcggtggaacc

SEQ ID NO: 24692 - DNA, 19 bp, Homo Sapiens
tcaaatctcggtggaacct

SEQ ID NO: 24693 - DNA, 20 bp, Homo Sapiens
tcaaatctcggtggaacctc

SEQ ID NO: 24694 - DNA, 21 bp, Homo Sapiens
tcaaatctcggtggaacctcc

SEQ ID NO: 24695 - DNA, 22 bp, Homo Sapiens
tcaaatctcggtggaacctcca

SEQ ID NO: 24696 - DNA, 18 bp, Homo Sapiens
tcaaatctcggtgggacc

SEQ ID NO: 24697 - DNA, 19 bp, Homo Sapiens
tcaaatctcggtgggacct

SEQ ID NO: 24698 - DNA, 20 bp, Homo Sapiens
tcaaatctcggtgggacctc

SEQ ID NO: 24699 - DNA, 21 bp, Homo Sapiens
tcaaatctcggtgggacctcc

SEQ ID NO: 24700 - DNA, 22 bp, Homo Sapiens
tcaaatctcggtgggacctcca

SEQ ID NO: 24701 - DNA, 22 bp, Homo Sapiens
tcaaatggtagagcgctcgctt

SEQ ID NO: 24702 - DNA, 16 bp, Homo Sapiens
tcaacttaacttgacc

SEQ ID NO: 24703 - DNA, 17 bp, Homo Sapiens
tcaacttaacttgaccg

SEQ ID NO: 24704 - DNA, 18 bp, Homo Sapiens
tcaacttaacttgaccgc

SEQ ID NO: 24705 - DNA, 19 bp, Homo Sapiens
tcaacttaacttgaccgct

SEQ ID NO: 24706 - DNA, 20 bp, Homo Sapiens
tcaacttaacttgaccgctc

SEQ ID NO: 24707 - DNA, 21 bp, Homo Sapiens
tcaacttaacttgaccgctct

SEQ ID NO: 24708 - DNA, 22 bp, Homo Sapiens
tcaacttaacttgaccgctctg

SEQ ID NO: 24709 - DNA, 23 bp, Homo Sapiens
tcaacttaacttgaccgctctga

SEQ ID NO: 24710 - DNA, 24 bp, Homo Sapiens
tcaacttaacttgaccgctctgac

SEQ ID NO: 24711 - DNA, 25 bp, Homo Sapiens
tcaacttaacttgaccgctctgacc

SEQ ID NO: 24712 - DNA, 26 bp, Homo Sapiens
tcaacttaacttgaccgctctgacca

SEQ ID NO: 24713 - DNA, 37 bp, Homo Sapiens
tcaagaagtccccggttcaaatccgggtgccccctcc

SEQ ID NO: 24714 - DNA, 17 bp, Homo Sapiens
tcaagaggtccccggtt

SEQ ID NO: 24715 - DNA, 35 bp, Homo Sapiens
tcaagaggtccccggttcaaatccgggtgccccct

SEQ ID NO: 24716 - DNA, 36 bp, Homo Sapiens
tcaagaggtccccggttcaaatccgggtgccccctc

SEQ ID NO: 24717 - DNA, 37 bp, Homo Sapiens
tcaagaggtccccggttcaaatccgggtgccccctcc

SEQ ID NO: 24718 - DNA, 18 bp, Homo Sapiens
tcaagaggtccctggttc

SEQ ID NO: 24719 - DNA, 35 bp, Homo Sapiens
tcaagaggtccctggttcaaatccaggtgccccct

SEQ ID NO: 24720 - DNA, 36 bp, Homo Sapiens
tcaagaggtccctggttcaaatccaggtgccccctc

SEQ ID NO: 24721 - DNA, 37 bp, Homo Sapiens
tcaagaggtccctggttcaaatccaggtgccccctcc

SEQ ID NO: 24722 - DNA, 35 bp, Homo Sapiens
tcaagaggtccctggttcaaatccgggtgccccct

SEQ ID NO: 24723 - DNA, 36 bp, Homo Sapiens
tcaagaggtccctggttcaaatccgggtgccccctc

SEQ ID NO: 24724 - DNA, 37 bp, Homo Sapiens
tcaagaggtccctggttcaaatccgggtgccccctcc

SEQ ID NO: 24725 - DNA, 21 bp, Homo Sapiens
tcaagcctcacctggagcacc

SEQ ID NO: 24726 - DNA, 21 bp, Homo Sapiens
tcaagtcacgtcggggtcacc

SEQ ID NO: 24727 - DNA, 22 bp, Homo Sapiens
tcaagtcacgtcggggtcacca

SEQ ID NO: 24728 - DNA, 22 bp, Homo Sapiens
tcaagtccctgtccaggcgcca

SEQ ID NO: 24729 - DNA, 19 bp, Homo Sapiens
tcaagtccctgttcgggcg

SEQ ID NO: 24730 - DNA, 21 bp, Homo Sapiens
tcaagtccctgttcgggcgcc

SEQ ID NO: 24731 - DNA, 22 bp, Homo Sapiens
tcaagtccctgttcgggcgcca

SEQ ID NO: 24732 - DNA, 16 bp, Homo Sapiens
tcaagttctggtctcc

SEQ ID NO: 24733 - DNA, 20 bp, Homo Sapiens
tcaagttctggtctccaatg

SEQ ID NO: 24734 - DNA, 17 bp, Homo Sapiens
tcaagttctggtctccg

SEQ ID NO: 24735 - DNA, 18 bp, Homo Sapiens
tcaagttctggtctccgg

SEQ ID NO: 24736 - DNA, 19 bp, Homo Sapiens
tcaagttctggtctccgga

SEQ ID NO: 24737 - DNA, 20 bp, Homo Sapiens
tcaagttctggtctccggat

SEQ ID NO: 24738 - DNA, 21 bp, Homo Sapiens
tcaagttctggtctccggatg

SEQ ID NO: 24739 - DNA, 20 bp, Homo Sapiens
tcaatccccggcacctccac

SEQ ID NO: 24740 - DNA, 21 bp, Homo Sapiens
tcaatccccggcacctccacc

SEQ ID NO: 24741 - DNA, 22 bp, Homo Sapiens
tcaatccccggcacctccacca

SEQ ID NO: 24742 - DNA, 17 bp, Homo Sapiens
tcaatccccggcatctc

SEQ ID NO: 24743 - DNA, 22 bp, Homo Sapiens
tcaatccccggcatctccacca

SEQ ID NO: 24744 - DNA, 19 bp, Homo Sapiens
tcaatcccgggtttcggca

SEQ ID NO: 24745 - DNA, 20 bp, Homo Sapiens
tcaatcccgggtttcggcac

SEQ ID NO: 24746 - DNA, 22 bp, Homo Sapiens
tcaatcccgggtttcggcacca

SEQ ID NO: 24747 - DNA, 21 bp, Homo Sapiens
tcaatggtagaattctcgcct

SEQ ID NO: 24748 - DNA, 20 bp, Homo Sapiens
tcaattccccgacggggagc

SEQ ID NO: 24749 - DNA, 21 bp, Homo Sapiens
tcaattccccgacggggagcc

SEQ ID NO: 24750 - DNA, 22 bp, Homo Sapiens
tcaattccccgacggggagcca

SEQ ID NO: 24751 - DNA, 22 bp, Homo Sapiens
tcaattcccggccaatgcacca

SEQ ID NO: 24752 - DNA, 19 bp, Homo Sapiens
tcaattctcgctggggcct

SEQ ID NO: 24753 - DNA, 22 bp, Homo Sapiens
tcaattctcgctggggcctcca

SEQ ID NO: 24754 - DNA, 16 bp, Homo Sapiens
tcacaagaactgctaa

SEQ ID NO: 24755 - DNA, 17 bp, Homo Sapiens
tcacaagaactgctaac

SEQ ID NO: 24756 - DNA, 18 bp, Homo Sapiens
tcacaagaactgctaact

SEQ ID NO: 24757 - DNA, 19 bp, Homo Sapiens
tcacaagaactgctaactc

SEQ ID NO: 24758 - DNA, 20 bp, Homo Sapiens
tcacaagaactgctaactca

SEQ ID NO: 24759 - DNA, 21 bp, Homo Sapiens
tcacaagaactgctaactcat

SEQ ID NO: 24760 - DNA, 22 bp, Homo Sapiens
tcacaagaactgctaactcatg

SEQ ID NO: 24761 - DNA, 23 bp, Homo Sapiens
tcacaagaactgctaactcatgc

SEQ ID NO: 24762 - DNA, 24 bp, Homo Sapiens
tcacaagaactgctaactcatgcc

SEQ ID NO: 24763 - DNA, 25 bp, Homo Sapiens
tcacaagaactgctaactcatgccc

SEQ ID NO: 24764 - DNA, 26 bp, Homo Sapiens
tcacaagaactgctaactcatgcccc

SEQ ID NO: 24765 - DNA, 27 bp, Homo Sapiens
tcacaagaactgctaactcatgccccc

SEQ ID NO: 24766 - DNA, 28 bp, Homo Sapiens
tcacaagaactgctaactcatgccccca

SEQ ID NO: 24767 - DNA, 29 bp, Homo Sapiens
tcacaagaactgctaactcatgcccccat

SEQ ID NO: 24768 - DNA, 30 bp, Homo Sapiens
tcacaagaactgctaactcatgcccccatg

SEQ ID NO: 24769 - DNA, 31 bp, Homo Sapiens
tcacaagaactgctaactcatgcccccatgt

SEQ ID NO: 24770 - DNA, 32 bp, Homo Sapiens
tcacaagaactgctaactcatgcccccatgtc

SEQ ID NO: 24771 - DNA, 33 bp, Homo Sapiens
tcacaagaactgctaactcatgcccccatgtct

SEQ ID NO: 24772 - DNA, 34 bp, Homo Sapiens
tcacaagaactgctaactcatgcccccatgtcta

SEQ ID NO: 24773 - DNA, 35 bp, Homo Sapiens
tcacaagaactgctaactcatgcccccatgtctaa

SEQ ID NO: 24774 - DNA, 36 bp, Homo Sapiens
tcacaagaactgctaactcatgcccccatgtctaac

SEQ ID NO: 24775 - DNA, 37 bp, Homo Sapiens
tcacaagaactgctaactcatgcccccatgtctaaca

SEQ ID NO: 24776 - DNA, 39 bp, Homo Sapiens
tcacaagaactgctaactcatgcccccatgtctaacaac

SEQ ID NO: 24777 - DNA, 40 bp, Homo Sapiens
tcacaagaactgctaactcatgcccccatgtctaacaaca

SEQ ID NO: 24778 - DNA, 41 bp, Homo Sapiens
tcacaagaactgctaactcatgcccccatgtctaacaacat

SEQ ID NO: 24779 - DNA, 42 bp, Homo Sapiens
tcacaagaactgctaactcatgcccccatgtctaacaacatg

SEQ ID NO: 24780 - DNA, 43 bp, Homo Sapiens
tcacaagaactgctaactcatgcccccatgtctaacaacatgg

SEQ ID NO: 24781 - DNA, 44 bp, Homo Sapiens
tcacaagaactgctaactcatgcccccatgtctaacaacatggc

SEQ ID NO: 24782 - DNA, 45 bp, Homo Sapiens
tcacaagaactgctaactcatgcccccatgtctaacaacatggct

SEQ ID NO: 24783 - DNA, 46 bp, Homo Sapiens
tcacaagaactgctaactcatgcccccatgtctaacaacatggctt

SEQ ID NO: 24784 - DNA, 47 bp, Homo Sapiens
tcacaagaactgctaactcatgcccccatgtctaacaacatggcttt

SEQ ID NO: 24785 - DNA, 48 bp, Homo Sapiens
tcacaagaactgctaactcatgcccccatgtctaacaacatggctttc

SEQ ID NO: 24786 - DNA, 22 bp, Homo Sapiens
tcacacgcgaaaggtccccggt

SEQ ID NO: 24787 - DNA, 25 bp, Homo Sapiens
tcacacgcgaaaggtccccggttcg

SEQ ID NO: 24788 - DNA, 26 bp, Homo Sapiens
tcacacgcgaaaggtccccggttcga

SEQ ID NO: 24789 - DNA, 24 bp, Homo Sapiens
tcacacgcgaaaggtccccggttt

SEQ ID NO: 24790 - DNA, 16 bp, Homo Sapiens
tcacatcaccccataa

SEQ ID NO: 24791 - DNA, 17 bp, Homo Sapiens
tcacatcaccccataaa

SEQ ID NO: 24792 - DNA, 18 bp, Homo Sapiens
tcacatcaccccataaac

SEQ ID NO: 24793 - DNA, 19 bp, Homo Sapiens
tcacatcaccccataaaca

SEQ ID NO: 24794 - DNA, 20 bp, Homo Sapiens
tcacatcaccccataaacac

SEQ ID NO: 24795 - DNA, 21 bp, Homo Sapiens
tcacatcaccccataaacacc

SEQ ID NO: 24796 - DNA, 22 bp, Homo Sapiens
tcacatcaccccataaacacca

SEQ ID NO: 24797 - DNA, 30 bp, Homo Sapiens
tcacccaggcggcccgggttcgactcccgg

SEQ ID NO: 24798 - DNA, 31 bp, Homo Sapiens
tcacccaggcggcccgggttcgactcccggt

SEQ ID NO: 24799 - DNA, 32 bp, Homo Sapiens
tcacccaggcggcccgggttcgactcccggtg

SEQ ID NO: 24800 - DNA, 34 bp, Homo Sapiens
tcacccaggcggcccgggttcgactcccggtgtg

SEQ ID NO: 24801 - DNA, 35 bp, Homo Sapiens
tcacccaggcggcccgggttcgactcccggtgtgg

SEQ ID NO: 24802 - DNA, 36 bp, Homo Sapiens
tcacccaggcggcccgggttcgactcccggtgtggg

SEQ ID NO: 24803 - DNA, 37 bp, Homo Sapiens
tcacccaggcggcccgggttcgactcccggtgtggga

SEQ ID NO: 24804 - DNA, 38 bp, Homo Sapiens
tcacccaggcggcccgggttcgactcccggtgtgggaa

SEQ ID NO: 24805 - DNA, 39 bp, Homo Sapiens
tcacccaggcggcccgggttcgactcccggtgtgggaac

SEQ ID NO: 24806 - DNA, 40 bp, Homo Sapiens
tcacccaggcggcccgggttcgactcccggtgtgggaacc

SEQ ID NO: 24807 - DNA, 41 bp, Homo Sapiens
tcacccaggcggcccgggttcgactcccggtgtgggaacca

SEQ ID NO: 24808 - DNA, 38 bp, Homo Sapiens
tcacccaggtggcccgggttcgactcccggtatgggaa

SEQ ID NO: 24809 - DNA, 39 bp, Homo Sapiens
tcacccaggtggcccgggttcgactcccggtatgggaac

SEQ ID NO: 24810 - DNA, 40 bp, Homo Sapiens
tcacccaggtggcccgggttcgactcccggtatgggaacc

SEQ ID NO: 24811 - DNA, 41 bp, Homo Sapiens
tcacccaggtggcccgggttcgactcccggtatgggaacca

SEQ ID NO: 24812 - DNA, 16 bp, Homo Sapiens
tcaccccataaacacc

SEQ ID NO: 24813 - DNA, 17 bp, Homo Sapiens
tcaccccataaacacca

SEQ ID NO: 24814 - DNA, 16 bp, Homo Sapiens
tcaccgccgcggcccg

SEQ ID NO: 24815 - DNA, 17 bp, Homo Sapiens
tcaccgccgcggcccgg

SEQ ID NO: 24816 - DNA, 19 bp, Homo Sapiens
tcaccgccgcggcccgggt

SEQ ID NO: 24817 - DNA, 20 bp, Homo Sapiens
tcaccgccgcggcccgggtt

SEQ ID NO: 24818 - DNA, 21 bp, Homo Sapiens
tcaccgccgcggcccgggttc

SEQ ID NO: 24819 - DNA, 22 bp, Homo Sapiens
tcaccgccgcggcccgggttcg

SEQ ID NO: 24820 - DNA, 24 bp, Homo Sapiens
tcaccgccgcggcccgggttcgat

SEQ ID NO: 24821 - DNA, 25 bp, Homo Sapiens
tcaccgccgcggcccgggttcgatt

SEQ ID NO: 24822 - DNA, 41 bp, Homo Sapiens
tcaccgccgcggcccgggttcgattcccggccagggaacca

SEQ ID NO: 24823 - DNA, 31 bp, Homo Sapiens
tcaccgccgcggcccgggttcgattcccggt

SEQ ID NO: 24824 - DNA, 32 bp, Homo Sapiens
tcaccgccgcggcccgggttcgattcccggtc

SEQ ID NO: 24825 - DNA, 33 bp, Homo Sapiens
tcaccgccgcggcccgggttcgattcccggtca

SEQ ID NO: 24826 - DNA, 34 bp, Homo Sapiens
tcaccgccgcggcccgggttcgattcccggtcag

SEQ ID NO: 24827 - DNA, 35 bp, Homo Sapiens
tcaccgccgcggcccgggttcgattcccggtcagg

SEQ ID NO: 24828 - DNA, 41 bp, Homo Sapiens
tcaccgccgcggcccgggttcgattcccggtcaggaaacca

SEQ ID NO: 24829 - DNA, 36 bp, Homo Sapiens
tcaccgccgcggcccgggttcgattcccggtcaggg

SEQ ID NO: 24830 - DNA, 37 bp, Homo Sapiens
tcaccgccgcggcccgggttcgattcccggtcaggga

SEQ ID NO: 24831 - DNA, 38 bp, Homo Sapiens
tcaccgccgcggcccgggttcgattcccggtcagggaa

SEQ ID NO: 24832 - DNA, 39 bp, Homo Sapiens
tcaccgccgcggcccgggttcgattcccggtcagggaac

SEQ ID NO: 24833 - DNA, 40 bp, Homo Sapiens
tcaccgccgcggcccgggttcgattcccggtcagggaacc

SEQ ID NO: 24834 - DNA, 41 bp, Homo Sapiens
tcaccgccgcggcccgggttcgattcccggtcagggaacca

SEQ ID NO: 24835 - DNA, 21 bp, Homo Sapiens
tcacgcgggagaccggggttc

SEQ ID NO: 24836 - DNA, 30 bp, Homo Sapiens
tcacgcgggagaccggggttcaattccccg

SEQ ID NO: 24837 - DNA, 31 bp, Homo Sapiens
tcacgcgggagaccggggttcaattccccga

SEQ ID NO: 24838 - DNA, 32 bp, Homo Sapiens
tcacgcgggagaccggggttcaattccccgac

SEQ ID NO: 24839 - DNA, 33 bp, Homo Sapiens
tcacgcgggagaccggggttcaattccccgacg

SEQ ID NO: 24840 - DNA, 34 bp, Homo Sapiens
tcacgcgggagaccggggttcaattccccgacgg

SEQ ID NO: 24841 - DNA, 35 bp, Homo Sapiens
tcacgcgggagaccggggttcaattccccgacggg

SEQ ID NO: 24842 - DNA, 36 bp, Homo Sapiens
tcacgcgggagaccggggttcaattccccgacgggg

SEQ ID NO: 24843 - DNA, 37 bp, Homo Sapiens
tcacgcgggagaccggggttcaattccccgacgggga

SEQ ID NO: 24844 - DNA, 38 bp, Homo Sapiens
tcacgcgggagaccggggttcaattccccgacggggag

SEQ ID NO: 24845 - DNA, 39 bp, Homo Sapiens
tcacgcgggagaccggggttcaattccccgacggggagc

SEQ ID NO: 24846 - DNA, 40 bp, Homo Sapiens
tcacgcgggagaccggggttcaattccccgacggggagcc

SEQ ID NO: 24847 - DNA, 41 bp, Homo Sapiens
tcacgcgggagaccggggttcaattccccgacggggagcca

SEQ ID NO: 24848 - DNA, 23 bp, Homo Sapiens
tcacgcgggagaccggggttcga

SEQ ID NO: 24849 - DNA, 29 bp, Homo Sapiens
tcacgcgggagaccggggttcgattcccc

SEQ ID NO: 24850 - DNA, 30 bp, Homo Sapiens
tcacgcgggagaccggggttcgattccccg

SEQ ID NO: 24851 - DNA, 31 bp, Homo Sapiens
tcacgcgggagaccggggttcgattccccga

SEQ ID NO: 24852 - DNA, 32 bp, Homo Sapiens
tcacgcgggagaccggggttcgattccccgac

SEQ ID NO: 24853 - DNA, 33 bp, Homo Sapiens
tcacgcgggagaccggggttcgattccccgacg

SEQ ID NO: 24854 - DNA, 34 bp, Homo Sapiens
tcacgcgggagaccggggttcgattccccgacgg

SEQ ID NO: 24855 - DNA, 35 bp, Homo Sapiens
tcacgcgggagaccggggttcgattccccgacggg

SEQ ID NO: 24856 - DNA, 36 bp, Homo Sapiens
tcacgcgggagaccggggttcgattccccgacgggg

SEQ ID NO: 24857 - DNA, 37 bp, Homo Sapiens
tcacgcgggagaccggggttcgattccccgacgggga

SEQ ID NO: 24858 - DNA, 38 bp, Homo Sapiens
tcacgcgggagaccggggttcgattccccgacggggag

SEQ ID NO: 24859 - DNA, 39 bp, Homo Sapiens
tcacgcgggagaccggggttcgattccccgacggggagc

SEQ ID NO: 24860 - DNA, 40 bp, Homo Sapiens
tcacgcgggagaccggggttcgattccccgacggggagcc

SEQ ID NO: 24861 - DNA, 41 bp, Homo Sapiens
tcacgcgggagaccggggttcgattccccgacggggagcca

SEQ ID NO: 24862 - DNA, 16 bp, Homo Sapiens
tcacgtcggggtcacc

SEQ ID NO: 24863 - DNA, 17 bp, Homo Sapiens
tcacgtcggggtcacca

SEQ ID NO: 24864 - DNA, 18 bp, Homo Sapiens
tcacgtctgctttacacg

SEQ ID NO: 24865 - DNA, 19 bp, Homo Sapiens
tcacgtctgctttacacgc

SEQ ID NO: 24866 - DNA, 30 bp, Homo Sapiens
tcacgtctgctttacacgcagaaggtcctg

SEQ ID NO: 24867 - DNA, 16 bp, Homo Sapiens
tcacgttcgcctcaca

SEQ ID NO: 24868 - DNA, 18 bp, Homo Sapiens
tcacgttcgcctcacacg

SEQ ID NO: 24869 - DNA, 32 bp, Homo Sapiens
tcacgttcgcctcacacgcgaaaggtccccgg

SEQ ID NO: 24870 - DNA, 16 bp, Homo Sapiens
tcagaagattccaggt

SEQ ID NO: 24871 - DNA, 18 bp, Homo Sapiens
tcagaagattccaggttc

SEQ ID NO: 24872 - DNA, 19 bp, Homo Sapiens
tcagaagattccaggttcg

SEQ ID NO: 24873 - DNA, 21 bp, Homo Sapiens
tcagaagattccaggttcgac

SEQ ID NO: 24874 - DNA, 22 bp, Homo Sapiens
tcagaagattccaggttcgact

SEQ ID NO: 24875 - DNA, 29 bp, Homo Sapiens
tcagaagattccaggttcgactcctggct

SEQ ID NO: 24876 - DNA, 32 bp, Homo Sapiens
tcagaagattccaggttcgactcctggctggc

SEQ ID NO: 24877 - DNA, 33 bp, Homo Sapiens
tcagaagattccaggttcgactcctggctggct

SEQ ID NO: 24878 - DNA, 34 bp, Homo Sapiens
tcagaagattccaggttcgactcctggctggctc

SEQ ID NO: 24879 - DNA, 35 bp, Homo Sapiens
tcagaagattccaggttcgactcctggctggctcg

SEQ ID NO: 24880 - DNA, 36 bp, Homo Sapiens
tcagaagattccaggttcgactcctggctggctcgc

SEQ ID NO: 24881 - DNA, 37 bp, Homo Sapiens
tcagaagattccaggttcgactcctggctggctcgcc

SEQ ID NO: 24882 - DNA, 38 bp, Homo Sapiens
tcagaagattccaggttcgactcctggctggctcgcca

SEQ ID NO: 24883 - DNA, 18 bp, Homo Sapiens
tcagaagattctaggttc

SEQ ID NO: 24884 - DNA, 22 bp, Homo Sapiens
tcagaagattctaggttcgact

SEQ ID NO: 24885 - DNA, 28 bp, Homo Sapiens
tcagaagattctaggttcgactcctggc

SEQ ID NO: 24886 - DNA, 30 bp, Homo Sapiens
tcagaagattctaggttcgactcctggctg

SEQ ID NO: 24887 - DNA, 32 bp, Homo Sapiens
tcagaagattctaggttcgactcctggctggc

SEQ ID NO: 24888 - DNA, 33 bp, Homo Sapiens
tcagaagattctaggttcgactcctggctggct

SEQ ID NO: 24889 - DNA, 34 bp, Homo Sapiens
tcagaagattctaggttcgactcctggctggctc

SEQ ID NO: 24890 - DNA, 35 bp, Homo Sapiens
tcagaagattctaggttcgactcctggctggctcg

SEQ ID NO: 24891 - DNA, 36 bp, Homo Sapiens
tcagaagattctaggttcgactcctggctggctcgc

SEQ ID NO: 24892 - DNA, 37 bp, Homo Sapiens
tcagaagattctaggttcgactcctggctggctcgcc

SEQ ID NO: 24893 - DNA, 38 bp, Homo Sapiens
tcagaagattctaggttcgactcctggctggctcgcca

SEQ ID NO: 24894 - DNA, 17 bp, Homo Sapiens
tcagaagattgagggtt

SEQ ID NO: 24895 - DNA, 18 bp, Homo Sapiens
tcagaagattgagggttc

SEQ ID NO: 24896 - DNA, 19 bp, Homo Sapiens
tcagaagattgagggttcg

SEQ ID NO: 24897 - DNA, 33 bp, Homo Sapiens
tcagaagattgagggttcgaatccctccgtggt

SEQ ID NO: 24898 - DNA, 35 bp, Homo Sapiens
tcagaagattgagggttcgaatccctccgtggtta

SEQ ID NO: 24899 - DNA, 36 bp, Homo Sapiens
tcagaagattgagggttcgaatccctccgtggttac

SEQ ID NO: 24900 - DNA, 37 bp, Homo Sapiens
tcagaagattgagggttcgaatccctccgtggttacc

SEQ ID NO: 24901 - DNA, 35 bp, Homo Sapiens
tcagaagattgagggttcgaatcccttcgtggtta

SEQ ID NO: 24902 - DNA, 36 bp, Homo Sapiens
tcagaagattgagggttcgaatcccttcgtggttac

SEQ ID NO: 24903 - DNA, 37 bp, Homo Sapiens
tcagaagattgagggttcgaatcccttcgtggttacc

SEQ ID NO: 24904 - DNA, 35 bp, Homo Sapiens
tcagaagattgagggttcgaatcccttcgtggttg

SEQ ID NO: 24905 - DNA, 36 bp, Homo Sapiens
tcagaagattgagggttcgaatcccttcgtggttgc

SEQ ID NO: 24906 - DNA, 37 bp, Homo Sapiens
tcagaagattgagggttcgaatcccttcgtggttgcc

SEQ ID NO: 24907 - DNA, 38 bp, Homo Sapiens
tcagaagattgagggttcgaatcccttcgtggttgcca

SEQ ID NO: 24908 - DNA, 32 bp, Homo Sapiens
tcagaagattgagggttcgagtcccttcgtgg

SEQ ID NO: 24909 - DNA, 34 bp, Homo Sapiens
tcagaagattgagggttcgagtcccttcgtggtc

SEQ ID NO: 24910 - DNA, 35 bp, Homo Sapiens
tcagaagattgagggttcgagtcccttcgtggtcg

SEQ ID NO: 24911 - DNA, 36 bp, Homo Sapiens
tcagaagattgagggttcgagtcccttcgtggtcgc

SEQ ID NO: 24912 - DNA, 37 bp, Homo Sapiens
tcagaagattgagggttcgagtcccttcgtggtcgcc

SEQ ID NO: 24913 - DNA, 38 bp, Homo Sapiens
tcagaagattgagggttcgagtcccttcgtggtcgcca

SEQ ID NO: 24914 - DNA, 18 bp, Homo Sapiens
tcagaagattgcaggttc

SEQ ID NO: 24915 - DNA, 19 bp, Homo Sapiens
tcagaagattgcaggttcg

SEQ ID NO: 24916 - DNA, 22 bp, Homo Sapiens
tcagaagattgcaggttcgagt

SEQ ID NO: 24917 - DNA, 23 bp, Homo Sapiens
tcagaagattgcaggttcgagtc

SEQ ID NO: 24918 - DNA, 29 bp, Homo Sapiens
tcagaagattgcaggttcgagtcctgccg

SEQ ID NO: 24919 - DNA, 33 bp, Homo Sapiens
tcagaagattgcaggttcgagtcctgccgcggt

SEQ ID NO: 24920 - DNA, 34 bp, Homo Sapiens
tcagaagattgcaggttcgagtcctgccgcggtc

SEQ ID NO: 24921 - DNA, 35 bp, Homo Sapiens
tcagaagattgcaggttcgagtcctgccgcggtcg

SEQ ID NO: 24922 - DNA, 36 bp, Homo Sapiens
tcagaagattgcaggttcgagtcctgccgcggtcgc

SEQ ID NO: 24923 - DNA, 37 bp, Homo Sapiens
tcagaagattgcaggttcgagtcctgccgcggtcgcc

SEQ ID NO: 24924 - DNA, 38 bp, Homo Sapiens
tcagaagattgcaggttcgagtcctgccgcggtcgcca

SEQ ID NO: 24925 - DNA, 16 bp, Homo Sapiens
tcagaaggctgcgtgt

SEQ ID NO: 24926 - DNA, 17 bp, Homo Sapiens
tcagaaggctgcgtgtt

SEQ ID NO: 24927 - DNA, 18 bp, Homo Sapiens
tcagaaggctgcgtgttc

SEQ ID NO: 24928 - DNA, 19 bp, Homo Sapiens
tcagaaggctgcgtgttcg

SEQ ID NO: 24929 - DNA, 23 bp, Homo Sapiens
tcagaaggctgcgtgttcgaatc

SEQ ID NO: 24930 - DNA, 24 bp, Homo Sapiens
tcagaaggctgcgtgttcgaatca

SEQ ID NO: 24931 - DNA, 26 bp, Homo Sapiens
tcagaaggctgcgtgttcgaatcacg

SEQ ID NO: 24932 - DNA, 27 bp, Homo Sapiens
tcagaaggctgcgtgttcgaatcacgt

SEQ ID NO: 24933 - DNA, 28 bp, Homo Sapiens
tcagaaggctgcgtgttcgaatcacgtc

SEQ ID NO: 24934 - DNA, 29 bp, Homo Sapiens
tcagaaggctgcgtgttcgaatcacgtcg

SEQ ID NO: 24935 - DNA, 30 bp, Homo Sapiens
tcagaaggctgcgtgttcgaatcacgtcgg

SEQ ID NO: 24936 - DNA, 31 bp, Homo Sapiens
tcagaaggctgcgtgttcgaatcacgtcggg

SEQ ID NO: 24937 - DNA, 32 bp, Homo Sapiens
tcagaaggctgcgtgttcgaatcacgtcgggg

SEQ ID NO: 24938 - DNA, 33 bp, Homo Sapiens
tcagaaggctgcgtgttcgaatcacgtcggggt

SEQ ID NO: 24939 - DNA, 34 bp, Homo Sapiens
tcagaaggctgcgtgttcgaatcacgtcggggtc

SEQ ID NO: 24940 - DNA, 35 bp, Homo Sapiens
tcagaaggctgcgtgttcgaatcacgtcggggtca

SEQ ID NO: 24941 - DNA, 36 bp, Homo Sapiens
tcagaaggctgcgtgttcgaatcacgtcggggtcac

SEQ ID NO: 24942 - DNA, 37 bp, Homo Sapiens
tcagaaggctgcgtgttcgaatcacgtcggggtcacc

SEQ ID NO: 24943 - DNA, 38 bp, Homo Sapiens
tcagaaggctgcgtgttcgaatcacgtcggggtcacca

SEQ ID NO: 24944 - DNA, 16 bp, Homo Sapiens
tcagaaggttgcgtgt

SEQ ID NO: 24945 - DNA, 18 bp, Homo Sapiens
tcagaaggttgcgtgttc

SEQ ID NO: 24946 - DNA, 19 bp, Homo Sapiens
tcagaaggttgcgtgttca

SEQ ID NO: 24947 - DNA, 23 bp, Homo Sapiens
tcagaaggttgcgtgttcaaatc

SEQ ID NO: 24948 - DNA, 29 bp, Homo Sapiens
tcagaaggttgcgtgttcaaatcacgtcg

SEQ ID NO: 24949 - DNA, 30 bp, Homo Sapiens
tcagaaggttgcgtgttcaaatcacgtcgg

SEQ ID NO: 24950 - DNA, 31 bp, Homo Sapiens
tcagaaggttgcgtgttcaaatcacgtcggg

SEQ ID NO: 24951 - DNA, 33 bp, Homo Sapiens
tcagaaggttgcgtgttcaaatcacgtcggggt

SEQ ID NO: 24952 - DNA, 34 bp, Homo Sapiens
tcagaaggttgcgtgttcaaatcacgtcggggtc

SEQ ID NO: 24953 - DNA, 35 bp, Homo Sapiens
tcagaaggttgcgtgttcaaatcacgtcggggtca

SEQ ID NO: 24954 - DNA, 36 bp, Homo Sapiens
tcagaaggttgcgtgttcaaatcacgtcggggtcac

SEQ ID NO: 24955 - DNA, 37 bp, Homo Sapiens
tcagaaggttgcgtgttcaaatcacgtcggggtcacc

SEQ ID NO: 24956 - DNA, 38 bp, Homo Sapiens
tcagaaggttgcgtgttcaaatcacgtcggggtcacca

SEQ ID NO: 24957 - DNA, 29 bp, Homo Sapiens
tcagaaggttgcgtgttcaagtcacgtcg

SEQ ID NO: 24958 - DNA, 30 bp, Homo Sapiens
tcagaaggttgcgtgttcaagtcacgtcgg

SEQ ID NO: 24959 - DNA, 31 bp, Homo Sapiens
tcagaaggttgcgtgttcaagtcacgtcggg

SEQ ID NO: 24960 - DNA, 32 bp, Homo Sapiens
tcagaaggttgcgtgttcaagtcacgtcgggg

SEQ ID NO: 24961 - DNA, 33 bp, Homo Sapiens
tcagaaggttgcgtgttcaagtcacgtcggggt

SEQ ID NO: 24962 - DNA, 34 bp, Homo Sapiens
tcagaaggttgcgtgttcaagtcacgtcggggtc

SEQ ID NO: 24963 - DNA, 35 bp, Homo Sapiens
tcagaaggttgcgtgttcaagtcacgtcggggtca

SEQ ID NO: 24964 - DNA, 36 bp, Homo Sapiens
tcagaaggttgcgtgttcaagtcacgtcggggtcac

SEQ ID NO: 24965 - DNA, 37 bp, Homo Sapiens
tcagaaggttgcgtgttcaagtcacgtcggggtcacc

SEQ ID NO: 24966 - DNA, 38 bp, Homo Sapiens
tcagaaggttgcgtgttcaagtcacgtcggggtcacca

SEQ ID NO: 24967 - DNA, 17 bp, Homo Sapiens
tcagaggttcaattcct

SEQ ID NO: 24968 - DNA, 16 bp, Homo Sapiens
tcagattgtgaatctg

SEQ ID NO: 24969 - DNA, 17 bp, Homo Sapiens
tcagattgtgaatctga

SEQ ID NO: 24970 - DNA, 18 bp, Homo Sapiens
tcagattgtgaatctgac

SEQ ID NO: 24971 - DNA, 19 bp, Homo Sapiens
tcagattgtgaatctgaca

SEQ ID NO: 24972 - DNA, 24 bp, Homo Sapiens
tcagattgtgaatctgacaacaga

SEQ ID NO: 24973 - DNA, 25 bp, Homo Sapiens
tcagattgtgaatctgacaacagag

SEQ ID NO: 24974 - DNA, 26 bp, Homo Sapiens
tcagattgtgaatctgacaacagagg

SEQ ID NO: 24975 - DNA, 27 bp, Homo Sapiens
tcagattgtgaatctgacaacagaggc

SEQ ID NO: 24976 - DNA, 28 bp, Homo Sapiens
tcagattgtgaatctgacaacagaggct

SEQ ID NO: 24977 - DNA, 29 bp, Homo Sapiens
tcagattgtgaatctgacaacagaggctt

SEQ ID NO: 24978 - DNA, 30 bp, Homo Sapiens
tcagattgtgaatctgacaacagaggctta

SEQ ID NO: 24979 - DNA, 31 bp, Homo Sapiens
tcagattgtgaatctgacaacagaggcttac

SEQ ID NO: 24980 - DNA, 32 bp, Homo Sapiens
tcagattgtgaatctgacaacagaggcttacg

SEQ ID NO: 24981 - DNA, 33 bp, Homo Sapiens
tcagattgtgaatctgacaacagaggcttacga

SEQ ID NO: 24982 - DNA, 34 bp, Homo Sapiens
tcagattgtgaatctgacaacagaggcttacgac

SEQ ID NO: 24983 - DNA, 35 bp, Homo Sapiens
tcagattgtgaatctgacaacagaggcttacgacc

SEQ ID NO: 24984 - DNA, 36 bp, Homo Sapiens
tcagattgtgaatctgacaacagaggcttacgaccc

SEQ ID NO: 24985 - DNA, 37 bp, Homo Sapiens
tcagattgtgaatctgacaacagaggcttacgacccc

SEQ ID NO: 24986 - DNA, 38 bp, Homo Sapiens
tcagattgtgaatctgacaacagaggcttacgacccct

SEQ ID NO: 24987 - DNA, 39 bp, Homo Sapiens
tcagattgtgaatctgacaacagaggcttacgacccctt

SEQ ID NO: 24988 - DNA, 40 bp, Homo Sapiens
tcagattgtgaatctgacaacagaggcttacgacccctta

SEQ ID NO: 24989 - DNA, 41 bp, Homo Sapiens
tcagattgtgaatctgacaacagaggcttacgaccccttat

SEQ ID NO: 24990 - DNA, 42 bp, Homo Sapiens
tcagattgtgaatctgacaacagaggcttacgaccccttatt

SEQ ID NO: 24991 - DNA, 46 bp, Homo Sapiens
tcagattgtgaatctgacaacagaggcttacgaccccttatttacc

SEQ ID NO: 24992 - DNA, 47 bp, Homo Sapiens
tcagattgtgaatctgacaacagaggcttacgaccccttatttaccc

SEQ ID NO: 24993 - DNA, 48 bp, Homo Sapiens
tcagattgtgaatctgacaacagaggcttacgaccccttatttacccc

SEQ ID NO: 24994 - DNA, 19 bp, Homo Sapiens
tcagcactctggactctga

SEQ ID NO: 24995 - DNA, 23 bp, Homo Sapiens
tcagcactctggactctgaatcc

SEQ ID NO: 24996 - DNA, 38 bp, Homo Sapiens
tcagcactctggactctgaatccagcgatccgagttca

SEQ ID NO: 24997 - DNA, 16 bp, Homo Sapiens
tcagcctccggagctg

SEQ ID NO: 24998 - DNA, 24 bp, Homo Sapiens
tcagcctccggagctggggattgt

SEQ ID NO: 24999 - DNA, 31 bp, Homo Sapiens
tcagcctccggagctggggattgtgggttcg

SEQ ID NO: 25000 - DNA, 21 bp, Homo Sapiens
tcagctaaataagctatcggg

SEQ ID NO: 25001 - DNA, 22 bp, Homo Sapiens
tcagctaaataagctatcgggc

SEQ ID NO: 25002 - DNA, 23 bp, Homo Sapiens
tcagctaaataagctatcgggcc

SEQ ID NO: 25003 - DNA, 24 bp, Homo Sapiens
tcagctaaataagctatcgggccc

SEQ ID NO: 25004 - DNA, 25 bp, Homo Sapiens
tcagctaaataagctatcgggccca

SEQ ID NO: 25005 - DNA, 26 bp, Homo Sapiens
tcagctaaataagctatcgggcccat

SEQ ID NO: 25006 - DNA, 27 bp, Homo Sapiens
tcagctaaataagctatcgggcccata

SEQ ID NO: 25007 - DNA, 28 bp, Homo Sapiens
tcagctaaataagctatcgggcccatac

SEQ ID NO: 25008 - DNA, 29 bp, Homo Sapiens
tcagctaaataagctatcgggcccatacc

SEQ ID NO: 25009 - DNA, 30 bp, Homo Sapiens
tcagctaaataagctatcgggcccataccc

SEQ ID NO: 25010 - DNA, 31 bp, Homo Sapiens
tcagctaaataagctatcgggcccatacccc

SEQ ID NO: 25011 - DNA, 35 bp, Homo Sapiens
tcagctaaataagctatcgggcccataccccgaaa

SEQ ID NO: 25012 - DNA, 42 bp, Homo Sapiens
tcagctaaataagctatcgggcccataccccgaaaatgttgg

SEQ ID NO: 25013 - DNA, 43 bp, Homo Sapiens
tcagctaaataagctatcgggcccataccccgaaaatgttggt

SEQ ID NO: 25014 - DNA, 44 bp, Homo Sapiens
tcagctaaataagctatcgggcccataccccgaaaatgttggtt

SEQ ID NO: 25015 - DNA, 46 bp, Homo Sapiens
tcagctaaataagctatcgggcccataccccgaaaatgttggttat

SEQ ID NO: 25016 - DNA, 22 bp, Homo Sapiens
tcagctggtagagcggaggact

SEQ ID NO: 25017 - DNA, 26 bp, Homo Sapiens
tcagctggtagagcggaggactgtag

SEQ ID NO: 25018 - DNA, 16 bp, Homo Sapiens
tcaggatggccgagcg

SEQ ID NO: 25019 - DNA, 17 bp, Homo Sapiens
tcaggatggccgagcgg

SEQ ID NO: 25020 - DNA, 18 bp, Homo Sapiens
tcaggatggccgagcggt

SEQ ID NO: 25021 - DNA, 19 bp, Homo Sapiens
tcaggatggccgagcggtc

SEQ ID NO: 25022 - DNA, 20 bp, Homo Sapiens
tcaggatggccgagcggtct

SEQ ID NO: 25023 - DNA, 21 bp, Homo Sapiens
tcaggatggccgagcggtcta

SEQ ID NO: 25024 - DNA, 23 bp, Homo Sapiens
tcaggatggccgagcggtctaag

SEQ ID NO: 25025 - DNA, 24 bp, Homo Sapiens
tcaggatggccgagcggtctaagg

SEQ ID NO: 25026 - DNA, 25 bp, Homo Sapiens
tcaggatggccgagcggtctaaggc

SEQ ID NO: 25027 - DNA, 29 bp, Homo Sapiens
tcaggatggccgagcggtctaaggcgctg

SEQ ID NO: 25028 - DNA, 30 bp, Homo Sapiens
tcaggatggccgagcggtctaaggcgctgc

SEQ ID NO: 25029 - DNA, 33 bp, Homo Sapiens
tcaggatggccgagcggtctaaggcgctgcgtt

SEQ ID NO: 25030 - DNA, 34 bp, Homo Sapiens
tcaggatggccgagcggtctaaggcgctgcgttc

SEQ ID NO: 25031 - DNA, 36 bp, Homo Sapiens
tcaggatggccgagcggtctaaggcgctgcgttcag

SEQ ID NO: 25032 - DNA, 16 bp, Homo Sapiens
tcaggatggccgagtg

SEQ ID NO: 25033 - DNA, 20 bp, Homo Sapiens
tcaggatggccgagtggtct

SEQ ID NO: 25034 - DNA, 21 bp, Homo Sapiens
tcaggatggccgagtggtcta

SEQ ID NO: 25035 - DNA, 22 bp, Homo Sapiens
tcaggatggccgagtggtctaa

SEQ ID NO: 25036 - DNA, 23 bp, Homo Sapiens
tcaggatggccgagtggtctaag

SEQ ID NO: 25037 - DNA, 25 bp, Homo Sapiens
tcaggatggccgagtggtctaaggc

SEQ ID NO: 25038 - DNA, 34 bp, Homo Sapiens
tcaggatggccgagtggtctaaggcgccagactc

SEQ ID NO: 25039 - DNA, 35 bp, Homo Sapiens
tcaggatggccgagtggtctaaggcgccagactca

SEQ ID NO: 25040 - DNA, 17 bp, Homo Sapiens
tcagggatgggttcgat

SEQ ID NO: 25041 - DNA, 18 bp, Homo Sapiens
tcagggatgggttcgatt

SEQ ID NO: 25042 - DNA, 19 bp, Homo Sapiens
tcagggatgggttcgattc

SEQ ID NO: 25043 - DNA, 20 bp, Homo Sapiens
tcagggatgggttcgattct

SEQ ID NO: 25044 - DNA, 21 bp, Homo Sapiens
tcagggatgggttcgattctc

SEQ ID NO: 25045 - DNA, 22 bp, Homo Sapiens
tcagggatgggttcgattctca

SEQ ID NO: 25046 - DNA, 26 bp, Homo Sapiens
tcagggatgggttcgattctcatagt

SEQ ID NO: 25047 - DNA, 27 bp, Homo Sapiens
tcagggatgggttcgattctcatagtc

SEQ ID NO: 25048 - DNA, 28 bp, Homo Sapiens
tcagggatgggttcgattctcatagtcc

SEQ ID NO: 25049 - DNA, 29 bp, Homo Sapiens
tcagggatgggttcgattctcatagtcct

SEQ ID NO: 25050 - DNA, 31 bp, Homo Sapiens
tcagggatgggttcgattctcatagtcctag

SEQ ID NO: 25051 - DNA, 32 bp, Homo Sapiens
tcagggatgggttcgattctcatagtcctagc

SEQ ID NO: 25052 - DNA, 33 bp, Homo Sapiens
tcagggatgggttcgattctcatagtcctagcc

SEQ ID NO: 25053 - DNA, 34 bp, Homo Sapiens
tcagggatgggttcgattctcatagtcctagcca

SEQ ID NO: 25054 - DNA, 16 bp, Homo Sapiens
tcaggggtagagcatt

SEQ ID NO: 25055 - DNA, 19 bp, Homo Sapiens
tcaggggtagagcatttga

SEQ ID NO: 25056 - DNA, 21 bp, Homo Sapiens
tcaggggtagagcatttgact

SEQ ID NO: 25057 - DNA, 24 bp, Homo Sapiens
tcaggggtagagcatttgactgca

SEQ ID NO: 25058 - DNA, 21 bp, Homo Sapiens
tcaggggttagagcactggtc

SEQ ID NO: 25059 - DNA, 22 bp, Homo Sapiens
tcaggggttagagcactggtct

SEQ ID NO: 25060 - DNA, 17 bp, Homo Sapiens
tcagggtcgtgggttcg

SEQ ID NO: 25061 - DNA, 21 bp, Homo Sapiens
tcagggtcgtgggttcgagcc

SEQ ID NO: 25062 - DNA, 31 bp, Homo Sapiens
tcagggtcgtgggttcgagccccacgttggg

SEQ ID NO: 25063 - DNA, 32 bp, Homo Sapiens
tcagggtcgtgggttcgagccccacgttgggc

SEQ ID NO: 25064 - DNA, 33 bp, Homo Sapiens
tcagggtcgtgggttcgagccccacgttgggcg

SEQ ID NO: 25065 - DNA, 34 bp, Homo Sapiens
tcagggtcgtgggttcgagccccacgttgggcgc

SEQ ID NO: 25066 - DNA, 35 bp, Homo Sapiens
tcagggtcgtgggttcgagccccacgttgggcgcc

SEQ ID NO: 25067 - DNA, 36 bp, Homo Sapiens
tcagggtcgtgggttcgagccccacgttgggcgcca

SEQ ID NO: 25068 - DNA, 17 bp, Homo Sapiens
tcagtaagttgcaatac

SEQ ID NO: 25069 - DNA, 18 bp, Homo Sapiens
tcagtaagttgcaatact

SEQ ID NO: 25070 - DNA, 20 bp, Homo Sapiens
tcagtaagttgcaatactta

SEQ ID NO: 25071 - DNA, 25 bp, Homo Sapiens
tcagtaagttgcaatacttaatttc

SEQ ID NO: 25072 - DNA, 27 bp, Homo Sapiens
tcagtaagttgcaatacttaatttctg

SEQ ID NO: 25073 - DNA, 28 bp, Homo Sapiens
tcagtaagttgcaatacttaatttctgc

SEQ ID NO: 25074 - DNA, 29 bp, Homo Sapiens
tcagtaagttgcaatacttaatttctgcc

SEQ ID NO: 25075 - DNA, 30 bp, Homo Sapiens
tcagtaagttgcaatacttaatttctgcca

SEQ ID NO: 25076 - DNA, 18 bp, Homo Sapiens
tcagtcagtagagcatca

SEQ ID NO: 25077 - DNA, 22 bp, Homo Sapiens
tcagtcgatagagcatgagact

SEQ ID NO: 25078 - DNA, 16 bp, Homo Sapiens
tcagtcggtagagcat

SEQ ID NO: 25079 - DNA, 20 bp, Homo Sapiens
tcagtcggtagagcataaga

SEQ ID NO: 25080 - DNA, 21 bp, Homo Sapiens
tcagtcggtagagcataagac

SEQ ID NO: 25081 - DNA, 22 bp, Homo Sapiens
tcagtcggtagagcataagact

SEQ ID NO: 25082 - DNA, 17 bp, Homo Sapiens
tcagtcggtagagcatc

SEQ ID NO: 25083 - DNA, 18 bp, Homo Sapiens
tcagtcggtagagcatca

SEQ ID NO: 25084 - DNA, 19 bp, Homo Sapiens
tcagtcggtagagcatcag

SEQ ID NO: 25085 - DNA, 20 bp, Homo Sapiens
tcagtcggtagagcatcaga

SEQ ID NO: 25086 - DNA, 21 bp, Homo Sapiens
tcagtcggtagagcatcagac

SEQ ID NO: 25087 - DNA, 22 bp, Homo Sapiens
tcagtcggtagagcatcagact

SEQ ID NO: 25088 - DNA, 23 bp, Homo Sapiens
tcagtcggtagagcatcagactt

SEQ ID NO: 25089 - DNA, 24 bp, Homo Sapiens
tcagtcggtagagcatcagacttt

SEQ ID NO: 25090 - DNA, 25 bp, Homo Sapiens
tcagtcggtagagcatcagactttt

SEQ ID NO: 25091 - DNA, 17 bp, Homo Sapiens
tcagtcggtagagcatg

SEQ ID NO: 25092 - DNA, 18 bp, Homo Sapiens
tcagtcggtagagcatga

SEQ ID NO: 25093 - DNA, 19 bp, Homo Sapiens
tcagtcggtagagcatgag

SEQ ID NO: 25094 - DNA, 20 bp, Homo Sapiens
tcagtcggtagagcatgaga

SEQ ID NO: 25095 - DNA, 21 bp, Homo Sapiens
tcagtcggtagagcatgagac

SEQ ID NO: 25096 - DNA, 22 bp, Homo Sapiens
tcagtcggtagagcatgagacc

SEQ ID NO: 25097 - DNA, 23 bp, Homo Sapiens
tcagtcggtagagcatgagaccc

SEQ ID NO: 25098 - DNA, 24 bp, Homo Sapiens
tcagtcggtagagcatgagaccct

SEQ ID NO: 25099 - DNA, 25 bp, Homo Sapiens
tcagtcggtagagcatgagaccctt

SEQ ID NO: 25100 - DNA, 26 bp, Homo Sapiens
tcagtcggtagagcatgagaccctta

SEQ ID NO: 25101 - DNA, 22 bp, Homo Sapiens
tcagtcggtagagcatgagact

SEQ ID NO: 25102 - DNA, 23 bp, Homo Sapiens
tcagtcggtagagcatgagactc

SEQ ID NO: 25103 - DNA, 24 bp, Homo Sapiens
tcagtcggtagagcatgagactct

SEQ ID NO: 25104 - DNA, 25 bp, Homo Sapiens
tcagtcggtagagcatgagactctt

SEQ ID NO: 25105 - DNA, 26 bp, Homo Sapiens
tcagtcggtagagcatgagactctta

SEQ ID NO: 25106 - DNA, 27 bp, Homo Sapiens
tcagtcggtagagcatgagactcttaa

SEQ ID NO: 25107 - DNA, 28 bp, Homo Sapiens
tcagtcggtagagcatgagactcttaat

SEQ ID NO: 25108 - DNA, 29 bp, Homo Sapiens
tcagtcggtagagcatgagactcttaatc

SEQ ID NO: 25109 - DNA, 30 bp, Homo Sapiens
tcagtcggtagagcatgagactcttaatct

SEQ ID NO: 25110 - DNA, 31 bp, Homo Sapiens
tcagtcggtagagcatgagactcttaatctc

SEQ ID NO: 25111 - DNA, 32 bp, Homo Sapiens
tcagtcggtagagcatgagactcttaatctca

SEQ ID NO: 25112 - DNA, 39 bp, Homo Sapiens
tcagtcggtagagcatgagactcttaatctcagggtcgt

SEQ ID NO: 25113 - DNA, 40 bp, Homo Sapiens
tcagtcggtagagcatgagactcttaatctcagggtcgtg

SEQ ID NO: 25114 - DNA, 41 bp, Homo Sapiens
tcagtcggtagagcatgagactcttaatctcagggtcgtgg

SEQ ID NO: 25115 - DNA, 44 bp, Homo Sapiens
tcagtcggtagagcatgagactcttaatctcagggtcgtgggtt

SEQ ID NO: 25116 - DNA, 46 bp, Homo Sapiens
tcagtcggtagagcatgagactcttaatctcagggtcgtgggttcg

SEQ ID NO: 25117 - DNA, 18 bp, Homo Sapiens
tcagtcggtagagcatgg

SEQ ID NO: 25118 - DNA, 19 bp, Homo Sapiens
tcagtcggtagagcatggg

SEQ ID NO: 25119 - DNA, 20 bp, Homo Sapiens
tcagtcggtagagcatggga

SEQ ID NO: 25120 - DNA, 21 bp, Homo Sapiens
tcagtcggtagagcatgggac

SEQ ID NO: 25121 - DNA, 22 bp, Homo Sapiens
tcagtcggtagagcatgggact

SEQ ID NO: 25122 - DNA, 23 bp, Homo Sapiens
tcagtcggtagagcatgggactc

SEQ ID NO: 25123 - DNA, 24 bp, Homo Sapiens
tcagtcggtagagcatgggactct

SEQ ID NO: 25124 - DNA, 25 bp, Homo Sapiens
tcagtcggtagagcatgggactctt

SEQ ID NO: 25125 - DNA, 27 bp, Homo Sapiens
tcagtcggtagagcatgggactcttaa

SEQ ID NO: 25126 - DNA, 30 bp, Homo Sapiens
tcagtcggtagagcatgggactcttaatcc

SEQ ID NO: 25127 - DNA, 31 bp, Homo Sapiens
tcagtcggtagagcatgggactcttaatccc

SEQ ID NO: 25128 - DNA, 32 bp, Homo Sapiens
tcagtcggtagagcatgggactcttaatccca

SEQ ID NO: 25129 - DNA, 40 bp, Homo Sapiens
tcagtcggtagagcatgggactcttaatcccagggtcgtg

SEQ ID NO: 25130 - DNA, 41 bp, Homo Sapiens
tcagtcggtagagcatgggactcttaatcccagggtcgtgg

SEQ ID NO: 25131 - DNA, 44 bp, Homo Sapiens
tcagtcggtagagcatgggactcttaatcccagggtcgtgggtt

SEQ ID NO: 25132 - DNA, 31 bp, Homo Sapiens
tcagtcggtagagcatgggactcttaatctc

SEQ ID NO: 25133 - DNA, 41 bp, Homo Sapiens
tcagtcggtagagcatgggactcttaatctcagggtcgtgg

SEQ ID NO: 25134 - DNA, 16 bp, Homo Sapiens
tcagtctcataatctg

SEQ ID NO: 25135 - DNA, 25 bp, Homo Sapiens
tcagtctcataatctgaaggtcctg

SEQ ID NO: 25136 - DNA, 27 bp, Homo Sapiens
tcagtctcataatctgaaggtcctgag

SEQ ID NO: 25137 - DNA, 25 bp, Homo Sapiens
tcagtctcataatctgaaggtcgtg

SEQ ID NO: 25138 - DNA, 27 bp, Homo Sapiens
tcagtctcataatctgaaggtcgtgag

SEQ ID NO: 25139 - DNA, 28 bp, Homo Sapiens
tcagtctcataatctgaaggtcgtgagt

SEQ ID NO: 25140 - DNA, 30 bp, Homo Sapiens
tcagtctcataatctgaaggtcgtgagttc

SEQ ID NO: 25141 - DNA, 31 bp, Homo Sapiens
tcagtctcataatctgaaggtcgtgagttcg

SEQ ID NO: 25142 - DNA, 16 bp, Homo Sapiens
tcagtggtagaattct

SEQ ID NO: 25143 - DNA, 17 bp, Homo Sapiens
tcagtggtagaattctc

SEQ ID NO: 25144 - DNA, 18 bp, Homo Sapiens
tcagtggtagaattctcg

SEQ ID NO: 25145 - DNA, 19 bp, Homo Sapiens
tcagtggtagaattctcgc

SEQ ID NO: 25146 - DNA, 20 bp, Homo Sapiens
tcagtggtagaattctcgcc

SEQ ID NO: 25147 - DNA, 21 bp, Homo Sapiens
tcagtggtagaattctcgcct

SEQ ID NO: 25148 - DNA, 22 bp, Homo Sapiens
tcagtggtagaattctcgcctc

SEQ ID NO: 25149 - DNA, 24 bp, Homo Sapiens
tcagtggtagaattctcgcctccc

SEQ ID NO: 25150 - DNA, 25 bp, Homo Sapiens
tcagtggtagaattctcgcctccca

SEQ ID NO: 25151 - DNA, 22 bp, Homo Sapiens
tcagtggtagaattctcgcctg

SEQ ID NO: 25152 - DNA, 23 bp, Homo Sapiens
tcagtggtagaattctcgcctgc

SEQ ID NO: 25153 - DNA, 24 bp, Homo Sapiens
tcagtggtagaattctcgcctgcc

SEQ ID NO: 25154 - DNA, 25 bp, Homo Sapiens
tcagtggtagaattctcgcctgcca

SEQ ID NO: 25155 - DNA, 26 bp, Homo Sapiens
tcagtggtagaattctcgcctgccac

SEQ ID NO: 25156 - DNA, 27 bp, Homo Sapiens
tcagtggtagaattctcgcctgccacg

SEQ ID NO: 25157 - DNA, 28 bp, Homo Sapiens
tcagtggtagaattctcgcctgccacgc

SEQ ID NO: 25158 - DNA, 29 bp, Homo Sapiens
tcagtggtagaattctcgcctgccacgcg

SEQ ID NO: 25159 - DNA, 31 bp, Homo Sapiens
tcagtggtagaattctcgcctgccacgcggg

SEQ ID NO: 25160 - DNA, 32 bp, Homo Sapiens
tcagtggtagaattctcgcctgccacgcggga

SEQ ID NO: 25161 - DNA, 33 bp, Homo Sapiens
tcagtggtagaattctcgcctgccacgcgggag

SEQ ID NO: 25162 - DNA, 37 bp, Homo Sapiens
tcagtggtagaattctcgcctgccacgcgggaggccc

SEQ ID NO: 25163 - DNA, 38 bp, Homo Sapiens
tcagtggtagaattctcgcctgccacgcgggaggcccg

SEQ ID NO: 25164 - DNA, 39 bp, Homo Sapiens
tcagtggtagaattctcgcctgccacgcgggaggcccgg

SEQ ID NO: 25165 - DNA, 40 bp, Homo Sapiens
tcagtggtagaattctcgcctgccacgcgggaggcccggg

SEQ ID NO: 25166 - DNA, 41 bp, Homo Sapiens
tcagtggtagaattctcgcctgccacgcgggaggcccgggt

SEQ ID NO: 25167 - DNA, 23 bp, Homo Sapiens
tcagtggtagaattcttgcctgc

SEQ ID NO: 25168 - DNA, 16 bp, Homo Sapiens
tcagtggtagagcatt

SEQ ID NO: 25169 - DNA, 17 bp, Homo Sapiens
tcagtggtagagcattt

SEQ ID NO: 25170 - DNA, 18 bp, Homo Sapiens
tcagtggtagagcatttg

SEQ ID NO: 25171 - DNA, 19 bp, Homo Sapiens
tcagtggtagagcatttga

SEQ ID NO: 25172 - DNA, 20 bp, Homo Sapiens
tcagtggtagagcatttgac

SEQ ID NO: 25173 - DNA, 21 bp, Homo Sapiens
tcagtggtagagcatttgact

SEQ ID NO: 25174 - DNA, 22 bp, Homo Sapiens
tcagtggtagagcatttgactg

SEQ ID NO: 25175 - DNA, 23 bp, Homo Sapiens
tcagtggtagagcatttgactgc

SEQ ID NO: 25176 - DNA, 24 bp, Homo Sapiens
tcagtggtagagcatttgactgca

SEQ ID NO: 25177 - DNA, 17 bp, Homo Sapiens
tcagtggtagagcgcat

SEQ ID NO: 25178 - DNA, 20 bp, Homo Sapiens
tcagtggtagagcgcatgct

SEQ ID NO: 25179 - DNA, 21 bp, Homo Sapiens
tcagtggtagagcgcatgctt

SEQ ID NO: 25180 - DNA, 21 bp, Homo Sapiens
tcagtggtagagcgcgtgctt

SEQ ID NO: 25181 - DNA, 20 bp, Homo Sapiens
tcagttgatgcagagtgggg

SEQ ID NO: 25182 - DNA, 23 bp, Homo Sapiens
tcagttgatgcagagtggggttt

SEQ ID NO: 25183 - DNA, 31 bp, Homo Sapiens
tcagttgatgcagagtggggttttgcagtcc

SEQ ID NO: 25184 - DNA, 32 bp, Homo Sapiens
tcagttgatgcagagtggggttttgcagtcct

SEQ ID NO: 25185 - DNA, 33 bp, Homo Sapiens
tcagttgatgcagagtggggttttgcagtcctt

SEQ ID NO: 25186 - DNA, 34 bp, Homo Sapiens
tcagttgatgcagagtggggttttgcagtcctta

SEQ ID NO: 25187 - DNA, 35 bp, Homo Sapiens
tcagttgatgcagagtggggttttgcagtccttac

SEQ ID NO: 25188 - DNA, 36 bp, Homo Sapiens
tcagttgatgcagagtggggttttgcagtccttacc

SEQ ID NO: 25189 - DNA, 37 bp, Homo Sapiens
tcagttgatgcagagtggggttttgcagtccttacca

SEQ ID NO: 25190 - DNA, 17 bp, Homo Sapiens
tcagttggtagagcatc

SEQ ID NO: 25191 - DNA, 18 bp, Homo Sapiens
tcagttggtagagcatca

SEQ ID NO: 25192 - DNA, 21 bp, Homo Sapiens
tcagttggtagagcatcagac

SEQ ID NO: 25193 - DNA, 22 bp, Homo Sapiens
tcagttggtagagcatcagact

SEQ ID NO: 25194 - DNA, 21 bp, Homo Sapiens
tcagttggtagagcatgggac

SEQ ID NO: 25195 - DNA, 22 bp, Homo Sapiens
tcagttggtagagcatgggact

SEQ ID NO: 25196 - DNA, 18 bp, Homo Sapiens
tcataactttgtcaaagt

SEQ ID NO: 25197 - DNA, 30 bp, Homo Sapiens
tcataactttgtcaaagttaaattataggc

SEQ ID NO: 25198 - DNA, 31 bp, Homo Sapiens
tcataactttgtcaaagttaaattataggct

SEQ ID NO: 25199 - DNA, 32 bp, Homo Sapiens
tcataactttgtcaaagttaaattataggcta

SEQ ID NO: 25200 - DNA, 33 bp, Homo Sapiens
tcataactttgtcaaagttaaattataggctaa

SEQ ID NO: 25201 - DNA, 34 bp, Homo Sapiens
tcataactttgtcaaagttaaattataggctaaa

SEQ ID NO: 25202 - DNA, 37 bp, Homo Sapiens
tcataactttgtcaaagttaaattataggctaaatcc

SEQ ID NO: 25203 - DNA, 17 bp, Homo Sapiens
tcataatctgaaggtcc

SEQ ID NO: 25204 - DNA, 18 bp, Homo Sapiens
tcataatctgaaggtcct

SEQ ID NO: 25205 - DNA, 19 bp, Homo Sapiens
tcataatctgaaggtcctg

SEQ ID NO: 25206 - DNA, 20 bp, Homo Sapiens
tcataatctgaaggtcctga

SEQ ID NO: 25207 - DNA, 22 bp, Homo Sapiens
tcataatctgaaggtcctgagt

SEQ ID NO: 25208 - DNA, 38 bp, Homo Sapiens
tcataatctgaaggtcctgagttcgaacctcagagggg

SEQ ID NO: 25209 - DNA, 41 bp, Homo Sapiens
tcataatctgaaggtcctgagttcgaacctcagagggggca

SEQ ID NO: 25210 - DNA, 43 bp, Homo Sapiens
tcataatctgaaggtcctgagttcgaacctcagagggggcacc

SEQ ID NO: 25211 - DNA, 44 bp, Homo Sapiens
tcataatctgaaggtcctgagttcgaacctcagagggggcacca

SEQ ID NO: 25212 - DNA, 32 bp, Homo Sapiens
tcataatctgaaggtcctgagttcgagcctca

SEQ ID NO: 25213 - DNA, 19 bp, Homo Sapiens
tcataatctgaaggtcgtg

SEQ ID NO: 25214 - DNA, 20 bp, Homo Sapiens
tcataatctgaaggtcgtga

SEQ ID NO: 25215 - DNA, 24 bp, Homo Sapiens
tcataatctgaaggtcgtgagttc

SEQ ID NO: 25216 - DNA, 25 bp, Homo Sapiens
tcataatctgaaggtcgtgagttcg

SEQ ID NO: 25217 - DNA, 43 bp, Homo Sapiens
tcataatctgaaggtcgtgagttcgagcctcacacggggcacc

SEQ ID NO: 25218 - DNA, 44 bp, Homo Sapiens
tcataatctgaaggtcgtgagttcgagcctcacacggggcacca

SEQ ID NO: 25219 - DNA, 37 bp, Homo Sapiens
tcataatctgaaggtcgtgagttcgatcctcacacgg

SEQ ID NO: 25220 - DNA, 44 bp, Homo Sapiens
tcataatctgaaggtcgtgagttcgatcctcacacggggcacca

SEQ ID NO: 25221 - DNA, 20 bp, Homo Sapiens
tcatatcattggtcgtggtt

SEQ ID NO: 25222 - DNA, 21 bp, Homo Sapiens
tcatatcattggtcgtggttg

SEQ ID NO: 25223 - DNA, 22 bp, Homo Sapiens
tcatatcattggtcgtggttgt

SEQ ID NO: 25224 - DNA, 23 bp, Homo Sapiens
tcatatcattggtcgtggttgta

SEQ ID NO: 25225 - DNA, 24 bp, Homo Sapiens
tcatatcattggtcgtggttgtag

SEQ ID NO: 25226 - DNA, 25 bp, Homo Sapiens
tcatatcattggtcgtggttgtagt

SEQ ID NO: 25227 - DNA, 26 bp, Homo Sapiens
tcatatcattggtcgtggttgtagtc

SEQ ID NO: 25228 - DNA, 27 bp, Homo Sapiens
tcatatcattggtcgtggttgtagtcc

SEQ ID NO: 25229 - DNA, 28 bp, Homo Sapiens
tcatatcattggtcgtggttgtagtccg

SEQ ID NO: 25230 - DNA, 29 bp, Homo Sapiens
tcatatcattggtcgtggttgtagtccgt

SEQ ID NO: 25231 - DNA, 30 bp, Homo Sapiens
tcatatcattggtcgtggttgtagtccgtg

SEQ ID NO: 25232 - DNA, 31 bp, Homo Sapiens
tcatatcattggtcgtggttgtagtccgtgc

SEQ ID NO: 25233 - DNA, 32 bp, Homo Sapiens
tcatatcattggtcgtggttgtagtccgtgcg

SEQ ID NO: 25234 - DNA, 34 bp, Homo Sapiens
tcatatcattggtcgtggttgtagtccgtgcgag

SEQ ID NO: 25235 - DNA, 35 bp, Homo Sapiens
tcatatcattggtcgtggttgtagtccgtgcgaga

SEQ ID NO: 25236 - DNA, 36 bp, Homo Sapiens
tcatatcattggtcgtggttgtagtccgtgcgagaa

SEQ ID NO: 25237 - DNA, 37 bp, Homo Sapiens
tcatatcattggtcgtggttgtagtccgtgcgagaat

SEQ ID NO: 25238 - DNA, 38 bp, Homo Sapiens
tcatatcattggtcgtggttgtagtccgtgcgagaata

SEQ ID NO: 25239 - DNA, 39 bp, Homo Sapiens
tcatatcattggtcgtggttgtagtccgtgcgagaatac

SEQ ID NO: 25240 - DNA, 40 bp, Homo Sapiens
tcatatcattggtcgtggttgtagtccgtgcgagaatacc

SEQ ID NO: 25241 - DNA, 41 bp, Homo Sapiens
tcatatcattggtcgtggttgtagtccgtgcgagaatacca

SEQ ID NO: 25242 - DNA, 32 bp, Homo Sapiens
tcatatccgcgtgggttcgaaccccacttctg

SEQ ID NO: 25243 - DNA, 19 bp, Homo Sapiens
tcatattgaattgcaaatt

SEQ ID NO: 25244 - DNA, 20 bp, Homo Sapiens
tcatattgaattgcaaattc

SEQ ID NO: 25245 - DNA, 21 bp, Homo Sapiens
tcatattgaattgcaaattcg

SEQ ID NO: 25246 - DNA, 23 bp, Homo Sapiens
tcatattgaattgcaaattcgaa

SEQ ID NO: 25247 - DNA, 32 bp, Homo Sapiens
tcatattgaattgcaaattcgaagaagcagct

SEQ ID NO: 25248 - DNA, 41 bp, Homo Sapiens
tcatattgaattgcaaattcgaagaagcagcttcaaacctg

SEQ ID NO: 25249 - DNA, 47 bp, Homo Sapiens
tcatattgaattgcaaattcgaagaagcagcttcaaacctgccgggg

SEQ ID NO: 25250 - DNA, 48 bp, Homo Sapiens
tcatattgaattgcaaattcgaagaagcagcttcaaacctgccggggc

SEQ ID NO: 25251 - DNA, 16 bp, Homo Sapiens
tcatatttaccaacca

SEQ ID NO: 25252 - DNA, 32 bp, Homo Sapiens
tcatgcaagattcccattcttgcgacccgggt

SEQ ID NO: 25253 - DNA, 16 bp, Homo Sapiens
tcatgcccccatgtct

SEQ ID NO: 25254 - DNA, 17 bp, Homo Sapiens
tcatgcccccatgtcta

SEQ ID NO: 25255 - DNA, 18 bp, Homo Sapiens
tcatgcccccatgtctaa

SEQ ID NO: 25256 - DNA, 19 bp, Homo Sapiens
tcatgcccccatgtctaac

SEQ ID NO: 25257 - DNA, 20 bp, Homo Sapiens
tcatgcccccatgtctaaca

SEQ ID NO: 25258 - DNA, 21 bp, Homo Sapiens
tcatgcccccatgtctaacaa

SEQ ID NO: 25259 - DNA, 22 bp, Homo Sapiens
tcatgcccccatgtctaacaac

SEQ ID NO: 25260 - DNA, 23 bp, Homo Sapiens
tcatgcccccatgtctaacaaca

SEQ ID NO: 25261 - DNA, 24 bp, Homo Sapiens
tcatgcccccatgtctaacaacat

SEQ ID NO: 25262 - DNA, 25 bp, Homo Sapiens
tcatgcccccatgtctaacaacatg

SEQ ID NO: 25263 - DNA, 26 bp, Homo Sapiens
tcatgcccccatgtctaacaacatgg

SEQ ID NO: 25264 - DNA, 27 bp, Homo Sapiens
tcatgcccccatgtctaacaacatggc

SEQ ID NO: 25265 - DNA, 28 bp, Homo Sapiens
tcatgcccccatgtctaacaacatggct

SEQ ID NO: 25266 - DNA, 29 bp, Homo Sapiens
tcatgcccccatgtctaacaacatggctt

SEQ ID NO: 25267 - DNA, 30 bp, Homo Sapiens
tcatgcccccatgtctaacaacatggcttt

SEQ ID NO: 25268 - DNA, 31 bp, Homo Sapiens
tcatgcccccatgtctaacaacatggctttc

SEQ ID NO: 25269 - DNA, 32 bp, Homo Sapiens
tcatgcccccatgtctaacaacatggctttct

SEQ ID NO: 25270 - DNA, 33 bp, Homo Sapiens
tcatgcccccatgtctaacaacatggctttctc

SEQ ID NO: 25271 - DNA, 34 bp, Homo Sapiens
tcatgcccccatgtctaacaacatggctttctca

SEQ ID NO: 25272 - DNA, 35 bp, Homo Sapiens
tcatgcccccatgtctaacaacatggctttctcac

SEQ ID NO: 25273 - DNA, 36 bp, Homo Sapiens
tcatgcccccatgtctaacaacatggctttctcacc

SEQ ID NO: 25274 - DNA, 37 bp, Homo Sapiens
tcatgcccccatgtctaacaacatggctttctcacca

SEQ ID NO: 25275 - DNA, 18 bp, Homo Sapiens
tcatggaggccatggggt

SEQ ID NO: 25276 - DNA, 19 bp, Homo Sapiens
tcatggaggccatggggtt

SEQ ID NO: 25277 - DNA, 20 bp, Homo Sapiens
tcatggaggccatggggttg

SEQ ID NO: 25278 - DNA, 21 bp, Homo Sapiens
tcatggaggccatggggttgg

SEQ ID NO: 25279 - DNA, 24 bp, Homo Sapiens
tcatggaggccatggggttggctt

SEQ ID NO: 25280 - DNA, 26 bp, Homo Sapiens
tcatggaggccatggggttggcttga

SEQ ID NO: 25281 - DNA, 32 bp, Homo Sapiens
tcattaaattatgataatcatatttaccaacc

SEQ ID NO: 25282 - DNA, 16 bp, Homo Sapiens
tcattggtcgtggttg

SEQ ID NO: 25283 - DNA, 17 bp, Homo Sapiens
tcattggtcgtggttgt

SEQ ID NO: 25284 - DNA, 18 bp, Homo Sapiens
tcattggtcgtggttgta

SEQ ID NO: 25285 - DNA, 19 bp, Homo Sapiens
tcattggtcgtggttgtag

SEQ ID NO: 25286 - DNA, 20 bp, Homo Sapiens
tcattggtcgtggttgtagt

SEQ ID NO: 25287 - DNA, 21 bp, Homo Sapiens
tcattggtcgtggttgtagtc

SEQ ID NO: 25288 - DNA, 22 bp, Homo Sapiens
tcattggtcgtggttgtagtcc

SEQ ID NO: 25289 - DNA, 23 bp, Homo Sapiens
tcattggtcgtggttgtagtccg

SEQ ID NO: 25290 - DNA, 24 bp, Homo Sapiens
tcattggtcgtggttgtagtccgt

SEQ ID NO: 25291 - DNA, 25 bp, Homo Sapiens
tcattggtcgtggttgtagtccgtg

SEQ ID NO: 25292 - DNA, 26 bp, Homo Sapiens
tcattggtcgtggttgtagtccgtgc

SEQ ID NO: 25293 - DNA, 27 bp, Homo Sapiens
tcattggtcgtggttgtagtccgtgcg

SEQ ID NO: 25294 - DNA, 28 bp, Homo Sapiens
tcattggtcgtggttgtagtccgtgcga

SEQ ID NO: 25295 - DNA, 29 bp, Homo Sapiens
tcattggtcgtggttgtagtccgtgcgag

SEQ ID NO: 25296 - DNA, 30 bp, Homo Sapiens
tcattggtcgtggttgtagtccgtgcgaga

SEQ ID NO: 25297 - DNA, 31 bp, Homo Sapiens
tcattggtcgtggttgtagtccgtgcgagaa

SEQ ID NO: 25298 - DNA, 32 bp, Homo Sapiens
tcattggtcgtggttgtagtccgtgcgagaat

SEQ ID NO: 25299 - DNA, 33 bp, Homo Sapiens
tcattggtcgtggttgtagtccgtgcgagaata

SEQ ID NO: 25300 - DNA, 34 bp, Homo Sapiens
tcattggtcgtggttgtagtccgtgcgagaatac

SEQ ID NO: 25301 - DNA, 35 bp, Homo Sapiens
tcattggtcgtggttgtagtccgtgcgagaatacc

SEQ ID NO: 25302 - DNA, 36 bp, Homo Sapiens
tcattggtcgtggttgtagtccgtgcgagaatacca

SEQ ID NO: 25303 - DNA, 16 bp, Homo Sapiens
tcatttcgatggcgtg

SEQ ID NO: 25304 - DNA, 19 bp, Homo Sapiens
tcatttcgatggcgtgggt

SEQ ID NO: 25305 - DNA, 40 bp, Homo Sapiens
tcatttcgatggcgtgggttcgaatcccaccgctgccacc

SEQ ID NO: 25306 - DNA, 16 bp, Homo Sapiens
tccaaataaaagtacc

SEQ ID NO: 25307 - DNA, 17 bp, Homo Sapiens
tccaagcagttgacccg

SEQ ID NO: 25308 - DNA, 18 bp, Homo Sapiens
tccaagcagttgacccgg

SEQ ID NO: 25309 - DNA, 20 bp, Homo Sapiens
tccaagcagttgacccgggt

SEQ ID NO: 25310 - DNA, 21 bp, Homo Sapiens
tccaagcagttgacccgggtt

SEQ ID NO: 25311 - DNA, 22 bp, Homo Sapiens
tccaagcagttgacccgggttc

SEQ ID NO: 25312 - DNA, 37 bp, Homo Sapiens
tccaagcagttgacccgggttcgattcccggccaacg

SEQ ID NO: 25313 - DNA, 41 bp, Homo Sapiens
tccaagcagttgacccgggttcgattcccggccaacgcacc

SEQ ID NO: 25314 - DNA, 43 bp, Homo Sapiens
tccaatggacatatgtccgcgtgggttcgaaccccactcctgg

SEQ ID NO: 25315 - DNA, 47 bp, Homo Sapiens
tccaatggacatatgtccgcgtgggttcgaaccccactcctggtacc

SEQ ID NO: 25316 - DNA, 18 bp, Homo Sapiens
tccaatggaggcgtgggt

SEQ ID NO: 25317 - DNA, 19 bp, Homo Sapiens
tccaatggaggcgtgggtt

SEQ ID NO: 25318 - DNA, 34 bp, Homo Sapiens
tccaatggaggcgtgggttcgaatcccacttctg

SEQ ID NO: 25319 - DNA, 35 bp, Homo Sapiens
tccaatggaggcgtgggttcgaatcccacttctga

SEQ ID NO: 25320 - DNA, 39 bp, Homo Sapiens
tccaatggaggcgtgggttcgaatcccacttctgacacc

SEQ ID NO: 25321 - DNA, 40 bp, Homo Sapiens
tccaatggaggcgtgggttcgaatcccacttctgacacca

SEQ ID NO: 25322 - DNA, 35 bp, Homo Sapiens
tccaatggggtctccccgcgcaggttcgaaccctg

SEQ ID NO: 25323 - DNA, 35 bp, Homo Sapiens
tccaatggggtctccccgcgcaggttcgaatcctg

SEQ ID NO: 25324 - DNA, 21 bp, Homo Sapiens
tccaatggggtttccccgcac

SEQ ID NO: 25325 - DNA, 23 bp, Homo Sapiens
tccaatggggtttccccgcacag

SEQ ID NO: 25326 - DNA, 46 bp, Homo Sapiens
tccaatggggtttccccgcacaggttcgaatcctgttcgtgacgcc

SEQ ID NO: 25327 - DNA, 47 bp, Homo Sapiens
tccaatggggtttccccgcacaggttcgaatcctgttcgtgacgcca

SEQ ID NO: 25328 - DNA, 20 bp, Homo Sapiens
tccaattaactagttttgac

SEQ ID NO: 25329 - DNA, 23 bp, Homo Sapiens
tccaattaactagttttgacaac

SEQ ID NO: 25330 - DNA, 24 bp, Homo Sapiens
tccaattaactagttttgacaaca

SEQ ID NO: 25331 - DNA, 38 bp, Homo Sapiens
tccaattaactagttttgacaacattcaaaaaagagta

SEQ ID NO: 25332 - DNA, 39 bp, Homo Sapiens
tccaattaactagttttgacaacattcaaaaaagagtac

SEQ ID NO: 25333 - DNA, 40 bp, Homo Sapiens
tccaattaactagttttgacaacattcaaaaaagagtacc

SEQ ID NO: 25334 - DNA, 41 bp, Homo Sapiens
tccaattaactagttttgacaacattcaaaaaagagtacca

SEQ ID NO: 25335 - DNA, 17 bp, Homo Sapiens
tccagaggttccgggtt

SEQ ID NO: 25336 - DNA, 18 bp, Homo Sapiens
tccagaggttccgggttc

SEQ ID NO: 25337 - DNA, 19 bp, Homo Sapiens
tccagaggttccgggttcg

SEQ ID NO: 25338 - DNA, 35 bp, Homo Sapiens
tccagaggttccgggttcgagtcccggcagagatg

SEQ ID NO: 25339 - DNA, 36 bp, Homo Sapiens
tccagaggttccgggttcgagtcccggcagagatgc

SEQ ID NO: 25340 - DNA, 37 bp, Homo Sapiens
tccagaggttccgggttcgagtcccggcagagatgcc

SEQ ID NO: 25341 - DNA, 38 bp, Homo Sapiens
tccagaggttccgggttcgagtcccggcagagatgcca

SEQ ID NO: 25342 - DNA, 24 bp, Homo Sapiens
tccagatcagaaggctgcgtgttc

SEQ ID NO: 25343 - DNA, 36 bp, Homo Sapiens
tccagcaatccgagttcgaatctcggtgggacctcc

SEQ ID NO: 25344 - DNA, 16 bp, Homo Sapiens
tccagcgatccgagtt

SEQ ID NO: 25345 - DNA, 17 bp, Homo Sapiens
tccagcgatccgagttc

SEQ ID NO: 25346 - DNA, 18 bp, Homo Sapiens
tccagcgatccgagttca

SEQ ID NO: 25347 - DNA, 21 bp, Homo Sapiens
tccagcgatccgagttcaaat

SEQ ID NO: 25348 - DNA, 28 bp, Homo Sapiens
tccagcgatccgagttcaaatctcggtg

SEQ ID NO: 25349 - DNA, 34 bp, Homo Sapiens
tccagcgatccgagttcaaatctcggtggaacct

SEQ ID NO: 25350 - DNA, 35 bp, Homo Sapiens
tccagcgatccgagttcaaatctcggtggaacctc

SEQ ID NO: 25351 - DNA, 36 bp, Homo Sapiens
tccagcgatccgagttcaaatctcggtggaacctcc

SEQ ID NO: 25352 - DNA, 37 bp, Homo Sapiens
tccagcgatccgagttcaaatctcggtggaacctcca

SEQ ID NO: 25353 - DNA, 32 bp, Homo Sapiens
tccagcgatccgagttcaaatctcggtgggac

SEQ ID NO: 25354 - DNA, 33 bp, Homo Sapiens
tccagcgatccgagttcaaatctcggtgggacc

SEQ ID NO: 25355 - DNA, 37 bp, Homo Sapiens
tccagcgatccgagttcaaatctcggtgggaccccca

SEQ ID NO: 25356 - DNA, 34 bp, Homo Sapiens
tccagcgatccgagttcaaatctcggtgggacct

SEQ ID NO: 25357 - DNA, 35 bp, Homo Sapiens
tccagcgatccgagttcaaatctcggtgggacctc

SEQ ID NO: 25358 - DNA, 36 bp, Homo Sapiens
tccagcgatccgagttcaaatctcggtgggacctcc

SEQ ID NO: 25359 - DNA, 23 bp, Homo Sapiens
tccagcgatccgagttcgagtct

SEQ ID NO: 25360 - DNA, 28 bp, Homo Sapiens
tccagcgatccgagttcgagtctcggtg

SEQ ID NO: 25361 - DNA, 34 bp, Homo Sapiens
tccagcgatccgagttcgagtctcggtggaacct

SEQ ID NO: 25362 - DNA, 35 bp, Homo Sapiens
tccagcgatccgagttcgagtctcggtggaacctc

SEQ ID NO: 25363 - DNA, 36 bp, Homo Sapiens
tccagcgatccgagttcgagtctcggtggaacctcc

SEQ ID NO: 25364 - DNA, 27 bp, Homo Sapiens
tccagggttcaagtccctgtccaggcg

SEQ ID NO: 25365 - DNA, 27 bp, Homo Sapiens
tccagggttcaagtccctgttcaggcg

SEQ ID NO: 25366 - DNA, 28 bp, Homo Sapiens
tccagggttcaagtccctgttcaggcgc

SEQ ID NO: 25367 - DNA, 25 bp, Homo Sapiens
tccagggttcaagtccctgttcggg

SEQ ID NO: 25368 - DNA, 26 bp, Homo Sapiens
tccagggttcaagtccctgttcgggc

SEQ ID NO: 25369 - DNA, 27 bp, Homo Sapiens
tccagggttcaagtccctgttcgggcg

SEQ ID NO: 25370 - DNA, 28 bp, Homo Sapiens
tccagggttcaagtccctgttcgggcgc

SEQ ID NO: 25371 - DNA, 29 bp, Homo Sapiens
tccagggttcaagtccctgttcgggcgcc

SEQ ID NO: 25372 - DNA, 30 bp, Homo Sapiens
tccagggttcaagtccctgttcgggcgcca

SEQ ID NO: 25373 - DNA, 16 bp, Homo Sapiens
tccaggtgccccctcc

SEQ ID NO: 25374 - DNA, 16 bp, Homo Sapiens
tccaggttcgactcct

SEQ ID NO: 25375 - DNA, 17 bp, Homo Sapiens
tccaggttcgactcctg

SEQ ID NO: 25376 - DNA, 21 bp, Homo Sapiens
tccaggttcgactcctggctg

SEQ ID NO: 25377 - DNA, 24 bp, Homo Sapiens
tccaggttcgactcctggctggct

SEQ ID NO: 25378 - DNA, 25 bp, Homo Sapiens
tccaggttcgactcctggctggctc

SEQ ID NO: 25379 - DNA, 26 bp, Homo Sapiens
tccaggttcgactcctggctggctcg

SEQ ID NO: 25380 - DNA, 27 bp, Homo Sapiens
tccaggttcgactcctggctggctcgc

SEQ ID NO: 25381 - DNA, 28 bp, Homo Sapiens
tccaggttcgactcctggctggctcgcc

SEQ ID NO: 25382 - DNA, 29 bp, Homo Sapiens
tccaggttcgactcctggctggctcgcca

SEQ ID NO: 25383 - DNA, 45 bp, Homo Sapiens
tccagtcatttcgatggcgtgggttcgaatcccaccgctgccacc

SEQ ID NO: 25384 - DNA, 44 bp, Homo Sapiens
tccagtctcttcggaggcgtgggttcgaatcccaccgctgccac

SEQ ID NO: 25385 - DNA, 45 bp, Homo Sapiens
tccagtctcttcggaggcgtgggttcgaatcccaccgctgccacc

SEQ ID NO: 25386 - DNA, 16 bp, Homo Sapiens
tccagtctcttcgggg

SEQ ID NO: 25387 - DNA, 17 bp, Homo Sapiens
tccagtctcttcggggg

SEQ ID NO: 25388 - DNA, 24 bp, Homo Sapiens
tccagtctcttcgggggcgtgggt

SEQ ID NO: 25389 - DNA, 45 bp, Homo Sapiens
tccagtctcttcgggggcgtgggttcgaatcccaccgctgccacc

SEQ ID NO: 25390 - DNA, 46 bp, Homo Sapiens
tccagtctcttcgggggcgtgggttcgaatcccaccgctgccacca

SEQ ID NO: 25391 - DNA, 16 bp, Homo Sapiens
tccatagctcaggggt

SEQ ID NO: 25392 - DNA, 26 bp, Homo Sapiens
tccatagctcaggggttagagcactg

SEQ ID NO: 25393 - DNA, 27 bp, Homo Sapiens
tccatagtgtagcggttatcacgtctg

SEQ ID NO: 25394 - DNA, 28 bp, Homo Sapiens
tccatagtgtagcggttatcacgtctgc

SEQ ID NO: 25395 - DNA, 29 bp, Homo Sapiens
tccatagtgtagcggttatcacgtctgct

SEQ ID NO: 25396 - DNA, 30 bp, Homo Sapiens
tccatagtgtagcggttatcacgtctgctt

SEQ ID NO: 25397 - DNA, 33 bp, Homo Sapiens
tccatagtgtagcggttatcacgtctgctttac

SEQ ID NO: 25398 - DNA, 20 bp, Homo Sapiens
tccatagtgtagtggttatc

SEQ ID NO: 25399 - DNA, 29 bp, Homo Sapiens
tccatagtgtagtggttatcacatctgct

SEQ ID NO: 25400 - DNA, 33 bp, Homo Sapiens
tccatagtgtagtggttatcacatctgctttac

SEQ ID NO: 25401 - DNA, 27 bp, Homo Sapiens
tccatagtgtagtggttatcacgtctg

SEQ ID NO: 25402 - DNA, 28 bp, Homo Sapiens
tccatagtgtagtggttatcacgtctgc

SEQ ID NO: 25403 - DNA, 29 bp, Homo Sapiens
tccatagtgtagtggttatcacgtctgct

SEQ ID NO: 25404 - DNA, 30 bp, Homo Sapiens
tccatagtgtagtggttatcacgtctgctt

SEQ ID NO: 25405 - DNA, 31 bp, Homo Sapiens
tccatagtgtagtggttatcacgtctgcttt

SEQ ID NO: 25406 - DNA, 32 bp, Homo Sapiens
tccatagtgtagtggttatcacgtctgcttta

SEQ ID NO: 25407 - DNA, 33 bp, Homo Sapiens
tccatagtgtagtggttatcacgtctgctttac

SEQ ID NO: 25408 - DNA, 34 bp, Homo Sapiens
tccatagtgtagtggttatcacgtctgctttaca

SEQ ID NO: 25409 - DNA, 26 bp, Homo Sapiens
tccatggtgtaatggtgagcactctg

SEQ ID NO: 25410 - DNA, 29 bp, Homo Sapiens
tccatggtgtaatggtgagcactctggac

SEQ ID NO: 25411 - DNA, 30 bp, Homo Sapiens
tccatggtgtaatggtgagcactctggact

SEQ ID NO: 25412 - DNA, 31 bp, Homo Sapiens
tccatggtgtaatggtgagcactctggactc

SEQ ID NO: 25413 - DNA, 32 bp, Homo Sapiens
tccatggtgtaatggtgagcactctggactct

SEQ ID NO: 25414 - DNA, 33 bp, Homo Sapiens
tccatggtgtaatggtgagcactctggactctg

SEQ ID NO: 25415 - DNA, 24 bp, Homo Sapiens
tccatggtgtaatggttagcactc

SEQ ID NO: 25416 - DNA, 26 bp, Homo Sapiens
tccatggtgtaatggttagcactctg

SEQ ID NO: 25417 - DNA, 27 bp, Homo Sapiens
tccatggtgtaatggttagcactctgg

SEQ ID NO: 25418 - DNA, 28 bp, Homo Sapiens
tccatggtgtaatggttagcactctgga

SEQ ID NO: 25419 - DNA, 29 bp, Homo Sapiens
tccatggtgtaatggttagcactctggac

SEQ ID NO: 25420 - DNA, 30 bp, Homo Sapiens
tccatggtgtaatggttagcactctggact

SEQ ID NO: 25421 - DNA, 31 bp, Homo Sapiens
tccatggtgtaatggttagcactctggactc

SEQ ID NO: 25422 - DNA, 32 bp, Homo Sapiens
tccatggtgtaatggttagcactctggactct

SEQ ID NO: 25423 - DNA, 33 bp, Homo Sapiens
tccatggtgtaatggttagcactctggactctg

SEQ ID NO: 25424 - DNA, 34 bp, Homo Sapiens
tccatggtgtaatggttagcactctggactctga

SEQ ID NO: 25425 - DNA, 35 bp, Homo Sapiens
tccatggtgtaatggttagcactctggactctgaa

SEQ ID NO: 25426 - DNA, 37 bp, Homo Sapiens
tccatggtgtaatggttagcactctggactctgaatc

SEQ ID NO: 25427 - DNA, 38 bp, Homo Sapiens
tccatggtgtaatggttagcactctggactctgaatcc

SEQ ID NO: 25428 - DNA, 24 bp, Homo Sapiens
tccattggggtctccccgcgcagg

SEQ ID NO: 25429 - DNA, 46 bp, Homo Sapiens
tccattggggtctccccgcgcaggttcgaatcctgccgactacgcc

SEQ ID NO: 25430 - DNA, 47 bp, Homo Sapiens
tccattggggtctccccgcgcaggttcgaatcctgccgactacgcca

SEQ ID NO: 25431 - DNA, 16 bp, Homo Sapiens
tccattggggtttccc

SEQ ID NO: 25432 - DNA, 21 bp, Homo Sapiens
tccattggggtttccccgcgc

SEQ ID NO: 25433 - DNA, 22 bp, Homo Sapiens
tccattggggtttccccgcgca

SEQ ID NO: 25434 - DNA, 23 bp, Homo Sapiens
tccattggggtttccccgcgcag

SEQ ID NO: 25435 - DNA, 24 bp, Homo Sapiens
tccattggggtttccccgcgcagg

SEQ ID NO: 25436 - DNA, 25 bp, Homo Sapiens
tccattggggtttccccgcgcaggt

SEQ ID NO: 25437 - DNA, 26 bp, Homo Sapiens
tccattggggtttccccgcgcaggtt

SEQ ID NO: 25438 - DNA, 35 bp, Homo Sapiens
tccattggggtttccccgcgcaggttcgaatcctg

SEQ ID NO: 25439 - DNA, 37 bp, Homo Sapiens
tccattggggtttccccgcgcaggttcgaatcctgcc

SEQ ID NO: 25440 - DNA, 38 bp, Homo Sapiens
tccattggggtttccccgcgcaggttcgaatcctgccg

SEQ ID NO: 25441 - DNA, 39 bp, Homo Sapiens
tccattggggtttccccgcgcaggttcgaatcctgccga

SEQ ID NO: 25442 - DNA, 41 bp, Homo Sapiens
tccattggggtttccccgcgcaggttcgaatcctgccgact

SEQ ID NO: 25443 - DNA, 42 bp, Homo Sapiens
tccattggggtttccccgcgcaggttcgaatcctgccgacta

SEQ ID NO: 25444 - DNA, 46 bp, Homo Sapiens
tccattggggtttccccgcgcaggttcgaatcctgccgactacgcc

SEQ ID NO: 25445 - DNA, 47 bp, Homo Sapiens
tccattggggtttccccgcgcaggttcgaatcctgccgactacgcca

SEQ ID NO: 25446 - DNA, 16 bp, Homo Sapiens
tccattggtcttaggc

SEQ ID NO: 25447 - DNA, 17 bp, Homo Sapiens
tccattggtcttaggcc

SEQ ID NO: 25448 - DNA, 18 bp, Homo Sapiens
tccattggtcttaggccc

SEQ ID NO: 25449 - DNA, 19 bp, Homo Sapiens
tccattggtcttaggcccc

SEQ ID NO: 25450 - DNA, 23 bp, Homo Sapiens
tccattggtcttaggccccaaaa

SEQ ID NO: 25451 - DNA, 24 bp, Homo Sapiens
tccattggtcttaggccccaaaaa

SEQ ID NO: 25452 - DNA, 25 bp, Homo Sapiens
tccattggtcttaggccccaaaaat

SEQ ID NO: 25453 - DNA, 26 bp, Homo Sapiens
tccattggtcttaggccccaaaaatt

SEQ ID NO: 25454 - DNA, 32 bp, Homo Sapiens
tccattggtcttaggccccaaaaattttggtg

SEQ ID NO: 25455 - DNA, 38 bp, Homo Sapiens
tccattggtcttaggccccaaaaattttggtgcaactc

SEQ ID NO: 25456 - DNA, 44 bp, Homo Sapiens
tccattggtcttaggccccaaaaattttggtgcaactccaaata

SEQ ID NO: 25457 - DNA, 46 bp, Homo Sapiens
tccattgtgctctgcacgcgtgggttcgaatcccatcctcgtcgcc

SEQ ID NO: 25458 - DNA, 47 bp, Homo Sapiens
tccattgtgctctgcacgcgtgggttcgaatcccatcctcgtcgcca

SEQ ID NO: 25459 - DNA, 42 bp, Homo Sapiens
tccattgtgctttgcacgcgtgggttcgaatcccatcctcgt

SEQ ID NO: 25460 - DNA, 45 bp, Homo Sapiens
tccattgtgctttgcacgcgtgggttcgaatcccatcctcgtcgc

SEQ ID NO: 25461 - DNA, 46 bp, Homo Sapiens
tccattgtgctttgcacgcgtgggttcgaatcccatcctcgtcgcc

SEQ ID NO: 25462 - DNA, 47 bp, Homo Sapiens
tccattgtgctttgcacgcgtgggttcgaatcccatcctcgtcgcca

SEQ ID NO: 25463 - DNA, 16 bp, Homo Sapiens
tcccacatggtctagc

SEQ ID NO: 25464 - DNA, 17 bp, Homo Sapiens
tcccacatggtctagcg

SEQ ID NO: 25465 - DNA, 18 bp, Homo Sapiens
tcccacatggtctagcgg

SEQ ID NO: 25466 - DNA, 19 bp, Homo Sapiens
tcccacatggtctagcggt

SEQ ID NO: 25467 - DNA, 20 bp, Homo Sapiens
tcccacatggtctagcggtt

SEQ ID NO: 25468 - DNA, 22 bp, Homo Sapiens
tcccacatggtctagcggttag

SEQ ID NO: 25469 - DNA, 23 bp, Homo Sapiens
tcccacatggtctagcggttagg

SEQ ID NO: 25470 - DNA, 24 bp, Homo Sapiens
tcccacatggtctagcggttagga

SEQ ID NO: 25471 - DNA, 25 bp, Homo Sapiens
tcccacatggtctagcggttaggat

SEQ ID NO: 25472 - DNA, 26 bp, Homo Sapiens
tcccacatggtctagcggttaggatt

SEQ ID NO: 25473 - DNA, 27 bp, Homo Sapiens
tcccacatggtctagcggttaggattc

SEQ ID NO: 25474 - DNA, 28 bp, Homo Sapiens
tcccacatggtctagcggttaggattcc

SEQ ID NO: 25475 - DNA, 29 bp, Homo Sapiens
tcccacatggtctagcggttaggattcct

SEQ ID NO: 25476 - DNA, 30 bp, Homo Sapiens
tcccacatggtctagcggttaggattcctg

SEQ ID NO: 25477 - DNA, 31 bp, Homo Sapiens
tcccacatggtctagcggttaggattcctgg

SEQ ID NO: 25478 - DNA, 32 bp, Homo Sapiens
tcccacatggtctagcggttaggattcctggt

SEQ ID NO: 25479 - DNA, 33 bp, Homo Sapiens
tcccacatggtctagcggttaggattcctggtt

SEQ ID NO: 25480 - DNA, 34 bp, Homo Sapiens
tcccacatggtctagcggttaggattcctggttt

SEQ ID NO: 25481 - DNA, 35 bp, Homo Sapiens
tcccacatggtctagcggttaggattcctggtttt

SEQ ID NO: 25482 - DNA, 36 bp, Homo Sapiens
tcccacatggtctagcggttaggattcctggttttc

SEQ ID NO: 25483 - DNA, 37 bp, Homo Sapiens
tcccacatggtctagcggttaggattcctggttttca

SEQ ID NO: 25484 - DNA, 38 bp, Homo Sapiens
tcccacatggtctagcggttaggattcctggttttcac

SEQ ID NO: 25485 - DNA, 39 bp, Homo Sapiens
tcccacatggtctagcggttaggattcctggttttcacc

SEQ ID NO: 25486 - DNA, 40 bp, Homo Sapiens
tcccacatggtctagcggttaggattcctggttttcaccc

SEQ ID NO: 25487 - DNA, 41 bp, Homo Sapiens
tcccacatggtctagcggttaggattcctggttttcaccca

SEQ ID NO: 25488 - DNA, 42 bp, Homo Sapiens
tcccacatggtctagcggttaggattcctggttttcacccag

SEQ ID NO: 25489 - DNA, 16 bp, Homo Sapiens
tcccaccactgccacc

SEQ ID NO: 25490 - DNA, 17 bp, Homo Sapiens
tcccaccactgccacca

SEQ ID NO: 25491 - DNA, 16 bp, Homo Sapiens
tcccaccagagtcgcc

SEQ ID NO: 25492 - DNA, 17 bp, Homo Sapiens
tcccaccagagtcgcca

SEQ ID NO: 25493 - DNA, 17 bp, Homo Sapiens
tcccacccagggacgcc

SEQ ID NO: 25494 - DNA, 18 bp, Homo Sapiens
tcccacccagggacgcca

SEQ ID NO: 25495 - DNA, 16 bp, Homo Sapiens
tcccacccggggtacc

SEQ ID NO: 25496 - DNA, 16 bp, Homo Sapiens
tcccaccctcgtcgcc

SEQ ID NO: 25497 - DNA, 17 bp, Homo Sapiens
tcccaccctcgtcgcca

SEQ ID NO: 25498 - DNA, 16 bp, Homo Sapiens
tcccaccgctgccacc

SEQ ID NO: 25499 - DNA, 17 bp, Homo Sapiens
tcccaccgctgccacca

SEQ ID NO: 25500 - DNA, 16 bp, Homo Sapiens
tcccaccttcgtcgcc

SEQ ID NO: 25501 - DNA, 17 bp, Homo Sapiens
tcccaccttcgtcgcca

SEQ ID NO: 25502 - DNA, 16 bp, Homo Sapiens
tcccactcctgacacc

SEQ ID NO: 25503 - DNA, 17 bp, Homo Sapiens
tcccactcctgacacca

SEQ ID NO: 25504 - DNA, 16 bp, Homo Sapiens
tcccacttctgacacc

SEQ ID NO: 25505 - DNA, 17 bp, Homo Sapiens
tcccacttctgacacca

SEQ ID NO: 25506 - DNA, 16 bp, Homo Sapiens
tcccagcggggcctcc

SEQ ID NO: 25507 - DNA, 17 bp, Homo Sapiens
tcccagcggggcctcca

SEQ ID NO: 25508 - DNA, 16 bp, Homo Sapiens
tcccagcggtgcctcc

SEQ ID NO: 25509 - DNA, 17 bp, Homo Sapiens
tcccagcggtgcctcca

SEQ ID NO: 25510 - DNA, 33 bp, Homo Sapiens
tcccagggtcgtgggttcgagccccacgttggg

SEQ ID NO: 25511 - DNA, 34 bp, Homo Sapiens
tcccagggtcgtgggttcgagccccacgttgggc

SEQ ID NO: 25512 - DNA, 37 bp, Homo Sapiens
tcccagggtcgtgggttcgagccccacgttgggcgcc

SEQ ID NO: 25513 - DNA, 38 bp, Homo Sapiens
tcccagggtcgtgggttcgagccccacgttgggcgcca

SEQ ID NO: 25514 - DNA, 16 bp, Homo Sapiens
tcccagtagagcctcc

SEQ ID NO: 25515 - DNA, 17 bp, Homo Sapiens
tcccagtagagcctcca

SEQ ID NO: 25516 - DNA, 16 bp, Homo Sapiens
tcccagtggggcctcc

SEQ ID NO: 25517 - DNA, 16 bp, Homo Sapiens
tcccatatggtctagc

SEQ ID NO: 25518 - DNA, 17 bp, Homo Sapiens
tcccatatggtctagcg

SEQ ID NO: 25519 - DNA, 18 bp, Homo Sapiens
tcccatatggtctagcgg

SEQ ID NO: 25520 - DNA, 19 bp, Homo Sapiens
tcccatatggtctagcggt

SEQ ID NO: 25521 - DNA, 20 bp, Homo Sapiens
tcccatatggtctagcggtt

SEQ ID NO: 25522 - DNA, 22 bp, Homo Sapiens
tcccatatggtctagcggttag

SEQ ID NO: 25523 - DNA, 23 bp, Homo Sapiens
tcccatatggtctagcggttagg

SEQ ID NO: 25524 - DNA, 24 bp, Homo Sapiens
tcccatatggtctagcggttagga

SEQ ID NO: 25525 - DNA, 25 bp, Homo Sapiens
tcccatatggtctagcggttaggat

SEQ ID NO: 25526 - DNA, 26 bp, Homo Sapiens
tcccatatggtctagcggttaggatt

SEQ ID NO: 25527 - DNA, 27 bp, Homo Sapiens
tcccatatggtctagcggttaggattc

SEQ ID NO: 25528 - DNA, 28 bp, Homo Sapiens
tcccatatggtctagcggttaggattcc

SEQ ID NO: 25529 - DNA, 29 bp, Homo Sapiens
tcccatatggtctagcggttaggattcct

SEQ ID NO: 25530 - DNA, 30 bp, Homo Sapiens
tcccatatggtctagcggttaggattcctg

SEQ ID NO: 25531 - DNA, 31 bp, Homo Sapiens
tcccatatggtctagcggttaggattcctgg

SEQ ID NO: 25532 - DNA, 32 bp, Homo Sapiens
tcccatatggtctagcggttaggattcctggt

SEQ ID NO: 25533 - DNA, 33 bp, Homo Sapiens
tcccatatggtctagcggttaggattcctggtt

SEQ ID NO: 25534 - DNA, 34 bp, Homo Sapiens
tcccatatggtctagcggttaggattcctggttt

SEQ ID NO: 25535 - DNA, 35 bp, Homo Sapiens
tcccatatggtctagcggttaggattcctggtttt

SEQ ID NO: 25536 - DNA, 36 bp, Homo Sapiens
tcccatatggtctagcggttaggattcctggttttc

SEQ ID NO: 25537 - DNA, 37 bp, Homo Sapiens
tcccatatggtctagcggttaggattcctggttttca

SEQ ID NO: 25538 - DNA, 38 bp, Homo Sapiens
tcccatatggtctagcggttaggattcctggttttcac

SEQ ID NO: 25539 - DNA, 39 bp, Homo Sapiens
tcccatatggtctagcggttaggattcctggttttcacc

SEQ ID NO: 25540 - DNA, 40 bp, Homo Sapiens
tcccatatggtctagcggttaggattcctggttttcaccc

SEQ ID NO: 25541 - DNA, 41 bp, Homo Sapiens
tcccatatggtctagcggttaggattcctggttttcaccca

SEQ ID NO: 25542 - DNA, 42 bp, Homo Sapiens
tcccatatggtctagcggttaggattcctggttttcacccag

SEQ ID NO: 25543 - DNA, 43 bp, Homo Sapiens
tcccatatggtctagcggttaggattcctggttttcacccagg

SEQ ID NO: 25544 - DNA, 45 bp, Homo Sapiens
tcccatatggtctagcggttaggattcctggttttcacccaggtg

SEQ ID NO: 25545 - DNA, 16 bp, Homo Sapiens
tcccatcctcgtcgcc

SEQ ID NO: 25546 - DNA, 17 bp, Homo Sapiens
tcccatcctcgtcgcca

SEQ ID NO: 25547 - DNA, 16 bp, Homo Sapiens
tcccatctggggtgcc

SEQ ID NO: 25548 - DNA, 17 bp, Homo Sapiens
tcccatctggggtgcca

SEQ ID NO: 25549 - DNA, 16 bp, Homo Sapiens
tcccatctgggtcgcc

SEQ ID NO: 25550 - DNA, 17 bp, Homo Sapiens
tcccatctgggtcgcca

SEQ ID NO: 25551 - DNA, 24 bp, Homo Sapiens
tcccatggtgtaatggttagcact

SEQ ID NO: 25552 - DNA, 26 bp, Homo Sapiens
tcccatggtgtaatggttagcactct

SEQ ID NO: 25553 - DNA, 27 bp, Homo Sapiens
tcccatggtgtaatggttagcactctg

SEQ ID NO: 25554 - DNA, 28 bp, Homo Sapiens
tcccatggtgtaatggttagcactctgg

SEQ ID NO: 25555 - DNA, 29 bp, Homo Sapiens
tcccatggtgtaatggttagcactctgga

SEQ ID NO: 25556 - DNA, 30 bp, Homo Sapiens
tcccatggtgtaatggttagcactctggac

SEQ ID NO: 25557 - DNA, 31 bp, Homo Sapiens
tcccatggtgtaatggttagcactctggact

SEQ ID NO: 25558 - DNA, 32 bp, Homo Sapiens
tcccatggtgtaatggttagcactctggactt

SEQ ID NO: 25559 - DNA, 34 bp, Homo Sapiens
tcccatggtgtaatggttagcactctggactttg

SEQ ID NO: 25560 - DNA, 35 bp, Homo Sapiens
tcccatggtgtaatggttagcactctggactttga

SEQ ID NO: 25561 - DNA, 36 bp, Homo Sapiens
tcccatggtgtaatggttagcactctggactttgaa

SEQ ID NO: 25562 - DNA, 38 bp, Homo Sapiens
tcccatggtgtaatggttagcactctggactttgaatc

SEQ ID NO: 25563 - DNA, 39 bp, Homo Sapiens
tcccatggtgtaatggttagcactctggactttgaatcc

SEQ ID NO: 25564 - DNA, 40 bp, Homo Sapiens
tcccatggtgtaatggttagcactctggactttgaatcca

SEQ ID NO: 25565 - DNA, 24 bp, Homo Sapiens
tcccattcttgcgacccgggttcg

SEQ ID NO: 25566 - DNA, 36 bp, Homo Sapiens
tcccattcttgcgacccgggttcgattcccgggcgg

SEQ ID NO: 25567 - DNA, 37 bp, Homo Sapiens
tcccattcttgcgacccgggttcgattcccgggcggc

SEQ ID NO: 25568 - DNA, 38 bp, Homo Sapiens
tcccattcttgcgacccgggttcgattcccgggcggcg

SEQ ID NO: 25569 - DNA, 43 bp, Homo Sapiens
tcccattcttgcgacccgggttcgattcccgggcggcgcacca

SEQ ID NO: 25570 - DNA, 16 bp, Homo Sapiens
tcccattggtctagcc

SEQ ID NO: 25571 - DNA, 17 bp, Homo Sapiens
tcccattggtctagcca

SEQ ID NO: 25572 - DNA, 16 bp, Homo Sapiens
tccccagcacctccac

SEQ ID NO: 25573 - DNA, 17 bp, Homo Sapiens
tccccagcacctccacc

SEQ ID NO: 25574 - DNA, 18 bp, Homo Sapiens
tccccagcacctccacca

SEQ ID NO: 25575 - DNA, 16 bp, Homo Sapiens
tccccagcatctccac

SEQ ID NO: 25576 - DNA, 17 bp, Homo Sapiens
tccccagcatctccacc

SEQ ID NO: 25577 - DNA, 18 bp, Homo Sapiens
tccccagcatctccacca

SEQ ID NO: 25578 - DNA, 17 bp, Homo Sapiens
tccccagtacctccacc

SEQ ID NO: 25579 - DNA, 18 bp, Homo Sapiens
tccccagtacctccacca

SEQ ID NO: 25580 - DNA, 16 bp, Homo Sapiens
tccccgacggggagcc

SEQ ID NO: 25581 - DNA, 17 bp, Homo Sapiens
tccccgacggggagcca

SEQ ID NO: 25582 - DNA, 22 bp, Homo Sapiens
tccccgcacaggttcgaatcct

SEQ ID NO: 25583 - DNA, 23 bp, Homo Sapiens
tccccgcacaggttcgaatcctg

SEQ ID NO: 25584 - DNA, 36 bp, Homo Sapiens
tccccgcctgtcacgcgggagaccggggttcgattc

SEQ ID NO: 25585 - DNA, 22 bp, Homo Sapiens
tccccgcgcaggttcaaatcct

SEQ ID NO: 25586 - DNA, 16 bp, Homo Sapiens
tccccgcgcaggttcg

SEQ ID NO: 25587 - DNA, 19 bp, Homo Sapiens
tccccgcgcaggttcgaac

SEQ ID NO: 25588 - DNA, 21 bp, Homo Sapiens
tccccgcgcaggttcgaaccc

SEQ ID NO: 25589 - DNA, 22 bp, Homo Sapiens
tccccgcgcaggttcgaaccct

SEQ ID NO: 25590 - DNA, 23 bp, Homo Sapiens
tccccgcgcaggttcgaaccctg

SEQ ID NO: 25591 - DNA, 19 bp, Homo Sapiens
tccccgcgcaggttcgaat

SEQ ID NO: 25592 - DNA, 20 bp, Homo Sapiens
tccccgcgcaggttcgaatc

SEQ ID NO: 25593 - DNA, 21 bp, Homo Sapiens
tccccgcgcaggttcgaatcc

SEQ ID NO: 25594 - DNA, 22 bp, Homo Sapiens
tccccgcgcaggttcgaatcct

SEQ ID NO: 25595 - DNA, 23 bp, Homo Sapiens
tccccgcgcaggttcgaatcctg

SEQ ID NO: 25596 - DNA, 34 bp, Homo Sapiens
tccccgcgcaggttcgaatcctgccgactacgcc

SEQ ID NO: 25597 - DNA, 34 bp, Homo Sapiens
tccccgcgcaggttcgaatcctgctcacagcgcc

SEQ ID NO: 25598 - DNA, 16 bp, Homo Sapiens
tccccggcacctccac

SEQ ID NO: 25599 - DNA, 17 bp, Homo Sapiens
tccccggcacctccacc

SEQ ID NO: 25600 - DNA, 18 bp, Homo Sapiens
tccccggcacctccacca

SEQ ID NO: 25601 - DNA, 16 bp, Homo Sapiens
tccccggcatctccac

SEQ ID NO: 25602 - DNA, 17 bp, Homo Sapiens
tccccggcatctccacc

SEQ ID NO: 25603 - DNA, 18 bp, Homo Sapiens
tccccggcatctccacca

SEQ ID NO: 25604 - DNA, 16 bp, Homo Sapiens
tccccggttcgaaacc

SEQ ID NO: 25605 - DNA, 23 bp, Homo Sapiens
tccccggttcgaaaccgggcgga

SEQ ID NO: 25606 - DNA, 27 bp, Homo Sapiens
tccccggttcgaaaccgggcggaaaca

SEQ ID NO: 25607 - DNA, 29 bp, Homo Sapiens
tccccggttcgatcccgggcggaaacacc

SEQ ID NO: 25608 - DNA, 16 bp, Homo Sapiens
tccccgtacgggccac

SEQ ID NO: 25609 - DNA, 17 bp, Homo Sapiens
tccccgtacgggccacc

SEQ ID NO: 25610 - DNA, 18 bp, Homo Sapiens
tccccgtacgggccacca

SEQ ID NO: 25611 - DNA, 16 bp, Homo Sapiens
tccccgtactggccac

SEQ ID NO: 25612 - DNA, 17 bp, Homo Sapiens
tccccgtactggccacc

SEQ ID NO: 25613 - DNA, 18 bp, Homo Sapiens
tccccgtactggccacca

SEQ ID NO: 25614 - DNA, 34 bp, Homo Sapiens
tcccctggaggcgtgggttcgaatcccacttctg

SEQ ID NO: 25615 - DNA, 37 bp, Homo Sapiens
tcccctggaggcgtgggttcgaatcccacttctgaca

SEQ ID NO: 25616 - DNA, 40 bp, Homo Sapiens
tcccctggaggcgtgggttcgaatcccacttctgacacca

SEQ ID NO: 25617 - DNA, 16 bp, Homo Sapiens
tcccggacgagccccc

SEQ ID NO: 25618 - DNA, 17 bp, Homo Sapiens
tcccggacgagccccca

SEQ ID NO: 25619 - DNA, 16 bp, Homo Sapiens
tcccggccaacgcacc

SEQ ID NO: 25620 - DNA, 17 bp, Homo Sapiens
tcccggccaacgcacca

SEQ ID NO: 25621 - DNA, 16 bp, Homo Sapiens
tcccggccaatgcacc

SEQ ID NO: 25622 - DNA, 17 bp, Homo Sapiens
tcccggccaatgcacca

SEQ ID NO: 25623 - DNA, 16 bp, Homo Sapiens
tcccggcccatgcacc

SEQ ID NO: 25624 - DNA, 17 bp, Homo Sapiens
tcccggcccatgcacca

SEQ ID NO: 25625 - DNA, 16 bp, Homo Sapiens
tcccggcggagtcgcc

SEQ ID NO: 25626 - DNA, 17 bp, Homo Sapiens
tcccggcggagtcgcca

SEQ ID NO: 25627 - DNA, 16 bp, Homo Sapiens
tcccgggcggaaacac

SEQ ID NO: 25628 - DNA, 17 bp, Homo Sapiens
tcccgggcggaaacacc

SEQ ID NO: 25629 - DNA, 18 bp, Homo Sapiens
tcccgggcggaaacacca

SEQ ID NO: 25630 - DNA, 16 bp, Homo Sapiens
tcccgggcggcgcacc

SEQ ID NO: 25631 - DNA, 17 bp, Homo Sapiens
tcccgggcggcgcacca

SEQ ID NO: 25632 - DNA, 21 bp, Homo Sapiens
tcccgggttcaaatcccggac

SEQ ID NO: 25633 - DNA, 25 bp, Homo Sapiens
tcccgggttcaaatcccggacgagc

SEQ ID NO: 25634 - DNA, 27 bp, Homo Sapiens
tcccgggttcaaatcccggacgagccc

SEQ ID NO: 25635 - DNA, 28 bp, Homo Sapiens
tcccgggttcaaatcccggacgagcccc

SEQ ID NO: 25636 - DNA, 29 bp, Homo Sapiens
tcccgggttcaaatcccggacgagccccc

SEQ ID NO: 25637 - DNA, 30 bp, Homo Sapiens
tcccgggttcaaatcccggacgagccccca

SEQ ID NO: 25638 - DNA, 29 bp, Homo Sapiens
tcccgggttcaatccccggcatctccacc

SEQ ID NO: 25639 - DNA, 30 bp, Homo Sapiens
tcccgggttcaatccccggcatctccacca

SEQ ID NO: 25640 - DNA, 27 bp, Homo Sapiens
tcccgggttcgatccccagcatctcca

SEQ ID NO: 25641 - DNA, 28 bp, Homo Sapiens
tcccgggttcgatccccagcatctccac

SEQ ID NO: 25642 - DNA, 29 bp, Homo Sapiens
tcccgggttcgatccccagcatctccacc

SEQ ID NO: 25643 - DNA, 30 bp, Homo Sapiens
tcccgggttcgatccccagcatctccacca

SEQ ID NO: 25644 - DNA, 30 bp, Homo Sapiens
tcccgggttcgatccccggcatctccacca

SEQ ID NO: 25645 - DNA, 16 bp, Homo Sapiens
tcccgggtttcggcac

SEQ ID NO: 25646 - DNA, 17 bp, Homo Sapiens
tcccgggtttcggcacc

SEQ ID NO: 25647 - DNA, 18 bp, Homo Sapiens
tcccgggtttcggcacca

SEQ ID NO: 25648 - DNA, 16 bp, Homo Sapiens
tcccggtatgggaacc

SEQ ID NO: 25649 - DNA, 17 bp, Homo Sapiens
tcccggtatgggaacca

SEQ ID NO: 25650 - DNA, 16 bp, Homo Sapiens
tcccggtcagggaacc

SEQ ID NO: 25651 - DNA, 17 bp, Homo Sapiens
tcccggtcagggaacca

SEQ ID NO: 25652 - DNA, 16 bp, Homo Sapiens
tcccggtgtgggaacc

SEQ ID NO: 25653 - DNA, 17 bp, Homo Sapiens
tcccggtgtgggaacca

SEQ ID NO: 25654 - DNA, 16 bp, Homo Sapiens
tccctggtagtctagt

SEQ ID NO: 25655 - DNA, 17 bp, Homo Sapiens
tccctggtagtctagtg

SEQ ID NO: 25656 - DNA, 18 bp, Homo Sapiens
tccctggtagtctagtgg

SEQ ID NO: 25657 - DNA, 19 bp, Homo Sapiens
tccctggtagtctagtggc

SEQ ID NO: 25658 - DNA, 20 bp, Homo Sapiens
tccctggtctagtggttagg

SEQ ID NO: 25659 - DNA, 22 bp, Homo Sapiens
tccctggtctagtggttaggat

SEQ ID NO: 25660 - DNA, 23 bp, Homo Sapiens
tccctggtctagtggttaggatt

SEQ ID NO: 25661 - DNA, 16 bp, Homo Sapiens
tccctggtggtctagt

SEQ ID NO: 25662 - DNA, 17 bp, Homo Sapiens
tccctggtggtctagtg

SEQ ID NO: 25663 - DNA, 18 bp, Homo Sapiens
tccctggtggtctagtgg

SEQ ID NO: 25664 - DNA, 19 bp, Homo Sapiens
tccctggtggtctagtggc

SEQ ID NO: 25665 - DNA, 20 bp, Homo Sapiens
tccctggtggtctagtggct

SEQ ID NO: 25666 - DNA, 21 bp, Homo Sapiens
tccctggtggtctagtggcta

SEQ ID NO: 25667 - DNA, 22 bp, Homo Sapiens
tccctggtggtctagtggctag

SEQ ID NO: 25668 - DNA, 23 bp, Homo Sapiens
tccctggtggtctagtggctagg

SEQ ID NO: 25669 - DNA, 24 bp, Homo Sapiens
tccctggtggtctagtggctagga

SEQ ID NO: 25670 - DNA, 25 bp, Homo Sapiens
tccctggtggtctagtggctaggat

SEQ ID NO: 25671 - DNA, 26 bp, Homo Sapiens
tccctggtggtctagtggctaggatt

SEQ ID NO: 25672 - DNA, 27 bp, Homo Sapiens
tccctggtggtctagtggctaggattc

SEQ ID NO: 25673 - DNA, 28 bp, Homo Sapiens
tccctggtggtctagtggctaggattcg

SEQ ID NO: 25674 - DNA, 29 bp, Homo Sapiens
tccctggtggtctagtggctaggattcgg

SEQ ID NO: 25675 - DNA, 30 bp, Homo Sapiens
tccctggtggtctagtggctaggattcggc

SEQ ID NO: 25676 - DNA, 31 bp, Homo Sapiens
tccctggtggtctagtggctaggattcggcg

SEQ ID NO: 25677 - DNA, 32 bp, Homo Sapiens
tccctggtggtctagtggctaggattcggcgc

SEQ ID NO: 25678 - DNA, 33 bp, Homo Sapiens
tccctggtggtctagtggctaggattcggcgct

SEQ ID NO: 25679 - DNA, 34 bp, Homo Sapiens
tccctggtggtctagtggctaggattcggcgctt

SEQ ID NO: 25680 - DNA, 35 bp, Homo Sapiens
tccctggtggtctagtggctaggattcggcgcttt

SEQ ID NO: 25681 - DNA, 36 bp, Homo Sapiens
tccctggtggtctagtggctaggattcggcgctttc

SEQ ID NO: 25682 - DNA, 37 bp, Homo Sapiens
tccctggtggtctagtggctaggattcggcgctttca

SEQ ID NO: 25683 - DNA, 38 bp, Homo Sapiens
tccctggtggtctagtggctaggattcggcgctttcac

SEQ ID NO: 25684 - DNA, 39 bp, Homo Sapiens
tccctggtggtctagtggctaggattcggcgctttcacc

SEQ ID NO: 25685 - DNA, 40 bp, Homo Sapiens
tccctggtggtctagtggctaggattcggcgctttcaccg

SEQ ID NO: 25686 - DNA, 41 bp, Homo Sapiens
tccctggtggtctagtggctaggattcggcgctttcaccgc

SEQ ID NO: 25687 - DNA, 42 bp, Homo Sapiens
tccctggtggtctagtggctaggattcggcgctttcaccgcc

SEQ ID NO: 25688 - DNA, 43 bp, Homo Sapiens
tccctggtggtctagtggctaggattcggcgctttcaccgccg

SEQ ID NO: 25689 - DNA, 19 bp, Homo Sapiens
tccctggtggtctagtggt

SEQ ID NO: 25690 - DNA, 20 bp, Homo Sapiens
tccctggtggtctagtggtt

SEQ ID NO: 25691 - DNA, 21 bp, Homo Sapiens
tccctggtggtctagtggtta

SEQ ID NO: 25692 - DNA, 22 bp, Homo Sapiens
tccctggtggtctagtggttag

SEQ ID NO: 25693 - DNA, 23 bp, Homo Sapiens
tccctggtggtctagtggttagg

SEQ ID NO: 25694 - DNA, 24 bp, Homo Sapiens
tccctggtggtctagtggttagga

SEQ ID NO: 25695 - DNA, 25 bp, Homo Sapiens
tccctggtggtctagtggttaggat

SEQ ID NO: 25696 - DNA, 26 bp, Homo Sapiens
tccctggtggtctagtggttaggatt

SEQ ID NO: 25697 - DNA, 27 bp, Homo Sapiens
tccctggtggtctagtggttaggattc

SEQ ID NO: 25698 - DNA, 28 bp, Homo Sapiens
tccctggtggtctagtggttaggattcg

SEQ ID NO: 25699 - DNA, 29 bp, Homo Sapiens
tccctggtggtctagtggttaggattcgg

SEQ ID NO: 25700 - DNA, 30 bp, Homo Sapiens
tccctggtggtctagtggttaggattcggc

SEQ ID NO: 25701 - DNA, 31 bp, Homo Sapiens
tccctggtggtctagtggttaggattcggcg

SEQ ID NO: 25702 - DNA, 32 bp, Homo Sapiens
tccctggtggtctagtggttaggattcggcgc

SEQ ID NO: 25703 - DNA, 33 bp, Homo Sapiens
tccctggtggtctagtggttaggattcggcgct

SEQ ID NO: 25704 - DNA, 34 bp, Homo Sapiens
tccctggtggtctagtggttaggattcggcgctc

SEQ ID NO: 25705 - DNA, 35 bp, Homo Sapiens
tccctggtggtctagtggttaggattcggcgctct

SEQ ID NO: 25706 - DNA, 36 bp, Homo Sapiens
tccctggtggtctagtggttaggattcggcgctctc

SEQ ID NO: 25707 - DNA, 37 bp, Homo Sapiens
tccctggtggtctagtggttaggattcggcgctctca

SEQ ID NO: 25708 - DNA, 38 bp, Homo Sapiens
tccctggtggtctagtggttaggattcggcgctctcac

SEQ ID NO: 25709 - DNA, 39 bp, Homo Sapiens
tccctggtggtctagtggttaggattcggcgctctcacc

SEQ ID NO: 25710 - DNA, 40 bp, Homo Sapiens
tccctggtggtctagtggttaggattcggcgctctcaccg

SEQ ID NO: 25711 - DNA, 41 bp, Homo Sapiens
tccctggtggtctagtggttaggattcggcgctctcaccgc

SEQ ID NO: 25712 - DNA, 42 bp, Homo Sapiens
tccctggtggtctagtggttaggattcggcgctctcaccgcc

SEQ ID NO: 25713 - DNA, 43 bp, Homo Sapiens
tccctggtggtctagtggttaggattcggcgctctcaccgccg

SEQ ID NO: 25714 - DNA, 44 bp, Homo Sapiens
tccctggtggtctagtggttaggattcggcgctctcaccgccgc

SEQ ID NO: 25715 - DNA, 45 bp, Homo Sapiens
tccctggtggtctagtggttaggattcggcgctctcaccgccgcg

SEQ ID NO: 25716 - DNA, 46 bp, Homo Sapiens
tccctggtggtctagtggttaggattcggcgctctcaccgccgcgg

SEQ ID NO: 25717 - DNA, 47 bp, Homo Sapiens
tccctggtggtctagtggttaggattcggcgctctcaccgccgcggc

SEQ ID NO: 25718 - DNA, 48 bp, Homo Sapiens
tccctggtggtctagtggttaggattcggcgctctcaccgccgcggcc

SEQ ID NO: 25719 - DNA, 27 bp, Homo Sapiens
tccctggttcaaatccgggtgccccct

SEQ ID NO: 25720 - DNA, 29 bp, Homo Sapiens
tccctggttcaaatccgggtgccccctcc

SEQ ID NO: 25721 - DNA, 26 bp, Homo Sapiens
tccctggttcaatcccgggtttcggc

SEQ ID NO: 25722 - DNA, 27 bp, Homo Sapiens
tccctggttcaatcccgggtttcggca

SEQ ID NO: 25723 - DNA, 28 bp, Homo Sapiens
tccctggttcaatcccgggtttcggcac

SEQ ID NO: 25724 - DNA, 30 bp, Homo Sapiens
tccctggttcaatcccgggtttcggcacca

SEQ ID NO: 25725 - DNA, 26 bp, Homo Sapiens
tccctggttcgatcccgggtttcggc

SEQ ID NO: 25726 - DNA, 27 bp, Homo Sapiens
tccctggttcgatcccgggtttcggca

SEQ ID NO: 25727 - DNA, 28 bp, Homo Sapiens
tccctggttcgatcccgggtttcggcac

SEQ ID NO: 25728 - DNA, 29 bp, Homo Sapiens
tccctggttcgatcccgggtttcggcacc

SEQ ID NO: 25729 - DNA, 30 bp, Homo Sapiens
tccctggttcgatcccgggtttcggcacca

SEQ ID NO: 25730 - DNA, 16 bp, Homo Sapiens
tccctgtggtctagtg

SEQ ID NO: 25731 - DNA, 17 bp, Homo Sapiens
tccctgtggtctagtgg

SEQ ID NO: 25732 - DNA, 18 bp, Homo Sapiens
tccctgtggtctagtggt

SEQ ID NO: 25733 - DNA, 21 bp, Homo Sapiens
tccctgtggtctagtggttag

SEQ ID NO: 25734 - DNA, 22 bp, Homo Sapiens
tccctgtggtctagtggttagg

SEQ ID NO: 25735 - DNA, 23 bp, Homo Sapiens
tccctgtggtctagtggttagga

SEQ ID NO: 25736 - DNA, 25 bp, Homo Sapiens
tccctgtggtctagtggttaggagt

SEQ ID NO: 25737 - DNA, 17 bp, Homo Sapiens
tccctgttcaggcacca

SEQ ID NO: 25738 - DNA, 16 bp, Homo Sapiens
tccctgttcaggcgcc

SEQ ID NO: 25739 - DNA, 17 bp, Homo Sapiens
tccctgttcaggcgcca

SEQ ID NO: 25740 - DNA, 16 bp, Homo Sapiens
tccctgttcgggcgcc

SEQ ID NO: 25741 - DNA, 17 bp, Homo Sapiens
tccctgttcgggcgcca

SEQ ID NO: 25742 - DNA, 16 bp, Homo Sapiens
tcccttcgtggtcgcc

SEQ ID NO: 25743 - DNA, 17 bp, Homo Sapiens
tcccttcgtggtcgcca

SEQ ID NO: 25744 - DNA, 16 bp, Homo Sapiens
tcccttcgtggttgcc

SEQ ID NO: 25745 - DNA, 35 bp, Homo Sapiens
tccgagaggtcccgggttcaaatcccggacgagcc

SEQ ID NO: 25746 - DNA, 37 bp, Homo Sapiens
tccgagaggtcccgggttcaaatcccggacgagcccc

SEQ ID NO: 25747 - DNA, 38 bp, Homo Sapiens
tccgagaggtcccgggttcaaatcccggacgagccccc

SEQ ID NO: 25748 - DNA, 16 bp, Homo Sapiens
tccgaggtgattttca

SEQ ID NO: 25749 - DNA, 17 bp, Homo Sapiens
tccgaggtgattttcat

SEQ ID NO: 25750 - DNA, 18 bp, Homo Sapiens
tccgaggtgattttcata

SEQ ID NO: 25751 - DNA, 19 bp, Homo Sapiens
tccgaggtgattttcatat

SEQ ID NO: 25752 - DNA, 20 bp, Homo Sapiens
tccgaggtgattttcatatt

SEQ ID NO: 25753 - DNA, 21 bp, Homo Sapiens
tccgaggtgattttcatattg

SEQ ID NO: 25754 - DNA, 24 bp, Homo Sapiens
tccgaggtgattttcatattgaat

SEQ ID NO: 25755 - DNA, 26 bp, Homo Sapiens
tccgaggtgattttcatattgaattg

SEQ ID NO: 25756 - DNA, 27 bp, Homo Sapiens
tccgaggtgattttcatattgaattgc

SEQ ID NO: 25757 - DNA, 28 bp, Homo Sapiens
tccgaggtgattttcatattgaattgca

SEQ ID NO: 25758 - DNA, 29 bp, Homo Sapiens
tccgaggtgattttcatattgaattgcaa

SEQ ID NO: 25759 - DNA, 31 bp, Homo Sapiens
tccgaggtgattttcatattgaattgcaaat

SEQ ID NO: 25760 - DNA, 32 bp, Homo Sapiens
tccgaggtgattttcatattgaattgcaaatt

SEQ ID NO: 25761 - DNA, 33 bp, Homo Sapiens
tccgaggtgattttcatattgaattgcaaattc

SEQ ID NO: 25762 - DNA, 34 bp, Homo Sapiens
tccgaggtgattttcatattgaattgcaaattcg

SEQ ID NO: 25763 - DNA, 43 bp, Homo Sapiens
tccgaggtgattttcatattgaattgcaaattcgaagaagcag

SEQ ID NO: 25764 - DNA, 16 bp, Homo Sapiens
tccgagtcacggcacc

SEQ ID NO: 25765 - DNA, 17 bp, Homo Sapiens
tccgagtcacggcacca

SEQ ID NO: 25766 - DNA, 26 bp, Homo Sapiens
tccgagttcaaatctcggtgggacct

SEQ ID NO: 25767 - DNA, 27 bp, Homo Sapiens
tccgagttcaaatctcggtgggacctc

SEQ ID NO: 25768 - DNA, 26 bp, Homo Sapiens
tccgagttcgagtctcggtggaacct

SEQ ID NO: 25769 - DNA, 20 bp, Homo Sapiens
tccgcgtgggttcgaacccc

SEQ ID NO: 25770 - DNA, 27 bp, Homo Sapiens
tccgcgtgggttcgaaccccactcctg

SEQ ID NO: 25771 - DNA, 28 bp, Homo Sapiens
tccgcgtgggttcgaaccccactcctgg

SEQ ID NO: 25772 - DNA, 30 bp, Homo Sapiens
tccgcgtgggttcgaaccccactcctggta

SEQ ID NO: 25773 - DNA, 31 bp, Homo Sapiens
tccgcgtgggttcgaaccccactcctggtac

SEQ ID NO: 25774 - DNA, 32 bp, Homo Sapiens
tccgcgtgggttcgaaccccactcctggtacc

SEQ ID NO: 25775 - DNA, 33 bp, Homo Sapiens
tccgcgtgggttcgaaccccactcctggtacca

SEQ ID NO: 25776 - DNA, 27 bp, Homo Sapiens
tccgcgtgggttcgaaccccacttctg

SEQ ID NO: 25777 - DNA, 17 bp, Homo Sapiens
tccggatcagaagattg

SEQ ID NO: 25778 - DNA, 18 bp, Homo Sapiens
tccggatcagaagattga

SEQ ID NO: 25779 - DNA, 19 bp, Homo Sapiens
tccggatcagaagattgag

SEQ ID NO: 25780 - DNA, 20 bp, Homo Sapiens
tccggatcagaagattgagg

SEQ ID NO: 25781 - DNA, 21 bp, Homo Sapiens
tccggatcagaagattgaggg

SEQ ID NO: 25782 - DNA, 22 bp, Homo Sapiens
tccggatcagaagattgagggt

SEQ ID NO: 25783 - DNA, 24 bp, Homo Sapiens
tccggatcagaagattgagggttc

SEQ ID NO: 25784 - DNA, 25 bp, Homo Sapiens
tccggatcagaagattgagggttcg

SEQ ID NO: 25785 - DNA, 32 bp, Homo Sapiens
tccggatcagaagattgagggttcgagtccct

SEQ ID NO: 25786 - DNA, 16 bp, Homo Sapiens
tccggatggaggcgtg

SEQ ID NO: 25787 - DNA, 17 bp, Homo Sapiens
tccggatggaggcgtgg

SEQ ID NO: 25788 - DNA, 18 bp, Homo Sapiens
tccggatggaggcgtggg

SEQ ID NO: 25789 - DNA, 19 bp, Homo Sapiens
tccggatggaggcgtgggt

SEQ ID NO: 25790 - DNA, 20 bp, Homo Sapiens
tccggatggaggcgtgggtt

SEQ ID NO: 25791 - DNA, 29 bp, Homo Sapiens
tccggatggaggcgtgggttcgaatccca

SEQ ID NO: 25792 - DNA, 31 bp, Homo Sapiens
tccggatggaggcgtgggttcgaatcccact

SEQ ID NO: 25793 - DNA, 35 bp, Homo Sapiens
tccggatggaggcgtgggttcgaatcccacttctg

SEQ ID NO: 25794 - DNA, 38 bp, Homo Sapiens
tccggatggaggcgtgggttcgaatcccacttctgaca

SEQ ID NO: 25795 - DNA, 39 bp, Homo Sapiens
tccggatggaggcgtgggttcgaatcccacttctgacac

SEQ ID NO: 25796 - DNA, 40 bp, Homo Sapiens
tccggatggaggcgtgggttcgaatcccacttctgacacc

SEQ ID NO: 25797 - DNA, 41 bp, Homo Sapiens
tccggatggaggcgtgggttcgaatcccacttctgacacca

SEQ ID NO: 25798 - DNA, 16 bp, Homo Sapiens
tccggctcgaaggacc

SEQ ID NO: 25799 - DNA, 17 bp, Homo Sapiens
tccggctcgaaggacca

SEQ ID NO: 25800 - DNA, 16 bp, Homo Sapiens
tccggctcggaggacc

SEQ ID NO: 25801 - DNA, 17 bp, Homo Sapiens
tccggctcggaggacca

SEQ ID NO: 25802 - DNA, 16 bp, Homo Sapiens
tccgggtgccccctcc

SEQ ID NO: 25803 - DNA, 17 bp, Homo Sapiens
tccgggtgccccctcca

SEQ ID NO: 25804 - DNA, 28 bp, Homo Sapiens
tccgggttcgagtcccggcagagatgcc

SEQ ID NO: 25805 - DNA, 24 bp, Homo Sapiens
tccgggttcgagtcccggcggagt

SEQ ID NO: 25806 - DNA, 25 bp, Homo Sapiens
tccgggttcgagtcccggcggagtc

SEQ ID NO: 25807 - DNA, 26 bp, Homo Sapiens
tccgggttcgagtcccggcggagtcg

SEQ ID NO: 25808 - DNA, 27 bp, Homo Sapiens
tccgggttcgagtcccggcggagtcgc

SEQ ID NO: 25809 - DNA, 28 bp, Homo Sapiens
tccgggttcgagtcccggcggagtcgcc

SEQ ID NO: 25810 - DNA, 29 bp, Homo Sapiens
tccgggttcgagtcccggcggagtcgcca

SEQ ID NO: 25811 - DNA, 20 bp, Homo Sapiens
tccgtagtggagtggttatc

SEQ ID NO: 25812 - DNA, 30 bp, Homo Sapiens
tccgtagtggagtggttatcacgttcgcct

SEQ ID NO: 25813 - DNA, 33 bp, Homo Sapiens
tccgtagtggagtggttatcacgttcgcctcac

SEQ ID NO: 25814 - DNA, 20 bp, Homo Sapiens
tccgtagtgtagcggttatc

SEQ ID NO: 25815 - DNA, 25 bp, Homo Sapiens
tccgtagtgtagcggttatcacatt

SEQ ID NO: 25816 - DNA, 29 bp, Homo Sapiens
tccgtagtgtagcggttatcacattcgcc

SEQ ID NO: 25817 - DNA, 30 bp, Homo Sapiens
tccgtagtgtagcggttatcacattcgcct

SEQ ID NO: 25818 - DNA, 31 bp, Homo Sapiens
tccgtagtgtagcggttatcacattcgcctc

SEQ ID NO: 25819 - DNA, 32 bp, Homo Sapiens
tccgtagtgtagcggttatcacattcgcctca

SEQ ID NO: 25820 - DNA, 33 bp, Homo Sapiens
tccgtagtgtagcggttatcacattcgcctcac

SEQ ID NO: 25821 - DNA, 34 bp, Homo Sapiens
tccgtagtgtagcggttatcacattcgcctcaca

SEQ ID NO: 25822 - DNA, 16 bp, Homo Sapiens
tccgtagtgtagtggt

SEQ ID NO: 25823 - DNA, 17 bp, Homo Sapiens
tccgtagtgtagtggtc

SEQ ID NO: 25824 - DNA, 18 bp, Homo Sapiens
tccgtagtgtagtggtca

SEQ ID NO: 25825 - DNA, 19 bp, Homo Sapiens
tccgtagtgtagtggtcat

SEQ ID NO: 25826 - DNA, 20 bp, Homo Sapiens
tccgtagtgtagtggtcatc

SEQ ID NO: 25827 - DNA, 21 bp, Homo Sapiens
tccgtagtgtagtggtcatca

SEQ ID NO: 25828 - DNA, 27 bp, Homo Sapiens
tccgtagtgtagtggtcatcacgttcg

SEQ ID NO: 25829 - DNA, 28 bp, Homo Sapiens
tccgtagtgtagtggtcatcacgttcgc

SEQ ID NO: 25830 - DNA, 29 bp, Homo Sapiens
tccgtagtgtagtggtcatcacgttcgcc

SEQ ID NO: 25831 - DNA, 30 bp, Homo Sapiens
tccgtagtgtagtggtcatcacgttcgcct

SEQ ID NO: 25832 - DNA, 32 bp, Homo Sapiens
tccgtagtgtagtggtcatcacgttcgcctaa

SEQ ID NO: 25833 - DNA, 33 bp, Homo Sapiens
tccgtagtgtagtggtcatcacgttcgcctaac

SEQ ID NO: 25834 - DNA, 19 bp, Homo Sapiens
tccgtagtgtagtggttat

SEQ ID NO: 25835 - DNA, 20 bp, Homo Sapiens
tccgtagtgtagtggttatc

SEQ ID NO: 25836 - DNA, 21 bp, Homo Sapiens
tccgtagtgtagtggttatca

SEQ ID NO: 25837 - DNA, 22 bp, Homo Sapiens
tccgtagtgtagtggttatcac

SEQ ID NO: 25838 - DNA, 23 bp, Homo Sapiens
tccgtagtgtagtggttatcacg

SEQ ID NO: 25839 - DNA, 26 bp, Homo Sapiens
tccgtagtgtagtggttatcacgttc

SEQ ID NO: 25840 - DNA, 27 bp, Homo Sapiens
tccgtagtgtagtggttatcacgttcg

SEQ ID NO: 25841 - DNA, 28 bp, Homo Sapiens
tccgtagtgtagtggttatcacgttcgc

SEQ ID NO: 25842 - DNA, 29 bp, Homo Sapiens
tccgtagtgtagtggttatcacgttcgcc

SEQ ID NO: 25843 - DNA, 30 bp, Homo Sapiens
tccgtagtgtagtggttatcacgttcgcct

SEQ ID NO: 25844 - DNA, 31 bp, Homo Sapiens
tccgtagtgtagtggttatcacgttcgccta

SEQ ID NO: 25845 - DNA, 32 bp, Homo Sapiens
tccgtagtgtagtggttatcacgttcgcctaa

SEQ ID NO: 25846 - DNA, 33 bp, Homo Sapiens
tccgtagtgtagtggttatcacgttcgcctaac

SEQ ID NO: 25847 - DNA, 31 bp, Homo Sapiens
tccgtagtgtagtggttatcacgttcgcctc

SEQ ID NO: 25848 - DNA, 32 bp, Homo Sapiens
tccgtagtgtagtggttatcacgttcgcctca

SEQ ID NO: 25849 - DNA, 33 bp, Homo Sapiens
tccgtagtgtagtggttatcacgttcgcctcac

SEQ ID NO: 25850 - DNA, 34 bp, Homo Sapiens
tccgtagtgtagtggttatcacgttcgcctcaca

SEQ ID NO: 25851 - DNA, 35 bp, Homo Sapiens
tccgtagtgtagtggttatcacgttcgcctcacac

SEQ ID NO: 25852 - DNA, 36 bp, Homo Sapiens
tccgtagtgtagtggttatcacgttcgcctcacacg

SEQ ID NO: 25853 - DNA, 37 bp, Homo Sapiens
tccgtagtgtagtggttatcacgttcgcctcacacgc

SEQ ID NO: 25854 - DNA, 40 bp, Homo Sapiens
tccgtagtgtagtggttatcacgttcgcctcacacgcgaa

SEQ ID NO: 25855 - DNA, 29 bp, Homo Sapiens
tccgtagtgtagtggttatcacgtttgcc

SEQ ID NO: 25856 - DNA, 30 bp, Homo Sapiens
tccgtagtgtagtggttatcacgtttgcct

SEQ ID NO: 25857 - DNA, 16 bp, Homo Sapiens
tccgtgcgagaatacc

SEQ ID NO: 25858 - DNA, 17 bp, Homo Sapiens
tccgtgcgagaatacca

SEQ ID NO: 25859 - DNA, 16 bp, Homo Sapiens
tccgtggcgcaatgga

SEQ ID NO: 25860 - DNA, 26 bp, Homo Sapiens
tccgtggcgcaatggatagcgcattg

SEQ ID NO: 25861 - DNA, 29 bp, Homo Sapiens
tccgtggcgcaatggatagcgcattggac

SEQ ID NO: 25862 - DNA, 30 bp, Homo Sapiens
tccgtggcgcaatggatagcgcattggact

SEQ ID NO: 25863 - DNA, 33 bp, Homo Sapiens
tccgtggcgcaatggatagcgcattggacttct

SEQ ID NO: 25864 - DNA, 19 bp, Homo Sapiens
tccgtggtggtctagtggc

SEQ ID NO: 25865 - DNA, 32 bp, Homo Sapiens
tccgtggtggtctagtggctaggattcggcgc

SEQ ID NO: 25866 - DNA, 33 bp, Homo Sapiens
tccgtggtggtctagtggctaggattcggcgct

SEQ ID NO: 25867 - DNA, 32 bp, Homo Sapiens
tcctaagccagggattgtgggttcgagtccca

SEQ ID NO: 25868 - DNA, 36 bp, Homo Sapiens
tcctaagccagggattgtgggttcgagtcccacccg

SEQ ID NO: 25869 - DNA, 41 bp, Homo Sapiens
tcctaagccagggattgtgggttcgagtcccacccggggta

SEQ ID NO: 25870 - DNA, 44 bp, Homo Sapiens
tcctaagccagggattgtgggttcgagtcccacccggggtacca

SEQ ID NO: 25871 - DNA, 43 bp, Homo Sapiens
tcctaagccagggattgtgggttcgagtcccacctggggtacc

SEQ ID NO: 25872 - DNA, 43 bp, Homo Sapiens
tcctaagccagggattgtgggttcgagtcccacctggggtgcc

SEQ ID NO: 25873 - DNA, 43 bp, Homo Sapiens
tcctaagccagggattgtgggttcgagtcccatctggggtgcc

SEQ ID NO: 25874 - DNA, 44 bp, Homo Sapiens
tcctaagccagggattgtgggttcgagtcccatctggggtgcca

SEQ ID NO: 25875 - DNA, 16 bp, Homo Sapiens
tcctatatatcttacc

SEQ ID NO: 25876 - DNA, 17 bp, Homo Sapiens
tcctatatatcttacca

SEQ ID NO: 25877 - DNA, 17 bp, Homo Sapiens
tcctcaaagcaatacac

SEQ ID NO: 25878 - DNA, 19 bp, Homo Sapiens
tcctcaaagcaatacactg

SEQ ID NO: 25879 - DNA, 20 bp, Homo Sapiens
tcctcaaagcaatacactga

SEQ ID NO: 25880 - DNA, 21 bp, Homo Sapiens
tcctcaaagcaatacactgaa

SEQ ID NO: 25881 - DNA, 36 bp, Homo Sapiens
tcctcaaagcaatacactgaaaatgtttagacgggc

SEQ ID NO: 25882 - DNA, 37 bp, Homo Sapiens
tcctcaaagcaatacactgaaaatgtttagacgggct

SEQ ID NO: 25883 - DNA, 38 bp, Homo Sapiens
tcctcaaagcaatacactgaaaatgtttagacgggctc

SEQ ID NO: 25884 - DNA, 39 bp, Homo Sapiens
tcctcaaagcaatacactgaaaatgtttagacgggctca

SEQ ID NO: 25885 - DNA, 40 bp, Homo Sapiens
tcctcaaagcaatacactgaaaatgtttagacgggctcac

SEQ ID NO: 25886 - DNA, 17 bp, Homo Sapiens
tcctcacacggggcacc

SEQ ID NO: 25887 - DNA, 18 bp, Homo Sapiens
tcctcacacggggcacca

SEQ ID NO: 25888 - DNA, 17 bp, Homo Sapiens
tcctcacctggagcacc

SEQ ID NO: 25889 - DNA, 18 bp, Homo Sapiens
tcctcacctggagcacca

SEQ ID NO: 25890 - DNA, 16 bp, Homo Sapiens
tcctcgctggggcctc

SEQ ID NO: 25891 - DNA, 17 bp, Homo Sapiens
tcctcgctggggcctcc

SEQ ID NO: 25892 - DNA, 18 bp, Homo Sapiens
tcctcgctggggcctcca

SEQ ID NO: 25893 - DNA, 16 bp, Homo Sapiens
tcctcgttagtatagt

SEQ ID NO: 25894 - DNA, 17 bp, Homo Sapiens
tcctcgttagtatagtg

SEQ ID NO: 25895 - DNA, 18 bp, Homo Sapiens
tcctcgttagtatagtgg

SEQ ID NO: 25896 - DNA, 20 bp, Homo Sapiens
tcctcgttagtatagtggtg

SEQ ID NO: 25897 - DNA, 21 bp, Homo Sapiens
tcctcgttagtatagtggtga

SEQ ID NO: 25898 - DNA, 22 bp, Homo Sapiens
tcctcgttagtatagtggtgag

SEQ ID NO: 25899 - DNA, 23 bp, Homo Sapiens
tcctcgttagtatagtggtgagt

SEQ ID NO: 25900 - DNA, 24 bp, Homo Sapiens
tcctcgttagtatagtggtgagta

SEQ ID NO: 25901 - DNA, 25 bp, Homo Sapiens
tcctcgttagtatagtggtgagtat

SEQ ID NO: 25902 - DNA, 26 bp, Homo Sapiens
tcctcgttagtatagtggtgagtatc

SEQ ID NO: 25903 - DNA, 27 bp, Homo Sapiens
tcctcgttagtatagtggtgagtatcc

SEQ ID NO: 25904 - DNA, 28 bp, Homo Sapiens
tcctcgttagtatagtggtgagtatccc

SEQ ID NO: 25905 - DNA, 29 bp, Homo Sapiens
tcctcgttagtatagtggtgagtatcccc

SEQ ID NO: 25906 - DNA, 30 bp, Homo Sapiens
tcctcgttagtatagtggtgagtatccccg

SEQ ID NO: 25907 - DNA, 31 bp, Homo Sapiens
tcctcgttagtatagtggtgagtatccccgc

SEQ ID NO: 25908 - DNA, 32 bp, Homo Sapiens
tcctcgttagtatagtggtgagtatccccgcc

SEQ ID NO: 25909 - DNA, 33 bp, Homo Sapiens
tcctcgttagtatagtggtgagtatccccgcct

SEQ ID NO: 25910 - DNA, 34 bp, Homo Sapiens
tcctcgttagtatagtggtgagtatccccgcctg

SEQ ID NO: 25911 - DNA, 35 bp, Homo Sapiens
tcctcgttagtatagtggtgagtatccccgcctgt

SEQ ID NO: 25912 - DNA, 36 bp, Homo Sapiens
tcctcgttagtatagtggtgagtatccccgcctgtc

SEQ ID NO: 25913 - DNA, 37 bp, Homo Sapiens
tcctcgttagtatagtggtgagtatccccgcctgtca

SEQ ID NO: 25914 - DNA, 38 bp, Homo Sapiens
tcctcgttagtatagtggtgagtatccccgcctgtcac

SEQ ID NO: 25915 - DNA, 39 bp, Homo Sapiens
tcctcgttagtatagtggtgagtatccccgcctgtcacg

SEQ ID NO: 25916 - DNA, 40 bp, Homo Sapiens
tcctcgttagtatagtggtgagtatccccgcctgtcacgc

SEQ ID NO: 25917 - DNA, 41 bp, Homo Sapiens
tcctcgttagtatagtggtgagtatccccgcctgtcacgcg

SEQ ID NO: 25918 - DNA, 42 bp, Homo Sapiens
tcctcgttagtatagtggtgagtatccccgcctgtcacgcgg

SEQ ID NO: 25919 - DNA, 43 bp, Homo Sapiens
tcctcgttagtatagtggtgagtatccccgcctgtcacgcggg

SEQ ID NO: 25920 - DNA, 24 bp, Homo Sapiens
tcctcgttagtatagtggtgagtg

SEQ ID NO: 25921 - DNA, 22 bp, Homo Sapiens
tcctcgttagtatagtggttag

SEQ ID NO: 25922 - DNA, 23 bp, Homo Sapiens
tcctcgttagtatagtggttagt

SEQ ID NO: 25923 - DNA, 24 bp, Homo Sapiens
tcctcgttagtatagtggttagta

SEQ ID NO: 25924 - DNA, 26 bp, Homo Sapiens
tcctcgttagtatagtggttagtatc

SEQ ID NO: 25925 - DNA, 27 bp, Homo Sapiens
tcctcgttagtatagtggttagtatcc

SEQ ID NO: 25926 - DNA, 28 bp, Homo Sapiens
tcctcgttagtatagtggttagtatccc

SEQ ID NO: 25927 - DNA, 29 bp, Homo Sapiens
tcctcgttagtatagtggttagtatcccc

SEQ ID NO: 25928 - DNA, 30 bp, Homo Sapiens
tcctcgttagtatagtggttagtatccccg

SEQ ID NO: 25929 - DNA, 31 bp, Homo Sapiens
tcctcgttagtatagtggttagtatccccgc

SEQ ID NO: 25930 - DNA, 32 bp, Homo Sapiens
tcctcgttagtatagtggttagtatccccgcc

SEQ ID NO: 25931 - DNA, 33 bp, Homo Sapiens
tcctcgttagtatagtggttagtatccccgcct

SEQ ID NO: 25932 - DNA, 34 bp, Homo Sapiens
tcctcgttagtatagtggttagtatccccgcctg

SEQ ID NO: 25933 - DNA, 35 bp, Homo Sapiens
tcctcgttagtatagtggttagtatccccgcctgt

SEQ ID NO: 25934 - DNA, 36 bp, Homo Sapiens
tcctcgttagtatagtggttagtatccccgcctgtc

SEQ ID NO: 25935 - DNA, 37 bp, Homo Sapiens
tcctcgttagtatagtggttagtatccccgcctgtca

SEQ ID NO: 25936 - DNA, 38 bp, Homo Sapiens
tcctcgttagtatagtggttagtatccccgcctgtcac

SEQ ID NO: 25937 - DNA, 39 bp, Homo Sapiens
tcctcgttagtatagtggttagtatccccgcctgtcacg

SEQ ID NO: 25938 - DNA, 16 bp, Homo Sapiens
tcctcttcttaacacc

SEQ ID NO: 25939 - DNA, 17 bp, Homo Sapiens
tcctcttcttaacacca

SEQ ID NO: 25940 - DNA, 26 bp, Homo Sapiens
tcctgagttcgaacctcagagggggc

SEQ ID NO: 25941 - DNA, 27 bp, Homo Sapiens
tcctgagttcgaacctcagagggggca

SEQ ID NO: 25942 - DNA, 29 bp, Homo Sapiens
tcctgagttcgaacctcagagggggcacc

SEQ ID NO: 25943 - DNA, 27 bp, Homo Sapiens
tcctgagttcgagcctcagagagggca

SEQ ID NO: 25944 - DNA, 16 bp, Homo Sapiens
tcctgccgactacgcc

SEQ ID NO: 25945 - DNA, 17 bp, Homo Sapiens
tcctgccgactacgcca

SEQ ID NO: 25946 - DNA, 16 bp, Homo Sapiens
tcctgccgcggtcgcc

SEQ ID NO: 25947 - DNA, 17 bp, Homo Sapiens
tcctgccgcggtcgcca

SEQ ID NO: 25948 - DNA, 16 bp, Homo Sapiens
tcctgctcacagcgcc

SEQ ID NO: 25949 - DNA, 17 bp, Homo Sapiens
tcctgctcacagcgcca

SEQ ID NO: 25950 - DNA, 16 bp, Homo Sapiens
tcctggctggctcgcc

SEQ ID NO: 25951 - DNA, 17 bp, Homo Sapiens
tcctggctggctcgcca

SEQ ID NO: 25952 - DNA, 25 bp, Homo Sapiens
tcctgggttcgaatcccagcggggc

SEQ ID NO: 25953 - DNA, 26 bp, Homo Sapiens
tcctgggttcgaatcccagcggggcc

SEQ ID NO: 25954 - DNA, 28 bp, Homo Sapiens
tcctgggttcgaatcccagcggggcctc

SEQ ID NO: 25955 - DNA, 29 bp, Homo Sapiens
tcctgggttcgaatcccagcggggcctcc

SEQ ID NO: 25956 - DNA, 24 bp, Homo Sapiens
tcctgggttcgaatcccagcggtg

SEQ ID NO: 25957 - DNA, 28 bp, Homo Sapiens
tcctgggttcgaatcccagcggtgcctc

SEQ ID NO: 25958 - DNA, 29 bp, Homo Sapiens
tcctgggttcgaatcccagcggtgcctcc

SEQ ID NO: 25959 - DNA, 23 bp, Homo Sapiens
tcctgggttcgagccccagtgga

SEQ ID NO: 25960 - DNA, 29 bp, Homo Sapiens
tcctgggttcgagccccagtggaaccacc

SEQ ID NO: 25961 - DNA, 30 bp, Homo Sapiens
tcctgggttcgagccccagtggaaccacca

SEQ ID NO: 25962 - DNA, 23 bp, Homo Sapiens
tcctggttttcacccaggcggcc

SEQ ID NO: 25963 - DNA, 26 bp, Homo Sapiens
tcctggttttcacccaggcggcccgg

SEQ ID NO: 25964 - DNA, 30 bp, Homo Sapiens
tcctggttttcacccaggcggcccgggttc

SEQ ID NO: 25965 - DNA, 35 bp, Homo Sapiens
tcctggttttcacccaggcggcccgggttcgactc

SEQ ID NO: 25966 - DNA, 31 bp, Homo Sapiens
tcctggttttcacccaggtggcccgggttcg

SEQ ID NO: 25967 - DNA, 16 bp, Homo Sapiens
tcctgtcggctacgcc

SEQ ID NO: 25968 - DNA, 17 bp, Homo Sapiens
tcctgtcggctacgcca

SEQ ID NO: 25969 - DNA, 16 bp, Homo Sapiens
tcctgttcgtgacgcc

SEQ ID NO: 25970 - DNA, 17 bp, Homo Sapiens
tcctgttcgtgacgcca

SEQ ID NO: 25971 - DNA, 20 bp, Homo Sapiens
tccttagcgcagtaggcagc

SEQ ID NO: 25972 - DNA, 16 bp, Homo Sapiens
tccttaggtcgctggt

SEQ ID NO: 25973 - DNA, 17 bp, Homo Sapiens
tccttaggtcgctggtt

SEQ ID NO: 25974 - DNA, 18 bp, Homo Sapiens
tccttaggtcgctggttc

SEQ ID NO: 25975 - DNA, 19 bp, Homo Sapiens
tccttaggtcgctggttcg

SEQ ID NO: 25976 - DNA, 29 bp, Homo Sapiens
tccttaggtcgctggttcgaatccggctc

SEQ ID NO: 25977 - DNA, 30 bp, Homo Sapiens
tccttaggtcgctggttcgaatccggctcg

SEQ ID NO: 25978 - DNA, 31 bp, Homo Sapiens
tccttaggtcgctggttcgaatccggctcga

SEQ ID NO: 25979 - DNA, 32 bp, Homo Sapiens
tccttaggtcgctggttcgaatccggctcgaa

SEQ ID NO: 25980 - DNA, 33 bp, Homo Sapiens
tccttaggtcgctggttcgaatccggctcgaag

SEQ ID NO: 25981 - DNA, 37 bp, Homo Sapiens
tccttaggtcgctggttcgaatccggctcgaaggacc

SEQ ID NO: 25982 - DNA, 28 bp, Homo Sapiens
tccttaggtcgctggttcgattccggct

SEQ ID NO: 25983 - DNA, 30 bp, Homo Sapiens
tccttaggtcgctggttcgattccggctcg

SEQ ID NO: 25984 - DNA, 31 bp, Homo Sapiens
tccttaggtcgctggttcgattccggctcga

SEQ ID NO: 25985 - DNA, 32 bp, Homo Sapiens
tccttaggtcgctggttcgattccggctcgaa

SEQ ID NO: 25986 - DNA, 33 bp, Homo Sapiens
tccttaggtcgctggttcgattccggctcgaag

SEQ ID NO: 25987 - DNA, 37 bp, Homo Sapiens
tccttaggtcgctggttcgattccggctcgaaggacc

SEQ ID NO: 25988 - DNA, 16 bp, Homo Sapiens
tccttccttttttgcc

SEQ ID NO: 25989 - DNA, 17 bp, Homo Sapiens
tccttccttttttgcca

SEQ ID NO: 25990 - DNA, 21 bp, Homo Sapiens
tccttggtggtctagtggcta

SEQ ID NO: 25991 - DNA, 16 bp, Homo Sapiens
tcgaaaccatcctctg

SEQ ID NO: 25992 - DNA, 17 bp, Homo Sapiens
tcgaaaccatcctctgc

SEQ ID NO: 25993 - DNA, 18 bp, Homo Sapiens
tcgaaaccatcctctgct

SEQ ID NO: 25994 - DNA, 19 bp, Homo Sapiens
tcgaaaccatcctctgcta

SEQ ID NO: 25995 - DNA, 20 bp, Homo Sapiens
tcgaaaccatcctctgctac

SEQ ID NO: 25996 - DNA, 21 bp, Homo Sapiens
tcgaaaccatcctctgctacc

SEQ ID NO: 25997 - DNA, 22 bp, Homo Sapiens
tcgaaaccatcctctgctacca

SEQ ID NO: 25998 - DNA, 21 bp, Homo Sapiens
tcgaaaccgagcggaaacacc

SEQ ID NO: 25999 - DNA, 20 bp, Homo Sapiens
tcgaaaccgggcagaagcac

SEQ ID NO: 26000 - DNA, 21 bp, Homo Sapiens
tcgaaaccgggcagaagcacc

SEQ ID NO: 26001 - DNA, 22 bp, Homo Sapiens
tcgaaaccgggcagaagcacca

SEQ ID NO: 26002 - DNA, 16 bp, Homo Sapiens
tcgaaaccgggcggaa

SEQ ID NO: 26003 - DNA, 17 bp, Homo Sapiens
tcgaaaccgggcggaaa

SEQ ID NO: 26004 - DNA, 18 bp, Homo Sapiens
tcgaaaccgggcggaaac

SEQ ID NO: 26005 - DNA, 19 bp, Homo Sapiens
tcgaaaccgggcggaaaca

SEQ ID NO: 26006 - DNA, 20 bp, Homo Sapiens
tcgaaaccgggcggaaacac

SEQ ID NO: 26007 - DNA, 21 bp, Homo Sapiens
tcgaaaccgggcggaaacacc

SEQ ID NO: 26008 - DNA, 22 bp, Homo Sapiens
tcgaaaccgggcggaaacacca

SEQ ID NO: 26009 - DNA, 22 bp, Homo Sapiens
tcgaaatccaatggggtctccc

SEQ ID NO: 26010 - DNA, 19 bp, Homo Sapiens
tcgaaccccactcctggta

SEQ ID NO: 26011 - DNA, 20 bp, Homo Sapiens
tcgaaccccactcctggtac

SEQ ID NO: 26012 - DNA, 21 bp, Homo Sapiens
tcgaaccccactcctggtacc

SEQ ID NO: 26013 - DNA, 22 bp, Homo Sapiens
tcgaaccccactcctggtacca

SEQ ID NO: 26014 - DNA, 19 bp, Homo Sapiens
tcgaaccccacttctggta

SEQ ID NO: 26015 - DNA, 21 bp, Homo Sapiens
tcgaaccccacttctggtacc

SEQ ID NO: 26016 - DNA, 21 bp, Homo Sapiens
tcgaaccccgtacgggccacc

SEQ ID NO: 26017 - DNA, 16 bp, Homo Sapiens
tcgaaccccgtccgtg

SEQ ID NO: 26018 - DNA, 18 bp, Homo Sapiens
tcgaaccccgtccgtgcc

SEQ ID NO: 26019 - DNA, 19 bp, Homo Sapiens
tcgaaccccgtccgtgcct

SEQ ID NO: 26020 - DNA, 20 bp, Homo Sapiens
tcgaaccccgtccgtgcctc

SEQ ID NO: 26021 - DNA, 21 bp, Homo Sapiens
tcgaaccccgtccgtgcctcc

SEQ ID NO: 26022 - DNA, 22 bp, Homo Sapiens
tcgaaccccgtccgtgcctcca

SEQ ID NO: 26023 - DNA, 16 bp, Homo Sapiens
tcgaaccctgctcgct

SEQ ID NO: 26024 - DNA, 20 bp, Homo Sapiens
tcgaaccctgctcgctgcgc

SEQ ID NO: 26025 - DNA, 21 bp, Homo Sapiens
tcgaaccctgctcgctgcgcc

SEQ ID NO: 26026 - DNA, 22 bp, Homo Sapiens
tcgaaccctgctcgctgcgcca

SEQ ID NO: 26027 - DNA, 16 bp, Homo Sapiens
tcgaacctcagagggg

SEQ ID NO: 26028 - DNA, 21 bp, Homo Sapiens
tcgaacctcagagggggcacc

SEQ ID NO: 26029 - DNA, 22 bp, Homo Sapiens
tcgaacctcagagggggcacca

SEQ ID NO: 26030 - DNA, 16 bp, Homo Sapiens
tcgaagaagcagcttc

SEQ ID NO: 26031 - DNA, 21 bp, Homo Sapiens
tcgaagaagcagcttcaaacc

SEQ ID NO: 26032 - DNA, 22 bp, Homo Sapiens
tcgaagaagcagcttcaaacct

SEQ ID NO: 26033 - DNA, 23 bp, Homo Sapiens
tcgaagaagcagcttcaaacctg

SEQ ID NO: 26034 - DNA, 24 bp, Homo Sapiens
tcgaagaagcagcttcaaacctgc

SEQ ID NO: 26035 - DNA, 25 bp, Homo Sapiens
tcgaagaagcagcttcaaacctgcc

SEQ ID NO: 26036 - DNA, 26 bp, Homo Sapiens
tcgaagaagcagcttcaaacctgccg

SEQ ID NO: 26037 - DNA, 28 bp, Homo Sapiens
tcgaagaagcagcttcaaacctgccggg

SEQ ID NO: 26038 - DNA, 29 bp, Homo Sapiens
tcgaagaagcagcttcaaacctgccgggg

SEQ ID NO: 26039 - DNA, 30 bp, Homo Sapiens
tcgaagaagcagcttcaaacctgccggggc

SEQ ID NO: 26040 - DNA, 31 bp, Homo Sapiens
tcgaagaagcagcttcaaacctgccggggct

SEQ ID NO: 26041 - DNA, 32 bp, Homo Sapiens
tcgaagaagcagcttcaaacctgccggggctt

SEQ ID NO: 26042 - DNA, 33 bp, Homo Sapiens
tcgaagaagcagcttcaaacctgccggggcttc

SEQ ID NO: 26043 - DNA, 34 bp, Homo Sapiens
tcgaagaagcagcttcaaacctgccggggcttcc

SEQ ID NO: 26044 - DNA, 35 bp, Homo Sapiens
tcgaagaagcagcttcaaacctgccggggcttcca

SEQ ID NO: 26045 - DNA, 19 bp, Homo Sapiens
tcgaatcacgtcggggtca

SEQ ID NO: 26046 - DNA, 20 bp, Homo Sapiens
tcgaatcacgtcggggtcac

SEQ ID NO: 26047 - DNA, 21 bp, Homo Sapiens
tcgaatcacgtcggggtcacc

SEQ ID NO: 26048 - DNA, 22 bp, Homo Sapiens
tcgaatcacgtcggggtcacca

SEQ ID NO: 26049 - DNA, 18 bp, Homo Sapiens
tcgaatcccaccactgcc

SEQ ID NO: 26050 - DNA, 21 bp, Homo Sapiens
tcgaatcccaccactgccacc

SEQ ID NO: 26051 - DNA, 21 bp, Homo Sapiens
tcgaatcccaccctcgtcgcc

SEQ ID NO: 26052 - DNA, 22 bp, Homo Sapiens
tcgaatcccaccctcgtcgcca

SEQ ID NO: 26053 - DNA, 16 bp, Homo Sapiens
tcgaatcccaccgctg

SEQ ID NO: 26054 - DNA, 18 bp, Homo Sapiens
tcgaatcccaccgctgcc

SEQ ID NO: 26055 - DNA, 19 bp, Homo Sapiens
tcgaatcccaccgctgcca

SEQ ID NO: 26056 - DNA, 20 bp, Homo Sapiens
tcgaatcccaccgctgccac

SEQ ID NO: 26057 - DNA, 21 bp, Homo Sapiens
tcgaatcccaccgctgccacc

SEQ ID NO: 26058 - DNA, 22 bp, Homo Sapiens
tcgaatcccaccgctgccacca

SEQ ID NO: 26059 - DNA, 21 bp, Homo Sapiens
tcgaatcccaccttcgtcgcc

SEQ ID NO: 26060 - DNA, 22 bp, Homo Sapiens
tcgaatcccaccttcgtcgcca

SEQ ID NO: 26061 - DNA, 19 bp, Homo Sapiens
tcgaatcccactcctgaca

SEQ ID NO: 26062 - DNA, 20 bp, Homo Sapiens
tcgaatcccactcctgacac

SEQ ID NO: 26063 - DNA, 21 bp, Homo Sapiens
tcgaatcccactcctgacacc

SEQ ID NO: 26064 - DNA, 22 bp, Homo Sapiens
tcgaatcccactcctgacacca

SEQ ID NO: 26065 - DNA, 16 bp, Homo Sapiens
tcgaatcccacttctg

SEQ ID NO: 26066 - DNA, 17 bp, Homo Sapiens
tcgaatcccacttctga

SEQ ID NO: 26067 - DNA, 18 bp, Homo Sapiens
tcgaatcccacttctgac

SEQ ID NO: 26068 - DNA, 19 bp, Homo Sapiens
tcgaatcccacttctgaca

SEQ ID NO: 26069 - DNA, 20 bp, Homo Sapiens
tcgaatcccacttctgacac

SEQ ID NO: 26070 - DNA, 21 bp, Homo Sapiens
tcgaatcccacttctgacacc

SEQ ID NO: 26071 - DNA, 22 bp, Homo Sapiens
tcgaatcccacttctgacacca

SEQ ID NO: 26072 - DNA, 22 bp, Homo Sapiens
tcgaatcccagcggggcctcca

SEQ ID NO: 26073 - DNA, 16 bp, Homo Sapiens
tcgaatcccagcggtg

SEQ ID NO: 26074 - DNA, 18 bp, Homo Sapiens
tcgaatcccagcggtgcc

SEQ ID NO: 26075 - DNA, 19 bp, Homo Sapiens
tcgaatcccagcggtgcct

SEQ ID NO: 26076 - DNA, 20 bp, Homo Sapiens
tcgaatcccagcggtgcctc

SEQ ID NO: 26077 - DNA, 21 bp, Homo Sapiens
tcgaatcccagcggtgcctcc

SEQ ID NO: 26078 - DNA, 22 bp, Homo Sapiens
tcgaatcccagcggtgcctcca

SEQ ID NO: 26079 - DNA, 19 bp, Homo Sapiens
tcgaatcccagtagagcct

SEQ ID NO: 26080 - DNA, 21 bp, Homo Sapiens
tcgaatcccagtagagcctcc

SEQ ID NO: 26081 - DNA, 22 bp, Homo Sapiens
tcgaatcccagtagagcctcca

SEQ ID NO: 26082 - DNA, 19 bp, Homo Sapiens
tcgaatcccatcctcgtcg

SEQ ID NO: 26083 - DNA, 20 bp, Homo Sapiens
tcgaatcccatcctcgtcgc

SEQ ID NO: 26084 - DNA, 21 bp, Homo Sapiens
tcgaatcccatcctcgtcgcc

SEQ ID NO: 26085 - DNA, 22 bp, Homo Sapiens
tcgaatcccatcctcgtcgcca

SEQ ID NO: 26086 - DNA, 22 bp, Homo Sapiens
tcgaatcccttcgtggttgcca

SEQ ID NO: 26087 - DNA, 16 bp, Homo Sapiens
tcgaatccgagtcacg

SEQ ID NO: 26088 - DNA, 17 bp, Homo Sapiens
tcgaatccgagtcacgg

SEQ ID NO: 26089 - DNA, 18 bp, Homo Sapiens
tcgaatccgagtcacggc

SEQ ID NO: 26090 - DNA, 19 bp, Homo Sapiens
tcgaatccgagtcacggca

SEQ ID NO: 26091 - DNA, 20 bp, Homo Sapiens
tcgaatccgagtcacggcac

SEQ ID NO: 26092 - DNA, 21 bp, Homo Sapiens
tcgaatccgagtcacggcacc

SEQ ID NO: 26093 - DNA, 22 bp, Homo Sapiens
tcgaatccgagtcacggcacca

SEQ ID NO: 26094 - DNA, 19 bp, Homo Sapiens
tcgaatccggctcgaagga

SEQ ID NO: 26095 - DNA, 20 bp, Homo Sapiens
tcgaatccggctcgaaggac

SEQ ID NO: 26096 - DNA, 21 bp, Homo Sapiens
tcgaatccggctcgaaggacc

SEQ ID NO: 26097 - DNA, 22 bp, Homo Sapiens
tcgaatccggctcgaaggacca

SEQ ID NO: 26098 - DNA, 21 bp, Homo Sapiens
tcgaatccggctcggaggacc

SEQ ID NO: 26099 - DNA, 16 bp, Homo Sapiens
tcgaatcctgccgact

SEQ ID NO: 26100 - DNA, 20 bp, Homo Sapiens
tcgaatcctgccgactacgc

SEQ ID NO: 26101 - DNA, 21 bp, Homo Sapiens
tcgaatcctgccgactacgcc

SEQ ID NO: 26102 - DNA, 22 bp, Homo Sapiens
tcgaatcctgccgactacgcca

SEQ ID NO: 26103 - DNA, 21 bp, Homo Sapiens
tcgaatcctgctcacagcgcc

SEQ ID NO: 26104 - DNA, 22 bp, Homo Sapiens
tcgaatcctgtcggctacgcca

SEQ ID NO: 26105 - DNA, 21 bp, Homo Sapiens
tcgaatcctgttcgtgacgcc

SEQ ID NO: 26106 - DNA, 22 bp, Homo Sapiens
tcgaatcctgttcgtgacgcca

SEQ ID NO: 26107 - DNA, 18 bp, Homo Sapiens
tcgactcattaaattatg

SEQ ID NO: 26108 - DNA, 20 bp, Homo Sapiens
tcgactcattaaattatgat

SEQ ID NO: 26109 - DNA, 21 bp, Homo Sapiens
tcgactcattaaattatgata

SEQ ID NO: 26110 - DNA, 24 bp, Homo Sapiens
tcgactcattaaattatgataatc

SEQ ID NO: 26111 - DNA, 26 bp, Homo Sapiens
tcgactcattaaattatgataatcat

SEQ ID NO: 26112 - DNA, 29 bp, Homo Sapiens
tcgactcattaaattatgataatcatatt

SEQ ID NO: 26113 - DNA, 30 bp, Homo Sapiens
tcgactcattaaattatgataatcatattt

SEQ ID NO: 26114 - DNA, 31 bp, Homo Sapiens
tcgactcattaaattatgataatcatattta

SEQ ID NO: 26115 - DNA, 32 bp, Homo Sapiens
tcgactcattaaattatgataatcatatttac

SEQ ID NO: 26116 - DNA, 33 bp, Homo Sapiens
tcgactcattaaattatgataatcatatttacc

SEQ ID NO: 26117 - DNA, 34 bp, Homo Sapiens
tcgactcattaaattatgataatcatatttacca

SEQ ID NO: 26118 - DNA, 35 bp, Homo Sapiens
tcgactcattaaattatgataatcatatttaccaa

SEQ ID NO: 26119 - DNA, 36 bp, Homo Sapiens
tcgactcattaaattatgataatcatatttaccaac

SEQ ID NO: 26120 - DNA, 37 bp, Homo Sapiens
tcgactcattaaattatgataatcatatttaccaacc

SEQ ID NO: 26121 - DNA, 38 bp, Homo Sapiens
tcgactcattaaattatgataatcatatttaccaacca

SEQ ID NO: 26122 - DNA, 17 bp, Homo Sapiens
tcgactcccagtggggc

SEQ ID NO: 26123 - DNA, 20 bp, Homo Sapiens
tcgactcccggtatgggaac

SEQ ID NO: 26124 - DNA, 21 bp, Homo Sapiens
tcgactcccggtatgggaacc

SEQ ID NO: 26125 - DNA, 18 bp, Homo Sapiens
tcgactcccggtgtggga

SEQ ID NO: 26126 - DNA, 20 bp, Homo Sapiens
tcgactcccggtgtgggaac

SEQ ID NO: 26127 - DNA, 21 bp, Homo Sapiens
tcgactcccggtgtgggaacc

SEQ ID NO: 26128 - DNA, 22 bp, Homo Sapiens
tcgactcccggtgtgggaacca

SEQ ID NO: 26129 - DNA, 16 bp, Homo Sapiens
tcgactcctggctggc

SEQ ID NO: 26130 - DNA, 17 bp, Homo Sapiens
tcgactcctggctggct

SEQ ID NO: 26131 - DNA, 18 bp, Homo Sapiens
tcgactcctggctggctc

SEQ ID NO: 26132 - DNA, 19 bp, Homo Sapiens
tcgactcctggctggctcg

SEQ ID NO: 26133 - DNA, 20 bp, Homo Sapiens
tcgactcctggctggctcgc

SEQ ID NO: 26134 - DNA, 21 bp, Homo Sapiens
tcgactcctggctggctcgcc

SEQ ID NO: 26135 - DNA, 22 bp, Homo Sapiens
tcgactcctggctggctcgcca

SEQ ID NO: 26136 - DNA, 22 bp, Homo Sapiens
tcgagccccacgttgggcgcca

SEQ ID NO: 26137 - DNA, 21 bp, Homo Sapiens
tcgagccccactcccggtacc

SEQ ID NO: 26138 - DNA, 16 bp, Homo Sapiens
tcgagccccagtggaa

SEQ ID NO: 26139 - DNA, 17 bp, Homo Sapiens
tcgagccccagtggaac

SEQ ID NO: 26140 - DNA, 18 bp, Homo Sapiens
tcgagccccagtggaacc

SEQ ID NO: 26141 - DNA, 19 bp, Homo Sapiens
tcgagccccagtggaacca

SEQ ID NO: 26142 - DNA, 20 bp, Homo Sapiens
tcgagccccagtggaaccac

SEQ ID NO: 26143 - DNA, 21 bp, Homo Sapiens
tcgagccccagtggaaccacc

SEQ ID NO: 26144 - DNA, 22 bp, Homo Sapiens
tcgagccccagtggaaccacca

SEQ ID NO: 26145 - DNA, 19 bp, Homo Sapiens
tcgagcctcacctggagca

SEQ ID NO: 26146 - DNA, 20 bp, Homo Sapiens
tcgagcctcacctggagcac

SEQ ID NO: 26147 - DNA, 21 bp, Homo Sapiens
tcgagcctcacctggagcacc

SEQ ID NO: 26148 - DNA, 22 bp, Homo Sapiens
tcgagcctcacctggagcacca

SEQ ID NO: 26149 - DNA, 21 bp, Homo Sapiens
tcgagcctcagagagggcacc

SEQ ID NO: 26150 - DNA, 22 bp, Homo Sapiens
tcgagcctcagagagggcacca

SEQ ID NO: 26151 - DNA, 21 bp, Homo Sapiens
tcgagtcccaccagagtcgcc

SEQ ID NO: 26152 - DNA, 19 bp, Homo Sapiens
tcgagtcccatctggggtg

SEQ ID NO: 26153 - DNA, 21 bp, Homo Sapiens
tcgagtcccatctggggtgcc

SEQ ID NO: 26154 - DNA, 22 bp, Homo Sapiens
tcgagtcccatctggggtgcca

SEQ ID NO: 26155 - DNA, 19 bp, Homo Sapiens
tcgagtcccatctgggtcg

SEQ ID NO: 26156 - DNA, 21 bp, Homo Sapiens
tcgagtcccatctgggtcgcc

SEQ ID NO: 26157 - DNA, 22 bp, Homo Sapiens
tcgagtcccatctgggtcgcca

SEQ ID NO: 26158 - DNA, 19 bp, Homo Sapiens
tcgagtcccggcggagtcg

SEQ ID NO: 26159 - DNA, 22 bp, Homo Sapiens
tcgagtcccggcggagtcgcca

SEQ ID NO: 26160 - DNA, 21 bp, Homo Sapiens
tcgagtcccttcgtggtcgcc

SEQ ID NO: 26161 - DNA, 22 bp, Homo Sapiens
tcgagtcccttcgtggtcgcca

SEQ ID NO: 26162 - DNA, 21 bp, Homo Sapiens
tcgagtcctgccgcggtcgcc

SEQ ID NO: 26163 - DNA, 22 bp, Homo Sapiens
tcgagtcctgccgcggtcgcca

SEQ ID NO: 26164 - DNA, 19 bp, Homo Sapiens
tcgagtctcggtggaacct

SEQ ID NO: 26165 - DNA, 20 bp, Homo Sapiens
tcgagtctcggtggaacctc

SEQ ID NO: 26166 - DNA, 21 bp, Homo Sapiens
tcgagtctcggtggaacctcc

SEQ ID NO: 26167 - DNA, 19 bp, Homo Sapiens
tcgatagagcatgagactc

SEQ ID NO: 26168 - DNA, 33 bp, Homo Sapiens
tcgatagctcagctggtagagcggaggactgta

SEQ ID NO: 26169 - DNA, 30 bp, Homo Sapiens
tcgatagctcagttggtagagcggaggact

SEQ ID NO: 26170 - DNA, 31 bp, Homo Sapiens
tcgatagctcagttggtagagcggaggactg

SEQ ID NO: 26171 - DNA, 33 bp, Homo Sapiens
tcgatagctcagttggtagagcggaggactgta

SEQ ID NO: 26172 - DNA, 20 bp, Homo Sapiens
tcgatccccagcatctccac

SEQ ID NO: 26173 - DNA, 21 bp, Homo Sapiens
tcgatccccagcatctccacc

SEQ ID NO: 26174 - DNA, 22 bp, Homo Sapiens
tcgatccccagcatctccacca

SEQ ID NO: 26175 - DNA, 19 bp, Homo Sapiens
tcgatccccggcatctcca

SEQ ID NO: 26176 - DNA, 21 bp, Homo Sapiens
tcgatccccggcatctccacc

SEQ ID NO: 26177 - DNA, 22 bp, Homo Sapiens
tcgatccccggcatctccacca

SEQ ID NO: 26178 - DNA, 17 bp, Homo Sapiens
tcgatccccgtacgggc

SEQ ID NO: 26179 - DNA, 18 bp, Homo Sapiens
tcgatccccgtacgggcc

SEQ ID NO: 26180 - DNA, 19 bp, Homo Sapiens
tcgatccccgtacgggcca

SEQ ID NO: 26181 - DNA, 21 bp, Homo Sapiens
tcgatccccgtacgggccacc

SEQ ID NO: 26182 - DNA, 22 bp, Homo Sapiens
tcgatccccgtacgggccacca

SEQ ID NO: 26183 - DNA, 20 bp, Homo Sapiens
tcgatccccgtactggccac

SEQ ID NO: 26184 - DNA, 22 bp, Homo Sapiens
tcgatccccgtactggccacca

SEQ ID NO: 26185 - DNA, 19 bp, Homo Sapiens
tcgatcccgggcggaaaca

SEQ ID NO: 26186 - DNA, 21 bp, Homo Sapiens
tcgatcccgggcggaaacacc

SEQ ID NO: 26187 - DNA, 22 bp, Homo Sapiens
tcgatcccgggcggaaacacca

SEQ ID NO: 26188 - DNA, 19 bp, Homo Sapiens
tcgatcccgggtttcggca

SEQ ID NO: 26189 - DNA, 20 bp, Homo Sapiens
tcgatcccgggtttcggcac

SEQ ID NO: 26190 - DNA, 21 bp, Homo Sapiens
tcgatcccgggtttcggcacc

SEQ ID NO: 26191 - DNA, 22 bp, Homo Sapiens
tcgatcccgggtttcggcacca

SEQ ID NO: 26192 - DNA, 22 bp, Homo Sapiens
tcgatcctcacctggagcacca

SEQ ID NO: 26193 - DNA, 20 bp, Homo Sapiens
tcgatcctcgctggggcctc

SEQ ID NO: 26194 - DNA, 21 bp, Homo Sapiens
tcgatgcccgcatcctccacc

SEQ ID NO: 26195 - DNA, 22 bp, Homo Sapiens
tcgatgcccgcatcctccacca

SEQ ID NO: 26196 - DNA, 21 bp, Homo Sapiens
tcgatgcccgcattctccacc

SEQ ID NO: 26197 - DNA, 16 bp, Homo Sapiens
tcgatggatcgaaacc

SEQ ID NO: 26198 - DNA, 17 bp, Homo Sapiens
tcgatggatcgaaacca

SEQ ID NO: 26199 - DNA, 25 bp, Homo Sapiens
tcgatggatcgaaaccatcctctgc

SEQ ID NO: 26200 - DNA, 26 bp, Homo Sapiens
tcgatggatcgaaaccatcctctgct

SEQ ID NO: 26201 - DNA, 27 bp, Homo Sapiens
tcgatggatcgaaaccatcctctgcta

SEQ ID NO: 26202 - DNA, 28 bp, Homo Sapiens
tcgatggatcgaaaccatcctctgctac

SEQ ID NO: 26203 - DNA, 29 bp, Homo Sapiens
tcgatggatcgaaaccatcctctgctacc

SEQ ID NO: 26204 - DNA, 30 bp, Homo Sapiens
tcgatggatcgaaaccatcctctgctacca

SEQ ID NO: 26205 - DNA, 16 bp, Homo Sapiens
tcgatggcgtgggttc

SEQ ID NO: 26206 - DNA, 17 bp, Homo Sapiens
tcgatggcgtgggttcg

SEQ ID NO: 26207 - DNA, 23 bp, Homo Sapiens
tcgatggcgtgggttcgaatccc

SEQ ID NO: 26208 - DNA, 24 bp, Homo Sapiens
tcgatggcgtgggttcgaatccca

SEQ ID NO: 26209 - DNA, 26 bp, Homo Sapiens
tcgatggcgtgggttcgaatcccacc

SEQ ID NO: 26210 - DNA, 27 bp, Homo Sapiens
tcgatggcgtgggttcgaatcccaccg

SEQ ID NO: 26211 - DNA, 30 bp, Homo Sapiens
tcgatggcgtgggttcgaatcccaccgctg

SEQ ID NO: 26212 - DNA, 35 bp, Homo Sapiens
tcgatggcgtgggttcgaatcccaccgctgccacc

SEQ ID NO: 26213 - DNA, 16 bp, Homo Sapiens
tcgattccccgacggg

SEQ ID NO: 26214 - DNA, 19 bp, Homo Sapiens
tcgattccccgacggggag

SEQ ID NO: 26215 - DNA, 20 bp, Homo Sapiens
tcgattccccgacggggagc

SEQ ID NO: 26216 - DNA, 21 bp, Homo Sapiens
tcgattccccgacggggagcc

SEQ ID NO: 26217 - DNA, 22 bp, Homo Sapiens
tcgattccccgacggggagcca

SEQ ID NO: 26218 - DNA, 17 bp, Homo Sapiens
tcgattcccggccaacg

SEQ ID NO: 26219 - DNA, 19 bp, Homo Sapiens
tcgattcccggccaacgca

SEQ ID NO: 26220 - DNA, 20 bp, Homo Sapiens
tcgattcccggccaacgcac

SEQ ID NO: 26221 - DNA, 21 bp, Homo Sapiens
tcgattcccggccaacgcacc

SEQ ID NO: 26222 - DNA, 22 bp, Homo Sapiens
tcgattcccggccaacgcacca

SEQ ID NO: 26223 - DNA, 17 bp, Homo Sapiens
tcgattcccggccaatg

SEQ ID NO: 26224 - DNA, 19 bp, Homo Sapiens
tcgattcccggccaatgca

SEQ ID NO: 26225 - DNA, 20 bp, Homo Sapiens
tcgattcccggccaatgcac

SEQ ID NO: 26226 - DNA, 21 bp, Homo Sapiens
tcgattcccggccaatgcacc

SEQ ID NO: 26227 - DNA, 22 bp, Homo Sapiens
tcgattcccggccaatgcacca

SEQ ID NO: 26228 - DNA, 21 bp, Homo Sapiens
tcgattcccggcccatgcacc

SEQ ID NO: 26229 - DNA, 22 bp, Homo Sapiens
tcgattcccggcccatgcacca

SEQ ID NO: 26230 - DNA, 16 bp, Homo Sapiens
tcgattcccgggcggc

SEQ ID NO: 26231 - DNA, 18 bp, Homo Sapiens
tcgattcccgggcggcgc

SEQ ID NO: 26232 - DNA, 19 bp, Homo Sapiens
tcgattcccgggcggcgca

SEQ ID NO: 26233 - DNA, 20 bp, Homo Sapiens
tcgattcccgggcggcgcac

SEQ ID NO: 26234 - DNA, 21 bp, Homo Sapiens
tcgattcccgggcggcgcacc

SEQ ID NO: 26235 - DNA, 22 bp, Homo Sapiens
tcgattcccgggcggcgcacca

SEQ ID NO: 26236 - DNA, 20 bp, Homo Sapiens
tcgattcccggtcagggaac

SEQ ID NO: 26237 - DNA, 21 bp, Homo Sapiens
tcgattcccggtcagggaacc

SEQ ID NO: 26238 - DNA, 22 bp, Homo Sapiens
tcgattcccggtcagggaacca

SEQ ID NO: 26239 - DNA, 19 bp, Homo Sapiens
tcgattccggctcgaagga

SEQ ID NO: 26240 - DNA, 20 bp, Homo Sapiens
tcgattccggctcgaaggac

SEQ ID NO: 26241 - DNA, 21 bp, Homo Sapiens
tcgattccggctcgaaggacc

SEQ ID NO: 26242 - DNA, 22 bp, Homo Sapiens
tcgattccggctcgaaggacca

SEQ ID NO: 26243 - DNA, 19 bp, Homo Sapiens
tcgattccttccttttttg

SEQ ID NO: 26244 - DNA, 20 bp, Homo Sapiens
tcgattccttccttttttgc

SEQ ID NO: 26245 - DNA, 21 bp, Homo Sapiens
tcgattccttccttttttgcc

SEQ ID NO: 26246 - DNA, 22 bp, Homo Sapiens
tcgattccttccttttttgcca

SEQ ID NO: 26247 - DNA, 19 bp, Homo Sapiens
tcgattctcatagtcctag

SEQ ID NO: 26248 - DNA, 20 bp, Homo Sapiens
tcgattctcatagtcctagc

SEQ ID NO: 26249 - DNA, 21 bp, Homo Sapiens
tcgattctcatagtcctagcc

SEQ ID NO: 26250 - DNA, 22 bp, Homo Sapiens
tcgattctcatagtcctagcca

SEQ ID NO: 26251 - DNA, 18 bp, Homo Sapiens
tcgcataaaacttaaaac

SEQ ID NO: 26252 - DNA, 20 bp, Homo Sapiens
tcgcataaaacttaaaactt

SEQ ID NO: 26253 - DNA, 21 bp, Homo Sapiens
tcgcataaaacttaaaacttt

SEQ ID NO: 26254 - DNA, 25 bp, Homo Sapiens
tcgcataaaacttaaaactttacag

SEQ ID NO: 26255 - DNA, 27 bp, Homo Sapiens
tcgcataaaacttaaaactttacagtc

SEQ ID NO: 26256 - DNA, 29 bp, Homo Sapiens
tcgcataaaacttaaaactttacagtcag

SEQ ID NO: 26257 - DNA, 30 bp, Homo Sapiens
tcgcataaaacttaaaactttacagtcaga

SEQ ID NO: 26258 - DNA, 31 bp, Homo Sapiens
tcgcataaaacttaaaactttacagtcagag

SEQ ID NO: 26259 - DNA, 32 bp, Homo Sapiens
tcgcataaaacttaaaactttacagtcagagg

SEQ ID NO: 26260 - DNA, 33 bp, Homo Sapiens
tcgcataaaacttaaaactttacagtcagaggt

SEQ ID NO: 26261 - DNA, 34 bp, Homo Sapiens
tcgcataaaacttaaaactttacagtcagaggtt

SEQ ID NO: 26262 - DNA, 35 bp, Homo Sapiens
tcgcataaaacttaaaactttacagtcagaggttc

SEQ ID NO: 26263 - DNA, 46 bp, Homo Sapiens
tcgcataaaacttaaaactttacagtcagaggttcaattcctcttc

SEQ ID NO: 26264 - DNA, 22 bp, Homo Sapiens
tcgcctgccacgcgggaggccc

SEQ ID NO: 26265 - DNA, 24 bp, Homo Sapiens
tcgcctgccacgcgggaggcccgg

SEQ ID NO: 26266 - DNA, 25 bp, Homo Sapiens
tcgcctgccacgcgggaggcccggg

SEQ ID NO: 26267 - DNA, 26 bp, Homo Sapiens
tcgcctgccacgcgggaggcccgggt

SEQ ID NO: 26268 - DNA, 27 bp, Homo Sapiens
tcgcctgccacgcgggaggcccgggtt

SEQ ID NO: 26269 - DNA, 28 bp, Homo Sapiens
tcgcctgccacgcgggaggcccgggttc

SEQ ID NO: 26270 - DNA, 17 bp, Homo Sapiens
tcgcgagttcaaatctc

SEQ ID NO: 26271 - DNA, 25 bp, Homo Sapiens
tcgcgagttcaaatctcgctggggc

SEQ ID NO: 26272 - DNA, 26 bp, Homo Sapiens
tcgcgagttcaaatctcgctggggcc

SEQ ID NO: 26273 - DNA, 27 bp, Homo Sapiens
tcgcgagttcaaatctcgctggggcct

SEQ ID NO: 26274 - DNA, 28 bp, Homo Sapiens
tcgcgagttcaaatctcgctggggcctc

SEQ ID NO: 26275 - DNA, 29 bp, Homo Sapiens
tcgcgagttcaaatctcgctggggcctcc

SEQ ID NO: 26276 - DNA, 25 bp, Homo Sapiens
tcgcgagttcaattctcgctggggc

SEQ ID NO: 26277 - DNA, 26 bp, Homo Sapiens
tcgcgagttcaattctcgctggggcc

SEQ ID NO: 26278 - DNA, 27 bp, Homo Sapiens
tcgcgagttcaattctcgctggggcct

SEQ ID NO: 26279 - DNA, 28 bp, Homo Sapiens
tcgcgagttcaattctcgctggggcctc

SEQ ID NO: 26280 - DNA, 29 bp, Homo Sapiens
tcgcgagttcaattctcgctggggcctcc

SEQ ID NO: 26281 - DNA, 16 bp, Homo Sapiens
tcgcgagttcgatcct

SEQ ID NO: 26282 - DNA, 26 bp, Homo Sapiens
tcgcgagttcgatcctcgctggggcc

SEQ ID NO: 26283 - DNA, 27 bp, Homo Sapiens
tcgcgagttcgatcctcgctggggcct

SEQ ID NO: 26284 - DNA, 28 bp, Homo Sapiens
tcgcgagttcgatcctcgctggggcctc

SEQ ID NO: 26285 - DNA, 29 bp, Homo Sapiens
tcgcgagttcgatcctcgctggggcctcc

SEQ ID NO: 26286 - DNA, 25 bp, Homo Sapiens
tcgcgggttcgaaccccgtacgggc

SEQ ID NO: 26287 - DNA, 26 bp, Homo Sapiens
tcgcgggttcgaaccccgtacgggcc

SEQ ID NO: 26288 - DNA, 27 bp, Homo Sapiens
tcgcgggttcgaaccccgtacgggcca

SEQ ID NO: 26289 - DNA, 28 bp, Homo Sapiens
tcgcgggttcgaaccccgtacgggccac

SEQ ID NO: 26290 - DNA, 29 bp, Homo Sapiens
tcgcgggttcgaaccccgtacgggccacc

SEQ ID NO: 26291 - DNA, 30 bp, Homo Sapiens
tcgcgggttcgaaccccgtacgggccacca

SEQ ID NO: 26292 - DNA, 25 bp, Homo Sapiens
tcgcgggttcgatccccgtacgggc

SEQ ID NO: 26293 - DNA, 26 bp, Homo Sapiens
tcgcgggttcgatccccgtacgggcc

SEQ ID NO: 26294 - DNA, 27 bp, Homo Sapiens
tcgcgggttcgatccccgtacgggcca

SEQ ID NO: 26295 - DNA, 28 bp, Homo Sapiens
tcgcgggttcgatccccgtacgggccac

SEQ ID NO: 26296 - DNA, 29 bp, Homo Sapiens
tcgcgggttcgatccccgtacgggccacc

SEQ ID NO: 26297 - DNA, 30 bp, Homo Sapiens
tcgcgggttcgatccccgtacgggccacca

SEQ ID NO: 26298 - DNA, 25 bp, Homo Sapiens
tcgcgggttcgatccccgtactggc

SEQ ID NO: 26299 - DNA, 19 bp, Homo Sapiens
tcgctggttcgaatccggc

SEQ ID NO: 26300 - DNA, 27 bp, Homo Sapiens
tcgctggttcgaatccggctcgaagga

SEQ ID NO: 26301 - DNA, 28 bp, Homo Sapiens
tcgctggttcgaatccggctcgaaggac

SEQ ID NO: 26302 - DNA, 29 bp, Homo Sapiens
tcgctggttcgaatccggctcgaaggacc

SEQ ID NO: 26303 - DNA, 30 bp, Homo Sapiens
tcgctggttcgaatccggctcgaaggacca

SEQ ID NO: 26304 - DNA, 27 bp, Homo Sapiens
tcgctggttcgaatccggctcggagga

SEQ ID NO: 26305 - DNA, 28 bp, Homo Sapiens
tcgctggttcgaatccggctcggaggac

SEQ ID NO: 26306 - DNA, 29 bp, Homo Sapiens
tcgctggttcgaatccggctcggaggacc

SEQ ID NO: 26307 - DNA, 30 bp, Homo Sapiens
tcgctggttcgaatccggctcggaggacca

SEQ ID NO: 26308 - DNA, 29 bp, Homo Sapiens
tcgctggttcgattccagctcgaaggacc

SEQ ID NO: 26309 - DNA, 19 bp, Homo Sapiens
tcgctggttcgattccggc

SEQ ID NO: 26310 - DNA, 20 bp, Homo Sapiens
tcgctggttcgattccggct

SEQ ID NO: 26311 - DNA, 26 bp, Homo Sapiens
tcgctggttcgattccggctcgaagg

SEQ ID NO: 26312 - DNA, 27 bp, Homo Sapiens
tcgctggttcgattccggctcgaagga

SEQ ID NO: 26313 - DNA, 28 bp, Homo Sapiens
tcgctggttcgattccggctcgaaggac

SEQ ID NO: 26314 - DNA, 29 bp, Homo Sapiens
tcgctggttcgattccggctcgaaggacc

SEQ ID NO: 26315 - DNA, 30 bp, Homo Sapiens
tcgctggttcgattccggctcgaaggacca

SEQ ID NO: 26316 - DNA, 24 bp, Homo Sapiens
tcgctttgggtgcgagaggtcccg

SEQ ID NO: 26317 - DNA, 26 bp, Homo Sapiens
tcggaggcgtgggttcgaatcccacc

SEQ ID NO: 26318 - DNA, 27 bp, Homo Sapiens
tcggaggcgtgggttcgaatcccaccg

SEQ ID NO: 26319 - DNA, 28 bp, Homo Sapiens
tcggaggcgtgggttcgaatcccaccgc

SEQ ID NO: 26320 - DNA, 30 bp, Homo Sapiens
tcggaggcgtgggttcgaatcccaccgctg

SEQ ID NO: 26321 - DNA, 31 bp, Homo Sapiens
tcggaggcgtgggttcgaatcccaccgctgc

SEQ ID NO: 26322 - DNA, 17 bp, Homo Sapiens
tcggatcagaagattga

SEQ ID NO: 26323 - DNA, 21 bp, Homo Sapiens
tcggatcagaagattgagggt

SEQ ID NO: 26324 - DNA, 42 bp, Homo Sapiens
tcggatcagaagattgagggttcgaatcccttcgtggttgcc

SEQ ID NO: 26325 - DNA, 19 bp, Homo Sapiens
tcggatcagaagattgcag

SEQ ID NO: 26326 - DNA, 23 bp, Homo Sapiens
tcggatcagaagattgcaggttc

SEQ ID NO: 26327 - DNA, 29 bp, Homo Sapiens
tcggatcagaagattgcaggttcgagtcc

SEQ ID NO: 26328 - DNA, 31 bp, Homo Sapiens
tcggatcagaagattgcaggttcgagtcctg

SEQ ID NO: 26329 - DNA, 41 bp, Homo Sapiens
tcggatcagaagattgcaggttcgagtcctgccgcggtcgc

SEQ ID NO: 26330 - DNA, 42 bp, Homo Sapiens
tcggatcagaagattgcaggttcgagtcctgccgcggtcgcc

SEQ ID NO: 26331 - DNA, 43 bp, Homo Sapiens
tcggatcagaagattgcaggttcgagtcctgccgcggtcgcca

SEQ ID NO: 26332 - DNA, 16 bp, Homo Sapiens
tcggcgctctcaccgc

SEQ ID NO: 26333 - DNA, 17 bp, Homo Sapiens
tcggcgctctcaccgcc

SEQ ID NO: 26334 - DNA, 23 bp, Homo Sapiens
tcggcgctctcaccgccgcggcc

SEQ ID NO: 26335 - DNA, 24 bp, Homo Sapiens
tcggcgctctcaccgccgcggccc

SEQ ID NO: 26336 - DNA, 25 bp, Homo Sapiens
tcggcgctctcaccgccgcggcccg

SEQ ID NO: 26337 - DNA, 27 bp, Homo Sapiens
tcggcgctctcaccgccgcggcccggg

SEQ ID NO: 26338 - DNA, 28 bp, Homo Sapiens
tcggcgctctcaccgccgcggcccgggt

SEQ ID NO: 26339 - DNA, 29 bp, Homo Sapiens
tcggcgctctcaccgccgcggcccgggtt

SEQ ID NO: 26340 - DNA, 30 bp, Homo Sapiens
tcggcgctctcaccgccgcggcccgggttc

SEQ ID NO: 26341 - DNA, 31 bp, Homo Sapiens
tcggcgctctcaccgccgcggcccgggttcg

SEQ ID NO: 26342 - DNA, 33 bp, Homo Sapiens
tcggcgctctcaccgccgcggcccgggttcgat

SEQ ID NO: 26343 - DNA, 34 bp, Homo Sapiens
tcggcgctctcaccgccgcggcccgggttcgatt

SEQ ID NO: 26344 - DNA, 35 bp, Homo Sapiens
tcggcgctctcaccgccgcggcccgggttcgattc

SEQ ID NO: 26345 - DNA, 39 bp, Homo Sapiens
tcggcgctctcaccgccgcggcccgggttcgattcccgg

SEQ ID NO: 26346 - DNA, 40 bp, Homo Sapiens
tcggcgctctcaccgccgcggcccgggttcgattcccggt

SEQ ID NO: 26347 - DNA, 48 bp, Homo Sapiens
tcggcgctctcaccgccgcggcccgggttcgattcccggtcagggaac

SEQ ID NO: 26348 - DNA, 17 bp, Homo Sapiens
tcggctgttaaccgaaa

SEQ ID NO: 26349 - DNA, 27 bp, Homo Sapiens
tcggctgttaaccgaaaggttggtggt

SEQ ID NO: 26350 - DNA, 16 bp, Homo Sapiens
tcgggcccataccccg

SEQ ID NO: 26351 - DNA, 18 bp, Homo Sapiens
tcgggcccataccccgaa

SEQ ID NO: 26352 - DNA, 19 bp, Homo Sapiens
tcgggcccataccccgaaa

SEQ ID NO: 26353 - DNA, 20 bp, Homo Sapiens
tcgggcccataccccgaaaa

SEQ ID NO: 26354 - DNA, 28 bp, Homo Sapiens
tcgggcccataccccgaaaatgttggtt

SEQ ID NO: 26355 - DNA, 29 bp, Homo Sapiens
tcgggcccataccccgaaaatgttggtta

SEQ ID NO: 26356 - DNA, 30 bp, Homo Sapiens
tcgggcccataccccgaaaatgttggttat

SEQ ID NO: 26357 - DNA, 31 bp, Homo Sapiens
tcgggcccataccccgaaaatgttggttata

SEQ ID NO: 26358 - DNA, 32 bp, Homo Sapiens
tcgggcccataccccgaaaatgttggttatac

SEQ ID NO: 26359 - DNA, 33 bp, Homo Sapiens
tcgggcccataccccgaaaatgttggttatacc

SEQ ID NO: 26360 - DNA, 34 bp, Homo Sapiens
tcgggcccataccccgaaaatgttggttataccc

SEQ ID NO: 26361 - DNA, 47 bp, Homo Sapiens
tcgggcccataccccgaaaatgttggttatacccttcccgtactacc

SEQ ID NO: 26362 - DNA, 48 bp, Homo Sapiens
tcgggcccataccccgaaaatgttggttatacccttcccgtactacca

SEQ ID NO: 26363 - DNA, 16 bp, Homo Sapiens
tcgggggcgtgggttc

SEQ ID NO: 26364 - DNA, 26 bp, Homo Sapiens
tcgggggcgtgggttcgaatcccacc

SEQ ID NO: 26365 - DNA, 27 bp, Homo Sapiens
tcgggggcgtgggttcgaatcccaccg

SEQ ID NO: 26366 - DNA, 29 bp, Homo Sapiens
tcgggggcgtgggttcgaatcccaccgct

SEQ ID NO: 26367 - DNA, 30 bp, Homo Sapiens
tcgggggcgtgggttcgaatcccaccgctg

SEQ ID NO: 26368 - DNA, 16 bp, Homo Sapiens
tcgggggcgtgggttt

SEQ ID NO: 26369 - DNA, 17 bp, Homo Sapiens
tcgggtgcgagaggtcc

SEQ ID NO: 26370 - DNA, 18 bp, Homo Sapiens
tcgggtgcgagaggtccc

SEQ ID NO: 26371 - DNA, 19 bp, Homo Sapiens
tcgggtgcgagaggtcccg

SEQ ID NO: 26372 - DNA, 21 bp, Homo Sapiens
tcgggtgcgagaggtcccggg

SEQ ID NO: 26373 - DNA, 22 bp, Homo Sapiens
tcgggtgcgagaggtcccgggt

SEQ ID NO: 26374 - DNA, 23 bp, Homo Sapiens
tcgggtgcgagaggtcccgggtt

SEQ ID NO: 26375 - DNA, 43 bp, Homo Sapiens
tcgggtgcgagaggtcccgggttcaaatcccggacgagccccc

SEQ ID NO: 26376 - DNA, 18 bp, Homo Sapiens
tcggtagagcataagact

SEQ ID NO: 26377 - DNA, 16 bp, Homo Sapiens
tcggtagagcatcaga

SEQ ID NO: 26378 - DNA, 17 bp, Homo Sapiens
tcggtagagcatcagac

SEQ ID NO: 26379 - DNA, 18 bp, Homo Sapiens
tcggtagagcatcagact

SEQ ID NO: 26380 - DNA, 19 bp, Homo Sapiens
tcggtagagcatcagactt

SEQ ID NO: 26381 - DNA, 20 bp, Homo Sapiens
tcggtagagcatcagacttt

SEQ ID NO: 26382 - DNA, 21 bp, Homo Sapiens
tcggtagagcatcagactttt

SEQ ID NO: 26383 - DNA, 25 bp, Homo Sapiens
tcggtagagcatcagacttttaatc

SEQ ID NO: 26384 - DNA, 37 bp, Homo Sapiens
tcggtagagcatcagacttttaatctgagggtccagg

SEQ ID NO: 26385 - DNA, 16 bp, Homo Sapiens
tcggtagagcatgaga

SEQ ID NO: 26386 - DNA, 17 bp, Homo Sapiens
tcggtagagcatgagac

SEQ ID NO: 26387 - DNA, 18 bp, Homo Sapiens
tcggtagagcatgagacc

SEQ ID NO: 26388 - DNA, 19 bp, Homo Sapiens
tcggtagagcatgagaccc

SEQ ID NO: 26389 - DNA, 20 bp, Homo Sapiens
tcggtagagcatgagaccct

SEQ ID NO: 26390 - DNA, 22 bp, Homo Sapiens
tcggtagagcatgagaccctta

SEQ ID NO: 26391 - DNA, 23 bp, Homo Sapiens
tcggtagagcatgagacccttaa

SEQ ID NO: 26392 - DNA, 24 bp, Homo Sapiens
tcggtagagcatgagacccttaat

SEQ ID NO: 26393 - DNA, 25 bp, Homo Sapiens
tcggtagagcatgagacccttaatc

SEQ ID NO: 26394 - DNA, 26 bp, Homo Sapiens
tcggtagagcatgagacccttaatct

SEQ ID NO: 26395 - DNA, 27 bp, Homo Sapiens
tcggtagagcatgagacccttaatctc

SEQ ID NO: 26396 - DNA, 18 bp, Homo Sapiens
tcggtagagcatgagact

SEQ ID NO: 26397 - DNA, 19 bp, Homo Sapiens
tcggtagagcatgagactc

SEQ ID NO: 26398 - DNA, 20 bp, Homo Sapiens
tcggtagagcatgagactct

SEQ ID NO: 26399 - DNA, 21 bp, Homo Sapiens
tcggtagagcatgagactctt

SEQ ID NO: 26400 - DNA, 22 bp, Homo Sapiens
tcggtagagcatgagactctta

SEQ ID NO: 26401 - DNA, 23 bp, Homo Sapiens
tcggtagagcatgagactcttaa

SEQ ID NO: 26402 - DNA, 24 bp, Homo Sapiens
tcggtagagcatgagactcttaat

SEQ ID NO: 26403 - DNA, 25 bp, Homo Sapiens
tcggtagagcatgagactcttaatc

SEQ ID NO: 26404 - DNA, 26 bp, Homo Sapiens
tcggtagagcatgagactcttaatct

SEQ ID NO: 26405 - DNA, 27 bp, Homo Sapiens
tcggtagagcatgagactcttaatctc

SEQ ID NO: 26406 - DNA, 28 bp, Homo Sapiens
tcggtagagcatgagactcttaatctca

SEQ ID NO: 26407 - DNA, 34 bp, Homo Sapiens
tcggtagagcatgagactcttaatctcagggtcg

SEQ ID NO: 26408 - DNA, 36 bp, Homo Sapiens
tcggtagagcatgagactcttaatctcagggtcgtg

SEQ ID NO: 26409 - DNA, 37 bp, Homo Sapiens
tcggtagagcatgagactcttaatctcagggtcgtgg

SEQ ID NO: 26410 - DNA, 38 bp, Homo Sapiens
tcggtagagcatgagactcttaatctcagggtcgtggg

SEQ ID NO: 26411 - DNA, 39 bp, Homo Sapiens
tcggtagagcatgagactcttaatctcagggtcgtgggt

SEQ ID NO: 26412 - DNA, 40 bp, Homo Sapiens
tcggtagagcatgagactcttaatctcagggtcgtgggtt

SEQ ID NO: 26413 - DNA, 41 bp, Homo Sapiens
tcggtagagcatgagactcttaatctcagggtcgtgggttc

SEQ ID NO: 26414 - DNA, 42 bp, Homo Sapiens
tcggtagagcatgagactcttaatctcagggtcgtgggttcg

SEQ ID NO: 26415 - DNA, 48 bp, Homo Sapiens
tcggtagagcatgagactcttaatctcagggtcgtgggttcgagcccc

SEQ ID NO: 26416 - DNA, 16 bp, Homo Sapiens
tcggtagagcatggga

SEQ ID NO: 26417 - DNA, 17 bp, Homo Sapiens
tcggtagagcatgggac

SEQ ID NO: 26418 - DNA, 18 bp, Homo Sapiens
tcggtagagcatgggact

SEQ ID NO: 26419 - DNA, 19 bp, Homo Sapiens
tcggtagagcatgggactc

SEQ ID NO: 26420 - DNA, 20 bp, Homo Sapiens
tcggtagagcatgggactct

SEQ ID NO: 26421 - DNA, 21 bp, Homo Sapiens
tcggtagagcatgggactctt

SEQ ID NO: 26422 - DNA, 22 bp, Homo Sapiens
tcggtagagcatgggactctta

SEQ ID NO: 26423 - DNA, 23 bp, Homo Sapiens
tcggtagagcatgggactcttaa

SEQ ID NO: 26424 - DNA, 24 bp, Homo Sapiens
tcggtagagcatgggactcttaat

SEQ ID NO: 26425 - DNA, 25 bp, Homo Sapiens
tcggtagagcatgggactcttaatc

SEQ ID NO: 26426 - DNA, 26 bp, Homo Sapiens
tcggtagagcatgggactcttaatcc

SEQ ID NO: 26427 - DNA, 27 bp, Homo Sapiens
tcggtagagcatgggactcttaatccc

SEQ ID NO: 26428 - DNA, 36 bp, Homo Sapiens
tcggtagagcatgggactcttaatcccagggtcgtg

SEQ ID NO: 26429 - DNA, 37 bp, Homo Sapiens
tcggtagagcatgggactcttaatcccagggtcgtgg

SEQ ID NO: 26430 - DNA, 38 bp, Homo Sapiens
tcggtagagcatgggactcttaatcccagggtcgtggg

SEQ ID NO: 26431 - DNA, 39 bp, Homo Sapiens
tcggtagagcatgggactcttaatcccagggtcgtgggt

SEQ ID NO: 26432 - DNA, 40 bp, Homo Sapiens
tcggtagagcatgggactcttaatcccagggtcgtgggtt

SEQ ID NO: 26433 - DNA, 41 bp, Homo Sapiens
tcggtagagcatgggactcttaatcccagggtcgtgggttc

SEQ ID NO: 26434 - DNA, 42 bp, Homo Sapiens
tcggtagagcatgggactcttaatcccagggtcgtgggttcg

SEQ ID NO: 26435 - DNA, 46 bp, Homo Sapiens
tcggtagagcatgggactcttaatcccagggtcgtgggttcgagcc

SEQ ID NO: 26436 - DNA, 48 bp, Homo Sapiens
tcggtagagcatgggactcttaatcccagggtcgtgggttcgagcccc

SEQ ID NO: 26437 - DNA, 26 bp, Homo Sapiens
tcggtagagcatgggactcttaatct

SEQ ID NO: 26438 - DNA, 27 bp, Homo Sapiens
tcggtagagcatgggactcttaatctc

SEQ ID NO: 26439 - DNA, 28 bp, Homo Sapiens
tcggtagagcatgggactcttaatctca

SEQ ID NO: 26440 - DNA, 36 bp, Homo Sapiens
tcggtagagcatgggactcttaatctcagggtcgtg

SEQ ID NO: 26441 - DNA, 37 bp, Homo Sapiens
tcggtagagcatgggactcttaatctcagggtcgtgg

SEQ ID NO: 26442 - DNA, 17 bp, Homo Sapiens
tcggttagcgcgcggta

SEQ ID NO: 26443 - DNA, 18 bp, Homo Sapiens
tcggttagcgcgcggtac

SEQ ID NO: 26444 - DNA, 19 bp, Homo Sapiens
tcggttagcgcgttcggct

SEQ ID NO: 26445 - DNA, 25 bp, Homo Sapiens
tcggttagcgcgttcggctgttaac

SEQ ID NO: 26446 - DNA, 26 bp, Homo Sapiens
tcggttagcgcgttcggctgttaacc

SEQ ID NO: 26447 - DNA, 21 bp, Homo Sapiens
tcggttcgaatccgagtcacg

SEQ ID NO: 26448 - DNA, 23 bp, Homo Sapiens
tcggttcgaatccgagtcacggc

SEQ ID NO: 26449 - DNA, 24 bp, Homo Sapiens
tcggttcgaatccgagtcacggca

SEQ ID NO: 26450 - DNA, 25 bp, Homo Sapiens
tcggttcgaatccgagtcacggcac

SEQ ID NO: 26451 - DNA, 26 bp, Homo Sapiens
tcggttcgaatccgagtcacggcacc

SEQ ID NO: 26452 - DNA, 18 bp, Homo Sapiens
tcgtaaacaggagatcct

SEQ ID NO: 26453 - DNA, 22 bp, Homo Sapiens
tcgtaaaccgaagatcacgggt

SEQ ID NO: 26454 - DNA, 32 bp, Homo Sapiens
tcgtaaaccgaagatcacgggttcgaaccccg

SEQ ID NO: 26455 - DNA, 37 bp, Homo Sapiens
tcgtaaaccgaagatcacgggttcgaaccccgtccgt

SEQ ID NO: 26456 - DNA, 19 bp, Homo Sapiens
tcgtaaaccgaagatcgcg

SEQ ID NO: 26457 - DNA, 22 bp, Homo Sapiens
tcgtaaaccgaagatcgcgggt

SEQ ID NO: 26458 - DNA, 24 bp, Homo Sapiens
tcgtaaaccgaagatcgcgggttc

SEQ ID NO: 26459 - DNA, 29 bp, Homo Sapiens
tcgtaaaccgaagatcgcgggttcgaacc

SEQ ID NO: 26460 - DNA, 36 bp, Homo Sapiens
tcgtaaaccgaagatcgcgggttcgaaccccgtccg

SEQ ID NO: 26461 - DNA, 43 bp, Homo Sapiens
tcgtaaaccgaagatcgcgggttcgaaccccgtccgtgcctcc

SEQ ID NO: 26462 - DNA, 16 bp, Homo Sapiens
tcgtatagtggttagt

SEQ ID NO: 26463 - DNA, 17 bp, Homo Sapiens
tcgtatagtggttagta

SEQ ID NO: 26464 - DNA, 18 bp, Homo Sapiens
tcgtatagtggttagtac

SEQ ID NO: 26465 - DNA, 19 bp, Homo Sapiens
tcgtatagtggttagtact

SEQ ID NO: 26466 - DNA, 20 bp, Homo Sapiens
tcgtatagtggttagtactc

SEQ ID NO: 26467 - DNA, 21 bp, Homo Sapiens
tcgtatagtggttagtactct

SEQ ID NO: 26468 - DNA, 22 bp, Homo Sapiens
tcgtatagtggttagtactctg

SEQ ID NO: 26469 - DNA, 23 bp, Homo Sapiens
tcgtatagtggttagtactctgc

SEQ ID NO: 26470 - DNA, 24 bp, Homo Sapiens
tcgtatagtggttagtactctgcg

SEQ ID NO: 26471 - DNA, 25 bp, Homo Sapiens
tcgtatagtggttagtactctgcgt

SEQ ID NO: 26472 - DNA, 26 bp, Homo Sapiens
tcgtatagtggttagtactctgcgtt

SEQ ID NO: 26473 - DNA, 27 bp, Homo Sapiens
tcgtatagtggttagtactctgcgttg

SEQ ID NO: 26474 - DNA, 28 bp, Homo Sapiens
tcgtatagtggttagtactctgcgttgt

SEQ ID NO: 26475 - DNA, 29 bp, Homo Sapiens
tcgtatagtggttagtactctgcgttgtg

SEQ ID NO: 26476 - DNA, 32 bp, Homo Sapiens
tcgtatagtggttagtactctgcgttgtggcc

SEQ ID NO: 26477 - DNA, 37 bp, Homo Sapiens
tcgtatagtggttagtactctgcgttgtggccgcagc

SEQ ID NO: 26478 - DNA, 41 bp, Homo Sapiens
tcgtatagtggttagtactctgcgttgtggccgcagcaacc

SEQ ID NO: 26479 - DNA, 42 bp, Homo Sapiens
tcgtatagtggttagtactctgcgttgtggccgcagcaacct

SEQ ID NO: 26480 - DNA, 43 bp, Homo Sapiens
tcgtatagtggttagtactctgcgttgtggccgcagcaacctc

SEQ ID NO: 26481 - DNA, 44 bp, Homo Sapiens
tcgtatagtggttagtactctgcgttgtggccgcagcaacctcg

SEQ ID NO: 26482 - DNA, 46 bp, Homo Sapiens
tcgtatagtggttagtactctgcgttgtggccgcagcaacctcggt

SEQ ID NO: 26483 - DNA, 27 bp, Homo Sapiens
tcgtgagttcgagcctcacacggggca

SEQ ID NO: 26484 - DNA, 28 bp, Homo Sapiens
tcgtgagttcgagcctcacacggggcac

SEQ ID NO: 26485 - DNA, 30 bp, Homo Sapiens
tcgtgagttcgagcctcacacggggcacca

SEQ ID NO: 26486 - DNA, 26 bp, Homo Sapiens
tcgtgagttcgatcctcacacggggc

SEQ ID NO: 26487 - DNA, 27 bp, Homo Sapiens
tcgtgagttcgatcctcacacggggca

SEQ ID NO: 26488 - DNA, 28 bp, Homo Sapiens
tcgtgagttcgatcctcacacggggcac

SEQ ID NO: 26489 - DNA, 29 bp, Homo Sapiens
tcgtgagttcgatcctcacacggggcacc

SEQ ID NO: 26490 - DNA, 19 bp, Homo Sapiens
tcgtggccgagtggttaag

SEQ ID NO: 26491 - DNA, 30 bp, Homo Sapiens
tcgtggcgcaacggtagcgcgtctgactcc

SEQ ID NO: 26492 - DNA, 30 bp, Homo Sapiens
tcgtggcgcaatggtagcgcgtctgactcc

SEQ ID NO: 26493 - DNA, 25 bp, Homo Sapiens
tcgtgggttcgagccccacgttggg

SEQ ID NO: 26494 - DNA, 26 bp, Homo Sapiens
tcgtgggttcgagccccacgttgggc

SEQ ID NO: 26495 - DNA, 27 bp, Homo Sapiens
tcgtgggttcgagccccacgttgggcg

SEQ ID NO: 26496 - DNA, 28 bp, Homo Sapiens
tcgtgggttcgagccccacgttgggcgc

SEQ ID NO: 26497 - DNA, 29 bp, Homo Sapiens
tcgtgggttcgagccccacgttgggcgcc

SEQ ID NO: 26498 - DNA, 30 bp, Homo Sapiens
tcgtgggttcgagccccacgttgggcgcca

SEQ ID NO: 26499 - DNA, 28 bp, Homo Sapiens
tcgtgggttcgagccgcacgttgggcgc

SEQ ID NO: 26500 - DNA, 16 bp, Homo Sapiens
tcgtggttgtagtccg

SEQ ID NO: 26501 - DNA, 17 bp, Homo Sapiens
tcgtggttgtagtccgt

SEQ ID NO: 26502 - DNA, 18 bp, Homo Sapiens
tcgtggttgtagtccgtg

SEQ ID NO: 26503 - DNA, 19 bp, Homo Sapiens
tcgtggttgtagtccgtgc

SEQ ID NO: 26504 - DNA, 20 bp, Homo Sapiens
tcgtggttgtagtccgtgcg

SEQ ID NO: 26505 - DNA, 21 bp, Homo Sapiens
tcgtggttgtagtccgtgcga

SEQ ID NO: 26506 - DNA, 22 bp, Homo Sapiens
tcgtggttgtagtccgtgcgag

SEQ ID NO: 26507 - DNA, 23 bp, Homo Sapiens
tcgtggttgtagtccgtgcgaga

SEQ ID NO: 26508 - DNA, 24 bp, Homo Sapiens
tcgtggttgtagtccgtgcgagaa

SEQ ID NO: 26509 - DNA, 25 bp, Homo Sapiens
tcgtggttgtagtccgtgcgagaat

SEQ ID NO: 26510 - DNA, 26 bp, Homo Sapiens
tcgtggttgtagtccgtgcgagaata

SEQ ID NO: 26511 - DNA, 27 bp, Homo Sapiens
tcgtggttgtagtccgtgcgagaatac

SEQ ID NO: 26512 - DNA, 28 bp, Homo Sapiens
tcgtggttgtagtccgtgcgagaatacc

SEQ ID NO: 26513 - DNA, 29 bp, Homo Sapiens
tcgtggttgtagtccgtgcgagaatacca

SEQ ID NO: 26514 - DNA, 16 bp, Homo Sapiens
tcgttagcgcagtagg

SEQ ID NO: 26515 - DNA, 18 bp, Homo Sapiens
tcgttagcgcagtaggca

SEQ ID NO: 26516 - DNA, 19 bp, Homo Sapiens
tcgttagcgcagtaggtag

SEQ ID NO: 26517 - DNA, 20 bp, Homo Sapiens
tcgttagcgcagtaggtagc

SEQ ID NO: 26518 - DNA, 25 bp, Homo Sapiens
tcgttagtatagtggtgagtatccc

SEQ ID NO: 26519 - DNA, 26 bp, Homo Sapiens
tcgttagtatagtggtgagtatcccc

SEQ ID NO: 26520 - DNA, 27 bp, Homo Sapiens
tcgttagtatagtggtgagtatccccg

SEQ ID NO: 26521 - DNA, 29 bp, Homo Sapiens
tcgttagtatagtggtgagtatccccgcc

SEQ ID NO: 26522 - DNA, 30 bp, Homo Sapiens
tcgttagtatagtggtgagtatccccgcct

SEQ ID NO: 26523 - DNA, 31 bp, Homo Sapiens
tcgttagtatagtggtgagtatccccgcctg

SEQ ID NO: 26524 - DNA, 32 bp, Homo Sapiens
tcgttagtatagtggtgagtatccccgcctgt

SEQ ID NO: 26525 - DNA, 33 bp, Homo Sapiens
tcgttagtatagtggtgagtatccccgcctgtc

SEQ ID NO: 26526 - DNA, 35 bp, Homo Sapiens
tcgttagtatagtggtgagtatccccgcctgtcac

SEQ ID NO: 26527 - DNA, 29 bp, Homo Sapiens
tcgttagtatagtggttagtatccccgcc

SEQ ID NO: 26528 - DNA, 30 bp, Homo Sapiens
tcgttagtatagtggttagtatccccgcct

SEQ ID NO: 26529 - DNA, 33 bp, Homo Sapiens
tcgttagtatagtggttagtatccccgcctgtc

SEQ ID NO: 26530 - DNA, 18 bp, Homo Sapiens
tcgttggtctaggggtat

SEQ ID NO: 26531 - DNA, 21 bp, Homo Sapiens
tcgttggtctaggggtatgat

SEQ ID NO: 26532 - DNA, 24 bp, Homo Sapiens
tcgttggtctaggggtatgattct

SEQ ID NO: 26533 - DNA, 25 bp, Homo Sapiens
tcgttggtctaggggtatgattctc

SEQ ID NO: 26534 - DNA, 26 bp, Homo Sapiens
tcgttggtctaggggtatgattctcg

SEQ ID NO: 26535 - DNA, 27 bp, Homo Sapiens
tcgttggtctaggggtatgattctcgc

SEQ ID NO: 26536 - DNA, 28 bp, Homo Sapiens
tcgttggtctaggggtatgattctcgct

SEQ ID NO: 26537 - DNA, 29 bp, Homo Sapiens
tcgttggtctaggggtatgattctcgctt

SEQ ID NO: 26538 - DNA, 32 bp, Homo Sapiens
tcgttggtctaggggtatgattctcgcttagg

SEQ ID NO: 26539 - DNA, 30 bp, Homo Sapiens
tcgttggtctaggggtatgattctcgcttc

SEQ ID NO: 26540 - DNA, 32 bp, Homo Sapiens
tcgttggtctaggggtatgattctcgcttcgg

SEQ ID NO: 26541 - DNA, 31 bp, Homo Sapiens
tcgttggtctaggggtatgattctcgctttg

SEQ ID NO: 26542 - DNA, 32 bp, Homo Sapiens
tcgttggtctaggggtatgattctcgctttgg

SEQ ID NO: 26543 - DNA, 29 bp, Homo Sapiens
tcgttggtctaggggtatgattctcggtt

SEQ ID NO: 26544 - DNA, 31 bp, Homo Sapiens
tcgttggtctaggggtatgattctcggtttg

SEQ ID NO: 26545 - DNA, 32 bp, Homo Sapiens
tcgttggtctaggggtatgattctcggtttgg

SEQ ID NO: 26546 - DNA, 32 bp, Homo Sapiens
tcgttggtctagtggtatgattctcgctttgg

SEQ ID NO: 26547 - DNA, 17 bp, Homo Sapiens
tctaaagacaggggtta

SEQ ID NO: 26548 - DNA, 18 bp, Homo Sapiens
tctaaagacaggggttag

SEQ ID NO: 26549 - DNA, 22 bp, Homo Sapiens
tctaaagacaggggttaggcct

SEQ ID NO: 26550 - DNA, 23 bp, Homo Sapiens
tctaaagacaggggttaggcctc

SEQ ID NO: 26551 - DNA, 24 bp, Homo Sapiens
tctaaagacaggggttaggcctct

SEQ ID NO: 26552 - DNA, 25 bp, Homo Sapiens
tctaaagacaggggttaggcctctt

SEQ ID NO: 26553 - DNA, 26 bp, Homo Sapiens
tctaaagacaggggttaggcctcttt

SEQ ID NO: 26554 - DNA, 27 bp, Homo Sapiens
tctaaagacaggggttaggcctctttt

SEQ ID NO: 26555 - DNA, 29 bp, Homo Sapiens
tctaaagacaggggttaggcctcttttta

SEQ ID NO: 26556 - DNA, 31 bp, Homo Sapiens
tctaaagacaggggttaggcctctttttacc

SEQ ID NO: 26557 - DNA, 32 bp, Homo Sapiens
tctaaagacaggggttaggcctctttttacca

SEQ ID NO: 26558 - DNA, 34 bp, Homo Sapiens
tctaaagacaggggttaggcctctttttaccacc

SEQ ID NO: 26559 - DNA, 35 bp, Homo Sapiens
tctaaagacaggggttaggcctctttttaccacca

SEQ ID NO: 26560 - DNA, 37 bp, Homo Sapiens
tctaaaggtccctggttcaatcccgggtttcggcacc

SEQ ID NO: 26561 - DNA, 19 bp, Homo Sapiens
tctaaaggtccctggttcg

SEQ ID NO: 26562 - DNA, 22 bp, Homo Sapiens
tctaaaggtccctggttcgatc

SEQ ID NO: 26563 - DNA, 23 bp, Homo Sapiens
tctaaaggtccctggttcgatcc

SEQ ID NO: 26564 - DNA, 35 bp, Homo Sapiens
tctaaaggtccctggttcgatcccgggtttcggca

SEQ ID NO: 26565 - DNA, 36 bp, Homo Sapiens
tctaaaggtccctggttcgatcccgggtttcggcac

SEQ ID NO: 26566 - DNA, 37 bp, Homo Sapiens
tctaaaggtccctggttcgatcccgggtttcggcacc

SEQ ID NO: 26567 - DNA, 38 bp, Homo Sapiens
tctaaaggtccctggttcgatcccgggtttcggcacca

SEQ ID NO: 26568 - DNA, 16 bp, Homo Sapiens
tctaacaacatggctt

SEQ ID NO: 26569 - DNA, 17 bp, Homo Sapiens
tctaacaacatggcttt

SEQ ID NO: 26570 - DNA, 18 bp, Homo Sapiens
tctaacaacatggctttc

SEQ ID NO: 26571 - DNA, 19 bp, Homo Sapiens
tctaacaacatggctttct

SEQ ID NO: 26572 - DNA, 20 bp, Homo Sapiens
tctaacaacatggctttctc

SEQ ID NO: 26573 - DNA, 21 bp, Homo Sapiens
tctaacaacatggctttctca

SEQ ID NO: 26574 - DNA, 22 bp, Homo Sapiens
tctaacaacatggctttctcac

SEQ ID NO: 26575 - DNA, 23 bp, Homo Sapiens
tctaacaacatggctttctcacc

SEQ ID NO: 26576 - DNA, 24 bp, Homo Sapiens
tctaacaacatggctttctcacca

SEQ ID NO: 26577 - DNA, 17 bp, Homo Sapiens
tctaaggcgccagactc

SEQ ID NO: 26578 - DNA, 19 bp, Homo Sapiens
tctaaggcgccagactcaa

SEQ ID NO: 26579 - DNA, 19 bp, Homo Sapiens
tctaaggcgctgcgttcag

SEQ ID NO: 26580 - DNA, 16 bp, Homo Sapiens
tctaaggcgctggatt

SEQ ID NO: 26581 - DNA, 25 bp, Homo Sapiens
tctaaggcgctggatttaggctcca

SEQ ID NO: 26582 - DNA, 43 bp, Homo Sapiens
tctaatccagaggttccgggttcgagtcccggcagagatgcca

SEQ ID NO: 26583 - DNA, 18 bp, Homo Sapiens
tctaattcaaaggttccg

SEQ ID NO: 26584 - DNA, 40 bp, Homo Sapiens
tctaattcaaaggttccgggttcgagtcccggcggagtcg

SEQ ID NO: 26585 - DNA, 42 bp, Homo Sapiens
tctaattcaaaggttccgggttcgagtcccggcggagtcgcc

SEQ ID NO: 26586 - DNA, 43 bp, Homo Sapiens
tctaattcaaaggttccgggttcgagtcccggcggagtcgcca

SEQ ID NO: 26587 - DNA, 16 bp, Homo Sapiens
tctagcggttaggatt

SEQ ID NO: 26588 - DNA, 17 bp, Homo Sapiens
tctagcggttaggattc

SEQ ID NO: 26589 - DNA, 18 bp, Homo Sapiens
tctagcggttaggattcc

SEQ ID NO: 26590 - DNA, 19 bp, Homo Sapiens
tctagcggttaggattcct

SEQ ID NO: 26591 - DNA, 20 bp, Homo Sapiens
tctagcggttaggattcctg

SEQ ID NO: 26592 - DNA, 21 bp, Homo Sapiens
tctagcggttaggattcctgg

SEQ ID NO: 26593 - DNA, 23 bp, Homo Sapiens
tctagcggttaggattcctggtt

SEQ ID NO: 26594 - DNA, 24 bp, Homo Sapiens
tctagcggttaggattcctggttt

SEQ ID NO: 26595 - DNA, 25 bp, Homo Sapiens
tctagcggttaggattcctggtttt

SEQ ID NO: 26596 - DNA, 26 bp, Homo Sapiens
tctagcggttaggattcctggttttc

SEQ ID NO: 26597 - DNA, 27 bp, Homo Sapiens
tctagcggttaggattcctggttttca

SEQ ID NO: 26598 - DNA, 29 bp, Homo Sapiens
tctagcggttaggattcctggttttcacc

SEQ ID NO: 26599 - DNA, 18 bp, Homo Sapiens
tctaggggtatgattctc

SEQ ID NO: 26600 - DNA, 20 bp, Homo Sapiens
tctaggggtatgattctcgc

SEQ ID NO: 26601 - DNA, 21 bp, Homo Sapiens
tctaggggtatgattctcgct

SEQ ID NO: 26602 - DNA, 22 bp, Homo Sapiens
tctaggggtatgattctcgctt

SEQ ID NO: 26603 - DNA, 25 bp, Homo Sapiens
tctaggggtatgattctcgctttgg

SEQ ID NO: 26604 - DNA, 21 bp, Homo Sapiens
tctaggggtatgattctcggt

SEQ ID NO: 26605 - DNA, 25 bp, Homo Sapiens
tctaggggtatgattctcggtttgg

SEQ ID NO: 26606 - DNA, 16 bp, Homo Sapiens
tctaggttcgactcct

SEQ ID NO: 26607 - DNA, 19 bp, Homo Sapiens
tctaggttcgactcctggc

SEQ ID NO: 26608 - DNA, 24 bp, Homo Sapiens
tctaggttcgactcctggctggct

SEQ ID NO: 26609 - DNA, 25 bp, Homo Sapiens
tctaggttcgactcctggctggctc

SEQ ID NO: 26610 - DNA, 26 bp, Homo Sapiens
tctaggttcgactcctggctggctcg

SEQ ID NO: 26611 - DNA, 27 bp, Homo Sapiens
tctaggttcgactcctggctggctcgc

SEQ ID NO: 26612 - DNA, 28 bp, Homo Sapiens
tctaggttcgactcctggctggctcgcc

SEQ ID NO: 26613 - DNA, 29 bp, Homo Sapiens
tctaggttcgactcctggctggctcgcca

SEQ ID NO: 26614 - DNA, 16 bp, Homo Sapiens
tctagtggctaggatt

SEQ ID NO: 26615 - DNA, 17 bp, Homo Sapiens
tctagtggctaggattc

SEQ ID NO: 26616 - DNA, 18 bp, Homo Sapiens
tctagtggctaggattcg

SEQ ID NO: 26617 - DNA, 20 bp, Homo Sapiens
tctagtggctaggattcggc

SEQ ID NO: 26618 - DNA, 21 bp, Homo Sapiens
tctagtggctaggattcggcg

SEQ ID NO: 26619 - DNA, 22 bp, Homo Sapiens
tctagtggctaggattcggcgc

SEQ ID NO: 26620 - DNA, 23 bp, Homo Sapiens
tctagtggctaggattcggcgct

SEQ ID NO: 26621 - DNA, 25 bp, Homo Sapiens
tctagtggctaggattcggcgcttt

SEQ ID NO: 26622 - DNA, 29 bp, Homo Sapiens
tctagtggctaggattcggcgctttcacc

SEQ ID NO: 26623 - DNA, 30 bp, Homo Sapiens
tctagtggctaggattcggcgctttcaccg

SEQ ID NO: 26624 - DNA, 32 bp, Homo Sapiens
tctagtggctaggattcggcgctttcaccgcc

SEQ ID NO: 26625 - DNA, 22 bp, Homo Sapiens
tctagtggtatgattctcgctt

SEQ ID NO: 26626 - DNA, 16 bp, Homo Sapiens
tctagtggttaggatt

SEQ ID NO: 26627 - DNA, 17 bp, Homo Sapiens
tctagtggttaggattc

SEQ ID NO: 26628 - DNA, 24 bp, Homo Sapiens
tctagtggttaggattcagcgctc

SEQ ID NO: 26629 - DNA, 18 bp, Homo Sapiens
tctagtggttaggattcg

SEQ ID NO: 26630 - DNA, 19 bp, Homo Sapiens
tctagtggttaggattcgg

SEQ ID NO: 26631 - DNA, 20 bp, Homo Sapiens
tctagtggttaggattcggc

SEQ ID NO: 26632 - DNA, 21 bp, Homo Sapiens
tctagtggttaggattcggcg

SEQ ID NO: 26633 - DNA, 22 bp, Homo Sapiens
tctagtggttaggattcggcgc

SEQ ID NO: 26634 - DNA, 23 bp, Homo Sapiens
tctagtggttaggattcggcgct

SEQ ID NO: 26635 - DNA, 24 bp, Homo Sapiens
tctagtggttaggattcggcgctc

SEQ ID NO: 26636 - DNA, 25 bp, Homo Sapiens
tctagtggttaggattcggcgctct

SEQ ID NO: 26637 - DNA, 26 bp, Homo Sapiens
tctagtggttaggattcggcgctctc

SEQ ID NO: 26638 - DNA, 27 bp, Homo Sapiens
tctagtggttaggattcggcgctctca

SEQ ID NO: 26639 - DNA, 28 bp, Homo Sapiens
tctagtggttaggattcggcgctctcac

SEQ ID NO: 26640 - DNA, 29 bp, Homo Sapiens
tctagtggttaggattcggcgctctcacc

SEQ ID NO: 26641 - DNA, 30 bp, Homo Sapiens
tctagtggttaggattcggcgctctcaccg

SEQ ID NO: 26642 - DNA, 31 bp, Homo Sapiens
tctagtggttaggattcggcgctctcaccgc

SEQ ID NO: 26643 - DNA, 32 bp, Homo Sapiens
tctagtggttaggattcggcgctctcaccgcc

SEQ ID NO: 26644 - DNA, 39 bp, Homo Sapiens
tctagtggttaggattcggcgctctcaccgccgcggccc

SEQ ID NO: 26645 - DNA, 40 bp, Homo Sapiens
tctagtggttaggattcggcgctctcaccgccgcggcccg

SEQ ID NO: 26646 - DNA, 41 bp, Homo Sapiens
tctagtggttaggattcggcgctctcaccgccgcggcccgg

SEQ ID NO: 26647 - DNA, 43 bp, Homo Sapiens
tctagtggttaggattcggcgctctcaccgccgcggcccgggt

SEQ ID NO: 26648 - DNA, 44 bp, Homo Sapiens
tctagtggttaggattcggcgctctcaccgccgcggcccgggtt

SEQ ID NO: 26649 - DNA, 45 bp, Homo Sapiens
tctagtggttaggattcggcgctctcaccgccgcggcccgggttc

SEQ ID NO: 26650 - DNA, 28 bp, Homo Sapiens
tctagtggttaggattcggcgctctcat

SEQ ID NO: 26651 - DNA, 16 bp, Homo Sapiens
tctcaccgccgcggcc

SEQ ID NO: 26652 - DNA, 17 bp, Homo Sapiens
tctcaccgccgcggccc

SEQ ID NO: 26653 - DNA, 18 bp, Homo Sapiens
tctcaccgccgcggcccg

SEQ ID NO: 26654 - DNA, 19 bp, Homo Sapiens
tctcaccgccgcggcccgg

SEQ ID NO: 26655 - DNA, 21 bp, Homo Sapiens
tctcaccgccgcggcccgggt

SEQ ID NO: 26656 - DNA, 22 bp, Homo Sapiens
tctcaccgccgcggcccgggtt

SEQ ID NO: 26657 - DNA, 23 bp, Homo Sapiens
tctcaccgccgcggcccgggttc

SEQ ID NO: 26658 - DNA, 31 bp, Homo Sapiens
tctcaccgccgcggcccgggttcgattcccg

SEQ ID NO: 26659 - DNA, 33 bp, Homo Sapiens
tctcaccgccgcggcccgggttcgattcccggt

SEQ ID NO: 26660 - DNA, 34 bp, Homo Sapiens
tctcaccgccgcggcccgggttcgattcccggtc

SEQ ID NO: 26661 - DNA, 35 bp, Homo Sapiens
tctcaccgccgcggcccgggttcgattcccggtca

SEQ ID NO: 26662 - DNA, 36 bp, Homo Sapiens
tctcaccgccgcggcccgggttcgattcccggtcag

SEQ ID NO: 26663 - DNA, 37 bp, Homo Sapiens
tctcaccgccgcggcccgggttcgattcccggtcagg

SEQ ID NO: 26664 - DNA, 39 bp, Homo Sapiens
tctcaccgccgcggcccgggttcgattcccggtcaggga

SEQ ID NO: 26665 - DNA, 40 bp, Homo Sapiens
tctcaccgccgcggcccgggttcgattcccggtcagggaa

SEQ ID NO: 26666 - DNA, 41 bp, Homo Sapiens
tctcaccgccgcggcccgggttcgattcccggtcagggaac

SEQ ID NO: 26667 - DNA, 42 bp, Homo Sapiens
tctcaccgccgcggcccgggttcgattcccggtcagggaacc

SEQ ID NO: 26668 - DNA, 43 bp, Homo Sapiens
tctcaccgccgcggcccgggttcgattcccggtcagggaacca

SEQ ID NO: 26669 - DNA, 19 bp, Homo Sapiens
tctcagggatgggttcgat

SEQ ID NO: 26670 - DNA, 21 bp, Homo Sapiens
tctcagggatgggttcgattc

SEQ ID NO: 26671 - DNA, 23 bp, Homo Sapiens
tctcagggatgggttcgattctc

SEQ ID NO: 26672 - DNA, 29 bp, Homo Sapiens
tctcagggatgggttcgattctcatagtc

SEQ ID NO: 26673 - DNA, 30 bp, Homo Sapiens
tctcagggatgggttcgattctcatagtcc

SEQ ID NO: 26674 - DNA, 31 bp, Homo Sapiens
tctcagggatgggttcgattctcatagtcct

SEQ ID NO: 26675 - DNA, 32 bp, Homo Sapiens
tctcagggatgggttcgattctcatagtccta

SEQ ID NO: 26676 - DNA, 33 bp, Homo Sapiens
tctcagggatgggttcgattctcatagtcctag

SEQ ID NO: 26677 - DNA, 34 bp, Homo Sapiens
tctcagggatgggttcgattctcatagtcctagc

SEQ ID NO: 26678 - DNA, 35 bp, Homo Sapiens
tctcagggatgggttcgattctcatagtcctagcc

SEQ ID NO: 26679 - DNA, 36 bp, Homo Sapiens
tctcagggatgggttcgattctcatagtcctagcca

SEQ ID NO: 26680 - DNA, 19 bp, Homo Sapiens
tctcagggtcgtgggttcg

SEQ ID NO: 26681 - DNA, 32 bp, Homo Sapiens
tctcagggtcgtgggttcgagccccacgttgg

SEQ ID NO: 26682 - DNA, 33 bp, Homo Sapiens
tctcagggtcgtgggttcgagccccacgttggg

SEQ ID NO: 26683 - DNA, 34 bp, Homo Sapiens
tctcagggtcgtgggttcgagccccacgttgggc

SEQ ID NO: 26684 - DNA, 35 bp, Homo Sapiens
tctcagggtcgtgggttcgagccccacgttgggcg

SEQ ID NO: 26685 - DNA, 36 bp, Homo Sapiens
tctcagggtcgtgggttcgagccccacgttgggcgc

SEQ ID NO: 26686 - DNA, 37 bp, Homo Sapiens
tctcagggtcgtgggttcgagccccacgttgggcgcc

SEQ ID NO: 26687 - DNA, 38 bp, Homo Sapiens
tctcagggtcgtgggttcgagccccacgttgggcgcca

SEQ ID NO: 26688 - DNA, 17 bp, Homo Sapiens
tctcagtgggacctcca

SEQ ID NO: 26689 - DNA, 19 bp, Homo Sapiens
tctcataatctgaaggtcc

SEQ ID NO: 26690 - DNA, 20 bp, Homo Sapiens
tctcataatctgaaggtcct

SEQ ID NO: 26691 - DNA, 21 bp, Homo Sapiens
tctcataatctgaaggtcctg

SEQ ID NO: 26692 - DNA, 22 bp, Homo Sapiens
tctcataatctgaaggtcctga

SEQ ID NO: 26693 - DNA, 23 bp, Homo Sapiens
tctcataatctgaaggtcctgag

SEQ ID NO: 26694 - DNA, 24 bp, Homo Sapiens
tctcataatctgaaggtcctgagt

SEQ ID NO: 26695 - DNA, 21 bp, Homo Sapiens
tctcataatctgaaggtcgtg

SEQ ID NO: 26696 - DNA, 16 bp, Homo Sapiens
tctcatagtcctagcc

SEQ ID NO: 26697 - DNA, 17 bp, Homo Sapiens
tctcatagtcctagcca

SEQ ID NO: 26698 - DNA, 16 bp, Homo Sapiens
tctccaatggaggcgt

SEQ ID NO: 26699 - DNA, 19 bp, Homo Sapiens
tctccaatggaggcgtggg

SEQ ID NO: 26700 - DNA, 20 bp, Homo Sapiens
tctccaatggaggcgtgggt

SEQ ID NO: 26701 - DNA, 21 bp, Homo Sapiens
tctccaatggaggcgtgggtt

SEQ ID NO: 26702 - DNA, 22 bp, Homo Sapiens
tctccaatggaggcgtgggttc

SEQ ID NO: 26703 - DNA, 36 bp, Homo Sapiens
tctccaatggaggcgtgggttcgaatcccacttctg

SEQ ID NO: 26704 - DNA, 37 bp, Homo Sapiens
tctccaatggaggcgtgggttcgaatcccacttctga

SEQ ID NO: 26705 - DNA, 39 bp, Homo Sapiens
tctccaatggaggcgtgggttcgaatcccacttctgaca

SEQ ID NO: 26706 - DNA, 41 bp, Homo Sapiens
tctccaatggaggcgtgggttcgaatcccacttctgacacc

SEQ ID NO: 26707 - DNA, 42 bp, Homo Sapiens
tctccaatggaggcgtgggttcgaatcccacttctgacacca

SEQ ID NO: 26708 - DNA, 24 bp, Homo Sapiens
tctccccgcgcaggttcgaatcct

SEQ ID NO: 26709 - DNA, 25 bp, Homo Sapiens
tctccccgcgcaggttcgaatcctg

SEQ ID NO: 26710 - DNA, 34 bp, Homo Sapiens
tctccccgcgcaggttcgaatcctgccgactacg

SEQ ID NO: 26711 - DNA, 36 bp, Homo Sapiens
tctccccgcgcaggttcgaatcctgccgactacgcc

SEQ ID NO: 26712 - DNA, 19 bp, Homo Sapiens
tctcccctggaggcgtggg

SEQ ID NO: 26713 - DNA, 20 bp, Homo Sapiens
tctcccctggaggcgtgggt

SEQ ID NO: 26714 - DNA, 21 bp, Homo Sapiens
tctcccctggaggcgtgggtt

SEQ ID NO: 26715 - DNA, 32 bp, Homo Sapiens
tctcccctggaggcgtgggttcgaatcccact

SEQ ID NO: 26716 - DNA, 36 bp, Homo Sapiens
tctcccctggaggcgtgggttcgaatcccacttctg

SEQ ID NO: 26717 - DNA, 39 bp, Homo Sapiens
tctcccctggaggcgtgggttcgaatcccacttctgaca

SEQ ID NO: 26718 - DNA, 42 bp, Homo Sapiens
tctcccctggaggcgtgggttcgaatcccacttctgacacca

SEQ ID NO: 26719 - DNA, 16 bp, Homo Sapiens
tctccggatggaggcg

SEQ ID NO: 26720 - DNA, 17 bp, Homo Sapiens
tctccggatggaggcgt

SEQ ID NO: 26721 - DNA, 19 bp, Homo Sapiens
tctccggatggaggcgtgg

SEQ ID NO: 26722 - DNA, 20 bp, Homo Sapiens
tctccggatggaggcgtggg

SEQ ID NO: 26723 - DNA, 21 bp, Homo Sapiens
tctccggatggaggcgtgggt

SEQ ID NO: 26724 - DNA, 22 bp, Homo Sapiens
tctccggatggaggcgtgggtt

SEQ ID NO: 26725 - DNA, 23 bp, Homo Sapiens
tctccggatggaggcgtgggttc

SEQ ID NO: 26726 - DNA, 37 bp, Homo Sapiens
tctccggatggaggcgtgggttcgaatcccacttctg

SEQ ID NO: 26727 - DNA, 41 bp, Homo Sapiens
tctccggatggaggcgtgggttcgaatcccacttctgacac

SEQ ID NO: 26728 - DNA, 42 bp, Homo Sapiens
tctccggatggaggcgtgggttcgaatcccacttctgacacc

SEQ ID NO: 26729 - DNA, 43 bp, Homo Sapiens
tctccggatggaggcgtgggttcgaatcccacttctgacacca

SEQ ID NO: 26730 - DNA, 26 bp, Homo Sapiens
tctcgcctcccacgcgggagacccgg

SEQ ID NO: 26731 - DNA, 16 bp, Homo Sapiens
tctcgcctgccacgcg

SEQ ID NO: 26732 - DNA, 24 bp, Homo Sapiens
tctcgcctgccacgcgggaggccc

SEQ ID NO: 26733 - DNA, 26 bp, Homo Sapiens
tctcgcctgccacgcgggaggcccgg

SEQ ID NO: 26734 - DNA, 27 bp, Homo Sapiens
tctcgcctgccacgcgggaggcccggg

SEQ ID NO: 26735 - DNA, 28 bp, Homo Sapiens
tctcgcctgccacgcgggaggcccgggt

SEQ ID NO: 26736 - DNA, 29 bp, Homo Sapiens
tctcgcctgccacgcgggaggcccgggtt

SEQ ID NO: 26737 - DNA, 30 bp, Homo Sapiens
tctcgcctgccacgcgggaggcccgggttc

SEQ ID NO: 26738 - DNA, 16 bp, Homo Sapiens
tctcgctggggcctcc

SEQ ID NO: 26739 - DNA, 17 bp, Homo Sapiens
tctcgctggggcctcca

SEQ ID NO: 26740 - DNA, 27 bp, Homo Sapiens
tctcgcttcgggtgcgagaggtcccgg

SEQ ID NO: 26741 - DNA, 16 bp, Homo Sapiens
tctcggtggaacctcc

SEQ ID NO: 26742 - DNA, 17 bp, Homo Sapiens
tctcggtggaacctcca

SEQ ID NO: 26743 - DNA, 16 bp, Homo Sapiens
tctcggtgggaccccc

SEQ ID NO: 26744 - DNA, 16 bp, Homo Sapiens
tctcggtgggacctcc

SEQ ID NO: 26745 - DNA, 17 bp, Homo Sapiens
tctcggtgggacctcca

SEQ ID NO: 26746 - DNA, 19 bp, Homo Sapiens
tctctgtggcgcaatggac

SEQ ID NO: 26747 - DNA, 16 bp, Homo Sapiens
tctcttcgggggcgtg

SEQ ID NO: 26748 - DNA, 18 bp, Homo Sapiens
tctcttcgggggcgtggg

SEQ ID NO: 26749 - DNA, 19 bp, Homo Sapiens
tctcttcgggggcgtgggt

SEQ ID NO: 26750 - DNA, 20 bp, Homo Sapiens
tctcttcgggggcgtgggtt

SEQ ID NO: 26751 - DNA, 21 bp, Homo Sapiens
tctcttcgggggcgtgggttc

SEQ ID NO: 26752 - DNA, 40 bp, Homo Sapiens
tctcttcgggggcgtgggttcgaatcccaccgctgccacc

SEQ ID NO: 26753 - DNA, 16 bp, Homo Sapiens
tctgaaggtcctgagt

SEQ ID NO: 26754 - DNA, 17 bp, Homo Sapiens
tctgaaggtcctgagtt

SEQ ID NO: 26755 - DNA, 18 bp, Homo Sapiens
tctgaaggtcctgagttc

SEQ ID NO: 26756 - DNA, 19 bp, Homo Sapiens
tctgaaggtcctgagttcg

SEQ ID NO: 26757 - DNA, 23 bp, Homo Sapiens
tctgaaggtcctgagttcgaacc

SEQ ID NO: 26758 - DNA, 24 bp, Homo Sapiens
tctgaaggtcctgagttcgaacct

SEQ ID NO: 26759 - DNA, 26 bp, Homo Sapiens
tctgaaggtcctgagttcgaacctca

SEQ ID NO: 26760 - DNA, 27 bp, Homo Sapiens
tctgaaggtcctgagttcgaacctcag

SEQ ID NO: 26761 - DNA, 30 bp, Homo Sapiens
tctgaaggtcctgagttcgaacctcagagg

SEQ ID NO: 26762 - DNA, 32 bp, Homo Sapiens
tctgaaggtcctgagttcgaacctcagagggg

SEQ ID NO: 26763 - DNA, 33 bp, Homo Sapiens
tctgaaggtcctgagttcgaacctcagaggggg

SEQ ID NO: 26764 - DNA, 34 bp, Homo Sapiens
tctgaaggtcctgagttcgaacctcagagggggc

SEQ ID NO: 26765 - DNA, 35 bp, Homo Sapiens
tctgaaggtcctgagttcgaacctcagagggggca

SEQ ID NO: 26766 - DNA, 36 bp, Homo Sapiens
tctgaaggtcctgagttcgaacctcagagggggcac

SEQ ID NO: 26767 - DNA, 37 bp, Homo Sapiens
tctgaaggtcctgagttcgaacctcagagggggcacc

SEQ ID NO: 26768 - DNA, 38 bp, Homo Sapiens
tctgaaggtcctgagttcgaacctcagagggggcacca

SEQ ID NO: 26769 - DNA, 22 bp, Homo Sapiens
tctgaaggtcctgagttcgagc

SEQ ID NO: 26770 - DNA, 32 bp, Homo Sapiens
tctgaaggtcctgagttcgagcctcagagagg

SEQ ID NO: 26771 - DNA, 33 bp, Homo Sapiens
tctgaaggtcctgagttcgagcctcagagaggg

SEQ ID NO: 26772 - DNA, 35 bp, Homo Sapiens
tctgaaggtcctgagttcgagcctcagagagggca

SEQ ID NO: 26773 - DNA, 36 bp, Homo Sapiens
tctgaaggtcctgagttcgagcctcagagagggcac

SEQ ID NO: 26774 - DNA, 37 bp, Homo Sapiens
tctgaaggtcctgagttcgagcctcagagagggcacc

SEQ ID NO: 26775 - DNA, 38 bp, Homo Sapiens
tctgaaggtcctgagttcgagcctcagagagggcacca

SEQ ID NO: 26776 - DNA, 16 bp, Homo Sapiens
tctgaaggtcgtgagt

SEQ ID NO: 26777 - DNA, 17 bp, Homo Sapiens
tctgaaggtcgtgagtt

SEQ ID NO: 26778 - DNA, 18 bp, Homo Sapiens
tctgaaggtcgtgagttc

SEQ ID NO: 26779 - DNA, 19 bp, Homo Sapiens
tctgaaggtcgtgagttcg

SEQ ID NO: 26780 - DNA, 23 bp, Homo Sapiens
tctgaaggtcgtgagttcgagcc

SEQ ID NO: 26781 - DNA, 24 bp, Homo Sapiens
tctgaaggtcgtgagttcgagcct

SEQ ID NO: 26782 - DNA, 26 bp, Homo Sapiens
tctgaaggtcgtgagttcgagcctca

SEQ ID NO: 26783 - DNA, 28 bp, Homo Sapiens
tctgaaggtcgtgagttcgagcctcaca

SEQ ID NO: 26784 - DNA, 29 bp, Homo Sapiens
tctgaaggtcgtgagttcgagcctcacac

SEQ ID NO: 26785 - DNA, 30 bp, Homo Sapiens
tctgaaggtcgtgagttcgagcctcacacg

SEQ ID NO: 26786 - DNA, 31 bp, Homo Sapiens
tctgaaggtcgtgagttcgagcctcacacgg

SEQ ID NO: 26787 - DNA, 32 bp, Homo Sapiens
tctgaaggtcgtgagttcgagcctcacacggg

SEQ ID NO: 26788 - DNA, 33 bp, Homo Sapiens
tctgaaggtcgtgagttcgagcctcacacgggg

SEQ ID NO: 26789 - DNA, 34 bp, Homo Sapiens
tctgaaggtcgtgagttcgagcctcacacggggc

SEQ ID NO: 26790 - DNA, 35 bp, Homo Sapiens
tctgaaggtcgtgagttcgagcctcacacggggca

SEQ ID NO: 26791 - DNA, 36 bp, Homo Sapiens
tctgaaggtcgtgagttcgagcctcacacggggcac

SEQ ID NO: 26792 - DNA, 37 bp, Homo Sapiens
tctgaaggtcgtgagttcgagcctcacacggggcacc

SEQ ID NO: 26793 - DNA, 38 bp, Homo Sapiens
tctgaaggtcgtgagttcgagcctcacacggggcacca

SEQ ID NO: 26794 - DNA, 32 bp, Homo Sapiens
tctgaaggtcgtgagttcgatcctcacacggg

SEQ ID NO: 26795 - DNA, 33 bp, Homo Sapiens
tctgaaggtcgtgagttcgatcctcacacgggg

SEQ ID NO: 26796 - DNA, 34 bp, Homo Sapiens
tctgaaggtcgtgagttcgatcctcacacggggc

SEQ ID NO: 26797 - DNA, 35 bp, Homo Sapiens
tctgaaggtcgtgagttcgatcctcacacggggca

SEQ ID NO: 26798 - DNA, 36 bp, Homo Sapiens
tctgaaggtcgtgagttcgatcctcacacggggcac

SEQ ID NO: 26799 - DNA, 37 bp, Homo Sapiens
tctgaaggtcgtgagttcgatcctcacacggggcacc

SEQ ID NO: 26800 - DNA, 38 bp, Homo Sapiens
tctgaaggtcgtgagttcgatcctcacacggggcacca

SEQ ID NO: 26801 - DNA, 16 bp, Homo Sapiens
tctgaatccagcgatc

SEQ ID NO: 26802 - DNA, 17 bp, Homo Sapiens
tctgaatccagcgatcc

SEQ ID NO: 26803 - DNA, 18 bp, Homo Sapiens
tctgaatccagcgatccg

SEQ ID NO: 26804 - DNA, 19 bp, Homo Sapiens
tctgaatccagcgatccga

SEQ ID NO: 26805 - DNA, 20 bp, Homo Sapiens
tctgaatccagcgatccgag

SEQ ID NO: 26806 - DNA, 21 bp, Homo Sapiens
tctgaatccagcgatccgagt

SEQ ID NO: 26807 - DNA, 22 bp, Homo Sapiens
tctgaatccagcgatccgagtt

SEQ ID NO: 26808 - DNA, 23 bp, Homo Sapiens
tctgaatccagcgatccgagttc

SEQ ID NO: 26809 - DNA, 24 bp, Homo Sapiens
tctgaatccagcgatccgagttca

SEQ ID NO: 26810 - DNA, 27 bp, Homo Sapiens
tctgaatccagcgatccgagttcaaat

SEQ ID NO: 26811 - DNA, 33 bp, Homo Sapiens
tctgaatccagcgatccgagttcaaatctcggt

SEQ ID NO: 26812 - DNA, 34 bp, Homo Sapiens
tctgaatccagcgatccgagttcaaatctcggtg

SEQ ID NO: 26813 - DNA, 35 bp, Homo Sapiens
tctgaatccagcgatccgagttcaaatctcggtgg

SEQ ID NO: 26814 - DNA, 36 bp, Homo Sapiens
tctgaatccagcgatccgagttcaaatctcggtgga

SEQ ID NO: 26815 - DNA, 37 bp, Homo Sapiens
tctgaatccagcgatccgagttcaaatctcggtggaa

SEQ ID NO: 26816 - DNA, 38 bp, Homo Sapiens
tctgaatccagcgatccgagttcaaatctcggtggaac

SEQ ID NO: 26817 - DNA, 39 bp, Homo Sapiens
tctgaatccagcgatccgagttcaaatctcggtggaacc

SEQ ID NO: 26818 - DNA, 40 bp, Homo Sapiens
tctgaatccagcgatccgagttcaaatctcggtggaacct

SEQ ID NO: 26819 - DNA, 41 bp, Homo Sapiens
tctgaatccagcgatccgagttcaaatctcggtggaacctc

SEQ ID NO: 26820 - DNA, 42 bp, Homo Sapiens
tctgaatccagcgatccgagttcaaatctcggtggaacctcc

SEQ ID NO: 26821 - DNA, 43 bp, Homo Sapiens
tctgaatccagcgatccgagttcaaatctcggtggaacctcca

SEQ ID NO: 26822 - DNA, 36 bp, Homo Sapiens
tctgaatccagcgatccgagttcaagtctcggtgga

SEQ ID NO: 26823 - DNA, 40 bp, Homo Sapiens
tctgaatccagcgatccgagttcaagtctcggtggaacct

SEQ ID NO: 26824 - DNA, 24 bp, Homo Sapiens
tctgaatccagcgatccgagttcg

SEQ ID NO: 26825 - DNA, 25 bp, Homo Sapiens
tctgaatccagcgatccgagttcga

SEQ ID NO: 26826 - DNA, 34 bp, Homo Sapiens
tctgaatccagcgatccgagttcgagtctcggtg

SEQ ID NO: 26827 - DNA, 35 bp, Homo Sapiens
tctgaatccagcgatccgagttcgagtctcggtgg

SEQ ID NO: 26828 - DNA, 36 bp, Homo Sapiens
tctgaatccagcgatccgagttcgagtctcggtgga

SEQ ID NO: 26829 - DNA, 37 bp, Homo Sapiens
tctgaatccagcgatccgagttcgagtctcggtggaa

SEQ ID NO: 26830 - DNA, 38 bp, Homo Sapiens
tctgaatccagcgatccgagttcgagtctcggtggaac

SEQ ID NO: 26831 - DNA, 40 bp, Homo Sapiens
tctgaatccagcgatccgagttcgagtctcggtggaacct

SEQ ID NO: 26832 - DNA, 41 bp, Homo Sapiens
tctgaatccagcgatccgagttcgagtctcggtggaacctc

SEQ ID NO: 26833 - DNA, 42 bp, Homo Sapiens
tctgaatccagcgatccgagttcgagtctcggtggaacctcc

SEQ ID NO: 26834 - DNA, 16 bp, Homo Sapiens
tctgacaacagaggct

SEQ ID NO: 26835 - DNA, 17 bp, Homo Sapiens
tctgacaacagaggctt

SEQ ID NO: 26836 - DNA, 18 bp, Homo Sapiens
tctgacaacagaggctta

SEQ ID NO: 26837 - DNA, 19 bp, Homo Sapiens
tctgacaacagaggcttac

SEQ ID NO: 26838 - DNA, 20 bp, Homo Sapiens
tctgacaacagaggcttacg

SEQ ID NO: 26839 - DNA, 21 bp, Homo Sapiens
tctgacaacagaggcttacga

SEQ ID NO: 26840 - DNA, 22 bp, Homo Sapiens
tctgacaacagaggcttacgac

SEQ ID NO: 26841 - DNA, 24 bp, Homo Sapiens
tctgacaacagaggcttacgaccc

SEQ ID NO: 26842 - DNA, 25 bp, Homo Sapiens
tctgacaacagaggcttacgacccc

SEQ ID NO: 26843 - DNA, 26 bp, Homo Sapiens
tctgacaacagaggcttacgacccct

SEQ ID NO: 26844 - DNA, 27 bp, Homo Sapiens
tctgacaacagaggcttacgacccctt

SEQ ID NO: 26845 - DNA, 28 bp, Homo Sapiens
tctgacaacagaggcttacgacccctta

SEQ ID NO: 26846 - DNA, 29 bp, Homo Sapiens
tctgacaacagaggcttacgaccccttat

SEQ ID NO: 26847 - DNA, 30 bp, Homo Sapiens
tctgacaacagaggcttacgaccccttatt

SEQ ID NO: 26848 - DNA, 31 bp, Homo Sapiens
tctgacaacagaggcttacgaccccttattt

SEQ ID NO: 26849 - DNA, 32 bp, Homo Sapiens
tctgacaacagaggcttacgaccccttattta

SEQ ID NO: 26850 - DNA, 33 bp, Homo Sapiens
tctgacaacagaggcttacgaccccttatttac

SEQ ID NO: 26851 - DNA, 34 bp, Homo Sapiens
tctgacaacagaggcttacgaccccttatttacc

SEQ ID NO: 26852 - DNA, 35 bp, Homo Sapiens
tctgacaacagaggcttacgaccccttatttaccc

SEQ ID NO: 26853 - DNA, 36 bp, Homo Sapiens
tctgacaacagaggcttacgaccccttatttacccc

SEQ ID NO: 26854 - DNA, 37 bp, Homo Sapiens
tctgacaacagaggcttacgaccccttatttacccca

SEQ ID NO: 26855 - DNA, 16 bp, Homo Sapiens
tctgagggtccagggt

SEQ ID NO: 26856 - DNA, 17 bp, Homo Sapiens
tctgagggtccagggtt

SEQ ID NO: 26857 - DNA, 18 bp, Homo Sapiens
tctgagggtccagggttc

SEQ ID NO: 26858 - DNA, 19 bp, Homo Sapiens
tctgagggtccagggttca

SEQ ID NO: 26859 - DNA, 20 bp, Homo Sapiens
tctgagggtccagggttcaa

SEQ ID NO: 26860 - DNA, 21 bp, Homo Sapiens
tctgagggtccagggttcaag

SEQ ID NO: 26861 - DNA, 22 bp, Homo Sapiens
tctgagggtccagggttcaagt

SEQ ID NO: 26862 - DNA, 26 bp, Homo Sapiens
tctgagggtccagggttcaagtccct

SEQ ID NO: 26863 - DNA, 27 bp, Homo Sapiens
tctgagggtccagggttcaagtccctg

SEQ ID NO: 26864 - DNA, 36 bp, Homo Sapiens
tctgagggtccagggttcaagtccctgtccaggcgc

SEQ ID NO: 26865 - DNA, 37 bp, Homo Sapiens
tctgagggtccagggttcaagtccctgtccaggcgcc

SEQ ID NO: 26866 - DNA, 38 bp, Homo Sapiens
tctgagggtccagggttcaagtccctgtccaggcgcca

SEQ ID NO: 26867 - DNA, 29 bp, Homo Sapiens
tctgagggtccagggttcaagtccctgtt

SEQ ID NO: 26868 - DNA, 30 bp, Homo Sapiens
tctgagggtccagggttcaagtccctgttc

SEQ ID NO: 26869 - DNA, 36 bp, Homo Sapiens
tctgagggtccagggttcaagtccctgttcaggcac

SEQ ID NO: 26870 - DNA, 37 bp, Homo Sapiens
tctgagggtccagggttcaagtccctgttcaggcacc

SEQ ID NO: 26871 - DNA, 38 bp, Homo Sapiens
tctgagggtccagggttcaagtccctgttcaggcacca

SEQ ID NO: 26872 - DNA, 36 bp, Homo Sapiens
tctgagggtccagggttcaagtccctgttcaggcgc

SEQ ID NO: 26873 - DNA, 37 bp, Homo Sapiens
tctgagggtccagggttcaagtccctgttcaggcgcc

SEQ ID NO: 26874 - DNA, 38 bp, Homo Sapiens
tctgagggtccagggttcaagtccctgttcaggcgcca

SEQ ID NO: 26875 - DNA, 31 bp, Homo Sapiens
tctgagggtccagggttcaagtccctgttcg

SEQ ID NO: 26876 - DNA, 32 bp, Homo Sapiens
tctgagggtccagggttcaagtccctgttcgg

SEQ ID NO: 26877 - DNA, 33 bp, Homo Sapiens
tctgagggtccagggttcaagtccctgttcggg

SEQ ID NO: 26878 - DNA, 34 bp, Homo Sapiens
tctgagggtccagggttcaagtccctgttcgggc

SEQ ID NO: 26879 - DNA, 35 bp, Homo Sapiens
tctgagggtccagggttcaagtccctgttcgggcg

SEQ ID NO: 26880 - DNA, 36 bp, Homo Sapiens
tctgagggtccagggttcaagtccctgttcgggcgc

SEQ ID NO: 26881 - DNA, 37 bp, Homo Sapiens
tctgagggtccagggttcaagtccctgttcgggcgcc

SEQ ID NO: 26882 - DNA, 38 bp, Homo Sapiens
tctgagggtccagggttcaagtccctgttcgggcgcca

SEQ ID NO: 26883 - DNA, 25 bp, Homo Sapiens
tctgagggtccagggttcatgtccc

SEQ ID NO: 26884 - DNA, 26 bp, Homo Sapiens
tctgagggtccagggttcatgtccct

SEQ ID NO: 26885 - DNA, 27 bp, Homo Sapiens
tctgagggtccagggttcatgtccctg

SEQ ID NO: 26886 - DNA, 28 bp, Homo Sapiens
tctgagggtccagggttcatgtccctgt

SEQ ID NO: 26887 - DNA, 29 bp, Homo Sapiens
tctgagggtccagggttcatgtccctgtt

SEQ ID NO: 26888 - DNA, 30 bp, Homo Sapiens
tctgagggtccagggttcatgtccctgttc

SEQ ID NO: 26889 - DNA, 37 bp, Homo Sapiens
tctgagggtccggggttcaagtccctgttcgggcgcc

SEQ ID NO: 26890 - DNA, 38 bp, Homo Sapiens
tctgagggtccggggttcaagtccctgttcgggcgcca

SEQ ID NO: 26891 - DNA, 23 bp, Homo Sapiens
tctgataaaagagttactttgat

SEQ ID NO: 26892 - DNA, 42 bp, Homo Sapiens
tctgataaaagagttactttgatagagtaaataataggagct

SEQ ID NO: 26893 - DNA, 16 bp, Homo Sapiens
tctgcacgcgtgggtt

SEQ ID NO: 26894 - DNA, 29 bp, Homo Sapiens
tctgcacgcgtgggttcgaatcccatcct

SEQ ID NO: 26895 - DNA, 16 bp, Homo Sapiens
tctgcgttgtggccgc

SEQ ID NO: 26896 - DNA, 17 bp, Homo Sapiens
tctgcgttgtggccgca

SEQ ID NO: 26897 - DNA, 28 bp, Homo Sapiens
tctgcgttgtggccgcagcaacctcggt

SEQ ID NO: 26898 - DNA, 30 bp, Homo Sapiens
tctgctttacacgcagaaggtcctgggttc

SEQ ID NO: 26899 - DNA, 16 bp, Homo Sapiens
tctggactctgaatcc

SEQ ID NO: 26900 - DNA, 17 bp, Homo Sapiens
tctggactctgaatcca

SEQ ID NO: 26901 - DNA, 19 bp, Homo Sapiens
tctggactctgaatccagc

SEQ ID NO: 26902 - DNA, 20 bp, Homo Sapiens
tctggactctgaatccagcg

SEQ ID NO: 26903 - DNA, 22 bp, Homo Sapiens
tctggactctgaatccagcgat

SEQ ID NO: 26904 - DNA, 24 bp, Homo Sapiens
tctggactctgaatccagcgatcc

SEQ ID NO: 26905 - DNA, 25 bp, Homo Sapiens
tctggactctgaatccagcgatccg

SEQ ID NO: 26906 - DNA, 26 bp, Homo Sapiens
tctggactctgaatccagcgatccga

SEQ ID NO: 26907 - DNA, 27 bp, Homo Sapiens
tctggactctgaatccagcgatccgag

SEQ ID NO: 26908 - DNA, 28 bp, Homo Sapiens
tctggactctgaatccagcgatccgagt

SEQ ID NO: 26909 - DNA, 29 bp, Homo Sapiens
tctggactctgaatccagcgatccgagtt

SEQ ID NO: 26910 - DNA, 30 bp, Homo Sapiens
tctggactctgaatccagcgatccgagttc

SEQ ID NO: 26911 - DNA, 31 bp, Homo Sapiens
tctggactctgaatccagcgatccgagttca

SEQ ID NO: 26912 - DNA, 40 bp, Homo Sapiens
tctggactctgaatccagcgatccgagttcaaatctcggt

SEQ ID NO: 26913 - DNA, 41 bp, Homo Sapiens
tctggactctgaatccagcgatccgagttcaaatctcggtg

SEQ ID NO: 26914 - DNA, 47 bp, Homo Sapiens
tctggactctgaatccagcgatccgagttcaaatctcggtggaacct

SEQ ID NO: 26915 - DNA, 16 bp, Homo Sapiens
tctggactttgaatcc

SEQ ID NO: 26916 - DNA, 17 bp, Homo Sapiens
tctggactttgaatcca

SEQ ID NO: 26917 - DNA, 29 bp, Homo Sapiens
tctggactttgaatccagcgatccgagtt

SEQ ID NO: 26918 - DNA, 30 bp, Homo Sapiens
tctggactttgaatccagcgatccgagttc

SEQ ID NO: 26919 - DNA, 26 bp, Homo Sapiens
tctggtctccaatggaggcgtgggtt

SEQ ID NO: 26920 - DNA, 46 bp, Homo Sapiens
tctggtctccaatggaggcgtgggttcgaatcccacttctgacacc

SEQ ID NO: 26921 - DNA, 47 bp, Homo Sapiens
tctggtctccaatggaggcgtgggttcgaatcccacttctgacacca

SEQ ID NO: 26922 - DNA, 24 bp, Homo Sapiens
tctggtctccggatggaggcgtgg

SEQ ID NO: 26923 - DNA, 27 bp, Homo Sapiens
tctggtctccggatggaggcgtgggtt

SEQ ID NO: 26924 - DNA, 46 bp, Homo Sapiens
tctggtctccggatggaggcgtgggttcgaatcccacttctgacac

SEQ ID NO: 26925 - DNA, 47 bp, Homo Sapiens
tctggtctccggatggaggcgtgggttcgaatcccacttctgacacc

SEQ ID NO: 26926 - DNA, 20 bp, Homo Sapiens
tctgtagtgtagtggttatc

SEQ ID NO: 26927 - DNA, 29 bp, Homo Sapiens
tctgtagtgtagtggttatcacgttcgcc

SEQ ID NO: 26928 - DNA, 30 bp, Homo Sapiens
tctgtagtgtagtggttatcacgttcgcct

SEQ ID NO: 26929 - DNA, 31 bp, Homo Sapiens
tctgtagtgtagtggttatcacgttcgcctc

SEQ ID NO: 26930 - DNA, 32 bp, Homo Sapiens
tctgtagtgtagtggttatcacgttcgcctca

SEQ ID NO: 26931 - DNA, 33 bp, Homo Sapiens
tctgtagtgtagtggttatcacgttcgcctcac

SEQ ID NO: 26932 - DNA, 34 bp, Homo Sapiens
tctgtagtgtagtggttatcacgttcgcctcaca

SEQ ID NO: 26933 - DNA, 16 bp, Homo Sapiens
tctgtggcgcaatcgg

SEQ ID NO: 26934 - DNA, 37 bp, Homo Sapiens
tctgtggcgcaatcggttagcgcgttcggctgttaac

SEQ ID NO: 26935 - DNA, 16 bp, Homo Sapiens
tctgtggcgcaatgga

SEQ ID NO: 26936 - DNA, 17 bp, Homo Sapiens
tctgtggcgcaatggac

SEQ ID NO: 26937 - DNA, 18 bp, Homo Sapiens
tctgtggcgcaatggacg

SEQ ID NO: 26938 - DNA, 30 bp, Homo Sapiens
tctgtggcgcaatggatagcgcattggact

SEQ ID NO: 26939 - DNA, 33 bp, Homo Sapiens
tctgtggcgcaatggatagcgcattggacttct

SEQ ID NO: 26940 - DNA, 16 bp, Homo Sapiens
tcttaatcccagggtc

SEQ ID NO: 26941 - DNA, 17 bp, Homo Sapiens
tcttaatcccagggtcg

SEQ ID NO: 26942 - DNA, 18 bp, Homo Sapiens
tcttaatcccagggtcgt

SEQ ID NO: 26943 - DNA, 19 bp, Homo Sapiens
tcttaatcccagggtcgtg

SEQ ID NO: 26944 - DNA, 20 bp, Homo Sapiens
tcttaatcccagggtcgtgg

SEQ ID NO: 26945 - DNA, 31 bp, Homo Sapiens
tcttaatcccagggtcgtgggttcgagcccc

SEQ ID NO: 26946 - DNA, 37 bp, Homo Sapiens
tcttaatcccagggtcgtgggttcgagccccacgttg

SEQ ID NO: 26947 - DNA, 16 bp, Homo Sapiens
tcttaatctcagggtc

SEQ ID NO: 26948 - DNA, 17 bp, Homo Sapiens
tcttaatctcagggtcg

SEQ ID NO: 26949 - DNA, 18 bp, Homo Sapiens
tcttaatctcagggtcgt

SEQ ID NO: 26950 - DNA, 19 bp, Homo Sapiens
tcttaatctcagggtcgtg

SEQ ID NO: 26951 - DNA, 20 bp, Homo Sapiens
tcttaatctcagggtcgtgg

SEQ ID NO: 26952 - DNA, 21 bp, Homo Sapiens
tcttaatctcagggtcgtggg

SEQ ID NO: 26953 - DNA, 23 bp, Homo Sapiens
tcttaatctcagggtcgtgggtt

SEQ ID NO: 26954 - DNA, 24 bp, Homo Sapiens
tcttaatctcagggtcgtgggttc

SEQ ID NO: 26955 - DNA, 29 bp, Homo Sapiens
tcttaatctcagggtcgtgggttcgagcc

SEQ ID NO: 26956 - DNA, 31 bp, Homo Sapiens
tcttaatctcagggtcgtgggttcgagcccc

SEQ ID NO: 26957 - DNA, 34 bp, Homo Sapiens
tcttaatctcagggtcgtgggttcgagccccacg

SEQ ID NO: 26958 - DNA, 35 bp, Homo Sapiens
tcttaatctcagggtcgtgggttcgagccccacgt

SEQ ID NO: 26959 - DNA, 37 bp, Homo Sapiens
tcttaatctcagggtcgtgggttcgagccccacgttg

SEQ ID NO: 26960 - DNA, 38 bp, Homo Sapiens
tcttaatctcagggtcgtgggttcgagccccacgttgg

SEQ ID NO: 26961 - DNA, 43 bp, Homo Sapiens
tcttaatctcagggtcgtgggttcgagccccacgttgggcgcc

SEQ ID NO: 26962 - DNA, 16 bp, Homo Sapiens
tcttagctttgggtgc

SEQ ID NO: 26963 - DNA, 24 bp, Homo Sapiens
tcttagctttgggtgctaatggtg

SEQ ID NO: 26964 - DNA, 27 bp, Homo Sapiens
tcttagctttgggtgctaatggtggag

SEQ ID NO: 26965 - DNA, 28 bp, Homo Sapiens
tcttagctttgggtgctaatggtggagt

SEQ ID NO: 26966 - DNA, 29 bp, Homo Sapiens
tcttagctttgggtgctaatggtggagtt

SEQ ID NO: 26967 - DNA, 30 bp, Homo Sapiens
tcttagctttgggtgctaatggtggagtta

SEQ ID NO: 26968 - DNA, 31 bp, Homo Sapiens
tcttagctttgggtgctaatggtggagttaa

SEQ ID NO: 26969 - DNA, 33 bp, Homo Sapiens
tcttagctttgggtgctaatggtggagttaaag

SEQ ID NO: 26970 - DNA, 34 bp, Homo Sapiens
tcttagctttgggtgctaatggtggagttaaaga

SEQ ID NO: 26971 - DNA, 35 bp, Homo Sapiens
tcttagctttgggtgctaatggtggagttaaagac

SEQ ID NO: 26972 - DNA, 36 bp, Homo Sapiens
tcttagctttgggtgctaatggtggagttaaagact

SEQ ID NO: 26973 - DNA, 37 bp, Homo Sapiens
tcttagctttgggtgctaatggtggagttaaagactt

SEQ ID NO: 26974 - DNA, 38 bp, Homo Sapiens
tcttagctttgggtgctaatggtggagttaaagacttt

SEQ ID NO: 26975 - DNA, 39 bp, Homo Sapiens
tcttagctttgggtgctaatggtggagttaaagactttt

SEQ ID NO: 26976 - DNA, 43 bp, Homo Sapiens
tcttagctttgggtgctaatggtggagttaaagactttttctc

SEQ ID NO: 26977 - DNA, 46 bp, Homo Sapiens
tcttagctttgggtgctaatggtggagttaaagactttttctctga

SEQ ID NO: 26978 - DNA, 47 bp, Homo Sapiens
tcttagctttgggtgctaatggtggagttaaagactttttctctgac

SEQ ID NO: 26979 - DNA, 48 bp, Homo Sapiens
tcttagctttgggtgctaatggtggagttaaagactttttctctgacc

SEQ ID NO: 26980 - DNA, 30 bp, Homo Sapiens
tcttaggccccaaaaattttggtgcaactc

SEQ ID NO: 26981 - DNA, 44 bp, Homo Sapiens
tcttaggccccaaaaattttggtgcaactccaaataaaagtacc

SEQ ID NO: 26982 - DNA, 16 bp, Homo Sapiens
tcttcggaggcgtggg

SEQ ID NO: 26983 - DNA, 17 bp, Homo Sapiens
tcttcggaggcgtgggt

SEQ ID NO: 26984 - DNA, 19 bp, Homo Sapiens
tcttcggaggcgtgggttc

SEQ ID NO: 26985 - DNA, 27 bp, Homo Sapiens
tcttcggaggcgtgggttcgaatccca

SEQ ID NO: 26986 - DNA, 38 bp, Homo Sapiens
tcttcggaggcgtgggttcgaatcccaccgctgccacc

SEQ ID NO: 26987 - DNA, 16 bp, Homo Sapiens
tcttcgggggcgtggg

SEQ ID NO: 26988 - DNA, 17 bp, Homo Sapiens
tcttcgggggcgtgggt

SEQ ID NO: 26989 - DNA, 18 bp, Homo Sapiens
tcttcgggggcgtgggtt

SEQ ID NO: 26990 - DNA, 19 bp, Homo Sapiens
tcttcgggggcgtgggttc

SEQ ID NO: 26991 - DNA, 20 bp, Homo Sapiens
tcttcgggggcgtgggttcg

SEQ ID NO: 26992 - DNA, 33 bp, Homo Sapiens
tcttcgggggcgtgggttcgaatcccaccgctg

SEQ ID NO: 26993 - DNA, 38 bp, Homo Sapiens
tcttcgggggcgtgggttcgaatcccaccgctgccacc

SEQ ID NO: 26994 - DNA, 19 bp, Homo Sapiens
tcttcgggggcgtgggttt

SEQ ID NO: 26995 - DNA, 17 bp, Homo Sapiens
tcttgcgacccgggttc

SEQ ID NO: 26996 - DNA, 18 bp, Homo Sapiens
tcttgcgacccgggttcg

SEQ ID NO: 26997 - DNA, 29 bp, Homo Sapiens
tcttgcgacccgggttcgattcccgggcg

SEQ ID NO: 26998 - DNA, 30 bp, Homo Sapiens
tcttgcgacccgggttcgattcccgggcgg

SEQ ID NO: 26999 - DNA, 31 bp, Homo Sapiens
tcttgcgacccgggttcgattcccgggcggc

SEQ ID NO: 27000 - DNA, 32 bp, Homo Sapiens
tcttgcgacccgggttcgattcccgggcggcg

SEQ ID NO: 27001 - DNA, 33 bp, Homo Sapiens
tcttgcgacccgggttcgattcccgggcggcgc

SEQ ID NO: 27002 - DNA, 34 bp, Homo Sapiens
tcttgcgacccgggttcgattcccgggcggcgca

SEQ ID NO: 27003 - DNA, 35 bp, Homo Sapiens
tcttgcgacccgggttcgattcccgggcggcgcac

SEQ ID NO: 27004 - DNA, 36 bp, Homo Sapiens
tcttgcgacccgggttcgattcccgggcggcgcacc

SEQ ID NO: 27005 - DNA, 37 bp, Homo Sapiens
tcttgcgacccgggttcgattcccgggcggcgcacca

SEQ ID NO: 27006 - DNA, 24 bp, Homo Sapiens
tcttgtaaacaggagatcctgggt

SEQ ID NO: 27007 - DNA, 40 bp, Homo Sapiens
tcttgtaaaccggagatgaaaacctttttccaaggacacc

SEQ ID NO: 27008 - DNA, 41 bp, Homo Sapiens
tcttgtaaaccggagatgaaaacctttttccaaggacacca

SEQ ID NO: 27009 - DNA, 33 bp, Homo Sapiens
tcttgtagttgaaatacaacgatggtttttcat

SEQ ID NO: 27010 - DNA, 20 bp, Homo Sapiens
tcttttagtataaatagtac

SEQ ID NO: 27011 - DNA, 21 bp, Homo Sapiens
tcttttagtataaatagtacc

SEQ ID NO: 27012 - DNA, 27 bp, Homo Sapiens
tcttttagtataaatagtaccgttaac

SEQ ID NO: 27013 - DNA, 28 bp, Homo Sapiens
tcttttagtataaatagtaccgttaact

SEQ ID NO: 27014 - DNA, 29 bp, Homo Sapiens
tcttttagtataaatagtaccgttaactt

SEQ ID NO: 27015 - DNA, 30 bp, Homo Sapiens
tcttttagtataaatagtaccgttaacttc

SEQ ID NO: 27016 - DNA, 31 bp, Homo Sapiens
tcttttagtataaatagtaccgttaacttcc

SEQ ID NO: 27017 - DNA, 32 bp, Homo Sapiens
tcttttagtataaatagtaccgttaacttcca

SEQ ID NO: 27018 - DNA, 18 bp, Homo Sapiens
tgaaaaagtcatggaggc

SEQ ID NO: 27019 - DNA, 19 bp, Homo Sapiens
tgaaaaagtcatggaggcc

SEQ ID NO: 27020 - DNA, 21 bp, Homo Sapiens
tgaaaaagtcatggaggccat

SEQ ID NO: 27021 - DNA, 27 bp, Homo Sapiens
tgaaaaagtcatggaggccatggggtt

SEQ ID NO: 27022 - DNA, 28 bp, Homo Sapiens
tgaaaaagtcatggaggccatggggttg

SEQ ID NO: 27023 - DNA, 29 bp, Homo Sapiens
tgaaaaagtcatggaggccatggggttgg

SEQ ID NO: 27024 - DNA, 16 bp, Homo Sapiens
tgaaaacctttttcca

SEQ ID NO: 27025 - DNA, 20 bp, Homo Sapiens
tgaaaacctttttccaagga

SEQ ID NO: 27026 - DNA, 21 bp, Homo Sapiens
tgaaaacctttttccaaggac

SEQ ID NO: 27027 - DNA, 22 bp, Homo Sapiens
tgaaaacctttttccaaggaca

SEQ ID NO: 27028 - DNA, 23 bp, Homo Sapiens
tgaaaacctttttccaaggacac

SEQ ID NO: 27029 - DNA, 24 bp, Homo Sapiens
tgaaaacctttttccaaggacacc

SEQ ID NO: 27030 - DNA, 25 bp, Homo Sapiens
tgaaaacctttttccaaggacacca

SEQ ID NO: 27031 - DNA, 17 bp, Homo Sapiens
tgaaaatgtttagacgg

SEQ ID NO: 27032 - DNA, 19 bp, Homo Sapiens
tgaaaatgtttagacgggc

SEQ ID NO: 27033 - DNA, 20 bp, Homo Sapiens
tgaaaatgtttagacgggct

SEQ ID NO: 27034 - DNA, 21 bp, Homo Sapiens
tgaaaatgtttagacgggctc

SEQ ID NO: 27035 - DNA, 22 bp, Homo Sapiens
tgaaaatgtttagacgggctca

SEQ ID NO: 27036 - DNA, 23 bp, Homo Sapiens
tgaaaatgtttagacgggctcac

SEQ ID NO: 27037 - DNA, 24 bp, Homo Sapiens
tgaaaatgtttagacgggctcaca

SEQ ID NO: 27038 - DNA, 25 bp, Homo Sapiens
tgaaaatgtttagacgggctcacat

SEQ ID NO: 27039 - DNA, 26 bp, Homo Sapiens
tgaaaatgtttagacgggctcacatc

SEQ ID NO: 27040 - DNA, 28 bp, Homo Sapiens
tgaaaatgtttagacgggctcacatcac

SEQ ID NO: 27041 - DNA, 29 bp, Homo Sapiens
tgaaaatgtttagacgggctcacatcacc

SEQ ID NO: 27042 - DNA, 30 bp, Homo Sapiens
tgaaaatgtttagacgggctcacatcaccc

SEQ ID NO: 27043 - DNA, 31 bp, Homo Sapiens
tgaaaatgtttagacgggctcacatcacccc

SEQ ID NO: 27044 - DNA, 32 bp, Homo Sapiens
tgaaaatgtttagacgggctcacatcacccca

SEQ ID NO: 27045 - DNA, 34 bp, Homo Sapiens
tgaaaatgtttagacgggctcacatcaccccata

SEQ ID NO: 27046 - DNA, 35 bp, Homo Sapiens
tgaaaatgtttagacgggctcacatcaccccataa

SEQ ID NO: 27047 - DNA, 36 bp, Homo Sapiens
tgaaaatgtttagacgggctcacatcaccccataaa

SEQ ID NO: 27048 - DNA, 40 bp, Homo Sapiens
tgaaaatgtttagacgggctcacatcaccccataaacacc

SEQ ID NO: 27049 - DNA, 21 bp, Homo Sapiens
tgaaaccagctttggggggtt

SEQ ID NO: 27050 - DNA, 23 bp, Homo Sapiens
tgaaaccagctttggggggttcg

SEQ ID NO: 27051 - DNA, 36 bp, Homo Sapiens
tgaaaggttggtggttcgagcccacccagggacgcc

SEQ ID NO: 27052 - DNA, 21 bp, Homo Sapiens
tgaaatacaacgatggttttt

SEQ ID NO: 27053 - DNA, 22 bp, Homo Sapiens
tgaaatacaacgatggtttttc

SEQ ID NO: 27054 - DNA, 24 bp, Homo Sapiens
tgaaatacaacgatggtttttcat

SEQ ID NO: 27055 - DNA, 31 bp, Homo Sapiens
tgaaatacaacgatggtttttcatatcattg

SEQ ID NO: 27056 - DNA, 34 bp, Homo Sapiens
tgaaatacaacgatggtttttcatatcattggtc

SEQ ID NO: 27057 - DNA, 36 bp, Homo Sapiens
tgaaatacaacgatggtttttcatatcattggtcgt

SEQ ID NO: 27058 - DNA, 43 bp, Homo Sapiens
tgaaatacaacgatggtttttcatatcattggtcgtggttgta

SEQ ID NO: 27059 - DNA, 46 bp, Homo Sapiens
tgaaatacaacgatggtttttcatatcattggtcgtggttgtagtc

SEQ ID NO: 27060 - DNA, 47 bp, Homo Sapiens
tgaaatacaacgatggtttttcatatcattggtcgtggttgtagtcc

SEQ ID NO: 27061 - DNA, 16 bp, Homo Sapiens
tgaagcattggactgt

SEQ ID NO: 27062 - DNA, 17 bp, Homo Sapiens
tgaagcattggactgta

SEQ ID NO: 27063 - DNA, 18 bp, Homo Sapiens
tgaagcattggactgtaa

SEQ ID NO: 27064 - DNA, 19 bp, Homo Sapiens
tgaagcattggactgtaaa

SEQ ID NO: 27065 - DNA, 20 bp, Homo Sapiens
tgaagcattggactgtaaat

SEQ ID NO: 27066 - DNA, 21 bp, Homo Sapiens
tgaagcattggactgtaaatc

SEQ ID NO: 27067 - DNA, 22 bp, Homo Sapiens
tgaagcattggactgtaaatct

SEQ ID NO: 27068 - DNA, 23 bp, Homo Sapiens
tgaagcattggactgtaaatcta

SEQ ID NO: 27069 - DNA, 24 bp, Homo Sapiens
tgaagcattggactgtaaatctaa

SEQ ID NO: 27070 - DNA, 25 bp, Homo Sapiens
tgaagcattggactgtaaatctaaa

SEQ ID NO: 27071 - DNA, 26 bp, Homo Sapiens
tgaagcattggactgtaaatctaaag

SEQ ID NO: 27072 - DNA, 29 bp, Homo Sapiens
tgaagcattggactgtaaatctaaagaca

SEQ ID NO: 27073 - DNA, 32 bp, Homo Sapiens
tgaagcattggactgtaaatctaaagacaggg

SEQ ID NO: 27074 - DNA, 35 bp, Homo Sapiens
tgaagcattggactgtaaatctaaagacaggggtt

SEQ ID NO: 27075 - DNA, 45 bp, Homo Sapiens
tgaagcattggactgtaaatctaaagacaggggttaggcctcttt

SEQ ID NO: 27076 - DNA, 27 bp, Homo Sapiens
tgaagccagttgattagggtgcttagc

SEQ ID NO: 27077 - DNA, 30 bp, Homo Sapiens
tgaagccagttgattagggtgcttagctgt

SEQ ID NO: 27078 - DNA, 31 bp, Homo Sapiens
tgaagccagttgattagggtgcttagctgtt

SEQ ID NO: 27079 - DNA, 34 bp, Homo Sapiens
tgaagccagttgattagggtgcttagctgttaac

SEQ ID NO: 27080 - DNA, 16 bp, Homo Sapiens
tgaaggtcctgagttc

SEQ ID NO: 27081 - DNA, 17 bp, Homo Sapiens
tgaaggtcctgagttcg

SEQ ID NO: 27082 - DNA, 21 bp, Homo Sapiens
tgaaggtcctgagttcgaacc

SEQ ID NO: 27083 - DNA, 22 bp, Homo Sapiens
tgaaggtcctgagttcgaacct

SEQ ID NO: 27084 - DNA, 23 bp, Homo Sapiens
tgaaggtcctgagttcgaacctc

SEQ ID NO: 27085 - DNA, 29 bp, Homo Sapiens
tgaaggtcctgagttcgaacctcagaggg

SEQ ID NO: 27086 - DNA, 30 bp, Homo Sapiens
tgaaggtcctgagttcgaacctcagagggg

SEQ ID NO: 27087 - DNA, 32 bp, Homo Sapiens
tgaaggtcctgagttcgaacctcagagggggc

SEQ ID NO: 27088 - DNA, 33 bp, Homo Sapiens
tgaaggtcctgagttcgaacctcagagggggca

SEQ ID NO: 27089 - DNA, 34 bp, Homo Sapiens
tgaaggtcctgagttcgaacctcagagggggcac

SEQ ID NO: 27090 - DNA, 35 bp, Homo Sapiens
tgaaggtcctgagttcgaacctcagagggggcacc

SEQ ID NO: 27091 - DNA, 36 bp, Homo Sapiens
tgaaggtcctgagttcgaacctcagagggggcacca

SEQ ID NO: 27092 - DNA, 33 bp, Homo Sapiens
tgaaggtcctgagttcgagcctcagagagggca

SEQ ID NO: 27093 - DNA, 34 bp, Homo Sapiens
tgaaggtcctgagttcgagcctcagagagggcac

SEQ ID NO: 27094 - DNA, 35 bp, Homo Sapiens
tgaaggtcctgagttcgagcctcagagagggcacc

SEQ ID NO: 27095 - DNA, 36 bp, Homo Sapiens
tgaaggtcctgagttcgagcctcagagagggcacca

SEQ ID NO: 27096 - DNA, 16 bp, Homo Sapiens
tgaaggtcgtgagttc

SEQ ID NO: 27097 - DNA, 17 bp, Homo Sapiens
tgaaggtcgtgagttcg

SEQ ID NO: 27098 - DNA, 27 bp, Homo Sapiens
tgaaggtcgtgagttcgagcctcacac

SEQ ID NO: 27099 - DNA, 32 bp, Homo Sapiens
tgaaggtcgtgagttcgagcctcacacggggc

SEQ ID NO: 27100 - DNA, 33 bp, Homo Sapiens
tgaaggtcgtgagttcgagcctcacacggggca

SEQ ID NO: 27101 - DNA, 34 bp, Homo Sapiens
tgaaggtcgtgagttcgagcctcacacggggcac

SEQ ID NO: 27102 - DNA, 35 bp, Homo Sapiens
tgaaggtcgtgagttcgagcctcacacggggcacc

SEQ ID NO: 27103 - DNA, 36 bp, Homo Sapiens
tgaaggtcgtgagttcgagcctcacacggggcacca

SEQ ID NO: 27104 - DNA, 22 bp, Homo Sapiens
tgaaggtcgtgagttcgatcct

SEQ ID NO: 27105 - DNA, 23 bp, Homo Sapiens
tgaaggtcgtgagttcgatcctc

SEQ ID NO: 27106 - DNA, 30 bp, Homo Sapiens
tgaaggtcgtgagttcgatcctcacacggg

SEQ ID NO: 27107 - DNA, 32 bp, Homo Sapiens
tgaaggtcgtgagttcgatcctcacacggggc

SEQ ID NO: 27108 - DNA, 33 bp, Homo Sapiens
tgaaggtcgtgagttcgatcctcacacggggca

SEQ ID NO: 27109 - DNA, 34 bp, Homo Sapiens
tgaaggtcgtgagttcgatcctcacacggggcac

SEQ ID NO: 27110 - DNA, 35 bp, Homo Sapiens
tgaaggtcgtgagttcgatcctcacacggggcacc

SEQ ID NO: 27111 - DNA, 36 bp, Homo Sapiens
tgaaggtcgtgagttcgatcctcacacggggcacca

SEQ ID NO: 27112 - DNA, 18 bp, Homo Sapiens
tgaatccagcaatccgag

SEQ ID NO: 27113 - DNA, 21 bp, Homo Sapiens
tgaatccagcaatccgagttc

SEQ ID NO: 27114 - DNA, 16 bp, Homo Sapiens
tgaatccagcgatccg

SEQ ID NO: 27115 - DNA, 17 bp, Homo Sapiens
tgaatccagcgatccga

SEQ ID NO: 27116 - DNA, 18 bp, Homo Sapiens
tgaatccagcgatccgag

SEQ ID NO: 27117 - DNA, 19 bp, Homo Sapiens
tgaatccagcgatccgagt

SEQ ID NO: 27118 - DNA, 20 bp, Homo Sapiens
tgaatccagcgatccgagtt

SEQ ID NO: 27119 - DNA, 21 bp, Homo Sapiens
tgaatccagcgatccgagttc

SEQ ID NO: 27120 - DNA, 22 bp, Homo Sapiens
tgaatccagcgatccgagttca

SEQ ID NO: 27121 - DNA, 23 bp, Homo Sapiens
tgaatccagcgatccgagttcaa

SEQ ID NO: 27122 - DNA, 24 bp, Homo Sapiens
tgaatccagcgatccgagttcaaa

SEQ ID NO: 27123 - DNA, 25 bp, Homo Sapiens
tgaatccagcgatccgagttcaaat

SEQ ID NO: 27124 - DNA, 26 bp, Homo Sapiens
tgaatccagcgatccgagttcaaatc

SEQ ID NO: 27125 - DNA, 27 bp, Homo Sapiens
tgaatccagcgatccgagttcaaatct

SEQ ID NO: 27126 - DNA, 31 bp, Homo Sapiens
tgaatccagcgatccgagttcaaatctcggt

SEQ ID NO: 27127 - DNA, 32 bp, Homo Sapiens
tgaatccagcgatccgagttcaaatctcggtg

SEQ ID NO: 27128 - DNA, 33 bp, Homo Sapiens
tgaatccagcgatccgagttcaaatctcggtgg

SEQ ID NO: 27129 - DNA, 38 bp, Homo Sapiens
tgaatccagcgatccgagttcaaatctcggtggaacct

SEQ ID NO: 27130 - DNA, 39 bp, Homo Sapiens
tgaatccagcgatccgagttcaaatctcggtggaacctc

SEQ ID NO: 27131 - DNA, 40 bp, Homo Sapiens
tgaatccagcgatccgagttcaaatctcggtggaacctcc

SEQ ID NO: 27132 - DNA, 41 bp, Homo Sapiens
tgaatccagcgatccgagttcaaatctcggtggaacctcca

SEQ ID NO: 27133 - DNA, 24 bp, Homo Sapiens
tgaatccagcgatccgagttcaag

SEQ ID NO: 27134 - DNA, 25 bp, Homo Sapiens
tgaatccagcgatccgagttcaagt

SEQ ID NO: 27135 - DNA, 32 bp, Homo Sapiens
tgaatccagcgatccgagttcaagtctcggtg

SEQ ID NO: 27136 - DNA, 38 bp, Homo Sapiens
tgaatccagcgatccgagttcaagtctcggtggaacct

SEQ ID NO: 27137 - DNA, 22 bp, Homo Sapiens
tgaatccagcgatccgagttcg

SEQ ID NO: 27138 - DNA, 23 bp, Homo Sapiens
tgaatccagcgatccgagttcga

SEQ ID NO: 27139 - DNA, 24 bp, Homo Sapiens
tgaatccagcgatccgagttcgag

SEQ ID NO: 27140 - DNA, 25 bp, Homo Sapiens
tgaatccagcgatccgagttcgagt

SEQ ID NO: 27141 - DNA, 26 bp, Homo Sapiens
tgaatccagcgatccgagttcgagtc

SEQ ID NO: 27142 - DNA, 27 bp, Homo Sapiens
tgaatccagcgatccgagttcgagtct

SEQ ID NO: 27143 - DNA, 32 bp, Homo Sapiens
tgaatccagcgatccgagttcgagtctcggtg

SEQ ID NO: 27144 - DNA, 33 bp, Homo Sapiens
tgaatccagcgatccgagttcgagtctcggtgg

SEQ ID NO: 27145 - DNA, 38 bp, Homo Sapiens
tgaatccagcgatccgagttcgagtctcggtggaacct

SEQ ID NO: 27146 - DNA, 39 bp, Homo Sapiens
tgaatccagcgatccgagttcgagtctcggtggaacctc

SEQ ID NO: 27147 - DNA, 40 bp, Homo Sapiens
tgaatccagcgatccgagttcgagtctcggtggaacctcc

SEQ ID NO: 27148 - DNA, 16 bp, Homo Sapiens
tgaatctgacaacaga

SEQ ID NO: 27149 - DNA, 17 bp, Homo Sapiens
tgaatctgacaacagag

SEQ ID NO: 27150 - DNA, 18 bp, Homo Sapiens
tgaatctgacaacagagg

SEQ ID NO: 27151 - DNA, 19 bp, Homo Sapiens
tgaatctgacaacagaggc

SEQ ID NO: 27152 - DNA, 20 bp, Homo Sapiens
tgaatctgacaacagaggct

SEQ ID NO: 27153 - DNA, 21 bp, Homo Sapiens
tgaatctgacaacagaggctt

SEQ ID NO: 27154 - DNA, 24 bp, Homo Sapiens
tgaatctgacaacagaggcttacg

SEQ ID NO: 27155 - DNA, 25 bp, Homo Sapiens
tgaatctgacaacagaggcttacga

SEQ ID NO: 27156 - DNA, 26 bp, Homo Sapiens
tgaatctgacaacagaggcttacgac

SEQ ID NO: 27157 - DNA, 27 bp, Homo Sapiens
tgaatctgacaacagaggcttacgacc

SEQ ID NO: 27158 - DNA, 28 bp, Homo Sapiens
tgaatctgacaacagaggcttacgaccc

SEQ ID NO: 27159 - DNA, 29 bp, Homo Sapiens
tgaatctgacaacagaggcttacgacccc

SEQ ID NO: 27160 - DNA, 30 bp, Homo Sapiens
tgaatctgacaacagaggcttacgacccct

SEQ ID NO: 27161 - DNA, 31 bp, Homo Sapiens
tgaatctgacaacagaggcttacgacccctt

SEQ ID NO: 27162 - DNA, 32 bp, Homo Sapiens
tgaatctgacaacagaggcttacgacccctta

SEQ ID NO: 27163 - DNA, 33 bp, Homo Sapiens
tgaatctgacaacagaggcttacgaccccttat

SEQ ID NO: 27164 - DNA, 34 bp, Homo Sapiens
tgaatctgacaacagaggcttacgaccccttatt

SEQ ID NO: 27165 - DNA, 35 bp, Homo Sapiens
tgaatctgacaacagaggcttacgaccccttattt

SEQ ID NO: 27166 - DNA, 36 bp, Homo Sapiens
tgaatctgacaacagaggcttacgaccccttattta

SEQ ID NO: 27167 - DNA, 37 bp, Homo Sapiens
tgaatctgacaacagaggcttacgaccccttatttac

SEQ ID NO: 27168 - DNA, 38 bp, Homo Sapiens
tgaatctgacaacagaggcttacgaccccttatttacc

SEQ ID NO: 27169 - DNA, 39 bp, Homo Sapiens
tgaatctgacaacagaggcttacgaccccttatttaccc

SEQ ID NO: 27170 - DNA, 40 bp, Homo Sapiens
tgaatctgacaacagaggcttacgaccccttatttacccc

SEQ ID NO: 27171 - DNA, 41 bp, Homo Sapiens
tgaatctgacaacagaggcttacgaccccttatttacccca

SEQ ID NO: 27172 - DNA, 25 bp, Homo Sapiens
tgaattgcaaattcgaagaagcagc

SEQ ID NO: 27173 - DNA, 26 bp, Homo Sapiens
tgaattgcaaattcgaagaagcagct

SEQ ID NO: 27174 - DNA, 29 bp, Homo Sapiens
tgaattgcaaattcgaagaagcagcttca

SEQ ID NO: 27175 - DNA, 42 bp, Homo Sapiens
tgaattgcaaattcgaagaagcagcttcaaacctgccggggc

SEQ ID NO: 27176 - DNA, 43 bp, Homo Sapiens
tgaattgcaaattcgaagaagcagcttcaaacctgccggggct

SEQ ID NO: 27177 - DNA, 44 bp, Homo Sapiens
tgaattgcaaattcgaagaagcagcttcaaacctgccggggctt

SEQ ID NO: 27178 - DNA, 45 bp, Homo Sapiens
tgaattgcaaattcgaagaagcagcttcaaacctgccggggcttc

SEQ ID NO: 27179 - DNA, 46 bp, Homo Sapiens
tgaattgcaaattcgaagaagcagcttcaaacctgccggggcttcc

SEQ ID NO: 27180 - DNA, 16 bp, Homo Sapiens
tgacaacagaggctta

SEQ ID NO: 27181 - DNA, 17 bp, Homo Sapiens
tgacaacagaggcttac

SEQ ID NO: 27182 - DNA, 18 bp, Homo Sapiens
tgacaacagaggcttacg

SEQ ID NO: 27183 - DNA, 19 bp, Homo Sapiens
tgacaacagaggcttacga

SEQ ID NO: 27184 - DNA, 20 bp, Homo Sapiens
tgacaacagaggcttacgac

SEQ ID NO: 27185 - DNA, 21 bp, Homo Sapiens
tgacaacagaggcttacgacc

SEQ ID NO: 27186 - DNA, 22 bp, Homo Sapiens
tgacaacagaggcttacgaccc

SEQ ID NO: 27187 - DNA, 23 bp, Homo Sapiens
tgacaacagaggcttacgacccc

SEQ ID NO: 27188 - DNA, 24 bp, Homo Sapiens
tgacaacagaggcttacgacccct

SEQ ID NO: 27189 - DNA, 25 bp, Homo Sapiens
tgacaacagaggcttacgacccctt

SEQ ID NO: 27190 - DNA, 26 bp, Homo Sapiens
tgacaacagaggcttacgacccctta

SEQ ID NO: 27191 - DNA, 27 bp, Homo Sapiens
tgacaacagaggcttacgaccccttat

SEQ ID NO: 27192 - DNA, 28 bp, Homo Sapiens
tgacaacagaggcttacgaccccttatt

SEQ ID NO: 27193 - DNA, 29 bp, Homo Sapiens
tgacaacagaggcttacgaccccttattt

SEQ ID NO: 27194 - DNA, 31 bp, Homo Sapiens
tgacaacagaggcttacgaccccttatttac

SEQ ID NO: 27195 - DNA, 32 bp, Homo Sapiens
tgacaacagaggcttacgaccccttatttacc

SEQ ID NO: 27196 - DNA, 33 bp, Homo Sapiens
tgacaacagaggcttacgaccccttatttaccc

SEQ ID NO: 27197 - DNA, 34 bp, Homo Sapiens
tgacaacagaggcttacgaccccttatttacccc

SEQ ID NO: 27198 - DNA, 35 bp, Homo Sapiens
tgacaacagaggcttacgaccccttatttacccca

SEQ ID NO: 27199 - DNA, 18 bp, Homo Sapiens
tgacaacattcaaaaaag

SEQ ID NO: 27200 - DNA, 20 bp, Homo Sapiens
tgacaacattcaaaaaagag

SEQ ID NO: 27201 - DNA, 21 bp, Homo Sapiens
tgacaacattcaaaaaagagt

SEQ ID NO: 27202 - DNA, 22 bp, Homo Sapiens
tgacaacattcaaaaaagagta

SEQ ID NO: 27203 - DNA, 23 bp, Homo Sapiens
tgacaacattcaaaaaagagtac

SEQ ID NO: 27204 - DNA, 24 bp, Homo Sapiens
tgacaacattcaaaaaagagtacc

SEQ ID NO: 27205 - DNA, 25 bp, Homo Sapiens
tgacaacattcaaaaaagagtacca

SEQ ID NO: 27206 - DNA, 22 bp, Homo Sapiens
tgacccgggttcgattcccggc

SEQ ID NO: 27207 - DNA, 31 bp, Homo Sapiens
tgacccgggttcgattcccggccaacgcacc

SEQ ID NO: 27208 - DNA, 32 bp, Homo Sapiens
tgacccgggttcgattcccggccaacgcacca

SEQ ID NO: 27209 - DNA, 20 bp, Homo Sapiens
tgactccagatcagaaggct

SEQ ID NO: 27210 - DNA, 23 bp, Homo Sapiens
tgactccagatcagaaggttgcg

SEQ ID NO: 27211 - DNA, 21 bp, Homo Sapiens
tgactgcagatcaagaggtcc

SEQ ID NO: 27212 - DNA, 22 bp, Homo Sapiens
tgactgcagatcaagaggtccc

SEQ ID NO: 27213 - DNA, 23 bp, Homo Sapiens
tgactgcagatcaagaggtcccc

SEQ ID NO: 27214 - DNA, 24 bp, Homo Sapiens
tgactgcagatcaagaggtccccg

SEQ ID NO: 27215 - DNA, 25 bp, Homo Sapiens
tgactgcagatcaagaggtccccgg

SEQ ID NO: 27216 - DNA, 23 bp, Homo Sapiens
tgactgcagatcaagaggtccct

SEQ ID NO: 27217 - DNA, 24 bp, Homo Sapiens
tgactgcagatcaagaggtccctg

SEQ ID NO: 27218 - DNA, 17 bp, Homo Sapiens
tgacttcggatcagaag

SEQ ID NO: 27219 - DNA, 18 bp, Homo Sapiens
tgacttcggatcagaaga

SEQ ID NO: 27220 - DNA, 22 bp, Homo Sapiens
tgacttcggatcagaagattga

SEQ ID NO: 27221 - DNA, 26 bp, Homo Sapiens
tgacttcggatcagaagattgagggt

SEQ ID NO: 27222 - DNA, 28 bp, Homo Sapiens
tgacttcggatcagaagattgagggttc

SEQ ID NO: 27223 - DNA, 29 bp, Homo Sapiens
tgacttcggatcagaagattgagggttcg

SEQ ID NO: 27224 - DNA, 22 bp, Homo Sapiens
tgacttcggatcagaagattgc

SEQ ID NO: 27225 - DNA, 23 bp, Homo Sapiens
tgacttcggatcagaagattgca

SEQ ID NO: 27226 - DNA, 16 bp, Homo Sapiens
tgagactcttaatctc

SEQ ID NO: 27227 - DNA, 35 bp, Homo Sapiens
tgagaggtcccgggttcaaatcccggacgagcccc

SEQ ID NO: 27228 - DNA, 16 bp, Homo Sapiens
tgagcactctggactc

SEQ ID NO: 27229 - DNA, 18 bp, Homo Sapiens
tgagcactctggactctg

SEQ ID NO: 27230 - DNA, 22 bp, Homo Sapiens
tgagcactctggactctgaatc

SEQ ID NO: 27231 - DNA, 23 bp, Homo Sapiens
tgagcactctggactctgaatcc

SEQ ID NO: 27232 - DNA, 24 bp, Homo Sapiens
tgagcactctggactctgaatcca

SEQ ID NO: 27233 - DNA, 25 bp, Homo Sapiens
tgagcactctggactctgaatccag

SEQ ID NO: 27234 - DNA, 26 bp, Homo Sapiens
tgagcactctggactctgaatccagc

SEQ ID NO: 27235 - DNA, 27 bp, Homo Sapiens
tgagcactctggactctgaatccagcg

SEQ ID NO: 27236 - DNA, 33 bp, Homo Sapiens
tgagcactctggactctgaatccagcgatccga

SEQ ID NO: 27237 - DNA, 34 bp, Homo Sapiens
tgagcactctggactctgaatccagcgatccgag

SEQ ID NO: 27238 - DNA, 35 bp, Homo Sapiens
tgagcactctggactctgaatccagcgatccgagt

SEQ ID NO: 27239 - DNA, 38 bp, Homo Sapiens
tgagcactctggactctgaatccagcgatccgagttcg

SEQ ID NO: 27240 - DNA, 40 bp, Homo Sapiens
tgagcactctggactctgaatccagcgatccgagttcgag

SEQ ID NO: 27241 - DNA, 24 bp, Homo Sapiens
tgagcatagctgccttccaagcag

SEQ ID NO: 27242 - DNA, 33 bp, Homo Sapiens
tgagcatagctgccttccaagcagttgacccgg

SEQ ID NO: 27243 - DNA, 34 bp, Homo Sapiens
tgagcatagctgccttccaagcagttgacccggg

SEQ ID NO: 27244 - DNA, 35 bp, Homo Sapiens
tgagcatagctgccttccaagcagttgacccgggt

SEQ ID NO: 27245 - DNA, 36 bp, Homo Sapiens
tgagcatagctgccttccaagcagttgacccgggtt

SEQ ID NO: 27246 - DNA, 37 bp, Homo Sapiens
tgagcatagctgccttccaagcagttgacccgggttc

SEQ ID NO: 27247 - DNA, 16 bp, Homo Sapiens
tgaggccccgggttca

SEQ ID NO: 27248 - DNA, 22 bp, Homo Sapiens
tgaggccccgggttcaatcccc

SEQ ID NO: 27249 - DNA, 25 bp, Homo Sapiens
tgaggccccgggttcaatccccggc

SEQ ID NO: 27250 - DNA, 26 bp, Homo Sapiens
tgaggccccgggttcaatccccggca

SEQ ID NO: 27251 - DNA, 29 bp, Homo Sapiens
tgaggccccgggttcaatccccggcatct

SEQ ID NO: 27252 - DNA, 30 bp, Homo Sapiens
tgaggccccgggttcaatccccggcatctc

SEQ ID NO: 27253 - DNA, 24 bp, Homo Sapiens
tgaggccccgggttcgatccccgg

SEQ ID NO: 27254 - DNA, 26 bp, Homo Sapiens
tgaggccccgggttcgatccccggca

SEQ ID NO: 27255 - DNA, 28 bp, Homo Sapiens
tgaggccccgggttcgatccccggcatc

SEQ ID NO: 27256 - DNA, 34 bp, Homo Sapiens
tgaggccccgggttcgatccccggcatctccacc

SEQ ID NO: 27257 - DNA, 35 bp, Homo Sapiens
tgaggccccgggttcgatccccggcatctccacca

SEQ ID NO: 27258 - DNA, 16 bp, Homo Sapiens
tgagggtccagggttc

SEQ ID NO: 27259 - DNA, 20 bp, Homo Sapiens
tgagggtccagggttcaagt

SEQ ID NO: 27260 - DNA, 22 bp, Homo Sapiens
tgagggtccagggttcaagtcc

SEQ ID NO: 27261 - DNA, 24 bp, Homo Sapiens
tgagggtccagggttcaagtccct

SEQ ID NO: 27262 - DNA, 35 bp, Homo Sapiens
tgagggtccagggttcaagtccctgtccaggcgcc

SEQ ID NO: 27263 - DNA, 27 bp, Homo Sapiens
tgagggtccagggttcaagtccctgtt

SEQ ID NO: 27264 - DNA, 35 bp, Homo Sapiens
tgagggtccagggttcaagtccctgttcaggcacc

SEQ ID NO: 27265 - DNA, 35 bp, Homo Sapiens
tgagggtccagggttcaagtccctgttcaggcgcc

SEQ ID NO: 27266 - DNA, 30 bp, Homo Sapiens
tgagggtccagggttcaagtccctgttcgg

SEQ ID NO: 27267 - DNA, 31 bp, Homo Sapiens
tgagggtccagggttcaagtccctgttcggg

SEQ ID NO: 27268 - DNA, 32 bp, Homo Sapiens
tgagggtccagggttcaagtccctgttcgggc

SEQ ID NO: 27269 - DNA, 33 bp, Homo Sapiens
tgagggtccagggttcaagtccctgttcgggcg

SEQ ID NO: 27270 - DNA, 34 bp, Homo Sapiens
tgagggtccagggttcaagtccctgttcgggcgc

SEQ ID NO: 27271 - DNA, 35 bp, Homo Sapiens
tgagggtccagggttcaagtccctgttcgggcgcc

SEQ ID NO: 27272 - DNA, 36 bp, Homo Sapiens
tgagggtccagggttcaagtccctgttcgggcgcca

SEQ ID NO: 27273 - DNA, 24 bp, Homo Sapiens
tgagggtccagggttcatgtccct

SEQ ID NO: 27274 - DNA, 26 bp, Homo Sapiens
tgagggttcgaatcccttcgtggttg

SEQ ID NO: 27275 - DNA, 27 bp, Homo Sapiens
tgagggttcgaatcccttcgtggttgc

SEQ ID NO: 27276 - DNA, 28 bp, Homo Sapiens
tgagggttcgaatcccttcgtggttgcc

SEQ ID NO: 27277 - DNA, 20 bp, Homo Sapiens
tgagggttcgagtcccttcg

SEQ ID NO: 27278 - DNA, 25 bp, Homo Sapiens
tgagggttcgagtcccttcgtggtc

SEQ ID NO: 27279 - DNA, 26 bp, Homo Sapiens
tgagggttcgagtcccttcgtggtcg

SEQ ID NO: 27280 - DNA, 27 bp, Homo Sapiens
tgagggttcgagtcccttcgtggtcgc

SEQ ID NO: 27281 - DNA, 28 bp, Homo Sapiens
tgagggttcgagtcccttcgtggtcgcc

SEQ ID NO: 27282 - DNA, 29 bp, Homo Sapiens
tgagggttcgagtcccttcgtggtcgcca

SEQ ID NO: 27283 - DNA, 16 bp, Homo Sapiens
tgaggtcccgggttcg

SEQ ID NO: 27284 - DNA, 30 bp, Homo Sapiens
tgaggtcccgggttcgatccccagcatctc

SEQ ID NO: 27285 - DNA, 33 bp, Homo Sapiens
tgaggtcccgggttcgatccccagcatctccac

SEQ ID NO: 27286 - DNA, 34 bp, Homo Sapiens
tgaggtcccgggttcgatccccagcatctccacc

SEQ ID NO: 27287 - DNA, 24 bp, Homo Sapiens
tgaggtcccgggttcgatccccgg

SEQ ID NO: 27288 - DNA, 16 bp, Homo Sapiens
tgagtatccccgcctg

SEQ ID NO: 27289 - DNA, 17 bp, Homo Sapiens
tgagtatccccgcctgt

SEQ ID NO: 27290 - DNA, 18 bp, Homo Sapiens
tgagtatccccgcctgtc

SEQ ID NO: 27291 - DNA, 20 bp, Homo Sapiens
tgagtatccccgcctgtcac

SEQ ID NO: 27292 - DNA, 34 bp, Homo Sapiens
tgagtatccccgcctgtcacgcgggagaccgggg

SEQ ID NO: 27293 - DNA, 16 bp, Homo Sapiens
tgagtgaagcattgga

SEQ ID NO: 27294 - DNA, 17 bp, Homo Sapiens
tgagtgaagcattggac

SEQ ID NO: 27295 - DNA, 18 bp, Homo Sapiens
tgagtgaagcattggact

SEQ ID NO: 27296 - DNA, 19 bp, Homo Sapiens
tgagtgaagcattggactg

SEQ ID NO: 27297 - DNA, 20 bp, Homo Sapiens
tgagtgaagcattggactgt

SEQ ID NO: 27298 - DNA, 21 bp, Homo Sapiens
tgagtgaagcattggactgta

SEQ ID NO: 27299 - DNA, 22 bp, Homo Sapiens
tgagtgaagcattggactgtaa

SEQ ID NO: 27300 - DNA, 23 bp, Homo Sapiens
tgagtgaagcattggactgtaaa

SEQ ID NO: 27301 - DNA, 24 bp, Homo Sapiens
tgagtgaagcattggactgtaaat

SEQ ID NO: 27302 - DNA, 25 bp, Homo Sapiens
tgagtgaagcattggactgtaaatc

SEQ ID NO: 27303 - DNA, 26 bp, Homo Sapiens
tgagtgaagcattggactgtaaatct

SEQ ID NO: 27304 - DNA, 27 bp, Homo Sapiens
tgagtgaagcattggactgtaaatcta

SEQ ID NO: 27305 - DNA, 28 bp, Homo Sapiens
tgagtgaagcattggactgtaaatctaa

SEQ ID NO: 27306 - DNA, 29 bp, Homo Sapiens
tgagtgaagcattggactgtaaatctaaa

SEQ ID NO: 27307 - DNA, 30 bp, Homo Sapiens
tgagtgaagcattggactgtaaatctaaag

SEQ ID NO: 27308 - DNA, 31 bp, Homo Sapiens
tgagtgaagcattggactgtaaatctaaaga

SEQ ID NO: 27309 - DNA, 33 bp, Homo Sapiens
tgagtgaagcattggactgtaaatctaaagaca

SEQ ID NO: 27310 - DNA, 45 bp, Homo Sapiens
tgagtgaagcattggactgtaaatctaaagacaggggttaggcct

SEQ ID NO: 27311 - DNA, 46 bp, Homo Sapiens
tgagtgaagcattggactgtaaatctaaagacaggggttaggcctc

SEQ ID NO: 27312 - DNA, 21 bp, Homo Sapiens
tgagttcgaacctcagagggg

SEQ ID NO: 27313 - DNA, 23 bp, Homo Sapiens
tgagttcgaacctcagagggggc

SEQ ID NO: 27314 - DNA, 24 bp, Homo Sapiens
tgagttcgaacctcagagggggca

SEQ ID NO: 27315 - DNA, 25 bp, Homo Sapiens
tgagttcgaacctcagagggggcac

SEQ ID NO: 27316 - DNA, 26 bp, Homo Sapiens
tgagttcgaacctcagagggggcacc

SEQ ID NO: 27317 - DNA, 27 bp, Homo Sapiens
tgagttcgaacctcagagggggcacca

SEQ ID NO: 27318 - DNA, 23 bp, Homo Sapiens
tgagttcgatcctcacacggggc

SEQ ID NO: 27319 - DNA, 16 bp, Homo Sapiens
tgataaaagagttact

SEQ ID NO: 27320 - DNA, 20 bp, Homo Sapiens
tgataaaagagttactttga

SEQ ID NO: 27321 - DNA, 21 bp, Homo Sapiens
tgataaaagagttactttgat

SEQ ID NO: 27322 - DNA, 22 bp, Homo Sapiens
tgataaaagagttactttgata

SEQ ID NO: 27323 - DNA, 26 bp, Homo Sapiens
tgataaaagagttactttgatagagt

SEQ ID NO: 27324 - DNA, 39 bp, Homo Sapiens
tgataaaagagttactttgatagagtaaataataggagc

SEQ ID NO: 27325 - DNA, 47 bp, Homo Sapiens
tgataaaagagttactttgatagagtaaataataggagcttaaaccc

SEQ ID NO: 27326 - DNA, 16 bp, Homo Sapiens
tgataatcatatttac

SEQ ID NO: 27327 - DNA, 17 bp, Homo Sapiens
tgataatcatatttacc

SEQ ID NO: 27328 - DNA, 18 bp, Homo Sapiens
tgataatcatatttacca

SEQ ID NO: 27329 - DNA, 19 bp, Homo Sapiens
tgataatcatatttaccaa

SEQ ID NO: 27330 - DNA, 20 bp, Homo Sapiens
tgataatcatatttaccaac

SEQ ID NO: 27331 - DNA, 21 bp, Homo Sapiens
tgataatcatatttaccaacc

SEQ ID NO: 27332 - DNA, 22 bp, Homo Sapiens
tgataatcatatttaccaacca

SEQ ID NO: 27333 - DNA, 16 bp, Homo Sapiens
tgatagagtaaataat

SEQ ID NO: 27334 - DNA, 20 bp, Homo Sapiens
tgatagagtaaataatagga

SEQ ID NO: 27335 - DNA, 21 bp, Homo Sapiens
tgatagagtaaataataggag

SEQ ID NO: 27336 - DNA, 22 bp, Homo Sapiens
tgatagagtaaataataggagc

SEQ ID NO: 27337 - DNA, 23 bp, Homo Sapiens
tgatagagtaaataataggagct

SEQ ID NO: 27338 - DNA, 24 bp, Homo Sapiens
tgatagagtaaataataggagctt

SEQ ID NO: 27339 - DNA, 25 bp, Homo Sapiens
tgatagagtaaataataggagctta

SEQ ID NO: 27340 - DNA, 26 bp, Homo Sapiens
tgatagagtaaataataggagcttaa

SEQ ID NO: 27341 - DNA, 29 bp, Homo Sapiens
tgatagagtaaataataggagcttaaacc

SEQ ID NO: 27342 - DNA, 30 bp, Homo Sapiens
tgatagagtaaataataggagcttaaaccc

SEQ ID NO: 27343 - DNA, 31 bp, Homo Sapiens
tgatagagtaaataataggagcttaaacccc

SEQ ID NO: 27344 - DNA, 32 bp, Homo Sapiens
tgatagagtaaataataggagcttaaaccccc

SEQ ID NO: 27345 - DNA, 33 bp, Homo Sapiens
tgatagagtaaataataggagcttaaaccccct

SEQ ID NO: 27346 - DNA, 34 bp, Homo Sapiens
tgatagagtaaataataggagcttaaaccccctt

SEQ ID NO: 27347 - DNA, 35 bp, Homo Sapiens
tgatagagtaaataataggagcttaaaccccctta

SEQ ID NO: 27348 - DNA, 36 bp, Homo Sapiens
tgatagagtaaataataggagcttaaacccccttat

SEQ ID NO: 27349 - DNA, 37 bp, Homo Sapiens
tgatagagtaaataataggagcttaaacccccttatt

SEQ ID NO: 27350 - DNA, 38 bp, Homo Sapiens
tgatagagtaaataataggagcttaaacccccttattt

SEQ ID NO: 27351 - DNA, 40 bp, Homo Sapiens
tgatagagtaaataataggagcttaaacccccttatttct

SEQ ID NO: 27352 - DNA, 43 bp, Homo Sapiens
tgatagagtaaataataggagcttaaacccccttatttctacc

SEQ ID NO: 27353 - DNA, 17 bp, Homo Sapiens
tgataggtggcacggag

SEQ ID NO: 27354 - DNA, 18 bp, Homo Sapiens
tgataggtggcacggaga

SEQ ID NO: 27355 - DNA, 20 bp, Homo Sapiens
tgataggtggcacggagaat

SEQ ID NO: 27356 - DNA, 22 bp, Homo Sapiens
tgataggtggcacggagaattt

SEQ ID NO: 27357 - DNA, 24 bp, Homo Sapiens
tgataggtggcacggagaattttg

SEQ ID NO: 27358 - DNA, 20 bp, Homo Sapiens
tgatcgtatagtggttagta

SEQ ID NO: 27359 - DNA, 22 bp, Homo Sapiens
tgatcgtatagtggttagtact

SEQ ID NO: 27360 - DNA, 23 bp, Homo Sapiens
tgatcgtatagtggttagtactc

SEQ ID NO: 27361 - DNA, 24 bp, Homo Sapiens
tgatcgtatagtggttagtactct

SEQ ID NO: 27362 - DNA, 25 bp, Homo Sapiens
tgatcgtatagtggttagtactctg

SEQ ID NO: 27363 - DNA, 26 bp, Homo Sapiens
tgatcgtatagtggttagtactctgc

SEQ ID NO: 27364 - DNA, 27 bp, Homo Sapiens
tgatcgtatagtggttagtactctgcg

SEQ ID NO: 27365 - DNA, 28 bp, Homo Sapiens
tgatcgtatagtggttagtactctgcgt

SEQ ID NO: 27366 - DNA, 29 bp, Homo Sapiens
tgatcgtatagtggttagtactctgcgtt

SEQ ID NO: 27367 - DNA, 30 bp, Homo Sapiens
tgatcgtatagtggttagtactctgcgttg

SEQ ID NO: 27368 - DNA, 31 bp, Homo Sapiens
tgatcgtatagtggttagtactctgcgttgt

SEQ ID NO: 27369 - DNA, 32 bp, Homo Sapiens
tgatcgtatagtggttagtactctgcgttgtg

SEQ ID NO: 27370 - DNA, 34 bp, Homo Sapiens
tgatcgtatagtggttagtactctgcgttgtggc

SEQ ID NO: 27371 - DNA, 25 bp, Homo Sapiens
tgatgcagagtggggttttgcagtc

SEQ ID NO: 27372 - DNA, 27 bp, Homo Sapiens
tgatgcagagtggggttttgcagtcct

SEQ ID NO: 27373 - DNA, 28 bp, Homo Sapiens
tgatgcagagtggggttttgcagtcctt

SEQ ID NO: 27374 - DNA, 29 bp, Homo Sapiens
tgatgcagagtggggttttgcagtcctta

SEQ ID NO: 27375 - DNA, 30 bp, Homo Sapiens
tgatgcagagtggggttttgcagtccttac

SEQ ID NO: 27376 - DNA, 31 bp, Homo Sapiens
tgatgcagagtggggttttgcagtccttacc

SEQ ID NO: 27377 - DNA, 32 bp, Homo Sapiens
tgatgcagagtggggttttgcagtccttacca

SEQ ID NO: 27378 - DNA, 16 bp, Homo Sapiens
tgattagggtgcttag

SEQ ID NO: 27379 - DNA, 20 bp, Homo Sapiens
tgattagggtgcttagctgt

SEQ ID NO: 27380 - DNA, 21 bp, Homo Sapiens
tgattagggtgcttagctgtt

SEQ ID NO: 27381 - DNA, 22 bp, Homo Sapiens
tgattagggtgcttagctgtta

SEQ ID NO: 27382 - DNA, 23 bp, Homo Sapiens
tgattagggtgcttagctgttaa

SEQ ID NO: 27383 - DNA, 24 bp, Homo Sapiens
tgattagggtgcttagctgttaac

SEQ ID NO: 27384 - DNA, 25 bp, Homo Sapiens
tgattagggtgcttagctgttaact

SEQ ID NO: 27385 - DNA, 27 bp, Homo Sapiens
tgattagggtgcttagctgttaactaa

SEQ ID NO: 27386 - DNA, 32 bp, Homo Sapiens
tgattagggtgcttagctgttaactaagtgtt

SEQ ID NO: 27387 - DNA, 41 bp, Homo Sapiens
tgattagggtgcttagctgttaactaagtgtttgtgggttt

SEQ ID NO: 27388 - DNA, 43 bp, Homo Sapiens
tgattagggtgcttagctgttaactaagtgtttgtgggtttaa

SEQ ID NO: 27389 - DNA, 17 bp, Homo Sapiens
tgattccggatcagaag

SEQ ID NO: 27390 - DNA, 18 bp, Homo Sapiens
tgattccggatcagaaga

SEQ ID NO: 27391 - DNA, 21 bp, Homo Sapiens
tgattccggatcagaagattg

SEQ ID NO: 27392 - DNA, 22 bp, Homo Sapiens
tgattccggatcagaagattga

SEQ ID NO: 27393 - DNA, 23 bp, Homo Sapiens
tgattccggatcagaagattgag

SEQ ID NO: 27394 - DNA, 26 bp, Homo Sapiens
tgattccggatcagaagattgagggt

SEQ ID NO: 27395 - DNA, 27 bp, Homo Sapiens
tgattccggatcagaagattgagggtt

SEQ ID NO: 27396 - DNA, 29 bp, Homo Sapiens
tgattccggatcagaagattgagggttcg

SEQ ID NO: 27397 - DNA, 47 bp, Homo Sapiens
tgattccggatcagaagattgagggttcgagtcccttcgtggtcgcc

SEQ ID NO: 27398 - DNA, 20 bp, Homo Sapiens
tgattctcgcttcgggtgcg

SEQ ID NO: 27399 - DNA, 22 bp, Homo Sapiens
tgattctcgcttcgggtgcgag

SEQ ID NO: 27400 - DNA, 19 bp, Homo Sapiens
tgattctcgctttgggtgc

SEQ ID NO: 27401 - DNA, 31 bp, Homo Sapiens
tgattctcgctttgggtgcgagaggtcccgg

SEQ ID NO: 27402 - DNA, 19 bp, Homo Sapiens
tgattctcggtttgggtcc

SEQ ID NO: 27403 - DNA, 20 bp, Homo Sapiens
tgattctcggtttgggtccg

SEQ ID NO: 27404 - DNA, 22 bp, Homo Sapiens
tgattctcggtttgggtccgag

SEQ ID NO: 27405 - DNA, 23 bp, Homo Sapiens
tgattctcggtttgggtccgaga

SEQ ID NO: 27406 - DNA, 31 bp, Homo Sapiens
tgattctcggtttgggtccgagaggtcccgg

SEQ ID NO: 27407 - DNA, 17 bp, Homo Sapiens
tgatttcgactcattaa

SEQ ID NO: 27408 - DNA, 18 bp, Homo Sapiens
tgatttcgactcattaaa

SEQ ID NO: 27409 - DNA, 19 bp, Homo Sapiens
tgatttcgactcattaaat

SEQ ID NO: 27410 - DNA, 20 bp, Homo Sapiens
tgatttcgactcattaaatt

SEQ ID NO: 27411 - DNA, 21 bp, Homo Sapiens
tgatttcgactcattaaatta

SEQ ID NO: 27412 - DNA, 22 bp, Homo Sapiens
tgatttcgactcattaaattat

SEQ ID NO: 27413 - DNA, 23 bp, Homo Sapiens
tgatttcgactcattaaattatg

SEQ ID NO: 27414 - DNA, 24 bp, Homo Sapiens
tgatttcgactcattaaattatga

SEQ ID NO: 27415 - DNA, 25 bp, Homo Sapiens
tgatttcgactcattaaattatgat

SEQ ID NO: 27416 - DNA, 26 bp, Homo Sapiens
tgatttcgactcattaaattatgata

SEQ ID NO: 27417 - DNA, 27 bp, Homo Sapiens
tgatttcgactcattaaattatgataa

SEQ ID NO: 27418 - DNA, 28 bp, Homo Sapiens
tgatttcgactcattaaattatgataat

SEQ ID NO: 27419 - DNA, 29 bp, Homo Sapiens
tgatttcgactcattaaattatgataatc

SEQ ID NO: 27420 - DNA, 34 bp, Homo Sapiens
tgatttcgactcattaaattatgataatcatatt

SEQ ID NO: 27421 - DNA, 36 bp, Homo Sapiens
tgatttcgactcattaaattatgataatcatattta

SEQ ID NO: 27422 - DNA, 37 bp, Homo Sapiens
tgatttcgactcattaaattatgataatcatatttac

SEQ ID NO: 27423 - DNA, 38 bp, Homo Sapiens
tgatttcgactcattaaattatgataatcatatttacc

SEQ ID NO: 27424 - DNA, 39 bp, Homo Sapiens
tgatttcgactcattaaattatgataatcatatttacca

SEQ ID NO: 27425 - DNA, 40 bp, Homo Sapiens
tgatttcgactcattaaattatgataatcatatttaccaa

SEQ ID NO: 27426 - DNA, 41 bp, Homo Sapiens
tgatttcgactcattaaattatgataatcatatttaccaac

SEQ ID NO: 27427 - DNA, 42 bp, Homo Sapiens
tgatttcgactcattaaattatgataatcatatttaccaacc

SEQ ID NO: 27428 - DNA, 43 bp, Homo Sapiens
tgatttcgactcattaaattatgataatcatatttaccaacca

SEQ ID NO: 27429 - DNA, 18 bp, Homo Sapiens
tgatttgcgttcagttga

SEQ ID NO: 27430 - DNA, 19 bp, Homo Sapiens
tgatttgcgttcagttgat

SEQ ID NO: 27431 - DNA, 20 bp, Homo Sapiens
tgatttgcgttcagttgatg

SEQ ID NO: 27432 - DNA, 29 bp, Homo Sapiens
tgatttgcgttcagttgatgcagagtggg

SEQ ID NO: 27433 - DNA, 40 bp, Homo Sapiens
tgatttgcgttcagttgatgcagagtggggttttgcagtc

SEQ ID NO: 27434 - DNA, 46 bp, Homo Sapiens
tgatttgcgttcagttgatgcagagtggggttttgcagtccttacc

SEQ ID NO: 27435 - DNA, 21 bp, Homo Sapiens
tgattttcatattgaattgca

SEQ ID NO: 27436 - DNA, 16 bp, Homo Sapiens
tgcaaattcgaagaag

SEQ ID NO: 27437 - DNA, 17 bp, Homo Sapiens
tgcaaattcgaagaagc

SEQ ID NO: 27438 - DNA, 19 bp, Homo Sapiens
tgcaaattcgaagaagcag

SEQ ID NO: 27439 - DNA, 20 bp, Homo Sapiens
tgcaaattcgaagaagcagc

SEQ ID NO: 27440 - DNA, 30 bp, Homo Sapiens
tgcaaattcgaagaagcagcttcaaacctg

SEQ ID NO: 27441 - DNA, 36 bp, Homo Sapiens
tgcaaattcgaagaagcagcttcaaacctgccgggg

SEQ ID NO: 27442 - DNA, 37 bp, Homo Sapiens
tgcaaattcgaagaagcagcttcaaacctgccggggc

SEQ ID NO: 27443 - DNA, 38 bp, Homo Sapiens
tgcaaattcgaagaagcagcttcaaacctgccggggct

SEQ ID NO: 27444 - DNA, 39 bp, Homo Sapiens
tgcaaattcgaagaagcagcttcaaacctgccggggctt

SEQ ID NO: 27445 - DNA, 40 bp, Homo Sapiens
tgcaaattcgaagaagcagcttcaaacctgccggggcttc

SEQ ID NO: 27446 - DNA, 41 bp, Homo Sapiens
tgcaaattcgaagaagcagcttcaaacctgccggggcttcc

SEQ ID NO: 27447 - DNA, 42 bp, Homo Sapiens
tgcaaattcgaagaagcagcttcaaacctgccggggcttcca

SEQ ID NO: 27448 - DNA, 16 bp, Homo Sapiens
tgcaactccaaataaa

SEQ ID NO: 27449 - DNA, 17 bp, Homo Sapiens
tgcaactccaaataaaa

SEQ ID NO: 27450 - DNA, 18 bp, Homo Sapiens
tgcaactccaaataaaag

SEQ ID NO: 27451 - DNA, 19 bp, Homo Sapiens
tgcaactccaaataaaagt

SEQ ID NO: 27452 - DNA, 20 bp, Homo Sapiens
tgcaactccaaataaaagta

SEQ ID NO: 27453 - DNA, 21 bp, Homo Sapiens
tgcaactccaaataaaagtac

SEQ ID NO: 27454 - DNA, 22 bp, Homo Sapiens
tgcaactccaaataaaagtacc

SEQ ID NO: 27455 - DNA, 23 bp, Homo Sapiens
tgcaactccaaataaaagtacca

SEQ ID NO: 27456 - DNA, 16 bp, Homo Sapiens
tgcaatacttaatttc

SEQ ID NO: 27457 - DNA, 18 bp, Homo Sapiens
tgcaatacttaatttctg

SEQ ID NO: 27458 - DNA, 19 bp, Homo Sapiens
tgcaatacttaatttctgc

SEQ ID NO: 27459 - DNA, 20 bp, Homo Sapiens
tgcaatacttaatttctgcc

SEQ ID NO: 27460 - DNA, 21 bp, Homo Sapiens
tgcaatacttaatttctgcca

SEQ ID NO: 27461 - DNA, 33 bp, Homo Sapiens
tgcacacgtgggttcgaatcccatcctcgtcgc

SEQ ID NO: 27462 - DNA, 34 bp, Homo Sapiens
tgcacacgtgggttcgaatcccatcctcgtcgcc

SEQ ID NO: 27463 - DNA, 16 bp, Homo Sapiens
tgcacgaggccccggg

SEQ ID NO: 27464 - DNA, 17 bp, Homo Sapiens
tgcacgaggccccgggt

SEQ ID NO: 27465 - DNA, 19 bp, Homo Sapiens
tgcacgaggccccgggttc

SEQ ID NO: 27466 - DNA, 32 bp, Homo Sapiens
tgcacgaggccccgggttcaatccccggcacc

SEQ ID NO: 27467 - DNA, 33 bp, Homo Sapiens
tgcacgaggccccgggttcaatccccggcacct

SEQ ID NO: 27468 - DNA, 34 bp, Homo Sapiens
tgcacgaggccccgggttcaatccccggcacctc

SEQ ID NO: 27469 - DNA, 35 bp, Homo Sapiens
tgcacgaggccccgggttcaatccccggcacctcc

SEQ ID NO: 27470 - DNA, 37 bp, Homo Sapiens
tgcacgaggccccgggttcaatccccggcacctccac

SEQ ID NO: 27471 - DNA, 38 bp, Homo Sapiens
tgcacgaggccccgggttcaatccccggcacctccacc

SEQ ID NO: 27472 - DNA, 39 bp, Homo Sapiens
tgcacgaggccccgggttcaatccccggcacctccacca

SEQ ID NO: 27473 - DNA, 38 bp, Homo Sapiens
tgcacgaggtcctgggttcgatccccagtacctccacc

SEQ ID NO: 27474 - DNA, 19 bp, Homo Sapiens
tgcacgcgtgggttcgaat

SEQ ID NO: 27475 - DNA, 20 bp, Homo Sapiens
tgcacgcgtgggttcgaatc

SEQ ID NO: 27476 - DNA, 22 bp, Homo Sapiens
tgcacgcgtgggttcgaatccc

SEQ ID NO: 27477 - DNA, 23 bp, Homo Sapiens
tgcacgcgtgggttcgaatccca

SEQ ID NO: 27478 - DNA, 34 bp, Homo Sapiens
tgcacgcgtgggttcgaatcccaccctcgtcgcc

SEQ ID NO: 27479 - DNA, 29 bp, Homo Sapiens
tgcacgcgtgggttcgaatcccatcctcg

SEQ ID NO: 27480 - DNA, 32 bp, Homo Sapiens
tgcacgcgtgggttcgaatcccatcctcgtcg

SEQ ID NO: 27481 - DNA, 33 bp, Homo Sapiens
tgcacgcgtgggttcgaatcccatcctcgtcgc

SEQ ID NO: 27482 - DNA, 34 bp, Homo Sapiens
tgcacgcgtgggttcgaatcccatcctcgtcgcc

SEQ ID NO: 27483 - DNA, 35 bp, Homo Sapiens
tgcacgcgtgggttcgaatcccatcctcgtcgcca

SEQ ID NO: 27484 - DNA, 28 bp, Homo Sapiens
tgcagagtggggttttgcagtccttacc

SEQ ID NO: 27485 - DNA, 29 bp, Homo Sapiens
tgcagagtggggttttgcagtccttacca

SEQ ID NO: 27486 - DNA, 17 bp, Homo Sapiens
tgcaggttcgagtcctg

SEQ ID NO: 27487 - DNA, 24 bp, Homo Sapiens
tgcaggttcgagtcctgccgcggt

SEQ ID NO: 27488 - DNA, 25 bp, Homo Sapiens
tgcaggttcgagtcctgccgcggtc

SEQ ID NO: 27489 - DNA, 26 bp, Homo Sapiens
tgcaggttcgagtcctgccgcggtcg

SEQ ID NO: 27490 - DNA, 27 bp, Homo Sapiens
tgcaggttcgagtcctgccgcggtcgc

SEQ ID NO: 27491 - DNA, 28 bp, Homo Sapiens
tgcaggttcgagtcctgccgcggtcgcc

SEQ ID NO: 27492 - DNA, 29 bp, Homo Sapiens
tgcaggttcgagtcctgccgcggtcgcca

SEQ ID NO: 27493 - DNA, 33 bp, Homo Sapiens
tgcatgaggtcccgggttcgatccccagcatct

SEQ ID NO: 27494 - DNA, 36 bp, Homo Sapiens
tgcatgaggtcccgggttcgatccccagcatctcca

SEQ ID NO: 27495 - DNA, 37 bp, Homo Sapiens
tgcatgaggtcccgggttcgatccccagcatctccac

SEQ ID NO: 27496 - DNA, 38 bp, Homo Sapiens
tgcatgaggtcccgggttcgatccccagcatctccacc

SEQ ID NO: 27497 - DNA, 39 bp, Homo Sapiens
tgcatgaggtcccgggttcgatccccagcatctccacca

SEQ ID NO: 27498 - DNA, 22 bp, Homo Sapiens
tgcatgggtggttcagtggtag

SEQ ID NO: 27499 - DNA, 35 bp, Homo Sapiens
tgcatgggtggttcagtggtagaattctcgcctgc

SEQ ID NO: 27500 - DNA, 33 bp, Homo Sapiens
tgcattggtggttcagtggtagaattctcgcct

SEQ ID NO: 27501 - DNA, 35 bp, Homo Sapiens
tgcattggtggttcagtggtagaattctcgcctgc

SEQ ID NO: 27502 - DNA, 16 bp, Homo Sapiens
tgccacgcgggaggcc

SEQ ID NO: 27503 - DNA, 17 bp, Homo Sapiens
tgccacgcgggaggccc

SEQ ID NO: 27504 - DNA, 18 bp, Homo Sapiens
tgccacgcgggaggcccg

SEQ ID NO: 27505 - DNA, 19 bp, Homo Sapiens
tgccacgcgggaggcccgg

SEQ ID NO: 27506 - DNA, 20 bp, Homo Sapiens
tgccacgcgggaggcccggg

SEQ ID NO: 27507 - DNA, 21 bp, Homo Sapiens
tgccacgcgggaggcccgggt

SEQ ID NO: 27508 - DNA, 24 bp, Homo Sapiens
tgccacgcgggaggcccgggttcg

SEQ ID NO: 27509 - DNA, 26 bp, Homo Sapiens
tgccacgcgggaggcccgggttcgat

SEQ ID NO: 27510 - DNA, 39 bp, Homo Sapiens
tgccacgcgggaggcccgggttcgattcccggccaatgc

SEQ ID NO: 27511 - DNA, 40 bp, Homo Sapiens
tgccacgcgggaggcccgggttcgattcccggccaatgca

SEQ ID NO: 27512 - DNA, 42 bp, Homo Sapiens
tgccacgcgggaggcccgggttcgattcccggccaatgcacc

SEQ ID NO: 27513 - DNA, 43 bp, Homo Sapiens
tgccacgcgggaggcccgggttcgattcccggccaatgcacca

SEQ ID NO: 27514 - DNA, 23 bp, Homo Sapiens
tgccatgatcgtatagtggttag

SEQ ID NO: 27515 - DNA, 27 bp, Homo Sapiens
tgccatgatcgtatagtggttagtact

SEQ ID NO: 27516 - DNA, 30 bp, Homo Sapiens
tgccatgatcgtatagtggttagtactctg

SEQ ID NO: 27517 - DNA, 31 bp, Homo Sapiens
tgccatgatcgtatagtggttagtactctgc

SEQ ID NO: 27518 - DNA, 16 bp, Homo Sapiens
tgcccccatgtctaac

SEQ ID NO: 27519 - DNA, 19 bp, Homo Sapiens
tgcccccatgtctaacaac

SEQ ID NO: 27520 - DNA, 20 bp, Homo Sapiens
tgcccccatgtctaacaaca

SEQ ID NO: 27521 - DNA, 22 bp, Homo Sapiens
tgcccccatgtctaacaacatg

SEQ ID NO: 27522 - DNA, 23 bp, Homo Sapiens
tgcccccatgtctaacaacatgg

SEQ ID NO: 27523 - DNA, 24 bp, Homo Sapiens
tgcccccatgtctaacaacatggc

SEQ ID NO: 27524 - DNA, 25 bp, Homo Sapiens
tgcccccatgtctaacaacatggct

SEQ ID NO: 27525 - DNA, 26 bp, Homo Sapiens
tgcccccatgtctaacaacatggctt

SEQ ID NO: 27526 - DNA, 27 bp, Homo Sapiens
tgcccccatgtctaacaacatggcttt

SEQ ID NO: 27527 - DNA, 28 bp, Homo Sapiens
tgcccccatgtctaacaacatggctttc

SEQ ID NO: 27528 - DNA, 29 bp, Homo Sapiens
tgcccccatgtctaacaacatggctttct

SEQ ID NO: 27529 - DNA, 30 bp, Homo Sapiens
tgcccccatgtctaacaacatggctttctc

SEQ ID NO: 27530 - DNA, 31 bp, Homo Sapiens
tgcccccatgtctaacaacatggctttctca

SEQ ID NO: 27531 - DNA, 32 bp, Homo Sapiens
tgcccccatgtctaacaacatggctttctcac

SEQ ID NO: 27532 - DNA, 33 bp, Homo Sapiens
tgcccccatgtctaacaacatggctttctcacc

SEQ ID NO: 27533 - DNA, 34 bp, Homo Sapiens
tgcccccatgtctaacaacatggctttctcacca

SEQ ID NO: 27534 - DNA, 16 bp, Homo Sapiens
tgcccgcatcctccac

SEQ ID NO: 27535 - DNA, 17 bp, Homo Sapiens
tgcccgcatcctccacc

SEQ ID NO: 27536 - DNA, 18 bp, Homo Sapiens
tgcccgcatcctccacca

SEQ ID NO: 27537 - DNA, 18 bp, Homo Sapiens
tgcccgcattctccacca

SEQ ID NO: 27538 - DNA, 33 bp, Homo Sapiens
tgcccggatagctcagtcggtagagcatcagac

SEQ ID NO: 27539 - DNA, 34 bp, Homo Sapiens
tgcccggctagctcagtcggtagagcatgagact

SEQ ID NO: 27540 - DNA, 35 bp, Homo Sapiens
tgcccggctagctcagtcggtagagcatgagactc

SEQ ID NO: 27541 - DNA, 18 bp, Homo Sapiens
tgccgaggttgtgagttc

SEQ ID NO: 27542 - DNA, 37 bp, Homo Sapiens
tgccgaggttgtgagttcgagcctcacctggagcacc

SEQ ID NO: 27543 - DNA, 37 bp, Homo Sapiens
tgccgaggttgtgagttcgatcctcacctggagcacc

SEQ ID NO: 27544 - DNA, 16 bp, Homo Sapiens
tgccgtgatcgtatag

SEQ ID NO: 27545 - DNA, 17 bp, Homo Sapiens
tgccgtgatcgtatagt

SEQ ID NO: 27546 - DNA, 18 bp, Homo Sapiens
tgccgtgatcgtatagtg

SEQ ID NO: 27547 - DNA, 19 bp, Homo Sapiens
tgccgtgatcgtatagtgg

SEQ ID NO: 27548 - DNA, 20 bp, Homo Sapiens
tgccgtgatcgtatagtggt

SEQ ID NO: 27549 - DNA, 21 bp, Homo Sapiens
tgccgtgatcgtatagtggtt

SEQ ID NO: 27550 - DNA, 22 bp, Homo Sapiens
tgccgtgatcgtatagtggtta

SEQ ID NO: 27551 - DNA, 23 bp, Homo Sapiens
tgccgtgatcgtatagtggttag

SEQ ID NO: 27552 - DNA, 24 bp, Homo Sapiens
tgccgtgatcgtatagtggttagt

SEQ ID NO: 27553 - DNA, 25 bp, Homo Sapiens
tgccgtgatcgtatagtggttagta

SEQ ID NO: 27554 - DNA, 26 bp, Homo Sapiens
tgccgtgatcgtatagtggttagtac

SEQ ID NO: 27555 - DNA, 27 bp, Homo Sapiens
tgccgtgatcgtatagtggttagtact

SEQ ID NO: 27556 - DNA, 28 bp, Homo Sapiens
tgccgtgatcgtatagtggttagtactc

SEQ ID NO: 27557 - DNA, 29 bp, Homo Sapiens
tgccgtgatcgtatagtggttagtactct

SEQ ID NO: 27558 - DNA, 30 bp, Homo Sapiens
tgccgtgatcgtatagtggttagtactctg

SEQ ID NO: 27559 - DNA, 31 bp, Homo Sapiens
tgccgtgatcgtatagtggttagtactctgc

SEQ ID NO: 27560 - DNA, 32 bp, Homo Sapiens
tgccgtgatcgtatagtggttagtactctgcg

SEQ ID NO: 27561 - DNA, 33 bp, Homo Sapiens
tgccgtgatcgtatagtggttagtactctgcgt

SEQ ID NO: 27562 - DNA, 34 bp, Homo Sapiens
tgccgtgatcgtatagtggttagtactctgcgtt

SEQ ID NO: 27563 - DNA, 35 bp, Homo Sapiens
tgccgtgatcgtatagtggttagtactctgcgttg

SEQ ID NO: 27564 - DNA, 36 bp, Homo Sapiens
tgccgtgatcgtatagtggttagtactctgcgttgt

SEQ ID NO: 27565 - DNA, 37 bp, Homo Sapiens
tgccgtgatcgtatagtggttagtactctgcgttgtg

SEQ ID NO: 27566 - DNA, 39 bp, Homo Sapiens
tgccgtgatcgtatagtggttagtactctgcgttgtggc

SEQ ID NO: 27567 - DNA, 40 bp, Homo Sapiens
tgccgtgatcgtatagtggttagtactctgcgttgtggcc

SEQ ID NO: 27568 - DNA, 41 bp, Homo Sapiens
tgccgtgatcgtatagtggttagtactctgcgttgtggccg

SEQ ID NO: 27569 - DNA, 42 bp, Homo Sapiens
tgccgtgatcgtatagtggttagtactctgcgttgtggccgc

SEQ ID NO: 27570 - DNA, 43 bp, Homo Sapiens
tgccgtgatcgtatagtggttagtactctgcgttgtggccgca

SEQ ID NO: 27571 - DNA, 44 bp, Homo Sapiens
tgccgtgatcgtatagtggttagtactctgcgttgtggccgcag

SEQ ID NO: 27572 - DNA, 46 bp, Homo Sapiens
tgccgtgatcgtatagtggttagtactctgcgttgtggccgcagca

SEQ ID NO: 27573 - DNA, 34 bp, Homo Sapiens
tgcctcgttagcgcagtaggtagcgcgtcagtct

SEQ ID NO: 27574 - DNA, 22 bp, Homo Sapiens
tgccttccaagcagttgacccg

SEQ ID NO: 27575 - DNA, 23 bp, Homo Sapiens
tgccttccaagcagttgacccgg

SEQ ID NO: 27576 - DNA, 24 bp, Homo Sapiens
tgccttccaagcagttgacccggg

SEQ ID NO: 27577 - DNA, 25 bp, Homo Sapiens
tgccttccaagcagttgacccgggt

SEQ ID NO: 27578 - DNA, 46 bp, Homo Sapiens
tgccttccaagcagttgacccgggttcgattcccggccaacgcacc

SEQ ID NO: 27579 - DNA, 28 bp, Homo Sapiens
tgcgacccgggttcgattcccgggcggc

SEQ ID NO: 27580 - DNA, 29 bp, Homo Sapiens
tgcgacccgggttcgattcccgggcggcg

SEQ ID NO: 27581 - DNA, 19 bp, Homo Sapiens
tgcgagaggtagcgggatc

SEQ ID NO: 27582 - DNA, 34 bp, Homo Sapiens
tgcgagaggtagcgggatcgatgcccgcattctc

SEQ ID NO: 27583 - DNA, 19 bp, Homo Sapiens
tgcgagaggtcccgggttc

SEQ ID NO: 27584 - DNA, 20 bp, Homo Sapiens
tgcgagaggtcccgggttca

SEQ ID NO: 27585 - DNA, 34 bp, Homo Sapiens
tgcgagaggtcccgggttcaaatcccggacgagc

SEQ ID NO: 27586 - DNA, 35 bp, Homo Sapiens
tgcgagaggtcccgggttcaaatcccggacgagcc

SEQ ID NO: 27587 - DNA, 36 bp, Homo Sapiens
tgcgagaggtcccgggttcaaatcccggacgagccc

SEQ ID NO: 27588 - DNA, 37 bp, Homo Sapiens
tgcgagaggtcccgggttcaaatcccggacgagcccc

SEQ ID NO: 27589 - DNA, 38 bp, Homo Sapiens
tgcgagaggtcccgggttcaaatcccggacgagccccc

SEQ ID NO: 27590 - DNA, 39 bp, Homo Sapiens
tgcgagaggtcccgggttcaaatcccggacgagccccca

SEQ ID NO: 27591 - DNA, 25 bp, Homo Sapiens
tgcgtgttcaaatcacgtcggggtc

SEQ ID NO: 27592 - DNA, 26 bp, Homo Sapiens
tgcgtgttcaaatcacgtcggggtca

SEQ ID NO: 27593 - DNA, 27 bp, Homo Sapiens
tgcgtgttcaaatcacgtcggggtcac

SEQ ID NO: 27594 - DNA, 29 bp, Homo Sapiens
tgcgtgttcaaatcacgtcggggtcacca

SEQ ID NO: 27595 - DNA, 24 bp, Homo Sapiens
tgcgtgttcaagtcacgtcggggt

SEQ ID NO: 27596 - DNA, 25 bp, Homo Sapiens
tgcgtgttcaagtcacgtcggggtc

SEQ ID NO: 27597 - DNA, 26 bp, Homo Sapiens
tgcgtgttcaagtcacgtcggggtca

SEQ ID NO: 27598 - DNA, 27 bp, Homo Sapiens
tgcgtgttcaagtcacgtcggggtcac

SEQ ID NO: 27599 - DNA, 28 bp, Homo Sapiens
tgcgtgttcaagtcacgtcggggtcacc

SEQ ID NO: 27600 - DNA, 29 bp, Homo Sapiens
tgcgtgttcaagtcacgtcggggtcacca

SEQ ID NO: 27601 - DNA, 25 bp, Homo Sapiens
tgcgtgttcgaatcacgtcggggtc

SEQ ID NO: 27602 - DNA, 27 bp, Homo Sapiens
tgcgttcagttgatgcagagtggggtt

SEQ ID NO: 27603 - DNA, 16 bp, Homo Sapiens
tgctaactcatgcccc

SEQ ID NO: 27604 - DNA, 17 bp, Homo Sapiens
tgctaactcatgccccc

SEQ ID NO: 27605 - DNA, 18 bp, Homo Sapiens
tgctaactcatgccccca

SEQ ID NO: 27606 - DNA, 20 bp, Homo Sapiens
tgctaactcatgcccccatg

SEQ ID NO: 27607 - DNA, 21 bp, Homo Sapiens
tgctaactcatgcccccatgt

SEQ ID NO: 27608 - DNA, 22 bp, Homo Sapiens
tgctaactcatgcccccatgtc

SEQ ID NO: 27609 - DNA, 23 bp, Homo Sapiens
tgctaactcatgcccccatgtct

SEQ ID NO: 27610 - DNA, 24 bp, Homo Sapiens
tgctaactcatgcccccatgtcta

SEQ ID NO: 27611 - DNA, 25 bp, Homo Sapiens
tgctaactcatgcccccatgtctaa

SEQ ID NO: 27612 - DNA, 26 bp, Homo Sapiens
tgctaactcatgcccccatgtctaac

SEQ ID NO: 27613 - DNA, 27 bp, Homo Sapiens
tgctaactcatgcccccatgtctaaca

SEQ ID NO: 27614 - DNA, 28 bp, Homo Sapiens
tgctaactcatgcccccatgtctaacaa

SEQ ID NO: 27615 - DNA, 29 bp, Homo Sapiens
tgctaactcatgcccccatgtctaacaac

SEQ ID NO: 27616 - DNA, 30 bp, Homo Sapiens
tgctaactcatgcccccatgtctaacaaca

SEQ ID NO: 27617 - DNA, 31 bp, Homo Sapiens
tgctaactcatgcccccatgtctaacaacat

SEQ ID NO: 27618 - DNA, 32 bp, Homo Sapiens
tgctaactcatgcccccatgtctaacaacatg

SEQ ID NO: 27619 - DNA, 33 bp, Homo Sapiens
tgctaactcatgcccccatgtctaacaacatgg

SEQ ID NO: 27620 - DNA, 34 bp, Homo Sapiens
tgctaactcatgcccccatgtctaacaacatggc

SEQ ID NO: 27621 - DNA, 35 bp, Homo Sapiens
tgctaactcatgcccccatgtctaacaacatggct

SEQ ID NO: 27622 - DNA, 36 bp, Homo Sapiens
tgctaactcatgcccccatgtctaacaacatggctt

SEQ ID NO: 27623 - DNA, 38 bp, Homo Sapiens
tgctaactcatgcccccatgtctaacaacatggctttc

SEQ ID NO: 27624 - DNA, 39 bp, Homo Sapiens
tgctaactcatgcccccatgtctaacaacatggctttct

SEQ ID NO: 27625 - DNA, 40 bp, Homo Sapiens
tgctaactcatgcccccatgtctaacaacatggctttctc

SEQ ID NO: 27626 - DNA, 41 bp, Homo Sapiens
tgctaactcatgcccccatgtctaacaacatggctttctca

SEQ ID NO: 27627 - DNA, 42 bp, Homo Sapiens
tgctaactcatgcccccatgtctaacaacatggctttctcac

SEQ ID NO: 27628 - DNA, 43 bp, Homo Sapiens
tgctaactcatgcccccatgtctaacaacatggctttctcacc

SEQ ID NO: 27629 - DNA, 44 bp, Homo Sapiens
tgctaactcatgcccccatgtctaacaacatggctttctcacca

SEQ ID NO: 27630 - DNA, 26 bp, Homo Sapiens
tgctaataacgccaaggtcgcgggtt

SEQ ID NO: 27631 - DNA, 16 bp, Homo Sapiens
tgctaatccattgtgc

SEQ ID NO: 27632 - DNA, 17 bp, Homo Sapiens
tgctaatccattgtgct

SEQ ID NO: 27633 - DNA, 22 bp, Homo Sapiens
tgctaatccattgtgctctgca

SEQ ID NO: 27634 - DNA, 31 bp, Homo Sapiens
tgctaatccattgtgctctgcacgcgtgggt

SEQ ID NO: 27635 - DNA, 18 bp, Homo Sapiens
tgctaatccattgtgctt

SEQ ID NO: 27636 - DNA, 19 bp, Homo Sapiens
tgctaatccattgtgcttt

SEQ ID NO: 27637 - DNA, 21 bp, Homo Sapiens
tgctaatccattgtgctttgc

SEQ ID NO: 27638 - DNA, 22 bp, Homo Sapiens
tgctaatccattgtgctttgca

SEQ ID NO: 27639 - DNA, 23 bp, Homo Sapiens
tgctaatccattgtgctttgcac

SEQ ID NO: 27640 - DNA, 16 bp, Homo Sapiens
tgctaatggtggagtt

SEQ ID NO: 27641 - DNA, 17 bp, Homo Sapiens
tgctaatggtggagtta

SEQ ID NO: 27642 - DNA, 18 bp, Homo Sapiens
tgctaatggtggagttaa

SEQ ID NO: 27643 - DNA, 19 bp, Homo Sapiens
tgctaatggtggagttaaa

SEQ ID NO: 27644 - DNA, 20 bp, Homo Sapiens
tgctaatggtggagttaaag

SEQ ID NO: 27645 - DNA, 21 bp, Homo Sapiens
tgctaatggtggagttaaaga

SEQ ID NO: 27646 - DNA, 22 bp, Homo Sapiens
tgctaatggtggagttaaagac

SEQ ID NO: 27647 - DNA, 23 bp, Homo Sapiens
tgctaatggtggagttaaagact

SEQ ID NO: 27648 - DNA, 24 bp, Homo Sapiens
tgctaatggtggagttaaagactt

SEQ ID NO: 27649 - DNA, 25 bp, Homo Sapiens
tgctaatggtggagttaaagacttt

SEQ ID NO: 27650 - DNA, 26 bp, Homo Sapiens
tgctaatggtggagttaaagactttt

SEQ ID NO: 27651 - DNA, 27 bp, Homo Sapiens
tgctaatggtggagttaaagacttttt

SEQ ID NO: 27652 - DNA, 28 bp, Homo Sapiens
tgctaatggtggagttaaagactttttc

SEQ ID NO: 27653 - DNA, 29 bp, Homo Sapiens
tgctaatggtggagttaaagactttttct

SEQ ID NO: 27654 - DNA, 30 bp, Homo Sapiens
tgctaatggtggagttaaagactttttctc

SEQ ID NO: 27655 - DNA, 31 bp, Homo Sapiens
tgctaatggtggagttaaagactttttctct

SEQ ID NO: 27656 - DNA, 32 bp, Homo Sapiens
tgctaatggtggagttaaagactttttctctg

SEQ ID NO: 27657 - DNA, 33 bp, Homo Sapiens
tgctaatggtggagttaaagactttttctctga

SEQ ID NO: 27658 - DNA, 34 bp, Homo Sapiens
tgctaatggtggagttaaagactttttctctgac

SEQ ID NO: 27659 - DNA, 35 bp, Homo Sapiens
tgctaatggtggagttaaagactttttctctgacc

SEQ ID NO: 27660 - DNA, 36 bp, Homo Sapiens
tgctaatggtggagttaaagactttttctctgacca

SEQ ID NO: 27661 - DNA, 20 bp, Homo Sapiens
tgctgggcccataacccaga

SEQ ID NO: 27662 - DNA, 28 bp, Homo Sapiens
tgctgggcccataacccagaggtcgatg

SEQ ID NO: 27663 - DNA, 30 bp, Homo Sapiens
tgctgggcccataacccagaggtcgatgga

SEQ ID NO: 27664 - DNA, 31 bp, Homo Sapiens
tgctgggcccataacccagaggtcgatggat

SEQ ID NO: 27665 - DNA, 32 bp, Homo Sapiens
tgctgggcccataacccagaggtcgatggatc

SEQ ID NO: 27666 - DNA, 33 bp, Homo Sapiens
tgctgggcccataacccagaggtcgatggatcg

SEQ ID NO: 27667 - DNA, 31 bp, Homo Sapiens
tgcttagctgttaactaagtgtttgtgggtt

SEQ ID NO: 27668 - DNA, 32 bp, Homo Sapiens
tgcttagctgttaactaagtgtttgtgggttt

SEQ ID NO: 27669 - DNA, 33 bp, Homo Sapiens
tgcttagctgttaactaagtgtttgtgggttta

SEQ ID NO: 27670 - DNA, 26 bp, Homo Sapiens
tgctttacacgcagaaggtcctgggt

SEQ ID NO: 27671 - DNA, 41 bp, Homo Sapiens
tgctttacacgcagaaggtcctgggttcgagccccagtgga

SEQ ID NO: 27672 - DNA, 47 bp, Homo Sapiens
tgctttacacgcagaaggtcctgggttcgagccccagtggaaccacc

SEQ ID NO: 27673 - DNA, 40 bp, Homo Sapiens
tgctttgcacgcgtgggttcgaatcccatcctcgtcgcca

SEQ ID NO: 27674 - DNA, 24 bp, Homo Sapiens
tgctttgcacgtatgaggccccgg

SEQ ID NO: 27675 - DNA, 25 bp, Homo Sapiens
tgctttgcacgtatgaggccccggg

SEQ ID NO: 27676 - DNA, 21 bp, Homo Sapiens
tggaaaccatcctctgctacc

SEQ ID NO: 27677 - DNA, 22 bp, Homo Sapiens
tggacaggtgtccgcgtgggtt

SEQ ID NO: 27678 - DNA, 17 bp, Homo Sapiens
tggacatatgtccgcgt

SEQ ID NO: 27679 - DNA, 20 bp, Homo Sapiens
tggacatatgtccgcgtggg

SEQ ID NO: 27680 - DNA, 21 bp, Homo Sapiens
tggacatatgtccgcgtgggt

SEQ ID NO: 27681 - DNA, 22 bp, Homo Sapiens
tggacatatgtccgcgtgggtt

SEQ ID NO: 27682 - DNA, 23 bp, Homo Sapiens
tggacatatgtccgcgtgggttc

SEQ ID NO: 27683 - DNA, 17 bp, Homo Sapiens
tggacgagcgcgctgga

SEQ ID NO: 27684 - DNA, 19 bp, Homo Sapiens
tggacgagcgcgctggact

SEQ ID NO: 27685 - DNA, 25 bp, Homo Sapiens
tggacgagcgcgctggacttctaat

SEQ ID NO: 27686 - DNA, 27 bp, Homo Sapiens
tggacgagcgcgctggacttctaatcc

SEQ ID NO: 27687 - DNA, 24 bp, Homo Sapiens
tggactcgaaatccaatggggttt

SEQ ID NO: 27688 - DNA, 17 bp, Homo Sapiens
tggactctgaatccagc

SEQ ID NO: 27689 - DNA, 24 bp, Homo Sapiens
tggactctgaatccagcgatccga

SEQ ID NO: 27690 - DNA, 25 bp, Homo Sapiens
tggactctgaatccagcgatccgag

SEQ ID NO: 27691 - DNA, 26 bp, Homo Sapiens
tggactctgaatccagcgatccgagt

SEQ ID NO: 27692 - DNA, 27 bp, Homo Sapiens
tggactctgaatccagcgatccgagtt

SEQ ID NO: 27693 - DNA, 28 bp, Homo Sapiens
tggactctgaatccagcgatccgagttc

SEQ ID NO: 27694 - DNA, 29 bp, Homo Sapiens
tggactctgaatccagcgatccgagttca

SEQ ID NO: 27695 - DNA, 45 bp, Homo Sapiens
tggactctgaatccagcgatccgagttcaaatctcggtggaacct

SEQ ID NO: 27696 - DNA, 48 bp, Homo Sapiens
tggactctgaatccagcgatccgagttcaaatctcggtggaacctcca

SEQ ID NO: 27697 - DNA, 22 bp, Homo Sapiens
tggactgctaatccattgtgct

SEQ ID NO: 27698 - DNA, 29 bp, Homo Sapiens
tggactgtaaatctaaagacaggggttag

SEQ ID NO: 27699 - DNA, 30 bp, Homo Sapiens
tggactgtaaatctaaagacaggggttagg

SEQ ID NO: 27700 - DNA, 45 bp, Homo Sapiens
tggactgtaaatctaaagacaggggttaggcctctttttaccacc

SEQ ID NO: 27701 - DNA, 46 bp, Homo Sapiens
tggactgtaaatctaaagacaggggttaggcctctttttaccacca

SEQ ID NO: 27702 - DNA, 17 bp, Homo Sapiens
tggactttgaatccagc

SEQ ID NO: 27703 - DNA, 16 bp, Homo Sapiens
tggaggccatggggtt

SEQ ID NO: 27704 - DNA, 16 bp, Homo Sapiens
tggaggcgtgggttcg

SEQ ID NO: 27705 - DNA, 21 bp, Homo Sapiens
tggaggcgtgggttcgaatcc

SEQ ID NO: 27706 - DNA, 22 bp, Homo Sapiens
tggaggcgtgggttcgaatccc

SEQ ID NO: 27707 - DNA, 23 bp, Homo Sapiens
tggaggcgtgggttcgaatccca

SEQ ID NO: 27708 - DNA, 25 bp, Homo Sapiens
tggaggcgtgggttcgaatcccact

SEQ ID NO: 27709 - DNA, 29 bp, Homo Sapiens
tggaggcgtgggttcgaatcccacttctg

SEQ ID NO: 27710 - DNA, 32 bp, Homo Sapiens
tggaggcgtgggttcgaatcccacttctgaca

SEQ ID NO: 27711 - DNA, 34 bp, Homo Sapiens
tggaggcgtgggttcgaatcccacttctgacacc

SEQ ID NO: 27712 - DNA, 23 bp, Homo Sapiens
tggagtggttatcacgttcgcct

SEQ ID NO: 27713 - DNA, 16 bp, Homo Sapiens
tggagttaaagacttt

SEQ ID NO: 27714 - DNA, 21 bp, Homo Sapiens
tggagttaaagactttttctc

SEQ ID NO: 27715 - DNA, 23 bp, Homo Sapiens
tggagttaaagactttttctctg

SEQ ID NO: 27716 - DNA, 24 bp, Homo Sapiens
tggagttaaagactttttctctga

SEQ ID NO: 27717 - DNA, 25 bp, Homo Sapiens
tggagttaaagactttttctctgac

SEQ ID NO: 27718 - DNA, 26 bp, Homo Sapiens
tggagttaaagactttttctctgacc

SEQ ID NO: 27719 - DNA, 27 bp, Homo Sapiens
tggagttaaagactttttctctgacca

SEQ ID NO: 27720 - DNA, 16 bp, Homo Sapiens
tggataacgcgtctga

SEQ ID NO: 27721 - DNA, 18 bp, Homo Sapiens
tggataacgcgtctgact

SEQ ID NO: 27722 - DNA, 16 bp, Homo Sapiens
tggataaggcactggc

SEQ ID NO: 27723 - DNA, 16 bp, Homo Sapiens
tggataaggcatcagc

SEQ ID NO: 27724 - DNA, 18 bp, Homo Sapiens
tggataaggcatcagcct

SEQ ID NO: 27725 - DNA, 27 bp, Homo Sapiens
tggataaggcatcagcctccggagctg

SEQ ID NO: 27726 - DNA, 16 bp, Homo Sapiens
tggataaggcattggc

SEQ ID NO: 27727 - DNA, 16 bp, Homo Sapiens
tggataaggcgtctga

SEQ ID NO: 27728 - DNA, 18 bp, Homo Sapiens
tggataaggcgtctgact

SEQ ID NO: 27729 - DNA, 16 bp, Homo Sapiens
tggatagcgcattgga

SEQ ID NO: 27730 - DNA, 17 bp, Homo Sapiens
tggatagcgcattggac

SEQ ID NO: 27731 - DNA, 25 bp, Homo Sapiens
tggatagctcagtcggtagagcatc

SEQ ID NO: 27732 - DNA, 27 bp, Homo Sapiens
tggatagctcagtcggtagagcatcag

SEQ ID NO: 27733 - DNA, 29 bp, Homo Sapiens
tggatagctcagtcggtagagcatcagac

SEQ ID NO: 27734 - DNA, 22 bp, Homo Sapiens
tggatcgaaaccatcctctgct

SEQ ID NO: 27735 - DNA, 39 bp, Homo Sapiens
tggattctcagggatgggttcgattctcatagtcctagc

SEQ ID NO: 27736 - DNA, 40 bp, Homo Sapiens
tggattctcagggatgggttcgattctcatagtcctagcc

SEQ ID NO: 27737 - DNA, 41 bp, Homo Sapiens
tggattctcagggatgggttcgattctcatagtcctagcca

SEQ ID NO: 27738 - DNA, 16 bp, Homo Sapiens
tggcacggagaatttt

SEQ ID NO: 27739 - DNA, 17 bp, Homo Sapiens
tggcacggagaattttg

SEQ ID NO: 27740 - DNA, 32 bp, Homo Sapiens
tggcacggagaattttggattctcagggatgg

SEQ ID NO: 27741 - DNA, 16 bp, Homo Sapiens
tggcagagcccggtaa

SEQ ID NO: 27742 - DNA, 17 bp, Homo Sapiens
tggcagagcccggtaat

SEQ ID NO: 27743 - DNA, 18 bp, Homo Sapiens
tggcagagcccggtaatc

SEQ ID NO: 27744 - DNA, 23 bp, Homo Sapiens
tggcagagcccggtaatcgcata

SEQ ID NO: 27745 - DNA, 24 bp, Homo Sapiens
tggcagagcccggtaatcgcataa

SEQ ID NO: 27746 - DNA, 25 bp, Homo Sapiens
tggcagagcccggtaatcgcataaa

SEQ ID NO: 27747 - DNA, 27 bp, Homo Sapiens
tggcagagcccggtaatcgcataaaac

SEQ ID NO: 27748 - DNA, 30 bp, Homo Sapiens
tggcagagcccggtaatcgcataaaactta

SEQ ID NO: 27749 - DNA, 31 bp, Homo Sapiens
tggcagagcccggtaatcgcataaaacttaa

SEQ ID NO: 27750 - DNA, 34 bp, Homo Sapiens
tggcagagcccggtaatcgcataaaacttaaaac

SEQ ID NO: 27751 - DNA, 35 bp, Homo Sapiens
tggcagagcccggtaatcgcataaaacttaaaact

SEQ ID NO: 27752 - DNA, 36 bp, Homo Sapiens
tggcagagcccggtaatcgcataaaacttaaaactt

SEQ ID NO: 27753 - DNA, 39 bp, Homo Sapiens
tggcagagcccggtaatcgcataaaacttaaaactttac

SEQ ID NO: 27754 - DNA, 19 bp, Homo Sapiens
tggcccgggttcgactccc

SEQ ID NO: 27755 - DNA, 17 bp, Homo Sapiens
tggccgagcggtctaag

SEQ ID NO: 27756 - DNA, 19 bp, Homo Sapiens
tggccgagcggtctaaggc

SEQ ID NO: 27757 - DNA, 23 bp, Homo Sapiens
tggccgagcggtctaaggcgctg

SEQ ID NO: 27758 - DNA, 27 bp, Homo Sapiens
tggccgagcggtctaaggcgctgcgtt

SEQ ID NO: 27759 - DNA, 26 bp, Homo Sapiens
tggccgagtggtctaaggcgctggat

SEQ ID NO: 27760 - DNA, 16 bp, Homo Sapiens
tggccgagtggttaag

SEQ ID NO: 27761 - DNA, 21 bp, Homo Sapiens
tggccgcagcaacctcggttc

SEQ ID NO: 27762 - DNA, 22 bp, Homo Sapiens
tggccgcagcaacctcggttcg

SEQ ID NO: 27763 - DNA, 23 bp, Homo Sapiens
tggccgcagcaacctcggttcga

SEQ ID NO: 27764 - DNA, 35 bp, Homo Sapiens
tggccgcagcaacctcggttcgaatccgagtcacg

SEQ ID NO: 27765 - DNA, 40 bp, Homo Sapiens
tggccgcagcaacctcggttcgaatccgagtcacggcacc

SEQ ID NO: 27766 - DNA, 41 bp, Homo Sapiens
tggccgcagcaacctcggttcgaatccgagtcacggcacca

SEQ ID NO: 27767 - DNA, 29 bp, Homo Sapiens
tggcctaatggataaggcatcagcctccg

SEQ ID NO: 27768 - DNA, 24 bp, Homo Sapiens
tggcctaatggataaggcattggc

SEQ ID NO: 27769 - DNA, 26 bp, Homo Sapiens
tggcctaatggataaggcgtctgact

SEQ ID NO: 27770 - DNA, 26 bp, Homo Sapiens
tggcctaatggataaggcgtctgatt

SEQ ID NO: 27771 - DNA, 28 bp, Homo Sapiens
tggcctaatggataaggcgtctgattcc

SEQ ID NO: 27772 - DNA, 29 bp, Homo Sapiens
tggcctaatggataaggcgtctgattccg

SEQ ID NO: 27773 - DNA, 17 bp, Homo Sapiens
tggcgcaatcggttagc

SEQ ID NO: 27774 - DNA, 24 bp, Homo Sapiens
tggcgcaatggatagcgcattgga

SEQ ID NO: 27775 - DNA, 25 bp, Homo Sapiens
tggcgcaatggatagcgcattggac

SEQ ID NO: 27776 - DNA, 26 bp, Homo Sapiens
tggcgcaatggatagcgcattggact

SEQ ID NO: 27777 - DNA, 23 bp, Homo Sapiens
tggcgcagcggaagcgtgctggg

SEQ ID NO: 27778 - DNA, 24 bp, Homo Sapiens
tggcgcagcggaagcgtgctgggc

SEQ ID NO: 27779 - DNA, 26 bp, Homo Sapiens
tggcgcagcggaagcgtgctgggccc

SEQ ID NO: 27780 - DNA, 33 bp, Homo Sapiens
tggcgcagcggaagcgtgctgggcccataaccc

SEQ ID NO: 27781 - DNA, 16 bp, Homo Sapiens
tggctaggattcggcg

SEQ ID NO: 27782 - DNA, 17 bp, Homo Sapiens
tggctaggattcggcgc

SEQ ID NO: 27783 - DNA, 18 bp, Homo Sapiens
tggctaggattcggcgct

SEQ ID NO: 27784 - DNA, 19 bp, Homo Sapiens
tggctaggattcggcgctt

SEQ ID NO: 27785 - DNA, 21 bp, Homo Sapiens
tggctaggattcggcgctttc

SEQ ID NO: 27786 - DNA, 22 bp, Homo Sapiens
tggctaggattcggcgctttca

SEQ ID NO: 27787 - DNA, 23 bp, Homo Sapiens
tggctaggattcggcgctttcac

SEQ ID NO: 27788 - DNA, 24 bp, Homo Sapiens
tggctaggattcggcgctttcacc

SEQ ID NO: 27789 - DNA, 25 bp, Homo Sapiens
tggctaggattcggcgctttcaccg

SEQ ID NO: 27790 - DNA, 21 bp, Homo Sapiens
tggctgagtgaagcattggac

SEQ ID NO: 27791 - DNA, 22 bp, Homo Sapiens
tggctgagtgaagcattggact

SEQ ID NO: 27792 - DNA, 23 bp, Homo Sapiens
tggctgagtgaagcattggactg

SEQ ID NO: 27793 - DNA, 24 bp, Homo Sapiens
tggctgagtgaagcattggactgt

SEQ ID NO: 27794 - DNA, 25 bp, Homo Sapiens
tggctgagtgaagcattggactgta

SEQ ID NO: 27795 - DNA, 26 bp, Homo Sapiens
tggctgagtgaagcattggactgtaa

SEQ ID NO: 27796 - DNA, 27 bp, Homo Sapiens
tggctgagtgaagcattggactgtaaa

SEQ ID NO: 27797 - DNA, 28 bp, Homo Sapiens
tggctgagtgaagcattggactgtaaat

SEQ ID NO: 27798 - DNA, 29 bp, Homo Sapiens
tggctgagtgaagcattggactgtaaatc

SEQ ID NO: 27799 - DNA, 32 bp, Homo Sapiens
tggctgagtgaagcattggactgtaaatctaa

SEQ ID NO: 27800 - DNA, 16 bp, Homo Sapiens
tgggactcttaatccc

SEQ ID NO: 27801 - DNA, 29 bp, Homo Sapiens
tgggactcttaatcccagggtcgtgggtt

SEQ ID NO: 27802 - DNA, 22 bp, Homo Sapiens
tgggcccataacccagaggtcg

SEQ ID NO: 27803 - DNA, 25 bp, Homo Sapiens
tgggcccataacccagaggtcgatg

SEQ ID NO: 27804 - DNA, 27 bp, Homo Sapiens
tgggcccataacccagaggtcgatgga

SEQ ID NO: 27805 - DNA, 28 bp, Homo Sapiens
tgggcccataacccagaggtcgatggat

SEQ ID NO: 27806 - DNA, 30 bp, Homo Sapiens
tgggcccataacccagaggtcgatggatcg

SEQ ID NO: 27807 - DNA, 17 bp, Homo Sapiens
tgggctggtgcccgcgt

SEQ ID NO: 27808 - DNA, 16 bp, Homo Sapiens
tggggattgtgggttc

SEQ ID NO: 27809 - DNA, 17 bp, Homo Sapiens
tggggattgtgggttcg

SEQ ID NO: 27810 - DNA, 22 bp, Homo Sapiens
tggggattgtgggttcgagtcc

SEQ ID NO: 27811 - DNA, 23 bp, Homo Sapiens
tggggattgtgggttcgagtccc

SEQ ID NO: 27812 - DNA, 24 bp, Homo Sapiens
tggggattgtgggttcgagtccca

SEQ ID NO: 27813 - DNA, 26 bp, Homo Sapiens
tggggattgtgggttcgagtcccatc

SEQ ID NO: 27814 - DNA, 30 bp, Homo Sapiens
tggggattgtgggttcgagtcccatctggg

SEQ ID NO: 27815 - DNA, 33 bp, Homo Sapiens
tggggattgtgggttcgagtcccatctgggtcg

SEQ ID NO: 27816 - DNA, 34 bp, Homo Sapiens
tggggattgtgggttcgagtcccatctgggtcgc

SEQ ID NO: 27817 - DNA, 35 bp, Homo Sapiens
tggggattgtgggttcgagtcccatctgggtcgcc

SEQ ID NO: 27818 - DNA, 36 bp, Homo Sapiens
tggggattgtgggttcgagtcccatctgggtcgcca

SEQ ID NO: 27819 - DNA, 18 bp, Homo Sapiens
tggggggttcgattcctt

SEQ ID NO: 27820 - DNA, 29 bp, Homo Sapiens
tggggggttcgattccttccttttttgcc

SEQ ID NO: 27821 - DNA, 21 bp, Homo Sapiens
tggggtctccccgcgcaggtt

SEQ ID NO: 27822 - DNA, 31 bp, Homo Sapiens
tggggtgtgataggtggcacggagaattttg

SEQ ID NO: 27823 - DNA, 41 bp, Homo Sapiens
tggggtttccccgcacaggttcgaatcctgttcgtgacgcc

SEQ ID NO: 27824 - DNA, 20 bp, Homo Sapiens
tggggtttccccgcgcaggt

SEQ ID NO: 27825 - DNA, 21 bp, Homo Sapiens
tggggtttccccgcgcaggtt

SEQ ID NO: 27826 - DNA, 22 bp, Homo Sapiens
tggggtttccccgcgcaggttc

SEQ ID NO: 27827 - DNA, 16 bp, Homo Sapiens
tggggttttgcagtcc

SEQ ID NO: 27828 - DNA, 21 bp, Homo Sapiens
tggggttttgcagtccttacc

SEQ ID NO: 27829 - DNA, 18 bp, Homo Sapiens
tgggtagagcatttgact

SEQ ID NO: 27830 - DNA, 25 bp, Homo Sapiens
tgggtagctcagtcggtagagcatc

SEQ ID NO: 27831 - DNA, 29 bp, Homo Sapiens
tgggtagctcagtcggtagagcatcagac

SEQ ID NO: 27832 - DNA, 30 bp, Homo Sapiens
tgggtagctcagtcggtagagcatcagact

SEQ ID NO: 27833 - DNA, 33 bp, Homo Sapiens
tgggtagctcagtcggtagagcatcagactttt

SEQ ID NO: 27834 - DNA, 37 bp, Homo Sapiens
tgggtccgagaggtcccgggttcaaatcccggacgag

SEQ ID NO: 27835 - DNA, 17 bp, Homo Sapiens
tgggtgcgagaggtccc

SEQ ID NO: 27836 - DNA, 18 bp, Homo Sapiens
tgggtgcgagaggtcccg

SEQ ID NO: 27837 - DNA, 21 bp, Homo Sapiens
tgggtgctaatggtggagtta

SEQ ID NO: 27838 - DNA, 22 bp, Homo Sapiens
tgggtgctaatggtggagttaa

SEQ ID NO: 27839 - DNA, 23 bp, Homo Sapiens
tgggtgctaatggtggagttaaa

SEQ ID NO: 27840 - DNA, 24 bp, Homo Sapiens
tgggtgctaatggtggagttaaag

SEQ ID NO: 27841 - DNA, 26 bp, Homo Sapiens
tgggtgctaatggtggagttaaagac

SEQ ID NO: 27842 - DNA, 29 bp, Homo Sapiens
tgggtgctaatggtggagttaaagacttt

SEQ ID NO: 27843 - DNA, 38 bp, Homo Sapiens
tgggtgctaatggtggagttaaagactttttctctgac

SEQ ID NO: 27844 - DNA, 39 bp, Homo Sapiens
tgggtgctaatggtggagttaaagactttttctctgacc

SEQ ID NO: 27845 - DNA, 16 bp, Homo Sapiens
tgggtggttcagtggt

SEQ ID NO: 27846 - DNA, 17 bp, Homo Sapiens
tgggtggttcagtggta

SEQ ID NO: 27847 - DNA, 18 bp, Homo Sapiens
tgggtggttcagtggtag

SEQ ID NO: 27848 - DNA, 19 bp, Homo Sapiens
tgggtggttcagtggtaga

SEQ ID NO: 27849 - DNA, 20 bp, Homo Sapiens
tgggtggttcagtggtagaa

SEQ ID NO: 27850 - DNA, 21 bp, Homo Sapiens
tgggtggttcagtggtagaat

SEQ ID NO: 27851 - DNA, 22 bp, Homo Sapiens
tgggtggttcagtggtagaatt

SEQ ID NO: 27852 - DNA, 23 bp, Homo Sapiens
tgggtggttcagtggtagaattc

SEQ ID NO: 27853 - DNA, 24 bp, Homo Sapiens
tgggtggttcagtggtagaattct

SEQ ID NO: 27854 - DNA, 25 bp, Homo Sapiens
tgggtggttcagtggtagaattctc

SEQ ID NO: 27855 - DNA, 26 bp, Homo Sapiens
tgggtggttcagtggtagaattctcg

SEQ ID NO: 27856 - DNA, 27 bp, Homo Sapiens
tgggtggttcagtggtagaattctcgc

SEQ ID NO: 27857 - DNA, 28 bp, Homo Sapiens
tgggtggttcagtggtagaattctcgcc

SEQ ID NO: 27858 - DNA, 29 bp, Homo Sapiens
tgggtggttcagtggtagaattctcgcct

SEQ ID NO: 27859 - DNA, 30 bp, Homo Sapiens
tgggtggttcagtggtagaattctcgcctg

SEQ ID NO: 27860 - DNA, 31 bp, Homo Sapiens
tgggtggttcagtggtagaattctcgcctgc

SEQ ID NO: 27861 - DNA, 32 bp, Homo Sapiens
tgggtggttcagtggtagaattctcgcctgcc

SEQ ID NO: 27862 - DNA, 33 bp, Homo Sapiens
tgggtggttcagtggtagaattctcgcctgcca

SEQ ID NO: 27863 - DNA, 34 bp, Homo Sapiens
tgggtggttcagtggtagaattctcgcctgccac

SEQ ID NO: 27864 - DNA, 35 bp, Homo Sapiens
tgggtggttcagtggtagaattctcgcctgccacg

SEQ ID NO: 27865 - DNA, 38 bp, Homo Sapiens
tgggtggttcagtggtagaattctcgcctgccacgcgg

SEQ ID NO: 27866 - DNA, 40 bp, Homo Sapiens
tgggtggttcagtggtagaattctcgcctgccacgcggga

SEQ ID NO: 27867 - DNA, 41 bp, Homo Sapiens
tgggtggttcagtggtagaattctcgcctgccacgcgggag

SEQ ID NO: 27868 - DNA, 26 bp, Homo Sapiens
tgggttcgaatcccaccttcgtcgcc

SEQ ID NO: 27869 - DNA, 26 bp, Homo Sapiens
tgggttcgaatcccacttctgacacc

SEQ ID NO: 27870 - DNA, 22 bp, Homo Sapiens
tgggttcgaatcccagcggggc

SEQ ID NO: 27871 - DNA, 25 bp, Homo Sapiens
tgggttcgaatcccagcggggcctc

SEQ ID NO: 27872 - DNA, 26 bp, Homo Sapiens
tgggttcgaatcccagcggggcctcc

SEQ ID NO: 27873 - DNA, 21 bp, Homo Sapiens
tgggttcgaatcccagcggtg

SEQ ID NO: 27874 - DNA, 23 bp, Homo Sapiens
tgggttcgaatcccagcggtgcc

SEQ ID NO: 27875 - DNA, 24 bp, Homo Sapiens
tgggttcgaatcccagcggtgcct

SEQ ID NO: 27876 - DNA, 25 bp, Homo Sapiens
tgggttcgaatcccagcggtgcctc

SEQ ID NO: 27877 - DNA, 26 bp, Homo Sapiens
tgggttcgaatcccagcggtgcctcc

SEQ ID NO: 27878 - DNA, 25 bp, Homo Sapiens
tgggttcgaatcccatcctcgtcgc

SEQ ID NO: 27879 - DNA, 26 bp, Homo Sapiens
tgggttcgaatcccatcctcgtcgcc

SEQ ID NO: 27880 - DNA, 27 bp, Homo Sapiens
tgggttcgaatcccatcctcgtcgcca

SEQ ID NO: 27881 - DNA, 23 bp, Homo Sapiens
tgggttcgagccccacgttgggc

SEQ ID NO: 27882 - DNA, 24 bp, Homo Sapiens
tgggttcgagccccacgttgggcg

SEQ ID NO: 27883 - DNA, 25 bp, Homo Sapiens
tgggttcgagccccacgttgggcgc

SEQ ID NO: 27884 - DNA, 27 bp, Homo Sapiens
tgggttcgagccccacgttgggcgcca

SEQ ID NO: 27885 - DNA, 23 bp, Homo Sapiens
tgggttcgagccccagtggaacc

SEQ ID NO: 27886 - DNA, 26 bp, Homo Sapiens
tgggttcgagccccagtggaaccacc

SEQ ID NO: 27887 - DNA, 25 bp, Homo Sapiens
tgggttcgagtcccatctgggtcgc

SEQ ID NO: 27888 - DNA, 24 bp, Homo Sapiens
tgggttcgattctcatagtcctag

SEQ ID NO: 27889 - DNA, 25 bp, Homo Sapiens
tgggttcgattctcatagtcctagc

SEQ ID NO: 27890 - DNA, 26 bp, Homo Sapiens
tgggttcgattctcatagtcctagcc

SEQ ID NO: 27891 - DNA, 27 bp, Homo Sapiens
tgggttcgattctcatagtcctagcca

SEQ ID NO: 27892 - DNA, 21 bp, Homo Sapiens
tgggtttaagtcccattggtc

SEQ ID NO: 27893 - DNA, 22 bp, Homo Sapiens
tgggtttaagtcccattggtct

SEQ ID NO: 27894 - DNA, 23 bp, Homo Sapiens
tgggtttaagtcccattggtcta

SEQ ID NO: 27895 - DNA, 24 bp, Homo Sapiens
tgggtttaagtcccattggtctag

SEQ ID NO: 27896 - DNA, 25 bp, Homo Sapiens
tgggtttaagtcccattggtctagc

SEQ ID NO: 27897 - DNA, 26 bp, Homo Sapiens
tgggtttaagtcccattggtctagcc

SEQ ID NO: 27898 - DNA, 23 bp, Homo Sapiens
tggtaagcactctggactctgaa

SEQ ID NO: 27899 - DNA, 25 bp, Homo Sapiens
tggtaagcactctggactctgaatc

SEQ ID NO: 27900 - DNA, 17 bp, Homo Sapiens
tggtaagcatagctgcc

SEQ ID NO: 27901 - DNA, 16 bp, Homo Sapiens
tggtagaattctcgcc

SEQ ID NO: 27902 - DNA, 17 bp, Homo Sapiens
tggtagaattctcgcct

SEQ ID NO: 27903 - DNA, 19 bp, Homo Sapiens
tggtagaattctcgcctcc

SEQ ID NO: 27904 - DNA, 35 bp, Homo Sapiens
tggtagaattctcgcctcccacgcgggagacccgg

SEQ ID NO: 27905 - DNA, 18 bp, Homo Sapiens
tggtagaattctcgcctg

SEQ ID NO: 27906 - DNA, 19 bp, Homo Sapiens
tggtagaattctcgcctgc

SEQ ID NO: 27907 - DNA, 20 bp, Homo Sapiens
tggtagaattctcgcctgcc

SEQ ID NO: 27908 - DNA, 21 bp, Homo Sapiens
tggtagaattctcgcctgcca

SEQ ID NO: 27909 - DNA, 22 bp, Homo Sapiens
tggtagaattctcgcctgccac

SEQ ID NO: 27910 - DNA, 23 bp, Homo Sapiens
tggtagaattctcgcctgccacg

SEQ ID NO: 27911 - DNA, 24 bp, Homo Sapiens
tggtagaattctcgcctgccacgc

SEQ ID NO: 27912 - DNA, 25 bp, Homo Sapiens
tggtagaattctcgcctgccacgcg

SEQ ID NO: 27913 - DNA, 26 bp, Homo Sapiens
tggtagaattctcgcctgccacgcgg

SEQ ID NO: 27914 - DNA, 27 bp, Homo Sapiens
tggtagaattctcgcctgccacgcggg

SEQ ID NO: 27915 - DNA, 28 bp, Homo Sapiens
tggtagaattctcgcctgccacgcggga

SEQ ID NO: 27916 - DNA, 29 bp, Homo Sapiens
tggtagaattctcgcctgccacgcgggag

SEQ ID NO: 27917 - DNA, 30 bp, Homo Sapiens
tggtagaattctcgcctgccacgcgggagg

SEQ ID NO: 27918 - DNA, 31 bp, Homo Sapiens
tggtagaattctcgcctgccacgcgggaggc

SEQ ID NO: 27919 - DNA, 32 bp, Homo Sapiens
tggtagaattctcgcctgccacgcgggaggcc

SEQ ID NO: 27920 - DNA, 33 bp, Homo Sapiens
tggtagaattctcgcctgccacgcgggaggccc

SEQ ID NO: 27921 - DNA, 34 bp, Homo Sapiens
tggtagaattctcgcctgccacgcgggaggcccg

SEQ ID NO: 27922 - DNA, 35 bp, Homo Sapiens
tggtagaattctcgcctgccacgcgggaggcccgg

SEQ ID NO: 27923 - DNA, 36 bp, Homo Sapiens
tggtagaattctcgcctgccacgcgggaggcccggg

SEQ ID NO: 27924 - DNA, 37 bp, Homo Sapiens
tggtagaattctcgcctgccacgcgggaggcccgggt

SEQ ID NO: 27925 - DNA, 38 bp, Homo Sapiens
tggtagaattctcgcctgccacgcgggaggcccgggtt

SEQ ID NO: 27926 - DNA, 39 bp, Homo Sapiens
tggtagaattctcgcctgccacgcgggaggcccgggttc

SEQ ID NO: 27927 - DNA, 39 bp, Homo Sapiens
tggtagaattctcgcctgccacgcgggaggcccgggttt

SEQ ID NO: 27928 - DNA, 20 bp, Homo Sapiens
tggtagaattcttgcctgcc

SEQ ID NO: 27929 - DNA, 16 bp, Homo Sapiens
tggtagagcatcagac

SEQ ID NO: 27930 - DNA, 17 bp, Homo Sapiens
tggtagagcatcagact

SEQ ID NO: 27931 - DNA, 25 bp, Homo Sapiens
tggtagagcatgggactcttaatcc

SEQ ID NO: 27932 - DNA, 16 bp, Homo Sapiens
tggtagagcatttgac

SEQ ID NO: 27933 - DNA, 17 bp, Homo Sapiens
tggtagagcatttgact

SEQ ID NO: 27934 - DNA, 18 bp, Homo Sapiens
tggtagagcatttgactg

SEQ ID NO: 27935 - DNA, 19 bp, Homo Sapiens
tggtagagcatttgactgc

SEQ ID NO: 27936 - DNA, 20 bp, Homo Sapiens
tggtagagcatttgactgca

SEQ ID NO: 27937 - DNA, 27 bp, Homo Sapiens
tggtagagcatttgactgcagatcaag

SEQ ID NO: 27938 - DNA, 34 bp, Homo Sapiens
tggtagagcatttgactgcagatcaagaggtccc

SEQ ID NO: 27939 - DNA, 16 bp, Homo Sapiens
tggtagagcgcatgct

SEQ ID NO: 27940 - DNA, 17 bp, Homo Sapiens
tggtagagcgcatgctt

SEQ ID NO: 27941 - DNA, 16 bp, Homo Sapiens
tggtagagcgcgtgct

SEQ ID NO: 27942 - DNA, 17 bp, Homo Sapiens
tggtagagcgcgtgctt

SEQ ID NO: 27943 - DNA, 18 bp, Homo Sapiens
tggtagagcgcgtgcttc

SEQ ID NO: 27944 - DNA, 21 bp, Homo Sapiens
tggtagagcgcgtgcttcgca

SEQ ID NO: 27945 - DNA, 16 bp, Homo Sapiens
tggtagagcgctcgct

SEQ ID NO: 27946 - DNA, 16 bp, Homo Sapiens
tggtagagcggaggac

SEQ ID NO: 27947 - DNA, 18 bp, Homo Sapiens
tggtagagcggaggactg

SEQ ID NO: 27948 - DNA, 20 bp, Homo Sapiens
tggtagagcggaggactgta

SEQ ID NO: 27949 - DNA, 18 bp, Homo Sapiens
tggtagtctagtggttag

SEQ ID NO: 27950 - DNA, 23 bp, Homo Sapiens
tggtatagtggtaagcatagctg

SEQ ID NO: 27951 - DNA, 25 bp, Homo Sapiens
tggtatagtggtaagcatagctgcc

SEQ ID NO: 27952 - DNA, 18 bp, Homo Sapiens
tggtatagtggtgagcat

SEQ ID NO: 27953 - DNA, 25 bp, Homo Sapiens
tggtatagtggtgagcatagctgcc

SEQ ID NO: 27954 - DNA, 29 bp, Homo Sapiens
tggtatagtggtgagcatagctgccttcc

SEQ ID NO: 27955 - DNA, 33 bp, Homo Sapiens
tggtatagtggtgagcatagctgccttccaagc

SEQ ID NO: 27956 - DNA, 44 bp, Homo Sapiens
tggtatagtggtgagcatagctgccttccaagcagttgacccgg

SEQ ID NO: 27957 - DNA, 16 bp, Homo Sapiens
tggtatagtggttagc

SEQ ID NO: 27958 - DNA, 21 bp, Homo Sapiens
tggtatagtggttagcatagc

SEQ ID NO: 27959 - DNA, 23 bp, Homo Sapiens
tggtatagtggttagcatagctg

SEQ ID NO: 27960 - DNA, 24 bp, Homo Sapiens
tggtatagtggttagcatagctgc

SEQ ID NO: 27961 - DNA, 44 bp, Homo Sapiens
tggtatagtggttagcatagctgccttccaagcagttgacccgg

SEQ ID NO: 27962 - DNA, 35 bp, Homo Sapiens
tggtatatagtttaaacaaaacgaatgatttcgac

SEQ ID NO: 27963 - DNA, 36 bp, Homo Sapiens
tggtatatagtttaaacaaaacgaatgatttcgact

SEQ ID NO: 27964 - DNA, 37 bp, Homo Sapiens
tggtatatagtttaaacaaaacgaatgatttcgactc

SEQ ID NO: 27965 - DNA, 17 bp, Homo Sapiens
tggtatcatgcaagatt

SEQ ID NO: 27966 - DNA, 18 bp, Homo Sapiens
tggtatcatgcaagattc

SEQ ID NO: 27967 - DNA, 19 bp, Homo Sapiens
tggtatcatgcaagattcc

SEQ ID NO: 27968 - DNA, 21 bp, Homo Sapiens
tggtatcatgcaagattccca

SEQ ID NO: 27969 - DNA, 20 bp, Homo Sapiens
tggtatgattctcgctttgg

SEQ ID NO: 27970 - DNA, 16 bp, Homo Sapiens
tggtcatcacgttcgc

SEQ ID NO: 27971 - DNA, 17 bp, Homo Sapiens
tggtcatcacgttcgcc

SEQ ID NO: 27972 - DNA, 16 bp, Homo Sapiens
tggtcgtggttgtagt

SEQ ID NO: 27973 - DNA, 17 bp, Homo Sapiens
tggtcgtggttgtagtc

SEQ ID NO: 27974 - DNA, 18 bp, Homo Sapiens
tggtcgtggttgtagtcc

SEQ ID NO: 27975 - DNA, 19 bp, Homo Sapiens
tggtcgtggttgtagtccg

SEQ ID NO: 27976 - DNA, 20 bp, Homo Sapiens
tggtcgtggttgtagtccgt

SEQ ID NO: 27977 - DNA, 21 bp, Homo Sapiens
tggtcgtggttgtagtccgtg

SEQ ID NO: 27978 - DNA, 22 bp, Homo Sapiens
tggtcgtggttgtagtccgtgc

SEQ ID NO: 27979 - DNA, 23 bp, Homo Sapiens
tggtcgtggttgtagtccgtgcg

SEQ ID NO: 27980 - DNA, 24 bp, Homo Sapiens
tggtcgtggttgtagtccgtgcga

SEQ ID NO: 27981 - DNA, 25 bp, Homo Sapiens
tggtcgtggttgtagtccgtgcgag

SEQ ID NO: 27982 - DNA, 26 bp, Homo Sapiens
tggtcgtggttgtagtccgtgcgaga

SEQ ID NO: 27983 - DNA, 27 bp, Homo Sapiens
tggtcgtggttgtagtccgtgcgagaa

SEQ ID NO: 27984 - DNA, 28 bp, Homo Sapiens
tggtcgtggttgtagtccgtgcgagaat

SEQ ID NO: 27985 - DNA, 29 bp, Homo Sapiens
tggtcgtggttgtagtccgtgcgagaata

SEQ ID NO: 27986 - DNA, 30 bp, Homo Sapiens
tggtcgtggttgtagtccgtgcgagaatac

SEQ ID NO: 27987 - DNA, 31 bp, Homo Sapiens
tggtcgtggttgtagtccgtgcgagaatacc

SEQ ID NO: 27988 - DNA, 32 bp, Homo Sapiens
tggtcgtggttgtagtccgtgcgagaatacca

SEQ ID NO: 27989 - DNA, 16 bp, Homo Sapiens
tggtctaaggcgccag

SEQ ID NO: 27990 - DNA, 17 bp, Homo Sapiens
tggtctaaggcgccaga

SEQ ID NO: 27991 - DNA, 20 bp, Homo Sapiens
tggtctaaggcgccagactc

SEQ ID NO: 27992 - DNA, 17 bp, Homo Sapiens
tggtctaaggcgctgga

SEQ ID NO: 27993 - DNA, 18 bp, Homo Sapiens
tggtctagcggttaggat

SEQ ID NO: 27994 - DNA, 19 bp, Homo Sapiens
tggtctagcggttaggatt

SEQ ID NO: 27995 - DNA, 20 bp, Homo Sapiens
tggtctagcggttaggattc

SEQ ID NO: 27996 - DNA, 21 bp, Homo Sapiens
tggtctagcggttaggattcc

SEQ ID NO: 27997 - DNA, 22 bp, Homo Sapiens
tggtctagcggttaggattcct

SEQ ID NO: 27998 - DNA, 23 bp, Homo Sapiens
tggtctagcggttaggattcctg

SEQ ID NO: 27999 - DNA, 24 bp, Homo Sapiens
tggtctagcggttaggattcctgg

SEQ ID NO: 28000 - DNA, 25 bp, Homo Sapiens
tggtctagcggttaggattcctggt

SEQ ID NO: 28001 - DNA, 26 bp, Homo Sapiens
tggtctagcggttaggattcctggtt

SEQ ID NO: 28002 - DNA, 27 bp, Homo Sapiens
tggtctagcggttaggattcctggttt

SEQ ID NO: 28003 - DNA, 28 bp, Homo Sapiens
tggtctagcggttaggattcctggtttt

SEQ ID NO: 28004 - DNA, 29 bp, Homo Sapiens
tggtctagcggttaggattcctggttttc

SEQ ID NO: 28005 - DNA, 30 bp, Homo Sapiens
tggtctagcggttaggattcctggttttca

SEQ ID NO: 28006 - DNA, 33 bp, Homo Sapiens
tggtctagcggttaggattcctggttttcaccc

SEQ ID NO: 28007 - DNA, 34 bp, Homo Sapiens
tggtctagcggttaggattcctggttttcaccca

SEQ ID NO: 28008 - DNA, 42 bp, Homo Sapiens
tggtctagcggttaggattcctggttttcacccaggtggccc

SEQ ID NO: 28009 - DNA, 44 bp, Homo Sapiens
tggtctagcggttaggattcctggttttcacccaggtggcccgg

SEQ ID NO: 28010 - DNA, 16 bp, Homo Sapiens
tggtctaggggtatga

SEQ ID NO: 28011 - DNA, 19 bp, Homo Sapiens
tggtctaggggtatgattc

SEQ ID NO: 28012 - DNA, 20 bp, Homo Sapiens
tggtctaggggtatgattct

SEQ ID NO: 28013 - DNA, 21 bp, Homo Sapiens
tggtctaggggtatgattctc

SEQ ID NO: 28014 - DNA, 23 bp, Homo Sapiens
tggtctaggggtatgattctcgc

SEQ ID NO: 28015 - DNA, 24 bp, Homo Sapiens
tggtctaggggtatgattctcgct

SEQ ID NO: 28016 - DNA, 25 bp, Homo Sapiens
tggtctaggggtatgattctcgctt

SEQ ID NO: 28017 - DNA, 24 bp, Homo Sapiens
tggtctaggggtatgattctcggt

SEQ ID NO: 28018 - DNA, 28 bp, Homo Sapiens
tggtctaggggtatgattctcggtttgg

SEQ ID NO: 28019 - DNA, 18 bp, Homo Sapiens
tggtctagtggctaggat

SEQ ID NO: 28020 - DNA, 21 bp, Homo Sapiens
tggtctagtggctaggattcg

SEQ ID NO: 28021 - DNA, 23 bp, Homo Sapiens
tggtctagtggctaggattcggc

SEQ ID NO: 28022 - DNA, 24 bp, Homo Sapiens
tggtctagtggctaggattcggcg

SEQ ID NO: 28023 - DNA, 25 bp, Homo Sapiens
tggtctagtggctaggattcggcgc

SEQ ID NO: 28024 - DNA, 26 bp, Homo Sapiens
tggtctagtggctaggattcggcgct

SEQ ID NO: 28025 - DNA, 29 bp, Homo Sapiens
tggtctagtggctaggattcggcgctttc

SEQ ID NO: 28026 - DNA, 17 bp, Homo Sapiens
tggtctagtggttagga

SEQ ID NO: 28027 - DNA, 18 bp, Homo Sapiens
tggtctagtggttaggat

SEQ ID NO: 28028 - DNA, 19 bp, Homo Sapiens
tggtctagtggttaggatt

SEQ ID NO: 28029 - DNA, 20 bp, Homo Sapiens
tggtctagtggttaggattc

SEQ ID NO: 28030 - DNA, 21 bp, Homo Sapiens
tggtctagtggttaggattcg

SEQ ID NO: 28031 - DNA, 22 bp, Homo Sapiens
tggtctagtggttaggattcgg

SEQ ID NO: 28032 - DNA, 23 bp, Homo Sapiens
tggtctagtggttaggattcggc

SEQ ID NO: 28033 - DNA, 24 bp, Homo Sapiens
tggtctagtggttaggattcggcg

SEQ ID NO: 28034 - DNA, 25 bp, Homo Sapiens
tggtctagtggttaggattcggcgc

SEQ ID NO: 28035 - DNA, 26 bp, Homo Sapiens
tggtctagtggttaggattcggcgct

SEQ ID NO: 28036 - DNA, 27 bp, Homo Sapiens
tggtctagtggttaggattcggcgctc

SEQ ID NO: 28037 - DNA, 28 bp, Homo Sapiens
tggtctagtggttaggattcggcgctct

SEQ ID NO: 28038 - DNA, 29 bp, Homo Sapiens
tggtctagtggttaggattcggcgctctc

SEQ ID NO: 28039 - DNA, 30 bp, Homo Sapiens
tggtctagtggttaggattcggcgctctca

SEQ ID NO: 28040 - DNA, 32 bp, Homo Sapiens
tggtctagtggttaggattcggcgctctcacc

SEQ ID NO: 28041 - DNA, 35 bp, Homo Sapiens
tggtctagtggttaggattcggcgctctcaccgcc

SEQ ID NO: 28042 - DNA, 41 bp, Homo Sapiens
tggtctagtggttaggattcggcgctctcaccgccgcggcc

SEQ ID NO: 28043 - DNA, 42 bp, Homo Sapiens
tggtctagtggttaggattcggcgctctcaccgccgcggccc

SEQ ID NO: 28044 - DNA, 44 bp, Homo Sapiens
tggtctagtggttaggattcggcgctctcaccgccgcggcccgg

SEQ ID NO: 28045 - DNA, 45 bp, Homo Sapiens
tggtctagtggttaggattcggcgctctcaccgccgcggcccggg

SEQ ID NO: 28046 - DNA, 46 bp, Homo Sapiens
tggtctagtggttaggattcggcgctctcaccgccgcggcccgggt

SEQ ID NO: 28047 - DNA, 47 bp, Homo Sapiens
tggtctagtggttaggattcggcgctctcaccgccgcggcccgggtt

SEQ ID NO: 28048 - DNA, 48 bp, Homo Sapiens
tggtctagtggttaggattcggcgctctcaccgccgcggcccgggttc

SEQ ID NO: 28049 - DNA, 23 bp, Homo Sapiens
tggtctccaatggaggcgtgggt

SEQ ID NO: 28050 - DNA, 24 bp, Homo Sapiens
tggtctccaatggaggcgtgggtt

SEQ ID NO: 28051 - DNA, 24 bp, Homo Sapiens
tggtctccggatggaggcgtgggt

SEQ ID NO: 28052 - DNA, 25 bp, Homo Sapiens
tggtctccggatggaggcgtgggtt

SEQ ID NO: 28053 - DNA, 45 bp, Homo Sapiens
tggtctccggatggaggcgtgggttcgaatcccacttctgacacc

SEQ ID NO: 28054 - DNA, 16 bp, Homo Sapiens
tggtgagcactctgga

SEQ ID NO: 28055 - DNA, 17 bp, Homo Sapiens
tggtgagcactctggac

SEQ ID NO: 28056 - DNA, 18 bp, Homo Sapiens
tggtgagcactctggact

SEQ ID NO: 28057 - DNA, 21 bp, Homo Sapiens
tggtgagcactctggactctg

SEQ ID NO: 28058 - DNA, 23 bp, Homo Sapiens
tggtgagcactctggactctgaa

SEQ ID NO: 28059 - DNA, 24 bp, Homo Sapiens
tggtgagcactctggactctgaat

SEQ ID NO: 28060 - DNA, 25 bp, Homo Sapiens
tggtgagcactctggactctgaatc

SEQ ID NO: 28061 - DNA, 26 bp, Homo Sapiens
tggtgagcactctggactctgaatcc

SEQ ID NO: 28062 - DNA, 27 bp, Homo Sapiens
tggtgagcactctggactctgaatcca

SEQ ID NO: 28063 - DNA, 28 bp, Homo Sapiens
tggtgagcactctggactctgaatccag

SEQ ID NO: 28064 - DNA, 29 bp, Homo Sapiens
tggtgagcactctggactctgaatccagc

SEQ ID NO: 28065 - DNA, 30 bp, Homo Sapiens
tggtgagcactctggactctgaatccagcg

SEQ ID NO: 28066 - DNA, 38 bp, Homo Sapiens
tggtgagcactctggactctgaatccagcgatccgagt

SEQ ID NO: 28067 - DNA, 41 bp, Homo Sapiens
tggtgagcactctggactctgaatccagcgatccgagttcg

SEQ ID NO: 28068 - DNA, 43 bp, Homo Sapiens
tggtgagcactctggactctgaatccagcgatccgagttcgag

SEQ ID NO: 28069 - DNA, 16 bp, Homo Sapiens
tggtgagcatagctgc

SEQ ID NO: 28070 - DNA, 17 bp, Homo Sapiens
tggtgagcatagctgcc

SEQ ID NO: 28071 - DNA, 16 bp, Homo Sapiens
tggtgagtatccccgc

SEQ ID NO: 28072 - DNA, 18 bp, Homo Sapiens
tggtgagtatccccgcct

SEQ ID NO: 28073 - DNA, 20 bp, Homo Sapiens
tggtgagtatccccgcctgt

SEQ ID NO: 28074 - DNA, 21 bp, Homo Sapiens
tggtgagtatccccgcctgtc

SEQ ID NO: 28075 - DNA, 20 bp, Homo Sapiens
tggtgcaactccaaataaaa

SEQ ID NO: 28076 - DNA, 21 bp, Homo Sapiens
tggtgcaactccaaataaaag

SEQ ID NO: 28077 - DNA, 22 bp, Homo Sapiens
tggtgcaactccaaataaaagt

SEQ ID NO: 28078 - DNA, 23 bp, Homo Sapiens
tggtgcaactccaaataaaagta

SEQ ID NO: 28079 - DNA, 24 bp, Homo Sapiens
tggtgcaactccaaataaaagtac

SEQ ID NO: 28080 - DNA, 25 bp, Homo Sapiens
tggtgcaactccaaataaaagtacc

SEQ ID NO: 28081 - DNA, 26 bp, Homo Sapiens
tggtgcaactccaaataaaagtacca

SEQ ID NO: 28082 - DNA, 29 bp, Homo Sapiens
tggtgctaataacgccaaggtcgcgggtt

SEQ ID NO: 28083 - DNA, 16 bp, Homo Sapiens
tggtggagttaaagac

SEQ ID NO: 28084 - DNA, 17 bp, Homo Sapiens
tggtggagttaaagact

SEQ ID NO: 28085 - DNA, 18 bp, Homo Sapiens
tggtggagttaaagactt

SEQ ID NO: 28086 - DNA, 19 bp, Homo Sapiens
tggtggagttaaagacttt

SEQ ID NO: 28087 - DNA, 20 bp, Homo Sapiens
tggtggagttaaagactttt

SEQ ID NO: 28088 - DNA, 21 bp, Homo Sapiens
tggtggagttaaagacttttt

SEQ ID NO: 28089 - DNA, 24 bp, Homo Sapiens
tggtggagttaaagactttttctc

SEQ ID NO: 28090 - DNA, 25 bp, Homo Sapiens
tggtggagttaaagactttttctct

SEQ ID NO: 28091 - DNA, 26 bp, Homo Sapiens
tggtggagttaaagactttttctctg

SEQ ID NO: 28092 - DNA, 27 bp, Homo Sapiens
tggtggagttaaagactttttctctga

SEQ ID NO: 28093 - DNA, 28 bp, Homo Sapiens
tggtggagttaaagactttttctctgac

SEQ ID NO: 28094 - DNA, 29 bp, Homo Sapiens
tggtggagttaaagactttttctctgacc

SEQ ID NO: 28095 - DNA, 30 bp, Homo Sapiens
tggtggagttaaagactttttctctgacca

SEQ ID NO: 28096 - DNA, 26 bp, Homo Sapiens
tggtggtatagtggtaagcatagctg

SEQ ID NO: 28097 - DNA, 24 bp, Homo Sapiens
tggtggtatagtggtgagcatagc

SEQ ID NO: 28098 - DNA, 25 bp, Homo Sapiens
tggtggtatagtggtgagcatagct

SEQ ID NO: 28099 - DNA, 27 bp, Homo Sapiens
tggtggtatagtggtgagcatagctgc

SEQ ID NO: 28100 - DNA, 28 bp, Homo Sapiens
tggtggtatagtggtgagcatagctgcc

SEQ ID NO: 28101 - DNA, 47 bp, Homo Sapiens
tggtggtatagtggtgagcatagctgccttccaagcagttgacccgg

SEQ ID NO: 28102 - DNA, 24 bp, Homo Sapiens
tggtggtatagtggttagcatagc

SEQ ID NO: 28103 - DNA, 25 bp, Homo Sapiens
tggtggtatagtggttagcatagct

SEQ ID NO: 28104 - DNA, 27 bp, Homo Sapiens
tggtggtatagtggttagcatagctgc

SEQ ID NO: 28105 - DNA, 28 bp, Homo Sapiens
tggtggtatagtggttagcatagctgcc

SEQ ID NO: 28106 - DNA, 16 bp, Homo Sapiens
tggtggtctagtggct

SEQ ID NO: 28107 - DNA, 21 bp, Homo Sapiens
tggtggtctagtggctaggat

SEQ ID NO: 28108 - DNA, 22 bp, Homo Sapiens
tggtggtctagtggctaggatt

SEQ ID NO: 28109 - DNA, 23 bp, Homo Sapiens
tggtggtctagtggctaggattc

SEQ ID NO: 28110 - DNA, 24 bp, Homo Sapiens
tggtggtctagtggctaggattcg

SEQ ID NO: 28111 - DNA, 25 bp, Homo Sapiens
tggtggtctagtggctaggattcgg

SEQ ID NO: 28112 - DNA, 26 bp, Homo Sapiens
tggtggtctagtggctaggattcggc

SEQ ID NO: 28113 - DNA, 27 bp, Homo Sapiens
tggtggtctagtggctaggattcggcg

SEQ ID NO: 28114 - DNA, 28 bp, Homo Sapiens
tggtggtctagtggctaggattcggcgc

SEQ ID NO: 28115 - DNA, 29 bp, Homo Sapiens
tggtggtctagtggctaggattcggcgct

SEQ ID NO: 28116 - DNA, 30 bp, Homo Sapiens
tggtggtctagtggctaggattcggcgctt

SEQ ID NO: 28117 - DNA, 31 bp, Homo Sapiens
tggtggtctagtggctaggattcggcgcttt

SEQ ID NO: 28118 - DNA, 32 bp, Homo Sapiens
tggtggtctagtggctaggattcggcgctttc

SEQ ID NO: 28119 - DNA, 33 bp, Homo Sapiens
tggtggtctagtggctaggattcggcgctttca

SEQ ID NO: 28120 - DNA, 35 bp, Homo Sapiens
tggtggtctagtggctaggattcggcgctttcacc

SEQ ID NO: 28121 - DNA, 18 bp, Homo Sapiens
tggtggtctagtggttag

SEQ ID NO: 28122 - DNA, 19 bp, Homo Sapiens
tggtggtctagtggttagg

SEQ ID NO: 28123 - DNA, 20 bp, Homo Sapiens
tggtggtctagtggttagga

SEQ ID NO: 28124 - DNA, 21 bp, Homo Sapiens
tggtggtctagtggttaggat

SEQ ID NO: 28125 - DNA, 22 bp, Homo Sapiens
tggtggtctagtggttaggatt

SEQ ID NO: 28126 - DNA, 23 bp, Homo Sapiens
tggtggtctagtggttaggattc

SEQ ID NO: 28127 - DNA, 24 bp, Homo Sapiens
tggtggtctagtggttaggattcg

SEQ ID NO: 28128 - DNA, 25 bp, Homo Sapiens
tggtggtctagtggttaggattcgg

SEQ ID NO: 28129 - DNA, 26 bp, Homo Sapiens
tggtggtctagtggttaggattcggc

SEQ ID NO: 28130 - DNA, 27 bp, Homo Sapiens
tggtggtctagtggttaggattcggcg

SEQ ID NO: 28131 - DNA, 28 bp, Homo Sapiens
tggtggtctagtggttaggattcggcgc

SEQ ID NO: 28132 - DNA, 29 bp, Homo Sapiens
tggtggtctagtggttaggattcggcgct

SEQ ID NO: 28133 - DNA, 30 bp, Homo Sapiens
tggtggtctagtggttaggattcggcgctc

SEQ ID NO: 28134 - DNA, 31 bp, Homo Sapiens
tggtggtctagtggttaggattcggcgctct

SEQ ID NO: 28135 - DNA, 32 bp, Homo Sapiens
tggtggtctagtggttaggattcggcgctctc

SEQ ID NO: 28136 - DNA, 33 bp, Homo Sapiens
tggtggtctagtggttaggattcggcgctctca

SEQ ID NO: 28137 - DNA, 34 bp, Homo Sapiens
tggtggtctagtggttaggattcggcgctctcac

SEQ ID NO: 28138 - DNA, 35 bp, Homo Sapiens
tggtggtctagtggttaggattcggcgctctcacc

SEQ ID NO: 28139 - DNA, 36 bp, Homo Sapiens
tggtggtctagtggttaggattcggcgctctcaccg

SEQ ID NO: 28140 - DNA, 38 bp, Homo Sapiens
tggtggtctagtggttaggattcggcgctctcaccgcc

SEQ ID NO: 28141 - DNA, 45 bp, Homo Sapiens
tggtggtctagtggttaggattcggcgctctcaccgccgcggccc

SEQ ID NO: 28142 - DNA, 47 bp, Homo Sapiens
tggtggtctagtggttaggattcggcgctctcaccgccgcggcccgg

SEQ ID NO: 28143 - DNA, 28 bp, Homo Sapiens
tggtggttcaatggtagaattctcgcct

SEQ ID NO: 28144 - DNA, 16 bp, Homo Sapiens
tggtggttcagtggta

SEQ ID NO: 28145 - DNA, 17 bp, Homo Sapiens
tggtggttcagtggtag

SEQ ID NO: 28146 - DNA, 19 bp, Homo Sapiens
tggtggttcagtggtagaa

SEQ ID NO: 28147 - DNA, 20 bp, Homo Sapiens
tggtggttcagtggtagaat

SEQ ID NO: 28148 - DNA, 21 bp, Homo Sapiens
tggtggttcagtggtagaatt

SEQ ID NO: 28149 - DNA, 22 bp, Homo Sapiens
tggtggttcagtggtagaattc

SEQ ID NO: 28150 - DNA, 23 bp, Homo Sapiens
tggtggttcagtggtagaattct

SEQ ID NO: 28151 - DNA, 24 bp, Homo Sapiens
tggtggttcagtggtagaattctc

SEQ ID NO: 28152 - DNA, 25 bp, Homo Sapiens
tggtggttcagtggtagaattctcg

SEQ ID NO: 28153 - DNA, 26 bp, Homo Sapiens
tggtggttcagtggtagaattctcgc

SEQ ID NO: 28154 - DNA, 27 bp, Homo Sapiens
tggtggttcagtggtagaattctcgcc

SEQ ID NO: 28155 - DNA, 28 bp, Homo Sapiens
tggtggttcagtggtagaattctcgcct

SEQ ID NO: 28156 - DNA, 29 bp, Homo Sapiens
tggtggttcagtggtagaattctcgcctc

SEQ ID NO: 28157 - DNA, 31 bp, Homo Sapiens
tggtggttcagtggtagaattctcgcctccc

SEQ ID NO: 28158 - DNA, 29 bp, Homo Sapiens
tggtggttcagtggtagaattctcgcctg

SEQ ID NO: 28159 - DNA, 30 bp, Homo Sapiens
tggtggttcagtggtagaattctcgcctgc

SEQ ID NO: 28160 - DNA, 31 bp, Homo Sapiens
tggtggttcagtggtagaattctcgcctgcc

SEQ ID NO: 28161 - DNA, 32 bp, Homo Sapiens
tggtggttcagtggtagaattctcgcctgcca

SEQ ID NO: 28162 - DNA, 44 bp, Homo Sapiens
tggtggttcagtggtagaattctcgcctgccacgcgggaggccc

SEQ ID NO: 28163 - DNA, 46 bp, Homo Sapiens
tggtggttcagtggtagaattctcgcctgccacgcgggaggcccgg

SEQ ID NO: 28164 - DNA, 25 bp, Homo Sapiens
tggtggttcgagcccacccagggac

SEQ ID NO: 28165 - DNA, 26 bp, Homo Sapiens
tggtggttcgagcccacccagggacg

SEQ ID NO: 28166 - DNA, 27 bp, Homo Sapiens
tggtggttcgagcccacccagggacgc

SEQ ID NO: 28167 - DNA, 28 bp, Homo Sapiens
tggtggttcgagcccacccagggacgcc

SEQ ID NO: 28168 - DNA, 29 bp, Homo Sapiens
tggtggttcgagcccacccagggacgcca

SEQ ID NO: 28169 - DNA, 25 bp, Homo Sapiens
tggtggttcgatcccacccagggac

SEQ ID NO: 28170 - DNA, 26 bp, Homo Sapiens
tggtggttcgatcccacccagggacg

SEQ ID NO: 28171 - DNA, 28 bp, Homo Sapiens
tggtggttcgatcccacccagggacgcc

SEQ ID NO: 28172 - DNA, 26 bp, Homo Sapiens
tggtgtaatggtaagcactctggact

SEQ ID NO: 28173 - DNA, 16 bp, Homo Sapiens
tggtgtaatggtgagc

SEQ ID NO: 28174 - DNA, 26 bp, Homo Sapiens
tggtgtaatggtgagcactctggact

SEQ ID NO: 28175 - DNA, 27 bp, Homo Sapiens
tggtgtaatggtgagcactctggactc

SEQ ID NO: 28176 - DNA, 28 bp, Homo Sapiens
tggtgtaatggtgagcactctggactct

SEQ ID NO: 28177 - DNA, 31 bp, Homo Sapiens
tggtgtaatggtgagcactctggactctgaa

SEQ ID NO: 28178 - DNA, 33 bp, Homo Sapiens
tggtgtaatggtgagcactctggactctgaatc

SEQ ID NO: 28179 - DNA, 34 bp, Homo Sapiens
tggtgtaatggtgagcactctggactctgaatcc

SEQ ID NO: 28180 - DNA, 45 bp, Homo Sapiens
tggtgtaatggtgagcactctggactctgaatccagcgatccgag

SEQ ID NO: 28181 - DNA, 16 bp, Homo Sapiens
tggtgtaatggttagc

SEQ ID NO: 28182 - DNA, 17 bp, Homo Sapiens
tggtgtaatggttagca

SEQ ID NO: 28183 - DNA, 20 bp, Homo Sapiens
tggtgtaatggttagcactc

SEQ ID NO: 28184 - DNA, 21 bp, Homo Sapiens
tggtgtaatggttagcactct

SEQ ID NO: 28185 - DNA, 22 bp, Homo Sapiens
tggtgtaatggttagcactctg

SEQ ID NO: 28186 - DNA, 23 bp, Homo Sapiens
tggtgtaatggttagcactctgg

SEQ ID NO: 28187 - DNA, 24 bp, Homo Sapiens
tggtgtaatggttagcactctgga

SEQ ID NO: 28188 - DNA, 25 bp, Homo Sapiens
tggtgtaatggttagcactctggac

SEQ ID NO: 28189 - DNA, 26 bp, Homo Sapiens
tggtgtaatggttagcactctggact

SEQ ID NO: 28190 - DNA, 27 bp, Homo Sapiens
tggtgtaatggttagcactctggactc

SEQ ID NO: 28191 - DNA, 28 bp, Homo Sapiens
tggtgtaatggttagcactctggactct

SEQ ID NO: 28192 - DNA, 29 bp, Homo Sapiens
tggtgtaatggttagcactctggactctg

SEQ ID NO: 28193 - DNA, 30 bp, Homo Sapiens
tggtgtaatggttagcactctggactctga

SEQ ID NO: 28194 - DNA, 31 bp, Homo Sapiens
tggtgtaatggttagcactctggactctgaa

SEQ ID NO: 28195 - DNA, 33 bp, Homo Sapiens
tggtgtaatggttagcactctggactctgaatc

SEQ ID NO: 28196 - DNA, 34 bp, Homo Sapiens
tggtgtaatggttagcactctggactctgaatcc

SEQ ID NO: 28197 - DNA, 35 bp, Homo Sapiens
tggtgtaatggttagcactctggactctgaatcca

SEQ ID NO: 28198 - DNA, 44 bp, Homo Sapiens
tggtgtaatggttagcactctggactctgaatccagcgatccga

SEQ ID NO: 28199 - DNA, 45 bp, Homo Sapiens
tggtgtaatggttagcactctggactctgaatccagcgatccgag

SEQ ID NO: 28200 - DNA, 46 bp, Homo Sapiens
tggtgtaatggttagcactctggactctgaatccagcgatccgagt

SEQ ID NO: 28201 - DNA, 47 bp, Homo Sapiens
tggtgtaatggttagcactctggactctgaatccagcgatccgagtt

SEQ ID NO: 28202 - DNA, 29 bp, Homo Sapiens
tggtgtaatggttagcactctggactttg

SEQ ID NO: 28203 - DNA, 32 bp, Homo Sapiens
tggtgtaatggttagcactctggactttgaat

SEQ ID NO: 28204 - DNA, 33 bp, Homo Sapiens
tggtgtaatggttagcactctggactttgaatc

SEQ ID NO: 28205 - DNA, 16 bp, Homo Sapiens
tggtgtagtggtatca

SEQ ID NO: 28206 - DNA, 19 bp, Homo Sapiens
tggtgtagtggtatcatgc

SEQ ID NO: 28207 - DNA, 20 bp, Homo Sapiens
tggtgtagtggtatcatgca

SEQ ID NO: 28208 - DNA, 22 bp, Homo Sapiens
tggtgtagtggtatcatgcaag

SEQ ID NO: 28209 - DNA, 23 bp, Homo Sapiens
tggtgtagtggtatcatgcaaga

SEQ ID NO: 28210 - DNA, 25 bp, Homo Sapiens
tggtgtagtggtatcatgcaagatt

SEQ ID NO: 28211 - DNA, 26 bp, Homo Sapiens
tggtgtagtggtatcatgcaagattc

SEQ ID NO: 28212 - DNA, 27 bp, Homo Sapiens
tggtgtagtggtatcatgcaagattcc

SEQ ID NO: 28213 - DNA, 28 bp, Homo Sapiens
tggtgtagtggtatcatgcaagattccc

SEQ ID NO: 28214 - DNA, 32 bp, Homo Sapiens
tggtgtagtggtatcatgcaagattcccattc

SEQ ID NO: 28215 - DNA, 41 bp, Homo Sapiens
tggtgtagtggtatcatgcaagattcccattcttgcgaccc

SEQ ID NO: 28216 - DNA, 42 bp, Homo Sapiens
tggtgtagtggtatcatgcaagattcccattcttgcgacccg

SEQ ID NO: 28217 - DNA, 43 bp, Homo Sapiens
tggtgtagtggtatcatgcaagattcccattcttgcgacccgg

SEQ ID NO: 28218 - DNA, 44 bp, Homo Sapiens
tggtgtagtggtatcatgcaagattcccattcttgcgacccggg

SEQ ID NO: 28219 - DNA, 45 bp, Homo Sapiens
tggtgtagtggtatcatgcaagattcccattcttgcgacccgggt

SEQ ID NO: 28220 - DNA, 16 bp, Homo Sapiens
tggttaaggcattgga

SEQ ID NO: 28221 - DNA, 17 bp, Homo Sapiens
tggttaaggcattggac

SEQ ID NO: 28222 - DNA, 17 bp, Homo Sapiens
tggttaaggcgttggac

SEQ ID NO: 28223 - DNA, 17 bp, Homo Sapiens
tggttagagcactggtc

SEQ ID NO: 28224 - DNA, 18 bp, Homo Sapiens
tggttagagcactggtct

SEQ ID NO: 28225 - DNA, 19 bp, Homo Sapiens
tggttagagcactggtctt

SEQ ID NO: 28226 - DNA, 16 bp, Homo Sapiens
tggttagcactctgga

SEQ ID NO: 28227 - DNA, 17 bp, Homo Sapiens
tggttagcactctggac

SEQ ID NO: 28228 - DNA, 18 bp, Homo Sapiens
tggttagcactctggact

SEQ ID NO: 28229 - DNA, 19 bp, Homo Sapiens
tggttagcactctggactc

SEQ ID NO: 28230 - DNA, 20 bp, Homo Sapiens
tggttagcactctggactct

SEQ ID NO: 28231 - DNA, 21 bp, Homo Sapiens
tggttagcactctggactctg

SEQ ID NO: 28232 - DNA, 22 bp, Homo Sapiens
tggttagcactctggactctga

SEQ ID NO: 28233 - DNA, 23 bp, Homo Sapiens
tggttagcactctggactctgaa

SEQ ID NO: 28234 - DNA, 24 bp, Homo Sapiens
tggttagcactctggactctgaat

SEQ ID NO: 28235 - DNA, 25 bp, Homo Sapiens
tggttagcactctggactctgaatc

SEQ ID NO: 28236 - DNA, 26 bp, Homo Sapiens
tggttagcactctggactctgaatcc

SEQ ID NO: 28237 - DNA, 27 bp, Homo Sapiens
tggttagcactctggactctgaatcca

SEQ ID NO: 28238 - DNA, 29 bp, Homo Sapiens
tggttagcactctggactctgaatccagc

SEQ ID NO: 28239 - DNA, 30 bp, Homo Sapiens
tggttagcactctggactctgaatccagcg

SEQ ID NO: 28240 - DNA, 34 bp, Homo Sapiens
tggttagcactctggactctgaatccagcgatcc

SEQ ID NO: 28241 - DNA, 36 bp, Homo Sapiens
tggttagcactctggactctgaatccagcgatccga

SEQ ID NO: 28242 - DNA, 37 bp, Homo Sapiens
tggttagcactctggactctgaatccagcgatccgag

SEQ ID NO: 28243 - DNA, 38 bp, Homo Sapiens
tggttagcactctggactctgaatccagcgatccgagt

SEQ ID NO: 28244 - DNA, 39 bp, Homo Sapiens
tggttagcactctggactctgaatccagcgatccgagtt

SEQ ID NO: 28245 - DNA, 40 bp, Homo Sapiens
tggttagcactctggactctgaatccagcgatccgagttc

SEQ ID NO: 28246 - DNA, 41 bp, Homo Sapiens
tggttagcactctggactctgaatccagcgatccgagttca

SEQ ID NO: 28247 - DNA, 21 bp, Homo Sapiens
tggttagcactctggactttg

SEQ ID NO: 28248 - DNA, 22 bp, Homo Sapiens
tggttagcactctggactttga

SEQ ID NO: 28249 - DNA, 23 bp, Homo Sapiens
tggttagcactctggactttgaa

SEQ ID NO: 28250 - DNA, 24 bp, Homo Sapiens
tggttagcactctggactttgaat

SEQ ID NO: 28251 - DNA, 25 bp, Homo Sapiens
tggttagcactctggactttgaatc

SEQ ID NO: 28252 - DNA, 26 bp, Homo Sapiens
tggttagcactctggactttgaatcc

SEQ ID NO: 28253 - DNA, 27 bp, Homo Sapiens
tggttagcactctggactttgaatcca

SEQ ID NO: 28254 - DNA, 29 bp, Homo Sapiens
tggttagcactctggactttgaatccagc

SEQ ID NO: 28255 - DNA, 37 bp, Homo Sapiens
tggttagcactctggactttgaatccagcgatccgag

SEQ ID NO: 28256 - DNA, 38 bp, Homo Sapiens
tggttagcactctggactttgaatccagcgatccgagt

SEQ ID NO: 28257 - DNA, 40 bp, Homo Sapiens
tggttagcactctggactttgaatccagcgatccgagttc

SEQ ID NO: 28258 - DNA, 17 bp, Homo Sapiens
tggttagcatagctgcc

SEQ ID NO: 28259 - DNA, 16 bp, Homo Sapiens
tggttaggattcagcg

SEQ ID NO: 28260 - DNA, 17 bp, Homo Sapiens
tggttaggattcagcgc

SEQ ID NO: 28261 - DNA, 19 bp, Homo Sapiens
tggttaggattcagcgctc

SEQ ID NO: 28262 - DNA, 16 bp, Homo Sapiens
tggttaggattcggcg

SEQ ID NO: 28263 - DNA, 17 bp, Homo Sapiens
tggttaggattcggcgc

SEQ ID NO: 28264 - DNA, 18 bp, Homo Sapiens
tggttaggattcggcgct

SEQ ID NO: 28265 - DNA, 19 bp, Homo Sapiens
tggttaggattcggcgctc

SEQ ID NO: 28266 - DNA, 20 bp, Homo Sapiens
tggttaggattcggcgctct

SEQ ID NO: 28267 - DNA, 21 bp, Homo Sapiens
tggttaggattcggcgctctc

SEQ ID NO: 28268 - DNA, 22 bp, Homo Sapiens
tggttaggattcggcgctctca

SEQ ID NO: 28269 - DNA, 23 bp, Homo Sapiens
tggttaggattcggcgctctcac

SEQ ID NO: 28270 - DNA, 24 bp, Homo Sapiens
tggttaggattcggcgctctcacc

SEQ ID NO: 28271 - DNA, 25 bp, Homo Sapiens
tggttaggattcggcgctctcaccg

SEQ ID NO: 28272 - DNA, 26 bp, Homo Sapiens
tggttaggattcggcgctctcaccgc

SEQ ID NO: 28273 - DNA, 27 bp, Homo Sapiens
tggttaggattcggcgctctcaccgcc

SEQ ID NO: 28274 - DNA, 28 bp, Homo Sapiens
tggttaggattcggcgctctcaccgcca

SEQ ID NO: 28275 - DNA, 28 bp, Homo Sapiens
tggttaggattcggcgctctcaccgccg

SEQ ID NO: 28276 - DNA, 29 bp, Homo Sapiens
tggttaggattcggcgctctcaccgccgc

SEQ ID NO: 28277 - DNA, 30 bp, Homo Sapiens
tggttaggattcggcgctctcaccgccgcg

SEQ ID NO: 28278 - DNA, 32 bp, Homo Sapiens
tggttaggattcggcgctctcaccgccgcggc

SEQ ID NO: 28279 - DNA, 33 bp, Homo Sapiens
tggttaggattcggcgctctcaccgccgcggcc

SEQ ID NO: 28280 - DNA, 34 bp, Homo Sapiens
tggttaggattcggcgctctcaccgccgcggccc

SEQ ID NO: 28281 - DNA, 35 bp, Homo Sapiens
tggttaggattcggcgctctcaccgccgcggcccg

SEQ ID NO: 28282 - DNA, 36 bp, Homo Sapiens
tggttaggattcggcgctctcaccgccgcggcccgg

SEQ ID NO: 28283 - DNA, 37 bp, Homo Sapiens
tggttaggattcggcgctctcaccgccgcggcccggg

SEQ ID NO: 28284 - DNA, 38 bp, Homo Sapiens
tggttaggattcggcgctctcaccgccgcggcccgggt

SEQ ID NO: 28285 - DNA, 39 bp, Homo Sapiens
tggttaggattcggcgctctcaccgccgcggcccgggtt

SEQ ID NO: 28286 - DNA, 40 bp, Homo Sapiens
tggttaggattcggcgctctcaccgccgcggcccgggttc

SEQ ID NO: 28287 - DNA, 44 bp, Homo Sapiens
tggttaggattcggcgctctcaccgccgcggcccgggttcgatt

SEQ ID NO: 28288 - DNA, 16 bp, Homo Sapiens
tggttagtactctgcg

SEQ ID NO: 28289 - DNA, 17 bp, Homo Sapiens
tggttagtactctgcgt

SEQ ID NO: 28290 - DNA, 18 bp, Homo Sapiens
tggttagtactctgcgtt

SEQ ID NO: 28291 - DNA, 19 bp, Homo Sapiens
tggttagtactctgcgttg

SEQ ID NO: 28292 - DNA, 20 bp, Homo Sapiens
tggttagtactctgcgttgt

SEQ ID NO: 28293 - DNA, 21 bp, Homo Sapiens
tggttagtactctgcgttgtg

SEQ ID NO: 28294 - DNA, 23 bp, Homo Sapiens
tggttagtactctgcgttgtggc

SEQ ID NO: 28295 - DNA, 24 bp, Homo Sapiens
tggttagtactctgcgttgtggcc

SEQ ID NO: 28296 - DNA, 25 bp, Homo Sapiens
tggttagtactctgcgttgtggccg

SEQ ID NO: 28297 - DNA, 29 bp, Homo Sapiens
tggttagtactctgcgttgtggccgcagc

SEQ ID NO: 28298 - DNA, 33 bp, Homo Sapiens
tggttagtactctgcgttgtggccgcagcaacc

SEQ ID NO: 28299 - DNA, 34 bp, Homo Sapiens
tggttagtactctgcgttgtggccgcagcaacct

SEQ ID NO: 28300 - DNA, 38 bp, Homo Sapiens
tggttagtactctgcgttgtggccgcagcaacctcggt

SEQ ID NO: 28301 - DNA, 20 bp, Homo Sapiens
tggttagtatccccgcctgt

SEQ ID NO: 28302 - DNA, 23 bp, Homo Sapiens
tggttatacccttcccgtactac

SEQ ID NO: 28303 - DNA, 24 bp, Homo Sapiens
tggttatacccttcccgtactacc

SEQ ID NO: 28304 - DNA, 25 bp, Homo Sapiens
tggttatacccttcccgtactacca

SEQ ID NO: 28305 - DNA, 18 bp, Homo Sapiens
tggttatcacatctgctt

SEQ ID NO: 28306 - DNA, 17 bp, Homo Sapiens
tggttatcacattcgcc

SEQ ID NO: 28307 - DNA, 16 bp, Homo Sapiens
tggttatcacgtctgc

SEQ ID NO: 28308 - DNA, 17 bp, Homo Sapiens
tggttatcacgtctgct

SEQ ID NO: 28309 - DNA, 18 bp, Homo Sapiens
tggttatcacgtctgctt

SEQ ID NO: 28310 - DNA, 19 bp, Homo Sapiens
tggttatcacgtctgcttt

SEQ ID NO: 28311 - DNA, 21 bp, Homo Sapiens
tggttatcacgtctgctttac

SEQ ID NO: 28312 - DNA, 22 bp, Homo Sapiens
tggttatcacgtctgctttaca

SEQ ID NO: 28313 - DNA, 23 bp, Homo Sapiens
tggttatcacgtctgctttacac

SEQ ID NO: 28314 - DNA, 24 bp, Homo Sapiens
tggttatcacgtctgctttacacg

SEQ ID NO: 28315 - DNA, 25 bp, Homo Sapiens
tggttatcacgtctgctttacacgc

SEQ ID NO: 28316 - DNA, 36 bp, Homo Sapiens
tggttatcacgtctgctttacacgcagaaggtcctg

SEQ ID NO: 28317 - DNA, 16 bp, Homo Sapiens
tggttatcacgttcgc

SEQ ID NO: 28318 - DNA, 17 bp, Homo Sapiens
tggttatcacgttcgcc

SEQ ID NO: 28319 - DNA, 18 bp, Homo Sapiens
tggttatcacgttcgcct

SEQ ID NO: 28320 - DNA, 19 bp, Homo Sapiens
tggttatcacgttcgcctc

SEQ ID NO: 28321 - DNA, 20 bp, Homo Sapiens
tggttatcacgttcgcctca

SEQ ID NO: 28322 - DNA, 21 bp, Homo Sapiens
tggttatcacgttcgcctcac

SEQ ID NO: 28323 - DNA, 22 bp, Homo Sapiens
tggttatcacgttcgcctcaca

SEQ ID NO: 28324 - DNA, 25 bp, Homo Sapiens
tggttatcacgttcgcctcacacgc

SEQ ID NO: 28325 - DNA, 28 bp, Homo Sapiens
tggttatcacgttcgcctcacacgcgaa

SEQ ID NO: 28326 - DNA, 23 bp, Homo Sapiens
tggttcaaatccgggtgccccct

SEQ ID NO: 28327 - DNA, 16 bp, Homo Sapiens
tggttcagtggtagaa

SEQ ID NO: 28328 - DNA, 18 bp, Homo Sapiens
tggttcagtggtagaatt

SEQ ID NO: 28329 - DNA, 19 bp, Homo Sapiens
tggttcagtggtagaattc

SEQ ID NO: 28330 - DNA, 20 bp, Homo Sapiens
tggttcagtggtagaattct

SEQ ID NO: 28331 - DNA, 21 bp, Homo Sapiens
tggttcagtggtagaattctc

SEQ ID NO: 28332 - DNA, 23 bp, Homo Sapiens
tggttcagtggtagaattctcgc

SEQ ID NO: 28333 - DNA, 24 bp, Homo Sapiens
tggttcagtggtagaattctcgcc

SEQ ID NO: 28334 - DNA, 25 bp, Homo Sapiens
tggttcagtggtagaattctcgcct

SEQ ID NO: 28335 - DNA, 26 bp, Homo Sapiens
tggttcagtggtagaattctcgcctc

SEQ ID NO: 28336 - DNA, 26 bp, Homo Sapiens
tggttcagtggtagaattctcgcctg

SEQ ID NO: 28337 - DNA, 27 bp, Homo Sapiens
tggttcagtggtagaattctcgcctgc

SEQ ID NO: 28338 - DNA, 28 bp, Homo Sapiens
tggttcagtggtagaattctcgcctgcc

SEQ ID NO: 28339 - DNA, 29 bp, Homo Sapiens
tggttcagtggtagaattctcgcctgcca

SEQ ID NO: 28340 - DNA, 30 bp, Homo Sapiens
tggttcagtggtagaattctcgcctgccac

SEQ ID NO: 28341 - DNA, 31 bp, Homo Sapiens
tggttcagtggtagaattctcgcctgccacg

SEQ ID NO: 28342 - DNA, 32 bp, Homo Sapiens
tggttcagtggtagaattctcgcctgccacgc

SEQ ID NO: 28343 - DNA, 38 bp, Homo Sapiens
tggttcagtggtagaattctcgcctgccacgcgggagg

SEQ ID NO: 28344 - DNA, 40 bp, Homo Sapiens
tggttcagtggtagaattctcgcctgccacgcgggaggcc

SEQ ID NO: 28345 - DNA, 41 bp, Homo Sapiens
tggttcagtggtagaattctcgcctgccacgcgggaggccc

SEQ ID NO: 28346 - DNA, 42 bp, Homo Sapiens
tggttcagtggtagaattctcgcctgccacgcgggaggcccg

SEQ ID NO: 28347 - DNA, 43 bp, Homo Sapiens
tggttcagtggtagaattctcgcctgccacgcgggaggcccgg

SEQ ID NO: 28348 - DNA, 44 bp, Homo Sapiens
tggttcagtggtagaattctcgcctgccacgcgggaggcccggg

SEQ ID NO: 28349 - DNA, 45 bp, Homo Sapiens
tggttcagtggtagaattctcgcctgccacgcgggaggcccgggt

SEQ ID NO: 28350 - DNA, 48 bp, Homo Sapiens
tggttcagtggtagaattctcgcctgccacgcgggaggcccgggttcg

SEQ ID NO: 28351 - DNA, 25 bp, Homo Sapiens
tggttcagtggtagaattcttgcct

SEQ ID NO: 28352 - DNA, 24 bp, Homo Sapiens
tggttcgaatccggctcgaaggac

SEQ ID NO: 28353 - DNA, 25 bp, Homo Sapiens
tggttcgaatccggctcgaaggacc

SEQ ID NO: 28354 - DNA, 20 bp, Homo Sapiens
tggttcgaatccggctcgga

SEQ ID NO: 28355 - DNA, 25 bp, Homo Sapiens
tggttcgaatccggctcggaggacc

SEQ ID NO: 28356 - DNA, 16 bp, Homo Sapiens
tggttcgagcccaccc

SEQ ID NO: 28357 - DNA, 23 bp, Homo Sapiens
tggttcgatcccgggtttcggca

SEQ ID NO: 28358 - DNA, 16 bp, Homo Sapiens
tggttcgattccggct

SEQ ID NO: 28359 - DNA, 23 bp, Homo Sapiens
tggttcgattccggctcgaagga

SEQ ID NO: 28360 - DNA, 24 bp, Homo Sapiens
tggttcgattccggctcgaaggac

SEQ ID NO: 28361 - DNA, 25 bp, Homo Sapiens
tggttcgattccggctcgaaggacc

SEQ ID NO: 28362 - DNA, 26 bp, Homo Sapiens
tggttcgattccggctcgaaggacca

SEQ ID NO: 28363 - DNA, 16 bp, Homo Sapiens
tggttgtagtccgtgc

SEQ ID NO: 28364 - DNA, 17 bp, Homo Sapiens
tggttgtagtccgtgcg

SEQ ID NO: 28365 - DNA, 18 bp, Homo Sapiens
tggttgtagtccgtgcga

SEQ ID NO: 28366 - DNA, 19 bp, Homo Sapiens
tggttgtagtccgtgcgag

SEQ ID NO: 28367 - DNA, 20 bp, Homo Sapiens
tggttgtagtccgtgcgaga

SEQ ID NO: 28368 - DNA, 21 bp, Homo Sapiens
tggttgtagtccgtgcgagaa

SEQ ID NO: 28369 - DNA, 22 bp, Homo Sapiens
tggttgtagtccgtgcgagaat

SEQ ID NO: 28370 - DNA, 23 bp, Homo Sapiens
tggttgtagtccgtgcgagaata

SEQ ID NO: 28371 - DNA, 24 bp, Homo Sapiens
tggttgtagtccgtgcgagaatac

SEQ ID NO: 28372 - DNA, 25 bp, Homo Sapiens
tggttgtagtccgtgcgagaatacc

SEQ ID NO: 28373 - DNA, 26 bp, Homo Sapiens
tggttgtagtccgtgcgagaatacca

SEQ ID NO: 28374 - DNA, 38 bp, Homo Sapiens
tggttttcacccaggcggcccgggttcgactcccggtg

SEQ ID NO: 28375 - DNA, 41 bp, Homo Sapiens
tggttttcacccaggcggcccgggttcgactcccggtgtgg

SEQ ID NO: 28376 - DNA, 45 bp, Homo Sapiens
tggttttcacccaggcggcccgggttcgactcccggtgtgggaac

SEQ ID NO: 28377 - DNA, 46 bp, Homo Sapiens
tggttttcacccaggcggcccgggttcgactcccggtgtgggaacc

SEQ ID NO: 28378 - DNA, 47 bp, Homo Sapiens
tggttttcacccaggcggcccgggttcgactcccggtgtgggaacca

SEQ ID NO: 28379 - DNA, 45 bp, Homo Sapiens
tggttttcacccaggtggcccgggttcgactcccggtatgggaac

SEQ ID NO: 28380 - DNA, 20 bp, Homo Sapiens
tggtttttcatatcattggt

SEQ ID NO: 28381 - DNA, 27 bp, Homo Sapiens
tggtttttcatatcattggtcgtggtt

SEQ ID NO: 28382 - DNA, 28 bp, Homo Sapiens
tggtttttcatatcattggtcgtggttg

SEQ ID NO: 28383 - DNA, 29 bp, Homo Sapiens
tggtttttcatatcattggtcgtggttgt

SEQ ID NO: 28384 - DNA, 30 bp, Homo Sapiens
tggtttttcatatcattggtcgtggttgta

SEQ ID NO: 28385 - DNA, 33 bp, Homo Sapiens
tggtttttcatatcattggtcgtggttgtagtc

SEQ ID NO: 28386 - DNA, 34 bp, Homo Sapiens
tggtttttcatatcattggtcgtggttgtagtcc

SEQ ID NO: 28387 - DNA, 42 bp, Homo Sapiens
tggtttttcatatcattggtcgtggttgtagtccgtgcgaga

SEQ ID NO: 28388 - DNA, 43 bp, Homo Sapiens
tggtttttcatatcattggtcgtggttgtagtccgtgcgagaa

SEQ ID NO: 28389 - DNA, 44 bp, Homo Sapiens
tggtttttcatatcattggtcgtggttgtagtccgtgcgagaat

SEQ ID NO: 28390 - DNA, 45 bp, Homo Sapiens
tggtttttcatatcattggtcgtggttgtagtccgtgcgagaata

SEQ ID NO: 28391 - DNA, 47 bp, Homo Sapiens
tggtttttcatatcattggtcgtggttgtagtccgtgcgagaatacc

SEQ ID NO: 28392 - DNA, 48 bp, Homo Sapiens
tggtttttcatatcattggtcgtggttgtagtccgtgcgagaatacca

SEQ ID NO: 28393 - DNA, 19 bp, Homo Sapiens
tgtaaaccaggggtcgcga

SEQ ID NO: 28394 - DNA, 17 bp, Homo Sapiens
tgtaaaccggagatgaa

SEQ ID NO: 28395 - DNA, 18 bp, Homo Sapiens
tgtaaaccggagatgaaa

SEQ ID NO: 28396 - DNA, 19 bp, Homo Sapiens
tgtaaaccggagatgaaaa

SEQ ID NO: 28397 - DNA, 20 bp, Homo Sapiens
tgtaaaccggagatgaaaac

SEQ ID NO: 28398 - DNA, 21 bp, Homo Sapiens
tgtaaaccggagatgaaaacc

SEQ ID NO: 28399 - DNA, 22 bp, Homo Sapiens
tgtaaaccggagatgaaaacct

SEQ ID NO: 28400 - DNA, 23 bp, Homo Sapiens
tgtaaaccggagatgaaaacctt

SEQ ID NO: 28401 - DNA, 24 bp, Homo Sapiens
tgtaaaccggagatgaaaaccttt

SEQ ID NO: 28402 - DNA, 25 bp, Homo Sapiens
tgtaaaccggagatgaaaacctttt

SEQ ID NO: 28403 - DNA, 26 bp, Homo Sapiens
tgtaaaccggagatgaaaaccttttt

SEQ ID NO: 28404 - DNA, 27 bp, Homo Sapiens
tgtaaaccggagatgaaaacctttttc

SEQ ID NO: 28405 - DNA, 31 bp, Homo Sapiens
tgtaaaccggagatgaaaacctttttccaag

SEQ ID NO: 28406 - DNA, 33 bp, Homo Sapiens
tgtaaaccggagatgaaaacctttttccaagga

SEQ ID NO: 28407 - DNA, 34 bp, Homo Sapiens
tgtaaaccggagatgaaaacctttttccaaggac

SEQ ID NO: 28408 - DNA, 35 bp, Homo Sapiens
tgtaaaccggagatgaaaacctttttccaaggaca

SEQ ID NO: 28409 - DNA, 36 bp, Homo Sapiens
tgtaaaccggagatgaaaacctttttccaaggacac

SEQ ID NO: 28410 - DNA, 37 bp, Homo Sapiens
tgtaaaccggagatgaaaacctttttccaaggacacc

SEQ ID NO: 28411 - DNA, 38 bp, Homo Sapiens
tgtaaaccggagatgaaaacctttttccaaggacacca

SEQ ID NO: 28412 - DNA, 47 bp, Homo Sapiens
tgtaaagctaacttagcattaaccttttaagttaaagattaagagaa

SEQ ID NO: 28413 - DNA, 33 bp, Homo Sapiens
tgtaaatatagtttaaccaaaacatcagattgt

SEQ ID NO: 28414 - DNA, 37 bp, Homo Sapiens
tgtaaatctaaagacaggggttaggcctctttttacc

SEQ ID NO: 28415 - DNA, 40 bp, Homo Sapiens
tgtaaatctaaagacaggggttaggcctctttttaccacc

SEQ ID NO: 28416 - DNA, 41 bp, Homo Sapiens
tgtaaatctaaagacaggggttaggcctctttttaccacca

SEQ ID NO: 28417 - DNA, 26 bp, Homo Sapiens
tgtaatggtaagcactctggactctg

SEQ ID NO: 28418 - DNA, 17 bp, Homo Sapiens
tgtaatggtgagcactc

SEQ ID NO: 28419 - DNA, 20 bp, Homo Sapiens
tgtaatggtgagcactctgg

SEQ ID NO: 28420 - DNA, 21 bp, Homo Sapiens
tgtaatggtgagcactctgga

SEQ ID NO: 28421 - DNA, 23 bp, Homo Sapiens
tgtaatggtgagcactctggact

SEQ ID NO: 28422 - DNA, 28 bp, Homo Sapiens
tgtaatggtgagcactctggactctgaa

SEQ ID NO: 28423 - DNA, 30 bp, Homo Sapiens
tgtaatggtgagcactctggactctgaatc

SEQ ID NO: 28424 - DNA, 31 bp, Homo Sapiens
tgtaatggtgagcactctggactctgaatcc

SEQ ID NO: 28425 - DNA, 32 bp, Homo Sapiens
tgtaatggtgagcactctggactctgaatcca

SEQ ID NO: 28426 - DNA, 16 bp, Homo Sapiens
tgtaatggttagcact

SEQ ID NO: 28427 - DNA, 17 bp, Homo Sapiens
tgtaatggttagcactc

SEQ ID NO: 28428 - DNA, 18 bp, Homo Sapiens
tgtaatggttagcactct

SEQ ID NO: 28429 - DNA, 19 bp, Homo Sapiens
tgtaatggttagcactctg

SEQ ID NO: 28430 - DNA, 20 bp, Homo Sapiens
tgtaatggttagcactctgg

SEQ ID NO: 28431 - DNA, 21 bp, Homo Sapiens
tgtaatggttagcactctgga

SEQ ID NO: 28432 - DNA, 22 bp, Homo Sapiens
tgtaatggttagcactctggac

SEQ ID NO: 28433 - DNA, 23 bp, Homo Sapiens
tgtaatggttagcactctggact

SEQ ID NO: 28434 - DNA, 24 bp, Homo Sapiens
tgtaatggttagcactctggactc

SEQ ID NO: 28435 - DNA, 25 bp, Homo Sapiens
tgtaatggttagcactctggactct

SEQ ID NO: 28436 - DNA, 26 bp, Homo Sapiens
tgtaatggttagcactctggactctg

SEQ ID NO: 28437 - DNA, 27 bp, Homo Sapiens
tgtaatggttagcactctggactctga

SEQ ID NO: 28438 - DNA, 28 bp, Homo Sapiens
tgtaatggttagcactctggactctgaa

SEQ ID NO: 28439 - DNA, 29 bp, Homo Sapiens
tgtaatggttagcactctggactctgaat

SEQ ID NO: 28440 - DNA, 30 bp, Homo Sapiens
tgtaatggttagcactctggactctgaatc

SEQ ID NO: 28441 - DNA, 31 bp, Homo Sapiens
tgtaatggttagcactctggactctgaatcc

SEQ ID NO: 28442 - DNA, 32 bp, Homo Sapiens
tgtaatggttagcactctggactctgaatcca

SEQ ID NO: 28443 - DNA, 43 bp, Homo Sapiens
tgtaatggttagcactctggactctgaatccagcgatccgagt

SEQ ID NO: 28444 - DNA, 44 bp, Homo Sapiens
tgtaatggttagcactctggactctgaatccagcgatccgagtt

SEQ ID NO: 28445 - DNA, 46 bp, Homo Sapiens
tgtaatggttagcactctggactctgaatccagcgatccgagttca

SEQ ID NO: 28446 - DNA, 26 bp, Homo Sapiens
tgtaatggttagcactctggactttg

SEQ ID NO: 28447 - DNA, 28 bp, Homo Sapiens
tgtaatggttagcactctggactttgaa

SEQ ID NO: 28448 - DNA, 29 bp, Homo Sapiens
tgtaatggttagcactctggactttgaat

SEQ ID NO: 28449 - DNA, 30 bp, Homo Sapiens
tgtaatggttagcactctggactttgaatc

SEQ ID NO: 28450 - DNA, 31 bp, Homo Sapiens
tgtaatggttagcactctggactttgaatcc

SEQ ID NO: 28451 - DNA, 43 bp, Homo Sapiens
tgtaatggttagcactctggactttgaatccagcaatccgagt

SEQ ID NO: 28452 - DNA, 42 bp, Homo Sapiens
tgtaatggttagcactctggactttgaatccagcgatccgag

SEQ ID NO: 28453 - DNA, 43 bp, Homo Sapiens
tgtaatggttagcactctggactttgaatccagcgatccgagt

SEQ ID NO: 28454 - DNA, 17 bp, Homo Sapiens
tgtacgaggtcccgggt

SEQ ID NO: 28455 - DNA, 37 bp, Homo Sapiens
tgtacgaggtcccgggttcaatccccggcacctccac

SEQ ID NO: 28456 - DNA, 38 bp, Homo Sapiens
tgtacgaggtcccgggttcaatccccggcacctccacc

SEQ ID NO: 28457 - DNA, 19 bp, Homo Sapiens
tgtagcggttatcacattc

SEQ ID NO: 28458 - DNA, 21 bp, Homo Sapiens
tgtagcggttatcacattcgc

SEQ ID NO: 28459 - DNA, 22 bp, Homo Sapiens
tgtagcggttatcacattcgcc

SEQ ID NO: 28460 - DNA, 23 bp, Homo Sapiens
tgtagcggttatcacattcgcct

SEQ ID NO: 28461 - DNA, 24 bp, Homo Sapiens
tgtagcggttatcacattcgcctc

SEQ ID NO: 28462 - DNA, 40 bp, Homo Sapiens
tgtagcggttatcacgtctgctttacacgcagaaggtcct

SEQ ID NO: 28463 - DNA, 16 bp, Homo Sapiens
tgtagctcagtggtag

SEQ ID NO: 28464 - DNA, 17 bp, Homo Sapiens
tgtagctcagtggtaga

SEQ ID NO: 28465 - DNA, 18 bp, Homo Sapiens
tgtagctcagtggtagag

SEQ ID NO: 28466 - DNA, 28 bp, Homo Sapiens
tgtagctcagtggtagagcatttgactg

SEQ ID NO: 28467 - DNA, 29 bp, Homo Sapiens
tgtagctcagtggtagagcatttgactgc

SEQ ID NO: 28468 - DNA, 45 bp, Homo Sapiens
tgtagctcagtggtagagcgcgtgcttagcatgcacgaggccccg

SEQ ID NO: 28469 - DNA, 21 bp, Homo Sapiens
tgtagcttaacacaaagcacc

SEQ ID NO: 28470 - DNA, 22 bp, Homo Sapiens
tgtagcttaacacaaagcaccc

SEQ ID NO: 28471 - DNA, 23 bp, Homo Sapiens
tgtagcttaacacaaagcaccca

SEQ ID NO: 28472 - DNA, 24 bp, Homo Sapiens
tgtagcttaacacaaagcacccaa

SEQ ID NO: 28473 - DNA, 26 bp, Homo Sapiens
tgtagcttaacacaaagcacccaact

SEQ ID NO: 28474 - DNA, 32 bp, Homo Sapiens
tgtagcttaacacaaagcacccaacttacact

SEQ ID NO: 28475 - DNA, 33 bp, Homo Sapiens
tgtagcttaacacaaagcacccaacttacactt

SEQ ID NO: 28476 - DNA, 34 bp, Homo Sapiens
tgtagcttaacacaaagcacccaacttacactta

SEQ ID NO: 28477 - DNA, 37 bp, Homo Sapiens
tgtagcttaacacaaagcacccaacttacacttagga

SEQ ID NO: 28478 - DNA, 42 bp, Homo Sapiens
tgtagcttaacacaaagcacccaacttacacttaggagattt

SEQ ID NO: 28479 - DNA, 17 bp, Homo Sapiens
tgtagcttacctcctca

SEQ ID NO: 28480 - DNA, 25 bp, Homo Sapiens
tgtagcttacctcctcaaagcaata

SEQ ID NO: 28481 - DNA, 30 bp, Homo Sapiens
tgtagcttacctcctcaaagcaatacactg

SEQ ID NO: 28482 - DNA, 16 bp, Homo Sapiens
tgtagtccgtgcgaga

SEQ ID NO: 28483 - DNA, 17 bp, Homo Sapiens
tgtagtccgtgcgagaa

SEQ ID NO: 28484 - DNA, 18 bp, Homo Sapiens
tgtagtccgtgcgagaat

SEQ ID NO: 28485 - DNA, 19 bp, Homo Sapiens
tgtagtccgtgcgagaata

SEQ ID NO: 28486 - DNA, 20 bp, Homo Sapiens
tgtagtccgtgcgagaatac

SEQ ID NO: 28487 - DNA, 21 bp, Homo Sapiens
tgtagtccgtgcgagaatacc

SEQ ID NO: 28488 - DNA, 22 bp, Homo Sapiens
tgtagtccgtgcgagaatacca

SEQ ID NO: 28489 - DNA, 16 bp, Homo Sapiens
tgtagtcgtggccgag

SEQ ID NO: 28490 - DNA, 21 bp, Homo Sapiens
tgtagtcgtggccgagtggtt

SEQ ID NO: 28491 - DNA, 16 bp, Homo Sapiens
tgtagtggtatcatgc

SEQ ID NO: 28492 - DNA, 17 bp, Homo Sapiens
tgtagtggtatcatgca

SEQ ID NO: 28493 - DNA, 19 bp, Homo Sapiens
tgtagtggtatcatgcaag

SEQ ID NO: 28494 - DNA, 23 bp, Homo Sapiens
tgtagtggtatcatgcaagattc

SEQ ID NO: 28495 - DNA, 24 bp, Homo Sapiens
tgtagtggtatcatgcaagattcc

SEQ ID NO: 28496 - DNA, 25 bp, Homo Sapiens
tgtagtggtatcatgcaagattccc

SEQ ID NO: 28497 - DNA, 27 bp, Homo Sapiens
tgtagtggtatcatgcaagattcccat

SEQ ID NO: 28498 - DNA, 29 bp, Homo Sapiens
tgtagtggtatcatgcaagattcccattc

SEQ ID NO: 28499 - DNA, 40 bp, Homo Sapiens
tgtagtggtatcatgcaagattcccattcttgcgacccgg

SEQ ID NO: 28500 - DNA, 41 bp, Homo Sapiens
tgtagtggtatcatgcaagattcccattcttgcgacccggg

SEQ ID NO: 28501 - DNA, 42 bp, Homo Sapiens
tgtagtggtatcatgcaagattcccattcttgcgacccgggt

SEQ ID NO: 28502 - DNA, 20 bp, Homo Sapiens
tgtagtggtcatcacgttcg

SEQ ID NO: 28503 - DNA, 21 bp, Homo Sapiens
tgtagtggtcatcacgttcgc

SEQ ID NO: 28504 - DNA, 22 bp, Homo Sapiens
tgtagtggtcatcacgttcgcc

SEQ ID NO: 28505 - DNA, 23 bp, Homo Sapiens
tgtagtggtcatcacgttcgcct

SEQ ID NO: 28506 - DNA, 22 bp, Homo Sapiens
tgtagtggttatcacattcgcc

SEQ ID NO: 28507 - DNA, 23 bp, Homo Sapiens
tgtagtggttatcacattcgcct

SEQ ID NO: 28508 - DNA, 21 bp, Homo Sapiens
tgtagtggttatcacgtctgc

SEQ ID NO: 28509 - DNA, 22 bp, Homo Sapiens
tgtagtggttatcacgtctgct

SEQ ID NO: 28510 - DNA, 23 bp, Homo Sapiens
tgtagtggttatcacgtctgctt

SEQ ID NO: 28511 - DNA, 24 bp, Homo Sapiens
tgtagtggttatcacgtctgcttt

SEQ ID NO: 28512 - DNA, 21 bp, Homo Sapiens
tgtagtggttatcacgttcgc

SEQ ID NO: 28513 - DNA, 22 bp, Homo Sapiens
tgtagtggttatcacgttcgcc

SEQ ID NO: 28514 - DNA, 23 bp, Homo Sapiens
tgtagtggttatcacgttcgcct

SEQ ID NO: 28515 - DNA, 24 bp, Homo Sapiens
tgtagtggttatcacgttcgccta

SEQ ID NO: 28516 - DNA, 24 bp, Homo Sapiens
tgtagtggttatcacgttcgcctc

SEQ ID NO: 28517 - DNA, 26 bp, Homo Sapiens
tgtagtggttatcacgttcgcctcac

SEQ ID NO: 28518 - DNA, 28 bp, Homo Sapiens
tgtagtggttatcacgttcgcctcacac

SEQ ID NO: 28519 - DNA, 30 bp, Homo Sapiens
tgtagtggttatcacgttcgcctcacacgc

SEQ ID NO: 28520 - DNA, 23 bp, Homo Sapiens
tgtagtggttatcatgttcgcct

SEQ ID NO: 28521 - DNA, 18 bp, Homo Sapiens
tgtagtgtagtggttatc

SEQ ID NO: 28522 - DNA, 27 bp, Homo Sapiens
tgtagtgtagtggttatcacgttcgcc

SEQ ID NO: 28523 - DNA, 21 bp, Homo Sapiens
tgtagttgaaatacaacgatg

SEQ ID NO: 28524 - DNA, 30 bp, Homo Sapiens
tgtagttgaaatacaacgatggtttttcat

SEQ ID NO: 28525 - DNA, 17 bp, Homo Sapiens
tgtatgaggccccgggt

SEQ ID NO: 28526 - DNA, 28 bp, Homo Sapiens
tgtatgaggccccgggttcgatccccgg

SEQ ID NO: 28527 - DNA, 32 bp, Homo Sapiens
tgtatgaggccccgggttcgatccccggcatc

SEQ ID NO: 28528 - DNA, 33 bp, Homo Sapiens
tgtatgaggccccgggttcgatccccggcatct

SEQ ID NO: 28529 - DNA, 34 bp, Homo Sapiens
tgtatgaggccccgggttcgatccccggcatctc

SEQ ID NO: 28530 - DNA, 35 bp, Homo Sapiens
tgtatgaggccccgggttcgatccccggcatctcc

SEQ ID NO: 28531 - DNA, 36 bp, Homo Sapiens
tgtatgaggccccgggttcgatccccggcatctcca

SEQ ID NO: 28532 - DNA, 37 bp, Homo Sapiens
tgtatgaggccccgggttcgatccccggcatctccac

SEQ ID NO: 28533 - DNA, 38 bp, Homo Sapiens
tgtatgaggccccgggttcgatccccggcatctccacc

SEQ ID NO: 28534 - DNA, 39 bp, Homo Sapiens
tgtatgaggccccgggttcgatccccggcatctccacca

SEQ ID NO: 28535 - DNA, 17 bp, Homo Sapiens
tgtatgaggtcccgggt

SEQ ID NO: 28536 - DNA, 33 bp, Homo Sapiens
tgtatgaggtcccgggttcgatccccggcacct

SEQ ID NO: 28537 - DNA, 37 bp, Homo Sapiens
tgtatgaggtcccgggttcgatccccggcacctccac

SEQ ID NO: 28538 - DNA, 38 bp, Homo Sapiens
tgtatgaggtcccgggttcgatccccggcacctccacc

SEQ ID NO: 28539 - DNA, 33 bp, Homo Sapiens
tgtatgaggtcccgggttcgatccccggcatct

SEQ ID NO: 28540 - DNA, 34 bp, Homo Sapiens
tgtatgaggtcccgggttcgatccccggcatctc

SEQ ID NO: 28541 - DNA, 36 bp, Homo Sapiens
tgtatgaggtcccgggttcgatccccggcatctcca

SEQ ID NO: 28542 - DNA, 37 bp, Homo Sapiens
tgtatgaggtcccgggttcgatccccggcatctccac

SEQ ID NO: 28543 - DNA, 38 bp, Homo Sapiens
tgtatgaggtcccgggttcgatccccggcatctccacc

SEQ ID NO: 28544 - DNA, 22 bp, Homo Sapiens
tgtcaaagttaaattataggct

SEQ ID NO: 28545 - DNA, 24 bp, Homo Sapiens
tgtcaaagttaaattataggctaa

SEQ ID NO: 28546 - DNA, 16 bp, Homo Sapiens
tgtcacgcgggagacc

SEQ ID NO: 28547 - DNA, 17 bp, Homo Sapiens
tgtcacgcgggagaccg

SEQ ID NO: 28548 - DNA, 37 bp, Homo Sapiens
tgtcacgcgggagaccggggttcaattccccgacggg

SEQ ID NO: 28549 - DNA, 38 bp, Homo Sapiens
tgtcacgcgggagaccggggttcaattccccgacgggg

SEQ ID NO: 28550 - DNA, 41 bp, Homo Sapiens
tgtcacgcgggagaccggggttcaattccccgacggggagc

SEQ ID NO: 28551 - DNA, 42 bp, Homo Sapiens
tgtcacgcgggagaccggggttcaattccccgacggggagcc

SEQ ID NO: 28552 - DNA, 43 bp, Homo Sapiens
tgtcacgcgggagaccggggttcaattccccgacggggagcca

SEQ ID NO: 28553 - DNA, 34 bp, Homo Sapiens
tgtcacgcgggagaccggggttcgattccccgac

SEQ ID NO: 28554 - DNA, 37 bp, Homo Sapiens
tgtcacgcgggagaccggggttcgattccccgacggg

SEQ ID NO: 28555 - DNA, 38 bp, Homo Sapiens
tgtcacgcgggagaccggggttcgattccccgacgggg

SEQ ID NO: 28556 - DNA, 40 bp, Homo Sapiens
tgtcacgcgggagaccggggttcgattccccgacggggag

SEQ ID NO: 28557 - DNA, 41 bp, Homo Sapiens
tgtcacgcgggagaccggggttcgattccccgacggggagc

SEQ ID NO: 28558 - DNA, 42 bp, Homo Sapiens
tgtcacgcgggagaccggggttcgattccccgacggggagcc

SEQ ID NO: 28559 - DNA, 43 bp, Homo Sapiens
tgtcacgcgggagaccggggttcgattccccgacggggagcca

SEQ ID NO: 28560 - DNA, 16 bp, Homo Sapiens
tgtcaggatggccgag

SEQ ID NO: 28561 - DNA, 17 bp, Homo Sapiens
tgtccccgtctgtcacg

SEQ ID NO: 28562 - DNA, 16 bp, Homo Sapiens
tgtccgcgtgggttcg

SEQ ID NO: 28563 - DNA, 21 bp, Homo Sapiens
tgtccgcgtgggttcgaaccc

SEQ ID NO: 28564 - DNA, 22 bp, Homo Sapiens
tgtccgcgtgggttcgaacccc

SEQ ID NO: 28565 - DNA, 23 bp, Homo Sapiens
tgtccgcgtgggttcgaacccca

SEQ ID NO: 28566 - DNA, 29 bp, Homo Sapiens
tgtccgcgtgggttcgaaccccactcctg

SEQ ID NO: 28567 - DNA, 30 bp, Homo Sapiens
tgtccgcgtgggttcgaaccccactcctgg

SEQ ID NO: 28568 - DNA, 32 bp, Homo Sapiens
tgtccgcgtgggttcgaaccccactcctggta

SEQ ID NO: 28569 - DNA, 33 bp, Homo Sapiens
tgtccgcgtgggttcgaaccccactcctggtac

SEQ ID NO: 28570 - DNA, 34 bp, Homo Sapiens
tgtccgcgtgggttcgaaccccactcctggtacc

SEQ ID NO: 28571 - DNA, 35 bp, Homo Sapiens
tgtccgcgtgggttcgaaccccactcctggtacca

SEQ ID NO: 28572 - DNA, 16 bp, Homo Sapiens
tgtctaacaacatggc

SEQ ID NO: 28573 - DNA, 17 bp, Homo Sapiens
tgtctaacaacatggct

SEQ ID NO: 28574 - DNA, 18 bp, Homo Sapiens
tgtctaacaacatggctt

SEQ ID NO: 28575 - DNA, 20 bp, Homo Sapiens
tgtctaacaacatggctttc

SEQ ID NO: 28576 - DNA, 21 bp, Homo Sapiens
tgtctaacaacatggctttct

SEQ ID NO: 28577 - DNA, 22 bp, Homo Sapiens
tgtctaacaacatggctttctc

SEQ ID NO: 28578 - DNA, 23 bp, Homo Sapiens
tgtctaacaacatggctttctca

SEQ ID NO: 28579 - DNA, 24 bp, Homo Sapiens
tgtctaacaacatggctttctcac

SEQ ID NO: 28580 - DNA, 25 bp, Homo Sapiens
tgtctaacaacatggctttctcacc

SEQ ID NO: 28581 - DNA, 26 bp, Homo Sapiens
tgtctaacaacatggctttctcacca

SEQ ID NO: 28582 - DNA, 23 bp, Homo Sapiens
tgtctcgtaaacaggagatcctg

SEQ ID NO: 28583 - DNA, 24 bp, Homo Sapiens
tgtctgataaaagagttactttga

SEQ ID NO: 28584 - DNA, 25 bp, Homo Sapiens
tgtctgataaaagagttactttgat

SEQ ID NO: 28585 - DNA, 30 bp, Homo Sapiens
tgtctgataaaagagttactttgatagagt

SEQ ID NO: 28586 - DNA, 16 bp, Homo Sapiens
tgtgaatctgacaaca

SEQ ID NO: 28587 - DNA, 22 bp, Homo Sapiens
tgtgaatctgacaacagaggct

SEQ ID NO: 28588 - DNA, 23 bp, Homo Sapiens
tgtgaatctgacaacagaggctt

SEQ ID NO: 28589 - DNA, 25 bp, Homo Sapiens
tgtgaatctgacaacagaggcttac

SEQ ID NO: 28590 - DNA, 26 bp, Homo Sapiens
tgtgaatctgacaacagaggcttacg

SEQ ID NO: 28591 - DNA, 28 bp, Homo Sapiens
tgtgaatctgacaacagaggcttacgac

SEQ ID NO: 28592 - DNA, 29 bp, Homo Sapiens
tgtgaatctgacaacagaggcttacgacc

SEQ ID NO: 28593 - DNA, 30 bp, Homo Sapiens
tgtgaatctgacaacagaggcttacgaccc

SEQ ID NO: 28594 - DNA, 31 bp, Homo Sapiens
tgtgaatctgacaacagaggcttacgacccc

SEQ ID NO: 28595 - DNA, 32 bp, Homo Sapiens
tgtgaatctgacaacagaggcttacgacccct

SEQ ID NO: 28596 - DNA, 33 bp, Homo Sapiens
tgtgaatctgacaacagaggcttacgacccctt

SEQ ID NO: 28597 - DNA, 34 bp, Homo Sapiens
tgtgaatctgacaacagaggcttacgacccctta

SEQ ID NO: 28598 - DNA, 35 bp, Homo Sapiens
tgtgaatctgacaacagaggcttacgaccccttat

SEQ ID NO: 28599 - DNA, 36 bp, Homo Sapiens
tgtgaatctgacaacagaggcttacgaccccttatt

SEQ ID NO: 28600 - DNA, 40 bp, Homo Sapiens
tgtgaatctgacaacagaggcttacgaccccttatttacc

SEQ ID NO: 28601 - DNA, 41 bp, Homo Sapiens
tgtgaatctgacaacagaggcttacgaccccttatttaccc

SEQ ID NO: 28602 - DNA, 42 bp, Homo Sapiens
tgtgaatctgacaacagaggcttacgaccccttatttacccc

SEQ ID NO: 28603 - DNA, 43 bp, Homo Sapiens
tgtgaatctgacaacagaggcttacgaccccttatttacccca

SEQ ID NO: 28604 - DNA, 21 bp, Homo Sapiens
tgtgatggccgagtggttaag

SEQ ID NO: 28605 - DNA, 19 bp, Homo Sapiens
tgtgctctgcacgcgtggg

SEQ ID NO: 28606 - DNA, 20 bp, Homo Sapiens
tgtgctctgcacgcgtgggt

SEQ ID NO: 28607 - DNA, 19 bp, Homo Sapiens
tgtgctttgcacgcgtggg

SEQ ID NO: 28608 - DNA, 20 bp, Homo Sapiens
tgtgctttgcacgcgtgggt

SEQ ID NO: 28609 - DNA, 22 bp, Homo Sapiens
tgtgctttgcacgcgtgggttc

SEQ ID NO: 28610 - DNA, 41 bp, Homo Sapiens
tgtgctttgcacgcgtgggttcgaatcccatcctcgtcgcc

SEQ ID NO: 28611 - DNA, 42 bp, Homo Sapiens
tgtgctttgcacgcgtgggttcgaatcccatcctcgtcgcca

SEQ ID NO: 28612 - DNA, 34 bp, Homo Sapiens
tgtggccgcagcaacctcggttcgaatccgagtc

SEQ ID NO: 28613 - DNA, 28 bp, Homo Sapiens
tgtgggttcgaatcccaccagagtcgcc

SEQ ID NO: 28614 - DNA, 29 bp, Homo Sapiens
tgtgggttcgaatcccaccagagtcgcca

SEQ ID NO: 28615 - DNA, 27 bp, Homo Sapiens
tgtgggttcgagtcccaccagagtcgc

SEQ ID NO: 28616 - DNA, 28 bp, Homo Sapiens
tgtgggttcgagtcccaccagagtcgcc

SEQ ID NO: 28617 - DNA, 29 bp, Homo Sapiens
tgtgggttcgagtcccaccagagtcgcca

SEQ ID NO: 28618 - DNA, 25 bp, Homo Sapiens
tgtgggttcgagtcccacctggggt

SEQ ID NO: 28619 - DNA, 26 bp, Homo Sapiens
tgtgggttcgagtcccacctggggta

SEQ ID NO: 28620 - DNA, 26 bp, Homo Sapiens
tgtgggttcgagtcccacctggggtg

SEQ ID NO: 28621 - DNA, 27 bp, Homo Sapiens
tgtgggttcgagtcccacctggggtgc

SEQ ID NO: 28622 - DNA, 29 bp, Homo Sapiens
tgtgggttcgagtcccacctggggtgcca

SEQ ID NO: 28623 - DNA, 23 bp, Homo Sapiens
tgtgggttcgagtcccatctggg

SEQ ID NO: 28624 - DNA, 24 bp, Homo Sapiens
tgtgggttcgagtcccatctgggg

SEQ ID NO: 28625 - DNA, 26 bp, Homo Sapiens
tgtgggttcgagtcccatctggggtg

SEQ ID NO: 28626 - DNA, 27 bp, Homo Sapiens
tgtgggttcgagtcccatctggggtgc

SEQ ID NO: 28627 - DNA, 28 bp, Homo Sapiens
tgtgggttcgagtcccatctggggtgcc

SEQ ID NO: 28628 - DNA, 29 bp, Homo Sapiens
tgtgggttcgagtcccatctggggtgcca

SEQ ID NO: 28629 - DNA, 24 bp, Homo Sapiens
tgtgggttcgagtcccatctgggt

SEQ ID NO: 28630 - DNA, 25 bp, Homo Sapiens
tgtgggttcgagtcccatctgggtc

SEQ ID NO: 28631 - DNA, 26 bp, Homo Sapiens
tgtgggttcgagtcccatctgggtcg

SEQ ID NO: 28632 - DNA, 27 bp, Homo Sapiens
tgtgggttcgagtcccatctgggtcgc

SEQ ID NO: 28633 - DNA, 28 bp, Homo Sapiens
tgtgggttcgagtcccatctgggtcgcc

SEQ ID NO: 28634 - DNA, 29 bp, Homo Sapiens
tgtgggttcgagtcccatctgggtcgcca

SEQ ID NO: 28635 - DNA, 23 bp, Homo Sapiens
tgtgggtttaagtcccattggtc

SEQ ID NO: 28636 - DNA, 24 bp, Homo Sapiens
tgtgggtttaagtcccattggtct

SEQ ID NO: 28637 - DNA, 25 bp, Homo Sapiens
tgtgggtttaagtcccattggtcta

SEQ ID NO: 28638 - DNA, 26 bp, Homo Sapiens
tgtgggtttaagtcccattggtctag

SEQ ID NO: 28639 - DNA, 27 bp, Homo Sapiens
tgtgggtttaagtcccattggtctagc

SEQ ID NO: 28640 - DNA, 28 bp, Homo Sapiens
tgtgggtttaagtcccattggtctagcc

SEQ ID NO: 28641 - DNA, 29 bp, Homo Sapiens
tgtgggtttaagtcccattggtctagcca

SEQ ID NO: 28642 - DNA, 17 bp, Homo Sapiens
tgtggtctagtggttag

SEQ ID NO: 28643 - DNA, 18 bp, Homo Sapiens
tgtggtctagtggttagg

SEQ ID NO: 28644 - DNA, 17 bp, Homo Sapiens
tgtgtgaggtcccgggt

SEQ ID NO: 28645 - DNA, 17 bp, Homo Sapiens
tgttaactaagtgtttg

SEQ ID NO: 28646 - DNA, 28 bp, Homo Sapiens
tgttaactaagtgtttgtgggtttaagt

SEQ ID NO: 28647 - DNA, 34 bp, Homo Sapiens
tgttaactaagtgtttgtgggtttaagtcccatt

SEQ ID NO: 28648 - DNA, 38 bp, Homo Sapiens
tgttaactaagtgtttgtgggtttaagtcccattggtc

SEQ ID NO: 28649 - DNA, 39 bp, Homo Sapiens
tgttaactaagtgtttgtgggtttaagtcccattggtct

SEQ ID NO: 28650 - DNA, 40 bp, Homo Sapiens
tgttaactaagtgtttgtgggtttaagtcccattggtcta

SEQ ID NO: 28651 - DNA, 42 bp, Homo Sapiens
tgttaactaagtgtttgtgggtttaagtcccattggtctagc

SEQ ID NO: 28652 - DNA, 43 bp, Homo Sapiens
tgttaactaagtgtttgtgggtttaagtcccattggtctagcc

SEQ ID NO: 28653 - DNA, 44 bp, Homo Sapiens
tgttaactaagtgtttgtgggtttaagtcccattggtctagcca

SEQ ID NO: 28654 - DNA, 36 bp, Homo Sapiens
tgttaagatggcagagcccggtaatcgcataaaact

SEQ ID NO: 28655 - DNA, 21 bp, Homo Sapiens
tgttcaaatcacgtcggggtc

SEQ ID NO: 28656 - DNA, 22 bp, Homo Sapiens
tgttcaaatcacgtcggggtca

SEQ ID NO: 28657 - DNA, 24 bp, Homo Sapiens
tgttcaaatcacgtcggggtcacc

SEQ ID NO: 28658 - DNA, 25 bp, Homo Sapiens
tgttcaaatcacgtcggggtcacca

SEQ ID NO: 28659 - DNA, 21 bp, Homo Sapiens
tgttcaagtcacgtcggggtc

SEQ ID NO: 28660 - DNA, 22 bp, Homo Sapiens
tgttcaagtcacgtcggggtca

SEQ ID NO: 28661 - DNA, 23 bp, Homo Sapiens
tgttcaagtcacgtcggggtcac

SEQ ID NO: 28662 - DNA, 24 bp, Homo Sapiens
tgttcaagtcacgtcggggtcacc

SEQ ID NO: 28663 - DNA, 25 bp, Homo Sapiens
tgttcaagtcacgtcggggtcacca

SEQ ID NO: 28664 - DNA, 18 bp, Homo Sapiens
tgttcgaatcacgtcggg

SEQ ID NO: 28665 - DNA, 20 bp, Homo Sapiens
tgttcgaatcacgtcggggt

SEQ ID NO: 28666 - DNA, 21 bp, Homo Sapiens
tgttcgaatcacgtcggggtc

SEQ ID NO: 28667 - DNA, 22 bp, Homo Sapiens
tgttcgaatcacgtcggggtca

SEQ ID NO: 28668 - DNA, 23 bp, Homo Sapiens
tgttcgaatcacgtcggggtcac

SEQ ID NO: 28669 - DNA, 24 bp, Homo Sapiens
tgttcgaatcacgtcggggtcacc

SEQ ID NO: 28670 - DNA, 25 bp, Homo Sapiens
tgttcgaatcacgtcggggtcacca

SEQ ID NO: 28671 - DNA, 23 bp, Homo Sapiens
tgttggttatacccttcccgtac

SEQ ID NO: 28672 - DNA, 24 bp, Homo Sapiens
tgttggttatacccttcccgtact

SEQ ID NO: 28673 - DNA, 25 bp, Homo Sapiens
tgttggttatacccttcccgtacta

SEQ ID NO: 28674 - DNA, 26 bp, Homo Sapiens
tgttggttatacccttcccgtactac

SEQ ID NO: 28675 - DNA, 27 bp, Homo Sapiens
tgttggttatacccttcccgtactacc

SEQ ID NO: 28676 - DNA, 28 bp, Homo Sapiens
tgttggttatacccttcccgtactacca

SEQ ID NO: 28677 - DNA, 16 bp, Homo Sapiens
tgtttagacgggctca

SEQ ID NO: 28678 - DNA, 17 bp, Homo Sapiens
tgtttagacgggctcac

SEQ ID NO: 28679 - DNA, 18 bp, Homo Sapiens
tgtttagacgggctcaca

SEQ ID NO: 28680 - DNA, 19 bp, Homo Sapiens
tgtttagacgggctcacat

SEQ ID NO: 28681 - DNA, 20 bp, Homo Sapiens
tgtttagacgggctcacatc

SEQ ID NO: 28682 - DNA, 21 bp, Homo Sapiens
tgtttagacgggctcacatca

SEQ ID NO: 28683 - DNA, 22 bp, Homo Sapiens
tgtttagacgggctcacatcac

SEQ ID NO: 28684 - DNA, 23 bp, Homo Sapiens
tgtttagacgggctcacatcacc

SEQ ID NO: 28685 - DNA, 24 bp, Homo Sapiens
tgtttagacgggctcacatcaccc

SEQ ID NO: 28686 - DNA, 25 bp, Homo Sapiens
tgtttagacgggctcacatcacccc

SEQ ID NO: 28687 - DNA, 26 bp, Homo Sapiens
tgtttagacgggctcacatcacccca

SEQ ID NO: 28688 - DNA, 27 bp, Homo Sapiens
tgtttagacgggctcacatcaccccat

SEQ ID NO: 28689 - DNA, 28 bp, Homo Sapiens
tgtttagacgggctcacatcaccccata

SEQ ID NO: 28690 - DNA, 29 bp, Homo Sapiens
tgtttagacgggctcacatcaccccataa

SEQ ID NO: 28691 - DNA, 30 bp, Homo Sapiens
tgtttagacgggctcacatcaccccataaa

SEQ ID NO: 28692 - DNA, 31 bp, Homo Sapiens
tgtttagacgggctcacatcaccccataaac

SEQ ID NO: 28693 - DNA, 32 bp, Homo Sapiens
tgtttagacgggctcacatcaccccataaaca

SEQ ID NO: 28694 - DNA, 33 bp, Homo Sapiens
tgtttagacgggctcacatcaccccataaacac

SEQ ID NO: 28695 - DNA, 34 bp, Homo Sapiens
tgtttagacgggctcacatcaccccataaacacc

SEQ ID NO: 28696 - DNA, 35 bp, Homo Sapiens
tgtttagacgggctcacatcaccccataaacacca

SEQ ID NO: 28697 - DNA, 34 bp, Homo Sapiens
tgtttccgtagtgtagtggttatcacgttcgcct

SEQ ID NO: 28698 - DNA, 16 bp, Homo Sapiens
tgtttgtgggtttaag

SEQ ID NO: 28699 - DNA, 18 bp, Homo Sapiens
tgtttgtgggtttaagtc

SEQ ID NO: 28700 - DNA, 22 bp, Homo Sapiens
tgtttgtgggtttaagtcccat

SEQ ID NO: 28701 - DNA, 23 bp, Homo Sapiens
tgtttgtgggtttaagtcccatt

SEQ ID NO: 28702 - DNA, 27 bp, Homo Sapiens
tgtttgtgggtttaagtcccattggtc

SEQ ID NO: 28703 - DNA, 28 bp, Homo Sapiens
tgtttgtgggtttaagtcccattggtct

SEQ ID NO: 28704 - DNA, 29 bp, Homo Sapiens
tgtttgtgggtttaagtcccattggtcta

SEQ ID NO: 28705 - DNA, 30 bp, Homo Sapiens
tgtttgtgggtttaagtcccattggtctag

SEQ ID NO: 28706 - DNA, 31 bp, Homo Sapiens
tgtttgtgggtttaagtcccattggtctagc

SEQ ID NO: 28707 - DNA, 32 bp, Homo Sapiens
tgtttgtgggtttaagtcccattggtctagcc

SEQ ID NO: 28708 - DNA, 33 bp, Homo Sapiens
tgtttgtgggtttaagtcccattggtctagcca

SEQ ID NO: 28709 - DNA, 20 bp, Homo Sapiens
ttaaaactttacagtcagag

SEQ ID NO: 28710 - DNA, 22 bp, Homo Sapiens
ttaaaactttacagtcagaggt

SEQ ID NO: 28711 - DNA, 23 bp, Homo Sapiens
ttaaaactttacagtcagaggtt

SEQ ID NO: 28712 - DNA, 24 bp, Homo Sapiens
ttaaaactttacagtcagaggttc

SEQ ID NO: 28713 - DNA, 25 bp, Homo Sapiens
ttaaaactttacagtcagaggttca

SEQ ID NO: 28714 - DNA, 35 bp, Homo Sapiens
ttaaaactttacagtcagaggttcaattcctcttc

SEQ ID NO: 28715 - DNA, 18 bp, Homo Sapiens
ttaaacaaaacgaatgat

SEQ ID NO: 28716 - DNA, 19 bp, Homo Sapiens
ttaaacaaaacgaatgatt

SEQ ID NO: 28717 - DNA, 22 bp, Homo Sapiens
ttaaacaaaacgaatgatttcg

SEQ ID NO: 28718 - DNA, 24 bp, Homo Sapiens
ttaaacaaaacgaatgatttcgac

SEQ ID NO: 28719 - DNA, 25 bp, Homo Sapiens
ttaaacaaaacgaatgatttcgact

SEQ ID NO: 28720 - DNA, 26 bp, Homo Sapiens
ttaaacaaaacgaatgatttcgactc

SEQ ID NO: 28721 - DNA, 27 bp, Homo Sapiens
ttaaacaaaacgaatgatttcgactca

SEQ ID NO: 28722 - DNA, 37 bp, Homo Sapiens
ttaaacaaaacgaatgatttcgactcattaaattatg

SEQ ID NO: 28723 - DNA, 39 bp, Homo Sapiens
ttaaacaaaacgaatgatttcgactcattaaattatgat

SEQ ID NO: 28724 - DNA, 17 bp, Homo Sapiens
ttaaacccccttatttc

SEQ ID NO: 28725 - DNA, 18 bp, Homo Sapiens
ttaaacccccttatttct

SEQ ID NO: 28726 - DNA, 19 bp, Homo Sapiens
ttaaacccccttatttcta

SEQ ID NO: 28727 - DNA, 20 bp, Homo Sapiens
ttaaacccccttatttctac

SEQ ID NO: 28728 - DNA, 21 bp, Homo Sapiens
ttaaacccccttatttctacc

SEQ ID NO: 28729 - DNA, 22 bp, Homo Sapiens
ttaaacccccttatttctacca

SEQ ID NO: 28730 - DNA, 16 bp, Homo Sapiens
ttaaagactttttctc

SEQ ID NO: 28731 - DNA, 17 bp, Homo Sapiens
ttaaagactttttctct

SEQ ID NO: 28732 - DNA, 19 bp, Homo Sapiens
ttaaagactttttctctga

SEQ ID NO: 28733 - DNA, 20 bp, Homo Sapiens
ttaaagactttttctctgac

SEQ ID NO: 28734 - DNA, 21 bp, Homo Sapiens
ttaaagactttttctctgacc

SEQ ID NO: 28735 - DNA, 22 bp, Homo Sapiens
ttaaagactttttctctgacca

SEQ ID NO: 28736 - DNA, 16 bp, Homo Sapiens
ttaaagattaagagaa

SEQ ID NO: 28737 - DNA, 17 bp, Homo Sapiens
ttaaagattaagagaac

SEQ ID NO: 28738 - DNA, 18 bp, Homo Sapiens
ttaaagattaagagaacc

SEQ ID NO: 28739 - DNA, 19 bp, Homo Sapiens
ttaaagattaagagaacca

SEQ ID NO: 28740 - DNA, 20 bp, Homo Sapiens
ttaaagattaagagaaccaa

SEQ ID NO: 28741 - DNA, 21 bp, Homo Sapiens
ttaaagattaagagaaccaac

SEQ ID NO: 28742 - DNA, 22 bp, Homo Sapiens
ttaaagattaagagaaccaaca

SEQ ID NO: 28743 - DNA, 23 bp, Homo Sapiens
ttaaagattaagagaaccaacac

SEQ ID NO: 28744 - DNA, 24 bp, Homo Sapiens
ttaaagattaagagaaccaacacc

SEQ ID NO: 28745 - DNA, 25 bp, Homo Sapiens
ttaaagattaagagaaccaacacct

SEQ ID NO: 28746 - DNA, 26 bp, Homo Sapiens
ttaaagattaagagaaccaacacctc

SEQ ID NO: 28747 - DNA, 27 bp, Homo Sapiens
ttaaagattaagagaaccaacacctct

SEQ ID NO: 28748 - DNA, 28 bp, Homo Sapiens
ttaaagattaagagaaccaacacctctt

SEQ ID NO: 28749 - DNA, 29 bp, Homo Sapiens
ttaaagattaagagaaccaacacctcttt

SEQ ID NO: 28750 - DNA, 30 bp, Homo Sapiens
ttaaagattaagagaaccaacacctcttta

SEQ ID NO: 28751 - DNA, 33 bp, Homo Sapiens
ttaaagattaagagaaccaacacctctttacag

SEQ ID NO: 28752 - DNA, 35 bp, Homo Sapiens
ttaaagattaagagaaccaacacctctttacagtg

SEQ ID NO: 28753 - DNA, 36 bp, Homo Sapiens
ttaaagattaagagaaccaacacctctttacagtga

SEQ ID NO: 28754 - DNA, 37 bp, Homo Sapiens
ttaaagattaagagaaccaacacctctttacagtgac

SEQ ID NO: 28755 - DNA, 38 bp, Homo Sapiens
ttaaagattaagagaaccaacacctctttacagtgacc

SEQ ID NO: 28756 - DNA, 39 bp, Homo Sapiens
ttaaagattaagagaaccaacacctctttacagtgacca

SEQ ID NO: 28757 - DNA, 16 bp, Homo Sapiens
ttaaaggataacagct

SEQ ID NO: 28758 - DNA, 22 bp, Homo Sapiens
ttaaaggataacagctatccat

SEQ ID NO: 28759 - DNA, 24 bp, Homo Sapiens
ttaaaggataacagctatccattg

SEQ ID NO: 28760 - DNA, 27 bp, Homo Sapiens
ttaaaggataacagctatccattggtc

SEQ ID NO: 28761 - DNA, 28 bp, Homo Sapiens
ttaaaggataacagctatccattggtct

SEQ ID NO: 28762 - DNA, 29 bp, Homo Sapiens
ttaaaggataacagctatccattggtctt

SEQ ID NO: 28763 - DNA, 30 bp, Homo Sapiens
ttaaaggataacagctatccattggtctta

SEQ ID NO: 28764 - DNA, 31 bp, Homo Sapiens
ttaaaggataacagctatccattggtcttag

SEQ ID NO: 28765 - DNA, 35 bp, Homo Sapiens
ttaaaggataacagctatccattggtcttaggccc

SEQ ID NO: 28766 - DNA, 16 bp, Homo Sapiens
ttaaagtggctgattt

SEQ ID NO: 28767 - DNA, 17 bp, Homo Sapiens
ttaaagtggctgatttg

SEQ ID NO: 28768 - DNA, 18 bp, Homo Sapiens
ttaaagtggctgatttgc

SEQ ID NO: 28769 - DNA, 23 bp, Homo Sapiens
ttaaagtggctgatttgcgttca

SEQ ID NO: 28770 - DNA, 30 bp, Homo Sapiens
ttaaagtggctgatttgcgttcagttgatg

SEQ ID NO: 28771 - DNA, 34 bp, Homo Sapiens
ttaaagtggctgatttgcgttcagttgatgcaga

SEQ ID NO: 28772 - DNA, 35 bp, Homo Sapiens
ttaaagtggctgatttgcgttcagttgatgcagag

SEQ ID NO: 28773 - DNA, 16 bp, Homo Sapiens
ttaaatacagaccaag

SEQ ID NO: 28774 - DNA, 18 bp, Homo Sapiens
ttaaatacagaccaagag

SEQ ID NO: 28775 - DNA, 19 bp, Homo Sapiens
ttaaatacagaccaagagc

SEQ ID NO: 28776 - DNA, 20 bp, Homo Sapiens
ttaaatacagaccaagagcc

SEQ ID NO: 28777 - DNA, 21 bp, Homo Sapiens
ttaaatacagaccaagagcct

SEQ ID NO: 28778 - DNA, 22 bp, Homo Sapiens
ttaaatacagaccaagagcctt

SEQ ID NO: 28779 - DNA, 23 bp, Homo Sapiens
ttaaatacagaccaagagccttc

SEQ ID NO: 28780 - DNA, 24 bp, Homo Sapiens
ttaaatacagaccaagagccttca

SEQ ID NO: 28781 - DNA, 26 bp, Homo Sapiens
ttaaatacagaccaagagccttcaaa

SEQ ID NO: 28782 - DNA, 29 bp, Homo Sapiens
ttaaatacagaccaagagccttcaaagcc

SEQ ID NO: 28783 - DNA, 36 bp, Homo Sapiens
ttaaatacagaccaagagccttcaaagccctcagta

SEQ ID NO: 28784 - DNA, 18 bp, Homo Sapiens
ttaaattagaatcttagc

SEQ ID NO: 28785 - DNA, 19 bp, Homo Sapiens
ttaaattagaatcttagct

SEQ ID NO: 28786 - DNA, 20 bp, Homo Sapiens
ttaaattagaatcttagctt

SEQ ID NO: 28787 - DNA, 21 bp, Homo Sapiens
ttaaattagaatcttagcttt

SEQ ID NO: 28788 - DNA, 22 bp, Homo Sapiens
ttaaattagaatcttagctttg

SEQ ID NO: 28789 - DNA, 23 bp, Homo Sapiens
ttaaattagaatcttagctttgg

SEQ ID NO: 28790 - DNA, 46 bp, Homo Sapiens
ttaaattagaatcttagctttgggtgctaatggtggagttaaagac

SEQ ID NO: 28791 - DNA, 47 bp, Homo Sapiens
ttaaattagaatcttagctttgggtgctaatggtggagttaaagact

SEQ ID NO: 28792 - DNA, 48 bp, Homo Sapiens
ttaaattagaatcttagctttgggtgctaatggtggagttaaagactt

SEQ ID NO: 28793 - DNA, 16 bp, Homo Sapiens
ttaaattataggctaa

SEQ ID NO: 28794 - DNA, 17 bp, Homo Sapiens
ttaaattataggctaaa

SEQ ID NO: 28795 - DNA, 18 bp, Homo Sapiens
ttaaattataggctaaat

SEQ ID NO: 28796 - DNA, 19 bp, Homo Sapiens
ttaaattataggctaaatc

SEQ ID NO: 28797 - DNA, 20 bp, Homo Sapiens
ttaaattataggctaaatcc

SEQ ID NO: 28798 - DNA, 21 bp, Homo Sapiens
ttaaattataggctaaatcct

SEQ ID NO: 28799 - DNA, 23 bp, Homo Sapiens
ttaaattataggctaaatcctat

SEQ ID NO: 28800 - DNA, 25 bp, Homo Sapiens
ttaaattataggctaaatcctatat

SEQ ID NO: 28801 - DNA, 26 bp, Homo Sapiens
ttaaattataggctaaatcctatata

SEQ ID NO: 28802 - DNA, 31 bp, Homo Sapiens
ttaaattataggctaaatcctatatatctta

SEQ ID NO: 28803 - DNA, 33 bp, Homo Sapiens
ttaaattataggctaaatcctatatatcttacc

SEQ ID NO: 28804 - DNA, 34 bp, Homo Sapiens
ttaaattataggctaaatcctatatatcttacca

SEQ ID NO: 28805 - DNA, 16 bp, Homo Sapiens
ttaaattatgataatc

SEQ ID NO: 28806 - DNA, 17 bp, Homo Sapiens
ttaaattatgataatca

SEQ ID NO: 28807 - DNA, 25 bp, Homo Sapiens
ttaaattatgataatcatatttacc

SEQ ID NO: 28808 - DNA, 28 bp, Homo Sapiens
ttaaattatgataatcatatttaccaac

SEQ ID NO: 28809 - DNA, 29 bp, Homo Sapiens
ttaaattatgataatcatatttaccaacc

SEQ ID NO: 28810 - DNA, 30 bp, Homo Sapiens
ttaaattatgataatcatatttaccaacca

SEQ ID NO: 28811 - DNA, 16 bp, Homo Sapiens
ttaacacaaagcaccc

SEQ ID NO: 28812 - DNA, 17 bp, Homo Sapiens
ttaacacaaagcaccca

SEQ ID NO: 28813 - DNA, 18 bp, Homo Sapiens
ttaacacaaagcacccaa

SEQ ID NO: 28814 - DNA, 19 bp, Homo Sapiens
ttaacacaaagcacccaac

SEQ ID NO: 28815 - DNA, 20 bp, Homo Sapiens
ttaacacaaagcacccaact

SEQ ID NO: 28816 - DNA, 21 bp, Homo Sapiens
ttaacacaaagcacccaactt

SEQ ID NO: 28817 - DNA, 22 bp, Homo Sapiens
ttaacacaaagcacccaactta

SEQ ID NO: 28818 - DNA, 23 bp, Homo Sapiens
ttaacacaaagcacccaacttac

SEQ ID NO: 28819 - DNA, 24 bp, Homo Sapiens
ttaacacaaagcacccaacttaca

SEQ ID NO: 28820 - DNA, 25 bp, Homo Sapiens
ttaacacaaagcacccaacttacac

SEQ ID NO: 28821 - DNA, 26 bp, Homo Sapiens
ttaacacaaagcacccaacttacact

SEQ ID NO: 28822 - DNA, 27 bp, Homo Sapiens
ttaacacaaagcacccaacttacactt

SEQ ID NO: 28823 - DNA, 28 bp, Homo Sapiens
ttaacacaaagcacccaacttacactta

SEQ ID NO: 28824 - DNA, 29 bp, Homo Sapiens
ttaacacaaagcacccaacttacacttag

SEQ ID NO: 28825 - DNA, 31 bp, Homo Sapiens
ttaacacaaagcacccaacttacacttagga

SEQ ID NO: 28826 - DNA, 32 bp, Homo Sapiens
ttaacacaaagcacccaacttacacttaggag

SEQ ID NO: 28827 - DNA, 33 bp, Homo Sapiens
ttaacacaaagcacccaacttacacttaggaga

SEQ ID NO: 28828 - DNA, 34 bp, Homo Sapiens
ttaacacaaagcacccaacttacacttaggagat

SEQ ID NO: 28829 - DNA, 38 bp, Homo Sapiens
ttaacacaaagcacccaacttacacttaggagatttca

SEQ ID NO: 28830 - DNA, 39 bp, Homo Sapiens
ttaacacaaagcacccaacttacacttaggagatttcaa

SEQ ID NO: 28831 - DNA, 40 bp, Homo Sapiens
ttaacacaaagcacccaacttacacttaggagatttcaac

SEQ ID NO: 28832 - DNA, 41 bp, Homo Sapiens
ttaacacaaagcacccaacttacacttaggagatttcaact

SEQ ID NO: 28833 - DNA, 42 bp, Homo Sapiens
ttaacacaaagcacccaacttacacttaggagatttcaactt

SEQ ID NO: 28834 - DNA, 44 bp, Homo Sapiens
ttaacacaaagcacccaacttacacttaggagatttcaacttaa

SEQ ID NO: 28835 - DNA, 45 bp, Homo Sapiens
ttaacacaaagcacccaacttacacttaggagatttcaacttaac

SEQ ID NO: 28836 - DNA, 46 bp, Homo Sapiens
ttaacacaaagcacccaacttacacttaggagatttcaacttaact

SEQ ID NO: 28837 - DNA, 18 bp, Homo Sapiens
ttaaccaaaacatcagat

SEQ ID NO: 28838 - DNA, 19 bp, Homo Sapiens
ttaaccaaaacatcagatt

SEQ ID NO: 28839 - DNA, 20 bp, Homo Sapiens
ttaaccaaaacatcagattg

SEQ ID NO: 28840 - DNA, 21 bp, Homo Sapiens
ttaaccaaaacatcagattgt

SEQ ID NO: 28841 - DNA, 22 bp, Homo Sapiens
ttaaccaaaacatcagattgtg

SEQ ID NO: 28842 - DNA, 23 bp, Homo Sapiens
ttaaccaaaacatcagattgtga

SEQ ID NO: 28843 - DNA, 25 bp, Homo Sapiens
ttaaccaaaacatcagattgtgaat

SEQ ID NO: 28844 - DNA, 26 bp, Homo Sapiens
ttaaccaaaacatcagattgtgaatc

SEQ ID NO: 28845 - DNA, 27 bp, Homo Sapiens
ttaaccaaaacatcagattgtgaatct

SEQ ID NO: 28846 - DNA, 28 bp, Homo Sapiens
ttaaccaaaacatcagattgtgaatctg

SEQ ID NO: 28847 - DNA, 29 bp, Homo Sapiens
ttaaccaaaacatcagattgtgaatctga

SEQ ID NO: 28848 - DNA, 30 bp, Homo Sapiens
ttaaccaaaacatcagattgtgaatctgac

SEQ ID NO: 28849 - DNA, 31 bp, Homo Sapiens
ttaaccaaaacatcagattgtgaatctgaca

SEQ ID NO: 28850 - DNA, 33 bp, Homo Sapiens
ttaaccaaaacatcagattgtgaatctgacaac

SEQ ID NO: 28851 - DNA, 34 bp, Homo Sapiens
ttaaccaaaacatcagattgtgaatctgacaaca

SEQ ID NO: 28852 - DNA, 35 bp, Homo Sapiens
ttaaccaaaacatcagattgtgaatctgacaacag

SEQ ID NO: 28853 - DNA, 36 bp, Homo Sapiens
ttaaccaaaacatcagattgtgaatctgacaacaga

SEQ ID NO: 28854 - DNA, 37 bp, Homo Sapiens
ttaaccaaaacatcagattgtgaatctgacaacagag

SEQ ID NO: 28855 - DNA, 38 bp, Homo Sapiens
ttaaccaaaacatcagattgtgaatctgacaacagagg

SEQ ID NO: 28856 - DNA, 39 bp, Homo Sapiens
ttaaccaaaacatcagattgtgaatctgacaacagaggc

SEQ ID NO: 28857 - DNA, 40 bp, Homo Sapiens
ttaaccaaaacatcagattgtgaatctgacaacagaggct

SEQ ID NO: 28858 - DNA, 41 bp, Homo Sapiens
ttaaccaaaacatcagattgtgaatctgacaacagaggctt

SEQ ID NO: 28859 - DNA, 43 bp, Homo Sapiens
ttaaccaaaacatcagattgtgaatctgacaacagaggcttac

SEQ ID NO: 28860 - DNA, 45 bp, Homo Sapiens
ttaaccaaaacatcagattgtgaatctgacaacagaggcttacga

SEQ ID NO: 28861 - DNA, 46 bp, Homo Sapiens
ttaaccaaaacatcagattgtgaatctgacaacagaggcttacgac

SEQ ID NO: 28862 - DNA, 47 bp, Homo Sapiens
ttaaccaaaacatcagattgtgaatctgacaacagaggcttacgacc

SEQ ID NO: 28863 - DNA, 48 bp, Homo Sapiens
ttaaccaaaacatcagattgtgaatctgacaacagaggcttacgaccc

SEQ ID NO: 28864 - DNA, 41 bp, Homo Sapiens
ttaaccgaaagattggtggttcgagcccacccagggacgcc

SEQ ID NO: 28865 - DNA, 21 bp, Homo Sapiens
ttaaccgaaaggttggtggtt

SEQ ID NO: 28866 - DNA, 22 bp, Homo Sapiens
ttaaccgaaaggttggtggttc

SEQ ID NO: 28867 - DNA, 23 bp, Homo Sapiens
ttaaccgaaaggttggtggttcg

SEQ ID NO: 28868 - DNA, 24 bp, Homo Sapiens
ttaaccgaaaggttggtggttcga

SEQ ID NO: 28869 - DNA, 25 bp, Homo Sapiens
ttaaccgaaaggttggtggttcgag

SEQ ID NO: 28870 - DNA, 26 bp, Homo Sapiens
ttaaccgaaaggttggtggttcgagc

SEQ ID NO: 28871 - DNA, 35 bp, Homo Sapiens
ttaaccgaaaggttggtggttcgagcccacccagg

SEQ ID NO: 28872 - DNA, 36 bp, Homo Sapiens
ttaaccgaaaggttggtggttcgagcccacccaggg

SEQ ID NO: 28873 - DNA, 37 bp, Homo Sapiens
ttaaccgaaaggttggtggttcgagcccacccaggga

SEQ ID NO: 28874 - DNA, 38 bp, Homo Sapiens
ttaaccgaaaggttggtggttcgagcccacccagggac

SEQ ID NO: 28875 - DNA, 39 bp, Homo Sapiens
ttaaccgaaaggttggtggttcgagcccacccagggacg

SEQ ID NO: 28876 - DNA, 40 bp, Homo Sapiens
ttaaccgaaaggttggtggttcgagcccacccagggacgc

SEQ ID NO: 28877 - DNA, 41 bp, Homo Sapiens
ttaaccgaaaggttggtggttcgagcccacccagggacgcc

SEQ ID NO: 28878 - DNA, 42 bp, Homo Sapiens
ttaaccgaaaggttggtggttcgagcccacccagggacgcca

SEQ ID NO: 28879 - DNA, 41 bp, Homo Sapiens
ttaaccgaaaggttggtggttcgatcccacccagggacgcc

SEQ ID NO: 28880 - DNA, 25 bp, Homo Sapiens
ttaaccttttaagttaaagattaag

SEQ ID NO: 28881 - DNA, 26 bp, Homo Sapiens
ttaaccttttaagttaaagattaaga

SEQ ID NO: 28882 - DNA, 27 bp, Homo Sapiens
ttaaccttttaagttaaagattaagag

SEQ ID NO: 28883 - DNA, 30 bp, Homo Sapiens
ttaaccttttaagttaaagattaagagaac

SEQ ID NO: 28884 - DNA, 31 bp, Homo Sapiens
ttaaccttttaagttaaagattaagagaacc

SEQ ID NO: 28885 - DNA, 32 bp, Homo Sapiens
ttaaccttttaagttaaagattaagagaacca

SEQ ID NO: 28886 - DNA, 34 bp, Homo Sapiens
ttaaccttttaagttaaagattaagagaaccaac

SEQ ID NO: 28887 - DNA, 36 bp, Homo Sapiens
ttaaccttttaagttaaagattaagagaaccaacac

SEQ ID NO: 28888 - DNA, 37 bp, Homo Sapiens
ttaaccttttaagttaaagattaagagaaccaacacc

SEQ ID NO: 28889 - DNA, 38 bp, Homo Sapiens
ttaaccttttaagttaaagattaagagaaccaacacct

SEQ ID NO: 28890 - DNA, 19 bp, Homo Sapiens
ttaactaagtgtttgtggg

SEQ ID NO: 28891 - DNA, 20 bp, Homo Sapiens
ttaactaagtgtttgtgggt

SEQ ID NO: 28892 - DNA, 21 bp, Homo Sapiens
ttaactaagtgtttgtgggtt

SEQ ID NO: 28893 - DNA, 22 bp, Homo Sapiens
ttaactaagtgtttgtgggttt

SEQ ID NO: 28894 - DNA, 23 bp, Homo Sapiens
ttaactaagtgtttgtgggttta

SEQ ID NO: 28895 - DNA, 24 bp, Homo Sapiens
ttaactaagtgtttgtgggtttaa

SEQ ID NO: 28896 - DNA, 25 bp, Homo Sapiens
ttaactaagtgtttgtgggtttaag

SEQ ID NO: 28897 - DNA, 26 bp, Homo Sapiens
ttaactaagtgtttgtgggtttaagt

SEQ ID NO: 28898 - DNA, 27 bp, Homo Sapiens
ttaactaagtgtttgtgggtttaagtc

SEQ ID NO: 28899 - DNA, 28 bp, Homo Sapiens
ttaactaagtgtttgtgggtttaagtcc

SEQ ID NO: 28900 - DNA, 30 bp, Homo Sapiens
ttaactaagtgtttgtgggtttaagtccca

SEQ ID NO: 28901 - DNA, 31 bp, Homo Sapiens
ttaactaagtgtttgtgggtttaagtcccat

SEQ ID NO: 28902 - DNA, 32 bp, Homo Sapiens
ttaactaagtgtttgtgggtttaagtcccatt

SEQ ID NO: 28903 - DNA, 33 bp, Homo Sapiens
ttaactaagtgtttgtgggtttaagtcccattg

SEQ ID NO: 28904 - DNA, 34 bp, Homo Sapiens
ttaactaagtgtttgtgggtttaagtcccattgg

SEQ ID NO: 28905 - DNA, 35 bp, Homo Sapiens
ttaactaagtgtttgtgggtttaagtcccattggt

SEQ ID NO: 28906 - DNA, 36 bp, Homo Sapiens
ttaactaagtgtttgtgggtttaagtcccattggtc

SEQ ID NO: 28907 - DNA, 37 bp, Homo Sapiens
ttaactaagtgtttgtgggtttaagtcccattggtct

SEQ ID NO: 28908 - DNA, 38 bp, Homo Sapiens
ttaactaagtgtttgtgggtttaagtcccattggtcta

SEQ ID NO: 28909 - DNA, 39 bp, Homo Sapiens
ttaactaagtgtttgtgggtttaagtcccattggtctag

SEQ ID NO: 28910 - DNA, 40 bp, Homo Sapiens
ttaactaagtgtttgtgggtttaagtcccattggtctagc

SEQ ID NO: 28911 - DNA, 41 bp, Homo Sapiens
ttaactaagtgtttgtgggtttaagtcccattggtctagcc

SEQ ID NO: 28912 - DNA, 42 bp, Homo Sapiens
ttaactaagtgtttgtgggtttaagtcccattggtctagcca

SEQ ID NO: 28913 - DNA, 16 bp, Homo Sapiens
ttaactagttttgaca

SEQ ID NO: 28914 - DNA, 17 bp, Homo Sapiens
ttaactagttttgacaa

SEQ ID NO: 28915 - DNA, 18 bp, Homo Sapiens
ttaactagttttgacaac

SEQ ID NO: 28916 - DNA, 19 bp, Homo Sapiens
ttaactagttttgacaaca

SEQ ID NO: 28917 - DNA, 33 bp, Homo Sapiens
ttaactagttttgacaacattcaaaaaagagta

SEQ ID NO: 28918 - DNA, 34 bp, Homo Sapiens
ttaactagttttgacaacattcaaaaaagagtac

SEQ ID NO: 28919 - DNA, 35 bp, Homo Sapiens
ttaactagttttgacaacattcaaaaaagagtacc

SEQ ID NO: 28920 - DNA, 36 bp, Homo Sapiens
ttaactagttttgacaacattcaaaaaagagtacca

SEQ ID NO: 28921 - DNA, 26 bp, Homo Sapiens
ttaacttccaattaactagttttgac

SEQ ID NO: 28922 - DNA, 27 bp, Homo Sapiens
ttaacttccaattaactagttttgaca

SEQ ID NO: 28923 - DNA, 28 bp, Homo Sapiens
ttaacttccaattaactagttttgacaa

SEQ ID NO: 28924 - DNA, 29 bp, Homo Sapiens
ttaacttccaattaactagttttgacaac

SEQ ID NO: 28925 - DNA, 30 bp, Homo Sapiens
ttaacttccaattaactagttttgacaaca

SEQ ID NO: 28926 - DNA, 46 bp, Homo Sapiens
ttaacttccaattaactagttttgacaacattcaaaaaagagtacc

SEQ ID NO: 28927 - DNA, 47 bp, Homo Sapiens
ttaacttccaattaactagttttgacaacattcaaaaaagagtacca

SEQ ID NO: 28928 - DNA, 16 bp, Homo Sapiens
ttaacttgaccgctct

SEQ ID NO: 28929 - DNA, 17 bp, Homo Sapiens
ttaacttgaccgctctg

SEQ ID NO: 28930 - DNA, 18 bp, Homo Sapiens
ttaacttgaccgctctga

SEQ ID NO: 28931 - DNA, 19 bp, Homo Sapiens
ttaacttgaccgctctgac

SEQ ID NO: 28932 - DNA, 20 bp, Homo Sapiens
ttaacttgaccgctctgacc

SEQ ID NO: 28933 - DNA, 21 bp, Homo Sapiens
ttaacttgaccgctctgacca

SEQ ID NO: 28934 - DNA, 16 bp, Homo Sapiens
ttaagagaaccaacac

SEQ ID NO: 28935 - DNA, 17 bp, Homo Sapiens
ttaagagaaccaacacc

SEQ ID NO: 28936 - DNA, 18 bp, Homo Sapiens
ttaagagaaccaacacct

SEQ ID NO: 28937 - DNA, 19 bp, Homo Sapiens
ttaagagaaccaacacctc

SEQ ID NO: 28938 - DNA, 20 bp, Homo Sapiens
ttaagagaaccaacacctct

SEQ ID NO: 28939 - DNA, 23 bp, Homo Sapiens
ttaagagaaccaacacctcttta

SEQ ID NO: 28940 - DNA, 26 bp, Homo Sapiens
ttaagagaaccaacacctctttacag

SEQ ID NO: 28941 - DNA, 28 bp, Homo Sapiens
ttaagagaaccaacacctctttacagtg

SEQ ID NO: 28942 - DNA, 29 bp, Homo Sapiens
ttaagagaaccaacacctctttacagtga

SEQ ID NO: 28943 - DNA, 30 bp, Homo Sapiens
ttaagagaaccaacacctctttacagtgac

SEQ ID NO: 28944 - DNA, 31 bp, Homo Sapiens
ttaagagaaccaacacctctttacagtgacc

SEQ ID NO: 28945 - DNA, 32 bp, Homo Sapiens
ttaagagaaccaacacctctttacagtgacca

SEQ ID NO: 28946 - DNA, 18 bp, Homo Sapiens
ttaagatccaatggacat

SEQ ID NO: 28947 - DNA, 16 bp, Homo Sapiens
ttaagatggcagagcc

SEQ ID NO: 28948 - DNA, 17 bp, Homo Sapiens
ttaagatggcagagccc

SEQ ID NO: 28949 - DNA, 18 bp, Homo Sapiens
ttaagatggcagagcccg

SEQ ID NO: 28950 - DNA, 19 bp, Homo Sapiens
ttaagatggcagagcccgg

SEQ ID NO: 28951 - DNA, 20 bp, Homo Sapiens
ttaagatggcagagcccggt

SEQ ID NO: 28952 - DNA, 21 bp, Homo Sapiens
ttaagatggcagagcccggta

SEQ ID NO: 28953 - DNA, 22 bp, Homo Sapiens
ttaagatggcagagcccggtaa

SEQ ID NO: 28954 - DNA, 23 bp, Homo Sapiens
ttaagatggcagagcccggtaat

SEQ ID NO: 28955 - DNA, 24 bp, Homo Sapiens
ttaagatggcagagcccggtaatc

SEQ ID NO: 28956 - DNA, 25 bp, Homo Sapiens
ttaagatggcagagcccggtaatcg

SEQ ID NO: 28957 - DNA, 28 bp, Homo Sapiens
ttaagatggcagagcccggtaatcgcat

SEQ ID NO: 28958 - DNA, 29 bp, Homo Sapiens
ttaagatggcagagcccggtaatcgcata

SEQ ID NO: 28959 - DNA, 30 bp, Homo Sapiens
ttaagatggcagagcccggtaatcgcataa

SEQ ID NO: 28960 - DNA, 31 bp, Homo Sapiens
ttaagatggcagagcccggtaatcgcataaa

SEQ ID NO: 28961 - DNA, 32 bp, Homo Sapiens
ttaagatggcagagcccggtaatcgcataaaa

SEQ ID NO: 28962 - DNA, 33 bp, Homo Sapiens
ttaagatggcagagcccggtaatcgcataaaac

SEQ ID NO: 28963 - DNA, 34 bp, Homo Sapiens
ttaagatggcagagcccggtaatcgcataaaact

SEQ ID NO: 28964 - DNA, 36 bp, Homo Sapiens
ttaagatggcagagcccggtaatcgcataaaactta

SEQ ID NO: 28965 - DNA, 37 bp, Homo Sapiens
ttaagatggcagagcccggtaatcgcataaaacttaa

SEQ ID NO: 28966 - DNA, 38 bp, Homo Sapiens
ttaagatggcagagcccggtaatcgcataaaacttaaa

SEQ ID NO: 28967 - DNA, 41 bp, Homo Sapiens
ttaagatggcagagcccggtaatcgcataaaacttaaaact

SEQ ID NO: 28968 - DNA, 42 bp, Homo Sapiens
ttaagatggcagagcccggtaatcgcataaaacttaaaactt

SEQ ID NO: 28969 - DNA, 43 bp, Homo Sapiens
ttaagatggcagagcccggtaatcgcataaaacttaaaacttt

SEQ ID NO: 28970 - DNA, 16 bp, Homo Sapiens
ttaaggctccagtctc

SEQ ID NO: 28971 - DNA, 16 bp, Homo Sapiens
ttaagtcccattggtc

SEQ ID NO: 28972 - DNA, 17 bp, Homo Sapiens
ttaagtcccattggtct

SEQ ID NO: 28973 - DNA, 18 bp, Homo Sapiens
ttaagtcccattggtcta

SEQ ID NO: 28974 - DNA, 20 bp, Homo Sapiens
ttaagtcccattggtctagc

SEQ ID NO: 28975 - DNA, 21 bp, Homo Sapiens
ttaagtcccattggtctagcc

SEQ ID NO: 28976 - DNA, 22 bp, Homo Sapiens
ttaagtcccattggtctagcca

SEQ ID NO: 28977 - DNA, 17 bp, Homo Sapiens
ttaagttaaagattaag

SEQ ID NO: 28978 - DNA, 19 bp, Homo Sapiens
ttaagttaaagattaagag

SEQ ID NO: 28979 - DNA, 20 bp, Homo Sapiens
ttaagttaaagattaagaga

SEQ ID NO: 28980 - DNA, 21 bp, Homo Sapiens
ttaagttaaagattaagagaa

SEQ ID NO: 28981 - DNA, 22 bp, Homo Sapiens
ttaagttaaagattaagagaac

SEQ ID NO: 28982 - DNA, 23 bp, Homo Sapiens
ttaagttaaagattaagagaacc

SEQ ID NO: 28983 - DNA, 24 bp, Homo Sapiens
ttaagttaaagattaagagaacca

SEQ ID NO: 28984 - DNA, 25 bp, Homo Sapiens
ttaagttaaagattaagagaaccaa

SEQ ID NO: 28985 - DNA, 26 bp, Homo Sapiens
ttaagttaaagattaagagaaccaac

SEQ ID NO: 28986 - DNA, 27 bp, Homo Sapiens
ttaagttaaagattaagagaaccaaca

SEQ ID NO: 28987 - DNA, 28 bp, Homo Sapiens
ttaagttaaagattaagagaaccaacac

SEQ ID NO: 28988 - DNA, 29 bp, Homo Sapiens
ttaagttaaagattaagagaaccaacacc

SEQ ID NO: 28989 - DNA, 30 bp, Homo Sapiens
ttaagttaaagattaagagaaccaacacct

SEQ ID NO: 28990 - DNA, 31 bp, Homo Sapiens
ttaagttaaagattaagagaaccaacacctc

SEQ ID NO: 28991 - DNA, 32 bp, Homo Sapiens
ttaagttaaagattaagagaaccaacacctct

SEQ ID NO: 28992 - DNA, 33 bp, Homo Sapiens
ttaagttaaagattaagagaaccaacacctctt

SEQ ID NO: 28993 - DNA, 34 bp, Homo Sapiens
ttaagttaaagattaagagaaccaacacctcttt

SEQ ID NO: 28994 - DNA, 35 bp, Homo Sapiens
ttaagttaaagattaagagaaccaacacctcttta

SEQ ID NO: 28995 - DNA, 37 bp, Homo Sapiens
ttaagttaaagattaagagaaccaacacctctttaca

SEQ ID NO: 28996 - DNA, 38 bp, Homo Sapiens
ttaagttaaagattaagagaaccaacacctctttacag

SEQ ID NO: 28997 - DNA, 39 bp, Homo Sapiens
ttaagttaaagattaagagaaccaacacctctttacagt

SEQ ID NO: 28998 - DNA, 40 bp, Homo Sapiens
ttaagttaaagattaagagaaccaacacctctttacagtg

SEQ ID NO: 28999 - DNA, 41 bp, Homo Sapiens
ttaagttaaagattaagagaaccaacacctctttacagtga

SEQ ID NO: 29000 - DNA, 42 bp, Homo Sapiens
ttaagttaaagattaagagaaccaacacctctttacagtgac

SEQ ID NO: 29001 - DNA, 43 bp, Homo Sapiens
ttaagttaaagattaagagaaccaacacctctttacagtgacc

SEQ ID NO: 29002 - DNA, 44 bp, Homo Sapiens
ttaagttaaagattaagagaaccaacacctctttacagtgacca

SEQ ID NO: 29003 - DNA, 16 bp, Homo Sapiens
ttaatcccagggtcgt

SEQ ID NO: 29004 - DNA, 17 bp, Homo Sapiens
ttaatcccagggtcgtg

SEQ ID NO: 29005 - DNA, 18 bp, Homo Sapiens
ttaatcccagggtcgtgg

SEQ ID NO: 29006 - DNA, 35 bp, Homo Sapiens
ttaatcccagggtcgtgggttcgagccccacgttg

SEQ ID NO: 29007 - DNA, 41 bp, Homo Sapiens
ttaatcccagggtcgtgggttcgagccccacgttgggcgcc

SEQ ID NO: 29008 - DNA, 42 bp, Homo Sapiens
ttaatcccagggtcgtgggttcgagccccacgttgggcgcca

SEQ ID NO: 29009 - DNA, 16 bp, Homo Sapiens
ttaatctcagggtcgt

SEQ ID NO: 29010 - DNA, 17 bp, Homo Sapiens
ttaatctcagggtcgtg

SEQ ID NO: 29011 - DNA, 18 bp, Homo Sapiens
ttaatctcagggtcgtgg

SEQ ID NO: 29012 - DNA, 19 bp, Homo Sapiens
ttaatctcagggtcgtggg

SEQ ID NO: 29013 - DNA, 38 bp, Homo Sapiens
ttaatctcagggtcgtgggttcgagccccacgttgggc

SEQ ID NO: 29014 - DNA, 39 bp, Homo Sapiens
ttaatctcagggtcgtgggttcgagccccacgttgggcg

SEQ ID NO: 29015 - DNA, 41 bp, Homo Sapiens
ttaatctcagggtcgtgggttcgagccccacgttgggcgcc

SEQ ID NO: 29016 - DNA, 42 bp, Homo Sapiens
ttaatctcagggtcgtgggttcgagccccacgttgggcgcca

SEQ ID NO: 29017 - DNA, 21 bp, Homo Sapiens
ttaatctgagggtccagggtt

SEQ ID NO: 29018 - DNA, 23 bp, Homo Sapiens
ttaatctgagggtccagggttca

SEQ ID NO: 29019 - DNA, 25 bp, Homo Sapiens
ttaatctgagggtccagggttcaag

SEQ ID NO: 29020 - DNA, 26 bp, Homo Sapiens
ttaatctgagggtccagggttcaagt

SEQ ID NO: 29021 - DNA, 41 bp, Homo Sapiens
ttaatctgagggtccagggttcaagtccctgtccaggcgcc

SEQ ID NO: 29022 - DNA, 42 bp, Homo Sapiens
ttaatctgagggtccagggttcaagtccctgtccaggcgcca

SEQ ID NO: 29023 - DNA, 41 bp, Homo Sapiens
ttaatctgagggtccagggttcaagtccctgttcaggcgcc

SEQ ID NO: 29024 - DNA, 36 bp, Homo Sapiens
ttaatctgagggtccagggttcaagtccctgttcgg

SEQ ID NO: 29025 - DNA, 40 bp, Homo Sapiens
ttaatctgagggtccagggttcaagtccctgttcgggcgc

SEQ ID NO: 29026 - DNA, 41 bp, Homo Sapiens
ttaatctgagggtccagggttcaagtccctgttcgggcgcc

SEQ ID NO: 29027 - DNA, 42 bp, Homo Sapiens
ttaatctgagggtccagggttcaagtccctgttcgggcgcca

SEQ ID NO: 29028 - DNA, 24 bp, Homo Sapiens
ttaatctgagggtccagggttcat

SEQ ID NO: 29029 - DNA, 16 bp, Homo Sapiens
ttaattaaagtggctg

SEQ ID NO: 29030 - DNA, 17 bp, Homo Sapiens
ttaattaaagtggctga

SEQ ID NO: 29031 - DNA, 18 bp, Homo Sapiens
ttaattaaagtggctgat

SEQ ID NO: 29032 - DNA, 19 bp, Homo Sapiens
ttaattaaagtggctgatt

SEQ ID NO: 29033 - DNA, 20 bp, Homo Sapiens
ttaattaaagtggctgattt

SEQ ID NO: 29034 - DNA, 21 bp, Homo Sapiens
ttaattaaagtggctgatttg

SEQ ID NO: 29035 - DNA, 22 bp, Homo Sapiens
ttaattaaagtggctgatttgc

SEQ ID NO: 29036 - DNA, 19 bp, Homo Sapiens
ttacacgcagaaggtcctg

SEQ ID NO: 29037 - DNA, 39 bp, Homo Sapiens
ttacacgcagaaggtcctgggttcgagccccagtggaac

SEQ ID NO: 29038 - DNA, 43 bp, Homo Sapiens
ttacacgcagaaggtcctgggttcgagccccagtggaaccacc

SEQ ID NO: 29039 - DNA, 16 bp, Homo Sapiens
ttacacttaggagatt

SEQ ID NO: 29040 - DNA, 17 bp, Homo Sapiens
ttacacttaggagattt

SEQ ID NO: 29041 - DNA, 18 bp, Homo Sapiens
ttacacttaggagatttc

SEQ ID NO: 29042 - DNA, 19 bp, Homo Sapiens
ttacacttaggagatttca

SEQ ID NO: 29043 - DNA, 20 bp, Homo Sapiens
ttacacttaggagatttcaa

SEQ ID NO: 29044 - DNA, 21 bp, Homo Sapiens
ttacacttaggagatttcaac

SEQ ID NO: 29045 - DNA, 22 bp, Homo Sapiens
ttacacttaggagatttcaact

SEQ ID NO: 29046 - DNA, 23 bp, Homo Sapiens
ttacacttaggagatttcaactt

SEQ ID NO: 29047 - DNA, 24 bp, Homo Sapiens
ttacacttaggagatttcaactta

SEQ ID NO: 29048 - DNA, 25 bp, Homo Sapiens
ttacacttaggagatttcaacttaa

SEQ ID NO: 29049 - DNA, 26 bp, Homo Sapiens
ttacacttaggagatttcaacttaac

SEQ ID NO: 29050 - DNA, 27 bp, Homo Sapiens
ttacacttaggagatttcaacttaact

SEQ ID NO: 29051 - DNA, 28 bp, Homo Sapiens
ttacacttaggagatttcaacttaactt

SEQ ID NO: 29052 - DNA, 29 bp, Homo Sapiens
ttacacttaggagatttcaacttaacttg

SEQ ID NO: 29053 - DNA, 30 bp, Homo Sapiens
ttacacttaggagatttcaacttaacttga

SEQ ID NO: 29054 - DNA, 31 bp, Homo Sapiens
ttacacttaggagatttcaacttaacttgac

SEQ ID NO: 29055 - DNA, 32 bp, Homo Sapiens
ttacacttaggagatttcaacttaacttgacc

SEQ ID NO: 29056 - DNA, 33 bp, Homo Sapiens
ttacacttaggagatttcaacttaacttgaccg

SEQ ID NO: 29057 - DNA, 34 bp, Homo Sapiens
ttacacttaggagatttcaacttaacttgaccgc

SEQ ID NO: 29058 - DNA, 35 bp, Homo Sapiens
ttacacttaggagatttcaacttaacttgaccgct

SEQ ID NO: 29059 - DNA, 36 bp, Homo Sapiens
ttacacttaggagatttcaacttaacttgaccgctc

SEQ ID NO: 29060 - DNA, 37 bp, Homo Sapiens
ttacacttaggagatttcaacttaacttgaccgctct

SEQ ID NO: 29061 - DNA, 38 bp, Homo Sapiens
ttacacttaggagatttcaacttaacttgaccgctctg

SEQ ID NO: 29062 - DNA, 39 bp, Homo Sapiens
ttacacttaggagatttcaacttaacttgaccgctctga

SEQ ID NO: 29063 - DNA, 40 bp, Homo Sapiens
ttacacttaggagatttcaacttaacttgaccgctctgac

SEQ ID NO: 29064 - DNA, 41 bp, Homo Sapiens
ttacacttaggagatttcaacttaacttgaccgctctgacc

SEQ ID NO: 29065 - DNA, 42 bp, Homo Sapiens
ttacacttaggagatttcaacttaacttgaccgctctgacca

SEQ ID NO: 29066 - DNA, 16 bp, Homo Sapiens
ttacagtcagaggttc

SEQ ID NO: 29067 - DNA, 17 bp, Homo Sapiens
ttacagtcagaggttca

SEQ ID NO: 29068 - DNA, 18 bp, Homo Sapiens
ttacagtcagaggttcaa

SEQ ID NO: 29069 - DNA, 21 bp, Homo Sapiens
ttacagtcagaggttcaattc

SEQ ID NO: 29070 - DNA, 22 bp, Homo Sapiens
ttacagtcagaggttcaattcc

SEQ ID NO: 29071 - DNA, 23 bp, Homo Sapiens
ttacagtcagaggttcaattcct

SEQ ID NO: 29072 - DNA, 24 bp, Homo Sapiens
ttacagtcagaggttcaattcctc

SEQ ID NO: 29073 - DNA, 25 bp, Homo Sapiens
ttacagtcagaggttcaattcctct

SEQ ID NO: 29074 - DNA, 27 bp, Homo Sapiens
ttacagtcagaggttcaattcctcttc

SEQ ID NO: 29075 - DNA, 28 bp, Homo Sapiens
ttacagtcagaggttcaattcctcttct

SEQ ID NO: 29076 - DNA, 33 bp, Homo Sapiens
ttacagtcagaggttcaattcctcttcttaaca

SEQ ID NO: 29077 - DNA, 34 bp, Homo Sapiens
ttacagtcagaggttcaattcctcttcttaacac

SEQ ID NO: 29078 - DNA, 35 bp, Homo Sapiens
ttacagtcagaggttcaattcctcttcttaacacc

SEQ ID NO: 29079 - DNA, 16 bp, Homo Sapiens
ttacctcctcaaagca

SEQ ID NO: 29080 - DNA, 19 bp, Homo Sapiens
ttacctcctcaaagcaata

SEQ ID NO: 29081 - DNA, 21 bp, Homo Sapiens
ttacctcctcaaagcaataca

SEQ ID NO: 29082 - DNA, 22 bp, Homo Sapiens
ttacctcctcaaagcaatacac

SEQ ID NO: 29083 - DNA, 23 bp, Homo Sapiens
ttacctcctcaaagcaatacact

SEQ ID NO: 29084 - DNA, 24 bp, Homo Sapiens
ttacctcctcaaagcaatacactg

SEQ ID NO: 29085 - DNA, 25 bp, Homo Sapiens
ttacctcctcaaagcaatacactga

SEQ ID NO: 29086 - DNA, 26 bp, Homo Sapiens
ttacctcctcaaagcaatacactgaa

SEQ ID NO: 29087 - DNA, 42 bp, Homo Sapiens
ttacctcctcaaagcaatacactgaaaatgtttagacgggct

SEQ ID NO: 29088 - DNA, 18 bp, Homo Sapiens
ttacgaccccttatttac

SEQ ID NO: 29089 - DNA, 19 bp, Homo Sapiens
ttacgaccccttatttacc

SEQ ID NO: 29090 - DNA, 20 bp, Homo Sapiens
ttacgaccccttatttaccc

SEQ ID NO: 29091 - DNA, 21 bp, Homo Sapiens
ttacgaccccttatttacccc

SEQ ID NO: 29092 - DNA, 22 bp, Homo Sapiens
ttacgaccccttatttacccca

SEQ ID NO: 29093 - DNA, 26 bp, Homo Sapiens
ttactttgatagagtaaataatagga

SEQ ID NO: 29094 - DNA, 27 bp, Homo Sapiens
ttactttgatagagtaaataataggag

SEQ ID NO: 29095 - DNA, 28 bp, Homo Sapiens
ttactttgatagagtaaataataggagc

SEQ ID NO: 29096 - DNA, 29 bp, Homo Sapiens
ttactttgatagagtaaataataggagct

SEQ ID NO: 29097 - DNA, 30 bp, Homo Sapiens
ttactttgatagagtaaataataggagctt

SEQ ID NO: 29098 - DNA, 31 bp, Homo Sapiens
ttactttgatagagtaaataataggagctta

SEQ ID NO: 29099 - DNA, 32 bp, Homo Sapiens
ttactttgatagagtaaataataggagcttaa

SEQ ID NO: 29100 - DNA, 35 bp, Homo Sapiens
ttactttgatagagtaaataataggagcttaaacc

SEQ ID NO: 29101 - DNA, 36 bp, Homo Sapiens
ttactttgatagagtaaataataggagcttaaaccc

SEQ ID NO: 29102 - DNA, 37 bp, Homo Sapiens
ttactttgatagagtaaataataggagcttaaacccc

SEQ ID NO: 29103 - DNA, 16 bp, Homo Sapiens
ttagaatcttagcttt

SEQ ID NO: 29104 - DNA, 17 bp, Homo Sapiens
ttagaatcttagctttg

SEQ ID NO: 29105 - DNA, 18 bp, Homo Sapiens
ttagaatcttagctttgg

SEQ ID NO: 29106 - DNA, 19 bp, Homo Sapiens
ttagaatcttagctttggg

SEQ ID NO: 29107 - DNA, 21 bp, Homo Sapiens
ttagaatcttagctttgggtg

SEQ ID NO: 29108 - DNA, 22 bp, Homo Sapiens
ttagaatcttagctttgggtgc

SEQ ID NO: 29109 - DNA, 23 bp, Homo Sapiens
ttagaatcttagctttgggtgct

SEQ ID NO: 29110 - DNA, 25 bp, Homo Sapiens
ttagaatcttagctttgggtgctaa

SEQ ID NO: 29111 - DNA, 28 bp, Homo Sapiens
ttagaatcttagctttgggtgctaatgg

SEQ ID NO: 29112 - DNA, 33 bp, Homo Sapiens
ttagaatcttagctttgggtgctaatggtggag

SEQ ID NO: 29113 - DNA, 34 bp, Homo Sapiens
ttagaatcttagctttgggtgctaatggtggagt

SEQ ID NO: 29114 - DNA, 35 bp, Homo Sapiens
ttagaatcttagctttgggtgctaatggtggagtt

SEQ ID NO: 29115 - DNA, 36 bp, Homo Sapiens
ttagaatcttagctttgggtgctaatggtggagtta

SEQ ID NO: 29116 - DNA, 37 bp, Homo Sapiens
ttagaatcttagctttgggtgctaatggtggagttaa

SEQ ID NO: 29117 - DNA, 38 bp, Homo Sapiens
ttagaatcttagctttgggtgctaatggtggagttaaa

SEQ ID NO: 29118 - DNA, 39 bp, Homo Sapiens
ttagaatcttagctttgggtgctaatggtggagttaaag

SEQ ID NO: 29119 - DNA, 40 bp, Homo Sapiens
ttagaatcttagctttgggtgctaatggtggagttaaaga

SEQ ID NO: 29120 - DNA, 41 bp, Homo Sapiens
ttagaatcttagctttgggtgctaatggtggagttaaagac

SEQ ID NO: 29121 - DNA, 42 bp, Homo Sapiens
ttagaatcttagctttgggtgctaatggtggagttaaagact

SEQ ID NO: 29122 - DNA, 43 bp, Homo Sapiens
ttagaatcttagctttgggtgctaatggtggagttaaagactt

SEQ ID NO: 29123 - DNA, 44 bp, Homo Sapiens
ttagaatcttagctttgggtgctaatggtggagttaaagacttt

SEQ ID NO: 29124 - DNA, 47 bp, Homo Sapiens
ttagaatcttagctttgggtgctaatggtggagttaaagactttttc

SEQ ID NO: 29125 - DNA, 48 bp, Homo Sapiens
ttagaatcttagctttgggtgctaatggtggagttaaagactttttct

SEQ ID NO: 29126 - DNA, 16 bp, Homo Sapiens
ttagacgggctcacat

SEQ ID NO: 29127 - DNA, 17 bp, Homo Sapiens
ttagacgggctcacatc

SEQ ID NO: 29128 - DNA, 18 bp, Homo Sapiens
ttagacgggctcacatca

SEQ ID NO: 29129 - DNA, 19 bp, Homo Sapiens
ttagacgggctcacatcac

SEQ ID NO: 29130 - DNA, 20 bp, Homo Sapiens
ttagacgggctcacatcacc

SEQ ID NO: 29131 - DNA, 21 bp, Homo Sapiens
ttagacgggctcacatcaccc

SEQ ID NO: 29132 - DNA, 22 bp, Homo Sapiens
ttagacgggctcacatcacccc

SEQ ID NO: 29133 - DNA, 23 bp, Homo Sapiens
ttagacgggctcacatcacccca

SEQ ID NO: 29134 - DNA, 24 bp, Homo Sapiens
ttagacgggctcacatcaccccat

SEQ ID NO: 29135 - DNA, 25 bp, Homo Sapiens
ttagacgggctcacatcaccccata

SEQ ID NO: 29136 - DNA, 26 bp, Homo Sapiens
ttagacgggctcacatcaccccataa

SEQ ID NO: 29137 - DNA, 27 bp, Homo Sapiens
ttagacgggctcacatcaccccataaa

SEQ ID NO: 29138 - DNA, 28 bp, Homo Sapiens
ttagacgggctcacatcaccccataaac

SEQ ID NO: 29139 - DNA, 29 bp, Homo Sapiens
ttagacgggctcacatcaccccataaaca

SEQ ID NO: 29140 - DNA, 30 bp, Homo Sapiens
ttagacgggctcacatcaccccataaacac

SEQ ID NO: 29141 - DNA, 31 bp, Homo Sapiens
ttagacgggctcacatcaccccataaacacc

SEQ ID NO: 29142 - DNA, 32 bp, Homo Sapiens
ttagacgggctcacatcaccccataaacacca

SEQ ID NO: 29143 - DNA, 16 bp, Homo Sapiens
ttagagccagactgcc

SEQ ID NO: 29144 - DNA, 17 bp, Homo Sapiens
ttagagccagactgcct

SEQ ID NO: 29145 - DNA, 18 bp, Homo Sapiens
ttagagccagactgcctg

SEQ ID NO: 29146 - DNA, 19 bp, Homo Sapiens
ttagagccagactgcctgg

SEQ ID NO: 29147 - DNA, 20 bp, Homo Sapiens
ttagagccagactgcctggg

SEQ ID NO: 29148 - DNA, 21 bp, Homo Sapiens
ttagagccagactgcctgggt

SEQ ID NO: 29149 - DNA, 22 bp, Homo Sapiens
ttagagccagactgcctgggtt

SEQ ID NO: 29150 - DNA, 23 bp, Homo Sapiens
ttagagccagactgcctgggttt

SEQ ID NO: 29151 - DNA, 24 bp, Homo Sapiens
ttagagccagactgcctgggtttg

SEQ ID NO: 29152 - DNA, 25 bp, Homo Sapiens
ttagagccagactgcctgggtttga

SEQ ID NO: 29153 - DNA, 16 bp, Homo Sapiens
ttagcactctggactc

SEQ ID NO: 29154 - DNA, 17 bp, Homo Sapiens
ttagcactctggactct

SEQ ID NO: 29155 - DNA, 18 bp, Homo Sapiens
ttagcactctggactctg

SEQ ID NO: 29156 - DNA, 19 bp, Homo Sapiens
ttagcactctggactctga

SEQ ID NO: 29157 - DNA, 20 bp, Homo Sapiens
ttagcactctggactctgaa

SEQ ID NO: 29158 - DNA, 21 bp, Homo Sapiens
ttagcactctggactctgaat

SEQ ID NO: 29159 - DNA, 22 bp, Homo Sapiens
ttagcactctggactctgaatc

SEQ ID NO: 29160 - DNA, 23 bp, Homo Sapiens
ttagcactctggactctgaatcc

SEQ ID NO: 29161 - DNA, 24 bp, Homo Sapiens
ttagcactctggactctgaatcca

SEQ ID NO: 29162 - DNA, 25 bp, Homo Sapiens
ttagcactctggactctgaatccag

SEQ ID NO: 29163 - DNA, 26 bp, Homo Sapiens
ttagcactctggactctgaatccagc

SEQ ID NO: 29164 - DNA, 27 bp, Homo Sapiens
ttagcactctggactctgaatccagcg

SEQ ID NO: 29165 - DNA, 30 bp, Homo Sapiens
ttagcactctggactctgaatccagcgatc

SEQ ID NO: 29166 - DNA, 31 bp, Homo Sapiens
ttagcactctggactctgaatccagcgatcc

SEQ ID NO: 29167 - DNA, 32 bp, Homo Sapiens
ttagcactctggactctgaatccagcgatccg

SEQ ID NO: 29168 - DNA, 33 bp, Homo Sapiens
ttagcactctggactctgaatccagcgatccga

SEQ ID NO: 29169 - DNA, 34 bp, Homo Sapiens
ttagcactctggactctgaatccagcgatccgag

SEQ ID NO: 29170 - DNA, 35 bp, Homo Sapiens
ttagcactctggactctgaatccagcgatccgagt

SEQ ID NO: 29171 - DNA, 36 bp, Homo Sapiens
ttagcactctggactctgaatccagcgatccgagtt

SEQ ID NO: 29172 - DNA, 37 bp, Homo Sapiens
ttagcactctggactctgaatccagcgatccgagttc

SEQ ID NO: 29173 - DNA, 38 bp, Homo Sapiens
ttagcactctggactctgaatccagcgatccgagttca

SEQ ID NO: 29174 - DNA, 39 bp, Homo Sapiens
ttagcactctggactctgaatccagcgatccgagttcaa

SEQ ID NO: 29175 - DNA, 40 bp, Homo Sapiens
ttagcactctggactctgaatccagcgatccgagttcaaa

SEQ ID NO: 29176 - DNA, 46 bp, Homo Sapiens
ttagcactctggactctgaatccagcgatccgagttcaaatctcgg

SEQ ID NO: 29177 - DNA, 48 bp, Homo Sapiens
ttagcactctggactctgaatccagcgatccgagttcaaatctcggtg

SEQ ID NO: 29178 - DNA, 18 bp, Homo Sapiens
ttagcactctggactttg

SEQ ID NO: 29179 - DNA, 19 bp, Homo Sapiens
ttagcactctggactttga

SEQ ID NO: 29180 - DNA, 20 bp, Homo Sapiens
ttagcactctggactttgaa

SEQ ID NO: 29181 - DNA, 21 bp, Homo Sapiens
ttagcactctggactttgaat

SEQ ID NO: 29182 - DNA, 22 bp, Homo Sapiens
ttagcactctggactttgaatc

SEQ ID NO: 29183 - DNA, 23 bp, Homo Sapiens
ttagcactctggactttgaatcc

SEQ ID NO: 29184 - DNA, 24 bp, Homo Sapiens
ttagcactctggactttgaatcca

SEQ ID NO: 29185 - DNA, 26 bp, Homo Sapiens
ttagcactctggactttgaatccagc

SEQ ID NO: 29186 - DNA, 34 bp, Homo Sapiens
ttagcactctggactttgaatccagcaatccgag

SEQ ID NO: 29187 - DNA, 33 bp, Homo Sapiens
ttagcactctggactttgaatccagcgatccga

SEQ ID NO: 29188 - DNA, 34 bp, Homo Sapiens
ttagcactctggactttgaatccagcgatccgag

SEQ ID NO: 29189 - DNA, 35 bp, Homo Sapiens
ttagcactctggactttgaatccagcgatccgagt

SEQ ID NO: 29190 - DNA, 36 bp, Homo Sapiens
ttagcactctggactttgaatccagcgatccgagtt

SEQ ID NO: 29191 - DNA, 37 bp, Homo Sapiens
ttagcactctggactttgaatccagcgatccgagttc

SEQ ID NO: 29192 - DNA, 38 bp, Homo Sapiens
ttagcactctggactttgaatccagcgatccgagttca

SEQ ID NO: 29193 - DNA, 18 bp, Homo Sapiens
ttagcatagctgccttcc

SEQ ID NO: 29194 - DNA, 33 bp, Homo Sapiens
ttagcatagctgccttccaagcagttgacccgg

SEQ ID NO: 29195 - DNA, 38 bp, Homo Sapiens
ttagcatagctgccttccaagcagttgacccgggttcg

SEQ ID NO: 29196 - DNA, 18 bp, Homo Sapiens
ttagcattaaccttttaa

SEQ ID NO: 29197 - DNA, 19 bp, Homo Sapiens
ttagcattaaccttttaag

SEQ ID NO: 29198 - DNA, 20 bp, Homo Sapiens
ttagcattaaccttttaagt

SEQ ID NO: 29199 - DNA, 21 bp, Homo Sapiens
ttagcattaaccttttaagtt

SEQ ID NO: 29200 - DNA, 36 bp, Homo Sapiens
ttagcattaaccttttaagttaaagattaagagaac

SEQ ID NO: 29201 - DNA, 37 bp, Homo Sapiens
ttagcattaaccttttaagttaaagattaagagaacc

SEQ ID NO: 29202 - DNA, 39 bp, Homo Sapiens
ttagcattaaccttttaagttaaagattaagagaaccaa

SEQ ID NO: 29203 - DNA, 40 bp, Homo Sapiens
ttagcattaaccttttaagttaaagattaagagaaccaac

SEQ ID NO: 29204 - DNA, 42 bp, Homo Sapiens
ttagcattaaccttttaagttaaagattaagagaaccaacac

SEQ ID NO: 29205 - DNA, 43 bp, Homo Sapiens
ttagcattaaccttttaagttaaagattaagagaaccaacacc

SEQ ID NO: 29206 - DNA, 44 bp, Homo Sapiens
ttagcattaaccttttaagttaaagattaagagaaccaacacct

SEQ ID NO: 29207 - DNA, 17 bp, Homo Sapiens
ttagcgcagtaggcagc

SEQ ID NO: 29208 - DNA, 16 bp, Homo Sapiens
ttagcgcagtaggtag

SEQ ID NO: 29209 - DNA, 17 bp, Homo Sapiens
ttagcgcagtaggtagc

SEQ ID NO: 29210 - DNA, 19 bp, Homo Sapiens
ttagcgcagtaggtagcgc

SEQ ID NO: 29211 - DNA, 18 bp, Homo Sapiens
ttagcgcgttcggctgtt

SEQ ID NO: 29212 - DNA, 22 bp, Homo Sapiens
ttagcgcgttcggctgttaacc

SEQ ID NO: 29213 - DNA, 23 bp, Homo Sapiens
ttagcgcgttcggctgttaaccg

SEQ ID NO: 29214 - DNA, 37 bp, Homo Sapiens
ttagcgcgttcggctgttaaccgaaaggttggtggtt

SEQ ID NO: 29215 - DNA, 21 bp, Homo Sapiens
ttagcggtagagcatttgact

SEQ ID NO: 29216 - DNA, 23 bp, Homo Sapiens
ttagcggtagagcatttgactgc

SEQ ID NO: 29217 - DNA, 21 bp, Homo Sapiens
ttagctgttaactaagtgttt

SEQ ID NO: 29218 - DNA, 23 bp, Homo Sapiens
ttagctgttaactaagtgtttgt

SEQ ID NO: 29219 - DNA, 24 bp, Homo Sapiens
ttagctgttaactaagtgtttgtg

SEQ ID NO: 29220 - DNA, 25 bp, Homo Sapiens
ttagctgttaactaagtgtttgtgg

SEQ ID NO: 29221 - DNA, 27 bp, Homo Sapiens
ttagctgttaactaagtgtttgtgggt

SEQ ID NO: 29222 - DNA, 29 bp, Homo Sapiens
ttagctgttaactaagtgtttgtgggttt

SEQ ID NO: 29223 - DNA, 30 bp, Homo Sapiens
ttagctgttaactaagtgtttgtgggttta

SEQ ID NO: 29224 - DNA, 31 bp, Homo Sapiens
ttagctgttaactaagtgtttgtgggtttaa

SEQ ID NO: 29225 - DNA, 39 bp, Homo Sapiens
ttagctgttaactaagtgtttgtgggtttaagtcccatt

SEQ ID NO: 29226 - DNA, 42 bp, Homo Sapiens
ttagctgttaactaagtgtttgtgggtttaagtcccattggt

SEQ ID NO: 29227 - DNA, 43 bp, Homo Sapiens
ttagctgttaactaagtgtttgtgggtttaagtcccattggtc

SEQ ID NO: 29228 - DNA, 44 bp, Homo Sapiens
ttagctgttaactaagtgtttgtgggtttaagtcccattggtct

SEQ ID NO: 29229 - DNA, 45 bp, Homo Sapiens
ttagctgttaactaagtgtttgtgggtttaagtcccattggtcta

SEQ ID NO: 29230 - DNA, 47 bp, Homo Sapiens
ttagctgttaactaagtgtttgtgggtttaagtcccattggtctagc

SEQ ID NO: 29231 - DNA, 48 bp, Homo Sapiens
ttagctgttaactaagtgtttgtgggtttaagtcccattggtctagcc

SEQ ID NO: 29232 - DNA, 24 bp, Homo Sapiens
ttagcttaattaaagtggctgatt

SEQ ID NO: 29233 - DNA, 25 bp, Homo Sapiens
ttagctttgggtgctaatggtggag

SEQ ID NO: 29234 - DNA, 26 bp, Homo Sapiens
ttagctttgggtgctaatggtggagt

SEQ ID NO: 29235 - DNA, 27 bp, Homo Sapiens
ttagctttgggtgctaatggtggagtt

SEQ ID NO: 29236 - DNA, 28 bp, Homo Sapiens
ttagctttgggtgctaatggtggagtta

SEQ ID NO: 29237 - DNA, 31 bp, Homo Sapiens
ttagctttgggtgctaatggtggagttaaag

SEQ ID NO: 29238 - DNA, 33 bp, Homo Sapiens
ttagctttgggtgctaatggtggagttaaagac

SEQ ID NO: 29239 - DNA, 34 bp, Homo Sapiens
ttagctttgggtgctaatggtggagttaaagact

SEQ ID NO: 29240 - DNA, 35 bp, Homo Sapiens
ttagctttgggtgctaatggtggagttaaagactt

SEQ ID NO: 29241 - DNA, 36 bp, Homo Sapiens
ttagctttgggtgctaatggtggagttaaagacttt

SEQ ID NO: 29242 - DNA, 41 bp, Homo Sapiens
ttagctttgggtgctaatggtggagttaaagactttttctc

SEQ ID NO: 29243 - DNA, 44 bp, Homo Sapiens
ttagctttgggtgctaatggtggagttaaagactttttctctga

SEQ ID NO: 29244 - DNA, 45 bp, Homo Sapiens
ttagctttgggtgctaatggtggagttaaagactttttctctgac

SEQ ID NO: 29245 - DNA, 46 bp, Homo Sapiens
ttagctttgggtgctaatggtggagttaaagactttttctctgacc

SEQ ID NO: 29246 - DNA, 47 bp, Homo Sapiens
ttagctttgggtgctaatggtggagttaaagactttttctctgacca

SEQ ID NO: 29247 - DNA, 16 bp, Homo Sapiens
ttaggagatttcaact

SEQ ID NO: 29248 - DNA, 17 bp, Homo Sapiens
ttaggagatttcaactt

SEQ ID NO: 29249 - DNA, 18 bp, Homo Sapiens
ttaggagatttcaactta

SEQ ID NO: 29250 - DNA, 19 bp, Homo Sapiens
ttaggagatttcaacttaa

SEQ ID NO: 29251 - DNA, 20 bp, Homo Sapiens
ttaggagatttcaacttaac

SEQ ID NO: 29252 - DNA, 21 bp, Homo Sapiens
ttaggagatttcaacttaact

SEQ ID NO: 29253 - DNA, 22 bp, Homo Sapiens
ttaggagatttcaacttaactt

SEQ ID NO: 29254 - DNA, 23 bp, Homo Sapiens
ttaggagatttcaacttaacttg

SEQ ID NO: 29255 - DNA, 25 bp, Homo Sapiens
ttaggagatttcaacttaacttgac

SEQ ID NO: 29256 - DNA, 26 bp, Homo Sapiens
ttaggagatttcaacttaacttgacc

SEQ ID NO: 29257 - DNA, 27 bp, Homo Sapiens
ttaggagatttcaacttaacttgaccg

SEQ ID NO: 29258 - DNA, 28 bp, Homo Sapiens
ttaggagatttcaacttaacttgaccgc

SEQ ID NO: 29259 - DNA, 29 bp, Homo Sapiens
ttaggagatttcaacttaacttgaccgct

SEQ ID NO: 29260 - DNA, 30 bp, Homo Sapiens
ttaggagatttcaacttaacttgaccgctc

SEQ ID NO: 29261 - DNA, 31 bp, Homo Sapiens
ttaggagatttcaacttaacttgaccgctct

SEQ ID NO: 29262 - DNA, 32 bp, Homo Sapiens
ttaggagatttcaacttaacttgaccgctctg

SEQ ID NO: 29263 - DNA, 33 bp, Homo Sapiens
ttaggagatttcaacttaacttgaccgctctga

SEQ ID NO: 29264 - DNA, 34 bp, Homo Sapiens
ttaggagatttcaacttaacttgaccgctctgac

SEQ ID NO: 29265 - DNA, 35 bp, Homo Sapiens
ttaggagatttcaacttaacttgaccgctctgacc

SEQ ID NO: 29266 - DNA, 36 bp, Homo Sapiens
ttaggagatttcaacttaacttgaccgctctgacca

SEQ ID NO: 29267 - DNA, 16 bp, Homo Sapiens
ttaggattcctggttt

SEQ ID NO: 29268 - DNA, 17 bp, Homo Sapiens
ttaggattcctggtttt

SEQ ID NO: 29269 - DNA, 18 bp, Homo Sapiens
ttaggattcctggttttc

SEQ ID NO: 29270 - DNA, 26 bp, Homo Sapiens
ttaggattcctggttttcacccaggc

SEQ ID NO: 29271 - DNA, 36 bp, Homo Sapiens
ttaggattcctggttttcacccaggcggcccgggtt

SEQ ID NO: 29272 - DNA, 37 bp, Homo Sapiens
ttaggattcctggttttcacccaggcggcccgggttc

SEQ ID NO: 29273 - DNA, 38 bp, Homo Sapiens
ttaggattcctggttttcacccaggcggcccgggttcg

SEQ ID NO: 29274 - DNA, 41 bp, Homo Sapiens
ttaggattcctggttttcacccaggcggcccgggttcgact

SEQ ID NO: 29275 - DNA, 42 bp, Homo Sapiens
ttaggattcctggttttcacccaggcggcccgggttcgactc

SEQ ID NO: 29276 - DNA, 43 bp, Homo Sapiens
ttaggattcctggttttcacccaggcggcccgggttcgactcc

SEQ ID NO: 29277 - DNA, 47 bp, Homo Sapiens
ttaggattcctggttttcacccaggcggcccgggttcgactcccggt

SEQ ID NO: 29278 - DNA, 48 bp, Homo Sapiens
ttaggattcctggttttcacccaggcggcccgggttcgactcccggtg

SEQ ID NO: 29279 - DNA, 27 bp, Homo Sapiens
ttaggattcctggttttcacccaggtg

SEQ ID NO: 29280 - DNA, 33 bp, Homo Sapiens
ttaggattcctggttttcacccaggtggcccgg

SEQ ID NO: 29281 - DNA, 16 bp, Homo Sapiens
ttaggattcggcgctc

SEQ ID NO: 29282 - DNA, 17 bp, Homo Sapiens
ttaggattcggcgctct

SEQ ID NO: 29283 - DNA, 18 bp, Homo Sapiens
ttaggattcggcgctctc

SEQ ID NO: 29284 - DNA, 19 bp, Homo Sapiens
ttaggattcggcgctctca

SEQ ID NO: 29285 - DNA, 20 bp, Homo Sapiens
ttaggattcggcgctctcac

SEQ ID NO: 29286 - DNA, 21 bp, Homo Sapiens
ttaggattcggcgctctcacc

SEQ ID NO: 29287 - DNA, 22 bp, Homo Sapiens
ttaggattcggcgctctcaccg

SEQ ID NO: 29288 - DNA, 23 bp, Homo Sapiens
ttaggattcggcgctctcaccgc

SEQ ID NO: 29289 - DNA, 24 bp, Homo Sapiens
ttaggattcggcgctctcaccgcc

SEQ ID NO: 29290 - DNA, 26 bp, Homo Sapiens
ttaggattcggcgctctcaccgccgc

SEQ ID NO: 29291 - DNA, 30 bp, Homo Sapiens
ttaggattcggcgctctcaccgccgcggcc

SEQ ID NO: 29292 - DNA, 31 bp, Homo Sapiens
ttaggattcggcgctctcaccgccgcggccc

SEQ ID NO: 29293 - DNA, 32 bp, Homo Sapiens
ttaggattcggcgctctcaccgccgcggcccg

SEQ ID NO: 29294 - DNA, 33 bp, Homo Sapiens
ttaggattcggcgctctcaccgccgcggcccgg

SEQ ID NO: 29295 - DNA, 34 bp, Homo Sapiens
ttaggattcggcgctctcaccgccgcggcccggg

SEQ ID NO: 29296 - DNA, 35 bp, Homo Sapiens
ttaggattcggcgctctcaccgccgcggcccgggt

SEQ ID NO: 29297 - DNA, 36 bp, Homo Sapiens
ttaggattcggcgctctcaccgccgcggcccgggtt

SEQ ID NO: 29298 - DNA, 37 bp, Homo Sapiens
ttaggattcggcgctctcaccgccgcggcccgggttc

SEQ ID NO: 29299 - DNA, 38 bp, Homo Sapiens
ttaggattcggcgctctcaccgccgcggcccgggttcg

SEQ ID NO: 29300 - DNA, 39 bp, Homo Sapiens
ttaggattcggcgctctcaccgccgcggcccgggttcga

SEQ ID NO: 29301 - DNA, 40 bp, Homo Sapiens
ttaggattcggcgctctcaccgccgcggcccgggttcgat

SEQ ID NO: 29302 - DNA, 41 bp, Homo Sapiens
ttaggattcggcgctctcaccgccgcggcccgggttcgatt

SEQ ID NO: 29303 - DNA, 42 bp, Homo Sapiens
ttaggattcggcgctctcaccgccgcggcccgggttcgattc

SEQ ID NO: 29304 - DNA, 47 bp, Homo Sapiens
ttaggattcggcgctctcaccgccgcggcccgggttcgattcccggt

SEQ ID NO: 29305 - DNA, 48 bp, Homo Sapiens
ttaggattcggcgctctcaccgccgcggcccgggttcgattcccggtc

SEQ ID NO: 29306 - DNA, 17 bp, Homo Sapiens
ttaggatttggcactct

SEQ ID NO: 29307 - DNA, 32 bp, Homo Sapiens
ttaggccccaaaaattttggtgcaactccaaa

SEQ ID NO: 29308 - DNA, 34 bp, Homo Sapiens
ttaggccccaaaaattttggtgcaactccaaata

SEQ ID NO: 29309 - DNA, 39 bp, Homo Sapiens
ttaggccccaaaaattttggtgcaactccaaataaaagt

SEQ ID NO: 29310 - DNA, 40 bp, Homo Sapiens
ttaggccccaaaaattttggtgcaactccaaataaaagta

SEQ ID NO: 29311 - DNA, 41 bp, Homo Sapiens
ttaggccccaaaaattttggtgcaactccaaataaaagtac

SEQ ID NO: 29312 - DNA, 42 bp, Homo Sapiens
ttaggccccaaaaattttggtgcaactccaaataaaagtacc

SEQ ID NO: 29313 - DNA, 43 bp, Homo Sapiens
ttaggccccaaaaattttggtgcaactccaaataaaagtacca

SEQ ID NO: 29314 - DNA, 16 bp, Homo Sapiens
ttaggcctctttttac

SEQ ID NO: 29315 - DNA, 17 bp, Homo Sapiens
ttaggcctctttttacc

SEQ ID NO: 29316 - DNA, 18 bp, Homo Sapiens
ttaggcctctttttacca

SEQ ID NO: 29317 - DNA, 19 bp, Homo Sapiens
ttaggcctctttttaccac

SEQ ID NO: 29318 - DNA, 20 bp, Homo Sapiens
ttaggcctctttttaccacc

SEQ ID NO: 29319 - DNA, 21 bp, Homo Sapiens
ttaggcctctttttaccacca

SEQ ID NO: 29320 - DNA, 17 bp, Homo Sapiens
ttagggtgcttagctgt

SEQ ID NO: 29321 - DNA, 18 bp, Homo Sapiens
ttagggtgcttagctgtt

SEQ ID NO: 29322 - DNA, 21 bp, Homo Sapiens
ttagggtgcttagctgttaac

SEQ ID NO: 29323 - DNA, 22 bp, Homo Sapiens
ttagggtgcttagctgttaact

SEQ ID NO: 29324 - DNA, 23 bp, Homo Sapiens
ttagggtgcttagctgttaacta

SEQ ID NO: 29325 - DNA, 24 bp, Homo Sapiens
ttagggtgcttagctgttaactaa

SEQ ID NO: 29326 - DNA, 29 bp, Homo Sapiens
ttagggtgcttagctgttaactaagtgtt

SEQ ID NO: 29327 - DNA, 31 bp, Homo Sapiens
ttagggtgcttagctgttaactaagtgtttg

SEQ ID NO: 29328 - DNA, 32 bp, Homo Sapiens
ttagggtgcttagctgttaactaagtgtttgt

SEQ ID NO: 29329 - DNA, 35 bp, Homo Sapiens
ttagggtgcttagctgttaactaagtgtttgtggg

SEQ ID NO: 29330 - DNA, 36 bp, Homo Sapiens
ttagggtgcttagctgttaactaagtgtttgtgggt

SEQ ID NO: 29331 - DNA, 37 bp, Homo Sapiens
ttagggtgcttagctgttaactaagtgtttgtgggtt

SEQ ID NO: 29332 - DNA, 38 bp, Homo Sapiens
ttagggtgcttagctgttaactaagtgtttgtgggttt

SEQ ID NO: 29333 - DNA, 39 bp, Homo Sapiens
ttagggtgcttagctgttaactaagtgtttgtgggttta

SEQ ID NO: 29334 - DNA, 40 bp, Homo Sapiens
ttagggtgcttagctgttaactaagtgtttgtgggtttaa

SEQ ID NO: 29335 - DNA, 43 bp, Homo Sapiens
ttagggtgcttagctgttaactaagtgtttgtgggtttaagtc

SEQ ID NO: 29336 - DNA, 47 bp, Homo Sapiens
ttagggtgcttagctgttaactaagtgtttgtgggtttaagtcccat

SEQ ID NO: 29337 - DNA, 48 bp, Homo Sapiens
ttagggtgcttagctgttaactaagtgtttgtgggtttaagtcccatt

SEQ ID NO: 29338 - DNA, 16 bp, Homo Sapiens
ttaggtcgctggttcg

SEQ ID NO: 29339 - DNA, 26 bp, Homo Sapiens
ttaggtcgctggttcgaatccggctc

SEQ ID NO: 29340 - DNA, 32 bp, Homo Sapiens
ttaggtcgctggttcgaatccggctcgaagga

SEQ ID NO: 29341 - DNA, 33 bp, Homo Sapiens
ttaggtcgctggttcgaatccggctcgaaggac

SEQ ID NO: 29342 - DNA, 34 bp, Homo Sapiens
ttaggtcgctggttcgaatccggctcgaaggacc

SEQ ID NO: 29343 - DNA, 35 bp, Homo Sapiens
ttaggtcgctggttcgaatccggctcgaaggacca

SEQ ID NO: 29344 - DNA, 30 bp, Homo Sapiens
ttaggtcgctggttcgaatccggctcggag

SEQ ID NO: 29345 - DNA, 33 bp, Homo Sapiens
ttaggtcgctggttcgaatccggctcggaggac

SEQ ID NO: 29346 - DNA, 34 bp, Homo Sapiens
ttaggtcgctggttcgaatccggctcggaggacc

SEQ ID NO: 29347 - DNA, 18 bp, Homo Sapiens
ttaggtcgctggttcgat

SEQ ID NO: 29348 - DNA, 33 bp, Homo Sapiens
ttaggtcgctggttcgattccagctcgaaggac

SEQ ID NO: 29349 - DNA, 34 bp, Homo Sapiens
ttaggtcgctggttcgattccagctcgaaggacc

SEQ ID NO: 29350 - DNA, 24 bp, Homo Sapiens
ttaggtcgctggttcgattccggc

SEQ ID NO: 29351 - DNA, 33 bp, Homo Sapiens
ttaggtcgctggttcgattccggctcgaaggac

SEQ ID NO: 29352 - DNA, 34 bp, Homo Sapiens
ttaggtcgctggttcgattccggctcgaaggacc

SEQ ID NO: 29353 - DNA, 35 bp, Homo Sapiens
ttaggtcgctggttcgattccggctcgaaggacca

SEQ ID NO: 29354 - DNA, 17 bp, Homo Sapiens
ttaggttaaatacagac

SEQ ID NO: 29355 - DNA, 18 bp, Homo Sapiens
ttaggttaaatacagacc

SEQ ID NO: 29356 - DNA, 16 bp, Homo Sapiens
ttagtactctgcgttg

SEQ ID NO: 29357 - DNA, 17 bp, Homo Sapiens
ttagtactctgcgttgt

SEQ ID NO: 29358 - DNA, 18 bp, Homo Sapiens
ttagtactctgcgttgtg

SEQ ID NO: 29359 - DNA, 21 bp, Homo Sapiens
ttagtactctgcgttgtggcc

SEQ ID NO: 29360 - DNA, 22 bp, Homo Sapiens
ttagtactctgcgttgtggccg

SEQ ID NO: 29361 - DNA, 23 bp, Homo Sapiens
ttagtactctgcgttgtggccgc

SEQ ID NO: 29362 - DNA, 24 bp, Homo Sapiens
ttagtactctgcgttgtggccgca

SEQ ID NO: 29363 - DNA, 26 bp, Homo Sapiens
ttagtactctgcgttgtggccgcagc

SEQ ID NO: 29364 - DNA, 30 bp, Homo Sapiens
ttagtactctgcgttgtggccgcagcaacc

SEQ ID NO: 29365 - DNA, 31 bp, Homo Sapiens
ttagtactctgcgttgtggccgcagcaacct

SEQ ID NO: 29366 - DNA, 34 bp, Homo Sapiens
ttagtactctgcgttgtggccgcagcaacctcgg

SEQ ID NO: 29367 - DNA, 35 bp, Homo Sapiens
ttagtactctgcgttgtggccgcagcaacctcggt

SEQ ID NO: 29368 - DNA, 37 bp, Homo Sapiens
ttagtactctgcgttgtggccgcagcaacctcggttc

SEQ ID NO: 29369 - DNA, 47 bp, Homo Sapiens
ttagtactctgcgttgtggccgcagcaacctcggttcgaatccgagt

SEQ ID NO: 29370 - DNA, 24 bp, Homo Sapiens
ttagtataaatagtaccgttaact

SEQ ID NO: 29371 - DNA, 25 bp, Homo Sapiens
ttagtataaatagtaccgttaactt

SEQ ID NO: 29372 - DNA, 27 bp, Homo Sapiens
ttagtataaatagtaccgttaacttcc

SEQ ID NO: 29373 - DNA, 29 bp, Homo Sapiens
ttagtatagtggtgagtatccccgcctgt

SEQ ID NO: 29374 - DNA, 17 bp, Homo Sapiens
ttagtatccccgcctgt

SEQ ID NO: 29375 - DNA, 18 bp, Homo Sapiens
ttagtatccccgcctgtc

SEQ ID NO: 29376 - DNA, 33 bp, Homo Sapiens
ttagtatccccgcctgtcacgcgggagaccggg

SEQ ID NO: 29377 - DNA, 23 bp, Homo Sapiens
ttataatgccgaggttgtgagtt

SEQ ID NO: 29378 - DNA, 24 bp, Homo Sapiens
ttataatgccgaggttgtgagttc

SEQ ID NO: 29379 - DNA, 16 bp, Homo Sapiens
ttatacccttcccgta

SEQ ID NO: 29380 - DNA, 17 bp, Homo Sapiens
ttatacccttcccgtac

SEQ ID NO: 29381 - DNA, 18 bp, Homo Sapiens
ttatacccttcccgtact

SEQ ID NO: 29382 - DNA, 19 bp, Homo Sapiens
ttatacccttcccgtacta

SEQ ID NO: 29383 - DNA, 20 bp, Homo Sapiens
ttatacccttcccgtactac

SEQ ID NO: 29384 - DNA, 21 bp, Homo Sapiens
ttatacccttcccgtactacc

SEQ ID NO: 29385 - DNA, 22 bp, Homo Sapiens
ttatacccttcccgtactacca

SEQ ID NO: 29386 - DNA, 16 bp, Homo Sapiens
ttataggctaaatcct

SEQ ID NO: 29387 - DNA, 29 bp, Homo Sapiens
ttataggctaaatcctatatatcttacca

SEQ ID NO: 29388 - DNA, 21 bp, Homo Sapiens
ttatcacatctgctttacacg

SEQ ID NO: 29389 - DNA, 16 bp, Homo Sapiens
ttatcacgtctgcttt

SEQ ID NO: 29390 - DNA, 18 bp, Homo Sapiens
ttatcacgtctgctttac

SEQ ID NO: 29391 - DNA, 21 bp, Homo Sapiens
ttatcacgtctgctttacacg

SEQ ID NO: 29392 - DNA, 22 bp, Homo Sapiens
ttatcacgtctgctttacacgc

SEQ ID NO: 29393 - DNA, 33 bp, Homo Sapiens
ttatcacgtctgctttacacgcagaaggtcctg

SEQ ID NO: 29394 - DNA, 16 bp, Homo Sapiens
ttatcacgttcgcctc

SEQ ID NO: 29395 - DNA, 18 bp, Homo Sapiens
ttatcacgttcgcctcac

SEQ ID NO: 29396 - DNA, 21 bp, Homo Sapiens
ttatcacgttcgcctcacacg

SEQ ID NO: 29397 - DNA, 20 bp, Homo Sapiens
ttatgataatcatatttacc

SEQ ID NO: 29398 - DNA, 23 bp, Homo Sapiens
ttatgataatcatatttaccaac

SEQ ID NO: 29399 - DNA, 24 bp, Homo Sapiens
ttatgataatcatatttaccaacc

SEQ ID NO: 29400 - DNA, 25 bp, Homo Sapiens
ttatgataatcatatttaccaacca

SEQ ID NO: 29401 - DNA, 16 bp, Homo Sapiens
ttatgtagcttacctc

SEQ ID NO: 29402 - DNA, 17 bp, Homo Sapiens
ttatgtagcttacctcc

SEQ ID NO: 29403 - DNA, 18 bp, Homo Sapiens
ttatgtagcttacctcct

SEQ ID NO: 29404 - DNA, 20 bp, Homo Sapiens
ttatgtagcttacctcctca

SEQ ID NO: 29405 - DNA, 25 bp, Homo Sapiens
ttatgtagcttacctcctcaaagca

SEQ ID NO: 29406 - DNA, 28 bp, Homo Sapiens
ttatgtagcttacctcctcaaagcaata

SEQ ID NO: 29407 - DNA, 30 bp, Homo Sapiens
ttatgtagcttacctcctcaaagcaataca

SEQ ID NO: 29408 - DNA, 32 bp, Homo Sapiens
ttatgtagcttacctcctcaaagcaatacact

SEQ ID NO: 29409 - DNA, 33 bp, Homo Sapiens
ttatgtagcttacctcctcaaagcaatacactg

SEQ ID NO: 29410 - DNA, 34 bp, Homo Sapiens
ttatgtagcttacctcctcaaagcaatacactga

SEQ ID NO: 29411 - DNA, 35 bp, Homo Sapiens
ttatgtagcttacctcctcaaagcaatacactgaa

SEQ ID NO: 29412 - DNA, 16 bp, Homo Sapiens
ttcaaaaaagagtacc

SEQ ID NO: 29413 - DNA, 17 bp, Homo Sapiens
ttcaaaaaagagtacca

SEQ ID NO: 29414 - DNA, 16 bp, Homo Sapiens
ttcaaacctgccgggg

SEQ ID NO: 29415 - DNA, 17 bp, Homo Sapiens
ttcaaacctgccggggc

SEQ ID NO: 29416 - DNA, 18 bp, Homo Sapiens
ttcaaacctgccggggct

SEQ ID NO: 29417 - DNA, 19 bp, Homo Sapiens
ttcaaacctgccggggctt

SEQ ID NO: 29418 - DNA, 20 bp, Homo Sapiens
ttcaaacctgccggggcttc

SEQ ID NO: 29419 - DNA, 21 bp, Homo Sapiens
ttcaaacctgccggggcttcc

SEQ ID NO: 29420 - DNA, 22 bp, Homo Sapiens
ttcaaacctgccggggcttcca

SEQ ID NO: 29421 - DNA, 22 bp, Homo Sapiens
ttcaaagccctcagtaagttgc

SEQ ID NO: 29422 - DNA, 28 bp, Homo Sapiens
ttcaaagccctcagtaagttgcaatact

SEQ ID NO: 29423 - DNA, 37 bp, Homo Sapiens
ttcaaagccctcagtaagttgcaatacttaatttctg

SEQ ID NO: 29424 - DNA, 38 bp, Homo Sapiens
ttcaaagccctcagtaagttgcaatacttaatttctgc

SEQ ID NO: 29425 - DNA, 39 bp, Homo Sapiens
ttcaaagccctcagtaagttgcaatacttaatttctgcc

SEQ ID NO: 29426 - DNA, 40 bp, Homo Sapiens
ttcaaagccctcagtaagttgcaatacttaatttctgcca

SEQ ID NO: 29427 - DNA, 16 bp, Homo Sapiens
ttcaaaggttccgggt

SEQ ID NO: 29428 - DNA, 24 bp, Homo Sapiens
ttcaaaggttccgggttcgagtcc

SEQ ID NO: 29429 - DNA, 34 bp, Homo Sapiens
ttcaaaggttccgggttcgagtcccggcggagtc

SEQ ID NO: 29430 - DNA, 35 bp, Homo Sapiens
ttcaaaggttccgggttcgagtcccggcggagtcg

SEQ ID NO: 29431 - DNA, 36 bp, Homo Sapiens
ttcaaaggttccgggttcgagtcccggcggagtcgc

SEQ ID NO: 29432 - DNA, 37 bp, Homo Sapiens
ttcaaaggttccgggttcgagtcccggcggagtcgcc

SEQ ID NO: 29433 - DNA, 38 bp, Homo Sapiens
ttcaaaggttccgggttcgagtcccggcggagtcgcca

SEQ ID NO: 29434 - DNA, 37 bp, Homo Sapiens
ttcaaaggttgtgggttcgaatcccaccagagtcgcc

SEQ ID NO: 29435 - DNA, 38 bp, Homo Sapiens
ttcaaaggttgtgggttcgaatcccaccagagtcgcca

SEQ ID NO: 29436 - DNA, 37 bp, Homo Sapiens
ttcaaaggttgtgggttcgagtcccaccagagtcgcc

SEQ ID NO: 29437 - DNA, 38 bp, Homo Sapiens
ttcaaaggttgtgggttcgagtcccaccagagtcgcca

SEQ ID NO: 29438 - DNA, 20 bp, Homo Sapiens
ttcaaatcacgtcggggtca

SEQ ID NO: 29439 - DNA, 21 bp, Homo Sapiens
ttcaaatcacgtcggggtcac

SEQ ID NO: 29440 - DNA, 22 bp, Homo Sapiens
ttcaaatcacgtcggggtcacc

SEQ ID NO: 29441 - DNA, 23 bp, Homo Sapiens
ttcaaatcacgtcggggtcacca

SEQ ID NO: 29442 - DNA, 16 bp, Homo Sapiens
ttcaaatcccggacga

SEQ ID NO: 29443 - DNA, 17 bp, Homo Sapiens
ttcaaatcccggacgag

SEQ ID NO: 29444 - DNA, 18 bp, Homo Sapiens
ttcaaatcccggacgagc

SEQ ID NO: 29445 - DNA, 19 bp, Homo Sapiens
ttcaaatcccggacgagcc

SEQ ID NO: 29446 - DNA, 20 bp, Homo Sapiens
ttcaaatcccggacgagccc

SEQ ID NO: 29447 - DNA, 21 bp, Homo Sapiens
ttcaaatcccggacgagcccc

SEQ ID NO: 29448 - DNA, 22 bp, Homo Sapiens
ttcaaatcccggacgagccccc

SEQ ID NO: 29449 - DNA, 23 bp, Homo Sapiens
ttcaaatcccggacgagccccca

SEQ ID NO: 29450 - DNA, 16 bp, Homo Sapiens
ttcaaatccgggtgcc

SEQ ID NO: 29451 - DNA, 17 bp, Homo Sapiens
ttcaaatccgggtgccc

SEQ ID NO: 29452 - DNA, 22 bp, Homo Sapiens
ttcaaatccgggtgccccctcc

SEQ ID NO: 29453 - DNA, 20 bp, Homo Sapiens
ttcaaatctcgctggggcct

SEQ ID NO: 29454 - DNA, 21 bp, Homo Sapiens
ttcaaatctcgctggggcctc

SEQ ID NO: 29455 - DNA, 22 bp, Homo Sapiens
ttcaaatctcgctggggcctcc

SEQ ID NO: 29456 - DNA, 16 bp, Homo Sapiens
ttcaaatctcggtgga

SEQ ID NO: 29457 - DNA, 17 bp, Homo Sapiens
ttcaaatctcggtggaa

SEQ ID NO: 29458 - DNA, 19 bp, Homo Sapiens
ttcaaatctcggtggaacc

SEQ ID NO: 29459 - DNA, 20 bp, Homo Sapiens
ttcaaatctcggtggaacct

SEQ ID NO: 29460 - DNA, 22 bp, Homo Sapiens
ttcaaatctcggtggaacctcc

SEQ ID NO: 29461 - DNA, 23 bp, Homo Sapiens
ttcaaatctcggtggaacctcca

SEQ ID NO: 29462 - DNA, 20 bp, Homo Sapiens
ttcaaatctcggtgggacct

SEQ ID NO: 29463 - DNA, 21 bp, Homo Sapiens
ttcaaatctcggtgggacctc

SEQ ID NO: 29464 - DNA, 22 bp, Homo Sapiens
ttcaaatctcggtgggacctcc

SEQ ID NO: 29465 - DNA, 16 bp, Homo Sapiens
ttcaacttaacttgac

SEQ ID NO: 29466 - DNA, 17 bp, Homo Sapiens
ttcaacttaacttgacc

SEQ ID NO: 29467 - DNA, 18 bp, Homo Sapiens
ttcaacttaacttgaccg

SEQ ID NO: 29468 - DNA, 19 bp, Homo Sapiens
ttcaacttaacttgaccgc

SEQ ID NO: 29469 - DNA, 20 bp, Homo Sapiens
ttcaacttaacttgaccgct

SEQ ID NO: 29470 - DNA, 21 bp, Homo Sapiens
ttcaacttaacttgaccgctc

SEQ ID NO: 29471 - DNA, 22 bp, Homo Sapiens
ttcaacttaacttgaccgctct

SEQ ID NO: 29472 - DNA, 23 bp, Homo Sapiens
ttcaacttaacttgaccgctctg

SEQ ID NO: 29473 - DNA, 24 bp, Homo Sapiens
ttcaacttaacttgaccgctctga

SEQ ID NO: 29474 - DNA, 25 bp, Homo Sapiens
ttcaacttaacttgaccgctctgac

SEQ ID NO: 29475 - DNA, 26 bp, Homo Sapiens
ttcaacttaacttgaccgctctgacc

SEQ ID NO: 29476 - DNA, 27 bp, Homo Sapiens
ttcaacttaacttgaccgctctgacca

SEQ ID NO: 29477 - DNA, 20 bp, Homo Sapiens
ttcaagtcacgtcggggtca

SEQ ID NO: 29478 - DNA, 21 bp, Homo Sapiens
ttcaagtcacgtcggggtcac

SEQ ID NO: 29479 - DNA, 22 bp, Homo Sapiens
ttcaagtcacgtcggggtcacc

SEQ ID NO: 29480 - DNA, 23 bp, Homo Sapiens
ttcaagtcacgtcggggtcacca

SEQ ID NO: 29481 - DNA, 17 bp, Homo Sapiens
ttcaagtccctgttcgg

SEQ ID NO: 29482 - DNA, 19 bp, Homo Sapiens
ttcaagtccctgttcgggc

SEQ ID NO: 29483 - DNA, 20 bp, Homo Sapiens
ttcaagtccctgttcgggcg

SEQ ID NO: 29484 - DNA, 22 bp, Homo Sapiens
ttcaagtccctgttcgggcgcc

SEQ ID NO: 29485 - DNA, 23 bp, Homo Sapiens
ttcaagtccctgttcgggcgcca

SEQ ID NO: 29486 - DNA, 18 bp, Homo Sapiens
ttcaatccccggcacctc

SEQ ID NO: 29487 - DNA, 22 bp, Homo Sapiens
ttcaatccccggcatctccacc

SEQ ID NO: 29488 - DNA, 21 bp, Homo Sapiens
ttcaattccccgacggggagc

SEQ ID NO: 29489 - DNA, 16 bp, Homo Sapiens
ttcacccaggcggccc

SEQ ID NO: 29490 - DNA, 17 bp, Homo Sapiens
ttcacccaggcggcccg

SEQ ID NO: 29491 - DNA, 18 bp, Homo Sapiens
ttcacccaggcggcccgg

SEQ ID NO: 29492 - DNA, 21 bp, Homo Sapiens
ttcacccaggcggcccgggtt

SEQ ID NO: 29493 - DNA, 35 bp, Homo Sapiens
ttcacccaggcggcccgggttcgactcccggtgtg

SEQ ID NO: 29494 - DNA, 36 bp, Homo Sapiens
ttcacccaggcggcccgggttcgactcccggtgtgg

SEQ ID NO: 29495 - DNA, 39 bp, Homo Sapiens
ttcacccaggcggcccgggttcgactcccggtgtgggaa

SEQ ID NO: 29496 - DNA, 40 bp, Homo Sapiens
ttcacccaggcggcccgggttcgactcccggtgtgggaac

SEQ ID NO: 29497 - DNA, 41 bp, Homo Sapiens
ttcacccaggcggcccgggttcgactcccggtgtgggaacc

SEQ ID NO: 29498 - DNA, 42 bp, Homo Sapiens
ttcacccaggcggcccgggttcgactcccggtgtgggaacca

SEQ ID NO: 29499 - DNA, 39 bp, Homo Sapiens
ttcacccaggtggcccgggttcgactcccggtatgggaa

SEQ ID NO: 29500 - DNA, 21 bp, Homo Sapiens
ttcaccgccgcggcccgggtt

SEQ ID NO: 29501 - DNA, 37 bp, Homo Sapiens
ttcaccgccgcggcccgggttcgattcccggtcaggg

SEQ ID NO: 29502 - DNA, 16 bp, Homo Sapiens
ttcaggtcgcagtctc

SEQ ID NO: 29503 - DNA, 17 bp, Homo Sapiens
ttcaggtcgcagtctcc

SEQ ID NO: 29504 - DNA, 18 bp, Homo Sapiens
ttcaggtcgcagtctccc

SEQ ID NO: 29505 - DNA, 19 bp, Homo Sapiens
ttcaggtcgcagtctcccc

SEQ ID NO: 29506 - DNA, 29 bp, Homo Sapiens
ttcaggtcgcagtctcccctggaggcgtg

SEQ ID NO: 29507 - DNA, 30 bp, Homo Sapiens
ttcaggtcgcagtctcccctggaggcgtgg

SEQ ID NO: 29508 - DNA, 16 bp, Homo Sapiens
ttcagtggtagaattc

SEQ ID NO: 29509 - DNA, 17 bp, Homo Sapiens
ttcagtggtagaattct

SEQ ID NO: 29510 - DNA, 18 bp, Homo Sapiens
ttcagtggtagaattctc

SEQ ID NO: 29511 - DNA, 19 bp, Homo Sapiens
ttcagtggtagaattctcg

SEQ ID NO: 29512 - DNA, 20 bp, Homo Sapiens
ttcagtggtagaattctcgc

SEQ ID NO: 29513 - DNA, 21 bp, Homo Sapiens
ttcagtggtagaattctcgcc

SEQ ID NO: 29514 - DNA, 22 bp, Homo Sapiens
ttcagtggtagaattctcgcct

SEQ ID NO: 29515 - DNA, 23 bp, Homo Sapiens
ttcagtggtagaattctcgcctc

SEQ ID NO: 29516 - DNA, 25 bp, Homo Sapiens
ttcagtggtagaattctcgcctccc

SEQ ID NO: 29517 - DNA, 23 bp, Homo Sapiens
ttcagtggtagaattctcgcctg

SEQ ID NO: 29518 - DNA, 24 bp, Homo Sapiens
ttcagtggtagaattctcgcctgc

SEQ ID NO: 29519 - DNA, 25 bp, Homo Sapiens
ttcagtggtagaattctcgcctgcc

SEQ ID NO: 29520 - DNA, 26 bp, Homo Sapiens
ttcagtggtagaattctcgcctgcca

SEQ ID NO: 29521 - DNA, 27 bp, Homo Sapiens
ttcagtggtagaattctcgcctgccac

SEQ ID NO: 29522 - DNA, 28 bp, Homo Sapiens
ttcagtggtagaattctcgcctgccacg

SEQ ID NO: 29523 - DNA, 29 bp, Homo Sapiens
ttcagtggtagaattctcgcctgccacgc

SEQ ID NO: 29524 - DNA, 31 bp, Homo Sapiens
ttcagtggtagaattctcgcctgccacgcgg

SEQ ID NO: 29525 - DNA, 32 bp, Homo Sapiens
ttcagtggtagaattctcgcctgccacgcggg

SEQ ID NO: 29526 - DNA, 33 bp, Homo Sapiens
ttcagtggtagaattctcgcctgccacgcggga

SEQ ID NO: 29527 - DNA, 38 bp, Homo Sapiens
ttcagtggtagaattctcgcctgccacgcgggaggccc

SEQ ID NO: 29528 - DNA, 39 bp, Homo Sapiens
ttcagtggtagaattctcgcctgccacgcgggaggcccg

SEQ ID NO: 29529 - DNA, 40 bp, Homo Sapiens
ttcagtggtagaattctcgcctgccacgcgggaggcccgg

SEQ ID NO: 29530 - DNA, 41 bp, Homo Sapiens
ttcagtggtagaattctcgcctgccacgcgggaggcccggg

SEQ ID NO: 29531 - DNA, 42 bp, Homo Sapiens
ttcagtggtagaattctcgcctgccacgcgggaggcccgggt

SEQ ID NO: 29532 - DNA, 16 bp, Homo Sapiens
ttcagttgatgcagag

SEQ ID NO: 29533 - DNA, 18 bp, Homo Sapiens
ttcagttgatgcagagtg

SEQ ID NO: 29534 - DNA, 19 bp, Homo Sapiens
ttcagttgatgcagagtgg

SEQ ID NO: 29535 - DNA, 20 bp, Homo Sapiens
ttcagttgatgcagagtggg

SEQ ID NO: 29536 - DNA, 21 bp, Homo Sapiens
ttcagttgatgcagagtgggg

SEQ ID NO: 29537 - DNA, 22 bp, Homo Sapiens
ttcagttgatgcagagtggggt

SEQ ID NO: 29538 - DNA, 23 bp, Homo Sapiens
ttcagttgatgcagagtggggtt

SEQ ID NO: 29539 - DNA, 24 bp, Homo Sapiens
ttcagttgatgcagagtggggttt

SEQ ID NO: 29540 - DNA, 25 bp, Homo Sapiens
ttcagttgatgcagagtggggtttt

SEQ ID NO: 29541 - DNA, 26 bp, Homo Sapiens
ttcagttgatgcagagtggggttttg

SEQ ID NO: 29542 - DNA, 27 bp, Homo Sapiens
ttcagttgatgcagagtggggttttgc

SEQ ID NO: 29543 - DNA, 28 bp, Homo Sapiens
ttcagttgatgcagagtggggttttgca

SEQ ID NO: 29544 - DNA, 29 bp, Homo Sapiens
ttcagttgatgcagagtggggttttgcag

SEQ ID NO: 29545 - DNA, 30 bp, Homo Sapiens
ttcagttgatgcagagtggggttttgcagt

SEQ ID NO: 29546 - DNA, 31 bp, Homo Sapiens
ttcagttgatgcagagtggggttttgcagtc

SEQ ID NO: 29547 - DNA, 32 bp, Homo Sapiens
ttcagttgatgcagagtggggttttgcagtcc

SEQ ID NO: 29548 - DNA, 33 bp, Homo Sapiens
ttcagttgatgcagagtggggttttgcagtcct

SEQ ID NO: 29549 - DNA, 34 bp, Homo Sapiens
ttcagttgatgcagagtggggttttgcagtcctt

SEQ ID NO: 29550 - DNA, 35 bp, Homo Sapiens
ttcagttgatgcagagtggggttttgcagtcctta

SEQ ID NO: 29551 - DNA, 36 bp, Homo Sapiens
ttcagttgatgcagagtggggttttgcagtccttac

SEQ ID NO: 29552 - DNA, 37 bp, Homo Sapiens
ttcagttgatgcagagtggggttttgcagtccttacc

SEQ ID NO: 29553 - DNA, 38 bp, Homo Sapiens
ttcagttgatgcagagtggggttttgcagtccttacca

SEQ ID NO: 29554 - DNA, 18 bp, Homo Sapiens
ttcataactttgtcaaag

SEQ ID NO: 29555 - DNA, 31 bp, Homo Sapiens
ttcataactttgtcaaagttaaattataggc

SEQ ID NO: 29556 - DNA, 32 bp, Homo Sapiens
ttcataactttgtcaaagttaaattataggct

SEQ ID NO: 29557 - DNA, 33 bp, Homo Sapiens
ttcataactttgtcaaagttaaattataggcta

SEQ ID NO: 29558 - DNA, 34 bp, Homo Sapiens
ttcataactttgtcaaagttaaattataggctaa

SEQ ID NO: 29559 - DNA, 35 bp, Homo Sapiens
ttcataactttgtcaaagttaaattataggctaaa

SEQ ID NO: 29560 - DNA, 16 bp, Homo Sapiens
ttcatatcattggtcg

SEQ ID NO: 29561 - DNA, 17 bp, Homo Sapiens
ttcatatcattggtcgt

SEQ ID NO: 29562 - DNA, 20 bp, Homo Sapiens
ttcatatcattggtcgtggt

SEQ ID NO: 29563 - DNA, 21 bp, Homo Sapiens
ttcatatcattggtcgtggtt

SEQ ID NO: 29564 - DNA, 22 bp, Homo Sapiens
ttcatatcattggtcgtggttg

SEQ ID NO: 29565 - DNA, 23 bp, Homo Sapiens
ttcatatcattggtcgtggttgt

SEQ ID NO: 29566 - DNA, 24 bp, Homo Sapiens
ttcatatcattggtcgtggttgta

SEQ ID NO: 29567 - DNA, 26 bp, Homo Sapiens
ttcatatcattggtcgtggttgtagt

SEQ ID NO: 29568 - DNA, 27 bp, Homo Sapiens
ttcatatcattggtcgtggttgtagtc

SEQ ID NO: 29569 - DNA, 28 bp, Homo Sapiens
ttcatatcattggtcgtggttgtagtcc

SEQ ID NO: 29570 - DNA, 29 bp, Homo Sapiens
ttcatatcattggtcgtggttgtagtccg

SEQ ID NO: 29571 - DNA, 30 bp, Homo Sapiens
ttcatatcattggtcgtggttgtagtccgt

SEQ ID NO: 29572 - DNA, 31 bp, Homo Sapiens
ttcatatcattggtcgtggttgtagtccgtg

SEQ ID NO: 29573 - DNA, 32 bp, Homo Sapiens
ttcatatcattggtcgtggttgtagtccgtgc

SEQ ID NO: 29574 - DNA, 33 bp, Homo Sapiens
ttcatatcattggtcgtggttgtagtccgtgcg

SEQ ID NO: 29575 - DNA, 34 bp, Homo Sapiens
ttcatatcattggtcgtggttgtagtccgtgcga

SEQ ID NO: 29576 - DNA, 35 bp, Homo Sapiens
ttcatatcattggtcgtggttgtagtccgtgcgag

SEQ ID NO: 29577 - DNA, 36 bp, Homo Sapiens
ttcatatcattggtcgtggttgtagtccgtgcgaga

SEQ ID NO: 29578 - DNA, 37 bp, Homo Sapiens
ttcatatcattggtcgtggttgtagtccgtgcgagaa

SEQ ID NO: 29579 - DNA, 38 bp, Homo Sapiens
ttcatatcattggtcgtggttgtagtccgtgcgagaat

SEQ ID NO: 29580 - DNA, 39 bp, Homo Sapiens
ttcatatcattggtcgtggttgtagtccgtgcgagaata

SEQ ID NO: 29581 - DNA, 40 bp, Homo Sapiens
ttcatatcattggtcgtggttgtagtccgtgcgagaatac

SEQ ID NO: 29582 - DNA, 41 bp, Homo Sapiens
ttcatatcattggtcgtggttgtagtccgtgcgagaatacc

SEQ ID NO: 29583 - DNA, 42 bp, Homo Sapiens
ttcatatcattggtcgtggttgtagtccgtgcgagaatacca

SEQ ID NO: 29584 - DNA, 16 bp, Homo Sapiens
ttcatattgaattgca

SEQ ID NO: 29585 - DNA, 20 bp, Homo Sapiens
ttcatattgaattgcaaatt

SEQ ID NO: 29586 - DNA, 21 bp, Homo Sapiens
ttcatattgaattgcaaattc

SEQ ID NO: 29587 - DNA, 48 bp, Homo Sapiens
ttcatattgaattgcaaattcgaagaagcagcttcaaacctgccgggg

SEQ ID NO: 29588 - DNA, 16 bp, Homo Sapiens
ttccaagcagttgacc

SEQ ID NO: 29589 - DNA, 17 bp, Homo Sapiens
ttccaagcagttgaccc

SEQ ID NO: 29590 - DNA, 18 bp, Homo Sapiens
ttccaagcagttgacccg

SEQ ID NO: 29591 - DNA, 22 bp, Homo Sapiens
ttccaagcagttgacccgggtt

SEQ ID NO: 29592 - DNA, 26 bp, Homo Sapiens
ttccaagcagttgacccgggttcgat

SEQ ID NO: 29593 - DNA, 34 bp, Homo Sapiens
ttccaagcagttgacccgggttcgattcccggcc

SEQ ID NO: 29594 - DNA, 37 bp, Homo Sapiens
ttccaagcagttgacccgggttcgattcccggccaac

SEQ ID NO: 29595 - DNA, 38 bp, Homo Sapiens
ttccaagcagttgacccgggttcgattcccggccaacg

SEQ ID NO: 29596 - DNA, 40 bp, Homo Sapiens
ttccaagcagttgacccgggttcgattcccggccaacgca

SEQ ID NO: 29597 - DNA, 42 bp, Homo Sapiens
ttccaagcagttgacccgggttcgattcccggccaacgcacc

SEQ ID NO: 29598 - DNA, 19 bp, Homo Sapiens
ttccaattaactagttttg

SEQ ID NO: 29599 - DNA, 21 bp, Homo Sapiens
ttccaattaactagttttgac

SEQ ID NO: 29600 - DNA, 22 bp, Homo Sapiens
ttccaattaactagttttgaca

SEQ ID NO: 29601 - DNA, 23 bp, Homo Sapiens
ttccaattaactagttttgacaa

SEQ ID NO: 29602 - DNA, 24 bp, Homo Sapiens
ttccaattaactagttttgacaac

SEQ ID NO: 29603 - DNA, 25 bp, Homo Sapiens
ttccaattaactagttttgacaaca

SEQ ID NO: 29604 - DNA, 29 bp, Homo Sapiens
ttccaattaactagttttgacaacattca

SEQ ID NO: 29605 - DNA, 36 bp, Homo Sapiens
ttccaattaactagttttgacaacattcaaaaaaga

SEQ ID NO: 29606 - DNA, 39 bp, Homo Sapiens
ttccaattaactagttttgacaacattcaaaaaagagta

SEQ ID NO: 29607 - DNA, 40 bp, Homo Sapiens
ttccaattaactagttttgacaacattcaaaaaagagtac

SEQ ID NO: 29608 - DNA, 41 bp, Homo Sapiens
ttccaattaactagttttgacaacattcaaaaaagagtacc

SEQ ID NO: 29609 - DNA, 42 bp, Homo Sapiens
ttccaattaactagttttgacaacattcaaaaaagagtacca

SEQ ID NO: 29610 - DNA, 18 bp, Homo Sapiens
ttccaggttcgactcctg

SEQ ID NO: 29611 - DNA, 26 bp, Homo Sapiens
ttccaggttcgactcctggctggctc

SEQ ID NO: 29612 - DNA, 27 bp, Homo Sapiens
ttccaggttcgactcctggctggctcg

SEQ ID NO: 29613 - DNA, 28 bp, Homo Sapiens
ttccaggttcgactcctggctggctcgc

SEQ ID NO: 29614 - DNA, 29 bp, Homo Sapiens
ttccaggttcgactcctggctggctcgcc

SEQ ID NO: 29615 - DNA, 30 bp, Homo Sapiens
ttccaggttcgactcctggctggctcgcca

SEQ ID NO: 29616 - DNA, 21 bp, Homo Sapiens
ttccatagtgtagcggttatc

SEQ ID NO: 29617 - DNA, 28 bp, Homo Sapiens
ttccatagtgtagcggttatcacgtctg

SEQ ID NO: 29618 - DNA, 29 bp, Homo Sapiens
ttccatagtgtagcggttatcacgtctgc

SEQ ID NO: 29619 - DNA, 30 bp, Homo Sapiens
ttccatagtgtagcggttatcacgtctgct

SEQ ID NO: 29620 - DNA, 31 bp, Homo Sapiens
ttccatagtgtagcggttatcacgtctgctt

SEQ ID NO: 29621 - DNA, 32 bp, Homo Sapiens
ttccatagtgtagcggttatcacgtctgcttt

SEQ ID NO: 29622 - DNA, 34 bp, Homo Sapiens
ttccatagtgtagcggttatcacgtctgctttac

SEQ ID NO: 29623 - DNA, 21 bp, Homo Sapiens
ttccatagtgtagtggttatc

SEQ ID NO: 29624 - DNA, 28 bp, Homo Sapiens
ttccatagtgtagtggttatcacatctg

SEQ ID NO: 29625 - DNA, 30 bp, Homo Sapiens
ttccatagtgtagtggttatcacatctgct

SEQ ID NO: 29626 - DNA, 31 bp, Homo Sapiens
ttccatagtgtagtggttatcacatctgctt

SEQ ID NO: 29627 - DNA, 34 bp, Homo Sapiens
ttccatagtgtagtggttatcacatctgctttac

SEQ ID NO: 29628 - DNA, 27 bp, Homo Sapiens
ttccatagtgtagtggttatcacgtct

SEQ ID NO: 29629 - DNA, 28 bp, Homo Sapiens
ttccatagtgtagtggttatcacgtctg

SEQ ID NO: 29630 - DNA, 29 bp, Homo Sapiens
ttccatagtgtagtggttatcacgtctgc

SEQ ID NO: 29631 - DNA, 30 bp, Homo Sapiens
ttccatagtgtagtggttatcacgtctgct

SEQ ID NO: 29632 - DNA, 31 bp, Homo Sapiens
ttccatagtgtagtggttatcacgtctgctt

SEQ ID NO: 29633 - DNA, 32 bp, Homo Sapiens
ttccatagtgtagtggttatcacgtctgcttt

SEQ ID NO: 29634 - DNA, 33 bp, Homo Sapiens
ttccatagtgtagtggttatcacgtctgcttta

SEQ ID NO: 29635 - DNA, 34 bp, Homo Sapiens
ttccatagtgtagtggttatcacgtctgctttac

SEQ ID NO: 29636 - DNA, 35 bp, Homo Sapiens
ttccatagtgtagtggttatcacgtctgctttaca

SEQ ID NO: 29637 - DNA, 37 bp, Homo Sapiens
ttccatagtgtagtggttatcacgtctgctttacacg

SEQ ID NO: 29638 - DNA, 27 bp, Homo Sapiens
ttccatggtgtaatggtaagcactctg

SEQ ID NO: 29639 - DNA, 33 bp, Homo Sapiens
ttccatggtgtaatggtaagcactctggactct

SEQ ID NO: 29640 - DNA, 25 bp, Homo Sapiens
ttccatggtgtaatggtgagcactc

SEQ ID NO: 29641 - DNA, 26 bp, Homo Sapiens
ttccatggtgtaatggtgagcactct

SEQ ID NO: 29642 - DNA, 27 bp, Homo Sapiens
ttccatggtgtaatggtgagcactctg

SEQ ID NO: 29643 - DNA, 28 bp, Homo Sapiens
ttccatggtgtaatggtgagcactctgg

SEQ ID NO: 29644 - DNA, 29 bp, Homo Sapiens
ttccatggtgtaatggtgagcactctgga

SEQ ID NO: 29645 - DNA, 31 bp, Homo Sapiens
ttccatggtgtaatggtgagcactctggact

SEQ ID NO: 29646 - DNA, 32 bp, Homo Sapiens
ttccatggtgtaatggtgagcactctggactc

SEQ ID NO: 29647 - DNA, 33 bp, Homo Sapiens
ttccatggtgtaatggtgagcactctggactct

SEQ ID NO: 29648 - DNA, 34 bp, Homo Sapiens
ttccatggtgtaatggtgagcactctggactctg

SEQ ID NO: 29649 - DNA, 35 bp, Homo Sapiens
ttccatggtgtaatggtgagcactctggactctga

SEQ ID NO: 29650 - DNA, 39 bp, Homo Sapiens
ttccatggtgtaatggtgagcactctggactctgaatcc

SEQ ID NO: 29651 - DNA, 40 bp, Homo Sapiens
ttccatggtgtaatggtgagcactctggactctgaatcca

SEQ ID NO: 29652 - DNA, 25 bp, Homo Sapiens
ttccatggtgtaatggttagcactc

SEQ ID NO: 29653 - DNA, 26 bp, Homo Sapiens
ttccatggtgtaatggttagcactct

SEQ ID NO: 29654 - DNA, 27 bp, Homo Sapiens
ttccatggtgtaatggttagcactctg

SEQ ID NO: 29655 - DNA, 28 bp, Homo Sapiens
ttccatggtgtaatggttagcactctgg

SEQ ID NO: 29656 - DNA, 29 bp, Homo Sapiens
ttccatggtgtaatggttagcactctgga

SEQ ID NO: 29657 - DNA, 30 bp, Homo Sapiens
ttccatggtgtaatggttagcactctggac

SEQ ID NO: 29658 - DNA, 31 bp, Homo Sapiens
ttccatggtgtaatggttagcactctggact

SEQ ID NO: 29659 - DNA, 32 bp, Homo Sapiens
ttccatggtgtaatggttagcactctggactc

SEQ ID NO: 29660 - DNA, 33 bp, Homo Sapiens
ttccatggtgtaatggttagcactctggactct

SEQ ID NO: 29661 - DNA, 34 bp, Homo Sapiens
ttccatggtgtaatggttagcactctggactctg

SEQ ID NO: 29662 - DNA, 35 bp, Homo Sapiens
ttccatggtgtaatggttagcactctggactctga

SEQ ID NO: 29663 - DNA, 36 bp, Homo Sapiens
ttccatggtgtaatggttagcactctggactctgaa

SEQ ID NO: 29664 - DNA, 37 bp, Homo Sapiens
ttccatggtgtaatggttagcactctggactctgaat

SEQ ID NO: 29665 - DNA, 38 bp, Homo Sapiens
ttccatggtgtaatggttagcactctggactctgaatc

SEQ ID NO: 29666 - DNA, 39 bp, Homo Sapiens
ttccatggtgtaatggttagcactctggactctgaatcc

SEQ ID NO: 29667 - DNA, 40 bp, Homo Sapiens
ttccatggtgtaatggttagcactctggactctgaatcca

SEQ ID NO: 29668 - DNA, 34 bp, Homo Sapiens
ttcccacatggtctagcggttaggattcctggtt

SEQ ID NO: 29669 - DNA, 24 bp, Homo Sapiens
ttcccatatggtctagcggttagg

SEQ ID NO: 29670 - DNA, 33 bp, Homo Sapiens
ttcccatatggtctagcggttaggattcctggt

SEQ ID NO: 29671 - DNA, 34 bp, Homo Sapiens
ttcccatatggtctagcggttaggattcctggtt

SEQ ID NO: 29672 - DNA, 16 bp, Homo Sapiens
ttcccattcttgcgac

SEQ ID NO: 29673 - DNA, 17 bp, Homo Sapiens
ttcccattcttgcgacc

SEQ ID NO: 29674 - DNA, 18 bp, Homo Sapiens
ttcccattcttgcgaccc

SEQ ID NO: 29675 - DNA, 19 bp, Homo Sapiens
ttcccattcttgcgacccg

SEQ ID NO: 29676 - DNA, 20 bp, Homo Sapiens
ttcccattcttgcgacccgg

SEQ ID NO: 29677 - DNA, 21 bp, Homo Sapiens
ttcccattcttgcgacccggg

SEQ ID NO: 29678 - DNA, 22 bp, Homo Sapiens
ttcccattcttgcgacccgggt

SEQ ID NO: 29679 - DNA, 23 bp, Homo Sapiens
ttcccattcttgcgacccgggtt

SEQ ID NO: 29680 - DNA, 25 bp, Homo Sapiens
ttcccattcttgcgacccgggttcg

SEQ ID NO: 29681 - DNA, 28 bp, Homo Sapiens
ttcccattcttgcgacccgggttcgatt

SEQ ID NO: 29682 - DNA, 32 bp, Homo Sapiens
ttcccattcttgcgacccgggttcgattcccg

SEQ ID NO: 29683 - DNA, 37 bp, Homo Sapiens
ttcccattcttgcgacccgggttcgattcccgggcgg

SEQ ID NO: 29684 - DNA, 38 bp, Homo Sapiens
ttcccattcttgcgacccgggttcgattcccgggcggc

SEQ ID NO: 29685 - DNA, 39 bp, Homo Sapiens
ttcccattcttgcgacccgggttcgattcccgggcggcg

SEQ ID NO: 29686 - DNA, 40 bp, Homo Sapiens
ttcccattcttgcgacccgggttcgattcccgggcggcgc

SEQ ID NO: 29687 - DNA, 41 bp, Homo Sapiens
ttcccattcttgcgacccgggttcgattcccgggcggcgca

SEQ ID NO: 29688 - DNA, 42 bp, Homo Sapiens
ttcccattcttgcgacccgggttcgattcccgggcggcgcac

SEQ ID NO: 29689 - DNA, 43 bp, Homo Sapiens
ttcccattcttgcgacccgggttcgattcccgggcggcgcacc

SEQ ID NO: 29690 - DNA, 44 bp, Homo Sapiens
ttcccattcttgcgacccgggttcgattcccgggcggcgcacca

SEQ ID NO: 29691 - DNA, 16 bp, Homo Sapiens
ttccccgacggggagc

SEQ ID NO: 29692 - DNA, 20 bp, Homo Sapiens
ttccccgcacaggttcgaat

SEQ ID NO: 29693 - DNA, 22 bp, Homo Sapiens
ttccccgcacaggttcgaatcc

SEQ ID NO: 29694 - DNA, 23 bp, Homo Sapiens
ttccccgcacaggttcgaatcct

SEQ ID NO: 29695 - DNA, 24 bp, Homo Sapiens
ttccccgcacaggttcgaatcctg

SEQ ID NO: 29696 - DNA, 35 bp, Homo Sapiens
ttccccgcacaggttcgaatcctgttcgtgacgcc

SEQ ID NO: 29697 - DNA, 16 bp, Homo Sapiens
ttccccgcgcaggttc

SEQ ID NO: 29698 - DNA, 23 bp, Homo Sapiens
ttccccgcgcaggttcaaatcct

SEQ ID NO: 29699 - DNA, 21 bp, Homo Sapiens
ttccccgcgcaggttcgaatc

SEQ ID NO: 29700 - DNA, 22 bp, Homo Sapiens
ttccccgcgcaggttcgaatcc

SEQ ID NO: 29701 - DNA, 23 bp, Homo Sapiens
ttccccgcgcaggttcgaatcct

SEQ ID NO: 29702 - DNA, 24 bp, Homo Sapiens
ttccccgcgcaggttcgaatcctg

SEQ ID NO: 29703 - DNA, 35 bp, Homo Sapiens
ttccccgcgcaggttcgaatcctgccgactacgcc

SEQ ID NO: 29704 - DNA, 36 bp, Homo Sapiens
ttccccgcgcaggttcgaatcctgccgactacgcca

SEQ ID NO: 29705 - DNA, 16 bp, Homo Sapiens
ttcccggccaacgcac

SEQ ID NO: 29706 - DNA, 17 bp, Homo Sapiens
ttcccggccaacgcacc

SEQ ID NO: 29707 - DNA, 18 bp, Homo Sapiens
ttcccggccaacgcacca

SEQ ID NO: 29708 - DNA, 16 bp, Homo Sapiens
ttcccggccaatgcac

SEQ ID NO: 29709 - DNA, 17 bp, Homo Sapiens
ttcccggccaatgcacc

SEQ ID NO: 29710 - DNA, 18 bp, Homo Sapiens
ttcccggccaatgcacca

SEQ ID NO: 29711 - DNA, 17 bp, Homo Sapiens
ttcccggccagggaacc

SEQ ID NO: 29712 - DNA, 16 bp, Homo Sapiens
ttcccggcccatgcac

SEQ ID NO: 29713 - DNA, 17 bp, Homo Sapiens
ttcccggcccatgcacc

SEQ ID NO: 29714 - DNA, 18 bp, Homo Sapiens
ttcccggcccatgcacca

SEQ ID NO: 29715 - DNA, 16 bp, Homo Sapiens
ttcccgggcggcgcac

SEQ ID NO: 29716 - DNA, 17 bp, Homo Sapiens
ttcccgggcggcgcacc

SEQ ID NO: 29717 - DNA, 18 bp, Homo Sapiens
ttcccgggcggcgcacca

SEQ ID NO: 29718 - DNA, 16 bp, Homo Sapiens
ttcccggtcaggaaac

SEQ ID NO: 29719 - DNA, 16 bp, Homo Sapiens
ttcccggtcagggaac

SEQ ID NO: 29720 - DNA, 17 bp, Homo Sapiens
ttcccggtcagggaacc

SEQ ID NO: 29721 - DNA, 18 bp, Homo Sapiens
ttcccggtcagggaacca

SEQ ID NO: 29722 - DNA, 16 bp, Homo Sapiens
ttccctggtggtctag

SEQ ID NO: 29723 - DNA, 26 bp, Homo Sapiens
ttccctggtggtctagtggttaggat

SEQ ID NO: 29724 - DNA, 27 bp, Homo Sapiens
ttccctggtggtctagtggttaggatt

SEQ ID NO: 29725 - DNA, 33 bp, Homo Sapiens
ttccctggtggtctagtggttaggattcggcgc

SEQ ID NO: 29726 - DNA, 34 bp, Homo Sapiens
ttccctggtggtctagtggttaggattcggcgct

SEQ ID NO: 29727 - DNA, 35 bp, Homo Sapiens
ttccctggtggtctagtggttaggattcggcgctc

SEQ ID NO: 29728 - DNA, 36 bp, Homo Sapiens
ttccctggtggtctagtggttaggattcggcgctct

SEQ ID NO: 29729 - DNA, 37 bp, Homo Sapiens
ttccctggtggtctagtggttaggattcggcgctctc

SEQ ID NO: 29730 - DNA, 40 bp, Homo Sapiens
ttccctggtggtctagtggttaggattcggcgctctcacc

SEQ ID NO: 29731 - DNA, 16 bp, Homo Sapiens
ttccggatcagaagat

SEQ ID NO: 29732 - DNA, 18 bp, Homo Sapiens
ttccggatcagaagattg

SEQ ID NO: 29733 - DNA, 19 bp, Homo Sapiens
ttccggatcagaagattga

SEQ ID NO: 29734 - DNA, 20 bp, Homo Sapiens
ttccggatcagaagattgag

SEQ ID NO: 29735 - DNA, 21 bp, Homo Sapiens
ttccggatcagaagattgagg

SEQ ID NO: 29736 - DNA, 22 bp, Homo Sapiens
ttccggatcagaagattgaggg

SEQ ID NO: 29737 - DNA, 23 bp, Homo Sapiens
ttccggatcagaagattgagggt

SEQ ID NO: 29738 - DNA, 24 bp, Homo Sapiens
ttccggatcagaagattgagggtt

SEQ ID NO: 29739 - DNA, 25 bp, Homo Sapiens
ttccggatcagaagattgagggttc

SEQ ID NO: 29740 - DNA, 26 bp, Homo Sapiens
ttccggatcagaagattgagggttcg

SEQ ID NO: 29741 - DNA, 33 bp, Homo Sapiens
ttccggatcagaagattgagggttcgagtccct

SEQ ID NO: 29742 - DNA, 36 bp, Homo Sapiens
ttccggatcagaagattgagggttcgagtcccttcg

SEQ ID NO: 29743 - DNA, 43 bp, Homo Sapiens
ttccggatcagaagattgagggttcgagtcccttcgtggtcgc

SEQ ID NO: 29744 - DNA, 44 bp, Homo Sapiens
ttccggatcagaagattgagggttcgagtcccttcgtggtcgcc

SEQ ID NO: 29745 - DNA, 45 bp, Homo Sapiens
ttccggatcagaagattgagggttcgagtcccttcgtggtcgcca

SEQ ID NO: 29746 - DNA, 16 bp, Homo Sapiens
ttccggctcgaaggac

SEQ ID NO: 29747 - DNA, 17 bp, Homo Sapiens
ttccggctcgaaggacc

SEQ ID NO: 29748 - DNA, 18 bp, Homo Sapiens
ttccggctcgaaggacca

SEQ ID NO: 29749 - DNA, 27 bp, Homo Sapiens
ttccgggttcgagtcccggcagagatg

SEQ ID NO: 29750 - DNA, 29 bp, Homo Sapiens
ttccgggttcgagtcccggcagagatgcc

SEQ ID NO: 29751 - DNA, 23 bp, Homo Sapiens
ttccgggttcgagtcccggcgga

SEQ ID NO: 29752 - DNA, 24 bp, Homo Sapiens
ttccgggttcgagtcccggcggag

SEQ ID NO: 29753 - DNA, 25 bp, Homo Sapiens
ttccgggttcgagtcccggcggagt

SEQ ID NO: 29754 - DNA, 26 bp, Homo Sapiens
ttccgggttcgagtcccggcggagtc

SEQ ID NO: 29755 - DNA, 27 bp, Homo Sapiens
ttccgggttcgagtcccggcggagtcg

SEQ ID NO: 29756 - DNA, 28 bp, Homo Sapiens
ttccgggttcgagtcccggcggagtcgc

SEQ ID NO: 29757 - DNA, 29 bp, Homo Sapiens
ttccgggttcgagtcccggcggagtcgcc

SEQ ID NO: 29758 - DNA, 30 bp, Homo Sapiens
ttccgggttcgagtcccggcggagtcgcca

SEQ ID NO: 29759 - DNA, 31 bp, Homo Sapiens
ttccgtagtggagtggttatcacgttcgcct

SEQ ID NO: 29760 - DNA, 21 bp, Homo Sapiens
ttccgtagtgtagcggttatc

SEQ ID NO: 29761 - DNA, 23 bp, Homo Sapiens
ttccgtagtgtagcggttatcac

SEQ ID NO: 29762 - DNA, 24 bp, Homo Sapiens
ttccgtagtgtagcggttatcaca

SEQ ID NO: 29763 - DNA, 26 bp, Homo Sapiens
ttccgtagtgtagcggttatcacatt

SEQ ID NO: 29764 - DNA, 27 bp, Homo Sapiens
ttccgtagtgtagcggttatcacattc

SEQ ID NO: 29765 - DNA, 30 bp, Homo Sapiens
ttccgtagtgtagcggttatcacattcgcc

SEQ ID NO: 29766 - DNA, 31 bp, Homo Sapiens
ttccgtagtgtagcggttatcacattcgcct

SEQ ID NO: 29767 - DNA, 32 bp, Homo Sapiens
ttccgtagtgtagcggttatcacattcgcctc

SEQ ID NO: 29768 - DNA, 33 bp, Homo Sapiens
ttccgtagtgtagcggttatcacattcgcctca

SEQ ID NO: 29769 - DNA, 34 bp, Homo Sapiens
ttccgtagtgtagcggttatcacattcgcctcac

SEQ ID NO: 29770 - DNA, 16 bp, Homo Sapiens
ttccgtagtgtagtgg

SEQ ID NO: 29771 - DNA, 17 bp, Homo Sapiens
ttccgtagtgtagtggt

SEQ ID NO: 29772 - DNA, 18 bp, Homo Sapiens
ttccgtagtgtagtggtc

SEQ ID NO: 29773 - DNA, 19 bp, Homo Sapiens
ttccgtagtgtagtggtca

SEQ ID NO: 29774 - DNA, 21 bp, Homo Sapiens
ttccgtagtgtagtggtcatc

SEQ ID NO: 29775 - DNA, 22 bp, Homo Sapiens
ttccgtagtgtagtggtcatca

SEQ ID NO: 29776 - DNA, 26 bp, Homo Sapiens
ttccgtagtgtagtggtcatcacgtt

SEQ ID NO: 29777 - DNA, 27 bp, Homo Sapiens
ttccgtagtgtagtggtcatcacgttc

SEQ ID NO: 29778 - DNA, 28 bp, Homo Sapiens
ttccgtagtgtagtggtcatcacgttcg

SEQ ID NO: 29779 - DNA, 29 bp, Homo Sapiens
ttccgtagtgtagtggtcatcacgttcgc

SEQ ID NO: 29780 - DNA, 30 bp, Homo Sapiens
ttccgtagtgtagtggtcatcacgttcgcc

SEQ ID NO: 29781 - DNA, 31 bp, Homo Sapiens
ttccgtagtgtagtggtcatcacgttcgcct

SEQ ID NO: 29782 - DNA, 32 bp, Homo Sapiens
ttccgtagtgtagtggtcatcacgttcgccta

SEQ ID NO: 29783 - DNA, 33 bp, Homo Sapiens
ttccgtagtgtagtggtcatcacgttcgcctaa

SEQ ID NO: 29784 - DNA, 34 bp, Homo Sapiens
ttccgtagtgtagtggtcatcacgttcgcctaac

SEQ ID NO: 29785 - DNA, 19 bp, Homo Sapiens
ttccgtagtgtagtggtta

SEQ ID NO: 29786 - DNA, 20 bp, Homo Sapiens
ttccgtagtgtagtggttat

SEQ ID NO: 29787 - DNA, 21 bp, Homo Sapiens
ttccgtagtgtagtggttatc

SEQ ID NO: 29788 - DNA, 22 bp, Homo Sapiens
ttccgtagtgtagtggttatca

SEQ ID NO: 29789 - DNA, 23 bp, Homo Sapiens
ttccgtagtgtagtggttatcac

SEQ ID NO: 29790 - DNA, 24 bp, Homo Sapiens
ttccgtagtgtagtggttatcacg

SEQ ID NO: 29791 - DNA, 27 bp, Homo Sapiens
ttccgtagtgtagtggttatcacgttc

SEQ ID NO: 29792 - DNA, 28 bp, Homo Sapiens
ttccgtagtgtagtggttatcacgttcg

SEQ ID NO: 29793 - DNA, 29 bp, Homo Sapiens
ttccgtagtgtagtggttatcacgttcgc

SEQ ID NO: 29794 - DNA, 30 bp, Homo Sapiens
ttccgtagtgtagtggttatcacgttcgcc

SEQ ID NO: 29795 - DNA, 31 bp, Homo Sapiens
ttccgtagtgtagtggttatcacgttcgcct

SEQ ID NO: 29796 - DNA, 32 bp, Homo Sapiens
ttccgtagtgtagtggttatcacgttcgccta

SEQ ID NO: 29797 - DNA, 33 bp, Homo Sapiens
ttccgtagtgtagtggttatcacgttcgcctaa

SEQ ID NO: 29798 - DNA, 34 bp, Homo Sapiens
ttccgtagtgtagtggttatcacgttcgcctaac

SEQ ID NO: 29799 - DNA, 32 bp, Homo Sapiens
ttccgtagtgtagtggttatcacgttcgcctc

SEQ ID NO: 29800 - DNA, 33 bp, Homo Sapiens
ttccgtagtgtagtggttatcacgttcgcctca

SEQ ID NO: 29801 - DNA, 34 bp, Homo Sapiens
ttccgtagtgtagtggttatcacgttcgcctcac

SEQ ID NO: 29802 - DNA, 35 bp, Homo Sapiens
ttccgtagtgtagtggttatcacgttcgcctcaca

SEQ ID NO: 29803 - DNA, 36 bp, Homo Sapiens
ttccgtagtgtagtggttatcacgttcgcctcacac

SEQ ID NO: 29804 - DNA, 37 bp, Homo Sapiens
ttccgtagtgtagtggttatcacgttcgcctcacacg

SEQ ID NO: 29805 - DNA, 38 bp, Homo Sapiens
ttccgtagtgtagtggttatcacgttcgcctcacacgc

SEQ ID NO: 29806 - DNA, 39 bp, Homo Sapiens
ttccgtagtgtagtggttatcacgttcgcctcacacgcg

SEQ ID NO: 29807 - DNA, 41 bp, Homo Sapiens
ttccgtagtgtagtggttatcacgttcgcctcacacgcgaa

SEQ ID NO: 29808 - DNA, 30 bp, Homo Sapiens
ttccgtagtgtagtggttatcacgtttgcc

SEQ ID NO: 29809 - DNA, 31 bp, Homo Sapiens
ttccgtagtgtagtggttatcacgtttgcct

SEQ ID NO: 29810 - DNA, 16 bp, Homo Sapiens
ttcctcttcttaacac

SEQ ID NO: 29811 - DNA, 17 bp, Homo Sapiens
ttcctcttcttaacacc

SEQ ID NO: 29812 - DNA, 18 bp, Homo Sapiens
ttcctcttcttaacacca

SEQ ID NO: 29813 - DNA, 18 bp, Homo Sapiens
ttcctggccaatgcacca

SEQ ID NO: 29814 - DNA, 26 bp, Homo Sapiens
ttcctggttttcacccaggcggcccg

SEQ ID NO: 29815 - DNA, 31 bp, Homo Sapiens
ttcctggttttcacccaggcggcccgggttc

SEQ ID NO: 29816 - DNA, 40 bp, Homo Sapiens
ttcctggttttcacccaggcggcccgggttcgactcccgg

SEQ ID NO: 29817 - DNA, 44 bp, Homo Sapiens
ttcctggttttcacccaggcggcccgggttcgactcccggtgtg

SEQ ID NO: 29818 - DNA, 36 bp, Homo Sapiens
ttcctggttttcacccaggtggcccgggttcgactc

SEQ ID NO: 29819 - DNA, 17 bp, Homo Sapiens
ttccttccttttttgcc

SEQ ID NO: 29820 - DNA, 18 bp, Homo Sapiens
ttccttccttttttgcca

SEQ ID NO: 29821 - DNA, 17 bp, Homo Sapiens
ttcgaaaccgggcggaa

SEQ ID NO: 29822 - DNA, 19 bp, Homo Sapiens
ttcgaaaccgggcggaaac

SEQ ID NO: 29823 - DNA, 20 bp, Homo Sapiens
ttcgaaaccgggcggaaaca

SEQ ID NO: 29824 - DNA, 22 bp, Homo Sapiens
ttcgaaaccgggcggaaacacc

SEQ ID NO: 29825 - DNA, 23 bp, Homo Sapiens
ttcgaaaccgggcggaaacacca

SEQ ID NO: 29826 - DNA, 17 bp, Homo Sapiens
ttcgaaccccgtccgtg

SEQ ID NO: 29827 - DNA, 20 bp, Homo Sapiens
ttcgaaccccgtccgtgcct

SEQ ID NO: 29828 - DNA, 22 bp, Homo Sapiens
ttcgaaccccgtccgtgcctcc

SEQ ID NO: 29829 - DNA, 21 bp, Homo Sapiens
ttcgaaccctgctcgctgcgc

SEQ ID NO: 29830 - DNA, 22 bp, Homo Sapiens
ttcgaaccctgctcgctgcgcc

SEQ ID NO: 29831 - DNA, 23 bp, Homo Sapiens
ttcgaaccctgctcgctgcgcca

SEQ ID NO: 29832 - DNA, 22 bp, Homo Sapiens
ttcgaacctcagagggggcacc

SEQ ID NO: 29833 - DNA, 16 bp, Homo Sapiens
ttcgaagaagcagctt

SEQ ID NO: 29834 - DNA, 17 bp, Homo Sapiens
ttcgaagaagcagcttc

SEQ ID NO: 29835 - DNA, 22 bp, Homo Sapiens
ttcgaagaagcagcttcaaacc

SEQ ID NO: 29836 - DNA, 24 bp, Homo Sapiens
ttcgaagaagcagcttcaaacctg

SEQ ID NO: 29837 - DNA, 26 bp, Homo Sapiens
ttcgaagaagcagcttcaaacctgcc

SEQ ID NO: 29838 - DNA, 27 bp, Homo Sapiens
ttcgaagaagcagcttcaaacctgccg

SEQ ID NO: 29839 - DNA, 30 bp, Homo Sapiens
ttcgaagaagcagcttcaaacctgccgggg

SEQ ID NO: 29840 - DNA, 31 bp, Homo Sapiens
ttcgaagaagcagcttcaaacctgccggggc

SEQ ID NO: 29841 - DNA, 32 bp, Homo Sapiens
ttcgaagaagcagcttcaaacctgccggggct

SEQ ID NO: 29842 - DNA, 33 bp, Homo Sapiens
ttcgaagaagcagcttcaaacctgccggggctt

SEQ ID NO: 29843 - DNA, 34 bp, Homo Sapiens
ttcgaagaagcagcttcaaacctgccggggcttc

SEQ ID NO: 29844 - DNA, 35 bp, Homo Sapiens
ttcgaagaagcagcttcaaacctgccggggcttcc

SEQ ID NO: 29845 - DNA, 36 bp, Homo Sapiens
ttcgaagaagcagcttcaaacctgccggggcttcca

SEQ ID NO: 29846 - DNA, 21 bp, Homo Sapiens
ttcgaatcacgtcggggtcac

SEQ ID NO: 29847 - DNA, 22 bp, Homo Sapiens
ttcgaatcacgtcggggtcacc

SEQ ID NO: 29848 - DNA, 23 bp, Homo Sapiens
ttcgaatcacgtcggggtcacca

SEQ ID NO: 29849 - DNA, 17 bp, Homo Sapiens
ttcgaatcccaccgctg

SEQ ID NO: 29850 - DNA, 22 bp, Homo Sapiens
ttcgaatcccaccgctgccacc

SEQ ID NO: 29851 - DNA, 23 bp, Homo Sapiens
ttcgaatcccaccgctgccacca

SEQ ID NO: 29852 - DNA, 17 bp, Homo Sapiens
ttcgaatcccactcctg

SEQ ID NO: 29853 - DNA, 22 bp, Homo Sapiens
ttcgaatcccactcctgacacc

SEQ ID NO: 29854 - DNA, 17 bp, Homo Sapiens
ttcgaatcccacttctg

SEQ ID NO: 29855 - DNA, 21 bp, Homo Sapiens
ttcgaatcccacttctgacac

SEQ ID NO: 29856 - DNA, 22 bp, Homo Sapiens
ttcgaatcccacttctgacacc

SEQ ID NO: 29857 - DNA, 23 bp, Homo Sapiens
ttcgaatcccacttctgacacca

SEQ ID NO: 29858 - DNA, 17 bp, Homo Sapiens
ttcgaatcccagcgggg

SEQ ID NO: 29859 - DNA, 22 bp, Homo Sapiens
ttcgaatcccagcggggcctcc

SEQ ID NO: 29860 - DNA, 17 bp, Homo Sapiens
ttcgaatcccagcggtg

SEQ ID NO: 29861 - DNA, 18 bp, Homo Sapiens
ttcgaatcccagcggtgc

SEQ ID NO: 29862 - DNA, 19 bp, Homo Sapiens
ttcgaatcccagcggtgcc

SEQ ID NO: 29863 - DNA, 21 bp, Homo Sapiens
ttcgaatcccagcggtgcctc

SEQ ID NO: 29864 - DNA, 22 bp, Homo Sapiens
ttcgaatcccagcggtgcctcc

SEQ ID NO: 29865 - DNA, 23 bp, Homo Sapiens
ttcgaatcccagcggtgcctcca

SEQ ID NO: 29866 - DNA, 19 bp, Homo Sapiens
ttcgaatcccagtagagcc

SEQ ID NO: 29867 - DNA, 22 bp, Homo Sapiens
ttcgaatcccatcctcgtcgcc

SEQ ID NO: 29868 - DNA, 23 bp, Homo Sapiens
ttcgaatcccatcctcgtcgcca

SEQ ID NO: 29869 - DNA, 17 bp, Homo Sapiens
ttcgaatccgagtcacg

SEQ ID NO: 29870 - DNA, 18 bp, Homo Sapiens
ttcgaatccgagtcacgg

SEQ ID NO: 29871 - DNA, 19 bp, Homo Sapiens
ttcgaatccgagtcacggc

SEQ ID NO: 29872 - DNA, 20 bp, Homo Sapiens
ttcgaatccgagtcacggca

SEQ ID NO: 29873 - DNA, 21 bp, Homo Sapiens
ttcgaatccgagtcacggcac

SEQ ID NO: 29874 - DNA, 22 bp, Homo Sapiens
ttcgaatccggctcgaaggacc

SEQ ID NO: 29875 - DNA, 22 bp, Homo Sapiens
ttcgaatccggctcggaggacc

SEQ ID NO: 29876 - DNA, 17 bp, Homo Sapiens
ttcgaatcctgccgact

SEQ ID NO: 29877 - DNA, 22 bp, Homo Sapiens
ttcgaatcctgccgactacgcc

SEQ ID NO: 29878 - DNA, 23 bp, Homo Sapiens
ttcgaatcctgccgactacgcca

SEQ ID NO: 29879 - DNA, 22 bp, Homo Sapiens
ttcgaatcctgttcgtgacgcc

SEQ ID NO: 29880 - DNA, 23 bp, Homo Sapiens
ttcgaatcctgttcgtgacgcca

SEQ ID NO: 29881 - DNA, 19 bp, Homo Sapiens
ttcgaatctcggtgggacc

SEQ ID NO: 29882 - DNA, 21 bp, Homo Sapiens
ttcgaatctcggtgggacctc

SEQ ID NO: 29883 - DNA, 19 bp, Homo Sapiens
ttcgactcattaaattatg

SEQ ID NO: 29884 - DNA, 20 bp, Homo Sapiens
ttcgactcattaaattatga

SEQ ID NO: 29885 - DNA, 21 bp, Homo Sapiens
ttcgactcattaaattatgat

SEQ ID NO: 29886 - DNA, 23 bp, Homo Sapiens
ttcgactcattaaattatgataa

SEQ ID NO: 29887 - DNA, 24 bp, Homo Sapiens
ttcgactcattaaattatgataat

SEQ ID NO: 29888 - DNA, 25 bp, Homo Sapiens
ttcgactcattaaattatgataatc

SEQ ID NO: 29889 - DNA, 26 bp, Homo Sapiens
ttcgactcattaaattatgataatca

SEQ ID NO: 29890 - DNA, 30 bp, Homo Sapiens
ttcgactcattaaattatgataatcatatt

SEQ ID NO: 29891 - DNA, 31 bp, Homo Sapiens
ttcgactcattaaattatgataatcatattt

SEQ ID NO: 29892 - DNA, 32 bp, Homo Sapiens
ttcgactcattaaattatgataatcatattta

SEQ ID NO: 29893 - DNA, 33 bp, Homo Sapiens
ttcgactcattaaattatgataatcatatttac

SEQ ID NO: 29894 - DNA, 34 bp, Homo Sapiens
ttcgactcattaaattatgataatcatatttacc

SEQ ID NO: 29895 - DNA, 35 bp, Homo Sapiens
ttcgactcattaaattatgataatcatatttacca

SEQ ID NO: 29896 - DNA, 36 bp, Homo Sapiens
ttcgactcattaaattatgataatcatatttaccaa

SEQ ID NO: 29897 - DNA, 37 bp, Homo Sapiens
ttcgactcattaaattatgataatcatatttaccaac

SEQ ID NO: 29898 - DNA, 38 bp, Homo Sapiens
ttcgactcattaaattatgataatcatatttaccaacc

SEQ ID NO: 29899 - DNA, 39 bp, Homo Sapiens
ttcgactcattaaattatgataatcatatttaccaacca

SEQ ID NO: 29900 - DNA, 16 bp, Homo Sapiens
ttcgactcccggtatg

SEQ ID NO: 29901 - DNA, 17 bp, Homo Sapiens
ttcgactcccggtatgg

SEQ ID NO: 29902 - DNA, 21 bp, Homo Sapiens
ttcgactcccggtatgggaac

SEQ ID NO: 29903 - DNA, 22 bp, Homo Sapiens
ttcgactcccggtatgggaacc

SEQ ID NO: 29904 - DNA, 16 bp, Homo Sapiens
ttcgactcccggtgtg

SEQ ID NO: 29905 - DNA, 17 bp, Homo Sapiens
ttcgactcccggtgtgg

SEQ ID NO: 29906 - DNA, 18 bp, Homo Sapiens
ttcgactcccggtgtggg

SEQ ID NO: 29907 - DNA, 19 bp, Homo Sapiens
ttcgactcccggtgtggga

SEQ ID NO: 29908 - DNA, 20 bp, Homo Sapiens
ttcgactcccggtgtgggaa

SEQ ID NO: 29909 - DNA, 21 bp, Homo Sapiens
ttcgactcccggtgtgggaac

SEQ ID NO: 29910 - DNA, 22 bp, Homo Sapiens
ttcgactcccggtgtgggaacc

SEQ ID NO: 29911 - DNA, 23 bp, Homo Sapiens
ttcgactcccggtgtgggaacca

SEQ ID NO: 29912 - DNA, 16 bp, Homo Sapiens
ttcgactcctggctgg

SEQ ID NO: 29913 - DNA, 17 bp, Homo Sapiens
ttcgactcctggctggc

SEQ ID NO: 29914 - DNA, 19 bp, Homo Sapiens
ttcgactcctggctggctc

SEQ ID NO: 29915 - DNA, 20 bp, Homo Sapiens
ttcgactcctggctggctcg

SEQ ID NO: 29916 - DNA, 21 bp, Homo Sapiens
ttcgactcctggctggctcgc

SEQ ID NO: 29917 - DNA, 22 bp, Homo Sapiens
ttcgactcctggctggctcgcc

SEQ ID NO: 29918 - DNA, 23 bp, Homo Sapiens
ttcgactcctggctggctcgcca

SEQ ID NO: 29919 - DNA, 16 bp, Homo Sapiens
ttcgagcccacccagg

SEQ ID NO: 29920 - DNA, 17 bp, Homo Sapiens
ttcgagcccacccaggg

SEQ ID NO: 29921 - DNA, 22 bp, Homo Sapiens
ttcgagcccacccagggacgcc

SEQ ID NO: 29922 - DNA, 23 bp, Homo Sapiens
ttcgagcccacccagggacgcca

SEQ ID NO: 29923 - DNA, 17 bp, Homo Sapiens
ttcgagccccacgttgg

SEQ ID NO: 29924 - DNA, 19 bp, Homo Sapiens
ttcgagccccacgttgggc

SEQ ID NO: 29925 - DNA, 19 bp, Homo Sapiens
ttcgagccccagtggaacc

SEQ ID NO: 29926 - DNA, 20 bp, Homo Sapiens
ttcgagccccagtggaacca

SEQ ID NO: 29927 - DNA, 21 bp, Homo Sapiens
ttcgagccccagtggaaccac

SEQ ID NO: 29928 - DNA, 22 bp, Homo Sapiens
ttcgagccccagtggaaccacc

SEQ ID NO: 29929 - DNA, 23 bp, Homo Sapiens
ttcgagccccagtggaaccacca

SEQ ID NO: 29930 - DNA, 17 bp, Homo Sapiens
ttcgagcctcacctgga

SEQ ID NO: 29931 - DNA, 22 bp, Homo Sapiens
ttcgagcctcacctggagcacc

SEQ ID NO: 29932 - DNA, 23 bp, Homo Sapiens
ttcgagcctcacctggagcacca

SEQ ID NO: 29933 - DNA, 16 bp, Homo Sapiens
ttcgagtcccggcaga

SEQ ID NO: 29934 - DNA, 16 bp, Homo Sapiens
ttcgagtcccggcgga

SEQ ID NO: 29935 - DNA, 17 bp, Homo Sapiens
ttcgagtcccggcggag

SEQ ID NO: 29936 - DNA, 16 bp, Homo Sapiens
ttcgagtcccttcgtg

SEQ ID NO: 29937 - DNA, 19 bp, Homo Sapiens
ttcgagtcctgccgcggtc

SEQ ID NO: 29938 - DNA, 22 bp, Homo Sapiens
ttcgagtcctgccgcggtcgcc

SEQ ID NO: 29939 - DNA, 17 bp, Homo Sapiens
ttcgagtctcggtggaa

SEQ ID NO: 29940 - DNA, 19 bp, Homo Sapiens
ttcgagtctcggtggaacc

SEQ ID NO: 29941 - DNA, 20 bp, Homo Sapiens
ttcgagtctcggtggaacct

SEQ ID NO: 29942 - DNA, 21 bp, Homo Sapiens
ttcgagtctcggtggaacctc

SEQ ID NO: 29943 - DNA, 22 bp, Homo Sapiens
ttcgagtctcggtggaacctcc

SEQ ID NO: 29944 - DNA, 23 bp, Homo Sapiens
ttcgagtctcggtggaacctcca

SEQ ID NO: 29945 - DNA, 16 bp, Homo Sapiens
ttcgatagctcagctg

SEQ ID NO: 29946 - DNA, 17 bp, Homo Sapiens
ttcgatagctcagctgg

SEQ ID NO: 29947 - DNA, 23 bp, Homo Sapiens
ttcgatagctcagctggtagagc

SEQ ID NO: 29948 - DNA, 28 bp, Homo Sapiens
ttcgatagctcagctggtagagcggagg

SEQ ID NO: 29949 - DNA, 31 bp, Homo Sapiens
ttcgatagctcagctggtagagcggaggact

SEQ ID NO: 29950 - DNA, 32 bp, Homo Sapiens
ttcgatagctcagctggtagagcggaggactg

SEQ ID NO: 29951 - DNA, 33 bp, Homo Sapiens
ttcgatagctcagctggtagagcggaggactgt

SEQ ID NO: 29952 - DNA, 34 bp, Homo Sapiens
ttcgatagctcagctggtagagcggaggactgta

SEQ ID NO: 29953 - DNA, 17 bp, Homo Sapiens
ttcgatagctcagttgg

SEQ ID NO: 29954 - DNA, 23 bp, Homo Sapiens
ttcgatagctcagttggtagagc

SEQ ID NO: 29955 - DNA, 31 bp, Homo Sapiens
ttcgatagctcagttggtagagcggaggact

SEQ ID NO: 29956 - DNA, 32 bp, Homo Sapiens
ttcgatagctcagttggtagagcggaggactg

SEQ ID NO: 29957 - DNA, 34 bp, Homo Sapiens
ttcgatagctcagttggtagagcggaggactgta

SEQ ID NO: 29958 - DNA, 16 bp, Homo Sapiens
ttcgatccccggcatc

SEQ ID NO: 29959 - DNA, 17 bp, Homo Sapiens
ttcgatccccggcatct

SEQ ID NO: 29960 - DNA, 18 bp, Homo Sapiens
ttcgatccccggcatctc

SEQ ID NO: 29961 - DNA, 19 bp, Homo Sapiens
ttcgatccccggcatctcc

SEQ ID NO: 29962 - DNA, 20 bp, Homo Sapiens
ttcgatccccggcatctcca

SEQ ID NO: 29963 - DNA, 21 bp, Homo Sapiens
ttcgatccccggcatctccac

SEQ ID NO: 29964 - DNA, 22 bp, Homo Sapiens
ttcgatccccggcatctccacc

SEQ ID NO: 29965 - DNA, 23 bp, Homo Sapiens
ttcgatccccggcatctccacca

SEQ ID NO: 29966 - DNA, 19 bp, Homo Sapiens
ttcgatccccgtacgggcc

SEQ ID NO: 29967 - DNA, 20 bp, Homo Sapiens
ttcgatccccgtacgggcca

SEQ ID NO: 29968 - DNA, 22 bp, Homo Sapiens
ttcgatccccgtacgggccacc

SEQ ID NO: 29969 - DNA, 23 bp, Homo Sapiens
ttcgatccccgtacgggccacca

SEQ ID NO: 29970 - DNA, 22 bp, Homo Sapiens
ttcgatccccgtactggccacc

SEQ ID NO: 29971 - DNA, 22 bp, Homo Sapiens
ttcgatcccgggcggaaacacc

SEQ ID NO: 29972 - DNA, 23 bp, Homo Sapiens
ttcgatcccgggcggaaacacca

SEQ ID NO: 29973 - DNA, 20 bp, Homo Sapiens
ttcgatcccgggtttcggca

SEQ ID NO: 29974 - DNA, 21 bp, Homo Sapiens
ttcgatcccgggtttcggcac

SEQ ID NO: 29975 - DNA, 22 bp, Homo Sapiens
ttcgatcccgggtttcggcacc

SEQ ID NO: 29976 - DNA, 23 bp, Homo Sapiens
ttcgatcccgggtttcggcacca

SEQ ID NO: 29977 - DNA, 19 bp, Homo Sapiens
ttcgatcctcacacggggc

SEQ ID NO: 29978 - DNA, 22 bp, Homo Sapiens
ttcgatcctcacctggagcacc

SEQ ID NO: 29979 - DNA, 23 bp, Homo Sapiens
ttcgatcctcacctggagcacca

SEQ ID NO: 29980 - DNA, 17 bp, Homo Sapiens
ttcgatggcgtgggttc

SEQ ID NO: 29981 - DNA, 28 bp, Homo Sapiens
ttcgatggcgtgggttcgaatcccaccg

SEQ ID NO: 29982 - DNA, 31 bp, Homo Sapiens
ttcgatggcgtgggttcgaatcccaccgctg

SEQ ID NO: 29983 - DNA, 36 bp, Homo Sapiens
ttcgatggcgtgggttcgaatcccaccgctgccacc

SEQ ID NO: 29984 - DNA, 16 bp, Homo Sapiens
ttcgattccccgacgg

SEQ ID NO: 29985 - DNA, 17 bp, Homo Sapiens
ttcgattccccgacggg

SEQ ID NO: 29986 - DNA, 21 bp, Homo Sapiens
ttcgattccccgacggggagc

SEQ ID NO: 29987 - DNA, 22 bp, Homo Sapiens
ttcgattccccgacggggagcc

SEQ ID NO: 29988 - DNA, 23 bp, Homo Sapiens
ttcgattccccgacggggagcca

SEQ ID NO: 29989 - DNA, 17 bp, Homo Sapiens
ttcgattcccggccaac

SEQ ID NO: 29990 - DNA, 18 bp, Homo Sapiens
ttcgattcccggccaacg

SEQ ID NO: 29991 - DNA, 21 bp, Homo Sapiens
ttcgattcccggccaacgcac

SEQ ID NO: 29992 - DNA, 22 bp, Homo Sapiens
ttcgattcccggccaacgcacc

SEQ ID NO: 29993 - DNA, 23 bp, Homo Sapiens
ttcgattcccggccaacgcacca

SEQ ID NO: 29994 - DNA, 17 bp, Homo Sapiens
ttcgattcccggccaat

SEQ ID NO: 29995 - DNA, 18 bp, Homo Sapiens
ttcgattcccggccaatg

SEQ ID NO: 29996 - DNA, 22 bp, Homo Sapiens
ttcgattcccggccaatgcacc

SEQ ID NO: 29997 - DNA, 23 bp, Homo Sapiens
ttcgattcccggccaatgcacca

SEQ ID NO: 29998 - DNA, 22 bp, Homo Sapiens
ttcgattcccggcccatgcacc

SEQ ID NO: 29999 - DNA, 16 bp, Homo Sapiens
ttcgattcccgggcgg

SEQ ID NO: 30000 - DNA, 17 bp, Homo Sapiens
ttcgattcccgggcggc

SEQ ID NO: 30001 - DNA, 18 bp, Homo Sapiens
ttcgattcccgggcggcg

SEQ ID NO: 30002 - DNA, 20 bp, Homo Sapiens
ttcgattcccgggcggcgca

SEQ ID NO: 30003 - DNA, 21 bp, Homo Sapiens
ttcgattcccgggcggcgcac

SEQ ID NO: 30004 - DNA, 22 bp, Homo Sapiens
ttcgattcccgggcggcgcacc

SEQ ID NO: 30005 - DNA, 23 bp, Homo Sapiens
ttcgattcccgggcggcgcacca

SEQ ID NO: 30006 - DNA, 16 bp, Homo Sapiens
ttcgattcccggtcag

SEQ ID NO: 30007 - DNA, 17 bp, Homo Sapiens
ttcgattcccggtcagg

SEQ ID NO: 30008 - DNA, 21 bp, Homo Sapiens
ttcgattcccggtcagggaac

SEQ ID NO: 30009 - DNA, 22 bp, Homo Sapiens
ttcgattcccggtcagggaacc

SEQ ID NO: 30010 - DNA, 23 bp, Homo Sapiens
ttcgattcccggtcagggaacca

SEQ ID NO: 30011 - DNA, 22 bp, Homo Sapiens
ttcgattccggctcgaaggacc

SEQ ID NO: 30012 - DNA, 23 bp, Homo Sapiens
ttcgattccggctcgaaggacca

SEQ ID NO: 30013 - DNA, 22 bp, Homo Sapiens
ttcgattccttccttttttgcc

SEQ ID NO: 30014 - DNA, 23 bp, Homo Sapiens
ttcgattccttccttttttgcca

SEQ ID NO: 30015 - DNA, 18 bp, Homo Sapiens
ttcgattctcatagtcct

SEQ ID NO: 30016 - DNA, 20 bp, Homo Sapiens
ttcgattctcatagtcctag

SEQ ID NO: 30017 - DNA, 21 bp, Homo Sapiens
ttcgattctcatagtcctagc

SEQ ID NO: 30018 - DNA, 22 bp, Homo Sapiens
ttcgattctcatagtcctagcc

SEQ ID NO: 30019 - DNA, 23 bp, Homo Sapiens
ttcgattctcatagtcctagcca

SEQ ID NO: 30020 - DNA, 17 bp, Homo Sapiens
ttcggaggcgtgggttc

SEQ ID NO: 30021 - DNA, 18 bp, Homo Sapiens
ttcggatcagaagattga

SEQ ID NO: 30022 - DNA, 22 bp, Homo Sapiens
ttcggatcagaagattgagggt

SEQ ID NO: 30023 - DNA, 43 bp, Homo Sapiens
ttcggatcagaagattgagggttcgagtcccttcgtggtcgcc

SEQ ID NO: 30024 - DNA, 24 bp, Homo Sapiens
ttcggatcagaagattgcaggttc

SEQ ID NO: 30025 - DNA, 43 bp, Homo Sapiens
ttcggatcagaagattgcaggttcgagtcctgccgcggtcgcc

SEQ ID NO: 30026 - DNA, 16 bp, Homo Sapiens
ttcggcgctctcaccg

SEQ ID NO: 30027 - DNA, 17 bp, Homo Sapiens
ttcggcgctctcaccgc

SEQ ID NO: 30028 - DNA, 18 bp, Homo Sapiens
ttcggcgctctcaccgcc

SEQ ID NO: 30029 - DNA, 23 bp, Homo Sapiens
ttcggcgctctcaccgccgcggc

SEQ ID NO: 30030 - DNA, 25 bp, Homo Sapiens
ttcggcgctctcaccgccgcggccc

SEQ ID NO: 30031 - DNA, 26 bp, Homo Sapiens
ttcggcgctctcaccgccgcggcccg

SEQ ID NO: 30032 - DNA, 27 bp, Homo Sapiens
ttcggcgctctcaccgccgcggcccgg

SEQ ID NO: 30033 - DNA, 28 bp, Homo Sapiens
ttcggcgctctcaccgccgcggcccggg

SEQ ID NO: 30034 - DNA, 29 bp, Homo Sapiens
ttcggcgctctcaccgccgcggcccgggt

SEQ ID NO: 30035 - DNA, 30 bp, Homo Sapiens
ttcggcgctctcaccgccgcggcccgggtt

SEQ ID NO: 30036 - DNA, 31 bp, Homo Sapiens
ttcggcgctctcaccgccgcggcccgggttc

SEQ ID NO: 30037 - DNA, 32 bp, Homo Sapiens
ttcggcgctctcaccgccgcggcccgggttcg

SEQ ID NO: 30038 - DNA, 33 bp, Homo Sapiens
ttcggcgctctcaccgccgcggcccgggttcga

SEQ ID NO: 30039 - DNA, 34 bp, Homo Sapiens
ttcggcgctctcaccgccgcggcccgggttcgat

SEQ ID NO: 30040 - DNA, 35 bp, Homo Sapiens
ttcggcgctctcaccgccgcggcccgggttcgatt

SEQ ID NO: 30041 - DNA, 36 bp, Homo Sapiens
ttcggcgctctcaccgccgcggcccgggttcgattc

SEQ ID NO: 30042 - DNA, 37 bp, Homo Sapiens
ttcggcgctctcaccgccgcggcccgggttcgattcc

SEQ ID NO: 30043 - DNA, 38 bp, Homo Sapiens
ttcggcgctctcaccgccgcggcccgggttcgattccc

SEQ ID NO: 30044 - DNA, 39 bp, Homo Sapiens
ttcggcgctctcaccgccgcggcccgggttcgattcccg

SEQ ID NO: 30045 - DNA, 40 bp, Homo Sapiens
ttcggcgctctcaccgccgcggcccgggttcgattcccgg

SEQ ID NO: 30046 - DNA, 41 bp, Homo Sapiens
ttcggcgctctcaccgccgcggcccgggttcgattcccggt

SEQ ID NO: 30047 - DNA, 48 bp, Homo Sapiens
ttcggcgctctcaccgccgcggcccgggttcgattcccggtcagggaa

SEQ ID NO: 30048 - DNA, 23 bp, Homo Sapiens
ttcggcgctttcaccgccgcggc

SEQ ID NO: 30049 - DNA, 28 bp, Homo Sapiens
ttcggctgttaaccgaaaggttggtggt

SEQ ID NO: 30050 - DNA, 29 bp, Homo Sapiens
ttcggctgttaaccgaaaggttggtggtt

SEQ ID NO: 30051 - DNA, 30 bp, Homo Sapiens
ttcggctgttaaccgaaaggttggtggttc

SEQ ID NO: 30052 - DNA, 16 bp, Homo Sapiens
ttcgggggcgtgggtt

SEQ ID NO: 30053 - DNA, 18 bp, Homo Sapiens
ttcgggggcgtgggttcg

SEQ ID NO: 30054 - DNA, 32 bp, Homo Sapiens
ttcgggggcgtgggttcgaatcccaccgctgc

SEQ ID NO: 30055 - DNA, 17 bp, Homo Sapiens
ttcgggggcgtgggttt

SEQ ID NO: 30056 - DNA, 19 bp, Homo Sapiens
ttcgggtgcgagaggtccc

SEQ ID NO: 30057 - DNA, 20 bp, Homo Sapiens
ttcgggtgcgagaggtcccg

SEQ ID NO: 30058 - DNA, 25 bp, Homo Sapiens
ttcggtgctgaaagcgtcacggccc

SEQ ID NO: 30059 - DNA, 43 bp, Homo Sapiens
ttctaatccagaggttccgggttcgagtcccggcagagatgcc

SEQ ID NO: 30060 - DNA, 44 bp, Homo Sapiens
ttctaatccagaggttccgggttcgagtcccggcagagatgcca

SEQ ID NO: 30061 - DNA, 19 bp, Homo Sapiens
ttctaattcaaaggttccg

SEQ ID NO: 30062 - DNA, 20 bp, Homo Sapiens
ttctaattcaaaggttccgg

SEQ ID NO: 30063 - DNA, 22 bp, Homo Sapiens
ttctaattcaaaggttccgggt

SEQ ID NO: 30064 - DNA, 43 bp, Homo Sapiens
ttctaattcaaaggttccgggttcgagtcccggcggagtcgcc

SEQ ID NO: 30065 - DNA, 44 bp, Homo Sapiens
ttctaattcaaaggttccgggttcgagtcccggcggagtcgcca

SEQ ID NO: 30066 - DNA, 43 bp, Homo Sapiens
ttctaattcaaaggttgtgggttcgaatcccaccagagtcgcc

SEQ ID NO: 30067 - DNA, 26 bp, Homo Sapiens
ttctaggttcgactcctggctggctc

SEQ ID NO: 30068 - DNA, 27 bp, Homo Sapiens
ttctaggttcgactcctggctggctcg

SEQ ID NO: 30069 - DNA, 28 bp, Homo Sapiens
ttctaggttcgactcctggctggctcgc

SEQ ID NO: 30070 - DNA, 29 bp, Homo Sapiens
ttctaggttcgactcctggctggctcgcc

SEQ ID NO: 30071 - DNA, 30 bp, Homo Sapiens
ttctaggttcgactcctggctggctcgcca

SEQ ID NO: 30072 - DNA, 24 bp, Homo Sapiens
ttctcagggatgggttcgattctc

SEQ ID NO: 30073 - DNA, 31 bp, Homo Sapiens
ttctcagggatgggttcgattctcatagtcc

SEQ ID NO: 30074 - DNA, 32 bp, Homo Sapiens
ttctcagggatgggttcgattctcatagtcct

SEQ ID NO: 30075 - DNA, 34 bp, Homo Sapiens
ttctcagggatgggttcgattctcatagtcctag

SEQ ID NO: 30076 - DNA, 35 bp, Homo Sapiens
ttctcagggatgggttcgattctcatagtcctagc

SEQ ID NO: 30077 - DNA, 36 bp, Homo Sapiens
ttctcagggatgggttcgattctcatagtcctagcc

SEQ ID NO: 30078 - DNA, 37 bp, Homo Sapiens
ttctcagggatgggttcgattctcatagtcctagcca

SEQ ID NO: 30079 - DNA, 16 bp, Homo Sapiens
ttctcatagtcctagc

SEQ ID NO: 30080 - DNA, 17 bp, Homo Sapiens
ttctcatagtcctagcc

SEQ ID NO: 30081 - DNA, 18 bp, Homo Sapiens
ttctcatagtcctagcca

SEQ ID NO: 30082 - DNA, 16 bp, Homo Sapiens
ttctcgcctgccacgc

SEQ ID NO: 30083 - DNA, 17 bp, Homo Sapiens
ttctcgcctgccacgcg

SEQ ID NO: 30084 - DNA, 20 bp, Homo Sapiens
ttctcgcctgccacgcggga

SEQ ID NO: 30085 - DNA, 25 bp, Homo Sapiens
ttctcgcctgccacgcgggaggccc

SEQ ID NO: 30086 - DNA, 27 bp, Homo Sapiens
ttctcgcctgccacgcgggaggcccgg

SEQ ID NO: 30087 - DNA, 28 bp, Homo Sapiens
ttctcgcctgccacgcgggaggcccggg

SEQ ID NO: 30088 - DNA, 30 bp, Homo Sapiens
ttctcgcctgccacgcgggaggcccgggtt

SEQ ID NO: 30089 - DNA, 16 bp, Homo Sapiens
ttctcgctggggcctc

SEQ ID NO: 30090 - DNA, 17 bp, Homo Sapiens
ttctcgctggggcctcc

SEQ ID NO: 30091 - DNA, 18 bp, Homo Sapiens
ttctcgctggggcctcca

SEQ ID NO: 30092 - DNA, 20 bp, Homo Sapiens
ttctcggtttgggtccgaga

SEQ ID NO: 30093 - DNA, 19 bp, Homo Sapiens
ttctggtctccaatggagg

SEQ ID NO: 30094 - DNA, 47 bp, Homo Sapiens
ttctggtctccaatggaggcgtgggttcgaatcccacttctgacacc

SEQ ID NO: 30095 - DNA, 16 bp, Homo Sapiens
ttctggtctccggatg

SEQ ID NO: 30096 - DNA, 18 bp, Homo Sapiens
ttctggtctccggatgga

SEQ ID NO: 30097 - DNA, 19 bp, Homo Sapiens
ttctggtctccggatggag

SEQ ID NO: 30098 - DNA, 20 bp, Homo Sapiens
ttctggtctccggatggagg

SEQ ID NO: 30099 - DNA, 22 bp, Homo Sapiens
ttctggtctccggatggaggcg

SEQ ID NO: 30100 - DNA, 44 bp, Homo Sapiens
ttctggtctccggatggaggcgtgggttcgaatcccacttctga

SEQ ID NO: 30101 - DNA, 48 bp, Homo Sapiens
ttctggtctccggatggaggcgtgggttcgaatcccacttctgacacc

SEQ ID NO: 30102 - DNA, 16 bp, Homo Sapiens
ttctgtagtgtagtgg

SEQ ID NO: 30103 - DNA, 21 bp, Homo Sapiens
ttctgtagtgtagtggttatc

SEQ ID NO: 30104 - DNA, 29 bp, Homo Sapiens
ttctgtagtgtagtggttatcacgttcgc

SEQ ID NO: 30105 - DNA, 30 bp, Homo Sapiens
ttctgtagtgtagtggttatcacgttcgcc

SEQ ID NO: 30106 - DNA, 31 bp, Homo Sapiens
ttctgtagtgtagtggttatcacgttcgcct

SEQ ID NO: 30107 - DNA, 32 bp, Homo Sapiens
ttctgtagtgtagtggttatcacgttcgcctc

SEQ ID NO: 30108 - DNA, 33 bp, Homo Sapiens
ttctgtagtgtagtggttatcacgttcgcctca

SEQ ID NO: 30109 - DNA, 34 bp, Homo Sapiens
ttctgtagtgtagtggttatcacgttcgcctcac

SEQ ID NO: 30110 - DNA, 35 bp, Homo Sapiens
ttctgtagtgtagtggttatcacgttcgcctcaca

SEQ ID NO: 30111 - DNA, 36 bp, Homo Sapiens
ttctgtagtgtagtggttatcacgttcgcctcacac

SEQ ID NO: 30112 - DNA, 37 bp, Homo Sapiens
ttctgtagtgtagtggttatcacgttcgcctcacacg

SEQ ID NO: 30113 - DNA, 30 bp, Homo Sapiens
ttcttgcgacccgggttcgattcccgggcg

SEQ ID NO: 30114 - DNA, 31 bp, Homo Sapiens
ttcttgcgacccgggttcgattcccgggcgg

SEQ ID NO: 30115 - DNA, 32 bp, Homo Sapiens
ttcttgcgacccgggttcgattcccgggcggc

SEQ ID NO: 30116 - DNA, 33 bp, Homo Sapiens
ttcttgcgacccgggttcgattcccgggcggcg

SEQ ID NO: 30117 - DNA, 34 bp, Homo Sapiens
ttcttgcgacccgggttcgattcccgggcggcgc

SEQ ID NO: 30118 - DNA, 35 bp, Homo Sapiens
ttcttgcgacccgggttcgattcccgggcggcgca

SEQ ID NO: 30119 - DNA, 36 bp, Homo Sapiens
ttcttgcgacccgggttcgattcccgggcggcgcac

SEQ ID NO: 30120 - DNA, 37 bp, Homo Sapiens
ttcttgcgacccgggttcgattcccgggcggcgcacc

SEQ ID NO: 30121 - DNA, 38 bp, Homo Sapiens
ttcttgcgacccgggttcgattcccgggcggcgcacca

SEQ ID NO: 30122 - DNA, 22 bp, Homo Sapiens
ttgaaaccagctttggggggtt

SEQ ID NO: 30123 - DNA, 23 bp, Homo Sapiens
ttgaaaccagctttggggggttc

SEQ ID NO: 30124 - DNA, 22 bp, Homo Sapiens
ttgaaatacaacgatggttttt

SEQ ID NO: 30125 - DNA, 35 bp, Homo Sapiens
ttgaaatacaacgatggtttttcatatcattggtc

SEQ ID NO: 30126 - DNA, 43 bp, Homo Sapiens
ttgaaatacaacgatggtttttcatatcattggtcgtggttgt

SEQ ID NO: 30127 - DNA, 47 bp, Homo Sapiens
ttgaaatacaacgatggtttttcatatcattggtcgtggttgtagtc

SEQ ID NO: 30128 - DNA, 48 bp, Homo Sapiens
ttgaaatacaacgatggtttttcatatcattggtcgtggttgtagtcc

SEQ ID NO: 30129 - DNA, 18 bp, Homo Sapiens
ttgaaatccaatggggtc

SEQ ID NO: 30130 - DNA, 32 bp, Homo Sapiens
ttgaagccagttgattagggtgcttagctgtt

SEQ ID NO: 30131 - DNA, 19 bp, Homo Sapiens
ttgaatccagcaatccgag

SEQ ID NO: 30132 - DNA, 20 bp, Homo Sapiens
ttgaatccagcaatccgagt

SEQ ID NO: 30133 - DNA, 39 bp, Homo Sapiens
ttgaatccagcaatccgagttcgaatctcggtgggacct

SEQ ID NO: 30134 - DNA, 40 bp, Homo Sapiens
ttgaatccagcaatccgagttcgaatctcggtgggacctc

SEQ ID NO: 30135 - DNA, 41 bp, Homo Sapiens
ttgaatccagcaatccgagttcgaatctcggtgggacctcc

SEQ ID NO: 30136 - DNA, 16 bp, Homo Sapiens
ttgaatccagcgatcc

SEQ ID NO: 30137 - DNA, 17 bp, Homo Sapiens
ttgaatccagcgatccg

SEQ ID NO: 30138 - DNA, 18 bp, Homo Sapiens
ttgaatccagcgatccga

SEQ ID NO: 30139 - DNA, 19 bp, Homo Sapiens
ttgaatccagcgatccgag

SEQ ID NO: 30140 - DNA, 20 bp, Homo Sapiens
ttgaatccagcgatccgagt

SEQ ID NO: 30141 - DNA, 21 bp, Homo Sapiens
ttgaatccagcgatccgagtt

SEQ ID NO: 30142 - DNA, 22 bp, Homo Sapiens
ttgaatccagcgatccgagttc

SEQ ID NO: 30143 - DNA, 23 bp, Homo Sapiens
ttgaatccagcgatccgagttca

SEQ ID NO: 30144 - DNA, 33 bp, Homo Sapiens
ttgaatccagcgatccgagttcaaatctcggtg

SEQ ID NO: 30145 - DNA, 35 bp, Homo Sapiens
ttgaatccagcgatccgagttcaaatctcggtggg

SEQ ID NO: 30146 - DNA, 39 bp, Homo Sapiens
ttgaatccagcgatccgagttcaaatctcggtgggacct

SEQ ID NO: 30147 - DNA, 40 bp, Homo Sapiens
ttgaatccagcgatccgagttcaaatctcggtgggacctc

SEQ ID NO: 30148 - DNA, 41 bp, Homo Sapiens
ttgaatccagcgatccgagttcaaatctcggtgggacctcc

SEQ ID NO: 30149 - DNA, 42 bp, Homo Sapiens
ttgaatccagcgatccgagttcaaatctcggtgggacctcca

SEQ ID NO: 30150 - DNA, 42 bp, Homo Sapiens
ttgaattgcaaattcgaagaagcagcttcaaacctgccgggg

SEQ ID NO: 30151 - DNA, 43 bp, Homo Sapiens
ttgaattgcaaattcgaagaagcagcttcaaacctgccggggc

SEQ ID NO: 30152 - DNA, 44 bp, Homo Sapiens
ttgaattgcaaattcgaagaagcagcttcaaacctgccggggct

SEQ ID NO: 30153 - DNA, 45 bp, Homo Sapiens
ttgaattgcaaattcgaagaagcagcttcaaacctgccggggctt

SEQ ID NO: 30154 - DNA, 46 bp, Homo Sapiens
ttgaattgcaaattcgaagaagcagcttcaaacctgccggggcttc

SEQ ID NO: 30155 - DNA, 47 bp, Homo Sapiens
ttgaattgcaaattcgaagaagcagcttcaaacctgccggggcttcc

SEQ ID NO: 30156 - DNA, 19 bp, Homo Sapiens
ttgacaacattcaaaaaag

SEQ ID NO: 30157 - DNA, 21 bp, Homo Sapiens
ttgacaacattcaaaaaagag

SEQ ID NO: 30158 - DNA, 23 bp, Homo Sapiens
ttgacaacattcaaaaaagagta

SEQ ID NO: 30159 - DNA, 24 bp, Homo Sapiens
ttgacaacattcaaaaaagagtac

SEQ ID NO: 30160 - DNA, 25 bp, Homo Sapiens
ttgacaacattcaaaaaagagtacc

SEQ ID NO: 30161 - DNA, 26 bp, Homo Sapiens
ttgacaacattcaaaaaagagtacca

SEQ ID NO: 30162 - DNA, 24 bp, Homo Sapiens
ttgacccgggttcgattcccggcc

SEQ ID NO: 30163 - DNA, 28 bp, Homo Sapiens
ttgacccgggttcgattcccggccaacg

SEQ ID NO: 30164 - DNA, 31 bp, Homo Sapiens
ttgacccgggttcgattcccggccaacgcac

SEQ ID NO: 30165 - DNA, 32 bp, Homo Sapiens
ttgacccgggttcgattcccggccaacgcacc

SEQ ID NO: 30166 - DNA, 33 bp, Homo Sapiens
ttgacccgggttcgattcccggccaacgcacca

SEQ ID NO: 30167 - DNA, 16 bp, Homo Sapiens
ttgaccgctctgacca

SEQ ID NO: 30168 - DNA, 26 bp, Homo Sapiens
ttgactgcagatcaagaggtccccgg

SEQ ID NO: 30169 - DNA, 27 bp, Homo Sapiens
ttgactgcagatcaagaggtccccggt

SEQ ID NO: 30170 - DNA, 24 bp, Homo Sapiens
ttgactgcagatcaagaggtccct

SEQ ID NO: 30171 - DNA, 27 bp, Homo Sapiens
ttgagggttcgaatcccttcgtggttg

SEQ ID NO: 30172 - DNA, 29 bp, Homo Sapiens
ttgagggttcgaatcccttcgtggttgcc

SEQ ID NO: 30173 - DNA, 27 bp, Homo Sapiens
ttgagggttcgagtcccttcgtggtcg

SEQ ID NO: 30174 - DNA, 28 bp, Homo Sapiens
ttgagggttcgagtcccttcgtggtcgc

SEQ ID NO: 30175 - DNA, 29 bp, Homo Sapiens
ttgagggttcgagtcccttcgtggtcgcc

SEQ ID NO: 30176 - DNA, 30 bp, Homo Sapiens
ttgagggttcgagtcccttcgtggtcgcca

SEQ ID NO: 30177 - DNA, 17 bp, Homo Sapiens
ttgatagagtaaataat

SEQ ID NO: 30178 - DNA, 19 bp, Homo Sapiens
ttgatagagtaaataatag

SEQ ID NO: 30179 - DNA, 20 bp, Homo Sapiens
ttgatagagtaaataatagg

SEQ ID NO: 30180 - DNA, 21 bp, Homo Sapiens
ttgatagagtaaataatagga

SEQ ID NO: 30181 - DNA, 22 bp, Homo Sapiens
ttgatagagtaaataataggag

SEQ ID NO: 30182 - DNA, 23 bp, Homo Sapiens
ttgatagagtaaataataggagc

SEQ ID NO: 30183 - DNA, 24 bp, Homo Sapiens
ttgatagagtaaataataggagct

SEQ ID NO: 30184 - DNA, 25 bp, Homo Sapiens
ttgatagagtaaataataggagctt

SEQ ID NO: 30185 - DNA, 26 bp, Homo Sapiens
ttgatagagtaaataataggagctta

SEQ ID NO: 30186 - DNA, 27 bp, Homo Sapiens
ttgatagagtaaataataggagcttaa

SEQ ID NO: 30187 - DNA, 28 bp, Homo Sapiens
ttgatagagtaaataataggagcttaaa

SEQ ID NO: 30188 - DNA, 29 bp, Homo Sapiens
ttgatagagtaaataataggagcttaaac

SEQ ID NO: 30189 - DNA, 30 bp, Homo Sapiens
ttgatagagtaaataataggagcttaaacc

SEQ ID NO: 30190 - DNA, 31 bp, Homo Sapiens
ttgatagagtaaataataggagcttaaaccc

SEQ ID NO: 30191 - DNA, 32 bp, Homo Sapiens
ttgatagagtaaataataggagcttaaacccc

SEQ ID NO: 30192 - DNA, 33 bp, Homo Sapiens
ttgatagagtaaataataggagcttaaaccccc

SEQ ID NO: 30193 - DNA, 34 bp, Homo Sapiens
ttgatagagtaaataataggagcttaaaccccct

SEQ ID NO: 30194 - DNA, 35 bp, Homo Sapiens
ttgatagagtaaataataggagcttaaaccccctt

SEQ ID NO: 30195 - DNA, 36 bp, Homo Sapiens
ttgatagagtaaataataggagcttaaaccccctta

SEQ ID NO: 30196 - DNA, 37 bp, Homo Sapiens
ttgatagagtaaataataggagcttaaacccccttat

SEQ ID NO: 30197 - DNA, 38 bp, Homo Sapiens
ttgatagagtaaataataggagcttaaacccccttatt

SEQ ID NO: 30198 - DNA, 40 bp, Homo Sapiens
ttgatagagtaaataataggagcttaaacccccttatttc

SEQ ID NO: 30199 - DNA, 44 bp, Homo Sapiens
ttgatagagtaaataataggagcttaaacccccttatttctacc

SEQ ID NO: 30200 - DNA, 16 bp, Homo Sapiens
ttgatgcagagtgggg

SEQ ID NO: 30201 - DNA, 20 bp, Homo Sapiens
ttgatgcagagtggggtttt

SEQ ID NO: 30202 - DNA, 21 bp, Homo Sapiens
ttgatgcagagtggggttttg

SEQ ID NO: 30203 - DNA, 26 bp, Homo Sapiens
ttgatgcagagtggggttttgcagtc

SEQ ID NO: 30204 - DNA, 27 bp, Homo Sapiens
ttgatgcagagtggggttttgcagtcc

SEQ ID NO: 30205 - DNA, 28 bp, Homo Sapiens
ttgatgcagagtggggttttgcagtcct

SEQ ID NO: 30206 - DNA, 29 bp, Homo Sapiens
ttgatgcagagtggggttttgcagtcctt

SEQ ID NO: 30207 - DNA, 30 bp, Homo Sapiens
ttgatgcagagtggggttttgcagtcctta

SEQ ID NO: 30208 - DNA, 31 bp, Homo Sapiens
ttgatgcagagtggggttttgcagtccttac

SEQ ID NO: 30209 - DNA, 32 bp, Homo Sapiens
ttgatgcagagtggggttttgcagtccttacc

SEQ ID NO: 30210 - DNA, 33 bp, Homo Sapiens
ttgatgcagagtggggttttgcagtccttacca

SEQ ID NO: 30211 - DNA, 16 bp, Homo Sapiens
ttgattagggtgctta

SEQ ID NO: 30212 - DNA, 17 bp, Homo Sapiens
ttgattagggtgcttag

SEQ ID NO: 30213 - DNA, 18 bp, Homo Sapiens
ttgattagggtgcttagc

SEQ ID NO: 30214 - DNA, 19 bp, Homo Sapiens
ttgattagggtgcttagct

SEQ ID NO: 30215 - DNA, 20 bp, Homo Sapiens
ttgattagggtgcttagctg

SEQ ID NO: 30216 - DNA, 21 bp, Homo Sapiens
ttgattagggtgcttagctgt

SEQ ID NO: 30217 - DNA, 22 bp, Homo Sapiens
ttgattagggtgcttagctgtt

SEQ ID NO: 30218 - DNA, 23 bp, Homo Sapiens
ttgattagggtgcttagctgtta

SEQ ID NO: 30219 - DNA, 24 bp, Homo Sapiens
ttgattagggtgcttagctgttaa

SEQ ID NO: 30220 - DNA, 25 bp, Homo Sapiens
ttgattagggtgcttagctgttaac

SEQ ID NO: 30221 - DNA, 26 bp, Homo Sapiens
ttgattagggtgcttagctgttaact

SEQ ID NO: 30222 - DNA, 27 bp, Homo Sapiens
ttgattagggtgcttagctgttaacta

SEQ ID NO: 30223 - DNA, 28 bp, Homo Sapiens
ttgattagggtgcttagctgttaactaa

SEQ ID NO: 30224 - DNA, 29 bp, Homo Sapiens
ttgattagggtgcttagctgttaactaag

SEQ ID NO: 30225 - DNA, 40 bp, Homo Sapiens
ttgattagggtgcttagctgttaactaagtgtttgtgggt

SEQ ID NO: 30226 - DNA, 41 bp, Homo Sapiens
ttgattagggtgcttagctgttaactaagtgtttgtgggtt

SEQ ID NO: 30227 - DNA, 42 bp, Homo Sapiens
ttgattagggtgcttagctgttaactaagtgtttgtgggttt

SEQ ID NO: 30228 - DNA, 17 bp, Homo Sapiens
ttgcaaattcgaagaag

SEQ ID NO: 30229 - DNA, 18 bp, Homo Sapiens
ttgcaaattcgaagaagc

SEQ ID NO: 30230 - DNA, 22 bp, Homo Sapiens
ttgcaaattcgaagaagcagct

SEQ ID NO: 30231 - DNA, 24 bp, Homo Sapiens
ttgcaaattcgaagaagcagcttc

SEQ ID NO: 30232 - DNA, 31 bp, Homo Sapiens
ttgcaaattcgaagaagcagcttcaaacctg

SEQ ID NO: 30233 - DNA, 37 bp, Homo Sapiens
ttgcaaattcgaagaagcagcttcaaacctgccgggg

SEQ ID NO: 30234 - DNA, 38 bp, Homo Sapiens
ttgcaaattcgaagaagcagcttcaaacctgccggggc

SEQ ID NO: 30235 - DNA, 39 bp, Homo Sapiens
ttgcaaattcgaagaagcagcttcaaacctgccggggct

SEQ ID NO: 30236 - DNA, 40 bp, Homo Sapiens
ttgcaaattcgaagaagcagcttcaaacctgccggggctt

SEQ ID NO: 30237 - DNA, 41 bp, Homo Sapiens
ttgcaaattcgaagaagcagcttcaaacctgccggggcttc

SEQ ID NO: 30238 - DNA, 42 bp, Homo Sapiens
ttgcaaattcgaagaagcagcttcaaacctgccggggcttcc

SEQ ID NO: 30239 - DNA, 43 bp, Homo Sapiens
ttgcaaattcgaagaagcagcttcaaacctgccggggcttcca

SEQ ID NO: 30240 - DNA, 19 bp, Homo Sapiens
ttgcaatacttaatttctg

SEQ ID NO: 30241 - DNA, 20 bp, Homo Sapiens
ttgcaatacttaatttctgc

SEQ ID NO: 30242 - DNA, 21 bp, Homo Sapiens
ttgcaatacttaatttctgcc

SEQ ID NO: 30243 - DNA, 22 bp, Homo Sapiens
ttgcaatacttaatttctgcca

SEQ ID NO: 30244 - DNA, 22 bp, Homo Sapiens
ttgcacgcgtgggttcgaatcc

SEQ ID NO: 30245 - DNA, 23 bp, Homo Sapiens
ttgcacgcgtgggttcgaatccc

SEQ ID NO: 30246 - DNA, 26 bp, Homo Sapiens
ttgcacgcgtgggttcgaatcccatc

SEQ ID NO: 30247 - DNA, 28 bp, Homo Sapiens
ttgcacgcgtgggttcgaatcccatcct

SEQ ID NO: 30248 - DNA, 30 bp, Homo Sapiens
ttgcacgcgtgggttcgaatcccatcctcg

SEQ ID NO: 30249 - DNA, 34 bp, Homo Sapiens
ttgcacgcgtgggttcgaatcccatcctcgtcgc

SEQ ID NO: 30250 - DNA, 35 bp, Homo Sapiens
ttgcacgcgtgggttcgaatcccatcctcgtcgcc

SEQ ID NO: 30251 - DNA, 36 bp, Homo Sapiens
ttgcacgcgtgggttcgaatcccatcctcgtcgcca

SEQ ID NO: 30252 - DNA, 19 bp, Homo Sapiens
ttgcacgtatgaggccccg

SEQ ID NO: 30253 - DNA, 38 bp, Homo Sapiens
ttgcacgtatgaggccccgggttcaatccccggcatct

SEQ ID NO: 30254 - DNA, 18 bp, Homo Sapiens
ttgcaggttcgagtcctg

SEQ ID NO: 30255 - DNA, 26 bp, Homo Sapiens
ttgcaggttcgagtcctgccgcggtc

SEQ ID NO: 30256 - DNA, 28 bp, Homo Sapiens
ttgcaggttcgagtcctgccgcggtcgc

SEQ ID NO: 30257 - DNA, 29 bp, Homo Sapiens
ttgcaggttcgagtcctgccgcggtcgcc

SEQ ID NO: 30258 - DNA, 30 bp, Homo Sapiens
ttgcaggttcgagtcctgccgcggtcgcca

SEQ ID NO: 30259 - DNA, 16 bp, Homo Sapiens
ttgcgacccgggttcg

SEQ ID NO: 30260 - DNA, 17 bp, Homo Sapiens
ttgcgacccgggttcga

SEQ ID NO: 30261 - DNA, 20 bp, Homo Sapiens
ttgcgacccgggttcgattc

SEQ ID NO: 30262 - DNA, 21 bp, Homo Sapiens
ttgcgacccgggttcgattcc

SEQ ID NO: 30263 - DNA, 23 bp, Homo Sapiens
ttgcgacccgggttcgattcccg

SEQ ID NO: 30264 - DNA, 24 bp, Homo Sapiens
ttgcgacccgggttcgattcccgg

SEQ ID NO: 30265 - DNA, 27 bp, Homo Sapiens
ttgcgacccgggttcgattcccgggcg

SEQ ID NO: 30266 - DNA, 28 bp, Homo Sapiens
ttgcgacccgggttcgattcccgggcgg

SEQ ID NO: 30267 - DNA, 29 bp, Homo Sapiens
ttgcgacccgggttcgattcccgggcggc

SEQ ID NO: 30268 - DNA, 30 bp, Homo Sapiens
ttgcgacccgggttcgattcccgggcggcg

SEQ ID NO: 30269 - DNA, 32 bp, Homo Sapiens
ttgcgacccgggttcgattcccgggcggcgca

SEQ ID NO: 30270 - DNA, 33 bp, Homo Sapiens
ttgcgacccgggttcgattcccgggcggcgcac

SEQ ID NO: 30271 - DNA, 34 bp, Homo Sapiens
ttgcgacccgggttcgattcccgggcggcgcacc

SEQ ID NO: 30272 - DNA, 35 bp, Homo Sapiens
ttgcgacccgggttcgattcccgggcggcgcacca

SEQ ID NO: 30273 - DNA, 25 bp, Homo Sapiens
ttgcgtgttcaaatcacgtcggggt

SEQ ID NO: 30274 - DNA, 26 bp, Homo Sapiens
ttgcgtgttcaaatcacgtcggggtc

SEQ ID NO: 30275 - DNA, 27 bp, Homo Sapiens
ttgcgtgttcaaatcacgtcggggtca

SEQ ID NO: 30276 - DNA, 28 bp, Homo Sapiens
ttgcgtgttcaaatcacgtcggggtcac

SEQ ID NO: 30277 - DNA, 29 bp, Homo Sapiens
ttgcgtgttcaaatcacgtcggggtcacc

SEQ ID NO: 30278 - DNA, 30 bp, Homo Sapiens
ttgcgtgttcaaatcacgtcggggtcacca

SEQ ID NO: 30279 - DNA, 24 bp, Homo Sapiens
ttgcgtgttcaagtcacgtcgggg

SEQ ID NO: 30280 - DNA, 25 bp, Homo Sapiens
ttgcgtgttcaagtcacgtcggggt

SEQ ID NO: 30281 - DNA, 26 bp, Homo Sapiens
ttgcgtgttcaagtcacgtcggggtc

SEQ ID NO: 30282 - DNA, 27 bp, Homo Sapiens
ttgcgtgttcaagtcacgtcggggtca

SEQ ID NO: 30283 - DNA, 28 bp, Homo Sapiens
ttgcgtgttcaagtcacgtcggggtcac

SEQ ID NO: 30284 - DNA, 29 bp, Homo Sapiens
ttgcgtgttcaagtcacgtcggggtcacc

SEQ ID NO: 30285 - DNA, 30 bp, Homo Sapiens
ttgcgtgttcaagtcacgtcggggtcacca

SEQ ID NO: 30286 - DNA, 16 bp, Homo Sapiens
ttgcgttcagttgatg

SEQ ID NO: 30287 - DNA, 17 bp, Homo Sapiens
ttgcgttcagttgatgc

SEQ ID NO: 30288 - DNA, 28 bp, Homo Sapiens
ttgcgttcagttgatgcagagtggggtt

SEQ ID NO: 30289 - DNA, 29 bp, Homo Sapiens
ttgcgttcagttgatgcagagtggggttt

SEQ ID NO: 30290 - DNA, 36 bp, Homo Sapiens
ttgcgttcagttgatgcagagtggggttttgcagtc

SEQ ID NO: 30291 - DNA, 38 bp, Homo Sapiens
ttgcgttcagttgatgcagagtggggttttgcagtcct

SEQ ID NO: 30292 - DNA, 25 bp, Homo Sapiens
ttggactgtaaatctaaagacaggg

SEQ ID NO: 30293 - DNA, 28 bp, Homo Sapiens
ttggactgtaaatctaaagacaggggtt

SEQ ID NO: 30294 - DNA, 31 bp, Homo Sapiens
ttggactgtaaatctaaagacaggggttagg

SEQ ID NO: 30295 - DNA, 34 bp, Homo Sapiens
ttggactgtaaatctaaagacaggggttaggcct

SEQ ID NO: 30296 - DNA, 35 bp, Homo Sapiens
ttggactgtaaatctaaagacaggggttaggcctc

SEQ ID NO: 30297 - DNA, 36 bp, Homo Sapiens
ttggactgtaaatctaaagacaggggttaggcctct

SEQ ID NO: 30298 - DNA, 37 bp, Homo Sapiens
ttggactgtaaatctaaagacaggggttaggcctctt

SEQ ID NO: 30299 - DNA, 38 bp, Homo Sapiens
ttggactgtaaatctaaagacaggggttaggcctcttt

SEQ ID NO: 30300 - DNA, 40 bp, Homo Sapiens
ttggactgtaaatctaaagacaggggttaggcctcttttt

SEQ ID NO: 30301 - DNA, 43 bp, Homo Sapiens
ttggactgtaaatctaaagacaggggttaggcctctttttacc

SEQ ID NO: 30302 - DNA, 46 bp, Homo Sapiens
ttggactgtaaatctaaagacaggggttaggcctctttttaccacc

SEQ ID NO: 30303 - DNA, 47 bp, Homo Sapiens
ttggactgtaaatctaaagacaggggttaggcctctttttaccacca

SEQ ID NO: 30304 - DNA, 25 bp, Homo Sapiens
ttggacttaagatccaatggacata

SEQ ID NO: 30305 - DNA, 29 bp, Homo Sapiens
ttggattctcagggatgggttcgattctc

SEQ ID NO: 30306 - DNA, 40 bp, Homo Sapiens
ttggattctcagggatgggttcgattctcatagtcctagc

SEQ ID NO: 30307 - DNA, 41 bp, Homo Sapiens
ttggattctcagggatgggttcgattctcatagtcctagcc

SEQ ID NO: 30308 - DNA, 42 bp, Homo Sapiens
ttggattctcagggatgggttcgattctcatagtcctagcca

SEQ ID NO: 30309 - DNA, 28 bp, Homo Sapiens
ttggcctcctaagccagggattgtgggt

SEQ ID NO: 30310 - DNA, 16 bp, Homo Sapiens
ttggggggttcgattc

SEQ ID NO: 30311 - DNA, 17 bp, Homo Sapiens
ttggggggttcgattcc

SEQ ID NO: 30312 - DNA, 18 bp, Homo Sapiens
ttggggggttcgattcct

SEQ ID NO: 30313 - DNA, 20 bp, Homo Sapiens
ttggggggttcgattccttc

SEQ ID NO: 30314 - DNA, 21 bp, Homo Sapiens
ttggggggttcgattccttcc

SEQ ID NO: 30315 - DNA, 30 bp, Homo Sapiens
ttggggggttcgattccttccttttttgcc

SEQ ID NO: 30316 - DNA, 17 bp, Homo Sapiens
ttggggtttccccgcgc

SEQ ID NO: 30317 - DNA, 21 bp, Homo Sapiens
ttggggtttccccgcgcaggt

SEQ ID NO: 30318 - DNA, 22 bp, Homo Sapiens
ttggggtttccccgcgcaggtt

SEQ ID NO: 30319 - DNA, 23 bp, Homo Sapiens
ttggggtttccccgcgcaggttc

SEQ ID NO: 30320 - DNA, 24 bp, Homo Sapiens
ttggggtttccccgcgcaggttcg

SEQ ID NO: 30321 - DNA, 20 bp, Homo Sapiens
ttgggtccgagaggtcccgg

SEQ ID NO: 30322 - DNA, 16 bp, Homo Sapiens
ttgggtgcgagaggtc

SEQ ID NO: 30323 - DNA, 17 bp, Homo Sapiens
ttgggtgcgagaggtcc

SEQ ID NO: 30324 - DNA, 18 bp, Homo Sapiens
ttgggtgcgagaggtccc

SEQ ID NO: 30325 - DNA, 19 bp, Homo Sapiens
ttgggtgcgagaggtcccg

SEQ ID NO: 30326 - DNA, 20 bp, Homo Sapiens
ttgggtgcgagaggtcccgg

SEQ ID NO: 30327 - DNA, 21 bp, Homo Sapiens
ttgggtgcgagaggtcccggg

SEQ ID NO: 30328 - DNA, 22 bp, Homo Sapiens
ttgggtgcgagaggtcccgggt

SEQ ID NO: 30329 - DNA, 24 bp, Homo Sapiens
ttgggtgcgagaggtcccgggttc

SEQ ID NO: 30330 - DNA, 38 bp, Homo Sapiens
ttgggtgcgagaggtcccgggttcaaatcccggacgag

SEQ ID NO: 30331 - DNA, 16 bp, Homo Sapiens
ttgggtgctaatggtg

SEQ ID NO: 30332 - DNA, 17 bp, Homo Sapiens
ttgggtgctaatggtgg

SEQ ID NO: 30333 - DNA, 19 bp, Homo Sapiens
ttgggtgctaatggtggag

SEQ ID NO: 30334 - DNA, 20 bp, Homo Sapiens
ttgggtgctaatggtggagt

SEQ ID NO: 30335 - DNA, 21 bp, Homo Sapiens
ttgggtgctaatggtggagtt

SEQ ID NO: 30336 - DNA, 22 bp, Homo Sapiens
ttgggtgctaatggtggagtta

SEQ ID NO: 30337 - DNA, 23 bp, Homo Sapiens
ttgggtgctaatggtggagttaa

SEQ ID NO: 30338 - DNA, 24 bp, Homo Sapiens
ttgggtgctaatggtggagttaaa

SEQ ID NO: 30339 - DNA, 25 bp, Homo Sapiens
ttgggtgctaatggtggagttaaag

SEQ ID NO: 30340 - DNA, 26 bp, Homo Sapiens
ttgggtgctaatggtggagttaaaga

SEQ ID NO: 30341 - DNA, 27 bp, Homo Sapiens
ttgggtgctaatggtggagttaaagac

SEQ ID NO: 30342 - DNA, 28 bp, Homo Sapiens
ttgggtgctaatggtggagttaaagact

SEQ ID NO: 30343 - DNA, 29 bp, Homo Sapiens
ttgggtgctaatggtggagttaaagactt

SEQ ID NO: 30344 - DNA, 30 bp, Homo Sapiens
ttgggtgctaatggtggagttaaagacttt

SEQ ID NO: 30345 - DNA, 31 bp, Homo Sapiens
ttgggtgctaatggtggagttaaagactttt

SEQ ID NO: 30346 - DNA, 32 bp, Homo Sapiens
ttgggtgctaatggtggagttaaagacttttt

SEQ ID NO: 30347 - DNA, 33 bp, Homo Sapiens
ttgggtgctaatggtggagttaaagactttttc

SEQ ID NO: 30348 - DNA, 34 bp, Homo Sapiens
ttgggtgctaatggtggagttaaagactttttct

SEQ ID NO: 30349 - DNA, 35 bp, Homo Sapiens
ttgggtgctaatggtggagttaaagactttttctc

SEQ ID NO: 30350 - DNA, 36 bp, Homo Sapiens
ttgggtgctaatggtggagttaaagactttttctct

SEQ ID NO: 30351 - DNA, 37 bp, Homo Sapiens
ttgggtgctaatggtggagttaaagactttttctctg

SEQ ID NO: 30352 - DNA, 38 bp, Homo Sapiens
ttgggtgctaatggtggagttaaagactttttctctga

SEQ ID NO: 30353 - DNA, 39 bp, Homo Sapiens
ttgggtgctaatggtggagttaaagactttttctctgac

SEQ ID NO: 30354 - DNA, 40 bp, Homo Sapiens
ttgggtgctaatggtggagttaaagactttttctctgacc

SEQ ID NO: 30355 - DNA, 41 bp, Homo Sapiens
ttgggtgctaatggtggagttaaagactttttctctgacca

SEQ ID NO: 30356 - DNA, 17 bp, Homo Sapiens
ttggtagagcatcagac

SEQ ID NO: 30357 - DNA, 18 bp, Homo Sapiens
ttggtagagcatcagact

SEQ ID NO: 30358 - DNA, 26 bp, Homo Sapiens
ttggtagagcatgggactcttaatcc

SEQ ID NO: 30359 - DNA, 16 bp, Homo Sapiens
ttggtagagcggagga

SEQ ID NO: 30360 - DNA, 17 bp, Homo Sapiens
ttggtagagcggaggac

SEQ ID NO: 30361 - DNA, 20 bp, Homo Sapiens
ttggtagagcggaggactgt

SEQ ID NO: 30362 - DNA, 38 bp, Homo Sapiens
ttggtatatagtttaaacaaaacgaatgatttcgactc

SEQ ID NO: 30363 - DNA, 16 bp, Homo Sapiens
ttggtcgtggttgtag

SEQ ID NO: 30364 - DNA, 17 bp, Homo Sapiens
ttggtcgtggttgtagt

SEQ ID NO: 30365 - DNA, 18 bp, Homo Sapiens
ttggtcgtggttgtagtc

SEQ ID NO: 30366 - DNA, 19 bp, Homo Sapiens
ttggtcgtggttgtagtcc

SEQ ID NO: 30367 - DNA, 20 bp, Homo Sapiens
ttggtcgtggttgtagtccg

SEQ ID NO: 30368 - DNA, 21 bp, Homo Sapiens
ttggtcgtggttgtagtccgt

SEQ ID NO: 30369 - DNA, 22 bp, Homo Sapiens
ttggtcgtggttgtagtccgtg

SEQ ID NO: 30370 - DNA, 23 bp, Homo Sapiens
ttggtcgtggttgtagtccgtgc

SEQ ID NO: 30371 - DNA, 24 bp, Homo Sapiens
ttggtcgtggttgtagtccgtgcg

SEQ ID NO: 30372 - DNA, 25 bp, Homo Sapiens
ttggtcgtggttgtagtccgtgcga

SEQ ID NO: 30373 - DNA, 26 bp, Homo Sapiens
ttggtcgtggttgtagtccgtgcgag

SEQ ID NO: 30374 - DNA, 27 bp, Homo Sapiens
ttggtcgtggttgtagtccgtgcgaga

SEQ ID NO: 30375 - DNA, 28 bp, Homo Sapiens
ttggtcgtggttgtagtccgtgcgagaa

SEQ ID NO: 30376 - DNA, 29 bp, Homo Sapiens
ttggtcgtggttgtagtccgtgcgagaat

SEQ ID NO: 30377 - DNA, 30 bp, Homo Sapiens
ttggtcgtggttgtagtccgtgcgagaata

SEQ ID NO: 30378 - DNA, 31 bp, Homo Sapiens
ttggtcgtggttgtagtccgtgcgagaatac

SEQ ID NO: 30379 - DNA, 32 bp, Homo Sapiens
ttggtcgtggttgtagtccgtgcgagaatacc

SEQ ID NO: 30380 - DNA, 33 bp, Homo Sapiens
ttggtcgtggttgtagtccgtgcgagaatacca

SEQ ID NO: 30381 - DNA, 21 bp, Homo Sapiens
ttggtctaggggtatgattct

SEQ ID NO: 30382 - DNA, 22 bp, Homo Sapiens
ttggtctaggggtatgattctc

SEQ ID NO: 30383 - DNA, 23 bp, Homo Sapiens
ttggtctaggggtatgattctcg

SEQ ID NO: 30384 - DNA, 24 bp, Homo Sapiens
ttggtctaggggtatgattctcgc

SEQ ID NO: 30385 - DNA, 25 bp, Homo Sapiens
ttggtctaggggtatgattctcgct

SEQ ID NO: 30386 - DNA, 26 bp, Homo Sapiens
ttggtctaggggtatgattctcgctt

SEQ ID NO: 30387 - DNA, 27 bp, Homo Sapiens
ttggtctaggggtatgattctcgcttc

SEQ ID NO: 30388 - DNA, 29 bp, Homo Sapiens
ttggtctaggggtatgattctcgcttcgg

SEQ ID NO: 30389 - DNA, 28 bp, Homo Sapiens
ttggtctaggggtatgattctcgctttg

SEQ ID NO: 30390 - DNA, 29 bp, Homo Sapiens
ttggtctaggggtatgattctcgctttgg

SEQ ID NO: 30391 - DNA, 26 bp, Homo Sapiens
ttggtctaggggtatgattctcggtt

SEQ ID NO: 30392 - DNA, 28 bp, Homo Sapiens
ttggtctaggggtatgattctcggtttg

SEQ ID NO: 30393 - DNA, 29 bp, Homo Sapiens
ttggtctaggggtatgattctcggtttgg

SEQ ID NO: 30394 - DNA, 23 bp, Homo Sapiens
ttggtctagtggtatgattctcg

SEQ ID NO: 30395 - DNA, 29 bp, Homo Sapiens
ttggtctagtggtatgattctcgctttgg

SEQ ID NO: 30396 - DNA, 35 bp, Homo Sapiens
ttggtcttaggccccaaaaattttggtgcaactcc

SEQ ID NO: 30397 - DNA, 48 bp, Homo Sapiens
ttggtcttaggccccaaaaattttggtgcaactccaaataaaagtacc

SEQ ID NO: 30398 - DNA, 16 bp, Homo Sapiens
ttggtgcaactccaaa

SEQ ID NO: 30399 - DNA, 17 bp, Homo Sapiens
ttggtgcaactccaaat

SEQ ID NO: 30400 - DNA, 18 bp, Homo Sapiens
ttggtgcaactccaaata

SEQ ID NO: 30401 - DNA, 20 bp, Homo Sapiens
ttggtgcaactccaaataaa

SEQ ID NO: 30402 - DNA, 24 bp, Homo Sapiens
ttggtgcaactccaaataaaagta

SEQ ID NO: 30403 - DNA, 25 bp, Homo Sapiens
ttggtgcaactccaaataaaagtac

SEQ ID NO: 30404 - DNA, 26 bp, Homo Sapiens
ttggtgcaactccaaataaaagtacc

SEQ ID NO: 30405 - DNA, 27 bp, Homo Sapiens
ttggtgcaactccaaataaaagtacca

SEQ ID NO: 30406 - DNA, 16 bp, Homo Sapiens
ttggtggtatagtggt

SEQ ID NO: 30407 - DNA, 19 bp, Homo Sapiens
ttggtggtatagtggtaag

SEQ ID NO: 30408 - DNA, 25 bp, Homo Sapiens
ttggtggtatagtggtaagcatagc

SEQ ID NO: 30409 - DNA, 26 bp, Homo Sapiens
ttggtggtatagtggtaagcatagct

SEQ ID NO: 30410 - DNA, 27 bp, Homo Sapiens
ttggtggtatagtggtaagcatagctg

SEQ ID NO: 30411 - DNA, 28 bp, Homo Sapiens
ttggtggtatagtggtaagcatagctgc

SEQ ID NO: 30412 - DNA, 29 bp, Homo Sapiens
ttggtggtatagtggtaagcatagctgcc

SEQ ID NO: 30413 - DNA, 33 bp, Homo Sapiens
ttggtggtatagtggtaagcatagctgccttcc

SEQ ID NO: 30414 - DNA, 19 bp, Homo Sapiens
ttggtggtatagtggtgag

SEQ ID NO: 30415 - DNA, 20 bp, Homo Sapiens
ttggtggtatagtggtgagc

SEQ ID NO: 30416 - DNA, 21 bp, Homo Sapiens
ttggtggtatagtggtgagca

SEQ ID NO: 30417 - DNA, 22 bp, Homo Sapiens
ttggtggtatagtggtgagcat

SEQ ID NO: 30418 - DNA, 25 bp, Homo Sapiens
ttggtggtatagtggtgagcatagc

SEQ ID NO: 30419 - DNA, 26 bp, Homo Sapiens
ttggtggtatagtggtgagcatagct

SEQ ID NO: 30420 - DNA, 27 bp, Homo Sapiens
ttggtggtatagtggtgagcatagctg

SEQ ID NO: 30421 - DNA, 28 bp, Homo Sapiens
ttggtggtatagtggtgagcatagctgc

SEQ ID NO: 30422 - DNA, 29 bp, Homo Sapiens
ttggtggtatagtggtgagcatagctgcc

SEQ ID NO: 30423 - DNA, 30 bp, Homo Sapiens
ttggtggtatagtggtgagcatagctgcct

SEQ ID NO: 30424 - DNA, 32 bp, Homo Sapiens
ttggtggtatagtggtgagcatagctgccttc

SEQ ID NO: 30425 - DNA, 33 bp, Homo Sapiens
ttggtggtatagtggtgagcatagctgccttcc

SEQ ID NO: 30426 - DNA, 48 bp, Homo Sapiens
ttggtggtatagtggtgagcatagctgccttccaagcagttgacccgg

SEQ ID NO: 30427 - DNA, 25 bp, Homo Sapiens
ttggtggtatagtggttagcatagc

SEQ ID NO: 30428 - DNA, 26 bp, Homo Sapiens
ttggtggtatagtggttagcatagct

SEQ ID NO: 30429 - DNA, 27 bp, Homo Sapiens
ttggtggtatagtggttagcatagctg

SEQ ID NO: 30430 - DNA, 28 bp, Homo Sapiens
ttggtggtatagtggttagcatagctgc

SEQ ID NO: 30431 - DNA, 29 bp, Homo Sapiens
ttggtggtatagtggttagcatagctgcc

SEQ ID NO: 30432 - DNA, 30 bp, Homo Sapiens
ttggtggtatagtggttagcatagctgcct

SEQ ID NO: 30433 - DNA, 33 bp, Homo Sapiens
ttggtggtatagtggttagcatagctgccttcc

SEQ ID NO: 30434 - DNA, 22 bp, Homo Sapiens
ttggtggtgcagtggtagaatt

SEQ ID NO: 30435 - DNA, 25 bp, Homo Sapiens
ttggtggtgcagtggtagaattctc

SEQ ID NO: 30436 - DNA, 28 bp, Homo Sapiens
ttggtggtgcagtggtagaattctcgcc

SEQ ID NO: 30437 - DNA, 29 bp, Homo Sapiens
ttggtggtgcagtggtagaattctcgcct

SEQ ID NO: 30438 - DNA, 25 bp, Homo Sapiens
ttggtggttcaatggtagaattctc

SEQ ID NO: 30439 - DNA, 29 bp, Homo Sapiens
ttggtggttcaatggtagaattctcgcct

SEQ ID NO: 30440 - DNA, 16 bp, Homo Sapiens
ttggtggttcagtggt

SEQ ID NO: 30441 - DNA, 17 bp, Homo Sapiens
ttggtggttcagtggta

SEQ ID NO: 30442 - DNA, 18 bp, Homo Sapiens
ttggtggttcagtggtag

SEQ ID NO: 30443 - DNA, 19 bp, Homo Sapiens
ttggtggttcagtggtaga

SEQ ID NO: 30444 - DNA, 20 bp, Homo Sapiens
ttggtggttcagtggtagaa

SEQ ID NO: 30445 - DNA, 21 bp, Homo Sapiens
ttggtggttcagtggtagaat

SEQ ID NO: 30446 - DNA, 22 bp, Homo Sapiens
ttggtggttcagtggtagaatt

SEQ ID NO: 30447 - DNA, 23 bp, Homo Sapiens
ttggtggttcagtggtagaattc

SEQ ID NO: 30448 - DNA, 24 bp, Homo Sapiens
ttggtggttcagtggtagaattct

SEQ ID NO: 30449 - DNA, 25 bp, Homo Sapiens
ttggtggttcagtggtagaattctc

SEQ ID NO: 30450 - DNA, 26 bp, Homo Sapiens
ttggtggttcagtggtagaattctcg

SEQ ID NO: 30451 - DNA, 27 bp, Homo Sapiens
ttggtggttcagtggtagaattctcgc

SEQ ID NO: 30452 - DNA, 28 bp, Homo Sapiens
ttggtggttcagtggtagaattctcgcc

SEQ ID NO: 30453 - DNA, 29 bp, Homo Sapiens
ttggtggttcagtggtagaattctcgcct

SEQ ID NO: 30454 - DNA, 30 bp, Homo Sapiens
ttggtggttcagtggtagaattctcgcctc

SEQ ID NO: 30455 - DNA, 31 bp, Homo Sapiens
ttggtggttcagtggtagaattctcgcctcc

SEQ ID NO: 30456 - DNA, 32 bp, Homo Sapiens
ttggtggttcagtggtagaattctcgcctccc

SEQ ID NO: 30457 - DNA, 33 bp, Homo Sapiens
ttggtggttcagtggtagaattctcgcctccca

SEQ ID NO: 30458 - DNA, 34 bp, Homo Sapiens
ttggtggttcagtggtagaattctcgcctcccac

SEQ ID NO: 30459 - DNA, 30 bp, Homo Sapiens
ttggtggttcagtggtagaattctcgcctg

SEQ ID NO: 30460 - DNA, 31 bp, Homo Sapiens
ttggtggttcagtggtagaattctcgcctgc

SEQ ID NO: 30461 - DNA, 32 bp, Homo Sapiens
ttggtggttcagtggtagaattctcgcctgcc

SEQ ID NO: 30462 - DNA, 33 bp, Homo Sapiens
ttggtggttcagtggtagaattctcgcctgcca

SEQ ID NO: 30463 - DNA, 34 bp, Homo Sapiens
ttggtggttcagtggtagaattctcgcctgccac

SEQ ID NO: 30464 - DNA, 35 bp, Homo Sapiens
ttggtggttcagtggtagaattctcgcctgccacg

SEQ ID NO: 30465 - DNA, 36 bp, Homo Sapiens
ttggtggttcagtggtagaattctcgcctgccacgc

SEQ ID NO: 30466 - DNA, 37 bp, Homo Sapiens
ttggtggttcagtggtagaattctcgcctgccacgcg

SEQ ID NO: 30467 - DNA, 38 bp, Homo Sapiens
ttggtggttcagtggtagaattctcgcctgccacgcgg

SEQ ID NO: 30468 - DNA, 39 bp, Homo Sapiens
ttggtggttcagtggtagaattctcgcctgccacgcggg

SEQ ID NO: 30469 - DNA, 40 bp, Homo Sapiens
ttggtggttcagtggtagaattctcgcctgccacgcggga

SEQ ID NO: 30470 - DNA, 41 bp, Homo Sapiens
ttggtggttcagtggtagaattctcgcctgccacgcgggag

SEQ ID NO: 30471 - DNA, 42 bp, Homo Sapiens
ttggtggttcagtggtagaattctcgcctgccacgcgggagg

SEQ ID NO: 30472 - DNA, 43 bp, Homo Sapiens
ttggtggttcagtggtagaattctcgcctgccacgcgggaggc

SEQ ID NO: 30473 - DNA, 44 bp, Homo Sapiens
ttggtggttcagtggtagaattctcgcctgccacgcgggaggcc

SEQ ID NO: 30474 - DNA, 45 bp, Homo Sapiens
ttggtggttcagtggtagaattctcgcctgccacgcgggaggccc

SEQ ID NO: 30475 - DNA, 46 bp, Homo Sapiens
ttggtggttcagtggtagaattctcgcctgccacgcgggaggcccg

SEQ ID NO: 30476 - DNA, 47 bp, Homo Sapiens
ttggtggttcagtggtagaattctcgcctgccacgcgggaggcccgg

SEQ ID NO: 30477 - DNA, 48 bp, Homo Sapiens
ttggtggttcagtggtagaattctcgcctgccacgcgggaggcccggg

SEQ ID NO: 30478 - DNA, 27 bp, Homo Sapiens
ttggtggttcgaacccacccagaggcg

SEQ ID NO: 30479 - DNA, 23 bp, Homo Sapiens
ttggtggttcgagcccacccagg

SEQ ID NO: 30480 - DNA, 25 bp, Homo Sapiens
ttggtggttcgagcccacccaggga

SEQ ID NO: 30481 - DNA, 26 bp, Homo Sapiens
ttggtggttcgagcccacccagggac

SEQ ID NO: 30482 - DNA, 27 bp, Homo Sapiens
ttggtggttcgagcccacccagggacg

SEQ ID NO: 30483 - DNA, 28 bp, Homo Sapiens
ttggtggttcgagcccacccagggacgc

SEQ ID NO: 30484 - DNA, 29 bp, Homo Sapiens
ttggtggttcgagcccacccagggacgcc

SEQ ID NO: 30485 - DNA, 30 bp, Homo Sapiens
ttggtggttcgagcccacccagggacgcca

SEQ ID NO: 30486 - DNA, 28 bp, Homo Sapiens
ttggtggttcgagcccacccagggatgc

SEQ ID NO: 30487 - DNA, 26 bp, Homo Sapiens
ttggtggttcgatcccacccagggac

SEQ ID NO: 30488 - DNA, 27 bp, Homo Sapiens
ttggtggttcgatcccacccagggacg

SEQ ID NO: 30489 - DNA, 28 bp, Homo Sapiens
ttggtggttcgatcccacccagggacgc

SEQ ID NO: 30490 - DNA, 29 bp, Homo Sapiens
ttggtggttcgatcccacccagggacgcc

SEQ ID NO: 30491 - DNA, 30 bp, Homo Sapiens
ttggtggttcgatcccacccagggacgcca

SEQ ID NO: 30492 - DNA, 27 bp, Homo Sapiens
ttggtggtttagtggtagaattctcgc

SEQ ID NO: 30493 - DNA, 28 bp, Homo Sapiens
ttggtggtttagtggtagaattctcgcc

SEQ ID NO: 30494 - DNA, 29 bp, Homo Sapiens
ttggtggtttagtggtagaattctcgcct

SEQ ID NO: 30495 - DNA, 21 bp, Homo Sapiens
ttggttatacccttcccgtac

SEQ ID NO: 30496 - DNA, 22 bp, Homo Sapiens
ttggttatacccttcccgtact

SEQ ID NO: 30497 - DNA, 23 bp, Homo Sapiens
ttggttatacccttcccgtacta

SEQ ID NO: 30498 - DNA, 24 bp, Homo Sapiens
ttggttatacccttcccgtactac

SEQ ID NO: 30499 - DNA, 25 bp, Homo Sapiens
ttggttatacccttcccgtactacc

SEQ ID NO: 30500 - DNA, 26 bp, Homo Sapiens
ttggttatacccttcccgtactacca

SEQ ID NO: 30501 - DNA, 17 bp, Homo Sapiens
ttgtaaacaggagatcc

SEQ ID NO: 30502 - DNA, 42 bp, Homo Sapiens
ttgtaaacaggagatcctgggttcgaatcccagtagagcctc

SEQ ID NO: 30503 - DNA, 18 bp, Homo Sapiens
ttgtaaaccaggggtcgc

SEQ ID NO: 30504 - DNA, 19 bp, Homo Sapiens
ttgtaaaccaggggtcgcg

SEQ ID NO: 30505 - DNA, 20 bp, Homo Sapiens
ttgtaaaccaggggtcgcga

SEQ ID NO: 30506 - DNA, 22 bp, Homo Sapiens
ttgtaaaccaggggtcgcgagt

SEQ ID NO: 30507 - DNA, 24 bp, Homo Sapiens
ttgtaaaccaggggtcgcgagttc

SEQ ID NO: 30508 - DNA, 41 bp, Homo Sapiens
ttgtaaaccaggggtcgcgagttcaaatctcgctggggcct

SEQ ID NO: 30509 - DNA, 43 bp, Homo Sapiens
ttgtaaaccaggggtcgcgagttcaaatctcgctggggcctcc

SEQ ID NO: 30510 - DNA, 40 bp, Homo Sapiens
ttgtaaaccaggggtcgcgagttcaattctcgctggggcc

SEQ ID NO: 30511 - DNA, 43 bp, Homo Sapiens
ttgtaaaccaggggtcgcgagttcaattctcgctggggcctcc

SEQ ID NO: 30512 - DNA, 16 bp, Homo Sapiens
ttgtaaaccggagatg

SEQ ID NO: 30513 - DNA, 17 bp, Homo Sapiens
ttgtaaaccggagatga

SEQ ID NO: 30514 - DNA, 18 bp, Homo Sapiens
ttgtaaaccggagatgaa

SEQ ID NO: 30515 - DNA, 19 bp, Homo Sapiens
ttgtaaaccggagatgaaa

SEQ ID NO: 30516 - DNA, 20 bp, Homo Sapiens
ttgtaaaccggagatgaaaa

SEQ ID NO: 30517 - DNA, 21 bp, Homo Sapiens
ttgtaaaccggagatgaaaac

SEQ ID NO: 30518 - DNA, 22 bp, Homo Sapiens
ttgtaaaccggagatgaaaacc

SEQ ID NO: 30519 - DNA, 23 bp, Homo Sapiens
ttgtaaaccggagatgaaaacct

SEQ ID NO: 30520 - DNA, 24 bp, Homo Sapiens
ttgtaaaccggagatgaaaacctt

SEQ ID NO: 30521 - DNA, 25 bp, Homo Sapiens
ttgtaaaccggagatgaaaaccttt

SEQ ID NO: 30522 - DNA, 26 bp, Homo Sapiens
ttgtaaaccggagatgaaaacctttt

SEQ ID NO: 30523 - DNA, 27 bp, Homo Sapiens
ttgtaaaccggagatgaaaaccttttt

SEQ ID NO: 30524 - DNA, 28 bp, Homo Sapiens
ttgtaaaccggagatgaaaacctttttc

SEQ ID NO: 30525 - DNA, 29 bp, Homo Sapiens
ttgtaaaccggagatgaaaacctttttcc

SEQ ID NO: 30526 - DNA, 30 bp, Homo Sapiens
ttgtaaaccggagatgaaaacctttttcca

SEQ ID NO: 30527 - DNA, 32 bp, Homo Sapiens
ttgtaaaccggagatgaaaacctttttccaag

SEQ ID NO: 30528 - DNA, 33 bp, Homo Sapiens
ttgtaaaccggagatgaaaacctttttccaagg

SEQ ID NO: 30529 - DNA, 34 bp, Homo Sapiens
ttgtaaaccggagatgaaaacctttttccaagga

SEQ ID NO: 30530 - DNA, 35 bp, Homo Sapiens
ttgtaaaccggagatgaaaacctttttccaaggac

SEQ ID NO: 30531 - DNA, 36 bp, Homo Sapiens
ttgtaaaccggagatgaaaacctttttccaaggaca

SEQ ID NO: 30532 - DNA, 37 bp, Homo Sapiens
ttgtaaaccggagatgaaaacctttttccaaggacac

SEQ ID NO: 30533 - DNA, 38 bp, Homo Sapiens
ttgtaaaccggagatgaaaacctttttccaaggacacc

SEQ ID NO: 30534 - DNA, 39 bp, Homo Sapiens
ttgtaaaccggagatgaaaacctttttccaaggacacca

SEQ ID NO: 30535 - DNA, 24 bp, Homo Sapiens
ttgtagtataaactaatacaccag

SEQ ID NO: 30536 - DNA, 32 bp, Homo Sapiens
ttgtagtataaactaatacaccagtcttgtaa

SEQ ID NO: 30537 - DNA, 16 bp, Homo Sapiens
ttgtagtccgtgcgag

SEQ ID NO: 30538 - DNA, 17 bp, Homo Sapiens
ttgtagtccgtgcgaga

SEQ ID NO: 30539 - DNA, 18 bp, Homo Sapiens
ttgtagtccgtgcgagaa

SEQ ID NO: 30540 - DNA, 19 bp, Homo Sapiens
ttgtagtccgtgcgagaat

SEQ ID NO: 30541 - DNA, 20 bp, Homo Sapiens
ttgtagtccgtgcgagaata

SEQ ID NO: 30542 - DNA, 21 bp, Homo Sapiens
ttgtagtccgtgcgagaatac

SEQ ID NO: 30543 - DNA, 22 bp, Homo Sapiens
ttgtagtccgtgcgagaatacc

SEQ ID NO: 30544 - DNA, 23 bp, Homo Sapiens
ttgtagtccgtgcgagaatacca

SEQ ID NO: 30545 - DNA, 16 bp, Homo Sapiens
ttgtagttgaaataca

SEQ ID NO: 30546 - DNA, 22 bp, Homo Sapiens
ttgtagttgaaatacaacgatg

SEQ ID NO: 30547 - DNA, 27 bp, Homo Sapiens
ttgtagttgaaatacaacgatggtttt

SEQ ID NO: 30548 - DNA, 29 bp, Homo Sapiens
ttgtagttgaaatacaacgatggtttttc

SEQ ID NO: 30549 - DNA, 30 bp, Homo Sapiens
ttgtagttgaaatacaacgatggtttttca

SEQ ID NO: 30550 - DNA, 31 bp, Homo Sapiens
ttgtagttgaaatacaacgatggtttttcat

SEQ ID NO: 30551 - DNA, 32 bp, Homo Sapiens
ttgtagttgaaatacaacgatggtttttcata

SEQ ID NO: 30552 - DNA, 43 bp, Homo Sapiens
ttgtagttgaaatacaacgatggtttttcatatcattggtcgt

SEQ ID NO: 30553 - DNA, 16 bp, Homo Sapiens
ttgtcaaagttaaatt

SEQ ID NO: 30554 - DNA, 20 bp, Homo Sapiens
ttgtcaaagttaaattatag

SEQ ID NO: 30555 - DNA, 21 bp, Homo Sapiens
ttgtcaaagttaaattatagg

SEQ ID NO: 30556 - DNA, 22 bp, Homo Sapiens
ttgtcaaagttaaattataggc

SEQ ID NO: 30557 - DNA, 23 bp, Homo Sapiens
ttgtcaaagttaaattataggct

SEQ ID NO: 30558 - DNA, 24 bp, Homo Sapiens
ttgtcaaagttaaattataggcta

SEQ ID NO: 30559 - DNA, 25 bp, Homo Sapiens
ttgtcaaagttaaattataggctaa

SEQ ID NO: 30560 - DNA, 26 bp, Homo Sapiens
ttgtcaaagttaaattataggctaaa

SEQ ID NO: 30561 - DNA, 30 bp, Homo Sapiens
ttgtcaaagttaaattataggctaaatcct

SEQ ID NO: 30562 - DNA, 33 bp, Homo Sapiens
ttgtcaaagttaaattataggctaaatcctata

SEQ ID NO: 30563 - DNA, 35 bp, Homo Sapiens
ttgtcaaagttaaattataggctaaatcctatata

SEQ ID NO: 30564 - DNA, 37 bp, Homo Sapiens
ttgtcaaagttaaattataggctaaatcctatatatc

SEQ ID NO: 30565 - DNA, 42 bp, Homo Sapiens
ttgtcaaagttaaattataggctaaatcctatatatcttacc

SEQ ID NO: 30566 - DNA, 16 bp, Homo Sapiens
ttgtgaatctgacaac

SEQ ID NO: 30567 - DNA, 17 bp, Homo Sapiens
ttgtgaatctgacaaca

SEQ ID NO: 30568 - DNA, 18 bp, Homo Sapiens
ttgtgaatctgacaacag

SEQ ID NO: 30569 - DNA, 19 bp, Homo Sapiens
ttgtgaatctgacaacaga

SEQ ID NO: 30570 - DNA, 20 bp, Homo Sapiens
ttgtgaatctgacaacagag

SEQ ID NO: 30571 - DNA, 21 bp, Homo Sapiens
ttgtgaatctgacaacagagg

SEQ ID NO: 30572 - DNA, 22 bp, Homo Sapiens
ttgtgaatctgacaacagaggc

SEQ ID NO: 30573 - DNA, 23 bp, Homo Sapiens
ttgtgaatctgacaacagaggct

SEQ ID NO: 30574 - DNA, 24 bp, Homo Sapiens
ttgtgaatctgacaacagaggctt

SEQ ID NO: 30575 - DNA, 25 bp, Homo Sapiens
ttgtgaatctgacaacagaggctta

SEQ ID NO: 30576 - DNA, 26 bp, Homo Sapiens
ttgtgaatctgacaacagaggcttac

SEQ ID NO: 30577 - DNA, 27 bp, Homo Sapiens
ttgtgaatctgacaacagaggcttacg

SEQ ID NO: 30578 - DNA, 28 bp, Homo Sapiens
ttgtgaatctgacaacagaggcttacga

SEQ ID NO: 30579 - DNA, 29 bp, Homo Sapiens
ttgtgaatctgacaacagaggcttacgac

SEQ ID NO: 30580 - DNA, 30 bp, Homo Sapiens
ttgtgaatctgacaacagaggcttacgacc

SEQ ID NO: 30581 - DNA, 31 bp, Homo Sapiens
ttgtgaatctgacaacagaggcttacgaccc

SEQ ID NO: 30582 - DNA, 32 bp, Homo Sapiens
ttgtgaatctgacaacagaggcttacgacccc

SEQ ID NO: 30583 - DNA, 33 bp, Homo Sapiens
ttgtgaatctgacaacagaggcttacgacccct

SEQ ID NO: 30584 - DNA, 34 bp, Homo Sapiens
ttgtgaatctgacaacagaggcttacgacccctt

SEQ ID NO: 30585 - DNA, 35 bp, Homo Sapiens
ttgtgaatctgacaacagaggcttacgacccctta

SEQ ID NO: 30586 - DNA, 36 bp, Homo Sapiens
ttgtgaatctgacaacagaggcttacgaccccttat

SEQ ID NO: 30587 - DNA, 37 bp, Homo Sapiens
ttgtgaatctgacaacagaggcttacgaccccttatt

SEQ ID NO: 30588 - DNA, 38 bp, Homo Sapiens
ttgtgaatctgacaacagaggcttacgaccccttattt

SEQ ID NO: 30589 - DNA, 39 bp, Homo Sapiens
ttgtgaatctgacaacagaggcttacgaccccttattta

SEQ ID NO: 30590 - DNA, 40 bp, Homo Sapiens
ttgtgaatctgacaacagaggcttacgaccccttatttac

SEQ ID NO: 30591 - DNA, 41 bp, Homo Sapiens
ttgtgaatctgacaacagaggcttacgaccccttatttacc

SEQ ID NO: 30592 - DNA, 42 bp, Homo Sapiens
ttgtgaatctgacaacagaggcttacgaccccttatttaccc

SEQ ID NO: 30593 - DNA, 43 bp, Homo Sapiens
ttgtgaatctgacaacagaggcttacgaccccttatttacccc

SEQ ID NO: 30594 - DNA, 44 bp, Homo Sapiens
ttgtgaatctgacaacagaggcttacgaccccttatttacccca

SEQ ID NO: 30595 - DNA, 26 bp, Homo Sapiens
ttgtgagttcgagcctcacctggagc

SEQ ID NO: 30596 - DNA, 27 bp, Homo Sapiens
ttgtgagttcgagcctcacctggagca

SEQ ID NO: 30597 - DNA, 28 bp, Homo Sapiens
ttgtgagttcgagcctcacctggagcac

SEQ ID NO: 30598 - DNA, 29 bp, Homo Sapiens
ttgtgagttcgagcctcacctggagcacc

SEQ ID NO: 30599 - DNA, 30 bp, Homo Sapiens
ttgtgagttcgagcctcacctggagcacca

SEQ ID NO: 30600 - DNA, 25 bp, Homo Sapiens
ttgtgagttcgatcctcacctggag

SEQ ID NO: 30601 - DNA, 26 bp, Homo Sapiens
ttgtgagttcgatcctcacctggagc

SEQ ID NO: 30602 - DNA, 28 bp, Homo Sapiens
ttgtgagttcgatcctcacctggagcac

SEQ ID NO: 30603 - DNA, 17 bp, Homo Sapiens
ttgtgctttgcacgcgt

SEQ ID NO: 30604 - DNA, 21 bp, Homo Sapiens
ttgtgctttgcacgcgtgggt

SEQ ID NO: 30605 - DNA, 23 bp, Homo Sapiens
ttgtgctttgcacgcgtgggttc

SEQ ID NO: 30606 - DNA, 24 bp, Homo Sapiens
ttgtgctttgcacgcgtgggttcg

SEQ ID NO: 30607 - DNA, 42 bp, Homo Sapiens
ttgtgctttgcacgcgtgggttcgaatcccatcctcgtcgcc

SEQ ID NO: 30608 - DNA, 43 bp, Homo Sapiens
ttgtgctttgcacgcgtgggttcgaatcccatcctcgtcgcca

SEQ ID NO: 30609 - DNA, 17 bp, Homo Sapiens
ttgtggccgcagcaacc

SEQ ID NO: 30610 - DNA, 18 bp, Homo Sapiens
ttgtggccgcagcaacct

SEQ ID NO: 30611 - DNA, 35 bp, Homo Sapiens
ttgtggccgcagcaacctcggttcgaatccgagtc

SEQ ID NO: 30612 - DNA, 38 bp, Homo Sapiens
ttgtggccgcagcaacctcggttcgaatccgagtcacg

SEQ ID NO: 30613 - DNA, 27 bp, Homo Sapiens
ttgtgggttcgaatcccaccagagtcg

SEQ ID NO: 30614 - DNA, 28 bp, Homo Sapiens
ttgtgggttcgaatcccaccagagtcgc

SEQ ID NO: 30615 - DNA, 29 bp, Homo Sapiens
ttgtgggttcgaatcccaccagagtcgcc

SEQ ID NO: 30616 - DNA, 30 bp, Homo Sapiens
ttgtgggttcgaatcccaccagagtcgcca

SEQ ID NO: 30617 - DNA, 28 bp, Homo Sapiens
ttgtgggttcgagtcccaccagagtcgc

SEQ ID NO: 30618 - DNA, 29 bp, Homo Sapiens
ttgtgggttcgagtcccaccagagtcgcc

SEQ ID NO: 30619 - DNA, 30 bp, Homo Sapiens
ttgtgggttcgagtcccaccagagtcgcca

SEQ ID NO: 30620 - DNA, 27 bp, Homo Sapiens
ttgtgggttcgagtcccatctggggtg

SEQ ID NO: 30621 - DNA, 28 bp, Homo Sapiens
ttgtgggttcgagtcccatctggggtgc

SEQ ID NO: 30622 - DNA, 26 bp, Homo Sapiens
ttgtgggttcgagtcccatctgggtc

SEQ ID NO: 30623 - DNA, 27 bp, Homo Sapiens
ttgtgggttcgagtcccatctgggtcg

SEQ ID NO: 30624 - DNA, 28 bp, Homo Sapiens
ttgtgggttcgagtcccatctgggtcgc

SEQ ID NO: 30625 - DNA, 29 bp, Homo Sapiens
ttgtgggttcgagtcccatctgggtcgcc

SEQ ID NO: 30626 - DNA, 30 bp, Homo Sapiens
ttgtgggttcgagtcccatctgggtcgcca

SEQ ID NO: 30627 - DNA, 16 bp, Homo Sapiens
ttgtgggtttaagtcc

SEQ ID NO: 30628 - DNA, 17 bp, Homo Sapiens
ttgtgggtttaagtccc

SEQ ID NO: 30629 - DNA, 20 bp, Homo Sapiens
ttgtgggtttaagtcccatt

SEQ ID NO: 30630 - DNA, 21 bp, Homo Sapiens
ttgtgggtttaagtcccattg

SEQ ID NO: 30631 - DNA, 24 bp, Homo Sapiens
ttgtgggtttaagtcccattggtc

SEQ ID NO: 30632 - DNA, 25 bp, Homo Sapiens
ttgtgggtttaagtcccattggtct

SEQ ID NO: 30633 - DNA, 26 bp, Homo Sapiens
ttgtgggtttaagtcccattggtcta

SEQ ID NO: 30634 - DNA, 27 bp, Homo Sapiens
ttgtgggtttaagtcccattggtctag

SEQ ID NO: 30635 - DNA, 28 bp, Homo Sapiens
ttgtgggtttaagtcccattggtctagc

SEQ ID NO: 30636 - DNA, 29 bp, Homo Sapiens
ttgtgggtttaagtcccattggtctagcc

SEQ ID NO: 30637 - DNA, 30 bp, Homo Sapiens
ttgtgggtttaagtcccattggtctagcca

SEQ ID NO: 30638 - DNA, 25 bp, Homo Sapiens
tttaaacaaaacgaatgatttcgac

SEQ ID NO: 30639 - DNA, 26 bp, Homo Sapiens
tttaaacaaaacgaatgatttcgact

SEQ ID NO: 30640 - DNA, 27 bp, Homo Sapiens
tttaaacaaaacgaatgatttcgactc

SEQ ID NO: 30641 - DNA, 29 bp, Homo Sapiens
tttaaacaaaacgaatgatttcgactcat

SEQ ID NO: 30642 - DNA, 16 bp, Homo Sapiens
tttaaaggataacagc

SEQ ID NO: 30643 - DNA, 17 bp, Homo Sapiens
tttaaaggataacagct

SEQ ID NO: 30644 - DNA, 25 bp, Homo Sapiens
tttaaaggataacagctatccattg

SEQ ID NO: 30645 - DNA, 28 bp, Homo Sapiens
tttaaaggataacagctatccattggtc

SEQ ID NO: 30646 - DNA, 29 bp, Homo Sapiens
tttaaaggataacagctatccattggtct

SEQ ID NO: 30647 - DNA, 30 bp, Homo Sapiens
tttaaaggataacagctatccattggtctt

SEQ ID NO: 30648 - DNA, 31 bp, Homo Sapiens
tttaaaggataacagctatccattggtctta

SEQ ID NO: 30649 - DNA, 32 bp, Homo Sapiens
tttaaaggataacagctatccattggtcttag

SEQ ID NO: 30650 - DNA, 19 bp, Homo Sapiens
tttaaattagaatcttagc

SEQ ID NO: 30651 - DNA, 20 bp, Homo Sapiens
tttaaattagaatcttagct

SEQ ID NO: 30652 - DNA, 21 bp, Homo Sapiens
tttaaattagaatcttagctt

SEQ ID NO: 30653 - DNA, 22 bp, Homo Sapiens
tttaaattagaatcttagcttt

SEQ ID NO: 30654 - DNA, 23 bp, Homo Sapiens
tttaaattagaatcttagctttg

SEQ ID NO: 30655 - DNA, 24 bp, Homo Sapiens
tttaaattagaatcttagctttgg

SEQ ID NO: 30656 - DNA, 29 bp, Homo Sapiens
tttaaattagaatcttagctttgggtgct

SEQ ID NO: 30657 - DNA, 31 bp, Homo Sapiens
tttaaattagaatcttagctttgggtgctaa

SEQ ID NO: 30658 - DNA, 41 bp, Homo Sapiens
tttaaattagaatcttagctttgggtgctaatggtggagtt

SEQ ID NO: 30659 - DNA, 42 bp, Homo Sapiens
tttaaattagaatcttagctttgggtgctaatggtggagtta

SEQ ID NO: 30660 - DNA, 19 bp, Homo Sapiens
tttaaccaaaacatcagat

SEQ ID NO: 30661 - DNA, 20 bp, Homo Sapiens
tttaaccaaaacatcagatt

SEQ ID NO: 30662 - DNA, 22 bp, Homo Sapiens
tttaaccaaaacatcagattgt

SEQ ID NO: 30663 - DNA, 23 bp, Homo Sapiens
tttaaccaaaacatcagattgtg

SEQ ID NO: 30664 - DNA, 24 bp, Homo Sapiens
tttaaccaaaacatcagattgtga

SEQ ID NO: 30665 - DNA, 25 bp, Homo Sapiens
tttaaccaaaacatcagattgtgaa

SEQ ID NO: 30666 - DNA, 26 bp, Homo Sapiens
tttaaccaaaacatcagattgtgaat

SEQ ID NO: 30667 - DNA, 27 bp, Homo Sapiens
tttaaccaaaacatcagattgtgaatc

SEQ ID NO: 30668 - DNA, 28 bp, Homo Sapiens
tttaaccaaaacatcagattgtgaatct

SEQ ID NO: 30669 - DNA, 29 bp, Homo Sapiens
tttaaccaaaacatcagattgtgaatctg

SEQ ID NO: 30670 - DNA, 30 bp, Homo Sapiens
tttaaccaaaacatcagattgtgaatctga

SEQ ID NO: 30671 - DNA, 32 bp, Homo Sapiens
tttaaccaaaacatcagattgtgaatctgaca

SEQ ID NO: 30672 - DNA, 33 bp, Homo Sapiens
tttaaccaaaacatcagattgtgaatctgacaa

SEQ ID NO: 30673 - DNA, 34 bp, Homo Sapiens
tttaaccaaaacatcagattgtgaatctgacaac

SEQ ID NO: 30674 - DNA, 35 bp, Homo Sapiens
tttaaccaaaacatcagattgtgaatctgacaaca

SEQ ID NO: 30675 - DNA, 36 bp, Homo Sapiens
tttaaccaaaacatcagattgtgaatctgacaacag

SEQ ID NO: 30676 - DNA, 37 bp, Homo Sapiens
tttaaccaaaacatcagattgtgaatctgacaacaga

SEQ ID NO: 30677 - DNA, 39 bp, Homo Sapiens
tttaaccaaaacatcagattgtgaatctgacaacagagg

SEQ ID NO: 30678 - DNA, 40 bp, Homo Sapiens
tttaaccaaaacatcagattgtgaatctgacaacagaggc

SEQ ID NO: 30679 - DNA, 41 bp, Homo Sapiens
tttaaccaaaacatcagattgtgaatctgacaacagaggct

SEQ ID NO: 30680 - DNA, 44 bp, Homo Sapiens
tttaaccaaaacatcagattgtgaatctgacaacagaggcttac

SEQ ID NO: 30681 - DNA, 17 bp, Homo Sapiens
tttaagtcccattggtc

SEQ ID NO: 30682 - DNA, 18 bp, Homo Sapiens
tttaagtcccattggtct

SEQ ID NO: 30683 - DNA, 19 bp, Homo Sapiens
tttaagtcccattggtcta

SEQ ID NO: 30684 - DNA, 21 bp, Homo Sapiens
tttaagtcccattggtctagc

SEQ ID NO: 30685 - DNA, 22 bp, Homo Sapiens
tttaagtcccattggtctagcc

SEQ ID NO: 30686 - DNA, 23 bp, Homo Sapiens
tttaagtcccattggtctagcca

SEQ ID NO: 30687 - DNA, 17 bp, Homo Sapiens
tttaagttaaagattaa

SEQ ID NO: 30688 - DNA, 18 bp, Homo Sapiens
tttaagttaaagattaag

SEQ ID NO: 30689 - DNA, 19 bp, Homo Sapiens
tttaagttaaagattaaga

SEQ ID NO: 30690 - DNA, 20 bp, Homo Sapiens
tttaagttaaagattaagag

SEQ ID NO: 30691 - DNA, 21 bp, Homo Sapiens
tttaagttaaagattaagaga

SEQ ID NO: 30692 - DNA, 22 bp, Homo Sapiens
tttaagttaaagattaagagaa

SEQ ID NO: 30693 - DNA, 23 bp, Homo Sapiens
tttaagttaaagattaagagaac

SEQ ID NO: 30694 - DNA, 24 bp, Homo Sapiens
tttaagttaaagattaagagaacc

SEQ ID NO: 30695 - DNA, 25 bp, Homo Sapiens
tttaagttaaagattaagagaacca

SEQ ID NO: 30696 - DNA, 26 bp, Homo Sapiens
tttaagttaaagattaagagaaccaa

SEQ ID NO: 30697 - DNA, 27 bp, Homo Sapiens
tttaagttaaagattaagagaaccaac

SEQ ID NO: 30698 - DNA, 28 bp, Homo Sapiens
tttaagttaaagattaagagaaccaaca

SEQ ID NO: 30699 - DNA, 29 bp, Homo Sapiens
tttaagttaaagattaagagaaccaacac

SEQ ID NO: 30700 - DNA, 30 bp, Homo Sapiens
tttaagttaaagattaagagaaccaacacc

SEQ ID NO: 30701 - DNA, 31 bp, Homo Sapiens
tttaagttaaagattaagagaaccaacacct

SEQ ID NO: 30702 - DNA, 32 bp, Homo Sapiens
tttaagttaaagattaagagaaccaacacctc

SEQ ID NO: 30703 - DNA, 33 bp, Homo Sapiens
tttaagttaaagattaagagaaccaacacctct

SEQ ID NO: 30704 - DNA, 34 bp, Homo Sapiens
tttaagttaaagattaagagaaccaacacctctt

SEQ ID NO: 30705 - DNA, 35 bp, Homo Sapiens
tttaagttaaagattaagagaaccaacacctcttt

SEQ ID NO: 30706 - DNA, 39 bp, Homo Sapiens
tttaagttaaagattaagagaaccaacacctctttacag

SEQ ID NO: 30707 - DNA, 40 bp, Homo Sapiens
tttaagttaaagattaagagaaccaacacctctttacagt

SEQ ID NO: 30708 - DNA, 41 bp, Homo Sapiens
tttaagttaaagattaagagaaccaacacctctttacagtg

SEQ ID NO: 30709 - DNA, 42 bp, Homo Sapiens
tttaagttaaagattaagagaaccaacacctctttacagtga

SEQ ID NO: 30710 - DNA, 43 bp, Homo Sapiens
tttaagttaaagattaagagaaccaacacctctttacagtgac

SEQ ID NO: 30711 - DNA, 44 bp, Homo Sapiens
tttaagttaaagattaagagaaccaacacctctttacagtgacc

SEQ ID NO: 30712 - DNA, 45 bp, Homo Sapiens
tttaagttaaagattaagagaaccaacacctctttacagtgacca

SEQ ID NO: 30713 - DNA, 16 bp, Homo Sapiens
tttaatctgagggtcc

SEQ ID NO: 30714 - DNA, 35 bp, Homo Sapiens
tttaatctgagggtccagggttcaagtccctgttc

SEQ ID NO: 30715 - DNA, 43 bp, Homo Sapiens
tttaatctgagggtccagggttcaagtccctgttcgggcgcca

SEQ ID NO: 30716 - DNA, 33 bp, Homo Sapiens
tttaatctgagggtccagggttcatgtccctgt

SEQ ID NO: 30717 - DNA, 16 bp, Homo Sapiens
tttacaatcagaggtt

SEQ ID NO: 30718 - DNA, 18 bp, Homo Sapiens
tttacacgcagaaggtcc

SEQ ID NO: 30719 - DNA, 19 bp, Homo Sapiens
tttacacgcagaaggtcct

SEQ ID NO: 30720 - DNA, 20 bp, Homo Sapiens
tttacacgcagaaggtcctg

SEQ ID NO: 30721 - DNA, 40 bp, Homo Sapiens
tttacacgcagaaggtcctgggttcgagccccagtggaac

SEQ ID NO: 30722 - DNA, 44 bp, Homo Sapiens
tttacacgcagaaggtcctgggttcgagccccagtggaaccacc

SEQ ID NO: 30723 - DNA, 45 bp, Homo Sapiens
tttacacgcagaaggtcctgggttcgagccccagtggaaccacca

SEQ ID NO: 30724 - DNA, 16 bp, Homo Sapiens
tttacagtcagaggtt

SEQ ID NO: 30725 - DNA, 17 bp, Homo Sapiens
tttacagtcagaggttc

SEQ ID NO: 30726 - DNA, 18 bp, Homo Sapiens
tttacagtcagaggttca

SEQ ID NO: 30727 - DNA, 19 bp, Homo Sapiens
tttacagtcagaggttcaa

SEQ ID NO: 30728 - DNA, 20 bp, Homo Sapiens
tttacagtcagaggttcaat

SEQ ID NO: 30729 - DNA, 22 bp, Homo Sapiens
tttacagtcagaggttcaattc

SEQ ID NO: 30730 - DNA, 23 bp, Homo Sapiens
tttacagtcagaggttcaattcc

SEQ ID NO: 30731 - DNA, 24 bp, Homo Sapiens
tttacagtcagaggttcaattcct

SEQ ID NO: 30732 - DNA, 25 bp, Homo Sapiens
tttacagtcagaggttcaattcctc

SEQ ID NO: 30733 - DNA, 26 bp, Homo Sapiens
tttacagtcagaggttcaattcctct

SEQ ID NO: 30734 - DNA, 27 bp, Homo Sapiens
tttacagtcagaggttcaattcctctt

SEQ ID NO: 30735 - DNA, 28 bp, Homo Sapiens
tttacagtcagaggttcaattcctcttc

SEQ ID NO: 30736 - DNA, 29 bp, Homo Sapiens
tttacagtcagaggttcaattcctcttct

SEQ ID NO: 30737 - DNA, 35 bp, Homo Sapiens
tttacagtcagaggttcaattcctcttcttaacac

SEQ ID NO: 30738 - DNA, 16 bp, Homo Sapiens
tttagacgggctcaca

SEQ ID NO: 30739 - DNA, 17 bp, Homo Sapiens
tttagacgggctcacat

SEQ ID NO: 30740 - DNA, 18 bp, Homo Sapiens
tttagacgggctcacatc

SEQ ID NO: 30741 - DNA, 19 bp, Homo Sapiens
tttagacgggctcacatca

SEQ ID NO: 30742 - DNA, 20 bp, Homo Sapiens
tttagacgggctcacatcac

SEQ ID NO: 30743 - DNA, 21 bp, Homo Sapiens
tttagacgggctcacatcacc

SEQ ID NO: 30744 - DNA, 22 bp, Homo Sapiens
tttagacgggctcacatcaccc

SEQ ID NO: 30745 - DNA, 23 bp, Homo Sapiens
tttagacgggctcacatcacccc

SEQ ID NO: 30746 - DNA, 24 bp, Homo Sapiens
tttagacgggctcacatcacccca

SEQ ID NO: 30747 - DNA, 25 bp, Homo Sapiens
tttagacgggctcacatcaccccat

SEQ ID NO: 30748 - DNA, 26 bp, Homo Sapiens
tttagacgggctcacatcaccccata

SEQ ID NO: 30749 - DNA, 27 bp, Homo Sapiens
tttagacgggctcacatcaccccataa

SEQ ID NO: 30750 - DNA, 28 bp, Homo Sapiens
tttagacgggctcacatcaccccataaa

SEQ ID NO: 30751 - DNA, 29 bp, Homo Sapiens
tttagacgggctcacatcaccccataaac

SEQ ID NO: 30752 - DNA, 30 bp, Homo Sapiens
tttagacgggctcacatcaccccataaaca

SEQ ID NO: 30753 - DNA, 31 bp, Homo Sapiens
tttagacgggctcacatcaccccataaacac

SEQ ID NO: 30754 - DNA, 32 bp, Homo Sapiens
tttagacgggctcacatcaccccataaacacc

SEQ ID NO: 30755 - DNA, 33 bp, Homo Sapiens
tttagacgggctcacatcaccccataaacacca

SEQ ID NO: 30756 - DNA, 16 bp, Homo Sapiens
tttagagccagactgc

SEQ ID NO: 30757 - DNA, 17 bp, Homo Sapiens
tttagagccagactgcc

SEQ ID NO: 30758 - DNA, 17 bp, Homo Sapiens
tttaggctccagtcatt

SEQ ID NO: 30759 - DNA, 18 bp, Homo Sapiens
tttaggctccagtcattt

SEQ ID NO: 30760 - DNA, 19 bp, Homo Sapiens
tttaggctccagtcatttc

SEQ ID NO: 30761 - DNA, 20 bp, Homo Sapiens
tttaggctccagtcatttcg

SEQ ID NO: 30762 - DNA, 47 bp, Homo Sapiens
tttaggctccagtcatttcgatggcgtgggttcgaatcccaccgctg

SEQ ID NO: 30763 - DNA, 17 bp, Homo Sapiens
tttaggctccagtctct

SEQ ID NO: 30764 - DNA, 18 bp, Homo Sapiens
tttaggctccagtctctt

SEQ ID NO: 30765 - DNA, 19 bp, Homo Sapiens
tttaggctccagtctcttc

SEQ ID NO: 30766 - DNA, 20 bp, Homo Sapiens
tttaggctccagtctcttcg

SEQ ID NO: 30767 - DNA, 18 bp, Homo Sapiens
tttaggttaaatacagac

SEQ ID NO: 30768 - DNA, 30 bp, Homo Sapiens
tttaggttaaatacagaccaagagccttca

SEQ ID NO: 30769 - DNA, 24 bp, Homo Sapiens
tttagtataaatagtaccgttaac

SEQ ID NO: 30770 - DNA, 25 bp, Homo Sapiens
tttagtataaatagtaccgttaact

SEQ ID NO: 30771 - DNA, 27 bp, Homo Sapiens
tttagtataaatagtaccgttaacttc

SEQ ID NO: 30772 - DNA, 28 bp, Homo Sapiens
tttagtataaatagtaccgttaacttcc

SEQ ID NO: 30773 - DNA, 17 bp, Homo Sapiens
tttatgtagcttacctc

SEQ ID NO: 30774 - DNA, 18 bp, Homo Sapiens
tttatgtagcttacctcc

SEQ ID NO: 30775 - DNA, 19 bp, Homo Sapiens
tttatgtagcttacctcct

SEQ ID NO: 30776 - DNA, 23 bp, Homo Sapiens
tttatgtagcttacctcctcaaa

SEQ ID NO: 30777 - DNA, 24 bp, Homo Sapiens
tttatgtagcttacctcctcaaag

SEQ ID NO: 30778 - DNA, 29 bp, Homo Sapiens
tttatgtagcttacctcctcaaagcaata

SEQ ID NO: 30779 - DNA, 17 bp, Homo Sapiens
tttcaacttaacttgac

SEQ ID NO: 30780 - DNA, 18 bp, Homo Sapiens
tttcaacttaacttgacc

SEQ ID NO: 30781 - DNA, 19 bp, Homo Sapiens
tttcaacttaacttgaccg

SEQ ID NO: 30782 - DNA, 21 bp, Homo Sapiens
tttcaacttaacttgaccgct

SEQ ID NO: 30783 - DNA, 22 bp, Homo Sapiens
tttcaacttaacttgaccgctc

SEQ ID NO: 30784 - DNA, 23 bp, Homo Sapiens
tttcaacttaacttgaccgctct

SEQ ID NO: 30785 - DNA, 24 bp, Homo Sapiens
tttcaacttaacttgaccgctctg

SEQ ID NO: 30786 - DNA, 25 bp, Homo Sapiens
tttcaacttaacttgaccgctctga

SEQ ID NO: 30787 - DNA, 26 bp, Homo Sapiens
tttcaacttaacttgaccgctctgac

SEQ ID NO: 30788 - DNA, 27 bp, Homo Sapiens
tttcaacttaacttgaccgctctgacc

SEQ ID NO: 30789 - DNA, 28 bp, Homo Sapiens
tttcaacttaacttgaccgctctgacca

SEQ ID NO: 30790 - DNA, 36 bp, Homo Sapiens
tttcacccaggcggcccgggttcgactcccggtgtg

SEQ ID NO: 30791 - DNA, 37 bp, Homo Sapiens
tttcacccaggcggcccgggttcgactcccggtgtgg

SEQ ID NO: 30792 - DNA, 38 bp, Homo Sapiens
tttcacccaggcggcccgggttcgactcccggtgtggg

SEQ ID NO: 30793 - DNA, 40 bp, Homo Sapiens
tttcacccaggcggcccgggttcgactcccggtgtgggaa

SEQ ID NO: 30794 - DNA, 41 bp, Homo Sapiens
tttcacccaggcggcccgggttcgactcccggtgtgggaac

SEQ ID NO: 30795 - DNA, 42 bp, Homo Sapiens
tttcacccaggcggcccgggttcgactcccggtgtgggaacc

SEQ ID NO: 30796 - DNA, 43 bp, Homo Sapiens
tttcacccaggcggcccgggttcgactcccggtgtgggaacca

SEQ ID NO: 30797 - DNA, 21 bp, Homo Sapiens
tttcaccgccgcggcccgggt

SEQ ID NO: 30798 - DNA, 43 bp, Homo Sapiens
tttcaccgccgcggcccgggttcgattcccggtcagggaacca

SEQ ID NO: 30799 - DNA, 16 bp, Homo Sapiens
tttcataactttgtca

SEQ ID NO: 30800 - DNA, 17 bp, Homo Sapiens
tttcataactttgtcaa

SEQ ID NO: 30801 - DNA, 19 bp, Homo Sapiens
tttcataactttgtcaaag

SEQ ID NO: 30802 - DNA, 32 bp, Homo Sapiens
tttcataactttgtcaaagttaaattataggc

SEQ ID NO: 30803 - DNA, 33 bp, Homo Sapiens
tttcataactttgtcaaagttaaattataggct

SEQ ID NO: 30804 - DNA, 34 bp, Homo Sapiens
tttcataactttgtcaaagttaaattataggcta

SEQ ID NO: 30805 - DNA, 35 bp, Homo Sapiens
tttcataactttgtcaaagttaaattataggctaa

SEQ ID NO: 30806 - DNA, 36 bp, Homo Sapiens
tttcataactttgtcaaagttaaattataggctaaa

SEQ ID NO: 30807 - DNA, 38 bp, Homo Sapiens
tttcataactttgtcaaagttaaattataggctaaatc

SEQ ID NO: 30808 - DNA, 16 bp, Homo Sapiens
tttcatatcattggtc

SEQ ID NO: 30809 - DNA, 17 bp, Homo Sapiens
tttcatatcattggtcg

SEQ ID NO: 30810 - DNA, 20 bp, Homo Sapiens
tttcatatcattggtcgtgg

SEQ ID NO: 30811 - DNA, 22 bp, Homo Sapiens
tttcatatcattggtcgtggtt

SEQ ID NO: 30812 - DNA, 23 bp, Homo Sapiens
tttcatatcattggtcgtggttg

SEQ ID NO: 30813 - DNA, 25 bp, Homo Sapiens
tttcatatcattggtcgtggttgta

SEQ ID NO: 30814 - DNA, 27 bp, Homo Sapiens
tttcatatcattggtcgtggttgtagt

SEQ ID NO: 30815 - DNA, 28 bp, Homo Sapiens
tttcatatcattggtcgtggttgtagtc

SEQ ID NO: 30816 - DNA, 29 bp, Homo Sapiens
tttcatatcattggtcgtggttgtagtcc

SEQ ID NO: 30817 - DNA, 30 bp, Homo Sapiens
tttcatatcattggtcgtggttgtagtccg

SEQ ID NO: 30818 - DNA, 31 bp, Homo Sapiens
tttcatatcattggtcgtggttgtagtccgt

SEQ ID NO: 30819 - DNA, 32 bp, Homo Sapiens
tttcatatcattggtcgtggttgtagtccgtg

SEQ ID NO: 30820 - DNA, 33 bp, Homo Sapiens
tttcatatcattggtcgtggttgtagtccgtgc

SEQ ID NO: 30821 - DNA, 34 bp, Homo Sapiens
tttcatatcattggtcgtggttgtagtccgtgcg

SEQ ID NO: 30822 - DNA, 35 bp, Homo Sapiens
tttcatatcattggtcgtggttgtagtccgtgcga

SEQ ID NO: 30823 - DNA, 36 bp, Homo Sapiens
tttcatatcattggtcgtggttgtagtccgtgcgag

SEQ ID NO: 30824 - DNA, 37 bp, Homo Sapiens
tttcatatcattggtcgtggttgtagtccgtgcgaga

SEQ ID NO: 30825 - DNA, 38 bp, Homo Sapiens
tttcatatcattggtcgtggttgtagtccgtgcgagaa

SEQ ID NO: 30826 - DNA, 39 bp, Homo Sapiens
tttcatatcattggtcgtggttgtagtccgtgcgagaat

SEQ ID NO: 30827 - DNA, 40 bp, Homo Sapiens
tttcatatcattggtcgtggttgtagtccgtgcgagaata

SEQ ID NO: 30828 - DNA, 41 bp, Homo Sapiens
tttcatatcattggtcgtggttgtagtccgtgcgagaatac

SEQ ID NO: 30829 - DNA, 42 bp, Homo Sapiens
tttcatatcattggtcgtggttgtagtccgtgcgagaatacc

SEQ ID NO: 30830 - DNA, 43 bp, Homo Sapiens
tttcatatcattggtcgtggttgtagtccgtgcgagaatacca

SEQ ID NO: 30831 - DNA, 16 bp, Homo Sapiens
tttcatattgaattgc

SEQ ID NO: 30832 - DNA, 17 bp, Homo Sapiens
tttcatattgaattgca

SEQ ID NO: 30833 - DNA, 18 bp, Homo Sapiens
tttcatattgaattgcaa

SEQ ID NO: 30834 - DNA, 20 bp, Homo Sapiens
tttcatattgaattgcaaat

SEQ ID NO: 30835 - DNA, 22 bp, Homo Sapiens
tttcatattgaattgcaaattc

SEQ ID NO: 30836 - DNA, 23 bp, Homo Sapiens
tttcatattgaattgcaaattcg

SEQ ID NO: 30837 - DNA, 26 bp, Homo Sapiens
tttcatattgaattgcaaattcgaag

SEQ ID NO: 30838 - DNA, 34 bp, Homo Sapiens
tttcatattgaattgcaaattcgaagaagcagct

SEQ ID NO: 30839 - DNA, 20 bp, Homo Sapiens
tttccccgcacaggttcgaa

SEQ ID NO: 30840 - DNA, 21 bp, Homo Sapiens
tttccccgcacaggttcgaat

SEQ ID NO: 30841 - DNA, 22 bp, Homo Sapiens
tttccccgcacaggttcgaatc

SEQ ID NO: 30842 - DNA, 23 bp, Homo Sapiens
tttccccgcacaggttcgaatcc

SEQ ID NO: 30843 - DNA, 24 bp, Homo Sapiens
tttccccgcacaggttcgaatcct

SEQ ID NO: 30844 - DNA, 36 bp, Homo Sapiens
tttccccgcacaggttcgaatcctgttcgtgacgcc

SEQ ID NO: 30845 - DNA, 18 bp, Homo Sapiens
tttccccgcgcaggttcg

SEQ ID NO: 30846 - DNA, 20 bp, Homo Sapiens
tttccccgcgcaggttcgaa

SEQ ID NO: 30847 - DNA, 21 bp, Homo Sapiens
tttccccgcgcaggttcgaat

SEQ ID NO: 30848 - DNA, 22 bp, Homo Sapiens
tttccccgcgcaggttcgaatc

SEQ ID NO: 30849 - DNA, 23 bp, Homo Sapiens
tttccccgcgcaggttcgaatcc

SEQ ID NO: 30850 - DNA, 24 bp, Homo Sapiens
tttccccgcgcaggttcgaatcct

SEQ ID NO: 30851 - DNA, 36 bp, Homo Sapiens
tttccccgcgcaggttcgaatcctgccgactacgcc

SEQ ID NO: 30852 - DNA, 37 bp, Homo Sapiens
tttccccgcgcaggttcgaatcctgccgactacgcca

SEQ ID NO: 30853 - DNA, 32 bp, Homo Sapiens
tttccgtagtggagtggttatcacgttcgcct

SEQ ID NO: 30854 - DNA, 16 bp, Homo Sapiens
tttccgtagtgtagcg

SEQ ID NO: 30855 - DNA, 21 bp, Homo Sapiens
tttccgtagtgtagcggttat

SEQ ID NO: 30856 - DNA, 22 bp, Homo Sapiens
tttccgtagtgtagcggttatc

SEQ ID NO: 30857 - DNA, 25 bp, Homo Sapiens
tttccgtagtgtagcggttatcaca

SEQ ID NO: 30858 - DNA, 27 bp, Homo Sapiens
tttccgtagtgtagcggttatcacatt

SEQ ID NO: 30859 - DNA, 28 bp, Homo Sapiens
tttccgtagtgtagcggttatcacattc

SEQ ID NO: 30860 - DNA, 31 bp, Homo Sapiens
tttccgtagtgtagcggttatcacattcgcc

SEQ ID NO: 30861 - DNA, 32 bp, Homo Sapiens
tttccgtagtgtagcggttatcacattcgcct

SEQ ID NO: 30862 - DNA, 33 bp, Homo Sapiens
tttccgtagtgtagcggttatcacattcgcctc

SEQ ID NO: 30863 - DNA, 34 bp, Homo Sapiens
tttccgtagtgtagcggttatcacattcgcctca

SEQ ID NO: 30864 - DNA, 17 bp, Homo Sapiens
tttccgtagtgtagtgg

SEQ ID NO: 30865 - DNA, 18 bp, Homo Sapiens
tttccgtagtgtagtggt

SEQ ID NO: 30866 - DNA, 21 bp, Homo Sapiens
tttccgtagtgtagtggtcat

SEQ ID NO: 30867 - DNA, 22 bp, Homo Sapiens
tttccgtagtgtagtggtcatc

SEQ ID NO: 30868 - DNA, 23 bp, Homo Sapiens
tttccgtagtgtagtggtcatca

SEQ ID NO: 30869 - DNA, 28 bp, Homo Sapiens
tttccgtagtgtagtggtcatcacgttc

SEQ ID NO: 30870 - DNA, 29 bp, Homo Sapiens
tttccgtagtgtagtggtcatcacgttcg

SEQ ID NO: 30871 - DNA, 30 bp, Homo Sapiens
tttccgtagtgtagtggtcatcacgttcgc

SEQ ID NO: 30872 - DNA, 31 bp, Homo Sapiens
tttccgtagtgtagtggtcatcacgttcgcc

SEQ ID NO: 30873 - DNA, 32 bp, Homo Sapiens
tttccgtagtgtagtggtcatcacgttcgcct

SEQ ID NO: 30874 - DNA, 20 bp, Homo Sapiens
tttccgtagtgtagtggtta

SEQ ID NO: 30875 - DNA, 21 bp, Homo Sapiens
tttccgtagtgtagtggttat

SEQ ID NO: 30876 - DNA, 22 bp, Homo Sapiens
tttccgtagtgtagtggttatc

SEQ ID NO: 30877 - DNA, 23 bp, Homo Sapiens
tttccgtagtgtagtggttatca

SEQ ID NO: 30878 - DNA, 24 bp, Homo Sapiens
tttccgtagtgtagtggttatcac

SEQ ID NO: 30879 - DNA, 25 bp, Homo Sapiens
tttccgtagtgtagtggttatcacg

SEQ ID NO: 30880 - DNA, 27 bp, Homo Sapiens
tttccgtagtgtagtggttatcacgtt

SEQ ID NO: 30881 - DNA, 28 bp, Homo Sapiens
tttccgtagtgtagtggttatcacgttc

SEQ ID NO: 30882 - DNA, 29 bp, Homo Sapiens
tttccgtagtgtagtggttatcacgttcg

SEQ ID NO: 30883 - DNA, 30 bp, Homo Sapiens
tttccgtagtgtagtggttatcacgttcgc

SEQ ID NO: 30884 - DNA, 31 bp, Homo Sapiens
tttccgtagtgtagtggttatcacgttcgcc

SEQ ID NO: 30885 - DNA, 32 bp, Homo Sapiens
tttccgtagtgtagtggttatcacgttcgcct

SEQ ID NO: 30886 - DNA, 34 bp, Homo Sapiens
tttccgtagtgtagtggttatcacgttcgcctaa

SEQ ID NO: 30887 - DNA, 33 bp, Homo Sapiens
tttccgtagtgtagtggttatcacgttcgcctc

SEQ ID NO: 30888 - DNA, 34 bp, Homo Sapiens
tttccgtagtgtagtggttatcacgttcgcctca

SEQ ID NO: 30889 - DNA, 35 bp, Homo Sapiens
tttccgtagtgtagtggttatcacgttcgcctcac

SEQ ID NO: 30890 - DNA, 36 bp, Homo Sapiens
tttccgtagtgtagtggttatcacgttcgcctcaca

SEQ ID NO: 30891 - DNA, 37 bp, Homo Sapiens
tttccgtagtgtagtggttatcacgttcgcctcacac

SEQ ID NO: 30892 - DNA, 38 bp, Homo Sapiens
tttccgtagtgtagtggttatcacgttcgcctcacacg

SEQ ID NO: 30893 - DNA, 39 bp, Homo Sapiens
tttccgtagtgtagtggttatcacgttcgcctcacacgc

SEQ ID NO: 30894 - DNA, 40 bp, Homo Sapiens
tttccgtagtgtagtggttatcacgttcgcctcacacgcg

SEQ ID NO: 30895 - DNA, 41 bp, Homo Sapiens
tttccgtagtgtagtggttatcacgttcgcctcacacgcga

SEQ ID NO: 30896 - DNA, 32 bp, Homo Sapiens
tttccgtagtgtagtggttatcacgtttgcct

SEQ ID NO: 30897 - DNA, 32 bp, Homo Sapiens
tttccgtggtgtagtggttatcacattcgcct

SEQ ID NO: 30898 - DNA, 16 bp, Homo Sapiens
tttcgactcattaaat

SEQ ID NO: 30899 - DNA, 17 bp, Homo Sapiens
tttcgactcattaaatt

SEQ ID NO: 30900 - DNA, 19 bp, Homo Sapiens
tttcgactcattaaattat

SEQ ID NO: 30901 - DNA, 20 bp, Homo Sapiens
tttcgactcattaaattatg

SEQ ID NO: 30902 - DNA, 21 bp, Homo Sapiens
tttcgactcattaaattatga

SEQ ID NO: 30903 - DNA, 22 bp, Homo Sapiens
tttcgactcattaaattatgat

SEQ ID NO: 30904 - DNA, 23 bp, Homo Sapiens
tttcgactcattaaattatgata

SEQ ID NO: 30905 - DNA, 24 bp, Homo Sapiens
tttcgactcattaaattatgataa

SEQ ID NO: 30906 - DNA, 25 bp, Homo Sapiens
tttcgactcattaaattatgataat

SEQ ID NO: 30907 - DNA, 26 bp, Homo Sapiens
tttcgactcattaaattatgataatc

SEQ ID NO: 30908 - DNA, 27 bp, Homo Sapiens
tttcgactcattaaattatgataatca

SEQ ID NO: 30909 - DNA, 28 bp, Homo Sapiens
tttcgactcattaaattatgataatcat

SEQ ID NO: 30910 - DNA, 29 bp, Homo Sapiens
tttcgactcattaaattatgataatcata

SEQ ID NO: 30911 - DNA, 31 bp, Homo Sapiens
tttcgactcattaaattatgataatcatatt

SEQ ID NO: 30912 - DNA, 32 bp, Homo Sapiens
tttcgactcattaaattatgataatcatattt

SEQ ID NO: 30913 - DNA, 33 bp, Homo Sapiens
tttcgactcattaaattatgataatcatattta

SEQ ID NO: 30914 - DNA, 34 bp, Homo Sapiens
tttcgactcattaaattatgataatcatatttac

SEQ ID NO: 30915 - DNA, 35 bp, Homo Sapiens
tttcgactcattaaattatgataatcatatttacc

SEQ ID NO: 30916 - DNA, 36 bp, Homo Sapiens
tttcgactcattaaattatgataatcatatttacca

SEQ ID NO: 30917 - DNA, 37 bp, Homo Sapiens
tttcgactcattaaattatgataatcatatttaccaa

SEQ ID NO: 30918 - DNA, 38 bp, Homo Sapiens
tttcgactcattaaattatgataatcatatttaccaac

SEQ ID NO: 30919 - DNA, 39 bp, Homo Sapiens
tttcgactcattaaattatgataatcatatttaccaacc

SEQ ID NO: 30920 - DNA, 40 bp, Homo Sapiens
tttcgactcattaaattatgataatcatatttaccaacca

SEQ ID NO: 30921 - DNA, 16 bp, Homo Sapiens
tttcgatggcgtgggt

SEQ ID NO: 30922 - DNA, 32 bp, Homo Sapiens
tttcgatggcgtgggttcgaatcccaccgctg

SEQ ID NO: 30923 - DNA, 37 bp, Homo Sapiens
tttcgatggcgtgggttcgaatcccaccgctgccacc

SEQ ID NO: 30924 - DNA, 19 bp, Homo Sapiens
tttgaatccagcgatccga

SEQ ID NO: 30925 - DNA, 20 bp, Homo Sapiens
tttgaatccagcgatccgag

SEQ ID NO: 30926 - DNA, 21 bp, Homo Sapiens
tttgaatccagcgatccgagt

SEQ ID NO: 30927 - DNA, 22 bp, Homo Sapiens
tttgaatccagcgatccgagtt

SEQ ID NO: 30928 - DNA, 23 bp, Homo Sapiens
tttgaatccagcgatccgagttc

SEQ ID NO: 30929 - DNA, 41 bp, Homo Sapiens
tttgaatccagcgatccgagttcaaatctcggtgggacctc

SEQ ID NO: 30930 - DNA, 20 bp, Homo Sapiens
tttgacaacattcaaaaaag

SEQ ID NO: 30931 - DNA, 23 bp, Homo Sapiens
tttgacaacattcaaaaaagagt

SEQ ID NO: 30932 - DNA, 24 bp, Homo Sapiens
tttgacaacattcaaaaaagagta

SEQ ID NO: 30933 - DNA, 25 bp, Homo Sapiens
tttgacaacattcaaaaaagagtac

SEQ ID NO: 30934 - DNA, 26 bp, Homo Sapiens
tttgacaacattcaaaaaagagtacc

SEQ ID NO: 30935 - DNA, 27 bp, Homo Sapiens
tttgacaacattcaaaaaagagtacca

SEQ ID NO: 30936 - DNA, 24 bp, Homo Sapiens
tttgactgcagatcaagaggtccc

SEQ ID NO: 30937 - DNA, 16 bp, Homo Sapiens
tttgatagagtaaata

SEQ ID NO: 30938 - DNA, 18 bp, Homo Sapiens
tttgatagagtaaataat

SEQ ID NO: 30939 - DNA, 20 bp, Homo Sapiens
tttgatagagtaaataatag

SEQ ID NO: 30940 - DNA, 21 bp, Homo Sapiens
tttgatagagtaaataatagg

SEQ ID NO: 30941 - DNA, 22 bp, Homo Sapiens
tttgatagagtaaataatagga

SEQ ID NO: 30942 - DNA, 23 bp, Homo Sapiens
tttgatagagtaaataataggag

SEQ ID NO: 30943 - DNA, 24 bp, Homo Sapiens
tttgatagagtaaataataggagc

SEQ ID NO: 30944 - DNA, 25 bp, Homo Sapiens
tttgatagagtaaataataggagct

SEQ ID NO: 30945 - DNA, 26 bp, Homo Sapiens
tttgatagagtaaataataggagctt

SEQ ID NO: 30946 - DNA, 27 bp, Homo Sapiens
tttgatagagtaaataataggagctta

SEQ ID NO: 30947 - DNA, 28 bp, Homo Sapiens
tttgatagagtaaataataggagcttaa

SEQ ID NO: 30948 - DNA, 29 bp, Homo Sapiens
tttgatagagtaaataataggagcttaaa

SEQ ID NO: 30949 - DNA, 30 bp, Homo Sapiens
tttgatagagtaaataataggagcttaaac

SEQ ID NO: 30950 - DNA, 31 bp, Homo Sapiens
tttgatagagtaaataataggagcttaaacc

SEQ ID NO: 30951 - DNA, 32 bp, Homo Sapiens
tttgatagagtaaataataggagcttaaaccc

SEQ ID NO: 30952 - DNA, 33 bp, Homo Sapiens
tttgatagagtaaataataggagcttaaacccc

SEQ ID NO: 30953 - DNA, 34 bp, Homo Sapiens
tttgatagagtaaataataggagcttaaaccccc

SEQ ID NO: 30954 - DNA, 35 bp, Homo Sapiens
tttgatagagtaaataataggagcttaaaccccct

SEQ ID NO: 30955 - DNA, 36 bp, Homo Sapiens
tttgatagagtaaataataggagcttaaaccccctt

SEQ ID NO: 30956 - DNA, 37 bp, Homo Sapiens
tttgatagagtaaataataggagcttaaaccccctta

SEQ ID NO: 30957 - DNA, 39 bp, Homo Sapiens
tttgatagagtaaataataggagcttaaacccccttatt

SEQ ID NO: 30958 - DNA, 40 bp, Homo Sapiens
tttgatagagtaaataataggagcttaaacccccttattt

SEQ ID NO: 30959 - DNA, 45 bp, Homo Sapiens
tttgatagagtaaataataggagcttaaacccccttatttctacc

SEQ ID NO: 30960 - DNA, 16 bp, Homo Sapiens
tttgattcccggtcag

SEQ ID NO: 30961 - DNA, 16 bp, Homo Sapiens
tttgcacgcgtgggtt

SEQ ID NO: 30962 - DNA, 21 bp, Homo Sapiens
tttgcacgcgtgggttcgaat

SEQ ID NO: 30963 - DNA, 23 bp, Homo Sapiens
tttgcacgcgtgggttcgaatcc

SEQ ID NO: 30964 - DNA, 24 bp, Homo Sapiens
tttgcacgcgtgggttcgaatccc

SEQ ID NO: 30965 - DNA, 27 bp, Homo Sapiens
tttgcacgcgtgggttcgaatcccatc

SEQ ID NO: 30966 - DNA, 31 bp, Homo Sapiens
tttgcacgcgtgggttcgaatcccatcctcg

SEQ ID NO: 30967 - DNA, 35 bp, Homo Sapiens
tttgcacgcgtgggttcgaatcccatcctcgtcgc

SEQ ID NO: 30968 - DNA, 36 bp, Homo Sapiens
tttgcacgcgtgggttcgaatcccatcctcgtcgcc

SEQ ID NO: 30969 - DNA, 37 bp, Homo Sapiens
tttgcacgcgtgggttcgaatcccatcctcgtcgcca

SEQ ID NO: 30970 - DNA, 18 bp, Homo Sapiens
tttgcacgtatgaggccc

SEQ ID NO: 30971 - DNA, 19 bp, Homo Sapiens
tttgcacgtatgaggcccc

SEQ ID NO: 30972 - DNA, 20 bp, Homo Sapiens
tttgcacgtatgaggccccg

SEQ ID NO: 30973 - DNA, 21 bp, Homo Sapiens
tttgcacgtatgaggccccgg

SEQ ID NO: 30974 - DNA, 22 bp, Homo Sapiens
tttgcacgtatgaggccccggg

SEQ ID NO: 30975 - DNA, 23 bp, Homo Sapiens
tttgcacgtatgaggccccgggt

SEQ ID NO: 30976 - DNA, 39 bp, Homo Sapiens
tttgcacgtatgaggccccgggttcaatccccggcatct

SEQ ID NO: 30977 - DNA, 16 bp, Homo Sapiens
tttgcagtccttacca

SEQ ID NO: 30978 - DNA, 17 bp, Homo Sapiens
tttgcgttcagttgatg

SEQ ID NO: 30979 - DNA, 18 bp, Homo Sapiens
tttgcgttcagttgatgc

SEQ ID NO: 30980 - DNA, 18 bp, Homo Sapiens
tttggattctcagggatg

SEQ ID NO: 30981 - DNA, 38 bp, Homo Sapiens
tttggattctcagggatgggttcgattctcatagtcct

SEQ ID NO: 30982 - DNA, 40 bp, Homo Sapiens
tttggattctcagggatgggttcgattctcatagtcctag

SEQ ID NO: 30983 - DNA, 41 bp, Homo Sapiens
tttggattctcagggatgggttcgattctcatagtcctagc

SEQ ID NO: 30984 - DNA, 42 bp, Homo Sapiens
tttggattctcagggatgggttcgattctcatagtcctagcc

SEQ ID NO: 30985 - DNA, 18 bp, Homo Sapiens
tttggggggttcgattcc

SEQ ID NO: 30986 - DNA, 19 bp, Homo Sapiens
tttggggggttcgattcct

SEQ ID NO: 30987 - DNA, 21 bp, Homo Sapiens
tttggggggttcgattccttc

SEQ ID NO: 30988 - DNA, 29 bp, Homo Sapiens
tttggggggttcgattccttccttttttg

SEQ ID NO: 30989 - DNA, 31 bp, Homo Sapiens
tttggggggttcgattccttccttttttgcc

SEQ ID NO: 30990 - DNA, 32 bp, Homo Sapiens
tttggggggttcgattccttccttttttgcca

SEQ ID NO: 30991 - DNA, 18 bp, Homo Sapiens
tttgggtccgagaggtcc

SEQ ID NO: 30992 - DNA, 19 bp, Homo Sapiens
tttgggtccgagaggtccc

SEQ ID NO: 30993 - DNA, 21 bp, Homo Sapiens
tttgggtccgagaggtcccgg

SEQ ID NO: 30994 - DNA, 18 bp, Homo Sapiens
tttgggtgcgagaggtcc

SEQ ID NO: 30995 - DNA, 19 bp, Homo Sapiens
tttgggtgcgagaggtccc

SEQ ID NO: 30996 - DNA, 20 bp, Homo Sapiens
tttgggtgcgagaggtcccg

SEQ ID NO: 30997 - DNA, 21 bp, Homo Sapiens
tttgggtgcgagaggtcccgg

SEQ ID NO: 30998 - DNA, 22 bp, Homo Sapiens
tttgggtgcgagaggtcccggg

SEQ ID NO: 30999 - DNA, 23 bp, Homo Sapiens
tttgggtgcgagaggtcccgggt

SEQ ID NO: 31000 - DNA, 24 bp, Homo Sapiens
tttgggtgcgagaggtcccgggtt

SEQ ID NO: 31001 - DNA, 26 bp, Homo Sapiens
tttgggtgcgagaggtcccgggttca

SEQ ID NO: 31002 - DNA, 22 bp, Homo Sapiens
tttgggtgctaatggtggagtt

SEQ ID NO: 31003 - DNA, 23 bp, Homo Sapiens
tttgggtgctaatggtggagtta

SEQ ID NO: 31004 - DNA, 24 bp, Homo Sapiens
tttgggtgctaatggtggagttaa

SEQ ID NO: 31005 - DNA, 25 bp, Homo Sapiens
tttgggtgctaatggtggagttaaa

SEQ ID NO: 31006 - DNA, 26 bp, Homo Sapiens
tttgggtgctaatggtggagttaaag

SEQ ID NO: 31007 - DNA, 27 bp, Homo Sapiens
tttgggtgctaatggtggagttaaaga

SEQ ID NO: 31008 - DNA, 28 bp, Homo Sapiens
tttgggtgctaatggtggagttaaagac

SEQ ID NO: 31009 - DNA, 29 bp, Homo Sapiens
tttgggtgctaatggtggagttaaagact

SEQ ID NO: 31010 - DNA, 30 bp, Homo Sapiens
tttgggtgctaatggtggagttaaagactt

SEQ ID NO: 31011 - DNA, 31 bp, Homo Sapiens
tttgggtgctaatggtggagttaaagacttt

SEQ ID NO: 31012 - DNA, 32 bp, Homo Sapiens
tttgggtgctaatggtggagttaaagactttt

SEQ ID NO: 31013 - DNA, 35 bp, Homo Sapiens
tttgggtgctaatggtggagttaaagactttttct

SEQ ID NO: 31014 - DNA, 39 bp, Homo Sapiens
tttgggtgctaatggtggagttaaagactttttctctga

SEQ ID NO: 31015 - DNA, 40 bp, Homo Sapiens
tttgggtgctaatggtggagttaaagactttttctctgac

SEQ ID NO: 31016 - DNA, 41 bp, Homo Sapiens
tttgggtgctaatggtggagttaaagactttttctctgacc

SEQ ID NO: 31017 - DNA, 42 bp, Homo Sapiens
tttgggtgctaatggtggagttaaagactttttctctgacca

SEQ ID NO: 31018 - DNA, 18 bp, Homo Sapiens
tttggtgcaactccaaat

SEQ ID NO: 31019 - DNA, 24 bp, Homo Sapiens
tttggtgcaactccaaataaaagt

SEQ ID NO: 31020 - DNA, 25 bp, Homo Sapiens
tttggtgcaactccaaataaaagta

SEQ ID NO: 31021 - DNA, 26 bp, Homo Sapiens
tttggtgcaactccaaataaaagtac

SEQ ID NO: 31022 - DNA, 27 bp, Homo Sapiens
tttggtgcaactccaaataaaagtacc

SEQ ID NO: 31023 - DNA, 28 bp, Homo Sapiens
tttggtgcaactccaaataaaagtacca

SEQ ID NO: 31024 - DNA, 16 bp, Homo Sapiens
tttgtcaaagttaaat

SEQ ID NO: 31025 - DNA, 17 bp, Homo Sapiens
tttgtcaaagttaaatt

SEQ ID NO: 31026 - DNA, 19 bp, Homo Sapiens
tttgtcaaagttaaattat

SEQ ID NO: 31027 - DNA, 20 bp, Homo Sapiens
tttgtcaaagttaaattata

SEQ ID NO: 31028 - DNA, 21 bp, Homo Sapiens
tttgtcaaagttaaattatag

SEQ ID NO: 31029 - DNA, 22 bp, Homo Sapiens
tttgtcaaagttaaattatagg

SEQ ID NO: 31030 - DNA, 23 bp, Homo Sapiens
tttgtcaaagttaaattataggc

SEQ ID NO: 31031 - DNA, 24 bp, Homo Sapiens
tttgtcaaagttaaattataggct

SEQ ID NO: 31032 - DNA, 25 bp, Homo Sapiens
tttgtcaaagttaaattataggcta

SEQ ID NO: 31033 - DNA, 26 bp, Homo Sapiens
tttgtcaaagttaaattataggctaa

SEQ ID NO: 31034 - DNA, 27 bp, Homo Sapiens
tttgtcaaagttaaattataggctaaa

SEQ ID NO: 31035 - DNA, 30 bp, Homo Sapiens
tttgtcaaagttaaattataggctaaatcc

SEQ ID NO: 31036 - DNA, 31 bp, Homo Sapiens
tttgtcaaagttaaattataggctaaatcct

SEQ ID NO: 31037 - DNA, 34 bp, Homo Sapiens
tttgtcaaagttaaattataggctaaatcctata

SEQ ID NO: 31038 - DNA, 36 bp, Homo Sapiens
tttgtcaaagttaaattataggctaaatcctatata

SEQ ID NO: 31039 - DNA, 38 bp, Homo Sapiens
tttgtcaaagttaaattataggctaaatcctatatatc

SEQ ID NO: 31040 - DNA, 39 bp, Homo Sapiens
tttgtcaaagttaaattataggctaaatcctatatatct

SEQ ID NO: 31041 - DNA, 40 bp, Homo Sapiens
tttgtcaaagttaaattataggctaaatcctatatatctt

SEQ ID NO: 31042 - DNA, 42 bp, Homo Sapiens
tttgtcaaagttaaattataggctaaatcctatatatcttac

SEQ ID NO: 31043 - DNA, 43 bp, Homo Sapiens
tttgtcaaagttaaattataggctaaatcctatatatcttacc

SEQ ID NO: 31044 - DNA, 44 bp, Homo Sapiens
tttgtcaaagttaaattataggctaaatcctatatatcttacca

SEQ ID NO: 31045 - DNA, 16 bp, Homo Sapiens
tttgtgggtttaagtc

SEQ ID NO: 31046 - DNA, 17 bp, Homo Sapiens
tttgtgggtttaagtcc

SEQ ID NO: 31047 - DNA, 25 bp, Homo Sapiens
tttgtgggtttaagtcccattggtc

SEQ ID NO: 31048 - DNA, 26 bp, Homo Sapiens
tttgtgggtttaagtcccattggtct

SEQ ID NO: 31049 - DNA, 27 bp, Homo Sapiens
tttgtgggtttaagtcccattggtcta

SEQ ID NO: 31050 - DNA, 28 bp, Homo Sapiens
tttgtgggtttaagtcccattggtctag

SEQ ID NO: 31051 - DNA, 29 bp, Homo Sapiens
tttgtgggtttaagtcccattggtctagc

SEQ ID NO: 31052 - DNA, 30 bp, Homo Sapiens
tttgtgggtttaagtcccattggtctagcc

SEQ ID NO: 31053 - DNA, 31 bp, Homo Sapiens
tttgtgggtttaagtcccattggtctagcca

SEQ ID NO: 31054 - DNA, 16 bp, Homo Sapiens
ttttaaaggataacag

SEQ ID NO: 31055 - DNA, 17 bp, Homo Sapiens
ttttaaaggataacagc

SEQ ID NO: 31056 - DNA, 18 bp, Homo Sapiens
ttttaaaggataacagct

SEQ ID NO: 31057 - DNA, 19 bp, Homo Sapiens
ttttaaaggataacagcta

SEQ ID NO: 31058 - DNA, 24 bp, Homo Sapiens
ttttaaaggataacagctatccat

SEQ ID NO: 31059 - DNA, 25 bp, Homo Sapiens
ttttaaaggataacagctatccatt

SEQ ID NO: 31060 - DNA, 26 bp, Homo Sapiens
ttttaaaggataacagctatccattg

SEQ ID NO: 31061 - DNA, 27 bp, Homo Sapiens
ttttaaaggataacagctatccattgg

SEQ ID NO: 31062 - DNA, 28 bp, Homo Sapiens
ttttaaaggataacagctatccattggt

SEQ ID NO: 31063 - DNA, 29 bp, Homo Sapiens
ttttaaaggataacagctatccattggtc

SEQ ID NO: 31064 - DNA, 30 bp, Homo Sapiens
ttttaaaggataacagctatccattggtct

SEQ ID NO: 31065 - DNA, 31 bp, Homo Sapiens
ttttaaaggataacagctatccattggtctt

SEQ ID NO: 31066 - DNA, 32 bp, Homo Sapiens
ttttaaaggataacagctatccattggtctta

SEQ ID NO: 31067 - DNA, 33 bp, Homo Sapiens
ttttaaaggataacagctatccattggtcttag

SEQ ID NO: 31068 - DNA, 36 bp, Homo Sapiens
ttttaaaggataacagctatccattggtcttaggcc

SEQ ID NO: 31069 - DNA, 37 bp, Homo Sapiens
ttttaaaggataacagctatccattggtcttaggccc

SEQ ID NO: 31070 - DNA, 38 bp, Homo Sapiens
ttttaaaggataacagctatccattggtcttaggcccc

SEQ ID NO: 31071 - DNA, 21 bp, Homo Sapiens
ttttaagttaaagattaagag

SEQ ID NO: 31072 - DNA, 22 bp, Homo Sapiens
ttttaagttaaagattaagaga

SEQ ID NO: 31073 - DNA, 23 bp, Homo Sapiens
ttttaagttaaagattaagagaa

SEQ ID NO: 31074 - DNA, 24 bp, Homo Sapiens
ttttaagttaaagattaagagaac

SEQ ID NO: 31075 - DNA, 25 bp, Homo Sapiens
ttttaagttaaagattaagagaacc

SEQ ID NO: 31076 - DNA, 26 bp, Homo Sapiens
ttttaagttaaagattaagagaacca

SEQ ID NO: 31077 - DNA, 27 bp, Homo Sapiens
ttttaagttaaagattaagagaaccaa

SEQ ID NO: 31078 - DNA, 28 bp, Homo Sapiens
ttttaagttaaagattaagagaaccaac

SEQ ID NO: 31079 - DNA, 29 bp, Homo Sapiens
ttttaagttaaagattaagagaaccaaca

SEQ ID NO: 31080 - DNA, 30 bp, Homo Sapiens
ttttaagttaaagattaagagaaccaacac

SEQ ID NO: 31081 - DNA, 31 bp, Homo Sapiens
ttttaagttaaagattaagagaaccaacacc

SEQ ID NO: 31082 - DNA, 32 bp, Homo Sapiens
ttttaagttaaagattaagagaaccaacacct

SEQ ID NO: 31083 - DNA, 33 bp, Homo Sapiens
ttttaagttaaagattaagagaaccaacacctc

SEQ ID NO: 31084 - DNA, 34 bp, Homo Sapiens
ttttaagttaaagattaagagaaccaacacctct

SEQ ID NO: 31085 - DNA, 35 bp, Homo Sapiens
ttttaagttaaagattaagagaaccaacacctctt

SEQ ID NO: 31086 - DNA, 36 bp, Homo Sapiens
ttttaagttaaagattaagagaaccaacacctcttt

SEQ ID NO: 31087 - DNA, 37 bp, Homo Sapiens
ttttaagttaaagattaagagaaccaacacctcttta

SEQ ID NO: 31088 - DNA, 40 bp, Homo Sapiens
ttttaagttaaagattaagagaaccaacacctctttacag

SEQ ID NO: 31089 - DNA, 41 bp, Homo Sapiens
ttttaagttaaagattaagagaaccaacacctctttacagt

SEQ ID NO: 31090 - DNA, 42 bp, Homo Sapiens
ttttaagttaaagattaagagaaccaacacctctttacagtg

SEQ ID NO: 31091 - DNA, 43 bp, Homo Sapiens
ttttaagttaaagattaagagaaccaacacctctttacagtga

SEQ ID NO: 31092 - DNA, 44 bp, Homo Sapiens
ttttaagttaaagattaagagaaccaacacctctttacagtgac

SEQ ID NO: 31093 - DNA, 45 bp, Homo Sapiens
ttttaagttaaagattaagagaaccaacacctctttacagtgacc

SEQ ID NO: 31094 - DNA, 46 bp, Homo Sapiens
ttttaagttaaagattaagagaaccaacacctctttacagtgacca

SEQ ID NO: 31095 - DNA, 17 bp, Homo Sapiens
ttttaatctgagggtcc

SEQ ID NO: 31096 - DNA, 18 bp, Homo Sapiens
ttttaatctgagggtcca

SEQ ID NO: 31097 - DNA, 33 bp, Homo Sapiens
ttttaatctgagggtccagggttcaagtccctg

SEQ ID NO: 31098 - DNA, 36 bp, Homo Sapiens
ttttaatctgagggtccagggttcatgtccctgttc

SEQ ID NO: 31099 - DNA, 25 bp, Homo Sapiens
ttttagtataaatagtaccgttaac

SEQ ID NO: 31100 - DNA, 26 bp, Homo Sapiens
ttttagtataaatagtaccgttaact

SEQ ID NO: 31101 - DNA, 27 bp, Homo Sapiens
ttttagtataaatagtaccgttaactt

SEQ ID NO: 31102 - DNA, 28 bp, Homo Sapiens
ttttagtataaatagtaccgttaacttc

SEQ ID NO: 31103 - DNA, 29 bp, Homo Sapiens
ttttagtataaatagtaccgttaacttcc

SEQ ID NO: 31104 - DNA, 16 bp, Homo Sapiens
ttttcacccaggcggc

SEQ ID NO: 31105 - DNA, 21 bp, Homo Sapiens
ttttcacccaggcggcccggg

SEQ ID NO: 31106 - DNA, 32 bp, Homo Sapiens
ttttcacccaggcggcccgggttcgactcccg

SEQ ID NO: 31107 - DNA, 35 bp, Homo Sapiens
ttttcacccaggcggcccgggttcgactcccggtg

SEQ ID NO: 31108 - DNA, 36 bp, Homo Sapiens
ttttcacccaggcggcccgggttcgactcccggtgt

SEQ ID NO: 31109 - DNA, 37 bp, Homo Sapiens
ttttcacccaggcggcccgggttcgactcccggtgtg

SEQ ID NO: 31110 - DNA, 38 bp, Homo Sapiens
ttttcacccaggcggcccgggttcgactcccggtgtgg

SEQ ID NO: 31111 - DNA, 40 bp, Homo Sapiens
ttttcacccaggcggcccgggttcgactcccggtgtggga

SEQ ID NO: 31112 - DNA, 41 bp, Homo Sapiens
ttttcacccaggcggcccgggttcgactcccggtgtgggaa

SEQ ID NO: 31113 - DNA, 42 bp, Homo Sapiens
ttttcacccaggcggcccgggttcgactcccggtgtgggaac

SEQ ID NO: 31114 - DNA, 43 bp, Homo Sapiens
ttttcacccaggcggcccgggttcgactcccggtgtgggaacc

SEQ ID NO: 31115 - DNA, 44 bp, Homo Sapiens
ttttcacccaggcggcccgggttcgactcccggtgtgggaacca

SEQ ID NO: 31116 - DNA, 43 bp, Homo Sapiens
ttttcacccaggtggcccgggttcgactcccggtatgggaacc

SEQ ID NO: 31117 - DNA, 16 bp, Homo Sapiens
ttttcatatcattggt

SEQ ID NO: 31118 - DNA, 17 bp, Homo Sapiens
ttttcatatcattggtc

SEQ ID NO: 31119 - DNA, 18 bp, Homo Sapiens
ttttcatatcattggtcg

SEQ ID NO: 31120 - DNA, 19 bp, Homo Sapiens
ttttcatatcattggtcgt

SEQ ID NO: 31121 - DNA, 20 bp, Homo Sapiens
ttttcatatcattggtcgtg

SEQ ID NO: 31122 - DNA, 21 bp, Homo Sapiens
ttttcatatcattggtcgtgg

SEQ ID NO: 31123 - DNA, 22 bp, Homo Sapiens
ttttcatatcattggtcgtggt

SEQ ID NO: 31124 - DNA, 23 bp, Homo Sapiens
ttttcatatcattggtcgtggtt

SEQ ID NO: 31125 - DNA, 24 bp, Homo Sapiens
ttttcatatcattggtcgtggttg

SEQ ID NO: 31126 - DNA, 25 bp, Homo Sapiens
ttttcatatcattggtcgtggttgt

SEQ ID NO: 31127 - DNA, 26 bp, Homo Sapiens
ttttcatatcattggtcgtggttgta

SEQ ID NO: 31128 - DNA, 27 bp, Homo Sapiens
ttttcatatcattggtcgtggttgtag

SEQ ID NO: 31129 - DNA, 28 bp, Homo Sapiens
ttttcatatcattggtcgtggttgtagt

SEQ ID NO: 31130 - DNA, 29 bp, Homo Sapiens
ttttcatatcattggtcgtggttgtagtc

SEQ ID NO: 31131 - DNA, 30 bp, Homo Sapiens
ttttcatatcattggtcgtggttgtagtcc

SEQ ID NO: 31132 - DNA, 31 bp, Homo Sapiens
ttttcatatcattggtcgtggttgtagtccg

SEQ ID NO: 31133 - DNA, 32 bp, Homo Sapiens
ttttcatatcattggtcgtggttgtagtccgt

SEQ ID NO: 31134 - DNA, 33 bp, Homo Sapiens
ttttcatatcattggtcgtggttgtagtccgtg

SEQ ID NO: 31135 - DNA, 34 bp, Homo Sapiens
ttttcatatcattggtcgtggttgtagtccgtgc

SEQ ID NO: 31136 - DNA, 35 bp, Homo Sapiens
ttttcatatcattggtcgtggttgtagtccgtgcg

SEQ ID NO: 31137 - DNA, 36 bp, Homo Sapiens
ttttcatatcattggtcgtggttgtagtccgtgcga

SEQ ID NO: 31138 - DNA, 37 bp, Homo Sapiens
ttttcatatcattggtcgtggttgtagtccgtgcgag

SEQ ID NO: 31139 - DNA, 38 bp, Homo Sapiens
ttttcatatcattggtcgtggttgtagtccgtgcgaga

SEQ ID NO: 31140 - DNA, 39 bp, Homo Sapiens
ttttcatatcattggtcgtggttgtagtccgtgcgagaa

SEQ ID NO: 31141 - DNA, 40 bp, Homo Sapiens
ttttcatatcattggtcgtggttgtagtccgtgcgagaat

SEQ ID NO: 31142 - DNA, 41 bp, Homo Sapiens
ttttcatatcattggtcgtggttgtagtccgtgcgagaata

SEQ ID NO: 31143 - DNA, 42 bp, Homo Sapiens
ttttcatatcattggtcgtggttgtagtccgtgcgagaatac

SEQ ID NO: 31144 - DNA, 43 bp, Homo Sapiens
ttttcatatcattggtcgtggttgtagtccgtgcgagaatacc

SEQ ID NO: 31145 - DNA, 44 bp, Homo Sapiens
ttttcatatcattggtcgtggttgtagtccgtgcgagaatacca

SEQ ID NO: 31146 - DNA, 17 bp, Homo Sapiens
ttttcatattgaattgc

SEQ ID NO: 31147 - DNA, 18 bp, Homo Sapiens
ttttcatattgaattgca

SEQ ID NO: 31148 - DNA, 23 bp, Homo Sapiens
ttttcatattgaattgcaaattc

SEQ ID NO: 31149 - DNA, 25 bp, Homo Sapiens
ttttcatattgaattgcaaattcga

SEQ ID NO: 31150 - DNA, 26 bp, Homo Sapiens
ttttcatattgaattgcaaattcgaa

SEQ ID NO: 31151 - DNA, 16 bp, Homo Sapiens
ttttccaaggacacca

SEQ ID NO: 31152 - DNA, 24 bp, Homo Sapiens
ttttgacaacattcaaaaaagagt

SEQ ID NO: 31153 - DNA, 26 bp, Homo Sapiens
ttttgacaacattcaaaaaagagtac

SEQ ID NO: 31154 - DNA, 27 bp, Homo Sapiens
ttttgacaacattcaaaaaagagtacc

SEQ ID NO: 31155 - DNA, 28 bp, Homo Sapiens
ttttgacaacattcaaaaaagagtacca

SEQ ID NO: 31156 - DNA, 16 bp, Homo Sapiens
ttttgcagtccttacc

SEQ ID NO: 31157 - DNA, 17 bp, Homo Sapiens
ttttgcagtccttacca

SEQ ID NO: 31158 - DNA, 18 bp, Homo Sapiens
ttttggattctcagggat

SEQ ID NO: 31159 - DNA, 41 bp, Homo Sapiens
ttttggattctcagggatgggttcgattctcatagtcctag

SEQ ID NO: 31160 - DNA, 42 bp, Homo Sapiens
ttttggattctcagggatgggttcgattctcatagtcctagc

SEQ ID NO: 31161 - DNA, 43 bp, Homo Sapiens
ttttggattctcagggatgggttcgattctcatagtcctagcc

SEQ ID NO: 31162 - DNA, 16 bp, Homo Sapiens
ttttggtgcaactcca

SEQ ID NO: 31163 - DNA, 20 bp, Homo Sapiens
ttttggtgcaactccaaata

SEQ ID NO: 31164 - DNA, 26 bp, Homo Sapiens
ttttggtgcaactccaaataaaagta

SEQ ID NO: 31165 - DNA, 27 bp, Homo Sapiens
ttttggtgcaactccaaataaaagtac

SEQ ID NO: 31166 - DNA, 28 bp, Homo Sapiens
ttttggtgcaactccaaataaaagtacc

SEQ ID NO: 31167 - DNA, 29 bp, Homo Sapiens
ttttggtgcaactccaaataaaagtacca

SEQ ID NO: 31168 - DNA, 16 bp, Homo Sapiens
tttttcatatcattgg

SEQ ID NO: 31169 - DNA, 17 bp, Homo Sapiens
tttttcatatcattggt

SEQ ID NO: 31170 - DNA, 18 bp, Homo Sapiens
tttttcatatcattggtc

SEQ ID NO: 31171 - DNA, 19 bp, Homo Sapiens
tttttcatatcattggtcg

SEQ ID NO: 31172 - DNA, 20 bp, Homo Sapiens
tttttcatatcattggtcgt

SEQ ID NO: 31173 - DNA, 21 bp, Homo Sapiens
tttttcatatcattggtcgtg

SEQ ID NO: 31174 - DNA, 22 bp, Homo Sapiens
tttttcatatcattggtcgtgg

SEQ ID NO: 31175 - DNA, 23 bp, Homo Sapiens
tttttcatatcattggtcgtggt

SEQ ID NO: 31176 - DNA, 24 bp, Homo Sapiens
tttttcatatcattggtcgtggtt

SEQ ID NO: 31177 - DNA, 25 bp, Homo Sapiens
tttttcatatcattggtcgtggttg

SEQ ID NO: 31178 - DNA, 26 bp, Homo Sapiens
tttttcatatcattggtcgtggttgt

SEQ ID NO: 31179 - DNA, 27 bp, Homo Sapiens
tttttcatatcattggtcgtggttgta

SEQ ID NO: 31180 - DNA, 29 bp, Homo Sapiens
tttttcatatcattggtcgtggttgtagt

SEQ ID NO: 31181 - DNA, 30 bp, Homo Sapiens
tttttcatatcattggtcgtggttgtagtc

SEQ ID NO: 31182 - DNA, 31 bp, Homo Sapiens
tttttcatatcattggtcgtggttgtagtcc

SEQ ID NO: 31183 - DNA, 32 bp, Homo Sapiens
tttttcatatcattggtcgtggttgtagtccg

SEQ ID NO: 31184 - DNA, 33 bp, Homo Sapiens
tttttcatatcattggtcgtggttgtagtccgt

SEQ ID NO: 31185 - DNA, 34 bp, Homo Sapiens
tttttcatatcattggtcgtggttgtagtccgtg

SEQ ID NO: 31186 - DNA, 35 bp, Homo Sapiens
tttttcatatcattggtcgtggttgtagtccgtgc

SEQ ID NO: 31187 - DNA, 36 bp, Homo Sapiens
tttttcatatcattggtcgtggttgtagtccgtgcg

SEQ ID NO: 31188 - DNA, 38 bp, Homo Sapiens
tttttcatatcattggtcgtggttgtagtccgtgcgag

SEQ ID NO: 31189 - DNA, 39 bp, Homo Sapiens
tttttcatatcattggtcgtggttgtagtccgtgcgaga

SEQ ID NO: 31190 - DNA, 40 bp, Homo Sapiens
tttttcatatcattggtcgtggttgtagtccgtgcgagaa

SEQ ID NO: 31191 - DNA, 41 bp, Homo Sapiens
tttttcatatcattggtcgtggttgtagtccgtgcgagaat

SEQ ID NO: 31192 - DNA, 42 bp, Homo Sapiens
tttttcatatcattggtcgtggttgtagtccgtgcgagaata

SEQ ID NO: 31193 - DNA, 43 bp, Homo Sapiens
tttttcatatcattggtcgtggttgtagtccgtgcgagaatac

SEQ ID NO: 31194 - DNA, 44 bp, Homo Sapiens
tttttcatatcattggtcgtggttgtagtccgtgcgagaatacc

SEQ ID NO: 31195 - DNA, 45 bp, Homo Sapiens
tttttcatatcattggtcgtggttgtagtccgtgcgagaatacca

SEQ ID NO: 31196 - DNA, 16 bp, Homo Sapiens
tttttccaaggacacc

SEQ ID NO: 31197 - DNA, 17 bp, Homo Sapiens
tttttccaaggacacca

SEQ ID NO: 31198 - DNA, 16 bp, Homo Sapiens
aaaaagtcatggaggc

SEQ ID NO: 31199 - DNA, 17 bp, Homo Sapiens
aaaaagtcatggaggcc

SEQ ID NO: 31200 - DNA, 19 bp, Homo Sapiens
aaaaattttggtgcaactc

SEQ ID NO: 31201 - DNA, 20 bp, Homo Sapiens
aaaacatcagattgtgaatc

SEQ ID NO: 31202 - DNA, 21 bp, Homo Sapiens
aaaacatcagattgtgaatct

SEQ ID NO: 31203 - DNA, 30 bp, Homo Sapiens; identical to SEQ ID NO: 42

SEQ ID NO: 31204 - DNA, 32 bp, Homo Sapiens; identical to SEQ ID NO: 44

SEQ ID NO: 31205 - DNA, 33 bp, Homo Sapiens; identical to SEQ ID NO: 45

SEQ ID NO: 31206 - DNA, 34 bp, Homo Sapiens; identical to SEQ ID NO: 46

SEQ ID NO: 31207 - DNA, 35 bp, Homo Sapiens; identical to SEQ ID NO: 47

SEQ ID NO: 31208 - DNA, 38 bp, Homo Sapiens; identical to SEQ ID NO: 50

SEQ ID NO: 31209 - DNA, 40 bp, Homo Sapiens; identical to SEQ ID NO: 52

SEQ ID NO: 31210 - DNA, 41 bp, Homo Sapiens; identical to SEQ ID NO: 53

SEQ ID NO: 31211 - DNA, 42 bp, Homo Sapiens; identical to SEQ ID NO: 54

SEQ ID NO: 31212 - DNA, 43 bp, Homo Sapiens; identical to SEQ ID NO: 55

SEQ ID NO: 31213 - DNA, 44 bp, Homo Sapiens; identical to SEQ ID NO: 56

SEQ ID NO: 31214 - DNA, 45 bp, Homo Sapiens; identical to SEQ ID NO: 57

SEQ ID NO: 31215 - DNA, 46 bp, Homo Sapiens; identical to SEQ ID NO: 58

SEQ ID NO: 31216 - DNA, 22 bp, Homo Sapiens
aaaacctttttccaaggacacc

SEQ ID NO: 31217 - DNA, 23 bp, Homo Sapiens
aaaacctttttccaaggacacca

SEQ ID NO: 31218 - DNA, 19 bp, Homo Sapiens
aaaacgaatgatttcgact

SEQ ID NO: 31219 - DNA, 20 bp, Homo Sapiens
aaaacgaatgatttcgactc

SEQ ID NO: 31220 - DNA, 28 bp, Homo Sapiens
aaaacttaaaactttacagtcagaggtt

SEQ ID NO: 31221 - DNA, 36 bp, Homo Sapiens; identical to SEQ ID NO: 104

SEQ ID NO: 31222 - DNA, 16 bp, Homo Sapiens
aaaagtcatggaggcc

SEQ ID NO: 31223 - DNA, 16 bp, Homo Sapiens
aaaatgttggttatac

SEQ ID NO: 31224 - DNA, 17 bp, Homo Sapiens
aaaatgttggttatacc

SEQ ID NO: 31225 - DNA, 18 bp, Homo Sapiens
aaaatgttggttataccc

SEQ ID NO: 31226 - DNA, 21 bp, Homo Sapiens
aaaatgttggttatacccttc

SEQ ID NO: 31227 - DNA, 22 bp, Homo Sapiens
aaaatgttggttatacccttcc

SEQ ID NO: 31228 - DNA, 24 bp, Homo Sapiens
aaaatgttggttatacccttcccg

SEQ ID NO: 31229 - DNA, 28 bp, Homo Sapiens
aaaatgttggttatacccttcccgtact

SEQ ID NO: 31230 - DNA, 29 bp, Homo Sapiens
aaaatgttggttatacccttcccgtacta

SEQ ID NO: 31231 - DNA, 30 bp, Homo Sapiens; identical to SEQ ID NO: 130

SEQ ID NO: 31232 - DNA, 31 bp, Homo Sapiens; identical to SEQ ID NO: 131

SEQ ID NO: 31233 - DNA, 32 bp, Homo Sapiens; identical to SEQ ID NO: 132

SEQ ID NO: 31234 - DNA, 17 bp, Homo Sapiens
aaaatgtttagacgggc

SEQ ID NO: 31235 - DNA, 18 bp, Homo Sapiens
aaaatgtttagacgggct

SEQ ID NO: 31236 - DNA, 19 bp, Homo Sapiens
aaaatgtttagacgggctc

SEQ ID NO: 31237 - DNA, 20 bp, Homo Sapiens
aaaatgtttagacgggctca

SEQ ID NO: 31238 - DNA, 21 bp, Homo Sapiens
aaaatgtttagacgggctcac

SEQ ID NO: 31239 - DNA, 22 bp, Homo Sapiens
aaaatgtttagacgggctcaca

SEQ ID NO: 31240 - DNA, 27 bp, Homo Sapiens
aaaatgtttagacgggctcacatcacc

SEQ ID NO: 31241 - DNA, 28 bp, Homo Sapiens
aaaatgtttagacgggctcacatcaccc

SEQ ID NO: 31242 - DNA, 29 bp, Homo Sapiens
aaaatgtttagacgggctcacatcacccc

SEQ ID NO: 31243 - DNA, 30 bp, Homo Sapiens; identical to SEQ ID NO: 147

SEQ ID NO: 31244 - DNA, 31 bp, Homo Sapiens; identical to SEQ ID NO: 148

SEQ ID NO: 31245 - DNA, 32 bp, Homo Sapiens; identical to SEQ ID NO: 149

SEQ ID NO: 31246 - DNA, 33 bp, Homo Sapiens; identical to SEQ ID NO: 150

SEQ ID NO: 31247 - DNA, 34 bp, Homo Sapiens; identical to SEQ ID NO: 151

SEQ ID NO: 31248 - DNA, 38 bp, Homo Sapiens; identical to SEQ ID NO: 154

SEQ ID NO: 31249 - DNA, 39 bp, Homo Sapiens; identical to SEQ ID NO: 155

SEQ ID NO: 31250 - DNA, 18 bp, Homo Sapiens
aaaattttggtgcaactc

SEQ ID NO: 31251 - DNA, 19 bp, Homo Sapiens
aaacatcagattgtgaatc

SEQ ID NO: 31252 - DNA, 20 bp, Homo Sapiens
aaacatcagattgtgaatct

SEQ ID NO: 31253 - DNA, 21 bp, Homo Sapiens
aaacatcagattgtgaatctg

SEQ ID NO: 31254 - DNA, 30 bp, Homo Sapiens; identical to SEQ ID NO: 204

SEQ ID NO: 31255 - DNA, 31 bp, Homo Sapiens; identical to SEQ ID NO: 205

SEQ ID NO: 31256 - DNA, 32 bp, Homo Sapiens; identical to SEQ ID NO: 206

SEQ ID NO: 31257 - DNA, 33 bp, Homo Sapiens; identical to SEQ ID NO: 207

SEQ ID NO: 31258 - DNA, 34 bp, Homo Sapiens; identical to SEQ ID NO: 208

SEQ ID NO: 31259 - DNA, 35 bp, Homo Sapiens; identical to SEQ ID NO: 209

SEQ ID NO: 31260 - DNA, 37 bp, Homo Sapiens; identical to SEQ ID NO: 211

SEQ ID NO: 31261 - DNA, 38 bp, Homo Sapiens; identical to SEQ ID NO: 212

SEQ ID NO: 31262 - DNA, 39 bp, Homo Sapiens; identical to SEQ ID NO: 213

SEQ ID NO: 31263 - DNA, 40 bp, Homo Sapiens; identical to SEQ ID NO: 214

SEQ ID NO: 31264 - DNA, 41 bp, Homo Sapiens; identical to SEQ ID NO: 215

SEQ ID NO: 31265 - DNA, 42 bp, Homo Sapiens; identical to SEQ ID NO: 216

SEQ ID NO: 31266 - DNA, 43 bp, Homo Sapiens; identical to SEQ ID NO: 217

SEQ ID NO: 31267 - DNA, 44 bp, Homo Sapiens; identical to SEQ ID NO: 218

SEQ ID NO: 31268 - DNA, 45 bp, Homo Sapiens; identical to SEQ ID NO: 219

SEQ ID NO: 31269 - DNA, 16 bp, Homo Sapiens
aaaccatcctctgcta

SEQ ID NO: 31270 - DNA, 17 bp, Homo Sapiens
aaaccatcctctgctac

SEQ ID NO: 31271 - DNA, 18 bp, Homo Sapiens
aaaccatcctctgctacc

SEQ ID NO: 31272 - DNA, 37 bp, Homo Sapiens; identical to SEQ ID NO: 252

SEQ ID NO: 31273 - DNA, 18 bp, Homo Sapiens
aaaccgaagatcgcgggt

SEQ ID NO: 31274 - DNA, 37 bp, Homo Sapiens; identical to SEQ ID NO: 262

SEQ ID NO: 31275 - DNA, 34 bp, Homo Sapiens; identical to SEQ ID NO: 273

SEQ ID NO: 31276 - DNA, 35 bp, Homo Sapiens; identical to SEQ ID NO: 274

SEQ ID NO: 31277 - DNA, 16 bp, Homo Sapiens
aaaccgggcagaagca

SEQ ID NO: 31278 - DNA, 17 bp, Homo Sapiens
aaaccgggcagaagcac

SEQ ID NO: 31279 - DNA, 18 bp, Homo Sapiens
aaaccgggcagaagcacc

SEQ ID NO: 31280 - DNA, 19 bp, Homo Sapiens
aaaccgggcagaagcacca

SEQ ID NO: 31281 - DNA, 16 bp, Homo Sapiens
aaaccgggcggaaaca

SEQ ID NO: 31282 - DNA, 17 bp, Homo Sapiens
aaaccgggcggaaacac

SEQ ID NO: 31283 - DNA, 18 bp, Homo Sapiens
aaaccgggcggaaacacc

SEQ ID NO: 31284 - DNA, 19 bp, Homo Sapiens
aaaccgggcggaaacacca

SEQ ID NO: 31285 - DNA, 16 bp, Homo Sapiens
aaacctgccggggctt

SEQ ID NO: 31286 - DNA, 18 bp, Homo Sapiens
aaacctgccggggcttcc

SEQ ID NO: 31287 - DNA, 19 bp, Homo Sapiens
aaacctgccggggcttcca

SEQ ID NO: 31288 - DNA, 18 bp, Homo Sapiens
aaacgaatgatttcgact

SEQ ID NO: 31289 - DNA, 19 bp, Homo Sapiens
aaacgaatgatttcgactc

SEQ ID NO: 31290 - DNA, 20 bp, Homo Sapiens
aaacgaatgatttcgactca

SEQ ID NO: 31291 - DNA, 17 bp, Homo Sapiens
aaactgggcggaaacac

SEQ ID NO: 31292 - DNA, 18 bp, Homo Sapiens
aaactgggcggaaacacc

SEQ ID NO: 31293 - DNA, 16 bp, Homo Sapiens
aaagactttttctctg

SEQ ID NO: 31294 - DNA, 17 bp, Homo Sapiens
aaagactttttctctga

SEQ ID NO: 31295 - DNA, 18 bp, Homo Sapiens
aaagactttttctctgac

SEQ ID NO: 31296 - DNA, 19 bp, Homo Sapiens
aaagactttttctctgacc

SEQ ID NO: 31297 - DNA, 20 bp, Homo Sapiens
aaagactttttctctgacca

SEQ ID NO: 31298 - DNA, 16 bp, Homo Sapiens
aaagattaagagaacc

SEQ ID NO: 31299 - DNA, 35 bp, Homo Sapiens; identical to SEQ ID NO: 362

SEQ ID NO: 31300 - DNA, 36 bp, Homo Sapiens; identical to SEQ ID NO: 363

SEQ ID NO: 31301 - DNA, 37 bp, Homo Sapiens; identical to SEQ ID NO: 364

SEQ ID NO: 31302 - DNA, 32 bp, Homo Sapiens; identical to SEQ ID NO: 370

SEQ ID NO: 31303 - DNA, 33 bp, Homo Sapiens; identical to SEQ ID NO: 371

SEQ ID NO: 31304 - DNA, 43 bp, Homo Sapiens; identical to SEQ ID NO: 380

SEQ ID NO: 31305 - DNA, 17 bp, Homo Sapiens
aaagctcacaagaactg

SEQ ID NO: 31306 - DNA, 16 bp, Homo Sapiens
aaaggtccccggttcg

SEQ ID NO: 31307 - DNA, 31 bp, Homo Sapiens; identical to SEQ ID NO: 438

SEQ ID NO: 31308 - DNA, 32 bp, Homo Sapiens
aaaggtccccggttcgaaaccgggcggaaaca

SEQ ID NO: 31309 - DNA, 33 bp, Homo Sapiens
aaaggtccccggttcgaaaccgggcggaaacac

SEQ ID NO: 31310 - DNA, 34 bp, Homo Sapiens; identical to SEQ ID NO: 439

SEQ ID NO: 31311 - DNA, 16 bp, Homo Sapiens
aaaggtccctggttcg

SEQ ID NO: 31312 - DNA, 33 bp, Homo Sapiens; identical to SEQ ID NO: 444

SEQ ID NO: 31313 - DNA, 33 bp, Homo Sapiens; identical to SEQ ID NO: 449

SEQ ID NO: 31314 - DNA, 34 bp, Homo Sapiens; identical to SEQ ID NO: 450

SEQ ID NO: 31315 - DNA, 16 bp, Homo Sapiens
aaaggttggtggttcg

SEQ ID NO: 31316 - DNA, 31 bp, Homo Sapiens; identical to SEQ ID NO: 453

SEQ ID NO: 31317 - DNA, 33 bp, Homo Sapiens; identical to SEQ ID NO: 454

SEQ ID NO: 31318 - DNA, 34 bp, Homo Sapiens; identical to SEQ ID NO: 455

SEQ ID NO: 31319 - DNA, 34 bp, Homo Sapiens; identical to SEQ ID NO: 457

SEQ ID NO: 31320 - DNA, 33 bp, Homo Sapiens; identical to SEQ ID NO: 458

SEQ ID NO: 31321 - DNA, 34 bp, Homo Sapiens; identical to SEQ ID NO: 459

SEQ ID NO: 31322 - DNA, 33 bp, Homo Sapiens; identical to SEQ ID NO: 461

SEQ ID NO: 31323 - DNA, 34 bp, Homo Sapiens; identical to SEQ ID NO: 462

SEQ ID NO: 31324 - DNA, 16 bp, Homo Sapiens
aaataagctatcgggc

SEQ ID NO: 31325 - DNA, 17 bp, Homo Sapiens
aaataagctatcgggcc

SEQ ID NO: 31326 - DNA, 18 bp, Homo Sapiens
aaataagctatcgggccc

SEQ ID NO: 31327 - DNA, 19 bp, Homo Sapiens
aaataagctatcgggccca

SEQ ID NO: 31328 - DNA, 28 bp, Homo Sapiens
aaataagctatcgggcccataccccgaa

SEQ ID NO: 31329 - DNA, 29 bp, Homo Sapiens
aaataagctatcgggcccataccccgaaa

SEQ ID NO: 31330 - DNA, 39 bp, Homo Sapiens; identical to SEQ ID NO: 509

SEQ ID NO: 31331 - DNA, 34 bp, Homo Sapiens; identical to SEQ ID NO: 528

SEQ ID NO: 31332 - DNA, 35 bp, Homo Sapiens; identical to SEQ ID NO: 529

SEQ ID NO: 31333 - DNA, 44 bp, Homo Sapiens; identical to SEQ ID NO: 541

SEQ ID NO: 31334 - DNA, 45 bp, Homo Sapiens; identical to SEQ ID NO: 542

SEQ ID NO: 31335 - DNA, 17 bp, Homo Sapiens
aaatcacgtcggggtca

SEQ ID NO: 31336 - DNA, 18 bp, Homo Sapiens
aaatcacgtcggggtcac

SEQ ID NO: 31337 - DNA, 19 bp, Homo Sapiens
aaatcacgtcggggtcacc

SEQ ID NO: 31338 - DNA, 16 bp, Homo Sapiens
aaatcccggacgagcc

SEQ ID NO: 31339 - DNA, 17 bp, Homo Sapiens
aaatcccggacgagccc

SEQ ID NO: 31340 - DNA, 18 bp, Homo Sapiens
aaatcccggacgagcccc

SEQ ID NO: 31341 - DNA, 19 bp, Homo Sapiens
aaatcccggacgagccccc

SEQ ID NO: 31342 - DNA, 20 bp, Homo Sapiens
aaatcccggacgagccccca

SEQ ID NO: 31343 - DNA, 18 bp, Homo Sapiens
aaatccgggtgccccctc

SEQ ID NO: 31344 - DNA, 17 bp, Homo Sapiens
aaatctcgctggggcct

SEQ ID NO: 31345 - DNA, 18 bp, Homo Sapiens
aaatctcgctggggcctc

SEQ ID NO: 31346 - DNA, 19 bp, Homo Sapiens
aaatctcgctggggcctcc

SEQ ID NO: 31347 - DNA, 16 bp, Homo Sapiens
aaatctcggtggaacc

SEQ ID NO: 31348 - DNA, 17 bp, Homo Sapiens
aaatctcggtggaacct

SEQ ID NO: 31349 - DNA, 18 bp, Homo Sapiens
aaatctcggtggaacctc

SEQ ID NO: 31350 - DNA, 19 bp, Homo Sapiens
aaatctcggtggaacctcc

SEQ ID NO: 31351 - DNA, 17 bp, Homo Sapiens
aaatctcggtgggacct

SEQ ID NO: 31352 - DNA, 18 bp, Homo Sapiens
aaatctcggtgggacctc

SEQ ID NO: 31353 - DNA, 19 bp, Homo Sapiens
aaatctcggtgggacctcc

SEQ ID NO: 31354 - DNA, 25 bp, Homo Sapiens
aaatggctgagtgaagcattggact

SEQ ID NO: 31355 - DNA, 16 bp, Homo Sapiens
aaatggtagagcgctc

SEQ ID NO: 31356 - DNA, 18 bp, Homo Sapiens
aaatggtagagcgctcgc

SEQ ID NO: 31357 - DNA, 16 bp, Homo Sapiens
aaatgttggttatacc

SEQ ID NO: 31358 - DNA, 23 bp, Homo Sapiens
aaatgttggttatacccttcccg

SEQ ID NO: 31359 - DNA, 28 bp, Homo Sapiens
aaatgttggttatacccttcccgtacta

SEQ ID NO: 31360 - DNA, 30 bp, Homo Sapiens; identical to SEQ ID NO: 627

SEQ ID NO: 31361 - DNA, 31 bp, Homo Sapiens; identical to SEQ ID NO: 628

SEQ ID NO: 31362 - DNA, 16 bp, Homo Sapiens
aaatgtttagacgggc

SEQ ID NO: 31363 - DNA, 17 bp, Homo Sapiens
aaatgtttagacgggct

SEQ ID NO: 31364 - DNA, 18 bp, Homo Sapiens
aaatgtttagacgggctc

SEQ ID NO: 31365 - DNA, 19 bp, Homo Sapiens
aaatgtttagacgggctca

SEQ ID NO: 31366 - DNA, 20 bp, Homo Sapiens
aaatgtttagacgggctcac

SEQ ID NO: 31367 - DNA, 37 bp, Homo Sapiens; identical to SEQ ID NO: 647

SEQ ID NO: 31368 - DNA, 35 bp, Homo Sapiens; identical to SEQ ID NO: 680

SEQ ID NO: 31369 - DNA, 36 bp, Homo Sapiens; identical to SEQ ID NO: 681

SEQ ID NO: 31370 - DNA, 20 bp, Homo Sapiens
aacaacatggctttctcacc

SEQ ID NO: 31371 - DNA, 21 bp, Homo Sapiens
aacaacatggctttctcacca

SEQ ID NO: 31372 - DNA, 16 bp, Homo Sapiens
aacacaaagcacccaa

SEQ ID NO: 31373 - DNA, 18 bp, Homo Sapiens
aacacctctttacagtga

SEQ ID NO: 31374 - DNA, 19 bp, Homo Sapiens
aacacctctttacagtgac

SEQ ID NO: 31375 - DNA, 21 bp, Homo Sapiens
aacacctctttacagtgacca

SEQ ID NO: 31376 - DNA, 16 bp, Homo Sapiens
aacagaggcttacgac

SEQ ID NO: 31377 - DNA, 17 bp, Homo Sapiens
aacagaggcttacgacc

SEQ ID NO: 31378 - DNA, 30 bp, Homo Sapiens; identical to SEQ ID NO: 746

SEQ ID NO: 31379 - DNA, 31 bp, Homo Sapiens; identical to SEQ ID NO: 747

SEQ ID NO: 31380 - DNA, 18 bp, Homo Sapiens
aacagctatccattggtc

SEQ ID NO: 31381 - DNA, 19 bp, Homo Sapiens
aacagctatccattggtct

SEQ ID NO: 31382 - DNA, 36 bp, Homo Sapiens; identical to SEQ ID NO: 773

SEQ ID NO: 31383 - DNA, 37 bp, Homo Sapiens; identical to SEQ ID NO: 774

SEQ ID NO: 31384 - DNA, 38 bp, Homo Sapiens; identical to SEQ ID NO: 775

SEQ ID NO: 31385 - DNA, 36 bp, Homo Sapiens; identical to SEQ ID NO: 779

SEQ ID NO: 31386 - DNA, 37 bp, Homo Sapiens; identical to SEQ ID NO: 780

SEQ ID NO: 31387 - DNA, 38 bp, Homo Sapiens; identical to SEQ ID NO: 781

SEQ ID NO: 31388 - DNA, 18 bp, Homo Sapiens
aacatcagattgtgaatc

SEQ ID NO: 31389 - DNA, 20 bp, Homo Sapiens
aacatcagattgtgaatctg

SEQ ID NO: 31390 - DNA, 31 bp, Homo Sapiens; identical to SEQ ID NO: 800

SEQ ID NO: 31391 - DNA, 32 bp, Homo Sapiens; identical to SEQ ID NO: 801

SEQ ID NO: 31392 - DNA, 33 bp, Homo Sapiens; identical to SEQ ID NO: 802

SEQ ID NO: 31393 - DNA, 36 bp, Homo Sapiens; identical to SEQ ID NO: 805

SEQ ID NO: 31394 - DNA, 37 bp, Homo Sapiens; identical to SEQ ID NO: 806

SEQ ID NO: 31395 - DNA, 38 bp, Homo Sapiens; identical to SEQ ID NO: 807

SEQ ID NO: 31396 - DNA, 39 bp, Homo Sapiens; identical to SEQ ID NO: 808

SEQ ID NO: 31397 - DNA, 40 bp, Homo Sapiens; identical to SEQ ID NO: 809

SEQ ID NO: 31398 - DNA, 41 bp, Homo Sapiens; identical to SEQ ID NO: 810

SEQ ID NO: 31399 - DNA, 42 bp, Homo Sapiens; identical to SEQ ID NO: 811

SEQ ID NO: 31400 - DNA, 43 bp, Homo Sapiens; identical to SEQ ID NO: 812

SEQ ID NO: 31401 - DNA, 44 bp, Homo Sapiens; identical to SEQ ID NO: 813

SEQ ID NO: 31402 - DNA, 18 bp, Homo Sapiens
aacatggctttctcacca

SEQ ID NO: 31403 - DNA, 19 bp, Homo Sapiens
aaccaaaacatcagattgt

SEQ ID NO: 31404 - DNA, 23 bp, Homo Sapiens
aaccaaaacatcagattgtgaat

SEQ ID NO: 31405 - DNA, 24 bp, Homo Sapiens
aaccaaaacatcagattgtgaatc

SEQ ID NO: 31406 - DNA, 37 bp, Homo Sapiens; identical to SEQ ID NO: 841

SEQ ID NO: 31407 - DNA, 38 bp, Homo Sapiens; identical to SEQ ID NO: 842

SEQ ID NO: 31408 - DNA, 22 bp, Homo Sapiens
aaccaacacctctttacagtga

SEQ ID NO: 31409 - DNA, 23 bp, Homo Sapiens
aaccaacacctctttacagtgac

SEQ ID NO: 31410 - DNA, 16 bp, Homo Sapiens
aaccaggcggaaacac

SEQ ID NO: 31411 - DNA, 17 bp, Homo Sapiens
aaccaggcggaaacacc

SEQ ID NO: 31412 - DNA, 36 bp, Homo Sapiens; identical to SEQ ID NO: 869

SEQ ID NO: 31413 - DNA, 38 bp, Homo Sapiens; identical to SEQ ID NO: 871

SEQ ID NO: 31414 - DNA, 39 bp, Homo Sapiens
aaccaggggtcgcgagttcaaatctcgctggggcctcca

SEQ ID NO: 31415 - DNA, 36 bp, Homo Sapiens
aaccaggggtcgcgagttcgatcctcgctggggcct

SEQ ID NO: 31416 - DNA, 16 bp, Homo Sapiens
aaccatcctctgctac

SEQ ID NO: 31417 - DNA, 17 bp, Homo Sapiens
aaccatcctctgctacc

SEQ ID NO: 31418 - DNA, 18 bp, Homo Sapiens
aaccatcctctgctacca

SEQ ID NO: 31419 - DNA, 20 bp, Homo Sapiens
aacccagaggtcgatggatc

SEQ ID NO: 31420 - DNA, 21 bp, Homo Sapiens
aacccagaggtcgatggatcg

SEQ ID NO: 31421 - DNA, 19 bp, Homo Sapiens
aaccccactcctggtacca

SEQ ID NO: 31422 - DNA, 16 bp, Homo Sapiens
aaccccgtccgtgcct

SEQ ID NO: 31423 - DNA, 17 bp, Homo Sapiens
aaccccgtccgtgcctc

SEQ ID NO: 31424 - DNA, 18 bp, Homo Sapiens
aaccctgctcgctgcgcc

SEQ ID NO: 31425 - DNA, 19 bp, Homo Sapiens
aaccctgctcgctgcgcca

SEQ ID NO: 31426 - DNA, 35 bp, Homo Sapiens
aaccgaagatcacgggttcgaaccccgtccgtgcc

SEQ ID NO: 31427 - DNA, 36 bp, Homo Sapiens; identical to SEQ ID NO: 918

SEQ ID NO: 31428 - DNA, 37 bp, Homo Sapiens; identical to SEQ ID NO: 919

SEQ ID NO: 31429 - DNA, 38 bp, Homo Sapiens; identical to SEQ ID NO: 920

SEQ ID NO: 31430 - DNA, 19 bp, Homo Sapiens
aaccgaagatcgcgggttc

SEQ ID NO: 31431 - DNA, 20 bp, Homo Sapiens
aaccgaagatcgcgggttcg

SEQ ID NO: 31432 - DNA, 23 bp, Homo Sapiens
aaccgaagatcgcgggttcgaac

SEQ ID NO: 31433 - DNA, 36 bp, Homo Sapiens; identical to SEQ ID NO: 929

SEQ ID NO: 31434 - DNA, 37 bp, Homo Sapiens; identical to SEQ ID NO: 930

SEQ ID NO: 31435 - DNA, 38 bp, Homo Sapiens; identical to SEQ ID NO: 931

SEQ ID NO: 31436 - DNA, 16 bp, Homo Sapiens
aaccggagatgaaaac

SEQ ID NO: 31437 - DNA, 17 bp, Homo Sapiens
aaccggagatgaaaacc

SEQ ID NO: 31438 - DNA, 30 bp, Homo Sapiens; identical to SEQ ID NO: 946

SEQ ID NO: 31439 - DNA, 32 bp, Homo Sapiens; identical to SEQ ID NO: 948

SEQ ID NO: 31440 - DNA, 33 bp, Homo Sapiens; identical to SEQ ID NO: 949

SEQ ID NO: 31441 - DNA, 34 bp, Homo Sapiens; identical to SEQ ID NO: 950

SEQ ID NO: 31442 - DNA, 16 bp, Homo Sapiens
aaccgggcagaaacac

SEQ ID NO: 31443 - DNA, 17 bp, Homo Sapiens
aaccgggcagaaacacc

SEQ ID NO: 31444 - DNA, 16 bp, Homo Sapiens
aaccgggcagaagcac

SEQ ID NO: 31445 - DNA, 17 bp, Homo Sapiens
aaccgggcagaagcacc

SEQ ID NO: 31446 - DNA, 18 bp, Homo Sapiens
aaccgggcagaagcacca

SEQ ID NO: 31447 - DNA, 16 bp, Homo Sapiens
aaccgggcggaaacac

SEQ ID NO: 31448 - DNA, 17 bp, Homo Sapiens
aaccgggcggaaacacc

SEQ ID NO: 31449 - DNA, 18 bp, Homo Sapiens
aaccgggcggaaacacca

SEQ ID NO: 31450 - DNA, 27 bp, Homo Sapiens
aacctcggttcgaatccgagtcacggc

SEQ ID NO: 31451 - DNA, 29 bp, Homo Sapiens
aacctcggttcgaatccgagtcacggcac

SEQ ID NO: 31452 - DNA, 17 bp, Homo Sapiens
aacctgccggggcttcc

SEQ ID NO: 31453 - DNA, 18 bp, Homo Sapiens
aacctgccggggcttcca

SEQ ID NO: 31454 - DNA, 17 bp, Homo Sapiens
aacgaatgatttcgact

SEQ ID NO: 31455 - DNA, 18 bp, Homo Sapiens
aacgaatgatttcgactc

SEQ ID NO: 31456 - DNA, 38 bp, Homo Sapiens; identical to SEQ ID NO: 1011

SEQ ID NO: 31457 - DNA, 39 bp, Homo Sapiens; identical to SEQ ID NO: 1012

SEQ ID NO: 31458 - DNA, 17 bp, Homo Sapiens
aactaagtgtttgtggg

SEQ ID NO: 31459 - DNA, 31 bp, Homo Sapiens; identical to SEQ ID NO: 1069

SEQ ID NO: 31460 - DNA, 32 bp, Homo Sapiens; identical to SEQ ID NO: 1070

SEQ ID NO: 31461 - DNA, 39 bp, Homo Sapiens; identical to SEQ ID NO: 1077

SEQ ID NO: 31462 - DNA, 40 bp, Homo Sapiens; identical to SEQ ID NO: 1078

SEQ ID NO: 31463 - DNA, 20 bp, Homo Sapiens
aactgctaactcatgccccc

SEQ ID NO: 31464 - DNA, 38 bp, Homo Sapiens; identical to SEQ ID NO: 1105

SEQ ID NO: 31465 - DNA, 46 bp, Homo Sapiens; identical to SEQ ID NO: 1113

SEQ ID NO: 31466 - DNA, 47 bp, Homo Sapiens; identical to SEQ ID NO: 1114

SEQ ID NO: 31467 - DNA, 16 bp, Homo Sapiens
aactgggcggaaacac

SEQ ID NO: 31468 - DNA, 17 bp, Homo Sapiens
aactgggcggaaacacc

SEQ ID NO: 31469 - DNA, 38 bp, Homo Sapiens; identical to SEQ ID NO: 1126

SEQ ID NO: 31470 - DNA, 17 bp, Homo Sapiens
aacttaacttgaccgct

SEQ ID NO: 31471 - DNA, 20 bp, Homo Sapiens
aacttaacttgaccgctctg

SEQ ID NO: 31472 - DNA, 21 bp, Homo Sapiens
aacttaacttgaccgctctga

SEQ ID NO: 31473 - DNA, 22 bp, Homo Sapiens
aacttaacttgaccgctctgac

SEQ ID NO: 31474 - DNA, 23 bp, Homo Sapiens
aacttaacttgaccgctctgacc

SEQ ID NO: 31475 - DNA, 24 bp, Homo Sapiens
aacttaacttgaccgctctgacca

SEQ ID NO: 31476 - DNA, 16 bp, Homo Sapiens
aacttacacttaggag

SEQ ID NO: 31477 - DNA, 35 bp, Homo Sapiens; identical to SEQ ID NO: 1156

SEQ ID NO: 31478 - DNA, 38 bp, Homo Sapiens; identical to SEQ ID NO: 1159

SEQ ID NO: 31479 - DNA, 39 bp, Homo Sapiens; identical to SEQ ID NO: 1160

SEQ ID NO: 31480 - DNA, 40 bp, Homo Sapiens; identical to SEQ ID NO: 1161

SEQ ID NO: 31481 - DNA, 41 bp, Homo Sapiens; identical to SEQ ID NO: 1162

SEQ ID NO: 31482 - DNA, 42 bp, Homo Sapiens; identical to SEQ ID NO: 1163

SEQ ID NO: 31483 - DNA, 43 bp, Homo Sapiens; identical to SEQ ID NO: 1164

SEQ ID NO: 31484 - DNA, 44 bp, Homo Sapiens; identical to SEQ ID NO: 1165

SEQ ID NO: 31485 - DNA, 45 bp, Homo Sapiens; identical to SEQ ID NO: 1166

SEQ ID NO: 31486 - DNA, 16 bp, Homo Sapiens
aacttgaccgctctga

SEQ ID NO: 31487 - DNA, 17 bp, Homo Sapiens
aacttgaccgctctgac

SEQ ID NO: 31488 - DNA, 18 bp, Homo Sapiens
aacttgaccgctctgacc

SEQ ID NO: 31489 - DNA, 19 bp, Homo Sapiens
aacttgaccgctctgacca

SEQ ID NO: 31490 - DNA, 19 bp, Homo Sapiens
aactttacagtcagaggtt

SEQ ID NO: 31491 - DNA, 27 bp, Homo Sapiens
aactttgtcaaagttaaattataggct

SEQ ID NO: 31492 - DNA, 18 bp, Homo Sapiens
aagaactgctaactcatg

SEQ ID NO: 31493 - DNA, 19 bp, Homo Sapiens
aagaactgctaactcatgc

SEQ ID NO: 31494 - DNA, 20 bp, Homo Sapiens
aagaactgctaactcatgcc

SEQ ID NO: 31495 - DNA, 21 bp, Homo Sapiens
aagaactgctaactcatgccc

SEQ ID NO: 31496 - DNA, 23 bp, Homo Sapiens
aagaactgctaactcatgccccc

SEQ ID NO: 31497 - DNA, 26 bp, Homo Sapiens
aagaactgctaactcatgcccccatg

SEQ ID NO: 31498 - DNA, 27 bp, Homo Sapiens
aagaactgctaactcatgcccccatgt

SEQ ID NO: 31499 - DNA, 28 bp, Homo Sapiens
aagaactgctaactcatgcccccatgtc

SEQ ID NO: 31500 - DNA, 29 bp, Homo Sapiens
aagaactgctaactcatgcccccatgtct

SEQ ID NO: 31501 - DNA, 33 bp, Homo Sapiens; identical to SEQ ID NO: 1230

SEQ ID NO: 31502 - DNA, 36 bp, Homo Sapiens; identical to SEQ ID NO: 1233

SEQ ID NO: 31503 - DNA, 39 bp, Homo Sapiens; identical to SEQ ID NO: 1236

SEQ ID NO: 31504 - DNA, 40 bp, Homo Sapiens; identical to SEQ ID NO: 1237

SEQ ID NO: 31505 - DNA, 41 bp, Homo Sapiens; identical to SEQ ID NO: 1238

SEQ ID NO: 31506 - DNA, 42 bp, Homo Sapiens; identical to SEQ ID NO: 1239

SEQ ID NO: 31507 - DNA, 44 bp, Homo Sapiens; identical to SEQ ID NO: 1241

SEQ ID NO: 31508 - DNA, 45 bp, Homo Sapiens; identical to SEQ ID NO: 1242

SEQ ID NO: 31509 - DNA, 46 bp, Homo Sapiens; identical to SEQ ID NO: 1243

SEQ ID NO: 31510 - DNA, 47 bp, Homo Sapiens; identical to SEQ ID NO: 1244

SEQ ID NO: 31511 - DNA, 20 bp, Homo Sapiens
aagaagcagcttcaaacctg

SEQ ID NO: 31512 - DNA, 26 bp, Homo Sapiens
aagaagcagcttcaaacctgccgggg

SEQ ID NO: 31513 - DNA, 27 bp, Homo Sapiens
aagaagcagcttcaaacctgccggggc

SEQ ID NO: 31514 - DNA, 28 bp, Homo Sapiens
aagaagcagcttcaaacctgccggggct

SEQ ID NO: 31515 - DNA, 29 bp, Homo Sapiens
aagaagcagcttcaaacctgccggggctt

SEQ ID NO: 31516 - DNA, 30 bp, Homo Sapiens; identical to SEQ ID NO: 1254

SEQ ID NO: 31517 - DNA, 31 bp, Homo Sapiens; identical to SEQ ID NO: 1255

SEQ ID NO: 31518 - DNA, 31 bp, Homo Sapiens; identical to SEQ ID NO: 1269

SEQ ID NO: 31519 - DNA, 16 bp, Homo Sapiens
aagactttttctctga

SEQ ID NO: 31520 - DNA, 17 bp, Homo Sapiens
aagactttttctctgac

SEQ ID NO: 31521 - DNA, 18 bp, Homo Sapiens
aagactttttctctgacc

SEQ ID NO: 31522 - DNA, 19 bp, Homo Sapiens
aagactttttctctgacca

SEQ ID NO: 31523 - DNA, 28 bp, Homo Sapiens
aagagaaccaacacctctttacagtgac

SEQ ID NO: 31524 - DNA, 29 bp, Homo Sapiens
aagagaaccaacacctctttacagtgacc

SEQ ID NO: 31525 - DNA, 30 bp, Homo Sapiens; identical to SEQ ID NO: 1283

SEQ ID NO: 31526 - DNA, 17 bp, Homo Sapiens
aagaggtccccggttca

SEQ ID NO: 31527 - DNA, 33 bp, Homo Sapiens; identical to SEQ ID NO: 1293

SEQ ID NO: 31528 - DNA, 34 bp, Homo Sapiens; identical to SEQ ID NO: 1294

SEQ ID NO: 31529 - DNA, 35 bp, Homo Sapiens; identical to SEQ ID NO: 1295

SEQ ID NO: 31530 - DNA, 35 bp, Homo Sapiens; identical to SEQ ID NO: 1297

SEQ ID NO: 31531 - DNA, 32 bp, Homo Sapiens
aagatcacgggttcgaaccccgtccgtgcctc

SEQ ID NO: 31532 - DNA, 19 bp, Homo Sapiens
aagatcgcgggttcgaacc

SEQ ID NO: 31533 - DNA, 32 bp, Homo Sapiens
aagatcgcgggttcgaaccccgtccgtgcctc

SEQ ID NO: 31534 - DNA, 21 bp, Homo Sapiens
aagattaagagaaccaacacc

SEQ ID NO: 31535 - DNA, 34 bp, Homo Sapiens; identical to SEQ ID NO: 1345

SEQ ID NO: 31536 - DNA, 35 bp, Homo Sapiens; identical to SEQ ID NO: 1346

SEQ ID NO: 31537 - DNA, 36 bp, Homo Sapiens; identical to SEQ ID NO: 1347

SEQ ID NO: 31538 - DNA, 26 bp, Homo Sapiens
aagattccaggttcgactcctggctg

SEQ ID NO: 31539 - DNA, 28 bp, Homo Sapiens
aagattccaggttcgactcctggctggc

SEQ ID NO: 31540 - DNA, 29 bp, Homo Sapiens
aagattccaggttcgactcctggctggct

SEQ ID NO: 31541 - DNA, 30 bp, Homo Sapiens; identical to SEQ ID NO: 1352

SEQ ID NO: 31542 - DNA, 31 bp, Homo Sapiens; identical to SEQ ID NO: 1353

SEQ ID NO: 31543 - DNA, 33 bp, Homo Sapiens; identical to SEQ ID NO: 1355

SEQ ID NO: 31544 - DNA, 28 bp, Homo Sapiens
aagattctaggttcgactcctggctggc

SEQ ID NO: 31545 - DNA, 30 bp, Homo Sapiens; identical to SEQ ID NO: 1359

SEQ ID NO: 31546 - DNA, 31 bp, Homo Sapiens; identical to SEQ ID NO: 1360

SEQ ID NO: 31547 - DNA, 33 bp, Homo Sapiens; identical to SEQ ID NO: 1362

SEQ ID NO: 31548 - DNA, 31 bp, Homo Sapiens
aagattgagggttcgaatcccttcgtggttg

SEQ ID NO: 31549 - DNA, 32 bp, Homo Sapiens
aagattgagggttcgaatcccttcgtggttgc

SEQ ID NO: 31550 - DNA, 19 bp, Homo Sapiens
aagattgagggttcgagtc

SEQ ID NO: 31551 - DNA, 22 bp, Homo Sapiens
aagattgagggttcgagtccct

SEQ ID NO: 31552 - DNA, 31 bp, Homo Sapiens; identical to SEQ ID NO: 1370

SEQ ID NO: 31553 - DNA, 32 bp, Homo Sapiens; identical to SEQ ID NO: 1371

SEQ ID NO: 31554 - DNA, 33 bp, Homo Sapiens; identical to SEQ ID NO: 1372

SEQ ID NO: 31555 - DNA, 34 bp, Homo Sapiens; identical to SEQ ID NO: 1373

SEQ ID NO: 31556 - DNA, 22 bp, Homo Sapiens
aagattgcaggttcgagtcctg

SEQ ID NO: 31557 - DNA, 30 bp, Homo Sapiens; identical to SEQ ID NO: 1376

SEQ ID NO: 31558 - DNA, 32 bp, Homo Sapiens; identical to SEQ ID NO: 1378

SEQ ID NO: 31559 - DNA, 33 bp, Homo Sapiens; identical to SEQ ID NO: 1379

SEQ ID NO: 31560 - DNA, 34 bp, Homo Sapiens; identical to SEQ ID NO: 1380

SEQ ID NO: 31561 - DNA, 31 bp, Homo Sapiens; identical to SEQ ID NO: 1382

SEQ ID NO: 31562 - DNA, 30 bp, Homo Sapiens; identical to SEQ ID NO: 1397

SEQ ID NO: 31563 - DNA, 17 bp, Homo Sapiens
aagcagcttcaaacctg

SEQ ID NO: 31564 - DNA, 23 bp, Homo Sapiens
aagcagcttcaaacctgccgggg

SEQ ID NO: 31565 - DNA, 24 bp, Homo Sapiens
aagcagcttcaaacctgccggggc

SEQ ID NO: 31566 - DNA, 25 bp, Homo Sapiens
aagcagcttcaaacctgccggggct

SEQ ID NO: 31567 - DNA, 26 bp, Homo Sapiens
aagcagcttcaaacctgccggggctt

SEQ ID NO: 31568 - DNA, 27 bp, Homo Sapiens
aagcagcttcaaacctgccggggcttc

SEQ ID NO: 31569 - DNA, 28 bp, Homo Sapiens
aagcagcttcaaacctgccggggcttcc

SEQ ID NO: 31570 - DNA, 20 bp, Homo Sapiens
aagccagggattgtgggttc

SEQ ID NO: 31571 - DNA, 21 bp, Homo Sapiens
aagccagggattgtgggttcg

SEQ ID NO: 31572 - DNA, 37 bp, Homo Sapiens; identical to SEQ ID NO: 1465

SEQ ID NO: 31573 - DNA, 39 bp, Homo Sapiens; identical to SEQ ID NO: 1471

SEQ ID NO: 31574 - DNA, 40 bp, Homo Sapiens; identical to SEQ ID NO: 1476

SEQ ID NO: 31575 - DNA, 30 bp, Homo Sapiens; identical to SEQ ID NO: 1477

SEQ ID NO: 31576 - DNA, 37 bp, Homo Sapiens; identical to SEQ ID NO: 1482

SEQ ID NO: 31577 - DNA, 38 bp, Homo Sapiens; identical to SEQ ID NO: 1483

SEQ ID NO: 31578 - DNA, 39 bp, Homo Sapiens; identical to SEQ ID NO: 1484

SEQ ID NO: 31579 - DNA, 40 bp, Homo Sapiens; identical to SEQ ID NO: 1485

SEQ ID NO: 31580 - DNA, 20 bp, Homo Sapiens
aagctatcgggcccataccc

SEQ ID NO: 31581 - DNA, 24 bp, Homo Sapiens
aagctatcgggcccataccccgaa

SEQ ID NO: 31582 - DNA, 25 bp, Homo Sapiens
aagctatcgggcccataccccgaaa

SEQ ID NO: 31583 - DNA, 21 bp, Homo Sapiens
aagctcacaagaactgctaac

SEQ ID NO: 31584 - DNA, 22 bp, Homo Sapiens
aagctcacaagaactgctaact

SEQ ID NO: 31585 - DNA, 31 bp, Homo Sapiens; identical to SEQ ID NO: 1539

SEQ ID NO: 31586 - DNA, 34 bp, Homo Sapiens; identical to SEQ ID NO: 1542

SEQ ID NO: 31587 - DNA, 24 bp, Homo Sapiens
aaggataacagctatccattggtc

SEQ ID NO: 31588 - DNA, 25 bp, Homo Sapiens
aaggataacagctatccattggtct

SEQ ID NO: 31589 - DNA, 30 bp, Homo Sapiens; identical to SEQ ID NO: 1566

SEQ ID NO: 31590 - DNA, 19 bp, Homo Sapiens
aaggctgcgtgttcgaatc

SEQ ID NO: 31591 - DNA, 22 bp, Homo Sapiens
aaggctgcgtgttcgaatcacg

SEQ ID NO: 31592 - DNA, 24 bp, Homo Sapiens
aaggctgcgtgttcgaatcacgtc

SEQ ID NO: 31593 - DNA, 28 bp, Homo Sapiens
aaggctgcgtgttcgaatcacgtcgggg

SEQ ID NO: 31594 - DNA, 30 bp, Homo Sapiens; identical to SEQ ID NO: 1575

SEQ ID NO: 31595 - DNA, 33 bp, Homo Sapiens; identical to SEQ ID NO: 1576

SEQ ID NO: 31596 - DNA, 16 bp, Homo Sapiens
aagggcttagcttaat

SEQ ID NO: 31597 - DNA, 17 bp, Homo Sapiens
aagggcttagcttaatt

SEQ ID NO: 31598 - DNA, 23 bp, Homo Sapiens
aagggcttagcttaattaaagtg

SEQ ID NO: 31599 - DNA, 25 bp, Homo Sapiens
aagggcttagcttaattaaagtggc

SEQ ID NO: 31600 - DNA, 30 bp, Homo Sapiens; identical to SEQ ID NO: 1592

SEQ ID NO: 31601 - DNA, 33 bp, Homo Sapiens; identical to SEQ ID NO: 1595

SEQ ID NO: 31602 - DNA, 41 bp, Homo Sapiens; identical to SEQ ID NO: 1602

SEQ ID NO: 31603 - DNA, 40 bp, Homo Sapiens; identical to SEQ ID NO: 1615

SEQ ID NO: 31604 - DNA, 24 bp, Homo Sapiens
aaggtccccggttcgaaaccgggc

SEQ ID NO: 31605 - DNA, 27 bp, Homo Sapiens
aaggtccccggttcgaaaccgggcgga

SEQ ID NO: 31606 - DNA, 30 bp, Homo Sapiens; identical to SEQ ID NO: 1632

SEQ ID NO: 31607 - DNA, 31 bp, Homo Sapiens
aaggtccccggttcgaaaccgggcggaaaca

SEQ ID NO: 31608 - DNA, 32 bp, Homo Sapiens; identical to SEQ ID NO: 1633

SEQ ID NO: 31609 - DNA, 33 bp, Homo Sapiens
aaggtccccggttcgaaaccgggcggaaacacc

SEQ ID NO: 31610 - DNA, 30 bp, Homo Sapiens
aaggtccctggttcgatcccgggtttcggc

SEQ ID NO: 31611 - DNA, 32 bp, Homo Sapiens; identical to SEQ ID NO: 1634

SEQ ID NO: 31612 - DNA, 33 bp, Homo Sapiens
aaggtccctggttcgatcccgggtttcggcacc

SEQ ID NO: 31613 - DNA, 20 bp, Homo Sapiens
aaggtcctgggttcgagccc

SEQ ID NO: 31614 - DNA, 30 bp, Homo Sapiens; identical to SEQ ID NO: 1644

SEQ ID NO: 31615 - DNA, 31 bp, Homo Sapiens
aaggtcctgggttcgagccccagtggaacca

SEQ ID NO: 31616 - DNA, 32 bp, Homo Sapiens
aaggtcctgggttcgagccccagtggaaccac

SEQ ID NO: 31617 - DNA, 33 bp, Homo Sapiens; identical to SEQ ID NO: 1645

SEQ ID NO: 31618 - DNA, 34 bp, Homo Sapiens; identical to SEQ ID NO: 1646

SEQ ID NO: 31619 - DNA, 29 bp, Homo Sapiens
aaggtcgcgggttcgatccccgtacgggc

SEQ ID NO: 31620 - DNA, 30 bp, Homo Sapiens; identical to SEQ ID NO: 1651

SEQ ID NO: 31621 - DNA, 31 bp, Homo Sapiens; identical to SEQ ID NO: 1652

SEQ ID NO: 31622 - DNA, 32 bp, Homo Sapiens; identical to SEQ ID NO: 1653

SEQ ID NO: 31623 - DNA, 33 bp, Homo Sapiens; identical to SEQ ID NO: 1654

SEQ ID NO: 31624 - DNA, 24 bp, Homo Sapiens
aaggttccgggttcgagtcccggc

SEQ ID NO: 31625 - DNA, 28 bp, Homo Sapiens
aaggttccgggttcgagtcccggcggag

SEQ ID NO: 31626 - DNA, 29 bp, Homo Sapiens
aaggttccgggttcgagtcccggcggagt

SEQ ID NO: 31627 - DNA, 30 bp, Homo Sapiens; identical to SEQ ID NO: 1661

SEQ ID NO: 31628 - DNA, 31 bp, Homo Sapiens; identical to SEQ ID NO: 1662

SEQ ID NO: 31629 - DNA, 32 bp, Homo Sapiens; identical to SEQ ID NO: 1663

SEQ ID NO: 31630 - DNA, 33 bp, Homo Sapiens; identical to SEQ ID NO: 1664

SEQ ID NO: 31631 - DNA, 34 bp, Homo Sapiens; identical to SEQ ID NO: 1665

SEQ ID NO: 31632 - DNA, 32 bp, Homo Sapiens; identical to SEQ ID NO: 1669

SEQ ID NO: 31633 - DNA, 33 bp, Homo Sapiens; identical to SEQ ID NO: 1670

SEQ ID NO: 31634 - DNA, 33 bp, Homo Sapiens
aaggttggtggttcgatcccacccagggacgcc

SEQ ID NO: 31635 - DNA, 32 bp, Homo Sapiens
aaggttgtgggttcgaatcccaccagagtcgc

SEQ ID NO: 31636 - DNA, 33 bp, Homo Sapiens; identical to SEQ ID NO: 1671

SEQ ID NO: 31637 - DNA, 32 bp, Homo Sapiens; identical to SEQ ID NO: 1673

SEQ ID NO: 31638 - DNA, 33 bp, Homo Sapiens; identical to SEQ ID NO: 1674

SEQ ID NO: 31639 - DNA, 18 bp, Homo Sapiens
aagtcacgtcggggtcac

SEQ ID NO: 31640 - DNA, 19 bp, Homo Sapiens
aagtcacgtcggggtcacc

SEQ ID NO: 31641 - DNA, 17 bp, Homo Sapiens
aagtcatggaggccatg

SEQ ID NO: 31642 - DNA, 16 bp, Homo Sapiens
aagtccctgttcgggc

SEQ ID NO: 31643 - DNA, 17 bp, Homo Sapiens
aagtccctgttcgggcg

SEQ ID NO: 31644 - DNA, 18 bp, Homo Sapiens
aagtccctgttcgggcgc

SEQ ID NO: 31645 - DNA, 19 bp, Homo Sapiens
aagtccctgttcgggcgcc

SEQ ID NO: 31646 - DNA, 19 bp, Homo Sapiens
aagtggctgatttgcgttc

SEQ ID NO: 31647 - DNA, 27 bp, Homo Sapiens
aagtggctgatttgcgttcagttgatg

SEQ ID NO: 31648 - DNA, 34 bp, Homo Sapiens; identical to SEQ ID NO: 1712

SEQ ID NO: 31649 - DNA, 35 bp, Homo Sapiens; identical to SEQ ID NO: 1713

SEQ ID NO: 31650 - DNA, 36 bp, Homo Sapiens; identical to SEQ ID NO: 1714

SEQ ID NO: 31651 - DNA, 21 bp, Homo Sapiens
aagttaaagattaagagaacc

SEQ ID NO: 31652 - DNA, 33 bp, Homo Sapiens; identical to SEQ ID NO: 1729

SEQ ID NO: 31653 - DNA, 25 bp, Homo Sapiens
aagttgcaatacttaatttctgcca

SEQ ID NO: 31654 - DNA, 20 bp, Homo Sapiens
aataataggagcttaaaccc

SEQ ID NO: 31655 - DNA, 21 bp, Homo Sapiens
aataataggagcttaaacccc

SEQ ID NO: 31656 - DNA, 22 bp, Homo Sapiens
aataataggagcttaaaccccc

SEQ ID NO: 31657 - DNA, 44 bp, Homo Sapiens; identical to SEQ ID NO: 1801

SEQ ID NO: 31658 - DNA, 27 bp, Homo Sapiens
aatacactgaaaatgtttagacgggct

SEQ ID NO: 31659 - DNA, 28 bp, Homo Sapiens
aatacactgaaaatgtttagacgggctc

SEQ ID NO: 31660 - DNA, 16 bp, Homo Sapiens
aatacagaccaagagc

SEQ ID NO: 31661 - DNA, 17 bp, Homo Sapiens
aatacttaatttctgcc

SEQ ID NO: 31662 - DNA, 18 bp, Homo Sapiens
aatacttaatttctgcca

SEQ ID NO: 31663 - DNA, 17 bp, Homo Sapiens
aatagctcagttgggag

SEQ ID NO: 31664 - DNA, 30 bp, Homo Sapiens; identical to SEQ ID NO: 1852

SEQ ID NO: 31665 - DNA, 16 bp, Homo Sapiens
aatcacgtcggggtca

SEQ ID NO: 31666 - DNA, 17 bp, Homo Sapiens
aatcacgtcggggtcac

SEQ ID NO: 31667 - DNA, 18 bp, Homo Sapiens
aatcacgtcggggtcacc

SEQ ID NO: 31668 - DNA, 19 bp, Homo Sapiens
aatcacgtcggggtcacca

SEQ ID NO: 31669 - DNA, 39 bp, Homo Sapiens; identical to SEQ ID NO: 1892

SEQ ID NO: 31670 - DNA, 40 bp, Homo Sapiens; identical to SEQ ID NO: 1893

SEQ ID NO: 31671 - DNA, 17 bp, Homo Sapiens
aatccagcgatccgagt

SEQ ID NO: 31672 - DNA, 19 bp, Homo Sapiens
aatccagcgatccgagttc

SEQ ID NO: 31673 - DNA, 20 bp, Homo Sapiens
aatccagcgatccgagttca

SEQ ID NO: 31674 - DNA, 21 bp, Homo Sapiens
aatccagcgatccgagttcaa

SEQ ID NO: 31675 - DNA, 22 bp, Homo Sapiens
aatccagcgatccgagttcaaa

SEQ ID NO: 31676 - DNA, 23 bp, Homo Sapiens
aatccagcgatccgagttcaaat

SEQ ID NO: 31677 - DNA, 37 bp, Homo Sapiens; identical to SEQ ID NO: 1914

SEQ ID NO: 31678 - DNA, 39 bp, Homo Sapiens; identical to SEQ ID NO: 1916

SEQ ID NO: 31679 - DNA, 21 bp, Homo Sapiens
aatccattggggtttccccgc

SEQ ID NO: 31680 - DNA, 22 bp, Homo Sapiens
aatccattggggtttccccgcg

SEQ ID NO: 31681 - DNA, 23 bp, Homo Sapiens
aatccattggggtttccccgcgc

SEQ ID NO: 31682 - DNA, 24 bp, Homo Sapiens
aatccattggggtttccccgcgca

SEQ ID NO: 31683 - DNA, 25 bp, Homo Sapiens
aatccattggggtttccccgcgcag

SEQ ID NO: 31684 - DNA, 26 bp, Homo Sapiens
aatccattggggtttccccgcgcagg

SEQ ID NO: 31685 - DNA, 27 bp, Homo Sapiens
aatccattggggtttccccgcgcaggt

SEQ ID NO: 31686 - DNA, 29 bp, Homo Sapiens
aatccattggggtttccccgcgcaggttc

SEQ ID NO: 31687 - DNA, 41 bp, Homo Sapiens; identical to SEQ ID NO: 1957

SEQ ID NO: 31688 - DNA, 42 bp, Homo Sapiens; identical to SEQ ID NO: 1958

SEQ ID NO: 31689 - DNA, 43 bp, Homo Sapiens; identical to SEQ ID NO: 1959

SEQ ID NO: 31690 - DNA, 47 bp, Homo Sapiens
aatccattggggtttccccgcgcaggttcgaatcctgccgactacgc

SEQ ID NO: 31691 - DNA, 18 bp, Homo Sapiens
aatcccaccactgccacc

SEQ ID NO: 31692 - DNA, 18 bp, Homo Sapiens
aatcccaccagagtcgcc

SEQ ID NO: 31693 - DNA, 18 bp, Homo Sapiens
aatcccaccctcgtcgcc

SEQ ID NO: 31694 - DNA, 17 bp, Homo Sapiens
aatcccaccgctgccac

SEQ ID NO: 31695 - DNA, 18 bp, Homo Sapiens
aatcccaccgctgccacc

SEQ ID NO: 31696 - DNA, 18 bp, Homo Sapiens
aatcccaccttcgtcgcc

SEQ ID NO: 31697 - DNA, 16 bp, Homo Sapiens
aatcccactcctgaca

SEQ ID NO: 31698 - DNA, 17 bp, Homo Sapiens
aatcccactcctgacac

SEQ ID NO: 31699 - DNA, 18 bp, Homo Sapiens
aatcccactcctgacacc

SEQ ID NO: 31700 - DNA, 19 bp, Homo Sapiens
aatcccactcctgacacca

SEQ ID NO: 31701 - DNA, 16 bp, Homo Sapiens
aatcccacttctgaca

SEQ ID NO: 31702 - DNA, 17 bp, Homo Sapiens
aatcccacttctgacac

SEQ ID NO: 31703 - DNA, 18 bp, Homo Sapiens
aatcccacttctgacacc

SEQ ID NO: 31704 - DNA, 19 bp, Homo Sapiens
aatcccacttctgacacca

SEQ ID NO: 31705 - DNA, 17 bp, Homo Sapiens
aatcccagcggggcctc

SEQ ID NO: 31706 - DNA, 19 bp, Homo Sapiens
aatcccagcggggcctcca

SEQ ID NO: 31707 - DNA, 16 bp, Homo Sapiens
aatcccagcggtgcct

SEQ ID NO: 31708 - DNA, 17 bp, Homo Sapiens
aatcccagcggtgcctc

SEQ ID NO: 31709 - DNA, 18 bp, Homo Sapiens
aatcccagcggtgcctcc

SEQ ID NO: 31710 - DNA, 39 bp, Homo Sapiens; identical to SEQ ID NO: 1989

SEQ ID NO: 31711 - DNA, 16 bp, Homo Sapiens
aatcccagtagagcct

SEQ ID NO: 31712 - DNA, 17 bp, Homo Sapiens
aatcccagtagagcctc

SEQ ID NO: 31713 - DNA, 17 bp, Homo Sapiens
aatcccatcctcgtcgc

SEQ ID NO: 31714 - DNA, 18 bp, Homo Sapiens
aatcccatcctcgtcgcc

SEQ ID NO: 31715 - DNA, 19 bp, Homo Sapiens
aatcccatcctcgtcgcca

SEQ ID NO: 31716 - DNA, 18 bp, Homo Sapiens
aatccccggcacctccac

SEQ ID NO: 31717 - DNA, 19 bp, Homo Sapiens
aatccccggcacctccacc

SEQ ID NO: 31718 - DNA, 20 bp, Homo Sapiens
aatccccggcacctccacca

SEQ ID NO: 31719 - DNA, 19 bp, Homo Sapiens
aatccccggcatctccacc

SEQ ID NO: 31720 - DNA, 16 bp, Homo Sapiens
aatcccggacgagccc

SEQ ID NO: 31721 - DNA, 17 bp, Homo Sapiens
aatcccggacgagcccc

SEQ ID NO: 31722 - DNA, 18 bp, Homo Sapiens
aatcccggacgagccccc

SEQ ID NO: 31723 - DNA, 19 bp, Homo Sapiens
aatcccggacgagccccca

SEQ ID NO: 31724 - DNA, 18 bp, Homo Sapiens
aatcccgggtttcggcac

SEQ ID NO: 31725 - DNA, 16 bp, Homo Sapiens
aatccgagtcacggca

SEQ ID NO: 31726 - DNA, 17 bp, Homo Sapiens
aatccgagtcacggcac

SEQ ID NO: 31727 - DNA, 18 bp, Homo Sapiens
aatccgagtcacggcacc

SEQ ID NO: 31728 - DNA, 19 bp, Homo Sapiens
aatccgagtcacggcacca

SEQ ID NO: 31729 - DNA, 16 bp, Homo Sapiens
aatccggctcgaagga

SEQ ID NO: 31730 - DNA, 17 bp, Homo Sapiens
aatccggctcgaaggac

SEQ ID NO: 31731 - DNA, 18 bp, Homo Sapiens
aatccggctcgaaggacc

SEQ ID NO: 31732 - DNA, 17 bp, Homo Sapiens
aatccggctcggaggac

SEQ ID NO: 31733 - DNA, 18 bp, Homo Sapiens
aatccggctcggaggacc

SEQ ID NO: 31734 - DNA, 16 bp, Homo Sapiens
aatccgggtgccccct

SEQ ID NO: 31735 - DNA, 17 bp, Homo Sapiens
aatccgggtgccccctc

SEQ ID NO: 31736 - DNA, 18 bp, Homo Sapiens
aatccgggtgccccctcc

SEQ ID NO: 31737 - DNA, 16 bp, Homo Sapiens
aatcctgccgactacg

SEQ ID NO: 31738 - DNA, 17 bp, Homo Sapiens
aatcctgccgactacgc

SEQ ID NO: 31739 - DNA, 18 bp, Homo Sapiens
aatcctgccgactacgcc

SEQ ID NO: 31740 - DNA, 19 bp, Homo Sapiens
aatcctgccgactacgcca

SEQ ID NO: 31741 - DNA, 18 bp, Homo Sapiens
aatcctgctcacagcgcc

SEQ ID NO: 31742 - DNA, 17 bp, Homo Sapiens
aatcctgtcggctacgc

SEQ ID NO: 31743 - DNA, 18 bp, Homo Sapiens
aatcctgtcggctacgcc

SEQ ID NO: 31744 - DNA, 16 bp, Homo Sapiens
aatcctgttcgtgacg

SEQ ID NO: 31745 - DNA, 17 bp, Homo Sapiens
aatcctgttcgtgacgc

SEQ ID NO: 31746 - DNA, 18 bp, Homo Sapiens
aatcctgttcgtgacgcc

SEQ ID NO: 31747 - DNA, 19 bp, Homo Sapiens
aatcctgttcgtgacgcca

SEQ ID NO: 31748 - DNA, 37 bp, Homo Sapiens; identical to SEQ ID NO: 2042

SEQ ID NO: 31749 - DNA, 39 bp, Homo Sapiens; identical to SEQ ID NO: 2048

SEQ ID NO: 31750 - DNA, 40 bp, Homo Sapiens; identical to SEQ ID NO: 2049

SEQ ID NO: 31751 - DNA, 16 bp, Homo Sapiens
aatctcgctggggcct

SEQ ID NO: 31752 - DNA, 17 bp, Homo Sapiens
aatctcgctggggcctc

SEQ ID NO: 31753 - DNA, 18 bp, Homo Sapiens
aatctcgctggggcctcc

SEQ ID NO: 31754 - DNA, 16 bp, Homo Sapiens
aatctcggtggaacct

SEQ ID NO: 31755 - DNA, 17 bp, Homo Sapiens
aatctcggtggaacctc

SEQ ID NO: 31756 - DNA, 18 bp, Homo Sapiens
aatctcggtggaacctcc

SEQ ID NO: 31757 - DNA, 19 bp, Homo Sapiens
aatctcggtggaacctcca

SEQ ID NO: 31758 - DNA, 16 bp, Homo Sapiens
aatctcggtgggacct

SEQ ID NO: 31759 - DNA, 17 bp, Homo Sapiens
aatctcggtgggacctc

SEQ ID NO: 31760 - DNA, 18 bp, Homo Sapiens
aatctcggtgggacctcc

SEQ ID NO: 31761 - DNA, 39 bp, Homo Sapiens; identical to SEQ ID NO: 2072

SEQ ID NO: 31762 - DNA, 40 bp, Homo Sapiens; identical to SEQ ID NO: 2073

SEQ ID NO: 31763 - DNA, 37 bp, Homo Sapiens; identical to SEQ ID NO: 2084

SEQ ID NO: 31764 - DNA, 39 bp, Homo Sapiens; identical to SEQ ID NO: 2086

SEQ ID NO: 31765 - DNA, 40 bp, Homo Sapiens; identical to SEQ ID NO: 2087

SEQ ID NO: 31766 - DNA, 39 bp, Homo Sapiens; identical to SEQ ID NO: 2094

SEQ ID NO: 31767 - DNA, 36 bp, Homo Sapiens; identical to SEQ ID NO: 2109

SEQ ID NO: 31768 - DNA, 37 bp, Homo Sapiens; identical to SEQ ID NO: 2110

SEQ ID NO: 31769 - DNA, 38 bp, Homo Sapiens; identical to SEQ ID NO: 2111

SEQ ID NO: 31770 - DNA, 39 bp, Homo Sapiens; identical to SEQ ID NO: 2112

SEQ ID NO: 31771 - DNA, 20 bp, Homo Sapiens
aatgccgaggttgtgagttc

SEQ ID NO: 31772 - DNA, 16 bp, Homo Sapiens
aatggacgagcgcgct

SEQ ID NO: 31773 - DNA, 19 bp, Homo Sapiens
aatggacgagcgcgctgga

SEQ ID NO: 31774 - DNA, 34 bp, Homo Sapiens; identical to SEQ ID NO: 2160

SEQ ID NO: 31775 - DNA, 35 bp, Homo Sapiens; identical to SEQ ID NO: 2161

SEQ ID NO: 31776 - DNA, 36 bp, Homo Sapiens; identical to SEQ ID NO: 2162

SEQ ID NO: 31777 - DNA, 20 bp, Homo Sapiens
aatggataacgcgtctgact

SEQ ID NO: 31778 - DNA, 16 bp, Homo Sapiens
aatggataaggcactg

SEQ ID NO: 31779 - DNA, 20 bp, Homo Sapiens
aatggataaggcatcagcct

SEQ ID NO: 31780 - DNA, 22 bp, Homo Sapiens
aatggataaggcatcagcctcc

SEQ ID NO: 31781 - DNA, 29 bp, Homo Sapiens
aatggataaggcatcagcctccggagctg

SEQ ID NO: 31782 - DNA, 37 bp, Homo Sapiens
aatggataaggcatcagcctccggagctggggattgt

SEQ ID NO: 31783 - DNA, 16 bp, Homo Sapiens
aatggataaggcattg

SEQ ID NO: 31784 - DNA, 18 bp, Homo Sapiens
aatggataaggcgtctga

SEQ ID NO: 31785 - DNA, 20 bp, Homo Sapiens
aatggataaggcgtctgact

SEQ ID NO: 31786 - DNA, 22 bp, Homo Sapiens
aatggataaggcgtctgattcc

SEQ ID NO: 31787 - DNA, 18 bp, Homo Sapiens
aatggatagcgcattgga

SEQ ID NO: 31788 - DNA, 19 bp, Homo Sapiens
aatggatagcgcattggac

SEQ ID NO: 31789 - DNA, 20 bp, Homo Sapiens
aatggatagcgcattggact

SEQ ID NO: 31790 - DNA, 22 bp, Homo Sapiens
aatggatagcgcattggacttc

SEQ ID NO: 31791 - DNA, 40 bp, Homo Sapiens
aatggatagcgcattggacttctaattcaaaggttccggg

SEQ ID NO: 31792 - DNA, 24 bp, Homo Sapiens
aatggctgagtgaagcattggact

SEQ ID NO: 31793 - DNA, 19 bp, Homo Sapiens
aatggtagaattctcgcct

SEQ ID NO: 31794 - DNA, 17 bp, Homo Sapiens
aatggtagagcgctcgc

SEQ ID NO: 31795 - DNA, 19 bp, Homo Sapiens
aatggtagagcgctcgctt

SEQ ID NO: 31796 - DNA, 22 bp, Homo Sapiens
aatggtgagcactttggactct

SEQ ID NO: 31797 - DNA, 19 bp, Homo Sapiens
aatggtggagttaaagact

SEQ ID NO: 31798 - DNA, 29 bp, Homo Sapiens
aatggtggagttaaagactttttctctga

SEQ ID NO: 31799 - DNA, 30 bp, Homo Sapiens; identical to SEQ ID NO: 2232

SEQ ID NO: 31800 - DNA, 31 bp, Homo Sapiens; identical to SEQ ID NO: 2233

SEQ ID NO: 31801 - DNA, 32 bp, Homo Sapiens; identical to SEQ ID NO: 2234

SEQ ID NO: 31802 - DNA, 16 bp, Homo Sapiens
aatggtggttcagtgg

SEQ ID NO: 31803 - DNA, 28 bp, Homo Sapiens
aatggtggttcagtggtagaattctcgc

SEQ ID NO: 31804 - DNA, 29 bp, Homo Sapiens
aatggtggttcagtggtagaattctcgcc

SEQ ID NO: 31805 - DNA, 30 bp, Homo Sapiens; identical to SEQ ID NO: 2236

SEQ ID NO: 31806 - DNA, 16 bp, Homo Sapiens
aatggttagcactctg

SEQ ID NO: 31807 - DNA, 17 bp, Homo Sapiens
aatggttagcactctgg

SEQ ID NO: 31808 - DNA, 18 bp, Homo Sapiens
aatggttagcactctgga

SEQ ID NO: 31809 - DNA, 20 bp, Homo Sapiens
aatggttagcactctggact

SEQ ID NO: 31810 - DNA, 21 bp, Homo Sapiens
aatggttagcactctggactc

SEQ ID NO: 31811 - DNA, 22 bp, Homo Sapiens
aatggttagcactctggactct

SEQ ID NO: 31812 - DNA, 23 bp, Homo Sapiens
aatggttagcactctggactctg

SEQ ID NO: 31813 - DNA, 24 bp, Homo Sapiens
aatggttagcactctggactctga

SEQ ID NO: 31814 - DNA, 25 bp, Homo Sapiens
aatggttagcactctggactctgaa

SEQ ID NO: 31815 - DNA, 26 bp, Homo Sapiens
aatggttagcactctggactctgaat

SEQ ID NO: 31816 - DNA, 27 bp, Homo Sapiens
aatggttagcactctggactctgaatc

SEQ ID NO: 31817 - DNA, 28 bp, Homo Sapiens
aatggttagcactctggactctgaatcc

SEQ ID NO: 31818 - DNA, 29 bp, Homo Sapiens
aatggttagcactctggactctgaatcca

SEQ ID NO: 31819 - DNA, 31 bp, Homo Sapiens; identical to SEQ ID NO: 2251

SEQ ID NO: 31820 - DNA, 32 bp, Homo Sapiens; identical to SEQ ID NO: 2252

SEQ ID NO: 31821 - DNA, 39 bp, Homo Sapiens; identical to SEQ ID NO: 2253

SEQ ID NO: 31822 - DNA, 40 bp, Homo Sapiens; identical to SEQ ID NO: 2254

SEQ ID NO: 31823 - DNA, 41 bp, Homo Sapiens
aatggttagcactctggactctgaatccagcgatccgagtt

SEQ ID NO: 31824 - DNA, 43 bp, Homo Sapiens; identical to SEQ ID NO: 2255

SEQ ID NO: 31825 - DNA, 27 bp, Homo Sapiens
aatggttagcactctggactttgaatc

SEQ ID NO: 31826 - DNA, 31 bp, Homo Sapiens; identical to SEQ ID NO: 2258

SEQ ID NO: 31827 - DNA, 39 bp, Homo Sapiens; identical to SEQ ID NO: 2259

SEQ ID NO: 31828 - DNA, 40 bp, Homo Sapiens; identical to SEQ ID NO: 2260

SEQ ID NO: 31829 - DNA, 29 bp, Homo Sapiens
aatgttggttatacccttcccgtactacc

SEQ ID NO: 31830 - DNA, 30 bp, Homo Sapiens; identical to SEQ ID NO: 2272

SEQ ID NO: 31831 - DNA, 16 bp, Homo Sapiens
aatgtttagacgggct

SEQ ID NO: 31832 - DNA, 17 bp, Homo Sapiens
aatgtttagacgggctc

SEQ ID NO: 31833 - DNA, 18 bp, Homo Sapiens
aatgtttagacgggctca

SEQ ID NO: 31834 - DNA, 19 bp, Homo Sapiens
aatgtttagacgggctcac

SEQ ID NO: 31835 - DNA, 20 bp, Homo Sapiens
aatgtttagacgggctcaca

SEQ ID NO: 31836 - DNA, 25 bp, Homo Sapiens
aatgtttagacgggctcacatcacc

SEQ ID NO: 31837 - DNA, 26 bp, Homo Sapiens
aatgtttagacgggctcacatcaccc

SEQ ID NO: 31838 - DNA, 27 bp, Homo Sapiens
aatgtttagacgggctcacatcacccc

SEQ ID NO: 31839 - DNA, 28 bp, Homo Sapiens
aatgtttagacgggctcacatcacccca

SEQ ID NO: 31840 - DNA, 29 bp, Homo Sapiens
aatgtttagacgggctcacatcaccccat

SEQ ID NO: 31841 - DNA, 30 bp, Homo Sapiens; identical to SEQ ID NO: 2287

SEQ ID NO: 31842 - DNA, 31 bp, Homo Sapiens; identical to SEQ ID NO: 2288

SEQ ID NO: 31843 - DNA, 32 bp, Homo Sapiens; identical to SEQ ID NO: 2289

SEQ ID NO: 31844 - DNA, 36 bp, Homo Sapiens; identical to SEQ ID NO: 2292

SEQ ID NO: 31845 - DNA, 37 bp, Homo Sapiens; identical to SEQ ID NO: 2293

SEQ ID NO: 31846 - DNA, 17 bp, Homo Sapiens
aattaactagttttgac

SEQ ID NO: 31847 - DNA, 44 bp, Homo Sapiens; identical to SEQ ID NO: 2327

SEQ ID NO: 31848 - DNA, 18 bp, Homo Sapiens
aattcaaaggttccgggt

SEQ ID NO: 31849 - DNA, 39 bp, Homo Sapiens; identical to SEQ ID NO: 2341

SEQ ID NO: 31850 - DNA, 39 bp, Homo Sapiens; identical to SEQ ID NO: 2343

SEQ ID NO: 31851 - DNA, 40 bp, Homo Sapiens; identical to SEQ ID NO: 2344

SEQ ID NO: 31852 - DNA, 39 bp, Homo Sapiens; identical to SEQ ID NO: 2345

SEQ ID NO: 31853 - DNA, 17 bp, Homo Sapiens
aattccccgacggggag

SEQ ID NO: 31854 - DNA, 18 bp, Homo Sapiens
aattccccgacggggagc

SEQ ID NO: 31855 - DNA, 19 bp, Homo Sapiens
aattccccgacggggagcc

SEQ ID NO: 31856 - DNA, 33 bp, Homo Sapiens; identical to SEQ ID NO: 2353

SEQ ID NO: 31857 - DNA, 34 bp, Homo Sapiens; identical to SEQ ID NO: 2354

SEQ ID NO: 31858 - DNA, 35 bp, Homo Sapiens; identical to SEQ ID NO: 2355

SEQ ID NO: 31859 - DNA, 16 bp, Homo Sapiens
aattctcgcctgccac

SEQ ID NO: 31860 - DNA, 17 bp, Homo Sapiens
aattctcgcctgccacg

SEQ ID NO: 31861 - DNA, 29 bp, Homo Sapiens
aattctcgcctgccacgcgggaggcccgg

SEQ ID NO: 31862 - DNA, 18 bp, Homo Sapiens
aattctcgctggggcctc

SEQ ID NO: 31863 - DNA, 41 bp, Homo Sapiens; identical to SEQ ID NO: 2376

SEQ ID NO: 31864 - DNA, 42 bp, Homo Sapiens; identical to SEQ ID NO: 2377

SEQ ID NO: 31865 - DNA, 45 bp, Homo Sapiens; identical to SEQ ID NO: 2380

SEQ ID NO: 31866 - DNA, 20 bp, Homo Sapiens
aattttggattctcagggat

SEQ ID NO: 31867 - DNA, 43 bp, Homo Sapiens
aattttggattctcagggatgggttcgattctcatagtcctag

SEQ ID NO: 31868 - DNA, 44 bp, Homo Sapiens
aattttggattctcagggatgggttcgattctcatagtcctagc

SEQ ID NO: 31869 - DNA, 16 bp, Homo Sapiens
aattttggtgcaactc

SEQ ID NO: 31870 - DNA, 17 bp, Homo Sapiens
aattttggtgcaactcc

SEQ ID NO: 31871 - DNA, 22 bp, Homo Sapiens
acaaaacgaatgatttcgactc

SEQ ID NO: 31872 - DNA, 23 bp, Homo Sapiens
acaaaacgaatgatttcgactca

SEQ ID NO: 31873 - DNA, 34 bp, Homo Sapiens; identical to SEQ ID NO: 2416

SEQ ID NO: 31874 - DNA, 32 bp, Homo Sapiens; identical to SEQ ID NO: 2433

SEQ ID NO: 31875 - DNA, 17 bp, Homo Sapiens
acaacatggctttctca

SEQ ID NO: 31876 - DNA, 19 bp, Homo Sapiens
acaacatggctttctcacc

SEQ ID NO: 31877 - DNA, 20 bp, Homo Sapiens
acaacatggctttctcacca

SEQ ID NO: 31878 - DNA, 16 bp, Homo Sapiens
acaagaactgctaact

SEQ ID NO: 31879 - DNA, 17 bp, Homo Sapiens
acaagaactgctaactc

SEQ ID NO: 31880 - DNA, 21 bp, Homo Sapiens
acaagaactgctaactcatgc

SEQ ID NO: 31881 - DNA, 22 bp, Homo Sapiens
acaagaactgctaactcatgcc

SEQ ID NO: 31882 - DNA, 25 bp, Homo Sapiens
acaagaactgctaactcatgccccc

SEQ ID NO: 31883 - DNA, 28 bp, Homo Sapiens
acaagaactgctaactcatgcccccatg

SEQ ID NO: 31884 - DNA, 35 bp, Homo Sapiens; identical to SEQ ID NO: 2478

SEQ ID NO: 31885 - DNA, 38 bp, Homo Sapiens; identical to SEQ ID NO: 2481

SEQ ID NO: 31886 - DNA, 41 bp, Homo Sapiens; identical to SEQ ID NO: 2484

SEQ ID NO: 31887 - DNA, 42 bp, Homo Sapiens; identical to SEQ ID NO: 2485

SEQ ID NO: 31888 - DNA, 43 bp, Homo Sapiens; identical to SEQ ID NO: 2486

SEQ ID NO: 31889 - DNA, 44 bp, Homo Sapiens; identical to SEQ ID NO: 2487

SEQ ID NO: 31890 - DNA, 46 bp, Homo Sapiens; identical to SEQ ID NO: 2489

SEQ ID NO: 31891 - DNA, 47 bp, Homo Sapiens; identical to SEQ ID NO: 2490

SEQ ID NO: 31892 - DNA, 18 bp, Homo Sapiens
acacctctttacagtgac

SEQ ID NO: 31893 - DNA, 19 bp, Homo Sapiens
acacctctttacagtgacc

SEQ ID NO: 31894 - DNA, 17 bp, Homo Sapiens
acacgcagaaggtcctg

SEQ ID NO: 31895 - DNA, 41 bp, Homo Sapiens; identical to SEQ ID NO: 2508

SEQ ID NO: 31896 - DNA, 20 bp, Homo Sapiens
acacgcgaaaggtccccggt

SEQ ID NO: 31897 - DNA, 39 bp, Homo Sapiens
acacgcgaaaggtccccggttcgaaaccgggcggaaaca

SEQ ID NO: 31898 - DNA, 40 bp, Homo Sapiens; identical to SEQ ID NO: 2513

SEQ ID NO: 31899 - DNA, 41 bp, Homo Sapiens; identical to SEQ ID NO: 2514

SEQ ID NO: 31900 - DNA, 30 bp, Homo Sapiens
acacgtgggttcgaatcccatcctcgtcgc

SEQ ID NO: 31901 - DNA, 31 bp, Homo Sapiens; identical to SEQ ID NO: 2517

SEQ ID NO: 31902 - DNA, 45 bp, Homo Sapiens; identical to SEQ ID NO: 2534

SEQ ID NO: 31903 - DNA, 36 bp, Homo Sapiens; identical to SEQ ID NO: 2554

SEQ ID NO: 31904 - DNA, 37 bp, Homo Sapiens; identical to SEQ ID NO: 2555

SEQ ID NO: 31905 - DNA, 38 bp, Homo Sapiens; identical to SEQ ID NO: 2556

SEQ ID NO: 31906 - DNA, 39 bp, Homo Sapiens; identical to SEQ ID NO: 2557

SEQ ID NO: 31907 - DNA, 40 bp, Homo Sapiens; identical to SEQ ID NO: 2558

SEQ ID NO: 31908 - DNA, 16 bp, Homo Sapiens
acagaggcttacgacc

SEQ ID NO: 31909 - DNA, 29 bp, Homo Sapiens
acagaggcttacgaccccttatttacccc

SEQ ID NO: 31910 - DNA, 30 bp, Homo Sapiens; identical to SEQ ID NO: 2590

SEQ ID NO: 31911 - DNA, 17 bp, Homo Sapiens
acagctatccattggtc

SEQ ID NO: 31912 - DNA, 35 bp, Homo Sapiens; identical to SEQ ID NO: 2611

SEQ ID NO: 31913 - DNA, 32 bp, Homo Sapiens; identical to SEQ ID NO: 2614

SEQ ID NO: 31914 - DNA, 33 bp, Homo Sapiens; identical to SEQ ID NO: 2615

SEQ ID NO: 31915 - DNA, 34 bp, Homo Sapiens; identical to SEQ ID NO: 2616

SEQ ID NO: 31916 - DNA, 35 bp, Homo Sapiens; identical to SEQ ID NO: 2617

SEQ ID NO: 31917 - DNA, 36 bp, Homo Sapiens; identical to SEQ ID NO: 2618

SEQ ID NO: 31918 - DNA, 37 bp, Homo Sapiens; identical to SEQ ID NO: 2619

SEQ ID NO: 31919 - DNA, 38 bp, Homo Sapiens; identical to SEQ ID NO: 2620

SEQ ID NO: 31920 - DNA, 33 bp, Homo Sapiens; identical to SEQ ID NO: 2623

SEQ ID NO: 31921 - DNA, 34 bp, Homo Sapiens; identical to SEQ ID NO: 2624

SEQ ID NO: 31922 - DNA, 35 bp, Homo Sapiens; identical to SEQ ID NO: 2625

SEQ ID NO: 31923 - DNA, 36 bp, Homo Sapiens; identical to SEQ ID NO: 2626

SEQ ID NO: 31924 - DNA, 37 bp, Homo Sapiens; identical to SEQ ID NO: 2627

SEQ ID NO: 31925 - DNA, 38 bp, Homo Sapiens; identical to SEQ ID NO: 2628

SEQ ID NO: 31926 - DNA, 35 bp, Homo Sapiens; identical to SEQ ID NO: 2629

SEQ ID NO: 31927 - DNA, 27 bp, Homo Sapiens
acaggggttaggcctctttttaccacc

SEQ ID NO: 31928 - DNA, 25 bp, Homo Sapiens
acaggttcgaatcctgttcgtgacg

SEQ ID NO: 31929 - DNA, 26 bp, Homo Sapiens
acaggttcgaatcctgttcgtgacgc

SEQ ID NO: 31930 - DNA, 27 bp, Homo Sapiens
acaggttcgaatcctgttcgtgacgcc

SEQ ID NO: 31931 - DNA, 17 bp, Homo Sapiens
acatcagattgtgaatc

SEQ ID NO: 31932 - DNA, 19 bp, Homo Sapiens
acatcagattgtgaatctg

SEQ ID NO: 31933 - DNA, 30 bp, Homo Sapiens; identical to SEQ ID NO: 2675

SEQ ID NO: 31934 - DNA, 31 bp, Homo Sapiens; identical to SEQ ID NO: 2676

SEQ ID NO: 31935 - DNA, 32 bp, Homo Sapiens; identical to SEQ ID NO: 2677

SEQ ID NO: 31936 - DNA, 37 bp, Homo Sapiens; identical to SEQ ID NO: 2682

SEQ ID NO: 31937 - DNA, 38 bp, Homo Sapiens; identical to SEQ ID NO: 2683

SEQ ID NO: 31938 - DNA, 16 bp, Homo Sapiens
acatggctttctcacc

SEQ ID NO: 31939 - DNA, 17 bp, Homo Sapiens
acatggctttctcacca

SEQ ID NO: 31940 - DNA, 22 bp, Homo Sapiens
acatggtctagcggttaggatt

SEQ ID NO: 31941 - DNA, 24 bp, Homo Sapiens
acatggtctagcggttaggattcc

SEQ ID NO: 31942 - DNA, 25 bp, Homo Sapiens
acatggtctagcggttaggattcct

SEQ ID NO: 31943 - DNA, 26 bp, Homo Sapiens
acatggtctagcggttaggattcctg

SEQ ID NO: 31944 - DNA, 28 bp, Homo Sapiens
acatggtctagcggttaggattcctggt

SEQ ID NO: 31945 - DNA, 29 bp, Homo Sapiens
acatggtctagcggttaggattcctggtt

SEQ ID NO: 31946 - DNA, 30 bp, Homo Sapiens; identical to SEQ ID NO: 2704

SEQ ID NO: 31947 - DNA, 31 bp, Homo Sapiens; identical to SEQ ID NO: 2705

SEQ ID NO: 31948 - DNA, 32 bp, Homo Sapiens; identical to SEQ ID NO: 2706

SEQ ID NO: 31949 - DNA, 38 bp, Homo Sapiens; identical to SEQ ID NO: 2710

SEQ ID NO: 31950 - DNA, 18 bp, Homo Sapiens
accaaaacatcagattgt

SEQ ID NO: 31951 - DNA, 22 bp, Homo Sapiens
accaaaacatcagattgtgaat

SEQ ID NO: 31952 - DNA, 23 bp, Homo Sapiens
accaaaacatcagattgtgaatc

SEQ ID NO: 31953 - DNA, 44 bp, Homo Sapiens; identical to SEQ ID NO: 2736

SEQ ID NO: 31954 - DNA, 22 bp, Homo Sapiens
accaacacctctttacagtgac

SEQ ID NO: 31955 - DNA, 16 bp, Homo Sapiens
accagaatggccgagt

SEQ ID NO: 31956 - DNA, 17 bp, Homo Sapiens
accagaatggccgagtg

SEQ ID NO: 31957 - DNA, 18 bp, Homo Sapiens
accagaatggccgagtgg

SEQ ID NO: 31958 - DNA, 19 bp, Homo Sapiens
accagaatggccgagtggt

SEQ ID NO: 31959 - DNA, 25 bp, Homo Sapiens
accagaatggccgagtggttaaggc

SEQ ID NO: 31960 - DNA, 16 bp, Homo Sapiens
accaggatggccgagt

SEQ ID NO: 31961 - DNA, 17 bp, Homo Sapiens
accaggatggccgagtg

SEQ ID NO: 31962 - DNA, 18 bp, Homo Sapiens
accaggatggccgagtgg

SEQ ID NO: 31963 - DNA, 19 bp, Homo Sapiens
accaggatggccgagtggt

SEQ ID NO: 31964 - DNA, 20 bp, Homo Sapiens
accaggatggccgagtggtt

SEQ ID NO: 31965 - DNA, 21 bp, Homo Sapiens
accaggatggccgagtggtta

SEQ ID NO: 31966 - DNA, 22 bp, Homo Sapiens
accaggatggccgagtggttaa

SEQ ID NO: 31967 - DNA, 23 bp, Homo Sapiens
accaggatggccgagtggttaag

SEQ ID NO: 31968 - DNA, 24 bp, Homo Sapiens
accaggatggccgagtggttaagg

SEQ ID NO: 31969 - DNA, 25 bp, Homo Sapiens
accaggatggccgagtggttaaggc

SEQ ID NO: 31970 - DNA, 32 bp, Homo Sapiens; identical to SEQ ID NO: 2781

SEQ ID NO: 31971 - DNA, 33 bp, Homo Sapiens; identical to SEQ ID NO: 2782

SEQ ID NO: 31972 - DNA, 43 bp, Homo Sapiens
accaggatggccgagtggttaaggcgttggacttaagatccaa

SEQ ID NO: 31973 - DNA, 16 bp, Homo Sapiens
accaggcggaaacacc

SEQ ID NO: 31974 - DNA, 18 bp, Homo Sapiens
accaggggtcgcgagttc

SEQ ID NO: 31975 - DNA, 19 bp, Homo Sapiens
accaggggtcgcgagttca

SEQ ID NO: 31976 - DNA, 32 bp, Homo Sapiens; identical to SEQ ID NO: 2790

SEQ ID NO: 31977 - DNA, 35 bp, Homo Sapiens; identical to SEQ ID NO: 2793

SEQ ID NO: 31978 - DNA, 36 bp, Homo Sapiens; identical to SEQ ID NO: 2794

SEQ ID NO: 31979 - DNA, 37 bp, Homo Sapiens; identical to SEQ ID NO: 2795

SEQ ID NO: 31980 - DNA, 35 bp, Homo Sapiens; identical to SEQ ID NO: 2797

SEQ ID NO: 31981 - DNA, 35 bp, Homo Sapiens; identical to SEQ ID NO: 2800

SEQ ID NO: 31982 - DNA, 37 bp, Homo Sapiens; identical to SEQ ID NO: 2801

SEQ ID NO: 31983 - DNA, 16 bp, Homo Sapiens
accatcctctgctacc

SEQ ID NO: 31984 - DNA, 17 bp, Homo Sapiens
accatcctctgctacca

SEQ ID NO: 31985 - DNA, 29 bp, Homo Sapiens
acccaacttacacttaggagatttcaact

SEQ ID NO: 31986 - DNA, 43 bp, Homo Sapiens; identical to SEQ ID NO: 2831

SEQ ID NO: 31987 - DNA, 45 bp, Homo Sapiens; identical to SEQ ID NO: 2833

SEQ ID NO: 31988 - DNA, 46 bp, Homo Sapiens; identical to SEQ ID NO: 2834

SEQ ID NO: 31989 - DNA, 47 bp, Homo Sapiens; identical to SEQ ID NO: 2835

SEQ ID NO: 31990 - DNA, 18 bp, Homo Sapiens
acccagaggtcgatggat

SEQ ID NO: 31991 - DNA, 19 bp, Homo Sapiens
acccagaggtcgatggatc

SEQ ID NO: 31992 - DNA, 20 bp, Homo Sapiens
acccagaggtcgatggatcg

SEQ ID NO: 31993 - DNA, 34 bp, Homo Sapiens
acccagaggtcgatggatcgaaaccatcctctgc

SEQ ID NO: 31994 - DNA, 35 bp, Homo Sapiens; identical to SEQ ID NO: 2845

SEQ ID NO: 31995 - DNA, 38 bp, Homo Sapiens
acccagaggtcgatggatcgaaaccatcctctgctacc

SEQ ID NO: 31996 - DNA, 39 bp, Homo Sapiens
acccagaggtcgatggatcgaaaccatcctctgctacca

SEQ ID NO: 31997 - DNA, 32 bp, Homo Sapiens; identical to SEQ ID NO: 2851

SEQ ID NO: 31998 - DNA, 33 bp, Homo Sapiens; identical to SEQ ID NO: 2852

SEQ ID NO: 31999 - DNA, 34 bp, Homo Sapiens; identical to SEQ ID NO: 2853

SEQ ID NO: 32000 - DNA, 35 bp, Homo Sapiens; identical to SEQ ID NO: 2854

SEQ ID NO: 32001 - DNA, 36 bp, Homo Sapiens; identical to SEQ ID NO: 2855

SEQ ID NO: 32002 - DNA, 37 bp, Homo Sapiens; identical to SEQ ID NO: 2856

SEQ ID NO: 32003 - DNA, 38 bp, Homo Sapiens; identical to SEQ ID NO: 2857

SEQ ID NO: 32004 - DNA, 39 bp, Homo Sapiens; identical to SEQ ID NO: 2858

SEQ ID NO: 32005 - DNA, 36 bp, Homo Sapiens; identical to SEQ ID NO: 2864

SEQ ID NO: 32006 - DNA, 37 bp, Homo Sapiens; identical to SEQ ID NO: 2865

SEQ ID NO: 32007 - DNA, 16 bp, Homo Sapiens
accccactcctggtac

SEQ ID NO: 32008 - DNA, 17 bp, Homo Sapiens
accccactcctggtacc

SEQ ID NO: 32009 - DNA, 18 bp, Homo Sapiens
accccactcctggtacca

SEQ ID NO: 32010 - DNA, 17 bp, Homo Sapiens
acccccttatttctacc

SEQ ID NO: 32011 - DNA, 38 bp, Homo Sapiens; identical to SEQ ID NO: 2890

SEQ ID NO: 32012 - DNA, 16 bp, Homo Sapiens
accccgtacgggccac

SEQ ID NO: 32013 - DNA, 17 bp, Homo Sapiens
accccgtacgggccacc

SEQ ID NO: 32014 - DNA, 16 bp, Homo Sapiens
accccgtccgtgcctc

SEQ ID NO: 32015 - DNA, 17 bp, Homo Sapiens
accccgtccgtgcctcc

SEQ ID NO: 32016 - DNA, 18 bp, Homo Sapiens
accccgtccgtgcctcca

SEQ ID NO: 32017 - DNA, 16 bp, Homo Sapiens
accccttatttacccc

SEQ ID NO: 32018 - DNA, 17 bp, Homo Sapiens
accccttatttacccca

SEQ ID NO: 32019 - DNA, 28 bp, Homo Sapiens
acccgggttcgattcccgggcggcgcac

SEQ ID NO: 32020 - DNA, 16 bp, Homo Sapiens
accctgctcgctgcgc

SEQ ID NO: 32021 - DNA, 17 bp, Homo Sapiens
accctgctcgctgcgcc

SEQ ID NO: 32022 - DNA, 18 bp, Homo Sapiens
accctgctcgctgcgcca

SEQ ID NO: 32023 - DNA, 17 bp, Homo Sapiens
accctggactctgaatc

SEQ ID NO: 32024 - DNA, 18 bp, Homo Sapiens
accgaaaggttggtggtt

SEQ ID NO: 32025 - DNA, 23 bp, Homo Sapiens
accgaaaggttggtggttcgagc

SEQ ID NO: 32026 - DNA, 38 bp, Homo Sapiens; identical to SEQ ID NO: 2912

SEQ ID NO: 32027 - DNA, 34 bp, Homo Sapiens; identical to SEQ ID NO: 2916

SEQ ID NO: 32028 - DNA, 35 bp, Homo Sapiens; identical to SEQ ID NO: 2917

SEQ ID NO: 32029 - DNA, 36 bp, Homo Sapiens; identical to SEQ ID NO: 2918

SEQ ID NO: 32030 - DNA, 37 bp, Homo Sapiens; identical to SEQ ID NO: 2919

SEQ ID NO: 32031 - DNA, 38 bp, Homo Sapiens; identical to SEQ ID NO: 2920

SEQ ID NO: 32032 - DNA, 16 bp, Homo Sapiens
accgaagatcgcgggt

SEQ ID NO: 32033 - DNA, 19 bp, Homo Sapiens
accgaagatcgcgggttcg

SEQ ID NO: 32034 - DNA, 34 bp, Homo Sapiens; identical to SEQ ID NO: 2926

SEQ ID NO: 32035 - DNA, 35 bp, Homo Sapiens; identical to SEQ ID NO: 2927

SEQ ID NO: 32036 - DNA, 36 bp, Homo Sapiens; identical to SEQ ID NO: 2928

SEQ ID NO: 32037 - DNA, 37 bp, Homo Sapiens; identical to SEQ ID NO: 2929

SEQ ID NO: 32038 - DNA, 38 bp, Homo Sapiens; identical to SEQ ID NO: 2930

SEQ ID NO: 32039 - DNA, 16 bp, Homo Sapiens
accgagcggaaacacc

SEQ ID NO: 32040 - DNA, 36 bp, Homo Sapiens; identical to SEQ ID NO: 2957

SEQ ID NO: 32041 - DNA, 37 bp, Homo Sapiens; identical to SEQ ID NO: 2958

SEQ ID NO: 32042 - DNA, 38 bp, Homo Sapiens; identical to SEQ ID NO: 2959

SEQ ID NO: 32043 - DNA, 39 bp, Homo Sapiens; identical to SEQ ID NO: 2960

SEQ ID NO: 32044 - DNA, 29 bp, Homo Sapiens
accggagatgaaaacctttttccaaggac

SEQ ID NO: 32045 - DNA, 31 bp, Homo Sapiens; identical to SEQ ID NO: 2978

SEQ ID NO: 32046 - DNA, 32 bp, Homo Sapiens; identical to SEQ ID NO: 2979

SEQ ID NO: 32047 - DNA, 33 bp, Homo Sapiens; identical to SEQ ID NO: 2980

SEQ ID NO: 32048 - DNA, 16 bp, Homo Sapiens
accgggatggccgagt

SEQ ID NO: 32049 - DNA, 18 bp, Homo Sapiens
accgggatggccgagtgg

SEQ ID NO: 32050 - DNA, 33 bp, Homo Sapiens
accgggatggccgagtggttaaggcgttggact

SEQ ID NO: 32051 - DNA, 16 bp, Homo Sapiens
accgggcagaagcacc

SEQ ID NO: 32052 - DNA, 17 bp, Homo Sapiens
accgggcagaagcacca

SEQ ID NO: 32053 - DNA, 16 bp, Homo Sapiens
accgggcggaaacacc

SEQ ID NO: 32054 - DNA, 17 bp, Homo Sapiens
accgggcggaaacacca

SEQ ID NO: 32055 - DNA, 28 bp, Homo Sapiens
accggggttcaattccccgacggggagc

SEQ ID NO: 32056 - DNA, 29 bp, Homo Sapiens
accggggttcaattccccgacggggagcc

SEQ ID NO: 32057 - DNA, 27 bp, Homo Sapiens
accggggttcgattccccgacggggag

SEQ ID NO: 32058 - DNA, 28 bp, Homo Sapiens
accggggttcgattccccgacggggagc

SEQ ID NO: 32059 - DNA, 29 bp, Homo Sapiens
accggggttcgattccccgacggggagcc

SEQ ID NO: 32060 - DNA, 30 bp, Homo Sapiens; identical to SEQ ID NO: 2992

SEQ ID NO: 32061 - DNA, 17 bp, Homo Sapiens
acctcagagggggcacc

SEQ ID NO: 32062 - DNA, 18 bp, Homo Sapiens
acctcagagggggcacca

SEQ ID NO: 32063 - DNA, 26 bp, Homo Sapiens
acctcggttcgaatccgagtcacggc

SEQ ID NO: 32064 - DNA, 28 bp, Homo Sapiens
acctcggttcgaatccgagtcacggcac

SEQ ID NO: 32065 - DNA, 16 bp, Homo Sapiens
acctcgtggcgcaacg

SEQ ID NO: 32066 - DNA, 16 bp, Homo Sapiens
acctctttacagtgac

SEQ ID NO: 32067 - DNA, 17 bp, Homo Sapiens
acctctttacagtgacc

SEQ ID NO: 32068 - DNA, 18 bp, Homo Sapiens
acctctttacagtgacca

SEQ ID NO: 32069 - DNA, 16 bp, Homo Sapiens
acctgccggggcttcc

SEQ ID NO: 32070 - DNA, 17 bp, Homo Sapiens
acctgccggggcttcca

SEQ ID NO: 32071 - DNA, 28 bp, Homo Sapiens
accttttaagttaaagattaagagaacc

SEQ ID NO: 32072 - DNA, 16 bp, Homo Sapiens
acgaatgatttcgact

SEQ ID NO: 32073 - DNA, 17 bp, Homo Sapiens
acgaatgatttcgactc

SEQ ID NO: 32074 - DNA, 18 bp, Homo Sapiens
acgaatgatttcgactca

SEQ ID NO: 32075 - DNA, 19 bp, Homo Sapiens
acgaccccttatttacccc

SEQ ID NO: 32076 - DNA, 20 bp, Homo Sapiens
acgaccccttatttacccca

SEQ ID NO: 32077 - DNA, 29 bp, Homo Sapiens
acgaggccccgggttcaatccccggcacc

SEQ ID NO: 32078 - DNA, 34 bp, Homo Sapiens
acgaggccccgggttcaatccccggcacctccac

SEQ ID NO: 32079 - DNA, 35 bp, Homo Sapiens; identical to SEQ ID NO: 3066

SEQ ID NO: 32080 - DNA, 17 bp, Homo Sapiens
acgaggtggccgagtgg

SEQ ID NO: 32081 - DNA, 32 bp, Homo Sapiens; identical to SEQ ID NO: 3076

SEQ ID NO: 32082 - DNA, 36 bp, Homo Sapiens; identical to SEQ ID NO: 3080

SEQ ID NO: 32083 - DNA, 37 bp, Homo Sapiens; identical to SEQ ID NO: 3081

SEQ ID NO: 32084 - DNA, 38 bp, Homo Sapiens; identical to SEQ ID NO: 3082

SEQ ID NO: 32085 - DNA, 40 bp, Homo Sapiens; identical to SEQ ID NO: 3084

SEQ ID NO: 32086 - DNA, 46 bp, Homo Sapiens; identical to SEQ ID NO: 3089

SEQ ID NO: 32087 - DNA, 47 bp, Homo Sapiens; identical to SEQ ID NO: 3090

SEQ ID NO: 32088 - DNA, 37 bp, Homo Sapiens; identical to SEQ ID NO: 3098

SEQ ID NO: 32089 - DNA, 38 bp, Homo Sapiens; identical to SEQ ID NO: 3099

SEQ ID NO: 32090 - DNA, 39 bp, Homo Sapiens; identical to SEQ ID NO: 3100

SEQ ID NO: 32091 - DNA, 40 bp, Homo Sapiens; identical to SEQ ID NO: 3101

SEQ ID NO: 32092 - DNA, 17 bp, Homo Sapiens
acgccaaggtcgcgggt

SEQ ID NO: 32093 - DNA, 18 bp, Homo Sapiens
acgccaaggtcgcgggtt

SEQ ID NO: 32094 - DNA, 19 bp, Homo Sapiens
acgccaaggtcgcgggttc

SEQ ID NO: 32095 - DNA, 33 bp, Homo Sapiens; identical to SEQ ID NO: 3112

SEQ ID NO: 32096 - DNA, 34 bp, Homo Sapiens; identical to SEQ ID NO: 3113

SEQ ID NO: 32097 - DNA, 38 bp, Homo Sapiens; identical to SEQ ID NO: 3115

SEQ ID NO: 32098 - DNA, 16 bp, Homo Sapiens
acgcgaaaggtccccg

SEQ ID NO: 32099 - DNA, 17 bp, Homo Sapiens
acgcgaaaggtccccgg

SEQ ID NO: 32100 - DNA, 18 bp, Homo Sapiens
acgcgaaaggtccccggt

SEQ ID NO: 32101 - DNA, 37 bp, Homo Sapiens; identical to SEQ ID NO: 3128

SEQ ID NO: 32102 - DNA, 38 bp, Homo Sapiens; identical to SEQ ID NO: 3129

SEQ ID NO: 32103 - DNA, 39 bp, Homo Sapiens; identical to SEQ ID NO: 3130

SEQ ID NO: 32104 - DNA, 36 bp, Homo Sapiens; identical to SEQ ID NO: 3145

SEQ ID NO: 32105 - DNA, 37 bp, Homo Sapiens; identical to SEQ ID NO: 3146

SEQ ID NO: 32106 - DNA, 38 bp, Homo Sapiens; identical to SEQ ID NO: 3147

SEQ ID NO: 32107 - DNA, 39 bp, Homo Sapiens; identical to SEQ ID NO: 3148

SEQ ID NO: 32108 - DNA, 30 bp, Homo Sapiens; identical to SEQ ID NO: 3155

SEQ ID NO: 32109 - DNA, 32 bp, Homo Sapiens; identical to SEQ ID NO: 3157

SEQ ID NO: 32110 - DNA, 33 bp, Homo Sapiens; identical to SEQ ID NO: 3158

SEQ ID NO: 32111 - DNA, 34 bp, Homo Sapiens; identical to SEQ ID NO: 3159

SEQ ID NO: 32112 - DNA, 35 bp, Homo Sapiens; identical to SEQ ID NO: 3160

SEQ ID NO: 32113 - DNA, 36 bp, Homo Sapiens; identical to SEQ ID NO: 3161

SEQ ID NO: 32114 - DNA, 37 bp, Homo Sapiens; identical to SEQ ID NO: 3162

SEQ ID NO: 32115 - DNA, 38 bp, Homo Sapiens; identical to SEQ ID NO: 3163

SEQ ID NO: 32116 - DNA, 39 bp, Homo Sapiens; identical to SEQ ID NO: 3164

SEQ ID NO: 32117 - DNA, 17 bp, Homo Sapiens
acgcgggaggcccgggt

SEQ ID NO: 32118 - DNA, 34 bp, Homo Sapiens; identical to SEQ ID NO: 3172

SEQ ID NO: 32119 - DNA, 38 bp, Homo Sapiens; identical to SEQ ID NO: 3176

SEQ ID NO: 32120 - DNA, 39 bp, Homo Sapiens; identical to SEQ ID NO: 3177

SEQ ID NO: 32121 - DNA, 31 bp, Homo Sapiens
acgcgtgggttcgaatcccaccttcgtcgcc

SEQ ID NO: 32122 - DNA, 30 bp, Homo Sapiens; identical to SEQ ID NO: 3185

SEQ ID NO: 32123 - DNA, 31 bp, Homo Sapiens; identical to SEQ ID NO: 3186

SEQ ID NO: 32124 - DNA, 27 bp, Homo Sapiens
acgggctcacatcaccccataaacacc

SEQ ID NO: 32125 - DNA, 28 bp, Homo Sapiens
acgggctcacatcaccccataaacacca

SEQ ID NO: 32126 - DNA, 25 bp, Homo Sapiens
acgggttcgaaccccgtccgtgcct

SEQ ID NO: 32127 - DNA, 18 bp, Homo Sapiens
acggtagcgcgtctgact

SEQ ID NO: 32128 - DNA, 20 bp, Homo Sapiens
acggtagcgcgtctgactcc

SEQ ID NO: 32129 - DNA, 38 bp, Homo Sapiens
acgtatgaggccccgggttcaatccccggcatctccac

SEQ ID NO: 32130 - DNA, 39 bp, Homo Sapiens; identical to SEQ ID NO: 3206

SEQ ID NO: 32131 - DNA, 28 bp, Homo Sapiens
acgtgggttcgaatcccatcctcgtcgc

SEQ ID NO: 32132 - DNA, 29 bp, Homo Sapiens
acgtgggttcgaatcccatcctcgtcgcc

SEQ ID NO: 32133 - DNA, 19 bp, Homo Sapiens
actaagtgtttgtgggttt

SEQ ID NO: 32134 - DNA, 16 bp, Homo Sapiens
actcaagttctggtct

SEQ ID NO: 32135 - DNA, 17 bp, Homo Sapiens
actcaagttctggtctc

SEQ ID NO: 32136 - DNA, 18 bp, Homo Sapiens
actcaagttctggtctcc

SEQ ID NO: 32137 - DNA, 30 bp, Homo Sapiens; identical to SEQ ID NO: 3258

SEQ ID NO: 32138 - DNA, 18 bp, Homo Sapiens
actccagatcagaaggct

SEQ ID NO: 32139 - DNA, 20 bp, Homo Sapiens
actccagatcagaaggctgc

SEQ ID NO: 32140 - DNA, 45 bp, Homo Sapiens
actccagatcagaaggctgcgtgttcgaatcacgtcggggtcacc

SEQ ID NO: 32141 - DNA, 20 bp, Homo Sapiens
actccagatcagaaggttgc

SEQ ID NO: 32142 - DNA, 16 bp, Homo Sapiens
actcccggtatgggaa

SEQ ID NO: 32143 - DNA, 17 bp, Homo Sapiens
actcccggtatgggaac

SEQ ID NO: 32144 - DNA, 18 bp, Homo Sapiens
actcccggtatgggaacc

SEQ ID NO: 32145 - DNA, 16 bp, Homo Sapiens
actcccggtgtgggaa

SEQ ID NO: 32146 - DNA, 17 bp, Homo Sapiens
actcccggtgtgggaac

SEQ ID NO: 32147 - DNA, 18 bp, Homo Sapiens
actcccggtgtgggaacc

SEQ ID NO: 32148 - DNA, 16 bp, Homo Sapiens
actcctggctggctcg

SEQ ID NO: 32149 - DNA, 17 bp, Homo Sapiens
actcctggctggctcgc

SEQ ID NO: 32150 - DNA, 18 bp, Homo Sapiens
actcctggctggctcgcc

SEQ ID NO: 32151 - DNA, 19 bp, Homo Sapiens
actcctggctggctcgcca

SEQ ID NO: 32152 - DNA, 21 bp, Homo Sapiens
actctgaatccagcgatccga

SEQ ID NO: 32153 - DNA, 22 bp, Homo Sapiens
actctgaatccagcgatccgag

SEQ ID NO: 32154 - DNA, 17 bp, Homo Sapiens
actctgcgttgtggccg

SEQ ID NO: 32155 - DNA, 18 bp, Homo Sapiens
actctgcgttgtggccgc

SEQ ID NO: 32156 - DNA, 16 bp, Homo Sapiens
actctggactctgaat

SEQ ID NO: 32157 - DNA, 17 bp, Homo Sapiens
actctggactctgaatc

SEQ ID NO: 32158 - DNA, 18 bp, Homo Sapiens
actctggactctgaatcc

SEQ ID NO: 32159 - DNA, 19 bp, Homo Sapiens
actctggactctgaatcca

SEQ ID NO: 32160 - DNA, 20 bp, Homo Sapiens
actctggactctgaatccag

SEQ ID NO: 32161 - DNA, 21 bp, Homo Sapiens
actctggactctgaatccagc

SEQ ID NO: 32162 - DNA, 26 bp, Homo Sapiens
actctggactctgaatccagcgatcc

SEQ ID NO: 32163 - DNA, 27 bp, Homo Sapiens
actctggactctgaatccagcgatccg

SEQ ID NO: 32164 - DNA, 28 bp, Homo Sapiens
actctggactctgaatccagcgatccga

SEQ ID NO: 32165 - DNA, 29 bp, Homo Sapiens
actctggactctgaatccagcgatccgag

SEQ ID NO: 32166 - DNA, 30 bp, Homo Sapiens; identical to SEQ ID NO: 3319

SEQ ID NO: 32167 - DNA, 31 bp, Homo Sapiens; identical to SEQ ID NO: 3320

SEQ ID NO: 32168 - DNA, 32 bp, Homo Sapiens; identical to SEQ ID NO: 3321

SEQ ID NO: 32169 - DNA, 33 bp, Homo Sapiens; identical to SEQ ID NO: 3322

SEQ ID NO: 32170 - DNA, 17 bp, Homo Sapiens
actctggactttgaatc

SEQ ID NO: 32171 - DNA, 18 bp, Homo Sapiens
actctggactttgaatcc

SEQ ID NO: 32172 - DNA, 29 bp, Homo Sapiens
actcttttagtataaatagtaccgttaac

SEQ ID NO: 32173 - DNA, 30 bp, Homo Sapiens; identical to SEQ ID NO: 3341

SEQ ID NO: 32174 - DNA, 31 bp, Homo Sapiens; identical to SEQ ID NO: 3342

SEQ ID NO: 32175 - DNA, 22 bp, Homo Sapiens
actgaaaatgtttagacgggct

SEQ ID NO: 32176 - DNA, 19 bp, Homo Sapiens
actgctaactcatgccccc

SEQ ID NO: 32177 - DNA, 45 bp, Homo Sapiens; identical to SEQ ID NO: 3397

SEQ ID NO: 32178 - DNA, 46 bp, Homo Sapiens; identical to SEQ ID NO: 3398

SEQ ID NO: 32179 - DNA, 16 bp, Homo Sapiens
actgggcggaaacacc

SEQ ID NO: 32180 - DNA, 16 bp, Homo Sapiens
actggtggttcagtgg

SEQ ID NO: 32181 - DNA, 28 bp, Homo Sapiens
actggtggttcagtggtagaattctcgc

SEQ ID NO: 32182 - DNA, 29 bp, Homo Sapiens
actggtggttcagtggtagaattctcgcc

SEQ ID NO: 32183 - DNA, 30 bp, Homo Sapiens; identical to SEQ ID NO: 3403

SEQ ID NO: 32184 - DNA, 20 bp, Homo Sapiens
actgtagatccttaggtcgc

SEQ ID NO: 32185 - DNA, 22 bp, Homo Sapiens
actgtagatccttaggtcgctg

SEQ ID NO: 32186 - DNA, 16 bp, Homo Sapiens
acttaacttgaccgct

SEQ ID NO: 32187 - DNA, 17 bp, Homo Sapiens
acttaacttgaccgctc

SEQ ID NO: 32188 - DNA, 19 bp, Homo Sapiens
acttaacttgaccgctctg

SEQ ID NO: 32189 - DNA, 20 bp, Homo Sapiens
acttaacttgaccgctctga

SEQ ID NO: 32190 - DNA, 21 bp, Homo Sapiens
acttaacttgaccgctctgac

SEQ ID NO: 32191 - DNA, 22 bp, Homo Sapiens
acttaacttgaccgctctgacc

SEQ ID NO: 32192 - DNA, 23 bp, Homo Sapiens
acttaacttgaccgctctgacca

SEQ ID NO: 32193 - DNA, 18 bp, Homo Sapiens
acttaagatccaatggac

SEQ ID NO: 32194 - DNA, 20 bp, Homo Sapiens
acttaagatccaatggacat

SEQ ID NO: 32195 - DNA, 34 bp, Homo Sapiens; identical to SEQ ID NO: 3447

SEQ ID NO: 32196 - DNA, 40 bp, Homo Sapiens; identical to SEQ ID NO: 3453

SEQ ID NO: 32197 - DNA, 41 bp, Homo Sapiens; identical to SEQ ID NO: 3454

SEQ ID NO: 32198 - DNA, 42 bp, Homo Sapiens; identical to SEQ ID NO: 3455

SEQ ID NO: 32199 - DNA, 43 bp, Homo Sapiens; identical to SEQ ID NO: 3456

SEQ ID NO: 32200 - DNA, 44 bp, Homo Sapiens; identical to SEQ ID NO: 3457

SEQ ID NO: 32201 - DNA, 34 bp, Homo Sapiens; identical to SEQ ID NO: 3482

SEQ ID NO: 32202 - DNA, 35 bp, Homo Sapiens; identical to SEQ ID NO: 3483

SEQ ID NO: 32203 - DNA, 36 bp, Homo Sapiens; identical to SEQ ID NO: 3484

SEQ ID NO: 32204 - DNA, 37 bp, Homo Sapiens; identical to SEQ ID NO: 3485

SEQ ID NO: 32205 - DNA, 38 bp, Homo Sapiens; identical to SEQ ID NO: 3486

SEQ ID NO: 32206 - DNA, 45 bp, Homo Sapiens
acttcggatcagaagattgagggttcgaatcccttcgtggttgcc

SEQ ID NO: 32207 - DNA, 26 bp, Homo Sapiens
acttcggatcagaagattgcaggttc

SEQ ID NO: 32208 - DNA, 45 bp, Homo Sapiens; identical to SEQ ID NO: 3509

SEQ ID NO: 32209 - DNA, 16 bp, Homo Sapiens
acttgaccgctctgac

SEQ ID NO: 32210 - DNA, 17 bp, Homo Sapiens
acttgaccgctctgacc

SEQ ID NO: 32211 - DNA, 18 bp, Homo Sapiens
acttgaccgctctgacca

SEQ ID NO: 32212 - DNA, 18 bp, Homo Sapiens
actttacagtcagaggtt

SEQ ID NO: 32213 - DNA, 21 bp, Homo Sapiens
actttgaatccagcgatccga

SEQ ID NO: 32214 - DNA, 22 bp, Homo Sapiens
actttgaatccagcgatccgag

SEQ ID NO: 32215 - DNA, 34 bp, Homo Sapiens; identical to SEQ ID NO: 3547

SEQ ID NO: 32216 - DNA, 35 bp, Homo Sapiens; identical to SEQ ID NO: 3548

SEQ ID NO: 32217 - DNA, 36 bp, Homo Sapiens; identical to SEQ ID NO: 3549

SEQ ID NO: 32218 - DNA, 38 bp, Homo Sapiens; identical to SEQ ID NO: 3551

SEQ ID NO: 32219 - DNA, 39 bp, Homo Sapiens; identical to SEQ ID NO: 3552

SEQ ID NO: 32220 - DNA, 26 bp, Homo Sapiens
actttgtcaaagttaaattataggct

SEQ ID NO: 32221 - DNA, 16 bp, Homo Sapiens
acttttaaaggataac

SEQ ID NO: 32222 - DNA, 28 bp, Homo Sapiens
acttttaaaggataacagctatccattg

SEQ ID NO: 32223 - DNA, 31 bp, Homo Sapiens; identical to SEQ ID NO: 3591

SEQ ID NO: 32224 - DNA, 32 bp, Homo Sapiens; identical to SEQ ID NO: 3592

SEQ ID NO: 32225 - DNA, 33 bp, Homo Sapiens; identical to SEQ ID NO: 3593

SEQ ID NO: 32226 - DNA, 16 bp, Homo Sapiens
actttttctctgacca

SEQ ID NO: 32227 - DNA, 26 bp, Homo Sapiens
agaaagctcacaagaactgctaactc

SEQ ID NO: 32228 - DNA, 47 bp, Homo Sapiens; identical to SEQ ID NO: 3633

SEQ ID NO: 32229 - DNA, 23 bp, Homo Sapiens
agaaatttaggttaaatacagac

SEQ ID NO: 32230 - DNA, 17 bp, Homo Sapiens
agaactgctaactcatg

SEQ ID NO: 32231 - DNA, 18 bp, Homo Sapiens
agaactgctaactcatgc

SEQ ID NO: 32232 - DNA, 19 bp, Homo Sapiens
agaactgctaactcatgcc

SEQ ID NO: 32233 - DNA, 22 bp, Homo Sapiens
agaactgctaactcatgccccc

SEQ ID NO: 32234 - DNA, 25 bp, Homo Sapiens
agaactgctaactcatgcccccatg

SEQ ID NO: 32235 - DNA, 26 bp, Homo Sapiens
agaactgctaactcatgcccccatgt

SEQ ID NO: 32236 - DNA, 27 bp, Homo Sapiens
agaactgctaactcatgcccccatgtc

SEQ ID NO: 32237 - DNA, 28 bp, Homo Sapiens
agaactgctaactcatgcccccatgtct

SEQ ID NO: 32238 - DNA, 35 bp, Homo Sapiens; identical to SEQ ID NO: 3707

SEQ ID NO: 32239 - DNA, 39 bp, Homo Sapiens; identical to SEQ ID NO: 3711

SEQ ID NO: 32240 - DNA, 40 bp, Homo Sapiens; identical to SEQ ID NO: 3712

SEQ ID NO: 32241 - DNA, 41 bp, Homo Sapiens; identical to SEQ ID NO: 3713

SEQ ID NO: 32242 - DNA, 43 bp, Homo Sapiens; identical to SEQ ID NO: 3715

SEQ ID NO: 32243 - DNA, 44 bp, Homo Sapiens; identical to SEQ ID NO: 3716

SEQ ID NO: 32244 - DNA, 46 bp, Homo Sapiens; identical to SEQ ID NO: 3718

SEQ ID NO: 32245 - DNA, 28 bp, Homo Sapiens
agaagattccaggttcgactcctggctg

SEQ ID NO: 32246 - DNA, 33 bp, Homo Sapiens; identical to SEQ ID NO: 3729

SEQ ID NO: 32247 - DNA, 34 bp, Homo Sapiens; identical to SEQ ID NO: 3730

SEQ ID NO: 32248 - DNA, 35 bp, Homo Sapiens; identical to SEQ ID NO: 3731

SEQ ID NO: 32249 - DNA, 16 bp, Homo Sapiens
agaagattctaggttc

SEQ ID NO: 32250 - DNA, 17 bp, Homo Sapiens
agaagattctaggttcg

SEQ ID NO: 32251 - DNA, 32 bp, Homo Sapiens; identical to SEQ ID NO: 3738

SEQ ID NO: 32252 - DNA, 33 bp, Homo Sapiens; identical to SEQ ID NO: 3739

SEQ ID NO: 32253 - DNA, 34 bp, Homo Sapiens; identical to SEQ ID NO: 3740

SEQ ID NO: 32254 - DNA, 35 bp, Homo Sapiens; identical to SEQ ID NO: 3741

SEQ ID NO: 32255 - DNA, 36 bp, Homo Sapiens; identical to SEQ ID NO: 3742

SEQ ID NO: 32256 - DNA, 16 bp, Homo Sapiens
agaagattgagggttc

SEQ ID NO: 32257 - DNA, 17 bp, Homo Sapiens
agaagattgagggttcg

SEQ ID NO: 32258 - DNA, 24 bp, Homo Sapiens
agaagattgagggttcgaatccct

SEQ ID NO: 32259 - DNA, 33 bp, Homo Sapiens
agaagattgagggttcgaatccctccgtggtta

SEQ ID NO: 32260 - DNA, 35 bp, Homo Sapiens
agaagattgagggttcgaatccctccgtggttacc

SEQ ID NO: 32261 - DNA, 33 bp, Homo Sapiens
agaagattgagggttcgaatcccttcgtggtta

SEQ ID NO: 32262 - DNA, 33 bp, Homo Sapiens; identical to SEQ ID NO: 3746

SEQ ID NO: 32263 - DNA, 34 bp, Homo Sapiens; identical to SEQ ID NO: 3747

SEQ ID NO: 32264 - DNA, 35 bp, Homo Sapiens; identical to SEQ ID NO: 3748

SEQ ID NO: 32265 - DNA, 36 bp, Homo Sapiens; identical to SEQ ID NO: 3749

SEQ ID NO: 32266 - DNA, 33 bp, Homo Sapiens; identical to SEQ ID NO: 3751

SEQ ID NO: 32267 - DNA, 34 bp, Homo Sapiens; identical to SEQ ID NO: 3752

SEQ ID NO: 32268 - DNA, 35 bp, Homo Sapiens; identical to SEQ ID NO: 3753

SEQ ID NO: 32269 - DNA, 36 bp, Homo Sapiens; identical to SEQ ID NO: 3754

SEQ ID NO: 32270 - DNA, 16 bp, Homo Sapiens
agaagattgcaggttc

SEQ ID NO: 32271 - DNA, 24 bp, Homo Sapiens
agaagattgcaggttcgagtcctg

SEQ ID NO: 32272 - DNA, 32 bp, Homo Sapiens; identical to SEQ ID NO: 3758

SEQ ID NO: 32273 - DNA, 33 bp, Homo Sapiens; identical to SEQ ID NO: 3759

SEQ ID NO: 32274 - DNA, 34 bp, Homo Sapiens; identical to SEQ ID NO: 3760

SEQ ID NO: 32275 - DNA, 35 bp, Homo Sapiens; identical to SEQ ID NO: 3761

SEQ ID NO: 32276 - DNA, 36 bp, Homo Sapiens; identical to SEQ ID NO: 3762

SEQ ID NO: 32277 - DNA, 19 bp, Homo Sapiens
agaagcagcttcaaacctg

SEQ ID NO: 32278 - DNA, 26 bp, Homo Sapiens
agaagcagcttcaaacctgccggggc

SEQ ID NO: 32279 - DNA, 27 bp, Homo Sapiens
agaagcagcttcaaacctgccggggct

SEQ ID NO: 32280 - DNA, 28 bp, Homo Sapiens
agaagcagcttcaaacctgccggggctt

SEQ ID NO: 32281 - DNA, 16 bp, Homo Sapiens
agaaggctgcgtgttc

SEQ ID NO: 32282 - DNA, 17 bp, Homo Sapiens
agaaggctgcgtgttcg

SEQ ID NO: 32283 - DNA, 21 bp, Homo Sapiens
agaaggctgcgtgttcgaatc

SEQ ID NO: 32284 - DNA, 32 bp, Homo Sapiens; identical to SEQ ID NO: 3777

SEQ ID NO: 32285 - DNA, 33 bp, Homo Sapiens
agaaggctgcgtgttcgaatcacgtcggggtca

SEQ ID NO: 32286 - DNA, 34 bp, Homo Sapiens; identical to SEQ ID NO: 3778

SEQ ID NO: 32287 - DNA, 35 bp, Homo Sapiens; identical to SEQ ID NO: 3779

SEQ ID NO: 32288 - DNA, 31 bp, Homo Sapiens; identical to SEQ ID NO: 3783

SEQ ID NO: 32289 - DNA, 34 bp, Homo Sapiens; identical to SEQ ID NO: 3786

SEQ ID NO: 32290 - DNA, 35 bp, Homo Sapiens; identical to SEQ ID NO: 3787

SEQ ID NO: 32291 - DNA, 36 bp, Homo Sapiens; identical to SEQ ID NO: 3788

SEQ ID NO: 32292 - DNA, 16 bp, Homo Sapiens
agaaggttgcgtgttc

SEQ ID NO: 32293 - DNA, 17 bp, Homo Sapiens
agaaggttgcgtgttca

SEQ ID NO: 32294 - DNA, 33 bp, Homo Sapiens; identical to SEQ ID NO: 3790

SEQ ID NO: 32295 - DNA, 34 bp, Homo Sapiens
agaaggttgcgtgttcaaatcacgtcggggtcac

SEQ ID NO: 32296 - DNA, 35 bp, Homo Sapiens; identical to SEQ ID NO: 3791

SEQ ID NO: 32297 - DNA, 33 bp, Homo Sapiens; identical to SEQ ID NO: 3794

SEQ ID NO: 32298 - DNA, 34 bp, Homo Sapiens; identical to SEQ ID NO: 3795

SEQ ID NO: 32299 - DNA, 35 bp, Homo Sapiens; identical to SEQ ID NO: 3796

SEQ ID NO: 32300 - DNA, 39 bp, Homo Sapiens; identical to SEQ ID NO: 3813

SEQ ID NO: 32301 - DNA, 18 bp, Homo Sapiens
agaattctcgcctgccac

SEQ ID NO: 32302 - DNA, 19 bp, Homo Sapiens
agaattctcgcctgccacg

SEQ ID NO: 32303 - DNA, 31 bp, Homo Sapiens; identical to SEQ ID NO: 3827

SEQ ID NO: 32304 - DNA, 30 bp, Homo Sapiens; identical to SEQ ID NO: 3851

SEQ ID NO: 32305 - DNA, 31 bp, Homo Sapiens; identical to SEQ ID NO: 3852

SEQ ID NO: 32306 - DNA, 27 bp, Homo Sapiens
agaccggggttcgattccccgacgggg

SEQ ID NO: 32307 - DNA, 29 bp, Homo Sapiens
agaccggggttcgattccccgacggggag

SEQ ID NO: 32308 - DNA, 30 bp, Homo Sapiens; identical to SEQ ID NO: 3861

SEQ ID NO: 32309 - DNA, 31 bp, Homo Sapiens; identical to SEQ ID NO: 3862

SEQ ID NO: 32310 - DNA, 32 bp, Homo Sapiens; identical to SEQ ID NO: 3863

SEQ ID NO: 32311 - DNA, 17 bp, Homo Sapiens
agacgggctcacatcac

SEQ ID NO: 32312 - DNA, 18 bp, Homo Sapiens
agacgggctcacatcacc

SEQ ID NO: 32313 - DNA, 29 bp, Homo Sapiens
agacgggctcacatcaccccataaacacc

SEQ ID NO: 32314 - DNA, 30 bp, Homo Sapiens; identical to SEQ ID NO: 3877

SEQ ID NO: 32315 - DNA, 20 bp, Homo Sapiens
agactcaagttctggtctcc

SEQ ID NO: 32316 - DNA, 23 bp, Homo Sapiens
agactcaagttctggtctccgga

SEQ ID NO: 32317 - DNA, 24 bp, Homo Sapiens
agactcaagttctggtctccggat

SEQ ID NO: 32318 - DNA, 16 bp, Homo Sapiens
agactttttctctgac

SEQ ID NO: 32319 - DNA, 17 bp, Homo Sapiens
agactttttctctgacc

SEQ ID NO: 32320 - DNA, 18 bp, Homo Sapiens
agactttttctctgacca

SEQ ID NO: 32321 - DNA, 27 bp, Homo Sapiens
agagaaccaacacctctttacagtgac

SEQ ID NO: 32322 - DNA, 35 bp, Homo Sapiens; identical to SEQ ID NO: 3913

SEQ ID NO: 32323 - DNA, 21 bp, Homo Sapiens
agagcatgggactcttaatcc

SEQ ID NO: 32324 - DNA, 32 bp, Homo Sapiens; identical to SEQ ID NO: 3921

SEQ ID NO: 32325 - DNA, 35 bp, Homo Sapiens; identical to SEQ ID NO: 3924

SEQ ID NO: 32326 - DNA, 47 bp, Homo Sapiens; identical to SEQ ID NO: 3928

SEQ ID NO: 32327 - DNA, 32 bp, Homo Sapiens
agagcatttgactgcagatcaagaggtccccg

SEQ ID NO: 32328 - DNA, 27 bp, Homo Sapiens
agaggcttacgaccccttatttacccc

SEQ ID NO: 32329 - DNA, 28 bp, Homo Sapiens
agaggcttacgaccccttatttacccca

SEQ ID NO: 32330 - DNA, 32 bp, Homo Sapiens; identical to SEQ ID NO: 3960

SEQ ID NO: 32331 - DNA, 33 bp, Homo Sapiens; identical to SEQ ID NO: 3961

SEQ ID NO: 32332 - DNA, 16 bp, Homo Sapiens
agaggtcgatggatcg

SEQ ID NO: 32333 - DNA, 19 bp, Homo Sapiens
agaggtcgatggatcgaaa

SEQ ID NO: 32334 - DNA, 20 bp, Homo Sapiens
agaggtcgatggatcgaaac

SEQ ID NO: 32335 - DNA, 21 bp, Homo Sapiens
agaggtcgatggatcgaaacc

SEQ ID NO: 32336 - DNA, 22 bp, Homo Sapiens
agaggtcgatggatcgaaacca

SEQ ID NO: 32337 - DNA, 23 bp, Homo Sapiens
agaggtcgatggatcgaaaccat

SEQ ID NO: 32338 - DNA, 25 bp, Homo Sapiens
agaggttccgggttcgagtcccggc

SEQ ID NO: 32339 - DNA, 32 bp, Homo Sapiens; identical to SEQ ID NO: 3977

SEQ ID NO: 32340 - DNA, 34 bp, Homo Sapiens; identical to SEQ ID NO: 3979

SEQ ID NO: 32341 - DNA, 35 bp, Homo Sapiens; identical to SEQ ID NO: 3980

SEQ ID NO: 32342 - DNA, 18 bp, Homo Sapiens
agagtggcgcagcggaag

SEQ ID NO: 32343 - DNA, 28 bp, Homo Sapiens
agagtggcgcagcggaagcgtgctgggc

SEQ ID NO: 32344 - DNA, 29 bp, Homo Sapiens
agagtggcgcagcggaagcgtgctgggcc

SEQ ID NO: 32345 - DNA, 30 bp, Homo Sapiens; identical to SEQ ID NO: 4009

SEQ ID NO: 32346 - DNA, 32 bp, Homo Sapiens; identical to SEQ ID NO: 4011

SEQ ID NO: 32347 - DNA, 30 bp, Homo Sapiens
agatcacgggttcgaaccccgtccgtgcct

SEQ ID NO: 32348 - DNA, 20 bp, Homo Sapiens
agatcagaaggctgcgtgtt

SEQ ID NO: 32349 - DNA, 21 bp, Homo Sapiens
agatcagaaggctgcgtgttc

SEQ ID NO: 32350 - DNA, 31 bp, Homo Sapiens; identical to SEQ ID NO: 4049

SEQ ID NO: 32351 - DNA, 32 bp, Homo Sapiens; identical to SEQ ID NO: 4053

SEQ ID NO: 32352 - DNA, 18 bp, Homo Sapiens
agatcgcgggttcgaacc

SEQ ID NO: 32353 - DNA, 25 bp, Homo Sapiens
agatgaaaacctttttccaaggaca

SEQ ID NO: 32354 - DNA, 26 bp, Homo Sapiens
agatgaaaacctttttccaaggacac

SEQ ID NO: 32355 - DNA, 27 bp, Homo Sapiens
agatgaaaacctttttccaaggacacc

SEQ ID NO: 32356 - DNA, 28 bp, Homo Sapiens
agatgaaaacctttttccaaggacacca

SEQ ID NO: 32357 - DNA, 17 bp, Homo Sapiens
agattaagagaaccaac

SEQ ID NO: 32358 - DNA, 20 bp, Homo Sapiens
agattaagagaaccaacacc

SEQ ID NO: 32359 - DNA, 33 bp, Homo Sapiens; identical to SEQ ID NO: 4092

SEQ ID NO: 32360 - DNA, 35 bp, Homo Sapiens; identical to SEQ ID NO: 4094

SEQ ID NO: 32361 - DNA, 21 bp, Homo Sapiens
agattccaggttcgactcctg

SEQ ID NO: 32362 - DNA, 30 bp, Homo Sapiens; identical to SEQ ID NO: 4098

SEQ ID NO: 32363 - DNA, 31 bp, Homo Sapiens; identical to SEQ ID NO: 4099

SEQ ID NO: 32364 - DNA, 25 bp, Homo Sapiens
agattcccattcttgcgacccgggt

SEQ ID NO: 32365 - DNA, 31 bp, Homo Sapiens; identical to SEQ ID NO: 4111

SEQ ID NO: 32366 - DNA, 32 bp, Homo Sapiens; identical to SEQ ID NO: 4112

SEQ ID NO: 32367 - DNA, 30 bp, Homo Sapiens; identical to SEQ ID NO: 4115

SEQ ID NO: 32368 - DNA, 31 bp, Homo Sapiens; identical to SEQ ID NO: 4116

SEQ ID NO: 32369 - DNA, 32 bp, Homo Sapiens; identical to SEQ ID NO: 4117

SEQ ID NO: 32370 - DNA, 18 bp, Homo Sapiens
agattgagggttcgagtc

SEQ ID NO: 32371 - DNA, 21 bp, Homo Sapiens
agattgagggttcgagtccct

SEQ ID NO: 32372 - DNA, 30 bp, Homo Sapiens; identical to SEQ ID NO: 4122

SEQ ID NO: 32373 - DNA, 31 bp, Homo Sapiens; identical to SEQ ID NO: 4123

SEQ ID NO: 32374 - DNA, 32 bp, Homo Sapiens; identical to SEQ ID NO: 4124

SEQ ID NO: 32375 - DNA, 33 bp, Homo Sapiens; identical to SEQ ID NO: 4125

SEQ ID NO: 32376 - DNA, 21 bp, Homo Sapiens
agattgcaggttcgagtcctg

SEQ ID NO: 32377 - DNA, 29 bp, Homo Sapiens
agattgcaggttcgagtcctgccgcggtc

SEQ ID NO: 32378 - DNA, 30 bp, Homo Sapiens; identical to SEQ ID NO: 4130

SEQ ID NO: 32379 - DNA, 31 bp, Homo Sapiens; identical to SEQ ID NO: 4131

SEQ ID NO: 32380 - DNA, 32 bp, Homo Sapiens; identical to SEQ ID NO: 4132

SEQ ID NO: 32381 - DNA, 16 bp, Homo Sapiens
agattgtgaatctgac

SEQ ID NO: 32382 - DNA, 17 bp, Homo Sapiens
agattgtgaatctgaca

SEQ ID NO: 32383 - DNA, 19 bp, Homo Sapiens
agattgtgaatctgacaac

SEQ ID NO: 32384 - DNA, 20 bp, Homo Sapiens
agattgtgaatctgacaaca

SEQ ID NO: 32385 - DNA, 21 bp, Homo Sapiens
agattgtgaatctgacaacag

SEQ ID NO: 32386 - DNA, 22 bp, Homo Sapiens
agattgtgaatctgacaacaga

SEQ ID NO: 32387 - DNA, 23 bp, Homo Sapiens
agattgtgaatctgacaacagag

SEQ ID NO: 32388 - DNA, 24 bp, Homo Sapiens
agattgtgaatctgacaacagagg

SEQ ID NO: 32389 - DNA, 25 bp, Homo Sapiens
agattgtgaatctgacaacagaggc

SEQ ID NO: 32390 - DNA, 26 bp, Homo Sapiens
agattgtgaatctgacaacagaggct

SEQ ID NO: 32391 - DNA, 27 bp, Homo Sapiens
agattgtgaatctgacaacagaggctt

SEQ ID NO: 32392 - DNA, 29 bp, Homo Sapiens
agattgtgaatctgacaacagaggcttac

SEQ ID NO: 32393 - DNA, 30 bp, Homo Sapiens; identical to SEQ ID NO: 4148

SEQ ID NO: 32394 - DNA, 32 bp, Homo Sapiens; identical to SEQ ID NO: 4150

SEQ ID NO: 32395 - DNA, 33 bp, Homo Sapiens; identical to SEQ ID NO: 4151

SEQ ID NO: 32396 - DNA, 34 bp, Homo Sapiens; identical to SEQ ID NO: 4152

SEQ ID NO: 32397 - DNA, 35 bp, Homo Sapiens; identical to SEQ ID NO: 4153

SEQ ID NO: 32398 - DNA, 36 bp, Homo Sapiens; identical to SEQ ID NO: 4154

SEQ ID NO: 32399 - DNA, 37 bp, Homo Sapiens; identical to SEQ ID NO: 4155

SEQ ID NO: 32400 - DNA, 38 bp, Homo Sapiens; identical to SEQ ID NO: 4156

SEQ ID NO: 32401 - DNA, 39 bp, Homo Sapiens; identical to SEQ ID NO: 4157

SEQ ID NO: 32402 - DNA, 40 bp, Homo Sapiens; identical to SEQ ID NO: 4158

SEQ ID NO: 32403 - DNA, 41 bp, Homo Sapiens; identical to SEQ ID NO: 4159

SEQ ID NO: 32404 - DNA, 42 bp, Homo Sapiens; identical to SEQ ID NO: 4160

SEQ ID NO: 32405 - DNA, 43 bp, Homo Sapiens; identical to SEQ ID NO: 4161

SEQ ID NO: 32406 - DNA, 44 bp, Homo Sapiens; identical to SEQ ID NO: 4162

SEQ ID NO: 32407 - DNA, 45 bp, Homo Sapiens; identical to SEQ ID NO: 4163

SEQ ID NO: 32408 - DNA, 46 bp, Homo Sapiens; identical to SEQ ID NO: 4164

SEQ ID NO: 32409 - DNA, 47 bp, Homo Sapiens; identical to SEQ ID NO: 4165

SEQ ID NO: 32410 - DNA, 25 bp, Homo Sapiens
agatttcaacttaacttgaccgctc

SEQ ID NO: 32411 - DNA, 27 bp, Homo Sapiens
agatttcaacttaacttgaccgctctg

SEQ ID NO: 32412 - DNA, 28 bp, Homo Sapiens
agatttcaacttaacttgaccgctctga

SEQ ID NO: 32413 - DNA, 29 bp, Homo Sapiens
agatttcaacttaacttgaccgctctgac

SEQ ID NO: 32414 - DNA, 30 bp, Homo Sapiens; identical to SEQ ID NO: 4178

SEQ ID NO: 32415 - DNA, 31 bp, Homo Sapiens; identical to SEQ ID NO: 4179

SEQ ID NO: 32416 - DNA, 30 bp, Homo Sapiens; identical to SEQ ID NO: 4181

SEQ ID NO: 32417 - DNA, 32 bp, Homo Sapiens; identical to SEQ ID NO: 4183

SEQ ID NO: 32418 - DNA, 32 bp, Homo Sapiens; identical to SEQ ID NO: 4191

SEQ ID NO: 32419 - DNA, 33 bp, Homo Sapiens; identical to SEQ ID NO: 4192

SEQ ID NO: 32420 - DNA, 16 bp, Homo Sapiens
agcactctggactctg

SEQ ID NO: 32421 - DNA, 17 bp, Homo Sapiens
agcactctggactctga

SEQ ID NO: 32422 - DNA, 18 bp, Homo Sapiens
agcactctggactctgaa

SEQ ID NO: 32423 - DNA, 19 bp, Homo Sapiens
agcactctggactctgaat

SEQ ID NO: 32424 - DNA, 20 bp, Homo Sapiens
agcactctggactctgaatc

SEQ ID NO: 32425 - DNA, 21 bp, Homo Sapiens
agcactctggactctgaatcc

SEQ ID NO: 32426 - DNA, 22 bp, Homo Sapiens
agcactctggactctgaatcca

SEQ ID NO: 32427 - DNA, 23 bp, Homo Sapiens
agcactctggactctgaatccag

SEQ ID NO: 32428 - DNA, 24 bp, Homo Sapiens
agcactctggactctgaatccagc

SEQ ID NO: 32429 - DNA, 25 bp, Homo Sapiens
agcactctggactctgaatccagcg

SEQ ID NO: 32430 - DNA, 26 bp, Homo Sapiens
agcactctggactctgaatccagcga

SEQ ID NO: 32431 - DNA, 29 bp, Homo Sapiens
agcactctggactctgaatccagcgatcc

SEQ ID NO: 32432 - DNA, 30 bp, Homo Sapiens; identical to SEQ ID NO: 4232

SEQ ID NO: 32433 - DNA, 31 bp, Homo Sapiens; identical to SEQ ID NO: 4233

SEQ ID NO: 32434 - DNA, 32 bp, Homo Sapiens; identical to SEQ ID NO: 4234

SEQ ID NO: 32435 - DNA, 33 bp, Homo Sapiens; identical to SEQ ID NO: 4235

SEQ ID NO: 32436 - DNA, 34 bp, Homo Sapiens; identical to SEQ ID NO: 4236

SEQ ID NO: 32437 - DNA, 35 bp, Homo Sapiens; identical to SEQ ID NO: 4237

SEQ ID NO: 32438 - DNA, 36 bp, Homo Sapiens; identical to SEQ ID NO: 4238

SEQ ID NO: 32439 - DNA, 41 bp, Homo Sapiens
agcactctggactctgaatccagcgatccgagttcaaatct

SEQ ID NO: 32440 - DNA, 44 bp, Homo Sapiens; identical to SEQ ID NO: 4242

SEQ ID NO: 32441 - DNA, 17 bp, Homo Sapiens
agcactctggactttga

SEQ ID NO: 32442 - DNA, 18 bp, Homo Sapiens
agcactctggactttgaa

SEQ ID NO: 32443 - DNA, 19 bp, Homo Sapiens
agcactctggactttgaat

SEQ ID NO: 32444 - DNA, 20 bp, Homo Sapiens
agcactctggactttgaatc

SEQ ID NO: 32445 - DNA, 21 bp, Homo Sapiens
agcactctggactttgaatcc

SEQ ID NO: 32446 - DNA, 32 bp, Homo Sapiens; identical to SEQ ID NO: 4261

SEQ ID NO: 32447 - DNA, 36 bp, Homo Sapiens; identical to SEQ ID NO: 4265

SEQ ID NO: 32448 - DNA, 16 bp, Homo Sapiens
agcagagtggcgcagc

SEQ ID NO: 32449 - DNA, 17 bp, Homo Sapiens
agcagagtggcgcagcg

SEQ ID NO: 32450 - DNA, 18 bp, Homo Sapiens
agcagagtggcgcagcgg

SEQ ID NO: 32451 - DNA, 19 bp, Homo Sapiens
agcagagtggcgcagcgga

SEQ ID NO: 32452 - DNA, 20 bp, Homo Sapiens
agcagagtggcgcagcggaa

SEQ ID NO: 32453 - DNA, 21 bp, Homo Sapiens
agcagagtggcgcagcggaag

SEQ ID NO: 32454 - DNA, 22 bp, Homo Sapiens
agcagagtggcgcagcggaagc

SEQ ID NO: 32455 - DNA, 23 bp, Homo Sapiens
agcagagtggcgcagcggaagcg

SEQ ID NO: 32456 - DNA, 24 bp, Homo Sapiens
agcagagtggcgcagcggaagcgt

SEQ ID NO: 32457 - DNA, 26 bp, Homo Sapiens
agcagagtggcgcagcggaagcgtgc

SEQ ID NO: 32458 - DNA, 27 bp, Homo Sapiens
agcagagtggcgcagcggaagcgtgct

SEQ ID NO: 32459 - DNA, 28 bp, Homo Sapiens
agcagagtggcgcagcggaagcgtgctg

SEQ ID NO: 32460 - DNA, 29 bp, Homo Sapiens
agcagagtggcgcagcggaagcgtgctgg

SEQ ID NO: 32461 - DNA, 30 bp, Homo Sapiens; identical to SEQ ID NO: 4283

SEQ ID NO: 32462 - DNA, 31 bp, Homo Sapiens; identical to SEQ ID NO: 4284

SEQ ID NO: 32463 - DNA, 32 bp, Homo Sapiens; identical to SEQ ID NO: 4285

SEQ ID NO: 32464 - DNA, 33 bp, Homo Sapiens; identical to SEQ ID NO: 4286

SEQ ID NO: 32465 - DNA, 34 bp, Homo Sapiens; identical to SEQ ID NO: 4287

SEQ ID NO: 32466 - DNA, 39 bp, Homo Sapiens; identical to SEQ ID NO: 4290

SEQ ID NO: 32467 - DNA, 42 bp, Homo Sapiens; identical to SEQ ID NO: 4291

SEQ ID NO: 32468 - DNA, 16 bp, Homo Sapiens
agcagcttcaaacctg

SEQ ID NO: 32469 - DNA, 22 bp, Homo Sapiens
agcagcttcaaacctgccgggg

SEQ ID NO: 32470 - DNA, 23 bp, Homo Sapiens
agcagcttcaaacctgccggggc

SEQ ID NO: 32471 - DNA, 24 bp, Homo Sapiens
agcagcttcaaacctgccggggct

SEQ ID NO: 32472 - DNA, 25 bp, Homo Sapiens
agcagcttcaaacctgccggggctt

SEQ ID NO: 32473 - DNA, 26 bp, Homo Sapiens
agcagcttcaaacctgccggggcttc

SEQ ID NO: 32474 - DNA, 27 bp, Homo Sapiens
agcagcttcaaacctgccggggcttcc

SEQ ID NO: 32475 - DNA, 18 bp, Homo Sapiens
agcagttgacccgggttc

SEQ ID NO: 32476 - DNA, 19 bp, Homo Sapiens
agcagttgacccgggttcg

SEQ ID NO: 32477 - DNA, 31 bp, Homo Sapiens; identical to SEQ ID NO: 4307

SEQ ID NO: 32478 - DNA, 33 bp, Homo Sapiens; identical to SEQ ID NO: 4309

SEQ ID NO: 32479 - DNA, 37 bp, Homo Sapiens; identical to SEQ ID NO: 4311

SEQ ID NO: 32480 - DNA, 31 bp, Homo Sapiens; identical to SEQ ID NO: 4314

SEQ ID NO: 32481 - DNA, 19 bp, Homo Sapiens
agcatgagactcttaatct

SEQ ID NO: 32482 - DNA, 33 bp, Homo Sapiens; identical to SEQ ID NO: 4327

SEQ ID NO: 32483 - DNA, 17 bp, Homo Sapiens
agcatgggactcttaat

SEQ ID NO: 32484 - DNA, 18 bp, Homo Sapiens
agcatgggactcttaatc

SEQ ID NO: 32485 - DNA, 19 bp, Homo Sapiens
agcatgggactcttaatcc

SEQ ID NO: 32486 - DNA, 20 bp, Homo Sapiens
agcatgggactcttaatccc

SEQ ID NO: 32487 - DNA, 28 bp, Homo Sapiens
agcatgggactcttaatcccagggtcgt

SEQ ID NO: 32488 - DNA, 33 bp, Homo Sapiens; identical to SEQ ID NO: 4337

SEQ ID NO: 32489 - DNA, 34 bp, Homo Sapiens; identical to SEQ ID NO: 4338

SEQ ID NO: 32490 - DNA, 19 bp, Homo Sapiens
agcatgggactcttcatcc

SEQ ID NO: 32491 - DNA, 33 bp, Homo Sapiens; identical to SEQ ID NO: 4342

SEQ ID NO: 32492 - DNA, 16 bp, Homo Sapiens
agcattggtggttcag

SEQ ID NO: 32493 - DNA, 31 bp, Homo Sapiens; identical to SEQ ID NO: 4369

SEQ ID NO: 32494 - DNA, 32 bp, Homo Sapiens; identical to SEQ ID NO: 4370

SEQ ID NO: 32495 - DNA, 33 bp, Homo Sapiens; identical to SEQ ID NO: 4371

SEQ ID NO: 32496 - DNA, 18 bp, Homo Sapiens
agccagggattgtgggtt

SEQ ID NO: 32497 - DNA, 19 bp, Homo Sapiens
agccagggattgtgggttc

SEQ ID NO: 32498 - DNA, 20 bp, Homo Sapiens
agccagggattgtgggttcg

SEQ ID NO: 32499 - DNA, 36 bp, Homo Sapiens; identical to SEQ ID NO: 4386

SEQ ID NO: 32500 - DNA, 38 bp, Homo Sapiens; identical to SEQ ID NO: 4393

SEQ ID NO: 32501 - DNA, 38 bp, Homo Sapiens; identical to SEQ ID NO: 4397

SEQ ID NO: 32502 - DNA, 36 bp, Homo Sapiens; identical to SEQ ID NO: 4403

SEQ ID NO: 32503 - DNA, 37 bp, Homo Sapiens; identical to SEQ ID NO: 4404

SEQ ID NO: 32504 - DNA, 38 bp, Homo Sapiens; identical to SEQ ID NO: 4405

SEQ ID NO: 32505 - DNA, 39 bp, Homo Sapiens; identical to SEQ ID NO: 4406

SEQ ID NO: 32506 - DNA, 18 bp, Homo Sapiens
agcccacccagggacgcc

SEQ ID NO: 32507 - DNA, 17 bp, Homo Sapiens
agccccagtggaaccac

SEQ ID NO: 32508 - DNA, 18 bp, Homo Sapiens
agccccagtggaaccacc

SEQ ID NO: 32509 - DNA, 16 bp, Homo Sapiens
agccgtgatcgtatag

SEQ ID NO: 32510 - DNA, 17 bp, Homo Sapiens
agccgtgatcgtatagt

SEQ ID NO: 32511 - DNA, 18 bp, Homo Sapiens
agccgtgatcgtatagtg

SEQ ID NO: 32512 - DNA, 19 bp, Homo Sapiens
agccgtgatcgtatagtgg

SEQ ID NO: 32513 - DNA, 21 bp, Homo Sapiens
agccgtgatcgtatagtggtt

SEQ ID NO: 32514 - DNA, 22 bp, Homo Sapiens
agccgtgatcgtatagtggtta

SEQ ID NO: 32515 - DNA, 23 bp, Homo Sapiens
agccgtgatcgtatagtggttag

SEQ ID NO: 32516 - DNA, 24 bp, Homo Sapiens
agccgtgatcgtatagtggttagt

SEQ ID NO: 32517 - DNA, 25 bp, Homo Sapiens
agccgtgatcgtatagtggttagta

SEQ ID NO: 32518 - DNA, 26 bp, Homo Sapiens
agccgtgatcgtatagtggttagtac

SEQ ID NO: 32519 - DNA, 27 bp, Homo Sapiens
agccgtgatcgtatagtggttagtact

SEQ ID NO: 32520 - DNA, 28 bp, Homo Sapiens
agccgtgatcgtatagtggttagtactc

SEQ ID NO: 32521 - DNA, 29 bp, Homo Sapiens
agccgtgatcgtatagtggttagtactct

SEQ ID NO: 32522 - DNA, 30 bp, Homo Sapiens; identical to SEQ ID NO: 4451

SEQ ID NO: 32523 - DNA, 31 bp, Homo Sapiens; identical to SEQ ID NO: 4452

SEQ ID NO: 32524 - DNA, 32 bp, Homo Sapiens; identical to SEQ ID NO: 4453

SEQ ID NO: 32525 - DNA, 33 bp, Homo Sapiens; identical to SEQ ID NO: 4454

SEQ ID NO: 32526 - DNA, 34 bp, Homo Sapiens; identical to SEQ ID NO: 4455

SEQ ID NO: 32527 - DNA, 35 bp, Homo Sapiens; identical to SEQ ID NO: 4456

SEQ ID NO: 32528 - DNA, 36 bp, Homo Sapiens; identical to SEQ ID NO: 4457

SEQ ID NO: 32529 - DNA, 37 bp, Homo Sapiens; identical to SEQ ID NO: 4458

SEQ ID NO: 32530 - DNA, 18 bp, Homo Sapiens
agcctcacctggagcacc

SEQ ID NO: 32531 - DNA, 44 bp, Homo Sapiens; identical to SEQ ID NO: 4465

SEQ ID NO: 32532 - DNA, 29 bp, Homo Sapiens
agcgatccgagttcaaatctcggtggaac

SEQ ID NO: 32533 - DNA, 30 bp, Homo Sapiens; identical to SEQ ID NO: 4469

SEQ ID NO: 32534 - DNA, 31 bp, Homo Sapiens; identical to SEQ ID NO: 4470

SEQ ID NO: 32535 - DNA, 32 bp, Homo Sapiens; identical to SEQ ID NO: 4471

SEQ ID NO: 32536 - DNA, 33 bp, Homo Sapiens; identical to SEQ ID NO: 4472

SEQ ID NO: 32537 - DNA, 29 bp, Homo Sapiens
agcgatccgagttcaaatctcggtgggac

SEQ ID NO: 32538 - DNA, 30 bp, Homo Sapiens; identical to SEQ ID NO: 4474

SEQ ID NO: 32539 - DNA, 31 bp, Homo Sapiens; identical to SEQ ID NO: 4475

SEQ ID NO: 32540 - DNA, 32 bp, Homo Sapiens; identical to SEQ ID NO: 4476

SEQ ID NO: 32541 - DNA, 32 bp, Homo Sapiens; identical to SEQ ID NO: 4478

SEQ ID NO: 32542 - DNA, 32 bp, Homo Sapiens; identical to SEQ ID NO: 4484

SEQ ID NO: 32543 - DNA, 17 bp, Homo Sapiens
agcggaagcgtgctggg

SEQ ID NO: 32544 - DNA, 18 bp, Homo Sapiens
agcggaagcgtgctgggc

SEQ ID NO: 32545 - DNA, 19 bp, Homo Sapiens
agcggaagcgtgctgggcc

SEQ ID NO: 32546 - DNA, 20 bp, Homo Sapiens
agcggaagcgtgctgggccc

SEQ ID NO: 32547 - DNA, 26 bp, Homo Sapiens
agcggaagcgtgctgggcccataacc

SEQ ID NO: 32548 - DNA, 17 bp, Homo Sapiens
agcggtctaaggcgctg

SEQ ID NO: 32549 - DNA, 19 bp, Homo Sapiens
agcggttaggattcctggt

SEQ ID NO: 32550 - DNA, 22 bp, Homo Sapiens
agcggttaggattcctggtttt

SEQ ID NO: 32551 - DNA, 24 bp, Homo Sapiens
agcgtgctgggcccataacccaga

SEQ ID NO: 32552 - DNA, 16 bp, Homo Sapiens
agctatccattggtct

SEQ ID NO: 32553 - DNA, 18 bp, Homo Sapiens
agctatcgggcccatacc

SEQ ID NO: 32554 - DNA, 33 bp, Homo Sapiens; identical to SEQ ID NO: 4582

SEQ ID NO: 32555 - DNA, 16 bp, Homo Sapiens
agctcacaagaactgc

SEQ ID NO: 32556 - DNA, 20 bp, Homo Sapiens
agctcacaagaactgctaac

SEQ ID NO: 32557 - DNA, 21 bp, Homo Sapiens
agctcacaagaactgctaact

SEQ ID NO: 32558 - DNA, 22 bp, Homo Sapiens
agctcacaagaactgctaactc

SEQ ID NO: 32559 - DNA, 25 bp, Homo Sapiens
agctcacaagaactgctaactcatg

SEQ ID NO: 32560 - DNA, 27 bp, Homo Sapiens
agctcacaagaactgctaactcatgcc

SEQ ID NO: 32561 - DNA, 30 bp, Homo Sapiens; identical to SEQ ID NO: 4604

SEQ ID NO: 32562 - DNA, 33 bp, Homo Sapiens; identical to SEQ ID NO: 4606

SEQ ID NO: 32563 - DNA, 16 bp, Homo Sapiens
agctcagtcggtagag

SEQ ID NO: 32564 - DNA, 17 bp, Homo Sapiens
agctcagtcggtagagc

SEQ ID NO: 32565 - DNA, 24 bp, Homo Sapiens
agctcagtcggtagagcatcagac

SEQ ID NO: 32566 - DNA, 25 bp, Homo Sapiens
agctcagtcggtagagcatcagact

SEQ ID NO: 32567 - DNA, 24 bp, Homo Sapiens
agctcagtcggtagagcatgagac

SEQ ID NO: 32568 - DNA, 25 bp, Homo Sapiens
agctcagtcggtagagcatgagact

SEQ ID NO: 32569 - DNA, 26 bp, Homo Sapiens
agctcagtcggtagagcatgagactc

SEQ ID NO: 32570 - DNA, 24 bp, Homo Sapiens
agctcagtcggtagagcatgggac

SEQ ID NO: 32571 - DNA, 25 bp, Homo Sapiens
agctcagtcggtagagcatgggact

SEQ ID NO: 32572 - DNA, 26 bp, Homo Sapiens
agctcagtcggtagagcatgggactc

SEQ ID NO: 32573 - DNA, 27 bp, Homo Sapiens
agctcagtcggtagagcatgggactct

SEQ ID NO: 32574 - DNA, 28 bp, Homo Sapiens
agctcagtcggtagagcatgggactctt

SEQ ID NO: 32575 - DNA, 24 bp, Homo Sapiens
agctcagtggtagagcatttgact

SEQ ID NO: 32576 - DNA, 26 bp, Homo Sapiens
agctcagttggtagagcggaggactg

SEQ ID NO: 32577 - DNA, 21 bp, Homo Sapiens
agctccgaggtgattttcata

SEQ ID NO: 32578 - DNA, 24 bp, Homo Sapiens
agctccgaggtgattttcatattg

SEQ ID NO: 32579 - DNA, 29 bp, Homo Sapiens
agctccgaggtgattttcatattgaattg

SEQ ID NO: 32580 - DNA, 30 bp, Homo Sapiens; identical to SEQ ID NO: 4685

SEQ ID NO: 32581 - DNA, 31 bp, Homo Sapiens; identical to SEQ ID NO: 4686

SEQ ID NO: 32582 - DNA, 38 bp, Homo Sapiens; identical to SEQ ID NO: 4693

SEQ ID NO: 32583 - DNA, 39 bp, Homo Sapiens; identical to SEQ ID NO: 4694

SEQ ID NO: 32584 - DNA, 45 bp, Homo Sapiens; identical to SEQ ID NO: 4700

SEQ ID NO: 32585 - DNA, 18 bp, Homo Sapiens
agctggggattgtgggtt

SEQ ID NO: 32586 - DNA, 20 bp, Homo Sapiens
agctggggattgtgggttcg

SEQ ID NO: 32587 - DNA, 37 bp, Homo Sapiens; identical to SEQ ID NO: 4717

SEQ ID NO: 32588 - DNA, 38 bp, Homo Sapiens; identical to SEQ ID NO: 4718

SEQ ID NO: 32589 - DNA, 39 bp, Homo Sapiens; identical to SEQ ID NO: 4719

SEQ ID NO: 32590 - DNA, 18 bp, Homo Sapiens
agcttcaaacctgccggg

SEQ ID NO: 32591 - DNA, 19 bp, Homo Sapiens
agcttcaaacctgccgggg

SEQ ID NO: 32592 - DNA, 20 bp, Homo Sapiens
agcttcaaacctgccggggc

SEQ ID NO: 32593 - DNA, 21 bp, Homo Sapiens
agcttcaaacctgccggggct

SEQ ID NO: 32594 - DNA, 22 bp, Homo Sapiens
agcttcaaacctgccggggctt

SEQ ID NO: 32595 - DNA, 25 bp, Homo Sapiens
agcttcaaacctgccggggcttcca

SEQ ID NO: 32596 - DNA, 16 bp, Homo Sapiens
agctttggggggttcg

SEQ ID NO: 32597 - DNA, 21 bp, Homo Sapiens
agctttggggggttcgattcc

SEQ ID NO: 32598 - DNA, 26 bp, Homo Sapiens
agctttggggggttcgattccttcct

SEQ ID NO: 32599 - DNA, 35 bp, Homo Sapiens; identical to SEQ ID NO: 4781

SEQ ID NO: 32600 - DNA, 24 bp, Homo Sapiens
aggactgtagatccttaggtcgct

SEQ ID NO: 32601 - DNA, 16 bp, Homo Sapiens
aggagatcctgggttc

SEQ ID NO: 32602 - DNA, 17 bp, Homo Sapiens
aggagatcctgggttcg

SEQ ID NO: 32603 - DNA, 27 bp, Homo Sapiens
aggagatcctgggttcgaatcccagcg

SEQ ID NO: 32604 - DNA, 30 bp, Homo Sapiens
aggagatcctgggttcgaatcccagcgggg

SEQ ID NO: 32605 - DNA, 31 bp, Homo Sapiens; identical to SEQ ID NO: 4805

SEQ ID NO: 32606 - DNA, 33 bp, Homo Sapiens; identical to SEQ ID NO: 4807

SEQ ID NO: 32607 - DNA, 34 bp, Homo Sapiens; identical to SEQ ID NO: 4808

SEQ ID NO: 32608 - DNA, 35 bp, Homo Sapiens; identical to SEQ ID NO: 4809

SEQ ID NO: 32609 - DNA, 30 bp, Homo Sapiens; identical to SEQ ID NO: 4810

SEQ ID NO: 32610 - DNA, 31 bp, Homo Sapiens; identical to SEQ ID NO: 4811

SEQ ID NO: 32611 - DNA, 33 bp, Homo Sapiens; identical to SEQ ID NO: 4813

SEQ ID NO: 32612 - DNA, 35 bp, Homo Sapiens; identical to SEQ ID NO: 4815

SEQ ID NO: 32613 - DNA, 31 bp, Homo Sapiens
aggagatcctgggttcgactcccagtggggc

SEQ ID NO: 32614 - DNA, 24 bp, Homo Sapiens
aggagatttcaacttaacttgacc

SEQ ID NO: 32615 - DNA, 28 bp, Homo Sapiens
aggagatttcaacttaacttgaccgctc

SEQ ID NO: 32616 - DNA, 30 bp, Homo Sapiens; identical to SEQ ID NO: 4838

SEQ ID NO: 32617 - DNA, 31 bp, Homo Sapiens; identical to SEQ ID NO: 4839

SEQ ID NO: 32618 - DNA, 32 bp, Homo Sapiens; identical to SEQ ID NO: 4840

SEQ ID NO: 32619 - DNA, 33 bp, Homo Sapiens; identical to SEQ ID NO: 4841

SEQ ID NO: 32620 - DNA, 34 bp, Homo Sapiens; identical to SEQ ID NO: 4842

SEQ ID NO: 32621 - DNA, 27 bp, Homo Sapiens
aggagcttaaacccccttatttctacc

SEQ ID NO: 32622 - DNA, 23 bp, Homo Sapiens
aggataacagctatccattggtc

SEQ ID NO: 32623 - DNA, 18 bp, Homo Sapiens
aggatggccgagcggtct

SEQ ID NO: 32624 - DNA, 19 bp, Homo Sapiens
aggatggccgagcggtcta

SEQ ID NO: 32625 - DNA, 21 bp, Homo Sapiens
aggatggccgagcggtctaag

SEQ ID NO: 32626 - DNA, 23 bp, Homo Sapiens
aggatggccgagcggtctaaggc

SEQ ID NO: 32627 - DNA, 31 bp, Homo Sapiens; identical to SEQ ID NO: 4870

SEQ ID NO: 32628 - DNA, 21 bp, Homo Sapiens
aggatggccgagtggtctaag

SEQ ID NO: 32629 - DNA, 23 bp, Homo Sapiens
aggatggccgagtggtctaaggc

SEQ ID NO: 32630 - DNA, 26 bp, Homo Sapiens
aggatggccgagtggtctaaggcgcc

SEQ ID NO: 32631 - DNA, 22 bp, Homo Sapiens
aggatggccgagtggttaaggc

SEQ ID NO: 32632 - DNA, 23 bp, Homo Sapiens
aggatggggtgtgataggtggca

SEQ ID NO: 32633 - DNA, 24 bp, Homo Sapiens
aggatggggtgtgataggtggcac

SEQ ID NO: 32634 - DNA, 27 bp, Homo Sapiens
aggatggggtgtgataggtggcacgga

SEQ ID NO: 32635 - DNA, 29 bp, Homo Sapiens
aggatggggtgtgataggtggcacggaga

SEQ ID NO: 32636 - DNA, 30 bp, Homo Sapiens; identical to SEQ ID NO: 4890

SEQ ID NO: 32637 - DNA, 31 bp, Homo Sapiens; identical to SEQ ID NO: 4891

SEQ ID NO: 32638 - DNA, 32 bp, Homo Sapiens; identical to SEQ ID NO: 4892

SEQ ID NO: 32639 - DNA, 35 bp, Homo Sapiens; identical to SEQ ID NO: 4895

SEQ ID NO: 32640 - DNA, 38 bp, Homo Sapiens
aggattcctggttttcacccaggcggcccgggttcgac

SEQ ID NO: 32641 - DNA, 46 bp, Homo Sapiens
aggattcctggttttcacccaggcggcccgggttcgactcccggtg

SEQ ID NO: 32642 - DNA, 25 bp, Homo Sapiens
aggattcctggttttcacccaggtg

SEQ ID NO: 32643 - DNA, 16 bp, Homo Sapiens
aggattcggcgctctc

SEQ ID NO: 32644 - DNA, 17 bp, Homo Sapiens
aggattcggcgctctca

SEQ ID NO: 32645 - DNA, 18 bp, Homo Sapiens
aggattcggcgctctcac

SEQ ID NO: 32646 - DNA, 19 bp, Homo Sapiens
aggattcggcgctctcacc

SEQ ID NO: 32647 - DNA, 20 bp, Homo Sapiens
aggattcggcgctctcaccg

SEQ ID NO: 32648 - DNA, 21 bp, Homo Sapiens
aggattcggcgctctcaccgc

SEQ ID NO: 32649 - DNA, 22 bp, Homo Sapiens
aggattcggcgctctcaccgcc

SEQ ID NO: 32650 - DNA, 27 bp, Homo Sapiens
aggattcggcgctctcaccgccgcggc

SEQ ID NO: 32651 - DNA, 28 bp, Homo Sapiens
aggattcggcgctctcaccgccgcggcc

SEQ ID NO: 32652 - DNA, 29 bp, Homo Sapiens
aggattcggcgctctcaccgccgcggccc

SEQ ID NO: 32653 - DNA, 31 bp, Homo Sapiens; identical to SEQ ID NO: 4919

SEQ ID NO: 32654 - DNA, 32 bp, Homo Sapiens; identical to SEQ ID NO: 4920

SEQ ID NO: 32655 - DNA, 34 bp, Homo Sapiens; identical to SEQ ID NO: 4922

SEQ ID NO: 32656 - DNA, 35 bp, Homo Sapiens; identical to SEQ ID NO: 4923

SEQ ID NO: 32657 - DNA, 20 bp, Homo Sapiens
aggcatcagcctccggagct

SEQ ID NO: 32658 - DNA, 21 bp, Homo Sapiens
aggcatcagcctccggagctg

SEQ ID NO: 32659 - DNA, 25 bp, Homo Sapiens
aggcatcagcctccggagctgggga

SEQ ID NO: 32660 - DNA, 28 bp, Homo Sapiens
aggcatcagcctccggagctggggattg

SEQ ID NO: 32661 - DNA, 29 bp, Homo Sapiens
aggcatcagcctccggagctggggattgt

SEQ ID NO: 32662 - DNA, 36 bp, Homo Sapiens; identical to SEQ ID NO: 4943

SEQ ID NO: 32663 - DNA, 32 bp, Homo Sapiens; identical to SEQ ID NO: 4949

SEQ ID NO: 32664 - DNA, 32 bp, Homo Sapiens
aggccccgggttcaatccccggcatctccacc

SEQ ID NO: 32665 - DNA, 32 bp, Homo Sapiens; identical to SEQ ID NO: 4951

SEQ ID NO: 32666 - DNA, 33 bp, Homo Sapiens; identical to SEQ ID NO: 4953

SEQ ID NO: 32667 - DNA, 20 bp, Homo Sapiens
aggcgctggatttaggctcc

SEQ ID NO: 32668 - DNA, 18 bp, Homo Sapiens
aggcggcccgggttcgac

SEQ ID NO: 32669 - DNA, 20 bp, Homo Sapiens
aggcggcccgggttcgactc

SEQ ID NO: 32670 - DNA, 21 bp, Homo Sapiens
aggcggcccgggttcgactcc

SEQ ID NO: 32671 - DNA, 22 bp, Homo Sapiens
aggcggcccgggttcgactccc

SEQ ID NO: 32672 - DNA, 24 bp, Homo Sapiens
aggcggcccgggttcgactcccgg

SEQ ID NO: 32673 - DNA, 25 bp, Homo Sapiens
aggcggcccgggttcgactcccggt

SEQ ID NO: 32674 - DNA, 26 bp, Homo Sapiens
aggcggcccgggttcgactcccggtg

SEQ ID NO: 32675 - DNA, 27 bp, Homo Sapiens
aggcggcccgggttcgactcccggtgt

SEQ ID NO: 32676 - DNA, 28 bp, Homo Sapiens
aggcggcccgggttcgactcccggtgtg

SEQ ID NO: 32677 - DNA, 29 bp, Homo Sapiens
aggcggcccgggttcgactcccggtgtgg

SEQ ID NO: 32678 - DNA, 30 bp, Homo Sapiens; identical to SEQ ID NO: 4967

SEQ ID NO: 32679 - DNA, 31 bp, Homo Sapiens; identical to SEQ ID NO: 4968

SEQ ID NO: 32680 - DNA, 32 bp, Homo Sapiens; identical to SEQ ID NO: 4969

SEQ ID NO: 32681 - DNA, 33 bp, Homo Sapiens; identical to SEQ ID NO: 4970

SEQ ID NO: 32682 - DNA, 34 bp, Homo Sapiens; identical to SEQ ID NO: 4971

SEQ ID NO: 32683 - DNA, 35 bp, Homo Sapiens; identical to SEQ ID NO: 4972

SEQ ID NO: 32684 - DNA, 19 bp, Homo Sapiens
aggcgtctgacttcggatc

SEQ ID NO: 32685 - DNA, 47 bp, Homo Sapiens
aggctccagtctcttcgggggcgtgggttcgaatcccaccgctgcca

SEQ ID NO: 32686 - DNA, 31 bp, Homo Sapiens
aggctgcgtgttcgaatcacgtcggggtcac

SEQ ID NO: 32687 - DNA, 32 bp, Homo Sapiens; identical to SEQ ID NO: 4985

SEQ ID NO: 32688 - DNA, 26 bp, Homo Sapiens
aggcttacgaccccttatttacccca

SEQ ID NO: 32689 - DNA, 17 bp, Homo Sapiens
agggatgggttcgattc

SEQ ID NO: 32690 - DNA, 20 bp, Homo Sapiens
agggatgggttcgattctca

SEQ ID NO: 32691 - DNA, 26 bp, Homo Sapiens
agggatgggttcgattctcatagtcc

SEQ ID NO: 32692 - DNA, 30 bp, Homo Sapiens; identical to SEQ ID NO: 5003

SEQ ID NO: 32693 - DNA, 16 bp, Homo Sapiens
agggattgtgggttcg

SEQ ID NO: 32694 - DNA, 21 bp, Homo Sapiens
agggattgtgggttcgagtcc

SEQ ID NO: 32695 - DNA, 22 bp, Homo Sapiens
agggattgtgggttcgagtccc

SEQ ID NO: 32696 - DNA, 23 bp, Homo Sapiens
agggattgtgggttcgagtccca

SEQ ID NO: 32697 - DNA, 25 bp, Homo Sapiens
agggattgtgggttcgagtcccacc

SEQ ID NO: 32698 - DNA, 28 bp, Homo Sapiens
agggattgtgggttcgagtcccacccgg

SEQ ID NO: 32699 - DNA, 30 bp, Homo Sapiens; identical to SEQ ID NO: 5013

SEQ ID NO: 32700 - DNA, 31 bp, Homo Sapiens; identical to SEQ ID NO: 5014

SEQ ID NO: 32701 - DNA, 32 bp, Homo Sapiens; identical to SEQ ID NO: 5015

SEQ ID NO: 32702 - DNA, 33 bp, Homo Sapiens; identical to SEQ ID NO: 5016

SEQ ID NO: 32703 - DNA, 34 bp, Homo Sapiens; identical to SEQ ID NO: 5017

SEQ ID NO: 32704 - DNA, 32 bp, Homo Sapiens; identical to SEQ ID NO: 5020

SEQ ID NO: 32705 - DNA, 33 bp, Homo Sapiens; identical to SEQ ID NO: 5021

SEQ ID NO: 32706 - DNA, 34 bp, Homo Sapiens; identical to SEQ ID NO: 5026

SEQ ID NO: 32707 - DNA, 35 bp, Homo Sapiens; identical to SEQ ID NO: 5027

SEQ ID NO: 32708 - DNA, 25 bp, Homo Sapiens
agggattgtgggttcgagtcccatc

SEQ ID NO: 32709 - DNA, 26 bp, Homo Sapiens
agggattgtgggttcgagtcccatct

SEQ ID NO: 32710 - DNA, 30 bp, Homo Sapiens; identical to SEQ ID NO: 5031

SEQ ID NO: 32711 - DNA, 31 bp, Homo Sapiens; identical to SEQ ID NO: 5032

SEQ ID NO: 32712 - DNA, 32 bp, Homo Sapiens; identical to SEQ ID NO: 5033

SEQ ID NO: 32713 - DNA, 33 bp, Homo Sapiens; identical to SEQ ID NO: 5034

SEQ ID NO: 32714 - DNA, 34 bp, Homo Sapiens; identical to SEQ ID NO: 5035

SEQ ID NO: 32715 - DNA, 35 bp, Homo Sapiens; identical to SEQ ID NO: 5036

SEQ ID NO: 32716 - DNA, 19 bp, Homo Sapiens
aggggtagagcatttgact

SEQ ID NO: 32717 - DNA, 21 bp, Homo Sapiens
aggggtagagcatttgactgc

SEQ ID NO: 32718 - DNA, 17 bp, Homo Sapiens
aggggtatgattctcgc

SEQ ID NO: 32719 - DNA, 18 bp, Homo Sapiens
aggggtatgattctcgct

SEQ ID NO: 32720 - DNA, 19 bp, Homo Sapiens
aggggtatgattctcgctt

SEQ ID NO: 32721 - DNA, 22 bp, Homo Sapiens
aggggtatgattctcgctttgg

SEQ ID NO: 32722 - DNA, 18 bp, Homo Sapiens
aggggtatgattctcggt

SEQ ID NO: 32723 - DNA, 19 bp, Homo Sapiens
aggggtatgattctcggtt

SEQ ID NO: 32724 - DNA, 32 bp, Homo Sapiens; identical to SEQ ID NO: 5056

SEQ ID NO: 32725 - DNA, 33 bp, Homo Sapiens; identical to SEQ ID NO: 5057

SEQ ID NO: 32726 - DNA, 34 bp, Homo Sapiens; identical to SEQ ID NO: 5058

SEQ ID NO: 32727 - DNA, 33 bp, Homo Sapiens; identical to SEQ ID NO: 5060

SEQ ID NO: 32728 - DNA, 32 bp, Homo Sapiens; identical to SEQ ID NO: 5062

SEQ ID NO: 32729 - DNA, 33 bp, Homo Sapiens; identical to SEQ ID NO: 5063

SEQ ID NO: 32730 - DNA, 30 bp, Homo Sapiens; identical to SEQ ID NO: 5073

SEQ ID NO: 32731 - DNA, 31 bp, Homo Sapiens; identical to SEQ ID NO: 5074

SEQ ID NO: 32732 - DNA, 32 bp, Homo Sapiens; identical to SEQ ID NO: 5075

SEQ ID NO: 32733 - DNA, 33 bp, Homo Sapiens; identical to SEQ ID NO: 5076

SEQ ID NO: 32734 - DNA, 19 bp, Homo Sapiens
agggtcgtgggttcgagcc

SEQ ID NO: 32735 - DNA, 21 bp, Homo Sapiens
agggtcgtgggttcgagcccc

SEQ ID NO: 32736 - DNA, 22 bp, Homo Sapiens
agggtcgtgggttcgagcccca

SEQ ID NO: 32737 - DNA, 24 bp, Homo Sapiens
agggtcgtgggttcgagccccacg

SEQ ID NO: 32738 - DNA, 25 bp, Homo Sapiens
agggtcgtgggttcgagccccacgt

SEQ ID NO: 32739 - DNA, 30 bp, Homo Sapiens; identical to SEQ ID NO: 5086

SEQ ID NO: 32740 - DNA, 31 bp, Homo Sapiens; identical to SEQ ID NO: 5087

SEQ ID NO: 32741 - DNA, 32 bp, Homo Sapiens; identical to SEQ ID NO: 5088

SEQ ID NO: 32742 - DNA, 33 bp, Homo Sapiens; identical to SEQ ID NO: 5089

SEQ ID NO: 32743 - DNA, 34 bp, Homo Sapiens; identical to SEQ ID NO: 5090

SEQ ID NO: 32744 - DNA, 23 bp, Homo Sapiens
agggttcaagtccctgttcgggc

SEQ ID NO: 32745 - DNA, 24 bp, Homo Sapiens
agggttcaagtccctgttcgggcg

SEQ ID NO: 32746 - DNA, 25 bp, Homo Sapiens
agggttcaagtccctgttcgggcgc

SEQ ID NO: 32747 - DNA, 26 bp, Homo Sapiens
agggttcaagtccctgttcgggcgcc

SEQ ID NO: 32748 - DNA, 27 bp, Homo Sapiens
agggttcaagtccctgttcgggcgcca

SEQ ID NO: 32749 - DNA, 25 bp, Homo Sapiens
agggttcgaatcccttcgtggttgc

SEQ ID NO: 32750 - DNA, 26 bp, Homo Sapiens
agggttcgaatcccttcgtggttgcc

SEQ ID NO: 32751 - DNA, 25 bp, Homo Sapiens
agggttcgagtcccttcgtggtcgc

SEQ ID NO: 32752 - DNA, 26 bp, Homo Sapiens
agggttcgagtcccttcgtggtcgcc

SEQ ID NO: 32753 - DNA, 24 bp, Homo Sapiens
aggtcagctaaataagctatcggg

SEQ ID NO: 32754 - DNA, 18 bp, Homo Sapiens
aggtccccggttcgaaac

SEQ ID NO: 32755 - DNA, 19 bp, Homo Sapiens
aggtccccggttcgaaacc

SEQ ID NO: 32756 - DNA, 20 bp, Homo Sapiens
aggtccccggttcgaaaccg

SEQ ID NO: 32757 - DNA, 21 bp, Homo Sapiens
aggtccccggttcgaaaccgg

SEQ ID NO: 32758 - DNA, 23 bp, Homo Sapiens
aggtccccggttcgaaaccgggc

SEQ ID NO: 32759 - DNA, 30 bp, Homo Sapiens; identical to SEQ ID NO: 5130

SEQ ID NO: 32760 - DNA, 32 bp, Homo Sapiens
aggtccccggttcgaaaccgggcggaaacacc

SEQ ID NO: 32761 - DNA, 24 bp, Homo Sapiens
aggtcccgggttcaaatcccggac

SEQ ID NO: 32762 - DNA, 30 bp, Homo Sapiens
aggtcccgggttcaaatcccggacgagccc

SEQ ID NO: 32763 - DNA, 31 bp, Homo Sapiens; identical to SEQ ID NO: 5133

SEQ ID NO: 32764 - DNA, 32 bp, Homo Sapiens; identical to SEQ ID NO: 5134

SEQ ID NO: 32765 - DNA, 19 bp, Homo Sapiens
aggtccctggttcgatccc

SEQ ID NO: 32766 - DNA, 21 bp, Homo Sapiens
aggtccctggttcgatcccgg

SEQ ID NO: 32767 - DNA, 31 bp, Homo Sapiens; identical to SEQ ID NO: 5138

SEQ ID NO: 32768 - DNA, 32 bp, Homo Sapiens
aggtccctggttcgatcccgggtttcggcacc

SEQ ID NO: 32769 - DNA, 17 bp, Homo Sapiens
aggtcctgagttcgaac

SEQ ID NO: 32770 - DNA, 19 bp, Homo Sapiens
aggtcctgagttcgaacct

SEQ ID NO: 32771 - DNA, 29 bp, Homo Sapiens
aggtcctgagttcgaacctcagagggggc

SEQ ID NO: 32772 - DNA, 30 bp, Homo Sapiens
aggtcctgggttcgagccccagtggaacca

SEQ ID NO: 32773 - DNA, 31 bp, Homo Sapiens; identical to SEQ ID NO: 5149

SEQ ID NO: 32774 - DNA, 32 bp, Homo Sapiens; identical to SEQ ID NO: 5150

SEQ ID NO: 32775 - DNA, 33 bp, Homo Sapiens; identical to SEQ ID NO: 5151

SEQ ID NO: 32776 - DNA, 17 bp, Homo Sapiens
aggtcgatggatcgaaa

SEQ ID NO: 32777 - DNA, 18 bp, Homo Sapiens
aggtcgatggatcgaaac

SEQ ID NO: 32778 - DNA, 19 bp, Homo Sapiens
aggtcgatggatcgaaacc

SEQ ID NO: 32779 - DNA, 20 bp, Homo Sapiens
aggtcgatggatcgaaacca

SEQ ID NO: 32780 - DNA, 21 bp, Homo Sapiens
aggtcgatggatcgaaaccat

SEQ ID NO: 32781 - DNA, 32 bp, Homo Sapiens; identical to SEQ ID NO: 5157

SEQ ID NO: 32782 - DNA, 18 bp, Homo Sapiens
aggtcgcgggttcgaacc

SEQ ID NO: 32783 - DNA, 19 bp, Homo Sapiens
aggtcgcgggttcgaaccc

SEQ ID NO: 32784 - DNA, 28 bp, Homo Sapiens
aggtcgcgggttcgaaccccgtacgggc

SEQ ID NO: 32785 - DNA, 29 bp, Homo Sapiens
aggtcgcgggttcgaaccccgtacgggcc

SEQ ID NO: 32786 - DNA, 30 bp, Homo Sapiens; identical to SEQ ID NO: 5159

SEQ ID NO: 32787 - DNA, 18 bp, Homo Sapiens
aggtcgcgggttcgatcc

SEQ ID NO: 32788 - DNA, 19 bp, Homo Sapiens
aggtcgcgggttcgatccc

SEQ ID NO: 32789 - DNA, 20 bp, Homo Sapiens
aggtcgcgggttcgatcccc

SEQ ID NO: 32790 - DNA, 21 bp, Homo Sapiens
aggtcgcgggttcgatccccg

SEQ ID NO: 32791 - DNA, 23 bp, Homo Sapiens
aggtcgcgggttcgatccccgta

SEQ ID NO: 32792 - DNA, 28 bp, Homo Sapiens
aggtcgcgggttcgatccccgtacgggc

SEQ ID NO: 32793 - DNA, 29 bp, Homo Sapiens
aggtcgcgggttcgatccccgtacgggcc

SEQ ID NO: 32794 - DNA, 30 bp, Homo Sapiens; identical to SEQ ID NO: 5165

SEQ ID NO: 32795 - DNA, 31 bp, Homo Sapiens; identical to SEQ ID NO: 5166

SEQ ID NO: 32796 - DNA, 32 bp, Homo Sapiens; identical to SEQ ID NO: 5167

SEQ ID NO: 32797 - DNA, 33 bp, Homo Sapiens; identical to SEQ ID NO: 5168

SEQ ID NO: 32798 - DNA, 31 bp, Homo Sapiens; identical to SEQ ID NO: 5170

SEQ ID NO: 32799 - DNA, 32 bp, Homo Sapiens; identical to SEQ ID NO: 5171

SEQ ID NO: 32800 - DNA, 31 bp, Homo Sapiens; identical to SEQ ID NO: 5173

SEQ ID NO: 32801 - DNA, 32 bp, Homo Sapiens; identical to SEQ ID NO: 5174

SEQ ID NO: 32802 - DNA, 31 bp, Homo Sapiens; identical to SEQ ID NO: 5179

SEQ ID NO: 32803 - DNA, 32 bp, Homo Sapiens; identical to SEQ ID NO: 5180

SEQ ID NO: 32804 - DNA, 17 bp, Homo Sapiens
aggtcgtgagttcgagc

SEQ ID NO: 32805 - DNA, 18 bp, Homo Sapiens
aggtcgtgagttcgagcc

SEQ ID NO: 32806 - DNA, 20 bp, Homo Sapiens
aggtcgtgagttcgagcctc

SEQ ID NO: 32807 - DNA, 18 bp, Homo Sapiens
aggtcgtgagttcgatcc

SEQ ID NO: 32808 - DNA, 20 bp, Homo Sapiens
aggtcgtgagttcgatcctc

SEQ ID NO: 32809 - DNA, 29 bp, Homo Sapiens
aggtcgtgagttcgatcctcacacggggc

SEQ ID NO: 32810 - DNA, 18 bp, Homo Sapiens
aggtgattttcatattga

SEQ ID NO: 32811 - DNA, 22 bp, Homo Sapiens
aggtgattttcatattgaattg

SEQ ID NO: 32812 - DNA, 18 bp, Homo Sapiens
aggtggcccgggttcgac

SEQ ID NO: 32813 - DNA, 21 bp, Homo Sapiens
aggtggcccgggttcgactcc

SEQ ID NO: 32814 - DNA, 22 bp, Homo Sapiens
aggtggcccgggttcgactccc

SEQ ID NO: 32815 - DNA, 26 bp, Homo Sapiens
aggtggcccgggttcgactcccggta

SEQ ID NO: 32816 - DNA, 31 bp, Homo Sapiens; identical to SEQ ID NO: 5215

SEQ ID NO: 32817 - DNA, 32 bp, Homo Sapiens; identical to SEQ ID NO: 5216

SEQ ID NO: 32818 - DNA, 33 bp, Homo Sapiens; identical to SEQ ID NO: 5217

SEQ ID NO: 32819 - DNA, 34 bp, Homo Sapiens; identical to SEQ ID NO: 5218

SEQ ID NO: 32820 - DNA, 20 bp, Homo Sapiens
aggttccgggttcgagtccc

SEQ ID NO: 32821 - DNA, 21 bp, Homo Sapiens
aggttccgggttcgagtcccg

SEQ ID NO: 32822 - DNA, 23 bp, Homo Sapiens
aggttccgggttcgagtcccggc

SEQ ID NO: 32823 - DNA, 27 bp, Homo Sapiens
aggttccgggttcgagtcccggcggag

SEQ ID NO: 32824 - DNA, 29 bp, Homo Sapiens
aggttccgggttcgagtcccggcggagtc

SEQ ID NO: 32825 - DNA, 30 bp, Homo Sapiens
aggttccgggttcgagtcccggcggagtcg

SEQ ID NO: 32826 - DNA, 31 bp, Homo Sapiens; identical to SEQ ID NO: 5228

SEQ ID NO: 32827 - DNA, 32 bp, Homo Sapiens; identical to SEQ ID NO: 5229

SEQ ID NO: 32828 - DNA, 25 bp, Homo Sapiens
aggttcgaaccctgctcgctgcgcc

SEQ ID NO: 32829 - DNA, 25 bp, Homo Sapiens
aggttcgaatcctgccgactacgcc

SEQ ID NO: 32830 - DNA, 23 bp, Homo Sapiens
aggttcgaatcctgttcgtgacg

SEQ ID NO: 32831 - DNA, 24 bp, Homo Sapiens
aggttcgaatcctgttcgtgacgc

SEQ ID NO: 32832 - DNA, 25 bp, Homo Sapiens
aggttcgaatcctgttcgtgacgcc

SEQ ID NO: 32833 - DNA, 16 bp, Homo Sapiens
aggttcgactcctggc

SEQ ID NO: 32834 - DNA, 20 bp, Homo Sapiens
aggttcgactcctggctggc

SEQ ID NO: 32835 - DNA, 22 bp, Homo Sapiens
aggttcgactcctggctggctc

SEQ ID NO: 32836 - DNA, 23 bp, Homo Sapiens
aggttcgactcctggctggctcg

SEQ ID NO: 32837 - DNA, 24 bp, Homo Sapiens
aggttcgactcctggctggctcgc

SEQ ID NO: 32838 - DNA, 25 bp, Homo Sapiens
aggttcgactcctggctggctcgcc

SEQ ID NO: 32839 - DNA, 26 bp, Homo Sapiens
aggttcgactcctggctggctcgcca

SEQ ID NO: 32840 - DNA, 23 bp, Homo Sapiens
aggttcgagtcctgccgcggtcg

SEQ ID NO: 32841 - DNA, 24 bp, Homo Sapiens
aggttcgagtcctgccgcggtcgc

SEQ ID NO: 32842 - DNA, 29 bp, Homo Sapiens
aggttgcgtgttcaaatcacgtcggggtc

SEQ ID NO: 32843 - DNA, 31 bp, Homo Sapiens
aggttgcgtgttcaaatcacgtcggggtcac

SEQ ID NO: 32844 - DNA, 32 bp, Homo Sapiens
aggttgcgtgttcaagtcacgtcggggtcacc

SEQ ID NO: 32845 - DNA, 17 bp, Homo Sapiens
aggttggtggttcgagc

SEQ ID NO: 32846 - DNA, 32 bp, Homo Sapiens; identical to SEQ ID NO: 5257

SEQ ID NO: 32847 - DNA, 17 bp, Homo Sapiens
aggttgtgagttcgagc

SEQ ID NO: 32848 - DNA, 18 bp, Homo Sapiens
aggttgtgagttcgagcc

SEQ ID NO: 32849 - DNA, 20 bp, Homo Sapiens
aggttgtgagttcgagcctc

SEQ ID NO: 32850 - DNA, 32 bp, Homo Sapiens
aggttgtgagttcgagcctcacctggagcacc

SEQ ID NO: 32851 - DNA, 23 bp, Homo Sapiens
aggttgtgggttcgaatcccacc

SEQ ID NO: 32852 - DNA, 31 bp, Homo Sapiens
aggttgtgggttcgaatcccaccagagtcgc

SEQ ID NO: 32853 - DNA, 32 bp, Homo Sapiens; identical to SEQ ID NO: 5263

SEQ ID NO: 32854 - DNA, 23 bp, Homo Sapiens
aggttgtgggttcgagtcccacc

SEQ ID NO: 32855 - DNA, 32 bp, Homo Sapiens; identical to SEQ ID NO: 5266

SEQ ID NO: 32856 - DNA, 16 bp, Homo Sapiens
agtaaggtcagctaaa

SEQ ID NO: 32857 - DNA, 17 bp, Homo Sapiens
agtaaggtcagctaaat

SEQ ID NO: 32858 - DNA, 18 bp, Homo Sapiens
agtaaggtcagctaaata

SEQ ID NO: 32859 - DNA, 20 bp, Homo Sapiens
agtaaggtcagctaaataag

SEQ ID NO: 32860 - DNA, 21 bp, Homo Sapiens
agtaaggtcagctaaataagc

SEQ ID NO: 32861 - DNA, 22 bp, Homo Sapiens
agtaaggtcagctaaataagct

SEQ ID NO: 32862 - DNA, 28 bp, Homo Sapiens
agtaaggtcagctaaataagctatcggg

SEQ ID NO: 32863 - DNA, 29 bp, Homo Sapiens
agtaaggtcagctaaataagctatcgggc

SEQ ID NO: 32864 - DNA, 30 bp, Homo Sapiens; identical to SEQ ID NO: 5300

SEQ ID NO: 32865 - DNA, 31 bp, Homo Sapiens; identical to SEQ ID NO: 5301

SEQ ID NO: 32866 - DNA, 32 bp, Homo Sapiens; identical to SEQ ID NO: 5302

SEQ ID NO: 32867 - DNA, 33 bp, Homo Sapiens; identical to SEQ ID NO: 5303

SEQ ID NO: 32868 - DNA, 34 bp, Homo Sapiens; identical to SEQ ID NO: 5304

SEQ ID NO: 32869 - DNA, 35 bp, Homo Sapiens; identical to SEQ ID NO: 5305

SEQ ID NO: 32870 - DNA, 36 bp, Homo Sapiens; identical to SEQ ID NO: 5306

SEQ ID NO: 32871 - DNA, 37 bp, Homo Sapiens; identical to SEQ ID NO: 5307

SEQ ID NO: 32872 - DNA, 38 bp, Homo Sapiens; identical to SEQ ID NO: 5308

SEQ ID NO: 32873 - DNA, 39 bp, Homo Sapiens; identical to SEQ ID NO: 5309

SEQ ID NO: 32874 - DNA, 40 bp, Homo Sapiens; identical to SEQ ID NO: 5310

SEQ ID NO: 32875 - DNA, 41 bp, Homo Sapiens; identical to SEQ ID NO: 5311

SEQ ID NO: 32876 - DNA, 42 bp, Homo Sapiens; identical to SEQ ID NO: 5312

SEQ ID NO: 32877 - DNA, 43 bp, Homo Sapiens; identical to SEQ ID NO: 5313

SEQ ID NO: 32878 - DNA, 45 bp, Homo Sapiens; identical to SEQ ID NO: 5315

SEQ ID NO: 32879 - DNA, 46 bp, Homo Sapiens; identical to SEQ ID NO: 5316

SEQ ID NO: 32880 - DNA, 47 bp, Homo Sapiens; identical to SEQ ID NO: 5317

SEQ ID NO: 32881 - DNA, 19 bp, Homo Sapiens
agtactctgcgttgtggcc

SEQ ID NO: 32882 - DNA, 20 bp, Homo Sapiens
agtactctgcgttgtggccg

SEQ ID NO: 32883 - DNA, 33 bp, Homo Sapiens; identical to SEQ ID NO: 5335

SEQ ID NO: 32884 - DNA, 20 bp, Homo Sapiens
agtaggcagcgcgtcagtct

SEQ ID NO: 32885 - DNA, 19 bp, Homo Sapiens
agtaggtagcgcatcagtc

SEQ ID NO: 32886 - DNA, 20 bp, Homo Sapiens
agtaggtagcgcatcagtct

SEQ ID NO: 32887 - DNA, 16 bp, Homo Sapiens
agtcacgtcggggtca

SEQ ID NO: 32888 - DNA, 17 bp, Homo Sapiens
agtcacgtcggggtcac

SEQ ID NO: 32889 - DNA, 18 bp, Homo Sapiens
agtcacgtcggggtcacc

SEQ ID NO: 32890 - DNA, 19 bp, Homo Sapiens
agtcacgtcggggtcacca

SEQ ID NO: 32891 - DNA, 16 bp, Homo Sapiens
agtcatggaggccatg

SEQ ID NO: 32892 - DNA, 18 bp, Homo Sapiens
agtcccatctgggtcgcc

SEQ ID NO: 32893 - DNA, 16 bp, Homo Sapiens
agtcccggcggagtcg

SEQ ID NO: 32894 - DNA, 17 bp, Homo Sapiens
agtcccggcggagtcgc

SEQ ID NO: 32895 - DNA, 18 bp, Homo Sapiens
agtcccggcggagtcgcc

SEQ ID NO: 32896 - DNA, 16 bp, Homo Sapiens
agtccctgttcgggcg

SEQ ID NO: 32897 - DNA, 17 bp, Homo Sapiens
agtccctgttcgggcgc

SEQ ID NO: 32898 - DNA, 18 bp, Homo Sapiens
agtccctgttcgggcgcc

SEQ ID NO: 32899 - DNA, 19 bp, Homo Sapiens
agtccctgttcgggcgcca

SEQ ID NO: 32900 - DNA, 17 bp, Homo Sapiens
agtcctgccgcggtcgc

SEQ ID NO: 32901 - DNA, 18 bp, Homo Sapiens
agtcctgccgcggtcgcc

SEQ ID NO: 32902 - DNA, 16 bp, Homo Sapiens
agtcggtagagcatca

SEQ ID NO: 32903 - DNA, 18 bp, Homo Sapiens
agtcggtagagcatcaga

SEQ ID NO: 32904 - DNA, 19 bp, Homo Sapiens
agtcggtagagcatcagac

SEQ ID NO: 32905 - DNA, 20 bp, Homo Sapiens
agtcggtagagcatcagact

SEQ ID NO: 32906 - DNA, 23 bp, Homo Sapiens
agtcggtagagcatcagactttt

SEQ ID NO: 32907 - DNA, 18 bp, Homo Sapiens
agtcggtagagcatgaga

SEQ ID NO: 32908 - DNA, 19 bp, Homo Sapiens
agtcggtagagcatgagac

SEQ ID NO: 32909 - DNA, 20 bp, Homo Sapiens
agtcggtagagcatgagacc

SEQ ID NO: 32910 - DNA, 21 bp, Homo Sapiens
agtcggtagagcatgagaccc

SEQ ID NO: 32911 - DNA, 28 bp, Homo Sapiens
agtcggtagagcatgagacccttaatct

SEQ ID NO: 32912 - DNA, 20 bp, Homo Sapiens
agtcggtagagcatgagact

SEQ ID NO: 32913 - DNA, 21 bp, Homo Sapiens
agtcggtagagcatgagactc

SEQ ID NO: 32914 - DNA, 22 bp, Homo Sapiens
agtcggtagagcatgagactct

SEQ ID NO: 32915 - DNA, 26 bp, Homo Sapiens
agtcggtagagcatgagactcttaat

SEQ ID NO: 32916 - DNA, 27 bp, Homo Sapiens
agtcggtagagcatgagactcttaatc

SEQ ID NO: 32917 - DNA, 28 bp, Homo Sapiens
agtcggtagagcatgagactcttaatct

SEQ ID NO: 32918 - DNA, 29 bp, Homo Sapiens
agtcggtagagcatgagactcttaatctc

SEQ ID NO: 32919 - DNA, 30 bp, Homo Sapiens; identical to SEQ ID NO: 5417

SEQ ID NO: 32920 - DNA, 42 bp, Homo Sapiens; identical to SEQ ID NO: 5424

SEQ ID NO: 32921 - DNA, 17 bp, Homo Sapiens
agtcggtagagcatggg

SEQ ID NO: 32922 - DNA, 18 bp, Homo Sapiens
agtcggtagagcatggga

SEQ ID NO: 32923 - DNA, 19 bp, Homo Sapiens
agtcggtagagcatgggac

SEQ ID NO: 32924 - DNA, 20 bp, Homo Sapiens
agtcggtagagcatgggact

SEQ ID NO: 32925 - DNA, 21 bp, Homo Sapiens
agtcggtagagcatgggactc

SEQ ID NO: 32926 - DNA, 22 bp, Homo Sapiens
agtcggtagagcatgggactct

SEQ ID NO: 32927 - DNA, 26 bp, Homo Sapiens
agtcggtagagcatgggactcttaat

SEQ ID NO: 32928 - DNA, 27 bp, Homo Sapiens
agtcggtagagcatgggactcttaatc

SEQ ID NO: 32929 - DNA, 28 bp, Homo Sapiens
agtcggtagagcatgggactcttaatcc

SEQ ID NO: 32930 - DNA, 29 bp, Homo Sapiens
agtcggtagagcatgggactcttaatccc

SEQ ID NO: 32931 - DNA, 39 bp, Homo Sapiens; identical to SEQ ID NO: 5444

SEQ ID NO: 32932 - DNA, 42 bp, Homo Sapiens; identical to SEQ ID NO: 5446

SEQ ID NO: 32933 - DNA, 16 bp, Homo Sapiens
agtcgtggccgagtgg

SEQ ID NO: 32934 - DNA, 22 bp, Homo Sapiens
agtcgtggccgagtggttaagg

SEQ ID NO: 32935 - DNA, 22 bp, Homo Sapiens
agtctcataatctgaaggtcct

SEQ ID NO: 32936 - DNA, 16 bp, Homo Sapiens
agtctcggtggaacct

SEQ ID NO: 32937 - DNA, 17 bp, Homo Sapiens
agtctcggtggaacctc

SEQ ID NO: 32938 - DNA, 41 bp, Homo Sapiens
agtctcttcgggggcgtgggttcgaatcccaccgctgccac

SEQ ID NO: 32939 - DNA, 19 bp, Homo Sapiens
agtggcgcaatggataacg

SEQ ID NO: 32940 - DNA, 16 bp, Homo Sapiens
agtggcgcagcggaag

SEQ ID NO: 32941 - DNA, 17 bp, Homo Sapiens
agtggcgcagcggaagc

SEQ ID NO: 32942 - DNA, 18 bp, Homo Sapiens
agtggcgcagcggaagcg

SEQ ID NO: 32943 - DNA, 26 bp, Homo Sapiens
agtggcgcagcggaagcgtgctgggc

SEQ ID NO: 32944 - DNA, 28 bp, Homo Sapiens
agtggcgcagcggaagcgtgctgggccc

SEQ ID NO: 32945 - DNA, 17 bp, Homo Sapiens
agtggctaggattcggc

SEQ ID NO: 32946 - DNA, 18 bp, Homo Sapiens
agtggctaggattcggcg

SEQ ID NO: 32947 - DNA, 18 bp, Homo Sapiens
agtggctgatttgcgttc

SEQ ID NO: 32948 - DNA, 17 bp, Homo Sapiens
agtggggttttgcagtc

SEQ ID NO: 32949 - DNA, 19 bp, Homo Sapiens
agtgggtagagcatcagac

SEQ ID NO: 32950 - DNA, 16 bp, Homo Sapiens
agtggtagaattctcg

SEQ ID NO: 32951 - DNA, 17 bp, Homo Sapiens
agtggtagaattctcgc

SEQ ID NO: 32952 - DNA, 18 bp, Homo Sapiens
agtggtagaattctcgcc

SEQ ID NO: 32953 - DNA, 19 bp, Homo Sapiens
agtggtagaattctcgcct

SEQ ID NO: 32954 - DNA, 20 bp, Homo Sapiens
agtggtagaattctcgcctg

SEQ ID NO: 32955 - DNA, 21 bp, Homo Sapiens
agtggtagaattctcgcctgc

SEQ ID NO: 32956 - DNA, 22 bp, Homo Sapiens
agtggtagaattctcgcctgcc

SEQ ID NO: 32957 - DNA, 23 bp, Homo Sapiens
agtggtagaattctcgcctgcca

SEQ ID NO: 32958 - DNA, 24 bp, Homo Sapiens
agtggtagaattctcgcctgccac

SEQ ID NO: 32959 - DNA, 30 bp, Homo Sapiens; identical to SEQ ID NO: 5546

SEQ ID NO: 32960 - DNA, 34 bp, Homo Sapiens; identical to SEQ ID NO: 5547

SEQ ID NO: 32961 - DNA, 35 bp, Homo Sapiens; identical to SEQ ID NO: 5548

SEQ ID NO: 32962 - DNA, 37 bp, Homo Sapiens; identical to SEQ ID NO: 5550

SEQ ID NO: 32963 - DNA, 39 bp, Homo Sapiens; identical to SEQ ID NO: 5552

SEQ ID NO: 32964 - DNA, 17 bp, Homo Sapiens
agtggtagagcatttga

SEQ ID NO: 32965 - DNA, 18 bp, Homo Sapiens
agtggtagagcatttgac

SEQ ID NO: 32966 - DNA, 19 bp, Homo Sapiens
agtggtagagcatttgact

SEQ ID NO: 32967 - DNA, 20 bp, Homo Sapiens
agtggtagagcatttgactg

SEQ ID NO: 32968 - DNA, 21 bp, Homo Sapiens
agtggtagagcatttgactgc

SEQ ID NO: 32969 - DNA, 26 bp, Homo Sapiens
agtggtagagcatttgactgcagatc

SEQ ID NO: 32970 - DNA, 29 bp, Homo Sapiens
agtggtagagcatttgactgcagatcaag

SEQ ID NO: 32971 - DNA, 36 bp, Homo Sapiens; identical to SEQ ID NO: 5568

SEQ ID NO: 32972 - DNA, 18 bp, Homo Sapiens
agtggtagagcgcatgct

SEQ ID NO: 32973 - DNA, 17 bp, Homo Sapiens
agtggtagagcgcgtgc

SEQ ID NO: 32974 - DNA, 18 bp, Homo Sapiens
agtggtagagcgcgtgct

SEQ ID NO: 32975 - DNA, 19 bp, Homo Sapiens
agtggtatcatgcaagatt

SEQ ID NO: 32976 - DNA, 20 bp, Homo Sapiens
agtggtatcatgcaagattc

SEQ ID NO: 32977 - DNA, 19 bp, Homo Sapiens
agtggtctaaggcgctgga

SEQ ID NO: 32978 - DNA, 20 bp, Homo Sapiens
agtggttaaggcgttggact

SEQ ID NO: 32979 - DNA, 17 bp, Homo Sapiens
agtggttaggattcggc

SEQ ID NO: 32980 - DNA, 18 bp, Homo Sapiens
agtggttaggattcggcg

SEQ ID NO: 32981 - DNA, 19 bp, Homo Sapiens
agtggttaggattcggcgc

SEQ ID NO: 32982 - DNA, 20 bp, Homo Sapiens
agtggttaggattcggcgct

SEQ ID NO: 32983 - DNA, 21 bp, Homo Sapiens
agtggttaggattcggcgctc

SEQ ID NO: 32984 - DNA, 22 bp, Homo Sapiens
agtggttaggattcggcgctct

SEQ ID NO: 32985 - DNA, 24 bp, Homo Sapiens
agtggttaggattcggcgctctca

SEQ ID NO: 32986 - DNA, 26 bp, Homo Sapiens
agtggttaggattcggcgctctcacc

SEQ ID NO: 32987 - DNA, 29 bp, Homo Sapiens
agtggttaggattcggcgctctcaccgcc

SEQ ID NO: 32988 - DNA, 36 bp, Homo Sapiens; identical to SEQ ID NO: 5616

SEQ ID NO: 32989 - DNA, 38 bp, Homo Sapiens; identical to SEQ ID NO: 5618

SEQ ID NO: 32990 - DNA, 39 bp, Homo Sapiens; identical to SEQ ID NO: 5619

SEQ ID NO: 32991 - DNA, 41 bp, Homo Sapiens; identical to SEQ ID NO: 5621

SEQ ID NO: 32992 - DNA, 17 bp, Homo Sapiens
agtggttagtactctgc

SEQ ID NO: 32993 - DNA, 18 bp, Homo Sapiens
agtggttagtactctgcg

SEQ ID NO: 32994 - DNA, 19 bp, Homo Sapiens
agtggttagtactctgcgt

SEQ ID NO: 32995 - DNA, 20 bp, Homo Sapiens
agtggttagtactctgcgtt

SEQ ID NO: 32996 - DNA, 21 bp, Homo Sapiens
agtggttagtactctgcgttg

SEQ ID NO: 32997 - DNA, 22 bp, Homo Sapiens
agtggttagtactctgcgttgt

SEQ ID NO: 32998 - DNA, 26 bp, Homo Sapiens
agtggttagtactctgcgttgtggcc

SEQ ID NO: 32999 - DNA, 35 bp, Homo Sapiens; identical to SEQ ID NO: 5634

SEQ ID NO: 33000 - DNA, 36 bp, Homo Sapiens; identical to SEQ ID NO: 5635

SEQ ID NO: 33001 - DNA, 18 bp, Homo Sapiens
agtggttatcacgtctgc

SEQ ID NO: 33002 - DNA, 19 bp, Homo Sapiens
agtggttatcacgtctgct

SEQ ID NO: 33003 - DNA, 20 bp, Homo Sapiens
agtggttatcacgtctgctt

SEQ ID NO: 33004 - DNA, 17 bp, Homo Sapiens
agtggttatcacgttcg

SEQ ID NO: 33005 - DNA, 18 bp, Homo Sapiens
agtggttatcacgttcgc

SEQ ID NO: 33006 - DNA, 19 bp, Homo Sapiens
agtggttatcacgttcgcc

SEQ ID NO: 33007 - DNA, 20 bp, Homo Sapiens
agtggttatcacgttcgcct

SEQ ID NO: 33008 - DNA, 25 bp, Homo Sapiens
agtgtagtggtcatcacgttcgcct

SEQ ID NO: 33009 - DNA, 25 bp, Homo Sapiens
agtgtagtggttatcacgttcgcct

SEQ ID NO: 33010 - DNA, 44 bp, Homo Sapiens
agtgtagtggttatcacgttcgcctcacacgcgaaaggtccccg

SEQ ID NO: 33011 - DNA, 33 bp, Homo Sapiens; identical to SEQ ID NO: 5677

SEQ ID NO: 33012 - DNA, 34 bp, Homo Sapiens; identical to SEQ ID NO: 5678

SEQ ID NO: 33013 - DNA, 35 bp, Homo Sapiens; identical to SEQ ID NO: 5679

SEQ ID NO: 33014 - DNA, 21 bp, Homo Sapiens
agttaaagactttttctctga

SEQ ID NO: 33015 - DNA, 22 bp, Homo Sapiens
agttaaagactttttctctgac

SEQ ID NO: 33016 - DNA, 23 bp, Homo Sapiens
agttaaagactttttctctgacc

SEQ ID NO: 33017 - DNA, 24 bp, Homo Sapiens
agttaaagactttttctctgacca

SEQ ID NO: 33018 - DNA, 20 bp, Homo Sapiens
agttaaagattaagagaacc

SEQ ID NO: 33019 - DNA, 39 bp, Homo Sapiens; identical to SEQ ID NO: 5705

SEQ ID NO: 33020 - DNA, 22 bp, Homo Sapiens
agttcaaatctcgctggggcct

SEQ ID NO: 33021 - DNA, 23 bp, Homo Sapiens
agttcaaatctcgctggggcctc

SEQ ID NO: 33022 - DNA, 24 bp, Homo Sapiens
agttcaaatctcgctggggcctcc

SEQ ID NO: 33023 - DNA, 22 bp, Homo Sapiens
agttcaaatctcggtggaacct

SEQ ID NO: 33024 - DNA, 23 bp, Homo Sapiens
agttcaaatctcggtggaacctc

SEQ ID NO: 33025 - DNA, 24 bp, Homo Sapiens
agttcaaatctcggtggaacctcc

SEQ ID NO: 33026 - DNA, 19 bp, Homo Sapiens
agttcaaatctcggtggga

SEQ ID NO: 33027 - DNA, 22 bp, Homo Sapiens
agttcaaatctcggtgggacct

SEQ ID NO: 33028 - DNA, 23 bp, Homo Sapiens
agttcaaatctcggtgggacctc

SEQ ID NO: 33029 - DNA, 24 bp, Homo Sapiens
agttcaaatctcggtgggacctcc

SEQ ID NO: 33030 - DNA, 24 bp, Homo Sapiens
agttcgaacctcagagggggcacc

SEQ ID NO: 33031 - DNA, 23 bp, Homo Sapiens
agttcgaatctcggtgggacctc

SEQ ID NO: 33032 - DNA, 22 bp, Homo Sapiens
agttcgagcctcacacggggca

SEQ ID NO: 33033 - DNA, 23 bp, Homo Sapiens
agttcgagcctcacacggggcac

SEQ ID NO: 33034 - DNA, 24 bp, Homo Sapiens
agttcgagcctcacacggggcacc

SEQ ID NO: 33035 - DNA, 24 bp, Homo Sapiens
agttcgagcctcacctggagcacc

SEQ ID NO: 33036 - DNA, 22 bp, Homo Sapiens
agttcgagcctcagagagggca

SEQ ID NO: 33037 - DNA, 24 bp, Homo Sapiens
agttcgatcctcacacggggcacc

SEQ ID NO: 33038 - DNA, 22 bp, Homo Sapiens
agttcgatcctcgctggggcct

SEQ ID NO: 33039 - DNA, 16 bp, Homo Sapiens
agttctggtctccaat

SEQ ID NO: 33040 - DNA, 16 bp, Homo Sapiens
agttctggtctccgga

SEQ ID NO: 33041 - DNA, 17 bp, Homo Sapiens
agttctggtctccggat

SEQ ID NO: 33042 - DNA, 20 bp, Homo Sapiens
agttctggtctccggatgga

SEQ ID NO: 33043 - DNA, 16 bp, Homo Sapiens
agttgacccgggttcg

SEQ ID NO: 33044 - DNA, 25 bp, Homo Sapiens
agttgacccgggttcgattcccggc

SEQ ID NO: 33045 - DNA, 34 bp, Homo Sapiens; identical to SEQ ID NO: 5772

SEQ ID NO: 33046 - DNA, 21 bp, Homo Sapiens
agttgcaatacttaatttctg

SEQ ID NO: 33047 - DNA, 24 bp, Homo Sapiens
agttgcaatacttaatttctgcca

SEQ ID NO: 33048 - DNA, 22 bp, Homo Sapiens
agttgggagagcgttagactga

SEQ ID NO: 33049 - DNA, 23 bp, Homo Sapiens
agttgggagagcgttagactgaa

SEQ ID NO: 33050 - DNA, 31 bp, Homo Sapiens
agttgggagagcgttagactgaagatctaaa

SEQ ID NO: 33051 - DNA, 19 bp, Homo Sapiens
agttggtagagcggaggac

SEQ ID NO: 33052 - DNA, 33 bp, Homo Sapiens
agtttccgtagtgtagtggttatcacgttcgcc

SEQ ID NO: 33053 - DNA, 34 bp, Homo Sapiens; identical to SEQ ID NO: 5860

SEQ ID NO: 33054 - DNA, 17 bp, Homo Sapiens
ataacccagaggtcgat

SEQ ID NO: 33055 - DNA, 18 bp, Homo Sapiens
ataacccagaggtcgatg

SEQ ID NO: 33056 - DNA, 20 bp, Homo Sapiens
ataacccagaggtcgatgga

SEQ ID NO: 33057 - DNA, 21 bp, Homo Sapiens
ataacccagaggtcgatggat

SEQ ID NO: 33058 - DNA, 22 bp, Homo Sapiens
ataacccagaggtcgatggatc

SEQ ID NO: 33059 - DNA, 23 bp, Homo Sapiens
ataacccagaggtcgatggatcg

SEQ ID NO: 33060 - DNA, 22 bp, Homo Sapiens
ataacgccaaggtcgcgggttc

SEQ ID NO: 33061 - DNA, 41 bp, Homo Sapiens; identical to SEQ ID NO: 5913

SEQ ID NO: 33062 - DNA, 29 bp, Homo Sapiens
ataactttgtcaaagttaaattataggct

SEQ ID NO: 33063 - DNA, 32 bp, Homo Sapiens
ataaggcatcagcctccggagctggggattgt

SEQ ID NO: 33064 - DNA, 32 bp, Homo Sapiens; identical to SEQ ID NO: 5956

SEQ ID NO: 33065 - DNA, 20 bp, Homo Sapiens
ataatctgaaggtcctgagt

SEQ ID NO: 33066 - DNA, 22 bp, Homo Sapiens
ataatctgaaggtcctgagttc

SEQ ID NO: 33067 - DNA, 40 bp, Homo Sapiens; identical to SEQ ID NO: 5966

SEQ ID NO: 33068 - DNA, 41 bp, Homo Sapiens; identical to SEQ ID NO: 5967

SEQ ID NO: 33069 - DNA, 40 bp, Homo Sapiens; identical to SEQ ID NO: 5975

SEQ ID NO: 33070 - DNA, 41 bp, Homo Sapiens; identical to SEQ ID NO: 5976

SEQ ID NO: 33071 - DNA, 40 bp, Homo Sapiens; identical to SEQ ID NO: 5978

SEQ ID NO: 33072 - DNA, 41 bp, Homo Sapiens; identical to SEQ ID NO: 5979

SEQ ID NO: 33073 - DNA, 16 bp, Homo Sapiens
ataatgccgaggttgt

SEQ ID NO: 33074 - DNA, 17 bp, Homo Sapiens
ataatgccgaggttgtg

SEQ ID NO: 33075 - DNA, 22 bp, Homo Sapiens
ataatgccgaggttgtgagttc

SEQ ID NO: 33076 - DNA, 41 bp, Homo Sapiens; identical to SEQ ID NO: 5988

SEQ ID NO: 33077 - DNA, 42 bp, Homo Sapiens; identical to SEQ ID NO: 6000

SEQ ID NO: 33078 - DNA, 43 bp, Homo Sapiens; identical to SEQ ID NO: 6001

SEQ ID NO: 33079 - DNA, 26 bp, Homo Sapiens
atacactgaaaatgtttagacgggct

SEQ ID NO: 33080 - DNA, 27 bp, Homo Sapiens
atacactgaaaatgtttagacgggctc

SEQ ID NO: 33081 - DNA, 39 bp, Homo Sapiens; identical to SEQ ID NO: 6035

SEQ ID NO: 33082 - DNA, 40 bp, Homo Sapiens; identical to SEQ ID NO: 6036

SEQ ID NO: 33083 - DNA, 20 bp, Homo Sapiens
atacccttcccgtactacca

SEQ ID NO: 33084 - DNA, 16 bp, Homo Sapiens
atacttaatttctgcc

SEQ ID NO: 33085 - DNA, 17 bp, Homo Sapiens
atacttaatttctgcca

SEQ ID NO: 33086 - DNA, 38 bp, Homo Sapiens; identical to SEQ ID NO: 6063

SEQ ID NO: 33087 - DNA, 17 bp, Homo Sapiens
atagctcagtcggtaga

SEQ ID NO: 33088 - DNA, 18 bp, Homo Sapiens
atagctcagtcggtagag

SEQ ID NO: 33089 - DNA, 22 bp, Homo Sapiens
atagctcagtcggtagagcatc

SEQ ID NO: 33090 - DNA, 26 bp, Homo Sapiens
atagctcagtcggtagagcatcagac

SEQ ID NO: 33091 - DNA, 27 bp, Homo Sapiens
atagctcagtcggtagagcatcagact

SEQ ID NO: 33092 - DNA, 29 bp, Homo Sapiens
atagctcagtcggtagagcatcagacttt

SEQ ID NO: 33093 - DNA, 29 bp, Homo Sapiens
ataggagcttaaacccccttatttctacc

SEQ ID NO: 33094 - DNA, 30 bp, Homo Sapiens; identical to SEQ ID NO: 6115

SEQ ID NO: 33095 - DNA, 38 bp, Homo Sapiens
ataggtggcacggagaattttggattctcagggatggg

SEQ ID NO: 33096 - DNA, 16 bp, Homo Sapiens
ataggtggttcagtgg

SEQ ID NO: 33097 - DNA, 19 bp, Homo Sapiens
atagtggttagtactctgc

SEQ ID NO: 33098 - DNA, 20 bp, Homo Sapiens
atagtggttagtactctgcg

SEQ ID NO: 33099 - DNA, 21 bp, Homo Sapiens
atagtggttagtactctgcgt

SEQ ID NO: 33100 - DNA, 22 bp, Homo Sapiens
atagtggttagtactctgcgtt

SEQ ID NO: 33101 - DNA, 23 bp, Homo Sapiens
atagtggttagtactctgcgttg

SEQ ID NO: 33102 - DNA, 24 bp, Homo Sapiens
atagtggttagtactctgcgttgt

SEQ ID NO: 33103 - DNA, 28 bp, Homo Sapiens
atagtggttagtactctgcgttgtggcc

SEQ ID NO: 33104 - DNA, 29 bp, Homo Sapiens
atagtggttagtactctgcgttgtggccg

SEQ ID NO: 33105 - DNA, 37 bp, Homo Sapiens
atagtggttagtactctgcgttgtggccgcagcaacc

SEQ ID NO: 33106 - DNA, 38 bp, Homo Sapiens; identical to SEQ ID NO: 6160

SEQ ID NO: 33107 - DNA, 26 bp, Homo Sapiens
atagtgtagtggttatcacgtctgct

SEQ ID NO: 33108 - DNA, 27 bp, Homo Sapiens
atagtgtagtggttatcacgtctgctt

SEQ ID NO: 33109 - DNA, 28 bp, Homo Sapiens
atagtgtagtggttatcacgtctgcttt

SEQ ID NO: 33110 - DNA, 24 bp, Homo Sapiens
atatcattggtcgtggttgtagtc

SEQ ID NO: 33111 - DNA, 27 bp, Homo Sapiens
atatcattggtcgtggttgtagtccgt

SEQ ID NO: 33112 - DNA, 30 bp, Homo Sapiens; identical to SEQ ID NO: 6208

SEQ ID NO: 33113 - DNA, 31 bp, Homo Sapiens; identical to SEQ ID NO: 6209

SEQ ID NO: 33114 - DNA, 32 bp, Homo Sapiens; identical to SEQ ID NO: 6210

SEQ ID NO: 33115 - DNA, 33 bp, Homo Sapiens; identical to SEQ ID NO: 6211

SEQ ID NO: 33116 - DNA, 34 bp, Homo Sapiens; identical to SEQ ID NO: 6212

SEQ ID NO: 33117 - DNA, 35 bp, Homo Sapiens; identical to SEQ ID NO: 6213

SEQ ID NO: 33118 - DNA, 36 bp, Homo Sapiens; identical to SEQ ID NO: 6214

SEQ ID NO: 33119 - DNA, 38 bp, Homo Sapiens; identical to SEQ ID NO: 6216

SEQ ID NO: 33120 - DNA, 39 bp, Homo Sapiens; identical to SEQ ID NO: 6217

SEQ ID NO: 33121 - DNA, 22 bp, Homo Sapiens
atatggtctagcggttaggatt

SEQ ID NO: 33122 - DNA, 24 bp, Homo Sapiens
atatggtctagcggttaggattcc

SEQ ID NO: 33123 - DNA, 25 bp, Homo Sapiens
atatggtctagcggttaggattcct

SEQ ID NO: 33124 - DNA, 28 bp, Homo Sapiens
atatggtctagcggttaggattcctggt

SEQ ID NO: 33125 - DNA, 29 bp, Homo Sapiens
atatggtctagcggttaggattcctggtt

SEQ ID NO: 33126 - DNA, 31 bp, Homo Sapiens; identical to SEQ ID NO: 6227

SEQ ID NO: 33127 - DNA, 32 bp, Homo Sapiens; identical to SEQ ID NO: 6228

SEQ ID NO: 33128 - DNA, 16 bp, Homo Sapiens
atatgtccgcgtgggt

SEQ ID NO: 33129 - DNA, 17 bp, Homo Sapiens
atatgtccgcgtgggtt

SEQ ID NO: 33130 - DNA, 36 bp, Homo Sapiens; identical to SEQ ID NO: 6259

SEQ ID NO: 33131 - DNA, 37 bp, Homo Sapiens; identical to SEQ ID NO: 6260

SEQ ID NO: 33132 - DNA, 38 bp, Homo Sapiens; identical to SEQ ID NO: 6261

SEQ ID NO: 33133 - DNA, 17 bp, Homo Sapiens
atcaccccataaacacc

SEQ ID NO: 33134 - DNA, 18 bp, Homo Sapiens
atcaccccataaacacca

SEQ ID NO: 33135 - DNA, 16 bp, Homo Sapiens
atcacgtcggggtcac

SEQ ID NO: 33136 - DNA, 17 bp, Homo Sapiens
atcacgtcggggtcacc

SEQ ID NO: 33137 - DNA, 18 bp, Homo Sapiens
atcacgtcggggtcacca

SEQ ID NO: 33138 - DNA, 19 bp, Homo Sapiens
atcacgtctgctttacacg

SEQ ID NO: 33139 - DNA, 19 bp, Homo Sapiens
atcacgttcgcctcacacg

SEQ ID NO: 33140 - DNA, 37 bp, Homo Sapiens; identical to SEQ ID NO: 6288

SEQ ID NO: 33141 - DNA, 38 bp, Homo Sapiens; identical to SEQ ID NO: 6289

SEQ ID NO: 33142 - DNA, 39 bp, Homo Sapiens; identical to SEQ ID NO: 6290

SEQ ID NO: 33143 - DNA, 38 bp, Homo Sapiens; identical to SEQ ID NO: 6301

SEQ ID NO: 33144 - DNA, 39 bp, Homo Sapiens; identical to SEQ ID NO: 6302

SEQ ID NO: 33145 - DNA, 36 bp, Homo Sapiens
atcagaagattgagggttcgaatccctccgtggtta

SEQ ID NO: 33146 - DNA, 38 bp, Homo Sapiens; identical to SEQ ID NO: 6306

SEQ ID NO: 33147 - DNA, 36 bp, Homo Sapiens
atcagaagattgagggttcgaatcccttcgtggtta

SEQ ID NO: 33148 - DNA, 37 bp, Homo Sapiens; identical to SEQ ID NO: 6309

SEQ ID NO: 33149 - DNA, 38 bp, Homo Sapiens; identical to SEQ ID NO: 6310

SEQ ID NO: 33150 - DNA, 39 bp, Homo Sapiens; identical to SEQ ID NO: 6311

SEQ ID NO: 33151 - DNA, 37 bp, Homo Sapiens; identical to SEQ ID NO: 6316

SEQ ID NO: 33152 - DNA, 38 bp, Homo Sapiens; identical to SEQ ID NO: 6317

SEQ ID NO: 33153 - DNA, 39 bp, Homo Sapiens; identical to SEQ ID NO: 6318

SEQ ID NO: 33154 - DNA, 19 bp, Homo Sapiens
atcagaagattgcaggttc

SEQ ID NO: 33155 - DNA, 37 bp, Homo Sapiens; identical to SEQ ID NO: 6325

SEQ ID NO: 33156 - DNA, 38 bp, Homo Sapiens; identical to SEQ ID NO: 6326

SEQ ID NO: 33157 - DNA, 39 bp, Homo Sapiens; identical to SEQ ID NO: 6327

SEQ ID NO: 33158 - DNA, 35 bp, Homo Sapiens; identical to SEQ ID NO: 6333

SEQ ID NO: 33159 - DNA, 37 bp, Homo Sapiens; identical to SEQ ID NO: 6335

SEQ ID NO: 33160 - DNA, 38 bp, Homo Sapiens; identical to SEQ ID NO: 6336

SEQ ID NO: 33161 - DNA, 36 bp, Homo Sapiens; identical to SEQ ID NO: 6344

SEQ ID NO: 33162 - DNA, 38 bp, Homo Sapiens; identical to SEQ ID NO: 6346

SEQ ID NO: 33163 - DNA, 22 bp, Homo Sapiens
atcattggtcgtggttgtagtc

SEQ ID NO: 33164 - DNA, 26 bp, Homo Sapiens
atcattggtcgtggttgtagtccgtg

SEQ ID NO: 33165 - DNA, 27 bp, Homo Sapiens
atcattggtcgtggttgtagtccgtgc

SEQ ID NO: 33166 - DNA, 30 bp, Homo Sapiens; identical to SEQ ID NO: 6404

SEQ ID NO: 33167 - DNA, 31 bp, Homo Sapiens; identical to SEQ ID NO: 6405

SEQ ID NO: 33168 - DNA, 32 bp, Homo Sapiens; identical to SEQ ID NO: 6406

SEQ ID NO: 33169 - DNA, 33 bp, Homo Sapiens; identical to SEQ ID NO: 6407

SEQ ID NO: 33170 - DNA, 34 bp, Homo Sapiens; identical to SEQ ID NO: 6408

SEQ ID NO: 33171 - DNA, 36 bp, Homo Sapiens; identical to SEQ ID NO: 6410

SEQ ID NO: 33172 - DNA, 37 bp, Homo Sapiens; identical to SEQ ID NO: 6411

SEQ ID NO: 33173 - DNA, 47 bp, Homo Sapiens
atccaatggggtttccccgcacaggttcgaatcctgttcgtgacgcc

SEQ ID NO: 33174 - DNA, 38 bp, Homo Sapiens; identical to SEQ ID NO: 6419

SEQ ID NO: 33175 - DNA, 39 bp, Homo Sapiens; identical to SEQ ID NO: 6420

SEQ ID NO: 33176 - DNA, 18 bp, Homo Sapiens
atccagcgatccgagttc

SEQ ID NO: 33177 - DNA, 19 bp, Homo Sapiens
atccagcgatccgagttca

SEQ ID NO: 33178 - DNA, 36 bp, Homo Sapiens; identical to SEQ ID NO: 6429

SEQ ID NO: 33179 - DNA, 21 bp, Homo Sapiens
atccagcgatccgagttcgag

SEQ ID NO: 33180 - DNA, 16 bp, Homo Sapiens
atccaggtgccccctc

SEQ ID NO: 33181 - DNA, 45 bp, Homo Sapiens
atccattggggtttccccgcgcaggttcgaatcctgccgactacg

SEQ ID NO: 33182 - DNA, 46 bp, Homo Sapiens; identical to SEQ ID NO: 6454

SEQ ID NO: 33183 - DNA, 47 bp, Homo Sapiens; identical to SEQ ID NO: 6455

SEQ ID NO: 33184 - DNA, 47 bp, Homo Sapiens; identical to SEQ ID NO: 6484

SEQ ID NO: 33185 - DNA, 16 bp, Homo Sapiens
atcccaccactgccac

SEQ ID NO: 33186 - DNA, 17 bp, Homo Sapiens
atcccaccactgccacc

SEQ ID NO: 33187 - DNA, 18 bp, Homo Sapiens
atcccaccactgccacca

SEQ ID NO: 33188 - DNA, 16 bp, Homo Sapiens
atcccaccagagtcgc

SEQ ID NO: 33189 - DNA, 17 bp, Homo Sapiens
atcccaccagagtcgcc

SEQ ID NO: 33190 - DNA, 18 bp, Homo Sapiens
atcccacccagggacgcc

SEQ ID NO: 33191 - DNA, 17 bp, Homo Sapiens
atcccaccctcgtcgcc

SEQ ID NO: 33192 - DNA, 16 bp, Homo Sapiens
atcccaccgctgccac

SEQ ID NO: 33193 - DNA, 17 bp, Homo Sapiens
atcccaccgctgccacc

SEQ ID NO: 33194 - DNA, 18 bp, Homo Sapiens
atcccaccgctgccacca

SEQ ID NO: 33195 - DNA, 16 bp, Homo Sapiens
atcccaccttcgtcgc

SEQ ID NO: 33196 - DNA, 17 bp, Homo Sapiens
atcccaccttcgtcgcc

SEQ ID NO: 33197 - DNA, 16 bp, Homo Sapiens
atcccactcctgacac

SEQ ID NO: 33198 - DNA, 17 bp, Homo Sapiens
atcccactcctgacacc

SEQ ID NO: 33199 - DNA, 18 bp, Homo Sapiens
atcccactcctgacacca

SEQ ID NO: 33200 - DNA, 16 bp, Homo Sapiens
atcccacttctgacac

SEQ ID NO: 33201 - DNA, 17 bp, Homo Sapiens
atcccacttctgacacc

SEQ ID NO: 33202 - DNA, 18 bp, Homo Sapiens
atcccacttctgacacca

SEQ ID NO: 33203 - DNA, 16 bp, Homo Sapiens
atcccagcggggcctc

SEQ ID NO: 33204 - DNA, 17 bp, Homo Sapiens
atcccagcggggcctcc

SEQ ID NO: 33205 - DNA, 16 bp, Homo Sapiens
atcccagcggtgcctc

SEQ ID NO: 33206 - DNA, 17 bp, Homo Sapiens
atcccagcggtgcctcc

SEQ ID NO: 33207 - DNA, 18 bp, Homo Sapiens
atcccagcggtgcctcca

SEQ ID NO: 33208 - DNA, 38 bp, Homo Sapiens; identical to SEQ ID NO: 6513

SEQ ID NO: 33209 - DNA, 16 bp, Homo Sapiens
atcccagtagagcctc

SEQ ID NO: 33210 - DNA, 17 bp, Homo Sapiens
atcccagtagagcctcc

SEQ ID NO: 33211 - DNA, 16 bp, Homo Sapiens
atcccatcctcgtcgc

SEQ ID NO: 33212 - DNA, 17 bp, Homo Sapiens
atcccatcctcgtcgcc

SEQ ID NO: 33213 - DNA, 18 bp, Homo Sapiens
atcccatcctcgtcgcca

SEQ ID NO: 33214 - DNA, 18 bp, Homo Sapiens
atccccagcatctccacc

SEQ ID NO: 33215 - DNA, 38 bp, Homo Sapiens
atccccgcctgtcacgcgggagaccggggttcgattcc

SEQ ID NO: 33216 - DNA, 16 bp, Homo Sapiens
atccccggcacctcca

SEQ ID NO: 33217 - DNA, 17 bp, Homo Sapiens
atccccggcacctccac

SEQ ID NO: 33218 - DNA, 18 bp, Homo Sapiens
atccccggcacctccacc

SEQ ID NO: 33219 - DNA, 19 bp, Homo Sapiens
atccccggcacctccacca

SEQ ID NO: 33220 - DNA, 17 bp, Homo Sapiens
atccccggcatctccac

SEQ ID NO: 33221 - DNA, 18 bp, Homo Sapiens
atccccggcatctccacc

SEQ ID NO: 33222 - DNA, 19 bp, Homo Sapiens
atccccggcatctccacca

SEQ ID NO: 33223 - DNA, 16 bp, Homo Sapiens
atccccgtacgggcca

SEQ ID NO: 33224 - DNA, 17 bp, Homo Sapiens
atccccgtacgggccac

SEQ ID NO: 33225 - DNA, 18 bp, Homo Sapiens
atccccgtacgggccacc

SEQ ID NO: 33226 - DNA, 16 bp, Homo Sapiens
atcccggacgagcccc

SEQ ID NO: 33227 - DNA, 17 bp, Homo Sapiens
atcccggacgagccccc

SEQ ID NO: 33228 - DNA, 18 bp, Homo Sapiens
atcccggacgagccccca

SEQ ID NO: 33229 - DNA, 16 bp, Homo Sapiens
atcccgggcggaaaca

SEQ ID NO: 33230 - DNA, 17 bp, Homo Sapiens
atcccgggcggaaacac

SEQ ID NO: 33231 - DNA, 18 bp, Homo Sapiens
atcccgggcggaaacacc

SEQ ID NO: 33232 - DNA, 16 bp, Homo Sapiens
atcccgggtttcggca

SEQ ID NO: 33233 - DNA, 17 bp, Homo Sapiens
atcccgggtttcggcac

SEQ ID NO: 33234 - DNA, 18 bp, Homo Sapiens
atcccgggtttcggcacc

SEQ ID NO: 33235 - DNA, 19 bp, Homo Sapiens
atcccgggtttcggcacca

SEQ ID NO: 33236 - DNA, 33 bp, Homo Sapiens
atccctggtggtctagtggttaggattcggcgc

SEQ ID NO: 33237 - DNA, 34 bp, Homo Sapiens; identical to SEQ ID NO: 6546

SEQ ID NO: 33238 - DNA, 16 bp, Homo Sapiens
atcccttcgtggttgc

SEQ ID NO: 33239 - DNA, 17 bp, Homo Sapiens
atcccttcgtggttgcc

SEQ ID NO: 33240 - DNA, 16 bp, Homo Sapiens
atccgagtcacggcac

SEQ ID NO: 33241 - DNA, 17 bp, Homo Sapiens
atccgagtcacggcacc

SEQ ID NO: 33242 - DNA, 18 bp, Homo Sapiens
atccgagtcacggcacca

SEQ ID NO: 33243 - DNA, 28 bp, Homo Sapiens
atccgagttcaaatctcggtggaacctc

SEQ ID NO: 33244 - DNA, 27 bp, Homo Sapiens
atccgagttcaaatctcggtgggacct

SEQ ID NO: 33245 - DNA, 28 bp, Homo Sapiens
atccgagttcaaatctcggtgggacctc

SEQ ID NO: 33246 - DNA, 16 bp, Homo Sapiens
atccggctcgaaggac

SEQ ID NO: 33247 - DNA, 17 bp, Homo Sapiens
atccggctcgaaggacc

SEQ ID NO: 33248 - DNA, 18 bp, Homo Sapiens
atccggctcgaaggacca

SEQ ID NO: 33249 - DNA, 16 bp, Homo Sapiens
atccggctcggaggac

SEQ ID NO: 33250 - DNA, 17 bp, Homo Sapiens
atccggctcggaggacc

SEQ ID NO: 33251 - DNA, 18 bp, Homo Sapiens
atccggctcggaggacca

SEQ ID NO: 33252 - DNA, 16 bp, Homo Sapiens
atccgggtgccccctc

SEQ ID NO: 33253 - DNA, 17 bp, Homo Sapiens
atccgggtgccccctcc

SEQ ID NO: 33254 - DNA, 18 bp, Homo Sapiens
atccgggtgccccctcca

SEQ ID NO: 33255 - DNA, 18 bp, Homo Sapiens
atcctcacacggggcacc

SEQ ID NO: 33256 - DNA, 19 bp, Homo Sapiens
atcctcacacggggcacca

SEQ ID NO: 33257 - DNA, 17 bp, Homo Sapiens
atcctcacctggagcac

SEQ ID NO: 33258 - DNA, 18 bp, Homo Sapiens
atcctcacctggagcacc

SEQ ID NO: 33259 - DNA, 17 bp, Homo Sapiens
atcctcgctggggcctc

SEQ ID NO: 33260 - DNA, 18 bp, Homo Sapiens
atcctcgctggggcctcc

SEQ ID NO: 33261 - DNA, 16 bp, Homo Sapiens
atcctgccgactacgc

SEQ ID NO: 33262 - DNA, 17 bp, Homo Sapiens
atcctgccgactacgcc

SEQ ID NO: 33263 - DNA, 18 bp, Homo Sapiens
atcctgccgactacgcca

SEQ ID NO: 33264 - DNA, 16 bp, Homo Sapiens
atcctgctcacagcgc

SEQ ID NO: 33265 - DNA, 17 bp, Homo Sapiens
atcctgctcacagcgcc

SEQ ID NO: 33266 - DNA, 18 bp, Homo Sapiens
atcctgctcacagcgcca

SEQ ID NO: 33267 - DNA, 29 bp, Homo Sapiens
atcctgggttcgaatcccagcggggcctc

SEQ ID NO: 33268 - DNA, 29 bp, Homo Sapiens
atcctgggttcgaatcccagcggtgcctc

SEQ ID NO: 33269 - DNA, 16 bp, Homo Sapiens
atcctgtcggctacgc

SEQ ID NO: 33270 - DNA, 17 bp, Homo Sapiens
atcctgtcggctacgcc

SEQ ID NO: 33271 - DNA, 18 bp, Homo Sapiens
atcctgtcggctacgcca

SEQ ID NO: 33272 - DNA, 16 bp, Homo Sapiens
atcctgttcgtgacgc

SEQ ID NO: 33273 - DNA, 17 bp, Homo Sapiens
atcctgttcgtgacgcc

SEQ ID NO: 33274 - DNA, 18 bp, Homo Sapiens
atcctgttcgtgacgcca

SEQ ID NO: 33275 - DNA, 19 bp, Homo Sapiens
atcgaaaccatcctctgct

SEQ ID NO: 33276 - DNA, 20 bp, Homo Sapiens
atcgaaaccatcctctgcta

SEQ ID NO: 33277 - DNA, 21 bp, Homo Sapiens
atcgaaaccatcctctgctac

SEQ ID NO: 33278 - DNA, 22 bp, Homo Sapiens
atcgaaaccatcctctgctacc

SEQ ID NO: 33279 - DNA, 23 bp, Homo Sapiens
atcgaaaccatcctctgctacca

SEQ ID NO: 33280 - DNA, 22 bp, Homo Sapiens
atcgatgcccgcatcctccacc

SEQ ID NO: 33281 - DNA, 24 bp, Homo Sapiens
atcgtatagtggttagtactctgc

SEQ ID NO: 33282 - DNA, 25 bp, Homo Sapiens
atcgtatagtggttagtactctgcg

SEQ ID NO: 33283 - DNA, 26 bp, Homo Sapiens
atcgtatagtggttagtactctgcgt

SEQ ID NO: 33284 - DNA, 27 bp, Homo Sapiens
atcgtatagtggttagtactctgcgtt

SEQ ID NO: 33285 - DNA, 43 bp, Homo Sapiens; identical to SEQ ID NO: 6646

SEQ ID NO: 33286 - DNA, 22 bp, Homo Sapiens
atctaaaccatcctctgctacc

SEQ ID NO: 33287 - DNA, 37 bp, Homo Sapiens; identical to SEQ ID NO: 6660

SEQ ID NO: 33288 - DNA, 38 bp, Homo Sapiens; identical to SEQ ID NO: 6661

SEQ ID NO: 33289 - DNA, 39 bp, Homo Sapiens; identical to SEQ ID NO: 6662

SEQ ID NO: 33290 - DNA, 23 bp, Homo Sapiens
atctaaaggtccctggttcgatc

SEQ ID NO: 33291 - DNA, 34 bp, Homo Sapiens; identical to SEQ ID NO: 6671

SEQ ID NO: 33292 - DNA, 36 bp, Homo Sapiens; identical to SEQ ID NO: 6673

SEQ ID NO: 33293 - DNA, 37 bp, Homo Sapiens; identical to SEQ ID NO: 6674

SEQ ID NO: 33294 - DNA, 38 bp, Homo Sapiens; identical to SEQ ID NO: 6675

SEQ ID NO: 33295 - DNA, 39 bp, Homo Sapiens; identical to SEQ ID NO: 6676

SEQ ID NO: 33296 - DNA, 37 bp, Homo Sapiens; identical to SEQ ID NO: 6680

SEQ ID NO: 33297 - DNA, 38 bp, Homo Sapiens; identical to SEQ ID NO: 6681

SEQ ID NO: 33298 - DNA, 39 bp, Homo Sapiens; identical to SEQ ID NO: 6682

SEQ ID NO: 33299 - DNA, 16 bp, Homo Sapiens
atctcgctggggcctc

SEQ ID NO: 33300 - DNA, 17 bp, Homo Sapiens
atctcgctggggcctcc

SEQ ID NO: 33301 - DNA, 18 bp, Homo Sapiens
atctcgctggggcctcca

SEQ ID NO: 33302 - DNA, 16 bp, Homo Sapiens
atctcggtggaacctc

SEQ ID NO: 33303 - DNA, 17 bp, Homo Sapiens
atctcggtggaacctcc

SEQ ID NO: 33304 - DNA, 18 bp, Homo Sapiens
atctcggtggaacctcca

SEQ ID NO: 33305 - DNA, 16 bp, Homo Sapiens
atctcggtgggacccc

SEQ ID NO: 33306 - DNA, 16 bp, Homo Sapiens
atctcggtgggacctc

SEQ ID NO: 33307 - DNA, 17 bp, Homo Sapiens
atctcggtgggacctcc

SEQ ID NO: 33308 - DNA, 18 bp, Homo Sapiens
atctcggtgggacctcca

SEQ ID NO: 33309 - DNA, 16 bp, Homo Sapiens
atctcggtggtacctc

SEQ ID NO: 33310 - DNA, 36 bp, Homo Sapiens; identical to SEQ ID NO: 6702

SEQ ID NO: 33311 - DNA, 37 bp, Homo Sapiens; identical to SEQ ID NO: 6703

SEQ ID NO: 33312 - DNA, 38 bp, Homo Sapiens; identical to SEQ ID NO: 6704

SEQ ID NO: 33313 - DNA, 39 bp, Homo Sapiens; identical to SEQ ID NO: 6705

SEQ ID NO: 33314 - DNA, 37 bp, Homo Sapiens; identical to SEQ ID NO: 6708

SEQ ID NO: 33315 - DNA, 38 bp, Homo Sapiens; identical to SEQ ID NO: 6709

SEQ ID NO: 33316 - DNA, 36 bp, Homo Sapiens; identical to SEQ ID NO: 6716

SEQ ID NO: 33317 - DNA, 37 bp, Homo Sapiens; identical to SEQ ID NO: 6717

SEQ ID NO: 33318 - DNA, 38 bp, Homo Sapiens; identical to SEQ ID NO: 6718

SEQ ID NO: 33319 - DNA, 39 bp, Homo Sapiens; identical to SEQ ID NO: 6719

SEQ ID NO: 33320 - DNA, 36 bp, Homo Sapiens; identical to SEQ ID NO: 6723

SEQ ID NO: 33321 - DNA, 37 bp, Homo Sapiens; identical to SEQ ID NO: 6724

SEQ ID NO: 33322 - DNA, 38 bp, Homo Sapiens; identical to SEQ ID NO: 6725

SEQ ID NO: 33323 - DNA, 39 bp, Homo Sapiens; identical to SEQ ID NO: 6726

SEQ ID NO: 33324 - DNA, 37 bp, Homo Sapiens; identical to SEQ ID NO: 6739

SEQ ID NO: 33325 - DNA, 38 bp, Homo Sapiens; identical to SEQ ID NO: 6740

SEQ ID NO: 33326 - DNA, 18 bp, Homo Sapiens
atctgagggtccagggtt

SEQ ID NO: 33327 - DNA, 37 bp, Homo Sapiens
atctgagggtccagggttcaagtccctgtccaggcgc

SEQ ID NO: 33328 - DNA, 38 bp, Homo Sapiens; identical to SEQ ID NO: 6743

SEQ ID NO: 33329 - DNA, 37 bp, Homo Sapiens; identical to SEQ ID NO: 6752

SEQ ID NO: 33330 - DNA, 38 bp, Homo Sapiens; identical to SEQ ID NO: 6753

SEQ ID NO: 33331 - DNA, 39 bp, Homo Sapiens; identical to SEQ ID NO: 6754

SEQ ID NO: 33332 - DNA, 16 bp, Homo Sapiens
atcttggtgggacctc

SEQ ID NO: 33333 - DNA, 19 bp, Homo Sapiens
atgaaaacctttttccaag

SEQ ID NO: 33334 - DNA, 21 bp, Homo Sapiens
atgaaaacctttttccaagga

SEQ ID NO: 33335 - DNA, 22 bp, Homo Sapiens
atgaaaacctttttccaaggac

SEQ ID NO: 33336 - DNA, 23 bp, Homo Sapiens
atgaaaacctttttccaaggaca

SEQ ID NO: 33337 - DNA, 24 bp, Homo Sapiens
atgaaaacctttttccaaggacac

SEQ ID NO: 33338 - DNA, 25 bp, Homo Sapiens
atgaaaacctttttccaaggacacc

SEQ ID NO: 33339 - DNA, 26 bp, Homo Sapiens
atgaaaacctttttccaaggacacca

SEQ ID NO: 33340 - DNA, 16 bp, Homo Sapiens
atgagactcttaatct

SEQ ID NO: 33341 - DNA, 34 bp, Homo Sapiens
atgaggccccgggttcgatccccggcatctccac

SEQ ID NO: 33342 - DNA, 35 bp, Homo Sapiens; identical to SEQ ID NO: 6789

SEQ ID NO: 33343 - DNA, 16 bp, Homo Sapiens
atgaggtcccgggttc

SEQ ID NO: 33344 - DNA, 34 bp, Homo Sapiens
atgaggtcccgggttcgatccccagcatctccac

SEQ ID NO: 33345 - DNA, 35 bp, Homo Sapiens; identical to SEQ ID NO: 6796

SEQ ID NO: 33346 - DNA, 19 bp, Homo Sapiens
atgattctcgctttgggtg

SEQ ID NO: 33347 - DNA, 21 bp, Homo Sapiens
atgattctcggtttgggtccg

SEQ ID NO: 33348 - DNA, 24 bp, Homo Sapiens
atgattctcggtttgggtccgaga

SEQ ID NO: 33349 - DNA, 25 bp, Homo Sapiens
atgcccccatgtctaacaacatggc

SEQ ID NO: 33350 - DNA, 26 bp, Homo Sapiens
atgcccccatgtctaacaacatggct

SEQ ID NO: 33351 - DNA, 27 bp, Homo Sapiens
atgcccccatgtctaacaacatggctt

SEQ ID NO: 33352 - DNA, 32 bp, Homo Sapiens; identical to SEQ ID NO: 6849

SEQ ID NO: 33353 - DNA, 18 bp, Homo Sapiens
atgcccgcatcctccacc

SEQ ID NO: 33354 - DNA, 19 bp, Homo Sapiens
atgccgaggttgtgagttc

SEQ ID NO: 33355 - DNA, 38 bp, Homo Sapiens; identical to SEQ ID NO: 6858

SEQ ID NO: 33356 - DNA, 21 bp, Homo Sapiens
atgctttgcacgtatgaggcc

SEQ ID NO: 33357 - DNA, 22 bp, Homo Sapiens
atgctttgcacgtatgaggccc

SEQ ID NO: 33358 - DNA, 23 bp, Homo Sapiens
atgctttgcacgtatgaggcccc

SEQ ID NO: 33359 - DNA, 24 bp, Homo Sapiens
atgctttgcacgtatgaggccccg

SEQ ID NO: 33360 - DNA, 43 bp, Homo Sapiens
atgctttgcacgtatgaggccccgggttcaatccccggcatct

SEQ ID NO: 33361 - DNA, 43 bp, Homo Sapiens
atggacatatgtccgcgtgggttcgaaccccactcctggtacc

SEQ ID NO: 33362 - DNA, 16 bp, Homo Sapiens
atggacgagcgcgctg

SEQ ID NO: 33363 - DNA, 18 bp, Homo Sapiens
atggacgagcgcgctgga

SEQ ID NO: 33364 - DNA, 33 bp, Homo Sapiens; identical to SEQ ID NO: 6890

SEQ ID NO: 33365 - DNA, 34 bp, Homo Sapiens; identical to SEQ ID NO: 6891

SEQ ID NO: 33366 - DNA, 35 bp, Homo Sapiens; identical to SEQ ID NO: 6892

SEQ ID NO: 33367 - DNA, 16 bp, Homo Sapiens
atggataacgcgtctg

SEQ ID NO: 33368 - DNA, 19 bp, Homo Sapiens
atggataacgcgtctgact

SEQ ID NO: 33369 - DNA, 17 bp, Homo Sapiens
atggataaggcactggc

SEQ ID NO: 33370 - DNA, 17 bp, Homo Sapiens
atggataaggcatcagc

SEQ ID NO: 33371 - DNA, 19 bp, Homo Sapiens
atggataaggcatcagcct

SEQ ID NO: 33372 - DNA, 21 bp, Homo Sapiens
atggataaggcatcagcctcc

SEQ ID NO: 33373 - DNA, 28 bp, Homo Sapiens
atggataaggcatcagcctccggagctg

SEQ ID NO: 33374 - DNA, 29 bp, Homo Sapiens
atggataaggcatcagcctccggagctgg

SEQ ID NO: 33375 - DNA, 36 bp, Homo Sapiens; identical to SEQ ID NO: 6910

SEQ ID NO: 33376 - DNA, 17 bp, Homo Sapiens
atggataaggcattggc

SEQ ID NO: 33377 - DNA, 18 bp, Homo Sapiens
atggataaggcattggcc

SEQ ID NO: 33378 - DNA, 16 bp, Homo Sapiens
atggataaggcgtctg

SEQ ID NO: 33379 - DNA, 17 bp, Homo Sapiens
atggataaggcgtctga

SEQ ID NO: 33380 - DNA, 19 bp, Homo Sapiens
atggataaggcgtctgact

SEQ ID NO: 33381 - DNA, 21 bp, Homo Sapiens
atggataaggcgtctgattcc

SEQ ID NO: 33382 - DNA, 16 bp, Homo Sapiens
atggatagcgcattgg

SEQ ID NO: 33383 - DNA, 17 bp, Homo Sapiens
atggatagcgcattgga

SEQ ID NO: 33384 - DNA, 18 bp, Homo Sapiens
atggatagcgcattggac

SEQ ID NO: 33385 - DNA, 22 bp, Homo Sapiens
atggatcgaaaccatcctctgc

SEQ ID NO: 33386 - DNA, 23 bp, Homo Sapiens
atggatcgaaaccatcctctgct

SEQ ID NO: 33387 - DNA, 24 bp, Homo Sapiens
atggatcgaaaccatcctctgcta

SEQ ID NO: 33388 - DNA, 25 bp, Homo Sapiens
atggatcgaaaccatcctctgctac

SEQ ID NO: 33389 - DNA, 26 bp, Homo Sapiens
atggatcgaaaccatcctctgctacc

SEQ ID NO: 33390 - DNA, 27 bp, Homo Sapiens
atggatcgaaaccatcctctgctacca

SEQ ID NO: 33391 - DNA, 24 bp, Homo Sapiens
atggccgagcggtctaaggcgctg

SEQ ID NO: 33392 - DNA, 18 bp, Homo Sapiens
atggccgagtggttaagg

SEQ ID NO: 33393 - DNA, 22 bp, Homo Sapiens
atggctgagtgaagcattggac

SEQ ID NO: 33394 - DNA, 16 bp, Homo Sapiens
atgggactcttaatcc

SEQ ID NO: 33395 - DNA, 27 bp, Homo Sapiens
atggggtgtgataggtggcacggagaa

SEQ ID NO: 33396 - DNA, 16 bp, Homo Sapiens
atgggtggttcagtgg

SEQ ID NO: 33397 - DNA, 23 bp, Homo Sapiens
atgggtggttcagtggtagaatt

SEQ ID NO: 33398 - DNA, 24 bp, Homo Sapiens
atgggtggttcagtggtagaattc

SEQ ID NO: 33399 - DNA, 26 bp, Homo Sapiens
atgggtggttcagtggtagaattctc

SEQ ID NO: 33400 - DNA, 27 bp, Homo Sapiens
atgggtggttcagtggtagaattctcg

SEQ ID NO: 33401 - DNA, 28 bp, Homo Sapiens
atgggtggttcagtggtagaattctcgc

SEQ ID NO: 33402 - DNA, 29 bp, Homo Sapiens
atgggtggttcagtggtagaattctcgcc

SEQ ID NO: 33403 - DNA, 30 bp, Homo Sapiens; identical to SEQ ID NO: 6995

SEQ ID NO: 33404 - DNA, 31 bp, Homo Sapiens; identical to SEQ ID NO: 6996

SEQ ID NO: 33405 - DNA, 32 bp, Homo Sapiens; identical to SEQ ID NO: 6997

SEQ ID NO: 33406 - DNA, 33 bp, Homo Sapiens; identical to SEQ ID NO: 6998

SEQ ID NO: 33407 - DNA, 34 bp, Homo Sapiens; identical to SEQ ID NO: 6999

SEQ ID NO: 33408 - DNA, 25 bp, Homo Sapiens
atgggttcgattctcatagtcctag

SEQ ID NO: 33409 - DNA, 26 bp, Homo Sapiens
atgggttcgattctcatagtcctagc

SEQ ID NO: 33410 - DNA, 16 bp, Homo Sapiens
atggtagagcgctcgc

SEQ ID NO: 33411 - DNA, 17 bp, Homo Sapiens
atggtagagcgctcgct

SEQ ID NO: 33412 - DNA, 20 bp, Homo Sapiens
atggtctagcggttaggatt

SEQ ID NO: 33413 - DNA, 22 bp, Homo Sapiens
atggtctagcggttaggattcc

SEQ ID NO: 33414 - DNA, 23 bp, Homo Sapiens
atggtctagcggttaggattcct

SEQ ID NO: 33415 - DNA, 26 bp, Homo Sapiens
atggtctagcggttaggattcctggt

SEQ ID NO: 33416 - DNA, 27 bp, Homo Sapiens
atggtctagcggttaggattcctggtt

SEQ ID NO: 33417 - DNA, 28 bp, Homo Sapiens
atggtctagcggttaggattcctggttt

SEQ ID NO: 33418 - DNA, 29 bp, Homo Sapiens
atggtctagcggttaggattcctggtttt

SEQ ID NO: 33419 - DNA, 30 bp, Homo Sapiens; identical to SEQ ID NO: 7036

SEQ ID NO: 33420 - DNA, 31 bp, Homo Sapiens; identical to SEQ ID NO: 7037

SEQ ID NO: 33421 - DNA, 35 bp, Homo Sapiens; identical to SEQ ID NO: 7039

SEQ ID NO: 33422 - DNA, 36 bp, Homo Sapiens
atggtctagcggttaggattcctggttttcacccag

SEQ ID NO: 33423 - DNA, 19 bp, Homo Sapiens
atggtgagcactctggact

SEQ ID NO: 33424 - DNA, 27 bp, Homo Sapiens
atggtgagcactctggactctgaatcc

SEQ ID NO: 33425 - DNA, 30 bp, Homo Sapiens; identical to SEQ ID NO: 7052

SEQ ID NO: 33426 - DNA, 29 bp, Homo Sapiens
atggtggagttaaagactttttctctgac

SEQ ID NO: 33427 - DNA, 30 bp, Homo Sapiens; identical to SEQ ID NO: 7068

SEQ ID NO: 33428 - DNA, 27 bp, Homo Sapiens
atggtggttcagtggtagaattctcgc

SEQ ID NO: 33429 - DNA, 29 bp, Homo Sapiens
atggtggttcagtggtagaattctcgcct

SEQ ID NO: 33430 - DNA, 27 bp, Homo Sapiens
atggtgtaatggtgagcactctggact

SEQ ID NO: 33431 - DNA, 28 bp, Homo Sapiens
atggtgtaatggtgagcactctggactc

SEQ ID NO: 33432 - DNA, 29 bp, Homo Sapiens
atggtgtaatggtgagcactctggactct

SEQ ID NO: 33433 - DNA, 30 bp, Homo Sapiens; identical to SEQ ID NO: 7080

SEQ ID NO: 33434 - DNA, 24 bp, Homo Sapiens
atggtgtaatggttagcactctgg

SEQ ID NO: 33435 - DNA, 25 bp, Homo Sapiens
atggtgtaatggttagcactctgga

SEQ ID NO: 33436 - DNA, 26 bp, Homo Sapiens
atggtgtaatggttagcactctggac

SEQ ID NO: 33437 - DNA, 27 bp, Homo Sapiens
atggtgtaatggttagcactctggact

SEQ ID NO: 33438 - DNA, 28 bp, Homo Sapiens
atggtgtaatggttagcactctggactc

SEQ ID NO: 33439 - DNA, 29 bp, Homo Sapiens
atggtgtaatggttagcactctggactct

SEQ ID NO: 33440 - DNA, 30 bp, Homo Sapiens; identical to SEQ ID NO: 7092

SEQ ID NO: 33441 - DNA, 31 bp, Homo Sapiens; identical to SEQ ID NO: 7093

SEQ ID NO: 33442 - DNA, 34 bp, Homo Sapiens; identical to SEQ ID NO: 7095

SEQ ID NO: 33443 - DNA, 46 bp, Homo Sapiens
atggtgtaatggttagcactctggactctgaatccagcgatccgag

SEQ ID NO: 33444 - DNA, 47 bp, Homo Sapiens
atggtgtaatggttagcactctggactctgaatccagcgatccgagt

SEQ ID NO: 33445 - DNA, 30 bp, Homo Sapiens; identical to SEQ ID NO: 7097

SEQ ID NO: 33446 - DNA, 16 bp, Homo Sapiens
atggttagcactctgg

SEQ ID NO: 33447 - DNA, 17 bp, Homo Sapiens
atggttagcactctgga

SEQ ID NO: 33448 - DNA, 18 bp, Homo Sapiens
atggttagcactctggac

SEQ ID NO: 33449 - DNA, 19 bp, Homo Sapiens
atggttagcactctggact

SEQ ID NO: 33450 - DNA, 20 bp, Homo Sapiens
atggttagcactctggactc

SEQ ID NO: 33451 - DNA, 21 bp, Homo Sapiens
atggttagcactctggactct

SEQ ID NO: 33452 - DNA, 22 bp, Homo Sapiens
atggttagcactctggactctg

SEQ ID NO: 33453 - DNA, 23 bp, Homo Sapiens
atggttagcactctggactctga

SEQ ID NO: 33454 - DNA, 24 bp, Homo Sapiens
atggttagcactctggactctgaa

SEQ ID NO: 33455 - DNA, 25 bp, Homo Sapiens
atggttagcactctggactctgaat

SEQ ID NO: 33456 - DNA, 26 bp, Homo Sapiens
atggttagcactctggactctgaatc

SEQ ID NO: 33457 - DNA, 27 bp, Homo Sapiens
atggttagcactctggactctgaatcc

SEQ ID NO: 33458 - DNA, 28 bp, Homo Sapiens
atggttagcactctggactctgaatcca

SEQ ID NO: 33459 - DNA, 29 bp, Homo Sapiens
atggttagcactctggactctgaatccag

SEQ ID NO: 33460 - DNA, 30 bp, Homo Sapiens; identical to SEQ ID NO: 7111

SEQ ID NO: 33461 - DNA, 31 bp, Homo Sapiens; identical to SEQ ID NO: 7112

SEQ ID NO: 33462 - DNA, 35 bp, Homo Sapiens; identical to SEQ ID NO: 7114

SEQ ID NO: 33463 - DNA, 38 bp, Homo Sapiens; identical to SEQ ID NO: 7116

SEQ ID NO: 33464 - DNA, 39 bp, Homo Sapiens; identical to SEQ ID NO: 7117

SEQ ID NO: 33465 - DNA, 40 bp, Homo Sapiens
atggttagcactctggactctgaatccagcgatccgagtt

SEQ ID NO: 33466 - DNA, 41 bp, Homo Sapiens; identical to SEQ ID NO: 7118

SEQ ID NO: 33467 - DNA, 42 bp, Homo Sapiens; identical to SEQ ID NO: 7119

SEQ ID NO: 33468 - DNA, 22 bp, Homo Sapiens
atggttagcactctggactttg

SEQ ID NO: 33469 - DNA, 23 bp, Homo Sapiens
atggttagcactctggactttga

SEQ ID NO: 33470 - DNA, 24 bp, Homo Sapiens
atggttagcactctggactttgaa

SEQ ID NO: 33471 - DNA, 25 bp, Homo Sapiens
atggttagcactctggactttgaat

SEQ ID NO: 33472 - DNA, 26 bp, Homo Sapiens
atggttagcactctggactttgaatc

SEQ ID NO: 33473 - DNA, 27 bp, Homo Sapiens
atggttagcactctggactttgaatcc

SEQ ID NO: 33474 - DNA, 30 bp, Homo Sapiens; identical to SEQ ID NO: 7128

SEQ ID NO: 33475 - DNA, 39 bp, Homo Sapiens
atggttagcactctggactttgaatccagcgatccgagt

SEQ ID NO: 33476 - DNA, 23 bp, Homo Sapiens
atggtttttcatatcattggtcg

SEQ ID NO: 33477 - DNA, 30 bp, Homo Sapiens; identical to SEQ ID NO: 7138

SEQ ID NO: 33478 - DNA, 34 bp, Homo Sapiens; identical to SEQ ID NO: 7142

SEQ ID NO: 33479 - DNA, 38 bp, Homo Sapiens; identical to SEQ ID NO: 7146

SEQ ID NO: 33480 - DNA, 39 bp, Homo Sapiens; identical to SEQ ID NO: 7147

SEQ ID NO: 33481 - DNA, 40 bp, Homo Sapiens; identical to SEQ ID NO: 7148

SEQ ID NO: 33482 - DNA, 41 bp, Homo Sapiens; identical to SEQ ID NO: 7149

SEQ ID NO: 33483 - DNA, 42 bp, Homo Sapiens; identical to SEQ ID NO: 7150

SEQ ID NO: 33484 - DNA, 43 bp, Homo Sapiens; identical to SEQ ID NO: 7151

SEQ ID NO: 33485 - DNA, 44 bp, Homo Sapiens; identical to SEQ ID NO: 7152

SEQ ID NO: 33486 - DNA, 45 bp, Homo Sapiens; identical to SEQ ID NO: 7153

SEQ ID NO: 33487 - DNA, 46 bp, Homo Sapiens; identical to SEQ ID NO: 7154

SEQ ID NO: 33488 - DNA, 17 bp, Homo Sapiens
atgtagctcagtggtag

SEQ ID NO: 33489 - DNA, 18 bp, Homo Sapiens
atgtagctcagtggtaga

SEQ ID NO: 33490 - DNA, 19 bp, Homo Sapiens
atgtagctcagtggtagag

SEQ ID NO: 33491 - DNA, 39 bp, Homo Sapiens
atgtatgaggtcccgggttcgatccccggcatctccacc

SEQ ID NO: 33492 - DNA, 16 bp, Homo Sapiens
atgtccgcgtgggttc

SEQ ID NO: 33493 - DNA, 30 bp, Homo Sapiens; identical to SEQ ID NO: 7173

SEQ ID NO: 33494 - DNA, 33 bp, Homo Sapiens; identical to SEQ ID NO: 7176

SEQ ID NO: 33495 - DNA, 27 bp, Homo Sapiens
atgtctaacaacatggctttctcacca

SEQ ID NO: 33496 - DNA, 28 bp, Homo Sapiens
atgttggttatacccttcccgtactacc

SEQ ID NO: 33497 - DNA, 29 bp, Homo Sapiens
atgttggttatacccttcccgtactacca

SEQ ID NO: 33498 - DNA, 16 bp, Homo Sapiens
atgtttagacgggctc

SEQ ID NO: 33499 - DNA, 17 bp, Homo Sapiens
atgtttagacgggctca

SEQ ID NO: 33500 - DNA, 18 bp, Homo Sapiens
atgtttagacgggctcac

SEQ ID NO: 33501 - DNA, 19 bp, Homo Sapiens
atgtttagacgggctcaca

SEQ ID NO: 33502 - DNA, 21 bp, Homo Sapiens
atgtttagacgggctcacatc

SEQ ID NO: 33503 - DNA, 24 bp, Homo Sapiens
atgtttagacgggctcacatcacc

SEQ ID NO: 33504 - DNA, 25 bp, Homo Sapiens
atgtttagacgggctcacatcaccc

SEQ ID NO: 33505 - DNA, 26 bp, Homo Sapiens
atgtttagacgggctcacatcacccc

SEQ ID NO: 33506 - DNA, 27 bp, Homo Sapiens
atgtttagacgggctcacatcacccca

SEQ ID NO: 33507 - DNA, 28 bp, Homo Sapiens
atgtttagacgggctcacatcaccccat

SEQ ID NO: 33508 - DNA, 29 bp, Homo Sapiens
atgtttagacgggctcacatcaccccata

SEQ ID NO: 33509 - DNA, 30 bp, Homo Sapiens; identical to SEQ ID NO: 7219

SEQ ID NO: 33510 - DNA, 31 bp, Homo Sapiens; identical to SEQ ID NO: 7220

SEQ ID NO: 33511 - DNA, 35 bp, Homo Sapiens; identical to SEQ ID NO: 7224

SEQ ID NO: 33512 - DNA, 36 bp, Homo Sapiens; identical to SEQ ID NO: 7225

SEQ ID NO: 33513 - DNA, 16 bp, Homo Sapiens
attaactagttttgac

SEQ ID NO: 33514 - DNA, 31 bp, Homo Sapiens; identical to SEQ ID NO: 7262

SEQ ID NO: 33515 - DNA, 32 bp, Homo Sapiens; identical to SEQ ID NO: 7263

SEQ ID NO: 33516 - DNA, 33 bp, Homo Sapiens; identical to SEQ ID NO: 7264

SEQ ID NO: 33517 - DNA, 16 bp, Homo Sapiens
attagaatcttagctt

SEQ ID NO: 33518 - DNA, 18 bp, Homo Sapiens
attagaatcttagctttg

SEQ ID NO: 33519 - DNA, 42 bp, Homo Sapiens; identical to SEQ ID NO: 7277

SEQ ID NO: 33520 - DNA, 43 bp, Homo Sapiens; identical to SEQ ID NO: 7278

SEQ ID NO: 33521 - DNA, 37 bp, Homo Sapiens; identical to SEQ ID NO: 7313

SEQ ID NO: 33522 - DNA, 38 bp, Homo Sapiens; identical to SEQ ID NO: 7314

SEQ ID NO: 33523 - DNA, 39 bp, Homo Sapiens; identical to SEQ ID NO: 7315

SEQ ID NO: 33524 - DNA, 37 bp, Homo Sapiens; identical to SEQ ID NO: 7318

SEQ ID NO: 33525 - DNA, 38 bp, Homo Sapiens; identical to SEQ ID NO: 7319

SEQ ID NO: 33526 - DNA, 39 bp, Homo Sapiens; identical to SEQ ID NO: 7320

SEQ ID NO: 33527 - DNA, 37 bp, Homo Sapiens; identical to SEQ ID NO: 7321

SEQ ID NO: 33528 - DNA, 38 bp, Homo Sapiens; identical to SEQ ID NO: 7322

SEQ ID NO: 33529 - DNA, 37 bp, Homo Sapiens
attcatatccgcgtgggttcgaaccccacttctggta

SEQ ID NO: 33530 - DNA, 17 bp, Homo Sapiens
attccagctcgaaggac

SEQ ID NO: 33531 - DNA, 18 bp, Homo Sapiens
attccagctcgaaggacc

SEQ ID NO: 33532 - DNA, 19 bp, Homo Sapiens
attccaggttcgactcctg

SEQ ID NO: 33533 - DNA, 30 bp, Homo Sapiens; identical to SEQ ID NO: 7329

SEQ ID NO: 33534 - DNA, 17 bp, Homo Sapiens
attcccattcttgcgac

SEQ ID NO: 33535 - DNA, 23 bp, Homo Sapiens
attcccattcttgcgacccgggt

SEQ ID NO: 33536 - DNA, 43 bp, Homo Sapiens
attcccattcttgcgacccgggttcgattcccgggcggcgcac

SEQ ID NO: 33537 - DNA, 44 bp, Homo Sapiens; identical to SEQ ID NO: 7333

SEQ ID NO: 33538 - DNA, 16 bp, Homo Sapiens
attccccgacggggag

SEQ ID NO: 33539 - DNA, 17 bp, Homo Sapiens
attccccgacggggagc

SEQ ID NO: 33540 - DNA, 18 bp, Homo Sapiens
attccccgacggggagcc

SEQ ID NO: 33541 - DNA, 17 bp, Homo Sapiens
attcccggccaacgcac

SEQ ID NO: 33542 - DNA, 18 bp, Homo Sapiens
attcccggccaacgcacc

SEQ ID NO: 33543 - DNA, 19 bp, Homo Sapiens
attcccggccaacgcacca

SEQ ID NO: 33544 - DNA, 16 bp, Homo Sapiens
attcccggccaatgca

SEQ ID NO: 33545 - DNA, 17 bp, Homo Sapiens
attcccggccaatgcac

SEQ ID NO: 33546 - DNA, 18 bp, Homo Sapiens
attcccggccaatgcacc

SEQ ID NO: 33547 - DNA, 19 bp, Homo Sapiens
attcccggccaatgcacca

SEQ ID NO: 33548 - DNA, 17 bp, Homo Sapiens
attcccggcccatgcac

SEQ ID NO: 33549 - DNA, 17 bp, Homo Sapiens
attcccgggcggcgcac

SEQ ID NO: 33550 - DNA, 18 bp, Homo Sapiens
attcccgggcggcgcacc

SEQ ID NO: 33551 - DNA, 16 bp, Homo Sapiens
attcccggtcagggaa

SEQ ID NO: 33552 - DNA, 17 bp, Homo Sapiens
attcccggtcagggaac

SEQ ID NO: 33553 - DNA, 18 bp, Homo Sapiens
attcccggtcagggaacc

SEQ ID NO: 33554 - DNA, 17 bp, Homo Sapiens
attcccggtcatggaac

SEQ ID NO: 33555 - DNA, 17 bp, Homo Sapiens
attccctgacggggagc

SEQ ID NO: 33556 - DNA, 20 bp, Homo Sapiens
attccggatcagaagattga

SEQ ID NO: 33557 - DNA, 45 bp, Homo Sapiens; identical to SEQ ID NO: 7361

SEQ ID NO: 33558 - DNA, 17 bp, Homo Sapiens
attccggctcgaaggac

SEQ ID NO: 33559 - DNA, 18 bp, Homo Sapiens
attccggctcgaaggacc

SEQ ID NO: 33560 - DNA, 19 bp, Homo Sapiens
attccggctcgaaggacca

SEQ ID NO: 33561 - DNA, 17 bp, Homo Sapiens
attcctggttttcaccc

SEQ ID NO: 33562 - DNA, 36 bp, Homo Sapiens
attcctggttttcacccaggcggcccgggttcgact

SEQ ID NO: 33563 - DNA, 32 bp, Homo Sapiens; identical to SEQ ID NO: 7379

SEQ ID NO: 33564 - DNA, 33 bp, Homo Sapiens; identical to SEQ ID NO: 7380

SEQ ID NO: 33565 - DNA, 34 bp, Homo Sapiens; identical to SEQ ID NO: 7381

SEQ ID NO: 33566 - DNA, 16 bp, Homo Sapiens
attcggcgctctcacc

SEQ ID NO: 33567 - DNA, 17 bp, Homo Sapiens
attcggcgctctcaccg

SEQ ID NO: 33568 - DNA, 18 bp, Homo Sapiens
attcggcgctctcaccgc

SEQ ID NO: 33569 - DNA, 19 bp, Homo Sapiens
attcggcgctctcaccgcc

SEQ ID NO: 33570 - DNA, 25 bp, Homo Sapiens
attcggcgctctcaccgccgcggcc

SEQ ID NO: 33571 - DNA, 26 bp, Homo Sapiens
attcggcgctctcaccgccgcggccc

SEQ ID NO: 33572 - DNA, 27 bp, Homo Sapiens
attcggcgctctcaccgccgcggcccg

SEQ ID NO: 33573 - DNA, 28 bp, Homo Sapiens
attcggcgctctcaccgccgcggcccgg

SEQ ID NO: 33574 - DNA, 29 bp, Homo Sapiens
attcggcgctctcaccgccgcggcccggg

SEQ ID NO: 33575 - DNA, 30 bp, Homo Sapiens; identical to SEQ ID NO: 7417

SEQ ID NO: 33576 - DNA, 31 bp, Homo Sapiens; identical to SEQ ID NO: 7418

SEQ ID NO: 33577 - DNA, 38 bp, Homo Sapiens; identical to SEQ ID NO: 7427

SEQ ID NO: 33578 - DNA, 16 bp, Homo Sapiens
attctcatagtcctag

SEQ ID NO: 33579 - DNA, 17 bp, Homo Sapiens
attctcatagtcctagc

SEQ ID NO: 33580 - DNA, 18 bp, Homo Sapiens
attctcatagtcctagcc

SEQ ID NO: 33581 - DNA, 28 bp, Homo Sapiens
attctcgcctgccacgcgggaggcccgg

SEQ ID NO: 33582 - DNA, 17 bp, Homo Sapiens
attctcgctggggcctc

SEQ ID NO: 33583 - DNA, 17 bp, Homo Sapiens
attctcggtttgggtcc

SEQ ID NO: 33584 - DNA, 18 bp, Homo Sapiens
attctcggtttgggtccg

SEQ ID NO: 33585 - DNA, 16 bp, Homo Sapiens
attcttgcgacccggg

SEQ ID NO: 33586 - DNA, 17 bp, Homo Sapiens
attcttgcgacccgggt

SEQ ID NO: 33587 - DNA, 32 bp, Homo Sapiens; identical to SEQ ID NO: 7454

SEQ ID NO: 33588 - DNA, 33 bp, Homo Sapiens; identical to SEQ ID NO: 7455

SEQ ID NO: 33589 - DNA, 34 bp, Homo Sapiens; identical to SEQ ID NO: 7456

SEQ ID NO: 33590 - DNA, 35 bp, Homo Sapiens; identical to SEQ ID NO: 7457

SEQ ID NO: 33591 - DNA, 36 bp, Homo Sapiens; identical to SEQ ID NO: 7458

SEQ ID NO: 33592 - DNA, 37 bp, Homo Sapiens; identical to SEQ ID NO: 7459

SEQ ID NO: 33593 - DNA, 38 bp, Homo Sapiens; identical to SEQ ID NO: 7460

SEQ ID NO: 33594 - DNA, 29 bp, Homo Sapiens
attgagggttcgaatcccttcgtggttgc

SEQ ID NO: 33595 - DNA, 30 bp, Homo Sapiens; identical to SEQ ID NO: 7470

SEQ ID NO: 33596 - DNA, 19 bp, Homo Sapiens
attgagggttcgagtccct

SEQ ID NO: 33597 - DNA, 22 bp, Homo Sapiens
attgagggttcgagtcccttcg

SEQ ID NO: 33598 - DNA, 28 bp, Homo Sapiens
attgagggttcgagtcccttcgtggtcg

SEQ ID NO: 33599 - DNA, 29 bp, Homo Sapiens
attgagggttcgagtcccttcgtggtcgc

SEQ ID NO: 33600 - DNA, 30 bp, Homo Sapiens; identical to SEQ ID NO: 7477

SEQ ID NO: 33601 - DNA, 31 bp, Homo Sapiens; identical to SEQ ID NO: 7478

SEQ ID NO: 33602 - DNA, 40 bp, Homo Sapiens; identical to SEQ ID NO: 7483

SEQ ID NO: 33603 - DNA, 41 bp, Homo Sapiens; identical to SEQ ID NO: 7484

SEQ ID NO: 33604 - DNA, 19 bp, Homo Sapiens
attgcaggttcgagtcctg

SEQ ID NO: 33605 - DNA, 29 bp, Homo Sapiens
attgcaggttcgagtcctgccgcggtcgc

SEQ ID NO: 33606 - DNA, 30 bp, Homo Sapiens; identical to SEQ ID NO: 7490

SEQ ID NO: 33607 - DNA, 36 bp, Homo Sapiens; identical to SEQ ID NO: 7501

SEQ ID NO: 33608 - DNA, 18 bp, Homo Sapiens
attggtcgtggttgtagt

SEQ ID NO: 33609 - DNA, 19 bp, Homo Sapiens
attggtcgtggttgtagtc

SEQ ID NO: 33610 - DNA, 20 bp, Homo Sapiens
attggtcgtggttgtagtcc

SEQ ID NO: 33611 - DNA, 21 bp, Homo Sapiens
attggtcgtggttgtagtccg

SEQ ID NO: 33612 - DNA, 23 bp, Homo Sapiens
attggtcgtggttgtagtccgtg

SEQ ID NO: 33613 - DNA, 24 bp, Homo Sapiens
attggtcgtggttgtagtccgtgc

SEQ ID NO: 33614 - DNA, 25 bp, Homo Sapiens
attggtcgtggttgtagtccgtgcg

SEQ ID NO: 33615 - DNA, 26 bp, Homo Sapiens
attggtcgtggttgtagtccgtgcga

SEQ ID NO: 33616 - DNA, 27 bp, Homo Sapiens
attggtcgtggttgtagtccgtgcgag

SEQ ID NO: 33617 - DNA, 28 bp, Homo Sapiens
attggtcgtggttgtagtccgtgcgaga

SEQ ID NO: 33618 - DNA, 29 bp, Homo Sapiens
attggtcgtggttgtagtccgtgcgagaa

SEQ ID NO: 33619 - DNA, 30 bp, Homo Sapiens; identical to SEQ ID NO: 7529

SEQ ID NO: 33620 - DNA, 31 bp, Homo Sapiens; identical to SEQ ID NO: 7530

SEQ ID NO: 33621 - DNA, 32 bp, Homo Sapiens; identical to SEQ ID NO: 7531

SEQ ID NO: 33622 - DNA, 33 bp, Homo Sapiens; identical to SEQ ID NO: 7532

SEQ ID NO: 33623 - DNA, 34 bp, Homo Sapiens; identical to SEQ ID NO: 7533

SEQ ID NO: 33624 - DNA, 16 bp, Homo Sapiens
attggtggttcagtgg

SEQ ID NO: 33625 - DNA, 18 bp, Homo Sapiens
attggtggttcagtggta

SEQ ID NO: 33626 - DNA, 23 bp, Homo Sapiens
attggtggttcagtggtagaatt

SEQ ID NO: 33627 - DNA, 24 bp, Homo Sapiens
attggtggttcagtggtagaattc

SEQ ID NO: 33628 - DNA, 25 bp, Homo Sapiens
attggtggttcagtggtagaattct

SEQ ID NO: 33629 - DNA, 26 bp, Homo Sapiens
attggtggttcagtggtagaattctc

SEQ ID NO: 33630 - DNA, 27 bp, Homo Sapiens
attggtggttcagtggtagaattctcg

SEQ ID NO: 33631 - DNA, 28 bp, Homo Sapiens
attggtggttcagtggtagaattctcgc

SEQ ID NO: 33632 - DNA, 29 bp, Homo Sapiens
attggtggttcagtggtagaattctcgcc

SEQ ID NO: 33633 - DNA, 30 bp, Homo Sapiens; identical to SEQ ID NO: 7557

SEQ ID NO: 33634 - DNA, 31 bp, Homo Sapiens; identical to SEQ ID NO: 7558

SEQ ID NO: 33635 - DNA, 33 bp, Homo Sapiens; identical to SEQ ID NO: 7560

SEQ ID NO: 33636 - DNA, 31 bp, Homo Sapiens; identical to SEQ ID NO: 7563

SEQ ID NO: 33637 - DNA, 32 bp, Homo Sapiens; identical to SEQ ID NO: 7564

SEQ ID NO: 33638 - DNA, 33 bp, Homo Sapiens; identical to SEQ ID NO: 7565

SEQ ID NO: 33639 - DNA, 34 bp, Homo Sapiens; identical to SEQ ID NO: 7566

SEQ ID NO: 33640 - DNA, 35 bp, Homo Sapiens; identical to SEQ ID NO: 7567

SEQ ID NO: 33641 - DNA, 36 bp, Homo Sapiens; identical to SEQ ID NO: 7568

SEQ ID NO: 33642 - DNA, 37 bp, Homo Sapiens; identical to SEQ ID NO: 7569

SEQ ID NO: 33643 - DNA, 46 bp, Homo Sapiens; identical to SEQ ID NO: 7578

SEQ ID NO: 33644 - DNA, 16 bp, Homo Sapiens
attgtgaatctgacaa

SEQ ID NO: 33645 - DNA, 17 bp, Homo Sapiens
attgtgaatctgacaac

SEQ ID NO: 33646 - DNA, 18 bp, Homo Sapiens
attgtgaatctgacaaca

SEQ ID NO: 33647 - DNA, 19 bp, Homo Sapiens
attgtgaatctgacaacag

SEQ ID NO: 33648 - DNA, 20 bp, Homo Sapiens
attgtgaatctgacaacaga

SEQ ID NO: 33649 - DNA, 23 bp, Homo Sapiens
attgtgaatctgacaacagaggc

SEQ ID NO: 33650 - DNA, 24 bp, Homo Sapiens
attgtgaatctgacaacagaggct

SEQ ID NO: 33651 - DNA, 25 bp, Homo Sapiens
attgtgaatctgacaacagaggctt

SEQ ID NO: 33652 - DNA, 26 bp, Homo Sapiens
attgtgaatctgacaacagaggctta

SEQ ID NO: 33653 - DNA, 28 bp, Homo Sapiens
attgtgaatctgacaacagaggcttacg

SEQ ID NO: 33654 - DNA, 30 bp, Homo Sapiens; identical to SEQ ID NO: 7596

SEQ ID NO: 33655 - DNA, 31 bp, Homo Sapiens; identical to SEQ ID NO: 7597

SEQ ID NO: 33656 - DNA, 32 bp, Homo Sapiens; identical to SEQ ID NO: 7598

SEQ ID NO: 33657 - DNA, 33 bp, Homo Sapiens; identical to SEQ ID NO: 7599

SEQ ID NO: 33658 - DNA, 34 bp, Homo Sapiens; identical to SEQ ID NO: 7600

SEQ ID NO: 33659 - DNA, 42 bp, Homo Sapiens; identical to SEQ ID NO: 7608

SEQ ID NO: 33660 - DNA, 43 bp, Homo Sapiens; identical to SEQ ID NO: 7609

SEQ ID NO: 33661 - DNA, 44 bp, Homo Sapiens; identical to SEQ ID NO: 7610

SEQ ID NO: 33662 - DNA, 45 bp, Homo Sapiens; identical to SEQ ID NO: 7611

SEQ ID NO: 33663 - DNA, 24 bp, Homo Sapiens
attgtgctttgcacgcgtgggttc

SEQ ID NO: 33664 - DNA, 42 bp, Homo Sapiens; identical to SEQ ID NO: 7620

SEQ ID NO: 33665 - DNA, 43 bp, Homo Sapiens; identical to SEQ ID NO: 7621

SEQ ID NO: 33666 - DNA, 28 bp, Homo Sapiens
attgtgggttcgagtcccatctggggtg

SEQ ID NO: 33667 - DNA, 29 bp, Homo Sapiens
attgtgggttcgagtcccatctggggtgc

SEQ ID NO: 33668 - DNA, 30 bp, Homo Sapiens; identical to SEQ ID NO: 7626

SEQ ID NO: 33669 - DNA, 29 bp, Homo Sapiens
attgtgggttcgagtcccatctgggtcgc

SEQ ID NO: 33670 - DNA, 30 bp, Homo Sapiens; identical to SEQ ID NO: 7630

SEQ ID NO: 33671 - DNA, 16 bp, Homo Sapiens
atttcaacttaacttg

SEQ ID NO: 33672 - DNA, 18 bp, Homo Sapiens
atttcaacttaacttgac

SEQ ID NO: 33673 - DNA, 19 bp, Homo Sapiens
atttcaacttaacttgacc

SEQ ID NO: 33674 - DNA, 21 bp, Homo Sapiens
atttcaacttaacttgaccgc

SEQ ID NO: 33675 - DNA, 23 bp, Homo Sapiens
atttcaacttaacttgaccgctc

SEQ ID NO: 33676 - DNA, 25 bp, Homo Sapiens
atttcaacttaacttgaccgctctg

SEQ ID NO: 33677 - DNA, 26 bp, Homo Sapiens
atttcaacttaacttgaccgctctga

SEQ ID NO: 33678 - DNA, 27 bp, Homo Sapiens
atttcaacttaacttgaccgctctgac

SEQ ID NO: 33679 - DNA, 28 bp, Homo Sapiens
atttcaacttaacttgaccgctctgacc

SEQ ID NO: 33680 - DNA, 29 bp, Homo Sapiens
atttcaacttaacttgaccgctctgacca

SEQ ID NO: 33681 - DNA, 33 bp, Homo Sapiens; identical to SEQ ID NO: 7683

SEQ ID NO: 33682 - DNA, 38 bp, Homo Sapiens; identical to SEQ ID NO: 7684

SEQ ID NO: 33683 - DNA, 42 bp, Homo Sapiens
attttggattctcagggatgggttcgattctcatagtcctag

SEQ ID NO: 33684 - DNA, 43 bp, Homo Sapiens; identical to SEQ ID NO: 7692

SEQ ID NO: 33685 - DNA, 44 bp, Homo Sapiens; identical to SEQ ID NO: 7693

SEQ ID NO: 33686 - DNA, 45 bp, Homo Sapiens; identical to SEQ ID NO: 7694

SEQ ID NO: 33687 - DNA, 16 bp, Homo Sapiens
caaaacatcagattgt

SEQ ID NO: 33688 - DNA, 18 bp, Homo Sapiens
caaaacatcagattgtga

SEQ ID NO: 33689 - DNA, 20 bp, Homo Sapiens
caaaacatcagattgtgaat

SEQ ID NO: 33690 - DNA, 21 bp, Homo Sapiens
caaaacatcagattgtgaatc

SEQ ID NO: 33691 - DNA, 22 bp, Homo Sapiens
caaaacatcagattgtgaatct

SEQ ID NO: 33692 - DNA, 23 bp, Homo Sapiens
caaaacatcagattgtgaatctg

SEQ ID NO: 33693 - DNA, 28 bp, Homo Sapiens
caaaacatcagattgtgaatctgacaac

SEQ ID NO: 33694 - DNA, 31 bp, Homo Sapiens; identical to SEQ ID NO: 7731

SEQ ID NO: 33695 - DNA, 33 bp, Homo Sapiens; identical to SEQ ID NO: 7733

SEQ ID NO: 33696 - DNA, 34 bp, Homo Sapiens; identical to SEQ ID NO: 7734

SEQ ID NO: 33697 - DNA, 35 bp, Homo Sapiens; identical to SEQ ID NO: 7735

SEQ ID NO: 33698 - DNA, 36 bp, Homo Sapiens; identical to SEQ ID NO: 7736

SEQ ID NO: 33699 - DNA, 37 bp, Homo Sapiens; identical to SEQ ID NO: 7737

SEQ ID NO: 33700 - DNA, 39 bp, Homo Sapiens; identical to SEQ ID NO: 7739

SEQ ID NO: 33701 - DNA, 40 bp, Homo Sapiens; identical to SEQ ID NO: 7740

SEQ ID NO: 33702 - DNA, 41 bp, Homo Sapiens; identical to SEQ ID NO: 7741

SEQ ID NO: 33703 - DNA, 42 bp, Homo Sapiens; identical to SEQ ID NO: 7742

SEQ ID NO: 33704 - DNA, 43 bp, Homo Sapiens; identical to SEQ ID NO: 7743

SEQ ID NO: 33705 - DNA, 44 bp, Homo Sapiens; identical to SEQ ID NO: 7744

SEQ ID NO: 33706 - DNA, 45 bp, Homo Sapiens; identical to SEQ ID NO: 7745

SEQ ID NO: 33707 - DNA, 46 bp, Homo Sapiens; identical to SEQ ID NO: 7746

SEQ ID NO: 33708 - DNA, 47 bp, Homo Sapiens; identical to SEQ ID NO: 7747

SEQ ID NO: 33709 - DNA, 21 bp, Homo Sapiens
caaaacgaatgatttcgactc

SEQ ID NO: 33710 - DNA, 22 bp, Homo Sapiens
caaaacgaatgatttcgactca

SEQ ID NO: 33711 - DNA, 16 bp, Homo Sapiens
caaacctgccggggct

SEQ ID NO: 33712 - DNA, 17 bp, Homo Sapiens
caaacctgccggggctt

SEQ ID NO: 33713 - DNA, 18 bp, Homo Sapiens
caaacctgccggggcttc

SEQ ID NO: 33714 - DNA, 19 bp, Homo Sapiens
caaacctgccggggcttcc

SEQ ID NO: 33715 - DNA, 33 bp, Homo Sapiens; identical to SEQ ID NO: 7776

SEQ ID NO: 33716 - DNA, 36 bp, Homo Sapiens; identical to SEQ ID NO: 7779

SEQ ID NO: 33717 - DNA, 33 bp, Homo Sapiens; identical to SEQ ID NO: 7799

SEQ ID NO: 33718 - DNA, 34 bp, Homo Sapiens; identical to SEQ ID NO: 7815

SEQ ID NO: 33719 - DNA, 35 bp, Homo Sapiens; identical to SEQ ID NO: 7816

SEQ ID NO: 33720 - DNA, 36 bp, Homo Sapiens; identical to SEQ ID NO: 7817

SEQ ID NO: 33721 - DNA, 34 bp, Homo Sapiens; identical to SEQ ID NO: 7818

SEQ ID NO: 33722 - DNA, 35 bp, Homo Sapiens; identical to SEQ ID NO: 7819

SEQ ID NO: 33723 - DNA, 36 bp, Homo Sapiens; identical to SEQ ID NO: 7820

SEQ ID NO: 33724 - DNA, 34 bp, Homo Sapiens
caaaggttgtgggttcgagtcccaccagagtcgc

SEQ ID NO: 33725 - DNA, 35 bp, Homo Sapiens; identical to SEQ ID NO: 7821

SEQ ID NO: 33726 - DNA, 18 bp, Homo Sapiens
caaatcacgtcggggtca

SEQ ID NO: 33727 - DNA, 19 bp, Homo Sapiens
caaatcacgtcggggtcac

SEQ ID NO: 33728 - DNA, 20 bp, Homo Sapiens
caaatcacgtcggggtcacc

SEQ ID NO: 33729 - DNA, 21 bp, Homo Sapiens
caaatcacgtcggggtcacca

SEQ ID NO: 33730 - DNA, 16 bp, Homo Sapiens
caaatcccggacgagc

SEQ ID NO: 33731 - DNA, 17 bp, Homo Sapiens
caaatcccggacgagcc

SEQ ID NO: 33732 - DNA, 18 bp, Homo Sapiens
caaatcccggacgagccc

SEQ ID NO: 33733 - DNA, 19 bp, Homo Sapiens
caaatcccggacgagcccc

SEQ ID NO: 33734 - DNA, 20 bp, Homo Sapiens
caaatcccggacgagccccc

SEQ ID NO: 33735 - DNA, 21 bp, Homo Sapiens
caaatcccggacgagccccca

SEQ ID NO: 33736 - DNA, 19 bp, Homo Sapiens
caaatccgggtgccccctc

SEQ ID NO: 33737 - DNA, 20 bp, Homo Sapiens
caaatccgggtgccccctcc

SEQ ID NO: 33738 - DNA, 18 bp, Homo Sapiens
caaatctcgctggggcct

SEQ ID NO: 33739 - DNA, 19 bp, Homo Sapiens
caaatctcgctggggcctc

SEQ ID NO: 33740 - DNA, 20 bp, Homo Sapiens
caaatctcgctggggcctcc

SEQ ID NO: 33741 - DNA, 17 bp, Homo Sapiens
caaatctcggtggaacc

SEQ ID NO: 33742 - DNA, 18 bp, Homo Sapiens
caaatctcggtggaacct

SEQ ID NO: 33743 - DNA, 19 bp, Homo Sapiens
caaatctcggtggaacctc

SEQ ID NO: 33744 - DNA, 20 bp, Homo Sapiens
caaatctcggtggaacctcc

SEQ ID NO: 33745 - DNA, 21 bp, Homo Sapiens
caaatctcggtggaacctcca

SEQ ID NO: 33746 - DNA, 17 bp, Homo Sapiens
caaatctcggtgggacc

SEQ ID NO: 33747 - DNA, 18 bp, Homo Sapiens
caaatctcggtgggacct

SEQ ID NO: 33748 - DNA, 19 bp, Homo Sapiens
caaatctcggtgggacctc

SEQ ID NO: 33749 - DNA, 20 bp, Homo Sapiens
caaatctcggtgggacctcc

SEQ ID NO: 33750 - DNA, 21 bp, Homo Sapiens
caaatggtagagcgctcgctt

SEQ ID NO: 33751 - DNA, 35 bp, Homo Sapiens; identical to SEQ ID NO: 7862

SEQ ID NO: 33752 - DNA, 36 bp, Homo Sapiens; identical to SEQ ID NO: 7863

SEQ ID NO: 33753 - DNA, 37 bp, Homo Sapiens; identical to SEQ ID NO: 7864

SEQ ID NO: 33754 - DNA, 38 bp, Homo Sapiens; identical to SEQ ID NO: 7865

SEQ ID NO: 33755 - DNA, 40 bp, Homo Sapiens; identical to SEQ ID NO: 7867

SEQ ID NO: 33756 - DNA, 30 bp, Homo Sapiens; identical to SEQ ID NO: 7881

SEQ ID NO: 33757 - DNA, 31 bp, Homo Sapiens; identical to SEQ ID NO: 7882

SEQ ID NO: 33758 - DNA, 32 bp, Homo Sapiens; identical to SEQ ID NO: 7883

SEQ ID NO: 33759 - DNA, 18 bp, Homo Sapiens
caacatggctttctcacc

SEQ ID NO: 33760 - DNA, 19 bp, Homo Sapiens
caacatggctttctcacca

SEQ ID NO: 33761 - DNA, 28 bp, Homo Sapiens
caacctcggttcgaatccgagtcacggc

SEQ ID NO: 33762 - DNA, 29 bp, Homo Sapiens
caacctcggttcgaatccgagtcacggca

SEQ ID NO: 33763 - DNA, 30 bp, Homo Sapiens; identical to SEQ ID NO: 7895

SEQ ID NO: 33764 - DNA, 20 bp, Homo Sapiens
caacggtagcgcgtctgact

SEQ ID NO: 33765 - DNA, 16 bp, Homo Sapiens
caacttaacttgaccg

SEQ ID NO: 33766 - DNA, 19 bp, Homo Sapiens
caacttaacttgaccgctc

SEQ ID NO: 33767 - DNA, 21 bp, Homo Sapiens
caacttaacttgaccgctctg

SEQ ID NO: 33768 - DNA, 22 bp, Homo Sapiens
caacttaacttgaccgctctga

SEQ ID NO: 33769 - DNA, 23 bp, Homo Sapiens
caacttaacttgaccgctctgac

SEQ ID NO: 33770 - DNA, 24 bp, Homo Sapiens
caacttaacttgaccgctctgacc

SEQ ID NO: 33771 - DNA, 25 bp, Homo Sapiens
caacttaacttgaccgctctgacca

SEQ ID NO: 33772 - DNA, 17 bp, Homo Sapiens
caacttacacttaggag

SEQ ID NO: 33773 - DNA, 26 bp, Homo Sapiens
caacttacacttaggagatttcaact

SEQ ID NO: 33774 - DNA, 27 bp, Homo Sapiens
caacttacacttaggagatttcaactt

SEQ ID NO: 33775 - DNA, 34 bp, Homo Sapiens; identical to SEQ ID NO: 7952

SEQ ID NO: 33776 - DNA, 35 bp, Homo Sapiens; identical to SEQ ID NO: 7953

SEQ ID NO: 33777 - DNA, 36 bp, Homo Sapiens; identical to SEQ ID NO: 7954

SEQ ID NO: 33778 - DNA, 37 bp, Homo Sapiens; identical to SEQ ID NO: 7955

SEQ ID NO: 33779 - DNA, 38 bp, Homo Sapiens; identical to SEQ ID NO: 7956

SEQ ID NO: 33780 - DNA, 39 bp, Homo Sapiens; identical to SEQ ID NO: 7957

SEQ ID NO: 33781 - DNA, 40 bp, Homo Sapiens; identical to SEQ ID NO: 7958

SEQ ID NO: 33782 - DNA, 41 bp, Homo Sapiens; identical to SEQ ID NO: 7959

SEQ ID NO: 33783 - DNA, 42 bp, Homo Sapiens; identical to SEQ ID NO: 7960

SEQ ID NO: 33784 - DNA, 43 bp, Homo Sapiens; identical to SEQ ID NO: 7961

SEQ ID NO: 33785 - DNA, 44 bp, Homo Sapiens; identical to SEQ ID NO: 7962

SEQ ID NO: 33786 - DNA, 45 bp, Homo Sapiens; identical to SEQ ID NO: 7963

SEQ ID NO: 33787 - DNA, 46 bp, Homo Sapiens; identical to SEQ ID NO: 7964

SEQ ID NO: 33788 - DNA, 19 bp, Homo Sapiens
caagaactgctaactcatg

SEQ ID NO: 33789 - DNA, 20 bp, Homo Sapiens
caagaactgctaactcatgc

SEQ ID NO: 33790 - DNA, 21 bp, Homo Sapiens
caagaactgctaactcatgcc

SEQ ID NO: 33791 - DNA, 24 bp, Homo Sapiens
caagaactgctaactcatgccccc

SEQ ID NO: 33792 - DNA, 37 bp, Homo Sapiens; identical to SEQ ID NO: 7986

SEQ ID NO: 33793 - DNA, 41 bp, Homo Sapiens; identical to SEQ ID NO: 7990

SEQ ID NO: 33794 - DNA, 42 bp, Homo Sapiens; identical to SEQ ID NO: 7991

SEQ ID NO: 33795 - DNA, 46 bp, Homo Sapiens; identical to SEQ ID NO: 7995

SEQ ID NO: 33796 - DNA, 33 bp, Homo Sapiens
caagaggtccccggttcaaatccgggtgccccc

SEQ ID NO: 33797 - DNA, 34 bp, Homo Sapiens; identical to SEQ ID NO: 8006

SEQ ID NO: 33798 - DNA, 35 bp, Homo Sapiens; identical to SEQ ID NO: 8007

SEQ ID NO: 33799 - DNA, 36 bp, Homo Sapiens; identical to SEQ ID NO: 8008

SEQ ID NO: 33800 - DNA, 34 bp, Homo Sapiens
caagaggtccctggttcaaatccaggtgccccct

SEQ ID NO: 33801 - DNA, 35 bp, Homo Sapiens
caagaggtccctggttcaaatccaggtgccccctc

SEQ ID NO: 33802 - DNA, 36 bp, Homo Sapiens
caagaggtccctggttcaaatccaggtgccccctcc

SEQ ID NO: 33803 - DNA, 34 bp, Homo Sapiens; identical to SEQ ID NO: 8012

SEQ ID NO: 33804 - DNA, 35 bp, Homo Sapiens
caagaggtccctggttcaaatccgggtgccccctc

SEQ ID NO: 33805 - DNA, 36 bp, Homo Sapiens
caagaggtccctggttcaaatccgggtgccccctcc

SEQ ID NO: 33806 - DNA, 31 bp, Homo Sapiens; identical to SEQ ID NO: 8025

SEQ ID NO: 33807 - DNA, 34 bp, Homo Sapiens; identical to SEQ ID NO: 8034

SEQ ID NO: 33808 - DNA, 30 bp, Homo Sapiens; identical to SEQ ID NO: 8036

SEQ ID NO: 33809 - DNA, 33 bp, Homo Sapiens
caaggtcgcgggttcgatccccgtacgggccac

SEQ ID NO: 33810 - DNA, 34 bp, Homo Sapiens; identical to SEQ ID NO: 8039

SEQ ID NO: 33811 - DNA, 19 bp, Homo Sapiens
caagtcacgtcggggtcac

SEQ ID NO: 33812 - DNA, 20 bp, Homo Sapiens
caagtcacgtcggggtcacc

SEQ ID NO: 33813 - DNA, 20 bp, Homo Sapiens
caagtccctgtccaggcgcc

SEQ ID NO: 33814 - DNA, 18 bp, Homo Sapiens
caagtccctgttcgggcg

SEQ ID NO: 33815 - DNA, 19 bp, Homo Sapiens
caagtccctgttcgggcgc

SEQ ID NO: 33816 - DNA, 20 bp, Homo Sapiens
caagtccctgttcgggcgcc

SEQ ID NO: 33817 - DNA, 19 bp, Homo Sapiens
caagtctcggtggaacctc

SEQ ID NO: 33818 - DNA, 18 bp, Homo Sapiens
caagttctggtctccgga

SEQ ID NO: 33819 - DNA, 28 bp, Homo Sapiens
caatacactgaaaatgtttagacgggct

SEQ ID NO: 33820 - DNA, 29 bp, Homo Sapiens
caatacactgaaaatgtttagacgggctc

SEQ ID NO: 33821 - DNA, 30 bp, Homo Sapiens; identical to SEQ ID NO: 8070

SEQ ID NO: 33822 - DNA, 31 bp, Homo Sapiens; identical to SEQ ID NO: 8071

SEQ ID NO: 33823 - DNA, 16 bp, Homo Sapiens
caatacttaatttctg

SEQ ID NO: 33824 - DNA, 17 bp, Homo Sapiens
caatacttaatttctgc

SEQ ID NO: 33825 - DNA, 18 bp, Homo Sapiens
caatacttaatttctgcc

SEQ ID NO: 33826 - DNA, 19 bp, Homo Sapiens
caatacttaatttctgcca

SEQ ID NO: 33827 - DNA, 19 bp, Homo Sapiens
caatccccggcacctccac

SEQ ID NO: 33828 - DNA, 20 bp, Homo Sapiens
caatccccggcacctccacc

SEQ ID NO: 33829 - DNA, 20 bp, Homo Sapiens
caatccccggcatctccacc

SEQ ID NO: 33830 - DNA, 19 bp, Homo Sapiens
caatcccgggtttcggcac

SEQ ID NO: 33831 - DNA, 17 bp, Homo Sapiens
caatggacgagcgcgct

SEQ ID NO: 33832 - DNA, 35 bp, Homo Sapiens; identical to SEQ ID NO: 8105

SEQ ID NO: 33833 - DNA, 36 bp, Homo Sapiens; identical to SEQ ID NO: 8106

SEQ ID NO: 33834 - DNA, 37 bp, Homo Sapiens; identical to SEQ ID NO: 8107

SEQ ID NO: 33835 - DNA, 21 bp, Homo Sapiens
caatggataacgcgtctgact

SEQ ID NO: 33836 - DNA, 17 bp, Homo Sapiens
caatggatagcgcattg

SEQ ID NO: 33837 - DNA, 18 bp, Homo Sapiens
caatggatagcgcattgg

SEQ ID NO: 33838 - DNA, 19 bp, Homo Sapiens
caatggatagcgcattgga

SEQ ID NO: 33839 - DNA, 42 bp, Homo Sapiens
caatggatagcgcattggacttctaattcaaaggttccgggt

SEQ ID NO: 33840 - DNA, 43 bp, Homo Sapiens
caatggatagcgcattggacttctaattcaaaggttccgggtt

SEQ ID NO: 33841 - DNA, 44 bp, Homo Sapiens
caatggggtttccccgcacaggttcgaatcctgttcgtgacgcc

SEQ ID NO: 33842 - DNA, 31 bp, Homo Sapiens
caatggtggttcagtggtagaattctcgcct

SEQ ID NO: 33843 - DNA, 18 bp, Homo Sapiens
caattaactagttttgac

SEQ ID NO: 33844 - DNA, 38 bp, Homo Sapiens; identical to SEQ ID NO: 8134

SEQ ID NO: 33845 - DNA, 18 bp, Homo Sapiens
caattccccgacggggag

SEQ ID NO: 33846 - DNA, 19 bp, Homo Sapiens
caattccccgacggggagc

SEQ ID NO: 33847 - DNA, 20 bp, Homo Sapiens
caattccccgacggggagcc

SEQ ID NO: 33848 - DNA, 20 bp, Homo Sapiens
caattccggctcgaaggacc

SEQ ID NO: 33849 - DNA, 19 bp, Homo Sapiens
caattctcgctggggcctc

SEQ ID NO: 33850 - DNA, 16 bp, Homo Sapiens
cacaagaactgctaac

SEQ ID NO: 33851 - DNA, 17 bp, Homo Sapiens
cacaagaactgctaact

SEQ ID NO: 33852 - DNA, 18 bp, Homo Sapiens
cacaagaactgctaactc

SEQ ID NO: 33853 - DNA, 22 bp, Homo Sapiens
cacaagaactgctaactcatgc

SEQ ID NO: 33854 - DNA, 26 bp, Homo Sapiens
cacaagaactgctaactcatgccccc

SEQ ID NO: 33855 - DNA, 29 bp, Homo Sapiens
cacaagaactgctaactcatgcccccatg

SEQ ID NO: 33856 - DNA, 43 bp, Homo Sapiens; identical to SEQ ID NO: 8196

SEQ ID NO: 33857 - DNA, 44 bp, Homo Sapiens; identical to SEQ ID NO: 8197

SEQ ID NO: 33858 - DNA, 45 bp, Homo Sapiens; identical to SEQ ID NO: 8198

SEQ ID NO: 33859 - DNA, 40 bp, Homo Sapiens
cacacgcgaaaggtccccggttcgaaaccgggcggaaaca

SEQ ID NO: 33860 - DNA, 41 bp, Homo Sapiens
cacacgcgaaaggtccccggttcgaaaccgggcggaaacac

SEQ ID NO: 33861 - DNA, 42 bp, Homo Sapiens; identical to SEQ ID NO: 8203

SEQ ID NO: 33862 - DNA, 31 bp, Homo Sapiens
cacacgtgggttcgaatcccatcctcgtcgc

SEQ ID NO: 33863 - DNA, 32 bp, Homo Sapiens; identical to SEQ ID NO: 8204

SEQ ID NO: 33864 - DNA, 27 bp, Homo Sapiens
cacaggttcgaatcctgttcgtgacgc

SEQ ID NO: 33865 - DNA, 28 bp, Homo Sapiens
cacaggttcgaatcctgttcgtgacgcc

SEQ ID NO: 33866 - DNA, 20 bp, Homo Sapiens
cacatcaccccataaacacc

SEQ ID NO: 33867 - DNA, 21 bp, Homo Sapiens
cacatcaccccataaacacca

SEQ ID NO: 33868 - DNA, 23 bp, Homo Sapiens
cacatggtctagcggttaggatt

SEQ ID NO: 33869 - DNA, 25 bp, Homo Sapiens
cacatggtctagcggttaggattcc

SEQ ID NO: 33870 - DNA, 26 bp, Homo Sapiens
cacatggtctagcggttaggattcct

SEQ ID NO: 33871 - DNA, 27 bp, Homo Sapiens
cacatggtctagcggttaggattcctg

SEQ ID NO: 33872 - DNA, 28 bp, Homo Sapiens
cacatggtctagcggttaggattcctgg

SEQ ID NO: 33873 - DNA, 29 bp, Homo Sapiens
cacatggtctagcggttaggattcctggt

SEQ ID NO: 33874 - DNA, 30 bp, Homo Sapiens; identical to SEQ ID NO: 8223

SEQ ID NO: 33875 - DNA, 31 bp, Homo Sapiens; identical to SEQ ID NO: 8224

SEQ ID NO: 33876 - DNA, 32 bp, Homo Sapiens; identical to SEQ ID NO: 8225

SEQ ID NO: 33877 - DNA, 33 bp, Homo Sapiens; identical to SEQ ID NO: 8226

SEQ ID NO: 33878 - DNA, 34 bp, Homo Sapiens; identical to SEQ ID NO: 8227

SEQ ID NO: 33879 - DNA, 37 bp, Homo Sapiens; identical to SEQ ID NO: 8230

SEQ ID NO: 33880 - DNA, 47 bp, Homo Sapiens; identical to SEQ ID NO: 8258

SEQ ID NO: 33881 - DNA, 31 bp, Homo Sapiens; identical to SEQ ID NO: 8268

SEQ ID NO: 33882 - DNA, 32 bp, Homo Sapiens
cacccaggcggcccgggttcgactcccggtgt

SEQ ID NO: 33883 - DNA, 33 bp, Homo Sapiens; identical to SEQ ID NO: 8269

SEQ ID NO: 33884 - DNA, 34 bp, Homo Sapiens; identical to SEQ ID NO: 8270

SEQ ID NO: 33885 - DNA, 35 bp, Homo Sapiens; identical to SEQ ID NO: 8271

SEQ ID NO: 33886 - DNA, 36 bp, Homo Sapiens; identical to SEQ ID NO: 8272

SEQ ID NO: 33887 - DNA, 37 bp, Homo Sapiens; identical to SEQ ID NO: 8273

SEQ ID NO: 33888 - DNA, 38 bp, Homo Sapiens; identical to SEQ ID NO: 8274

SEQ ID NO: 33889 - DNA, 39 bp, Homo Sapiens; identical to SEQ ID NO: 8275

SEQ ID NO: 33890 - DNA, 40 bp, Homo Sapiens; identical to SEQ ID NO: 8276

SEQ ID NO: 33891 - DNA, 35 bp, Homo Sapiens; identical to SEQ ID NO: 8282

SEQ ID NO: 33892 - DNA, 36 bp, Homo Sapiens
cacccaggtggcccgggttcgactcccggtatggga

SEQ ID NO: 33893 - DNA, 37 bp, Homo Sapiens; identical to SEQ ID NO: 8283

SEQ ID NO: 33894 - DNA, 38 bp, Homo Sapiens; identical to SEQ ID NO: 8284

SEQ ID NO: 33895 - DNA, 39 bp, Homo Sapiens; identical to SEQ ID NO: 8285

SEQ ID NO: 33896 - DNA, 16 bp, Homo Sapiens
caccccataaacacca

SEQ ID NO: 33897 - DNA, 19 bp, Homo Sapiens
caccgccgcggcccgggtt

SEQ ID NO: 33898 - DNA, 36 bp, Homo Sapiens; identical to SEQ ID NO: 8311

SEQ ID NO: 33899 - DNA, 37 bp, Homo Sapiens; identical to SEQ ID NO: 8312

SEQ ID NO: 33900 - DNA, 38 bp, Homo Sapiens; identical to SEQ ID NO: 8313

SEQ ID NO: 33901 - DNA, 39 bp, Homo Sapiens; identical to SEQ ID NO: 8314

SEQ ID NO: 33902 - DNA, 40 bp, Homo Sapiens; identical to SEQ ID NO: 8315

SEQ ID NO: 33903 - DNA, 17 bp, Homo Sapiens
cacctctttacagtgac

SEQ ID NO: 33904 - DNA, 18 bp, Homo Sapiens
cacctctttacagtgacc

SEQ ID NO: 33905 - DNA, 19 bp, Homo Sapiens
cacctctttacagtgacca

SEQ ID NO: 33906 - DNA, 33 bp, Homo Sapiens
cacgaggccccgggttcaatccccggcacctcc

SEQ ID NO: 33907 - DNA, 34 bp, Homo Sapiens
cacgaggccccgggttcaatccccggcacctcca

SEQ ID NO: 33908 - DNA, 35 bp, Homo Sapiens
cacgaggccccgggttcaatccccggcacctccac

SEQ ID NO: 33909 - DNA, 36 bp, Homo Sapiens; identical to SEQ ID NO: 8323

SEQ ID NO: 33910 - DNA, 16 bp, Homo Sapiens
cacgcagaaggtcctg

SEQ ID NO: 33911 - DNA, 38 bp, Homo Sapiens
cacgcagaaggtcctgggttcgagccccagtggaacca

SEQ ID NO: 33912 - DNA, 39 bp, Homo Sapiens; identical to SEQ ID NO: 8328

SEQ ID NO: 33913 - DNA, 40 bp, Homo Sapiens; identical to SEQ ID NO: 8329

SEQ ID NO: 33914 - DNA, 41 bp, Homo Sapiens; identical to SEQ ID NO: 8330

SEQ ID NO: 33915 - DNA, 19 bp, Homo Sapiens
cacgcgaaaggtccccggt

SEQ ID NO: 33916 - DNA, 22 bp, Homo Sapiens
cacgcgaaaggtccccggttcg

SEQ ID NO: 33917 - DNA, 38 bp, Homo Sapiens
cacgcgaaaggtccccggttcgaaaccgggcggaaaca

SEQ ID NO: 33918 - DNA, 39 bp, Homo Sapiens
cacgcgaaaggtccccggttcgaaaccgggcggaaacac

SEQ ID NO: 33919 - DNA, 40 bp, Homo Sapiens; identical to SEQ ID NO: 8340

SEQ ID NO: 33920 - DNA, 34 bp, Homo Sapiens; identical to SEQ ID NO: 8353

SEQ ID NO: 33921 - DNA, 35 bp, Homo Sapiens; identical to SEQ ID NO: 8354

SEQ ID NO: 33922 - DNA, 36 bp, Homo Sapiens; identical to SEQ ID NO: 8355

SEQ ID NO: 33923 - DNA, 37 bp, Homo Sapiens; identical to SEQ ID NO: 8356

SEQ ID NO: 33924 - DNA, 38 bp, Homo Sapiens; identical to SEQ ID NO: 8357

SEQ ID NO: 33925 - DNA, 39 bp, Homo Sapiens; identical to SEQ ID NO: 8358

SEQ ID NO: 33926 - DNA, 40 bp, Homo Sapiens; identical to SEQ ID NO: 8359

SEQ ID NO: 33927 - DNA, 38 bp, Homo Sapiens
cacgcgggagaccggggttcgattccccaacggggagc

SEQ ID NO: 33928 - DNA, 39 bp, Homo Sapiens
cacgcgggagaccggggttcgattccccaacggggagcc

SEQ ID NO: 33929 - DNA, 31 bp, Homo Sapiens; identical to SEQ ID NO: 8366

SEQ ID NO: 33930 - DNA, 32 bp, Homo Sapiens; identical to SEQ ID NO: 8367

SEQ ID NO: 33931 - DNA, 33 bp, Homo Sapiens; identical to SEQ ID NO: 8368

SEQ ID NO: 33932 - DNA, 34 bp, Homo Sapiens; identical to SEQ ID NO: 8369

SEQ ID NO: 33933 - DNA, 35 bp, Homo Sapiens; identical to SEQ ID NO: 8370

SEQ ID NO: 33934 - DNA, 36 bp, Homo Sapiens; identical to SEQ ID NO: 8371

SEQ ID NO: 33935 - DNA, 37 bp, Homo Sapiens; identical to SEQ ID NO: 8372

SEQ ID NO: 33936 - DNA, 38 bp, Homo Sapiens; identical to SEQ ID NO: 8373

SEQ ID NO: 33937 - DNA, 39 bp, Homo Sapiens; identical to SEQ ID NO: 8374

SEQ ID NO: 33938 - DNA, 40 bp, Homo Sapiens; identical to SEQ ID NO: 8375

SEQ ID NO: 33939 - DNA, 18 bp, Homo Sapiens
cacgcgggaggcccgggt

SEQ ID NO: 33940 - DNA, 35 bp, Homo Sapiens; identical to SEQ ID NO: 8385

SEQ ID NO: 33941 - DNA, 37 bp, Homo Sapiens; identical to SEQ ID NO: 8387

SEQ ID NO: 33942 - DNA, 38 bp, Homo Sapiens; identical to SEQ ID NO: 8388

SEQ ID NO: 33943 - DNA, 39 bp, Homo Sapiens; identical to SEQ ID NO: 8389

SEQ ID NO: 33944 - DNA, 37 bp, Homo Sapiens
cacgcgggaggcccgggttcgattcccggcccatgca

SEQ ID NO: 33945 - DNA, 32 bp, Homo Sapiens; identical to SEQ ID NO: 8393

SEQ ID NO: 33946 - DNA, 32 bp, Homo Sapiens; identical to SEQ ID NO: 8394

SEQ ID NO: 33947 - DNA, 31 bp, Homo Sapiens; identical to SEQ ID NO: 8397

SEQ ID NO: 33948 - DNA, 32 bp, Homo Sapiens; identical to SEQ ID NO: 8398

SEQ ID NO: 33949 - DNA, 33 bp, Homo Sapiens; identical to SEQ ID NO: 8399

SEQ ID NO: 33950 - DNA, 40 bp, Homo Sapiens
cacgtatgaggccccgggttcaatccccggcatctccacc

SEQ ID NO: 33951 - DNA, 16 bp, Homo Sapiens
cacgtcggggtcacca

SEQ ID NO: 33952 - DNA, 17 bp, Homo Sapiens
cacgtctgctttacacg

SEQ ID NO: 33953 - DNA, 28 bp, Homo Sapiens
cacgtgggttcgaatcccatcctcgtcg

SEQ ID NO: 33954 - DNA, 29 bp, Homo Sapiens
cacgtgggttcgaatcccatcctcgtcgc

SEQ ID NO: 33955 - DNA, 30 bp, Homo Sapiens
cacgtgggttcgaatcccatcctcgtcgcc

SEQ ID NO: 33956 - DNA, 16 bp, Homo Sapiens
cactctggactctgaa

SEQ ID NO: 33957 - DNA, 17 bp, Homo Sapiens
cactctggactctgaat

SEQ ID NO: 33958 - DNA, 18 bp, Homo Sapiens
cactctggactctgaatc

SEQ ID NO: 33959 - DNA, 19 bp, Homo Sapiens
cactctggactctgaatcc

SEQ ID NO: 33960 - DNA, 20 bp, Homo Sapiens
cactctggactctgaatcca

SEQ ID NO: 33961 - DNA, 21 bp, Homo Sapiens
cactctggactctgaatccag

SEQ ID NO: 33962 - DNA, 22 bp, Homo Sapiens
cactctggactctgaatccagc

SEQ ID NO: 33963 - DNA, 23 bp, Homo Sapiens
cactctggactctgaatccagcg

SEQ ID NO: 33964 - DNA, 26 bp, Homo Sapiens
cactctggactctgaatccagcgatc

SEQ ID NO: 33965 - DNA, 27 bp, Homo Sapiens
cactctggactctgaatccagcgatcc

SEQ ID NO: 33966 - DNA, 28 bp, Homo Sapiens
cactctggactctgaatccagcgatccg

SEQ ID NO: 33967 - DNA, 29 bp, Homo Sapiens
cactctggactctgaatccagcgatccga

SEQ ID NO: 33968 - DNA, 30 bp, Homo Sapiens; identical to SEQ ID NO: 8428

SEQ ID NO: 33969 - DNA, 31 bp, Homo Sapiens; identical to SEQ ID NO: 8429

SEQ ID NO: 33970 - DNA, 32 bp, Homo Sapiens; identical to SEQ ID NO: 8430

SEQ ID NO: 33971 - DNA, 33 bp, Homo Sapiens; identical to SEQ ID NO: 8431

SEQ ID NO: 33972 - DNA, 34 bp, Homo Sapiens; identical to SEQ ID NO: 8432

SEQ ID NO: 33973 - DNA, 16 bp, Homo Sapiens
cactctggactttgaa

SEQ ID NO: 33974 - DNA, 18 bp, Homo Sapiens
cactctggactttgaatc

SEQ ID NO: 33975 - DNA, 19 bp, Homo Sapiens
cactctggactttgaatcc

SEQ ID NO: 33976 - DNA, 20 bp, Homo Sapiens
cactctggactttgaatcca

SEQ ID NO: 33977 - DNA, 29 bp, Homo Sapiens
cactctggactttgaatccagcgatccga

SEQ ID NO: 33978 - DNA, 30 bp, Homo Sapiens; identical to SEQ ID NO: 8442

SEQ ID NO: 33979 - DNA, 44 bp, Homo Sapiens; identical to SEQ ID NO: 8462

SEQ ID NO: 33980 - DNA, 16 bp, Homo Sapiens
cactgtaaagctaact

SEQ ID NO: 33981 - DNA, 17 bp, Homo Sapiens
cactgtaaagctaactt

SEQ ID NO: 33982 - DNA, 20 bp, Homo Sapiens
cactgtaaagctaacttagc

SEQ ID NO: 33983 - DNA, 21 bp, Homo Sapiens
cactgtaaagctaacttagca

SEQ ID NO: 33984 - DNA, 23 bp, Homo Sapiens
cactgtaaagctaacttagcatt

SEQ ID NO: 33985 - DNA, 24 bp, Homo Sapiens
cactgtaaagctaacttagcatta

SEQ ID NO: 33986 - DNA, 27 bp, Homo Sapiens
cactgtaaagctaacttagcattaacc

SEQ ID NO: 33987 - DNA, 28 bp, Homo Sapiens
cactgtaaagctaacttagcattaacct

SEQ ID NO: 33988 - DNA, 29 bp, Homo Sapiens
cactgtaaagctaacttagcattaacctt

SEQ ID NO: 33989 - DNA, 30 bp, Homo Sapiens; identical to SEQ ID NO: 8478

SEQ ID NO: 33990 - DNA, 31 bp, Homo Sapiens; identical to SEQ ID NO: 8479

SEQ ID NO: 33991 - DNA, 32 bp, Homo Sapiens; identical to SEQ ID NO: 8480

SEQ ID NO: 33992 - DNA, 33 bp, Homo Sapiens; identical to SEQ ID NO: 8481

SEQ ID NO: 33993 - DNA, 34 bp, Homo Sapiens; identical to SEQ ID NO: 8482

SEQ ID NO: 33994 - DNA, 35 bp, Homo Sapiens; identical to SEQ ID NO: 8483

SEQ ID NO: 33995 - DNA, 38 bp, Homo Sapiens; identical to SEQ ID NO: 8486

SEQ ID NO: 33996 - DNA, 45 bp, Homo Sapiens; identical to SEQ ID NO: 8493

SEQ ID NO: 33997 - DNA, 46 bp, Homo Sapiens; identical to SEQ ID NO: 8494

SEQ ID NO: 33998 - DNA, 47 bp, Homo Sapiens; identical to SEQ ID NO: 8495

SEQ ID NO: 33999 - DNA, 18 bp, Homo Sapiens
cacttaggagatttcaac

SEQ ID NO: 34000 - DNA, 19 bp, Homo Sapiens
cacttaggagatttcaact

SEQ ID NO: 34001 - DNA, 20 bp, Homo Sapiens
cacttaggagatttcaactt

SEQ ID NO: 34002 - DNA, 27 bp, Homo Sapiens
cacttaggagatttcaacttaacttga

SEQ ID NO: 34003 - DNA, 28 bp, Homo Sapiens
cacttaggagatttcaacttaacttgac

SEQ ID NO: 34004 - DNA, 29 bp, Homo Sapiens
cacttaggagatttcaacttaacttgacc

SEQ ID NO: 34005 - DNA, 30 bp, Homo Sapiens; identical to SEQ ID NO: 8511

SEQ ID NO: 34006 - DNA, 32 bp, Homo Sapiens; identical to SEQ ID NO: 8513

SEQ ID NO: 34007 - DNA, 33 bp, Homo Sapiens; identical to SEQ ID NO: 8514

SEQ ID NO: 34008 - DNA, 34 bp, Homo Sapiens; identical to SEQ ID NO: 8515

SEQ ID NO: 34009 - DNA, 35 bp, Homo Sapiens; identical to SEQ ID NO: 8516

SEQ ID NO: 34010 - DNA, 36 bp, Homo Sapiens; identical to SEQ ID NO: 8517

SEQ ID NO: 34011 - DNA, 37 bp, Homo Sapiens; identical to SEQ ID NO: 8518

SEQ ID NO: 34012 - DNA, 38 bp, Homo Sapiens; identical to SEQ ID NO: 8519

SEQ ID NO: 34013 - DNA, 39 bp, Homo Sapiens; identical to SEQ ID NO: 8520

SEQ ID NO: 34014 - DNA, 25 bp, Homo Sapiens
cagaagattccaggttcgactcctg

SEQ ID NO: 34015 - DNA, 27 bp, Homo Sapiens
cagaagattccaggttcgactcctggc

SEQ ID NO: 34016 - DNA, 32 bp, Homo Sapiens; identical to SEQ ID NO: 8528

SEQ ID NO: 34017 - DNA, 33 bp, Homo Sapiens; identical to SEQ ID NO: 8529

SEQ ID NO: 34018 - DNA, 34 bp, Homo Sapiens; identical to SEQ ID NO: 8530

SEQ ID NO: 34019 - DNA, 35 bp, Homo Sapiens; identical to SEQ ID NO: 8531

SEQ ID NO: 34020 - DNA, 36 bp, Homo Sapiens; identical to SEQ ID NO: 8532

SEQ ID NO: 34021 - DNA, 37 bp, Homo Sapiens; identical to SEQ ID NO: 8533

SEQ ID NO: 34022 - DNA, 17 bp, Homo Sapiens
cagaagattctaggttc

SEQ ID NO: 34023 - DNA, 18 bp, Homo Sapiens
cagaagattctaggttcg

SEQ ID NO: 34024 - DNA, 32 bp, Homo Sapiens; identical to SEQ ID NO: 8542

SEQ ID NO: 34025 - DNA, 33 bp, Homo Sapiens; identical to SEQ ID NO: 8543

SEQ ID NO: 34026 - DNA, 34 bp, Homo Sapiens; identical to SEQ ID NO: 8544

SEQ ID NO: 34027 - DNA, 35 bp, Homo Sapiens; identical to SEQ ID NO: 8545

SEQ ID NO: 34028 - DNA, 36 bp, Homo Sapiens; identical to SEQ ID NO: 8546

SEQ ID NO: 34029 - DNA, 37 bp, Homo Sapiens; identical to SEQ ID NO: 8547

SEQ ID NO: 34030 - DNA, 16 bp, Homo Sapiens
cagaagattgagggtt

SEQ ID NO: 34031 - DNA, 17 bp, Homo Sapiens
cagaagattgagggttc

SEQ ID NO: 34032 - DNA, 18 bp, Homo Sapiens
cagaagattgagggttcg

SEQ ID NO: 34033 - DNA, 34 bp, Homo Sapiens; identical to SEQ ID NO: 8551

SEQ ID NO: 34034 - DNA, 35 bp, Homo Sapiens
cagaagattgagggttcgaatccctccgtggttac

SEQ ID NO: 34035 - DNA, 36 bp, Homo Sapiens; identical to SEQ ID NO: 8552

SEQ ID NO: 34036 - DNA, 34 bp, Homo Sapiens; identical to SEQ ID NO: 8553

SEQ ID NO: 34037 - DNA, 35 bp, Homo Sapiens
cagaagattgagggttcgaatcccttcgtggttac

SEQ ID NO: 34038 - DNA, 36 bp, Homo Sapiens; identical to SEQ ID NO: 8554

SEQ ID NO: 34039 - DNA, 34 bp, Homo Sapiens; identical to SEQ ID NO: 8555

SEQ ID NO: 34040 - DNA, 35 bp, Homo Sapiens; identical to SEQ ID NO: 8556

SEQ ID NO: 34041 - DNA, 36 bp, Homo Sapiens; identical to SEQ ID NO: 8557

SEQ ID NO: 34042 - DNA, 37 bp, Homo Sapiens; identical to SEQ ID NO: 8558

SEQ ID NO: 34043 - DNA, 25 bp, Homo Sapiens
cagaagattgagggttcgagtccct

SEQ ID NO: 34044 - DNA, 28 bp, Homo Sapiens
cagaagattgagggttcgagtcccttcg

SEQ ID NO: 34045 - DNA, 32 bp, Homo Sapiens; identical to SEQ ID NO: 8562

SEQ ID NO: 34046 - DNA, 33 bp, Homo Sapiens; identical to SEQ ID NO: 8563

SEQ ID NO: 34047 - DNA, 34 bp, Homo Sapiens; identical to SEQ ID NO: 8564

SEQ ID NO: 34048 - DNA, 35 bp, Homo Sapiens; identical to SEQ ID NO: 8565

SEQ ID NO: 34049 - DNA, 36 bp, Homo Sapiens; identical to SEQ ID NO: 8566

SEQ ID NO: 34050 - DNA, 37 bp, Homo Sapiens; identical to SEQ ID NO: 8567

SEQ ID NO: 34051 - DNA, 16 bp, Homo Sapiens
cagaagattgcaggtt

SEQ ID NO: 34052 - DNA, 17 bp, Homo Sapiens
cagaagattgcaggttc

SEQ ID NO: 34053 - DNA, 28 bp, Homo Sapiens
cagaagattgcaggttcgagtcctgccg

SEQ ID NO: 34054 - DNA, 31 bp, Homo Sapiens
cagaagattgcaggttcgagtcctgccgcgg

SEQ ID NO: 34055 - DNA, 32 bp, Homo Sapiens
cagaagattgcaggttcgagtcctgccgcggt

SEQ ID NO: 34056 - DNA, 33 bp, Homo Sapiens; identical to SEQ ID NO: 8573

SEQ ID NO: 34057 - DNA, 34 bp, Homo Sapiens; identical to SEQ ID NO: 8574

SEQ ID NO: 34058 - DNA, 35 bp, Homo Sapiens; identical to SEQ ID NO: 8575

SEQ ID NO: 34059 - DNA, 36 bp, Homo Sapiens; identical to SEQ ID NO: 8576

SEQ ID NO: 34060 - DNA, 37 bp, Homo Sapiens; identical to SEQ ID NO: 8577

SEQ ID NO: 34061 - DNA, 17 bp, Homo Sapiens
cagaaggctgcgtgttc

SEQ ID NO: 34062 - DNA, 33 bp, Homo Sapiens; identical to SEQ ID NO: 8581

SEQ ID NO: 34063 - DNA, 34 bp, Homo Sapiens
cagaaggctgcgtgttcgaatcacgtcggggtca

SEQ ID NO: 34064 - DNA, 35 bp, Homo Sapiens; identical to SEQ ID NO: 8582

SEQ ID NO: 34065 - DNA, 36 bp, Homo Sapiens; identical to SEQ ID NO: 8583

SEQ ID NO: 34066 - DNA, 26 bp, Homo Sapiens
cagaaggtcctgggttcgagccccag

SEQ ID NO: 34067 - DNA, 32 bp, Homo Sapiens; identical to SEQ ID NO: 8587

SEQ ID NO: 34068 - DNA, 33 bp, Homo Sapiens; identical to SEQ ID NO: 8588

SEQ ID NO: 34069 - DNA, 34 bp, Homo Sapiens; identical to SEQ ID NO: 8589

SEQ ID NO: 34070 - DNA, 35 bp, Homo Sapiens; identical to SEQ ID NO: 8590

SEQ ID NO: 34071 - DNA, 36 bp, Homo Sapiens; identical to SEQ ID NO: 8591

SEQ ID NO: 34072 - DNA, 37 bp, Homo Sapiens; identical to SEQ ID NO: 8592

SEQ ID NO: 34073 - DNA, 34 bp, Homo Sapiens; identical to SEQ ID NO: 8594

SEQ ID NO: 34074 - DNA, 35 bp, Homo Sapiens; identical to SEQ ID NO: 8595

SEQ ID NO: 34075 - DNA, 36 bp, Homo Sapiens; identical to SEQ ID NO: 8596

SEQ ID NO: 34076 - DNA, 34 bp, Homo Sapiens
cagaaggttgcgtgttcaagtcacgtcggggtca

SEQ ID NO: 34077 - DNA, 35 bp, Homo Sapiens; identical to SEQ ID NO: 8600

SEQ ID NO: 34078 - DNA, 36 bp, Homo Sapiens; identical to SEQ ID NO: 8601

SEQ ID NO: 34079 - DNA, 16 bp, Homo Sapiens
cagaccaagagccttc

SEQ ID NO: 34080 - DNA, 17 bp, Homo Sapiens
cagaccaagagccttca

SEQ ID NO: 34081 - DNA, 25 bp, Homo Sapiens
cagaccaagagccttcaaagccctc

SEQ ID NO: 34082 - DNA, 23 bp, Homo Sapiens
cagagaatagtttaaattagaat

SEQ ID NO: 34083 - DNA, 24 bp, Homo Sapiens
cagagaatagtttaaattagaatc

SEQ ID NO: 34084 - DNA, 31 bp, Homo Sapiens; identical to SEQ ID NO: 8638

SEQ ID NO: 34085 - DNA, 32 bp, Homo Sapiens; identical to SEQ ID NO: 8639

SEQ ID NO: 34086 - DNA, 33 bp, Homo Sapiens; identical to SEQ ID NO: 8640

SEQ ID NO: 34087 - DNA, 34 bp, Homo Sapiens; identical to SEQ ID NO: 8641

SEQ ID NO: 34088 - DNA, 16 bp, Homo Sapiens
cagagcatttgactgc

SEQ ID NO: 34089 - DNA, 27 bp, Homo Sapiens
cagaggcttacgaccccttatttaccc

SEQ ID NO: 34090 - DNA, 28 bp, Homo Sapiens
cagaggcttacgaccccttatttacccc

SEQ ID NO: 34091 - DNA, 29 bp, Homo Sapiens
cagaggcttacgaccccttatttacccca

SEQ ID NO: 34092 - DNA, 16 bp, Homo Sapiens
cagaggtcgatggatc

SEQ ID NO: 34093 - DNA, 17 bp, Homo Sapiens
cagaggtcgatggatcg

SEQ ID NO: 34094 - DNA, 20 bp, Homo Sapiens
cagaggtcgatggatcgaaa

SEQ ID NO: 34095 - DNA, 21 bp, Homo Sapiens
cagaggtcgatggatcgaaac

SEQ ID NO: 34096 - DNA, 22 bp, Homo Sapiens
cagaggtcgatggatcgaaacc

SEQ ID NO: 34097 - DNA, 23 bp, Homo Sapiens
cagaggtcgatggatcgaaacca

SEQ ID NO: 34098 - DNA, 24 bp, Homo Sapiens
cagaggtcgatggatcgaaaccat

SEQ ID NO: 34099 - DNA, 28 bp, Homo Sapiens
cagaggtcgatggatcgaaaccatcctc

SEQ ID NO: 34100 - DNA, 35 bp, Homo Sapiens
cagaggtcgatggatcgaaaccatcctctgctacc

SEQ ID NO: 34101 - DNA, 16 bp, Homo Sapiens
cagaggttccgggttc

SEQ ID NO: 34102 - DNA, 17 bp, Homo Sapiens
cagaggttccgggttcg

SEQ ID NO: 34103 - DNA, 26 bp, Homo Sapiens
cagaggttccgggttcgagtcccggc

SEQ ID NO: 34104 - DNA, 31 bp, Homo Sapiens
cagaggttccgggttcgagtcccggcagaga

SEQ ID NO: 34105 - DNA, 33 bp, Homo Sapiens; identical to SEQ ID NO: 8699

SEQ ID NO: 34106 - DNA, 35 bp, Homo Sapiens; identical to SEQ ID NO: 8701

SEQ ID NO: 34107 - DNA, 36 bp, Homo Sapiens; identical to SEQ ID NO: 8702

SEQ ID NO: 34108 - DNA, 17 bp, Homo Sapiens
cagagtggcgcagcgga

SEQ ID NO: 34109 - DNA, 19 bp, Homo Sapiens
cagagtggcgcagcggaag

SEQ ID NO: 34110 - DNA, 24 bp, Homo Sapiens
cagagtggcgcagcggaagcgtgc

SEQ ID NO: 34111 - DNA, 25 bp, Homo Sapiens
cagagtggcgcagcggaagcgtgct

SEQ ID NO: 34112 - DNA, 29 bp, Homo Sapiens
cagagtggcgcagcggaagcgtgctgggc

SEQ ID NO: 34113 - DNA, 30 bp, Homo Sapiens; identical to SEQ ID NO: 8713

SEQ ID NO: 34114 - DNA, 31 bp, Homo Sapiens; identical to SEQ ID NO: 8714

SEQ ID NO: 34115 - DNA, 32 bp, Homo Sapiens; identical to SEQ ID NO: 8715

SEQ ID NO: 34116 - DNA, 33 bp, Homo Sapiens; identical to SEQ ID NO: 8716

SEQ ID NO: 34117 - DNA, 37 bp, Homo Sapiens
cagagtggcgcagcggaagcgtgctgggcccataacc

SEQ ID NO: 34118 - DNA, 38 bp, Homo Sapiens; identical to SEQ ID NO: 8718

SEQ ID NO: 34119 - DNA, 40 bp, Homo Sapiens; identical to SEQ ID NO: 8719

SEQ ID NO: 34120 - DNA, 47 bp, Homo Sapiens; identical to SEQ ID NO: 8720

SEQ ID NO: 34121 - DNA, 23 bp, Homo Sapiens
cagagtggggttttgcagtcctt

SEQ ID NO: 34122 - DNA, 26 bp, Homo Sapiens
cagagtggggttttgcagtccttacc

SEQ ID NO: 34123 - DNA, 27 bp, Homo Sapiens
cagagtggggttttgcagtccttacca

SEQ ID NO: 34124 - DNA, 16 bp, Homo Sapiens
cagagtgtagcttaac

SEQ ID NO: 34125 - DNA, 26 bp, Homo Sapiens
cagagtgtagcttaacacaaagcacc

SEQ ID NO: 34126 - DNA, 27 bp, Homo Sapiens
cagagtgtagcttaacacaaagcaccc

SEQ ID NO: 34127 - DNA, 28 bp, Homo Sapiens
cagagtgtagcttaacacaaagcaccca

SEQ ID NO: 34128 - DNA, 29 bp, Homo Sapiens
cagagtgtagcttaacacaaagcacccaa

SEQ ID NO: 34129 - DNA, 30 bp, Homo Sapiens; identical to SEQ ID NO: 8746

SEQ ID NO: 34130 - DNA, 31 bp, Homo Sapiens; identical to SEQ ID NO: 8747

SEQ ID NO: 34131 - DNA, 35 bp, Homo Sapiens; identical to SEQ ID NO: 8751

SEQ ID NO: 34132 - DNA, 36 bp, Homo Sapiens; identical to SEQ ID NO: 8752

SEQ ID NO: 34133 - DNA, 37 bp, Homo Sapiens; identical to SEQ ID NO: 8753

SEQ ID NO: 34134 - DNA, 38 bp, Homo Sapiens; identical to SEQ ID NO: 8754

SEQ ID NO: 34135 - DNA, 39 bp, Homo Sapiens; identical to SEQ ID NO: 8755

SEQ ID NO: 34136 - DNA, 41 bp, Homo Sapiens; identical to SEQ ID NO: 8757

SEQ ID NO: 34137 - DNA, 42 bp, Homo Sapiens; identical to SEQ ID NO: 8758

SEQ ID NO: 34138 - DNA, 43 bp, Homo Sapiens; identical to SEQ ID NO: 8759

SEQ ID NO: 34139 - DNA, 44 bp, Homo Sapiens; identical to SEQ ID NO: 8760

SEQ ID NO: 34140 - DNA, 45 bp, Homo Sapiens; identical to SEQ ID NO: 8761

SEQ ID NO: 34141 - DNA, 47 bp, Homo Sapiens; identical to SEQ ID NO: 8763

SEQ ID NO: 34142 - DNA, 22 bp, Homo Sapiens
cagatcagaaggctgcgtgttc

SEQ ID NO: 34143 - DNA, 41 bp, Homo Sapiens; identical to SEQ ID NO: 8767

SEQ ID NO: 34144 - DNA, 16 bp, Homo Sapiens
cagatcagaaggttgc

SEQ ID NO: 34145 - DNA, 17 bp, Homo Sapiens
cagattgtgaatctgac

SEQ ID NO: 34146 - DNA, 26 bp, Homo Sapiens
cagattgtgaatctgacaacagaggc

SEQ ID NO: 34147 - DNA, 27 bp, Homo Sapiens
cagattgtgaatctgacaacagaggct

SEQ ID NO: 34148 - DNA, 28 bp, Homo Sapiens
cagattgtgaatctgacaacagaggctt

SEQ ID NO: 34149 - DNA, 30 bp, Homo Sapiens; identical to SEQ ID NO: 8783

SEQ ID NO: 34150 - DNA, 33 bp, Homo Sapiens; identical to SEQ ID NO: 8786

SEQ ID NO: 34151 - DNA, 34 bp, Homo Sapiens; identical to SEQ ID NO: 8787

SEQ ID NO: 34152 - DNA, 35 bp, Homo Sapiens; identical to SEQ ID NO: 8788

SEQ ID NO: 34153 - DNA, 36 bp, Homo Sapiens; identical to SEQ ID NO: 8789

SEQ ID NO: 34154 - DNA, 37 bp, Homo Sapiens; identical to SEQ ID NO: 8790

SEQ ID NO: 34155 - DNA, 40 bp, Homo Sapiens; identical to SEQ ID NO: 8793

SEQ ID NO: 34156 - DNA, 44 bp, Homo Sapiens; identical to SEQ ID NO: 8797

SEQ ID NO: 34157 - DNA, 45 bp, Homo Sapiens; identical to SEQ ID NO: 8798

SEQ ID NO: 34158 - DNA, 46 bp, Homo Sapiens; identical to SEQ ID NO: 8799

SEQ ID NO: 34159 - DNA, 47 bp, Homo Sapiens; identical to SEQ ID NO: 8800

SEQ ID NO: 34160 - DNA, 16 bp, Homo Sapiens
cagcaacctcggttcg

SEQ ID NO: 34161 - DNA, 31 bp, Homo Sapiens; identical to SEQ ID NO: 8805

SEQ ID NO: 34162 - DNA, 32 bp, Homo Sapiens; identical to SEQ ID NO: 8806

SEQ ID NO: 34163 - DNA, 33 bp, Homo Sapiens; identical to SEQ ID NO: 8807

SEQ ID NO: 34164 - DNA, 34 bp, Homo Sapiens; identical to SEQ ID NO: 8808

SEQ ID NO: 34165 - DNA, 35 bp, Homo Sapiens; identical to SEQ ID NO: 8809

SEQ ID NO: 34166 - DNA, 31 bp, Homo Sapiens; identical to SEQ ID NO: 8811

SEQ ID NO: 34167 - DNA, 32 bp, Homo Sapiens; identical to SEQ ID NO: 8812

SEQ ID NO: 34168 - DNA, 33 bp, Homo Sapiens; identical to SEQ ID NO: 8819

SEQ ID NO: 34169 - DNA, 32 bp, Homo Sapiens; identical to SEQ ID NO: 8821

SEQ ID NO: 34170 - DNA, 23 bp, Homo Sapiens
cagcctccggagctggggattgt

SEQ ID NO: 34171 - DNA, 16 bp, Homo Sapiens
cagcgatccgagttca

SEQ ID NO: 34172 - DNA, 31 bp, Homo Sapiens; identical to SEQ ID NO: 8830

SEQ ID NO: 34173 - DNA, 32 bp, Homo Sapiens; identical to SEQ ID NO: 8831

SEQ ID NO: 34174 - DNA, 33 bp, Homo Sapiens; identical to SEQ ID NO: 8832

SEQ ID NO: 34175 - DNA, 34 bp, Homo Sapiens; identical to SEQ ID NO: 8833

SEQ ID NO: 34176 - DNA, 30 bp, Homo Sapiens; identical to SEQ ID NO: 8835

SEQ ID NO: 34177 - DNA, 31 bp, Homo Sapiens; identical to SEQ ID NO: 8836

SEQ ID NO: 34178 - DNA, 32 bp, Homo Sapiens; identical to SEQ ID NO: 8837

SEQ ID NO: 34179 - DNA, 33 bp, Homo Sapiens; identical to SEQ ID NO: 8838

SEQ ID NO: 34180 - DNA, 33 bp, Homo Sapiens
cagcgatccgagttcaagtctcggtggaacctc

SEQ ID NO: 34181 - DNA, 33 bp, Homo Sapiens; identical to SEQ ID NO: 8846

SEQ ID NO: 34182 - DNA, 17 bp, Homo Sapiens
cagcgatggccgagtgg

SEQ ID NO: 34183 - DNA, 18 bp, Homo Sapiens
cagcggaagcgtgctggg

SEQ ID NO: 34184 - DNA, 19 bp, Homo Sapiens
cagcggaagcgtgctgggc

SEQ ID NO: 34185 - DNA, 20 bp, Homo Sapiens
cagcggaagcgtgctgggcc

SEQ ID NO: 34186 - DNA, 21 bp, Homo Sapiens
cagcggaagcgtgctgggccc

SEQ ID NO: 34187 - DNA, 22 bp, Homo Sapiens
cagcggaagcgtgctgggccca

SEQ ID NO: 34188 - DNA, 28 bp, Homo Sapiens
cagcggaagcgtgctgggcccataaccc

SEQ ID NO: 34189 - DNA, 20 bp, Homo Sapiens
cagctaaataagctatcggg

SEQ ID NO: 34190 - DNA, 24 bp, Homo Sapiens
cagctaaataagctatcgggccca

SEQ ID NO: 34191 - DNA, 30 bp, Homo Sapiens; identical to SEQ ID NO: 8885

SEQ ID NO: 34192 - DNA, 16 bp, Homo Sapiens
cagctatccattggtc

SEQ ID NO: 34193 - DNA, 17 bp, Homo Sapiens
cagctatccattggtct

SEQ ID NO: 34194 - DNA, 20 bp, Homo Sapiens
cagcttcaaacctgccgggg

SEQ ID NO: 34195 - DNA, 21 bp, Homo Sapiens
cagcttcaaacctgccggggc

SEQ ID NO: 34196 - DNA, 22 bp, Homo Sapiens
cagcttcaaacctgccggggct

SEQ ID NO: 34197 - DNA, 23 bp, Homo Sapiens
cagcttcaaacctgccggggctt

SEQ ID NO: 34198 - DNA, 34 bp, Homo Sapiens; identical to SEQ ID NO: 8925

SEQ ID NO: 34199 - DNA, 35 bp, Homo Sapiens; identical to SEQ ID NO: 8926

SEQ ID NO: 34200 - DNA, 17 bp, Homo Sapiens
caggagatcctgggttc

SEQ ID NO: 34201 - DNA, 18 bp, Homo Sapiens
caggagatcctgggttcg

SEQ ID NO: 34202 - DNA, 34 bp, Homo Sapiens; identical to SEQ ID NO: 8933

SEQ ID NO: 34203 - DNA, 29 bp, Homo Sapiens
caggagatcctgggttcgaatcccagcgg

SEQ ID NO: 34204 - DNA, 31 bp, Homo Sapiens; identical to SEQ ID NO: 8938

SEQ ID NO: 34205 - DNA, 32 bp, Homo Sapiens; identical to SEQ ID NO: 8939

SEQ ID NO: 34206 - DNA, 33 bp, Homo Sapiens; identical to SEQ ID NO: 8940

SEQ ID NO: 34207 - DNA, 34 bp, Homo Sapiens; identical to SEQ ID NO: 8941

SEQ ID NO: 34208 - DNA, 35 bp, Homo Sapiens; identical to SEQ ID NO: 8942

SEQ ID NO: 34209 - DNA, 36 bp, Homo Sapiens; identical to SEQ ID NO: 8943

SEQ ID NO: 34210 - DNA, 37 bp, Homo Sapiens; identical to SEQ ID NO: 8944

SEQ ID NO: 34211 - DNA, 31 bp, Homo Sapiens; identical to SEQ ID NO: 8946

SEQ ID NO: 34212 - DNA, 32 bp, Homo Sapiens; identical to SEQ ID NO: 8947

SEQ ID NO: 34213 - DNA, 33 bp, Homo Sapiens; identical to SEQ ID NO: 8948

SEQ ID NO: 34214 - DNA, 34 bp, Homo Sapiens; identical to SEQ ID NO: 8949

SEQ ID NO: 34215 - DNA, 35 bp, Homo Sapiens; identical to SEQ ID NO: 8950

SEQ ID NO: 34216 - DNA, 36 bp, Homo Sapiens; identical to SEQ ID NO: 8951

SEQ ID NO: 34217 - DNA, 37 bp, Homo Sapiens; identical to SEQ ID NO: 8952

SEQ ID NO: 34218 - DNA, 34 bp, Homo Sapiens; identical to SEQ ID NO: 8953

SEQ ID NO: 34219 - DNA, 35 bp, Homo Sapiens; identical to SEQ ID NO: 8954

SEQ ID NO: 34220 - DNA, 36 bp, Homo Sapiens; identical to SEQ ID NO: 8955

SEQ ID NO: 34221 - DNA, 16 bp, Homo Sapiens
caggatggccgagcgg

SEQ ID NO: 34222 - DNA, 20 bp, Homo Sapiens
caggatggccgagcggtcta

SEQ ID NO: 34223 - DNA, 22 bp, Homo Sapiens
caggatggccgagcggtctaag

SEQ ID NO: 34224 - DNA, 24 bp, Homo Sapiens
caggatggccgagcggtctaaggc

SEQ ID NO: 34225 - DNA, 22 bp, Homo Sapiens
caggatggccgagtggtctaag

SEQ ID NO: 34226 - DNA, 24 bp, Homo Sapiens
caggatggccgagtggtctaaggc

SEQ ID NO: 34227 - DNA, 23 bp, Homo Sapiens
caggatggccgagtggttaaggc

SEQ ID NO: 34228 - DNA, 21 bp, Homo Sapiens
caggcggcccgggttcgactc

SEQ ID NO: 34229 - DNA, 22 bp, Homo Sapiens
caggcggcccgggttcgactcc

SEQ ID NO: 34230 - DNA, 23 bp, Homo Sapiens
caggcggcccgggttcgactccc

SEQ ID NO: 34231 - DNA, 25 bp, Homo Sapiens
caggcggcccgggttcgactcccgg

SEQ ID NO: 34232 - DNA, 26 bp, Homo Sapiens
caggcggcccgggttcgactcccggt

SEQ ID NO: 34233 - DNA, 27 bp, Homo Sapiens
caggcggcccgggttcgactcccggtg

SEQ ID NO: 34234 - DNA, 28 bp, Homo Sapiens
caggcggcccgggttcgactcccggtgt

SEQ ID NO: 34235 - DNA, 29 bp, Homo Sapiens
caggcggcccgggttcgactcccggtgtg

SEQ ID NO: 34236 - DNA, 30 bp, Homo Sapiens; identical to SEQ ID NO: 9004

SEQ ID NO: 34237 - DNA, 31 bp, Homo Sapiens; identical to SEQ ID NO: 9005

SEQ ID NO: 34238 - DNA, 32 bp, Homo Sapiens; identical to SEQ ID NO: 9006

SEQ ID NO: 34239 - DNA, 33 bp, Homo Sapiens; identical to SEQ ID NO: 9007

SEQ ID NO: 34240 - DNA, 34 bp, Homo Sapiens; identical to SEQ ID NO: 9008

SEQ ID NO: 34241 - DNA, 35 bp, Homo Sapiens; identical to SEQ ID NO: 9009

SEQ ID NO: 34242 - DNA, 36 bp, Homo Sapiens; identical to SEQ ID NO: 9010

SEQ ID NO: 34243 - DNA, 26 bp, Homo Sapiens
cagggattgtgggttcgagtcccacc

SEQ ID NO: 34244 - DNA, 33 bp, Homo Sapiens; identical to SEQ ID NO: 9029

SEQ ID NO: 34245 - DNA, 34 bp, Homo Sapiens; identical to SEQ ID NO: 9030

SEQ ID NO: 34246 - DNA, 35 bp, Homo Sapiens; identical to SEQ ID NO: 9031

SEQ ID NO: 34247 - DNA, 33 bp, Homo Sapiens; identical to SEQ ID NO: 9045

SEQ ID NO: 34248 - DNA, 34 bp, Homo Sapiens; identical to SEQ ID NO: 9046

SEQ ID NO: 34249 - DNA, 35 bp, Homo Sapiens; identical to SEQ ID NO: 9047

SEQ ID NO: 34250 - DNA, 36 bp, Homo Sapiens; identical to SEQ ID NO: 9048

SEQ ID NO: 34251 - DNA, 20 bp, Homo Sapiens
caggggtagagcatttgact

SEQ ID NO: 34252 - DNA, 33 bp, Homo Sapiens; identical to SEQ ID NO: 9058

SEQ ID NO: 34253 - DNA, 34 bp, Homo Sapiens; identical to SEQ ID NO: 9059

SEQ ID NO: 34254 - DNA, 35 bp, Homo Sapiens; identical to SEQ ID NO: 9060

SEQ ID NO: 34255 - DNA, 34 bp, Homo Sapiens; identical to SEQ ID NO: 9064

SEQ ID NO: 34256 - DNA, 21 bp, Homo Sapiens
caggggttagagcactggtct

SEQ ID NO: 34257 - DNA, 29 bp, Homo Sapiens
caggggttagagcactggtcttgtaaacc

SEQ ID NO: 34258 - DNA, 26 bp, Homo Sapiens
caggggttaggcctctttttaccacc

SEQ ID NO: 34259 - DNA, 16 bp, Homo Sapiens
cagggtcgtgggttcg

SEQ ID NO: 34260 - DNA, 31 bp, Homo Sapiens; identical to SEQ ID NO: 9085

SEQ ID NO: 34261 - DNA, 32 bp, Homo Sapiens; identical to SEQ ID NO: 9086

SEQ ID NO: 34262 - DNA, 33 bp, Homo Sapiens; identical to SEQ ID NO: 9087

SEQ ID NO: 34263 - DNA, 34 bp, Homo Sapiens; identical to SEQ ID NO: 9088

SEQ ID NO: 34264 - DNA, 35 bp, Homo Sapiens; identical to SEQ ID NO: 9089

SEQ ID NO: 34265 - DNA, 24 bp, Homo Sapiens
cagggttcaagtccctgttcgggc

SEQ ID NO: 34266 - DNA, 25 bp, Homo Sapiens
cagggttcaagtccctgttcgggcg

SEQ ID NO: 34267 - DNA, 26 bp, Homo Sapiens
cagggttcaagtccctgttcgggcgc

SEQ ID NO: 34268 - DNA, 27 bp, Homo Sapiens
cagggttcaagtccctgttcgggcgcc

SEQ ID NO: 34269 - DNA, 28 bp, Homo Sapiens
cagggttcaagtccctgttcgggcgcca

SEQ ID NO: 34270 - DNA, 16 bp, Homo Sapiens
caggtcgcagtctccc

SEQ ID NO: 34271 - DNA, 27 bp, Homo Sapiens
caggtggcccgggttcgactcccggta

SEQ ID NO: 34272 - DNA, 29 bp, Homo Sapiens
caggtggcccgggttcgactcccggtatg

SEQ ID NO: 34273 - DNA, 30 bp, Homo Sapiens; identical to SEQ ID NO: 9098

SEQ ID NO: 34274 - DNA, 31 bp, Homo Sapiens; identical to SEQ ID NO: 9099

SEQ ID NO: 34275 - DNA, 32 bp, Homo Sapiens; identical to SEQ ID NO: 9100

SEQ ID NO: 34276 - DNA, 33 bp, Homo Sapiens; identical to SEQ ID NO: 9101

SEQ ID NO: 34277 - DNA, 34 bp, Homo Sapiens; identical to SEQ ID NO: 9102

SEQ ID NO: 34278 - DNA, 35 bp, Homo Sapiens; identical to SEQ ID NO: 9103

SEQ ID NO: 34279 - DNA, 26 bp, Homo Sapiens
caggttcgaaccctgctcgctgcgcc

SEQ ID NO: 34280 - DNA, 25 bp, Homo Sapiens
caggttcgaatcctgccgactacgc

SEQ ID NO: 34281 - DNA, 26 bp, Homo Sapiens
caggttcgaatcctgccgactacgcc

SEQ ID NO: 34282 - DNA, 26 bp, Homo Sapiens
caggttcgaatcctgctcacagcgcc

SEQ ID NO: 34283 - DNA, 24 bp, Homo Sapiens
caggttcgaatcctgttcgtgacg

SEQ ID NO: 34284 - DNA, 25 bp, Homo Sapiens
caggttcgaatcctgttcgtgacgc

SEQ ID NO: 34285 - DNA, 26 bp, Homo Sapiens
caggttcgaatcctgttcgtgacgcc

SEQ ID NO: 34286 - DNA, 26 bp, Homo Sapiens
caggttcgactcctggctggctcgcc

SEQ ID NO: 34287 - DNA, 25 bp, Homo Sapiens
caggttcgagtcctgccgcggtcgc

SEQ ID NO: 34288 - DNA, 26 bp, Homo Sapiens
caggttcgagtcctgccgcggtcgcc

SEQ ID NO: 34289 - DNA, 28 bp, Homo Sapiens
cagtaagttgcaatacttaatttctgcc

SEQ ID NO: 34290 - DNA, 29 bp, Homo Sapiens
cagtaagttgcaatacttaatttctgcca

SEQ ID NO: 34291 - DNA, 16 bp, Homo Sapiens
cagtagagcatcagac

SEQ ID NO: 34292 - DNA, 16 bp, Homo Sapiens
cagtcagtagagcatc

SEQ ID NO: 34293 - DNA, 42 bp, Homo Sapiens; identical to SEQ ID NO: 9150

SEQ ID NO: 34294 - DNA, 43 bp, Homo Sapiens; identical to SEQ ID NO: 9151

SEQ ID NO: 34295 - DNA, 16 bp, Homo Sapiens
cagtcggtagagcata

SEQ ID NO: 34296 - DNA, 20 bp, Homo Sapiens
cagtcggtagagcataagac

SEQ ID NO: 34297 - DNA, 16 bp, Homo Sapiens
cagtcggtagagcatc

SEQ ID NO: 34298 - DNA, 17 bp, Homo Sapiens
cagtcggtagagcatca

SEQ ID NO: 34299 - DNA, 18 bp, Homo Sapiens
cagtcggtagagcatcag

SEQ ID NO: 34300 - DNA, 19 bp, Homo Sapiens
cagtcggtagagcatcaga

SEQ ID NO: 34301 - DNA, 20 bp, Homo Sapiens
cagtcggtagagcatcagac

SEQ ID NO: 34302 - DNA, 21 bp, Homo Sapiens
cagtcggtagagcatcagact

SEQ ID NO: 34303 - DNA, 23 bp, Homo Sapiens
cagtcggtagagcatcagacttt

SEQ ID NO: 34304 - DNA, 24 bp, Homo Sapiens
cagtcggtagagcatcagactttt

SEQ ID NO: 34305 - DNA, 16 bp, Homo Sapiens
cagtcggtagagcatg

SEQ ID NO: 34306 - DNA, 17 bp, Homo Sapiens
cagtcggtagagcatga

SEQ ID NO: 34307 - DNA, 18 bp, Homo Sapiens
cagtcggtagagcatgag

SEQ ID NO: 34308 - DNA, 19 bp, Homo Sapiens
cagtcggtagagcatgaga

SEQ ID NO: 34309 - DNA, 20 bp, Homo Sapiens
cagtcggtagagcatgagac

SEQ ID NO: 34310 - DNA, 21 bp, Homo Sapiens
cagtcggtagagcatgagacc

SEQ ID NO: 34311 - DNA, 22 bp, Homo Sapiens
cagtcggtagagcatgagaccc

SEQ ID NO: 34312 - DNA, 27 bp, Homo Sapiens
cagtcggtagagcatgagacccttaat

SEQ ID NO: 34313 - DNA, 28 bp, Homo Sapiens
cagtcggtagagcatgagacccttaatc

SEQ ID NO: 34314 - DNA, 30 bp, Homo Sapiens; identical to SEQ ID NO: 9182

SEQ ID NO: 34315 - DNA, 21 bp, Homo Sapiens
cagtcggtagagcatgagact

SEQ ID NO: 34316 - DNA, 22 bp, Homo Sapiens
cagtcggtagagcatgagactc

SEQ ID NO: 34317 - DNA, 23 bp, Homo Sapiens
cagtcggtagagcatgagactct

SEQ ID NO: 34318 - DNA, 24 bp, Homo Sapiens
cagtcggtagagcatgagactctt

SEQ ID NO: 34319 - DNA, 26 bp, Homo Sapiens
cagtcggtagagcatgagactcttaa

SEQ ID NO: 34320 - DNA, 27 bp, Homo Sapiens
cagtcggtagagcatgagactcttaat

SEQ ID NO: 34321 - DNA, 28 bp, Homo Sapiens
cagtcggtagagcatgagactcttaatc

SEQ ID NO: 34322 - DNA, 29 bp, Homo Sapiens
cagtcggtagagcatgagactcttaatct

SEQ ID NO: 34323 - DNA, 30 bp, Homo Sapiens; identical to SEQ ID NO: 9193

SEQ ID NO: 34324 - DNA, 31 bp, Homo Sapiens; identical to SEQ ID NO: 9194

SEQ ID NO: 34325 - DNA, 37 bp, Homo Sapiens; identical to SEQ ID NO: 9195

SEQ ID NO: 34326 - DNA, 38 bp, Homo Sapiens; identical to SEQ ID NO: 9196

SEQ ID NO: 34327 - DNA, 39 bp, Homo Sapiens; identical to SEQ ID NO: 9197

SEQ ID NO: 34328 - DNA, 40 bp, Homo Sapiens; identical to SEQ ID NO: 9198

SEQ ID NO: 34329 - DNA, 41 bp, Homo Sapiens; identical to SEQ ID NO: 9199

SEQ ID NO: 34330 - DNA, 42 bp, Homo Sapiens; identical to SEQ ID NO: 9200

SEQ ID NO: 34331 - DNA, 43 bp, Homo Sapiens; identical to SEQ ID NO: 9201

SEQ ID NO: 34332 - DNA, 45 bp, Homo Sapiens; identical to SEQ ID NO: 9203

SEQ ID NO: 34333 - DNA, 17 bp, Homo Sapiens
cagtcggtagagcatgg

SEQ ID NO: 34334 - DNA, 18 bp, Homo Sapiens
cagtcggtagagcatggg

SEQ ID NO: 34335 - DNA, 19 bp, Homo Sapiens
cagtcggtagagcatggga

SEQ ID NO: 34336 - DNA, 20 bp, Homo Sapiens
cagtcggtagagcatgggac

SEQ ID NO: 34337 - DNA, 21 bp, Homo Sapiens
cagtcggtagagcatgggact

SEQ ID NO: 34338 - DNA, 22 bp, Homo Sapiens
cagtcggtagagcatgggactc

SEQ ID NO: 34339 - DNA, 23 bp, Homo Sapiens
cagtcggtagagcatgggactct

SEQ ID NO: 34340 - DNA, 24 bp, Homo Sapiens
cagtcggtagagcatgggactctt

SEQ ID NO: 34341 - DNA, 27 bp, Homo Sapiens
cagtcggtagagcatgggactcttaat

SEQ ID NO: 34342 - DNA, 28 bp, Homo Sapiens
cagtcggtagagcatgggactcttaatc

SEQ ID NO: 34343 - DNA, 29 bp, Homo Sapiens
cagtcggtagagcatgggactcttaatcc

SEQ ID NO: 34344 - DNA, 30 bp, Homo Sapiens; identical to SEQ ID NO: 9217

SEQ ID NO: 34345 - DNA, 31 bp, Homo Sapiens; identical to SEQ ID NO: 9218

SEQ ID NO: 34346 - DNA, 38 bp, Homo Sapiens; identical to SEQ ID NO: 9220

SEQ ID NO: 34347 - DNA, 39 bp, Homo Sapiens; identical to SEQ ID NO: 9221

SEQ ID NO: 34348 - DNA, 40 bp, Homo Sapiens; identical to SEQ ID NO: 9222

SEQ ID NO: 34349 - DNA, 43 bp, Homo Sapiens; identical to SEQ ID NO: 9225

SEQ ID NO: 34350 - DNA, 24 bp, Homo Sapiens
cagtctcataatctgaaggtcctg

SEQ ID NO: 34351 - DNA, 41 bp, Homo Sapiens
cagtctcttcggaggcgtgggttcgaatcccaccgctgcca

SEQ ID NO: 34352 - DNA, 42 bp, Homo Sapiens
cagtctcttcggaggcgtgggttcgaatcccaccgctgccac

SEQ ID NO: 34353 - DNA, 43 bp, Homo Sapiens; identical to SEQ ID NO: 9250

SEQ ID NO: 34354 - DNA, 41 bp, Homo Sapiens; identical to SEQ ID NO: 9259

SEQ ID NO: 34355 - DNA, 42 bp, Homo Sapiens; identical to SEQ ID NO: 9260

SEQ ID NO: 34356 - DNA, 43 bp, Homo Sapiens; identical to SEQ ID NO: 9261

SEQ ID NO: 34357 - DNA, 27 bp, Homo Sapiens
cagtggcctaatggataaggcatcagc

SEQ ID NO: 34358 - DNA, 29 bp, Homo Sapiens
cagtggcctaatggataaggcatcagcct

SEQ ID NO: 34359 - DNA, 16 bp, Homo Sapiens
cagtgggtagagcatc

SEQ ID NO: 34360 - DNA, 16 bp, Homo Sapiens
cagtggtagaattctc

SEQ ID NO: 34361 - DNA, 17 bp, Homo Sapiens
cagtggtagaattctcg

SEQ ID NO: 34362 - DNA, 18 bp, Homo Sapiens
cagtggtagaattctcgc

SEQ ID NO: 34363 - DNA, 19 bp, Homo Sapiens
cagtggtagaattctcgcc

SEQ ID NO: 34364 - DNA, 20 bp, Homo Sapiens
cagtggtagaattctcgcct

SEQ ID NO: 34365 - DNA, 24 bp, Homo Sapiens
cagtggtagaattctcgcctccca

SEQ ID NO: 34366 - DNA, 21 bp, Homo Sapiens
cagtggtagaattctcgcctg

SEQ ID NO: 34367 - DNA, 22 bp, Homo Sapiens
cagtggtagaattctcgcctgc

SEQ ID NO: 34368 - DNA, 23 bp, Homo Sapiens
cagtggtagaattctcgcctgcc

SEQ ID NO: 34369 - DNA, 24 bp, Homo Sapiens
cagtggtagaattctcgcctgcca

SEQ ID NO: 34370 - DNA, 25 bp, Homo Sapiens
cagtggtagaattctcgcctgccac

SEQ ID NO: 34371 - DNA, 26 bp, Homo Sapiens
cagtggtagaattctcgcctgccacg

SEQ ID NO: 34372 - DNA, 31 bp, Homo Sapiens; identical to SEQ ID NO: 9295

SEQ ID NO: 34373 - DNA, 34 bp, Homo Sapiens; identical to SEQ ID NO: 9297

SEQ ID NO: 34374 - DNA, 35 bp, Homo Sapiens; identical to SEQ ID NO: 9298

SEQ ID NO: 34375 - DNA, 36 bp, Homo Sapiens; identical to SEQ ID NO: 9299

SEQ ID NO: 34376 - DNA, 39 bp, Homo Sapiens; identical to SEQ ID NO: 9301

SEQ ID NO: 34377 - DNA, 40 bp, Homo Sapiens; identical to SEQ ID NO: 9302

SEQ ID NO: 34378 - DNA, 21 bp, Homo Sapiens
cagtggtagaattctcgcctt

SEQ ID NO: 34379 - DNA, 20 bp, Homo Sapiens
cagtggtagagcatttgact

SEQ ID NO: 34380 - DNA, 22 bp, Homo Sapiens
cagtggtagagcatttgactgc

SEQ ID NO: 34381 - DNA, 30 bp, Homo Sapiens; identical to SEQ ID NO: 9313

SEQ ID NO: 34382 - DNA, 16 bp, Homo Sapiens
cagtggtagagcgcat

SEQ ID NO: 34383 - DNA, 18 bp, Homo Sapiens
cagtggtagagcgcatgc

SEQ ID NO: 34384 - DNA, 19 bp, Homo Sapiens
cagtggtagagcgcatgct

SEQ ID NO: 34385 - DNA, 20 bp, Homo Sapiens
cagtggtagagcgcatgctt

SEQ ID NO: 34386 - DNA, 18 bp, Homo Sapiens
cagtggtagagcgcgtgc

SEQ ID NO: 34387 - DNA, 20 bp, Homo Sapiens
cagtggtagagcgcgtgctt

SEQ ID NO: 34388 - DNA, 16 bp, Homo Sapiens
cagttgacccgggttc

SEQ ID NO: 34389 - DNA, 17 bp, Homo Sapiens
cagttgacccgggttcg

SEQ ID NO: 34390 - DNA, 26 bp, Homo Sapiens
cagttgacccgggttcgattcccggc

SEQ ID NO: 34391 - DNA, 29 bp, Homo Sapiens
cagttgacccgggttcgattcccggccaa

SEQ ID NO: 34392 - DNA, 35 bp, Homo Sapiens; identical to SEQ ID NO: 9330

SEQ ID NO: 34393 - DNA, 35 bp, Homo Sapiens; identical to SEQ ID NO: 9344

SEQ ID NO: 34394 - DNA, 36 bp, Homo Sapiens; identical to SEQ ID NO: 9345

SEQ ID NO: 34395 - DNA, 16 bp, Homo Sapiens
cagttggtagagcatc

SEQ ID NO: 34396 - DNA, 22 bp, Homo Sapiens
cataacccagaggtcgatggat

SEQ ID NO: 34397 - DNA, 23 bp, Homo Sapiens
cataacccagaggtcgatggatc

SEQ ID NO: 34398 - DNA, 24 bp, Homo Sapiens
cataacccagaggtcgatggatcg

SEQ ID NO: 34399 - DNA, 30 bp, Homo Sapiens; identical to SEQ ID NO: 9394

SEQ ID NO: 34400 - DNA, 16 bp, Homo Sapiens
cataatctgaaggtcc

SEQ ID NO: 34401 - DNA, 17 bp, Homo Sapiens
cataatctgaaggtcct

SEQ ID NO: 34402 - DNA, 18 bp, Homo Sapiens
cataatctgaaggtcctg

SEQ ID NO: 34403 - DNA, 19 bp, Homo Sapiens
cataatctgaaggtcctga

SEQ ID NO: 34404 - DNA, 21 bp, Homo Sapiens
cataatctgaaggtcctgagt

SEQ ID NO: 34405 - DNA, 23 bp, Homo Sapiens
cataatctgaaggtcctgagttc

SEQ ID NO: 34406 - DNA, 24 bp, Homo Sapiens
cataatctgaaggtcctgagttcg

SEQ ID NO: 34407 - DNA, 41 bp, Homo Sapiens; identical to SEQ ID NO: 9414

SEQ ID NO: 34408 - DNA, 42 bp, Homo Sapiens; identical to SEQ ID NO: 9415

SEQ ID NO: 34409 - DNA, 43 bp, Homo Sapiens; identical to SEQ ID NO: 9416

SEQ ID NO: 34410 - DNA, 16 bp, Homo Sapiens
cataatctgaaggtcg

SEQ ID NO: 34411 - DNA, 18 bp, Homo Sapiens
cataatctgaaggtcgtg

SEQ ID NO: 34412 - DNA, 23 bp, Homo Sapiens
cataatctgaaggtcgtgagttc

SEQ ID NO: 34413 - DNA, 24 bp, Homo Sapiens
cataatctgaaggtcgtgagttcg

SEQ ID NO: 34414 - DNA, 40 bp, Homo Sapiens; identical to SEQ ID NO: 9429

SEQ ID NO: 34415 - DNA, 41 bp, Homo Sapiens; identical to SEQ ID NO: 9430

SEQ ID NO: 34416 - DNA, 42 bp, Homo Sapiens; identical to SEQ ID NO: 9431

SEQ ID NO: 34417 - DNA, 41 bp, Homo Sapiens; identical to SEQ ID NO: 9434

SEQ ID NO: 34418 - DNA, 42 bp, Homo Sapiens; identical to SEQ ID NO: 9435

SEQ ID NO: 34419 - DNA, 41 bp, Homo Sapiens; identical to SEQ ID NO: 9443

SEQ ID NO: 34420 - DNA, 27 bp, Homo Sapiens
catagtgtagtggttatcacgtctgct

SEQ ID NO: 34421 - DNA, 28 bp, Homo Sapiens
catagtgtagtggttatcacgtctgctt

SEQ ID NO: 34422 - DNA, 29 bp, Homo Sapiens
catatcattggtcgtggttgtagtccgtg

SEQ ID NO: 34423 - DNA, 31 bp, Homo Sapiens; identical to SEQ ID NO: 9467

SEQ ID NO: 34424 - DNA, 32 bp, Homo Sapiens; identical to SEQ ID NO: 9468

SEQ ID NO: 34425 - DNA, 34 bp, Homo Sapiens; identical to SEQ ID NO: 9470

SEQ ID NO: 34426 - DNA, 35 bp, Homo Sapiens; identical to SEQ ID NO: 9471

SEQ ID NO: 34427 - DNA, 36 bp, Homo Sapiens; identical to SEQ ID NO: 9472

SEQ ID NO: 34428 - DNA, 37 bp, Homo Sapiens; identical to SEQ ID NO: 9473

SEQ ID NO: 34429 - DNA, 39 bp, Homo Sapiens; identical to SEQ ID NO: 9475

SEQ ID NO: 34430 - DNA, 40 bp, Homo Sapiens; identical to SEQ ID NO: 9476

SEQ ID NO: 34431 - DNA, 25 bp, Homo Sapiens
catatggtctagcggttaggattcc

SEQ ID NO: 34432 - DNA, 26 bp, Homo Sapiens
catatggtctagcggttaggattcct

SEQ ID NO: 34433 - DNA, 29 bp, Homo Sapiens
catatggtctagcggttaggattcctggt

SEQ ID NO: 34434 - DNA, 30 bp, Homo Sapiens; identical to SEQ ID NO: 9484

SEQ ID NO: 34435 - DNA, 31 bp, Homo Sapiens; identical to SEQ ID NO: 9485

SEQ ID NO: 34436 - DNA, 32 bp, Homo Sapiens; identical to SEQ ID NO: 9486

SEQ ID NO: 34437 - DNA, 33 bp, Homo Sapiens; identical to SEQ ID NO: 9487

SEQ ID NO: 34438 - DNA, 37 bp, Homo Sapiens; identical to SEQ ID NO: 9491

SEQ ID NO: 34439 - DNA, 18 bp, Homo Sapiens
catatgtccgcgtgggtt

SEQ ID NO: 34440 - DNA, 18 bp, Homo Sapiens
catcaccccataaacacc

SEQ ID NO: 34441 - DNA, 16 bp, Homo Sapiens
catcagattgtgaatc

SEQ ID NO: 34442 - DNA, 29 bp, Homo Sapiens
catcagattgtgaatctgacaacagaggc

SEQ ID NO: 34443 - DNA, 30 bp, Homo Sapiens; identical to SEQ ID NO: 9532

SEQ ID NO: 34444 - DNA, 31 bp, Homo Sapiens; identical to SEQ ID NO: 9533

SEQ ID NO: 34445 - DNA, 36 bp, Homo Sapiens; identical to SEQ ID NO: 9538

SEQ ID NO: 34446 - DNA, 37 bp, Homo Sapiens; identical to SEQ ID NO: 9539

SEQ ID NO: 34447 - DNA, 26 bp, Homo Sapiens
catcagcctccggagctggggattgt

SEQ ID NO: 34448 - DNA, 16 bp, Homo Sapiens
catgagactcttaatc

SEQ ID NO: 34449 - DNA, 17 bp, Homo Sapiens
catgagactcttaatct

SEQ ID NO: 34450 - DNA, 33 bp, Homo Sapiens; identical to SEQ ID NO: 9557

SEQ ID NO: 34451 - DNA, 34 bp, Homo Sapiens
catgaggtcccgggttcgatccccagcatctcca

SEQ ID NO: 34452 - DNA, 35 bp, Homo Sapiens; identical to SEQ ID NO: 9558

SEQ ID NO: 34453 - DNA, 36 bp, Homo Sapiens; identical to SEQ ID NO: 9559

SEQ ID NO: 34454 - DNA, 31 bp, Homo Sapiens; identical to SEQ ID NO: 9565

SEQ ID NO: 34455 - DNA, 26 bp, Homo Sapiens
catgcccccatgtctaacaacatggc

SEQ ID NO: 34456 - DNA, 27 bp, Homo Sapiens
catgcccccatgtctaacaacatggct

SEQ ID NO: 34457 - DNA, 28 bp, Homo Sapiens
catgcccccatgtctaacaacatggctt

SEQ ID NO: 34458 - DNA, 31 bp, Homo Sapiens; identical to SEQ ID NO: 9580

SEQ ID NO: 34459 - DNA, 33 bp, Homo Sapiens; identical to SEQ ID NO: 9582

SEQ ID NO: 34460 - DNA, 35 bp, Homo Sapiens; identical to SEQ ID NO: 9584

SEQ ID NO: 34461 - DNA, 36 bp, Homo Sapiens; identical to SEQ ID NO: 9585

SEQ ID NO: 34462 - DNA, 34 bp, Homo Sapiens; identical to SEQ ID NO: 9592

SEQ ID NO: 34463 - DNA, 36 bp, Homo Sapiens; identical to SEQ ID NO: 9593

SEQ ID NO: 34464 - DNA, 16 bp, Homo Sapiens
catggctttctcacca

SEQ ID NO: 34465 - DNA, 16 bp, Homo Sapiens
catgggactcttaatc

SEQ ID NO: 34466 - DNA, 17 bp, Homo Sapiens
catgggactcttaatcc

SEQ ID NO: 34467 - DNA, 17 bp, Homo Sapiens
catgggactcttcatcc

SEQ ID NO: 34468 - DNA, 16 bp, Homo Sapiens
catgggtggttcagtg

SEQ ID NO: 34469 - DNA, 17 bp, Homo Sapiens
catgggtggttcagtgg

SEQ ID NO: 34470 - DNA, 19 bp, Homo Sapiens
catgggtggttcagtggta

SEQ ID NO: 34471 - DNA, 28 bp, Homo Sapiens
catgggtggttcagtggtagaattctcg

SEQ ID NO: 34472 - DNA, 29 bp, Homo Sapiens
catgggtggttcagtggtagaattctcgc

SEQ ID NO: 34473 - DNA, 30 bp, Homo Sapiens; identical to SEQ ID NO: 9620

SEQ ID NO: 34474 - DNA, 31 bp, Homo Sapiens; identical to SEQ ID NO: 9621

SEQ ID NO: 34475 - DNA, 32 bp, Homo Sapiens; identical to SEQ ID NO: 9622

SEQ ID NO: 34476 - DNA, 33 bp, Homo Sapiens; identical to SEQ ID NO: 9623

SEQ ID NO: 34477 - DNA, 34 bp, Homo Sapiens; identical to SEQ ID NO: 9624

SEQ ID NO: 34478 - DNA, 21 bp, Homo Sapiens
catggtctagcggttaggatt

SEQ ID NO: 34479 - DNA, 23 bp, Homo Sapiens
catggtctagcggttaggattcc

SEQ ID NO: 34480 - DNA, 24 bp, Homo Sapiens
catggtctagcggttaggattcct

SEQ ID NO: 34481 - DNA, 25 bp, Homo Sapiens
catggtctagcggttaggattcctg

SEQ ID NO: 34482 - DNA, 26 bp, Homo Sapiens
catggtctagcggttaggattcctgg

SEQ ID NO: 34483 - DNA, 27 bp, Homo Sapiens
catggtctagcggttaggattcctggt

SEQ ID NO: 34484 - DNA, 28 bp, Homo Sapiens
catggtctagcggttaggattcctggtt

SEQ ID NO: 34485 - DNA, 29 bp, Homo Sapiens
catggtctagcggttaggattcctggttt

SEQ ID NO: 34486 - DNA, 30 bp, Homo Sapiens; identical to SEQ ID NO: 9642

SEQ ID NO: 34487 - DNA, 31 bp, Homo Sapiens; identical to SEQ ID NO: 9643

SEQ ID NO: 34488 - DNA, 32 bp, Homo Sapiens; identical to SEQ ID NO: 9644

SEQ ID NO: 34489 - DNA, 35 bp, Homo Sapiens
catggtctagcggttaggattcctggttttcaccc

SEQ ID NO: 34490 - DNA, 36 bp, Homo Sapiens
catggtctagcggttaggattcctggttttcaccca

SEQ ID NO: 34491 - DNA, 37 bp, Homo Sapiens
catggtctagcggttaggattcctggttttcacccag

SEQ ID NO: 34492 - DNA, 29 bp, Homo Sapiens
catggtgtaatggtgagcactctggactc

SEQ ID NO: 34493 - DNA, 31 bp, Homo Sapiens; identical to SEQ ID NO: 9649

SEQ ID NO: 34494 - DNA, 26 bp, Homo Sapiens
catggtgtaatggttagcactctgga

SEQ ID NO: 34495 - DNA, 28 bp, Homo Sapiens
catggtgtaatggttagcactctggact

SEQ ID NO: 34496 - DNA, 29 bp, Homo Sapiens
catggtgtaatggttagcactctggactc

SEQ ID NO: 34497 - DNA, 30 bp, Homo Sapiens; identical to SEQ ID NO: 9655

SEQ ID NO: 34498 - DNA, 31 bp, Homo Sapiens; identical to SEQ ID NO: 9656

SEQ ID NO: 34499 - DNA, 36 bp, Homo Sapiens
catggtgtaatggttagcactctggactctgaatcc

SEQ ID NO: 34500 - DNA, 31 bp, Homo Sapiens; identical to SEQ ID NO: 9659

SEQ ID NO: 34501 - DNA, 18 bp, Homo Sapiens
cattcaaaaaagagtacc

SEQ ID NO: 34502 - DNA, 19 bp, Homo Sapiens
cattcaaaaaagagtacca

SEQ ID NO: 34503 - DNA, 16 bp, Homo Sapiens
cattcggctgttaacc

SEQ ID NO: 34504 - DNA, 16 bp, Homo Sapiens
cattcttgcgacccgg

SEQ ID NO: 34505 - DNA, 17 bp, Homo Sapiens
cattcttgcgacccggg

SEQ ID NO: 34506 - DNA, 18 bp, Homo Sapiens
cattcttgcgacccgggt

SEQ ID NO: 34507 - DNA, 19 bp, Homo Sapiens
cattcttgcgacccgggtt

SEQ ID NO: 34508 - DNA, 22 bp, Homo Sapiens
cattcttgcgacccgggttcga

SEQ ID NO: 34509 - DNA, 23 bp, Homo Sapiens
cattcttgcgacccgggttcgat

SEQ ID NO: 34510 - DNA, 39 bp, Homo Sapiens; identical to SEQ ID NO: 9713

SEQ ID NO: 34511 - DNA, 40 bp, Homo Sapiens; identical to SEQ ID NO: 9714

SEQ ID NO: 34512 - DNA, 37 bp, Homo Sapiens; identical to SEQ ID NO: 9726

SEQ ID NO: 34513 - DNA, 22 bp, Homo Sapiens
cattggggtttccccgcgcagg

SEQ ID NO: 34514 - DNA, 23 bp, Homo Sapiens
cattggggtttccccgcgcaggt

SEQ ID NO: 34515 - DNA, 24 bp, Homo Sapiens
cattggggtttccccgcgcaggtt

SEQ ID NO: 34516 - DNA, 44 bp, Homo Sapiens; identical to SEQ ID NO: 9748

SEQ ID NO: 34517 - DNA, 16 bp, Homo Sapiens
cattggtcgtggttgt

SEQ ID NO: 34518 - DNA, 19 bp, Homo Sapiens
cattggtcgtggttgtagt

SEQ ID NO: 34519 - DNA, 20 bp, Homo Sapiens
cattggtcgtggttgtagtc

SEQ ID NO: 34520 - DNA, 21 bp, Homo Sapiens
cattggtcgtggttgtagtcc

SEQ ID NO: 34521 - DNA, 24 bp, Homo Sapiens
cattggtcgtggttgtagtccgtg

SEQ ID NO: 34522 - DNA, 25 bp, Homo Sapiens
cattggtcgtggttgtagtccgtgc

SEQ ID NO: 34523 - DNA, 26 bp, Homo Sapiens
cattggtcgtggttgtagtccgtgcg

SEQ ID NO: 34524 - DNA, 28 bp, Homo Sapiens
cattggtcgtggttgtagtccgtgcgag

SEQ ID NO: 34525 - DNA, 29 bp, Homo Sapiens
cattggtcgtggttgtagtccgtgcgaga

SEQ ID NO: 34526 - DNA, 30 bp, Homo Sapiens; identical to SEQ ID NO: 9763

SEQ ID NO: 34527 - DNA, 31 bp, Homo Sapiens; identical to SEQ ID NO: 9764

SEQ ID NO: 34528 - DNA, 32 bp, Homo Sapiens; identical to SEQ ID NO: 9765

SEQ ID NO: 34529 - DNA, 33 bp, Homo Sapiens; identical to SEQ ID NO: 9766

SEQ ID NO: 34530 - DNA, 34 bp, Homo Sapiens; identical to SEQ ID NO: 9767

SEQ ID NO: 34531 - DNA, 35 bp, Homo Sapiens; identical to SEQ ID NO: 9768

SEQ ID NO: 34532 - DNA, 16 bp, Homo Sapiens
cattggtggttcagtg

SEQ ID NO: 34533 - DNA, 17 bp, Homo Sapiens
cattggtggttcagtgg

SEQ ID NO: 34534 - DNA, 19 bp, Homo Sapiens
cattggtggttcagtggta

SEQ ID NO: 34535 - DNA, 20 bp, Homo Sapiens
cattggtggttcagtggtag

SEQ ID NO: 34536 - DNA, 21 bp, Homo Sapiens
cattggtggttcagtggtaga

SEQ ID NO: 34537 - DNA, 22 bp, Homo Sapiens
cattggtggttcagtggtagaa

SEQ ID NO: 34538 - DNA, 24 bp, Homo Sapiens
cattggtggttcagtggtagaatt

SEQ ID NO: 34539 - DNA, 25 bp, Homo Sapiens
cattggtggttcagtggtagaattc

SEQ ID NO: 34540 - DNA, 26 bp, Homo Sapiens
cattggtggttcagtggtagaattct

SEQ ID NO: 34541 - DNA, 27 bp, Homo Sapiens
cattggtggttcagtggtagaattctc

SEQ ID NO: 34542 - DNA, 28 bp, Homo Sapiens
cattggtggttcagtggtagaattctcg

SEQ ID NO: 34543 - DNA, 29 bp, Homo Sapiens
cattggtggttcagtggtagaattctcgc

SEQ ID NO: 34544 - DNA, 30 bp, Homo Sapiens; identical to SEQ ID NO: 9797

SEQ ID NO: 34545 - DNA, 31 bp, Homo Sapiens; identical to SEQ ID NO: 9798

SEQ ID NO: 34546 - DNA, 32 bp, Homo Sapiens; identical to SEQ ID NO: 9804

SEQ ID NO: 34547 - DNA, 33 bp, Homo Sapiens; identical to SEQ ID NO: 9805

SEQ ID NO: 34548 - DNA, 34 bp, Homo Sapiens; identical to SEQ ID NO: 9806

SEQ ID NO: 34549 - DNA, 35 bp, Homo Sapiens; identical to SEQ ID NO: 9807

SEQ ID NO: 34550 - DNA, 36 bp, Homo Sapiens; identical to SEQ ID NO: 9808

SEQ ID NO: 34551 - DNA, 37 bp, Homo Sapiens; identical to SEQ ID NO: 9809

SEQ ID NO: 34552 - DNA, 42 bp, Homo Sapiens; identical to SEQ ID NO: 9812

SEQ ID NO: 34553 - DNA, 47 bp, Homo Sapiens; identical to SEQ ID NO: 9814

SEQ ID NO: 34554 - DNA, 43 bp, Homo Sapiens; identical to SEQ ID NO: 9821

SEQ ID NO: 34555 - DNA, 44 bp, Homo Sapiens; identical to SEQ ID NO: 9822

SEQ ID NO: 34556 - DNA, 45 bp, Homo Sapiens; identical to SEQ ID NO: 9823

SEQ ID NO: 34557 - DNA, 34 bp, Homo Sapiens; identical to SEQ ID NO: 9833

SEQ ID NO: 34558 - DNA, 35 bp, Homo Sapiens; identical to SEQ ID NO: 9834

SEQ ID NO: 34559 - DNA, 36 bp, Homo Sapiens; identical to SEQ ID NO: 9835

SEQ ID NO: 34560 - DNA, 26 bp, Homo Sapiens
catttgactgcagatcaagaggtccc

SEQ ID NO: 34561 - DNA, 35 bp, Homo Sapiens; identical to SEQ ID NO: 9861

SEQ ID NO: 34562 - DNA, 17 bp, Homo Sapiens
ccaaaacatcagattgt

SEQ ID NO: 34563 - DNA, 21 bp, Homo Sapiens
ccaaaacatcagattgtgaat

SEQ ID NO: 34564 - DNA, 22 bp, Homo Sapiens
ccaaaacatcagattgtgaatc

SEQ ID NO: 34565 - DNA, 23 bp, Homo Sapiens
ccaaaacatcagattgtgaatct

SEQ ID NO: 34566 - DNA, 29 bp, Homo Sapiens
ccaaaacatcagattgtgaatctgacaac

SEQ ID NO: 34567 - DNA, 31 bp, Homo Sapiens; identical to SEQ ID NO: 9877

SEQ ID NO: 34568 - DNA, 32 bp, Homo Sapiens; identical to SEQ ID NO: 9878

SEQ ID NO: 34569 - DNA, 33 bp, Homo Sapiens; identical to SEQ ID NO: 9879

SEQ ID NO: 34570 - DNA, 34 bp, Homo Sapiens; identical to SEQ ID NO: 9880

SEQ ID NO: 34571 - DNA, 35 bp, Homo Sapiens; identical to SEQ ID NO: 9881

SEQ ID NO: 34572 - DNA, 36 bp, Homo Sapiens; identical to SEQ ID NO: 9882

SEQ ID NO: 34573 - DNA, 37 bp, Homo Sapiens; identical to SEQ ID NO: 9883

SEQ ID NO: 34574 - DNA, 40 bp, Homo Sapiens; identical to SEQ ID NO: 9886

SEQ ID NO: 34575 - DNA, 42 bp, Homo Sapiens; identical to SEQ ID NO: 9888

SEQ ID NO: 34576 - DNA, 43 bp, Homo Sapiens; identical to SEQ ID NO: 9889

SEQ ID NO: 34577 - DNA, 44 bp, Homo Sapiens; identical to SEQ ID NO: 9890

SEQ ID NO: 34578 - DNA, 45 bp, Homo Sapiens; identical to SEQ ID NO: 9891

SEQ ID NO: 34579 - DNA, 46 bp, Homo Sapiens; identical to SEQ ID NO: 9892

SEQ ID NO: 34580 - DNA, 18 bp, Homo Sapiens
ccaacttacacttaggag

SEQ ID NO: 34581 - DNA, 19 bp, Homo Sapiens
ccaacttacacttaggaga

SEQ ID NO: 34582 - DNA, 27 bp, Homo Sapiens
ccaacttacacttaggagatttcaact

SEQ ID NO: 34583 - DNA, 28 bp, Homo Sapiens
ccaacttacacttaggagatttcaactt

SEQ ID NO: 34584 - DNA, 32 bp, Homo Sapiens; identical to SEQ ID NO: 9920

SEQ ID NO: 34585 - DNA, 35 bp, Homo Sapiens; identical to SEQ ID NO: 9923

SEQ ID NO: 34586 - DNA, 36 bp, Homo Sapiens; identical to SEQ ID NO: 9924

SEQ ID NO: 34587 - DNA, 38 bp, Homo Sapiens; identical to SEQ ID NO: 9926

SEQ ID NO: 34588 - DNA, 40 bp, Homo Sapiens; identical to SEQ ID NO: 9928

SEQ ID NO: 34589 - DNA, 41 bp, Homo Sapiens; identical to SEQ ID NO: 9929

SEQ ID NO: 34590 - DNA, 42 bp, Homo Sapiens; identical to SEQ ID NO: 9930

SEQ ID NO: 34591 - DNA, 43 bp, Homo Sapiens; identical to SEQ ID NO: 9931

SEQ ID NO: 34592 - DNA, 44 bp, Homo Sapiens; identical to SEQ ID NO: 9932

SEQ ID NO: 34593 - DNA, 45 bp, Homo Sapiens; identical to SEQ ID NO: 9933

SEQ ID NO: 34594 - DNA, 46 bp, Homo Sapiens; identical to SEQ ID NO: 9934

SEQ ID NO: 34595 - DNA, 47 bp, Homo Sapiens; identical to SEQ ID NO: 9935

SEQ ID NO: 34596 - DNA, 36 bp, Homo Sapiens; identical to SEQ ID NO: 9937

SEQ ID NO: 34597 - DNA, 40 bp, Homo Sapiens; identical to SEQ ID NO: 9946

SEQ ID NO: 34598 - DNA, 16 bp, Homo Sapiens
ccaaggtcgcgggttc

SEQ ID NO: 34599 - DNA, 31 bp, Homo Sapiens; identical to SEQ ID NO: 9952

SEQ ID NO: 34600 - DNA, 35 bp, Homo Sapiens; identical to SEQ ID NO: 9956

SEQ ID NO: 34601 - DNA, 36 bp, Homo Sapiens; identical to SEQ ID NO: 9965

SEQ ID NO: 34602 - DNA, 37 bp, Homo Sapiens; identical to SEQ ID NO: 9966

SEQ ID NO: 34603 - DNA, 38 bp, Homo Sapiens; identical to SEQ ID NO: 9967

SEQ ID NO: 34604 - DNA, 19 bp, Homo Sapiens
ccaattaactagttttgac

SEQ ID NO: 34605 - DNA, 36 bp, Homo Sapiens
ccaattaactagttttgacaacattcaaaaaagagt

SEQ ID NO: 34606 - DNA, 37 bp, Homo Sapiens; identical to SEQ ID NO: 9973

SEQ ID NO: 34607 - DNA, 38 bp, Homo Sapiens; identical to SEQ ID NO: 9974

SEQ ID NO: 34608 - DNA, 39 bp, Homo Sapiens; identical to SEQ ID NO: 9975

SEQ ID NO: 34609 - DNA, 40 bp, Homo Sapiens; identical to SEQ ID NO: 9976

SEQ ID NO: 34610 - DNA, 16 bp, Homo Sapiens
ccacatggtctagcgg

SEQ ID NO: 34611 - DNA, 24 bp, Homo Sapiens
ccacatggtctagcggttaggatt

SEQ ID NO: 34612 - DNA, 26 bp, Homo Sapiens
ccacatggtctagcggttaggattcc

SEQ ID NO: 34613 - DNA, 27 bp, Homo Sapiens
ccacatggtctagcggttaggattcct

SEQ ID NO: 34614 - DNA, 28 bp, Homo Sapiens
ccacatggtctagcggttaggattcctg

SEQ ID NO: 34615 - DNA, 30 bp, Homo Sapiens; identical to SEQ ID NO: 9987

SEQ ID NO: 34616 - DNA, 31 bp, Homo Sapiens; identical to SEQ ID NO: 9988

SEQ ID NO: 34617 - DNA, 32 bp, Homo Sapiens; identical to SEQ ID NO: 9989

SEQ ID NO: 34618 - DNA, 33 bp, Homo Sapiens; identical to SEQ ID NO: 9990

SEQ ID NO: 34619 - DNA, 34 bp, Homo Sapiens; identical to SEQ ID NO: 9991

SEQ ID NO: 34620 - DNA, 16 bp, Homo Sapiens
ccacccagggacgcca

SEQ ID NO: 34621 - DNA, 16 bp, Homo Sapiens
ccacgcgggaggcccg

SEQ ID NO: 34622 - DNA, 38 bp, Homo Sapiens; identical to SEQ ID NO: 10011

SEQ ID NO: 34623 - DNA, 40 bp, Homo Sapiens; identical to SEQ ID NO: 10012

SEQ ID NO: 34624 - DNA, 41 bp, Homo Sapiens; identical to SEQ ID NO: 10013

SEQ ID NO: 34625 - DNA, 16 bp, Homo Sapiens
ccagaggtcgatggat

SEQ ID NO: 34626 - DNA, 17 bp, Homo Sapiens
ccagaggtcgatggatc

SEQ ID NO: 34627 - DNA, 18 bp, Homo Sapiens
ccagaggtcgatggatcg

SEQ ID NO: 34628 - DNA, 23 bp, Homo Sapiens
ccagaggtcgatggatcgaaacc

SEQ ID NO: 34629 - DNA, 33 bp, Homo Sapiens
ccagaggtcgatggatcgaaaccatcctctgct

SEQ ID NO: 34630 - DNA, 36 bp, Homo Sapiens
ccagaggtcgatggatcgaaaccatcctctgctacc

SEQ ID NO: 34631 - DNA, 35 bp, Homo Sapiens; identical to SEQ ID NO: 10049

SEQ ID NO: 34632 - DNA, 36 bp, Homo Sapiens; identical to SEQ ID NO: 10050

SEQ ID NO: 34633 - DNA, 37 bp, Homo Sapiens; identical to SEQ ID NO: 10051

SEQ ID NO: 34634 - DNA, 16 bp, Homo Sapiens
ccagatcagaaggctg

SEQ ID NO: 34635 - DNA, 17 bp, Homo Sapiens
ccagatcagaaggctgc

SEQ ID NO: 34636 - DNA, 18 bp, Homo Sapiens
ccagatcagaaggctgcg

SEQ ID NO: 34637 - DNA, 22 bp, Homo Sapiens
ccagatcagaaggctgcgtgtt

SEQ ID NO: 34638 - DNA, 23 bp, Homo Sapiens
ccagatcagaaggctgcgtgttc

SEQ ID NO: 34639 - DNA, 24 bp, Homo Sapiens
ccagatcagaaggctgcgtgttcg

SEQ ID NO: 34640 - DNA, 42 bp, Homo Sapiens
ccagatcagaaggctgcgtgttcgaatcacgtcggggtcacc

SEQ ID NO: 34641 - DNA, 17 bp, Homo Sapiens
ccagatcagaaggttgc

SEQ ID NO: 34642 - DNA, 23 bp, Homo Sapiens
ccagatcagaaggttgcgtgttc

SEQ ID NO: 34643 - DNA, 16 bp, Homo Sapiens
ccagcgatccgagttc

SEQ ID NO: 34644 - DNA, 33 bp, Homo Sapiens; identical to SEQ ID NO: 10088

SEQ ID NO: 34645 - DNA, 34 bp, Homo Sapiens; identical to SEQ ID NO: 10089

SEQ ID NO: 34646 - DNA, 35 bp, Homo Sapiens; identical to SEQ ID NO: 10090

SEQ ID NO: 34647 - DNA, 33 bp, Homo Sapiens; identical to SEQ ID NO: 10094

SEQ ID NO: 34648 - DNA, 34 bp, Homo Sapiens; identical to SEQ ID NO: 10095

SEQ ID NO: 34649 - DNA, 34 bp, Homo Sapiens; identical to SEQ ID NO: 10101

SEQ ID NO: 34650 - DNA, 26 bp, Homo Sapiens
ccaggcggcccgggttcgactcccgg

SEQ ID NO: 34651 - DNA, 27 bp, Homo Sapiens
ccaggcggcccgggttcgactcccggt

SEQ ID NO: 34652 - DNA, 28 bp, Homo Sapiens
ccaggcggcccgggttcgactcccggtg

SEQ ID NO: 34653 - DNA, 29 bp, Homo Sapiens
ccaggcggcccgggttcgactcccggtgt

SEQ ID NO: 34654 - DNA, 30 bp, Homo Sapiens; identical to SEQ ID NO: 10129

SEQ ID NO: 34655 - DNA, 31 bp, Homo Sapiens; identical to SEQ ID NO: 10130

SEQ ID NO: 34656 - DNA, 32 bp, Homo Sapiens; identical to SEQ ID NO: 10131

SEQ ID NO: 34657 - DNA, 33 bp, Homo Sapiens; identical to SEQ ID NO: 10132

SEQ ID NO: 34658 - DNA, 34 bp, Homo Sapiens; identical to SEQ ID NO: 10133

SEQ ID NO: 34659 - DNA, 35 bp, Homo Sapiens; identical to SEQ ID NO: 10134

SEQ ID NO: 34660 - DNA, 36 bp, Homo Sapiens; identical to SEQ ID NO: 10135

SEQ ID NO: 34661 - DNA, 37 bp, Homo Sapiens; identical to SEQ ID NO: 10136

SEQ ID NO: 34662 - DNA, 36 bp, Homo Sapiens; identical to SEQ ID NO: 10143

SEQ ID NO: 34663 - DNA, 36 bp, Homo Sapiens; identical to SEQ ID NO: 10144

SEQ ID NO: 34664 - DNA, 34 bp, Homo Sapiens; identical to SEQ ID NO: 10147

SEQ ID NO: 34665 - DNA, 35 bp, Homo Sapiens; identical to SEQ ID NO: 10148

SEQ ID NO: 34666 - DNA, 36 bp, Homo Sapiens; identical to SEQ ID NO: 10149

SEQ ID NO: 34667 - DNA, 37 bp, Homo Sapiens; identical to SEQ ID NO: 10150

SEQ ID NO: 34668 - DNA, 32 bp, Homo Sapiens; identical to SEQ ID NO: 10154

SEQ ID NO: 34669 - DNA, 33 bp, Homo Sapiens; identical to SEQ ID NO: 10155

SEQ ID NO: 34670 - DNA, 34 bp, Homo Sapiens; identical to SEQ ID NO: 10156

SEQ ID NO: 34671 - DNA, 35 bp, Homo Sapiens; identical to SEQ ID NO: 10157

SEQ ID NO: 34672 - DNA, 36 bp, Homo Sapiens; identical to SEQ ID NO: 10158

SEQ ID NO: 34673 - DNA, 34 bp, Homo Sapiens; identical to SEQ ID NO: 10160

SEQ ID NO: 34674 - DNA, 34 bp, Homo Sapiens; identical to SEQ ID NO: 10164

SEQ ID NO: 34675 - DNA, 35 bp, Homo Sapiens; identical to SEQ ID NO: 10172

SEQ ID NO: 34676 - DNA, 25 bp, Homo Sapiens
ccagggttcaagtccctgttcgggc

SEQ ID NO: 34677 - DNA, 26 bp, Homo Sapiens
ccagggttcaagtccctgttcgggcg

SEQ ID NO: 34678 - DNA, 27 bp, Homo Sapiens
ccagggttcaagtccctgttcgggcgc

SEQ ID NO: 34679 - DNA, 28 bp, Homo Sapiens
ccagggttcaagtccctgttcgggcgcc

SEQ ID NO: 34680 - DNA, 29 bp, Homo Sapiens
ccagggttcaagtccctgttcgggcgcca

SEQ ID NO: 34681 - DNA, 28 bp, Homo Sapiens
ccaggtggcccgggttcgactcccggta

SEQ ID NO: 34682 - DNA, 30 bp, Homo Sapiens; identical to SEQ ID NO: 10187

SEQ ID NO: 34683 - DNA, 32 bp, Homo Sapiens; identical to SEQ ID NO: 10189

SEQ ID NO: 34684 - DNA, 33 bp, Homo Sapiens; identical to SEQ ID NO: 10190

SEQ ID NO: 34685 - DNA, 34 bp, Homo Sapiens; identical to SEQ ID NO: 10191

SEQ ID NO: 34686 - DNA, 35 bp, Homo Sapiens; identical to SEQ ID NO: 10192

SEQ ID NO: 34687 - DNA, 36 bp, Homo Sapiens; identical to SEQ ID NO: 10193

SEQ ID NO: 34688 - DNA, 27 bp, Homo Sapiens
ccaggttcgactcctggctggctcgcc

SEQ ID NO: 34689 - DNA, 44 bp, Homo Sapiens; identical to SEQ ID NO: 10204

SEQ ID NO: 34690 - DNA, 20 bp, Homo Sapiens
ccataacccagaggtcgatg

SEQ ID NO: 34691 - DNA, 23 bp, Homo Sapiens
ccataacccagaggtcgatggat

SEQ ID NO: 34692 - DNA, 42 bp, Homo Sapiens; identical to SEQ ID NO: 10222

SEQ ID NO: 34693 - DNA, 28 bp, Homo Sapiens
ccatagtgtagcggttatcacgtctgct

SEQ ID NO: 34694 - DNA, 27 bp, Homo Sapiens
ccatagtgtagtggttatcacgtctgc

SEQ ID NO: 34695 - DNA, 28 bp, Homo Sapiens
ccatagtgtagtggttatcacgtctgct

SEQ ID NO: 34696 - DNA, 29 bp, Homo Sapiens
ccatagtgtagtggttatcacgtctgctt

SEQ ID NO: 34697 - DNA, 30 bp, Homo Sapiens; identical to SEQ ID NO: 10237

SEQ ID NO: 34698 - DNA, 16 bp, Homo Sapiens
ccatatggtctagcgg

SEQ ID NO: 34699 - DNA, 24 bp, Homo Sapiens
ccatatggtctagcggttaggatt

SEQ ID NO: 34700 - DNA, 26 bp, Homo Sapiens
ccatatggtctagcggttaggattcc

SEQ ID NO: 34701 - DNA, 27 bp, Homo Sapiens
ccatatggtctagcggttaggattcct

SEQ ID NO: 34702 - DNA, 28 bp, Homo Sapiens
ccatatggtctagcggttaggattcctg

SEQ ID NO: 34703 - DNA, 30 bp, Homo Sapiens; identical to SEQ ID NO: 10247

SEQ ID NO: 34704 - DNA, 31 bp, Homo Sapiens; identical to SEQ ID NO: 10248

SEQ ID NO: 34705 - DNA, 32 bp, Homo Sapiens; identical to SEQ ID NO: 10249

SEQ ID NO: 34706 - DNA, 33 bp, Homo Sapiens; identical to SEQ ID NO: 10250

SEQ ID NO: 34707 - DNA, 34 bp, Homo Sapiens; identical to SEQ ID NO: 10251

SEQ ID NO: 34708 - DNA, 16 bp, Homo Sapiens
ccatcctctgctacca

SEQ ID NO: 34709 - DNA, 29 bp, Homo Sapiens
ccatgatcgtatagtggttagtactctgc

SEQ ID NO: 34710 - DNA, 32 bp, Homo Sapiens; identical to SEQ ID NO: 10267

SEQ ID NO: 34711 - DNA, 25 bp, Homo Sapiens
ccatggtgtaatggttagcactctg

SEQ ID NO: 34712 - DNA, 28 bp, Homo Sapiens
ccatggtgtaatggttagcactctggac

SEQ ID NO: 34713 - DNA, 29 bp, Homo Sapiens
ccatggtgtaatggttagcactctggact

SEQ ID NO: 34714 - DNA, 30 bp, Homo Sapiens; identical to SEQ ID NO: 10275

SEQ ID NO: 34715 - DNA, 31 bp, Homo Sapiens; identical to SEQ ID NO: 10276

SEQ ID NO: 34716 - DNA, 32 bp, Homo Sapiens; identical to SEQ ID NO: 10277

SEQ ID NO: 34717 - DNA, 33 bp, Homo Sapiens; identical to SEQ ID NO: 10278

SEQ ID NO: 34718 - DNA, 36 bp, Homo Sapiens
ccatggtgtaatggttagcactctggactctgaatc

SEQ ID NO: 34719 - DNA, 37 bp, Homo Sapiens
ccatggtgtaatggttagcactctggactctgaatcc

SEQ ID NO: 34720 - DNA, 32 bp, Homo Sapiens; identical to SEQ ID NO: 10280

SEQ ID NO: 34721 - DNA, 37 bp, Homo Sapiens; identical to SEQ ID NO: 10281

SEQ ID NO: 34722 - DNA, 16 bp, Homo Sapiens
ccattcttgcgacccg

SEQ ID NO: 34723 - DNA, 17 bp, Homo Sapiens
ccattcttgcgacccgg

SEQ ID NO: 34724 - DNA, 19 bp, Homo Sapiens
ccattcttgcgacccgggt

SEQ ID NO: 34725 - DNA, 38 bp, Homo Sapiens; identical to SEQ ID NO: 10295

SEQ ID NO: 34726 - DNA, 40 bp, Homo Sapiens; identical to SEQ ID NO: 10297

SEQ ID NO: 34727 - DNA, 45 bp, Homo Sapiens; identical to SEQ ID NO: 10317

SEQ ID NO: 34728 - DNA, 46 bp, Homo Sapiens; identical to SEQ ID NO: 10318

SEQ ID NO: 34729 - DNA, 27 bp, Homo Sapiens
cccaaaaattttggtgcaactccaaat

SEQ ID NO: 34730 - DNA, 28 bp, Homo Sapiens
cccaaaaattttggtgcaactccaaata

SEQ ID NO: 34731 - DNA, 33 bp, Homo Sapiens; identical to SEQ ID NO: 10334

SEQ ID NO: 34732 - DNA, 34 bp, Homo Sapiens; identical to SEQ ID NO: 10335

SEQ ID NO: 34733 - DNA, 35 bp, Homo Sapiens; identical to SEQ ID NO: 10336

SEQ ID NO: 34734 - DNA, 36 bp, Homo Sapiens; identical to SEQ ID NO: 10337

SEQ ID NO: 34735 - DNA, 37 bp, Homo Sapiens; identical to SEQ ID NO: 10338

SEQ ID NO: 34736 - DNA, 19 bp, Homo Sapiens
cccaacttacacttaggag

SEQ ID NO: 34737 - DNA, 28 bp, Homo Sapiens
cccaacttacacttaggagatttcaact

SEQ ID NO: 34738 - DNA, 29 bp, Homo Sapiens
cccaacttacacttaggagatttcaactt

SEQ ID NO: 34739 - DNA, 36 bp, Homo Sapiens
cccaacttacacttaggagatttcaacttaacttga

SEQ ID NO: 34740 - DNA, 37 bp, Homo Sapiens; identical to SEQ ID NO: 10356

SEQ ID NO: 34741 - DNA, 39 bp, Homo Sapiens; identical to SEQ ID NO: 10358

SEQ ID NO: 34742 - DNA, 40 bp, Homo Sapiens; identical to SEQ ID NO: 10359

SEQ ID NO: 34743 - DNA, 41 bp, Homo Sapiens; identical to SEQ ID NO: 10360

SEQ ID NO: 34744 - DNA, 42 bp, Homo Sapiens; identical to SEQ ID NO: 10361

SEQ ID NO: 34745 - DNA, 43 bp, Homo Sapiens; identical to SEQ ID NO: 10362

SEQ ID NO: 34746 - DNA, 44 bp, Homo Sapiens; identical to SEQ ID NO: 10363

SEQ ID NO: 34747 - DNA, 45 bp, Homo Sapiens; identical to SEQ ID NO: 10364

SEQ ID NO: 34748 - DNA, 46 bp, Homo Sapiens; identical to SEQ ID NO: 10365

SEQ ID NO: 34749 - DNA, 47 bp, Homo Sapiens; identical to SEQ ID NO: 10366

SEQ ID NO: 34750 - DNA, 16 bp, Homo Sapiens
cccacatggtctagcg

SEQ ID NO: 34751 - DNA, 17 bp, Homo Sapiens
cccacatggtctagcgg

SEQ ID NO: 34752 - DNA, 18 bp, Homo Sapiens
cccacatggtctagcggt

SEQ ID NO: 34753 - DNA, 25 bp, Homo Sapiens
cccacatggtctagcggttaggatt

SEQ ID NO: 34754 - DNA, 27 bp, Homo Sapiens
cccacatggtctagcggttaggattcc

SEQ ID NO: 34755 - DNA, 31 bp, Homo Sapiens; identical to SEQ ID NO: 10376

SEQ ID NO: 34756 - DNA, 32 bp, Homo Sapiens; identical to SEQ ID NO: 10377

SEQ ID NO: 34757 - DNA, 33 bp, Homo Sapiens; identical to SEQ ID NO: 10378

SEQ ID NO: 34758 - DNA, 34 bp, Homo Sapiens; identical to SEQ ID NO: 10379

SEQ ID NO: 34759 - DNA, 16 bp, Homo Sapiens
cccacccagggacgcc

SEQ ID NO: 34760 - DNA, 17 bp, Homo Sapiens
cccacccagggacgcca

SEQ ID NO: 34761 - DNA, 16 bp, Homo Sapiens
cccaccgctgccacca

SEQ ID NO: 34762 - DNA, 16 bp, Homo Sapiens
cccacctggggtacca

SEQ ID NO: 34763 - DNA, 16 bp, Homo Sapiens
cccacgttgggcgcca

SEQ ID NO: 34764 - DNA, 16 bp, Homo Sapiens
cccactcctgacacca

SEQ ID NO: 34765 - DNA, 16 bp, Homo Sapiens
cccactcctggtacca

SEQ ID NO: 34766 - DNA, 16 bp, Homo Sapiens
cccacttctgacacca

SEQ ID NO: 34767 - DNA, 16 bp, Homo Sapiens
cccagaggtcgatgga

SEQ ID NO: 34768 - DNA, 17 bp, Homo Sapiens
cccagaggtcgatggat

SEQ ID NO: 34769 - DNA, 18 bp, Homo Sapiens
cccagaggtcgatggatc

SEQ ID NO: 34770 - DNA, 19 bp, Homo Sapiens
cccagaggtcgatggatcg

SEQ ID NO: 34771 - DNA, 36 bp, Homo Sapiens
cccagaggtcgatggatcgaaaccatcctctgctac

SEQ ID NO: 34772 - DNA, 37 bp, Homo Sapiens
cccagaggtcgatggatcgaaaccatcctctgctacc

SEQ ID NO: 34773 - DNA, 16 bp, Homo Sapiens
cccagcatctccacca

SEQ ID NO: 34774 - DNA, 16 bp, Homo Sapiens
cccagcggggcctcca

SEQ ID NO: 34775 - DNA, 16 bp, Homo Sapiens
cccagcggtgcctcca

SEQ ID NO: 34776 - DNA, 31 bp, Homo Sapiens; identical to SEQ ID NO: 10416

SEQ ID NO: 34777 - DNA, 32 bp, Homo Sapiens; identical to SEQ ID NO: 10417

SEQ ID NO: 34778 - DNA, 33 bp, Homo Sapiens; identical to SEQ ID NO: 10418

SEQ ID NO: 34779 - DNA, 35 bp, Homo Sapiens; identical to SEQ ID NO: 10420

SEQ ID NO: 34780 - DNA, 36 bp, Homo Sapiens; identical to SEQ ID NO: 10421

SEQ ID NO: 34781 - DNA, 37 bp, Homo Sapiens; identical to SEQ ID NO: 10422

SEQ ID NO: 34782 - DNA, 38 bp, Homo Sapiens; identical to SEQ ID NO: 10423

SEQ ID NO: 34783 - DNA, 34 bp, Homo Sapiens; identical to SEQ ID NO: 10425

SEQ ID NO: 34784 - DNA, 35 bp, Homo Sapiens
cccagggtcgtgggttcgagccccacgttgggcgc

SEQ ID NO: 34785 - DNA, 36 bp, Homo Sapiens; identical to SEQ ID NO: 10426

SEQ ID NO: 34786 - DNA, 35 bp, Homo Sapiens; identical to SEQ ID NO: 10430

SEQ ID NO: 34787 - DNA, 36 bp, Homo Sapiens; identical to SEQ ID NO: 10431

SEQ ID NO: 34788 - DNA, 16 bp, Homo Sapiens
cccagtggaaccacca

SEQ ID NO: 34789 - DNA, 19 bp, Homo Sapiens
cccataacccagaggtcga

SEQ ID NO: 34790 - DNA, 20 bp, Homo Sapiens
cccataacccagaggtcgat

SEQ ID NO: 34791 - DNA, 21 bp, Homo Sapiens
cccataacccagaggtcgatg

SEQ ID NO: 34792 - DNA, 24 bp, Homo Sapiens
cccataacccagaggtcgatggat

SEQ ID NO: 34793 - DNA, 26 bp, Homo Sapiens
cccataacccagaggtcgatggatcg

SEQ ID NO: 34794 - DNA, 32 bp, Homo Sapiens
cccataacccagaggtcgatggatcgaaacca

SEQ ID NO: 34795 - DNA, 33 bp, Homo Sapiens
cccataacccagaggtcgatggatcgaaaccat

SEQ ID NO: 34796 - DNA, 37 bp, Homo Sapiens
cccataacccagaggtcgatggatcgaaaccatcctc

SEQ ID NO: 34797 - DNA, 16 bp, Homo Sapiens
cccatatggtctagcg

SEQ ID NO: 34798 - DNA, 17 bp, Homo Sapiens
cccatatggtctagcgg

SEQ ID NO: 34799 - DNA, 25 bp, Homo Sapiens
cccatatggtctagcggttaggatt

SEQ ID NO: 34800 - DNA, 27 bp, Homo Sapiens
cccatatggtctagcggttaggattcc

SEQ ID NO: 34801 - DNA, 31 bp, Homo Sapiens; identical to SEQ ID NO: 10480

SEQ ID NO: 34802 - DNA, 32 bp, Homo Sapiens; identical to SEQ ID NO: 10481

SEQ ID NO: 34803 - DNA, 34 bp, Homo Sapiens; identical to SEQ ID NO: 10483

SEQ ID NO: 34804 - DNA, 16 bp, Homo Sapiens
cccatcctcgtcgcca

SEQ ID NO: 34805 - DNA, 16 bp, Homo Sapiens
cccatctggggtgcca

SEQ ID NO: 34806 - DNA, 16 bp, Homo Sapiens
cccatctgggtcgcca

SEQ ID NO: 34807 - DNA, 30 bp, Homo Sapiens; identical to SEQ ID NO: 10495

SEQ ID NO: 34808 - DNA, 33 bp, Homo Sapiens; identical to SEQ ID NO: 10496

SEQ ID NO: 34809 - DNA, 38 bp, Homo Sapiens; identical to SEQ ID NO: 10499

SEQ ID NO: 34810 - DNA, 21 bp, Homo Sapiens
cccatgtctaacaacatggct

SEQ ID NO: 34811 - DNA, 29 bp, Homo Sapiens
cccatgtctaacaacatggctttctcacc

SEQ ID NO: 34812 - DNA, 16 bp, Homo Sapiens
cccattcttgcgaccc

SEQ ID NO: 34813 - DNA, 17 bp, Homo Sapiens
cccattcttgcgacccg

SEQ ID NO: 34814 - DNA, 18 bp, Homo Sapiens
cccattcttgcgacccgg

SEQ ID NO: 34815 - DNA, 19 bp, Homo Sapiens
cccattcttgcgacccggg

SEQ ID NO: 34816 - DNA, 20 bp, Homo Sapiens
cccattcttgcgacccgggt

SEQ ID NO: 34817 - DNA, 21 bp, Homo Sapiens
cccattcttgcgacccgggtt

SEQ ID NO: 34818 - DNA, 22 bp, Homo Sapiens
cccattcttgcgacccgggttc

SEQ ID NO: 34819 - DNA, 23 bp, Homo Sapiens
cccattcttgcgacccgggttcg

SEQ ID NO: 34820 - DNA, 24 bp, Homo Sapiens
cccattcttgcgacccgggttcga

SEQ ID NO: 34821 - DNA, 35 bp, Homo Sapiens; identical to SEQ ID NO: 10520

SEQ ID NO: 34822 - DNA, 36 bp, Homo Sapiens; identical to SEQ ID NO: 10521

SEQ ID NO: 34823 - DNA, 37 bp, Homo Sapiens; identical to SEQ ID NO: 10522

SEQ ID NO: 34824 - DNA, 38 bp, Homo Sapiens; identical to SEQ ID NO: 10523

SEQ ID NO: 34825 - DNA, 39 bp, Homo Sapiens; identical to SEQ ID NO: 10524

SEQ ID NO: 34826 - DNA, 40 bp, Homo Sapiens; identical to SEQ ID NO: 10525

SEQ ID NO: 34827 - DNA, 41 bp, Homo Sapiens; identical to SEQ ID NO: 10526

SEQ ID NO: 34828 - DNA, 42 bp, Homo Sapiens; identical to SEQ ID NO: 10527

SEQ ID NO: 34829 - DNA, 16 bp, Homo Sapiens
cccattggtctagcca

SEQ ID NO: 34830 - DNA, 29 bp, Homo Sapiens
ccccaaaaattttggtgcaactccaaata

SEQ ID NO: 34831 - DNA, 37 bp, Homo Sapiens; identical to SEQ ID NO: 10539

SEQ ID NO: 34832 - DNA, 38 bp, Homo Sapiens; identical to SEQ ID NO: 10540

SEQ ID NO: 34833 - DNA, 16 bp, Homo Sapiens
ccccacattgggcgcc

SEQ ID NO: 34834 - DNA, 16 bp, Homo Sapiens
ccccacgttgggcgcc

SEQ ID NO: 34835 - DNA, 17 bp, Homo Sapiens
ccccacgttgggcgcca

SEQ ID NO: 34836 - DNA, 16 bp, Homo Sapiens
ccccactcctggtacc

SEQ ID NO: 34837 - DNA, 17 bp, Homo Sapiens
ccccactcctggtacca

SEQ ID NO: 34838 - DNA, 16 bp, Homo Sapiens
ccccagcatctccacc

SEQ ID NO: 34839 - DNA, 17 bp, Homo Sapiens
ccccagcatctccacca

SEQ ID NO: 34840 - DNA, 16 bp, Homo Sapiens
ccccagtggaaccacc

SEQ ID NO: 34841 - DNA, 17 bp, Homo Sapiens
ccccagtggaaccacca

SEQ ID NO: 34842 - DNA, 34 bp, Homo Sapiens; identical to SEQ ID NO: 10561

SEQ ID NO: 34843 - DNA, 20 bp, Homo Sapiens
ccccatgtctaacaacatgg

SEQ ID NO: 34844 - DNA, 21 bp, Homo Sapiens
ccccatgtctaacaacatggc

SEQ ID NO: 34845 - DNA, 22 bp, Homo Sapiens
ccccatgtctaacaacatggct

SEQ ID NO: 34846 - DNA, 23 bp, Homo Sapiens
ccccatgtctaacaacatggctt

SEQ ID NO: 34847 - DNA, 30 bp, Homo Sapiens; identical to SEQ ID NO: 10569

SEQ ID NO: 34848 - DNA, 31 bp, Homo Sapiens; identical to SEQ ID NO: 10570

SEQ ID NO: 34849 - DNA, 22 bp, Homo Sapiens
cccccatgtctaacaacatggc

SEQ ID NO: 34850 - DNA, 23 bp, Homo Sapiens
cccccatgtctaacaacatggct

SEQ ID NO: 34851 - DNA, 31 bp, Homo Sapiens; identical to SEQ ID NO: 10581

SEQ ID NO: 34852 - DNA, 32 bp, Homo Sapiens; identical to SEQ ID NO: 10582

SEQ ID NO: 34853 - DNA, 16 bp, Homo Sapiens
cccccggctcctccac

SEQ ID NO: 34854 - DNA, 17 bp, Homo Sapiens
cccccggctcctccacc

SEQ ID NO: 34855 - DNA, 16 bp, Homo Sapiens
cccccttatttctacc

SEQ ID NO: 34856 - DNA, 36 bp, Homo Sapiens; identical to SEQ ID NO: 10599

SEQ ID NO: 34857 - DNA, 37 bp, Homo Sapiens; identical to SEQ ID NO: 10600

SEQ ID NO: 34858 - DNA, 16 bp, Homo Sapiens
ccccgacggggagcca

SEQ ID NO: 34859 - DNA, 26 bp, Homo Sapiens
ccccgcacaggttcgaatcctgttcg

SEQ ID NO: 34860 - DNA, 30 bp, Homo Sapiens
ccccgcacaggttcgaatcctgttcgtgac

SEQ ID NO: 34861 - DNA, 31 bp, Homo Sapiens
ccccgcacaggttcgaatcctgttcgtgacg

SEQ ID NO: 34862 - DNA, 32 bp, Homo Sapiens
ccccgcacaggttcgaatcctgttcgtgacgc

SEQ ID NO: 34863 - DNA, 33 bp, Homo Sapiens
ccccgcacaggttcgaatcctgttcgtgacgcc

SEQ ID NO: 34864 - DNA, 34 bp, Homo Sapiens
ccccgcacaggttcgaatcctgttcgtgacgcca

SEQ ID NO: 34865 - DNA, 33 bp, Homo Sapiens
ccccgcgcaggttcaaatcctgctcacagcgcc

SEQ ID NO: 34866 - DNA, 26 bp, Homo Sapiens
ccccgcgcaggttcgaaccctgctcg

SEQ ID NO: 34867 - DNA, 27 bp, Homo Sapiens
ccccgcgcaggttcgaaccctgctcgc

SEQ ID NO: 34868 - DNA, 28 bp, Homo Sapiens
ccccgcgcaggttcgaaccctgctcgct

SEQ ID NO: 34869 - DNA, 29 bp, Homo Sapiens
ccccgcgcaggttcgaaccctgctcgctg

SEQ ID NO: 34870 - DNA, 30 bp, Homo Sapiens
ccccgcgcaggttcgaaccctgctcgctgc

SEQ ID NO: 34871 - DNA, 31 bp, Homo Sapiens
ccccgcgcaggttcgaaccctgctcgctgcg

SEQ ID NO: 34872 - DNA, 32 bp, Homo Sapiens
ccccgcgcaggttcgaaccctgctcgctgcgc

SEQ ID NO: 34873 - DNA, 33 bp, Homo Sapiens; identical to SEQ ID NO: 10606

SEQ ID NO: 34874 - DNA, 34 bp, Homo Sapiens
ccccgcgcaggttcgaaccctgctcgctgcgcca

SEQ ID NO: 34875 - DNA, 21 bp, Homo Sapiens
ccccgcgcaggttcgaatcct

SEQ ID NO: 34876 - DNA, 22 bp, Homo Sapiens
ccccgcgcaggttcgaatcctg

SEQ ID NO: 34877 - DNA, 24 bp, Homo Sapiens
ccccgcgcaggttcgaatcctgcc

SEQ ID NO: 34878 - DNA, 25 bp, Homo Sapiens
ccccgcgcaggttcgaatcctgccg

SEQ ID NO: 34879 - DNA, 26 bp, Homo Sapiens
ccccgcgcaggttcgaatcctgccga

SEQ ID NO: 34880 - DNA, 27 bp, Homo Sapiens
ccccgcgcaggttcgaatcctgccgac

SEQ ID NO: 34881 - DNA, 28 bp, Homo Sapiens
ccccgcgcaggttcgaatcctgccgact

SEQ ID NO: 34882 - DNA, 29 bp, Homo Sapiens
ccccgcgcaggttcgaatcctgccgacta

SEQ ID NO: 34883 - DNA, 30 bp, Homo Sapiens
ccccgcgcaggttcgaatcctgccgactac

SEQ ID NO: 34884 - DNA, 31 bp, Homo Sapiens
ccccgcgcaggttcgaatcctgccgactacg

SEQ ID NO: 34885 - DNA, 32 bp, Homo Sapiens
ccccgcgcaggttcgaatcctgccgactacgc

SEQ ID NO: 34886 - DNA, 33 bp, Homo Sapiens; identical to SEQ ID NO: 10615

SEQ ID NO: 34887 - DNA, 34 bp, Homo Sapiens; identical to SEQ ID NO: 10616

SEQ ID NO: 34888 - DNA, 29 bp, Homo Sapiens
ccccgcgcaggttcgaatcctgctcacag

SEQ ID NO: 34889 - DNA, 30 bp, Homo Sapiens
ccccgcgcaggttcgaatcctgctcacagc

SEQ ID NO: 34890 - DNA, 31 bp, Homo Sapiens
ccccgcgcaggttcgaatcctgctcacagcg

SEQ ID NO: 34891 - DNA, 32 bp, Homo Sapiens
ccccgcgcaggttcgaatcctgctcacagcgc

SEQ ID NO: 34892 - DNA, 33 bp, Homo Sapiens; identical to SEQ ID NO: 10618

SEQ ID NO: 34893 - DNA, 34 bp, Homo Sapiens; identical to SEQ ID NO: 10619

SEQ ID NO: 34894 - DNA, 31 bp, Homo Sapiens
ccccgcgcaggttcgaatcctgtcggctacg

SEQ ID NO: 34895 - DNA, 32 bp, Homo Sapiens
ccccgcgcaggttcgaatcctgtcggctacgc

SEQ ID NO: 34896 - DNA, 33 bp, Homo Sapiens
ccccgcgcaggttcgaatcctgtcggctacgcc

SEQ ID NO: 34897 - DNA, 16 bp, Homo Sapiens
ccccggcacctccacc

SEQ ID NO: 34898 - DNA, 17 bp, Homo Sapiens
ccccggcacctccacca

SEQ ID NO: 34899 - DNA, 16 bp, Homo Sapiens
ccccggcatctccacc

SEQ ID NO: 34900 - DNA, 17 bp, Homo Sapiens
ccccggcatctccacca

SEQ ID NO: 34901 - DNA, 16 bp, Homo Sapiens
ccccggctcctccacc

SEQ ID NO: 34902 - DNA, 29 bp, Homo Sapiens
ccccgggttcaatccccggcacctccacc

SEQ ID NO: 34903 - DNA, 29 bp, Homo Sapiens
ccccgggttcgatccccggcatctccacc

SEQ ID NO: 34904 - DNA, 26 bp, Homo Sapiens
ccccggttcgaaaccgggcggaaaca

SEQ ID NO: 34905 - DNA, 28 bp, Homo Sapiens
ccccggttcgaaaccgggcggaaacacc

SEQ ID NO: 34906 - DNA, 16 bp, Homo Sapiens
ccccgtacgggccacc

SEQ ID NO: 34907 - DNA, 17 bp, Homo Sapiens
ccccgtacgggccacca

SEQ ID NO: 34908 - DNA, 16 bp, Homo Sapiens
ccccgtactggccacc

SEQ ID NO: 34909 - DNA, 16 bp, Homo Sapiens
ccccgtccgtgcctcc

SEQ ID NO: 34910 - DNA, 17 bp, Homo Sapiens
ccccgtccgtgcctcca

SEQ ID NO: 34911 - DNA, 16 bp, Homo Sapiens
ccccttatttacccca

SEQ ID NO: 34912 - DNA, 16 bp, Homo Sapiens
ccccttatttctacca

SEQ ID NO: 34913 - DNA, 16 bp, Homo Sapiens
cccgaaaatgttggtt

SEQ ID NO: 34914 - DNA, 17 bp, Homo Sapiens
cccgaaaatgttggtta

SEQ ID NO: 34915 - DNA, 23 bp, Homo Sapiens
cccgaaaatgttggttataccct

SEQ ID NO: 34916 - DNA, 25 bp, Homo Sapiens
cccgaaaatgttggttatacccttc

SEQ ID NO: 34917 - DNA, 26 bp, Homo Sapiens
cccgaaaatgttggttatacccttcc

SEQ ID NO: 34918 - DNA, 28 bp, Homo Sapiens
cccgaaaatgttggttatacccttcccg

SEQ ID NO: 34919 - DNA, 31 bp, Homo Sapiens; identical to SEQ ID NO: 10669

SEQ ID NO: 34920 - DNA, 32 bp, Homo Sapiens; identical to SEQ ID NO: 10670

SEQ ID NO: 34921 - DNA, 33 bp, Homo Sapiens; identical to SEQ ID NO: 10671

SEQ ID NO: 34922 - DNA, 34 bp, Homo Sapiens; identical to SEQ ID NO: 10672

SEQ ID NO: 34923 - DNA, 35 bp, Homo Sapiens; identical to SEQ ID NO: 10673

SEQ ID NO: 34924 - DNA, 36 bp, Homo Sapiens; identical to SEQ ID NO: 10674

SEQ ID NO: 34925 - DNA, 30 bp, Homo Sapiens
cccgcacaggttcgaatcctgttcgtgacg

SEQ ID NO: 34926 - DNA, 31 bp, Homo Sapiens
cccgcacaggttcgaatcctgttcgtgacgc

SEQ ID NO: 34927 - DNA, 32 bp, Homo Sapiens
cccgcacaggttcgaatcctgttcgtgacgcc

SEQ ID NO: 34928 - DNA, 16 bp, Homo Sapiens
cccgcatcctccacca

SEQ ID NO: 34929 - DNA, 47 bp, Homo Sapiens
cccgcctgtcacgcgggagaccggggttcgattccccgacggggagc

SEQ ID NO: 34930 - DNA, 30 bp, Homo Sapiens
cccgcgcaggttcgaaccctgctcgctgcg

SEQ ID NO: 34931 - DNA, 31 bp, Homo Sapiens
cccgcgcaggttcgaaccctgctcgctgcgc

SEQ ID NO: 34932 - DNA, 32 bp, Homo Sapiens; identical to SEQ ID NO: 10683

SEQ ID NO: 34933 - DNA, 27 bp, Homo Sapiens
cccgcgcaggttcgaatcctgccgact

SEQ ID NO: 34934 - DNA, 30 bp, Homo Sapiens
cccgcgcaggttcgaatcctgccgactacg

SEQ ID NO: 34935 - DNA, 31 bp, Homo Sapiens
cccgcgcaggttcgaatcctgccgactacgc

SEQ ID NO: 34936 - DNA, 32 bp, Homo Sapiens; identical to SEQ ID NO: 10685

SEQ ID NO: 34937 - DNA, 33 bp, Homo Sapiens; identical to SEQ ID NO: 10686

SEQ ID NO: 34938 - DNA, 30 bp, Homo Sapiens
cccgcgcaggttcgaatcctgctcacagcg

SEQ ID NO: 34939 - DNA, 31 bp, Homo Sapiens
cccgcgcaggttcgaatcctgctcacagcgc

SEQ ID NO: 34940 - DNA, 32 bp, Homo Sapiens; identical to SEQ ID NO: 10687

SEQ ID NO: 34941 - DNA, 16 bp, Homo Sapiens
cccggacgagccccca

SEQ ID NO: 34942 - DNA, 18 bp, Homo Sapiens
cccggatagctcagtcgg

SEQ ID NO: 34943 - DNA, 22 bp, Homo Sapiens
cccggatagctcagtcggtaga

SEQ ID NO: 34944 - DNA, 23 bp, Homo Sapiens
cccggatagctcagtcggtagag

SEQ ID NO: 34945 - DNA, 29 bp, Homo Sapiens
cccggatagctcagtcggtagagcatcag

SEQ ID NO: 34946 - DNA, 31 bp, Homo Sapiens; identical to SEQ ID NO: 10702

SEQ ID NO: 34947 - DNA, 32 bp, Homo Sapiens; identical to SEQ ID NO: 10703

SEQ ID NO: 34948 - DNA, 16 bp, Homo Sapiens
cccggcacctccacca

SEQ ID NO: 34949 - DNA, 16 bp, Homo Sapiens
cccggcatctccacca

SEQ ID NO: 34950 - DNA, 16 bp, Homo Sapiens
cccggccaacgcacca

SEQ ID NO: 34951 - DNA, 16 bp, Homo Sapiens
cccggccaatgcacca

SEQ ID NO: 34952 - DNA, 16 bp, Homo Sapiens
cccggccagtgcacca

SEQ ID NO: 34953 - DNA, 16 bp, Homo Sapiens
cccggcccatgcacca

SEQ ID NO: 34954 - DNA, 17 bp, Homo Sapiens
cccggctagctcagtcg

SEQ ID NO: 34955 - DNA, 18 bp, Homo Sapiens
cccggctagctcagtcgg

SEQ ID NO: 34956 - DNA, 25 bp, Homo Sapiens
cccggctagctcagtcggtagagca

SEQ ID NO: 34957 - DNA, 27 bp, Homo Sapiens
cccggctagctcagtcggtagagcatg

SEQ ID NO: 34958 - DNA, 31 bp, Homo Sapiens; identical to SEQ ID NO: 10724

SEQ ID NO: 34959 - DNA, 32 bp, Homo Sapiens; identical to SEQ ID NO: 10728

SEQ ID NO: 34960 - DNA, 33 bp, Homo Sapiens; identical to SEQ ID NO: 10729

SEQ ID NO: 34961 - DNA, 40 bp, Homo Sapiens; identical to SEQ ID NO: 10736

SEQ ID NO: 34962 - DNA, 28 bp, Homo Sapiens
cccggctagctcagtcggtagagcatgg

SEQ ID NO: 34963 - DNA, 31 bp, Homo Sapiens; identical to SEQ ID NO: 10743

SEQ ID NO: 34964 - DNA, 32 bp, Homo Sapiens; identical to SEQ ID NO: 10744

SEQ ID NO: 34965 - DNA, 33 bp, Homo Sapiens; identical to SEQ ID NO: 10745

SEQ ID NO: 34966 - DNA, 34 bp, Homo Sapiens; identical to SEQ ID NO: 10746

SEQ ID NO: 34967 - DNA, 40 bp, Homo Sapiens; identical to SEQ ID NO: 10749

SEQ ID NO: 34968 - DNA, 41 bp, Homo Sapiens; identical to SEQ ID NO: 10750

SEQ ID NO: 34969 - DNA, 16 bp, Homo Sapiens
cccgggcggaaacacc

SEQ ID NO: 34970 - DNA, 17 bp, Homo Sapiens
cccgggcggaaacacca

SEQ ID NO: 34971 - DNA, 16 bp, Homo Sapiens
cccgggcggcgcacca

SEQ ID NO: 34972 - DNA, 28 bp, Homo Sapiens
cccgggttcaatccccggcacctccacc

SEQ ID NO: 34973 - DNA, 26 bp, Homo Sapiens
cccgggttcgactcccggtatgggaa

SEQ ID NO: 34974 - DNA, 27 bp, Homo Sapiens
cccgggttcgactcccggtatgggaac

SEQ ID NO: 34975 - DNA, 25 bp, Homo Sapiens
cccgggttcgactcccggtgtggga

SEQ ID NO: 34976 - DNA, 26 bp, Homo Sapiens
cccgggttcgactcccggtgtgggaa

SEQ ID NO: 34977 - DNA, 27 bp, Homo Sapiens
cccgggttcgactcccggtgtgggaac

SEQ ID NO: 34978 - DNA, 28 bp, Homo Sapiens
cccgggttcgactcccggtgtgggaacc

SEQ ID NO: 34979 - DNA, 27 bp, Homo Sapiens
cccgggttcgatccccagcatctccac

SEQ ID NO: 34980 - DNA, 28 bp, Homo Sapiens
cccgggttcgatccccagcatctccacc

SEQ ID NO: 34981 - DNA, 28 bp, Homo Sapiens
cccgggttcgatccccggcatctccacc

SEQ ID NO: 34982 - DNA, 24 bp, Homo Sapiens
cccgggttcgattcccggccaatg

SEQ ID NO: 34983 - DNA, 26 bp, Homo Sapiens
cccgggttcgattcccggtcagggaa

SEQ ID NO: 34984 - DNA, 27 bp, Homo Sapiens
cccgggttcgattcccggtcagggaac

SEQ ID NO: 34985 - DNA, 16 bp, Homo Sapiens
cccgggtttcggcacc

SEQ ID NO: 34986 - DNA, 17 bp, Homo Sapiens
cccgggtttcggcacca

SEQ ID NO: 34987 - DNA, 16 bp, Homo Sapiens
cccggtatgggaacca

SEQ ID NO: 34988 - DNA, 16 bp, Homo Sapiens
cccggtcagggaacca

SEQ ID NO: 34989 - DNA, 16 bp, Homo Sapiens
cccggtgtgggaacca

SEQ ID NO: 34990 - DNA, 27 bp, Homo Sapiens
cccggttcgaaaccgggcggaaacacc

SEQ ID NO: 34991 - DNA, 16 bp, Homo Sapiens
cccgtacgggccacca

SEQ ID NO: 34992 - DNA, 16 bp, Homo Sapiens
cccgtccgtgcctcca

SEQ ID NO: 34993 - DNA, 16 bp, Homo Sapiens
ccctacgttgggcgcc

SEQ ID NO: 34994 - DNA, 32 bp, Homo Sapiens; identical to SEQ ID NO: 10829

SEQ ID NO: 34995 - DNA, 33 bp, Homo Sapiens; identical to SEQ ID NO: 10830

SEQ ID NO: 34996 - DNA, 16 bp, Homo Sapiens
ccctgctcgctgcgcc

SEQ ID NO: 34997 - DNA, 17 bp, Homo Sapiens
ccctgctcgctgcgcca

SEQ ID NO: 34998 - DNA, 16 bp, Homo Sapiens
ccctggtggtctagtg

SEQ ID NO: 34999 - DNA, 17 bp, Homo Sapiens
ccctggtggtctagtgg

SEQ ID NO: 35000 - DNA, 18 bp, Homo Sapiens
ccctggtggtctagtggc

SEQ ID NO: 35001 - DNA, 19 bp, Homo Sapiens
ccctggtggtctagtggct

SEQ ID NO: 35002 - DNA, 31 bp, Homo Sapiens; identical to SEQ ID NO: 10845

SEQ ID NO: 35003 - DNA, 32 bp, Homo Sapiens; identical to SEQ ID NO: 10846

SEQ ID NO: 35004 - DNA, 33 bp, Homo Sapiens; identical to SEQ ID NO: 10847

SEQ ID NO: 35005 - DNA, 24 bp, Homo Sapiens
ccctggtggtctagtggttaggat

SEQ ID NO: 35006 - DNA, 25 bp, Homo Sapiens
ccctggtggtctagtggttaggatt

SEQ ID NO: 35007 - DNA, 26 bp, Homo Sapiens
ccctggtggtctagtggttaggattc

SEQ ID NO: 35008 - DNA, 27 bp, Homo Sapiens
ccctggtggtctagtggttaggattcg

SEQ ID NO: 35009 - DNA, 29 bp, Homo Sapiens
ccctggtggtctagtggttaggattcggc

SEQ ID NO: 35010 - DNA, 30 bp, Homo Sapiens; identical to SEQ ID NO: 10862

SEQ ID NO: 35011 - DNA, 31 bp, Homo Sapiens; identical to SEQ ID NO: 10863

SEQ ID NO: 35012 - DNA, 32 bp, Homo Sapiens; identical to SEQ ID NO: 10864

SEQ ID NO: 35013 - DNA, 33 bp, Homo Sapiens; identical to SEQ ID NO: 10865

SEQ ID NO: 35014 - DNA, 34 bp, Homo Sapiens; identical to SEQ ID NO: 10866

SEQ ID NO: 35015 - DNA, 35 bp, Homo Sapiens; identical to SEQ ID NO: 10867

SEQ ID NO: 35016 - DNA, 27 bp, Homo Sapiens
ccctggttcaatcccgggtttcggcac

SEQ ID NO: 35017 - DNA, 25 bp, Homo Sapiens
ccctggttcgatcccgggtttcggc

SEQ ID NO: 35018 - DNA, 26 bp, Homo Sapiens
ccctggttcgatcccgggtttcggca

SEQ ID NO: 35019 - DNA, 27 bp, Homo Sapiens
ccctggttcgatcccgggtttcggcac

SEQ ID NO: 35020 - DNA, 28 bp, Homo Sapiens
ccctggttcgatcccgggtttcggcacc

SEQ ID NO: 35021 - DNA, 29 bp, Homo Sapiens
ccctggttcgatcccgggtttcggcacca

SEQ ID NO: 35022 - DNA, 16 bp, Homo Sapiens
ccctgttcgggcgcca

SEQ ID NO: 35023 - DNA, 16 bp, Homo Sapiens
cccttcgtggtcgcca

SEQ ID NO: 35024 - DNA, 19 bp, Homo Sapiens
ccgaaaatgttggttatac

SEQ ID NO: 35025 - DNA, 27 bp, Homo Sapiens
ccgaaaatgttggttatacccttcccg

SEQ ID NO: 35026 - DNA, 34 bp, Homo Sapiens; identical to SEQ ID NO: 10908

SEQ ID NO: 35027 - DNA, 35 bp, Homo Sapiens; identical to SEQ ID NO: 10909

SEQ ID NO: 35028 - DNA, 37 bp, Homo Sapiens; identical to SEQ ID NO: 10910

SEQ ID NO: 35029 - DNA, 17 bp, Homo Sapiens
ccgaaaggttggtggtt

SEQ ID NO: 35030 - DNA, 18 bp, Homo Sapiens
ccgaaaggttggtggttc

SEQ ID NO: 35031 - DNA, 19 bp, Homo Sapiens
ccgaaaggttggtggttcg

SEQ ID NO: 35032 - DNA, 35 bp, Homo Sapiens; identical to SEQ ID NO: 10915

SEQ ID NO: 35033 - DNA, 36 bp, Homo Sapiens; identical to SEQ ID NO: 10916

SEQ ID NO: 35034 - DNA, 37 bp, Homo Sapiens; identical to SEQ ID NO: 10917

SEQ ID NO: 35035 - DNA, 38 bp, Homo Sapiens; identical to SEQ ID NO: 10918

SEQ ID NO: 35036 - DNA, 37 bp, Homo Sapiens; identical to SEQ ID NO: 10919

SEQ ID NO: 35037 - DNA, 20 bp, Homo Sapiens
ccgaaatagctcagttggga

SEQ ID NO: 35038 - DNA, 22 bp, Homo Sapiens
ccgaaatagctcagttgggaga

SEQ ID NO: 35039 - DNA, 16 bp, Homo Sapiens
ccgaagatcacgggtt

SEQ ID NO: 35040 - DNA, 28 bp, Homo Sapiens
ccgaagatcacgggttcgaaccccgtcc

SEQ ID NO: 35041 - DNA, 34 bp, Homo Sapiens; identical to SEQ ID NO: 10924

SEQ ID NO: 35042 - DNA, 35 bp, Homo Sapiens; identical to SEQ ID NO: 10925

SEQ ID NO: 35043 - DNA, 36 bp, Homo Sapiens; identical to SEQ ID NO: 10926

SEQ ID NO: 35044 - DNA, 16 bp, Homo Sapiens
ccgaagatcgcgggtt

SEQ ID NO: 35045 - DNA, 17 bp, Homo Sapiens
ccgaagatcgcgggttc

SEQ ID NO: 35046 - DNA, 18 bp, Homo Sapiens
ccgaagatcgcgggttcg

SEQ ID NO: 35047 - DNA, 23 bp, Homo Sapiens
ccgaagatcgcgggttcgaaccc

SEQ ID NO: 35048 - DNA, 31 bp, Homo Sapiens; identical to SEQ ID NO: 10931

SEQ ID NO: 35049 - DNA, 34 bp, Homo Sapiens; identical to SEQ ID NO: 10933

SEQ ID NO: 35050 - DNA, 35 bp, Homo Sapiens; identical to SEQ ID NO: 10934

SEQ ID NO: 35051 - DNA, 36 bp, Homo Sapiens; identical to SEQ ID NO: 10935

SEQ ID NO: 35052 - DNA, 32 bp, Homo Sapiens
ccgagaggtcccgggttcaaatcccggacgag

SEQ ID NO: 35053 - DNA, 33 bp, Homo Sapiens; identical to SEQ ID NO: 10937

SEQ ID NO: 35054 - DNA, 34 bp, Homo Sapiens
ccgagaggtcccgggttcaaatcccggacgagcc

SEQ ID NO: 35055 - DNA, 35 bp, Homo Sapiens; identical to SEQ ID NO: 10938

SEQ ID NO: 35056 - DNA, 36 bp, Homo Sapiens; identical to SEQ ID NO: 10939

SEQ ID NO: 35057 - DNA, 37 bp, Homo Sapiens; identical to SEQ ID NO: 10940

SEQ ID NO: 35058 - DNA, 38 bp, Homo Sapiens; identical to SEQ ID NO: 10941

SEQ ID NO: 35059 - DNA, 34 bp, Homo Sapiens
ccgagatagctcagttgggagagcgttagactga

SEQ ID NO: 35060 - DNA, 39 bp, Homo Sapiens
ccgagatagctcagttgggagagcgttagactgaagatc

SEQ ID NO: 35061 - DNA, 16 bp, Homo Sapiens
ccgagcggtctaaggc

SEQ ID NO: 35062 - DNA, 16 bp, Homo Sapiens
ccgaggttgtgagttc

SEQ ID NO: 35063 - DNA, 17 bp, Homo Sapiens
ccgaggttgtgagttcg

SEQ ID NO: 35064 - DNA, 16 bp, Homo Sapiens
ccgagtcacggcacca

SEQ ID NO: 35065 - DNA, 16 bp, Homo Sapiens
ccgagtggtctaaggc

SEQ ID NO: 35066 - DNA, 18 bp, Homo Sapiens
ccgagtggtctaaggcgc

SEQ ID NO: 35067 - DNA, 26 bp, Homo Sapiens
ccgagttcaaatctcggtggaacctc

SEQ ID NO: 35068 - DNA, 25 bp, Homo Sapiens
ccgagttcaaatctcggtgggacct

SEQ ID NO: 35069 - DNA, 26 bp, Homo Sapiens
ccgagttcaaatctcggtgggacctc

SEQ ID NO: 35070 - DNA, 26 bp, Homo Sapiens
ccgagttcgaatctcggtgggacctc

SEQ ID NO: 35071 - DNA, 31 bp, Homo Sapiens
ccgcacaggttcgaatcctgttcgtgacgcc

SEQ ID NO: 35072 - DNA, 16 bp, Homo Sapiens
ccgcacgttgggcgcc

SEQ ID NO: 35073 - DNA, 17 bp, Homo Sapiens
ccgcacgttgggcgcca

SEQ ID NO: 35074 - DNA, 19 bp, Homo Sapiens
ccgcagcaacctcggttcg

SEQ ID NO: 35075 - DNA, 36 bp, Homo Sapiens; identical to SEQ ID NO: 10989

SEQ ID NO: 35076 - DNA, 37 bp, Homo Sapiens; identical to SEQ ID NO: 10990

SEQ ID NO: 35077 - DNA, 38 bp, Homo Sapiens; identical to SEQ ID NO: 10991

SEQ ID NO: 35078 - DNA, 38 bp, Homo Sapiens
ccgcatggaggcgtgggttcgaatcccacttctgacac

SEQ ID NO: 35079 - DNA, 17 bp, Homo Sapiens
ccgccgcggcccgggtt

SEQ ID NO: 35080 - DNA, 18 bp, Homo Sapiens
ccgccgcggcccgggttc

SEQ ID NO: 35081 - DNA, 19 bp, Homo Sapiens
ccgccgcggcccgggttcg

SEQ ID NO: 35082 - DNA, 28 bp, Homo Sapiens
ccgccgcggcccgggttcgattcccggt

SEQ ID NO: 35083 - DNA, 30 bp, Homo Sapiens; identical to SEQ ID NO: 11008

SEQ ID NO: 35084 - DNA, 31 bp, Homo Sapiens; identical to SEQ ID NO: 11009

SEQ ID NO: 35085 - DNA, 32 bp, Homo Sapiens; identical to SEQ ID NO: 11010

SEQ ID NO: 35086 - DNA, 33 bp, Homo Sapiens; identical to SEQ ID NO: 11011

SEQ ID NO: 35087 - DNA, 34 bp, Homo Sapiens; identical to SEQ ID NO: 11012

SEQ ID NO: 35088 - DNA, 35 bp, Homo Sapiens; identical to SEQ ID NO: 11013

SEQ ID NO: 35089 - DNA, 36 bp, Homo Sapiens; identical to SEQ ID NO: 11014

SEQ ID NO: 35090 - DNA, 37 bp, Homo Sapiens; identical to SEQ ID NO: 11015

SEQ ID NO: 35091 - DNA, 38 bp, Homo Sapiens; identical to SEQ ID NO: 11016

SEQ ID NO: 35092 - DNA, 26 bp, Homo Sapiens
ccgcctgtcacgcgggagaccggggt

SEQ ID NO: 35093 - DNA, 46 bp, Homo Sapiens; identical to SEQ ID NO: 11018

SEQ ID NO: 35094 - DNA, 47 bp, Homo Sapiens; identical to SEQ ID NO: 11019

SEQ ID NO: 35095 - DNA, 37 bp, Homo Sapiens
ccgcctgtcacgcgggagaccggggttcgattccccg

SEQ ID NO: 35096 - DNA, 45 bp, Homo Sapiens; identical to SEQ ID NO: 11023

SEQ ID NO: 35097 - DNA, 46 bp, Homo Sapiens; identical to SEQ ID NO: 11024

SEQ ID NO: 35098 - DNA, 47 bp, Homo Sapiens; identical to SEQ ID NO: 11025

SEQ ID NO: 35099 - DNA, 22 bp, Homo Sapiens
ccgcgcaggttcgaatcctgcc

SEQ ID NO: 35100 - DNA, 16 bp, Homo Sapiens
ccgcggcccgggttcg

SEQ ID NO: 35101 - DNA, 18 bp, Homo Sapiens
ccgcggcccgggttcgat

SEQ ID NO: 35102 - DNA, 19 bp, Homo Sapiens
ccgcggcccgggttcgatt

SEQ ID NO: 35103 - DNA, 20 bp, Homo Sapiens
ccgcggcccgggttcgattc

SEQ ID NO: 35104 - DNA, 21 bp, Homo Sapiens
ccgcggcccgggttcgattcc

SEQ ID NO: 35105 - DNA, 22 bp, Homo Sapiens
ccgcggcccgggttcgattccc

SEQ ID NO: 35106 - DNA, 25 bp, Homo Sapiens
ccgcggcccgggttcgattcccggt

SEQ ID NO: 35107 - DNA, 26 bp, Homo Sapiens
ccgcggcccgggttcgattcccggtc

SEQ ID NO: 35108 - DNA, 27 bp, Homo Sapiens
ccgcggcccgggttcgattcccggtca

SEQ ID NO: 35109 - DNA, 28 bp, Homo Sapiens
ccgcggcccgggttcgattcccggtcag

SEQ ID NO: 35110 - DNA, 29 bp, Homo Sapiens
ccgcggcccgggttcgattcccggtcagg

SEQ ID NO: 35111 - DNA, 32 bp, Homo Sapiens; identical to SEQ ID NO: 11046

SEQ ID NO: 35112 - DNA, 33 bp, Homo Sapiens; identical to SEQ ID NO: 11047

SEQ ID NO: 35113 - DNA, 34 bp, Homo Sapiens; identical to SEQ ID NO: 11048

SEQ ID NO: 35114 - DNA, 35 bp, Homo Sapiens; identical to SEQ ID NO: 11049

SEQ ID NO: 35115 - DNA, 29 bp, Homo Sapiens
ccgcgtggcctaatggataaggcgtctga

SEQ ID NO: 35116 - DNA, 26 bp, Homo Sapiens
ccgctggtgtagtggtatcatgcaag

SEQ ID NO: 35117 - DNA, 27 bp, Homo Sapiens
ccgctggtgtagtggtatcatgcaaga

SEQ ID NO: 35118 - DNA, 29 bp, Homo Sapiens
ccgctggtgtagtggtatcatgcaagatt

SEQ ID NO: 35119 - DNA, 30 bp, Homo Sapiens; identical to SEQ ID NO: 11070

SEQ ID NO: 35120 - DNA, 31 bp, Homo Sapiens; identical to SEQ ID NO: 11071

SEQ ID NO: 35121 - DNA, 32 bp, Homo Sapiens; identical to SEQ ID NO: 11072

SEQ ID NO: 35122 - DNA, 36 bp, Homo Sapiens; identical to SEQ ID NO: 11075

SEQ ID NO: 35123 - DNA, 47 bp, Homo Sapiens; identical to SEQ ID NO: 11080

SEQ ID NO: 35124 - DNA, 16 bp, Homo Sapiens
ccggagatgaaaacct

SEQ ID NO: 35125 - DNA, 28 bp, Homo Sapiens
ccggagatgaaaacctttttccaaggac

SEQ ID NO: 35126 - DNA, 29 bp, Homo Sapiens
ccggagatgaaaacctttttccaaggaca

SEQ ID NO: 35127 - DNA, 30 bp, Homo Sapiens; identical to SEQ ID NO: 11096

SEQ ID NO: 35128 - DNA, 31 bp, Homo Sapiens; identical to SEQ ID NO: 11097

SEQ ID NO: 35129 - DNA, 32 bp, Homo Sapiens; identical to SEQ ID NO: 11098

SEQ ID NO: 35130 - DNA, 16 bp, Homo Sapiens
ccggagctggggattg

SEQ ID NO: 35131 - DNA, 17 bp, Homo Sapiens
ccggagctggggattgt

SEQ ID NO: 35132 - DNA, 21 bp, Homo Sapiens
ccggagctggggattgtgggt

SEQ ID NO: 35133 - DNA, 31 bp, Homo Sapiens; identical to SEQ ID NO: 11100

SEQ ID NO: 35134 - DNA, 41 bp, Homo Sapiens
ccggagctggggattgtgggttcgagtcccatctgggtcgc

SEQ ID NO: 35135 - DNA, 42 bp, Homo Sapiens
ccggagctggggattgtgggttcgagtcccatctgggtcgcc

SEQ ID NO: 35136 - DNA, 16 bp, Homo Sapiens
ccggatagctcagtcg

SEQ ID NO: 35137 - DNA, 17 bp, Homo Sapiens
ccggatagctcagtcgg

SEQ ID NO: 35138 - DNA, 20 bp, Homo Sapiens
ccggatagctcagtcggtag

SEQ ID NO: 35139 - DNA, 21 bp, Homo Sapiens
ccggatagctcagtcggtaga

SEQ ID NO: 35140 - DNA, 22 bp, Homo Sapiens
ccggatagctcagtcggtagag

SEQ ID NO: 35141 - DNA, 23 bp, Homo Sapiens
ccggatagctcagtcggtagagc

SEQ ID NO: 35142 - DNA, 24 bp, Homo Sapiens
ccggatagctcagtcggtagagca

SEQ ID NO: 35143 - DNA, 25 bp, Homo Sapiens
ccggatagctcagtcggtagagcat

SEQ ID NO: 35144 - DNA, 26 bp, Homo Sapiens
ccggatagctcagtcggtagagcatc

SEQ ID NO: 35145 - DNA, 27 bp, Homo Sapiens
ccggatagctcagtcggtagagcatca

SEQ ID NO: 35146 - DNA, 28 bp, Homo Sapiens
ccggatagctcagtcggtagagcatcag

SEQ ID NO: 35147 - DNA, 30 bp, Homo Sapiens; identical to SEQ ID NO: 11116

SEQ ID NO: 35148 - DNA, 31 bp, Homo Sapiens; identical to SEQ ID NO: 11117

SEQ ID NO: 35149 - DNA, 33 bp, Homo Sapiens; identical to SEQ ID NO: 11119

SEQ ID NO: 35150 - DNA, 34 bp, Homo Sapiens; identical to SEQ ID NO: 11120

SEQ ID NO: 35151 - DNA, 16 bp, Homo Sapiens
ccggatcagaagattg

SEQ ID NO: 35152 - DNA, 17 bp, Homo Sapiens
ccggatcagaagattga

SEQ ID NO: 35153 - DNA, 18 bp, Homo Sapiens
ccggatcagaagattgag

SEQ ID NO: 35154 - DNA, 19 bp, Homo Sapiens
ccggatcagaagattgagg

SEQ ID NO: 35155 - DNA, 20 bp, Homo Sapiens
ccggatcagaagattgaggg

SEQ ID NO: 35156 - DNA, 21 bp, Homo Sapiens
ccggatcagaagattgagggt

SEQ ID NO: 35157 - DNA, 23 bp, Homo Sapiens
ccggatcagaagattgagggttc

SEQ ID NO: 35158 - DNA, 31 bp, Homo Sapiens; identical to SEQ ID NO: 11132

SEQ ID NO: 35159 - DNA, 41 bp, Homo Sapiens
ccggatcagaagattgagggttcgagtcccttcgtggtcgc

SEQ ID NO: 35160 - DNA, 42 bp, Homo Sapiens; identical to SEQ ID NO: 11133

SEQ ID NO: 35161 - DNA, 18 bp, Homo Sapiens
ccggatggaggcgtgggt

SEQ ID NO: 35162 - DNA, 37 bp, Homo Sapiens; identical to SEQ ID NO: 11143

SEQ ID NO: 35163 - DNA, 38 bp, Homo Sapiens; identical to SEQ ID NO: 11144

SEQ ID NO: 35164 - DNA, 39 bp, Homo Sapiens; identical to SEQ ID NO: 11145

SEQ ID NO: 35165 - DNA, 16 bp, Homo Sapiens
ccggctagctcagtcg

SEQ ID NO: 35166 - DNA, 23 bp, Homo Sapiens
ccggctagctcagtcggtagagc

SEQ ID NO: 35167 - DNA, 24 bp, Homo Sapiens
ccggctagctcagtcggtagagca

SEQ ID NO: 35168 - DNA, 25 bp, Homo Sapiens
ccggctagctcagtcggtagagcat

SEQ ID NO: 35169 - DNA, 26 bp, Homo Sapiens
ccggctagctcagtcggtagagcatg

SEQ ID NO: 35170 - DNA, 27 bp, Homo Sapiens
ccggctagctcagtcggtagagcatga

SEQ ID NO: 35171 - DNA, 28 bp, Homo Sapiens
ccggctagctcagtcggtagagcatgag

SEQ ID NO: 35172 - DNA, 29 bp, Homo Sapiens
ccggctagctcagtcggtagagcatgaga

SEQ ID NO: 35173 - DNA, 30 bp, Homo Sapiens; identical to SEQ ID NO: 11159

SEQ ID NO: 35174 - DNA, 31 bp, Homo Sapiens; identical to SEQ ID NO: 11160

SEQ ID NO: 35175 - DNA, 32 bp, Homo Sapiens; identical to SEQ ID NO: 11161

SEQ ID NO: 35176 - DNA, 33 bp, Homo Sapiens; identical to SEQ ID NO: 11162

SEQ ID NO: 35177 - DNA, 31 bp, Homo Sapiens; identical to SEQ ID NO: 11165

SEQ ID NO: 35178 - DNA, 32 bp, Homo Sapiens; identical to SEQ ID NO: 11166

SEQ ID NO: 35179 - DNA, 33 bp, Homo Sapiens; identical to SEQ ID NO: 11167

SEQ ID NO: 35180 - DNA, 34 bp, Homo Sapiens; identical to SEQ ID NO: 11168

SEQ ID NO: 35181 - DNA, 36 bp, Homo Sapiens; identical to SEQ ID NO: 11170

SEQ ID NO: 35182 - DNA, 37 bp, Homo Sapiens; identical to SEQ ID NO: 11171

SEQ ID NO: 35183 - DNA, 38 bp, Homo Sapiens; identical to SEQ ID NO: 11172

SEQ ID NO: 35184 - DNA, 39 bp, Homo Sapiens; identical to SEQ ID NO: 11173

SEQ ID NO: 35185 - DNA, 40 bp, Homo Sapiens; identical to SEQ ID NO: 11174

SEQ ID NO: 35186 - DNA, 41 bp, Homo Sapiens; identical to SEQ ID NO: 11175

SEQ ID NO: 35187 - DNA, 47 bp, Homo Sapiens
ccggctagctcagtcggtagagcatgagactcttaatctcagggtcg

SEQ ID NO: 35188 - DNA, 27 bp, Homo Sapiens
ccggctagctcagtcggtagagcatgg

SEQ ID NO: 35189 - DNA, 28 bp, Homo Sapiens
ccggctagctcagtcggtagagcatggg

SEQ ID NO: 35190 - DNA, 29 bp, Homo Sapiens
ccggctagctcagtcggtagagcatggga

SEQ ID NO: 35191 - DNA, 30 bp, Homo Sapiens; identical to SEQ ID NO: 11179

SEQ ID NO: 35192 - DNA, 31 bp, Homo Sapiens; identical to SEQ ID NO: 11180

SEQ ID NO: 35193 - DNA, 32 bp, Homo Sapiens; identical to SEQ ID NO: 11181

SEQ ID NO: 35194 - DNA, 33 bp, Homo Sapiens; identical to SEQ ID NO: 11182

SEQ ID NO: 35195 - DNA, 34 bp, Homo Sapiens; identical to SEQ ID NO: 11183

SEQ ID NO: 35196 - DNA, 37 bp, Homo Sapiens; identical to SEQ ID NO: 11186

SEQ ID NO: 35197 - DNA, 38 bp, Homo Sapiens; identical to SEQ ID NO: 11187

SEQ ID NO: 35198 - DNA, 39 bp, Homo Sapiens; identical to SEQ ID NO: 11188

SEQ ID NO: 35199 - DNA, 40 bp, Homo Sapiens; identical to SEQ ID NO: 11189

SEQ ID NO: 35200 - DNA, 41 bp, Homo Sapiens; identical to SEQ ID NO: 11190

SEQ ID NO: 35201 - DNA, 47 bp, Homo Sapiens; identical to SEQ ID NO: 11191

SEQ ID NO: 35202 - DNA, 16 bp, Homo Sapiens
ccggctcgaaggacca

SEQ ID NO: 35203 - DNA, 16 bp, Homo Sapiens
ccggctcggaggacca

SEQ ID NO: 35204 - DNA, 16 bp, Homo Sapiens
ccgggcagaagcacca

SEQ ID NO: 35205 - DNA, 16 bp, Homo Sapiens
ccgggcggaaacacca

SEQ ID NO: 35206 - DNA, 27 bp, Homo Sapiens
ccggggttcaagtccctgttcgggcgc

SEQ ID NO: 35207 - DNA, 28 bp, Homo Sapiens
ccggggttcaagtccctgttcgggcgcc

SEQ ID NO: 35208 - DNA, 27 bp, Homo Sapiens
ccggggttcaattccccgacggggagc

SEQ ID NO: 35209 - DNA, 28 bp, Homo Sapiens
ccggggttcaattccccgacggggagcc

SEQ ID NO: 35210 - DNA, 26 bp, Homo Sapiens
ccggggttcgattccccgacggggag

SEQ ID NO: 35211 - DNA, 27 bp, Homo Sapiens
ccggggttcgattccccgacggggagc

SEQ ID NO: 35212 - DNA, 28 bp, Homo Sapiens
ccggggttcgattccccgacggggagcc

SEQ ID NO: 35213 - DNA, 29 bp, Homo Sapiens
ccggggttcgattccccgacggggagcca

SEQ ID NO: 35214 - DNA, 16 bp, Homo Sapiens
ccgggtgccccctcca

SEQ ID NO: 35215 - DNA, 27 bp, Homo Sapiens
ccgggttcaatccccggcacctccacc

SEQ ID NO: 35216 - DNA, 26 bp, Homo Sapiens
ccgggttcgactcccggtatgggaac

SEQ ID NO: 35217 - DNA, 24 bp, Homo Sapiens
ccgggttcgactcccggtgtggga

SEQ ID NO: 35218 - DNA, 25 bp, Homo Sapiens
ccgggttcgactcccggtgtgggaa

SEQ ID NO: 35219 - DNA, 26 bp, Homo Sapiens
ccgggttcgactcccggtgtgggaac

SEQ ID NO: 35220 - DNA, 27 bp, Homo Sapiens
ccgggttcgactcccggtgtgggaacc

SEQ ID NO: 35221 - DNA, 26 bp, Homo Sapiens
ccgggttcgagtcccggcggagtcgc

SEQ ID NO: 35222 - DNA, 27 bp, Homo Sapiens
ccgggttcgagtcccggcggagtcgcc

SEQ ID NO: 35223 - DNA, 27 bp, Homo Sapiens
ccgggttcgatccccagcatctccacc

SEQ ID NO: 35224 - DNA, 26 bp, Homo Sapiens
ccgggttcgatccccggcatctccac

SEQ ID NO: 35225 - DNA, 27 bp, Homo Sapiens
ccgggttcgatccccggcatctccacc

SEQ ID NO: 35226 - DNA, 26 bp, Homo Sapiens
ccgggttcgattcccggccaacgcac

SEQ ID NO: 35227 - DNA, 22 bp, Homo Sapiens
ccgggttcgattcccgggcggc

SEQ ID NO: 35228 - DNA, 25 bp, Homo Sapiens
ccgggttcgattcccgggcggcgca

SEQ ID NO: 35229 - DNA, 26 bp, Homo Sapiens
ccgggttcgattcccgggcggcgcac

SEQ ID NO: 35230 - DNA, 25 bp, Homo Sapiens
ccgggttcgattcccggtcagggaa

SEQ ID NO: 35231 - DNA, 26 bp, Homo Sapiens
ccgggttcgattcccggtcagggaac

SEQ ID NO: 35232 - DNA, 16 bp, Homo Sapiens
ccgggtttcggcacca

SEQ ID NO: 35233 - DNA, 17 bp, Homo Sapiens
ccggttcgaaaccgggc

SEQ ID NO: 35234 - DNA, 23 bp, Homo Sapiens
ccggttcgaaaccgggcggaaac

SEQ ID NO: 35235 - DNA, 24 bp, Homo Sapiens
ccggttcgaaaccgggcggaaaca

SEQ ID NO: 35236 - DNA, 26 bp, Homo Sapiens
ccggttcgaaaccgggcggaaacacc

SEQ ID NO: 35237 - DNA, 29 bp, Homo Sapiens
ccgtagtgtagcggttatcacattcgcct

SEQ ID NO: 35238 - DNA, 19 bp, Homo Sapiens
ccgtagtgtagtggtcatc

SEQ ID NO: 35239 - DNA, 27 bp, Homo Sapiens
ccgtagtgtagtggtcatcacgttcgc

SEQ ID NO: 35240 - DNA, 28 bp, Homo Sapiens
ccgtagtgtagtggtcatcacgttcgcc

SEQ ID NO: 35241 - DNA, 29 bp, Homo Sapiens
ccgtagtgtagtggtcatcacgttcgcct

SEQ ID NO: 35242 - DNA, 19 bp, Homo Sapiens
ccgtagtgtagtggttatc

SEQ ID NO: 35243 - DNA, 20 bp, Homo Sapiens
ccgtagtgtagtggttatca

SEQ ID NO: 35244 - DNA, 28 bp, Homo Sapiens
ccgtagtgtagtggttatcacgttcgcc

SEQ ID NO: 35245 - DNA, 29 bp, Homo Sapiens
ccgtagtgtagtggttatcacgttcgcct

SEQ ID NO: 35246 - DNA, 32 bp, Homo Sapiens; identical to SEQ ID NO: 11297

SEQ ID NO: 35247 - DNA, 47 bp, Homo Sapiens
ccgtagtgtagtggttatcacgttcgcctcacacgcgaaaggtcccc

SEQ ID NO: 35248 - DNA, 18 bp, Homo Sapiens
ccgtatggaggcgtgggt

SEQ ID NO: 35249 - DNA, 37 bp, Homo Sapiens
ccgtatggaggcgtgggttcgaatcccacttctgaca

SEQ ID NO: 35250 - DNA, 38 bp, Homo Sapiens
ccgtatggaggcgtgggttcgaatcccacttctgacac

SEQ ID NO: 35251 - DNA, 39 bp, Homo Sapiens
ccgtatggaggcgtgggttcgaatcccacttctgacacc

SEQ ID NO: 35252 - DNA, 16 bp, Homo Sapiens
ccgtgatcgtatagtg

SEQ ID NO: 35253 - DNA, 20 bp, Homo Sapiens
ccgtgatcgtatagtggtta

SEQ ID NO: 35254 - DNA, 21 bp, Homo Sapiens
ccgtgatcgtatagtggttag

SEQ ID NO: 35255 - DNA, 22 bp, Homo Sapiens
ccgtgatcgtatagtggttagt

SEQ ID NO: 35256 - DNA, 23 bp, Homo Sapiens
ccgtgatcgtatagtggttagta

SEQ ID NO: 35257 - DNA, 24 bp, Homo Sapiens
ccgtgatcgtatagtggttagtac

SEQ ID NO: 35258 - DNA, 25 bp, Homo Sapiens
ccgtgatcgtatagtggttagtact

SEQ ID NO: 35259 - DNA, 26 bp, Homo Sapiens
ccgtgatcgtatagtggttagtactc

SEQ ID NO: 35260 - DNA, 27 bp, Homo Sapiens
ccgtgatcgtatagtggttagtactct

SEQ ID NO: 35261 - DNA, 28 bp, Homo Sapiens
ccgtgatcgtatagtggttagtactctg

SEQ ID NO: 35262 - DNA, 29 bp, Homo Sapiens
ccgtgatcgtatagtggttagtactctgc

SEQ ID NO: 35263 - DNA, 30 bp, Homo Sapiens; identical to SEQ ID NO: 11315

SEQ ID NO: 35264 - DNA, 31 bp, Homo Sapiens; identical to SEQ ID NO: 11316

SEQ ID NO: 35265 - DNA, 32 bp, Homo Sapiens; identical to SEQ ID NO: 11317

SEQ ID NO: 35266 - DNA, 33 bp, Homo Sapiens; identical to SEQ ID NO: 11318

SEQ ID NO: 35267 - DNA, 34 bp, Homo Sapiens; identical to SEQ ID NO: 11319

SEQ ID NO: 35268 - DNA, 35 bp, Homo Sapiens; identical to SEQ ID NO: 11320

SEQ ID NO: 35269 - DNA, 37 bp, Homo Sapiens; identical to SEQ ID NO: 11322

SEQ ID NO: 35270 - DNA, 43 bp, Homo Sapiens
ccgtgatcgtatagtggttagtactctgcgttgtggccgcagc

SEQ ID NO: 35271 - DNA, 47 bp, Homo Sapiens; identical to SEQ ID NO: 11328

SEQ ID NO: 35272 - DNA, 16 bp, Homo Sapiens
ccgtgcgagaatacca

SEQ ID NO: 35273 - DNA, 16 bp, Homo Sapiens
cctaagccagggattg

SEQ ID NO: 35274 - DNA, 42 bp, Homo Sapiens
cctaagccagggattgtgggttcgagtcccacctggggtacc

SEQ ID NO: 35275 - DNA, 41 bp, Homo Sapiens
cctaagccagggattgtgggttcgagtcccatctggggtgc

SEQ ID NO: 35276 - DNA, 42 bp, Homo Sapiens; identical to SEQ ID NO: 11347

SEQ ID NO: 35277 - DNA, 43 bp, Homo Sapiens; identical to SEQ ID NO: 11348

SEQ ID NO: 35278 - DNA, 40 bp, Homo Sapiens
cctaatggataaggcatcagcctccggagctggggattgt

SEQ ID NO: 35279 - DNA, 16 bp, Homo Sapiens
cctacccagggacgcc

SEQ ID NO: 35280 - DNA, 16 bp, Homo Sapiens
cctacgttgggcgcca

SEQ ID NO: 35281 - DNA, 16 bp, Homo Sapiens
cctcacacggggcacc

SEQ ID NO: 35282 - DNA, 17 bp, Homo Sapiens
cctcacacggggcacca

SEQ ID NO: 35283 - DNA, 16 bp, Homo Sapiens
cctcacctggagcacc

SEQ ID NO: 35284 - DNA, 17 bp, Homo Sapiens
cctcacctggagcacca

SEQ ID NO: 35285 - DNA, 16 bp, Homo Sapiens
cctcagagagggcacc

SEQ ID NO: 35286 - DNA, 16 bp, Homo Sapiens
cctcagagggggcacc

SEQ ID NO: 35287 - DNA, 17 bp, Homo Sapiens
cctcagagggggcacca

SEQ ID NO: 35288 - DNA, 29 bp, Homo Sapiens
cctcagtaagttgcaatacttaatttctg

SEQ ID NO: 35289 - DNA, 31 bp, Homo Sapiens; identical to SEQ ID NO: 11385

SEQ ID NO: 35290 - DNA, 32 bp, Homo Sapiens; identical to SEQ ID NO: 11386

SEQ ID NO: 35291 - DNA, 45 bp, Homo Sapiens
cctccggagctggggattgtgggttcgagtcccatctgggtcgcc

SEQ ID NO: 35292 - DNA, 16 bp, Homo Sapiens
cctcgctggggcctcc

SEQ ID NO: 35293 - DNA, 26 bp, Homo Sapiens
cctcggttcgaatccgagtcacggca

SEQ ID NO: 35294 - DNA, 27 bp, Homo Sapiens
cctcggttcgaatccgagtcacggcac

SEQ ID NO: 35295 - DNA, 19 bp, Homo Sapiens
cctcttagcgcagtgggca

SEQ ID NO: 35296 - DNA, 16 bp, Homo Sapiens
cctctttacagtgacc

SEQ ID NO: 35297 - DNA, 17 bp, Homo Sapiens
cctctttacagtgacca

SEQ ID NO: 35298 - DNA, 16 bp, Homo Sapiens
cctctttttaccacca

SEQ ID NO: 35299 - DNA, 28 bp, Homo Sapiens
cctgagttcgagcctcagagagggcacc

SEQ ID NO: 35300 - DNA, 19 bp, Homo Sapiens
cctgccacgcgggaggccc

SEQ ID NO: 35301 - DNA, 21 bp, Homo Sapiens
cctgccacgcgggaggcccgg

SEQ ID NO: 35302 - DNA, 16 bp, Homo Sapiens
cctgccgactacgcca

SEQ ID NO: 35303 - DNA, 16 bp, Homo Sapiens
cctgccgcggtcgcca

SEQ ID NO: 35304 - DNA, 16 bp, Homo Sapiens
cctgctcacagcgcca

SEQ ID NO: 35305 - DNA, 16 bp, Homo Sapiens
cctgctcgctgcgcca

SEQ ID NO: 35306 - DNA, 16 bp, Homo Sapiens
cctggctggctcgcca

SEQ ID NO: 35307 - DNA, 27 bp, Homo Sapiens
cctgggttcgaatcccagcggggcctc

SEQ ID NO: 35308 - DNA, 27 bp, Homo Sapiens
cctgggttcgaatcccagcggtgcctc

SEQ ID NO: 35309 - DNA, 27 bp, Homo Sapiens
cctgggttcgagccccagtggaaccac

SEQ ID NO: 35310 - DNA, 28 bp, Homo Sapiens
cctgggttcgagccccagtggaaccacc

SEQ ID NO: 35311 - DNA, 28 bp, Homo Sapiens
cctggtggtctagtggctaggattcggc

SEQ ID NO: 35312 - DNA, 30 bp, Homo Sapiens; identical to SEQ ID NO: 11478

SEQ ID NO: 35313 - DNA, 31 bp, Homo Sapiens; identical to SEQ ID NO: 11479

SEQ ID NO: 35314 - DNA, 32 bp, Homo Sapiens; identical to SEQ ID NO: 11480

SEQ ID NO: 35315 - DNA, 34 bp, Homo Sapiens; identical to SEQ ID NO: 11482

SEQ ID NO: 35316 - DNA, 23 bp, Homo Sapiens
cctggtggtctagtggttaggat

SEQ ID NO: 35317 - DNA, 24 bp, Homo Sapiens
cctggtggtctagtggttaggatt

SEQ ID NO: 35318 - DNA, 26 bp, Homo Sapiens
cctggtggtctagtggttaggattcg

SEQ ID NO: 35319 - DNA, 28 bp, Homo Sapiens
cctggtggtctagtggttaggattcggc

SEQ ID NO: 35320 - DNA, 29 bp, Homo Sapiens
cctggtggtctagtggttaggattcggcg

SEQ ID NO: 35321 - DNA, 30 bp, Homo Sapiens; identical to SEQ ID NO: 11496

SEQ ID NO: 35322 - DNA, 31 bp, Homo Sapiens; identical to SEQ ID NO: 11497

SEQ ID NO: 35323 - DNA, 32 bp, Homo Sapiens; identical to SEQ ID NO: 11498

SEQ ID NO: 35324 - DNA, 33 bp, Homo Sapiens; identical to SEQ ID NO: 11499

SEQ ID NO: 35325 - DNA, 34 bp, Homo Sapiens; identical to SEQ ID NO: 11500

SEQ ID NO: 35326 - DNA, 35 bp, Homo Sapiens; identical to SEQ ID NO: 11501

SEQ ID NO: 35327 - DNA, 40 bp, Homo Sapiens; identical to SEQ ID NO: 11506

SEQ ID NO: 35328 - DNA, 26 bp, Homo Sapiens
cctggttcaatcccgggtttcggcac

SEQ ID NO: 35329 - DNA, 25 bp, Homo Sapiens
cctggttcgatcccgggtttcggca

SEQ ID NO: 35330 - DNA, 26 bp, Homo Sapiens
cctggttcgatcccgggtttcggcac

SEQ ID NO: 35331 - DNA, 27 bp, Homo Sapiens
cctggttcgatcccgggtttcggcacc

SEQ ID NO: 35332 - DNA, 46 bp, Homo Sapiens
cctggttttcacccaggcggcccgggttcgactcccggtgtgggaa

SEQ ID NO: 35333 - DNA, 47 bp, Homo Sapiens
cctggttttcacccaggcggcccgggttcgactcccggtgtgggaac

SEQ ID NO: 35334 - DNA, 16 bp, Homo Sapiens
cctgtcacgcgggaga

SEQ ID NO: 35335 - DNA, 18 bp, Homo Sapiens
cctgtcacgcgggagacc

SEQ ID NO: 35336 - DNA, 19 bp, Homo Sapiens
cctgtcacgcgggagaccg

SEQ ID NO: 35337 - DNA, 20 bp, Homo Sapiens
cctgtcacgcgggagaccgg

SEQ ID NO: 35338 - DNA, 21 bp, Homo Sapiens
cctgtcacgcgggagaccggg

SEQ ID NO: 35339 - DNA, 23 bp, Homo Sapiens
cctgtcacgcgggagaccggggt

SEQ ID NO: 35340 - DNA, 41 bp, Homo Sapiens
cctgtcacgcgggagaccggggttcaattccccgacgggga

SEQ ID NO: 35341 - DNA, 43 bp, Homo Sapiens; identical to SEQ ID NO: 11522

SEQ ID NO: 35342 - DNA, 44 bp, Homo Sapiens; identical to SEQ ID NO: 11523

SEQ ID NO: 35343 - DNA, 35 bp, Homo Sapiens
cctgtcacgcgggagaccggggttcgattccccga

SEQ ID NO: 35344 - DNA, 37 bp, Homo Sapiens
cctgtcacgcgggagaccggggttcgattccccgacg

SEQ ID NO: 35345 - DNA, 38 bp, Homo Sapiens; identical to SEQ ID NO: 11526

SEQ ID NO: 35346 - DNA, 39 bp, Homo Sapiens; identical to SEQ ID NO: 11527

SEQ ID NO: 35347 - DNA, 41 bp, Homo Sapiens; identical to SEQ ID NO: 11529

SEQ ID NO: 35348 - DNA, 42 bp, Homo Sapiens; identical to SEQ ID NO: 11530

SEQ ID NO: 35349 - DNA, 43 bp, Homo Sapiens; identical to SEQ ID NO: 11531

SEQ ID NO: 35350 - DNA, 44 bp, Homo Sapiens; identical to SEQ ID NO: 11532

SEQ ID NO: 35351 - DNA, 45 bp, Homo Sapiens; identical to SEQ ID NO: 11533

SEQ ID NO: 35352 - DNA, 16 bp, Homo Sapiens
cctgttcgtgacgcca

SEQ ID NO: 35353 - DNA, 19 bp, Homo Sapiens
ccttagcgcagtaggcagc

SEQ ID NO: 35354 - DNA, 17 bp, Homo Sapiens
ccttaggtcgctggttc

SEQ ID NO: 35355 - DNA, 35 bp, Homo Sapiens; identical to SEQ ID NO: 11540

SEQ ID NO: 35356 - DNA, 36 bp, Homo Sapiens; identical to SEQ ID NO: 11541

SEQ ID NO: 35357 - DNA, 35 bp, Homo Sapiens; identical to SEQ ID NO: 11542

SEQ ID NO: 35358 - DNA, 35 bp, Homo Sapiens; identical to SEQ ID NO: 11545

SEQ ID NO: 35359 - DNA, 36 bp, Homo Sapiens; identical to SEQ ID NO: 11546

SEQ ID NO: 35360 - DNA, 18 bp, Homo Sapiens
ccttccaagcagttgacc

SEQ ID NO: 35361 - DNA, 19 bp, Homo Sapiens
ccttccaagcagttgaccc

SEQ ID NO: 35362 - DNA, 20 bp, Homo Sapiens
ccttccaagcagttgacccg

SEQ ID NO: 35363 - DNA, 21 bp, Homo Sapiens
ccttccaagcagttgacccgg

SEQ ID NO: 35364 - DNA, 22 bp, Homo Sapiens
ccttccaagcagttgacccggg

SEQ ID NO: 35365 - DNA, 23 bp, Homo Sapiens
ccttccaagcagttgacccgggt

SEQ ID NO: 35366 - DNA, 42 bp, Homo Sapiens
ccttccaagcagttgacccgggttcgattcccggccaacgca

SEQ ID NO: 35367 - DNA, 16 bp, Homo Sapiens
ccttcgatagctcagc

SEQ ID NO: 35368 - DNA, 17 bp, Homo Sapiens
ccttcgatagctcagct

SEQ ID NO: 35369 - DNA, 18 bp, Homo Sapiens
ccttcgatagctcagctg

SEQ ID NO: 35370 - DNA, 19 bp, Homo Sapiens
ccttcgatagctcagctgg

SEQ ID NO: 35371 - DNA, 25 bp, Homo Sapiens
ccttcgatagctcagctggtagagc

SEQ ID NO: 35372 - DNA, 35 bp, Homo Sapiens; identical to SEQ ID NO: 11573

SEQ ID NO: 35373 - DNA, 16 bp, Homo Sapiens
ccttcgatagctcagt

SEQ ID NO: 35374 - DNA, 18 bp, Homo Sapiens
ccttcgatagctcagttg

SEQ ID NO: 35375 - DNA, 19 bp, Homo Sapiens
ccttcgatagctcagttgg

SEQ ID NO: 35376 - DNA, 25 bp, Homo Sapiens
ccttcgatagctcagttggtagagc

SEQ ID NO: 35377 - DNA, 33 bp, Homo Sapiens; identical to SEQ ID NO: 11581

SEQ ID NO: 35378 - DNA, 35 bp, Homo Sapiens; identical to SEQ ID NO: 11583

SEQ ID NO: 35379 - DNA, 27 bp, Homo Sapiens
ccttttaagttaaagattaagagaacc

SEQ ID NO: 35380 - DNA, 33 bp, Homo Sapiens; identical to SEQ ID NO: 11596

SEQ ID NO: 35381 - DNA, 46 bp, Homo Sapiens; identical to SEQ ID NO: 11604

SEQ ID NO: 35382 - DNA, 16 bp, Homo Sapiens
cctttttccaaggaca

SEQ ID NO: 35383 - DNA, 17 bp, Homo Sapiens
cctttttccaaggacac

SEQ ID NO: 35384 - DNA, 18 bp, Homo Sapiens
cctttttccaaggacacc

SEQ ID NO: 35385 - DNA, 19 bp, Homo Sapiens
cctttttccaaggacacca

SEQ ID NO: 35386 - DNA, 19 bp, Homo Sapiens
cgaaaatgttggttatacc

SEQ ID NO: 35387 - DNA, 26 bp, Homo Sapiens
cgaaaatgttggttatacccttcccg

SEQ ID NO: 35388 - DNA, 29 bp, Homo Sapiens
cgaaaatgttggttatacccttcccgtac

SEQ ID NO: 35389 - DNA, 31 bp, Homo Sapiens; identical to SEQ ID NO: 11628

SEQ ID NO: 35390 - DNA, 32 bp, Homo Sapiens; identical to SEQ ID NO: 11629

SEQ ID NO: 35391 - DNA, 33 bp, Homo Sapiens; identical to SEQ ID NO: 11630

SEQ ID NO: 35392 - DNA, 34 bp, Homo Sapiens; identical to SEQ ID NO: 11631

SEQ ID NO: 35393 - DNA, 17 bp, Homo Sapiens
cgaaaccatcctctgct

SEQ ID NO: 35394 - DNA, 18 bp, Homo Sapiens
cgaaaccatcctctgcta

SEQ ID NO: 35395 - DNA, 20 bp, Homo Sapiens
cgaaaccatcctctgctacc

SEQ ID NO: 35396 - DNA, 18 bp, Homo Sapiens
cgaaaccgggcagaagca

SEQ ID NO: 35397 - DNA, 19 bp, Homo Sapiens
cgaaaccgggcagaagcac

SEQ ID NO: 35398 - DNA, 20 bp, Homo Sapiens
cgaaaccgggcagaagcacc

SEQ ID NO: 35399 - DNA, 16 bp, Homo Sapiens
cgaaaccgggcggaaa

SEQ ID NO: 35400 - DNA, 17 bp, Homo Sapiens
cgaaaccgggcggaaac

SEQ ID NO: 35401 - DNA, 18 bp, Homo Sapiens
cgaaaccgggcggaaaca

SEQ ID NO: 35402 - DNA, 19 bp, Homo Sapiens
cgaaaccgggcggaaacac

SEQ ID NO: 35403 - DNA, 20 bp, Homo Sapiens
cgaaaccgggcggaaacacc

SEQ ID NO: 35404 - DNA, 21 bp, Homo Sapiens
cgaaaccgggcggaaacacca

SEQ ID NO: 35405 - DNA, 25 bp, Homo Sapiens
cgaaaggtccccggttcgaaaccgg

SEQ ID NO: 35406 - DNA, 35 bp, Homo Sapiens
cgaaaggtccccggttcgaaaccgggcagaagcac

SEQ ID NO: 35407 - DNA, 36 bp, Homo Sapiens; identical to SEQ ID NO: 11645

SEQ ID NO: 35408 - DNA, 32 bp, Homo Sapiens
cgaaaggtccccggttcgaaaccgggcggaaa

SEQ ID NO: 35409 - DNA, 33 bp, Homo Sapiens; identical to SEQ ID NO: 11647

SEQ ID NO: 35410 - DNA, 34 bp, Homo Sapiens; identical to SEQ ID NO: 11648

SEQ ID NO: 35411 - DNA, 35 bp, Homo Sapiens; identical to SEQ ID NO: 11649

SEQ ID NO: 35412 - DNA, 36 bp, Homo Sapiens; identical to SEQ ID NO: 11650

SEQ ID NO: 35413 - DNA, 34 bp, Homo Sapiens
cgaaaggtccccggttcgatcccgggcggaaaca

SEQ ID NO: 35414 - DNA, 36 bp, Homo Sapiens
cgaaaggtccccggttcgatcccgggcggaaacacc

SEQ ID NO: 35415 - DNA, 36 bp, Homo Sapiens
cgaaaggtccctggatcaaaaccaggcggaaacacc

SEQ ID NO: 35416 - DNA, 16 bp, Homo Sapiens
cgaaaggttggtggtt

SEQ ID NO: 35417 - DNA, 18 bp, Homo Sapiens
cgaaaggttggtggttcg

SEQ ID NO: 35418 - DNA, 34 bp, Homo Sapiens; identical to SEQ ID NO: 11656

SEQ ID NO: 35419 - DNA, 35 bp, Homo Sapiens; identical to SEQ ID NO: 11657

SEQ ID NO: 35420 - DNA, 36 bp, Homo Sapiens; identical to SEQ ID NO: 11658

SEQ ID NO: 35421 - DNA, 37 bp, Homo Sapiens; identical to SEQ ID NO: 11659

SEQ ID NO: 35422 - DNA, 36 bp, Homo Sapiens; identical to SEQ ID NO: 11660

SEQ ID NO: 35423 - DNA, 20 bp, Homo Sapiens
cgaaccccactcctggtacc

SEQ ID NO: 35424 - DNA, 20 bp, Homo Sapiens
cgaaccccgtacgggccacc

SEQ ID NO: 35425 - DNA, 18 bp, Homo Sapiens
cgaaccccgtccgtgcct

SEQ ID NO: 35426 - DNA, 19 bp, Homo Sapiens
cgaaccccgtccgtgcctc

SEQ ID NO: 35427 - DNA, 20 bp, Homo Sapiens
cgaaccccgtccgtgcctcc

SEQ ID NO: 35428 - DNA, 20 bp, Homo Sapiens
cgaaccctgctcgctgcgcc

SEQ ID NO: 35429 - DNA, 21 bp, Homo Sapiens
cgaagaagcagcttcaaacct

SEQ ID NO: 35430 - DNA, 27 bp, Homo Sapiens
cgaagaagcagcttcaaacctgccggg

SEQ ID NO: 35431 - DNA, 28 bp, Homo Sapiens
cgaagaagcagcttcaaacctgccgggg

SEQ ID NO: 35432 - DNA, 29 bp, Homo Sapiens
cgaagaagcagcttcaaacctgccggggc

SEQ ID NO: 35433 - DNA, 30 bp, Homo Sapiens; identical to SEQ ID NO: 11673

SEQ ID NO: 35434 - DNA, 31 bp, Homo Sapiens; identical to SEQ ID NO: 11674

SEQ ID NO: 35435 - DNA, 32 bp, Homo Sapiens; identical to SEQ ID NO: 11675

SEQ ID NO: 35436 - DNA, 33 bp, Homo Sapiens; identical to SEQ ID NO: 11676

SEQ ID NO: 35437 - DNA, 34 bp, Homo Sapiens; identical to SEQ ID NO: 11677

SEQ ID NO: 35438 - DNA, 33 bp, Homo Sapiens; identical to SEQ ID NO: 11681

SEQ ID NO: 35439 - DNA, 34 bp, Homo Sapiens; identical to SEQ ID NO: 11682

SEQ ID NO: 35440 - DNA, 16 bp, Homo Sapiens
cgaagatcgcgggttc

SEQ ID NO: 35441 - DNA, 33 bp, Homo Sapiens; identical to SEQ ID NO: 11687

SEQ ID NO: 35442 - DNA, 17 bp, Homo Sapiens
cgaatcacgtcggggtc

SEQ ID NO: 35443 - DNA, 18 bp, Homo Sapiens
cgaatcacgtcggggtca

SEQ ID NO: 35444 - DNA, 19 bp, Homo Sapiens
cgaatcacgtcggggtcac

SEQ ID NO: 35445 - DNA, 20 bp, Homo Sapiens
cgaatcacgtcggggtcacc

SEQ ID NO: 35446 - DNA, 21 bp, Homo Sapiens
cgaatcacgtcggggtcacca

SEQ ID NO: 35447 - DNA, 20 bp, Homo Sapiens
cgaatcccaccactgccacc

SEQ ID NO: 35448 - DNA, 20 bp, Homo Sapiens
cgaatcccaccagagtcgcc

SEQ ID NO: 35449 - DNA, 20 bp, Homo Sapiens
cgaatcccaccctcgtcgcc

SEQ ID NO: 35450 - DNA, 17 bp, Homo Sapiens
cgaatcccaccgctgcc

SEQ ID NO: 35451 - DNA, 18 bp, Homo Sapiens
cgaatcccaccgctgcca

SEQ ID NO: 35452 - DNA, 19 bp, Homo Sapiens
cgaatcccaccgctgccac

SEQ ID NO: 35453 - DNA, 20 bp, Homo Sapiens
cgaatcccaccgctgccacc

SEQ ID NO: 35454 - DNA, 20 bp, Homo Sapiens
cgaatcccaccttcgtcgcc

SEQ ID NO: 35455 - DNA, 18 bp, Homo Sapiens
cgaatcccactcctgaca

SEQ ID NO: 35456 - DNA, 19 bp, Homo Sapiens
cgaatcccactcctgacac

SEQ ID NO: 35457 - DNA, 20 bp, Homo Sapiens
cgaatcccactcctgacacc

SEQ ID NO: 35458 - DNA, 18 bp, Homo Sapiens
cgaatcccacttctgaca

SEQ ID NO: 35459 - DNA, 19 bp, Homo Sapiens
cgaatcccacttctgacac

SEQ ID NO: 35460 - DNA, 20 bp, Homo Sapiens
cgaatcccacttctgacacc

SEQ ID NO: 35461 - DNA, 18 bp, Homo Sapiens
cgaatcccagcggggcct

SEQ ID NO: 35462 - DNA, 19 bp, Homo Sapiens
cgaatcccagcggggcctc

SEQ ID NO: 35463 - DNA, 20 bp, Homo Sapiens
cgaatcccagcggggcctcc

SEQ ID NO: 35464 - DNA, 18 bp, Homo Sapiens
cgaatcccagcggtgcct

SEQ ID NO: 35465 - DNA, 19 bp, Homo Sapiens
cgaatcccagcggtgcctc

SEQ ID NO: 35466 - DNA, 20 bp, Homo Sapiens
cgaatcccagcggtgcctcc

SEQ ID NO: 35467 - DNA, 18 bp, Homo Sapiens
cgaatcccagtagagcct

SEQ ID NO: 35468 - DNA, 19 bp, Homo Sapiens
cgaatcccagtagagcctc

SEQ ID NO: 35469 - DNA, 20 bp, Homo Sapiens
cgaatcccagtagagcctcc

SEQ ID NO: 35470 - DNA, 18 bp, Homo Sapiens
cgaatcccatcctcgtcg

SEQ ID NO: 35471 - DNA, 19 bp, Homo Sapiens
cgaatcccatcctcgtcgc

SEQ ID NO: 35472 - DNA, 20 bp, Homo Sapiens
cgaatcccatcctcgtcgcc

SEQ ID NO: 35473 - DNA, 21 bp, Homo Sapiens
cgaatcccatcctcgtcgcca

SEQ ID NO: 35474 - DNA, 19 bp, Homo Sapiens
cgaatcccttcgtggttgc

SEQ ID NO: 35475 - DNA, 17 bp, Homo Sapiens
cgaatccgagtcacggc

SEQ ID NO: 35476 - DNA, 18 bp, Homo Sapiens
cgaatccgagtcacggca

SEQ ID NO: 35477 - DNA, 19 bp, Homo Sapiens
cgaatccgagtcacggcac

SEQ ID NO: 35478 - DNA, 20 bp, Homo Sapiens
cgaatccgagtcacggcacc

SEQ ID NO: 35479 - DNA, 21 bp, Homo Sapiens
cgaatccgagtcacggcacca

SEQ ID NO: 35480 - DNA, 18 bp, Homo Sapiens
cgaatccggctcgaagga

SEQ ID NO: 35481 - DNA, 19 bp, Homo Sapiens
cgaatccggctcgaaggac

SEQ ID NO: 35482 - DNA, 20 bp, Homo Sapiens
cgaatccggctcgaaggacc

SEQ ID NO: 35483 - DNA, 19 bp, Homo Sapiens
cgaatccggctcggaggac

SEQ ID NO: 35484 - DNA, 20 bp, Homo Sapiens
cgaatccggctcggaggacc

SEQ ID NO: 35485 - DNA, 19 bp, Homo Sapiens
cgaatcctgccgactacgc

SEQ ID NO: 35486 - DNA, 20 bp, Homo Sapiens
cgaatcctgccgactacgcc

SEQ ID NO: 35487 - DNA, 20 bp, Homo Sapiens
cgaatcctgctcacagcgcc

SEQ ID NO: 35488 - DNA, 20 bp, Homo Sapiens
cgaatcctgtcggctacgcc

SEQ ID NO: 35489 - DNA, 18 bp, Homo Sapiens
cgaatcctgttcgtgacg

SEQ ID NO: 35490 - DNA, 19 bp, Homo Sapiens
cgaatcctgttcgtgacgc

SEQ ID NO: 35491 - DNA, 20 bp, Homo Sapiens
cgaatcctgttcgtgacgcc

SEQ ID NO: 35492 - DNA, 18 bp, Homo Sapiens
cgaatctcggtgggacct

SEQ ID NO: 35493 - DNA, 19 bp, Homo Sapiens
cgaatctcggtgggacctc

SEQ ID NO: 35494 - DNA, 18 bp, Homo Sapiens
cgaccccttatttacccc

SEQ ID NO: 35495 - DNA, 19 bp, Homo Sapiens
cgaccccttatttacccca

SEQ ID NO: 35496 - DNA, 18 bp, Homo Sapiens
cgactcccggtatgggaa

SEQ ID NO: 35497 - DNA, 19 bp, Homo Sapiens
cgactcccggtatgggaac

SEQ ID NO: 35498 - DNA, 20 bp, Homo Sapiens
cgactcccggtatgggaacc

SEQ ID NO: 35499 - DNA, 16 bp, Homo Sapiens
cgactcccggtgtggg

SEQ ID NO: 35500 - DNA, 17 bp, Homo Sapiens
cgactcccggtgtggga

SEQ ID NO: 35501 - DNA, 18 bp, Homo Sapiens
cgactcccggtgtgggaa

SEQ ID NO: 35502 - DNA, 19 bp, Homo Sapiens
cgactcccggtgtgggaac

SEQ ID NO: 35503 - DNA, 20 bp, Homo Sapiens
cgactcccggtgtgggaacc

SEQ ID NO: 35504 - DNA, 21 bp, Homo Sapiens
cgactcccggtgtgggaacca

SEQ ID NO: 35505 - DNA, 17 bp, Homo Sapiens
cgactcctggctggctc

SEQ ID NO: 35506 - DNA, 18 bp, Homo Sapiens
cgactcctggctggctcg

SEQ ID NO: 35507 - DNA, 19 bp, Homo Sapiens
cgactcctggctggctcgc

SEQ ID NO: 35508 - DNA, 20 bp, Homo Sapiens
cgactcctggctggctcgcc

SEQ ID NO: 35509 - DNA, 21 bp, Homo Sapiens
cgactcctggctggctcgcca

SEQ ID NO: 35510 - DNA, 32 bp, Homo Sapiens; identical to SEQ ID NO: 11786

SEQ ID NO: 35511 - DNA, 33 bp, Homo Sapiens; identical to SEQ ID NO: 11787

SEQ ID NO: 35512 - DNA, 34 bp, Homo Sapiens; identical to SEQ ID NO: 11788

SEQ ID NO: 35513 - DNA, 35 bp, Homo Sapiens; identical to SEQ ID NO: 11789

SEQ ID NO: 35514 - DNA, 36 bp, Homo Sapiens; identical to SEQ ID NO: 11790

SEQ ID NO: 35515 - DNA, 37 bp, Homo Sapiens; identical to SEQ ID NO: 11791

SEQ ID NO: 35516 - DNA, 20 bp, Homo Sapiens
cgagcccacccagggacgcc

SEQ ID NO: 35517 - DNA, 18 bp, Homo Sapiens
cgagccccacgttgggcg

SEQ ID NO: 35518 - DNA, 19 bp, Homo Sapiens
cgagccccacgttgggcgc

SEQ ID NO: 35519 - DNA, 20 bp, Homo Sapiens
cgagccccacgttgggcgcc

SEQ ID NO: 35520 - DNA, 17 bp, Homo Sapiens
cgagccccagtggaacc

SEQ ID NO: 35521 - DNA, 18 bp, Homo Sapiens
cgagccccagtggaacca

SEQ ID NO: 35522 - DNA, 19 bp, Homo Sapiens
cgagccccagtggaaccac

SEQ ID NO: 35523 - DNA, 20 bp, Homo Sapiens
cgagccccagtggaaccacc

SEQ ID NO: 35524 - DNA, 18 bp, Homo Sapiens
cgagcctcacacggggca

SEQ ID NO: 35525 - DNA, 20 bp, Homo Sapiens
cgagcctcacctggagcacc

SEQ ID NO: 35526 - DNA, 18 bp, Homo Sapiens
cgagcctcagagagggca

SEQ ID NO: 35527 - DNA, 16 bp, Homo Sapiens
cgaggccccgggttca

SEQ ID NO: 35528 - DNA, 33 bp, Homo Sapiens
cgaggccccgggttcaatccccggcacctccac

SEQ ID NO: 35529 - DNA, 34 bp, Homo Sapiens
cgaggccccgggttcaatccccggcacctccacc

SEQ ID NO: 35530 - DNA, 24 bp, Homo Sapiens
cgaggtgattttcatattgaattg

SEQ ID NO: 35531 - DNA, 16 bp, Homo Sapiens
cgaggtggccgagtgg

SEQ ID NO: 35532 - DNA, 22 bp, Homo Sapiens
cgaggtggccgagtggttaagg

SEQ ID NO: 35533 - DNA, 16 bp, Homo Sapiens
cgagtcccacccgggg

SEQ ID NO: 35534 - DNA, 20 bp, Homo Sapiens
cgagtcccatctgggtcgcc

SEQ ID NO: 35535 - DNA, 18 bp, Homo Sapiens
cgagtcccggcggagtcg

SEQ ID NO: 35536 - DNA, 20 bp, Homo Sapiens
cgagtcccggcggagtcgcc

SEQ ID NO: 35537 - DNA, 19 bp, Homo Sapiens
cgagtcctgccgcggtcgc

SEQ ID NO: 35538 - DNA, 20 bp, Homo Sapiens
cgagtcctgccgcggtcgcc

SEQ ID NO: 35539 - DNA, 17 bp, Homo Sapiens
cgagtggtctaaggcgc

SEQ ID NO: 35540 - DNA, 25 bp, Homo Sapiens
cgagttcaaatctcgctggggcctc

SEQ ID NO: 35541 - DNA, 24 bp, Homo Sapiens
cgagttcaaatctcggtggaacct

SEQ ID NO: 35542 - DNA, 25 bp, Homo Sapiens
cgagttcaaatctcggtggaacctc

SEQ ID NO: 35543 - DNA, 26 bp, Homo Sapiens
cgagttcaaatctcggtggaacctcc

SEQ ID NO: 35544 - DNA, 24 bp, Homo Sapiens
cgagttcaaatctcggtgggacct

SEQ ID NO: 35545 - DNA, 25 bp, Homo Sapiens
cgagttcaaatctcggtgggacctc

SEQ ID NO: 35546 - DNA, 26 bp, Homo Sapiens
cgagttcaaatctcggtgggacctcc

SEQ ID NO: 35547 - DNA, 24 bp, Homo Sapiens
cgagttcgaatctcggtgggacct

SEQ ID NO: 35548 - DNA, 25 bp, Homo Sapiens
cgagttcgaatctcggtgggacctc

SEQ ID NO: 35549 - DNA, 25 bp, Homo Sapiens
cgagttcgatcctcgctggggcctc

SEQ ID NO: 35550 - DNA, 19 bp, Homo Sapiens
cgatccccagcatctccac

SEQ ID NO: 35551 - DNA, 20 bp, Homo Sapiens
cgatccccagcatctccacc

SEQ ID NO: 35552 - DNA, 19 bp, Homo Sapiens
cgatccccggcatctccac

SEQ ID NO: 35553 - DNA, 20 bp, Homo Sapiens
cgatccccggcatctccacc

SEQ ID NO: 35554 - DNA, 16 bp, Homo Sapiens
cgatccccgtacgggc

SEQ ID NO: 35555 - DNA, 17 bp, Homo Sapiens
cgatccccgtacgggcc

SEQ ID NO: 35556 - DNA, 18 bp, Homo Sapiens
cgatccccgtacgggcca

SEQ ID NO: 35557 - DNA, 19 bp, Homo Sapiens
cgatccccgtacgggccac

SEQ ID NO: 35558 - DNA, 20 bp, Homo Sapiens
cgatccccgtacgggccacc

SEQ ID NO: 35559 - DNA, 19 bp, Homo Sapiens
cgatcccgggcggaaacac

SEQ ID NO: 35560 - DNA, 17 bp, Homo Sapiens
cgatcccgggtttcggc

SEQ ID NO: 35561 - DNA, 18 bp, Homo Sapiens
cgatcccgggtttcggca

SEQ ID NO: 35562 - DNA, 19 bp, Homo Sapiens
cgatcccgggtttcggcac

SEQ ID NO: 35563 - DNA, 20 bp, Homo Sapiens
cgatcccgggtttcggcacc

SEQ ID NO: 35564 - DNA, 30 bp, Homo Sapiens
cgatccgagttcaaatctcggtggaacctc

SEQ ID NO: 35565 - DNA, 29 bp, Homo Sapiens
cgatccgagttcaaatctcggtgggacct

SEQ ID NO: 35566 - DNA, 30 bp, Homo Sapiens; identical to SEQ ID NO: 11877

SEQ ID NO: 35567 - DNA, 20 bp, Homo Sapiens
cgatcctcacacggggcacc

SEQ ID NO: 35568 - DNA, 19 bp, Homo Sapiens
cgatcctcacctggagcac

SEQ ID NO: 35569 - DNA, 20 bp, Homo Sapiens
cgatcctcacctggagcacc

SEQ ID NO: 35570 - DNA, 19 bp, Homo Sapiens
cgatcctcgctggggcctc

SEQ ID NO: 35571 - DNA, 20 bp, Homo Sapiens
cgatgcccgcatcctccacc

SEQ ID NO: 35572 - DNA, 20 bp, Homo Sapiens
cgatgcccgcattctccacc

SEQ ID NO: 35573 - DNA, 28 bp, Homo Sapiens
cgatggatcgaaaccatcctctgctacc

SEQ ID NO: 35574 - DNA, 29 bp, Homo Sapiens
cgatggatcgaaaccatcctctgctacca

SEQ ID NO: 35575 - DNA, 34 bp, Homo Sapiens
cgatggcgtgggttcgaatcccaccgctgccacc

SEQ ID NO: 35576 - DNA, 19 bp, Homo Sapiens
cgattccagctcgaaggac

SEQ ID NO: 35577 - DNA, 18 bp, Homo Sapiens
cgattccccgacggggag

SEQ ID NO: 35578 - DNA, 19 bp, Homo Sapiens
cgattccccgacggggagc

SEQ ID NO: 35579 - DNA, 20 bp, Homo Sapiens
cgattccccgacggggagcc

SEQ ID NO: 35580 - DNA, 21 bp, Homo Sapiens
cgattccccgacggggagcca

SEQ ID NO: 35581 - DNA, 16 bp, Homo Sapiens
cgattcccggccaacg

SEQ ID NO: 35582 - DNA, 18 bp, Homo Sapiens
cgattcccggccaacgca

SEQ ID NO: 35583 - DNA, 19 bp, Homo Sapiens
cgattcccggccaacgcac

SEQ ID NO: 35584 - DNA, 20 bp, Homo Sapiens
cgattcccggccaacgcacc

SEQ ID NO: 35585 - DNA, 21 bp, Homo Sapiens
cgattcccggccaacgcacca

SEQ ID NO: 35586 - DNA, 18 bp, Homo Sapiens
cgattcccggccaatgca

SEQ ID NO: 35587 - DNA, 19 bp, Homo Sapiens
cgattcccggccaatgcac

SEQ ID NO: 35588 - DNA, 20 bp, Homo Sapiens
cgattcccggccaatgcacc

SEQ ID NO: 35589 - DNA, 21 bp, Homo Sapiens
cgattcccggccaatgcacca

SEQ ID NO: 35590 - DNA, 20 bp, Homo Sapiens
cgattcccggcccatgcacc

SEQ ID NO: 35591 - DNA, 16 bp, Homo Sapiens
cgattcccgggcggcg

SEQ ID NO: 35592 - DNA, 17 bp, Homo Sapiens
cgattcccgggcggcgc

SEQ ID NO: 35593 - DNA, 18 bp, Homo Sapiens
cgattcccgggcggcgca

SEQ ID NO: 35594 - DNA, 19 bp, Homo Sapiens
cgattcccgggcggcgcac

SEQ ID NO: 35595 - DNA, 20 bp, Homo Sapiens
cgattcccgggcggcgcacc

SEQ ID NO: 35596 - DNA, 16 bp, Homo Sapiens
cgattcccggtcaggg

SEQ ID NO: 35597 - DNA, 18 bp, Homo Sapiens
cgattcccggtcagggaa

SEQ ID NO: 35598 - DNA, 19 bp, Homo Sapiens
cgattcccggtcagggaac

SEQ ID NO: 35599 - DNA, 20 bp, Homo Sapiens
cgattcccggtcagggaacc

SEQ ID NO: 35600 - DNA, 19 bp, Homo Sapiens
cgattccggctcgaaggac

SEQ ID NO: 35601 - DNA, 20 bp, Homo Sapiens
cgattccggctcgaaggacc

SEQ ID NO: 35602 - DNA, 21 bp, Homo Sapiens
cgattccggctcgaaggacca

SEQ ID NO: 35603 - DNA, 20 bp, Homo Sapiens
cgattctcatagtcctagcc

SEQ ID NO: 35604 - DNA, 21 bp, Homo Sapiens
cgattctcatagtcctagcca

SEQ ID NO: 35605 - DNA, 22 bp, Homo Sapiens
cgcaacggtagcgcgtctgact

SEQ ID NO: 35606 - DNA, 23 bp, Homo Sapiens
cgcaatggataacgcgtctgact

SEQ ID NO: 35607 - DNA, 17 bp, Homo Sapiens
cgcaatggatagcgcat

SEQ ID NO: 35608 - DNA, 25 bp, Homo Sapiens
cgcaatggatagcgcattggacttc

SEQ ID NO: 35609 - DNA, 22 bp, Homo Sapiens
cgcaatggtagcgcgtctgact

SEQ ID NO: 35610 - DNA, 16 bp, Homo Sapiens
cgcacgttgggcgcca

SEQ ID NO: 35611 - DNA, 19 bp, Homo Sapiens
cgcagaaggtcctgggttc

SEQ ID NO: 35612 - DNA, 28 bp, Homo Sapiens
cgcagaaggtcctgggttcgagccccag

SEQ ID NO: 35613 - DNA, 35 bp, Homo Sapiens; identical to SEQ ID NO: 11952

SEQ ID NO: 35614 - DNA, 36 bp, Homo Sapiens; identical to SEQ ID NO: 11953

SEQ ID NO: 35615 - DNA, 37 bp, Homo Sapiens; identical to SEQ ID NO: 11954

SEQ ID NO: 35616 - DNA, 38 bp, Homo Sapiens; identical to SEQ ID NO: 11955

SEQ ID NO: 35617 - DNA, 39 bp, Homo Sapiens; identical to SEQ ID NO: 11956

SEQ ID NO: 35618 - DNA, 18 bp, Homo Sapiens
cgcagcaacctcggttcg

SEQ ID NO: 35619 - DNA, 31 bp, Homo Sapiens; identical to SEQ ID NO: 11962

SEQ ID NO: 35620 - DNA, 32 bp, Homo Sapiens; identical to SEQ ID NO: 11963

SEQ ID NO: 35621 - DNA, 33 bp, Homo Sapiens; identical to SEQ ID NO: 11964

SEQ ID NO: 35622 - DNA, 34 bp, Homo Sapiens; identical to SEQ ID NO: 11965

SEQ ID NO: 35623 - DNA, 35 bp, Homo Sapiens; identical to SEQ ID NO: 11966

SEQ ID NO: 35624 - DNA, 36 bp, Homo Sapiens; identical to SEQ ID NO: 11967

SEQ ID NO: 35625 - DNA, 37 bp, Homo Sapiens; identical to SEQ ID NO: 11968

SEQ ID NO: 35626 - DNA, 21 bp, Homo Sapiens
cgcagcggaagcgtgctgggc

SEQ ID NO: 35627 - DNA, 16 bp, Homo Sapiens
cgcaggttcgaatcct

SEQ ID NO: 35628 - DNA, 17 bp, Homo Sapiens
cgcaggttcgaatcctg

SEQ ID NO: 35629 - DNA, 31 bp, Homo Sapiens
cgcatgggtggttcagtggtagaattctcgc

SEQ ID NO: 35630 - DNA, 32 bp, Homo Sapiens; identical to SEQ ID NO: 11998

SEQ ID NO: 35631 - DNA, 33 bp, Homo Sapiens; identical to SEQ ID NO: 11999

SEQ ID NO: 35632 - DNA, 17 bp, Homo Sapiens
cgcattggacttctaat

SEQ ID NO: 35633 - DNA, 16 bp, Homo Sapiens
cgcattggtggttcag

SEQ ID NO: 35634 - DNA, 19 bp, Homo Sapiens
cgcattggtggttcagtgg

SEQ ID NO: 35635 - DNA, 31 bp, Homo Sapiens; identical to SEQ ID NO: 12010

SEQ ID NO: 35636 - DNA, 32 bp, Homo Sapiens; identical to SEQ ID NO: 12011

SEQ ID NO: 35637 - DNA, 33 bp, Homo Sapiens; identical to SEQ ID NO: 12012

SEQ ID NO: 35638 - DNA, 35 bp, Homo Sapiens; identical to SEQ ID NO: 12014

SEQ ID NO: 35639 - DNA, 16 bp, Homo Sapiens
cgccaaggtcgcgggt

SEQ ID NO: 35640 - DNA, 17 bp, Homo Sapiens
cgccaaggtcgcgggtt

SEQ ID NO: 35641 - DNA, 18 bp, Homo Sapiens
cgccaaggtcgcgggttc

SEQ ID NO: 35642 - DNA, 37 bp, Homo Sapiens; identical to SEQ ID NO: 12023

SEQ ID NO: 35643 - DNA, 32 bp, Homo Sapiens; identical to SEQ ID NO: 12027

SEQ ID NO: 35644 - DNA, 33 bp, Homo Sapiens; identical to SEQ ID NO: 12028

SEQ ID NO: 35645 - DNA, 36 bp, Homo Sapiens
cgccaaggtcgcgggttcgatccccgtacgggccac

SEQ ID NO: 35646 - DNA, 37 bp, Homo Sapiens; identical to SEQ ID NO: 12030

SEQ ID NO: 35647 - DNA, 33 bp, Homo Sapiens; identical to SEQ ID NO: 12041

SEQ ID NO: 35648 - DNA, 34 bp, Homo Sapiens; identical to SEQ ID NO: 12048

SEQ ID NO: 35649 - DNA, 34 bp, Homo Sapiens; identical to SEQ ID NO: 12054

SEQ ID NO: 35650 - DNA, 36 bp, Homo Sapiens; identical to SEQ ID NO: 12056

SEQ ID NO: 35651 - DNA, 37 bp, Homo Sapiens; identical to SEQ ID NO: 12057

SEQ ID NO: 35652 - DNA, 16 bp, Homo Sapiens
cgccgcggcccgggtt

SEQ ID NO: 35653 - DNA, 34 bp, Homo Sapiens
cgccgcggcccgggttcgattcccggccagggaa

SEQ ID NO: 35654 - DNA, 35 bp, Homo Sapiens
cgccgcggcccgggttcgattcccggccagggaac

SEQ ID NO: 35655 - DNA, 27 bp, Homo Sapiens
cgccgcggcccgggttcgattcccggt

SEQ ID NO: 35656 - DNA, 28 bp, Homo Sapiens
cgccgcggcccgggttcgattcccggtc

SEQ ID NO: 35657 - DNA, 29 bp, Homo Sapiens
cgccgcggcccgggttcgattcccggtca

SEQ ID NO: 35658 - DNA, 30 bp, Homo Sapiens; identical to SEQ ID NO: 12073

SEQ ID NO: 35659 - DNA, 31 bp, Homo Sapiens; identical to SEQ ID NO: 12074

SEQ ID NO: 35660 - DNA, 32 bp, Homo Sapiens; identical to SEQ ID NO: 12076

SEQ ID NO: 35661 - DNA, 33 bp, Homo Sapiens; identical to SEQ ID NO: 12077

SEQ ID NO: 35662 - DNA, 34 bp, Homo Sapiens; identical to SEQ ID NO: 12078

SEQ ID NO: 35663 - DNA, 35 bp, Homo Sapiens; identical to SEQ ID NO: 12079

SEQ ID NO: 35664 - DNA, 36 bp, Homo Sapiens; identical to SEQ ID NO: 12080

SEQ ID NO: 35665 - DNA, 37 bp, Homo Sapiens; identical to SEQ ID NO: 12081

SEQ ID NO: 35666 - DNA, 17 bp, Homo Sapiens
cgccgctggtgtagtgg

SEQ ID NO: 35667 - DNA, 19 bp, Homo Sapiens
cgccgctggtgtagtggta

SEQ ID NO: 35668 - DNA, 24 bp, Homo Sapiens
cgccgctggtgtagtggtatcatg

SEQ ID NO: 35669 - DNA, 28 bp, Homo Sapiens
cgccgctggtgtagtggtatcatgcaag

SEQ ID NO: 35670 - DNA, 29 bp, Homo Sapiens
cgccgctggtgtagtggtatcatgcaaga

SEQ ID NO: 35671 - DNA, 31 bp, Homo Sapiens; identical to SEQ ID NO: 12092

SEQ ID NO: 35672 - DNA, 34 bp, Homo Sapiens; identical to SEQ ID NO: 12095

SEQ ID NO: 35673 - DNA, 27 bp, Homo Sapiens
cgccgtgatcgtatagtggttagtact

SEQ ID NO: 35674 - DNA, 32 bp, Homo Sapiens; identical to SEQ ID NO: 12107

SEQ ID NO: 35675 - DNA, 33 bp, Homo Sapiens; identical to SEQ ID NO: 12108

SEQ ID NO: 35676 - DNA, 34 bp, Homo Sapiens; identical to SEQ ID NO: 12109

SEQ ID NO: 35677 - DNA, 35 bp, Homo Sapiens; identical to SEQ ID NO: 12110

SEQ ID NO: 35678 - DNA, 41 bp, Homo Sapiens; identical to SEQ ID NO: 12129

SEQ ID NO: 35679 - DNA, 45 bp, Homo Sapiens; identical to SEQ ID NO: 12132

SEQ ID NO: 35680 - DNA, 41 bp, Homo Sapiens; identical to SEQ ID NO: 12139

SEQ ID NO: 35681 - DNA, 44 bp, Homo Sapiens; identical to SEQ ID NO: 12142

SEQ ID NO: 35682 - DNA, 45 bp, Homo Sapiens; identical to SEQ ID NO: 12143

SEQ ID NO: 35683 - DNA, 46 bp, Homo Sapiens; identical to SEQ ID NO: 12144

SEQ ID NO: 35684 - DNA, 47 bp, Homo Sapiens; identical to SEQ ID NO: 12145

SEQ ID NO: 35685 - DNA, 20 bp, Homo Sapiens
cgcgaaaggtccccggttcg

SEQ ID NO: 35686 - DNA, 38 bp, Homo Sapiens; identical to SEQ ID NO: 12151

SEQ ID NO: 35687 - DNA, 36 bp, Homo Sapiens; identical to SEQ ID NO: 12156

SEQ ID NO: 35688 - DNA, 37 bp, Homo Sapiens; identical to SEQ ID NO: 12157

SEQ ID NO: 35689 - DNA, 38 bp, Homo Sapiens; identical to SEQ ID NO: 12158

SEQ ID NO: 35690 - DNA, 39 bp, Homo Sapiens; identical to SEQ ID NO: 12159

SEQ ID NO: 35691 - DNA, 36 bp, Homo Sapiens; identical to SEQ ID NO: 12163

SEQ ID NO: 35692 - DNA, 38 bp, Homo Sapiens; identical to SEQ ID NO: 12164

SEQ ID NO: 35693 - DNA, 27 bp, Homo Sapiens
cgcgagttcaaatctcgctggggcctc

SEQ ID NO: 35694 - DNA, 24 bp, Homo Sapiens
cgcggcccgggttcgattcccggt

SEQ ID NO: 35695 - DNA, 27 bp, Homo Sapiens
cgcggcccgggttcgattcccggtcag

SEQ ID NO: 35696 - DNA, 31 bp, Homo Sapiens; identical to SEQ ID NO: 12193

SEQ ID NO: 35697 - DNA, 32 bp, Homo Sapiens; identical to SEQ ID NO: 12194

SEQ ID NO: 35698 - DNA, 33 bp, Homo Sapiens; identical to SEQ ID NO: 12195

SEQ ID NO: 35699 - DNA, 32 bp, Homo Sapiens; identical to SEQ ID NO: 12207

SEQ ID NO: 35700 - DNA, 35 bp, Homo Sapiens; identical to SEQ ID NO: 12210

SEQ ID NO: 35701 - DNA, 36 bp, Homo Sapiens; identical to SEQ ID NO: 12211

SEQ ID NO: 35702 - DNA, 37 bp, Homo Sapiens; identical to SEQ ID NO: 12212

SEQ ID NO: 35703 - DNA, 38 bp, Homo Sapiens; identical to SEQ ID NO: 12213

SEQ ID NO: 35704 - DNA, 37 bp, Homo Sapiens; identical to SEQ ID NO: 12217

SEQ ID NO: 35705 - DNA, 28 bp, Homo Sapiens
cgcgggagaccggggttcgattccccga

SEQ ID NO: 35706 - DNA, 29 bp, Homo Sapiens
cgcgggagaccggggttcgattccccgac

SEQ ID NO: 35707 - DNA, 31 bp, Homo Sapiens; identical to SEQ ID NO: 12223

SEQ ID NO: 35708 - DNA, 32 bp, Homo Sapiens; identical to SEQ ID NO: 12224

SEQ ID NO: 35709 - DNA, 33 bp, Homo Sapiens; identical to SEQ ID NO: 12225

SEQ ID NO: 35710 - DNA, 34 bp, Homo Sapiens; identical to SEQ ID NO: 12226

SEQ ID NO: 35711 - DNA, 35 bp, Homo Sapiens; identical to SEQ ID NO: 12227

SEQ ID NO: 35712 - DNA, 36 bp, Homo Sapiens; identical to SEQ ID NO: 12228

SEQ ID NO: 35713 - DNA, 37 bp, Homo Sapiens; identical to SEQ ID NO: 12229

SEQ ID NO: 35714 - DNA, 38 bp, Homo Sapiens; identical to SEQ ID NO: 12230

SEQ ID NO: 35715 - DNA, 16 bp, Homo Sapiens
cgcgggaggcccgggt

SEQ ID NO: 35716 - DNA, 18 bp, Homo Sapiens
cgcgggaggcccgggttc

SEQ ID NO: 35717 - DNA, 33 bp, Homo Sapiens; identical to SEQ ID NO: 12241

SEQ ID NO: 35718 - DNA, 35 bp, Homo Sapiens; identical to SEQ ID NO: 12243

SEQ ID NO: 35719 - DNA, 37 bp, Homo Sapiens; identical to SEQ ID NO: 12245

SEQ ID NO: 35720 - DNA, 38 bp, Homo Sapiens; identical to SEQ ID NO: 12246

SEQ ID NO: 35721 - DNA, 26 bp, Homo Sapiens
cgcgggttcgaaccccgtccgtgcct

SEQ ID NO: 35722 - DNA, 24 bp, Homo Sapiens
cgcgggttcgatccccgtacgggc

SEQ ID NO: 35723 - DNA, 25 bp, Homo Sapiens
cgcgggttcgatccccgtacgggcc

SEQ ID NO: 35724 - DNA, 26 bp, Homo Sapiens
cgcgggttcgatccccgtacgggcca

SEQ ID NO: 35725 - DNA, 27 bp, Homo Sapiens
cgcgggttcgatccccgtacgggccac

SEQ ID NO: 35726 - DNA, 28 bp, Homo Sapiens
cgcgggttcgatccccgtacgggccacc

SEQ ID NO: 35727 - DNA, 30 bp, Homo Sapiens; identical to SEQ ID NO: 12286

SEQ ID NO: 35728 - DNA, 30 bp, Homo Sapiens
cgcgtgggttcgaatcccaccttcgtcgcc

SEQ ID NO: 35729 - DNA, 26 bp, Homo Sapiens
cgcgtgggttcgaatcccatcctcgt

SEQ ID NO: 35730 - DNA, 28 bp, Homo Sapiens
cgcgtgggttcgaatcccatcctcgtcg

SEQ ID NO: 35731 - DNA, 29 bp, Homo Sapiens
cgcgtgggttcgaatcccatcctcgtcgc

SEQ ID NO: 35732 - DNA, 30 bp, Homo Sapiens; identical to SEQ ID NO: 12289

SEQ ID NO: 35733 - DNA, 31 bp, Homo Sapiens; identical to SEQ ID NO: 12290

SEQ ID NO: 35734 - DNA, 25 bp, Homo Sapiens
cgcgttcgattcccggtcagggaac

SEQ ID NO: 35735 - DNA, 18 bp, Homo Sapiens
cgctctcaccgccgcggc

SEQ ID NO: 35736 - DNA, 43 bp, Homo Sapiens; identical to SEQ ID NO: 12305

SEQ ID NO: 35737 - DNA, 44 bp, Homo Sapiens; identical to SEQ ID NO: 12306

SEQ ID NO: 35738 - DNA, 45 bp, Homo Sapiens; identical to SEQ ID NO: 12307

SEQ ID NO: 35739 - DNA, 21 bp, Homo Sapiens
cgctggtgtagtggtatcatg

SEQ ID NO: 35740 - DNA, 25 bp, Homo Sapiens
cgctggtgtagtggtatcatgcaag

SEQ ID NO: 35741 - DNA, 28 bp, Homo Sapiens
cgctggtgtagtggtatcatgcaagatt

SEQ ID NO: 35742 - DNA, 46 bp, Homo Sapiens; identical to SEQ ID NO: 12319

SEQ ID NO: 35743 - DNA, 47 bp, Homo Sapiens; identical to SEQ ID NO: 12320

SEQ ID NO: 35744 - DNA, 27 bp, Homo Sapiens
cgctggttcgaatccggctcgaaggac

SEQ ID NO: 35745 - DNA, 28 bp, Homo Sapiens
cgctggttcgaatccggctcgaaggacc

SEQ ID NO: 35746 - DNA, 27 bp, Homo Sapiens
cgctggttcgaatccggctcggaggac

SEQ ID NO: 35747 - DNA, 28 bp, Homo Sapiens
cgctggttcgaatccggctcggaggacc

SEQ ID NO: 35748 - DNA, 27 bp, Homo Sapiens
cgctggttcgattccagctcgaaggac

SEQ ID NO: 35749 - DNA, 28 bp, Homo Sapiens
cgctggttcgattccagctcgaaggacc

SEQ ID NO: 35750 - DNA, 27 bp, Homo Sapiens
cgctggttcgattccggctcgaaggac

SEQ ID NO: 35751 - DNA, 28 bp, Homo Sapiens
cgctggttcgattccggctcgaaggacc

SEQ ID NO: 35752 - DNA, 29 bp, Homo Sapiens
cgctggttcgattccggctcgaaggacca

SEQ ID NO: 35753 - DNA, 33 bp, Homo Sapiens; identical to SEQ ID NO: 12341

SEQ ID NO: 35754 - DNA, 34 bp, Homo Sapiens; identical to SEQ ID NO: 12342

SEQ ID NO: 35755 - DNA, 16 bp, Homo Sapiens
cggaagcgtgctgggc

SEQ ID NO: 35756 - DNA, 17 bp, Homo Sapiens
cggaagcgtgctgggcc

SEQ ID NO: 35757 - DNA, 18 bp, Homo Sapiens
cggaagcgtgctgggccc

SEQ ID NO: 35758 - DNA, 19 bp, Homo Sapiens
cggaagcgtgctgggccca

SEQ ID NO: 35759 - DNA, 20 bp, Homo Sapiens
cggaagcgtgctgggcccat

SEQ ID NO: 35760 - DNA, 21 bp, Homo Sapiens
cggaagcgtgctgggcccata

SEQ ID NO: 35761 - DNA, 22 bp, Homo Sapiens
cggaagcgtgctgggcccataa

SEQ ID NO: 35762 - DNA, 23 bp, Homo Sapiens
cggaagcgtgctgggcccataac

SEQ ID NO: 35763 - DNA, 24 bp, Homo Sapiens
cggaagcgtgctgggcccataacc

SEQ ID NO: 35764 - DNA, 25 bp, Homo Sapiens
cggaagcgtgctgggcccataaccc

SEQ ID NO: 35765 - DNA, 26 bp, Homo Sapiens
cggaagcgtgctgggcccataaccca

SEQ ID NO: 35766 - DNA, 27 bp, Homo Sapiens
cggaagcgtgctgggcccataacccag

SEQ ID NO: 35767 - DNA, 28 bp, Homo Sapiens
cggaagcgtgctgggcccataacccaga

SEQ ID NO: 35768 - DNA, 29 bp, Homo Sapiens
cggaagcgtgctgggcccataacccagag

SEQ ID NO: 35769 - DNA, 32 bp, Homo Sapiens; identical to SEQ ID NO: 12358

SEQ ID NO: 35770 - DNA, 33 bp, Homo Sapiens; identical to SEQ ID NO: 12359

SEQ ID NO: 35771 - DNA, 34 bp, Homo Sapiens; identical to SEQ ID NO: 12360

SEQ ID NO: 35772 - DNA, 35 bp, Homo Sapiens; identical to SEQ ID NO: 12361

SEQ ID NO: 35773 - DNA, 36 bp, Homo Sapiens; identical to SEQ ID NO: 12362

SEQ ID NO: 35774 - DNA, 37 bp, Homo Sapiens; identical to SEQ ID NO: 12363

SEQ ID NO: 35775 - DNA, 38 bp, Homo Sapiens; identical to SEQ ID NO: 12364

SEQ ID NO: 35776 - DNA, 39 bp, Homo Sapiens; identical to SEQ ID NO: 12365

SEQ ID NO: 35777 - DNA, 40 bp, Homo Sapiens; identical to SEQ ID NO: 12366

SEQ ID NO: 35778 - DNA, 41 bp, Homo Sapiens; identical to SEQ ID NO: 12367

SEQ ID NO: 35779 - DNA, 44 bp, Homo Sapiens
cggaagcgtgctgggcccataacccagaggtcgatggatcgaaa

SEQ ID NO: 35780 - DNA, 45 bp, Homo Sapiens
cggaagcgtgctgggcccataacccagaggtcgatggatcgaaac

SEQ ID NO: 35781 - DNA, 46 bp, Homo Sapiens
cggaagcgtgctgggcccataacccagaggtcgatggatcgaaacc

SEQ ID NO: 35782 - DNA, 47 bp, Homo Sapiens
cggaagcgtgctgggcccataacccagaggtcgatggatcgaaacca

SEQ ID NO: 35783 - DNA, 17 bp, Homo Sapiens
cggagaattttggattc

SEQ ID NO: 35784 - DNA, 25 bp, Homo Sapiens
cggagaattttggattctcagggat

SEQ ID NO: 35785 - DNA, 26 bp, Homo Sapiens
cggagaattttggattctcagggatg

SEQ ID NO: 35786 - DNA, 30 bp, Homo Sapiens
cggagaattttggattctcagggatgggtt

SEQ ID NO: 35787 - DNA, 32 bp, Homo Sapiens; identical to SEQ ID NO: 12369

SEQ ID NO: 35788 - DNA, 34 bp, Homo Sapiens; identical to SEQ ID NO: 12370

SEQ ID NO: 35789 - DNA, 35 bp, Homo Sapiens
cggagaattttggattctcagggatgggttcgatt

SEQ ID NO: 35790 - DNA, 47 bp, Homo Sapiens
cggagaattttggattctcagggatgggttcgattctcatagtccta

SEQ ID NO: 35791 - DNA, 27 bp, Homo Sapiens
cggagatgaaaacctttttccaaggac

SEQ ID NO: 35792 - DNA, 28 bp, Homo Sapiens
cggagatgaaaacctttttccaaggaca

SEQ ID NO: 35793 - DNA, 29 bp, Homo Sapiens
cggagatgaaaacctttttccaaggacac

SEQ ID NO: 35794 - DNA, 30 bp, Homo Sapiens; identical to SEQ ID NO: 12384

SEQ ID NO: 35795 - DNA, 31 bp, Homo Sapiens; identical to SEQ ID NO: 12385

SEQ ID NO: 35796 - DNA, 16 bp, Homo Sapiens
cggagctggggattgt

SEQ ID NO: 35797 - DNA, 20 bp, Homo Sapiens
cggagctggggattgtgggt

SEQ ID NO: 35798 - DNA, 32 bp, Homo Sapiens; identical to SEQ ID NO: 12389

SEQ ID NO: 35799 - DNA, 41 bp, Homo Sapiens; identical to SEQ ID NO: 12391

SEQ ID NO: 35800 - DNA, 34 bp, Homo Sapiens
cggaggcgtgggttcgaatcccaccgctgccacc

SEQ ID NO: 35801 - DNA, 16 bp, Homo Sapiens
cggatagctcagtcgg

SEQ ID NO: 35802 - DNA, 17 bp, Homo Sapiens
cggatagctcagtcggt

SEQ ID NO: 35803 - DNA, 18 bp, Homo Sapiens
cggatagctcagtcggta

SEQ ID NO: 35804 - DNA, 19 bp, Homo Sapiens
cggatagctcagtcggtag

SEQ ID NO: 35805 - DNA, 20 bp, Homo Sapiens
cggatagctcagtcggtaga

SEQ ID NO: 35806 - DNA, 21 bp, Homo Sapiens
cggatagctcagtcggtagag

SEQ ID NO: 35807 - DNA, 22 bp, Homo Sapiens
cggatagctcagtcggtagagc

SEQ ID NO: 35808 - DNA, 23 bp, Homo Sapiens
cggatagctcagtcggtagagca

SEQ ID NO: 35809 - DNA, 24 bp, Homo Sapiens
cggatagctcagtcggtagagcat

SEQ ID NO: 35810 - DNA, 25 bp, Homo Sapiens
cggatagctcagtcggtagagcatc

SEQ ID NO: 35811 - DNA, 27 bp, Homo Sapiens
cggatagctcagtcggtagagcatcag

SEQ ID NO: 35812 - DNA, 28 bp, Homo Sapiens
cggatagctcagtcggtagagcatcaga

SEQ ID NO: 35813 - DNA, 29 bp, Homo Sapiens
cggatagctcagtcggtagagcatcagac

SEQ ID NO: 35814 - DNA, 30 bp, Homo Sapiens; identical to SEQ ID NO: 12409

SEQ ID NO: 35815 - DNA, 31 bp, Homo Sapiens; identical to SEQ ID NO: 12410

SEQ ID NO: 35816 - DNA, 32 bp, Homo Sapiens; identical to SEQ ID NO: 12411

SEQ ID NO: 35817 - DNA, 33 bp, Homo Sapiens; identical to SEQ ID NO: 12412

SEQ ID NO: 35818 - DNA, 19 bp, Homo Sapiens
cggatcagaagattccagg

SEQ ID NO: 35819 - DNA, 41 bp, Homo Sapiens
cggatcagaagattccaggttcgactcctggctggctcgcc

SEQ ID NO: 35820 - DNA, 22 bp, Homo Sapiens
cggatcagaagattctaggttc

SEQ ID NO: 35821 - DNA, 41 bp, Homo Sapiens; identical to SEQ ID NO: 12419

SEQ ID NO: 35822 - DNA, 16 bp, Homo Sapiens
cggatcagaagattga

SEQ ID NO: 35823 - DNA, 20 bp, Homo Sapiens
cggatcagaagattgagggt

SEQ ID NO: 35824 - DNA, 22 bp, Homo Sapiens
cggatcagaagattgagggttc

SEQ ID NO: 35825 - DNA, 19 bp, Homo Sapiens
cggatcagaagattgcagg

SEQ ID NO: 35826 - DNA, 22 bp, Homo Sapiens
cggatcagaagattgcaggttc

SEQ ID NO: 35827 - DNA, 17 bp, Homo Sapiens
cggatggaggcgtgggt

SEQ ID NO: 35828 - DNA, 18 bp, Homo Sapiens
cggatggaggcgtgggtt

SEQ ID NO: 35829 - DNA, 27 bp, Homo Sapiens
cggatggaggcgtgggttcgaatccca

SEQ ID NO: 35830 - DNA, 29 bp, Homo Sapiens
cggatggaggcgtgggttcgaatcccact

SEQ ID NO: 35831 - DNA, 31 bp, Homo Sapiens; identical to SEQ ID NO: 12439

SEQ ID NO: 35832 - DNA, 36 bp, Homo Sapiens; identical to SEQ ID NO: 12442

SEQ ID NO: 35833 - DNA, 37 bp, Homo Sapiens; identical to SEQ ID NO: 12443

SEQ ID NO: 35834 - DNA, 38 bp, Homo Sapiens; identical to SEQ ID NO: 12444

SEQ ID NO: 35835 - DNA, 17 bp, Homo Sapiens
cggcccgggttcgactc

SEQ ID NO: 35836 - DNA, 18 bp, Homo Sapiens
cggcccgggttcgactcc

SEQ ID NO: 35837 - DNA, 19 bp, Homo Sapiens
cggcccgggttcgactccc

SEQ ID NO: 35838 - DNA, 22 bp, Homo Sapiens
cggcccgggttcgactcccggt

SEQ ID NO: 35839 - DNA, 23 bp, Homo Sapiens
cggcccgggttcgactcccggtg

SEQ ID NO: 35840 - DNA, 25 bp, Homo Sapiens
cggcccgggttcgactcccggtgtg

SEQ ID NO: 35841 - DNA, 26 bp, Homo Sapiens
cggcccgggttcgactcccggtgtgg

SEQ ID NO: 35842 - DNA, 27 bp, Homo Sapiens
cggcccgggttcgactcccggtgtggg

SEQ ID NO: 35843 - DNA, 28 bp, Homo Sapiens
cggcccgggttcgactcccggtgtggga

SEQ ID NO: 35844 - DNA, 29 bp, Homo Sapiens
cggcccgggttcgactcccggtgtgggaa

SEQ ID NO: 35845 - DNA, 30 bp, Homo Sapiens; identical to SEQ ID NO: 12456

SEQ ID NO: 35846 - DNA, 31 bp, Homo Sapiens; identical to SEQ ID NO: 12457

SEQ ID NO: 35847 - DNA, 32 bp, Homo Sapiens; identical to SEQ ID NO: 12458

SEQ ID NO: 35848 - DNA, 20 bp, Homo Sapiens
cggcccgggttcgattcccg

SEQ ID NO: 35849 - DNA, 22 bp, Homo Sapiens
cggcccgggttcgattcccggt

SEQ ID NO: 35850 - DNA, 29 bp, Homo Sapiens
cggcccgggttcgattcccggtcagggaa

SEQ ID NO: 35851 - DNA, 30 bp, Homo Sapiens; identical to SEQ ID NO: 12467

SEQ ID NO: 35852 - DNA, 46 bp, Homo Sapiens; identical to SEQ ID NO: 12481

SEQ ID NO: 35853 - DNA, 47 bp, Homo Sapiens; identical to SEQ ID NO: 12482

SEQ ID NO: 35854 - DNA, 16 bp, Homo Sapiens
cggctagctcagtcgg

SEQ ID NO: 35855 - DNA, 22 bp, Homo Sapiens
cggctagctcagtcggtagagc

SEQ ID NO: 35856 - DNA, 23 bp, Homo Sapiens
cggctagctcagtcggtagagca

SEQ ID NO: 35857 - DNA, 24 bp, Homo Sapiens
cggctagctcagtcggtagagcat

SEQ ID NO: 35858 - DNA, 25 bp, Homo Sapiens
cggctagctcagtcggtagagcatg

SEQ ID NO: 35859 - DNA, 26 bp, Homo Sapiens
cggctagctcagtcggtagagcatga

SEQ ID NO: 35860 - DNA, 27 bp, Homo Sapiens
cggctagctcagtcggtagagcatgag

SEQ ID NO: 35861 - DNA, 29 bp, Homo Sapiens
cggctagctcagtcggtagagcatgagac

SEQ ID NO: 35862 - DNA, 30 bp, Homo Sapiens; identical to SEQ ID NO: 12500

SEQ ID NO: 35863 - DNA, 31 bp, Homo Sapiens; identical to SEQ ID NO: 12501

SEQ ID NO: 35864 - DNA, 30 bp, Homo Sapiens; identical to SEQ ID NO: 12504

SEQ ID NO: 35865 - DNA, 31 bp, Homo Sapiens; identical to SEQ ID NO: 12505

SEQ ID NO: 35866 - DNA, 32 bp, Homo Sapiens; identical to SEQ ID NO: 12506

SEQ ID NO: 35867 - DNA, 33 bp, Homo Sapiens; identical to SEQ ID NO: 12507

SEQ ID NO: 35868 - DNA, 35 bp, Homo Sapiens; identical to SEQ ID NO: 12509

SEQ ID NO: 35869 - DNA, 36 bp, Homo Sapiens; identical to SEQ ID NO: 12510

SEQ ID NO: 35870 - DNA, 37 bp, Homo Sapiens; identical to SEQ ID NO: 12511

SEQ ID NO: 35871 - DNA, 38 bp, Homo Sapiens; identical to SEQ ID NO: 12512

SEQ ID NO: 35872 - DNA, 39 bp, Homo Sapiens; identical to SEQ ID NO: 12513

SEQ ID NO: 35873 - DNA, 46 bp, Homo Sapiens; identical to SEQ ID NO: 12515

SEQ ID NO: 35874 - DNA, 47 bp, Homo Sapiens
cggctagctcagtcggtagagcatgagactcttaatctcagggtcgt

SEQ ID NO: 35875 - DNA, 26 bp, Homo Sapiens
cggctagctcagtcggtagagcatgg

SEQ ID NO: 35876 - DNA, 27 bp, Homo Sapiens
cggctagctcagtcggtagagcatggg

SEQ ID NO: 35877 - DNA, 28 bp, Homo Sapiens
cggctagctcagtcggtagagcatggga

SEQ ID NO: 35878 - DNA, 29 bp, Homo Sapiens
cggctagctcagtcggtagagcatgggac

SEQ ID NO: 35879 - DNA, 30 bp, Homo Sapiens; identical to SEQ ID NO: 12521

SEQ ID NO: 35880 - DNA, 31 bp, Homo Sapiens; identical to SEQ ID NO: 12522

SEQ ID NO: 35881 - DNA, 32 bp, Homo Sapiens; identical to SEQ ID NO: 12523

SEQ ID NO: 35882 - DNA, 33 bp, Homo Sapiens; identical to SEQ ID NO: 12524

SEQ ID NO: 35883 - DNA, 36 bp, Homo Sapiens; identical to SEQ ID NO: 12527

SEQ ID NO: 35884 - DNA, 38 bp, Homo Sapiens; identical to SEQ ID NO: 12529

SEQ ID NO: 35885 - DNA, 39 bp, Homo Sapiens; identical to SEQ ID NO: 12530

SEQ ID NO: 35886 - DNA, 46 bp, Homo Sapiens
cggctagctcagtcggtagagcatgggactcttaatcccagggtcg

SEQ ID NO: 35887 - DNA, 22 bp, Homo Sapiens
cggctgttaaccgaaaggttgg

SEQ ID NO: 35888 - DNA, 24 bp, Homo Sapiens
cggctgttaaccgaaaggttggtg

SEQ ID NO: 35889 - DNA, 25 bp, Homo Sapiens
cggctgttaaccgaaaggttggtgg

SEQ ID NO: 35890 - DNA, 27 bp, Homo Sapiens
cggctgttaaccgaaaggttggtggtt

SEQ ID NO: 35891 - DNA, 46 bp, Homo Sapiens; identical to SEQ ID NO: 12539

SEQ ID NO: 35892 - DNA, 47 bp, Homo Sapiens; identical to SEQ ID NO: 12540

SEQ ID NO: 35893 - DNA, 47 bp, Homo Sapiens
cggctgttaaccgaaaggttggtggttcgatcccacccagggacgcc

SEQ ID NO: 35894 - DNA, 30 bp, Homo Sapiens; identical to SEQ ID NO: 12546

SEQ ID NO: 35895 - DNA, 32 bp, Homo Sapiens; identical to SEQ ID NO: 12548

SEQ ID NO: 35896 - DNA, 33 bp, Homo Sapiens; identical to SEQ ID NO: 12549

SEQ ID NO: 35897 - DNA, 34 bp, Homo Sapiens; identical to SEQ ID NO: 12550

SEQ ID NO: 35898 - DNA, 35 bp, Homo Sapiens; identical to SEQ ID NO: 12551

SEQ ID NO: 35899 - DNA, 36 bp, Homo Sapiens; identical to SEQ ID NO: 12552

SEQ ID NO: 35900 - DNA, 17 bp, Homo Sapiens
cgggagaccggggttcg

SEQ ID NO: 35901 - DNA, 20 bp, Homo Sapiens
cgggagaccggggttcgatt

SEQ ID NO: 35902 - DNA, 34 bp, Homo Sapiens
cgggagaccggggttcgattccccaacggggagc

SEQ ID NO: 35903 - DNA, 35 bp, Homo Sapiens
cgggagaccggggttcgattccccaacggggagcc

SEQ ID NO: 35904 - DNA, 26 bp, Homo Sapiens
cgggagaccggggttcgattccccga

SEQ ID NO: 35905 - DNA, 27 bp, Homo Sapiens
cgggagaccggggttcgattccccgac

SEQ ID NO: 35906 - DNA, 28 bp, Homo Sapiens
cgggagaccggggttcgattccccgacg

SEQ ID NO: 35907 - DNA, 29 bp, Homo Sapiens
cgggagaccggggttcgattccccgacgg

SEQ ID NO: 35908 - DNA, 30 bp, Homo Sapiens; identical to SEQ ID NO: 12559

SEQ ID NO: 35909 - DNA, 31 bp, Homo Sapiens; identical to SEQ ID NO: 12560

SEQ ID NO: 35910 - DNA, 32 bp, Homo Sapiens; identical to SEQ ID NO: 12561

SEQ ID NO: 35911 - DNA, 33 bp, Homo Sapiens; identical to SEQ ID NO: 12562

SEQ ID NO: 35912 - DNA, 34 bp, Homo Sapiens; identical to SEQ ID NO: 12563

SEQ ID NO: 35913 - DNA, 35 bp, Homo Sapiens; identical to SEQ ID NO: 12564

SEQ ID NO: 35914 - DNA, 36 bp, Homo Sapiens; identical to SEQ ID NO: 12565

SEQ ID NO: 35915 - DNA, 17 bp, Homo Sapiens
cgggaggcccgggttcg

SEQ ID NO: 35916 - DNA, 29 bp, Homo Sapiens
cgggaggcccgggttcgattcccggccaa

SEQ ID NO: 35917 - DNA, 31 bp, Homo Sapiens; identical to SEQ ID NO: 12573

SEQ ID NO: 35918 - DNA, 32 bp, Homo Sapiens; identical to SEQ ID NO: 12574

SEQ ID NO: 35919 - DNA, 33 bp, Homo Sapiens; identical to SEQ ID NO: 12575

SEQ ID NO: 35920 - DNA, 34 bp, Homo Sapiens; identical to SEQ ID NO: 12576

SEQ ID NO: 35921 - DNA, 35 bp, Homo Sapiens; identical to SEQ ID NO: 12577

SEQ ID NO: 35922 - DNA, 36 bp, Homo Sapiens; identical to SEQ ID NO: 12578

SEQ ID NO: 35923 - DNA, 31 bp, Homo Sapiens; identical to SEQ ID NO: 12580

SEQ ID NO: 35924 - DNA, 26 bp, Homo Sapiens
cgggatcgatgcccgcattctccacc

SEQ ID NO: 35925 - DNA, 18 bp, Homo Sapiens
cgggcccataccccgaaa

SEQ ID NO: 35926 - DNA, 47 bp, Homo Sapiens; identical to SEQ ID NO: 12606

SEQ ID NO: 35927 - DNA, 27 bp, Homo Sapiens
cgggctcacatcaccccataaacacca

SEQ ID NO: 35928 - DNA, 23 bp, Homo Sapiens
cggggatgtagctcagtggtaga

SEQ ID NO: 35929 - DNA, 34 bp, Homo Sapiens
cgggggattagctcaaatggtagagcgctcgctt

SEQ ID NO: 35930 - DNA, 34 bp, Homo Sapiens
cgggggcgtgggttcgaatcccaccgctgccacc

SEQ ID NO: 35931 - DNA, 26 bp, Homo Sapiens
cggggttcaagtccctgttcgggcgc

SEQ ID NO: 35932 - DNA, 26 bp, Homo Sapiens
cggggttcaattccccgacggggagc

SEQ ID NO: 35933 - DNA, 24 bp, Homo Sapiens
cggggttcgattccccgacgggga

SEQ ID NO: 35934 - DNA, 25 bp, Homo Sapiens
cggggttcgattccccgacggggag

SEQ ID NO: 35935 - DNA, 26 bp, Homo Sapiens
cggggttcgattccccgacggggagc

SEQ ID NO: 35936 - DNA, 27 bp, Homo Sapiens
cggggttcgattccccgacggggagcc

SEQ ID NO: 35937 - DNA, 24 bp, Homo Sapiens
cgggttcaaatcccggacgagccc

SEQ ID NO: 35938 - DNA, 25 bp, Homo Sapiens
cgggttcaaatcccggacgagcccc

SEQ ID NO: 35939 - DNA, 25 bp, Homo Sapiens
cgggttcaatccccggcacctccac

SEQ ID NO: 35940 - DNA, 26 bp, Homo Sapiens
cgggttcaatccccggcacctccacc

SEQ ID NO: 35941 - DNA, 25 bp, Homo Sapiens
cgggttcaatccccggcatctccac

SEQ ID NO: 35942 - DNA, 24 bp, Homo Sapiens
cgggttcgaaccccgtacgggcca

SEQ ID NO: 35943 - DNA, 25 bp, Homo Sapiens
cgggttcgaaccccgtacgggccac

SEQ ID NO: 35944 - DNA, 26 bp, Homo Sapiens
cgggttcgaaccccgtacgggccacc

SEQ ID NO: 35945 - DNA, 24 bp, Homo Sapiens
cgggttcgaaccccgtccgtgcct

SEQ ID NO: 35946 - DNA, 25 bp, Homo Sapiens
cgggttcgaaccccgtccgtgcctc

SEQ ID NO: 35947 - DNA, 22 bp, Homo Sapiens
cgggttcgactcccggtatggg

SEQ ID NO: 35948 - DNA, 23 bp, Homo Sapiens
cgggttcgactcccggtatggga

SEQ ID NO: 35949 - DNA, 24 bp, Homo Sapiens
cgggttcgactcccggtatgggaa

SEQ ID NO: 35950 - DNA, 25 bp, Homo Sapiens
cgggttcgactcccggtatgggaac

SEQ ID NO: 35951 - DNA, 26 bp, Homo Sapiens
cgggttcgactcccggtatgggaacc

SEQ ID NO: 35952 - DNA, 18 bp, Homo Sapiens
cgggttcgactcccggtg

SEQ ID NO: 35953 - DNA, 20 bp, Homo Sapiens
cgggttcgactcccggtgtg

SEQ ID NO: 35954 - DNA, 21 bp, Homo Sapiens
cgggttcgactcccggtgtgg

SEQ ID NO: 35955 - DNA, 22 bp, Homo Sapiens
cgggttcgactcccggtgtggg

SEQ ID NO: 35956 - DNA, 23 bp, Homo Sapiens
cgggttcgactcccggtgtggga

SEQ ID NO: 35957 - DNA, 24 bp, Homo Sapiens
cgggttcgactcccggtgtgggaa

SEQ ID NO: 35958 - DNA, 25 bp, Homo Sapiens
cgggttcgactcccggtgtgggaac

SEQ ID NO: 35959 - DNA, 26 bp, Homo Sapiens
cgggttcgactcccggtgtgggaacc

SEQ ID NO: 35960 - DNA, 27 bp, Homo Sapiens
cgggttcgactcccggtgtgggaacca

SEQ ID NO: 35961 - DNA, 26 bp, Homo Sapiens
cgggttcgagtcccggcggagtcgcc

SEQ ID NO: 35962 - DNA, 25 bp, Homo Sapiens
cgggttcgatccccagcatctccac

SEQ ID NO: 35963 - DNA, 26 bp, Homo Sapiens
cgggttcgatccccagcatctccacc

SEQ ID NO: 35964 - DNA, 25 bp, Homo Sapiens
cgggttcgatccccggcatctccac

SEQ ID NO: 35965 - DNA, 26 bp, Homo Sapiens
cgggttcgatccccggcatctccacc

SEQ ID NO: 35966 - DNA, 27 bp, Homo Sapiens
cgggttcgatccccggcatctccacca

SEQ ID NO: 35967 - DNA, 22 bp, Homo Sapiens
cgggttcgatccccgtacgggc

SEQ ID NO: 35968 - DNA, 23 bp, Homo Sapiens
cgggttcgatccccgtacgggcc

SEQ ID NO: 35969 - DNA, 24 bp, Homo Sapiens
cgggttcgatccccgtacgggcca

SEQ ID NO: 35970 - DNA, 25 bp, Homo Sapiens
cgggttcgatccccgtacgggccac

SEQ ID NO: 35971 - DNA, 26 bp, Homo Sapiens
cgggttcgatccccgtacgggccacc

SEQ ID NO: 35972 - DNA, 25 bp, Homo Sapiens
cgggttcgattcccggccagggaac

SEQ ID NO: 35973 - DNA, 21 bp, Homo Sapiens
cgggttcgattcccgggcggc

SEQ ID NO: 35974 - DNA, 22 bp, Homo Sapiens
cgggttcgattcccgggcggcg

SEQ ID NO: 35975 - DNA, 23 bp, Homo Sapiens
cgggttcgattcccgggcggcgc

SEQ ID NO: 35976 - DNA, 24 bp, Homo Sapiens
cgggttcgattcccgggcggcgca

SEQ ID NO: 35977 - DNA, 25 bp, Homo Sapiens
cgggttcgattcccgggcggcgcac

SEQ ID NO: 35978 - DNA, 21 bp, Homo Sapiens
cgggttcgattcccggtcagg

SEQ ID NO: 35979 - DNA, 22 bp, Homo Sapiens
cgggttcgattcccggtcaggg

SEQ ID NO: 35980 - DNA, 23 bp, Homo Sapiens
cgggttcgattcccggtcaggga

SEQ ID NO: 35981 - DNA, 24 bp, Homo Sapiens
cgggttcgattcccggtcagggaa

SEQ ID NO: 35982 - DNA, 25 bp, Homo Sapiens
cgggttcgattcccggtcagggaac

SEQ ID NO: 35983 - DNA, 26 bp, Homo Sapiens
cgggttcgattcccggtcagggaacc

SEQ ID NO: 35984 - DNA, 27 bp, Homo Sapiens
cgggttcgattcccggtcagggaacca

SEQ ID NO: 35985 - DNA, 25 bp, Homo Sapiens
cgggttcgattcccggtcatggaac

SEQ ID NO: 35986 - DNA, 26 bp, Homo Sapiens
cggtaatcgcataaaacttaaaactt

SEQ ID NO: 35987 - DNA, 27 bp, Homo Sapiens
cggtaatcgcataaaacttaaaacttt

SEQ ID NO: 35988 - DNA, 30 bp, Homo Sapiens; identical to SEQ ID NO: 12717

SEQ ID NO: 35989 - DNA, 16 bp, Homo Sapiens
cggtagagcatcagac

SEQ ID NO: 35990 - DNA, 17 bp, Homo Sapiens
cggtagagcatcagact

SEQ ID NO: 35991 - DNA, 19 bp, Homo Sapiens
cggtagagcatcagacttt

SEQ ID NO: 35992 - DNA, 16 bp, Homo Sapiens
cggtagagcatgagac

SEQ ID NO: 35993 - DNA, 17 bp, Homo Sapiens
cggtagagcatgagacc

SEQ ID NO: 35994 - DNA, 18 bp, Homo Sapiens
cggtagagcatgagaccc

SEQ ID NO: 35995 - DNA, 17 bp, Homo Sapiens
cggtagagcatgagact

SEQ ID NO: 35996 - DNA, 18 bp, Homo Sapiens
cggtagagcatgagactc

SEQ ID NO: 35997 - DNA, 19 bp, Homo Sapiens
cggtagagcatgagactct

SEQ ID NO: 35998 - DNA, 24 bp, Homo Sapiens
cggtagagcatgagactcttaatc

SEQ ID NO: 35999 - DNA, 25 bp, Homo Sapiens
cggtagagcatgagactcttaatct

SEQ ID NO: 36000 - DNA, 26 bp, Homo Sapiens
cggtagagcatgagactcttaatctc

SEQ ID NO: 36001 - DNA, 36 bp, Homo Sapiens; identical to SEQ ID NO: 12751

SEQ ID NO: 36002 - DNA, 39 bp, Homo Sapiens; identical to SEQ ID NO: 12753

SEQ ID NO: 36003 - DNA, 16 bp, Homo Sapiens
cggtagagcatgggac

SEQ ID NO: 36004 - DNA, 17 bp, Homo Sapiens
cggtagagcatgggact

SEQ ID NO: 36005 - DNA, 18 bp, Homo Sapiens
cggtagagcatgggactc

SEQ ID NO: 36006 - DNA, 19 bp, Homo Sapiens
cggtagagcatgggactct

SEQ ID NO: 36007 - DNA, 25 bp, Homo Sapiens
cggtagagcatgggactcttaatcc

SEQ ID NO: 36008 - DNA, 26 bp, Homo Sapiens
cggtagagcatgggactcttaatccc

SEQ ID NO: 36009 - DNA, 36 bp, Homo Sapiens; identical to SEQ ID NO: 12766

SEQ ID NO: 36010 - DNA, 39 bp, Homo Sapiens; identical to SEQ ID NO: 12767

SEQ ID NO: 36011 - DNA, 19 bp, Homo Sapiens
cggtagagcatttgactgc

SEQ ID NO: 36012 - DNA, 16 bp, Homo Sapiens
cggtagcgcgtctgac

SEQ ID NO: 36013 - DNA, 17 bp, Homo Sapiens
cggtagcgcgtctgact

SEQ ID NO: 36014 - DNA, 19 bp, Homo Sapiens
cggtagcgcgtctgactcc

SEQ ID NO: 36015 - DNA, 24 bp, Homo Sapiens
cggtagcgcgtctgactccagatc

SEQ ID NO: 36016 - DNA, 16 bp, Homo Sapiens
cggtctaaggcgctgc

SEQ ID NO: 36017 - DNA, 17 bp, Homo Sapiens
cggtctaaggcgctgcg

SEQ ID NO: 36018 - DNA, 17 bp, Homo Sapiens
cggtctaaggcgctgga

SEQ ID NO: 36019 - DNA, 19 bp, Homo Sapiens
cggtctaaggcgctggatt

SEQ ID NO: 36020 - DNA, 17 bp, Homo Sapiens
cggttagcgcgcggtac

SEQ ID NO: 36021 - DNA, 19 bp, Homo Sapiens
cggttagcgcgcggtactt

SEQ ID NO: 36022 - DNA, 24 bp, Homo Sapiens
cggttagcgcgttcggctgttaac

SEQ ID NO: 36023 - DNA, 17 bp, Homo Sapiens
cggttagctcagtcggc

SEQ ID NO: 36024 - DNA, 17 bp, Homo Sapiens
cggttaggattcctggt

SEQ ID NO: 36025 - DNA, 18 bp, Homo Sapiens
cggttaggattcctggtt

SEQ ID NO: 36026 - DNA, 20 bp, Homo Sapiens
cggttaggattcctggtttt

SEQ ID NO: 36027 - DNA, 21 bp, Homo Sapiens
cggttaggattcctggttttc

SEQ ID NO: 36028 - DNA, 22 bp, Homo Sapiens
cggttaggattcctggttttca

SEQ ID NO: 36029 - DNA, 23 bp, Homo Sapiens
cggttaggattcctggttttcac

SEQ ID NO: 36030 - DNA, 24 bp, Homo Sapiens
cggttaggattcctggttttcacc

SEQ ID NO: 36031 - DNA, 27 bp, Homo Sapiens
cggttaggattcctggttttcacccag

SEQ ID NO: 36032 - DNA, 28 bp, Homo Sapiens
cggttaggattcctggttttcacccagg

SEQ ID NO: 36033 - DNA, 29 bp, Homo Sapiens
cggttaggattcctggttttcacccaggc

SEQ ID NO: 36034 - DNA, 43 bp, Homo Sapiens
cggttaggattcctggttttcacccaggcggcccgggttcgac

SEQ ID NO: 36035 - DNA, 30 bp, Homo Sapiens; identical to SEQ ID NO: 12805

SEQ ID NO: 36036 - DNA, 16 bp, Homo Sapiens
cggttatcacgtctgc

SEQ ID NO: 36037 - DNA, 19 bp, Homo Sapiens
cggttcaaatccgggtgcc

SEQ ID NO: 36038 - DNA, 20 bp, Homo Sapiens
cggttcaaatccgggtgccc

SEQ ID NO: 36039 - DNA, 23 bp, Homo Sapiens
cggttcaaatccgggtgccccct

SEQ ID NO: 36040 - DNA, 16 bp, Homo Sapiens
cggttcgaaaccgggc

SEQ ID NO: 36041 - DNA, 22 bp, Homo Sapiens
cggttcgaaaccgggcggaaac

SEQ ID NO: 36042 - DNA, 23 bp, Homo Sapiens
cggttcgaaaccgggcggaaaca

SEQ ID NO: 36043 - DNA, 24 bp, Homo Sapiens
cggttcgaaaccgggcggaaacac

SEQ ID NO: 36044 - DNA, 25 bp, Homo Sapiens
cggttcgaaaccgggcggaaacacc

SEQ ID NO: 36045 - DNA, 22 bp, Homo Sapiens
cggttcgaatccgagtcacggc

SEQ ID NO: 36046 - DNA, 23 bp, Homo Sapiens
cggttcgaatccgagtcacggca

SEQ ID NO: 36047 - DNA, 24 bp, Homo Sapiens
cggttcgaatccgagtcacggcac

SEQ ID NO: 36048 - DNA, 25 bp, Homo Sapiens
cggttcgaatccgagtcacggcacc

SEQ ID NO: 36049 - DNA, 26 bp, Homo Sapiens
cggttcgaatccgagtcacggcacca

SEQ ID NO: 36050 - DNA, 21 bp, Homo Sapiens
cgtaaaccgaagatcgcgggt

SEQ ID NO: 36051 - DNA, 16 bp, Homo Sapiens
cgtagtcgtggccgag

SEQ ID NO: 36052 - DNA, 17 bp, Homo Sapiens
cgtagtcgtggccgagt

SEQ ID NO: 36053 - DNA, 19 bp, Homo Sapiens
cgtagtcgtggccgagtgg

SEQ ID NO: 36054 - DNA, 24 bp, Homo Sapiens
cgtagtcgtggccgagtggttaag

SEQ ID NO: 36055 - DNA, 28 bp, Homo Sapiens
cgtagtgtagtggtcatcacgttcgcct

SEQ ID NO: 36056 - DNA, 18 bp, Homo Sapiens
cgtagtgtagtggttatc

SEQ ID NO: 36057 - DNA, 27 bp, Homo Sapiens
cgtagtgtagtggttatcacgttcgcc

SEQ ID NO: 36058 - DNA, 28 bp, Homo Sapiens
cgtagtgtagtggttatcacgttcgcct

SEQ ID NO: 36059 - DNA, 47 bp, Homo Sapiens
cgtagtgtagtggttatcacgttcgcctcacacgcgaaaggtccccg

SEQ ID NO: 36060 - DNA, 19 bp, Homo Sapiens
cgtatagtggttagtactc

SEQ ID NO: 36061 - DNA, 21 bp, Homo Sapiens
cgtatagtggttagtactctg

SEQ ID NO: 36062 - DNA, 22 bp, Homo Sapiens
cgtatagtggttagtactctgc

SEQ ID NO: 36063 - DNA, 23 bp, Homo Sapiens
cgtatagtggttagtactctgcg

SEQ ID NO: 36064 - DNA, 24 bp, Homo Sapiens
cgtatagtggttagtactctgcgt

SEQ ID NO: 36065 - DNA, 25 bp, Homo Sapiens
cgtatagtggttagtactctgcgtt

SEQ ID NO: 36066 - DNA, 31 bp, Homo Sapiens; identical to SEQ ID NO: 12890

SEQ ID NO: 36067 - DNA, 36 bp, Homo Sapiens
cgtatagtggttagtactctgcgttgtggccgcagc

SEQ ID NO: 36068 - DNA, 40 bp, Homo Sapiens; identical to SEQ ID NO: 12892

SEQ ID NO: 36069 - DNA, 41 bp, Homo Sapiens; identical to SEQ ID NO: 12893

SEQ ID NO: 36070 - DNA, 37 bp, Homo Sapiens; identical to SEQ ID NO: 12903

SEQ ID NO: 36071 - DNA, 38 bp, Homo Sapiens; identical to SEQ ID NO: 12904

SEQ ID NO: 36072 - DNA, 19 bp, Homo Sapiens
cgtgatcgtatagtggtta

SEQ ID NO: 36073 - DNA, 22 bp, Homo Sapiens
cgtgatcgtatagtggttagta

SEQ ID NO: 36074 - DNA, 23 bp, Homo Sapiens
cgtgatcgtatagtggttagtac

SEQ ID NO: 36075 - DNA, 24 bp, Homo Sapiens
cgtgatcgtatagtggttagtact

SEQ ID NO: 36076 - DNA, 25 bp, Homo Sapiens
cgtgatcgtatagtggttagtactc

SEQ ID NO: 36077 - DNA, 26 bp, Homo Sapiens
cgtgatcgtatagtggttagtactct

SEQ ID NO: 36078 - DNA, 27 bp, Homo Sapiens
cgtgatcgtatagtggttagtactctg

SEQ ID NO: 36079 - DNA, 28 bp, Homo Sapiens
cgtgatcgtatagtggttagtactctgc

SEQ ID NO: 36080 - DNA, 29 bp, Homo Sapiens
cgtgatcgtatagtggttagtactctgcg

SEQ ID NO: 36081 - DNA, 30 bp, Homo Sapiens; identical to SEQ ID NO: 12928

SEQ ID NO: 36082 - DNA, 31 bp, Homo Sapiens; identical to SEQ ID NO: 12929

SEQ ID NO: 36083 - DNA, 32 bp, Homo Sapiens; identical to SEQ ID NO: 12930

SEQ ID NO: 36084 - DNA, 33 bp, Homo Sapiens; identical to SEQ ID NO: 12931

SEQ ID NO: 36085 - DNA, 34 bp, Homo Sapiens; identical to SEQ ID NO: 12932

SEQ ID NO: 36086 - DNA, 36 bp, Homo Sapiens; identical to SEQ ID NO: 12934

SEQ ID NO: 36087 - DNA, 46 bp, Homo Sapiens; identical to SEQ ID NO: 12938

SEQ ID NO: 36088 - DNA, 47 bp, Homo Sapiens; identical to SEQ ID NO: 12939

SEQ ID NO: 36089 - DNA, 18 bp, Homo Sapiens
cgtgctgggcccataacc

SEQ ID NO: 36090 - DNA, 19 bp, Homo Sapiens
cgtgctgggcccataaccc

SEQ ID NO: 36091 - DNA, 22 bp, Homo Sapiens
cgtgctgggcccataacccaga

SEQ ID NO: 36092 - DNA, 27 bp, Homo Sapiens
cgtgctgggcccataacccagaggtcg

SEQ ID NO: 36093 - DNA, 29 bp, Homo Sapiens
cgtgctgggcccataacccagaggtcgat

SEQ ID NO: 36094 - DNA, 30 bp, Homo Sapiens; identical to SEQ ID NO: 12946

SEQ ID NO: 36095 - DNA, 32 bp, Homo Sapiens; identical to SEQ ID NO: 12948

SEQ ID NO: 36096 - DNA, 33 bp, Homo Sapiens; identical to SEQ ID NO: 12949

SEQ ID NO: 36097 - DNA, 35 bp, Homo Sapiens; identical to SEQ ID NO: 12951

SEQ ID NO: 36098 - DNA, 19 bp, Homo Sapiens
cgtggccgagcggtctaag

SEQ ID NO: 36099 - DNA, 19 bp, Homo Sapiens
cgtggccgagtggttaagg

SEQ ID NO: 36100 - DNA, 20 bp, Homo Sapiens
cgtggccgagtggttaaggc

SEQ ID NO: 36101 - DNA, 28 bp, Homo Sapiens
cgtgggttcgaatcccaccctcgtcgcc

SEQ ID NO: 36102 - DNA, 26 bp, Homo Sapiens
cgtgggttcgaatcccaccgctgcca

SEQ ID NO: 36103 - DNA, 28 bp, Homo Sapiens
cgtgggttcgaatcccaccgctgccacc

SEQ ID NO: 36104 - DNA, 28 bp, Homo Sapiens
cgtgggttcgaatcccaccttcgtcgcc

SEQ ID NO: 36105 - DNA, 26 bp, Homo Sapiens
cgtgggttcgaatcccatcctcgtcg

SEQ ID NO: 36106 - DNA, 27 bp, Homo Sapiens
cgtgggttcgaatcccatcctcgtcgc

SEQ ID NO: 36107 - DNA, 28 bp, Homo Sapiens
cgtgggttcgaatcccatcctcgtcgcc

SEQ ID NO: 36108 - DNA, 29 bp, Homo Sapiens
cgtgggttcgaatcccatcctcgtcgcca

SEQ ID NO: 36109 - DNA, 25 bp, Homo Sapiens
cgtgggttcgagccccacgttgggc

SEQ ID NO: 36110 - DNA, 26 bp, Homo Sapiens
cgtgggttcgagccccacgttgggcg

SEQ ID NO: 36111 - DNA, 27 bp, Homo Sapiens
cgtgggttcgagccccacgttgggcgc

SEQ ID NO: 36112 - DNA, 28 bp, Homo Sapiens
cgtgggttcgagccccacgttgggcgcc

SEQ ID NO: 36113 - DNA, 29 bp, Homo Sapiens
cgtgggttcgagccccacgttgggcgcca

SEQ ID NO: 36114 - DNA, 22 bp, Homo Sapiens
cgtggttgtagtccgtgcgaga

SEQ ID NO: 36115 - DNA, 23 bp, Homo Sapiens
cgtggttgtagtccgtgcgagaa

SEQ ID NO: 36116 - DNA, 24 bp, Homo Sapiens
cgtggttgtagtccgtgcgagaat

SEQ ID NO: 36117 - DNA, 25 bp, Homo Sapiens
cgtggttgtagtccgtgcgagaata

SEQ ID NO: 36118 - DNA, 27 bp, Homo Sapiens
cgtggttgtagtccgtgcgagaatacc

SEQ ID NO: 36119 - DNA, 28 bp, Homo Sapiens
cgtggttgtagtccgtgcgagaatacca

SEQ ID NO: 36120 - DNA, 24 bp, Homo Sapiens
cgtgttcaaatcacgtcggggtca

SEQ ID NO: 36121 - DNA, 25 bp, Homo Sapiens
cgtgttcaaatcacgtcggggtcac

SEQ ID NO: 36122 - DNA, 26 bp, Homo Sapiens
cgtgttcaaatcacgtcggggtcacc

SEQ ID NO: 36123 - DNA, 25 bp, Homo Sapiens
cgtgttcaagtcacgtcggggtcac

SEQ ID NO: 36124 - DNA, 26 bp, Homo Sapiens
cgtgttcaagtcacgtcggggtcacc

SEQ ID NO: 36125 - DNA, 24 bp, Homo Sapiens
cgtgttcgaatcacgtcggggtca

SEQ ID NO: 36126 - DNA, 25 bp, Homo Sapiens
cgtgttcgaatcacgtcggggtcac

SEQ ID NO: 36127 - DNA, 26 bp, Homo Sapiens
cgtgttcgaatcacgtcggggtcacc

SEQ ID NO: 36128 - DNA, 28 bp, Homo Sapiens
cgttaacttccaattaactagttttgac

SEQ ID NO: 36129 - DNA, 16 bp, Homo Sapiens
cgttcaggtcgcagtc

SEQ ID NO: 36130 - DNA, 18 bp, Homo Sapiens
cgttcaggtcgcagtctc

SEQ ID NO: 36131 - DNA, 19 bp, Homo Sapiens
cgttcaggtcgcagtctcc

SEQ ID NO: 36132 - DNA, 20 bp, Homo Sapiens
cgttcaggtcgcagtctccc

SEQ ID NO: 36133 - DNA, 16 bp, Homo Sapiens
cgttcggctgttaacc

SEQ ID NO: 36134 - DNA, 27 bp, Homo Sapiens
cgttggtctaggggtatgattctcgct

SEQ ID NO: 36135 - DNA, 28 bp, Homo Sapiens
cgttggtctaggggtatgattctcgctt

SEQ ID NO: 36136 - DNA, 22 bp, Homo Sapiens
cgttggtggtatagtggtgagc

SEQ ID NO: 36137 - DNA, 34 bp, Homo Sapiens; identical to SEQ ID NO: 13076

SEQ ID NO: 36138 - DNA, 33 bp, Homo Sapiens; identical to SEQ ID NO: 13077

SEQ ID NO: 36139 - DNA, 34 bp, Homo Sapiens; identical to SEQ ID NO: 13078

SEQ ID NO: 36140 - DNA, 37 bp, Homo Sapiens
ctaaaaggttggtggttcgaacccacccagaggcgcc

SEQ ID NO: 36141 - DNA, 20 bp, Homo Sapiens
ctaaaccatcctctgctacc

SEQ ID NO: 36142 - DNA, 33 bp, Homo Sapiens; identical to SEQ ID NO: 13094

SEQ ID NO: 36143 - DNA, 34 bp, Homo Sapiens; identical to SEQ ID NO: 13095

SEQ ID NO: 36144 - DNA, 35 bp, Homo Sapiens; identical to SEQ ID NO: 13097

SEQ ID NO: 36145 - DNA, 36 bp, Homo Sapiens
ctaaaggtccctggttcaatcccgggtttcggcacc

SEQ ID NO: 36146 - DNA, 32 bp, Homo Sapiens
ctaaaggtccctggttcgatcccgggtttcgg

SEQ ID NO: 36147 - DNA, 33 bp, Homo Sapiens; identical to SEQ ID NO: 13099

SEQ ID NO: 36148 - DNA, 34 bp, Homo Sapiens; identical to SEQ ID NO: 13100

SEQ ID NO: 36149 - DNA, 35 bp, Homo Sapiens; identical to SEQ ID NO: 13101

SEQ ID NO: 36150 - DNA, 36 bp, Homo Sapiens; identical to SEQ ID NO: 13102

SEQ ID NO: 36151 - DNA, 37 bp, Homo Sapiens; identical to SEQ ID NO: 13103

SEQ ID NO: 36152 - DNA, 17 bp, Homo Sapiens
ctaaataagctatcggg

SEQ ID NO: 36153 - DNA, 20 bp, Homo Sapiens
ctaacaacatggctttctca

SEQ ID NO: 36154 - DNA, 22 bp, Homo Sapiens
ctaacaacatggctttctcacc

SEQ ID NO: 36155 - DNA, 23 bp, Homo Sapiens
ctaacaacatggctttctcacca

SEQ ID NO: 36156 - DNA, 42 bp, Homo Sapiens; identical to SEQ ID NO: 13161

SEQ ID NO: 36157 - DNA, 16 bp, Homo Sapiens
ctaagccagggattgt

SEQ ID NO: 36158 - DNA, 17 bp, Homo Sapiens
ctaagccagggattgtg

SEQ ID NO: 36159 - DNA, 18 bp, Homo Sapiens
ctaagccagggattgtgg

SEQ ID NO: 36160 - DNA, 20 bp, Homo Sapiens
ctaagccagggattgtgggt

SEQ ID NO: 36161 - DNA, 22 bp, Homo Sapiens
ctaagccagggattgtgggttc

SEQ ID NO: 36162 - DNA, 23 bp, Homo Sapiens
ctaagccagggattgtgggttcg

SEQ ID NO: 36163 - DNA, 30 bp, Homo Sapiens; identical to SEQ ID NO: 13176

SEQ ID NO: 36164 - DNA, 41 bp, Homo Sapiens; identical to SEQ ID NO: 13186

SEQ ID NO: 36165 - DNA, 42 bp, Homo Sapiens; identical to SEQ ID NO: 13187

SEQ ID NO: 36166 - DNA, 17 bp, Homo Sapiens
ctaatccagaggttccg

SEQ ID NO: 36167 - DNA, 18 bp, Homo Sapiens
ctaatccagaggttccgg

SEQ ID NO: 36168 - DNA, 42 bp, Homo Sapiens; identical to SEQ ID NO: 13215

SEQ ID NO: 36169 - DNA, 16 bp, Homo Sapiens
ctaatccattgtgctt

SEQ ID NO: 36170 - DNA, 17 bp, Homo Sapiens
ctaatccattgtgcttt

SEQ ID NO: 36171 - DNA, 16 bp, Homo Sapiens
ctaatggataaggcac

SEQ ID NO: 36172 - DNA, 18 bp, Homo Sapiens
ctaatggataaggcactg

SEQ ID NO: 36173 - DNA, 16 bp, Homo Sapiens
ctaatggataaggcat

SEQ ID NO: 36174 - DNA, 17 bp, Homo Sapiens
ctaatggataaggcatc

SEQ ID NO: 36175 - DNA, 22 bp, Homo Sapiens
ctaatggataaggcatcagcct

SEQ ID NO: 36176 - DNA, 31 bp, Homo Sapiens; identical to SEQ ID NO: 13229

SEQ ID NO: 36177 - DNA, 18 bp, Homo Sapiens
ctaatggataaggcattg

SEQ ID NO: 36178 - DNA, 22 bp, Homo Sapiens
ctaatggataaggcgtctgact

SEQ ID NO: 36179 - DNA, 32 bp, Homo Sapiens; identical to SEQ ID NO: 13255

SEQ ID NO: 36180 - DNA, 33 bp, Homo Sapiens; identical to SEQ ID NO: 13256

SEQ ID NO: 36181 - DNA, 17 bp, Homo Sapiens
ctaattcaaaggttccg

SEQ ID NO: 36182 - DNA, 18 bp, Homo Sapiens
ctaattcaaaggttccgg

SEQ ID NO: 36183 - DNA, 20 bp, Homo Sapiens
ctaattcaaaggttccgggt

SEQ ID NO: 36184 - DNA, 30 bp, Homo Sapiens
ctaattcaaaggttccgggttcgagtcccg

SEQ ID NO: 36185 - DNA, 40 bp, Homo Sapiens
ctaattcaaaggttccgggttcgagtcccggcggagtcgc

SEQ ID NO: 36186 - DNA, 41 bp, Homo Sapiens; identical to SEQ ID NO: 13261

SEQ ID NO: 36187 - DNA, 40 bp, Homo Sapiens
ctaattcaaaggttgtgggttcgaatcccaccagagtcgc

SEQ ID NO: 36188 - DNA, 41 bp, Homo Sapiens; identical to SEQ ID NO: 13263

SEQ ID NO: 36189 - DNA, 42 bp, Homo Sapiens; identical to SEQ ID NO: 13264

SEQ ID NO: 36190 - DNA, 41 bp, Homo Sapiens; identical to SEQ ID NO: 13265

SEQ ID NO: 36191 - DNA, 16 bp, Homo Sapiens
ctagcggttaggattc

SEQ ID NO: 36192 - DNA, 17 bp, Homo Sapiens
ctagcggttaggattcc

SEQ ID NO: 36193 - DNA, 18 bp, Homo Sapiens
ctagcggttaggattcct

SEQ ID NO: 36194 - DNA, 19 bp, Homo Sapiens
ctagcggttaggattcctg

SEQ ID NO: 36195 - DNA, 21 bp, Homo Sapiens
ctagcggttaggattcctggt

SEQ ID NO: 36196 - DNA, 22 bp, Homo Sapiens
ctagcggttaggattcctggtt

SEQ ID NO: 36197 - DNA, 24 bp, Homo Sapiens
ctagcggttaggattcctggtttt

SEQ ID NO: 36198 - DNA, 31 bp, Homo Sapiens
ctagcggttaggattcctggttttcacccag

SEQ ID NO: 36199 - DNA, 32 bp, Homo Sapiens
ctagcggttaggattcctggttttcacccagg

SEQ ID NO: 36200 - DNA, 16 bp, Homo Sapiens
ctagctcagtcggtag

SEQ ID NO: 36201 - DNA, 17 bp, Homo Sapiens
ctagctcagtcggtaga

SEQ ID NO: 36202 - DNA, 18 bp, Homo Sapiens
ctagctcagtcggtagag

SEQ ID NO: 36203 - DNA, 26 bp, Homo Sapiens
ctagctcagtcggtagagcatgagac

SEQ ID NO: 36204 - DNA, 27 bp, Homo Sapiens
ctagctcagtcggtagagcatgagact

SEQ ID NO: 36205 - DNA, 26 bp, Homo Sapiens
ctagctcagtcggtagagcatgggac

SEQ ID NO: 36206 - DNA, 27 bp, Homo Sapiens
ctagctcagtcggtagagcatgggact

SEQ ID NO: 36207 - DNA, 28 bp, Homo Sapiens
ctagctcagtcggtagagcatgggactc

SEQ ID NO: 36208 - DNA, 29 bp, Homo Sapiens
ctagctcagtcggtagagcatgggactct

SEQ ID NO: 36209 - DNA, 46 bp, Homo Sapiens; identical to SEQ ID NO: 13307

SEQ ID NO: 36210 - DNA, 34 bp, Homo Sapiens; identical to SEQ ID NO: 13313

SEQ ID NO: 36211 - DNA, 21 bp, Homo Sapiens
ctaggattcggcgctttcacc

SEQ ID NO: 36212 - DNA, 17 bp, Homo Sapiens
ctaggggtatgattctc

SEQ ID NO: 36213 - DNA, 20 bp, Homo Sapiens
ctaggggtatgattctcgct

SEQ ID NO: 36214 - DNA, 21 bp, Homo Sapiens
ctaggggtatgattctcgctt

SEQ ID NO: 36215 - DNA, 20 bp, Homo Sapiens
ctaggggtatgattctcggt

SEQ ID NO: 36216 - DNA, 21 bp, Homo Sapiens
ctaggggtatgattctcggtt

SEQ ID NO: 36217 - DNA, 27 bp, Homo Sapiens
ctaggttcgactcctggctggctcgcc

SEQ ID NO: 36218 - DNA, 20 bp, Homo Sapiens
ctagtggtatgattctcgct

SEQ ID NO: 36219 - DNA, 21 bp, Homo Sapiens
ctagtggtatgattctcgctt

SEQ ID NO: 36220 - DNA, 17 bp, Homo Sapiens
ctagtggttaggattcg

SEQ ID NO: 36221 - DNA, 19 bp, Homo Sapiens
ctagtggttaggattcggc

SEQ ID NO: 36222 - DNA, 20 bp, Homo Sapiens
ctagtggttaggattcggcg

SEQ ID NO: 36223 - DNA, 21 bp, Homo Sapiens
ctagtggttaggattcggcgc

SEQ ID NO: 36224 - DNA, 22 bp, Homo Sapiens
ctagtggttaggattcggcgct

SEQ ID NO: 36225 - DNA, 23 bp, Homo Sapiens
ctagtggttaggattcggcgctc

SEQ ID NO: 36226 - DNA, 24 bp, Homo Sapiens
ctagtggttaggattcggcgctct

SEQ ID NO: 36227 - DNA, 28 bp, Homo Sapiens
ctagtggttaggattcggcgctctcacc

SEQ ID NO: 36228 - DNA, 31 bp, Homo Sapiens; identical to SEQ ID NO: 13363

SEQ ID NO: 36229 - DNA, 38 bp, Homo Sapiens; identical to SEQ ID NO: 13365

SEQ ID NO: 36230 - DNA, 16 bp, Homo Sapiens
ctatcgggcccatacc

SEQ ID NO: 36231 - DNA, 31 bp, Homo Sapiens; identical to SEQ ID NO: 13414

SEQ ID NO: 36232 - DNA, 32 bp, Homo Sapiens; identical to SEQ ID NO: 13415

SEQ ID NO: 36233 - DNA, 16 bp, Homo Sapiens
ctcaagttctggtctc

SEQ ID NO: 36234 - DNA, 17 bp, Homo Sapiens
ctcaagttctggtctcc

SEQ ID NO: 36235 - DNA, 20 bp, Homo Sapiens
ctcaagttctggtctccgga

SEQ ID NO: 36236 - DNA, 17 bp, Homo Sapiens
ctcacaagaactgctaa

SEQ ID NO: 36237 - DNA, 18 bp, Homo Sapiens
ctcacaagaactgctaac

SEQ ID NO: 36238 - DNA, 19 bp, Homo Sapiens
ctcacaagaactgctaact

SEQ ID NO: 36239 - DNA, 28 bp, Homo Sapiens
ctcacaagaactgctaactcatgccccc

SEQ ID NO: 36240 - DNA, 46 bp, Homo Sapiens; identical to SEQ ID NO: 13478

SEQ ID NO: 36241 - DNA, 16 bp, Homo Sapiens
ctcacacggggcacca

SEQ ID NO: 36242 - DNA, 17 bp, Homo Sapiens
ctcaccgccgcggcccg

SEQ ID NO: 36243 - DNA, 21 bp, Homo Sapiens
ctcaccgccgcggcccgggtt

SEQ ID NO: 36244 - DNA, 39 bp, Homo Sapiens; identical to SEQ ID NO: 13508

SEQ ID NO: 36245 - DNA, 40 bp, Homo Sapiens; identical to SEQ ID NO: 13509

SEQ ID NO: 36246 - DNA, 41 bp, Homo Sapiens; identical to SEQ ID NO: 13510

SEQ ID NO: 36247 - DNA, 42 bp, Homo Sapiens; identical to SEQ ID NO: 13511

SEQ ID NO: 36248 - DNA, 16 bp, Homo Sapiens
ctcacctggagcacca

SEQ ID NO: 36249 - DNA, 16 bp, Homo Sapiens
ctcagagggggcacca

SEQ ID NO: 36250 - DNA, 30 bp, Homo Sapiens; identical to SEQ ID NO: 13523

SEQ ID NO: 36251 - DNA, 32 bp, Homo Sapiens; identical to SEQ ID NO: 13524

SEQ ID NO: 36252 - DNA, 33 bp, Homo Sapiens; identical to SEQ ID NO: 13525

SEQ ID NO: 36253 - DNA, 34 bp, Homo Sapiens; identical to SEQ ID NO: 13526

SEQ ID NO: 36254 - DNA, 35 bp, Homo Sapiens; identical to SEQ ID NO: 13527

SEQ ID NO: 36255 - DNA, 22 bp, Homo Sapiens
ctcaggggtagagcatttgact

SEQ ID NO: 36256 - DNA, 34 bp, Homo Sapiens; identical to SEQ ID NO: 13539

SEQ ID NO: 36257 - DNA, 35 bp, Homo Sapiens; identical to SEQ ID NO: 13540

SEQ ID NO: 36258 - DNA, 36 bp, Homo Sapiens; identical to SEQ ID NO: 13541

SEQ ID NO: 36259 - DNA, 37 bp, Homo Sapiens; identical to SEQ ID NO: 13542

SEQ ID NO: 36260 - DNA, 28 bp, Homo Sapiens
ctcagtaagttgcaatacttaatttctg

SEQ ID NO: 36261 - DNA, 30 bp, Homo Sapiens; identical to SEQ ID NO: 13557

SEQ ID NO: 36262 - DNA, 31 bp, Homo Sapiens; identical to SEQ ID NO: 13558

SEQ ID NO: 36263 - DNA, 16 bp, Homo Sapiens
ctcagtcggtagagca

SEQ ID NO: 36264 - DNA, 18 bp, Homo Sapiens
ctcagtcggtagagcatc

SEQ ID NO: 36265 - DNA, 19 bp, Homo Sapiens
ctcagtcggtagagcatca

SEQ ID NO: 36266 - DNA, 22 bp, Homo Sapiens
ctcagtcggtagagcatcagac

SEQ ID NO: 36267 - DNA, 23 bp, Homo Sapiens
ctcagtcggtagagcatcagact

SEQ ID NO: 36268 - DNA, 25 bp, Homo Sapiens
ctcagtcggtagagcatcagacttt

SEQ ID NO: 36269 - DNA, 26 bp, Homo Sapiens
ctcagtcggtagagcatcagactttt

SEQ ID NO: 36270 - DNA, 18 bp, Homo Sapiens
ctcagtcggtagagcatg

SEQ ID NO: 36271 - DNA, 22 bp, Homo Sapiens
ctcagtcggtagagcatgagac

SEQ ID NO: 36272 - DNA, 23 bp, Homo Sapiens
ctcagtcggtagagcatgagact

SEQ ID NO: 36273 - DNA, 25 bp, Homo Sapiens
ctcagtcggtagagcatgagactct

SEQ ID NO: 36274 - DNA, 31 bp, Homo Sapiens; identical to SEQ ID NO: 13586

SEQ ID NO: 36275 - DNA, 32 bp, Homo Sapiens; identical to SEQ ID NO: 13587

SEQ ID NO: 36276 - DNA, 45 bp, Homo Sapiens; identical to SEQ ID NO: 13589

SEQ ID NO: 36277 - DNA, 22 bp, Homo Sapiens
ctcagtcggtagagcatgggac

SEQ ID NO: 36278 - DNA, 23 bp, Homo Sapiens
ctcagtcggtagagcatgggact

SEQ ID NO: 36279 - DNA, 24 bp, Homo Sapiens
ctcagtcggtagagcatgggactc

SEQ ID NO: 36280 - DNA, 25 bp, Homo Sapiens
ctcagtcggtagagcatgggactct

SEQ ID NO: 36281 - DNA, 26 bp, Homo Sapiens
ctcagtcggtagagcatgggactctt

SEQ ID NO: 36282 - DNA, 29 bp, Homo Sapiens
ctcagtcggtagagcatgggactcttaat

SEQ ID NO: 36283 - DNA, 30 bp, Homo Sapiens
ctcagtcggtagagcatgggactcttaatc

SEQ ID NO: 36284 - DNA, 31 bp, Homo Sapiens; identical to SEQ ID NO: 13601

SEQ ID NO: 36285 - DNA, 32 bp, Homo Sapiens; identical to SEQ ID NO: 13602

SEQ ID NO: 36286 - DNA, 45 bp, Homo Sapiens; identical to SEQ ID NO: 13604

SEQ ID NO: 36287 - DNA, 22 bp, Homo Sapiens
ctcagtggtagagcatttgact

SEQ ID NO: 36288 - DNA, 17 bp, Homo Sapiens
ctcataatctgaaggtc

SEQ ID NO: 36289 - DNA, 19 bp, Homo Sapiens
ctcataatctgaaggtcct

SEQ ID NO: 36290 - DNA, 20 bp, Homo Sapiens
ctcataatctgaaggtcctg

SEQ ID NO: 36291 - DNA, 43 bp, Homo Sapiens
ctcataatctgaaggtcctgagttcgaacctcagagggggcac

SEQ ID NO: 36292 - DNA, 44 bp, Homo Sapiens; identical to SEQ ID NO: 13624

SEQ ID NO: 36293 - DNA, 20 bp, Homo Sapiens
ctcataatctgaaggtcgtg

SEQ ID NO: 36294 - DNA, 44 bp, Homo Sapiens
ctcataatctgaaggtcgtgagttcgagcctcacacggggcacc

SEQ ID NO: 36295 - DNA, 43 bp, Homo Sapiens
ctcataatctgaaggtcgtgagttcgatcctcacacggggcac

SEQ ID NO: 36296 - DNA, 44 bp, Homo Sapiens; identical to SEQ ID NO: 13630

SEQ ID NO: 36297 - DNA, 29 bp, Homo Sapiens
ctcatgcccccatgtctaacaacatggct

SEQ ID NO: 36298 - DNA, 30 bp, Homo Sapiens; identical to SEQ ID NO: 13645

SEQ ID NO: 36299 - DNA, 38 bp, Homo Sapiens
ctccaatggaggcgtgggttcgaatcccacttctgaca

SEQ ID NO: 36300 - DNA, 39 bp, Homo Sapiens
ctccaatggaggcgtgggttcgaatcccacttctgacac

SEQ ID NO: 36301 - DNA, 17 bp, Homo Sapiens
ctccagatcagaaggct

SEQ ID NO: 36302 - DNA, 18 bp, Homo Sapiens
ctccagatcagaaggctg

SEQ ID NO: 36303 - DNA, 19 bp, Homo Sapiens
ctccagatcagaaggctgc

SEQ ID NO: 36304 - DNA, 24 bp, Homo Sapiens
ctccagatcagaaggctgcgtgtt

SEQ ID NO: 36305 - DNA, 25 bp, Homo Sapiens
ctccagatcagaaggctgcgtgttc

SEQ ID NO: 36306 - DNA, 44 bp, Homo Sapiens; identical to SEQ ID NO: 13672

SEQ ID NO: 36307 - DNA, 19 bp, Homo Sapiens
ctccagatcagaaggttgc

SEQ ID NO: 36308 - DNA, 25 bp, Homo Sapiens
ctccagatcagaaggttgcgtgttc

SEQ ID NO: 36309 - DNA, 44 bp, Homo Sapiens
ctccagtcatttcgatggcgtgggttcgaatcccaccgctgcca

SEQ ID NO: 36310 - DNA, 45 bp, Homo Sapiens
ctccagtcatttcgatggcgtgggttcgaatcccaccgctgccac

SEQ ID NO: 36311 - DNA, 46 bp, Homo Sapiens; identical to SEQ ID NO: 13677

SEQ ID NO: 36312 - DNA, 44 bp, Homo Sapiens
ctccagtctcttcggaggcgtgggttcgaatcccaccgctgcca

SEQ ID NO: 36313 - DNA, 45 bp, Homo Sapiens; identical to SEQ ID NO: 13680

SEQ ID NO: 36314 - DNA, 46 bp, Homo Sapiens; identical to SEQ ID NO: 13681

SEQ ID NO: 36315 - DNA, 44 bp, Homo Sapiens
ctccagtctcttcgggggcgtgggttcgaatcccaccactgcca

SEQ ID NO: 36316 - DNA, 46 bp, Homo Sapiens
ctccagtctcttcgggggcgtgggttcgaatcccaccactgccacc

SEQ ID NO: 36317 - DNA, 44 bp, Homo Sapiens; identical to SEQ ID NO: 13687

SEQ ID NO: 36318 - DNA, 45 bp, Homo Sapiens; identical to SEQ ID NO: 13688

SEQ ID NO: 36319 - DNA, 46 bp, Homo Sapiens; identical to SEQ ID NO: 13689

SEQ ID NO: 36320 - DNA, 16 bp, Homo Sapiens
ctcccggtatgggaac

SEQ ID NO: 36321 - DNA, 17 bp, Homo Sapiens
ctcccggtatgggaacc

SEQ ID NO: 36322 - DNA, 16 bp, Homo Sapiens
ctcccggtgtgggaac

SEQ ID NO: 36323 - DNA, 17 bp, Homo Sapiens
ctcccggtgtgggaacc

SEQ ID NO: 36324 - DNA, 18 bp, Homo Sapiens
ctcccggtgtgggaacca

SEQ ID NO: 36325 - DNA, 33 bp, Homo Sapiens; identical to SEQ ID NO: 13726

SEQ ID NO: 36326 - DNA, 34 bp, Homo Sapiens; identical to SEQ ID NO: 13727

SEQ ID NO: 36327 - DNA, 35 bp, Homo Sapiens; identical to SEQ ID NO: 13728

SEQ ID NO: 36328 - DNA, 36 bp, Homo Sapiens; identical to SEQ ID NO: 13729

SEQ ID NO: 36329 - DNA, 27 bp, Homo Sapiens
ctccgaggtgattttcatattgaattg

SEQ ID NO: 36330 - DNA, 28 bp, Homo Sapiens
ctccgaggtgattttcatattgaattgc

SEQ ID NO: 36331 - DNA, 29 bp, Homo Sapiens
ctccgaggtgattttcatattgaattgca

SEQ ID NO: 36332 - DNA, 19 bp, Homo Sapiens
ctccggagctggggattgt

SEQ ID NO: 36333 - DNA, 44 bp, Homo Sapiens
ctccggagctggggattgtgggttcgagtcccatctgggtcgcc

SEQ ID NO: 36334 - DNA, 39 bp, Homo Sapiens
ctccggatggaggcgtgggttcgaatcccacttctgaca

SEQ ID NO: 36335 - DNA, 40 bp, Homo Sapiens
ctccggatggaggcgtgggttcgaatcccacttctgacac

SEQ ID NO: 36336 - DNA, 41 bp, Homo Sapiens
ctccggatggaggcgtgggttcgaatcccacttctgacacc

SEQ ID NO: 36337 - DNA, 16 bp, Homo Sapiens
ctcctggctggctcac

SEQ ID NO: 36338 - DNA, 16 bp, Homo Sapiens
ctcctggctggctcgc

SEQ ID NO: 36339 - DNA, 17 bp, Homo Sapiens
ctcctggctggctcgcc

SEQ ID NO: 36340 - DNA, 18 bp, Homo Sapiens
ctcctggctggctcgcca

SEQ ID NO: 36341 - DNA, 16 bp, Homo Sapiens
ctcgctggggcctcca

SEQ ID NO: 36342 - DNA, 16 bp, Homo Sapiens
ctcggtggaacctcca

SEQ ID NO: 36343 - DNA, 16 bp, Homo Sapiens
ctcggtgggacctcca

SEQ ID NO: 36344 - DNA, 26 bp, Homo Sapiens
ctcggttcgaatccgagtcacggcac

SEQ ID NO: 36345 - DNA, 34 bp, Homo Sapiens; identical to SEQ ID NO: 13830

SEQ ID NO: 36346 - DNA, 16 bp, Homo Sapiens
ctctcaccgccgcggc

SEQ ID NO: 36347 - DNA, 17 bp, Homo Sapiens
ctctcaccgccgcggcc

SEQ ID NO: 36348 - DNA, 18 bp, Homo Sapiens
ctctcaccgccgcggccc

SEQ ID NO: 36349 - DNA, 41 bp, Homo Sapiens; identical to SEQ ID NO: 13880

SEQ ID NO: 36350 - DNA, 42 bp, Homo Sapiens; identical to SEQ ID NO: 13881

SEQ ID NO: 36351 - DNA, 44 bp, Homo Sapiens; identical to SEQ ID NO: 13883

SEQ ID NO: 36352 - DNA, 18 bp, Homo Sapiens
ctctgaatccagcgatcc

SEQ ID NO: 36353 - DNA, 19 bp, Homo Sapiens
ctctgaatccagcgatccg

SEQ ID NO: 36354 - DNA, 20 bp, Homo Sapiens
ctctgaatccagcgatccga

SEQ ID NO: 36355 - DNA, 21 bp, Homo Sapiens
ctctgaatccagcgatccgag

SEQ ID NO: 36356 - DNA, 22 bp, Homo Sapiens
ctctgaatccagcgatccgagt

SEQ ID NO: 36357 - DNA, 25 bp, Homo Sapiens
ctctgaatccagcgatccgagttca

SEQ ID NO: 36358 - DNA, 41 bp, Homo Sapiens; identical to SEQ ID NO: 13897

SEQ ID NO: 36359 - DNA, 42 bp, Homo Sapiens
ctctgaatccagcgatccgagttcaaatctcggtggaacctc

SEQ ID NO: 36360 - DNA, 16 bp, Homo Sapiens
ctctgcgttgtggccg

SEQ ID NO: 36361 - DNA, 17 bp, Homo Sapiens
ctctgcgttgtggccgc

SEQ ID NO: 36362 - DNA, 16 bp, Homo Sapiens
ctctggactctgaatc

SEQ ID NO: 36363 - DNA, 17 bp, Homo Sapiens
ctctggactctgaatcc

SEQ ID NO: 36364 - DNA, 18 bp, Homo Sapiens
ctctggactctgaatcca

SEQ ID NO: 36365 - DNA, 19 bp, Homo Sapiens
ctctggactctgaatccag

SEQ ID NO: 36366 - DNA, 20 bp, Homo Sapiens
ctctggactctgaatccagc

SEQ ID NO: 36367 - DNA, 21 bp, Homo Sapiens
ctctggactctgaatccagcg

SEQ ID NO: 36368 - DNA, 23 bp, Homo Sapiens
ctctggactctgaatccagcgat

SEQ ID NO: 36369 - DNA, 25 bp, Homo Sapiens
ctctggactctgaatccagcgatcc

SEQ ID NO: 36370 - DNA, 26 bp, Homo Sapiens
ctctggactctgaatccagcgatccg

SEQ ID NO: 36371 - DNA, 27 bp, Homo Sapiens
ctctggactctgaatccagcgatccga

SEQ ID NO: 36372 - DNA, 28 bp, Homo Sapiens
ctctggactctgaatccagcgatccgag

SEQ ID NO: 36373 - DNA, 29 bp, Homo Sapiens
ctctggactctgaatccagcgatccgagt

SEQ ID NO: 36374 - DNA, 30 bp, Homo Sapiens; identical to SEQ ID NO: 13916

SEQ ID NO: 36375 - DNA, 31 bp, Homo Sapiens; identical to SEQ ID NO: 13917

SEQ ID NO: 36376 - DNA, 32 bp, Homo Sapiens; identical to SEQ ID NO: 13918

SEQ ID NO: 36377 - DNA, 16 bp, Homo Sapiens
ctctggactttgaatc

SEQ ID NO: 36378 - DNA, 17 bp, Homo Sapiens
ctctggactttgaatcc

SEQ ID NO: 36379 - DNA, 16 bp, Homo Sapiens
ctctgtggaacctcca

SEQ ID NO: 36380 - DNA, 18 bp, Homo Sapiens
ctctgtggcgcaatggac

SEQ ID NO: 36381 - DNA, 19 bp, Homo Sapiens
ctcttaatcccagggtcgt

SEQ ID NO: 36382 - DNA, 19 bp, Homo Sapiens
ctcttaatctcagggtcgt

SEQ ID NO: 36383 - DNA, 24 bp, Homo Sapiens
ctcttaatctcagggtcgtgggtt

SEQ ID NO: 36384 - DNA, 44 bp, Homo Sapiens
ctcttaatctcagggtcgtgggttcgagccccacgttgggcgcc

SEQ ID NO: 36385 - DNA, 39 bp, Homo Sapiens
ctcttcggaggcgtgggttcgaatcccaccgctgccacc

SEQ ID NO: 36386 - DNA, 39 bp, Homo Sapiens
ctcttcgggggcgtgggttcgaatcccaccgctgccacc

SEQ ID NO: 36387 - DNA, 16 bp, Homo Sapiens
ctctttacagtgacca

SEQ ID NO: 36388 - DNA, 16 bp, Homo Sapiens
ctgaaaatgtttagac

SEQ ID NO: 36389 - DNA, 18 bp, Homo Sapiens
ctgaaaatgtttagacgg

SEQ ID NO: 36390 - DNA, 20 bp, Homo Sapiens
ctgaaaatgtttagacgggc

SEQ ID NO: 36391 - DNA, 21 bp, Homo Sapiens
ctgaaaatgtttagacgggct

SEQ ID NO: 36392 - DNA, 22 bp, Homo Sapiens
ctgaaaatgtttagacgggctc

SEQ ID NO: 36393 - DNA, 23 bp, Homo Sapiens
ctgaaaatgtttagacgggctca

SEQ ID NO: 36394 - DNA, 37 bp, Homo Sapiens; identical to SEQ ID NO: 13968

SEQ ID NO: 36395 - DNA, 16 bp, Homo Sapiens
ctgaaggtcctgagtt

SEQ ID NO: 36396 - DNA, 17 bp, Homo Sapiens
ctgaaggtcctgagttc

SEQ ID NO: 36397 - DNA, 18 bp, Homo Sapiens
ctgaaggtcctgagttcg

SEQ ID NO: 36398 - DNA, 34 bp, Homo Sapiens; identical to SEQ ID NO: 13983

SEQ ID NO: 36399 - DNA, 35 bp, Homo Sapiens; identical to SEQ ID NO: 13984

SEQ ID NO: 36400 - DNA, 36 bp, Homo Sapiens; identical to SEQ ID NO: 13985

SEQ ID NO: 36401 - DNA, 37 bp, Homo Sapiens; identical to SEQ ID NO: 13986

SEQ ID NO: 36402 - DNA, 34 bp, Homo Sapiens; identical to SEQ ID NO: 13989

SEQ ID NO: 36403 - DNA, 35 bp, Homo Sapiens; identical to SEQ ID NO: 13990

SEQ ID NO: 36404 - DNA, 36 bp, Homo Sapiens; identical to SEQ ID NO: 13991

SEQ ID NO: 36405 - DNA, 16 bp, Homo Sapiens
ctgaaggtcgtgagtt

SEQ ID NO: 36406 - DNA, 17 bp, Homo Sapiens
ctgaaggtcgtgagttc

SEQ ID NO: 36407 - DNA, 18 bp, Homo Sapiens
ctgaaggtcgtgagttcg

SEQ ID NO: 36408 - DNA, 24 bp, Homo Sapiens
ctgaaggtcgtgagttcgagcctc

SEQ ID NO: 36409 - DNA, 31 bp, Homo Sapiens; identical to SEQ ID NO: 14000

SEQ ID NO: 36410 - DNA, 32 bp, Homo Sapiens
ctgaaggtcgtgagttcgagcctcacacgggg

SEQ ID NO: 36411 - DNA, 33 bp, Homo Sapiens; identical to SEQ ID NO: 14001

SEQ ID NO: 36412 - DNA, 34 bp, Homo Sapiens; identical to SEQ ID NO: 14002

SEQ ID NO: 36413 - DNA, 35 bp, Homo Sapiens; identical to SEQ ID NO: 14003

SEQ ID NO: 36414 - DNA, 36 bp, Homo Sapiens; identical to SEQ ID NO: 14004

SEQ ID NO: 36415 - DNA, 37 bp, Homo Sapiens; identical to SEQ ID NO: 14005

SEQ ID NO: 36416 - DNA, 31 bp, Homo Sapiens
ctgaaggtcgtgagttcgatcctcacacggg

SEQ ID NO: 36417 - DNA, 34 bp, Homo Sapiens; identical to SEQ ID NO: 14008

SEQ ID NO: 36418 - DNA, 35 bp, Homo Sapiens; identical to SEQ ID NO: 14009

SEQ ID NO: 36419 - DNA, 36 bp, Homo Sapiens; identical to SEQ ID NO: 14010

SEQ ID NO: 36420 - DNA, 37 bp, Homo Sapiens; identical to SEQ ID NO: 14011

SEQ ID NO: 36421 - DNA, 16 bp, Homo Sapiens
ctgaatccagcgatcc

SEQ ID NO: 36422 - DNA, 17 bp, Homo Sapiens
ctgaatccagcgatccg

SEQ ID NO: 36423 - DNA, 18 bp, Homo Sapiens
ctgaatccagcgatccga

SEQ ID NO: 36424 - DNA, 19 bp, Homo Sapiens
ctgaatccagcgatccgag

SEQ ID NO: 36425 - DNA, 20 bp, Homo Sapiens
ctgaatccagcgatccgagt

SEQ ID NO: 36426 - DNA, 21 bp, Homo Sapiens
ctgaatccagcgatccgagtt

SEQ ID NO: 36427 - DNA, 22 bp, Homo Sapiens
ctgaatccagcgatccgagttc

SEQ ID NO: 36428 - DNA, 23 bp, Homo Sapiens
ctgaatccagcgatccgagttca

SEQ ID NO: 36429 - DNA, 39 bp, Homo Sapiens; identical to SEQ ID NO: 14031

SEQ ID NO: 36430 - DNA, 40 bp, Homo Sapiens; identical to SEQ ID NO: 14032

SEQ ID NO: 36431 - DNA, 41 bp, Homo Sapiens; identical to SEQ ID NO: 14033

SEQ ID NO: 36432 - DNA, 16 bp, Homo Sapiens
ctgacaacagaggctt

SEQ ID NO: 36433 - DNA, 21 bp, Homo Sapiens
ctgacaacagaggcttacgac

SEQ ID NO: 36434 - DNA, 24 bp, Homo Sapiens
ctgacaacagaggcttacgacccc

SEQ ID NO: 36435 - DNA, 33 bp, Homo Sapiens; identical to SEQ ID NO: 14063

SEQ ID NO: 36436 - DNA, 34 bp, Homo Sapiens; identical to SEQ ID NO: 14064

SEQ ID NO: 36437 - DNA, 35 bp, Homo Sapiens; identical to SEQ ID NO: 14065

SEQ ID NO: 36438 - DNA, 36 bp, Homo Sapiens; identical to SEQ ID NO: 14066

SEQ ID NO: 36439 - DNA, 21 bp, Homo Sapiens
ctgactccagatcagaaggct

SEQ ID NO: 36440 - DNA, 23 bp, Homo Sapiens
ctgactccagatcagaaggctgc

SEQ ID NO: 36441 - DNA, 29 bp, Homo Sapiens
ctgactccagatcagaaggctgcgtgttc

SEQ ID NO: 36442 - DNA, 16 bp, Homo Sapiens
ctgacttcggatcaga

SEQ ID NO: 36443 - DNA, 34 bp, Homo Sapiens
ctgacttcggatcagaagattgagggttcgaatc

SEQ ID NO: 36444 - DNA, 17 bp, Homo Sapiens
ctgagggtccagggttc

SEQ ID NO: 36445 - DNA, 36 bp, Homo Sapiens; identical to SEQ ID NO: 14075

SEQ ID NO: 36446 - DNA, 31 bp, Homo Sapiens; identical to SEQ ID NO: 14077

SEQ ID NO: 36447 - DNA, 34 bp, Homo Sapiens; identical to SEQ ID NO: 14080

SEQ ID NO: 36448 - DNA, 35 bp, Homo Sapiens; identical to SEQ ID NO: 14081

SEQ ID NO: 36449 - DNA, 36 bp, Homo Sapiens; identical to SEQ ID NO: 14082

SEQ ID NO: 36450 - DNA, 37 bp, Homo Sapiens; identical to SEQ ID NO: 14083

SEQ ID NO: 36451 - DNA, 36 bp, Homo Sapiens
ctgagggtccggggttcaagtccctgttcgggcgcc

SEQ ID NO: 36452 - DNA, 17 bp, Homo Sapiens
ctgagtgaagcattgga

SEQ ID NO: 36453 - DNA, 18 bp, Homo Sapiens
ctgagtgaagcattggac

SEQ ID NO: 36454 - DNA, 22 bp, Homo Sapiens
ctgagtgaagcattggactgta

SEQ ID NO: 36455 - DNA, 18 bp, Homo Sapiens
ctgcagatcaagaggtcc

SEQ ID NO: 36456 - DNA, 19 bp, Homo Sapiens
ctgcagatcaagaggtccc

SEQ ID NO: 36457 - DNA, 20 bp, Homo Sapiens
ctgcagatcaagaggtcccc

SEQ ID NO: 36458 - DNA, 21 bp, Homo Sapiens
ctgcagatcaagaggtccccg

SEQ ID NO: 36459 - DNA, 18 bp, Homo Sapiens
ctgccacgcgggaggccc

SEQ ID NO: 36460 - DNA, 20 bp, Homo Sapiens
ctgccacgcgggaggcccgg

SEQ ID NO: 36461 - DNA, 22 bp, Homo Sapiens
ctgccacgcgggaggcccgggt

SEQ ID NO: 36462 - DNA, 24 bp, Homo Sapiens
ctgccttccaagcagttgacccgg

SEQ ID NO: 36463 - DNA, 26 bp, Homo Sapiens
ctgcgtgttcgaatcacgtcggggtc

SEQ ID NO: 36464 - DNA, 27 bp, Homo Sapiens
ctgcgtgttcgaatcacgtcggggtca

SEQ ID NO: 36465 - DNA, 28 bp, Homo Sapiens
ctgcgtgttcgaatcacgtcggggtcac

SEQ ID NO: 36466 - DNA, 29 bp, Homo Sapiens
ctgcgtgttcgaatcacgtcggggtcacc

SEQ ID NO: 36467 - DNA, 18 bp, Homo Sapiens
ctgctaactcatgccccc

SEQ ID NO: 36468 - DNA, 21 bp, Homo Sapiens
ctgctaactcatgcccccatg

SEQ ID NO: 36469 - DNA, 36 bp, Homo Sapiens; identical to SEQ ID NO: 14151

SEQ ID NO: 36470 - DNA, 16 bp, Homo Sapiens
ctggactctgaatcca

SEQ ID NO: 36471 - DNA, 17 bp, Homo Sapiens
ctggactctgaatccag

SEQ ID NO: 36472 - DNA, 18 bp, Homo Sapiens
ctggactctgaatccagc

SEQ ID NO: 36473 - DNA, 19 bp, Homo Sapiens
ctggactctgaatccagcg

SEQ ID NO: 36474 - DNA, 21 bp, Homo Sapiens
ctggactctgaatccagcgat

SEQ ID NO: 36475 - DNA, 23 bp, Homo Sapiens
ctggactctgaatccagcgatcc

SEQ ID NO: 36476 - DNA, 25 bp, Homo Sapiens
ctggactctgaatccagcgatccga

SEQ ID NO: 36477 - DNA, 26 bp, Homo Sapiens
ctggactctgaatccagcgatccgag

SEQ ID NO: 36478 - DNA, 27 bp, Homo Sapiens
ctggactctgaatccagcgatccgagt

SEQ ID NO: 36479 - DNA, 28 bp, Homo Sapiens
ctggactctgaatccagcgatccgagtt

SEQ ID NO: 36480 - DNA, 29 bp, Homo Sapiens
ctggactctgaatccagcgatccgagttc

SEQ ID NO: 36481 - DNA, 30 bp, Homo Sapiens; identical to SEQ ID NO: 14179

SEQ ID NO: 36482 - DNA, 46 bp, Homo Sapiens; identical to SEQ ID NO: 14184

SEQ ID NO: 36483 - DNA, 35 bp, Homo Sapiens; identical to SEQ ID NO: 14192

SEQ ID NO: 36484 - DNA, 16 bp, Homo Sapiens
ctggggattgtgggtt

SEQ ID NO: 36485 - DNA, 17 bp, Homo Sapiens
ctggggattgtgggttc

SEQ ID NO: 36486 - DNA, 24 bp, Homo Sapiens
ctggggattgtgggttcgagtccc

SEQ ID NO: 36487 - DNA, 27 bp, Homo Sapiens
ctggggattgtgggttcgagtcccatc

SEQ ID NO: 36488 - DNA, 33 bp, Homo Sapiens; identical to SEQ ID NO: 14220

SEQ ID NO: 36489 - DNA, 34 bp, Homo Sapiens; identical to SEQ ID NO: 14221

SEQ ID NO: 36490 - DNA, 35 bp, Homo Sapiens; identical to SEQ ID NO: 14222

SEQ ID NO: 36491 - DNA, 36 bp, Homo Sapiens; identical to SEQ ID NO: 14223

SEQ ID NO: 36492 - DNA, 37 bp, Homo Sapiens; identical to SEQ ID NO: 14224

SEQ ID NO: 36493 - DNA, 26 bp, Homo Sapiens
ctgggttcgaatcccagcggggcctc

SEQ ID NO: 36494 - DNA, 25 bp, Homo Sapiens
ctgggttcgaatcccagcggtgcct

SEQ ID NO: 36495 - DNA, 26 bp, Homo Sapiens
ctgggttcgaatcccagcggtgcctc

SEQ ID NO: 36496 - DNA, 26 bp, Homo Sapiens
ctgggttcgagccccagtggaaccac

SEQ ID NO: 36497 - DNA, 27 bp, Homo Sapiens
ctgggttcgagccccagtggaaccacc

SEQ ID NO: 36498 - DNA, 19 bp, Homo Sapiens
ctggtctccaatggaggcg

SEQ ID NO: 36499 - DNA, 43 bp, Homo Sapiens
ctggtctccaatggaggcgtgggttcgaatcccacttctgaca

SEQ ID NO: 36500 - DNA, 44 bp, Homo Sapiens
ctggtctccaatggaggcgtgggttcgaatcccacttctgacac

SEQ ID NO: 36501 - DNA, 45 bp, Homo Sapiens; identical to SEQ ID NO: 14245

SEQ ID NO: 36502 - DNA, 44 bp, Homo Sapiens
ctggtctccggatggaggcgtgggttcgaatcccacttctgaca

SEQ ID NO: 36503 - DNA, 45 bp, Homo Sapiens
ctggtctccggatggaggcgtgggttcgaatcccacttctgacac

SEQ ID NO: 36504 - DNA, 46 bp, Homo Sapiens; identical to SEQ ID NO: 14247

SEQ ID NO: 36505 - DNA, 16 bp, Homo Sapiens
ctggtggtctagtggc

SEQ ID NO: 36506 - DNA, 27 bp, Homo Sapiens
ctggtggtctagtggctaggattcggc

SEQ ID NO: 36507 - DNA, 30 bp, Homo Sapiens; identical to SEQ ID NO: 14258

SEQ ID NO: 36508 - DNA, 33 bp, Homo Sapiens; identical to SEQ ID NO: 14261

SEQ ID NO: 36509 - DNA, 22 bp, Homo Sapiens
ctggtggtctagtggttaggat

SEQ ID NO: 36510 - DNA, 23 bp, Homo Sapiens
ctggtggtctagtggttaggatt

SEQ ID NO: 36511 - DNA, 24 bp, Homo Sapiens
ctggtggtctagtggttaggattc

SEQ ID NO: 36512 - DNA, 25 bp, Homo Sapiens
ctggtggtctagtggttaggattcg

SEQ ID NO: 36513 - DNA, 27 bp, Homo Sapiens
ctggtggtctagtggttaggattcggc

SEQ ID NO: 36514 - DNA, 28 bp, Homo Sapiens
ctggtggtctagtggttaggattcggcg

SEQ ID NO: 36515 - DNA, 29 bp, Homo Sapiens
ctggtggtctagtggttaggattcggcgc

SEQ ID NO: 36516 - DNA, 30 bp, Homo Sapiens; identical to SEQ ID NO: 14277

SEQ ID NO: 36517 - DNA, 31 bp, Homo Sapiens; identical to SEQ ID NO: 14278

SEQ ID NO: 36518 - DNA, 32 bp, Homo Sapiens; identical to SEQ ID NO: 14279

SEQ ID NO: 36519 - DNA, 33 bp, Homo Sapiens; identical to SEQ ID NO: 14280

SEQ ID NO: 36520 - DNA, 39 bp, Homo Sapiens; identical to SEQ ID NO: 14284

SEQ ID NO: 36521 - DNA, 16 bp, Homo Sapiens
ctggtgtagtggtatc

SEQ ID NO: 36522 - DNA, 19 bp, Homo Sapiens
ctggtgtagtggtatcatg

SEQ ID NO: 36523 - DNA, 21 bp, Homo Sapiens
ctggtgtagtggtatcatgca

SEQ ID NO: 36524 - DNA, 23 bp, Homo Sapiens
ctggtgtagtggtatcatgcaag

SEQ ID NO: 36525 - DNA, 24 bp, Homo Sapiens
ctggtgtagtggtatcatgcaaga

SEQ ID NO: 36526 - DNA, 26 bp, Homo Sapiens
ctggtgtagtggtatcatgcaagatt

SEQ ID NO: 36527 - DNA, 44 bp, Homo Sapiens; identical to SEQ ID NO: 14302

SEQ ID NO: 36528 - DNA, 46 bp, Homo Sapiens; identical to SEQ ID NO: 14304

SEQ ID NO: 36529 - DNA, 23 bp, Homo Sapiens
ctggttcaaatccgggtgccccc

SEQ ID NO: 36530 - DNA, 25 bp, Homo Sapiens
ctggttcaatcccgggtttcggcac

SEQ ID NO: 36531 - DNA, 25 bp, Homo Sapiens
ctggttcgaatccggctcgaaggac

SEQ ID NO: 36532 - DNA, 26 bp, Homo Sapiens
ctggttcgaatccggctcgaaggacc

SEQ ID NO: 36533 - DNA, 25 bp, Homo Sapiens
ctggttcgaatccggctcggaggac

SEQ ID NO: 36534 - DNA, 26 bp, Homo Sapiens
ctggttcgaatccggctcggaggacc

SEQ ID NO: 36535 - DNA, 23 bp, Homo Sapiens
ctggttcgatcccgggtttcggc

SEQ ID NO: 36536 - DNA, 24 bp, Homo Sapiens
ctggttcgatcccgggtttcggca

SEQ ID NO: 36537 - DNA, 25 bp, Homo Sapiens
ctggttcgatcccgggtttcggcac

SEQ ID NO: 36538 - DNA, 26 bp, Homo Sapiens
ctggttcgatcccgggtttcggcacc

SEQ ID NO: 36539 - DNA, 25 bp, Homo Sapiens
ctggttcgattccggctcgaaggac

SEQ ID NO: 36540 - DNA, 26 bp, Homo Sapiens
ctggttcgattccggctcgaaggacc

SEQ ID NO: 36541 - DNA, 45 bp, Homo Sapiens
ctggttttcacccaggcggcccgggttcgactcccggtgtgggaa

SEQ ID NO: 36542 - DNA, 46 bp, Homo Sapiens
ctggttttcacccaggcggcccgggttcgactcccggtgtgggaac

SEQ ID NO: 36543 - DNA, 47 bp, Homo Sapiens; identical to SEQ ID NO: 14328

SEQ ID NO: 36544 - DNA, 21 bp, Homo Sapiens
ctgtagatccttaggtcgctg

SEQ ID NO: 36545 - DNA, 29 bp, Homo Sapiens
ctgtagtgtagtggttatcacgttcgcct

SEQ ID NO: 36546 - DNA, 16 bp, Homo Sapiens
ctgtcacgcgggagac

SEQ ID NO: 36547 - DNA, 17 bp, Homo Sapiens
ctgtcacgcgggagacc

SEQ ID NO: 36548 - DNA, 18 bp, Homo Sapiens
ctgtcacgcgggagaccg

SEQ ID NO: 36549 - DNA, 19 bp, Homo Sapiens
ctgtcacgcgggagaccgg

SEQ ID NO: 36550 - DNA, 20 bp, Homo Sapiens
ctgtcacgcgggagaccggg

SEQ ID NO: 36551 - DNA, 21 bp, Homo Sapiens
ctgtcacgcgggagaccgggg

SEQ ID NO: 36552 - DNA, 22 bp, Homo Sapiens
ctgtcacgcgggagaccggggt

SEQ ID NO: 36553 - DNA, 23 bp, Homo Sapiens
ctgtcacgcgggagaccggggtt

SEQ ID NO: 36554 - DNA, 24 bp, Homo Sapiens
ctgtcacgcgggagaccggggttc

SEQ ID NO: 36555 - DNA, 25 bp, Homo Sapiens
ctgtcacgcgggagaccggggttca

SEQ ID NO: 36556 - DNA, 36 bp, Homo Sapiens
ctgtcacgcgggagaccggggttcaattccccgacg

SEQ ID NO: 36557 - DNA, 38 bp, Homo Sapiens; identical to SEQ ID NO: 14360

SEQ ID NO: 36558 - DNA, 39 bp, Homo Sapiens
ctgtcacgcgggagaccggggttcaattccccgacgggg

SEQ ID NO: 36559 - DNA, 41 bp, Homo Sapiens
ctgtcacgcgggagaccggggttcaattccccgacggggag

SEQ ID NO: 36560 - DNA, 42 bp, Homo Sapiens; identical to SEQ ID NO: 14362

SEQ ID NO: 36561 - DNA, 43 bp, Homo Sapiens; identical to SEQ ID NO: 14363

SEQ ID NO: 36562 - DNA, 25 bp, Homo Sapiens
ctgtcacgcgggagaccggggttcg

SEQ ID NO: 36563 - DNA, 26 bp, Homo Sapiens
ctgtcacgcgggagaccggggttcga

SEQ ID NO: 36564 - DNA, 30 bp, Homo Sapiens
ctgtcacgcgggagaccggggttcgattcc

SEQ ID NO: 36565 - DNA, 34 bp, Homo Sapiens; identical to SEQ ID NO: 14368

SEQ ID NO: 36566 - DNA, 35 bp, Homo Sapiens; identical to SEQ ID NO: 14369

SEQ ID NO: 36567 - DNA, 36 bp, Homo Sapiens; identical to SEQ ID NO: 14370

SEQ ID NO: 36568 - DNA, 37 bp, Homo Sapiens; identical to SEQ ID NO: 14371

SEQ ID NO: 36569 - DNA, 38 bp, Homo Sapiens; identical to SEQ ID NO: 14372

SEQ ID NO: 36570 - DNA, 39 bp, Homo Sapiens; identical to SEQ ID NO: 14373

SEQ ID NO: 36571 - DNA, 41 bp, Homo Sapiens; identical to SEQ ID NO: 14374

SEQ ID NO: 36572 - DNA, 42 bp, Homo Sapiens; identical to SEQ ID NO: 14375

SEQ ID NO: 36573 - DNA, 43 bp, Homo Sapiens; identical to SEQ ID NO: 14376

SEQ ID NO: 36574 - DNA, 44 bp, Homo Sapiens; identical to SEQ ID NO: 14377

SEQ ID NO: 36575 - DNA, 17 bp, Homo Sapiens
ctgtgatggccgagtgg

SEQ ID NO: 36576 - DNA, 16 bp, Homo Sapiens
ctgtggcgcaatggac

SEQ ID NO: 36577 - DNA, 44 bp, Homo Sapiens
ctgttaaccgaaaggttggtggttcgagcccacccagggacgcc

SEQ ID NO: 36578 - DNA, 19 bp, Homo Sapiens
ctgttaactaagtgtttgt

SEQ ID NO: 36579 - DNA, 16 bp, Homo Sapiens
cttaacttgaccgctc

SEQ ID NO: 36580 - DNA, 18 bp, Homo Sapiens
cttaacttgaccgctctg

SEQ ID NO: 36581 - DNA, 19 bp, Homo Sapiens
cttaacttgaccgctctga

SEQ ID NO: 36582 - DNA, 20 bp, Homo Sapiens
cttaacttgaccgctctgac

SEQ ID NO: 36583 - DNA, 21 bp, Homo Sapiens
cttaacttgaccgctctgacc

SEQ ID NO: 36584 - DNA, 22 bp, Homo Sapiens
cttaacttgaccgctctgacca

SEQ ID NO: 36585 - DNA, 16 bp, Homo Sapiens
cttaagatccaatgga

SEQ ID NO: 36586 - DNA, 17 bp, Homo Sapiens
cttaagatccaatggac

SEQ ID NO: 36587 - DNA, 18 bp, Homo Sapiens
cttaagatccaatggaca

SEQ ID NO: 36588 - DNA, 19 bp, Homo Sapiens
cttaagatccaatggacat

SEQ ID NO: 36589 - DNA, 20 bp, Homo Sapiens
cttaagatccaatggacata

SEQ ID NO: 36590 - DNA, 17 bp, Homo Sapiens
cttaagatccaatggat

SEQ ID NO: 36591 - DNA, 18 bp, Homo Sapiens
cttaagatccaatggatt

SEQ ID NO: 36592 - DNA, 17 bp, Homo Sapiens
cttaagatccaatgggc

SEQ ID NO: 36593 - DNA, 16 bp, Homo Sapiens
cttaatcccagggtcg

SEQ ID NO: 36594 - DNA, 17 bp, Homo Sapiens
cttaatcccagggtcgt

SEQ ID NO: 36595 - DNA, 42 bp, Homo Sapiens; identical to SEQ ID NO: 14469

SEQ ID NO: 36596 - DNA, 16 bp, Homo Sapiens
cttaatctcagggtcg

SEQ ID NO: 36597 - DNA, 17 bp, Homo Sapiens
cttaatctcagggtcgt

SEQ ID NO: 36598 - DNA, 42 bp, Homo Sapiens; identical to SEQ ID NO: 14476

SEQ ID NO: 36599 - DNA, 17 bp, Homo Sapiens
cttacacttaggagatt

SEQ ID NO: 36600 - DNA, 40 bp, Homo Sapiens; identical to SEQ ID NO: 14507

SEQ ID NO: 36601 - DNA, 41 bp, Homo Sapiens; identical to SEQ ID NO: 14508

SEQ ID NO: 36602 - DNA, 42 bp, Homo Sapiens; identical to SEQ ID NO: 14509

SEQ ID NO: 36603 - DNA, 43 bp, Homo Sapiens; identical to SEQ ID NO: 14510

SEQ ID NO: 36604 - DNA, 21 bp, Homo Sapiens
cttacgaccccttatttaccc

SEQ ID NO: 36605 - DNA, 22 bp, Homo Sapiens
cttacgaccccttatttacccc

SEQ ID NO: 36606 - DNA, 23 bp, Homo Sapiens
cttacgaccccttatttacccca

SEQ ID NO: 36607 - DNA, 34 bp, Homo Sapiens; identical to SEQ ID NO: 14560

SEQ ID NO: 36608 - DNA, 47 bp, Homo Sapiens; identical to SEQ ID NO: 14567

SEQ ID NO: 36609 - DNA, 18 bp, Homo Sapiens
cttaggagatttcaactt

SEQ ID NO: 36610 - DNA, 26 bp, Homo Sapiens
cttaggagatttcaacttaacttgac

SEQ ID NO: 36611 - DNA, 28 bp, Homo Sapiens
cttaggagatttcaacttaacttgaccg

SEQ ID NO: 36612 - DNA, 30 bp, Homo Sapiens; identical to SEQ ID NO: 14583

SEQ ID NO: 36613 - DNA, 33 bp, Homo Sapiens; identical to SEQ ID NO: 14586

SEQ ID NO: 36614 - DNA, 34 bp, Homo Sapiens; identical to SEQ ID NO: 14587

SEQ ID NO: 36615 - DNA, 35 bp, Homo Sapiens; identical to SEQ ID NO: 14588

SEQ ID NO: 36616 - DNA, 36 bp, Homo Sapiens; identical to SEQ ID NO: 14589

SEQ ID NO: 36617 - DNA, 37 bp, Homo Sapiens; identical to SEQ ID NO: 14590

SEQ ID NO: 36618 - DNA, 16 bp, Homo Sapiens
cttaggtcgctggttc

SEQ ID NO: 36619 - DNA, 34 bp, Homo Sapiens; identical to SEQ ID NO: 14594

SEQ ID NO: 36620 - DNA, 35 bp, Homo Sapiens; identical to SEQ ID NO: 14595

SEQ ID NO: 36621 - DNA, 35 bp, Homo Sapiens; identical to SEQ ID NO: 14597

SEQ ID NO: 36622 - DNA, 34 bp, Homo Sapiens; identical to SEQ ID NO: 14599

SEQ ID NO: 36623 - DNA, 35 bp, Homo Sapiens; identical to SEQ ID NO: 14600

SEQ ID NO: 36624 - DNA, 16 bp, Homo Sapiens
cttcaaacctgccggg

SEQ ID NO: 36625 - DNA, 17 bp, Homo Sapiens
cttcaaacctgccgggg

SEQ ID NO: 36626 - DNA, 18 bp, Homo Sapiens
cttcaaacctgccggggc

SEQ ID NO: 36627 - DNA, 19 bp, Homo Sapiens
cttcaaacctgccggggct

SEQ ID NO: 36628 - DNA, 20 bp, Homo Sapiens
cttcaaacctgccggggctt

SEQ ID NO: 36629 - DNA, 21 bp, Homo Sapiens
cttcaaacctgccggggcttc

SEQ ID NO: 36630 - DNA, 17 bp, Homo Sapiens
cttccaagcagttgacc

SEQ ID NO: 36631 - DNA, 18 bp, Homo Sapiens
cttccaagcagttgaccc

SEQ ID NO: 36632 - DNA, 19 bp, Homo Sapiens
cttccaagcagttgacccg

SEQ ID NO: 36633 - DNA, 20 bp, Homo Sapiens
cttccaagcagttgacccgg

SEQ ID NO: 36634 - DNA, 37 bp, Homo Sapiens
cttcggaggcgtgggttcgaatcccaccgctgccacc

SEQ ID NO: 36635 - DNA, 19 bp, Homo Sapiens
cttcggatcagaagattga

SEQ ID NO: 36636 - DNA, 20 bp, Homo Sapiens
cttcggatcagaagattgag

SEQ ID NO: 36637 - DNA, 25 bp, Homo Sapiens
cttcggatcagaagattgagggttc

SEQ ID NO: 36638 - DNA, 44 bp, Homo Sapiens
cttcggatcagaagattgagggttcgaatcccttcgtggttgcc

SEQ ID NO: 36639 - DNA, 19 bp, Homo Sapiens
cttcggatcagaagattgc

SEQ ID NO: 36640 - DNA, 22 bp, Homo Sapiens
cttcggatcagaagattgcagg

SEQ ID NO: 36641 - DNA, 25 bp, Homo Sapiens
cttcggatcagaagattgcaggttc

SEQ ID NO: 36642 - DNA, 44 bp, Homo Sapiens
cttcggatcagaagattgcaggttcgagtcctgccgcggtcgcc

SEQ ID NO: 36643 - DNA, 37 bp, Homo Sapiens; identical to SEQ ID NO: 14666

SEQ ID NO: 36644 - DNA, 44 bp, Homo Sapiens; identical to SEQ ID NO: 14668

SEQ ID NO: 36645 - DNA, 32 bp, Homo Sapiens; identical to SEQ ID NO: 14673

SEQ ID NO: 36646 - DNA, 16 bp, Homo Sapiens
cttgaccgctctgacc

SEQ ID NO: 36647 - DNA, 17 bp, Homo Sapiens
cttgaccgctctgacca

SEQ ID NO: 36648 - DNA, 35 bp, Homo Sapiens; identical to SEQ ID NO: 14685

SEQ ID NO: 36649 - DNA, 45 bp, Homo Sapiens; identical to SEQ ID NO: 14698

SEQ ID NO: 36650 - DNA, 17 bp, Homo Sapiens
ctttacagtcagaggtt

SEQ ID NO: 36651 - DNA, 18 bp, Homo Sapiens
ctttacagtcagaggttc

SEQ ID NO: 36652 - DNA, 25 bp, Homo Sapiens
ctttcgatagctcagttggtagagc

SEQ ID NO: 36653 - DNA, 21 bp, Homo Sapiens
ctttgaatccagcaatccgag

SEQ ID NO: 36654 - DNA, 18 bp, Homo Sapiens
ctttgaatccagcgatcc

SEQ ID NO: 36655 - DNA, 19 bp, Homo Sapiens
ctttgaatccagcgatccg

SEQ ID NO: 36656 - DNA, 20 bp, Homo Sapiens
ctttgaatccagcgatccga

SEQ ID NO: 36657 - DNA, 21 bp, Homo Sapiens
ctttgaatccagcgatccgag

SEQ ID NO: 36658 - DNA, 22 bp, Homo Sapiens
ctttgaatccagcgatccgagt

SEQ ID NO: 36659 - DNA, 23 bp, Homo Sapiens
ctttgaatccagcgatccgagtt

SEQ ID NO: 36660 - DNA, 24 bp, Homo Sapiens
ctttgaatccagcgatccgagttc

SEQ ID NO: 36661 - DNA, 25 bp, Homo Sapiens
ctttgaatccagcgatccgagttca

SEQ ID NO: 36662 - DNA, 36 bp, Homo Sapiens
ctttgcacgcgtgggttcgaatcccatcctcgtcgc

SEQ ID NO: 36663 - DNA, 37 bp, Homo Sapiens; identical to SEQ ID NO: 14763

SEQ ID NO: 36664 - DNA, 45 bp, Homo Sapiens
ctttgcacgtatgaggccccgggttcaatccccggcatctccacc

SEQ ID NO: 36665 - DNA, 20 bp, Homo Sapiens
ctttgggtgcgagaggtccc

SEQ ID NO: 36666 - DNA, 44 bp, Homo Sapiens; identical to SEQ ID NO: 14776

SEQ ID NO: 36667 - DNA, 42 bp, Homo Sapiens; identical to SEQ ID NO: 14797

SEQ ID NO: 36668 - DNA, 43 bp, Homo Sapiens; identical to SEQ ID NO: 14798

SEQ ID NO: 36669 - DNA, 25 bp, Homo Sapiens
ctttgtcaaagttaaattataggct

SEQ ID NO: 36670 - DNA, 26 bp, Homo Sapiens
cttttaagttaaagattaagagaacc

SEQ ID NO: 36671 - DNA, 18 bp, Homo Sapiens
cttttaatctgagggtcc

SEQ ID NO: 36672 - DNA, 16 bp, Homo Sapiens
ctttttccaaggacac

SEQ ID NO: 36673 - DNA, 17 bp, Homo Sapiens
ctttttccaaggacacc

SEQ ID NO: 36674 - DNA, 18 bp, Homo Sapiens
ctttttccaaggacacca

SEQ ID NO: 36675 - DNA, 16 bp, Homo Sapiens
gaaaaagtcatggagg

SEQ ID NO: 36676 - DNA, 17 bp, Homo Sapiens
gaaaaagtcatggaggc

SEQ ID NO: 36677 - DNA, 18 bp, Homo Sapiens
gaaaaagtcatggaggcc

SEQ ID NO: 36678 - DNA, 19 bp, Homo Sapiens
gaaaaagtcatggaggcca

SEQ ID NO: 36679 - DNA, 21 bp, Homo Sapiens
gaaaaagtcatggaggccatg

SEQ ID NO: 36680 - DNA, 24 bp, Homo Sapiens
gaaaaagtcatggaggccatgggg

SEQ ID NO: 36681 - DNA, 25 bp, Homo Sapiens
gaaaaagtcatggaggccatggggt

SEQ ID NO: 36682 - DNA, 26 bp, Homo Sapiens
gaaaaagtcatggaggccatggggtt

SEQ ID NO: 36683 - DNA, 27 bp, Homo Sapiens
gaaaaagtcatggaggccatggggttg

SEQ ID NO: 36684 - DNA, 28 bp, Homo Sapiens
gaaaaagtcatggaggccatggggttgg

SEQ ID NO: 36685 - DNA, 30 bp, Homo Sapiens; identical to SEQ ID NO: 14877

SEQ ID NO: 36686 - DNA, 23 bp, Homo Sapiens
gaaaacctttttccaaggacacc

SEQ ID NO: 36687 - DNA, 24 bp, Homo Sapiens
gaaaacctttttccaaggacacca

SEQ ID NO: 36688 - DNA, 17 bp, Homo Sapiens
gaaaatgttggttatac

SEQ ID NO: 36689 - DNA, 18 bp, Homo Sapiens
gaaaatgttggttatacc

SEQ ID NO: 36690 - DNA, 25 bp, Homo Sapiens
gaaaatgttggttatacccttcccg

SEQ ID NO: 36691 - DNA, 29 bp, Homo Sapiens
gaaaatgttggttatacccttcccgtact

SEQ ID NO: 36692 - DNA, 30 bp, Homo Sapiens; identical to SEQ ID NO: 14908

SEQ ID NO: 36693 - DNA, 32 bp, Homo Sapiens; identical to SEQ ID NO: 14910

SEQ ID NO: 36694 - DNA, 33 bp, Homo Sapiens; identical to SEQ ID NO: 14911

SEQ ID NO: 36695 - DNA, 18 bp, Homo Sapiens
gaaaatgtttagacgggc

SEQ ID NO: 36696 - DNA, 19 bp, Homo Sapiens
gaaaatgtttagacgggct

SEQ ID NO: 36697 - DNA, 20 bp, Homo Sapiens
gaaaatgtttagacgggctc

SEQ ID NO: 36698 - DNA, 21 bp, Homo Sapiens
gaaaatgtttagacgggctca

SEQ ID NO: 36699 - DNA, 22 bp, Homo Sapiens
gaaaatgtttagacgggctcac

SEQ ID NO: 36700 - DNA, 23 bp, Homo Sapiens
gaaaatgtttagacgggctcaca

SEQ ID NO: 36701 - DNA, 28 bp, Homo Sapiens
gaaaatgtttagacgggctcacatcacc

SEQ ID NO: 36702 - DNA, 29 bp, Homo Sapiens
gaaaatgtttagacgggctcacatcaccc

SEQ ID NO: 36703 - DNA, 30 bp, Homo Sapiens; identical to SEQ ID NO: 14926

SEQ ID NO: 36704 - DNA, 31 bp, Homo Sapiens; identical to SEQ ID NO: 14927

SEQ ID NO: 36705 - DNA, 32 bp, Homo Sapiens; identical to SEQ ID NO: 14928

SEQ ID NO: 36706 - DNA, 33 bp, Homo Sapiens; identical to SEQ ID NO: 14929

SEQ ID NO: 36707 - DNA, 34 bp, Homo Sapiens; identical to SEQ ID NO: 14930

SEQ ID NO: 36708 - DNA, 35 bp, Homo Sapiens; identical to SEQ ID NO: 14931

SEQ ID NO: 36709 - DNA, 39 bp, Homo Sapiens; identical to SEQ ID NO: 14934

SEQ ID NO: 36710 - DNA, 40 bp, Homo Sapiens; identical to SEQ ID NO: 14935

SEQ ID NO: 36711 - DNA, 19 bp, Homo Sapiens
gaaaccatcctctgctacc

SEQ ID NO: 36712 - DNA, 18 bp, Homo Sapiens
gaaaccgggcagaagcac

SEQ ID NO: 36713 - DNA, 19 bp, Homo Sapiens
gaaaccgggcagaagcacc

SEQ ID NO: 36714 - DNA, 16 bp, Homo Sapiens
gaaaccgggcggaaac

SEQ ID NO: 36715 - DNA, 17 bp, Homo Sapiens
gaaaccgggcggaaaca

SEQ ID NO: 36716 - DNA, 18 bp, Homo Sapiens
gaaaccgggcggaaacac

SEQ ID NO: 36717 - DNA, 19 bp, Homo Sapiens
gaaaccgggcggaaacacc

SEQ ID NO: 36718 - DNA, 20 bp, Homo Sapiens
gaaaccgggcggaaacacca

SEQ ID NO: 36719 - DNA, 18 bp, Homo Sapiens
gaaagctcacaagaactg

SEQ ID NO: 36720 - DNA, 23 bp, Homo Sapiens
gaaagctcacaagaactgctaac

SEQ ID NO: 36721 - DNA, 25 bp, Homo Sapiens
gaaagctcacaagaactgctaactc

SEQ ID NO: 36722 - DNA, 33 bp, Homo Sapiens
gaaaggtccccggttcgaaaccgggcggaaaca

SEQ ID NO: 36723 - DNA, 34 bp, Homo Sapiens
gaaaggtccccggttcgaaaccgggcggaaacac

SEQ ID NO: 36724 - DNA, 35 bp, Homo Sapiens; identical to SEQ ID NO: 14984

SEQ ID NO: 36725 - DNA, 33 bp, Homo Sapiens
gaaaggtccccggttcgatcccgggcggaaaca

SEQ ID NO: 36726 - DNA, 16 bp, Homo Sapiens
gaaaggttggtggttc

SEQ ID NO: 36727 - DNA, 32 bp, Homo Sapiens; identical to SEQ ID NO: 14988

SEQ ID NO: 36728 - DNA, 34 bp, Homo Sapiens; identical to SEQ ID NO: 14990

SEQ ID NO: 36729 - DNA, 35 bp, Homo Sapiens; identical to SEQ ID NO: 14991

SEQ ID NO: 36730 - DNA, 35 bp, Homo Sapiens
gaaaggttggtggttcgatcccacccagggacgcc

SEQ ID NO: 36731 - DNA, 45 bp, Homo Sapiens; identical to SEQ ID NO: 15005

SEQ ID NO: 36732 - DNA, 19 bp, Homo Sapiens
gaaatagctcagttgggag

SEQ ID NO: 36733 - DNA, 17 bp, Homo Sapiens
gaaccccgtccgtgcct

SEQ ID NO: 36734 - DNA, 18 bp, Homo Sapiens
gaaccccgtccgtgcctc

SEQ ID NO: 36735 - DNA, 19 bp, Homo Sapiens
gaaccctgctcgctgcgcc

SEQ ID NO: 36736 - DNA, 39 bp, Homo Sapiens; identical to SEQ ID NO: 15049

SEQ ID NO: 36737 - DNA, 45 bp, Homo Sapiens; identical to SEQ ID NO: 15055

SEQ ID NO: 36738 - DNA, 47 bp, Homo Sapiens; identical to SEQ ID NO: 15057

SEQ ID NO: 36739 - DNA, 28 bp, Homo Sapiens
gaagaagcagcttcaaacctgccggggc

SEQ ID NO: 36740 - DNA, 29 bp, Homo Sapiens
gaagaagcagcttcaaacctgccggggct

SEQ ID NO: 36741 - DNA, 30 bp, Homo Sapiens; identical to SEQ ID NO: 15062

SEQ ID NO: 36742 - DNA, 33 bp, Homo Sapiens; identical to SEQ ID NO: 15065

SEQ ID NO: 36743 - DNA, 32 bp, Homo Sapiens
gaagatcacgggttcgaaccccgtccgtgcct

SEQ ID NO: 36744 - DNA, 33 bp, Homo Sapiens
gaagatcacgggttcgaaccccgtccgtgcctc

SEQ ID NO: 36745 - DNA, 34 bp, Homo Sapiens; identical to SEQ ID NO: 15067

SEQ ID NO: 36746 - DNA, 32 bp, Homo Sapiens; identical to SEQ ID NO: 15070

SEQ ID NO: 36747 - DNA, 33 bp, Homo Sapiens; identical to SEQ ID NO: 15071

SEQ ID NO: 36748 - DNA, 34 bp, Homo Sapiens; identical to SEQ ID NO: 15072

SEQ ID NO: 36749 - DNA, 31 bp, Homo Sapiens; identical to SEQ ID NO: 15076

SEQ ID NO: 36750 - DNA, 35 bp, Homo Sapiens; identical to SEQ ID NO: 15080

SEQ ID NO: 36751 - DNA, 31 bp, Homo Sapiens; identical to SEQ ID NO: 15086

SEQ ID NO: 36752 - DNA, 33 bp, Homo Sapiens; identical to SEQ ID NO: 15088

SEQ ID NO: 36753 - DNA, 34 bp, Homo Sapiens; identical to SEQ ID NO: 15089

SEQ ID NO: 36754 - DNA, 35 bp, Homo Sapiens; identical to SEQ ID NO: 15090

SEQ ID NO: 36755 - DNA, 32 bp, Homo Sapiens; identical to SEQ ID NO: 15092

SEQ ID NO: 36756 - DNA, 33 bp, Homo Sapiens; identical to SEQ ID NO: 15093

SEQ ID NO: 36757 - DNA, 34 bp, Homo Sapiens; identical to SEQ ID NO: 15094

SEQ ID NO: 36758 - DNA, 33 bp, Homo Sapiens; identical to SEQ ID NO: 15098

SEQ ID NO: 36759 - DNA, 34 bp, Homo Sapiens; identical to SEQ ID NO: 15099

SEQ ID NO: 36760 - DNA, 35 bp, Homo Sapiens; identical to SEQ ID NO: 15100

SEQ ID NO: 36761 - DNA, 23 bp, Homo Sapiens
gaagattgcaggttcgagtcctg

SEQ ID NO: 36762 - DNA, 33 bp, Homo Sapiens; identical to SEQ ID NO: 15104

SEQ ID NO: 36763 - DNA, 34 bp, Homo Sapiens; identical to SEQ ID NO: 15105

SEQ ID NO: 36764 - DNA, 35 bp, Homo Sapiens; identical to SEQ ID NO: 15106

SEQ ID NO: 36765 - DNA, 18 bp, Homo Sapiens
gaagcagcttcaaacctg

SEQ ID NO: 36766 - DNA, 25 bp, Homo Sapiens
gaagcagcttcaaacctgccggggc

SEQ ID NO: 36767 - DNA, 26 bp, Homo Sapiens
gaagcagcttcaaacctgccggggct

SEQ ID NO: 36768 - DNA, 27 bp, Homo Sapiens
gaagcagcttcaaacctgccggggctt

SEQ ID NO: 36769 - DNA, 16 bp, Homo Sapiens
gaagcgtgctgggccc

SEQ ID NO: 36770 - DNA, 31 bp, Homo Sapiens; identical to SEQ ID NO: 15143

SEQ ID NO: 36771 - DNA, 32 bp, Homo Sapiens; identical to SEQ ID NO: 15144

SEQ ID NO: 36772 - DNA, 33 bp, Homo Sapiens; identical to SEQ ID NO: 15145

SEQ ID NO: 36773 - DNA, 34 bp, Homo Sapiens; identical to SEQ ID NO: 15146

SEQ ID NO: 36774 - DNA, 33 bp, Homo Sapiens; identical to SEQ ID NO: 15154

SEQ ID NO: 36775 - DNA, 34 bp, Homo Sapiens; identical to SEQ ID NO: 15155

SEQ ID NO: 36776 - DNA, 32 bp, Homo Sapiens; identical to SEQ ID NO: 15161

SEQ ID NO: 36777 - DNA, 33 bp, Homo Sapiens; identical to SEQ ID NO: 15162

SEQ ID NO: 36778 - DNA, 34 bp, Homo Sapiens; identical to SEQ ID NO: 15163

SEQ ID NO: 36779 - DNA, 35 bp, Homo Sapiens; identical to SEQ ID NO: 15164

SEQ ID NO: 36780 - DNA, 34 bp, Homo Sapiens; identical to SEQ ID NO: 15168

SEQ ID NO: 36781 - DNA, 34 bp, Homo Sapiens; identical to SEQ ID NO: 15173

SEQ ID NO: 36782 - DNA, 16 bp, Homo Sapiens
gaaggttgcgtgttca

SEQ ID NO: 36783 - DNA, 31 bp, Homo Sapiens; identical to SEQ ID NO: 15176

SEQ ID NO: 36784 - DNA, 33 bp, Homo Sapiens
gaaggttgcgtgttcaaatcacgtcggggtcac

SEQ ID NO: 36785 - DNA, 34 bp, Homo Sapiens; identical to SEQ ID NO: 15177

SEQ ID NO: 36786 - DNA, 33 bp, Homo Sapiens; identical to SEQ ID NO: 15179

SEQ ID NO: 36787 - DNA, 34 bp, Homo Sapiens; identical to SEQ ID NO: 15180

SEQ ID NO: 36788 - DNA, 17 bp, Homo Sapiens
gaatcacgtcggggtca

SEQ ID NO: 36789 - DNA, 18 bp, Homo Sapiens
gaatcacgtcggggtcac

SEQ ID NO: 36790 - DNA, 19 bp, Homo Sapiens
gaatcacgtcggggtcacc

SEQ ID NO: 36791 - DNA, 20 bp, Homo Sapiens
gaatcacgtcggggtcacca

SEQ ID NO: 36792 - DNA, 20 bp, Homo Sapiens
gaatccagcgatccgagttc

SEQ ID NO: 36793 - DNA, 38 bp, Homo Sapiens; identical to SEQ ID NO: 15198

SEQ ID NO: 36794 - DNA, 19 bp, Homo Sapiens
gaatcccaccactgccacc

SEQ ID NO: 36795 - DNA, 19 bp, Homo Sapiens
gaatcccaccgctgccacc

SEQ ID NO: 36796 - DNA, 19 bp, Homo Sapiens
gaatcccaccttcgtcgcc

SEQ ID NO: 36797 - DNA, 19 bp, Homo Sapiens
gaatcccactcctgacacc

SEQ ID NO: 36798 - DNA, 18 bp, Homo Sapiens
gaatcccacttctgacac

SEQ ID NO: 36799 - DNA, 19 bp, Homo Sapiens
gaatcccacttctgacacc

SEQ ID NO: 36800 - DNA, 17 bp, Homo Sapiens
gaatcccagcggtgcct

SEQ ID NO: 36801 - DNA, 18 bp, Homo Sapiens
gaatcccagcggtgcctc

SEQ ID NO: 36802 - DNA, 19 bp, Homo Sapiens
gaatcccagcggtgcctcc

SEQ ID NO: 36803 - DNA, 18 bp, Homo Sapiens
gaatcccatcctcgtcgc

SEQ ID NO: 36804 - DNA, 19 bp, Homo Sapiens
gaatcccatcctcgtcgcc

SEQ ID NO: 36805 - DNA, 20 bp, Homo Sapiens
gaatcccatcctcgtcgcca

SEQ ID NO: 36806 - DNA, 16 bp, Homo Sapiens
gaatccgagtcacggc

SEQ ID NO: 36807 - DNA, 17 bp, Homo Sapiens
gaatccgagtcacggca

SEQ ID NO: 36808 - DNA, 18 bp, Homo Sapiens
gaatccgagtcacggcac

SEQ ID NO: 36809 - DNA, 19 bp, Homo Sapiens
gaatccgagtcacggcacc

SEQ ID NO: 36810 - DNA, 18 bp, Homo Sapiens
gaatccggctcgaaggac

SEQ ID NO: 36811 - DNA, 19 bp, Homo Sapiens
gaatccggctcgaaggacc

SEQ ID NO: 36812 - DNA, 18 bp, Homo Sapiens
gaatccggctcggaggac

SEQ ID NO: 36813 - DNA, 19 bp, Homo Sapiens
gaatccggctcggaggacc

SEQ ID NO: 36814 - DNA, 19 bp, Homo Sapiens
gaatcctgccgactacgcc

SEQ ID NO: 36815 - DNA, 19 bp, Homo Sapiens
gaatcctgctcacagcgcc

SEQ ID NO: 36816 - DNA, 18 bp, Homo Sapiens
gaatcctgttcgtgacgc

SEQ ID NO: 36817 - DNA, 19 bp, Homo Sapiens
gaatcctgttcgtgacgcc

SEQ ID NO: 36818 - DNA, 38 bp, Homo Sapiens; identical to SEQ ID NO: 15233

SEQ ID NO: 36819 - DNA, 39 bp, Homo Sapiens; identical to SEQ ID NO: 15234

SEQ ID NO: 36820 - DNA, 40 bp, Homo Sapiens; identical to SEQ ID NO: 15235

SEQ ID NO: 36821 - DNA, 16 bp, Homo Sapiens
gaatgatttcgactca

SEQ ID NO: 36822 - DNA, 17 bp, Homo Sapiens
gaattctcgcctgccac

SEQ ID NO: 36823 - DNA, 18 bp, Homo Sapiens
gaattctcgcctgccacg

SEQ ID NO: 36824 - DNA, 34 bp, Homo Sapiens; identical to SEQ ID NO: 15264

SEQ ID NO: 36825 - DNA, 41 bp, Homo Sapiens; identical to SEQ ID NO: 15266

SEQ ID NO: 36826 - DNA, 42 bp, Homo Sapiens; identical to SEQ ID NO: 15267

SEQ ID NO: 36827 - DNA, 43 bp, Homo Sapiens; identical to SEQ ID NO: 15268

SEQ ID NO: 36828 - DNA, 19 bp, Homo Sapiens
gacaacagaggcttacgac

SEQ ID NO: 36829 - DNA, 32 bp, Homo Sapiens; identical to SEQ ID NO: 15286

SEQ ID NO: 36830 - DNA, 33 bp, Homo Sapiens; identical to SEQ ID NO: 15287

SEQ ID NO: 36831 - DNA, 17 bp, Homo Sapiens
gaccacccagggacgcc

SEQ ID NO: 36832 - DNA, 19 bp, Homo Sapiens
gaccacgtggcctaatgga

SEQ ID NO: 36833 - DNA, 32 bp, Homo Sapiens; identical to SEQ ID NO: 15308

SEQ ID NO: 36834 - DNA, 33 bp, Homo Sapiens; identical to SEQ ID NO: 15309

SEQ ID NO: 36835 - DNA, 36 bp, Homo Sapiens; identical to SEQ ID NO: 15310

SEQ ID NO: 36836 - DNA, 18 bp, Homo Sapiens
gacccagtggcctaatgg

SEQ ID NO: 36837 - DNA, 19 bp, Homo Sapiens
gacccagtggcctaatgga

SEQ ID NO: 36838 - DNA, 20 bp, Homo Sapiens
gacccagtggcctaatggat

SEQ ID NO: 36839 - DNA, 23 bp, Homo Sapiens
gacccagtggcctaatggataag

SEQ ID NO: 36840 - DNA, 28 bp, Homo Sapiens
gacccagtggcctaatggataaggcatc

SEQ ID NO: 36841 - DNA, 31 bp, Homo Sapiens; identical to SEQ ID NO: 15319

SEQ ID NO: 36842 - DNA, 32 bp, Homo Sapiens; identical to SEQ ID NO: 15320

SEQ ID NO: 36843 - DNA, 33 bp, Homo Sapiens; identical to SEQ ID NO: 15321

SEQ ID NO: 36844 - DNA, 34 bp, Homo Sapiens; identical to SEQ ID NO: 15322

SEQ ID NO: 36845 - DNA, 35 bp, Homo Sapiens; identical to SEQ ID NO: 15323

SEQ ID NO: 36846 - DNA, 36 bp, Homo Sapiens; identical to SEQ ID NO: 15324

SEQ ID NO: 36847 - DNA, 16 bp, Homo Sapiens
gaccccttatttaccc

SEQ ID NO: 36848 - DNA, 17 bp, Homo Sapiens
gaccccttatttacccc

SEQ ID NO: 36849 - DNA, 30 bp, Homo Sapiens; identical to SEQ ID NO: 15331

SEQ ID NO: 36850 - DNA, 31 bp, Homo Sapiens; identical to SEQ ID NO: 15332

SEQ ID NO: 36851 - DNA, 18 bp, Homo Sapiens
gaccgcgtggcctaatgg

SEQ ID NO: 36852 - DNA, 19 bp, Homo Sapiens
gaccgcgtggcctaatgga

SEQ ID NO: 36853 - DNA, 20 bp, Homo Sapiens
gaccgcgtggcctaatggat

SEQ ID NO: 36854 - DNA, 30 bp, Homo Sapiens; identical to SEQ ID NO: 15337

SEQ ID NO: 36855 - DNA, 32 bp, Homo Sapiens; identical to SEQ ID NO: 15338

SEQ ID NO: 36856 - DNA, 33 bp, Homo Sapiens; identical to SEQ ID NO: 15339

SEQ ID NO: 36857 - DNA, 34 bp, Homo Sapiens; identical to SEQ ID NO: 15340

SEQ ID NO: 36858 - DNA, 36 bp, Homo Sapiens; identical to SEQ ID NO: 15342

SEQ ID NO: 36859 - DNA, 29 bp, Homo Sapiens
gaccggggttcaattccccgacggggagc

SEQ ID NO: 36860 - DNA, 30 bp, Homo Sapiens; identical to SEQ ID NO: 15344

SEQ ID NO: 36861 - DNA, 25 bp, Homo Sapiens
gaccggggttcgattccccgacggg

SEQ ID NO: 36862 - DNA, 28 bp, Homo Sapiens
gaccggggttcgattccccgacggggag

SEQ ID NO: 36863 - DNA, 29 bp, Homo Sapiens
gaccggggttcgattccccgacggggagc

SEQ ID NO: 36864 - DNA, 30 bp, Homo Sapiens; identical to SEQ ID NO: 15351

SEQ ID NO: 36865 - DNA, 16 bp, Homo Sapiens
gacctcgtggcgcaac

SEQ ID NO: 36866 - DNA, 17 bp, Homo Sapiens
gacctcgtggcgcaacg

SEQ ID NO: 36867 - DNA, 18 bp, Homo Sapiens
gacctcgtggcgcaacgg

SEQ ID NO: 36868 - DNA, 19 bp, Homo Sapiens
gacctcgtggcgcaacggt

SEQ ID NO: 36869 - DNA, 22 bp, Homo Sapiens
gacctcgtggcgcaacggtagc

SEQ ID NO: 36870 - DNA, 31 bp, Homo Sapiens; identical to SEQ ID NO: 15357

SEQ ID NO: 36871 - DNA, 32 bp, Homo Sapiens; identical to SEQ ID NO: 15358

SEQ ID NO: 36872 - DNA, 33 bp, Homo Sapiens; identical to SEQ ID NO: 15359

SEQ ID NO: 36873 - DNA, 17 bp, Homo Sapiens
gacctcgtggcgcaatg

SEQ ID NO: 36874 - DNA, 18 bp, Homo Sapiens
gacctcgtggcgcaatgg

SEQ ID NO: 36875 - DNA, 32 bp, Homo Sapiens; identical to SEQ ID NO: 15365

SEQ ID NO: 36876 - DNA, 16 bp, Homo Sapiens
gacgaggtggccgagt

SEQ ID NO: 36877 - DNA, 18 bp, Homo Sapiens
gacgaggtggccgagtgg

SEQ ID NO: 36878 - DNA, 19 bp, Homo Sapiens
gacgaggtggccgagtggt

SEQ ID NO: 36879 - DNA, 20 bp, Homo Sapiens
gacgaggtggccgagtggtt

SEQ ID NO: 36880 - DNA, 22 bp, Homo Sapiens
gacgaggtggccgagtggttaa

SEQ ID NO: 36881 - DNA, 23 bp, Homo Sapiens
gacgaggtggccgagtggttaag

SEQ ID NO: 36882 - DNA, 24 bp, Homo Sapiens
gacgaggtggccgagtggttaagg

SEQ ID NO: 36883 - DNA, 25 bp, Homo Sapiens
gacgaggtggccgagtggttaaggc

SEQ ID NO: 36884 - DNA, 32 bp, Homo Sapiens; identical to SEQ ID NO: 15378

SEQ ID NO: 36885 - DNA, 33 bp, Homo Sapiens; identical to SEQ ID NO: 15379

SEQ ID NO: 36886 - DNA, 36 bp, Homo Sapiens; identical to SEQ ID NO: 15381

SEQ ID NO: 36887 - DNA, 29 bp, Homo Sapiens
gacgggctcacatcaccccataaacacca

SEQ ID NO: 36888 - DNA, 21 bp, Homo Sapiens
gactccagatcagaaggctgc

SEQ ID NO: 36889 - DNA, 21 bp, Homo Sapiens
gactccagatcagaaggttgc

SEQ ID NO: 36890 - DNA, 17 bp, Homo Sapiens
gactcccggtatgggaa

SEQ ID NO: 36891 - DNA, 18 bp, Homo Sapiens
gactcccggtatgggaac

SEQ ID NO: 36892 - DNA, 17 bp, Homo Sapiens
gactcccggtgtgggaa

SEQ ID NO: 36893 - DNA, 18 bp, Homo Sapiens
gactcccggtgtgggaac

SEQ ID NO: 36894 - DNA, 19 bp, Homo Sapiens
gactcccggtgtgggaacc

SEQ ID NO: 36895 - DNA, 16 bp, Homo Sapiens
gactcctggctggctc

SEQ ID NO: 36896 - DNA, 18 bp, Homo Sapiens
gactcctggctggctcgc

SEQ ID NO: 36897 - DNA, 19 bp, Homo Sapiens
gactcctggctggctcgcc

SEQ ID NO: 36898 - DNA, 22 bp, Homo Sapiens
gactctgaatccagcgatccga

SEQ ID NO: 36899 - DNA, 43 bp, Homo Sapiens; identical to SEQ ID NO: 15425

SEQ ID NO: 36900 - DNA, 44 bp, Homo Sapiens; identical to SEQ ID NO: 15426

SEQ ID NO: 36901 - DNA, 19 bp, Homo Sapiens
gacttaagatccaatggac

SEQ ID NO: 36902 - DNA, 21 bp, Homo Sapiens
gacttaagatccaatggacat

SEQ ID NO: 36903 - DNA, 17 bp, Homo Sapiens
gacttcggatcagaaga

SEQ ID NO: 36904 - DNA, 16 bp, Homo Sapiens
gactttttctctgacc

SEQ ID NO: 36905 - DNA, 17 bp, Homo Sapiens
gactttttctctgacca

SEQ ID NO: 36906 - DNA, 16 bp, Homo Sapiens
gagaaagctcacaaga

SEQ ID NO: 36907 - DNA, 18 bp, Homo Sapiens
gagaaagctcacaagaac

SEQ ID NO: 36908 - DNA, 19 bp, Homo Sapiens
gagaaagctcacaagaact

SEQ ID NO: 36909 - DNA, 20 bp, Homo Sapiens
gagaaagctcacaagaactg

SEQ ID NO: 36910 - DNA, 21 bp, Homo Sapiens
gagaaagctcacaagaactgc

SEQ ID NO: 36911 - DNA, 22 bp, Homo Sapiens
gagaaagctcacaagaactgct

SEQ ID NO: 36912 - DNA, 23 bp, Homo Sapiens
gagaaagctcacaagaactgcta

SEQ ID NO: 36913 - DNA, 24 bp, Homo Sapiens
gagaaagctcacaagaactgctaa

SEQ ID NO: 36914 - DNA, 25 bp, Homo Sapiens
gagaaagctcacaagaactgctaac

(The sequence listing continues in the following parts.)

1. A method of identifying a subject in need of therapeutic intervention to treat a disease, condition, disease recurrence, or disease progression, the method comprising:
isolating fragments derived from tRNAs (tRFs) from a sample obtained from the subject; and
characterizing the tRFs and their relative abundance in the sample to identify a signature, wherein when the signature is indicative of a diagnosis of the disease, a treatment of the subject is recommended.

2. The method of claim 1, wherein the tRFs are selected from the group consisting of 3′-tRFs, 3′-tRHs, 5′-tRFs, 5′-tRHs, and i-tRFs from a mitochondrion (MT).

3. The method of claim 1, wherein the tRFs are selected from the group consisting of 3′-tRFs, 3′-tRHs, 5′-tRFs, 5′-tRHs, and i-tRFs a nucleus (Nuc).

4. The method of claim 1, wherein the sample is isolated from a cell, a tissue, an extracellular vesicle, or a body fluid obtained from the subject.

5. The method of claim 4, wherein the body fluid, the extracellular vesicle, the tissue or the cell is selected from the group consisting of bile, blood serum, plasma, cerebrospinal fluid, and prefrontal cortex.

6. The method of claim 1, wherein isolating the tRFs comprises isolating tRFs fragments with a length in the range of about 10 nucleotides to about 70 nucleotides.

7. The method of claim 1, wherein the signature comprises at least one sequence selected from the group consisting of SEQ ID NO:53135-SEQ ID NO: 63850.

8. The method of claim 1, wherein characterizing the tRFs comprises at least one assessment selected from the group consisting of sequencing the tRFs, measuring overall abundance of a tRF mapped to the genome, measuring a relative abundance of a tRF to a reference, assessing a length of a tRF, identifying starting and ending points of a tRF, identifying a genomic origin of a tRF, and identifying a terminal modification of a tRF.

9. The method of claim 1, wherein the tRFs and their relative abundance vary between the normal state as compared to disease state or condition.

10. The method of claim 1, wherein the tRFs and their relative abundance vary depending on sex of the subject.

11. The method of claim 1, wherein the disease or condition, disease recurrence, or disease progression is a brain disease.

12. The method of claim 11, wherein the brain disease is genetically predisposed.

13. The method of claim 11, wherein the brain disease is Parkinson's Disease.

14. A method of diagnosing, identifying or monitoring Parkinson's Disease (PD) in a subject in need thereof, the method comprising:
isolating tRFs from a cell obtained from the subject; quantifying the tRFs using a panel of oligonucleotides engineered to detect tRFs, or another method; analyzing levels of the tRFs present in the cell; wherein a differential in the level of measured tRFs as compared to a reference is indicative of a diagnosis or identification of PD in the subject; and
providing a treatment regimen to the subject dependent on the differential in the level of measured tRFs as compared to the reference.

15. The method of claim 14, wherein the tRFs comprise at least one sequence selected from the group consisting of SEQ ID NO:53135-SEQ ID NO: 63850.

16. A method of identifying a subject at risk for developing Parkinson's Disease (PD) or in need of therapeutic intervention to treat Parkinson's disease (PD), the method comprising:
isolating fragments of tRFs from a sample obtained from the subject; quantifying the tRFs using a panel of oligonucleotides engineered to detect tRFs, or another method; and
characterizing the tRFs and their relative abundance in the sample to identify a signature, wherein when the signature is indicative of a prognosis for developing PD or a diagnosis for PD, a treatment of the subject is recommended.

17. The method of claim 16, wherein the sample is isolated from a cell, tissue, extracellular vesicle, or body fluid obtained from the subject.

18. The method of claim 16, wherein the cell, extracellular vesicle, the tissue or the body fluid is selected from the group consisting of bile, blood serum, plasma, cerebrospinal fluid, and prefrontal cortex.

19. The method of claim 16, wherein isolating the tRFs comprises isolating tRFs with a length in the range of about 10 nucleotides to about 70 nucleotides.

20. The method of claim 16, wherein the signature comprises at least one sequence selected from the group consisting of SEQ ID NO:53135-SEQ ID NO: 63850.

21. The method of claim 16, wherein characterizing the tRFs comprises at least one assessment selected from the group consisting of sequencing tRFs, measuring overall abundance of a tRF mapped to the genome, measuring a relative abundance of a tRF to a reference, assessing a length of a tRF, identifying starting and ending points of a tRF, identifying genomic origin of a tRF, and identifying a terminal modification of a tRF.

22. The method of claim 16, wherein the tRFs and their relative abundance vary between the normal state subject as compared to a subject at a risk of or suffering from PD.

23. The method of claim 16, wherein the tRFs and their relative abundance compared to control subjects differ between subjects suffering from PD with dementia and subjects suffering from PD without dementia.

24. The method of claim 16, wherein the tRFs and their relative abundance vary with the sex of the subject.

25. The method of claim 16, wherein the tRFs and their relative abundance vary with the body fluid, extracellular vesicle, cell or tissue sample.

26. The method of claim 16, wherein the tRFs and their relative abundance vary in the prefrontal cortex samples from the normal state subjects, the subjects suffering from PD with dementia, and the subjects suffering from PD without dementia.

27. The method of claim 16, wherein the tRFs and their relative abundance vary in the cerebrospinal fluid samples from the normal state subjects, the subjects suffering from PD with dementia, and the subjects suffering from PD without dementia.

28. The method of claim 16, wherein the tRFs and their relative abundance vary in the serum samples from the normal state subjects, the subjects suffering from PD with dementia, and the subjects suffering from PD without dementia.

29. The method of claim 1, wherein the subject is a human.

30. A kit for high-throughput analysis of tRFs fragments in a sample from a subject in need thereof, the kit comprising a collection of specially-designed qPCR assays for quantitating tRFs, or a panel of engineered oligonucleotides capable of hybridizing tRFs, or another quantification method.
